United States Patent Application Publication US 2008/0276334 A1 - sequence listing, part 3

SEQ ID NO: 13779 - DNA, 392 bp, Glycine max
  Clone ID: LIB3040-039-Q1-E1-G3
gatagtagatattcattccccttatctttctctcttctctctccccgcccaaaccctaactccctaccctattccgctttctctcatccatcatgaaaggaggaaagtccaagaccgaatctaagagagccgatgccaaacttgctgtgaataagaagggcgccgccaccaagactaggaaacccgccggaaaggggaaggcagcgaaagatcctaacgagccaaagaggcctccaagtgctttcttcgttttcatggaggaattcaggaatgtgttcaacaaggaacatcccgacaacaaagcagtgtctgctgtgggcaaagctgctggagcaaaatggaagacgatgtctgatgctgaacaagcaccttatgtggcaaagtctgagaaa

SEQ ID NO: 13780 - DNA, 392 bp, Glycine max
  unsure (1)..(392): unsure at all n locations
  Clone ID: LIB3040-039-Q1-E1-G4
ggcctctagtgcccccgtctcttcctcctctctccgcatcgctgcgttttccgaatcgaaaggtacgcaagtaacaatggtggaggccaagggtaggaaagaggaggtcgtcactcgagagttcaccatcaacctccacaaacgcttgcatggctgcacattcaagaagaaggctcctaaagcaattaaggagataaggaagtttgctcagaaagcgatggggacgaatgatgtgagagtggatgtgaagctgaacaaggctgtgtggagccaggggattcggagcgtcccgaggaggattanggttcgcattgcccganagaggaacgacgatgaggatgcaaaggaagagctatattcccttgttactgttgtcgaaatccccaaagatg

SEQ ID NO: 13781 - DNA, 380 bp, Glycine max
  Clone ID: LIB3040-039-Q1-E1-G5
gatccaaattcaagttcgcaccaaattttcctcccaaaatgtcaggccgtggaaaaggtgggaagggtttgggaaagggaggagctaagaggcacagaaaggttcttcgtgacaacattcaaggaatcacgaaacctgcgattcgtaggttagcgagaagaggtggcgtgaagaggatcagtggtttgatttacgaggaaaccagaggagttctgaagatattcttggagaacgtgattcgcgatgctgtaacctacactgagcacgctaggaggaaaactgttactgctatggatgtcgtttatgctctcaagagacagggaaggaccctctatggctttggaggctaaagaatagaatctttaagtttaatgactgtg

SEQ ID NO: 13782 - DNA, 388 bp, Glycine max
  Clone ID: LIB3040-039-Q1-E1-G6
gattcgcttcttttcctaacctaaaccctactcattctccatacctcaacgaagaggttaaagagacggcaacactttgctgtccgccttgaccgagcagagcttcgtcttggccctcgattttgccctaaagtactctcagtcacaacagacaccgtcgtcgtcgtcgtcgtcatcaatggcaccgaagcagaccaaggctgagaagaagatcgcttacgatgcgaagctgtgcgacctaatggaggagtacggccagatcctcgttgtgaactccgataacgtgggatcgaaccagctccagaacattcgcaagggtctccgtggcgactccgtcgtcctcatggggaagaacaccatgatgaagcgctcagtcaggatgcacgct

SEQ ID NO: 13783 - DNA, 287 bp, Glycine max
  Clone ID: LIB3040-039-Q1-E1-G7
ggcccttcgccgccgcagcatccgaattcctttgctcgctggagtggaccgatggaacactgctcatacactgatcagagtaagtcaacatttactctcgtagatgacgatcagacttttgcaaacgctgtaagattcaccttatctcaagacccaagattgtcattttgtggctacagcattccacagccttcagataatcgtgttaatatcatagtctagacaacaagcgatccatcacgcgaggtgttatacgatgcatttcacgatctgatgcttatgtgcca

SEQ ID NO: 13784 - DNA, 342 bp, Glycine max
  Clone ID: LIB3040-039-Q1-E1-G8
gcagctgcgaaaacctagtgcaccgtaagggttgtgaagcaggcagagaagagccatggtgcacgtttctttctaccgaaactatgggaaaacgttcaagaagcctcgtcgtccctacgagaaggagcgtttggacgccgagttgaagctggtcggtgagtacgggcttcgctgcaagagggagttatggagggtccagtacgccctgagccgcatccgtaacaacgccagaaacctattgacccttgatgagaagaaccctcgccgtatcttcgagggtgaagcccttctccgaagaagttccgttacggactcctcgacgagacacagaacaaggctgga

SEQ ID NO: 13785 - DNA, 349 bp, Glycine max
  Clone ID: LIB3040-039-Q1-E1-G9
ggacacacaccgaacactcaaacacacacagtgtgcagcagcagcagcaacaacaagagaagaagatggctctgcaactatgggagacattgaaggaggccatagttgcctacacggggctctccccgcccaccttcttcacccttctggccctgatcctagccctatactacgtcgtttctgggctcttcccctcttccgaccaccgccacaacaccgcctcgcgcgacttggagccccagatggagcctctgcgaccccccgttcagatcggcgaggtcaccgaggacgacctcaaggcctacgacggcaccgatcccgagaagcctctcctcatggccatcaaggg

SEQ ID NO: 13786 - DNA, 380 bp, Glycine max
  Clone ID: LIB3040-039-Q1-E1-H1
gacaacacaacgcaacacaacgcgcactctctcttttctctcctaacacaaaaaccctatcgttcttcgcggtttcgccgattctcgccatgccgaaagccaaatccgacgccaaagccgccgatagccggttgaagcgcaagggcgctggtgctggaaggaagcaatcgaagaaagctgctaaggatcctaacaagccaaagagacctccaagcgctttcttcgttttcatgtccgagttcagagagcagtttaagaaggagcatcctaacaacaaatccgtcgctgttgtcggtaaagctggtggtgacaaatggaaatcgctgtctgatgctgaaaagggccccttcgttgccacggccgaaaagaagaaacaagag

SEQ ID NO: 13787 - DNA, 323 bp, Glycine max
  Clone ID: LIB3040-039-Q1-E1-H10
gaaatagagaaaacacaaaaagttctgttctttttcccacccaattcagttttctcaaatggctcgtacgaagcaaacggctcgcaagtccaccggcggcaaggcgccacgtaagcagctggccaccaaggcggctcgtaagtctgctccggctaccggcggcgtgaagaagccgcacagattccgtccgggaaccgtagcgctccgcgagatccggaagtaccagaagagcacggaacttctgatccggaagctcccgttccagcgattggtccgtgagatcgcgcaggacttcaagaccgaccttcgatttcagagctccg

SEQ ID NO: 13788 - DNA, 342 bp, Glycine max
  Clone ID: LIB3040-039-Q1-E1-H11
ggcagccaaagaaaagaaaatcctcaattttctgagcagccaaacactctctctctgtctctcgaaaattctcagtttgcagagaaaatctgaatcatgtcgtggcaagcgtatgtcgacgatcaccttctgtgtgacatcgaaggtaaccacctcactcacgctgctatcatcggccaagacggcagcgtttgggctcagagtaccgacttccctcagttcaaacctgaggagataactgccatcatgaatgactttaatgagcctggattacttgctccaactggattgtatctcggtggcaccaaatatatggtcatccagggtgaaaccggtgctgtc

SEQ ID NO: 13789 - DNA, 305 bp, Glycine max
  Clone ID: LIB3040-039-Q1-E1-H12
tacaactgcgagaacacgatcctacggtatctaaacaacacacactaagttctgttccttttcccacccaattcaattttcgcaattggctcataacgatacatactgatcacaggtcgaccttcggcatagcgttatatcagcagctttccactaaagcggatcgtaagtcttgctccagctaccggccgctttaagaagcctcacagattctgtcccagaaccgtagcgctccgatagatccaggatctacagactagcacggaacttcagattcttaatctcccgttccatcgattggtccc

SEQ ID NO: 13790 - DNA, 395 bp, Glycine max
  Clone ID: LIB3040-039-Q1-E1-H2
ggcctacgcagagagaaattgagtttctgagataaccacttttctctttgattcatcaatggcaaccgcgaggaccgtgaaggatgtttcgcctcacgatttcgtgaaggcttacgcctcccatctcaagcgttccggcaagatggagcttcctgagtggactgatattgtaaaaacagcaaaatttaaggaattggctccatatgatcctgactggtattatgttacggctgcctcaatggcaagaaagatttatttgagaggcggtcttggtgttggggctttccagaggatctatggtggaagcaagagaaatggaagccgtcccccacatttctgcaagagcagtggggctattgcaagacacattctgcaacaattgcaaaacatgagca

SEQ ID NO: 13791 - DNA, 387 bp, Glycine max
  Clone ID: LIB3040-039-Q1-E1-H3
gaaggtttggttattacggttttcgctcaccggtgtgcagtcgagcccccgaagaaaaagcgaaaatgccgtcgcacaagacattcagaatcaagaagaagttggcgaagaagatgaggcagaacaggcctatcccctactggatccgcatgaggaccgacaacaccatcaggtacaacgcgaagcgccgtcactggcgtcgcaccaagcttggattctgaggtgcttgctttgcctcggttctgtttatccaattaattagtgttttattttcttgagccaaaaacaatgctttggagattttaatattttgcattttgttccaagactatattgtgtaaggaacttattgtagttcagactaatggtggtgttggtcaccttttt

SEQ ID NO: 13792 - DNA, 275 bp, Glycine max
  Clone ID: LIB3040-039-Q1-E1-H6
gaagactgtctctaaggaggaagcgtctgccatcaaggctgctgggaaagcatggtatcacactatggtgtcagattctgattatacagaattcgacaacttttctaagtggttgggtgtttcacagtaaacttcatgatttattttttcgtattagaattttgttttttatgctcatcagaactaaatatccttatctttggtttttttgttttgccggttaaggttgtcatcataattatgcagacaatgtggaaattttgtttgttggattt

SEQ ID NO: 13793 - DNA, 53 bp, Glycine max; identical to SEQ ID NO: 13458
  Clone ID: LIB3040-039-Q1-E1-H8

SEQ ID NO: 13794 - DNA, 352 bp, Glycine max
  Clone ID: LIB3040-039-Q1-E1-H9
ggcagcgcttgagaccaagccccactcaaccaccacaccactctctctgctcttcttctacctttcaagtttttaaagtattaagatggcagagacattcctatttacctcagagtcagtgaacgagggacaccctgacaagctctgcgaccaaatctccgatgctgtcctcgacgcttgccttgaacaggacccagacagcaaggttgcctgcgaaacatgcaccaagaccaacttggtcatggtcttcggagagatcaccaccaaggccaacgttgactacgagaagatcgtgcgtgacacctgcaggaacatcggcttcgtctcaaacgatgtgggacttgatgctgac

SEQ ID NO: 13795 - DNA, 281 bp, Glycine max
  Clone ID: LIB3040-040-Q1-E1-A11
gagagtgatccttctacactaactaaagccgagcagcgagagagagaaaccctagcaaaaatgccggctggtcacggtttgagatcccgcaccagagattccttctctcgtcccttcaggaagaagggtaccatcgccctcaccacatacctcagaacctaccacgtcggcgattatgtcgacgtcaaggttaacggcgccgtccacaagggaatgcctcacaagttctaccatggccgcaccggtcgcgtctggaatgtcaccaaacgtgctgttggggt

SEQ ID NO: 13796 - DNA, 392 bp, Glycine max
  Clone ID: LIB3040-040-Q1-E1-A2
gtctcaagccacttcagagaaaatggcggtacctctgctctcgaagaagatcgtgaagaagagggtgaagaagttcaagaggcctcagagtgacaggaaaatttccgtcaagacaaactggcgtagaccaaagggtatagattcccgtgttaggagaaagttcaagggatgcactttgatgccaaacatcggttatggttctgacaagaagacccgccactatctccctaatggttttaagaaatttgttgttcacaatgtgaaggacttggaactgctcatgatgcacaacaggacttactgtgctgagattgctcacaatatatccacaagaaagagaaaagatatagttgagagagctgcgcaacttgatgttgttgtgacaaaccaaa

SEQ ID NO: 13797 - DNA, 203 bp, Glycine max
  Clone ID: LIB3040-040-Q1-E1-A3
gattgttgttgctattatcatccgcagctgcttttattcgcaccgcaaacagtgagccatggccgtcggaaagaacaagcgcatctccaaggggaaaaagggtggcaagaaaaaggaaccgattccctttgcaaaaaaggattggaagaaaattaagcgccctccggtttcaaatgtgaaatgtttggaaaaacctcgtctct

SEQ ID NO: 13798 - DNA, 350 bp, Glycine max
  Clone ID: LIB3040-040-Q1-E1-A4
gacagcactgcactcttcgcaacacaacaaaaaaagacaacccagagagcgcgtcttaataaacgctcttctctgaaaacccccatttcttttcttctttcttcttctctttcgcttcttcgatcttcgatcttcgtcgctgaaaatgagagagtgcatttcaatccacatcggccaggccgggattcaggttggaaacgcctgctgggagctttacgggcctcgaacacggcattcagcctgatgggcagatgccaattgacaagaccgttggtggaggtgatgatgctttcaacaccttcttcagtgaaactggggcaggaaagcatgtgccccgtgcgatttttgta

SEQ ID NO: 13799 - DNA, 361 bp, Glycine max
  Clone ID: LIB3040-040-Q1-E1-A6
attcatgtcgtgaactctctcccttcatctagctcgagtttttttcttgcttccgggagctctgaacttgaccgacgtcgttttcacatcaaaacccttcaacaaaaaaatggcgttcttcttgaaccaaactagtatcgcttcccattttcgatctcactctcagaagactgaagatttggcttcttttcctcgccgtcgattccacgtcgaaccaggggctcgtgaaaaagctctcttggcagaagatgcaactctgaaaccgttcaaatcgtacaagaagagtgtaaaaaagcttagaaaaattgggaatgcccttacaattgttgttgttgcaggatgctgttacgaagtatatgtc

SEQ ID NO: 13800 - DNA, 359 bp, Glycine max
  Clone ID: LIB3040-040-Q1-E1-A7
gagcactcactgcgctaaccccttctctctctctctctgctcggttctccgatcgccgtcttcgccttgcccattcctgatcaatatgtctagaagatatgatagccgtacaacaatcttctcccccgaaggacgtctttaccaagtggagtatgcaatggaggccattgggaatgctggaactgcaatagggatcttgtcaaaagatggggtagttctggttggtgaaaagaaggtcacatccaagctgctgcaaacctcaacctccactgagaaaatgtacaagattgatgatcatgttgcatgtgctgtggctggaattatgtctgatgccaacatcttaatcaatactgctagag

SEQ ID NO: 13801 - DNA, 354 bp, Glycine max
  Clone ID: LIB3040-040-Q1-E1-A8
ggagcaaaaccctaatccctatttttcttcctcagtagtgtcatttacgcttctcttctctgcagcaactatgcctaaccctaaggtcttcttcaacatgacaatcggcggtcaatctgctggccgcatcttaatgaacctctacgccaacttaattcccggaaccgccgagaacttccgcgcgctttgcaccggcgagaagggcgtagggcggagcggcaagcccctccactacaagggctcgtccttccaccgcgtgatcccgattttcatgtgtcagggtggcgacttcaccgccggaaacggaaccggcggcgagtcgatttatggcgccaatttcgccgacgagaactt

SEQ ID NO: 13802 - DNA, 320 bp, Glycine max
  Clone ID: LIB3040-040-Q1-E1-A9
ggatcaaccctgccgacagtataatccatgtggttgccaaacggcttgtggaaagcagtgtccttgtcttcaaaatggaacctgctgtgagaagtactgtggacgccccaagagctgcaagaatcgatttcgtggctgtcattgtgctaagagtcaatgcagaagccgtcaatgtccatgttttgctgcagatagggaatgtgatccagatgtttgtaggaattgttgggtcagttgtggcgatggtacacttgggattcctagccaaagaggggacaattatgaatgtagaaacatgaagcttcttctcaaacaacagc

SEQ ID NO: 13803 - DNA, 378 bp, Glycine max
  Clone ID: LIB3040-040-Q1-E1-B1
gaaaagagcattttttttttctttcggttcagagctatgatcttttgagtcttcttattcaaagtatgaccttccctcctttgttgcctgtttgacattttagcaactggttataccaaaataggaagcacggtatgagctgaaagttattatcaacttatatctttgctgtgccacaatctgtattttcaagtcataaaaaagtacagaactacagattgaacaatttttcagccactgtatttgcaatcttcctagtgatcttcttctccttttcagcagtacttcttgcagtctttgttgggtgaggttgaactttacatttgctttggctttgactcaagaagtatattctctagtgaatgatcatggtgaaag

SEQ ID NO: 13804 - DNA, 161 bp, Glycine max
  Clone ID: LIB3040-040-Q1-E1-B10
gaggtgaagactgaagaggtagctagtactgcacacgctgcgacgtcgcttcggagaaggattttgggcgccaaataaatcgtctcatcatagactccatagtctgaacgctaaacgaaaccaagccccaaatacaaataacgttggtgtcaggtgtcact

SEQ ID NO: 13805 - DNA, 348 bp, Glycine max
  Clone ID: LIB3040-040-Q1-E1-B2
gcagagaaaggatatagtatgtgatctgcgaatctctctctgttatccggaatgtccctagtaaatttcatgattcaagattattgcatgcaaaccgattataggtatcctcagaaggctatgtttacgattcggttgccggtcggatatttaagtgtgacaaatacgttatgatatgatgtctgcacttagctagatgctgcagaatgaattgtatatgctgagatgggcgcgtctgaattggcttctaaggaagttggattttgtaatctgaagaacaatttaagggttttgaatgatagagttagttttgcgacgaataatatacggtgggagaaggctgggatt

SEQ ID NO: 13806 - DNA, 375 bp, Glycine max
  Clone ID: LIB3040-040-Q1-E1-B3
gatcgttgcttaacactgttcactcactcaaccgttcctttatcttttggattcccttctcattcactttcactttcactccttagcctggttataggagctagggtttatcgagggtttcgttccttcctctctgcaacaacaatggcgaaacctgggcgaggtcgtcgctctccctccggttccgtttccggctcctcctctcgctcctcttccccctccgactctcgttcctcctctcgctcgcgctccctttctcggtcccgtcctccctcgcgctccagatcctcttccccctcctcctcctcttcctcccgaagctcccgcagccgcagccctcccccgcagaggcgccgaagtcctgctgacgcaact

SEQ ID NO: 13807 - DNA, 334 bp, Glycine max
  Clone ID: LIB3040-040-Q1-E1-B4
ggagttgaaatctgaagctgaatcgtatcgttgagtttagggtttgaaattggatctgacagcatagcatagaatggcgggggttcgtagagacgcattgctgacgagagataaaggccaatcatcggtccgatttcgaatcgtcgtcgctgtcgtgatcggcgttctcctcggctgcgtctttgccttcttctcctccgctcccactcctcttcacattccctaccctattaagatggtttcatctgcatgtgaatcgccagaacaagttaatgcgcttaaagttgatattctatcagcgaaagtgaaaaattctgagctgaagaaacgggtc

SEQ ID NO: 13808 - DNA, 347 bp, Glycine max
  Clone ID: LIB3040-040-Q1-E1-B6
ggccgaaaagtagtaccaagatggcttcagttgtgtatctcctctttggcttccatctcattgttatcatgtcaagttccttacccgcaactagtgaagtgtttgcaaaacagtatccatccacagaacccgtggaagaaaaactcacccaactccacttctatttccataacaacataacgggggaacacccaactgctatgaaaactgttttgcctcctaaggggtccattcatggttttggggctacttacatgatggatgaccctctaactgaaggaccaagtccaacttcaaagcttgtgggaagatctcagggaatatacgctttggcttcacaacatgag

SEQ ID NO: 13809 - DNA, 393 bp, Glycine max
  Clone ID: LIB3040-040-Q1-E1-B8
gatatgagaaactcatgaaaactctggtggtgacttattagttctctcggcaagtaaggatttcaaacaaactaaagttgaagagagtataaatgactttggaaactcttcaatccaatgagttctccaacttcattatctatgacactatctctgcaactccatttagcagccatggctccccagaggctagtttcttggaaagttttgtgaactatcaggagcagcatgaccaccctacatttgataattgcgcaatgaggacccgaaagcgtgaagccagcgaaccagaaagcattggccggaggcagaattcggtggcagtgcaagggaggaagaagaggagaaggaagccaagggtttgcaaaaacacggaagaggctgagacacaaa

SEQ ID NO: 13810 - DNA, 377 bp, Glycine max
  Clone ID: LIB3040-040-Q1-E1-B9
ggtagcgctatctttctcagtgtaacgcctttagctagctcagatactcgagggtggtgattttcagtttcgtgttcgtttcttggtttttctgttcagtcatttgtttgtttgcaccgaaaacccatttcgaaactggtcttacttatttttttgctgatctggtcgaagaatacatagcgacacacacaaacaaaccatggctggtgccacgaattggcttacgttttcgttgactcacatggaaatgcagcagttcggtccatacgacaccaccactcactctcactgcttcaacgacagcaatttttatgggtggacgaattctaagagcgtcatggattcacagagtgagaccaacaactttgcggtgcaaa

SEQ ID NO: 13811 - DNA, 389 bp, Glycine max
  Clone ID: LIB3040-040-Q1-E1-C10
gatacctaaaaattgtaccgatatggcttcacttgtgtgtctccttttttccttgcatttcatggttatcatgtcaggttccttaccagcaaatagtgaagtgtttacaaaagagtctcctatgtctctatccacaaaacccgtggaaagactcacccaactccacttttatttccataacaacaaaatgggggaacacccgactgctatgaaaattgttgagcctcctaaggcgtccatttctggttttgggactatttacatgatggatgaccctctaaccgaaggaccaagtccaacttcaaagcttgttggaagatgtcagggaatatatgctgaggcttcgcaacatgaacctgcgatactcatggtaacgaatttgttcttca

SEQ ID NO: 13812 - DNA, 349 bp, Glycine max
  Clone ID: LIB3040-040-Q1-E1-C11
gggcatagcaaaatcgtttctccaatttaatcaccattgtacaacccaattcccttcgtcgttttcgattaagagagcaatggcacgtaccaagcaaaccgctcgcaagtccaccggaggaaaggctccgaggaagcaattggcaaccaaagccgctcgcaagtcagccccggcgaccggcggagtgaagaagccccaccgcttcaggccaggaacggtggctctgagggagattcgaaagtaccagaagagcaccgaacttctgatccgaaaactcccattccagaggctcgtcagagaaatcgctcaggatttcaaaaccgatctccgctttcagagcagcgccgtt

SEQ ID NO: 13813 - DNA, 304 bp, Glycine max
  Clone ID: LIB3040-040-Q1-E1-C12
gactcaccacttcaaaacactcataacacaaagcacaaagcaaagctcatccttgagttaaaaaatggcagcagcttcttccatggctctctcatccccatccttggctggcaaggccgtgaagctgggcccatcagccccagaagtgggaagggtgagcatgaggaagaccgtcaccaagcaggtctcctcaggaagcccatggtacggcccaggccgagtcaagtacttgggcccattctctggcgagcccccgtcctacctaaccggtgagttcccaggcgactacggctgggacactgct

SEQ ID NO: 13814 - DNA, 390 bp, Glycine max
  Clone ID: LIB3040-040-Q1-E1-C2
gacccccaaaccctgctgcataggaagaaaccctagcctctcaccctccctgcgacacgatgcagatcttcgtgaaaaccctaacgggtaagacgatcacccttgaggtggagtcttctgacaccatcgacaacgtgaaggccaagatccaggacaaggaacgcatccctccggaccaacagcgcctcatcttcgccggaaagcagctggaggacgggcgcaccctcgccgactacaacatccagaaggagtccaccctccacctcgtcctccgtctccgcggtggcgccaagaagcgcaagaagaagacctacaccaagcccaagaagatcaaacacaagcacaagaaggtcaagctcggcattctccagttccacaaggtccacgatt

SEQ ID NO: 13815 - DNA, 363 bp, Glycine max; identical to SEQ ID NO: 7753
  Clone ID: LIB3040-040-Q1-E1-C3

SEQ ID NO: 13816 - DNA, 374 bp, Glycine max
  Clone ID: LIB3040-040-Q1-E1-C4
ggcgggttaatatgcagcgataacggttgaaatagaagtttgaataacagtgttttggtgaagctgagaacacaaaggtttagatcacctctgaaattctgctatggcctcaaccagatcactcattccttgtctgttcattcaactgtgcttcgatcttctaccccgctcattcgctcaatcccccgccaccatgtctgccgaaggttacaccatttatggtcgagtgaagatccccagtgtgggaacatcagattatattcttcctggaaaaatttcaaatgtcaaactcatactcaatggtggtcacagagttacttttctgaggcctgatggatatttcgcattccacaatgttcctgccgggacacatc

SEQ ID NO: 13817 - DNA, 362 bp, Glycine max
  Clone ID: LIB3040-040-Q1-E1-C5
gattttgcttcatcgtattccacccacctcggaggcctaagccaaagcagatcctgcggacattgtaagtaaatcttatgaagatggagatgataactaatgttaccgagtatgaggcaattgcaaaggaaaaattgccaaagatggtttatgactactatgcatcaggggcagaggatcagtggactttgaaggagaaccgaaatgcattctcaaggattctgttccggccgcgtattcttgttgatgtgagcaagatagacttgactgcaactgtattgggcttcaaaatatcaatgcctatcatgattgctccaacagccatgcaaaagatggctcaccctgaaggagaattagctact

SEQ ID NO: 13818 - DNA, 365 bp, Glycine max
  Clone ID: LIB3040-040-Q1-E1-C6
gactcaccacttcaaaacactcataacacaaagcacaaagcaaagctcatccttgagttaaaaaatggcagcagcttcttccatggctctctcatccccatccttggctggcaaggccgtgaagctgggcccatcagccccagaagtgggaagggtgagcatgaggaagaccgtcaccaagcaggtctcctcaggaagcccatggtacggcccagaccgagtcaagtacttgggcccattctctggcgagcccccgtcctacctaaccggtgagttcccaggcgactacggctgggacactgctgggctttccgcagacccagaaaccttcgccaagaaccgtgaactcgaagtgatccactcca

SEQ ID NO: 13819 - DNA, 378 bp, Glycine max
  Clone ID: LIB3040-040-Q1-E1-C8
tactcaccacttcaaaacactcataacacaaagcacaaagcaaagctcatccttgagttaaaaaatggcagcagcttcttccatggctctctcatccccatccttggctggcaaggccgtgaagctgggcccatcagccccagaagtgggaagggtgagcatgaggaagaccgtcaccaagcaggtctcctcaggaagcccatggtacggcccagaccgagtcaagtacttgggcccattctctggcgagcccccgtcctacctaaccggtgagttcccaggcgactacggctgggacactgctgggctttccgcagacccagaaaccttcgccaagaaccgtgaactcgaagtgatccactccaggtgggccatgct

SEQ ID NO: 13820 - DNA, 382 bp, Glycine max
  Clone ID: LIB3040-040-Q1-E1-D1
gagtgtttgaatgaatcattgatcaatctaatgtctcatcaggagcaagccgtgttgtcccttctctccaagctcgccctttccttcgacggtgccgttttgggcgttgccttggccttcgccgccgtccgcaccctcttcaaattcaccgccacctccgcctccctccgcaagctccgccgcgcaccctccatctccgtctccgacctccgctccctcctcgccgagccaccctccgatgccgacgccggcgaaatcgtaattatccgtggcactgtcgacgccaagtccgccgtcgacggcacctggaaaactttgaaacccggcgtattggtttctcgcgagtccggcgataaaggtgtcattcttcaaagaactcaaa

SEQ ID NO: 13821 - DNA, 365 bp, Glycine max
  Clone ID: LIB3040-040-Q1-E1-D10
ggaacttagaacctttgctgaccctcgtggagtgatccggtggacgcaataactgcaggcagctctgacttcagtgcaagcaagcatcaaaacattgctttaaaagcatcaattcagcgtttctgcaagttccaattttccaactatccacagaaacggtcgtttgaaaaaaagctgttaattcgggagcgatatggaggtcgaactcaaagagctgcacgccgatcttcaatctctgagccaatcgcttcccgatccatctcaccatgatttgctccgcaagattcaattgcgtgttggggaccttgcgaagcttgcagaggcagcacctgttcgacgctctaaagttgaggatatgagtgctg

SEQ ID NO: 13822 - DNA, 371 bp, Glycine max
  Clone ID: LIB3040-040-Q1-E1-D12
gaggttttctgagttattgttaccatttgctcccagcactgagcttaaccgagcttcacaaagatgaatcgggaaaaattgatgaatatggccggttcggttagaactgggggaaagggcaccgtgagaagaaagaagaaggctgtccacaagacaacaaccacagatgacaaaaggcttcagagcaccctgaagagaataggggtgaatgccatcccggctattgaggaggtcaatatctttaaggatgacgtagttatccagtttctaaatcccaaagttcaagcatccattgctgctaatacttgggttgtcagtggttctccacaaacaaagaagttgcaggatatactccctagcattatccacca

SEQ ID NO: 13823 - DNA, 360 bp, Glycine max
  Clone ID: LIB3040-040-Q1-E1-D2
ggtgctctgctcgtgcctctagggttatcatttctccatttccattttctctctcacttttcaagaatcgtaagctatgggaaagtcttacccaactgtgagtgctgattaccagaaggccgttgagaaggcgaagaagaagctcagaggcttcatcgctgagaagagatgcgctcctctaatgctccgtttggcatggcactctgctggaacctttgacaagggcacgaagaccggtggacccttcggaaccatcaagcaccctgccgaactggctcacagcgctaacaacggtcttgacatcgctgttaggcttttggagccactcaaggcggagttccctattttgagctacgccga

SEQ ID NO: 13824 - DNA, 363 bp, Glycine max
  Clone ID: LIB3040-040-Q1-E1-D3
gactgaaaaaagagaaagtgagaaaagggtcgaacaactggtgaagtcattgatggctacagaggaagagagtgcggtgaacgagcctttggatctcattaggctcagcctcgacgagcgtatctatgtcaaactccgttccgacagagagcttcgtggcaaacttcacgcttatgattagcatcttaatatgattcttggtgatgttgaagaaattgttactacagtggaaatcgatgatgagacatacgaagaaattgtgaggactacaaagcggacagttcctttcctgtttgtcaggggagatggggtgatattggtttccccgccattgaggactgcatgactggactgatgaactaa

SEQ ID NO: 13825 - DNA, 378 bp, Glycine max
  Clone ID: LIB3040-040-Q1-E1-D4
gactcaccacttcaaaacactcataacacaaagcacaaagcaaagctcatccttgagttaaaaaatggcagcagcttcttccatggctctctcatccccatccttggctggcaaggccgtgaagctgggcccatcagccccagaagtgggaagggtgagcatgaggaagaccgtcaccaagcaggtctcctcaggaagcccatggtacggcccagaccgagtcaagtacttgggcccattctctggcgagcccccgtcctacctaaccggtgagttcccaggcgactacggctgggacactgctgggctttccgcaggcccagaaaccttcgccaagaaccgtgaactcgaagtgatccactccaggtgggccatgct

SEQ ID NO: 13826 - DNA, 379 bp, Glycine max
  Clone ID: LIB3040-040-Q1-E1-D5
gcagcagcatttgaactctactatcgttttctccgttctttctcaaagccgcactcaactttctaaaaccaaatcggtttgaatcctcatttcccgcctctcactggaaagcagcaaaatcacctttctctactatctatctgttccttttgtacgctgagtgggtagaagtcatggtaaggctcactgctgacttgatttggaaaagccctcatttcttcaacacgattaaagagcgtgagttagatctcagaggcaagaagatagctgtaattgaaaacttgggtgctactgaggaccaatttgacacaatagacttatctgacaatgagattgttaaacttgaaaatgtaccatatcttaaccggttgggcacaat

SEQ ID NO: 13827 - DNA, 340 bp, Glycine max
  Clone ID: LIB3040-040-Q1-E1-D6
gaggggaaaagaactaagatcagattacaagatgatagcaagaagatgccaaggttgaatgtggagatcttcaatgaaaacgagcaagaagattgtagtctggaagatggacagaaggtagagaagatgtatttgtatcgtacattggctgggaaaaggaaagatgcaccagaatatgtatggactctgtaggtgcattttttaggtcatttaatttcttgttattcagaagtttgtacttgtttttaggctgactgaattaatgcaattttagccgggtgtagtgttttgtaacttccttgcatttgctagttttatacatatgttagtttgtcttttc

SEQ ID NO: 13828 - DNA, 370 bp, Glycine max
  Clone ID: LIB3040-040-Q1-E1-D7
gagggtttttgtcgttgcgactaagagttgctgcttcttccgccactcagcacttcgctccctctgtgcttcaccaaccatggccgaaatcgaagctaccgttccagatccctctcaaatcgacgtcaaacttttcaaccgctggagcttcgacgacgttgaggttactgatatgtctctggctgattacattggagtgtccccgtcaaagcatgctacatatgttcctcacactgctggtaggtactcagtgaagaggttcaggaaggcgcagtgccccattgttgagagactcaccaactctctcatgatgcacggaaggaacaatggaaagaagctcatggctgtcaggattatcaagcatgcaatg

SEQ ID NO: 13829 - DNA, 281 bp, Glycine max
  Clone ID: LIB3040-040-Q1-E1-D8
gagcaacatggtgaagctggtggagagatttacttgccagaagcttacgttagaaccaagaggactacttaatggagcaaatcagttggaagaacttgtagctagcttcccaactggcttatctgagtgtggagaagcattatcaagccttaggagtaggagaacgagtactgtttgtgatgaatgtctatggtttaagaaatctgtctttagtcaacttgtgtgttttgttattcagttctcagcaataaactgctctggcaatctagtttcatgttcat

SEQ ID NO: 13830 - DNA, 373 bp, Glycine max
  Clone ID: LIB3040-040-Q1-E1-E10
ggtaataaccggagaaaaatcaagcaccgagtcctcttctctctgtggtcgccgcgactacgcttcttcgaaactcaaggcgcgtgaaaaaagaccttctggatctggatctcgaacgccatggcgttttggagatctctcgtagcgttctctgcggctcttctgcttctcatccatggcgctcactgcttctacctccccggcgtcgctccagaggacttcctgaagggagatcaattgcaagtgaaactagataaattaacatcaacacagatccagcttccatattcatattattcacttccctactgtgccccatcaaaaatagaggatagtgcacaatatcttggggaagtacttcgtggtgaccgca

SEQ ID NO: 13831 - DNA, 377 bp, Glycine max
  Clone ID: LIB3040-040-Q1-E1-E11
ggcgcattgaacgaaaattagggtttgtagtgtagcaggaagaagcagcaatggcgccgaagataacacgtaaggttagcagaaaccctgaattgataaggggaatcggaaagtactcgaggtcgcagatgtaccacaagaggggcatttgggctatcaaggccaaaaacggtggcgttttacctcgccacgaccctaaacccaagcctgaagctcctgctgaaaaaccacccaaattttaccctgctgatgatatcaagaagccccttgtcaacaagcacaaaccgaaaccagctaagctcaaggctagcattactcccgggacagtgttgattcttcttgccggtagatttaagggaaagagggtagtctttttg

SEQ ID NO: 13832 - DNA, 387 bp, Glycine max
  unsure (1)..(387): unsure at all n locations
  Clone ID: LIB3040-040-Q1-E1-E12
ggaattttgctgtgctgacaagagaaaatgctgtgggcaaagtgaaacaatcaagcctaccaatccacaagagctgttgccttcagtttctcgcgaccttgatctaaatgttgtttcggcgcctgatttaaatgaagagcttacacctccattcgagtcttctagggatgaagataatggttgcactttgcagcaggctgttgaggcagatgatgatgctgcttcgcatgatttagaaaaaaatttagcaagatcacacggtagtggtggttcccaaacttggaaccatggacctactggtgaagttccagcagttgactctcgtggagatgcatgtangaagagggtagcaagcacaaatgaagagacacatgattgtgacagcac

SEQ ID NO: 13833 - DNA, 357 bp, Glycine max
  Clone ID: LIB3040-040-Q1-E1-E2
ggaaacagagagtgatttcagtgagtgatcggtgttcacttgatctcatcataatcgtcagcgtcaattgaagaagatgccgatcagaaacatcgccgtcggaaggcctgaagaggcgactcaccccgacacgttgaaggcggctttggctgagttcatctcaaccttcatcttcgtgttcgccggctcaggctccggcatcgcctacaacaagctcaccgacaacggcgctgccacccctgccggcctcatctccgcctccatcgcccatgcattcgccctcttcgtcgccgtctccgtcggcgccaacatctccggcggccacgtcaaccccgccgtcaccttcggcgccttcgt

SEQ ID NO: 13834 - DNA, 368 bp, Glycine max
  Clone ID: LIB3040-040-Q1-E1-E3
ggtctattaactcttttttgttgttgtggtgtttcatttgtgaaactaacaacaacacaaggccatcatcatggcagctgcttccccaatggcaagccaactcaagtccaccttcactaggactcttgtagctcccaagggcctctctgcctcttcaccacttcacctcgtgccttctagaaggcaatttagcttcactgttaaggccatccaatcagagaagccaacctatcaagtgattcagccaatcaacggtgacccattcattggaagcctggaaaccccagttacatccagccctttgatcgcatggtacttgtccaacctgcccgcatacagaaccgcagtgagcccactactaagaggga

SEQ ID NO: 13835 - DNA, 366 bp, Glycine max
  Clone ID: LIB3040-040-Q1-E1-E4
gacaacacaacgcaacacaacgcgcactctctcttttctctcttaacacaaaaaccctatcgttcttcgcggtttcgccgattctcgccatgccgaaagccaaatccgacgccaaagccgccgatagccggttgaagcgcaagggcgctggtgctggaaggaagcaatcgaagaaagctgctaaggatcctaacaagccaaagagacctccaagcgctttcttcgttttcatgtccgagttcagagagcagtttaagaaggagcatcctaacaacaaatccgtcgctgttgtcggtaaagctggtggtgacaaatggaaatcgctgtctgatgctgaaaaggcccccttcgttgccacgggcgaaa

SEQ ID NO: 13836 - DNA, 411 bp, Glycine max
  Clone ID: LIB3040-040-Q1-E1-E5
gcgcccttcttcttgcttgttgccagttgagtctcagcctccttcttcaccggctcttccttctcagataatatcagctcaatgtggcatggagatgacatgtaagggttgattcttcccttagccgttgctctgcttcaacattgcggaagcagaataagcgccgcagctatggtgaagtactccagagaaaccgacaatcccagcacgtcctgcaacgccagaggcgctgacctcagagttcattttaagaacactagggagactgcctttgccatcaggaagttgccccttgttaaagctaaacgatacttagaggatgttttggaccacaaacaggctattcctttccgacgcttttgtggtggtgttgggacgacggcacatgctaagaacagacactccaatggg

SEQ ID NO: 13837 - DNA, 380 bp, Glycine max
  Clone ID: LIB3040-040-Q1-E1-E7
gacaacacaacgcaacacaacgcgcactctctcttttctctcttaacacaaaaaccctatcgttcttcgcggtttcgccgattctcgccatgccgaaagccaaatccgacgccaaagccgccgatagccggttgaagcgcaagggcgctggtgctggaaggaagcaatcgaagaaagctgctaaggatcctaacaagccaaagagacctccaagcgctttcttcgttttcatgtccgagttcagagagcagtttaagaaggagcatcctaacaacaaatccgtcgctgttgtcggtaaagccggtggtgacaaatggaaatcgctgtctgatgctgaaaaggcccccttcgttgccacggccgaaaagaagaaacaagag

SEQ ID NO: 13838 - DNA, 295 bp, Glycine max
  Clone ID: LIB3040-040-Q1-E1-E8
gaacccaaagtttcaaaccaacaacaccaacaaggttcaaaatatggagatgaagagagagattattaccaaggaggaagagcacaaggaggatagcatgcacactatagtgttcacagcaggtacatttcttctgatggtgtgtctaaagcactttctagttgagcaatggcgtgcttgggttttcctcatcctcaatgtcattttgttagccattttattcatgtctatgaggccagccaagctggaggatcacagttcacgaagtgaaatcactgttgaagaagtgaaaagt

SEQ ID NO: 13839 - DNA, 377 bp, Glycine max
  Clone ID: LIB3040-040-Q1-E1-E9
ggtaataaccggagaaaaatcaagcaccgagtcctcttctctctgtggtcgccgcgactacgcttcttcgaaactcgaggcgcgtgaaaaaagaccttctggatctggatctcgaacgccatggcgttttggagatctctcgtagcgttctctgcggctcttctgcttctcatccatggcgctcactgcttctacctccccggcgtcgctccacaggacttcctgaagggagatcaattgcaagtgaaagtaaataaattaacatcaacaaagacccagcttccatattcatattattcacttccctactgtgccccatcaaaaatacaggatagtgcagaaaatcttggggaagtacttcgtggtgaccgcattga

SEQ ID NO: 13840 - DNA, 350 bp, Glycine max
  Clone ID: LIB3040-040-Q1-E1-F1
ggttttgcatttgtcttctttaacttgtcactctctctctctctctaatggcttcattttccatcacctcctcgcctcccacccttcacaaagccactatcaccgacccttcttcttcttcttcccacgccttccctcaccgttctcccttcgttttacgcatgccccaccaaccccatcgccctcaaactcctcttgttttgcccaagattcaatctttgcgcaacgaaactagagctattccagttaccaaagacctgtgggataattcaattctgaaaagtgaaatcccagtccttgttatattctatgcaaattggtgcggcccgtgcaggatggttcaccggata

SEQ ID NO: 13841 - DNA, 389 bp, Glycine max
  Clone ID: LIB3040-040-Q1-E1-F10
ggtgctctgctcgtgcctctagggttatcatttctccatttccattttctctctcacttttcaagaatcgtaagctatgggaaagtcttacccaactgtgagtgctgattaccagaaggccgttgagaaggcgaagaagaagctcagaggcttcatcgctgagaagagatgcgctcctctaatgctccgtttggcatggcactctgctggaacctttgacaagggcacgaagaccggtggacccttcggaaccatcaagcaccctgccgaactggctcacagcgctaacaacggtcttgacatcgctgttaggcttttggagccactcaaggcggagttccctattttgagctacgccgatttctaccagttggctggcgttgttgccg

SEQ ID NO: 13842 - DNA, 364 bp, Glycine max
  unsure (1)..(364): unsure at all n locations
  Clone ID: LIB3040-040-Q1-E1-F12
gaatcctctgttacctctcagcagcttaggctagggttcagaaacgaaaaagggttcggtgttcagttcgcgatgggagccaagtggaagaagaagcgtatgaggaggttgaagaggaagcgccgaaagatgagacagagatccaagtagtgcgttaatccaagtagttgatttccgttgcttttataattatgttgtcaaattgggcacccagttgttagaggcactggtttctcctttttgatgttttgatacatttttgtttggtttaattcgtcttatgttattagctgaaaacaatgctgttactgcgtttgcgaatcaacatgatctcttatacgaaaaanattttcaacaatttaat

SEQ ID NO: 13843 - DNA, 378 bp, Glycine max
  Clone ID: LIB3040-040-Q1-E1-F2
gacagaaaagaaaaaggaaaccctagctggataggtcaaacatcatcatgtcggacgaagagcaccatttcgagtccaaggcagacgccggtgcctccaaaacctaccctcagcaagccggtaccattcgcaagaacggctacatcgtcatcaaaggacgcccctgcaaggttgtggaagtttcgacttccaaaactggaaagcacggtcacgccaagtgccactttgttggaattgatattttcactgccaagaaacttgaggatattgtgccctcttctcacaactgtgatgttcctcatgtgaatcgtactgattaccagctcattgatattgctgaggatggatttttgagtctgcttactgaaaatgggaaca

SEQ ID NO: 13844 - DNA, 337 bp, Glycine max
  Clone ID: LIB3040-040-Q1-E1-F3
gatcccaatcagaaaaagttagggtttgtaactttgtcttttgcttgcgaatctgaatcgaataataatcaatcaatcatcatgtcgtcggcgaagaagatcacactgaagagttcggacggcgaggctttcgaggtggacgaggcggtggcgctggagtctcagacgataaagcacatgatcgaggacgactgcgccgacagcggcatccctctgccgaacgtgacgagcaagatcctggcgaaggtgatcgagtactgcaagaagcacgtcgaggccgcgaatcccgaagacaaaccctccgaggacgatctcaaagcctgggacgccgatttcg

SEQ ID NO: 13845 - DNA, 398 bp, Glycine max
  unsure (1)..(398): unsure at all n locations
  Clone ID: LIB3040-040-Q1-E1-F4
gaaaatcacaatccctaattccccaaaattttctctgaagaagaagcaacaatgtctggtcgcggaaagggaggcaagggtttgggaaagggtggagcgaagaggcatcgcaaggtgctccgcgacaacatccagggaatcacgaaacccgcgattcggaggctagccagaagaggcggcgtgaaaagaatcagcggcttgatctacgaggaaaccaggggtgtgctcaagatcttcctcgagaacgtcattcgcgacgccgtcacctacaccgagcacgctaggagaaagaccgtcacggccatggacgtcgtttacgcgctcaagaggcanggaagaaccctctacggtttcggaggctganggcttgggctttttctgggcctggaattgttcct

SEQ ID NO: 13846 - DNA, 359 bp, Glycine max
  Clone ID: LIB3040-040-Q1-E1-F5
gaagtatataacttcttctaggtgtccggaaatcgttcctatcatcacttctcaaatctcgaaccctctcgttcgtgccgatcactaggtcacacttcatcaatggcgggtagaggcaaaaccctaggatccagcgccgctaagaaggccacctcaaggagcagcaaagccggcctccaattccccgtcggtcgtatcgccaggttcctcaaggccggaaagtacgccgagcgcgtcggcgccggagcccccgtcgacctcgccgccgttctcgaatatctcgctgctgaggttttggaattggctggaaacgctgcgagagataacaagaagactcgaattgttccacgccacatcca

SEQ ID NO: 13847 - DNA, 389 bp, Glycine max
  unsure (1)..(389): unsure at all n locations
  Clone ID: LIB3040-040-Q1-E1-F7
ggccattgaaagaaactgttgaatcgcgtcgattaaggttttgagatttctaggctttcatctcagacagtgaaaaaatgatagatataagtacacttaatgctgcacagattactgtgctgggatctgccttttgtgctatgctttccatgcatttcacgtcgcagttactgtctcagcatctcttttattggaagaatccgaaagagcaaaaggctattatcattatcatcctcatggctccaatctatgcagctgtctcctttgtgggtctcttggatatcagaggaagcaaggagtttttcacctttttggagtcagttaaagaatgttatgaagctttggtcattgccaagtttttggctttgatgtanagttaccttaacata

SEQ ID NO: 13848 - DNA, 397 bp, Glycine max
  Clone ID: LIB3040-040-Q1-E1-F8
ggcacctccgtagggtttggttattagggttttcgctcacccgtgtgcagtcgagcctcccgaagaaaaagcgaaaatgccgtcgcacaagacattcagaatcaagaagaagttggcgaagaagatgaggcagaacaggcccatcccctactggatccgcatgaggaccgacaacaccatcaggtacaacgcgaagcgccgtcactggcgtcgcaccaagcttggattctgaggtgcttgctttgcctcgattcagtttatccaattaattagtgttttattttcttgagccaaaaacaatgctttggagtttttaatattttgcattttattccaagactatattgtgtaaggaatttattgtagtacgtttgacgtgggtccatttgcagaaaaa

SEQ ID NO: 13849 - DNA, 374 bp, Glycine max
  Clone ID: LIB3040-040-Q1-E1-F9
ggatttttgttttgggtttttgctcgctgatgttttcacaaaatcggtttccactgatttcgcattcttcactcttccatgtctaaaatctccgaaatggacgttgctttcaaagacgcaaacgccaaatcccctctctgggaacaagtctcaagattcaaacttttgcatcaagaagatatagagtttcaaagatttggtatgcgtaacaatgttgatcagctttgtgtttttgagtgtggaatcccaggaagtgcttgatgctgaactctcagcttgagtttcacagttgataaatgtaactgacagttgaatacagtcaggaaaggagatgttcccttgcaacagatctcagcttgtttacttacgaataa

SEQ ID NO: 13850 - DNA, 340 bp, Glycine max
  Clone ID: LIB3040-040-Q1-E1-G1
ggcccattgagcgatgttttaggtttgtgatgtgacatgaacaattctgaatggcacacaagatactcctttaagtttgcagctgccctgttctaaccccgggaatgatgaacatatcctagtcacaacattttccatagacagtcattttagctaactttggcatttacagcagcatttttgcttacctacacccttaattcatttctgaaactactgctgttttaccacctatattatattctgcagatgatttcttgactaccattgttaacatgcacgtaccggattcagtcatacttatggctaccattactcccgggacagtgttgattcttct

SEQ ID NO: 13851 - DNA, 390 bp, Glycine max
  Clone ID: LIB3040-040-Q1-E1-G10
gagaagggagaattaggtttttagggtttacaccgagcagcgacacctccctcccgcagtagccatggttctcaaaactgaactatgccgattcagtggtgccaagatctaccccggaaagggcatcagatttgttcgtggtgattctcaggttttcctgtttgccaactcaaaatgtaagcggtatttccacaaccgcctgaagccctcaaagctcacctggactgctatgtacagaaagcaacacaaaaaggacattgctcaagaagctgtgaagaagaggagacgcgctgccaaaaagccttactctaggtccattgttggtgccactctggaagttatccagaaaaagagagctgagaagccagaagttcgagatgcagctaggga

SEQ ID NO: 13852 - DNA, 388 bp, Glycine max
  Clone ID: LIB3040-040-Q1-E1-G12
gactcaccacttcaaaacactcataacacaaagcacaaagcaaagctcatccttgagttaaaaaatggcagcagcttcttccatggctctctcatccccatccttggctggtaaggccgtgaagctgggcccatcagccccagaagtgggaagggtgagcatgaggaagaccgtcaccaagcatgtctcctcaggaagcccatggtacggcccagaccgagtcaagtacttgggcccattctctggcgagcccccgtcctacctaaccggtgagttcccaggcgactacggctgggacactgctgggctttccgcagacccagaaaccttcgccaagaaccgtgaactcgaagtgatccactccaggtgggccatgctcggagccttg

SEQ ID NO: 13853 - DNA, 51 bp, Glycine max
  Clone ID: LIB3040-040-Q1-E1-G3
ggcatgttgttcatctcatttaggaggccaacaaaacgttggcacacccgg

SEQ ID NO: 13854 - DNA, 311 bp, Glycine max
  unsure (1)..(311): unsure at all n locations
  Clone ID: LIB3040-040-Q1-E1-G4
gacttctcttcacacctttgttcactcttcttctcttgcggctagggttttagcgcagcttcttctagatttaaggaagatgggtaaggaaaaggttcacatcagtattgtggtcattggccatgtcgactctgggaaatccactaccactggtcacctgatttacaagcttggaggcattgacaagcgtgttattgagaggtttgagaaggaagctgctgagatgaacaagaggtctttcaagtatgcctgggtgctggacaaacttaaggctgagcgtgaaagaggaatcancattgatattgctttgt

SEQ ID NO: 13855 - DNA, 371 bp, Glycine max
  Clone ID: LIB3040-040-Q1-E1-G6
gttcacacaaactttattacagttgttgtattgtaattaagcaagaatattaggcaatggagtcttctagaacttcaactactcttgctctttttttaaccatcaatttgcttttctttgtcatggcaagtggctgctacacttgcacacagcctaagccaaaccctatcccattcccttaccctaaccctagtcctgccgcgaagagctgccccagggacgcacttaagctcggagtgtgcgcaaacgtgcttaatggaccaattggtgctattggagggtcaccaccggaccacccatgttgctcagtgctagaagggcttcttgatcttgaagttgcggtttgcctctgcactgccatcaaagccaac

SEQ ID NO: 13856 - DNA, 142 bp, Glycine max
  Clone ID: LIB3040-040-Q1-E1-G9
ggttgttatgttatgctatgggattcgattactattgtgtgaaagttacccttctcttaagttatgttttcaacacttcatttggtttgatatttagatttttgtcttccgtccccattgataaccatgaaacccctaaact

SEQ ID NO: 13857 - DNA, 340 bp, Glycine max
  Clone ID: LIB3040-040-Q1-E1-H1
gaaagtggacagaagagagcgtcctagtcgcaaccctaataagaagaaccacagcttcaagcgagtgacatccaccagccatgggtcgtatgcacagccgcggtaagggtatatcctcttctgctttgccctacaaaaggacaccccctagctggctcaagatctcttcgcaagatgtggaagaaaatatctgcaagtttgcgaagaagggtttgaccccgtctcagattggtgtcattcttcgagattctcacggtattgctcaggtcaacagcgtcactggcagcaaaatccttcgcatcctcaaagctcacgggcttgcgcctgaaattccagagga

SEQ ID NO: 13858 - DNA, 391 bp, Glycine max
  Clone ID: LIB3040-040-Q1-E1-H10
gagtgcctccattcgggactgtaactagccgcagcacgaggagcagcctcaggaggagaaggatgtctcacaggaagttcgagcacccaaggcacggttcactgggatttcttcccacgaagcgtgctgctcgtcacaggggaaaagtgaaggcattccccaaggatgacccatccatggcacccaagctcactgcattcatgggttacaaggccggtatgactcacattgttagagaggtcgagaagccaggatcaaagcttcacaagaaggaaacttgtgagcctgttacaattattgagactcctccaatggttactgttggtgttgtgggttatgtgaaaactccacgtggtctccgaacattgaacactgtctgggctcagcattt

SEQ ID NO: 13859 - DNA, 340 bp, Glycine max
  Clone ID: LIB3040-040-Q1-E1-H11
ggtcctccgatagttataatataaccatgtaacgttcaaattctacgccaatctctgtctcattctctttcctctttcctttttccttacaagaatcgaaaacgtcttcaaaaaaccaagccattattaatggctgtcgattccttcttccagaaagaacatcaaattcgggagtttgtggacgggaatggaaacgtatctgtcggtttgaagttgcataatacaccaagtaatgatggccttaaacgacagtttcctctagagattccgccgattctatttgaagagacttcacttccagcatgattgcacggttcacatactacagatgtttatagta

SEQ ID NO: 13860 - DNA, 267 bp, Glycine max
  Clone ID: LIB3040-040-Q1-E1-H12
gacaccatccagtactcttcttttcagcacaacctcttcatctctcccaggctttcttttctttgcaacaacactaccaaaaatgtcaccagatttcacacttttgttctccccggaactcatgcagtcccctatcatcactttccaagccactttctgtgtccttctcttcaacctcatgttcacgccgttcttcactcctggtgggcttccttgggcctggggccgggccaagaacatcatccctggcccagtaactgccctgct

SEQ ID NO: 13861 - DNA, 371 bp, Glycine max
  Clone ID: LIB3040-040-Q1-E1-H3
attatggtgaatagccatgaatagtattcccttgttcctgcatgcaaattcatatgaattgaaatctattacaaattgagtagtggatcacaatcattgatgtacaaggcaggcctcaagtacgatccatccatgtattcaaaatttgtgagatttaaaaaataaaataaaatacaagtaggaaggctaagttaattgtgctagtctgggagcatcaaatcattgatatatcaacaaaatgaaaataaaataaaaacagtgtatacataacaaataaataagaatggtactttgttagaaaacaaaacaagtttaataatagctcacaaaccactatttttattacgtctcatcactggaaccaatagaga

SEQ ID NO: 13862 - DNA, 376 bp, Glycine max
  Clone ID: LIB3040-040-Q1-E1-H4
ggagcgaagaagatattagggtttttgagtgcggtgcggcgatcctagcactctcttctgcagctttcgccgacagcttcattcaccatggctgagcaaaccgagaaggcttttttgaaacaaccaaaagtgtttctcagctcgaagaaaactgggaagggaaagagacccggaaagggtgggaaccgcttttggaaatccattgggcttggatttaagactcccagggaagccatcgaaggaacctacattgacaagaagtgccccttcactggcaatgtttccatccgtggccgtatcttggctggaacatgtcacagtgctaagatgaacaggactattattgttacgacgaattatctccattttatcaaga

SEQ ID NO: 13863 - DNA, 330 bp, Glycine max
  Clone ID: LIB3040-040-Q1-E1-H5
gatcatcgctgtggtttttctttttctctgttgaggttgtcattgggagcactcaacctaaactattcaagttgtgaaagcacatcacaagaaaattcgcaagcgatggatccgaagctaaaagaggtttctcagctcttcgatcgctttaaggcttcgtttatcaggaacgactttgatacctgttccaatctcctttctcagctaaaggtgttacttacaggtttcagaagccttccaccgttgtttgcagatacacctaatgcagttcatgaattaacaatagcaagggatatatacgagcatgctgttgtccctagtgtgaaaaat

SEQ ID NO: 13864 - DNA, 288 bp, Glycine max
  Clone ID: LIB3040-040-Q1-E1-H6
aggaagactgtctctaaggaggaagcgtctgccatcaaggctgctgggaaagcatggtatcacactatggtgtcagattctgattatacagaattcgacaacttttctaagtggttgggtgtttcacagtaaacttcatgatttatttttttcgtattagaattttgttttttatgctcatcagaactaaatatccttatctttggtttttttgttttgcgggttaaggttgtcatcataattatgcagacaatgtggaaattttgtttgttggattttagtgcaaat

SEQ ID NO: 13865 - DNA, 379 bp, Glycine max
  Clone ID: LIB3040-040-Q1-E1-H8
taccagatgagcaatcttaggacctattcctggcagcaagagtagtccttcaattgagcttggtatgtctccatcgtacttcaagaaacaaaaatattggcaattttcttcaagttactcgcttttcttgtataaaatccagattatttgaatagcatgagtaaatggttttcaaccgataccatagattctgtgacaaagaacatactgggtaaatcaacttttagatggtttcctcatcagttttgttcattgcatcagctgtaagcaaaccattttcacaaagaggttgagtcgctcctactcttaaaagtacaaacttgtaattaaaacaatttcataagcaagttgaatatcatgacactggcaatgggcatca

SEQ ID NO: 13866 - DNA, 373 bp, Glycine max
  Clone ID: LIB3040-040-Q1-E1-H9
ggagcttttctttctttctctgctctcttttcttttaggtttccactctcacacactctccctcttctccttctctgcaataatctctcttctcttcttcactctctcaactcctgccaaacccccatttccgcagttcttaaatttggagtctgatgtctccgccattgctggttaccgaagatgaagggcagtgccatgcctcgatggtagcatctgcatcttcaccatccctgaactgtttctccctaaatgaggccggatttaaagaatgcaattacctgggattgtcagattgctcttcggtggacagttctactgtcccgaatttgtctgatgagaaaaaggagaatctgaatttgaaggctactga

SEQ ID NO: 13867 - DNA, 59 bp, Glycine max
  Clone ID: LIB3040-041-Q1-E1-A10
agggtgtctaccattttttttatgtagctttcttacccaaactagaccaccattatcgc

SEQ ID NO: 13868 - DNA, 242 bp, Glycine max
  Clone ID: LIB3040-041-Q1-E1-A11
cgctgaaggttcatggtagctgactcaatgtgaaatgaaacagaattttaaatggatatgaaatgggttccaacaggactcttcaaggtgttaatggatattaaatgagacttgatgttttcatatttatttttttaagattcctatggtggttcgaattgatcttttcattagaatttctattccagtttcgtttcaaaaaaaaaaaaaaaatcaaaaaaataagaaaaatatatcaacat

SEQ ID NO: 13869 - DNA, 109 bp, Glycine max
  Clone ID: LIB3040-041-Q1-E1-A12
gtagcggacaaacaaagcaaagaattcgttatatagactggcctgcaatgttgaactatgcaattccttcatttcttttccctataaatagaggctttttgtgtcttat

SEQ ID NO: 13870 - DNA, 230 bp, Glycine max
  Clone ID: LIB3040-041-Q1-E1-A3
tcacttaaatgatcgcatttggctagcatattaaccaacagattgccaagtggagtatatgcgcgcttagggtgcttgttccatgcgaaaacatgtgtcattcatgctgagatcgatcacttgaatttttggtctgactctacactgcgtaatcctcgcaggcgtcaaagagatttatctccacagcaggctccacatgatcgcaatgaagtacttgcgtttcctccgca

SEQ ID NO: 13871 - DNA, 401 bp, Glycine max
  Clone ID: LIB3040-041-Q1-E1-A4
gacacaccgtttgttctattcttaactcaacttctgctacccactctcttcttccaagtccaaccacgcttttctctacagtcatgggcaaggtcaagatcggaatcaacggatttggaagaattggccgtttggttgccagagtcgctctgcaaagagacgatgtggagctcgttgccgttaacgaccctttcattaccaccgattacatgacatacatgtttaaatacgacagtgttcacggacactggaagcatcacgatgtcaccgttaaggacgagaagacccttctcttcggtgacaagccagtcactgtttttggacacaggaaccctgaagagatcccatgggggtcaactggagctgatatcattgttgagtccaccggagttttcaccgat

SEQ ID NO: 13872 - DNA, 328 bp, Glycine max
  Clone ID: LIB3040-041-Q1-E1-A5
gttccaatgagaacccaactataattgcagggactgtttttgatgaaaatccagaagaagcagtagaccttgataccgtcattaaagcagcgctgaaagacagtaacaagctcagcagtggaactttcaacactgtttacaaggcagtcatgccttctggggtggtcatatctgttaggagactgaagtctgtagacaagacaataatccactaacagaacaagatgatctatagaacttgaaagactgagcaaagtttgccatgataatctaatgcgtcacattgtctatgtcacttatgaagatgttgctcatcgcctgcatcaat

SEQ ID NO: 13873 - DNA, 370 bp, Glycine max
  Clone ID: LIB3040-041-Q1-E1-A7
gactccacaacacaaacaaaaactcccgttttctctctctgtttttccatggtcatctgatcaaacttttcttgattcactctctcagtttttgctattctgagtgatgggtatgccctgccgctgttcccacacctcccacatcactgagatcatcatcatcagcttcttccgccacaagtctgaaattacaacaatttccctcaattattcatcaaccaatcaccttaaaaaccttttccaatggatccctaaagattcaacttggtcagagtaaacatggcggctaatggaaattccttttccaacatcactagctttccttcgcatccaacatacctcttaccaacctctcgattcttctcacttc

SEQ ID NO: 13874 - DNA, 346 bp, Glycine max
  Clone ID: LIB3040-041-Q1-E1-B1
tactgtcgcaaaaagatcacagtcagctacggttgcgagaatgactacacatgggtctaagtgttgacaaggtagaccttcatcggaccaatgccatcaaagccgtcgctaagaaaaagtcattgcaattgggcaactttgctagcacatgtgatcatcatcgtggttacacctttataataattttatccatgcagagtcctaagtgttctgtttaagttatatttataagtctctgccgacttcacgtacccgtaactttcaaaactatagttcttgatcagaggtggtcaattttcactgctgtcagtttttgatgagtactgttttttgttttgatggtaag

SEQ ID NO: 13875 - DNA, 392 bp, Glycine max
  Clone ID: LIB3040-041-Q1-E1-B11
ggcgtacacagcctcaacaaccctaacgcgtgcagagcagagagagacgcagccatggggcgaagacccgcgaggtgttataggcaaattaagaacaaaccataccccaagtcacggttttgccgtggtgttcctgatcccaagatcaggatttacgatgttggtatgaagaagaagggtgttgatgagtttcctttctgtgtccatctggttagttgggagaaggaaaacgtttctagtgaggccctggaagctactcgtattgcttgcaacaagtacatggccaaatttgctggaaaggatgctttccacttgagagtcagggtgcacccattccatgttcttaggatcaacaagatgctttcgtgtgccggagctgataggctccaaac

SEQ ID NO: 13876 - DNA, 81 bp, Glycine max
  Clone ID: LIB3040-041-Q1-E1-B12
gggatagttgtagacatgtgacattggtttggttcatgttttggaccaaatatttttaacatgtctaagattgtctggtac

SEQ ID NO: 13877 - DNA, 430 bp, Glycine max
  unsure (1)..(430): unsure at all n locations
  Clone ID: LIB3040-041-Q1-E1-B3
ttacgattgcaaaaagacaacaaaaggttacggttgcaaaaaaacaacaaaaggttacggttgcaaaaaaacaacagaaggggaacacaatggcaactaatttaaccccttcccaaccaaccaaaccctcacttttttgaaattacttgcatagatagataatcatggctatgatgaaacgtgctgcttcctctgcgcttcgctctcttattgcctcatcctccaccttcaccagaaaccttcatgcctcaggtgaaaagaagaagattgtgggggtgttctacaaagggaatgaatatgctaaattgaatccaaattttgttggatgtgttgaangtgcattgggaatacgtgagtggctggaatcacagggtcatcagtacattgtcactgatgacaaagaaggacctgattctgaacttgagaaaca

SEQ ID NO: 13878 - DNA, 407 bp, Glycine max
  Clone ID: LIB3040-041-Q1-E1-B4
ggttttccacattcatattttccttgcgtttccctttcattttccctcactttctcgctcgccaaacgcccctctctctcctccaatggccgaccagctcaccgacgaccagatcgccgagttcaaggaggccttcagcctcttcgacaaggacggcgatggttgtattactactaaggaacttgggactgtgatgcggtcactagggcaaaacccaactgaggcagaactgcaggatatgattaatgaggttgatgctgatggcaatggaaccatcgacttcccagagttcctcaacctgatggctcgcaagatgaaagacaccgactccgaggaggagcttaaggaggctttccgtgtgttcgacaaggatcagaatggtttcatctctgcagctgagctccgcc

SEQ ID NO: 13879 - DNA, 393 bp, Glycine max
  Clone ID: LIB3040-041-Q1-E1-B5
ggtcgtcgaagcgcgagcaagcatcccaaaaccctagctcgcgttctgcattcgtcttttacatcaggatggagtctcaagtgaagcacgcacttgttgtcaaagttaagggtcgtactggatccagaggacaagtaacccaagttacagtgaaatttttggatgatcagaaccgtcacatcatgacgaatgtgaaaagacctgtgcgagaaggagacattctcaacctactcgagtctgaaagggaagcaagaagattgcgctagatggtttcttttggcttggctccaaattctaacaagacagtggtgatttgttgattttaatggtacatggtggatgtcaaaggttttagcaccctatcctaatgtccgtctttgggccaattttaat

SEQ ID NO: 13880 - DNA, 371 bp, Glycine max
  Clone ID: LIB3040-041-Q1-E1-B6
ggtcgctttttctctatcttcatcacacacacttcaatctttttcgcttttgtctttctttgtcctttgattgctgccattaattaattaattaatattctccctccctcttcacatcaagaagttagaagaagtccatgcggtgtcagcttgtgaagaagaaatgtgagaaggatcttggtttacacctgacctgacagttctagtagtagagtgcaacagctacaatctaatctaatggggtccgagcaaaatcgatttcctcagcacgaaagacgaaagagatggggaggatgttggggtgcattttcctgtttaggttcacagaagggtgggaagcgcattgtacctgcatctcgcattcctgacag

SEQ ID NO: 13881 - DNA, 335 bp, Glycine max
  Clone ID: LIB3040-041-Q1-E1-B7
gagacattgtgctttcaacttggctccgctctttggtttgctcaaccgatctccgcaacaatggtgaacgttccgaagacaaagaagacctactgcaagagcaaggagttcaggaagcacacgctccataaggtcacccaatacaagaagggcaaggacagcatcgccgctcagggaaaacgccgttatgaccgcaaacagtccggttacggtgggcagaccaagcccgttttccacaaaaaggcgaaaaccaccaagaaaattgtgttgaggctccagtgccaaggatgcaagcatgtctcgcagcacgctatcaagaggtgcaagcactttga

SEQ ID NO: 13882 - DNA, 208 bp, Glycine max
  Clone ID: LIB3040-041-Q1-E1-B8
tgggaacatcgttttctcgtttgtgttttttccgttaaaatcataaatttctcacggaacaccagatccacgctcccgcttacaggccttccaccatctacagatccatgcttgacgagttcaccgacgacgtcatgttcctcgacaacgaccgcgatcactgtattgataccaccgaagctggcattgaaaccccgtcaatagggca

SEQ ID NO: 13883 - DNA, 375 bp, Glycine max
  Clone ID: LIB3040-041-Q1-E1-B9
ggagtgtgtcgtgtggtgtgagacagtgtaactcggaagcgcagcagcaatggcaagagcgactctccttcacttgctgcggtcacagagcctccgccacgtgtccaaaaacgctccttcagcatatcgttgttttgggtcctctacctgtcaacgacccattagccccaatccatcattcaaaacttcctcccatcttgctattttccaaagaagatgggcatcacaaatcccaactacagaggaagacgacaagattagcatcggacctcgtagtggaggacaaccacgggagggtgacaaggaaactggagtcgtttattatggcccgatctcaaacaccataaagaaagtaaaacttctgtctctctcaac

SEQ ID NO: 13884 - DNA, 388 bp, Glycine max
  Clone ID: LIB3040-041-Q1-E1-C1
gattgaggacggtgcagacgcagatgtggagaacagaaacgatgaaataactggagagcctattgacaccgatgataatgaagaggaacaaccactgaagcggcctcgatagacatcgatatatatgactaagtatgatcgtgctagaattttgggcacccgtgctcttcacatcagtatgaatgcacctgtcatggactacttggagggggaaactgacccactcgatattgctatgaaggagcttcgaaagcggaaaataccctttacaattcggcgctacttgcctgatagaagctatgaagattggggagttgatgaactgattgtgtgagactcctggaaaaagcaactgggttgtgactgatgattgaactgacaagtgtgg

SEQ ID NO: 13885 - DNA, 397 bp, Glycine max
  Clone ID: LIB3040-041-Q1-E1-C10
gagtggcagacgcagacgccgtgactagacactcatctcactcgcgccatcttagggtttctccttttgtttcgcaacatggttgccgctaagaaaactaagaagacccatgagagcatcaacaacaggctcgctcttgtcatgaagagtggcaaattcaccctcggttacaagaccgttctcaaatctcttaggaactccaaaggaaaattgattatcattgctaacaactgccccccctttgagaaagtcagagattgaatactatgctatgttggcaaaggttggagctcatcattacaatgggaacaatgtggatttgggcaccgcatgtggaaaatattacagagtgtgctgccttagcattattgatcctggtgattctgatatcatcaag

SEQ ID NO: 13886 - DNA, 354 bp, Glycine max
  Clone ID: LIB3040-041-Q1-E1-C11
ggaacctttgcattctattcattcaagattcagcaagtgcgttttggaagcagagaccgaaatacttcgagatggcccgtacaaagcaaactgctcgtaagtcaactggaggaaaagctcccaggaagcagcttgcaaccaaggctgcacgtaagtctgcaccaacaactggtggtgtgaagaagcctcatcgttatcgccctggaactgttgctcttcgtgagattaggaaataccagaagagcactgagctcctaatcaggaagcttcctttccagaagttggttcgtgaaattgcccaggatttcaagactgatctgcgtttccagagccatgctgtgctcgcattgcaag

SEQ ID NO: 13887 - DNA, 382 bp, Glycine max
  Clone ID: LIB3040-041-Q1-E1-C12
ggacgcaactcacaagtgaagaagaacgagagattgagaagagaaagcgttccaaaatgttcacgctatctcgcgtgttccctctcacttccccttccaggcataggctcttggaagtgctgtcctctaggaaagttgaagtcggagaccgtctgcgccaagaggggcgcgattttacctattcagctgccatttctactgctacaaataactatgctgccaaaggacacgcttccgatcgaatatttgctccttatactgtttacaagggcaaagctgcattctcgttgattccttgtcttccaactttcactaagttggattctgggactgttgtagttgatcgacgcggttcaatcatgatgtctttcatgcattctat

SEQ ID NO: 13888 - DNA, 384 bp, Glycine max
  Clone ID: LIB3040-041-Q1-E1-C2
gagtgaagagataaagaagacggaggcggtttggagtatgacttcttgcacctcttttgcatcctttctcatttcttcttcttcatttccttcattgtgcttcgcgcaaacccactcaatcacatgtaaacaacgcttcccatttccttctgtaaagggaagaagaaagttctcaactttatcattttcatccaccaaaggctcgttacaagagccgctgagtacaaattcccagaccctattcccgaatttgcagatgccgagactcaaaaattcaaaagccaccttctcaaaaagctttcaaagaaagatatgtatggagaatcaattgaggaagttgtaggaatttgcactgagattttcagcactttcttacactccgag

SEQ ID NO: 13889 - DNA, 372 bp, Glycine max
  Clone ID: LIB3040-041-Q1-E1-C3
ggagggttggttcatttgatctgcgagtggagaagagaatcgtgatgggaggaggacacggtcacggcaccacctacaaaggagttaccgttcatcacccaaagcgctggcacactatcaccggcaagggtttgtgcgcggtcatgtggttttgggtattctacagggcaaagcaagacggtcctgttgtattgggctggaagcatccttgggagggtcatcacgatgatcatggcaagggccattaagcattccttaggcatgagctccaagaacaggaagaacagaatttgaagtgactgttgctgtgggtgtgctgttagttgaaatgtttactttgatcaattcaataaatttggctgtaaaataaga

SEQ ID NO: 13890 - DNA, 376 bp, Glycine max
  Clone ID: LIB3040-041-Q1-E1-C4
ggcccttctagctttttcccagtccaagcagcctccaattcgtgccactctcttcaaaatggccgttaccttctcaaatctccacacagaatcaggtctcaagtccctcgacgacttcctctctgggaaggtctacgtttctggggatcagttcacaaaggacgacatcaaagtgtatggtgctgttttggagaagccaggtgactcttttcccaatgctgccaagtggtacgaggttgtctcatctcagcttgctgcaagcttccccggcaatgctcaaggggtgagattcagtggcaaagcttctgctccagcggaggctgctcctgcgagaccggatgcttctgctgctgaagatgatgatgaccttgatctc

SEQ ID NO: 13891 - DNA, 392 bp, Glycine max
  Clone ID: LIB3040-041-Q1-E1-C5
gatagaggttgttggttgttggtgtttaaaattaaaaccgagcctcttccccaaaggagacacagagcgagagagaatcgtaacaaaagcggtaaccggaataagttgtctctacgatttgagccatggcaacaacaacatcctcaaaccgatcatcagaggcgtttgctctcatggcaatcctcagcactctgctttgcacggcggtggcggcgaaggagagcgtgtacgagatactccccaagtacggcctcccgagcggtctgttaccggacaccgtcaccgactacacgctcgacgaggacgggcaattcgtcgtcgttttggcgaagccctgctacatacagttcgattacttagtttactacgagaacaagatctccgggaagctc

SEQ ID NO: 13892 - DNA, 381 bp, Glycine max
  Clone ID: LIB3040-041-Q1-E1-C7
ggcaaagtgtttcttgtagcattcagtgaagcactagctaaggtattgggagctctcgttgtttcggagttagggaccttacgcagccatgggcactgctacgaatgccgccgccgccccatcacgccagctctcccagaaggaagctgacatccagatgatgttggccgccgacgtccacctcggcaccaagaactgcgacttccaaatggaacgttacatcttcaagcgccgcaacgacgggatttacattattaaccttgggaagacgtgggagaagcttcagctagcagctagggttatagttgcaattgagaacccccaggatatcattgttcaatctgcaaggccttatgggcaaagagcggttctgaagtttgc

SEQ ID NO: 13893 - DNA, 424 bp, Glycine max
  Clone ID: LIB3040-041-Q1-E1-C8
aggggttcaaagcaagtttcccttttaagtcgagtcgcattgcaatgactgcatcggattttgtctttcatggcttcatcaaggtctcgcaaacaacgaagtcgcatccctgaggcagtttttgaaaacattgcatggagtattctactacaaaatccttccttccaagcataggttcatgcccctgaaaatcacatacgataatatggcagcattcttcaagtctcgggaacggtttctttcaaagaatgtcactttcaaattggattgaactgttggtcaagcccgttgagaaaattaaatactcgatccttgttaagattctccatacagctttttacatctgctgcacacactccattccacttgggcatcgcttatccattttgttgaatccgggttgtattacaacacagttcaaaat

SEQ ID NO: 13894 - DNA, 372 bp, Glycine max
  Clone ID: LIB3040-041-Q1-E1-C9
ggactctgatgcgaacgtaaccaggctctggttttgcggttagggtagctctttctactcaaaacaaaacaaaacatcaatttctgtttcagttcgcggagatcaatatttgtcgctgaggtcgatcgtcgataaaaggcaatgtttttgtgggattggttttatgggattctagcgtcgcttggcctgtggcagaaggaggccaagatcttattcttgggcctcgataacgctggcaaaaccaccttgcttcacatgctcaaagatgagagattagtccagcatcagcctacccaatatcctacatcagaggagttgagtattgggaaggtcaagtttaaagcttttgatctcgggggtcatcagattgct

SEQ ID NO: 13895 - DNA, 398 bp, Glycine max
  Clone ID: LIB3040-041-Q1-E1-D1
gagtcttcatttgtgtttttgtagagagaagcccagccatggataggcttctatcatcgccttcacccccttctttcacatttctcactcgattcgaatctgcaactgcaagattcattttcacacgttctcaatctcacttgaagcgggtcacctcaatttgttgccaacatgcttatccatctcctttcactcgctttctcgcttcttccaaccaccccaatacttttcgatccatttcctctccttcagttcgcttcacacccgaatcctattctctcaatgacatcaaaactggggctttccaaaagccataggcaatatcatctcggacgcttgtaatacttgctgctcgtgctatgatcttaatccaaccagctagtgcaccagcagctttt

SEQ ID NO: 13896 - DNA, 358 bp, Glycine max
  Clone ID: LIB3040-041-Q1-E1-D10
gggcagcgcttgagaccaagccccactcaaccaccacaccactctctctgctcttcttctacctttcaagtttttaaagtattaagatggcagagacattcctatttacctcagagtcagtgaacgagggacaccctgacaagctctgcgaccaaatctccgatgctgtcctcgacgcttgccttgaacaggacccagacagcaaggttgcctgcgaaacatgcaccaagaccaacttggtcatggtcttcggagagatcaccaccaaggccaacgttgactacgagaagatcgtgcgtgacacctgcaggaacatcggcttcgtctcaaacgatgtgggacttgatgctgacaactg

SEQ ID NO: 13897 - DNA, 370 bp, Glycine max
  Clone ID: LIB3040-041-Q1-E1-D12
gggtcctcaaatcaacacactcccttataattgcagcgtcgacaaaaaccctaactcctaaactttttttcttcccttcacctcttcagcagtcgttacagagactccataacccgagaatgcctttcaagaggtgcgttgagattggaaggggtgctcagatcaactatggcaaagagtatgggaggctcgtggttattgtcgatgtcattgaccagaatagggctcttgttgatgctcctgacatggtgaggtcccaagtgaacttcaagaggctagcactcactgacatcaagatcgatattaagaggatccccaagaagaaggatctcattcaagccatggaagctgctgatgttaagaacagatg

SEQ ID NO: 13898 - DNA, 390 bp, Glycine max
  Clone ID: LIB3040-041-Q1-E1-D2
gataatagaaggttgtggggttagggctttagagtgtcttttcttctttttcttcttcttcttcttcgttgaatcgcgattgttctgttgtgcgactgaaagaagagagatcgaaaatggcgttggctttcgacgagttcggaaggcctttcataatcctgaaggaacaggagcagaagagcagacttcgaggtttggacgctcagaaagccaacatctccgccggcaaagccgtcgctcgcatcctccgaacctccctcggccccaaaggcatggacaagatgctccagagccccgacggcgacgtcactatcacgaacgacggtgccacgatccttgaccagatggacgtggacaaccaaatcgcgaagctgatggtggagctctcgc

SEQ ID NO: 13899 - DNA, 406 bp, Glycine max
  Clone ID: LIB3040-041-Q1-E1-D4
gaggggggctagtgacagtaaccaacctcgatttctcactcgccgtcgtctcttccgtctagggtttctcctcttcacaaaaatggttgccgcaaaaaaaactaagaagacccatgagagcatcaacaacaggctcgctctcgtcatgaagagtggcaaattcaccctcggttacaaaaccgttctcaaatctcttaggagctccaaagggaaattgattatcattgctaacaactgcccccctttgaggaagtcagagattgaatactatgctatgttggcaaaggttggggttcatcattacaatgggaacaatgtggatttgggcactgcatgtggcaaatattacagagtgtgctgccttagcattattgatcctggtgattcggatatcatcaagacactg

SEQ ID NO: 13900 - DNA, 382 bp, Glycine max
  Clone ID: LIB3040-037-Q1-E1-A10
cgccaaatgtggacttttctttgttttaggtgttgaagcaatgtccatttttcatggcactgacattccttctcctgttcaacatgtatcattgacatggaagttacattcgttatctgtcaatttccttgttggtatggaaatacttgaacaagattgtgacaaggatatttttgaagctttgcaggatctttatggtgagcttcttgataatgcaaggttaaaccaaagtaaagaagttatttcagatgataaaaagcatcttgagtttctgatgttccaagctgagattcatgaaagttactcaacttttcttgaagaacttgtggagcagttttctgctgtttcttatggtgatgttatttttaggcggcaagtttca

SEQ ID NO: 13901 - DNA, 264 bp, Glycine max
  Clone ID: LIB3040-037-Q1-E1-A12
gggattggttcttcttccacttccaacgccatgcctctttttggaattttccagataccctcatttatggacataatcactgacctcgccatgttcattactccgctatggattgcggttatcgtcggcgtcgtcgtgggctgggcgtggaagcccaaatgggcctttcaccccaaagacgctcttctcaagtttcgctctcctcgccctcccaatccccaaaacgacaccgcttttacctactccgccaccagttcctccgcg

SEQ ID NO: 13902 - DNA, 360 bp, Glycine max
  Clone ID: LIB3040-037-Q1-E1-A2
ggcagttcaattccaatatattccattctctctgtgtatttccctacctctcccttcaagatgcagatcttcgtcaagaccctcaccggcaagaccatcacccttgaggtggaaagctctgacaccatcgacaacgtcaaggccaagatccaggacaaggaaggaatccccccggaccagcaacgtctcattttcgccggaaagcaacttgaggacggccgtacccttgctgactacaacattcagaaggagagtactcttcacctcgtcctccgtctccgtggtggcatgcagatcttcgttaagacactcaccggcaagaacataaccctagaggttgaaagctcccgacacatcgat

SEQ ID NO: 13903 - DNA, 376 bp, Glycine max
  Clone ID: LIB3040-037-Q1-E1-A3
gggggtggcccccaattcgttccttcaggaagaaccttgcaagcagcagcagtgcttctaagccacctcctgagtctcaggctgagcagcacaacaaggttgctggtaaaaaacctgttgacaactatgctaataataaaggtttgtttgtcaagatcaacatggatggtgttcctatagggagaaaagtggacctcaatgcctatgacagctatgaaaatctctcttccgccgtggacgagctattcagaggtcttcttgctgctcaaagagattcctctgctggtggagttcacaacaagcatgaggaagagaaagcaattacggcgttattggatggaagtggagagtatactcttgtttatgaggataatga

SEQ ID NO: 13904 - DNA, 361 bp, Glycine max
  Clone ID: LIB3040-037-Q1-E1-A4
gattttgtgtttaattaatctaataaaataacccaaatttcgaatggggtaatccttccgagttctgagaatgagatgttgctaaatgtttcagatgttgtcgacaagtatgaggttcaacttattagggcactacgaacatactctgggcattgaaaactggtttgtccctcgaacattttccgcatcatatggtcccacattcttagatgcctaatcattggaaaaggctactttggctctacttgatgaattgtatggctgggatttttttccctttgcttgtagaatcctctcaaaatttatttaaccattgtgtactcatttagaacaaacaactcttcccaaatatcaaaaagcg

SEQ ID NO: 13905 - DNA, 375 bp, Glycine max
  Clone ID: LIB3040-037-Q1-E1-A8
gatcgcatttcatagcactcaccctcattaccaacacgaaagcatagccaaaaccttttttcgaagtctctgattttcctaatggctccggcaaaggcagagaagaagccggcggagaagaagccagcggcggagaaggcaccggcggagaagaagccgaaggcggagaagaagatctcgaaggaaggagggagcgagaagaagaagaagcgcacgaagaagagcgtggagacctacaagatctacatcttcaaggtcctcaagcaggttcaccccgacattggtatttccagcaaggccatgggcatcatgaacagcttcatcaacgacatcttcgagaagctcgcccaggaagcgtcgcgtttggctcgctac

SEQ ID NO: 13906 - DNA, 360 bp, Glycine max
  Clone ID: LIB3040-037-Q1-E1-A9
ggagggttattggacacattcttcagcgactgcgtttttggatcggaacctcttctgcggcgtagcaatgggacactccaacgtttggaactctcacccaaaaaactacggtcctggttctcgcacttgccgtgtgtgtgggaatccacatggactgatcaggaagtatggccttatgtgctgcatgcagtgcttccgtagcaatgccaaggaaattggcttcatcaagagcagttgtcaactacggaccaatattgtgttctggcactaagatgttttgaggatgttatgtttgaagaaacttgagactttcttttttcatctaattaattatcagacgtaatttgtggtactaagaat

SEQ ID NO: 13907 - DNA, 316 bp, Glycine max
  Clone ID: LIB3040-037-Q1-E1-B1
gaagttgcgtgtgatgaaccataaccatgtcagacgatgaacaccacttcgactcaaaagctgacgctggagcatcaaacacatttccccaacatgctggaaccatccgcataaacggttacattgtcaacataaacatgccatgcaatgttgtcgatgtttcaacttccaagactggctagcatggatacgcaaagtgtcacattgttgcaattgacatcttcactgggaaaaaacttgaggataatgtcacatcttcccataactgtgatgttccccatgttaatcgcattgaataccaactcattgacatctc

SEQ ID NO: 13908 - DNA, 356 bp, Glycine max
  Clone ID: LIB3040-037-Q1-E1-B10
ggcacttcaattgcaatcaaattagttcattctctttgcgcagttccctacctctcctttcaagatgcagatcttcgtcaagaccctcaccggaaagaccatcacccttgaggtggaaagctctgacaccatcgacaacgtcaaggccaagatccaggacaaggaaggaattcccccggatcagcaacgtctcatcttcgccggaaagcagctcgaggacggccgtaccctcgccgactacaacatccagaaggagtcaacccttcaccttgtccttcgtctccgtggtggcatgcagatcttcgtcaagactctcactggcaaaaccataaccctagaggtcgaaagctctgaca

SEQ ID NO: 13909 - DNA, 130 bp, Glycine max
  Clone ID: LIB3040-037-Q1-E1-B11
ggcgaaacagagagtgatttcagtgagtgatcggtgttcacctgatttcaacacaaacctcaacgtccaatgtagaaaatgcccattaaaaacaacccccctcggaaggcttaaaaagggaatcaacccc

SEQ ID NO: 13910 - DNA, 315 bp, Glycine max
  Clone ID: LIB3040-037-Q1-E1-B12
gacagagaagggtttcttccgggttcacgtttcacaatcactttttgcgcttctctcactcactcactcatcttcttcctcttcgtgtggttttctttctcgaactcgaacgaagatgcgtgagattcttcacatcgagagatggcaatgcgggaaggagatctgcaccaaattctgggacgtggtgtgcgcggggcaagggatcgattcaacggagaggtagcacagggacaacgagttggaaatcgagcgagtcaacatctacgacaatgaagcgaattgcggaaggttcgtgcctacggtggtgctcatgga

SEQ ID NO: 13911 - DNA, 373 bp, Glycine max
  unsure (1)..(373): unsure at all n locations
  Clone ID: LIB3040-037-Q1-E1-B2
gatccacacctctctctctctctcagaatttctatctatctcttgtttcaatttcaacaacggttactcctttttcgttttgagtttcaatcaagccatcatcatgtctaccgcatcgcaacccaaggccaagaaaacggcgtcgtccaagaagcccctctcccaccctcccttcgccgtgatgatagcagaggcgattgcgagtctgaaagagagaaccggttcgagccaatacgcgataaccaaatacatcgaagggaagcacaaggagttgcctgcaacctacaagaagcttgtcctcgttcatctcaagaaatctgttgctgctggcaagcttgttaaggtgaanaactcctttaagctcgcaccgact

SEQ ID NO: 13912 - DNA, 381 bp, Glycine max
  Clone ID: LIB3040-037-Q1-E1-B4
gaccggattgcaaccatgtcgaggagaaaggttagagagccaaaggaggaaaacgtgactctgggcccagctgttagagatggtgaacatgtttttggagtcgctcgcatctttgcctccttcaatgacaccttcattcatgtcactgatctgtctgggagggaaacacttgtccgcatcactggcgggatgaaggttaaagctgacagagatgaatcatctccatatgctgctatgcttgctgcgcaggatgttgctgctagatgcaaggaactgggcataactgctcttcatatcaagctccgtgccacaggtggaaacaagacagagacaccaggtcctggtgctcaatcagctcttcgagcccttgcccgttcagga

SEQ ID NO: 13913 - DNA, 379 bp, Glycine max
  Clone ID: LIB3040-037-Q1-E1-B8
cgggtgccaaaaaacgcacaaagggagagctgagacaagacgacaaaaaggtacagttttcagaacaccaaagcacgcgatctctatcccacgaaaattctcagtttgcagagaaaatctgaggcatctctagacgatcgtatctcaactatgagtgtctgtgacatcataactcgtcacacctcacatcatacattcaattaactggcagtactgtaacatttgcgcgcatggtaaagacttgccttaattcaaatctgacgacatgcatgacatcatcattgacctaactgaccctgtatcaattacgccaactgcaatgtatctccgtagcacttgctcaaccgtcatcgagagtgaaacccgtcctgtcactcca

SEQ ID NO: 13914 - DNA, 378 bp, Glycine max
  Clone ID: LIB3040-037-Q1-E1-B9
ggaagtgatttctgagattggatgcgagagttctgagaagaaaagagaagatcggtgagtgaggaagcaaatagcaatagcaccgccaccgtcaccactgccgctgccactgccactagcaacagcagaatgggaaccttgggcagagttttctacgccgtcggattttggatccgcgagaccggccaagccatcgatcgcctcggctctcgtctccaaggcaactacctctttcaagaacagctgtctaggcatcgacctctgatgaatctgttcgacaaagctccctcggttcacagggatgcatttgtggcccctagtgcctccctcctcggcgatgtccacgttggccccgcttcctccatttggggaggatgc

SEQ ID NO: 13915 - DNA, 389 bp, Glycine max
  unsure (1)..(389): unsure at all n locations
  Clone ID: LIB3040-037-Q1-E1-C1
gatcgcatttcatagcactcaccctcattaccaacacgaaagcatagccaaaaccttttttcgaagtctctgattttcctaatggctccggcaaaggcagagaagaagccggcggagaagaagccagcggcggagaaggcaccggcggagaagaagccgaaggcggagaagaagatctcgaaggaaggagggagcgagaagaagaagaagcgcacgaagaagagcgtggagacctacaagatctacatcttcaaggtcctcaagcaggttcaccccgacattggtatttccagcaaggccatgggcatcatgaacagcttcatcaacgacatcttcgagaagctcgcncaggaagcgtcgcgtttggctcgctacaacaagaagcccac

SEQ ID NO: 13916 - DNA, 149 bp, Glycine max
  Clone ID: LIB3040-037-Q1-E1-C11
gattgctggctggtaaagaatctctaaactgatttccgcacttagtcacttgctttcttcacaattcactccagatttttattttcgtgttgatcttcttgttactctgatgttccataaagataaactcaagtttctttgatgatgat

SEQ ID NO: 13917 - DNA, 346 bp, Glycine max
  Clone ID: LIB3040-037-Q1-E1-C2
gcatcaaatcaaaaaccctaattcccaaattctctcatttttcaagtttcaaccaagaaaagcagcaacaatgtcgggtcgcggaaagggtgggaagggtttaggaaagggaggagcaaagaggcatcgcaaggtgctccgcgacaatatccagggaatcacgaagcccgcgattcggagactggcgagaagaggtggcgtgaagagaatcagtggtttgatctacgaagagaccaggggcgtgctcaagatctttctcgagaacgtgattcgcgatgccgtgacgtacacggagcacgctaggagaaagacagtgacggccatggatgtcgtttacgctctcaag

SEQ ID NO: 13918 - DNA, 347 bp, Glycine max
  Clone ID: LIB3040-037-Q1-E1-C4
gaattgttaatttgcgtccataattcactcatcctcctcgcaatttccgatctttctgtagttgtctggtctccgtcaaccatcaatcaccaacgtagatcgcacacaaataacaatgggtttaggttttgttgtcggattcctcgggcttctgattctatttcacgccgcatattctaccatccaatacaagggtttgttgaagattacggaggaagagttttcagggcctcctttgaatgtggtgattgaggtgactctagggttagttttttgcatgtgggctgcactaaccgtgccaggaaagtttttgtcaatccaacctcactctgaagagaacagaattg

SEQ ID NO: 13919 - DNA, 88 bp, Glycine max
  Clone ID: LIB3040-037-Q1-E1-C5
ggctacgctttcttttccttcagggttaagccgtgagatttgccaatctgagaaatggccgattcttctcgggaggagaacgtttaca

SEQ ID NO: 13920 - DNA, 371 bp, Glycine max
  unsure (1)..(371): unsure at all n locations
  Clone ID: LIB3040-037-Q1-E1-C7
ggattccttcagtcacttccctcattttttaacattcccctcggcgctgcgcacctttctcgatctccgatctataaaccccacaacaccctccttccttctttctcaaccttacactctctctctctctctcaaaataaatctcgtttctctctcctctcgttgggcctcttcaacgggcttcccggcccaacgctacaaccttttttctgctctttcgattttttagggttttcgcgcgctccccctttcttcttctcctggatctgctangagaagtgctgcatgctctgaacttccttccatactcttagagatggcgtcttcgtatcccggttctgttagtgccgcgcaggttggttcctacttcg

SEQ ID NO: 13921 - DNA, 339 bp, Glycine max
  Clone ID: LIB3040-037-Q1-E1-C8
ggaaacagagagtgatttcagtgagtgatcggtgttcacttgatctcaacaaaatcctcagcgtcaattgaagaagatgccgattagaaacatccccgtccgaaaggctgaagaagcgaatcaacccgacacgttgaaagccgctttggctgaattcaactcaaccttcaacctcctgttcgccggctcaagctccgggaacggcctacaacaagctcaccgacaacggcgctgccaaccctgccggcctcatctccgcctccatcgcccatgcattcgccctcttcgtcgccgtctccgtcggcgccaacatctccggcggccacgtcaaccccgccg

SEQ ID NO: 13922 - DNA, 352 bp, Glycine max
  Clone ID: LIB3040-037-Q1-E1-C9
gaggcgcggcgggatcagcacaagattgcaaaatgaagttcaacattgcaaatcccaccactgggtgccagaagaagctggaaatcgatgacgacctgaagcttcgagcattttgggacaagaggatctcccaggaggttcttggtgatgctctgggtgaggagtttaaaggatatgttttcaaaatcaccggtgggtgtgacaaacaaggattccctatgaagcagggagtgctgacccctggtcgtgttcgacttttgctccatagaggaactccttgtttccgtggatatggaaggcgcaatggagagcgtagaaggaagtctgttcgtggttgcattgtcagtccaga

SEQ ID NO: 13923 - DNA, 255 bp, Glycine max
  Clone ID: LIB3040-037-Q1-E1-D1
gttattgacctccggaagcaacagaagaaggagcctgagaggcctctttatcaagtactccaatacaaggaagaaaagattgctcctggaactttgcttggaaccattcaaacttatgtggttggcactagcacacaggactcgtcatcgtgctaaaaaggttgatctgcttagaggtctgaacacagatatagtaaatgtcacattacaccctgaaaagttggaagccatggaaaatgttttgccctcgaagta

SEQ ID NO: 13924 - DNA, 366 bp, Glycine max
  Clone ID: LIB3040-037-Q1-E1-D10
gaaggcaagtttcacttcacaactcctcaacacaagaactacagtagtagtagtagcttcacttcactcacaacacagcaatgcccactggcttctctctcatctttgcggcatcacttttccttttgcttctcgattgttgctctgggagttttgttggggtctgctatggaagaagtgctgatgacctccctacacctgacaaggtggcacagttggttcaacttcataaaatcaaatatgtcacgatttatgattctaatatacaggttctgaaggcctttgcaaacactggaattgagcttatgattggggttccaaattcggacttgctttcagtctctcagttccaatctaatgcagact

SEQ ID NO: 13925 - DNA, 312 bp, Glycine max
  unsure (1)..(312): unsure at all n locations
  Clone ID: LIB3040-037-Q1-E1-D11
gtcagtcatacactgagagagagagagagagagagagagaacatcgttgcagtggcgcgcccaatggctctgggaatctcaaacatactgcactgccccaaattgagtttctcccacaacaattttcgcccaaaagtttcaacctctctcagcctcaggtttccccagacagcagcacggagtgatagaaagatcatctgtgctgctgcatctgcngctggaagctctaatcccgatggtgaatttaatccttatgaggtgctangtgtaagccctattgagaaatttgacatggtcaagggaacatatgct

SEQ ID NO: 13926 - DNA, 386 bp, Glycine max
  Clone ID: LIB3040-037-Q1-E1-D2
ggatcctttgtattctattcttcaagattcaggtactgcgtttcggaagcagacacagatggctcgtacgaagcaaaccgctcgtaagtccacaggaggaaaggctcctaggaagcagcttgcaaccaaggctgcacgtaagtctgcaccaactactggtggtgtgaagaagccccaccgttatcgtcctggtaccgttgctcttcgtgagattaggaaataccagaagagtaccgagcttttgatccggaagctccccttccagaggctggttcgtgaaattgctcaggacttcaagactgatctgcgtttccagagccacgccgtgcttgcattgcaagaagctgctgaggcataccttgttgggctctttgaggacactaacc

SEQ ID NO: 13927 - DNA, 377 bp, Glycine max
  Clone ID: LIB3040-037-Q1-E1-D3
gacatctttcactcgttctctgaaattttaattgacttttctcccctcataaaaaaaacctaccaatggctcccgcaaaggcagagaagaagcccgcggagaagaagccggcagagaaggccccagcggagaagaagccgaaggcggagaagaagatatcgaaggaaggaggaagcgagaagaagaagaagagaacaaagaagagcgttgagacctacaagatctacatcttcaaggtgttgaagcaagtgcaccccgacatcgggatctccagcaaggctacggggatcatgaacagtttcataaacgacatcttcgagaagctcgcccaggagtcatcgcgtctcgctaggtacaacaagaagcccaccattact

SEQ ID NO: 13928 - DNA, 377 bp, Glycine max
  unsure (1)..(377): unsure at all n locations
  Clone ID: LIB3040-037-Q1-E1-D6
gggttcttcttagccgtagttttctctcacagccgcagacagagatggaagctgtgtgtggaagtgtttgggtcacatcctctcttccacgctcacccaagtccactctctctctattccgctctactcatcaacacctaacagcatttccttcacaatcccatcttttcttatatcaccctcctccctatgctaatgctaaaaccctccgcgccagaacctcctccaaacccgccattttccttccccacttaattgcttctctggaacaagttgaccagacttacataatggtcaagcccgacggcgtgcaacgtggcctcgtgggagaaattacttctaggtttgagaaganagggtttaagtcaactggcttg

SEQ ID NO: 13929 - DNA, 374 bp, Glycine max
  Clone ID: LIB3040-037-Q1-E1-D7
gacccccaaaccctgctgcataggaagaaaccctagcctctcaccctccctgcgacacgatgcagatcttcgtgaaaaccctaacgggtaagacgatcacccttgaggtggagtcttctgacaccatcgacaacgtgaaggccaagatccaggacaaggaaggcatccctccggaccagcagcgcctcatcttcgccggaaagcagctggaggacggccgcaccctcgccgactacaacatccagaaggagtccaccctccacctcgtcctccgtctccgcggtggcgccaagaagcgcaagaagaagacctgcaccaagcccaagaagatcaaacacaagcacaagaaggtcaagctcggcattctccagttc

SEQ ID NO: 13930 - DNA, 363 bp, Glycine max
  Clone ID: LIB3040-037-Q1-E1-D8
ggaacctttgcattctatacattcaagattcagcaagtgcgttttggaagcagagaccgaaatacttcgagatggcccgtacaaagcaaactgctcgtaagtcaactggaggaaaagctcccaggaagcagcttgcaaccaaggctgcacgtaagtctgcaccaacaactggtggtgtgaagaagcctcatcgttatcgccctggaactgttgctcttcgtgagattaggaaataccagaagagcactgagctcctaatcaggaagcttcctttccagaggttggttcgtgaaattgcccaggatttcaagactgatctgcgtttccagagccatgctgtgcttgcattgcaagaggctgctg

SEQ ID NO: 13931 - DNA, 339 bp, Glycine max
  Clone ID: LIB3040-037-Q1-E1-D9
caaggctgcccagaagaagaagtgaatcgtgcgggctggttcatcaggggatgttggttacaataaatgttggtttcttttctgtactcttgtgtcttcttttctaggtagcttgtttttcggacaaagtttgaagtctccaccatcatctcgcaactgttgttcccagaactgggttcttgatcgacggtggcaaaattgcttttatttatctgtgttttaatgtgttgtgtttgtcggaacccctgattacatttttgttaagcgcagcgagtttcaggactttgctgcgttgtgttgctttggtttattaaatgtcaactttctatttgtagtgtt

SEQ ID NO: 13932 - DNA, 383 bp, Glycine max
  unsure (1)..(383): unsure at all n locations
  Clone ID: LIB3040-037-Q1-E1-E1
gagccacaccacaagctccttatcgtgtttgcattgcagagagagagagaatggcgaccacacccggtttgtgtggcagtgtgttgttgagcacctcgttcctgaggaagcacgcaatggcatcagtgaacatgagaatgctgaacgctaatgctggtgtttttggcttaaagggagggcgtgganggcgtgtgagtgcgatggcaagttacaatgtgaagctgataaccccagaaggagaacaagaatttgaatgcccagatgatgttttcattcttgaaaaggctgaggaatttggcattgaccttccctactcatgcaaggctggtgcttgctcttcctgtgccggcaaagttgtttctggcaaagtcgnacaatctgat

SEQ ID NO: 13933 - DNA, 345 bp, Glycine max
  unsure (1)..(345): unsure at all n locations
  Clone ID: LIB3040-037-Q1-E1-E11
ggtgattgagtttggctgtcataatctctctctcatccgaaaatgtcactcaccttgcaaactccgccttctacaactctctcttctgcatctcccattcacagaacaataacaagatacaccacattctccttctcgcttcgtcctccaacaactcttcacttcaatccccacaggtcnctccctctaattcgcgcttccaattcttctatcaatgccgcttcgaccactgaactggacgctgtgtccgccttcagcgagatcgttcacgacaccgtcgttttcgatgatttcgaaaagtttcctccaactgctgctactgtaagttcatcgcttctcttggga

SEQ ID NO: 13934 - DNA, 353 bp, Glycine max
  Clone ID: LIB3040-037-Q1-E1-E2
gactgcgaaccagtagggactcccattccgactcttagccgccgatctctcagggcttgcatcttctcaggtaagctgtgaagatgtacacatcaaggaagaaaatccacaaggataaggatgctgaaccaactgaatttgaagagtcagttggacaggcattgtttgatctggaaaataccaatcaggagcttaaaagtgatctgaaggatttatacataaactcagccgtgcaagttgatgtttctggaaaccgcaaggctgttgttattcatgtcccttacagattaaggaaaggtttccgtaagattcatgttaggcttgtcagggagcttgagaagaagtttagtggc

SEQ ID NO: 13935 - DNA, 385 bp, Glycine max
  Clone ID: LIB3040-037-Q1-E1-E3
gactcaccacttcaaaacactcataacacaaagcacaaagcaaagctcatccttgagttaaaaaatggcagcagcttcttccatggctctctcatccccatccttggctggcaaggccgtgaagctgggcccatcagccccagaagtgggaagggtgagcatgaggaagaccgtcaccaagcaggtctcctcaggaagcccatggtacggcccagaccgagtcaagtacttgggcccattctctggcgagcccccgtcctacctaaccggtgagttcccaggcgactacggctgggacactgctgggctttccgcagacccagaaaccttcgccaagaaccgtgaactcgaagtgattcactccaggtgggccatgctcggagcc

SEQ ID NO: 13936 - DNA, 383 bp, Glycine max
  Clone ID: LIB3040-037-Q1-E1-E4
gatagggtttttgtcgttgcgactaagagttgctgcttcttccgccactcagcacttcgctccctctgtgcttcaccaaccatggccgaaatcgaagctaccgttccagatccctctcaaatcgacgtcaaacttttcaaccgctggagcttcgacgacgttgaggttactgatatgtctctggctgattacattggagtgtccccgtcaaagcatgctacatatgttcctcacactgctggtaggtactcagtgaagaggttcaggaaggcgcagtgccccattgttgagagactcaccaactctctcatgatgcacggaaggaacaatggaaagaagctcatggctgtcaggattatcaagcatgcaatggaaattattca

SEQ ID NO: 13937 - DNA, 154 bp, Glycine max
  Clone ID: LIB3040-037-Q1-E1-E5
gacgcatccttctttctctctctctcctcctcgatcccaattccactagggattcaattccgatgcgattccgagcttgttagatccacgacaacgtttcgtttcccagattcttttgtaaaaaaaaataatcttcctttgcccaacaggtaag

SEQ ID NO: 13938 - DNA, 383 bp, Glycine max
  Clone ID: LIB3040-037-Q1-E1-E6
ggctgacaagccaatcctttgtgtaggtgctcaaccctagtaagccgcaatggtgaagtactcaagggagcctgacaatccaactaagtcttgcaaggctagaggcgccgaccttagggttcattttaagaacacaagggaaactgcctttgcaatcaggaagttgcccttggtcaaggctaaaaggtacttggaagatgttcttgcccacaagcaggcaattccattcagacgtttttgtcgaggtgttggaaggacagcccaggctaagaatagacactctaatggccaaggacggtggcctgtcaagtcagcaaaattcattcctgatttgctcaaaaatgctgagagcaatgctgaagtgaaaggtttggatgttgatg

SEQ ID NO: 13939 - DNA, 380 bp, Glycine max
  Clone ID: LIB3040-037-Q1-E1-E7
gatagcaaaatcgcttctccaatttaatcaccattgtacaacccaattcccttcgtcgttttcgattaagagagcaatggcacgtaccaagcaaaccgctcgcaagtccaccggaggaaaggctccgaggaagcaattggcaaccaaagccgctcgcaagtcagccccggcgaccggcggagtgaagaagccccaccgcttcaggccaggaacggtggctctgagggagattcgaaagtaccagaagagcaccgaacttctgatccgaaaactcccattccagaggctcgtcagagaaatcgctcaggatttcaaaaccgacctccgctttcagagcagcgccgtttcggctcttcaggaagccgcggaggcttatctcg

SEQ ID NO: 13940 - DNA, 100 bp, Glycine max
  unsure (1)..(100): unsure at all n locations
  Clone ID: LIB3040-037-Q1-E1-F1
gacgttcacattcaggaatcgttttcttcagaaaatttgccatcgttganggaagcgcgagagccttcgttgttcaagatgagagctaagtggaagaaga

SEQ ID NO: 13941 - DNA, 313 bp, Glycine max
  unsure (1)..(313): unsure at all n locations
  Clone ID: LIB3040-037-Q1-E1-F11
catctgagaactgccaaaagagcaaaatcttttttattgcatggtctccttcggtagcccgcattcgccctaagatgctatatgcaacatccaaggacaggttcagaagggagctgcagggcatccattatgagattcaggcaacagacccaaccgagatggatcttgaagtcctcagagagcgtgcaaactgagcacctacacaagagggttgtgtctaggtgatgtagttaagatatctgaggcctcanggaatgatgttgactgataccctttagttgttctactatgatctctgtctgtttcgcgacat

SEQ ID NO: 13942 - DNA, 306 bp, Glycine max
  Clone ID: LIB3040-037-Q1-E1-F12
atggcaaggtcatgagcttactaggccatgagtctcgctaatggaaatctcttttgacaaaaaaaaaaaaaaaaaaaaaaaaaaaaaaaaaaaaaaaaaaaaaaaaagtaaaaaaaaaaaaaaaaaaaaaaaaaaaaaaaacggccgctcaaaaagattcaaacttaaataagcctgaaaggaaagttaaaacccctcaaaaatgttaactaaattcaattcaatggccgttcttttaaaaagtccttaatgggaaaaacctggcgttaaccaaattaaaccccttgtaagaaaatccccttttcc

SEQ ID NO: 13943 - DNA, 109 bp, Glycine max
  Clone ID: LIB3040-037-Q1-E1-F3
taggctattatgatacagtaacttgtgtacaacatatacataaagtcaaaagagtaaaagcaaatggattttacaccatactataattattttatatatccctcgttgc

SEQ ID NO: 13944 - DNA, 249 bp, Glycine max
  Clone ID: LIB3040-037-Q1-E1-F4
taatggggagggaaaaagattccacggttctcgagttcggtgcgtcgatgctagcattctcttctgcaactttcgcggggagcttcattcaccatggatgtccgtgccgaggatgctttgttgtttgaaccgtcagtgtttcgcatctctaggaaaactggtaatggaaagcgtcccggaaggggtgcgaaatgcgtttggaaatgtcttgcgcttggtcatcatactcccacggaagccatcgaacga

SEQ ID NO: 13945 - DNA, 314 bp, Glycine max
  Clone ID: LIB3040-037-Q1-E1-F5
ggagcgaacaagatattaaggtttttgagtgcggtgcggcgatgctagcactctcttctgcagctttcgccgacagcttcattcaccatggctggacaaaccgagaaggcttttttgaaacaaccaatagtgtttctcaggctcgaataaaactgggaagggaaagcgacccggaaagggtgggaaccgcttttggaaatccaatgggcttggatttaagactcccacggaagccaaccaaggaatctacattgacaagaagtgcgccttcactggcaatgtctccaaccgtggccgtatcttggctggaacat

SEQ ID NO: 13946 - DNA, 145 bp, Glycine max
  Clone ID: LIB3040-037-Q1-E1-F7
gtctttaattcttcgtcaaaaaaaaaaaaaaaaaaaaaaaaaaaaaaaaaaaaaaaaaaaaaaaaaaaaaaaaaaaaaaaaaaaaaaaaataaaaaaaaaaaaaaaaaaaaaaaaaaaaaaaaaaaaaaaaaaaggcaactaaaa

SEQ ID NO: 13947 - DNA, 204 bp, Glycine max
  Clone ID: LIB3040-037-Q1-E1-F8
gatggggttttatcatgagcgcgaacaccgattgtgtcaatgttcctgtgagctcaaggcaagggagagaatagtacaataaaaaaaaagatgcatgtttggaagtttttctttcttcttgaagaagagaaaataaaatggcttgttcaatatatgggacaagcgtttcatgctgcaaataataatgaatgattttcaggggct

SEQ ID NO: 13948 - DNA, 338 bp, Glycine max
  Clone ID: LIB3040-037-Q1-E1-F9
ggtggtattttggcagcgacacgtatcttcatcaagaatcgcagaagcagtttccggtgcatcgcatcgtcttccaaaatgaacgacgcagatgtcgcgaagcaaatccagcagatggtgcgtttcatccgccaggaagctgatgagaaagccaacgagatctctgtatctgccgaagaggaattcaatatcgagaagctgcagttggttgaagccgaaaagaagaagatcaggcaagaatacgaacgcaatgagcgccaagtcgaaattcgcaagaagattgagtactcactgcagctgaatgcttctcggattaaagttcttcaagctcaagatga

SEQ ID NO: 13949 - DNA, 353 bp, Glycine max
  Clone ID: LIB3040-037-Q1-E1-G10
gaagagaaaaatgagtataattcaatacaacgcatcatgttaagagtgaaggtactgaccgagcgaaagcatatataatacatactgagtgcttacagttgctgcgtcgcaaggtatcggcagcaacagataactatcatcacaattttcgatcactgcattggttcagtggacaagggatttgaactacctgacttgcatacgtgatagcttcaaagttgcagaagttgcacgctagagcatctcaagcgtcacaatttgcacccacacgtggaactaacgactactggcaattgctggaacataatatgccatacattcaggagcctcctacagtagagaaatgcaccctg

SEQ ID NO: 13950 - DNA, 58 bp, Glycine max
  Clone ID: LIB3040-037-Q1-E1-G11
gaccagtccccgtttgttccgctgcaaaacaaaaacaccgcgtcttccccgtgcggcg

SEQ ID NO: 13951 - DNA, 383 bp, Glycine max
  Clone ID: LIB3040-037-Q1-E1-G12
ggtgctgttccaagtcccatagcagcgatgggaatcgatcttaatgctgggggtaagagcaaaaagaccaaaagaacagcaccaaaatccaatgacatctacctcaaattacttgtcaagctttatcggttccttgttcgaaggactggcagcaatttcaatgctgttatactcaagcgcttgttcatgagcaaggttaacaagcctccaatttctttgtcaaggttaattaagtatacaaaggggaaggaggataaaattgctgtaatagtggggactgtaactgatgatatcagagtatatgaagttccagcattgaaaattacagcactcaagtttactgagagagcacgtgcaagaatagaaaacgctggtggtgaatg

SEQ ID NO: 13952 - DNA, 125 bp, Glycine max
  Clone ID: LIB3040-037-Q1-E1-G2
aaggtgtatcattgacaaaaaatagcttaaaagtaaccccataacgttttcgacgtatcattgacaaaatttcattgaaagcccagaggggcaaaaagactgcatgcatgaaggtgtgctttctc

SEQ ID NO: 13953 - DNA, 385 bp, Glycine max
  Clone ID: LIB3040-037-Q1-E1-G3
gatatttctaactcccaacacttccatatcttatcttctcctcctccatctttgaggttctcacggaaacttctgaagatggctggcatagcattcggaagcttcaatgattctttcagtttggcctccatcaaggcctacattgctgagttcatctcaacccttctctttgtttttgctggtgttggttcagccatagcctatgctaagttgacatcagatgcagctcttgatccaactgggttggtagctgttgccatttgccatggttttgctctcttcgttgctgtttctgttggagccaacatttctggtggccatgtcaaccctgctgtgaccttcgggttggctcttgggggccacatcaccatcctcactggtctct

SEQ ID NO: 13954 - DNA, 355 bp, Glycine max
  Clone ID: LIB3040-037-Q1-E1-G5
gagtgtgtgcgactttccattcgggcacagcgccaatctctgcagcgccttcgatctagagcacatgacaaagataccaaccaaagctggcattgataggcaatacagtactcgtaaaggtgccagtctgcgaaagcagattaagaagatggaagttagtcagcacaccatatttgatctgtgaattttgtgggaagtatgctgtgacgaggaacgctgtatgaatatggggatgcaaggactgtggtaaactgaaagcaggctgtgcttagacattgactaccgcatgtgctgtgacagtaccgagcaccatcacgacgttgagggagcagactgagagttgagcattttgttg

SEQ ID NO: 13955 - DNA, 366 bp, Glycine max
  unsure (1)..(366): unsure at all n locations
  Clone ID: LIB3040-037-Q1-E1-G6
gaatcctctgttgtttctcagccgcctcggctagggttcggaaacgaagaagggttctgttttcttttcgcgatgagggccaagtggaagaagaagcgtatgaggaggctgaagaggaagcgccgaaagatgagacagagatccaagtagtgcgttaaacctagtttgtttccgttgcttttacaattgcttatgttgtcaaataggacacccagttgttagtggcactggtctctcctttttgatgttttgatacattttgttggattttatttcgtcttatgttcttagctgaaaacaatgctgttactgcgtttgcgaatcaacaggatatcttgtttgcatttctgtntctctctttgctac

SEQ ID NO: 13956 - DNA, 373 bp, Glycine max
  unsure (1)..(373): unsure at all n locations
  Clone ID: LIB3040-037-Q1-E1-G7
gacaacacagaacaaaaacaaagaaaaaaaaaaacccttagccaacacaaccatcatggccacctctgctattcagcaatcagcattcactggtcaaactgctctgaagcagctcaatgagttcgtccgcaagaccggtggcgccggcaaaggtcgcactaacatgcgccgcaccgtcaagagtgctcctcagagcatttggtatggccctgaccgtcccaagtacttgggtccattctcggagcagattccatcatacctgaccggagaattccctggtgactacggatgggacactgctggattatcagctgnaccggaaaccttcgccaggaaccgggagctggaggtgattcacagcagatgggcaatg

SEQ ID NO: 13957 - DNA, 298 bp, Glycine max
  Clone ID: LIB3040-037-Q1-E1-G9
ggggctatggagcactatacttggtttcggctttccctattattataggtatttcagttgttctgattttgttttacaattccctccagtaggaaattgcattccactcaaattcagtgtataatgttacactatattgaaatgagttagtatatcgcaatgttcacctaacatcaaaaaaaaaaaaaaaaaaaaaaaaaaaaaaaaaaaaaaaaaaaaaaaaaaaaaaaaaaaaaaaaaaaaaaaaaaaaaaaaaaaaacctaataacctttcaaaacaattcaacacccctcaatg

SEQ ID NO: 13958 - DNA, 120 bp, Glycine max
  unsure (1)..(120): unsure at all n locations
  Clone ID: LIB3040-037-Q1-E1-H10
taacgatacggctgctataaaccacaccatgggtgtattacacatgctcaatgtttatgttgctttcagtcagtttagatgatactgccacatcnttgaatcaacctttgagagtccaaa

SEQ ID NO: 13959 - DNA, 383 bp, Glycine max
  unsure (1)..(383): unsure at all n locations
  Clone ID: LIB3040-037-Q1-E1-H12
gaactcacacttcaactttttcataacacaaagcacaaagcaaagctcatccttgagttaaaaaatggcagcagcttcttccatggctctctcatccccatccttggctggcaaggccgtgaagctgggcccatcagccccagaagtgggaagggtgagcatgaggaagaccgtcaccaagcaggtctcctcangaagcccatggtacgggccagaccgagtcaagtacttgggcccattctctggcgagccccgtcctaactaaccggtgagttccaggcgactacggctgggacactgctgggctttccgcagacccagaaaccttcgccaagaaacgtgaactcgaagtgattcactccaggtgggccatgctcggagcc

SEQ ID NO: 13960 - DNA, 381 bp, Glycine max
  unsure (1)..(381): unsure at all n locations
  Clone ID: LIB3040-037-Q1-E1-H3
gactcttgtctccccagcattcatattaatatcatgccctccttctgcatccaaaccttcattttgtagtgggtgggggtttctcatttctctgccgttccatggatcgggaaggaggatccaacggcggatcttgctactactccgttctcgggattcgtanggacgcctccttctctgatattcgcactgcctaccgcaaactcgctatgaggtggcacccggacaagtgggctcagaatcctgcaaccgctggcgaagccaagcggcggtttcagcaaatccaagaagcctactcagttctctccgatcagtctaaaggtcaatgtacgatgcggggctctacgattctttggaggaagaagaccaagacttttgtga

SEQ ID NO: 13961 - DNA, 376 bp, Glycine max
  Clone ID: LIB3040-037-Q1-E1-H4
ggcagcagcacctttaaacgccgaaggttcatccaatctccgaaggccttcaccggattgcaaccatgtcgaggagaaaggttagagagccaaaggaggaaaacgtgactctgggcccagctgttagagatggtgaacatgtttttggagtcgctcgcatctttgcctccttcaatgacaccttcattcatgtcactgatctgtctgggagggaaacacttgtccgcatcactggcgggatgaaggttaaagctgacagagatgaatcatctccatatgctgctatgcttgctgcgcaggatgttgctgctagatgcaaggaactgggcataactgctcttcatatcaagctccgtgccacaggtggaaacaagac

SEQ ID NO: 13962 - DNA, 369 bp, Glycine max
  Clone ID: LIB3040-037-Q1-E1-H5
ggctcgcgttcacaacacaaaccctagaagccaacatttttcaggaacgagtgcgagcagaggtagtggagtgcggatgcgtaattgaattgccagaattaaaagtgttcattcagttatttctttgattcttgctttcattttggaccgtgctgctcatcatcacaggatctttcaggaataatttggagacgtattttaatgaagttagatcattggaagcagttagattcaaggcgctttgcatccagtgggcacagtattatctaaaatttagaaatcaaacataggatgttagacaactatgtaactttaggttacttaattagtttacatactttgcattacattttttacaattgttgtttc

SEQ ID NO: 13963 - DNA, 379 bp, Glycine max
  unsure (1)..(379): unsure at all n locations
  Clone ID: LIB3040-037-Q1-E1-H6
gatgccgaaaagtagtaccaagatggcttcagttgtgtatctcctctttggcttccatctcattgttatcatgtcaagttccttacccgcaactagtgaagtgtttgcaaaacagtatccatccacagaacccgtggaagaaaaactcacccaactccacttctatttccataacaacataacgggggaacacccaactgctatgaaaactgttttgcctcctaaggggtccattcatggttttggggctacttacatgatggatgaccctctaactgaaggaccaagtccaacttcaaagcttgtgggaagatctcanggaatatacgctttggcttcacaacatgagcctgggttgctcatggtgacaaattttctc

SEQ ID NO: 13964 - DNA, 109 bp, Glycine max
  Clone ID: LIB3040-037-Q1-E1-H7
attactattactgatcaatcaaaatatctatcaaaagtaaaaagcgaagagaagggaaaaactttaatttttttatggtaaaaaattcaattatacctgttatttcact

SEQ ID NO: 13965 - DNA, 244 bp, Glycine max
  Clone ID: LIB3040-037-Q1-E1-H8
gacatactcttcttcttcttccaatggcgctcactgcttcgctcgctaacaacgcatttctgaaaatcccaacactccatcatggcgaatgctcactgtcttcgtcatccttcatcggttctcggctcacactctcgcgctcttgtactcttcaagggaaccaattgctttcgagaaagcaattcgtggttttcgcgaggaagatttcggggttggaggaggccatgaatatcagaagagaacg

SEQ ID NO: 13966 - DNA, 374 bp, Glycine max
  Clone ID: LIB3040-037-Q1-E1-H9
gaaggtggttgtggaagaagagatggaggaagcaaagggagtagtgaagcacgtgctcctagctaagttcaaggacgacgtcactccagagcggattgaagagctcatcaaggactatgccaatctggtcaatctcatcccacccatgaagtcattccattggggcaaggatgtaagtgctgaaaacctgcatcaaggcttcactcatgtctttgaatcaacctttgagagtccagaaggcgttgcagagtatgtagctcatcctgcccatgttgaatatgcaaatttgttcctttcctgcttggagaaagtcattgtgattgactataagcctaccgttgttaagctttgattggagaagtaaagcctcgttc

SEQ ID NO: 13967 - DNA, 332 bp, Glycine max
  Clone ID: LIB3040-038-Q1-E1-A10
ggtccttctctctctctccctctttctcgtcactagctctgtgcattcttctctcgctctctgccttccatcacactcgggatttcctttcccaagatagtagaagatggcagacactgaggatattcaacctcttgtttgtgacaatggaacaggaatggttaaggctggatttgctggagatgatgccccacgtgctgtgtttcccagcattgtaggtcgtcctcgtcacactggtgtgatggttggcatgggccaaaaagatgcatatgttggtgatgaggcacaatctaagaggggtattttgactctcaagtatcccaatgaccatg

SEQ ID NO: 13968 - DNA, 402 bp, Glycine max
  Clone ID: LIB3040-038-Q1-E1-A11
gccgctctctgagaaaaacagatagtgtgggagagagaagagcggaagagaaaatgacgaccaggttcaagaagaacacgaagaagagaggtcacgtcagcgccggacacggccgtatcggaaagcaccgcaagcatcccggaggtcgcggtaacgccggtggcatgcatcaccaccgtatcctcttcgacaagtaccatcctggtttcttcgggaaggtaggcatgcgctacttccacaaacttcgcaacaaattctacaatccgatcatcaacatcgacaagctgtggtccctcctcccccaggaggccaaagacaatgccaccgccgacaaaggcaccttgctcgatgtcaaccaatttcgggttaccttaaaggttttgggtaacaggggtttttccc

SEQ ID NO: 13969 - DNA, 320 bp, Glycine max
  Clone ID: LIB3040-038-Q1-E1-A12
ctatagaaacaatgaaagtggacgaatggtgctaaatcaaacctttacaattgaacctatgctgactattggcagcatcaatcctgtgatgtggaatgacgactggacagttgtaacggaagatggaagcctttcagcacagtttgaacacaccattctgataacacctgacggggctgagattatgactcaatgctgaaagatgcaacacttgttatttatggataaaaccacatcgagaaacttcattatttaaatgcaactgatttaattacttctaaaaaaaaaaaaaaagacaaaaaaaaaaaagcggccgctct

SEQ ID NO: 13970 - DNA, 192 bp, Glycine max
  Clone ID: LIB3040-038-Q1-E1-A2
aggttacggcttccagaaaaacaacaaaaggaaggaaaatgggtgttttgatttgtaaaatttccggaattttataatggggttttaaattagttggcctaaaaaggaatcctccttgaaggccgttttacccacccttttttaaggtaaattaaaaaaattaaattagggaaatttggccaaattcaaccc

SEQ ID NO: 13971 - DNA, 338 bp, Glycine max
  Clone ID: LIB3040-038-Q1-E1-A4
gacaacacagaacaaaaacaaagaaaaaaaaaaacccttggccaacacaaccatcatggccacctctgctattcagcaatcagcattcactggtcaaactgctctgaagcagctcaatgagttcgtccgcaagaccggtggcgccggcaaaggtcgcactaacatgcgccgcaccgtcaagagtgctcctcagagcatttggtatggccctgaccgtcccaagtacttgggtccattctcggagcagattccatcatacctgaccggagaattccctggtgactacggatgggacactgctggattatcagctgacccggaaaccttcgccaggaacc

SEQ ID NO: 13972 - DNA, 85 bp, Glycine max
  Clone ID: LIB3040-038-Q1-E1-A5
gaataatcacataacatgaagagaaagataagaagaaagaggaacatataaagaaatagatagatgtcgtatagtgatctgatgg

SEQ ID NO: 13973 - DNA, 87 bp, Glycine max
  Clone ID: LIB3040-038-Q1-E1-A6
gtgtaaatggtcattctattggcttttaacttgcctgttgtgatactcctggaattgtaacgctgttggattttaagagttctttgc

SEQ ID NO: 13974 - DNA, 328 bp, Glycine max
  unsure (1)..(328): unsure at all n locations
  Clone ID: LIB3040-038-Q1-E1-A7
ggccacggcattctccggccccattgtcaccgtgaaggtgtttgaagacaacgtgttggtgagggagcttgttgagacgaaaggcgaaggaagagtattggttgttgatggaggaggaagcttgaggtgtgcattgatgggagggaatttggtacagattgcatataacatggggtgggctgggattgtggtgaatggttgcgttagagatgtggatgatatcaatgcgtgtaatattggcgtcaaagccttggcttctcatccactcagatccaacaaaaagcgcactggtgaaaagaatgtccctgtttangttggtggaacattt

SEQ ID NO: 13975 - DNA, 325 bp, Glycine max
  Clone ID: LIB3040-038-Q1-E1-A8
gacatagctgagagagaaaggaaaggttaactaagaagcaatacttcaatggccacccttgttgttcataaccaaacttcttctgctcaagatgctgaggctctccaacaggctttcaaaggatggggggctgatgacaaggccattatagcaatactgggtcacagaaatgttcatcagaggcaagaaatcagaaaagcttatgaggagatttaccaagaggatctcatcaaacgccttgagtccgagatctctggtgactttgagagagctatgtaccggtggatgttgcagcctgcggatcgtgatgctgttttggtgaatg

SEQ ID NO: 13976 - DNA, 336 bp, Glycine max
  Clone ID: LIB3040-038-Q1-E1-A9
ggaagctgtgacagtttcagatgagtgaagcaacaacaagaaacgaacggcgggttctggtggcggtggacgaaggcgaggaaagtatgtacgctctttcttggagcctcaagaacataattttccaaaattccaacgatacccttatccttctttacgtcaagccccctcatgccgtttattcccccttagattccacagccaggatagatcatcctgaaactccaggatatttgttttcgtcggacgtaagtgcggccatcgagaagtatggccaagaagtggcagattgcgtgttagagaaagcaaaaaaattgtgtaaagatctccaaaacg

SEQ ID NO: 13977 - DNA, 353 bp, Glycine max
  Clone ID: LIB3040-038-Q1-E1-B11
gatttcactcccaaacaaacaaagaagaagttagatttgaaattgaaagagaaacaaacttgggatataagaagaatggctagtggaggaggctatggagacgcgaaccagaaggtagattacgtgttcaaagtggtgctaattggtgattcagccgtggggaagtcgcagatacttgcacgcttcgcgagaaacgagttcagtttggattcaaaggccacaatcggcgtcgagttccaaacgcgcactttggtcattcagcacaagagcgtaaaggctcagatctgggacactgccggccaagaacgatacagagcagttacaagtgcatactacaggggtgctgttggggc

SEQ ID NO: 13978 - DNA, 322 bp, Glycine max
  Clone ID: LIB3040-038-Q1-E1-B12
ggcgagagaagttattaaggtttttgagtgcggcggtccaaacactcttctctgcagcttttgcctacaactcccttcaccatggctgaacaaaccgagaaagcttttctgaagcaaccaaaagtgtttctcagcacaaagaagactgggaagggaaagagacctggaaaaggtgggaaccgcttttggaagtccattgggcttggatttaagactcccagggaagccatcgaaggaacctatattgacaagaagtgccccttcactggcaatgtttccatccgtggccgtatcttggctggaacatgtcacagtgctaaga

SEQ ID NO: 13979 - DNA, 318 bp, Glycine max
  Clone ID: LIB3040-038-Q1-E1-B4
ggcgtcagaactacgctgaagaatatcatcaccatcaaagtgtttcgttggaaggggaatttggcagatcattggaagaaaatggcgggtggtggaaaggtttcgttcaaagtcacactcacctccgatccaaaattacccttcaaagtgtttagcgttccagaggctgcgccttttactgccgttctcaaattcgccgccgaagaattcaaagtcccgccccagaccagcgctatcatcaccaatgatggtgttggcataaatccccagcagagcgcaggcaatgtcttccttaaacatggttcaaaattgcgcctg

SEQ ID NO: 13980 - DNA, 295 bp, Glycine max
  Clone ID: LIB3040-038-Q1-E1-B5
ggagtgaaaccctagctagccacaatgcagatattcgtgaaaaccctaacggggaagacgataaccctagaggtagagtcttcggacacgatcgacaatgtgaaggcgaagattcaggacaaggagggcatcccgccggattagcaacgcctgatcttcgccggaaagcagctggaggacgggcgcacccttgccgactacaacatccagaaggagtccaccctccacctcgtcctccgcctccgcggcggcgccaagaagcgcaagaagaagacctacaccaagcccaagaaga

SEQ ID NO: 13981 - DNA, 317 bp, Glycine max
  Clone ID: LIB3040-038-Q1-E1-B6
ggcgcctgatttctcagttctctcacacactcattcggtgctccgaatctcagattctagggttagggttcccaatttctccaccgatcagaaaatgagttcaactggtggttctaccaagggcggaaggggcaagcccaaagcctccaaatccgtttcaagatcgcagaaagctggtctccaattccccgttggaagaatcgctcgattccttaaggctgggaaatacgccgagcgtgttggtgctggtgctcctgtgtacctctctgcagtgctcgaatatctcgctgctgaggttttggaattggctgggaatg

SEQ ID NO: 13982 - DNA, 355 bp, Glycine max
  Clone ID: LIB3040-038-Q1-E1-B7
ggaatcgtcttttacttctcagcagcttcggctagggttcagaaacgaaaaagggttcggtgttctgttcgcgatgagagccaagtggaagaagaagcgtatgaggaggttgaagaggaagcgccgaaagatgagacagagatccaagtagtgcgttaaacctagtttgtttctgttgcttttacaattgcttatgttgtcgaatgggacacccagttgttagtggcactggtttctcctttttgatgtttgatacattttgttggattcaagtagtttatgttcgtcttatgttattagctcaaaacaatgttgttactgcttttgctaatcaacatgatttcctaattggcac

SEQ ID NO: 13983 - DNA, 307 bp, Glycine max
  Clone ID: LIB3040-038-Q1-E1-B8
gacacaaaaaatttctagagcgagaaagtgagaggagagagaaagtagctgatcctccatggcctccaccaaggaacgcgaaaactttgtctacaccgccaagctcgccgaacaagccgaacgctatgaagaaatggtggaagcaatgaagaatgtggcgaagctgaacgtggaattgacggtcgaggagcggaaccttctgtcggtagggtacaagaacgtggtgggtgctcgtagggcttcgtggaggattctatcgtcgattgaacagaaagaagaagctaaagggaacgatgtgagtgtgaag

SEQ ID NO: 13984 - DNA, 351 bp, Glycine max
  Clone ID: LIB3040-038-Q1-E1-B9
ttacaggacaaacgtgaagaagcctgatactgacttcgaattttacaagtgatgatgttgtagcttttagattggtgtgtgctcgcgaagttaatatacagtgcagggtacatttctagagggatcaccacgatcatgagaaatgaagcaatgtttctgtttcttgttggcctttcatcttttgtaatttagattatttaatttactaaatatattaattgtggcagcttaatgttgagtacgtactgcatgtctgatttcaaaagtaatatggatgacttgcttctgccttcattttgccttgatgctaaaaacaagatgacttaagtctataaaatgagtatgttttta

SEQ ID NO: 13985 - DNA, 347 bp, Glycine max
  Clone ID: LIB3040-038-Q1-E1-C10
gggggactcatacaatagagaccagcttttgcttctttgtgaacatggagatgaggaaatcatgtggcttcttcttcttgctcctcctccttgtctttgcttcccaggtggtggtgcagacggagggaagagtgtgtgagtcacaaagccacgggttccatggtttgtgtaatagagaccacaactgtgctttggtctgcaggaacgaaggtttctccggtggcaggtgcaaaggcttccgccgccgctgcttttgcaccaggatttgttgagatctcatcaaacactactcttgccatgcaaattaataaatcatagctaggccaaataaattgcatctactcttt

SEQ ID NO: 13986 - DNA, 322 bp, Glycine max
  Clone ID: LIB3040-038-Q1-E1-C11
gagcaacatggtgaagctggtggagagatttacttgccagaagcttacgttagaaccaagaggactacttaatggagcaaatcagttggaagaacttgtagctagcttcgcaactggcttatctgagtgtggagaagcattatcaagccttaggagtaggagaacgagtactgtttgtgatgaatgtctatggtttaagaaatctgtctttagtcaacttgtgtgttttgttattcagttctcagcaataaactgctctggcaatctagtttcatgttctaaaacaataaggaaacaagttaaagaaaaagcggccgctcta

SEQ ID NO: 13987 - DNA, 355 bp, Glycine max
  Clone ID: LIB3040-038-Q1-E1-C12
gatcacatttaggatcaaaacaacaaattttcagactcaacaagcttcgaaccaaatcttattgagaaaatgtctggtcatggaaagggtggaaagggtttgggaaagggatgtgccaagaggcacatgaaggttcttcgtgacaacatccagggcatcacgaaacctgcgattcgtacgttaacgataagaggtggcgtgaaaaggatcagtggtttgatctacaatgaaaccatatgagttctgaagatattcttggagaacgtgattcgcgatgctgtgacctacactgaccacgctaggaggaagacggttactgctatggatgttgtttatgctcataagaggcaaggaa

SEQ ID NO: 13988 - DNA, 316 bp, Glycine max
  Clone ID: LIB3040-038-Q1-E1-C2
gatatcagaagctcagacctagggatttcggccgtttgctccccaaaaagggaagaagcagattctgtcctttgaaatcaacaagaaaagatgtcaggtgaagaggtagctgttgcagttgaggtacctgctacttcaattccaggtgagccaatggacatcatgactgctctacagcttgtgctgagaaaatctctggcctatggtggtcttgcacgaggtcttcatgaaggtgccaaggtgatcgagaagcatgctgcacagctctgtgttctagcagaagattgtgaccaacctgattatgtgaaactggtga

SEQ ID NO: 13989 - DNA, 299 bp, Glycine max
  Clone ID: LIB3040-038-Q1-E1-C3
ggttccgctgcaaaacaaaaacaccgcgtcttccccgtgcggggaaaaagaacagaaaagaaaagaaccctcaattttccgggaaaaccctccccacaatggtttcccgggaaaacaccaattggctcttcgattacggcttgatcgacgatattcccgttccggacgccaccttcggcgtcaattcctccccttcacatggccccctaacgccttgaacgcttcctccaatgtcggcgttgaaattgacggctcgttgggggattctgacagtctcaaagagtctggctcaaagaaaa

SEQ ID NO: 13990 - DNA, 329 bp, Glycine max
  Clone ID: LIB3040-038-Q1-E1-C4
gagagttgcatcgactgaaacccctaggaaaaaccccagtttctctctttcactagttccgttcaagttctaaccaagcactcacagtacttttgcttctctcgaggatgtctctacgagtgctgaaccctaacgccgaagtgctgaacaaatcggcggcacttcacatgaacatcaatgccgccaagggtttgcaagatgtcctcaaaaccaacctcggtcccaaaggaaccatcaaaatgctcgttggtggtgctggtgatatcaagcttaccaaagatggcaacactctcttgaaagagatgcaaatccaaaacccgacggcgatt

SEQ ID NO: 13991 - DNA, 114 bp, Glycine max
  Clone ID: LIB3040-038-Q1-E1-C5
agaggttggtgagcgaagtggaggcgtagagcgagaccgcgagaggaaggatatggtaatttctaaaattaaaatggtttcaaattgaaacgatgtagtttcaactataacctc

SEQ ID NO: 13992 - DNA, 329 bp, Glycine max
  Clone ID: LIB3040-038-Q1-E1-C6
gactccactcacaactgaaaccaaaactgaaaaaaaaaacaaacaataccataacatggcttcttccaccatcacctcctccttcctaacatcacccccttcatctctcttcaacaaatcatcatccccttccttccatgccacccctactctccgccccctcgcgccacgcgcctccatgtccgcctcagcgccgccctacgacttcggatcgttccggttcgatccgattagagagtcgattgtgtcgcgcgagatgacccgcaggtacatgatcgacatggtcacccacgccgacaccgacgtcgtcatcgttggcgcgggctccg

SEQ ID NO: 13993 - DNA, 344 bp, Glycine max
  Clone ID: LIB3040-038-Q1-E1-C8
gatatacctctctcatttcccaacgcagcagcagcggcagcttcatctgtttttctgcatcggcgtgaacaatggcgacgtacgctgcgatgaagcccaataagcctggcttggaggagtcccaagaacagatccacaagataaggatcaccctttcctccaagcacgtcaaaaatctcgagaaggtttgtggggacttggttcgtggtgcaaaggataagaggctcaaggttaagggacctgtcaggatgcccactaaggttcttcacatcactaccaggaagtccccctgtggtgaaggtaccaacacatgggacagatttgaacttcgtgtgcacaagaag

SEQ ID NO: 13994 - DNA, 333 bp, Glycine max
  Clone ID: LIB3040-038-Q1-E1-C9
gatcccaatcagaaaaagttagggtttgtaactttgtcttttgcttgcgaatctgaatcgaataataatcaatcaatcatcatgtcgtcggcgaagaagatcacactgaagagttcggacggcgaggctttcgaggtggacgaggcggtggcgctggagtctcagacgataaagcacatgatcgaggacgactgcgccgacagcggcatccctctgccgaacgtgacgagcaagatcctggcgaaggtgatcgagtactgcaagaagcacgtcgaggccgcgaatcccgaagacaaaccctccgaggacgatctcaaagcctgggacgccgat

SEQ ID NO: 13995 - DNA, 260 bp, Glycine max
  Clone ID: LIB3040-038-Q1-E1-D1
ttatatagttaagccctcttttatgcgtcaaaaaaaaattacaaagaaattactgaagactagcctttagcaagagagtcttgggtgcacgagaggggttattttaaccttttaaaattcataaaagttcaaaagaataatttacaaaaattagtatgtaaaataaatttacctaaaaatatattccagataaagaaggaatattataatagatattttttataaaaaaaaaaaaacaaaaaaaaaaaaaaaagcgggcg

SEQ ID NO: 13996 - DNA, 342 bp, Glycine max
  Clone ID: LIB3040-038-Q1-E1-D10
gatccaactctctaaacaacacattaacctttctcattccccatctcctcaccttattcagccactgctaatttctagggttccgaaatggacgctggcggaaagatcaagaagggcgccggaggaagaaagggcggcggccctaagaagaagccggtttcaaggtccgtcaaggccggtctccaattccccgtcggaagaattggccgttatttgaagaaaggaaggtacgcccagcgtgtcggtaccggtgctcccgtttacttggccgcagttctcgagtacctagctgctgaagtgcttgagttggctgggaatgctgcacgtgacaacaagaagaac

SEQ ID NO: 13997 - DNA, 353 bp, Glycine max
  unsure (1)..(353): unsure at all n locations
  Clone ID: LIB3040-038-Q1-E1-D11
gacaactaaacacactagctatagctagaatcncctccaatccctctttgtctttgtgcttttctttagttctttccaaaacagcaacaatgatgagttgccaagcatggcctgaacccatagttcgagtccaatccttagctgacagtggcctaagctcaatcncttcacgctatattaggccacactctcaaagactctccaacaccacttcttttaaactttcacaaaccgaacatgatcatggtcacggtcgagagactcgtgaccatgatcatgttaacatccccgttattgacctggaacatcttttctcggaggatgaaatcctccgagaaaagatattccgacac

SEQ ID NO: 13998 - DNA, 336 bp, Glycine max
  Clone ID: LIB3040-038-Q1-E1-D12
gagggttacacgccgtcgtcgctgtttttgtgtgtcgcttcttcgtaggtgcagctgcaatggtgaagggacgccaaggagaacgtgtcagactctacgtgaggggtacaatccttggatacaaaaggtccaagtcaaaccagtatccaaatacatccctgatccaaattgacggtgtgaatgccaaagaagaagtagcatggtatgctggcaagaaaatggcctatatctacaaagctaatgtgaagaagaatggaagccattaccgctgcatatggggcaaggttacaaggcctcatggtaacagtggtattgtccgtgcaaaattcaagtcga

SEQ ID NO: 13999 - DNA, 205 bp, Glycine max
  Clone ID: LIB3040-038-Q1-E1-D2
ggaccgcgttcttttctacggagcctcgaccaagaagaatcgcagagagaagagggtcagagtgagaaagagagagagagagagagaaactgagagaaattcgcaaaccctaatttcggaaagatcggcgatggctgcctccaaggatcgcgagaacttcgtctacatcgccaagctcgccgaacaggccgagcgatacgaagag

SEQ ID NO: 14000 - DNA, 316 bp, Glycine max
  Clone ID: LIB3040-038-Q1-E1-D3
gaaaatacggaacttgaaaccctcccaatataaaccctcgcttccttgtgtactctctcactttccattctcttcaaacctaacgcagcatcgctattctcttcattccatggctttgcccaaccagcaaaccgtggattaccctagtttcaaactcgttatcgtcggcgatggtggcacaggaaagacaacctttgtgaaaaagcatctcaccggaattcgagaagaaatatgagccaaccatcggtgtggaggttcacccattggattttttcacaaactgtggaaagattcgattttactgctgggatactgc

SEQ ID NO: 14001 - DNA, 317 bp, Glycine max
  Clone ID: LIB3040-038-Q1-E1-D4
gacacataatagcacgcaattttcatttttctctctcccttagtcaaagggattcatcgttcttcttcccacgttatttagaaaagcaagatggtgaagatttgctgcattggtgctgggtatgtggggggtcctactatggcagtcattgcacttaagtgcccatccattgaagtcgctgttgttgatatctctaaatcccgcattgcagcctggaacatcgaccagcttcctatctatgaacctggccttgatggtgttgtgaagcaatgccgtggcaagaacctcttcttcagcactgaagttgaaaagcatgt

SEQ ID NO: 14002 - DNA, 346 bp, Glycine max
  Clone ID: LIB3040-038-Q1-E1-D6
ggctcccactaataaacttttcaaataattaaacccacacatgaccatggcggaagccactgcatcggaactggaaatcgtcgagcccaccaccacggacgccgccgccgcagacgtggctgtcgacggcgttgaatcaaacctgaagcggactagagaggacagcgatgacgaagaagacggtgtttcgaagaagcagaaggtggatgcagaagaaaagaaagcatcaggtcccgtgaaattgggtttcaaaagcttcgcctcttccgtggaaatgttcgattacttctacaatctccttcatgcttggcccgcttatctcaatcttaaccagtatgaacatatg

SEQ ID NO: 14003 - DNA, 357 bp, Glycine max
  Clone ID: LIB3040-038-Q1-E1-D7
agtgataagactgaagaattgaggtgtgttgtaaaggagtgcagtgctgagtggaaagggattttgtgagtccatgacaactaaactaagtccaggacagttactgccaaaacccacaccacactgcatttttcacagtcccaaaaccctcactttcttctttttttaattaaatgaagccctgtagctatagctctatttgtcggatattcatgttacacgcctccaaatcatatcaaatcaactgaaaaccattactaacttattaatgcatattttatgtatataatactactactataacaatatactagaatatagaccatagaatactatacatataagtaattttaacct

SEQ ID NO: 14004 - DNA, 343 bp, Glycine max
  Clone ID: LIB3040-038-Q1-E1-D8
gacagcgaaacagagagtgatttcagtgagtgatcggtgttcacttgatctcatcataatcgtcagcgtcaattgaagaagatgccgatcagaaacatcgccgtcggaaggcctgaagaggcgactcaccccgacacgttgaaggcggctttggctgagttcatctcaaccttcatcttcgtgttcgccggctcaggctccggcatcgcctacaacaagctcaccgacaacggcgctgccacccctgccggcctcatctccgcctccatcgcccatgcattcgccctcttcgtcgccgtctccgtcggcgccaacatctccggcggccacgtcaaccccgccg

SEQ ID NO: 14005 - DNA, 281 bp, Glycine max
  Clone ID: LIB3040-038-Q1-E1-D9
aggaagacgacagaagggaaagaaaggtaggtttctttcttatgaaaaggttattggactcttgtgctagaattgcttttttttggggagaaaaacgaaaattatcgtctaattgaatttctttgaaatagtgttgtatatagagaacatcttctatcatatctcatcgcatctttacagtttatagattgagaaagtgttccgttagtgttgtaagcgaccttgcttggttaacaatttggagagtttgcttttacacggaaacgaagactttcgagaac

SEQ ID NO: 14006 - DNA, 318 bp, Glycine max; identical to SEQ ID NO: 12670
  Clone ID: LIB3040-038-Q1-E1-E1

SEQ ID NO: 14007 - DNA, 248 bp, Glycine max
  Clone ID: LIB3040-038-Q1-E1-E10
ggtgtccaagcttatttgttgctttgtgcttaatggaaggcccttgagcttttctttctttctctgctctcttttcttttaggtttccactctcacacactctccctcttctctttctctgcaataatctctcttctcttcttcactctctcaactcctgccaaacccccatttccgcagttcttaaatttggagtctgatgtctccgccattgctggttaccgaagatgaagggcagtgccatgcct

SEQ ID NO: 14008 - DNA, 387 bp, Glycine max
  unsure (1)..(387): unsure at all n locations
  Clone ID: LIB3040-038-Q1-E1-E11
ggcttcgtctcagatcattctgcgcaggtaagacagagagaaagaactgacctcagcggcggcggcggcggcaacagaagaacaaccaccaccacacacaatgggtcgcgtgagaacaaaaacggtgaagaaatcctcccgccaggtgattgagcgttactactcgcgcatgaccctcgacttccacacaaacaaaaagcttctcgaagaagtggccatcatcccttccaagaggctgcggaacaagatcgcgggtttctccacgcatctcatgaagcgcatccagaagggtcccgttcgcggcatctccctcaagctccaggaggangagcgcgagcgccgcatggacttcgtccccgacgtctccgccatcaacaccgaccacat

SEQ ID NO: 14009 - DNA, 341 bp, Glycine max
  Clone ID: LIB3040-038-Q1-E1-E12
gatccaactctctaaacaacacattaacctttctcattccccatctcctcaccttattcagccactgctaatttctagggttccgaaatggacgctggcggaaagatcaagaagggcgccggaggaagaaagggcggcggccctaagaagaagccggtttcaaggtccgtcaaggccggtctccaattccccgtcggaagaattggccgttatttgaagaaaggaacgtacgcccagcgtgtcggtaccggtgctcccgtttacttggccgcagttctcgagtacctagctgctgaggtgcttgagttggctgggaatgctgcacgtgacaacaagaagaa

SEQ ID NO: 14010 - DNA, 103 bp, Glycine max
  Clone ID: LIB3040-038-Q1-E1-E3
ggcggaattcagatctagcgtttgcactttgcacaatgcgagttctataggatcgtttggttataccgattagtgttactaaaacaacgtttttgtgatatcg

SEQ ID NO: 14011 - DNA, 277 bp, Glycine max
  Clone ID: LIB3040-038-Q1-E1-E4
ggtcaatactttctcgtattttcccctcttcttcccctctctcgtgttatccgctttagttttctcgggaaaatcatggtgaaaggtccaggtctctactctgacatcggcaagagagctcgcgatcttctgttcaaggattatcagaatgaccacaagttcaccatcaccacttacacttccactggagtggaaatcacttcaactggagtcaggaaaggtgaaatatatttggccgatgtcagcactaaggtgaagaacaagaacatcacaactg

SEQ ID NO: 14012 - DNA, 330 bp, Glycine max
  Clone ID: LIB3040-038-Q1-E1-E5
ggcagcgcttgatttgaggccaggcaagccccactcaaccaccacacctctcctcgttcacgctacccctttctgctcttcttctacctttcaagttttaaaagtataaagatggcagagacattcctatttacctcagagtcggtgaacgagggacaccctgacaagctctgcgaccaaatctccgatgctgtcctcgacgcttgcctcgagcaggacccagacagcaaagttgcctgcgaaacatgcaccaaaaccaacttggtcatggtcttcggagaaatcacgaccaaggccaacgttgactacgagaagatagtgcgtgacacc

SEQ ID NO: 14013 - DNA, 332 bp, Glycine max
  Clone ID: LIB3040-038-Q1-E1-E6
ggagcagaatcttcaggccaagccaggtaagcacaaccaaagcaacaccccaaatggcttcagcttctgttcccatggcgttgtcactgagctctgttaccaacaacaacaagccttcatccgaagccttcttcaggccactacccctacgccaaccaaagaggaccctcttcaccacgaaggcagtgtcaaactccaagcctcaaatcaatgcatctttgaaggagaaggcagttgccggactcacagcagcttctgtgacagcatctatggtggttccggaggtggctcatgctgctggatatgagttctccccttccctaaagaacttt

SEQ ID NO: 14014 - DNA, 306 bp, Glycine max
  Clone ID: LIB3040-038-Q1-E1-E7
attcccaccattgggtccaccttggagacggtggaggataggaccattagtttcactgtctgggaggttggtggccaggataggattcgtcccttgtggaggcactgcttcgaaaatacacagggtcgcatttttgttgttcacagcaatgacagggagagatttgttaaggccagagatgagttgcacaggattttgattgaggatgaactgggatatgctgtatcgcttgtatttgcgaacagtcactatcttcccagtgcaatgaatgcggcccaaattactgagaacctgggatcccagtct

SEQ ID NO: 14015 - DNA, 332 bp, Glycine max
  Clone ID: LIB3040-038-Q1-E1-E8
ggttctcctacagattcttcagcaactgcgattttggatcggaacctcttctgcggcgtagcaatgggacactccaacgtttggaattctcacccaaaaaactacggtcctggttctcgcacttgccgagtgtgtgggaatccacatggattgatcaggaagtatggccttatgtgctgcaggcagtgcttccgtagcaatgccaaggaaattggcttcatcaagtatcgctaaaagagctgttgtcacctacggaccaatattatgttctggcactaggatgttttgaagatgttatgtttgaagaaacttgagacttgtttttttcatct

SEQ ID NO: 14016 - DNA, 152 bp, Glycine max
  Clone ID: LIB3040-038-Q1-E1-F1
actaatgaaattataaattatccataaattggatagaaagatctttcaacccttaattgccatttttttttaagaaaaattttcttgtccaaaggccttttaagggatagtgataaaatgaaaatggttcaggcaaaaggcccacaatttgg

SEQ ID NO: 14017 - DNA, 281 bp, Glycine max
  Clone ID: LIB3040-038-Q1-E1-F11
gaacagccaaaggacttgcccacgttcattctgttggtggtcccaaatttacacatggaaatattaagtcctcaaatgtcctcctcaaccaagataatgatggctgcatttctgattttggccttgctccccttatgaatgttcctgctaccccttctagaactgcaggttatcgtgctcctgaggtgattgaagcccgtaaacactctcataaatccgatgtgtatagctttggtgtcctccttcttgagatgcttaccgggaaagctcctctccaatct

SEQ ID NO: 14018 - DNA, 289 bp, Glycine max
  Clone ID: LIB3040-038-Q1-E1-F12
ggaatttgaaaaccaaaatcgaaatcaaaatcatttggctcctttgattcattcatcaaatcaaaaaatccattttccatgggcacttctcagagccgcgaaggcctcgaagtcaccgactcagactccgactacgaaaacgaagaagaaacagagcactacgaagacgcgaaaaccacccactccaccgagctcgatgacgtggacgcgaaactcaaagccttaaaactcaaataccaaacgccgtcctcctccgccaaaccgcttccccaaaacgcccttaaactct

SEQ ID NO: 14019 - DNA, 335 bp, Glycine max
  Clone ID: LIB3040-038-Q1-E1-F2
gagagtggtggggtgtgcagaagagcgtcgcagttgtaaccctaatcagaagaagcgcagcttcaagcgagtgacagccaccagccatgggtcgtatgcacagccgcggtaagggtatatcctcttctgctttgccctacaaaaggacacctcctagctggctcaagatctcttcgcaagatgtcgaagaaaatatctgcaagtttgcgaagaaaggtttgaccccgtctcagattggtgtcattctcagagattctcacggtattgctcaggtcaatagcgtcactggcagcaaaatccttcgcatcctcaaagctcacggacttgcgcctgag

SEQ ID NO: 14020 - DNA, 333 bp, Glycine max
  Clone ID: LIB3040-038-Q1-E1-F4
gatctcgtggaagtgtaagcaagcaaaaccctagcggcgcctgctttctttgttcgtgttttgcatcaggatggagtctcaggtgaagcacgcacttgttgtcaaagttatgggtcgtactggatccagaggacaagtgacccaggttagagtgaagtttttggatgatcagaaccgtcacatcatgaggaatgtgaaaggacctgtgagagaaggagacattctcaccctactcgagtctgaaagggaagcaagaagattgcgctagatggtctcttttttttggcttgcctccaaattcgaacaaaagcaatatttttcttgatatttaag

SEQ ID NO: 14021 - DNA, 309 bp, Glycine max
  Clone ID: LIB3040-038-Q1-E1-F5
ggactgagagcaattgcatcaacaacaaattgaaaggatgtcgatcttcgagtacaacggaagcgccgtggtggctatggtcggcaagaactgcttcgccattgccagcgaccgaaggctcggcgttcagctccaaaccatagccacggatttccaacgcatttccaagattcacgacaagctcttcatcgctctctctggcctcgccaccgatgctcaaacattgtatcagcgtcttgttttccggcacaaactgtatcagcttcgtgaagagagggatatgaaaccagagacctttgccaacttaat

SEQ ID NO: 14022 - DNA, 329 bp, Glycine max
  Clone ID: LIB3040-038-Q1-E1-F6
aacaaagaagagcgttgagacctacaagatctacatcttcaaggtgttgaagcaagtgcaccccgacatcgggatctccagcaaggctatggggatcatgaacagtttcataaacgacatcttcgagaagctcgcccaggagtcatcgcgtctcgctaggtacaacaagaagcccaccattacttccagggagatccaaacggcggtgcgtttggtcctccctggggagttggccaagcatgccgtttctgaaggcaccaaggccgtcaccaaattcaccagctcttgattggtttcgtgtgtttatgtcagggttttctgttagcccg

SEQ ID NO: 14023 - DNA, 328 bp, Glycine max
  Clone ID: LIB3040-038-Q1-E1-F7
gaacatttgtctctcatctttcaatttcaatcaacggttatacccttttctatttgagcatcatcatgtccaccgcagcgcagcccaaggccaagaaaacggcgtcgtccaagaagcccctctcccatcctaccttcgccgcgatgatagcggaggcgatagcgagtctgaaggagagaaccggttcgagccaatacgcgataaccaaattcatcgaaggcaagcacaaggagttgcctccaacctacaagaagcttgttctcgttcatctcaagaagtctgttgctgctggcaagctcgttaaggtcaaaaactctttcaagctcgc

SEQ ID NO: 14024 - DNA, 318 bp, Glycine max
  Clone ID: LIB3040-038-Q1-E1-F8
gatagggtttttgtcgttgcgactaagagttgctgcttcttccgccactcagcacttcgctccctctgtgcttcaccaaccatggccgaaatcgaagctaccgttccagatccctctcaaatcgacgtcaaacttttcaaccgctggagcttcgacgacgttgaggttactgatatgtctctggctgattacattggagtgtccccgtcaaagcatgctacatatgttcctcacactgctggtaggtactcagtgaagaggttcaggaaggcgcagtgccccattgttgagagactcaccaactctctcatgatgcac

SEQ ID NO: 14025 - DNA, 360 bp, Glycine max
  Clone ID: LIB3040-038-Q1-E1-F9
ggaagggagaattaggtttttagggtttacaccgagcagcgacacctccctcccgcagtagccatggttctcaaaactgaactatgccgattcagtggtgccaagatctaccccggaaagggcatcagatttgttcgtggtgattctcaagttttcctgtttgccaactcaaaatgtaagcggtatttccacaaccgcctgaagccctcaaagctcacctggactgctatgtacagaaagcaacacaaaaaggacattgctcaagaagctgtgaagaagaggagacgcgctgccaaaaagccttactctaggtccattgttggtgccactctggaagttatccagaaaaagagagctgag

SEQ ID NO: 14026 - DNA, 305 bp, Glycine max
  Clone ID: LIB3040-038-Q1-E1-G1
gaacagcgaaacagagagtgatttcagtgagtgatcggtgttcacttgatctcatcataatcgtcagcgtcaattgaagaagatgccgatcagaaacatcgccgtcggaaggcctgaagaggcgactcaccccgacacgttgaaggcggctttggctgagttcatctcaaccttcatcttcgtgttcgccggctcaggctccggcatcgcctacaacaagctcaccgacaacggcgctgccacccctgccggcctcatctccgcccccatcgcccatgcattcgccctcttcgtcgccgtctccg

SEQ ID NO: 14027 - DNA, 347 bp, Glycine max
  Clone ID: LIB3040-038-Q1-E1-G12
gacttcacaactcaaactgcttcattgcataattgcagataagatcaacccttctaccttcagattcgcgggaagatggcatcacttcatgctaatgtgacatcagttgtttacaacagtggcaaccgtgtttctcaatcgaaatttgcaagctcttccttcttgtctgggttcgatgttgttggtcgtgcttcaagtgcttggaagaaggaacttgtcccatcttccatttccttggtgcctagagccaccctaacatttgatcccccaactaccaattcagacataaccaagcaaaagaagcacactcttgaccctgcttctccagattttcttcctcgtccttc

SEQ ID NO: 14028 - DNA, 152 bp, Glycine max
  Clone ID: LIB3040-038-Q1-E1-G2
ggcagcatccattcttgttctcttctttctttcgatcagggtttcccctcgtctccgggctcgtttcgttctcgaataatcgatctacgataatgactcgcggtagccagagggatcgtgatcgcgaaagggctcaggctagaactggtgct

SEQ ID NO: 14029 - DNA, 336 bp, Glycine max
  Clone ID: LIB3040-038-Q1-E1-G3
ggcagtttcaaattttcttttccttcactttcccgagaaaaaaataacacttttcactttcttcactacgttctcacttcgatatggctcgtacgaagcaaaccgctcgcaagtccaccggtggcaaggcgccacgtaagcagctcgccaccaaggccgctcggaagtccgctccggcgaccggaggagtgaagaagccccaccgcttcaggccgggaaccgtggcgctgagggaaatcagaaagtaccagaagagcaccgagcttctcatcaggaagcttccatttcagaggctcgtgagagaaatcgcgcacgatttcaagaccgatttgcgtt

SEQ ID NO: 14030 - DNA, 342 bp, Glycine max
  Clone ID: LIB3040-038-Q1-E1-G4
ataacagtagtccgtttcacagaagataacccagatggaaaagcaactgctcttctaaattggaggctattggttgttgaagtattgccagaagaagatgcagtactgatgcttctcctttgcctttcaatactcaaaagtgtatcagaaatgaagaaacaagacgtgggaggcttgttggtgaggagaagattaaaagaagcaaggcttggaagtagggattggggttctgtgatacttcatccatcttcatggtcatcatccattgattcaacttatcttcaaccctggcattggaatgctgtggttgtcatgaaatctgatgctgtagattagctgaaa

SEQ ID NO: 14031 - DNA, 309 bp, Glycine max
  Clone ID: LIB3040-038-Q1-E1-G5
ggggcttatgaaaaccaaggttgggtccggcccttttagggtttcgtctgagttataaaatacctaattcattgtcctctgtgccgttttcttcttcatcatagtcgtggccgtgtcgcagcaaaaccaaaccacatattaacttgtttgctctaagtcatggctctgatcttgcacgcaaccaaagcaaacaagaatgctttcaagactctgattgcggcagagtacagtggcgtccaagtggaattggcccctaatttcgagatgggtgtctctaatagaactcctgaattccttaaaatgaatccc

SEQ ID NO: 14032 - DNA, 319 bp, Glycine max
  Clone ID: LIB3040-038-Q1-E1-G7
gaaccaagtttgcttgcgtgtatattcattttagcatcaaggttgaatctcagagaaaaagaaacatcgacaagcatgtctggaagaggaaagggaggcaagggtctcggaaagggaagagccaaacgacaccgtaaggttctgagggataacattcagggaatcaccaagcccgcgattcgccgtctggccagacgtggtggcgtcaagcgtatcagtggtcttatctatgaagaaactcgcggtgttctcaagatctttctagagaacgtcattcgcgacgctgtcacctaaactgaacaagctcggcgcaagaacg

SEQ ID NO: 14033 - DNA, 349 bp, Glycine max
  Clone ID: LIB3040-038-Q1-E1-G8
gagcatagaagaagcagaaagagaagcattagcaaaagcaagaagaactagtctaagcagaaatggcctcttcagtgatggcatctgtggccctcaaacctgcccctttcactgttgagaagtcctcagttagaggccttccctccctctcaaggaactcctcttcattcagagttgtggccagtggtggcaagaagatcaagactgataagccttatggaattaatggtggcatggctttgagggaaggagttgatgcatctggcaggaaaggaaagggaaagggcgtttacaagtttgtagacaaatacggtgctaatgtcaatggttacagtcctatctacgacac

SEQ ID NO: 14034 - DNA, 334 bp, Glycine max
  Clone ID: LIB3040-038-Q1-E1-H10
ggaacacttcaacatctcttaataaagattagaaatcgacatatggggggagcaaagagttactcttgttttgcagtaatagctgtggccttggttttgctacttctgaatgtggctgtggtttgcaatggaggcaagacaagcacattcattaggaaagttgagaaaactggggacatgccccttcatagtgatgtatttgttgccccttctggctataatgctcctcagcaggttcatataacacaaggtgaccaagtgggaagggccatgatcgtgtcatgggtgactgtggacgaaccaggaaagagtctagtgcattactggagtgacg

SEQ ID NO: 14035 - DNA, 357 bp, Glycine max
  Clone ID: LIB3040-038-Q1-E1-H11
tggttatcatctgcccaatttatatatacagttaaatttgtataaaaataactttttgaaaatattttttttctgtattaacttctatactagtttataaaattagtacttttaataaattaataaggtaatttttttaagggttaaatgttttttctccctaataatttttaaaatttagttttaatctctatgaattttttaactttttagtccctaataaatttatgtttgattaacacacttaatttatttttggtccctaataacattttgaaaaataaaatataataaagtgatttagatagtactatagagaccaagaataaaagaataaacattattagagaccaattt

SEQ ID NO: 14036 - DNA, 97 bp, Glycine max
  unsure (1)..(97): unsure at all n locations
  Clone ID: LIB3040-038-Q1-E1-H12
aggaaaatcaagagagagaaganaacacccacaattcgagtattaagaggaattaaatgagccgttaaatcctccaatcaggaaggggacgcgtggc

SEQ ID NO: 14037 - DNA, 265 bp, Glycine max
  Clone ID: LIB3040-038-Q1-E1-H3
gatagcgaaacagagagtggtttcagtgagtgatcggtgttcacttgatccttcataagtcgtcatcatcatcatcatcatcaccgttgattgaagaagatgccgatcagaaacatcgccatcggaaggcctgaagaggctactcaccccgacacgttgaaggcggggttggctgagttcatctccaccttgatcttcgtgttcgccggttcaggttccggcatcgcctacaacaagctcaccgacaacggcgccgccactcccg

SEQ ID NO: 14038 - DNA, 329 bp, Glycine max
  Clone ID: LIB3040-038-Q1-E1-H4
gacaccatccagtactcttcttttcagcacaacctcttcatctctcccaggctttcttttctttgcaacaacactaccaaaaatgtcaccagatttcacacttttgttctccccggaactcatgcagtcccctatcatcactttccaagccactttctgtgtccttctcttcaccctcatgttcacgccgttcttcactcctggtgggcttccttgggcctgggcccggcccagaaccatcatccctggcccagtaactgccctgctcggggtcttcacgggttccacacctcacagcgctttatccaaactggcccgcacttatcacg

SEQ ID NO: 14039 - DNA, 315 bp, Glycine max
  Clone ID: LIB3040-038-Q1-E1-H6
gactgcgaaccagtagggactcccattccgactcttagccgccgatctctcagggcttgcatcttctcaggtaagctgtgaagatgtacacatcaaggaagaaaatccacaaggataaggatgctgaaccaactgaatttgaagagtcagttggacaggcattgtttgatctggaaaataccaatcaggagcttaaaagtgatctgaaggatttatacataaactcagccgtgcaagttgatgtttctggaaaccgcaaggctgttgttattcatgtcccttacagattaaggaaaggtttccgtaagattcatg

SEQ ID NO: 14040 - DNA, 335 bp, Glycine max
  Clone ID: LIB3040-038-Q1-E1-H7
ggcacttcaattgcaatcaaattagttcattctctttgcgcagttccctacctctcctttcaagatgcagatcttcgtcaagaccctcaccggaaagaccatcacccttgaggtggaaagctctgacaccatcgacaacgtcaaggccaagatccaggacaaggaaggaattcccccggatcagcaacgtctcatcttcgccggaaagcagctcgaggacggccgtaccctcgccgactacaacatccagaaggagtcaacccttcaccttgtccttcgtctccgtggtggcatgcagatcttcgtcaagactctcactgggcaaaacataaccc

SEQ ID NO: 14041 - DNA, 314 bp, Glycine max
  Clone ID: LIB3040-038-Q1-E1-H8
gagttctgcatcgcgttttgctctggactctcaccgttccttcagagtggaaccctagttgtctctatccttaaggttccgccaccgcaccaagtctcagcacccaaccaggtcttctttcattcatggcggaggaacttatttctcaattaaacaatatgctagaagaaaatggaacaccaagtcatgtagaaagggctgctgatgctgatgctgatgctgagctttctcccaccatcacaaaaggagatgacactaaagaagtttcaaagaagaaaaagaagaaatctaaaagcaggaaaaagaaagaactc

SEQ ID NO: 14042 - DNA, 331 bp, Glycine max
  Clone ID: LIB3040-038-Q1-E1-H9
gatgagcagcaagctatggcggaagaaccgaaagttccaccaccttctgatcctccgttaccgtttgatcctagtcggatgattggtatcatcaagagggaggccttgatcaaagacttagctgcggtataccatgctgaatgccttgcatactgtcaagagcttttgggacttcaaactaaatgggaagaggttttcaggtggttgatgcataactcatttagggcgcaaaagatgcaccatctgaggatatacctttttcttgctgctggtgtgtacctgttagtatcagagcacatatttaatgtagtatcgatgtacttttcaaatg

SEQ ID NO: 14043 - DNA, 359 bp, Glycine max
  unsure (1)..(359): unsure at all n locations
  Clone ID: LIB3040-039-Q1-E1-A10
gacacaaactttattacagttgttgtattgtaattaagcaagaatattaggcaatggagtcttctagaacttcaactactcttgctctttttttaaccatcaatttgcttttctttgtcatggcaagtggctgctacacttgtacacagcctaagccaaaccctatcccattcccttaccctaaccctagtcctgccgcgaagagctgccccagggacgcacttaagctcggagtgtgcgcaaacgtgcttaatggaccaattggtgctattgtanggtcaccaccggaccacccatgttgctcagtgctagaagggcttcttgatcttgaagttgcggtttgcctctgcactgccatc

SEQ ID NO: 14044 - DNA, 331 bp, Glycine max
  Clone ID: LIB3040-039-Q1-E1-A2
ggttgcgtgtgtgagtatcggcaatggaagaatgttcatccattgaggaatcggtggcgagcgtgatcgaagaaccagggaggttgaagacaccgtttcctctcacatctcaaaggcttccagcgatgaagaatctcgccaccaacgtgtccgtgccgtcgattccagaatccattcgataagttcctctctcgattctcttgtctccaccatacaaagccctccctccttaaccgtcacattacatgaagatttgcagagagcgagatgcatcatcgttgatggtgacgcctcatcgctcctccctggccatgcacaaggtagcgttttg

SEQ ID NO: 14045 - DNA, 301 bp, Glycine max
  Clone ID: LIB3040-039-Q1-E1-A4
aagctttggaggttctgggctcaagaaaagtggaaagaaataagggctctttatcatgattgtatacatccaatattgagccctgtagtttattaccatgataacttctgtcttattgtggccttctttattgctctaatgttagtactgaactgaggtatttcgtgatgtaagctgcaacaagttacttgtttgtagctttattgtgtggcccttcatggggttctgataattacatcctattagtagtgctgtggatttggcatagacttgttcaagtaataatgacttggcttgcgat

SEQ ID NO: 14046 - DNA, 353 bp, Glycine max
  Clone ID: LIB3040-039-Q1-E1-A5
gacacaccatccgttctagtctcaacttctgctcttccaactcctacaacgcttttctctgcactcatgggcaaggtcaagatcggaatcaacggatttggaagaattggccgtttggttgccagagtcgctctgcaaagagacgatgttgaactcgttgccgttaacgaccctttcattaccaccgattacatgacatacatgtttaaatacgacagtgttcacggacactggaagcatcacgatgtcaccgttaaggacgagaagacccttctcttcggtgacaaggcagtcactgtttttggacacagaaaccctgaagagatccatgggggtcaactggagctgacatc

SEQ ID NO: 14047 - DNA, 383 bp, Glycine max
  unsure (1)..(383): unsure at all n locations
  Clone ID: LIB3040-039-Q1-E1-A6
gatccctgctttccttttttgacttagatacttcttatgcaactatagtgaggctaagagttggtgcataattaatcaaaatgttggccatattccacaaagcttttgctcatccacctgaagagctgaacagtcctgcatcttacaaaggttccaagaagcctaaggttcctgaggaaactctcaaagatttcctttcccaccatcctcacaacacttgctccatgagctttggtgaagctgctgtgctagcttatgttcgtcctgatcaatccttctctcgtcatcaaaggttgttttgtgggattgataacatatactgtctcttcttggggagcttgaacaatttgtcnctactcaacaagcaatatggattgtcaaag

SEQ ID NO: 14048 - DNA, 341 bp, Glycine max
  Clone ID: LIB3040-039-Q1-E1-A8
ggaaaattgtggggaactcaaattgattgaaatcaaacctcagcaccactaggtcaagcttctgtctcagtcactgtttctccggcctcgcttcttctctcagattcagataccaattcggtttcttctgaaccaaacttggtttgagaaattcggccgttaattttccatggccaacaatccatcacagcttctcccatcagagttgattgaccggtgtataggttcaaaaatttgggtgataatgaagggtgacaaggagcttgttggtactcttagaggctttgatgtttatgtcaacatggtccttgaagatgtcactgaatatgaaatcactgctg

SEQ ID NO: 14049 - DNA, 222 bp, Glycine max
  Clone ID: LIB3040-039-Q1-E1-A9
gacagcgaaacaaagagtgatttcagtgagtgatcggtgttcacttgatctcatcataatcgtcagcgtcaattgaagaagatgccgatcagaaacatcgccgtcggaaggcctgaagaggcgactcaccccgacacgttgaaggcggctttggctgagttcatctcaaccttcatcttcgtgttcgccggctcaagctccggcatcgcctacaacaagctc

SEQ ID NO: 14050 - DNA, 361 bp, Glycine max
  Clone ID: LIB3040-039-Q1-E1-B1
gactgcgagagtgtgggagccataaaactgctgcttctcgacccacttttgaagttcaaaacttaaaccctagttctctctctttctttctcctgcatcttcaaccatgtcagcaatgctgcaacctcagatcattctgctcaaggaatgcacggacacttcgcaagggaagccacagctggtgagcaacatcaatgcctgcaccgccgtcgccgatgtcgtccggaccatcctcggacctcgcggcatggacaagctcatccacgacggacaaggaaccgtcaccatctctaacgacggctgcaacatcatgaagctcctcgacatcgtccaacccgctgcaaaaatcctcgccgacatc

SEQ ID NO: 14051 - DNA, 356 bp, Glycine max
  Clone ID: LIB3040-039-Q1-E1-B12
gacaacacaacacaacgcgcactctctctttttctctctgttttttgttctctcttcgcttaaaccctatcgttcttctcgttttcgccgattctcgccatgccgaaagctaaatccgacgccaaagccgccgatagcaggttgaagcggaagggcgctggtgctgggaggaagcaatcgaggaaagctgctaaggaccctaacaagccgaagagacctccaagcgctttcttcgttttcatgtccgagttcagagagcagttcaagaaggagcatcctaacaacaaatccgtcgctgttgtcggcaaagctggtggtgaaaaatggaaatcgctatctgatgctgaaaaaggccc

SEQ ID NO: 14052 - DNA, 382 bp, Glycine max
  Clone ID: LIB3040-039-Q1-E1-B2
gacacactcatttttcttttcactcaaatcatggatttcttgcaagcacaagaaaatcagatacttgtgggtgtggccgtggccgttgtagccattgggcttggtgcagtatatctctattcatccaagaagaccaaaggttgcttggacccagagaactttaaggcattcaaacttgttaagcgtgcacagctgagccataatgttgcaaagttcacatttgcactcccaacacctacatctgttttgggtcttccaattgggcaacacataagttgcaggggtaaagatgctcaaggtgaagaggttatcaaaccatatactcctactactttggattccgatgttggacattttgaactagttattaagatgtacccac

SEQ ID NO: 14053 - DNA, 322 bp, Glycine max
  Clone ID: LIB3040-039-Q1-E1-B3
gggatgatgaattgagcaaggcaagatttgagttccgatggatggaccagtttgctttgtcattggatccgatgacagccacgtccttccatgacgaaaccctaccggcagatggtgcgaaagtggcccatttctgctcaatgtgtggccctaaattctgctctatgaagattacagaggatgtgaggaagtatgctgcggaacatggctatggaactgatgaagctttgcagcgtgggatggatgctatgagtgctgaatttcaagctgccaagaagaccatcagtggggagcaacatggtgaagctggtggagagattta

SEQ ID NO: 14054 - DNA, 375 bp, Glycine max
  Clone ID: LIB3040-039-Q1-E1-B4
ggctagaacgttgaactgcaccttctcactggagctggcattaccttcttcagttctcctcaaatttgatgtattttctatctacaacttcagtgtttattctgtctcactctcaaaacctgtgtgttctggcggtgattgctgaagaccccaatgctttgttgatccatctcagcgtcttaacgtttactaaattctgctttgaaaatgagagttgagaaaggagcaaaaaatgaaggtggatatgttggtggtttcttccacttgtttgactggacctcaaaatctcgtaagaaattatttgcagccaagtcagatttgccagagtcctcaaaacagagaagaaaggttgatggcaacatggcaatggtgctg

SEQ ID NO: 14055 - DNA, 371 bp, Glycine max
  Clone ID: LIB3040-039-Q1-E1-B5
gagtgagagagagagaaggcaagatgtcgaagagaggacgcggtggttcggcggggaacaagttccggatgtcgctgggtctgccggtggcggcgacggtgaactgcgccgacaatacgggggcgaagaacctctacatcatatcggtgaaagggatcaaagggcgtttgaaccgtctcccctcggcttgcgttggcgacatggtgatggccaccgtgaagaaggggaaacccgatctgaggaagaaggttttgccagctgtcattgttcgccagcgcaagccatggcgccgaaaggacggcgtctacatgtatttcgaagataatgctggtgttattgtcaatcccaaaggagaaatgaaaagttctgct

SEQ ID NO: 14056 - DNA, 377 bp, Glycine max
  Clone ID: LIB3040-037-Q1-E1-A1
gatagatagaatagataaggtgtgggaaataagaacagcaacttctctttactgtgtgtgaaaaaaatggtcacactcacacttttatcatctctgtctctgcgctcttcatcttcttcttcttcttcttcttttacactctcttcttctttttcttctccctcctcctttgactttttttgtagcttccacttgcgctctgccacttcatcattgaaggtacaaacaattcataagaacaagcgcgtggttaatgtagtggaagatgatacccagcatgaactcaacgctgctgatgactctgatcaaccatcaaacttcgaagcaccaaccgttgtggttaccgtatcatcatcagatactctcaacatgttctt

SEQ ID NO: 14057 - DNA, 317 bp, Glycine max
  Clone ID: LIB3040-034-Q1-E1-H2
ggagagacttcactttctgctttgctttcgacaattccaaagtctccaactcaacccagctgcctacagccgctacaactaaaaaagccctttgctttctcttgcattgctcttttcaactcgtcacattggctcatttatcacccatcagatttagggtcccttctgccatactgcgcacattgaagatgacaacaacatcattttctggcttgcgatttgcaatgtcaagatcatgcattccttcatcacaaaagattgcagatgcaggggctgtggttcttggcggcaagtccaagattgggtcctggaataaa

SEQ ID NO: 14058 - DNA, 365 bp, Glycine max
  Clone ID: LIB3040-034-Q1-E1-H3
gatacctaaaaattgtaccgatatggcttcacttgtgtgtctccttttttccttgcatttcatggttatcatgtcaggttccttaccagcaaatagtgaagtgtttacaaaagagtctcctatgtctctatccacaaaacccgtggaaagactcacccaactccacttttatttccataacaacaaaatgggggaacacccgactgctatgaaaattgttgagcctcctaaggcgtccatttctggttttgggactatttacatgatggatgaccctctaaccgaaggaccaagtccaacttcaaagcttgttggaagatgtcagggaatatatgctgaggcttcgcaacatgaacctgcgatac

SEQ ID NO: 14059 - DNA, 305 bp, Glycine max
  Clone ID: LIB3040-034-Q1-E1-H5
attgggcatgtggatgagaatggcgtctacaatggccatttctccacttttgctctctgcggcttcatacgtgcgcagggtgatgctgacagtgccctagatcgcttgtggcagaagaacaaagttgaagttaagcaacagtagacacccatgatagtttgttactttgctacgtattaatttctacgcatgctagagcatatttgagtactatgactgtcgtcttgagcaaatactcattctaaattttcgttggtatttggtaccgccagctaaatttgcttttttgacagtttgccactgcg

SEQ ID NO: 14060 - DNA, 363 bp, Glycine max
  Clone ID: LIB3040-034-Q1-E1-H6
gacacatcacaacaacaacaacaacaaaaaaagacaaaaactacttccttctctcctttgctgtgttttctttctcaaaaatgggtcgtacctatgttcttatgatggttgctgcattgttgttgagctccaccatggctcaatctccagcttcgtcgccggctttgtcccccacccacacgccggtggccactccacctaggagggcgttgtcgccgtctccgtcgtctgtgtcaccagcggcttcacccgccaccggaaattctcctccggcaccacctacttcttctccttcggaatcgccacttccatcagctgctactcccaacatctctccctcgaccatctcgactccgccatctg

SEQ ID NO: 14061 - DNA, 362 bp, Glycine max
  Clone ID: LIB3040-034-Q1-E1-H7
gactcagccagggcagaaaattcagaagctctccctcttcctcacgttgcattttccttctcctccattctccattgagacgccatcacagctccaacctttggtgctcatttctgctccaaatctcgaaacaagggcattttcggggtcgtgaagtgcgtggctacgactgggacttcgaaatttcagatcgtgatggcggcgcagctaatccgtgatcgagtagagatggagtgcctagagggagcttgggataccctcgaaggcaacacaaggtgccgatttcggggcaccattcgattcacggctacttctttggtgcatccagatgaacctgcaccgacgcttcagcgaactgtgga

SEQ ID NO: 14062 - DNA, 368 bp, Glycine max
  Clone ID: LIB3040-034-Q1-E1-H9
gagtgcaaaactcacaacacatctaaacaaaaaatcaagaacaatggcttatgctaggcttgctcctatggctgtcttcttgcttgccacttccaccataatgttcccaacgaagatagaagcagcagattgtaatggtgcatgttcacctttcgagatgccaccgtgccgctcacgtgattgtcgttgtgtccctataggactagttgctggtttctgcatacatccaactggactttcatctgttgcgaagatgatcgacgaacatcccaacttaagtcaatctgatgatgaatgcatgaagaaaggaagtggcaatttttgcgctcgttaccctaataattatatcgattatggatggtgttttg

SEQ ID NO: 14063 - DNA, 325 bp, Glycine max
  Clone ID: LIB3040-035-Q1-E1-A1
aggttcctttcttgcagctcataatatctaggcatttaaataaagatttagtgaacacaacaaccacaaagccccaatctacttaagctataaacagtggtttaggcatgaattggaggatccatggacggaaaaaaaatctgttaatcgtgtggtacgtggaaagattccttcttattagttatcaatcaaattcaagcatcaaacgcactcgctcatgtcgtcgacaaggaccaatgatataggttcctccagcggagtaacaagaaagaaaacatcaaacagtacatgtcattaatgtgtgttttggccttttcaacagaaa

SEQ ID NO: 14064 - DNA, 389 bp, Glycine max
  Clone ID: LIB3040-035-Q1-E1-A11
gataccatagaagaagcacaaagagaagcattagcactaggagcagcaacaactagtctcagctgaaatggccgcttcagtgatggcatctgtggccctcaaacctgcccctttcactgttgagaagtcctcagtgagaggccttccctctctctcaaggaactcttcttcattcagagttgtggccagtggcaagaagatcaagactgacaaaccttatggaattaatggtggcatggctttgagggatggaactgatgcatctggcaggaaaggaaagggaaagggtgtttaccagtttgtagacaaatacggtgctaatgtcgatggttacagtcctatctacgacaccaaggactggtctccaaccggtgatgtctacgctggcg

SEQ ID NO: 14065 - DNA, 273 bp, Glycine max
  Clone ID: LIB3040-035-Q1-E1-A2
taatttgggaattattgctcccatcgccattggtttcattgtcggcgctaacattttgttgggtggggccttctctggagcggccatgatccccgctgtgacatttgggcctgctgtcgtgagctggacctggaccaaccactggatctactgggccgggcctctcatcggtggtggaatcgctggccttgtttacgaggttgtctttatcagccacacccacgagcagcttcccaccactgactactacagggggggagatgaatatgtgtt

SEQ ID NO: 14066 - DNA, 86 bp, Glycine max
  Clone ID: LIB3040-035-Q1-E1-A3
gtcagtggaagccggcatgtccacatgcgcatttggaaatgtatacattgagcactactcctccaaatgcccaagttagaagagac

SEQ ID NO: 14067 - DNA, 271 bp, Glycine max
  Clone ID: LIB3040-035-Q1-E1-A4
ggggggagtttcttcttggatcttaccctcttgtttgctaatattctcattcttctgtctctgcttcttctccttctgaactaagagatggggttgtctttcaccaagctttttaacccgctctttgctaagaaagagatgcgtattctcatggtaggtcttgatgctgctggtaagactaccatcttgtacaagctcaagctgggagaaattgtcacaaccattcccacaattggattcaatgtggaaactgtggaatatacgaattatt

SEQ ID NO: 14068 - DNA, 219 bp, Glycine max
  Clone ID: LIB3040-035-Q1-E1-A5
gtcagcggagacgttcgactttccttcagagcgctgctctaatgctacagcttgggctcttatactctaaatggtggataatcgcttccgatactctctctgtaccctcattatcccttcatgtctcagcgaaacgattcaccgaattcacaggtctctgcagatcaacatgcttccctcacttatctagataatcctcagaagatttccagtctgtca

SEQ ID NO: 14069 - DNA, 354 bp, Glycine max
  Clone ID: LIB3040-035-Q1-E1-A6
gagtgccagacgcagtgactaaaccaaacctctcactcgccgtcgtagggtttctcctttcgtttagcaacaacaacaatggttgcagccaagagaaccaggaagacccatgagagcatcaacaacaggctcgctcttgtcatgaagagtggaaaattcaccctcggttacaagacggttctcaaatcacttaggagctccaaagggaaattgattatcattgctaacaactgcccccctttgaggaaatcagagattgaatactatgctatgttggccaaggttggagttcatcattacaatgggaacaatgtggatttgggcacggcaagtggaaaatattacagagtgtgc

SEQ ID NO: 14070 - DNA, 255 bp, Glycine max
  Clone ID: LIB3040-035-Q1-E1-A9
gaggaaaagcgcgacgcagactgtgtgaagtagatgtgtgcggaaaatccacgaatcattcttagggtttcaacataggatccaaaaaaggacaaggctccaacaacttcctgcaagcccacaagatctggccgtggctagcactacaaacaacaatctgtagcactggaaaacagtcagctaaagtgaacacaatggcgctcttttttcaaggcacctattgcaaaatcccttctgaaactccccaatacaagc

SEQ ID NO: 14071 - DNA, 288 bp, Glycine max
  Clone ID: LIB3040-035-Q1-E1-B1
ggtgtactatcattgcaacatcatggaaaaatggtgtaactgtgacgtcacaaacaccgcacaacaagcgtgctcaaatgctgcacaagtaaggtttaggataagtctagtgtgatccccgagatctccatgaacacttcacggcaaaatctcaggaaattagctagagattggtttatgatcaggatatcaaccagaattcaatcacgatcaactcctcctcagatgcacgaaggataaaggaagggccgacgaacgggttatagtccagttaagggtaccatggag

SEQ ID NO: 14072 - DNA, 276 bp, Glycine max
  Clone ID: LIB3040-035-Q1-E1-B10
cgggggcacccccattggcgtctcagaaggagaatttggttttgaatcaagagtctagacctgcatttgctgcagaaactcctaagaagttgaaccgagaaatcgcggttgatgctagcctttcaaattggctgggttcatcagaaactacacctgttaccaaaggtttgtacgtgggtaccctggagaggagcagctcacaaagctcaaattcagtggttagccattaaaataggcctattttaggtgcattgacagttgaagagctcaaacatt

SEQ ID NO: 14073 - DNA, 57 bp, Glycine max; identical to SEQ ID NO: 13428
  Clone ID: LIB3040-035-Q1-E1-B11

SEQ ID NO: 14074 - DNA, 379 bp, Glycine max
  Clone ID: LIB3040-035-Q1-E1-B12
ggagaaaggggtgcattctgttctgtgtttcggggttacgctttgcgagtgagaattgataaacaaatcgttagggttttttggttgtgcgagtgagagtgagagagaacaatggaagacataacagagggagtgaacaacatcaacatctctgattcgtataagaaaaatcgcattcaggtctctaacaccaagaagcccctcttcttctacgtcaatctggccaagagatatatgcaacagcatgatgaggtcgagctctcagctctaggaatggctattgccacagtagtaactgttgctgaaattttgaaacacaccagacttgccgttgacaagaacatcaggacatcaactgttgacataaaggatgactcta

SEQ ID NO: 14075 - DNA, 166 bp, Glycine max
  Clone ID: LIB3040-035-Q1-E1-B2
ggttgaatgtagaacgctgctgccgaaacccttcccgatccctaaggtaagtgagtaatcggtggttgagaatggtggagaacgcgaacggtatgaaggacgacgtgagctccacagactacatcatcaacctccatccccgcctccatggcggcacatttgacaa

SEQ ID NO: 14076 - DNA, 372 bp, Glycine max
  Clone ID: LIB3040-035-Q1-E1-B3
gatagcaagctctgaaaagaagagagagagagagagaagtgcatagcgtgatagagttttttgttgtctatacatcttccttcgttgtttgggttcgttcgccttcactctccgacattcatatcattcatcagagactggagcctgagaagaaaaggagaatttatggaggacggcgcaggaagaggtttggaatgcccgaagactatggatgggaaggcgagtaacgggaatgggttagagaaggaaattccttcttgttgtctgaaggctaacgcttcaatccctgagtctgaggcgaagtgccattctaccgtttgttccgggttggtctcaacgtcccaaaacttgccctggggaaagtctgggaaa

SEQ ID NO: 14077 - DNA, 341 bp, Glycine max
  Clone ID: LIB3040-035-Q1-E1-B4
ggtctcgcaacttcatgcttagaaccctagcaacactgtgacccactctactctcgtgtgatggttcagagtgtgttttcacactctcatgcagcggttcacgctctcactctctctcacggtggttcacactcgcattgtggttcagagtgtgttctcattctctctcacacggtggttcacgctctcactctcacggaggtgctctatcaaggtcgagtttacttctcactttagtcgaaagaaggactcttttgtatccagcagtgtctcgagcctacccaaacgttaataggtagtattaacttcaatggagccatccaaaggaaacatcaagggga

SEQ ID NO: 14078 - DNA, 331 bp, Glycine max
  Clone ID: LIB3040-035-Q1-E1-B5
ggttctagtgtgtgattgtttgttgttgtaactcgttcttcttcttttgttgttctgtgtttgtgtttgttttttctctcacctgaaaatgtcttgctgcggtggtaactgtggttgcggaagctcctgcaagtgcggcaacggctgcggaggctgcaagatgtacccagacttgagctacactgagtcaaccaccaccgagaccttggtcatgggagtggcacctgttaaggctcaatttgagggtgctgaaatgggtgtgcccgctgagaacgatggctgcaaatgtggaccaaactgctcctgcaacccctgcacttgcaagtgaagt

SEQ ID NO: 14079 - DNA, 63 bp, Glycine max
  Clone ID: LIB3040-035-Q1-E1-B6
gtctttaattcttcgtcaaaaacaaaacaaaaaaaaaagcaacaacaaacgaacacaacaaaa

SEQ ID NO: 14080 - DNA, 161 bp, Glycine max
  Clone ID: LIB3040-035-Q1-E1-B8
gatgccgaaaagtagtaccaagatggcttcagttgtgtatctcctctttggcttccatctcattgttatcatgtcaagttccttacccgcaactagtgaagtgtttgcaaaacagtatccatccacagaacccgtggaagaaagactcacgcaactccacc

SEQ ID NO: 14081 - DNA, 218 bp, Glycine max
  unsure (1)..(218): unsure at all n locations
  Clone ID: LIB3040-035-Q1-E1-C1
gagagtggagtaaaaaaaaagagcagtgtaagaaattagaaagggcgaaaggcgcactttatctgaaagcaaaaaccctacctanggtcaaccgtgacgccacaatcgccttcggcatctttgcaacgggatcaggtgctcctcgtccttcacgatggcggggaactgaaacccaaaaaacctaattccaaaaacctggccgctaacaatcccgttcc

SEQ ID NO: 14082 - DNA, 304 bp, Glycine max
  Clone ID: LIB3040-035-Q1-E1-C10
gtctcctcctttgtggtgtcgagctgagaataccagttgctccagtagccggcactaaacaacatggcggacaatgcagtcaccatccgaaccaggaagtttatgacaaacaggcttctctccagaaagcagttcgtcgttgatgtccttcatccagtgagggctaatgtttccaaggctgaactgaaggagaagctgggaagaatgtatgacgtgaaagacaccaacactgtatttgtcctcaagttccgaactcattttggtggtggcaagtctactgggtttggtttgatcgacgattcag

SEQ ID NO: 14083 - DNA, 385 bp, Glycine max
  Clone ID: LIB3040-035-Q1-E1-C11
gattgccgtcacagagagagacaagaaacaatgaagtttaaccctagggtttcctcaagccgtcgcaagagccgcaaggctcacttcaccgctccgtcgagcgtgcgccgcgtcctgatgagcgcgcctctctccaccgatctccggtcaaagtacaacgtgcggtccattccggttcgcaaggacgacgaggttcaggtcgtgaggggaacctacaagggccgcgagggcaaagtggtccaggtctatcgccgcaagtgggtcatccacatcgagcgcatcacccgcgagaaggttaacggctccaccgtttaacgttggcattcacccttccaaggttgtcgtcaccaagctccgaatggacaaggaccgcaaatccttgctc

SEQ ID NO: 14084 - DNA, 378 bp, Glycine max
  Clone ID: LIB3040-035-Q1-E1-C12
ccacatcacgacatcacatcgcagagaagaacagagagggatccatccatcaattccaatggccgatcagctcaccgacgaacagatctccgagttcaaggaagccttcagcctcttcgacaaggacggggatggttgtattaccaccaaggaacttgggaccgtgatgcggtcacttggccagaacccaactgaggcagagctgcaggacatgataaatgaggttgatgctgatgggaatggtaccattgatttcccagaattcctgaatctcatggctcgcaagatgaaagacactgattcagaggatgagctgaaggatgctttccgcgtgtttgacaaggatcagaatggcttcatctctgcagcggaactccg

SEQ ID NO: 14085 - DNA, 218 bp, Glycine max
  Clone ID: LIB3040-035-Q1-E1-C2
ggttcaacttccacttgaacttgccgcttcttcaagtcgaagacaacaaacacacaacagagactgaaacgacagcattttttgatctattatggtgaaggggttgcacgggcagaacctccccgcccacgtggcacagctggttgatcagctggagcgccactgcttcgctcccgatggatctcccatctccaagccctcgcttcaacgatctccaa

SEQ ID NO: 14086 - DNA, 262 bp, Glycine max
  Clone ID: LIB3040-035-Q1-E1-C4
gaagtttaggcccgagcggtttgtggaggaggatgtgagcataatggggtctgatttgaggttggcacctttcgggtctggaagaagagtgtgccctgggaaggcccttggtttggcctcggttcatctttggctcgctcagttgcttcaaaattttcattgggtttcatctgatggtgtttctgtggagttggatgagtttcttaagctttctatggagactaagaacccactgtcttgcaaggctgtgcctagggtttcc

SEQ ID NO: 14087 - DNA, 205 bp, Glycine max
  Clone ID: LIB3040-035-Q1-E1-C5
gattgtagaactgaacaagggtttctctttctctttctctgtctgcttcttcactttctctcgtttcaatcgaaaaaaatcatgggcagaaaattcttcgtcggtggcaactggaaatgcaatgggaccactgaggaggtgaagaagattgttactactttaaatgaagctaaagtccctggagaagatgttgtacaagttgttg

SEQ ID NO: 14088 - DNA, 350 bp, Glycine max
  Clone ID: LIB3040-035-Q1-E1-C6
agattgtagatcatcttcaatttcttgatcatccgtagaatactggttgatagcacctcatctatgcaagtgaggagggtaaccatgtttcttgtagcaagtgtctaccatatgacctgatatgttacaataagtgcacatttttgtgcttctgcctctacctcttccaccagatgtatggcctccacgacctctgcttctgccacaagtaccattgttggtatccaattgagcgaaaactctagaatcatcaaattgaagaaccaatcgcctttcttgttgaatgaggatagaaaaaaatttgtctaaatcagggaaggggtccatcatcattatatttgacctaactg

SEQ ID NO: 14089 - DNA, 283 bp, Glycine max
  Clone ID: LIB3040-035-Q1-E1-C7
ggaagaaggaagcatcataaccggccaaagcttctctctcttccatttatcccccataaataaaactaggtgaaaaaaatatactctgtgcttctcatgatggtagtgtagctgaagctgcttctgctgcagcattggcgatttggacacaaaaaaagtttcaaacttttcagttctctgagcttctggtttatcaattttgaaggagttcaatactttaccctattagttggttccctgaaatttgtattggtattgctgtatcagaaattcttctgaacaa

SEQ ID NO: 14090 - DNA, 80 bp, Glycine max; identical to SEQ ID NO: 12942
  Clone ID: LIB3040-035-Q1-E1-C8

SEQ ID NO: 14091 - DNA, 395 bp, Glycine max
  Clone ID: LIB3040-035-Q1-E1-C9
gtgctgctgcaagaagacgaaagagagggacagcacagttctcatactttggagaatcccaacccttagttaacacaactatcattgccacctctgctattcagtaatcagcattcactggtcaaactgctctgaagcagctcaatgagttcgtccgcatgaccggtggcgcctgcaaaggtcgcactaacattcgccccaccgtcaatagtgctcctcagagcatctggtatggacctgaccgtcccaagtacttgggtccattctcggaccagattccaacagacctgaccgcggaattccctggttactaccgattggacactgccgggttatcagctgaccctgaaaccttctccaggaaccgggagctggaggtgattcacagcagattg

SEQ ID NO: 14092 - DNA, 285 bp, Glycine max
  Clone ID: LIB3040-035-Q1-E1-D1
gattcaccacaaccctctctctatattccattgccacccagttttgaatatatttttattccttctttgtttcttcactttcttccatacacataaccatgtcttctcagactgttgtcctcaaagttggtatgtcatgtcaagggtgtgctggagcagtgaacagggttttgggaaaaatggaacgtgttgagtcatttgacattgatctgaatgaacagaaggtgacagtgaaatgaaatgttgagccagatgaagttctgcaagccgtttccacatctggga

SEQ ID NO: 14093 - DNA, 320 bp, Glycine max
  Clone ID: LIB3040-035-Q1-E1-D10
actacagagagggatacctaaaaattgtaccgatatggcttcacttgtgtgtctccttttttccttgcatttcatggttatcatgtcaggttccttaccagcaaatagtgaagtgtttacaaaagagtctcctatgtctctatccacaaaacccgtggaaagactcacccaactccacttttatttccataacaacaaaatgggggaacacccgactgctatgaaaattgttgagcctcctaaggcgtccatttctggttttgggactatttacatgatggatgaccctctaaccgaatgaccaagtccaacttcaaagc

SEQ ID NO: 14094 - DNA, 350 bp, Glycine max
  unsure (1)..(350): unsure at all n locations
  Clone ID: LIB3040-035-Q1-E1-D12
ggggttattggacacattcttcagcgactgcgtttttggatcggaacctcttctgcggcgtagcaatgggacactccaacgtttggaactctcacccaaaaaactacggtcctggttctcgcacttgccgtgtgtgtgggaatccacatggactgatcaggaagtatggccttatgtgctgcaggcagtgcttccgtagcaatgccaaggaaattggcttcatcaagtatcgctaaaagagcagttgtcaactacggaccaatattgtgttctggcactangatgttttgaggatgttatgtttgaagaaacttgagactttcttttttcatctaattaattatcagacg

SEQ ID NO: 14095 - DNA, 238 bp, Glycine max
  Clone ID: LIB3040-035-Q1-E1-D4
gattttcatttggagagacagagtagtgagtagtgagagggcgaagcgatgaatgccccagatcgttacgagcgtttcgtcgtccctgaaggcaccaaaaaggtttcttatgagagggacacgaagatcatcaatgcggcgtccttcaccatcgagagagaggagcacactatcgggaacatcctccgcatgcagctgcacaaagagcccaatgtcttgtttgccagatacaagcttc

SEQ ID NO: 14096 - DNA, 351 bp, Glycine max
  Clone ID: LIB3040-035-Q1-E1-D6
gactccttttctccttcaaaacttgaattaccttcaaccataccttgtttttcaagcctctaaaggtaagatactttggaataaccatgaatgacgaacatggaaccactccaacaatggtgtcaccaccttcacctcatagctcatgtgcgtccactgatcccagccaggaggacaacaacaacaacaacgataataacaaagatggtgacaacaacaacgacgatgataacaacaataataacgatgacaacgacaacaacaacaacgaccccaacaacaacaaccctgaagctccttccttggttctagtagggtgccctcactgccttatgtatctgatgatctctg

SEQ ID NO: 14097 - DNA, 251 bp, Glycine max
  Clone ID: LIB3040-035-Q1-E1-D7
gactctgctgttttccaaaaccctaatttctcgaaaggtagggttttgcagagcctcgtcctcctctcacggtttcttctttttatcttctcacctttcttcttccactgctctaatctaagatgggcaagtcaagcaagaaatcagctctcaaggtcgacgctgttccagctgtggttccgccatccaagtctgccaagaagggaggcaagagacaagctcaagatgaaattgagaagcaattgagtgcc

SEQ ID NO: 14098 - DNA, 253 bp, Glycine max
  Clone ID: LIB3040-035-Q1-E1-D8
ggactatcagctgacccggaaaccttcgccaggaaccgggagctggaggtgattcacagcagatgggccatgcttggtgcacttggctgcaccttcccagagatccttgagaagaatggtgtgaaattcggcgaggccgtgtggttcaaggctggttcacagatcttctcggagggaggacttgactacttgcgcaacccaaacctgatccatgctcaaagccatccttgccatctgggctgttcaggttgtg

SEQ ID NO: 14099 - DNA, 258 bp, Glycine max
  Clone ID: LIB3040-035-Q1-E1-D9
acttgatatcacattctgccacagtgcttaacatgcggattggataagcccctctatctgcagatcttagattcagacttttaaatgcgaattagccccatgtttacttgtttgcataacaagaggaatggctgtgttgatctaaatccttgccccacacatacataacctaaaggagaaagaactacaaggaggacttgaattttctacgaaagtgactctcacaattcgcgggaccctctcaagaattcaggctaa

SEQ ID NO: 14100 - DNA, 268 bp, Glycine max
  Clone ID: LIB3040-035-Q1-E1-E1
tgcttcttggcgtgatgggtgctccaatcgcccgtccacgtgtgcaccactgacccctttcctcacctcagcataaaagacatccccattattagtcccctcttgttgtttagagatcatatagagctaggttcagaaattgtttcatttctcttaattattaagttatgttgtctaagatcagtagatattatcattattatgtcatgttaagcattatgttagggaaaatgtgtgtgaatgagtattagcactttttttagcttgc

SEQ ID NO: 14101 - DNA, 313 bp, Glycine max
  Clone ID: LIB3040-035-Q1-E1-E10
ggcattctattcattcaagattcagcaagtgcgttttggaagcagagaccgaaatacttcgagatggcccgtacaaagcaaactgctcgtaagtcaactggaggaaaagctcccaggaagcagcttgcaaccaaggctgcacgtaagtctgcaccaacaactggtggtgtgaagaagcctcatcgttatcgccctggaactgttgctcttcgtgagattaggaaataccacaagatcactgagctcctaatcaggaagcttcctttccagatgttgggtcgtgaaattgccccacgatttcaacactgatctg

SEQ ID NO: 14102 - DNA, 376 bp, Glycine max
  Clone ID: LIB3040-035-Q1-E1-E12
tagaatcccattccagagccaaggtaggttaaacactcttcttcatcgtcgtcgcaatgggacgtgtgatccgtgcgcagcgtaagggagcaggctcggtcttcaagtcccacacgcaccaccgcaagggccctgcccgcttccggagcctggatttcggagagcgcaacggctacctgaagggtgtcgtcactgacgtcatccacgatcctggccgtggcgcgcctctcgctaaggtcgccttccgccacccgttccgctacaagaagcagaacgagctcttcatcgccgccgagggtctctacaccggccagttcatctactgcggcaagaaggccaccctcgttgtcggcaatgtgttgcctcttcgatccat

SEQ ID NO: 14103 - DNA, 202 bp, Glycine max
  Clone ID: LIB3040-035-Q1-E1-E4
cacgcgtcagaccacgcgtccgacgcgacagaagggggtctccagctcatgagaagtgcatcatagttagaagcaaacccacccttttcatccaattttgattatagatggaaaaccagcccccatcatcaaaggcttctgaagtagatgccccccttcaatcacttggctttgagattcaagacttgtctccacaaacggt

SEQ ID NO: 14104 - DNA, 196 bp, Glycine max
  Clone ID: LIB3040-035-Q1-E1-E8
aataaagaagatttgtgttggttcaatatggcagcagactcaacccctttccacaacctttcatatgctaacaaagcaggaatcagatttgctccaggttgccaaattaaatgataagcagcctttgaatgaagtagggaacacttggagaaaaggactaggagcagagaatgaagacataggaggttgtgaattg

SEQ ID NO: 14105 - DNA, 269 bp, Glycine max
  Clone ID: LIB3040-035-Q1-E1-F1
gatttcaattcattttgaattgaaaccgcggagagtttgcagctgcatcatcgatcatcgtcacctcatggacggacacgattcacaagacccgaagcagagccctgctgacatgactgcctttgtgcaaaatcttctccagcagatgcaaaataggttccagacaatgtccgactccattgttacaaagattgatgatatgggaagtcgcatagctgagttggaacaacgcatcaatgacctaagagcagagatgcggagtggagtcc

SEQ ID NO: 14106 - DNA, 382 bp, Glycine max
  Clone ID: LIB3040-035-Q1-E1-F11
ggccgttgcctctgcctctcacccgcagggtttagagaaaatttaacaattagggttgcttctcctttgccgacccatggctcccaaagctgatagttcaaagaaggctgatccaaaggcacaggccttgaaaactgccaaggcagttaagtccggtgctaactttaagaagaagaccaagaagatccgaacatctgttaccttccatcgaccaaggactttgaaaaaggataggagccccaaatatccacgcattagtgctccacccaggaacaagcttgatcactatcagatattgaagtttcctctcacgactgagtctgcaatgaagaagattgaagacaacaacactttggttttcattgttgacttgcgggccgac

SEQ ID NO: 14107 - DNA, 381 bp, Glycine max
  Clone ID: LIB3040-035-Q1-E1-F12
gagtgccagacgcagtgactaaaccaaacctctcactcgccgtcgtagggtttctcctttcgtttagcaacaacaacaatggttgcagccaagaaaaccaagaagacccatgagagcatcaacaacaggctcgctcttgtcatgaagagtggaaaattcaccctcggttacaagacggttctcaaatcacttaggagctccaaagggaaattgattatcattgctaacaactgcccccctttgaggaaatcagagattgaatactatgctatgttggccaaggttggagttcatcattacaatgggaacaatgtggatttgggcactgcatgtgggaaaaatatacagagtgtgctgccttagcattattgatcctggtga

SEQ ID NO: 14108 - DNA, 240 bp, Glycine max
  Clone ID: LIB3040-035-Q1-E1-F3
gctccgatctaatggccaccgtaatcgacggcaaaaccgttgcgcaaatcatccgatctgaaatcgccaacgaggtgcgcctgctctctcaaaaatatcgcaaggttccgggactatcagttgtgatagtacggaacagaaaggattcacgcgactacctgggaatgaagagaggagcatgcgccgaattgggaatcatatccgtcgatgtggaccttcccgaacaactctcccaagctg

SEQ ID NO: 14109 - DNA, 139 bp, Glycine max
  Clone ID: LIB3040-035-Q1-E1-F4
gacacgcagttgtattgtagaactgaacaagggtttctctttctctttctctgtctgcgtcttcactttctctcgtttcagtcgaaaaagatcatgggcagaaaattcctcgtcggtggcaactggaagatgcaatggg

SEQ ID NO: 14110 - DNA, 53 bp, Glycine max
  Clone ID: LIB3040-035-Q1-E1-F5
gttaaaaataatgtaccaaattttacgtaccagcttcgccagtacctgcgaag

SEQ ID NO: 14111 - DNA, 179 bp, Glycine max
  Clone ID: LIB3040-035-Q1-E1-F6
ggaagaagagagtgatgatgatatgggattcggcttgtttgattagggacattctcaatgatttggttaaattttgtggttctttaccttttaaggttactctggatattgtaggttttatttttgtgctggttatttatatctgtatacgacttgattttgttatgttatatgaactt

SEQ ID NO: 14112 - DNA, 272 bp, Glycine max
  Clone ID: LIB3040-035-Q1-E1-F7
gaaagtgccttcattcgggactttcactagccgcagcagcctcaggaggagaataaggatgtctcacaggaagttcgagcacccaaggcacgggtcactgggatttctccccaggaagcgtgctgctcgtcacaggggaaaagtgaaggcattccccaaggatgacccatccaaggcacccaagctcactgcattcttgggttacaaggctggtatgactcacattgttagagaggtcgagaagccaggatcaaggcttcacaagaaggaaa

SEQ ID NO: 14113 - DNA, 255 bp, Glycine max
  Clone ID: LIB3040-035-Q1-E1-F8
gatttctgcgtggcgtctccggtgagggaaaagtagtagaagagaagatgtcgaccgtaccaggacagctcatctgggagatcgtgaagaagaacaactcctttttggtgaaagagttcggaaggggcactcagagcgtgcagttcagcagagagcccagcaatctctacaacctcaacactttcacgtactccggtttggcgagccagatcacggtcgctgtgcaacctgctggtagagaccactccgtgtttg

SEQ ID NO: 14114 - DNA, 315 bp, Glycine max
  Clone ID: LIB3040-035-Q1-E1-G1
ggatacctaaaaattgtaccgatatggcttcacttgtgtgtctccttttttccttgcatttcatggttatcatgtcaggttccttaccagcaaatagtgaagtgtttacaaaagagtctcctatgtctctatccacaaaacccgtggaaagactcacccaactccacttttatttccataacaacaaaatgggggaacacccgactgctatgaaaattgttgagcctcctaaggcgtccatttctggttttgggactatttacatgatggatgaccctctaaccgaaggaccaagtccaacttcaaagcttgttg

SEQ ID NO: 14115 - DNA, 172 bp, Glycine max
  Clone ID: LIB3040-035-Q1-E1-G10
gaaagcactgcactcctcgcaacacaacaaaagaagacaacccagagagcgcgtcttaataaacgctcttctctgaaaacccccatttcctttcttctttcttcttctccttcgcctcttcgatcttcgatcttcctcgctgaaaatgagagaatgcatttcaatccacatc

SEQ ID NO: 14116 - DNA, 378 bp, Glycine max
  Clone ID: LIB3040-035-Q1-E1-G11
gggaggaacctgagagagagaatcagaggaagaagatgatctataggaagtggagtctccttaccggcccggtcgccattctcggcggcgtagtcgtcgccatcgccgccgcaaacgtcatcttcgtcaagaatgatcctttcctcaaaccagaggagaggaagtatgaaaatgaacctgctaccaagtaggagaaaagagacaacagaagtttgcgttttgatgtcttttaaaccctgatttatgagctctgtatactgttttgcaagacatgctctgggtagttaataagattgagattctgaatggagtctggactctggagcacgggcccttagtttagaactaaccttccaaggttctagaaaactggttcat

SEQ ID NO: 14117 - DNA, 319 bp, Glycine max
  Clone ID: LIB3040-035-Q1-E1-G12
aagggttttgccctgttgttgcggctcatcctccgtaacctccgagctctgcaccgaagaacgaagccatggggaagacacatggaatgggatctgctcgcaagctcaagtcccaccgcaggaggcaaaggtgggctgacaagtcatacaagaaatcacatcttggaaatgaatggaagaaaccttttgctggttcatcccatgccaagggaattgtccttgaaaagataggtattgaggctaagcagcccaactctgccattcgtaattgtgccagggttcaacttatcaggaatgggaagaagattgccgcttttgt

SEQ ID NO: 14118 - DNA, 229 bp, Glycine max
  Clone ID: LIB3040-035-Q1-E1-G3
ggtcaagggatgctgtgttggtcccaagaagagggtcattacattgcgtcaatccctccttaagcagacttctcgtgttgctcttgaggagatcaaactcaagtttatcgatacctcttcaaagtttgggcatggtcgcttccagaccacacaggagaagcagaagttctttggacgcctcaaagcataattaggttaattggatggaaatgctggaatccaattgggt

SEQ ID NO: 14119 - DNA, 369 bp, Glycine max
  Clone ID: LIB3040-035-Q1-E1-G4
ggtgctctgctcgtgcctctagggttatcatttctccatttccattttctctctcacttttcaagaatcgtaagctatgggaaagtcttacccaactgtgagtgctgattaccagaaggccgttgagaaggcgaagaagaagctcagaggcttcatcgctgagaagagatgcgctcctctaatgctccgtttggcatggcactctgctggaacctttgacaagggcacgaagaccggtggacccttcggaaccatcaagcaccctgccgaactggctcacaacgctaacaacggtcttgacatcgctgttaggcttttggagccactcaaggcggagttcctattttgaactaacccgatttctaccag

SEQ ID NO: 14120 - DNA, 64 bp, Glycine max
  Clone ID: LIB3040-035-Q1-E1-G5
gagcaacatggtgacgctggtggacagatttacttgccacaagcttacgttagaaccacgagga

SEQ ID NO: 14121 - DNA, 196 bp, Glycine max
  Clone ID: LIB3040-035-Q1-E1-G6
gactgacagtggcagacagagaaagacgtgcatagtgtgagtgaagctctctgttctgttctaatgttcttctcttgcaacctctgaatctgtaggcgtcagttgtgcaatttaacagagtgtgcttaagaaatagtaattttgtatatttactgtaaataatatcagtatgggtgacgaagaacgaccgaatgaa

SEQ ID NO: 14122 - DNA, 298 bp, Glycine max
  Clone ID: LIB3040-035-Q1-E1-G7
ggactcactcttgttttcgcttcgctactcatcatcctaagtaccaggaagaaacaaacaatgtttctcaaagtccagctgcactggaatgtcatcatcgctgctgaaaatctgcaaccggaaggtctgatgcttcatagggcaatcattgtccgccttctgagtgactttgctgtgaagaaggccaccaaagatctgggatactttcttgcagtgaccacactggagaaaataggggaaggaaaggtcagacaacatactggggatgtgctcctccctgtggtttttaatgccatca

SEQ ID NO: 14123 - DNA, 314 bp, Glycine max
  Clone ID: LIB3040-035-Q1-E1-G8
ggctcttccttgagcatccagcagcaacaaacaagaggggtttgccttgtgccgtttggtttggtttccggaacaaaaaaaaaaatggtgtcaggttctggaatctgcgcaaagcgggtggtggtggacgcgcgccaccacatgctgggtcgtctagcctccatcgtggcgaaggagcttctgaacggccaaaaattggtggtcgttcccggtgaaaaaatttccacctcggccggcttgttaaggcagagaatgaattacttaaggtcccttcgcaaaccctatgacccaaaaccttccaatggcccattcaa

SEQ ID NO: 14124 - DNA, 285 bp, Glycine max
  Clone ID: LIB3040-035-Q1-E1-G9
atccagctctcgcaacagtgcataccctctcgcattccgtatttcctcccctccttcattcaccgctaactatcgacggttccaacatggacactggccgaagaattaagaatggatcccgacgtagaaaaggacgaggtccaaagaagaagccggtttcaacgtctgtcaaaaccagtctccaagtcaccatctgaagaattggccgtaagttgactaaaagaaggtacgctcagcgtgtcggtaccggtgctcccgtatacttcgctgcagttctcgaatacc

SEQ ID NO: 14125 - DNA, 339 bp, Glycine max
  Clone ID: LIB3040-035-Q1-E1-H1
gaaagtatataacttcttctaggtgtccggaaatcgttcctatcatcacttctcaaatctcgaaccctctcgtccgtgccgatcactaggtcacacttcatcaatggcgggtagaggcaaaaccctaggatccagcgccgctaagaaggccacctcaaggagcagcaaagccggcctccaattccccgtcggtcgtatcgccaggttcctcaaggccggaaagtacgccgagcgcgtcggcgccggagcccccgtctacctcgccgccgttctcgaatatctcgctgctgaggttttggaattggctggaaacgctgcgagagataacaagaagactcg

SEQ ID NO: 14126 - DNA, 283 bp, Glycine max
  Clone ID: LIB3040-035-Q1-E1-H10
ccaacccttaagccaagccttcgtaacggtgccaaaaaaacaacagaagggaaataaccccaaaggccaaagaaaaaaaacaaaaaaccaaaaaaaaaccggccgccctaaaggatcaaacctaagttacccttcaagccaagtcaaaaaccctccaaagtggtcacctaattcaattccacgggccgtcttttacaacgtccttaacgggaaaaacctggcggtaacccaactaaacccccttcaacaaatccccccttccccaactggcgttataaccaaa

SEQ ID NO: 14127 - DNA, 103 bp, Glycine max
  Clone ID: LIB3040-035-Q1-E1-H11
agttttatacacaaaagttagtcgttttcactgactaacagtcgacttacagggttgaatgccagttacagtgcaaaacagatgatcatttagtgttttgatc

SEQ ID NO: 14128 - DNA, 375 bp, Glycine max
  Clone ID: LIB3040-035-Q1-E1-H2
gacacaaactttattacagttgttgtattgtaattaagcaagaatattaggcaatggagtcttctagaacttcaactactcttgctctttttttaaccatcaatttgcttttctttgtcatggcaagtggctgctacacttgcacacagcctaagccaaaccctatcccattcccttaccctaaccctagtcctgccgcgaagagctgccccagggacgcacttaagctcggagtgtgcgcaaacgtgcttaatggaccaattggtgctattgtagggtcaccaccggaccacccatgttgctcagtgctagaagggcttcttgatcttgaagttgcggtttgcctctgcactgccatcaaaggcaacattcttg

SEQ ID NO: 14129 - DNA, 53 bp, Glycine max
  Clone ID: LIB3040-035-Q1-E1-H3
tacagctgcgataatacaattgaaggggtggatgtggacacgatcattaaatc

SEQ ID NO: 14130 - DNA, 319 bp, Glycine max
  Clone ID: LIB3040-035-Q1-E1-H5
ataaggaaggagaaaacagtgcactcattatttgttctaattctgtgggaaagagaagccattccccttctgtcacagacaagtttttcatttgtcaaatctgcactttgagtctgtgggagagagaagccactcccctccctaacgcactgttgctactgtatctctttcttccatccatccatccattacactaagaaaaggtaggcaagttttctgaagttcctccttgaaggattaaatcttgatgaaatcaatatatgttttctattgcatttttaatgagtcaagttattaaatttattttcttgcccttttt

SEQ ID NO: 14131 - DNA, 360 bp, Glycine max
  Clone ID: LIB3040-035-Q1-E1-H6
gtccgtcacttttctcagctgctgttcctgcgcgtgaacaagcctcaggtaagccaaagccatggttaagcataacaatgttatccccaacggacacttccgtaagcactggcagaactatgtgaagacctggttcaatcagccagcacggaagacaagaagacggttggctcgtcagaagaaagctgtgaagattttccccagacctacagctggacctcttagacccattgtacatggtcaaactttgaaatacaacatgaaagtgagagctggaaggggattttcccttgaagaactcaaggcatcagggattcccaaaaagcttgcaccaacaattggtattgctgttgattatcg

SEQ ID NO: 14132 - DNA, 248 bp, Glycine max
  Clone ID: LIB3040-035-Q1-E1-H7
ggagagaaactagtgactgacttttcgagaaaggaaaaaaaaagagtttccggcattattccatcatgaacgctcttcccattcttctcttcttcctcttcgtttcggcattagtttatgcgaagaaaactggcgatgtgacggagttgcaaattggcgtgaagcataaaccagcatcatgtgaagttctggcacacaaaggtgacagagtcagagtacactatcggggaaaactcactgatggaact

SEQ ID NO: 14133 - DNA, 118 bp, Glycine max
  Clone ID: LIB3040-035-Q1-E1-H8
actaatctacaaattacaggcatccctaccaagcaccttttggccaccccacatgagagagcacgcggatttatcgacttacctttcaccaccactgccatacgtacacggcccccac

SEQ ID NO: 14134 - DNA, 377 bp, Glycine max
  Clone ID: LIB3040-035-Q1-E1-H9
gtacaaatctgaggatgaagagcacaaaaagaaggttgaggccaagaatgctttggaaaactatgcatacaacatgaggaacactgtgaatgatgacaaaattggtgagaaacttgatcctactgacaagaagacgattgacgacgcagttgaacaagctatccagtggctacacagcaaccagctcgcagaagcagatgaatttgatgacaaaatgacagaattggtaagcatctgcaatcctatcattgccaagatgtaccaaggtggtgctggtcctgacatgggtggtgctggtgctgggggaaacgacgatgatctatgcgctccttctggtggaagtggtgctggccccaagattgaggaactggactaaa

SEQ ID NO: 14135 - DNA, 375 bp, Glycine max
  Clone ID: LIB3040-036-Q1-E1-A10
gactcaccacttcaaaacactcataacacacagcacaaagcaaagctcatccttgagttaaaaaatggcagcagcttcttccatggctctctcatccccatccttggctggcaaggccgtgaagctgggcccatcagccccagaagtgggaagggtgagcatgaggaagaccgtcaccaagcaggtctcctcaggaagcccatggtacggcccagaccgagtcaagtacttgggcccattctctggagagcccccgtcctacctaaccggtgagttcccaggcgactatcgctgggacactgctgggctttccgcagacccagaaaccttcgccaagaaccgtgaactcgaagtgatccactccaggtgggccat

SEQ ID NO: 14136 - DNA, 379 bp, Glycine max
  Clone ID: LIB3040-036-Q1-E1-A11
gactacaaatcagttttttacttgaattttcttcatccttctctgttctcctagaacttgattacttgaacattccctatgacagatgacgtggttcttctggatttctggccaagtccatttgggatgagggtcaggattgcacttgctgaaaagggtatcgaatatgagtacaaagaagaggacttgaggaacaagagtcctcttctcttacaaatgaatccggttcataagaagattccggttcccatccacaatggcaaacccatttccgaatccctcattgctgttcagtacattgacgaggtttggcatgacagaaatcccttgttgccttcagacccttaccagagagctcacgctaaattctgggctgatt

SEQ ID NO: 14137 - DNA, 372 bp, Glycine max
  unsure (1)..(372): unsure at all n locations
  Clone ID: LIB3040-036-Q1-E1-A12
ggaaaatctagtttcttacaaggctctactctactgcttcaccttctgctctagaaaattcagtggtgatacatggcttcggctactctctctgtagccaaaccagcccttcaggcaaatgggaaaggcttctctgaattctctggcctccgcagctcatcaggcttccttcccttttctagaaaatcttcagaggatttccattctgtcattgccttccagacctatgcagttggaagcagtggaggatacaagaagggtgtgacagaagcaaaactgaaggttgccataaacggatttggaaggattggaaggaacttcttgangtgctggcacggtcgcaaagactcccctcttgatgtcattgccatc

SEQ ID NO: 14138 - DNA, 317 bp, Glycine max
  Clone ID: LIB3040-036-Q1-E1-A2
gacagacagacacacactcggttctgccttcacaaaaaaattatcgagatcccctttttctcctaagaaaagccatggctaagggtcccggtctctactctgacatcggcaagaaagccagggatctgctgttcaaggactaccacagtgaccagaagttcaccatcaccacctactcacccactggagttgctataacagcatcaggaaccaggaaaagtgaactgtttgtggctgatgtcaacacccagttgaagaacaaaaacatcactactgatatcaaagttgatacagattctaaatcccttccccttttt

SEQ ID NO: 14139 - DNA, 277 bp, Glycine max
  Clone ID: LIB3040-036-Q1-E1-A3
gagcaacatggtgaagctggtggagagatttacttgccagaagcttacgttagaaccaagaggactacttaatggagcaaatcagttggaagaacttgtagctagcttcccaactggcttatctgagtgtggagaagcattatcaagccttaggagtaggagaacgagtactgtttgtgatgaatgtctatggtttaagaaatctgtctttagtcaacttgtgtgttttgttattcagttctcagcaataaactgctctggcaatctagtttcatgc

SEQ ID NO: 14140 - DNA, 150 bp, Glycine max
  Clone ID: LIB3040-036-Q1-E1-A4
ggatgttaggttgtatcgtatcatcattcattcatccatccagctgtctactgtgtgccatttccattgccaccaccgatgactctctcacccatcaactgagtccactaacttcatcaccttcgctgccttcttcaaatttcattaatc

SEQ ID NO: 14141 - DNA, 248 bp, Glycine max
  Clone ID: LIB3040-036-Q1-E1-A5
gaaagcaaagcaatcgcataatctagggtttgttcgttggttcgcaacaatggcgatgaggagattctacaacgagatcaaggggaagagggtgagcgaggttccggagcacgtgaagccgatgctgtcgctgaactacatcaagaaggcgattcagagaggcttcgataattaccatgccaagtacattgaaaccagctcccccgatcccatcttccatgtctgctacggcggcatgatcttctcct

SEQ ID NO: 14142 - DNA, 232 bp, Glycine max
  Clone ID: LIB3040-036-Q1-E1-A6
gagaatagagagctcctccaattagggtttttgtgatctgcagctacgatgggtaagggaacggggagtttcggtaagaggaggaacaagacccacaccctctgtgtgaggtgtggccgccgcagcttccacctccagaagagtcgttgctctgcgtgcgcttaccccgctgcgcgcaccaggaaatataactggagcgtgaaggccattaggagaaagaccaccggaactg

SEQ ID NO: 14143 - DNA, 307 bp, Glycine max
  Clone ID: LIB3040-036-Q1-E1-A7
gggcatataaaacacattttgcttgcagcaatctgtttcactccgcatccgcccgcagctgctgcagacaaaaccctagtgagcagagcgtgaaagcaccggccaccggccatgacattcaagcgcaggaatggaggtcgcaacaaacacggccgtggccacgtcaaattcatccgatgctccaactgtggcaaatgctgccccaagggcaaggccatcaagaggtttcttgtgaggaacattgttgaacaggctgcagtcagagatgtgcaggaagcctgtgtctatgaacagtacacgcttccga

SEQ ID NO: 14144 - DNA, 302 bp, Glycine max
  Clone ID: LIB3040-036-Q1-E1-A8
ggggaagaagaacttagctacaagctaaggaaggatcaaagagaatggctcaagcaatggcatcaatgactagcttacgtggttcctctcaggctgtgttggaaggtagccttggctccacacgcttgaatgtggggagtggaagcagggtggcctcagtcacacgtgcagggttcacagttagagcacagcaacaacaagtgaatggtggtgaggtacaaagtagccgtagggcagtgctttcacttgttgctgctggtttgaccactggctcttttgttcaagctgtgcttgctgatgcc

SEQ ID NO: 14145 - DNA, 368 bp, Glycine max
  unsure (1)..(368): unsure at all n locations
  Clone ID: LIB3040-036-Q1-E1-A9
ggcgcctctgcttgcaagagtgaaaaccttctcttacccttctctcaagtttcaagagatttcatcatggctccaaagaaggacaaggctccaccaccttcctccaagcccgccaaatctggcggtggcaagcagaagaagaagaagtggagcaagggaaagcaaaaggagaaggtgaacaatatggtgctgtttgatcagggcacctatgacaagctcctttctgaagctcccaaatacaagctcatcactccttccattctctctgatcgtttgaggattaatggatcacttgcaaggaanggctatagagaattgatggcaagaggttctatcangatggtgtctgcccatgcaagtcagcaaat

SEQ ID NO: 14146 - DNA, 360 bp, Glycine max
  Clone ID: LIB3040-036-Q1-E1-B10
aattcgagcggacgattatagaatggttaatgttagcctcttgaggctttcattcgttatcgctcctatgggagtgaggtccaagatgtgacctatgccgtccttcataatagtcacgaagttcttcacttaagctcttgcaagagttataactactattggaggcatgtttttatcttttcatttctttcattatttttcttctttcttcctctcttattttctctctttcaacttgacttagttcttcgactttttttttacctttttcttttctctcttgtttttctttccaaaacttaagggatctcaactcatctaatatcttatacaacgggtccttaggagtagaaccctcac

SEQ ID NO: 14147 - DNA, 367 bp, Glycine max
  Clone ID: LIB3040-036-Q1-E1-B11
ggctgtgcccataatttctgaggctgaggaaagtgagttaggatagccccagaaatagaaactcgaagttactcacttactcaactaccaccaccaccaccatgttctgatattcccccaaccacacacagtcactcttaaaaaaataattaaactttatgcaaatgcaaagcatgtcaaccaccatggcttcgttttctcctccgacccatttctcagccgcaccttcttcctcgaaactccgtcttgtctacaagaacaacaatttcttctctctcaggtcgaagagtcttgctttctctcccttgaaggctgctgctgctgagaacggcgttgggaccgccgtggagccgccgccggagcaggc

SEQ ID NO: 14148 - DNA, 311 bp, Glycine max
  Clone ID: LIB3040-036-Q1-E1-B2
gagttcggtggagggagggagccgtagcagcggaagctctagcttgggtagcgaatcacaatggcgagaggattaaagaagcatctgaagaggcttaatgccccaaagcattggatgcttgacaaactgggtggtgcatttgctcctaagccctcatctggaccacacaaatcgagggaatgcctgccactcatactcattttgcgaaaccggctgaagtatgctctaacataccgtgaagtcattgctattctgatgcagcgacatgtccttgttgatggcaaagtcaggactgacaaaacataccctgc

SEQ ID NO: 14149 - DNA, 188 bp, Glycine max
  Clone ID: LIB3040-036-Q1-E1-B4
ggataaaaaaaaaaaagaaaaaaaaaagattgttgaaaacggcatagtattgtatggcttgcttgggctaaaattagaaccctaagcccctcagcgagacagccgccgccgccttcttcaataaccgtcgcaatcctctttcggcaaaaaaagaaaacccttcttctcactcatattcttacgcacac

SEQ ID NO: 14150 - DNA, 282 bp, Glycine max
  Clone ID: LIB3040-036-Q1-E1-B5
gactcaccacttcaaaacactcataacacaaagcacaaagcaaagctcatccttgagttaaaaaatggcagcagcttcttccatggctctctcatccccatccttggctggcaaggccgtgaagctgggcccatcagccccagaagtgggaagggtgagcatgaggaagaccgtcaccaagcaggtctcctcaggaagcccatggtacggcccagaccgagtcaagtacttgggcccattctctggcgagcccccgtcctacctaaccggtgagttcccagg

SEQ ID NO: 14151 - DNA, 302 bp, Glycine max
  Clone ID: LIB3040-036-Q1-E1-B6
gacacatccagtcatgacggggtagtcgctgtaattccgcatagcactctttatctctttctccgccgcaaactagtcgttctacaggatcgccactgtagtacccttgaattaaacatcagagcacttcaatgatgtgcttggatgccaattgacggcacctcaagcaacaacgacgtcactgccaacgccgaggggtccgtgatgagcctcatcatgaagcacatccgcgttgtccgaactaggctgatacgcatccacgccatggcagatagcgtttcccagggcttgcctctgatcaa

SEQ ID NO: 14152 - DNA, 174 bp, Glycine max
  Clone ID: LIB3040-036-Q1-E1-B7
gacacactatccagaagaaaagaaacgagtggttctgctgcatctccaaccctgggaacagcatctccacactcatttccaaattatcaagcactaatgaaattaacacaaccaaaaaaaatttagaaacagaagaaacatatcaataacttaagtcacatacattctgacacc

SEQ ID NO: 14153 - DNA, 57 bp, Glycine max; identical to SEQ ID NO: 12752
  Clone ID: LIB3040-036-Q1-E1-B8

SEQ ID NO: 14154 - DNA, 373 bp, Glycine max
  unsure (1)..(373): unsure at all n locations
  Clone ID: LIB3040-036-Q1-E1-B9
ttaatgttagcctcttgaggctttctttccttttctctcctatgggagtgaggtccaagatgtgacctatgccttccttcataatagtcacgaagttcttcacttaggctcttgcaagagttataactactattggaggcatgtttttatcttttcatttctttcattatttttcttctttcttcctctcttattttctctctttcatcttgacttatttcttccactttttttttacctttttcttttctctcttgtttttctttccacaacttaagggatctcaactcatctaatatcttatacaaggggtccttangagtagaaccctcaccattaacactagatgaagaatgaagactcatgttggttc

SEQ ID NO: 14155 - DNA, 341 bp, Glycine max
  Clone ID: LIB3040-036-Q1-E1-C1
gatgccgaaaagtagtaccaagatggcttcagttgtgtatctcctctttggcttccatctcattgttatcatgtcaagttccttacccgcaactagtgaagtgtttgcaaaacagtatccatccacagaacccgtggaagaaaaactcacccaactccacttctatttccataacaacataacgggggaacacccaactgctatgaaaactgttttgcctcctaaggggtccattcatggttttggggctacttacatgatggatgaccctctaactgaaggaccaagtccaacttcaaagcttgtgggaagaaatttcctttgcccaaaagtgggggggg

SEQ ID NO: 14156 - DNA, 374 bp, Glycine max
  Clone ID: LIB3040-036-Q1-E1-C10
ggcttcgcctcattttctggctaaccaaccctgacactccttcttctccgcttcctcttcgatcatcgcttcagaatgccgccgaagttcgacccctcccagatcgtcgacgtcttcgtacgcgtcaccggcggtgaggtcggcgcggcgagttccctcgccccgaagatcggtcccctcggtctctcccccaagaagatcggagaagatatcgccaaggaaaccgccaaggactggaagggcctccgcgtcaccgtcaagctcagcgtgcagaaccgtcaggccaatgtcacggtggtcccatccgccgccgcgctcgtcatcaaggccctcaaggagcccgagcgtgaccgcaagaaaacgaagaacatcaa

SEQ ID NO: 14157 - DNA, 402 bp, Glycine max
  Clone ID: LIB3040-036-Q1-E1-C11
cccgctcctacaacagcaccgaaagggctacacaacggtaccgctgccatactactacagaagggtacggccgcgaggatacaacctaacgttaccgttgctacaacatcacagctcggtatggctgccatataactacatatcggtaccgctgctataagacgatcgaatggtacagctgccatgaacattacataactgttatcgctgcgaaactactcacacttgcgactccagacctcccacctaaccacgctttccccgcatcgcccttcctgcctcttgagcggcttgatgcttatatgccatgccacctgtatcagaacatctaccttctgtcacctaatctctattcactggctgtcgtttaacattgccatcactgtaacaaccgtgcctttc

SEQ ID NO: 14158 - DNA, 262 bp, Glycine max
  Clone ID: LIB3040-036-Q1-E1-C12
attggaacatgaagagtgtggaaagagaacttatgatataaatgactgaatgccgggttttgatggttaactgctattccagatgttgtctatggttaccagtttcataataatgtcctggtcctttgtttgtgttacatttgtttctacttatataccttatgaagctaccttgaatattagtaattgtggaacctgtaatccttaaaggaacatgtttgtttggataagttgaatgtatgttgcaatcactgtaatgttt

SEQ ID NO: 14159 - DNA, 246 bp, Glycine max
  Clone ID: LIB3040-036-Q1-E1-C2
ggtctcatctcacgccacccaaagttgtctttcgacctttctctctcaaaacctttgcttttgcgttggctatatatatataaaactaacttccccaaaacccaatcatatatcatttcatttcttttttctcgtccatccgtaaccatgtctcagactgttgtcctcaaagttggtatgtcatgtgaaggatgtgttggagcagtgaagagagttttaggaaaattggatggtgtggaatcatat

SEQ ID NO: 14160 - DNA, 259 bp, Glycine max
  Clone ID: LIB3040-036-Q1-E1-C3
gacttatctaaaagtagatggtccagattactaccacataaatggacaaatagaataactgaatatcgtatagctcaaaataaagatttaaccaaatgcaattcatatgaaaaaagccaattaattctttacaaagaacaacaagtaaacgcattataccaaataattagacaacaatatatatacgatcttttatcctataattttatcaattatgcagataagaaagactcatatatttatggatatagatccctat

SEQ ID NO: 14161 - DNA, 325 bp, Glycine max
  Clone ID: LIB3040-036-Q1-E1-C4
gagcaacatggtgaagctggtggagagatttacttgccagaagcttacgttagaaccaagaggactacttaatggagcaaatcagttggaagaacttgtagctagcttcccaactggcttatctgagtgtggagaagcattatcaagccttaggagtaggagaacgagtactgtttgtgatgaatgtctatggtttaagaaatctgtctttagtcaacttgtgtgttttgttattcagttctcagcaataaactgctctggcaatctagtttcatgtgcaaaaaaaaaaaaaaaaaaaaaaaaaaaaaagcgggggccccccggg

SEQ ID NO: 14162 - DNA, 311 bp, Glycine max
  Clone ID: LIB3040-036-Q1-E1-C5
ggtggtggaggttatccggatagtggacactatggtttatcagcttcatctgggtaccagaatcagcaccaccctccttctggggcttcacctgtgcctagggttccgcccatgtatcccaacgtgcccccttactactgaagaggtgtatcatcgcttattgggcgcagatgctttgtgtgcttctggtgattgcgtgaattgcagactatgtgctctggtgtagtgtatttgttagactgtacttttacagcctcttgacttcatctgctcccttttaagccttgattcatatgaatgttactagtttt

SEQ ID NO: 14163 - DNA, 304 bp, Glycine max
  Clone ID: LIB3040-036-Q1-E1-C6
ggcccattcaccgaggcaatgcagatagagttactgagtttccgagattaccagttgactcattgattcaacatgggaagatgctaagagagttaacgacgtatcacctcatgaatgcgtaaacgtctaagcttaagagttcaagcgttatggaactacggaacttcatgaatggagtgatattgtcaaaatttcaggatttagcgacttagcatcatgagatgcagaatggtacgacagtatggctgcctcaatggctcgaaatatcaagttgacatgtggtcgtggcgttcgagatgatcaa

SEQ ID NO: 14164 - DNA, 301 bp, Glycine max
  Clone ID: LIB3040-036-Q1-E1-C7
gatgccgaaaagtagtaccaagatggcttcagttgtgtatctcctctttggcttccatctcattgttatcatgtcaagttccttacccgcaactagtgaagtgtttgcaaaacagtatccatccacagaacccgtggaagaaaaactcacccaactccacttctatttccataacaacataacgggggaacacccaactgctatgaaaactgttttgcctcctaaggggtccattcatggttttggggctacttacatgatggatgaccctctaactgaaggaccaagtccaaaccctttt

SEQ ID NO: 14165 - DNA, 345 bp, Glycine max
  Clone ID: LIB3040-036-Q1-E1-C8
ggtctacagacattatgtacatgtcctttttaggcaccttagccatgagggagatattttggaagacccagctaatgagcctacaaaggacatgtacataatgtctgtagaccctgatgactcacctgatcaaccagaacatgtgcaaattgggatagagtcagggcttcctgtttcagtgaatgggacgaggctttcatcaacatctttacttgctgagctcagtgagattggtggactgcatggaattggcagggtcgacatgggtcaaaatcggcttgtaggtatgaatagccgtggagtgtaccacactccaggaggaaccattctggggtttttttttgg

SEQ ID NO: 14166 - DNA, 378 bp, Glycine max
  Clone ID: LIB3040-036-Q1-E1-C9
gacacacagagcggttctcatattttggagaatccgaaaaacacgttaaagaaagtcccattcccactaccgaagcaaattaagaagatgaagcagcagagagtggagtttatgggcatgggcatgggcatgggcatgggcctgggccttttggtggtgatgatggcatgtgggtcggcgagtggtgcggatgatttggcaaccaagtgttcagcggtgattcagaaggtaataccgtgtttggatttcgcgaaggggaaggaagaaacgccgaaaaagcaatgttgcgacgcagcaacgtccataaaggagagcaacccagagtgcctctgctacatcattgaagagacccacaagggtagcccacaggttaaaagc

SEQ ID NO: 14167 - DNA, 309 bp, Glycine max
  Clone ID: LIB3040-036-Q1-E1-D1
gaaacacaccacaccttcaaaccctaaccctagaagaagaaaaaaaccacaaccaccaccatctagggtttttctttttctcatggctagtttgtcaactaggattttcttcatcatgtcccttgtgtgcctggctctcggtccaatggcacaaggggaaatgacatgtggccaggttgtgagcaacctgaccccatgcatctcccatgtggtgtatggtggaaccaatgttcctgaacagtgtcgcactgggataagagatctctatggcatggctcagaccaaacctataccgccaagctgtttgca

SEQ ID NO: 14168 - DNA, 384 bp, Glycine max
  Clone ID: LIB3040-036-Q1-E1-D10
cccacgcgtccgagaattggagagcgagacctcacaactcgtcctgcgacatcggataattgcacaatatgatcaactcatctaccttcagatcggatgataaaacctttacaatcagatagcggcggatgtatgttggtgttagaatcatgggtgtgaaactgcattaaatacatccttgccccagaactagatgacgtatatgatagacaagtagagagaacacgtgagttttctacgagagtgatctcagattcgcgggaagatggcatcacttcatgctaatgtgacatcagttgtttacaacagtggcaagcgtgtttctcaatcgaaatttgcaggctcttccttcgtgtcggggttccatgttgttggtcgtgcttc

SEQ ID NO: 14169 - DNA, 362 bp, Glycine max
  Clone ID: LIB3040-036-Q1-E1-D11
ggatttaaccatgtatattgcactttgcagcatagagtttgactgcgatgatgatttgtttgctactgctggagtttcccggcgcatcaaagtttttgacttttctgctgttgtgaatgaacctacagatgctcactgtcctgttgtggagatgtctacacgttcaaaacttaattgcttgagttggaataaatatgctaagaatcaaatagctagtagtgattatgaaggaattgtgactgtttgggatgtaaccactcgaaagagtttaatggaatatgaagagcatgaaaagcgtgcatggagtgttgatttttcaagaacagatccctctatgcttgtatctggtagcgatgactgta

SEQ ID NO: 14170 - DNA, 163 bp, Glycine max
  Clone ID: LIB3040-036-Q1-E1-D12
gggagagcgtgatggtggtgctgtcaaaaggggggaaagttatcatcaaagacaaaggtatggtggaagtatatctttcatgttgtataattaagaatgtttgtagaaaatgttgtttttagaagaggataagaatattttggaaggttcctttcctttttgc

SEQ ID NO: 14171 - DNA, 313 bp, Glycine max
  Clone ID: LIB3040-036-Q1-E1-D3
gacaacacagaacaaaaacaaagaaaaaaaaaaacccttagccaacacaaccatcatggccacctctgctattcagcaatcagcattcactggtcaaactgctctgaagcagctcaatgagttcgtccgcaagaccggtggcgccggcaaaggtcgcactaacatgcgccgcaccgtcaagagtgctcctcagagcatttggtatggccctgaccgtcccaagtacttgggtccattctcggagcagattccatcatacctgaccggagaattccctggtgactacggatgggacactgctggattatcagcc

SEQ ID NO: 14172 - DNA, 307 bp, Glycine max
  Clone ID: LIB3040-036-Q1-E1-D4
ggtgctctgctcgtgcctctagggttatcatttctccatttccattttctctctcacttttcaagaatcgtaagctatgggaaagtcttacccaactgtgagtgctgattaccagaaggccgttgagaacgcgaagaagaagctcagaggcttcatcgctgagaagagatgcgctcctctaatgctccgtttggcatggcactctgctggaacctttgacaagggcacgaagaccggtggacccttcggaaccatcaagcaccctgccgaactggctcacagcgctaacaacggtcttgacatcgct

SEQ ID NO: 14173 - DNA, 297 bp, Glycine max
  Clone ID: LIB3040-036-Q1-E1-D5
tcaggcaccggggaaggaggtctaatttacggagtaaagcagtaagtataagggcttagtgctccgattgcgccttaggactaggactgataggtaaatgcccctgactcttccaatgaaggtgggtaggcttttcttttgtttaggattggcaagaggatggctgcctcggtctcaaagctgttagataatgcgctcttatcaatacagggacgcgagaggaattcctcgaaggtagtccctaaataaagggatagggcattatcggtgtggggatatctttgaatatgactctta

SEQ ID NO: 14174 - DNA, 259 bp, Glycine max
  Clone ID: LIB3040-036-Q1-E1-D6
gacagcacagcactctttgcaacacaacaaaaaaagacaacacagagagaagcgtcttaataaacgctcttctctgaaaaacctgatttcttctcttcttctcttctctttcgtttcgatcttcgatctctgaaaatgagagagtgcatttcaatccacatcggtcaggccggtattcaggtcggaaacgcctgctgggagctctactgcctcgaacacggcattcagcctgatgggcagatgccaagtgataagactg

SEQ ID NO: 14175 - DNA, 301 bp, Glycine max
  Clone ID: LIB3040-036-Q1-E1-D7
ggggaattgtctttcatctggtaagactgatgacgaagttgttatcaccttcagcaccaccatgtccatgtctaagggttccaattccaaatccaaccgtaaaatatcgatatgcatacagtcacagagggcaattgcgtgttcgatgcagtgataatagtgatgaagagaaggagaaggagaagaagaagaagaaggaaaagcggttgtctcagcagtcgtcgtgggaagcccaagacgctgagggaagagactatctctaccgacttgggaaagaggctgataacatgaacatcgccgt

SEQ ID NO: 14176 - DNA, 367 bp, Glycine max
  Clone ID: LIB3040-036-Q1-E1-D9
gacttcacaactcaaactgcttcattgcataattgcagataagatcaacccttctaccttcagatcggatgataaaacctttacaatctgatattggaggatgtttgttggtgttagaatcatgggtgtgaaactgcattatatacatccttgccccacaaatacatgacctatatgataaagaagtagaaggaagacttgaattttctacgaaagtgatctcagattcgcgggaagatggcatcacttcatgctaatgtgacatcagttgtttacaacagtggcaaccgtgtttctcaatcgaaatttgcaagctcttccttcttgtctgggttcgatgttgttggtcgtgcttcaagtgcttgga

SEQ ID NO: 14177 - DNA, 376 bp, Glycine max
  Clone ID: LIB3040-036-Q1-E1-E11
gagggtgaaggaagacgcgtgcgtggataatatagagaatagtaatgtaatggcagagcaaagtggtgcagagttgattgatcgatgattgatgatggttcgggcgtcggtgaaggtgggttccgccaagttcgtagtgatctgcgtggggcttttaggcttcgctctcgtcgccgactttctatgggcctctacctcttccactcttcccacctccaccaaaccctccgcatttgtggttccctccaaccacaataagaagaaatatgagaatgccactgcttctggaagattccttgccgcggcttaccccgatttggatgcgccgcagctcaggtggcagaagatggctcctgctcccgtcactcgccttgag

SEQ ID NO: 14178 - DNA, 316 bp, Glycine max
  Clone ID: LIB3040-036-Q1-E1-E2
ggcgtacacagcctcaacaaccctaacgcgtgcagagcagagagagacgcagccatggggcgaagacccgcgaggtgttataggcaaattaagaacaaaccataccccaagtcacggttttgccgtggtgttcctgatcccaagatcaggatttacgatgttggtatgaagaagaagggtgttgatgagtttcctttctgtgtccatctggttagttgggagaaggaaaacgtttctagtgaggccctggaagctgctcgtattgcttgcaacaagtacatggccaaatttgctggaaaggatgctttccaccctt

SEQ ID NO: 14179 - DNA, 134 bp, Glycine max
  Clone ID: LIB3040-036-Q1-E1-E3
gattgtgatgtgagagacccatgccattataatcagcaacaacgtttctgataatctgatctatggttttagtaatttatgtcatttttgtcttcgtattgcaacttgcaagttagtttaacttaattttgagg

SEQ ID NO: 14180 - DNA, 290 bp, Glycine max
  Clone ID: LIB3040-036-Q1-E1-E4
ggcagttcaattccaatatattccattctctctgtgtatttccctacctctcccttcaagatgcagatcttcgtcaagaccctcaccggcaagaccatcacccttgaggtggaaagctctgacaccatcgacaacgtcaaggccaagatccaggacaaggaaggaatccccccggaccagcaacgtctcattttcgcccggaaagcaacttgaggacggccgtacccttgctgactacaacattcagaaggagagtactcttcacctcgtcctccgtctccgtggtggcc

SEQ ID NO: 14181 - DNA, 305 bp, Glycine max
  Clone ID: LIB3040-036-Q1-E1-E5
gagggttacacgccgtcgtcgctgtttttgtgtgtcgcttcttcgtaagtgcagctgcaatggtgaagggacgccaatgagaacgtgtcagactctacgtgaggggtacaatccttggatacaaaaggtccaagtcaaaccagtatccaaatacatccctgatccaaattgagggtgtgaatgccaaagaagaagtagcatggtatgctggcaagaaaatggcctatatctacaaggctaaggtgaagaagaatggaagccattaccgctgcatatggggcaaggttacaaggcctcatggtaac

SEQ ID NO: 14182 - DNA, 303 bp, Glycine max
  Clone ID: LIB3040-036-Q1-E1-E6
ggttgttgttttcagtgtactggaagaatcactcccttatccatttccacaccacaccatggcctcaagcaacgctctctcttcagcctccattctacgctctcccaaccgccagtctctgacccgaggagcgaaccatactggaagagtaaattaccggaaaccgaataaccgtttctccgtgaaagcctccgccaaagagattgcctttgaccagcattcccgctctgctatgcaggccggcattgacaagctcgccgacgctgttgggctcactcttgggcccagagggaggaatgttgt

SEQ ID NO: 14183 - DNA, 288 bp, Glycine max
  Clone ID: LIB3040-036-Q1-E1-E7
tatctggcatatagtattagtaaaggtcttgttaatcagtgtccttaggatattgattaaaaaattaaaaggagaaagtatttattatgaaaatcataagagagcataaaaaaatcatgagcagtgtaattttacacatcccaataatttttttctccttttaattccttaaccaatgtcctaagagagttagcatttgcctatattagtaatagtacctaccttgaaatggggaatggttagtttgaggaaatcaggattgggctggaaatctgcatctaatattgc

SEQ ID NO: 14184 - DNA, 302 bp, Glycine max; identical to SEQ ID NO: 13390
  Clone ID: LIB3040-036-Q1-E1-E8

SEQ ID NO: 14185 - DNA, 335 bp, Glycine max
  Clone ID: LIB3040-036-Q1-E1-F10
gacaatcgaacgggaaaaggcgtcttcataaacgccgcccaaaacttctcatacccttttattcattccattcgtttctagggttttcttttctttgccgagaaaatgagagagtgcatttcgatccacattggccaggccggtatccaggttggaaacgcctgctgggaactctattgccttgaacacggcattcagcccgatggacagatgccgagtgacaagaccgttggcggaggagacgacgccttcaacacatttttcagcgagaccggcgccggaaagcacgtgccccgcgctgtcttcgtggatcttgaacccaccgtgatcgacga

SEQ ID NO: 14186 - DNA, 360 bp, Glycine max
  Clone ID: LIB3040-036-Q1-E1-F11
ggaggtgacttgattttccctcttctctttttctctctcgtgagtctcgtccctgaagcgaaattctagaatggcggaagaagctcctgcatctgaaacctccgtcacaatgcctcaaccggcggaagtcatcaccgtcgacggaaccctaacctcttccgagaatgacaagagcggaatctccgtcgatgccgccgcgcacggcggtgaaaagacggtgtccaacgctgaaccttccggtagcgatcctcagaagtctctggagttggcgaacgagctgatggaaaaaggaaacaaggcattaaggagaacgattttggagaagcagctgatagcttcagccgtgctctcgaaatcaga

SEQ ID NO: 14187 - DNA, 375 bp, Glycine max
  Clone ID: LIB3040-036-Q1-E1-F12
gggagtttcaacattcaacaatggtacctcaagctttgtcagtgcctgcgagttccagcttggctatcgcttctcgcaccagaagtccctcccacctcgtattttctcaaagaaacccgtgctcgatagcttcttccttgccaaacccatatggccattcatcggaagttgggttatcaagtaaaagccgtggctttcctttaaaacatgatgagaaaaatatccatggtgctagtacaagttatggtgcaattgaagccaaggggaatctgccgataactccagcagtgatgactcctggaggacctcttgatctcacatccggttttgttcaggaatcgtataatcttcataggtcagccagtcaattcacaa

SEQ ID NO: 14188 - DNA, 307 bp, Glycine max
  Clone ID: LIB3040-036-Q1-E1-F2
ggtttttgtttcccatagcatagaagaagcagaaagagaagcattagcaaaagcaagaagaactagtctaagcagaaatggcctcttcagtgatggcatctgtggccctcaaacctgcccctttcactgttgagaagtcctcagttagaggccttccctccctctcaaggaactcctcttcattcagagttgtggccagtggtggcaagaagatcaagactgacaagccttatggaattaatggtggcatggctttgagggaaggagttgatgcatctggcaggaaaggaaagggaaagggcgttta

SEQ ID NO: 14189 - DNA, 236 bp, Glycine max
  unsure (1)..(236): unsure at all n locations
  Clone ID: LIB3040-036-Q1-E1-F3
aatagattcaatctcagcctcgaacaaataaaggatatctctgatcgctctcaagaatttgtggataagctttttgaagaatcaaagaagcttgaagactatgcatcacaggctgaccaaatgcaattgaagagcattgatgagtttaagaaagcatacgaggaacaatcaaaatctgatacagagaaacttattgccaatatgactagtttagtttcagatcacattcnggcgaa

SEQ ID NO: 14190 - DNA, 320 bp, Glycine max
  Clone ID: LIB3040-036-Q1-E1-F4
tacgccaaagccctctcttatttccagacgcggcggcttcttcttccgtttttgtctatcggcgtgaacaatggcgacttacgctgcgatgaagcccacaaagcccggcctggaggagccccaggagcagatccacaagataaggatcaccctttcctccaagcacgtcaaaaacctcgagaaggtttgtgcggacttggttcgcggtgcaaaggacaagcgcctcagggttaagggacctgtcaggatgcccactaaggttcttctcatcactaccaggaagtccccttgtggtgaaggtaccaacacatgggacagat

SEQ ID NO: 14191 - DNA, 294 bp, Glycine max
  Clone ID: LIB3040-036-Q1-E1-F5
ggagtgagtgagggcattgttgtttaggtacagaaaaatggcatcatctcagtcgaagaagagagttgacgctgtcgattctcgcgctgcttccgttctccttcgcgccaaagatggaagtgcttttgctcgatgcgacgactgcaagaagaatgtgccggttgcactcatcgacatgcacagttgcagccttgaagctaaaattaaaatgaacctagatgctcaagttgtggaacaggctgctgaagctaagaagccagagaggaagaagcccaaatccaaagagcctatggc

SEQ ID NO: 14192 - DNA, 304 bp, Glycine max
  Clone ID: LIB3040-036-Q1-E1-F6
ggggttctcctacagattcttcagcaactgcgattttggatcggaacctcttctgcggcgtagcaatgggacactccaacgtttggaattctcacccaaaaaactacggtcctggttctcgcacttgccgagtgtgtgggaatccacatggattgatcaggaagtatggccttatgtgctgcaggcagtgcttccgtagcaatgccaaggaaattggcttcatcaagtatcgctaaaagagctgttgtcacctacggaccaatattatgttctggcactaggatgttttgaagatgttatgttt

SEQ ID NO: 14193 - DNA, 293 bp, Glycine max
  Clone ID: LIB3040-036-Q1-E1-F7
ggtagaatagagagctcctccaattagggtttttgtgatctgcagctacgatgggtaagggaacggggagtttcggtaagaggaggaacaagacccacaccctctgtgtgaggtgtggccgccgcagcttccacctccagaagagtcgttgctctgcgtgcgcttaccccgctgcgcgcaccaggaaatataactggagcgtgaaggccattaggagaaagaccaccggaactggaaggatgaggtacttgcgtaacgtgcctcgcagattcaagagcggcttcagagagggt

SEQ ID NO: 14194 - DNA, 288 bp, Glycine max
  Clone ID: LIB3040-036-Q1-E1-F8
gactcatacaatagagaccagcttttgcttctttgtgaacatggagatgaggaaatcatgtggcttcttcttcttgctcctcctccttgtctttgcttcccaggtggtggtgcagacggagggaagagtgtgtgagtcacaaagccacgggttccatggtttgtgtaatagagaccacaactgtgctttggtctgcaggaacgaaggtttctccggtggcaggtgcaaaggcttccgccgccgctgcttttgcaccaggatttgttgagatctcatcaaacactactc

SEQ ID NO: 14195 - DNA, 300 bp, Glycine max
  unsure (1)..(300): unsure at all n locations
  Clone ID: LIB3040-036-Q1-E1-F9
ggttccatttctcaacaacttctgctacttcctactccaaccgcacttctgctccgcaattatcatgggcaaggtcaagatcggaatcaacggatttggaagaattggccgtttggttgccagagtcgctctgcaaagagacgatgtggagctcgttgccgttaacgaccctttcattaccaccgattacatgacatacatgtttaaatacgacagtgttcacggacactggaagcatcacgatgtcaccgttaaggacgagaagacccttctcttcggtgacangccagtcactgtttt

SEQ ID NO: 14196 - DNA, 372 bp, Glycine max
  Clone ID: LIB3040-036-Q1-E1-G11
ggtcttctccgcccccactcacccaccctccatacacactctctctgagtcggtcgagttgaatcggtgtgagtcagtgaccgagtcgaaccatgtcggacgaagaacaccatttcgaatccaaggccgatgctggagcctccaagacctatcctcaacaagccggaaccatccgcaaaaacggttacatcgtcatcaagggtcgtccctgcaaggttgttgaagtttctacttccaagactggtaagcacggtcatgccaagtgtcactttgttgggattgatattttcactgccaagaagcttgaagatattgtgccctcttctcacaactgtgatgttccccatgtgaatcgtactgattaccagttga

SEQ ID NO: 14197 - DNA, 349 bp, Glycine max
  Clone ID: LIB3040-036-Q1-E1-G2
ccaggcgtcaggagaagaagacagaagggggaaaaaccgtgtttcactcggatcgcgcattcacaaataaggttgaagagggccctgccggaagaagataaataccgtctttcattttccggcgatctcttttttcttccatcaccgttttccggctatccctaatccttaacagaaatgacgacatcaaggcgccttgcggacaggaaggtggagaagtttgagaaaaacatcaccaaaagaggatttgtgccagacacaaccactaaaaaggggaaagactaccctgttggcccagtgctgctcggtttcttcgtctttgttgtcattggatcatctctcttccaga

SEQ ID NO: 14198 - DNA, 290 bp, Glycine max
  Clone ID: LIB3040-036-Q1-E1-G4
gacagctgcaataacaatggctgcctcactagatgctgcagctaccttcatgcgacccaccagcgttcgaatatcctctcgcatcctcatatctacacaatgcatttctaaagcatttggcatgtcacctgctgcaactaacctcacttgctcccttcagcctgatttccaagaacttgctcaagtgtgtgtccacgctaccaaaattgcaagattcgcccttgccacctctgctctcgttgtttctggatcaagtgcacaaagtgttccaatcaggccaaccctcaacc

SEQ ID NO: 14199 - DNA, 90 bp, Glycine max
  Clone ID: LIB3040-036-Q1-E1-G5
gccattagataaaattcctcaatatgaaagagacattctaacgactattaaaccagaattactacaatcactaaaaggtggactaactag

SEQ ID NO: 14200 - DNA, 314 bp, Glycine max
  unsure (1)..(314): unsure at all n locations
  Clone ID: LIB3040-036-Q1-E1-G6
gattgaattgaaaactctccccacaactcaaattgaaaaggaagacaaaaaaaaaaccccattgctttgttttccattattggtgccaaagtttcaaactttctctgcttcctctgctcctccagggtaagaactgctttccctttcgagtttacagtgatttgattcttgccccttttgtggtttgatccaaatcaaaggacgtttctctactggtgctttgattctaagttttggtggggggaaatgatgggaaattanggcctgggtctggaatttttcatcatttctatcgaaaaattgtaccttgttgt

SEQ ID NO: 14201 - DNA, 305 bp, Glycine max
  Clone ID: LIB3040-036-Q1-E1-G7
gggaatcgttgctatttctcacagttgcactggagtagcagcaagagcttgtggtttagtgggactagaacccactagggttgcagaaatcctcaaagatcggcctttgtggtttcaggattgccgagctgttgatgttctcaatgtgctgcccacagcaaatggtggaaccattgagctgctttatatgcagctatatgcaccaaccacattggctcctgctcgagacttctggttgttgcgctacacttctgttttagaagatggcagcttagtgatctgtgagaggtcacttaaaaatactc

SEQ ID NO: 14202 - DNA, 320 bp, Glycine max
  Clone ID: LIB3040-036-Q1-E1-G8
gggatgaagggggaaaatagttcagtttgttaatcaccaacgttaaacgttaacgctaacgctgtcttataaaatgttagcttaataataatttgaaacctcttactttgagagacagtggcaactgtggtactctgaaattgatcctctcagtctcaggaacacgggtgcgttagtcaaaagtgaaaaagagatggcagaactgagtttgggaattctaattgatattgttgatgacgaatggatgagagacactcttcctgatgatgatcttccactgcccccaacactggttgttacgacagatgatactgaggact

SEQ ID NO: 14203 - DNA, 377 bp, Glycine max
  Clone ID: LIB3040-036-Q1-E1-G9
gatccatttctcgcaacaatgcttaacctctctcattccccatttcctcacctccttcaaccgctgctaaattctagggttccgaaatggacgctggcggaaagatcaagaagggcgccggaggtagaaagggcggcggcccaaagaagaagccggtttcaaggtccgtcaaagccggtctccaattccccgtcggaagaattggccgttatttgaagaaaggaaggtacgctcagcgtgtcggtaccggtgctcccgtatacttggctgcagttctcgaatacctagctgccgaggtgcttgagttggctaagaatgccgcacgtgacaacaagaagaacaggattattccaagacacgtgcttttggcagtgagg

SEQ ID NO: 14204 - DNA, 309 bp, Glycine max
  Clone ID: LIB3040-036-Q1-E1-H1
gaactgttgaatcgtcttgattaccattttgtagcatgttctgtacaactagaatgtgtttgattataagacattattatttattttatctgctgcaagtatctaattaagcaatagtatcattacagtggatgtggaatttgcaggtatataaactgctaattagtcaagttaacttgtctcaaatatcttaaagtgctaatttccttgtgtctgtcctttttatagtttgactattattagtttgttgaattggagaaattgatacaagggcaccaaatttggtgattacagtatttgtttgatgtg

SEQ ID NO: 14205 - DNA, 344 bp, Glycine max
  Clone ID: LIB3040-036-Q1-E1-H10
ggtggttcttgtttgcgagatagaagcgtaagcagcggctaccctaacctcgtcttcctctctactaatttcagctatggccgacgaagctgtggttgttccagatcccacccagatcgatgtcaagctctttaaccgctggagcttcgaggatattgaggttactgacatttcactggttgattacattggagttgcggcatccaagcacgccacatatgttcctcacaccgccggaaggcactccgtgaagcggttcaggaaggcgcagtgccccattgttgagaggctcaccaactctctcatgatgcacggtagaaacaatggcaagaaactcttggctg

SEQ ID NO: 14206 - DNA, 374 bp, Glycine max
  Clone ID: LIB3040-036-Q1-E1-H11
gatcgaagaacagcactctggttgccgtgccaccatcttctccaaagttatcatattcgaagagaaaaaaggagtgactgtccaggttgggcaattagggacggaaaaggagaaacacgaaaatgtttttccacatagtactggagcgaaatatgcagcttcatccacgctactttggtcgtaaccttcgcgataatctcgtttccaagcttatgaaagacgtggaaggcacttgcagtggccgacatggatttgtggtggcagttacagggatagagaacatagggaaagggctaattcgtgatggaacagggtttgtgacatttccagttaagtaccaatgtgttgtcttcagaccgtttaagggagagatc

SEQ ID NO: 14207 - DNA, 303 bp, Glycine max
  Clone ID: LIB3040-036-Q1-E1-H12
gacttcacaactcaaactgcttcattgcataattgcagataagatcaacccttctaccttcagattcgcgggaagatggcatcacttcatgctaatgtgacatcagttgtttacaacagtggcaaccgtgtttctcaatcgaaatttgcaagctcttccttcttgtctgggttcgatgttgttggtcgtgcttcaagtgcttggaagaaggaacttgtcccatcttccatttccttggtgcctaaagccaccctaacatttgattccccaactaccaattcaaacattaccaagccaaagaag

SEQ ID NO: 14208 - DNA, 314 bp, Glycine max
  Clone ID: LIB3040-036-Q1-E1-H3
gagcctcagcagaagcagaacgaggagaagcagaaggagcaaaagcaatggcgccgaagaagccgagaaccacgacaaggaaccctgatttggttagggggattggcaagtattcgaggtcgcagatgtaccacaagaggggcatctgggccatcaaggccaaaaacggtggcgttttgccccgccacgatcccaagcccaagcccgaggccccggcccagaagccgcccaagttctactccgcggacgatgttaagaagcccctcgtcaacaagcacaagcccaaacccgcgaaactcagggggggccccttt

SEQ ID NO: 14209 - DNA, 353 bp, Glycine max
  unsure (1)..(353): unsure at all n locations
  Clone ID: LIB3040-036-Q1-E1-H4
gatcccaatcagaaaaagttagggtttgtaactttgtcttttgcttgcgaatctgaatcgaatgataatcaatcaatcatcatgtcgtcggcgaagaagatcacactgaagagttcggacggcgaggctttcgaggtggacgaggcggtggcgctggagtctcagacgataaagcacatgatcgaggacgactgcgccgacagcggcatccctctgccgaacgtgacgagcaagatcctggcgaaggtgatcgagtactgcaagaagcacgtcnagggcgcgaatccccgaagacagaccctcccgaggacgattctcaaaaaaaggggccccccccctgtgggggggggggg

SEQ ID NO: 14210 - DNA, 285 bp, Glycine max
  Clone ID: LIB3040-036-Q1-E1-H5
ggcctccattcgggactgtaactagccgcagcacgaggagcagcctcaggaggagaaggatgtctcacaggaagttcgagcacccaaggcacggttcactgggatttcttcccaggaagcgtgctgctcgtcacaggggaaaagtgaaggcattccccaaggatgacccatccaaggcacccaagctcactgcattcttgggttacaaggccggtatgactcacattgttagagaggtcgagaagccaggatcaaagcttcacaagaaggaaacttgtgagcctg

SEQ ID NO: 14211 - DNA, 81 bp, Glycine max
  Clone ID: LIB3040-036-Q1-E1-H6
gccggtttcccgaacgatttgatggtttggaatgcatttcccaagcaacgagtcttcggttcgaaaccagcagagagagag

SEQ ID NO: 14212 - DNA, 295 bp, Glycine max
  Clone ID: LIB3040-036-Q1-E1-H7
ggctcttggctgatatttcctgataagtggacagacgcttaaacagagaaactaacacagatttgcatgcatggggaaaataacgcacattgtagtaattcccagtgcagggtacagccacttcgttcccgttatccacttctcaaagagacttgttgagcttcacccagaaattcacgtcacatgcatcattcccattctggggtctctcccaagtgctgcaaaacccattctccaaacccttccacaaaacatcaacacggttttccttccaccggtgaaccctaatgaccta

SEQ ID NO: 14213 - DNA, 303 bp, Glycine max
  Clone ID: LIB3040-036-Q1-E1-H8
tattttagggaggaatttatttcattgctacaaatatggattatttaaaagaataagacatgtatttggatatttcccttcaacttaacaaaaattgaatttttttccatacacgcacgaatagttgaagggaactctccgaagaaaaaatggattatgggagtaacaaaaaaacctgacttgaatgatcctgtattaagagctaaattggctaagggaatgggtcataattattatggagaacctacatggcccaacgatcttttatatatttttccagtagtaattctaggtactattgcc

SEQ ID NO: 14214 - DNA, 374 bp, Glycine max
  Clone ID: LIB3040-036-Q1-E1-H9
aagcataaaaagaaaagaaataacacaactatcctaaaaaaatcagattgcaactaactgaaagggagataagaaatcctgggtttcctcccaataagcgtatttttaacgtcattagcttgacgagtcaaatgccttcaaggtggcatgaaggtcacaaagaacacatattccttgtatttttgcctcctagctagagactccatgaaagtcatgtattctggaagcaccttccatatcattgcaagagaagtgctagtgatcaaggaaagaataacacttaaggctttctcatgttctccatgtccttcttccttgacaatcagttgatgaggatgagtattgacttggagaatactttcttgttgaatttc

SEQ ID NO: 14215 - DNA, 81 bp, Glycine max
  Clone ID: LIB3040-034-Q1-E1-H12
gtggtagggctgcaaaaagacgacgcaatggtgtctgatgtaaactataatgacttcagcatagatcatccgaatcttcag

SEQ ID NO: 14216 - DNA, 362 bp, Glycine max
  Clone ID: LIB3040-032-Q1-E1-F4
ggtgtgtttttctcaatccaaacaaacagtttctagtttctgggctatagtactaaggtttcttcttctcttctcttcctccgctaacacatacagtagatgcgtttgcttctatattgttgatcatgaaccgtcacgaccaatttcagaaacctcaatctctctctaaaggaactacagatcatagtcagcatcagaacaaggaagatgtggtttctataaaagattgtatctcaccggacttgacatcatttgcgacctcctctggagatgttgctgctggtttcacaggtgttcatgaatcagaaaccctgtcttgttattcatcagtctcaacttctgtttgcgttcaaagcaaaact

SEQ ID NO: 14217 - DNA, 342 bp, Glycine max
  Clone ID: LIB3040-032-Q1-E1-F6
ggcagcaggagcaggatgtccatctctctacccgtttccatggcaaccacaatccattccttaccctattcacttctcaaactcaaaccaccctccctcaccccatctctatttcgccgcacgctctttcccaattcaactctcaacgccgcccctaaacgcaccgtttcgtccaccactttctcactgacgctcactaacggaacctgcaaaaccagacacgttgccgccaaatcatccgaagccgacaccggaaacacttccacctcgctaacccaaaccgtgtttggggtgcttcatttggcggtgtcactgggcctcattctcgcggtggacaagttt

SEQ ID NO: 14218 - DNA, 383 bp, Glycine max
  Clone ID: LIB3040-032-Q1-E1-F8
gattcacaacttcaatccctcttttgctttaccaaattccattttccaattcaaaaccctaactccgttcgaagcaccaaatcgtgatggcaccaaaggcagagaagaagccagcagagaagaagcctgtggaggagaagaaatcgacggtgggagacaaggctccggcggagaagaagccaaaggccggaaagaagcttccgaaggagggaggcgccggcggagaaggtaagaagaagaagagaaacaagaagagcgtggagacatacaagatctacatcttcaaggttctgaagcaggttcaccctgacattggtatctcaagcaaggccatgggaatcatgaacagcttcatcaacgacatcttcgagaagcttgcccag

SEQ ID NO: 14219 - DNA, 373 bp, Glycine max
  Clone ID: LIB3040-032-Q1-E1-G1
ggcgaaacagagagtgatttcagtgagtgatcggtgttcacttgatctcatcataatcgtcagcgtcaattgaagaagatgccgatcagaaacatcgccgtcggaaggcctgaagaggcgactcaccccgacacgttgaaagcggctttggctgagttcatctcaaccttcatcttcgtgttcgccggctcaggctccggcatcgcctacaacaagctcaccgacaacggcgctgccacccctgccgggctcatctccgcctccatcgcccatgcattcgccctcttcgtcgccgtctccgtcggagccaacatctccggcggccacgtcaaccccgccgtcaacttcggcgccttcgtcggcggcaacatca

SEQ ID NO: 14220 - DNA, 274 bp, Glycine max
  Clone ID: LIB3040-032-Q1-E1-G10
caccaccaccatgctcgtggaatctccaatgctcatgaaccaaatgctcgctccatataaaattatataattatgactaggattcagaacaagacttgatgatgattagcttaattctcattaattggggctagagtactactgttgttgaggatactttattttataattaagggctggaaaggaatttataaaatcccaaatctaaataaggtgcatctttaatttatgaaatcactttgttttaacctttgtaaaaaaaaaaatttttttt

SEQ ID NO: 14221 - DNA, 351 bp, Glycine max
  Clone ID: LIB3040-032-Q1-E1-G11
gagagagaaggctccatttataaaacatcgtgtgcgtactcgctcttcacctaggtttcggtcccatcaacttcagggatggtgcaaacgtccacttatcgcaagtctcagagctatgctactagttccaactaactacgggttgttaagatccctgatggcgaattggtgtactataacatctagttgagagcacgtggacgtaactgccctgtcagtggtaagaagatccaatggattctatacttaagtcctgctgaattcaagaggtctagattgccgatgaatcgcatgacagtagatcgatcctatcgatgtctgttatcctggggagctgttacagagttgatt

SEQ ID NO: 14222 - DNA, 354 bp, Glycine max
  Clone ID: LIB3040-032-Q1-E1-G12
gagcagcgaggagaggaatcagaatcgcgttagggagaagaagagaaaatcgcaggtgaaaatgagcggaacggtgaagaaagtaaccgatgtagcattcaaggtgggaaggaacatcgattgggatggaatggcgaagcttctcgtctccgatgaggctcgcagggagttctccaatctccgtcgcgctttcgacgaggttaactcccaactcgaaaccaagttcagccaggaacctgaacccatagactgggattactatagaaaaggaattggcactcgcttggtggatatgtacaaggagcattatgagaacaatgaagtccccaagtttgttgacacagtaactcctca

SEQ ID NO: 14223 - DNA, 349 bp, Glycine max
  unsure (1)..(349): unsure at all n locations
  Clone ID: LIB3040-032-Q1-E1-G2
cggggatggtgaggacggtgaataataacaagctgcgattggattatggagtggcattgcttggttggtanggatgactgtgttcattgctgtgttgtctgaatatgtggtggatacaattgaggatgcatcagattcgtggggtttgtctgtgagctttctcagcataatcttgctaccaatagttggaaatgcagctgaacatgcaggagcaatcatatttgctttcaagaacaagctggacatttcattgggtgttgcattgggttcagcaactcagattgccatgtttgtggtcccattatgtgtaatcgttgcttggataatgggtatcgatatggacctgaac

SEQ ID NO: 14224 - DNA, 365 bp, Glycine max
  Clone ID: LIB3040-032-Q1-E1-G3
gaggaggaggccgatcgatggcggcgactcggatttcgatttggatgtggaagatggggagttggagttcacggaaggggatgatgcctttgttggtttgaagtttgactagtgatgatgatgcagcagcaatgggtgatggaaattttactgcttttttttttgttgctaattctaggaggagtagcagcatatagggtggtagagtagtgtttttggatagtgttttttgcacagattatttgtggagaaacaactgaaaacaaagtatacgtgttgatttggggttttgtcattttggtaaagaggcattaccttgttcatattttaccatttttgtaatgccccttttgatttgatgacct

SEQ ID NO: 14225 - DNA, 342 bp, Glycine max
  Clone ID: LIB3040-032-Q1-E1-G4
gaatccaacagaacagaactagtaccatgttgctgtcacaagccaaactgcacaacaacaacaacatctccaatgccattaacatgattatgaagaagaagggtaataacaataacaacaatcattgttcacctgctatactttatcactacccttgccctgatggtgcttttgctgcccttgctgcacacctttactttaaggccacttcatcattctctcctcttttctttcccaacactgtcttcaaccccctcagtgctgaagatcttcctctgaatgaaattggtgatctttatctcttaaattttgtggggcccgatggttttgttcaagaaatct

SEQ ID NO: 14226 - DNA, 380 bp, Glycine max
  Clone ID: LIB3040-032-Q1-E1-G5
gattcaccacaaccctctctctatattccattgccacccagttttgaatatatttttattccttctttgtttcttcactttcttccatacacataaccatgtcttctcagactgttgtcctcaaagttggtatgtcatgtcaagggtgtgctggagcagtgaacagggttttgggaaaaatggaaggtgttgagtcatttgacattgatctgaacgagcagaaggtgacagtgaaaaggaaatgtggagccaagaatgaagttctgcaaagccttgttccaaatctgggaaagaagactgcattctggggtggataaagcaccacaatctagaaaacaagccttttagaaagtgcacctgttgcctcagaaaacaagcct

SEQ ID NO: 14227 - DNA, 328 bp, Glycine max
  Clone ID: LIB3040-032-Q1-E1-G6
gactgcgaaccagtagggactcccattccgactcttagccgccgatctctcagggcttgcatcttctcaggtaagctgtgaagatgtacacatcaaggaagaaaatccacaaggataaggatgctgaaccaactgaatttgaagagtcagttggacaggcattgtttgatctggaaaataccaatcaggagcttaaaagtgatctgaaggatttatacataaactcagccgtgcaagttgatgtttctggaaaccgcaaggctgttgttattcatgtcccttacagattaaggaaaggtttccgtaagattcatgttaggcttgtcag

SEQ ID NO: 14228 - DNA, 83 bp, Glycine max
  Clone ID: LIB3040-032-Q1-E1-G8
gagacaagggtggcatcgcggtatacgcgatagacaccgattttggactatatgggaatgccgactttgtttcatcgcgttcg

SEQ ID NO: 14229 - DNA, 356 bp, Glycine max
  Clone ID: LIB3040-032-Q1-E1-G9
gaacagcgaaacagagagtgatttcagtgagtgatcggtgttcacttgatctcatcataatcgtcagcgtcaattgaagaagatgccgatcagaaacatcgccgtcggaaggcctgaagaggcgactcaccccgacacgttgaaggcggctttggctgagttcatctcaaccttcatcttcgtgtccgccggctcaggctccggtatcgcctacaacaagctcagcgacaacggcgctgccacccctgccggccgcatctccgcctccatcgctcatgcattcgccctcttcgtcgccgtcgccgtcggcgccaatatctctgggggcaacgttaaccccgctgtcaacctcggcg

SEQ ID NO: 14230 - DNA, 348 bp, Glycine max
  Clone ID: LIB3040-032-Q1-E1-H1
ggaaacacagtgtcagaatctgagttctttgaactcaaaccctaaaaaaaacgatgtatcgttttttgtcttccattcgccatggctgtggatcttccctcacatcacttctcgcgccgaaacccacccttccattcgacgccgccctacgatctcgccgtttacctcaaaacgacggacatgttagaggattttcaagctcgaattttgattggaggaatcttattgtgaacgagaatgtgaatgcagatgattctatgcaggatgcagagaacagaaactccgaaaagtggaataatatgaggctgaatatgaatgcagatgcaaaagctcctccagattttgtgc

SEQ ID NO: 14231 - DNA, 371 bp, Glycine max
  Clone ID: LIB3040-032-Q1-E1-H10
gacttgctataatgttacataaagctaaggagaaatattgagaagcaggaagaagcaagttatggcgacgaagcagcttccgcagatcgccattctgggagctggtatctttgtgaagactcagtaccttccgagactctccgagatctctcatcttttcattctgaaatccatttggagccgcactcaggaatcagctacagctgccgtaaacatagctcgtaagcattttctccaagtagagactaagtggggagataacggttttgatgacatcattcacgatggatcaatcgatgctgttgccgtggtcttggctggacaaaatcacgttgacatctcactcacgttgctaaatgctggtaaacatg

SEQ ID NO: 14232 - DNA, 384 bp, Glycine max
  unsure (1)..(384): unsure at all n locations
  Clone ID: LIB3040-032-Q1-E1-H12
ggttgacaaaggaaacgtgtagtacgagggccaatttccaaaaaccttttgtctcgcaacctcacctcttcctccttcaatctctttcggaatttcccaaaatccttagtgggaggaagagatggttctgactcagaagattcacgaagctttcaaaggcaccgtcgagaggatcactggcccccgaaccgtttccgccttcaaagaaaaaggagttctcagtgtctccgagttcgtcaccggcggcgataatctcgttggcaaatgccccaactggtcctgggaatccgggtgatcaggcaagaggaagccatacttgnncactgagaaacagttcttgattactagaaatgtgccttgtcttcggagagctgcatctgttga

SEQ ID NO: 14233 - DNA, 353 bp, Glycine max
  Clone ID: LIB3040-032-Q1-E1-H3
gacagcaaaacaattttcaaactcaattaccattccataacctaaatctcctctttgtttccgagtcagagagcaatggcacgtaccaagcaaaccgctcgcaagtccaccggcggaaaggcgccgaggaagcaattggcgactaaagccgctcgcaagtcagctccggccaccggcggagtgaagaagccccaccgcttcaggcccggaacggtggctctgaaggagaataaaaagttacagaagagcactgaacttctgatccgaaaactcccattccagaggctcgtcagagaaatcgctcaggatttcaaaacagatcttcgtttccagagcagcgctgtttctgcgct

SEQ ID NO: 14234 - DNA, 370 bp, Glycine max
  unsure (1)..(370): unsure at all n locations
  Clone ID: LIB3040-032-Q1-E1-H4
ggtacacagcctcaacaaccctaacgcgtgcatagcaaagagagacgcacccatggggcgaaaacccgcgaggtgttatangcaaattaagaacaaaccataccccaagtcacggttttgccgtggtgttcctgatcccaagatcaggatttacgatgttggtatgaagaaaaagggtgttgatgagtttcctttctgtgtccatctggttagttgggacaaggaaaacgtttctagtgaagccctggaagctgctcctaatgcttgcaacaagtacatggccaaatttgctggaaaggatgcattccacttgagagtcagggtgcacccattccatgttcttacgatcaacaagatgctttcgtgtgct

SEQ ID NO: 14235 - DNA, 316 bp, Glycine max
  unsure (1)..(316): unsure at all n locations
  Clone ID: LIB3040-032-Q1-E1-H5
gacacttcaaaatcctctggtaacccttattttatctattctctctctttcttttgtgttctaagcagctagaagcaatggagaggaaaagaagccatgcctctttcaccaagtttgcaatgcttgttggagtgatctctcagagccttgtcattcctgtagtatccaccactgttgaagatcagaagaactactacaccccagattcacatgctggaagtcncccctcaggctcacacagtagtactcctccatctcatggccatggaagctctccaccctcacatcatcacagtagtccaagtactccatcaac

SEQ ID NO: 14236 - DNA, 379 bp, Glycine max
  Clone ID: LIB3040-032-Q1-E1-H6
ggaggaacttaatggtaccagagtaaagtattgcggaagaaaagaaaaacgaaatccctcgctttgagaaatgggtgtagtactcttccggtgggttctgccactgactctgttgctcacttgcgcgttaggtttccaatcggacgagcttctcctcgacgaccaagagttcggcatcgagggaggacgagcctccttcgattccgattcgcacccatctcccacctccaccttgaggaagagcttttctgactcgtcctccgactccaagatccacttccctctccaacacgctttcggcgactccgatttctccgacgccggcaacttctccgctcgccttaagacgtggagccactgcgtccagacgctgacgaag

SEQ ID NO: 14237 - DNA, 95 bp, Glycine max
  Clone ID: LIB3040-032-Q1-E1-H7
agtaccatgacgacgtgaccgtaattgtaatcatgcttgggatgaatcagcgtacttcaaaggcatcaacttgcatttaagacttgccacttcag

SEQ ID NO: 14238 - DNA, 385 bp, Glycine max
  Clone ID: LIB3040-032-Q1-E1-H8
gggtggcaaaagaacaacgaaggggggacgaagttaatggtaccagagtagagtacagccgtagaatggaaaaacgaactccctcgcgttgagaaatgggtgtagtactcttccggtgggttctgccactgactctgttgctcacttgcgcgttacgtttccagtctgacgatcgtctcctctactaccaagagttcggcatcgagggaggactagcctccttcgattcagattcggacccatctcgcacctccaacatggggaaggacttttctgactcgtccaccgactctatttatctacttccctctcgaagacgctttcggcgacgccgaattctccgaacgcttgcaacttctccgcgcgccttaacacgtggagccac

SEQ ID NO: 14239 - DNA, 378 bp, Glycine max
  Clone ID: LIB3040-032-Q1-E1-H9
gaaaacaaacaacacagtttttcttgtctctatattcttccggccaccgcagatggcggcggagcacgacagctgctgctcgcgctgtgtcaccttcctaataaccataggcctcacagcgctcttcctatggctgagtctccgcgttgacgaaccaaaatgctacctcgactacatttacgttcctgccctcaacaaaaccctaaattccaattccactcacaacaaaaacaccacaatactcttcgctctcaagctcaccaacgggaacaatgacaaaggcatccaatacgacgacgttctcctctccttcagagtcttcgagagcgtcaacctcacgcgcccactcggcaacgccaccgtgcaaaggttctacca

SEQ ID NO: 14240 - DNA, 174 bp, Glycine max
  Clone ID: LIB3040-033-Q1-E1-A1
gagaacacaagacaacgcgcactctctctttttctctctgttttttgttctctcttcgcttaaaccctatcgtgcgtcgcgttttcgccgattctcgccatgccgaaagcgaagtgggacgccaaaggcgccgatagcaggttgaagcggaagggcgctggtgctgggaggaag

SEQ ID NO: 14241 - DNA, 306 bp, Glycine max
  Clone ID: LIB3040-033-Q1-E1-A10
gacacctccttttttccccgatgctaactctacaagcttcgtctcgtaaagaaaattcgaaagctcaatagagaggactcaattgaatcatcaaatgaggacagtgatttcgcgcttgatccattccacgccttccatttccaggctcaatgccacggtagtgtcaatcagcgggagaaatctctgcacagattctaacaaagttgatgggccattcaaagttgaagaagcagagactgtaaatgtgcctccactcccaacagaaaagttgcttgtgttgagaggaaatgggtttgtggtctcaca

SEQ ID NO: 14242 - DNA, 115 bp, Glycine max
  Clone ID: LIB3040-033-Q1-E1-A2
gggtgaaccaatcgtatgttattggtacatccacaaaggtggatatctctgatgtcaatgttgataaatttgatgacaagtactttgccaaggaagctaagaaaaagaaaacaaa

SEQ ID NO: 14243 - DNA, 55 bp, Glycine max
  Clone ID: LIB3040-033-Q1-E1-A4
aatggaaataaacaaaaagactgcaaaagcacaagctactagaatcattcaatcc

SEQ ID NO: 14244 - DNA, 242 bp, Glycine max
  Clone ID: LIB3040-033-Q1-E1-A6
gctcttcatcgtagcgccagactgagaggaagggagagggagattctttgtttgctaccttctctcggaaaaatggttacgttcaggtttcaccagtaccaagtggttgggagggctcttcccacggaagcagatcagcacccgaagatctaccgaatgaagctctgggccaccaacgaggttcgcgcgaggtggaggttctggtattttctgaagaaactgaagaaggtgaagaagagcaa

SEQ ID NO: 14245 - DNA, 342 bp, Glycine max
  Clone ID: LIB3040-033-Q1-E1-A7
ggcagttcaattccaatatattccattctctctgtgtatttccctacctctcccttcaagatgcagatcttcgtcaagaccctcaccggcaagaccatcacccttgaggtggaaagctctgacaccatcgacaacgtcaaggccaagatccaggacaaggaaggaatccccccggaccagcaacgtctcattttcgccggaaagcaacttgaggacggccgtacccttgctgactacaacattcagaaggagagtactcttcacctcgtcctccgtctccgtggtggcatgcagatcttcgttaagacactcaccggcaagaccataaccctagaggttgaa

SEQ ID NO: 14246 - DNA, 308 bp, Glycine max
  Clone ID: LIB3040-033-Q1-E1-A8
gacaacacagaacaaaaacaaagaaaaaaaaaaacccttagccaacacaaccatcatggccacctctgctattcagcaatcagcattcactggtcaaactgctctgaagcagctcaatgagttcgtccgcaagaccggtggcgccggcaaaggtcgcactaacatgcgccgcaccgtcaagagtgctcctcagagcatttggtatggccctgaccgtcccaagtacttgggtccattctcggagcagattccatcatacctgaccggagaattccctggtgactacggatgggacactgctggattat

SEQ ID NO: 14247 - DNA, 370 bp, Glycine max
  Clone ID: LIB3040-033-Q1-E1-A9
gcatatcagaagctcagacctagggatttcggccgtttgctccccaaaaaggaaagaagcagattctgtcctttgaaatcaacaagaaaagatgtcaggtgaagaggtagctgttgcagttgaggtacctgctacttcaattccaggtgagccaatggacatcatgactgctctacagcttgtgctgagaaaatctctggcctatggtggtcttgcacgaggtcttcatgaaggtgccaaggtgatcgagaagcatgctgcacagctctgtgttctagcagaagattgtgaccaacctgattatgtgaaactggtgaaagctctttgtgcagagcacaatgttagtcttttgacagttccaagtgcaaag

SEQ ID NO: 14248 - DNA, 315 bp, Glycine max
  Clone ID: LIB3040-033-Q1-E1-B1
gacaccatccactactcttcttagttccagcacaacaagctcttcatttctcccacactttcttttctttcaccaaaaatgtcaccagatttcacacttttgttcttcccggaactcatgcagtcccctatgatcactttccaagccaccctctgcgtccttctcttcaccctcatgttcacgctgctcttcactcctggtgggcttccttgggcctgagcccggcccagacgcatcatccctggcccagtaactgccctgttagggatctttactggctccacgcctcaccgtgctttatccaaactcgcccgt

SEQ ID NO: 14249 - DNA, 360 bp, Glycine max
  Clone ID: LIB3040-033-Q1-E1-B10
ggtgcctggccatccggtttcccagatctgctccttcctcaccccacaggctgatactagactgtaactttcagaagtcagttgaagagcatgggtcgtggagttagcagtggtggtggtcaaagttccttgggttatctttttggcagtggagaggcccctgccgcaaaaccggcaacaaacaatgccccagcccaacctgaagtgcaggctgtaaataatgcgcctccttcaaaagcatctcctcctactaaaacaatagaccctaacaaggctgctggtataaacagtcattctactgatggccagaacaccggcaacttcatcacggaccgaccctcaaccaaggtccatgctgcc

SEQ ID NO: 14250 - DNA, 66 bp, Glycine max
  Clone ID: LIB3040-033-Q1-E1-B12
cacatagacccatgaatccatacatctcgatcgaaaaagaatcgaaattgatgaatatatctctcg

SEQ ID NO: 14251 - DNA, 366 bp, Glycine max
  Clone ID: LIB3040-033-Q1-E1-B4
gaacatcaaggaatgaaaggaatgggtaacatctaacataaggagatccaaaaagtcaagacattcatgaaaatcatccaagcaacccaatcatggcaaaatagttaatcagctcaagaatgaaaagtgataaagcctcacaagatatacactctatctctcaagtgtctaggctactatttaccctcaaagcacccatgaaagcaaacaccacataaacttggcaagattctaaaattgacaatcaacccataaacacaagcacatgaggatcaaaaggtcttttaaggttgtaatggggccaaggacaaggtatggagaaatatggaataagtggctaaatcccaaaggaatagaggagcaaag

SEQ ID NO: 14252 - DNA, 351 bp, Glycine max
  Clone ID: LIB3040-033-Q1-E1-B5
ggaacctgatcgatctctttaccagttgccacactacaccgagattccccctaaacccgtttgcgttgttgtttgcgaagaaatggcgactaagaggagcgtgggaacgttgaaggagggtgatttgaaagggaagagggtgttcgtgagggtcgatctgaacgtgcctttggatgacaaccttaacatcaccgatgacactagagtccgtgctgctgttcccaccatcaagtacttaactggtcatggaaccaaagtgatcctttctagccacttgggacgtcctaaaggtgtaacacctaaatacagtttgaagcctcttgtgccaaggctgtcgcaacttctcggaat

SEQ ID NO: 14253 - DNA, 336 bp, Glycine max
  Clone ID: LIB3040-033-Q1-E1-B6
ggatagcagctactcggtccatatggaagctcagaaatgatgtgatctttcataatcagcctttccacatttctaagttggtggataacactaacttcctcacttggtcctggttgaggggatgggaaaaggacttcaatgccccttttcaccaatggtctacagccatgcctatggcctttacttagctagtggtctgttgggttaaggattttgggggcttcttgtagggcatttgtgttatgtatttttggactcatgatcctggagatgttatctccttcttctcttgtagtacctctggtactattatttggttaatatatatattagatc

SEQ ID NO: 14254 - DNA, 370 bp, Glycine max
  Clone ID: LIB3040-033-Q1-E1-B7
ggcactgcaactttgctctctgtgaggcttcaatttccaattagggtttcgcttagagtaaccaattaccatgggagtcttcacctttgtcgttcgcaaatccggcgccgaatggagcgccaagcaacattccggcgacatcgaggcctccgccgactccacctacgatctccaaaggaagctcgtgcaagccgctctcgccgttgattcctccggtggagtccagtcctccttctctcccgtgtctcctacctccgctgtgttccaggtgatagtgggtggtgctgtattcgttggagggtgcggtggtgctgttgcagctgcacctgcaggtggtgctgctgcagctgatggtgccccggctgctgag

SEQ ID NO: 14255 - DNA, 351 bp, Glycine max
  Clone ID: LIB3040-033-Q1-E1-B9
gccgctgagctccctttctcctcggtccacagagacaaaatgtaagacaggtgccaacagttcatcacgaaagaaaggactagctgagccgagatcactaactaaaacgaatttaatactaatcgaaaatactaatagaatagaaatagaactgtcttttcatatagatatcccttcaacacaacataagtcatcgaaaggatctcgaacgaccaccaacgcacgaaagccgggatctttcagaaaatggattcccattcgaagggtgcataaccgcatggattagctcacactaacccgtcaatttgggatccaattcggttccttaagaggtatcgggaaggaattttg

SEQ ID NO: 14256 - DNA, 365 bp, Glycine max
  Clone ID: LIB3040-033-Q1-E1-C10
gatgccgaaaagtagtaccaagatggcttcagttgtgtatctcctctttggcttccatctcattgttatcatgtcaagttccttacccgcaactagtgaagtgtttgcaaaacagtatccatccacagaacccgtggaagaaaaactcacccaactccacttctatttccataacaacataacgggggaacacccaactgctatgaaaactgttttgcctcctaaggggtccattcatggttttggggctacttacatgatggatgaccctctaactgaaggaccaagtccaacttcaaagcttgtgggaagatctcagggaatatacgctttggcttcacaacatgagcctgggttgctcatgg

SEQ ID NO: 14257 - DNA, 373 bp, Glycine max
  Clone ID: LIB3040-033-Q1-E1-C11
ggcccttctagctttttcccagtccaagcagcctccaattcgtgccactctcttcaaaatggccgttaccttctcaaatctccacacagaatcaggtctcaagtccctcgacgacttcctctctgggaaggtctacgtttctggggatcagttcacaaaggacgacatcaaagtgtatggtgctgttttggagaagccaggtgactcttttcccaatgctgccaagtggtacgaggttgtctcatctcagcttgctgcaagcttccccggcaatgctcaaggggtgagattcagtggcaaagcttctgctccggcggaggctgctcctgcgaaaccggatgcttctgctgctgaagatgatgatgaccttgat

SEQ ID NO: 14258 - DNA, 375 bp, Glycine max
  Clone ID: LIB3040-033-Q1-E1-C12
gaccctagctcgcgttcttcgttcgtcttttacatcaggatggagtctcaggtgaagcacgcacttgttgtcaaagtaatgggtcgtactggatccagaggacaggtgacccaggttagagtgaagtttctggatgatcagaaccgtcacatcatgaggaatgttaaaggaccagtgagagaaggagacattctcaccctactcgagtctgaaagggaagctagaaggttgcgctaagagggtccttctttcttgatctttatggtagttagtcggtgctaaaggttatagcaccctatcttgtcttggatctattttcattcgaattatggcttgagttttgctgttttgagtctaagcttcaaggttgaagta

SEQ ID NO: 14259 - DNA, 313 bp, Glycine max
  Clone ID: LIB3040-033-Q1-E1-C4
gaggcgcggcgggatcagcacaagattgcaaaatgaagttcaacattgcaaatcccaccactgggtgccagaagaagctggaaatcgatgacgacctgaagcttcgagcattttgggacaagaggatctcccaggaggttcttggtgatgctctgggtgaggagtttaaaggatatgttttcaaaatcaccggtgggtgtgacaaacaaggattccctatgaagcagggagtgctgacccctggtcgtgttcgacttttgctccatagaggaactccttgtttccctggatatggaaggcgcaatggagagcg

SEQ ID NO: 14260 - DNA, 361 bp, Glycine max
  Clone ID: LIB3040-033-Q1-E1-C5
atgcgtgaattgcttacaacatgctagaatagggttttcaagtttaggctaagagtagggtttccttaggcttatattcacagagggtcctagtgttggatgccttagtctctttttccgggtgggaattgtagaatgcttgtgattgcttgtaaggattcttaatgcatagtgaaaatctaattcaggttgtggactagacaattggagtagcttttctagaaatagagagtgaaccagtataaaagattatatctttgtctcttggttcatatctttcactcattgaagttttattcaatgtttgaaaagattcaagttttatgattttgaaagaaaggaagttaatgaaggatgatgt

SEQ ID NO: 14261 - DNA, 314 bp, Glycine max
  Clone ID: LIB3040-033-Q1-E1-C6
ggttcatccactaatctgattatggtggcttctacaaccctgatgctgtttgctggaaggtttggattggctccatcagcaaacaggaaagccactgcagggctaaagctggaggtgatggactcaggcttgcagactggtgaccctgctggcttcacccttgctgacaccttggcctgtggatctgttggccacatcattggggttggggttgttcttggtctcaagaacattggtgccctgtaaaaagcaactatataagtttagtgcttgatgcatctgtaatcaatgttagtatgtacttcattttcaca

SEQ ID NO: 14262 - DNA, 387 bp, Glycine max
  Clone ID: LIB3040-033-Q1-E1-C7
gggtcgtgtgttgttgtatactataatagcagaatcgtgagtaacagcagagcagaacaccgataaatcgctatgactgctcagacccaagaggagcttcttgcggccgaccttgagcaacaaaagatccatgatgatgagcctgtagttgaggatgatgatgaggatgacgaagatgacgacgatgaggatgacgacaatgttgaagaaggtgatgcatctggtaggtccaagcagaccagaagcgaaaagaagagtcgcaaggcaatgctcaaacttggaatgaaacctgtcacaggtgtcagtcgtgtgactgttaagaagagcaaaaatatcctgtttgttatatcaaaaccagatgttttcaggagcccgacttctgacaca

SEQ ID NO: 14263 - DNA, 352 bp, Glycine max
  Clone ID: LIB3040-033-Q1-E1-C8
ggacaaggaaagtgaaagtgagagagagagagagaaacttcgaggaaacaaccttcaccgttcaattcatcaacatcaattgaacaacaacaacatcaaaacatatcccattcttattcttatcatttctcaatcactgccacactgatactactgacacgcccacctaccaccttaatgctcttcaactcccactactgcctcactctctctcaggcccttcaaggttttctttaggataaagaatttatgggtggatcaatttcaaaacggaggcgttctaagcaacattcgtcaaatttttttcctcggtatcagcaacctcatttcccacaaagccaagataatgggt

SEQ ID NO: 14264 - DNA, 171 bp, Glycine max
  Clone ID: LIB3040-033-Q1-E1-C9
ggggcagagcaaacttgctcctcggtctttatcaccaatgtgtaagataggtcccatcagctcatcactataaaatagaataggtgagtcgaaatcactaagcacaccggtctaactactgaacggctccacagaagcaattggcatagaaatgtcctctcacatcaacat

SEQ ID NO: 14265 - DNA, 321 bp, Glycine max
  Clone ID: LIB3040-033-Q1-E1-D1
ggtgtatcaatcggccacacagaaatgggcagtgcttctctgattccagtttcctggttgccttggcggccactttctcctttcaagggaacggtgaaaaccttggtcgcaaaaccatggctgaagaagattcagcaagcaagacccctcatttccgtggttaacaaggctgcctctctatcttcccccgtgacagcacccagcgtcggcgttcggtttcgggtggagagtttggggccgcaagcgggttcgaggaagagggctaagagaaagggtagaggaatatccgcagggcaaagggcaagttgtgggtttgggatg

SEQ ID NO: 14266 - DNA, 265 bp, Glycine max
  Clone ID: LIB3040-033-Q1-E1-D10
gagccatagaatttcacattttatcttttgcattgagcaactaactcactcgcgccatggctgctaccatcatcaccacatgcaagctctcactgcttttgagtcttctctcagtttcacttttgctgggtgtgaggtctgatacccttcagaatgtaggcgcaattccccccacatgcaagcgcatagagtgtcccagctatgatgtcattcacgtaggcaacggctacgaaatccgtcgctataattcacccgtttggatttc

SEQ ID NO: 14267 - DNA, 62 bp, Glycine max
  Clone ID: LIB3040-033-Q1-E1-D11
aacaaatttaacctttacaaaatcttgaaatagtttgtaaagacttaaagaagagttaaggc

SEQ ID NO: 14268 - DNA, 226 bp, Glycine max
  Clone ID: LIB3040-033-Q1-E1-D2
gagaggcaaagcaaataagcagtaatagatctgactctgattttcagaaagcaaaatgcctggtttcaacggcgatgaaactgctccgttcttcggcttcctgggcgcggcgggcgccctagtagtctcctgtatgggagcggcgtacggcacggccaagagcggggtccgcgttgcgtcgatgggcgtcaagagaccggagctggtcatgaaatccatcggcccg

SEQ ID NO: 14269 - DNA, 294 bp, Glycine max
  Clone ID: LIB3040-033-Q1-E1-D3
gagcctcagcgggtgcagtacgaggagaagcattaggtgcaaattcattggcgccgaagaagccgagaaccacgacaaggaaccctgatttggttaggtggattggcaagtattcgacgtcgcagatgtaccacaagaggggcatctgggccatcatggccaaaaaccgtggcgttttgccccgccacgattgcaaacccaatcccgaggccccggttcagaggccggccaagttctacccctgcgacgatggttagaagcccctcgtcgacaagcacaatcgcaaatccgcga

SEQ ID NO: 14270 - DNA, 288 bp, Glycine max
  Clone ID: LIB3040-033-Q1-E1-D8
gatcaatagcaccggagaatagaatagcccatggcttcttccaacaaaatgaagatcatcaagtcaacgttccttgttttgtgcctcttagcctcgtcgttcctctgtccaatcaaggctcacggaggaagcggtgattctcatgacgatgaatctgatatcgaaggtttgcagtctcggggtctgatcgtggtgaaaatatggtgtttgatcatcttccttgtgagcactttcgctggtggggtttcgccgtagttcgaccgttggaacgagtcgttgcgtcttttg

SEQ ID NO: 14271 - DNA, 358 bp, Glycine max
  Clone ID: LIB3040-033-Q1-E1-D9
ggggcatagcaaaatcgtttctccaatttaatcaccattgtacaacccaattcccttcgtcgttttcgattaagagagcaatggcacgtaccaagcaaaccgctcgcaagtccaccggaggaaaggctccgaggaagcaattggcaaccaaagccgctcgcaagtcagccccggcgaccggcggagtgaagaagccccaccgcttcaggccaggaacggtggctctgagggagattcgaaagtaccagaagagcaccgaacttctgatccgaaaactcccattccagaggctcgtcagagaaatcgctcaggatttcaaaaccgatctccgctttcagagcagcgccgtttcggctct

SEQ ID NO: 14272 - DNA, 354 bp, Glycine max
  Clone ID: LIB3040-033-Q1-E1-E11
ggctctgctcgtgcctctagggttatcatttctccatttccattttctctctcacttttcaagaatcgtaagctatgggaaagtcttacccaactgtgagtgctgattaccagaaggccgttgagaaggcgaagaagaagctcagaggcttcatcgctgagaagagatgcgctcctctaatgctccgtttggcatggcactctgctggaacctttgacaagggcacgaagaccggtggacccttcggaaccatcaagcaccctgccgaactggctcacagcgctaacaacggtcttgacatcgctgttaggcttttggagccactcaaggcggagttccctattttgagctacg

SEQ ID NO: 14273 - DNA, 375 bp, Glycine max
  Clone ID: LIB3040-033-Q1-E1-E12
aacgtagcaacggtataataattcagtatgatgataatgctgcagttgtcattgatcaagaaggaaatccaaaaggaactcgaatcttttgtgcaatcgcccgggaattgagacagttaaatttcactaaaatagtttcattagcacccgaggtattataagacgaaactgtgctatggatacattatttttttgtgaaatagattaattaatctattttatctaacatatatcccttttgtagtaattattagaatttgtagtaattattataagtattagaagcagcaattcttatttatttcagattaatacttgataacctaaacaatatatctatatatagaatatagatagatatatatataatagaac

SEQ ID NO: 14274 - DNA, 274 bp, Glycine max
  unsure (1)..(274): unsure at all n locations
  Clone ID: LIB3040-033-Q1-E1-E2
tggggcgcaggtagagagagcgagagaacacgaacatatcggaaccacagctgcggtaacagaagaacaatcacagaatgggtcgagtgagaacgaagacggtgaagaagtcctctcagcatgtgatatagcgtcactactcgcgcatgaccctggacttccacacgatcaagaagcttctggaggaagtggcgataatcccgtcnaagaggctaaggaaacaggatcgcggggttctcgacgcacctgatgaagcgcatccacaatggccctg

SEQ ID NO: 14275 - DNA, 268 bp, Glycine max
  Clone ID: LIB3040-033-Q1-E1-E3
gatccacacctctctctctctctcagaatttctatctatctcttgtttcaatttcaacaacggttactcctttttcgttttgagtttcaatcaagccatcatcatgtctaccgcatcgcaacccaaggccaagaaaacggcgtcgtccaagaagcccctctcccagcctcccttcgccgtgatgatagcagaggcgattgggagtctgaaagagagaaccggttcgagccaatacgcgataaccaaatacatccaagggaagcacaag

SEQ ID NO: 14276 - DNA, 297 bp, Glycine max
  Clone ID: LIB3040-033-Q1-E1-E4
gacaaactcacaccacatccatctttgccttctgcatgttggttctctgtaaacagatactgcaaaagaagaataatattgaatatttggttgggttgaatccctgggttgaagcgttgcagacatcacggctattctaagagtgtctcgctctctcattcatgtcccaactgtacgacggaggacaggttgcgtaactgccagcaacccttcgccgcacggtgggcgtggtgctttgccttctgaaggtggtagcccttcagacttgctcttcttagctggtggtggttctgctgt

SEQ ID NO: 14277 - DNA, 281 bp, Glycine max
  Clone ID: LIB3040-033-Q1-E1-E5
gaagtaacttaaggtttcaaacctaggaagttggaagtcatggcagcaacattgatggcagcaacaagttctggcactcttaaagcaactcctttcctaggccaaggcaagggtgccaatgccaatgctcttagggatgttgtttccatgggaactgggaagtacaccagtggcaatgatttgtggtatggaccagacagagtgaaatacttgggacccttttcagctcagaccccttcatacgtgagaggagaattcccaggggattatggatgggacac

SEQ ID NO: 14278 - DNA, 209 bp, Glycine max
  Clone ID: LIB3040-033-Q1-E1-E6
aagaaggggtgtcaattaatccaacattcaacgtttctgttatatttggcaaacgggatgagccaatgttagtagcatgtgcacgccagctgattgagcacatgagtttatctggctcctccaggccattggtgctctcacttggtcttaaagaccattctgtggaaacattgaaaggcattgtttctgctgtgatggacaatagcatg

SEQ ID NO: 14279 - DNA, 195 bp, Glycine max
  Clone ID: LIB3040-033-Q1-E1-E7
ggagtcttttaacgcatgtttctagacacatacgtcattgggacaagatctcacatcgttcaagcttctcctacttctgccctacaatactctcgaatcttctcttgtgtgttgtacccgcatcgtgaccatcagtgacagtgactgctgtcgacatctcccaatctcacgctgagtgacatattatgtgaatga

SEQ ID NO: 14280 - DNA, 255 bp, Glycine max
  unsure (1)..(255): unsure at all n locations
  Clone ID: LIB3040-033-Q1-E1-E8
gctagtggcagtgaccaaactccatttctcactcgccgtcgtctcttccgtctagggtttctcctcttcacaaaaatggttgccgcaaagaaaactaagaagacccatgagagcatcaacaacaggctcgctctcgtcatgaagagtggcaaattcaccctcggttacaagaccgttctcaaatctcgtangagctccaaagggaaattgattatcattgctaacaactgcccccctttgaggaagtcanagatt

SEQ ID NO: 14281 - DNA, 349 bp, Glycine max
  unsure (1)..(349): unsure at all n locations
  Clone ID: LIB3040-033-Q1-E1-E9
ggcagaggtgtattttctcacttctcagcactcagcagcgatatcagttgaagaaacagaaacaaacaaaagaggcagaagatgttgtgggtggacaaatatcgtcccaaaaccctcgaccaggttatggtccacaccgacatcgctcgcaatctcaagaaattggtaacggaacaggattgcccccatttactcttctatggcccatctggctccggcaagaaaaccctaatcatggctcttctccgccaaatgttcggacctggtgccgaaaaggtgaaggtggataataggacctggaaagtggatgctgggagtagatctcttgatttagagctgancacattat

SEQ ID NO: 14282 - DNA, 382 bp, Glycine max
  unsure (1)..(382): unsure at all n locations
  Clone ID: LIB3040-033-Q1-E1-F11
aggggaatctgaaattgcaatgcttcacccggcggcactgatagcatcgtgtccttatccttatccttatcctgggcggcatgagttaccctcagcctcagcgtcagcgacagccagagtcgctgttccaatgccaaatctgagaggcaaagcggttgttggtgttggttccagaatgataaggtgcatggctaaccccagaagagttcaaatggtggccaagcaaattaggagagagctttctcatatgcttctcaccgataaagtcttgcagtatgctgttcttcncgaagcctccttaggagccgaccgttacctctcttctctcaccaccatcaccgacgtccaagtctccgccgacttgcaggttgttaaggtgtat

SEQ ID NO: 14283 - DNA, 318 bp, Glycine max
  Clone ID: LIB3040-033-Q1-E1-F2
acggttttgcgcagttgtcgcagctcatcctccgtaacctccgagctctgcaccgaataacgaagccatggggaagacacatggaatgggatctgctcgcaagctcaagtcccaccgcaggaggcaaaggtgggctgacaagtcatacaagaaatcacatcttggaaatgaatggaagaaaccttttgctggttcatcccatgccaagggaattgtccttgaagagagagggattgaggctaagcagcccaactctgccagtcgtaagtttgccacggttcaacttatcaggaatgggaagagagatgccgcttttgt

SEQ ID NO: 14284 - DNA, 366 bp, Glycine max
  Clone ID: LIB3040-033-Q1-E1-F3
ggaacatcaatacatactttagggctgcagtttcgtgctttcccgccgccgctacactgccaccgtcttccccgccgtctccgccagagatggcagaagaggattcaaagcctctgaactacatctccgaggtcattctcaagaagaggaagaacaccgaagcatgggctttaaggaaaaaagaacagttccagcaaaagaaataccaatccatcaagaagccggaggatttcatccacgagtatcgcaacaaggaagtggaccttataagaatgaagcggggggtgaagaggaaagtgcctgaagctaactccaacactctaagtatcagtcggattcaggggaaaaaggacatgcatccgagga

SEQ ID NO: 14285 - DNA, 344 bp, Glycine max
  Clone ID: LIB3040-033-Q1-E1-F4
gacatctttcactcgttctctgaaattttaattgacttttctcccctcataaaaaaaacctaccaatggctcccgcaaaggcagagaagaagcccgcggagaagaagccggcagagaagaagatatcgaaggaaggaggaagcgagaagaagaagaagagaacaaagaagagcgttgagacctacaagatctacatcttcaaggtgttgaagcaagtgcaccccgacatcgggatctccagcaaggctatggggatcatgaacagtttcataaacgacatcttcgagaagctcgcccaggagtcatcgcgtctcgctaggtagaacaagaagcccaccattact

SEQ ID NO: 14286 - DNA, 305 bp, Glycine max
  Clone ID: LIB3040-033-Q1-E1-F5
ggaccaatcacaattctctgtgaactttctagaatctcgttcttcctttgccttctccttcttcttcaaccctttttctttctcattctttcacactttcattctctaaaaagatctaagtccctttggtcttcatcttctgttctgatccatgtatggcttctaaacgcatcttgaaggagctcaaggatttgcagaaggatcctcctagctcatgcactgcatgccctgtggctgaggacatgtttcactggcaagccataatcatgggacctgctgagtacccatatgcaggtggtgttttc

SEQ ID NO: 14287 - DNA, 350 bp, Glycine max
  Clone ID: LIB3040-033-Q1-E1-F6
gactcaccacttcaaaacactcataacacaaagcacaaagcaaagctcatccttgagttaaaaaatggcagcagcttcttccatggctctctcatccccatccttggctggcaaggccgtgaagctgggcccatcagccccagaagtgggaagggtgagcatgaggaagaccgtcaccaagcaggtctcctcaggaagcccatggtacggcccagaccgagtcaagtacttgggcccattctctggcgagcccccgtcctacctaaccggtgagttcccaggcgactacggctgggacactgctgggctttccgcagacccagaaaccttcgccaagaaccgtgaactcg

SEQ ID NO: 14288 - DNA, 359 bp, Glycine max
  Clone ID: LIB3040-033-Q1-E1-F7
ggggatgcaagcagagattttttcttacgcaggcagtggacacagacaccatgtcacttattaaccagctctttaacagaggcgttttcggcactcgatgcaaaacatgcctgaacctggcaatttcacgaattaagctgctgcaaaacaagagagatatccaactgaaacaaatgtgcaaggagattagccaattcttgcaggctggccaagaggcaattgctagaattagggtggagcatatcatacgagaacaaaatacatgggctgcatatgaaatattggagttgttctgtgaatttgttctagcacgtgtacctataattgagaaccagagggagtgccccacagaattgcga

SEQ ID NO: 14289 - DNA, 329 bp, Glycine max
  unsure (1)..(329): unsure at all n locations
  Clone ID: LIB3040-033-Q1-E1-F8
gacccttaacctctctgctgcgtttgcttctcctccacccatccacaaacgaacacacactttgattgagaatggggcgtgttcgcacaaagacagtgaagaagtcctcgcggcaagtgatcgagaggtactactctcgcatgacgctggacttccacacgaacaagaaggttctggaagaggtggccatcattccctccaagaggctccgcaacaagatcgcgggattctccagccacctcatgaagcggatccagaagggtcccgtacgtggaatctccctcaagctgcangaggaggagcgcgagcgccgcatggacttcngtccc

SEQ ID NO: 14290 - DNA, 379 bp, Glycine max
  unsure (1)..(379): unsure at all n locations
  Clone ID: LIB3040-033-Q1-E1-F9
gggttctagtgtgtgattgtttgttgttgtaactcgttcttcttcttttgttgttctgtgtttgtgtttgttttttctctcacctgaaaatgtcttgctgcggtggtaactgtggttgcggaagctcctgcaagtgcggcaacggctgcggaggctgcaagatgtacccagacttgagctacactgagtcaaccaccaccgagaccttggtcatgggagtggcacctgttaaggctcaatttgagggtgctgaaatgggtgtgcccgctgagaacgatggctgcaaatgtggaccaaactgctcctgcaacccctgcacttgcaagtgaggtgttgggagagcaagcttcaagcagagatagcccttaattangaataa

SEQ ID NO: 14291 - DNA, 295 bp, Glycine max
  Clone ID: LIB3040-033-Q1-E1-G1
gacaccatccactactcttcttagttccagcacaacaagctcttcatttctcccacactttcttttctttcaccaaaaatgtcaccagatttcacacttttgttcttcccggaactcatgcagtcccctatgatcactttccaagccaccctctgcgtccttctcttcaccctcatgttcacgctgctcttcactcctggtgggcttccttgggcctgggcccggggcagagccatcatccctggcccagtaactgccctgttagggatctttactggctccacgcctcaccgtg

SEQ ID NO: 14292 - DNA, 361 bp, Glycine max
  Clone ID: LIB3040-033-Q1-E1-G11
gggtttctagtgtgtgattgtttgttgttgttactcgttcctcctcctttggtggcctggggttggggttggtttttcccccaactgaaaatgtcctgctgccgtggtaactgtggttgcggaagctcctgcaagtgcggcaacggctgccgaggctgcaagatgtacccagacttgagctacactgagtcaaccaccaacgagaccttggtcatgggagtggcacctgttaaggcgcaatttgagggtgctgaaatgggtgtgcccgctgagaacgatggctgcaaatgtggaccaaactgctcctgggaaacctgtacattcaaatgaggtgtttggagagcaaacttttagcacagat

SEQ ID NO: 14293 - DNA, 191 bp, Glycine max
  unsure (1)..(191): unsure at all n locations
  Clone ID: LIB3040-033-Q1-E1-G12
atatattttctgagtgaaacaaatttcctgtggatttgatattcggttcttatcattttatattacttgtacgacttggtacatttgccgattagcatcgcagaagagcgaacatatgtgcataaggtttcacaagagtatttggtaaaaattattaanaataaaaagaactcatattacatacaananaa

SEQ ID NO: 14294 - DNA, 321 bp, Glycine max
  Clone ID: LIB3040-033-Q1-E1-G3
ggatacagtgtgggcataaaattttcgaagttgaagcgagaacttgccatttcaagggttttagggttagggttttctcaaattgcaaggacatgggtttcaaccttcaaccatatgagattcaatccatgctcaaggaaggccataagcacctttctggcctcgacgaagcggttctcaagaacatcgacgcttgcaaacaactttccactattactcgaacttccctgcgtcccaatggaatgaataagatggttatgaatcacttggacaagctttttgtcacgaacgatgctgggacaattgtgaatgaacttgaag

SEQ ID NO: 14295 - DNA, 278 bp, Glycine max
  Clone ID: LIB3040-033-Q1-E1-G5
gttcgcttcttttcctaacctaaaccctactcattctccatacctcaacgaagaggttaaagagacggcaacactttgctgtccgccttgaccgagcagagcttcgtcttggccctcgattttgccctaaagtactctcagtcacaacagacaccgtcgtcgtcgtcgtcgtcatcaatggcaccgaagcagaccaaggctgagaagaggatcgcttacgatgcgaagctgtgcgacctaatggaggagtacggccagatcctcgttgtgaactccga

SEQ ID NO: 14296 - DNA, 302 bp, Glycine max
  Clone ID: LIB3040-033-Q1-E1-G6
ggggctctctcttctcttctcttctctctcaaaatcgtttctctgcattttcagctaaacctgagcacacccaactgagattttagcttcagattccgaggtaagaggagaaagaagagaactaagtgctacccagagttcgatttttgggttggtcaacaaggtcaagatgtttctgagcttgatgggtatcatgtagatgaagaggggtgcgtgtgtggattggggaagcaatttgtttatgaagttgaagaagcatggatagagtgacttcgtcgtttatgggttccgtttttgtttgg

SEQ ID NO: 14297 - DNA, 311 bp, Glycine max
  Clone ID: LIB3040-033-Q1-E1-G7
gagatttctgagagaaaggaaagggtgtgagaagagaatggagagtaaagaggaagatgttaacgttggagcaaacaagttctcagaaaggcaaccaattggtacagcagctcagggtggtggtgacaaggactacaaggaggcacccccaactcccttggttgaacctggttgagcccaaatcaaggtccttccaacaagctggaattgctgagtttgtggcaacgttcttgttcctctacattaccatcttaactgtcatgggtgtcaacaggtcaccctccaagtgtgcctccgttggcattcaaggc

SEQ ID NO: 14298 - DNA, 266 bp, Glycine max
  Clone ID: LIB3040-033-Q1-E1-G8
gaaatcaagagaattctagagaagattgtgcagccaagcaggaaagattggagtaccaggcttgatgatgctctctgggcacatcggactgcctacaaagcacccataggaatgtctccttatcgggttgtctttggaaaggcatgtcatcttccagtggaaatttagcacagagcatactgggcagtgaagacgtgcaacttctctaggggtgaggttggcgaggaaagggagttgcaactgagtgagttagatgaaatccgcct

SEQ ID NO: 14299 - DNA, 282 bp, Glycine max
  Clone ID: LIB3040-033-Q1-E1-H1
gagagccggcttcttcctctgcgcaggaattaggaatattcgacaggtagagtttcttcaatggctcctaaagttgataagaagaatgatccaaaggcccaggccttgaagactgctaaggcagttaagtcaggtgctacctttaagaagaaggtaaagaagatccgaacttctgtcactttccacaggccgaagaccttgaagaaggacagggaccccaagtaccctcgcattagcgccccgccgaggaacaagcttgatcattatcagatcctgaaatac

SEQ ID NO: 14300 - DNA, 374 bp, Glycine max
  Clone ID: LIB3040-033-Q1-E1-H11
ggtgagacgagggtaaggtcgcgttgtgttgcgtcgtgtcgtgcgctgttcctctgtctgtcgtttttgttttcagaccaaaccctagctccgcatcgcaaccatgtcgaccaagcaaggtggaaaagctaagcctttgaagaaacccaagtctgataagaaggattacgacgaggttgacatggctaacattcagaagaaaaaggaagaggagaaggcgctaaaggagttgaaagccaaggcgcaacagaagggaagctttggaggttctgggctcaagaaaagtggaaagaaataagggctctttatcatgattgtatacatccaatattgagccctgtagtttattaccatgataacttctgtcttattgt

SEQ ID NO: 14301 - DNA, 219 bp, Glycine max
  Clone ID: LIB3040-033-Q1-E1-H2
gagtgcagcatcggagagaaataatggaaaactggtgtcgctgaaactgcataagcgccgctccgcaagcgtgctcaagtgcggcagaggaaaggtttggcttgaccccaatgaagtcatcgaaatcgccatgggcaattctcggcaatacatcatgaagttggttaaggatgggtttatcatcatgaagccaatcaagattcactcgcgctcacgtgc

SEQ ID NO: 14302 - DNA, 300 bp, Glycine max
  Clone ID: LIB3040-033-Q1-E1-H3
tatgcttagaatctggggcaattaaggatgtagctgcatgttcttttatttttgtgtgttcttcttggtttcccccaaggattcctgtctgctgtaattttcccgtcacggtcttctataaagaagagaacataagtttgaggcttcagtcctcactttgtgctttaaaccatgtgcagtctatgatagcctgagccctttcgctcagtccacgggatgccccaaagcgcttaattaaaactgaacctaactggctcgttgcatttgaaaacattcatacatacacatacgcatgcaggt

SEQ ID NO: 14303 - DNA, 54 bp, Glycine max
  Clone ID: LIB3040-033-Q1-E1-H4
gagacctcaggtcaagcggggctacccgctgagtttaagcatatcaataagcgc

SEQ ID NO: 14304 - DNA, 250 bp, Glycine max
  Clone ID: LIB3040-033-Q1-E1-H6
gattcacaactttacccactcttcattctagcaattcgaattcccaatccaaaaccctaataccttcaaagaacctagtagtgaatcagtgatggcacctaaggcagagaagaagccagcggagaagaagccggtggaggagaagaagtcgacggtgggagacaaggctccggcggagaagaagccgaaggccggaaagaagcttccgaaggagggaggagccggcggagaaagggggaagaagaaaaag

SEQ ID NO: 14305 - DNA, 314 bp, Glycine max
  Clone ID: LIB3040-033-Q1-E1-H7
atgtataagaatttctaagattccgctcgcacttttataatgccaacaattatattgaattgatactggtatttaatatttacttatacttaataattgaataaaatgtcaaactcactacaatcaattactcgcgagtttcgtccatcgcagatatgaagtgtatatagtatgtataaaaaagaaatattaagattgtaaaatcattcgcacatgccttgtctcgaatgttccagtttgatactatttagaagattcagactaaaaataatgtttaagtttttacaagatcgaggtcatattaatttgtgaaa

SEQ ID NO: 14306 - DNA, 319 bp, Glycine max
  unsure (1)..(319): unsure at all n locations
  Clone ID: LIB3040-033-Q1-E1-H8
gattagcaaaagcaagaagaactagtctaagcagaaatggcctcttcagtgatggcatctgtggccctcaaacctgcccctttcactgttgagaagtcctcagttagaggccttccctccctctcaaggaactcctcttcattcagagttgtggccagtggtggcaagaagatcaagactgacaagccttatggaattaatggtggcatggctttgagggaaggggttgatgcatctggcagggaaaggaagggaaagggcgtttaagagtttgtanacaaataccgtgctaatgtcgatggttacagtcctatctacg

SEQ ID NO: 14307 - DNA, 385 bp, Glycine max
  Clone ID: LIB3040-034-Q1-E1-A10
ggaatcacagtggtgccttatcgctgtggttatcatcttcttcttcctctttcttagatctcttctttctctacgccgcacgccgaaaccatggccggaaaaggagagggtcctgctatcggaatcgatctcggaaccacctactcttgcgtcggtgtgtggcaacatgaccgcgttgaaatcatcgccaacgaccaagggaacagaaccacgccgtcttacgtcggattcactgacaccgagcgtctcatcggtgatgcggccaagaatcaagtcgccatgaaccccatcaacaccgtcttcgatgccaagaggttgattggtcgtagattcagtgattcctctgttcagagtgatatcaaattgtggcctttcaaggtcgttc

SEQ ID NO: 14308 - DNA, 381 bp, Glycine max
  Clone ID: LIB3040-034-Q1-E1-A12
ggggttttggtgtttgttgttgaatcgtgaaaatgttcagaaaccagtacgacacggacgtgaccacatggagccctgcggggaggctgttccaggtggagtacgctatggaggcggtgaagcagggctcggcggcgatagggctccgatcgaagacccacgtggtcctcgcatgcgtcaacaaggccaactccgaactctcctcgcaccagaagaagatcttcaaggtcgacaatcacatcggcgtcgccatcgctggcctcaccgccgatggccgcgtcctctcccgctacatgagatccgaatgcatcaactataattacacctacgagtcgccgcttcccgtcggcagactagtcgttcagctcgccgataaggctc

SEQ ID NO: 14309 - DNA, 333 bp, Glycine max
  Clone ID: LIB3040-034-Q1-E1-A2
gacaacacaacgcaacacaacgcgcactctcgcttttctctctgatcacagctaccctatcgttcttcgcggtttcgccgattctcgccatggcgaaagccatatccgacgccgaaggcgccgatagacggttgaaacgcaaaggcgctggtgctggaaggaagcaatcgacgaaagctgctaaggattctaacaagccagagagacctccaagcactttcttcggtttcatgtccgaattcatagagcagtttaagatggagcatccgaacaacacagccgtcgctgttgtcggtaaagctggttggtagatatggaaatcgctgtctgatg

SEQ ID NO: 14310 - DNA, 293 bp, Glycine max
  Clone ID: LIB3040-034-Q1-E1-A3
gacgtctctcagcacagagcgcggcatgctcacccgagaccggtaccagcaatcgggatccatcccattgtcggacgtacatccacacataccaaaacaacagcacccatatccagagaaatctatcctacgcccttggaccaactttatcacttccgtcatcggcgaactggcaacatcttcaatgccgttctacgcaagagattgtccatgaccagggctcacaagccttcattgtccttgtcaacggtgcgtaaatctaccacagggaaagaacatatcagtgctctcat

SEQ ID NO: 14311 - DNA, 349 bp, Glycine max
  Clone ID: LIB3040-034-Q1-E1-A4
ggttttacaatttacatcacatttcgttgcgcctctgttctctgtcactgctgcgtctctcgtaaccatgcctaagcaaatccacgagattaaggatttccttctcactgctagaaggaaggacgcagggtcggtgaagatcaagaggagcagagatgtggttaagttcaaggtcagatgctcgaagtacctctacacactttgtgtgtttgacccagagaaagctgataaattgaagcaatctcttcctccaggtttgagtgttcaagacctgtaaaggtacagggcgagagaccaagaagaagcaattcattgattcttctgaacttcgtttctctgtagttgaaac

SEQ ID NO: 14312 - DNA, 112 bp, Glycine max
  Clone ID: LIB3040-034-Q1-E1-A5
gtgaagtttcattgtgattctttgttgagtcaccatccttcattttcgtgctttgtggccaaattctttttgcatgtcttggatgaatagaacttttactaggttaagtggc

SEQ ID NO: 14313 - DNA, 303 bp, Glycine max
  Clone ID: LIB3040-034-Q1-E1-A6
gtgttctgctacatttgaggagtttctttctgttctgatttttatgtatgatgtctaaatcaacattttgttgtggagcaaaacactttaacttttttttttaaaacttacaatgaatgttattttctgcaacaactgggaagaaaaaaaaaaaaaaagacaaataaaaaaaaaaaaaaaaaacaaaaaaaaaaaaaaaaaaaagagaaaaaagacaaaaaaaagaaaaaagaaaccaccaaataaaaaatataaacgaaaaaaaggcgccgcttaagaagttaccagctagaggcgcctcaa

SEQ ID NO: 14314 - DNA, 258 bp, Glycine max
  Clone ID: LIB3040-034-Q1-E1-A7
ggagagagaaggggatattcactccacatcgtgtgctcactctctcttctcctaggtgtcgctctcaacgatagaaactaaggtacacatgcacactaattcaaagctctacaactatgtcaccaaatttaaattcacatgggcttctttttaccccttcttgaaagttagaagtctagagtatcacaactagatcaccttgcactacatgccccgttcgtgagatgacgttctaacgaatacgacacttacgatctg

SEQ ID NO: 14315 - DNA, 375 bp, Glycine max
  Clone ID: LIB3040-034-Q1-E1-A8
gacagcgaaacagagagtgatttcagtgagtgatcggtgttcacttgatctcatcataatcgtcagcgtcaattgaagaagatgccgatcagaaacatcgccgtcggaaggcctgaagaggcgactcaccccgacacgttgaaggcggctttggctgagttcatctcaaccttcatcttcgtgttcgccggctcaggctccggcatcgcctacaacaagctcaccgacaacggcgctgccacccctgccggcctcatctccgcctccatcgcccatgcattcgccctcttcgtcgccgtctccgtcggcgccaacatctccggcggccacgtcaaccccgccgtcaccttcggcgccttcgtcggcgggaacatc

SEQ ID NO: 14316 - DNA, 322 bp, Glycine max
  Clone ID: LIB3040-034-Q1-E1-B1
gattcacaacttcaatccctcttttgctttaccaaattccattttccaattcaaaaccctaactccgttcgaagcaccaaatcgtgatggcaccaaaggcagagaagaagccagcagagaagaagcctgtggaggagaagaaatcgacggtgggagacaaggctccggcggagaagaagccaaaggccggaaagaagcttccgaaggagggaggcgccggcggagaaggtaagaagaagaagagaaacaagaagagcgtggagacatacaagatctacatcttcaaggttctgaagcaggttcaccctgacattggtatctc

SEQ ID NO: 14317 - DNA, 383 bp, Glycine max
  Clone ID: LIB3040-034-Q1-E1-B10
gggtagatgaggtgaaatgagagcattggtgagagttgagagagagtgagttatgttatcaatgttatggtgaaagtgaaaccacacgcaaagctgaaagagaagctattcagtgattttgattcagatcgtgtctgtgtctacaaccatgtacagcggctccagcgacggcgaaagccatgacgctcctcaaaatcagaggaaaattccgcctgcatcctccatgctatgggtccgcaatcttcgccgtttcatccggatccggcgccggtctccgatcccaagcccctgatggagcttgaaactaagagaattttgctccacatttttaaggaaaagcagcagaaaaccgccgaaactgctacaattcccactttctacaa

SEQ ID NO: 14318 - DNA, 388 bp, Glycine max
  Clone ID: LIB3040-034-Q1-E1-B11
ggcgctcacatcgtgttctctgcggcgcgagctagctagggtttagaacctcgcagttacagaaaacatggcgactgtggtgccaacctccgaagaagacgctgcactctccgtcgttcgattcgcctctgaacttgcctgggccgatgccggtcccgaggttgctgagccccaagttagcagactctgcgtggaggctgaagaattcattgttatgggaaagtggttggagctagcatcattgatgattacctctgctgaattgattttctcgaaggtttctgaaaaagatatagagtccatcttcactatcatctgcaatcttgttacaaagaccgaaaatccagatgaagtgatggagattgtaaaagttataactacaaatact

SEQ ID NO: 14319 - DNA, 382 bp, Glycine max
  Clone ID: LIB3040-034-Q1-E1-B12
gtttacctgaacaagcaatctatcaagactcaaaggggacgagaaatactcactgatagtgttgccaaagctgcacttggtaacagcagccggacctcctacagaagagcactaaagaaaggtggcggccatggagggtcaagttccagtgtgcatagaagcagtgctagtgtttcccagaaaatcaggaacaggtcaaggagccaaactaaacatcattaggtgtctgtgaaaagctgcaattcatcagtatttctaagacttgataaaatggaggagtatttttcaaacttgtttttacccagtacttgcttcaacctgtaacccactctgtggaataagaaggctttgctgtgattgttgttgttttgtttcaacctgt

SEQ ID NO: 14320 - DNA, 331 bp, Glycine max
  Clone ID: LIB3040-034-Q1-E1-B2
gccctttcttctgcatcactttccattctcttcaacctaacgcagcatcgctatactcttcattccatggctttgcccaatcagcaaaccgtggattaccctagtttcaaactcgttatcgtcggtgatggtggcacaggaaagacaacctttgtgaaaaggcatctcaccggagaattcgagaagaaatatgagccaaccatcggtgtggaggttcacccattggattttttcacaaactgtggaaagattcgattctactgctgggatactgctggacaggagaagtttggtggcctcagagatggatactatatccatgggcaatgtg

SEQ ID NO: 14321 - DNA, 292 bp, Glycine max
  Clone ID: LIB3040-034-Q1-E1-B3
gatccatttctcgcaacaatgcttaacctctctcattccccatttcctcacctccttcaaccgctgctaaattctatggttccgaaatggacgctggcggaaagatcaagaagggcgccggaggtataaagggcggcggcccaaagaagaagccggtttcaaggtccgtcaaagccggtctccaattccccgtcggaagaattggccgttatttgaagaaaggaaggtacgctcagcgtgtccgtaccggtgctcccgtatacttggctgcagttctcgaatacctagctgc

SEQ ID NO: 14322 - DNA, 205 bp, Glycine max
  Clone ID: LIB3040-034-Q1-E1-B4
ggtggccgctgtgattcccatgaggtcctccccatgccgcatctcccaccctcaatgtcgcccgatcatattgttgtcgtcgatgctcacccaagctctttgtgtggtcaaagttatgatctactcacaatgggtgctagtgagtcatggtggatgatagagatgacaatggatgctggtgatttcttggttcattgttcatgga

SEQ ID NO: 14323 - DNA, 339 bp, Glycine max
  Clone ID: LIB3040-034-Q1-E1-B5
gaccctcttgtttgctaatattctcattcttctgtctctgcttcttctccttctgaactaagagatggggttgtctttcaccaagctttttagccggctctttgctaagaaagagatgcgtattctcatggtaggtcttgatgctgctggtaagactaccatcttgtacaagctcaagctgggagaaattgtcacaaccattcccacaattggattcaatgtggagactgtggaatataagaatattagctttactgtatgggatgtgggtggcaagataagatccgtccctttaggagacactacttccaaaacactcaggggctaatcgttgttgtg

SEQ ID NO: 14324 - DNA, 230 bp, Glycine max
  Clone ID: LIB3040-034-Q1-E1-B7
ggcgtacacagcctcaacaaccctaacgcgtgcagagcagagagagacgcagccatggggcgaagacccgcgaggtgttataggcaaattaagaacaaaccataccccaggtcacggttttgccgtggtgttcctgatcccaagatcaggatttacgatgttggtatgaagaagaacggtgttgatgagtttccattctgtgtcgcatctggctagttgggagaaggaac

SEQ ID NO: 14325 - DNA, 165 bp, Glycine max
  Clone ID: LIB3040-034-Q1-E1-B8
ctttccaaaacgtgaatagtttaaagaagggagttctttatttgtacttctaaatccaactgtttagttaaggggtgtttatctcttgtagagcttttagtttgatttagagttttcttgttgaaatctggttaagtttgtatcaatataattggcttatcattc

SEQ ID NO: 14326 - DNA, 225 bp, Glycine max
  Clone ID: LIB3040-034-Q1-E1-B9
gacagtaacaaagactccttttccaatttccttcctttgggttgtgttctgtgttattgggttggattgtgttgtgtgttccatacaactccaactagtcagagattcttgtctgggctacattgcactttgcaccccaaaaagtgaaaggaagagaggcataaacaccccaaaaaatggagagagctcacactaaagtcaccagcttaaaagtagggtttgggg

SEQ ID NO: 14327 - DNA, 351 bp, Glycine max
  Clone ID: LIB3040-034-Q1-E1-C1
gactcaccacttcaaaacactcataacacaaagcacaaagcaaagctcatccttgagttaaaaaatggcagcagcttcttccatggctctctcatccccatccttggctggcaaggccgtgaagctgggcccatcagccccagaagtgggaagggtgagcatgaggaagaccgtcaccaagcaggtctcctcaggaagcccatggtacggcccagaccgagtcaagtacttgggcccattctctggcgagcccccgtcctacctaaccggtgagttcccaggcgactaccggtgggacactgctggggcttccgcagacccagaaaccttcggcaaagaaccgtgaactcg

SEQ ID NO: 14328 - DNA, 238 bp, Glycine max
  Clone ID: LIB3040-034-Q1-E1-C11
gattacttggttgccgacccttacccttaccctagattatgtgggtgtcaaatgatacccaaccttctcccggctagtcccaagccaaactcttttggcagattatttcagtgtagagttattaacgttctatggattatatgtactttatgcgctcttaagtacttatagataagtagatatgtgtggagtgaataaatgtttttagcaataaacaagccaaaacagttggaaggtg

SEQ ID NO: 14329 - DNA, 348 bp, Glycine max
  Clone ID: LIB3040-034-Q1-E1-C12
ggattgaggaaggttaggcgaggaagggaaaaagaggacagaggttgcttgcgcaaatctagctaatctgggctttctgggacaaccagtagagaaagtaaaaggattgagattgagatttgagagaaagagaaagagaaagagaaagaagaggttaaacacacacaaaacagaagaagagaactctcccaccatgccatgcccaaaaccgtactacacaataaagcacaccaaccattcatttccttttgcccacatttactatcccacattatgtttccacagacaatcgcagtgccacagaaccaactaggcactccttcatgtccttagctagtttagttacct

SEQ ID NO: 14330 - DNA, 269 bp, Glycine max
  Clone ID: LIB3040-034-Q1-E1-C2
gggtggagtgtgcacaagagactcacagtctcaaccctacttagatcatttgcagcatcaagctcgtgacaggcaccacccatgggtcctgtgcacagccgcggtaacggtatctcgtcttctgctttgccctacaaaaggacacctcctagctggctcaagatctctgcgcaagatgtcgatgaccatatctgcaagtttgcgaacacaagtttgtcgccctctcagattgctgtcattctcacagattcccaccgtattgctcaggt

SEQ ID NO: 14331 - DNA, 189 bp, Glycine max
  Clone ID: LIB3040-034-Q1-E1-C4
gggagctgggtttgttttccgcctttggtcttccactctctctccttttctctcgcgaaaaccgtatcaacaatgtctggagaatcagccagcgcgattcacaacggtcaaatcgatctcttagacttcattgactggtctcgggttgaatgcctcaatcaaagctccacccactctctccccaatgct

SEQ ID NO: 14332 - DNA, 240 bp, Glycine max
  Clone ID: LIB3040-034-Q1-E1-C5
acgaaagagaaagtggagagtgcagaagaacgacagaaacgacaagtggaagatcaatatgcacaggtcctttctgagtccccaaaagcagcagaagcaagtgagcagaaatcttccaagcctgctcctgcccagggtttgatcctttgatttgcttcttgtattgataaatatacttcctcgtaccgaccttgatttcatccagatcgaaagtgaatgtaggactgatttactgtcgag

SEQ ID NO: 14333 - DNA, 271 bp, Glycine max
  Clone ID: LIB3040-034-Q1-E1-C6
gagggttacacgccgtcgtcgctgtttttgtgtgtcgcttcttcgtaggtgcagctgcaatggtgaacggacgccaaggagaacgtgtcagactctacgtgaggggtacagtccttggatacaaaaggtccaagtcaaaccagtatccagatacatccctgatccaaattgagggtgtgaatgccagagaagaagtagcatggtatgctggcaagacagatggctatatctacaacgcgaaggtgaagaagaatggaagccattaccgctg

SEQ ID NO: 14334 - DNA, 256 bp, Glycine max
  Clone ID: LIB3040-034-Q1-E1-C7
ggattgcagcgtcactgttagttattgtatcctagaggaccctatcttctcccacccccttcctatattacataagccttgcatttcattgcatgcccttcttcttgttctgatcttttggggtgtgcgtgtgtgtcacgttgattgactgattgtttgttcgttcctccatcaacgcaattaccatatcggatgagcaacagttctacaccaatccgcgctacatgttttcaccgagggatagccatgtgcgggg

SEQ ID NO: 14335 - DNA, 205 bp, Glycine max
  Clone ID: LIB3040-034-Q1-E1-C9
cggggcgtttgtgtttggtcttagacgccggacgccaccaccgtcactgtttcaatcctcgaactgtgtcttcttcgctttctggtctttttattaggttttgttcatcgatctatctccaaacatgccttccagtcacttgcttctccatgaaaccaatatgatggtctccatccttgagccatccaagcctaattttttctct

SEQ ID NO: 14336 - DNA, 358 bp, Glycine max
  Clone ID: LIB3040-034-Q1-E1-D10
ggaacggaaaagcactggcgcagctaccctgaggcttctcttctcttctcttctctgtcgtgagtcaccatggtgagggttagtgtgctgaacgatgctctgaagagcatgtacaatgctgagaaaaggggaaagcgccaagtcatgattaggccatcctccaaagtcattatcaaattccttttggtgatgcaaaagcacggatacatcggagagtttgagtatgttgatgaccacagggctggtaaaatcgtggttgaattgaacggtagactgaacaagtgtggggttattagtccccgttttgatgtgggcgtcaaagagattgaaggttggactgctaggcttctcccctcaa

SEQ ID NO: 14337 - DNA, 79 bp, Glycine max
  Clone ID: LIB3040-034-Q1-E1-D12
gaccatcatgctcatagggaacaagtgtgatctgtctcatcgacgggcagtgagcaaagaggagggagagcaatttgtg

SEQ ID NO: 14338 - DNA, 223 bp, Glycine max
  Clone ID: LIB3040-034-Q1-E1-D3
gtccctgacatgggcaaaagacagctcatgaatcttcttcctcttggtgccatttcactccccactgctggaatgcttattcccgacacctacttctttgtccctccaggttcaggttcttcagctggcggtactgttgccaacgatgccgttgggaatgatctaattgcccagaattggctcacggcacatcgacctcgtcaccgaccccttccgcacggat

SEQ ID NO: 14339 - DNA, 341 bp, Glycine max
  Clone ID: LIB3040-034-Q1-E1-D4
gacaacacaacgcaacacaacgcgcactctctcttttctctcttaacacaaaaaccctatcgttcttcgcggtttcgccgattctcgccatgccgaaagccaaatccgacgccaaagccgccgatagccggttgaagcgcaagggcgctggtgctggaaggaagcaatcgacgaaagctgctaaagatcctaacaagccaaagacacgtccaagcgctttcttcgttttcatgtcggagttcagagagcagtttaagaaggagcatcctaacaacaaatccgtcgctgttgtcggtaacactggtggtgaccaatggaaatcgctgtctgatgctgaaaag

SEQ ID NO: 14340 - DNA, 187 bp, Glycine max
  Clone ID: LIB3040-034-Q1-E1-D5
ggttgtgaatcaccataactcttccgtcttgcgtttctctgcctacaaggattgaaacatgggtcaagcactacgttgctagcaacttgatcagtcaaatgtcgatatcaccgagcattttggcacatttgatcatgtcctacaacctgcatgtcatcacctgccttggtgtcctgcgtaccacctt

SEQ ID NO: 14341 - DNA, 182 bp, Glycine max
  Clone ID: LIB3040-034-Q1-E1-D7
gatcatagcgatccagagagtgggttcaatcagtgatcggggttcacttgctccttcgtaaagtcctcgtcatcagcataatcatcactccttggttggagacgatgctgatgacagacgtcgccatcggaacgcctgaagacgctactcatcccgacacctctgaacgtggggttggctga

SEQ ID NO: 14342 - DNA, 268 bp, Glycine max
  Clone ID: LIB3040-034-Q1-E1-D8
ggcagtttcaaattttcttttccttcactttcccgagaaaaaaataacacttttcactttcttcactacgttctcacttcgatatggctcgtacgaagcaaaccgctcgcaagtccaccggtggcaaggcgccacgtaagcagctcgccaccaaggccgctcggaagtccgctccggcgaccggaggagtgaagaagccccaccgcttcaggccgggaaccgtggcgctgagggaaatcagagagtgccagaagaggaccgagcttcg

SEQ ID NO: 14343 - DNA, 201 bp, Glycine max
  Clone ID: LIB3040-034-Q1-E1-E1
ttaatctaaatatgacacgtgagttaaaacaaatcgaataagtgatatttaaatggagcaaggcatgtgtttaagaaatacagaacaaataaaaaaaaatctacatgtggacggaagaggatttgcatgtcactcgcgtgtcgaattcatagatgttaacttgtcctcattcgtacgtgtccttacaatgacgttagcgtt

SEQ ID NO: 14344 - DNA, 384 bp, Glycine max
  Clone ID: LIB3040-034-Q1-E1-E10
gactccgcagctgcagcactcaaaaccctagagaggacgagagagcgtgcaactttcggcaaccacagaccatgacattcaagcgcaggaatggaggtcgcaacaaacacggccgcggccatgtcaaattcatccgatgctccaactgcggaaaatgctgccccaaggacaaggccatcaagaggtttttggttaggaacattgttgaacaggctgcagtcagagatgtgcaggaagcttgtgtctatgaacaatatacacttccaaaactctatgtgaagatgcagtactgtgtttcctgtgctatccactctcatgttgtgagggttcgattccgcaccgacaggaggaagcgtgagcctccacagagattcatcaggcgca

SEQ ID NO: 14345 - DNA, 301 bp, Glycine max
  Clone ID: LIB3040-034-Q1-E1-E11
gtcagtaggagatgcaaggagaaaacataacccaatatcaaatataattgggataagaagatacataataataaatcagcttcagccatttcagtacatgatgaaaaggaatcattgtacttacggcccagtaatgacgatttgcaatgtcccaaccaccttgataacgtcgaaatccgtgtagaatgtcaggcctattggtcctgtttgctgctagcacaagagtacccttagttctaggacgtgctgcttgagctacttgtgtgacgccattcttccatggacccaaattctgaccccc

SEQ ID NO: 14346 - DNA, 381 bp, Glycine max
  Clone ID: LIB3040-034-Q1-E1-E12
gttcttaaatgaaaggccccaacctaggcctggaaaaggggtcaccaatacctgccaagtctgtgagcgcagcctccttgattccttcaacttctgctctcttggttgtaaggtatatttaaatggaattcctaatcttaactacatcttagttgtaacaaaatatgatgaatagatttcctaattttttaagaaatgttgtatgtcctttgtaaattgtaactacctcctacttttttgctgtataaagtatgtaacattatagttgtactttttatgcctgctttgaaaaagtaagaaaaaaatgatgatgagaacagttggatacgaatgaataatgatctcttgaacttttgaattttcttctcagattgttggaac

SEQ ID NO: 14347 - DNA, 336 bp, Glycine max
  Clone ID: LIB3040-034-Q1-E1-E2
ggaaagcaagcattatcagaagcagaaagaaagaataagaggttgcagcaacaatggcagccatggctgcgcttcagagctcaatggtcggtctctccctctcctccaactctttcttaggccaacgcctttctcccatcaccctcccctctcttcttccgggtaagtcaacagagaagcaatgtcctattgtaatgaggcttaaacgatgggaacggaaggagtgtaaaccaaacagccttcctatcttgcacaaaatgcatgttaaacttggagatacggtgcaagtcatatctggacgtgaaaggggtaaagttggggagattactaaaatct

SEQ ID NO: 14348 - DNA, 160 bp, Glycine max
  Clone ID: LIB3040-034-Q1-E1-E4
taaacccctgttctatggtttccagatcaaccatactctcaccagtactggtgcgagtaaaaataccctcttctttaacttctgttattattctgatggagtgcaactccttcataagtatttcgagaataccaccacgattttttccatcaaatcccca

SEQ ID NO: 14349 - DNA, 236 bp, Glycine max
  Clone ID: LIB3040-034-Q1-E1-E5
agtttggaattggaactaccgaaagccgaaccttaaacacaaacgccaaatctagcaactattgagttttgttttctttgaaacatcgtgtgcacagtaccccagaagatcgaacaaggatctccacgaagacaaacctctgttctcaactgtgtttctttacctctcacctactttcagaccatacccagattgactaggctgagaagatgcatcagatagcgcctatgattcct

SEQ ID NO: 14350 - DNA, 248 bp, Glycine max
  Clone ID: LIB3040-034-Q1-E1-E6
tgggagccctcgtcagcacgttgtgcatgcccagtttgggagttccgacgctcttagcaaccagtcaagacccggtgcctctaggctcatgttcccattcaacttgggttttcgaagcccagtcatgcatcacaatgcgaacggagtaataccatcgtgcccattattgttatgtatgtcgacggtccccaatcaaacatgccggtaggaagttgggtgcaggcctcgctcaacggcaagcttggtgc

SEQ ID NO: 14351 - DNA, 309 bp, Glycine max
  Clone ID: LIB3040-034-Q1-E1-E7
gatccaactctctaaacaacacattaacctttctcattccccatctcctcaccttattcagccactgctaatttctagggttccgaaatggacgctggcggaaagatcaagaagggcgccggaggaagaaagggcggcggccctaagaagaagccggtttcaaggtccgtcaaggccggtctccaattccccgtcggaagaattggccgttatttgaagaaaggaaggtacgcccagcgtgtcggtaccggtgctcccgtttacttggccgcagttctccagtagctagctgctgaggtgcctgagttg

SEQ ID NO: 14352 - DNA, 241 bp, Glycine max
  Clone ID: LIB3040-034-Q1-E1-E8
ggctattccgcaccttctctgctaccaatggaattcaacccgatcccaatcggttcgtgctcgaacaaacaccagatgatctatacagagtagttcaattccactgaatcagatcacgataggcacattacggggactgatcccaacacgtttttcgccatgtcgaatttgtcccgcgaagatcctaagcaagtgtactctagtgcacattcacagcgacgacgatatctcagattcactg

SEQ ID NO: 14353 - DNA, 75 bp, Glycine max
  Clone ID: LIB3040-034-Q1-E1-E9
ggtggtagtaatcacagaacttagcgtcacaggttccattgcctccgcttccatctcgcatgcatggatgactct

SEQ ID NO: 14354 - DNA, 325 bp, Glycine max
  Clone ID: LIB3040-034-Q1-E1-F1
gatccacatcacaaaaattacaacaccaatctcacccatttcaaaaaaaggccgttagtgttactattcgtaaaatggccactcttgttctttaccaattctttctcaaactcttgctcctaatttcagtctttcagctttcctttgctgctaggagactcaaacaactggttcaggaccagtcacagttactccattaccacaacggtcctcttccataccgcaaaatcgccgtgaacctaatctggtatggtcacttcagaccatcccaaaaagccatcatcacagatttcgttacctcactgtcatccccatcgtctcaaga

SEQ ID NO: 14355 - DNA, 292 bp, Glycine max
  Clone ID: LIB3040-034-Q1-E1-F11
ggattctgcaacactttcgtttcgtcactctgttgttttcccatccacagtactctctacaatacaaaacctccactttcagttctacaatataagattgttcatcaatggaatgtaatgatcagcgtgtaagtgtaagcttgaagagaaaatcaccagaaaatggagatcatgtactcttcaacaccttttctctggatgaccttaatgaagatctctttgaaaggatactttcatggctccaaacttccacattctttcgcctcaattctgtgtgcaaaagatggaaatc

SEQ ID NO: 14356 - DNA, 246 bp, Glycine max
  Clone ID: LIB3040-034-Q1-E1-F12
gtaccgggcacgaattcacgggtcaatacaggcgtcagtaaggctagcaaaaggggacatgccggtgttgcaactaatacttcatgtatatgcatcgtcaggcccttactagatgccaatggtcatgatctaattttaagtgattcttctgatgaccagattgacagttagatgaagccaattcacgttttaaatcgtcccaataccgagttcaattcgtcacaagttgaatgttatcactcaatg

SEQ ID NO: 14357 - DNA, 329 bp, Glycine max
  Clone ID: LIB3040-034-Q1-E1-F5
gctctaccgcattaccacccgtcttgggtccgggttaatagatctctgtgaagtcgctttataacactcaacctaagatgcagaacgaggaaggacagttcaccgggctttacattcctaggaagtgctctgccacaaaccgattgattaccgctagggaccatgcttcggttcaggttaacattgggcatgtggatgagaatggcgtctacaatggccatttctccacttttgctctctgcggcttcatacgtgctcagggtgatgccgacagtgccccatatcgcttgtggcaaaacaagaaagttgaagttaagcaacagtaaaca

SEQ ID NO: 14358 - DNA, 340 bp, Glycine max
  Clone ID: LIB3040-034-Q1-E1-F6
gatcatcaaatcaaaaaccctaattcccaaattccctcatttttcaagtttcaaccaagaaaagcagcaacaatgtccggtccccgaaaaggttggaaagggttaagaaaaggaagaacaaacaaggctcccaaagtgccccgccacaatatccacggaatcacgaaacccgcgattccgagaatggcgacaacaaggtgcctgaagaagatcaaccggttgatctaccaacagaccaggggcctgctcaagatctttctcgagaacgtcattcgcgatgccgtgacctacacggagcacgccaggagaaagacagtgaccgccatggatgtcctttacc

SEQ ID NO: 14359 - DNA, 300 bp, Glycine max
  Clone ID: LIB3040-034-Q1-E1-F7
gaagggagaaatgaccgaatgctattcacttctaaatcttcgatttccatcgtttcccgtcattgatttcggcgcaaaaatcttccccaaacgtttccccaaatccatttcattctcacacccttcatcgaagtttcaactttgtggaatttcccgagctatggaagtggtcgagggaagtgaagagagtaaagggtcgtcatcccctctaatgaagctcttgttcgtggaaatgggtgtcggctacgatcaacatggacaggacataacggttgcagcaatgagggcttgcaaggatgc

SEQ ID NO: 14360 - DNA, 268 bp, Glycine max
  Clone ID: LIB3040-034-Q1-E1-F9
gaaaccacaagtaaaagaaagaagctttcttgagttgagttaacagcatggagagggaggaagatgttaaggttggagcacagaaattctcacagaggcaagcattggggacaggagctcacggtgacaaggactacaaggaggcaccaccagcacccttgtttgagccaagggagttaaagtcatggtctttttacagagctgggattgcagagtttgtggccacattcttgttcctctacatcactgtcctgaccgtcatgggtgt

SEQ ID NO: 14361 - DNA, 222 bp, Glycine max
  Clone ID: LIB3040-034-Q1-E1-G11
gatttacgttactcccaaatcgcaattggccaattccaccaaagctcctcacgctcacactcactcatttgcaaagaaagagagagaaatggcactgagggcagccgtgctccgccacgttcgtgtgccactccaagccgctccaaaactgcagccatggcgtgccatgtcatcacacggcgacgatcatctctccaaagaggaggtcgtcgaaagagtcct

SEQ ID NO: 14362 - DNA, 383 bp, Glycine max
  Clone ID: LIB3040-034-Q1-E1-G12
gacacgcaactatttctgactacgttttgctctacgcctctccctctctctcaaaaatcgttctcttcgattttagggttttgttttgctgctgcctccgttccccccttctcataaacaacgcgttttctcttctgcttcgtatctattctttgcttttggttttggttgattcaaggccttcacagcattcgttgcggcattttaatcgatttatccaagcaggactgaatgaactaatggagtctaaaggtgggaaaaagaagtctagtagtagtagtagtaaatcattgttctacgaagctcccctcggatacagcattgaagacgttagaccaaacggtggaatcaagaaattcagatctgctgcttactccaactgc

SEQ ID NO: 14363 - DNA, 358 bp, Glycine max
  Clone ID: LIB3040-034-Q1-E1-G2
ggaatggagagctcaacaacaataagaaggatatgaacttgttccggaggattaagaatggcttatcccgccataataacaatgaaggaggcaacagcagcagcagtgatagcgaaagtgatgatgagaagtgcccaaagacaaagaaaggaggaaactgcaagcaggacgcaactaagacaaagccagtttaactgacggaaagaacatcgccacaaagtgtgtttaccatttcatctgttcttgtacccaaatagttgggaaaaataaattccaatatttcacttgggtgtgagtatcttatgataaataatatattttgaagtttacccacaaggaaatcaaggcgcctcccaac

SEQ ID NO: 14364 - DNA, 244 bp, Glycine max
  Clone ID: LIB3040-034-Q1-E1-G3
ggcctacttcatctctcttataatcacacacacacctaccttaatagctatggaaactggaagctttcacggctaccgcaagctccccaacaccaccgctgggttgaagctgtcaatgtcagacatgaacatcaagcaccacgtagcatcaccagatcacagtgcagccacaggagaggataacgaatgcacggtgagggagcaagacacgttcatgccaatcgccaccgtgactacgatcacg

SEQ ID NO: 14365 - DNA, 232 bp, Glycine max
  Clone ID: LIB3040-034-Q1-E1-G4
gatgagctcaaagactaggatgttttcacttgtggagctccaaatgctacgaggacggcgtggaccttggtcattgcacagtgctttattccctggtttggtaatcattggcgctagacattcttagcatttaaaaacagaacagtgtttctaattgtagctcttggatgcaatgcttgtattggtagcatgaacttgggtatctcgctgtacatctgccctttaatttgtg

SEQ ID NO: 14366 - DNA, 324 bp, Glycine max
  Clone ID: LIB3040-034-Q1-E1-G6
ggaagtcgccgtttgttttcttttcgttcgcatcttctctctctctcagaaagatgaaggtggtcgccgcgtatttgctcgccgtcctcggtggcaacaacagccgctccgccgatgtcatcaaggaaatccttggctccgttggagtagaagcagatgacgataggattgaatcgtttttgtctgaagttaagggtaaggatatagttgagcttattgctgccggtagggaaaagttggccacggttccttctggtggtggtggtgccgttgccgtcgccgcagctcctgggggacgtgctgctgctgcgtgctcctgctgct

SEQ ID NO: 14367 - DNA, 368 bp, Glycine max
  Clone ID: LIB3040-034-Q1-E1-G9
ggcacttcaattgcaatcaaattagttcattctctttgcgcagttccctacctctcctttcaagatgcagatcttcgtcaagaccctcaccggaaagaccatcacccttgaggtggaaagctctgacaccatcgacaacgtcaaggccaagatccaggacaaggaaggaattcccccggatcagcaacgtctcatcttcgccggaaagcagctcgaggacggccgtaccctcgccgactacaacatccagaaggagtcaaaccttcaccttgtccttcgtctccgtggtggcatgcagatcttcgtcaagactctcactggcaaaaccataaccccaaagggtcaaagctctgacaccatttacaacg

SEQ ID NO: 14368 - DNA, 57 bp, Glycine max; identical to SEQ ID NO: 12752
  Clone ID: LIB3040-034-Q1-E1-H1

SEQ ID NO: 14369 - DNA, 381 bp, Glycine max
  Clone ID: LIB3040-034-Q1-E1-H10
gagagtgatccttctacactaactaaagccgagcagcgagagagagaaaccctagcaaaaatgccggctggtcacggtttgagatcccgcaccagagattccttctctcgtcccttcaggaagaagggtaccatcgccctcaccacatacctcagaacctaccacgtcggcgattatgtcgacgtcaaggttaacggcgccgtccacaagggaatgcctcacaagttctaccatggccgcaccggtcgcgtctggaatgtcaccaaacgtgctgttggggtcgaagtcaacaagcaggtcggcaacagaatcataaggaagaggattcacgtgcgtgtggagcatgttatgccatcaaggtgcactgaggagttccgcctt

SEQ ID NO: 14370 - DNA, 350 bp, Glycine max
  Clone ID: LIB3040-034-Q1-E1-H11
ggctgccgctctctgagaaaaacagatagtgtgggagagagaagagcggaagagaaaatgacgaccaggttcaagaagaacaggaagaagagaggtcacgtcagcgccggacacggccgtatcggaaagcaccgcaagcatcccggaggtcgcggtaacgccggtggcatgcatcaccaccgtatcctcttcgacaagtaccatcctggtttcttcgggaaggtaggcatgcgctacttccacaaacttcgcaacaaattctacaatccgatcatcaacatcgacaagctgtggtccctcctcccccaggaggccaaagacaaggccaccgccgacaaggcacccttgct

SEQ ID NO: 14371 - DNA, 355 bp, Glycine max
  Clone ID: LIB3040-032-Q1-E1-F3
ggttttagagtggtggagtgtgcagaagagcgtcgcagtcgcaaccctaatcagaagaagcgcagcttcaagcgagtgacagccaccagccatgggtcgtatgcacagccgcggtaagggtatatcctcttctgctttgccctacaaaaggacacctcctagctggctcaagatctcttcgcaagatgtcgaagaaaatatctgcaagtttgcgaagaaaggtttgaccccgtctcagattggtgtcattctcagagattctcacggtattgctcaggtcaatagcgtcactggcagcaaaatccttcgcatcctcaaagctcacggacttgcgcctgaaattccagaggacctg

SEQ ID NO: 14372 - DNA, 363 bp, Glycine max
  unsure (1)..(363): unsure at all n locations
  Clone ID: LIB3040-031-Q1-E1-C10
gactcactcatacaatagagaccagcttttgcttctttgtgaacatggagatgaggaaatcatgtggcttcttcttcttgctcctcctccttgtctttgcttcncaggtggtggtgcagacggagggaagagtgtgtgagtcacaaagccacgggttccatgggttgtggtatagaggacaaaactgtgctttggtctgcaggaacgaaaggttctccggtggcaggtgcaaaagctttcgccgccgctgcttttgcaccaggatttgttgagatctcatcaaacactactcttgccatgcaaattaataaatcatagctaggccaaataaattgcatctactctttatccatttgggagcta

SEQ ID NO: 14373 - DNA, 329 bp, Glycine max
  Clone ID: LIB3040-031-Q1-E1-C11
gatccacatcctccacaacacaactccactcttaactgccattggtttttcctcctccaattcccctcctttccaaacttttttcgattacccatttggagattctgtcctaatgggtcctgctccctccaaaatttcctcccttttccgggttttctcacaaacccattgttggggatctctgaaaaacccaacttgctctgtttctctgagctttgcgaatgtgaaacttggaagcagaaaccttagggtttgtgcctcaactgtgcctctctcacgggtgattttcgaacccttcgaggaggttaagaagggtgaacttgctgttc

SEQ ID NO: 14374 - DNA, 374 bp, Glycine max
  Clone ID: LIB3040-031-Q1-E1-C12
ggcgatccaaatccaaaaaaagaagacttcaaaaaatcggaagggtacttttgtaattatatggaaacccgtgagatcagaatatcagatcgaatttaaacgggtcaaattcgcattttcatttcattttgaattgaaaccgcggaaagtttgctgctacatcgatcatcatcacctcatggacggacacgatccacaagacccaaagcagagccctgctgacatgactgcctttgtgcaaaatcttcttcagcagatgcaaaataggttccagacaatgtccgactccattgttacaaagattgatgatatgggaagtcgcataaatgagttggaacaaagcatcaatgacctgagagcagagatgggagtgg

SEQ ID NO: 14375 - DNA, 139 bp, Glycine max
  Clone ID: LIB3040-031-Q1-E1-C4
gcactgcgttatagcaggaccaacttcatgaccacactgctcgctattgctgttcgctcttgctgctcgtgggacttcggtaaccttgacaatgtccagttcggtatccgtaccttggccatttggtcagtctcatgat

SEQ ID NO: 14376 - DNA, 330 bp, Glycine max
  Clone ID: LIB3040-031-Q1-E1-C8
gctagctagggtttctgagtttatgtggttgcgcctctgcctgtaagagtgaaaaaaccttctcttttccttctctcaagtctcaagagatttcatcatggctccaaagaaggacaaggctccaccaccttcctccaagcccgccaaatctggcggtggcaagcagaagaagaagaagtggagcaagggaaagcaaagggagaaggtgaataacatggtgctgtttgatcagggcacctatgataagctcctttctgaagctcccaaattcaagctcatcactccgtccagtcgttctgatcgtttgaggattaatggatcacttgcaag

SEQ ID NO: 14377 - DNA, 359 bp, Glycine max
  unsure (1)..(359): unsure at all n locations
  Clone ID: LIB3040-031-Q1-E1-C9
ggaacttgtaaaataaaatttgcatcatatagagtcatatatagcttgcgctgcgcagttattttgaacctttttttaatatgtgtaattcatatatgtgtttgtactagcttatgctataagataattattctgtgtgactgactgaactatttactttatggtaacgaagatattctcttgtattattttaattgttttcatgttcaccttttctatcctcccctactttttcatctaatctaaagctggctcctgcttctgcttctgccattcttcttcattattctctgcactaatttaagagcatgatacacgatgcaggtccctataanggagggtttctcatgcatgtgact

SEQ ID NO: 14378 - DNA, 372 bp, Glycine max
  Clone ID: LIB3040-031-Q1-E1-D10
gatggaatggttagagaaaagagaggcccatatagtgatccacagcatccttacttttatgaagaagaggatgtgtggatggcacctggcttcattaaccagttttatgaagtccctgattactggaaagtatatgtgcatgaagttgatcaagaaagagaaatgtggttaaactctttttataaagctcctcttacgttacccatgccagctgagctagagcactggtggtccaaaagaggagaatcaatagattcctgaatttgtccttattaacaaggaaccggagcctgatcctgaagatccttcaaagcttatatatactgaggatcctctcatcctccatacaccaactggaaatattatcaatta

SEQ ID NO: 14379 - DNA, 111 bp, Glycine max
  Clone ID: LIB3040-031-Q1-E1-D11
gaccattttggagggagagaaaaaaaagggggggaaatttcaatggcgtcaagggtttctctgaaggcaaggggtaagatttcaagggtatcaagcgccgcgaaatatcta

SEQ ID NO: 14380 - DNA, 208 bp, Glycine max
  Clone ID: LIB3040-031-Q1-E1-D12
gggtgaaaaaacaatgtctcactgtgccgcaaggtgtgccacaaggagtgccacgaggcttcttaacctaacgcgcgctctctccacggaggcgcgtgggcaaaagattgaacgcatcgccacggagcttctcgacctcaacaagttccagaagcacgatttcacggtcctctggcggctcaagatgggtctgcaacgctaaggggct

SEQ ID NO: 14381 - DNA, 296 bp, Glycine max
  Clone ID: LIB3040-031-Q1-E1-D2
gacacaaactttattacagttgttgtattgtaattaagcaagaatattaggcaatggagtcttctagaacttcaactactcttgctcttttttaaccatcaatttgcttttctttgtcatggcaagtggctgctacacttgcacacagcctaagccaaaccctatcccattcccttagcctaaccctagtcctgccgcgaagagctgccccagggacgcacttaagctcggagtgtgcgcaaacgtgcttaatggaccaattggtgctattgtagggtcaccagcggaacacccat

SEQ ID NO: 14382 - DNA, 251 bp, Glycine max
  Clone ID: LIB3040-031-Q1-E1-D4
ggaaatgaaaaaggtgacaagaagtgaagagaatgcgggttgtttgttgttccaattcaggcgtgagtgctttccctagttgtcttagattccctccactgatcgcaatttcaacaacaccctcttcgatccgctttctaaattcgccacccctccgttccactgcttcgtcgcaacacgttacaatagtggcttcgaagaattctcaacaggacacgcgcttagcgagaatcgcgtctgcagtccgagtc

SEQ ID NO: 14383 - DNA, 260 bp, Glycine max
  Clone ID: LIB3040-031-Q1-E1-D6
gactgcaactttgctctctgtgaggcttcaatttctaattagggtttcgcttagggtaaccaatagccatgggagtcttcacctttgtcgtccgcaaatccggcagcgaatggagcgccaagcagcattccggggacatcgaggcctccgccgagtccaccttcgatctccaacggggagctcgtgcaagccgctcgcgccgttgattcgtccggtggagttgagtcctctttcgcgcgcgtgtcgcggagctccgcggt

SEQ ID NO: 14384 - DNA, 337 bp, Glycine max
  Clone ID: LIB3040-031-Q1-E1-D8
cacccgagaatgtcccaatttataaaaatgaaaatagaagcttgaataataggaaacacattttatttcttcataagattcaagtcaaacaatcatgacctaatttatctcgaagatagaacaaagacgcccctataccaagagggtagtggaccattcctacatcgaagagggtccttcaagaccagcattattagtagtcctaaaggctaaaagtgacatcagcaggcactgacgatttctaacgagatactaaaatctagtaggtcctcgtcgcattgggggagcgttggttgacagggtggagcgatcgcgagcctgttcgctgggaggctgg

SEQ ID NO: 14385 - DNA, 275 bp, Glycine max
  Clone ID: LIB3040-031-Q1-E1-D9
gagcaacatggtgaagctggtggagagatttacttgccagaagcttacgttagaaccaagaggactacttaatggagcaaatcagttggaagaacttgtagctagcttcccaactggcttatctgagtgtggagaagcattatcaagccttaggagtaggagaacgagtactgtttgtgatgaatgtctatggtttaagaaatctgtctttagtcaacttgtgtgttttgttattcagttctcagcaataaactgctctggcaatctagtttcat

SEQ ID NO: 14386 - DNA, 345 bp, Glycine max
  Clone ID: LIB3040-031-Q1-E1-E10
ggatgcagatgcagcctatcatggcagcctactaccccaacaacgtcaccactgatcacattcaacagtacctggatgagaacaagtccttgatcctgaagattgttgaaagccagaattctggcaagctgagcgagtgtgcagagaaccaatcaaggctgcagagaaatctcatgtacctagctgcaatagctgattctcaaccccaaccatctccaatgcctggtcagtatccttctagtggacttatgcagcagggagcacactacatgcaggctcagcaggctcagcagatgtcacaacaacagctaatggcttcgcgctcctcactcttgtactcccaac

SEQ ID NO: 14387 - DNA, 354 bp, Glycine max
  Clone ID: LIB3040-031-Q1-E1-E11
gaggacacaagacgataacaaatggcatcatctcagtcgaggaagagagttgacgccgtcgattctcgcgctgcttccgttctcgttcgcgccaaagatggcagtgcttttgctcgttgcgacgattgcaagaagaatgtgccggttgcactcatcgacatgcacagttgcagccttgaagctaaaattaaaatgaacccagacgctcaagttgtggaacaggctgctgaagctaagaagccggagaggaagaagcccaaatctaaagagcctatggcaaaaaaagctaaagttgggaaggggaagaaagtcaaggatcctaacatgcctaagcgtcctcccacagctttcttt

SEQ ID NO: 14388 - DNA, 376 bp, Glycine max
  Clone ID: LIB3040-031-Q1-E1-E12
gacctgatccagatgaacccaaccagggaagccaataacccaaccaagttaacaacggataacattcaaaagtacctgaatgaaaaaaagtccttgatcctgaaaattgttgaaagccagaattctggcaagctgagcgagtgtgcagagaaccaatcaaggctgcagagaaatctcatgtacctagctgcaatagctgattctcaaccccaaccatctccaatgcctggtcagtatccttctagtggacttatgcagcagggagcacactacatgcatgctcagcaggctcagcagatgtcacaacaacagctaatggcttcgcgctcctcactcttgtactcccaacagcctttctcagtgcttcaacagcagc

SEQ ID NO: 14389 - DNA, 169 bp, Glycine max
  Clone ID: LIB3040-031-Q1-E1-E2
gaggtcgcgagcgagcatcttcgagttgcatttcgcagtgtgtgtgagaagaagagaagaatggagaaaatgatgcgactgagaccactgttccgatcactgagttgcagatcttatcatgccttcccattcatcaaccatgtcgttcttcgaccttctcttatctcgc

SEQ ID NO: 14390 - DNA, 361 bp, Glycine max
  Clone ID: LIB3040-031-Q1-E1-E6
gagacaagaatcttttgctgttttttctttcttttctcttcttctatattgcactattgcttatgcaaaacaattttacatatttcaggacggaaaagagagcgagtttcccttgatagatgagactagtgcaacacaagaacaaaacagtatcatcatggaagtgcatcatcttcaaggggttgttgttgataaaagcactgatttcttcccagttgaacagcctatggagccaccagatgaagattgtcgcgtgaaaatgccaatgcccgagtcgtcggttatcaatgatgaaaggatggatgaaaagagatttggagaaagctcaaagaagagagtggagaacaaccgggccgtggtg

SEQ ID NO: 14391 - DNA, 230 bp, Glycine max
  Clone ID: LIB3040-031-Q1-E1-E9
gacaaaagtagcaaagcaattcactcagcctcttcaccacctctttaagctcaggctatctaagaaatgttagtacttctttcctggcaggtttaaatccgtttgtggtgtgagaaaaaaggggatggatttggcaagagcaagggtcttcttcatggggttcgttgtggggggtctatttgctgcaagggtgagtgctcagaccagtgagttccctcaagcggcaggac

SEQ ID NO: 14392 - DNA, 384 bp, Glycine max
  Clone ID: LIB3040-031-Q1-E1-F10
gaactcaaactgcttcattgcataattgcagataagatcaacccttctaccttcagattcgcgggaagatggcatcacttcatgctaatgtgacatcagttgtttacaacagtggcaaccgtgtttctcaatcgaaatttgcaagctcttccttcttgtctgggttcgatgttgttggtcgtgcttcaagtgcttggaagaaggaacttgtcccatcttccatttccttggtgcctagagccaccctaacatttgatcccccaactaccaattcatacataaccaagcaaaagaagcacactcttgaccctgcttctccagattttcttcctcttccttcatttgaacagtgctttccaaagagcaacaaagaacacagggaag

SEQ ID NO: 14393 - DNA, 57 bp, Glycine max; identical to SEQ ID NO: 13136
  unsure (1)..(57): unsure at all n locations
  Clone ID: LIB3040-031-Q1-E1-F11

SEQ ID NO: 14394 - DNA, 366 bp, Glycine max
  Clone ID: LIB3040-031-Q1-E1-F2
gacttctcttcacacctttgttcactcttcttctcttgcggctagggttttagcgcagcttcttctagatttaaggaagatgggtaaggaaaaggttcacatcagtattgtggtcattggccatgtcgactctgggaaatccactaccactggtcacctgatttacaagcttggaggcattgacaagcgtgttattgagaggtttgagaaggaagctgctgagatgaacaagaggtctttcaagtatgcctgggtgctggacaaacttaaggctgagcctgaaagaagaatcaccattgatattgcttttgtggagtttgaaacaacaaagtaatagtgcacagttattgatgcgcctggacatag

SEQ ID NO: 14395 - DNA, 312 bp, Glycine max
  Clone ID: LIB3040-031-Q1-E1-F4
caaccacgaagcaccggatgataacctaagatttgccagaggtagtgattgttatgagaatcgcctttagaggaatttcccacctcaccgtgtgtaagaaacaccaaaataacaaaattgagagtggtataaataggacgaaaatgcctaagtataatctcgtttggtattttacattatacttatatctatttcacacaccattcgtagctccagcaagtggaaccaacagataaacattttggtggctgttaattttaagcaagtagcacacatattatcagggagcactgatatatcgtgggaaattaa

SEQ ID NO: 14396 - DNA, 364 bp, Glycine max
  Clone ID: LIB3040-031-Q1-E1-F6
gacaacacaacgcaacacaacgcgcactctctcttttctctcttaacacaaaaaccctatcgttcttcgcggtttcgccgattctcgccatgccgaaagccaaatccgacgccaaagccgccgatagccggttgaagcgcaagggcgctggtgctggaaggaagcaatcgaagaaagctgctaaggatcctaacaagccaaagagacctccaagcgctttcttcgttttcatgtccgagttcagagagcagtttaagaaggagcatcctaacagcaaatccgtcgctgttgtcggtaaagctggtggtgacaaatggaaatcgctgtctgatgctgaaaaggcccccttcgttgccacgggcga

SEQ ID NO: 14397 - DNA, 358 bp, Glycine max
  Clone ID: LIB3040-031-Q1-E1-F9
gacaacaaaatttgccaattgccatttcaatcctcagtttctttcttcaacgtttccatcatacacagatcccaatcctctctcaagccctaatttcccctcatttccatggccacagaagagcccactgtcgcggtggaaccgctcccgaacctgcctccggcgatcctcccccggaggagaaggaggagaccaaacctgaagccaaggctaagaaaaccaaggagcccaaacctaaaaaggtttccagacctcgcaaccctcccactcatccttcctacgaagagatggttaaagatgcaattacctcgctgaaggagaaaaccggttcgagccaatacgcgattgcgaagttcat

SEQ ID NO: 14398 - DNA, 380 bp, Glycine max
  Clone ID: LIB3040-031-Q1-E1-G10
ggtaatccttacgctctctcactcacaaacgcacactgaattcaaaaacatcgaaagagagaggcatggccgagcaaaccttcatcatgatcaagccagatggcgttcaaagaggccttattggcgagattattagcagatttgagaggaagggtttttacttgaaagggttgaaactcgttactgtggaccgtccttttgctgagaagcactatgctgatttgtctgcaaagcctttctttagtggtttggtggattacattgtctctggccctgttgttgccatgatctgggagggtaagaatgttgttacaactggccgaaagattatcggagccacaaacccagctcaatctgagcctggaactattcgtggtgac

SEQ ID NO: 14399 - DNA, 372 bp, Glycine max
  Clone ID: LIB3040-031-Q1-E1-G11
gaaagaagagaaaataataatatgaataacaacccacaaaacttgggtcttgcaaattaagttcattttcctccctttcactctcgtagacatcacaaaccttccctccattcatcccacgcatggctgccatgaactctagcgtattggcctgtagctatgccatatcaggtgcagcgtgttcggagctcaatgggaaggtcacttccgtggcctatgttgcatgctctggctacaagttgccattgatcaaagctgaggccagagttcctaaagccaaagaatctgaaggaggaaggagaggtgcccttgttctcttggcagctacccttttcacctctgcagcttccaattcttctgccaatgctggga

SEQ ID NO: 14400 - DNA, 392 bp, Glycine max
  Clone ID: LIB3040-031-Q1-E1-G12
gccgcagcaagtgccattttattttgccctacctcctcgattctagggtttcaacaatggcgcagttccttccctacgaatccgcttcaggctacagcctgttccacgttcacggcgtcgattaaatcggacagaacaccgaagcggttcggaactccgtttcggacctcaacaagttcggcaaagtcgttaagcttcgctccttcaaccctttcacttccgctctcgatgctctcaaacagtgcaacgccgtctccgaaggcatattaactgatgagctgaggactgtcttggagaccaacttgcctaaagtgaacgaaggtaagaagtccaagttcactttacgtgtgtccgattctaagattgggtcccagatatctgaagtgactaag

SEQ ID NO: 14401 - DNA, 355 bp, Glycine max
  Clone ID: LIB3040-031-Q1-E1-G2
gacagcaaaacaattttcaaactcaattaccattccataacctaaatctcctctttgtttccgagtcagagagcaatggcacgtaccaagcaaaccgctcgcaagtccaccggcggaaaggcgccgaggaagcaattggcgactaaagccgctcgcaagtcagctccggccaccggcggagtgaagaagccccaccgcttcaggcccggaacggtggctctgagggagatcagaaagtaccagaagagcactgaacttctgatccgaaaactcccattccagaggctcgtcagagaaatcgctcaggatttcaaaacagatcttcgtttccagagcagcgctgtttctgcgcttc

SEQ ID NO: 14402 - DNA, 322 bp, Glycine max
  Clone ID: LIB3040-031-Q1-E1-G4
ggccgttttcttcttcatcatagtcgtggccgtgtcgcagcaaaaccaaaccacatattaacttgtttgctctaagtcatggctctgatcttgcacgcaaccaaagcaaacaagaatgctttcaagactctgattgcggcagagtacagtggcgtccaagtggaattggcccctaatttcgagatgggtgtctctaatagaactcctgaattccttaaaatgaatcccataggaaaggttcctgtcttggaaacgcccgatggtccagtctttgagagcaatgccattgctcgttacgttgctcgactcaagggtgacaacg

SEQ ID NO: 14403 - DNA, 375 bp, Glycine max
  Clone ID: LIB3040-031-Q1-E1-G6
gatcatataaaccacctcggcttttgcttcctctgctgcgttttaacgcccatcacgcgtttctttgcttatacactaactaagatttcaaaccccccgcggccaactaactaagatctggttttgttctgattgattcgtgcattggactgtgaaacgcacgccaaaatgtggtggatgatgaacgagactggaggcaattactgttctaagaagagcgatgatttgtgcagcaatgtgtgtgatcaggaatcaagtcaagtattgggcatgtcacgaattcgctgtattctgcgtggtttggctgtgaaaacctatatatgcacgtatgctgttatcccaatgtgcgtcattggattcgatatacacgggcag

SEQ ID NO: 14404 - DNA, 379 bp, Glycine max
  Clone ID: LIB3040-031-Q1-E1-G8
actcaccacttcaaaacactcataacacaaagcacaaagcaaagctcatccttgagttaaaaaatggcagcagcttcttccatggctctctcatccccatccttggctggcaaggccgtgaagctgggcccatcagccccagaagtgggaagggtgagcatgaggaagaccgtcaccaagcaggtctcctcaggaagcccatggtacggcccagaccgagtcaagtacttgggcccattctctggcgagcccccgtcctacctaaccggtgagttcccaggcgactacgggtgggacactgctgggctttccgcagacccagaaaccttcgccaagaaccgtgaactccaagtgatccactccaggtgggccatgctcg

SEQ ID NO: 14405 - DNA, 344 bp, Glycine max
  Clone ID: LIB3040-031-Q1-E1-G9
gagcgaaacagagagtgatttcagtgagtgatcggtgttcacttgatctcatcataatcgtcagcgtcaattgaagaagatgccgatcaggaacatcgccgtcggaaggcctgaagaggcgactcaccccgacacgttgaaggcggctttggctgagttcatctcaaccttcatcttcgtgttcgccggctcaagctccggcatcgcctacaacaagctcaccgacaacggcgctgccacccctgccggcctcatctccgcctccatcgcccatgcattcgccctcttcgtcgccgtctccgtcggcgccaacatctccggcgggcacgtcaaccccgccgtca

SEQ ID NO: 14406 - DNA, 346 bp, Glycine max
  Clone ID: LIB3040-031-Q1-E1-H1
tggggtgctctgctcgtgcctctagggttatcatttctccatttccattttctctctcacttttcaagaatcgtaagctatgggaaagtcttacccaactgtgagtgctgattatcagaaggccgttgagaaggcgaagaagaagctcagaggcttcatcgctgagaagagatgcgctcctcgaatgctccgtttggcatggcactctgctggaacctttgacaagggcacgaagaccggtggacccttcggaaccatcaagcaccctgccgaactggctcagatcgctaacaacggtcttgacatcgctgttacgcttttggagccactcaaagcggagttccct

SEQ ID NO: 14407 - DNA, 234 bp, Glycine max
  Clone ID: LIB3040-031-Q1-E1-H10
ggagggttacacgccgtcgtcactgtttttgtgtgtcacttcttcgtaggtgcaactgcaatggtgaagggacgccaaggggaacgtgtcaaagtctacgtgatgggtacaatccttggatacaacaggtctcagtcaaaccagtatccaaatacatccctgagtcaaattgagggtgtgaatgtcactgaagaaatagcatgggatgctgggcaaaaaatggcctatatctac

SEQ ID NO: 14408 - DNA, 379 bp, Glycine max
  Clone ID: LIB3040-031-Q1-E1-H11
atcaacatttgtctctcatctttcaatttcaatcaacggttatacccttttctatttgagcatcatcatgtccaccgcagcgcagcccaaggccaagaaaacggcgtcgtccaagaagcccctctcccatcctaccttcgccgcgatgatagcggaggcgatagcgagtctgaaggagagaaccggttcgagccaatacgcgataaccaaattcatcgaaggcaagcacaaggagttgcctccaacctacaagaagcttgttctcgttcatctcaagaagtctgttgctgctggcaagctcgttaaggtcaaaaactctttcaagctcgcaccgactaagtctgctcctgttaaagccgctgctgctcccaagaagccc

SEQ ID NO: 14409 - DNA, 282 bp, Glycine max
  Clone ID: LIB3040-031-Q1-E1-H2
ggtgtgtagtataagattcacttccttactcattttgtaatttcagtcagtcataatctttgtgaaaaataatgttcatcgagaattttaaggttgagtgtcctaaggtgaagtacagcgcaactgagattcagtccgtatacaactaccacatcaccgaccttgtttacgagaacacgaatgggacctatcagtggattgtcaaaccaaaatctgtcacgtccgaatttacaagcaacatccacgttcctatcttaggggtaatgcctgtgggttggggtg

SEQ ID NO: 14410 - DNA, 370 bp, Glycine max
  Clone ID: LIB3040-031-Q1-E1-H4
agccgagacgaagacgacagaaggggaaaagtagagagaattagcagggtgttattggtgggtgtagaaagtagcagaaaatggctgtgatcccgtgtcactgttaccgtaccgtcggatcagacaaaccctacctctccggtcagagtctccgccgtcgcgctcctttccccgccgtctctgtttcatttcgacgccgaatatcatgcgtcgcctcttctgccatcgctcacaaagttgggctgagagattttcttcacttagatgattttgataaggacactattctgaagatgctggaccgggcacttgaggtcaaggccttgctgaagtcaagggacaggtcgtttcgaccttttgaggggaagac

SEQ ID NO: 14411 - DNA, 366 bp, Glycine max
  Clone ID: LIB3040-031-Q1-E1-H6
gacacagaccaatattcattcatttagattcatcaaaagcttataacaacaattaaacatgagtgcagccagcagagcttggattgtggcatcaagcattggagcagtggaggcattgaaggatcaattgggggtgtgcaggtggaaccatgcattgaggtcactgcagcagcatgccaagagcaacattagatcctacactcaggccaaaaccttgtcttctgctacttctgctgctgtctccaataaggtcaagaggaccaaggaggagtccatgaggaaagtcatggacttgagctgttggggtcccaatacttcaaggttttagtgtgtggactattctaattgcattcatcattgtgctgc

SEQ ID NO: 14412 - DNA, 284 bp, Glycine max
  Clone ID: LIB3040-031-Q1-E1-H7
gacgttccattctcttcaaacgtaacgcagcatcgctattctcttcattccatggctttgcgcagccagcagaccgtggattacccgagtttcagactcgttatcgtctgcgatggtggcacaggaaagacaagctttgtggggaggcatcgcacggggagaattctgggaggagatatgagccgggcagcggtgtgggggtgcacccattggagtttttcagagactgtggaaagagtcgatgttactgccggggagcggctgggcaggagaagtttggtggg

SEQ ID NO: 14413 - DNA, 335 bp, Glycine max
  Clone ID: LIB3040-031-Q1-E1-H8
gacactcattccatttttacctttctctctcgctcgcatacgcaaataataaagaacaaggttttagccatggcatcgaagcggatcttgaatgaactcaaggatctctaaaaggatactcctacctcatgcatcgccggtcctgttgctgaagacatgtttcactggcaagcaacaattatgggtcctccagacagtccttatgctggaggtgttttcctagtcactattcatttcactccagattatccctttaagccacccaaggatgcattcaggacgaaggtatttcacccatatataaatagcaatggtagcatttgccttgacatatt

SEQ ID NO: 14414 - DNA, 296 bp, Glycine max
  Clone ID: LIB3040-031-Q1-E2-A10
ggttctagtgtgtgattgtttgttgttgtaactcgttcttcgtcttttgttgttctgtgtttgtgtttgttttttctctcacctgaaaatgtcttgctgcggtggtaactgtggttgcggaagctcctgcaagtgcggcaacggctgcagaggctgcaagatgtacccagacttgagctacactgagtcaaccaccaccgagaccttggtcatgggagtggcacctgttaaggctcaatttgaaggttcttaaattggttttcccgcttaaaaccaatggtggcaattttgaacaa

SEQ ID NO: 14415 - DNA, 282 bp, Glycine max
  Clone ID: LIB3040-031-Q1-E2-A2
gagcaacatggtgaagctggtggagagatttacttgccagaagcttacgttagaaccaagaggacgacctaatggagcatatcagttggaagaacttgtagctagcttcccaactggcttatctgagtgtggagaagctttatcatgccttatgagtaggagaacgagtactgtttgtggtgaatgtctatggttgaagaaatctgtccttagtcaacttgtgtgttttgttattcagttctcagcaataaactgctctggcaatctagtttcatgttcaca

SEQ ID NO: 14416 - DNA, 389 bp, Glycine max
  Clone ID: LIB3040-031-Q1-E2-A3
ggctggaatgctttacaaatcaccgaggactcgggaattttggatgatgttggaaatcaccatgtctattttgtgcactcttatcgtgccatgccttcagatgacaacaatgagtggatatcctccaactgtgactatggtgacaaatttatagcatctattagaagaggaaatgtgcatgcagttcaattccatccagagaagagtggacatgttggcctctctattttgggaagattcttgaatccgaagtcagacatggcaaagaagcctggggaaggcaaagcttcaaaacttgcaaaaagggtgattgcttgtctcgatgtgagaacaaatgataacggggaccttgttgtaaccaaaggagaccagtatgatgtaagagaaca

SEQ ID NO: 14417 - DNA, 405 bp, Glycine max
  Clone ID: LIB3040-031-Q1-E2-A6
gatctcattgctctgcattgcaacactcacacaccaatggcactcagacccatcgacaacgctcttccgacaacaaccccagagagacccaaaaaacaacctaaaatcgctgttgcaacccaaaaacaacaagatcgtgcttccgtcaacggcgaaaacgtagttccattgccatcatctgaggatgccactgttgactatgtctcctccgacaaccttaaacccttggcggaccccgaagttaagattcagagtttggtggaagatttggattcgaaaaattggatcaaggtttgtgaatcgttgaatgatgttaggcgcttctcgttactccactcctctcttctattcccaatcttgggtaaaattgtgttggtggtggcgaagacaatgaggaaccctcgt

SEQ ID NO: 14418 - DNA, 384 bp, Glycine max
  Clone ID: LIB3040-031-Q1-E2-A7
ggaagcatagagcggcaaatgcaacacaggaagagaagaaaggaaaagcagcagaaagtgacaaaatcccagtaaagagtgacagtgccagctccctcaagccaaagtcttgtgcttttcacatccccattttctcatttccctttctgcttcctctttcgccaaatgggtctcccataacacaatcttcagcttttttttttcctctttctttcttcttcgcttctcggtggggcttcaagtttcaccataggatgttttctaagttgatacatcctcatgaagggcaggaagacatgcagggtggctccaatcaggctcacctcggagacccttgtcttgttttaacctccgaatccaaacctcgtcttcgttggaccgctg

SEQ ID NO: 14419 - DNA, 393 bp, Glycine max
  Clone ID: LIB3040-031-Q1-E2-A8
gacttgcggctgcagcagagaagcactcatcattcttcgtttgtctaagatccgccttctctgaattgtaaaaatgtcgctcggagaaactgcttgttcatacgcagctctcatccttcatgaagatggaatcagtgtaactgccgacaagatcagcaccttgttggaaactgcaaaggttcaagtagatacctattggccaaccttatttgctaaacttgctgagaagaaaaatcttggcgatttgatagccaatgcagcaggcggtggtgcaccagttgctgttgcagctgcccctgttgctgcctcaggtggtggtggtgctgctgctgccgccccagctgctgaggagaaaaagaaggaggaacctgaagaagagagtgatgatgatat

SEQ ID NO: 14420 - DNA, 273 bp, Glycine max
  Clone ID: LIB3040-031-Q1-E2-A9
acgcgtccaacggctgaacacagaatggtacagctgccacaagaccacatacgggtacagctgccaaaagaccacaaaacggtactgctgctaaaatacgacatccaggagaagaatacagagttgggtttcccactaacgacatatgctatcaatgtgtaactttacatcaatcttatcggttaactggacatttacctcctttatactcgataagttttgctataactcgttttgtagtttcatgtttactgcttaatatctgtgtttaac

SEQ ID NO: 14421 - DNA, 392 bp, Glycine max
  Clone ID: LIB3040-031-Q1-E2-B1
gaccgcattagcactcgtctttggttctggtttatagatctctgtgaagtcgctttataacactcaacctaagatgcagaacgaggaaggacagatcaccgagctttacattcctaggaagtgctctgccacaaaccgattgattaccgctaaggaccatgcttcggttcaggttaacattgggcatgtggatgagaatggcgtctacaatggccatttctccacttttgctctctgcggcttcatacgtgctcagggtgatgctgacagtgccctagatcgcttgtggcagaagaagaaagttgaagttaagcaacagtagacacccatgatagtttgttactttgctaagtattaatttctacgcttgctagagatatttgagtactatg

SEQ ID NO: 14422 - DNA, 261 bp, Glycine max
  Clone ID: LIB3040-031-Q1-E2-B11
gataacgggacaataaaacacacatactcttttctgtttttatactaatctcatgtaggtgtgacagacaatgtcattcttggcttatatgagggtatcaataatgctcttctgaatcgaggctcttcacgcttccctcatgtggtttcccctcaaataattgtttcccaccaaaaaaagctcccatctcttacagcatcaacatccacacccacgcgcgtcccatattcccctccaccttcctccatctgcttcccctcc

SEQ ID NO: 14423 - DNA, 391 bp, Glycine max
  Clone ID: LIB3040-031-Q1-E2-B12
gacctaaaaattgtaccgatatggcttcacttgtgtgtctccttttttccttgcatttcatggttatcatgtcaggttccttaccagcaaatagtgaagtgtttacaaaagagtctcctatgtctctatccacaaaacccgtggaaagactcacccaactccacttttatttccataacaacaaaatgggggaacacccgactgctatgaaaattgttgagcctcctaaggcgtccatttctggttttgggactatttacatgatggatgaccctctaaccgaaggaccaagtccaacttcaaagcttgttggaagatgtcagggaatatatgctgaggcttcgcaacatgaacctgcgatactcatggtaacgaatttgttcttcactga

SEQ ID NO: 14424 - DNA, 384 bp, Glycine max
  Clone ID: LIB3040-031-Q1-E2-B3
cctacttgcagcaaatattctcaatatgatgtaaaagtcaagactatgcagaaaatgaatacatgtcctcacgacacagaagcacaaaaaggattgtatggtttctatcaggcatttacaagttcaatgatgtatccttatttatactacttgcagtatttatcatcaagcatgactcttacactaaattagatagatggaatagtcttatcatacttgaaatatataatatctttagtaaattcggtatctactaactatatgaatcaaaattatgcagattatcttaattcacggttcaatggcatccaactagtcagaaattgattccatagttttctagtagctactcatgaatccagtgatacaatcctaatatgcctt

SEQ ID NO: 14425 - DNA, 393 bp, Glycine max
  Clone ID: LIB3040-031-Q1-E2-B4
gcttcttatttgtaaccaagcaaacgctgccgaattcgttatcgctttgcactagcagctttgaaacccggttcatccgaagcccttcaccgaaccatgtcgatgagaaaggttagagagccaaaggaggaaaatgtgactctgggtccagctgttatagatggtgaacacgtttttggcgttgctcgcatccttgcctccttcaacgacaccttcatccatgtcactgatttgtctggcagggaaacccttgtccgaatcactggtggtatgaaagttaaagctgacagagatgaatcatctccttatgctgctatgcttgcagctcaagatgttgctgccagatgcaaggaactgggcataactgctcttcatatcaagctccgtgctact

SEQ ID NO: 14426 - DNA, 402 bp, Glycine max
  Clone ID: LIB3040-031-Q1-E2-B5
gatcatcaataggtgttttcatttgggattcaaactcaccatggtggacgccttcaaactttgcatcttccttcttgcgtcgatctgtgctttcctagtcttttctaatccagtgctgtgtagtgataaggaggacagtgtattcaagggaatcaacagctacaggcaaacacggagcctggtacccctgagccaagtttcgaaggcaacatgtttggctgatgaagttgcagaagaaatagagaagatgccctgtgaaaacgtgaaccaatactacccttcatctgttcctggtagtgggaacctcaaaatcccaaacttgcagaagcacataaataaatgtgacattaacttcaacaccaccactgatggggtcattctccccgtttgtgtctccaagct

SEQ ID NO: 14427 - DNA, 232 bp, Glycine max
  Clone ID: LIB3040-031-Q1-E2-B9
ccagacggctacagaagggtaacgctgagagcatacgacagtgtgggctacttgcagcacatattctcaatatgatgtgcaagtcaagactatgcacgcactgcataggggtcctcatcacacagacatacacatgagattgtatggtttccaacatgcagttacaagttcactgatgtcaccttacttacactacgtgcactatttatcatcaaccatgactcttacacca

SEQ ID NO: 14428 - DNA, 445 bp, Glycine max
  Clone ID: LIB3040-031-Q1-E2-C1
ggtcgagcacgcgtccacgacagaagggggatcatagagtaagtgagtgagagaaggagattctgatttgatctctcagatctgagcttaccgtcgccggaatccaactcaacctgggtcggattcttgggtatcatcgcatcgccattcgttttagcctctcaataagagattttagttcgcttcaaattcgaggtttgatttgaagttgaaagttggaatagcttaactgttgtgtaaaacaaccaacacacacgagcatgggaagccaagacaacaacgtagaattgtcatccaattcatttctagcttacaaatctgctaaggtgtttgttgctggtcaccggggtcttgttggctcggccattggtcgcaagctcacccaacttgggttcactaatctagtcttgcgctcccatgccgagcttgatctcactcgacaatc

SEQ ID NO: 14429 - DNA, 376 bp, Glycine max
  Clone ID: LIB3040-031-Q1-E2-C10
gactcactcatacaatagagaccagcttttgcttctttgtgaacatggagatgaggaaatcatgtggcttcttcttcttgctcctcctccttgtctttgcttcccaggtggtggtgcagacggagggaagagtgtgtgagtcacaaagccacgggttccatggtttgtgtaatagagaccacaactgtgctttggtctgcaggaacgaaggtttctccggtggcaggtgcaaaggcttccgccgccgctgcttttgcaccaggatttgttgagatctcatcaaacactactcttgccatgcaaattaataaatcatagctaggccaaataaattgcatctactctttatccatttgggagctagctaccacaacca

SEQ ID NO: 14430 - DNA, 261 bp, Glycine max
  Clone ID: LIB3040-031-Q1-E2-C11
cccacccgtccgcccacgcaaacataccgctgctatatactacagaacgggatccacatcctccacaccacatctccactcttagctgccattggcttttcttcttccatttctcttcctttctaaccttgtttctattacccattctcgtattctgtcctaatcactcttgctccttccaaactttcctccttttccgagttttctcccaaacccacttttggggattctcttaaaataccaacttgctccgtttccctc

SEQ ID NO: 14431 - DNA, 379 bp, Glycine max
  Clone ID: LIB3040-031-Q1-E2-C12
ggcgatccaaatccaaaaaaagaagacttcaaaaaatcggaagggtacttttgtaattatatggagactcgtgagatcagaatatcagatcgaatttaaacgggtcatattcgcattttcatttcattttgaattgaaaccgcggagagtttgctgctacatcgatcatcatcacctcatggacggacacgatccacaagacccaaagcagagccctgctgacatgactgcctttgtgcaaaatcttcttcagcagatgcaaaataggttccagacaatgtccgactccattgttacaaagattgatgatatgggaagtcgcataaatgagttggaacaaagcatcaatgacctgagagcagagatgggagtggagtcc

SEQ ID NO: 14432 - DNA, 297 bp, Glycine max
  Clone ID: LIB3040-031-Q1-E2-C4
gcactgcgttatcgcacgaccagcttcatgaccaactgctcgcgcatcctattcactcttgcagctgttaacattccgtaaccttgaaatttccagatcgagaaccgtatctaggcgatttggtcagtcgcatgattcgaaaattatctttgaccgacaagttccacttctgttaccttgtcacggcctgaacagattggattctcgatatcacattgtaaccccatccatctggattaagactccgctgaccatcaatgatgtcgtcataggcttcaggtaaattatctcatgtat

SEQ ID NO: 14433 - DNA, 354 bp, Glycine max
  Clone ID: LIB3040-031-Q1-E2-C5
ggattccatcaaatctcttcagatccgccaggtcctcacccaggctgtgagcctaggcatgattgttacgtctgcactgataatatggaaggcattgatgtgcgttactggcagtgaatctcccgttgttgttgttctttctggaagcatggaacccggattcaagcggggagacatcttgttcttgttgtgtttaatgttgatggacgtgagattccaattgttcatcgcgtaattaacgtacatgaaatggaagatactggggaggttgatgttctcacataaggagacaacaattatggggatgacaggctactgtacgctcactggcaactttggctgcaaaggcaccac

SEQ ID NO: 14434 - DNA, 297 bp, Glycine max
  Clone ID: LIB3040-031-Q1-E2-C7
gattacattatcaaacaacccattccaattctcgtgaactccattccattgcttctcttcttcacaaattccattcctagagagagagagaagcaacaacatcataatcggaatttgattgaattcgatttgggtgatgagcgcgtgaaaaaagaagaagaggaagaagatggcagggaagaaaggggtggcggcagaagacgcaataagggccattgggttaaggttacaatctcacaaacgatctcaagctcaaattctgcaagaaccactccagattgatcgctatcgacgatg

SEQ ID NO: 14435 - DNA, 406 bp, Glycine max
  Clone ID: LIB3040-031-Q1-E2-C8
gctagctagggtttctgagtttatgtggttgcgcctctgcctgtaagagtgaaaaaaccttctcttttccttctctcaagtctcaagagatttcatcatggctccaaagaaggacaaggctccaccaccttcctccaagcccgccaaatctggcggtggcaagcagaagaagaagaagtggagcaagggaaagcaaagggagaaggtgaataacatggtgctgtttgatcagggcacctatgataagctcctttctgaagctcccaaattcaagctcatcactccttccattctttctgatcgtttgaggattaatggatcacttgcaaggaaggctataagagaattgatggctaagggttcaatcaggatggtgtctgcccatgcaagccagcaaatttacacc

SEQ ID NO: 14436 - DNA, 379 bp, Glycine max
  Clone ID: LIB3040-031-Q1-E2-D10
gatggaatggttagagaaaagagaggcccatatagtgatccacagcatccttacttttatgaagaagaggatgtgtggatggcacctggcttcattaaccagttttatgaagtccctgattactggaaagtatatgtgcatgaagttgatcaagaaagagaaatgtggttaaactctttttataaagctcctcttaggttacccatgccagctgagctagagcactggtggtcaaaagaggagaatcataagattcctgaatttgtccttattaacaaggaaccggagcctgatcctgaagatccttcaaagcttatatatactgaggatcctctcatcctccatacaccaactggaaatattatcaattatgtcgagg

SEQ ID NO: 14437 - DNA, 376 bp, Glycine max
  Clone ID: LIB3040-031-Q1-E2-D12
gggtgaaaaaacaatgtctcactgtgccgcaaggtgtgccacaaggagtgccacgaggcttcttaacctaacgcgcgctctctccacggaggcgcgtgggcaaaagatcgagcgcatcgccacggagcttctcgacctcaacaggttcgagaggcacgatttcacggtcctctggcggctcaagatgggtctgcaccgctacggcgctcctgtggctggcatgacgatgccgtccgtcggggcggctgcccgggctgaggccggtgctgccgcagtcgcggagaagatggcatttgacttgaagttggagaagtatgatgctgctgccaagatcaagatcatcaaggaagtgaggtctttcaccgatttggggttg

SEQ ID NO: 14438 - DNA, 402 bp, Glycine max
  Clone ID: LIB3040-031-Q1-E2-D2
gacacaaactttattacagttgttgtattgtaattaagcaagaatattaggcaatggagtcttctagaacttcaactactcttgctcttttttaaccatcaatttgcttttctttgtcatggcaagtggctgctacacttgcacacagcctaagccaaaccctatcccattcccttaccctaaccctagtcctgccgcgaagagctgccccagggacgcacttaagctcggagtgtgcgcaaacgtgcttaatggaccaattggtgctattgtagggtcaccaccggaccacccatgttgctcagtgctagaagggcttcttgatcttgaagttgcggtttgcctctgcactgccatcaaagccaacattcttggcattaaccttaacatccccatttcgct

SEQ ID NO: 14439 - DNA, 357 bp, Glycine max
  Clone ID: LIB3040-031-Q1-E2-D3
ggacaagccaatcctttgtgtaggtgctcaaccctagtaagccgcaatggtgaagtactcaagggagcctgacaatccaactaagtcctgcaaggctagaggcgccgaccttacggttcattttaagaacacaagggaaactgcctttgcaatcaggaagttgcccttggtcaacgctaaaaggtacttggaagatgttcttgcccacaagcaagcaattccattcagacgtttttgtccacgtgttggcaggacagcccaggctaagaatatacactctaatggccaaagacggtggcctgtcaagtcaccaaaattcattcttgatttgctcaaaaatgctgagagcaatgctga

SEQ ID NO: 14440 - DNA, 379 bp, Glycine max
  Clone ID: LIB3040-031-Q1-E2-D4
ggaaatgaaaaaagtgacatgaagtgacgagaatgcgggttgtttgttgttccaattcaagcgtgagtgctttccctagttgtcttagattccctccactgatcgcaatttcaacaacaccctcttcgatccgcgttctaaattctccacccctccgttccactgcttcgtcgcaacacgttacaataatggcttctacgaattctcaacaagacacgcgcttaacgagaatcgcctctgcaatccgagtcatccccgactttcctaagccaggaattttgtttcaggacataatcacgctgcttcttgatacaaatgctttcacagacaccattgacttgtttgttgaaacgtacatagatcacaacatcaatgttgt

SEQ ID NO: 14441 - DNA, 352 bp, Glycine max
  Clone ID: LIB3040-031-Q1-E2-D5
ggccaaaccaactccccaaaggggaccttagagagcaatcttctaccttctctctcctctctctctctctctctcttttgcttttattattctctttcaatggcttcatcctcttccagaacaaattcaattgaccgtgtctaactctctctcacactccaccagattctgctcatacaccacttccaaaactcctttctcttctccttcatcggccttcccttcctccacaagctctggcttttcgtcctcatccttcttcaaccagccacgttagcatcacgctcacaggcatcaccgtgccggatcgcccacccgtgtcaatctatgcagccccgcccctctctcctct

SEQ ID NO: 14442 - DNA, 393 bp, Glycine max
  Clone ID: LIB3040-031-Q1-E2-D6
gactgcaactttgcacactgtgaggcatcaaattccaattaaggttacgcttaaaataaccaatcaacatgggagtcctcatctttgtcgcccgcacatccggcatcaaaaggcgcgccaagcaacattccggtcacatcgaagactccgccgagtccaccttccatctccaacggaagctcgtacaagccgctctcgccgttaaatcctccggtggacttcactcctctttctcacccgtgtcccctacctccacatgtgttcgacgtgacatcgggatccttcgtattcgatggaggtggtagtagtgctatagcaactgcacttgcaggtggcgcagccgcatctgacgatgcaccagctgctgacaaaaatgaacaaaacgtggatgaa

SEQ ID NO: 14443 - DNA, 409 bp, Glycine max
  Clone ID: LIB3040-031-Q1-E2-D7
gatacctaaaaattgtaccgatatggcttcacttgtgtgtctccttttttccttgcatttcatggttatcatgtcaggttccttaccagcaaatagtgaagtgtttacaaaagagtctcctatgtctctatccacaaaacccgtggaaagactcacccaactccacttttatttccataacaacaaaatgggggaacacccgactgctatgaaaattgttgagcctcctaaggcgtccatttctggttttgggactatttacatgatggatgaccctctaaccgaaggaccaagtccaacttcaaagcttgttggaagatgtcagggaatatatgctgaggcttcgcaacatgaacctgcgatactcatggtaacgaatttgttcttcactgagggcatttacaatggg

SEQ ID NO: 14444 - DNA, 395 bp, Glycine max
  Clone ID: LIB3040-031-Q1-E2-D8
cacccgagaatgtcccaatttataaaaatgaaaataaaagcttgaataatacgaaacacattttatttcttcataaaattcaagtcaaacaatcatgacctaatttatctctaaaatagaacaaagacgcccctataccaagagggtagtggaccattcctacatctaagagggtccttcaagaccaccattattattattcctaaaagctaaaagtaacatcaacaacaactgaaaatttctaacagatactaaaatctagtacttcctcctctcattggagaccgttgtttgacaaagtgcatcgatcgcaagcctgttctctgggactctgcatccagtaggtccaagcattttctcattaacatgaatagaacattgctgcttgccaagac

SEQ ID NO: 14445 - DNA, 405 bp, Glycine max
  Clone ID: LIB3040-031-Q1-E2-E1
gacaccgcaaactctctctgtaaagtgcaaagcctctattttttcttgtgaatttgaaggacgatgagttccacagaggtcgcagccacaacgaagaagggtggaagagggaaacccaagaccacaaagtccgtttcccgttcctccaaagccggccttcagttccccgtcggccgcgtcgctcgctacctcaaggccggtcgctatgcccagcgcgttggttccggttcccctgtttacctatctgcggttctcgaataccttgccgctgaggttttggagcttgccggcaacgctgcgagggacaacaagaagacgaggatcgttcctaggcacattcaacttgcggtgaggaacgatgaggagttgagcaagctgatggggtctgtgaccattgccaatggt

SEQ ID NO: 14446 - DNA, 352 bp, Glycine max
  Clone ID: LIB3040-031-Q1-E2-E10
ggatgcagatgcagcctatcatggcagcctactaccccaacaacggcaccactgatcacattcaacagtacctggatgagaacaagtccttgatcctgaagattgttgaaagccagaattctggcaagctgagcgagtgtgcagagaaccaatcaaggctgcagagaaatctcatgtacctagctgcaatagctgattctcaaccccaaccatctccaatgcctggtcagtatccttctagtggacttatgcagcagggagcacactacatgcaggctcagcaggctcagcagatgtcacaacaacagctaatggcttcgcgctcctcactcttgtactcccaacagccttt

SEQ ID NO: 14447 - DNA, 391 bp, Glycine max
  Clone ID: LIB3040-031-Q1-E2-E12
gacctgatgcagatgcagcctatcatggcagcctactaccccaacaacgtcaccactgatcacattcaacagtacctggatgagaacaagtccttgatcctgaagattgttgaaagccagaattctggcaagctgagcgagtgtgcagagaaccaatcaaggctgcagagaaatctcatgtacctagctgcaatagctgattctcaaccccaaccatctccaatgcctggtcagtatccttctagtggacttatgcagcagggagcacactacatgcaggctcagcaggctcagcagatgtcacaacaacagctaatggcttcgcgctcctcactcttgtactcccaacagcctttctcagtgcttcaacagcagcaaggcatgcacagcc

SEQ ID NO: 14448 - DNA, 388 bp, Glycine max
  Clone ID: LIB3040-031-Q1-E2-E2
gaggtcgcgagcgagcatcttcgagttgcatttcgcagtgtgtgtgagaagaagagaaaaatggagaaaatgatgcgactgagaccactgttccgatcactgagttgcagatcttatcatgccttcccattcatcaaccatgtcgttcttcgaccttctcttatctctcgctctcccaatcctcttccttctccttcacactcagaatgcatgtctcctttctcgatgggtttagggagcatgcgattctatagtgaagatttgacccacgtgcccaatattaaggaccctgcactttacaatgctttcaaggatttgatggcagtaagttggagtgagcttccggatcctgttgtatctgatgttaagaatgtgttgtctaaaaaca

SEQ ID NO: 14449 - DNA, 401 bp, Glycine max
  Clone ID: LIB3040-031-Q1-E2-E3
gctctaccgcattagcactcgtctttggttctggtttatagatctctgtgaagtcgctttataacactcaacctaagatgcagaacgaggaaggacagatcaccgagctttacattcctaggaagtgctctgccacaaaccgattgattaccgccaaggaccatgcttcggttcaggttaacattgggcatgtggatgagaatggcgtctacaatggccatttctccacttttgctctctgcggcttcatacgtgctcagggtgatgctgacagtgccctagatcgcttgtggcagaagaagaaagttgaagttaagcaacagtagacacccatgatagtttgttactttgctatgtattaatttctacgcttgctagagatattttgagtacatgattgt

SEQ ID NO: 14450 - DNA, 63 bp, Glycine max
  Clone ID: LIB3040-031-Q1-E2-E4
gaataatatattttacgatagttcttgatcagatattcatgtccgtgatagctctttttgccc

SEQ ID NO: 14451 - DNA, 407 bp, Glycine max
  Clone ID: LIB3040-031-Q1-E2-E5
gaatcaaaaccctccaaggtttgatctcaaaataaacaatggaaaactcttcaccccttcctctttctaaacacaacagagatctccttttatctgctttataactcccatctggtcatccttcgcaaaaagaatttcagaatgagaatgtgtcaccactcttttgccttcaccatctcaatgtccttttctaattatctttatcttgctccttagaagaagaacctcacactacagagctcaagcaccccacccccaagtggtcaaaatgtcaactatgccaatgtatcaacagcaacaagaacaacctcctccgatgagtgtgacacaacattcaccacatgagtccattggtcccgtgattggggttctggtcgtggttattgtgttaggcgtaattgctgtta

SEQ ID NO: 14452 - DNA, 378 bp, Glycine max
  Clone ID: LIB3040-031-Q1-E2-E6
gagacaagaatcttttgctgttttttctttcttttctcttcttctatattgcactattgcttatgcaaaacaattttacatatttcaggacggaaaagagagcgagtttcccttgatagatgagactagtgcaacacaacaacaaaacagtatcatcatggaagtgcatcatcttcaaggggttgttgttgataaaagcactgatttcttcccagttgaacaccctatggagccaccagatgaagatcgtcccgtgaaatgcccaatgcccgagtcttcggttatcaatgatgaaaggatgcatgaaaagagatttgcagaaagctcaaagaagagagtggagacaacccgggccgtggtgaatggagaatgaacacc

SEQ ID NO: 14453 - DNA, 376 bp, Glycine max
  Clone ID: LIB3040-031-Q1-E2-E7
ggaggtaaaagtggaggagcgagttctggaggaagaggtcaaggtagtgccccgattttacgaggtgttcgtttctgaaatttgtggcacagcaagtgagcgatggggagagcttcaagggataagagggatatctattaccggaaagcaaaagaagaaggttggcgagctcgaagtgcgtttaaactccttcagatacacgaggaattcaacctttttgatggagtgaagcgtgttgtagatttatgtgctgccccaggtagctggagtcaggttttgagtcgtaaattgtatctcccagccaagcttgcacctgatgcaaaggatgaaaatcttcctcttattgtagctattgatttgcaaccaatggctccaa

SEQ ID NO: 14454 - DNA, 151 bp, Glycine max
  Clone ID: LIB3040-031-Q1-E2-F1
atagtgcactacctctatactcacgtgtgagattgcaggccgttcagttgcaccaatgtctcaaccacatgcagcaaagcttaaatagggaaacccaagaccaccaagtccgtatcccgttccaccagcacctgacttcaattacacatct

SEQ ID NO: 14455 - DNA, 389 bp, Glycine max
  Clone ID: LIB3040-031-Q1-E2-F10
gaactcaaactgcttcattgcataattgcagataagatcaacccttctaccttcagattcgcgggaagatggcatcacttcatgcgaatgtgacatcagttgtttacaacagtggcaaccgtgtttctcaatcgaaatttgcaagctcttccttcttgtctgggttcgatgttgttggtcgtgcttcaagtgcttggaagaaggaacttgtcccatcttccatttccttggtgcctagagccaccctaacatttgatcccccaactaccaattcagacataaccaagcaggagaagcacactcttgaccctgcttctccagattttcttcctcttccttcatttgaacagtgctttccaaagagcaccaaagaacacagggaagtcact

SEQ ID NO: 14456 - DNA, 380 bp, Glycine max
  Clone ID: LIB3040-031-Q1-E2-F12
ggaggaggaagaagagcgagatggcgtcagtggtgaagaacgtactcaaatcggtcagagaaaagggtttcggcgctttcctcagggagctcaaggatgaaggctacctgagatgccttccggatggaaatctcttgcaaaccaagatccacaatattggggcaacacttgttggtgttgataaatttggtaacaagtattatgagaagcttggagacacacagtttggaaggcacaggtgggttgaatatgcagagaagactagatataatgcctctcaggttccagctgaatggcatggttggctccacttcatcactgatcacacaggagatgagcttcttttactgaaaccgaaaaggtatggtattgaacacaaa

SEQ ID NO: 14457 - DNA, 364 bp, Glycine max; identical to SEQ ID NO: 12808
  Clone ID: LIB3040-031-Q1-E2-F2

SEQ ID NO: 14458 - DNA, 404 bp, Glycine max
  Clone ID: LIB3040-031-Q1-E2-F3
gggcaagtgataagagtaatagaacaaccactcaccccctctccgatctaatggccaccgtaatcgacggcaaagccgttgcgcaaatcatccgatctgaaatcgccgacgaggtgcgcctgctctctcaaaaatacggcaaggttccgggactagcagttgtgatagtagggaacagaaaggattcacaaagctacgtgggaatgaagagaaaggcatgcgccgaattgggaatcaaatccttcgatgtggaccttcccgaacaagtctcccaagctgaactaataaaacaagttcacgagttgaatgttaaccctgatgtacatggtatattggttcagcttccgttgcccaagcacataaatgaagagaaagttctgactgaaatcagccttgagaaagat

SEQ ID NO: 14459 - DNA, 282 bp, Glycine max
  Clone ID: LIB3040-031-Q1-E2-F4
caaccacgaagcaccggatgataacctaagatttgccagaggtagtgattgttatgagaatcgcctttagaggaatttcccacctcaccgtgtgtaagaaacaccaaaataacaaaattgagagtggtataaataggacgaaaatgcctaagtataatctcttttgggattttacattatacttatatctatttcacacaccattcgtagctccagcaagtgggaccaacaaataagcattttgatggctgttaatttttaacaagtagcacacatattatc

SEQ ID NO: 14460 - DNA, 407 bp, Glycine max
  Clone ID: LIB3040-031-Q1-E2-F5
gacggcactcgttttcgttctcgttctggtttatagatctttgcgaaggaggtttacggcgctcaaccaaagatgcagaacgaggaaggacagatcactgagctttacattcctaggaagtgctccgccacaaacagattgattaccgctaaggaccatgcttcggttcagatcaacattgggcatgtggatgagaatggcgtctacaatggccatttctccacttttgccctctgcggattcatccgtgctcagggtgatgctgacagtgctctagaccgcttgtggcagaagaagaaagttgaagttaagcaacagtagacacccatgatagtttgttacttcgttatgtattaatttctactcttgctagagatatttgagtactatgattgtccttttgagca

SEQ ID NO: 14461 - DNA, 393 bp, Glycine max
  Clone ID: LIB3040-031-Q1-E2-F6
gacaacacaacgcaacacaacgcgcactctctcttttctctcttaacacaaaaaccctatcgttcttcgcggtttcgccgattctcgccatgccgaaagccaaatccgacgccaaagccgccgatagccggttgaagcgcaagggcgctggtgctggaaggaagcaatcgaagaaagctgctaaggatcctaacaagccaaagagacctccaagcgctttcttcgttttcatgtccgagttcagagagcagtttaagaaggagcatcctaacaacaaatccgtcgctgttgtcggtaaagctggtggtgacaaatggaaatcgctgtctgatgctgaaaaggcccccttcgttgccacggccgaaaagaagaaacaagagtatgagaaaacta

SEQ ID NO: 14462 - DNA, 403 bp, Glycine max
  Clone ID: LIB3040-031-Q1-E2-F7
gaagaagaatgatgatgacctctggtgaagctgtcaagtacaagagttccttggacgcattcacacagatcctcaagaatgagggcgccaagtccttgttcaagggtgccggtgctaacatcctccgtgccgttgctggtgctggtgtgcttgctggttacgacaagttgcaggttcttgtgttcggcaagaagtatggttctggtggtgcttaatttcagtgctgagtcagtgttattattattgttttttagatggcgatgataaaaaccgttctgagtttcaagagttttttagactaatggctgccgcaaattttgtttaataaattttctagatgggatattgtcccaaaaaccgtttttaaatttcatcatgatggaaattttacatttgagaatga

SEQ ID NO: 14463 - DNA, 382 bp, Glycine max
  Clone ID: LIB3040-031-Q1-E2-G10
ggtaatccttacgctctctcactcacaaacgcacactgaattcaaaaacatcgaaagagagaggcatggccgagcaaaccttcgggatgatcaagccagatggcgttcaaagaggccttattggcgagattattagcagatttgagaggaagggtttttacttgaaagggttgaaactcgttactgtggaccgtccttttgctgagaagcactatgctgatttgtctgcaaagcctttctttagtggtttggtggattacattgtctctggccctgttgttgccatgatctgggaaggtaagaatgttgttacaaactggcgaaagattatcggagccacagacccagctcaatctgagcctggaactattcctggtgactt

SEQ ID NO: 14464 - DNA, 389 bp, Glycine max
  Clone ID: LIB3040-031-Q1-E2-G12
gccgcagcaagtgccattttattttgccctacctcctcgattcgagggtttcaacaatggtgctgttccttccctacgaatccggttcaggctacagcctgttcgacgttcacggcgtcgatgaaatcggacagaataccgaatcggttcggaactccgtttcagacctcatcaagttcggcaaagtcgttaagcttcggtccttcaagtctttcacttccgctctcgatgctctcaaacagtgcaacgccgtctccgaaggcatattaactgatgagctgaggactgtcgtggagagcaacttgcctaaagtgaatgaaggtaagaagtctaagttcagtttacgtgtgtccgatcctaagattggttcccagatatctgaagtgact

SEQ ID NO: 14465 - DNA, 275 bp, Glycine max
  Clone ID: LIB3040-031-Q1-E2-G2
gacagcaaaacaattttcaaactcaattaccattccataacctaaatctcctctttgtttccgagtcagagagcaatggcacgtaccaagcaaaccgctcgcaagtccaccggcggaaaggcgccgaggaagcaattggcgactaaagccgctcgcaagtcagctccggccaccggcggagtgaagaagccccaccggctcatggcccgaacggtggctctgaaggagattataaagtaccagaagagcaatgaacttctgatccgaaaactccc

SEQ ID NO: 14466 - DNA, 378 bp, Glycine max
  unsure (1)..(378): unsure at all n locations
  Clone ID: LIB3040-031-Q1-E2-G4
ggccgttttcttcttcatcatagtcgtggccgtgtcgcagcanaaccaaaccacatattaacttgtttgctctaagtcatggctctgatcttgcacgcaaccaaagcaaacaagaatgctttcaagactctgattgcggcagagtacagtggcgtccaagtggaattggcccctaatttcgagatgggtgtctctaatagaactcctgaattccttaaaatgaatcccataggaaaggttcctgtcttggaaacgcccgatggtccagtctttgagagcaatgccattgctcgttacgttgctcgactcaagggtgacaacgctttgttctcatcttctgccattgataatgcccacattgaccagtggattgacttt

SEQ ID NO: 14467 - DNA, 402 bp, Glycine max
  Clone ID: LIB3040-031-Q1-E2-G6
gatcatataaaccacctcggattttgcttcctctgctgcgttttaacgcccatcacgcgtttctttgcttatacactaactaagatttcaaaccccccgcggccaactaactaagatctggttttgttctgattgattcgtgcattggactgtgaaacgcacgccaaaatgtggtggatgatgaacgagactggaggcaattactgttctaagaagagcgatgatttgtgcagcaatgtttgtgatcaggaatcaagtcaagtattgggcatgtcacgaattcgctgtattctgcgtggtttggatgtgaaaacctatatattcatgtttgctgttatcccaatgtgcgtctttggattctatatacacgggcagaagatctcctactttctgcgaccgctg

SEQ ID NO: 14468 - DNA, 404 bp, Glycine max
  Clone ID: LIB3040-031-Q1-E2-G7
gacacacaacacagtttccactttccactttgactgtaccaaagtcacgcttgctccctctctcaacggcttccctcttcttcctctctctctctctctctctggacacacacatccttggtgttgaacgggtttttgggtgaaggagtagtgttggtggcttcatcttttagtgaataaggatacagcagcatgcggtggtggcttactctctctgttgatgtataccgcaaagtgatttccttgaatctgtattgcaaagttattctgtaactcttaagtcccttttgatcaaaaaaccttttacaatcatctcactcatctcttccttgccttgaatcaatgggatccaatttttttgttgttgttccttgttatgtccgtcagatcagctgaagaaaccc

SEQ ID NO: 14469 - DNA, 394 bp, Glycine max
  Clone ID: LIB3040-031-Q1-E2-G8
actcaccacttcaaaacactcataacacaaagcacaaagcaaagctcatccttgagttaaaaaatggcagcagcttcttccatggctctctcatccccatccttggctggcaaggccgtgaagctgggcccatcagccccagaagtgggaagggtgagcatgaggaagaccgtcaccaagcaggtctcctcaggaagcccatggtacggcccagaccgagtcaagtacttgggcccattctctggcgagcccccgtcctacctaaccggtgagttcccaggcgactacggctgggacactgctgggctttccgcagacccagaaaccttcgccaagaaccgtgaactcgaagtgatccactccaggtgggccatgctcggagccttgggctgcg

SEQ ID NO: 14470 - DNA, 283 bp, Glycine max
  Clone ID: LIB3040-031-Q1-E2-G9
aaatgaggccgttatcatcgtcatcatacacgtagtcatggcccatcagaatcacgccacatctggccatgtgttcgcccactcaagcggctgggggggcacacaacccaggtcatcagcagttcgatcaacagtcaggtcgcaggccaccatagtatcgaccgtgtccgctgcgaacacctcttcaacatgcggcacacaaccccgacgcctgcatgcgtggccgatgtgaaccttgaacttctcccgctcgtgcaaggccacgaatgtccagtcggcggta

SEQ ID NO: 14471 - DNA, 392 bp, Glycine max
  Clone ID: LIB3040-031-Q1-E2-H1
tggggtgctctgctcgtgcctctagggttatcatttctccatttccattttctctctcacttttcaagaatcgtaagctatgggaaagtcttacccaactgtgagtgctgattaccagaaggccgttgagaaggcgaacaagaagctcagaggcttcatcgctgagaagagatgcgctcctctaatgctccgtttggcatggcactctgctggaacctttgacaagggcacgaagaccggtggacccttcggaaccatcaagcaccctgccgaactggctcacagcgctaacaacggtcttgacatcgctgttaggcttttggaaccactcaaggcggagttccctattctgagctacgccgatttctaccagttggctggcgttgttgccg

SEQ ID NO: 14472 - DNA, 390 bp, Glycine max
  Clone ID: LIB3040-031-Q1-E2-H10
ggagggttacacgccgtcgtcactgtttttgtgtgtcgcttcttcgtaagtgcagctgcaatggtgaagggacgccaaggagagggtgtcagactctacgtgaggggtacaatccttggatacaaaaggtccaagtcaaaccagtatccaaatacatccctgatccaaattgagggtgtgaatgccaaagaagaagtagcatggtatgctggcaagaaaatggcctatatctacaaggctaaggtgaagaagaatggaagccattaccgctgcatatgtggcaaggttacaaggcctcatggtaacagtggtattgtccgtgcaaaattcaagtcgaaacttccacccaaatcaatgggagcccgactaagagtattcatgtatccaagc

SEQ ID NO: 14473 - DNA, 272 bp, Glycine max
  Clone ID: LIB3040-031-Q1-E2-H11
ccttgggtaactcaccccgatacagacaactacctccacacccgtagtaactgtggtctgatactgacctcccgcgcgtcaacttaacttggtgaagtcacgggggcctattggtcgccgtatgcgttcagggaagcgttccatcgaaccgaaccgtacttacacgcgtatcttgccggggcccatgatcgtcctcgctgaggacgtccgaaatgcacacgactacggcgacaacggtgaccaccccaaatatgtcccttgagatatcatca

SEQ ID NO: 14474 - DNA, 392 bp, Glycine max
  Clone ID: LIB3040-031-Q1-E2-H2
ggtgtgtagtataggattctcttctttattccttttgtaatttcattcattcttaatctttgtgaaaaataatgttcatcgagaattttaaggttgagtgtcctaatgtgaagtacaccgagactgagattcagtccgtgtacaactacgaaaccaccgaacttgttcacgagaacaggaatggcacctatcagtggattgtcaaacccaaatctgtcaaatacgaatttaaaaccaacatccatgttcctaaattaagggtaatgcttgtgggttggggtggaaacaacggctcaaccctcaccggtggtgttattgctaaccgagagggcatttcatgggctacaaaggacaagatttaacaagccaattaatttggctccctcaaccaa

SEQ ID NO: 14475 - DNA, 405 bp, Glycine max
  Clone ID: LIB3040-031-Q1-E2-H3
ggggtttcgtttcgaaagcagcaccgcacgtgttctgctccgccgcgattgcaatcgtttccactcccgccgctgatgggtttctcaaaggaacagcttcttgcgcggttaaaggagcttcaggttccattttcccagtatgagcatcctgttgttttgaccgtcgacgctcaggctcaatgtgttggacatttggggggtggcctcagcaagaatttgtttctcaaggacaagaaaagcacgttgtatattgtttctgctttagctggtaccaaagtagatctcaaagtgttgtctcagcggcttggtttgggaaaaggtggtctcagaatggcacctgatgatgctttatgtgaagtacttcacgtacccttgggttgtgtcactccatttgcacctgtgaat

SEQ ID NO: 14476 - DNA, 282 bp, Glycine max
  Clone ID: LIB3040-031-Q1-E2-H4
aaaataacaaggtatgggaaacagcctattattcatacctttctctcgcgctcatacattgaaattgtaacagtcaagggtgtatccaacagaccttagcctgtgggtcaaagcattggaggattggatgcattgcacgatgaatcggtggtattcaggtggaaacatgcattgatgtcactgtaggagcatgccaagagcaatattagatcctacactcatgccaaaaccttgtcttctgctacgtctgctgctgtctccaattaaccctttaagccaccc

SEQ ID NO: 14477 - DNA, 349 bp, Glycine max
  Clone ID: LIB3040-031-Q1-E2-H5
ggtgcaacatgcattgcattctagcaaagcaagtggaccttgccagctcaaggaaattttaccagacaataaatgagtgagtattcagaaaccaaaaaccaatagcagtacatttccgatttccagacagaggaactactcagcttagcttgagtattttcaagaggggatcaaagggaagaagaagggaaggactcaaacttgcacacgcaacctttggttcctttcccaacactcaccatggtggcagattctaagtccaattccgacctctccttcggaaaaatctttgccagcagtgctttctctgcatgtttcgctgaggtgtgtactattcctttggatactg

SEQ ID NO: 14478 - DNA, 376 bp, Glycine max
  unsure (1)..(376): unsure at all n locations
  Clone ID: LIB3040-031-Q1-E2-H6
gacacagaccaatattcattcatttagattcatcaaaagcttataacaacaattaaacatgagtgcagccagcagagcttggattgtggcatcaagcattggagcagtggaggcattgaaggatcaattgggggtgtgcaggtggaaccatgcattgaggtcactgcagcagcatgccaagagcaacattagatcctacactcaggccaaaaccttgtcttctgctacttctgctgctgtctccaataaggtcaagaggaccaaggaggagtccatgaggaaagtcatggacttgagctgttggggtcncaatacttcaaggttttagtgtgtggactattctaattgcattcatcattgtgctgcaaggtttatg

SEQ ID NO: 14479 - DNA, 375 bp, Glycine max
  Clone ID: LIB3040-031-Q1-E2-H7
gactttccattctcttcaaacctaacgcagcatcgctattctcttcattccatggctttgcccaaccagcaaaccgtggattaccctagtttcaaactcgttatcgtcggcgatggtggcacaggaaagacaacctttgtgaaaatgcatctcaccggagaattcgagaagaaatatgagccaaccatcggtgtggaggttcacccattggattttttcacaaactgtggaaagattcgattttactgctgggatactgctggacaggagaaatttggtggcctcagagatggatactatatccatggacaatgtgctattatcatgtttgatgttactgcccggcttacatacaaaaatgttcccacctggctc

SEQ ID NO: 14480 - DNA, 380 bp, Glycine max
  Clone ID: LIB3040-031-Q1-E2-H8
gacactcattccatttttacctttctctctcgctcgcaaacgcaaataataaaaaacaaggttttagccatggcatcgaagcggatcttgaaggaactcaaggatctccaaaaggatcctcctacctcatgcagcgccggtcctgttgctgaagacatgtttcactggcaagcaacaattatgggtcctccagacagtccttatgctggaggtgttttcctagtcactaatcaattccccccaaattatccctttaagccacccaaagttgcattcaggacgaaggtatttcacccaaatataaatagcaatgggagcaattgtcctgacatattgaaagagcaatggagacctgcgctaactatttcaaaggtgttgct

SEQ ID NO: 14481 - DNA, 348 bp, Glycine max
  Clone ID: LIB3040-032-Q1-E1-A11
gactccctctattattatcattattcttgcggtcttcatctctccaatatctctgcacacacaataacagagtttaactatgaatcaaccataatggacaaagttaacaccagcaacaacagcaacagcaacagcaacagcaacagcaacaacaactgtgggttcatgtcgtgcgacaaactggaccgagtggccaactgggtcggcgccaacgttgcccctgctttctttgcatccttggagcggtgctcttgcatcaacctcagcatcaaagacaacgaagatgacaccaacaacgatgatcgccctctcttcctctctcaccccactactcctttttcctccaac

SEQ ID NO: 14482 - DNA, 379 bp, Glycine max
  Clone ID: LIB3040-032-Q1-E1-A12
gaatctttccactttgacattgccgacgcctccagataaacaaccttaactttcccacaacaccacccatcattctttttctctctctagatttcatttagttgttgctgtcttcttctgtttgtgtgtgccaacacagagcgaaaaacatggctctgaaccaatcaaaagccgtgttgttgagggtgagtttggtggtggtggcgctcttcatagcagggtacatagtgggtccccctctctactggcatttcgttgaaggtttggctgcggtcaaccactcttcttctacttgtgccccctgcatctgcgattgctcttcacaacccattctttctattccacaaggactgagcaacacttccttcggagattgtgc

SEQ ID NO: 14483 - DNA, 230 bp, Glycine max
  Clone ID: LIB3040-032-Q1-E1-A2
catgtctaacattcacaatcttctccttcccaagaatgctggtggatcatccaatgctgctgctgcaaacgatgactcttaaataagggttttttttccgtgaaaagttatccaatttattctctttggattctcactgtctttgtagtttttcagtttttgataattgcgttctgtacatgtaattacgttttcaatcactgatgtgaatatagaacactcattttctc

SEQ ID NO: 14484 - DNA, 328 bp, Glycine max
  unsure (1)..(328): unsure at all n locations
  Clone ID: LIB3040-032-Q1-E1-A3
gattgcttctaacgtgagatctcagattgcaattgcctcttctcttctcccagaatcggtgtaggttacatgtttaanggttttgttttcatttaagtcactaatccgatatcatgaagctcgatacgactagtctcgaatcgtttcccacactgattgcacctcaaaacgacgtcgccggagaactctccgccgctccgttctttgaccttccgaattccaatgacttcgatgggttcttgaaagacgctattcagatggtgaagcccgcgaagggtactacaactcttgcttttatatttaaagagggtgttatggtagctgctga

SEQ ID NO: 14485 - DNA, 302 bp, Glycine max
  Clone ID: LIB3040-032-Q1-E1-A4
gggtggagagatgggcactgactcacacccacaatagtctagggcagcttcaaagtacctccacattgtctcctactcttactgttctcttctcttctcatcatttttattttttccaatcaaaccaaacactccataagcaccgctcttttctctccgaaatctccatctcacttcacttctgagctctggacgagatcccagatcgtcacatctttcacgcactcttccatcagattcaccctttcgtttaacgcatactcataacttgaaggttaatggctgctccaccggcaatggct

SEQ ID NO: 14486 - DNA, 366 bp, Glycine max
  unsure (1)..(366): unsure at all n locations
  Clone ID: LIB3040-032-Q1-E1-A5
gagaagaaccagatctctctttctcaaatcaccaagaatagttgaaaatggggctgtctttcacgaagctgttcagccggctctttgcgaagaaggagatgcgtattcttatggtgggtctcgacgccgccggtaagaccaccattctctacaaactcaagctaggagagatcgtcacaaccattcccaccattgggtttaatgttgaaactgtggaatacaagaacatcagcttcactgtctgggatgttggtggccaggacaagatccgtcctctgtggagacactacttccaaaatacccaagggcttaactttgtggttgatagcaatgaccgggatcgtgtggttgaagctanggatgagc

SEQ ID NO: 14487 - DNA, 372 bp, Glycine max
  Clone ID: LIB3040-032-Q1-E1-A6
taatttgggaattattgctcccatcgccattggcttcattgtcggcgctaacattttgttgggtggggccttctctggagcggccatgaaccccgctgtgacatttgggcctgctgtcgtgagctggacctggaccaaccactggatctactgggccgggcctctcatcggtggtggaatcgctggccttgtttacgaggttgtctttatcagccacacccacgagcagcttcccaccactgactactatagggggggaaatgaaaataaaaaagaataatattgtgtattattgaatttctctggaatcttcttctgtgtacggttttccttccttgtgttttcttcctaattcactttcgagggttgtac

SEQ ID NO: 14488 - DNA, 378 bp, Glycine max
  Clone ID: LIB3040-032-Q1-E1-A7
agaagggcagaaaaacaagatttgtaacacaaactgtcctttttattaggcttttacccccaaaaaaaaaaaaaaaaaaaaaaaaaaaaaaaaaaaaaacaaaaaaaaaaaaaaaaaaaaaaaaaaaaaaaaaaaaaaagaaaaaaaaaaaaaaaaaaaaaaaaaaaaaaaaaaagaaaaaaaaaaaatagaggaaaataaaaaacatgatgaaaaaagatgacaaaaaaaaaaaaaaaaaagggggagccaaagggggtaaaactaatagaggggggggaagggaataaaaaccccctaaaaagggcacccaaaaaaaaattcgggggggggtttttaaaaaaacgggggggggaaaaaccgtgggtttccaaaata

SEQ ID NO: 14489 - DNA, 376 bp, Glycine max
  Clone ID: LIB3040-032-Q1-E1-A8
agaaggggaagtgagtgagtagtgagaatggagtttcaagggttaccggaaggttgcattgctagtatactctctcgcactacgccggcggacgtgtgtaggttttccgtcgtatcaaagattttccgttcggccgctgaatcggacgctgtgtggaaacgttttctcccttccgattaccattccatcatttcccagtctccttcgcctctcaactatccttccaagaaggagctctatctcgctctctcggatcgccctatcatcatcgatcagggtaaaaagagctttcaattggagaaaaagagtgggaagaagtgttacatgcttgctgctagagctctcagcattatttggggtgacactgagcaatact

SEQ ID NO: 14490 - DNA, 371 bp, Glycine max
  Clone ID: LIB3040-032-Q1-E1-B1
gatcactcacactagtctctgtgaaaagcgacacgacacaacacaacacaagctttattctttttcttcgcttcttctgtacagcacccaagattgaagatgatagaccttgcgcgcgtgcagaaggagcttgtggaatgcagcaaggacgcggagggatcgggcatcaaagtcagccccaaaaacgacaaccttgttctcttgatcggcaccattcctggccccgtcggaactccatatgaagggggcattttccagattgatatcacattgcctgatgggtacccgtttgaaccccccaagatgcagtttaaaaccaaagtttggcatcctaatatcagcagccaaagtggagctatttgcctggatat

SEQ ID NO: 14491 - DNA, 245 bp, Glycine max
  unsure (1)..(245): unsure at all n locations
  Clone ID: LIB3040-032-Q1-E1-B10
gagattcgtcttcagtttcagcctttctctcccactcactcactcacaggtaagcaatggcgggaaaaggagggaaggggcttcttgcagcgaaaaccaccgcggcgaataaggacaaagacaaggacaagaagagacctatttctcgctcttcccgtgctggaatccagtttcctgtgggacgttatccataggcagctganacanagggtcnnaagcaatggacgtgttggggcaacagctgc

SEQ ID NO: 14492 - DNA, 342 bp, Glycine max
  Clone ID: LIB3040-032-Q1-E1-B2
gagcctcaccagaagcacaacgaggagaagcagaaggagcaaaagcaatggcgccgaagaagccgacaaccacgacaaggaaccctgatttggttagggggattggcaagtattccaggtcgcagatgtaccacaagaggggcatctggaccatcaaggccaaaaacagtggcgttttgccccgccacgattccaagcccaagcccgacgccacggctcataagccgctcaagttctaacccgcggacgatgtttacaagcccctcgtcaacaagcacaagcccaaacccgcgaaactcagggctagcattactccagcgactgtgttgatcctgcttgctg

SEQ ID NO: 14493 - DNA, 321 bp, Glycine max
  Clone ID: LIB3040-032-Q1-E1-B3
gaaccatcttcgtttttcagcatttctactctccaaacactcgaattcgcattctcttcactctttccccaatccatggccaagggagagaagaaaccggcggagaagaagcccgcggagaacgctccggcggtgaaaacaaaagccgagaagaagatcccaaaggaacccgcctcgggcgagaagaaggagaagaagagaaacaagaagagcgtggagacgtacaagatctacatattcaacgtgctgaagcaagtgcaccctgacatcgggatctccagcaaagccatggggatcatgaacagcttcatcaacgacatc

SEQ ID NO: 14494 - DNA, 234 bp, Glycine max
  Clone ID: LIB3040-032-Q1-E1-B6
ggcccaaaagttatacaaaaatggcttcagttgtgtatctcctctttggcttccatctcattgttatcatgtcaagttccttacccgcaactagtgaagtgtttgcaaaacagtatccatccacagaacccgtggaagaaaaactcacccaactccacttctatttccataacaacataacgggggaacacccaactgctatgaaaactgttttgcctcctaaggggtccattc

SEQ ID NO: 14495 - DNA, 355 bp, Glycine max
  Clone ID: LIB3040-032-Q1-E1-B7
ggcattctattcattcaagattcagcaagtgcgttttggaagcagagaccgagatacttcgagatggcccgtacaaagcaaactgctcgtaagtcaactggaggaaaagctcccaggaagcagcttgcaaccaaggctgcacgtaagtctgcaccaacaactggtggtgtgaagaagcctcatcgttatcgccctggaactgttgctcttcgtgagattaggaaataccagaagagcactgagctcctaatcaggaagcttcctttccagaggttggttcgtgaaattgcccaggatttcaagactgatctgcgtttccagagccatgctgtgcctgcattgcaagaggctgctg

SEQ ID NO: 14496 - DNA, 375 bp, Glycine max
  Clone ID: LIB3040-032-Q1-E1-B8
ggcagcgcttgatttgaggccaggcaagccccactcaaccaccacacctctcctcgttcacgctacccctttctgctcttcttctacctttcaagttttaaaagtataaagatggcagagacattcctatttacctcagagtcggtgaacgagggacaccctgacaagctctgcgaccaaatctccgatgctgtcctcgacgcttgcctcgagcaggacccagacagcaaagttgcctgcgaaacatgcaccaaaaccaacttggtcatggtcttcggagaaatcacgaccaaggccaacgttgactacgagaagatagtgcgtgacacctgcaggaacatcggcttcgtctcaaatgatgtgggactggatgcc

SEQ ID NO: 14497 - DNA, 360 bp, Glycine max
  Clone ID: LIB3040-032-Q1-E1-B9
ggctacaaaaacattgaaagaaatagaaaaagcaaaactggtttctcgcatttcctccgaaacagaccgtttcgctcgtttctcggatctgcaatggaagccccacccaaaggcgctgctggaagaagaggtgacaggaagaagtccgtttccaaatccatcaaagctggcctccaattccccgtcagccgcgtcgccaggtactttaaaaaaggccgttactctcgccgccttggcaccggggctcccatttacctcgccgccgttctcgaaaatctcgccgcagaattgttggagctggccgggaacgctgcacgtgacaacaggaagaataggattaaccctaggcacgtgttgctg

SEQ ID NO: 14498 - DNA, 356 bp, Glycine max
  Clone ID: LIB3040-032-Q1-E1-C10
ggttctagtgtgtgattgtttgttgttgtaacccgttcttcttcttttgttgttctgtgtttgtgtttgttttttctctcacctgaaaatgtcttgctgcggtggtaactgtggttgcggaagctcctgcaagtgcggcaacggctgcggaggctgcaagatgtacccagacttgagctacactgagtcaacaccaccgagaccttggtcatgggagtggcacctgttaaagctcaatttgagggtgctgaaatgggtgtgcccgctgagaacgatggctgcaaatgtggaccaaactgctcctgcaacccctgcacttgcaagtgaggtgttgggagagcaagcttcaagcagag

SEQ ID NO: 14499 - DNA, 366 bp, Glycine max
  Clone ID: LIB3040-032-Q1-E1-C12
gatcatcaataggtgttttcatttgggattcaaactcaccatggtggacgccttcaaactttgcatcttccttcttgcgtcgatctgtgctttcctagtcttttctaatccagtgctgtgtagtgataaggaggacagtgtattcaagggaatcaacagctacaggcaaacacggagcctgatacccctgagccaagtttcgaaggcaacatgtttggctgatgaagttgcagaagaaatagagaagatgccctgtgaaaacgtgaaccaatactacccttcatctgttcctggtagtgggaacctcaaaatcccaaacttgcagaagcacataaataaatgtgacattaacttcaacaccaccac

SEQ ID NO: 14500 - DNA, 342 bp, Glycine max
  Clone ID: LIB3040-032-Q1-E1-C3
gatccttcgtccagctagcaccacattcacctgaggcttccaaagcaatggcttcccttgcagcatccactgctgctgcttcccttggcatgtcagaaatgcttggaaaccccatcaacttcagtggtgccacaaggccagctccatctgcttctagtcctgcctccttcaagactgtggctcttttctccaaaaagaaggctacaccaacacctccaaaaaaagctgctgctgctgctcctgccaatgatgagcttgccaagtggtatggtcctgacagaaggatcttcttgcctgagggtctcttggaccgatccgaaatccagagtacttgaccggaga

SEQ ID NO: 14501 - DNA, 274 bp, Glycine max
  unsure (1)..(274): unsure at all n locations
  Clone ID: LIB3040-032-Q1-E1-C4
gaaaaatagagagtttcgttcgtcaccatgactttcaagcgcangaatggaggtcgcaacaaacacggccgcggccacgtcaagttcattcgatgctccaactgcggcaaatgctgccctaaggacaaggctatcaagaggtttctggtgaggaacattgttgaacaagctgcagtcagagatgtgcangangcttgtgtctacgaacaatacacgcttccgaagctgtatgtgaagatgcagtattgtgtttcctgtgctatccactctcatg

SEQ ID NO: 14502 - DNA, 350 bp, Glycine max
  Clone ID: LIB3040-032-Q1-E1-C5
ggtcctccgatagttataatataaccatgtaacgttcaaattctacgccaatctctgtctcattctctttcctctttcctttttccttagaagaatcgaaaacgtcttcaaaaaaccaagccattattaatggctgtcgattccttcttccagaaagaacatcaaattcgggagtttgtggacgggaatggaaacgtagctgtcggtttgaagttgcataataaaccaagtaatgatggccttaaccgacagtttcctctagagattccgccgattctatttgaagagacttcacttccagcaggattgcacggttcacatactaaagatgtttatagtatttcagtgtt

SEQ ID NO: 14503 - DNA, 372 bp, Glycine max
  Clone ID: LIB3040-032-Q1-E1-C6
gacccccaaaccctgctgcataggaagaaaccctagcctctcaccctccctgcgacacgatgcagatcttcgtgaaaaccctaacgggtaagacgatcacccttgaggtggagtcttctgacaccatcgacaacgtgaaggccaagatccaggacaaggaaggcatccctccggaccagcagcgcctcatcttcgccggaaagcagctggaggacggccgcaccctcgccgactacaacatccagaaggagtccaccctccacctcgtcctcggtctccgcggtggcgccaagaagcgcaagaagaagacctacaccaagcccaagaagaatccagcacaagcacaagaacgtcaagctcggcattctccag

SEQ ID NO: 14504 - DNA, 265 bp, Glycine max
  Clone ID: LIB3040-032-Q1-E1-C7
gatccgaggcccctcttttatatggtcgttgataaaatggcttcgacccttttaacaaagatgcttttgggtcaccgattgatacacccttcttcgttcctcactcaccagccacagattctctcttctctattcagtaaacggctgttttgtatacgagctgtcccggtctcagcctctacatcccaaaacatcaaaacaactggttgggctccttgtatggcttcttcctcagttggtagaagagctacatattcaacacaat

SEQ ID NO: 14505 - DNA, 329 bp, Glycine max
  Clone ID: LIB3040-032-Q1-E1-C9
gattcaccacaaccctctctctatattccattgccacccagttttgaatatatttttattccttctttgtttcttcactttcttccatacacataaccatgtcttctcagactgttgtcctcaaagttggtatgtcatgtcaagggtgtgctggagcagtgaacagggttttgggaaaaatggaaggtgttgagtcatttgacattgatctgaaggagcagaaggtgacagtgaaaggaaatgtggagccagatgaagttctgcaagccgtttccaaatctgggaagaagactgcaatctggggtggataagcaccacaatctaaaaac

SEQ ID NO: 14506 - DNA, 354 bp, Glycine max
  unsure (1)..(354): unsure at all n locations
  Clone ID: LIB3040-032-Q1-E1-D1
ggttttacaatttacatcacatttcgttgcgcctctgttctctgtcactgctgcgtctctcgtaaccatgcctaagcaaatccacgagattaaggatttccttctcactgctagaaggaaggacgcanggtcggtgaagatcaagaggagcagagatgtggttaagttcaaggtcagatgctcgaagtacctctacacactttgtgtgttttgaccagagaaagctgataaattgaagcaatctcttcctccaggtttgagtgttcaagacctgtaaaggtacagggcgagagaccaagaagaagcaattcattgattcgtctgaacttcgtttctctgtagttgaaacttgag

SEQ ID NO: 14507 - DNA, 378 bp, Glycine max
  Clone ID: LIB3040-032-Q1-E1-D10
gacactaaacaagttaaaagaagagcatcactgaactaacaaagcaaccctatgtcgaaggtggtttgtgtcaccggagccagcggcgccatcggatcatgggtggtcctactcctcctccagcgtggttacaccgtccatgccaccgtccaagatatcaaggatgaaaatgagacgaaacatttggaggaaatggaaggagcaaagagtcatctccatttttttgaaatggatcttcttgacatcgactccattgccgctgccataaagggttgttccggcgtaatccaccttgcatgtcctaacatcattggtcaagtcgaagatcccgagaaacagatattggaaccggcgataaaaggaaccgttaatgtgttg

SEQ ID NO: 14508 - DNA, 350 bp, Glycine max
  Clone ID: LIB3040-032-Q1-E1-D11
gactccactcacaactgaaaccaaaactgaaaaaaaaaacaaacaataccataacatggcttcttccaccatcacctcctccttcctaacatcacccccttcatctctcttcaacaaatcatcatccccttccttccatgccacccctactctccgccccctcgcgccacgcgcctccatgtccgcctcagcgccgccctacgacttcggatcgttccggttcgatccgattacagagtcgattgtgtcgcgcgagatgattctcaagtacatgatcgacatggtcacccacgccaacaccgacgtcgtcatcgttggcgcgggctccgcgggtctctcgtgcacctacg

SEQ ID NO: 14509 - DNA, 362 bp, Glycine max
  Clone ID: LIB3040-032-Q1-E1-D12
gacggctttcaccattattttcctttctctctcactcgaaacaaaacaaaacaacacaaccggaaaaccaaaccacctctccctgctcccgccgctgttttccgccgctgtcgccgtcgttcccacctcaccgtggcggcgcgcgcgtctccgatgggaaagtacatgaagaaagcgaagccgaaaggagaactcgcgctcgtcgaatccaccaccagcaacaccaccacctcctacatgggggtccgaacccgcgccaaaaccctagcgcttcagaaatcgcacgcgcagcagcacgagctcgccgccacctccgactcctacctccagctccggagccgtcgcctccagaagcctccgat

SEQ ID NO: 14510 - DNA, 294 bp, Glycine max
  Clone ID: LIB3040-032-Q1-E1-D2
gattcatcacatacaacactctctccaaagttcaaattaagactgagaggtgagaaagagagaattcatatgggtgccggtctagttgcgttcctcttaatggttcttgtgcaattggtctatgcagtgatgaacattacttcaaagcttgcaatagaatctggaatgagccctcttgtccttgttgcttatcgacaactctttgctactgtgtccattgctccctttgcttattggctcgagtggaatacgcttcccaggattacacagcgtcttatgattcagataataatt

SEQ ID NO: 14511 - DNA, 352 bp, Glycine max
  Clone ID: LIB3040-032-Q1-E1-D4
gatccataaccatggcgtctaactctgcttccgctctttacttccttttatgcctatcgcccatcactttgcttctttctgcgtttcgtgctcaagctcaatctcatgctccagctcccactttcaagtactgtgaaaagaatgcagactatgctgtgaacgtgagtggagtggaaatattgcctgaccccgtggagagaggagtgccattcacctttaagatcccagcttatactcctgaaccaattcaaagcggggacttgttatatgaaatttcttatgctggaatagaagcacaacctgctacatttctccatgatctctgtgaggaagcaccatgcccagtacctgc

SEQ ID NO: 14512 - DNA, 375 bp, Glycine max
  Clone ID: LIB3040-032-Q1-E1-D6
ggaaattctaagagcttgttccgtcgtcccccaagtgctgcagagccgcattttgcttgcaattcagaaactttgtgcgtagaggggacgaaacaatacaatggcttacgctgcaatgaagcctactaaggccggcttggaggagcctcaggagcagatccataagattaggatcaccctttcctctaagaacgtcaagaatctcgagaaagtgtgcgccgaccttgttcgtggtgccaaggacaagcgcctcacggtgaaagggacctgttaaggatgcaacctaagtatcttacaatcacaacaggaaatccccgtgtggtgaaggcaccaacacatgggacagatttgagctgcgtgtgcacaagagaatta

SEQ ID NO: 14513 - DNA, 364 bp, Glycine max
  unsure (1)..(364): unsure at all n locations
  Clone ID: LIB3040-032-Q1-E1-D7
gatgccgaaaagtagtaccaagatggcttcagttgtgtatctcctctttggcttccatctcattgttatcatgtcaagttccttacccgcaactagtgaagtgtttgcaaaacagtatccatccacagaacccgtggaagaaaaactcacccaactccacttctatttccataacaacataacgggggaacacccaactgctatgaaaactgttttgcctcctaaggggtccattcatggttttggggctacttacatgatggatgaccctctaactgaaggaccaagtccaacttcaaagcttgtgggaagatctcagggaatatacgctttggcttcacaacatgagcctgngttgctcatg

SEQ ID NO: 14514 - DNA, 345 bp, Glycine max
  Clone ID: LIB3040-032-Q1-E1-D8
gatcattgatattggcttaggcgctgcatctgcaaaatctcagcccaaacaaacatctctgtacctctctccctctttccctctctttcgcttatcaattttcgttttaatttctctacgactcgggtcgacctccgatcactttgggtctatcggcggggacttgggtcgaactcgcatgactcaatttactgcgaggtacggaatccgtgaattttcctgcgaggtaagattccgttgaaattttgctttggtccgagggggaaggtggaattaggatcgatttggcttcagatcttggaattagggtttagtattggttgcaggtgacgttaattttgtgat

SEQ ID NO: 14515 - DNA, 59 bp, Glycine max
  Clone ID: LIB3040-032-Q1-E1-D9
ggtagttccaccgagtagcaacaatgtcgaagcgaagtcgcggaggatctgcgggaaac

SEQ ID NO: 14516 - DNA, 370 bp, Glycine max
  Clone ID: LIB3040-032-Q1-E1-E1
gagacaagggtttcttccgggttcacgtttcacaatcactttttgcgcttctctcactcactcactcttcttcttcctcttcgtgtggttttctttctcgaactcgaacgaagatgcgtgagattcttcacatccagggagggcaatgcgggaaccagatcggagccaagttctgggaggtggtgtgcgcggagcacgggatcgattcaacggggaggtaccaaggggacaacgagttgcaactcgagcgagtcaacgtctactacaatgaagcgagttgcggaaggttcgtgcctagggcggtgctcatggatctggagccagggaccatggacagcgtcagatctggtccctacggtcagattttccg

SEQ ID NO: 14517 - DNA, 366 bp, Glycine max
  Clone ID: LIB3040-032-Q1-E1-E10
gaaataacagtggggctttgtacagttcagcctatcactctctcgaagcttcctaacgcctcctcgtttcttcctaaacctaaaccctctcttcctcagtcttacactccctccgccgcacacttatctcggtcagtttgcttaaggaatctgtcgccaaaggcaacatcttctgaagaagaaaggtccagtgggggaagtcaatttttcaatgagaagcgcgatggtgtaataatcctggaggatgttaaagaggataataataagaatgagttcgataaaacggtgattgaagatacaaagcaagacttgtttgatgatgatggacagggtctatcatttgatttgctggataagctcaatttt

SEQ ID NO: 14518 - DNA, 165 bp, Glycine max; identical to SEQ ID NO: 14325
  Clone ID: LIB3040-032-Q1-E1-E12

SEQ ID NO: 14519 - DNA, 378 bp, Glycine max
  Clone ID: LIB3040-032-Q1-E1-E3
ggagacaccattctgattttgtccatccaaaccttaaaaagattcagtgaagaacaacgttaatggcatctcttggtgtgcaagcagttcatcctcctccattaacatccacctccgacacacctcctctttttgatggcaccaccaggttgtacatcagttattcttgcccctatgcacaacgtgtatggatcgctcggaacttcaagggactaaaagacaagatcaatttggtccctataaaccttcaagacatgccagcttggtataaggagaaagtctaccctgaaaataaggtgccatccttggagcacaatggcaaggtgttgggagaaagtcttgatttgatcaaatatgtagattaaaactttgaaggga

SEQ ID NO: 14520 - DNA, 349 bp, Glycine max
  Clone ID: LIB3040-032-Q1-E1-E4
gggcatagcaaaatcgtttctccaatttaatcaccattgtacaacccaattcccttcgtcgttttcgattaagagagcaatggcacgtaccaagcaaaccgctcgcaagtccaccggaggaaacgctccgaggaagcaattggcaaccaaagccgctcgcaagtcagccccggcgaccggcggagtgaagaatccccaccgcttcaggccaagaacggtggctctgagggagattcgaaagtaccagaaaagcaccgaacttctgatccgaaaactcccattccagaggctcgtcagagaaatcgctcatgatttcaaaaccgatctccgcattcagagcagcgccgtt

SEQ ID NO: 14521 - DNA, 355 bp, Glycine max
  Clone ID: LIB3040-032-Q1-E1-E5
ggaaactgcggaagcattccttgggaagaacattaatgatgctgtggtcactgtcccagcttacttcaatgatgctcacacgcaggccaccaaagatgctggtgtcattgctggtctcactgttgctagaattattaatgaacctactgctgctgccattgcgtatggattggacaagaaaggtggcgagaagaacattcttgtttttgaccttgggggtggaacatttgatgtcagtatcttgacaattgataatggtgtttttgaggttcttgctacaaatggagatactcatcttggatgtgaggactttgatcacagaataatggaatacttcattaagttgatcaataaa

SEQ ID NO: 14522 - DNA, 378 bp, Glycine max
  unsure (1)..(378): unsure at all n locations
  Clone ID: LIB3040-032-Q1-E1-E6
gatgccgaaaagtagtaccaagatggcttcagctgtgtatctcctctttggcttccatctcattgttatcatgtcaagttccttacccgcaactagtgaagtgtttgcaaaacagtatccatccacagaacccgtggaagaaaaactcacccaactccacttctatttccataacaacataacgggggaacacccaactgctatgaaaactgttttgcctcctaaggggtccattcatggttttggggctacttacatgatggacgaccctctaactgaaggaccaagtccaacttcaaagcttgtgggaagatctcanggaatatacgctttggcttcacaacatgagcctgggttgcccatggtgacaaattttct

SEQ ID NO: 14523 - DNA, 163 bp, Glycine max; identical to SEQ ID NO: 14170
  Clone ID: LIB3040-032-Q1-E1-E8

SEQ ID NO: 14524 - DNA, 378 bp, Glycine max
  Clone ID: LIB3040-032-Q1-E1-F1
ggacattgctaaaccttaaaccctaatttttacaatccgagggtgaagagtttgatgggtcagcgaagaacgacaacaacatcaatcagtgctcctcaagcaaggaagacgctgacatgaataacaaccaccttcgctttgaagaggctgtcgacgagagttccaacctcgaccaatccatgcgcgacatcgaagaatccgatgataaaaccagcgccgactattacttcgattcctactctcattttggaattcacgaagagatgttgaaggacactgtgagaaccaagacatatcaaaatgttatttatcagaacaagtttttattcaagaataaagtagttcttgatgttggtgctgggactgggattttatcac

SEQ ID NO: 14525 - DNA, 345 bp, Glycine max
  Clone ID: LIB3040-032-Q1-E1-F10
gagggcgaggaagccacatagagacacaatacagagtgagttgttgctccttcgccacaactctctgccaacatgggtatctccagagattctatgcacaagaggcgtgccactggtggcaagaagaaagcctggaggaaaaagagaaagtatgagcttggtcgccagcctgctaacactaagctgtcaagcaacaagacagtcaagaggattcgggttagaggtggaaaatgtgaaatggacggcattgagattggatactggaaaattactcctggggaagtgaagctgtaactcgcaagactcgtgtactagatgtggtttacaatgcctcaaacaatgagc

SEQ ID NO: 14526 - DNA, 360 bp, Glycine max
  Clone ID: LIB3040-032-Q1-E1-F11
ggatttaaccatgtatattgcactttgcagcatagagtttgactgcgatgatgatttgtttgctactgctggagtttcccggcgcatcaaagtttttgacttttctgctgttgtgaatgaacctacagatgctcactgtcctgttgtggagatgtctacacgttcaaaacttaattgcttgagttggaataaatatgctaagaatcaaatagctagtagtgattatgaaggaattgtgactgtttgggatgtaaccactcgaaagagtttaatggaatatgaagagcatgaaaagcgtgcatggagtgttgatttttcaagaacagatccctctatgcttgtatctggtagcgatgactg

SEQ ID NO: 14527 - DNA, 354 bp, Glycine max
  unsure (1)..(354): unsure at all n locations
  Clone ID: LIB3040-032-Q1-E1-F12
gattatcatagtagatattcattccccttatctttctctcttctctctccccgcccaaaccctaactccctaccctattccgctttctctcatccatcatgaaaggaggaaagtccaagaccgaatctaagagagccgatgccaaacttgctgtgaataagaagggcgccgccaccaagactaggaaacccgccggaaaggggaaggcagcgaaagatcctaacaagccaaagaggcctccaagtgctttcttcgttttcatggaggaattcaggaaggtgttcaacaaggaacatcncgacaacaaagcagtgtctgctgtgggcaaagctgctggagcanaatggaagacga

SEQ ID NO: 14528 - DNA, 363 bp, Glycine max
  Clone ID: LIB3040-031-Q1-E1-B4
tgggcttcttatttgtaacgaagcaaacgctgccgaattcgttatcgctttgcactagcagctttgaaacccggttcatccgaagcccttcaccgaaccatgtcgatgagaaaggttagagagccaaaggaggaaaatgtgactctgggtccagctgttagagatggtgaacacgtttttggcgttgctcgcatctttgcctccttcaacgacaccttcatccatgtcactgatttgtctggcagggaaacccttgtccgaatcactggtggtatgaaagttaaagctgacagagatgaatcatctccttatgctgctatgcttgcagctcacgatgttgctgccagatgcaaagaactgggc

SEQ ID NO: 14529 - DNA, 389 bp, Glycine max
  Clone ID: LIB3040-029-Q1-E1-A12
gaaaacagagagtgatttcagtgagtgatcggtgttcacttgatctcatcataatcgtcagcgtcaattgaagaagatgccgatcagaaacatcgccgtcggaaggcctgaagaggcgactcaccccgacacgttgaaggcggctttggctgagtccatctcaaccttcatcctcgtgttcgccggctcaggctccggcatcgcctacaacaagctcaccgacaacggcgctgccacccctgccggcctcatctccgcctccatcgcccatgcattcgccctcttcgtcgccgtctccgtcggggccaacatctccggcggccacgtcaaccccgccgtcaccttcggcgccttcgtcggcggcaacatcaccttcctccgcggcatcg

SEQ ID NO: 14530 - DNA, 379 bp, Glycine max
  Clone ID: LIB3040-029-Q1-E1-A2
gacaataagaattcctctcaaatttcaatttttcatttgaaaataataaaaccctaaaagaggggttgcaagcaaaatgagaagctcgaagatgtggatggttttcatgtgtctgacggtgagcttcttcgctcgcattgaatcgctatccgtgacggtgaacgacgtcgagtgcgtctacgagtacgtacgttacgagggcgacaccgtttcggggaactttgttgtcggcgagcatgacattttctggagctctgatcaccccggcattgatttcaggggtgacaactgctgcagggaataatgtcaagagtatcaagggaacctctggtgacaaattcagttttaaagcccatcacatggaaagtaaaaattttgt

SEQ ID NO: 14531 - DNA, 263 bp, Glycine max
  Clone ID: LIB3040-029-Q1-E1-A3
ggagggttggttcatttgatctgcgactgagagaagagaagagaattgtgatggggggaggacagggtcacggcacaacctacaaaggtgttaccattcatcagccaaagcgctggcacactatcaccggcaagggtttgtgcgcggtcatgtggttttgggtattctacagggcaaagcaagatggtcctgttgtattgggctggagacatccttgggaaggtcaccatgatgatcatggcaagggccattagcattcctta

SEQ ID NO: 14532 - DNA, 343 bp, Glycine max
  Clone ID: LIB3040-029-Q1-E1-A4
ggagaacacaaacagcagcgtcttggtttgtgagagagacagaggcacagagagaaaatggtttcggggtcaggaatctgcgcgaagagggtagttgtggacgcgcggcaccacatgctggggaggctggcatcgatcgtggcgaaggaacttctgaatgggcagaaggtggtggtggtgcgctgcgaggagatttgcatctccggtgggctcgtcaggcagaagatgaagtacgtggcgtttcctccgcaagcgcatgaacaccaagccctctcacggggccatccatttccgtgcacccggcaagatcttctggcgcaccgttcgtgggatgataccacac

SEQ ID NO: 14533 - DNA, 193 bp, Glycine max
  Clone ID: LIB3040-029-Q1-E1-A6
gagactcgcagaaaaggtctttcttttgatcaatggaggaaagaggagaatgctctgcttcagcttcagcttcagccaatccctcagatgaaatctgggccaagcttgttctgtcagatgagggatattcagatgtgcagataagttcagatgaaagagtggtatcttcagagatatcagctacgtctaatga

SEQ ID NO: 14534 - DNA, 282 bp, Glycine max
  Clone ID: LIB3040-029-Q1-E1-A7
gagagttctcattctctctctctctctcaataatttctctctctctacagttttctctatactccaactgtggtatttctgtcactgctaagatccccacctaatcgcctcgtctcaggctcatcagtcttttcccttctcttccaagctcataaactcacacacccacgtgcttcattttccccgtcggtctgggaggttttgttagtattagatgggtgtttctggcagggtcgcattcagagttatcgagcgtcagaggtggggggggggggggggggg

SEQ ID NO: 14535 - DNA, 357 bp, Glycine max
  unsure (1)..(357): unsure at all n locations
  Clone ID: LIB3040-029-Q1-E1-A8
ggcgcacccagagaggaagcttagagagagagagagagagagagagaggagagagtattggcgcttcatcaagatgggtatttctagggattccatgcacaagaggcgtgccactggtggcaagaaaaaggcttggagaaagaagagaaagtatgagcttgggcgtcaggcagcaaacaccaagttatcaagcaacaggacaatcaggaggattcgtgttagaggtggcagtgttaaatggagggcattgaggctggatactggcaattactcaggggggtactgaagcagttactcgcaagactcgtattcgagatattgtttacaatgcctcanacaacgagcttgtgcgaactc

SEQ ID NO: 14536 - DNA, 388 bp, Glycine max
  Clone ID: LIB3040-029-Q1-E1-B10
ggaaccacctacttggtgtcttgcaattcccaatggcctccattttcaagctctcaacgccatctccagctgcttccttatcagaagcgcttcgccccagagattctcgcttcctctccttcaatccttcttccaacgctattaattacaaaattaacctctccgcttccctccgatccattcactccctccctcttaaaacctccttgcggatcaaatgctcccaaacagatgggaatggaagtcctgcaaagaggacagtgcttcatgatctttatgagaaagaagggcagagtccatggtatgataatctctgcagacctgttacagaccttcttcctcttatagcaagtggtgtcagaggcgtcactagcaaccctgcgatttt

SEQ ID NO: 14537 - DNA, 370 bp, Glycine max
  Clone ID: LIB3040-029-Q1-E1-B11
gaattgactgtgggaacatgcgaattgcgagcctgatacgagagcttcagattccagtttgttcctcagaccctccatcatgtgtcataggcttcaaattagtggtaacatcatcttaggggagagatttgactgatcgcaccttccagatatgcaatgactcttatgagagcacagaagatctttggagcatgcggagacgttgccattacagaaacatgattcccgtattgtggtagtggcagcagtgtgtgcgctggggatattagatgtggatctgaacgacgaatacgccttggatctgggccaaaattgaccatctgtggaagagatttgggacaacgtgaggaaatgtggattcgagcctctc

SEQ ID NO: 14538 - DNA, 384 bp, Glycine max
  unsure (1)..(384): unsure at all n locations
  Clone ID: LIB3040-029-Q1-E1-B12
ggtagttccaccgagtagcaacaatgtcgaagcgaggtcgcggaggatcggcagggaacaagttccgcatgtcactgggtctgccggtggcggcgacggtgaactgcgccgacaacaccggcgcgaagaatctctacatcatatcagtgaaggggatcaagggaacgctgaaccggttgccgtcagcttgcgtgggtgacatggttatggccaccgtcaagaagggaaagcctgatctccgtaaaaaggtgctccccgccgtcatcgtccgtcagcgcaaaccctggcgccgaaaaggacgtgtctacatgtacttcgaaaataatgctggggtcatantgaatcgcaagggtgaatatgaaagttctgctatcactggtccta

SEQ ID NO: 14539 - DNA, 371 bp, Glycine max
  Clone ID: LIB3040-029-Q1-E1-B2
gcttcacactcatctactccacattgtcctctcaccactctccaattgaaaaggcttctttatcaaaagaaaaatggctcaagtttgtttgctcttggtggggcttctcacaatgttctcctctgcctatggctatggatatggtggtggctgggttaatgcacatgccaccttctatggaggaagtgatgcctcaggaacaatgggtggggcatgtggatatggcaacctctacagccaagggtatggaacaaacactgctgctttgagcactgctttgttcaacaatggtcttagttgtggctcatgctataaaataaggtgtgtgaatgaacataggtggtgcctccctggctccattatggtcactg

SEQ ID NO: 14540 - DNA, 344 bp, Glycine max
  unsure (1)..(344): unsure at all n locations
  Clone ID: LIB3040-029-Q1-E1-B3
aagttaatcgaagaagggtaaaatcagcaattctatctcctggatctgcatcatctgtccgtcaatctcctcgtttgaaggtcaggaaatgaagcggtgtgggggatgctcacctgctcggtaccttattttgatgagacatgctggttcatgtanggaattaattgctaactaattgacatgtaaattaagacatacccaggttccagatgtctgaacctgtagataatagaccagaagattcctacattttttgtgtatggtccaggtgagatttgtgtgtagtttaattggtagttgccattgctgaaaaactggtattgttcaataaaacatcattcaat

SEQ ID NO: 14541 - DNA, 371 bp, Glycine max
  Clone ID: LIB3040-029-Q1-E1-B5
gaaaaggccatggctggttcctctgcttctcttttgttccttttccttctctttggattctcagcagctaaggagctattggttggaggcaaaatagatgcttggaagattccatcttctgaatcagataccctcaatcaatgggctgaaaggtctcgtttcagagtgggcgatcatctagtgtggaaatatgagagtgggaaggactcagtgttggaagtaacaagggaagattatgctaattgcagcacatccaagcccatgagggagtacaatgatggaaacactaaggtgaagcttgaacatcctggtccattttacttcatcagtggatcaaaggggcactgtgagaaggggcaaaagttgattgt

SEQ ID NO: 14542 - DNA, 73 bp, Glycine max
  Clone ID: LIB3040-029-Q1-E1-B7
gggaaatgaaaataaaaaaaaaaaaattgtgtattattgaatttctctggaatcttcttctgtgtatgggggg

SEQ ID NO: 14543 - DNA, 339 bp, Glycine max
  Clone ID: LIB3040-029-Q1-E1-B8
gcttggtgttgattcttgacgatgtccgccgccaggtgtttgctgcgctccgccgtctcccgagctgccggtgcggcaaatctggctgccggagctagaacgaagcctgcacgatctccgtttcggctcccaaagcaaacctcagtctccaatcgcgttttcaggttaccggtggaagcgagcttctgcgtggaatcgatgcttccttatcacagtgctactgcgtctgcattgctgaattcgatgctctctgtgtctcgccactcctacggttggacccctgaagggtgatgctgaatgccacaatttctggtctgtaagctcgtgatttggaattta

SEQ ID NO: 14544 - DNA, 359 bp, Glycine max
  unsure (1)..(359): unsure at all n locations
  Clone ID: LIB3040-029-Q1-E1-B9
ggaggtgaaggggaaaaaaaaaagagtagagtggataatggcttcgttatcgctttgcatagccatgagagcacccactccctcagcttctctcattctcactaccccaaaaccatcttcactctctttgaaccttacccgcacttgctccagcgctcgctctccgctcctccattgctccttcctctcttctccttcccatctctcttccccttcctccgtttcaggcttgtcacttggattggatttgacatctaatgttgggaccagaagaggaaaaggttctggcctagttgtgagggcaggcaaggctgctctttgtctgactaagagaagcanatcaagaaaatcattggcac

SEQ ID NO: 14545 - DNA, 253 bp, Glycine max
  Clone ID: LIB3040-029-Q1-E1-C1
ggcacaggcaaaaaccctagccttcgaaaaccctaatcctgaggcactgtgatatggcaagagccgtttcctcttcctgcgcgcgcctcacaatgcgcctcttctccaccaccaccaccaccaccaccaccaccgctgcgttcgccgttacattacccaaaccctcgtcactctcagtctcaacgcgtcgattgctcgtcgctctctcgcatgccatcgtccctccctcgaggcaggtcgccggaatccggtg

SEQ ID NO: 14546 - DNA, 391 bp, Glycine max
  Clone ID: LIB3040-029-Q1-E1-C12
gaccgtgcgctagttctgagtattctgatcgccccctgagagagctcgtcgcggcggttgcagaagaagattgcaagatgaagttcaacatcgcgaatcccaccactggatgccagaagaagctcgagatcgacgacgatctgaaactgcgagcattttgggacaagaggatctcacaggaggtcatcggagatgcactcggtgaggaatttaagggctatgtcttcaaaattaccggaggttgtgacaaacaaggatttccaatgaagcagggagtgctgactcctggtcgtgttagacttttgcttcacaggggaactccttgcttccgtggatatggaaggcgtaatggagagcgtaggagaaagtctgttcgtgggtgcattgtcag

SEQ ID NO: 14547 - DNA, 216 bp, Glycine max
  Clone ID: LIB3040-029-Q1-E1-C2
gagctttcaattggctcaggtgaggtagtgatctgcgaccgtggggtctcagcaatagctgcatagtcgtatgtttcagatgtatgtcacaagcatcactctgaggtcgtgcgcttcttgcagtcagtgaggtgcttggagtgtaggtttgaatgttttaatgttcagcttgcaactgtctattcgcccggacagggtccgtctcctgggacttca

SEQ ID NO: 14548 - DNA, 258 bp, Glycine max
  Clone ID: LIB3040-029-Q1-E1-C3
gggtagcagaggattgggcgccatacagagggtattgctggggagtgtgactaattatgtcaccacaaatgcgagttgccctataacgattgtgaaagactctgccccttctactaactgatatgctactgaatttggttggcctttgtaatcggttgtttttatcttcatcagagaccagactgcttttccctccgttcttacttcttacagatgcggaatgtgggtttatgaacacacatgatgattaaggattcg

SEQ ID NO: 14549 - DNA, 394 bp, Glycine max
  Clone ID: LIB3040-029-Q1-E1-C5
gactcactcatacaatagagaccagcttttgcttctttgtgaacatggagatgaggaaatcatgtggcttcttcttcttgctcctcctccttgtctttgcttcccaggtggtggtgcagacggagggaagagtgtgtgagtcacaaagccacgggttccatggtttgtgtaatagagaccacaactgtgctttggtctgcaggaacgaaggtttctccggtggcaggtgcaaaggcttccgccgccgctgcttttgcaccaggatttgttgagatctcatcagacactactcttgccatgcagattaataaatcatagctaagccaaataaattgcatctactctttatccatttgggagctagctaccacaaccaactcatacttggtcattg

SEQ ID NO: 14550 - DNA, 245 bp, Glycine max
  Clone ID: LIB3040-029-Q1-E1-C6
ggatctggatccaacggtccaaaatgttcggggcttgtgctgcttgttttcccaggttttagagctccaaaccttcacatgcacctcattcgtctccatatcttccttccttgataacgttttcgggttcgagaatgcacttgtttgtttgtcgtacgacatggagactataccgagttcggtgacggttacgcggagtgacggcgcgttgacgtgcgccgcggagctgctcgcgactttgctag

SEQ ID NO: 14551 - DNA, 204 bp, Glycine max
  Clone ID: LIB3040-029-Q1-E1-C7
ggttggtagaagaaattgggcgtgtgggagttgttgaatcgggaagcaaaaaaaatgagaatccatcacatagcatgcctccaagacaattattcctatctgatcgtagacgagagcacgaaggaagccgcggcggtggacccggtcgaaccggagaaggttcttgaagttgccagctcgcacggcctcacgctcaaattcgtc

SEQ ID NO: 14552 - DNA, 60 bp, Glycine max
  Clone ID: LIB3040-029-Q1-E1-C8
ggttggtagaaaaaattgggcttgtgggacttgtttaatcgggaatcacaactcgtgaca

SEQ ID NO: 14553 - DNA, 177 bp, Glycine max
  Clone ID: LIB3040-029-Q1-E1-C9
ggaccatggagggttttgcctgcagctaaaatcgaaagcaggacgccgcagtgtcatatagtaggtcaagcgatcacaatgcgaaggtcaccaattcatttcattatacctcacacgtctagcctcacttcaaaatcatctcgcaagcttcatgtcacctctgatcgatgacatact

SEQ ID NO: 14554 - DNA, 169 bp, Glycine max
  Clone ID: LIB3040-029-Q1-E1-D1
gacggttacacgccgtcgtcgctgtttttgtgtgtcgcttcttcgtacgtgcagctgcaatggtgaagggacgccaaggagaacgtgtcagactctacgtgaggggtacaatccttgggtaaaaaaggtccaattcaaaccagtatccaaatacatccctgatccaaat

SEQ ID NO: 14555 - DNA, 222 bp, Glycine max
  Clone ID: LIB3040-029-Q1-E1-D10
cagagcacaactcatccgtgagtgtaaggatggagacagcttcttccatggctctctcatccccatccttggatggcaacgccgtaaagctgggccgatcaacgggatcaatgctaacggtgcgtatgaggaagatcgtcacccttcaagtctcctcaggaatcccattctacggcccatactttgacaagtacttgagcggaatctccggggagctcccgt

SEQ ID NO: 14556 - DNA, 351 bp, Glycine max
  Clone ID: LIB3040-029-Q1-E1-D11
gactcaccacttcaaaacactcataacacaaagcacaaagcaaagctcatccttgagttaaaaaatggcagcagcttcttccatggctctctcatccccatccttggctggcaaggccgtgaagctgggcccatcagccccagaagtgggaagggtgagcatgaggaagaccgtcaccaagcaggtctcctcaggaagcccatggtacggcccagaccgagtcaagtacttgggcccattctctggcgagcccccgtcctacctaaccggtgagttcccaggcgactacggctgggacactgctgggcttttcgcagagccagaaaaccttcgccaagaaccgtgaactcg

SEQ ID NO: 14557 - DNA, 373 bp, Glycine max
  Clone ID: LIB3040-029-Q1-E1-D12
gagataaaagaagacgaagttgcatcttatctgcaacactccgtatccacttcgctggtaataagagaagagaagagagagagagagagagagagggcgtggagaatgttaagtctctcagttgcttctccttcttcttcaaccatttcctttctcccaaagccattcaatggcattcagctccgtcgctctgccacatgctccattccacccacgaaatgcagcgcttcggtgccagtggtgatgatgtctaaaaggacggaggaattgaaggaaattagacaaatgaccaccgaacaaattaacgaagaggttgtcgaccttaagggcgagcttgtcatgcttcgccttcagaaatcggctcgcaacgagt

SEQ ID NO: 14558 - DNA, 112 bp, Glycine max
  Clone ID: LIB3040-029-Q1-E1-D2
gttttgaggatgttatgtttgaagaaacttgagactttcttttttcagcgaattaattatcagacgtaaattgtggtactaagaatacgtttacataaattgttttgaacca

SEQ ID NO: 14559 - DNA, 183 bp, Glycine max
  Clone ID: LIB3040-029-Q1-E1-D4
agggacaaaactcgaagcagaaactcaactcaccaagacagttgcattattttctttccagatccaactcaaaattgcaatgggagtagaagatacagatatttgtatcatcaaggagccagatcatgttgtagtccaatcagatggcatttcccatgattcaggtcatgaagctggaagtga

SEQ ID NO: 14560 - DNA, 369 bp, Glycine max
  Clone ID: LIB3040-029-Q1-E1-D5
gacatctttcactcgttctctgaaattttaattgacttttctcccctcataaaaaaaacctaccaatggctcccgcaaaggcagagaagaagcccgcggagaagaagccggcagagaaggccccagcggagaagaagccgaaggcggagaagaaaagatatcgagggagggaggaagcgagaagaagaagaagagaataaagaacagcgttgagacgtaggatatctacatcatcagggtgtagaagcatgtggaccacgacatggggatctcgagcaaggctatgggggatatgaggagtttcataaacgacatcttcgagaagctcgcccaggaatcatcgcgtcccgctaggtacaacaagaagcc

SEQ ID NO: 14561 - DNA, 330 bp, Glycine max
  Clone ID: LIB3040-029-Q1-E1-D7
gaccgcattagcactcgtctttggttctggtttatagatctctgtgaagtcgctttataacactcaacctaagatgcagaacgaggaaggacagatcaccgagctttacattcctaggaagtgctctgccacaaaccgattgattaccgctaaggaccatgcgtcggttcaggttaacattgggcatgtggatgagaatggcgtctacaatggccatttctccacttttgctctctgcggcttcatacgtgctcagggtgatgctgacagtgccctagatcgcttgtggcagaagaagaaagttgaagttaagcaacagtagacacccat

SEQ ID NO: 14562 - DNA, 232 bp, Glycine max
  Clone ID: LIB3040-029-Q1-E1-D8
ggttgtcaagcgtgccgagaaaaccctacttcgcttgcagtcacacaagaggccaatcctattcatagctcgagatgggtgaagaagtgaaggtagttgttccagaatcagtgttgaagaagcgcaagagggaggaggaatgggcgttggccaagaagcaagaactcggtgcggccgggaggaagagagccgagagccgcagacgcatctacgggggagggaagcagtacgc

SEQ ID NO: 14563 - DNA, 330 bp, Glycine max
  Clone ID: LIB3040-029-Q1-E1-D9
gaaggaagggagggaagaatagaatgggatctggaagtggaaaacacactggagagttcttcaggagaagggatgcatggaggaagcatccgatgctcaccaatcagctccgccacgccacccctggccttggcatcgccgtcgtcgccttcggtatctacctcgtcggcgaacaagtctacaataggctctatgctcccgatcctcattcgatttctcacgtgaaagccggggatcaccactaaacgtttggacggacgcactccatttcatcatcacttaataagcttgctagcatgttctcgcatcctttaatgtttaaatttcaga

SEQ ID NO: 14564 - DNA, 377 bp, Glycine max
  Clone ID: LIB3040-029-Q1-E1-E11
gaccgcgcaccacactgagaggaagagggagtgagagagagtgttcttcgtttgctaccttctcccagaaatggttacgttcaggtttcaccagtaccaggtggtcgggagggctctcccaacggaagcagatcagcatccgaagatctaccgaatgaagctctgggccaccaacgaggttcgcgccaagtctaagttctggtattttttgaggaagctgaagaaggtgaagaagagcaatggtcaagttcttgctatcaacgagatttttgagaagaacccaaccaagattaagaactacgggatatggttgcggtatcagagtaggactggttaccacaacatgtacaaagagtaccgcgattccaatctaaacg

SEQ ID NO: 14565 - DNA, 54 bp, Glycine max; identical to SEQ ID NO: 13691
  Clone ID: LIB3040-029-Q1-E1-E12

SEQ ID NO: 14566 - DNA, 231 bp, Glycine max
  Clone ID: LIB3040-029-Q1-E1-E2
gacaatagagactagagaagagagaggtgttggtgccctaatcgtgagaagaaaggaaagggaaaagaggaaaatggtgtgcataaggaaggcgacggtgaaggaccttctggcgatgcaggcgtgcaacctgttctgcctccctgagaactaccagatgaagtactacctctatcacatcctctcctgggcccagctcctctacgtcgccgaagaagagaacgggcgcat

SEQ ID NO: 14567 - DNA, 170 bp, Glycine max
  Clone ID: LIB3040-029-Q1-E1-E3
gagtgagaacaatactgttccaaaacttaatttgaggtagggcctaccctaaaatgccataacatggacctatcagtagcatttacaatagaatctattaaaaaatttttgtccaaaaaaaaaaaaggaataaaaaaaaaaaaacgggccgcccaaaaggttccaagctt

SEQ ID NO: 14568 - DNA, 254 bp, Glycine max
  Clone ID: LIB3040-029-Q1-E1-E4
tggtctgcgcctgatttctcagttctctcacacacgcattcggtgctccgaatctcagattctagggttagggttcccaatttctccaccgatcagaaaatgagttcaactggtggttctaccaagggcggaaggggcaagcccaaagcctccaaatccgtttcaagatcgcagaaagctggtctccaattccgcgttgggagaatcgcgcgattccttaagggtggggaaagacccggagcgtgttcgtgctg

SEQ ID NO: 14569 - DNA, 244 bp, Glycine max
  Clone ID: LIB3040-029-Q1-E1-E5
gatcacaattcatttcacaactcggagttgctgttgttcatcattctcttctcttcactggcacttgatagatccctctctcgcagcttccattcgtaatccagattctctttgatcggatgcatcttctgggttttgaacctgttactcctcatcaacattatttgtagagggaaaggaggtgtggtttcagtttgaaaagctttagattctcaggcaattaagggaggtcagttatggctcc

SEQ ID NO: 14570 - DNA, 173 bp, Glycine max
  Clone ID: LIB3040-029-Q1-E1-E6
aatgtttgtcacgggctatacctactaaaactttaggagtcttttggtttcagttttgttttagctatttatcatcattccttcttagcactgaagtcgaacgggacttagatgttgtagttgtatcgtgttttcaacttctagcatatgacagtttgaataaattgaaaagc

SEQ ID NO: 14571 - DNA, 383 bp, Glycine max
  Clone ID: LIB3040-029-Q1-E1-E9
gatcatatttaaaatcaaaacaacaaattttcagactcaacaagcttcgaaccaaatcttactgagaaaatgtctggtcgtggaaagggtggaaagggtttgggaaagggaggtgccaagaggcacaggaaggttcttcgtgacaacatccagggcatcacgaaacctgcgattcgtaggttagcgagaagaggtggcgtgaagaggatcagtggtttgatctacgaggaaaccagaggagttctgaagatattcttggagaacgtgattcgcgatgctgtgacctacactgagcacgctaggaggaagacggttactgctatggatgttgtttatgctcttaagaggcacggaaggaccctctatggttttggaggctaaaa

SEQ ID NO: 14572 - DNA, 265 bp, Glycine max
  Clone ID: LIB3040-029-Q1-E1-F1
ttagggttttccaattcacagagcaacacaacgaaccaacaatggcgcagcctcagccgcagtcgcagccgcagcacgggcaagcagcgctggagcaggtgcagtgcttcggtcgcaagaagaccgccgtggccgtgacctactgcaagcgcgggcgcggtctcatcaagatcaacggctgccccattgagctcgtggagccggagatcctccgcttcaaggccgtcgagccgaggcaccggttgggtaagagccgcttcgccgg

SEQ ID NO: 14573 - DNA, 390 bp, Glycine max
  Clone ID: LIB3040-029-Q1-E1-F10
ggccgctctctgaggaaaacagatagtgtgggagagagaagagcggaagagaaaatgacgaccaggttcaagaagaacaggaagaagagaggtcacgtcagcgccggacacggccgtatcggaaagcaccgcaagcatcccggaggtcgcggtaacgccggtggcatgcatcaccaccgtatcctcttcgacaagtaccatcctggtttcttcgggaaggtaggcatgcgctacttccacaaacttcgcaacaaattctacaatccgatcatcaacatcgacaagctgtggtccctcctcgcccaggaggccaaagacaaggccaccgccgacaagggcaccttgctcgatgtcacccagttcggttaccttaaggttttgggtaaaggg

SEQ ID NO: 14574 - DNA, 388 bp, Glycine max
  Clone ID: LIB3040-029-Q1-E1-F11
gagggttggttgctcttcttcctcttcctcttcctctgtgaatagggtttctgccttttttaacaacaatttcgaatcgattcgattgggtctctcaaagttttgattgcacagtttgcgaagatgcctcgtcccaaaagaaaagctgccccaccaatcacttcctctgatgttgattcgtctcttcgcaccgaaccaaagaaatcaactacaaagcaatttgatcgaatagataacttatttgagtcatatgcaaataagtcattgggtttaattgacccagacgggattgaagcactttgtaaagatgtgcatgtggaccacacacatgttagaatgctcatacttgcttggaaattgaaagctgaaaaacaaagttatttttcca

SEQ ID NO: 14575 - DNA, 172 bp, Glycine max
  Clone ID: LIB3040-029-Q1-E1-F2
ggaagttgaacttgattgacgtgtgttaatgcagagagagatatttcattgttgttcaaagtctttggtgcacttaaaagagaccagatacaagtgaaagtggatgatgaagtggaggagtatgagacaatagtggagtggggtacaactttctggttcggattgagaattt

SEQ ID NO: 14576 - DNA, 187 bp, Glycine max
  Clone ID: LIB3040-029-Q1-E1-F3
ggtttgattagggtttgtcattagcacttcttcttttcacactgccgctgcaacaatggcttcagagaagaaactttcgaacccaatgagggagataaaagtgcagaagctcgttctcaatatctctgttggcgagagtggagatcgtctcaccagagccgccaatgtgttggaacaacttagtggg

SEQ ID NO: 14577 - DNA, 122 bp, Glycine max
  Clone ID: LIB3040-029-Q1-E1-F5
taatttgggaattattgctcccatcgccattggtttcattgtcggcgctaacattttgttgggtggggccttctctgaaccggcaatgaaccccgcggtgacatttgggcctgcggtcgtaa

SEQ ID NO: 14578 - DNA, 159 bp, Glycine max
  Clone ID: LIB3040-029-Q1-E1-F6
cgcacgaagaagagcgtggagacctacgggatctacatcttcaaggtcctcaagcaggttcattgcgatgttggtagttccagcggggtcatggggcatcctgagcggcttcgagcacgacatcttcgagaagctcgctgaggaggcgtcgcgtttggg

SEQ ID NO: 14579 - DNA, 229 bp, Glycine max
  Clone ID: LIB3040-029-Q1-E1-F7
ttggcgtgtaaatattttttattataaaataacaatgatgatggtgatttggtgtatatattaattaatattataaaataacaattaatcttattctttaatagatatcatttatttttgtgtggcacacaggacaaaaagtattttttttttcgaaaagaagcactagttaggcacagttcccaggaataaagtatagccggtccagtgcgtcctgatacttcgagga

SEQ ID NO: 14580 - DNA, 168 bp, Glycine max
  Clone ID: LIB3040-029-Q1-E1-F8
tggcaaagtctccagtgctgccaaacgaactgttacagcatacgttgcttcctggtagagatatggtgaagtttaaacttcaccgtactttttggtagtcttgtttgagggcgattatgacgcacatttagggttttttactttaagtacattgtagtgcatttaagt

SEQ ID NO: 14581 - DNA, 369 bp, Glycine max
  Clone ID: LIB3040-029-Q1-E1-F9
gaaatcaagagaattctagagaagattgtgcagccaagcaggaaagattggagtaccaggcttgatgatgctctctgggcacatcggactgcctacaaagcacccataggaatgtctccttatcgggttgtctttggaaaggcatgtcatcttccagtggaaatttagcacaaagcatactgggcagtgaagacttgcaacttctctatggatcaagttggcgaggaaaggaagttgcaactgagtgagttagatgaaatccgcctagaagcctacgagaatgccaagttctacaaagaaaagaccaagaagttccatgatagcatgatagttaaaaaagacttcgtggttgggcaaaaagtgttattg

SEQ ID NO: 14582 - DNA, 172 bp, Glycine max
  Clone ID: LIB3040-029-Q1-E1-G1
ggagagagagagagagagagagaggcacttggaatccaaaaatgagagaaatcatcagcattcacataggtcaggccgggatccaggttggcaactcctgctgggaactctactgcctggaacatggcatccagcccgatggcatgatgccaagtgactcctccttcggtgt

SEQ ID NO: 14583 - DNA, 68 bp, Glycine max
  Clone ID: LIB3040-029-Q1-E1-G10
attatccaacttgctacaatgaacatagcaaatcaaacaaaaaaaaaaaggcggcccctcaagatgat

SEQ ID NO: 14584 - DNA, 385 bp, Glycine max
  Clone ID: LIB3040-029-Q1-E1-G11
ggttctagtgtgtgattgtttgttgttgtaactcgttcttcttcttttgttgttctgtgtttgtgtttgttttttctctcacctgaaaatgtcttgctgcggtggtaactgtggttgcggaagctcctgcaagtgcggcaacggctgcggaggctgcaagatgtacccagacttgagctacactgagtcaaccaccaccgagaccttggtcatgggaatggcacctgttaaggctcaatttgagggtgctgaaatgggtgtgcccgctgagaacgatggctgcaaatgtggaccaaactgctcctgcaacccctgcacttgcaagtgaagtgttgggagagcaagcttcaagcagagatagcccttaattaggaataatgataaa

SEQ ID NO: 14585 - DNA, 293 bp, Glycine max
  Clone ID: LIB3040-029-Q1-E1-G12
gactcgcagttgtattgttgaacaagggtttctctgtctgcttcttcactttctctcgtttcaatcgaaaccaaaacaaaaacatgggcagaaaattcttcgtcggtggcaactggaaatgcaatgggaccactgaggaggtaaagaagattgttactactttgaatgaggctaaagtccctggagaagatgtcgtagaagttgttgtgagccctccttttgtgttccttcctgttgtaaaaagtttggctgcgccctgatttccatggttcggcacaaaactgttgggttcg

SEQ ID NO: 14586 - DNA, 94 bp, Glycine max
  Clone ID: LIB3040-029-Q1-E1-G2
caaagtctccagtgctgccacatgaactgttacagcataggttgcttcctggtagagatatggtgaagtttaagcttcagggtattttttggga

SEQ ID NO: 14587 - DNA, 111 bp, Glycine max
  Clone ID: LIB3040-029-Q1-E1-G4
aaggttccgctgccaaaaaaccacaaaaaggtaccgcttccaaaaaaccacaaaaaggtaccgcttccaaaaaacgacaaaagggtaccgcttccaaaaaacgacagaaag

SEQ ID NO: 14588 - DNA, 344 bp, Glycine max
  Clone ID: LIB3040-029-Q1-E1-G6
ggagaattcgaatctaggatttgtttgagcgtgcgcgaaggatcatggtggggttcagaaacagatacatggtgatggaggtttttctgaaccctaatagagacaaagttggggatgcgtctgttataattacacagtttaatgtgtcaaaagctgtaagagacagcatattggtgaattttggggagtgtggtttggcttcatcattgggatcgttccaggttaagtacgtgaatccaatcactaatgtgtgtataattagggcatcaagggaggagtatcacagagtatgggctgcgattagaggggtcacaaatattggaaactgcccggtcatgtttaac

SEQ ID NO: 14589 - DNA, 220 bp, Glycine max
  Clone ID: LIB3040-029-Q1-E1-G7
ggttacggtggtgatggtggttctcgctactctcgcggtggggaaggcggtggatccgatggaaactggagaaattaggcatatgaccctgtaaattagggtttatgattaagttcaattattttaaggtgttgtctgtgtgtggtttaagtttcggtagctgtgttggtttcgtgtcgtgttcctgtggttttcgtggttgacctacaattctagttgt

SEQ ID NO: 14590 - DNA, 254 bp, Glycine max
  Clone ID: LIB3040-029-Q1-E1-G8
ggaagagtgaagagaatggctcccaagggtttaacctttctggctgtgttaatatgcgtttcagcactgtcactgagtccttctgttgcgggggaacggcaaaataatggccttgttatgaacttctacaaggaatcatgcccccaggctgaagacatcatcacagaacaagtcgagggtctctacggggcggccgcaagaacactgctttctcggggcgcaggaacatcttccatgactgtgcggttcagagt

SEQ ID NO: 14591 - DNA, 266 bp, Glycine max
  Clone ID: LIB3040-029-Q1-E1-H1
ggcgatggtgactgactgagagagaagagaaaaacaatgtcagggctgaatgaattgctgaacaaatggttaggtttatgcgacatggcgttcaacgccggctgcggagccataacctggttccccggccacatggtcgccgctatacctgccaaccgccaccgcctcaatctcgctgacctcgtcatcgaagttcgcgacgctcgcattcccctctcctccgtcaacgccgacctccatccacatctctccgctaaacgatgcgt

SEQ ID NO: 14592 - DNA, 360 bp, Glycine max
  Clone ID: LIB3040-029-Q1-E1-H10
gactcttacaaacataacacattcagatactcactcacctgtttttagtagtttcttccctattttctgttcataactcagtttgtaactatgactgctgaggttatggctcaagaggagacacacgcagctgaggttgttgttgctgttgagcccctgaaataggaaaatgttgctgaagaaaatgtgaaactaagagagtcatcactggaaacatccaaacccaaaatggtggagaaaagctcttcttacactgaagaaagcaactacctttctgatctcaacgagtttgaacgacaggctttgactgaactcaagtcacatcttgaagaagctatcttggggaacaacctttttgag

SEQ ID NO: 14593 - DNA, 366 bp, Glycine max
  unsure (1)..(366): unsure at all n locations
  Clone ID: LIB3040-029-Q1-E1-H11
gaggtttgtgatactgattgcctccctctgctgccgtccctaatctgaaggctcccgccatctgcgatcggatttcatggctccaaagaaggacaaggctcccccaccttcatccaagcctgccaagtctggcggtggcaagcagaagaagaagaagtggagcaagggtaagcaaaaggaaaaggtgaataacatggtgctcttcgatcagggtacctatgacaagctcctctctgaggcacccanatacaagctcattactcctgtcattctctctgaccgtttgatgattaatggatcacttgcaaggaaggctattagggaattgatggctataggttcaatcaggatggtgtctgcccatgc

SEQ ID NO: 14594 - DNA, 57 bp, Glycine max
  Clone ID: LIB3040-029-Q1-E1-H12
gagacctcaggtcaggcggggctacccgctgagtttaagcatatcaataagcggagc

SEQ ID NO: 14595 - DNA, 340 bp, Glycine max
  Clone ID: LIB3040-029-Q1-E1-H5
gggttctggatgctgacagtttcagtctgaaagctattccccaacgtagccgcaagcttcgccgtttgaaacagtgcctcaaccatggcagaacaaacagagaaggcttttctgacgcaaccaaatgtgtttcacagcacagagaatactgagaagggaaagagacctgcaaaaggtgggaaccgctttaggtagtccattgagcttggatttaagactcgcagggaagctatccaacgaacctacattgagaagaagtgtccctgcactgcgacggtggccatccgtagacgtatcttggctgggacatctcacaatgctaatatgaacaggactacta

SEQ ID NO: 14596 - DNA, 249 bp, Glycine max
  Clone ID: LIB3040-029-Q1-E1-H6
gacacagactttagtacagttgttgtagtgtacttatgcacgaatattaggcaatggactcttctagaacttcaactactcttgctctttttttaaccatcaatgtgcttttctttgtcatggcaagtggctgctacacttgcacacagcctaagccaaaccctatgccattcgcttatcctaatccgagtcctgccgggaagatctgcctcagggacgcacttaaggtctgaatgtgcgcaaaagtgc

SEQ ID NO: 14597 - DNA, 89 bp, Glycine max
  Clone ID: LIB3040-029-Q1-E1-H7
aagcttatggaacatgtcagtgtgatgtctgtctgctataccatgagctttagtaatctcactcactggattgataggttttgtcgaaa

SEQ ID NO: 14598 - DNA, 263 bp, Glycine max
  Clone ID: LIB3040-029-Q1-E1-H8
ggcagtgatagagataagaaaatgtggcttgtgcagctctcaaccccatttctgaacggacatggtcattccaccacccttctctccaagcacagttcggcggtgactcagacccactgggccccaccgagtttcctgcctcaaatcaatgcgatgaagacaatgcaggggagagtggtgtgctccagcagggacaagacggtggcagtggaggtggtgcggctggccgctcggccaaagtacaagaggcgcgtgaggaagaa

SEQ ID NO: 14599 - DNA, 161 bp, Glycine max
  Clone ID: LIB3040-029-Q1-E1-H9
ggcaacattgttaaccattctcttcactttaaagttacatagtttttcattgttttacttaatctacaatggctgcttcaacaatgactctctcttcatcatcattggctggccaagctatcaagcttgtcacctccacccctgaacttggtgtttgaatg

SEQ ID NO: 14600 - DNA, 140 bp, Glycine max
  Clone ID: LIB3040-030-Q1-E1-A1
gtttttaatctttatctttggtattacaacttgattgtctaagtaactgctagttcttttctggattgtattgcgattactataataatagttttaagaactcagtcattttgtttccgttgaatgaaattgattgtcag

SEQ ID NO: 14601 - DNA, 357 bp, Glycine max
  Clone ID: LIB3040-030-Q1-E1-A10
gacctaggaaaaaccgtttccaactctaccattttcccaccaaccctccactctcttcctcaaaacaatcgttaatctcttctacattgtgaagtctgatattctctaagtagacaacacaaacacacctcaatttatagcacccatctttcttttctcccacaaattcagctccattttgttacacgttcaaataataagccaagaagccaccatgatctcttcaatgaagtgcacagcctcatctctcacatgttccgctttctcaaacagaaagattcccattgcaaggccacaacttgtcacgttaccaaccattaacaacgttgaacaaaacacgggtctctctcagttgtg

SEQ ID NO: 14602 - DNA, 321 bp, Glycine max
  Clone ID: LIB3040-030-Q1-E1-A11
aaccacagcggcggtaacagaagaacaagcagagaatgggtcgagtgagaactaacacggtgaagaaatcctctcggcaggtgatagagcgtcactactcgcgcatgatcctggacttccacacgaacaataagcttctggaggaagtggcgataatcccgtccatcaggctaaggaacatgatctcggggttctcgacgcacctgatgactcgcatccagaagggccctgtgcgcggcatctccctcaagctctaggatgaggagcgctagcgccgcatggacttcgactgcgaggtctccgccatcagcaccgaccaca

SEQ ID NO: 14603 - DNA, 367 bp, Glycine max
  Clone ID: LIB3040-030-Q1-E1-A12
agggtgtgtagctccaccgagtagcagcaatgtctaagcgatgtcgcagatgatcggcagggaacaagttccgcatgtcactgggtctgccggtggcggcgacagtgaactgcgccgacatcaccggggcgaagaatctctacatcagatcagtgaaggggatcaacggaaagctgaaccggttgccgtcagcttgcctgggtgacatggttatggccaccgtcaagaatggaaagcctgatctccgtaaaaaggtgctccccgccgtcatcgtccgtcagcgcaagccgtggcaccgaaaggacggtgtttacatgtacttccaacataatgctggggtcatagtggatcacaatggtgaaatgaa

SEQ ID NO: 14604 - DNA, 126 bp, Glycine max
  Clone ID: LIB3040-030-Q1-E1-A2
gtctgcctatttttacatctaggatttacatatacaacatatatcactgtcaagattaagagtgaatttttggattatttagattagatatttcgattccaaaattaaaaaaagggataggagatt

SEQ ID NO: 14605 - DNA, 354 bp, Glycine max
  Clone ID: LIB3040-030-Q1-E1-A3
agtgtagaatcggatctgaagctctttactaggattggaacaagcgaggaacgagtgaccacaagctccgcttaagcgctcgacatttagcttaaaacatgttcatcatgtggccgagcgaagcgcacctgcgtgaagcagcctagcatcactttagataggagcagaatggatgacttacaactgaaagttcttcggatcgatatatcgtacgacgtaatggagattttgggctacgtccggtgggtcgcagaattccggacctaacaatgttcgattcgtcacatgaacgggaacggacgattccctcgtcgcgcccgttttcggggaatggctgcattcacaggcaagtga

SEQ ID NO: 14606 - DNA, 281 bp, Glycine max
  Clone ID: LIB3040-030-Q1-E1-A5
caatattatatgtgagcttgttgatcccgatggtctactaacgcagctaagggtgttgaaatcagtacatgttgatggtgttatggtagactgttggtggggaatagtggaggcacatgctccacaagagtataattggaatggctacaagagactctttcaaatggtgcgagagcttaagcttaagctgcaggttgtaatttcatttcatgaatgtggaggcaattttggtgatgatgtttgtattccactaccgcattgggttgctgaaattggtcgga

SEQ ID NO: 14607 - DNA, 371 bp, Glycine max
  Clone ID: LIB3040-030-Q1-E1-A6
agaagttttgtatttggagacacatttgtccagatatgaactttgttttactggagagaagatggtcaaggttacaccagcaacccagttgcatgaccccgtcacagaaaagtctcaaaatcaccacccacattctacaaatggtgaaaaaaatgattgtgagaatgtcatgattgatgcattcaggtggtctcgttgtaagaagcctctgccacagaaactgatgcgtacaattggcatccctttgcctattgaacatatagagttactggaggaaaatttggactgggaagatgtgcaatggtcgcaaacaggtgtttggattgctggaaaggaatataccttggcacgagtgcatttcttgtcaatga

SEQ ID NO: 14608 - DNA, 400 bp, Glycine max
  Clone ID: LIB3040-030-Q1-E1-A7
gaggcatggattcgttaccacctgcaaaacggcgtcgtgagagcaaagacggcgagactgaagcttcaacgttgtcaccggttgtgatcttcgctcacggtgccggtgctccttcctcttctgattggatgcaaagatggaagaacatgataaaggaggcactgcgcgctgtcgatgttgtcacttttgactatccttacatgtctgcgaaaaagaaggcccctcctaaggcggaaaaactggtggagtttcactcaaattttgtcaaggaaactgcaactaagtaccctggtcatcccctgatacttgcaggcaaatcaatgggttcaagagttggctgcatggtggctagcatgaaagacattaatgtttctgctgtagtatgcttgggctacccaat

SEQ ID NO: 14609 - DNA, 358 bp, Glycine max
  Clone ID: LIB3040-030-Q1-E1-A8
gggctccgccatttttcgtagctgctgttcttgcgcgtgaacaagcctcagccaaaaccatggttaagcataacaatgttatcccaaacggacacttccgtaagcactggcagaactatgtgaagacttggttcaatcagccagcacggaagacaaggagacgattggctcgtcagaagaaagctgtgaagatattccccagacctacggctggacctctcaggcccattgtacatggtcaaactttgaaatacaacatgaaagtgagaggtggaaggggattttctcttgaagaactcaaggcagcagggattcccaaaaagcttgcaccaaccataggtattgctgttgatcatcg

SEQ ID NO: 14610 - DNA, 257 bp, Glycine max
  Clone ID: LIB3040-030-Q1-E1-A9
gagaacaaaaaagagtcaagcggcgagcaatggcgacatcgctggtgcgatcgggttttcttcgtagcgccctacgaggaagagctcgtagctctcaggttcccaagcgaaactttgcttcctctggtcatcacgatgatgcatatgagacggccaaatgggagaagattacatatttaggcattgttggttgcaccggtttagccgtttataatctatcaaagggccacccgcacttcaaagaacctcctgcatac

SEQ ID NO: 14611 - DNA, 360 bp, Glycine max
  Clone ID: LIB3040-030-Q1-E1-B1
gacactgtgtttggagcagaatcagatcgtgtgttccgtacgttcgttcgttcatttccagtgtcaaacatggcgtctcagatgagcaagaagagaaagtttgttgcggacggagtgttcttcgccgaactgaacgaggttctgacacgtgaattggcggaggacggttactccggcgtggaagttagggttacgccgatgcgcaccgagatcatcatcagagccaccagaacccaggctgttctaggtgagaagggaaggagaattagggaacttacctcagtggtgcagaagaggttcaaattccccgaaaacagtgtcgagctttatgctgagaaggtcaacaacagaggcttgtgt

SEQ ID NO: 14612 - DNA, 290 bp, Glycine max
  Clone ID: LIB3040-030-Q1-E1-B11
ggcagtttcaaattttcttttccttcactttcccgagaaaaaaataacacttttcactttcttcactacgttctcacttcgatatggctcgtacgaagcaaaccgctcgcaagtccaccggtggcaaggcgccacgtaagcagctcgccaacaaggccgctcggaagtccgctccggcgaccggaggagtgaagaagccccaccgcttcaggcccggaaccgttttcgctcagggaaatccagaacgtatcacacgagcaccgcgcttcccatcaggaagcttccacttc

SEQ ID NO: 14613 - DNA, 193 bp, Glycine max
  Clone ID: LIB3040-030-Q1-E1-B2
gaacacactcatattgtatacctcacaacttccatgtcactgcccgtgtgtcgccgctatggccagtgtcatcaaccaagcctccgtcgcaattttccgggcatgtaccgctaaatcgaggctgctgagcggcacttccggtcaacttaaaccggaagtaaccttgctgccaatgaggtgccctccttcagcc

SEQ ID NO: 14614 - DNA, 258 bp, Glycine max
  Clone ID: LIB3040-030-Q1-E1-B3
gctgctttttctttctcatattttccttcattcccagtttccacacctttcccacaattcactatttctctcgccatgccatctcgacaactgcccacgtctgcaccacctcccaaccaccgcgtctcaacccctctcttcgctttcaccgcctccgtctgctctttattctttctagccctcctctgcctccggaagcgtcaaccgaacaactccatcctcgaacccccctcaaccgttcccctaccccgtcctccg

SEQ ID NO: 14615 - DNA, 382 bp, Glycine max
  Clone ID: LIB3040-030-Q1-E1-B5
gggcagcgcttgatttgaggccaggcaagccccactcaaccaccacacctctcctcgttcacgctacccctttctgctcttcttctacctttcaagttttaaaagtataaagatggcagagacattcctatttacctcagagtcggtgaacgagggacaccctgacaagctctgcgaccaaatctccgatgctgtcctcgacgcttgcctcgagcaggacccagacagcaaagttgcctgcgaaacatgcaccagaaccaacttggtcatggtcttcggagaaatcacgaccaaggccaacgttgactacgagaagatagtgcgtgacacctgcaggaacatcggcttcgtctcagatgatgtgggactggatgccgacaac

SEQ ID NO: 14616 - DNA, 383 bp, Glycine max
  Clone ID: LIB3040-030-Q1-E1-B6
tattaaaaattatttatatttttattaaggtttaattacttatttagtttctatagtttttaaacttatttattttagtctctatcgttaataagttgattttttagtttctaaaatctacattttaattcccaaacaatttcaactgttaaaattatttaactaatgaagttaaaaaaattttaataacattgatattttaggaattaaaatgtaaattgcaggaattaaaaaatatacttattaaatttcaaaaattaaaaaattcacttattaaatataagaattaaaaggaataagtttaaaaactataaaaactaaatggataattaaatcttaattaaataactttttgaatcaacattttcattaaataatagaca

SEQ ID NO: 14617 - DNA, 360 bp, Glycine max
  Clone ID: LIB3040-030-Q1-E1-B7
ggctcctcctcctccttcttcttctgccttacatcacatacttcactctcttgtttttccctttcctctcctcaaaatttcttctgattcatttaatctttactcatcaatggctctgagactgaaccctatccccacccaaaccttctccctctcccaaatggccagtctcagatttcccaggttccgcatggcctccaacctccgctccggttccaaagaagttgaaaatattaagaagccattcactcctcccaaagaagtgcatgttcaagtaagccactctatgccttctcagaagaattagattttcaaatctttggaagattgggcttagcacaacatcttgactcatcttaa

SEQ ID NO: 14618 - DNA, 417 bp, Glycine max
  Clone ID: LIB3040-030-Q1-E1-B8
ctgggatgccaaatttctcagacatcaaggccaaccttttgccagtcaaattattaaatcacttgttcacatagatcagctgatgccatcatcttagtatggattcacaacagctcttcagtttcggtggtgttactagtgcaggattaccttacatgtcttcttttcccactgttccatcgctacccaacagtctacttagatccttgaaatatgacacaggaaactcacctaattcacccttttccacttattttgattctgatactctttcagcattgagtgacggccaggagcaatacagcccaggagaaatcctctctggtgtcagctcttcactggaaaccaaccattatatgtataatagatcaatctccactttggacagtttcccattatattctgatcggaactctc

SEQ ID NO: 14619 - DNA, 381 bp, Glycine max
  Clone ID: LIB3040-030-Q1-E1-B9
gacaccatccagtactcttcttttcagcacaacctcttcatctctcccaggctttcttttctttgcaacaacactaccaaaaatgtcaccagatttcacacttttgttctccccggaactcatgcagtcccctatcatcactttccaagccactttctgtgtccttctcttcaccctcatgttcacgccgttcttcactcctggtgggcttccttgggcctgggcccggcccagaaccatcatccctggcccagtaactgccctgctcggggtcttcacgggttccacacctcacagcgctttatccaaactggcccgcacttatcacgcggaaaagctcatggctttctccatcggtttaacccggttcgttatctccag

SEQ ID NO: 14620 - DNA, 234 bp, Glycine max
  Clone ID: LIB3040-030-Q1-E1-C1
gctcctacagattcttcagcaactgcgattttggatcggaacctcttctgcggcgtagcaatgggacactccaacgtttggaattctcacccaaaaaactacggtcctggttctcgcacttgccgattgtgtgggaatccacatggattgttcaggaattatggccttatgtgctgcaggcattgcttccgtaccaatgccaaggaaattggcttcatcaattatcgctaaaaa

SEQ ID NO: 14621 - DNA, 388 bp, Glycine max
  Clone ID: LIB3040-030-Q1-E1-C11
gacacaaactttattacagttgttgtattgtaattaagcaagaatattaggcaatggagtcttctagaacttcaactactcttgctctttttttaaccatcaatttgcttttctttgtcatggcaagtggctgctacacttgcacacagcctaagccaaaccctatcccattcccttaccctaaccctagtcctgccgcgaagagctgccccagggacgcacttaagctcggagtgtgcgcaaacgtgcttaatggaccaattggtgctattgtagggtcaccaccggaccacccatgttgctcagtgctagaaaggcttcttgatcttgaagttgcggtttgcctctgcactgccatcaaagccaacattcttggcattaaccttaa

SEQ ID NO: 14622 - DNA, 377 bp, Glycine max
  Clone ID: LIB3040-030-Q1-E1-C12
gacttcaattgcaatcaaattagttcattctccttgcgcagttccctacctctcctttcacgatgcagatcttcgtcaagaccctcaccggaaagaccatcacccttgaggtggaaagctctgacaccatcgacaacgtcaaggccaagatccaggacaaggaaggaattcccccggatcagcaacgtctcatcttcgccggaaagcagctcgaggacggccgtaccctcgccgactacaacatccagaaggagtcaatccttcaacttgtccttcgtctccgtggtggcatgcagatcttcgtcaagactcccactggcaataacataaccctagaggtcgaaagctctgacaccattgacaacgtccaggccaag

SEQ ID NO: 14623 - DNA, 401 bp, Glycine max
  Clone ID: LIB3040-030-Q1-E1-C2
ggttcgtggaatgcgcaccttccctaacacccccattacaaatctctgtatttcagggttgaagattcacacattgaattgaagtttggaaatttgacacctaccccacaccatcatggcctgcatcgacaaattttgggttttcgccctcgctcttctcctcctcgcttcccctctcctccaagttgctaggtgccagtcagactctgatgatgtagtggaggctgctgaagaatcaggtgatattggcattgttggtgatgatgtccaagactttggtgatgggactttcccttctgctccaggaattgaaacaataagtgtatttccgaaaaatagtgcaagattgataacagctggagaagagtcagagctgcttgttggtgttaaaaattgatggg

SEQ ID NO: 14624 - DNA, 343 bp, Glycine max
  Clone ID: LIB3040-030-Q1-E1-C4
ggccgagcttagtagaagagaaaaggaggagcaggaggcatcaccgttaccaaacatggtgaaagggcgccaaggagagcgtgttagactttacgtcaggggttcaatacttggatacaagaggtccaagtcaaatcaatacccaaacacctcattaatccagattgagaatgtaaacactaaggaagaagttgcgtggtactgtgggaagcgtatggcttacatttacaaagccaaggtaaagaaggacggaagccactatcgctgcatttggggtaaggtcaccaggcctcatggtaacagtggtatagttcgtgctaagttcaagtccaatctgccgccc

SEQ ID NO: 14625 - DNA, 373 bp, Glycine max
  Clone ID: LIB3040-030-Q1-E1-C5
gaagtctcatctaatctataccccgtctaaatctccgagtggttgacaccgatcgaagtagcagcacacagaaaatgggcactcgagaggtgtacgaagagaaactaaggaccggaaatctccaccacgattccaacatcaaccctggcctcggttccgctcgatgccctcgctgtctctctcccctcaaacctaaatttcaaagaaggcaattgaacaacaatcccgttctgcaagaagccaatggcgtccctgggttcgggattggtggtatgcttggttttgttcatggtttcaatacaggtttacctcctcttcaaaatggtctgaagggaccgaagtggcttccttttgttgttgggattcctccaat

SEQ ID NO: 14626 - DNA, 364 bp, Glycine max
  unsure (1)..(364): unsure at all n locations
  Clone ID: LIB3040-030-Q1-E1-C6
ggatccttctacactaactaaagccgagcagcgagagagagaaaccctagcaaaaatgccggctggtcacggtttgagatcccgcaccagagattccttctctcgtcccttcaggaagaagggtaccatcgccctcaccacatacctcagaacctaccacgtcggcgattatgtcgacgtcaaggttaacggcgccgtccacaagggaatgcctcacaagttctaccatggccgcaccggtcgcgtctggaatgtcaccaaacgtgctgttggggtcgaagtcaacangcaggtcggcaacagaatcataaggaagaggattcacgtgcgtgtggagcatggtatggcatcaaggtgcactgag

SEQ ID NO: 14627 - DNA, 123 bp, Glycine max
  Clone ID: LIB3040-030-Q1-E1-C8
ggaggctactgtaatcactactcatactagtcttcgactctcattcatcattacgcacctatatcaccaatccacacagtcccatgtttcacgtttaaccattcccaccttacattccattcc

SEQ ID NO: 14628 - DNA, 337 bp, Glycine max
  Clone ID: LIB3040-030-Q1-E1-D1
gacacttggtatagtgcaggaggaacagagaaaggggatggccataacactcaacaatggcttcaagatgcctatcattggattgggcgtgtggcgcatggaaggaaacgaaatcagggacctaattctcaattccatcaaaattggttatcgccattttgattgtgctgctgactacaaaaacgaagcagaagttggagatgcgcttaaggaggcttttgatagtggccttgtgaagagagaggatctcttcattaccaccaggctttggaattctgatcaagggcacgttcttgaggcgtgtaaagacagtctcaagaagcttcagttaacgtat

SEQ ID NO: 14629 - DNA, 158 bp, Glycine max
  Clone ID: LIB3040-030-Q1-E1-D10
gatggctctgaatagaagacaatagggtaggccgttgagatggtgtcgtgtgggctaatgctcagaactgcagttctaaagtcttctgacaatattcttactagtactaaatcatttcgtattatgtgagtagtgcttggcctcttaaacgtgtgtcg

SEQ ID NO: 14630 - DNA, 305 bp, Glycine max
  Clone ID: LIB3040-030-Q1-E1-D12
gatagcaaaatcgtttctccaatttaatcaccattgtacaacccaattcccttcgtcgttttcgattaagagagcaatggcacgtaccaagcaaaccgctcgcaagtccaccggaggaaaggctccgaggaagcaattggcaaccaaagccgctcgcaagtcagccccggcgaccggcggagtgaagaagccccaccgcttcaggccaggaacggtggctctgagggagattcgaaagtaccagaagagcaccgaacttctgatccgaaaactcccattccagaggctcgtcagagaaatcgctc

SEQ ID NO: 14631 - DNA, 267 bp, Glycine max
  Clone ID: LIB3040-030-Q1-E1-D2
gatcacaacactaacacagattttgattcgattcgattcgattcagtcgaggttttaagcagcagcaagatgtctgggcgtggaaagggaagaaagggaatgggaaaaagacgaacataacgacatcgtaaggtgctccgcgacaacattcagggaattacgaaaccagcgattcgtcgtttggctcgcacgggtggcgtgaaacgtatcagccgtttgatctacgaagaaactcccagtgttctcaagatcttcctggagaatgtc

SEQ ID NO: 14632 - DNA, 362 bp, Glycine max
  Clone ID: LIB3040-030-Q1-E1-D5
gacctccacaacattgcatacccttttgagttttgattctctctcctcacataactaggtggtatcgaatatttttggggtgtgtcaaagtttgtgaaggaacttgaagaagtaaatgcatggatcgaggggaccaaatgacattacctggctctgcatcttactatatgcagagaggaatacctggtgctggaaaccaacctgtactgcacaattcacctaatattggaccattgtctaaccctaatctaccatgtcaatcaagcattgggggtggtggtaccattggatccacattacccttagagtcttcgggaatttcagctccatgtgtcaatgtgagtgctccttctgggactctg

SEQ ID NO: 14633 - DNA, 382 bp, Glycine max
  Clone ID: LIB3040-030-Q1-E1-D6
gacaacacagaacaggaacacagaaaaaatacaacccttagccaacacaaccatcatggccacctctgctattcatcaatcagcattcactggtcaaactgctctgaagcagctcaatgagttcgtccgcaagaccggtggcgccggcaaaggtcgcactaacatgcgccgcaccgtcaagagtgctcctcagagcatttggtatggccctgaccgtcccaagtacttgggtccattctcggagcagattccatcatacctgaccggagaattccctggtgactacggatgggacactgctggattatcagctgacccggaaaccttcgccaggaaccgggagctggatgtgattcacagcagatgggcaatgcttggtgcc

SEQ ID NO: 14634 - DNA, 395 bp, Glycine max
  Clone ID: LIB3040-030-Q1-E1-D8
agaaacagctggggaaagcgagggcaagttgggaatagacccacccaaaatcgcatccgaaattcctaacagaagagaaaaggaaggcatagattcacatttcacacacacacacatacgactctctctctctctctctctctgatggattcgagggagtaaaagcaagaaagcaagcatttggatttggattgagatccgcaatggcaccgaacaacaccagaaccatgggatcccatttccctcttctcgctttcctctttctctgcctcctcgcgccccttctcttcttcttcttcgcatcgccccttcacggtctcattctctcattctcaactctcacttgttttcaattattagttttgtttctagtgttggcacatccacgtagagtg

SEQ ID NO: 14635 - DNA, 391 bp, Glycine max
  Clone ID: LIB3040-030-Q1-E1-E1
gttgaacttcattgtttttggctaagcctcgaaatccagaaaaatcgtgagcgaagatgatgcacatgaccttttactggagcaggaaggtgaatctcctaatagattcatggaagaccaacgattggacggagtatctcatcactctgctcgcatgcctcgtcgttgccgccttctaccagttcctagagaatcgccgcatccgcctcaagctcatcggcgccggaaatcccttcccggcagagatcgaggccccgcttctgcgacggaagcttgccggaaaccgcgccaaggtgggcgtgaaggtagccggagcgtttctgttcgggctgagctcggcgatcgggtacttgctgatgttgtcggtgatgtccttcaacggtggggtgtt

SEQ ID NO: 14636 - DNA, 235 bp, Glycine max
  Clone ID: LIB3040-030-Q1-E1-E10
gatttcactcccatacagacgtcgaagaagttagatttgaaattgaccgagaaacaaacttgggatataagaagaatggctagtggaggaggctatggagacgcgaaccagaaggtatattacgtgttcacggtggtgctaactggtgattcagccgtggggaagtcacacagacctgcacgcttcgcgagaaatgagttcagtttggactcagacgccacagtcggcgtccagt

SEQ ID NO: 14637 - DNA, 365 bp, Glycine max
  Clone ID: LIB3040-030-Q1-E1-E11
gacacaccgtttgttctattcttaactcaacttctgctacccactctcttcttccaagtccaaccacgcttttctctacagtcatgggcaaggtcaagatcggaatcaacggatttggaagaattggccgtttggttgccagagtcgctctgcaaagagacgatgtggagctcgttgccgttaacgaccctttcattaccaccgattacatgacatacatgtttaaatacgacagtgttcacggacactggaagcatcacgatgtcaccgttaaggacgagaagaaccttctcttcggtgacaagccagtcactgtttttggacacaggaaccctgaagagatcccatgggggtcaactggagct

SEQ ID NO: 14638 - DNA, 320 bp, Glycine max
  Clone ID: LIB3040-030-Q1-E1-E12
ggttacggtaaatagcgtttcgttaacttactcagtcctctatgacggtgtgcgtgcgcaaaccctaacctagttcttctatatcggcacctctatcccctgaaccctgttccatcttccaaccatggcgaaccaagacttcgaagagcgctcgcagcaaccgcaggagctagggtacgacccgaactttgtccccgactcggtaaaatcttttgtggttcacctgtagcgtcacatccgtgaaaagaacgtgtacgagatccaccagatgtactagagctccttccagaccctctcggagcgtctcttcaaggataccc

SEQ ID NO: 14639 - DNA, 366 bp, Glycine max
  Clone ID: LIB3040-030-Q1-E1-E2
ggaaaactgaaaagtaaaggcgaaagactttaggtttggaattgggaagtagggttgttcgcgtcacgaagatgatcgaggtggtgttgaacgatccactggggaagaacgtgcgcgtgaagtgcaacgacgatcacaccatcggcgacctgaagaagctggtggcggctcacacgggcacaagagccgacaagatccgcatccataagtggtacaccatatacaaggatcacatcactctcaaggattacgagatccacgacggcatgggtctcgaactctactacaactaaacacaaggtgtgttttatgcatgatatattactatgatctgggaatgggattacgcgccaaatgtaattttga

SEQ ID NO: 14640 - DNA, 360 bp, Glycine max
  Clone ID: LIB3040-030-Q1-E1-E4
gagcgaaacagagagtgatttcagtgagtgatcggtgttcacttgatctcatcataatcgtcagcgtcaattgaagaagatgccgatcagaaacatcgccgtcggaaggcctgaagaggcgactcaccccgacacgttgaaggcggctttggctgagttcatctcaaccttcatcttcgtgttcgccggctcaggctccggcatcgcctacaacaagctcaccgacaacggcgctgccacccctgccagcctcatctccgcctccatcgcccatgcattcgccctcttcgtcgccgtctccgtcggatccaacatctccggcggtcaggtcaccccgccgtcaccttcggcgccttcgtc

SEQ ID NO: 14641 - DNA, 365 bp, Glycine max
  Clone ID: LIB3040-030-Q1-E1-E5
gacactgctacaaaaacattgaaagaaatagaaaaagcaaaactggtttctcgcatttcctccgaaacaaaccgtttcgctcgtttctcggatctgcaatggaagccccacccaaaggcgctgctggaagaagaggtgacaggaagaagtccgtttccaaatccatcaaagctggcctccaattccccgtcagccgcgtcgccaggtacttgaagaaaggccgttactctcgccgccttggcaccggcgctcccatttatctcgccgccgttctcgaatatctcgccgcagaagtgttggagctggccgggaacgctgcacgtgacaacaagaagaataggattaaccctaggcacgtgttgctg

SEQ ID NO: 14642 - DNA, 377 bp, Glycine max
  Clone ID: LIB3040-030-Q1-E1-E7
ggaaagcgcatttactagtgtttaccaactccctcacgcccccaaggccaagaaaagaaaacacacacttttttagccttccctctctctctctctttctcttctccattctccattttttttttcttcttatcacgcgtttgtgaccacaaccaagtacgaaagttgagatttttagcatacccatttccacacaatgtccaacaagtccccagttttccccatcccagacccccaacacttcagcgactatggatttgaccctcaaatcaactatttccaggtgttggaagaagccatgaagcacaagcgcgagacagcgagatccatagactccatccacttcaagctccagaagcccatatccaaggacgact

SEQ ID NO: 14643 - DNA, 375 bp, Glycine max
  Clone ID: LIB3040-030-Q1-E1-E8
ggcccttctagctttttcccagtccaagcagcctccaattcgtgccactctcttcaagatggccgttaccttctcaaatctccacacagaatcaggtctcaagtccctcgacgacttcctctctgggaaggtctacgtttctggggatcagttcacaaaggacgacatcaaagtgtatggtgctgttttggagaagccaggtgactcttttcccaatgctgccaagtggtacgaggttgtctcatctcagcttgctgcaagcttccccggcaatgctcaaggggtgagattcagtggcaaagcttctgctccagcggaggctgctcctgcgaaacctgatgcttctgctgctgaagatgatgatgaccttgatct

SEQ ID NO: 14644 - DNA, 391 bp, Glycine max
  Clone ID: LIB3040-030-Q1-E1-E9
gagggtttggttattacggttttcgctgaccggtgcgcagtcgagcctccagaagacgaatcgaaaatgccgtcgcacaagacattcagaatcaagaagaagttggcgaagaagatgaggcagaacaggcccattccctactggatccgcatgaggaccgataacaccatcaggtacaacgcgaagcgccgtcactggcgtcgcaccaagcttggattctgaggtgtatgctctgcctaggttcaatttatccaattaattagtgttttattttcttgaggcaagaacaatgttttgagtttttaatattttccatttgttcgaagactatattgtgtaaggaacttattgtagttcatactcatggcgtttgtcaactccttttaaagta

SEQ ID NO: 14645 - DNA, 391 bp, Glycine max
  Clone ID: LIB3040-030-Q1-E1-F10
ggctgacaagccaatcctttgtgtaggtgctcaaccctagtaagccgcaatggtgaagtactcaagggagcctgacaatccaactaagtcttgcaaggctagaggcgccgaccttagggttcattttaagaacacaagggaaactgcctttgcaatcaggaagttgcccttggtcaaggctaaaaggtacttggaagatgttcttgcccacaagcaggcaattccattcagacgtttttgtcgaggtgttggaaggacagcccaggctaagaatagacactctaatggccaaggacggtggcctgtcaagtcagcaaaattcattcttgatttgctcaaaaatgctgagagcaatgctgaagtgaaaggttggatgttgatgcactgtaca

SEQ ID NO: 14646 - DNA, 322 bp, Glycine max
  Clone ID: LIB3040-030-Q1-E1-F12
gctctacggcactcgttttcgttctcgttctggtttatagatctttgcgaaggaggtttacagcgctcaaccaaagatgcagaacgaggaaggacagatcactgagctttacattccgaggaagtgctccgccacaaacagattgattaccgctaaggaccatgcttcggttcagatcaacattgggcatgtggatgagaatggcgtctacaatggccatttctccacttttgccctctgcggattcatccgtgctcagggtgatgctgacagtgctctagaccgcttgtggcagaagaagaaagttgaagttaagcaacag

SEQ ID NO: 14647 - DNA, 347 bp, Glycine max
  Clone ID: LIB3040-030-Q1-E1-F2
gaggaggttctgatcttctttcttttttgtctggttccctttcttccttcaaccaatttcgagatccgaaaccggcatcagatccgatccgaaatgtacggattcgaagctctcaccttcaacatccacggcggcttcctaaaaggcaacctccgcgggcaacgcgccgggctcctcaacaacgccgattacaacaacctctgccaatgcgaaaccctcgacgacatcaagatgcacctctccgccaacgagtacgggccttaactccaaaacgaaccttccccaatggataacacaacgattgtggagaaatgtactcctaagctgggtgatgaataccagaacat

SEQ ID NO: 14648 - DNA, 390 bp, Glycine max
  Clone ID: LIB3040-030-Q1-E1-F4
gggtgcagccccttctgccctccccagccattaactgaaaagaaacaaccaaaaaaccaaaagtactacaaatttttttcagtttctccgccgccgcacaaccaccacctcctccgttcggatctccggcggacctactatccctactactactctactctatttacacggaagaacataaaactatccccctcccccaaaaaaaaccccaaagcggatcggttagggtttagttttgtaccatttcgtgtaatctaatttttcatccgtaaaaatctaattttgaggcggggagatggcggtgattcaggtgcagcatcagagtccggtgtccgcggctcctcctccaaacggcggcgtgacgaacgccccgaacaacgcgaaccagtt

SEQ ID NO: 14649 - DNA, 312 bp, Glycine max
  Clone ID: LIB3040-030-Q1-E1-F5
ggtccaaaatcctcactccagccacacgcctcagtagaccatggcctcattgggtgggttacaaaatctaagcggcatcaattttcttatcaaaaaagagggtccaaaagtcaatgcgaagttcgagctgaagccgccaccatatccactgaatggtttggagccggtgatgagccagcagacacttgagtttcattgggggaaacaccacaagacatatgtggaaaatctgaaaaaacacattgttgggacagagcttgatgggaaatcactagaagagattatagtgacatcatataattaagggtgaca

SEQ ID NO: 14650 - DNA, 67 bp, Glycine max
  Clone ID: LIB3040-030-Q1-E1-F6
ggtccaaaatcctcactccagccacaacccttcatgtggaccatgggctcaatgggtgggttacaaa

SEQ ID NO: 14651 - DNA, 383 bp, Glycine max
  Clone ID: LIB3040-030-Q1-E1-F7
gacaccatccagtactcttcttttcagcacaacctcttcatctctcccaggctttcttttctttgcaacaacactaccaaaaatgtcaccagatttcacacttttgttctccccggaactcatgcagtcccctatcatcactttccaagccactttctgtgtccttctcttcaccctcatgttcacgccgttcttcactcctggtgggcttccttgggcctgggcccggcccagaaccatcatccctggcccagtaactgccctgctcggggtcttcacgggttccacacctcacagcgctttatccaaactggcccgcacttatcacgcggaaaagctcatggctttctccatcggtttaacccggttcgttatctccagcg

SEQ ID NO: 14652 - DNA, 305 bp, Glycine max
  Clone ID: LIB3040-030-Q1-E1-F8
gggctgcgtcggtctctctcggtttcaactgtgaactgtgagctggtaatggtttcataaatctcactgcatccatggcttcggagaagatttcctcgattctcttgttttctgctgtaattttgcttgtccgtgatgctccttctgccatagctggggacatagttcacgacgacgattcaactcccaaaaagcccggttgcgagaaccagttcgttctggtaaaagtgcaaacttgggtcaatggtgtcgaggatgtttgaattttttggtgtgggtgcaagatttggcagagctattgtgtc

SEQ ID NO: 14653 - DNA, 390 bp, Glycine max
  Clone ID: LIB3040-030-Q1-E1-F9
gatcgcttctcttctcttcaaagtgaactttgcaactttgagcagaaaatctcacagtcgaaggaagaaataatcgccaatggcaattgaacacgaagacgatctcaaagacgagaagaacccacgacccctcgacgaggatgacatcgccctcctcaaaacctacggtttgggaccttattccacaagcataaaaaaggcggagaaggaaatcaaagatatggccaagaaagtgaatgacttatgtggtatcaaggagtctgatactggattagcagcaccaagccagtgggatcttgtttctgataagcaaatgatgcaggaagagcagcctcttcaggtggcacgatgcacaaagatcataaatccaaactctgaagatgccaaata

SEQ ID NO: 14654 - DNA, 367 bp, Glycine max
  Clone ID: LIB3040-030-Q1-E1-G1
ggctctgtggctctctacatttcatcattcatcggaaaaatggctctcgaggttgctgttaaggctgctgttggtgctccaaatgttctcggagattgtccattttcccaaagggtcctcttaactttagaggagaagaaaatcccttacaaactccacctcatcgatctcagtagtaaacccgaatggtttttgggtgtgaatcccgaagggaaggtgccagtggttctttttgatggcaaatgggtggctgattctgatgtgattgtggggatactcgaggaaaagtacccagaaccctctctcgtcactcctcctgaatttgcctccgtgggatcaaagatatttgggtcctttgtgagttttt

SEQ ID NO: 14655 - DNA, 312 bp, Glycine max
  Clone ID: LIB3040-030-Q1-E1-G10
ggcttttgctggaactgtgaaggatcagagcctctatgaccctcacaagtattcctctgtggaagcttttgctgatgacttgatcactctgctgaatgagatggacctcaaagctgtcacttttgttggccactccatgtcgggcatcattggttgcattgcctctgtcaaaagacctcaactcttcaagacccttattctcgttggtgcttccccaaggtttctaaattcagatgattatgagggaggctttaacagctcagatattgagcaattgctctcaaacatatggaacaactatgaaaactttgc

SEQ ID NO: 14656 - DNA, 393 bp, Glycine max
  unsure (1)..(393): unsure at all n locations
  Clone ID: LIB3040-030-Q1-E1-G11
gatgtcatagtattatcattcagtctcatctttctctcttctctctccatccaaaccctaactcccgaccctgttcccctctcgtatccgtcatgaaaggaggaaagtccaagaccgaatctaagagagccgatcccaaacttgctgtgaataagaacggagccgccaccaaggctagggaaacccgccggcaaggggaatgcagcgaaagaccctaacaagccaaagaggcctccaagtgctttcttcgttttcatggaggagttcaggaaggtattcancanagaacatcctgaaaacaaagcagtgtctgctgtgggcaaagctgctggagcaaaatggaagaccatgtctgatgctgaaaaagcaccttatgtggcaaagtctgagaaa

SEQ ID NO: 14657 - DNA, 277 bp, Glycine max
  unsure (1)..(277): unsure at all n locations
  Clone ID: LIB3040-030-Q1-E1-G12
tagcctgctggtcggccatgtgtcgtaggcaacgctctaacctttttgcggatgagctgaggtgaactctanaggtggtggcggtgtgtctattgcccgctaccggccatcccaatgctgctgtggtgtttcgccctgcgcctgcctgggggcgcagtacttcttgatgaaagctcgattagtanggggcctgatgcccttgctggaggtgacaggtactccgtagaactgacagagacccgtaattagagcttgacaactccaagaccctattgga

SEQ ID NO: 14658 - DNA, 386 bp, Glycine max
  unsure (1)..(386): unsure at all n locations
  Clone ID: LIB3040-030-Q1-E1-G2
ggttctagtgtgtgattgtttgttgttgtaactcgttcttcttcttttgttgttctgtgtttgtgtttgttttttctctcacctgaaaatgtcttgctgcggtggtaactgtggttgcggaagctcctgcaagtgcggcaacggctgcggaggctgcaagatgtacccagacttgagctacactgagtcaaccaccaccgagaccttggtcatgggagtggcacctgttaaggctcaatttgagggtgctgaaatgggtgtgcccgctgagaacgatggctgcaaatgtggaccaaactgctcctgcaacccctgcacttgcaagtgaggtgttgggagagcaagcttcaagcagagatagcccttaattangaataatgataaac

SEQ ID NO: 14659 - DNA, 367 bp, Glycine max
  unsure (1)..(367): unsure at all n locations
  Clone ID: LIB3040-030-Q1-E1-G4
ggtgtgagttgagtctgtgatgataatgatgatgatgatgtgttccatgtggatgtgggttgtccttgtggccattgctggtgcccttttagtcctaagatctatcctcaagaatgtaaattggtggctctatgaatccaaattgggtgtgaagcagtactctttgccaccaggtgacatgggatggcccttcattggcaacatgtggtcctttctcagtgctttcaagtccaaggaccctgattccttcatctcctcctttgtctccagatttggaagaactggaatgtacaagaccatgatgtttggaaatccaagtataattgtgacaacacctgaaatatgcanaagggtgcttacagatgac

SEQ ID NO: 14660 - DNA, 384 bp, Glycine max
  Clone ID: LIB3040-030-Q1-E1-G5
gacctttcacctttgacatacaacaggtgcagagtgatacgatgccgtgcctcaacctctccaccaacgttaacctaaatggcgtcgacaccacctccattctctcagaagcaaactcaaccgtctccagcaacatcggcatagccgaagcctatgtgatgactgtactgaaaggatcagtacctaaatctcatggcgggagtgagcagccaacagcttatggtgaattggtgtccattggtagtcctagccctgacgtgaccaagaaacttagtgctggcagtgcttcaagtctcgattacaagttgtctgtgacgtagtcgcgattctacgtgacgtattatgacaccaagggttccagcattggatagaatggatctacat

SEQ ID NO: 14661 - DNA, 383 bp, Glycine max
  Clone ID: LIB3040-030-Q1-E1-G6
gattgttggcttgtgctctgctcgtgcctctagggttatcatatctccatttccatttcctctctctcagtttccaagaatcttaagctatgggaaagtcttacccaaccgtgagcgctgattaccagaaggccgttgagaaggcgaagaagaagctcagaggcttcatcgctgagaagagatgcgctcctctaatgctccgtttggcatggcactctgctggaacttacgacgtgagctcgaagaccggtggtcccttcggaaccataaagcacccctccgaactcgctcacggcgctaacaacggtcttgacatcgctgttaggcttttggagccactcaaagcggagtttcctattttgagctacgccgatttctaacag

SEQ ID NO: 14662 - DNA, 362 bp, Glycine max
  Clone ID: LIB3040-030-Q1-E1-G7
gaagcacaaaccttattcaacactcatatccttatcctgtttctttcaatggaagtcatttctgcttctagcttgaatcccaacgctccgatgttcgtgccactcgcctatcggacggtggaggatttctccgaccagtggtgggacctcgttcactcctccccctggttccgcgactactggctccgcgagtgcttccaatatccccagttccaaaacgacgacgctttcgacttcgactttgacctagatctccaagatgaagatgaaatggaacgagatgaatggaaagatgtggtgtcattggggctgctgaaatggcgacgctgtggatgatgatcggcccatgcgccgaggtatgt

SEQ ID NO: 14663 - DNA, 270 bp, Glycine max
  Clone ID: LIB3040-030-Q1-E1-G8
gacacatgcccatcatcaaagtttcttcctttctctgctctttgtcttctctgacacatttggggccttgttgagtgtgtttttgcgagagggtatggcgaaggacgttgaggttgctgaacgttgctccttccctgggaaagactaccaagaccctccaacagcaacactcattgatgctgaagaactcacaaagtggtccttttacagggctcttaatgctgagttcaatgccactttgctcttcctctacattaatgtgctcacagt

SEQ ID NO: 14664 - DNA, 389 bp, Glycine max
  Clone ID: LIB3040-030-Q1-E1-G9
gggcagccaaagaaaagaaaatcctcaattttctgagcagccaaacactctctctctgtctctcgaaaattctcagtttgcagagaaaatctgaatcatgtcgtggcaagcgtatgtcgacgatcaccttctgtgtgacatcgaaggtaaccacctcactcacgctgctatcatcggccaagacggcagcgtttgggctcagagtaccgacttccctcagttcaaacctgaggagataactgccatcatgaatgactttaatgagcctggattacttgctccaactggattgtatctcggtggcaccaaatatatggtcatccagggtgaacccggtgctgtcattcgagggaagaagggtcctggtggtgttactgtgaagaagaccg

SEQ ID NO: 14665 - DNA, 397 bp, Glycine max
  Clone ID: LIB3040-030-Q1-E1-H1
acctacattgtacattttttatgcaacaccaaaacacgaaaacaaacttccactgccgtaataaaaacattatctgccagcgagggtttttttaataaaaattgcgcaatgtcagctgaaaaatatcagtcgcggtgaataatatttttttgccgtgttgggctaatgttttcctggccgaataaatgggaacatgccagtttcggccgtaacaaaacgtcggttgagctcgcacaaaaaaacctagccgacctacattgttcattttttatgcatcaccaaaacaagaaaacttcctctgccgtaaaaaaaacattatctgccggcgagcgtttttaaataaaaattgcgcaacgtcggctgagaaatatcagtcgcggctatttcacgaccgatg

SEQ ID NO: 14666 - DNA, 263 bp, Glycine max
  Clone ID: LIB3040-030-Q1-E1-H10
ggcagtttcaaattttcttttccttcactttcccgagaaaaaaataacacttttcactttcttcactacgttctcacttcgatatggctcgtacgaagcaaaccgctcgcaagtccaccggtggcaaggcgccacgtaagcagctcgccaccaaggccgctcggaagtccgctccggcgaccggaggagtgaagaagccccaccgcttcaggccgggaaccgtggcgctgagggaaatcagaaagtaccagagagcaccgagc

SEQ ID NO: 14667 - DNA, 397 bp, Glycine max
  Clone ID: LIB3040-030-Q1-E1-H5
gattgttggcttgtgctctgctcgtgcctctagggttatcatatctccatttccatttcctctctctcagtttccaagaatcttaagctatgggaaagtcttacccaaccgtgagcgctgattaccagaaggccgttgagaaggcgaagaagaagctcagaggcttcatcgctgagaagagatgcgctcctctaatgctccgtttggcatggcactctgctggaacttacgacgtgagctcgaagaccggtggtcccttcggaaccataaagcacccctccgaactcgctcacggcgctaacaacggtcctgacatcgctgttaggcttttggagccactcaaagcggagtttcctatttttgagctacgccgatttcttacagttggctggcgttg

SEQ ID NO: 14668 - DNA, 261 bp, Glycine max
  Clone ID: LIB3040-030-Q1-E1-H6
ggcagaatctggggttgctcctgctttggccagggctctcagctctgaaagattggtaccgattccggatgtgagccaaaacagctttcatttgaatcccctgtttttcctttcgggaaagttaacaatatgtgggagtttctgctgtgaattgaattcgagtcgtagcttctggattcggtgcttgctgctttggtggcataagttattggactaagtgagatgatacgatttgagtgcaaaggagacttacactgtgtg

SEQ ID NO: 14669 - DNA, 383 bp, Glycine max
  Clone ID: LIB3040-030-Q1-E1-H7
gactcctttccgtcacttttggggaagaggtcgagtttcacagcagcaatggtgtacgtcaaggctcagaaatcaaaagcctacttcaagagatatcaagtcaagttcaagagaagaagagagggaaaaaccgattaccgtgccaggattcggttgattaatcaggacaagaacaaatataacactccgaaataccgatttgttgttcgctttagcaacaaggacattgttgcacaaataatatctgctaacattgctggcgatattgttcttgctgcagcatatgcacatgagctgccacaatatggtcttgaagtagggcttacaaattatgctggagcttaatgcactggtctcctgttggcccgaagagtcctcaatac

SEQ ID NO: 14670 - DNA, 269 bp, Glycine max
  Clone ID: LIB3040-030-Q1-E1-H8
acacacagagcggttctcataatttggagaatccgaaaaagacgttaaagaaagtcccattcccactaccgaagcaaattaagaagatgaagcagcagagagtggagtttatgggcatgggcatgggcatgggcatgggcctgggccttttggtggtgatgatggcatgtgggtcggcgagtggtgcggatgatttgggcaccaagttgtcagcggtgattcagaaggtaataccgtgtatggagttcgcgaaggggaaggaagaaacg

SEQ ID NO: 14671 - DNA, 379 bp, Glycine max
  Clone ID: LIB3040-030-Q1-E1-H9
gacagcgaaacagagagtgatttcagtgagtgatcggtgttcacttgatctcatcataatcgtcagcgtcaattgaagaagatgccgatcagaaacatcgccgtcggaaggcctgaagaggcgactcaccccgacacgttgaaggcggctttggctgagttcatctcaaccttcatcttcgtgttcgccggctcaggctccggcatcgcctacaacaagctcaccgacaacggcgctgccacccctgccggcctcatctccgcctccatcgcccatgcattcgccctcttcgtcgccgtctccgtcggcgccaacatctccggcggccacgtcaaccccgccgtcaccttcggcgccttcgtcggcggcaacatcacct

SEQ ID NO: 14672 - DNA, 371 bp, Glycine max
  Clone ID: LIB3040-031-Q1-E1-A10
ggttctaatgtgtgattgtttgttgttgtaactcgttcttcgtcatttgttgttctgtgtttgtgtatgttttttctctcacctgaaaatgtcttgctgcggtggtaactgtggttgcggaagctcctgcaagtgcggcaacggctgcagaggctgcaaaaatgtacccaagacttgagctacactgagtcaactaccaccgagaccttggtcatgggagtggcacctgttaaggctcaatttgagggtgctgaaatgggtgtgcccgctgagaacgatggctgcaaatgtggaccaaactgctcctgcaacccctgcacttgcaagcgacgtgttgggagagcaagcttcaagcagagatagcccttaat

SEQ ID NO: 14673 - DNA, 215 bp, Glycine max
  Clone ID: LIB3040-031-Q1-E1-A4
agaagaagaaagagttatatttcccactaaggaaatatgctatcaaggtgtaactttagagcaatcttatcggttaattggacatttacctcctttatactcgacaagttttgatatatctcgttttgtagtttcatgtttattgcttattggctgtgttaaacttcatgtcttctttacacctggggtttcttgaagctaccaggatttatgga

SEQ ID NO: 14674 - DNA, 384 bp, Glycine max
  Clone ID: LIB3040-031-Q1-E1-A6
gatctcattgctctgcattgcaacactcacacaccaatggcactcagacccatcgacaacgctcttccgacaacaaccccagagagacccaagagacaagctaaaatcgctgttgcaacccagagacaacaagatcgtgcttccgtcaacggcgaaaacgtagttccattgccatcatctgaggatgccactgttgactatgtctcctccgacaaccttaaacccttggcggaccccgaagttaagattcagagtttggtggaagatttggattcgaaaaattggatcaaggtttgtgaatcgttgaatgatgttaggcgcttctcgttactccactcctctcgtcgagtcccaatcttgggtaaaattgtgttgggtgtgggg

SEQ ID NO: 14675 - DNA, 393 bp, Glycine max
  Clone ID: LIB3040-031-Q1-E1-A8
gacttgcggctgcagcagagaagcactcatcattcttcgtttgtctaagatccgccttctctgaattgtaaaaatgtcgctcggagaaactgcttgttcatacgcagctctcatccttcatgaagatggaatcagtgtaactgccgacaagatcagcaccttgttggaaactgcaaaggttcaagtagatacctattggccaaccttatttgctaaacttgctgagaagaaaaatcttggcgatttgatagccaatgcagcaggcggtggtgcaccagttgctgttgcagctgcccctgttgctgcctcaggtggtggtggtgctgctgctgccgccccagctgctgaggagaaaaagaaggacgaacctgaagaagagagtgatgatgatat

SEQ ID NO: 14676 - DNA, 331 bp, Glycine max
  Clone ID: LIB3040-031-Q1-E1-A9
gaaagcaatctcaacttccaagttaggtcactcttccagatggcgcgtacaaagcaaactgctcgcgagtccaccggcggcaaggctccccggaagcagctggcgacgaaggccgctcggaagtctgctccggcgaccggcggagtgaagaagccgcacaggttcaagcctggaacagtggccctgagggagatcagaaagtaccagaagagcacggagcttctgatccgaaagcttccgtttcagcgtttggttcgtgaaatcgctcaagatttcaaaacggatctgaggtttcagagcagtgctgtttcggcgctccaggaagctgctg

SEQ ID NO: 14677 - DNA, 380 bp, Glycine max
  Clone ID: LIB3040-031-Q1-E1-B11
gagaacaaaacacacagagtcttttctgtttttatacaaacctcatgtaggtgggagagagagtgtctttcttggctcatagcatagcatcactatggctcttctgagtcgagcctcttcacgcttccctcagctggtttcccctcaaagagttgtttccctccacacaacgctcccatctcttaacgcatcaacatccacacccacgcccgccccatatgccccgccaccgcctccgtccgcttcccctcccgccggcgtgtcgaaggcggcggagttcgtgatctcgaaggttgacgatctgatgaactgggcccggcgcggctccatcctggcccatgaccttcggcctcgcctgctgcgccgtcgaaatgatgcac

SEQ ID NO: 14678 - DNA, 253 bp, Glycine max
  Clone ID: LIB3040-031-Q1-E1-B2
gtgacattttagattccaatgcacataaaatttatgtatataaagatggacactgaaatcaaatcaggcatttcatttagtcctttgtactgtatactagtagtatgttgctggccatcatttgttgaaaacttaaaatgttagaaatagtacaagggtgacaaattgtaataatgtatttatcagaagagacgaagagaaagagggtgacaaggagaagagcactaggagagaagaaaatggaggggaggat

SEQ ID NO: 14679 - DNA, 356 bp, Glycine max
  Clone ID: LIB3040-029-Q1-E1-A10
ggagaataaggatcaagcggcagacgtggcttcaaattggggaatccgtctattcggcaacatagtcgacacacggagcattcggtctgttcatcaccgtcaccgttgcgcgcaccctctgttctaacgactcctaaatagcttgagactttgcttccacttcatctttcccagatcgttgcaccctttgcttccatatgcacacgtctgcgccgttcactgtctgcatggaataagcatcaattcacctgtttgatttaccacatcacatggtatcacatgcaacagattgatgtctcaacaagcatgcctacttcacacatgatgaggactgttctcaacgttgtcgatatctc

SEQ ID NO: 14680 - DNA, 406 bp, Glycine max
  Clone ID: LIB3040-026-Q1-E1-H2
gagggtttttgtcgtcgctactaagagttgctgcttcttcagccactccgcacctcgcagcctctgtgccctcaacaaccatggctgaaatcgaagctaccgttccagatcccacccaaatcgacgtcaaactcttcaatcgctggagcttcgaggatgttgaggttaatgatatgtctctggctgattacattggagtgtccccatcaaagcatgctacatatgttcctcacactgctggtaggtactcagtgaagaggttcaggaaagcgcagtgccccattgttgagaggctcaccaactctctgatgatgcacgggaggaacaatggaaagaagctcatgggtgtcaggattatcaagcatgccatggagatcatccacttgctcactgacctgaacccaat

SEQ ID NO: 14681 - DNA, 402 bp, Glycine max
  Clone ID: LIB3040-026-Q1-E1-H3
aaagcagtcatcaaagaaactctgagattacatcccgcaactcccgtattgattccaagggaatcaatgcaagacaccaaagtgatgggttatgacattgcagctggcacacaagtactagttaacgcgtgggcgatttcggtggatccttcatattgggatcagcctctggagtttcaaccagagagacacttgaacagttcaattgatatcaaaggacatgattttcaatttatcccttttggagctggaaggagggggtgtcctggaatagcatttgccatgcttctgaatgagttggtccttgcaaacattgtgcaccaatttgattgggcagttcctggtggacttttgggggaaaaggcattggatttgtctgaaactactggattgtctgttcac

SEQ ID NO: 14682 - DNA, 413 bp, Glycine max
  Clone ID: LIB3040-026-Q1-E1-H4
ggtgtagtataggattctcttctttattccttttgtaatttcattcattcttaatctttgtgaaaaataatgttcatcgagaattttaaggttgagtgtcctaatgtgaagtacaccgagactgagattcagtccgtgtacaactacgaaaccaccgaacttgttcacgagaacaggaatggcacctatcagtggattgtcaaacccaaatctgtcaaatacgaatttaaaaccaacatccatgttcctaaattaggggtaatgcttgtgggttggggtggaaacaacggctcaaccctcaccggtggtgttattgctaaccgagagggcatttcatgggctacaaaggacaagattcaacaagccaattacgttggcccctcaaccaagcctcagctatccgagttgggtcc

SEQ ID NO: 14683 - DNA, 389 bp, Glycine max
  Clone ID: LIB3040-026-Q1-E1-H5
attgtagaactgaacaagggtttctctttctctttctctgtctgcttcttcactttctctcgtttcaatcgaaaaaaatcatgggcagaaaattcttcgtcggtggcaactggaaatgcaatgggaccactgaggaggtgaagaagattgttactactttaaatgaagctaaagtccctggagaagatgttgtagaagttgttgtgagccctccttttgtgttccttccttttgtaaaaagtttgctgcgccctgatttccatgtctcggcccaaaattgttgggttcgcaaaggtggtgcttatactggagaggttagtgctgaaagtgcttgttaatttgggaattccttgggttaatagtggtcactctgaacggagggagctttt

SEQ ID NO: 14684 - DNA, 231 bp, Glycine max
  Clone ID: LIB3040-026-Q1-E1-H6
agggacaccatccagtactcttcttttcagcacaaaatcttcatctctcccagactttcttttctttgcaacaacactaccacaaatgtcaccagatttcacacatttgttctccccgggaaacatgcagtcccctatcatcacattccaagccactttctgtgtccttctcttcaccctcacgttcacgccgttcttcactcctggtgggcttccttgggcctgggcccg

SEQ ID NO: 14685 - DNA, 79 bp, Glycine max
  Clone ID: LIB3040-026-Q1-E1-H7
cgggactcaccacttcagaacactcactacacacagcacaaagcaaagctcatccttgagttaaaaacatggcagcagc

SEQ ID NO: 14686 - DNA, 141 bp, Glycine max
  Clone ID: LIB3040-026-Q1-E1-H8
gaatgcgcaatccaagcctaagctccgtatacaataacatgggacaacaccacacgatcccgatactatcgcgttcgtcttcgggatcggagtcatcatcaaaagggacagtccgggggagtcgtaattcatagtcagaag

SEQ ID NO: 14687 - DNA, 341 bp, Glycine max
  Clone ID: LIB3040-026-Q1-E1-H9
gatcactctcacgcttctgattattcctcttcccattctagggttcccaaatggacgctggcggaaagatcaagaagggcgcccgaggaagaaagggcggcggccctaagaagaagccggtttcaaggtccgtcaaggccggtctccaattccccgtcggaagaattggccgttatttgaagaaatgaaggtacgcccagcgtgtcggtaccggtgctcgcgtttacttggccgcagttctcgagtacctagctgctgaggtgcttgagttggctgggaatgctgcacgtgacaacaagaagaacaggattattccgagacatgtgctgttggctgtaagg

SEQ ID NO: 14688 - DNA, 386 bp, Glycine max
  Clone ID: LIB3040-027-Q1-E1-A1
gatgccgaaaagtagtaccaagatggcttcagttgtgtatctcctctttggcttccatctcattgttatcatgtcaagttccttacccgcaactagtgaagtgtttgcaaaacagtatccatccacagaacccgtggaagaaaaactcacccaactccacttctatttccataacaacataacgggggaacacccaactgctatgaaaactgttttgcctcctaaggggtccattcatggttttggggctacttacatgatggatgaccctctaactgaaggaccaagtccaacttcaaagcttgtgggaagatctcagggaatatacgctttggcttcacaacatgagcctgggttgctcatggtgacaaattttctcttcactt

SEQ ID NO: 14689 - DNA, 349 bp, Glycine max
  Clone ID: LIB3040-027-Q1-E1-A10
gactgcgaaccagtagggactcccattccgactcttagccgccgatctctcagggcttgcatcttctcagctgtgaagatgtacacatcaaggaagaaaatccacaaggataaggatgctgaaccaactgaatttgaagagtcggttggacaggcattgtttgatctggaaaataccaatcaggagcttaaaagtgatctgaaggatttatacataaactcagccgtgcaagttgatgtttctggaaaccgcaaggctgttgttattcatgtcccttacagattaaggaaaggtttccgtaagattcatgttaggcttgtcagggagcttgagaagaagtttagtggca

SEQ ID NO: 14690 - DNA, 195 bp, Glycine max
  Clone ID: LIB3040-027-Q1-E1-A12
gagcgaaacagagagtgatttcagtgagtgatcagtgttcacttgattacaacaaagtcgtcagagtcaattgaagaagatgccgatcagaaacatcgccgtccgcaggccggtagaggcgacgcaccccgagacgttgaaggcggatttcggcgagttcatcacaaccttcatcttcatgtgcgccggctcaag

SEQ ID NO: 14691 - DNA, 386 bp, Glycine max
  Clone ID: LIB3040-027-Q1-E1-A2
acatccacacatttatagaacagaaggaacacgtatccacaaagtacttcatgaataattcttcattcagagttgtggccactggtggcaagaagatcaagactgacaagccttatggaattaatggtggcatggctttgagggaaggagttgatgcatctggcaggaaaggaaagggaaagggcgtttaccagtttgtagacaaatacggtgctaatgtcgatggttacagtcctatctacgacaccaaggactggtctccaaccggtgatgtctacgctggcggtaccactggcttggctaactgggctgtgactctacttggtcttcatgctggtggtgcacttcctgtctacaacacaagtgctttggcgcaataaaccttg

SEQ ID NO: 14692 - DNA, 311 bp, Glycine max
  Clone ID: LIB3040-027-Q1-E1-A4
aaggtatgtagaagatattttccagatcgtcaatttactttcgttttttaaaaaaattttggttggggttgctcataaatgtatgatatggtttgtaatttgaatagtcactgtcgttatttctgcaagcgtacttttaatgtatcaaaagttttcctttctagcatctatgccatcagttgtggctgggctttgtatatcctaggcaagtttgcatttgtgttttggacaaaatcaattgatacgtttaagtgtgtataaattataatacatgtcatacaaaataaatgacatcagcgagaaggaaaaag

SEQ ID NO: 14693 - DNA, 287 bp, Glycine max
  Clone ID: LIB3040-027-Q1-E1-A5
gaaagtggacagaagagagcgtcctagtcgcaaccctaataagaagaaccacagcttcaagcgagtgacatccaccagccatgggtcgtatgcacagccgcggtaagggtatatcctcttctgctttgccctacaaaaggacaccccctagctggctcaagatctcttcgcaagatgtggaagaaaatatctgcaagtttgcgaagaagggtttgaccccgtctcagattggtgtcattcttcgagattctcacggtattgctcaggtcaacagcgtcactggcagc

SEQ ID NO: 14694 - DNA, 336 bp, Glycine max
  Clone ID: LIB3040-027-Q1-E1-A6
gatacctaaaaattgtaccgatatggcttcacttgtgtgtctccttttttccttgcatttcatggttatcatgtcaggttccttaccagcaaatagtgaagtgtttacaaaagagtctcctatgtctctatccacaaaacccgtggaaagactcacccaactccacttttatttccataacaacagaatgggggaacacccgactgctatgaaaattgttgagcctcctaaggcgtccatttctggttttgggactatttacatgatggatgaccctctaaccgaaggaccaagtccaacttcaaagcttgttggaagatgtcacggaatatatgc

SEQ ID NO: 14695 - DNA, 297 bp, Glycine max
  Clone ID: LIB3040-027-Q1-E1-A8
aaatggagtctcactgtcatacaatgttggacggaaatttgaatttctattcaaatttcaccgtcactctgaaggttacattctaaagtcaactttagagccacgatttcactcattaagattatcaaatttcagcaattcgttcagcccacgaattccaacatcaagttcaggaatcaccatgaagtgtaccttggtgtcaccatgcatgtaaaccatgaatggtatacacacagtgtgactataagatgtggacatgtaatgtatcacacaaatgctcagctcggacttacgttg

SEQ ID NO: 14696 - DNA, 321 bp, Glycine max
  Clone ID: LIB3040-027-Q1-E1-B10
ggggtctgagagaaaccctagctagccacaatgcagatattcgtgaaaaccctaacggggaagacgataaccctagaggtagagtcatcggacacaatcgacaatgtgaaggcgaagatccaggacaaggagggcatcccgccggaccagcagcgcctgatcttcgccggtaagcagctggaggacggccgcaccctcgccgactacaacatccagaaggagtccacgcttcacctcgtcctccgcctccgcggcggcgccaagaagcgcaagaagaagacctacaccaagcccaagaagatcaagcacaagcacaagaaa

SEQ ID NO: 14697 - DNA, 356 bp, Glycine max
  Clone ID: LIB3040-027-Q1-E1-B11
ggttctagtgtgtgattgtttgttgttgtaactcgttcttcttcttttgttgttctgtgtttgtgtttgttttttctctcacctgaaaatgtcttgctgcggtggtaactgtggttgcggaagctcctgcaagtgcggcaacggctgcggaggctgcaagatgtacccagacttgagctacactgagtcaaccaccaccgagaccttggtcatgggagtggcacctgttaaggctcaatttgaaggtgctgaaatgggtgtgcccgctgagaacgatggctgcaaatgtggaccaaactgctcctgcaacccctgcacttgcaagtgaggtgttgggagagcaagcttcaagcaga

SEQ ID NO: 14698 - DNA, 259 bp, Glycine max
  Clone ID: LIB3040-027-Q1-E1-B12
gctacttctcaagaaaattagggtttgcagtcactgctttgtttagatcagaaccagatcgtgttctcttcttccattggcaaacatggcaactcaaatgagcaagaagagaaagtttgtggcggatggagtgttcttcgccgaactgaacgaggttctgacacgtgagttggcggaggacggttactccggcgtggaggttagggttacgccgatgcgcaccgagattatcatcagagccaccagaacccaagccgtt

SEQ ID NO: 14699 - DNA, 153 bp, Glycine max
  Clone ID: LIB3040-027-Q1-E1-B2
gtgctttcctagtcttttctaatccagtgctgtgtagtgataaggaggacattgtattcaagggaatcaccagctacaggcaaccacggaccctggaacccctgacccaattttcaaaggcaccatttttggctaataaatttccaaagaaat

SEQ ID NO: 14700 - DNA, 285 bp, Glycine max
  Clone ID: LIB3040-027-Q1-E1-B3
gagcaacatggtgaagctggtggagagatttacttgccagaagcttacgttagaaccaagaggactacttaatggagcaaatcagttggaagaacttgtaactagcttcccaactggccttaccgagtgtggagaagcaataacaagccttaagaataagagaacgaatactggttgtgaagaatgtccaagggttaagaaatccgtccttaatcaacctgtgtggtttggtaatcagttctcaacaataaactgctctgggaatccaatttcacgttcaatgcc

SEQ ID NO: 14701 - DNA, 266 bp, Glycine max
  Clone ID: LIB3040-027-Q1-E1-B5
taggtgtgcaatttgtccatgtcaggggtcaatcgtaggttccatctgccatacctacccatgcactataccaaaccttaccaatccatttctaaatctcctccttttttcccccgggaggcttatccaatcaatcggtccattttccttattagctttcatcaatcaccggcttcatcttaaaggccaaccgttacctccccactctaaacctctcaacactttcccataaacaaccccatgattcctttccacaattctcccta

SEQ ID NO: 14702 - DNA, 260 bp, Glycine max
  Clone ID: LIB3040-027-Q1-E1-B7
ggctgcaagggatcaactgaggagagtgagagaaaagagaagagaagatgacaacacgcttcaagaagaacaggaagaagaggggccacgtcagcgctggccacggtcgaatcggaaagcacaggaagcaccctggaggacgcggtaacgccggaggcatgcaccaccacaggatcctcttcgacaaataccaccctggttcttcggcaaggtaggaatgcgctattttcacaagcttcgcaacatattctactctccga

SEQ ID NO: 14703 - DNA, 393 bp, Glycine max
  Clone ID: LIB3040-027-Q1-E1-C1
ggacgggaagaaacgcatcgagcgtggagaaagagaaggatgatgaggttaaggtggagtgtactcgtaatggtcacgttcgctgtttcactgttttggcttggacccctgcaagtcaaagcctctaattctgtttccgccttcgttcaaaacgccatctactccaacagaatcgccgttttctccaaatcctattgcccctactgtttgcgcgccaaacgcttgcttgctgaactcaatgaaaaaccttttgtggtggagctcgatttgcgagatgatgggtttcaaattcagagtgttcttctggatttgatacgtagaaggacagtcccgcaagtgtttgtgaatggcaagcatattggtggatccgatgatctcagtgctgccgtccaa

SEQ ID NO: 14704 - DNA, 381 bp, Glycine max
  Clone ID: LIB3040-027-Q1-E1-C11
gcagcaactcattctgtttcttcagtttggtataactttagccgaggtcaggaggagcactagctaagttcacaatttcaaaatggctaggggactaaagaagcatttgaaaaggctcaatgctcctaagcattggatgcttgacaaactgggtggtgcatttgcgcctaaaccctcatctggaccacacaaatcgagggagtgcctccccctcattcttattctgcgaaaccggctgaagtatgctctgacataccgtgaagtcattgctattctgatgcagcgccatgttcttgttgatggcaaagtcaggactgacaagacttaccctgctggtttcatggatgttgtttcaatcccaaaaacaaatgagaacttccg

SEQ ID NO: 14705 - DNA, 381 bp, Glycine max
  Clone ID: LIB3040-027-Q1-E1-C12
gacccctcctctcgtcgaaactctccgaccccatctccgaattcgcctccggcatcgtaccatgtaacgcctcgccggtacagttcagtttctttcctcccctaaccctaatcttcgcgttttctaattttcgcgcagttctctctgtaacacatccgcgattcgcttcttcttccgtacatggctcaaccagacactctcactatcactcccaccagttctaaggatgaaagggaatccttgaagaatgacactccaattgacaacaatgcttgtaataattctacagatgaaagggaatccttgaagaatgacactccaattgacaacaatgcttgtaataattctacagatgaaagggaatccttggagaatgacact

SEQ ID NO: 14706 - DNA, 388 bp, Glycine max
  Clone ID: LIB3040-027-Q1-E1-C3
gacctaaaaattgtaccgatatggcttcacttgtgtgtctccttttttccttgcatttcatggttatcatgtcaggttccttaccagcaaatagtgaagtgtttacaaaagagtctcctatgtctctatccacaaaacccgtggaaagactcacccaactccacttttatttccataacaacaaaatgggggaacacccgactgctatgaaaattgttgagcctcctaaggcgtccatttctggttttgggactatttacatgatggatgaccctctaaccgaaggaccaagtccaacttcaaagcttgttggaagatgtcagggaatatatgctgaggcttcgcaacatgaacctgcgatactcatggtaacgaatttgttcttcac

SEQ ID NO: 14707 - DNA, 317 bp, Glycine max
  Clone ID: LIB3040-027-Q1-E1-C4
gacagcacaatagaacgcgcacgctctcatttgcgcgccgtcttttgttctcgcatcgcatagacactatcgttcgtctcgtattcgccgattctcgccaggctgaaagcgagatccgacggtaaagacgcagatagcacgttgaaacagaaaggcgctggagctgggatgaaacaatcgaggaaagctgcgaaagaccctaagcaaccgaaaatgattacaagcgcattgttctgatttatgtctgagttaagagagcaattcaggaaggagcatcataacaacggatccgtcgatgttgtcggcaaagctggtgg

SEQ ID NO: 14708 - DNA, 395 bp, Glycine max
  Clone ID: LIB3040-027-Q1-E1-C6
gaggcgaaagagaagatggccaccgttccagggcagctcgtgtgggagatcgtgaagaaaaacaactcctttttggtcaagcagttcggaagggggacccagagcgtcgaattcagcagagagagcaacaatctctacaacctcaattcgttcaagtactctggtttggcaaacaagaaaactgttacggtacagcctgagggtaaagatcaggctgtgttgttggctacaacaaagacaaagaagcaaaacaagcctgctgcattgcttcacaaatctgtgatgaagaaggagttcaggaggatggcaaaggctgttgaaaatcaggtggcagaaaattactacaggcccgatctcaagaaagccgcccttgccaggttgagtgctgttcacag

SEQ ID NO: 14709 - DNA, 386 bp, Glycine max
  Clone ID: LIB3040-027-Q1-E1-D1
tgggagtttgcgtttggcgtaagtggaagaagaagagaaaagagagagaagggtaaggtaaccctagagtggtgaatcgaatctgcaaagatggaagctgcttctcgaagaagaggtggaggcattttcgaaagcctctacacggtcgttatgcgtcgcaactctgtctacgttaccttcgtcatcgctggcgccttcctcggagaacgggctgtagattatggagtccacaagctctgggaggctaataatgttgggaaacgatatgaagacattcctgtgctaaggcaaaggcagtcagaatagtgaccagcttgttagccattttgaagttttattattttcatgaaaatttgaagtgattaagagctggaagcagtttccat

SEQ ID NO: 14710 - DNA, 370 bp, Glycine max
  Clone ID: LIB3040-027-Q1-E1-D10
gctagtggcagtgaccaaactccatttctcactcgccgtcgtctcttccgtctagggtttctcctcttcacaaaaatggttgccgcaaaaaaaaactaagaagacccatgagagcatcaacaacaggctcgctctcgtcatgaagagtggcaaattcaccctcggttacaagaccgttctcaaatctcttaggagctccaaagggaaattgattatcattgctaacaactgcccccctttgaggaagtcagagattgaatactatgctatgttggcaaaggttggggttcatcattacaatgggaacaatgtggatttgggcactgcatgtggcaaatattacagagtgtgctgccttaacattattgat

SEQ ID NO: 14711 - DNA, 364 bp, Glycine max
  Clone ID: LIB3040-027-Q1-E1-D11
gacttcaattggaatcagattatttcaatctcctagcgcagttccctagttctcccttcaatatgcagatcctcgtcaagaccctcatcggtaagaccatcacccttgaggtggaaagctctgacaccatcgacaacgtcaaggccaatcatccaggacaaggaaggaattcccccggatcagcaacgtcccatcttcgccgagagagcacctcgaggacggtcgtacccatctccgactacaagatccacaatgagtcaatccttcaccgtgtcctacgtcaccttggtggcaggcagatcttcgtcaagactctcactggcagtaccattaccctatacgtctagagctctgacaccattga

SEQ ID NO: 14712 - DNA, 397 bp, Glycine max
  Clone ID: LIB3040-027-Q1-E1-D3
gtcccgtcgtcgcaggcgcagagtagagcagcacagaagagggaaaacggcaccgccgccgtagaagaaaacaaccatggtgcacgtctccttttacaggaactatgggaagacattcaagaagccgcgtcgtccgtacgagaaggagcgtctcgacgcggagttgaagctggttggtgagtacgggcttcggtgcaagagagagctgtggagggtgcagtacgcgctcagccgcatccgcaacaacgcgcggaacctcctcaccctcgacgagaagaacccgcgccggatcttcgagggagaggcgctgctccgaaggatgttccgttacggtctcctcgatgagacacagaacaagcttgattacgtcctcgccctcaccgtcgagaactttctc

SEQ ID NO: 14713 - DNA, 206 bp, Glycine max
  Clone ID: LIB3040-027-Q1-E1-D4
tccacctaataacagcttatggtggatacctcagcacccagagacgacgaaaggcctactatgcgacaaaatgcctctgggacttgtacctattcgtagatctagggaatcccgattctacgtcaacccttcgtcactgctgctaagtccactcgccacgcaagatacaacctggtgaactgatacatcttatctagccacaggaa

SEQ ID NO: 14714 - DNA, 355 bp, Glycine max
  Clone ID: LIB3040-027-Q1-E1-D5
gcatagaattctttcaccaaagctaggtctatgctcccatcgaccaaattggtgaggcgtttatggaaattatgcctctccaattcagccttaaattcatctagctcaaaatgatatatctctactttcctctctagtaaaatatttctcccctgaacattatctgtgtatctagtccaagaatctaaggaagagaatctccttgtgttatactgcactgtgggtcttgaaccaatacttttacgtttcctagaaaccatttgcaaataaagaaaccaaatagttgatcagggcccaatttattaaaaatcaaaactgaaaaagacactggccgcctagctggcctttacaataa

SEQ ID NO: 14715 - DNA, 361 bp, Glycine max
  Clone ID: LIB3040-027-Q1-E1-D6
gactcacaatcgaacgggaaaaggcgtcttcataaacgccgcccaaaacttctcatacccttttattcattccattcgtttctagggttttcttttctttgccgagaaaatgagagagtgcatttcgatccacattggccaggccggtatccaggttggaaacgcctgctgggaactctattgccttgaacacggcattcagcccgatggacagatgccgagtgacaagaccgttggcggaggagacgacgccttcaacacatttttcagcgagaccggcgccggaaagcacgtgccccgcgccgtcttcgtggatcttgaacccaccgtgatcgacgaagtccgaaacggtgcgtaccgg

SEQ ID NO: 14716 - DNA, 397 bp, Glycine max
  Clone ID: LIB3040-027-Q1-E1-D7
ggtcgtcgcaggcgcagagtagagcagcacagaagagggaaaacggcaccgccgccgtagaagaaaacaaccatggtgcacgtctccttttacaggaactatgggaagacattcaagaagccgcgtcgtccgtacgagaaggagcgtctcgacgcggagttgaagctggttggtgagtacgggcttcggtgcaagagagagctgtggagggtgcagtacgcgctcagccgcatccgcaacaacgcgcggaacctcctcaccctcgacgagaagaacccgcgccggatcttcgagggagaggcgctgctccgaaggatgttccgttacggtctcctcgatgagacacagaacaagcttgattacgtcctcgccctcaccgtcgagaactttctcgagc

SEQ ID NO: 14717 - DNA, 357 bp, Glycine max
  Clone ID: LIB3040-027-Q1-E1-D8
gacaccatccagtactcttcttttcagcacaacctcgtcatctcgcacaggctttcttttctttgcaacaacacgtagcaaatacatgtcaccagatttcacactgtatgttctccccggaactcatgcagtcgtctaacatcaatttccaagccactttctgtgtccttctcggcaacctcatgttcacgcccttcatcaatcctggtgggcttccttgggcctgggcccggatcagaaccatcatccctggcctagtaactgccctgatcggggtcttcacgggttccacaccgcacaacgctttatccaaactggcccgcatttatgacgcggaaaagctcatggctttctcca

SEQ ID NO: 14718 - DNA, 345 bp, Glycine max
  Clone ID: LIB3040-027-Q1-E1-D9
gaagtgatccactccacgtgggccatgctcggagccttgggctgcgtcttcccggagttgctgtcccgcaacggggtgaagttcggagaagccgtgtggttcaaggccgggtcccagatcttcagcgagggtgggctcgactacttgggcaacccaagcctgatccacgcccagagcatcctcgccatctgggccacacaagttatcctaatgggtgccgttgaaggttaccgtattgctggtggccccctcggtgaggtcactgacccaatctactcaggtggcaacatcgacccattgggccctgctgatgacccagaggcttttgctgagcttaaggtgaag

SEQ ID NO: 14719 - DNA, 355 bp, Glycine max
  Clone ID: LIB3040-027-Q1-E1-E10
gtccaggaacatttctgttacaagaagtggcgaaaagtgcacataattgttgaatgcattcttaattgtactttcttcatttaggtattgttgtatactatgtttagtttataaaaaaaaaaaaaaaaaaaaaaaaaaaaaaaaaaaaaaaaaaaaaaaaaaaaaaaaaaaaaacaaaaaaaaaaaaaaaaaaaagtaaaaaaaaaaaaaaaaagaaaaaaaaaaaaggggcggctcaaaaggttcaatgctaaattcccgttgaagggaacgtaaaaacttttcaaacagtcaactaaaattcatttcaagggcgttcttttaaaaaattgtaaacgggaaaaccctggggttt

SEQ ID NO: 14720 - DNA, 369 bp, Glycine max
  Clone ID: LIB3040-027-Q1-E1-E12
gatccataaccatggcgtctaactctgcttccgctctttacttccttttatgcctatcgcccatcactttgcttctttctgcgtttcgtgctcaagctcaatctcatgctccagctcccactttcaagtactgtgaaaagaatgcagactatgctgtgaaggtgagtggagtggaaatattgcctgaccccgtggagagaggagtgccattcacctttaagatcccagcttatactcctgaaccaattcaaagcggggacttgttatatgaaatttcttatgctggaatagaagcacaacctgctacatttctccatgatctctgtgaggaagcaccatgcccagtacctgcaggcaactttggtgccg

SEQ ID NO: 14721 - DNA, 286 bp, Glycine max
  Clone ID: LIB3040-027-Q1-E1-E2
gacagtttccccatagaatttctcgtctgcaacgcactacccagacaccgcgtctccggttcgaaaccagcatagggaagataacgttgtgctgcgccgccacactgggaccttgcttaaggttgcaggcgtacattcacctacatcagaatatgtaactcgtcttaagtgtcaccactctattggtctatggcagtcacatcatacattcttgactggcaaaacttggtggtaagcctgcatagacggcatgctgcacaactctctttgacaagctagggtaata

SEQ ID NO: 14722 - DNA, 357 bp, Glycine max
  Clone ID: LIB3040-027-Q1-E1-E3
ggactctcaaaggaatttatgcaacaagacagcgacacaaagttcccacttccagatctacttctgttctgtcagtcaccacagatagtttaactccactcacctctcaccgcaaccttaacttactatgtacctttcttcttcttttctttgtgtaaagtttaaaacttgaagcaaaaccaattgccccatttgccatttggtggtaataatcgatcgatggagttcactgaatcttacaagcaaacgggtccctgttgtttctctcccgacgctcgcttcattgccgttgctgttgattatcgtctcgtcattcgggagaccgtttctttcaaggttgtgcagttgttttcatgc

SEQ ID NO: 14723 - DNA, 407 bp, Glycine max
  Clone ID: LIB3040-027-Q1-E1-E4
agggagcaactcgagaggaatactatatggtaacaacaagaaattctttggcacttaatcgagatattcatgatgaacagactgttccagcccgataccgtcacgaatttcatacgattgcatgggaacaagttcatcttcgacgtctttttcccttccaaaaagttttctacttggagcttctctgattccttttattgaacattgtgatgccaatcgagctttaatgatttctaatatccaacgtccagcagttccgctttcgcagtccgaaaaatgcattgttcgaactggattggaacgccaagtatctttacattcaggagtttccgctcataccggtcacgaaggatacatcattcataccactacttgacggatatttttaggtcgaaatggacagactc

SEQ ID NO: 14724 - DNA, 346 bp, Glycine max
  Clone ID: LIB3040-027-Q1-E1-E5
ggcgcctctgcttgcaagagtgaaaaccttctcttacccttctctcaagtttcaagagatttcatcatggctccaaagaaagacaaggctccaccaccttcctccaagcccgccaaatctggcggtggcaagcagaacaagaagaagtggagcaagggaaagctaaaggagaaggtgaacaatatggtgctgtttgctcagggcacctatgacaagctcctttctgaagctcccaaatacaagctcatcactcctgccactctctctgatcgtttgaggattactggatcacttgcaacgaacgccatcggagaattaatggcaacacgttcgatcaggatggtgt

SEQ ID NO: 14725 - DNA, 333 bp, Glycine max
  unsure (1)..(333): unsure at all n locations
  Clone ID: LIB3040-027-Q1-E1-E6
gacatgccaaaattaacacccctgaatttcacactccctctcccaaactcatcatcctataatacaaagggtttggaatatatatcaaatatcaaaatacatcacaacatcaaaatggcctcaattgttactatggccaccattgtcacattagtcctcgcactagcatgttgtggcatgtctgccccgacctcagtgccgaaaaccactgcagcggccccggccccggagagcaatggctgcttgatggcactagcanacatgtcagattgtctgacctatgttgaggatgggagtaagttgtcaaagcccgacaaagggtgctgccctgag

SEQ ID NO: 14726 - DNA, 262 bp, Glycine max
  Clone ID: LIB3040-027-Q1-E1-E7
gatccccagtcacatacaaaagttagggttcataactttcccattccctctcgcatgccaatctcaatacaataatcaagtctttcgtacatttttcatcaatctcgtctagatcacaacatcacgctgaccacttctgttagcaaggccttcaatgtcacagaagtcctcgcactagcatctcataccatgtctgacatgatcgcagtgcagcgcaccaatggcgcgatcccggtcccgaacatcactagcagcatgatgg

SEQ ID NO: 14727 - DNA, 378 bp, Glycine max
  Clone ID: LIB3040-027-Q1-E1-E9
gattcacacaactaactaagaaagtcttccatagccccccaaaaatgaagagcaccatcttctttgctctctttctcttttgtgccttcaccacctcatacctaccttcagccatcgctgatttcgtgctcgataatgaaggtaaccctcttgaaaatggtggcacatattatatcttgtcagacataacagcatttggtggaataagagcagccccaacgggaaatgaaagatgccctctcactgtggtgcaatctcgcaatgagctcgacaaagggattggaacaatcatctcgtccccatatcgaatccgttttatcgccgaaggccatcctttgagccttaagttcgattcatttgcagttataatgctgtgtg

SEQ ID NO: 14728 - DNA, 392 bp, Glycine max
  Clone ID: LIB3040-027-Q1-E1-F1
gatctcaagccacgtcagagaaaatggcggtacctctgctctcgaagaagatcgtgaagaagagggtgaagaagttcaagaggcctcagagtgacaggaaaatttccgtcaagagaaactggcgtagaccagagggtatagattcccgtgttacgagaaagttcaagggatgcactttgatgccaaacatccgttatggttctgacaagaagacccgccactatctccctaatggtttgaagaaatttgttgttcacaatgtgaaggacttggaactgctcatgatgcacaacaggacttactgtgctgagattgctcacaatatatccacaagaaagagaacagatatagttgagagagctgcgcaacttgatgttgttgtgacaaacaaa

SEQ ID NO: 14729 - DNA, 381 bp, Glycine max
  Clone ID: LIB3040-027-Q1-E1-F11
ggttctagtgtgtgattgtttgttgttgtaactcgttcttcttcttttgttgttctgtgtttgtgtttgttttttctctcacctgaaaatgtcttgctgcggtggtaactgtggttgcggaagctcctgcaagtgcggcaacggctgcggaggctgcaagatgtacccagacttgagctacactgagtcaaccaccaccgagaccttggtcatgggagtggcacctgttaaggctcaatttgagggtgctgaaatgggtgtgcccgctgagaacgatggctgcaaatgtggaccaaactgctcctgcaacccctgcacttgcaagtgaggtgttgggagagcaagcttcaagcagagataacccttaattaagaataatga

SEQ ID NO: 14730 - DNA, 348 bp, Glycine max
  Clone ID: LIB3040-027-Q1-E1-F12
gactcaccacttcaaaacactcataacacaaagcacaaagcaaagctcatccttgagttaaaaaatggcagcagcttcttccatggctctctcatccccatccttggctggcaaggccgtgaagctgggcccatcagccccagaagtgggaagggtgagcatgaggaagaccgtcaccaagcaggtctcctcaggaagcccatggtacggcccagaccgagtcaagtacttgggcccattctctggcgagcccccgtcctacctaaccggtgagttcccaggcgactacggctgggacactgctgggctttccgcagacccagaaaccttcgccaagaaccgtgaact

SEQ ID NO: 14731 - DNA, 208 bp, Glycine max
  Clone ID: LIB3040-027-Q1-E1-F2
gagtaatacagacagcaacatgcgcccagcggttattctcaaaactaccatctctcttttggaggcgtcgtcgtcctcaacaccctgtgatggcagactcaacactctcgctagacacgtccttccacaaatggcttctcatgacatgatctgagaatcttcaacctacgcatctgaatccgtcatcaatcatctcgttcgtactccc

SEQ ID NO: 14732 - DNA, 394 bp, Glycine max
  Clone ID: LIB3040-027-Q1-E1-F3
ggagagagagagtaatgaaatgagtgaagaagctaaaaagaacttcgtccgcgctctaacggcgacgcccacctccgatgaccagaaacaagcgccggcgctgaatgtccctccgaagaacgtcatcatcaagagcgctgatatgatccccgacatgcagaatgaggccgttgatatcgctgtcgctgcgtttgagaggtacaatgtggagaaagacgtcgcggaatagataaagaaggagttcgataagatgcatggccccacttggcattgcatcgttggtcgtaattttggttcatatgtgactcatgaaacaaaccactttgtttatttctacttggatcagaaagcggttttactctttaaatctggctagccttattgtggtagcaaa

SEQ ID NO: 14733 - DNA, 311 bp, Glycine max
  Clone ID: LIB3040-027-Q1-E1-F5
ggagtgtagaagacgaaaagagagtggagagagagagaagtgagagtgtgagagggagcacagtgaagaagagaacgaaggaacgaagatggagactcctcctccgcaacaaggcgtggtgaagaagaacgagactaggggccgaaaacccaggccgagagacgaacacgccaaggcgttgaatgaagggagaataacacagcaacagcaacatgatcagcagcaacaacaacaacagcaacatcaaccttcggtggacgagacatacacgcagtggaagtcccttgttcctgtcctctacgactggcacg

SEQ ID NO: 14734 - DNA, 392 bp, Glycine max
  Clone ID: LIB3040-027-Q1-E1-F6
ggagaagggttttacattttattcgttctccggtgaaacagaaacagagagagagagtgagaaaaaacgaaacgatggagggaggagtctcctacgcgcgcatgcctcgtgtcaaaatccgcgagctgaaggacgactacgccaagttcgagctccgcgacaccgacgcgagtatagccaacgcgctgcggcgcgtgatgatcgcggaggtgccgacggtcgccatcgacctcgtggagatcgaggtcaactcgtcggtgctcaacgacgagttcatcgcgcacaggctcggcctcattcccctcacgagcgagcgcgccatgtccatgcgcttctcacgtgactgcaatgcctggaacggtgacggacagtgcgagttttgctccgtcgag

SEQ ID NO: 14735 - DNA, 346 bp, Glycine max
  Clone ID: LIB3040-027-Q1-E1-F8
gagtccactcgattttagaatttgacgtgtctggtgccttgacctgtactgcattgtgccccttcgctgacattgcagatatgtttttagtgctgacgcatcgtggtggggagatattcactacccttgaggggtgttctgctactgttcggtctggtttcatcatgaaaggcagaatatgtgaagtgtcgcgaccgtaacgcgtcactgaatgtctaatgcagtgacgtgttgaagctaatgtcactcaaagataagataggccagatgacacagattgaatggagtgtcgccacacctgatgtgatgatcatgtacttcaattggactgtgctcagtaggggat

SEQ ID NO: 14736 - DNA, 338 bp, Glycine max
  Clone ID: LIB3040-027-Q1-E1-F9
actgttcctcctactttccaagcttcctggcacactttgataagttttttgtgcagctccaatggcaacctctcaaatcacttcatcattgaggaacttgcctgcatttgaaaggtttcaaccttcaacgcttcgatttccttctgctgggcacgtcagaattgggacactgacacaaacctcgtttccctctttcgttgtcaaagccgccactgttgtcgcccccaagcacaccactgttaagcctctgggtgatagagtactggtgaaaattaaggatgcagaggagaagactgcaggtgggattttactgccagcaactgctcaaggcaagcctc

SEQ ID NO: 14737 - DNA, 379 bp, Glycine max
  Clone ID: LIB3040-027-Q1-E1-G10
gagagagaaattgaaattgaaactgaaacgaaacagcgtcttcgctttgctgctgcttctgctgagtcgtgcgtggatctacctttgaaccctaaacttattgctgattgctgatctcagttagaaatctgtggatatggcgacggggaagtcatctcgctccagaagcgcagtgtccagtgccaaggacaacggtcctaagctcgaagaaggtctcaatcccttcaagtctgataaattcgatgccgagtcctatgtccagtccaattgctccctcaacgataaggaaattaagcaattgtgcacatatttggtggacttgaagaaagcgtctgctgaggagatgcgtcgaagtgtctatgctaactatgcagctttc

SEQ ID NO: 14738 - DNA, 374 bp, Glycine max
  Clone ID: LIB3040-027-Q1-E1-G11
ggccattgttgctgtcatcatccgcagctgctgttattcgcaccgcaaacaaacagtgagccatggtcgtcggaaagaacaagcgcatctccaaagggaaaaagggtggcaagaagaaggcagctgatccctttgccaagaaggattggtatgacattaaggccccttctctttttcaagtgaaaaatgttggcaaaaccctcgtctctcgtacgcagggtaccaagattgcttctgaaggacttaaacatagagtgtttgaggtctccttggctgatcttcaaggggatgaggatcatgcattcaagaagattaggttgagagctgaagatgtgcaagggaagaatgtcctgacaaatttctggggaatggat

SEQ ID NO: 14739 - DNA, 373 bp, Glycine max
  Clone ID: LIB3040-027-Q1-E1-G12
ggatccatttctcgcaacaacgcttaacctctctcattccccatttcctcacctccttcaaccgctgctaaattctagggttccgaaatggacgctggcggaaagatcaagaagggcgccggaggtagaaagggcggcggcccaaagaagaagccggtttcaaggtccgtcaaagccggtctccaattccccgtcggaagaatcggccgttatttgaagaaaggaaggtacgctcagcgtgtcggtaccggtgctcccgtatacatggctgcagttctcgaatacctatctgccgaggtgcttgagttggctgggaatgccgcacgtgacaacaagaagaacaggattattccaagacacgtgcatttggcag

SEQ ID NO: 14740 - DNA, 185 bp, Glycine max
  Clone ID: LIB3040-027-Q1-E1-G2
aaagagacccggaaaaggtgggaaccgcttttggaaatccattgggcttggatttaagactcccacggaagccatcgaaggaacctacattgacaagaagtgccccttcactggcaatgtttccatccgtggccgtatcttggctggaacatgtcacagtgctaagatgaacaagactattattg

SEQ ID NO: 14741 - DNA, 376 bp, Glycine max
  Clone ID: LIB3040-027-Q1-E1-G3
gggatccgaggttcttaagtaacagaacacacaaaaccctagttagtgttagtgttcctcaagccaccgtaccgtgttgcctctctgcaatctacagccaaaatgcctttcaagaggtacgttgagatcgggagggttgcccaaatcaactacggcaaggaatatggcaggctcgtcgtcattgtcgacgtcattgatcagaacagagctcttgtcgatgcccctgatatggtgaggtcccaagtcaatttcaaaaggctttccctaaccgatattaagattgacattaagagggtccctaagaagaaagatcttgtcaaagccatggaggatgctgatgttaagaccaagtgggagaagagttcatggggcagga

SEQ ID NO: 14742 - DNA, 357 bp, Glycine max
  Clone ID: LIB3040-027-Q1-E1-G4
gaagtatataacttcttcgaagtgtccggaaatcgttcctatcatcacttctcaaatctcgaaccctctcgttcgtgccgatcactaagtcacacttcatcaatggcgggtagaggcaaaaccctatgattcagcgccgctaaaaaggtcacctcaaggagcaccaaagccggtctccaattccccgtcggtcgtatcgccaggttcctcaaggccggaaagtacgccgagcgcgtctgcgccggagcccccgtctagctcgccgccgttctcgaatatctcgctgctgaggttttggaattggctggaaatgctgcgagagataacaagaagactcgaattgttccacgccacatc

SEQ ID NO: 14743 - DNA, 361 bp, Glycine max
  Clone ID: LIB3040-027-Q1-E1-G5
ggcactgcaactttgctctctgtgaggcttcaatttctaattagggtttcgcttagagtaaccaataaccatgggagtcttcacctttgtcgtccgcaaatccggcagcgaatggagcgccaagcaacattccggcgacatcgaggcctccgccgattccaccttcgatctccaacggaagctcgtgcaagccgctctcgccgttgattcctccggtggagttcagtcctctttctctcccgtgtctcctacctccgctgtgttccaggtgatagtgggcggtgcagtattcgttggaggtggtggtggtgctgttgcagctgcacctgcacgtggtgctgccgcagctgatgctggccca

SEQ ID NO: 14744 - DNA, 367 bp, Glycine max
  Clone ID: LIB3040-027-Q1-E1-G6
tgtggggcagtgtaggtaccaggagctgagaaggaggcaggttaagattgagactgagacgtgggaagaggcggcaaaggagtatagggagcttttgatggacatgtgtgagcataagctggcacccaatttgccgtacatgaagtcgctctttctcggctggtttgagcctctgagggatgccattgtcaaggaacaggagatgtatggtgaagggaagaataggacggcctatgtgccatactttgttcagttgccggcagacaagatggctgttatcgcaatgcataagttgatggggctgttgatgacaggaacagaacatgccaccgttggcactgccagcgttgtgcaggctgcgtgtggc

SEQ ID NO: 14745 - DNA, 358 bp, Glycine max
  Clone ID: LIB3040-027-Q1-E1-G7
gaatgaatttatttttaccagcttcagatacctgaaaagagaagagcgagatggcgtcggtggtaaagaacgtactcaaatccgtcagagaaaagggtttcggcgctttcctcagagagctcaaggatgaaggctacctgagatgccttccggatggaaatctcttgcaaaccaagatccacaatattggggcaacgcttgttggtgttgataaatttggtaacaagtattatgagaagcttggagacacacagtatggaaggcacacgtggattgaatatgcagagaagactagatataatgcctcccaagttccagctgaatggcatggttggctccacttcataaccgattacac

SEQ ID NO: 14746 - DNA, 382 bp, Glycine max
  unsure (1)..(382): unsure at all n locations
  Clone ID: LIB3040-027-Q1-E1-G9
gacaatcgaacgggaaaaggcgtcttcataaacgccgcccaaaacttctcatacccttttattcattccattcgtttctagggttttcttttctttgccgagaaaatgagagagtgcatttcgatccacattggccaggccggtatccaggttggaaacgcctgctgggaactctattgccttgaacacggcattcagcccgatggacagatgccgagtgacaagaccgctggcggaggagacgacgccttcaacacatttttcagcgagaccggcgctggaaagcacgtgccccgcgccgtcttcgtggatcttgaacccaccgtgatcgacgaagtccgaaccggtgcgtaccggcagctcttccnaccggagcagctga

SEQ ID NO: 14747 - DNA, 185 bp, Glycine max
  unsure (1)..(185): unsure at all n locations
  Clone ID: LIB3040-027-Q1-E1-H1
ggaaggatagtgattttagagtagaaaaagcanaaaaaaaaaaaaaaaaaaaaaaaaaaaaccggccgcccaaaaggatcaaacctaacttacccttgaatgcaacttcaaactcctccaagagtgccaccaaaatacaatacagggcccctctttaaacaatctcgacacggaaaaaacccggg

SEQ ID NO: 14748 - DNA, 359 bp, Glycine max
  Clone ID: LIB3040-027-Q1-E1-H10
gagcgaaacagagagtgatttcagtgagtgatcggtgttcacttgatctcatcataatcgtcagcgtcaattgaagaagatgccgatcagaaacatcgccgtcggaaggcctgaagaggcgactcaccccgacacgttgaaggcggctttggctgagttcatctcaaccttcatcttcgtgttcgccggctcaggctccggcatcgcctacaacaagctcaccgacaacggcgctgccacccctgccggcctcatctccgcctccatcgcccatgcattcgccctcttcgtcgccgtctccgtcggagccaacatctccggcggccacgtcaaccccgccgtcaccttcggcgccttcg

SEQ ID NO: 14749 - DNA, 349 bp, Glycine max
  Clone ID: LIB3040-027-Q1-E1-H11
ggttcattttgttgttcgaagccaaaaccctagcagccggcgagaatggcagacgttgaggttgatgcggcggcagcggcaggggcagcgcagccgaagaagagaacgttcaagaaattcagcttcaggggcgtggatctggacgcgcttctggacatgtccaccgacgaactggtgaagatgttcagtgcgcgtgcacgtagaaggttccagagaggtctgacgaggaagcccatggccttgattaagaagctccgcaaagctaaaagggaagcaccagcaggtgagaagccagaaccagtgcgcacccatctccgcaacatgattattgtgcctgagatgattggta

SEQ ID NO: 14750 - DNA, 331 bp, Glycine max
  Clone ID: LIB3040-027-Q1-E1-H12
gatttcttcttaacatagtatatttataataaatcagttacagaaacatagtttatgatgtactatatttcacattttaattaatatttcgactacacgcctaaacagcactactagtagacggtgttagatctagtgtgtacagacaatcaaacaaacctttcgtcgaacaccttctctgcatcgagcgcgccttttacgttgaactcgggagtggagggagcagagaacaccatcaccatgtttggctccgctcaaccttcttcttcacccttcggcaccccttcttctacccctgcttttggcaccccttcttcgatccctgcttttg

SEQ ID NO: 14751 - DNA, 305 bp, Glycine max
  unsure (1)..(305): unsure at all n locations
  Clone ID: LIB3040-027-Q1-E1-H2
tttcctgttttcattttcattgaaaatgttttcagaaatccaaccaaacacattttcatcactattttctgttttcagtgaaaatgaaaacagaaaacaaccaaatcaaacatcccctatttaatctaagtgaaagtggattgggcttgaatttcttagatgagatctcaagtttgaattttgggatgataaactttacttaaggtgattaaacaagttttataacaaagattagttattaataaaatcaatagatacttcataccganaaaaaaaaaannaaaaaaaaaaaaaaaagcggccgc

SEQ ID NO: 14752 - DNA, 358 bp, Glycine max
  Clone ID: LIB3040-027-Q1-E1-H3
ggcagcgcttgagaccaagccccactcaaccaccacaccactctctctgctcttcttctacctttcaagtttttaaagtattaagatggcagagacattcctatttacctcagagtcagtgaacgagggacaccctgacaagctctgcgaccaaatctccgatgctgtcctcgacgcttgccttgaacaggacccagacagcaaggttgcctgcgaaacatgcaccaagaccaacttggtcatggtcttcggagagatcaccaccaaggccaacgttgactacgagaagatcgtgcgtgacacctgcaggaacatcggcttcgtctcaaacgatgtgggacttgatgctgacaactgc

SEQ ID NO: 14753 - DNA, 342 bp, Glycine max
  Clone ID: LIB3040-027-Q1-E1-H4
ggaaatcgagaagaagaagaagaagaagatggagaagtatcagatctggagcaggagaatagcgttggcagcgtttgcgtttgctctgctgttccaatcggcctcagcagacgacgtcgttgtgctctctgaagataacttcgagaaggaagttggtcaggacagaggagctctcgttgagttctatgctccttggtgtggacactgcaaaaagcttgctccagaatatgaaaagcttggtagcagcttcaagaaagccaaatctgttttaattggcaaggttgactgtgatgagcataagagtttgtgcagcaagtatggagtctctgggtacccaacaat

SEQ ID NO: 14754 - DNA, 375 bp, Glycine max
  unsure (1)..(375): unsure at all n locations
  Clone ID: LIB3040-027-Q1-E1-H6
taatttgggaattattgctcccatcgccattggtttcattgtcggcgctaacattttgttgggtggggccttctctggagcggccatgaaccccgctgtgacatttgggcctgctgtcgtgagctggacctggaccaaccactggatctactgggccgggcctctcatcggtggtggaatcgctggccttgtttacgaggttgtcnttatcagccacacccacgaacagccttccaacaactgactactagaggggggaaattgaaattanaaaaaaaaaattgtgtattattgaatttctctggaatcttcttcggtgtatggttttcgttccttgtgttttcttcccaattcactttcgagggttgtacttgt

SEQ ID NO: 14755 - DNA, 400 bp, Glycine max
  unsure (1)..(400): unsure at all n locations
  Clone ID: LIB3040-027-Q1-E1-H8
gacattcaatcacacacacatgcccctatcttccatagctacctagattattcactccctccctaacaagccacaacgtttcctgctccaattggcagctttggatctcacaataagcatgttggcactcatagttgttgttgtntctcttggcctgtgggttggtgtcaaggtgcgccacaagttccaagccacttcaattttggtgaatccttgggtgataatgggaacaacaaccagctccaatctttggctaaggctgattacttgccttatgggattgacttccctggtggaccttctggaaagttttccaatggaaaaaccactgttgatgcaattgctgaacttttgggattcgatgattacatacctccaatatgctgatgctagtggcgat

SEQ ID NO: 14756 - DNA, 115 bp, Glycine max
  Clone ID: LIB3040-028-Q1-E1-A1
ggattacgtcgcctcatgcgcaaagcatggcaacccaggtcagggacaacggcaccgccatcgtgcaggaacctgccacgtgtgcaaggcaccttttacacgaaccataggacaa

SEQ ID NO: 14757 - DNA, 51 bp, Glycine max
  Clone ID: LIB3040-028-Q1-E1-A10
aaacaatatttaagtggtcatcttataaaattttttaatgtcaatgaatcc

SEQ ID NO: 14758 - DNA, 343 bp, Glycine max
  Clone ID: LIB3040-028-Q1-E1-A11
ggagcgaagaagatattatggtttttgagtgcggtgcggcgatcctagcactctcttctgcagctttcgccgacagcttcattcaccatggctgagcaaaccgagaaggcttttttgaaacaaccaaaagtgtttctcagctcgaagaaaactgggaagggaaagagacccggaaagggtgggaaccgcttttggaaatccattgggcttggatttaagactcccagggaagccatcgaaggaacctacattgacaagaagtgccccttcactggcaatgtttccatccgtggccgtatcttggctggaacatgtcacagtgcctagatgaacaagactatta

SEQ ID NO: 14759 - DNA, 314 bp, Glycine max
  Clone ID: LIB3040-028-Q1-E1-A12
ggaaacagagagtgatttcagtgagtgatcggtgttcacttgatctcatcataatcgtcagcgtcaattgaagaagatgccgatcagaaacatcgccgtcggaaggcctgaagaggcgactcaccccgacacgttgaaagcggctttggctgagttcatctcaaccttcatcttcgtgttcgccggctcaggctccggcatcgcctacaacaagctcaccgacaacggcgctgccacccctgccggcctcatctccgcctccatcgcgcatgcattcgccctcttcgtcgccgtctccgtcggcgccaacatct

SEQ ID NO: 14760 - DNA, 83 bp, Glycine max
  Clone ID: LIB3040-028-Q1-E1-A2
gatgatccttcaggcagttaatgggatatgaggagtggcaaaagctcgcaccaaatatgcgagaggggtgtccaccctagcct

SEQ ID NO: 14761 - DNA, 228 bp, Glycine max
  Clone ID: LIB3040-028-Q1-E1-A3
ccacaagtccgcccacacatcagtgcagctgcgacaagaccacacatggggactttcgaaacttccgtgccccccagtttccgggtcaaccgagaagttactaaatgaaaacgtgaaccgaaacgaaaacgaacggcggatatcagttgttccatcgaggctcaccgcggcaggctcccccgaatccctgttcacaccttctgcatcgctggaacctcgtcggcatac

SEQ ID NO: 14762 - DNA, 385 bp, Glycine max
  Clone ID: LIB3040-028-Q1-E1-A4
ggcagcgcttgagaccaagccccactcaaccaccacaccactctctctgctcttcttctacctttcaagtttttaaagtattaagatggcagagacattcctatttacctcagagtcagtgaacgagggacaccctgacaagctctgcgaccaaatctccgatgctgtcctcgacgcttgccttgaacaggacccagacagcaaggttgcctgcgaaacatgcaccaagaccaacttggtcatggtcttcggagagatcaccaccaaggccaacgttgactacgagaagatcgtgcgtgacacctgcaggaacatcggcttcgtctcaaacgatgtgggacttgatgctgacaactgcgaaggccttgtaaacattgagcagcag

SEQ ID NO: 14763 - DNA, 383 bp, Glycine max
  Clone ID: LIB3040-028-Q1-E1-A5
gacgctcaattcattttcttctcctctctctctctcctaaggttagggttttctctcttcatcactctctgtgtcgctccgtttcaatggctcagcaagacgctcaaaacggcgggtcggagaatgccgctgctgctgctacggtgtcgtttgtcgctgtgaagccgcagctcctcgtcgaagctcccaaagccaacgacgccattctgttcttcaaggctgcgtttggcgctgaggaagttggccgtacgctcaaccctaagcgcaaagctgagcacgagctccctctcatactctccgcagaactcaaaatcgctggctccaccattctcgtcgccgacctcgttgatgacacttcttcgccagcgaaaacggggggaaac

SEQ ID NO: 14764 - DNA, 359 bp, Glycine max
  Clone ID: LIB3040-028-Q1-E1-A7
gggatccaatctcgttagggtttttgacagttgcaatttgcactttgtaggatcaactcctaacattgatcgattgaaatggcagacgaagctaacagaactgctttccttgaaattcaaagtctcatgatcgatactactggaaaactagtacaggtgcaaacccatatgcgttccacagaagcagaacataagcgtgcttttctgaccatggaggagctgattcaagttcctgatgatacgaatgtttacaaatccattgggagaatgtttgtaatggagaccaaagcaacattaatgaatgaacacgagaccaagtttaatgatggtgaagcttcagttactgcattacagagctc

SEQ ID NO: 14765 - DNA, 372 bp, Glycine max
  Clone ID: LIB3040-028-Q1-E1-A8
gactcatgcgatatagaccatcttttgcgtccttgtgaacatggacatgaggaaatcatgtagcgtcatcgtcttgcacctcctccatgtcgctgcctctccagatgtggtggtgcagactgacggaagagtgtgtgagtcacatatccacgggttccatggtttgtgtaatagagaccacaactgtgctttggtctgcatgaacgaacgtttctccggtggcaagtgcaaaggcgtctgccgctcgcatgcgtttgcaccaggatttgttgacatctcatcaaacactacacttgccatgcgaattagtaaatcatagctaggccacatatattgcatctactcgttatccatttgggatctagctaccac

SEQ ID NO: 14766 - DNA, 320 bp, Glycine max
  Clone ID: LIB3040-028-Q1-E1-A9
gaagcttagcttcaccgtcagttgcaggaaaaatggtttcgctgaaactgcagaagcggctcgccgcgagcgtgctcaagtgtggcagaggaaaggtttggcttgaccccaatgaagtcaacgaaatctccatgggcaattctcgccaaaacataaggaagctggttaaggatgggtttatcatcaggaagcccaccaagattcactctcgctcacgtgctcgtcgaatgaatgaagccaagaggaaaggacgtcactctggatacggtaagcgtaagggtacaagggaggcaaggcttcccaacaaaattctatggatg

SEQ ID NO: 14767 - DNA, 377 bp, Glycine max
  Clone ID: LIB3040-028-Q1-E1-B1
ggtagcgcagagaaagaactagaactagggtttcatctttgccatcagtaaacgacaatgatttacgacgttaactctcctcttttccgatccttcctcagccagaagggaggctcctctgataagaggaaatcggacgaacagaagccaaaagagcagaaacccaaagccagcgagaacaaacctataatgactgagtgataacagctgagctgcattcagttgtagaatgaaaataggtggtaggtattgtatttggtgctaaactaagatctttttggctgtgttctgaagtatatgccggcgatgttggtctttgttattgtaatggtttgattttggatatgggttatacgaaaaccttatatgggcacaag

SEQ ID NO: 14768 - DNA, 389 bp, Glycine max
  Clone ID: LIB3040-028-Q1-E1-B10
accatcgaaattctagacacacaacacataaaagatttccttgttctttttactgcttaactgttcggctatctcatatatgaacaacaacatgttaggaatgaagagacggagagatgataatgaagggtccttggatttggcaaaatgtcttatgctgttttcttgtccaatagaaagcaacaagacacaacagaaaagttttggttctgtggaatttgagtgcaagacgtgcaaccgcaagttctcttcttttcaagcactgggagggcacagggcaagccacaagaggcagaagctggagggggaagaactgaaagaacaggccaaaagtcttagcttgtggaacaaacccaaaatgcacgagtgctccatttgtggccttgaat

SEQ ID NO: 14769 - DNA, 367 bp, Glycine max
  Clone ID: LIB3040-028-Q1-E1-B11
ggttctagtgtgtgattgtttgttgttgtaactcgttcttcgtcctttgttgttctgtgtttgtgtttgttttttctctcacctgaaaatgtcttgctgcggtggtaactgtggttgcggaagctcctgcaagtgcggcaacggctgcggaggctgcaagatgtacccagacttgagctacactgagtcaaccaccaccgagaccttggtcatgggagtggcacctgttaaggctcaatttgagggtgctgaaatgggtgtgcccactgagaacgatggctgcaaatgtggaccaaactgctcctgcaacccctgcacttgcaagtgaggtgttgggaaagcaagcttcaagcaaagataaccctta

SEQ ID NO: 14770 - DNA, 360 bp, Glycine max
  Clone ID: LIB3040-028-Q1-E1-B5
gactcactcatacaatatagaccagcttttgcttctttgtgaacatggagatgaggaaatcatgtggcttcttcgtcttgctcctcctccttgtctttgcttcccatgtggtggtgcagacggatggaagagtgtgtgagtcacaaagccacgggttccatggtttgtgtaatagagaccacaactgtgctttggtctgcacgaacgaaggtttctccggtggcaggtgcaaaggcttccgccgccgctgcttttgcaccaggatttgttgagatctcatcagacactactcttgccatgcaaattaatacatcatatctaggccaaataaattgcatctactctttatccatttgggag

SEQ ID NO: 14771 - DNA, 386 bp, Glycine max
  Clone ID: LIB3040-028-Q1-E1-B6
acccaggcgtcagcccacgcgtcagcggacccgtcagattgctgccagacgacaactgaacggggtccgcgcacatctcacagcataactgtacacaatgcgcaatctctcatttctctcatattacgaatgccctaacgttcatctcggtttcaccgattctcggcatgccgaaagtgtcatacgatgctatcgtcgccgatagccggttgaagcacacaggcgctggtgcttgaatgaatcaatcttggatagctgatatggatcctaacattccaatcagatctccacacgctttcgtcatattcaagtccgagttcagagagcattttaaggaggagcattctaacaacaagtccgtctctgtagtcggtaaagctggtggt

SEQ ID NO: 14772 - DNA, 361 bp, Glycine max
  Clone ID: LIB3040-028-Q1-E1-B7
gatttttctgccgaggaaaagaaagaaagaaaaagaagaacagcgccctagatttgctcttctttgcttcggaagaaagagaggaacaaataacaatggcgttcgcttctttcctcagcagagttctcttcgcttccgtcttcatactctctgcttaccaagaatttaacgaatttggagttgatgggggacctgcagcaaaagcactcagacctaagtttgatgcctttacacatcgagtgcattctcaagttggctttcaacttcctgagactgatcggaaatttttaattgctggggctattgctcataaaggccttggaggggttctttgcagatgtggcagctcttttggagcttc

SEQ ID NO: 14773 - DNA, 359 bp, Glycine max
  Clone ID: LIB3040-028-Q1-E1-B8
ggcacttcaattgcaatcaaattagttcattctctttgcgcagttccctacctctcctttcaagatgcagatcttcgtcaagaccctcaccggaaagaccatcacccttgaggtggaaagctctgagaccatcgacaacgtcaaggccaagatccaggacaaggaaggaattcccccggatcagcaacgtctcatcttcgccggaaagcagctcgaggacggccgtaccctcgccgactacaacatccagaatgagtcaacccttcacgttgtccgtcgtctccgtggtgggatgcagatcttcgtcaagactctcactggcaaaaccataaccctagcagtcgaaagctctgacacca

SEQ ID NO: 14774 - DNA, 328 bp, Glycine max
  Clone ID: LIB3040-028-Q1-E1-B9
gactacctcaacaacaatactacagcagcatacgtcgtcgtcgtcgtcgatgacctctcctccgccgcatcatcatgccttcggtgtccctcatgataatggtggtcgccgcttcttagctgctcgtcgtcggcggtagcaacaacacctccaccaatgataacatcgaagacatccacggctttgttataatagcagaagatgatcataggaatgaatccttgttgtctgatattgatggtgatgttattgatgagcttactgccggtagtgaagaacagctggccgcggcgtcttctggtggtagtggggccgttgtcgttgccgc

SEQ ID NO: 14775 - DNA, 266 bp, Glycine max
  Clone ID: LIB3040-028-Q1-E1-C1
ggaggaaaagaaagaaagaacaaaaaaaacagcgccctagatttgctcttctttgcttcggaagaaagagaaaaacaaataacaatggcgttcgcttctttcctcggcagagttctcttcgcttccgtcttcatactctctgcttaccaagaatttaacgaatttggagttgatgggggacctgcagcaaaagcactcagacctaagtttgatgcctttacacatcgagtgcattcccaagttggcgttcaacttcctgagattga

SEQ ID NO: 14776 - DNA, 304 bp, Glycine max
  Clone ID: LIB3040-028-Q1-E1-C10
gaaagaagttaagagagttttttttgttccacactgaccaacccttggagacgcaagtgatactttcgttacctatcttggtcttgtatcccttagccttattttcaaacatagtctttggtaaatggttcaaattggacgttcattcaagagtaactgggctcgtaacaagttgggaccaatggcattactcacagcatgacactcagggtgacaagcgggtatgcttgccatgatgtgacaagtcacatcgtaggaagcactagcgagagacacacttcgttgttgttcgtgacaagcttcg

SEQ ID NO: 14777 - DNA, 390 bp, Glycine max
  Clone ID: LIB3040-028-Q1-E1-C3
gacacaccgtttgttctattcttaactcaacttctgctacccactctcttcttccaagtccaaccacgcttttctctacagtcatgggcaaggtcaagatcggaatcaacggatttggaagaattggccgtttggttgccagagtcgctctgcaaagagacgatgtggagctcgttgccgttaacgaccctttcattaccaccgattacatgacatacatgtttaaatacgacagtgttcacggacactggaagcatcacgatgtcaccgttaaggacgagaagacccttctcttcggtgacaagccagtcactgtttttggacacaggaaccctgaagagatcccatgggggtcaactggagctgatatcattgttgagtccaccggag

SEQ ID NO: 14778 - DNA, 236 bp, Glycine max
  Clone ID: LIB3040-028-Q1-E1-C4
gaacgacgtatggactgatctcagtgcatgatctgtgatcaattcatctcatcaaaatcgacagagtcaattcactaaaatgccgatcaaagacatcatcgtcagcaagcctgatgaggcgactcaccccgagacgttcaaagccgctttggctgaattcaactcaagcctcatcttcgtgtacgacggctcaagctccagcatcgcctacaacaagctcaccgacaacggcactg

SEQ ID NO: 14779 - DNA, 353 bp, Glycine max
  Clone ID: LIB3040-028-Q1-E1-C7
gacagcaaaacaattttcaggctcacttaccattccataacctaaatctcctctttgtttccgagtcagagagcaatggcacgtaccaagcataccgctcgcaagtccatcggcggaaaggcgccgaggaagcaattggcgactaaagccgctcgcaagtcagctccggccaccggcggagtgaagaagccccaccgcttcaggcccggaacggtggctctgagggagatcagaaagtaccagaagagcactgaacttctgatccgaaaactcccattccagaggctcgtcagagaaatcgctcaggatttcagtacagatcatcgtttcgagagcagcgctgtgtctgcgct

SEQ ID NO: 14780 - DNA, 384 bp, Glycine max
  Clone ID: LIB3040-028-Q1-E1-C9
ggtcactcaccacttcaaaacactcataacacaaagcacaaagcaaagctcatccttgagttaaaaaatggcagcagcttcttccatggctctctcatccccatccttggctggcaaggccgtgaagctgggcccatcagccccagaagtgggaagggtgagcatgaggaagaccgtcaccaagcaggtctcctcaggaagcccatggtacggcccagaccgagtcaagtacttgggcccattctctggcgagcccccgtcctacctaaccggtgagttcccaggcgactacggctgggacactgctgggctttccgcagacccagaaaccttcgccaagaaccgtgaactcgaaatgatccactccaagtgggccaatgccgg

SEQ ID NO: 14781 - DNA, 385 bp, Glycine max
  Clone ID: LIB3040-028-Q1-E1-D1
gacttcacaactcaaactgcttcattgcataattgcagataagatcaacccttctaccttcagattcgcgggaagatggcatcacttcatgctaatgtgacatcagttgtttacaacagtggcaaccgtgtttctcaatcgaaatttgcaagctcttccttcttgtctgggttcgatgttgttggtcgtgcttcaagtgcttggaagaaggaacttgtcccatcttccatttccttggtgcctagagccaccctaacatttgatcccccaactaccaattcagacataaccaagcaaaagaagcacactcttgaccctgcttctccagattttcttcctcttccttcatttgaacagtgctttccaaagagcaccaaggaacaca

SEQ ID NO: 14782 - DNA, 403 bp, Glycine max
  Clone ID: LIB3040-028-Q1-E1-D12
gaagacgacagaagggggcgcaggtagagagagcgagagaacacgaacataagggaaccacagcggcggtaacagaagaacaagcagagaatgggtcgagtgagaacgaagacggtgaagaaatcctctcggcaggtgatagagcgtcactactcgcgcatgaccctggacttccacacgaacaagaagcttctggaggaagtggcgataatcccgtcgaagaggctaaggaacaagatcgcggggttctcgacgcacctgatgaagcgcatccagaagggccctgtgcgcggcatctccctcaagctccaggaggaggagcgcgagcgccgcatggacttcgtccccgacgtctccgccatcaacaccgaccacatcgaggtcgacaaggaaaacctcgaca

SEQ ID NO: 14783 - DNA, 388 bp, Glycine max
  Clone ID: LIB3040-028-Q1-E1-D2
gatacctaaaaattgtaccgatatggcttcacttgtgtgtctccttttttccttgcatttcatggttatcatgtcaggttccttaccagcaaatagtgaagtgtttacaaaagagtctcctatgtctctatccacaaaacccgtggaaagactcacccaactccacttttatttccataacaacaaaatgggggaacacccgactgctatgaaaattgttgagcctcctaaggcgtccatttctggttttgggactatttacatgatggatgaccctctaagcgaaggaccaagtccaacttcaaagcttgttggaagatgtcagggaatatatgctgacgcttcgcaacatgaacctgcgatactcatggtaacgaatttgttcttc

SEQ ID NO: 14784 - DNA, 388 bp, Glycine max
  Clone ID: LIB3040-028-Q1-E1-D3
gacctaaaaattgtaccgatatggcttcacatgtgtgtctccctttttccctgcatttcacgggtaccatgtcaggttccttaccagcaaatagtgaagtgtttacaaaagagtctcctatgtctctatccacaaaacccgtggaaagactcacccaactccacttttatttccataacaacaaaatgggggaacacccgactgctatgaaaattgttgagcctcctaaggcgtccatttctggttttgggactatttacatgatggatgaccctctaaccgaaggaccaagtccaacttcaaagcttgttggaagatgtcacggaatatatgctgaggcttcgcaacatgaacctgcgatactcatggtaacgaatttgttcttcac

SEQ ID NO: 14785 - DNA, 228 bp, Glycine max
  Clone ID: LIB3040-028-Q1-E1-D4
gcccgccgatatgtctattcatagccttgctggaaagccacatttcactacatgtcgaattccacaacaagtcaataccggtggcccctcctgacagttgcgcagccgggatgcccaaggggacgcgctctgtaattgcgcattaagagatgcgggtgtagtcgctacggggcaggatgaacgctacacttaccaattgcctatcgcatggctcggatcacattcttc

SEQ ID NO: 14786 - DNA, 375 bp, Glycine max
  Clone ID: LIB3040-028-Q1-E1-D5
tcagcgggatcatcccgacattcagttcataatttctgcggacttcatatatatttcgtacataaagcatggcacgttaggtgtgaaagaatgaagagtcactgcagctgaaagtcgcagggacgactcatgttcattcataagagaatattggaagacaggatgtacaagtggtcatcatatgatctctctacttggcctctgactacaagcagtagctcttgatttacatgggtaaagatttcgagggcatggtccatcaactcacagttggacttgcactggtgctgaaggagttccaccaacttgcaggcacgttatggatatatgaaaagtgggtgttcagactcaagtatgatgatcacatgcatggtg

SEQ ID NO: 14787 - DNA, 383 bp, Glycine max
  Clone ID: LIB3040-028-Q1-E1-D6
gaatccgaacagtagtaccaacatggcttcagttgtgtacctccactttggcttccatctcattgttatcatgtcaagttccttacgcgcaatcactgaactgtttgctgaacagtatcaatccacagaacccgtggaagaaaaactcacccaactccacttctatttccataacaacatatccggggaacacccaactgctatgaaaactgtcttgcctcctaaggggtccattcatggttttggggctacttacatgatggatgaccctctaacggaacgaccaagtctaacttcaaagcttgtgggaagatctcagggaatatacgctttggcttcactacatgagcctgagttgctcatggtgacaaatttctcttcac

SEQ ID NO: 14788 - DNA, 304 bp, Glycine max
  Clone ID: LIB3040-028-Q1-E1-D7
gaataatagtcccttttctgaaattctcctaactctctctctctctcaacaatggctcctacttttgttcctaagttggtttctgctgcagcattgttgtttaactccacgatggctcaatctccaacttcctcccccgccttaacacccaccaacacgccggttggcactccacctaagagggcgttgtccccgttccctgttcctgctgccgttccaaccgtcgtcctctccctccggggtccacctaccttcttctccttcggaacccccaatttgcagctgctactcccaaacatccctc

SEQ ID NO: 14789 - DNA, 385 bp, Glycine max
  Clone ID: LIB3040-028-Q1-E1-D9
agggatacacactctgtcacgcacccaccagtctactacactcctctcactcagtctcactctctgctccgtgatagctgtaccacgtttttctctccatctcgaaacaccatctctgcctcagtcccaacccatcaccattctcatggctgctctagctctagcacttcttcttctggctttcaccggcacttcaagtgctacatggtgcgtttgcaaggatggaagcgacgcgatcctgcagaagacgttagactatgcttgtggagctggtgctgactgtaaccctcttcacctaaacgggccttgttttcagcccaacaccgtcagggcccactgtaactacgccgtgaacatctacttccaaaagaagggtcaagctcaa

SEQ ID NO: 14790 - DNA, 179 bp, Glycine max
  Clone ID: LIB3040-028-Q1-E1-E1
caacggggaggtctcgtcacaactttattcaatcatgcttctcctgcgacaagggtattaacggatcctcctccaaaaatacgagaaaatgggtaaagaaaacgcttatctcaatatcgccgacatctctcactctcacaactgggaaatccacttctcttcgtaccttatttacaacc

SEQ ID NO: 14791 - DNA, 349 bp, Glycine max
  Clone ID: LIB3040-028-Q1-E1-E10
ggattgattccctcattcttcatccatagacatggccaccgtcacttctgcagccgttgctattccctcattcactggcctcaaggcaagcgcaggcaaagtgagtgccgcagttaaagtctcagctccccaagccacaaggttgggcatcaaggcttcgctgaaagacgttggagtcgctgttgtggccactgccgcgagtgcagtgctggctagcaacgccatggccattgaagtgttgctgggtggtgatgacgggtctctggctttcgttcccaacaatttctccgtggcctctggggagaagatcgtgttcaagaacaacgcaggtttcccccacaacgttgtg

SEQ ID NO: 14792 - DNA, 387 bp, Glycine max
  Clone ID: LIB3040-028-Q1-E1-E3
tcaggattgaggtcttgggtattttggtattagtagctttccaaataacattgcaaaatgcagggcattttttatgttagcaacaattataactataattaggattgactgtatatgtacaaaatccaaaaaatattactccatccctcctgaagccgtcaccgattcatttctctacatatcaccaccgagggcttccaccagtcactcaaatgccctgtaaaatacagacactgatttacctggtctgcatgcacacgagcagattccagccagcattggggtatacaaaaaaagtgacgaccaaaaatgactgaagggcatggtgggaaaaaaaataagatgttacaatgccaaaatttgtactcatggatatgtacactctga

SEQ ID NO: 14793 - DNA, 365 bp, Glycine max
  Clone ID: LIB3040-028-Q1-E1-E5
ggttcttttcatgcatgtgttgaatgcacatgctggatctccggtccggttagggcatttctgggaccttaaatcaccaatttctcacccaatcaattccaattaagctgaaggtgtctctgatctatatgtgatgggtgctccgaagcacacatggactgcagaagatgaacaagcacttacagccggagttgtcaaacatggtgttggtaaatggcgcaccatactgaaggatccagagtttagtagtgtcttgtacctgcggtcaaatgtggatctcaaggataaatggagaaatctgactgtgatggcaaatggatggagctctagggaaaaatctaggttatcactcagaagggtgcatc

SEQ ID NO: 14794 - DNA, 366 bp, Glycine max
  Clone ID: LIB3040-028-Q1-E1-E6
gactgcaactttgctctctgtgaggcttcaatttccaattagggtttcgcttagagtaaccaattaccatgggagtcttcacctttgtcgttcgcaaatccggcgccgaatggagcgccaagcaacattccggcgacatcgaggcctccgccgactccacctacgatctccaaaggaagctcgtgcaagccgctctcgccgttgattcctccggtggagtccagtcctccttctctcccgtgtctcctacctccgctgtgttccaagtgatagtgggtggtgctgtattcgttggaggtggcggtggtgctgttgcagctgcacctgcaggtggtgctgctgcagctgatgctgccccggctgctg

SEQ ID NO: 14795 - DNA, 379 bp, Glycine max
  Clone ID: LIB3040-028-Q1-E1-E7
gaacaaaacagccatcatcatggccacctctgctattcagcaatcagcattcgcaggtcaaactgctctgaagcagctcaatgagttggtccgcaagaccggtggcgccggcaaaggtcgcaccaacatgcgccgtaccgtcaagagtgctcctcagagcatttggtatggccctgatcgtcccaagtacctgggtccattctcagagcaggttccgtcatacctgaccggagaattccccggtgactacggatgggacactgctggactatcagctgacccggaaaccttcgccaggaaccgggagctggaggtgattcacagcagatgggccatgcttggtgcacttggctgcaccttcacagagatccttgagaag

SEQ ID NO: 14796 - DNA, 388 bp, Glycine max
  Clone ID: LIB3040-028-Q1-E1-E9
gggctgatatttcctgataagtggacagacgcttaaacagagaaactaacacagatttgcatgcatggggaaaataacgcacattgtagtaattcccagtgcagggtacagccacttcgttcccgttatccacttctcaaagagacttgttgagcttcacccagaaattcacgtcacatgcatcattcccattctggggtctctcccaagtgctgcaaaacccattctccaaacccttccacaaaacatcaacacggttttccttccaccggtgaaccctaatgacctaccacaaggtgttcccgtagttgtccaaattcagctagcaatggctcactccatgccctccatccaccacaccctcaagtccataacttcaaagactccc

SEQ ID NO: 14797 - DNA, 152 bp, Glycine max; identical to SEQ ID NO: 14028
  Clone ID: LIB3040-028-Q1-E1-F1

SEQ ID NO: 14798 - DNA, 375 bp, Glycine max
  Clone ID: LIB3040-028-Q1-E1-F12
gtcagttcggtggaaggagccgtagcagcagcggaagctctagcttgggcagcgaatcacaatggcgagaggattgaagaagcatttgaagaggcttaatgccccaaagcattggatgcttgacaaactgggtggtgcatttgctcctaagccctcatctggaccacacaaatccagggaatgcctgccactcatactcattttgcgaaaccggctgaagtatgctctgacataccgtgaagtcattgctattctgatgcagcgacatgtccttgttgatggcaaagtcaggacagacaagacatatcctgctggtttcatggatgttgtatcaacccctaaaacaaatgagaacttccgcctgctgtatgacac

SEQ ID NO: 14799 - DNA, 57 bp, Glycine max; identical to SEQ ID NO: 12752
  Clone ID: LIB3040-028-Q1-E1-F2

SEQ ID NO: 14800 - DNA, 351 bp, Glycine max
  Clone ID: LIB3040-028-Q1-E1-F3
aactacaacacaagagactgtagcttctttttgaactctctgtgggttggggttttggagtgggagcaccaatggctttcttgatggcaattgtagtattaagtgttgtcttggtgctctgtttttgctctgctctcttgaggtggaatgaagtaaggtacaggaagaaaggtttgcctcctggcacaatgggttggccactttttggggagacaactgagtttcttaagcagggtccaaacttcatgaaaacccagagagcaaggtatggcagttttttcacatcccacatactgggttgtcctaccattgtttccaggattcaaagcttaacagatacatcctaatgaa

SEQ ID NO: 14801 - DNA, 242 bp, Glycine max
  Clone ID: LIB3040-028-Q1-E1-F5
aaggatcacttaaggggtatactacttgactgaatattgaacacgattttgtacaattaatcataatttaaaaaggattcaataaacatttggaaatgatttatacctctaagattgttaacatcttaacgaggatagtgttgatcatcaaaagccctcatctggacaaaaaaaaatgcggctattcaagatgattcattactcatttagtcatgcaagctaattcatcctccaacatgtca

SEQ ID NO: 14802 - DNA, 174 bp, Glycine max
  Clone ID: LIB3040-028-Q1-E1-F6
agggatagcaaaatcgtatcgccagtttaatcaccagtgttcaacccaattcccttcctcgttttccattaagagatcaatggcacgtttcaagcaaaacgctcccaagtccaaccgaagaaatggtcccaagaaacaattggtaaccaaagccgctcgcaagtcaacccccgg

SEQ ID NO: 14803 - DNA, 348 bp, Glycine max
  Clone ID: LIB3040-028-Q1-E1-F7
ggactgcaaatccctttcagctttctgggtacggagaattttgtaagatggtagagtttcaaaggttgttggtgtgcatcaccacctgcattctatgttggatgcccaatggtgccactgccgccacagatccaaatgatgctgctgctgtgagatttttgtttcaaaatatgaactcaccaccccagctaggttggcctcctaatggtgatgatccatgtggacaatcttggaaaggcattacttgctctggcaatcgtgttacagagattaagttatctaatcttgggctaactggatcgttgccttatggattacatgtcctgacatctttgacctacgtacaca

SEQ ID NO: 14804 - DNA, 343 bp, Glycine max
  Clone ID: LIB3040-028-Q1-E1-F8
gcacttgcaatcccttttaacatttagggcaaggttcattttcgcaccaggccccagttccagcggttttcctcttaaccaaccacaggcattccaagtagattacggattgcctccacagtgccaaaaggtcgaactcatggtcgtgcagaatcattaggatcacaaatttggaaacttccacggcaacaagctcgacttcccactacacacgttatatgtgtgccacctagaaagcggataatttgaccgtctctctcctcacatatgagtgttcaggacatcttaaggtaaatggcgagagaccccaaagattccaattcctgacacctctgaactacgt

SEQ ID NO: 14805 - DNA, 367 bp, Glycine max
  Clone ID: LIB3040-028-Q1-E1-F9
tgggactcactcatacaatagagaccagcttttgcttctttgtgaacatggagatgaggaaatcatgtggcttcttcttcttgctcctcctccttgtctttgcttcccaggtggtggtgcagacggagggaagagtgtgtgagtcacaaagccacgggttccatggtttgtgtaatagagaccacaactgtgctttggtctgcaggaacgaaggtttctccggtggcaggtgcaaaggcttccgccgccgctgcttttgcaccaggatttgttgagatctcatcaaacactactcttgccatgcaaattaataaatcatagctaggccaaataaattgcatctactctttatccatttgggagctag

SEQ ID NO: 14806 - DNA, 377 bp, Glycine max
  Clone ID: LIB3040-028-Q1-E1-G10
ggaaacacgagtcttgaacaaacttcgaggaaagggatcgccggcggcaccctccgaagacggagatacacccactcactcaccaccactttcccagaaaataaccaccgcctacaatttctcggaatttattttgcgttttggtgcctttgttgttcggattttcaggtgagggagctcgtgtcgtgtgtcgtttagggttaaaaatggggtttaagtgggtgcactgatgtcattgttgtggcttgtgattcgtcaacttgcagaaatcgaggcaatggctgcatctaagaaactgataacaagagaagagtgggagaagaagcttagtgatgtgaagattagaacagaagacatgaataagttggtaatgaatt

SEQ ID NO: 14807 - DNA, 363 bp, Glycine max
  Clone ID: LIB3040-028-Q1-E1-G11
ggaaacacgagtcttgagcatacttcgaggaaagggatcgccggcggcaccctccgaagacggagatacacccactcactcaccaccactttcccagaatataaccaccgcctacaatttctcggaatttattttgcgttttggtgcctttgttgttcggattttcaggtgagggagctcgtgtcgtgtgtcatttagggttaaaaatggggtttaagtgggtgcactgatgtcattgttgtggcttgtgaatcgtcaacttgcagaaatcgaagcagtggctgcatctaataaactgataacaatagaagagtgggagaagaagcttagtgatgtgacgattaaatcagaacgacattaata

SEQ ID NO: 14808 - DNA, 381 bp, Glycine max
  Clone ID: LIB3040-028-Q1-E1-G2
gacagcactgcactcttcgcaacacagcaaaaaaagacaacccagagagcgcgtcttaataaacgctcttctctgaaaacccccatttcttttcttctttcttcttctctttcgcttcttcgatcttcgatcttcgtcgctgaaaatgagagagtgcatttcaatccacatcggccaggccgggattcaggttggaaacgcctgctgggagctttactgcctcgaacacgggattcagcctgatgggcagatgccaagtgacaagaccgttggtggaggtgtggatgctttcaacaccttcttcagtgaaactggggcaggaaagcacgtgccccgtgcgatttttgtagattttgagcccactgtgattgatgaggttag

SEQ ID NO: 14809 - DNA, 385 bp, Glycine max
  Clone ID: LIB3040-028-Q1-E1-G3
ggccattgttgttgctattatcatccgcagctgcttttattcgcaccgcaaacagtgagccatggccgtcggaaagaacaagcgcatctccaaggggaacaacggtggcaagaagaaggcagctgatccctttgccaagaaggattggtatgacattaaggctccttctgtttttcaagtggaaaatgttggcaaaaccctcgttctcgtactcaaggtaccaagattgcttctgaaggactcaagcatagagtgtttgaggtctccttggctgatcttcaaagggatgaggatcatgcattcaagaagattaggttgagagctgaagatgtgcaatggaagaatgtgctgacaaatttctggggaatggatttcacaacagaca

SEQ ID NO: 14810 - DNA, 279 bp, Glycine max
  Clone ID: LIB3040-028-Q1-E1-G4
tgccgttgcgataccactaaacaacggtaccgctgctaaataccacagaaagggtccgccaatttccgtagctactgttcttgcgcgttcacaggcgcaaagtgatccaaaaacataaggtaaccattaccttgtcaaccaaggatgactcttccgtaagcgctcctacaactatgtaaatacatagtttagtcaaacaccacggctcacatagacacgattggcacatcacatcaaagcgatgcacatatacactatatcaactcctcgacctctcat

SEQ ID NO: 14811 - DNA, 350 bp, Glycine max
  Clone ID: LIB3040-028-Q1-E1-G5
gagggtttcggagtcgttgcagagctgcgcgttgatctagaaaaatggcgaggataaaggtgtacgagttgaggaataagacgaaggcggagctactgaaccagctcaaggatctcaaggcggagctagccctgctccgcgtcgccaaggttaccggcggcgccccaaacaagctctccaaaattaaggtggtgaggctatcgatagcgcaggttttgacggttatttcccagaagcagaaagcggcgctgagagaggcttacaagaagaagaagtatttgccccttgacctccgtcccaagaagacccgcgccattcgcagacgccttaccaaacaccaggtgtctttg

SEQ ID NO: 14812 - DNA, 389 bp, Glycine max
  Clone ID: LIB3040-028-Q1-E1-G6
gatacctaaaaattgtaccgatatggcttcacttgtgtgtctccttttttccttgcatttcatggttatcatgtcaggttccttaccagcaaatagtgaagtgtttacaaaagagtctcctatgtctctagccacaaaacccgtggaaagactcacccaactccacttttaattccataacaacaaaatgggggaacacccgactgctatgaaaattgttgagcctcctaaggcgtccatttctgggtttggggactatttacatgatgggatgaccctcgaaacgaaaggacaagtccaacttcaaagcttgttggaagatgtcagggaatatatgctgaggcttcgcaacatgaacctgcgatactcatggtaacgaatttgttctt

SEQ ID NO: 14813 - DNA, 344 bp, Glycine max
  Clone ID: LIB3040-028-Q1-E1-G7
gattcacatatgtacgactgtcagtggcagagagagacagacgtggagtgtgtgggtgaagaagctctctgttgatgtttacctcttccattctaacctttgactctgtaggcttcagttgtgctatttaacagtgtagggcattgtgtgcctaggaaatagtaagtttgtataattactgtgcataaaatcagtatgggtgacgaagagtcagtgaatgaggtttcagaaactgattcatatgggaagagctttcaggagaaagctttggatgaaattactgacatgtaggacttggtcactgatggaagacaaatcctggagaacattggtatcaaaaacac

SEQ ID NO: 14814 - DNA, 379 bp, Glycine max
  Clone ID: LIB3040-028-Q1-E1-G8
gagtcagagagacagaaggcaggaagtcaaagagaggacacggtggttcggcggggaacaagttcctgatgtctctgggtctgccggtggccgctacagttaaatgccccgacaacacggcggcgaataagctcgacatcatagcggtgaaagggatcaaagggcatttgaaccgtctcgcctcggcttgcgttggcgacatggtgatggccaccgtgaagaaggggagacccgatcttaggaagaatgttttgccagctgtcattgttcgccagcgcgcaccatagcgcctaaaggacggcgtctacatgtattgcgaagataacgcaggtgtgattgtcaatcccaaacgataaattaaaggttctgctatcactgg

SEQ ID NO: 14815 - DNA, 394 bp, Glycine max
  Clone ID: LIB3040-028-Q1-E1-G9
aagaatgtgattggtgctcgcagagcgtcctggaggatcctgtcttccattgagcagaaggaagaaacaaaagggaacgagttgaatgcgaagcggattaaggagtacagacagaaggttgaattggagctatcgaacatctgtaatgatgttatgagagtgattgatgagcaccttatcccttcggctgcagctggtgaatccactgtgttttactataagatgaaaggagattattatcgttatcttgctgaatttaagtcaggcaatgagaagaaggaagctgctgatcagtctatgaaagcatatgagtctgctaccgctgcagcagaggctgatttacctcccacacatcccatccgattgggtctagctttaaatttctctgttttca

SEQ ID NO: 14816 - DNA, 387 bp, Glycine max
  Clone ID: LIB3040-028-Q1-E1-H1
gacatcacattttctcaaagtaatttattaattaataaataaatggcggcggcggcggcagtgacggtgctactcccacctaggattccgaccgccaccaacgttacccgctgctctgctttgccttctctgcctcctcgcggcaccaacactaaaaccactttgctcttatcttccctcaaccacttctcagtgtcccgaaaatcttctctgcttcagaccagagcttcttcagaggaatcatcctcagtagatgccaatgaggtgttcacagatttgaaggaaaagtgggatgctcttgaaaacaagtccacagtacttttttatggtggtggggctttagttgctgtttggctatcgtcgattcttgtgagcgccatcaactct

SEQ ID NO: 14817 - DNA, 323 bp, Glycine max
  Clone ID: LIB3040-028-Q1-E1-H10
aggccccaactagttgggtcaagaggtaacccacgtcctaaccaagggtaggactgaccgtgtatacatgtttaaaagtatctctaccttaagacttctaacatggccgattctagatagagagcgcggtaaccctactctacaaaaagtggaaaatctcttcatagggtactgtagctgtacagccatagtaccatagggatggtgagagttcatcagagcccgaattgatataggttaaatatccttactcaaattacgaaccctgaacctctttgcgaattcggctgaaccttgatgggaaatctgagatttctgatagg

SEQ ID NO: 14818 - DNA, 361 bp, Glycine max
  Clone ID: LIB3040-028-Q1-E1-H11
cacctacttgaagctcttgtgctctgattaccacttgatggaagcttgcttgtggggcttctatggaggctggatctttgagcttcaatgaggtcctttaatggtgattttccaccatggagatgcagcggaagacaaaggagaagaggtgagaggaggcgccatccactagggaataagccatggaagaaggagcttcaccaccaagatgagccttggataagaagcttggaaggatgcttcaatggaggtaaagaaagagggagagaaagagagaggggggagcacgaaattgaaggaataaaagagggagagaagtggaactttgaagtatgtctcataagactctcattcatcaaag

SEQ ID NO: 14819 - DNA, 360 bp, Glycine max
  Clone ID: LIB3040-028-Q1-E1-H12
ggcttgctgatcctcatcatgggaaccatttttcctcctcactctctctctccactcctcaacatcaaaccttcaccctcaagaattctcttggctccctctccccaacccaagtcaaattctctcttttgctccaaacccattgtttcaagtctcagaaagaaccaaacttcatctcccaaaccttcatcgggcacaagctggttggctcatgctcaacagggcctagcagctttggctatctccttggcactcaactttagcccagttttgtttaatggcaatgcattggcatctgagtttgatgtgcttaatgagggtccacccaaagattcttatgtgtttgatgatgcaggagtg

SEQ ID NO: 14820 - DNA, 358 bp, Glycine max
  Clone ID: LIB3040-028-Q1-E1-H2
gatccactactcttcttagttccagcacaacaagctcttcatttctcccacactttcttttctttcaccaaaaatgtcaccagatttcacacttttgttcttcccggaactcatgcagtcccctatgatcactttccaagccaccctctgcgtccttctcttcaccctcatgttcacgctgctcttcactcctggtgggcttccttgggcctgggcccggcccagacccatcatccctggcccagtaactgccctgttagggatctttactggctccacgcctcaccgtgctttatccaaactcgcccgtaattaccacgcggaaaaactcatggctttctccatcggtttaacccgt

SEQ ID NO: 14821 - DNA, 395 bp, Glycine max
  Clone ID: LIB3040-028-Q1-E1-H7
agaaggggaggacccatatttctatcttactaaagaaaactgggcccaataaacttgaaagccctcgatggtgaatgaggagcagatgagcaatctctatctatatcgacgtatcgtctaagctcagtgatcataatctatgccgatcgaaatcccatctaccaatccaatcctctcccaactcacaaggccatgtctccaggtcacgttgtcgacgcgtcgcctgaggttgatgcgcagcaacatgttccctccctcgatcacgccactcagaagaagatacgccaaccacaggaggacgattctcaccttgtcgaggacttgaaggatgatcacaaagacgactacgatcaagacgacaacgatgacgacgaggatgacaacgaacacgatgc

SEQ ID NO: 14822 - DNA, 387 bp, Glycine max
  unsure (1)..(387): unsure at all n locations
  Clone ID: LIB3040-028-Q1-E1-H9
naggggccaagattctcttaaccaaagcaatcttcagttttttttttttctctctcactcccttctctcctccttataaaccaatcaaccttagcctcagccacatccaaaattcagagtgtggttgtaaagttgcaatggaagtgttgagagttcaggtttttgttgtgtccattgtggctcttgctttggcttatgtggcaccttccatcaatgctcaggtccttcctcctgcccctgcccctgcacccacaagtgatgggatatcagttgaccaaggaattgcctatgtgctaatgctgctggctctggtccttacttacatcattcactaacctctctatcaccccattcatctattcactatgtttttcttcaactctattc

SEQ ID NO: 14823 - DNA, 312 bp, Glycine max
  Clone ID: LIB3040-029-Q1-E1-A1
gactcaccacttcaaaacactcataacacaaagcacaaagcaaagctcattcttgagttaaaaaatggcagcagcttcttccatggctctctcatccccatccttggctggcaaggccgtgaagctgggcccatcagccccagaagtgggaagggtgagcatgaggaagaccgtcaccaagcaggtctcctcaggaagcccatggtacggcccagaccgagtcaagtacttgggcccattctctggcgagcccccgtcctacctaaacggtgagtttccaggcgactacggctgggacactgctgggctttc

SEQ ID NO: 14824 - DNA, 215 bp, Glycine max
  Clone ID: LIB3040-026-Q1-E1-G7
tcaactactctcagcatcaatcacaaaaccctgattagctgattccctaatgagttggaattaaatggtcatacttcagatttagtttatgtacgagcatgtgtgatgtctcaaatgaaatacagatttgatagttttttaaaagaggtgtattccgaaaattagatagcatcttatctagacgaatgtcctaaccgacaacgtccaattgatta

SEQ ID NO: 14825 - DNA, 354 bp, Glycine max
  Clone ID: LIB3040-024-Q1-E1-E10
gaacctttgcattctattcattcaagattcagcaagtgcgttttggaagcagagaccgaaatacttcgagatggcccgtacaaagcaaactgctcgtaagtcaactggaggaaaagctcccaggaagcagcttgcaaccaaggctgcacgtaagtctgcaccaacaactggtggtgtgaagaagcctcatcgttatcgccctggaactgttgctcttcgtgagattaggaaataccagaagagcactgagctcctaatcaggaagcttcctttccagaggttggttcgtgaaattgcccaggatttcaagactgatctgcgtttccagagccatgctgtgcttgcattgcaaga

SEQ ID NO: 14826 - DNA, 366 bp, Glycine max
  Clone ID: LIB3040-024-Q1-E1-E11
gactcctttccgtcacttttggggaagaggtcgagtttcacagcagcaatggtgtacgtcaaggctcagaaatcaaaagcctacttcaagagatatcaagtcaagttcaagagaagaagagagggaaaaaccgattaccgtgccaggattcggttgattaatcaggacaagaacaaatataacactccgaaataccgatttgttgttcgctttagcaacaaggacattgttgcacaaataatatctgctagcattgctggcgatattgttcttgctgcagcatatgcacatgagctgccacaatatggtcttgaagttgggcttacaaattatgctgcagcttattgcactggtctcctgttgggc

SEQ ID NO: 14827 - DNA, 74 bp, Glycine max
  Clone ID: LIB3040-024-Q1-E1-E2
aaggtgaaaatcagcgacgcaagtcttcatttgctctcttctcttcttcgtcatgttcatatcttatgagctgg

SEQ ID NO: 14828 - DNA, 180 bp, Glycine max
  Clone ID: LIB3040-024-Q1-E1-E3
ggtcacattctacaagaacgaagtactactacaagggaagaaaaacttagctactacggacggatcagagagagtggctcaagcaatggcatcgaattctggcttgcgtggttcctctcaggatgtgttggaaggtagccctcatgtgagtggctccacacgcctgaatgtggggagtgg

SEQ ID NO: 14829 - DNA, 344 bp, Glycine max
  Clone ID: LIB3040-024-Q1-E1-E9
ggtgtgagtgaagaagcagagggagtagcggcattaaaaatgcagatcttcgtgaaaactctgacagggaagactataaccctcgaggtcgagagcagcgacaccatcgacaatgtcaaggccaagattcaagacaaggaaggcattcctccggatcagcagcgtttgattttcgccggaaagcagcttgaagatggaaggaccctggccgattacaacatccagaaggaatcaacccttcatctcgtcctcaggcttcgtggtggcatcattgagccttccctcatggctttggctcgcaaatacaaccaggacaagatgatttgccccaggtgctatgcccg

SEQ ID NO: 14830 - DNA, 362 bp, Glycine max
  Clone ID: LIB3040-024-Q1-E1-F10
gatctttcactcgttctctgaaattttaattgacttttctcccctcataaaaaaaacctaccaatggctcccgcaaaggcagagaagaagcccgcggagaagaagccggcagagaaggccccagcggagaagaagccgaaggcggagaagaagatatcgaaggaaggaggaagcgagaagaagaagaagagaacaaagaagagcgttgagacctacaagatctacatcttcaaggtgttgaagcaagtgcaccccgacatcgggatctccagcaaggctatggggatcatgaacagtttcataaacgacatcttcgagaagctcgcccaggagtcatcgcgtctcgctaggtacaacaagaa

SEQ ID NO: 14831 - DNA, 320 bp, Glycine max
  Clone ID: LIB3040-024-Q1-E1-F11
ggccatttttcgtagctgctgttcttgcgcgtgaacaagcctcaggtaagccaaaaccatggttaagcataacaatgttatcccaaacggacacttccgtaagcactggcagaactatgtgaagacttggttcaatcagccagcacggaagacaaggagacgattggctcgtcagaagaaagctgtgaagatattccccagacctacggctggacctctcaggcccattgtacatggtcaaactttgaaatacaacattaaagttagacgtggaaggggattttctcctgaagaactccagggaacagggattcccaaaa

SEQ ID NO: 14832 - DNA, 301 bp, Glycine max
  Clone ID: LIB3040-024-Q1-E1-F12
gatgccgaaaagtactaccaagatggcctcagttgtgtatctcctccttggcttccatctcaatgttatcatgtcaagttccttacccgcaactactcaactgtttgcaaaacagtatccatccacagaacccgtggaagaaaaactcacccaacaccacgtcaatatccataacaccataacgggggaacacccaactgctatgaaaactgttttgactcctaaggggtccattcatggttttggggctacttacatcatggatgatcctctatctaaaggaccaagtccatcttcaaag

SEQ ID NO: 14833 - DNA, 195 bp, Glycine max
  Clone ID: LIB3040-024-Q1-E1-F4
taagttgggaattattgctcccatcgccattggtttcattgtcggcgctaacattttgttgggtggggccttctctggagcggccatgaaccccgctgtgacatttgggcctgctgtcgtgagctggacctggaccaaccactggatccactgggccgggcctcgcatcggtggtggaagcgctggccttgttta

SEQ ID NO: 14834 - DNA, 59 bp, Glycine max
  Clone ID: LIB3040-024-Q1-E1-F8
tggggaggtaagaagttgtgctttggcatcaccgtggcttcgggacgagaatctcaatg

SEQ ID NO: 14835 - DNA, 262 bp, Glycine max
  Clone ID: LIB3040-024-Q1-E1-F9
gatgcttatgagataaactgcaggcgtaacaaaagttgcgtagccatactctgattcattagtgaagaaaaatggcaaccatcatcgccggcatcccaactacatcgatcactcgcgcaggtcttgtgctcaaacgacctgttggagcctcgtcctctaccgttcttggattgccagcactggctaaggcagggaaagtgaggtgctccatggaggaaaagccttcaagcagctcacatatacggatgggggcattcttgtt

SEQ ID NO: 14836 - DNA, 141 bp, Glycine max
  Clone ID: LIB3040-024-Q1-E1-G1
gacctaaaaattgtaccgatatggcttcacttgtgtgtctccttttggccttgcatttcatgggtatcatgtcaggtgcgttaggagcaaatactgaagtgtttacaaaagagtctcggacgtctctatcgaggagaaccg

SEQ ID NO: 14837 - DNA, 197 bp, Glycine max
  Clone ID: LIB3040-024-Q1-E1-G2
ggaaaaaaaggttatgatgccagaaaagaaaagaaaaaacacttgggacgggatttttaaatccaaggcagatagatctgtagactgaagttaattgtccaaaattcgccagttagtcactgagttcatccattcatccttcgcttatccctcgtgtttgggtcatggcaatttgttcctcactttcatcgtcatcg

SEQ ID NO: 14838 - DNA, 187 bp, Glycine max
  Clone ID: LIB3040-024-Q1-E1-G4
acaaggactctcggcaacggatatctcggctcttgcatcgatgaagaacgtagcgaaatgcgatacttggtgtgaattgcagaatcccgtgaaccatcgagtcgttgaacgcaagttgcgcccgaagccattaggccgagggcacgcctgcctgggtgtcacacgagagggggggggggggggcggg

SEQ ID NO: 14839 - DNA, 289 bp, Glycine max
  Clone ID: LIB3040-024-Q1-E1-G5
gactcacgacgccagactactcatctactcattttcattttctaagtactttgctctttctcacattcaaatgcaaagcccgccaccctttttcttccttgatgtagcaaaattcaaatcccactttagattgttcccaattcccatcgccttttctatttggaaactatggctttatcattggaagtttgagattccaacacccccatttcacttttcctttgtttggttttaaaaatttagttttttttcttcttttcttctcactttgcctgtttcccttttgttt

SEQ ID NO: 14840 - DNA, 373 bp, Glycine max
  Clone ID: LIB3040-024-Q1-E1-G9
ggaggcggaacctggagtggaagtgcgatcccagtgttagtgtgtatttcctctcttctcactccgggatcgatattttcaagaacagatcgaaaagccgttcatcgatttgttggatctgtgagtgagaagatggttactaagacagaggagactcaattgaacaggctcgaaaaccaggtcgataacggcggcggcggcgcgtgggagtacctctgcctcgtgcggaagctcaaagttcggcggtcggagaaagttctgaagcacggtctctccatccttaacgacctcagacaacgattctctctcggctccgatgaatggaccttgtatgagcaggttgctgttgctgctatggactgccaatgtctcg

SEQ ID NO: 14841 - DNA, 336 bp, Glycine max
  Clone ID: LIB3040-024-Q1-E1-H10
gattgagtacaacttcacattttagaagaataccccctcttttgctgcatcagaggagttgtaaattaagagcatggctgcacaagctcttgtatcatcatcttctcttaccttctcagcggaggctgcaagacaaagtcttggaccaagatcactccaatctccatttggcttctccagaaaagcctcctttcttgttaaggcagctgctaccccccctgtcaagcaaggatcagacagacctttgtggtttgcatcaaagcaaagtctttcttacttggatggcagccttccgggtgactatggatttgaccctctgggactttcagaccctga

SEQ ID NO: 14842 - DNA, 200 bp, Glycine max
  Clone ID: LIB3040-024-Q1-E1-H11
gattgagtccaacttcacattttagttgagtacgtcatcttttgcggcatcagaggagttgtcacttaacagcattgctgcaatagctcttactctcatcatcttctcttactttctcatcagaggctgcatgtcaaagtcttggacgcacatcattcacgtccagatttggtttctccagatatgcatcctctcttgtt

SEQ ID NO: 14843 - DNA, 304 bp, Glycine max
  Clone ID: LIB3040-024-Q1-E1-H12
ggcacttcaattgcaatcaaattagttcattctctttgcgcagttccctacctctcctttcaaggttcgtagatttcttctgtttttttttcttcttctttattgtttgttctacatcagcatgatgttgatttgattgtgttttctatcgtttcatcgattataaattttcataatcagaagattcagcttttattaatgcaagaacgtccttaattgatgactttataaccgtaaattaggtctaattaaagtttttttcataaagattttcagatccgtttacaacaagccttaattgttg

SEQ ID NO: 14844 - DNA, 207 bp, Glycine max
  Clone ID: LIB3040-024-Q1-E1-H2
gagagaacaagaatcaaagaatggcaactatgactggtgtgagcctttcaagccccagggttttcttcaacgcatcaccctcgccgcaaaacacgtacgccgtaaagttcgcagttccactcagccaagggactcgacttggtagtgtcaggttgggtcgggtgatgaggatgcgagccgttcgcgcagctccagagcgcagttcgg

SEQ ID NO: 14845 - DNA, 300 bp, Glycine max
  Clone ID: LIB3040-024-Q1-E1-H3
gcagctgcgaaaacctagtgcaccgtaagggttgtgaagcaggcagagaagagccatggtgcacgtttctttctagcgaaactatgggaaaacgttcaagaagcctcgtcgtccctacgagaaggagcgtttggacgccgagttgaagctggtcggtgagtacgggcttcgctgcaagagggagttatggacggtccagtacgccctgagccgcatccgtaacaacgccagaaacctattggaccttgatgagaagaacctcgccgtatcttcgaggggtaagcccttctccgaagaatg

SEQ ID NO: 14846 - DNA, 119 bp, Glycine max
  Clone ID: LIB3040-024-Q1-E1-H4
gagggtgtttgtcgtcgctactaagagttgctgcttcttcagccactccgcaactcgcagcctctgtgccctcaacaaccatggctgaaatcgaaactaccgttccagatcccacccaa

SEQ ID NO: 14847 - DNA, 310 bp, Glycine max
  Clone ID: LIB3040-024-Q1-E1-H5
gggtgaagtctggaaagaccagcgtgcaggttcttcaatcttctagagagagaaagttaaggattgaaatttggatcggagagagagagagagatagcgttgaatcctcaattgtttcctaatggaatgcccgttcctttcgtgaacgagatgtttgtgttggccagagacggcgtcgaattcgaggtcgatcggattcctgcctctggaaatcatgggggtcatctcaaaacagagggaatcgtgtatttgtcaaatattcggatggtcttcgttgctaaaagttcagttggacacttcactgcgtttg

SEQ ID NO: 14848 - DNA, 306 bp, Glycine max
  Clone ID: LIB3040-024-Q1-E1-H6
gacgtaagatccattctttcttaattctcacctccctcactcgttcattcgaacaaaaccctttttagtttttttccgcctctgtttctctctctgcgctgcattttggtggcatcatcagagatagagacttgagtgtgagagccacaacttctccaattcttcaaaagggtgaaagtttgaaggaaaagaaatggttggtgcgataaaggcacggattggagacgcggtgttgacgttcatgtgcgtgttctgttcctctgtgttgggaattgcctcatggtacataaacaatgcacttaacct

SEQ ID NO: 14849 - DNA, 357 bp, Glycine max
  Clone ID: LIB3040-024-Q1-E1-H7
ggaaggaacttttgtactttctctggggtgtgtgtgtgtgcctgtctcacaccacaaacactgaaagtacaatcttcttgtggttacaaaaactctgaaaaacacacacacacacacacttcttatgcctatggctggtgagcaaggtgatagattctcctccattaccataccccttctcgatgatgaaaaattgcaccaagtgaatggttcagatgaggctttggtggccaaaacttgtgatctacacacacctcatgtggataacacctcctttttcaagacctgcttccacctcattaatgccctctcaggagttggtattatttccatgccttatgcactggcatctggggg

SEQ ID NO: 14850 - DNA, 330 bp, Glycine max
  Clone ID: LIB3040-024-Q1-E1-H9
gctctttctaaaaaccagaaacaacaaacacaaaccgaaaaggcgaaaggggttttccgagtgagatctagggtttccatcgattcggagagaggatattgatcgaacgacctcagcgagcaaggacaggaggtggagtactagatcatggattcggtgccttcgaattcgcatggaaacctcgatgagcagatttctcagctcatgcagtgcaaacccttgtccgagcaagaggtatgggtcttgtgtgataaggcaaaagagattttgatggaagagagcaatgtacagcctgtgaaaagtcctgttacaatttgtggtgatattcat

SEQ ID NO: 14851 - DNA, 367 bp, Glycine max
  Clone ID: LIB3040-025-Q1-E1-A10
gagagattccatctgggtctccctcattcaccaccaatggagaccagcacacccttccaagaccttccagaagcatctccaaagcccttcgtcaagaaaagcacactcacttccttcatcatgtcttcaacaccttccttcaaggaagacacctactacatctcccacctcaaatcctccgagaaaaaaagccctccaagacctcaagaacacactccaatcttctgagtcttccaccccgtccatgtggggcgttcctttactcaacaacaacaacgccgacaacgccgacgtcatcctcctcaagttcctccgagcccgtgacttcagggtccacgacgccctctccatgctcctcaagtgcctc

SEQ ID NO: 14852 - DNA, 322 bp, Glycine max
  Clone ID: LIB3040-025-Q1-E1-A2
gagggttttgcgctgttgttgctgctcatcctccgtaacctccgagctctgcaccgaagaacgaagccatggggaagacacatggaatgggatctgctcgcaagctcaagtcccaccgcaggaggcaaaggtgggctgacagcggagagaggaaatcacatcttggaaatgaatggaagaaaccttttgctgggtcagcgcatggcgggggaattgtccttgaggaggggggtattgaggctaagcaagccggaggcggccattcgtaagtgtgccagggttcaacttatcaagaatgggaagaagattgccgcgtttgtcc

SEQ ID NO: 14853 - DNA, 144 bp, Glycine max
  Clone ID: LIB3040-025-Q1-E1-A3
gattgaagtggcaacatgtattgattatacacgaacgcagtattgtttactattaaaaaaaaaaaacccaagacaaccaacagatacaatcacatccgcacaccaaatcaaataaaaacaaaccaaaacaagaaaaaccggccg

SEQ ID NO: 14854 - DNA, 130 bp, Glycine max
  Clone ID: LIB3040-025-Q1-E1-A6
gggcttttcccattcgctcacgtgagtgttttgtttgcactctcctctccccttagcagtaccacaggattcagacaggattagatctagaggagaagttttaactgtccaacagcatcaccgcgactac

SEQ ID NO: 14855 - DNA, 283 bp, Glycine max
  unsure (1)..(283): unsure at all n locations
  Clone ID: LIB3040-025-Q1-E1-A7
gaacacacacaaactctctatcattttgcttttgtgccttctctaacataaaccaagcatgagtaagatcacggtcctgttcttcactgttctgttcctctgggggagtgatcacccactccacgcgccctcaaccagcttttcacaaggaatcttgtgggtcggagtccatcaggatgctgaggggggggatgaaagctgtgaancgatggggggagaggagtgtttgataaggaggacacttactgcacacatccattatatttatacgcagaagcataat

SEQ ID NO: 14856 - DNA, 268 bp, Glycine max
  unsure (1)..(268): unsure at all n locations
  Clone ID: LIB3040-025-Q1-E1-A8
cccacgcgtccgacgacagaaggggagagtggtggagtgtgcaaaagagcgtcgtagtcgcaaccctaatcagaagaagcgcagcttcaagcgagtgacagccaccagccatgggtcgtatgcacagccgcggtaagggtatatcctcttctgctttgccctacagggggggggctcctanctggctcaagatctcttcgcaggatgtcgaggagggtggcggcagcgtggggaggaaaggtttgggggcggcggagattggtgtcag

SEQ ID NO: 14857 - DNA, 403 bp, Glycine max
  Clone ID: LIB3040-025-Q1-E1-A9
gaccaaaccattctccaaacccttccacaaaacatcaacacggttttccttccaccggtgaaccctaatgacctaccacaaggtgttcccgtagttgtccaaattcagctagcaatggctcactccatgccctccatccaccacaccctcaagtccataacttcaaagactccctacgtggccatggtggttgattctttcgccatgcatgccctagatttcgctcacgagttcaacatgttgtcctacgtttacttccctatatcagccaccacactctccatgcacttgaacttgcccttgttggacgaggaaacatcatgtgagtacagatatctgccggaggctatcaaattaccgggttgcgtgccgtttcacggccgcgatctctatgcccaagccc

SEQ ID NO: 14858 - DNA, 171 bp, Glycine max
  unsure (1)..(171): unsure at all n locations
  Clone ID: LIB3040-025-Q1-E1-B1
gggatggacaacgttgtgganggaggttgaaaaggtaaaaaaggaatggaataaaccatccaaaaaaccccacgaccacattaaggcaaccccaaactacggcaaatcaccaaaaccaaaagaggaaaataattcccttgccaaatgagggggaagcccccaggatggctt

SEQ ID NO: 14859 - DNA, 378 bp, Glycine max
  Clone ID: LIB3040-025-Q1-E1-B10
gggtgccgtttattcatggaccagaagaatacatcatagcttctttctcatttcacacacacaagaaccttgagacatcatgaagatttcaagttccaagcaattggctgtgggatttgcacttggcaatgaaggataggcaacgttggagagctgaagaggatgctttacttcgtgcatatgtcaaacagtatggtcctagggaatggaatctcgtgtctcagcgcatgaacacacctcttaacagggatgccaagtcatgcttagaaaggtggaagaactacctcaaacccggcattaaaaaaggatctcttactgaggaagagcagcgtctagtcatcaatcttcaagcaacgcacgggaacaagtggaagaaaa

SEQ ID NO: 14860 - DNA, 351 bp, Glycine max
  Clone ID: LIB3040-025-Q1-E1-B12
gacaaaagacaaaaacaaggttttcttcctctgctatcaatctatcgaagggtcacttccgaatcagattccgattcagacgcataaccctttcagtgctttattgaactaacgaggttttcttcacgcagcttgatatcattgcattgtattctaattccatggaggagtcttcgtacatcggtcttctcactagccatttgctcggttcacttcctgctgtcataactgacgaagataatgccacgatacatgtggccaccggtgcatatatgcatacattctctcccaacagtggatgagacagtggaccacgacatcaatctcctggcagtcctattgaaacttttg

SEQ ID NO: 14861 - DNA, 292 bp, Glycine max
  Clone ID: LIB3040-025-Q1-E1-B2
ggtgtgagtgcgagagacacgaagacaggtccttggatagtaatacgtggattacgttttcagtcgccaaaatttggtttacaaaagccattcgccagaacaaccacaaaaggaaacaacgaacactggttttgaatccgttagcggcggcgttagctgatttagcttacgaacacacacctctagctctgtgttgatcgtttgcaggtcacagtgaccaggaggagaggggtttcgaaggtcctgtgatagcgtggaatgtaaaatcactctggcaatgggactgggaaca

SEQ ID NO: 14862 - DNA, 219 bp, Glycine max
  Clone ID: LIB3040-025-Q1-E1-B4
cccacgcgtccgcccacgcgtccgactcctggaaagaagtctcttgctattgaggcattctcccgtgcactcgtggctattccaacaatcattgctgataatgctggtttggacagtgctgagttgatttctcagctccgtgcagagcatcagaaggagggctgcactgcggggagtgatgttatttctggctctgttggagacatggctgaagggggg

SEQ ID NO: 14863 - DNA, 325 bp, Glycine max
  Clone ID: LIB3040-025-Q1-E1-B5
ggcagtttcaaattttcttttccgtcactttcccgagaaaaaaataacacttttcactttcttcactacgttctcacttcgatatggctcgtacgaagcaaaccgctcgcaagtccaccggtggcaaggcgccacgtaaggagggggcgcggcaaggccgctcggaagtccgctccggcgaccggaggagtgagggggcgccagcgggtcaggccgggaaccgtggcggggggggaaatcagaaagtagcaggggggcagcgagcttctcatcaggaagcttccatttcagaggctcgtgagagaaatcgcgcacgatttcaaga

SEQ ID NO: 14864 - DNA, 305 bp, Glycine max
  Clone ID: LIB3040-025-Q1-E1-B6
gaacagccagaacactttccacttgtctccgaattagttatcttgagaaacattattcccattgctatatattatggctagcatgaaggttacatgggtggttgtgatcatgtgcatggccgtgggagggtggagcgatgatggcgcaagccatgacatgcagtgatgtggcggtgagcagtggacacgggcgatcctacctgatgcgggggggggcaccttcaacactttgcttggagggggtcaagaacattcttggcgctgctgtcaccaccgttgacagacaaactgtgtgcaactgtctc

SEQ ID NO: 14865 - DNA, 317 bp, Glycine max
  Clone ID: LIB3040-025-Q1-E1-B7
ggagagagagtagtacatcggaagactcagtgagtttactgtttctctgactttgatgcatgcaggttgaagagtggaagacggtgaaaactaagaataatagaattaaataaaattcagagtaaatgaaaaaaagaaggaggtggagagagtgatgtagtgagtagtgagtgtagacaaggtttggtctttggggcggatgtggagcagtgcagggttgccgcaggggggtttctctccgagtgggagggggggagatgatgatttcagccttttaagaggaatgtgacactaggataatgctgaagaatggaaaa

SEQ ID NO: 14866 - DNA, 349 bp, Glycine max
  Clone ID: LIB3040-025-Q1-E1-B8
ggaatcgccaagttctgctcgtaaagtggttgttcatctcagagccaccggcgatgctcctattctcaagcaatccaaattcaagatagcaggaactgataaattcgctaaagtgatagactttcttcgccgacagctccggagggaaacattgtttgtatacatcaatagtgctttttcaccaaaccctgatgaattgggcagtgatttgtttaataagtgtgggggtgatggcaaactggtggtcggggacgcgtgttctatggcatggggctaaccctgaatgatggctgcaggttacaaaagctccatattgtgaagacattgtttccgttcagaaattcgggac

SEQ ID NO: 14867 - DNA, 187 bp, Glycine max
  Clone ID: LIB3040-025-Q1-E1-B9
tacggctgccaaaaaacaacaaaaggttacgcttccaaaaaaccaccaaaaggtaccgcttccaaaagaccacaacacggtaccgcttccaaaaaaccaccaaatggtaccgcttccaaaacaccacccaaaggtaccgctgccaaaagaccacactaaggtacagctgccaaaagaccacacaatg

SEQ ID NO: 14868 - DNA, 402 bp, Glycine max
  Clone ID: LIB3040-025-Q1-E1-C10
cggacgcgtggggacagaagggggacagaacacaaggcacagcacagcgcagcgccgcctcaacatctcaactttcccttcgatctcattctcaggtgttgttgaagcttcctgtgttggcttggtatccctgcaagtgctgctgtagcagattccaaggtgaaaggttcacgttgaactttctttcatgtttgaacgggctattatccatttgggagcaattgagttgcttagagagtgtttttcttcttctagaaaaaagaacaggcccttgcctacaagacccacctgtatgcactgcctggaatacaccaacctttgttgttgttcttgacaaccttcgctacatttgcttcccaagccaaaggcgtctgttgtgatttttctgtctttggaactttt

SEQ ID NO: 14869 - DNA, 356 bp, Glycine max
  Clone ID: LIB3040-025-Q1-E1-C11
gggtctctctctctttatctcactgcgactcactctagtgagagaaggaagaagcgaagaacaagtacacacacacacaaacacaagcatagttgaaaatggctctgcttagcctctcgtcgctgcaatgaagaaacgtatgtttttcttctccgaagaagaaaaatggctctcggcgacgatgcgcagcatgactctccctcgttcctcgatgcccttcgctgcgaagagcgagaaaccttcgaggaagactttgatgagaacggttatgagcgtgagaccgatgacaacgaaccctctgtgataaagtcgcaatctttgcccttggttttgcacgataatgacctgttctggga

SEQ ID NO: 14870 - DNA, 328 bp, Glycine max
  Clone ID: LIB3040-025-Q1-E1-C2
gaacatttgtctcgcatctttcaatttgaatcaacggttatacccttttctatttgagcatcatcatgtccaccgcagcgcagcccaaggccaagaaaacggcgtcgtccaagaagcccctctcccatcctaccttcgccgctgcggggggcggaggcgatagcgagtctgaaggagagaaccggttcgagcgaagaggcgggtgcgaggttcatcgagggcaagcggagggggttgcctccaacctacaggaggggtgttctcgttcatctcaggaagtctgttgctgctggcaagctcgttaaagtcaaaagctctttcaagctcg

SEQ ID NO: 14871 - DNA, 174 bp, Glycine max
  Clone ID: LIB3040-025-Q1-E1-C3
gactctcaagagatacgacacattaccagtcttcataaaaccccaaagcactctctctcgtgactcaatcacttcgttttctccgctttcatcttctcatctcttctcttttccctgctaatcatggcaaccttgtcaactgtgtgggggtcgccccattgcatgtttcaaaca

SEQ ID NO: 14872 - DNA, 245 bp, Glycine max
  unsure (1)..(245): unsure at all n locations
  Clone ID: LIB3040-025-Q1-E1-C4
gggtcttggcctgtatttgtatcatgaggatcaaatgtctaatttttaagcttctaaatttttgttttggttggatgtgatattgtattgtttcttctcgttgatgtgaatagaagtagacaataggtggctgttaggtacgtgggggagggcactgtcaagtatggtggaaaacttgaagccatagcgttggtgggaggantgggggatgcgtaggtgtagggagggggttttattgctcaggt

SEQ ID NO: 14873 - DNA, 296 bp, Glycine max
  unsure (1)..(296): unsure at all n locations
  Clone ID: LIB3040-025-Q1-E1-C5
cggggcgagagaagttattagggtttttgagtgcggcggtccaaacactcttctctgcagcttttgcctacaactcccttcaccatggctgaacaaaccgagaaagcttttctgaagcggggaggagtgtttctcancacaaagaagactgggaagggaaagagacctggaggaggtgggaagcgcgtttggaagtccagtgggcggggatttaagactcccatggaggggggcgaaggaacctagattgacaagaagtgccccttcactggcaatgtttccatccgtgggcgtat

SEQ ID NO: 14874 - DNA, 289 bp, Glycine max
  Clone ID: LIB3040-025-Q1-E1-C6
gagggtttcaaagtggacagaggagagcgtcctagtcgcaaccctaataagaagaaccacagcttcaagcgagtgacatccaccagccatgggtcgtatgcacagccgcggtaagggtatatcctcttctgctttgcgtgggggaaggacacctcctagctggctcaagatctcttcgcaagatgtcgaggaggggatctgggggtttgcgaagaagggtgtggggggcgtctcagattggtgtcattgggcgggagtctcacggtattgctcaggtcaacagcgtcac

SEQ ID NO: 14875 - DNA, 310 bp, Glycine max
  Clone ID: LIB3040-025-Q1-E1-C7
ggcgataaacacgtactagtacagagcatacctcaccaaaacccagcgtttcacattatcttcgtttttatttctccaatgggacaagcagcgtccacgccggtttcttcgacggacctgagtcaccgggatattttcagaggggggggggccatcggccgcgactacaccgccggcatccccgaggagtgccgggcgggagggggcgagtttctaagcgcggggggggcggaaaacctgctccgtggcgggggggcggtggctgcgcgtggacggcgagaaccgccagcgcctctccctggacgcgaag

SEQ ID NO: 14876 - DNA, 314 bp, Glycine max
  Clone ID: LIB3040-025-Q1-E1-C8
gacgacagaggcatgaggatgaggaggaggacaagttcactgtagcattgctcgactgtgttgttgtgtttgtgtgtacctatgttaaaataacagcaacaacaactaagactgaaaccagagctccataataagtgaggcgtggtgttttttcttgtgtctagttccccgagacaaagggttaaaggaggttgaacttgggggttgagactcgaaacgggcggcggttctgtctttaacacagatgggggggagttagaagttttctggcgctttctgaggggctatttttagcgggttgaagttgaagctgt

SEQ ID NO: 14877 - DNA, 351 bp, Glycine max
  Clone ID: LIB3040-025-Q1-E1-C9
ggaaacagagagtgatttcagtgagtgatcggtgttcacttgatctcatcataatcgtcagcgtcaattgaagaagatgccgatcagaaacatcgccgtcggaaggcctgaagaggcgactcaccccgacacgttgaaggcggctctggctgagttcatctcaaccttcatcttcgtgttcgccggctcaggctccggcatcgcctacaacaagctcaccgacaacggcgctgccacccctgccggcctcatctccgcccccatcgcccatgcattcgccctcttcgtcgccgtctccgtcggcgccaacatctccggcggccacgtcaaccccgccgtcaccttcggcgc

SEQ ID NO: 14878 - DNA, 378 bp, Glycine max
  Clone ID: LIB3040-025-Q1-E1-D10
gaaccaagtttgcttgcgtgtatattcattttagcatcaaggttgaatctcagagaaaaagaaacatcgacaagcatgtctggaagaggaaagggaggcaagggtctcggatagggaggagccaaacgacaccgtaaggttctgagggataacattcagggaatcaccaagcccgcgattcgccgtctggccagacgtggtggcgtcaagcgtatcagtggtcttatctatgaagaaactcgcggtgttctcaagatctttctagagaacgtcattcgcgacgctgtcacctacactgaacacgctcgccgcaagaccgtcactgccatggacgttgtttacgcgctcaagatgcacgggaggaccctctacggattt

SEQ ID NO: 14879 - DNA, 304 bp, Glycine max
  Clone ID: LIB3040-025-Q1-E1-D2
gaaagtagcagagcagagtaaccagcgaggtagggttttctctttctcacgttcctcttcgcagcgccacagtagcttcgcattagcaatggcgagaatcaaggtgtacgagctgaggtacaagacaaaagcagagcttctgaggcgagcggaaggatctcaaagcagaactcgctctcctccgcgtcgctaaggtcacgggcgggggcgcagacaagctttccaggggcggagtggttcggctttcgagagggcgggtgctgacagtgatttcccagaagcaaaaggcagcgttgagggaagc

SEQ ID NO: 14880 - DNA, 267 bp, Glycine max
  Clone ID: LIB3040-025-Q1-E1-D4
ggtgtcgacgtgtattcagcacacagcatagctcctctctcccccatggtttggaatcgaatgccgtagagtacatgaggggggcgctttcttgtagcatttctaagctatcacagctccagctcctggttgcagtttcgcgcgtcacaaagtgaaccgggtgggggataacaccgtttcaaggatgggtgctctcaacgttccatgaaaatctttttgtagtactgagggtgtgaagattgctggttgccctagtccagaggtttc

SEQ ID NO: 14881 - DNA, 306 bp, Glycine max
  Clone ID: LIB3040-025-Q1-E1-D5
gagtatcacaacttggtttacaccaataattggaagacaaatgttatattcactctattttttttttaagtacacttccattttattttaatttaaattttttactaccattaatatttcgaaaagtaatttttaagatggggggtgagtttattcaagttcaaaaagtaattttcggaatgcgaatatggagggagattgggggggagagagcaggagcggggaggggttgagcgtttgagatgtagggggggtccgaatgttagacagagaggccaatcagacaagaaagacgggaacaagata

SEQ ID NO: 14882 - DNA, 279 bp, Glycine max
  Clone ID: LIB3040-025-Q1-E1-D6
gactcctcaacgctttctcatcgctgatcaaacttcaaaccctagctaggatttcaaggtacacttaacgatggcttcaaaacgcattactaaggagttgaagggtcggcagcaggaccctcctgtttcctgcagtgctggccctgttggtgatgagaggtttcagggggaagctacaattaggggtggagcggacagtccttatgctggtggggtagtcctggtgaccattcacttcccaccagattatccatttaagccaccaaaggtttccttccg

SEQ ID NO: 14883 - DNA, 303 bp, Glycine max
  Clone ID: LIB3040-025-Q1-E1-D7
ggaaacagagagtgatttcagtgagtgatcggtgttcacttgatctcatcataatcgtcagcgtcaattgaagaagatgccgatcagaaacatcgccgtcggaaggcctgaagaggcgactcaccccgagggggtgaaggcggctttggctgagttcatctcagccttcagcggcgtgtgtcgggggcgcaggcgccggcatcgcctagaggaagggggccgacaacggcgctgcgacgggggccgggctcatctccggctccatcgcccatgcattcgccctcttcgtcgccgtctccgtcg

SEQ ID NO: 14884 - DNA, 298 bp, Glycine max
  Clone ID: LIB3040-025-Q1-E1-D8
gatagctcacacactaaggatttgatttctcacatcccacacttcagcgtcaagctctgctttcataatctcacttcttcagctcaagatgctgaagtcctcaatcacgctttcagatgatgaggagctgatcactatggtcggagttcatcactgtgtcacagttgtgttcatcagacgtaggtaagcattgatcttagtgggagatttaacaggtggagtgggagcatatcccttgagtccgatgtcgcaggggacgttgggatagccattcacccgtgtctgttgctgcctgtgg

SEQ ID NO: 14885 - DNA, 359 bp, Glycine max
  Clone ID: LIB3040-025-Q1-E1-D9
ggaagaaatgcaacagattatggaagaaaacaggactttgcatgaacttaacttctcttccaccaggtcattgaaaaatcagcaaatggaaatttctgagctgaagaagatcaaagagaaacttgaacgagagtttgctgtaaaagttgaagaaagtaatgtcctccaatgggaatctcatcaaataaaggatgaaatcctgggcttgaataatagataccaggctatactggaagaactaggctctgtgggtttgaatcctaaatcttttgcagcatctgtgaaggatttacagaaggagaatacaatgataaaggatgcttgcaaaatggagcgagatgagaaagaagctctgcatg

SEQ ID NO: 14886 - DNA, 340 bp, Glycine max
  Clone ID: LIB3040-025-Q1-E1-E1
gaaaacttgaaatacctccaactccaagaacacaaccactcaaaagggttgaaagagagaaaagggtttaaaaagtagtgaagtgatcaatgtctacagaggaagagagtgcggtgaaggagcctttggatctcattaggctcagcggcgacgagcgtatctatgtcaaactccgttccgacagagagcttcgtggcaaacttcacgcgtatgatcagcatcttaagatggggcgtggcgatgttgaagagatgagtactacagtggaaatcgatgatgagacatacgaagaaattgtgaggactacaaagcggacagttcctttcctgtttgtcagggg

SEQ ID NO: 14887 - DNA, 344 bp, Glycine max
  Clone ID: LIB3040-025-Q1-E1-E10
gaattccccattgagcgcaccgaaagcaaagtgtctctctaacctctgcaaaagtccaaggttgcacggttttaactgcttaggtttttgtcttcaaaattaaaactgtgcaactttggttgcaaagtcataggggttaagttgtgtttgcatgaaagtgggcttgagataattgtgcctcttgtatgatggaatccctttggaagcttttgtatttgctggagcctgcgcctgtcacacttatcactacagctgtggctgtgacatttggtgctgcttttcgagctctaaactatgggaaagaaatggagcgtaatcgggacttctctgaagcatcgattaca

SEQ ID NO: 14888 - DNA, 375 bp, Glycine max
  Clone ID: LIB3040-025-Q1-E1-E11
gctagcaatactaatagcaaaaactcattcgcgatctcgttccgtacgtgcagccgcagcaagtgatcgaagcgaaagagagagaaattcatcgtcgcagtaatcatgggtaaggttcatggatcacttgcacgtgctggtaaggttagagggcaaaccccgaaggtggccaagcaggataagaagaagaagccacgtggccgcgcccacaagaggatgcagtacaatcgccgattcgtcaccgccgtggtgggattcggcaagaagaggggacccaactcgtctgagaagtgaggccgaggcttgaggaatatgttgctactctatttgatttatctttgttgttttttatttatgtttaatttgtatgttttg

SEQ ID NO: 14889 - DNA, 375 bp, Glycine max
  Clone ID: LIB3040-025-Q1-E1-E12
gagggtttttgtcgtcgctactaagagttgctgcttcttcagccactccgcacctcgcagcctctgtgccctcaagaaccatggctgaaatcgaaactaccgttccagatcccacccaaatcgacgtcaaactcttcaatcgcgggagcttcgaggatgttgaggttaatgatatgtctctggctgattacattggagtgtccccatcaaagcatgctacatatgttcctcacactgctggtaggtactcagtgaagaggttcaggaaagcgcagtgccccattgttgagaggctcaccaactctctgatgatgcacgggaggaacaatggaaagaagctcatggctgtcaggattatcaagcatgccatggaga

SEQ ID NO: 14890 - DNA, 325 bp, Glycine max
  unsure (1)..(325): unsure at all n locations
  Clone ID: LIB3040-025-Q1-E1-E2
gagggttttgcgctgttgttgctgctcatcctccgtaacctccgagctctgcaccgaagaacgaagccatggggaagacacatggaatgggatctgctcgcaagctcaagtcccaccacaggaggcaaaggtgggctgacaagtgggagaggaaatcacatcttggaaatgaatggaagaaaccttttgctggttcagcccatgcgaagggaattgtccttgaagggagggggattgangctaagcagcgcagggcggccattcgtaagtgtgccaaggttcaacttatcaagaatgggaagaagattgccgcttttgtccctaa

SEQ ID NO: 14891 - DNA, 325 bp, Glycine max
  Clone ID: LIB3040-025-Q1-E1-E3
ggctgtgagtgagattacccatagatagagagcgcggcataacctaaacttacccttcttctctctgtgtgtgtgcgcatcaaacgcaaccagaagcagccatggccactgcaagaactgtgaaggacgtttctcctcatgagttcggtcgaagcttactcttctcacctcaagcgatctggcaagatggagctgccagagtggacggatattgtgaaaactgcaagatgtgagggagttggctccttattatcgtgactggtactatgtcagagctgcttccatggcaagaaagatctacgtgagaggaggacgtggtgttggt

SEQ ID NO: 14892 - DNA, 283 bp, Glycine max
  unsure (1)..(283): unsure at all n locations
  Clone ID: LIB3040-025-Q1-E1-E6
ggagaaaggctctttggcttgtattgaaaggtaagcaattgaaggttagaggccgaaagagagtggaataacagactagtcttaggaggtcgctagtgaaggtgaaacctgctctaagtgaagcaaaatcacttgcttgtgaagaagctcacaaaatctcttgcaagtgaaggggtgtangctctgaccttgttttggggaattgcaagctaagctggtttagttagtagctagcctttctcgcccttcttatatatattccacaattcaacaatcaatcagc

SEQ ID NO: 14893 - DNA, 323 bp, Glycine max
  unsure (1)..(323): unsure at all n locations
  Clone ID: LIB3040-025-Q1-E1-E7
ggttctagtgtatgtgattgttgtgactcgttcttcttcgtcgttatcttcttcttttgttgtttgtgtgtttgttttttctctcacctgaaaatgtcttgctgcggtggtaactgtggttgcggaagcgcctgcaagtgggggaagggctgcggaggctgcaagatgtagccagacttgagctacaccgagtcagccagcagggagaccttggtcatgggagtggggccanttaangctcaagtcgagagtgctgaaatgggtgttcccgctgagaacgatggctgcaaatgtggagctaactgcacctgcaacccctggac

SEQ ID NO: 14894 - DNA, 372 bp, Glycine max
  Clone ID: LIB3040-025-Q1-E1-E9
gacagacagacacacactcggttctgccttcacaaaataattatcgagatcccctttttctcctaagaaaagccatggctaacggtcccggtctctactctgacatcggcaagaaagccagggatctgctgttcaaggactaccacagtgaccagaagttcaccatcaccacctactcacccactggagttgctataacagcatcaagaaccaggaaaagtgaactgtttgtggctgatgtcaacacccagttgaagaacacaaacatcactactgatatcaaagttgatacagattctaatctcttcacaactatcactgttaatgaacctgctcctggtctgaacgctatttttagcttcaaagttcctg

SEQ ID NO: 14895 - DNA, 352 bp, Glycine max
  Clone ID: LIB3040-025-Q1-E1-F1
gatgccgaaaagtagtaccaagatggcttcagttgtgtatctcctctttggcttccatctcattgttatcatgtcaagttccttacccgcaactagtgaagtgtttgcaaaacagtatccatccacagaacccgtggaagaaaaaggcacggagctccacttctatttccataacaacataacgggggaacacccaactgcgatgaaaactgttttgcctcctaaggggtgcagtgatggttttggggctagttacatgatggatgaccctctaactgaaggaccaagtccaacttcaaagcttgtgggaagatctcagggaatatacgctttggcttcacaacatgagcct

SEQ ID NO: 14896 - DNA, 354 bp, Glycine max
  Clone ID: LIB3040-025-Q1-E1-F10
gacaccacacacacacactgtctatgaagccgaaaaatcggttctcccatcgatgaatccccgtggataagatcaaggactaaaatttgttcttttttataatattactgccccaaagaagttacctttcaattctttccccttccctatatataatcctttcataaccccttcaaactaccactcctgcagtttttgagttaccttgcatgcctaaagaaatcactcgttctttagagcacttttcattttcctctcttctttaactctcagaggattattttcgctaatatccaagctttaagatcatggaagttgcgcatttcattttcgggatatttgggaatgtttctg

SEQ ID NO: 14897 - DNA, 335 bp, Glycine max
  Clone ID: LIB3040-025-Q1-E1-F2
gatcacaacactaacacagattttgattcgattcgattcgattcagtcgaggttttaagcagcagcaagatgtctgggcgtggaaagggaggaaagggattgggaaaaggaggagcaaaacgacatcgtaaggtgctccgcgagagacattcagggaattacgaagccagcgattcgtcgtttggctcgcaggggtggcgtgaaaggtatcagcggtttgatctacgaggagactcgcggtgttctcaagatggtcgtggggaatgtcatccgtgacgccgttacttacacggagcacgctaggaggaagaccgttacggctatggacgttgttt

SEQ ID NO: 14898 - DNA, 330 bp, Glycine max
  Clone ID: LIB3040-025-Q1-E1-F3
gtctctctcacacacacacatcccagccatgagcctcttcggtataggcagaaaccagagaacattccgcccgaaaaaaagtactccttctggaagtaagggagctcaacttcgaaaacatattgatgccacgttaggtagtgggaggctgagggaagcagtaaagctacctcctggggaggatttaaatgagtggctagctgtcagcactgttgatttcttcaaggaggggggtctgctttatggtaccgttagagagttctgtactcctgagaattgtcgggcaatgtctgcaggacccaagtatgaatagagatgggcagatggtgt

SEQ ID NO: 14899 - DNA, 310 bp, Glycine max
  unsure (1)..(310): unsure at all n locations
  Clone ID: LIB3040-025-Q1-E1-F4
gagaggcggaagcggcaaatcgcttcgaccgagttccacaacagcagcttagcttagtagcttaactctttctactggcgtggcgctgctggatgcttttgatcaatagaacaggaagaggagtcagccaaaaagaaagaccgggagggagggatgaccaccaagatatgcatagtgagtcgatcgtttggatgagccagttttggggaggcagtttggggggcttcaggggggacacngaagattggattaggggaatcacgagtcttatatactgtgttacgatcacctcagattgataaaaagtcca

SEQ ID NO: 14900 - DNA, 338 bp, Glycine max
  Clone ID: LIB3040-025-Q1-E1-F6
gactcaccacttcaaaacactcataacacaaagcacaaagcaaagctcatccttgagttaaaaaatggcagcagcttcttccatggctctctcatccccatccttggctggcaaggccgtgaagctgggcccatcagcgcgagaggtgggaagggtgagcatgaggaagaccgtcaccaagcaggtctcctcaggaagccgatggtacggcccagaccgagtcaggtggttgggcccattctctggctgaggcgccgtcctacctaaccggtgagttcccaggcgactacggctgggacactgctgggctttccgcagacccagaaagcttcgccaag

SEQ ID NO: 14901 - DNA, 302 bp, Glycine max
  Clone ID: LIB3040-025-Q1-E1-F7
ggaccccattaagaaccacttcctatacattggatgcaaccaaacaacagtattgattaggatttcagaaattttgacaaaaaatcaaaataaaataaaatgtgtaaatccatgggacgttttggaacaactagagcatggagaaccatggtttatttttggaataggaagggcatatcaaaatttagttacttgagagggggacagaacactcataggcagggtggcagtaatttagttttgatgcattttccatgtatagatttttacactgtctgacaattagaaatcactctatacat

SEQ ID NO: 14902 - DNA, 330 bp, Glycine max
  Clone ID: LIB3040-025-Q1-E1-F9
gatatatatatatatatatgtgtgtgtgtgtgtgtgtgtgtcaaactctatttttgtttcattcatacaaatacaaattaataaaaacaacaggttctttgctccttgtggctctcatcaggctctgatcacacttcgatggcaaagtttggattatctccactcttggtgctttccatattgttgctgatcatgagtggtggtgcagtgagaggccaaagagaaatggtgcctgccttgttcatatttggtgactctctcattgacaatggcaacaacaacaaccttccttcctttgctaaggccaactattacccttatggcatcgac

SEQ ID NO: 14903 - DNA, 328 bp, Glycine max
  Clone ID: LIB3040-025-Q1-E1-G1
ggccgcgctcttgaaagcttgaactgagatacgatttttttttcagcgtttaggcgaattcaccgagagttgcggctgggaatggacggtgacggcgaggagttgactgcgcaggagaccgctttgtatgaccgtcaaattagggtttggggagctgatgctcaaagaagattaagcaaatctcatgtcttaggcgagggaatggggggaactgtagctgagttgtgcggggatattgttctggctggagtgagggtagtcggactttagtagatgaccgggttgccactgaggaagtgctttcctcgaattttctcatccctcctga

SEQ ID NO: 14904 - DNA, 256 bp, Glycine max
  Clone ID: LIB3040-025-Q1-E1-G10
gggttttggctcgagctctgcgagatcttcattcgccgattttaaaagatgagtaagcctcagagtgatgcttttccttaaaccaattcaaggatcaagggcgaatccaaggagaagaatcccaaatttgtggagaccatcgaactccaaatcgggttgaaaaactacgatccacagaaagacaagcgtttcagtggctctgtcaagctgccccacatccctcgccccaagatgaaaatttgcatgcttggtgatg

SEQ ID NO: 14905 - DNA, 57 bp, Glycine max
  Clone ID: LIB3040-025-Q1-E1-G11
gagacctcaggtcaagcggggctacccgctgagtttaagcatatcaataagcggagg

SEQ ID NO: 14906 - DNA, 281 bp, Glycine max
  Clone ID: LIB3040-025-Q1-E1-G12
gagggttacaatccttggtgttgatccaaaacgtccacacattcgtcatggacatatacacaatgggtccgacagaaacgtgtcaaagggtccgttgtaacagcgaacaagaatgttcaggaaaaggtcatcaatcctttgttcgagaagcgtctcaagcagttcgggatcggaggcgcgctgccgccaaaaccggacctgacgccgttcgtgaagtggccgaagaaagtccaaatccaacgcaagaagcacatcctcaagcagaggctcaaggtccctct

SEQ ID NO: 14907 - DNA, 318 bp, Glycine max
  Clone ID: LIB3040-025-Q1-E1-G2
ggtggtggggtgtgcagaagagcgtcgcagttgtaaccctaatcagaagaagcgcagcttcaagcgagtgacagccaccagccatgggtcgtatgcacagccgcggtaagggtatatcctcttctgctttgccctacagatgcggaggctcctagctggctcaagatctcttcgcaagatgtcgaagaggatagctgcaggtttgcgaggagaggtttgaccccgtcggagagtggtgtcattctcagagaggcggcggtattgctcaggtcaatagcgtcactggcagcaaaatccttcgcatcctcaaggctcacg

SEQ ID NO: 14908 - DNA, 62 bp, Glycine max
  Clone ID: LIB3040-025-Q1-E1-G4
gttcaagattttgccttgtttaaataatgaataccatgtcttcttttgagttccatgtttac

SEQ ID NO: 14909 - DNA, 378 bp, Glycine max
  unsure (1)..(378): unsure at all n locations
  Clone ID: LIB3040-025-Q1-E1-G5
caacataggtcatcgaaaggatctcgaagacccaccaacgcacgaaagccgggatctttcagaaaatggattcctattcgaagggtgcataaccgcatggataagctcacactaacccgtcaatttgggatccaattcggtgccggaggaggtatcgggaaggaattttggaatgtaataatatcgattcatacagatacagaggaaagggttctctattgagtgagaggctctacctacgagatgnggatagagaaagaggaaaaaaccgaggatttcacatagtacttttggtcgaaaaatcgatctgatttttttcgtacttttcgctcaatgatgaaatgggtcagattcgacaggaccagagcttggtggagt

SEQ ID NO: 14910 - DNA, 318 bp, Glycine max
  Clone ID: LIB3040-025-Q1-E1-G6
gaaggttttgtgccgttgtcgctgctcatcctccataacctccgaactctactcctaataacgacgccatgctgaagacacatggttcgtcacctgctcgcatcctcatgtctcacctcatgaggtactggtgggctgagaggtcgatttcaatctcccatcttgagaatgattttcaggtcccttttgccggttgagcgcatgccaggggaattgtccgtgaggggcgaggtattgaaactaagcaggggaactctgctattcgtaagtgtgccagcgttcaacttatcaataatgggaactgaattgcagcttttg

SEQ ID NO: 14911 - DNA, 241 bp, Glycine max
  Clone ID: LIB3040-025-Q1-E1-G7
gacagcactgcactcttcgcaagagaacagaaaaagacaacacagagagaagcgtcttaataaacgctcttctctgaaaaacctgatttcttctcttcttctcttctctttcgtttcgatcttcgatctctgaaaatgagagggggcgggtcaatccacatcggtcaggccggtagtcaggtcggaaacgcctgcggggaagggggggggctcgaagacgggaggggggctgatgggcaga

SEQ ID NO: 14912 - DNA, 340 bp, Glycine max
  Clone ID: LIB3040-025-Q1-E1-G8
gaccgtgcgctagttctgagtattctgatcgctccctgagagagctcgtcgcggcggttgcagaagaagattgcaagatgaagttcaacatcgcgaatcccaccactggatgccagaagaagctcgagatcgacgacgagtggaggcggggagcattttgggacaagaggatctcacaggaggtcatcggagatgcactcggtgaggaatttaagggctatgtcgggaggattaccggaggttgtgacaggggagcgatttccaatgaagcagggagtgctgactcctggtcgtgttagacttttgcttcacaggggaactccttgcttccgtggagatg

SEQ ID NO: 14913 - DNA, 377 bp, Glycine max
  Clone ID: LIB3040-025-Q1-E1-G9
gagggttttgcgctgttgttgctgctcatcctccgtaacctccgagctctgcaccgaagaacgaagccatggggaagacacatggaatgggatctgctcgcaagctcaagtcccaccgcaggaggcaaaggtgggctgacaagtcatacaagaaatcacatcttggaaatgaatggaagaaaccttttgctggttcatcccatgccaagggaattgtccttgaaaagataggtattgaggctaagcagcccaactctgccattcgtaagtgtgccagggttcaacttatcaagaatgggaagaagattgccgcttttgtccctaatgacggttgcttgaactacattgaagagaatgacgaagtcttgattgctgga

SEQ ID NO: 14914 - DNA, 119 bp, Glycine max
  Clone ID: LIB3040-025-Q1-E1-H1
gacaacaaaatttgccacatgccaattcacgcctcaatttctttcctcaacgtttccatcacacatagatcccaatcctctcccatgccctatgttcccctcacttccatgggcacaca

SEQ ID NO: 14915 - DNA, 199 bp, Glycine max
  Clone ID: LIB3040-025-Q1-E1-H10
ggatagctgagagagaaaggaaaggttaactaagaagcaatacttcaatggccacccttgttgttcataaccaaggttcttctgctcaagatgctgaggctctcgaacaggctttcaaaggatggggggctgatgacaatgccattatagcaatactgagtcacagaaatgttcatcagaggcaagaaatcagaaaagc

SEQ ID NO: 14916 - DNA, 300 bp, Glycine max
  Clone ID: LIB3040-025-Q1-E1-H11
gagatagctcagagagaaaggaaaggttaactaaagaagcaatacgtcactggacacgcttgttgttcatatccacacgtcttctactcaagatgccgacgctctcgaacaggctttcaaaggatggggggcttgatgacaaggccattataccagtactgggtcacagtaatgttcatcagaggcaatgcatcagaaaagcttatcaggagatttactaataggatctcagcaagcacctttagtccgacatctctggtgactttgctaaatctatataccgatggatgttgcagcctg

SEQ ID NO: 14917 - DNA, 382 bp, Glycine max
  Clone ID: LIB3040-025-Q1-E1-H12
gattgtgattggttgtagtgttatgttactgttactaaaggaaagaagaaaaagggaggaagtggatgacgagtgcacacgtgggagccatgtctagttctacatgcttcccttcacttcctcgacttcttcgaccttctttcaccaaaaccaaatcatcacctaagttcagcatgagcatgagcaaggatccggttcgtgagtggattctttctgatgggaaagctatggagataaccaaaattagccctgttggtgggggttgtatcaatcttgctagtcgctacgacaccgatgctggttcactcgttgttaaaacaaacaggagtattggaccatccatgtttgaagctgaggctcttggtttaggagctatgtatga

SEQ ID NO: 14918 - DNA, 320 bp, Glycine max
  Clone ID: LIB3040-025-Q1-E1-H2
ttcatagatttagggaatcgattactatactaataataaattgtacaaaaaataaagatataaataatataaatataaaaagaacaaacacaaattttatgtgattagtcgccgtatttaaaataaaaaaagggaggagggaaataaagaaggaaaggagatgtttggataaagggaagtccccgtcgagttcggaggttttgagaggacagggaaggaggggatgttttattatgctctaggagagacagtaagaagattatatgagatatctgctgtggaagtaagtcaacatttctattggcaaatagggagtttcc

SEQ ID NO: 14919 - DNA, 322 bp, Glycine max
  unsure (1)..(322): unsure at all n locations
  Clone ID: LIB3040-025-Q1-E1-H3
gacctcacccagttgcagaaagaaaagaccatcaaagtttcacttcagccttatccggtttagggtttcggtttttgacccaacctttgacgtatcgaaaccttaagtttcggatgaggtcggagcaatctggttggtagaacctttggtcttagagagtcaagttttatgtctgagttagacgatcaaattcctagggcgggggatccttttgctgatngaagtgcggatgactcgggtgctgggtcaaaggagtatgtgcatattcgcgtacagcagcgaaatggaaggaaaagcctgacaaccgttcagggattgagga

SEQ ID NO: 14920 - DNA, 332 bp, Glycine max
  Clone ID: LIB3040-025-Q1-E1-H4
gaacagcgaaacagagagtgatttcagtgagtgatcggtgttcacttgatctcatcataatcgtcagcgtcaattgaagaagatgccgatcagaaacatcgccgtcggaaggcctgaagaggcgactcaccgcggaggaggtggaaagcggctttggctgagttcatctcaaccttcagcttcgtgttcgccggcgcaggctccggcatcgcctaggagaggggcaccgacaacggcgctgccagggcctgccgggctcatctccgcctccatcgcccatgcattcgccctcttcgtcgccgtctccgtcggcgccaagatctccggcgggc

SEQ ID NO: 14921 - DNA, 391 bp, Glycine max
  Clone ID: LIB3040-025-Q1-E1-H5
gaaaattctaattaaaaaaaagacaaaaataatttatattttcttaaagaacaaaatgtttgttatgcttaatatctttaatttggtctgtatttgtattcactccgtcctttattcaagtagttttttctcggcgaaggtggcgcgaagcctacgctttcttgaatccaattgtggatattatgccagtgatacccttaggcgtttttcttttagcttttgtggggcgagctgctgtaagtttgccgggagatctgtaatttgagtaatgtcttaaaaaaaaattaagaatttatcagaaaactaaaattcgaacattttaacaatttaaaagatgggataagtcttacagtgtgaattagggattccgagattgaaatttttggatata

SEQ ID NO: 14922 - DNA, 316 bp, Glycine max
  Clone ID: LIB3040-025-Q1-E1-H6
tggaagctacagcactgagcgtgaaagagcccaactggattgcaactggttggaacgttggatgtcatcacaatcacccaacttaagaccacgtgagaccctttataggacgcgtgccaatgctacttccaccactgattacatgtctgaagaaaagacacttgagagggacatgggtgcaactctggacgcgggggcatgctaatatgggcttcaggaatggagaatcttttgacacaagcccaatttctaataggtaccatcagcgccaccacagtgctggtgtctctagctacatggccccaaaccagtctgc

SEQ ID NO: 14923 - DNA, 90 bp, Glycine max
  Clone ID: LIB3040-025-Q1-E1-H7
gaggacctctatgctgcgtgtttcctttggattatgctattacctcacctggtttgcttttaatgaaaggttgataacaaatttatatag

SEQ ID NO: 14924 - DNA, 386 bp, Glycine max
  Clone ID: LIB3040-025-Q1-E1-H8
gatctcattaacgtttcttctcgtcactctgcccgctgcatcaatggcttcagagaagaaactttcgaacccaatgagggagataaaagtgcagaagctcgtcctcaatatctctgttggcgagagtggagatcgtctcgggagggcgtccaaggtgttggaacaacttagtgggcaaaccccagtgttttcgagggcagcgtagactgttcgttcctttgggaggggggaaatgagaagattgcatgcgatgtcactgtcagaggtgacaaggcaatgcaacttttggagagtggtttgaaggtgaaggaatatgaacttctcagaaggaacttcagtgagactgggtgcttcggcgttgggagtcagggacatattgatttggg

SEQ ID NO: 14925 - DNA, 309 bp, Glycine max
  Clone ID: LIB3040-026-Q1-E1-A10
gaccgcaaactctctctgtaaagtgcaaagcctctattttttcttgtgaatttgaaggacgatgagttccacagaggtcgcagccacaacgaagaagggtggaagagggaaacccaagaccacaaagtccgtttcccgttcctccaaagccggccttcagttccccgtcggccgcgtcgctcgctacctcaaggccggtcgctatgcccagcgcgttggttccggttcccctgtttacctatctgcggttctcgactaccttgccgctgaggttttggagcttgccggccacgctgcgacggacacccg

SEQ ID NO: 14926 - DNA, 359 bp, Glycine max
  Clone ID: LIB3040-026-Q1-E1-A11
gacttgcggctgcagcagagaagcactcatcattcttcgtttgtctaagatccgccttctctgaattgtaaaaatgtcgctcggagaaactgcttgttcatacgcagctcccaaccttcaataagatggaatcagtgttactgccgacaagattagcaccctgttgggaactggcaaaggtcaagttgatacctattggccaaccttatttgcgaaacttgctgagaagaaaaatcttggcgatttgatagccaatgcagcatgcggtggtgcaccaattgctgttgcaagtgcccctgttgctgcctcacgtggtggtggtgccgctgatggcgcaccagctgccgacgagaaaaaga

SEQ ID NO: 14927 - DNA, 318 bp, Glycine max; identical to SEQ ID NO: 12670
  Clone ID: LIB3040-026-Q1-E1-A2

SEQ ID NO: 14928 - DNA, 377 bp, Glycine max
  Clone ID: LIB3040-026-Q1-E1-A3
gaccctgcggtgtcgtccccgccagtgccgcgcacacagcatcagtgagccaagaacatgaagtaacgcgacaacatcagctgcctggaaacacctttccggctttccttcgcaaccctggcccccctgggtcctggcgggcataaattgacttgagaatggaatacgtcagcccaaaaggacttcgcttggatggccgccgaccaatggaaatgcgacaaattcgtgcagagattggtgctgtatccaaagcagatggttctgccatttttgagatgggtaataccaaagttattgctgctgtttatggccccagagaggtgcaaaataggagccagcaaataagtagccatgccctggttcggtgtgagtactgc

SEQ ID NO: 14929 - DNA, 383 bp, Glycine max
  Clone ID: LIB3040-026-Q1-E1-A4
gcagcgcttgatttgaggccaggcaagccccactcaaccaccacacctctcctcgttcacgctacccctttctgctcttcttctacctttcaagttttaaaagtataaagatggcagagacattcctatttacctcagagtcggtgaacgagggacaccctgacaagctctgcgaccaaatctccgatgctgtcctcgacgcttgcctcgagcaggacccagacagcaaagttgcctgcgaaacatgcaccaaaaccaacttggtcatggtcttcggagaaatcacgaccaaggccaacgttgactacgagaagatagtgcgtgacacctgcaggaacatcggcttcgtctcaaatgatgtgggactggatgccgacaactgc

SEQ ID NO: 14930 - DNA, 408 bp, Glycine max
  Clone ID: LIB3040-026-Q1-E1-A5
gagggttttgtgctgttgtcgctgctcatcctccataacctccgagctctacaccgaagaacgaagccatggggaagacacatggaatgggagctgctcgcaagctcaagtctcaccgcaggaggcaaaggtgggctgataagtcatacaagaaatcccatcttgggaatggatggaagaaaccttttgccggttcatcccatgccaagggaattgtccttgaaaagataggtattgaagctaagcagcccaactctgctattcgtaagtgtgccagagttcaacttatcaagaatgggaagaaaattgcagcttttgtccctaatgatggttgcttgaactacattgaagggaatgacgaactcttgattgctggatttggacgaaagggtcatgctgtgggagata

SEQ ID NO: 14931 - DNA, 412 bp, Glycine max
  Clone ID: LIB3040-026-Q1-E1-A6
ggttctagtgtgtgattgtttgttgttgtaactcgttcttcttcttttgttgttctgtgtttgtgtttgttttttctctcacctgaaaatgtcttgctgcggtggtaactgtggttgcggaagctcctgcaagtgcggcaacggctgcggaggctgcaagatgtacccagacttgagctacactgagtcaaccaccaccgagaccttggtcatgggagtggcacctgttaaggctcaatttgagggtgctgaaatgggtgtgcccgctgagaacgatggctgcaaatgtggaccaaactgctcctgcaacccctgcacttgcaagtgaggtgttgggagagcaagcttcaagcagagatagcccttaattaggaataatgataaactattaatgtgtagctaaaaacttatg

SEQ ID NO: 14932 - DNA, 416 bp, Glycine max
  Clone ID: LIB3040-026-Q1-E1-A7
ggatacagtgtgggcataaaattttcgaagttgaagcgagaacttgccatttcaagggttttagggttagggttttctcaaattgcaaggacatgggtttcaaccttcaaccatatgggattcaatccatgctcaaggaaggccataagcacctttctggcctcgacgaagcggttctcaagaacatcgacgcttgcaaacaactttccactattactcgaacttccctcggtcccaatggaatgaataagatggttataaatcacttggacaagctttttgtcacgaacgatgctgggacaattgtgaatgaacttgaagttcagcatcctgctgccaaggttttggttttggctgggaaggctcaacaagaggagattggggatggagctaatttaactatttcatttgctggg

SEQ ID NO: 14933 - DNA, 388 bp, Glycine max
  Clone ID: LIB3040-026-Q1-E1-A8
gaccacaccgagtcgcagaaaaagaaaaaagcgatcatagtttcacttcggccttatccagtttagggtttcggttctctaccctatctttcacgtatcgaaaccttaaatttacgatcaggtctgagcaatctggttggtagaacctttggtcttagtgagtcaagttttatgtctgaattagacgatcaaattcctactgccttcgatccttttgctgatgcaaatgctgatgactcgggtgctgggtcaaaggagtatgtgcatattcgtgtacagcagcgaaatggtaggaaaagcctgacaaccgttcaaggattgaaaaaggaattcagctataacaagatacttgaagacgtcaagaaagagtactggttcaatggaacag

SEQ ID NO: 14934 - DNA, 130 bp, Glycine max
  Clone ID: LIB3040-026-Q1-E1-B1
tacctctttccaacaatgatgcacttgctgaacttagaagcgctcagatatgggtccactctcccattgagatttgtgaatttgacacaacattgacatgttaagaaataatgaatattattaattactt

SEQ ID NO: 14935 - DNA, 410 bp, Glycine max
  Clone ID: LIB3040-026-Q1-E1-B12
agaaggggactgcgagagtgtgggagccagaaaactgctgcttctcgacccacttttgaagttcaaaacttaaaccctagttctctctctctttctttctcctgcatcttcaaccatgtcagcaatgctgcaacctcagatcattctgctcaaggaaggcacggacacttcgcaagggaagccacagctggtgagcaacatcaatgcctgcaccgccgtcgccgacgtcgtccgcaccaccctcggccctcgcggcatggacaagctcatccacgacgacaagggaaccgtcaccatctccaacgacggcgccaccatcatgaagctcctcgacatcgtccaccccgctgcaaaaatcctcgccgacatcgccaagtctcaggactccgaggttggcgatggaaccacca

SEQ ID NO: 14936 - DNA, 395 bp, Glycine max
  Clone ID: LIB3040-026-Q1-E1-B2
ggaaattctaagagcttgttccgtcgtcccccaagtgctgcagagccgcattttgcttgcaattcagaaactttgtgcgtagaggggacgaaacaatacaatggcttacgctgcaatgaagcctactaaggccggcttggaggagcctcaggagcagatccacaagattaggatcaccctttcctctaagaacgtcaagaatctcgagaaagtgtgcgccgaccttgttcgtggtgccaaggacaagcgcctcagggtgaagggacctgttaggatgccaactaaagtacctaacatcaccaccaggaaatccccgtgtggtgaatgcaccaacacatgggacaaatttgagctgcgtgtgcacaagagaattattgatctctacagttcccctg

SEQ ID NO: 14937 - DNA, 417 bp, Glycine max
  Clone ID: LIB3040-026-Q1-E1-B3
gacaacacaacgcaacacaacgcgcactctctcttttctctcttaacacaaaaaccctatcgttcttcgcggtttcgccgattctcgccatgccgaaagccaaatccgacgccaaagccgccgatagccggttgaagcgcaagggcgctggtgctggaaggaagcaatcgaagaaagctgctaaggatcctaacaagccaaagagacctccaagcgctttcttcgttttcatgtccgagttcagagagcagtttaagaaggagcatcctaacaacaaatccgtcgctgttgtcggtaaagctggtggtgacaaatggaaatcgctgtctgatgctgaaaaggcccccttcgttgccacggccgaaaagaagaaacaagagtatgagaaaactattttggcttacaataagaaattgg

SEQ ID NO: 14938 - DNA, 401 bp, Glycine max
  Clone ID: LIB3040-026-Q1-E1-B4
gagaccttgaattgttggtttgcttcttataaggcttgtagttgacgcctttaggaatctctcaaggatgggtttctcagtggcagcttcgttgggtacctatgttgtgctgagagacactcatgaaacaagaatcaagtgccaatttttgtgcagaaaagaacagaatagtagaattggtttcaagttttcaaagcacaaggccattcaaagtgcaattttttttagcaagcatgagttcactgatttggatgagaggaagagctcagatggggttaaagaagagattaaaaaatgttatgaactcataaacagattagggagaggagttgtgtatctgggttcttcaaggatgggacctagccattcacattatgtgcaagcacaagagctggctaaag

SEQ ID NO: 14939 - DNA, 344 bp, Glycine max
  Clone ID: LIB3040-026-Q1-E1-B6
gattcctcaaaatctaacctctctcattagctaacatctcaccaaaacagagtactgtgttgagtttttgttcttctttttctttgagttatttccctagatatacacacactcacatctctgtctctgtgcaaccaacagcctctgcttcttaattctcatcacttatgcctcattcttattaaggggtttttgttcatgaaagaattgaatatgccgggaattgttacaaacggggttcaagatgaaggggggagtaatgagatgaatggggaccaggattcaccttttaatggaaccttgaatctggttaagtcccccaggggtggttctgtgagtcccgg

SEQ ID NO: 14940 - DNA, 372 bp, Glycine max
  Clone ID: LIB3040-026-Q1-E1-B8
gaacatacctaaaaattgtaccgatatggcttcacttgtgtgtctccttttttccttgcatttcatggttatcatgtcaggttccttaccagcaaatagtgaagtgtttacaaaagagtctcctatgtcactatccacaaaacccgtggaaagactcacccaactccacttttatttccataacaacaaaatgggggaacacccgactgctatgaaaattgttgagcctcctaaggcgtccatttctggttttgggactatttacatgatggatgaccctctaaccgaatgaccaagtccaagttcaaagcttgttggaagatgtcagggaatatatgctgaggcatcgcaacatgaacctgcgatactcat

SEQ ID NO: 14941 - DNA, 363 bp, Glycine max
  Clone ID: LIB3040-026-Q1-E1-B9
ggtttaccgtttcgtttgtttctgcggaaaatgggaggtgaagaaaatgtaaagcatcttgaagattgttctgtttccaatgcattgggcacttgggtattctcagttgcaggagctttgctggctattccagtggggataaagcgcaaatctctggcaccccttgtattttttggcaccactggtactatgttggatattattatgggaattagtgcttgcgaaagggaacatgcacagcgccaaatgaagttacttgaagcgcaaaatgctgctgccgagacttctttgggtgaaacagaaattgattcataaactgctatgttgaagttgtcagcattgtcaaatttaattggtcatgat

SEQ ID NO: 14942 - DNA, 364 bp, Glycine max
  Clone ID: LIB3040-026-Q1-E1-C10
ggcccaaattttttcatagcattttcagaggaacaatggcgggtagggtttcgacgtgcttcttcttcgtgtttgctccttctctccttcttccttttcagatctccgctgaggaatcatcggagaaagagttcgtactcacattggatcactctaactttcacgacactgtcagcaagcacgatttcatcgtcgtcgagttctacgctccatggtgtggccactgtaagaagcttgctcccgagtatgagaaagctgcctctatcttgagtagtcatgatcctccggttgttttggctaaaattgatgcccatgaggagaagaacgcagaccttgcatctcactacgacgttacgggataccc

SEQ ID NO: 14943 - DNA, 260 bp, Glycine max
  Clone ID: LIB3040-026-Q1-E1-C12
acacaccgtttgttctattcttaactcaacttctgctacccactctcttcttccaagtccaaccacgcttttctctacagtcatgggcaaggtcaagatcggaatcaacggatttggaagaattggccgtttggttgccagactcgctctgcaaagagacgatgtggagctcgttgccgttaacgaccctttcattaacaccgattacatgacatacatgtttaaataccacagtgttcacggacactggaagcatcacg

SEQ ID NO: 14944 - DNA, 412 bp, Glycine max
  Clone ID: LIB3040-026-Q1-E1-C2
gaacatttgtctctcatctttcaatttcaatcaacggttatacccttttctatttgagcatcatcatgtccaccgcagcgcagcccaaggccaagaaaacggcgtcgtccaagaagcccctctcccatcctaccttcgccgcgatgatagcggaggcgatagcgagtctgaaggagagaaccggttcgagccaatacgcgataaccaaattcatcgaaggcaagcacaaggagttgcctccaacctacaagaagcttgttctcgttcatctcaagaagtctgttgctgctggcaagctcgttaaggtcaaaaactctttcaagctcgcaccgactaagtctgctcctgttaaagccgctgctgctcccaagaagcccaccaaagctgcggctaagcccgccgccaagcccgc

SEQ ID NO: 14945 - DNA, 397 bp, Glycine max
  Clone ID: LIB3040-026-Q1-E1-C3
gattgttggcttgtgctctgctcgtgcctctagggttatcatatctccatttccatttcctctctctcagtttccaagaatcttaagctatgggaaagtcttacccaaccgtgagcgctgattaccagaaggccgttgagaaggcgaagaagaagctcagaggcttcatcgctgagaagagatgcgctcctctaatgctccgtttggcatggcactctgctggaacttacgacgtgagctcgaagaccggtggtcccttcggaaccataaagcacccctccgaactcgctcacggcgctaacaacggtcttgacatcgctgttaggcttttggagccactcaaagcggagtttcctattttgagctacgccgatttctaccagttggctggcgttgt

SEQ ID NO: 14946 - DNA, 314 bp, Glycine max
  Clone ID: LIB3040-026-Q1-E1-C6
gaacggatgtctaattgtctgttgaccggctattgcctatttcggtgttccttcctcgtttacgtcgcccccattgacacgttgttcccaaaatttaagcactataaatttcgacacttgccaagtactccaacgcctacttcatctctcttataatcacacacacctaccttatagctatggaaactggaggctttcatggctaccgcaagctccccaacacaacctctgggttgaagctgtcagtgtcagacatgaacatgaacatgaggcagcagcaggtagcatcatcagatcagaactgcagcaaccac

SEQ ID NO: 14947 - DNA, 401 bp, Glycine max
  Clone ID: LIB3040-026-Q1-E1-C7
gagggatagggatagggatggagaaagtgaaggtgcttcggcgactcctcgagacaccaggggttcaccaggggccagcctgtttcgacgctctgggtgcgaagctcatagaatccgctggcttcccctactgcatcaccagtggcttctccatcgccgcttccaggttggctctgcccgacaccggcttcatctcctacggcgaaatgctggagcagggccaactcatcacccaagccgtttccattcccgtcattggcgacgccgacaacggctacggcaatgccatgaacctcaagcgaaccgtcaagggtttcattgccgccggtttcgcaggaatcattctggaagaccagattgcgccgaaagcgtgttgggacacgcgcgggaggaaagtgata

SEQ ID NO: 14948 - DNA, 398 bp, Glycine max
  Clone ID: LIB3040-026-Q1-E1-C8
gatggaatggttagagaaaagagaggcccatatagtgatccacagcatccttacttttatgaagaagaggatgtgtggatggcacctggcttcattaaccagttttatgaagtccctgattactggaaagtatatgtgcatgaagttgatcaagaaagagaaatgtggttaaactctttttataaagctcctcttaggttacccatgccagctgagctagagcactggtggtcaaaagaggagaatcataagattcctgaatttgtccttattaacaaggaaccggagcctgatcctgaagatccttcaaagcttatatatactgaggatcctctcatcctccatacaccaactggaaatattatcaattatgtccaggatgagaaatatggaatacg

SEQ ID NO: 14949 - DNA, 349 bp, Glycine max
  Clone ID: LIB3040-026-Q1-E1-C9
ggccgtccccaaaatcccttcttctctctctcaattagggtttgcgttttcacactctctcccacacactcctctctctctcgcgtttcaatgcctgccaaatccgtctccaaattccaaacagtgccaagccgttctattttcaagcgaattcggcgttcggttcagttcatatcacttcttccccttattttactatagggctcctcccatggcgccgagccgcagaaggggcgtcagtaaggcggcagccgcggccgccgcttgccgccagttccaagtccgcgatcttgtgcgtgccaaagtaaaggggttccctgcatggcctgccacggtaagtgagccggag

SEQ ID NO: 14950 - DNA, 409 bp, Glycine max
  Clone ID: LIB3040-026-Q1-E1-D1
gacccttaacctctctgctgcgtttgcttctcctccacccatccacaaacgaacacacactttgattgagaatggggcgtgtccgcacaaagacagtgaagaagtcctcgcggcaagtgatcgagaggtactactctcgcatgacgctggacttccacacgaacaagaaggttctggaagaggtggccatcattccctccaagaggctccgcaacaagatcgcgggattccccacccacctcatgaagcggatccagaagggtcccgtacgtggaatctccctcaagctgcaggaggaggagcgcgagcgccgcatggacttcgtccccgatgtctccgccatcagaaccgaccagatcgaggtcgacaaggagacgctcgacatgctcgccgccctcggaatgtccga

SEQ ID NO: 14951 - DNA, 348 bp, Glycine max
  Clone ID: LIB3040-026-Q1-E1-D10
gactcaccacttcaaaacactcataacataaagcacaaagcaaagctcatccttgagttaaaaaatggcagcagcttcttccatggctctctcatccccatccttggctggcaaggccgtgaagctgggcccatcagccccagaagtgggaagggtgagcatgaggaagaccgtcaccaagcaggtctcctcagggagcccatggtacggcccagaccgagtcaagtacttgggcccattctctggcgagcccccgtcctacctaaccggtgagttcccaggcgactacggctgggacactgctgggctttccgcagacccacaaaccttccccaagaaccgtgaact

SEQ ID NO: 14952 - DNA, 260 bp, Glycine max
  Clone ID: LIB3040-026-Q1-E1-D11
acgcgtccaaccgaggccaaaagacaaccgaagggggccattattgctgtcaacatccgcagctgctgttattcgcagcgcaaacaaccagtgagccatgggcgtccgaaagaacaagcgcagctccaaagggaaaaagggtggccagaagaaggcagctgatcgctttgccaagaaggattggtatgacactaaggccccctccctctttcaagtgaacgatgtgcgcagaacccgcgtcgctcgtacgcacggtagca

SEQ ID NO: 14953 - DNA, 185 bp, Glycine max
  Clone ID: LIB3040-026-Q1-E1-D12
cgggattcaatcactcacacatgcccctatcttccttagctacctagattattcacttcaattcctcacaagcaacatcgtttcttgctccaatggcagctttgtatctcccaataagcatgttggcactcattgttgttgtttctcttggtttgtggagtggtgttcaaggtgcaccacacgtg

SEQ ID NO: 14954 - DNA, 414 bp, Glycine max
  Clone ID: LIB3040-026-Q1-E1-D2
ggtcaacaacagtgttcccataggagataataaaaatcctctcatcattctgcctcagcctcattgcatcccacaaactataggatcctcacattgctagcaccatgatcaagaccttgaatccttacccaaatccagcaaaaactgctgagatcatgtcgaggtaccggccaatagcaccaaagcctgaaacctctccaaactccatgagtgagggcccttcttcctcttctctctcccagaagatcaagcaatctccttaccttaggaatttatggccacagcttcaagccagacccaccaggaccagaaagagaggtaaagctcctttgacactaccctcttcctccctcaagagacacaagacaacacatcatcatgtcctaagattttgtcccccttgtcatcatgttg

SEQ ID NO: 14955 - DNA, 393 bp, Glycine max
  Clone ID: LIB3040-026-Q1-E1-D3
gagggtttttgtcgtcgctactaagagttgctgcttcttcagccactccgcacctcgcagcctctgtgccctcaacaaccatggctgaaatcgaaactaccgttccagatcccacccaaatcgacgtcaaactcttcaatcgctggagcttcgaggatgttgaggttaatgatatgtctctggctgattacattggagtgtccccatcaaagcatgctacatatgttcctcacactgctggtaggtactcagtgaagaggttcaggaaagcgcagtgccccattgttgagaggctcaccaactctctgatgatgcacgggaggaacaatggaaagaagctcatggctgtcaggattatcaagcatgccatggagatcatccacttgctcactg

SEQ ID NO: 14956 - DNA, 404 bp, Glycine max
  Clone ID: LIB3040-026-Q1-E1-D4
gacggcactcgttttcgttctcgttctggtttatagatctttgcgaaggaggtttacagcgctcaaccaaagatgcagaacgaggaaggacagatcactgagctttacattcctaggaagtgctccgccacaaacagattgattaccgctaaggaccatgcttcggttcagatcaacattgggcatgtggatgagaacggcgtctacaatggccatttctccacttttgccctctgcggattcatccgtgctcagggtgatgctgacagtgctctagaccgcttgtggcagaagaagaaagttgaagttaagcaacagtagacacccatgatagtttgttacttcgttatgtattaatttctactcttgctagagatatttgagtactacgattgtcgttttga

SEQ ID NO: 14957 - DNA, 409 bp, Glycine max
  Clone ID: LIB3040-026-Q1-E1-D5
gagagaagttattagggtttttgagtgcggcggtccaaacactcttctctgcagcttttgcctacaactcccttcaccatggctgaacaaaccgagaaagcttttctgaagcaaccaaaagtgtttctcagcacaaagaagactgggaagggaaagagacctggaaaaggtgggaaccgcttttggaagtccattgggcttggatttaagactcccagggaagccatcgaaggaacctatattgacaagaagtgccccttcactggcaatgtttccatccgtggccgtatcttggctggaacatgtcacagtgctaagatgaacaggactattattgttagaaggaattatctccattttatcaagaagtacagaagtacgagaagaggcactcaaatattcctgctca

SEQ ID NO: 14958 - DNA, 384 bp, Glycine max
  Clone ID: LIB3040-026-Q1-E1-D7
ggattgagaagtaagatggaggttgttatgcgccgtaagtaatttgtttgttggattggaattgagaaaacagcaacaaggggaaatgggagatagagaagaacaaggcgagggtgctggctcctccttggaattggaagctcctattccagagacccaaaaagaaatcccaatttcagatggcatcgcattcaacaatcagagcgcgattttccaagccatcgaggttgtggaacgagactcgttggccatcgctcagagtttcacttctctcttcgcttccctccgattggctctctccgaatccacatccacctctcgccatcacatgcagtgcttcaccgatgccaccggtcgccttcaggaatctggtgcttgcttgat

SEQ ID NO: 14959 - DNA, 349 bp, Glycine max
  Clone ID: LIB3040-026-Q1-E1-D8
ggtgttcaccacagtttacacgcacgagagtacccattttctcttctcaatttctcaagtgtgccgagaaaatcatggtggacgcagcagaacgtagatacttggaggatgatgattcatctctcatgaaaactatcaagggcgcaacaactggtttagtggctggaactatctggggtactgtagttgccacctggtatgatgtcccccgtgtcgagagaaatgttgctcttccagggctgattaggactatcaggatgatgggcaactatggtctgagctttgctgccagaggaggagtcgaccatagtgtagagccattggtgcagaactatatgatgaagaggga

SEQ ID NO: 14960 - DNA, 357 bp, Glycine max
  Clone ID: LIB3040-026-Q1-E1-D9
gattgtaaagcattcttcgcctttctctctcttctttttactctctctctgtctctctctacgctttctcgttcgagatccctcaagggatccactaactgaaggagaaatggggttgacattcaccaagcttttcagccggcttttcgccaagaaggaaatgcgaattctgatggtgggtctcgatgcagctggtaagaccaccatcctgtacaagctcaaacttggagagatcgttaccacaattcccagcattgggttcaatgtggagactgtggaatacaagaacattagtttcactgtctgggatgttggtggccaagacaagattcgtcgcttgtggaggcactacttcca

SEQ ID NO: 14961 - DNA, 64 bp, Glycine max
  Clone ID: LIB3040-026-Q1-E1-E1
gagttgtgaactggccattcaggactctgtagtgaggattttccttctaaacctagttatggtg

SEQ ID NO: 14962 - DNA, 54 bp, Glycine max
  Clone ID: LIB3040-026-Q1-E1-E11
acgcgtccggagtaaatagcaccaataccaagtctcgcgttaagcacgggagac

SEQ ID NO: 14963 - DNA, 360 bp, Glycine max
  Clone ID: LIB3040-026-Q1-E1-E12
aaagagacccggaaagggtgggaaccgcttttggaaatccattgggcttggatttaagactcccagggaagccatcgaaggaacctacattgacaagaagtgccccttcactggcaatgtttccatccgtggccgtatcttggctggaacatgacacagtgctaagatgaacaggactattattgttaggaggaattatctccattttatcaagaagtaccagaggtacgagaaaaggcactccaacattcctgctcatatatcacctgctttccgtgtgaaggaaggagatcacgttattattggtcaatgcaggccactttctaagactgtgaggttcaatgtgttgaaagttattcc

SEQ ID NO: 14964 - DNA, 410 bp, Glycine max
  Clone ID: LIB3040-026-Q1-E1-E2
ggccgaaaagtagtatcaagatggcttcagttgtgtatctcctctttggcttccatctcattgttatcatgtcaagttccttacccgcaactagtgaagtgtttgcaaaacagtatccatccacagaacccgtggaagaaaaactcacccaactccacttctatttccataacaacataacgggggaacacccaactgctatgaaaactgttttgcctcctaaggggtccattcatggttttggggctacttacatgatggatgaccctctaactgaaggaccaagtccaacttcaaagcttgtgggaagatctcacggaatatacgctttggcttcacaacatgagcctgggttgctcatggtgacaaattttcccttcactttgggcatttacaatgggagcaccctc

SEQ ID NO: 14965 - DNA, 378 bp, Glycine max
  Clone ID: LIB3040-026-Q1-E1-E6
gattctcacctttccatgcatatagcttagctagctccttcacctccttagtttcgaaagcatggcttccctggcggcttccaccgcggctatgtcagaaatccttggaaaccccgttaacctcagatgcgcaaccaggtctgctccatcaccaactacacctgccaccttcaagaccgtcgcacttttctccaagaagaagccagctccacctccaaagaaaaagcctgccgctgtatcccccgccaatgaggaactcgccaagtggtatggtcctgacagaaggatcttcttgcctgagggtctcttggaccgatctgagatccccgagtatttgaccggagaagtgcctggagattatggttatgatccgtttgg

SEQ ID NO: 14966 - DNA, 232 bp, Glycine max
  Clone ID: LIB3040-026-Q1-E1-E7
tgacgtagcaacaacacaaccttctggttctgtcggcattaaattatctcacggtaacgctactacaataccacaaagggattcagttccgatgacaattccgaacttgttaggttcacaacaaagtatcgtttggtacagtcgttagtgacgaaaaaattctgcctctgcaccaacaggtaatagtgactattttcaactgaaggttccagtatccatttggactaaaatc

SEQ ID NO: 14967 - DNA, 313 bp, Glycine max
  Clone ID: LIB3040-026-Q1-E1-E8
gacatacaaacgacgcatccttctctttctttcggctttgatttctctctcctcgactcgatcccaattccactagggattcaattccgatgcgattccgagcttgttagatccacgacaaggtttcgtttcccagattcttttgtaaaaaaaaattcttcctctgcccaacaggtattggacactagttgaactgaggggtcatgttatcatgtggaatgaaatctataataacactaaaaacagggctagctgactatcttttaacaaggagtagtttgtaaaaaaatggaccatgacaagacggggtgcc

SEQ ID NO: 14968 - DNA, 385 bp, Glycine max
  Clone ID: LIB3040-026-Q1-E1-E9
gccacaacacagaacaaaaacaaagaaaaaaaaaaacccttagccaacacaaccatcatggccacctctgctattcagcaatcagcattcactggtcaaactgctctgaagcagctcaatgagttcgtccgcaagaccggtggcgccggcaaaggtcgcactaacatgcgccgcaccgtcaagagtgctcctcagagcatttggtatggccctgaccgtcccaagtacttgggtccattctcggagcagattccatcatacctgaccggagaattccctggtgactaccgatgggacactgctggattatcagctgacccggaaaacttcgccaggaaacgggagctggacgtgattcacaacagatgggcaatgcttggtgccc

SEQ ID NO: 14969 - DNA, 51 bp, Glycine max
  Clone ID: LIB3040-026-Q1-E1-F1
cctttgatcccttttttcttcttctaaaaaccttcaaaaaacagcacggtg

SEQ ID NO: 14970 - DNA, 208 bp, Glycine max
  Clone ID: LIB3040-026-Q1-E1-F11
gagggtttttgtcgtcgcgactaatagttgctgcgtcatcagccactccgcatctcgcagcgtctgtgccctcaacaaacatggctgaaatcgaaactaccgttccagattccagccaaatcgacgtcaaactcttcagtcgctggagcttccaggatgttgaggttaatgatatgtcgctggctgattacattggagtgtccccatc

SEQ ID NO: 14971 - DNA, 395 bp, Glycine max
  Clone ID: LIB3040-026-Q1-E1-F12
gactcaccacttcaaaacactcataacacaaagcacaaagcaaagctcatccttgagttaaaaaatggcagcagcttcttccatggctctctcatccccatccttggctggcaaggccgtgaagctgggcccatcagccccagaagtgggaagggtgagcatgaggaagaccgtcaccaagcaggtctcctcaggaagcccatggtacggcccagaccgagtcaagtacttgggcccattctctggcgagcccccgtcctacctaaccggtgagttcccaggcgactacggctgggacactgctgggctttccgcagacccagaaaccttcgccaagaaccgtgaactcgaagtgatccactccaggtggggcatgctcggagccttgggctgcg

SEQ ID NO: 14972 - DNA, 175 bp, Glycine max
  Clone ID: LIB3040-026-Q1-E1-F2
cacccatgtagctataggccaaattgtaccataggaacttatagctaacagtggaaataagtgcatttgtagatattcatttgtaaggtaggaacacgactttcaaaccagttcattgaacctccaaaatgagagcaagttgtaagattttgtcttttgttcgaaatttatgaag

SEQ ID NO: 14973 - DNA, 371 bp, Glycine max
  Clone ID: LIB3040-026-Q1-E1-F3
gacgccaaagccctctcttatttccagacgcggggggttcttcatccgtttttgtcaatcggggttgaaaatggcgacttacgctgcgatgaagcccacaaagcccggcttggtggagccccatgaacagattcacaagatgaagatcaccctttcctccaagcacgtcaaaaacctcaagaatgtttgtgtcgacatgggtcgcggtgcacaggaaaggcgcctcagggttaatggacctgtcatgatgcccactaaaggtcttctcagcactaccatgaagtcgccctgtggtcaaggtagcaatacatgggacacgcttgaagatcgtgtgcactagagagtgcttgacctccacacttttccagatg

SEQ ID NO: 14974 - DNA, 415 bp, Glycine max
  Clone ID: LIB3040-026-Q1-E1-F4
acataagtcattttctcgcctaataaaaaaataaaataaatttccaccgatcatttgaattgtaatattcattaatttcttttaaaatgaaatccgaccgttcggtcatgccgtaaccacgttggaaaccaaaaagaggtaaaataataatataataatcaaaaaaatatcttttagtaaaataaagcaaaaaaatcaatcggacgtttctctttgggatttctctttcttaattgaattgactaataactaaagtgaaactaaggataaaatcaactagcaaagtcaagctcgtctgcaaaaaaaatcactaaaaaggattttaaggttcgatacctcagtttttctcactaagtaaaaatggataattttaaggtccaatgccttaaaaagaccaccttccaagtaaaaagaa

SEQ ID NO: 14975 - DNA, 325 bp, Glycine max
  Clone ID: LIB3040-026-Q1-E1-F6
gatcagtcacactagtctctgtgaaaggcgacacgacacaacacaacacaagctttaatctttttcttcgcttcttctgtacagcacccaagattgaagatgatagaccttgcgcgcgtgcagaaggagcttgtggaatgcagcaaggacgcggagggatcgggcatcaaagtcagccccaaaaacgacaaccttgttctcttgatcggcaccattcctggccccgtcggaactccatatgaagggggcattttccagattgatagcacattgcctgatgggtacccgtttgaaccccccaagatgcagtttaaaaccaaagttt

SEQ ID NO: 14976 - DNA, 324 bp, Glycine max
  Clone ID: LIB3040-026-Q1-E1-F7
agatggactgataaaacttaaaagagaggtggggattgccaaacttttgatagtgattggattagtcatcttatttttctctagtggcattttaaagtttcttcaattgattggtggtgttgtgtttggagtcttgtcaatcggatcgatcaccacccgcattgtacttttctatgcaaatgtttgcgccactatttaaaagttgtagagaaggtagcgaaaagaaagggaaaaaaattcgtttgactacatagattagaatcacaaagtcagtgtggttctgtaatttcagttaatgttggatctttatcattatccacttga

SEQ ID NO: 14977 - DNA, 383 bp, Glycine max
  Clone ID: LIB3040-026-Q1-E1-G1
catgagagtgagaataaatcggggtcttctttgtcctcgtgtgaaaaaaaaaaaaaaaaaaaaaaaaaaaaaaaaaaaaaaaaaaaaaaaaacaaaaaaaaaaaaaaaaaaaaaaaaaaaaaaaaaaaaaaaaaaaaaaaaaaaaaaaaaaaaaaaacccaaaaaaaaaaaaaaaaaaaaaaaaaaaaaaggggccccccaaaaggttccaagtttatttccccggaaaaggaaccccaaagcccctcaaagagggcccccaaattaaattccggggccctttttttaaaaaactgcacggggaaaaaccctgggtttaccccaataaaaccccttgaaaaaaaacccccttttccaaaggggtataataccaaaaagccccc

SEQ ID NO: 14978 - DNA, 313 bp, Glycine max
  Clone ID: LIB3040-026-Q1-E1-G10
ggagcgaagaagatattagggtttttgagtgcggtgcggcgatcctagcactctcttctgcagctttcgccgacagcttcattcaccatggctgagcaaaccgagaaggcttttttgaaacaaccagaagtgtttctcagctcgaagaaaactgggaagggaaagagacccggaaagggtgggaaccgcttttggaaatccattgggcttgggtttaaggactcccagggaagcgatcgaaggaacccacattgacaacaagtgccccttcactggcgatgtttccagccgtgggcggtagcgtggcgggaac

SEQ ID NO: 14979 - DNA, 345 bp, Glycine max
  Clone ID: LIB3040-026-Q1-E1-G11
gacagaaactgaaaagaaaaacttactcgagaaaatgtctggaaaggcgaagaggagagacgacgacgatgcttccgacgccgactccgaaggccacgcgccgcccatgaagtccctcaagaaggattccgacgacgatcccgactctgttaccatttgcgaaatttcgaagaacaggagggttgccgtgaggaactggaaaggcagcattatggttgacattcgcgagttttacgtcaaagatggcaagcaattgcctggcaggaaaggtatctcgttgaccatggatcagtggaatgtgcttcgtaatcatgttgaagaaattgacaaggcagttaatgagaa

SEQ ID NO: 14980 - DNA, 361 bp, Glycine max
  Clone ID: LIB3040-026-Q1-E1-G12
gtctgcatattcctttttaaagagagaattaaaatttgttaggggaaatttttaaacttaattcaccccccccccccctcttaagttattgaggccacttgtttaacaatccacgtgaggagcatcctcagcaacaacagcgacttcccgttgcctacgtgcggatgttgtgggcctttgccgctgaggagcatcatctgaatcacgattatcttctctctctctagggctcttcctataactctacctaaggtacgacctaaacctctaattctaaccataatctgcaaatttgcacatacataaaaatttatgtcaaaattcaaaacaatacttaaatcaattacaataatatcattcc

SEQ ID NO: 14981 - DNA, 406 bp, Glycine max
  Clone ID: LIB3040-026-Q1-E1-G5
agaacaactgtccgtatgttggaaagtttgatacgcctagctcaagcccatgcaaggttgatgttcagaaatgaggtgactcgactagatgccatcacggctattttatgcatagaatcctccatgactacctcagctattgtggattgcattgggaatgctctgcattccaattttactgacaaccctgatcaggaatatgcgaggcaagaaagattgatcctagaaaaattgggatcaatagacgacatttgatgaatagcatggaggagtgaacgcagagaaaggaaaacaagatggaagagtcatgttgtatcatgaactggtttgttttgcttggctttgctattttttagtacaatgaaattgattgctttagcaatgaagggggccatagtttttgttt

SEQ ID NO: 14982 - DNA, 406 bp, Glycine max
  Clone ID: LIB3040-026-Q1-E1-G6
gagatcccaaaggtactcttatagtacttcttctctttctctcactgtttttgttgcttattctgccttatcctgtctccctctcttcactacccttttttttttttcactttccttcttatcatctttttttcttttttggtttatattttgggggggtatttttcttttcatttgtacttttttatttattgatcttgggttttggtttattttattgtgtgtggaatacaagtggtgaagttagaaattttgttgtttcccatctgcatgtggagtttgaggtcagctttgtgtttgttaaggttacatgaagccatttctctttttaaatcttcccaacaccgagttcaattcttcacaagttgattgtcaccactcaatggctcattcttcttatccctag

SEQ ID NO: 14983 - DNA, 367 bp, Glycine max
  Clone ID: LIB3040-024-Q1-E1-E1
ggagaaaaacgagccaattcatcattttctctcttctctgcttcttcttgttcaaatcttaggagctgaggagaatcaatcgagagaaatatgtctggtatcgctcgtggacgccttgctgaggaacgaaagtcatggcgcaaaaaccatccacacggtttcgttgccaagcccgagactctacctgatggcaccgtaaatttgagtgtctggcattgcactattcctggcaagagggggactgattgggaaggtggatattttccactgacaatgcacttcagtgaagaataccctagcaagcctcccaagtgcaaattcgctcaaagtttctttcaccctaatgtgttaccatctggaactgttt

SEQ ID NO: 14984 - DNA, 360 bp, Glycine max
  Clone ID: LIB3040-022-Q1-E1-A11
gagggttacacgccgtcgtcgctgtttttgtgtgtcgcttcttcgtaggtgcagctgcaatggtgaagggacgccaaggagaacgtgtcagactctacgtgaggggtacaatccttggatacaaaaggtccaagtcaaaccagtatccaaatacatccctgatccaaattgagggtgtgaatgccaaagaagaagtagcatggtatgctggcaagaaaatggcctatatctacaaggctaaggtgaagaagaatggaagccattaccgctgcatatggggcaaggttacaaggcctcatggtaacagtggtattgtccgtgcaaaattcaagtcgaaccttccacccaaatcaatgggag

SEQ ID NO: 14985 - DNA, 301 bp, Glycine max
  Clone ID: LIB3040-022-Q1-E1-A2
gtagaatccccattccagagccaaggtaggttaaacactcttcttcatcgtcgtcgcaatgggacgtgtgatccgtgcgcagcgtaagggagcacgctcggtcttcaagtcccacacgcaccaccgcaagggccctgcccgcttccggagcctggatttcggagagcgcaacggctacctgaagggtgtcgtcactgacgtcatcgacgatcctggccgtggcgcgcctctcgctaaggtcgccttccgccaggcgttccgctacaagaagcagaacgagctcttcatcgccgccgagggt

SEQ ID NO: 14986 - DNA, 168 bp, Glycine max
  Clone ID: LIB3040-022-Q1-E1-A3
gatagtcaattcattttcttcttctgcttcaccttctcttctcttctctcagagggttagggtttttttctcttcattgctctctctgtcgttttatttccatggctcagcaagatgctcagaatggtgggtcggagaatggcgctgctgcggtgtcgtttgtcgctt

SEQ ID NO: 14987 - DNA, 367 bp, Glycine max
  Clone ID: LIB3040-022-Q1-E1-A6
ggagtaagcaggcggcatggcattctcagcggtctggcgactagcgaatcttgggcgacacttggatttgagtgaatcagtgaacaaggctgcgccagttgggtcaatcaagttgaaggtagcttcagaggtttctgaagcattatcactgggtcgtgctgttgttgctcttgaatctaccattatttcgcatgggatgccatatccccaaaatttggaaactgcaaaagaggtggaacgtattgtaagagagaacggtgcagttcctgcaaccattgcaattttagatggcacgccttgtgtaggcctaagtgtagaagaacttgaaaggctagctattttgggaaccagagctcagaggacagct

SEQ ID NO: 14988 - DNA, 323 bp, Glycine max
  Clone ID: LIB3040-022-Q1-E1-A7
gaatttcaatatccgctcaaaccctatcctaactcctcgcgtcgtcacataaagtcttcttctccgatcgttacgatgttggaactccgtctcgtgcaatgttcccttctgaacaaggttctggaatcgatcaacgagctcgtagacgacgcgaacttcgactgctcctccaccgggttctccctctaggccatggattccaggcacatcgccctcgttgcgctcctcctccggtccgagggctttgatcactagcgctgcgaccgcaatacctccatgggcatgaacctcaacaacatggccgagatgctcaagtgcgccgg

SEQ ID NO: 14989 - DNA, 218 bp, Glycine max
  Clone ID: LIB3040-022-Q1-E1-A8
atacaggcgtcagacagactacaaaaagaggaggaaagggggagcgaaagaggggttttggaacctgcagcattcggtgctccaatctcagctatccgtgaaggctccatcaccgatcgacaatcctgtcaccgattcgtggtacacccaccgtcccgtcttcacgctcgcaatcggacacgtcttaagtgcctcattcttcacttattacgcaacat

SEQ ID NO: 14990 - DNA, 347 bp, Glycine max
  Clone ID: LIB3040-022-Q1-E1-B10
gctctgaaaactgaaaagtaaaggcgaaagactttaggtttggaattgggaattagggttgttcgcgtcacgaagatgatcgaggtggtgttgaacgatcgattggggaagaaggtgcgcgtgaagtgcaacgacgatgacaccatcggcgacctgaagaagctggtggcggctcagacgggcacaagagccgacaagatccgcatccagaagtggtacaccatatacaaggatcacatcactctcaaggattacgagatccacgacggcatgggtctcgaactctactacaactaaacacaaagtgtgttttatgcatgatatattactatgatctgggaatggga

SEQ ID NO: 14991 - DNA, 52 bp, Glycine max
  Clone ID: LIB3040-022-Q1-E1-B11
aaaaactttaatttttttatggtaaaaaattcaattatacctgttatttcac

SEQ ID NO: 14992 - DNA, 362 bp, Glycine max
  Clone ID: LIB3040-022-Q1-E1-B12
ggcgtacgcagcttcatccctaacgcgtgcatagcagagtcagagacagagacgcagccatggggcggagacctgcgaggtgttataggcaaattaagaacaagccataccccaagtcacgtttctgccgtggtgttcctgatcccaagatcaggatttatgatgttggtatgaagaagaagggtgttgatgagtttcctttctgtgtccatctggttagttgggagaaggaaaatgtttcaagtgaggccctggaagctgctcgcattgcttgcaacaagtacatggccaaatttgctggaaaggatgctttccacttgagagtcagggtgcacccattccatgttcttaggattaacaag

SEQ ID NO: 14993 - DNA, 284 bp, Glycine max
  Clone ID: LIB3040-022-Q1-E1-B3
tggaagaaggggaagctggccatgacggtcgaggtattcgaggtggcgccggaggtttcggtggttgagttcgccaagtctgctggagacacgcttgaatacattaaattctgtgaggaccaagtcagaccttctctcaaagacattgtgtggagttggcaaggggacgctaattgccaccagtaacgcaatggagttactttccgttatgtcttaatcttttgcgtgtttccattatcacaatccgtttgggtttagatttattacccatgtaatgtaatatt

SEQ ID NO: 14994 - DNA, 344 bp, Glycine max
  Clone ID: LIB3040-022-Q1-E1-B4
ggaaacccacatcatgagcacactttgtatggcggaaaatatgaaggaggtggaagttgaagatggatatgtcttgaaagaagagatccatctcacggtgctaaaaacctctctgttcttcgcgggcgatggcttcagcgtcgacgattgcaaaggtcaactcgtgttcagagttgactcttatggacccgacactcgcgacatagacgaactcgttctcatggatcctaacggacgttgcctcctcagcgttcgtcgaaagcggccgagtttgcatcaacggtcggaaggtttcaaaggggagagaatgggacggtgagaagaccatcttcagcgtgaggaga

SEQ ID NO: 14995 - DNA, 261 bp, Glycine max
  Clone ID: LIB3040-022-Q1-E1-B6
gaaccaagtttgcttgcgtgtatattcattttagcatcaaggttgaatctcagagaaaaagaaacatcgacaagcatgtctggaagaggaaagggaggcaagggtctcggaaagggaggagccaaacgacaccgtaaggttctgaaggataacagtcagggaatcaccaagcccgcgattcgccgtctggccagacgtggtggcgtcaagcgtatcagtggtcgtatctatgaagaagctcgcggtgttctcaagatcgtt

SEQ ID NO: 14996 - DNA, 248 bp, Glycine max
  Clone ID: LIB3040-022-Q1-E1-B9
ggtggtcagcattagaccatgaatctattctttccaaacctcactcactccctcttctctcacaatgccatctgtggccactttacagaacagttagttaatgaggccacctttggtggtcctcaagggctgcaagggtctcttctccgcgcccagttcccaagcgaagacaccctcactcatctctaaactcgtgacaaggggtccaccattcacaacaagcccacaacagcgcaaacccgtgttcc

SEQ ID NO: 14997 - DNA, 326 bp, Glycine max
  Clone ID: LIB3040-022-Q1-E1-C1
gtacgcgcgagaagacacagaagggagggagattagcattagccaatcaaaacacagactgggcacatggcatccacaatggaaagtgaaatcactaacacatgtgcgtgtgctcaatcacaagtgaagttgaactgcagtgaatttcagacaaattttgttgagaacccatcaattttgaacatttctggcaatgtgtgtcgtctaaaaaacggtcttcccattggtatacgtgaaactgtagagtttttgtatgcatggcttcctaagtttccagttcaacccatttcttcgagaggagattgcaactaattgatcttaagtag

SEQ ID NO: 14998 - DNA, 339 bp, Glycine max
  Clone ID: LIB3040-022-Q1-E1-C11
ggcagccaagaaaagaaaatcctcacccattttcttcgtagccaaacactctgaaattctcagttatgtcgtggcaagcgtatgtggatgatcacctactgtgtgaaatcgaaggtaaccacctcactcacgccgctatcatcggccaagacggaagcgtttgggctcagagcaccaacttccctcagttcaaacctgaggaaataactgccatcaataatgactttaatgagcctggatcacttgctccaactggattgtatatcggtggcaccaaatacatggtcatccagggtgagcctggtgctgtcattcgagggaagaagggtcctggtggtg

SEQ ID NO: 14999 - DNA, 150 bp, Glycine max
  Clone ID: LIB3040-022-Q1-E1-C12
tctcggggggttctcctaccgattcttcagccggggcgattttggatccgaacctcttctgcggcgtcgctctgggacactccatcgttcggcattcgcaccctctcgtctacggtcctggttctcgcatttgccgagtgtgtgggattc

SEQ ID NO: 15000 - DNA, 430 bp, Glycine max
  unsure (1)..(430): unsure at all n locations
  Clone ID: LIB3040-022-Q1-E1-C2
gcagaatgcaaggaacgcaaggaaagttaacaatgaccagaatttacagggagacaatggacaaagagttggatactcatangctggagcatggtcccaagaaaagaaagatccctgacgaaaacaataatgacgacgatgatgatgtggaagatataaatgtgggagaggatgacatgatggatgatgaattagacgatgattctagtangaggattgatgaaacaaccaagacggaagcacgtagtgccagttcagatcctgcagctgatgctgataatgcgggagggaagtgatcacccgcaaggacacaattttcaatagttttgagttatttatgtttttgtagtttattccttggtattctaacttttacgtaattggatttatagccgttgtagtttctgtatgcaaatgaaatttcttcact

SEQ ID NO: 15001 - DNA, 255 bp, Glycine max
  Clone ID: LIB3040-022-Q1-E1-C3
aatccgagaagtgatttactcattcaacctgccaaggagcttgtgacagaggagaggccggccttgtactcaccaatgacctatgaggaagacagactttacattaggctaaatggaccttgtggaaaggcccaagttgaatcactggctttccaacgatgacttaataatgtcaattaataacgtgtttggtttcacaatgtaattttctatgtttcatgtggaattttaagttgagagttataacttaagggg

SEQ ID NO: 15002 - DNA, 350 bp, Glycine max
  Clone ID: LIB3040-022-Q1-E1-C4
gactctctctctctcctcagtctgatccaaatggaagatctctagagagagaaactaatggttggatttttttggttcagttgccacgacagcctctgactgtctagagggacattggctccccacggatgtgcccagagcaagattgttgcacctactgtaagcacaaatcagatgccatccctaaaagtgaagagcaaagtaagcgtgagctgtttaacagagacaaaggatcttcatgtgtgtccgaaatcaaaaataatttccaaaagcccgtgttctaaaatcatgatttctacacaaaaggctgaaatagacaccactgttcaaaattgcctagatgtttcctc

SEQ ID NO: 15003 - DNA, 215 bp, Glycine max
  Clone ID: LIB3040-022-Q1-E1-C7
gagcaacatggtgaagctggtggagagatttacttgccagaagcttacgttagaaccaggaggactacttactggagcacatgagtgtggaagaacgggtggctagcttcgcaggctggcttatctgagtgtggagaagcattatggagccttaggagtacgagaacgagtactgtttgtgatgaaggtcgagtgggttaggaaatctgtcgtta

SEQ ID NO: 15004 - DNA, 316 bp, Glycine max
  Clone ID: LIB3040-022-Q1-E1-C8
ggttgcagcaaagaacccaaaaacaaaaggttgaagaatttgacagagtgagagtgtaaggtacagtcagtcagagatagagaaatggcttcgtggtgcagtgttcgaagcttccaggttccggcgatggaaggcagcgcagtgcgcaaccgtgcttcattggccgccagagtggggtgtttgtccgtggccggcacctccttctggcgttcctcttcgtcagcgaagcactctttgtcagtcacatgcgtgagcatttcttccgaaacgcgtatgaaggagaatgtgcaagcagaagggcgacctgcggctctgg

SEQ ID NO: 15005 - DNA, 408 bp, Glycine max
  Clone ID: LIB3040-022-Q1-E1-D1
gatgcatagcaattcccaattcctaattgtttaaacctaattctcatttcttcatcgttcgattcttctcctcctaaagatgcagatcttcgtgaaaactttgaccggtaagaccatcacccttgaggtggagtcctccgacaccatcgataacgtgaaagctaagattcaagacaaggaagggatcccacctgaccagcagagacttatctttgcgggtaaacagcttgaggatggtcgaacccttgccgactacaacatccaaaaggaatccactctccacctcgtgcttcgcctcaggggtggcatgcaaatctttgtcaagactttgactggcaagaccatcagcctcgaggtccaatcctcggacacgattgataatgtcaagggcaagatccaggaacagga

SEQ ID NO: 15006 - DNA, 107 bp, Glycine max
  unsure (1)..(107): unsure at all n locations
  Clone ID: LIB3040-022-Q1-E1-D2
aggggcgattcaatcttaaaaaaaaagccgtagtttaattggaaaaggtcntttttccttcctacttggaaagtttcttcttcgtatttctcgtaaaactctcaacc

SEQ ID NO: 15007 - DNA, 259 bp, Glycine max
  Clone ID: LIB3040-022-Q1-E1-D3
gaataatagtccctttgctgaaattctcctaactctctctctctctcaacaatggctcgtacttttgttcttatgttggttgctgctgctgcattgttgttgagctccacgatggctcaatcgccagcttcttcgccggctttatcaccgaccaacacgccggtggccactccaccgaggagggcgttgtctccgtctcctgttcctgctgcggtgccaccgtcgtcttctcctccggctccacctacgtcgtctcctt

SEQ ID NO: 15008 - DNA, 446 bp, Glycine max
  Clone ID: LIB3040-022-Q1-E1-D5
ggaacctgatcgatctctttaccagttgccacactacaccgagattccccctaaacccgtttgcgttgttgtttgcgaagaaatggcgactaagaggagcgtgggaacgttgaaggagggtgatttgaaagggaagagggtgttcgtgagggtcgatctgaacgtgcctttggatgacaaccttaacatcaccgatgacactagagtccgtgctgctgttcccaccatcaagtacttaactggtcatggagccaaagtgatcctttctagccacttgggacgtcctaaaggtgtaacacctaaatacagtttgaagcctcttgtgccaaggctgtctcaacttctcggaattgaggttacaatggcaaatgactctattggggacgaagttgagaagttggttgcacaacttccagaaggtggtgttttgcttctagagaatgtga

SEQ ID NO: 15009 - DNA, 226 bp, Glycine max
  Clone ID: LIB3040-022-Q1-E1-D6
gaaaagctttgtttattaataataataacaagcgaggtaaaacacttcgagcggcggggcaggggcagagttgattgcagttgagagagttgtagtgagtaacgagtacgatgatctgttcaagcttctcctaatcggcgacgcttccgttggaaaatcctgcttgcttctcagattcgctgaggactccgacgtcgacagctacatgagtaccagtggacttgat

SEQ ID NO: 15010 - DNA, 51 bp, Glycine max
  Clone ID: LIB3040-022-Q1-E1-D7
gggtttctgtttaggtttatgtgtgttgttgggttgaggtggtttggtttg

SEQ ID NO: 15011 - DNA, 328 bp, Glycine max
  Clone ID: LIB3040-022-Q1-E1-D9
tgggacaaacaatttactttactacaagctatctcagcttgttagcactttctttttcttcatttcattatttttctcataatgtcaactttcatgtcgatcatcttccttctaatttccatctttcaaatctctttcgccactaggatgtctaatgagttagttcaggacctaactcagcttcttcgttaccacaatggccctcttctctctggcataatctccattaacctcatttggtactgccacttcatcgcttcccagagcgcaatagtctccgatttcatcaactcgctgatcactctcataggtccacatcatccaatca

SEQ ID NO: 15012 - DNA, 367 bp, Glycine max
  unsure (1)..(367): unsure at all n locations
  Clone ID: LIB3040-022-Q1-E1-E1
tggtcccccactaatattcacaaatttggtccttctattttgtaaaattgtgcaatgttggtcctccagaccataattggacgttgaggttaacaagtgatgttgattgccacgtgtcatgttctgattggatatcaactccatgaaagatgaaataaattattgttttcattgatcaatcaaaacatgacacgtggcagtcatcattcaataagaacgtgacacgtgacagtcgacatcacttgttaacgattaacgtccaattgtgacctangggatcaacattgcacaattttactatataaggagaccaaatttgtgaattaaattacttgaggaccaaattcgaaactggagataaactgag

SEQ ID NO: 15013 - DNA, 366 bp, Glycine max
  Clone ID: LIB3040-022-Q1-E1-E10
gactgcaactttgctctctgtgaggcttcaatttccaattagggtttcgcttagagtaaccaattaccatgggagtcttcacctttgtcgttcgcaaatccggcgccgaatggagcgccaagcaacattccggcgacatcgaggcctccgccgactccacctacgatctccaaaggaagctcgtgcaagccgctctcgccgttgattcctccggtggagtccagtcctccttctctcccgtgtctcctacctccgctgtgttccaggtgatactgggtggtgctgtattcgttggacgtggcggtggtgctgttgcagctgcaactgcaagtggtgctgctgcagctgatgccggcccggccgcct

SEQ ID NO: 15014 - DNA, 174 bp, Glycine max
  Clone ID: LIB3040-022-Q1-E1-E12
atcatttatcatactcacgcattgcatttgcctaagtcatcgcattatcatacatcttcatctaacatgtttttgttttgccaattgcatacattctattttcatcgttcatatgtgatgttcactaatgcttgatcctgacacatagttgctcatgccttgcattttcctcac

SEQ ID NO: 15015 - DNA, 440 bp, Glycine max
  Clone ID: LIB3040-022-Q1-E1-E2
gggctgccaaaagaccaaagaaagggggaaggcaaagaaaagattggcaacgttccaagggaactccttttggaaattcttaagaaaaacaactcctttttgggcaacaatttcgaaaggggaaccaaaacgttcaatttaacaaagagagcacaatcctcacaacctaaattcgttcaagtactctggtttggcaaacaagaaaactgttacggtacagcctgagggtaaagatcaggctgtgttgttggctacaacaaagacaaagaagcataacaagcctgctgcattgcttcacagatctgtgatgaagaaggagttcaggaggatggcaaaggctgttgaaaatcaggtggcagaaaattactacaggcccgatctcaagaaggccgcccttgcaaggttgagttctgttcacaaaagcctcaaagttgccaagt

SEQ ID NO: 15016 - DNA, 397 bp, Glycine max
  Clone ID: LIB3040-022-Q1-E1-E3
gaggaaggtaaaagaagcaaacgcaagagcaagagcaagagcgaaagcggcagagaagattgaaggagaagagggttctcagcagccacaattggtgctcgcggacaagctattccttctccggcaacccgatgtgcaagacattgacaaggttcgctacaaagaggatgtcttcactcatgtcaaggaaaacgatatggtccctctgtacgaaaccctagtcgctgattccgtgttggacttggatcgtgcccttttggactctatgcgcgctaaaattgacgacgagctcaccaagctcgagcagaagatgctgaatccgaggaaaacttatgagagagtgaagttcgtgaggctcatttggcaaaatccttggttttcatccggattagggaca

SEQ ID NO: 15017 - DNA, 224 bp, Glycine max
  unsure (1)..(224): unsure at all n locations
  Clone ID: LIB3040-022-Q1-E1-E4
agggcagaacacttgggtggataagaaacttanatttgcattgcatgtgaaacatgtggcatgcgttgtgactacttttgaggtttactacgcagaatactgctgggttggttttaaggtggcatgagctgagttggaatgctttgggtatggaaagattttggcacacctcatgcctaaaatactttttgtggttcttgtaatacgttttatggttcatctgt

SEQ ID NO: 15018 - DNA, 543 bp, Glycine max
  Clone ID: LIB3040-022-Q1-E1-E6
gaagtaattacatctcaatttttgtttcgaagaaacacaaagataagcaaaagtgggagcgaagaatggagaaccccagcagtagtgaaaggagcagagcaggaatcgaagataacatgctggccatgtttgatgcctccgaaaccaaagatgctcaccaagatgccctagatgaccggattgcttttattgatgctgttcgtgcttcttgtgaacatggaaaaccgcccacttcaaaaatttttggggcggtttttcacatgctgaggacagggaagtctctagagttgattgtgggaagttataagcttctggttgatttagacaagcacttccctcgcgtggtatttagctggcacggatgattcccgatcatcagcgaactctccatcaaaattggttgtggttaaagaggcatggtctcccagtatcgattttgtggataaggccacggctgttagtgaagctgggtagaaacagtcgggtggatgggcgggaccctctagctttcaagtcgtgattaaagggctggctgaagtttta

SEQ ID NO: 15019 - DNA, 56 bp, Glycine max
  Clone ID: LIB3040-022-Q1-E1-E9
gagacctcaggtcaggcggggctacccgctgagtttaagcatatcaataagcggag

SEQ ID NO: 15020 - DNA, 178 bp, Glycine max
  Clone ID: LIB3040-022-Q1-E1-F1
gatgtcatagtattatcattcattctcatctttctctcttctctctccacccaaaccctaacttccgaccctgttcccctctcgtagccgtcatgaaaggaggaaagtccaagaccgaatctaagagagccgatcccaaagttgctgtgaataagaaaggagccgccaccaaggctag

SEQ ID NO: 15021 - DNA, 320 bp, Glycine max
  Clone ID: LIB3040-022-Q1-E1-F11
gacttctcttcacacctttgttcactcttcttctcttgcggctagggttttagcgcagcttcttctagatttaaggaagatgggtaaggaaaaggttcacatcagtattgtggtcattggccatgtcgactctgggaaatccactaccactggtcacctgatttacaagcttggaggcattgacaagcgtgttattgagaggtttgagaaggaagctgctgagatgaacaagaggtctttcaagtatgcctgggtgctggacaaacttaaggctgagcgtgaaagaggaatcaccattgatattgctttgtggaagtttg

SEQ ID NO: 15022 - DNA, 431 bp, Glycine max
  Clone ID: LIB3040-022-Q1-E1-F2
acagaaggggatgccgaaaagttataccaagatggcttcaattgtgtaacccctccttggcttccaacccaatggtaacaagtcaagttccctaaccgcaactaatgaaatgtttgcaaaacagtttccatccacaaaaaccgttgaagaaaaactcagccaactccacttctatttccataacaacataacgggggaaacaccaactgctatgaaaactgttttgcctcctaaggggtccattcatggttttggggctacttacatgatggatgaccctctaactgaaggaccaagtccaacttcaaagcttgtgggaagatctcagggaatatacgctttggcttcacaacatgagcctgggttgctcatggtgacaaattttctcttcactttgggcatttacaatggcagcaccctcagcattcttg

SEQ ID NO: 15023 - DNA, 387 bp, Glycine max
  unsure (1)..(387): unsure at all n locations
  Clone ID: LIB3040-022-Q1-E1-F3
ggcgcctctgcttgcaagagtgaaaaccttctcttacccttctctcaagtttcaagagatttcatcatggctccaaagaaggacaaggctccaccaccttcctccaagcccgccaaatctggcggtggcaagcagaagaagaagaagtggagcaagggaaagcaaaaggagaaggtgaacaatatggtgctgtttgatcagggcacctatgacaagctcctttctgaagctcccaaatacaagctcatcactccttccattctctctgatcgtttgaggattaatggatcacttgcaaggaangctataagagaattgatggcaagaggttctatcangatggtgtctgcccatgcaagtcagcanatttataccagggcaacaaac

SEQ ID NO: 15024 - DNA, 434 bp, Glycine max
  Clone ID: LIB3040-022-Q1-E1-F4
agggcttcaactacataactccatcactgcagcattaaggtttaacatctgcctcaatggggaaaggaacaaggaacttcggttagaagaagaacaagacccacactctctgtgtgaagtgtggccgccgcaacttccacctccagaagagtcgctgcgccgcttgtgctttccccgctgcacgcacgcggaaatataactggagcgtcaaggcaattcgcagaaagaccaccggaactggcaggatgagatacttgcgtaacgtgcctcgccgtttcaagagtggcttcagagaaggtaccgaagctgcaccaaggaagaagggagcagctaccactgcatagacctttcaaagatcgttctcgttgggtacggatttacaggaatagattgctttttgtgcttttggcaagtattttggaacatttattttt

SEQ ID NO: 15025 - DNA, 323 bp, Glycine max
  Clone ID: LIB3040-022-Q1-E1-F5
agaacaaagaagagcgttgagacctacaagatctacatcttcaaggtgttgaagcaagtgcaccccgacatcgggatctccagcaaggctatggggatcatgaacagtttcataaacgacatcttcgagaagctcgcccaggagtcatcgcgtctcgctaggtacagcaagaagcccaccattacttccagggagatccaaacggcggtgcgtttggtcctccctggggagttggccaagcatgccgtttctgaaggcaccaaggccgtcaccaaattcaccagctcttgagtggtttcgtgtgtttaggtcaggcttttctg

SEQ ID NO: 15026 - DNA, 379 bp, Glycine max
  Clone ID: LIB3040-022-Q1-E1-F6
gagcgccaatgtttttttcagaggagtttcatcttgtaatcgaaagagtttatcttatagtaagaaatcgatgtcttactcgagttgaaggaactgggcaagagaacaatagcctgacaaagggtttagccataaaatcgaatccatcattgagttgagatattgataaggtgaatactcatttctcgtcaatgctaggcataatgcgggtatagggacctgagaaagattatcttttcttcctatcttatgaactttaaggtgtatgaagtgtcatttcctagcgtagagttgaatttgagtaggtagagtgggagtcgatttaacttaagttgatctaggccagaggcagacctacgtcgagataagcgttcgttga

SEQ ID NO: 15027 - DNA, 252 bp, Glycine max
  Clone ID: LIB3040-022-Q1-E1-F9
tagagtcagtggtttatcgctgttcaaatgctccttcatgattgctctccagcatcatcatcatcaccgttaagttcgaaaggggtcatcaagtgtcatcgccatcggaaggcctcatgacgctactcagccccgcactttgagcgcggggtttgctcagttcatctccaggttgatcttcgtgttcgcccgttcacgttccggcaatcccctacagcgtgctcacggacactggccgccgtcactcccgcc

SEQ ID NO: 15028 - DNA, 341 bp, Glycine max
  Clone ID: LIB3040-022-Q1-E1-G10
ggttctagtgtgtgattgtttgtttttgtaactcgttcttcttcttttgttgttctgtgtttgtgtttgttttttctctcacctgaaaatgtcttgctgcggtggtaactgtggttgcggaagctcctgcaagtgcggcaacggctgcggaggctgcaagatgtacccagacttgagctacactgagtcaaccaccaccgagaccttggtcatgggagtggcacctgttaaggctcaatttgagggtgctgaaatgggtgtgcccgctgagaacgatggctgcaaatgtggaccacactgctcctgcaacccctgcacttgcaagtgaggtgttgggagag

SEQ ID NO: 15029 - DNA, 359 bp, Glycine max
  Clone ID: LIB3040-022-Q1-E1-G11
gactcactcatacaatagagaccagcttttgcttctttgtgaacatggagatgaggaaatcatgtggcttcttcttcttgctcctcctccttgtctttgcttcccaggtggtggtgcacacggacggaagagtgtgtgagtcacaaagccacgggttccatggtttgtgtaatagagaccacaactgtgctttggtctgcaggaacgaaggtttctccggtggcacgtgcaaaggcttccgccgccgctgcttttgcaccaggatttgttgagatctcatcaaacactactcttgccatgcaaattaatacatcatagctaggccacttaaattgcatcctactctttatccatttggg

SEQ ID NO: 15030 - DNA, 321 bp, Glycine max
  Clone ID: LIB3040-022-Q1-E1-G12
gagttcggtggagggagggagccgtagcagcggaagctctagcttgggtagcgaatcacaatggcgagaggattaaagaagcatctgaagaggcttaatgccccaaagcattggatgcttgacaaactgggtggtgcatttgctcctaagccctcatctggaccacacaaatcgagggaatgcctgccactcatactcattttgcgaaaccggctgaagtatgctctaacataccgtgaagtcattgctattctgatgcagcgacatgtccttgttgatggcaaagtcaggactgacaaaacataccctgctggttttatg

SEQ ID NO: 15031 - DNA, 81 bp, Glycine max
  Clone ID: LIB3040-022-Q1-E1-G2
tgcgaaaagaagaaagaaagggtttattctaaaatttaaaccaaaaaaaaaaaaaaaaaaaaaaaaaaaaaaacgggcggt

SEQ ID NO: 15032 - DNA, 388 bp, Glycine max
  Clone ID: LIB3040-022-Q1-E1-G3
gatacccttctctcttatttctctttcaattttcaccttactcattgtttctcccaccttacctctttgtccctctgcttctcgctgtgaaacttcattatctttctctttctttatttactaataccacttcacctcactttgctttcattctccataccctatcaaactccactttccttttttcctctctttgtctctctctttctacctcacatcacacattctcatcctctttttatatccttcccctccaaagctgagagagccacaacacaaccaaaaccctatattattcacttggtcaaacactctttcacttgacaaacaaacactttgtgtagctacaatggaagcgtattactacaagaggcaacatgttccagca

SEQ ID NO: 15033 - DNA, 454 bp, Glycine max
  unsure (1)..(454): unsure at all n locations
  Clone ID: LIB3040-022-Q1-E1-G4
ggagaaaaacgagccaattcatcattttctctcttctctgcttcttcttgttcaaatcttangagctgaggagaatcaatcgagagaaatatgtctggtatcgctcgtggacgccttgctgaggaacgaaagtcatggcgcaaaaaccatccacacggtttcgttgccaagcccgagactctacctgatggcaccgtaaatttgatggtctggcattgcactattcctggcaagaccgggactgattgggagggtggatatttcccactgacaatgcacttcagtgaggattaccctagcaagcctcccaagtgcaaattccctcaaggtttctttcaccctaatgtgtatccatctggaactgtttgcttgtctatacttaatgaagatagtgggtggagaccagctataacagtgaagcagattcttgtgggcatccaagacctgcttgatc

SEQ ID NO: 15034 - DNA, 229 bp, Glycine max
  Clone ID: LIB3040-022-Q1-E1-G5
gactcattcacttactttgacattcacattcagaagacaagcagaatgcagagaggcacgccggtgagaaagccacacaccatcagctccgatctcctcacttggtcggaaaggcctccgccggattccgccgccggcgccatgagtcgctctgggcagccttccgatacaatcagtaaggttcgccaagggagccagcgcaccgactaagaagctcagaggctaacca

SEQ ID NO: 15035 - DNA, 265 bp, Glycine max
  Clone ID: LIB3040-022-Q1-E1-G7
gactcactcacttcagtgtcattttttcttattctcttcctctctctctactctgagacacaaaggagaattataagaaattatggctggttattcaaaagcttcagctctttggatcctttttcttctctttggcttctctgtagctaaggaaattttggttggaggtaagactgatgcatggaaggtttcagcctctgaatcagattcactcaaccaatgggcagaaaagtctcgtttccaagttggagacgagcttgtttgg

SEQ ID NO: 15036 - DNA, 389 bp, Glycine max
  Clone ID: LIB3040-022-Q1-E1-G8
ggaagatctattaaaattgacgcgaacacgaaaagactagaaaaaagggttaagaagtaaaagtttggtgtgaggtgtgagtgttctgcacgcaccgaatcaacaataatttctcaaacagcgttgtaaaagaaacacattagactaggcagataactatggctgtacattctgattcggcttcatccgagaagaaatcaaccaatggagtgaatgagttgctgacttttaatgccgagaacatgcaaagcaacatgaaaattatctattacagccgaacatttttatctataattggtggagttgttgctggtagtttgggatttacacgcttgaaaggatttgtgttttacttacttctcatggcatttacgtcacttgggctcgtg

SEQ ID NO: 15037 - DNA, 180 bp, Glycine max
  Clone ID: LIB3040-022-Q1-E1-G9
ggtctcgtggaagtttaagcaagcagaattctaccggcgcctgctttctttgttcgtgttatgcatcatgatggagtcttaggtgaagcacgcacttgttgtcatagttatgggtcgtactggatccagaggacctgtgacccaggttagagtgaagttattggatgattatgaacgtca

SEQ ID NO: 15038 - DNA, 352 bp, Glycine max
  Clone ID: LIB3040-022-Q1-E1-H1
aggggcgtacacagcctcaacaaccctaacgcgtgcagagcagagagagacgcagccatggggcgaagacccgcgaggtgttataggcaaattaagaacaaaccataccccaagtcacggttttgccgtggtgttcctgatcccaagatcaggatttacgatgttggtatgaagaagaagggtgttgatgagtttcctttctgtgtccatctggttagttgggagaaggaaaacgtttctagtgaggccctggaagctgctcgtattgcttgcaacaagtacatggccaaatttgctggaaaggatgctttccacttgagagtcagggtgcacccattccatgttcttagga

SEQ ID NO: 15039 - DNA, 365 bp, Glycine max
  Clone ID: LIB3040-022-Q1-E1-H10
gacttccagatttcaaagaaggcgtcttcataaacgcctttcttctccgtttccgtttcctcgttcgaattcgctttttgatctgcgaaaatgagagagtgcatctcgatccacattggtcaggctggtatccaggtcggaaatgcttgctgggagctctactgcctcgagcacggcatcgggcccgatgggcaaatgccaagtgacaagacagttggcggtggtgatgatgctttcaatactttcttcagccagactggtgctggaaagcacgtgccacgtgcagtgtttgtagatcttgagcccactgttattgatgaggtgagaaccggaacttaccgccagcttttccaccagagcagctc

SEQ ID NO: 15040 - DNA, 353 bp, Glycine max
  Clone ID: LIB3040-022-Q1-E1-H3
gaaacagagagagcgaggacaccatggccaacaacaacgaagaggaagaggaagcagtggcgccaatggtgaagttgggttcttacggtggtgaggttcggttggtggttggtggggaggaatccgctgccgaggagaccatgctgctttggggtattcagcagcccacactttccaaacccaatgccttcgtctctcaagcttccttgcaactctccctcgactcttgtggccactctctctccattcttcaatccccttcctcattgggaacgcctggagtaactggagcagtgatgtgggacagtggagttgtactgggaaagtttctagagcatgctgttgactcaggg

SEQ ID NO: 15041 - DNA, 366 bp, Glycine max
  Clone ID: LIB3040-022-Q1-E1-H5
ggagtgaacacacacctacgaacaaacccaaccccgaatggcacagaagcagcacctccttctggatctatcccaaatctcaatctccaaaccctagaacattcaactctcccccgttccctttcaaaaaccttccctttccactcttccgccgcgattcgatctccgggctgccttcctttccgcgatttcgatctgaaactcgaggttgcggaattcggaaattgacattgaagtgttcaattggcactgtcaatgccattggtgtggtttgtgaagaatttttctgtggtgttttgataccggaaaaacacaatgtcttgggcaaggccctgggatatttacctttctacttcacttgccagc

SEQ ID NO: 15042 - DNA, 410 bp, Glycine max
  Clone ID: LIB3040-022-Q1-E1-H6
gggcagttggaatcttggacaaggttgtcctacgatggaggagaaaaggagctggtttacgaggtttccgacaagagatggacatcaatgaaaatgaagatgaagatattctcaaggtgttccgaaaacagaaattagatgtagaaattgaagaggctgtttcaagggtgctgtccatggttgactcaccggattctcgtgagcaatatcatcgcatgcttgagaaatatcgtcaagctaaggctgaacttgcgggtacgagtgacgaagcatcattatcaacttctgtaggagatgacttatttatggatgagttttatccatttccctaagagcaaacgctagccttgttaatcttcattcttctgaactatcaatttgtggaacaagctgacttattagtttgagac

SEQ ID NO: 15043 - DNA, 362 bp, Glycine max
  Clone ID: LIB3040-022-Q1-E1-H7
gctagtggcagtgaccaaactccatttctcactcgccgtcgtctcttccgtctagggtttctcctcttcacaaaaatggttgccgcaaaaaaaaactaagaagacccatgagagcatcaacaacaggctcgctctcgtcatgaagagtggcaaattcaccctcggttacaagaccgttctcaaatctcttaggagctccaaagggaaattgattatcattgctaacaactgcccccctttgaggaagtcagagattgaatactatgctatgttggcaaaggttggggttcatcattacaatgggaacaatgtggatttgggcaatgcatgtggcaaatattacagagtgtgctgccttagca

SEQ ID NO: 15044 - DNA, 425 bp, Glycine max
  unsure (1)..(425): unsure at all n locations
  Clone ID: LIB3040-022-Q1-E1-H8
ggagagagagagagaaacaaagcagcacccatttggatcctctcttctcttctttgatctccgttaccctttttgttttctcaacagagagagagagagagaatctttcgaagttcgtttgcgtgtgttgtgtggtcagtcaccgatggcagcaccacctgcgagggcacgtgccgattacgattacctcatcaagcttcttcttattggcgatagcggtgtgggaaagagttgtctgcttttgcgattttctgatggttccttcacaaccagttttatcaccaccattggcattgattttaagataagaaccattgaacttgatggcaaacgcattaagttacaaatctgggatacagctggtcaggancgatttcgaactattaccacagcttattaccgtggagccatgggtatcttgctcg

SEQ ID NO: 15045 - DNA, 54 bp, Glycine max
  Clone ID: LIB3040-022-Q1-E1-H9
gagggaaagaagttggtctctgctactaaggaaggcctgaaacttgacgagagc

SEQ ID NO: 15046 - DNA, 330 bp, Glycine max
  Clone ID: LIB3040-023-Q1-E1-A12
gggatcgtccttgtcctattaaataacaccgcccaccgactgtgtgagtccgagtgtgagagaaaccagtgactgacttttcgagaaagaaaaacaaaaatgagtttccgtcattccatcatgaacgctcttcccattctcctcttcttcctcttcgtttctgcattagtttctgcgaagaaaactggtgatgtgacggagctgcaaattggcgtgaagcataaaccagtatcatgtgaagttcaggcacacaaaggtgacagagtcaaagtacactataggggaaaactcactgatggaactgttttcgattctagctttgaaagaaat

SEQ ID NO: 15047 - DNA, 196 bp, Glycine max
  Clone ID: LIB3040-023-Q1-E1-A2
agggtcaaacgaagaaaggcttatggtggatacctaggcacccacagacgaggaacggcgtagtaagcgacgaaatgcttcggggagttgaaaataatcgtagatccggggattcccgatataggtcaacctttcgaactgctgctgaatccacgggcaggcaacacacaacctggtgaactgaaacatcttagta

SEQ ID NO: 15048 - DNA, 382 bp, Glycine max
  Clone ID: LIB3040-023-Q1-E1-A3
ggatcctttgtattctattcttcaagattcaggtactgcgtttcggaagcagacacagatggctcgtacgaagcaaaccgctcgtaagtccacaggaggaaaggctcctaggaagcagcttgcaaccaaggctgcacgtaagtctgcaccaactactggtggtgtgaagaagccccaccgttatcgtcctggtaccgttgctcttcgtgagattaggaaataccagaagagtaccgagcttttgatccggaagctccccttccagaggctggttcgtgaaattgctcaggacttcaagactgatctgcgtttccagagccacgccgtgcttgcattgcaagaagctgctgaggcaaaccttgttgggctctttgaagacact

SEQ ID NO: 15049 - DNA, 383 bp, Glycine max
  Clone ID: LIB3040-023-Q1-E1-A4
ggttgtgttgtgtctcttctcttcccaaactctcttcttctattccaaagacccttttgaagtaatcgatggagtttcagtctctttccagattctaccttcttctttccttaaccattctcttccttgcaccctttcacgctcaggctaaaattaaagtcacttactgcgataagaggcagactatcctgtgaaggtgtctggagttgaaatatcaccagaccctgtggagagtggcaagcctgctacctttaagatctcggctacttctagtaaagctatttatggtggagaagttgtaattggagtttcatacgttggggtgcctgtccatactgaaagaattgatctctgtcatgaagtatcctgtcctgttgccaatg

SEQ ID NO: 15050 - DNA, 369 bp, Glycine max
  Clone ID: LIB3040-023-Q1-E1-A7
gaaacacacttgattagctgaggaggaagagagaaaaaccatggcaataacactcaacaatggcttcaagatgcctatcattggattgggcgtgtggcgcatggaaggaaacgaaatcagggacctaattctcaattccatcaaaattggttatcgccattttgattgtgctgctgactacaaaaacgaagcagaagttggagatgcgcttaaggaggcttttgatagtggccttgtgaagagagaggatctcttcattaccaccaagctttggaaattctgatcaaggccacgttcttgaggcgtgtaaagacagtctcaagaagcttcagttaacgtatctagatttatatcttgttcactttcctg

SEQ ID NO: 15051 - DNA, 390 bp, Glycine max
  Clone ID: LIB3040-023-Q1-E1-A8
ggtgcaaaactgaattataaacttgaaatacatcaaagcagttttgttcctctcttcgtcttcatatacgtttatgttttatgatttatacttcactacttttatgcttccacttagtttgattgcatagtctgatcagatctttgctcagtttgatagctatttctgctttagtctggtagtgtcatagtctgatagcatcagtttgaaagttgttttcttcagtctgatatatcatgtgttctgtttttacaacatagcttgttacccttttatgcttcagtctttttccctctgccatattcaaacagtctcaatatatggagtgacaaatggttcccaaactctcttgataatgttattcactgggattagaatccagatattgat

SEQ ID NO: 15052 - DNA, 316 bp, Glycine max
  Clone ID: LIB3040-023-Q1-E1-A9
ggagcatgttccctacacggatccatacactcccagaaaacatttttcattctatttctcagcaccagtcagcaacaacaacacccctttcctttccacaagacaccaaacaaagttcacagctttttttgttctttcacctcgattcacgaactgggtcatcctctgattgtggattattggatttcattttgagctacaccacacccccaagactttgactttcaacccaaaaccagctctttgtggtttgccaggttgccagttactgtgatatcataatggattccccaaaatctgttgtgtcacccttcag

SEQ ID NO: 15053 - DNA, 278 bp, Glycine max
  Clone ID: LIB3040-023-Q1-E1-B10
ggattgaggaaggttaggcgaggaagggaaaaagaggacagaggttgcttgcgcaaatctagctaatctgggctttctgggacaaccagtagagaaagtaaaaggattgagattgagatttgagagaaagagacagagaaagagaaagaagaggttaaacacacacaaaacagaataagagaactctcccaccatgccatgcccaaaaccgtactacacaataatgcacaccaaccattcatttccttttgcccacatttactatcccacattatgtt

SEQ ID NO: 15054 - DNA, 254 bp, Glycine max
  Clone ID: LIB3040-023-Q1-E1-B11
ggctcttggctgatatttcctgataagtggacagacgcttaaacagagaaactaacacagatttgcatgcatggggaaaataacgcacattgtagtaattcccagtgcagggtacagccacttcgttcccgttatccacttctcaaagagacttgttgagcttcacccagaaattcacgtcacatgcatcattcccattctggggtctctcccaagtgctgcaaaacccattccccaaaaccttccacaaaaca

SEQ ID NO: 15055 - DNA, 370 bp, Glycine max
  Clone ID: LIB3040-023-Q1-E1-B2
gatcgacaaacacagctcaacaactgtgtctgcccaaaagtcatgttgatgttcttcttcttctccttgttcgcctccacttttcactgaacacttattactcactccttcatggccacttcgctctctttctccatttctcccaaaaccactgccacaacctcagccttccgattcaaagtctccgccatggctaccaccatcgccgccccttctaccaaggtggctcccgccgtcattgtcggcggcggaagagtgggtagggccttgcaggacatgggcaccggtcaagacctcctcgttcgccgaggagagtccgtacctcccaattttgagggtcgcatttttgtgtgcacaatgaacgatgatc

SEQ ID NO: 15056 - DNA, 373 bp, Glycine max
  Clone ID: LIB3040-023-Q1-E1-B3
gactgatacaggaacagcagagaaacaaagttagaagtaaagaagatcatggcttctctagcaaccttggctgctgttcaaccagctacgatcaatggccttgctggaagttccctctctggaactaagctctctttcaagccctctcgccacagtgtcaaatccaagaacttcaggagtggtgccgtggtagcaaagtatggtgacaagagtgtgtactttgatttggaggatctgggcaacactacagggcagtgggacttgtatggctcagatgcaccttcaccctacaaccctcttcagagcaagttcttcgagacatttgctgctccattcacaaagaggggattgttactcaagtttctgatattgg

SEQ ID NO: 15057 - DNA, 389 bp, Glycine max
  Clone ID: LIB3040-023-Q1-E1-B4
gaacgcttcatttgaatcaacactccttcctcttcctctctctcgtctattttagttgtaagactaagatctcatcttagattccattttgtctcttcattgcccccaaaataactttattttctctgaattattgcctacagcaactttgaataattctccttcgtatcaagtcttcctcatcttcaccacctttttatatttatgtgtctaagaacataaactataaaaccaaggcgagtgaaagaaaaaaaatgtcaggtgtgtctctagcagtgtctggtccaccagcagcaacagtggctgaagcagcaggtacaaagcctaaacgaagaacagaacaggcaccaatgggtggcatgatgggttcactgcgcgtgatagaactt

SEQ ID NO: 15058 - DNA, 207 bp, Glycine max
  unsure (1)..(207): unsure at all n locations
  Clone ID: LIB3040-023-Q1-E1-B5
cccacgcntcccatacagtcgtcaatacagtaccgacaggagtacagaacggaaatatacccttgaagggtatcaacccctttttgtaccccacttcgcctgcatttacgtctccgttggaagacatctactgaacctcctttaaccatactgggccttcacgtggcattgtttcaatacatggctgtaccttggctgaaacatgtc

SEQ ID NO: 15059 - DNA, 337 bp, Glycine max
  Clone ID: LIB3040-023-Q1-E1-B6
gatgactgaactttgaagtataccgattctgggagacatcagaggaagcaatcatgagttccaaaggcaaagtgatgagagtgagagaagtggctgggtgaaagtcaaggagctcagatagatcacagcaagattaatgatagtggagtgagtaaggtttttggccaattagtgaacaacacaatgtgttccttttttgcaggcattttggttacagatacaatacaagaactgttcttagttacctcatagttcctacagatacacacacaacctgggttaagagagagagacattgagaggaagcatagcatggtactcttgaataaatggggcc

SEQ ID NO: 15060 - DNA, 60 bp, Glycine max
  Clone ID: LIB3040-023-Q1-E1-B7
gtgttgatgcccagccatgaatatttgatgttagaatattgaaatattgcaattttattt

SEQ ID NO: 15061 - DNA, 165 bp, Glycine max
  Clone ID: LIB3040-023-Q1-E1-B8
ttcttttgttccccctcccgcctcgtcgtttctccgcctgtcttgcccttctcgtcttcctttcgtctctgtcgtcttcggtctccctggctttgtgtggcgtggttctgggcgccttgggctctcgcttgttctgccttttgtttgttgcttcgtttccctctc

SEQ ID NO: 15062 - DNA, 265 bp, Glycine max
  Clone ID: LIB3040-023-Q1-E1-B9
gcttgcaggcgaaagagaagatggccaccgttccagggcagctcgtgtgggagatcgtgaagaaaaacaactcctttttggtcaagcagttcggaagggggacccagagcgtcgaattcagcagagagagcaacaatctctacaaactcaattccttcaagtactctggtttggcaaacaagaaaactgttacggtacagcctgagggtacagatcacgctgtgttgttggctacaacaaagacaaagaagcaaaacaagcctgc

SEQ ID NO: 15063 - DNA, 360 bp, Glycine max
  Clone ID: LIB3040-023-Q1-E1-C1
gataacactgtggctcttacaatcccagctcatagcattcttcatcttccaacgagaatcagtctttgtgttccaaatggctcgtacgaagcaaacagcaagaaagtccaccggaggaaaagctccaaggaagcagctcgccaccagggcagcacgtaagtccgctccggcgacgggcggcgtgaagaagccccaccgtttcaggccggggacagtggctctgagggagattcggaagtaccagaagagcacggagcttctcataaggaagcttccgttccagaggctcgtaagggaaatcgctcaggacttcgagagcgatctacgcttccagagcagttctgtctgcgctcttcagga

SEQ ID NO: 15064 - DNA, 298 bp, Glycine max
  Clone ID: LIB3040-023-Q1-E1-C10
gggcgcgggtgaggtagaacccttccacggtggtgactgcgcgatgggtgcctacaagtatgtttcagagctattgcgcaaggaacagtctgatgtcatgcgcttcttgcagcgggtgaggtgctgggagtataggcagcaaacttccattgttcgcttgacaaggtcgacccgccctgacaaggctcgtcgcttgggcttcaaggccaagcacggctatgtgatataccgtgttcgtgttacgatgggtggcccacataggccagttcccaaagggtattgtttatgggaagcccac

SEQ ID NO: 15065 - DNA, 232 bp, Glycine max
  Clone ID: LIB3040-023-Q1-E1-C12
ggttctagtgtgtgattgtttgttgttgtaactcgttcttcttcttttgttgttctgtgtttgtgtttgttttttctctcacctgaaaatgtcttgctgcggtggtaactgtggttgcggaagctcctgcaagtgcggcaacggctgcggaggctgcaagatgtacccagacttgagctacactgagtcaaccaccagcgagaccttggtcatgggagtggcacctgttaag

SEQ ID NO: 15066 - DNA, 390 bp, Glycine max
  Clone ID: LIB3040-023-Q1-E1-C2
gactgtttcatatcagaactataaccttgctactctgtaaaaccttaaatggaatcttcctatctccacgcaactcatttccaatctatccaaatttgcaagctaacatcatgtctacctccacactcaaatgctcagatcacatcaattccatttcctactactcattatctgtacaaccactgcaacagcttcatcatccctttaagtttcactgttcccctcaaagcattatccacttccatccattcctcactttcttcccctaagccacctatcacaaaggaggatgccatacttcaggccaaaacatccctttcagcaaccttagagaagcccctaaacaataccaaactaataggcaaattcaagaaactaaggcaacccaag

SEQ ID NO: 15067 - DNA, 385 bp, Glycine max
  Clone ID: LIB3040-023-Q1-E1-C6
gaacggtgcgtttaaacttttaaagtgtgaacagtgaccgacattgcttcttccctgcgtcgtcgtttttttcttctctcctctttgttagggtttgctcggttccatttttcccaaaccattcggcacaacatcgaaatttccccattgtccgcttccgcaacgaaataactctaccgtgccctacgataaggggtttctcagagcaggagcaatgtcttccccttatctacctgccacaactgactcacttgctctcgcaactgaggccaaagacccatctgaggccatctccattctttatcgggtgcttgatgatccttcttcttcaccagatgctctgcgtatgaaagagcacgcaatcacaaacctcactaagcttctc

SEQ ID NO: 15068 - DNA, 326 bp, Glycine max
  Clone ID: LIB3040-023-Q1-E1-C9
ttgtgcaatttaatttctaattaagttcaattctcatcagtaaaaaagtggtacacccaaaaatacagataattcgccagctttatgtgcaatttgtgtcccattcaaattatcttcaatacgagtcaagggaataaacccctgttctatggtttccagataaacgatactctcaaaagtactggtacgagtaaaaataccctcttctttaacttctgttaatattctgatggagtgaagctcgttcataggtatttcgagaataatacgacgattttttccaggaaatccccaacaaacaaacgttaccttttccctttttaatg

SEQ ID NO: 15069 - DNA, 285 bp, Glycine max
  Clone ID: LIB3040-023-Q1-E1-D1
cggggagtgatccttctacactaactagagccgagcagcgagagagagaaaccctagcaaaaatgccggctggtcacggtttgagatcccgcaccagagattccttctctcgtcccttcacgaagaacggtaccatcgccctcaccacatacctcagaacctaccacgtcggcgattatgtccacctcaaggttaacggcgccgtccacaagggaatgcctcacaagttctaccatggccgcaccggtcgcctctggaatgtcaccaaacgtgctgttggggtcg

SEQ ID NO: 15070 - DNA, 288 bp, Glycine max
  Clone ID: LIB3040-023-Q1-E1-D10
aggagcagcaaaggcagtggcccttgtcctcccaaccctcaagggcaaactcaatggcattgcactccgtgtgccaacaccaaacgtctcagtggtggacctcgttgttcaggtctcaaagaagacctttgcagaagaagtgaatgcagcattcagagagagtgcagacaatgagctccagggaatcctctctgtgtgtgatgagccacttgtgtctgttgacttcaggtgcactgatgtgtcctcaaccgttgactcatcgttgaccatggtcatgggagatgacat

SEQ ID NO: 15071 - DNA, 265 bp, Glycine max
  Clone ID: LIB3040-023-Q1-E1-D2
tcatatctaataaactcattttttattattaaatttataattttactcatgaatgtttttcactatgtctaaggatccttctgctccaaaagcaaaagctcaggccatcaccgagtaatgctcatcagcacccgttgtcttcaagttcataattttgttaaatcgccaacaatttgaattggtacacaacatagagttgaatgtcatatacaataattttatattactacttaatgatccattaccatttgaattactttaacat

SEQ ID NO: 15072 - DNA, 387 bp, Glycine max
  Clone ID: LIB3040-023-Q1-E1-D4
ggatttggagaaaagaaaaagaaagaagacatttccttccgaattgaggaagggaaaggtgtcttggatggccaagtcatcttccttagctatcacgttgatctgcgccgccacggtattggtggcgatgagtcggtggccgacagccgtgggcggcggggaccaccacttgggaatgggatgggtttccagcacgtgcaaggggaccattgctgattgcctgggaggggaggagtacgagttggattcggagatcaaccggcgcatcttagccaccaacaagtacatcagctacgttgcgctgcagaggaacactgctccctgctctcgccgcggcgcctcctactacaattgccgacccggagcacaggccaatccttacagccg

SEQ ID NO: 15073 - DNA, 397 bp, Glycine max
  Clone ID: LIB3040-023-Q1-E1-D5
gacctaaaaattgtaccgatatggcttcacttgtgtgtctccttttttccttgcatttcatggttatcatgtcaggttccttaccagcaaatagtgaagtgtttacaaaagagtctcctatgtctctatccacaaaacccgtggaaagactcacccaaccccacttttatttccataacaacaaaatgggggaacacccgactgctatgaaaattgttgagcctcctaaggcgtccatttctggttttgggactatttacatgatggatgaccctctaaccgaaggaccaagtccaacttcaaagcttgttggaagatgtcagggaatatatgctgaggcttcgcaacatgaacctgcgatactcatggtaacgaatttgttcttcactgagggcat

SEQ ID NO: 15074 - DNA, 351 bp, Glycine max
  Clone ID: LIB3040-023-Q1-E1-D6
gatgccgaaaagtagtaccaagatggcttcagttgtgtatctcctctttggcttccatctcattgttatcatgtcaagttccttacccgcaactagtgaagtgtttgcaaaacagtatccatccacagaacccgtggaagaaaaactcacccaactccacttctatttccataacaacataacgggggaacacccaactgctatgaaaactgttttgcctcctaaggggtccattcatggttttggggctacttacatgatggatgaccctctaactgaaggaccaagtccaacttcaaagcttgtgggaagatctcagggaatatacgctttggcttcacaacatgagcc

SEQ ID NO: 15075 - DNA, 375 bp, Glycine max
  Clone ID: LIB3040-023-Q1-E1-E1
aggaaaaagggttgagtagtagtgttgaggacaaggtgagttgtgttggggacaaggtggttgttgtggaaaaagtgagtagtgttgaggagaaacaagtggtttcgaaaacgattgagcaagggaaaagggtggtggaccctgtggaggaagaaaaaactgtcacaagcacgaggagtgtgaacttggtgtttggtgaagatataaggtgggcagagttagccgtgcattgtactgtgaagctggctacggatataactagggatcggtatccaggtctgaagggtgctcttgtcaagtacaaggatacacagggtgaattggttacaatcactgccaccgaataactgcggctagctgaacaatctgcccctg

SEQ ID NO: 15076 - DNA, 194 bp, Glycine max
  Clone ID: LIB3040-023-Q1-E1-E10
ggcatcacacacagacaaacactcccattttctctctttctctttctctccgacctagcgagaccgagcgatccgatcctaatcccgcgatgctccgccgcgcaaccacctccctcatctccggcgcctcccgccgctgcctctccaccgacgtgccggcgacgccggcggcggattccgtcttcgcggacgcg

SEQ ID NO: 15077 - DNA, 65 bp, Glycine max
  Clone ID: LIB3040-023-Q1-E1-E2
aacccacgggaggaaaacgggttcagtcgtattgttcaggcgatggtgatttgtctcggggacaa

SEQ ID NO: 15078 - DNA, 342 bp, Glycine max
  Clone ID: LIB3040-023-Q1-E1-E3
gagagtggtggagtgtgcaaaagagcgtcgtagtcgcaaccctaatcagaagaagcgcagcttcaagcgagtgacagccaccagccatgggtcgtatgcagagccgcggtaagggtatatcctcttctgctttgcccgacagaaggacacctcctagctggctcaagatgccttcgcaggatgtcgaagaagatatctgcacgtttgctaagaaaggtttgaccccgtcgcagattggtgtcattcgcacagattcgcacggtattgctgagggtaagagcgtcgctggcagcacaatccttcgcatccccaaagctcatggacgtgcgcccgagagtccag

SEQ ID NO: 15079 - DNA, 401 bp, Glycine max
  Clone ID: LIB3040-023-Q1-E1-E5
agaaggggacttcaacatctcttaataaagattagaaatcgacatatggggggagcaaagagttactcttgttttgcagtaatagctgtggccttggttttgctacttctgaatgtggctgtggtttgcaatggaggcaagacaagcacattcattaggaaggttgagaaaactgaggacatgccccttcatagtgatgtatttgttgccccttctggctataatgctcctcagcaggttcatataacacaaggtgaccaagtgggaagggccatgatcgtgtcatgggtgactgtggacgaaccaggaaagagtctagtgcattactggagtgacgccagccagcacaagagagtggccaagggaaatcatgtcacatatagatacttcaattattcttc

SEQ ID NO: 15080 - DNA, 362 bp, Glycine max
  Clone ID: LIB3040-023-Q1-E1-E6
cggctgccagacgactgaaggggacttcatcatcgcttaacaaagattagaaatcgacatatggggggagcaaagagttactcttgttttgcactactagctgtggccttggttttgctacttctgaatgtggctgtggttttcactggacgcaagacatgcatattcattaggaaggttcacaaaactgacgacatcccccttcatagtgatgtatttgttgccccttctggctataatgctcctcagcatgttcacatgacacatcgtgaccaagtgtgaagggccataatcgtgtccccggtcactgtgcattaatcaggaactagtctatgtcatctctggactgactcccgccagcc

SEQ ID NO: 15081 - DNA, 76 bp, Glycine max
  Clone ID: LIB3040-023-Q1-E1-E9
ggggaaggggtcagatttatcttgacgggagcaagagtaataataatgtgtataatgctacatcagcgggtatggt

SEQ ID NO: 15082 - DNA, 57 bp, Glycine max; identical to SEQ ID NO: 12752
  Clone ID: LIB3040-023-Q1-E1-F1

SEQ ID NO: 15083 - DNA, 316 bp, Glycine max
  Clone ID: LIB3040-023-Q1-E1-F11
acttgagacacaaactcacacactttgtactctccgtccttccttcttcgatccagatctctctccttctccctcaaatggcttcccttctgcaatgttccatgcccctcgtctctctttccaatcgagctctggtacccggtaccaggatctccaacccaagttcagtttccctttcaattaagggaagaagtttcccatccgttacattgcagcccagagggcgtcggtttcagcttagatgtgcggcaaaaccagagacagtgaagaaggtgtgtgacatagtcaagaagcaattggcactgccagatgaatc

SEQ ID NO: 15084 - DNA, 388 bp, Glycine max
  Clone ID: LIB3040-023-Q1-E1-F12
gacttcaattgcaatcaaattagttcattctctttgcgcagttccctacctctcctttcaagatgcagatcttcgtcaagaccctcaccggaaagaccatcacccttgaggtggaaagctctgacaccatcgacaacgtcaaggccaagatccaggacaaggaaggaattcccccggatcagcaacgtctcatcttcgccggaaagcagctcgaggacggccgtaccctcgccgactacaacatccagaaggagtcaacccttcaccttgtccttcgtctccgtggtggcatgcagatcttcgtcaagactctcactgggaaaaccataaccctagaagtcgaaagctctgaaaccattgacaacttcaaggccaagatccaggacaa

SEQ ID NO: 15085 - DNA, 392 bp, Glycine max
  Clone ID: LIB3040-023-Q1-E1-F2
ggttggacgcatggaagcaaagcaaaggctgataatggcggcaacccataactcaatcataaatccccacatcaaccccaccctttctccattacaacacctggcactagagggataccatcttttattattatctatcttcactattactgttagatggatagacattgccataaacagcactttcctccccttacctgaaaagtttggtttctgattcttttttccatttcagcaaagtgggtgtggtttaatttaatttacttttagtatgagttatgggtgaattatttggcgttggaaaaagaaggaacatcagcagcagcaacaacaacaacaacagttctagtactagcgttcttgggttggatgtgaaggtgcaacagagccct

SEQ ID NO: 15086 - DNA, 390 bp, Glycine max
  Clone ID: LIB3040-023-Q1-E1-F3
ggtggtgtcgagctgagaataccagttgctccagtagccggcactaaacaacatggcggacaaggcagtcaccatccgaaccaggaagtttatgacaaacaggcttctctccagaaagcagttcgtcgttgatgtccttcatccagggagggctaatgtttccaaggctgaactgaaggagaagctgggaagaatgtatgacgtgaaagacaccaacactgtatttgtcttcaagttccgaactcattttggtggtggcaagtccactgggtttggtttgatctatgattcagttgagaatgctaagaagtatgagcctaaatacaggcttatcaggaatggacttgataccaaagtagagaaatcaaggaagcacatgaaggagagaaa

SEQ ID NO: 15087 - DNA, 398 bp, Glycine max
  Clone ID: LIB3040-023-Q1-E1-F5
tattcacacaactaactaagaaagtcttccatagccccccaaaaatgaagagcaccatcttctttgctctctttctcttttgtgccttcaccacctcatacctaccttcagccatcgctgatttcgtgctcgataatgaaggtaaccctcttgaaaatggtggcacatattatatcttgtcagacataacagcatttggtggaataagagcagccccaacgggaaatgaaagatgccctctcactgtggtgcaatctcgcaatgagctcgacaaagggattggaacaatcatctcgtccccatatcgaatccgttttatcgccgaaggccatcctttgagccttaagttcgattcatttgcagttataatgctgtgtgttggaattcctaccgagtgg

SEQ ID NO: 15088 - DNA, 165 bp, Glycine max
  Clone ID: LIB3040-023-Q1-E1-F7
ggaggccatagtaaccattagttatactggtcttcgcctatcattaatcatgacgcaccaatctttctattcctcacagtcgcatatcacacgtttatccatgcccaccttccagactatgatggtcactctcacgatcgtccagatggaatgacatcatttcac

SEQ ID NO: 15089 - DNA, 304 bp, Glycine max
  Clone ID: LIB3040-023-Q1-E1-F9
gaatgaaactagattccatgttccaaccacagtgctacgaaagtgcgtgcgagaaagagatcacatcacacatgggctattacccacagtttcctgcacgatcatgctcatgccacacctgccagattgccatgcccacacatcataggaagtcccaatcctaaccagcttgcttccgtggcacataagcatgatgatagttacgtcagccgaagctctcgccggtcagctcgcagagtgcgcataggtgcagccgccgttggctctcaggtccaccctgatgaagcaacatatcgggacactg

SEQ ID NO: 15090 - DNA, 309 bp, Glycine max
  Clone ID: LIB3040-023-Q1-E1-G12
accactaccaaaggccccaagagaagccaaatacctactagtcgtcattgactacttcaccaagtggataaaagcaagaccactgtgggaaattacagctaacgaggtggaaaatttcacctagaaacacctcatctgcagctacggcctcccatacgccattgttgtggacaacgacactcagttcgaagcttagacttctgaataattcttgacaaggataggcatcaagcacctagtcacctttgttgaacatcctcaaactaacggttgggtagagacaaccaatagagtccccttgagagccct

SEQ ID NO: 15091 - DNA, 365 bp, Glycine max
  Clone ID: LIB3040-023-Q1-E1-G3
gactcatctcttacaacgaaaccctcttcatcttgttctatctgtgacgagcatcatggcctcaagagcagtgttattgttggctatgtgtgtgcttccggcgatggttgtggccattcgcccagcaaagaaccctttttgcgtgaagggtcgtgtctactgtgacccttgccgtgctggttttgagacctcagctaccacctacattgctggtgctgagattatgttgcaatgcaagagcagggttagcaacgaggttgtgtacacgaagaaggggtacaccgactcaaccggagcatacacaatgtacgtggatgaggatcacgcagatcagatctgcagtgccaagctttgtagcagccctc

SEQ ID NO: 15092 - DNA, 359 bp, Glycine max
  Clone ID: LIB3040-023-Q1-E1-G4
ggacgacttaaccccaaacgaagaaaaaagactgagagcaattgcatcaacaacaaattgaaaggatgtcgatcttcgagtacaacggaagcgccgtggtggctatggtcggcaagaactgcttcgccattgccagcgaccgaaggctcggcgttcagctccaaaccatagccacggatttccaacgcatttccaagattcacgacaagctcttcatcgctctctctggcctcgccaccgatgctcaaacattgtatcagcgtcttgttttccggcacaaactgtatcagcttcgtgaagagaaggatatgaaaccagagacctttgccagcttagtctctgctctgctttatgagaaa

SEQ ID NO: 15093 - DNA, 60 bp, Glycine max
  Clone ID: LIB3040-023-Q1-E1-G5
gacatgttctgataccgaccatggcgcacgagtaagaaagatagaatctcggtactttcc

SEQ ID NO: 15094 - DNA, 380 bp, Glycine max
  Clone ID: LIB3040-023-Q1-E1-G8
gaatgcataacactggaagccaaaatcaattgtatttcttgtttgtttttgtttaacgctgttgcgattcactcttcttcttctctttagggtttttgtctgttctctgaatctcacactatgaatccgcttccttttcaatctgcaccgccgccccctcctccatggtttccgatattaccctccgaaccaccaaattcaacctccttttgggacaacagaaatgtctgcgatcgcctcagagaattgcaacacactctccatctcgcaaagtcaatgcagaaggagttagagatgttgaagatgataaaagatggtaaagggtctttagaagatgtaaaagatgcttcaaacgaaccttgtccttctggttttgtaaa

SEQ ID NO: 15095 - DNA, 287 bp, Glycine max
  Clone ID: LIB3040-023-Q1-E1-G9
ggtgttgctttagaatctgggtgctgcggctgaagatctcgattagccgaaaattgcaagaacggcttcaggctcttgcgatcaacaaacgcagcgttttgatctcagatttgagggggagagaatggcaacaacagtgagaagtctgaagataaagacaagtacgtgcaaacgtatagtgaaggagctgcattcttatgagaaggaagttgagagagaagctgccaaaacagctgatatgaaggaaaaaggagccgatccctatgatctcaagcaacaggaaaatg

SEQ ID NO: 15096 - DNA, 389 bp, Glycine max
  Clone ID: LIB3040-023-Q1-E1-H1
ggagagagagagagagagttggaagaagaagaagggaagatgaacttgagatggatggaagcggtgctgccgctgggaatcatagcgggaatgctctgcgtcatgggaaacgctcagtattacattcacaaatccgcgcatggcagacctaagcacatcgggaacgatatgtgggacgtggccatggaacgaagggacaagaagcttgtcgagcaagcctctccctccaattaacatcgttgttttgccaatgacattgtgaagaaaataaactgctcacctggatttacgactgtgttctagggaagcagggttaatcacaagaatcaaattccgtctgttttcttgtatgcaattcaacataagatttataaatatatctatgttcc

SEQ ID NO: 15097 - DNA, 399 bp, Glycine max
  unsure (1)..(399): unsure at all n locations
  Clone ID: LIB3040-023-Q1-E1-H2
gacaaacagacacacagtcggttcttccttctcaaatattcttgagatccccattttctccgaagcaaagccatggctaagggtcctggtctctactctgacatcggcaagaaagctagggatctgctgttcaaggactaccacagtgaccagaagttcaccatcaccacctactcaccgactggagtggctattacagcatcaggaaccaggaaaagtgaactgtttctggctgatgtcaacacccagttgaagaacanaaacatcactactgatatcaaagttgatacagattctaatctcttcacaactatcactgtcaatgaacctgctcctggtctgaaggctatttttagcttcaaagttcctgaccaaaggtctggaaaggtggaagttcag

SEQ ID NO: 15098 - DNA, 362 bp, Glycine max
  Clone ID: LIB3040-023-Q1-E1-H6
ggcagacgccgtgactagacactcatctcactcgcgccatcttagggtttctccttttgtttcgcaacatggttgccgctaagaaaactaagaagacccatgagagcatcaacaacaggctcgctcttgtcatgaagagtggcaaattcaccctcggttacaagaccgttctcaaatctcttaggaactccaaaggaaaattgattatcattgctaacaactgcccccctttgagaaagtcagagattgaatactatgctatgttggcaaaggttggagttcatcattacaatgggaacaatgtggatttggggactgcatgtggaaaatattacagagtgtgctgccttagcaatattgat

SEQ ID NO: 15099 - DNA, 388 bp, Glycine max
  Clone ID: LIB3040-023-Q1-E1-H7
acacttcaaaatcctctggtaacccttattttatctattctctctctttcttttgtgttctaagcagctagaagcaatggagaggaaaagatgccatgcctctttcaccatgtttgcaatgcttgttggagtgatctctcagagccttgtcattcctgtagtagtccaagtactccatcaacaccctcaggtggaaactgtggatcatcacctccacaacatcatgattcaacaacaccctcaactccatcaacaccaacaaaccctccctcaggtgatactatggaggtacccctcaacacctgtcactgtgagcccagcaactactccagttgaccctggaacccctagtattccctcatcatcacccattccttcaccatctccc

SEQ ID NO: 15100 - DNA, 217 bp, Glycine max
  Clone ID: LIB3040-023-Q1-E1-H9
ggagactgtagattctgggaatgattcttaaggagcaggtggagggtttggtgggtgttaatatttgacttgtgcattccacacgctgcttccgattgaaggcatctaaggagagaaaaatgcacgatttctgcttcacgattccctacggattgatgttagtgggtggtcgactgttcgcctaccactgccacacggatcatcgcttctctcgccc

SEQ ID NO: 15101 - DNA, 221 bp, Glycine max
  Clone ID: LIB3040-024-Q1-E1-A10
cggggttggtccctacattgccttctttgcttttctcgggctagcagtcgacgacgccgttttgacccggcgaccggcaaatggtggagccggtggagcttcgctgcgacgaccagctctcgcatctgtcagattcaagcaatggtgatccgtcgtggcggttgaacttccacgggtttcagccatcctccaaacaagcggaaaagcagttgaacccccct

SEQ ID NO: 15102 - DNA, 283 bp, Glycine max
  Clone ID: LIB3040-024-Q1-E1-A11
gagtgttagtgttcctcaagccatcgtaccgtgttgcctctctgcaatctacagccaaaatgcctttcaagaggtacgttgagatcgggagggttacccaaatcaactacggcacggaatatggcaggctcgtcgtcattgtcgacgtcattgatcagaacagagctcttgtcgatgcccctgatatggtgaggtcccaagtcaatttcaaaaggctttccctaaccgatattaagattgacattaatagggtccctaagaagaaagatcttgtcaaagccat

SEQ ID NO: 15103 - DNA, 176 bp, Glycine max
  Clone ID: LIB3040-024-Q1-E1-A2
gactcaccacttcaaaacactcataacacaaagcacaaagcaaagctcatccttgagttaaaaaatggcagcagcttcttccatggctctctcatccccatccttggctggcaaggccgtgaagctgggcccatcagccccagaagtgggaagggtgagcatgaggaagaccgtca

SEQ ID NO: 15104 - DNA, 275 bp, Glycine max
  Clone ID: LIB3040-024-Q1-E1-A4
gacacagactttattacagttgttgtattgtaattaagcaagaatattaggcaatggagtcttctggaacttcaactactcttgctctttttttaaccatcaatttgcttttctttgtcatggcaagtggctgcgacacttgcacagagcctaagccaaagcctatcccattccgttaccctaaccctagtgcgtgcgcgaagaggtgccccagggacggacttaagctcggaatgtgcgggaacgtgcttaatggaccaattggtgctattgta

SEQ ID NO: 15105 - DNA, 228 bp, Glycine max
  Clone ID: LIB3040-024-Q1-E1-A5
gggtcatagaatcttttggcaaaatgcaaaagtgctagcatgatttcgtgttcttccgctaatgtgtaaattttccgttggatttgcttgctataagtttaggagggaacttttgttttttctcctatgcactgttttcaggttttgccagagaacgctttcgtgcaaattttgagattgagcgattgaatgaaaatttgaatcaggcgctcggcccagtagttgcaa

SEQ ID NO: 15106 - DNA, 91 bp, Glycine max
  Clone ID: LIB3040-024-Q1-E1-A6
cttgaacatacgaacttgtataaattactgggaattggtaactacgttttttgagctgaaacttttactgaattttctagacatctggacc

SEQ ID NO: 15107 - DNA, 307 bp, Glycine max
  Clone ID: LIB3040-024-Q1-E1-A9
taatttgggaattattgctcccatcgccattggtttcattgtcggcgctaacattttgttgggtggggccttctctggagcggccatgaaccccgctgtgacatttgggcctgctgtcgtgagctggacctggaccaaccactggatctactgggccgggcctctcatcggtggtggaatcgctggccttgtttacgaagttgtctttatcagccacacccacgagcagcttcccaccactgactactacagggggggaaatgaaattaaatgcctgcacaccttacccttaaaaaaaaccgccgcc

SEQ ID NO: 15108 - DNA, 142 bp, Glycine max
  Clone ID: LIB3040-024-Q1-E1-B1
gattgccgtcacacagagagagaagagacaatgaagtttaacccaacggtttcctcaagccgtccaaagagccgcaaggctcacttcaccgctccgtcgagcgtgcgtcgcgtcctgatgagcccgcctctctcgaccgatc

SEQ ID NO: 15109 - DNA, 271 bp, Glycine max
  Clone ID: LIB3040-024-Q1-E1-B10
gggttattaaggagcatagggtgaagagggagaggggtgactgtgtgaaggatgaacgatctgaggattttgttgatgttctgcttgatttggacaatgaaaccatgctcagtgaagctgacatgattgctgttctttgggaaatgatattcaggggaactgacacggtagcaattctgctagagtggattctggctcgcatggttctccaccctgaactccaagcaacggcacacctcgaaatacacttcctttgcggatcctccaggct

SEQ ID NO: 15110 - DNA, 217 bp, Glycine max
  Clone ID: LIB3040-024-Q1-E1-B11
gctcttaaagaatctcagtgctgaagagaaactcataagcatggcggtttgctagtcagtgcttgacttccttgcttctggttgtagtgttcaacgtggctcaatggcagcctctggtccctgccctgttcatatttggggactctgtggttgatctgcgaaatgattcccacctatacaccgttgttgtcgcacacttcccacattttggacgaga

SEQ ID NO: 15111 - DNA, 334 bp, Glycine max
  Clone ID: LIB3040-024-Q1-E1-B12
gaaccaagtttgcttgcgtgtatattcattttagcatcaaggttgaatctcagagaaaaagaaacatcgacaagcatgtctggaagaggaaagggaggcaagggtctcggaaagggaggagccaaacgacaccgtaaggttctgagggataacattcagggaatcaccaagcccgcgattcgccgtctggccagacgtggtggcgtcaagcgtatcagtggtcttatctatgaagaaactcgcggtgttctcaagatctttctagagaacgtcattcgcgacgctgtcacctacactgaacacgctcgccgcaagaccgtcactgccatggacg

SEQ ID NO: 15112 - DNA, 243 bp, Glycine max
  Clone ID: LIB3040-024-Q1-E1-B2
gatccttcgtccagctagcaccacattcacctgaggcttccaaagcaatggcgtcccttgcagcatccactgctgctgcttcccttggcatgtcagaaatgcttggaaaccccatcaacttcagtggtgccacagggccagctccatctgcggtcagtcctgcctcctgcaagacggtggctcgtttctccaaacggaatgctacaccacgacctccaggaaaagctgctgctgctgctcctg

SEQ ID NO: 15113 - DNA, 369 bp, Glycine max
  Clone ID: LIB3040-024-Q1-E1-B5
gaatgaaacaaaatattactacttcccttacctttctctctctctcaaaacctcatttgtcgtcctcttcatcaacctctttcttctgcctcaccaaccaatttgttttctttttgcaatgctggtgcttggaagcatctctccattgaatgtgatagcttcaattctccaacatttgtagaaatagtttaacatcgacaagtgtgaagctctgatattaatttggtcagggcgatggtccagacagttatgttagtgttccatgcagcagtttgctcaccatagttacggttagatgtggacactgtgccaatttgctgacagttaacatgggagcatcacttcaaacttttccttctcaagacacta

SEQ ID NO: 15114 - DNA, 292 bp, Glycine max
  Clone ID: LIB3040-024-Q1-E1-B7
ggctagagtggattctggctcgcatggttctccaccctgaaatccaagcaaaggcacagcgcgaaatagacttcgtttgcggatcctccaggctcgtatccgaagcagacattccgaacctgcgctaccttcaggtgcatagtaaaagaaaccctccgtgtgcagccaccaggcccgctacgctcgtgggctcgccttgctgtgcacgacgttacggttggcggcaagcacgtgattcccaagggcaccaccgcgatggtgaacatgtgggccatagacccacgacgagagg

SEQ ID NO: 15115 - DNA, 73 bp, Glycine max
  Clone ID: LIB3040-024-Q1-E1-B8
aggggtgcttcgtctcagatcattctgcgcaagtgggacagagagaccgaagtgacctcagcggcgggtgcgg

SEQ ID NO: 15116 - DNA, 108 bp, Glycine max
  Clone ID: LIB3040-024-Q1-E1-B9
acccacgcatccaaccgctcgtaagtaacgatgcaaggggactacacacgggggctagagaagtgatgagggtctttgagtgccgcagtggacgccctcgacgatgca

SEQ ID NO: 15117 - DNA, 368 bp, Glycine max
  Clone ID: LIB3040-024-Q1-E1-C10
ggagttgagaggatcgtgagaggggcagtagccgagattccgtgagttgcaaaaatgaagacgattctttccatcgagaccatgaacatcccggacggcgtgagcatcaaagttcatgccaaggtcatcgaagttgagggcccccgcggaatattggtgcgagacttcaagcatttgaatctcgattttcagctcattactgacgaaaacggtaaaagaaagctgaaaatcgacgcgtggtttggttctcggaaaacatccgacgccattcgcaccgccttgagccacgtggagaatcttatcaccggcgtcaccaacggctaccgctacaaaatgaggttcgtttatgcccattttcccatcaacgc

SEQ ID NO: 15118 - DNA, 135 bp, Glycine max
  Clone ID: LIB3040-024-Q1-E1-C12
ggcagttcaattctaatctattcgattctctctgtgtatttccctatctctcccttcaagatgcatatcttcgtcaagaccggggcggcgataccatcatccttgaggtgggagggtctgacaccatcgacaacg

SEQ ID NO: 15119 - DNA, 216 bp, Glycine max
  Clone ID: LIB3040-024-Q1-E1-C2
gattccaattcaaacagaaaacctaatttctcaaagttgagttcgcaccaaattttcctcactaaaatgtctggtcgtggaaagggtggcaagggtttgggaaagggaggtgccaagaggcacaggaaggttctgcgcgataacattcaaggaatcacgaaacctgcgattcgtgagttagcgagaagaggtggggtgaaaaggatgagtggtttg

SEQ ID NO: 15120 - DNA, 152 bp, Glycine max
  Clone ID: LIB3040-024-Q1-E1-C5
gagagaaagagagagaacgatgtcgaagcgtggtcgtggtggttcggcggggaatgagttccgcatgtcgctgggtcttccagtggcggcgacagtgaactgcgcctacaacacggcggcgaagaagctgtagatcagttcggtgaaaggga

SEQ ID NO: 15121 - DNA, 285 bp, Glycine max
  Clone ID: LIB3040-024-Q1-E1-C7
ggagtaagaggctgccgtcaccgtcaccatcaccgttaccgttactgtcagcgtccgttatcctctccgaacccgtgaaaccctcgttccaccggtttcctctgttctcgaatcctcacactcttcgaaccatgaggctctccaagtgtgtctctcacgccggggccaaacccgaatccgaggcggaagcggaacccgattcacctcagactctcgttgtggtttcattcggcaagttcgcggatttccccgaccacgccctcttgcgatatcccttgaagcaac

SEQ ID NO: 15122 - DNA, 302 bp, Glycine max
  Clone ID: LIB3040-024-Q1-E1-C8
gctgaatcgtcgtttacttctcagcagcttcggctagggttcagaaacgaaaaagggttcggtgttctgttcgcgatgagagccaagtggaagaagaagcgtatgaggaggttgaagaggaagcgccgaaagatgagacagagatccaagtagtgcgttaaacctagtttgttgctgttgcttttacaattgcgtaggttgtcgaaggggacacccagttgttagtggcactggtttctccgttttgatgtgtgatacattttgttggattcaagtagtttacgttcgtcctaggttattag

SEQ ID NO: 15123 - DNA, 195 bp, Glycine max
  Clone ID: LIB3040-024-Q1-E1-C9
tgggagggttagattcgttgatgttgttctaaaacgtcgacacattctccgtcgccacaacagcaatggctccgaacaaaggtgtgaaacgttcggttgacagcacacaataagaacgttcacgaaaacgtgacgaatcctttgttcgagaagcgtccgaagcaattcgggatcggaggcgcactgccgtcgaat

SEQ ID NO: 15124 - DNA, 287 bp, Glycine max
  Clone ID: LIB3040-024-Q1-E1-D1
ggagcgaagaagatattagggtttttgagtgcggtgcggcgatcctagcactctcgtctgcagctttcgccgacagcttcattcagcatggctgagcaaaccgagaaggcttttttgaaacaaccaaaagtgtttctcagctcgaagaaaagtgggaagggaaagagacccggaaagggtgggaaccgcttttggaaatccgttgggcttggatttaagactcccagggaagccatcgaatgaacctacattgacaagaagtgccccttcactggcaaggtttccat

SEQ ID NO: 15125 - DNA, 313 bp, Glycine max
  Clone ID: LIB3040-024-Q1-E1-D10
gacttcatttcactcacccctttaactgccatccattctttctctcttgaggggcaggggtaccacttcaaaaaatatcctctttgatccctttctctgtttccttttctttatcattattatataataacaccctctaaatacttcctttacccctctttctctctctcatcttaaacacaaacaactatactactacttcaaactttgacatccaactgtgctgtacaactctatctcacccatcaccgcctacaaaggcacacgcactatcacgataccaaccccatctgccgacaagatccaactcact

SEQ ID NO: 15126 - DNA, 298 bp, Glycine max
  Clone ID: LIB3040-024-Q1-E1-D12
gaaatacaacctcacaacacactttgtacactccgtccctcttacctgtcgctcaaatggcttcactgacgcaaactttcatgtccctcgcctctcttcccaatccagtacccggtaccaggatatcccagccaagtgcacttgccctcgcaattaaggacggaagaagtttcccatccatgacattgcagcccagatgatgtcggtttcgatttagatctgtggcaaaaccacacacagtgaagaaggtgtgacacacagttcagacgcaattagcactaccagaggaatcatctgt

SEQ ID NO: 15127 - DNA, 150 bp, Glycine max
  Clone ID: LIB3040-024-Q1-E1-D3
gcttcttcagccatttagctccatagctgcagcattagggtttttcatctgcttcaatggggaagggaacagggagttttggtaagagaaggaacaagactcacactctctgtgtgaggtgtggccgccggagcttccatcgccagaaga

SEQ ID NO: 15128 - DNA, 126 bp, Glycine max
  Clone ID: LIB3040-024-Q1-E1-D5
ggctttcttctccaccatcatcgtgatcatgtcacatcacaaccaatccaccgactaggcttatttggtccaagacatcgctcatatcctgcatgctaccaacacacacagataatgccttccaca

SEQ ID NO: 15129 - DNA, 174 bp, Glycine max
  Clone ID: LIB3040-024-Q1-E1-D8
gagaataaggttaaataaattctcgtagcagcgttttgtttcccagggccggcttttgctctgcctctgtgcagacatgttgttcttctcgtacttcaaggatttggtggggagggaagtaatcgtggagctgaagaacgatttggccatcagaggagcattgcattctgttga

SEQ ID NO: 15130 - DNA, 333 bp, Glycine max
  Clone ID: LIB3040-024-Q1-E1-D9
ggtgacagtgaagagatggaaggcatagtacacaggacagttgaagtgaatggcataaaaatgcatgttgctgagaaaggtgaaggtcccgtggtcttgttcctccacggcttcccggagctctggtactcctggcgccaccagattctggctctcagcaacctcggctaccgcgccgtggctccagatctccgcggctacggagacaccgaggcaccagcttcaatcagcagctacaccatcctccacttagtttctgacatcgtcgcgctcattcactcacttgctgtggattaagtcttcctcgtagcccatgattggggggctgtcata

SEQ ID NO: 15131 - DNA, 306 bp, Glycine max
  Clone ID: LIB3040-022-Q1-E1-A10
gaaggcaacaaactgaaccagagccaatccttttcttctcccttgttttgaacaccctctgtggatacccttttgttaaagccaattgttttctcagatttgaggacaaggaggtggtgggggaggagataatacagggagaaaaacataatagagagaacaataaaagcacaaacgtgaggctcttgttgaaacacacaattagatataccagttgtcaatttgtcatatctgaaatttctcaagttgtgtttgtttgtcgtacaattgtaagttcagctgcatccttatattttggttcacata

SEQ ID NO: 15132 - DNA, 322 bp, Glycine max
  Clone ID: LIB3040-019-Q1-E1-G2
gactcaactttatccatagagcacaatttttttgcttcaacgggccttaccttacctgaagatggcttcagtgtcctttgccgtgggattattaccttgctcgtcttcatcctgctatacccgcgtctcttatggttcagttcgatttcccgtattgaacaacgccaactcactgaaactcagctcctcagctaagatctccagtccaattcttcaacaaaagctttgtactggtccgtctccccttgctcgagaggctcgccctctcaacattgtatccgctaagggctacaaaatgaaaacccacaaagcatctgcaaag

SEQ ID NO: 15133 - DNA, 260 bp, Glycine max
  Clone ID: LIB3040-019-Q1-E1-G4
gtgaatgctacagatgttaaaacatcacagaatgcgccagtttcccgaacgagttgatggtttagtatgcatttctcaagcaacgtgtcttcagttctaaaccagcatatggaataccagagtgaatggtatcaaataaattctaacgatcttttagctactactgagtttgaactaatgactccctccgtactataccagtactctaaccactgaattacgtaggtcatttatcaacacccccccccataagaaaaccc

SEQ ID NO: 15134 - DNA, 185 bp, Glycine max
  Clone ID: LIB3040-019-Q1-E1-G6
gactccctacgacaaacaacaacaacttctttttactttcatattctctcctctttcattaacgatctctacgaagttctttcactcaaacacacccttaatacacccttaattatatcgcattcgccttctcgtaccgttagaattagattgcacttattcctctctctccctctttttctgga

SEQ ID NO: 15135 - DNA, 402 bp, Glycine max
  Clone ID: LIB3040-019-Q1-E1-G7
gacctgatgcagatgcagcctatcatggcagcctactaccccaacaacgtcaccactgatcacattcaacagtacctggatgagaacaagtccttgatcctgaagattgttgaaagccagaattctggcaagctgagcgagtgtgcagagaaccaatcaaggctgcagagaaatctcatgtacctagctgcaatagctgattctcaaccccaaccatctccaatgcctggtcagtatccttctagtggacgtatgcagcagggagcacactacatgcaggctcagcaggctcagcagatgtcacaacaacagctaatggcttcgcgctcctcactcttgtactcgcaacagcctttctcagtgcttcaacagcagcaaggcatgcacagccaacttggcatg

SEQ ID NO: 15136 - DNA, 383 bp, Glycine max
  Clone ID: LIB3040-019-Q1-E1-G9
gaggattggatttaaaaaagaaaagacaaaaaccgcattgagtggggcctgccctaaaatggcccttacagagcttctctatcaagagctgctagttggtggttgaggagtaataggttccgcataagctacatttcgtgggggaggcacctatccagtacttccgaactcgtctttcatctacagacattgggtcgctaaagccaatagttcggtgtccgggcaacagccaagccactcatctttggttgcagcttcggcggaagcctatgctttcagttcagttccattccttggttctccggttgattgccctgcccgcgtcacaccttaaaaagctttggaacggcagtttcacttacttctcacggacattggacctt

SEQ ID NO: 15137 - DNA, 244 bp, Glycine max
  unsure (1)..(244): unsure at all n locations
  Clone ID: LIB3040-019-Q1-E1-H1
gaacanaaacttcctttgacagacgaaacgctgcgttgagagtagtggcgcccatattctgcactgaaccgaactctctgttcgttcgcgttgcgctctctccgaaggattcgtttcaattcgaaaactctctgaagtgttctgatggatgtggagtggtctgagtcacggtacgatggtacaaatgataagggggattccccggtgagggagcactatgacaatgatggggcggagaaatcta

SEQ ID NO: 15138 - DNA, 396 bp, Glycine max
  Clone ID: LIB3040-019-Q1-E1-H10
ggagatagagttatcgatccctttggggagataagaaaatgtggcttgtgcagctctcaaccccatttctgaacggccatggccatggctccagccttctctggaaacccagttcggcggtgactcagacccactgggccccgccgagtttgctgcctcaaatcaatgcgatgaagacgatgcagggaaaagtggtgtgctccacgaacgacaagactgtggcagtggacgtggtgcggctggcccctcacccacagtacaagaggcgcgtgaggaagaagaagaagtaccaggcccacgatcccgataaccaattcaatgtcggcgacatcgtccagctccagaagaccaggcccatcagcaagaccaaggcctttctcgcactccccgttccca

SEQ ID NO: 15139 - DNA, 299 bp, Glycine max
  Clone ID: LIB3040-019-Q1-E1-H11
gagtttggtataactttagccgaggtcaagaggagcactagctaagttcacaatttcaaaatggctatgggactaaagaagcatttgaaaaggctcaatgctcccaagcattggatgcttgacaaactgggtggtgcatttgcgcctaaaccctcatctggaccacacaaatcgagggagtgcctccccctcattcttagtctgcgaaaccggctgaagtatgctctgacataccgtgaagtcattgctattctgatgcagcgccatgttcctgttgatggcaaagtcaaggactgaca

SEQ ID NO: 15140 - DNA, 204 bp, Glycine max
  Clone ID: LIB3040-019-Q1-E1-H12
gagggcgaggaagccacatacagacacaatacagagtgagttgttgctccttcgccacaactctctgccaacatgggtatctccagagattctatgcacaagaggcgtgccactggtggcaagaagaaggcctggaggaaaaagagaaagtatgagcttggtcgccagcctgctaacactaagctgtcaagcaacaagacagtc

SEQ ID NO: 15141 - DNA, 292 bp, Glycine max
  Clone ID: LIB3040-019-Q1-E1-H3
gaacaattcaaaggaaaatcctccctaacaaaagccttccaaaaacgaaaaaaaaaggaagagcaattttcccccaccaaagaagaagaagcaaacaagggccgataaacttaccgatgaaaagatctccgagttcaaggaagccttcagcttgttcgacaaagacggcgatggtttgttctcgctctctctctctcaagttttgtgtatttgatttgatttgatttatgcgtttgtgggttttgtagatcggtgttccgtgtcgtgatagtggattaggaaaattagatga

SEQ ID NO: 15142 - DNA, 346 bp, Glycine max
  Clone ID: LIB3040-019-Q1-E1-H7
gacttcacacactctcctcactcgctcgacctagttagaactgtgctagggttttacgaaaccaccgaagttgcagaaagaagaagaaaaatggtggctgacaggagcaagaagccgaaggtctccgacaagggcgaaaacctcgatgaaatcgacggagaactcgtcctctccatcgagaagttgcaggagatccaagacgagcttgaaaagatcaacgaggaagccagtgacaaagttctggaaatagagcagaagtacaatgagatacggaagcccgtttatgataagcgcaatgatattatcaatgccattcctgatttccggttaactgcttttttgagtc

SEQ ID NO: 15143 - DNA, 415 bp, Glycine max
  Clone ID: LIB3040-019-Q1-E1-H9
gaagtcaccacaacacgaagttcattgcacagtgttagtttgagtagcagcatcaatggctccaattgcagtgggaaacgtgattccaggcggcagtttggcttacttggatgaacaagacaaacctcaaaccgtctccattcactctctcgccaccggtaagatagtcatcatctttggggttcccggtgccttcactcatacttgcagcttgaagcacgttcctggcttcattgacagagcagtagagctgaatgggaagggtgtggacggcataatctgtatcagtgtgcatgatccatttgtgatgaactcatgggccaacacattcgcagagaacaagcatgttaagttccttgctgatggtgcatccaaatacaccaatgcccttggtcatgagcttgacctcactgac

SEQ ID NO: 15144 - DNA, 366 bp, Glycine max
  unsure (1)..(366): unsure at all n locations
  Clone ID: LIB3040-020-Q1-E1-A10
aagccaaatggaagattcttcagctataatccagcaacaaagaagacaaccctgcttgcccaagacctctactttgccaatggggttgcagtttcagcagatcaacaatttgtggtcttctgtgaatctgtcttgatgagatgcaataaatatttcgtcctgggccctaaaacaggaaccatagagaagttctgtgacctgcctggcatgcctgataacattcattatgatggacaagggcactatttgattgcaatgttcacggccctttctcccgaattggaattggcatatagataccctttcattangaaggcttttgcaatgtttacaaagtatgtanggagtctatctatctcgaagaat

SEQ ID NO: 15145 - DNA, 373 bp, Glycine max
  Clone ID: LIB3040-020-Q1-E1-A11
gattctcacctttccatgcatatagcttagctagctccttcacctccttagtttcgaaagcatggcttccctggcggcttccaccgcggctatgtcagaaatccttggaaaccccgttaacctcagatgcgcaaccaggtctgctccatcaccaactacacctgccaccttcaagaccgtcgcacttttctccaagaagaagccagctccacctccaaagaaaaagcctgccgctgtatcccccgccaatgaggaactcgccaagtggtatggtcctgacagaaggatcttcttgcctgagggtctcttggaccgatctgagatccccgagtacttgaccggagaagtggctggagattatggttatgatccg

SEQ ID NO: 15146 - DNA, 335 bp, Glycine max
  Clone ID: LIB3040-020-Q1-E1-A2
ggcacaagtttgttgagatagctagaagcaataagatgaaaatgaaagtgcttgttttgtttgttgctacagttttggtagcatatgaatgccatggctcagactaccagaagttccctctccaaatgaaaactgggtttggtgggcaatacagcaatgaggtggcatgtgccagttggaggcttggcgtggaagcaaacaacgtagtcaagtggcaaactgttcctgcagcttgcggagagtacatagctgactacgttctaggagaccaatatagatcagattccaaaacagttaagcaacaagcttatttctatgctaaatccctcaaactc

SEQ ID NO: 15147 - DNA, 347 bp, Glycine max
  unsure (1)..(347): unsure at all n locations
  Clone ID: LIB3040-020-Q1-E1-A4
ggggttattggacacattcttcagcgactgcgtttttggatcggaacctcttctgcggcgtagcaatgggacactccaacgtttggaactctcacccaaaaaactacggtcctggttctcgcacttgccgtgtgtgtgggaatccacatggactgatcaggaagtatggccttatgtgctgcaggcagtgcttccgtagcaatgccaaggaaattggcttcatcaagtatcgctaaaagagcagttgtcaactacggaccaatattgtgttctggcactangatgttttgaggatgttatgtttgaagaaacttgagactttcttttttcatctaattaattatcag

SEQ ID NO: 15148 - DNA, 195 bp, Glycine max
  Clone ID: LIB3040-020-Q1-E1-A6
catattccatgattgtgtcatgcatctcttcatggcatcgtgatgggcatatcattcctgcatttatcatattcatggattgcattttgcatgagtaattgcattatcatgcatcttcattcaacatgctttttgttctacaaactgcataccttttcatgttcactcatgcatagtccttgcattttcctctac

SEQ ID NO: 15149 - DNA, 395 bp, Glycine max
  Clone ID: LIB3040-020-Q1-E1-A8
gacttttctcagctgctgttcctgcgcgtgaacaagcctcaggtaagccaaagccatggttaagcataacaatgttatccccaacggacacttccgtaagcactggcagaactatgtgaagacctggttcaatcagccagcacggaagacaagaagacggttggctcgtcagaagaaagctgtgaagattttccccagacctacagctggacctcttagacccattgtacatggtcaaactttgaaatacaacatgaaagtgagagctggaaggggattttcccttgaagaactcaaggcagcagggattcccaaaaagcttgcaccaacaattggtattgctgttgatcatcgccgcaagaaccgttctttggaaagtctgcaagctaatgtgc

SEQ ID NO: 15150 - DNA, 323 bp, Glycine max
  Clone ID: LIB3040-020-Q1-E1-A9
ggcctgcaagtgtgagtgatatttgagcttaaaccctagccgctcttctcttcattcttcactttggaaacaatcataatggcgttctgtaataaggttggaaatgtcttgaggcagggtgctgctcgcagcacacatgcccctgttgcgtccatgcttaattacatccgctgcatgtcttcaagcaagcttttcattggaggcctttcatatggagttgatgaccagtctcttaaggatgcattttctggctttggagatgtggttgatgcaaaagttataactgatagagacagtggaagatcaaagggatttggatttgt

SEQ ID NO: 15151 - DNA, 346 bp, Glycine max
  Clone ID: LIB3040-020-Q1-E1-B1
gacttgagacacaaactcacacactttgtactctccgtccttccttcttcgatccagatctctctccttctccctcaaatggcttcccttctgcaatgttccatgcccctcgtctctctttccaatcgagctctggtacccggtaccaggatctccaacccaagttcagtttccctttcaattaagggaagaagtttcccatccgttacattgcagcccagagggcgtcggtttcagcttagatgtgcggcaaaaccagagacagtgaagaacgtgtgtgacatagtcaagaagcaattggcactgccagatgaatcagctgttactggagagtctaaatttgctg

SEQ ID NO: 15152 - DNA, 373 bp, Glycine max
  Clone ID: LIB3040-020-Q1-E1-B11
gaatgcaaacccacccaccattttgtgcttctttctgtgtgcaagaaaggtaaaagctttcacacaccaagaaaagtagccatggctgcttgctcaagaacttctcttttgctccttttctttctctttggattctccgcagctaaggaactattggttggaggcaaaatagatgcttggaagattccatcttctgaatcagattccctcaatcaatgggctgaaaggtctcgtttcagagtcggcgatcatcttgtgtggaaatatgagaatgggaaggactcagtgttggaagtaacaagggaagattatgccaattgcagcacatccaagcccatcaaagagtacaatgatggaaacacaaaggtgaagc

SEQ ID NO: 15153 - DNA, 375 bp, Glycine max
  Clone ID: LIB3040-020-Q1-E1-B2
gacaacacaacgcaacacaacgcgcactctctcttttctctcttaacacaaaaaccctatcgttcttcgcggtttcgccgattctcgccatgccgaaagccaaatccgacgccaaagccgccgatagccggttgaagcgcaagggcgctggtgctggaaggaagcaatcgaagaaagctgctaaggatcctaacaagccaaagagacctccaagcgctttcttcgttttcatgtccgagttcagagagcagtttaagaaggagcattctaacaacaaatccgtcgttgttgtcggtaaagctggtggtgacaaatggaaatcgctgtctgatgctgaaaagggccccttcgttgccacggccgaaaagaagaaac

SEQ ID NO: 15154 - DNA, 400 bp, Glycine max
  Clone ID: LIB3040-020-Q1-E1-B3
agagtccggaaaccctaacaacacaggcgcagacgcaaacgcaaacgcaaacgcaaacgcaaacgcagagcgtgatccattgacgaagatggtgcagcgtctcacctaacgcaagcggcacagctatgccaccaagtccaaccaacacagggtcgtcaaaacccctggtgggaagctcgtttatcagacgaccaagaagagggccagcggacccaagtgccccgtcactggcaagaggattcacgcgattccacacttgaggcctgcagagtacaagaggtcaaggttacccagaacacgtaggactgtcaaccgtgcatatggtggagttttatctggaagtgccgtcacggagacgattatccgagccgtcttagttgaagagcaaaagattgtgaag

SEQ ID NO: 15155 - DNA, 393 bp, Glycine max
  Clone ID: LIB3040-020-Q1-E1-B4
ggggaaaatttgtcaaataaattcatctaaccccaaacaaaaccctagcacacttttatcgcttagtggcagcagcagtggcggcaagcaactccatccgcaatgggaatcgatttgaaggcaggaggtaagtccaagaagaccaagcgaaccgcccccaaatccgatgatatctacctcaagcttctcgtcaagctgtaccgttttcttgttcggaggactgggagtaacttcaatgctgttgtcctcaagcgccttttcatgagcaaggtcaacaagcgcccgctatccctctctagattgatccgttacacgaagggaaaggaggataagatagctgtggttgttggtgccgtgaccgatgacattaaggtttatgaagtccctgctctg

SEQ ID NO: 15156 - DNA, 386 bp, Glycine max
  Clone ID: LIB3040-020-Q1-E1-B5
gacggctttcaccattattttcctttctctctcactcgaaacaaaacaaaacaacacaaccggaaaaccaaaccacctctccctgctcccgccgctgttttccgccgctgtcgccgtcgttcccacctcaccgtggcggcgcgcgcgtctccgatgggaaagtacatgaagaaagcgaagccgaaaggagaactcgcgctcgtcgaatccaccaccagcaacaccaccacctcctacatgggggtccgaacccgcgccaaaaccctagcgcttcagaaatcgcacgcgcagcagcacgagctcgccgccacctccgactcctacctccagctccggagccgtcgcctccagaagcctccgattttggtccactctccgaagcgccc

SEQ ID NO: 15157 - DNA, 395 bp, Glycine max
  Clone ID: LIB3040-020-Q1-E1-B6
gcgaacttctcacgttcatttctacacatccctagctctgtcgttccgtcgttgacgatggcgtttcgggtgcgaagccctgacctccgctctctctttcttctctctctcttgtccatcgcttccgccaatgtcttcttcgaagagcgtttcgatgacgggtgggaaaatcgatgggttaaatcagattggaaaaaagatgagaacgtggctggggagtggaaccacacctctggtcaatggaatggagacgctaatgacaaaggtattcaaaccagtgaggattacagattctatgctatttcagctgagtaccctgaattcagcaacaagggtaagacactagtctttcaattttctgttaagcacgaacagaagcttgactgtggtggtgg

SEQ ID NO: 15158 - DNA, 187 bp, Glycine max
  Clone ID: LIB3040-020-Q1-E1-B7
gaggatatccctcttgaaaagtgagtaggttttaaatttaagcagcagcagtcgtcgtgcatgttgtattaagtagaggctagaaggcagggagacgtacacagaactctcactgtgggaaaatattttatatccgttgggttaaacaaaaaataaataaaaatggatcaattaatttagtcccctg

SEQ ID NO: 15159 - DNA, 403 bp, Glycine max
  Clone ID: LIB3040-020-Q1-E1-B9
ggttgacaaaggaaacgtgtagtacgagggccaatttccaaaaaccttttgtctcgcaacctcacctcttcctccttcaatctctttcggaatttcccaaaatccttagtgggaggaagagatggttctgactcagaagattcacgaagctttcaaaggcaccgtcgagaggatcactggcccccgaaccgtttccgccttcaaagaaaaaggagttctcagtgtctccgagttcgtcaccgccggcgataatctcgttgccaaatgccccacctggtcctgggaatcgggtgatccaggcaagaggaagccatacttgccacctgagaaacagttcttgattactagaaatgtgccttgtcttcggagagctgcatctgttgaagaagaatatgaagctgct

SEQ ID NO: 15160 - DNA, 353 bp, Glycine max
  Clone ID: LIB3040-020-Q1-E1-C1
agggaaccacacaccacatcggagcaattaaggtccgtagattccgttaacctcctcccaaatttcacatttgcgggtccaatccccgtttccgaacgctcgaaaaggtggaatggcatccccgaccgaagttatcgacgtcgacgccgaaaacgctcctactcctactccacctcctcttcctccaccgcaagatccgaaatcgaatcgcgccaagaccatcatgcggaagcggaagaaggttccctcgttgctgcaaaacctaaagagctacgaggagaagcaagcgcacatcgaaaccctcgagaaggagctcgacgcgctgttccgctactaccaagaagccatggctc

SEQ ID NO: 15161 - DNA, 376 bp, Glycine max
  unsure (1)..(376): unsure at all n locations
  Clone ID: LIB3040-020-Q1-E1-C10
gtccgccatttttcgtagctgctgttcttgcgcgtgaacaagcctcaggtaagccaaaaccatggttaagcataacaatgttatcccaaacggacacttccgtaagcactggcagaactatgtgaagacttggttcaatcagccagcacggaagacaaggagacgattggctcgtcagaagaaagctgtgaagatattccccagacctacggctggacctctcaggcccattgtacatggtcaaactttgaaatacaacatgaaagtgagaggtggaaggggattttctcttgaagaactcaaggcagcanggattcccaaaaagcttgcaccaaccataggtattgctgttgatcatcgtcccaagaaccgttct

SEQ ID NO: 15162 - DNA, 393 bp, Glycine max
  Clone ID: LIB3040-020-Q1-E1-C12
gacagcacagcactctttgcaacacaacaaaaaaagacaacacagagagaagcgtcttaataaacgctcttctctgaaaaacctgatttcttctcttcttctcttctctttcgtttcgatcttcgatctctgaaaatgagagagtgcatttcaatccacatcggtcaggccggtattcaggtcggaaacgcctgctgggagctctactgcctcgaacacggcattcagcctgatgggcagatgccaagtgataagactgttggtggaggtgatgatgctttcaacaccttcttcagtgaaactggggctggaaagcacgtgcctcgtgcgatttttgtagatctcgagcctactgtgattgatgaagttaggactgggacataccggcaacta

SEQ ID NO: 15163 - DNA, 386 bp, Glycine max
  Clone ID: LIB3040-020-Q1-E1-C3
gttcccaattcatcgttgtctccgccttcttttatctctctctccactcccatatcgaaacaaagtcgttttgagttccgccgaaggcaccgtacgttgcagcagctatggatttggcatccaatctcggtggcaagattgacaaagccgaagttctctctgccgttcagaagtatgagaagtatcatgtttgctatggaggtcaagaggaagagagaaaagctaattataccgatatggttaataaatactatgatcttgttaccagcttttatgagtttggctggggggaatctttccattttgcacccagatggaaaggagaatctcttcgagagagcatcagaagacatgaacacttccttgcttcacaacgtggactgaag

SEQ ID NO: 15164 - DNA, 377 bp, Glycine max
  unsure (1)..(377): unsure at all n locations
  Clone ID: LIB3040-020-Q1-E1-C4
aggcgtcagacagctgcaaaaagagtacagaatgggactcagaacttcaatccctctattgctttatcaaattccattttccaattcaaaagcctaaatccgttcgaagcaccaaatcgtgatggaacaataggcagataagaagccagtatagatgaaaccagtggaagagaagaaatccacggtgggatacaaagctccggcagataacaagtcagctgccggagacaagcttccgagagaaggacgcgcctgccgagaatgtatgaagaagaagagagataatatgagcatcgagacatactatatctacatcggaaacgttcagaatcacgttcaccctgacattggtatctcatgcanagacatgggaatca

SEQ ID NO: 15165 - DNA, 385 bp, Glycine max
  Clone ID: LIB3040-020-Q1-E1-C6
gagagtggcactccactgttactaaataaaggtttcaactttgaggataaacctcaccagttccctggttgaaacgaagcgaaatttccacctgcatcatcttcaaacctgcgcttcttttgaaccgatttgtgctgttttgttagtgaagcacatcgagtgcaaactgtcgaacaggcatggcaagcctgttgacaacatcagccatcacctattctcctctcaacaatggttccaaggatttcagaaagtcagggaattcttctaaaggaaggtgttgcataaaagcaatggggatagagaaatccttggaggaattgtacaatgtgaaggtggaaagaaaagtgtctcctgagaaactagctgagcttggagtttcaaaatg

SEQ ID NO: 15166 - DNA, 383 bp, Glycine max
  Clone ID: LIB3040-020-Q1-E1-C8
ggaacctgatcgatctctttaccagttgccacactacaccgagattccccctaaacccgtttgcgttgttgtttgcgaagaaatggcgactaagaggagcgtgggaacgttgaaggagggtgatttgaaagggaagagggtgttcgtgagggtcgatctgaacgtgcctttggatgacaaccttaacatcaccgatgacactagagtccgtgctgctgttcccaccatcaagtacttaactggtcatggagccaaagtgatcctttctagccacttgggacgtcctaaaggtgtaacacctaaatacagtttgaagcctcttgtgccaaggctgtctcaacttctcggaattgaggttacgatggcaaatgactctattgggg

SEQ ID NO: 15167 - DNA, 392 bp, Glycine max
  unsure (1)..(392): unsure at all n locations
  Clone ID: LIB3040-020-Q1-E1-D1
gatacctaaaaattgtaccgatatggcttcacttgtgtgtccccctttttccttgcaattcaagggtaacaagtcaaggtccttaacaacaaataatgaaatgtttacaaaagaatctcccaagtctccaaccaaaaaacccgtggaaaaactcaaccaactccacttttaattccaaaacaacaaaatgggggaacaaccgactgctatgaaaaatgttgaacctcctaaaggcgtcatttctggttttgggactatttacatgatggatgaccctctaaccgaanggacaagtccaacttcaaagcttgttggaagatgtcagggaatatatgctgaggcttcgcaacatgaacctgcgatactcatggtaacgaatttgttcttcactg

SEQ ID NO: 15168 - DNA, 395 bp, Glycine max
  Clone ID: LIB3040-020-Q1-E1-D10
gatcatggcatctgctagggttttcggagcgatcgccgggagagcgttcatggccgcggcgtcgaagagttcggccaagaagaaacccgttccgtccggcggagccgctgcaaaagccgccgtgaaaaagccggccgcgcctaggaccaccaactccggcatacagaaggtggttccggtgtcttccgagctcggagacttcctcggcgctcctcaagtgtcgcgaaccgacgccgtcaagaaagtctgggcctacatcaagctgcagaatcttcagaatccagcaaataagaaggagatcttttgtgatgaaaagctgaagaccatttttgaggggaaagataaggttgggttcacagagattgctaaattgctgtctagccattttgtgaaat

SEQ ID NO: 15169 - DNA, 383 bp, Glycine max
  Clone ID: LIB3040-020-Q1-E1-D11
gacaacttcaatccctcttttgctttaccaaattccattttccaattcaaaaccctaactccgttcgaagcaccaaatcgtgatggcaccaaaggcagagaagaagccagcagagaagaagcctgtggaggagaagaaatcgacggtgggagacaaggctccggcggagaagaagccaaaggccggaaagaagcttccgaaggagggaggcgccggcggagaaggtaagaagaagaagagaaacaagaagagcgtggagacatacaagatctacatcttcaaggttctgaagcaggttcaccctgacattggtatctcaagcaaggccatgggaatcatgaacagcttcatcaacgacatcttcgagaagcttgcccaggaat

SEQ ID NO: 15170 - DNA, 399 bp, Glycine max
  Clone ID: LIB3040-020-Q1-E1-D12
ggcctctgacccaggtatggcttcgagacgcatcctgaaggagctcaaggatttgcagaaggatcctcctacgtcatgcagcgcaggtcctgtggctgaagacatgtttcactggcaagccacaatcatgggacctgctgatagcccatatgcaggtggtgttttcttagtttcaattcattttcctcctgactatcccttcaagccaccaaaggttgcttttcggactaaggtgttccacccaaacatcaacagcaatggcagtatatgtcttgacattctcaaggaacaatggagcccagctctaaccatttccaaggtccttttgtcaatttgctcattgttgacggatcccaaccctgatgaatcacttgtacctgagattgcacacatgtacaa

SEQ ID NO: 15171 - DNA, 185 bp, Glycine max
  Clone ID: LIB3040-020-Q1-E1-D2
tctatactgagactggtatcaccattaaagacaagttaagcatgtgtagcatcctcatggaccacttctgtaaccatggccatgatatcatctatagtacccgttatatcattatcaccagtatgacgtcaaaggaaattcagaccgcggtcaagcttgtaccggccgctcaattggatacacac

SEQ ID NO: 15172 - DNA, 371 bp, Glycine max
  Clone ID: LIB3040-020-Q1-E1-D3
tggtaccgctgccaaaaaaacacagaaggggaactcaaccaattgccgtaaaaaagacaatcaaatttcaccttcagcctaaccggttttaggtttcagtttttgaaccaacccttgacgtaacaaaacctaagtttcggatcaagtctgaccaatctggttggtagaacctttggacttacagagtcaagttttatgtctgaattagacgataaattcctactgccttcgatacttttgctgatgcaaatgctgatgactcgggtgctgggtcaaaggagtatgtgcacattcgcgtacagcagcgaaatggaacgaaaatcctgacaaccgttcaaggattgacaaaagaattcagctataacaagata

SEQ ID NO: 15173 - DNA, 367 bp, Glycine max
  unsure (1)..(367): unsure at all n locations
  Clone ID: LIB3040-020-Q1-E1-D4
gactgccgcgaaaacagaacagggactcactctggcagcggcactctcggtggctataatctttctgtggtgagttgtcaagatgtacacatcaaggaagaaaatccacaaggataaggatgctgagccaactgaatttgaggaatcagtcggacaggcattgtttgatctggaaaatgccaacaatgagctgaaaagtgatctgaaagatttatacataaactcagctgtccaaattgatgtttctgggaacncgcaagctgtggttatccatgtcccctacagattaaggaaaggattccggaagattcatgtcaggcttgtgagagaacttgagaaaaagtttagtggaaaggatgtaatcctg

SEQ ID NO: 15174 - DNA, 391 bp, Glycine max; identical to SEQ ID NO: 12496
  Clone ID: LIB3040-020-Q1-E1-D5

SEQ ID NO: 15175 - DNA, 144 bp, Glycine max
  Clone ID: LIB3040-020-Q1-E1-D6
gttcctgagtatcgatatggcatcttaattctaccacattctaccttggtggtttgttgaacttggactatgatggttgatttagcttgacccgtgcacttactaatataatcactgttagtaggtgacggcgatttttgtttg

SEQ ID NO: 15176 - DNA, 389 bp, Glycine max
  unsure (1)..(389): unsure at all n locations
  Clone ID: LIB3040-020-Q1-E1-D7
gaagcctcagtctcaacacagaagcagaaggaggagaagcagaaagaggagacgaagcaatggcgccgaagaagccccgaaccacgtcgaggaaccctgatttggtcaggggaattggcaaatattcgaggtcgcagatgtaccacaagaggggcatctgggccatcaaggccaaaaacggcggtgttttgcccctccacgatcccaagcccaaacccgaggccccggcccagaagccgcccaagttctacccggccgatgacgtgaagaagcccctcgtcaacaagcacaagcccaagcccgcgaaactcagggctagcattactccagggactgttctgatcctgcttgctgggaggttcaagggaaaganggttgttttcttgaag

SEQ ID NO: 15177 - DNA, 376 bp, Glycine max
  unsure (1)..(376): unsure at all n locations
  Clone ID: LIB3040-020-Q1-E1-D8
tcacaatgaggatacaaaagctccctcttctgatttaaagttgaggaaaattgctggcagaatcgaaccataaaatcttagccatcactgagtgatctcttttccccagttatcttttgcctctttctgatttttcgatccctaaatttcactttattttttttcttagtctaattatatttgtgaatgtgtttttagttgtgttctatttgaatgtgttgaggtcagtgatgaattcaatttgcctacattggctgagtatctggtttttattagattatgatgtgtcncaacagtctgaggcctctgagtctgtgtattccattttgtaatacanaaatgtaattttaattttgtatcgcgtaggattgaatct

SEQ ID NO: 15178 - DNA, 380 bp, Glycine max
  Clone ID: LIB3040-020-Q1-E1-D9
atgacagtgagtgagagaaagagatcatatatcagaatggcttccactcaatgtttcttgcaccaccatgctcttaccacccctgccagatccccatcagaccgcatcatggttagcaccaatcctaaccagcttgtttgcaaagcacagaagcacgaggatattgatgtcagcccaatctctcgccggttagctctaactgtgctcattggtgctgctgctgttagctccaaagtccaacctgctgatgcagcttatggggaagctgccactgtgtttggaaagccaaacacagacacagatttcctgccatgacaaggatatcgattcaaactattgattccctcaaagtggaacccaagcaaagacgtttagtacac

SEQ ID NO: 15179 - DNA, 401 bp, Glycine max
  Clone ID: LIB3040-020-Q1-E1-E1
gtattaaactttgaaataaataaataaataaacgggaattaagcttcccttttaataaaaaaattacacagaaaagtatgaaatgactaattaatttttggccaaactaaatgtatccttcaccgaaaataatcttggtcaagccaaactattatgaatagcaaatacaaagtcattgtttaatttaaaaactgtgacacaatgaaatagtcgaatttgattgagtcaagcatggtgatacagattgcaaaaggccatagtcaagctcagcaacaagtgtggccttgtattcaacaattgtacagtagcttcaagtttgaacacttcactatgactgcgagtgagacagaacaattcattcaaatacaacaacaatgattcacattacaaccacaaccatg

SEQ ID NO: 15180 - DNA, 374 bp, Glycine max
  Clone ID: LIB3040-020-Q1-E1-E10
ttttcatcaaagggtaagccaccaagatcttttgttactaccatctccagttctggattgtttgtgagccaaaagcttgggaaatcaaatgctccgcggtctcaacatcaacccaaatgtgtaaagcctttgcaaactgttccagatgatgactctcctgtcacctgcatcaaaacttcttctcccaacggcaagaggatctcctctcctaattgtgacgtgggatcatcacctactactcgcagaggtgggaggaagttgatattacaatctatctcttcatttccttctctcaaccctcaccattagaatgaagatcttcatcttcggcttaagttagcctacccccaaccctcttcccttggttcacgttt

SEQ ID NO: 15181 - DNA, 392 bp, Glycine max
  Clone ID: LIB3040-020-Q1-E1-E11
gatgtcatagtattatcattcattctcatctttctctcttctctctccacccaaaccctaactcccgaccctgttcccctctcgtatccgtcatgaaaggaggaaagtccaagaccgaatctaagagagccgatcccaaacttgctgtgaataagaagggagccgccaccaaggctaggaaacccgccggcaaggggaaggcagcgaaagatcctaacaagccaaagaggcctccaagtgctttcttcgttttcatggaggagttcaggaaggtattcaacaaagaacatcctgaaaacaaagcagtgtctgctgtgggcaaagctgctggagcaaaatggaagaccatgtctgatgctgacaaagcaccttatgtggcaaagtctgagaaa

SEQ ID NO: 15182 - DNA, 384 bp, Glycine max
  unsure (1)..(384): unsure at all n locations
  Clone ID: LIB3040-020-Q1-E1-E12
gatgccgaaaagtagtaccaagatggcttcagttgtgtatctcctctttggcttccatctcattgttatcatgtcaagttccttacccgcaactagtgaagtgtttgcaaaacagtatccatccacagaacccgtggaagaaaaactcacccaactccacttctatttccataacaacataacgggggaacacccaactgctatgaaaactgttttgcctcctaaggggtccattcatggttttggggctacttacatgatggatgaccctctaactgaaggaccaagtccaacttcaaagcttgtgggaagatctcaaggaatatacgctttggcttcacaacatgagcctgngttgctcatggtgacaaattttctcttcac

SEQ ID NO: 15183 - DNA, 387 bp, Glycine max
  Clone ID: LIB3040-020-Q1-E1-E2
gatgtacagaaaggaggatgagacgacgtatgaggataagaaaaactagacaagcttatggtaaaaatgaagacaacgaggactggatcagtgagagagaagttgatggtgaaactgaggacgatggggacatgatcagtgagaggaaaagaaacattagagaagttgatgctgatgttcaagatagggtcataaaatatgctctgttgcacaatgtccagaagttgaaaatgaatataaattcaacaacctatagacccaattttaagtccctccctttaatctttcgcagtcagtctttgacatctcttgagctttccaataagttgagcccttctaggttaaaacttccaaaatctctatgcttgcctgcattgaaaagcttgc

SEQ ID NO: 15184 - DNA, 395 bp, Glycine max
  Clone ID: LIB3040-020-Q1-E1-E4
ggagcagcagaatcttcaggccaagccaggtaagcaagcacaacacaaccccgaaatggcttctgcttctgttcccatggctttctcgctgagctctgttatcaacaacaacaagccttcatccgaagccttcttcaggccactacccctacggcaaccaaagaggaccctcttcaccacaaaggcagtgtcaaactccaaggctcaaatcaatgcatctttgaaggagaaggcagttgcaggactcacagcagcttctgtgacagcatctatggtggttccggaggtggctcatgctgctggatatgagttctccccttccctcaagaactttctgctaagcatctttgctggtgggtttgttctagtagccatatttggagccgttattgggg

SEQ ID NO: 15185 - DNA, 369 bp, Glycine max
  Clone ID: LIB3040-020-Q1-E1-E5
aaagagacccggaaagggtgggaaccgcttttggaaatccattgggcttggatttaagactcccagggaagccatcgaaggaacctacattgacaagaagtgccccttcactggcaatgtttccatccgtggccgtatcttggctggaacatgacacagtgctaagatgaacaggactattattgttaggaggaattatctccattttatcaagaagtaccagaggtacgagaaaaggcactccaacattcctgctcatatatcacctgctttccgtgtgaaggaaggagatcacgttattattggtcaatgcaggccactttctaagactgtgaggttcaatgtgttgaaagtgatcccagctggatc

SEQ ID NO: 15186 - DNA, 65 bp, Glycine max
  Clone ID: LIB3040-020-Q1-E1-E6
ggttctcgagtgtttgaaccccccttccttttctgctttgaattaaagattcgtgttttatatgt

SEQ ID NO: 15187 - DNA, 397 bp, Glycine max
  Clone ID: LIB3040-020-Q1-E1-E9
tattttagggaggaatttatttcattgctacaaatatggattatttaaaagaataagacatgtatttggatatttcccttcaacttaacaaaaattgaatttttttccatacacgcacgaatagttgaagggaactctccgaagaaaaaatggattatgggagtaacaaaaaaacctgacttgaatgatcctgtattaagagctaaattggctaagggaatgggtcataattattatggagaacctacatggcccaacgatcttttatatatttttccagtagtaattctaggtactattgcctgtaacgtaggcttagcggttctagaaccatccatgattggggaacccgcggatccatttgcaactcctttggaaatattacccgaatggtatt

SEQ ID NO: 15188 - DNA, 249 bp, Glycine max
  Clone ID: LIB3040-020-Q1-E1-F1
gagtctaaggttacgccgtcgtcgctgtttgtgtgtgtatcaagtgcaactaccaacgatggtgaaaggtcctcaaagagaacgcgtcagactctacgtgaggggtacaatccttggatacaaaaagtccaaatccaaccaatacccaaacacatccctgattcaaattgaaggagtgaacaccaaagaagaagtaagatggtatgcttgcaaaaaaattggctaaatctacaaagctaaagtgaaaaa

SEQ ID NO: 15189 - DNA, 386 bp, Glycine max
  unsure (1)..(386): unsure at all n locations
  Clone ID: LIB3040-020-Q1-E1-F10
ggccgaatgtgtctctccgcagcagccacacttcttcgccgtttcagctgaagagccatccgcaggtaagcaatggttaagcataataatgttatccccaatgggcacttccggaaacactggcaaaactatgtgaagacttggtttaatcaaccagcccgaaagaccagaagacggttggctcggcagaagaaggctgtcaagattttccccaggcctactgctggatctctcaggcctattgttcatggccagactctgaaatacaacatgaaagtcagagccgggagaggattttcactggaagaattgaaggctgcangaattcccaagaaacttgctccaactattgggatttctgttgatcaccgcagaaagaatcgttc

SEQ ID NO: 15190 - DNA, 380 bp, Glycine max
  Clone ID: LIB3040-020-Q1-E1-F11
ggcactcattctttcattctcattgccgtcacagagagagacaagaaacaatgaagtttaaccctagggtttcctcaagccgtcgcaagagccgcaaggctcacttcaccgctccgtcgagcgtgcgccgcgtcctgatgagcgcgcctctctccaccgatctccggtcaaagtacaacgtgcggtccattccggttcgcaaggacgacgaggttcaggtcgtgaggggaacctacaagggccgcgagggcaaagtggtccaggtctatcgccgcaagtgggtcatccacatcgagcgcaccacccgcgagaaggttaacggctccaccgttaacgttggtattcacccttccaatgttgtcgtcaccaagctccgaatg

SEQ ID NO: 15191 - DNA, 391 bp, Glycine max
  Clone ID: LIB3040-020-Q1-E1-F2
gatacctaaaaattgtaccgatatggcttcacttgtgtgtctccttttttccttgcatttcatggttatcatgtcaggttccttaccagcaaatagtgaagtgtttacaaaagagtctcctatgtctctatccacaaaacccgtggaaagactcacccaactccacttttatttccataacaacaaaatgggggaacacccgactgctatgaaaattgttgagcctcctaaggcgtccatttctggttttgggactatttacatgatggatgaccctctaaccgaaggaccaagtccaacttcaaagcttgttggaagatgtcagggaatatatgctgaggcttcgcaacatgaacctgcgatactcatggtaacgaatttgttcttcact

SEQ ID NO: 15192 - DNA, 372 bp, Glycine max
  Clone ID: LIB3040-020-Q1-E1-F3
gacagcgaaacaaagagtgatttcaatgaatgattgggggtcacttgatctcaacaaaatcctcaaggtcaattgaagaagatgccgattagaaacatcgccgtccggaagctgaagaaggactcacccgacacgttgaaagcggctttggctgagttcaacccaaacttcatcttcgtgctcgccggctcaagctccggcatcgcctacaacaagctcaccgacaacggcgctgccacccctgccggcctcatctccgcctccatcgcccatgcattcgccctcttcgtcgccgtctccgtcggcgccaacatctccggcggccacgtcaaccccgccgtcaccttcggcgccttcgtcggcggcaacatc

SEQ ID NO: 15193 - DNA, 158 bp, Glycine max
  Clone ID: LIB3040-020-Q1-E1-F4
acctccgatctaattacgttataagaaataagttctagtgtaaaattcactacatcatgtttcttatatattgaacgatatatagtattttaaaatgttaatgacaatttacatactttctaaaataatcccttaccttagcaagtaatcaatgtgtg

SEQ ID NO: 15194 - DNA, 398 bp, Glycine max
  Clone ID: LIB3040-020-Q1-E1-F5
ggaatcacagtggtgccttatcgctgtggttatcatcttcttcttcctctttcttagatctcttctttctctacgccgcacgccgaaaccatggccggaaaaggagagggtcctgctatcggaatcgatctcggaaccacctactcttgcgtcggtgtgtggcaacatgaccgcgttgaaatcatcgccaacgaccaagggaacagaaccacgccgtcttacgtcggattcactgacaccgagcgtctcatcggtgatgcggccaagaatcaagtcgccatgaaccccatcaacaacgtcttcgatgccaagaggttgattggtcgtagattcagtgattcctctgttcagagtgatatcaaatttgtggctttcaaagtcgttcctggtgctgctga

SEQ ID NO: 15195 - DNA, 381 bp, Glycine max
  unsure (1)..(381): unsure at all n locations
  Clone ID: LIB3040-020-Q1-E1-F6
ggtacgcagcttcatccctaacgcgtgcatagcagagtcagagacagagacgcagccatggggcggagacctgcgaggtgttataggcaaattaagaacaagccataccccaagtcacgtttctgccgtggtgttcctgatcccaagatcaggatttatgatgttggtatgaagaagaagggtgttgatgagtttcctttctgtgtccatctggttagttgggagaaggaaaatgtttcaagtgaggccctggaagctgctcgcattgcttgcaacaagtacatggccaaatttgctggaaaggatgctttccacttgagagtcanggtgcacccattccatgttcttaggatcaacangatgctttcgtgtgctggtgct

SEQ ID NO: 15196 - DNA, 385 bp, Glycine max
  unsure (1)..(385): unsure at all n locations
  Clone ID: LIB3040-020-Q1-E1-F7
gagggtttttgtcgtcgctactaagagttgctgcttcttcagccactccgcacctcgcagcctctgtgccctcaacaaccatggctgaaatcgaaactaccgttccagatcccacccaaatcgacgtcaaactcttcaatcgctggagcttcgaggatgttgaggttaatgatatgtctctggctgattacattggagtgtccccatcaaagcatgctacatatgttcctcacactgctggtaggtactcagtgaagaggttcaggaaagcgcagtgcccattgttgagaggctcancaactctctgatgatgcacgggaggaacaatggaaagaagctcatggctgtcaggattatcaagcatgccatggagatcatccacttg

SEQ ID NO: 15197 - DNA, 391 bp, Glycine max
  Clone ID: LIB3040-020-Q1-E1-F8
gatagatagagagcgcggcataacctaaacttacccttcttctctctgtgtgtgtgcgcatcaaacgcaaccagaagcagccatggccactgcaagaactgtgaaggacgtttctcctcatgagttcgtcaaagcttactctcctcacctcaagcgatctggcaagatggagctgccagagtggactgatattgtgaaaactgcaagatttaaggagttggctccttatgatcctgactggtactatgtcagagctgcttccatggcaagaaagatctacttgagaggaggacttggtgttggtgcctttcagaggatttatggtgggagcaagaggaatggtagccgccctcctcattttctgcagagcagtggtgctgttgctcgtcac

SEQ ID NO: 15198 - DNA, 394 bp, Glycine max
  Clone ID: LIB3040-020-Q1-E1-F9
ggtttttgtttcccatagcatagaagaagcagaaagagaagcattagcaaaagcaagaagaactagtctaagcagaaatggcctcttcagtgatggcatctgtggccctcaaacctgcccctttcactgttgagaagtcctcagttagaggccttccctccctctcaaggaactcctcttcattcagagttgtggccagtggtggcaagaagatcaagactgacaagccttatggaattaatggtggcatggctttgagggaaggagttgatgcatctggcaggaaaggaaagggaaagggcgtttaccagtttgtagacaaatacggtgctaatgtcgatggttacagtcctatctacgacaccaaggactggtctccaaccggtgatgtcta

SEQ ID NO: 15199 - DNA, 354 bp, Glycine max
  Clone ID: LIB3040-020-Q1-E1-G1
tgggacatcacatttcgttgcgcctttgatctctgtccccgctgcgtctctcgtaatcaagcctaagcaaatccacgagattaaggatttccttctcactggcaaaacgaaggatgcgaggtcagtgaagatcaagaggagcagagatgtggttaagttcaaggtcagatgctccaagtacctctacacactttgtgtgtttgacccagagaaagctgataaattgaagcaatctcttcctccaggtttgagtgttcaagacctgtaaaggtactgggcgagagatcacgaggaagcaatccattgattcttctgaagtttgattctctgtcagtgaagcttgagatttttgtc

SEQ ID NO: 15200 - DNA, 67 bp, Glycine max
  Clone ID: LIB3040-020-Q1-E1-G10
gggttgcaccgccgaccgaccctgatcttctgtgaagggttcgagtgagagcatacctgtcgggacc

SEQ ID NO: 15201 - DNA, 385 bp, Glycine max
  Clone ID: LIB3040-020-Q1-E1-G11
ggagagagggagtcagagaaaccctaggtaagaagaaaagatgccggctggtcatggtttgagatcccgcaccagagattccttctctcgtcctttcaggaagaagggaaccatcgccctcaccacatacctgagaacctaccacgtcggcgactatgttgacgtcaaggttaacggtgccgttcacaagggaatgccccacaaattctaccatggccgcaccggacgcgtctggaatgtcaccaaacgtgctgttggcgtcgaagtcaacaagcaggttggcaacagaattataaggaagaggattcatgtgcgggtagagcatgttatgccttcaaggtgcgctgaggagttccgcctcaggaagattaagaatgatcagcta

SEQ ID NO: 15202 - DNA, 391 bp, Glycine max
  Clone ID: LIB3040-020-Q1-E1-G12
ggctgtgagtgagattacccatagatagagagcgcggcataacctaaacttacccttcttctctctgtgtgtgtgcgcatcaaacgcaaccagaagcagccatggccactgcaagaactgtgaaggacgtttctcctcatgagttcgtcaaagcttactcttctcacctcaagcgatctggcaagatggagctgccagagtggactgatattgtgaaaactgcaagatttaaggagttggctccttatgatcctgactggtactatgtcagagctgcttccatggcaagaaagatctacttgagacgaggacttggtgttggtgcctttcagaggatttatggtgggagcaagaggaatggtagccgccctcctcatttctgcaagagcag

SEQ ID NO: 15203 - DNA, 385 bp, Glycine max
  unsure (1)..(385): unsure at all n locations
  Clone ID: LIB3040-020-Q1-E1-G3
ggtgtagttccaccgagtaacaacaatgtcgaagcgaggtcgcggaagatcngcgggaaacaagttccgcatgtcgctgggtctgccggtggcggcgacggtgaactgcgccgacaacaccggcgcgaagaacctctacatcatatcactgaaggggatcaagggtatgctgaaccggttgccgtcagcttgcgtcggagacatggttatggccaccgtcaagaagggaaagcccgatctccgtaagaaggtgctgcccgccgtcatcgtccgccagcgcaagccttggcgccgaaaggacggtgtttacatgtacttcgaagataatgctggtgttatcgtgaatcacaatggtgaaatgaaaggttctgctatcactggtcca

SEQ ID NO: 15204 - DNA, 393 bp, Glycine max
  Clone ID: LIB3040-020-Q1-E1-G6
ggcccttctagctttttcccagtccaagcagcctccaattcgtgccactctcttcaaaatggccgttaccttctcaaatctccacacagaatcaggtctcaagtccctcgacgacttcctctctgggaaggtctacgtttctggggatcagttcacaaaggacgacatcaaagtgtatggtgctgttttggagaagccaggtgactcttttcccaatgctgccaagtggtacgaggttgtctcatctcagcttgctgcaagcttccccggcaatgctcaaggggtgagattcagtggcaaagcttctgctccagcggaggctgctcctgcgaaaccggatgcttctgctgctgaagatgatgatgaccttgatctctttggcgatgagactga

SEQ ID NO: 15205 - DNA, 401 bp, Glycine max
  unsure (1)..(401): unsure at all n locations
  Clone ID: LIB3040-020-Q1-E1-G7
ggtagttccaccgagtagcaacaatgtcgaagcgaggtcgcggaggatcggcgggaaacaagttccgcatgtcgctgggtctgccggtggcggcgacggtgaactgcgccgacaacaccggcgcgaagaacctctacatcatatcagtgaaggggatcaagggtangctgaaccggttgccgtcagcttgcgtcggagacatggttatggccaccgtcaagaagggaaagcccgatctccgtaagaaggtgctgcccgccgtcatcgtccgccagcgcaagccttggcgccgaaaggacggtgtttacatgtacttcgaagataatgctggtgttatcgtgaatcccaagggtgaaatgaaaggttctgctatcactggtccaattgggaaggagtgtgct

SEQ ID NO: 15206 - DNA, 325 bp, Glycine max
  Clone ID: LIB3040-020-Q1-E1-G8
ggttctagtgtgtgattgtttgttgttgtaactcgttcttcttcttttgttgttctgtgtttgtgtttgttttttctctcacctgaaaatgtcttgctgcggtggtaactgtggttgcggaagctcctgcaagtgcggcaacggctgcggaggctgcaagatgtacccagacttgagctacactgagtcaaccaccaccgagaccttggtcatgggagtggcacctgttaaggctcaatttgagggtgctgaaatgggtgtgcccgctgagaacgatggctgcaaatgtggaccaaactgctcctgcaacccctgcacttgcaag

SEQ ID NO: 15207 - DNA, 361 bp, Glycine max
  Clone ID: LIB3040-020-Q1-E1-G9
ggagagtgagtgagatagagagagacgcttcgcaaatctcaatcgaatctcagaaaaatgagagaaatcatcagcattcacataggtcaggccgggatccaggtcggaaactcctgctgggaactctactgcctcgagcatggcatccagcccgacggcatgatgccttctgactccaccttcggtgtagcccacgacgccttcaacaccttcttcagcgaaaccggatctggcaagcacgtcccccgtgctgtcttcgtcgacctcgaacccaccgtcatcgacgaggtccgctgcggcacctaccgtcaactcttccaccccgaacaactcatctccggcaaggaagacgccgccaaca

SEQ ID NO: 15208 - DNA, 405 bp, Glycine max
  Clone ID: LIB3040-020-Q1-E1-H1
gggcatagcaaaatcgtttctccaatttaatcaccattgtacaacccaattcccttcgtcgttttcgattaagagagcaatggcacgtaccaagcaaaccgctcgcaagtccaccggaggaaaggctccgaggaagcaattggcaaccaaagccgctcgcaagtcagccccggcgaccggcggagtgaagaagccccaccgcttcaggccaggaacggtggctctgagggagattcgaaagtaccagaagagcaccgaacttctgatccgaaaactcccattccagaggctcgtcagagaaatcgctcaggatttcaaaaccgatctccgctttcagagcagcgccgtttcggctcttcaggaagccgcggaggcttatctcgttggactctttgaggacactaa

SEQ ID NO: 15209 - DNA, 342 bp, Glycine max
  Clone ID: LIB3040-020-Q1-E1-H10
ggtagttccaccgagtagcaacaatgtcgaagcgaggtcgcggaggatcggcgggaaacaagttccgcatgtcgctgggtctgccggtggcggcgacggtgaactgcgccgacaacaccggcgcgaagaacctctacatcatatcagtgaaggggatcaagggtaggctgaaccggttgccgtcagcttgcgtcggagacatggttatggccaccgtcaagaagggaaagcccgatctccgtaagaacgtgctgcccgccgtcatcgtccgccagcgcaagccttggcgcccaaaggactgtgtttacatgtacttcgaagataatgctggtgttatcgtga

SEQ ID NO: 15210 - DNA, 59 bp, Glycine max
  Clone ID: LIB3040-020-Q1-E1-H11
ggagagagagagagaaatggagaagacaggagtgttatcggcgaaggagggagggagag

SEQ ID NO: 15211 - DNA, 157 bp, Glycine max
  Clone ID: LIB3040-020-Q1-E1-H12
tcaaacgaagaaaggcttatggtggatacctaggcacccagagacgaggaagggcgtagtaagcgacgaaatgcttcggggagttgaaaataagcgtagatccggggattcccgatataggtcaacctttcgaactgctgctgaatccacgggcagg

SEQ ID NO: 15212 - DNA, 362 bp, Glycine max
  unsure (1)..(362): unsure at all n locations
  Clone ID: LIB3040-020-Q1-E1-H2
gatgtcttggacaaagcatcttgtgaatgtgacagagtgttggggttgaacacctgaacagaacttgaaccctgcctctgcgctcttgtggaatctgtgcagtgcttgaaccctaataatggctgctttcttgagaaggtttgcgagggccactccgatcctattcgctgcccaatccaattcctctcacaccaatctccgccttcccttcactgccatcgccgccatttccggcggagtctccttcctttactaccattcctctcccaacttcgctcattcacaagaagcagaacaagtggaaagtaaaaacatcgcactcgttccggataaatgggtcgagtttaagttgcangacactg

SEQ ID NO: 15213 - DNA, 362 bp, Glycine max
  Clone ID: LIB3040-020-Q1-E1-H3
gactcactcatacaatagagaccagcttttgcttctttgtgaacatggagatgaggaaatcatgtggcttcttcttcttgctcctcctccttgtctttgcttcccaggtggtggtgcagacggagggaagagtgtgtgagtcacaaagccacgggttccatggtttgtgtaatagagaccacaactgtgctttggtctgcaggaacgaaggtttctccggtggcaggtgcaaaggcttccgccgccgctgcttttgcaccaggatttgttgagatctcatcaaacactactcttgccatgcaaattaataaatcatagctaggccaaataaattgcatctactctttatccatttgggagct

SEQ ID NO: 15214 - DNA, 397 bp, Glycine max
  Clone ID: LIB3040-020-Q1-E1-H6
gatccaaattcaagttcgcaccaaattttcctcccaaaatgtcaggccgtggaaaaggtgggaagggtttgggaaagggaggagctaagaggcacagaaaggttcttcgtgacaacattcaaggaatcacgaaacctgcgattcgtaggttagcgagaagaggtggcgtgaagaggaccagtggtttgatttacgaggaaaccagaggagttctgaagatattcttggggaacgtgattcgcgatgctgtaacctacactgagcacgctaggaggaaaactgttactgctatggatgtcgtttatgctctcaagagacagggaaggaccctctatggctttggaggctaaagaatagaatctttaggtttaatgactgtgttgcaggataaaacatt

SEQ ID NO: 15215 - DNA, 392 bp, Glycine max
  Clone ID: LIB3040-020-Q1-E1-H7
gatctcattaacgtttcttctcttcactctgcccgctgcatcaatggcttcagagaagaaactttcgaacccaatgagggagataaaagtgcagaagctcgtcctcaatatctctgttggcgagagtggagatcgtctcaccagagcctccaaggtgttggaacaacttagtggccaaaccccagtgttttccaaagcaaggtacactgttcgttcctttgggattagaagaaatgagaagattgcatgctatgtcactgtcagaggtgacaaggcaatgcaacttttggagagtggtttgaaggtgaaggaatatgaacttctcagaaggaacttcagtgatactggttgcttcggctttggtattcaagagcatattgatttgggaatca

SEQ ID NO: 15216 - DNA, 358 bp, Glycine max
  Clone ID: LIB3040-020-Q1-E1-H8
gacggcactcgttttcgttctcgttctggtttatagatctttgcgaaggaggtttacagcgctcaaccaaagatgcagaacgaggaaggacagatcactgagctttacattcctaggaagtgctccgccacaaacagattgattaccgctaaggaccatgcttcggttcagatcaacattgggcatgtggatgagaatggcgtctacaatggccatttctccacttttgccctctgcggattcatccgtgctcaaggtgatgctgacagtgctctagaccgcttgtggcagaagaagaaagttgaagttaagcaacagtagacacccatgatagtttgttacttcgttatgtattaat

SEQ ID NO: 15217 - DNA, 372 bp, Glycine max
  Clone ID: LIB3040-020-Q1-E1-H9
gattcacaactttacccactcttcattctagcaattcgaattcccaatccaaaaccctaataccttcaaagaacctagtagtgaatcagtgatggcacctaaggcagagaagaagccagcggagaagaagccggtggaggagaagaagtcgacggtgggagacaaggctccggcggagaagaagccgaaggccggaaagaagcttccgaaggagggaggagccggcggagaaggggggaagaagaaaaagaggaacaagaagagcgtggagacatacaagatatacatattcaaggttctgaagcaggtccaccctgacattggtatctcaagcaaggccatgggaatcatgaacagcttcatcaacgacat

SEQ ID NO: 15218 - DNA, 348 bp, Glycine max
  Clone ID: LIB3040-021-Q1-E1-A10
accaaggcgtccgacgacagaaggggaagtatataacttcttcgaggtgtccggaaatcgttcctatcatcacttctcaaatctcgaaccctctcgttcgtgccgatcactaggtcacacttcatcaatggcgggtagaggcaaaaccctaggattcagcgccgctaagaaggccacctcaaggagcagcaaagccggcctccaattccccgtcggtcgtatcgccaggttcctcaaggccggaaagtacgccgagcgcgtcggcgccggagcccccgtctaactcgccgccgttctcgaatatctcgctgctgaggttttggaagtggctggaaacgctgcgacaga

SEQ ID NO: 15219 - DNA, 278 bp, Glycine max
  Clone ID: LIB3040-021-Q1-E1-A11
ggctctgtggctctctacatgtcagcaatcagcgcgaaacaggctctcgaagttgccgttaacgctgctgtttgtggatcaaaaggtcacagatattgtccagtttcccaaagggtcctcctaagattaaacgacaataaaatcgcttacacactccacctcaacgattgcagtagtatacccgtaaggtttttgggtgtgaatcccaaagggaacgttccactggttccttttgatggcaaatgggtggctgactctgatgtgattgtggggatact

SEQ ID NO: 15220 - DNA, 364 bp, Glycine max
  Clone ID: LIB3040-021-Q1-E1-A12
gacaccgaagcactcgcgattccagccatagcacagaactctttgcaagacagttgctgaatgacgccacagatagaagcgtcttagttcacgctcatcgctgaaaaacctgaattcttctcttcatctcttcacattcgtttcgatcttcgatatctgaaaatgacagtgtgcatttcaatccacatcggtcatgccggtattcacgtcggaaaaacctgctggtagctctattggctcgaacacggcattcagcctgataggcaaatgctaagtgatacgactgttggtggacgtgatgatgctttgaacatcttcatcagtgaaactgggtctgaatagcacgtgcctcgtgcgatttttg

SEQ ID NO: 15221 - DNA, 335 bp, Glycine max
  Clone ID: LIB3040-021-Q1-E1-A2
gagattatctttatccttttagcctttgggtacccctctgtgtggcagtgcatcttcatctgaagtgggaagctaaactcaaaggtcaaaaagagcacaggttagtcatgacatcctcattctcaacgcagttggtgcaaagtcagaacctacctcctcgttttcatctccatgtccaggggaattttagccaacatgtgtcaaatgtttcaatgacacatgtggtccgtagcagtaacaaatcacagcttggtttacggtaaaacgttggcatcaagatctcactatgctgccagattttcagtctcaggacaatctgaagcaaaatcaatcac

SEQ ID NO: 15222 - DNA, 362 bp, Glycine max
  unsure (1)..(362): unsure at all n locations
  Clone ID: LIB3040-021-Q1-E1-A3
gagggatctcactcactaaaattccaagtagccacagctctcctctcactttcatttctacatccctggctctgttccgtcgatgacgatggcgtttagggtgcgaaaccctgacctccgctttctcattcttctctctctcttgtccatcacttccgccaaggtcttcttcgaggagcgtttcgatgacggatggggaaatcgttgggttaaatcagattggaaaaaagatgagaacctggctggggagtggaaccacacctctggccaatggaatggagacgctaacgacaaaggtattcanaacagtgaaggatacagattctacgctaattcagctcagtaccctgaattcagcaaca

SEQ ID NO: 15223 - DNA, 343 bp, Glycine max
  Clone ID: LIB3040-021-Q1-E1-A4
ggtagcgctagtttgtatgttcctgcgattgcaattttcaagttgccgacgttttgaggagaatcaaaagagcaaaagcaaaggcaaatgatcctaaagagactgttactgctactaaaacccttaagtgtatcttcaccaccttcccacatcaaccctcagatcttacagttcttggagaataggagaaaggtgcaccatgatgcaataaacttttgtcaagccattctgcaaaaaaagtcaattgaatggaaagctgtgcaccgtaacaatttgtcacaggccatcaatgatgttgacctagttgttacagttggtggtgatggaactcttctgcaggcca

SEQ ID NO: 15224 - DNA, 326 bp, Glycine max
  Clone ID: LIB3040-021-Q1-E1-B12
gggaaataatagtcaaccatggcagggagattgaccaacgcagcatcgaggatcttgggcggaaacggcgtcgtttaacgatccgtagcttcctctcttcggctccgctccggcatgggcctccccgtcggcaaacactacgttcccgacaaaccccttcccatgaatgaagaactcttgtgggacaatggcactgcatttccagaaccgtgcatacatcgtactgctgacactgtccgaaagtatgaagcattggcctggctatgtgggggattgagttttttcgcgtctctgggactgtttggctgtgtggaatgacaaagcct

SEQ ID NO: 15225 - DNA, 384 bp, Glycine max
  unsure (1)..(384): unsure at all n locations
  Clone ID: LIB3040-021-Q1-E1-B2
ggacgaagaagaaaatgatggcaacaaccgcgcctgtgcggtggcaaccaccaaacattaggtttaggattgagccgaagagagcgatgagagtgaaagcctttggtaagggaggcagggatatggatagggtttggagtgaggcgtggcgaagtgctaacgatgggtttgagcggttcgtcttcgaagcgaagaagactgcggagcgcatcgaccggcgctattccctttcgcggcgtctctcctccgtggcaagggcggccgcagaccgagcccgcgagattgatcgtgagtntgagattggaaaacgttaccgcactttgagcatcgattttcaaaggaaactggcccaagtacaggaaacagctcaaggactttctggat

SEQ ID NO: 15226 - DNA, 358 bp, Glycine max
  Clone ID: LIB3040-021-Q1-E1-B3
gacacctttgttcactcttcttctcttgcggctagggttttagcgcagcttcttctagatttaaggaagatgggtaaggaaaaggttcacatcagtattgtggtcattggccatgtcgactctgggaaatccactaccactggtcacctgatttacaagcttggaggcattgacaagcgtgttattgagaggtttgagaaggaagctgctgagatgaacaagaggtctttcaagtatgcctgggtgctggacaaacttaaggctgagcgtgaaagaagaatcaccattgatattgctttgtggaagtttgaaacaacaaagtattattgcacagttattgatgcgcctggacataagg

SEQ ID NO: 15227 - DNA, 242 bp, Glycine max
  Clone ID: LIB3040-021-Q1-E1-B4
ggggggtcagagtgagaaagagaaagagagaattcgtaaaccctaatttcggaaagatcggcgatgactgcctccaaggatcgcgagaacttcgtctacatcgccaaactcgccgagcaggccgagcgttacgaagagatggtggaatcaatgaagaacgttgcgaatctcgacgttgaactgacggtggaggagcggaatttgctttctgttgggtacaagaatgtgattggtgctcgcag

SEQ ID NO: 15228 - DNA, 85 bp, Glycine max
  Clone ID: LIB3040-021-Q1-E1-B5
gttccaaaagaactacgtaggtctgattttctcatcccaaattgaggaatacgtaggagcaaagggaaacacccttgtcgaccat

SEQ ID NO: 15229 - DNA, 298 bp, Glycine max
  Clone ID: LIB3040-021-Q1-E1-B6
aggaaaaagggttgagtagtagtgttgaggacaaggtgagttgtgttggggacaaggtggttgttgtggaaaaagtgagtagtgttgaggataaacaagtggtttcgaaaacgattgagcaagggaaaagggtggtggaacctgtggaggaagaaaaaactgtcacaatcactacgagtgtgaagttggtgtttggtgaggatataacgtgggcagagttacccgtgaactgtagtgtgaagctggtgagggatatacctagggatcggtatccaggtttgaacgggtgccctgtcaa

SEQ ID NO: 15230 - DNA, 347 bp, Glycine max
  Clone ID: LIB3040-021-Q1-E1-B7
gacatcacatttcgttgcgcctctgttctctgtcactgctgcgtctctcgtaaccatgcctaagcaaatccacgagattaaggatttccttctcactgctagaaggaaggacgcaaggtcggtgaagatcaagaggagcagagatgtggttaagttcaaggtcagatgctcgaagtacctctacacactttgtgtgtttgacccagagaaagctgataaattgaagcaatctcttcctccaggtttgagtgttcaagacctgtaaaggtacagggcgagagaccaagaagaagcaattcattgattcttctgaacttcgtttctccgtagttgaaacttgagattct

SEQ ID NO: 15231 - DNA, 399 bp, Glycine max
  unsure (1)..(399): unsure at all n locations
  Clone ID: LIB3040-021-Q1-E1-B8
gagttcataatcaaacccttcaggaaccttgataaccttcgaaggatcaccgtcctgcactattatcaaatgataaccctcgaagaagggcctccacatccccaagaagtccaggttacgtatcgtgggaatcactatgtccacctcctccttcagaatcggcgttgctgctgctgtgcttcccgatgacgaagacatcgttccttcctcttcctcggatcgtaggttttgctgagaaagacaacgttgttgttgttcttgttgctgctgctttcgagcttcgaggagcacgaggatggtgctgtgtntgttactactttgtctgcattggagtggggggcttatgtagtagttcaaactctcgggatttggcacgtgccgaaagcgtgtatgtgtgag

SEQ ID NO: 15232 - DNA, 308 bp, Glycine max
  Clone ID: LIB3040-021-Q1-E1-C1
ggaacaacagttgcggagtcaatcgaaatcggcggagatggttgccatgaggtttcaccagtaccaggtggtgggaagggctcttcctaccgaatccgatgagcatcctaagatctaccgcatgaaactctgggccaccaacgaggtccgtgccaaatccaagttctggtattttttgagaaaattgaagaacgttaagaaaagcaatggacaagtgctagccatcaatgagatttttgagaacaatcctaccaagattaagaattatggaatttggccgcgttatcagacgcgcactggttatcaca

SEQ ID NO: 15233 - DNA, 397 bp, Glycine max
  Clone ID: LIB3040-021-Q1-E1-C10
aaaagggcactgaacgctatcgcttgcaggttgccacactacggtgatgtttccaccaaacccgtttgcgttgttgtttgcaaatacatggcaacgataaggatcctaggaacgctgaaagagggtgacttgcatgggaaaacggtactcgttaaggtccatcttaacgtgactttggatgacacccttaatatcagcgatgacactaaagtccgtgctgctgttcccaccatcaagtacttcactcggaacggtccaaaagtaatcctttccagccatttgcgacgttcaagatgtttaacacctaaatacagtttgaaccctcttgtgccaacgctgtcacaacctcctggaactgaagttactattgccaacgaacccaattgggaagaaattt

SEQ ID NO: 15234 - DNA, 383 bp, Glycine max
  Clone ID: LIB3040-021-Q1-E1-C12
ctgccaaaagaccactgaaaggggttcctaatcgtgtccctgaaaaagcctaaactataaacactccagtctgagtattgatcgttctctttcagcgttcctcaggtccatagggcattctaagcttcgcgagcaataagttcgaatgctttcccaacatgaccgccttcaactagattaagcacatagagataccaattcgccgcaaggaagaatcactggaagaaccggaagtgccgaaatacagagatcgagctaaagagcgtagagaggatcagaatcctgattatgaacaaactgagcttggatttcatgcagttgctccacctggtactgtggatattccgtcatctgatgcgcacaagttatctattgagaagagc

SEQ ID NO: 15235 - DNA, 389 bp, Glycine max
  Clone ID: LIB3040-021-Q1-E1-C2
agctacgagacgacagaaggggagatatacattctcttgtcacagttttctgtgtcaccggaactcgtttctttcaaaacacttcaaacatctcgaacgctctctttccggcaactaggttaaagttcatcaatggcaggtcgcggcaaaaccctaggatctagcgccgccaagaaggctacctcaaggagcagcaaagccggcctccaattccccgtcggccgtatcgcccgtttcctcaaggccggaaaatacgctgagcgtgtccgcgccggcgcccctgtctacctcgccgccgtactcgaatatctcgcggctgaagttttggaattggctggaaacgctgccagagacaacaagaagactcgaattgtgccgcgccacattca

SEQ ID NO: 15236 - DNA, 381 bp, Glycine max
  Clone ID: LIB3040-021-Q1-E1-C3
gagtgagagagagagaaggcaagatgtcgaagagaggacgcggtggttcggcggggaacaagttccggatgtcgctgggtctgccggtggcggcgacggtgaactgcgccgacaatacgggggcgaagaacctctacatcatatcggtgaaagggatcaaagggcgtttgaaccgtctcccctcggcttgcgttggcgacatggtgatggccaccgtgaagaaggggaaacccgatctgaggaagaaggttttgccagctgtcattgttcgccagcgcaagccatggcgccgaaaggacggcgtctacatgtatttcgaagataatgctggtgttattgtcaatcccaaagggagaaaataaacgttctgctatcactggt

SEQ ID NO: 15237 - DNA, 325 bp, Glycine max
  Clone ID: LIB3040-021-Q1-E1-C4
gaagatttgtgagagaaagggagaaagggtgtgagaatggagagcaaagaggaagatgtaagggttggagcaactaggttctcagaaaggcacccaattggtacagcagctcacggtgacaaggactacaaagaaccacccccagcacctttgtttgagcctggtgagctaaagtcatggtccttctacagagctggaagtgctgagtttgtggccagtttcctgttcctccacattaccatcttaagctgtcatgggtgtcaacacgtcacccttccaagtgtgcctctgtgggcattcaatgcattgcttgggcctttggggg

SEQ ID NO: 15238 - DNA, 78 bp, Glycine max
  Clone ID: LIB3040-021-Q1-E1-C5
ggggatcatatgtgtttgacactttttgtgacaaacattatctggcaccgcttaaatgatcatttgttttgatgatgt

SEQ ID NO: 15239 - DNA, 200 bp, Glycine max
  Clone ID: LIB3040-021-Q1-E1-C7
gagggctgccgctaagggaagccagttggattcacacaagaacgccatgtctattcagtgcaaggtgtgcatgcaaacatttatatgcaccacatcagaactgaagtgcaacgagcatgctgaagccaaacaccccatatctgatctccatgtttgttctcctcatcttagaacgtgaaagagtgcactgttcagacgtg

SEQ ID NO: 15240 - DNA, 397 bp, Glycine max
  unsure (1)..(397): unsure at all n locations
  Clone ID: LIB3040-021-Q1-E1-C8
ggaactcattcttcttcaactcaacagagcaagggttcgcactcgcagattcttgagcaagaataatggggaagaaaagaaaacacagtgagactactcaagctgtagcacaacccaaaaaggaagaggctgctccagagagaccggctaggacccttttggggtggaaggataagaatcaagttgaggatgattcaccaatatttaggaacaaagagaagctattggtcacttgctctaggcgcatcaattacaggtaccggcatttgatgttgaatttggtcacacttttgcctcattgtaagaaggataacaaagttggattaaaggaaactaaaggagccaccctcaacgagcttgttgagctaanaaattgttcctcttgtttaatttttga

SEQ ID NO: 15241 - DNA, 224 bp, Glycine max
  Clone ID: LIB3040-021-Q1-E1-C9
gactcgagcttccctcacacattctctgtgactgcctctgttccgccgaacccagcattttcccaccgttcgggccaccggcggagttagttttccggcaaggatgggtgctgctctgctgtctgagcttgcgacggagatagttgtgccggcctgcgccgtcatcgggatcgtgttctcgttggtgcagtggttccccctgtcgcgcgtcaagctcactcccc

SEQ ID NO: 15242 - DNA, 354 bp, Glycine max
  Clone ID: LIB3040-021-Q1-E1-D1
ggctagctagcgggccaaagtagtgcctaagtcttcctcatatcttccaccctttggcttattagtgggagcaatacatatcattcattcagaggcaacaaaggagttgtaaattaagagcatggctgcacaagctcttgtatcatcatcatctcttaccttctcagccgaggctacaagacaaagtcttggaccaagatcactccaatctccatttggcttctcaagaaaagcctcctttcttgttaaggcagctgctactctccctgtcaagcaaggatcagacagacctttgtggtctgcatcaaagcaaagtctttcctacttggatggcagccttccgggtcaccatgg

SEQ ID NO: 15243 - DNA, 366 bp, Glycine max
  Clone ID: LIB3040-021-Q1-E1-D10
aggggtatagagggagctacatacaaagagtgtgatagtaagagtaatagaagagcggtctggtccaagtgctgcaatatgcaaggcaaagacatggaatggttgtcgtcttcgtcggcgattgcacagaaaacatgggaactcgagaacaacatcagcccaatggacactccgggcggcgccgccatctcctccacaaccaccacgactagcgccgacgagtcgatcttctactacgacgaggcgggccagaacgagttccagcgcgacaagccctgagccaacgacccccactacttcaagcgcgtgaagatctccgcactcgcgctcctcaagatggtcatccacgcccgctccggcgggacc

SEQ ID NO: 15244 - DNA, 374 bp, Glycine max
  Clone ID: LIB3040-021-Q1-E1-D11
ggtgctcactcatctatctattataaacaaacactcttcttcatattcttcttcttcttcttgttcttgttctatctgtgacgagcatcatggcctcgagagcagtgctattgttggctatgtgtgtgcttccggccatggttgtggccattcgcccagcaaagaaccctttttgcgtgaagggtcgcgtctactgtgacccttgccgtgctggttttgagacctcagcaaccacctacattgccggtgctgagattatgttgcaatgcaagagcagggttagcaacgaggttgtgtacaccaagaacgggtacactgactcaactggagcatacacaatgtacgtggaccaagattacgcagattaaatatgc

SEQ ID NO: 15245 - DNA, 356 bp, Glycine max
  unsure (1)..(356): unsure at all n locations
  Clone ID: LIB3040-021-Q1-E1-D12
gactcaacatttgcatttcctccttcatatacagtacacacttcagctggtggtagcctggtacatagtgtgcttccaaaatgaagaacagtaggaagactttactattgctgctgctcatggctgcaactctcttttgcatgccaattgtgtcgtatgctgtttctaatgtcaacattcaagaccatctcaccaatatttctgagctggtaaaaggtccaaatataatgcttttgtcatttgtggattgtggagagaggtgcatggtgaggtgcagtttgcactcaaggccaaagatttgcacgagagcttgcgggacatgctgtatgangtgcangtgtgttcctccggggcac

SEQ ID NO: 15246 - DNA, 399 bp, Glycine max
  unsure (1)..(399): unsure at all n locations
  Clone ID: LIB3040-021-Q1-E1-D2
ggcattttcatttcattttgaattgaaaccgcggagagtttgctgctacatcgatcatcatcacctcatggacggacacgatccacaagacccaaagcagagccctgctgacatgactgcctttgtgcaaaatcttcttcagcagatgcaaaataggttccagacaatgtccgactccattgttacaaagattgatgatatgggaagtcgcataaatgagttggaacaaagcatcaatgacctgagagcagagatgggagtggagtcctctccatcacctgcagcccctgctaagctaacggaggagataaccanagaagaaggttcagcttaagtggcattctgatttcagttgctcattattcatgcattgtattgcacaaggattgatattctgca

SEQ ID NO: 15247 - DNA, 308 bp, Glycine max
  Clone ID: LIB3040-021-Q1-E1-D3
ggctcccagcagctaaggaatcaaatcggaaattcagactctcactcttcccttctcccctctccttagcttccactcattgtacacaagattctgcagagacagagagaaaagtgttgaacatggcaggaagagaagttcgtgaatacaccaacctcagcgaccccaaagataagaaatggtgcaaggggaaagataagattgacgatgaagacattagtttccaacgcatggttgcaaagatgcgagaggttgctggggatcccggaggttagcttcatggacgaggcgccttggacagtgagtga

SEQ ID NO: 15248 - DNA, 390 bp, Glycine max
  Clone ID: LIB3040-021-Q1-E1-D4
gaaggggttccagcattaagaaatggatagaatttagacaactaagaaagaaaaagaagaaacaaagccaaggcgttgctgaatcgcgactatgatcattccttactttgttccttgttctgtgttcttcatgtgaccgtcggttagttttgttttttagatttaaatgtgatctatgtacccttaggggtcccccttgttattatgtgcacatccatcttccccatctatcatcggcgatctcctttttctttgtaaagttcaatcttaaccgatcactagtgttgtaaagttgtctttaaagagattgacagttaataagcaacaccaagatataagcaactcacaactaacttctttttatcaaatatcacttgagatcgtttcaag

SEQ ID NO: 15249 - DNA, 73 bp, Glycine max
  Clone ID: LIB3040-021-Q1-E1-D7
gtatggcgcaacccaattcttgtactatacttggcaagttctactctcctatcccttttattaatttcggaat

SEQ ID NO: 15250 - DNA, 270 bp, Glycine max
  Clone ID: LIB3040-021-Q1-E1-D8
ggtccaaaatcctcactccagccacacgcctcagtagaccatggcctcattgggtgggttacaaaatctaagcggcatcaattttcttatcaaaaaagagggtccaaaagtcaatgcgaagttcgagctgaagccgccaccatatccactgaatggtttggagccggtgatgagccagcagacacttgagtttcattgggggaaacaccacaagacatatgtggaaaatctgaaaaaacaaattcttgggacagagcttgatgggaaatc

SEQ ID NO: 15251 - DNA, 365 bp, Glycine max
  Clone ID: LIB3040-021-Q1-E1-D9
ggtgtagaggcagctaaaaacaaagagtgtgatagtaagagtagtagaagagcggtctggtccaagtgctgcaatatgcaaggcaaagaaatggaagggttgtcgtcttcgtcggcgatcgcgcagaaaacatgggaactcgagaacaacatcatcccgatggacactccgggcggcgccgccatctcctccacaaccaccacgacaagcgccgacgactcgatcttctactacgacgaggcgggccagaacgagttccagcgcgacaagccctgggccaacgacccccactacttcaagcgcgtgaagatctccgcactcgcgctcctcaagatggtcgtccacgcgcgctccgggcgcaacat

SEQ ID NO: 15252 - DNA, 322 bp, Glycine max
  Clone ID: LIB3040-021-Q1-E1-E1
gcatttggagagacagagtagtgagtagtgagagggcgaagcgatgaatgccccagatcgttacgagcgtttcgtcgtccctgaaggcaccaaaaaggtttcttatgagagggacacgaagatcatcaatgcggcgtccttcaccatcgagagagaggagcacactatcggcaacatcctccgcatgcagctgcacagagaccccaatgtcttgtttgccggatacaagcttcctcatcctcttcaatacaaaattattgtcaggatacacaccactagtcagtcctcgccaatgcacgcatataaccagtccgttaatgat

SEQ ID NO: 15253 - DNA, 356 bp, Glycine max
  Clone ID: LIB3040-021-Q1-E1-E10
ggcgtacacagcctcaacaaccctaacgcgtgcagagcagagagagacgcagccatggggcgaagacccgcgaggtgttataggcaaattaagaacaaaccataccccaagtcacggttttgccgtggtgttcctgatcccaagatcaggatttacgatgttggtatcaagaacaagggtgttgacgagtttcctttctgtgtccatccggttagttgggacaaggaaaacgtctctagtgaggccctgcaagctgctcgtactgcctgcaccaagtacatgggcagatctgctggaaaggatgctttccacttgagagtcacggtgcacccattccatcttcttaggatcccccc

SEQ ID NO: 15254 - DNA, 299 bp, Glycine max
  Clone ID: LIB3040-021-Q1-E1-E11
ggttgaacttcattgtttttggctaagcctcgaaatccagaaaaatcgtgagcgaagatgatgcacatgaccttttactggagcaggaaggtgaatctcctaatagattcatggaagaccaacgattggacggagtatctcatcactctgctcgcatgcctcgtcgttgccgccttctaccagttcctagagaatcgccgcatccgcctcaagctcatcggcgccggaaatcccttcccggcagagatctaggccccgcttctgcgacggaagcttgccggaaaccgcgccaaggtggg

SEQ ID NO: 15255 - DNA, 349 bp, Glycine max
  Clone ID: LIB3040-021-Q1-E1-E12
ggagggttattggacacattcttcagcgactgcgtttttggatcggaacctcttctgcggcgtagcaatgggacactccaacgtttggaactctcacccaaaaaactacggtcctggttctcgcacttgccgtgtgtgtgggaatccacatggactgatcaggaagtatggccttatgtgctgcaggcagtgcttccgtagcaatgccaaggaaattggcttcatcaagtatcgctaaaagagcagttgtcaactacggaccaatattgtgttctggcactaggatgttttgaggatgttatgtttgaagaaacttgagactttcttttttcatctaattaattatcag

SEQ ID NO: 15256 - DNA, 362 bp, Glycine max
  Clone ID: LIB3040-021-Q1-E1-E3
ggttttgattagggtttgtcattagcacttcttcttttcacactgccgctgcaacaatggcttcagagaagaaactttcgaacccaatgagggagataaaagtgcagaagctcgttctcaatatctctgttggcgagagtggagatcgtctcaccagagccgccaaggtgttggaacaacttagtggccaaaccccagtgttttccaaagcaaggtacactgttcgttcctttgggattagaagaaatgagaagattgcatgctatgtcactgtcataggtgacaaggcaatgcaacttttggagagtggtttgaacgttaacgaatatgaacttctcagaagggaattcagtgatactggg

SEQ ID NO: 15257 - DNA, 105 bp, Glycine max
  Clone ID: LIB3040-021-Q1-E1-E4
tgattggggccattgttgttgctattagcatccgcagctgcttctattcgcaccgcacacagtgagccatggccgtcggaaacgacaagcgcatctccaagggga

SEQ ID NO: 15258 - DNA, 196 bp, Glycine max
  Clone ID: LIB3040-021-Q1-E1-E5
gacccccaaactctgcatcggaagaaaccctagccactctcccggcgtcacgatgcagatcttcgtgaaaagcctaacgggtaaaacgatcacgttggaggtggagtcttcggacaccatcgacaacgtgaaggccaagatccaggacaaggaaggcatccctccggagcaccagcgcctcatcttcgccgggaag

SEQ ID NO: 15259 - DNA, 198 bp, Glycine max
  Clone ID: LIB3040-021-Q1-E1-E9
gaagagtgatccttctacactaactaaagccgagcagcgagagagagaaaccctagcaaaaatgccggctggtcacggtttgagatggcgcaccagagattccttctctcgtcccttgaggaagaatggtaccatcgccctcaccacatacctcagaacctatgacgtcggcgattatgtccacgtccatgttaacgg

SEQ ID NO: 15260 - DNA, 302 bp, Glycine max
  Clone ID: LIB3040-021-Q1-E1-F10
gggtggatagaggggcactgactcacacccacaatagtcgggggcagcttcaaagtacctccacattgtctcctactcttactgttctcttctcttctcatcatttttattttttccaatcaaaccaaacaaaacataagcaccgctcttttctctccgaaatccccatctcccttcacttctgagctctggacgagatcccagatctcaccatctttcacgcactcttccatcagattcaccctttcgtttaacgcaaactcataacttgaaggttaatggctgctccaccggcaagggct

SEQ ID NO: 15261 - DNA, 353 bp, Glycine max
  Clone ID: LIB3040-021-Q1-E1-F12
accacgcgtccaataaggcgccaaaaaaataacaaaagggaattgcaaaccattaggaacccccatcccaattcttagccgccattttcccagggcttcaacctttcaagttaacccataaaaatttccacaccttggatgaaatccctcaaggataaggatcctaacccatctaaatttgaaaattcatttggacaggcaccgtttgatctggaaagtaccactcaggagctcaaaagtgatctgaaggatttatacagacacccatccgtgccagttgacgtttctggataccgtatagctgtagtcattcatgtcgcttacatattaaagataggtttccgtaagattca

SEQ ID NO: 15262 - DNA, 385 bp, Glycine max
  Clone ID: LIB3040-021-Q1-E1-F2
gattactcgaaactatttttgagccactagggtacgtgttcgataatactgtggtttctgttcttccagactaaggtaaacgaaagtgcgcaatgcatgcaagcagcaaaatgggtgaaaaatataaaccttggatcatctttcttcatctactagtaatcacgtgttcctgcaatagaagctgcagagccaggggattgattgaaacagaagacaaattcttcaaagcaacctcaaatgatcatcatgaaacagaacatgcacatgctcactctcacgtggatcacatagatccttctgtgatggtgtttttcaacatcgaagatttgaaggttgggaaaacaatgcctattcattttcccaagagggaccctgcaacatcccc

SEQ ID NO: 15263 - DNA, 388 bp, Glycine max
  Clone ID: LIB3040-021-Q1-E1-F3
ggtacacagcctcaacaaccctaacgcgtgcagagcagagagagacgcagccatggggcgaagacccgcgaggtgttataggcaaattaagaacaaaccataccccaagtcacggttttgccgtggtgttcctgatcccaagatcaggatttacgatgttggtatgaagaagaagggtgttgatgagtttcctttctgtgtccatctggttagttgggagaaggaaaacgtttctagtgaggccctggaagctgctcgtattgcttgcaacaagtacatggccaaatttgctggaaaggatgctttccacttgagagtcagggtgcacccattccatgttcttaggattaacaagatgctttcgtgtgctggagctgataggctccaa

SEQ ID NO: 15264 - DNA, 225 bp, Glycine max
  Clone ID: LIB3040-021-Q1-E1-F5
gagcaacatggtgaagctggtggagagatttacttgccagaagcttacgttagaaccaagaggactacttaatggagcaaatcagttggaagaacttgtagctagcttcccaactggcttatctgagtgtggagaagcattatcaagccttaggagtaggagaacgagtactgtttgtgatgaatgtctatggtttaagacatctgtctttagtcaccttgtgtg

SEQ ID NO: 15265 - DNA, 62 bp, Glycine max
  Clone ID: LIB3040-021-Q1-E1-F6
gtgctttgttgtggttgttaaggtttgattcgacaggtttagacgatcttacagcgacgcac

SEQ ID NO: 15266 - DNA, 366 bp, Glycine max
  Clone ID: LIB3040-021-Q1-E1-F8
gacaacacaacagagaaagaaaagagtaagagtatgggaggctcatggtcatggcagctcacatgtgccctcttgctactcttctccgccgtagtcaccgccactgaccacattgtgggtgcgaatcgtggctggaaccctggctttaactacactctttgggccaacaaccacactttctatgttggcgatcttatctcattcaggtaccaaaagaaccaatacaatgtgtttgaggtgaaccaaactgggtatgacaactgcactacagaaggggcagtggggaattggagcagtgggaaggatttcataccccttaacaaggccaagagatattacttcatttgtggcaatggccaatgcttc

SEQ ID NO: 15267 - DNA, 321 bp, Glycine max
  Clone ID: LIB3040-021-Q1-E1-F9
gacgctttacgatttctctttttttgttttttgttgcgtgtgttagggttttaaggaagcatgggaaaggttcaggtgagtgacaaggaagaattctctcaaatggagaacaacgatttcagtgattcgcagttagttcatcacttcagaggtgtgcttgttgcagtgacaacgggtgatcgagagaattacgatgagctcgttggttatttgcaaccgaagaaacatcttaatcctgatgaggttgctatacttgtgacaactttgaaagcgctttctggagcagtgtcctatatagattctgttcatcatgaatccctg

SEQ ID NO: 15268 - DNA, 168 bp, Glycine max
  Clone ID: LIB3040-021-Q1-E1-G1
gacaccatcgactactcttcttagttccagcacaataagctcttcatttctcccagactttcttttccttcaccagcaatgtcagcaggagttcacacttttgttcttcccggacctcatgcagtcccctatgatcactttccatgccaccttctgggtccgtctctt

SEQ ID NO: 15269 - DNA, 347 bp, Glycine max
  Clone ID: LIB3040-021-Q1-E1-G10
aaagagacccggaaatggtgggaaccgcttttgggaatccattgggcttggatttaagactcccagggaagccatcgaaagaacctacattgacaacaactgccccttcactggcaatgtttccatccgtggccgtatcttggctggaacatgtcacagtgctaagatgaacaggaccattattgttaggacgaattatctccattttatcaagaagtaccagaagtacgagaaaaggcactccaacattcctgctcatatatcacctgctttccgtgtgaacgaatgagatcacgttattattggtcaatgcatgccactttctaagactgtgacgttcactgtgt

SEQ ID NO: 15270 - DNA, 330 bp, Glycine max
  Clone ID: LIB3040-021-Q1-E1-G11
aaagggacacttaagggaaaaatacccggcaaaggttggaaacgcttttggaaatccattgggcttggatttaagactcccattgaatccatctaaagaacctacattgacaataagtgccccttcactggcaatgtttccatccgtggccgtatcttggctggaacatgtcacagtgctaagatgaacaggactattattgttaggacgaattatctccactttatcaagaattaccacaggtacgacaaaaggcattccaacattcctgctcatacatcaactgctttccatgtgaacgaacgagatcacgttactattggtcaatgc

SEQ ID NO: 15271 - DNA, 363 bp, Glycine max
  Clone ID: LIB3040-021-Q1-E1-G12
ggcggcaaaagaacaacaaaaggggcttgttggctccctttggattccccggctttcaaatacacaccacaaaaccccccttttttttcaaaaaccctccgagaaaaaccagatgggtgaaaagcaccacaaccatccaccgccaccggttcaggcacctccggcaggtccacaaccgccaaacctagcactttcaagaggccccgtttggcatccacctgaacaactctcgcagcttcactattgcatccactcaaatccttcatggccggtggcaattctactgggttttcagcactacattgtgatgcttggaacaacggttctgattgcaaccacactggttcctgcaatgggtgggga

SEQ ID NO: 15272 - DNA, 383 bp, Glycine max
  Clone ID: LIB3040-021-Q1-E1-G2
gaagaagaactagtctaagcagaaatggcctcttcagtgatggcatctgtggccctcaaacctgcccctttcactgttgagaagtcctcagttagaggccttccctccctctcaaggaactcctcttcattcagagttgtggccagtggtggcaagaagatcaagactgacaagccttatggaattaatggtggcatggctttgagggaaggagttgatgcatctggcaggaaaggaaagggaaagggcgtttaccagtttgtagacaaatacggtgctaatgtcgatggttacagtcctatctacgacaccaaggactggtctccaaccggtgatgtccaccctggcggtacgactggcctggctatctgggctgtgactct

SEQ ID NO: 15273 - DNA, 393 bp, Glycine max
  Clone ID: LIB3040-021-Q1-E1-G3
gatttcgcttcttttcctaacctaaaccctactcattctccatacctcaacgaagaggttaaagagacggcaacactttgctgtccgccttgaccgagcagagcttcgtcttggccctcgattttgccctaaagtactctcagtcacaacagacaccgtcgtcgtcgtcgtcgtcatcaatggcaccgaagcagaccaaggctgagaagaagatcgcttacgatgcgaagctgtgcgacctaatggaggagtacggccagatcctcgttgtgaactccgataacgtgggatcgaaccagctccagaacattcgcaagggtctccgtggcgactccgtcgtcctcatgggggaagaacaccatgatgaagcgctcagtcaggatgcacgctgag

SEQ ID NO: 15274 - DNA, 125 bp, Glycine max
  Clone ID: LIB3040-021-Q1-E1-G5
ggatatcagaagcgcagacctacgatttcggccgtttgctccccagggaaagaagcagggtgtttcttttgaaatcggctacaatagatgtcaggtgaagacgtagctgttgcagttgatgcacc

SEQ ID NO: 15275 - DNA, 175 bp, Glycine max
  Clone ID: LIB3040-021-Q1-E1-G8
gatcccataaaaaacacaagcaaaaaaaaaaaaaaaaaaaaaacaaaaaaagcggccgcccaaagaagaagccggtttcaaggtccgtcaaagccggtctccaattccccgtcggaagacatggccgttatttgaacaacggaaggtacgctcagcgtgtccgtaccggtgctcc

SEQ ID NO: 15276 - DNA, 317 bp, Glycine max
  Clone ID: LIB3040-021-Q1-E1-G9
gagcgaaacagagagtgatttcagtgagtgatcggtgttcacttgatctcatcataatcgtcagcgtcaattgaagaagatgccgatcagaaacatcgccgtcggaaggcctgaagaggcgactcaccccgacacgttgaaggcggctttggctgagttcatctcaaccttcatcttcgtgttcgccggctcaggctccggcatcgcctacaacaagctcaccgacaacggcgctgccacccctgccggcctcatctccgcctccatcgcccatgcattcgccctcttcgtcgccgtctccgtcggcgccaacatct

SEQ ID NO: 15277 - DNA, 354 bp, Glycine max
  Clone ID: LIB3040-021-Q1-E1-H1
gaggcatggattcgttaccacctgcaaaacggcgtcgtgagagcaaagacggcgagactgaagcttcaacgttgtcaccggttgtgatcttcgctcacggtgccggtgctccttcctcttctgattggatgcaaagatggaagaacatgataaaggaggcactgcgcgctgtcgatgttgtcacttttgactatccttacatgtctgcgaaaaagaaggcccctcctaaggcggaaaaactggtggagtttcactcacattttgtcaaggaacctgcaactaattaccctggccatcccctgatacttccacgcaaatcactgggttcacgagttcgctgcctggtggccaccc

SEQ ID NO: 15278 - DNA, 258 bp, Glycine max
  Clone ID: LIB3040-021-Q1-E1-H10
ggcccaaattttttcatagcattttcagaggaacaatggcgggtagggtttcgacgtgcttcttcttcgtgtttgctctttctctccttcttccttttcagatctccgctgaggaatcatcggagaaagagttcgtactcacattggatcactctaactttcacgacactgtcagcaagcacgatttcatcgtcgtcgagttctacgctccatggtgtggccactgtaagaagcttgctcccgagtatgagaaagctg

SEQ ID NO: 15279 - DNA, 72 bp, Glycine max
  Clone ID: LIB3040-021-Q1-E1-H11
ccaacgcgtccgcccacgcgtccgcccacgcgtccgcccacgcgtccgcccacgcgtccgcccacgcgtccg

SEQ ID NO: 15280 - DNA, 329 bp, Glycine max
  Clone ID: LIB3040-021-Q1-E1-H12
gagggttacacgccgtcgtcgctgtttttgtgtgtcgcttcttcgtaggtgcagctgcaatggtgaagggacgccaaggagaacgtgtcagactctacgtgaggggtacaatccttggatacaaaaggtccaagtcaaaccagtatccaaatacatccctgatccaaattgagggtgtgaatgccaaagaagaagtagcatggtatgctggcaagaaaatggcctatatctacaaggctaatgtgaagaagaatggaagccattaccgctgcatatggggcaaggttacaaggcctcatggtaacagtggtattgtccgtgcaaaattc

SEQ ID NO: 15281 - DNA, 331 bp, Glycine max
  Clone ID: LIB3040-021-Q1-E1-H2
tcatatctaataaactcattttttattattaaatttataattttactcatgaatgtttttcactatgtctaaggatccttctgctccaaaagcaaaagctcaggccatcaccgagtaatgctcatcagcacccgttgtcttcaacttcataattttgttaaatcgccaacaatttgaattggtaaataagaaagagtttaatgtcatataaaataattttatattattatttaatgataaattatcatttgaattattttaaaatttaataaatttatcctacattataaattgtaatcaaatacaaaatgtgtaaacaaatttacaccac

SEQ ID NO: 15282 - DNA, 291 bp, Glycine max
  Clone ID: LIB3040-021-Q1-E1-H3
gacaacacaacgcaacacaacgcgcactctctcttttctctcttaacacaaaaaccctatcgttcttcgcggtttcgccgattctcgccatgccgaaagccaaatccgacgccaaagccgccgatagcaggttgaagcggaagggcgctggtgctgggaggaagcaatcgaggaaagctgctaaggaccctaacaagccgaagagacctgcaagcgctttcttcgttttcatgtccgagttcagagagcagttcaagaacgatcatcataacaacaaatccgtcgctgttg

SEQ ID NO: 15283 - DNA, 341 bp, Glycine max
  Clone ID: LIB3040-021-Q1-E1-H5
gggatggaatcctaagacttcactttgggacctgcttgaatccactctgacatatcagcacaggacatatgctgaagccgttaagaaagtcattgcaaaacccctcgcaagttaagcttttacagtgatggtgatgtgctacctttgagaaggggtgttcttgcccaagtgttctgccatattttactggttggttttatataaaatcgcaaattttcctccttttggtttcgttagccagtaggcaatatagcccacataagccccaatgccttggtgtatgttcctggagaagtacgaatttatatatagggcaatctgtgctgctatgtaattttaat

SEQ ID NO: 15284 - DNA, 380 bp, Glycine max
  Clone ID: LIB3040-021-Q1-E1-H6
ggtagcaatagcatactcttactctgattcgttagtgaagaaaaatggcaacaatcatcgccggcaccccaactacatcaatcactcgcacaggtcatgtgctcaaacgacctgttggggcctcatcctctaccgttcttggattgccagcaatggccaaggcggggagagtgaggtgctccatggaggaaaagccttcaagcagctcaaacctaaggatgggggcatccttgttagcagctgcagctgccgcaaccatgtcaagcccagcagccatggctttggttgatgagagactcagcactgaaggaactgggcttccctttgggcttagcaacaaccttcttggttggatcctgtttggtgtccttggtctcata

SEQ ID NO: 15285 - DNA, 389 bp, Glycine max
  Clone ID: LIB3040-021-Q1-E1-H8
gacagcactgcactcttcgcaacacaacaaaaaaagacaacccagagagcgcgtcttaataaacgctcttctctgaaaacccccatttcttttcttctttcttcttctctttcgcttcttcgatcttcgatcctcgtcgctgaaaatgagagagtgcatttcaatccacatcggccaggccgggattcaggttggaaacgcctgctgggagctttactgcctcgaacacggcattcagcctgatgggcagatgccaagtgacaagaccgttggtggaggtgatgatgctttcaacaccttcttcagtgaaactggggcaggaaagcacgtgccccgtgagatttttgtatatcttgagcccactgtgattgatgaggttaagactggga

SEQ ID NO: 15286 - DNA, 157 bp, Glycine max
  Clone ID: LIB3040-021-Q1-E1-H9
gttgggaacttaagatattcttgctgcataatacatgacatcattgattatgcataacatacagttcttgtatttctgtcccctatactgtaaatctgtaatctagatatgattttcattcaatttgaagaatttgaagttgttaagttgggatttc

SEQ ID NO: 15287 - DNA, 245 bp, Glycine max
  Clone ID: LIB3040-022-Q1-E1-A1
gattgcattgtggtgaatgtttgagtgcagaaggtaaaaaagaaaatggtggtgaagattcgattggcaacgctcgggtgccggaaccacccattcgatcgtgtggttgttacggatagtggaacggcaagagatggcaagcaacttgaagttttaggtttctacaagcccgtcgcaggcaaggatgatgacaaaagaatgagcctcagactggagagaatcaagtagtggcgttccggttggag

SEQ ID NO: 15288 - DNA, 398 bp, Glycine max
  Clone ID: LIB3040-019-Q1-E1-G11
ggagttggaataccaattttggcgctctctctgtatttctcttccttctctttcatttcccctctcttgttggttcaaaattatactctctctaagttttaaccttatgaatatggatatgtgccaaaatgtatcagtttccggtgagtgccaacaagtgcaggtttttgccccttcttgctcaagcagccttgatgacctcttctctgctcagaacacggaagtggatgttgagttggagtggctttcagagtttgttgaagactgtttttcaagccctccaagctgtgtcttggtacctattggtgtcaagactacaagcacaagcaccaacctttcttcaggcacattgaagagaccccaacaacaaaatgagtcacctttgcaaaactttgctg

SEQ ID NO: 15289 - DNA, 383 bp, Glycine max
  Clone ID: LIB3040-017-Q1-E1-E9
gaagggagaattaggtttttagggtttacaccgagcagcgacacctccctcccgcagtagccatggttctcaaaactgaactatgccgattcagtggtgccaagatctaccccggaaagggcatcagatttgttcgtggtgattctcaggttttcctgtttgccaactcaaaatgtaagcggtatttccacaaccgcctgaagccctcaaagctcacctggactgctatgtacagaaagcaacacaaaaaggacattgctcaagaagctgtgaagaagaggagacgcgctgccaaaaagccttactctaggtccattgttggtgccactctggaagttatccagaaaaagagagctgagaagccagaagttcgagatgcagct

SEQ ID NO: 15290 - DNA, 239 bp, Glycine max
  Clone ID: LIB3040-017-Q1-E1-F10
ggtctgcgcctgatttctcagttctctcacacactcattcggtgctccgaatctcagattctagggttagggttcccaatttctccaccgatcagaaaatgagttcaactggtggttctaccaagggcggaaggggcaagcccaaagcctccaaatccgtttcaagatcgcagaaagctggtctccaattccccgttggaagaatccctcgaatccttaaaggtgggaaatacgccgaa

SEQ ID NO: 15291 - DNA, 392 bp, Glycine max
  Clone ID: LIB3040-017-Q1-E1-F11
gatacctaaaaattgtaccgatatggcttcacttgtgtgtctccttttttccttgcatttcatggttatcatgtcaggttccttaccagcaaatagtgaagtgtttacaaaagagtctcctatgtctctatccacaaaacccgtggaaagactcacccaactccacttttatttccataacaacaaaatgggggaacacccgactgctatgaaaattgttgagcctcctaaggcgtccatttctggttttgggactatttacatgatggatgaccctctaaccgaaggaccaagtccaacttcaaagcttgttggaagatgtcagggaatatatgctgaggcttcgcaacatgaacctgcgatactcatggtaacgaatttgttcttcactg

SEQ ID NO: 15292 - DNA, 378 bp, Glycine max
  Clone ID: LIB3040-017-Q1-E1-F2
gatggaggcatagacggagacgcagtcatgaacaggacagagttcagattcttattcagagcaaaatttggggcagcaaggaactaaatcctctatcagcattagtttacctctgcgttctgtctctggtgcaatccagtatagattgttgggtcagttatggcagcgttgatttccaaaagaatcctacgttgttcttcttggtcattgcattcactaggacgatgttactttgattcacctagtgctgggtttgcctctatttataaaccacgtgatgtatgcaacagtttatctggggagagaatgtttcctgcagatcgttctttggtcaggtctatggtccgacagttttctacttctattttaactcctgga

SEQ ID NO: 15293 - DNA, 367 bp, Glycine max
  Clone ID: LIB3040-017-Q1-E1-F3
ggtggcacgtgccacgtacacgtgaaaaagaccctgggcctttcggccctccccaatccttcccggcaacggcggaaacttttcctaatcagtcccacagtgaagttgatcggagcccacatacattcaggcacggacccaacggtttgaacagaaataagaataatatgtgttggttgactttgaggggatccagtggatacagatttcaaaacaattgaggcaagcataatgttcaggcttggacaactccaatctgagggtggcatcctacaaagaatggtatacaagaattaagaacagcaccgacgcggttcctatttccagcgtcttttgaaggtaaggagggatttaaggctgctgcaat

SEQ ID NO: 15294 - DNA, 373 bp, Glycine max
  Clone ID: LIB3040-017-Q1-E1-F4
tattcaaagttttggaatgctaatccctctgcagaaaagcaggtcaagttgtctagcaaagctggcatgcttttgctgtacactcctgcttttcttgctggccttgcatccttctggatctttcctcatcaaggcctcagatccaccctccttcagtctgcagttaccctgcatttcttcaagagggtctttgaggttgtgtttattcacaaatatagtggtgccatgcttcttgattctgcaatccccatcactctgagttatttcctatcaactgcaactatgatctatgctcaacacttaacacaagggcttccagaaccaccaatcgatctgttgtatcctggcattgttttgtttgtggtgggcatca

SEQ ID NO: 15295 - DNA, 386 bp, Glycine max
  Clone ID: LIB3040-017-Q1-E1-F5
gacagctgactcaaaaatgagaatcttgagttacctttacattcttctcctttttcatcaacaccaccaccattattcaagcgagcttaaatagggaaagaggagcaagaccttttcagtacctctaaatccagtttttgcaattccatttgtgagttattggaatttggaagtagctagggagtgtctcaaattaatggcatccatgtctcttattcttctttggttcctaatgtttgctggcgaaatgatgtcaatgggaaatagtttacacaaggggcacatgataatggaagaggaggaatgttgggattgtttgaagtgatgggtgctcttctggaagacccttacagggcccaaacacatccacagccatgtactgatac

SEQ ID NO: 15296 - DNA, 395 bp, Glycine max
  Clone ID: LIB3040-017-Q1-E1-F7
ggttgtgaatcaacataaatattccgttttgcgtttctctgcctaaaaggattgaaagatgggtcaagcactaggttgctatcaagttgatcagtcaaatgtggctatcaaggagcattttggaaaatttgatgatgtcctagaacctggatgtcattgcctgccttggtgtcttgggtaccagattgctggtagtttgtcactgcgtgtgcagcaacttgatgttcgatgtgagacgaaaaccaaggacaatgtctttgtcactgtggttgcatctgtgcaataccgagctgtgtctgagaaagcatctgatgcattctataggcttaccaacacaagggagcagatccaatcatatgtttttgatgtcatcagggccagtgtaccatagttgg

SEQ ID NO: 15297 - DNA, 292 bp, Glycine max
  Clone ID: LIB3040-017-Q1-E1-F8
gaccagaaaactgtggacgctgcagtgttaaaagccattgagagtgtgccagacttgaagtcctatttgggtgccaggttttctctgaaggccggggtgaaaccacatgagctagtcttctagaggaaagaggggtgttactcttgtttttgatatcgtgtttgtttattgatgctggttcttatagttgccctcttataacattcttgttagcagacaaatgaagaacctaaaattttgttagtcaaattgtgacgcgtgctctttacattttgttgattgtgtgaatttc

SEQ ID NO: 15298 - DNA, 175 bp, Glycine max
  Clone ID: LIB3040-017-Q1-E1-F9
gactattgctttccaattagctgtttttgcattaattgctatttcatttattttattgattagtgtacctgttgtatttgcttctcctgaaggttggtcgaataacaaaaatgttgtattttccggtacatcattatggattggattagtgtttctcgtgggtattcttaattct

SEQ ID NO: 15299 - DNA, 370 bp, Glycine max
  Clone ID: LIB3040-017-Q1-E1-G1
gattgtagaactgaacaagggtttctctttctctttctctgtctgcttcttcactttctctcgtttcaatcgaaaaaaatcatgggcagaaaattcttcgtcggtggcaactggaaatgcaatgggaccactgaggaggtgaagaagattgttactactttaaatgaagctaaagtccctggagaagatgttgtagaagttgttgtgagccctccttttgtgttccttccttttgtaaaaagtttgctgcgccctgattttcatgtctcggcccaaaattgttgggttcgcaaaggtggtgcttatactggagaagttagtgctgaaatgcttgttaatttgggaattccttgggttattattggtcact

SEQ ID NO: 15300 - DNA, 390 bp, Glycine max
  Clone ID: LIB3040-017-Q1-E1-G10
ggtgtattaggtttttttgcttcttctcatttgctaatagagagggacatgaagaagtaagatagggcatggggtgttggtggcacatataaaacggccaaaagcaatgcttaatttctcttatgctcttcagagtcggcttcattctgtgattcctccctccttttctcttcgcttggttcaagttgttacagtgttaaatttgaggggagtcatatttcttggttctgaaggccaccgttatggctgtacatacagaattccctcttattacttactcacaagagattgtagatggacagcctatttttgtctcttcaaactgtcttcctatcaaggctttgaaatttgaacctgcaggtcattctttccattctgctgcacttaaac

SEQ ID NO: 15301 - DNA, 81 bp, Glycine max; identical to SEQ ID NO: 14211
  Clone ID: LIB3040-017-Q1-E1-G11

SEQ ID NO: 15302 - DNA, 334 bp, Glycine max
  Clone ID: LIB3040-017-Q1-E1-G12
gatgtgatagtattatcattcattcgcatcggtctcacttctctctccacctataccctaactcacgacactgtacccctctcgaatccgtcatgacacgaggaaagtccaagaccgaatctaagacagcagattgcaaacttgctgtgaataataagggagccgcgaacaatgctaagaaactcgccggcaacgggaatgcagcgaaagatgctaacaagcgaaagaggcctccaagtgcattcttcgttttcatggaggaattcacgaatgtattcaacaaagaacatcctgaaaacaaatcagtgtctgctgttggcaaaactgctggagc

SEQ ID NO: 15303 - DNA, 87 bp, Glycine max
  Clone ID: LIB3040-017-Q1-E1-G4
gatcaaattaatttttgatatctttcaaggctttgccttgatttgagtggttgtgtgttatggattttaatatagattatggttctg

SEQ ID NO: 15304 - DNA, 343 bp, Glycine max
  Clone ID: LIB3040-017-Q1-E1-G5
ggtgtgagttgagtctgtgatgataatgatgatgatgatgtgttccatgtggatgtgggttgtccttgtggccattgctggtgcccttttagtcctaagatctatcctcaagaatgtaaattggtggctctatgaatccaaattgggtgtgaagcagtactctttgccaccaggtgacatgggatggcccttcattggcaacatgtggtcctttcccagtgctttcaagttcaaaggacccggatcccttaacctctcccttggccccaagattggaagaactggaatgttcaagaccaagatgtttgggaatccaagtataaatgggacaacacctggaata

SEQ ID NO: 15305 - DNA, 394 bp, Glycine max
  Clone ID: LIB3040-017-Q1-E1-G6
ggaagagtgaagagaatggctcccaagggtttaacctttctggctgtgttaatatgcgtttcagcactgtcactgagtccttctgttgcgggggaagggcaaaataatggccttgttatgaacttctacaaggaatcatgccctcaggctgaagacatcatcacagaacaagtcaagcttctctacaagcgccacaagaacactgctttctcctggctcaggaacatcttccatgactgtgctgttcagagttgtggtgcttcactgttgctggactccacaagaaggagcttgtctgagaaggaaacagatagaagctttgggttgagaaatttcaggtacattgagaccatcaaagaagctttggaaagagaatgccctggagttgtttcaa

SEQ ID NO: 15306 - DNA, 291 bp, Glycine max
  Clone ID: LIB3040-017-Q1-E1-G7
gcttgcaggcgaaagagaagatggccaccgttccaagggcaactcctgttggaaattgtgaagaaaaacaactcctttttggtcaagcaattccgaaaggggaaccaaaacgtctaattctaaaaagagagcacaaatctctataaactcaattcgctcaagtataccgggttttgaaacacaaaaactgttacagtgacaacccaaggggaaaattaagggctgttttttgggacaacaaagaccaagaaaccaaacaaacccgctggaatgcctcacaaatctctgtat

SEQ ID NO: 15307 - DNA, 398 bp, Glycine max
  unsure (1)..(398): unsure at all n locations
  Clone ID: LIB3040-017-Q1-E1-G9
gatatcgtcgacgaatcgaactgttcagaaaccaaactagtcgaagaggaagaggaagacttacagaagcttctagtccctgacttgcagaatcttcctctcactcctgcttccgccgttgaaaccaactttgccatttacttcgccctagatttcatgaagccagctcacgatcagtacgtttaccgccacgccaatggcttgtgtgtgattgggttggctccttcccacattgctttcaatgatgaaggtggaatcacagccgttgatttcaatgttggaaagtctgatcgcagcgggataaaagtcactggaaagcggaagaagaacgcacaacactttgagtccaatacggctctgtgtaaaatttctaccanaaatgatacttatattgtgag

SEQ ID NO: 15308 - DNA, 313 bp, Glycine max
  Clone ID: LIB3040-017-Q1-E1-H1
ggtggttcttgtttgcgagatagaagcgtaagcagcggttagcctaacctcgtcttcctctctacgaatttcagctatggccgacgaagctgtggctgttccagatcctacccagatcgatgtcaagctctttaaccgctggagcttcgaggatattgaggttactgacatttcactggctgattacattggagttgcggcatccaagcacgccacatatgttcctcacaccgccggaaggtactccgtgaagcggttcatgaaggcgcagtagcccattgttgagaggctcaccacctctcccatgatgcac

SEQ ID NO: 15309 - DNA, 324 bp, Glycine max
  Clone ID: LIB3040-017-Q1-E1-H12
ggaacctttgcattctattcattcaagattcagcaagtgcgttttggaagcagagaccgaaatacttcgagatggcccgtacaaagcaaactgctcgtaagtcaactggaggaaaagctcccaggaagcagcttgcaaccaaggctgcacgtaagtctgcaccaacaactggtggtgtgaagaagcctcatcgttatcgccctggaactgttgctcttcgtgagattaggaaataccagaagagcactgagctcctaatcatgaagcttcctttccagaggttggttcgtgaaattgcccaggatttcaagactgatctgcgtt

SEQ ID NO: 15310 - DNA, 381 bp, Glycine max
  Clone ID: LIB3040-017-Q1-E1-H2
ggttttaggttttcttagatagagttgttaccatttgctcccagtacagagcttaaccgagcttcacaaagatgaatcgggaaaagttgatgaagatggccggttcggttagaactgggggaaagggtaccatgagaagaaagaagaaggctgtccacaagacaacaaccacagatgacaaaaggcttcagagcaccctgaagagaataggggtgaatgccatcccggctattgaggaggtcaatatctttaaggatgacgtagttatccagtttctaaatcccaaagttcaagcatccattgctgctaatacttgggttgtcagtggttctccacaaacaaagaagttgcaagatatactccctagcattatccaccaat

SEQ ID NO: 15311 - DNA, 339 bp, Glycine max
  Clone ID: LIB3040-017-Q1-E1-H3
ggtgttaagtgtgaatccctttccctctctactcttcactttccatttccatttttttctggttttctttctccatggcctccgccgccgccgtcgccgccgaagacgacgctgtcaacggctccactcggtcggagatgtactcggaaaacctcgccggcactgtcgacgcctacgaccgacacgtgttcctctgctacaagagctacgtgtcctggccggcacgcatcgaggcatccgacgccgatcccttccccaagcgcgtcgccgccaccttcaaagcccgcaagaacgacttgcccctcaagacgaaaatcacggtgtgcgaggcgcgcgaag

SEQ ID NO: 15312 - DNA, 353 bp, Glycine max
  Clone ID: LIB3040-017-Q1-E1-H4
ggaattctctcgagtcgaggttgcgtttggactttggagaagaagaaaatggcggagtcgaattacgagtacccaaggctacggcggccggaaatagtcacaatcctagcgcagttgcagatcgcgaacgtgaccgagcaggacttcaccaaccctaaccctgatttcatctccgatctctacactcgcgtcctcattcatctcgacattctcctcgaggaagacaacgagcaactcgagttccacgccctagagcatcttgaaaaccctgatttccacctggattccgttcgcgccgtgaaactctacaaccagatcaacgaggttctcacgacactcgagtgtccgcgcaa

SEQ ID NO: 15313 - DNA, 141 bp, Glycine max
  Clone ID: LIB3040-017-Q1-E1-H6
tcatgcatgctccaatgcttttcattttctctctctctttttcactcttcttctagcttcttgtttcatgcaagttatatgcaactggttctgttatatgcatactatctatatcccagctgcactttattttatattttc

SEQ ID NO: 15314 - DNA, 343 bp, Glycine max
  unsure (1)..(343): unsure at all n locations
  Clone ID: LIB3040-017-Q1-E1-H7
gcggggttttggtgttgagggaaaaaagtggcatgtgggctgcagcaacaaaaccattcgtccaattccaattccgcagacacactactacttctctccttccgattcttctgatggcaaaccaagcttcactctccttctcttcggggtctccagttcacgcgcctctgaagcgcgtgggcacgcacaacggaagcttccactgcgacgaagcccttggctgcttcatgattcgcctcacgaacanattcaacagccccgaaatcgttcgctcccgagaccctcaggtgttggaggatcttgatgctgttcttgatgttgggggagtgtatgaccctgctcg

SEQ ID NO: 15315 - DNA, 382 bp, Glycine max
  Clone ID: LIB3040-017-Q1-E1-H8
gacaatcgaacgggaaaaggcgtcttcataaacgccgcccaaaacttctcatacccttttattcattccattcgtttctagggttttcttttctttgccgagaaaatgagagagtgcatttcgatccacattggccaggccggtatccaggttggaaacgcctgctgggaactctattgccttgaacacggcattcagcccgatggacagatgccgagtgacaagaccgttggcggaggagacgacgccttcaacacatttttcagcgagaccggcgccggaaagcacgtgccccgcgccgtcttcgtggatcttgaacccaccgtgatcgacgaagtccgaaccggtgcgtaccggcagctcttccacccggagcagctga

SEQ ID NO: 15316 - DNA, 248 bp, Glycine max
  unsure (1)..(248): unsure at all n locations
  Clone ID: LIB3040-018-Q1-E1-A1
gcttcttcagccatttagctccatagctgcagcattagggtttttcatctgcttcaatggggaagggaacagggagttttggtaagagaaggaacaagactcacactctctgtgtgaggtgtggccgccgcagcttccatctccagaagagtcgttgcgccgcttgtgctttncccgccgcacgcactaagaaatataactggagcgtcaaggcaatccgcagaaaagaccaccggaactggcaagat

SEQ ID NO: 15317 - DNA, 314 bp, Glycine max
  Clone ID: LIB3040-018-Q1-E1-A10
gtgttggcagaggattgatgggctatcttggaaataagggatccatctcaattagtatgtctgtgcacgaaactagcttttgctttatctgtagccatttaacctcaggacagaaagaaggtgatgaactaagaagaaattctgatgtgatggagattcttaagaagacaaggtttcctcgtgttcaaggtgtggacaatgagaagtctccacagacaatccttgagcatgatcgaatcatatggcttggagatttgaattaccggattgcactctcctaccgatctgctaaagcactcgttgagatgcaaact

SEQ ID NO: 15318 - DNA, 423 bp, Glycine max
  unsure (1)..(423): unsure at all n locations
  Clone ID: LIB3040-018-Q1-E1-A2
gaaacctatcttagtgaggaagaagagatgatgatgatggaagagtcagaaatggaaatagagtcacaggtgttcgttgctcacgagattgacttggattacgagttcgacgcagttcgattcttcgatttcggtgcacaagaaactcccgctcaagctcgccaagccgaactctggtttcattccgcccggcagctatcctccttctccttttgtggcgaagttagtggcgagagaggacgacgttagggaatgcgcaaccaccgttcacgctgccaattctaatgttccgtccgggattggattttctcgcaccgtttttcaacatgacggttcanaaaganggggtgggagtgggaacatttctgccttgctgagtggtgttccgcgggatgttaatatgcaactgttacacgtaacctc

SEQ ID NO: 15319 - DNA, 163 bp, Glycine max
  unsure (1)..(163): unsure at all n locations
  Clone ID: LIB3040-018-Q1-E1-A3
gaggtttttanggtttacaccgaggagacacaccttcagcagcagcagccatggttctcaaaaccgaactatgccgattcagcggtgccaagatctacccagggaaaaggcatcagattgttcgtggtgattctcaggttttcctgtntgctaactcgaaatg

SEQ ID NO: 15320 - DNA, 294 bp, Glycine max
  Clone ID: LIB3040-018-Q1-E1-A6
cacgggactcacgacttcagtacactcataatacatcagcacaaatcaaagctcatccttgagttatgaaatggcagcagcttcatccatggctctctcatccccatccttggctggcaatcgccgtgaagctgggcccatcatccccagaatttggaatggtgagcatgaagaagaccgtcaccaagcaggtctcctcaagaagcccatggtacggcccagaccgactcaagtacttgggcccattctctggcgaacccccgttctaactaacccgtgaatttccaagcgaat

SEQ ID NO: 15321 - DNA, 274 bp, Glycine max
  Clone ID: LIB3040-018-Q1-E1-A7
gacagctcttggctttagcaaattccaagtcccaattcccaattcgaaacccttagtcctttcaaagaaccaaattgagtgatcgtgatggcaccaaaggcagagaagaagccagcggagaagaagcccgcggaggagaagaagtcgacggtgggagacaaggctccggcggagaagaagccaaaggccggaaagaagcttccgaaggagggatgcgccggcggagaaaggaagaagatgaagagaaacaagaagagcgtggagacatacaaga

SEQ ID NO: 15322 - DNA, 240 bp, Glycine max
  Clone ID: LIB3040-018-Q1-E1-A8
ataaccaaaatggtgtataaacacctaaaatcataagcaagcaaaaaaatgaacatctatacagaccaatgacctttttaggtaaaaataaatttcatgtttgaaacaaaccggtgtgaagtctgaaaaaaattattgtgaataagcttctcgggtccttcaagcttaataagatcgtgttcaaatgaaacacataaatgcaacctagtgaagccttataccaaaaaaggaacaatatac

SEQ ID NO: 15323 - DNA, 280 bp, Glycine max
  Clone ID: LIB3040-018-Q1-E1-A9
ggtttttgtttcccatagcatagaagaagcagaaagagaagcattagcaaaagcaagaagaactagtctaagcagaaatggcctcttcagtgatggcatctgtggccctcaaacctgcccctttcactgttgagaagtcctcagttagaggccttccctccctctcaaggaactcctcttcattcagagtcgtggccagtggtggcaagaagatcaagactgacaagccttatggaattaatggtggcatggctttgagggaaggagctgatgcatctgg

SEQ ID NO: 15324 - DNA, 229 bp, Glycine max
  Clone ID: LIB3040-018-Q1-E1-B1
gatttcaattcattttgaattgaaaccgcggagagtttgcagctgcatcatcgatcatcgtcacctcatggacggacacgattcacaagacccgaagcagagccctgctgacatgactgcctttgtgcaaaatcttctccagcagatgcaaaataggttccagacaatgtccgactccaatggttacaaagattgatgatatgggaattcgcataaatgatttggaaca

SEQ ID NO: 15325 - DNA, 381 bp, Glycine max
  Clone ID: LIB3040-018-Q1-E1-B10
ggcgtacacagcctcaacaaccctaacgcgtgcagagcagagagagacgcagccatggggcgaagacccgcgaggtgttataggcaaattaagaacaaaccataccccaagtcacggttttgccgtggtgttcctgatcccaagatcaggatttacgatgttggtatgaagaagaagggtgttgatgagtttcctttctgtgtccatctggttagttgggagaaggaaaacgtttctagtgaggccctggaagctgctcgtattgcttgcaacaagtacatggccaaatttgctggaaaggatgctttccacttgagagtcacggtgcacccattccatgttcttaggatcaacacgatgctttcgtgtgctggagctgat

SEQ ID NO: 15326 - DNA, 269 bp, Glycine max
  Clone ID: LIB3040-018-Q1-E1-B11
gattgtcctctgtattcttcttcttcttctcttactctctctgtaacaacaccaccatcaacaaccctttcaagccggcctaaaccccattacccaaaatctgtttttttttttattttttttcctgcaacactctttattggatcatcttgtatttcattcctcctttacaatttcctttcaaaaaaaattttaaaaaatattaaaaagtgctcttttttgtgaattttgacccatttggccaccgacagatttcgatcttctccgtg

SEQ ID NO: 15327 - DNA, 407 bp, Glycine max
  Clone ID: LIB3040-018-Q1-E1-B2
ggttcgtaaacgcaggggaatcgagtgcgtgagggtttgcagtgtgcagtgtgcagtgtgcagtgcacttggatgcatcaataacccccgattcaatttgggaccaagatcctggttcgcgatgaagaggtcatttccatgggaaaatcaaattgatgtctcttcttcttcttctccaaactcccttcgtcctaaccccctaactatccctaactcccccatagataccaagtcccaagatgcactcatcaggcgggcagaaatgtatcaggattacatgaaacagattccaatcccaaatcatcgaagcactatgattccatttacctcatggatgggaataggcagattcatgaaacagatatacggacagcctctgcattacctcagcaatattctcctcaagc

SEQ ID NO: 15328 - DNA, 350 bp, Glycine max
  unsure (1)..(350): unsure at all n locations
  Clone ID: LIB3040-018-Q1-E1-B3
gacttcacaactcaaactgcttcattgcataattgcagataagatcaacccttctaccttcagattcgcgggaagatggcatcacttcatgctaatgtgacatcagttgtttacaacagtggcaaccgtgtttctcaatcgaaatttgcaagctcttccttcttgtctgggttcgatgttgttggtcgtgcttcaagtgcttggaagaaggaacttgtcncatcttccatttccttggtgcctagagccaccctaacatttgatcccccaactaccaattcagacataaccaagcaaaagaagcacactcttgaacctgctttcccagaatttcctcctcctccctcaat

SEQ ID NO: 15329 - DNA, 424 bp, Glycine max
  unsure (1)..(424): unsure at all n locations
  Clone ID: LIB3040-018-Q1-E1-B4
ggtgcctctcgtctccctttgcacaaaccctaacacctaaaagccagaagaagcgaaatcgtaatcgcaatctagcggatatgaaggtcgtcgctgcatacttgctcgcagtgttgggagggaatccatctccttctgccgatgatatcaaaaacatcctcggcgcagttggagctgaggctgagcatgagttgattgagttgctcttgaccgaagtcaagggcanagacttcaatgagctacttgctagtggaagttaaaaaatttctgcagtggctggtggtggtgcagcggttgctgttgctgctgcaccagcgggaggtgctggtggcggtgctgcacctgctgccgaagcaaaagaagaaaagaaagtagaagaagaagaggaatctgatgatgatatgggtttcagtttgttcgacta

SEQ ID NO: 15330 - DNA, 143 bp, Glycine max
  Clone ID: LIB3040-018-Q1-E1-B5
gacatacagtcgcagcacaagtcacagaggttgtcggcggcgtgagaaagttggacatcaacctattcacagatgagaagggccacatacctgaactcttaagcgattctcaatgccgtcgtttcgccagcgtctaaatcctc

SEQ ID NO: 15331 - DNA, 384 bp, Glycine max
  Clone ID: LIB3040-018-Q1-E1-B6
gtgtgaaaaaaaaaaaaaaaaaaaaaaaaaaaaaaaaaaaaaaaaaaaaaaaaaaaaaaaaaaaaaaaaaaaaaaaaaaaaaaaaaaaaaaaaaaaaaaaaaaaacaaaaaaaaaaaaaaaaaaaaaaaaaaaaaaaccccccccccaaaaggtccaaacctaaatacccccgaaaagcaaaccaaaacccccccaaaaggccccccaaaaccaaatccaaggcccccccttaaaaaaccccctaacggaaaaacccccggcgtaacccaactaaacccccttaaaaaaaaccccccttccccaaaggggggaaaacccaaaaagccccccaccaatcccccccccaaaaaatgccccacccaaaatggcaaaaggaacccccc

SEQ ID NO: 15332 - DNA, 395 bp, Glycine max
  Clone ID: LIB3040-018-Q1-E1-B8
gagagtggtggagtgtgcagaagagcgtcgcagtcgcaaccctaatcagaagaagcgcagcttcaagcgagtgacagccaccagccatgggtcgtatgcacagccgcggtaagggtatatcctcttctgctttgccctacaaaaggacacctcctagctggctcaagatctcttcgcaagatgtcgaagaaaatatctgcaagtttgcgaagaaaggtttgaccccgtctcagattggtgtcattctcagagattctcacggtattgctcaggtcaatagcgtcactggcagcaaaatccttcgcatcctcaaagctcacggacttgcgcctgaaattccagaggacctgtaccatttgattaagaaggcagtttcaattaggaagcatcttgag

SEQ ID NO: 15333 - DNA, 403 bp, Glycine max
  unsure (1)..(403): unsure at all n locations
  Clone ID: LIB3040-018-Q1-E1-B9
ggattgaggaaggttangcgangaanggaaaaagaggacagaggttgcttgcgcaaatctagctaatctgggctttctgggacaaccagtagagaaagtaaaaggattgagattgagatttgagagaaagagaaagagaaagagaaagaagaggttaaacacacacaaaacagaagaagagaactctcccaccatgccatgcccaaaaccgtactacacaataaagcacaccaaccattcatttccttttgcccacatttactatcccacattatgtttccacagacaatcgcagtgccacagaaccaactaggcactccttcatgtccttagctagtttagttacctcacttctaactttcccccacaattattccctcccttcaacacantgcaccccttt

SEQ ID NO: 15334 - DNA, 347 bp, Glycine max
  Clone ID: LIB3040-018-Q1-E1-C12
ggccgaaaaccctaacaacacaggcgcagagcgtgattcattgacgaagatggtgcagcgtcccacctaacgcaagaagcaaaactatgccaccaaatccaaccaacaaagggtcgtcaaaaccccctggtgggaagctcgtttatcagaccaccaagaagagggccagcgggcccaagtgccccgtcactggcaagaggattcaggggattccacacttgaggcctgcagagtacaagagatcaaggttacccagaaaccgtaggactgtcaaccgtgcatatggcggagttttgtctggaagtgctgtcagggagaggattatccgagctttcttagttgaagag

SEQ ID NO: 15335 - DNA, 377 bp, Glycine max
  unsure (1)..(377): unsure at all n locations
  Clone ID: LIB3040-018-Q1-E1-C2
gacacttactagtagtaagcatggagtcctcaaagatctatgcttacctcttcctctgcatgatctttctctcttccgccactcccattctcggttgtggctactgtggcaaaccccccaaaaagcacaagcctggtaaaacaccaaaggacacccaaaacacccgttgttaagccaccagtcaccatcnctcccattaatgttcctcncgttgttcttccaccaatagtgaagcccccaggtattctccctccaattccaattattaacccagcaaccacaccagggaatggagggaacactccatgcccaccaccaaagtctcctgcgcaggctacgtgccccattgacacgctcaaacttggtgcctgtgtgga

SEQ ID NO: 15336 - DNA, 389 bp, Glycine max
  Clone ID: LIB3040-018-Q1-E1-C3
atcgtgcctatgcacaaggtcaatttcgacgccaagagcgagtacgagatgattcagaactacaaggtccttcaagatgtcttcaacaaactcaaaatcaccaagcacatcgaggtcagcaagctggtgaaaggaaggccactggataacctcgagttcatgcaatggatgaaacgatactgcgattctgtcgattccggccttcagtacaattataatcctctggagaggagagaggtttgcaaaggaggaagagaaacgagcaagaaatctgcaaactcccaaggctcaaccaagggtttctactgcacagagaactcaatcctcccataatgctcgaagaaatgaggtttccaatgcaaaccctacaaatcaggctgcaaaggttg

SEQ ID NO: 15337 - DNA, 374 bp, Glycine max
  Clone ID: LIB3040-018-Q1-E1-C4
gacaacaagaaattatcatcctagcacaagtttaataagagttatgacaaagaaagagatgaaagttattagagttgtgattatgatcctgattatgtttgacttctcacaagctaattacaatccttcatctatgcaaattgggtcaaattatggatctgatggacgattcgcttgtcaaatcaaatgtcagaaaaaatgtcaaaaatatctattacttccaccaggtggtattttttatataatatgttatcattcatgttttcggaaatggtgataaatgcccatcgatgttgctcaagattgtgtcactagttgtgtcctgaccaagccaattgacgtcaacattgatgttcgtggtcctacagatgaca

SEQ ID NO: 15338 - DNA, 429 bp, Glycine max
  Clone ID: LIB3040-018-Q1-E1-C6
ttcgttacagttggtgaaagaggcattgtacgcatatggaattccaaaggtgcaggttgcatctttgagcaaaaaacttcagatgttacagccggcatggatgaggatggctcacgtaagggtttcacttctgctgttatgcttgcctcagatcaaggattgctttgtgtaactgcagatcagcagtttctgttttactctctggacttcactgaacagttgttgcaattaaatctaaccaaaagacttgtgggatataatgaagagattgtagatatgaagtttattggggatgatgaaaaattccttgctcttgctacaaatcttgaacagattcgggtttatgacctttcatctatgtcatgttcgtatgtcttatctggtcacactgaaattgttctatgccttgactcctgtgtatcaagttct

SEQ ID NO: 15339 - DNA, 296 bp, Glycine max
  Clone ID: LIB3040-018-Q1-E1-C7
ggtgtgttcctcaactcaacacactcctttataattgcagcgtcgacaaaaaccctaactcctaacctttttttcttcctttcacctcttcagcagtcgttacagagactccataacccgaaaatgcctttcaagaggtacgttgagattggaagggttgctcagatcaactatggcaaagagtatgggaggctcgtggttattgtcgatgtcattgaccagaataaggctcttgttgatgctcctgacatggtgaggtccaaagtgaacttcaagagggctatcaccactgacat

SEQ ID NO: 15340 - DNA, 413 bp, Glycine max
  Clone ID: LIB3040-018-Q1-E1-C8
gactcaccacttcaaaacactcataacacaaagcacaaagcaaagctcatccttgagttaaaaaatggcagcagcttcttccatggctctctcatccccatccttggctggcaaggccgtgaagctgggcccatcagccccagaagtgggaagggtgagcatgaggaagaccgtcaccaagcaggtctcctcaggaagcccatggtacggcccagaccgagtcaagtacttgggcccattctctggcgagcccccgtcctacctaaccggtgagttcccaggcgactacggctgggacactgctgggctttccgcagacccagaaaccttcgccaagaaccgtgaactcgaagtgatccactccaggtgggccatgctcggagccttgggctgcgtcttcccggagttgctgt

SEQ ID NO: 15341 - DNA, 116 bp, Glycine max
  Clone ID: LIB3040-018-Q1-E1-C9
gttgtggccaagaattaggtgcctcgagttaggaggacgatagtctaagcatcttttctcacagggatttttgagtcagtttctgtttatatttattatatgcataattggtttct

SEQ ID NO: 15342 - DNA, 53 bp, Glycine max
  Clone ID: LIB3040-018-Q1-E1-D1
gagacctcaggtcaggcggggctacccgctgagtttaagcatatcaataagcc

SEQ ID NO: 15343 - DNA, 359 bp, Glycine max
  Clone ID: LIB3040-018-Q1-E1-D10
gatccttcgtccagctagcaccacgttcacctgaggcttccaaagcaatggcttcccttgcagcatccactgctgctgcttcccttggcatgtcagaaatgcttggaaaccccatcaacttcagtggtgccacaaggccagctccatctgcttctagtcctgcctccttcaagactgtggctcttttctccaaaaagaaggctacaccaacacctccaaaaaaagctgctgctgctgctcctgccaatgatgagcttgccaagtggtatggtcctgacagaaggatcttcttgcctgagggtctcttggaccgatccgaaatcccagagtacttgaccggaaaagtccctggagactat

SEQ ID NO: 15344 - DNA, 374 bp, Glycine max
  Clone ID: LIB3040-018-Q1-E1-D11
gatgttaagacttgagagtgagagagagagtgagagagtgagtgagatagagagagacgcttcgcaaatctcaatcgaatctcagaaaaatgagagaaatcatcggcattcacataggtcaggccgggatccaggtcggaaactcctgctgggaactctactgcctcgaacatggcatccagcccgacggcatgatgccttctgactccaccttcggtgtagcccacgacgccttcaacaccttcttcagcgaaaccggatctggcaagcacgttccccgtgctgtcttcgtcgacctcgaacccagcgtcatcgacgaggtccgctgcggcaactaccgtcaactcctttcacccgaacaactcatctccagc

SEQ ID NO: 15345 - DNA, 395 bp, Glycine max
  Clone ID: LIB3040-018-Q1-E1-D2
gattcctcaagaactatggtttgcagtcactgctctgtttcaccgagtttgggcgtttagatcagaaccaaatcgtgttctcttccattggcaaacatggcaactcaaatgagcaagaagagaaagtttgttgcggacggagtgttccttgccgaactgaacgaggttctgacacgtgaattggcggaggacggttactccggcgtcgaagttagggttacgccgatgcgcagcgagatcatcatcagagccaccagaacccaagccgttctaggtgagaagggaaggagaattacggaacttagctcagtggtgcagaagaggttcaaattccccgaaaacagcgtcgagctttatgctgagaaggtcaacaacagaggcctgtgtgccattgc

SEQ ID NO: 15346 - DNA, 69 bp, Glycine max
  Clone ID: LIB3040-018-Q1-E1-D3
aaaaggtaaggcctccaaaaaaacacaaaaagggggttttggctccaactccgccaaattctcaatccc

SEQ ID NO: 15347 - DNA, 340 bp, Glycine max
  Clone ID: LIB3040-018-Q1-E1-D4
tggtaccctgtcgtacgctgcggaatcccgaggtcgaccagccgtcggtacgctgccaaaagaacaacaaaagggtcacaatcaaacgggaaaaggcgtcttcaaaaacgcggcccaaaacttctcctacccttttattcattcaattcgtttctagggtttcctttcctttgccgagaaaaatgagagattgcatttcaatccacattggcaaggccggtatccaggttggaaacgcctgctgggaactctattgccttgaacacggcattcaccccgatggacagattcccaagtgacaagaccgttggcggaggagacgacgccttcaacacatttt

SEQ ID NO: 15348 - DNA, 314 bp, Glycine max
  unsure (1)..(314): unsure at all n locations
  Clone ID: LIB3040-018-Q1-E1-D5
attgggcatgtggatgagaatggcgtctacaatggccatttctccacttttgctctctgcggcttcatacgtgctcagggtgatgctgacagtgccctagatcgcttgtggcagaagaagaaagttgaagttaagcaacagtagacacccatgatagtttgttactttgctatgtattaatttctacgcatgctagagatnattgagtactatgattgtcgtcttgagcaaatactcattcgaaattttcgttggtatttggtaccgccagctaaatttgcttttttgacagtttgccagtgcgttgataaata

SEQ ID NO: 15349 - DNA, 263 bp, Glycine max
  Clone ID: LIB3040-018-Q1-E1-D7
ggcagtttcaaattttcctttccttcactttcccgagaaaaaaataacacttttcactttcttcactacgttctcacttcgatatggctcgtacgaagcaaaccgctcgcaagtccaccggtggcaaggcgccacgtaagcagctcgccaccaaggccgctcggaagtccgctccggcgaccggaggagtgaagaagccccaccgcttcaggccggggaacgtggcgctgacggaaatcagaaagtaccagaagagcaccgag

SEQ ID NO: 15350 - DNA, 287 bp, Glycine max
  Clone ID: LIB3040-018-Q1-E1-D8
ggcgtacacagcctcaacaaccctaacgcgtgcagagcagagagagacgcagccatggggcgaagacccgcgaggtgttataggcaaattaagaacaaaccataccccaagtcacggttttgccgtggtgttcctgattccaagaataggatttacgatgttggtattaagaaaaaggtgttgatgagtttcctttctgtgtccatctggttagttgggagaaagaaaacgtttctagtgagggcctggaagctgctcgtattgcttgcaacaagtacatggccaaa

SEQ ID NO: 15351 - DNA, 141 bp, Glycine max
  Clone ID: LIB3040-018-Q1-E1-D9
gaagaaagctgctagcacagggaagttctacacttttttgtttggattgatcgagtgtactttttcttttcgagattggcttggtgtgcagtggaaagagggtggaaaagagtggtaagggggagggcggcgccccttgtc

SEQ ID NO: 15352 - DNA, 377 bp, Glycine max
  Clone ID: LIB3040-018-Q1-E1-E1
gagctagggtttcagtggtgttagatctgtacccgcctagccattgatttggaaaagtccaagcttcaaagatgtgtaagcttcagagtgatgctcttagagaagctatctcaggaatcatgactgattccaaggaaaagaacaggaaatttgtggagaccattgaactccaaattgggctgaaaaactatgatccccagaaggacaagcgttttagtggctctgttaagttgcctcacattcctcgccccaagatgaagatttgtatgcttggagatgcccaacacgttgaagaggctgagaagataggattggactacatggatgttgaggccttgaagaagcttaacaaaaacaagaaattggtgaaaaaacta

SEQ ID NO: 15353 - DNA, 174 bp, Glycine max
  Clone ID: LIB3040-018-Q1-E1-E10
aatcagcttttccccatcctgtttgttctcatcttcagtctcatcatgcttccctgtttccatctccgattgtggttcaggcgaattctgattcttcgttgacgaaggcaccgtggattccggacgccctcgcccccgctacgagtttgcatattattattgtcattcatgaac

SEQ ID NO: 15354 - DNA, 341 bp, Glycine max
  Clone ID: LIB3040-018-Q1-E1-E11
gacctcaaaaaacaaaaatcaataccttagagaaaacaaaagcacagaatcgaaagaagagttcttttttgagagagattgggatggcttcgacgaagaagatcacactgaagagttcggacggcgaggccttcgaggtggaggaggcggtggcggtggagtcccagacgatcaagcacatgatcgaggacaactgcgccgacagcggaattcctctccccaatgttaccagcaagattctggccaaggttatcgagtattgcaagaagcacgttgaggccaattgcgctgacgagaagcccagtgaggatgaactcaaggcttgggacgctgatttcgtc

SEQ ID NO: 15355 - DNA, 400 bp, Glycine max
  Clone ID: LIB3040-018-Q1-E1-E3
gactcactcatacaatagagaccagcttttgcttctttgtgaacatggagatgaggaaatcatgtggcttcttcttcttgctcctcctccttgtctttgcttcccaggtggtggtgcagacggagggaagagtgtgtgagtcacaaagccacgggttccatggtttgtgtaatagagaccacaactgtgctttggtctgcaggaacgaaggtttctccggtggcaggtgcaaaggcttccgccgccgctgcttttgcaccaggatttgttgagatctcatcaaacactactcttgccatgcaaattaataaatcatagctaggccaaataaattgcatctactctttatccatttgggagctagcttacacaaccaactcatacttggtcattggattgc

SEQ ID NO: 15356 - DNA, 359 bp, Glycine max
  unsure (1)..(359): unsure at all n locations
  Clone ID: LIB3040-018-Q1-E1-E4
gcctccgaaaaccctaacaacacaggcgcagacgcanacgcaaacgcaaacgcaaacgcaaacgcagagcgtgatccattgacgaagatggtgcagcgtcgcacctaccgcaaacgccacagctatgctaccaaatccaaccagcacagagtcgtcaagactcccggtggcaagcttgtttatcagaccacgaagaagagggccagcggacccaagtgccctgtcactggaaagaggattcaagggattccacatttaaggccagcagagtataatagatcaaggttacacagaaaccgaaggactgtgaaccgtgcatatggtggtgtgttgtctggcagtgctgttagagaaagaat

SEQ ID NO: 15357 - DNA, 419 bp, Glycine max
  Clone ID: LIB3040-018-Q1-E1-E5
tggggaacgccattgaactttgaatcagtattcactcgtttcagtcaaacctttatctctctctttctttcttcaaattcaacttgcaattccaattcctggggagttggttccattttccgacgaaccatctcaaatccaccgccacataatgtaactgtatgcgaatgcgaatgtgaacgcggtttcgatttagatccagattcatggggatttgctttagcattgaagaccaaaaccacctttccatctccgattccaacgcgaagcctaaacctgcagtagggtatgaatctggcgctccattggcttccaagaacaacaaagaattccgccaaagtgctggatacaacaatgtggataattttacctacgaggagcttaggctcgcgacgaagcactttcggcccgatttcatc

SEQ ID NO: 15358 - DNA, 76 bp, Glycine max
  Clone ID: LIB3040-018-Q1-E1-E6
agggaaagatcccaaggagtcggtccgaacgaagattccaccccttccttgacgaacacacagacgtgtgttttgg

SEQ ID NO: 15359 - DNA, 408 bp, Glycine max
  Clone ID: LIB3040-018-Q1-E1-E9
gacacgcaactatttctgactacgttttgctctacgcctctccctctctctcaaaaatcgttctcttcgattttagggttttgttttgctgctgcctccgttccccccttctcataaacaacgcgttttctcttctgcttcgtatctattctttgcttttggttttggttgattcaaggccttcacagcattcgttgcggcattttaatcgatttatccaagcaggactgaatgaactaatggagtctaaaggtgggaaaaagaagtctagtagtagtagtagtaaatcattgttctacgaagctcccctcggatacagcattgaagacgttagaccaaacggtggaatcaagaaattcagatctgctgcttactccaactgcgctcgcaaaccttcctgatatccat

SEQ ID NO: 15360 - DNA, 278 bp, Glycine max
  Clone ID: LIB3040-018-Q1-E1-F1
gatccttcgtccagctagcaccacattcacctgaggcttccaaagcaatggcttcccttgcagcatccactgctgctgcttcccttggcatgtcagaaatgcttggaaaccccaacaacttcagtggtggcacaagggcagctccaactgcttccaatcctggctccttcaagactgtggctcctttctccaaaaagaaggctacaccaacacctccaaaaaaagctgctgctgctgctcctgccaatgatgagcttgccaagtggtatggtcctgac

SEQ ID NO: 15361 - DNA, 324 bp, Glycine max
  unsure (1)..(324): unsure at all n locations
  Clone ID: LIB3040-018-Q1-E1-F10
gagaatagagagctcctccaattagggtttttgtgatctgcagctacgatgggtaagggaacggggagtttcggtaagaggaggaacaagacccacaccctctgtgtgaggtgtggccgccgcagcttccacctccagaagagtcgttgctctgcgtgcgcttaccccgctgcgcgcaccaggaaatataactggagcgtgaaggccattangagaaagaccaccggaactggaaggatgaggtacttgcgtaacgtgcctcgcagattcaagagcggcttcagagagggtaccgaagctgcacccaagaagagaggagctgct

SEQ ID NO: 15362 - DNA, 230 bp, Glycine max
  Clone ID: LIB3040-018-Q1-E1-F11
gaacatacctaaaaattgtaccgatatggcttcacttgtgtgtctccttttttccttgcatttcatggttatcatgtcaggttccttaccagcaaatagtgaagtgtttacaaaagagtctcctatgtctctatccacaaaacccgtggaaagactcacccaactccacttttatttccataacaacaaaatgggggaacacccgactgctatgaaaattgttgagcctc

SEQ ID NO: 15363 - DNA, 260 bp, Glycine max
  Clone ID: LIB3040-018-Q1-E1-F12
cttcagatcggaaacttcacactttcgaggatgtggcatagcacgaccagaccaatgattgctggctcatcatttctggcaaagtgtatgatgtcacccctttcatggaggatcatcccggacgtgatgaggttttgttatctgcaacatggaaagatgcaaccaatgattttgaagatgttggacacagtgattctgctagagatatgatggaaaaatactaaattggtgagattgattcatcaactgtacaactaaaa

SEQ ID NO: 15364 - DNA, 137 bp, Glycine max
  Clone ID: LIB3040-018-Q1-E1-F2
gacacttactagtagtaagcatggagtcctcaaagatctatgcttacctcttcctctgcatgatctttctctcttccgccactcccattctcggttgtggctactgtggcaaaccccccaaaaagcacaagcctggt

SEQ ID NO: 15365 - DNA, 434 bp, Glycine max
  Clone ID: LIB3040-018-Q1-E1-F3
gaatcgcacctaggcctccgtcacagccacggtaccgcacgctcgctgcctttctcactcacccacgcgagcgcgcgtcctctcacccacatcattgcaccgccatcccagatgccgccgtgcacttgctgtcgtgcccacactgagattcgcacgtcctctgacccacatcatcgtgtcgccgctgtcgagcccacactaccattgcacacgctgccgcgcacttgccgtcatgcgcacgccagctgtttcgtaatttttatttttttttatcttttgtctgcctcttttttatttgatatgatattttgacattcaggtttacgggttttgttggttggatgaaaaagtaaacactaaactttgaagtttagaatattttgattatgaataactggtgactggttgatgaggttttcttgagatgagattcc

SEQ ID NO: 15366 - DNA, 268 bp, Glycine max
  Clone ID: LIB3040-018-Q1-E1-F4
gacgtctctgcggattcatccttttcttctgcagacaaagaaccaacaacacttgtttcttcagccatggccagtcaacctgaatcatctgacgcaaagggcacaaaaagggattttagcaccgccatattagagcgtaagaaggctccgaatcggctcgtggttgatgaagctgtcaacgacgacaactctgttgtcgcgcttcatcctgataccatggagaaacttcaactttttcgtggtgacaccatcttgatcaaggggaaaa

SEQ ID NO: 15367 - DNA, 365 bp, Glycine max
  Clone ID: LIB3040-018-Q1-E1-F5
aggaagctttagagcagcaaagaagggaggaagaacgatataaagagctggaagagatgcaaagacagaaggaagaagccatgcgaaaaaagaaacaggaggaggagcaagaacgtctaaaccaaataaagttgttgggtaaaaacaaatcccgaccaaaattgtcatttgcttttggatccaaatgaccattggcttgggcaacctgtgtctatttatttagtctaaagtgtgtttgggcttaattccctatttgtgtctgtaatttgaggaaaatcaggaaattatacacagcctcctcaactataatgtgacagcgttgttaccgttttcagtttgcattagatttcattgtttatcattgc

SEQ ID NO: 15368 - DNA, 51 bp, Glycine max
  Clone ID: LIB3040-018-Q1-E1-F6
gcgtaatgaacttgattatttccctaaaatgaagatgttatctttgctcgt

SEQ ID NO: 15369 - DNA, 285 bp, Glycine max
  Clone ID: LIB3040-018-Q1-E1-F7
gcttgcaggcgaaagagaagatggccaccgttccagggcagctcgtgtgggagatcgtgaagaaaaacaactcctttttggtcaagcagttcggaagggggacccagagcgtcgaattcagcagagagagcaacaatctctacaacctcaattcgttcaagtactctggtttggcaaacaagaaaactgttacggtacagcctgagggtaaagatcaggctgtgttgttggctacaacaaagacaaagaagcaaaacaagcctgctgcaatgcctcaaaaatctg

SEQ ID NO: 15370 - DNA, 435 bp, Glycine max
  Clone ID: LIB3040-018-Q1-E1-F8
gaccctcttgtttgctaatattctcattcttctgtctctgcttcttctccttctgaactaagagatggggttgtctttcaccaagctttttagccggctctttgctaagaaagagatgcgtattctcatggtaggtcttgatgctgctggtaagactaccatcttgtacaagctcaagctgggagaaattgtcacaaccattcccacaattggattcaatgtggagactgtggaatataagaatattagctttactgtatgggatgtgggtggccaagataagatccgtcctttatggagacactacttccaaaacactcaggggcttatctttgttgtggatagcaatgatcgtgaccgtgtagttgaggctagagatgagctccaccggatgttgaatgaggatgagttgagagatgctgttctcctggtatt

SEQ ID NO: 15371 - DNA, 107 bp, Glycine max
  Clone ID: LIB3040-018-Q1-E1-G2
gacacaccgtttgttctattcttaactcaacttctgctacccactctcttcttccaagtccaaccacgcttttctctacagtcatgggcaaggtcaagatcggaatc

SEQ ID NO: 15372 - DNA, 434 bp, Glycine max
  Clone ID: LIB3040-018-Q1-E1-G3
gcttgtgcgcttagcgcacttatggaccgcttagcacacgttagtgatttttggcttagcgcgcctttctcacttagcggatgaactgaagcggtgcacttagtgagatgaagcggtgcgcttagcgaacctgtacagctcatcttcttccagagtcttcctcgcgcttagcccaggagtgttacgcttagtggacgctcgctaagccagcagattggcttagcgagaaggtgaaaaacaacactttccaaagcttgcctaattaacctgaagttgagagaaaatgattattaaacacacaaaatgaaaatactaagtatttattacctatacttaacagaaaatacttataacactacaaaataaccataaattgggagagtttgatacaatttatacaagttttatacacaaaagttagtcgttttcatcga

SEQ ID NO: 15373 - DNA, 349 bp, Glycine max
  Clone ID: LIB3040-018-Q1-E1-G4
gaacagcgccatatcataacccttcgaagtcgccgtttgtgttcatttcgttcgcatcttctctctctctcagaaagatgaaggtggtcgccgcgtatttgctcgccgtcctcggtggcaacaacagcccctccgccgatgtcatcaaggaaatccttggctccgttggagtagaagcagatgacgataggattgaatcgtttttgtctgaatttaagggtaaggatatagttgagcttattgctgccggtagggaaaatttggccacggttccttcaggtggtggtggtgccgttgccgtcgccgcatctcctggggaatgtgctgctgctgctgcacctgctgctga

SEQ ID NO: 15374 - DNA, 411 bp, Glycine max
  Clone ID: LIB3040-018-Q1-E1-G5
gaaccaagtttgcttgcgtgtatattcattttagcatcaaggttgaatctcagagaaaaagaaacatcgacaagcatgtctggaagaggaaagggaggcaagggtctcggaaagggaagagccaaacgacaccgtaaggttctgagggataacattcagggaatcaccaagcccgcgattcgccgtctggccagacgtggtggcgtcaagcgtatcagtggtctcatctacgaagagacacgtggcgtcctcaagatcttcctcgagaacgttattcgcgacgctgtcacctacactgaacacgctcgccgcaagaccgtcactgccatggacgttgtttacgccctcaagaggcaagggaggaccctctacggatttggcggttagacaattggggatttcagcactgcg

SEQ ID NO: 15375 - DNA, 405 bp, Glycine max
  Clone ID: LIB3040-018-Q1-E1-G6
ggtttctctctgcagttgcactcttgcaggcatgtgcagctgtttcccgttctgctcctctcccaacccctctgtttctttggagtgagaaagtttaatactttagaaccagctagcgagcaattgagccattgtcatacatatatataaataccgtgcgagaaatgcagcagcacctgatgcagatgcagcctatcatggaagcctactaccccaacaacgtcaccactgatcacattcaacagtacctggatgagaacaagtccttgatcctgaagattgttgaaagccagaattctggcaagctgagcgagtgtgcagagaaccattcagggctgcagagaaatctcatgtacctagctgcaatagctgattctcaaacccaaccatctccaatgcctggtc

SEQ ID NO: 15376 - DNA, 343 bp, Glycine max
  Clone ID: LIB3040-018-Q1-E1-G8
gaggggatggaggacattgaggatttgctgattggaagtgcaactccaccgggctttcgtttgccattagcagcggctgttggcgtggggacaaagcggaatcaactctcttcttcttcgctttcgccttcacctgcaatccctggcactcagactatcttcataaagacctttggctgctctcataaccagagtgacagtgaatatatggctggtcagctttctgcttttggctattcattgagcgatgatcctgaccatgcagatctctggctcatcaacacttgcacggtcaaatccccaagtcaatctgctatggataccatcatatcgaaaggaaaat

SEQ ID NO: 15377 - DNA, 419 bp, Glycine max
  Clone ID: LIB3040-018-Q1-E1-G9
gagatctgctgcttctcattgttgaaaagaaaccctagcaagtggagcaatggcagacgttgaagtcgatgtggcggcagcagcagcagcagggctgccgaagaagagaacgttcaagaagttcagttttcgaggcgtggatctcgatgcacttctcgacatgtccaccgatgaactcgtcaagatgttcagtgcccgcgctcgtagaaggttccagagaggcctcaccagaaagcccatggccttgatcaagaagctccgtaaagcgaaaagggaagctccaccaggtgagaagccagaaccagtacgcacccacctccgcaacatgattattgtgcctgagatgattggtagcattattggagtgtacaatggcaaaacctttaatcaggttgaaatcaaacctgagatgattgggc

SEQ ID NO: 15378 - DNA, 423 bp, Glycine max
  Clone ID: LIB3040-018-Q1-E1-H1
ggttgtcaagcctgccgagaaaaccctagttcgcttgcagtcacacaagaggccaatcctattcatagctcgaaatgggtgaagaattgaaggtagttgttccagaatcattgttgaagaacccaagaaggaagaaggaatggccgttggcaagaagccagaaatccgtacctgcaagaagaaaagagaccaagacccacaatctcatctacaacagagctaagcagtacgctaaggagtacgatcaccaggagaaggaattgattcggttgaaacgcgaggccaagctgaaaggtggtttctatgtggatccagaggctaacctgttgtttattattcgcattcgtggtattaatgccatggaccccaaatcaaggaagatcctgcatttgttgcgattgacacagattttcaatgggtgta

SEQ ID NO: 15379 - DNA, 265 bp, Glycine max
  Clone ID: LIB3040-018-Q1-E1-H10
cccacgcgtccgaagggcggcaaaagaacaacgaaagggaaaatctgatgctactcaatgatatctgaatctccgtccgaatgcacctgtgacaaactttcagttccacgtcgctgaaacaacatcatcaagactacggtaaagaagtacattcagcctcttcatttttcgaagcgttgctttcgaagcacttcgcgaaatgtccacggttgagatcctcgtgatatgcaatgctcgaacgcatacaatgttccaccaaagactc

SEQ ID NO: 15380 - DNA, 423 bp, Glycine max
  Clone ID: LIB3040-018-Q1-E1-H11
gttagtgtgtacttcccaagacgacatagaaaagtgttataatcgctctgtcctcgctgtctctgtctttgaccgaagccaaagaagaggaagaaaccttagcagctttcggcgctcttcttttatctctgattttttttttttttttctctttcccttccaattttttctcatatcatattcatctctgtgcctctatgacagactagtacttgttgttttttgtacccattattacccacacacccccaaatacaaattaaattccaatccattattttaatgttattgttactagtattggtattattaccttaaactaaacagaaataagttgctattgtttttaatgttgttgtgattactactagtatttttttatatatatactggagtgatgtatcttcctagtttctactctct

SEQ ID NO: 15381 - DNA, 254 bp, Glycine max
  unsure (1)..(254): unsure at all n locations
  Clone ID: LIB3040-018-Q1-E1-H12
cgctgcgacatgacgacataatggtaccgctgcgacaacactatacaaggcgactccgcagctgcagcactcangaccctacataggacgatatagcgtgcaactttcggcaaccacagaccatgacattcaagcgcatgaattgaggtcgcaacaaacactgccgctgacatgtcaaattcatccgatgctccaactgcggaaaatgctgccccaaagacaaagccatcaagaggtttttggttangaacatt

SEQ ID NO: 15382 - DNA, 420 bp, Glycine max
  Clone ID: LIB3040-018-Q1-E1-H2
ccaggtcaccagcgtccgtaagcgtcagacaacgatcagcgcagatatctgacaaagaatcgaacgttagctaaaagacaatacttcggtgacctcccgtattgttcataaccaaacttcttctgctcaacatgctgacgctctgatacaagctttcataggatggagggctgatgacaacgccactatagcattactgggtcacagatctgtgcatcacatgcaagaaatcagtgaagcttatgacgatatttaccacgaggatctcatcacatgccttgagtccgatatctctagtgactttgatagagctatgtaccggtggatgttgcattctgcagattgtgatactgttatggtgaatgtggaaatcaccagtggcagcacagactaccatgtgattgcagagattgcttgtat

SEQ ID NO: 15383 - DNA, 421 bp, Glycine max
  Clone ID: LIB3040-018-Q1-E1-H5
ggttgtcaagcctgccgagaaaaccctagttcgcttgcagtcacacaagaggccaatcctattcatagctcgagatgggtgaagaagtgaaggtagttgttccagaatcagtgttgaagaagcgcaagagggaggaggaatgggcgttggccaagaagcaagaactcgatgctgccaagaagaagagagccgagagccgcaaactcatctacaacagagctaagcagtacgctaaggagtacgatcaccaggagaaggaattgattcggttgaaacgcgaggccaagctgaaaggtggtttctatgtggattcagaggctaagctgttgtttagtattcgcattcgtggtattaatgccatggaccccaaatcaaggaagattctgcagttgttgcgattgagacagattttcaatggtgt

SEQ ID NO: 15384 - DNA, 354 bp, Glycine max
  Clone ID: LIB3040-018-Q1-E1-H7
gacaaccaagctcgcttcttccttctcgcatcaacagcatgcagatcatcgtcaagactttgagcggcaagaccatcaccctcgaggtcgagagcagcgacaccatcgacaacgtcaaggccaagatccacggcaaggaatgtatcgctcctgaccagcagaggttgatttttgctggtaagcacctggaagatggtcgcactcgtgctgattataacatacgacaggaatcaacacttcacatggtcttgaggctaaggggaggtaccatgagtagcgtgatgactttaactgggaaagaaattgagattgacattgaagcatctgatacaatcgaccggattaaggaacgtg

SEQ ID NO: 15385 - DNA, 278 bp, Glycine max
  Clone ID: LIB3040-018-Q1-E1-H8
gacaactaagagagaatcgtcctgctcacatcaacacaatgcatctctgcgcaaccatgttgatcagaaacaacattactctgcacgacaagatcaggcacaccatcaagctttcaaaggacaggatgcagaagacagagcgaatacctcctgaccaggacacattgatttttaccagaaagcagatggcagatggtcttactcgtgcagtttacaacatgctctcagcatcaacacttcatctgatcttgctgctaacgttaagaaacatgagtaac

SEQ ID NO: 15386 - DNA, 350 bp, Glycine max
  Clone ID: LIB3040-018-Q1-E1-H9
gaaatctgctgcttctcaatgttgaaaagaaaccctagcaagtggagcaatggcagacgttgaagtccaagttgccggaacagcaacaacaaggctggccaaaaagagaacgttcaggaagttcagttttcgaggcgtggatctcgatgcacttctcgacatgtccaccgatgaactcgtcaagatgttcagtgcccgcgctcgtagaacgttccagagaggcctcaccagaaagcccatggccttgatcaagaagctccgtaaagcgaaaagggaagctccaccaggtgagaagccagaaccagtacgcacccacctccgcaacatgattattgtgcctgagatgattg

SEQ ID NO: 15387 - DNA, 223 bp, Glycine max
  Clone ID: LIB3040-019-Q1-E1-A1
taatattgtaatttagcaaatatcttttgagattctcataaagactgatcatatatggtcttcttacatatattgccctacctattaattagttttcatcacttaaattcatcaaaaacccagtgcttctgagttgtgatcttccatggggtcagccccatgcaaattcagcgggtatgtgctgggtggtcacactacattgttatctgaccttttgtccttt

SEQ ID NO: 15388 - DNA, 360 bp, Glycine max
  unsure (1)..(360): unsure at all n locations
  Clone ID: LIB3040-019-Q1-E1-A10
ggtttcggaaacccgaaacgtttcgcctcgcttcacccgtttcgtgcttatcctcctcctcaatggcggtgcctccgtcttcgctggagaagcaattcgatgactttagggttcagctggaagaatctggaaccttgcgcgaacgaattcgaagcgtcgtttcggagattgagtcctccactaggctcatctatgccacacttcttctcgttcaccagtctcgtcccactcccgagcttttagagaaggccaagtctcatgttaatgtgttaaagaagcagtataagcaacttgctgaagttgttggacgatgccctgngcaatactataggtaccatggtgattggaagagtgagacac

SEQ ID NO: 15389 - DNA, 79 bp, Glycine max
  Clone ID: LIB3040-019-Q1-E1-A11
gccggtttcccgaacgatttgatggtttggaatgcatttcccaagcaacgagtcttcggttcgaaaccagcagagagag

SEQ ID NO: 15390 - DNA, 381 bp, Glycine max
  Clone ID: LIB3040-019-Q1-E1-A4
ggaacacagagcgagcgaaagtagaatctgaaaaacaatggcggcgaagctagacacccacgccgtggcttccgatctgatcgacttcctcaacgcttctccaacggctttccacgccgtcgacgaggcaaagaggcgtttgcgtagcgcggggtaccaccaactctctgagagggaagtgtgggaactgcaaccgggcaacaagtacttcttcaccagaaatcactccaccatcgtcgccttcgccatcggcaaaaagtacgttgctgggaatggattctacataattggggctcacacggatagtccttgtctcaaactcaaaccctggtcacaagggtgttaaggctggggattttggaggttggggtccaaacctat

SEQ ID NO: 15391 - DNA, 407 bp, Glycine max
  Clone ID: LIB3040-019-Q1-E1-A7
ggagttgagaggatcgtgagaggggcagtagccgagattccgtgagttgcaaaaatgaagacgattctttccaccgagaccatgaacatcccggacggcgtgagcatcaaagttcatgccaaggtcatcgaagttgagggcccccgcggaaaattggtgcgagacttcaagcatttgaatctcgattttcagctcattactgacgaaaacggtaaaagaaagctgaaaatcgacgcgtggtttggttctcggaaaacatccgccgccattcgcaccgccttgagccacgtggagaatcttatcaccggcgtcaccaagggctaccgctacaaaatgaggttcgtttatgcccattttcccatcaacgcaagcatcggcaacagcaacaagtctattgagatccgaaa

SEQ ID NO: 15392 - DNA, 389 bp, Glycine max
  Clone ID: LIB3040-019-Q1-E1-A8
gacaacgaaactcacagaagaaaggagaaaaagaagcgaaactaaagtcagcattcgaaaaagatgagtagcatcggtacaggttacgatctatcggtcaccactttctcccctgatggacgcgttttccagatcgagtatgccgctaaagccgtcgacaacagcgggactgttattgggatcaagtgcaaagatggggttgtgttgggcgttgagaagcttattccgtcgaaaatgatgcttccgggttccaatagaagagtacactccgttcatcgtcactctgggatggctgtagcaggattagcagctgatggcagacaaattgttgccagggctaagtctgaagctactaactatgacagcgtatatggcgaaccaattcctgt

SEQ ID NO: 15393 - DNA, 450 bp, Glycine max
  unsure (1)..(450): unsure at all n locations
  Clone ID: LIB3040-019-Q1-E1-A9
ggatcttcacgattaggagatggctaagtcgaagaaccacaccgctcacaaccagtcctacaaggcccacaagaatggcatcaaaaagccaaagaggcaccgccacacttccaccaaagggatggatccaaagtttctgaggaaccaaaggtacgcgaggaagcataacaagaagagcggtgaaacagccacggaagaagagtaaagtgtcactctcaaatggggctattaggatttgatttgctattcaagtcccatatgttttgtgtcaaatctatatttagtagtatagtcattttgatgagttaatttaatccagagagaatgcagtacttactcttatagcatcgttgctggtttttgtttgttaaagacccttcaaattttatcgatggattattattcagttgtttaaaaaaaanaanaananaaaaaaaaaaaaagcggccg

SEQ ID NO: 15394 - DNA, 288 bp, Glycine max
  Clone ID: LIB3040-019-Q1-E1-B10
gacgctctctcactcacaaacgcacactgaattcaaaaacatcgaaagagagaggcatggccgagcaaaccttcatcatgatcaagccagatggcgttcaaagaggccttattggcgagattattagcagatttgagaggaagggtttttacttgaaagggttgaaactcgttactgtggaccgtccttttgctgagaagcactatgctgatttgtctgcaaagcctttctttagtggtttggtggattacattgtctctggccctgttgttgccaagatctgggaag

SEQ ID NO: 15395 - DNA, 258 bp, Glycine max
  Clone ID: LIB3040-019-Q1-E1-B11
atttggggttgtccgctgtgcactgctctttggatttgccgcctagaattaatttacatatcttgaaactatttcctaacataaaatattcaagtttctatttttacttttattgggtatgttttgctaggtctattggagatgagagcctttgcaaggaagtatttgaggagtacattgcacagctaaaagaagaggcaaaagagaatgagcggaaacgaaaagaggaaagggcaaagaaggaaaaagacagggagg

SEQ ID NO: 15396 - DNA, 59 bp, Glycine max
  Clone ID: LIB3040-019-Q1-E1-B12
atggatattgcgtaatcaattgacgttgatattcaataacaaagagtaaatcctctaac

SEQ ID NO: 15397 - DNA, 280 bp, Glycine max
  unsure (1)..(280): unsure at all n locations
  Clone ID: LIB3040-019-Q1-E1-B2
gaagagtgatccttctacactaactaaagccgagcagcgagagagagaaaccctagcaaaaatgccggctggtcacggtttgagatcccgcaccagagattccttctctcgtcncttcaagaagaagggtaccatcgccctcaccacatacctcagaacctaccacgtcggcgattaagtcgacgtcaaagttaacggcgccgtccacaagggaatgcctcacaagttctaccatgggcgcaccggtcgcgtctggaatgtgagcagacgtgctgttggg

SEQ ID NO: 15398 - DNA, 92 bp, Glycine max
  Clone ID: LIB3040-019-Q1-E1-B3
gctttagtataagatcatatgaagttatgggaagaaacatatggttgtgtaagctgtagttgtcacttatttaatgatatgagcaatttggg

SEQ ID NO: 15399 - DNA, 282 bp, Glycine max
  Clone ID: LIB3040-019-Q1-E1-B4
cggggaatcgtcttttacttctcagcagcttcggctagggttcagaaacgaaaaagggttcggtgttctgttcgcgatgagagccaagtggaagaagaagcgtatgaggaggttgaagaggaagcgccgaaagatgagacagagatccaagtagtgcgttaaacctactttgtttctgttgcttttacaattgcttatgttgtcgaatgggaaacccagttgttagtggcactggtttctcctttttgatgtttgatacattttgttggattcaattagttt

SEQ ID NO: 15400 - DNA, 410 bp, Glycine max
  Clone ID: LIB3040-019-Q1-E1-B5
gacaacacaacgcaacacaacgcgcactctctcttttctctcttaacacaaaaaccctatcgttctccgcggtttcgccgattctcgccatgccgaaagccaaatccgacgccaaagccgccgatagccggttgaagcgcaagggcgctggtgctggaaggaagcaatcgaagaaagctgctaaggatcctaacaagccaaagagacctccaagcgctttcttcgttttcatgtccgagttcagagagcagtttaagaaggagcatcctaacaacaaatccgtcgctgttgtcggtaaagctggtggtgacaaatggaaatcgctgtctgatgctgaaaaggcccccttcgttgccacggccgaaaagaagaaacaagagtatgagaaaactattttggcttacaataag

SEQ ID NO: 15401 - DNA, 422 bp, Glycine max
  Clone ID: LIB3040-019-Q1-E1-B7
gagtgtatgtgattgttgtgactcgttcttcttcgtcgttatcttcttcttttgttgtttgtgtgtttgttttttctctcacctgaaaatgtcttgctgcggtggtaactgtggttgcggaagcgcctgcaagtgcggcaacggctgcggaggctgcaagatgtacccagacttgagctacaccgagtcaaccaccaccgagaccttggtcatgggagtggcaccagttaaggctcaattcgagagtgctgaaatgggtgttcccgctgagaacgatggctgcaaatgtggagctaactgcacctgcaacccctgcacttgcaagtgaggtgttggggagctaaagcttcaagcagaaatggcccttagaaataatgataaaaactatatgtagtttcaaaacttcaaaattatgtagtaag

SEQ ID NO: 15402 - DNA, 399 bp, Glycine max
  Clone ID: LIB3040-019-Q1-E1-B8
gatcctctgcaacggcaacagactaagttgtttctctctctagccctagggtttcgttctctactaccgttctttcatcagatcgctgccgtttctggcgtcattccgataattcggcggcatgaagctaacagtgaagactttgaaagggagccatttcgaaatcagggttcaaccctccgatactgttatggctgtcaagaagaatattgaagatgtacaagggaaaagataattacgcatgtggacagcaattgttgattcacaatggcaaggttttgaaagatgaaactacattagtagagaataaagtctctcaagatggctttcttgttgttatgcttagtaagagtaaaacatcacgttctgctgcagcttcatccgttcatcctgccagta

SEQ ID NO: 15403 - DNA, 286 bp, Glycine max
  Clone ID: LIB3040-019-Q1-E1-B9
gaagggtttcaagttattgtgagcaaagaaagatagtgagtgaagtaactgaagagaagaaaaaatgccgtgcctcaacctcagcaccaacgtgtccctcgaaggcgtcgacacctcttccatcctcgccgaagccacctcctccgtcgccagcataatcggcaaacccgaagcctatgtgatgattgtactgaaaggatcagtacccatagcttttggtgggaatgagcagccagcagcttatggagaattggtttccattggtggtcttaaccctagtgtaaac

SEQ ID NO: 15404 - DNA, 219 bp, Glycine max
  Clone ID: LIB3040-019-Q1-E1-C1
ggtcatagtattatcattcattctcatctttctctcttctctctccacccataccctaagtcccgaccctgttcccctctcgtatccgtcatgaatggaggaaagtccaagactgaatctaagagagccgatcccaaacttgctgtgaataagatgggagccgccatcaaggctaggaaacgcgccggcaaagggaatgcagcgaaagaccctaacaag

SEQ ID NO: 15405 - DNA, 434 bp, Glycine max
  Clone ID: LIB3040-019-Q1-E1-C10
gtccgttcaaagcacgccgtgtttcgctgtctctcccatcctttcgcattctcaatacccttttgatttgtgaaaggaaagcaaacatggttgatcaggtccaacaccctacaatcatggacaaggttgctggtcagctccatctccgttctggtctttcatctggtattagaagttatgatggagcctaccgccacccagctatgtaccaaagaccctcttttgggaattactcgaatgctgcattgcagtttcctgtgatgcccacatgcaaagctaccatggatttgtctgctactgcaacatctgcctcacccgtctttgttgctgctccagcagagaaaggccattttcttttagactttctcatgggaggtgtttcagcagctgtctccaaaactgctgctgctcccattgaacgtgttaagcttttg

SEQ ID NO: 15406 - DNA, 102 bp, Glycine max
  Clone ID: LIB3040-019-Q1-E1-C11
tcttgaataacacaattaaagagagcttaagacttattttgattcacaaatccaaccacaactcagcaccacaactcaacttcatcataggcatcatgtagg

SEQ ID NO: 15407 - DNA, 275 bp, Glycine max
  Clone ID: LIB3040-019-Q1-E1-C12
aggattctgatgtggcacacaatgcaactttctcctatacatatgacgatcaggcatggagagcagaatttggagcaatatatcaggagcattactaattgactgttggtattattagcatttgataaatttccttttggatcaaactccaaacaatttgtctggcatatcctacttgggtcaaagggcatcccttaatgccattattctttttgtgtatttctagaaattcattatatttttttcgttgctgtgataatccaacagttgttatg

SEQ ID NO: 15408 - DNA, 398 bp, Glycine max
  Clone ID: LIB3040-019-Q1-E1-C2
gacgcagcttcatccctaacgcgtgcatagcagagtcagagacagagacgcagccatggggcggagacctgcgatgtgttataggcaaattaagaacaagccataccccaagtcacgtttctgccgtggtgttcctgatcccaagatcaggatttatgatgttggtatgaagaagaagggtgttgatgagtttcctttctgtgtccatctggttagttgggagaaggaaaatgtttcaagtgaggccctggaagctgctcgcagtgcttgcaacaagtacatggccaaatttgctggaaaggatgccttccacttgagagtcagggtgcacccattccatgttcttaggatcaacaagatgctttcgtgtgctggtgctgataggctccaaactggaa

SEQ ID NO: 15409 - DNA, 107 bp, Glycine max
  Clone ID: LIB3040-019-Q1-E1-C3
gccacaacacagaacaaaaacaatgaaaaagaaaaacccttagccaacacaaccatcatgggcacctctgctattcagcagtcagcattcactgggcaaactgctct

SEQ ID NO: 15410 - DNA, 139 bp, Glycine max
  Clone ID: LIB3040-019-Q1-E1-C5
aggggcccaggctgattacatcactgtgcctgttgagggtccatacaagcctgctcactacatgtactaagtaactgagattatcaacggaaagtgagggaaagacataatcggttttatgaatcaggttgattgatta

SEQ ID NO: 15411 - DNA, 403 bp, Glycine max
  Clone ID: LIB3040-019-Q1-E1-C6
gattgttggcttgtgctctgctcgtgcctctagggttatcatatctccatttccatttcctctctctcagtttccaagaatcttaagctatgggaaagtcttacccaaccgtgagcgctgattaccagaaggccgttgagaaggcgaagaacaagctcagaggcttcatcgctgagaagagatgcgctcctctaatgctccgtttggcatggcactctgctggaacttacgacgtgagctcgaagaccggtgggcgcttcggaagcataaagcacccctccgaactcgctcacggagctaacaacggtcttgacatcgctgttaggcttttggggccactcaaagcggagtttcctattttgagctacgccgatttctaccagttggctggcgttgttgccgt

SEQ ID NO: 15412 - DNA, 431 bp, Glycine max
  Clone ID: LIB3040-019-Q1-E1-C7
gccactcacaaagtttgtaactctacacaggataaacctgccacacctcattagtagtagccagtatattcaaagttgagagaaacaaacagacaaaacacagccaagcatctcccaacacaccatcatcatcatcatcatcaaagccaagcacaacaatggcactcaaaagggcatcgtggttgctgctgctgccactgttatctgcagttgctggtgctgccaccaacaccaacagtgtgtaccatccttggtgtgaggccaggattcagagatctgatggcttcacttttggcattgccttcagttccagggactcgttcttctacaaccagaagcagtccctccagctctctcccctgtgaccgacgcctctctcgcgcttcctccaacgctcagcttgctctcttccgtcccagagttgatgagat

SEQ ID NO: 15413 - DNA, 280 bp, Glycine max
  Clone ID: LIB3040-019-Q1-E1-C9
gaaagtgctatgagtcagctcggcgaactatgtgaccatgttcacattcatgcacagaaaacccttccttccagttccagcagctcggacgatctatgtgctgcaagcggatcaatgcggtgtgtcgagcacgtagatcgtcaaacacgtgcccttccaccaagtcactggcgttcactgcacaagggagctggtgctaacgacatgtggtaaccaaactgaatacctgtgcaacatatcggccgtgaaccagccgttctacctccgaagacggtcggac

SEQ ID NO: 15414 - DNA, 130 bp, Glycine max
  Clone ID: LIB3040-019-Q1-E1-D1
tgggggtgtaacgggattaggtaatgtggttacatcaagagctatggtgggaaacctcgtaagaataaacaatactaccgcccctcccataaaaatatggtgtatttcttcaataaaagttaacttatgc

SEQ ID NO: 15415 - DNA, 438 bp, Glycine max
  unsure (1)..(438): unsure at all n locations
  Clone ID: LIB3040-019-Q1-E1-D10
ggtcttgcaggcgaagagatggccaccgttccagggcagctcgtgtgggagatcgtcaagaaaaacaattccttcttggtcaagcagtttggaaggggcacccagagcgtcgaattcagcagagagagcaacaatctctataacctcaattcgttcaagtactctggtttggcaaacaagaaaactgttactgttcagcctgagggcaaagatcaggctgtgttgttggctacaaccaagacaaagaagcaaaacaagcccgctgcattgctccacanatctgtgatgaagaaggagttcaagaggatggcaaaagctgttgaaaaccaggtggccaaaaattactacaggcctgatctcaagaaggctgcccttgcaaggttgagtgctgttcacagaagcctcaaagttgccaagtctggtgtcaagaagaggaat

SEQ ID NO: 15416 - DNA, 57 bp, Glycine max
  Clone ID: LIB3040-019-Q1-E1-D12
ggtttgagtagtattattgtgagatcattgtttctagtacataattgatttctttat

SEQ ID NO: 15417 - DNA, 321 bp, Glycine max
  Clone ID: LIB3040-019-Q1-E1-D2
ggaaggcatttcattagcagcgttaaagaagagagaagaaaaatgcgaaagttcgatccatggcccgttttcttcaagcgcgagtggaaacgcaactggcccttcctcgttggattcgcagtcaccggagctctaatcaccaaactttcccttggccttaccgaggaagatgctaagaattccaaattcgttaaggcgcacaaaaggtgatttctgaatcgtgacatctgcctggctttgcactttatgttaggtttgtcaagattacgttgcgtgtcgtgattttatggattgtaataacagaagagagatgctctagat

SEQ ID NO: 15418 - DNA, 303 bp, Glycine max
  Clone ID: LIB3040-019-Q1-E1-D3
cggggagagaaactagtgactgacttttcgagaaaggaaaaaaaaagagtttccggcattactccatcatgaacgctcttcgcattcttctcttcttcctcttcgtttcggcattagtttatgcgaagaaaactggcgatgtgacggaattgcaaattggcgtgaagcataaaccagcatcatgtgaagttctggcacacaaaggtgacagagtcaaagtacactatcggggaaaactcactgatggaactgttttcgattctagctttgaaagaaataatccaattgaatttgagcttggta

SEQ ID NO: 15419 - DNA, 114 bp, Glycine max
  Clone ID: LIB3040-019-Q1-E1-D4
ttttgcttcattgtgaacatggaggttcaggaaatcatgtggcatcatcgtcctgctcatcctccttgtctttgccttccaagtggtagtgcataatgcgggaaaagtgtgtga

SEQ ID NO: 15420 - DNA, 303 bp, Glycine max
  Clone ID: LIB3040-019-Q1-E1-D5
gagcgaaacagagagtgatttcagtgaatgatcggtgttcactttattccaacaaaatcctcaacgtcaaattaagaaaatgccgatcagaaacatcgccgtcggaaagcctgaagaggcgactcaccccgacacgttgaaagcggctttggctgagttcatctcaaccttcatcttcgtgttcgccggctcaggctccggcatcgcctacaacaagctcaccgacaacggcgctgccacccctgccggcctcatctccgcctccatcgcccatgcattcgccctcttcgtcgccgtctccgt

SEQ ID NO: 15421 - DNA, 338 bp, Glycine max
  Clone ID: LIB3040-019-Q1-E1-D7
ggagatagaaaagctctttggcttgtaatgaaaggtaagcaattgaacgttagaagccgaaagagagtggaataacaaactagtcttaagaactccctaatgaaagtgaaactttccctaagttaagcaaaatcacctgcctgtgaagaagctcacaaaatctcttgcaagttaagtttgtatgctctgaccttggttttgggaattgcaaactaaactgggttaattaagaactaacccttctcgcccttcctatgtagattccacaattcaacaatcaatcatcatgcctaattgcctcctgttgtgaacggagaaagaagattctcatcatcatc

SEQ ID NO: 15422 - DNA, 329 bp, Glycine max
  Clone ID: LIB3040-019-Q1-E1-D8
ggagagagaaaggctctttggcttgtattgaaaggtaagcaattgaaggttacgggccgaaagagagtggaataacagactagtcttaggaactccctagtgaaggtgaaacttgctctaagtgaagcaaaatcacgtgcttgtgaagaagctcacaagatctcgtgcaagttaagtttgtacgctctgagcttgtttttgggaattgcaagctaagctggtttagttagtagcgaggcccttcgcgcccttcttagagggaggcgaagattcaacaatcaatcatcatgcctaattgcctcttgttgtgaaaggagaaagaagattct

SEQ ID NO: 15423 - DNA, 433 bp, Glycine max
  unsure (1)..(433): unsure at all n locations
  Clone ID: LIB3040-019-Q1-E1-E10
gatccatttctcgcaacaacgcttaacctctctcattccccatttcctcacctccttcaaccgctgctaaattctagggttccgaaatggacgctggcggaaagatcaagaagggcgccggaggtagaaagggcggcggcccaaagaagaagccggtttcaaggtccgtcaaagccggtctccaattccccgtcggaagaattggccgttatttgaagaaaggaaggtacgctcagcgtgtcggtaccggtgctcccgtatacttggctgcagttctcgaatacctagctgccgaggtgcttgagttggctgggaatgccgcacgtgacaacaagaagaacaggattattccaagacacgtgcttttggcagtgaggaacgatgaagagttgggaaattgcntgctggagtgacaattgcacatggtggcgtg

SEQ ID NO: 15424 - DNA, 440 bp, Glycine max
  unsure (1)..(440): unsure at all n locations
  Clone ID: LIB3040-019-Q1-E1-E11
gccgcagcaagtgccattttattttgccctacctcctcgattctagggtttcaacaatggcgctgttccttccctacgaatccgcttcgggctacagcctgttcgaggttcacggcgtcgatgaaatcggccagaacaccgaagcggttcggaactccgtttcggacctcaacaggttcggcaaagtcgttaagcttcgctccttcaaccctttcacttccgctctcgatgctctcaaacagtgcaacgccgtctccgaaggcatattaactgatgagctgaggactgtcttggagaccaacttgcctaaagtgaaggaaggtaagaagtccaagttcagtttangtgtgtccgatcctaagattggttcccagatatctgaagtgactaagattccttgccaaagtaatgagtttgtgagtgaacttcttcgtggtgtg

SEQ ID NO: 15425 - DNA, 434 bp, Glycine max
  unsure (1)..(434): unsure at all n locations
  Clone ID: LIB3040-019-Q1-E1-E12
gaagtcgtacacgtttaaacggagttctaaatttccggcgagttttcctctctcgaatctgcgacaccgacgaatctcgctcaccggaatttcgcattcagaaaatggctttaggtggaacagctcccccaagaggaagtgcagcggctactgcaagcatgaggagaaggagaacaaccggtggtgcggcctctggaggagcagctggaactatgctccaattttacacagatgatgcncctggactcaagatctccccaaatgttgttcttgtaatgagcattggcttcatagcatttgttgccatccttcatgtgatgggcaagctgtactttgtgcgtagggaggcttagagaatagatcaagatgttaggtccaattttttggattttcaatacacctctgttatgaaatttagatttttttgttgctgg

SEQ ID NO: 15426 - DNA, 173 bp, Glycine max
  Clone ID: LIB3040-019-Q1-E1-E4
gcgtcacttttcacatctgctgttcctgcgcgtggacactcctcaggtatgccgagaccatagttacacataagagcgttagtcccgccggggacttccgtttgcactggtacatgtacgtgcagacctgtgtcactgatccaggactggctgcatcaacatggttgcatcgt

SEQ ID NO: 15427 - DNA, 426 bp, Glycine max
  Clone ID: LIB3040-019-Q1-E1-E5
gtcagctgcgaaaacctagtgcaccgtaagggttgtgaagcaggcagagaagagccatggtgcacgtttctttctaccgaaactatgggaaaacgttcaagaagcctcgtcgtccctacgagaaggagcgtttggacgccgagttgaagctggtcggtgagtacgggcttcgctgcaagagggagttatggagggtccagtacgccctgagccgcatccgtaacaacgccagaaacctattgacccttgatgagaagaaggctcgccgtatcttcgagggtgaagcccttctccgaagaatgttccgttacggactcctcgacgagacacagaacaagctggattatgtgttggctctcaccgtcgagaactttctcgaacgccgcctcaaaaccctcgtcttcaagtctggcatggccaagtcat

SEQ ID NO: 15428 - DNA, 418 bp, Glycine max
  Clone ID: LIB3040-019-Q1-E1-E7
ggtgaacaggtgctcgctgatgccactattaagagagtgaagggagcgagtaacagaatcacgcttcaaatcatctgcattcatttttcttctctctacttcttctgcgtcatcttagggttttggtttgtgctcctctcactgattttctggagatggcttctttcgggccaaatggaactgaaaatgaggattcgttgcctcgcccacctcccgttgtaccatcagatgttgtacctgtggaggcggagccggagaagaaaaaggcttcaaggtttccaatagccaggcgtggccttgcttcaaaagggacgaagctgcaacttctcaccaatcactacagagtgaacgttgcaaacactgatgggcatttttatcagtatagtgttgctcttttttatgatgatggacgacctgt

SEQ ID NO: 15429 - DNA, 358 bp, Glycine max
  Clone ID: LIB3040-019-Q1-E1-E8
ggcagcagttgagaggaggcactgtggcagaagtcctaggagtgtaaaacagagacgcacaatgaagacgatcttgtcgtctgagaccatgaatattcccgacggcgtgagcatcaaggttcacgctaaggttatcgaggttgagggccctcgtggaaaactcgtgcgagacttccaccatctgaacttggacttccaacttattaccgacgatggcggtaaaaggaagctcaagattgattcttggtttggttctcgtaaaacctccgccgccatccgcaacgccctcagccacgttgagaatttgatcaccggcgtcaccaagggatggcgatacaaagtgagattcctgtacgct

SEQ ID NO: 15430 - DNA, 407 bp, Glycine max
  Clone ID: LIB3040-019-Q1-E1-E9
gacttctcttcacacctttgttcactcttcttctcttgcggctagggttttagcgcagcttcttctagatttaaggaagatgggtaaggaaaaggttcacatcagtattgtggtcattggccatgtcgactctgggaaatccactaccactggtcacctgatttacaagcttggaggcattgacaagcgtgttattgagaggtttgagaaggaagctgctgagatgaacaagaggtctttcaagtatgcctgggtgctggacaaacttaaggctgagcgtgaaagaggaatcaccattgatattgctttgtggaagtttgaaacaacaaagtattattgcacagttattgatgcgcctggacatatggatttcattaagaatatgattactgggacatcccaaactg

SEQ ID NO: 15431 - DNA, 429 bp, Glycine max
  Clone ID: LIB3040-019-Q1-E1-F10
gggttttgattagggtttgtcattagcacttcttcttttcacactgccgctgcaacaatggcttcagagaagaaactttcgaacccaatgagggagataaaagtgcagaagctcgttctcaatatctctgttggcgagagtggagatcgtctcaccagagccgccaaggttcacttcactcattgctcccgctttttttttttttttaatttttaatttctgtttttcttcttgcaggtgttggaacaacttagtggccaaaccccagtgttttccaaagcaaggtacactgttcgttcctttgggattagaagaaatgagaagattgcatgctatgtcactgtcagaggtgacaaggcaatgcaacttttggagagtggtttgaaggttaaggaatatgaacttctcagaaggaatttcagtgatacg

SEQ ID NO: 15432 - DNA, 356 bp, Glycine max
  Clone ID: LIB3040-019-Q1-E1-F11
gagagtgatccttctacactaactaaagccgagcagcgagagagagaaaccctagcaaaaatgccggctggtcacggtttgagatcccgcaccagagattccttctctcgtcccttcaggaagaagggtaccatcgccctcaccacatacctcagaacctaccacgtcggcgattatgtcgacgtcaaggttaacggcgccgtccacaagggaatgcctcacaagttctaccatggccgcaccggtcgcgtctggaatgtcaccaaacgtgctgttggggtcgaagtcaacaagcaggtcggcaacagaatcataaggaagaggattcacgtgcgtgtggagcatgttatgccatc

SEQ ID NO: 15433 - DNA, 167 bp, Glycine max
  Clone ID: LIB3040-019-Q1-E1-F12
aacatcaaacatgaatcatcaattcatggcagcaattaaagtgttttggggtatttacatctcatccatgaacttataaacataaacataagatcataaaatctacccatggcacattttcattcatgcaaaggaagaaaaagagagaactcacatcctttaacctc

SEQ ID NO: 15434 - DNA, 285 bp, Glycine max
  Clone ID: LIB3040-019-Q1-E1-F2
ggtgtagtataagattctcgtgcattattccttttgtaatttcattcattcttaatctttgtgaaaaataatgttcatcgagaattttaaggttgagtgtcctaatgtgaagtacaccgagactgagattcagtccgtgtacaactacgaaaccaccgaacttgttcacgagaacaggaatggcacctatcagtggattgtcaaacccaaatctgtcaaatacgaatttaaaaccaacatccatgttcctaaattagggggagtgcgtgtgggttgggggtggaa

SEQ ID NO: 15435 - DNA, 378 bp, Glycine max
  unsure (1)..(378): unsure at all n locations
  Clone ID: LIB3040-019-Q1-E1-F3
ggctgtgattgaaattacccatagatagagagcgcggcataacctaaacttacccttcttctctctgtgtgtgtgcgcatcaaacgcaaccagaagcagccatggccactgcaagaactgtgaaggacgtttctcctcatgagttcgtcagagcttactcttctcacctcaagcgatctggcaagatggagctgccagagtggactgatattgtgaaaactgcaagatttaaggagttggctccttatgatcctgactggtactatgtcagagctgcttccatggcaagaaagatctacttgagaggangacctggtgttggtgcctttcagaggatttatgggtggagcaagaggaatggtagccgccctcctcatt

SEQ ID NO: 15436 - DNA, 305 bp, Glycine max
  Clone ID: LIB3040-019-Q1-E1-F4
cgggaaagagaagcattagcacaagcaagaagaactaatcgaagcacaaatggcctcttcagtgatggcatctgtggccctcaaacctgctcctttcactgttgagaagtcctcagttagaggccttccctccctctcaaggaactcctcttcattcagagttgtggccagtggtggcaagaagatcaagactgacaagccttatggaattaatggtggcatggctttgagggaaggatttgatgcatctggcaggaaaggaaaaggtaagggcgtttaacagtttgtagacaaatacggtgcta

SEQ ID NO: 15437 - DNA, 411 bp, Glycine max
  Clone ID: LIB3040-019-Q1-E1-F5
gatccacacctctctctctctcagaatttctatctatctcttgtttcaatttcaacaacggttactcctttttcgttttgagtttcaatcaagccatcatcatgtctaccgcatcgcaacccaaggccaagaaaacggcgtcgtccaagaagcccctctcgcagggtctcttcgccgtgatgatagcagatgcgattgcgagtctgaaagagagaaccggttcgagccaatacgcgataagcaggtggatcgaagggaagcacaaggagttgcctgcatcctacaggaagcttgtcctcgttcatctcaagaaatctgttgctgctggcaagcttgttaaggtgaaaaactcctttaagctcgcaccgactaagcctgctccggttaaggccgctgctcccagaaagccaa

SEQ ID NO: 15438 - DNA, 357 bp, Glycine max
  Clone ID: LIB3040-019-Q1-E1-F7
gctctgaatggaacagttacagtcagaccccttccaattggatcatcagtcagtggaaaggtagagaagcaatgtgctcatttcattggtgtgacaataaatgagcagcaagctgagtcaggcattgtagtaagagttacttcaactgcacaaagcagattaagttgctcgactttgaacaggatgccaatggaggctatggtttggcattgcatgaagacagtgataagactggcaaggtgacatctgcaggaatgtatttcttacatttccaattgtaaaaaagggatcaaccggtaaaggcttaaccaatggcaaaggatccggaaggggccttttttaaaaaattggaaggtc

SEQ ID NO: 15439 - DNA, 359 bp, Glycine max
  Clone ID: LIB3040-019-Q1-E1-F8
ggtagcgcagagaaagaactagaactagaactagggtttcatctttgccatcagaaacaacaatgatttacgacgttaactctccccttttccgatccttcctcagccagaagggaggctcctccgataagaggaaaacggatgaacagaagccaaaagagcagaaacccaaagccagcgagaacaaacctataatgacagagtgacaacaaatttgctgcattcagttgtagaatgataatacgtggtagatattggcatttggttctacacaattaagatcattttggctgtgttctgacgtatatgtggtgttttaagacttgttagtgtaatgggttgattttggatatggttat

SEQ ID NO: 15440 - DNA, 406 bp, Glycine max
  Clone ID: LIB3040-019-Q1-E1-F9
ggtgtgagttgagtctgtgatgataatgatgatgatgatgtgttccatgtggatgtgggttgtccttgtggccattgctggtgcccttttagtcctaagatctatcctcaagaatgtaaattggtggctctatgaatccaaattgggtgtgaagcagtactctttgccaccaggtgacatgggatggcccttcattggcaacatgtggtcctttctcagtgctttcaagtccaaggaccctgattccttcatctcctcctttgtctccagatttggaagaactggaatgtacaagaccatgatgtttggaaatccaagtataattgtgacaacacctgaaatatgcaaaaaggtgcttacagatgacgataaattcacacctggttggcctcaatctactatagag

SEQ ID NO: 15441 - DNA, 308 bp, Glycine max
  unsure (1)..(308): unsure at all n locations
  Clone ID: LIB3040-019-Q1-E1-G1
gaagcactacaattcgctcagaggagagaganagtgttggtgtgttttttagagagagagagaaagaaaagactgtgtgagtgtagtgtgtgtcgttctcccatggtctctatgccgttgcggccgcagcaactgcttcaaaccgccgcgccgctagtggagaatgacgcgatgaaagtggactctcgcggcggctccgacgccagcgccgaaaaggaaaatgtcagctcctgtcgcaaatggtaatgatgccctcactggtcacataatctcaaacacaattggaggcaaaaatggtgaacctaaac

SEQ ID NO: 15442 - DNA, 424 bp, Glycine max
  Clone ID: LIB3040-019-Q1-E1-G10
ggagtttgagtgaaaccctagctagccacaatgcagatattcgtgaaaaccctaacggggaagacgataaccctagaggtagagtcttcggacacgatcgacaatgtgaaggcgaagatccaggacaaggagggcatcccgccggatcagcagcgcctgatcttcgccggaaagcagctggaggacgggcgcacccttgccgactacaacatccagaaggagtccaccctccacctcgtcctccgcctccgccgcggcgccaaaaaccgcaggaagaagacctacaccaagcccaagaagatcaagcacaagcacaagaaggtcaagctcgccctcctccagttctacaaggtcgacgactccggcaagctccagaggctccgcaaggagtgccccaatgccgaatgtggcgccgggaccttca

SEQ ID NO: 15443 - DNA, 390 bp, Glycine max
  Clone ID: LIB3040-017-Q1-E1-E8
ggctaaggcattgtctggcaacaaggatgtggccttcttctctgctaatgctgcagctcaggcttcaaggaagtcctctccaagagtgacgaacgaggctgttcagaaggctgctgctgcattgaagggttcagatcatcgccgtgcaacaaatgtcagtgccagactggatgctcaacaaaagaagctcaaccttccaatccttccaaccaccactattggatccttccctcagactgtagaactgaggagggtacgccgtgagttcaaggctaacaagatctccgaggaagagtatgttaagtcaattaaggaggaaattcgcaaagttgttgaacttcaagaagagcttgatattgatgttcttgttcatggataaccagagagaaa

SEQ ID NO: 15444 - DNA, 361 bp, Glycine max
  Clone ID: LIB3040-015-Q1-E1-C8
ggtgttcctgacaaatctgaggatgaaacaccagagaaatctgaaagtgaagacaaaagtgattctggaagtgaatctgaagatacgaaagaaaagaaaaaacctaaaacatcatccacaaagaaagaatctgctaagaaaagtaaaattgagaaaattaaagttgcaactaaatctcgctcaccacaaaaaagaacacctaagaaatcatcatccaacctctcaaagtctgatgatgacagtgatgaaagtccaaatccaaaggtcttttcaaggaagaagaaaaatgagaaaggaggaaagcagaagattgatgatagtgatgaaagtccaaatccaaaggtattttcaaggaagaaga

SEQ ID NO: 15445 - DNA, 345 bp, Glycine max
  Clone ID: LIB3040-015-Q1-E1-C9
gattcacacaactaactaagaaagtcttccatagccccccaaaaatgaagagcaccatcttctttgctctctttctcttttgtgccttcaccacctcatacctaccttcagccatcgctgatttcgtgctcgataatgaaggtaaccctcttgaaaatggtggcacatattatatcttgtcagacataacagcatttggtggaataagagcagccccaacgggaaatgaaagatgccctctcactgtggtgcaatctcgcaatgagctcgacaaagggattggaacaatcatctcgtccccatatcgaatccgttttatcgccgaaggccatcctttgagcctta

SEQ ID NO: 15446 - DNA, 355 bp, Glycine max
  Clone ID: LIB3040-015-Q1-E1-D1
ggacaacacaacgcaacacaacgcgcactctctcttttccctcttaacacaaaaaccctatcgttcttcgcggtttcgccgattctcgccatgccgaaagccaaatccgacgccaaagccgccgatagccggttgaagcgcaagggcgctggtgctggaaggaagcaatcgaagaaagctgctaaggatcctaacaagccaaagagacctccaagcgctttcttcgttttcatgtccgagttcagagagcagtttaagaaggagcatcctaacaacaaatccgtcgctgttgtcggtaaagctggtggtgacaaatggaaatcgctgtctgatgctgaaaagcccccttcgttgc

SEQ ID NO: 15447 - DNA, 225 bp, Glycine max
  Clone ID: LIB3040-015-Q1-E1-D10
tttctcgatttcgaaatatatcaaaaccttgggtagaaaaaaaaagtggtatgctgtgtttccaagattggatttcatattcgaatgaacctcgtaatcgtaagaaagtgggttttttaactacgggtctagcaaacgaaaaattgagataggattcaatccaataagatctcccctttcaaaatcggacgtgaaggtttcctttcaatcggctcaagtagttat

SEQ ID NO: 15448 - DNA, 317 bp, Glycine max
  Clone ID: LIB3040-015-Q1-E1-D11
aagcacaaatcataaaatagtagcatagaattgaaaagggaaaaattacttcaaaaccccatcttgaattcaacaattgtaaaactaaatgacaaacataaatttcaaattacaagttttgactctcagatttcatttcccctaataagtccaatgtacattcccattcaaacaactaaaacggcagaaatgactctggtctaaggtttaccaaatcttactagacattgaaagcctaatcaacagccacaattactccgaacctactttattctaaagtaaaatgtacacttgaaaccaaaattgtagtcattccc

SEQ ID NO: 15449 - DNA, 317 bp, Glycine max
  unsure (1)..(317): unsure at all n locations
  Clone ID: LIB3040-015-Q1-E1-D12
gctggccattccgtttcncagatctgctccttccgttccccctcagaaatcagttgaagagcatgggtcgtggagttagcagtggtggtggtcaaagttcattgggttatctttttggcagtggagaggcccctgccccaaaaccagcaacaaataatgccccagcccaacctgaagtgcaggctgtaaataatgtgcctcctccaaaagcatctcctcctactaaaacaatagaccctaacaaggctgctggtatcaacagtcattctactgatggccagaacaccggcaacttcatcacgggccgaccctcaacc

SEQ ID NO: 15450 - DNA, 367 bp, Glycine max
  unsure (1)..(367): unsure at all n locations
  Clone ID: LIB3040-015-Q1-E1-D4
gaggttttggagttacagccgcagcttgaaacagagcagagcgaccttgaagagctatggctgtcggaaagaataagaggatttccaagggaaagaagggtggcaagaagaaagccgctgatccctttgccaagaaagactggtacgatatcaaggccccttccctcttccaggtcaagaatattggcaaaaccctcgtctctcgtacccagggaaccaagattgcatccgaaggactcaaacatcgggtttttgaggtctcattggctgatctccaangggatgaagaccactccttcaagaagattcgtttgagagctgaggacgttcaagggaagaatgttctgacaaacttctggggaatgga

SEQ ID NO: 15451 - DNA, 342 bp, Glycine max
  Clone ID: LIB3040-015-Q1-E1-D5
agaaggggatatattatcaactcaatcccaaaccctagaatttcagatcctcaatcggccagcaccaacagcatcggcggcgacagtcactctccgacaacaacacttccgcggcgaaaaatgtctctggtggcgaacgaggatttccagcacattctgcgtgtgctgaacaccaacgtggatgggaagcagaagataatgttcgctgtgacctccatcaagggtattggaaggagattcgccaacatcgcttgcaagaaggccgatgttgacatgaacaaaagggctggtgagttgagtgctgcagagttggatagtgtgatgactgtggtggcgaaccct

SEQ ID NO: 15452 - DNA, 379 bp, Glycine max
  Clone ID: LIB3040-015-Q1-E1-D6
gaaaacaagaagcaataacactcaaaaactcctctcttttcctctcctcacatttctccccgaacctctccccacattactgcactgtgaggtgtctgaaatagaatagcttcttctgtttcatttgttactatatcacccaccagcaccagcctttgtgctagctctttgattcctttttactcttttttcgtttttttttcctgttctttccctttcccctctgctcgatgatgaatggaaggaacgttgacacaaacaggttccccttcactccttcccagtggcaagagcttgaacaccaagccctcatctacaaatacatggcttcaggtatttccatcccccctgacctttctcttaacatcaaaggaacaac

SEQ ID NO: 15453 - DNA, 312 bp, Glycine max
  Clone ID: LIB3040-015-Q1-E1-D7
ggccgaatgtgtctctccgcagcagccacacttcttcgccgtttcagctgaagagccatccgcaggtaagcaatggttaagcataataatgttatccccaatgggcacttccggaaacactggcaaaactatgtgaagacttggtttaatcaaccagcccgaaagaccagaagacggttggctcggcagaagaaggctgtcaagattttcccccaggcctactgctggatctctcaggcctattgttcatggccagactctgaaatacaacatgaaagtcagagccgggagaggattttcactggaagaatt

SEQ ID NO: 15454 - DNA, 354 bp, Glycine max
  Clone ID: LIB3040-015-Q1-E1-D8
ccctgaaggagaaaaccccatcaacgaacgatgctaacatcatcatagccacaccaatttcgccatcatccgaaaaggcggcacaagttgttccctcaaagaaaaaacaagattcaaagaagcagcaatctttcgaaaaagaattgctggagatgcaggaaatgctgcagcagatgcgcctcgagaaggagaagaccgaagagctcttgaaggtcaaggacgaggctctcaagctgaaggaagaagagcttgaaaaccgtggccgggagcaagagaagcttcagaccgagctcaaaaaattgcagaagttgaaggagtttaaaccctacatgaatttgcctgtgttgaaagata

SEQ ID NO: 15455 - DNA, 301 bp, Glycine max
  Clone ID: LIB3040-015-Q1-E1-D9
gatacttcattcattttatcgctcgcagctgaaaagaaactcaactctactctgcaactcattcctaggatttctacacctcgacgaatcctaggtacttcagaaattttgaatgaatggagatgacaatgtcagcagcaacttgttccaacatgactagattcagtggcattctccggacaacatgtgtatcatcatctcccaagaggaagcatgcaaaaggaatcttgagaaattttaccatatgtgcctcaccatttatatcttcagttgaccctataattgttaattccccttcctt

SEQ ID NO: 15456 - DNA, 355 bp, Glycine max
  Clone ID: LIB3040-015-Q1-E1-E1
ggcagcgtcccaagttccaggtttcagcgagcattctacaatggctactataccagttaatcccaagcctttcttgaacaatttgactgggaagcctgtaattgtgaaactgaagtggggaatggagtacaagggctatctcgtttccgttgattcctatatgaacttgcagctggccaacaccgaggagtacattgagggacaatttactggaaatttgggagagattttaatcagatgtaacaatgttctctaccttcgaggagtaccggaggatgaggaaatcgaagatgctgctgaagactagagagtgatagaagctgctaatggctatgacataaacagaactcgaatt

SEQ ID NO: 15457 - DNA, 334 bp, Glycine max
  Clone ID: LIB3040-015-Q1-E1-E10
gattcgatcaaatactcagaactgttcggtttttctggaaatttttcttctctcagccatctctctctctctctgcgtccatggagttttggggtgttgaggtgaaaagtggagaatctctcaaggttgatccgggagatgacaagattatccacctttcaaatgcatgcctgggggatgtcactaaggataaagaaggtctaccagtaaccctgtatgtcaagtttggtaaccaaaagcttgtacttggaacgctttcttctgaagcttttcctcagatatcttatgatttggtatttgagaaggaatttgagctatcccataactggaaaca

SEQ ID NO: 15458 - DNA, 320 bp, Glycine max
  Clone ID: LIB3040-015-Q1-E1-E12
gattcattgctccctcgaactgttgtttggtctcttctctcttatccatggcatcaacgtttctcaccctaccaactcccttcctacacaaaaccaatgccatcagtttctctaacaagagaccctcatttttgcagaggagctctctgaagattcatgcaattaccaaaaaatgggaacccacaagggttgtgcctcaggctgatagagttcttattcgtttggaggagctttcagataaaacagttggtggagttttgctgcctaaatcagctgttaaatttgagcgctatcttgtgggagaaatcctaactgttggt

SEQ ID NO: 15459 - DNA, 336 bp, Glycine max
  Clone ID: LIB3040-015-Q1-E1-E2
gaacgccaatgtttttttcaaaggagtttcaacctggaatcaaaagagtttaacctaaagtaagaaatccaagtcctaatccaatttaagggacaaaacaagagaacaataacctgacaaagggtttaaccataaaatcgaatccaacattgatttgagatattgataaagtgaatactcatttctcgtcaatgctaggcataatgcgggtatagggacctaaaaaagattatcttttcttcctatcttatgaactttaaggtgtatgaagtgtcatttcctatcttagattttaattttagtaggtagataaagagtccatttaacttaagttga

SEQ ID NO: 15460 - DNA, 326 bp, Glycine max
  Clone ID: LIB3040-015-Q1-E1-E4
gaaggttagattcgttgttgttgttctaaaacgtccacacattctccgtcgccacaacaacaatggctccgaagaaaggtgtgaaaggttccgttgtagcagcgaagaagaaagttcaagagaaggtgacgaatcctttgttcgagaagcgtccgaagcaattcgggatcggaggcgcgctgccgccgaagcgggacctgacgcggttcgtgaagtggccgaagaacgtccaaatccaacgcaagaagcgcatcctcaagcagaagctcaaggtccctcctgcactcaaccagttcaccaaaaccctagacaagaatctcgccacg

SEQ ID NO: 15461 - DNA, 355 bp, Glycine max
  Clone ID: LIB3040-015-Q1-E1-E5
ggcgaaacagagagtgatttcagtgagtgatcggtgttcacttgatctcatcataatcgtcagcgtcaattgaagaagatgccgatcagaaacatcgccgtcggaaggcctgaagaggcgactcaccccgacacgttgaaggcggctttggctgagttcatctcaaccttcatcttcgtgttcgccggctcaggctccggcatcgcctacaacaagctcaccgacaacggcgctgccacccctgccggcctcatctccgcctccatcgcccatgcattcgccctcttcgtcgccgtctccgtcggcgccaacatctccggcggccacgtcaaccccgccgtcaacttcggcgcct

SEQ ID NO: 15462 - DNA, 353 bp, Glycine max
  Clone ID: LIB3040-015-Q1-E1-E6
ggttctagtgtatgtgattgttgtgactcgttcttcttcgtcgttatcttcttcttttgttgtttgtgtgtttgttttttctctcacctgaaaatgtcttgctgcggtggtaactgtggttgcggaagcgcctgcaagtgcggcaacggctgcggaggctgcaagatgtacccagacttgagctacaccgagtcaaccaccaccgagaccttggtcatgggagtggcaccagttaaggctcaattcgagagtgctgaaatgggtgttcccgctgagaacgatggctgcaaatgtggagctaactgcacctgcaacccctgcacttgcaagtgaggtgttggagagctaaagct

SEQ ID NO: 15463 - DNA, 312 bp, Glycine max
  Clone ID: LIB3040-015-Q1-E1-E7
ggcagtttcaaattttcttttccttcactttcccgagaaaaaaataacacttttcactttcttcactacgttctcacttcgatatggctcgtacgaagcaaaccgctcgcaagtccaccggtggcaaggcgccacgtaagcagttggcgaccaaggccgcccggaagtccgctcccgcgaccgggaggagtgaagaagccccaccgcttcaggccgggaaccgtggcgctgagggaaatcagaaagtaccagaagagcaccgagcttctcatcaggaagcttccatttcagaggctcgtgagagaaatcgcg

SEQ ID NO: 15464 - DNA, 353 bp, Glycine max
  Clone ID: LIB3040-015-Q1-E1-E8
attcgagcgggcgcattatattttgggatggttatattcttctttgctcatttagatcttcaatttaaacaacgctctactcaaaattgaaacacaaggtctgcttaatgtcaactgagacaaatgatgggtactaacaatgcacaaaatatggaatctacgctttttaaaaaagttttcttcatgattaaccataaagctgcctaagtactagtactaccctaaataatcccaatcttgtttgccacatccaatgcatcggaatcaggtgtcaacctgacatatgacttcctggtgacatcaggcctggataaagtgttcaattttttgagcctggatgtcacatattttct

SEQ ID NO: 15465 - DNA, 346 bp, Glycine max
  Clone ID: LIB3040-015-Q1-E1-E9
gacggacgagggtttcgtttcgggtttgacgttgttcacaatcactttctgcgcttcactcactcccttcgtgcggttttctttctttgtcgaactcgtgcgaaaatgcgtgagattcttcacatacagggagggcaatgcggaaaccagatcggagcgaagttctgggaggtggtgtgcgcggagcacgggatcgattccacggggaggtaccagggggacaacgagttgcaactcgagcgagtcaacgtctattacaatgaagcgagttgcggaaggttcgtgccgagggcggtgctcatggatctagagccggggaccatggacagcgtcagatctggtccct

SEQ ID NO: 15466 - DNA, 280 bp, Glycine max
  Clone ID: LIB3040-015-Q1-E1-F1
gacagcgaaacagagagtgatttcagtgagtgatcggtgttcacttgatctcatcataatcgtcagcgtcaattgaagaagatgccgatcagaaacatcgccgtcggaaggcctgaagaggcgactcaccccgacacgttgaaggcggctttggctgagttcatctcaaccttcatcttcgtgttcgccggctcacgctccggcatcgcctacaacaagctcaccgacaacggcgctgccacccctgccgggctcatctccgcctccatcgcccatgcat

SEQ ID NO: 15467 - DNA, 333 bp, Glycine max
  Clone ID: LIB3040-015-Q1-E1-F10
ggcgcattgaacgaaaattaaggtttgtagtgtagcaggaagaagcagcaatggcgccgaagataacacgtaaggttagcagaaaccctgaattgataaggggaatcggaaagtactcgaggtcgcagatgtaccacaagaggggcatttgggctatcaaggccaaaaacggtggtgttttacctcgccacgaccctaaacccaagcctgaagctcctgccgaaaaaccacccaaattttaccctgctgatgatatcaagaagccccttgtcaacaagcacaaaccgaaaccagctaagctcagtgcaaccatttggcatctgataatgtaaa

SEQ ID NO: 15468 - DNA, 57 bp, Glycine max; identical to SEQ ID NO: 13136
  unsure (1)..(57): unsure at all n locations
  Clone ID: LIB3040-015-Q1-E1-F11

SEQ ID NO: 15469 - DNA, 325 bp, Glycine max; identical to SEQ ID NO: 15206
  Clone ID: LIB3040-015-Q1-E1-F12

SEQ ID NO: 15470 - DNA, 63 bp, Glycine max
  Clone ID: LIB3040-015-Q1-E1-F4
ggggccttcactctgaaccaaataccatagtcttctctttgtccgtgacaaaacagttcccac

SEQ ID NO: 15471 - DNA, 350 bp, Glycine max
  Clone ID: LIB3040-015-Q1-E1-F6
gggacgggaagaaacgcatcgagcgtggagaaagagaaggatgatgaggttaaggtggagtgtactcgtaatggtcacgttcgctgtttctctgttttggcttggacccctgcaagtcaaagcctctaattctgtttccgccttcgttcaaaacgccatctactccaacagaatcgccgttttctccaaatcctattgcccctactgtttgcgcgccaaacgcttgcttgctgaactcaatgaaaaaccttttgtggtggtgctcgatttgcgagatgatgggtttcaaattcagagtgttcttctggatttgataggtagaaggacagtcccgcaagtgtttgtgaatg

SEQ ID NO: 15472 - DNA, 334 bp, Glycine max
  Clone ID: LIB3040-015-Q1-E1-F8
gatcaccactttcattttgagcgtgtcgtgtctgtttctgagttatggcacagaagacgtttctgattctcagaaattaacatgaagggcatggttttgaagtaaataaatccagctgtgtcttgattgatgagtttggaagcattgcatttacattttgcagtgttggtgggtagttgttgctctctatagccatttctgaagtacactatagtgtgtatgtgtgtgtgtgatagagtgtcgagtttgaagattaagctacaaaggtttgtcctgttgtcttagttgctcattcttaaagaaacagtggggaacaacagtgatagctcttgac

SEQ ID NO: 15473 - DNA, 330 bp, Glycine max
  Clone ID: LIB3040-015-Q1-E1-F9
gattttcgtcgtgagtggtgacgtgccctagccccatatctagtctccctctctcaatctcacatctctcgtcgccaccgccgcgccgcacggaggcacccacggaaccaatctagccatcagttgaaacagtgagcttacaaaaaatggcaactgcacctgcacaaattcctacaagctttggccatgagttgagggcttgtcttcgttgccgccttgtcaaaacctatgatcagttcagagagtcaggctgtgagaactgctcattctttaagatggaagaagatcacgagcgtgttgttgattgcactactcccaattttaatggga

SEQ ID NO: 15474 - DNA, 363 bp, Glycine max
  Clone ID: LIB3040-015-Q1-E1-G1
ggttggtagaagaaattgggcgtgtgggagttgttgaatcgggaagcaaaaaaaatgagaatccatcacatagcatgcctccaagacaattattcctatctgatcgtagacgagagcacgaaggaagccgcggcggtggacccggtcgaaccggagaaggttcttgaagttgccagctcgcacggcctcactctcaaattcgtcctcaccacccaccatcactgggatcatgctggtggaaacgacaagataaagcagctggtgccaggaatcaaagtctatggtggttccattgaaaacgtcaagggttgcactgacaaagttgaaaacggtgataaggtctctcttggaagctgaatcact

SEQ ID NO: 15475 - DNA, 314 bp, Glycine max
  Clone ID: LIB3040-015-Q1-E1-G11
gacaccatccactactcttcttagttccagcacaacaagctcttcatttctcccacactttcttttctttcaccaaaaatgtcaccagatttcacacttttgttcttcccggaactcatgcagtcccctatgatcactttccaagccaccctctgcgtccttctcttcaccctcatgttcacgctgctcttcactcctggtgggcttccttgggcctgggcccggcccagacccatcatccctggcccagtaactgccctgttagggatctttactggctccacgcctcaacgtgctttatccaaactcgcccg

SEQ ID NO: 15476 - DNA, 353 bp, Glycine max
  unsure (1)..(353): unsure at all n locations
  Clone ID: LIB3040-015-Q1-E1-G3
gaatcctcagaatcagcttcagcctttctctctaactccctcactcacactcacagttaagcaatggcggggaaaagangaaaagggcttcttgcagcgaaaaccaccgcggctaacaaggacaaagacaaggacaagaagagacctatttctcgttcatctcgtgccggaatccagtttcctgtgggacgtatccataggcagctgaaacaaagggtccaagctaatggacgtgttggtgccactgctgccgtatacttagcctcaattcttgagtatcttactgctgaagttcttgaacttgctgggaatgcaagcaaggatctgaaggtgaaaaggataacaccaaggca

SEQ ID NO: 15477 - DNA, 349 bp, Glycine max
  Clone ID: LIB3040-015-Q1-E1-G4
ggctcttactctctttcgtcagtttcgggggaagagatccagcagcaatggtgtacgtcaaggctcagaaatcaaaagcctacttcaagagatatcaagtcaagttcaagagaagaagagagggaaaaaccgattaccgtgccaggattcggttgattaatcaggacaagaacaaatataacactccgaaataccgatttgtggttcgctttagcaacaaggacattgttgcacaaataatatctgctagcattgccggcgatttagttcttgctacagcatattcacatgagctgccacgatatggtcttgaagtaggacttacaaattatgcagcagcttattgcac

SEQ ID NO: 15478 - DNA, 336 bp, Glycine max
  Clone ID: LIB3040-015-Q1-E1-G5
gacacaccatccgttctagtctcaacttctgctcttccaactcctacaacgcttttctctgcactcatgggcaaggtcaagatcggaatcaacggatttggaagaattggccgtttggttgccagagtcgctctgcaaagagacgatgttgaactcgttgccgttaacgaccctttcattaccaccgattacatgacatacatgtttaaatacgacagtgttcacggacactggaagcatcacgatgtcaccgttaaggacgagaagacccttctcttcggtgacaaggcagtcactgtttttggacacagaaaccctgaagagatcccatggggg

SEQ ID NO: 15479 - DNA, 397 bp, Glycine max
  Clone ID: LIB3040-015-Q1-E1-G6
ggacaacacagaacaaaaacaaagaaaaaaaaaaacccttagccaacacaaccatcatggccacctctgctattcagcaatcagcattcactggtcaaactgctctgaagcagctcaatgagttcgtccgcaagaccggtggcgccggcaaaggtcgcactaacatgcgccgcaccgtcaagagtgctcctcagagcatttggtatggccctgaccgtcccaagtacttgggtccattctcggagcagattccatcatacctgaccggagaattccctggtgactacggatgggacactgctggattatcagctgacccggaaaccttcgccaggaaccgggagctggaggtgattcacagcagatgggcaatgcttggtgcccttggctgcacctt

SEQ ID NO: 15480 - DNA, 359 bp, Glycine max
  Clone ID: LIB3040-015-Q1-E1-G8
ggttctagtgtgtgattgtttgttgttgtaactcgttcttcttcttttgttgttctgtgtttgtgtttgttttttctctcacctgaaaatgtcttgctgcggtggtaactgtggttgcggaagctcctgcaagtgcggcaacggctgcggaggctgcaagatgtacccagacttgagctacactgagtcaaccaccaccgagaccttggtcatgggagtggcacctgttaaggctcaatttgagggtgctgaaatgggtgtgcccgctgagaacgatggctgcaaatgtggaccaaactgctcctgcaacccctgcacttgcaagtgaggtgttgggagagcaagcttcaagcagagat

SEQ ID NO: 15481 - DNA, 360 bp, Glycine max
  Clone ID: LIB3040-015-Q1-E1-H1
gattctgttccgcagaaaaccctagcccaaccggatcttcacgactaggagatggcaaagtcgaagaaccacaccgctcacaaccagtcctacaaggcccataagaatggcatcaaaaagccaaagaggcatcgccacacttccaccaaagggatggatccaaagtttctgaggaaccagaggtacgcgaggaagcataacaagaagagcggtgaaacagccaccgaagaagagtaaagtgccactctcaaatgggcctattaggatttgatttgttatttaagccccatatgttttgtgtcgaatctatctttagtagtatagtcatttttatgagttaacttaatccagagagaatgc

SEQ ID NO: 15482 - DNA, 245 bp, Glycine max
  Clone ID: LIB3040-015-Q1-E1-H10
atcaaaaaagaaggtccaaaagtcaatgcgaagttcgagctgaagccgccaccatatccactgaatggtttggagccggtgatgagccagcagacacttgagtttcattgggggaaacaccacaagacatatgtggaaaatctgaaaaaacaaattgttgggacagagcttgatgggaaatcactagaagagattatagtgacatcatataataagggtgacattcctccagctttcaacaatgc

SEQ ID NO: 15483 - DNA, 338 bp, Glycine max
  Clone ID: LIB3040-015-Q1-E1-H11
ggtacgtcgtatatgtggttgatcttttgctggttgtttgttttgttccttccaattgtcagatctgaatcaccggactcactcttcacactcactcacactgaatggcttctgaaggcgaccatcaccaccaccaccaccaccatcaagatcacgatcatcatcatcatgatcatgatcaccatcatcatcacgatggagagggagagaccaactcatgggtaggtaaggatgggaaggtgtaccatagccacgatggtctggcgccgcattctcacgaacccatttactcccccggctacttcaccagaagagctccaccgcttctcaacagaaac

SEQ ID NO: 15484 - DNA, 55 bp, Glycine max
  Clone ID: LIB3040-015-Q1-E1-H12
gttccggttgccaaaaaacaacaaaagggtacggctgcaaaaaaacgacataatg

SEQ ID NO: 15485 - DNA, 337 bp, Glycine max
  Clone ID: LIB3040-015-Q1-E1-H2
ggattcgtaaagattttttttttcttttactcacagtcatcccgcaatccccaaatcgcccctcctctcgtcgaaacccgaccccatctccaaattcggctccggcatcgtaccatttctctcactacttcggggattcgctccttcttccgtccatggctctcccagacactctcactagcactcccaccagttctatggatgaaagggaatccttgaagaatgacactccaatttgcagcaatgcttgtaaggatgtgacaaaggagaaaaccttctatcttcaaccagtgtcacctttttcttctggtgtaggtttgccatatggcactgaagg

SEQ ID NO: 15486 - DNA, 344 bp, Glycine max
  Clone ID: LIB3040-015-Q1-E1-H4
gactccgcagctgcagcactcaaaaccctagagaggacgagagagcgtgcaactttcggcaaccacagaccatgacattcaagcgcaggaatggaggtcgcaacaaacacggccgcggccatgtcaaattcatccgatgctccaactgcggaaaatgctgccccaaggacaaggccatcaagaggtttttggttaagaacattgttgaacaggctgcagtcagagatgtgcaggaagcttgtgtctatgaacaatatacacttccaaaactctatgtgaagatgcagtactgtgtttcctgtgctatccactctcatgttgtgagggttcgattccgcaccgac

SEQ ID NO: 15487 - DNA, 352 bp, Glycine max
  Clone ID: LIB3040-015-Q1-E1-H5
gacacaccatccgttctagtctcaacttctgctcttccaactcctacaacgcttttctctgcactcatgggcaaggtcaagatcggaatcaacggatttggaagaattggccgtttggttgccagagtcgctctgcaaagagacgatgttgaactcgttgccgttaacgaccctttcattaccaccgattacatgacatacatgtttaaatacgacagtgttcacggacactggaagcatcacgatgtcaccgttaaggacgagaagacccttctcttcggtgacaaggcagtcactgtttttggacacagaaaccctgaagagatccatgggggtcaactggagctgacat

SEQ ID NO: 15488 - DNA, 336 bp, Glycine max
  Clone ID: LIB3040-015-Q1-E1-H6
gacaacacagaacaataacaaagaaaaaaaaaaacccttagccaacacaaccatcatggccacctctgctattcagcaatcagcattcactggtcaaactgctctgaagcagctcaatgagttcgtccgcaagaccggtggcgccggcaaaggtcgcactaacatgcgccgcaccgtcaagagtgctcctcagagcatttggtatggccctgaccgtcccaagtacttgggtccattctcggagcagattccatcatacctgaccggagaattccctggtgactacggatgggacactgctggattatcagctgacccggaaaccttcgccaggaa

SEQ ID NO: 15489 - DNA, 349 bp, Glycine max
  Clone ID: LIB3040-015-Q1-E1-H7
gatctcaatttcttttctctttgtcgcaaagagaagagatctgcctcctttttatcaaatctatctcttcttcaagaatagttgaaaatggggttgtctttcaacaagttgttcagccgactgtttgccaagaaagagatgcgtatactgatggtgggtctcgatgctgcgggtaagaccaccattctgtacaagctcaagcttggagagattgtcaccaccattcccaccattgggtttaatgtggaaactgtggaatataagaacatcagcttcactgtctgggatgttggaggtcaggacaagatccgtcctttgtggagacattacttccaaaatacacaaggac

SEQ ID NO: 15490 - DNA, 371 bp, Glycine max
  Clone ID: LIB3040-015-Q1-E1-H9
aggctggtcatggcccaatataaagggatgcttagtttgtaataggcagcagagaaaaataatagagtttccttcttcacgttcttgcttcttgggagggtcctagacctcaaatgctaggaaacattgagctgattttcagttcataacatgtaacaaccttaataacttctttgacatatatgcgttccttcaaataattatacttaaagtaccaaactattaactcaatcaccggtggcttctcttctcttccacaatgccttgctatctcatcatcacttcatgatttggatctacaactgaacaagcttcatggaactttgccaagtacctttgcaaaggactgttggctcataacataatgcatc

SEQ ID NO: 15491 - DNA, 396 bp, Glycine max
  unsure (1)..(396): unsure at all n locations
  Clone ID: LIB3040-016-Q1-E1-A1
gacttccagatttcaaagaaggcgtcttcataaacgcctttcttctccgtttccgtttcctcgttcgaattcgctttttgatctgcgaaaatgagagagtgcatctcgatccacattggtcaggctggtatccaggtcggaaatgcttgctgggagctctactgcctcgagcacggcatcgggcccgatgggcaaatgccaagtgacaagacagttggcggtggtgatgatgctttcaatactttcttcagcgagactggtgctggaaagcacgtgccacgtgcagtgtttgtagatcttgagcccactgttattgatgaggtgagaaccggaacttaccgccagcttttccacccagagcagctcatcagcggcanagaagatgccgccaacaac

SEQ ID NO: 15492 - DNA, 359 bp, Glycine max
  Clone ID: LIB3040-016-Q1-E1-A10
gagggttttgcgctgttgttgctgctcatcctccgtaacctccgagctctgcaccgaagaacgaagccatggggaagacacatggaatgggatctgctcgcaagctcaagtcccaccgcaggaggcaaaggtgggctgacaagtcatacaagaaatcacatcttggaaatgaatggaagaaaccttttgctggttcatcccatgccaagggaattgtccttgaaaagataggtattgaggctaagcagcccaactctgccattcgtaagtgtgccagggttcaacttatcaagaatgggaagaagattgccgcttttgtccctaatgacggttgcttgaactacattgaagagaatgac

SEQ ID NO: 15493 - DNA, 362 bp, Glycine max
  Clone ID: LIB3040-016-Q1-E1-A2
tggtgcattactggagtgacgccagccagcacaagacagtggccaatggaaatcatgtcacatatagatacttcaattaatcatctggttttatacatcactgcacccttagagatttaaagtttaacacaaaatattattatgaacttggaattgggcataactactaggcaattttggtttgtgactcctcctgaagttcaccctgatgcgccttatacatttggtctcattggtgatctgggtcaaacttttgattcaaacaagacccttgttcactatgaatcaaaccctcacaaaggacaagctgtgttgtatgttggagacctctcttatgcagataatcacccaaatcatgataa

SEQ ID NO: 15494 - DNA, 358 bp, Glycine max
  Clone ID: LIB3040-016-Q1-E1-A4
gattcagaggcaacaaaggagttgtaaattaagagcatggctgcacaagctcttgtatcatcatcatctcttaccttctcagccgaggctacaagacaaagtcttggaccaagatcactccaatctccatttggcttctcaagaaaagcctcctttcttgttaaggcagctgctactccccctgtcaagcaaggatcagacagacctttgtggtttgcatcaaagcaaagtctttcctacttggatggcaggtaaatttcatcctagttcatcaatagcttaacgtaacgatatgatcatgtctggatatataaacttctcatgagcacttgaagaataaaaaggtaaaatgaagttt

SEQ ID NO: 15495 - DNA, 349 bp, Glycine max
  unsure (1)..(349): unsure at all n locations
  Clone ID: LIB3040-016-Q1-E1-A6
gaggtcgcgagcgagcatcttcgagttgcatttcgcagtgtgtgtgagaagaagagaaaaatggagaaaatgatgcgactgagaccactgttccgatcactgagttgcagatcttatcatgccttcccattcatcaaccatgtcgttcttcgaccttctcttaactctcgctctcccaatcctcttccttctccttcacactcagaatgcatgtctcctttctcgatgggtttagggagcatgcgattctatagtgaagatttgacncacgtgcccaatattaaggaccctgcactttacaatgctttcaaggatttgatggcagtaagttggagtgagcttcccggat

SEQ ID NO: 15496 - DNA, 378 bp, Glycine max
  Clone ID: LIB3040-016-Q1-E1-A7
gaaatctatttcagtttgaattttgaaagtgagtgtggcgtaccgtgtacgtatctgcagaaagtgaatgaatggtaatgggggaagaagggtgcaaggtatgtgttacaggaggcagtggttacattggttcctggctcatcaagaagctactggccaagggctacacagtccatgcaactctcagagacttgaagaatgagtcaaaggttggcctcttaaagagccttccacaatcagaaggaaaactggtgctgtttgaagctgatatttacaacccaaatgattttgaccttgcaattgaaggctgcaagtttgtgtttcatgttgctactcccatgatccatgaacctggctcccagtacaaggatactagtg

SEQ ID NO: 15497 - DNA, 359 bp, Glycine max
  Clone ID: LIB3040-016-Q1-E1-A8
ggttttgattagggtttgtcattagcacttcttcttttcacactgccgctgcaacaatggcttcagagaagaaactttcgaacccaatgagggagataagagtgcagaagctcgttctcaatatctctgttggcgagagtggagatcgtctcaccagagccgccaaggtgttggaacaacttagtggccaaaccccagtgttttccaaagcaaggtacactgttcgttcctttgggattagaagagatgagaagattgcatgctatgtcactgtcataggtgacaaggcaatgcaacttttggagagtggtttgaaggttaaggaatatgaacttctcagaaggaatttcactgatact

SEQ ID NO: 15498 - DNA, 323 bp, Glycine max
  Clone ID: LIB3040-016-Q1-E1-A9
gaccataaccgaggtcgacgcttcgcgagtgcgcatcctaagacccacgtcttttttgttgtcgtggcctcaacgcaacatcattatcactgtcactataaaaaccctacttggctcttttcttcacttgttcactttcttccaacctctaacctacctctttttcttctctctcaacaacttcaccttcttcctcctcgatcatgtctcacttcaagggcaagtaccatgatgagcttatcgccaatgctgcgtacattggcactcctggaaagggtattcttgctgctgatgagtcaacagggacaattggcaagcgtttg

SEQ ID NO: 15499 - DNA, 399 bp, Glycine max
  Clone ID: LIB3040-016-Q1-E1-B1
gaggaagccacatagagacacaatacagagtgagttgttgctccttcgccacaactctctgccaacatgggtatctccagagattctatgcacaagaggcgtgccactggtggcaagaagaaggcctggaggaaaaagagaaagtatgagcttggtcgccagcctgctaacactaagctgtcaagcaacaagacagtcaggaggatccgtgttagaggtggaaatgtgaaatggagggcattgagattggatactggaaattactcctggggaagtgaagctgtaactcgcaagactcgtgtactagatgtggtttacaatgcctcaaacaatgagcttgtgcgtactcagactcttgtcaaaagtgctatcggtcaaggtgatgctgctccattcaaa

SEQ ID NO: 15500 - DNA, 351 bp, Glycine max
  Clone ID: LIB3040-016-Q1-E1-B10
gagagccggcttcgtcctctgcgcaggaattaggaatattcgacaggtagagtttcttcaatggctcctaaagttgataagaagaatgatccaaaggcccaggccttgaagactgctaaggcagttaagtcaggtgctacctttaagaagaaggtaaagaagatccgaacttctgtcactttccacaggccgaagaccttgaagaaggacaggaaccccaagtaccctcgcattagcgccccgccgaggaacaagcttgatcattatcagatcctgaaataccccctcaccactgagtctgccatgaagaagattgagggacacaacactttggttttcattgtcgacctg

SEQ ID NO: 15501 - DNA, 363 bp, Glycine max
  Clone ID: LIB3040-016-Q1-E1-B11
gagtctcagtctctacacacacctcagaagaacagaacagaaccaccacataacagtgcttttcaaaggcggtttgagcaatggcgttcttaaataaaattgggaatctgctcaagaattctgctgtcaagcacatcaatcaggatttttcggcgtctaccccttcacttttccaagcaattagatccatgtcatctgcaaagcttttcgtcggaggtatttcttacagcactgatgatatgagtttgcgagagtcttttgctcgctatggagaagtaattgatgtcaaggttattatggatcgtgaaactggcaagtcaagaggttttggctttgtaacttttgcaacaagtgacgatgcat

SEQ ID NO: 15502 - DNA, 371 bp, Glycine max
  unsure (1)..(371): unsure at all n locations
  Clone ID: LIB3040-016-Q1-E1-B12
gaacacttgtattgtctcaagcaaccatggcaatggcaacccaagcctctctcttaaccccacccctctccggtctcaaagccagcgaccgcgcctccgtgccatggaagcaaaactccagcctctccttctccagcccgaagcccctcaagttctccagaacaatcagagcagcagccgccgacgagaccacagaggcaccagcaaaagtagaggctgcaccggtcgggttcaccccaccagaacttgacccaaacaccccttccccgatcttcgggggcagcaccggcgggctcctgcgcaaggcacaagtggacgagttttatgtcattacgtgggactcacccanagaacagatctttgaaatgcca

SEQ ID NO: 15503 - DNA, 345 bp, Glycine max
  Clone ID: LIB3040-016-Q1-E1-B2
acgggtgagacaggagcaaaaaaagggatccacgtgcgtttagattacggttcgacactaaactgtcactggttatactgcctccacttcactgcctttctaaacttttttttcgaacccaattagggatactgtctgaatggctcctgccccatcaacactgtcggccatagtggggattttctcaacacagactgatggtgatgcgcagacttactgaacatgctccattgctctcaacattacggtagactgacctgtcattagggatcataaggtttgtgactcatgcagtgcatctcacaggggtgagtttcaaagccttccaagatgtgtagaatggtt

SEQ ID NO: 15504 - DNA, 318 bp, Glycine max
  Clone ID: LIB3040-016-Q1-E1-B3
ggagcgccaatgtttttttcagaggagtttcatcttgtaatcaaaagagtttatcttatagtaagaaatcgatgtcttactccattttaaggaacaaaacaagagaacaatagcctgacaaagggtttagccataaaatcgaatccatcattgatttgagatattgataaggtgaatactcatttctcgtcaatgctaggcataatgcgggtatagggacctaaaaaagattatcttttcttcctatcttatgaactttaaggtgtatgaagtgtcatttcctatcttagattttaattttagtaggtagataaagag

SEQ ID NO: 15505 - DNA, 282 bp, Glycine max
  Clone ID: LIB3040-016-Q1-E1-B5
gagtaacgtttgtctcaataaaccccagtgtaggccgcctggatctattgcctaccatcaacatgtggcgcctagcgagcaagtcagcacttaaccgagtctgatcgaattgacatcggcttagcgcaaccatggacatgatgtctgtctatatctgactgtcagtcaatggttcaacaataaacgtttcagactccccgcttatcccattactaattgtgcgcttaccgctatgcctgagcttacctaagtcacagtttttcatcatggttttctgatttg

SEQ ID NO: 15506 - DNA, 375 bp, Glycine max
  unsure (1)..(375): unsure at all n locations
  Clone ID: LIB3040-016-Q1-E1-B6
ggcgtacgcagcttcatccctaacgcgtgcatagcagagtcagagacagagacgcagccatggggcggagacctgcgaggtgttataggcaaattaagaacaagccataccccaagtcacgtttctgccgtggtgttcctgatcccaagatcaggatttatgatgttggtatgaagaagaagggtgttgatgagtttcctttctgtgtccatctggttagttgggagaaggaaaatgtttcaagtgaggccctggaagctgctcgcattgcttgcaacaagtacatggccaaatttgctggaaaggatgctttccacttgagagtcanggtgcacccattccatgttcttaggatcaacaagatgctttcgtgtg

SEQ ID NO: 15507 - DNA, 276 bp, Glycine max
  Clone ID: LIB3040-016-Q1-E1-B9
gatagcaaaatcgtttctccaatttaatcaccattgtacaacccaattcccttcgtcgttttcgattaagagagcaatggcacgtaccaagcaaaccgctcgcaagtccaccggaggaaaggctccgaggaagcaattggcaaccaaagccgctcgcaagtcagccccggcgaccggcggagtgaagaagccccaccgcttcaggccaggaacggtggctctgagggagattcgaaagtaccagaagagcaccgaacttctgattcgaaaactccc

SEQ ID NO: 15508 - DNA, 248 bp, Glycine max
  Clone ID: LIB3040-016-Q1-E1-C1
ggaagacgaagattgcattaatacaggctacgtgacatgtaggccatgcaggatgtcaccatttctataccacccgtgatggtcgccacttaacacttctgacatggtccgacgtgatataattttgccagccatgtttcctgttattcccgtcaccatgtgcccgaaatagcatcgttatgaaatggtcgttcgacactcattcacttttgatcccaccccctggatctgatgttcgaatccggaat

SEQ ID NO: 15509 - DNA, 327 bp, Glycine max
  Clone ID: LIB3040-016-Q1-E1-C10
agggagggtgctctctctgcattccttccagttctgccatatctccctgtttcagcagatggatcagatggcctaaactatgatggtagagatggtaaaagacatggacgtggacattcatattcaagtgggtatggaggctcaagtgatttagcagctggtgacgtctatggaagctatgatggttctcagcttggaagcaacagtgcttatggggcttatggaagttattctttgggacggtctagtactgctgggttgtcgagtcagagtggtgtttctaggaggagagaccatgcttactagacataatggtctatgcagctg

SEQ ID NO: 15510 - DNA, 319 bp, Glycine max
  Clone ID: LIB3040-016-Q1-E1-C12
gctaattcccaatttaataaagtagataaatatgcttgaaacggtggtgtgtgggttttagggtttttggcagcaaggatggcgtcgagaccagaggtagttgcgccgcctgagattttctacgacgatgccgaagctcgcaagtacacctcttcttcccgtattgttcaaattcaggcgacgctgtcagagagagctctcgaactacttgctttgcctgatgacagcgttcctaaattactccttgatatcggttgtggatcgggacttagcggtgagacactctccgagaatggacaccattggattgggcttgaca

SEQ ID NO: 15511 - DNA, 340 bp, Glycine max
  Clone ID: LIB3040-016-Q1-E1-C2
cacctcatgttatcaccgttggagttggggaggacattgtagcaaagttattgtcatttgcaaggcagagaccaagggctgtgtgcatcttaacaggaactgggacaatttcttcagtcactctgcgccaacccgcttctactagcatcagtgttacatatgagggccgatttcaaatattatgcttgtctggttcttacttggttgctgaagaaggtggacctcacaatagaacgggtggcatgagtgtttccctttctagtcctgatggtcatatcattggtggtggtgttactaggcttgttgctgcaagcccagtgcaagtggtagcatgcagttt

SEQ ID NO: 15512 - DNA, 364 bp, Glycine max
  Clone ID: LIB3040-016-Q1-E1-C4
gagagactttggtctcatgaacctgcagtgactagaacctgcttctttgcctcctttcaagaatggtttacactacagttagtttgtagtgtagtgtgtgtgataatagtaacttcacttcaaggacattatccacttgaggtttgtttgtaactgataagcagtaattgaaaacatgaagaacgtttctggcttctttgttttgctcttggtacttggagcaactctgtcgttccttaacttcttaagtcccacttgtgcctcatggttttctgatttgattgctaccaactgtggtgataaagctacactgattgcactaagcatgaaacttaacgaaagtgacactagtactattaaaagc

SEQ ID NO: 15513 - DNA, 363 bp, Glycine max
  Clone ID: LIB3040-016-Q1-E1-C5
ggaacttctcacgttcatttctacacatccctagctctgtcgttccgtcgttgacgatggcgtttcgggtgcgaagccctgacctccgctctctctttcttctctctctcttgtccatcgcttccgccaatgtcttcttcgaagagcgtttcgatgacgggtgggaaaatcgatgggttaaatcagattggaaaaaagatgagaacgtggctggggagtggaaccacacctctggtcaatggaatggagacgctaatgacaaaggtattcaaaccagtgaggattacagattctatgctatttcagctgagtaccctgaattcagcaacaagggtaagacactagtctttcaattttctgtta

SEQ ID NO: 15514 - DNA, 393 bp, Glycine max
  Clone ID: LIB3040-016-Q1-E1-C6
gacatttctgcgtggcgtctccggtgagggaaaagtagtagaagagaagatgtcgaccgtaccaggacagctcatctgggagatcgtgaagaagaacaactcctttttggtgaaagagttcggaaggggcactcagagcgtgcagttcagcagagagcccaacaatctctacaacctcaacactttcaagtactccggtttggcgaaccagaaaactgtcactgttcaacctgctggtaaagaccagtccgtgttgctcgcaacaaccaagacaaagaagcaaaacaagcctgctgctttgcttcacaaatctgtcatgaaaaaggagttccgtaggatggcaaaggctgtgcaaaatcaggtagcagataactactacaggcctgatctcaa

SEQ ID NO: 15515 - DNA, 355 bp, Glycine max
  Clone ID: LIB3040-016-Q1-E1-C7
gactgcaaacagagtcaacaacaacacacacaaacacaacgtcatgaaatcgccgcagcacaaaaacaaaacaccaaaatcccgatcagatcctcaacaacaacaaaaatccaattccctggccgtcaccgttttccgaaatgcacccgattattattcctgcgacccccttattccgttaagcacgtgcctccccgcctcgggcacgtgcgccgccagaatgcgcctactgccgcatgcagatcaggctctcagtctccgccgctccccccgcttcaattctgctccggccgccgtggatggcggcaatgcgggctccagaaagcggaagcggtcgccggaaacggcggcgacg

SEQ ID NO: 15516 - DNA, 368 bp, Glycine max
  unsure (1)..(368): unsure at all n locations
  Clone ID: LIB3040-016-Q1-E1-C9
gatgccgaaaagtagtaccaagatggcttcagttgtgtatctcctctttggcttccatctcattgttatcatgtcaagttccttacccgcaactagtgaagtgtttgcaaaacagtatccatccacagaacccgtggaagaaaaactcacccaactccacttctatttccataacaacataacgggggaacacccaactgctatgaaaactgttttgcctcctaaggggtccattcatggttttggggctacttacatgatggatgaccctctaactgaaggaccaagtccaacttcaaagcttgtgggaagatccanggaatatacgctttggcttcacaacatgagcctgggttgctcatggtgac

SEQ ID NO: 15517 - DNA, 309 bp, Glycine max
  Clone ID: LIB3040-016-Q1-E1-D12
gtcaagtcataagtgtgtgtataatataactgataactggtgctgtgtgaatgacatatttcaatgttgaacaattccttcttgagttcttctgaaaaaaaaaaaaaaaaaaaaaaaaaaaaaaataaaaaaaaaaaaaaaaataaaaaaaaaaagcataaaaattcaatagaaaaaaacataagcacaataaaaaaaaaaggggggcgcccaaaagtttaaaatttaaattgggtgagaaggaaatttaaaaccttttaaaaggggccacaaaattcaaataaaggggacttcttaaaaaacctttta

SEQ ID NO: 15518 - DNA, 364 bp, Glycine max
  Clone ID: LIB3040-016-Q1-E1-D3
aagaaatcttcaaagtttctaccggtcattggttggtcaatgtggttttctgaatatcttttcctggagagaagttgggccaaggatgaacgcacattaaagtcgggcctacagcaactgagggatttccctcttcccttttggttggctctctttgtagaaggaactcgctttacccaggccaaactattagctgctcaggagtatgcagcctcagctggattgcctgttccaagaaatgttttgattccaagaactaagggttttgtttcagcagtaaaccatatgcgctcgtttgttcctgccatttatgatgtaactgtggcaattcccaagagttcacctgctcctacaatgctaagac

SEQ ID NO: 15519 - DNA, 369 bp, Glycine max
  Clone ID: LIB3040-016-Q1-E1-D7
gacacaaactttattacagttgttgtattgtaattaagcaagaatattaggcaatggagtcttctagaacttcaactactcttgctctttttttaaccatcaatttgcttttctttgtcatggcaagtggctgctacacttgcacacagcctaagccaaaccctatcccattcccttaccctaaccctagtcctgccgcgaagagctgccccagggacgcacttaagctcggagtgtgcgcaaacgtgcttaatggaccaattggtgctattgtagggtcaccaccggaacaaccatgttgctcagtgctagaagggcttcttgatcttgaagttgcggtttgcctctgcactgccatcaaagccaaca

SEQ ID NO: 15520 - DNA, 79 bp, Glycine max; identical to SEQ ID NO: 15389
  Clone ID: LIB3040-016-Q1-E1-D9

SEQ ID NO: 15521 - DNA, 312 bp, Glycine max
  Clone ID: LIB3040-016-Q1-E1-E11
aaagagacccggaaagggtgggaaccgcttttggaaatccattgggcttggatttaagactcccagggaagccatcgaaggaacctacattgacaagaagtgccccttcactggcaatgtttccatccgtggccgtatcttggctggaacatgacacagtgctaagatgaacaggactattattgttaggaggaattatctccattttatcaagaagtaccagaggtacgagaaaaggcactccaacattcctgctcatatatcacctgctttccgtgtgaaggaaggagatcacgttattattggtcaatg

SEQ ID NO: 15522 - DNA, 323 bp, Glycine max
  Clone ID: LIB3040-016-Q1-E1-E12
ggtgtagtataggattctcttctttattccttttgtaatttcattcattcttaatctttgtgaaaaataatgttcatcgagaattttaaggttgagtgtcctaatgtgaagtacaccgagactgagattcagtccgtgtacaactacgaaaccaccgaacttgttcacgagaacaggaatggcacctatcagtggattgtcaaacccaaatctgtcaaatacgaatttaaaaccaacatccatgttcctaaattaggggtaatgcttgtgggttggggtggaaacaacggctcaaccctcaccggtggtgttattgctaaccg

SEQ ID NO: 15523 - DNA, 251 bp, Glycine max
  Clone ID: LIB3040-016-Q1-E1-E3
tcttcacataattttgcatatgggagcttggaaattaaatgatacagtttgttcaatactgcttgcctaaattagagtacacacgggctggtttactagttattactgattcaaaaaagataaatgaatgtttttttattaacaaataatacaaagaaaaacattagggaattccattgttgaagcttcaaataaaaacgctattgattgccgaaagttggtggttgtcaatataggcacacacacacaat

SEQ ID NO: 15524 - DNA, 391 bp, Glycine max
  Clone ID: LIB3040-016-Q1-E1-E5
gacagcacaacactctttgcaacacaacaaaaaaagacaacacagagagaagcgtcttaataaacgctcttctctgaaaaacctgatttcttctcttcttctcttctctttcgtttcgatcttcgatctctgaaaatgagagagtgcatttcaatccacatcggtcaggccggtattcaggtcggaaacgcctgctgggagctctactgcctcgaacacggcattcagcctgatgggcagatgccaagtgataagactgttggtggaggtgatgatgctttcaacaccttcttcagtgaaactggggctggaaagcacgtgcctcgtgcgatttttgtagatctcgagcctactgtgattgatgaagttaggactgggacataccgccgac

SEQ ID NO: 15525 - DNA, 164 bp, Glycine max
  Clone ID: LIB3040-016-Q1-E1-E6
ggaaacaagctgctgaagatatgcgcagaatatgataacatgtcaccaataatagatttgaatatctgtaatctgacaaatttccctaaatactatgaatcaatttctctgaggttgtgtccgcggattttatgtcaatggttgctgatctatatttgtgtggc

SEQ ID NO: 15526 - DNA, 371 bp, Glycine max
  Clone ID: LIB3040-016-Q1-E1-E8
gacttctcttcacacctttgttcactcttcttctcttgcggctagggttttagcgcagcttcttctagatttaaggaagatgggtaaggaaaaggttcacatcagtattgtggtcattggccatgtcgactctgggaaatccactaccactggtcacctgatttacaagcttggaggcattgacaagcgtgttattgagacgtttgagaaggaagctgctgagatgaacaagaggtctttcaagtatgcctgggtgctggacaaacttaaggctgagcgtgaaagaggaatcaccattgatattgctttgtggaagtttgaaacaacaaagtattattgcacagttattgatgcgcctggacatagggatt

SEQ ID NO: 15527 - DNA, 365 bp, Glycine max
  Clone ID: LIB3040-016-Q1-E1-E9
ggcactgcaactttgctctctgtgaggcttcaatttctaattagggtttcgcttagagtaaccaataaccatgggagtcttcacctttgtcgtccgcaaatccggcagcgaatggagcgccaagcaacattccggcgacatcgaggcctccgccgattccaccttcgatctccaacggaagctcgtgcaagccgctctcgccgttgattcctccggtggagttcagtcctctttctctcccgtgtctcctacctccgctgtgttccaggtgatagtgggtggtgcagtattcgttggaggtggtggtggtgctgttgcagctgcacctgcaggtggtgctgccgcagctgatgctgcccagctgc

SEQ ID NO: 15528 - DNA, 357 bp, Glycine max
  Clone ID: LIB3040-016-Q1-E1-F10
gggtttctgtgttttctaacaagcaatggctatgagatcgtgggtgagtcgaggaggatccatgactcgtttgatggactcaacaaatcgaggggctttgagtcggttcttgagcgacaagggtcgcattctcagcgaggaggaacaggccaaagagaatgtctacatccagaaatgggagagggagaggttggagaaacagaagcaactgtctgagaaggccaaggctctcacggacaaagatgcttctgctgctgctcataagaaacctgaaggtgctcaaaaggactgagtttatctttcacacaacccgtcaaggccactttgtgggaaataaacatggagaaataaacacat

SEQ ID NO: 15529 - DNA, 336 bp, Glycine max
  Clone ID: LIB3040-016-Q1-E1-F12
gaacatgccgaaaagtagtaccaagatggcttcagttgtgtatctcctctttggcttccatctcattgttatcatgtcaagttccttacccgcaactagtgaagtgtttgcaaaacagtatccatccacagaacccgtggaagaaaaactcacccaactccacttctatttccataacaacataacgggggaacacccaactgctatgaaaactgttttgcctcctaaggggtccattcatggttttggggctacttacatgatggatgaccctctaactgaaggaccaagtccaacttcaaagcttgtgggaagatctcagggaatatacgcttt

SEQ ID NO: 15530 - DNA, 79 bp, Glycine max
  Clone ID: LIB3040-016-Q1-E1-F2
gccggtttcccgaacgatttgatggtttggaatgcatttcccaagcaacgagtcttcggttcgaaaccagcagagagtg

SEQ ID NO: 15531 - DNA, 349 bp, Glycine max
  Clone ID: LIB3040-016-Q1-E1-F3
gattgtagaactgaacaagggtttctctttctctttctctgtctgcttcttcactttctctcgtttcaatcgaaaaaaatcatgggcagaaaattcttcgtcggtggcaactggaaatgcaatgggaccactgaggaggtgaagaagattgttactactttaaatgaagctaaagtccctggagaagatgttgtagaagttgttgtgagccctccttttgtgttccttccttttgtaaaaagtttgctgcgccctgatttccatgtctcggcccaaaattgttgggttcgcaaaggtggtgcttatactggagaggttagtgctgaaatgcttgttaatttgggaattc

SEQ ID NO: 15532 - DNA, 363 bp, Glycine max
  Clone ID: LIB3040-016-Q1-E1-F4
gttcggtgttgggaggaggatttgcccagcgtggacaatggggattttgcatataaatatgctgctggctaagatggtgcatgctttccactggctgcccaatcccaactctccacccgacccgactgagaccttcgctttcactgttgtcatgaacaaccctctcaagccacttattgtgccacgatccatttaacttatacttatagtgctccttctctgcaaactaaggaatatatcggcttctaaaataacatatgagcacaaggctttttttggaagattgctgattgcagtttgttgccatcgaattccaaccttcgtttatcgcataagatattgcacaattttattgtaatggag

SEQ ID NO: 15533 - DNA, 386 bp, Glycine max
  Clone ID: LIB3040-016-Q1-E1-F6
gaccgccgttctcatctctcttcccagccctcacctcaacgctgcatcttcacgtcgtctcacgaggtgcatatagtagagagggaaaatgagtcgaggaggcgcagtagcagcagcgaagggaaagaagaagggtgctacattcaccattgactgtgcaaagccagtggaagataagatcatggacattgcttctctcgaaaagtttcttcaagagaggatcaaggttggtggcaaagctggtgctcttggtgacagtatcaccgttacccgcgagaagaccaagatcattgtcacctctgacagtaacttttccaaacggtatttgaagtacttgacgaagaagtacttgaagaaacacaatgtgcgagactggctcagagtga

SEQ ID NO: 15534 - DNA, 297 bp, Glycine max
  Clone ID: LIB3040-016-Q1-E1-F7
ccatttattgggaatattcttccgctttgatagccttccttcgtctgcctatgccttgagtttcaacacttgagtggagaatatgaaactgttgagttggaaattgatgctctgttgttggatcatgtgacacaggcttagtgattcactcttgctcttccgataaaattgttattttctccacataaggcacgagatcatcaactgtccatgtattcctcccttgtggagacaccatgtactgtaatgtctccgtaacttcagcctgcaattattagggtgagcaaattaatggcc

SEQ ID NO: 15535 - DNA, 396 bp, Glycine max
  Clone ID: LIB3040-016-Q1-E1-F8
gggttctagtgtgtgattgtttgttgttgtaactcgttcttcttcttttgttgttctgtgtttgtgtttgttttttctctcacctgaaaatgtcttgctgcggtggtaactgtggttgcggaagctcctgcaagtgcggcaacggctgcggaggctgcaagatgtacccagacttgagctacactgagtcaaccaccaccgagaccttggtcatgggagtggcacctgttaaggctcaatttgagggtgctgaaatgggtgtgcccgctgagaacgatggctgcaaatgtggaccaaactgctcctgcaacccctgcacttgcaagtgaggtgttgggagagcaagcttcaagcagagatagcccttaattaagaataatgataaactattaatgt

SEQ ID NO: 15536 - DNA, 55 bp, Glycine max; identical to SEQ ID NO: 14243
  Clone ID: LIB3040-016-Q1-E1-F9

SEQ ID NO: 15537 - DNA, 373 bp, Glycine max
  Clone ID: LIB3040-016-Q1-E1-G1
gatgccttccaatttctcgtcacttctccgcaaatcctcgccgccgccgtcccaccaacacccgcaaattacagaccttagcgtgccaaacaaaccccaaccttgatcaaaaggatacccctaccacggatgaagaaaaacttgtggtcgagcccagcacgagtacaacaacaagttctcttcctcaattgccgaccaaaaacatcaacaacaaaatcgcacttgtttctaccttagcggccttggggcttttcttatctgccaggttggatttcggtgtttccctcaaggatctctctgccaatgcaatgccttacgaagaggctctctccaatgggaagcccactgtggtggagttttatgcagattggtg

SEQ ID NO: 15538 - DNA, 249 bp, Glycine max
  Clone ID: LIB3040-016-Q1-E1-G10
cccaggcgtcagcacacacgtcagcgcagacatcagtacgggtgcaaaatgacaacaaaaagggacttcataactcacactgcttcattgcatatctgcaaatactgtcacccctgctacctacaaattcgccgaaatatggaatcacttcatgcaaatgtaacatcacttgtatacagcagtggcaatcgtgtatctcactcgacatttgcatgctcttccttcgtgtcagcgttcgatgttgtctgg

SEQ ID NO: 15539 - DNA, 332 bp, Glycine max
  Clone ID: LIB3040-016-Q1-E1-G12
gaacgttgaacgggatccctcttcgtagtgaattacattgcattgggttctagcagcgtatttcactcaccatgcaggctagtgataggtttaacatcaattctcagctcgagcatctccaagccaaatatgttggaactggccatgctgatttgaacagatttgagtgggcagtgaacattcaacgtgatagctatgcatcatatattgggcactaccctttactgggattctttgctattgctgaaaatgaatctattggaagagaacgctacagctttatgcagaaaatgctcctgccttgtggtttgcctcccgaaagagaagaagat

SEQ ID NO: 15540 - DNA, 408 bp, Glycine max
  unsure (1)..(408): unsure at all n locations
  Clone ID: LIB3040-016-Q1-E1-G2
gatcgcatttcatagcactcaccctcattaccaacacgaaagcatagccaaaaccttttttcgaagtccctgattttcctaatggctccggcaaaggcagagaagaagccggcggagaagaagccagcggcggagaaagcaccggcggagaagaagccgaaggcggagaagaagatctcgaaggaagganggagcgagaagaagaagaagcgcacgaagaagagcgtggagacctacaagatctacatcttcaaggtcctcaagcaggttcaccccgacattggtatttccagcaaggccatgggcatcatgaacagcttcatcaacgacatcttcgagaagctcgcccaggaagcgtcgcgtttggctcgctacaacaagaagcccaacatcacctcgagggagatc

SEQ ID NO: 15541 - DNA, 373 bp, Glycine max
  Clone ID: LIB3040-016-Q1-E1-G3
ggggcgaggtagccagagagtgatacaatacagagtgcgttgttgctccttcgccacaactccctgccaacatgggtatctccagagattctatgcacaagaggcgtgccactggtggcaagaagaaggcatggaggaagaagagaaagtatgagcttggtcgccagcctgctaacactaagctgtcaagcaacaagacagtcaggaggatccgggttagaggtggaaatgtggagtggagggcactgagattggatactggaaattactcctggggaagtgaagctgtaactcgcaagactcgtatactagatgtggtttacaatgcctcaaacaacgagcttgtgcgtactcagactcctgtaaaaagtgc

SEQ ID NO: 15542 - DNA, 365 bp, Glycine max
  unsure (1)..(365): unsure at all n locations
  Clone ID: LIB3040-016-Q1-E1-G4
ggagacattgtgctttcaccttggctccgcactttggtttgctcaaccgatctccgcagcaatggtgaacgttccgaagacaaagaagacctactgcaagagcaaggagtgcaagaagcacacgctccacaaagtcacccaatacaagaaaggcaaggacagcatcgccgctcaaggaaaacgccgttattgacgcaaacagtccggttaccggtggcaagactaaagccgttttccacaaaaaggcgaaaaccaccaagaaaattgtgttgaggctccantgccaaggatgcaagcatgtctcgcagcacgctatcaagaggtgcaagcactttgagatcggtggtgacaagaacggaaaagga

SEQ ID NO: 15543 - DNA, 348 bp, Glycine max
  Clone ID: LIB3040-016-Q1-E1-G6
gggtgtagcgcagagaaagaactagaactagggtttcatctttgccatcagtaaacgacaatgatttacgacgttaactctcctcgtttccgatccttcctcagccagaatggaagctcctctgataagaggaaatcggaccaacaaaaaccaaaagaagcagaaacccaaagccagggaaaacaaacctataatgactgagtgataacagctgaactgcaatcagttgtagaatgaaaatacgtggtaagtattgtatttggtgctaaactaagatccttttggctgtgttctgaagtatatgccggcgatgttggtctttgttattgtaatggtttgaatttggat

SEQ ID NO: 15544 - DNA, 382 bp, Glycine max
  Clone ID: LIB3040-016-Q1-E1-G7
gaccaaaccaaagtaagtgttctaagagtgagcaacttcaaaacaccatagtgagaaatgacttccaagggtgcaattctcttgtgtctcaatgttctcttcttcactgtggttagttccacatatgttccatgcaacccaccccccaaaactcccaaacacccacctgtcccaaagccaccttccccaaagcaagtttcttgccccaaggacactgttaagtttggtgtgtgtgctgatgtgttaggtttgattaacgtgcaactagggaagccaccaaaaaccccatgctgcagcctcattcagggtcttgctgatcttgaagctgcagtgtgcctttgcactgctctcaaggctaatgtgttgggcatcaacctcaatg

SEQ ID NO: 15545 - DNA, 94 bp, Glycine max
  Clone ID: LIB3040-016-Q1-E1-G8
gggggcaaatgcaaatcaaattaaacaagaggaaacagcagttgaagaggagaaaagcaaacaaagcaaagcaaaaaccctggcttcagttcag

SEQ ID NO: 15546 - DNA, 329 bp, Glycine max
  Clone ID: LIB3040-016-Q1-E1-G9
gacggagcctcgaccaagaagaatcgcagtgagaagaagagggggtcagagtgagaaagagaaagagggaattcgtaaaccctaatttcggaaagatcggcgatgactgcctccaaggatcgcgagaacttcgtctacatcgccaaactcgccgagcaggccgagcgttacgaagagatggtggaatcaatgaagaacgttgcgaatctcgacgttgaactgacggtggaggagcggaatttgctttctgttgggtacaagaatgtgattggtgctcgcagagcgtcctggaggatcctgtcttccattgagcagaaggaagaaacaaa

SEQ ID NO: 15547 - DNA, 54 bp, Glycine max
  Clone ID: LIB3040-016-Q1-E1-H1
tacataccatctgaataaaggaaaatcatgaacaggacaagagaacgaaggtac

SEQ ID NO: 15548 - DNA, 355 bp, Glycine max
  Clone ID: LIB3040-016-Q1-E1-H10
gaggacacaagacgataacaaatggcatcatctcagtcgaggaaaagagttgacgccgtcgattctcgcgctgcttccgttctcgttcgcgccaaagatggcagtgcttttgctcgttgcgacgattgcaagaagaatgtgccggttgcactcatcgacatgcacagttgcagccttgaagctaaaattaaaatgaacctagacgctcaagttgtggaacaggctgctgaagctaagaagccggagaggaagaagcccaaatctaaagagcctatggcaaaaaaagctaaagttgggaaggggaagaaagtcaaggatcctaacatgcctaagcgtcctcccacagctttctttg

SEQ ID NO: 15549 - DNA, 342 bp, Glycine max
  Clone ID: LIB3040-016-Q1-E1-H11
acggcactcgttttcgttctcgttctggtttatagatctttgcgaaggaggtttacagcgctcaaccaaagatgcagaacgaggaaggacagatcactgagctttacattcctaggaagtgctccgccacaaacagattgattaccgctaaggaccatgcttcggttcagatcaacattgggcatgtggatgagaatggcgtctacaatggccatttctccacttttgccctctgcggattcatccgtgctcagggtgatgctgacagtgctctagaccgcttgtggcagaagaagaaagttgaagttaagcaacagttagacacccatgatagttggttac

SEQ ID NO: 15550 - DNA, 378 bp, Glycine max
  Clone ID: LIB3040-016-Q1-E1-H2
ggctacttccaatttgaagaaagagctttgcactctgaaattcaaacaacccctcctgggtttgtggaatatgccattgccatgacatgaagaccttaattgccctaacctttcctcgtgtgctcaaacaatgggttgttttcctcaatgctttggttcctccaaagagcacaaaacctaggcgcaatgcacaccatcaccatcgactcgctagagacaggttagagcaatgctctattcaggattactccgaaacggtggtaattggcactgcatcacaagaagtccaggctaaacctttggagcagataaacgtgagccccaaaaagaaagtaacttttgatgtcaatgtgaaaacgtacgagcctgatgaagttg

SEQ ID NO: 15551 - DNA, 398 bp, Glycine max
  Clone ID: LIB3040-016-Q1-E1-H3
ggggctgcgagcgaatccctctctctctttctctttctctctcatccagatcttgcaaaaaaaaaaaaacacaatggcagcgagcgctcccactccacgcgaagagttcgtgtacatggcgaagctggcggagcaggccgagcgctacgaggagatggtggagttcatggagaaggtctccgcctccgccgagagcgaggagctgaccgtggaggagcgcaacctcctctccgtcgcctacaagaacgtaatcggggctcgccgcgcctcctggcgcatcatctcctccattgagcagaaggaggagagccgcggcaacgaggaccacgtcgccgtcatccgtgactaccgctccaagatcgaggccgagctctccaacatctgcgacggaatcctca

SEQ ID NO: 15552 - DNA, 349 bp, Glycine max
  unsure (1)..(349): unsure at all n locations
  Clone ID: LIB3040-016-Q1-E1-H5
gacactacaactaaacacactagctatagctagaatcccctccaatccctctttgtctttgtgcttttctttagttctttccaaaacagcaacaatgatgagttgccaagcatggcctgaacccatagttcgagtccaatccttagctgacagtggcctaagctcaatcncttcacgctatattaggccacactcccaaagaccctccaacaccatgatcatgttaacatccccgttattgacctggaacatcttttctcggaggatgaaatcctccgagaaaagatattccgacacgtggacgaggcgtgtcgggagtgggggttcttccaggtggtgaaccatgggg

SEQ ID NO: 15553 - DNA, 368 bp, Glycine max
  Clone ID: LIB3040-016-Q1-E1-H7
ggttctagtgtgtgattgtttgttgttgtaactcgttcttcttcttttgttgttctgtgtttgtgtttgttttttctctcacctgaaaatgtcttgctgcggtggtaactgtggttgcggaagctcctgcaagtgcggcaacggctgcggaggctgcaagatgtacccagacttgagctacactgagtcaaccaccaccgagaccttggtcatgggagtggcacctgttaaggctcaatttgagggtgctgaaatgggttgtccccgctgagaacgatggctgcaaatgtggaccaaactgctcctgcaacccctgcacttgcaagtgaggtgttgggagagcaagcttcaagcagagatagccctta

SEQ ID NO: 15554 - DNA, 348 bp, Glycine max
  unsure (1)..(348): unsure at all n locations
  Clone ID: LIB3040-016-Q1-E1-H9
tacaggcaatagtacctagaattactactggaaaaatatataaaagatcgttgggccatgctggttctccataataattatgacccattcccttagccaatttagctcttaatacaggatcattcaagtcaggtttttttgttattgggataggtgaattcttatagatccatcctccgaaagaaccggatatgataatttttcatcatccggctcgagcactaatcaaagatttcgaatgtatctatagaaaaaatgtatgtgttattcacacatatatgaggattctatgtaagaaaataaactagattctctttttccgaagttacanactantccttaatggag

SEQ ID NO: 15555 - DNA, 331 bp, Glycine max
  Clone ID: LIB3040-017-Q1-E1-A1
gaacaaaacaaacacaactttgcgccccttgtaaacttctcaatgggaagtctaaaaacgaaaacattgaagcctttgtggagagctggggtcagaccaaattgccctggaagggtgcacaaatgccccctaacctcaagggtccagaatatgaaggtgttgaagagaccttgaatcccacaaagtgagcctgtcctcctaaagtccaaccctgtgcacaagaaaatcccaattttcctccatggagataaagtcatttgtgaatctgcaatcataagtgagtacattgatgaggcttggactaatgttccctccaaccttccacaaaatg

SEQ ID NO: 15556 - DNA, 391 bp, Glycine max
  unsure (1)..(391): unsure at all n locations
  Clone ID: LIB3040-017-Q1-E1-A10
gatgagttctccaacttcattatctatgacactatctctgcaactccatttagcagccatggctccccagaggctagtttcttggaaagttttgtgaactatcaggagcagcatgaccaccctacatttgataattgcgcaatgaggacccgaaagcgtgaagccagcgaaccagaaagcattggccggaggcagaattcggtggcagtgcaagggaggaagaagaggagaaggaagccaagggtttgcaaaaacacggaagaggctgagacacaaaggatcacacacattacagtggaaagaaaccgccggaagcagatgaatgagcatcttgctgtccttcgttcactcatgccggagtcctacgtccaaanggggtgaccaggctcta

SEQ ID NO: 15557 - DNA, 339 bp, Glycine max
  Clone ID: LIB3040-017-Q1-E1-A11
gagggtttacaccgaggagacacaccttcagcagcagcagccatggttctcaaaaccgaactatgccgattcagcggtgccaagatctacccagggaaaggcatcagatttgttcgtggtgattctcaggttttcctgtttgctaactcgaaatgtaagaggtatttccacaacaggttgaagccatcaaagctcacctggactgcaatgtacagaaagcaacacaagaaggacattgctcaagaagctgtgaagaaaagaagacgtgctgccaaaaagccttactccaggtccattgtcggtgccactttggaagttatccagaaaaagagagctgag

SEQ ID NO: 15558 - DNA, 383 bp, Glycine max
  unsure (1)..(383): unsure at all n locations
  Clone ID: LIB3040-017-Q1-E1-A12
tacggcagcgagaagaagaagaagcgcacgaagaagagcgtggagacctacaagatctacatcttcaaggtcctcaagcaggttcaccccgacattggtatttccagcaaggccatgggcatcatgaacagcttcatcaacgacatcttcgagaagctcgcccaggaagcgtcgcgtttggctcgctacaacaagaagcccaccatcacctcgagggagatccagaccgccgtgcgtctcgtgctccctggtgaattggccaaacacgccgtttctgaagggaccaaggcggttaccaagtttaccagctcttgaattanggtttgttaggcggttgtgttgcagatctanggttttctgtggatttcttttcttaaaaatta

SEQ ID NO: 15559 - DNA, 148 bp, Glycine max
  Clone ID: LIB3040-017-Q1-E1-A4
actaatgaaattataaattatccataaattggatagaaagatctttcatccttcattcgccatttttttttatataaatttcttgtcgaaggcttttgaaggatagtgataaaatgaagatggttcaggcaaaaggctcacgatttgg

SEQ ID NO: 15560 - DNA, 385 bp, Glycine max
  Clone ID: LIB3040-017-Q1-E1-A5
gaactgttgaatcgtcttgattaccattttgtagcatgttctgtacaactagaatgtgtttgattataagacattattatttattttatctgctgcaagtatctaattaagcaatagtatcattacagtggatgtggaatttgcaggtatataaactgctaattagtcaagttaacttgtctcaaatatcttaaagtgctaatttccttgtgtctgtcctttttatagtttgactattattagtttgttgaattggagaaattgatacaagggcaccaaatttggtgattacagtatttgtttgatgtgttggcatttttaattttttttaaaaaaaacattctaaaacgattctgactgaaaaccgacttagaaacatcacatt

SEQ ID NO: 15561 - DNA, 391 bp, Glycine max
  Clone ID: LIB3040-017-Q1-E1-A6
gaaccaaaaacaatggccacttgttcactcatttccacactcttcccttctccttcttcttcttctttttcactctctcgttcttcctcaaacaccaccaaaccaaccaccattcacctctccaaatccctccatctccaaactcccatcctcttcctccttcgccccccaaacccaaaaccgacacttccaataatacccctcttccccaaactcaccattcccaactcccttctccttctctgcacctccctcgctctctccttcactctcctcctctcccccgccgaatccgccgccgcctttgttgtcacctccccaaggaagctccagtccgatgaactcgccaccgtccgcctcttccaagagaacactccctccgttgtctaca

SEQ ID NO: 15562 - DNA, 391 bp, Glycine max; identical to SEQ ID NO: 12496
  Clone ID: LIB3040-017-Q1-E1-A7

SEQ ID NO: 15563 - DNA, 326 bp, Glycine max
  Clone ID: LIB3040-017-Q1-E1-A8
ggtgtcacagtcggaaaaagaaatacatgttcttctcaaaatataattaaataattatcacatctccgtcttctatatattatcagtcgctgagtcccgttaaaaagcaccaccaccaccaccaccacaacactattcttcttcgcagcaatggcgcgagtggatctggacgggaaccccatgaaggcacttacgatctgcatgatcggcgctggcggcttcataggctcgcatctctgcgagaagctcatgttccgaaaccctcacaccgtcctcgccctcgacgtctacaacgacaagatcaaacacctcctcgaaacctccga

SEQ ID NO: 15564 - DNA, 383 bp, Glycine max
  Clone ID: LIB3040-017-Q1-E1-A9
gaactcgaagccactccacagagagaaccaagcccaaaaaagctgagaactttggcacaaaaccaacaagcccaccttcaaatcaccccatattccccattcccatgcagagattccatctgggtctccctcattcaccaccaatggacaccagcacacccttccaagaccttccagaagcatctccaaagcccttcttcaagaaaaccacactcacttccttcatcatgtcttcaacaccttccttcaaggaagacacctactacatctcccacctcaaatcctccgagaaaaaagccctccaagacctcaagaacaaactccaatcttcttattcttccaccccttccatgtggggcgttcctttaatcaacaacaacaac

SEQ ID NO: 15565 - DNA, 321 bp, Glycine max
  Clone ID: LIB3040-017-Q1-E1-B10
tcataaaaaaaacaaaaaaaaaaaaaacaaaaaaaaaaaaaaaaaaaaaaaaaaaaaaaaaaaaaaaactgataaacaaaaagatataaggcttccctaaaggtatatacaattgttttaactcttctaaaatgtcacaaaatcttcaattcggtgcccgtcttttaacaccgtggtcatcgttttaaacctggggtcctccaaaataccttcccttttaccacttttacctttttgcagcaggtcctcttattggcgagccccctttttttcgcccgggcctgcatttttaccccttcattgggaaaacccccccttttt

SEQ ID NO: 15566 - DNA, 324 bp, Glycine max
  Clone ID: LIB3040-017-Q1-E1-B12
gactcacaaaaaccacttacaaagtagtactacttggtttcaatcaaaacaaaaactcacactttggtggccacagcaacaataacaatggcagcctcactacaagctgcagctaccttcatgcaacccaccaaggtgggcatggccactcgcaacctcaaatctacacaatgcatttctaaggcttttggcttggaacccgctgcagctaaactcatttgctcccttaagcccgatctcaaagattttgctcaaaaatgtgtcggcgccaccaaaattgcaggattcgcccttgccacctcagctctcgttgtttctggagcg

SEQ ID NO: 15567 - DNA, 370 bp, Glycine max
  Clone ID: LIB3040-017-Q1-E1-B2
ggcacttcaattgcaatcaaattagttcattctctttgcgcagttccctacctctcctttcaagatgcagatcttcgtcaagaccctcaccggaaagaccatcacccttgaggtggaaagctctgacaccatcgacaacgtcaaggccaagatccaggacaaggaaggaattcccccggatcagcaacgtctcatcttcgccggaaagcagctcgaggacggccgtaccctcgccgactacaacatccagaaggagtcaacccttcaccttgtccttcgtctccgtggtgacatgcagatcttcgtcaagactctcactggcaaaaccataaccctagaggtcgaaagctctgacaccattgacaacgtc

SEQ ID NO: 15568 - DNA, 351 bp, Glycine max
  Clone ID: LIB3040-017-Q1-E1-B3
tgattaaggtttgtcaatagcacttcctcctttcacactgccgctgcaacaatggcttcagagaataaactttcgaacccaatgagggaaataaaagtgcaaaagctcgttctcaatatctctgttggcgaaagtggagatcgtctcaccagagccgccaaggtgttggaacaacttagtggccaaaccccagtgttttccaaagcaaggtacactgttcgttcctttgggattagaagaaatgagaagattgcatgctatgtcactgtcagaggtgacaaggcaatgcaacttttggagagtggtttgaaggttaaggaatatgaacttctcagaaggaatttcagtgat

SEQ ID NO: 15569 - DNA, 386 bp, Glycine max
  Clone ID: LIB3040-017-Q1-E1-B5
ggcgtacgcagcttcatccctaacgcgtgcatagcagagtcagagacagagacgcagccatggggcggagacctgcgatgtgttataggcaaattatgaacaagccataccccaagtcacgtttctgccgtggtgttcctgatcccaagatcaggatttatgatgttggtatgaagaagaatggtgttgatgagtttcctttctgtgtccatctggttagttgggagaaggaaaatgtttcaagtgaggccctggaagctgctcgcattgcttgcaacaagtacatggccaaatttgctggaaaggatgctttccacttgagagtcagggtgcacccattccatgttcttaggatcaacaagatgctttcgtgtgctggtgctgat

SEQ ID NO: 15570 - DNA, 396 bp, Glycine max
  Clone ID: LIB3040-017-Q1-E1-B6
gatatcagaagctcagacctagggatttcggccgtttgctccccaaaaaggaaagaagcagattctgtcctttgaaatcaacaagaaaagatgtcaggtgaagaggtagctgttgcagttgaggtacctgctacttcaattccaggtgagccaatggacatcatgactgctctacagcttgtgctgagaaaatctctggcctatggtggtcttgcacgaggtcttcatgaaggtgccaaggtgatcgagaagcatgctgcacagctctgtgttctagcagaagattgtgaccaacctgattatgtgaaactggtgaaggctctttgtgcagagcacaatgttagtcttttgacagttccaagtgcaaagacccttggagaatgggctggtttgtgt

SEQ ID NO: 15571 - DNA, 295 bp, Glycine max
  unsure (1)..(295): unsure at all n locations
  Clone ID: LIB3040-017-Q1-E1-B7
gcacacaaactttattacagttgttgtattgtaattaagcaagaatattaggcaatggagtcttctagaacttcaactactcttgctctttttttaaccatcaatttgcttttctttgtcatggcaagtggctgctacacttgcacacagcctaagccaaaccctatcccattcccttaccctaaccctagtcctgccgcgaagagctgccccagggacgcacttaagctcggagtgtgcgcaaacgtgcttaatggaccaattggtgctattgtanggtcaccaccggaccaac

SEQ ID NO: 15572 - DNA, 379 bp, Glycine max
  Clone ID: LIB3040-017-Q1-E1-B9
gggccacgaggtagtgattgtggtatagtgaatgcaaacatacctacaaatggagctgagattggtggtgcctttggtggagaaaaggcgaccggtggtggccgtgaggcgggaagtgactcgtggaagcaatacatgcggcgttctacatgtaccatcaattatggaagtgaactaccattagctcagggaataaactttggctagaaagctatccttgcaaatgaaactgcacaaataatgcgattttgcagcccgaaagagagatgttagtctggctgacatgggttcaaagtgttgtattaacaagatctgcctgctgtaaggatggtaccttcacatgacagtttcaatggtaaagatatcctaaatcctaaat

SEQ ID NO: 15573 - DNA, 63 bp, Glycine max
  Clone ID: LIB3040-017-Q1-E1-C1
gagttctagtctaaggttacgccgtcgtcgctgtttgtgtgtgtatcaggtgcagctaccaac

SEQ ID NO: 15574 - DNA, 63 bp, Glycine max
  Clone ID: LIB3040-017-Q1-E1-C11
gaccgtcctcctctttctctccgtgtggccgttcagtgacaccgagtgtaaagaagaggagag

SEQ ID NO: 15575 - DNA, 384 bp, Glycine max
  unsure (1)..(384): unsure at all n locations
  Clone ID: LIB3040-017-Q1-E1-C12
gaactcagttagactttgttccaagagaaagaccaatcaaagcatcatgactaaagttgtgtgtgcacttcttcttatttttgtcatggcttttgtgactcaagttgcttatggtggcggcgaaggatcacttacgccccaagaatgtccgggggcttgcgattatcgttgttcaaaggctgatcggactaagaaggcgtgcctgaacttctgtaacatgtgctgtgcgaaatgtctgtgcgttccatcaggaacctatggtcacaaggaagaatgtccatgttataacaattggaaaacaaagagaggaacacccaagtgcccctaattcaacttcattattgatattcatcaataaaatgtgtantcctgtggcgtgctatg

SEQ ID NO: 15576 - DNA, 393 bp, Glycine max
  Clone ID: LIB3040-017-Q1-E1-C2
ggggttattggacacattcttcagcgactgcgtttttggatcggaacctcttctgcggcgtagcaatgggacactccaacgtttggaactctcacccaaaaaactacggtcctggttctcgcacttgccgtgtgtgtgggaatccacatggactgatcaggaagtatggccttatgtgatgcaggcagtgcttccgtagcaatgccaaggaaattggcttcatcaagtatcgctaaaagagcagttgtcaactacggaccaatattgtgttctggcactaagatgttttgaggatgttatgtttgaagaaacttgagactttcttttttcatctaattaattatcagacgtaatttgtggtactaagaatacttttatataaattgttttgaa

SEQ ID NO: 15577 - DNA, 390 bp, Glycine max
  unsure (1)..(390): unsure at all n locations
  Clone ID: LIB3040-017-Q1-E1-C3
gaaacttctctgtccgtcaatgcatctccaatctcgcttcctcccccaaattcagataccaattccgtttcctccgaaccaaacttgtttttgagaaattcggcaattgattttccatggccaacaatccgtcacagcttctcccatcagagttgattgaccggtgtataagttcgaaaatttgggtgataatgaaaggtgacaaggagcttgttggtactcttagaggctttgatgtttatgtcaacatggtccttgaagatgttactgaatatgagatcactgctgaagggagacggataaccaagcttgatcagattttactcaatggaaacaacattgccattttggtcnctggtggttctcctgagtcagaatgaacagtgctac

SEQ ID NO: 15578 - DNA, 392 bp, Glycine max
  Clone ID: LIB3040-017-Q1-E1-C4
gatcgaagaacagcactctggttgccgtgccaccatcttctccaaagttatcatattcgaagagaaaaaaggagtgactgtccaggttgggcaattagggacggaaaaggagaaacacgaaaatgtttttccacatagtactggagcgaaatatgcagcttcatccacgctactttggtcgtaaccttcgcgataatctcgtttccaagcttatgaaagacgtggaaggcacttgcagtggccgacatggatttgtggtggcagttacagggatagagaacatagggaaagggctaattcgtgatggaacagggtttgtgacatttccagttaagtaccaatgtgttgtcttcagaccgtttaagggagagatcttggaagcagttgttact

SEQ ID NO: 15579 - DNA, 393 bp, Glycine max
  Clone ID: LIB3040-017-Q1-E1-C5
agtccaggcgtcagacggctgcaagaggagtacagaaggggattcacaccttcactccctctattgctttctcaaattccattttccaattcagaagcctatctccgtgcgaagcagcacatcgggatggcaccaaaggcagataggaagccagtatagaagaagcctgtggaggagaataaatcgactgtgggatacaaagctccggcagatatcaagtcagcggccggagagaagcttccgaaagagggaggagccggcggagaatgtatgaagaataagagaaataagaatagcgtggagacatactagatctagatcggaaacgttcagaagcacgttcacactgacattggtatctcaaccaaagcaatgggaatcataagcagattc

SEQ ID NO: 15580 - DNA, 375 bp, Glycine max
  Clone ID: LIB3040-017-Q1-E1-C6
gctgagcaaaaccctaatccctatttttcttcctcagtagtgtcatttacgcttctcttctctgcagcaactatgcctaaccctaaggtcttcttcgacatgaccatcggcggtcaatctgctggccgcatcgtgatggagctctacgccgacgtcactccccgcaccgccgagaacttccgcgcgctttgcaccggcgagaagggcgtagggcggagcggcaagcccctccactacaagggctcgtccttccaccgcgtgatcccgagtttcatgtgtcagggtggcgacttcaccgccggaaacggaaccggcggcgagtcgatttatggcgccaagttcgccgacgagaacttcgtgaagaagcacaccggt

SEQ ID NO: 15581 - DNA, 388 bp, Glycine max
  Clone ID: LIB3040-017-Q1-E1-C7
ggcagagtttgtggccacattcttgttcctctacatcactgtcttgactgtcatgggtgtcaacagggcacccaacaagtgctcctctgttggcattcaaggaattgcatgggctttcggtggcatgatctttgccctcgtcgactgcactgctggaatatcaggtgggcacataaatccggcagtgacgttcggtttgtttctggctaggaagctgtccctgacaagagcgctgttctacattgtgatgcagtgtcttggagctatctgtggtgctggtgtggtgaaggggtttgaggggaatgccaggtatgagttattcaaaggtggagccaattttgtgagtcatggatacaccaagggtgatggccttggagccgagattgtt

SEQ ID NO: 15582 - DNA, 393 bp, Glycine max
  Clone ID: LIB3040-017-Q1-E1-C8
gagggtttcaaagtggacagaagacagcgtcctagtcgcaaccctaataagaagaaccacagcttcaagcgagtgacatccaccacccatgggtcgtatgcacagccgcggtaagggtatatcctcgtctgctttgccctacaaaaggacaccccctagctggctcaagatctcttcgcaagatgtggacgacaatatctgcaagtttgcgatgaaaggtttgaccccgtctcacattggtgtcaatcttcgagattctcacggtattgctcacgtcaacagcgtcactggcagcagaatccttcgcatcctcagagctcacgggcttgcgcctgaaattccagatgatctttaccatttgattaagagagcagtttcagttacgaagcatct

SEQ ID NO: 15583 - DNA, 380 bp, Glycine max
  Clone ID: LIB3040-017-Q1-E1-D1
gacttgaaccacattggtgcctaaccgcggtggttaccacctcctccttccccttcctaaaatcccttctttctcaacgccgcacgccgaaacaatggccggaaaaggagagggtcctggctatcggaatcgatctcggaaccacctactcttgcgtcggtgtgtggcaacatgaccgcgttgaaatcatcgccaacgaccaagggaacagaaccacgccgtcttacgtcggattcactgacaccgagcgtctcatcggtgatgcggccaagaatcaagtcgccatgaaccccatcaacaccgtcttcgatgccaagaggttgattggtcgtagattcagtgattcctctgttcagagtgatatcaaattgtggcctttc

SEQ ID NO: 15584 - DNA, 349 bp, Glycine max
  Clone ID: LIB3040-017-Q1-E1-D10
gataggaaaaccaaccaaagttccaaattttttggtttggggatagatagagtgatacgcgtcacattttcataataataaaaaaatggcagcggcggcggcagtgacggtgctactcccacctaggattccgaccaccaccaacgttacccgctgctctgctttgccttctctccctcctcgcgtctccaacaccaaaaccactttgttctcaccttccctcaacaacttttcagtgtcccgaaaatcttctctgcttcagaccagagcttcttcagaggaatcatcctcagtagatgccaatgaggtgttcacagatttgaaggaaaagtgggatgctcttgaaaac

SEQ ID NO: 15585 - DNA, 345 bp, Glycine max
  Clone ID: LIB3040-017-Q1-E1-D12
cgggactcaccacttcaaaacactcataacacaaagcacaaagcaaagctcatccttgagttaaaaaatggcagcagcttcttccatggctctctcatccccatccttggctggcaaagccgtgaagctgggcccatcagccccagaagtgggaagggtgagcatgaggaagaccgtcaccaagcaggtctcctcaggaagcccatggtacggcccagaccgagtcaagtacttgggcccattctctggcgagcccccgtcctacctaaccggtgagttcccaggcgactacggctgggacactgctgggctttccgcagacccagaaaccttcgccaagaaccg

SEQ ID NO: 15586 - DNA, 388 bp, Glycine max
  unsure (1)..(388): unsure at all n locations
  Clone ID: LIB3040-017-Q1-E1-D2
ggtagaacggtagaagccactttggctacagagttggtgttgtgtcttgcgaaagaggaaaaacgtagaaagaagcaagcaaggaagcgtgctagctgggtttgtttctgttgtgaattgcgatccttaaacctttctctctcactcactcaatcaaattcaaatggacattgatttcaaagaataccagttgcgctgcgagcttcgcggccacgaagacgacgttcgcggaatatgcgtgtgcggcagcaagggtatagcgacttcgtcaagggaccggaccgttaggttgtggtctttggacgacaaccgcaggttcgcgagttccaagattcttttgggccacaagcttcgtgggtcncttggcatggattcctccgaattcgga

SEQ ID NO: 15587 - DNA, 376 bp, Glycine max
  Clone ID: LIB3040-017-Q1-E1-D4
gacacttactagtagtaagcatggagtcctcaaagatctatgcttacctcttcctctgcatgatctttctctcttccgccactcccattctcggttgtggctactgtggcaaaccccccaaaaagcacaagcctggtaaaacaccaaagacacccaaaacacccgttgttaagccaccagtcaccatccctcccattaatgttcctcccgttgttcttccaccaatagtgaagcccccaggtattctccctccaattccaattattaacccaccaaccacaccagggaagggagggaacactccatgcctaccaccaaagtctcctgcgcaagctacatgccccattgacacgctcatacttggtgcctgtgtgga

SEQ ID NO: 15588 - DNA, 56 bp, Glycine max; identical to SEQ ID NO: 15019
  Clone ID: LIB3040-017-Q1-E1-D6

SEQ ID NO: 15589 - DNA, 397 bp, Glycine max
  Clone ID: LIB3040-017-Q1-E1-D7
gaacacaatacattcatccttgtgtttccgttcccgccattgcaaagggaaaaaaatggcttctgcgccatcgagaaccctaacggactttttccaacccgcttcgaagcgcttggagcccactctccccgcatcatgcaaatccgacgacgccaatgcttccacgctctccgtcgatcagaagttgcgcatggaatacaacaagctcctcgccaagtccaagaggaatctcaaactctgcgtcgagagggtctccaaaagcaaagttcaaaacgcagaatcaggtttaggtggcgtgaagctggaagagctgctggtggaagaaacgtggttggaagctctacctggtgaactccaaaaaccctatgccctcactctctccaaattcgttgaaagt

SEQ ID NO: 15590 - DNA, 389 bp, Glycine max
  Clone ID: LIB3040-017-Q1-E1-D9
gggaactcataatattcatcactagaagtgttggatgcatttctatttctaactaattattgtgcttattattattgttgagaaagaaaagaatggcaaagttaataaaattctttgagttgaacacaggggccaagattccttctgttgggttaggcacttggcaagctgagcctggtgttgtagccaaagctgtcaccacagccattctggttggatacaggcatattgattgtgttcaagcgtataacaatcaagcagagattggttctgctcttaagaagctttttgatgatggtgtggtgaagcgtgaggacttatggatcacctccaaactctggtgttcagatcatgcttcagaagatgtgcccaaagcattggataaacat

SEQ ID NO: 15591 - DNA, 354 bp, Glycine max
  Clone ID: LIB3040-017-Q1-E1-E1
gatagcaaaatcgtttccccaatttaatcaccaatggacaacccaattcccttcgtcgttttccattaagagagcaatggcacgtaccaagcaaaccgctcgcaagtccaccggaggaaaggctccgaggaagcaattggcaaccaaagccgctcgcaagtcagccccggcgaccggcggagtgaagaagccccaccgcttcaggccaggaacggtggctctgggggagattcgaaagtaccagaagagcaccgaacttctgatccgaaaactcccattccagaggctcgtcagagaaatcgctcaggatttcaaaaccgattcccgctttcagagcagcgccgtttcggctct

SEQ ID NO: 15592 - DNA, 382 bp, Glycine max
  Clone ID: LIB3040-017-Q1-E1-E11
ggagcgaaagaaaaacgaacaagaaaaaatcggatgagctatacatttcttagcagaaacttcaccggacctgagaattgagaaagtgtagtttgagtttcacatcaaaagattgtgtgtaagaagcgttttcttcagatcgatggaatatcttgggattgatctaagctgcgccgttggatctctccgccacggccagttaccggagaaggactgcttgctccctctcatttccaaactcctcggctacgccatcgtcgcggcttccaccaccgtcaaactcccccagattatgaaaattctgaagcatcagagtgtgagaggacttagcatgatatccttcgagcttgaagttattggatataccattgccttggcttac

SEQ ID NO: 15593 - DNA, 342 bp, Glycine max
  unsure (1)..(342): unsure at all n locations
  Clone ID: LIB3040-017-Q1-E1-E12
gatgtgcaatatgcattgtcgtgctttcagcaagctctagctgtcaagggagtacaaaatgaaatgggcaactagtggaagaatttgaatatggcacgttgctgccatattagtcattaaaaaggaattccgtgttccatttgcctttgctcatttgattttcttaaatgtaccctaaagaacatgcaaagatttacatctttgatgttgttccctgttatgaattatgttgactatcaacgtcgttcccctgctaatttagctcattgtttactgtcccattattaagcatgttangcatgtataagatattgtgcaacgttagcaatatatttttaatat

SEQ ID NO: 15594 - DNA, 381 bp, Glycine max
  unsure (1)..(381): unsure at all n locations
  Clone ID: LIB3040-017-Q1-E1-E2
gtcaacctggaggatgtcttgcactgtaaatcaccacaaatttccttcaaaataattgagtgactggttcagtgttgtactatccttgtgatagcgcccttttatttttccttctatttttgtcaaatattttctttttcctttttttcctttttctctcttcattcagaaaacaatgtctcgctgctgattatcagtcttctcgtgttgactggaaaatgtcgtacccttgattcccataaagagctattgaaactattatattagctgaaaaaaaaaaaannaaaaaaaaaaaaaaaaaaaaatanaaaaanannattaaaaaaataaaaaagggaaaatgtataatcacaaaaaaaaaaaaaagcggccgcccaaaag

SEQ ID NO: 15595 - DNA, 345 bp, Glycine max
  Clone ID: LIB3040-017-Q1-E1-E4
gatgcagatgcagcctatcatggcagcctactaccccaacaacgtcaccactgatcacattcaacagtacctggatgagaacaagtccttgatcctgaagattgttgaaagccagaattctggcaagctgagcgagtgtgcagagaaccaatcaaggctgcagagaaatctcatgtacctagctgcaatagctgattctcaaccccaaccatctccaatgcctggtcagtatccttctagtggacttatgcagcagggagcacactacatgcaggctcagcaggctcagcagatgtcacaacaacagctaatggcttcgcgctcctcactcttgtactcccaaca

SEQ ID NO: 15596 - DNA, 376 bp, Glycine max
  Clone ID: LIB3040-017-Q1-E1-E5
atcaaaatatctttgaataaaataatcaaaaaaatcaattagacgtttttctttggaagtttccttggatcaattgacttataaccaaagtgaaactaaggctaaaatcaactcacaaatcaagctttgtccgcaaaaaatcactaaaaaccattttaaggtccaacgccttaaacgatcctctttgcttttatcggttaacatggaccgttcaaaagcataaaatcaacatgtaactttaacgcttttgcgagaactacgtaggtctgatttcctcttcgatggaggatacgtaagagcaaaagccccacttttgtcgacctcgtgagatggttagaggtccaacgccttagcttttctcaccaagtaaaatgga

SEQ ID NO: 15597 - DNA, 367 bp, Glycine max
  Clone ID: LIB3040-017-Q1-E1-E6
gacagcgcagagccgcctcaacatctgaaacagactctatccctaatccctatcttcttctctgctctctccgcacgctttggctcctctgatctcagtttctggttttgaattgtaggtgttgttggcttggtatccgtgcaagttctgctgtagccgatttgaaggtgaaggtgtcaccttaaagtttctttcatgtttgatcaggctactatccatttgggagcaactgagctgcttggagagtatttttcttcttctagaaaaaattacagaccctcatcccagagagttagctgtatgcattgcgagacatatcagaaattcattcagttttctggttgcggttggccaccttccattatac

SEQ ID NO: 15598 - DNA, 394 bp, Glycine max
  Clone ID: LIB3040-017-Q1-E1-E7
gagcgccaatgtttttttcagaggagtttcatcttgtaatcaaaagagtttatcttatagtaagaaatcgatgtcttactccattttaaggaacaaaacaagagaacaatagcctgacaaagggtttagccataaaatcgaatccatcattgatttgagatattgataaggtgaatactcatttctcgtcaatgctaggcataatgcgggtatagggacctaaaaaagattatcttttcttcctatcttatgaactttaaggtgtatgaagtgtcatttcctatcttagattttaattttagtaggtagataaagagtccatttaacttaagttgatctaggccagaagcagacctacgtcaagataatccttctttgaaacactttggtagtg

SEQ ID NO: 15599 - DNA, 351 bp, Glycine max
  Clone ID: LIB3040-015-Q1-E1-C7
ggcgccccatatcttccaccctttggctattcctaaccattgagtacaacttcacattttagaagaataccccctcttttgctgcatcagaggagttgtaaattaagagcatggctgcacaagctcttgtatcatcatcttctcttaccttctcagcggaggctgcaagacaaagtcttggaccaagatcactccaatctccatttggcttctccagaaaagcctcctttcttgttaaggcagctgctaccccccctgtcaagcaaggatcagacagacctttgtggtttgcatcaaagcaaagtctttcttacttggatggcagccttccgggtgactatggatttgacc

SEQ ID NO: 15600 - DNA, 225 bp, Glycine max
  Clone ID: LIB3040-013-Q1-E1-A7
gcgcgctagaattccttataaataacagggttatatgcttatgcgttggggaaacatgacaatgagtgttcttggggatagtaaaaatgtaaaatgggttgggccaatccaatcactcaatttaatccaccatttgttcggtgtgtgcctaaagaagtcaactattttatctgtattatctgcattatccattttaactttattatcaattgaggtcttttttac

SEQ ID NO: 15601 - DNA, 387 bp, Glycine max
  Clone ID: LIB3040-013-Q1-E1-A9
gtccttctccttcctcctcgtcttctctcttctccttcctctcaagtattgcaacctaaaagaatcactttctttaccacagcctttttcacacccatgacatttcctctttgccaccgcattcccttccccaaccttgcctgggtttgtatcccagacggaagttctgaaccaaatgcggtttcttggtcttttttgccatctggttatgggaaaaatgggtttgtggaggaggtatttttggtgtttaatgtgatttgcttgttgtgttgttaagtgcaatgagtttacctcccccaatacgcttacgacatgttcaatgaagaagggggatttgaacttacgatggctgtggttagaaggttcgagtatggagaatttgttgtg

SEQ ID NO: 15602 - DNA, 316 bp, Glycine max
  unsure (1)..(316): unsure at all n locations
  Clone ID: LIB3040-013-Q1-E1-B1
ggcaaatgcttcattccaagatagttaggactctgtaagctgataaagacaacactcataccgttggaaagaaagatgctgctggccatgttgcttaatttaattcctgcttcctttggcctcttgaattttaacaaaaaccggaattcaaggattactagctccttcaatccgtcaaaatgggccggagttgacatcccccttgatcatgaagcatttgcagttccaaagggttataatgcacctcaacaagtgcacatcacgcaaggtgactatgatggaaaagcagtaatcatctcatgggtgnacacagaag

SEQ ID NO: 15603 - DNA, 381 bp, Glycine max
  unsure (1)..(381): unsure at all n locations
  Clone ID: LIB3040-013-Q1-E1-B10
gagtacagaaaacgcagttctcaccatttccctctcgattgtgagacttgttgttgttaactgaacttttctgagcaagaatgtctgggcgtggaaagggaggcaagggtttgggaaagggaggagcgaaacgacaccgtaaggtgctgcgcgataacattcagggaatcaccaagcccgcgattcggcgtttggctcgtangggtggcgtgaagcgtatcagtggtctcatctacgaagagacacgtggcgtgctcaagatctttttggagaacgtgattcgtgacgccgttacctacactgagcatgctangagaaagaccgttacggcaatggacgtggtttatgctctcaagagacagggaaggaccctctacggat

SEQ ID NO: 15604 - DNA, 327 bp, Glycine max
  Clone ID: LIB3040-013-Q1-E1-B2
gagcatactttattctcgcttggttgcagcttcagcagcagcggcaagcaactccatccgcaatgggaatcgatttgaaggcaggaggtaagtccaagaagaccaaacgtacagcccccaaatccaatgatatttacctcaagctcctcgtcaagctgtaccgttttcttgttcggaggactggtagtaacttcaatgccgtcatcctcaaacgccttttcatgagcaaggtcaacaagcccccgctatccctctctagattgattcgttacaccaagggaaaggaggataagatagctgtggtagtcggggccgtgaccgatgaca

SEQ ID NO: 15605 - DNA, 116 bp, Glycine max
  Clone ID: LIB3040-013-Q1-E1-B4
aatctaaattgattcaaccccatgtcctgcgtaaaaattcgcaatacttcatctgtgtatcattcacatacgtccatgcttttcattggttgcattgctcattgcattctttccgc

SEQ ID NO: 15606 - DNA, 240 bp, Glycine max
  Clone ID: LIB3040-013-Q1-E1-B5
gacagacagacacacactcggttctgccttcacaaaaaaattatcgagatcccctttttctcctaagaaaagccatggctaagggtcccggtctctactctgacatcggcaagaaagccagggatctgctgttcaaggactaccacagtgaccagaagttcaccatcaccacctactcacccactggagttgctataacagcatcaggaaccaggaaaagtgaactgtttgtggctgatg

SEQ ID NO: 15607 - DNA, 340 bp, Glycine max
  Clone ID: LIB3040-013-Q1-E1-B6
gatccatttctcgcaacaacgcttaacctctctcattccccatttcctcacctccttcaaccgctgctaaattctagggttccgaaatggacgctggcggaaagatcaagaagggcgccggaggtagaaagggcggcggcccaaagaagaagccggtttcaaggtccgtcaaagccggtctccaattccccgtcggaagaattggccgttatttgaagaaaggaaggtacgctcagcgtgtcggtaccggtgctcccgtatacttggctgcagttctcgaatacctagttgccgaggtgcttgagttggctgggaatgccgcacgtgacaacaagaagaa

SEQ ID NO: 15608 - DNA, 330 bp, Glycine max
  Clone ID: LIB3040-013-Q1-E1-B7
actaataaccaaagtgaagctaatgctaaaattaactcacaaatcaagctttgtcattaaaaaatcacctaaaaaccattttaaggtccaacgccttgaatgatcctctttgcttttatttggttaaacgtggacttttgaaagcctatagccaacgcataactttgtcactactttcaagaaaccaagatatcattaatggtccaatgccttaatgttttctcttctttcaaaaagaatcaaaagatcatttaaatggtccaaagccttaaaacgaccttttttggtcataacatatcttgcaaaaaagataaaaacacttaacaaacg

SEQ ID NO: 15609 - DNA, 337 bp, Glycine max
  Clone ID: LIB3040-013-Q1-E1-B8
gattcggagctgggtttgttttcggcctttgatcttcgattctctctctttttctctcgcgaaaaccgtatcagcaatgtctggagaatcagccagcgctattcacaagggtcaagtcgatctcttagacttcattgactggtctggggttgaatgcctcaatcaaagctccacccactctctccccaatgctatcaaacagggttatagagaagacgatggtttgcatctggagagtgatgcagacgagcagcttttgctctatattcctttcactcaagtcgttaaactttattcctttgttatcaaaggtcctgaagaagaagggcccaagaca

SEQ ID NO: 15610 - DNA, 160 bp, Glycine max
  Clone ID: LIB3040-013-Q1-E1-B9
gaagaaagtagaaaggatttggattcgaggcttgctaggtgaagtcaacaaagaaagaaaaaaagctttctccgagaaagcttctgttcacgtcagggtccggggtaggcttcttcattgagattgggttggtgttcagtgtgaatgcatttccagtgac

SEQ ID NO: 15611 - DNA, 354 bp, Glycine max
  unsure (1)..(354): unsure at all n locations
  Clone ID: LIB3040-013-Q1-E1-C1
ggcattaccactatgcgttaagttaaccatttctagcgttagggtttttgcttctcggaagattcgaaatggaagaagattacggctacagaaggacggcgaagatagcacttgtcgcaatcatggtgctcgcttccgtcgccgtctttgcattgctcgttgtcttcgcttactactgctacatcctcaacaaggtctcgaatcgtcgcaaaagcctcaaaaaagttgaagatgccaaccttaacgagaaaagtgactttgcaaatctgcaagttgttgctgagaaaggacttcaggtgtttactttcaagcagctgcattctgcaacggngggattcagcangtcaaatgtca

SEQ ID NO: 15612 - DNA, 355 bp, Glycine max
  unsure (1)..(355): unsure at all n locations
  Clone ID: LIB3040-013-Q1-E1-C11
gaactacaacacaagagactgtaccttctttttgaagtctctgtgggttggggttttggagtgggagcaccaatggctttcttgatggcaattgtagtagtaggtgttgtcttggtgctctgtttttgctctgctctcttgaggtggaatgaagtaaggtacaggaagaaaggtttgcctcctggcacaatgggttggccactttttggggagacaactgagtttcttaagcaaggtccaaacttcatgaaaacncagagagcaaggtatggcagttttttcaaatcccacatactgggttgtcctancattgtttccatggattcagagcttaacagatacatcctaatgaatg

SEQ ID NO: 15613 - DNA, 394 bp, Glycine max
  unsure (1)..(394): unsure at all n locations
  Clone ID: LIB3040-013-Q1-E1-C12
gatttctcttcactccttcgttcactcttcttctcttgcggctagggttttagcgcagcttcttctacatttaaggaagatgggtaaggaaaaggttcacatcagtattgtggttattggccatgttgactctgggaagtccactaccactggccacctgatctacaaacttggaggcattgacaagcgtgttattgagagatttgagaaggaagctgctgagatgaacaagaggtctttcaagtatgcctgggtgcttgataagcttaaggctgagcgtgaaagaggaatcacaattgatattgccttgtggaagtttgaaaccaccaagtactattgcacagtcattgatgcccctggacacagggatttcatcangaacatgatcactggg

SEQ ID NO: 15614 - DNA, 379 bp, Glycine max
  Clone ID: LIB3040-013-Q1-E1-C2
cccacgcgtccgagcggctaccctaacctcgtcttcctctctactaatttcagctatggccgacgaagctgtggttgttccagatcccacccagatcgatgtcaagctctttaaccgctggagcttcgaggatattgaggttactgacatttcactggctgattacattggagttgcggcatccaagcacgccacatatgttcctcacaccgccggaaggtactccgtgaagcggttcaggaaggcgcagtgccccattgttgagaggctcaccaactctctcatgatgcacggtagaaacaatggcaagaaactcttggctgttaggatcatcaagcatgctatggagattattcaattgttgactgaccaagaaccc

SEQ ID NO: 15615 - DNA, 332 bp, Glycine max
  Clone ID: LIB3040-013-Q1-E1-C3
gaagtccgaagcgatcggcaggcagtgatagcaaagagaagatcatttcataatcagactcacctaactccgccatggctgctgttccctctactttcgctctaaccaaatctgcattgtccataaacaagctggaccactctctggtcaagatcaaaccatacagcttctctctgaatctaaaccgtctagggaggatggaaacatctttaaccagaaggcctctaacaatccaagccacatatagtgatggtggaaggcccagcagtgctagtgtatttgttggtgggtttctcttgggaggattaatagttggcactcttggttgtgtg

SEQ ID NO: 15616 - DNA, 302 bp, Glycine max
  Clone ID: LIB3040-013-Q1-E1-C4
caattagagggtttaaattgattctttctggagaattagatggtcttcctgaacaagccttttatttggtaggtaatatcgatgaagctactgcgaaagctacgaacttagaaatggagagcaatttgaagaaatgactttaaatctttgtgtactgacccccaatcgaattgtttgggattcggaagtgaaggaaatcattttatctactaatagcggacaaattggagtattaccaaatcatgcgcctattgccacagccgtagatataggtattttgagaatacgtcttcttaaagacc

SEQ ID NO: 15617 - DNA, 335 bp, Glycine max
  Clone ID: LIB3040-013-Q1-E1-C5
ggaagagagagagagagagagagagagtcctgaaacttgggtgcgattccttcactcacaacaacaacacatcactatggctcttctgagtcgagcctcttcacgcttccctcagctggtttcccctcaaagggtagtttcactccacacaacgctcccatctctgaacgcatccccatccacagccacgcctacaccatatgccccgccaccgcctccgtccgcttcctctcccgccggcgtttcgaaggcggcggagttcgtgatctcgaaggtggacgatctgatgaactgggcccgccgcggctccatctggcccatgaccttcggcctcg

SEQ ID NO: 15618 - DNA, 343 bp, Glycine max
  Clone ID: LIB3040-013-Q1-E1-C6
gggagtgaacaacatcaacatctctgattcttacaagaagaatcgcattcaggtctccaacaccaaaaagcctctcttcttctacgtcaatctcgccaagaggtatatgcaacagcataatgaggttgagctctcagcactaggaatggctattgctacagtggttactgttgctgaaatcttgaaaaacaatgagcttgctattgaaaagaaaatcacgacatcaacagttgacatcaaagatgattctagaggcagacctgtccaaaaggccaagattgaaatattacttgggaagactgaaaaatttgatgagttgatggccgctgctgctgctgctgct

SEQ ID NO: 15619 - DNA, 309 bp, Glycine max
  Clone ID: LIB3040-013-Q1-E1-C8
tcagacagctacaaaagggtaaggctgcggcaatacgacatacggggagatctgctgcttctcattgttgaaaaggaagcccaacaggttgcacactggcatacgtttacatccaagttgcggcagcatcaacagcatggcctgccgttcaaatagaacgttcatcaagttcagttttcgaggcgtggatcacgatgcacttctcgacatgtccaccgatgaactcgtcaagatgttcactgcccgcgctcgtagaaagttcgacagaagccttagcacatcgcacatggtcttgatcaagaatctcca

SEQ ID NO: 15620 - DNA, 414 bp, Glycine max
  unsure (1)..(414): unsure at all n locations
  Clone ID: LIB3040-013-Q1-E1-C9
gagatagatctgcttcttgttgttggaaagaaaccctagcaagcggaacaatggcagacgttgaggtcgatgtggcggctgcagcagcagcagggcagccgaagaagagaacgttcaagaagttcagtttcaggggcgtggatctcgatgcgcttctggacatgtccaccgatgaactcgtgaagatgttcagtgctcgcgcacgtagaaggttccagagaggcctcaccagaaagcccatggccttgatcaagaagcttcgcaaagcgaaaagagaagctccaccaggtgagaagccagaacctgtccgcacccacctccgcaacatgattattgtgcctgagatgattggtagcattattggagtgtacaatggcaagacctttaatcanggtganatcaaacctgagatga

SEQ ID NO: 15621 - DNA, 126 bp, Glycine max
  Clone ID: LIB3040-013-Q1-E1-D1
gactctctatgcaatgaacaaagcaactgaagttgttgctttttagcttcaacaatttctcagtccaaccaaccgcatcagtcaaatctagcggcatatctcagccttcactctcacaacacttgc

SEQ ID NO: 15622 - DNA, 354 bp, Glycine max
  Clone ID: LIB3040-013-Q1-E1-D10
gcattctcattgccgtcacacagagagagaagagacaatgaagtttaacccaagggtttcctcaagccgtcgaaagagccgcaaggctcacttcaccgctccgtcgagcgtgcgtcgcgtcctgatgagcgcgcctctctcgaccgatctccggtcgaagtacaacgtgcggtccattccggttcgcaaggacgacgatgtgcatgtggtgaggggaacctacaagggccgcgagggcaaagtggtccaggtctatcgccgcaagtgggtcatccacatcgagcgcatcatccgcgagaaggttaacggctccaccgtcaacgttggcattcacccttccaaggttgtcgtcac

SEQ ID NO: 15623 - DNA, 411 bp, Glycine max
  Clone ID: LIB3040-013-Q1-E1-D11
gggttggaattgtatggaatggagggttagctaagaagaaaataggagagggttagtttttaggggctgcggaaaaaagatagtgagtggtggccaatgggagcggagaggttttcccacgaccatgctcccttgattctgggtctccagccatccgccctggtcgacaacgttgccaccgtcgattggtccttgctccatcgcattcccggcgagcgcggtggctccatccctgtccaaattgaagaactggaatccatactgagagaggttaaatccaaatcccacgatgacatcaaaactctcgctggtggcagcgttgccaacacaattcgcggtctcagtcgcggttttggaatttccaccggaattattggagcttatggagaatgacaacaaggggcagctttt

SEQ ID NO: 15624 - DNA, 377 bp, Glycine max
  Clone ID: LIB3040-013-Q1-E1-D12
gacatataaaaccttctttggcgcctgacatagagaagaagaagagagagtgatggagtgcgtattcggattggtgggtaatgggtttgcgatcgtggtggctgattcatcggcggtgcacagcatcctcgtccacaagtccaacgaggacaagatcatgctcctcgattcccacaaactcattgccgctagcggcgagcccggagacagggttcagttcacagagtacattcagaagaacgtcgccttgtatcagttccgtaacggcatccctcttaccaccgccgccgccgccaatttcacgcgtggcgaactcgccactgctctccgcaagacccatactctgtgaacatccttcctgctggttatgacaaaga

SEQ ID NO: 15625 - DNA, 382 bp, Glycine max
  Clone ID: LIB3040-013-Q1-E1-D2
gatttttatttctatccaatcatccatggccgaggaaccccaaaaaccagcctccgctgaagaagtggtcgctgttcctgcggagaacccaccatctgaagccgaagctgaaaacatcgaagcagagaaggcccagagtggtgtagaagacaagatttcccagtcggtttcgttcaaggaggagaccaacgtggttggcgacctccccgaggcgcagaagaaagcccttgatgagctcaagaagcttgttcaagaagcgctcaacaaccatgagctaactgctcccaagccagaaccggagaagaagaaaccagcagcagagaagaaggaggaagttgaagtgacagaagggaagaatgaagctgaagtcatagaagagaag

SEQ ID NO: 15626 - DNA, 275 bp, Glycine max
  Clone ID: LIB3040-013-Q1-E1-D3
gacagacaagggtttcttccgggttcacgtttcacaatcactttttgcgcttctctcactcactcactcttcttcttcctcttcgtgtggttttctttctcgaactcgaacgaagatgcgtgagattcttcacatccagggagggcaatgcgggaaccagatcggagccaagttctgggaggtggtgtgcgcggagcacgggatcgattcaacggggaggtaccaaggggacaacgagttgcaactcgagcgagtcaacgtctactacaatgaag

SEQ ID NO: 15627 - DNA, 380 bp, Glycine max
  Clone ID: LIB3040-013-Q1-E1-D4
gaccaccctcctaaccaatcaaaattcatgcatacccgtcacactcactctctactcattttccctcaacttagcaaacaagttaggttctctctctctctcaccaaaaacgcttcagatgaccctcaattgaaccaagagcactcatatcctcttctgaaacacacaaattcgttaaccaccaagtaggaaggaagagtcactctaaaatctttgcactagttttgtgttgtgcttgcaaggcttggaagcttacataatcttaaccacctcttcctctaattttcatgtagcagtgaaatctatggtcagcaggtctttttggtgaacgcaaccctggaaaccatggatcatactacggggtaaagagatgacactat

SEQ ID NO: 15628 - DNA, 363 bp, Glycine max
  Clone ID: LIB3040-013-Q1-E1-D5
gagttgtctgcaacagagtaagagggcaaaaccctagctttagtgtcttcccgcccatctcttgcaatctcatagattttagcagccatggcgagtaccaaagttcagagggttatgacccaacctattaacttgattttcaggtttcttcagagcaaagcgcgcatccagatttggctctttgagcaaaaggatttgaggattgaaggccgaatcattggttttgatgaatacatgaatttggttcttgatgatgctgaagaagtgaacgtcaagaagaaaagcagaaagacattagggaggatccttcttaaaggagacaacataaccttgatgatgaacacggggaaaatgatgaacaac

SEQ ID NO: 15629 - DNA, 340 bp, Glycine max
  Clone ID: LIB3040-013-Q1-E1-D6
acttacaaatattttgaggtcattctggtggatgttgcccacactgctgtaagaaatgatccaagaatcaactggctctgcaatccagtccataaacacagggaactgcgtggcctcacttctgctgggaaaagcaataggggtttacgtggcagaggacatctctaccacaaaaatcgtccatcacgcagggcaacctggaagagaaacaataccctctcccttcgtcgctaccgttgattttgttgcagttatcgtatgttgcttcattttctgagtatttggaggaaaatcgtcagttttggatccctgaatcatgccttttttccccgataatgtc

SEQ ID NO: 15630 - DNA, 53 bp, Glycine max
  Clone ID: LIB3040-013-Q1-E1-D7
gagacctcatgtcaggcggggctacccgctgagtttaagcatatcaataagcg

SEQ ID NO: 15631 - DNA, 335 bp, Glycine max
  Clone ID: LIB3040-013-Q1-E1-D8
gaattcagttgaaggaattgttgtaactttttgattcctaaattctctaaaattcgaaattctaatttcgttaggggaaagagattgtttgtgtgtgagtgagtatggctggaaaaggcgagggtcctgctatcggaatcgatttgggaacgacgtactcttgcgtcggcgtgtggcaacacgatcgtgttgaaatcatagccaacgatcagggtaacagaactaccccatcctacgtggctttcaccgacacagaacggttgatcggcgatgcggcgaagaaccaggtcgctatgaacccaaccaacaccgtttttgatgctaagcgtttgatt

SEQ ID NO: 15632 - DNA, 243 bp, Glycine max
  Clone ID: LIB3040-013-Q1-E1-D9
aatcatgtgcactcaattaggctctctcgcgctggaacgtcgaccattcatgaaggcacaaggctcttttccgatctgcgcagcaaggcctccccttggaaaatcaccacgcggttcaatcgactatcgagcaccgcccaaacaccttagtatgaacgttttcatctaaactcacagtggctctcaattcctggttgtgctgaatccgtcggaaactccttctgcatcgacaataccaacata

SEQ ID NO: 15633 - DNA, 318 bp, Glycine max
  Clone ID: LIB3040-013-Q1-E1-E1
gagcgaaacagagagtgatttcagtgagtgatcggtgttcacttgatctcatcataatcgtcagcgtcaattgaagaagatgccgatcagaaacatcgccgtcggaaggcctgaagaggcgactcaccccgacacgttgaaggcggctttggctgagttcatctcaaccttcatcttcgtgttcgccggctcaggctccggcatcgcctacaacaagctcaccgacaacggcgctgccacccctgccggcctcatctccgcctccatcgcccatgcattcgccctcttcgtcgccgtctccgtcggcgccaacatctc

SEQ ID NO: 15634 - DNA, 379 bp, Glycine max
  Clone ID: LIB3040-013-Q1-E1-E10
ggacccaaaatacaaaccttcatttttctcattcacggctataaataatctcaaaaacccttccaaaccctcacttcgccttccgcttccggcgccatatcgcgtatctttctctgttctattcctacgatggagttttggggtgccgaggttaaggttggtgagtctgttaaggtagatccagccgaattcgaggcatgcatacacctttctcaggctgctcttggtgaggcaaagaaagacaaatcaaatgaaccagttgttctctacttgaaagttggtcaacagaaatttgtcttgggaaccctttccagggagaaaattcctcaaatacctctggaattggttttggaaaaggagtttgagcttttccacaact

SEQ ID NO: 15635 - DNA, 368 bp, Glycine max
  unsure (1)..(368): unsure at all n locations
  Clone ID: LIB3040-013-Q1-E1-E12
gatcatcaaatcaaaaaccctaattcccaaattctctcatttttcaagtttcaaccaagaaaagcagcaacaatgtcgggtcgcggaaagggtgggaagggtttaggaaagggaggagcaaagaggcatcgcaaggtgctccgcgacaatatccagggaatcacgaagcccgcgattcggagactggcgagaagaggtggcgtgaagagaatcagtggtttgatctacgaagagaccaggggcgtgctcaagatctttctcgagaacgtgattcgcgatgccgtgacgtacacggagcacgctangagaaagacagtgacggccatggatgtcgtttacgctctcaagaggcanggaangactctcta

SEQ ID NO: 15636 - DNA, 333 bp, Glycine max
  unsure (1)..(333): unsure at all n locations
  Clone ID: LIB3040-013-Q1-E1-E2
atcatcgccagtgacaaaattgcatgcagaaggtataggaacagtttgcagcaggttatacattggaacagccaagaacataccaccatcagagcttattgatacaactggtgctggagatgcatttattggagccgttctctatgctatctgtgccaacttcgagccagagaaaatgctgtgctttgctgctactgtggcagcttccaagtgcagagctcttggagcaagaagtggtctcccttaccgcatagattcatgcttggcatccttcatgcagtagcaatccttactancactgaagtgaaccaaatgggttagaataaatttttt

SEQ ID NO: 15637 - DNA, 341 bp, Glycine max
  Clone ID: LIB3040-013-Q1-E1-E3
gaggcaggtacgcaacaaagcgatagcagtgtggaagtatttgcagaactttgtttcccaacctccattgcctccgcttctacctcgctaccatgatcattcctgagaagaaccgcaaggagatctgcaaatacctcttccaagagggagtttgctttgcgaagaaggacttcaatttggcgaagcaccctgagattgacgtgccgaatctgcaggtgattaagctgatgcagagtttcaagtctcgcgagtatgtgagggagacttttgcttggatgcactattactggttcctcaccaacgatggaatcgagtttctcagaacttaccttaaccttcct

SEQ ID NO: 15638 - DNA, 397 bp, Glycine max
  Clone ID: LIB3040-013-Q1-E1-E4
ctgtgccgagattaccattgtgctttgctacttccaattgtgcagtgaggattacaattggtggtggagatcttacctcactgctgggtcctctgcgctgtaccttttcctctactcaattttctacttctttaccaagttggagatttcaaagctggtctcgggcatcctttactttggatacatgataattgtttcatatgccttctttgtgttgacgggaactatcggcttctatgcatgcttctggtttgttcgcaagatctactcgtcggtgaagattgactgatttcaggcatcaatcatataatatgaccgatgagtacaaccggaaactgatactgagatgactcaaccaaatactgccgggaagttacctttcccccaactctgaaaa

SEQ ID NO: 15639 - DNA, 311 bp, Glycine max
  unsure (1)..(311): unsure at all n locations
  Clone ID: LIB3040-013-Q1-E1-E5
gcatacaatagagaccagcttttgcttctttgtgaacatggagatgaggaaatcatgtggcttcttcttcttgctcctcctccttgtctttgcttcccaggtggtggtgcagacggagggaagagtgtgtgagtcacaaagccacgggttccatggtttgtgtaatagagaccacaactgtgctttggtctgcaggaacgaaggtttctccggtggcaggtgcaaaggcttccgccgccgctgcttttgcaccaggatttgtcgagatctcatcaaacactactcttgccatgcaaattaatanatcatag

SEQ ID NO: 15640 - DNA, 303 bp, Glycine max
  unsure (1)..(303): unsure at all n locations
  Clone ID: LIB3040-013-Q1-E1-E6
gacttctcaagaaaattagggtttgcagtcactgctttgtttagatcagaaccagatcgcgttctcttcttccattggcaaacatggcaactcaaatgagcaagaagagaaagtttgtggcggatggagtgttcttcgccgaactgaacgaggttctgacacgtgagttggcggaggacggttactccggcgtggaggttagggttacgccgatgcgcaccgagattatcatcagagccaccagaacccaagccgttctcggtgagaagggaaggagaattagggaactntactcagtggtgc

SEQ ID NO: 15641 - DNA, 324 bp, Glycine max
  Clone ID: LIB3040-013-Q1-E1-E7
agcttacaagattgcggctcatgctgctgatttagccaaaggccatccatatgctcaagcttgggatgatgaattgagcaaggcaagatttgagttccgatggatggaccagtttgctttgtcattggatccgatgacagccacgtccttccatgacgaaaccctaccggcagatggtgcgaaagtggcccatttctgctcaatgtgtggccctaaattctgctctatgaagattacagaggatgtgaggaagtatgctgcggaacatggctatggaactgatgaagctttgcagcgtgggatggatgctatgagtgctgaatt

SEQ ID NO: 15642 - DNA, 337 bp, Glycine max
  Clone ID: LIB3040-013-Q1-E1-E8
gacgttcacattcaggaatcgttttcttcagaaatttgccatcgttgagggaagcgcgagagccttcgttgttcaagatgagagctaagtggaagaagaagcgcatgaggaggttgaagaggaagcgccgaaagatgagacaaagatctaagtaggtgcttgaacaaggagtggagatgatgtgcttttccatctgctaccagcttcatgacattttatgctgtcatggctcttatgatgatcttgaggtctagtggcgaggggagcttccatcttgactttagtttagctttactggtctaaagattgctgttttagtgtgggttaagttatgata

SEQ ID NO: 15643 - DNA, 307 bp, Glycine max
  Clone ID: LIB3040-013-Q1-E1-E9
aacaatagcctgacaaagggtttagccataaaatcgaatccatcattgatttgagatattgataaggtgaatactcatttctcgtcaatgctaggcataatgcgggtatagggacctaaaaaagattatcttttcttcctatcttatgaactttaaggtgtatgaagtgtcatttcctatcttagattttaattttagtaggtagataaagagtccatttaacttaagttgatctaggccagaagcagacctacgtcaagataatccttctttgaaacactttggtagtgctcttagattgtaatcc

SEQ ID NO: 15644 - DNA, 363 bp, Glycine max
  Clone ID: LIB3040-013-Q1-E1-F1
gatcaccactttcattttgagcgtgtcgtgtctgtttctgagttatggcacagaagacgtttctgattctcagaaattaacatgaagggcatggttttgaagtaaataaatccagctgtgtcttgattgatgagtttggaagcattgcatttacattttgcagtgttggtgggtagttgttgctctctatagccatttctgaagtacactatagtgtgtatgtgtgtgtgtgatagagtgtcgagtttgaagattaagctacaaaggtttgtcctgttgtcttagttgctcattcttaaagaaacagtggggaacaacagtgatagctcttgacaggatcaagtctttgaagatttagcaact

SEQ ID NO: 15645 - DNA, 386 bp, Glycine max
  Clone ID: LIB3040-013-Q1-E1-F11
ggaggcgacggtaaggtcgcgttgtgttgcgtcgtgtcgtgcgctgttcctctgtttctcgtttttgtgttcagaccgaaccctagctccgcatcgcaaccatgtcgaccaagcaaggtggaaaagctaagcctttgaagaaacccaagtctgataagaaggattacgacgagattgatgtggctaacattcagaagaaaaaggaagaggagaaggcgctaaaggagttgaaagccaaggcgcaacagaagggaagctttggaggttctgggctcaagaaaagtggaaagaaataagggctctttatcatgattgtatgcattcaatattgagccctgtaattacagttgctaccatgataacttctcttattattgtggcctact

SEQ ID NO: 15646 - DNA, 397 bp, Glycine max
  Clone ID: LIB3040-013-Q1-E1-F12
gagggttacacgccgtcgtcgctgtttttgtgtgtcgcttcttcgtaggtgcagctgcaatggtgaagggacgccaaggagaacgtgtcagactctacgtgaggggtacaatccttggatacaaaaggtccaagtcaaaccagtatccaaatacatccctgatccaaattgagggtgtgaatgccaaagaagaagtagcatggtatgctggcaagaaaatggcctatatctacaaggctaaggtgaagaagaatggaagccattaccgctgcatatggggcaaggttacaaggcctcatggtaacagtggtattgtccgtgcaaaattcaagtcgaaccttccacccaaatcaatgggagcccgagtaagagtattcatgtatccaagcaacatatg

SEQ ID NO: 15647 - DNA, 359 bp, Glycine max
  Clone ID: LIB3040-013-Q1-E1-F2
ggtgagacgagggtaaggtcgcgttgtgttgcgtcgtgtcgtgcgctgttcctctgtctgtcgtttttgttttcagaccaaaccctagctccgcatcgcaaccatgtcgaccaagcaaggtggaaaagctaagcctttgaagaaacccaagtctgataagaaggattacgacgaggttgacatggctaacattcagaagaaaaaggaagaggagaaggcgctaaaggagttgaaagccaaggcgcaacagaagggaagctttggaggttctgggctcaagaaaagtggaaagaaataagggctctttatcatgattgtatacatccaatattgagccctgtagtttaaaatacatgata

SEQ ID NO: 15648 - DNA, 319 bp, Glycine max
  Clone ID: LIB3040-013-Q1-E1-F4
ggtgcttcgtctcagatcattctgcgcaggtaagacagagagaaagaactgacctcagcggcggcggcggcggcaacagaagaacaaccaccaccacacacaatgggtcgcgtgagaacaaaaacggtgaagaaatcctcccgccaggtgattgagcgttactactcgcgcatgaccctcgacttccacacaaacaaaaagcttctcgaagaagtggccatcatcccttccaagaggctgcggaacaagatcgcgggtttctccacgcatctcatgaagcgcatccagaagggtcccgttcgcggcaatctcctcaagc

SEQ ID NO: 15649 - DNA, 301 bp, Glycine max
  Clone ID: LIB3040-013-Q1-E1-F5
gagcgaaacagagagtgatttcagtgagtgatcggtgttcacttgatctcatcataatcgtcagcgtcaattgaagaagatgccgatcagaaacatcgccgtcggaaggcctgaagaggcgactcaccccgacacgttgaaggcggctttggctgagttcatctcaaccttcatcttcgtgttcgccggctcaggctccggcatcgcctacaacaagctcaccgacaacggcgctgccacccctgccggcctcatctccgcctccatcgcccatgcattcgccctcttcgtcgccgtctcc

SEQ ID NO: 15650 - DNA, 333 bp, Glycine max
  Clone ID: LIB3040-013-Q1-E1-F6
gatggttgcatgaacatggcaggtttcgcggcaaacatcggcttcaacatctcgtcccactttccctgtcgcgttttttcaattcaccggagtatttggaagtttcagattgtctgcttgaagagaagagagtatagttcttctgttcctattaggtacatttccagcacatcctgcagggtgaaaatacttgaaactgcactgccagtgaaaagccttggatattgtagctgtcctgatgttaatgtgctcaagataaatggtggaaaagatgtgcaggcaacaattgcacattgtgaaatttctcaagacccgaatgaaatttgccctgac

SEQ ID NO: 15651 - DNA, 313 bp, Glycine max
  Clone ID: LIB3040-013-Q1-E1-F8
taattagtccttttgggccgttgtgcaaacgaaagtgaagaaagagttgcagttgcagtagagaaagagttgttgttacaatacaattaacttacatcccaatagagacagcactataatgttgcttttggggggttgggttggggtttccattttgaagaaacaacaaaagttctttatcctgaaactgcatgaggagccacagttggtgttgatgataagcaagagtgctacctggagacaaacactcacgtacaattgcatgtcatgcatggtttattgtgaacagtgtcaatccatgaagaagaacatc

SEQ ID NO: 15652 - DNA, 362 bp, Glycine max
  Clone ID: LIB3040-013-Q1-E1-F9
ggaggtcatcttgttggtccattcgtgcggtaacggaaggagacaataagcgtctccgtcgcttaaattgccgagaacttcattacccattatctgttacagttctacgctctcgctccaaaccccacttcagatttggtttactggaaggaaagtgcttgaaggacccaatctacacgagagatgcaatggcaataaacacacacatgttagcttcaatgtgttattattgctgccactgtgattaatgagtaagtcactgtgtcaaaggatatagagctgttttcttccagtgcatctttggtttgagatttatgtagttttctctgaaaagtgattactagtttccctcaaacaataat

SEQ ID NO: 15653 - DNA, 365 bp, Glycine max
  Clone ID: LIB3040-013-Q1-E1-G10
gatcatcaataggtgttttcatttgggattcaaactcaccatggtggacgccttcaaactttgcatcttccttcttgcgtcgatctgtgctttcctagtcttttctaatccagtgctgtgtagtgataaggaggacagtgtattcaagggaatcaacagctacaggcaaacacggagcctggtacccctgagccaagtttcgaaggcaacatgtttggctgatgaagttgcagaagaaatagagaagatgccctgtgaaaacgtgaaccaatactacccttcatctgttcctggtagtgggaacctcaaaatcccaaacttgcagaagcacattaataaatgtgacattaactttcaaacacaca

SEQ ID NO: 15654 - DNA, 411 bp, Glycine max
  unsure (1)..(411): unsure at all n locations
  Clone ID: LIB3040-013-Q1-E1-G11
ggagagaagttattagggtttttgagtgcggcggtccaaacactcttctctgcagcttttgcctacaactcccttcaccatggctgaacaaaccgagaaagcttttctgaagcaaccaaaagtgtttctcagcacaaagaagactgggaagggaaagagacctggaaaaggtgggaaccgcttttggaagtccattgggcttggatttaagactcccagggaagccatcgaaggaacctatattgacaagaagtgccccttcactggcaatgtttccatccgtggccgtatcttggctggaacatgtcacagtgctaagatgaacaggactattattgttagaatgaattatctccattttatcaagaagtaccagaggtacgagaagaggcactcnaaatatcctgctca

SEQ ID NO: 15655 - DNA, 364 bp, Glycine max
  unsure (1)..(364): unsure at all n locations
  Clone ID: LIB3040-013-Q1-E1-G3
ggggttattggacacattcttcagcgactgcgtttttggatcggaacctcttctgcggcgtagcaatgggacactccaacgtttggaactctcacccaaaaaactacggtcctggttctcgcacttgccgtgtgtgtgggaatccacatggactgatcaggaagtatggccttatgtgctgcaggcagtgcttccgtagcaatgccaaggaaattggcttcatcaagtatcgctaaaagagcagttgtcaactacggaccaatattgtgttctggcactaggatgttttgaggatgttatgtttgaagaaacttgagactttcttttttcatctaattaattatcagacgtantttgtggtact

SEQ ID NO: 15656 - DNA, 79 bp, Glycine max; identical to SEQ ID NO: 12323
  Clone ID: LIB3040-013-Q1-E1-G7

SEQ ID NO: 15657 - DNA, 304 bp, Glycine max
  Clone ID: LIB3040-013-Q1-E1-G8
gagcgaaacagagagtgatttcagtgagtgatcggtgttcacttgatctcatcataatcgtcagcgtcaattgaagaagatgccgatcagaaacatcgccgtcggaaggcctgaagaggcgactcaccccgacacgttgaaggcggctttggctgagttcatctcaaccttcatcttcgtgttcgccggctcaggctccggcatcgcctacaacaagctcaccgacaacggcgctgccacccctgccggcctcatctccgcctccatcgcccatgcattcgccctcttcgtcgccgtctccgtc

SEQ ID NO: 15658 - DNA, 405 bp, Glycine max
  unsure (1)..(405): unsure at all n locations
  Clone ID: LIB3040-013-Q1-E1-H11
ggagttcagttgcagaccttcacatggcaaaatcattcttcacttagttaggaaccgaaccatggctataacgttcggtttagtgactcctaactccaacactttgtgtctcactctcaccacaccacccctcatcgccaatcatcgtactactaatgttgtgttctctggtcaaagtgtcttcagctatggacacactaatctttcttattcacaccaaagggcttcttcctttgccactattgtctgttctgctgctaataaaccatcctcttcttctgaaattagctctacagccaagataaggagcgaggttctctctcnctttcgttcagttaggatgttcttttatattgcttttgttgcaagtggtgctcttgggggaatcatagcaaccacacaact

SEQ ID NO: 15659 - DNA, 372 bp, Glycine max
  unsure (1)..(372): unsure at all n locations
  Clone ID: LIB3040-013-Q1-E1-H12
gttaaatggcccattataaagccttctaatttgcactttgtctctctctttccgttcccttgatgtaatggctttatgccgattcgcttactcttattctcctgcttctgctttcaccatttttcgtttcccgaaatacccttcgaaacacactaaattctccttgctaccactctcattctcaacgatgggagctcctccagaaggctatcgtangaacgttggtatctgtctcatgaacaatcacaaaaagattttcgcggcttcgaggctcgacattcccaatgcttggcaaatgccttaaggtggtattgatgaaggtgaggattcaagaaatgcagctatcaaggagttacgagaagagacaggagt

SEQ ID NO: 15660 - DNA, 304 bp, Glycine max
  Clone ID: LIB3040-013-Q1-E1-H2
agcgaaacagagagtgatttcagtgagtgatcggtgttcacttgatctcatcataatcgtcagcgtcaattgaagaagatgccgatcagaaacatcgccgtcggaaggcctgaagaggcgactcaccccgacacgttgaaggcggctttggctgagttcatctcaaccttcatcttcgtgttcgccggctcaggctccggcatcgcctacaacaagctcaccgacaacggcgctgccacccctgccggcctcatctccgcctccatcgcccatgcattcgccctcttcgtcgccgtctccgtcg

SEQ ID NO: 15661 - DNA, 357 bp, Glycine max
  unsure (1)..(357): unsure at all n locations
  Clone ID: LIB3040-013-Q1-E1-H3
gaaatctatttcagtttgaattttgaaagtgagtgtggcgtaccgtgtacgtatctgcagaaagtgaatgaatggtaatgggggaagaagggtgcaaggtatgtgttacaggaggcagtggttacattggttcctggctcatcaagaagctactggccaagggctacacagtccatgcaactctcagagacttgaagaatgagtcaaaggttggcctcttaaagagccttccacaatcagaaggaaaactggtgctgtttgaagctgatatttacaacccaaatgattttgaccttgcaattgaaggctgcaagtttgtgtntcatgttgctactcccatgatccatgaacctggct

SEQ ID NO: 15662 - DNA, 309 bp, Glycine max
  Clone ID: LIB3040-013-Q1-E1-H4
cgccgagcctcccccggaggagaaggaggagcccaaacctgaagccaaggctaagaaaaccaaggaacccaaacctaaaaaggtttccagaccacgcaaccctcccactcatccttcctacgaggagatgattaaagacgcaattacctcgctgaaggagaaaaccggttcgagccaacacgcgattgcgaagttcatcgaggagaagcacaagcagcttccaccgaacttcaggaagcttcttctctaccatttgaagaaacttgtagccgctggaaaactcgtcaaagtcaaaggctccttcaagct

SEQ ID NO: 15663 - DNA, 383 bp, Glycine max
  Clone ID: LIB3040-013-Q1-E1-H5
gatacatagctatctatttatctatagcaagtgcgtcaagagacacgtggtaccctagctagagtgccattctgtggtttctttctttctttctttctgcatcacatcacaatttgcattgcctcgtgtcctttttcttctttgctctccaaaaatctcacacacacaggtatctagcaaatgggttctcaccaacaagaaccatggctattggagaatgggaaaccaagggttttgaccaaggagaccaggcatggccgttctgcacacagaatgtcctccacctctttgcgcaagaaatctagccgaactcttgtctcaaaggttccatgtgccactctcagaaactttcttcaaaatttgcaaaggttaatcctgggaac

SEQ ID NO: 15664 - DNA, 283 bp, Glycine max
  Clone ID: LIB3040-013-Q1-E1-H6
ggtccctctgcgtttttgacaccgtgtttgttgttgtgtgtgttttccgcggaaaatcaagatgggtatcattgaaaagatcaaagaaattgaagccgagatggctcggacccagaaaaacaaagccacagagtatcatctcgggcagctcaaggcaaaaatagcaaaactgaggacacaattattggagcctccaaaaggttctagtggaggtggagaaggatttgaagttacaaaatttggtcatggacgtgttgcactgattggatttccaagtgtgggg

SEQ ID NO: 15665 - DNA, 353 bp, Glycine max
  unsure (1)..(353): unsure at all n locations
  Clone ID: LIB3040-013-Q1-E1-H7
cccacgcgtccgcccacgcgtccggacgacagaaggggacaacacagaacaaaaacaaagaaaaaaaaaacccttagccaacacaaccatcatggccacctctgctattcagcaatcagcattcactggtcaaactgctctgaagcagctcaatgagttcgtccgcaagaccggtggcgccggcaaaggtcgcactaacatgcgccgcaccgccaagagtgctcctcagagcatttggtatggccctgaccgtcccaagtacttgggtccattctcggagcagattccatcatacctgaccggagaattccctggtgactacggatgggacactgctggattatcnagctgac

SEQ ID NO: 15666 - DNA, 300 bp, Glycine max
  Clone ID: LIB3040-013-Q1-E1-H8
gattgttggcttgtgctctgctcgtgcctctagggttatcatatctccatttccatttcctctctctcagtttccaagaatcttaagctatgggaaagtcttacccaaccgtgagcgctgattaccagaaggccgttgagaaggcgaagaagaagctcagaggcttcatcgctgagaagagatgcgctcctctaatgctccgtttggcatggcactctgctggaacttacgacgtgagctcgaagaccggtggtcccttcggaaccataaagcacccctccgaactcgctcacggcgcta

SEQ ID NO: 15667 - DNA, 354 bp, Glycine max
  Clone ID: LIB3040-013-Q1-E1-H9
gacaactaaacacactagctatagctagaatcccctccaatccctctttgtctttgtgcttttctttagttctttccaaaacagcaacaatgatgagttgccaagcatggcctgaacccatagttcgagtccaatccttagctgacagtggcctaagctcaatcccttcacgctatattaggccacactcccaaagaccctccaacaccacttcttttaaactttcacaaaccgaacatgatcatggtcacggtcgagagactcgtgaccatgatcatgttaacatccccgttattgacctggaacatcttttctcggaggatgaaatcctccgagaaaagatattccgacacg

SEQ ID NO: 15668 - DNA, 262 bp, Glycine max
  Clone ID: LIB3040-014-Q1-E1-A1
ggatgaccctcaaccaccctaagggaccttcttccaaattcccaatttcatctgccgttcgatttcagactcttcattcgggatttggcacaacgagatcatggctcgcattcagtcgatgcgtgctcgttcggctgttctcgtgcgtccagtgatcagttccgtgtcagtcgatttaagcttgcatgacaggtgaaggcccggatcttgcagagctctcagccatgggtcaagacatacttaccacagcaagtggaagatg

SEQ ID NO: 15669 - DNA, 357 bp, Glycine max
  Clone ID: LIB3040-014-Q1-E1-A10
gacccttaacctctctgctgcgtttgcttctcctccacccatccacaaacgaacacacactttgattgagaatggggcgtgttcgcacaaagacagtgaagaagtcctcgcggcaagtgatcgagaggtactactctcgcatgacgctggacttccacacgaacaagaaggttctggaagaggtggccatcattccctccaagaggctccgcaacaagatcgcgggattctccacccacctcatgaagcggatccagaagggtcccgtacgtggaatctccctcaagctgcaggaggaggagcgcgagcgccgcatggacttcgtccccgatgtctccgccatcagaaccgaacaga

SEQ ID NO: 15670 - DNA, 391 bp, Glycine max
  Clone ID: LIB3040-014-Q1-E1-A11
taaaaaagaaaagacaaaaaccgcattgagtggggcctgccctaaaatggcccttacagagcttctctatcaagagctgctagttggtggttgaggagtaataggttccgcataagctacatttcgtgggggaggcacctatccagtacttccgaactcgtctttcatctacagacattgggtcgctaaagccaatagttcggtgtccgggcaacagccaagccactcatctttggttgcagcttcggcggaagcctatgctttcagttcagttccattccttggttctccggttgattgccctgcccgcgtcacaccttaaaaagctttggaacggcagtttcacttacttctcacggacattggaccttcttcaaactggcctttgaac

SEQ ID NO: 15671 - DNA, 142 bp, Glycine max
  Clone ID: LIB3040-014-Q1-E1-A2
ggctgtgagtgagacaccgatagatagatagcgcggcataacctaaacctatctttcttctctccctgtgtgtgcgcgtcaacggcaaacagaaggcaccatggtcactgccaggactgtgaaggatgtttcacctcatgag

SEQ ID NO: 15672 - DNA, 360 bp, Glycine max
  Clone ID: LIB3040-014-Q1-E1-A4
gaccctagctcgcgttcttcgttcgtcttttacatcaggatggagtctcaggtgaagcacgcacttgttgtcaaagtaatgggtcgtactggattcagaggacaggtgacccaggttagagtgaagtttctggatgatcagaaccgtcagatcatgaggaatgttaaaggaccagtgagagaaggagacattctcaccctagtcgagtctgaaagggaagctagaaggttgcgctaagagggtccttctttcttgatctttatggtagttagtcggtgctaaaggttatagcaccctatcttgtcttggatctattttcattcgaattatggcttgagttttgctgttttgagtcgaagc

SEQ ID NO: 15673 - DNA, 392 bp, Glycine max
  Clone ID: LIB3040-014-Q1-E1-A6
ggggtttctccacacattctttatctaccaatcttcttccactactttcccttcgttccctctcactctcttcatttgtaagctttttgcgctagggttttctctgcaatctcttgtactcgaagttcgttccttcttccggatctcaatctatggatatccgcaagaggggaagacacgaaaccggcttcagcttaaatggaggattcaagagatccaagcaagaaatggagtccttatcaactggtgtaggaagcaaatcgaagccatgtaccaagtttttcagcactgctggttgcccaattggtgagggctgccacttcttgcactatgttcccggtggttataatgcagttgcccatatgatgaatttaacagctgcagcacctcct

SEQ ID NO: 15674 - DNA, 367 bp, Glycine max
  Clone ID: LIB3040-014-Q1-E1-A7
ggattgcagcgtcactgttagttattgtatcctagaggaccctatcttctcccacccccttcctatattacataaccttgcatttcattgcatgcccttcttcttgttctgatcttttggggtgtgcgtgtgtgtgaggttgattgattgattgtttgtttgttccttcatcaacacaatgaagatatctgatgagaacagttctaaaccaatcaaccctacaagttttcaaggagggatagaatgtgtggggaacagaaagatggggcagaacagaagggctttaagcgtgatcaatcaggatctggtggcggaagggagaccttacccttgtgttgttaacaagagggcagtggcagaaaaacac

SEQ ID NO: 15675 - DNA, 324 bp, Glycine max
  Clone ID: LIB3040-014-Q1-E1-A8
gatccaaatccaccccaacacaaatcttagccgctattgatttttcctcttccatttctcttactttctcagcctttttcgattacccatttggttatttcgccctaatggctcttgctccatccaaagtttccaccttttctggtttttctcccaaacccagtgttgggggtgctcagaaaaacccaacttgctctgtttctctgagctttttgaatgagaaacttggaagcagaaaccttagggtttgtgcctcaacggtgcctctcactggggtgatttttgaaccgtttgaggaggttaagaagagcgagcttgctgttc

SEQ ID NO: 15676 - DNA, 372 bp, Glycine max
  Clone ID: LIB3040-014-Q1-E1-B1
gaacatgccgaaaagtagtaccaagatggcttcagttgtgtatctcctctttggcttccatctcattgttatcatgtcaagttcctttaccgcaactagtgaagtgtttgcaaaacagtatccatccacagaacccgtggaagagaaactgagccaactccacttctatttccataacaacataacgggggaacacccaactgctatgaaaactgttttgcctcctaaggggtccattcatggttttggggctacgtacatgatggatgaccctctaactgaaggaccaagtccaacttcaaagcttgtgggaagatctcagggaatatacgctttggcttcagaacatgagcctgggttgctcagggtgac

SEQ ID NO: 15677 - DNA, 396 bp, Glycine max
  unsure (1)..(396): unsure at all n locations
  Clone ID: LIB3040-014-Q1-E1-B10
ggttgtcaagcctgccgagaaaaccctagttcgcttgcagtcacacaagaggccaatcctattcatagctcgagatgggtgaagaagtgaaggtagttgttccagaatcagtgttgaagaagcgcaagagggaggaggaatgggcgttggccaagaagcaagaactcgatgctgccaagaagaagagagccgagagccgcaaactcatctacaacagagctaagcagtacgctaaggagtacgatcaccaggagaaggaattgattcggttgaaacgcgaggccaagctgaaaggtggtttctatgtggatccagaggctaagctgttgtttattattcgcattcgtggtattaatgccatggaccccanatcaaggaagatcctgcagttgttgc

SEQ ID NO: 15678 - DNA, 306 bp, Glycine max
  Clone ID: LIB3040-014-Q1-E1-B12
agtgcatgtaattcatattcataaagagaaaacccttagccaacacaaccatcatggccagctctgctattcaatactcaccaatcaatgcttacattgcacttcatcaccccactaaattcttccgcaagatcagttcaccgggcatcggtctcaataatattcaccgcaacgtccctagtgttcctcagattatttggtatggacctgatcgtcctatctacatctgtccaatcacggagcaggttcgatcatatctgacttgacaattctttggtaactacagatgcgacactgatgcattat

SEQ ID NO: 15679 - DNA, 181 bp, Glycine max
  unsure (1)..(181): unsure at all n locations
  Clone ID: LIB3040-014-Q1-E1-B2
cgggactccgcagctgcagcactcaaaatcctagagaggacgagagaacctgcaactttcggcaaccacagaccatgacattcaagcgcaggaatggaggtcgcaacaaacacggccgcngccatgtcaaattcatccgatgctccaactgcggaagatgctgccccaatgacaaggccat

SEQ ID NO: 15680 - DNA, 322 bp, Glycine max
  unsure (1)..(322): unsure at all n locations
  Clone ID: LIB3040-014-Q1-E1-B4
gaacaacatggtgaaactggtggagagaattacttgccaaaagcttacgttagaaccaagaggactacttaatggagcaaatcagttggaagaacttgtagccagcttcccaactggcttatctgagtgtggagaagcattatcaagccttaggagtaagagaacgagtactgtttgtgatgaatgtctatggtttaagaaatctgtctttagtcaacttgtgtgttttgttattcagttctcagcaataaactgctctggcaatctagtttcatgtccaaaagagaaatngagaaaaagaaaaaaaaaaagcggccgctct

SEQ ID NO: 15681 - DNA, 326 bp, Glycine max
  Clone ID: LIB3040-014-Q1-E1-B5
gattgccaaagtaatcattagtgcagtataatggtggaggttggagtggtgtggagcagcctctggagtctggccatcaatgcagacctgtagctgagtttgtcatgtagcagggattgtggcttctaattgcagccactatggttgacagggaaattcccttcgttacccctgtttttgtgtgagggctaaactactttttgggaaataggcgttgggcactagattcagtgtttctctatctcgaggatgaacagaagaaataccgaagagcagcacacctgtttccaccaaattgttatcaaggaagaagaaggttttcgggt

SEQ ID NO: 15682 - DNA, 293 bp, Glycine max
  Clone ID: LIB3040-014-Q1-E1-B6
gacaactgagaaaggcaagaagcagccgtgtgggtcacctcattggactgacttcaccgcagaaatgggacggaactgcacatccgcaattcactctctcccgataacgccacagcacagtttctttgtaattcacagtacaatcaaatcgcttgtccatctaaacatgggagaatatgcttcgagaaccaatcttagctactgtccagattatcgcattgacgaggactccatagatgacatgcctttaacaagtgaccccgaatgctatgacgatgatcgccatcttaaac

SEQ ID NO: 15683 - DNA, 152 bp, Glycine max
  unsure (1)..(152): unsure at all n locations
  Clone ID: LIB3040-014-Q1-E1-B7
gattgttgttgctattatcatccgcagctgcttttattcgcaccgcaaacagtgggccatggccgtcggaaagaacaagcgcatctccaaggggaanaagggtggcaagaagaaggcagctgatccctttgccaagaaggattgggatgaca

SEQ ID NO: 15684 - DNA, 71 bp, Glycine max
  Clone ID: LIB3040-014-Q1-E1-B9
gactctttatttctcgttttctctctctacactcctttcagcacagcacaacacaacacaaaaccctttcc

SEQ ID NO: 15685 - DNA, 363 bp, Glycine max
  Clone ID: LIB3040-014-Q1-E1-C1
gatccacacctctctctctctctcagaatttctatctatctcttgtttcaatttcaacaacggttactcctttttcgttttgagtttcaatcaagccatcatcatgtctaccgcatcgcaacccaaggccaagaaaacggcgtcgtccaggaagcccctctcccaccctcccttcgccgtgatgatagcaaaggcgattgcgagtctgaaagagagaaccggttcgagccaatacgcgataaccaaatacatcgaagggaagcacaaggagttgcctgcaacctacaagaagcttgtcctcgttcatctcaagaaatctgttgctgctggcaagcttgttaaggtgaaaaactcctttaagct

SEQ ID NO: 15686 - DNA, 260 bp, Glycine max
  Clone ID: LIB3040-014-Q1-E1-C10
ttccgggcctacacacgcgtcaaaccggtcgacagaaagggacttacgggtaaatgtttccgtcactcttcgtctcttaccgactactgtacacgctctccctatacgatacaatactacatacgtgtacagtctacgttatcatcactcaagtgggtctcgttgcgtcttctcctggctctccgttctctattgtcttcccagttttattcacttgctcgccatttccaacgctcgccagttgcacatctctcattgaa

SEQ ID NO: 15687 - DNA, 146 bp, Glycine max
  Clone ID: LIB3040-014-Q1-E1-C2
gacgtgaagttgaatccttgctgatgcccatcatgggaactacttttcctcctcactctcgctcgggaagcgtcaacatcaaatcttcagccgcaagaattctcttgggtccctcgccgcaaaccaggtcaggttctctcttttgg

SEQ ID NO: 15688 - DNA, 332 bp, Glycine max
  Clone ID: LIB3040-014-Q1-E1-C3
ggacatgcctaacttgaacccaacacttcaagtacttgcttcttcatacccttaccagatcccaaaggtcttgatctaattttaagtgattcttctgatgactatattgaaggttacatgaagccatttctctttttaaatcttcccagcaccgagttcaattcttcacaagttgattgtaatcactcaatggctcattcgtcttatccctacggcgatccaatttttgcttatggaccacaagctattagtcatccccaaatgatacccccgatgctgggactagcatccaccagagtggctttgccacttgatcttgcagaagatggacc

SEQ ID NO: 15689 - DNA, 250 bp, Glycine max
  Clone ID: LIB3040-014-Q1-E1-C6
gaatgtgcgagcacttactcgtctcactgtcttgctatatttgggtgagaacacagaggatagtggagttcaacgagatggagcacataaagcacagaacagttgaagtgaatggcataaaaatgcatgttgcagagaaaggagagggtccagtggtgttgttcctccacggcttccctcagctctggtactcatggcgccatcagattctctctctcagctccctcggctaccgcgccgtcgctcccga

SEQ ID NO: 15690 - DNA, 271 bp, Glycine max
  Clone ID: LIB3040-014-Q1-E1-C7
gggtggagagaggggcactgactcacacccacaatagtcgggggcagcttcaaagtacctccacattgtctcctactcttactgttctcttctcttctcatcatttttattttttccaatcaaaccaaacaaaacataagcaccgctcttttctctccgaaatccccatctcccttcacttctgagctctggacgagatcccagatctcaccatctttcacgcactcttccatcagattcaccctttcgtttaacgcaaactcataacttg

SEQ ID NO: 15691 - DNA, 375 bp, Glycine max
  Clone ID: LIB3040-014-Q1-E1-D1
gaaggtttttgtcgtcgctactaagaattgctgcttcttcagccactccgcaactcgcagcctctgtgccctcaacaaccatggctgaaatcgaaactaccgttccagattccacccaaatcgacgtcaaactcttcaatcgctggagcttcgaggatgttgaagttaatgatatgtctctggctgattacattggagtgtccccatcaaagcatgctacatatgttcctcacactgctggtaggtactcagtgaagaggttcaggaaagcgcagtgccccattgttgagaggctcaccaactctctgatgatgcacgggaggaacaatggaaagaagctcagggctgtcaggattaacaggcatgccatggaga

SEQ ID NO: 15692 - DNA, 344 bp, Glycine max
  unsure (1)..(344): unsure at all n locations
  Clone ID: LIB3040-014-Q1-E1-D10
gagccacaacactttccacttgtctccgaattagttatcttgagaaacattattcccattgctatatattatggctagcatgaaggttacatgggtggttgtgatcatgtgcatggccgtggtgggtgcaccgatgatggcgcaagccatgacatgcaatgatgtgacggtgaacatggcacagtgcctatcctacctgatgcagggaggaacaccttcaacactttgctgcagcggagtcaagaacattcttggctctgctgtcaccaccgttgacaaacaaactgtgtgcaactgtctcaaggcggatgctgctaggtacaacantcaatgacagtatgctc

SEQ ID NO: 15693 - DNA, 386 bp, Glycine max
  Clone ID: LIB3040-014-Q1-E1-D11
agacgacagaaggggacacttactagtagtaagcatggagtcctcaaagatctatgcttacctcttcctctgcatgatctttctctcttccgccactcccattctcggttgtggctactgtggcaaaccccccaaaaagcacaagcctggtaaaacaccaaagacacccaaaacacctgttgttaagccaccagtcaccatccctcccattaatgttcctcccgttgttcttccaccaatagtgaagcccccaggtattctccctccaattccaattattaacccaccaaccacaccagggaagggagggaacactccatgcccaccaccaaagtctcctgcgcaggctacgtgccccattgacacgctcaaacttggtgcctgtg

SEQ ID NO: 15694 - DNA, 342 bp, Glycine max
  Clone ID: LIB3040-014-Q1-E1-D2
ggagtggaagtagtagcaagtacgtcgtatatgtggttgatcttttgctggttgtttgttttgttccgtccaattgtcagatctgaatcaccggactcactcttcagactcactcacactgaatggcttctgaaggcgaccatcagcagcagcagcaccaccatcaagatcacgatcatcatcatcatgatcatgatcaggatcatcatcacgatggagagggagagaccaactcatgggtaggtaaggatgggaacgtgtaccatagccacgatggtctggcaccgcattctcacgaacccatttactcccccggctacttcaccagaagagctccaccgc

SEQ ID NO: 15695 - DNA, 331 bp, Glycine max
  Clone ID: LIB3040-014-Q1-E1-D3
gagaccatccagtactcttcgtttcagcacaagctcgtcatctctcccaagctttcttttctttgcaacgacactatcaaaaatgtcacgagatttcagacttttgttctccccggaactcatgcagtcccctatcagcactttccaggcgacgtgctgtgtccttctcgtcagcctcaggttcacgccgttcttcactcctggtgggcttccttgggcctgggcccggcccagaagcatcatcgctgggccagtaactgcgctggtcggggtcttcacgggttccagacctcacagcgctttatcgagactggcccgcacttatcacgcg

SEQ ID NO: 15696 - DNA, 278 bp, Glycine max
  Clone ID: LIB3040-014-Q1-E1-D5
ggaggaagagaagtttgtattctagtcttgtgataaaatgtttggcattttaggcacactagagaggctgcaagtccccttaattttgccattttttatttgccattttgtttaacggtagcagaatgagaatatcacgatgtataaactttggtatagagatgagtgcagtgctgaaatcttagataatagtttgtttgatacagttgaattaatcaattgctagtttttatgagtgagtgaagggtggcgagagggtgggacgaggcggccgctct

SEQ ID NO: 15697 - DNA, 397 bp, Glycine max
  Clone ID: LIB3040-014-Q1-E1-D6
gacaacacagaacaaaaacaaagaaaaaaaaaaacccttagccaacacaaccatcatggccacctctgctattcagcaatcagcattcactggtcaaactgctctgaagcagctcaatgagttcgtccgcaagaccggtggcgccggcaaaggtcgcactaacatgcgccgcaccgtcaagagtgctcctcagagcatttggtatggccctgaccgtcccaagtacttgggtccattctcggagcagattccatcatacctgaccggagaattccctggtgactacggatgggacactgctggattatcagctgacccggaaaccttcgccaggaagcgggagctggaggtgagtcgcagcagatgggcaatggttggtgcccttggctgcaccttc

SEQ ID NO: 15698 - DNA, 328 bp, Glycine max
  Clone ID: LIB3040-014-Q1-E1-D7
gactgcaactttgctctctgtgaggcttcaatttctaattagggtttcgcttagagtaaccaataaccatgggagtcttcacctttgtcgtccgcaaatccggcagcgaatggagcgccaagcaacattccggcgacatcgaggcctccgccgattccaccttcgatctccaacggaagctcgtgcaagccgctctcgccgttgattcctccggtggagttcagtcctctttctctcccgtgtctcctacctccgctgtgttccaggtgatagtgggtggtgcagtattcgttggaggtggtggtggtgctgttgcagctgcacctgc

SEQ ID NO: 15699 - DNA, 399 bp, Glycine max
  unsure (1)..(399): unsure at all n locations
  Clone ID: LIB3040-014-Q1-E1-D9
aggagggagcggagccacatgattgggagatcccttgatccgtatttcttatttgtttccattttttcctgttacatatcatcttatttttgtttgactaagggactaacgtttgtttcgttttgattgacttttgttttgtacatacatatcgtttgagttgttacgtcagtacttgtttcgttgttttcaatagtgtttgtagaaattccggaatcgcgtagaatttttttttttcatttaggaacgtcgttctaaaaataaaatgaaccaaaatcatgataaaaagagagaagtgtagtgaatanaatttttgcgtatataaagaanaaggaaaatgtgcatagaagggtttttataanaaaatatgtgtagaaagattcttgtgtgtgtgaacaa

SEQ ID NO: 15700 - DNA, 390 bp, Glycine max
  unsure (1)..(390): unsure at all n locations
  Clone ID: LIB3040-014-Q1-E1-E10
ggtaagtgtacatttcatcttagttagggttcaattctcaatcttggtctttgcagttcctagttcctactaccgtgaccttaattctcgggtttcttctgagcgagcagaaggatttcagcatcggagaccgaatcgttcgggtgaggggagtaaataaacagagtgaaccaactcaagcccccaagtagaactgataattagttgcaattttaaaagattgtgattgttgggattgcagagagaagggtggttagtgttagaataggctgagtgtggatggggaaagaggangaagagatgaggggtgagattgangaacgactgattaatgaagagtacaagatantggaagaagaacagtcctttcctgtatgatctggtcattac

SEQ ID NO: 15701 - DNA, 322 bp, Glycine max
  Clone ID: LIB3040-014-Q1-E1-E11
ggaacagagtgaaaagaagggtttgtaagagaaagaaaaaagaggtacggtggtggtggaggaggtggtggcggcggaggaagctgctacagctgtggagagtctgggcatttcgccagagattgcccatcaagtgctcgttgaaattactgttatggtggtttatgttatgcggattgttttaagtttttactttaacatgttgtagagattttaatggtttctgtcaaagctgtggcttcttataagtagatgcgtgagatttttcttttttttggttatttaaatgaaagtttctgtgttatcgttacaatctgcaaac

SEQ ID NO: 15702 - DNA, 412 bp, Glycine max
  unsure (1)..(412): unsure at all n locations
  Clone ID: LIB3040-014-Q1-E1-E12
gacagcaaaacaattttcaaactcaattaccattccataacctaaatctcctctttgtttccgagtcagagagcaatggcacgtaccaagcaaaccgctcgcaagtccaccggcggaaaggcgccgaggaagcaattggcgactaaagccgctcgcaagtcagctccggccaccggcggagtgaagaagccccaccgcttcaggcccggaacggtggctctgagggagatcagaaagtaccagaagagcactgaacttctgatccgaaaactcccattccagaggctcgtcagagaaatcgctcaagatttcaaaacagatcttcgtttccagagcagcgctgtntctgcgcttcaggaagccgcagaggcttatctcgttggactcttcgnagggacacaactctgcgcta

SEQ ID NO: 15703 - DNA, 373 bp, Glycine max
  Clone ID: LIB3040-014-Q1-E1-E2
cgtacgctgccagaaaacaacaaaaggggggggccccaaaacccttaacacaattaaaagtacaatttgcagggatggcctcaacctcctcctccacactctctatatcctcttcatcgacccttgttgatgccaatgctccaagtccaagacaatccccacaatgtgtctcccctccacctgttcactctccttggaagaccactgctttctgtatgtcaattcagttattacaactcctttgtcttataactcaacttcattatacactatggtttgattctttcaggtcgcaggattgcaagcaatgttatggcaatggctaccaccagagacgcacccgcagcagaagttgccacgaccgagctctctg

SEQ ID NO: 15704 - DNA, 395 bp, Glycine max
  unsure (1)..(395): unsure at all n locations
  Clone ID: LIB3040-014-Q1-E1-E3
ggtcttgcaggcgaagagatggccaccgttccagggcagctcgtgtgggagatcgtcaagaaaaacaattccttcttggtcaagcagtttggaaggggcacccagagcgtcgaattcagcagagagagcaacaatctctacaacctcaattcgttcaagtactctggtttggcaaacaagaaaactgttactgttcagcctgagggcaaagatcaggctgtgttgttggctacaaccaagacaaagaagcaaaacaagcccgctgcattgctccacaaatctgtgatgaagaaggagttcaggangattgcaaaagctgttgaaaaccaggtggccaaaaattactacaggcctgatctcaagaanggctgccttgcaaggttgagtgctgttca

SEQ ID NO: 15705 - DNA, 330 bp, Glycine max
  Clone ID: LIB3040-014-Q1-E1-E5
ggagagagaaagagaaatggcaacaagcgaagaagtggttgcggcggcgccggaggcagccgcgccggaggcagggttgaagcacaaactggagagaaaatggacgttttggtgcgacaaccaatccaaacccaagcaaggcgctgcgtggggaacctctcttcgcaaggtctacaccttcgagaccgttgaagagttctggtgtttgtatgatcaggtattcaagcccagcaagttgcaaatcaatgccgagtttcagttgttcaagactgggattgaccctaaatgggaagatccagagtgcgccaatggaggaaagtgggtctatca

SEQ ID NO: 15706 - DNA, 398 bp, Glycine max
  Clone ID: LIB3040-014-Q1-E1-E6
ggcaatcaatttgcaaaccaaacacaacacaaggagaagaaccagatctctctttctcaaatcaccaagaatagttgaaaatggggctgtctttcacgaagctgttcagccggctctttgcgaagaaggagatgcgtattcttatggtgggtctcgacgccgccggtaagaccaccattctctacaaactcaagctaggagagatcgtcacaaccattcccaccattgggtttaatgttgaaactgtggaatacaggacgatcagcttcactgtctgggatgttggtggccaggacaagatccgtcctctgtggagacactacttccaaaatacgcaggggcttatctttgtgggtgataggagtgaccgggatcgtgtggttgaagctagggatgag

SEQ ID NO: 15707 - DNA, 370 bp, Glycine max
  Clone ID: LIB3040-014-Q1-E1-E7
gacctccacaacattgcatacccttttgagttttgattctctctcctcacataactaggtggtatcgaatatttttggggtgtgtcaaagtttgtgaaggaacttgaagaagtaaatgcatggatcgaggggaccaaatgacattacctggctctgcatcttactatatgcagagaggaatacctggtgctggaaaccaacctgtactgcacaattcacctaatattggaccattgtctaaccctaatctaccatgtcaatcaagcattgggggtggtggtaccattggatccacattacccttagagtcttcgggaatttcagctccatgtgtgaatgtgagtgctccttctgggactctgcctgggga

SEQ ID NO: 15708 - DNA, 351 bp, Glycine max
  Clone ID: LIB3040-014-Q1-E1-E8
gatccacacctctctctctctctcagaatttctatctatctcttgtttcaatttcaacaacggttactcctttttcgttttgagtttcaatcaagccatcatcatgtctaccgcatcgcaacccaaggccaagaaaacggcgtcgtccaagaagcccctctcccaccctcccttcgccgtgatgatagcagaggcgattgcgagtctgaaagagagaaccggttcgagccaatacgcgataaccaaatacatcgaagggaagcacaaggagttgcctgcaacctacaagaagcttgtcctcattcatctcaagaaatctgttgctgctggcaagcttgttaaggtgaaaaa

SEQ ID NO: 15709 - DNA, 238 bp, Glycine max
  Clone ID: LIB3040-014-Q1-E1-E9
gatttcacggtctcattactcatccctgtaattcaaggttggaaatccagacatcaaactgacattaggatggcctcagtacacacctattggaccattgcctccgtacatcacctccgtgcctctgctctcgttcatctcgccatgtcttagtcacaccccgaagatgcaatgtatgattcagacaccgcaaatgtaatcgacgctgctgatgaatcagttgataacttcagtgatg

SEQ ID NO: 15710 - DNA, 328 bp, Glycine max
  Clone ID: LIB3040-014-Q1-E1-F1
gggtgttgtaactgaaggaacatgaaagggtacaaggtttggaactcaaccttcatacctttcaataataatctctccccaaattaccccttaaccccttcctcctatactgcttcaaactacaccccatccttccagaaccaaagaccaaaacttaaagctcagaatttcaaagcccacattcttctatgcgcctctctgcccagtccgcaggcaagcagtgcttccacggctcaagctgaggatcaagaggttgaaattgcaaggggttacactatgacacaattttgtgacaacatgatagatttctttttgaatgaaaaaacta

SEQ ID NO: 15711 - DNA, 404 bp, Glycine max
  unsure (1)..(404): unsure at all n locations
  Clone ID: LIB3040-014-Q1-E1-F10
gaggtgtgatggcggcttcattggggtttcccttcacaagtgcacaatggagggagcttgaaaggcaggctatgatatacaagtacatgatggcttcagttcctgttccacctgatctcctcattcctacttcactcacatcctcttctcgctcttcctgcatggatggtggtttcaatctgaggttggcaaatagcactgaccctgagccaggtaggtgcagaagaacagatggaaaaaaatggagatgttcaagagacgtggctcctaaccacaagtactgcgagcgccatatgcatagaggccgtcnccgttcaagaaagcctgtggaagttaacaccaacaccactcccactagcatcaacancaacaataacaaccaccaaatcaaaagggctcgccat

SEQ ID NO: 15712 - DNA, 384 bp, Glycine max
  unsure (1)..(384): unsure at all n locations
  Clone ID: LIB3040-014-Q1-E1-F11
tcactcactcatacaatagagaccagcttttgcttctttgtgaacatggagatgaggaaatcatgtagcttcttcttcttgctcctcctccttgtctttgcttcccaggtggtggtgcagacggagggaagagtgtgtgagtcacaaagccacgggttccatggtttgtgtaatagagaccacaactgtgctttggtctgcaggaacgaaggtttctccggtggcaggtgcaaaggcttccgccgccgctgcttttgcaccaggatttgttgagatctcatcaaacactactcttgccatgcaaattaataaatcatagctaggccaaataaattgcatctactctttatccatttgggagctagctnacacaaccaactcata

SEQ ID NO: 15713 - DNA, 381 bp, Glycine max
  unsure (1)..(381): unsure at all n locations
  Clone ID: LIB3040-014-Q1-E1-F12
atcgtgcctatgcacaaggtcaatttcgacgccaagagcgagtacgagatgattcagaactacaaggtccttcaagatgtcttcaacaaactcaaaatcaccaagcacatcgaggtcagcaagctggtgaaaggaaggccactggataacctcgagttcatgcaatggatgaaacgatactgcgattctgtcgattccggccttcagtacaattataatcctctggagaggagagaggtttgcaaaggaggaagagaaacgagcaagaaatctgcaaactcccaagcctcaaccaagggttctactgcacagagacctcattcttctcataatgctcgaagaaatgaggtttctaatgcanaccctacanatcaggctgca

SEQ ID NO: 15714 - DNA, 381 bp, Glycine max
  Clone ID: LIB3040-014-Q1-E1-F2
ggcgtgtgttcctcaactcaacacactcctttaaaattgcagcgtcgacaaaaaacctaactcctaacctttttttcttcctttcagctcttcagcagtcgttacagagactccataacccgaaaatgcctttcaagaggtacgttgagattggaagggttgctcagatcaactatgggaaagagtatggggaggctcgtggttattgtcgatgtcattgaccagaatagggctcttgttgacgctcctgacatggtgaggtcccaagtgaacttcaagaggctatcactcactgacatcaagatcgatattaagaggatccccaagaagaaggatctcattcaagccatggaggctgcggatgttaagaacagatgggag

SEQ ID NO: 15715 - DNA, 331 bp, Glycine max
  Clone ID: LIB3040-014-Q1-E1-F3
agaagttggggttttacatggagctatgagctacctgctgcaggatgatgatggacaaatagttgagcctcactcaattagtgcaggcttggactaccctggtgtgggtccggaacataactttttgaaagatttagggcgtgctgaatatcatagcatcacagatgaagaagcattggaagcttttaagagagtttcgcgacttgaacgcataattccagctctggaaacatctcatgcgttggcatatctagagaaagtgtgtccaacccttcctaatggagccaaggttgtggttaacttcagtggccggggtgataaggatgttcaa

SEQ ID NO: 15716 - DNA, 335 bp, Glycine max
  Clone ID: LIB3040-014-Q1-E1-F5
ggcagtttcaaattttcttttccttcactttcccgagaaaaaaataacacttttcactttcgtcactacgttctcacttcgatatggctcgtacgaagcaaaccgctcgcaagtccaccggtggcaaggcgccacgtaagcaggtcgccaccaagggcgctcggaagtccgctccggcgaccggaggagtggagaagccccaccgcttcaggccgggaaccgtggcgctgagggaaatcaggaagtaccaagaggaggaccgagcgtctcatcaggaaagcttccatttcagaggctcgtgagagagatcgcgcaggatttcaagaccgatttgc

SEQ ID NO: 15717 - DNA, 288 bp, Glycine max
  Clone ID: LIB3040-014-Q1-E1-F6
ggcaattgcagagtttaacgtttggccatcacagaagggggaatggagttttctcaagatgattttgatcggttactgttattcgagcacacgcgaaagagcgctgaagcaaactacgcagagaatcctctagacgctgataatctgaccaagtgggggggagctttgatcgagttgtcatcgttccaagctcctaaggatgccaaggcaatgattgatgatgccctttcaaagctggaggaaggtttgctgatcaatcgagctaagcatgacactctttggggcttg

SEQ ID NO: 15718 - DNA, 123 bp, Glycine max
  Clone ID: LIB3040-014-Q1-E1-F7
tacctattttttatgctctagtttctaacttaaatttaaaagtaactttttaagtaaaaaataagttgggtcaaacatacccttaaagcaagcacctggccatattaaattagactgtattag

SEQ ID NO: 15719 - DNA, 95 bp, Glycine max
  Clone ID: LIB3040-014-Q1-E1-F8
caaaaaaaaaaaaaaaaaaaaaaaaaaaaaaacgggcgccccaaaagattcaaacctaagtaaccctgcaagcgaagtcaaaacccctccaaaag

SEQ ID NO: 15720 - DNA, 359 bp, Glycine max
  unsure (1)..(359): unsure at all n locations
  Clone ID: LIB3040-014-Q1-E1-F9
gctgcaacatcagctttaaacgccgacgacagttcatccaatctccgaagcccttcagcgcactgcaaccactgtcgagaagaacggttacagagtcacaggaagaaaacgtgactctgggcccagctgttagagatggcgatcatgtctttggcgtcactctcatctttgcctccttcaatgataccttcattcatgtcactgatctgtccgggagggaaacacttgtctgcagcacaagtggaatgaccgttaacgctgacacanatgactcgtcaccctatgctgctatgcctgctgcacaggacgttgctgccagatgcatcgaactgggcataactgctcatcacatcaagctc

SEQ ID NO: 15721 - DNA, 328 bp, Glycine max
  Clone ID: LIB3040-014-Q1-E1-G1
ggtgctctgctcgtgcctctagggttatcatttctccatttccattttctctcccacttttcaagaatcgtaagctatgggaaagtcttacccaactgtgagtgctgattaccagaaggccgttgagaaggcgaagaagaagctcaaaggcttcatcgctgagaagagatgcgctcctctaatgctccgtttggcatggcactctgctggaacctttgacaagggcacgaagaccggtggacccttcggaaccatcaagcaccctgccgaactggctcacagcgctaacaacggtcttgacatcgctgttaggcttttggagccactc

SEQ ID NO: 15722 - DNA, 392 bp, Glycine max
  unsure (1)..(392): unsure at all n locations
  Clone ID: LIB3040-014-Q1-E1-G10
gattgctgacgttaaaatagagtatagaattagagtcagcgagcgaaagaggggttttggaacgtgcaagatccggtgctctaatctctgcattctgtgatggctccaaaaccgataacgagtcccgtccccgattcgtggtaccccacgctctccgtcttcaccctcgccatcggcctcgtcttaaccgcctctttcttcatttatgaagcaacatcttctaggaaaagtcgttcacttgttcaggagctgacaactggtgcagtggcttcagtcttcttgggttttgggtccttgttcctcctacttgcttctggtgtttatgtctaatttaaacattgaattggatgaaaattttgctaagcagatagctttaaatgaaanattgcatt

SEQ ID NO: 15723 - DNA, 370 bp, Glycine max
  Clone ID: LIB3040-014-Q1-E1-G11
gatagtgggttaagcctcgcttctaacgtcaccgactcagttgttgtcagcgagtgagtgagtcgtttctctgcagcaacaatgtttagccactccaaacacaccagaaatgggtcgtggggtcagtgctggtggtggtcagagttccttacgttatcgcattggcactggggtgcctgccatcagtgcacacagtcagcctgcaaatggtgctcgcactcaaaatgctaatgctccttcaccagcagtcgatacgcaaagtctagcaccagcaccagcaccatcaccagcacctgcatcatcaccatttgataagcagattctagctggaattcgtggaagtctcactaacacttaccatcgtgctgat

SEQ ID NO: 15724 - DNA, 366 bp, Glycine max
  Clone ID: LIB3040-014-Q1-E1-G12
ggagagagaaaggctctttggcttgtattgaaaggtaagcaattgaaggttagaggccgaaagagagtggaataacagactagtcttaggaactccctagtgaaggtgaaacttgctctaagtgaagcaaaatcacttgcttgtgaagaagctcacaaaatctcttgcaagttaagtttgtaggctctgaccttgtttttgggaattgcaagctaagctggtttagttagtagctagcccttctcgcccttcttatatatattccacaattcaacaatcaatcatcatgcctaattgcctcttgttgtgaagggagaaagaagattctcatcatcatcacattcatcattttaggttttgaaaaac

SEQ ID NO: 15725 - DNA, 357 bp, Glycine max
  Clone ID: LIB3040-014-Q1-E1-G3
tcaaaggggcctacttcatctctcttatggtcacacacacctaccttatagctatggaaactggacgctttcatggctaccgcaagctctccaacacaacctctgtgttgaagctgtcagtgtcacacatgaacatgaatatgaggcagcagcatgtaacatcatcagatgagaactgcatcaaccacagtgcatcaggagacgataacgaatacaccgttatggaacatgacaggttcatgtcaatcgctaacctgaatcggatctatgcacaatattctccctccacacgcaaaaatctccgatgatgcaaacgacacaatccacgagtgcgtgtctgagtgcatcagcttcatc

SEQ ID NO: 15726 - DNA, 335 bp, Glycine max
  Clone ID: LIB3040-014-Q1-E1-G5
ggaacctcaaaatcagtctctaatatttttctcactgtcttgtctctccagagaactgtatagagagagatggcagctgcaacatctggtgctgtgttaaatgggttgggatcttccttcttgagtggaggaaacaggagccaaacccttctggccactgctattggaggcaaagttggtgctgctgctgttactgttagtcctagaagactcattgtggtagctgctgctgcaccagagaagtcatggctccctggtgtcagaggtggtggcaacctcgtcgacccagaatggcttgatggatcgctaccaggtgactatggctttgacccact

SEQ ID NO: 15727 - DNA, 352 bp, Glycine max
  Clone ID: LIB3040-014-Q1-E1-G7
ttcatagatttagggaatcgattactatactagtaataaattgtacaaaaaataaaaatataaataatataaatataaaaagaacaaacacaaattttatgtgattagtcgcggtatttaaaataaaaaatgaaagtagacaaataaaaaaggaaaggagatgtttgaataaaaataattccccttcaagttcttattttttgagaggacaggacaatatgaatgttttattatgctctagcaacacattaaaaagattatatgatatatctgctgtggaagtaggtcaacatttctattggcaaatagggagtttccaagtacatgcccaagtacgtagtacttcttgggt

SEQ ID NO: 15728 - DNA, 393 bp, Glycine max
  unsure (1)..(393): unsure at all n locations
  Clone ID: LIB3040-014-Q1-E1-G9
gaggtttgtgattgtctttgcctcactttgctgccgtacctaatcggagagctcccgctgactgcgatcggatttcatggctcctaagaaagacaaggctcccccaccttcatccaagcccgccaagtctggtggtgggaagcagaagaagaagaagtggagcaagggaaagcaaaaggagaaggtgaataaccaggtgctgttcgatcaggctacctatgacaagctcctctccgaggcacccaaatacaaactcattactccttccattctctctgaccgtttgaggattaatggatcacttgcaaggaaggctattanggaattgatggccaaaggttcaataaggatggtgtctacccatgctagtcagcaaatttacactagagcgac

SEQ ID NO: 15729 - DNA, 409 bp, Glycine max
  Clone ID: LIB3040-014-Q1-E1-H10
agaaggggaggccccatatttctatcttactaaagaaaactgggcccaataaacttgaaaaccctcgatggtgaatgaggagcaaatgagcaatccctatctatatctacttatcgtctaagctcagtgatcagaacctacgccgagcgaaaccccaaataccaatccaatcctctcccaactcacaaagccatgtctccaggtcccgttgtcgacgcttcccctgaggttgatgcagagcaacaacttccctccctcgatgacgccactcagaagaagataccccaaccacaggaggacgatgctccccttgtcgaggacttgaaggatgatgacaaagacgacgacgatgaagacgacgacgacgacgacgaagatgacaaggaagacgatgctcaaggtggtgctg

SEQ ID NO: 15730 - DNA, 369 bp, Glycine max
  unsure (1)..(369): unsure at all n locations
  Clone ID: LIB3040-014-Q1-E1-H12
ggttctagtgtgtgattgtttgttgttgtaactcgttcttcttcttttgttgttctgtgtttgtgtttgttttttctctcacctgaaaatgtcttgctgcggtggtaactgtggttgcggaagctcctgcaagtgcggcaacggctgcggaggctgcaagatgtacccagacttgagctacactgagtcaaccaccaccgagaccttggtcatgggagtggcacctgttaaggctcaatttgagggtgctgaaatgggtgtgcccgctgagaacgatggctgcaaatgtggaccanactgctcctgcaacccctgcacttgcaagtgangtgttgggagagcaagcttcaagcagagatagcccttaat

SEQ ID NO: 15731 - DNA, 327 bp, Glycine max
  Clone ID: LIB3040-014-Q1-E1-H2
gcctagcaattcggggcaatcatcgtctgcttcaaggaaggagagcttgttattccctatcaacaaggtaaatgtcaggtgaaaacgttgttgttgcagctgagccaactgctgccatcccaggcgagcctatggatagcatgagtgccttgcaacttgtgctcagaaaatctctggcttatggtggtcttgcacgaagccttcacgaaggggcaagagtgattgacaagcatgctgcacaactctatgttctagcagaagactgtgaccagcctgactatgttaaactggttaagggcctttgtgcagagcacaatgttagcctgc

SEQ ID NO: 15732 - DNA, 340 bp, Glycine max
  Clone ID: LIB3040-014-Q1-E1-H3
actcgaattgttccacgccacatccaattggcggtgaggaacgacgaagagttgagcaagcttctaggagatgttaccattgctaacggcggtgttatgcctaacattcacaaccttcttcttcccaagaaggctgggggctcatccaagggtgctgctgctgacgatgactcttaaatagggattcactgttcacaaagttcttgaatttagattcgatgtttgctctctttttttttcctttttatttgtagttagtataattgtgccctttgtagtagtagttaggttttcagtcagatgtgtttaaggaatgctcttacgcatcaagaaaggttgt

SEQ ID NO: 15733 - DNA, 405 bp, Glycine max
  Clone ID: LIB3040-014-Q1-E1-H5
gacttctcttcacacctttgttcactcttcttctcttgcggctagggttttagcgcagcttcttctagatttaaggaagatgggtaaggaaaaggttcacatcagtattgtggtcattggccatgtcgactctgggaaatcgactaccactggtcacctgatttacaagcttggaggcattgacaagcgtgttattgagaggtttgagaaggaagctgctgagatgaacaagaggtctttcaagtatgcctgggtgctggacaaacttaaggctgagcgtgaaagaggaatcaccattgatattgctttgtggaagtttgaaacaacaaagtagtagtgcacagttattgatgcgcctggacatagggatttcagtaagaatatgattactgggacatcgcaagc

SEQ ID NO: 15734 - DNA, 325 bp, Glycine max
  Clone ID: LIB3040-014-Q1-E1-H6
gacccttaacctctctgctgcgtttgcttctcctccacccatccacaaacgaacacacactttgattgagaatggggcgtgttcgcacaaagacagtgaagaagtcctcgcggcaagtgatcgagaggtactactctcgcatgacgctggacttccacacgaacaagaaggttctggaagaggtggccatcattccctccaagaggctccgcaacaagatcgcgggattctccacccacctcatgaagcggatccagaagggtcccgtacgtggaatctccctcaagctgcaggaggaggagcgcgagcgccgcatggacttcgt

SEQ ID NO: 15735 - DNA, 99 bp, Glycine max
  Clone ID: LIB3040-014-Q1-E1-H8
gaaggacacaaaaaccagaacgtagagtcacaccaccacagcagagcacagcaaccctcaaatccctttcctttttcccccctgatttaacagaagaaa

SEQ ID NO: 15736 - DNA, 395 bp, Glycine max
  unsure (1)..(395): unsure at all n locations
  Clone ID: LIB3040-014-Q1-E1-H9
gagagtggtggagtgtgcagaagagcgtcgcagtcgcaaccctaatcagaagaagcgcagcttcaagcgagtgacagccaccagccatgggtcgtatgcacagccgcggtaagggtatatcctcttctgctttgccctacaaaaggacacctcctagctggctcaagatctcttcgcaagatgtcgaagaaaatatctgcaagtttgcgaagaaaggtttgaccccgtctcagattggtgacattctcagagattctcacggtattgctcaggtcaatagcgtcactggcagcaaaatccttcgcatcctcaaagctcacggacttgcgcctgaaattcccagaggactgtaccatttgattaagaaggcagtttcaattangaagcatcttgag

SEQ ID NO: 15737 - DNA, 364 bp, Glycine max
  Clone ID: LIB3040-015-Q1-E1-A1
cggggcgtacacagcctcaacaaccctaacgcgtgcagagcagagagagacgcagccatggggcgaagacccgcgaagtgttatacgcaacttaagaacaaaccataccccaagtcacggttttgccgtggtgttcctgatcccaagatcaggatttacgatgttggtatgaagaagaaaggtgttgatgagtttcctttctgtgtccatctggttaattgggagaaggaaaacgtttctagtgaggccctggaagctgctcgtattgcttgcaacaagtacatggccaaatttgctggaaaggatgctttccacttgaaagtcacggtgcacccattccatgttcttaggatcaacaagatgc

SEQ ID NO: 15738 - DNA, 376 bp, Glycine max
  unsure (1)..(376): unsure at all n locations
  Clone ID: LIB3040-015-Q1-E1-A10
gagtctcgtgtggtgtcataacttctgcatgctctctattaagaagtgtattcaatgaaattagtttttatacaaagttgtaaagctaactaactaactaattttgtgaagcaacaatgtggaagataactgtacagtgccaacagctacaacaggcacaacaatatgatttggtaaagtgattgccttattgaacactattgacaagcaacatgagtgctagcacctgaatcaacaagccagcaatcacgaaggagattaaaggaggaggcagacataatcataccattagaatcaccatgattctgatggggaacagtgacatttgaagtttgaccctgtangagactcatcaactggttgtactgctgtgctg

SEQ ID NO: 15739 - DNA, 312 bp, Glycine max
  Clone ID: LIB3040-015-Q1-E1-A11
gagttttctgttggcgcgggtgaggtagaacccttccacggtggtgactgcgcgatgggtgcctacaagtatgtttcagagctatggcgcaagaagcagtctgatgtcatgcgcttcttgcagcgggtgaggtgctgggagtataggcagcaaccttcccttgttcgcttgacaaggtcgacccgccctgacaaggctcgtcgcttgggcttcaaggctaagcagggctatgtgatataccgtgttcgtgttacgatgggtggccgaaagaggccagttcccgaaggtattgtttatgggaagcccacaaac

SEQ ID NO: 15740 - DNA, 354 bp, Glycine max
  Clone ID: LIB3040-015-Q1-E1-A2
ggaatttgtgtggagtttaactaaggtttttggaatttcgaataaagggaaaagaaggtgcaaggtgcatcttctttttgttgttctctcaaactttaataatctcataaattagcagaacgaagaggaacaaaaacaagaagaagaattggattcgaaaatcgtagcgtagcgttggtgcgattgaacgatacgatgggaagaggaaaattcaagagcaagcccactggtcgccgccagttctccaccccggaagatatgcttgctggaacctctaaccgtcctcgaacttttagacagaaagaagctgagcatgaagaggaagaacccgaggaagtatctggagatgaatct

SEQ ID NO: 15741 - DNA, 381 bp, Glycine max
  Clone ID: LIB3040-015-Q1-E1-A3
gcaggaagacaacgacggggacgtgcacaacctcaacaaccctaacgcgtgcagagcagagagagacgcagccatggggcgaagacccgcgaagtgttataggccaattaggtacaaaccaaaccccaagtcacggttttgccgtggtgttcctgatcccaagatcaggatttacgatgttgggacgaataagaagggtgttgatgagtttcctttctgtgtccatctggttacttgggagaaggaaaacgtttctagtgaggccctgtaagctgctcgtagtgcttgcaacaagtacatggccaaatttgctggaaaggatgctttccacttgagagtcagggtgcacccattccatgttcttaggatcaacaagatgct

SEQ ID NO: 15742 - DNA, 312 bp, Glycine max
  Clone ID: LIB3040-015-Q1-E1-A4
ggagttgagaggatcgtgagaggggcagtagccgagattccgtgagttgcaaaaatgaagacgattctttccaccgagaccatgaacatcccggacggcgtgagcatcaaagttcatgccaaggtcatcgaagttgagggcccccgcggaaaattggtgcgagacttcaagcatttgaatctcgattttcagctcattactgacgaaaacggtaaaagaaagctgaaaatcgacgcgtggtttggttctcggaaaacatccgccgccattcgcaccgccttgagccacgtggagaatcttatcaccggcgtc

SEQ ID NO: 15743 - DNA, 306 bp, Glycine max
  Clone ID: LIB3040-015-Q1-E1-A6
gatcactctcacgcttctgattattcctcttcccattctagggttcccaaatggacgctggcggaaagatcaagaagggcgccggaggaagaaagggcggcggccctaagaagaagccggtttcaaggtccgtcaaggccggtctccaattccccgtcggaagaattggccgttatttgaagaaaggaaggtacgcccagcgtgtcggtaccggtgctcccgtttacttggccgcagttctcgagtacctagctgctgaggtgcttgagttggctgggaatgctgcacgtgacaacaagaagaaca

SEQ ID NO: 15744 - DNA, 363 bp, Glycine max
  Clone ID: LIB3040-015-Q1-E1-A7
gagagaagttattagggtttttgagtgcggcggtccaaacactcttctctgcagcttttgcctacaactcccttcaccatggctgaacaaaccgagaaagcttttctgaagcaaccaaaagtgtttctcagcacaaagaagactgggaagggaaagagacctggaaaaggtgggaaccgcttttggaagtccattgggcttggatttaagactcccagggaagccatcgaaggaacctatattgacaagaagtgccccttcactggcaatgtttccatccgtggccgtatcttggctggaacatgtcacagtgctaagatgaacaggactattattgttagaaggaattatctccattttatc

SEQ ID NO: 15745 - DNA, 342 bp, Glycine max
  Clone ID: LIB3040-015-Q1-E1-A9
caaactgttgctgtgggagtcatcaataacgttgagaagaatgatcctaccggagccaaggtcaccaaagctgcccagaagaagaagtgaatcgtgcgggctggttcatcaagggatgttggttacaataaatgttggtttcttttctgtactcttgtgtcttcttttctaagtagcttgtttttcggacaaagtttgaaatctccaccatcatctcgcaactgttgttcccagaactgggttcttgatcgacggtggcaaaattgcttttacttatctgtgttttaatgtgttgtgtttgtcggaacccctgattacatttttgttaagcgcaaccaattt

SEQ ID NO: 15746 - DNA, 337 bp, Glycine max
  Clone ID: LIB3040-015-Q1-E1-B10
ggtccaaaatcctcactccagccacacgcctcagtagaccatggcctcattgggtgggttacaaaatctaagcggcatcaattttcttatcaaaaaagagggtccaaaagtcaatgcgaagttcgagctgaagccgccaccatatccactgaatggtttggagccggtgatgagccagcagacacttgagtttcattgggggaaacaccacaagacatatgtggaaaatctgaaaaaacaaattgttgggacagagcttgatgggaaatcactagaagagattatagtgacatcatataataagggtgacattcttccagctttcaacaatgcagca

SEQ ID NO: 15747 - DNA, 339 bp, Glycine max
  Clone ID: LIB3040-015-Q1-E1-B12
gatccacatcacaaaaattacaacaccaatctcacccatttcaaaaaaaggccgttagtgttactattcgtaaaatggccactcttgttctttaccaattctttctcaaactcttgctcctaatttcagtctttcagctttcctttgctgctaggagactcaaccagctggttcaggaccagtcacagttactccattaccacaacggtcctcttctatacggcaaaatcgccgtgaacctaatctggtatggtcacttcaaaccatcccaaaaggccatcatcaccgatttcgttacctcactgtcatccccatcgtctcagagcagccagccatctg

SEQ ID NO: 15748 - DNA, 356 bp, Glycine max
  Clone ID: LIB3040-015-Q1-E1-B2
ggggaattgtctttcatctggtaagactgatgacgaagttgttatcaccttcagcaccaccatgtccatgtctaagggttccaattccaaatccaaccgtaaaatatcgatatgcatacagtcacagagggcaattgcgtgttcgatgcagtgataatagtgatgaagagaaggataaggagaagaagaagaagaacgaaaagcggttgtctcagcagtcgtcgtgggaagcccaagacgctgagggaagagactatctctaccgacttgggaaagaggctgataacatgaacatcgccgtcggccagcgtgctggcgtcatcgattctcttttcgccggcaattttctcggcaaa

SEQ ID NO: 15749 - DNA, 349 bp, Glycine max
  Clone ID: LIB3040-015-Q1-E1-B3
gactcagcacttcaaaacactcataacacaaagcacaaagcaaagctcatccttgagttcaaaaagttggaacagcttcttccatgggtctctcatccccatccttggctggcaagggcgtgaagctgggcccatcaagcccaaaaatgggaacggggagcaatgagaagaccgtcaacaaacatgtctcctcatgaagcccatggtacgggccagaccgagtcaagtacttgggcccattctctggcgagcccccgtcctacctaaccggtgagttcccaggcgactacggctgggacactgctgggctttccgcagacccagaaaccttcgccaagaaccgtgaact

SEQ ID NO: 15750 - DNA, 348 bp, Glycine max
  unsure (1)..(348): unsure at all n locations
  Clone ID: LIB3040-015-Q1-E1-B4
gatgagctcaaagactaagatgttttcacttgtggagctccaaatgctatgaggacggcgtggaccttggtcattgcagagtgctttattccctggtttggtaatcattggagctagacattcctagcatttaaaaacagaacagtgtttctaattgtaactcttggatgcaatgcttgtattggtagcatgaagttgagtatctcgctgtagatctgcttttaatttgtgctctaaattcactaacgtgttcatgaactttggcatccttgactatggtagtagctaccttgcatattggttggtttttggcaatgaagtttatcataatgcatccaaaanaacaaa

SEQ ID NO: 15751 - DNA, 317 bp, Glycine max
  Clone ID: LIB3040-015-Q1-E1-B6
gaagaaagtgagggaaaaaagtagagtggtatgtgggttgctgcggcaacaaaaccattcatcaaattccaattccacagacacactacttctcttccgcttcttctgatggcaaaccaagcttcactctccttttcttcttccgtgtctcctgttcacgcgcctctcaagcgcgtgggcacgcacaacggaagctttcattgcgacgaggccctcggctgcttcatgattcgcctcacgaacaaattcaacagcgccgaaatcgttcgctcccgagaccctcaagtgttggaggttctcgatgctgttctcgatgt

SEQ ID NO: 15752 - DNA, 361 bp, Glycine max
  Clone ID: LIB3040-015-Q1-E1-B8
agggcactgcaactttgctctctgtgaggcttcaatttccaattagggtttcgcttagagtaaccaattaccatgggagtcttcacctttgtcgttcgcaaatccggcgccgaatggagcgccaagcaacattccggcgacatcgaggcctccgccgactccacctacgatctccaaaggaagctcgtgcaagccgctctcgccgttgattcctccggtggagtccagtcctccttctctcccgtgtctcctacctccgctgtgttccaggtgatagtgggtggtgctgtattcgttggaggtggcggtggtgctgttgcagctgcacctgcaggttgtgctgctgcagctgatgctgccc

SEQ ID NO: 15753 - DNA, 328 bp, Glycine max
  unsure (1)..(328): unsure at all n locations
  Clone ID: LIB3040-015-Q1-E1-B9
ggccgaaaagtagtaccaagatggcttcagttgtgtatctcctctttggcttccatctcattgttatcatgtcaagttccttacccgcaactagtgaagtgtttgcaaaacagtatccatccacagaacccgtggaagaaaaactcacccaactccacttctatttccataacaacataacgggggaacacccaactgctatgaaaactgttttgcctcctaaggggtccattcatggttttggggctacttacatgatggatgaccctctaactgaaggaccaagtccaacttcaaagcttgtgggaagatctcanggaatatacgc

SEQ ID NO: 15754 - DNA, 327 bp, Glycine max
  Clone ID: LIB3040-015-Q1-E1-C10
gagagtggcactccactgttactaaataaaggtttcaactttgaggataaacctcaccagttccctggttgaaacgaagcgaaatttccacctgcatcatcttcaaacctgcgcttcttttgaaccgatttgtgctgttttgttagtgaagcacatcgagtgcaaactgtcgaacaggcatggcaagcctgttgacaacatcagccatcacctattctcctctcaacaatggttccaaggatttcagaaagtcagggaattcttctaaaggaaggtgttgcataaaagcaatggggatagagaaatccttggaggaattgtacaatg

SEQ ID NO: 15755 - DNA, 312 bp, Glycine max
  Clone ID: LIB3040-015-Q1-E1-C11
gacaacgcaactattgacaatctctctttattctattcactccctccatttcttcaaactaaatttcctgagaatggcgaaggctgcggagaaaaagcctgcggccgagaaggctccggcggagaaaaagccaaaggcggagaagaaggttccaaaggaaggcagcggcggagagaagaagaagaagaggtcgaagaagagcgtggaaacgtacaagatctacatattcaaggtgctgaagcaggtacatcctgacatcggcatttcgagcaaggccatggggatcatgaacagcttcatcaacgatatatt

SEQ ID NO: 15756 - DNA, 277 bp, Glycine max
  Clone ID: LIB3040-015-Q1-E1-C12
cggggcgacagaagttattacggtttttgagtgcggcggtccaaacactcttctctgcagcttttgcctacaactcccttcaccatggctgaacaaaccgagaaagcttttctgaagcaaccaaaagtgtttctcagcacaaacaagactgggaagggaatgagacctgtaaaaggtgggaaccgcttttggaagtccactgggcttggatttaagactcccagggaagccatcgaatgaacctatattgacaagaaatgccccttcactggcaatg

SEQ ID NO: 15757 - DNA, 62 bp, Glycine max
  Clone ID: LIB3040-015-Q1-E1-C2
atgtgaaaaaacttttttgttagtaatcatgcttcttcaacaatgtctccaatttgtttctc

SEQ ID NO: 15758 - DNA, 331 bp, Glycine max
  unsure (1)..(331): unsure at all n locations
  Clone ID: LIB3040-015-Q1-E1-C5
gagttttctgttggcgcgggtgaggtagaacccttccacggtggtgactgcgcgatgggtgcctacaagtatgtttcagagctatggcgcaagaagcagtctgatgtcatgcgcttcttgcagcgggtgaggtgctgggagtataggcagcaaccttcccttgttcgcttgacaaggtcgacccgccctgacaaggctcgtcgcttgggcttcaaggctaagcagggctatgtgatataccgtgttcgtgttangaggggtggccgaaagaggccagttccccgaagtattgtttatgggaagccacaaacaaggtgttacccaactgaaa

SEQ ID NO: 15759 - DNA, 392 bp, Glycine max
  Clone ID: LIB3040-015-Q1-E1-C6
cccacgcgtccgaagacgacagaagggggctcagtggtcactcactcaccccttcctttctaactcctcaaattgtgtgttctgagaatggaaatgcctccttctccatcggggcattccgcactctccatcccataaaagtcccagatccaagatggcttaccaccatcaaaaatcccttttggacaccctatactgctccgaagagcattggataggggaaggtgaatttgaccaagcagaggaggagtacggtaacagtaatagcaatagtagcagcaccttagtaaacaactcccctgagtcctcccctcatttgttgctcgaaagcgacatgttttgggacgaacaagagttggcatcgctgttggagaaagaacacacaacccact

SEQ ID NO: 15760 - DNA, 326 bp, Glycine max
  Clone ID: LIB3040-013-Q1-E1-A5
gagggtttttgtcgtcgctactaagagttgctgcttcttcagccactccgcacctcgcagcctctgtgccctcaacaaccatggctgaaatcgaaactaccgttccagatcccacccaaatcgacgtcaaactcttcaatcgctggagcttcggggatgttgaggttaatgatatgtctctggctgattacattggagtgtccccatcaaagcatgctacatatgttcctcacactgctggtaggtactcagtgaagaggttcaggaaagcgcagtgccccattgttgagaggctcaccaactctctgatgatgcacgggaggaac

SEQ ID NO: 15761 - DNA, 135 bp, Glycine max
  Clone ID: LIB3040-010-Q1-E1-D12
gtttcattttgattgacttttgttttgtgcatacatgtcatttgaactgttacgttagtatttacttcgttgttgtcaatactgtttgttgaagttccgaaatcgcgtagaatttttcatttaggaacgtcgtcc

SEQ ID NO: 15762 - DNA, 300 bp, Glycine max
  Clone ID: LIB3040-010-Q1-E1-D2
ggcgtgtgttcctcaactcagcacactcctttataaatgcagcgtcgacaaaaaccctaactcctaacctttttttcctccatgcagctcttcagcagtcgttacagagactccataacccgaacatgcctttcaagaagtacgttgagattggaagggttgctcagatcaactatgggagagagtatgggaggctcgtagttagtgtccatgtcattagccagaatatggctcttgttgacgctcctgacatggtgaggtcccaattgaacttcaagatgctagcactcactgacatca

SEQ ID NO: 15763 - DNA, 251 bp, Glycine max
  Clone ID: LIB3040-010-Q1-E1-D3
gccctaaaaccctcgctgccgtcgtggtggccgcccaagaaaagagaatagagagcgcaaacgagtcttcatcttcgactcaccatgaagctcgtcaggtttttaatgaagttgaacaatgaaaccgtgtcaattgagctcaagaatggcactattgttcatggcaccattacaggtgttgatatcagtatgaacacacatttgaaaacagttaaactaactctgaaagggaaaaatccagtgactctgga

SEQ ID NO: 15764 - DNA, 302 bp, Glycine max
  unsure (1)..(302): unsure at all n locations
  Clone ID: LIB3040-010-Q1-E1-D5
gacggataactattcggtggcacaggcggtgatcactccatgggctcacctcgctttgactgagacacgacattcggtggtcatcgtaatggacacactggaggtcgacgcggacctgtcagtgattacggtgactcagttggcgctcctgctgattacacgacttcatttgggggttgtcctgnccgactgccttgattgagttctggatcatgtggatatcgcgcaccgactaattgatacattcggtcgtacatattggatatcagtgctctagtgggtgctgttggggcagtcatagg

SEQ ID NO: 15765 - DNA, 330 bp, Glycine max
  Clone ID: LIB3040-010-Q1-E1-D6
gagcgaaacagagagtgatttcagtgagtgatcggtgttcacttgatctcatcataatcgtcagcgtcaattgaagaagatgccgatcagaaacatcgccgtcggaaggcctgaagaggcgactcaccccgacacgttgaaggcggctttggctgagttcatctcaaccttcatcttcgtgttcgccggctcaggctccggcatcgcctacaagaagctcaccgacaacggcgctgccagccctgccggcctcatctccgcctccatcgcccatgcattcgggctcttcggcgccgtctccgtcggcgccaacatctccggcggcgaggt

SEQ ID NO: 15766 - DNA, 348 bp, Glycine max
  Clone ID: LIB3040-010-Q1-E1-D7
tagtaaacatgggggtgcaaatagaaaccaggcccacttgggccttccaggaagttctccagaaggcggtgccttatgtaggaagcaacctagctcgcctgggcgagctgggtggcaagccctccctcattttcctataaatagggggaggagggaagaacaaaaatgttcaaccctcctggtatctgagattcacttaaaattagtcagaaaaattgtttcggtgaaaaaaatccaagccgaggcgcttccgtaacgcttccgagatgtttccgtgggtgatttcgcgaagattttcaaccgttcttcgtcgttcttcggtcttcaaccggtaagttgccgaaatcg

SEQ ID NO: 15767 - DNA, 280 bp, Glycine max
  Clone ID: LIB3040-010-Q1-E1-E1
gagttccaaggcggagaaaacactaatggccaccaacgatgagacggatatggagaacaagaagagtgaggaagaactgaagcatctcgggtttgtgaagattgcggcaatgaaagccttagtgtgtgtgtcgaatctctacggcttcgcaaagcaaaactcgggacttttgagatctgctgttggaaccgtggaagacactgtaaccaccgttctgggtcccgtctaccacaaattcaacgctgttcccaaccacatcctcctttttgtcgacaacaag

SEQ ID NO: 15768 - DNA, 402 bp, Glycine max
  Clone ID: LIB3040-010-Q1-E1-E11
gaggttttcttagatagagttgttaccatttgctcccagtacagagcttaaccgagcttcacaaagatgaatcgggaaaagttgatgaagatggccggttcggttagaactgggggaaagggtaccatgagaagaaagaagaaggctgtccacaagacaacaaccacagatgacaaaaggcttcagagcaccctgaagagaataggggtgaatgccatcccggctattgaggaggtcaatatctttaaggatgacgtagttatccagtttctaaatcccaaagttcaagcatccattgctgctaatacttgggttgtcagtggttctccacaaacagagaagttgcaagatatactcgctagcattatccagcaattaggaccagataacatagaaaacctg

SEQ ID NO: 15769 - DNA, 296 bp, Glycine max
  Clone ID: LIB3040-010-Q1-E1-E12
tggatctcgcgggtcgacacaagactctatacagactcgtattaagcagagaaagggctacattttgggaggttttcgtatagagaattgttatcatttgctccgagtacataactaattacatccttcatagtcatgaatctgtgatggttttccaaaatcgccggttctgttacaattgggggaatcggtaacatgacaagaaagaataaggctgtccacagcagacgcaccaacaggttacaagctgcttcaaaccagcctggcaagtctaagggcgactgccatctcagcta

SEQ ID NO: 15770 - DNA, 264 bp, Glycine max
  unsure (1)..(264): unsure at all n locations
  Clone ID: LIB3040-010-Q1-E1-E2
agggacggtttttgtcgtcgctactaagagttgctgcttcttcagccactccgcacctcgcagcctctgtgccctcaacaaccatggctgaaatcgaaactaccgttccagatcccacccaaatcgacgtcaaactcttcaatcgctggagcttcnacgatgttgaggttaatgatatgtctctggctgattacattggagtgtccccatcaaagcatgctacataggttcctcacactgctggtangtactcagtgaacaggt

SEQ ID NO: 15771 - DNA, 203 bp, Glycine max
  Clone ID: LIB3040-010-Q1-E1-E3
gccactacaaaaagacaacagaggggtacggctgcaaacaaaacgacaaaaagggagggtttttatcatcactacaaaaagttgctgcatcatcatacactcgacacctcacagccgctgtacactcggcccccctagaggttcaaccctactttcgttctgcatcccacccaagtccccttcaaactcttcacgcaatttaa

SEQ ID NO: 15772 - DNA, 322 bp, Glycine max
  Clone ID: LIB3040-010-Q1-E1-E5
ggttttcatttgggattcaaactcaccatggtggacgccttcaaactttgcatcttccttcttgcgtcgatctgtgctttcctagtcttttctaatccagtgctgtgtagtgataaggaggacagtgtattcaagggaatcaacagctacaggcaaacacggagcctggtacccctgagccaagtttcgaaggcaacatgtttggctgatgaagttgcagaagaaatagagaagatgcgctgtgaaaacgtgaagcaatactacccttcatctgttcctgggagtgggaggctcaaaatcccaaacttgcagaagcacataa

SEQ ID NO: 15773 - DNA, 333 bp, Glycine max
  Clone ID: LIB3040-010-Q1-E1-E6
gagtacagaaaacgcagttctcaccatttccctctcgattgtgagacttgttgttgttaactgaacttttctgagcaagaatgtctgggcgtggaaagggaggcaagggtttgggaaagggaggagcgaaacgacaccgtaaggtgctgcgcgataacattcagggaatcaccaagcccgcgattcggcgtttggctcgtacgggtggcgtgaagcgtatcagtggtctcatctacgaagagacacgtggcgtgctcaagatctttttggagaacgtcattcgtgacgccgttacctacactgagcatgctaggagaaagaccgttacggcaa

SEQ ID NO: 15774 - DNA, 93 bp, Glycine max
  Clone ID: LIB3040-010-Q1-E1-E7
agtcgcaacttttcaacttctatctctttctcccttactatttcatgttctgcggcgcaaatccgatttatgatcactcatgttttttctcta

SEQ ID NO: 15775 - DNA, 313 bp, Glycine max
  Clone ID: LIB3040-010-Q1-E1-E8
gattttccctcttctctttttctctctcgtgagtctcgtccctgaagcgaaattctagaatggcggaagaagctcctgcatctgaaacctccgtcacaatgcctcaaccggcggaagtcatcaccgtcgacggaaccctaacctcttccgagaatgacaagagcggaatctccgtcgatgccgccgcgcacggcggtgaaaagacggtgtccaacgctgaaccttccggtagcgatcctcagaagtctctggagttggcgaacgagctgatggaagagggaaacaaggcaattaaggagaacgattttggaga

SEQ ID NO: 15776 - DNA, 375 bp, Glycine max
  unsure (1)..(375): unsure at all n locations
  Clone ID: LIB3040-010-Q1-E1-E9
gatagctgagagagaaaggaaaggttaactaagaagcaatacttcaatggccacccttgttgttcataaccaaacttcttctgctcaagatgctgaggctctccaacaggctttcaaaggatggggggctgatgacaaggccattatagcaatactgggtcacagaaatgttcatcagaggcacgaaatcacaaaagcttatgaggagatttaccaagaggatctcatcaaacgccttgagtccgagatctctggtgactttgagagagctatgtaccggtggatgttgcancctgcggatcgtgatgctgttttggtgaatgtggcaatcaagaatggcaccatagactacatgtgattgcagacattgcttgt

SEQ ID NO: 15777 - DNA, 323 bp, Glycine max
  Clone ID: LIB3040-010-Q1-E1-F1
gattgttggcttgtgctctgctcgtgcctctagggttatcatatctccatttccatttcctctctctcagtttccaagaatcttaagctatgggaaagtcttacccaaccgtgagcgctgattaccagaaggccgttgagaaggcgaagaagaagctcagaggcttcatcgctgagaagagatgcgctcctctaatgctccgtttggcatggcactctgctggaacttacgacgtgagctcgaagaccggtggtcccttcggaaccataaagcacccctccgaagtcgctcacggcgctaacaacggtcttgacatcgctgtt

SEQ ID NO: 15778 - DNA, 374 bp, Glycine max
  Clone ID: LIB3040-010-Q1-E1-F10
gatcggatgtcagagcactcaacctcagtaccgctacgaaagcataaccaaaagcttttgacgaagtctcagattttcctaggggctccggcaaaggcagagaagaagccggcggagaagaagccagcggaggagaaggcaccggcggagaataagccgaatgcggacacgaagatctcgaacgaaagagggagcgacaagaataagaatcgcacgatgaagagcgtggagacctagatgatctacatcttcaaggtcctcaagcatgttcaccccgacattggtatttccagcagggccatgggcatcatgaatagcttcatcaacgacatcttcgagaagctcgcccaggatgcgtcgcgttgggctcgcta

SEQ ID NO: 15779 - DNA, 445 bp, Glycine max
  Clone ID: LIB3040-010-Q1-E1-F11
gtttccctttcgactgtgattttttgttaactgaacttttcgagcaaaatgtctggacgtggaaaggggggcaagggtttgggaaagggaggagcgaaacgacaccgtaaggtgttgcgcgataacattcagggaatcaccaagcctgcgattcggcgtttggctcgcaggggtggtgtgaagcgtatcagtggtctcatctacgaggagacacgtggcgtgctcaagatctttctggagaacgtgattcgtgacgccgttacctacactgagcacgctacgagaaagaccgttacggcaatggatgtggtttatgctctcaagagacaacgaagaaccctctacggatttggaggctagtttgtttttttattatttttctaatttttattgttacgtttcgtttgttttggaagtttatgtgggatgtaagagacccttgcta

SEQ ID NO: 15780 - DNA, 379 bp, Glycine max
  Clone ID: LIB3040-010-Q1-E1-F12
gacaccatccagtactcttcttttcagcacaacctcttcatctctcccaggctttcttttctttgcaacaacactaccaaaaatgtcaccagatttcacacttttgttctccccggaactcatgcagtcccctatcatcactttccaagccactttctgtgtccttctcttcaccctcatgttcacgccgttcttcactcctggtgggcttccttgggcctgggcccggcccagaaccatcatccctggcccagtaactgccctgctcggggtcttcacgggttccacacctcacagcgctttatccaaactggcccgcacttatcacgcggaaaagctcatggctttctccatcggtttaacccggttcgttatctcc

SEQ ID NO: 15781 - DNA, 323 bp, Glycine max
  unsure (1)..(323): unsure at all n locations
  Clone ID: LIB3040-010-Q1-E1-F3
ggcgcctctgcttgcaagagtgaaaaccttctcttacccttctctcaagtttcaagagatttcatcatggctccaaagaaggacaaggctccaccaccttcctccaagcccgccaaatctggcggtggcaagcagaagaagaagaagtggagcaagggaaagcaaaaggagaacgtgaacaatatggtgctgtttgatcacggcacctatgacaagctcctttctgaagctcccaaatacaagctcatcactccttccattctctctgatcgtttgangattaatggatcacttgcaaggaaggctataacagaattgatggc

SEQ ID NO: 15782 - DNA, 329 bp, Glycine max
  Clone ID: LIB3040-010-Q1-E1-F4
ggttgggatgggtcagaatgatgcttacgtgggtgatgaagcccaatcaaaaaggggtatactcaccttgaagtatcctatagagcatggcatagtcagcaactgggacgatatggagaagatttggcatcacacattttacaatgagctacgtgttgcccctgaagaacaccccgtacttcttaccgaggcaccactcaatcccaacgccaacagagagaagatgacccaaattatgtttgagactttcaatgtgcctgccatgtatgttgcaattcaggctgtcgtgtctctgtatgccagtggacgtactacaggtattgtgcttg

SEQ ID NO: 15783 - DNA, 323 bp, Glycine max
  Clone ID: LIB3040-010-Q1-E1-F5
gatagcaaaatcgtttctccaatttaatcaccattgtacaacccaattcccttcggcgttttcgattaagagagcaatggcacgtaccaagcaaaccgctcgcaagtccaccggaggaaaggctccgaggaagcaattggcaaccaaagccgctcgcaagtcagccccggcgaccgggggagtgaagaagccccaccgcttcaggccaggaacggtggctctgagggagattcgaaagtagcagaagagcaccgaacttctgatccgaaaactcccattcgagaggcgcgtcagagaaatcgctcacgatttcaaaaccgatc

SEQ ID NO: 15784 - DNA, 322 bp, Glycine max
  Clone ID: LIB3040-010-Q1-E1-F6
gtcatagtgaaagtggttgttgtgtgtgtgacattggcttggagctcttgggctgcatatcctttcatgagttctgcagtcaaccccaggagaaaagctcttgcactcgagccagtttttctcatgtatgtatctgttggttttctcatcattgccattgactaaatgcatcaatgcttctgatttctttattacgataacgacctggaatctgcgtctaaataggaatttttgtttgatgatcaaccatttttttttaattcttttctgggcctccgtttgtctgttgagaatttggttagatatatttgaagacaaacag

SEQ ID NO: 15785 - DNA, 337 bp, Glycine max
  Clone ID: LIB3040-010-Q1-E1-F7
ggcgcctgatttctcagttctctcacacactcattcggtgctccgaatctcagattctagggttagggttcccaatttctccaccgatcagaaaatgagttcaactggtggttctaccaagggcggaaggggcaagcccaaagcctccaaatccgtttcaagatcgcagaaagctggtctccaattccccgttggaagaatcgctcgattccgtaaggctgggaaatacgccgagcgtgttggtgctggtgctcctgtgtacctctctgcagtgctcgaatatcgcgctgctgaggttttggaattggctgggaatgctgctagggataacaagaag

SEQ ID NO: 15786 - DNA, 256 bp, Glycine max
  Clone ID: LIB3040-010-Q1-E1-F8
ggtttctgttccttcgtctgcaaccctagctttcagctgtttgcagtcaatgggtggtgaatctgatgtaccggaaaacaccctctcttgtgctaattgtggcaaacctgcgaagctgcagtactttcgctttatctgtgtctgtgtgtgtgttctagagcgtgcgcagaagtaacaggagctgtgcccccactttgtctttttttatgatgtaggttgttgtggagtgtgggatgctatttttgcatttgatatg

SEQ ID NO: 15787 - DNA, 234 bp, Glycine max
  Clone ID: LIB3040-010-Q1-E1-G10
gaacggcgtttccaccagcggtgactctctgagatctattcctacgccgtttctcaccaaaaccttccaactcgtccacgatcacaccatcgaccatgtgatttcgttgaacgactctggattctccttcatcgtctggaacaccaccgcttttcgccaaaggatttgcttcctaaatatttcaatcacaacaacttctccaacttcattccccaactcaacacttacggattc

SEQ ID NO: 15788 - DNA, 413 bp, Glycine max
  Clone ID: LIB3040-010-Q1-E1-G12
ggcagccatcatttcccttctcttagtaatcctctttgtccttcttcttcacctctacgccaagtggttcctcgctcaagcacaggctcaggccaacgcccgccgccggaggcggcgccgtcgcacgacggtgaccgtctccgacgtcctaggcccggcaaggttccaccacttccacagcttcaccatagaagacagttcacccctctcaacaaaagggttagattcttcaaccattagaacaattccactgttcatctatgaacacaacaacaacaacaacaaaaaggtcgaagaagaagaagaagaacttgaatgtgtgatttgtttgagtgcatttaagaatggtgaagtgggaaggtgtttgccaaagtgtggccatggcttccatgtggagtgcattgacatgtggt

SEQ ID NO: 15789 - DNA, 60 bp, Glycine max
  Clone ID: LIB3040-010-Q1-E1-G2
aacgagacctcaggtcaggcggggctacccgctgagtttaagcatatcaataagcggagg

SEQ ID NO: 15790 - DNA, 159 bp, Glycine max
  Clone ID: LIB3040-010-Q1-E1-G3
gacatctttcactcgttctcagatatttcaagtcaattttctcccctcataaagctcacccatcactggctctcgttcaggcacacatcaatcccgcggctatcaatcccgtagaaaaggtcccatcggacactcaacctcttgcagacaaaaagctat

SEQ ID NO: 15791 - DNA, 53 bp, Glycine max
  Clone ID: LIB3040-010-Q1-E1-G4
gacagctcttggctttagcaaattccaattcgcagatctcacttagacaccct

SEQ ID NO: 15792 - DNA, 130 bp, Glycine max
  Clone ID: LIB3040-010-Q1-E1-G5
gggagttacacattattctctctctcactcacacacactcagagtgcaagctagagagagagagatggacgatctcgaggatgaagagaacggagccgaggaggtgttggggtcaagcttgaccatggag

SEQ ID NO: 15793 - DNA, 334 bp, Glycine max
  unsure (1)..(334): unsure at all n locations
  Clone ID: LIB3040-010-Q1-E1-G6
gagagtggtggagtgtgcaaaagagcgtcgtagtcgcaaccctaatcagaagaagcgcagcttcaagcgagtgacagccaccagccatgggtcgtatgcacagccgcggtaagggtatatcctcttctgctttgccctacaaaaggacacctcctagctggctcaaggtctcttcgcaagatgtcgaagaaaatatctgcaagtttgcgaagaaaggtttgaccccgtctcagattggtgtcattctcagagattctcacggtattgctcaggtcaatancgtcactggcagcaaaatccttcgcatcctcaaagctcacggacttgcgcctga

SEQ ID NO: 15794 - DNA, 267 bp, Glycine max
  Clone ID: LIB3040-010-Q1-E1-G7
ggtgtacatgatgaactctaggaagtttgcaaaacggataaagagtgagcggaagttatattccggatagttatatttcagtcgtagtgtttttttgttttccctagataagcagaccgtggaaaactgctagtaaaagctggagcttttgcttcgatcacatttgactatttcactgattagaacaggcaaagatgtctctcttgggttgatctttttatgtttcgatcaattgagtttcccattatgacgcttcctgaaaatcta

SEQ ID NO: 15795 - DNA, 125 bp, Glycine max
  Clone ID: LIB3040-010-Q1-E1-G9
aagattcctaaagaagctagagcttagctacacatacctctctaatagctaagctcacctccttgagatgagaagctagaacttagctacacaccccccataatagctaagctcacccccatgac

SEQ ID NO: 15796 - DNA, 345 bp, Glycine max
  unsure (1)..(345): unsure at all n locations
  Clone ID: LIB3040-010-Q1-E1-H1
ggtgacagtgaacagatggaaggcatagtacacaggacagttgaagtgaatggcataaaatgcatgttgctganaaaggtgaaggtcccgtggtcttgttcctccacggcttcncggagctctggtactcctggcgccaccagattctggctctcagcaacctcggctaccgcgccgtggctccagatctccgcggctacagagacaccgaggcaccagcttcaatcagcagctacaccatcctccacttagtttctgacatcgtcgcgctcattcactcacttgctgtggattaagtcttcctcgtagcccatgattggggggctgtcataggttggtacctcg

SEQ ID NO: 15797 - DNA, 313 bp, Glycine max
  Clone ID: LIB3040-010-Q1-E1-H10
gttcgcggctctcttcaaatacgcgacacccgaactcgctgactgaaacgcgcacgcataagggttttgccatgatggcactgtccaaactcgtccgatcggcaatctctctcatctccagatccacgttcctcacctccgagcgatccagtctctaccgattcttcattgaccattccatctccgtcgcctccagaaattacaccaacatgacggggcacaatgacttcacggttaaggtcgcactggctttgtttggacgttcaggatactatgcctgtgcattgtacaatgcatctgctatagctaatgc

SEQ ID NO: 15798 - DNA, 405 bp, Glycine max
  unsure (1)..(405): unsure at all n locations
  Clone ID: LIB3040-010-Q1-E1-H11
gacaccaagtcctgctcttcttccagagcaacaacaaacaaaccctttctttctggcttcagtttttgcagtgaaaatggcggtgactttaacatcaaccctctttatggctttgctatttgctgcttcagcttttgctgctcttcagcctagagtacctgaagcttaccttcaaaatggaaactttgaggagcagccaaaccccaaaaacctccagaaaacaaagctcatggggaaatattctttgcccaaatgggaagtcaatggtctggttgagtatgtctctgggggtcnccaacctggaggcatgttcttcccagtgactcatggaatccatgctgtgaggcttggcaatgaggcctcaatctcccaaaatatcaaggtcaaacccggtcaactgtatgc

SEQ ID NO: 15799 - DNA, 230 bp, Glycine max
  Clone ID: LIB3040-010-Q1-E1-H12
gactttctattggccttaaaccaaacgcagcatcgctattctcttcattccagggcttagcccatgcagcaaaacgtggattaacctaatttcaaactcgctatcgtccgctatggtgtgacaggtcagacatcgcttgtcaacaggcatctcaccggagaactcgacatcaaatatgagccaatcatcggtgtggaggttcacccattggcttttttcacaaactgtgg

SEQ ID NO: 15800 - DNA, 263 bp, Glycine max
  Clone ID: LIB3040-010-Q1-E1-H3
gggccgtacgggcaaatcgtcaagttcgacaactttgtgtttgggcagtcctgcgcatggaacaactgggccaacgggcattacaccgagggtgtggaattgaatgactccgttctcgatattgtgcacaacgacgctgataactgcgaatgcatgcaaagttttcacgtgtgccaatccctggggggaggaactggatcaggaatgtgaaccatgctgagttctacgatcaaggaatactacccagatagaatgatgcttaa

SEQ ID NO: 15801 - DNA, 328 bp, Glycine max
  Clone ID: LIB3040-010-Q1-E1-H8
gaagaaggtaaagaagatccgaacttctgtcactttccacaggccgaagaccttgaagaacgacaggaaccccaagtaccctcgcattagcgccccgccgaggaacaagcttgatcattatcagatcctgaaataccccctcaccactgagtctgccatgaagaagattgaggacaacaacactttggttttcattgtcgacctgcgtgccgacaagaagaagatcaaggatgcggtgaagaaaatgtatgacatccaggccaaaaaagtgaacaccttgatcaggcctgatggcaccaagaaggcatatgtcaggttgacacctgat

SEQ ID NO: 15802 - DNA, 435 bp, Glycine max
  unsure (1)..(435): unsure at all n locations
  Clone ID: LIB3040-010-Q1-E1-H9
gttgaacttcattgtttttggctaagcctcgaaatccagaaaaatcgtgagcgaagatgatgcacatgaccttttactggagcaggaaggtgaatctcctaatagattcatggaagaccaacgattggacggagtatctcatcactctgctcgcatgcctcgtcgttgccgccttctaccagttcctagagaatcgccgcatccgcctcaagctcatcggcgccggaaatcccttcccggcagagatcgaggccccgcttctgcgacggaagcttgccggaaaccgcgccaaggtgggcgtgaaggtagccggagcgtttctgttcgggctgagctcggcgatcgggtacttgctgatgttgtcggtgatgtccttcaacggtggggtgtntgtggccgtcgtcgtgggtcttgctgttggttacttcttcttca

SEQ ID NO: 15803 - DNA, 336 bp, Glycine max
  unsure (1)..(336): unsure at all n locations
  Clone ID: LIB3040-011-Q1-E1-A1
gaccaccgcaaagcaatgggcgctatactttctgccttaactggcggtgccgcaacggcggcgacgtcttcgccggagagttctgcttctanggtccagtctttccactcttcggcgcgctggcagctccacttcaacgagctcaaagaaaccaataagctcgttgtgatagatttctcggcgtcgtggtgcggcccttgcaaattcatagagccagcgattcacgccatgtccgaaaagttcaccgacgttgacttcgtcaagatcgacgtcgacgaattgcgggatgtggcgaaggagtttaatgtggatgcgatgccgacgttcgtgttgtgt

SEQ ID NO: 15804 - DNA, 324 bp, Glycine max
  unsure (1)..(324): unsure at all n locations
  Clone ID: LIB3040-011-Q1-E1-A2
gaaattaaatcgttcaacactggaactctttgatataatatagaaagagacagagagagagagacagacaagaagaacaaagatgcaatcttcanaggagaagctgaaaaacatgaccagtgctgccaaggagcaagtcgacatctataaagcanaaatagacgagaaaggtcagcttttccatctctatacatccatatatttttgttccattatacaatgattcatttgtggcgtanctaggcatcaatatcatgaaagtagaatcgtgatatataattatatatgtatgtaacctcttcaacaagtttttttttttttttt

SEQ ID NO: 15805 - DNA, 254 bp, Glycine max
  unsure (1)..(254): unsure at all n locations
  Clone ID: LIB3040-011-Q1-E1-A3
gctgcgnagaaggacgacagacagggaggaaagggaatccaatgcgaaaccctaaccctaacggagagatggcggcgcacttggcatcgatattcgcgacggagaaggacatggtgaactgtccgttctacttcaagatccgcgcgtgcacgcacagggaccggtgctcccggctttacacgatgcccacacttatcccaccgttggttctgtccaacatgttccagatgcccgacatgaacatgtacatcatc

SEQ ID NO: 15806 - DNA, 224 bp, Glycine max
  Clone ID: LIB3040-011-Q1-E1-A4
gccaatctcgcaacgcaagcgacaacaatcgtcacagctcagcagcacaatcaaaaccaaaactccctccccttgcgacatttttacaaacaccttctgcctacaaataaaagatatttcagttttcatgtcctcgtagtggttgggtttgagtgcgtgtgtgtgagaatggaagagagtggtgatgcgagggatcttcagaaaccgttcctccacacagggag

SEQ ID NO: 15807 - DNA, 398 bp, Glycine max
  Clone ID: LIB3040-011-Q1-E1-A5
gacagaacaaaaacaaagaaaaaaaaaaacccttagccaacacaaccatcatggccacctctgctattcagcaatcagcattcactggtcaaactgctctgaagcagctcaatgagttcgtccgcaagaccggtggcgccggcaaaggtcgcactagcatgcgccgcaccgtcaagagtgctcctcagagcatttggtatggccctgaccgtcccaagtacttgggtccattctcggagcagattccatcatacctgaccggagaattccctggtgactacggatgggacactgctggattatcagctgacccggaaaccttcgccaggaaccgggagctggaggtgattcacagcagatgggcaatgcttggtgcccttggctgcaccttcccagag

SEQ ID NO: 15808 - DNA, 388 bp, Glycine max
  Clone ID: LIB3040-011-Q1-E1-A6
cggggtccctcttactaacactagggtttacagagaagcgaagaggcgcagccgtagcagtaactcgtggaattgctagcaatggcgaggatcaaggtttacgagctgaggcagaagacgaaggctgatctgttgaatcagcggaaggatctcaaggtcgagcttgccttgcttcgtgttgctaaggtcaccggcggtgcatctagcaagctctcgaagatcaaagggggtaatgttgaacattgcccaggttttgacggtgatttctcagacgcagaaggccgcgttgagggatgcctactcgaacaataagtacatgcctctcgatctccgccctaagaagaccatggccattcgcatgaggcttactaagcaccaggcatcattg

SEQ ID NO: 15809 - DNA, 398 bp, Glycine max
  Clone ID: LIB3040-011-Q1-E1-A7
gacaccccatctatacacgactcattctcactacacacgctcaacacattacttcctctttcgtgccctcaaattgagatggcctgtagggtcgatgaaaggatctcactgcgcaaccaacatcacattgtccgactacgtacctgctcaagctcatcctgcagtgtctctcttgacataagtagcgtatcacgcctacacattcacttcctcgcaatgggcattgacagtatacattactggcagctctttgctaccatatcacagttcatctagcctaaccaaccatgtcttgatacaacatggatgttccaaatggcacggtttgtgcatgaacgtttaaggcgagggtcacatgcaagaagagaggtgccactctcgtgtctagtttagacgtc

SEQ ID NO: 15810 - DNA, 328 bp, Glycine max
  Clone ID: LIB3040-011-Q1-E1-A8
gatgccgaaaagtagtaccaagatggcttcagttgtgtatctcctctttggcttccatctcattgttatcatgtcaagttccttacccgcaactagtgaagtgtttgcaaaacagtatccatccacagaacccgtggaagaaaaactcacccaactccacttctatttccataacaacataacgggggaacacccaactgctatgaaaactgttttgcctcctaaggggtccattcatggttttggggctacttacatgatggatgaccctctaactgaaggaccaagtccaacttcaaagcttgtgggaagatctcaaggaatatac

SEQ ID NO: 15811 - DNA, 389 bp, Glycine max
  Clone ID: LIB3040-011-Q1-E1-B1
ggtgtctgctcactcgctcttctccgccacttctgaatctattgaatcaacaatcatgtcggacgaagagcaccatttcgagtccaaggccgacgccggagcctccaaaacctacccgcagcaagccggtaccatccgcaagaacggctacatcgtcatcaaaggccgcccctgcaaggttgtggaagtttcgacttccaaaactggaaagcacggtcacgctaagtgtcactttgttggaatggatattttcactgccaagaaacttgaggatattgtgccctcttctcacaactgtgaagttccccaagtgaatcgtactgattaccagctcattgatattgctgaagatggatttttgagtctgcctactgaaaatggtaacacta

SEQ ID NO: 15812 - DNA, 409 bp, Glycine max
  Clone ID: LIB3040-011-Q1-E1-B3
aagcctgatagcacgcagagactaacgtcgtctcctgcgcccttcgtcaatcgcggccgacaagcccgttgacacgcagagatttacgtcatcttctgcgctcacaagatctgtcatactgacttttgagtcgcgctgacgggcggaaatatccgagtggttatccgtataaacattcttttgctatctgtaagacagaacgcttgatagcatgcagagactgacatcgtcttctgcagcttttgttcccccggggacaacaagttatttgcatgtggagatgttatggtcacccgcgactctcgtcaaacgagaggaacgaaattagtggcctaacctttactcccttttatctccaataaaagacaagtaaagaggggtaactgtcaatacctaatttcgtccgggg

SEQ ID NO: 15813 - DNA, 335 bp, Glycine max
  Clone ID: LIB3040-011-Q1-E1-B4
gcacaatcgaacgggaaaaggcgtcttcataaacgccgcccaaaacttctcatacccttttattcattccattcgtttctagggttttcttttctttgccgagaaaatgagagagtgcatttcgatccacattggccaggccggtatccaggttggaaacgcctgctgggaactctattgccttgaacacggcattcagcccgatggacagatgccgagtgacaagaccgttggcggaggagacgacgccttcaacacatttttcagcgagaccggcgccggaaaacacgtgccccgcgccgtcttcgtggatcttgaaaccaccgtgatcgacg

SEQ ID NO: 15814 - DNA, 407 bp, Glycine max
  Clone ID: LIB3040-011-Q1-E1-B5
gactcagctttatccataaagcacaatttttttgcttcaacgggccttaccttacctgaagatggcttcggtgtcctttgccgtgggattattaccttgctcttcttcttcttgctatacccgcgtctcttatggttcagttcgatttcccgtattgaacaacgccaactcactgaaactcagctcctcagctaacatctccagtccaattcttcaccaaaagctttgcactgttccttctccccttgctctaaggcctcgccctctcaccattgtatccgctaagggctacaaaatgaaaacccacaaggcatctgcaaagcggtttaaggtgacggggcgaggcaagatagtgcgtaggagagctggcaagcagcatttgctcgttaagaagaataccaagcgca

SEQ ID NO: 15815 - DNA, 433 bp, Glycine max
  Clone ID: LIB3040-011-Q1-E1-B7
gaaaccacaagtaaaagaaagaagctttcttgagttgagttaacagcatggagagggaggaagatgttaaggttggagcacagaaattctcagagaggcaagcattggggacaggagctcagggtgacaaggactacaaggaggcaccaccagcacccttgtttgagccaggggagttaaagtcatggtctttttacagagctgggattgcagagtttgtggccacattcttgttcctctacatcactgtcttgactgtcatgggtgtcaacagggcacccaacaagtgctcctctgttggcattcaaggaattgcatgggctttcggtggcatgatctttgccctcgtcgactgcactgctggaatatcaggtgggcacataaatccggcagtgacgttcggtttgtttctggctaagaagctgtccctgac

SEQ ID NO: 15816 - DNA, 427 bp, Glycine max
  Clone ID: LIB3040-011-Q1-E1-B8
ggggaagagagaaagttagttacggctggtggcatttttcatttgaaagcgcagctgcagatagaggaaatggaaaagggtgccaaatcggaagcagcggcctcactgcgtcgctgtgcaaaagctgcattgcttctccatagcttgaattccccaatctcccaaaatcagtggaagagggaaatccatgacctgaaaattgaattgctgaaggagcgtttcatgaggaagaagatgaagctctgcgctatcacggagttgttcgttcagctcctcttgttgctctccgtttgtaacttcgtccttctctaatttctttgatattttcctctgcgttacgacttcagagagtgctcttcctccatgctctgttctacttccgtttacgcagctttaaactgctttagctcgttgatgaccgtaaacg

SEQ ID NO: 15817 - DNA, 357 bp, Glycine max
  Clone ID: LIB3040-011-Q1-E1-C1
gacgaaaaagaaaaacaacgttttcttcttctgctatctatctatctagggctcaattccgattccgattccgattcatactcataaccctttcaatgctttattgaactaacgaggttttcttcacgcaccttgttttctctgcattgtttcgaattccatggaggagtcttcgtacaccggtcttcccactagccacttgctcggttcagttcctgctgtcataactgaagaaaataatgccacgaaacatgtggccaccggtgcaaatatgcaaacattccctcccaacaatggaggagacagaggaccaggacatcaaactcttggcagtcctactgaagcttttgaacaaca

SEQ ID NO: 15818 - DNA, 248 bp, Glycine max
  Clone ID: LIB3040-011-Q1-E1-C12
gaaacagaattagaataatcccttgcgaaaaagcaaaaccctaaaccctcgcttgcactgttctgggtcctcctccgatctgatctcatcggcaatggcttccgcgtggagcagaatcgcgcagtcaacatcaatttcgtccatcagatcatccagcaaatccaacattcgcgcttcatcttcggtctccaaagcagcttcctcctcgtcgcctcgtcggcaaaccgtagtgaccaggatttcggggg

SEQ ID NO: 15819 - DNA, 341 bp, Glycine max
  Clone ID: LIB3040-011-Q1-E1-C2
cggggaagttattacggtttttgagtgcggcggtccaaacactcttctctgcagcttttgcctacaactcccttcaccatggctgaacaaaccgagaaagcttttctgaagcaaccaaaagtgtttctcagcacaaagaagactgggaagggaaagagacctggaaaaggtgggaaccgcttttggaagtccattgggcttggatttaagactcccagggaagccatcgaaggaacctatattgacaagaagtgccccttcactgacaatgtttccatccgtggccgtatcatggcttggacatgtcacagtgctaagatgaacaggactattattgttac

SEQ ID NO: 15820 - DNA, 357 bp, Glycine max
  unsure (1)..(357): unsure at all n locations
  Clone ID: LIB3040-011-Q1-E1-C4
attctcagattgcaaagagtgagaaggatgtgcgagttgatggcagagaagacgacaacaaggatatcagatatgaacgggatagccataatgattcaaaaggtgacattaagacagacaaggatggctatggtatggtaagcagcagcagccacctgagttggaaagaatcaaaagagtatangggtaagagattttctgatgcccctggtgggagtttggattcctggcatacatcacgtggcaatacacctactgaagttggaaaggacagttcaatggcagaagaaagggactatttggaaacacatgaggctgttggagaaaacaaaattgattctaaaagtgaagatagaa

SEQ ID NO: 15821 - DNA, 399 bp, Glycine max
  Clone ID: LIB3040-011-Q1-E1-C5
gagtctcggaatccatcgatccaaaaccctaattgaagttgtcttgtctgcgttctcaaacgttgttgcttgctgctgctgcatagttgatcgaaagcatgacaacatcattgtccagcatccttttcaagggaattgcagctcgttctttcaccgcccctctaactaggtcctgttatcatggaatgagatactttgctactgtatcaaatgatcctgacacacatgatgacttcaagccagctaataaacttgagaattccaacatttctttggctgatgttattgagcaagatgtcaaggataatcctgttatgatttgcatgaaaggtgtgcctgattttccacagtgtggatttagttctcttgcagttagagtgttacaacaatatgatgttc

SEQ ID NO: 15822 - DNA, 426 bp, Glycine max
  Clone ID: LIB3040-011-Q1-E1-C6
gagttgggaaaccctaattctgcgtggtgagtgaaaatggcggtacccttgctctccaagaggatcgtgaagaagcgcgtcaagaagtttatacgcccccagagtgatcgcaagatctccgtcaagccaagctggcgcagacccaagggtattgattctcgtgtcaggagaaagttcaaaggatgcactttgatgcccaacattggttatggctcagacaagaaaacccgccattatctaccaaatggtttcaagaaatttgtcgtgcacaatgtgaaagacctggaacttctcatgatgcataacaggacatactgtgctgagattgctcacaatgtatccacaaggaagaggaaagacatagttgagagagctgctcagcttgatgttgtcttgacgaacaagacggccagactacgtagccag

SEQ ID NO: 15823 - DNA, 417 bp, Glycine max
  Clone ID: LIB3040-011-Q1-E1-C7
ttccagtagtaattctaggtactattgcctgtaacgtaggcttagcggttctagaaccatccatgattggggaacccgcggatccatttgcaactcctttggaaatattacccgaatggtatttctttcccgtatttcaaatacttcgtacagtgcccaataagttattgggcgttcttttaatggtttcggtacctacaggattattaacagtaccctttttggagaatgttaataaattccaaaacccatttcgccgtccagtagcaaccaccatctttttgattggtactgtagttgccctttggttaggtattggagcaacattacctattgagaaatccctaactttaggtcttttttaaacttataaaattgattccattttgaaataaaaaaaaataaaatgccatgtgt

SEQ ID NO: 15824 - DNA, 102 bp, Glycine max
  Clone ID: LIB3040-011-Q1-E1-C8
gagacacgccactcaattatttctgtccatttcttcttcccatattgttctcgtgtgttgtgtgtgtcagtgttttggggtgtgtgtgtgagtgagtgagat

SEQ ID NO: 15825 - DNA, 358 bp, Glycine max
  Clone ID: LIB3040-011-Q1-E1-D1
gagggttttgtgctgttgtcgctgctcatcctccataacctccgagctctacaccgaagaacgaagccatggggaagacacatggaatgggagctgctcgcaagctcaagtctcaccgcaggaggcaaaggtgggctgataagtcatacaagaaatcccatcttgggaatgaatggaagaaaccttttgccggttcatcccatgccaagggaattgtccttgaaaagataggtattgaagctaagcagcccaactctgctattcgtaagtgtgccagagttcaacttatcaagaatgggaagaaaattgcagcttttgtccctaatgatggttgcttgaactacattgaagagaatga

SEQ ID NO: 15826 - DNA, 226 bp, Glycine max
  Clone ID: LIB3040-011-Q1-E1-D12
ggttccagttccacttagagccatgacagacatctcgaagtcccttctctttacctttaccatcatcatcagctttggcgtgtgcattctttatgcatctgcaaaactccagagatttgcacactcttccaaacatgatggtgctcttagcttcttggtgcttggtgactggggaagaagaggtgcttacaagcaatcagtagttgctttccagatgggaaaggtt

SEQ ID NO: 15827 - DNA, 417 bp, Glycine max
  unsure (1)..(417): unsure at all n locations
  Clone ID: LIB3040-011-Q1-E1-D3
ggttcttcctttgccttctccttcttcttcaaccctttttctttctctttctttcgcactttcattctctaaaaaaatctaagtccctttggtcttcatcttctgttctgatccaggtatggcttctaaacgcatcttgaaggagctcaaggatttgcagaaggatcctcctacctcatgcagtgcaggccctgtggctgaggacatgtttcactggcaagccacaatcatgggacctgctgatagcccatatgcaggtggtgttttcctagtttcaattcattttcctcctgactatcccttcaagccaccanaggttgcttttcggactaaggtgttccacccaaacatcaacagcaatggaagtaaaggtcttgacattctcaaggagcaatggacccaagccctaacaatttc

SEQ ID NO: 15828 - DNA, 368 bp, Glycine max
  Clone ID: LIB3040-011-Q1-E1-D4
ggatgaaggaaggaggcactccaaaaaatgctaaaactttgttggacatgaggttttatgttgttgtgttttggtaatttcaattcaagcagcacaacgcaaaggtaaaaacagagagagagagagagtgtcccattcccatcccccacacaaaaggtggtggaaaaaaagttctttttgtacacactgcgatgatggcgatgatgatgcctgcaatctccaacacaaacacaaacacaaacacaaacaccatttcctcctcctcctcctcctcttcttctctctcttttatcactccctctacttcctagttctcagccaaccatggtttgcttcatgttctcactcactagaaaggaaccatgaat

SEQ ID NO: 15829 - DNA, 415 bp, Glycine max
  Clone ID: LIB3040-011-Q1-E1-D5
tgtaggccttagatctcattggtgcaaaatccaaagcagtgttttgtgagaagcaaggatttcttgcttttgcttgaacgctggtttgaaggctctataacataaaaacaaatatgtatatcgttgggggttgtatgacgttttctttgaaccagatagcaagctggttgtagataaaataaatggttcaaatgatgttgtatttgaattagacagcttagttagtgagtgtggtcacttattgattgtcaatcaaatctttcatgtgagtttccttaggaaagcatattaataatattgtgcatgttcttgctacggtgacactatattgtcctagtctccatgttttcagcaaaatcctcactgtagtgctcaatttggcacataataaaattgatataaacgttgttttggt

SEQ ID NO: 15830 - DNA, 363 bp, Glycine max
  Clone ID: LIB3040-011-Q1-E1-D6
gacagcaaaacaattttcaaactcaattaccattccataacctaaatctcctctttgtttccgagtcagagagcaatggcacgtaccaagcaaaccgctcgcaagtccaccggcggaaaggcgccgaggaagcaattggcgactaaagccgctcgcaagtcagctccggccaccggcggagtgaagaagccccaccgcttcaggcccggaacggtggctctgagggagatcagaaagtaccagaagagcactgaacttctgatccgaaaactcccattccagaggctcgtcagagaaatcgctcaagatttcaaaaacagatctccgttccaaaagcagcgctgtttctgcgcttcaggaagc

SEQ ID NO: 15831 - DNA, 416 bp, Glycine max
  unsure (1)..(416): unsure at all n locations
  Clone ID: LIB3040-011-Q1-E1-D7
gatgccgaaaagtagtaccaagatggcttcagttgtgtatctcctctttggcttccatctcattgttatcatgtcaagttccttacccgcaactagtgaagtgtttgcaaaacagtatccatccacagaacccgtggaagaaaaactcacccaactccacttctatttccataacaacatgacgggggaacacccaactgctatgaaaactgttttgcctcctaaggggtccattcatggttttggggctacttacatgatggatgaccctctaactgaaggaccaagtccaacttcaaagcttgtgggaagatctcagggaatatacgctttggcttcacaacatgagcctgngttgctcatggtgacaaattttctcttcactttgggcatttacaatggcagcaccctcagca

SEQ ID NO: 15832 - DNA, 67 bp, Glycine max
  Clone ID: LIB3040-011-Q1-E1-E1
acgagctaagacgacagaaggggagacctcaggtcaggcggggctacccgctgagtttaagcatatc

SEQ ID NO: 15833 - DNA, 285 bp, Glycine max
  Clone ID: LIB3040-011-Q1-E1-E12
gaaggtatatataagccacccttcagagcaatttgtccatcttcttcaatttattagcagaagatgtggtgcattagattaccttagtctttgtcctagtgtcttccacaggaacttggtcgaacgtttccagatattcacataagagaagaacaatagttctctccctataaactcatgatatgctagataagccatccttaggagcaatatatccgtcctcttcaatttattagcagaaggtgtgttgcgtagtagaccatagtcattttgtcattgttgttt

SEQ ID NO: 15834 - DNA, 264 bp, Glycine max
  Clone ID: LIB3040-011-Q1-E1-E2
taggtagagatggttgccaaatctgtgatactgtttataatcaggtggagtatatattaaatatgattaaatatggcaccagcattgattccttatcaagatgggatctttcttttgcactgtttccggtgacagcttaagaaatactgcctaatccttacaccacttattttctgtggaaacacttataggaaaccaagtaaaaaaataaaataaattgagtttttttcacacaagctaattagctaaagtcaattcacatac

SEQ ID NO: 15835 - DNA, 361 bp, Glycine max
  Clone ID: LIB3040-011-Q1-E1-E3
gacatcagagaaagtaaagagtctgagtatgggaggctcatggtcatggcagctcacatgtgccctcttgctactcttctccgccgtagtcaccgccactgaccacattgttggtgcgaatcgtggctggtaccctggctttaactacactctttgggctcaacaacatactttctatgttggcgatcttatctcattcaggtaccaaatgaaccaatacaatgtgtttgcagtgaaccaaactgggtatgacaactgcactacataaagggcagtggggaattggagcagtgggaaagatttcataccccttaacaaagccaatagatattacttcatttgtggcaatggccaatgcttc

SEQ ID NO: 15836 - DNA, 375 bp, Glycine max
  unsure (1)..(375): unsure at all n locations
  Clone ID: LIB3040-011-Q1-E1-E4
gtattttgatagctgttggtgaggcagttgcctatgttctttcggggatgtatggcaatgtggggcaacttggagtatggaatgccatcctcatcatcatccagctatgttttgcgggtataattgtgatatgtctagatgagcttcttcaaaaaggatatggtctggggtctggaatatcnctattcattgcaaacaatatctgtgaaaacattatatgggatgcatttagtccaaccaccatcaacagtggacgtggagctgaatttgaaggtgctgttattgctctgttccatttgttgataactagaacagacaaggtccgtgctcttcgtgaggcattttaccggcaaaatcctcccaatgtgacaaatt

SEQ ID NO: 15837 - DNA, 422 bp, Glycine max
  Clone ID: LIB3040-011-Q1-E1-E5
gacgttcacattcaggaatcgttttcttcagaaatttgccatcgttgagagaagcgtgagagccttagtcgttcaagatgagagctaagtggaagaagaagcgcatgaggaggttgaagaggaagcgccgaaagatgggacaaagatctaagtaggtgcttgagcaggagttgagatgagctttccatctgctaccagcctcatgacattttaggctgttatggctcttatgatcttgaggtctagtcgctaggggagcttcactcttgacttagtttgctttactggtcctggtcctggtccaagactattgagtgtgggttaagttgtgatgtttagtgttttgtggtatctaattatgtactggtttttatactttttggttgaatagctatatattagtatcgagacttccaggcgag

SEQ ID NO: 15838 - DNA, 351 bp, Glycine max
  Clone ID: LIB3040-011-Q1-E1-E6
gactttccattctcttcaaacctaacgcagcatcgctattctcttcattccatggctttgcccaaccagcaaaccgtggattaccctagtttcaaactcgttatcgtcggcgatggtggcacaggaaagacaacctttgtgaaaaggcatctcaccggagaattcgagaagaaatatgagccaaccatcggtgtggaggttcacccattggattttttcacaaactgtggaaagattcgattttactgctgggatactgctggacaggagaaatttggtggcctcagagatggatactatatccatggacaatgtgctattatcatgtttgatgttactgcccggctaaca

SEQ ID NO: 15839 - DNA, 423 bp, Glycine max
  Clone ID: LIB3040-011-Q1-E1-E7
gaaaaacatcatatcatttaagcaaaggctaaccctaaattgcgctgtctctcgtcactatcgggagaagtaatcgagcttcagcaatggtgtacgtcaaggctcagaaatcaaaagcctacttcaagagatatcaagtcaagttcaagagaagaagagagggaaaaaccgattaccgtgccaggattcggttgattaatcaggacaagaacaaatataacactccgaaataccgatttgtggttcgctttagcaacaaggacattgttgcacaaataatatctgctagcattgccggcgatttagttcttgctacagcatattcacatgagctgccacgatatggtcttgaagtaggacttacgaattatgcagcagcttattgcactggtctcctgttggcccgaagagtcctcaaaacac

SEQ ID NO: 15840 - DNA, 361 bp, Glycine max
  Clone ID: LIB3040-011-Q1-E1-E8
gaatcgcacctaggcctccgtcacagccacggtaccgcacgctcgctgcctttctcactcacccacgcgagcgcgcgtcctctcacccacatcattgcaccgccatcccagatgccgccgtgcacttgctgtcgtgcccacactgagattcgcacgtcctctgacccacatcatcgtgtcgccgctgtcgagcccacactaccattgcacacgctgccgcgcacttgccgtcatgcccacgccagctgtttcgtaatttttatttttttttatcttttgtctgcctcttttttatttgatatgatattttgacattcaggtttacgggttttgttggttggatgaaaaagtaaacactaaa

SEQ ID NO: 15841 - DNA, 363 bp, Glycine max
  Clone ID: LIB3040-011-Q1-E1-F10
gattcaaaacttcaatccctcttttgcttaccaaattccattttccaattcagaaccctaactccgttcgaagcaccaaatcgtgatggcaccaaaggcagagaagaagccagcagagaagaagcctgtggaggagaagaaatcgacggtgggagacaaggctccggcggagaagaagccaaaggccggaaagaagcttccgaaggagggaggcgccggcggagaaggtaagaagaagaagagaaacaagaagagcgtggagacatacaagatctacatcgtcaaagttctgaagcaggttcaccctgacattggtatctcaagcaagggcatgggaatcatgaacagcttcatcaacgacat

SEQ ID NO: 15842 - DNA, 348 bp, Glycine max
  Clone ID: LIB3040-011-Q1-E1-F12
gaaaccggaaaaaaaatggattcattgagtgatcggtgttcacttggatctcatcataatcgtcagcgtcaattgaagaagatgccgatcagaaacatcgccgtcggaaggcctgaagaggcgactcaccccgacacgttgaaggcggctttggctgagttcatctcaaccttcatcttcgtgttcgccggctcaggctccggcatcgcctacaacaagctcaccgacaacggcgctgccacccctgccggcctcatctccgcctccatcgcccatgcagtcgccctcttcgtcgccgtctccgtcggcgccaacatctccggcggccacgtcaaccccgccgtcacc

SEQ ID NO: 15843 - DNA, 354 bp, Glycine max
  Clone ID: LIB3040-011-Q1-E1-F2
ggtctgcgcctgatttctcagttctctcacacactcattcggtgctccgaatctcagattctagggttagggttcccaatttctcaaccgatcagaaaatgagttcacctggtggttctaccaagggcggaaggggcaagcccaaagcctccaaatccgtttcaagatcgcagaaagctggtctccaattccccgttggaagaatcgctcgattccttaaggctgggaaatacgccgagcgtgttggtgctggtgctcctgtgtacctctctgcagtgctcgaatatctcgctgctgaaggttttggaattggctgggaatgctgctagggataacaagaagaatcgtattgtt

SEQ ID NO: 15844 - DNA, 240 bp, Glycine max
  Clone ID: LIB3040-011-Q1-E1-F3
cccacgcgtacgaccgctgctacgaagacacatcaggggacatctcagttcagatgtcacacaaccagagacagagtattcatacatattagcagtctcgtactctcgcatggagatttcggcgtctcaaattgtctctgtgtagctagctaggatttcgatgatattcagtttgttgagcgaacgagtttggatggggatcataatatgcagttcatggtgtacaccatttcgggtcct

SEQ ID NO: 15845 - DNA, 217 bp, Glycine max
  Clone ID: LIB3040-011-Q1-E1-F4
gactccgcagctgcagcactcaaaaccctagagaggacgagagagcgtgcaactttcggcaaccacagaccatgacattcaagcgcaggaatggaggtcgcaacaaacacggccgcggccatgtcaaattcatccgatgctccaactgcggaaaatgctgccccaaggacaaggccatcaagaggtttttggttaggaacattgttgaacaggctgc

SEQ ID NO: 15846 - DNA, 117 bp, Glycine max
  Clone ID: LIB3040-011-Q1-E1-F5
ctctgaggatgatgagaaaatataactttcattcttccgagtttcccatgaggaaagtacatggagacctcaggtcaggcggggctacccgctgagtttaagcatatcaataagcgg

SEQ ID NO: 15847 - DNA, 71 bp, Glycine max; identical to SEQ ID NO: 15684
  Clone ID: LIB3040-011-Q1-E1-F6

SEQ ID NO: 15848 - DNA, 259 bp, Glycine max
  Clone ID: LIB3040-011-Q1-E1-G1
caaaggggaaagagaatgttaccaattaacccacactttaccaattattcactcactcactcactgttgcagcaacgccattgtgtgaaatcaatgttttgagatttgttgggaacaatggggagcgtttcgtccgaagatggttccgaccgttgtgggagttatagcctcagtgctgatgtcagcgagtccgagagctgcagcaacttctccgcacaccgcttcgactccgacggagcttccagctccgccaacctct

SEQ ID NO: 15849 - DNA, 302 bp, Glycine max
  Clone ID: LIB3040-011-Q1-E1-G10
gaaacactcttttgctaactcccaagagctcaccacaacagcatgatgcacaccaattctcatgctgaatattgggccatacttgtctgccaaggatcctaacgttatgtaaggtggctgagtggaaccacctaagaggtgaagatgaccgatcaaaggccagccaccgcctgctgccggtggcttgcgggcagaacctgctgtagcccttttgatgaagtaagaaactaagattatgccaataattgcggcaactgatgcctccaggtactgaatcctgagacccatgacagtttgagaaa

SEQ ID NO: 15850 - DNA, 62 bp, Glycine max
  Clone ID: LIB3040-011-Q1-E1-G4
caaaaaaccacaaaaagggaagaaaaattccaaaaaaaggctccaaaatttggcaagttaac

SEQ ID NO: 15851 - DNA, 425 bp, Glycine max
  Clone ID: LIB3040-011-Q1-E1-G5
gctcctttgtttgattagggttttttcgcttcttctattcactctgttacggtgcaacctagcagcctccaaatccaatggcttcagagaagagactttcgaacccaatgagggagataaaagtgcagaagctcgtcctcaatatctctgttggtgagagtggagatcgtctcaccagagccgccaaggtgttggaacaacttagtggccaaaccccagtgttttccaaagcaaggtacactgttcgttcctttgggattagaagaaatgagaagattgcatgctatgtcactgtcagaggtgacaaggcaatgcaacttttggagagtggtttgaaggtgaaggaatatgaacttctcagaaggaacttcagtgatactggttgctttggctttggtattcaagagcatatcgatttgggaatc

SEQ ID NO: 15852 - DNA, 84 bp, Glycine max
  Clone ID: LIB3040-011-Q1-E1-G6
ggattgattccctcattcttcatccatagacatggccaccgtcacttctgcagccgttgctattccctcattcactggcctcaa

SEQ ID NO: 15853 - DNA, 395 bp, Glycine max
  unsure (1)..(395): unsure at all n locations
  Clone ID: LIB3040-011-Q1-E1-G7
gactcttacaaacataacacattcagatactcactcacctgtttttagtagtttcttccctattttctgttcataactcagtttgtaactatgactgctgaggttatggctcaagaggagacacaagcagctgaggttgttgttgctgttgagcccctgaaagaggagaaggttgctgaagaaaatgtgaaaccaagagagtcatcagtggaagcatccaaacccaaaatggtggagaaaagctcttcttacaaggaagaaagcaactacctttctgatctcaaggagtttgaaagaaaggctttgagtgaactcaagtcaaagcttgaggaagctatcttggggaacaccctttttgagccaaagaaggaggctttgctanagaatgaagagaa

SEQ ID NO: 15854 - DNA, 375 bp, Glycine max
  unsure (1)..(375): unsure at all n locations
  Clone ID: LIB3040-011-Q1-E1-H12
gctccttttcttctctccagacaatttctctcgcctctctctctctacaaatccttcattctttcttctcttcgctgctcactgtagccatggctttcagagtatgatgagcgggagggggaaatgtctcttctggcatgggtgttgctgagcataatgtaaacaccttcctggaattgcagaggaagaaagttcatcgctatgtgatttttaaaaatgatgagaaaaagaaaaggttatcgtttgaaaaactgganggcctgctgagagctatgatgatttcactgcatccttgcctgaacatgattgccgatacgctgtctttgactttgattttgtgacatctgagaactggcaaaagagccaaatcttttt

SEQ ID NO: 15855 - DNA, 351 bp, Glycine max
  Clone ID: LIB3040-011-Q1-E1-H3
ggaagagaggatactgcagcagcaggaggaatttgacactcctgaaaaggagactggaaaaaattgagttgcacctgtgttcaaagcaagggtgtaaagaggaaaatgagtcaaaagatgtggagtcaagtgggtttatgaggaggctattgcgtgtttacaaaagtgaggatgatcctggaatggtgaagtcaatggatttggacatggatgatcaagaaccccttggccgcaaggtaaacatcgttggtggagttatgtgcaggagtgattacaatgttaaacaagactcttcaaatcaacctggtccgaatgctttgactggtgtaaaagaagatgctcaagtttttt

SEQ ID NO: 15856 - DNA, 138 bp, Glycine max
  unsure (1)..(138): unsure at all n locations
  Clone ID: LIB3040-011-Q1-E1-H4
aaacctaaccggnaggagtatgcaagatcttaaaaatcacaaaccggcagtcctaaaggttcaaacctaacttatccttgaatgcaagttcaaaccccttcaatatggtcaccaaatttcatttcattggccttcgtt

SEQ ID NO: 15857 - DNA, 426 bp, Glycine max
  Clone ID: LIB3040-011-Q1-E1-H5
gactttcacaccaccttcttcttcttcttaagggttcccattcaatttatatttctttcacttcatggaaacgtaaaactcttctctctcttcatctttctctgttcctcacaattcactaccccctacaaatatattcaaggtcccatttttctcatctgggtcatcaacttaatcatctctctcttgttctctatccaattaattgcttttccctctgagtttctctccaccttgttgttgttgcaacttgatttcatggttgcaaaatgaagtgtttcttctttaaggagaagagcaaatccgccccggaactgcacaagaagaaaacccccgccgtgaaccgcgccgcaaactccaccggctcagtgtcttcaccgaagagcgtgaaggacttgtacagagagaaagagcacagcttcagag

SEQ ID NO: 15858 - DNA, 335 bp, Glycine max
  Clone ID: LIB3040-011-Q1-E1-H6
accacaccctcaaaaccatttccaactaccaactactctctctatcactctcccatggcttcctcttccctctttctctcactctctctcaccctttgccttgtttcctctctctgctatgctcacaaatcttccttaaccctacctgtgacaaaagacgattcatcccaccattacctaacaaccctctcttatggcacccctgttgagtctgcaaaattcgtgcttgatctccgtggttcaatcctctgggctgactgtgcatccagaaccaccccatcttccacccttgccccaatctttcaccgttcagttcgctgcctcacggcaaaggg

SEQ ID NO: 15859 - DNA, 413 bp, Glycine max
  Clone ID: LIB3040-011-Q1-E1-H7
ggcgttccttctccttctgtccgctgcgactctctttccttccctctttttccgaatctgaatcgaaatggcttcggagactgagacgtttgcttttcaggccgagatcaaccagctcctcagtctaatcatcaacaccttctacagcaacaaggagatctttcttcgtgagctcatcagcaatgcctctgatgctttggacaagattcgatttgagagtcttacagacaagagcaagcttgatgctcagccagagttgttcattcacattattcctgacaagaccaacaacacattgtctatcattgacagtggtattggcatgactaaggccgatttggtgaataacctcggtactattgcaaggtctgggaccaaggaattcatggaagccctggctgctggtgctgatg

SEQ ID NO: 15860 - DNA, 290 bp, Glycine max
  Clone ID: LIB3040-011-Q1-E1-H8
ggttcccaattcatcgtggcctccgcctcctttaacccccccctccaatcccaaatcgaaaaaaattcgttttaagttcccccaaaggaaccttaggttgcacaaccaaaggatttggaaccaatccccggtggaaaaattgcaaaacccaaatttcccccggccgttaaaaattatgaaaattaccatgtttgctatggaggtcaagaggaagagagaaaagctaattataccgatatggttaataaatactaagattctgttaccagcttttatgaatttggctgggg

SEQ ID NO: 15861 - DNA, 363 bp, Glycine max
  Clone ID: LIB3040-012-Q1-E1-A1
gacaacacagaacataaacaaagaaaaaaaaaacccttagccaacacaaccatcatggccacctctgctattcagcaatcagcattcactggtcaaactgctctgaagcagctcaatgagttcgtccgcaagaccggtggcgccggcaaaggtcgcactaacatgcgccgcaccgtcaagagtgctcctcagagcatttggtatggccctgaccgtcccaagtacttgggtccattctcggagcagattccatcatacctgaccggagaattccctggtgactacggatgggacactgctggattatcagctgacccggaaaccttcgccaggaaccgggagctggaggtgattcacagcaga

SEQ ID NO: 15862 - DNA, 368 bp, Glycine max
  unsure (1)..(368): unsure at all n locations
  Clone ID: LIB3040-012-Q1-E1-A2
gatactcaattcattttcttcttctgcttcaccttctcttctcttctctcatagggttagggtttttttctcttcattgctctctctgtcgttttatttccatggctcagcaagatgctcagaatggtgggtcggagaatgccgctgctgcggtgtcgtttgtcgctttgaagccgcagctcctcatcgaagctctcaaagcgaacgacgccgttctgttctacaacgccgcgtttgccgctgatgaggttggccgtacgctcaaccctaagcgtaaagcggagcacgagcttcctctcatactctccgcagagctcaaaatcgctggctctaccattctcgttgctgnactcgttgatgactctgct

SEQ ID NO: 15863 - DNA, 397 bp, Glycine max
  Clone ID: LIB3040-012-Q1-E1-A3
gactcaccacttcaaaacactcataacacaaagcacaaagcaaagctcatccttgagttaaaaaaatggcagcagcttcttccatggctctctcatccccatccttggctggcaaggccgtgaagctgggcccatcagccccagaagtgggaagggtgagcatgaggaagaccgtcaccaagcaggtctcctcaggaagcccatggtacggcccagaccgagtcaagtacttgggcccattctctggcgagcccccgtcctacctaaccggtgagttcccaggcgactacggctgggacactgctgggctttccgcagacccagaaaccttcgccaagaaacgtgaactcgaagtgatccactccaggtgggccatgctcggagccttgggctgcgt

SEQ ID NO: 15864 - DNA, 353 bp, Glycine max
  Clone ID: LIB3040-012-Q1-E1-A4
gacagcaaaacaattttcaaactcaattaccattccataacctaaatctcctctttgtttccgagtcagagagcaatggcacgtaccaagcaaaccgctcgcaagtccaccggcggaaaggcgccgaggaagcaattggcgactaaagccgctcgcaagtcagctccggccaccggcggagtgaagaagccccaccgcttcaggcccggaacggtggctctgagggagatcagaaagtaccagaagagcactgaacttctgatccgaaaactcccattccagaggctcgtcagagaaatcgctcaggatttcaaaacagattttcgtttccagagcagcgctgtttctgcgct

SEQ ID NO: 15865 - DNA, 395 bp, Glycine max
  Clone ID: LIB3040-012-Q1-E1-A7
gggggaacacccaactgctatgaaaactgttttgcctcctaaggggtccattcatggttttggggctacttacatgatggatgaccctctaactgaaggaccaagtccaacttcaaagcttgtgggaagatctcagggaatatacgctttggcttcacaacatgagcctgggttgctcatggtgacaaattttctcttcactttgggcatttacaatggcagcaccctcagcattcttggcagaaaccctacatttataaaagttagagaaatgccaattgttgggggtactgggatcttcaaatatgcaaggggttctgctgtgcttacgacatatgtgtatgacatcaccggtggtgttgcaattgttgaatacaacgtgactgccatgcatg

SEQ ID NO: 15866 - DNA, 395 bp, Glycine max
  Clone ID: LIB3040-012-Q1-E1-B1
gaaagaaaaatgaaaatagtagaaaagaaggcattaggttaagagtgaaggcagtgagcgaaagagagcatagtaatacttactgagtgcttacagttgctgcgtcgcaaggtaccggcggcgacggagaactatcttctcaattttcgatcactgcattggttctgttgacaagggttttgttcttcctgacttgcatacttgatggcttcaaagttgcagaagttgcaggccacagcctctcaagcgtctcaatttgtatccagtcgtggaactaactactacaagcaattgctggaacagaacaagcaacacattcaggagcctcctacagtagagaaatgcaacctgttggcaaagcaattgttttacactcgccttgctagtattccgag

SEQ ID NO: 15867 - DNA, 388 bp, Glycine max
  Clone ID: LIB3040-012-Q1-E1-B2
gggttgctttcacttcttcctctctgcttcttcttcttccttgccctctctcgctattgagcttttctttttaacacggaatatgagtgacacaaaagggttttgaggctttctatcactctaaagctcttagctcattcacctcttgggtggtgtggtctattatgtaaattaccatttgtgcaattttttctcagatctatccaacttctcttttttatcctttattctgtttgcaaatcgccatcatcaccatttgatttgcaagaccataatttttctgctttggctttcccctcttccacatcatttttcaattttttttcctctgggtgttttcttcctgagaaaattttgttctttttggctaccctccaagcagatccta

SEQ ID NO: 15868 - DNA, 364 bp, Glycine max
  Clone ID: LIB3040-012-Q1-E1-B4
ggtagagactctattcaaacccacatctcagtctctatctcaagctacttcacagaaaatggcggtgcctctgctctcaaagaagatcgtgaagaagagggtaaagaagttcaagaggcctcagagtgacaggaaaatttccgtcaagactaactggcgcagaccaaagggtatcgattctcgtgttaggagaaagttcaagggatgcactttgatgccaaacattggttatggttcagacaagaagacccgccactatctccctaatggtttcaagaaatttgttgttcacaatgtgaaggatttggaactgctcatgatgcacaacaggacttactgtgctgaaattgccacaatatatcca

SEQ ID NO: 15869 - DNA, 375 bp, Glycine max
  Clone ID: LIB3040-012-Q1-E1-B6
ggaagaaaacccagaatcaaatcaaaaggtaaaaaacaaattaaaagaaaaagggaaaagtatactacgcagaagaggtggttcaaaattcaatggctgagaagaaggaaatgattccgcaacaatttgacatcgatgccaaatgggacgcctgcattgatctcaccgtccgtcgcttcgtctactccgcaaccgccggtgcatttggcggtctcctatttttcaggagtcctgtgactcgatgggcatctattgcttttggtgctggagttggaattggatctgcatatgcagaatgttctcgtctgttcgatggacctccaacaaatttacccttacctaaggtctccgaaactgctactcaggactctgatt

SEQ ID NO: 15870 - DNA, 371 bp, Glycine max
  Clone ID: LIB3040-012-Q1-E1-B7
gggatccgaggttcttaagtaacagaacacacaaaaccctagttagtgttagtgttcctcaagccaccgtaccgtgttgcctctctgcaatctacagccaaaatgcctttcaagaggtacgttgagatcgggagggttgcccaaatcaactacggcaaggaatatggcaggctcgtcgtcattgtcgacgtcattgatcagaacagagctcttgtcgatgcccctgatatggtgaggtcccaagtcaatttcaaaaggctttccctaaccgatattaagattgacattaagagggtccctaagaagaaagatcttgtcaaagccatggaggatgctgatgttaagaccaagtgggagaagagttcatgggg

SEQ ID NO: 15871 - DNA, 350 bp, Glycine max
  Clone ID: LIB3040-012-Q1-E1-B8
gactcttttcattctttctctgttctcatttcatcttctacacgcgtttctaatcattattagactcgatctcaacgatgaaggcaacactgctttgtccttgttcttctgctcctctgattctcgacacgcatagcaaccgaacctcggcaacgagacacgcttccaccgttgtttgttgttcgtcgaggaatcaaccctacatcccgaagctcgagccttttagccgaaccaaatttgaaagggccgttaaggaccctcctttgatcgaaaaatccgagagagagatcttagattattgttcaacgcttgaaggagaccaatcctatagctgctggcaggcttatttt

SEQ ID NO: 15872 - DNA, 282 bp, Glycine max
  Clone ID: LIB3040-012-Q1-E1-C1
gacagtgattcattttttcgaaaaccaaatccctaattttctgtctcttcaatggcgcctcagaaactgaccgattacgagcgcaaacggctcgagaacattcgccgcaacgatgaaatgatggctgcactcaaactccattccaaagctactcaactctccaacttcaagcgtccaagggtgggaaccaaatcctacaacatgaaatcggaaaagaaacccaaaaccgaaaccccaattgtgattaggcgctccctgcgaaacaagggaattttccgcaga

SEQ ID NO: 15873 - DNA, 335 bp, Glycine max
  Clone ID: LIB3040-012-Q1-E1-C2
cgcgtcacgacgggctgccgagaaaaacgacaaaaaggggatcaacattcaagttcgcaccaaattttcctctcaaaatgtcacgccgtggaaaaggtgggaaaggtttgggaaagggaggagctaagaggcacagaaaggttcttcgtgacaacattcaaggaatcacgaaacctgcgattcgtacgttagcgagaagaggtggcgtgaagaggatcagtggtttgatttacgaggagaccagaggagttctgaagatattcttggagaacgtgattcgcgatgctgtaacctacactgagcacgctatgaggaaaactgttactgctatggat

SEQ ID NO: 15874 - DNA, 332 bp, Glycine max
  Clone ID: LIB3040-012-Q1-E1-C3
gaagcctaaaaataaaatatcttgtcattcaattccactcacattcgccatatcgtcttctcccatggccgccaccgatgaatccctccgcaaatccctcgccgagaagcacgccgcagtggaagcccaaggcaacgccgtccgcgccctcaaggccgccaaagccgccaaacccgaaatcgacgccgcaatcgaagccctaaacgcgctgaagctcgaaaaaagctccatcgagcactccctcctcggcggctccgacagccgcgaggccttccgtcagtccgtggtgaacacccttgaacggcgcctcttctacatcccctccttcaaga

SEQ ID NO: 15875 - DNA, 254 bp, Glycine max
  Clone ID: LIB3040-012-Q1-E1-C4
atgctcctgttttctcacagtcccacaacagcaatggtagcaatcacacacggagttaataacatcaacatctctgattcttataataagaatcgcattcaggtctccaacaccaaaaagcctctcttcttctacgtcaatctcgccaagaggtatatgcaacagcataatgaggttgagctctcagcactaggaatggctattgctacagtggttaatgttgctgaaatcctgaaaaacatttagcttgccat

SEQ ID NO: 15876 - DNA, 225 bp, Glycine max
  Clone ID: LIB3040-012-Q1-E1-C5
ccgattgcttcatagaaatgtgtaaaaaatagaatcgctcttaaaagccgagtactctaccattgagttagcaaccccaatacaatttagaaaataacgtgggtgtatatatccaatcgcaataaaaacaataaaatgaaaagattgaattgtctaataaaatatcagacattcaaaaaaatagaaaaactcaaaatgttgaagtcgaattgattctcaacatac

SEQ ID NO: 15877 - DNA, 372 bp, Glycine max
  Clone ID: LIB3040-012-Q1-E1-C8
gactcaccacttcaaaacactcataacacaaagcacaaagcaaagctcatccttgagttaaaaaatggcagcagcttcttccatggctctctcatccccatccttggctggcaaggccgtgaagctgggcccatcagccccagaagtgggaagggtgagcatgaggaagaccgtcaccaagcaggtctcctcaggaagcccatggtacggcccagaccgagtcaagtacttgggcccattctctggcgagcccccgtcctacctaaccggtgagttcccaggcgactacggctgggacactgctgggctttccgcagacccagaaaccttcgccaagaaccgtgaactcgaagtgatccactccaggtgggc

SEQ ID NO: 15878 - DNA, 166 bp, Glycine max
  Clone ID: LIB3040-012-Q1-E1-D10
gggagggcgtgggcgagggaatcaagcagagcttgtactactatttatcttcatcctcatttttgtcgtcgtcgttcttcctttttccgttgttcatctggttcgtctcgcagggggagggcgggagtcgatcttgcgcgcttcgaggcttttcgaattgcgttca

SEQ ID NO: 15879 - DNA, 376 bp, Glycine max
  Clone ID: LIB3040-012-Q1-E1-D2
gatccaactctctaaacaacacattaacctttctcattccccatctcctcaccttattcagccactgctaatttctagggttccgaaatggacgctggcggaaagatcaagaagggcgccggaggaagaaagggcggcggccctaagaagaagccggtttcaaggtccgtcaaggccggtctccaattccccgtcggaagaattggccgttatttgaagaaaggaacgtacgcccagcgtgtcggtaccggtgctcccgtttacttggccgcagttctcgagtacctagctgctgaggtgcttgagttggctgggaatgctgcacgtgacaacaagaagaacaagattattccgagacatgtgccattggctgtga

SEQ ID NO: 15880 - DNA, 405 bp, Glycine max
  Clone ID: LIB3040-012-Q1-E1-D3
gaagctcagtgatcacaacctacgccgagtgaaaccccaatcccaatacactcccaactcacaaagccatgtctccaggtcctgttgtcgacgcttcccctgaggttgaagcagagcaacaacttccctccgtcgatgacgcaacccagttgaagaaatcccaaccgcaggaggatgatgctcccgttgtcgaggacgtgagggatgatgacaaggacgacgacgatgaggacgacgacgacgatgatgaagatgacaaggaagacgatgctctaggtggtgctgagggttcaaagcagagcagaagtgagaagaagagtcgaaaagcaatgttgaagctgggactaaaacctgtcaccggtgttagtagggtcacaatcaagagaacaaaaaatattcttttct

SEQ ID NO: 15881 - DNA, 326 bp, Glycine max
  Clone ID: LIB3040-012-Q1-E1-D4
taatacaacattttaacatgtgttggagttcagctccaaaactgatacacatttgtggatccatgatcgatctctcaaagcattgttgtccaaaaaagagagaaatgttttgaatgaagtgttattttcagccctgaggagggtttagaaactgaggcagctttttcagacacagcaaaaacaaaattgtaacagagggctttggcatttaattttgtggcagagtgtggcacacgagagggcatggcatcttcatatatcaaattacttttggagacagtgaaactaccataatgcaaaagccaaaagcagacaatttttttttc

SEQ ID NO: 15882 - DNA, 399 bp, Glycine max
  Clone ID: LIB3040-012-Q1-E1-D7
gagttatttattatctgaagttgcgagagtgaagaaatggcgcaagacttggcattggatttggaggagcttcgccgcctccacagcatcgccaaaagacctcgaaccctctctcttctctcctccgaaattcgtaacctcgaaaagttatcgtcagaggaagcttctgcgcagattccggcgccgatttcgaccggaactaaagtggcgccttcacctgcgctgaagtatgcggcactcgcgtcgttcagttgggaccaggatagtgacaaagttaagatatatgtgttaatggagggaatcgatgagaataaggttgaatccgagtttaagtcgatgtcattcgatgttaagttccatgatgttcaagggaagaactaccgatgtgcaatatcaaaa

SEQ ID NO: 15883 - DNA, 392 bp, Glycine max
  Clone ID: LIB3040-012-Q1-E1-D8
gggacttgtgcgttgaagttatagagagagacgagtttggagagaagagtgaagaaggcaaatcgcgaagactagatctgatctgagagaatggctcctcggtctagcagcaaggacgcccaagaccttttccgcgctctttggtctgcttatgctgcaacccccactaatctcaagatcattgatctctatgtcatctatgccgtattcaccgctttcatccaggttgtttacatggctttggttggatcatttccatttaactccttcctatcaggagtactttcttgtgtaggaactgctgttcttgctgtttgtctcaagatccaagtgaataaagagaataaggaattcaaggatcttgcacctgagcgcgcttttgcggattttgt

SEQ ID NO: 15884 - DNA, 272 bp, Glycine max
  Clone ID: LIB3040-012-Q1-E1-E2
gaggaaaaggaaaggaaagggaagccaaagcgaaaccctaaccctagcggagagatggcggagcacttggcatcgatattcgggacggagaaggacagggtgaactgtccgttctacttcaagatcggcgcgtgcaggcacggcgaccggtgctcccggcttcacacgaagcccacaattagcccaacgttggttctgtcgaacatgtaccagaggcccgacatgagcatgaacatcgtcaccaaccccgattagccccaaccccaatctct

SEQ ID NO: 15885 - DNA, 225 bp, Glycine max
  Clone ID: LIB3040-012-Q1-E1-E3
ggagacagggatttccatagctcgcaatacatcacacatgtctgagcacatccctgcgttaaaaaatgggagcaggttcttccatgggatctctcatcgacatccgtgggtgggaatgccgtgaagctgggcccatcagccccacaagtgggaaaggtgagcatgaggaaaaccgtcaccaaacaggtctcctcaggaaacccatggtatggcccataccgactc

SEQ ID NO: 15886 - DNA, 177 bp, Glycine max
  Clone ID: LIB3040-012-Q1-E1-E5
tgccaaaaaaccaccaaaaggggaagctacgttcagcatccccataattgagaaagatgagcatgaagaaaacagtcaccaaacgaagtcccctcaagacacactatgatctgacaaaaccgatctccagtacttgcagccaagtctctgacgacccttttgtcctactctaatgcg

SEQ ID NO: 15887 - DNA, 367 bp, Glycine max
  Clone ID: LIB3040-012-Q1-E1-E6
gacagcaaaacaattttcaaactcaattaccattccataacctaaatctcctctttgtttccgagtcagagagcaatggcacgtaccaagcaaaccgctcgcaagtccaccggcggaaaggcgccgaggaagcaattggcgactaaagccgctcgcaagtcagctccggccaccggcggagtgaagaagccccaccgcttcaggcccggaacggtggctctgagggagatcagaaagtaccagaagagcactgaacttctgatccgaaaactcccattccagaggctcgtcagagaaatcgctcaggatttcaaaacagatcttcgtttccagagcagcgctgtttctgcgcttcaggaagccgcag

SEQ ID NO: 15888 - DNA, 375 bp, Glycine max
  Clone ID: LIB3040-012-Q1-E1-E7
gacaaccctagctagcagtccctcagcattgtgtgcccacaaagcagctccttttcctgttccgttgagagaagatgggattttgggggacgcgggtgatggagattgtgaagaagcatgattctggagggctggtttggaagagaatcaagctcaccaccacccgaaaagccaatgctaagaagcgtcttcttcgggtttggcagaatgaagctgtcctcaaagcctgttctgctactcccaacgaacctcaacctacaccagtggctacaccagtggctagttaagttcaagcccagccatctcaatttcattacttttcttttcccttcccttcacaaatattgtcactacttttacggcttcagttacata

SEQ ID NO: 15889 - DNA, 400 bp, Glycine max
  Clone ID: LIB3040-012-Q1-E1-E8
gaacatttgtctctcatctttcaatttcaatcaacggttatacccttttctatttgagcatcatcatgtccaccgcagcgcagcccaaggccaagaaaacggcgtcgtccaagaagcccctctcccatcctaccttcgccgcgatgatagcggaggcgatagcgagtctgaaggagagaaccggttcgagccaatacgcgataaccaaattcatcgaaggcaagcacaaggagttgcctccaacctacaagaagcttgttctcgttcatctcaagaagtctgttgctgctggcaagctcgttaaggtcaaaaactctttcaagctcgcaccgactaagtctgctcctgttaaagccgctgctgctcccaagaagcccaccaaagctgcggctaagcccgc

SEQ ID NO: 15890 - DNA, 270 bp, Glycine max
  Clone ID: LIB3040-012-Q1-E1-F12
gtcgctctgaccgggaaaagaaaaaccagctttcttcaagcacctagatttcctctctctctaaatggcgttctcttcttttctcggcagagtcctcttcgcctctgttttcatcctctcaggttaccaagaatttaattcttatggagttgttgggggagtcgcagtaaaagcactcagaccgaagtttggtgccattgcacatcaggtacattcgaaggttgactttcaacttcgagatattgcgatgcaatttttaggtggggtggg

SEQ ID NO: 15891 - DNA, 381 bp, Glycine max
  Clone ID: LIB3040-012-Q1-E1-F2
gaagggaatgggtgggtctagcagtagcagcaaggacgcccaagaccttttccgcgctctttggtctgcttatgcttcaaccccaacaaatctcaagatcattgacctctacgtaatctatgccgtcttcaccgctctcatccaggttgtttacatggctttggtgggatcatttccatttaactccttcctatcaggagtactttcttgtgtaggaactgctgttcttgctgtctgtctcatgatccaagtgaataaagataacaaggaattcaaggatcttgcacctgagcgtgcttttgcggattttgttctctgtaatttggtgcttcatttggtgatcatgaacttccttggttaaattgggtcgtgtggctgttg

SEQ ID NO: 15892 - DNA, 251 bp, Glycine max
  Clone ID: LIB3040-012-Q1-E1-F4
ggttcaaattcgaatcaagcgcttcgcctatgcttttgcctactgttcacactgtcactaccactgttcaagttctaactaaacacttcggcgcagtctgtggttctgcacatgatgtccctggcagtgatgggtccgaacgatgtcctgatgaccaaatccggtgcaattcgcatcatcatcatgctcgctagtggtccccgtgatatcatccttaccaaactcggtcacactcgcatgatcgagatgca

SEQ ID NO: 15893 - DNA, 350 bp, Glycine max
  Clone ID: LIB3040-012-Q1-E1-F5
gagttcacattaagggatcgtcttctgcagaaatttgcgccatcgtcgagagaagcgtgagagacttctcgtttatgatgagagctaagatagtttagttgtcaagtcataaatcagtatcatcactttaaatttcattagaagctgtcaaaatgtcacggaagggtttgatggagcaagacctgagtaagttggatgtaacaaagttgcatccactttctccagaagtcatatctcggcaggctactattaatatcggcactataggtcacgtggcccatggcaagtcaacagttgtgaaagcaatatcaggtgtccagactgtgcgtttcaaaaatgagttggagcgt

SEQ ID NO: 15894 - DNA, 400 bp, Glycine max
  Clone ID: LIB3040-012-Q1-E1-F6
gacacttactagtagtaagcatggagtcctcaaagatctatgcttacctcttcctctgcatgatctttctctcttccgccactcccattctcggttgtggctactgtggcaaaccccccaaaaagcacaagcctggtaaaacaccaaagacacccaaaacacccgttgttaagccaccagtcaccatccctcccattaatgttcctcccgttgttcttccaccaatagtgaagcccccaggtattctccctccaattccaattattaacccaccaaccacaccagggaagggagggaacactccatgcccaccaccaaagtctcctgcgcaggctacgtgccccattgacacgctcaaacttggtgcctgtgtggatcttcttggagggttggttcacat

SEQ ID NO: 15895 - DNA, 386 bp, Glycine max
  Clone ID: LIB3040-012-Q1-E1-F7
gagcgaaacagagagtgatttcagtgagtgatcggtgttcacttgatctcatcataatcgtcagcgtcaattgaagaagatgccgatcagaaacatcgccgtcggaaggcctgaagaggcgactcaccccgacacgttgaaggcggctttggctgagttcatctcaaccttcatcttcgtgttcgccggctcaggctccggcatcgcctacaacaagctcaccgacaacggcgctgccacccctgccggcctcatctccgcctccatcgcccatgcattcgccctcttcgtcgccgtctccgtcggcgccaacatccccggcggccacgtcaaccccgccgtcaccttcggcgccttcgtcggcggcaacatcaccttcctccgcg

SEQ ID NO: 15896 - DNA, 356 bp, Glycine max
  Clone ID: LIB3040-012-Q1-E1-G10
gaggaacaagaagcgaaaatataacaaataatttgtactttcatcaaaacaaaatcccgttgtatttttctcagatggctcgaacgaagcaaacggcccgcaagtccaccggcggcaaggcgccgcggaagcagctggcgactaaggcggctcgcaagtcggctccggcgaccggcggcgtgaagaagccgcacagattcaggccgggaaccgtggcgctgcgcgagatccggaagtatcagaagagcacggagctactcatccggaagcttccgttccagcgcttggtccgcgagatcgcgcaggacttcaagaccgacctccggttccagagctccgccgtctccgcgctccag

SEQ ID NO: 15897 - DNA, 319 bp, Glycine max
  Clone ID: LIB3040-012-Q1-E1-G3
gacttcacaactcaaactgcttcattgcattattgcagataagatcaaccctactcccttcagattcgggccaagatggcatcacttcatgctaatgtgacatcagttgtttgcaagagtggcaaccatgcttctcaatcgaaattcacaagctcttcattcttgcctgggtttgatgttgttggtcgtgcttcaaatgcttggaagaaagaacttgtcccatcttccatttccttggtgcctagagccacactaacatttgatcccccaactaccaactcagacaaaaccaaacaaaggaagcacactgttgaccctg

SEQ ID NO: 15898 - DNA, 319 bp, Glycine max
  Clone ID: LIB3040-012-Q1-E1-G4
ggggaaaccctaattctgcgtggtgagtgaaaatggcggtacccttgctctccaagaggatcgtgaagaagcgcgtcaagaagtttatacgcccccagagtgatcgcaagatctccgtcaagccaagctggcgcagacccaagggtattgattctcgtgtcaggagaaagttcaaaggatgcactttgatgcccaacattggttatggctcagacaagaaaacccgccattatctaccaaatggtttcaagaaatttgtcgtgcacaatgtgaaagacctggaacttctcatgatgcataacaggacatactgtgctga

SEQ ID NO: 15899 - DNA, 389 bp, Glycine max
  Clone ID: LIB3040-012-Q1-E1-G5
ggattcggatagcgaaagcaatcccccacccctaattttgatttgtgtcgaggaaaggacaggtcttggaaccctaaccgcacctctctctttcttcccgtgtgcgtcaaagcgaagcaacgcgacacgatggtgttctacttcaaagcgcgccccgaagccggcgatttcaccatcttcatgggccttgacaagtacgagaacgaggaactcatcaaatacggttttcccgaagacatctggttccatgtcgataaaatgtcttcagcccatgtctatgtcaggttgcacaaaggccagaccatcgatgacatgagtgaaggtttactggaagactgtgctcagcttgtcaaagcaaattcaattcaaagaaataaagtgaacaatgt

SEQ ID NO: 15900 - DNA, 356 bp, Glycine max
  Clone ID: LIB3040-012-Q1-E1-G6
gacacagacgaatattcattgcatttagatgcagcatcagcttataacaacaattaaacatgagtgcagccagcatagcttggtttgtggcatcaagcagtggagcagtggatgcattgaacgatcgattgggggtgtgcaagtggaaccatgcattgaggtcactgcagcatcaagccaggagcgtcattatctgctacaggcaagccaatcccttgtcatctgctacttcagctgcggtcgccaataaggtcaataggaccaaggacgagtccatgaggaaagtcatggacttgagctgttgaggtcacaatacatcaacgtttcactgtgtggactattcgaattgcattcat

SEQ ID NO: 15901 - DNA, 360 bp, Glycine max
  Clone ID: LIB3040-012-Q1-E1-G7
taatttgggaattattgctcccatcgccattggtttcattgtcggcgctaacattttgttgggtggggccttctctggagcggccatgaaccccgctgtgacatttgggcctgctgtcgtgagctggacctggaccaaccactggatctactgggccgggcctctcatcggtggtggaatcgctggccttgtttacgaggttgtctttatcagccacacccacgagcagcttcccaccactgactactacagggggggaaatgaaaataacaaaaaaaaaattgtgtattattgaatttctctggaatcttcttctgtgtatggttttccttccttgtgttttcttcctaattcactttc

SEQ ID NO: 15902 - DNA, 395 bp, Glycine max
  Clone ID: LIB3040-012-Q1-E1-G8
gacacaccgtttgttctattcttaactcaacttctgctacccactctcttcttccaagtccaaccacgcttttctctacagtcatgggcaaggtcaagatcggaatcaacggatttggaagaattggccgtttggttgccagagtcgctctgcaaagagacgatgtggagctcgttgccgttaacgaccctttcattaccaccgattacatgacatacatgtttaaatacgacagtgttcacggacactggaagcatcacgatgtcaccgttaaggacgagaagacccttctcttcggtgacaagccagtcactgtttttggacacaggaaccctgaagagatccatgggggtcaactggagctgatatcattgttgagtccaccggagttttca

SEQ ID NO: 15903 - DNA, 313 bp, Glycine max
  Clone ID: LIB3040-012-Q1-E1-H1
ggccttgtttcagttctttctttggtcactcagtgctctctaacctagttccacatttttccactcaccaagtctctatctttcatctcacatttcgcttcattcacatcacttctctgatctgtctcttcactctctttgacccacatcaaattttttaccttttgttcctctctctttctctccgttagtgctttgcttcaaatcattctcattaaacccaatgcttccatctgggtctaccctctttctggatttttgttaactgattttgtaatatgggttgttttttatatgccaaactttgattcaa

SEQ ID NO: 15904 - DNA, 396 bp, Glycine max
  Clone ID: LIB3040-012-Q1-E1-H10
taaaatatattgacgaacataatttttaaataacatttaaaaaaatactaaaaattattaaaaatattatttatcaaataattaaacaaacattttaactcataaaaaaagaaaaaatgaattgaaataatttgtccagcatattcattatcgaaaaagttagtgttcatgggactactctatttaatttggcatatctttagcatgtataaaacggcactctaaaagtaaatcatataaaatgattgaaaaaatttatttcacatgcttcgtttatgatccttaagcaaggctgttaaaagaactgagagaattggactcaaccaaacggtccaaaccataaataatcagatattttaaaattgataagaaaaatatgagtaaattgggcttttt

SEQ ID NO: 15905 - DNA, 296 bp, Glycine max
  unsure (1)..(296): unsure at all n locations
  Clone ID: LIB3040-012-Q1-E1-H2
gattcaccacaaccctctctctatattccattgccacccagttttgaatatatttttattccttctttgtttcttcactttcttccatacacataaccatgtcttctcagactgttgtcctcaaagttggtatgtcatgtcaagggtgtgctggagcagtgaacagggttttgggaaaaatggaaggtgttgagtcatttgacattgatctgaangagcagaaggtgacagtgaaaggaaatgtggagccagatgaagttctgcaagccgttttcaaatctgggaagaagactgca

SEQ ID NO: 15906 - DNA, 346 bp, Glycine max
  Clone ID: LIB3040-012-Q1-E1-H3
gacggttttgtgctgttgtcgctgcgcatcctccatagtctccttcctctacatctcaacatgaagccatggggaatacacatggaatgggagctgctcgcaagctcacagtctcaccgcacgaggcaaaagtgggctgatatgtcatacggtatatcccatcttgggaatccatggcagaaatcttttgccggttcagcccatgccaatggaactgtccttgaaagcataggtattgtatctggacatcccaactctgctattcgtaactgtgccatagttcaacttatcaataatgggtaataaattgcagcttttgtctctaatgatggatgcatgaactaca

SEQ ID NO: 15907 - DNA, 383 bp, Glycine max
  Clone ID: LIB3040-012-Q1-E1-H4
cttcccaggcctacgaacgcgtccgacaggaggacagaaggggatggctgctaccatcatcacatgcaagctctcactgcttttaagccttctctcagtttcactattgctgggtgtgagttcatcagatacccttcagaatgtaggggcaattcccccaacatgcaagcgcatagagtgtcccagctatgatgtcattcactttggcaacggctacgaaatccgtcgctataattcacccgtttggatttcgaacagccccattctagacatttctctggttgaagccacaagaaccggcttcaggaggctatttgattatattcaaggtaagaataactacaagcagaaaattgagatgacagcgcctgtgatcagtgaag

SEQ ID NO: 15908 - DNA, 256 bp, Glycine max
  Clone ID: LIB3040-012-Q1-E1-H6
ggaagtatgcctggaaagcaaaagtgaggggtagtggtagaaggataaggtgactataaaccgtggaaacggtggtgtagtgtgtgagtgtcattgtgaagttggaaacaatgctagcttcttcgctctccttcctccattcttgcacattcccctcttcctcctccttattgtcaatttcaactccaaaccccaaaccctctcacttcctaactttcgttgtccaagccaaagacaagacccgcaaggaaaacaa

SEQ ID NO: 15909 - DNA, 272 bp, Glycine max
  Clone ID: LIB3040-012-Q1-E1-H7
ggaactgccaatatagtttgcaggcagaatacttctgtggacaagcctgaagaagctactgtcattgagatgaatgaacctgtgtccttgacatttgctttgcgatatatgaactcttttacaaaggcaacgccattgtccaacacagttaccattagtctgtcaaatgagctgccagttgtagtcgagtataagattgctgagatgggttatgtgcggttctatttggctcccaagatagaagaggatgaagaagatacgaaacctcaagt

SEQ ID NO: 15910 - DNA, 151 bp, Glycine max
  Clone ID: LIB3040-012-Q1-E1-H8
gacggcactcgttttcgttctcgcactggtttaaagatctctgccaatgacgctaacagctgcgcaaccaaagatgcagaacgacgaaagacagatcactgagctttacattcctaggaagtgctccgccacaaacagattgaatatcgct

SEQ ID NO: 15911 - DNA, 248 bp, Glycine max
  Clone ID: LIB3040-013-Q1-E1-A10
taatttgggaattattgctcccatcgccattggtttcattgtcggcgctaacattttgttgggtggggccttctctggagcggccatgaaccccgctgtgacatttgggcctgctgtcgtgagctggacctggaccaaccactggatctactgggccgggcctctcatcggtggtggaatcgctggccttgtttacgaggttgtctttatcagccacacccacgagcagcttcccaccactgactact

SEQ ID NO: 15912 - DNA, 354 bp, Glycine max
  Clone ID: LIB3040-013-Q1-E1-A11
gtcgaatatattcacaagcatgtttggagctgtgccgtgagatgaacatcatggcaattgatctgtggtctgcactccagaaaagggttgactggagagaagtttgcttcacggatggaattcatcttacttctgacgggagcaatatagtggcaaaagaggtattgaaggtcatcaaagaagcaaactgggaaccttgcctgcactggaggtcaatgccaactgaatatggagaagattcaccttatgatcctgttggccctgatggtaagacaagtttaaatatctccaactggatcttccttgaaaccaaggaatgggactagagttatgtgtatttgaaaactatagaca

SEQ ID NO: 15913 - DNA, 397 bp, Glycine max
  unsure (1)..(397): unsure at all n locations
  Clone ID: LIB3040-013-Q1-E1-A12
ggatgcagatgcagcctatcatggcagcctactaccccaacaacgtcaccactgatcacattcaacagtacctggatgagaacaagtccttgatcctgaagattgttgaaagccagaattctggcaagctgagcgagtgtgcagagaaccaatcaaggctgcagagaaatctcatgtacctagctgcaatagctgattctcaaccccaaccatctccaatgcctggtcagtatccttctagtggacttatgcagcagggagcacactacatgcaggctcagcaggctcagcagatgtcacaacaacagctaatggcttcgcgctcctcactcttgtactcccaacagcctttctcagtgcttcaacagcagcnaagcatgcacagcaacttggcatg

SEQ ID NO: 15914 - DNA, 369 bp, Glycine max
  Clone ID: LIB3040-013-Q1-E1-A2
ggttctagtgtgtgattgtttgttgttgtaactcgttcttcttcttttgttgttctgtggttgtgtttgttttttctctcacctgaaaatgtcttgctgcggtggtaactgtggttgcggaagctcctgcaagtgcggcaacggctgcggaggctgcaagatgtacccagacttgagctacactgagtcaaccaccaccgagaccttggtcatgggagtggcacctgttaaggctcaatttgagggtgctgaaatgggtgtgcccgctgagaacgatggctgcaaatgtggaccaaactgctcctgcaacccctgcacttgcaagtgaggtgttgggagagcatgcttcaagcagagatagcccttaat

SEQ ID NO: 15915 - DNA, 53 bp, Glycine max
  Clone ID: LIB3040-013-Q1-E1-A3
gagacctcaggtcaagcggggctacccgctgagtttaagcatatcaataagcg

SEQ ID NO: 15916 - DNA, 443 bp, Glycine max
  unsure (1)..(443): unsure at all n locations
  Clone ID: LIB3040-010-Q1-E1-D11
ggaaagtgcctgaagctaactccaacactctaataatcattcggattcaggggaaaaaggacatgcatccgaggacgaggaaggtgttgtacagcttggggttgaggagaagattcagtgctgtgtttgtgaagccaagtgagggaataatggccaagcagcagagggtggaaccatatgtcacctatggatatcctaatcttaaaagcataaaggagctaatttacaaaaaaaggacatgcaaggatggaacagcgaaaagttcccttgactgataataacattattgagcaggaattaggaaagttcggtattgtatgcatagaagacatggttcatcagatttataatgctggtccacactttaaggaagttgttagatttatgtggccctttgagctcaacatgccagctgaaggattganaagatcaaaaacctcatt

SEQ ID NO: 15917 - DNA, 375 bp, Glycine max
  Clone ID: LIB3040-008-Q1-E1-C4
gagggtttacaccgaggagacacaccttcagcagcagcagccatggttctcaaaaccgaactatgccgattcagcggtgccaagatctacccagggaaaggcatcagatttgttcgtggtgattctcaggttttcctgtttgctaactcgaaatgtaagaggtatttccacaacaggttgaagccatcaaagctcacctggactgcaatgtacagaaagcaacacaagaaggacattgctcaagaagctgtgaagaaaagaagacgtgctgccaaaaagccttactccaggtccattgtcggtgccactttggaagttatccagaaaaagagagctgagaagccagaagttcgagatgcacatagggaaactgcc

SEQ ID NO: 15918 - DNA, 364 bp, Glycine max
  Clone ID: LIB3040-008-Q1-E1-C5
gggtcacttccaccacctcctctctcttcttggcttggtagagagaaaataaaaaaaaacacaaagctaaacacagacactactgttacagaatctagtaaaacagtctccagaaacacaaacctgagttaagaaaaacaacaaacaactgagcttttgattgaatttttaaccattctcatctgaacatggcttgttcagtgcatctccttcttcttcttacttcacttctggctttgttctttaacccaacatgtgtctatggcaatgatgagcttagaacacttttggacgtgaaatctagtttggatccagaagggcactttctgtcctcatggactagtgatggcaacccatgtggtgg

SEQ ID NO: 15919 - DNA, 283 bp, Glycine max
  Clone ID: LIB3040-008-Q1-E1-C6
gagcaacatggtgaagctggtggagagatttacttgccagaagcttacgttagaaccaagaggactacttaatggagcaaatcagttggaagaacttgtagctagcttcccaactggcttatctgagtgtggagaagcattatcaagccttacgagtaggagaacgagtactgtttgtgatgaatgtctatggtttaagaaatctgtctttagtcaacttgtgtgttttgttattcagttctcagcaataaactgctctggcaatctagtttcatgtcaaaaa

SEQ ID NO: 15920 - DNA, 395 bp, Glycine max
  Clone ID: LIB3040-008-Q1-E1-C8
ggttgttacttttgctttaacacattacactcacactctttgtgacaaaggggagtttcttattctttctagacgcttccattgatcggcgatttcttagacatggcggagcatcacgaacacgaggaagtgaagggtgagtccttgttggagaagatttctgggaagatccacgaccacgattcgtcatcttcgtcggattccgacaacgagaaaaccagcgcttctgactccttgaagtcaaaggttttcgggcttttcggcagagaaaatcccattcaccatgttcttggtggcggaaaaccggccgacgtttttctctggagaaacaagaagatatctgcatcgacactcggagttgcgaccgctatatgggttctgtttgaattgcctga

SEQ ID NO: 15921 - DNA, 364 bp, Glycine max
  Clone ID: LIB3040-008-Q1-E1-C9
gcagctgcgaaaacctagtgcaccgtaagggttgtgaagcaggcagagaagagccatggtgcacgtttctttctaccgaaactatgggaaaacgttcaagaagcctcgtcgtccctacgagaaggagcgtttggacgccgagttgaagctggtcggtgagtacgggcttcgctgcaagagggagttatggagggtccagtacgccctgagccgcatccgtaacaacgccagaaacctattgacccttgatgagaagaaccctcgccgtatcttcgaaggtgaagcccttctccgaagaatgttccgttacggactcctcgacgagacacataaccagctgggattatgtggtgggcctcaccgt

SEQ ID NO: 15922 - DNA, 402 bp, Glycine max
  Clone ID: LIB3040-008-Q1-E1-D1
gaagcaggcggcatggcattctcagcggtctggcgactagcgaatcttgggcgacacttggatttgagtgaatcagtgaacaaggctgcgccagttgggtcaatcaagttgaaggtagcttcagaggtttctgaagcattatcactgggtcgtgctgttgttgctcttgaatctaccattatttcgcatgggatgccatatccccaaaatttggaaactgcaaaagaggtggaacgtattgtaagagagaacggtgcagttcctgcaaccattgcaattttagatggcacgccttgtgtaggcctaagtgtagaagaacttgaaaggctagctattttgggaaccagagctcagaagacagctcgaagggacatcgcacatgttgtagcttgcggtggaaat

SEQ ID NO: 15923 - DNA, 203 bp, Glycine max
  Clone ID: LIB3040-008-Q1-E1-D10
ggcatctcagctagaatgtcaacaggagtgagccaccataggaaggactacgtcaactctcgtctagcccccctcatcgacttggccgagattcagctctggtccttcgtcagagccctcatcctcgagtttaactccacactcctcttcctctacatcatcgttgccaccgtcattggccacaaaaaacagaccggaccatg

SEQ ID NO: 15924 - DNA, 373 bp, Glycine max
  Clone ID: LIB3040-008-Q1-E1-D11
gggaaacacgcgaatggctgctactgctccttggttttttagttgttgtgttgttgtcttcaactccacacagttccctcacttctcttccctttgaccattcaaccttcctcgcctttgcctccgtttccgtgactgagatggctggaggtgttattcagcagatattgaggaggaaactccaccctcggtttactaactctcccttgttgtcacccatcgtagcaaaaaaagatgatgctggctctactggcagtcagtccttaagagcacttgcattaattggagctggtttgtcaggtcttttcagtttttcaacaatggcagcagctgatgaagctgaacatggcctggcatgtccaagctatcaatg

SEQ ID NO: 15925 - DNA, 343 bp, Glycine max
  Clone ID: LIB3040-008-Q1-E1-D12
gactcactcatacaatagagaccagcttttgcttctttgtgaacatggagatgaggaaatcatgtggcttcttcttcttgctcctcctccttgtctttgcttcccaggtggtggtgcaggcggagggaagagtgtgtgagtcgcaaagccacgggttccatggtttgtgtaatagagaccacaactgtgctttggtctgcaggaacgaaggtttctccggtggcaggtgcaaaggcttccgccgccgctgcttttgcaccaggatttgttgagatctcatcaaacactactcttgccatgcaaattaataaatcatagctaagccaaataaattgcatctact

SEQ ID NO: 15926 - DNA, 364 bp, Glycine max
  Clone ID: LIB3040-008-Q1-E1-D2
gatcccatttgaaatcaatatcaacaacaccaaatcctctaattcaagtttgcaccatgttttcctgagaaaatgtctggtcgtcgacacggtggaaatggtttgggaaaaggatgtgccaagaggcacatgaaggttcttcacgacaacattcatggcattacgaaacctgcgattcgtaggtcaccgagaatacgtggcctgaaaaggatcagtgctttgatctacgaggaaaccagaggggttctgaagatattcttggataacgtgattcgcgatgcagtgacctagacctatcacgctaggaggatgacggttactgccatggaatttgtttatgcacccacgacacagggaaggaccc

SEQ ID NO: 15927 - DNA, 379 bp, Glycine max
  Clone ID: LIB3040-008-Q1-E1-D3
cattctcaaattatcttggtgacaataaatctgagtgggaggattacgatgccactcgtttagtaacaaagtttcccaatgtttcgtccaccattttgattgatcagggagaagatgacaaatttttgcctgataaactgttgcctcacaagtttgaagaggcttgtaaaaaggccaacgttcccctactgttacgtttccaacctggttatgaccacctttactactttataaccacattcatagatgatcacatccgacatcatgctcaagctcttagacttaattaagttatgtgcactctgattatctataactattttgtcaactcttctaactttactaagctgttcatttgctcgtggtaccatgggttgta

SEQ ID NO: 15928 - DNA, 223 bp, Glycine max
  Clone ID: LIB3040-008-Q1-E1-D5
ggtgtgtttctcagagaatcgctcttcttccatcctttcctctcctctctccgcatttcccaagagcagatattagaagatggcagacgctgaggatattcaaccccttgtttgcgacaatggaacaggaatggttaaggcaggatttgcaggagatgatgccccacgtgctgtgtttcctaccattgttggtcgtcctcgtcacactggtgtgatggttggt

SEQ ID NO: 15929 - DNA, 249 bp, Glycine max
  Clone ID: LIB3040-008-Q1-E1-D7
ttccgagttaaaagggtatatgcttcgttacattaccctgaaccattattgttcgttcttttttgtttttgctcctgctgtgtgatatagttctccattattcaaactgtgaagtgatcaacattatgcttctatttggtggtttaaaaaactaaaaaaaaaaaagcaaaaaaaaaaaaaggtacagagaaaaaagcgaacaacaaacagagacacaattaaaaaaaaagcgggcgcctaaaaggatcc

SEQ ID NO: 15930 - DNA, 370 bp, Glycine max
  Clone ID: LIB3040-008-Q1-E1-D8
gactcaccacttcaaaacactcataacacagagcacaaagcaaagctcatccttgagttaaaaaatggcagcagcttcttccatggctctctcatccccatccttggctggcaaggccgtgaagctgggcccatcagccccagaagtgggaagggtgagcatgaggaagaccgtcaccaagcaggtctcctcaggaagcccatggtacggcccagaccgagtcaagtacttgggcccattctctggcgagcccccgtcctacctaaccggtgagttcccaggcgactacggctgggacactgctgggctttccgcagacccagaaaccttcgccaagaaccgtgaactcgaagtgatccactccaggtgg

SEQ ID NO: 15931 - DNA, 348 bp, Glycine max
  Clone ID: LIB3040-008-Q1-E1-D9
ggcgcattgaacgaaaattagggtttgtagtgtagcaggaagaagcagcaatggcgccgaagataacacgtaaggttagcagaaaccctgaattgataaggggaatcggaaagtactcgaggtcgcagatgtaccacaagaggggcatttgggctatcaaggccaaaaacggtggcgttttacctcgccacgaccctaaacccaagcctgaagctcctgctgaaaaaccacccaaattttaccctgctgatgatatcaagaagccccttgtcaacaagcacaaacccaaacccgctaagctcagggctagcattactccgggaacagtgttgattcctcttgctggta

SEQ ID NO: 15932 - DNA, 395 bp, Glycine max
  Clone ID: LIB3040-008-Q1-E1-E1
gatgccgaaaagtagtaccaagatggcttcagttgtgtatctcctctttggcttccatctcattgttatcatgtcaagttccttacccgcaactagtgaagtgtttgcaaaacagtatccatccacagaacccgtggaagaaaaactcacccaactccacttctatttccataacaacataacgggggaacacccaactgctatgaaaactgttttgcctcctaaggggtccattcatggttttggggctacttacatgatggatgaccctctaactgaaggaccaagtccaacttcaaagcttgtgggaagatctcacggaatatacgctttggcttcacaacatgagcctgggttgctcatggtgacaaattttctcttcactttgggcattt

SEQ ID NO: 15933 - DNA, 345 bp, Glycine max
  Clone ID: LIB3040-008-Q1-E1-E11
gatggtcttatgtggggtcacataggtagggcaggagagcttacattgccgatttcgtttcatttgtgaaaaagaggaacctgagagagagaatcagaggaagaagatgatctataggaagtggagtctccttaccggcccggtcgccattctcggcggcgtagtcgtcgccatcgccgccgcaaacgtcatcttcgtcaagaatgatcctttcctcaaaccagaggagaggaagtatgaaaatgaacctgctaccaagtaggagaaaagagacaacagaagtttgcgttttgatgtcttttaaaccctgatttatgagctctgtatactgttttgcaagacatg

SEQ ID NO: 15934 - DNA, 306 bp, Glycine max
  Clone ID: LIB3040-008-Q1-E1-E12
gagcaaaaccctaatccctatttttcttcctcagtagtgtcatttacgcttctcttctctgcagcagctatgcctaaccctaaggtcttcttcgacatgaccatcggcggtcaatctgctggccgcatcgtgatggagctctacgccgacgtcactccccgcatcgccgagaacttccgcgcgctttgcaccggcgagaagggcgtagggcggagcgggaagcccttcgactacaagggctcgtcctttcagcgcgtgatcccgagtttcatgtgtcagggtggcgacttcaccgccgggaacgga

SEQ ID NO: 15935 - DNA, 335 bp, Glycine max
  Clone ID: LIB3040-008-Q1-E1-E2
cgggacctaaaaattgtaccgatatggcttcacttgtgtgtctccttttttccttgcatttcatggttatcatgtcaggttccttaccagcaaatagtgaagtgtttacaaaagagtctcctatgtctctatccacaaaacccgtggaaagactcacccaactccacttttatttccataacaacaaaatgggggaacacccgactgctatgaaaattgttgagcctcctaaggcgtccatttctggttttgggactatttacatgatggatgaacctctaaccgaaggaacaagtccaacttcaaagcttgttggaagatgtcagggaatgtat

SEQ ID NO: 15936 - DNA, 261 bp, Glycine max
  Clone ID: LIB3040-008-Q1-E1-E3
aatgaaaataaaatcagtgcggagactctgaaccgtattgaagatcactttactgttctaaatttaaggtgtattgaacgtctatatggtgatcatggtctggacgttatagacatcttgcgtaaaaacccaacccatgccctgcctgtaatattgactcgactgaagcagaagcaagaggagtggactaagtgtcgttcagatttcaataaagtatgggctgagatttatgctaaaaatcactacaaatcacttgatcat

SEQ ID NO: 15937 - DNA, 372 bp, Glycine max
  Clone ID: LIB3040-008-Q1-E1-E4
gggaatcggaagaagataatgtcggaggcggaggagctaccccggtctattgtgcgccgcgtagtgaaggataagctgtcgcgttgctccgaagacagagaaatttccgtcagcaaagacgctcttctcgcagtctccgaaagcggtacgatcttcatccactacctttccgcaacggataatgatatatgtaaggagtctagtatgcagattatcaatgttgaggatgttgtcaaagctcttgaggaaactgagttccctgagtttcttcgtcctctgaaagcttcccttgaagactttaggaagaagaatgctggaaagaaagctgcagtgttcaaaggaaaggatgatgagccgagaatgaaaaggaaa

SEQ ID NO: 15938 - DNA, 355 bp, Glycine max
  Clone ID: LIB3040-008-Q1-E1-E5
gacctcacccagttgcagaaagaaaagaccatcaaagtttcacttcagccttatccggtttagggtttcggtttttgacccaacctttgacgtatcgaaaccttaagtttcggatcaggtctgagcaatctggttggtagaacctttggtcttagagagtcaagttttatgtctgaattagacgatcaaattcctactgccttcgatccttttgctgatgcaaatgctgatgactcgggtgctgggtcaaaggagtatgtgcatattcgcgtacagcagcgaaatggaaggaaaagcctgacaaccgttcagggattgaaaaaagaattcagctattacaagatacttaaagatg

SEQ ID NO: 15939 - DNA, 395 bp, Glycine max
  Clone ID: LIB3040-008-Q1-E1-E7
gattcccaaagtttctcattctccctttcctctccgaaccctcgatcactctcacgcgctcctatattcgctcctccaccgtcgctctctcgaacaaccacaacaccatcttcatcacatggcaaacgcagcatctggtatggcagtccatgatgactgcaagttgaggtttttggagctgaaggcaaaaaggacacaccgtttcatagtttttaagattgaggagcagcagaagcaggtcattgtggagaagcttggtgagcctgcccagggctatgaagatttcactgccagccttcctgctgacgagtgccgttatgctgtttatgattttgagtatctgactgaagggaatgtccctaaaagcagaatttttttcattgcgtggtcccctg

SEQ ID NO: 15940 - DNA, 370 bp, Glycine max
  Clone ID: LIB3040-008-Q1-E1-E8
tgcattttgtggttccgacaccacagcaacagagctatctgtaatcgagagtgttttcaagctgagagaagcgcagcctagcgcaattgtggacgatgagatgaagaaaaccattgcaaaagcatggactgatgctagaactgggaaaactgctgaccctttaagtagctaccgttgagcgaccaaaagaggttcagatgcttagttcctgtttctagagaatgatttgctctatttaattacattatcttgttttaaagtgaatgtttggcctgtgttcatggtacttgtagaagattagatgtgcagttattgttaccaaagttatactttgatataatgatgcgattttcgtctgtggttgctcaaa

SEQ ID NO: 15941 - DNA, 402 bp, Glycine max
  Clone ID: LIB3040-008-Q1-E1-F1
ggcatttcaacattgtatcaatttgagcctcaaccatttaaagttgtatcaaaacaagttgtttactacaagggtcatcaagtgcacaatctcaatgaattggaatacataaatggtgaagtttgggccaatgttttgccgactgactgcattgtaagaatctctccccatgatggaagggttcttggatggattctcctccaaaatttgaggaaagaacttgtggaagctggggagattagtgatcgtgatattttgaatgggatagcatgggatggtgagcagaatcgtatttttgtgactggaaaacaatggccaaagctgtatgaaatcaaggtttcacctataaagaaaccaattgaagaagggatcatcgagcaactttgcttgtatgagcctttg

SEQ ID NO: 15942 - DNA, 343 bp, Glycine max
  Clone ID: LIB3040-008-Q1-E1-F10
ggagacattttcataatcgaaattggaagcgaggaaggaaaacccaaatcgaaaatggcagtgatggagaggttgaagatgttcgtcgttcaagagccagttgttgccgcttcctgtctcatcgctggcttcggtctttttcttccagcttttgtgaggcccatgttggattcatatcaggcaaccaagcaacctccccagcctgctttaagtgacgtggttgcaggaatgactggtaaaaagtaaaggtgatttacttgacagatgcaagggcaaatttgctaagtttcttgtttgaacttattttaagtctcaaatgtgagagaaattagagtactgaata

SEQ ID NO: 15943 - DNA, 365 bp, Glycine max
  Clone ID: LIB3040-008-Q1-E1-F11
gaaacgcatatctctgtcatttgtgtctgctcagtcgctcttctccgctacttctgagatcttttagtcaagtttcatgtctgaccaagagcaccatttcgagtccaaggctcactccggagcctcgaaaaccgactctcaccaagccggtaccatccgcacgaatgggtacctcgtcatcaaaggccgcccctgcaaggttgtggaagtttcgacttccaaaactggaaagcacggtcacgcgtagtgtcactttgttggaattgatattttcactgccaagaaactttaggatattgtgccctcttctcacaactgtgatgttcctcatgtgaatcgtactgattaccagctcattgatattg

SEQ ID NO: 15944 - DNA, 327 bp, Glycine max
  Clone ID: LIB3040-008-Q1-E1-F12
ggtgattgtttgttgttgtaactcgttcttcttcttttgttgttctgtgtttgtgtttgttttttctctcacctgaaaatgtcttgctgcggtggtaactgtggttgcggaagctcctgcaagtgcggcaacggctgcggaggctgcaagatgtacccagacttgagctacactgagtcaaccagcaccgagaccttggtcatgggagtggcacctgttaaggctcaatttgagggtgctgaaatgggtgtgcccgctgagaacgatggctgcaaatgtggaccaaactgctcctgcaacccctgcacttgcaagtgaggtgttggg

SEQ ID NO: 15945 - DNA, 353 bp, Glycine max
  Clone ID: LIB3040-008-Q1-E1-F2
gagacataccactatgcattcatttagattcatcacaagcttagaagaacaattaaacatgagtgcagccagcagagcttggattgtggcatcaagcattggggcagtggaggcattgaaggatcaattgggggtgtgcacgtgggaccatgcagtgaggtcactgcagcagcatgccaagagcaacatgagatcctacactcaggccataaccttgtcatctgctacatccgctggagtctccagttcggtcaagaggaccagggaggactccataaggaaagtcatggccttgagctgttggggtcccaatacgtcaaggtttgagtgtgtggaccattccaattgcattc

SEQ ID NO: 15946 - DNA, 401 bp, Glycine max
  unsure (1)..(401): unsure at all n locations
  Clone ID: LIB3040-008-Q1-E1-F3
gcgtcagcccacacgtccgacaggctgcgaagaggacgacnagacgagggtattcatatcatgtccattgtcattctataacataataacaacaaacaaaacaccattcaaacaataagaacttggaccgtcgtggataacatcggagcttcacaagcattgacggatcgaatgaaggtgtcccagtcgcaacatgcattgaggtcactgcagcagcatgccaggcgcactataagatccaaccctcaggacacgtgcatgccatctgctacctctgctacagtctcacctacagtcaataagaggaccgtggagtacaacatgatgatcgggaaaatcctctgtttacgtaacataatctcacttgcatcacagtgccctttcgccaacttgcgtacaac

SEQ ID NO: 15947 - DNA, 342 bp, Glycine max
  Clone ID: LIB3040-008-Q1-E1-F4
ggtgtgtagtataagattctcttctttattccttttgtaatttcattcattcttaatctttgtgaaaaataatgttcatcgagaattttaaggttgagtgtcctaatgtgaagtacaccgagactgatattcattccgtgtacaactacgaaaccaccgaacttgttcacgagaacaggaatggcacctagcagtggattgtcagacccaaatctgtcaaatacgaatttagaagcaatatccatgttcgtaaattaggggtaatgcttgtgggttggggtggaaacaacggctcaacgctcaccggtggtgttattgcgaaccgagagggcatttcatggg

SEQ ID NO: 15948 - DNA, 331 bp, Glycine max
  Clone ID: LIB3040-008-Q1-E1-F5
gatccaagagtgacccgagacacagattcttaccaaataaacaaacaaaaaaacacacacacacacactttccattttctgtggttcttcttctcacttctctaatcttctcccccctctgttactccccgcttctctgaatccctttctgttaatcatctgtctttcacctcgtgattccaaaaagattcaaactttgaaaatttttctcgaaagccaggtgttttcagaatcgagatccagtttctttttatccttttgttaagaaattattattttctttcattcagccaagagggttgtttttgatccctcaacgcttttttctttc

SEQ ID NO: 15949 - DNA, 388 bp, Glycine max
  Clone ID: LIB3040-008-Q1-E1-F7
gacgcactcatacaatagagaccagcttttgcttctttgtgaacatggagatgaggaaatcatgtggcttcttcttcttgctcctcctccttgtctttgcttcccaggtggtggtgcagacggagggaagagtgtgtgagtcacaaagccacgggttccatggtttgtgtaatagagaccacaactgtgctttggtctgcaggaacgaaggtttctccggtggcaggtgcaaaggcttccgccgccgctgcttttgcaccaggatttgttgagatctcatcaaacactactcttgccatgcaaattaataaatcatagctaggccaaataaattgcatctactctttatccatttgggagctagctaccacaaccaactcatacttgg

SEQ ID NO: 15950 - DNA, 371 bp, Glycine max
  Clone ID: LIB3040-008-Q1-E1-F8
ggaagcaagaggttgtattttggcatccccgtggcttcaagaagagaatctcaatggaggcccaggagctgaagcgcgtgttccacatgttcgaccgcaacggcgacgggagaataacgaagaaggagctgaacgactcgctggagaacctgggcatcttcatctctgacaaggacctgagccaaatgatccaaatgatcgacgtcaacggcgacggttgcctggacatggacgagtttggggagctgtatcagaccataatggacgagcgcgacaatgacgaggacatgagggacgccttcaacgtcttcgaccagaacgccgaccgcttcatcaccgtcgacgagttgaggaccgtcttgtcctccctc

SEQ ID NO: 15951 - DNA, 343 bp, Glycine max
  Clone ID: LIB3040-008-Q1-E1-F9
gacacttcaaaatcctctggtaacccttattttatctattctctctctttcttttgtgttctaagcagctagaagcaatggagaggaaaagaagccatgcctctttcaccatgtttgcaatgcttgttggagtgatctctcagagccttgtcattcctgtagtatccaccactgttgaagatcagaagaactactacaccccagatccacatgctggaagtcccccctcaggctcacacagtagtactcctccatctcatggccatggaagctctccaccctcacatcatcacagtagtccaagtactccatcaacacgctcaggtggaaactgtggatcatc

SEQ ID NO: 15952 - DNA, 373 bp, Glycine max
  Clone ID: LIB3040-008-Q1-E1-G11
ggacgtattttggggtttgggtttgggtttggattgtaccggccaacttagggtggactcactctcgatctcaccgatcaccaaccaacgtggcttcttctcctcaggttctctaagtcaactttcagtttttgattgttgaggatggtgctggttttggccctgggggatttgcacataccccacagggctcctgatcttcctgctaagttcaaatccatgcttgtccctggcaagatccagcacataatttgtactggaaatttatgtattaaagaaattcatgactacgtaaagactctttgtccagacttgcatataactcgtggtgagtatgatgaagagacaaaatatccggagaccaaaacactaa

SEQ ID NO: 15953 - DNA, 141 bp, Glycine max
  Clone ID: LIB3040-008-Q1-E1-G12
gacacacagagagaagagacaatgaagtttaacccaagggtttcctcaagccgtcgaaagagccgcaaggctcacttcaccgctccgtccagcgtgcgtcgcgtcctgatgagcgcgcctctctcgaccgatctccggtcc

SEQ ID NO: 15954 - DNA, 398 bp, Glycine max
  Clone ID: LIB3040-008-Q1-E1-G3
ggccacggcattctccggccccattgtcaccgtgaaggtgtttgaagacaacgtgttggtgagggagcttgttgagacgaaaggcgaaggaagagtattggttgttgatggaggaggaagcttgaggtgtgcattgatgggagggaatttggtacagattgcatataacatggggtgggctgggattgtggtgaatggttgcgttagagatgtggatgatatcaatgcgtgtaatattggcgtcaaagccttggcttctcatccactcagatccaacaaaaagcgcactggtgaaaagaatgtccctgtttatgttggtggaacatttattcgtgaaggagaatggttgtatgcagataatgatggcatcctcgtatcagaatttgagttgtcaaact

SEQ ID NO: 15955 - DNA, 361 bp, Glycine max
  Clone ID: LIB3040-008-Q1-E1-G4
gagcgaaacagagagtggtttcagtgagtgatcggtgttcacgtgatccttcataagtcgtcatcatcatcatcatcatcaccgttgattgaagaagatgccgatcagaaacatcgccatcggaaggcctgaagaggctactcaccccgacacgttgaaggcggggttggctgagttcatctccaccttgatcttcgtgttcgccggttcaggttccggcatcgcctacaacaagctcaccgacaacggcgccgccactctcgccggcctcatctccgcttccatcgcccatgctttcgccctcttcgtcgccgtctccgtcggcgccaacatctccggcggccacgtcaaccccgccgtc

SEQ ID NO: 15956 - DNA, 364 bp, Glycine max
  Clone ID: LIB3040-008-Q1-E1-G6
gactgccttcttaaaaccctatctctcaccaacttccgctacttcctactccaaccactttcttttttcccgcagtcatgggcaaggtcaagatcggaatcaacggatttggaagaattggccgtttggtggccagggtggctctgcagagagacgatgttgaactcgttgccgttaacgatcctttcattaccaccgattacatgacatacatgtttaaatacgacagtgttcacgggcactggaagcatcacgatgtcaccgttaaggatgagaagacccttctcttcggtgacaagccagtcactgtttttggacacaggaaccctgaagagatccatggaagtcgactggagctgacatc

SEQ ID NO: 15957 - DNA, 400 bp, Glycine max
  Clone ID: LIB3040-008-Q1-E1-G7
ggtgagttgagaggatcgtgagaggggcagtagccgagattccgtgagttgcaaaaatgaagacgattctttccaccgagaccatgaacatcccggacggcgtgagcatcaaagttcatgccaaggtcatcgaagttgagggcccccgcggaaaattggtgcgagacttcaagcatttgaatctcgattttcagctcattactgacgaaaacggtaaaagaaagctgaaaatcgacgcgtggtttggttctcggaaaacatccgccgccattcgcaccgccttgagccacgtggagaatcttatcaccggcgtcaccaagggctaccgctacaaaatgaggttcgtttatgcccattttcgcatcaacgcaagcatcggcaacagcaacaagtctattga

SEQ ID NO: 15958 - DNA, 336 bp, Glycine max
  Clone ID: LIB3040-008-Q1-E1-G9
ggaacaacaatgactctctatatgcaactggaaggcccaacctaaaagaaagagcatttaactaaccctaattcgccattgaagcctagacattgtgctttcaccttggctccgctctttggtttgctcaaccgatctccgcagcaatggtgaacgttccgaagacaaagaagacctactgcaagagcaaggagtgcaggaagcacacgctccacaaggtcacccaatacaagaagggcaaggacagcatcgccgctcagggaaaacgccgttatgaccgcaaacagtccggttacggtggccagaccaagcccgttttccacaaaaaggggaaaa

SEQ ID NO: 15959 - DNA, 428 bp, Glycine max
  Clone ID: LIB3040-008-Q1-E1-H1
acgcgtctaacataaatcatcttcttgaaaagcttcgcaggtcttcctgggatgctgcagtgcaagatattgaagaccttaaggaattctccaaaagtcagggagcattggaagctggtgatttgactcattgggacattacctattggagtgagaggctacgtgagtcaaaatatgatattaatgaggaagaactgcgtccctttttctctctgccaaaggttatggatggactctttaaccttgcaaaatcactttttggcattgaaattgagccagctgatggtctagctccggtctggaataatgatgtcaggttcttctgtgttaaggattcttctggtagtccaattgcgtatttttattttgatccttatagtcgtcctgctgaaaaaaggcaaggtgcatggatgaatgaagtctttgct

SEQ ID NO: 15960 - DNA, 337 bp, Glycine max
  Clone ID: LIB3040-008-Q1-E1-H10
gattgcttttgctcagaagcaaactgttgctgcttaaatttccttgtcagcaggtggtttcttgggttatggatttatttgagcataaatactacttagaggacttacgttgcagatttgttgtatcatctttactgcttccagaacttatgattcagactttctatgtatcaattctacttccagttttgttagtacaacgggaggacgcttccatttctgttctctaaaccgagcttaagttttggtcagaaatcttcaaagatgtaagcattataatgtagaattgagaaaaaatgtaaacgttgctttttgaaaaaaagtcaaaaaagaaaaa

SEQ ID NO: 15961 - DNA, 255 bp, Glycine max
  Clone ID: LIB3040-008-Q1-E1-H11
gacacaactaactaagaaagtcttccatagccccccaaaaatgaagagcaccatcttctttgctctctttctcttttgtgccttcaccacctcatacctaccttcagccatcgctgatttcgtgctcgataatgaaggtaaccctcttgaaaatggtggcacatattatatcttgtcagacataacagcatttggtggaataagagcagccccaaccggaaatgaaagactccctctcactgtggtgcaatctcg

SEQ ID NO: 15962 - DNA, 194 bp, Glycine max
  unsure (1)..(194): unsure at all n locations
  Clone ID: LIB3040-008-Q1-E1-H12
gacctcaaaaaacaaaaatcaataccttagagaaaacaaaagcacagaatcgaaagaagagttcttttttgagagagattgggatggcttcgacgaagaagatcacactgaagagttcggacggcgaggccttcgaggtggaggaagcngtggcggtggagtcccagacgatcaagcacatgatcgaggacaac

SEQ ID NO: 15963 - DNA, 357 bp, Glycine max
  Clone ID: LIB3040-008-Q1-E1-H2
gaccccacgaatttgcaaatctcaaacgaagcccttttctctctctcttcaatttcacccttttagcatttgtacattcctttcccttccttgaatcgttcttaattgcgagaggggatatcggagaagttgattggcctcccattaattgcaggtctgaatgatctgatggagtctaaagttgggaagaagaagtcgtctagtagtaagtcccttttgtacgaagctcctctcgattacaccattgaagacgttcgaccacacggtggaattaagaagttcagatctgctgcttactccaactgcattcgcaagccatcctgagattccctaggttgtgtgacaacatagcccccg

SEQ ID NO: 15964 - DNA, 361 bp, Glycine max
  Clone ID: LIB3040-008-Q1-E1-H3
gaagacagctgggagggaagaatagaatgggatctggaagtggaagacacactggatagttcctcacgtgaacggatgcatgaaggaagcatccgacgctcatgactcagctccgccactccatgcctgtccttggcaacgctctcgtcggcgtcagtatcgacctcttccgccaacaactctatactacgcactatgctttcgatactcagtcgatttctcacgtggcagccggggatcaccactaaacgtttggacggacgcactccagtccatcatcacctcctagtcttgctaccatattctcgcaggctttaatgtttacacttcacatcatgttcacatctttggcactcactat

SEQ ID NO: 15965 - DNA, 114 bp, Glycine max
  Clone ID: LIB3040-008-Q1-E1-H4
gggtcgatcaatcggcgcgccagagtcaacaaaaggggatctccatctcagggtcgtatcatccacatttcatcaccagttcatacaccctgcatcgcgtgtacaaacacgtgg

SEQ ID NO: 15966 - DNA, 383 bp, Glycine max
  Clone ID: LIB3040-008-Q1-E1-H7
agaacaaggataggctagacaagtctgacctaagattgtccaaggcagtaattcattctaacatggatttgataaagcagctagatagtaaggcagccaagcaaggaaagaaaggtgatacattctcactggttcacccctcacaaccaccttctttgctacagctgaaagatgttgtcttgtcctctgctcttgatctgagacgaacagttccaagacctgtggttgcaccatcaggagtaagttccagatctgtctcccctttctctagaagaccaagcccccctcgttcagctacgcctattccaacaacttcaggacttgccttctcaaaaagtatttctgatagtttgaacaaaacaaatgaacttttaaatcaagaa

SEQ ID NO: 15967 - DNA, 324 bp, Glycine max
  Clone ID: LIB3040-008-Q1-E1-H8
ggttctagtgtatgtgattgttgtgactcgttcttcttcgtcgttatcttcttcttttgttgtttgtgtgtttgttttttctctcacctgaaaatgtcttgctgcggtggtaactgtggttgcggaagcgcctgcaagtgcggcaacggctgcggaggctgcaagatgtacccagacttgagctacaccgagtcaaccaccaccgagaccttggtcatgggagtggcaccagttaaggctcaattcgagagtgctgaaatgggtgttcccgctgagaacgatggctgcaaaatgtggagctaactgcacctgcaaaccccgcac

SEQ ID NO: 15968 - DNA, 338 bp, Glycine max
  Clone ID: LIB3040-008-Q1-E1-H9
cgggtggcaaaagaacaacgaaggggaatgtctgagagtcgggtctatacgtgtcgggctgtgcggatcttcacttacactctccaaatcacacaccaaaccacgcagcgagagaaacctaaatgccgttctaagtgacactcaaatcgatcgactatggatgcggtgtattacgtgaatatattgggcatcggctctgtcgactgccttcaaattgtcttccctccgtcgatagtcactcgctcttgcaaagcacacgaagcactttggctgtggagactaaatcgctggcaaacttactcagattgggaacagattcaggggagatgaccagcctg

SEQ ID NO: 15969 - DNA, 391 bp, Glycine max
  Clone ID: LIB3040-009-Q1-E1-A10
gactcacatgtccttctctcttttcactctccactttccttcctgtgttatttagatcctcccctttgttcttcattgtactacactactaccactactactattatctgctttaagaagtgagaaacccaaaaagagagagtgcaagtggaacctgttcgtgtcctaacttttttttttctttcttttgcttagccattgtttgttataagttcccacttacttaccactttcatgggacacaacaacacttgtcatcatcatgtcaaaggtttccacgcagacccttttagccatagcctctcttctgcttcaaatggtggtgataggaggagaaaatgtgggaacaatgaaaaaagtggtggtagtggtttcattttctttacctttt

SEQ ID NO: 15970 - DNA, 279 bp, Glycine max
  Clone ID: LIB3040-009-Q1-E1-A11
gacacaccgtttgttccactctcaactcaacttctgctacccagtctcttcttgcatgtcagatcactgttctctctatactcatgggcatggtcaacatctgaatcatgggatttgctagagttcacgctttggttgccatactcactctggcatatagacgatgtgtggctcgttaccggcatgttctcaacttttgcactctgaggattctcacgtgatccaggtgcacctgtcatcaccatgtcccgcgtgtccacgatgtcgcttttagcgatt

SEQ ID NO: 15971 - DNA, 423 bp, Glycine max
  unsure (1)..(423): unsure at all n locations
  Clone ID: LIB3040-009-Q1-E1-A12
gaccaacaacacgtagtattatttcattgatttctccctcttcgctctctctcagtgaccagagacagatgatgatggagatggcgaagcgaaacgctgtcgttgcggcactcgcggcgttggtgctactcgcggcgagtgtggcggtggatgctcaggagaactcggacgtgaagacgctggtgaagtacaagcacgggaagaagtactgcgacaaaggatgggaatgtaagggctggtcaatttactgttgtaacctcaccattaccgattatttccagacctaccagttcgagaatctgttctccaagcggaactcgccggtggcgcacgcggtcggattttgggactaccactccttcatcgccgccgccgcgctttttgagccggaagggttcgnngcacacgggaacaagacgatgc

SEQ ID NO: 15972 - DNA, 316 bp, Glycine max
  Clone ID: LIB3040-009-Q1-E1-A2
gaggaaaaggaaaggaaagggaagccaaagcgagaccctaaccctagcggagagatggcggagcacttggcatcgatattcgggacggagaaggacagggtgaactgtccgttctacttcaagatcggcgcgtgcaggcacggcgaccggtgctcccggcttcacacgaagcccacaattagcccaacgttggttctgtcgaacatgtaccagaggcccgacatgagcatgaacatcgtcaccaaccccgatcagccccagccccaatctctcgaccccgataaggtccaggatcacttcgacgacttctacgaag

SEQ ID NO: 15973 - DNA, 292 bp, Glycine max
  Clone ID: LIB3040-009-Q1-E1-A3
ggccttttcctcaagtgttgccgtgaggttgcagagaaatatcctgagataacttatgaggaagttgtcattgacaattgctgcatgatgcttgtgaagaatcctgcacttttcgatgtactagtgatgcctaacctttatggtgatattatcagtgacctttgtgctggcttgattggaggattgggcttaacaccaagctgcaacattggtgagggcggtattgcacttgctgaagctgtacatggttcagcacctgatattgctggaaagaatttggctaatccaactg

SEQ ID NO: 15974 - DNA, 321 bp, Glycine max
  unsure (1)..(321): unsure at all n locations
  Clone ID: LIB3040-009-Q1-E1-A4
gactcaccacttcaaaacactcataacacaaagcacaaagcaaagctcatccttgagttaaaaaatggcagcagcttcttccatggctctctcatccccatccttggctggcaaggccgtgaagctgggcccatcagccccagaagtgggaagggtgagcatgaggaagaccgtcaccaagcaggtctcctcaggaagcccatggtacggcccagaccgagtcaagtacttgggcccattctctggcgagcccccgtcctacctaaccggtgagttcncaggcgactacggctgggacactgctgggctttccgcagaccc

SEQ ID NO: 15975 - DNA, 310 bp, Glycine max
  Clone ID: LIB3040-009-Q1-E1-A5
gacgttcacattcaggaatcgttttcttcagaaatttgccatcgttgagagaagcgtgagagccttagtcgttcaagatgagagctaagtggaagaagaagcgcatgaggaggttgaagaggaagcgccgaaagatgagacaaagatctaagtaggtgcttgagcaggagttgagatgagctttccatctgctaccagcctcatgacattttaggctgttatggctcttatgatcttgaggtctagtcgctaagggagcttcactcttgacttagtttgctttactggtcctggtcctgggccaaagact

SEQ ID NO: 15976 - DNA, 257 bp, Glycine max
  Clone ID: LIB3040-009-Q1-E1-A7
agggatcaacatttgtctcacatctttcactttcagtcaacggttaatcccttttcaaaatttagcatcaacatttccaccgcaacgtaccccaaggtcaatataacggagtcttcaaataaccacctctcacatcctaccttccccttaatgaaatcggatcgcgatacctattctcaaggataaaaccggttctagccattacaccataactacaattcatcgaaaggacgcacatggacttgcttccaacctac

SEQ ID NO: 15977 - DNA, 355 bp, Glycine max
  Clone ID: LIB3040-009-Q1-E1-A8
gacaacacacaactcgtcacatcacatcacatcacatctattttcattacttcatcattttcactgcaattttcacaccacacacacaccacagtcatggcagttgatagtacgtttctgaacactggcctcctccttgtggccacaatccttgtggtcaagctcatctcagccttcatagtgcccaaatccagaaagagggtacccccagttgtgaaggggtggcccttaattggaggactcatccgtttcctcaaaggtccaatctttatgctccgtgacgagtaccctaagcttggaagtgtcttcactctcaaactcttccacaatagcatcaccttcctcattgggcctg

SEQ ID NO: 15978 - DNA, 340 bp, Glycine max
  Clone ID: LIB3040-009-Q1-E1-A9
gattctctctctttcacagcacactcctcccagggtttctccaccaagagggaaatggctcccaaaccgcctagtacgggtctgtttgttggactgaacaagggacatgtcgtcaccaagaaggaattgcccccacgcccctcggatcgtaaggggaaaacaagcaagagggtgcactttgtgaggaacctcataagagaggttgctggttttgcaccctatgaaaagcgtataactgagttgctgaaggttgggaaggataagagggcacttaaggttgcaaagagaaagcttggaacccacaaacgtgcaaagaagaagcgtgaggaaatgtccaatg

SEQ ID NO: 15979 - DNA, 196 bp, Glycine max
  Clone ID: LIB3040-009-Q1-E1-B1
ggctgggtgtttgttttgttccttccaattgtcagatctgaatcaccggactcactcttcacactcactcacactgaatggcttccgaacgcgaccatcaccaacaccaccatcaccatcaagatcacgatcatcatcatcatgatcatgatcaccatcatcatcacgatggagacggagagacccactcacgggt

SEQ ID NO: 15980 - DNA, 407 bp, Glycine max
  unsure (1)..(407): unsure at all n locations
  Clone ID: LIB3040-009-Q1-E1-B10
gagattcgtcttcagtttcagcctttctctcncactcactcactcacaggtaagcaatggcgggaaaagganggaaggggcttcttgcagcgaaaaccaccgcggcgaataaggacaaagacaaggacaagaagagacctatttctcgctcttcccgtgctggaatccagtttcctgtgggacgtatccataggcagctgaaacaaagggtccaagccaatggacgtgttggggcaacagctgcagtgtacttagcctcaattctagagtatctgactgctgaagttcttgaacttgctgggaatgcaagcaaggatctgaaggtgaagaggatcacaccaaggcatttgcagctggctatcangngagattaagagctggacactcttatcaaagggaccattgct

SEQ ID NO: 15981 - DNA, 432 bp, Glycine max
  unsure (1)..(432): unsure at all n locations
  Clone ID: LIB3040-009-Q1-E1-B11
gacagagatattccaatatatacattgtttttcttaaaagaaaaaagttatgttctttaaatacgaaaattccaaatccaccttcatggttttggtagatgggtaggttacgggtctaagcaaatggctaattacagcttgagcagacaagacgcgctttatttgctttcattagcttttcaactttgagtttgaaatgcaagctaggttgcacaccattggctttattcttggaaaattggaatattgaaccctcgatttccttacaaatttcccgttgcaagccgtgaatgagttggaagcgccgggtgtttaagtcttcaccagtggcatcaaacaatagttagatcagatgtgtaacagaaggtatgaaacanatcaccagtaacttggacttttttaacattttctttataagatatagtcaataaa

SEQ ID NO: 15982 - DNA, 160 bp, Glycine max
  Clone ID: LIB3040-009-Q1-E1-B12
gattcacacaactaactaagaaagtcttccatagccccccaaaaatgaagagcaccatcttctttggtctccttcccctttggggcttcaacaactcatacctaacttcagccatcgctgatttcgtgcccgataatgaaggtaaccctcctgaaaatgg

SEQ ID NO: 15983 - DNA, 329 bp, Glycine max
  Clone ID: LIB3040-009-Q1-E1-B2
ggagttcaacgagatggagcaaataaagcacagaacagttgaagtgaatggcataaaaatgcatgttgcagagaaaggagagggtccagtggtgttgttcctccacggcttccctgagctctggtactcatggcgccatcagattctctctctcagctccctcggctaccgcgccgtcgctcccgatctccgtggctacggtgacaccgaagcaccaccttcaatcagcagctacaactgcttccacatagtgggtgatctcgttgcgcttattgactctctgggtgtccaacaagtgttcccttgtggctcatgactggggagccatc

SEQ ID NO: 15984 - DNA, 275 bp, Glycine max
  Clone ID: LIB3040-009-Q1-E1-B3
gactttcgattctcttcaaacctaacgcagcatcgctattctcttcattccatggctttgcccaaccagcaaaccgtggattaccctagtttcaaactcggtatcgtcggcgatggtggcacaggaaagacaacctttgtgaaaaggcatctcaccggagaattccagaagaaatatgagccaaccatcggtgtggaggttcacccattggattttttcacaaactgtggaaagattccattttactgctgggatactgctggacaggagaaatt

SEQ ID NO: 15985 - DNA, 283 bp, Glycine max
  Clone ID: LIB3040-009-Q1-E1-B4
ggcagccaagaaaagaaaatcctcacccattttcttcgtagccaaacactctgaaattctcagttatgtcgtggcaagcgtatgtggatgatcacctactgtgtgaaatcgaaggtaaccacctcactcacgccgctatcatcggccaagacggaagcgtttgggctcagagcaccaacttccctcagttcaaacctgaggaaataactgccatcaataatgactttaatgagccgggattacttgctccaactgtgattgtacatcggtggcaccacataca

SEQ ID NO: 15986 - DNA, 84 bp, Glycine max
  Clone ID: LIB3040-009-Q1-E1-B5
cccactcctccataacgatgcgatgggacgacaggaggtgacactcaacaggtaaaaggttggtacataacggcagccaaaaac

SEQ ID NO: 15987 - DNA, 361 bp, Glycine max
  Clone ID: LIB3040-009-Q1-E1-B6
ggttctagtgtgtgattgtttgttgttgtaactcgttcttcttcttttgttgttctgtgtttgtgtttgttttttctctcacctgaaaatgtcttgctgcggtggtaactgtggttgcggaagctcctgcaagtgcggcaacggctgcggaggctgcaagatgtacccagacttgagctacactgagtcaaccaccaccgagaccttggtcatgggagtggcacctgttaaggctcaatttgagggtgctgaaatgggtgtgcccgctgagaacgatggctgcaaatgtggaccaaactgctcctgcaacccctgcacttgcaagtgaggtgttgggagagcaagcttcaagcagagatag

SEQ ID NO: 15988 - DNA, 366 bp, Glycine max
  Clone ID: LIB3040-009-Q1-E1-B8
ggagcgaagaagatattagggtttttgagtgcggtgcggcgatcctagcactctcttctgcagctttcgccgacagcttcattcaccatggctgagcaaaccgagaaggcttttttgaaacaaccaaaagtgtttctcagctcgaagaaaactgggaagggaaagagacccggaaagggtgggaaccgcttttggaaatccattgggcttggatttaagactcccagggaagccatcgaaggaacctacattgacaagaagtgccccttcactggcaatgtttccatccgtggccgtatcttggctggaacatgtcacagtgctaagatgaacaggactattattgttaggaggaattatctccat

SEQ ID NO: 15989 - DNA, 360 bp, Glycine max; identical to SEQ ID NO: 13823
  Clone ID: LIB3040-009-Q1-E1-B9

SEQ ID NO: 15990 - DNA, 339 bp, Glycine max
  Clone ID: LIB3040-009-Q1-E1-C1
gatacctaaaaattgtaccgatatggcttcacttgtgtgtctcctttttttccttgcatttcatggttatcatgtcaggttccttaccagcaaatagtgaagtgtttacaaaagagtctcctatgtctctatccacaaaacccgtggaaagactcacccaactccacttttatttccataacaacaaaatgggggaacacccgactgctatgaaaattgttgagcctcctaaggcgtccatttctggttttgggactatttacatgatggatgaccctctaaccgaaagaccaagtccaacttcaaagcttgttgggagatgtcacggaatatatgctg

SEQ ID NO: 15991 - DNA, 54 bp, Glycine max
  Clone ID: LIB3040-009-Q1-E1-C10
gagacctcaggtcaggcggggctacccgctgagtttaagcatatcaataagcgg

SEQ ID NO: 15992 - DNA, 400 bp, Glycine max
  Clone ID: LIB3040-009-Q1-E1-C11
ggcagttcaaagcgaagaaagattcgaaacgaagaaagaaagcgttgtgaagaatggcggaagagggacaagtgatcggtgtccacagcgtagaggagtggaaggaacatctcaagaagggagaagggtccaagaaattgattgtggtggattttactgcttcttggtgcggtccatgccgtttcattgccccaattcttgcagagtttgctaaaaagttgccgaatgtcaccttcctcaaggtggatgtggatgaattggagactgtttccaaggagtggggaattgaggctatgccaaccttcctgttcttgaaagaaggcaagctggtggacaaggttgtgggtgccaagaaagaggagctgcaattgacaatagccaaacatgccgcaattgctgc

SEQ ID NO: 15993 - DNA, 384 bp, Glycine max
  unsure (1)..(384): unsure at all n locations
  Clone ID: LIB3040-009-Q1-E1-C12
ggttctagtgtgtgattgtttgttgttgtaactcgttcttcttcttttgttgttctgtgtttgtgtttgttttttctctcacctgaaaatgtcttgctgcggtggtaactgtggttgcggaagctcctgcaagtgcggcaacggctgcggaggctgcaagatgtacccagacttgagctacactgagtcaaccaccaccgagaccttggtcatgggagtggcacctgttaaggctcaatttgagggtgctgaaatgggtgtgcccgctgagaacgatggctgcaaatgtggaccaaactgctcctgcaacccctgcacttgcaagtgangtgttgggagagcaagcttcaagcagagatagcccttagttangaataatgataa

SEQ ID NO: 15994 - DNA, 336 bp, Glycine max
  Clone ID: LIB3040-009-Q1-E1-C5
gaggtttgaagcaagcaagttccgcaatgagtgaacccagatagagagatagatagtggcgcaatccgggtttggtttgtccccaaataacagaaaatgacgatgctttccaagatatcatcatcactgttactatcactatcctccaaacccaaacccaaacccatttgcaacccctttctgctttctcgttcagccgccacaaaacatcagaagaataaaaaggagaacgcaaaagcagcgttggcgaaggagaagcgcagaacccgttccgataagcagttcaacagagacgcaataatcgagcgttgcagaataaacgacattgacaccgaa

SEQ ID NO: 15995 - DNA, 423 bp, Glycine max
  unsure (1)..(423): unsure at all n locations
  Clone ID: LIB3040-009-Q1-E1-C9
gagaagccttaaagctcttctctgctttgaaaatggctgattggggcccggtggtgatcgcagtggtgctgttcgtgctgttaagcccggggcttctgtttcagatgccagccaggggaagggtagcagagtttgggaacatgcaaaccagtggggcctccattttggttcacgccatcatctactttggcctcatcactatcttcctcattgccattggcgttcacatctacactggctaactcctggatctggttcagtttcacccatctatgtttatctctgccttttaattagtctttttagctttacaataatttccttgtttgatctctatgtatcttatgtgggggttggtcatgggtgccagannaaaacantaaatcagataaggataatcctccgtgggggtttttttttttt

SEQ ID NO: 15996 - DNA, 268 bp, Glycine max
  Clone ID: LIB3040-009-Q1-E1-D1
ggagtgaggggtagtgatagaaggataaggtgaggtgacgataaaccgtggaaagtggaaacggtggtgtagtctgtgagtgtcattgtgaagttggagacaatgttagcttcttctctctccttcctccattcttgttcatcttcctctttcttattgtcaatttcacttcctaatcccaaaccctctcattccctacctttcgtgctcgaagccaaagacaggacccgtaaggaaaacaggtccgcgcgccacactcgcatcagaa

SEQ ID NO: 15997 - DNA, 54 bp, Glycine max
  Clone ID: LIB3040-009-Q1-E1-D10
agagtaagagaatttctatactccctttgttccagattgtatgacattttagag

SEQ ID NO: 15998 - DNA, 401 bp, Glycine max
  Clone ID: LIB3040-009-Q1-E1-D11
agaagggcacaaaaacaagatttgtaacataaactgtcctttttattatgcttttacccccaaacaaaaaacacaaaatcacccttaaaaaaaaaaaaacaaaaaaaaaaaaaaaaaaaaaaaaaaaaaaaaaaaaaaaaaaaaaaaaaaaaaaaaaaaaaaaaaaaaaaaaaaaaaaaaaaaacaaaaaaaaaaaaaaaaaaaaaaaaaaaaaaaaaaaaaaaaaaaaaaaaaaaaaaaacggccccacaaaaaaataaccaaacttcaacaacatccctagaacgacaaaacccctcttagggacccaccaaataaacatccgcgggccctttttaaaaaacacccgtcaggaaaaaccccatgaacccccacacataacccccttacaaaaagccccc

SEQ ID NO: 15999 - DNA, 322 bp, Glycine max
  Clone ID: LIB3040-009-Q1-E1-D3
gagtcacacagctaactaagaaagtcttccatagccccccaaaaatgaagagcaccatcttctttgctctctttctcttttgtgccttcaccacctcatacctaccttcagccatcgctgatttcgtgctcgataatgaaggtaaccctcttgaaaatggtggcacatattatatcttgtcagacataacagcatttggtggaataagagcagccccaacgggaaatgaaagatgccctctcactgtggtgcaatctcgcaatgagctcgacaaagggattgggacaatcatctcgtccccatatcgaatccgttttatcgc

SEQ ID NO: 16000 - DNA, 367 bp, Glycine max
  Clone ID: LIB3040-009-Q1-E1-D4
ggatttggatttgggggaacatttggttgattagggtttcttcgggtgctaatgctcttgttttctcacagtcacacagcaatggaagcaatcacagagggagtgaacaacatcaacatctccgattcttacaagaagaatcgcattcaggtctccaacaccaaaaagcccctcttcttctacgtcaatctcgccaagaggtatatgcaacagcataatgaagttgagctctcagcactaggaatggctattgctacggtggttactgttgctgaaatcttgaaaaacaatgagcttgctgttgaaaagaaaatcacaacatcaacagttgacatcaaagatgattctagaggcagacctgtccaaa

SEQ ID NO: 16001 - DNA, 191 bp, Glycine max
  Clone ID: LIB3040-009-Q1-E1-D5
gtcgaatcgggatcaactaggacagaaatcaagcattgggtcgaactcttctttgatgtcaaagtaatagctatgaatagtcatcgactcccggtaaagggtagaagagtacgacctattatgggacatacaatgcattacagacgtatgattattacgcttcaaccgggttattctattccacctcttag

SEQ ID NO: 16002 - DNA, 318 bp, Glycine max
  Clone ID: LIB3040-009-Q1-E1-D6
gatagaagaagcagaaagagaagcattagcaaaagcaagaagaactagtctaagcagaaatggcctcttcagtgatggcatctgtggccctcaaacctgcccctttcactgttgagaagtcctcagttagaggccttccctccctctcaaggaactcctcttcattcagagttgtggccagtggtggcaagaagatcaagactgacaagccttatggaattaatggtggcatggctttgagggaaggagttgatgcatctggcaggaaaggaaagggaaagggcgtttaccagtttgtagacaaataccgtgctaatg

SEQ ID NO: 16003 - DNA, 368 bp, Glycine max
  Clone ID: LIB3040-009-Q1-E1-D8
gacttcacaactcaaactgcttcattgcattattgcagataagatcaaccctactcccttcagattcgggccaagatggcatcacttcatgctaatgtgacatcagttgtttgcaagagtggcaaccatgcttctcaatcgaaattcacaagctcttcattcttgcctgggtttgatgttgttggtcgtgcttcaaatgcttggaagaaagaacttgtcccatcttccatttccttggtgcctagagccacactaacatttgatcccccaactaccaactcagacaaaaccaaacaaaggaagcacactgttgaccctgcttctccagattttcttgcccttccttcatttgaacagtgctttccaaa

SEQ ID NO: 16004 - DNA, 106 bp, Glycine max
  Clone ID: LIB3040-009-Q1-E1-D9
attactattactgatcaatcaaaatatctatcaaaagtaaaaagcgaagagaagggaaaaactttaatttttttatggtaaaaaattcaattatacctgttatttc

SEQ ID NO: 16005 - DNA, 361 bp, Glycine max
  Clone ID: LIB3040-009-Q1-E1-E1
ggccgagcgtgtctctccgcagcagccttcttcgccgtttcagctcaagagccaccagcaggtaagatatggttaagcataacaacgttatccccaatgggcacttcaggaaacactggcaaaactatgtgaagacttggtttaatcaaccagcacggaagaccagaaggcgtttagctcggcagaagaaggctgtcaagattttcccaaggcctactgctggacctctcaggccaattgttcatggccagactctgaaatacaacatgaaagtcagatctgggagaggattttctctcgaagagttgaaggctgtgggaattcccaagaaacttggtccaactattgggatttctgttga

SEQ ID NO: 16006 - DNA, 312 bp, Glycine max
  unsure (1)..(312): unsure at all n locations
  Clone ID: LIB3040-009-Q1-E1-E10
gatcatcaataggtgttttcatttgggattcaaactcaccatggtggacgccttcaaactttgcatcttccttcttgcgtcgatctgtgctttcctagtcttttctaatccagtgctgtgtagtgataaggaggacagtgtattcaagggaatcaacagctacaggcaaacacggagcctggtacccctgagccaagtttcgaaggcaacatgtttggctgatgaagttgcagaaganatanagaagatgccctgtgaaaacgtgaaccaatactacccttcatctgttcctggtaatgggaaactcaaaat

SEQ ID NO: 16007 - DNA, 393 bp, Glycine max
  Clone ID: LIB3040-009-Q1-E1-E11
ggacgttatatctgccagttgcctagatgacactctcacgtctcatctgcggcgctctactgtctatgatttccgtccactaatggtagtatagacctctacttctcgacagtatattcataatgactcagcaatctttctcattgtctctgttcatctaccttcagaatccttgtcaagttcgtctcattctgtctaaactcccatatattgtccctatcttgtcttcaaaagtgcagctgagctgcattggatatcgtgttcgcataaaaagttgtagtcataattgaacaattagacccggtatagaatagatcaagagcacaaaatctcgtgtcaatgatactgtgtttcatgccaacttcaagtgtcttgctgatcaaataaacctga

SEQ ID NO: 16008 - DNA, 346 bp, Glycine max
  Clone ID: LIB3040-009-Q1-E1-E12
ggagcgaagaagatattagggtttttgagtgcggtgcggcgatcctagcactctcttctgcagctttcgccgacagcttcattcaccatggctgagcaaaccgagaaggcttttttgaaacaaccaaaagtgtttctcagctcgaagaaaactgggaagggaaagagacccggaaagggtgggaaccgcttttggaaatccattgggcttggatttaagactcccagggaagccatcgaaggaacctacattgacaagaagtgccccttcactggcaatgtttccatccgtggccgtatcttggctggaacatgtcacagtgctaagatgaacaagactattattg

SEQ ID NO: 16009 - DNA, 275 bp, Glycine max
  Clone ID: LIB3040-009-Q1-E1-E2
gacattgctcgctctctctcactctctctctctctcgctctctctcatcacgttcgatcattcgcatctgaatctccaacgatggtgctcgacgagactataatttgtgatgacaagtcagaatggattcgtaacggggattactcaccatcacgatttcaaacccaagcattacgccgtcaatcttaattgcggtgctaaaacccaatcgaatccagaagatactgtgagagttctcacgaaggccgagaatggcgttcgtgttatggtgatcc

SEQ ID NO: 16010 - DNA, 298 bp, Glycine max
  Clone ID: LIB3040-009-Q1-E1-E3
ggttctagtgtgtgattgtttgttgttgtaactcgttcttcttcttttgttgttctgtgtttgtgtttgttttttctctcacctgaaaatgtcttgctgcggtggtaactgtggttgcggaagctcctgcaagtgcggcaacggctgcggaggctgcaagatgtacccagacttgagctacactgagtcaaccaccgccgagaccttggtcatgggagtggcacctgttaaggctcaatttgagggtgctgaaatgggtgtgcccgctgagaacgatggctgcaaatgtggaccaaac

SEQ ID NO: 16011 - DNA, 351 bp, Glycine max
  unsure (1)..(351): unsure at all n locations
  Clone ID: LIB3040-009-Q1-E1-E4
ggagagggagagggagagagaaagaaaggtgaattggattgcatctctctctgtgtgttggaagaggggaatcgtagatctgagttctttctttctttttaataattttgtgatcagaattattgagctgaacaaaagacaatgggattgtgggaagcttttctcaattggcttcgcagccttttttttcaagcaggaaatggagttatctctaataggacttcagaatgctgggaagacttcccttgtaaatgtagttgctaccggtggatatagtgaggacatgattccaactgtgggattcaatatgangaaagtgacaaaagggaatgttacaataaagttatggga

SEQ ID NO: 16012 - DNA, 371 bp, Glycine max
  Clone ID: LIB3040-009-Q1-E1-E5
gagtttcaggctgtgtcttctcttgttttttgcaaattcgcaacccacacagcaagggaaggtgcgagtgagtgagtatggcgtctccattatcagctcaattggttcaatgtcagaactcacttccacctcttcagggtaattttagccaagatgtgtctaaggttcaaaggtcgcgtgtggtatgttacggtaccagatcaccgcttggttattatggtaaagcattgacatcaagatcacataacgccctgaggttttctgtcacgcgacaatctgaagcacggtcaattggatataggagaatgacatgtgtcaatgctgcagacaatgttgtagagcttcaagccaaggtgacaaccaagtgtttc

SEQ ID NO: 16013 - DNA, 360 bp, Glycine max
  Clone ID: LIB3040-009-Q1-E1-E8
gacagcaaagcaattttcaaactcaattacaattcaataaccaaacctccccttggtttccaattcaaaaagaagtggcacttccaagccaaaccgcccacaattcaaccgggggaagggccccggggacgcaattggagactaaagccgctcacatgtcagctcgggacaccggcggtgtgaaaaagccccagcgtttcaggcccgaaactgtggctctgagggatatcagattgtaccagaagagcactgatcttctgatgcgaaaactcccattccagaggctcgtcagaaaaatcgctcaggatttcaaaacatatcttcgtttccagagcagcgctgtttctgctcttcaggaag

SEQ ID NO: 16014 - DNA, 360 bp, Glycine max
  Clone ID: LIB3040-009-Q1-E1-E9
gagggtttacactgaggaggcacaccttcaggagcagtcatggttctcaaaaccgagctgtgccgattcagcggtgccaagatctacccagggaaaggcatcagatttgttcgtggtgattctcaggttttcctgtttgctaactcaaaatgtaagaggtatttccacaacaggttgaagccgtcaaagctcacgtggactgcaatgtaccgaaagcagcataagaaggatattgctcaagaagctgtgaagaagagaagacgtgctaccaaaaaaccttactctaggtctattgttggtgctactttagaagttatccagaaaaagagaaccgagaagccagaagttcgagatgcagct

SEQ ID NO: 16015 - DNA, 285 bp, Glycine max
  Clone ID: LIB3040-009-Q1-E1-F1
gatgtggttgcgcctctgcctgtaagagtgaaaaaaccttctcttttccttctctcaagtctcaagagatttcatcatggctccaaagaaggacaaggctccaccaccttcctccaagcccgccaaatctggcggtagcaagcagaagaagaagaagtggagcaagggaaagcaaaaggagaaggtgaataacatggtgctgtttgattagggcacctatgataagctcctttctgaagctcccaaattcaagctcatcactccttccattctttctgatcgttt

SEQ ID NO: 16016 - DNA, 80 bp, Glycine max; identical to SEQ ID NO: 12942
  Clone ID: LIB3040-009-Q1-E1-F10

SEQ ID NO: 16017 - DNA, 410 bp, Glycine max
  unsure (1)..(410): unsure at all n locations
  Clone ID: LIB3040-009-Q1-E1-F11
gtctttttgctgtgggaagaggaaccctagctagggtttggcagaagctgatccgagaagatggtgcagcgtctcacctaccgcaaacgccacagctatgctaccaaatccaaccagcacagagtcgtcaagactcccggtggcaagcttgtttatcagaccacgaagaagagggccagcggacccaagtgccctgtcactggaaagaggattcaagggattccacatttaaggccagcagagtataatagatcaaggttacacagaaaccgaaggactgtgaaccgtgcatatggtggtgtgttgtctggcagtgctgttagagaaagaatcattcgagctttcttggttgaagagcaaaagattgtgaaaaaggtcttgaagattcaaaagacanaggaaaaacaagc

SEQ ID NO: 16018 - DNA, 268 bp, Glycine max
  unsure (1)..(268): unsure at all n locations
  Clone ID: LIB3040-009-Q1-E1-F12
gacgccaaaaccactgtatcagtgtgtccttccattccaggtttttccaccacactagaaagtaactttaaggttactatgatcttttttcaacatgattcatcacattttcaagcacacactgcattaagaagcgagaaatcataactcatacatatatatggtcacttataaataattcttatagcanaacggatggcatggaaagcgtanggaagaatgtgcctgtaattgtccttgtccaaattaaagtctgtaattggccttt

SEQ ID NO: 16019 - DNA, 192 bp, Glycine max
  Clone ID: LIB3040-009-Q1-E1-F2
gagctttcagttggcgcgggtgaggtagaacccttccactgtggtgactctgcgatgggtgcctacaagtatgtttcagagctatggcgcaagaagcagtctgatgtcatgcgcttcttgcagcgggtgaggtgctgggagtataggcagcaaccttccattgttcgtttgacaaagtctacccgccctgac

SEQ ID NO: 16020 - DNA, 375 bp, Glycine max
  Clone ID: LIB3040-009-Q1-E1-F3
gacatagcagaatggcttctactcaatgtttcttgcaccaccatgctcttaccacccctgccagatccccatcacaacgcatcatggttagcaccaagcctaaccagcttgtttgcaaggcacagaagcaagaggatattgatgtcagcccaatctctcgccggttagctctaaccgtgctcattggtgctgctgctgttggctccaaagtccaacctgctgatgcagcttatggggaagctgccaatgtgtttggaaagccaaagacagacacagatttcctgccatacaatggagatggattcaaactatcgattccctcaaagtggaacccaagcaaagaagttgagtacacaggtcaggttgttagatatg

SEQ ID NO: 16021 - DNA, 363 bp, Glycine max
  Clone ID: LIB3040-009-Q1-E1-F5
ggttcaaagttgaagctgaaagtgtctgaaactggaagttgatatctataaagcgctcactctgtcttaggtggggttttaagtgttgtgttaataacagaacttcatcgtgacaatggttttgataagtggcaacaacaaaagtgtcttacaacaaacaaatgatgagagggccaaagcacaaggtgttacagtgcttcagaattcacatcagcatggaaacaagaacattgaaagtgggcgtacacagaatgtggtcaactctgggttgaccaaagcaatatcaacaatggatgaattcaagtgtggatttccatcagaaggcctatcgaccacatcaaataaatggtggggaaatagtga

SEQ ID NO: 16022 - DNA, 365 bp, Glycine max
  Clone ID: LIB3040-009-Q1-E1-F6
ggtttctgcagcagttgagaggaggcactgtggcagaagtcctaggagtgtaaaacagagacgcaaaatgaagacgatcttgtcgtctgagaccatgaatattcccgacggcgtgagcatcaaggttcacgctaaggttatcgaggttgagggccctcgtggaaaactcgtgcgagacttccaccatctgaacttggacttccaacttattaccgacgatggcggtaaaaggaagctcaagattgattcttggtttggttctcgtaaaacctccgccgccatccgcaccgccctcagccacgttgagaatttgatcaccggcgtcaacaggggataccgatacaaaatgagattcgtgtacgctc

SEQ ID NO: 16023 - DNA, 273 bp, Glycine max
  Clone ID: LIB3040-009-Q1-E1-F7
tcacaatgaggatacaaaagctccctcttctgatttaaagttgaggaaaattgctggcagaatcgaaccataaaatcttagccatcactgagtgatctcttttccccagttatcttttgcctctttctgatttttcgatccctaaatttcactttagttttttcttagtctaattatatttgtgaatgtgtttttagttgtgttctatttgaatgtgttgaggtcagtgatgaattcaatttgcctacattggctgagtatctggtttttatt

SEQ ID NO: 16024 - DNA, 386 bp, Glycine max
  Clone ID: LIB3040-009-Q1-E1-F8
ggagcaaaaccctaatccctatttttcttcctcagtagtgtcatttacgcttctcttctctgcagcaactatgcctaaccctaaggtcttcttcgacatgaccatcggcggtcaatctgctggccgcatcgtgatggagctctacgccgacgtcactccccgcaccgccgagaacttccgcgcgctttgcaccggcgagaagggcgtagggcggagcggcaagcccctccactacaagggctcgtccttccaccgcgtgatcccgagtttcatgtgtcagggtggcgacttcaccgccggaaacggaaccggcggcgagtcgatttatggcgccaagttcgccgacgagaacttcgtgaagaagcacaccggtcccggcatcctct

SEQ ID NO: 16025 - DNA, 381 bp, Glycine max
  Clone ID: LIB3040-009-Q1-E1-F9
ggtgttgtgccttttcactactactttgttcggtagctacttcgcttctaccctccattccattctctgaagtgcaggaacaatgtctgagaaaatcacagctgaaaaccttttaaacacccttgtggaaacacttactgagaagcaaaaatctggatcattttttgaagaagacaagtcaagctcagtgagctaccaattcaacagactgtttggacgccagaaacctgtgcaccatattttacggggtggaaaatctgctgatgtcttgttatggaggaacaagaagatctctgctagcgttttatcggcagcaacagctatatgggtgctttttgaatggcttaattataatttcataactattttagtcattgttgt

SEQ ID NO: 16026 - DNA, 81 bp, Glycine max
  Clone ID: LIB3040-009-Q1-E1-G1
gccggtttcccgaacgatttgatggtttggaatgcatttcccaagcaacgagtcttcggttcgaaaccagcagagagagac

SEQ ID NO: 16027 - DNA, 281 bp, Glycine max
  unsure (1)..(281): unsure at all n locations
  Clone ID: LIB3040-009-Q1-E1-G10
gacgttcacattcaggaatcgttttcttcagaaaatttgccatcgttgagggaagcgcgagagccttcgttgttcaagatgagagctaagtggaagaagaagcgcatgaggaggttgaagaggaagcgccgaaagatgagacaaagatctaagtaggtgcttgaacaaggagtggagatgatgtgcttttccatctgctaccagcttcatgacattttatgctgtcatggctcttatgatgatcttgaggtctantggcgangggagctttcatcttgact

SEQ ID NO: 16028 - DNA, 433 bp, Glycine max
  Clone ID: LIB3040-009-Q1-E1-G11
gaatcctcagaatcagcttcagcctttctctctaactccctcactcacactcacagttaagcaatggcggggaaaggaggaaaggggcttcttgcagcgaaaaccaccgcggctaacaaggacaaagacaaggacaagaagagacctatttctcgttcatctcgtgccggaatccagtttcctgtgggacgtatccataggcagctgaaacaaagggtccaagctaatggacgtgttggtgccactgctgccgtatacttagcctcaattcttgagtatcttactgctgaagttcttgaacttgctgggaatgcaagcaaggatctgaaggtgaaaaggataacaccaaggcatttgcagcttgctatcagaggagatgaggagttggacaaccttattaaagggaacattgctggtggtggtgtcattcctc

SEQ ID NO: 16029 - DNA, 379 bp, Glycine max
  unsure (1)..(379): unsure at all n locations
  Clone ID: LIB3040-009-Q1-E1-G12
gtcagcaacagcagttacagcactcaaaaacctagagcgaagagcgtgaaggcaccggccgccggccatgacattcaagcgcagggacggaggtcgcaacaaacacggccgtggccatgtcgaattcatccgatgctccaactgcggcaaatgctgccccaaggacaaggccatcaagaggtttcttgtgaggaacattgttgaacaggctgcagtcagagatgtgcaggaagcctgtgtctatgaacaatacacgcttccgaaactatatgtgaagatgcagtactgtgtttcctgtgctatccattctcatgttgtgagggttcgatcncgcactgatangaggaagcgtgagcctccacagcgattcatcaggcgc

SEQ ID NO: 16030 - DNA, 273 bp, Glycine max
  Clone ID: LIB3040-009-Q1-E1-G3
gccttcctctcagtgcagcatcgtagagaaataagggaaaaatggtgtcgctgaaactgcataagcgcctctccgcaagcgtgctcaagtgcggcagacgaaaggtttggcttgaccccaatgaagtcaacgaaatctccatggccaattctcggcaaaacatcatgaagttggttaatgatgggtttatcatcaggaagccaaccaagattcactcccgctcacgtgctcgtaagatgaatgaggcaaagaggaaaggccgccactccggtt

SEQ ID NO: 16031 - DNA, 334 bp, Glycine max
  Clone ID: LIB3040-009-Q1-E1-G4
gaacatcaactaactccttcttagttcaacaaaaaaggtcctcaattttccacactttcctttccttcaacaaaaaatgtcaacagatttcacgcttttgttcttcccggaactcatgcagtcccctatgatcactttccaagccaccctctgcgtccttctcttcaccctcatgttcaagctgctcttcactcctggtgggcttccttgggcctgggcccggcccagacccatcatccctggcccagtaactgccctgttagggatctttactggctccacgcctcaccgtgctttatccaaactcgcccgtaattaccacgcggaaaaactc

SEQ ID NO: 16032 - DNA, 331 bp, Glycine max
  Clone ID: LIB3040-009-Q1-E1-G6
gtgctgagattgcccacaatatatccacaagaaagagaaaagatatagtcgagagagccgcgcagcttgatgttgttgtgacaaacaaaacggccagattacgcagccaggaggatgaatagtctaaatgactgaaaaagtcacttatctgtagtgattctgtagttcaatatcgaagttgcagtttaattttaaattgaattttgcttcagtgtattttgcttcagtgtattttgcttattgggaaccaggtttttgatgtgcctctttcatgtaagtcgtatcttgatttgtttttaggaacaaaaatatacgaaaccttaatctaaac

SEQ ID NO: 16033 - DNA, 347 bp, Glycine max
  Clone ID: LIB3040-009-Q1-E1-G8
gggtggagtgtgcaaaagagcgtcgtagtcgcaaccctaatcagaagaagcgcagcttcaagcgagtgacagccaccagccatgggtcgtatgcacagccgcggtaagggtatatcctcttctgctttgccctacaaaaggacacctcctagctggctcaagatctcttcgcaagatgtcgaagaaaatatctgcaagtttgcgaagaaaggtttgaccccgtctcagattggtgtcattctcagagattctcacggtattgctcaggtcaatagcgtcactggcagcaaaatccttcgcatcctcaaagctcacggacttgcgcctgaaattccagaggacctgta

SEQ ID NO: 16034 - DNA, 353 bp, Glycine max
  Clone ID: LIB3040-009-Q1-E1-G9
ggccctagtttttcttcctccttcagccgttgccctgcttcaaccttgcggaagaagaagacgccgcagccatggtgaagtactccagagaacccgacaatcccaccaagtcctgcaaggccagaggcgctgaccttagagtgcatttcaagaacactagggagactgcctttgccatcaggaagttgcccctggttaaagctaaaagatacctggaggatgttttggcccacaaacaggccatccctttccgacgcttctgtggtggtgttgggaggacagcccaagctaagagcagacactccaatggtcaaagacgctggcccgtcaaatcagctaagttcatcctagat

SEQ ID NO: 16035 - DNA, 104 bp, Glycine max
  Clone ID: LIB3040-009-Q1-E1-H1
tgcccagtgatggaaaaataaacctattgaacggctacatgattatgttcgtaactggatctgcaccattctcattctctctctctctctctctctctcccccc

SEQ ID NO: 16036 - DNA, 407 bp, Glycine max
  unsure (1)..(407): unsure at all n locations
  Clone ID: LIB3040-009-Q1-E1-H10
gcaggctcgtttatataaaagggagtccttatcttctcgcattgttttaggttttcttagatagagttgttaccatttgctcccagtacagagcttaaccgagcttcacaaagatgaatcgggaaaagttgatgaagatggccggttcggttagaactgggggaaagggtaccatgagaagaaagaagaaggctgtccacaagacaacaaccacagatgacaaaaggcttcagagcaccctgaagagaatangggtgaatgccatcccggctattgaggaggtcaatatctttaaggatgacgtagttatccagtttctaaatcccanagttcaagcatccattgctgctaatacttgggttgtcagtggttctccacaaacaaagaagttgcaagatatactccct

SEQ ID NO: 16037 - DNA, 340 bp, Glycine max
  Clone ID: LIB3040-009-Q1-E1-H11
gaccgtgcgctagttctgagtattctgatcgctccctgagagagctcgtcgcggcggttgcataagaagattgcaagatgaagttcaacatcgcgaatcccaccactggatgccagaagaagctcgagatcgacgacgatctgaaactgcgagcattttgggacaagaggatctcacacgaggtcatcggagatgcactcggtgaggaatttaagggctatgtcttcaaaattaccggaggttgtgacaaacaaggatttccaatgaagcaaggagtgctgactcctggtcgtgttagacttctgcttcacaggggaactccttgcttccgtggatatgg

SEQ ID NO: 16038 - DNA, 338 bp, Glycine max
  Clone ID: LIB3040-009-Q1-E1-H12
atacaacggtacagctggggggggaccactgtttgggatcgtgcgcaacttgtgaatattctgatctctccatgagatagctcgactcggaggtagttttctgtgattgctgaatttagttaaggatgttgaatctgagattcttgtgctacaagatgctcgtagatcaacgacgatgttaagcacgtaagcattgttgggacattgaggttctcacaggcaagtcatcagagactgtcatctgatgggtaagtgcagcataggttttgagacttacccatggttgtgacaatttgcgtggtcgatgcaattacatattgtcgcatcatgatcttgtt

SEQ ID NO: 16039 - DNA, 363 bp, Glycine max
  Clone ID: LIB3040-009-Q1-E1-H2
gatccaactctctaaacaacacattaacctttcgcaatccccatctcctcaccttagtcatccactgctaatttctatggctccgaaatggacgctggcggaaagatcaagaagggcgccggaggaagaaagggcggcggccctaagagaaaaccggtttcaaagtccgtcaaggacggtctccaattctccgtcggaagaattggccgtaatttgaagaaaggaaggtacgcccagcgtgtcggtaacggtgctcccgtttacttggccacagttctcgagtacctagctgctgacgtgcttgagttggctgggaatgctgcacgtgacaacaagaataacaggattattccgagacatgtg

SEQ ID NO: 16040 - DNA, 333 bp, Glycine max
  Clone ID: LIB3040-009-Q1-E1-H3
gattataacactgtcactcttacattctcagtccaaatcattcttcttcttccatcgacaatcagtctttgtgtttcaagatggctcgtacgaagcatacagcaagaatgtccaccggaggaaaagctccaaggaagcagctcgccaccaaggcagcacgtacatcggctctcgcgaccggtcgcctgatcaagctccaccgtttcaggcctgagatagtggctctgagggagattcagcattaccataacagcactgaacttttcattaggaacacttcctttctagatgctcgtaaaggaaatctctcatgacttcaaaaccgatctatgc

SEQ ID NO: 16041 - DNA, 366 bp, Glycine max
  unsure (1)..(366): unsure at all n locations
  Clone ID: LIB3040-009-Q1-E1-H4
cacgcgtcaacccaagcgtccgacggcagaaaacgacataaggggactctcactctcactctcactctctcagctcaggagtgtataaccctgacaagtcaatctgaggtcccttgccctaaaggaaaagttggttgactattcgtcagttcgatggatcntgttattttgtggtccttcccatctccttcaacatttatttccttacataccttggggatgtaagatctgagtggaagtcctataagacgcgtcagaaggaacatgatgagaatgtgaaaaaaggtaacaaacgtctcaaacaaaggaatccatcaaaagatggtcttgtctgtaccgctcgtaagccctggattgctgttggga

SEQ ID NO: 16042 - DNA, 340 bp, Glycine max
  Clone ID: LIB3040-009-Q1-E1-H6
ggatatgaacggtgaaccggatcccccttcgaagtgaattatattgcagtgaatcacacacactctgaacaacgcccaccatgcaggccagtgataggtttaacatcaattcccagcttgagcatctccaagccaaatatgttggaactggccatgccgatttgaacagatttgagtgggcagtgaacattcaacgagatagctatgcatcatatattggacactaccctttactgggattctttgctaatgctgaaaatgaatctaatgggagagaacgctacagctttatgcagaaaatgctcctgccttgtggtttgcctcccgaaagagaagaaga

SEQ ID NO: 16043 - DNA, 108 bp, Glycine max
  Clone ID: LIB3040-009-Q1-E1-H7
gagggttacacgccgtcgtcactgtttttgtgtgtcgcttcttcgtatgtgcagctgcaatggtgaagggacgccaatgagaacgtgtcagactctacctgaggggta

SEQ ID NO: 16044 - DNA, 332 bp, Glycine max
  Clone ID: LIB3040-009-Q1-E1-H8
tgggggccgaaaagtagtaccaagatggcttcagttgtgtatctcctctttggcttccatctcattgttatcatgtcaagttccttacccgcaactagtgaagtgtttgcagaacagtatccatccacagaacccgtggaagaaaaactcacccaactcgacttcgatttccataacaacataacgggggaacacccaactgctatgaaaactgttttgcctcctaaagggtccattcatggttttggggctacttacatgatggatgacactctaactgaaggacaaagtccaacttcaaagcttgtcggaagatttcaaggaatatacgc

SEQ ID NO: 16045 - DNA, 355 bp, Glycine max
  Clone ID: LIB3040-009-Q1-E1-H9
ggagagtaagggcggtgcagtgcttcaaacccctttttctcttctcatttcctttcatcactcttgcatcatttcttcttctcgcaattttccattttcacacttttagcaacatcttttaatggcgtcccaaatccgtgagtggtctggaatcaatacattcgcacctgctacccagactaagttgcttgaactcttgggaaatcttaaacatgagaatgtgaactccttgactatacttgtgatgggaaaaggaggtgttggaaaatcttcaactgtgaactccatcattggggaaagagtggtttcgattagtcctttccagtcggaagggccaagacctgtgatggtgtca

SEQ ID NO: 16046 - DNA, 296 bp, Glycine max
  Clone ID: LIB3040-010-Q1-E1-A1
gtattggtcaaacgggtatcatcagctgaagaaagttttgatagagcgctacaatcattttcctcatgagtgtcgatgattgaatttctttcaagagttgaatggtgtgaggtcttcccgtgcaatttttacaccttatcgtggctagtgtattggttgcgtatcttagaacataatcaactgggtaatgtgtcatagtagtcaaatttgttatgtttttggttacttgagtcttgatgttgtaaaagcgtgatcggagattaatttttagacatggtcatttaaaagaggggggg

SEQ ID NO: 16047 - DNA, 429 bp, Glycine max
  Clone ID: LIB3040-010-Q1-E1-A10
ggaagagtgttgtgttgagatgggttggtattgaggggaatgttggctggctcgaggcttttcacaaatgaggttcacagtggatggaactataaggcttcggaccaggcttcattcccctcaaaagttcttcctttcatttgtttctacttcaaacttcaaacacaagatcatgtgtgttgtgtgtggttgagaacttgacatgcttcttcttcctagcttgcaaaggtgaggttgagaggaatgttgtctggctcgaggtcatggaggaggaggaggagtagagtactgagatcagtgaaagtttccaatggaaatttaccctcttacacaaaaaaatgattctcggaccaggcttcattccccccacccaacttttgctttttccttaatttaaatttctttctctccattttcatatctcgcatg

SEQ ID NO: 16048 - DNA, 395 bp, Glycine max
  Clone ID: LIB3040-010-Q1-E1-A11
gacacaccgtttgttctattcttaactcaacttctgctacccactctcttcttccaagtccaaccacgcttttctctacagtcatgggcaaggtcaagatcggaatcaacggatttggaagaattggccgtttggttgccagagtcgctctgcaaagagacgatgtggagctcgttgccgttaacgaccctttcattaccaccgattacatgacatacatgtttaaatacgacagtgttcacggacactggaagcatcacgatgtcaccgttaaggacgagaagacccttctcttcggtgacaagccagtcactgtttttggacacaggaaccctgaagagatcccatgggggtcaactggagctgatatcattgttgaatccaaccgagttttc

SEQ ID NO: 16049 - DNA, 336 bp, Glycine max
  Clone ID: LIB3040-010-Q1-E1-A2
agaaggggagcgaaacagagagtgatttcagtgagtgatcggtgttcacttgatctcatcataatcgtcagcgtcaattgaagaagatgccgatcagaaacatcgccgtcggaaggcctgaagaggcgactcaccccgacacgttgaaggcggctttggctgagttcatctcaaccttcatcttcgtgttcgccggctcaggctccggcatcgcctacaacaagctcaccgacaacggcgctgccacccctgccggcctcatctccgcctccatcgcccatgcattcgccctcttcgtcgccgtctccgtcggcgccaacatctccggcggccacg

SEQ ID NO: 16050 - DNA, 275 bp, Glycine max
  Clone ID: LIB3040-010-Q1-E1-A3
gagggatcgcatttgtaatcacaataacagattttcaaactcatcaagcttcaaagcgaatcttattgagaaaatgtctggtcctggtaaaggtggcgacggtttaggaaatggaggtgtcaataagcataagaaggttcttcctgacattcatctagtgcatcacaaaacctgtcattcgtaggttagcgacaagatgttgcatgaaaaagatcagtggtttggtctacgaagcaaccagcagaattctgaccatactcctggggaacgtgaat

SEQ ID NO: 16051 - DNA, 338 bp, Glycine max
  Clone ID: LIB3040-010-Q1-E1-A4
ggagcatcctcactgcatttgttcaataaagggaagatggtctcttgcatatacctaaagtgttgaagctgatggctctatgatgcagcaaactggcatgtttatatctcttctgaagcaacaccttggcttggtctatgatatgcctgtaatagttagatatgcttgccacccaagagatatacggtgactttgtgaattgggtggctgcattgtgactagtctcattatgctcgtgctcatgtttctgcaagcaacaccagccgttctcaattaggatcacagctacctcctacctgtaaaggcagccaatgatgaacagaaaataccgtttttac

SEQ ID NO: 16052 - DNA, 316 bp, Glycine max
  Clone ID: LIB3040-010-Q1-E1-A8
gacttcaattgcgatcaaattagttcattcactttgcgcaattccctacctctcctttcaagatgcagatcttcgacaagactctcaccggaaacaccatcagccttgaggtggtaagctctgacaccatcgacatcgtcaaggccaagatccaggacaaggaaggaattcccccggatcagcaccgtctcatcttcgccggaaagcagctcgaggacagccgtacgctcgccgacgagaacatccagaaggagtcaacccttcatcttgtccttcgtcgccgtgggggcatgcagatcttcgtcaagactctcac

SEQ ID NO: 16053 - DNA, 384 bp, Glycine max
  Clone ID: LIB3040-010-Q1-E1-A9
agggattatcatagtagatattcattccccttatctttctctcttctctctccccgcccaaaccctaactccctaccctattccgctttctctcatccatcatgaaaggaggaaagtccaagaccgaatctaaaagagccgatgccaaacttgctgtgaataagaagggcgccgccaccaagactaggaaacccgccggaaaggggaaggcagcgaaagatcctaacaagccaaagaggcctccaagtgctttcttcgttttcatggaggaattcaggaaggtgttcaacaaggaacatcccgacaacaaagcagtgtctgctgtgggcaaagctgctggagcaaaatggaagacgatgtctgatgctgaaaaagcaacttatg

SEQ ID NO: 16054 - DNA, 193 bp, Glycine max
  Clone ID: LIB3040-010-Q1-E1-B1
tgtagttcagcgtcatcctttcattagcataccattatatcagattccaaagttcattatccgcatgaatgacactaagaggatttctgtcattattggagaagggtggggctcttacgtacaatcattaccaactcattccgagtggcttccaagttgcgtatcttagaacataatcaaatggcgtgcgctc

SEQ ID NO: 16055 - DNA, 308 bp, Glycine max
  Clone ID: LIB3040-010-Q1-E1-B10
ggtgtcccacgagtccataaagctgcaaaatgagaaattcgtcgtcactttcacactttctctcgcattcactcatgcacacgtatcattgcataaaggtgacggaaggcgcttcgtgcatcgaaaatcaccgcggcgaattctgacaaagctacggacagtaacaaacctaattctcgctcttcccgtgctgaaatccagtttcctgtcggacgtatccataggcagctgagacagatggtccaatccaactagacatgttgaggcaacagctgcactgtacttagcctcaactctagagtatctga

SEQ ID NO: 16056 - DNA, 359 bp, Glycine max
  Clone ID: LIB3040-010-Q1-E1-B11
cccacgcgtccggcgagaagtacgagagaacggggcactttcattctctaggaaaatctaattcgctttggtcttcatcctctgttctgatccaagtatggcttctaaactcatcttgaaggagctcaaggatttgcagaaggatcctcctacctcatgcactgcatgccctgtggctgacgacatgtttcactggtaagccacaatcatgagacctgctgataccccatatgcaggtggtgttttcctagtttcaattcattttcctcctgactaacccttcaagccatcaaaggttgcttttcggactaaggtgttccactcaaagatcaacagcaatggcactatatgtcttgaca

SEQ ID NO: 16057 - DNA, 337 bp, Glycine max
  unsure (1)..(337): unsure at all n locations
  Clone ID: LIB3040-010-Q1-E1-B2
gatcgttattgtgttgcttaatcttttttccacaaccttgaatgtttaccgccccgccgggataaggagaaagagaaagaggatctgcgtcgcaggcactgttcatcgccatgtctcgggttgataacagaaattcctcagccaccaagcgtgctaggactgatggtagtcgtanggaagatgattggacatgccccagctgtggcaatgtcaatttctctttcaggacaacttgtaacatgcgtaattgcactcaaccaaggccggctgatcataattcgaaatctgctgccaagcctctacaagctccgcagggttattcatcctcagctcctta

SEQ ID NO: 16058 - DNA, 141 bp, Glycine max
  Clone ID: LIB3040-010-Q1-E1-B5
ggagaacctttgatgtttagggaaaaggagagaaaaatgaatggtgaaaatttgatttctgaaagacttctgttgaaatctgtgtccatgtaaacattactcttctggttgatatttagtaacaagtgtctctttctgtcc

SEQ ID NO: 16059 - DNA, 340 bp, Glycine max
  Clone ID: LIB3040-010-Q1-E1-B7
gattgcacagtgttattttcagtatcagcatcatggctccaattgcagtgggagatgtcattccagacggcattttggcttacttggatgaagaaaacaaaccccaaactgtctctattcactctctcgccgccggcaagaaagtcatcatctttggggttcccggtgccttcactcctacatgcagcttgaagcacgtgcctggcttcattgagagagcagaagagctgaaaggaaagggtgtggacgaaataatctgtatcagcgtgaatgatccctttgtgatgaactcatgggccaaaacgttcccagagaacaagcatgttaagttccttgctga

SEQ ID NO: 16060 - DNA, 309 bp, Glycine max
  Clone ID: LIB3040-010-Q1-E1-B8
gacactaaacaagttaaaagaagagcatcactgaactaacaaagcaaccctatgtcgaaggtggtttgtgtcaccggagccagcggcgccatcggatcatgggtggtcctactcctcctccagcgtggttacaccgtccatgccaccgtccaagatatcaaggatgaaaatgacacgaaacatttggaggaaatggaaggagcaaagagtcatcgccatttttttgaaatggatcttcttgacatcgactccattgccgctgccagaaagggttgttccggcgtaatccaccttgcatgtcctaacatc

SEQ ID NO: 16061 - DNA, 410 bp, Glycine max
  Clone ID: LIB3040-010-Q1-E1-B9
gaacgttttcatactttgcagcatccattcttgttctcttctttctttcgatcagggtttcccctcgtctccgggctcgtttcgttctcgaataatcgatctacgataatgactcgcggtagccagagggatcgtgatcgcgaaagggctcaggctagaactggtgctaaaggcaagcagaaagatgatggattgacccctgaacagcgcagggaaagagatgcaaaggcgctgcaggagaaggccgcaaagaaagcggcacagggtgcaggagggaataatgcagctggaagcaaaaaataggcaataattcaatgagtagtttgagtttgccgtatgttgattgtggacatggaatttgtggaaattttatgttgcattaatcatggagtatgatgtgtttattaatg

SEQ ID NO: 16062 - DNA, 274 bp, Glycine max
  Clone ID: LIB3040-010-Q1-E1-C1
ggtctagcccgccgagaaaaccctaattcgctcgcagtcacccaagaggcgaatccttaccattgctcgagatgggtgaagaagtgaaggccgtggttccagagtctgttttgaagaagcagaagagagaggaggaatgggcgttggccaagaagcaagacctcgacgctgcgaagaagaagagagccgagagccgcaaactcatctacaacagagctaagcagtacgctaaggagtacgatcaccaggagaaggaattgattcggttgaaacg

SEQ ID NO: 16063 - DNA, 253 bp, Glycine max
  Clone ID: LIB3040-010-Q1-E1-C10
catccatgatctggatgtgaatgagtcaaattacttatccctcggtcttttaatgaggtagctctccaggaattgtgcattaatgttctatgaaacgtattcatgttactgcttcgacgcatattccctacaatttacatgcggttctaatacatcctaataactgagatacatgtattgttatacaactgattcttatttcagaacatcgaccttactttatcagtctttcaaacaataagggatttcactt

SEQ ID NO: 16064 - DNA, 301 bp, Glycine max
  Clone ID: LIB3040-010-Q1-E1-C12
atctgctctatagcactcaaccacacgatctccttcccaatggtcaacattgcgcgatctaaatcagcgctaggtgcagtcgtcgtcataaatagccaagttcaagctaacgtaagctcctctttgtgcaagctctgtatgatccatttctggatccacgtgactctgacgtcacaacgctaccatgacacgctctcatgtcctcttcaatgtccgtcgatttcaattccacgaacctcgcatcaagtctagtgacacagtctaaccgtcgctcaaccaatccaccttgcgtcacaacaaa

SEQ ID NO: 16065 - DNA, 355 bp, Glycine max
  Clone ID: LIB3040-008-Q1-E1-C12
gcccccgaaaaacccttaaaccccgaccttcatatttgcagtgctagtctgtttatttcgtcagctatgtttttgtcacgaacacttggacgaacactatttgctgcagctgccagatcaaaacaatatgccactacagcagctgctgctactggcacagaaggacacaacccccttcaggagttctttgaggcagacaggagccctgatgatgacaaacctgttgtttatggtcggagttggaatgcgtctgaactgcgtctgaagtcttgggacgaccttcataagttgtggtatgtgttgttaaaggaaaagaacatgttgatgactcaacgtcaaatgcttaatgcacaga

SEQ ID NO: 16066 - DNA, 328 bp, Glycine max
  Clone ID: LIB3040-010-Q1-E1-C2
gactttccattctcttcaaacctaacgcagcatcgctattctcttcattccatggctttgcccaaccagcaaaccgtggattaccctagtttcaaactcgttagcgtcggcgatggtggcacaggaaagacaacctttgtgaaaaggcatctcaccggagaattcgagaagaaatatgagccagccatcggtgtggaggttcacccagtgggattttttcaggaactgtgggaagattcgattttactgctgggatactgctggacaggagaaatttggtgggctcagggatggatactatatccatggacaatgtgctattatcatg

SEQ ID NO: 16067 - DNA, 102 bp, Glycine max
  Clone ID: LIB3040-010-Q1-E1-C3
ctacacttaaaattacaattttagcgtgggaaacgtcgctgttttatttatgttcaatgcagtttgacaactgcagaaaatgacatatgcagatattgcgga

SEQ ID NO: 16068 - DNA, 113 bp, Glycine max
  Clone ID: LIB3040-010-Q1-E1-C4
gcacctaaggggagacatcttcggatttcagcatttctactctccaaacattcgaattcgcattctcatcactctttcgccattccatggcttcgggatataacacatcggcg

SEQ ID NO: 16069 - DNA, 286 bp, Glycine max
  Clone ID: LIB3040-010-Q1-E1-C5
tacaacagcagagaaagggaaagttaatgggagcctctcatcttctgtcgaccagcttttgcttcgttgtgaacatggacatgaggacaacaggttgcatcctcatctagccctgcatccgagttcatgcgtcttagatggtgtcacaaactgcaggacaagtgtgttagtcattacagcgtcgggttcgaggaggatgtttaagagacacaacatctgcgccttggactgcaggaacgattggtgctctggtgtcatgtccaaaaggttcggacggatcggcctt

SEQ ID NO: 16070 - DNA, 362 bp, Glycine max
  Clone ID: LIB3040-010-Q1-E1-C7
agacttctgccaaaaagccttactccaggtccattgtcggtgccactttggaagttatccagaaaaagagagctgagaagccagaagttcgagatgcaaatatggaagctgcccttcgtgaaattaaggagacgaacaagaaaacaaaggatgagaagaaggctaagaaagcagagtttgccaagtcccaaaaatcacaagggaagggaaatgtttcgaagggtgccatgcccaaaggtcccaggcttggtggtggaggcgggaaacgctgagcctttactttggttcccatttttggctacatttaaaagagtgttgtgttgaatctgtactattttactgttttagtaaaccgttggttg

SEQ ID NO: 16071 - DNA, 418 bp, Glycine max
  Clone ID: LIB3040-010-Q1-E1-D10
cagcggtaaagttgtgccttggtgacctgttggtcatgggttcgaatccggaaacagcctctttgcatatgcaagggtaaggctgcgtacaacatccctcccccataccttcgcatagcgaatagcctctgggcaatgtggtactaagttttttatgagataagattttttattgttttactgataagggactgcaatcattcattccatcacttgtatatgctgcctatagatggtaaacttagaacagtatgctatagagaataatggatgaatacagaatactccacatatatgaatataatacacagtaacatttttggtattttccttgacagactgatctgtaatatatttacaaatttcatcattatctataatttctattagaatattcactttaagatggattgattca

SEQ ID NO: 16072 - DNA, 421 bp, Glycine max
  unsure (1)..(421): unsure at all n locations
  Clone ID: LIB3040-005-Q1-E1-H5
agtgagaagaaagaaaagctgcattgggtaggttaggcgttgcagaaccgaaacacgtcacctctgccagccattttttctttttttcttttttcggattatagagaacgtgagcgcgaagatcggatactcgcaccgatttccttcattatcacagtttcaaccgaacgaacgactcctctccaaccatttctcgcagaattccagttccagtttcaggttcactttgttgatggctaaagttggtaagttgcggagcaaggctcaaggtcagagggcaaccccgcatcttttatcgtgtgcaagaaaaaatctgaaagatgttaatgtaaggaacaactcttctaaagcatcggagaagaaagattgggaagatgcaacctgctcagtctgtatggaggtcnnccacaatgctatcctt

SEQ ID NO: 16073 - DNA, 426 bp, Glycine max
  unsure (1)..(426): unsure at all n locations
  Clone ID: LIB3040-005-Q1-E1-H6
ggagttgaaatcgaaagggaagcggtggtttaggttaggatttggtgagtgagtggggatggcgaagttcaatgtggtgcagaagcgaaggagagctctaatagcagagaagaagagacagcttcacggagaccctttaaccggcaagctcaagatcaaggaccaacccctttccctatccggaaaacgcaaacgcaagctcttcaaaaaatggcgccgggaccaaaaggacgccttacagaatggtttggtaaccatggaagatgttcaaatggcagttgctgaaggggataccaaagatacccctagaccttcaccaaaaattcacttaaagaagaaggccttgaaacttaaacagctcaggcgcaaagggaagancangaganaatctgatgtgcctgctgatgtttcggctgatgcaatggt

SEQ ID NO: 16074 - DNA, 411 bp, Glycine max
  Clone ID: LIB3040-005-Q1-E1-H7
gacccaccattttgtgcttctttctgtgtgcaagaaaggtaaaagctttcacacaccaagaaaagtagccatggctgcttgctcaagaacttctcttttgctccttttctttctctttggattctccgcagctaaggaactattggttggaggcaaaatagatgcttggaagattccatcttctgaatcagattcccccaatcaatgggctgaaaggtctcgtttcagagtcggcgatcatcttgtgtggaaatatgagaatgggaaggactcagtgttggaagtaacaagggaagattatgccaattgcagcacatccaagcccatcaaagagtacaatgatggaaacacaaaggtgaagctagagcatgctggtccattctacttcataagtggagcaaaggggcactg

SEQ ID NO: 16075 - DNA, 303 bp, Glycine max
  Clone ID: LIB3040-005-Q1-E1-H8
gggtcacacgcagttgtattgtagaactgaacaagggtttctctttctctttctctgtctgcttcttcactttctctcgtttcaatcgaaaaaaatcatgggcagaaaattcttcgtcggtggcaactggaaatgcaatgggaccactgaggaggtgaagaagattgttactactttaaatgaagctaaagtccctggagaagatgttgtagaagttgttgtgagccctccttttgtgttccttccttttgtaaaaagtttgctgcgccctgatttccatgtctccggccaaaattgttgggt

SEQ ID NO: 16076 - DNA, 413 bp, Glycine max
  Clone ID: LIB3040-005-Q1-E1-H9
gctttttgtgcgtagcgtagaaatgactccatctttgcgattctcaactttctctctctaaaaaacccatcagagcatgaggagagagaaacttccctgcccttccatttccctctcgattccttcgcctttgctttcgatcctttgctagaagagaaccttattcctctctgtctctcccccttcaaattcccttccttttcttccatattcactctctcttcctaaccgcccgatgcactttggttttgcaaactaattcgttggctaaattactccgattgtgaactggttctgttggaatatccaaaatggcaaaaggtagcaggggaagacacaggattgcttctcgtcaattcagagtgactccatacccactggcttcttgcaaaagggacatttgtgaggacatg

SEQ ID NO: 16077 - DNA, 276 bp, Glycine max
  Clone ID: LIB3040-006-Q1-E1-A1
gatagcaaaatcgtttctccaatttaatcaccattgtacaacccaattcccttcgtcgttttcgattaagagagcaatggcacgtaccaagcaaaccgctcgcaagtccaccggaggaaaggctccgaggaagcaattggcaaccaaagccgctcgcaagtcagccccggcgaccggcggagtgaagaagccccaccgcttcacgccaggaacggtggctctgaaggagattcgaaagtaccagaagagcaccgaacttctgatccgaaaactccc

SEQ ID NO: 16078 - DNA, 282 bp, Glycine max
  Clone ID: LIB3040-006-Q1-E1-A11
gaggacaaatcactgtttcgttctgtcacgctatgactatcgttcatcaatggccaccctcaacctctcttcgttgcaagctctctcctcgaagattttatgctcgtcttttctgcataatacctctaccccttccttcaatttccagctaataccctcaattgacccgcgctcaatttctctgaaaccctacgtttccgagaagcctcacgcgcatgtggtggcattagacgtgaagagcctcggcgatactgatggcctggaggtgttccctgaataatg

SEQ ID NO: 16079 - DNA, 416 bp, Glycine max
  Clone ID: LIB3040-006-Q1-E1-A12
agggacatcacattttctcaaagtaatttattacttactaaataaatggcggcggcagcagcagtgacggtgctactctcatctatgattccgaccgccaccaacgttacacgctgctctgctttgccttctctgcctcctcgcggcatcaacactaaaaccactttgctcttatcttccctcaaccacttctcagtgtcccgaaaatcttctctgcttcagaccagagcttcttcagaggaatcatcctcagtagatgccaatgaggtgttcacagatttgaaggaaaagtgggatgctcttgaaaacaagtccacagtacttttttatggtggtggggctttaattgctgtttggctatcgtcgattcgtgtgagcgccatcaactctgttcccttgcttccaaagattatgga

SEQ ID NO: 16080 - DNA, 393 bp, Glycine max
  Clone ID: LIB3040-006-Q1-E1-A4
caacagagaacccaaattgttcaaggcaacatccaattggcggtgaggaacgacgaaaagttgagcaagcttctaggagatgttaccattgctaacggcggtgttatgcctaacattcacaaccttcttcttcccaagaaggctgggggctcatccaagggtgctgctgctgacgatgactcttaaatagggattcactgttcacaaagttcttgaatttagattctatgtttgctctctttttttttcctttttatttgtagttatgataattgtgccctttgtagtagtagttaggttttcagtcagatgtgtttaaagaatgctcttacgcatcaagaaaagttgttcaaaatttaaattaatttaatgtcacctttgagtcttgatcta

SEQ ID NO: 16081 - DNA, 377 bp, Glycine max
  Clone ID: LIB3040-006-Q1-E1-A5
gatctcgcgttggtgcaaagcatccttcgcttcaatctctctctctctctttgcgctttctgcagaccgaacatttcatctccaaagggatcaacaggtcgaaggagaaatggggctgacattcacgaagcttttcagccggcttttcgcgaagaaggaaatgcgaattctgatggttggtcttgatgctgctggtaagaccactatcctctacaagctcaagctcggagagatcgttactacaattcctaccattgggttcaatgttgagactgtggaatacaagaacattagcttcactgtttgggatgttggtggccacgacaagattcgtcccttgtggaggcactacttccagaacacccagggtcttaatt

SEQ ID NO: 16082 - DNA, 386 bp, Glycine max
  Clone ID: LIB3040-006-Q1-E1-A6
ggttttgcatggagacaaagaatccatgggaacttcaacggcctcacgggtttctctgacggcgaacgggaagagttcacacggatcgagagctgcggaacatcgatccgctagcgagtgcctgaacgagtcgacgacatgggcgatgcgaaaagcgagagtcatcactcacgacggtttcaccccattcgtcatcgtcaacgatatgaactctgaccccaagcccccactttcatcagcatcacaaccccgtctgatccatctcttcaattcatccatcatcaacgcgacatcattctcattgtcctcgtattttgcccccattcatacatatgcaactttcgttatggatcaattttcacttgcacatcgcacgtagcatggtg

SEQ ID NO: 16083 - DNA, 153 bp, Glycine max
  Clone ID: LIB3040-006-Q1-E1-A7
gaatacacaagcgaagtgaagagagagtgagtatcgtttgaacaatggagttcactttcgacgagaaggacatcgcgtcgtgctgctgaagcaccaaattcgctaaggaaatggcttcggcctctcctttccgttcgttccaggacgctgttt

SEQ ID NO: 16084 - DNA, 367 bp, Glycine max
  Clone ID: LIB3040-006-Q1-E1-A8
ggatcctttgtattctattcttcaaaattcatgtactgcgtttcggaagcatacatacatagctcgtaggaatcaaaccgctcgtaagtccacaagatgaaaggctcctatgaagcagcttgcaaccaatgctgcacgtaagtctgcaccaaccactggtgatgtgaataagccccaccgttatcgtcctgataccgttgctcttcgtgagattaggacataccagaatagtaccgagcttttgatccggaagctcctcttccagaagctggttcgtgaaattgctcaagacttcaagactgatctgcgtttccagagccacgccctgcttgcaatgcaagaaactgcttaagcataacttgttagg

SEQ ID NO: 16085 - DNA, 353 bp, Glycine max
  Clone ID: LIB3040-006-Q1-E1-A9
gacggcattcaccccaccttgttgttctttccatttttctgacttgctccttttttctctcaaacacttcatttcttgagtttttttcactaagtttgttagggagatttacacaatggccaaacactttcttctgcttctttttgcagtatgcgttgctgctattgatgaagaaccatttataggggtgaatattggaagagacctctcagatatgcctcaccccactcaagtagtagcactacttaaagcacagcaaattcgacatgttaggttgtatgatgctgaccaagctatgctcattgcccttgcaaacacaagaattcaagttgctgtatctgtccctaatcaag

SEQ ID NO: 16086 - DNA, 143 bp, Glycine max
  Clone ID: LIB3040-006-Q1-E1-B1
ggttttaaagggaacatcattccaactttttcaagaaacgattgcgatgtacagtgttgcatgatctgtgcctgagttcctggtgaatcatatgaatcgtacatacgtatgtttgtgtacttttttctttttgtcagagaaga

SEQ ID NO: 16087 - DNA, 350 bp, Glycine max
  Clone ID: LIB3040-006-Q1-E1-B10
cgatagaacattgcttttggactgcttaccctcagtgccactccttgcatcccttttccaccagccgatgcaatcactgagttctgcaaccatgcacccaaagattggcatttgacatagtccaaaatgcacatgtcttgtgttggaattggatttagtgcattcacctttccacatattcagtaaatttataaccattgaatgaaaattggactgacttagatttttaaatgtgttttaagttgattgactgagagaaaatgattcgtctaaggctgaatggtcattttggtacctgaaagtgtatagtgattctaagtaagtccctgaattcaagtgggtcttaaaaa

SEQ ID NO: 16088 - DNA, 418 bp, Glycine max
  Clone ID: LIB3040-006-Q1-E1-B12
cggggcctttgaggaaaagaaaggaagagatgcaagaagcaggcttgggaatgatgggtgaggtctccggcgatcagcaccgtcagctgaaggcggagatagcgactcatccgctgtacgagcagcttctggcagcacacgtggcatgcctccgtgtggcgactcccatcgatcagcttccactcattgatgctcaattatctcagtctcaccatcttctacgctcttatgtctcacacaacactctttctctctcccctcatcaccgccaagaacttgacaacttcctggcacaatatttgatagttttgtgtacatttaaagaacagcttcagcaacatgtcagagtccacgccgtcgaggctgtcatggcctgccgtgatatcgaaaataccttacaagctctcactggagtgag

SEQ ID NO: 16089 - DNA, 221 bp, Glycine max
  Clone ID: LIB3040-006-Q1-E1-B3
gatgcttgagttgacacaagttgaaaattttggttaattaaaaggcttgccttggttccccaaccatgtcccagaaacatgcccttctgtaaagaatgtccttcctttggattccgatgggaaacatgttgcggtcaaatacgtctctgaagactggccgacaaatagtgccaaggaaaattttgagaaagttgtattcaacaagactcagaaaaccaatg

SEQ ID NO: 16090 - DNA, 443 bp, Glycine max
  unsure (1)..(443): unsure at all n locations
  Clone ID: LIB3040-006-Q1-E1-B4
acccttcggacggtgcaagaggacaacagaaggggacagcatggaattcttcgcaccacaccaaaaaaggacaacccaaaaagcgcgtcttaataaaggctcttctctgaaaacccccatttcttttcttctttcttcttctctttcgcttcttcgatcttcgatcttcgtcgctgaaaatgagagagtgcatttcaatcaacatcggccaggccgggattcaggttggaaacgcctgctgggagctttactgcctcgaacacggcattcagcctgatgggcagatgccaagtgacaagaccgttggtggaggtgatgatgctttcaacaccttcttcagtgaaactggggcaggaaagcacgtgccccgtgcgatttntgtagatcttgagcccactgtgattgatgaggttaggactgggacattacgccaactattccat

SEQ ID NO: 16091 - DNA, 374 bp, Glycine max
  Clone ID: LIB3040-006-Q1-E1-B6
gacacagcagcatcttctaccttgtgttgtgtctgtttgtgtgagtggcataagcataaccaatggacgccatgaatgtagtgacgctgaaagcaatcgaagcaactccgtcaaccttcaaagactacggtcaggtcatcaaggcttcgccggacggccaggaatttggttcccacgatgctcaactcgacctttctcaaggaactccaaggttctacattatgcatattgaaaatcgcccgcttaagttttctagtattacacatcatgcaagcgtgactcagtgcctcgggtctattggtggccatgtttggtatcttggactggccaagtcatccattgttgattcaaatgaaatcaacgatggcacaagc

SEQ ID NO: 16092 - DNA, 436 bp, Glycine max
  Clone ID: LIB3040-006-Q1-E1-B8
ggcctcagcagaagcagaacgaggagaagcagaaggagcaaaagcaatggcgccgaagaagccgagaaccacgacaaggaaccctgatttggttagggggattggcaagtattcgaggtcgcagatgtaccacaagaggggcatctgggccatcaaggccaaaaacggtggcgttttgccccgccacgatcccaagcccaagcccgaggccccggcccagaagccgcccaagttctaccccgcggacgatgttaagaagcccctcgtcaacaagcacaagcccaaacccgcgaaactcacggctagcattactccagggactgtgttgaccctgcttgctgggaggttcaagggaaagagggttgttttcctgaagcagctcccatctggattgcttcttgtaactggtccctttaagatcaatggggttcctccc

SEQ ID NO: 16093 - DNA, 393 bp, Glycine max
  Clone ID: LIB3040-006-Q1-E1-B9
gacacatgcccatcatcaaagtttcttcctttctctgctctttgtcttctctgacacatttggggccctgttgagtgtgtttttgcaagacggtatggcgaatgacgttgacgttgctgatcgtggctccttctctgggaaggactaccagtaccctccaccagcaacactcattgatgctgatgagctcacaaagtggtccttttacacggctcttattgctgagttcattgccactttgcgcttcctctacattactgtgctcacagttataagggtaaagcaccatacggatcattctgatgcgtctggtggggttggcattcttggcattgcatgggccgttggtggcatgatcttcatccttgtctacttcactgctgggatttcagg

SEQ ID NO: 16094 - DNA, 408 bp, Glycine max
  Clone ID: LIB3040-006-Q1-E1-C1
tgggaactttaaaaattgaaaccgcatccctcattttctctcattcacccaatggctgctacggcttctgtttcctcttctatctgcaacagaatatacaacctttccttcacacacccttccctttcactcaccagcagcaacttccctcaaagacccgtatctcaaaaaccactcagtctcaacctcgagtcccaaagtttcgctctttcctttctcccacttcaccgtcttcccccacctttcgctgcctttgatgggttggaagtagctcaagataccacagagtcccaacaagacgaaccagaaccagaaaccgttgaaaaaacagaacaagaggaagagcaaaaggtttcagactccaatgatgctgggaagctctatgttggaaacttgccatattcaatc

SEQ ID NO: 16095 - DNA, 238 bp, Glycine max
  Clone ID: LIB3040-006-Q1-E1-C11
aacagaacagaaaggggtagtccgtacgtctacgcactaacctcgcacattccctcagtactggcatcgctggaaaattcaatctgggactcaactgaactgatcactcatgattcaccatggatgcattggatctcaacggtgtgccactctgaattctaagtcacgcaactatggcatacctaaatactctgcctttcgttgcgcctcgctaatgactcccaaggttgccgtcact

SEQ ID NO: 16096 - DNA, 421 bp, Glycine max
  Clone ID: LIB3040-006-Q1-E1-C12
ggacttcaattgcaatcagattagttcattctctttgcgcagttccctacctctcctttcaagatgcagatcttcgtcaagaccctcaccggaaagaccatcacccttgaggtggaaagctctgacaccatcgacaacgtcaaggccaagatccaggacaaggaacgaattctcccggatcagcaacgtctcatcttcgccggaaagcagctcgaggacggccgtaccctcgccgactacaacatccagaaggagtcaacccttcaccttgtccttcgtctccgtggtggcatgcagatcttcgtcaagactctcactggcaaaaccataaccctagaggtcgaaagctctgacaccattgacaacgtcaaggccaagatccaggacaaggagggaatccccccagaccagcaacgtctca

SEQ ID NO: 16097 - DNA, 200 bp, Glycine max
  Clone ID: LIB3040-006-Q1-E1-C2
cagaatataggccctttccttcatacatccttccctttcacacagtacgcacaacttatctcaactatccgtagctcacatgccacttaatcacaacctcaactcgtaaagtttctcactttcatttctcgcacttcaccgtcgtcccccaccttacactgctcttgatgtcttggttatagctcatgatactacacagt

SEQ ID NO: 16098 - DNA, 376 bp, Glycine max
  Clone ID: LIB3040-006-Q1-E1-C5
gacaacacaacgcaacacaacgcgcactctctcttttctctcttaacacaaaaaccctatcgttcttcgcggtttcgccgattctcgccatgccgaaagccaaatccgacgccaaagccgccgatagccggttgaagcgcaagggcgctggtgctggaaggaagcaatcgaagaaagctgctaaggatcctaacaagccaaagagacctccaagcgctttcttcgttttcatgttcgagttcagagagcagtttaagaaggagcatcctaacaacaaatccgtccctgttgtcggtaaagctggtggtgacaaatggaaatcgctgtctgatgctgaaaaggcccccttcgttgccacggccgaaaagaagaaaca

SEQ ID NO: 16099 - DNA, 385 bp, Glycine max
  Clone ID: LIB3040-006-Q1-E1-C7
gggctgatatttcctgataagtggacatacgcttaaacagagaaactaacacagatttgcatgcatggggaaaataacgcacattgtagtaattcccagtgcagggtatagccacttcgttcccgttatccacttctcaaagagacttgttgagcttcacccagaaattcacgtcacatgcatcattcccattctggggtctctcacaagtgctgcataacccattctccaaacccttccacaaaacatcaacacggttttccttccaccggtgaaccctaatgacctaccacaaggtgttcccgtagttgtccaaattcagctagcaatggatcactccatgcgctccatctaccacaccctcaagtccataacttcaaagact

SEQ ID NO: 16100 - DNA, 409 bp, Glycine max
  Clone ID: LIB3040-006-Q1-E1-C8
gatccttcgtccagctagcaccacattcacctgaggcttccaaagcaatggcatcccttgcagcatccactgctgctgcttcccttggcatgtcagaaatgcttggaaaccccatcaacttcagtggtgccacaaggccagctccatctgcttctagtcctgcctccttcaagactgtggctcttttctccaaaaagaatgctacaccaatacctccaaaaaaagctgctgctgctgctcctgccaatgatgagcttgccaagtggtatggtcctgacagaaggatcttcttgcctgagggtctcttggaccgatccgaaatcccagagtacttgaccggagaagtccctggagactatggttatgacccatttggtcttagcaagaagccagacgactttgccaaata

SEQ ID NO: 16101 - DNA, 235 bp, Glycine max
  Clone ID: LIB3040-006-Q1-E1-C9
agatgacgatgatgacgaagatgatgaggaagaaagcaagactaataagaagtcatcagcacctaagaagagtggaagagcacagcttggtgatggccatcagggtgagcgacctccagagtgcaagcagcagtagatgcagaaggtcatttatgtacttgttgagttttgttggtgttcgagaatgtttgatgtgaaagtgggtttcatgttttaatgcttcgtaagttgattt

SEQ ID NO: 16102 - DNA, 363 bp, Glycine max
  Clone ID: LIB3040-006-Q1-E1-D1
aatcaatcaatcaatttaatggcaatttttcctaatcccctcctccccccccaatccgaaacacaaaggaaaattattagaaattaaggctggttattcaaaagcttcaactccttggattccttttcctctccttggcttctctgtaactaaggaaattttggttggaggtaagactgatgcatggaaggtttcagcctctgaatcagattcactcaaccaatgggcagaaaagtctcgtttccaagttggagactatcttgtttggaaatatgatggtggaaaagactcactgttgcaagtgagcaaagagaactatgtgaattgcagcatctcaaaccccataaaggagttcaatgatga

SEQ ID NO: 16103 - DNA, 187 bp, Glycine max
  Clone ID: LIB3040-006-Q1-E1-D11
gatcatcactaggtgtttacatttgggattacctctcgtcatggtgggacaccctcataacttgcatcatccatcttgcgtcaatctgtgctttcctagtcttttctaatccagtgctgtgtactgataatgaggacagtcttttccatggaatcaacatctacacgcaaacacagagcccggtaac

SEQ ID NO: 16104 - DNA, 411 bp, Glycine max
  unsure (1)..(411): unsure at all n locations
  Clone ID: LIB3040-006-Q1-E1-D12
gattcccctttttgttaaaactgtatctattcctaaactccagtagtggatccgaagccagcttcagctctgagcgtagaatccaaatcctgaacctcaacaacctgcggcatcaccatctgctggattatcaacagtatcacccctgtaatccgcgtcgatcacgcccgctcccacatcagtgtcattctaacaaactaacatttgcacaaaacacgccaaaaggagtgaagatctaaacaagcaatctgtgtgtgttccgccatgaacgaagaacaacagtgtctgcttctcagctcagcttctcgcttctggccccccaaaggagtgaagctatcgtacggcactgcgggcttcagggccgatgcatcacttctccaatcgacggtgtacanagtgggaatccttgca

SEQ ID NO: 16105 - DNA, 361 bp, Glycine max
  Clone ID: LIB3040-006-Q1-E1-D2
gattcactcactcacgtcactgtcattttttcttatgctcttcctctcacactactctgagagacacacgaaaattataataaattatggctggttattcaaaagcttcagctctttggatacattttcttctctttggcttctctgtagctaatgaaattttggttggatgtaacactgatgcatggaatgtttcagcctctgaatcagattcactcaatcaatgggcagaaaagtctcgtttccaagttggagactatcttgtttgaaaatattatggtggaaaagactcagtgttgcaagtgagcagagagaactatgtgaattgcagcatctcaaaccccataaaggactacaatga

SEQ ID NO: 16106 - DNA, 395 bp, Glycine max
  Clone ID: LIB3040-006-Q1-E1-D5
gatcccgataacaccatcatcactttcagtcactgtcgcttccataccatgtcatggtactgttgtacatcaacgatagaatggtaacactgatcaaacacaccacactgtctcccactcccattgtgtacacctcactcaatctcgatgatcatggcatcatccatttcaagcacttgtgacaaacctcaattccctcaccctctctcctcctctttctcttcatctgcatcattaataagagatctgggcttccacataatgtttcagcagaagcccattagaaatgtagttgattggtgctcaaattcccacctagtgattcatttcccacaacagtcctacaacaaaactgaaattaacaaaaaaaccaataacttcaacggcggaaaggc

SEQ ID NO: 16107 - DNA, 415 bp, Glycine max
  unsure (1)..(415): unsure at all n locations
  Clone ID: LIB3040-006-Q1-E1-D8
gatagtattagcttggcttgactcctctcatcagaagaaagcgaagaaagcaaaaatgcaatctatgtccctgacgctgagcaagaggctctccaattcaaagcctctcttcagaatctcttccagcctcgtcgctcacgcatcctccgccacaacctctccgccgccaccttcgccgccagtcccctctccctccgccctcaacagcctcctcaccgctccgtggtccgccactcagtcacgcggaatcacgctttccggatctgatattagagtcgggaatctcattggaaaccgaggacgcgctcacgaggttctcaaactgtatcgccctcttgaaggaacgggcaaagccactcttgaggttccgcctcaaagtgtanctggttatggcacagttgctactacagaggat

SEQ ID NO: 16108 - DNA, 355 bp, Glycine max
  Clone ID: LIB3040-006-Q1-E1-E10
ggctcgctctctagggtttttctttttctcttctcactgcatcgcttcaggttcttctgaaaagatgtctcgcgtgtatgttggtaacttggattcacgagtcactgagagagatctcgaagacgaattccgcgttttcggagttattcggagtgtttgggttgcacgtagaccacctggttatgcttttattgactttgatgaccgcagagacgcacaggatgctatccgtgaattggatggcaagaatggttggagggttgaactttcccacaactctagaagtggaagttgtggtcgtggtggtcgctctggtggttctgaattgaaatgttacgaatgtggtgaacctggt

SEQ ID NO: 16109 - DNA, 305 bp, Glycine max
  Clone ID: LIB3040-006-Q1-E1-E11
tttcctgttttcattttcattgaaaatgttttcagaaatccaaccaaacacattttcatcactattttctgttttcagtgaaaatgaaaacagaaaacaaccatatcaaacatcccctatttaatctaagtgaaagtggattgggcttgaatttcttagatgagatctcaagtttgaattttgggatgataaactttacttaaggtgattaaacaagttttataacaaagattagttattaataaaatcaatagatacttcattacgaaaaaaaatagaggtaaaaataaaaaaaaaacggccgc

SEQ ID NO: 16110 - DNA, 407 bp, Glycine max
  Clone ID: LIB3040-006-Q1-E1-E12
gagggtttacaccgaggagacacaccttcagcagcagcagccatggttctcaaaaccgaactatgccgattcagcggtgccaagatctacccagggaaaggcatcagatttgttcgtggtgattctcaggttttcctgtttgctaactcgaaatgtaagaggtatttccacaacaggttgaagccatcaaagctcacctggactgcaatgtacagaaagcaacacaagaaggacattgctcaagaagctgtgaagaaaagaagacgtgctgccgaaaagccttactccaggtccattgtcggtgccactttggaagttatccagaaaaagagagctgagaagccagaagttcgagatgcaaatagggaagcagcccttcgtgaaattaaggagaggaacaagaaaac

SEQ ID NO: 16111 - DNA, 392 bp, Glycine max
  Clone ID: LIB3040-006-Q1-E1-E5
gacagcagtgcactcttcgcaacacggcacagctggacaacccagagagcgcgtcataataaacgctcttctctgaaaacccccatttcttttcatctttcttcttctctttcgcttcttcgatcttcgatcttcgtcgctgacactgagagattgcatttcaattcacatcggataggccgggattcacgttggaaacgcctgctgggagctttactgcctcgatcactgtattcagtctgatgggcaaatgccatgtgataagaccgttggtggacgtgatgatgctttcaacattctcttcagtgaaactggggcaagaaagcacgtgccatgtgcgatttttgtagatcctgagcctactgtgattgatgacgttacgactgggagat

SEQ ID NO: 16112 - DNA, 391 bp, Glycine max
  Clone ID: LIB3040-006-Q1-E1-E6
gcaattggcaagtgataataatagcaaactaattatacgtttcttttcttccccgtctcaactcaattccattctcttctctgagtctcaacctaattccccattcatccatctttacgtgtttgttggattccatggccaaaagctccttcaagcttgaacatcccttggaaagaagacaggctgagtctgctcgcattagagacaagtatcctgatagaatacctgtgattgttgagaaagcggaaagaagtgacatcccagacatcgataagaagaagtaccttgtcccagcggatttgactgttggtcagtttgtttatgttgtccgtaaaaggattaaggtcagtgcggagaacgctatttttgtttttatctacaacactctacc

SEQ ID NO: 16113 - DNA, 402 bp, Glycine max
  Clone ID: LIB3040-006-Q1-E1-E7
gagccttgggtaggtagctgccaatgctgtcccaccacaagtccacttgtcctctcaaaacttaatttgatcaccgcatcccaacttccactccaagctgttgtgaaaagccagcacttgttgtgggtgatggagtgccaatgttcagatggctccaccactcagaatcattagaacctctagatgcttcatctaagctcctctaagctccatacattgattccagtactttagcccaaagatcgatggggtattggaataagctccatctccattttcacatcaaagcaaggttaaagctgttgacatccttgattcctatccgccctctttcttttgggaggcatatcgtcatcccatgttgacccatgagatcgtagattggtcatggctggcctccca

SEQ ID NO: 16114 - DNA, 396 bp, Glycine max
  Clone ID: LIB3040-006-Q1-E1-E8
gatccaactctctaaacaacacattaacctttctcattccccatctcctcaccttattcagccactgctaatttctagggttccgaaatggacgctggcggaaagatcaagaagggcgccggaggaagaaagggcggcggccctaagaagaagccggtttcaaggtccgtcaaggccggtctccaattccccgtcggaagaattggccgttatttgaagaaaggaaggtacgcccagcgtgtcggtaccggtgctcccgtttacttggccgcagttctcgagtacctagctgctgaggtgcttgagttggctgggaatgctgcacgtgacaacaagaagaacaggattattccgagacatgtgctattggctgtgaggaacgatgacgaattgggg

SEQ ID NO: 16115 - DNA, 263 bp, Glycine max
  Clone ID: LIB3040-006-Q1-E1-E9
gaagactgtctctaaggaggaagcgtctgccatcaaggctgctgggaaagcatggtatcacactatggtgtcagattctgattatacggaattcgacaacttttctaagtggttgggtgtttcacagtaaacttcatgatttattttttcgtattagaattttgttttttatgctcatcagaactaaatatccttatctttggtttttttgttttgcgggttaaggttgtcatcataattatgcagacaatgtggaaattttg

SEQ ID NO: 16116 - DNA, 215 bp, Glycine max
  Clone ID: LIB3040-006-Q1-E1-F10
gtttcaactgagtgttaatttccctgtctctttgttgaaaaagaactggcaaaatgtcaggtgcctgtatctgaagagtacaatggggaaatcttaccgtgtcttttgaggaattttttttaatccggtgaatttgtgatcgcgcttgatacattgattatcctaatagctagatacagactatcatcttgttacaattttgttggctggatttt

SEQ ID NO: 16117 - DNA, 144 bp, Glycine max
  Clone ID: LIB3040-006-Q1-E1-F11
ggaagtcgccgtttgttttcttttcgttcgcatcatctctctctctctcagaaagatgaaagtggtcgccgcgtaattgctcgccgtcctcggtggcaacaacatcccctccgccgatgtcctcaatgaaatccttggctccgt

SEQ ID NO: 16118 - DNA, 375 bp, Glycine max
  Clone ID: LIB3040-006-Q1-E1-F5
ggttgttggcttgtgctctgctcgtgcctctagggttatcatatctccattgcgattctcctcgctctcagtttccatgaatctgaagctaagggaaagtctcatccaaccgtgagcgctgattaccataaggccgtgtagaatgcgaagaagaagctcagaagcttcatggcggagaagagatgcgctcctctaatgcacagtttggcatcgcactctgctggaacttacgacatgagcgcaaagatcggtggtcccatcagaaccataaagtaactctccaaagtcactcacggtgctaacaaccgtcttgacatccctgtgaggcgtttggacccactctaagcggagtatctgacattgagctacgccgat

SEQ ID NO: 16119 - DNA, 383 bp, Glycine max
  Clone ID: LIB3040-006-Q1-E1-F6
ggtagttccaccgagtagcaacaatgtcgaagcgaggtcgcggaggatcggcagggaacaagttccgcatgtcactgggtctgccggtggcggcgacggtgaactgcgccgacaacaccggcgcgaagaatctctacatcatatcagtgaaggggatcaagggaaggctgaaccggttgccgtcagcttgcgtgggtgacatggttatggccaccgtcaagaagggaaagcctgatctccgtaaaaaggtgctccccgccgtcatcgtccgtcagcgcaagccgtggcgccgaaaggacggtgtttacatgtacttcgaagataatgctggggtcatagtgaatcccaagggtgaaatgaaaggttctgctatcactggtcct

SEQ ID NO: 16120 - DNA, 422 bp, Glycine max
  Clone ID: LIB3040-006-Q1-E1-F7
ggttaccatttgtgatttgtgagttcctacacagtgttctctttcgttgttgttggtcgtgctcgtcctcctttctctcggcgattcgaagcgcaaaaccatcgcaatctctacgaatttcgtgtctcgatcccgaatctcaagctgaaagagatgaattggattcagcgcaagatctacctttacaatgtgacttttgggctgtatatgttggactggtgggagcgttgtaccttcaatattgtggtgattatattaatgtgtttcgttctacgatacgttactcagttcttcaagatgtacgtttggtaagaagcacaaccattgtcacgggaagaatcaaatgtagattggtgtagctgaatagggaatatcttgatataacctgacttggaatttcttaaagctacccagaaattgag

SEQ ID NO: 16121 - DNA, 418 bp, Glycine max
  unsure (1)..(418): unsure at all n locations
  Clone ID: LIB3040-006-Q1-E1-F9
gactcactcatacaatagagaccagcttttgcttctttgtgaacatggagatgaggaaatcatgtggcttcttcttcttgctcctcctccttgtctttgcttcccaggtggtggtgcagacggagggaagagtgtgtgagtcacaaagccacgggttccatggtttgtgtaatagagaccacaactgtgctttggtctgcangaacgaaggtttctccggtggcaggtgcaaaggcttccgccgccgctgcttttgcaccagaatttgttgaaatctcatcaaaaactattcttgcaatgcaaattattaaatcatagctaggccaaataaattgcatctactctttatccatttggaagctagctaccacaaccaactcatacttggtcattggattgcttccctttggcttctgcc

SEQ ID NO: 16122 - DNA, 221 bp, Glycine max
  Clone ID: LIB3040-006-Q1-E1-G1
ggaaaccaaattttcttccttcgttggcatccgtgatctcatctcctcacaatgagcagatcacggcaaccaccggatttgaagaagtacatggacaagaagcttcagatcaagctgaatgcaaatcgcatggttgttggtactctccgtggcttcgaccagtttatgaatttacttgttgacaacactgtggaagtgaatggcaatgagaaaaatgacat

SEQ ID NO: 16123 - DNA, 195 bp, Glycine max
  Clone ID: LIB3040-006-Q1-E1-G10
gacaaagtagcacagcagagtaaccagctaggtacggttttctctttctcacgttccccttcgcagcgccacagtagcttcgcattagcaatggcgagaatcaacgtgtacgagctgaggtacatgacataagcaaaacttctgaaccaacttaacgatctcaaagcagaactcgctctcctccgcgtcgctaag

SEQ ID NO: 16124 - DNA, 275 bp, Glycine max
  Clone ID: LIB3040-006-Q1-E1-G11
ggatgataacaaaaacatcgacgacgagatcgaagagatcgagcttgagataaagcgccttaccacgcgcctcgacgcgctccgtctcgagaaggcgaagcgggggaagcgcgtggtgatgggcagagtcgtccccgcgaagttcatggagccgcgcccaagcgccgtcgtttcaagaaaacccgaagaaacgccgaagacaaaagttagggttagtagtagtagtaacaatgataataatgcgtggccgcgacggatgagtcttggaccgaatg

SEQ ID NO: 16125 - DNA, 406 bp, Glycine max
  Clone ID: LIB3040-006-Q1-E1-G12
ggcgaaacactcccctttgccgctgttgttgttgctgcaccaccgaacaacttccccggtaaacccgtttccgttggtccaaggtttaaaagattgctgatgctgaagacattcaacctcctgttgttgataatggaactggaatggtcaacgctggttttgcaggtgatgatgctcctaaggccgtgttccccagcattattgggagaccacgccatactggtgtaatggttgggatgggtcagaaggatgcttacgtgggtgatgaagcccaatcaaaaaggggtatactcaccttgaagtatcctatagagcatggcatactcagcaactgggacgatatggagaagatttggcatcacacattttacaatgagctacgtgttgcccctgaagaacacccgta

SEQ ID NO: 16126 - DNA, 160 bp, Glycine max
  Clone ID: LIB3040-006-Q1-E1-G2
aaaaaacaacgaagggggaaatccaaatttgcgtccttccttggcatctgtgatctcttctcctcacactgagcagattaaggcaaccaccggacttgaacaagtacatggagacaaagctccagatcaagctgaatgcaaatcgcatggttgttggtac

SEQ ID NO: 16127 - DNA, 391 bp, Glycine max
  Clone ID: LIB3040-006-Q1-E1-G5
ggtccacccgttcgttagatctaacaacgacgtatcccctttctccttctaacgagtgaggaaaaatggcgcgtaagaagatcagagagtatgacacatagaggttgttgaaggagcactttaagagactctctggcaaggagttgccgatcaagtctgcacaaattagcgcatcaactgatttcactgagctacacgagaaggaagtctgactttcatcttctaaattggttgttaaacctgacatgtgatttggaaaacgtggcaaaaatggtttggttgccctgaatttggcatttgcacaagttgatacatctgtgaaggagcgtcttggaacagacgttgagatgagtggatgcaaaggatccatactaactgtcactgttgaacc

SEQ ID NO: 16128 - DNA, 297 bp, Glycine max
  Clone ID: LIB3040-006-Q1-E1-G6
ggcgctaacagcaactaacgtgcaagttccatggcggagagaacaataatggccaccaacgacgagagggatatggagaacagcaagagtgaggaagaactgaagcatcacgggtttgtgaagattgccgcaatcaaagccttactgtgtgtgtcgaatctcaacggtttccaaaagcaaaccccggaacttttgaattcggcggttggaaccttgaacaatactgtacccaccgtcctgggtcccttctaccacaaattcaacgcggtccccaaccacatcctcctttttgtcaac

SEQ ID NO: 16129 - DNA, 390 bp, Glycine max
  Clone ID: LIB3040-006-Q1-E1-G7
gacaaattcacacattttttgttgcattatcacaaacacctcgtccctcacaatgcagctagcaatggcggccaacgctgtcgtttcaccgtcgccgttccgacctcagccctttctccggtcatccttctccggcgtctccgtcaagctcactccctaatccataacgctttcacactccaggcatctcaccgtcgtcgccgccaccaagaaggccgtcgccgtcctcaacgggacctccgccgtcgaaggcgtcgccactctcatccaagaagacgatggcccgacgacagtttctgttcgcatcactggccttactccggggcttcatggttttcacctacatgagtatggtgatacgacaaatgggtgtatgtctacgggagcaca

SEQ ID NO: 16130 - DNA, 260 bp, Glycine max
  Clone ID: LIB3040-006-Q1-E1-G8
gaaacttatttactttatctcttaattagtatcatgtttttacttcttcttcttcgtcttcttgttttaatttcgaacatttacgtgagtgttccttgcactagcttgttcacgactgtcactgtgagatgtggtcattgcacctatcttctctcagtcaatatgcctggactgcttctccttagtgccaatcagcttcaccttggccacatcttcttcactcctcaaaatcttctggaggagattcgtaatgcactttc

SEQ ID NO: 16131 - DNA, 53 bp, Glycine max; identical to SEQ ID NO: 13458
  Clone ID: LIB3040-006-Q1-E1-H10

SEQ ID NO: 16132 - DNA, 180 bp, Glycine max
  Clone ID: LIB3040-006-Q1-E1-H11
tacggctgcaggtcacgacagaatggtaccgctgctaaaacacgacagtaaggggttcatgttttatgctgtggaaaaaatgaatacgttccttgctggggggttttggtagttttacaactttggacgcctttttacaactgttgggtttgatgttgttttaactcaaccttttttgtt

SEQ ID NO: 16133 - DNA, 398 bp, Glycine max
  unsure (1)..(398): unsure at all n locations
  Clone ID: LIB3040-006-Q1-E1-H12
gatctaactttgattttgtatgcacttcaaacagtttgggcgtcatgtggagagagagagcgttattggtgatcctgctactgcttctagtccagcaaatttgtgctaccaagaagcaagatcatggttgccccctttcttcctgcggcaaaatcaccaacataacttacgcatttcgattaaagggccaccctaaagctgcggcgacaataggtatgagctagcttgtgaaaacaatgttactgtgttacatttgtactctggaaaatattatgtgcaggcaatcaactacaataatttcactatccgagtggttgattcaggagtcgatcaacanacaaattgctcctcncttcctcgctatttcctgtctcgctccaatttcactgatacttaca

SEQ ID NO: 16134 - DNA, 306 bp, Glycine max
  Clone ID: LIB3040-006-Q1-E1-H4
aggggtttaaagataaaaaaaaaaaaaaaaacacaaaaaaaaaaaaccggcggcccaaaaggttcaaacctaacttagccttgaaggcaacttaaaacccctccaaaagggccaccaaaatcaaattaacgggcggtcgtttaaaaaggtcttaacgggaaaaaccctgccgtaaccaaactaaaccgccttgaagaaaatcccccttccgcaaccggccgtaaaaccaaaaaggcccgaacgattagcccttccaaaaatttgcgcaccttgaatggcaattgagacccgccctgtaacggggca

SEQ ID NO: 16135 - DNA, 319 bp, Glycine max
  Clone ID: LIB3040-006-Q1-E1-H5
gataacacagactcacacaaagagttacaagagaaatcatcatgggatcatcaccaactatgtatgcgtagttacctattgttgcaacttccaacatctactcaagggtggtcatgtttaacatcaataacaatacttctaggtttgttgtacaggcatcagattagcctgcagcagctgcatccgcctgcgccacatccccatttgaagctgaagcttaatcacaaccacgacctattggcatcaccataggtgctaatgtgaagattcatatgaaagaatcatactggtacaaacgcaccggttcagtggttgctgt

SEQ ID NO: 16136 - DNA, 92 bp, Glycine max
  Clone ID: LIB3040-006-Q1-E1-H6
agatatgatcgctcaagagttctccttagtaatgataatgttttttgtgttctctaaagctctcccttcgattgttttattaagattgttgc

SEQ ID NO: 16137 - DNA, 431 bp, Glycine max
  Clone ID: LIB3040-006-Q1-E1-H7
gaaccaaaaacaatggccacttgttcactcatttccacactcttcccttctccttcttcttcttctttttcactctctcgttcttcctcaaacaccaccaaaccaaccaccattcacctctccaaatccctccatctccaaactcccatcctcttcctccttcgccccccaaacccaaaaccgacacttccaataatacccctcttccccaaactcaccattcccaactcccttctccttctctgcacctccctcgctctctccttcactctcctcctctcccccgccgactccgccgccgcctttgttgtcacctccccaaggaagctccagtccgatgaactcgccaccgtccgcctcttccaagagaacactccctccgttgtccacataaacaaccttgctgtcaagcaagatgcgtttacattgga

SEQ ID NO: 16138 - DNA, 407 bp, Glycine max
  Clone ID: LIB3040-006-Q1-E1-H8
gattacacgggatttacatcaccgtccgcactttccttcccccctacacaaaacatggctttgcccaatcagcacaccgtcgattaccccaacttcaagcttgtcatcctcggcgacggtggcacaggaaagacaagcttcgtgaacaggcatctcactggtgacatcgagaagaactatgaaccgaccattggtgtggatgttcatccgttggattttttcacgaactgtggaaagagtcgcttcgattgttgcgatactgctgagcaagacaagtttggtggcctcagagatcgctattatagccatgggcactgtgcgattagcatgtttgatgtgactgcccgtctaacatatacaactgtcactacctgtcaccgtgatcattgccgggtctgtgaaaacat

SEQ ID NO: 16139 - DNA, 373 bp, Glycine max
  unsure (1)..(373): unsure at all n locations
  Clone ID: LIB3040-006-Q1-E1-H9
gacacaccgtttgttctattcttaactcaacttctgctacccactctcttcttccaagtccaaccacgcttttctctacagtcatgggcaaggtcaagatcggaatcaacggatttggaagaattggccgtttggttgccagagtcgctctgcaaagagacgatgtggagctcgttgccgttaacgaccctttcattaccaccgattacatgacatacatgtttaaatacgacagtgttcacggacactggaagcatcacgatgtcaccgttaaggacgagaagaccttctcttcggtgacaagccagtcactngtttttggacacaggaaaccttaaagagattccatgggggtcaactggagctgatatca

SEQ ID NO: 16140 - DNA, 409 bp, Glycine max
  Clone ID: LIB3040-007-Q1-E1-A1
agaggggcacatgaagcacgctgaaagtgaagaagaaacaaaaagattattgcatttgcaggaacaggaaccaccccacaagcttttactggaatcagtttctgagggagaaggatccaaagtctcttctgttgtcgggggttgtaaacaggaagatatcagttcagccaggagtgatattttggattcagatagtccacattacaccgatggagttaactccgcactgctagagcatggtgattcttcttatgtgtttgagcatgatcaatcggatatgtcacaagatgaagaagataacctcagcaaaagtctctacccttcgtacctctttcccaaacttgaggaagatgtggattactccgacccgcctgaaagttcttgtaaatttggattttctgaggaagat

SEQ ID NO: 16141 - DNA, 309 bp, Glycine max
  Clone ID: LIB3040-007-Q1-E1-A10
acgcgtcaatccggacgtccgccgacgcctcaggggaatcctccgtgccgctccgagacacccacagattgtgcgcttatgcagtgaagaagcttggtcatcttaaggatattgtttcagcaggctgtctactctgctcaggcttccttgactgtgcttttcaattgcttgctcttctatggtgtgaccgggcccgttttactggccgtcgtttttgatcttcgtgtactgtgaaatcctgccgttgagcaccatattcaccgttctgtagatctcccttccagtttctggagtcagttccaataggcc

SEQ ID NO: 16142 - DNA, 316 bp, Glycine max
  Clone ID: LIB3040-007-Q1-E1-A11
gatacaactactctattctaccacatctgagtctctgtccgaagccacttgagagaaaatggcggtgcctctgctctcaaagaagatcgtgaagaagagggtaaagaagttcaagaggcctcagagtgacaggaaaatttccgtcaagactaactggcgcagaccaaagggtatcgattctcgtgttaggagaaagttcaagggatgcactttgatgccaaacattggttatggttcagacaagaagacccgccactatctccctaatggtttcaagaaatttgttgttcacaatgtgaaggatttggaactgctc

SEQ ID NO: 16143 - DNA, 356 bp, Glycine max
  Clone ID: LIB3040-007-Q1-E1-A2
gcccagtttcccgcacacacttcttgtctcttctctctctctctatattttgggtttcattgttgggtgctgaagcaaatttgcggtgtagcagaggcaatggaggttcaaagtctcagctttgagaataacattttgtgggttggctcttttgtggaggctttggtgcttgacactttccttgccactgccaaatctcttgcttgctttgtcatcttgactggatctctccttacggatgtcaataatttagtgtcaccgatggtggatggaaggtttcctttagaccaactgtgcaagggaaaacatacttttgaagaaaacaaggatgctagtgatacagaggatgatgatga

SEQ ID NO: 16144 - DNA, 326 bp, Glycine max
  Clone ID: LIB3040-007-Q1-E1-A5
gagggttttgcgctgttgttgctgctcatcctccgtaacctccgagctctgcaccgaagaacgatgccatggggaagacacactggaatgggatctgctcgcaagctcaagtctcagcgcaggacgtaaaggtgggctgacaagtcatacacgagatcacatcttggacatgaatggaagaaaccttttgctggttcatcccatgccaacggaattgtccttgaacagataggtattgaggctaaacagcccaactctgccattcgtaagtgtgccacggttcaacttatccggaatgggaagaagattgccgcctttgtccctaa

SEQ ID NO: 16145 - DNA, 103 bp, Glycine max
  Clone ID: LIB3040-007-Q1-E1-A6
tgagtgcagctgagaattcatcactaatgcggagggtgattcccagtgattcagaagcttagtctgaggacgacgagaacgatatggaagatgaagaggattg

SEQ ID NO: 16146 - DNA, 350 bp, Glycine max
  Clone ID: LIB3040-007-Q1-E1-A8
gtcatcacaatctcattcgttaacacatcaatttctatctctcttatactctcactactctctttgctctttcttttctccactatggctgcacaagaaaacaacttccaagactacttgcctgtgatggccaacaagcttggtggggatggcctaattgatgaactgtgcaatgggttcgatcttttgaaggattctgataaaagggtcatcacttttgagagcctcaagaggaattcttacttgcttggtcttcaaggtctcagtgatgaggatcatcgctccatggttttggaaggtgactttgatggtgacggtgcactcaaccagatggagttatgtgtcctgat

SEQ ID NO: 16147 - DNA, 332 bp, Glycine max
  Clone ID: LIB3040-007-Q1-E1-B12
gtctcttcctacttgaagaaagtaggatacaaccctgacaagattccttttgttcctatctctggttttgagggagacaacatgattgagaggtccacaaaccttgactggtacaagggtccaactctgcttgatgcacttgaccagattagtgagcccaagaggccctctgacaagcccctcaggcttccccttcaggatgtgtacaagattggaggtattggaactgtgccagtgggacgtgttgagaccggtgtcttgaagcctggaatggtggtgacttttgcaccaactggactgacaactgaactcaagtctgtggagatgcacca

SEQ ID NO: 16148 - DNA, 407 bp, Glycine max
  Clone ID: LIB3040-007-Q1-E1-B2
ggctgtgagtgagacaccgatagatagagagcgcggcataacctaaacctatctttcttctctctctgtgtgtgcgcttcaacggcaaccagaagcagccatggccactgcaaggactgtgaaggatgtttcacctcatgagttcgttaaggcgtactcctctcacctcaagcgatccggcaagatggagctgccagagtggactgatattgtgaaaactgcaagatttaaggagttggctccttatgatcctgactggtactatgtcagagctgcttccatggcaagaaagatctacttgagaggaggacttggtgttggtgcctttcagaggatttatggtgggagcaagaggaattgtagtccccctcctcatttttgcaagagcagtgggtgcattgctcgtc

SEQ ID NO: 16149 - DNA, 386 bp, Glycine max
  Clone ID: LIB3040-007-Q1-E1-B6
acgcgaccgacagctgctagagactacagaaagggattccacacactataagactcctcaatcatccatagacatggacaccgtcacttctgcagcagtttctattccctcattcactggcctcaaggcaagcgcaagcaaagtgagtgccgccgcagttaaagtctcagctccccaagccacaatgttctgcggcatcaaggcttccctcaaagacgttggagtcgctgttgtggccactgctgcgagcgcagttctagctagcaacgccatggccattgaagtgttactgggcactgatgacgggtctctggttttctctcccaactctttctccatggcccctggggaaaagatcgtgttcaagaacaacgcaggtttcccca

SEQ ID NO: 16150 - DNA, 73 bp, Glycine max
  Clone ID: LIB3040-007-Q1-E1-B7
acgcgaccgacggctgctacaaaaggagagaaggggactgcacgggatagcaattcgttcgacttctctcgac

SEQ ID NO: 16151 - DNA, 300 bp, Glycine max
  Clone ID: LIB3040-007-Q1-E1-B8
gactcaccacttcaaaacactcataacacaaagcacaaagcaaagctcatccttgagttaaaaaatggcagcagcttcttccatggctctctcatccccatccttggctggcaaggccgtgaagctgggcccatcagccccagaagtgggaagggtgagcatgaggaagaccgtcaccaagcaagtctcctcaggaagcccatggtacggcccagagcgaatcaagtacttgggcccattctctggcgagccaccgtcgtacctaaccggtgagttcccaggcgactacggctgggacac

SEQ ID NO: 16152 - DNA, 240 bp, Glycine max
  Clone ID: LIB3040-007-Q1-E1-B9
acccacgcgtcagtccagatgacgacagaaggggtctcgatcatttcagaattgtgcaattatggtctctaaatcttttttattggcacatttactcgccatatttttacaatctagcgggtttgatctattgtttgccgattgtcaagtttttagaaacaattattgatatgacatcgtcgtactgtcttcatcggaggatgttaacatgacacgtagatcatcagtctgttttgagcc

SEQ ID NO: 16153 - DNA, 203 bp, Glycine max
  Clone ID: LIB3040-007-Q1-E1-C11
ggcgaaacagagagtgatttcagtgagtgatcggtgttcacttgatctcatcataatcgtcagcgtcaattgaagaagatgccgatcagaaacatcgccgtcggaaggcctgaagaggcgactcaccccgacacgttgaaggcggctttggctgagttcatctcaaccttcatcttcgtgttcgccggctcaggctccggcat

SEQ ID NO: 16154 - DNA, 411 bp, Glycine max
  unsure (1)..(411): unsure at all n locations
  Clone ID: LIB3040-007-Q1-E1-C2
gatccaaattcaagttcgcaccaaattttcctcccaaaatgtcaggccgtggaaaaggtgggaagggtttgggaaagggaggagctaagaggcacagaaaggttcttcgtgacaacattcaaggaatcacgaaacctgcgattcgtaggttagcgagaagaggtggcgtgaagaggatcagtggtttgatttacgaggaaaccagaggagttctgaagatattcttggagaacgtgattcgcgatgctgtaacctacactgagcacgctaggaggaaaactgttactgctatggatgtcgtttatgctctcaagagacanggaagggacctctatggctttggaggctaaagaatagaatctttaggtttaatgactgtgttgcangataaaacattgggtcttttgaatt

SEQ ID NO: 16155 - DNA, 412 bp, Glycine max
  Clone ID: LIB3040-007-Q1-E1-C3
ggccgaaaagtagtaccaagatggcttcagttgtgtatctcctcgttggcttccatctcattgtgatcatgtcaagttccttacccgcaactagtgaagtgtttgcaaaacagtatccatccacagaacccgtggaagaaaaactcagccaactccacttcgatttccataacagcataacgggggaacacccaactgctatgaaaactgttttgcctcctaaggggtccattcatggttttggggctacttacatgatggatgaccctctaactgaaggaccaagtccaacttcaaagcttgtgggaagatctcagggaatatacgctttggcttcacaacatgagcctgggttgctcatggtgacaaaatttctcttcactttgggcatttacaatggcagcaacctcag

SEQ ID NO: 16156 - DNA, 264 bp, Glycine max
  unsure (1)..(264): unsure at all n locations
  Clone ID: LIB3040-007-Q1-E1-C4
tggggtcgaaatgtantttcacgatggcttcacttctgtatctcttctgtggtgtccatcgcattgttggcatgtcaagtgcatgacccgcaacgagtgaagtgtttgcaaaacagtatccatccagagaacccgtcgaacaaatcctcagtcaactccacttcgattgctataacaggataatgggggaacacccaactgctatgaaaactgttttgcctcctacagggtccattcatggctttggggctacttacatgatgg

SEQ ID NO: 16157 - DNA, 151 bp, Glycine max
  Clone ID: LIB3040-007-Q1-E1-C5
tggttgttccatatgcctatcacacagtccactcacactctttgtgaaaaacgggagtttcttactctttctgataccttccacttatccgtgatttctacgtcatggctcatcatcactatcaccaggatttaattggtgagtccttgtt

SEQ ID NO: 16158 - DNA, 240 bp, Glycine max
  Clone ID: LIB3040-007-Q1-E1-C6
gaaaccacacttgattttcttgtaggatggtgttgcatttggtggctctggcgaatctccacgggctaaggcccgcggtggtctggctggcgtgcccgcttgtcctcaagttcttgatgggcttcaggatcttccgatacgacgtccttcaccactcaggactcttccttttccaattgggtcacatactcttcagcattcaagcccatatctcctgcctgctcagaatagaacgtgctc

SEQ ID NO: 16159 - DNA, 120 bp, Glycine max
  Clone ID: LIB3040-007-Q1-E1-C7
cggggttttctcgtcagaagcctaggtagcctctttctgtcgccactgcaatcaacggcacggcccacagtaatgacaggagagagactgaatctcaacgcttaccctttggccgattcg

SEQ ID NO: 16160 - DNA, 215 bp, Glycine max
  Clone ID: LIB3040-007-Q1-E1-C8
cttgcgcagcatgtgtttcaacatctggttctctctttcaagaactctatggaactctccctttttttatgtgggttttcgtctcaattttgtcttcttgcttcgagatactcaatcttttttgatgtgggttacataaggatctacgaatctcttgatcgaacctgtggacaattttcaagcaatctgaatctacgttcgtttgggtccagatg

SEQ ID NO: 16161 - DNA, 335 bp, Glycine max
  Clone ID: LIB3040-007-Q1-E1-C9
gaaggtttacaccgaggagacacaccttcagcagcagcagccatggttctcaaaaccgaactatgccgattcagcggtgccaagatctacccatggaaaggcatcagatttgttcgtggtgattctcacgttttcctgtttgctaactcgaactatttgacgtatttccacaacaggttgaagccatcaaagctcacctggactgcaatgtacagaaagcagcacaagaaggacattgctcaagaagctgtgaagaaaagaagacgtgctgccaaaaagccttactccaggtccattgtccgtgccactttggaaattatccagaaaaagacagc

SEQ ID NO: 16162 - DNA, 165 bp, Glycine max
  unsure (1)..(165): unsure at all n locations
  Clone ID: LIB3040-007-Q1-E1-D1
gcttctgaatcgtcttttacttctcagcagcttcggctagggttcaganacgaaaaaaggttccggttttccgttcccgattaaaacccaattggaaaaaaaaccttttaaggaggttaaaaaggaacccccaaagaataaaacagaaatccaattattccttta

SEQ ID NO: 16163 - DNA, 102 bp, Glycine max
  Clone ID: LIB3040-007-Q1-E1-D10
ggagcatgttccctacacggattcatacactcccagaaaacatttttcattcgatttctcagcaccagtcagcaacaacaacagccctttccattccacaag

SEQ ID NO: 16164 - DNA, 417 bp, Glycine max
  Clone ID: LIB3040-007-Q1-E1-D5
ggcggcactcgttttcgttctcgtgctggtttatagatctttgcgaaggaggtttacagcgctcaaccaaagatgcagaacgaggaaggacagatcactgagctttacattcctaggaagtgctccgccacaaacagattgattaccgctaaggaccatgcttcggttcagatcaacattgggcatgtggatgagaatggcgtctacaatggccatttctccacttttgccctctgcggattcatccgtgctcagggtgatgctgacagtgctctagaccgcttgtggcagaagaagaaagttgaagttaagcaacagtagacacccatgatagtttgttacttcgttatgtattaatttctactcgtgctagagatatttgaataccatgattgtcattttgagcacaaatgctca

SEQ ID NO: 16165 - DNA, 129 bp, Glycine max
  Clone ID: LIB3040-007-Q1-E1-D6
ggcggcactcgttttcgttctcatgctggtttatacatctttgctaacgaggtttacagcgctcaacctacgatgcagaacgacgacggacggatcacatgatctttacattcctatgaagtgctccgc

SEQ ID NO: 16166 - DNA, 157 bp, Glycine max
  Clone ID: LIB3040-007-Q1-E1-D9
gcgtcaatcgggaggccgaaagccggcaaaagggtgagaggtgctcctagatgatcatccaggatactgtgatccattcaacagcaagcatagactcacgggaaggactatagttacatgcagctctatgagtgctgagggaacgtcaaagttgtcc

SEQ ID NO: 16167 - DNA, 432 bp, Glycine max
  Clone ID: LIB3040-007-Q1-E1-E1
ggagaatagagagctcctccaattagggtttttgtgatctgcagctacgatgggtaagggaacggggagtttcggtaagaggaggaacaagacccacaccctctgtgtgaggtgtggccgccgcagcttccacctccagaagagtcgttgctctgcgtgcgcttaccccgctgcgcgcaccaggaaatataactggagcgtgaaggccattaggagaaagaccaccggaactggaaggatgaggtacttgcgtaacgtgcctcgcagattcaagagcggcttcagagagggtaccgaagctgcacccaggaagagaggagctgctgcctctgcctaagctttgaatgaatgacagcaatttttgctgggtcagtgaattataggagttaatgtttctgtgtttgtgccaaactccttggaacacattttcct

SEQ ID NO: 16168 - DNA, 340 bp, Glycine max
  Clone ID: LIB3040-007-Q1-E1-E12
ggagactcgcgactcaccaccactgctcgccggcctctaattttgaaagcttctgcgcctcccacgccatttttgatactctctttgtgttcgcatagtgagatatggggaagaaggcgaagaaagctatgaagaagaatttgaaaagggcttcctttaataagaatccatctgaggatgctgatttcttgcccttggaaggtggccctgctcgtaagctcgccggccagcagaagccgccgccgccgccggagaacaccgccacggttttgtacgtcggtcggatcccacatgggttctatgagaaggagatggaaggttattttgggcaatttggaac

SEQ ID NO: 16169 - DNA, 384 bp, Glycine max
  unsure (1)..(384): unsure at all n locations
  Clone ID: LIB3040-007-Q1-E1-E2
gagttgctcttttctccctctccgcatacactctgctcgtanggtttctccacctagagggaaatggctcccaaaccgcctagtacgggtctgtttgttggactgaacaagggtcacgtcgtcaccaagaaggaattgcctccacgcccctcagatcgtaaggggaaaacaagcaagagggtgcactttgtgaggaacctcataagagaggtagccggttttgcaccctatgaaaagcgtataactgagttgctgaaggttgggaaggataaganggcactgaaggttgcaaagagaaagctcggaacacacaaacgcgcanagaagaaacgtgaggaaatgtccagtgttctcaggaagatgagggctggtggtgctggagac

SEQ ID NO: 16170 - DNA, 337 bp, Glycine max
  Clone ID: LIB3040-007-Q1-E1-E3
ggtgagttgaaaggatcgtgaaaggggcagtacccgagattccgtgagttgcaaaaatgaagacgattctttccaccgagaccatgaacatcccggacggcgtgagcatcaaagttcatgccaaggtcatcgaagttgagggcccccgcggaaaattggtgcgagacttcaagcatttgaatctcgattttcagctcattactgacgaaaacggtaaaaagaaagctgaaaatcgacgcgtggtttggttctcggaaaacatccgccgcaattcgcaccgccttgagccacgtggagaatcttatcaccggcgtcaccaagggctaccgctacaaaa

SEQ ID NO: 16171 - DNA, 269 bp, Glycine max
  Clone ID: LIB3040-007-Q1-E1-E4
cggcgtgatcatcagtgttcatgccagggtcaccgacgttaacggcctccgcggacagctgtgtgcgagacttcctgcacttgaatctcgattttcagctcacttctgacgaattcggtgaaagaccgctgaaaatcgacgcgatgtttggttccctgaaatcatccgccactattcgcaccgccttgagccaggtggcgaatctgatcacaggcgtcacgagaggctagcgctcacaaaatgacgttcgtttatgccaattttcccat

SEQ ID NO: 16172 - DNA, 214 bp, Glycine max
  Clone ID: LIB3040-007-Q1-E1-E5
acgcgaccgtgcagctgcaggagaacacataggggaaactcacaactcagcatgactgctcacctggctcgattgctgttcgtgtttgcaccgcgaacgtggtttatgatatgcgctttgttgatcacgctttaagatgtagcgattacggcgaagattactatactgtggaagttgaagttgagttcatttaataggagtccatctgaggatt

SEQ ID NO: 16173 - DNA, 123 bp, Glycine max
  Clone ID: LIB3040-007-Q1-E1-E6
cacgcaaccgtgatgccgcgacgccaccggatggggagactcgcgagtcagcaacactgcgcgctggcctctaattctgacgtgcttgtgcgcctctcacgccattttttatacactctttgt

SEQ ID NO: 16174 - DNA, 189 bp, Glycine max
  Clone ID: LIB3040-007-Q1-E1-E9
gggaatctgaagaagatcacgtccgaggtcgatgaggtatcccggtctaatgggcgccgcgtagtgaaggataagctgtcccgttgcaccgaagacggataactttccgtcagcacagacgctcttctcgcattctccgaaagcggtatgatcttcatgcacgacgttttagcagctgctaacggggaa

SEQ ID NO: 16175 - DNA, 358 bp, Glycine max
  Clone ID: LIB3040-007-Q1-E1-F1
gatccattcctcgcaacaacgcttaacctctctcattccccatttcctcacctccttcaaccgctgctaaattctagggttccgaaatggacgctggcggaaagatcaagaagggcgccggaggtagaaagggcggcggcccaaagaagaagccggtttcaaggtccgtcaaagccggtctccaattccccgtcggaagaattggccgttatttgaagaaaggaaggtacgctcagcgtgtcggtaccggtgctcccgtatacttggctgcagttctcgaatacctagctgccgaggtgcttgagttggctgggaatgccgcacgtgacaacaagaagaacaggattattccaagaca

SEQ ID NO: 16176 - DNA, 341 bp, Glycine max
  Clone ID: LIB3040-007-Q1-E1-F11
gaagccaatcctttgtgtaagtgctcaaccctagtaagccgcaatggtgaagtactcaagggagcctgacaatccaactaagtcttgcaaggctagaggcgccgaccttagggttcattttaagaacacaagggaaactgcctttgcaatcaggaagttgcccttggtcaaggctaaaacgtacttggaagatgttcttgcccacaagcaggcaattccattcagacgtttttgtcgaggtgttggaaggacagcccaggctaagaatagacactctaatggccaaggacggtggcctgtcaagtcagcaaaattcagtcttgatttgctcaaaaatgctg

SEQ ID NO: 16177 - DNA, 264 bp, Glycine max
  Clone ID: LIB3040-007-Q1-E1-F12
gatctttcatctgtgacatacaacaggtacagagttttctgatgctatgcctctatctctccactactcttacgctaaatagactcaacattacctccattctctcaaaagcaaactcaattctctccagcaacatcagcatactctcagtccatgtgatgaccggactgtaccgatcagtacctaaatctcatagctggagtgagcagggaatcccttatggtgaattggtgtccattagtacttctaaccctgacgtcacac

SEQ ID NO: 16178 - DNA, 370 bp, Glycine max
  Clone ID: LIB3040-007-Q1-E1-F2
ggtcaagcctgccgagaaaaccctagttcgcttgcagtcacacaagaggccaatcctattcatagctcgagatgggtgaagaagtgaaggtagttgttccagaatcagtgttgaagaagcgcaagagggaggaggaatgggcgttggccaagaagcaagaactcgatgctgccaagaagaagagagccgagagccgcaaactcatctacaacagagctaagcagtacgctaaggagtacgatcaccaggagaaggaattgattcggttgaaacgcgaggccaagctgaaaggtggtttctatgtggatccagaggctaagctgttgtttattattcgcattcgtggtattaatgccatggaccccaaatc

SEQ ID NO: 16179 - DNA, 70 bp, Glycine max
  Clone ID: LIB3040-007-Q1-E1-F7
attgatgtagtcactacaacatgttagtatttatctattaggtttctagttgacagcgttgatattaggg

SEQ ID NO: 16180 - DNA, 247 bp, Glycine max
  Clone ID: LIB3040-007-Q1-E1-G1
tcactatcttgattcttttgaatcatgtaaaaaaaaaaaaaaaaaaaaaaaaaaaaaaaaaaaaaaaaaaaaaaaaaaaaaaaaaaaaaaaaaaaaaaaaaaaaaaaaaaaaaaaaaaaaaaaaaaaaaaaaaaaaaaaaaaaaaaaaaaaaaaaaaaaaaaaaaaaaaaaaaaaaaaaaaaaaaaaaaaaaagaggggcaaaaaaaaaaaaaaaagttaaatacgaggtaaagaaaattaaaaact

SEQ ID NO: 16181 - DNA, 311 bp, Glycine max
  Clone ID: LIB3040-007-Q1-E1-G11
gacatacaacagctgcagagtgaaacgatgccgtgcctcaacctctccaccaacgttaacctagacggcgtcgacacctcctccattctctccgaagccacctcaaccgtcgccagcatcatcggcaaacccgaggcctatgtgatgattgtattgaaaggatcagtgcctatatctcatggtgggagtgagcagccagcagcttatggtgaattggtgtccattggtggtcttagccctgacgtgaacaagaaacttagtgctggcattgcttcaattctcgaaaacaagttgtctgtgccagagtcgcg

SEQ ID NO: 16182 - DNA, 434 bp, Glycine max
  Clone ID: LIB3040-007-Q1-E1-G2
tgggactctgctgcctcgctctgtttctgtctctgtgtttgcggctgatgattccgaacgatcgaccttcttcgtttctcgcaaagtttaactcatcattggtaacgaaaagactcatatcaacattttcgtcattggacatgtcgactctgggaagtcatctaccactggtcatttgatctacaagcttggaggtattgacaaacgtgtgattgagaggttcgagaaagacgctgctgatatgaacaagaggtcattcaagtatgcctgggtgcttgacaagctcaaggctgatcgcgaaataggaattaccattgatattgctttgtggaagtgtgaaaccaccaagtactactgcacagtcatcgatgcccccggacatcctgaccttatcacgaacatgattactggtacctcccatgctgattgtgctg

SEQ ID NO: 16183 - DNA, 170 bp, Glycine max
  Clone ID: LIB3040-007-Q1-E1-G3
ggaacctttgcattctactcattcaggatccatcaagtccgtttaggaatcagagacagagatacttctagatggcccctaaattcaaaacagcacggatgtcagctggaggaaaagctcccatgaagcagcttgcaaccatggttgcacgtaattctgctccaacagtt

SEQ ID NO: 16184 - DNA, 120 bp, Glycine max
  Clone ID: LIB3040-007-Q1-E1-G6
tacagttgcgagaaaacgaccgaatatggccgcagatcagcatcaccactttgggctgcaccacatgatgcagatttaagtcaccctgccagcaacctcttcacgcgtctagagcgtata

SEQ ID NO: 16185 - DNA, 157 bp, Glycine max
  Clone ID: LIB3040-007-Q1-E1-G7
gtgattaagctttcgataagagacatagagagaactcaaaggaaaaacatcaaagccttttactattttttcttttgcatcatttgaatcttgattggaagagcttcgaattggggtgttttagccatcaattcaatgttgatgccgtgccttctac

SEQ ID NO: 16186 - DNA, 207 bp, Glycine max
  Clone ID: LIB3040-007-Q1-E1-G8
gaaaaacaacgattctatcatatgaatcagcgctgtttggggttgtctcctactcctacaccctgaattgaagcccgcctttgttttcctccaattcacttcttcgctatctcctgcttccacattccctttcccggattccaactataatggcttgtgggagtaagagcgggaaaagtgagatcagtgaacgaggtgcaaatgatt

SEQ ID NO: 16187 - DNA, 299 bp, Glycine max
  Clone ID: LIB3040-007-Q1-E1-H10
gtataggcattatttttttcttctaaaaaaataaaattaagaaattttcatggtaaccattcgtgcagatgaaattagtaaaattatccgtgaacgcattgagcaatataatacggaagtaaaaattgtaaatacgggtaccgtacttcaagtaggcgacggtattgctcgtatttatgggcttgatgaagtaatggcgggtgaattagtggaatttgaagagggtactataggcattgctttgaatttggaatccaaaaatgttggtgttgtattaatgggtgatggtttgatgatac

SEQ ID NO: 16188 - DNA, 432 bp, Glycine max
  Clone ID: LIB3040-007-Q1-E1-H3
gagattatcataaaacacttgaacaaggaacaagatgctgatcaaagcaacttccgtgattcagccacctctgcagagttggaagttcaggagaagatgcccttgcttgagtggtttgccaatgagtacaaaaaatttggatgctccttggaatttgtgaccaacaaatctcaagaggggtcacaattctgcagagggtttggtggcattggtggaattcttcgttaccagcttgacatcagatcatttgatgagttatctgatgatgaagtgtatgaggattctgattaagtgcctggtactgcagaacccttactttgttttggatgattgcgtcctccaagcatgatttggatactattgattatggttctaagacttaaactttgccctttggttttttgatcataagatgtgtagcattcacttttt

SEQ ID NO: 16189 - DNA, 96 bp, Glycine max
  Clone ID: LIB3040-007-Q1-E1-H4
gggaagcggctgctggtgaggataccttctgtggttcacgcacctctgccgtcttggctcttcaggggtgtctgcccgtgcctgtttggtgggcgt

SEQ ID NO: 16190 - DNA, 188 bp, Glycine max
  Clone ID: LIB3040-007-Q1-E1-H6
acgcaaccgccaacgcgtccgtacagccgtcagcacacgactcagcgggtgcttcaagaccattgactgggggagtttgtcgtgtggtgttccagtgtcaatactggccgctctatacgatccttgcctacgtgcccttgcatgctccgttctctctcttctatagtctcagctaatttcaattcatt

SEQ ID NO: 16191 - DNA, 394 bp, Glycine max
  Clone ID: LIB3040-007-Q1-E1-H8
ggcagttcaattccaatatattccattctctctgtgtatttccctacctctcccttcaagatgcagatcttcgtcaagaccctcaccggcaagaccatcacccttgaggtggaaagctctgacaccatcgacaacgtcaaggccaagatccaggacaaggaaggaatccccccggaccagcaacgtctcattttcgccggaaagcaacttgaggacggccgtacccttgctgactacaacattcagaaggagagtactcttcacctcgtcctccgtctccgtggtggcatgcagatcttcgttaagacactcaccggcaagaccataaccctagaggttgaaagctccgacaccatcgattacgtcaaggccaagatcaagacaaggagggtat

SEQ ID NO: 16192 - DNA, 152 bp, Glycine max
  Clone ID: LIB3040-007-Q1-E1-H9
gaattggggaaatgccacatcaaacgatctaaagacagaccattattcacatctcatcgggttcactggagtcatgcatcatcactgatctgtaagaaccatacaattcacactcacttcgtcacctcaaatcaactaagaacatatcccca

SEQ ID NO: 16193 - DNA, 382 bp, Glycine max
  Clone ID: LIB3040-008-Q1-E1-A1
cacctacttgaagctcttgtgctctgattaccacttgatggaagcttgcttgtggggcttctatggaggctggatctttgagcttcaatgaggtcctttaatggtgattttccaccatggagatgcagcggaagacaaaggagaagaggtgagaggaggcgccatccactagggaataagccatggaagaaggagcttcaccaccaagatgagccttggataagaagcttggaaggatgcttcaatggaggtaaagaaagagggagagaaagagagaggggggagcacgaaattgaaggaataaaagagggagagaagtggaactttgaagtatgtctcataagactctcattcatcaaagttacaacaagtgttacacatg

SEQ ID NO: 16194 - DNA, 380 bp, Glycine max
  Clone ID: LIB3040-008-Q1-E1-A10
ggctgccggtctctgataaatacagatagtgtgggagagagaagagtggaaggtaaagtgacgaccaggttctaagaataacaggaatgaagagaggtcacgtcagcgccggacacggccgtatcggaaagcaccgcaagcatcccggaggtcgctgtaacgccggtggcatgcatcaccaccgtatcctcttcgacaagtaccatcctggtttcttcgggaaggtatgcatgcgctacttccacaaagttcgcaacaaattctacaatccgatcatcaacatcgacaagctgtggtctctcctcacccaggatgccatagacaaggccaccgccgataaagcatccttgctcgatgtcacccagttccgttactttaag

SEQ ID NO: 16195 - DNA, 346 bp, Glycine max
  Clone ID: LIB3040-008-Q1-E1-A11
ggcttgctgatcctcatcatgggaaccatttttcctcctcactctctctctccactcctcaacatcaaaccttcaccctcaagaattctcttggctccctctccccaacccaagtcaaattctctcttttgctccaaacccattgtttcaagtctcagaaagaaccaaacttcatctcccataccttcatcgggcacaagctggttggctcatgctcaacagggcctagcagctttggctatctccttggcactcaactttagcccagttttgtttaatggcaatgcattggcatctgagtttgatgtgcttaatgagggtccacccacagattcctatgtgtttg

SEQ ID NO: 16196 - DNA, 306 bp, Glycine max
  Clone ID: LIB3040-008-Q1-E1-A12
gacacaaaacatttctagagcgagaaagtgagaggagagagaaagtagctgatcctccatggcctccaccaaggaacgcgaaaactttgtctacaccgccaagctcgccgaacaagccgaacgctatgatgaaatggtggaagcaatgacgaatgtggcgaagctgaacgtggaattgacggtcgaggagcggaaccttctgtcggtagggtacaagaacgtggtgggtgctcgtacggcttcgtggaggattctatcgtcgattgaacagaaagaagaagctaaagggaacgaagtgagtgtgaa

SEQ ID NO: 16197 - DNA, 402 bp, Glycine max
  Clone ID: LIB3040-008-Q1-E1-A2
gtaaaatggtaagaaaaccgggtccgcaattttccgtgccgtcaaatctcacaatcgataactaaactcatcgcctttattcagaatgtcggaagcaccattcagaccacgagaaaagcttgctgagaagcaaaaatatttccagagtatccacaggcatacctacttgaagggacccatggataagattacatctgtggccataccactggctttggctgcaacatcaatttacatgattggacgagggatctataatatgtcgcatggaattggaaagaaagaatgacctggaaatttctgattgaggaggtttttccacacatagcctccttaatatggactagtggttttctttgcatttatgtttgttctcttaataaaattgcttagttgcagatt

SEQ ID NO: 16198 - DNA, 434 bp, Glycine max
  unsure (1)..(434): unsure at all n locations
  Clone ID: LIB3040-008-Q1-E1-A3
actcacgcgtcagctcacgcggtcagaaagacgacagaaggggcccagtttcccgcacacacttcttgtctcttctctctctctctatattttgggtttcattgttgggtgctgaagcaaatttgcggtgtagcagaggcaatggaggttcaaagtctcagctttgagaataacattttgtgggttggctcttttgtggaggctttggtgcttgacactttccttgccactgccaaatctcttgcttgctttgtcatcttgactggatctctccttacggatgtcaataatttagtgtcaccgatggtggatggaaggtttcctttanaccaactgtgcaagggataacatacttttgaagaaaacaaagatgctagtgatacagacgatgatgatgatgacgacaatgtgaatgatggagacgacgacaatga

SEQ ID NO: 16199 - DNA, 388 bp, Glycine max
  Clone ID: LIB3040-008-Q1-E1-A5
ggaacggaaaagcactggcgcagctaccctgaggcttctcttctcttctcttctctgtcgtgagtcaccatggtgagggttagtgtgttgaacgatgctctgaagagcatgtacaatgctgagaaaaggggaaagcgccaagtcatgattaggccatcctccaaagtcattatcaaattccttttggtgatgcaaaagcacggatacatcggagaatttgagtatgttgatgaccacagggctggtaaaatcgtggttgaattgaacggtagactgaacaagtgtggggttattagtccccgttttgatgtgggcgtcaaagagattgaaggttggactgctaggcttctcccctcaagacagtttgggtatattgtattgactacct

SEQ ID NO: 16200 - DNA, 259 bp, Glycine max
  Clone ID: LIB3040-008-Q1-E1-A7
aaaatacggttctggctccaaaacaccacctcacggttccggtcccaacagaccacagtaagggttccacctctaaataatcacagtccggtcgttttaaaacaggaaatttagtttgtcatttctacatgatcgatctcgcaattaagattgacaaactcccctctacatgatccaaccaaagctgcccctctatatgatcttctctcacttccatcattcttgcctactttttactatacatagtctcccctcaact

SEQ ID NO: 16201 - DNA, 378 bp, Glycine max
  Clone ID: LIB3040-008-Q1-E1-A8
gtctgatagtagattgagcaaacaaaggaacaatgtcgaagaagaacaacctcgccaagagaaagaagcaatacgaattcgatctccaaagagagaaacaagagaagataaagaaagagcagaagctccatgcgaagaagaacaagatgaaagttgatggtagtggcaagaaaaagaaaggtgggagtggatttcaggtggggaagagaaaagtgaagaccaagttgactgcccttgctaaagctaaggctgcccaggcaatggagcttgacaaatgaggttcgacttgtgtaattttagacaatgtgttgaaaattggtagatgacagtgttgttttgaggctcaatatccttgttctgttctgctatatgactatg

SEQ ID NO: 16202 - DNA, 91 bp, Glycine max
  Clone ID: LIB3040-008-Q1-E1-A9
gtttactgtttttcatgtgcatctatttaattgacttgtaaggtgagggttgccccccacttatatgtgcacttatgcagtgatcttgcat

SEQ ID NO: 16203 - DNA, 404 bp, Glycine max
  Clone ID: LIB3040-008-Q1-E1-B1
gatcgctctcacacctgtgattattcctcttttaacaatccacacccaaattctagggttccgaaatggacgctggcggaaagatcaagaagggcgccggaggtagaaagggcggcggcccaaagaagaagccggtttcaaggtccgtcaaagccggtctccaattccccgtcggaagaattggccgttatttgaagaaaggaaggtacgctcagcgtgtcggtaccggtgctcccgtatacttggctgcagttctcgaatacctagctgccgaggtgcttgagttggctgggaatgccgcacgtgacaacaagaagaacaggattattccaagacacgtgcttttggcagtgaggaacgatgaagagttggggaaattgcttgctggagtgacaattgcacat

SEQ ID NO: 16204 - DNA, 326 bp, Glycine max
  Clone ID: LIB3040-008-Q1-E1-B10
attgttggcttgtgctctgctcgtgcctctagggttatcatatctccatttccatttcctctctctcagtttccaagaatcttaagctatgggaaagtcttacccaaccgtgagcgctgattaccagaaggccgttgagaaggcgaagaagaagctcagaggcttcatcgctgagaagagatgcgctcctctaatgctccgtttggcatggcactctgctggaacttacgacgtgagctcgaagaccggtggtcccttcggaaccataaagcacccctccgaactcgctcacggcgctagcaacggtcttgacatcgctgttaggc

SEQ ID NO: 16205 - DNA, 347 bp, Glycine max
  Clone ID: LIB3040-008-Q1-E1-B11
gggagccccaatcacttgagcagcagaatcttcaggccaagccaggtaagcaagcacaacacaaccccgaaatggcttctgcttctgttcccatggctttctcgctgagctctgttatcaacaacaacaagccttcatccgaagccttcttcaggcgactacccctacggcaaccaaagaggaccctcttcaccacaaaggcagtgtcaaactccaaggctcaaatcaatgcatctttgaaggagaatgcagttgcaggactcacagcagcttctgtgacagcatctatggtggttccggaggtggctcatgctgctggatatgagttctccccttccctcaagaac

SEQ ID NO: 16206 - DNA, 229 bp, Glycine max
  Clone ID: LIB3040-008-Q1-E1-B12
gatacctaaaaattgtaccgatatggcttcacttgtgtgtctccttttttccttgcatttcatggttatcatgtcaggttccttaccagcaaatagtgaattgtttacaaaagattctccaaggtctcaatcaacaaaacccttggaaagactcacccaactcaactttaatttccataacaccaaattgggggaacacccaagggctataaaatttttagacccccaa

SEQ ID NO: 16207 - DNA, 180 bp, Glycine max
  unsure (1)..(180): unsure at all n locations
  Clone ID: LIB3040-008-Q1-E1-B2
gacctccaatttgcgtgagaacgaanaaagaaaaaaaaaccctaacgcactcgagaccctgagatttttcatcttcgtttctcattctctttttgatcatggacgtcgaggtgcggcagatcttcaacaagttcgacaagaacggcgacgganaaatctcggtaacggagctgaaggaca

SEQ ID NO: 16208 - DNA, 424 bp, Glycine max
  Clone ID: LIB3040-008-Q1-E1-B3
aaggcccccttcattccggatgcaaaaggacaacaaaagggaaaaggctctcccttgcattcccaaaggaaaaccctacctagtattccatttcgtttgagagagaaaaaatggcagacggtctcgttctccgcggaaccatgcgcgcccacaccgacgtcgtgacggcgattgccactcccatcgacaactccgacatgatcgtgacggcgtcgcgcgacaaatccatcattctctggcacctcaccaaggaggacaagacctacggtgtcccccgccgccgcctcaccggacattctcacttcgcccaggacgtcgtcctctcatccgacggtcagttcgccctctccggctcctgggacggcgagctccgcctctgggaactcgcggctggcacctcttcccgccgcttcgttggccacac

SEQ ID NO: 16209 - DNA, 388 bp, Glycine max
  Clone ID: LIB3040-008-Q1-E1-B4
aggggaaacacaatcctgaacaactccaaaaaaaggattccccgcggcaccctccgaagacggagatacacccactcactcaccaccactttcccagaaaataaccaccgcctacaatttctcggaatttattttgcgttttggtgcctttgttgttcggattttcaggtgagggagctcgtgtcgtgtgtcgtttagggttaaaaatggggtttaagtgggtgcactgatgtcattgttgtggcttgtgattcgtcaacttgcagaaatcgaggcaatggctgcatctaagaaactgataacaagagaagagtgggagaagaagcttactgatgtgaagattagaaaagaagacatgaataagttggtaatgaatttcctcgtcact

SEQ ID NO: 16210 - DNA, 79 bp, Glycine max; identical to SEQ ID NO: 15389
  Clone ID: LIB3040-008-Q1-E1-B5

SEQ ID NO: 16211 - DNA, 320 bp, Glycine max
  Clone ID: LIB3040-008-Q1-E1-B6
tcaggctgctacaacataactgaagggataccattcttggaaatttaatggccatttgagaaagacggggattcgtgaagataccagctttcattatcatgcattgcgacttaatgattgacgtacatgtcccacaagattcatctaacagacctgttctaaacacttcgtggctttcaagtccctagcgttctttatcatcattgtgctttgcaatatcgcctcatcacctgatagaggcctcttttagaggactggatcaatttcatgtcctcatagttgcacatccccaatggctcagcgtacacaccctatttcat

SEQ ID NO: 16212 - DNA, 370 bp, Glycine max
  Clone ID: LIB3040-008-Q1-E1-B7
ttcttgagttaattcgttcagtaagtcgactcttgagtaaattcttttttttagtagacttttggtaaactttataaattctaagtaaattcggtagaatttggagtttacaattgagtcaataagttaaaaaaataagacaaaaatataaattattttgggttattttttgtttgtttagtgttaaacataactttatttggtgtgttatttttaaatacaaaaattttcacttttaataacattaaactcttgttctctaataacatcaaatcctccatgagaatcatctatcattattataacatttaaaagttattatccagtgatgcattaatagacttgattatttaagtattgtaaaatttat

SEQ ID NO: 16213 - DNA, 383 bp, Glycine max
  Clone ID: LIB3040-008-Q1-E1-B8
gactgcgaaccagtagggactcccattccgactcttagccgccgatctctcagggcttgcatcttctcaggtaagctgtgaagatgtacacatcaaggaagaaaatccacaaggataaggatgctgaaccaactgaatttgaagagtcagttggacaggcattgtttgatctggaaaataccaatcaggagcttaaaagtgatctgaaggatttatacataaactcagccgtgcaagttgatgtttctggaaaccgcaaggctgttgttattcatgtcccttacagattaaggaaaggtttccgtaagattcatgttaggcttgtcagggagcttgagaagaagtttagtggccaggatgtaatcttggttgccacccggaag

SEQ ID NO: 16214 - DNA, 343 bp, Glycine max
  Clone ID: LIB3040-008-Q1-E1-B9
ggcaacaacaaagatcaccaacactttgctggtgccattctttctgacctctcttccaaaaacacttcctccacccaccttaaaaaaacagaggacagccatgagtcgcagaaacgaaagtggtccaaagcttgacttgaagctgaacctgtccccaccgagggctgatcggagactggattcgccgacacgatcggcgacggcgtctccgacgtcaccgccgagctcgtgcgtgtcttcggagctgaaccaagaggacaagagttactctaacagccctgaagccacttccatggttcttgtgggttgccctcgctgcctcatgtatgtgacgctctcctga

SEQ ID NO: 16215 - DNA, 399 bp, Glycine max
  Clone ID: LIB3040-008-Q1-E1-C1
gatctgcgtatggtttcgggggagtttcttcttggatcttaccctcttgtttgctaatattctcattcttctgtctctgcttcttctccttctgaactaagagatggggttgtctttcaccaagctttttagccggctctttgctaagaaagagatgcgtattctcatggtaggtcttgatgctgctggtaagactaccatcctgtacaagctcaagctgggagaaattgtcacaaccattcccacaattggattcaatgtggagactgtggaatataagaatattagctttactgtatgggatgtgggtggccaagataagatccgtcctttatggagacactacttccaaaacactcaggggcttatctttgttgtggatagcaatgatcgtgaccg

SEQ ID NO: 16216 - DNA, 264 bp, Glycine max
  Clone ID: LIB3040-008-Q1-E1-C10
ggtcctaaatcctcattccagccacacgcttcagaagacatggcctcattgggtgggttacaaaatgtgagcggcatcaattttcttatcaaagagggtccaaaagtcaatgcaaagttcgagctgaagccgccaccatatccactgaatggtttggagccggtgatgagccagcagacacttgagtttcactgggggaagcaccacaagacttatgtggaaaatctgaaaaaacaagttgtttggacaaaaccttaatggaaa

SEQ ID NO: 16217 - DNA, 359 bp, Glycine max
  Clone ID: LIB3040-008-Q1-E1-C11
gaattcccaacgcttcttcaaatcttttatttcattcttcagaccaaaaaaagaaaaagggaacattgttcaacgaagcaagatgcttagcaaccgcatatggcagaggagagctttgatctccgcccggaccttattttctggctctgcttctcactcttcatcatcttcccatgcgatctcgcttcgcttcgccaaaactaatgctccttcttcttcacatgtcattttcaattttgcacgtgtggacaaatattggttttctactcaacccgccctagagcttcccgccagcaagatcgtggacgtgccgttggcacaaactggtgaaggcatcgcagaatgtgagcttcccaaat

SEQ ID NO: 16218 - DNA, 348 bp, Glycine max; identical to SEQ ID NO: 14730
  Clone ID: LIB3040-005-Q1-E1-H4

SEQ ID NO: 16219 - DNA, 138 bp, Glycine max
  Clone ID: LIB3040-003-Q1-E1-F5
ggactctcaccgttccttcagagtggaaccctagttgtctctatccttaaggttccgccaccgcaccaagtctcagcacccaaccaggtcttctttcattcatggcggaggaacttatttctcaattaaacaatatgc

SEQ ID NO: 16220 - DNA, 417 bp, Glycine max
  unsure (1)..(417): unsure at all n locations
  Clone ID: LIB3040-003-Q1-E1-F6
gacacacgttctctgtgactgcctctgttccgccaagcgcagcattttcccaccgttcaggccaccggctgagttaggtttccggcgaggatgggtgctgctctgctgtcggagcttgcgacggagatagtcgtgccagtgtgcgccgtcatcgggatcgtgttctcgctggtgcagtggttcctcgtgtcgcgcgtcaagctcactcccgaccgcaacggaacgacgtcgtcgccgcgcaacaacaaaaacggctacggcgacttcctcattgaagaggaagaaggcatcaacgaccacagcgtcgttgtgaaatgcgctgagatacagaacgctatctccgaaggtgcaacatcctttcttttcactgaatatcaatatgtgnggattttcatggttgcttttgcaatactgatc

SEQ ID NO: 16221 - DNA, 425 bp, Glycine max
  Clone ID: LIB3040-003-Q1-E1-F7
gacagcaaaacaattttcaaactcaattaccattccataacctaaatctcctctttgtttccgagtcagagagcaatggcacgtaccaagcaaaccgctcgcaagtccaccggcggaaaggcgccgaggaagcaattggcgactaaagccgctcgcaagtcagctccggccaccggcggagtgaagaagccccaccgcttcaggcccggaacggtggctctgagggagatcagaaagtaccagaagagcactgaacttctgatccgaaaactcccattccagaggctcgtcagagaaatcgctcaggatttcaaaacagatcttcgtttccagagcagcgctgtttctgcgcttcaggaagccgcagaggcttatctcgttggactcttcgaggacaccaacctctgcgctattcacgccaagag

SEQ ID NO: 16222 - DNA, 240 bp, Glycine max
  Clone ID: LIB3040-003-Q1-E1-F8
gatagcatcagtgttgaaattatctcaaaaaacgaaaatatatcagccacattttaccctatcaattgagggcttgtatcagatgtaccaggctggcagtgtgtgtaatcaagccataaaaagcataaaccatagcttgcgcttgaagcatacttatgaatgcacctcctgtttccattttcatgatgaatcaggaaaggctacaaagctttcttatccgggcaactacaactgctttac

SEQ ID NO: 16223 - DNA, 393 bp, Glycine max
  Clone ID: LIB3040-003-Q1-E1-G1
gatagcgaaacagagagtggtttcagtgagtgatcggtgttcacttgatccttcataagtcgtcatcatcatcatcatcatcaccgttgattgaagaagatgccgatcagaaacatcgccatcggaaggcctgaagaggctactcaccccgacacgttgaaggcggggttggctgagttcatctccaccttgatcttcgtgttcgccggttcaggttccggcatcgcctacgacaagctcaccgacaacggcgccgccactcccgccggcctcatctccgcttccatcgcccatgctttcgccctcttcgtcgccgtctccgtcggcgccaacatctccggcggccacgtcaaccccgccgtcaccttcggcgccttcgtgggcggcaacatc

SEQ ID NO: 16224 - DNA, 358 bp, Glycine max
  Clone ID: LIB3040-003-Q1-E1-G12
cttgcactaacaaccttgaaacccgggtcaaccgaaacccctcaaccaaccaagtccaagaaaaaaggttaaaaacccaaaggaggaaatgttaacccgggttcaaccggtaaaaaatgggaacaacttttttgcctttcccccaaccttggcccccttcaacaaaaccttcaccaaggtcactaattttccggcaaggaaaacccttgtccgaatcactggtggtatgaaagttaaacctgacaaaaatgaatcatctccttatgctgctatccttgcagctcaggatgttgctgccagatgcaaggaactgggcataactgctcttcatatcaagctccgtgctactggtggaaac

SEQ ID NO: 16225 - DNA, 397 bp, Glycine max
  unsure (1)..(397): unsure at all n locations
  Clone ID: LIB3040-003-Q1-E1-G2
gaaaattggaggtgacgatggaattggaagttgacgagaacgacttgaaagccgccggcgctgaactcctcgccgaaggtggcccggcaggcattcgtatcaatggctggttgatcgagactcggaggcactccatactgaactcttccacattccaagagtgggaacagaaactcgatacgtctcatttacaganatggtttttggggaaaacactttgattctaaaacacttgancagtggaaccaacattcattttaatgcatttgatgctctacgtggctggaaacaagaagccttgccgccagttgaagttcctgcggcggctaaatggaaatttagaagcaagccctctcagcaagtaatactagattacgactatacatttacaacacct

SEQ ID NO: 16226 - DNA, 391 bp, Glycine max
  Clone ID: LIB3040-003-Q1-E1-G4
ggaggaagaaacgggagcttttagtagtagtaataaccagttgacgctttcgcccctaattcaaggctttaccaaactcccaaccctcaaccctttcaatttcaccaccctttgccttcttccttctcccctctccttgcagttccaaccacacaacctcttctcaacctccctttccctcaggccgaaaaagaaatggagtgcgtggaggcagcgttgaagagcaattataggaaagaaatgaccttaaaactgagcccacaaaccttcacggaagaggttagtgtccaaaacggcacaacctgcgacgaacttttcgttaacgacctccttgacctctctcacggtcaaagaagaacccgaacaacaagaagacactccctgtgtctcc

SEQ ID NO: 16227 - DNA, 221 bp, Glycine max
  Clone ID: LIB3040-003-Q1-E1-G6
ggcctcattcgggactttcactacccgcagcagcctcaggaggagaataaggatgtctcacaggaatttcgagcacccaaggcacgggtcactgggatttctccccaggaagcgtgctgctcgtcacaggggaaaagtgaaggcattccccaaggatgacccatccaaggcacccaagctcactgcattcttgggttacaaggctggtatgactcacattg

SEQ ID NO: 16228 - DNA, 420 bp, Glycine max
  unsure (1)..(420): unsure at all n locations
  Clone ID: LIB3040-003-Q1-E1-G7
gctagcaattcggcgcaatcgtcttctgcttcaaggaaggagagcttgttattctctatcaacaaggaaaatgtcaggtgaagaggttgttgttgcagctgagccagctgctgccatcccaggcgagcctatggatatcatgactgccttgcaacttgtgctcagaaaatctctggcttatggtggtcttgcacgaggccttcacgaaggggcaaaagtgattgagaagcatgctgcacaactctgtgttctagcagaagactgtgaccagcctgactatgttaaactggttaaggccctttgtgcagagcacaatgttagcctgctgacagttccgagtgcaaagacccttggagaatgggctggtttgtgcaagattgattccgaaggaaaagctangaaagttactggttgctcctg

SEQ ID NO: 16229 - DNA, 436 bp, Glycine max
  Clone ID: LIB3040-003-Q1-E1-G8
gacacacactctgtcacgcacccaccattctactacactcctctctctcactctcactctctgctccgtgatagctgtaccacgtttttctctccatctcgaaacaccatctctgcctcagtcccaacccatcaccattctcatggctgctctagctctagcacttcttcttctggctttcaccggcacttcaagtgctacatggtgcgtttgcaaggatggaagcgacgcgatcctgcagaagacgttagactatgcttgtggagctggtgctgactgtaaccctcttcacctaaacgggccttgttttcagcccaacaccgtcagggcccactgtaactacgccgtgaacagctacttccaaaagaagggtcaagctcaagggtcatgcgagtttgcgggaacagccactgttactgcatctgaccccagctct

SEQ ID NO: 16230 - DNA, 416 bp, Glycine max
  Clone ID: LIB3040-003-Q1-E1-H1
gattcctctgcattcattcagcgttcatctcaatctagatttgtgtgcggtgcgtctccggtgaagagaagaagatggcgaccgtaccaggacagctcatatgggaggtcgtaaagaagaacaactctttcgtggtgaaagagttcggaaggggcactcagagcgtgcagttcagcagagagcccaacaatctctacaacctcaacactttcaagtactccggtttggcgaacaagaaaactgtcactgttcaacctgcgggtaaagaccagtctgtgttgctggcaacaaccaagaacaagaagcaaaacaagcctgctgctttgcttcacaaatctgtcatgaaaaaggagttccggatgatggcaaaggcagtgcaaaatcaggtagcagataactactacaggcctgatctc

SEQ ID NO: 16231 - DNA, 422 bp, Glycine max
  unsure (1)..(422): unsure at all n locations
  Clone ID: LIB3040-003-Q1-E1-H10
aggggcagtttcanattttcttttccttcactttcccgaganaaaaataacacttttcactttcttcactacgttctcacttcgatatggctcgtacgaagcaaaccgctcgcaagtccaccggtggcaaggggccacgtaagcagctcgccaccaaggccgctcggaagtccgctccggcgaccggaggagtgaagaagccccaccgcttcagggcgggaaccgtggcgctgagggaaatcagaaagtaccagaagagcaccgagcttctcatcaggaagcttccatttcagaggctcgtgagagaaatcgcgcaagatttcaagaccgatttgcgtttccagagcagcgctgttttcgcgcttcaggaggctgctganggntacctcgttgggttgttcgaggacactaacctctgcgcg

SEQ ID NO: 16232 - DNA, 273 bp, Glycine max
  unsure (1)..(273): unsure at all n locations
  Clone ID: LIB3040-003-Q1-E1-H12
gctggaaagcgttcgcgtcggctcgtcacgttcccgctcactccctctcgcgttcgccctctgagcatagtggatatggaatgtgtggttcagggaattatagagactcagcatgttgaggccttggagattcttcttcaaggactatgtggtgttcagagagaacgattgacgatccatgaaatatgcctcaagagtggtccacatctgggcactgtancctcagatgttcgactcttgtgtgacctagagcaagctgaaccttcctggact

SEQ ID NO: 16233 - DNA, 414 bp, Glycine max
  Clone ID: LIB3040-003-Q1-E1-H4
ccttacggctgcaaaaaaacaacaaaagggaaaagaaggagaaattgaaaaatcctccggaaaccccacctgacaaaaaaagggtgcaacggtcctccgccctaaatcccacctccgacgcccctccaaggaaacaagctgtcaagaaagatgtgttccgggtgtttgctgagaaggttagagaccataaagaattggtttcaagatgggctgttctacaggagacgcgtgttgagtattttagagggaaggatttcgtgagcttcttaaaaagccatccggagctcaaagatgttctagaattagataggattttggaaacagaggagattgccaacattctacttgcaaaaaatcttttagtgcgctgtgatcgtgttgtaaaaactgttcgtcctgggaagaaaaagctgt

SEQ ID NO: 16234 - DNA, 435 bp, Glycine max
  Clone ID: LIB3040-003-Q1-E1-H5
gaagcttctttcttcttcgccaattcagatcgcagacagacacagagagtgagagagggagatggggagcgacagcgaggcagagaagtcggtgcagaaagagaaggagaagaagaagatgttggccctggctcccattgctaaacctcttgctgggaagaagctttgcaagcgaaccctaaaacttgttcgtagagctgccgaacacaaatgcttgaaaagaggagtgaaggaggtcgttaaaagtataaggagaggtcataaaggattgtgtgtgattgctgggaacatatcaccgattgatgtcatcactcatgttcctattctttgtgaagagtctgacattccttatatttatgtcccatctaaagaagatcttgcaggcgcaggagcaacaaagaggcctacttgctgtgttctggtacagacaaagcc

SEQ ID NO: 16235 - DNA, 401 bp, Glycine max
  Clone ID: LIB3040-003-Q1-E1-H6
gactcattctttcattctcattgccgtcacagagagagacaagaaacaatgaagtttaaccctagggtttcctcaagccgtcgcaagagccgcaaggctcacttcaccgctccgtcgagcgtgcgccgcgtcctgatgagcgcgcctctctccaccgatctccggtcaaagtacaacgtgcggtccattccggttcgcaaggacgacgaggttcaggtcgtgaggggaacctacaagggccgcgagggcaaagtggtccaggtctatcgccgcaagtgggtcatccacatcgagcgcatcacccgcgagaaggttaacggctccaccgttaacgttggcattcacccttccaaggttgtcgtcaccaagctccgaatggacaaggaccgcaaatccttgct

SEQ ID NO: 16236 - DNA, 280 bp, Glycine max
  Clone ID: LIB3040-003-Q1-E1-H7
gagcaacatggtgaagctggtggagagatttacttgccagaagcttacgttagaaccaagaggactacttaatggagcaaatcagttggaagaacttgtagctagcttcccaactggcttatctgagtgtggagaagcattatcaagccttaggagtaggagaacgagtactgtttgtgatgaatgtctatggtttaagaaatctgtctttagtcaacttgtgtgttttgttattcagttctcagcaataaactgctctggcaatctagtttcatgcccg

SEQ ID NO: 16237 - DNA, 194 bp, Glycine max
  unsure (1)..(194): unsure at all n locations
  Clone ID: LIB3040-003-Q1-E1-H8
ggccgctctctgagaaaaacagatagtgtgggagagagaagagcggaagagaaaatgacgaccaggttcaagaagaacaggaagaagagaggtcacgtcagcgccggacacggccgtatcggaaagcaccgcaagcatcccggaggtcgcggtaacgccggtggcatgcatcnacaacgtatcctcctcgacaa

SEQ ID NO: 16238 - DNA, 387 bp, Glycine max
  Clone ID: LIB3040-003-Q1-E1-H9
gggtttacaaaccggttttggatgtccaaagattaacacagtacccaatggagttccaaagtcagtacaagttcaatgaaacaagagaagccgatgaagatgaaaccaatggcaagggcccctaaaattaccaacaactgttagaaaattccgaaattcctggttaagtcttccaaaaattgcaacaatttgttccatgaatcggttggtcaatgcacttcaattgtgtttgatattgatcccaagaacttccgcggttgagctgtgcacgactgtgcaacttatatactatgaacatggcaagctgtacccaatttatgctattactgagcatttcctccctcgtttttttttgttgtaacatggatgcacaatcatcaatagaga

SEQ ID NO: 16239 - DNA, 289 bp, Glycine max
  Clone ID: LIB3040-004-Q1-E1-A1
tcaagacgtcatgcatctggtcatgaatcagatgaaggacgacacgaaagacacaagagagaccaccgcagagaaggagatcttgaagatggggaatttggtgatgatcatgtggatagatggtagccatgttattctatttgaactcctattattaccttttgtttagctcaacatgtattatttttcaaaagaaaatattatgatatacaacttttaagagaactcccttgtattccaaggttttgcactgaagaatttgctactagaatgaaaggttaagttctca

SEQ ID NO: 16240 - DNA, 143 bp, Glycine max
  Clone ID: LIB3040-004-Q1-E1-A10
ggaaagtgaaaagtgtatttatttatttttatttttatttttaaagaaaaaaaaacaataaaaagaggagagtttgttgctgtgctgggttgtatgagcggttcaacaggaaaatctcgcgggccaaaaaagatgtgtaattg

SEQ ID NO: 16241 - DNA, 408 bp, Glycine max
  Clone ID: LIB3040-004-Q1-E1-A11
gacccaacaacttaatttattttgtaacgccaaacgtccatccaaaattgcgttcctaaatcgccgctaccgaacacagccgtagacttttaagtcattccgctgcgtttctttctctgcacttcaaagttcaaaccctagcgaagcatccactgtcgccgtcgcacactcgcacgccgctcacaggtttatgggctacgctgatgtcctgaatttgttgttggccgtggtggtttggtgcactgcttacgttactgttgtagttctcgcttcctttcgagccgtttgcactttctgaaaccttgcaatttcattgataacatgggttatgcacagcttgtcataagtcctgctggtagtggcaagtccacgtattgctcaagtttgtatgaacactgtgttgctgca

SEQ ID NO: 16242 - DNA, 400 bp, Glycine max
  Clone ID: LIB3040-004-Q1-E1-A12
gaaagattagaagtcgacatatggggggagcaaagagttactcctgttttgcagtaatagctgtggccttggttttgctacttctgaatgtggctgtggtttgcaatggacgcaagacaagcacattcattaggaacgttgagaaaactgaggacatgccccttcatagtgatgtatttgttgccccttctggctataatgctcctcagcaagttcatataacacaatgtgaccaagtgggaagggccatgatcgtgtcatgggtgactgtggacgaaccaggaaagagtctagtgcattactggagtgacgccagccagcacaagagagtggccaacggaaatcatgtcacatatagatacttcaattaatcttctggttttatacatcactgcaccct

SEQ ID NO: 16243 - DNA, 325 bp, Glycine max
  unsure (1)..(325): unsure at all n locations
  Clone ID: LIB3040-004-Q1-E1-A2
gagtcaccacagagagagaggttttgatgcaacgctgtcactgagaaaggatctctatctacgaaggagcggaataaaacccttctctctgtgattaagagaatggcttcagatcggaaacttcacacttttgaggaggtggcaaagcacaaccagaccaaggattgctggctcatcatttctggcaaggtgtatgatgtcacccctttcatggaggatcatcccggaggtgatgaggttttgttatctgcaacaagggaagatgcanccaatgactttgaagatgtggggggcactgaatctgctagagatatgatggaaaaat

SEQ ID NO: 16244 - DNA, 327 bp, Glycine max
  Clone ID: LIB3040-004-Q1-E1-A4
gaggctttaatgaatggcggttctgcatctagtaacttaagggcagctctctcccattgcgtacaacaagtgcgaagttatgattatcatcactatctttgccttctcgagctgcctccgtctatgcggaaggctgcatttgcactccgtgccttgaatgttgaaacagcgagggctatggatgttgcctcagatcccaggatcggccttatgcgccttgtttggtggcaggaagccatagacaaaatgttcgccaataaactgattgaacacccaacagcagaggccctggcatctgtgatagctgaaacaaactcagcaagatat

SEQ ID NO: 16245 - DNA, 385 bp, Glycine max
  Clone ID: LIB3040-004-Q1-E1-A5
gacttcaacatctcttaataaagattagaaatcgacatatggggggagcaaagagttactcttgttttgcagtaatagctgtggccttggttttgctacttctgaatgtggctgtggtttgcaatggaggcaagacaagcacattcattaggaaggttgagaaaactgaggacatgccccttcatagtgatgtatttgttgccccttctggctataatgctcctcagcaggttcatataacacaaggtgaccaagtgggaagggccatgatcgtgtcatgggtgactgtggacgaaccaggaaagagtctagtgcattactggagtgacgccagccagcacaagagagtggccaagggaaatcatgtcacatatagatacttcaa

SEQ ID NO: 16246 - DNA, 312 bp, Glycine max
  Clone ID: LIB3040-004-Q1-E1-A6
gatcgcatttcatagcactcaccctcattaccaacacgaaagcataaccaaaaccttttttcgaagtctctgattttcctaatggctccggcaaaggcagagaagaagccggcggagaagaagccagcggcggagaaggcaccggcggagaagaagccgaaggcggagaagaagatctcgaaggaaggagggagcgagaagaagaagaagcgcacgaagaagagcgtggagacctacaagatctacatcttcaaagtcctcaagcaggttcacaccgacattgggatattcagcacggccatgggcatcatg

SEQ ID NO: 16247 - DNA, 356 bp, Glycine max
  Clone ID: LIB3040-004-Q1-E1-A7
tgagttccgatggatggaccagtttgctttgtcattggatccgatgacagccacgtccttccatgacgaaaccctaccggcagatggtgcgaaagtggcccatttctgctcaatgtgtggccctaaattctgctctatgaagattacagaggatgtgaggaagtatgctgcggatcatggctatggaactgatgaagctttgcggcgtgggatggatgctatgagtgctgaatttcaagctgccaagatgaccatcagtggggaagaacatggtgaagctggtggagagatttacttgccagaagcttacgttagaaccacgacgactacttaatggagcacatcagttggaagaa

SEQ ID NO: 16248 - DNA, 311 bp, Glycine max
  Clone ID: LIB3040-004-Q1-E1-A8
gagagtgatccttctacactaactaaagccgagcagcgagagagagaaaccctagcaaaaatgccggctggtcacggtttgagatcccgcaccagagattccttctctcgtcccttcaggaagaagggtgccatcgccctcaccacatacctcagaacctaccacgtcggcgattatgtcgacgtcaaggttaacggcgccgtccacaagggaatgcctcacaagttctaccatggccgcaccggtcgcgtctggaatgtcaccaaacgtgctgttggggtcgaagtcaacaagcaggtcggcaacagaat

SEQ ID NO: 16249 - DNA, 230 bp, Glycine max
  Clone ID: LIB3040-004-Q1-E1-A9
caaaacgtgtacgcgagactgaaaactttggggatatttgtttgatgtttgagcataaaattttcgaccatttattatatgaagttgtcaatgaagttttagaactttattattgagaattttgtcatcttgatgtgtaaagtatcaatatatagatgtaggatattacgtgatgattttgcaaatgaactcttctgtttgctacatgatacataaaactaacttcaagc

SEQ ID NO: 16250 - DNA, 389 bp, Glycine max
  Clone ID: LIB3040-004-Q1-E1-B1
gagggagaattaggtttttagggtttacaccgagcagccacacctcgcgcagcagccatggttctcaaagctgaactatgccgattcagtggtgccaagatctacccaggaaagggcatcagatttgttcgtggtgattctcaggttttcctgtttgcaaactcaaaatgtaagaggtatttccacaatcgcctgaagccttcaaagctcacctggactgcaatgtacagaaagcaacacacataggacattgctcaagaagctgtgaggaagaggagacgtgctgccacaaagccttactctgggtccattgttggtgcgaccttggaagtaatccagaaaatgagagctgagaaaccagaagttcgaaatgcaactaagggaagctg

SEQ ID NO: 16251 - DNA, 191 bp, Glycine max
  Clone ID: LIB3040-004-Q1-E1-B10
tgggttgcaacgtgtactcaaacatgtcctagctaactcattaagaaaacacctttcctgaactttttccattgccattctacgagaacgttaaagttgatgtcgttgggtggaagcctccatagcattgtctagtaatacgtctgaaatacgtgccattaatgtaaaaatatacctgtgcagaaaccaaa

SEQ ID NO: 16252 - DNA, 393 bp, Glycine max
  Clone ID: LIB3040-004-Q1-E1-B11
gggaggtcagaacagttgttgattcccaaattttggaatcctacatgagtgtgacaattgaagccatggcaaaagcctttggagtgagagtacagttcattgatgtggagctatcatgtaatagtgcaccagggacgctacagtggtcgattgataaagttgcaagtgttcttgaaactaaccgacctgatgcgaacaaggctcgttaccacgcaactatcaagcaaggggacttcctgctgaagcggatccagaaactgtcacctgtgataaatcgtcaggtcacctctcgcatgttagagtaaaagttactggagaggcatagatagtgacaacatcaaagttgatcgacatccttatgaagacattactgtaatccatatgaggtccaga

SEQ ID NO: 16253 - DNA, 124 bp, Glycine max
  Clone ID: LIB3040-004-Q1-E1-B12
gattcacacaactaactaagaaagtctttcatagccccccaaaaatgaagagcaccatcttctttgctctctttctcttttgtgccttcaccagctcatacctaccttcagccatccccgattt

SEQ ID NO: 16254 - DNA, 294 bp, Glycine max
  Clone ID: LIB3040-004-Q1-E1-B2
gacagacacatgcgcctatctgcgatagctacctaaattattcactccctccctaacaagccacaccgtttcgtgctccaatggcagctttggatctcactataagcatgttggcactcataattgttgttgtttcacttggcgtgtgcggtggtgttcaaggtgcgccacaagttccatgctacttcacttttggtgattctttggttgacaatgggaacaacaaccagctccaatctttggctaaggctgattacttgccttaagggattgacattcctggtggaccttctg

SEQ ID NO: 16255 - DNA, 55 bp, Glycine max
  Clone ID: LIB3040-004-Q1-E1-B3
tggatttagttggaggggttcatagatttagggaatcgattactatactagtaat

SEQ ID NO: 16256 - DNA, 173 bp, Glycine max
  Clone ID: LIB3040-004-Q1-E1-B5
tctctttgagaactgatgatgcattctaggatttatgtttgcttattagtagatggcatcaaggaaaaattaagtattgtttgctgagaattttacaatttgtatttttgttaaatgtttaacctttattctagtttggagttttggtcattaaggttttgatttaagttcgc

SEQ ID NO: 16257 - DNA, 345 bp, Glycine max
  Clone ID: LIB3040-004-Q1-E1-B6
gattctgaagttgaacggcggagaagaagatgttgtgcgcttgttcttccggggagcagttcaaattcgaagagccgccacactcgccggagtccctcgccaccagggatttctccgccagcggactctcttccaggaccggagaatgggaacctaaattcgatgatacgcaagttgaagaagctgaatctactcttaaagatgctctttccttaaactacgaggaggctacggctttgttggggaggcttgaataccagagagggaactttgatgctgcacttcaagtgtttcaaggtatggatatcacgggtttgaccccaagaatgatcaaggctattgctg

SEQ ID NO: 16258 - DNA, 340 bp, Glycine max
  Clone ID: LIB3040-004-Q1-E1-B8
gcttcttcatcatagtcgtggccgtgtcgcagcaaaaccaaaccacatattaacttgtttgctctaagtcatggctctgatcttgcacgcaaccaaagcaaacaagaatgctttcaagactctgattgcggcagagtacagtggcgtccaagtggaattggcccctaatttcgagatgggtgtctctaatagaactcctgaattccttaaaatgaatcccatatgaaaggttcctgtcttggaaacgcccgatggtccagtctttgagagcaatgccattgctcgttacgttgctcgagtcaagggtgacaacgctttgttctcatcttcggccattgat

SEQ ID NO: 16259 - DNA, 273 bp, Glycine max
  Clone ID: LIB3040-004-Q1-E1-B9
cccacgcgtccgcccacgcgtccggaaccacttggagtaacataactcctaacactggaaactttgctgtttctgaatcttcaattcacttttcagtcagtaccatgtctcctttgcaattaagagataccaagacaaatgattctgtatctgatgatgcttttccaaactgtattgggaatgatatagctagttcaggatcagcatcatctgataattataagatgaattcttccaaggggaagaatttcgcgttcaacaagagcagtgttt

SEQ ID NO: 16260 - DNA, 353 bp, Glycine max
  Clone ID: LIB3040-004-Q1-E1-C1
gagggacatggtggttctggtggagagatttacttgccaaaagcttacgttagaaccatgaggaccacttcttggatcagctcagttagtagaacctgtatctagcttcccaacgggcttatctgagtgtgtagaaacactcacgtgccccaggagtcggagaacgagtattgtatgtgatcaatgtctatggtttacgatctctgtccttagtcacttgtgtgttttgttactcagttctcaggactttactgctcaggctctcaagtttcagatacatgctgccaaaaagccttactctgtgtccattgtttgtgcgatctttggaagtaatccagaactggagagctgag

SEQ ID NO: 16261 - DNA, 401 bp, Glycine max
  unsure (1)..(401): unsure at all n locations
  Clone ID: LIB3040-004-Q1-E1-C12
ggccattgttgctgtcatcatccgcagctgctgttattcgcaccgcaaacaaacagtgagccatggccgtcggaaagaacaagcgcatctccaaagggaaaaagggtggcaagaagaaggcagctgatccctttgccaagaaggattggtatgacattaaggccccttctctttttcaagtgaaaaatgttggcaaaaccctcgtctctcgtacgcanggtaccaagattgcttctgaaggacttaaacatagagtgtttgaggtctccttggctgatcttcaaggggatgaggatcatgcattcangaagattacgttgagagctgaagatgtgcaagggaagaatgtcctgacaaatttctggggaatggattcacaactgacaagctgaggtcattgg

SEQ ID NO: 16262 - DNA, 353 bp, Glycine max
  unsure (1)..(353): unsure at all n locations
  Clone ID: LIB3040-004-Q1-E1-C2
agtctcagtgtcatacaaaattggagggaaatttgaatttctattcaaatttcacttcaatttgaatttgaatttgtagagccaaatttagagccaaaatttcactaattatgattagtgaatttcagctatggttcagcccactaatccaagatcaaattcaagattctccactaagtgtactttggtgtcatgaggcatgtaaagcatgaagggtatacacaaagtgtgactatatgatgtggcaatggaatgtagcaagcanatgctcacctcccccttaagttggtcnanaatttaaattggatacgcttctccaaatcaaataaattctctcccacacacacatcaat

SEQ ID NO: 16263 - DNA, 364 bp, Glycine max
  Clone ID: LIB3040-004-Q1-E1-C3
gattcttcttcccttcgtctgaaaaccctaaaacattgaatcttagatggacttgacatggttgagtgccatcctggtgggggctggttaccttgctttgggttacttcattggttctcagtatccccctcgtttcctcttctcacataaattatcgactaaacataaagaagatgcttcacttctcaatgacaacgacaataagaagaggaatactaagtccaaactcaaagaccccctggagattgaacaactcgctgaaatcctcgatgattttaagatgatactcgttgtcaggaatgatcttaaaaggggtaaagggaagattgctgctcaatgcagtcatgcaacgttaggtctctat

SEQ ID NO: 16264 - DNA, 51 bp, Glycine max
  Clone ID: LIB3040-004-Q1-E1-C4
taatgggaacttcgtccctccctttgtcattcactctctgagtgacatcgg

SEQ ID NO: 16265 - DNA, 124 bp, Glycine max
  Clone ID: LIB3040-004-Q1-E1-C5
gatacagtttcaggttgagtttgtttcgttagattagacacttttggtttgttatggaccaccaccttcttttggttgaagggcacttcaacactgattttaattatgccttgcatttggtgct

SEQ ID NO: 16266 - DNA, 63 bp, Glycine max
  Clone ID: LIB3040-004-Q1-E1-C7
gccggtttcccgaacgatttgatggtttggaatgcatttcccaagcaacgagtcttcggttcg

SEQ ID NO: 16267 - DNA, 294 bp, Glycine max
  Clone ID: LIB3040-004-Q1-E1-C8
ggagtggcagataagttcgacgaagatagccagacacttaggctatgattgtccacaacatgtggatagcaggaaaaacgagtgtagcagatctcaacgatccttccctttgcatcgatcactcccatcactcatcttcttcatcgtcacttgtacactcttcaaccactcatcatagtggttggtttttggtgcgaaagccatggcatctacatcctctctgcatctatctcacgcccttctggcacgtgctgtgtaccttcatggcacgtcgtctgaacgtgtctcactctc

SEQ ID NO: 16268 - DNA, 417 bp, Glycine max
  Clone ID: LIB3040-004-Q1-E1-D12
ggcacttagccagttcggtccctcacttaagccactgtgtggaactaacaacaacacaaggccatcatcatggcagctgcttctcctatggcaagccaactcaagtccaccttcactaaaactcttgtagctcccaagggcctctctgcctcttcaccactccacctcctgccttctaagaggcaatttagcttcactgttagggccatccaatcagaaaagccaacctatcaagtgattcaaccaatcaacggtgatcccttcattggaagccttgaaaccccagttacatccagccccttgattgcatggtacttatcgaacctccccgcatacaggaccgcagtgagcccactactaagagggatcgaggtgggcctggcccatggctaccttctggtgggcccattcgtgaag

SEQ ID NO: 16269 - DNA, 236 bp, Glycine max
  Clone ID: LIB3040-004-Q1-E1-D2
gaccgaaagcgaaatcggaagcgtgatcgttcgtttaaacgtacgttgacactgatggagagactaacttctaggacatcttctcgcaaatccgcgccacgcgcagcgacatgcacatcgacgtcaacgcaatcgccatcacctgccccaacacatacgacgagagctaagcagatagctccgcaactggagcctgaggacgagggagaggctcaagggcggaataagtcgggaac

SEQ ID NO: 16270 - DNA, 348 bp, Glycine max
  Clone ID: LIB3040-004-Q1-E1-D3
ggtgtctcactcacatcacacacactctcatagctgtagcggcgacactaagatcggagaaagaatggcgaaaacgacgtcgttgctgctctttacactgctcctcttcggaaccctagctctcatccaggcgaagaaatcgaaggaggatttgaaggaggtgacccacaaggtttactttgatgttgagattaatggaaaagaagcaggtcgtattgtaatgggtctttatgggaaggctgttccaaaaactgcagaaaacttccgagcactttgcacatgggaaaagggaactggtaagagtggaaagcctctccattacaaaggtagctcattccatagaattat

SEQ ID NO: 16271 - DNA, 366 bp, Glycine max
  unsure (1)..(366): unsure at all n locations
  Clone ID: LIB3040-004-Q1-E1-D5
gtcatcaaggatttcatgattcaaggaggagactttgacaaaggaaatggaactggaggcaaaagtatatatggtcgtactttcaaagatgagaattttaatttgtctcacactgggccgggtgttgttagcatggcaaatgcaggacccaacacaaatgggagtcagtttttcatatgcactgtcaagacaccttggctggatcagagacatgtagtatttgggcaagttttggaaggcatggatattgttaggttgatcgaatcacaggagacagatangggtgaccgtcctacaaagaaggtgagcatcagtgactgtggtgagcttccaaatgcttgaggtggttcctgtgtaattttgttg

SEQ ID NO: 16272 - DNA, 329 bp, Glycine max
  Clone ID: LIB3040-004-Q1-E1-D8
ggaggtgagggttggttcatttgatctgcgactgagagaagagaagagaattgtgatggggggaggacagggtcacggcacaacctacaaaggtgttaccattcatcagccaaagcgctggcacactatcaccggcaagggtttgtgcgcggtcatgtggttttgggtattctacagggcaaagcaagatggtcctgttgtattgggctggagacatccttgggagggtcaccatgatgatcatggcaagggccattagcattccttaggcatgagctccaagaacaggaagaacagaatttgaagtgtcggttgctgtggatgtgttg

SEQ ID NO: 16273 - DNA, 401 bp, Glycine max
  Clone ID: LIB3040-004-Q1-E1-D9
gatgtggttgcgcctctgcctgtaagagtgaaaaaaccttctcttttccttctctcaagtctcaagagatttcatcatggctccaaagaaggacaaggctccaccaccttcctccaagcccgccaaatctggcggtggcaagcagaagaagaagaagtggagcaagggaaagcaaaaggagaaggtgaataacatggtgctgtttgatcagggcacctatgataagctcctttctgaagctcccaaattcaagctcatcactccttccattctttctgatcgtttgaggattaatggatcacttgcaaggaaggctataagagaattgatggctaggggttcaatcaggatggtgtctgcccatgcaagccagcaaatttacaccaaggcaacaaacacct

SEQ ID NO: 16274 - DNA, 341 bp, Glycine max
  Clone ID: LIB3040-004-Q1-E1-E1
gacacaattaatcttgtgcataacaatttcacaagtgctattttcagtacattttcttagttgtgataatatgagagtgagcgcagagtttgagcgtgttctcaagtatttcgatgaagatggggatggtaagatttccccatctgagcttaggaaccggctatgcatgatgggtggtgagttattgttcaaagacgctgaaaagttgattgaggaattggattctgacggtgatgggtttttgagtttggaagattttgtgaagataatggacgcagcaggggaagatgagaagttgaaggatttggccgaagcttttgagatgttcatgacactgaaat

SEQ ID NO: 16275 - DNA, 415 bp, Glycine max
  Clone ID: LIB3040-004-Q1-E1-E11
gacacaccgtttgttctattcttaactcaacttctgctacccactctcttcttccaagtccaaccacgcttttctctacagtcatgggcaaggtcaagatcggaatcaacggatttggaagaattggccgtttggttgccagagtcgctctgcaaagagacgatgtggagctcgttgccgttaacgaccctttcattaccaccgattacatgacatacatgtttaaatacgacagtgttcacggacactggaagcatcacgatgtcaccgttaaggacgagaagacccttctcttcggtgacaagccagtcactgtttttggacacaggaaccctgaagagatccatgggggtcaactggagctgatatcattgttgagtcaccggagtttcaccgataaggacaaggccgccgc

SEQ ID NO: 16276 - DNA, 354 bp, Glycine max
  Clone ID: LIB3040-004-Q1-E1-E2
ggaagagtgaagagaatggctcccaagggtttaacctttctggctgtgttaatatgcgtttcagcactgtcactgagtccttctgttgcgggggaagggcaaaataatggccttgttatgaacttctacaaggaatcatgccctcaggctgaagacatcatcacagaacaagtcaagcttctctacaagcgccacaagaacactgctttctcctggctcaggaacatcttccatgactgtgctgttcagagttgtgatgcttcactgttgctggactccacaagaaggagcttgtctgagaaggaaacagatagaggctttgggttgagaaatttcaagtacattgagacaatc

SEQ ID NO: 16277 - DNA, 288 bp, Glycine max
  Clone ID: LIB3040-004-Q1-E1-E3
ggtcttgcaggcgaagagatggccaccgttccagggcagctcgtgtgggagatcgtcaagaaaaacaattccttcatggtcaagcagtttggaacgggcacccagagcgtcgaattcagcagagagagcaacaatctctacaacctcaattcgttcaagtactctggtttggtaaacaagaaaactgttactgttcagcctgagggcaaagatcaggctgtgttgttggctacaaccaagacaaagaagcagaacaagcccgctgcattgctccacacatctgtgatg

SEQ ID NO: 16278 - DNA, 367 bp, Glycine max
  Clone ID: LIB3040-004-Q1-E1-E5
gatacaaacatccatcatcattattattttactccgaacgagttgacaccgattccactcactcaaccatgagccgattcaggcgttttgagctcatagaacaaccacctttcttccactcctgctactctttcccttccttcgtcctccaagactcactctctctcgacctcgacctcttgccacttcccagccacttcgacgctttcgcagatctggtgcacgcgccgtcgttcgcttaccggcgcgtggagaggcatctcgagaatgagttgcgtttgcagagcctctctgaccgtgtggcggagctggagtcgcggttcgaccgtgtgctcggcggagatcggaagtacacgtggacagcgga

SEQ ID NO: 16279 - DNA, 342 bp, Glycine max
  Clone ID: LIB3040-004-Q1-E1-E6
ataatatcacaagagcatgtaaggtgatctctatcagaaaatgatttagcaataaaaaaatatcacatgggccaatgggacagcaggtatatcttacagcataattctaacttgtaggacaatgagttacactttcaacatttcatctaacacttatgtgttcaggtggatggcataagggtcaagagatggcaatgttggtggctggctgtagtttggtccatttggcagatgcaaaacagagttatcttctccaatgcacttttcaatggcaacaagttgctcgaggatgctatagtcttaatgtggacttggctaagaaacatggagaaagattttaca

SEQ ID NO: 16280 - DNA, 319 bp, Glycine max
  Clone ID: LIB3040-004-Q1-E1-E7
ttccgggtgcgccccacgcgtccgggcagccataagacgagagacggggacttcctcgattgaagtcttcctcaaaaccatctttcgtgatctccaccctctctctaattttcacacgcagcggcttcatcgtccgttttcatgactcggtgtgcatactggcgacgtctgctgtgatggaccccaccttgccagggttggaggagtcccaggaattgattgatcagatggagatcatcctgtcctcgagacaggtctgttagctcgagactgtttgtgcggacatggttcgtggtgcaaacgacatgcgcctcacggt

SEQ ID NO: 16281 - DNA, 364 bp, Glycine max
  Clone ID: LIB3040-004-Q1-E1-E8
gacaacttctctctctattcccacttctcttctgtgttccttagaagaattaagatggctaccttgactgtacccccagttcctccttcccccagagatgatgccatgcagctctaccgtgcttttaagggatttggatgtgatactagtgctgttatcaatattcttgctcatcgagatgctacacagcgtgcctacatccaacaagaatacagatcaatgtattctgaggaactttccaaacgcttagcttcagagcttagtggaaagttagagactgcagttctgctctggttgcatgaccctgcgggacgtgatgcaacaatcattaggaagtctctaacagccgacaacagaagcattg

SEQ ID NO: 16282 - DNA, 325 bp, Glycine max
  Clone ID: LIB3040-004-Q1-E1-E9
gacaatacaacttcagtttcaacaacaatctctcttttttccattctcatgcctcttgtcttcttgtaacacacccttttctcttttctctctaactcccctccaagaaattctgagagaatagaatagaaaagagggtgagtggttttttgagttttgatagaatagctgcatggggaagctggttgagattcttgaccaatgggtcaggattgctgcaaggtttcactctaattgcccccaaacaggccgtaagtactaccactctctatccctctccgagaagtacggccaccactaccatggtggtgccaatcaattcagc

SEQ ID NO: 16283 - DNA, 342 bp, Glycine max
  unsure (1)..(342): unsure at all n locations
  Clone ID: LIB3040-004-Q1-E1-F1
gagggtttttgtcgtcgctactaagagttgctgcttcttcagccactccgcacctcgcagcctctgtgccctcaacaaccatggctgaaatcgaaactaccgttccagatcccacccaaatcgacgtcaaactcttcaatcgctggagcttcgaggatgttgaggttaatgatatgtctctggctgattacattggagtgtccccatcaaagcatgctacatatgttcctcacactgctggtaggtactcagtgaagaggttcaggaaagcgcagtgccccattgttgagaggctcgacaactctctgatgatgcacgggaggaacantggaaagaagctca

SEQ ID NO: 16284 - DNA, 379 bp, Glycine max
  unsure (1)..(379): unsure at all n locations
  Clone ID: LIB3040-004-Q1-E1-F3
gggtcaaaactcaaaagctcacaaagcaagaacactgttccaatacggaatctaaggcanagcanaccanacatcttgaatcatgggttcaacacgtgagactcagattaccccaacccacgtatctgatgaagaagcaaaccttttcgccatgcaactagccagtgcttctgtccttccaatgatcctcaaatcagcacttgagcttgatctgttggaaatcatagccaaggctggccctggtgttcatctttcncccactgacatttcttctcagctcccaacacagaaccctgatgcacccgtgatgttggagcgtatattgcgcctattggcttgctacaatatcctctcttttttctctccgcaactctccctg

SEQ ID NO: 16285 - DNA, 295 bp, Glycine max
  Clone ID: LIB3040-004-Q1-E1-F5
ggagttgaaggggttagggtttaggaagggatggaagcggcagtggtggacgtcggctctaagctcctcaaagcgggctttgcaattcctgaccagactcctgccatggcccgcacttggagaggttttatctccttcaatgcataattctaagtttctaacccacttagctattctcaaataattcccactcagatgaagcaattactcgatgatggatccgtcgcagataattcactggctgacaatgtcaccgttgattccgttgtgcgaggatttattagagattgggatg

SEQ ID NO: 16286 - DNA, 57 bp, Glycine max; identical to SEQ ID NO: 14594
  Clone ID: LIB3040-004-Q1-E1-F6

SEQ ID NO: 16287 - DNA, 336 bp, Glycine max
  Clone ID: LIB3040-004-Q1-E1-F7
aaagagacccggaaagggtgggaaccgcttttggaaatccattgggcttggatttaagactcccagggaagccatcgaaggaacctacattgacaagaagtgccccttcactggcaatgtttccatccgtggccgtatcttggctggaacatgtcacagtgctaagatgaacaggactattattgttaggaggaattatctccattttatcaagaagtaccagaggtacgagaaaaggcactccaacattcctgctcatatatcacctgctttccgtgtgaaggaaggagatcacgttattattggtcaatgcaggccactttctaagactgtgag

SEQ ID NO: 16288 - DNA, 410 bp, Glycine max
  Clone ID: LIB3040-004-Q1-E1-F9
ggttcaaagcacgccgtgtttcgctgtcactcccatcctttcgcattctcaatacccttttgatttgtgaaaggaaagcaaacatggttgatcaggtccaacaccctacaatcatggacaaagttgctggtcagctccatctccgttctggtctttcatctggtattagaagttatgatggagcctaccgccagccagctatgtaccaaagaccctcttttgggaattactcgaatgctgcaattgaattttcctgtgatgcccacatgcaaagctaccatggatgtgtctgcaactgcaacatctgcctcacccgtctttgatgctgctccatcagaaaaacgccattttcatttagactttctcatgggacgtgtttcaacaactgtctccagaactgctgctgctcc

SEQ ID NO: 16289 - DNA, 283 bp, Glycine max
  Clone ID: LIB3040-004-Q1-E1-G1
acgaatcgaaaatgccgtcgcacaagacattcagaatcaagaagaagttggcgaagaagatgaggcagaacaggcccattccctactggatccgcatgaggaccgataacaccatcaggtacaacgcgaagcgccgtcactggcgtcgcaccaagcttggattctgaggtgtatgctctgcctaggttcaatttatccaattaattagtgttttattttcttgaggcaaaaacaatgttttgagtttttaatattttccatttgttcgaagactatattgtgt

SEQ ID NO: 16290 - DNA, 372 bp, Glycine max
  unsure (1)..(372): unsure at all n locations
  Clone ID: LIB3040-004-Q1-E1-G11
agtcgagaatgatgggagattctagttacaagaacacccttgattgttttatcaaaacattgaagaatgatggacccttagccttttataaagggttcctcccaaattttggacggctgggatcttggaatgtgatcatgtttctaaccttagaacagactaaaaagttcgtcaaaagtttagagtcgtcctgaggcgagttcccgttgagaattttctaaggggactggttgcaactgcaaatgtagtggaaattgtagaaaataaaggtcnctttctcttcattctgctaaccaggatgtggtcaaacatttttttacggaagaaaaatttgatagtaaaatgagaatgctattcatatatactagcttt

SEQ ID NO: 16291 - DNA, 417 bp, Glycine max
  Clone ID: LIB3040-004-Q1-E1-G12
gatacctaaaaattgtaccgatatggcttcacttgtgtgtctccttttttccttgcatttcatggttatcatgtcaggttccttaccagcaaatagtgaagtgtttacaaaagagtctcctatgtctctatccacaaaacccgtggaaagactcacccaactccacttttatttccataacaacaaaatgggggaacacccgactgctatgaaaattgttgagcctcctaaggcgtccatttctggttttgggactatttacatgatggatgaccctctaaccgaaggaccaagtccaacttcaaagcttgttggaagatgtcagggaatatatgctgaggcttcgcaacatgaacctgcgatactcatggtaacgaatttgttcttcactgagggcatttacaatggcagcaccct

SEQ ID NO: 16292 - DNA, 385 bp, Glycine max
  unsure (1)..(385): unsure at all n locations
  Clone ID: LIB3040-004-Q1-E1-G2
gggttagagaaacaagacataatccttttcttcttccattcncttctcctttcaatctctagaattaacaccatgtcactgacacttttcctgaagacccttttcctcttcttcccttgctacctgtgcctccttgactcagcaacaacaacaacaacccttaagcccattttgctaaccccatccaagcctgcaacgacaatccctgcattcccagaacaatctgatgtctcagggtgccctctcaccctctcagatgagctctttgatgggattaagagtgcatgtagtggtgccaaaagtggtgctgacatggagctccaccacagcacgtgctggtcagtgcttgcagcatggttgtaatctgcatattctgccactgcac

SEQ ID NO: 16293 - DNA, 301 bp, Glycine max
  Clone ID: LIB3040-004-Q1-E1-G3
tgtaagtaaattcccctaacgttcataacctaatttgactagtcgttactaaataaaattgtttgtaaattaggttgttttctatcatactcgaaccgagttgttttgaatttgtagagtggttggaaaatgataaaaataaaaaaggaagggaaaaaaaatcacagtttggatttttcaacttacatttttaatcaatattaacacattaacatttatcaataaaaaaattctccatatcctaattttttcaagtgggttttttttaatgataacccaacttatcattgacgcatttttg

SEQ ID NO: 16294 - DNA, 280 bp, Glycine max
  Clone ID: LIB3040-004-Q1-E1-G4
tgacagtagagtaccctgacattctagctcgatatgtccaacaccatcctgtctgacgatgagtagcatttcgattcgattgccagaatccggcgcctcgaattgttatgctcatctagcctgtatgagtcgctagaacggttacatcggcatggaaggacgctcatgctttgttgttgtacatctctactttttaatctggaattcacggtcacgcctttgtgccattttgttggtctctcgaaaccttcactttttcagaatgcgtatgtatttagtg

SEQ ID NO: 16295 - DNA, 254 bp, Glycine max
  Clone ID: LIB3040-004-Q1-E1-G6
gtcatagatgatatcagaactattcaagctaccgaggaatggacaagattgatacattagctatgaatatgtttgctaactatcaagttaggagaaactttgcttagggatagttcttttttaaatgtaatttgctattgctgacaaactttgtgtgctttgttactattgtacttttctattgaagatggacttttatgtactttgctattgcataaaaactttgcttgaaataaaacacaaactggcataat

SEQ ID NO: 16296 - DNA, 318 bp, Glycine max
  Clone ID: LIB3040-004-Q1-E1-G8
gtggggaaggttaaggacccgtatggcttcgtttggctcttctgcactccagggaagaagtgtgctgacgtggaggcttaatggcctttgatgttgttctgagtctaattgtttggattatcagttttagttgtagaattgattagggaaaggtcgtacgtgtctagttaagacatttctcttcttcagtctttcagtcttttatatctaagtgggattagtattaatctaatggttacgcgtgtatttctattttgaatattttgaagtgcttctcgtttgtcattagactcattgtgaatgacattagttgttggc

SEQ ID NO: 16297 - DNA, 390 bp, Glycine max
  Clone ID: LIB3040-004-Q1-E1-G9
gtgaaaggcattcaatttttgcacacagggatagtgcctggactatattcaaataatctgaagataacagatattcttttggataacaatcacaatgttaaaataagcagttataatctaccactctctgctgaaaataaaagaatgatcagcaagggaacctcccctggattaaaaggaaaagtccaagcaaggatccaggatgcagacaagaatgatgtctatgatattggagtagtcttgctagaaaccattctgggaagaccaataatgttccacaatgaagttggaacactaaaagatcttttacaggtaagcatcaaaaccgatgacatagctagaaggagcattgttgacccagcagttcataaggaatgttcagatgagtca

SEQ ID NO: 16298 - DNA, 300 bp, Glycine max
  Clone ID: LIB3040-004-Q1-E1-H1
gatcacatttaaaatcaaaacaacaaattttcagactcaacaagcttcgaaccaaatcttattgagaaaatgtctggtcgtggaaagggtggaaagggtttgggaaagggaagtgccaagaggcacaggaaggttcttcgtgacaacatccagggcatcacgaaacctgcgattcgtaggttagcgagaagaggtggcgtgaagaggatcagtggtttgatctacgaggaaaccagaggagttctgaagatattcttggagaacgtgattcgcgatgctgtgacctacactgagcacgct

SEQ ID NO: 16299 - DNA, 418 bp, Glycine max
  Clone ID: LIB3040-004-Q1-E1-H10
tcttactcatcacatgaacccctaaatcctaattgctttgttttcccccaattcccaatggcgaacgactcgtcgtttttgttcgccggcattcgtttcgatagaaagaagttcggcgccgatattgccaggttccagaaaaaagacagtgatactgattcggcgatgattttgagcgccgccgaagacgaaggcgagaaaacaatagaacctctggaagaagagaaagtcgcggcgtcaacgacgaagaagaggaagcgcaagggaacctcttccgaaacggtcgaaggattcaatgtgttcagaagttcgacgtctgtggcgcagtcgaatgatgaagtccgagtcattgaggagtccgttgagctgtataataataataagaaggaacaaaataagcaactcgagcgggacgcaa

SEQ ID NO: 16300 - DNA, 312 bp, Glycine max
  Clone ID: LIB3040-004-Q1-E1-H11
gaagttaatttgcgtctagagtcaatttggaatctaggatgaatctcaacggacagagaagagccataaccatgtctggaatatgaaagggacgcaggggtctcggatcgggaggagcgaagcgagaccgtacggttctgagggataacagtcaaggtacaacgaagcccgcaattcgccgtctcgcgagacgtgacagcttgaagcgtatcactggtcacagctaccatcaaacacgaagtgttctcaatatcttccatgataatgtcattcgctgagctgtcagctagactgaacacgctcgacgctcga

SEQ ID NO: 16301 - DNA, 408 bp, Glycine max
  unsure (1)..(408): unsure at all n locations
  Clone ID: LIB3040-004-Q1-E1-H12
gagcctcagcagaagcagaacgaggagaagcagaaggagcaaaagcaatggcgccgaagaagccgagaaccacgacaaggaaccctgatttggttagggggattggcaagtattcgaggtcgcagatgtaccacaagaggggcatctgggccatcaaggccaaaaacggtggcgttttgccccgccacgatcccaagcccaagcccgaggccccggcccagaagccgcccaagttctaccccgcggacgatgttaagaagcccctcgtcaacaagcacaagcccaaacccgcgaaactcagggctagcattactccagggactgtgttgatcctgcttgctgggaagttcaagggaaaganggttgttttcctgaagcagctcccatctggattgcttcttgtaactg

SEQ ID NO: 16302 - DNA, 351 bp, Glycine max
  Clone ID: LIB3040-004-Q1-E1-H2
ggtttcagagtggtggggtgtgcagaagagcgtcgcagttgtaaccctaatcagaagaagcgcagcttcaagcgagtgacagccaccagccatgggtcgtatgcacagccgcggtaagggtatatcctcttctgctttgccctacaaaaggacacctcctagctggctcaagatctcttcgcaagatgtcgaagaaaatatctgcaagtttgcgaagaaaggtttgaccccgtctcagattggtgtcattctcagagattctcacggtattgctcaggtcaatagcgtcactggcagcaaaatccttcgcatcctcgaagctcacggacttgcgcctgaaattccagagga

SEQ ID NO: 16303 - DNA, 292 bp, Glycine max
  unsure (1)..(292): unsure at all n locations
  Clone ID: LIB3040-004-Q1-E1-H4
ggatccgtgctctgtgattccagaccttaatttttctctcattcgcttcaaatttcnggaaatcaattatggctcaaccctcaacaagaataggccttgctggactggctgttatgggccaaaatctagcactcaatattgctgagaaaggctttcccatttctgtttataaccgaaccacttccaaggttgatgagactgtagaacgagcaaaacaagaaggaaatcttccagtttatggctaccatgaccccgaagcttttgttcattccattcaaaaacctaaggtgat

SEQ ID NO: 16304 - DNA, 289 bp, Glycine max
  Clone ID: LIB3040-004-Q1-E1-H5
gattcattcataaatcttagttactttatcagtatcattcattatcactacgattgttctaaaagcaattattactcttgagaagaattaaaagatcatcatcacaataacaagatgagttcaggaattagagcatggagtgtggcagctagtgttggagttgtggaggccttgaaagaccaaggcatatgcaggtggaatcatgctttaagatcagctcaacaccatctcaaaaaccatgttggctcattctctcaggctaacaagctttcttcttctgctatgatct

SEQ ID NO: 16305 - DNA, 360 bp, Glycine max
  Clone ID: LIB3040-004-Q1-E1-H6
gatatcagaagcgcagacctaggatttcggccgtttgctccccacggaaagaagcagagtgtttcttttgaaatcagctagaaaagatgtcaggtgaagaggtagctgttgcagctgatgcacctgctgcttcaattccaggtgagccaatggacatcatgactgctcgacagcttgtgctgagaaaatctctggcctatggtggtcttgcacgaggtcatcatgaacgtgctaaggtgatcgagaagcatgctgcagagctctgcgttccatcagcagattgtgaccaaactgattatggtgaactggttgaagctcattgtgcagagtcacaatgttagtcttatgacagttccaagt

SEQ ID NO: 16306 - DNA, 358 bp, Glycine max
  Clone ID: LIB3040-004-Q1-E1-H7
gagcgaaacagagagtgatttcagtgagtgatcggtgttcacttgatctcatcataatcgtcagcgtcaattgaagaagatgccgatcagaaacatcgccgtcggaaggcctgaagaggcgactcaccccgacacgttgaaggcggctttggctgagttcatctcaaccttcatcttcgtgttcgccggctcaggctccggcatcgcctacaacaagctcaccgacaacggcgctgccacccctgccggcctcatctccgcctccatcgcccatgcattcgccctcttcgtcgccgtctccgtcggcgccaacatctccggcggccacgtcaaccccgccgtcaccttcggcgccttc

SEQ ID NO: 16307 - DNA, 417 bp, Glycine max
  Clone ID: LIB3040-004-Q1-E1-H9
ggttttcattgggtgctgatcggaacaaacagggaatagaagagaggagaagatgggtttcataatggaatttgcggagaacttggtattaaagttgatggaagatccgaaggaaagggatcggaggttcagggagcacgtttatagagtgaaggacaggtgcgagaagacgaaggagatgtggagctaccctatgcgaccctatgggttttggacattcgaacgccacaattctcagcttgcttgggatgcacagattagccaagtggccgggaggagggacccttatgatgatctcctccaacatttctctaccccacctaagtgagtgttgctgaacttgccacaagcattatcggtgaaaaggatgaatttgtcgtaatttccccttgtaatatcctgtcctgttgcatgttg

SEQ ID NO: 16308 - DNA, 213 bp, Glycine max
  Clone ID: LIB3040-005-Q1-E1-A1
gaagtctcatctaatctataccccgtctaaatctccgagtggttgacaccgatcgaagtagcagcacacagaaaatgggcactcgagaggtgtacgaagaaaaactaaaggacgggaatccccaacacgattccaacatcaaccctgggctccggtccgctccaagccctcgctgtctcctctcccttcaaccctaatttcaaaaaaggcaat

SEQ ID NO: 16309 - DNA, 64 bp, Glycine max
  Clone ID: LIB3040-005-Q1-E1-A10
cactctaggtgcaaaaaaagggctcttaataattattcaaatgggtgttccttaatcatccaca

SEQ ID NO: 16310 - DNA, 159 bp, Glycine max
  Clone ID: LIB3040-005-Q1-E1-A11
ggatgcgtctacactaactaaagccgagcagcgagagagagaaatcctagcaaaaatgccggccggccagggttcgagatcgcgcaccaaagattccctctctcgtcgcttcaggaagaatggtaccgaacgcctcatcacaggactcagaagctacca

SEQ ID NO: 16311 - DNA, 383 bp, Glycine max
  Clone ID: LIB3040-005-Q1-E1-A12
ctctataatgagtcataatacaacagaagggcgtcaaacaaattgatgataatctttaaaggtacacatatttagaagtcatgataaattctagaccgaattggtttggaatgttgtaggatgccttgaatagactgagcataatcccaaacggtacacaacacttgaaagtcatgagagccccttactggatttgaactatattgaatgtgcaagtggttgacgtggacatatggcttttactcatccccattttcattcgtcattttcttctatttctaggtatgatgctttggcttaacacatttggattttagagggtgtggttgcaacttgagataagatctccatgaatattgatggggttaattggtcataatact

SEQ ID NO: 16312 - DNA, 283 bp, Glycine max
  Clone ID: LIB3040-005-Q1-E1-A3
caatactgatacttatttaattcaatgaaacaagcatcaatcacacaataacacaccaatcaaacacaatcaaaatcttagaatcaaatacaatcaatcaatcattaaccacaaatatttcaatcaaccaatcaatccttatttatccaaatcactaatatataacaggcctaattctcttctaatggaaaagaatgtttctttggggataggttttgtgaagatatcagcaagctgattctttgcatcaacaaattctagcacacaatctcccttttaaaca

SEQ ID NO: 16313 - DNA, 402 bp, Glycine max
  Clone ID: LIB3040-005-Q1-E1-A6
ggtcctaaatcctcattccagccacacgcttcagaagacatggcctcattgggtgggttacaaaatgtgagcggcatcaattttcttatcaaagagggtccaaaagtcaatgcaaagttcgagctgaagccgccaccatatccactgaatggtttggagccggtgatgagccagcagacacttgagtttcactgggggaagcaccacaagacttatgtggaaaatctgaaaaaacaagttgttgggacagagcttgatgggaagtcactagaatagattattgtcacatcatacaataagggtgacattcttccagctttcaacaatgcagcacacgttatggaacatgacttcttctgggagtgcatgaaaccaggtggaggtggaaagcatccggggagc

SEQ ID NO: 16314 - DNA, 226 bp, Glycine max
  Clone ID: LIB3040-005-Q1-E1-A7
aggggaaaacagaacatggactcactctggcacctgaactcacagtggctaaaatcgttctgtggtgaattgtcaagatgttcacatcaatgaagaaaatccacaaagagtcagatgctgatccaacttaatttgacgaatcagtcagacaggcattgtttgatctgtgaaataccaacagtgacctgaaaactgatctgagagatttatacataaactcatctgt

SEQ ID NO: 16315 - DNA, 176 bp, Glycine max
  Clone ID: LIB3040-005-Q1-E1-A9
ggcacttcaattgcaatcaaattagttcattcgctttgcgcagttccctacctctcctttcaagatgcagatcttcgtcaagaccctcaccggaaagaccatcacccttgaggtggaaagctctgacaccatcgacaacgtcaaggccgagatccatgacaatgaaggaagtcccc

SEQ ID NO: 16316 - DNA, 400 bp, Glycine max
  Clone ID: LIB3040-005-Q1-E1-B10
gattgcatcgtaggagtctcttattttcctttgtaatggaaagttagaaaccctcatcgtcaaagcacgcgtttttttgaatctctctctctcaacaaatatttgtgggtagattcaattcaccatgtcgagctcatcggagtactctgaattttccggccagaaaccggcgaggtcgccggagaaatcgagcttctctcagacttgcagtctgttgagtcaatacatcaaggagaagggtagcttcggagatcttaccctcggaatgacatcatgtgggtcacctgagacatcttgtcaatctgctacaagcatgaacttgtttcctcccaaggaaaacaacgtggcagcaaagaacctgacagctatggatttgctctctccacaagcttcctcctat

SEQ ID NO: 16317 - DNA, 357 bp, Glycine max
  unsure (1)..(357): unsure at all n locations
  Clone ID: LIB3040-005-Q1-E1-B12
gatcgcatttcatagcactcaccctcattaccaacacgaaagcatagccaaaaccttttttcgaagtctctgattttcctaatggctccggcaaaggcagagaagaagccggcggagaagaagccagcggcggagaaggcaccggcggagaagaagccgaaggcggagaagaagatctcgaaggaaggatggagcgagaagaagaagaagcgcacgaagaagagcgtggagacctacaagatctacatcttcaaggtcctcaagcaggttcaccccgacattggtatttccagcaaggccatgggcatcatgaacagcttcatcaacgacatcttcgagaagctcgnccaggaagcg

SEQ ID NO: 16318 - DNA, 362 bp, Glycine max
  unsure (1)..(362): unsure at all n locations
  Clone ID: LIB3040-005-Q1-E1-B3
gacgccaaaaccactgtatcagtgtgtccttccattccaggtttttccaccacactagaaagtaactttaaggttactatgatcgtttttcaacatgattcatcacattttcaagcacacactgcattaagaagcgagaaatcataactcatacatatatatggtcacttataaataattcttatagcaaaacggatggcatggaaagcgtanggaagaatgtgcctgtaattgtctttgtctaagtagagtctgtaattgtctttttgagaaaacaacagctaaagtaattacatagagccatatttcatctataaaatagcctgaaatctcatctgccactagttcttgaagaccacact

SEQ ID NO: 16319 - DNA, 331 bp, Glycine max
  Clone ID: LIB3040-005-Q1-E1-B5
ggcctttgaggaaaagaaaggcagatatgcaagaatcatgcttgggaatgattggtgaggtctccggcgatcagcaccgtcagctgatagcggagatagcgactcatccgctgttcgagcatcttctggcagcacacgtggcatgcctccgtgtggcgactcccatccatcagcttccactcattgatgctcaattatctcagtctcaccatcttctacgctcttacgtctcacacaacactctttctctctctcctcatcaccgccaagaacttgacagcttcctggcacaatatttgataattttgtgtacatttaaagaacagcttca

SEQ ID NO: 16320 - DNA, 387 bp, Glycine max
  Clone ID: LIB3040-005-Q1-E1-B8
gaacatgccgaaaagtagtaccaagatggcttcagttgtgtatctcctctttggcttccatctcattgttatcatgtcaagttccttacccgcaactagtgaagtgtttgcaaaacagtatccatccacagaacccgtggaagaaaaactcacccaactccacttctatttccataacaacataacgggggaacacccaactgctatgaaaactgttttgcctcctaaggggtccattcatggttttggggctacttacatgatggatgaccctctaactgaaggaccaagtccaacttcaaagcttgtgggaagatctcatggaatatacgctttggcttcacaacatgagcctgagttgctcatggtgacaaattttctcttcac

SEQ ID NO: 16321 - DNA, 126 bp, Glycine max
  Clone ID: LIB3040-005-Q1-E1-C1
tatttacatgataatgtcaccatatacacaaatggttttgtaactgatactaagaggaaaagtaaaaaacaaaaagtctggacattataattaaacaccttttttcacaaagttcttttttaactg

SEQ ID NO: 16322 - DNA, 396 bp, Glycine max
  unsure (1)..(396): unsure at all n locations
  Clone ID: LIB3040-005-Q1-E1-C10
gactcaccacttcaaagcactcataacacatagcacaaagcaaagctcatccttgagttatggaatggcagcagcttcttccatggatctcgcatccccatccttggctggcaaggacgtgtagctgggcccagcagccccagaagtgggaaaggtgagcatgaggaagaccgtcaccaagcaggtctcctcatgaagctcatggtacggcccagaccgagtcaagtacttgggctcattctctggcgagcctgcgtcctatctaaccggtgagttcgcacgcgactacagctgggatactgctgggctttccgcagatccagagaccatcgccaagaatcgtgaactctatgtgatcactctangtgggccatgctcggaaccttgggctgcgtc

SEQ ID NO: 16323 - DNA, 222 bp, Glycine max
  Clone ID: LIB3040-005-Q1-E1-C12
ggtagcaagtaagtctaaacacgaagctcgcaaattccctcaacactggagtcgctggaatattcattctgggactcatcttaactgactcagcatgattcaaaatggttgcattgtatcccaaaggtgtgcccctctgaattctaagttacacaatcatggcatagctaatacctttgcctttcgttgcccctcacaaatgcctctcaaagtttccctctc

SEQ ID NO: 16324 - DNA, 228 bp, Glycine max
  Clone ID: LIB3040-005-Q1-E1-C2
ctagggtgcagcttcgagaacacgacatctggggactcatctcttacacctattctctcttcatcctgttctatctgtgacgagcatcatggcctcaagagcagtgttactgttggccaagtgtatgcatcctgacatgggtgtggacattccctcatcactcatcccttttttccttaaaggtcttgtacagggtgacgcttgacatgctcgtttttggaactcacc

SEQ ID NO: 16325 - DNA, 263 bp, Glycine max
  Clone ID: LIB3040-005-Q1-E1-C3
ggagctttagattcttttcccctagattcagccacagttggaaaaaaaaaaaaagttgttcgagatggcacgtacgaagcaaactgctcgtaagtccacaggaggaaaggcacctaggaagcagctcgcaaccaaggctgcacgtaagtctgcaccaactactggtggtgtgaagaagccacatcgttatcgtcctggtaccgttgctcttcgtgagattaggaaataccagaagagtaccgagcttttgatcaggaagctcc

SEQ ID NO: 16326 - DNA, 267 bp, Glycine max
  Clone ID: LIB3040-005-Q1-E1-C4
tgggagcaacatggtgaagctggtggagagatttacttgccaaaagcttacgttagacccaggaggcctacttaagtggccaatccattgggaaaacctggtgccaacttcccaactgggttaaccgagtgtggagaagcattatcaagccctatgagtatgagaaccagtactgtttgtgaagaatgtctatgggttaagaaatctgtctttagtcaacttgtgtgttttgttattcagttctcagcaataaactgctctggcaat

SEQ ID NO: 16327 - DNA, 369 bp, Glycine max
  Clone ID: LIB3040-005-Q1-E1-C5
ggagagagagagttggaagaagaagaagggaagatgaacttgagatggatggaagcggtgctgccgctgggaatcatagcgggaatgctctgcgtcatgggaaacgctcagtattacattcacaaatccgcgcatggcagaccgaagcacatcgggaacgatatgtgggacgtggccatggaacgaatggacaagaagcttgtcgagcaagcctcgccctccaattaacatcgttgttttgccaatgacattgttaagaaaataaactgctcacctggatttacgactgtgttctagggaagcacggttaatcacaggaatcaaattccgtctgttttcttgtatgcaattcaacattagattttataa

SEQ ID NO: 16328 - DNA, 152 bp, Glycine max
  Clone ID: LIB3040-005-Q1-E1-C8
acgcgtcagaacacgactcaacggtaacgtcgctacagcagcaaaaaaagggaattctggtaaggctgctatacaatcaccgtcgggatactgatgaggttattaacacagcgtaatttttctttacagtacatcgctaatgacatagttat

SEQ ID NO: 16329 - DNA, 392 bp, Glycine max
  Clone ID: LIB3040-005-Q1-E1-D10
ggcgtttttcacttctttttttttttcattttgttttgctaccctaatagacacgaggactatttaaaaacccggaccgtcgtatcgttccaccggcgccgtcaacctccaaggctcgaaccaccatccttccactcaaccgcgcacttgcactcgtcggctcaagctaccaccgcagcacgcctcagccgccgccagttaacaagcatttgctcataaagaatgaaggaagatggtgtttgggcaagtactggttggtcctcctggctctggaaaaacaacttactgcaatggcatgtctcagtttcgcagtcttattggaaggaaggttgctgttatcaatttggatcccgctaatgattcgttaccctaggaatgttctgtgaacatca

SEQ ID NO: 16330 - DNA, 110 bp, Glycine max
  Clone ID: LIB3040-005-Q1-E1-D12
aggtgagctgaaagtgttactgaattttctagacatctggaaaaagttagaaaaaaagaaacaagtgatttggataagagtaaaacataagaaaaatcacacaagttgac

SEQ ID NO: 16331 - DNA, 355 bp, Glycine max
  Clone ID: LIB3040-005-Q1-E1-D3
gacttcacaactcaaactgcttcattgcataattgcagataagatcaacccttctaccttcagattcgcgggaagatggcatcacttcatgctaatgtgacatcagttgtttacaacagtggcaaccgtgtttctcaatcgaaatttgcaagctcttccttcttgtctgggttcgatgttgttggtcgtgcttcaagtgcttggaagaatgaacttgtcccatcttccatttccttggtgcctagagccaccctaacatttgatcccccaactaccaattcagacataaccaagcaaaagaagcacactcttgaccctgcttctccagattttcttcctcttccttcatttgaac

SEQ ID NO: 16332 - DNA, 166 bp, Glycine max
  Clone ID: LIB3040-005-Q1-E1-D4
cgctcttaacgtgagatcgtgtgaagtttaagctaccttaagcaaaaggagaaagacacaccgaaacttagaactctctcttgaatacacccaaagcctgatataccaaactcttgtaatgtaactcttccttactatttatttaatgcaatttcagttctaaaaa

SEQ ID NO: 16333 - DNA, 317 bp, Glycine max
  Clone ID: LIB3040-005-Q1-E1-D6
tctcattgtattgattgatatgcaaaagattcaaatcttacattaagcttaagggttgtttgggtaagcttcattagaagtatttctaattgatagagcctattctagagccgatacgtaattaacaactagcaagcattcctaatgagcatactaaccgactaatacaaccatcataactagtcgtatcgatcactatttattgttaaaattaacacacttatcggatgagaatgtacaactatttagaataatttatttagaacaggtcgataagcacagaatgtatcctctatctggtggcagacattaccata

SEQ ID NO: 16334 - DNA, 296 bp, Glycine max
  Clone ID: LIB3040-005-Q1-E1-D7
ggatatacattctcttgtcacagttttctgtgtcaccggaactcgtttctttcaaaacacttcaaacatctcgaacgctctctttccggcaactaggttaaagttcatcaatggcaggtcgcggcaaaaccctaggatctagcgccgccaagaaggctacctcaaggagcagcaaagccggcctccaattccccgtcggccgtatcgcccgtttcctcaaggccggaaaatacgctgagcgtgtcggcgccggcgcccctgtctacctcgccgccgtactccaatatctcgcggct

SEQ ID NO: 16335 - DNA, 270 bp, Glycine max
  Clone ID: LIB3040-005-Q1-E1-D9
gacattcatacgtgccatgcgtgtcccttccaattgcccacattttcacgctcgcgaatcactcctctctctccaccaatggccgagcagctcacggatgacgagatcgccgagttcaaggcggacatcagcctcatcgaaaatgactgcgatggctgctatattactattgcacctgggactgtgatggggtcaccacggcaaaatccagctgatcgcagagatgcatgatattattaatgacgttgatgctgatggcaatggaagcat

SEQ ID NO: 16336 - DNA, 215 bp, Glycine max
  Clone ID: LIB3040-005-Q1-E1-E1
ggtgctctgctcgtgcctctagggttatcatttctccatttccattttctctctcacttttcaagaatcgtaagctatgggaaagtcttacccaactgtgagtgctgattacaagaaggccgttgaaaaggcgaagaagaacctcaaaggcttcatcgctgaaaaaaaatgcgctcctcaaaggctccgtttggaatggaattcggctggaacct

SEQ ID NO: 16337 - DNA, 360 bp, Glycine max
  Clone ID: LIB3040-005-Q1-E1-E11
gagaataaggttaaataaattctcgtagcagcgttttgtttcccatcgcccccttttgctctccctctgtgcagacatgttgttcttctcgtacttcaaggatttggtggggagggaagtaatcgtggagctgaagaacgatttggccatcaaaggaacattgcattctgttgatcagtacctcaacatcaagctcgaaaacactagcgtcgtcaatcaagaaaagtaccctcacatgctttctgtaagaaactgcttcatcagaggttcggtagtgagatatgtgcaattgcctccagaaggggtggacattgaattattgcacgatgccacaagaagagaagcccggggcggttagtg

SEQ ID NO: 16338 - DNA, 404 bp, Glycine max
  Clone ID: LIB3040-005-Q1-E1-E12
gaatccaacataacagaactactaccatgttgctgtcacaagccaaactgcacatcagcaacaacatctccaatgccattaacatgattatgaagaagaagggtaataacaataacaacaatcattgttcacctgctatactttatcactacccttgccctgatggtgcttttgctgcccttgctgcacacctttactttaaggccacttcatcattctctcctcttttctttcccaacactgtcttcaaccccctcagtgctgaagatcttcctctgaatgaaattggtgatctttatctcttagattttgtggggcccgatggttttgttcaggaaatctccaccaaagttccaagggtgattgttttggaccatcacaaaactgctcttgagaggctaggc

SEQ ID NO: 16339 - DNA, 318 bp, Glycine max
  unsure (1)..(318): unsure at all n locations
  Clone ID: LIB3040-005-Q1-E1-E2
gactcagctttatccataaagcacaatttttttgcttcaacgggccttaccttacctgaagatggcttcggtgtcctttgccgtgggattattaccttgctcttcttcttcttgctatacccgcgtctcttatggttcagttcgatttcccgtattgaacaacgccaactcactgaaactcagctcctcagctaacatctccagtccaattcttcaccaaaagctttgcactgttccttctccccttgctctaanggctcgccctctcaccattgtatccgctaagggctacaaaatgaaaaaccacaaagcatctgc

SEQ ID NO: 16340 - DNA, 348 bp, Glycine max
  Clone ID: LIB3040-005-Q1-E1-E4
aggggcagctgcgaaaacctagtggcacgtaagggttgttaaacaagcagagaagaaccatggtgcacgtttccttctaacgaaactatgggaaaacgttcaagaagcctcgtcgtccctacgagaaggaacgtttggacgccgagttgaagctggtccgtgagtacaggcttcgctgcaagagggagttatggagggtccagtacgccctgagccgcatccgtaacaacgccagaaacctattgacccttgatgagaagaaacctcgccgtatcttcgagggtgaagcccttctccgaagaatgttccgttacggactcctcgacgagacacagaacaagctggaat

SEQ ID NO: 16341 - DNA, 321 bp, Glycine max
  Clone ID: LIB3040-005-Q1-E1-E5
ggtggcaagaagttcataactctcttggacttgaagcgtccatttaaaccaatgaaggatttggacatggacaaggtcatctcggacatcattgaggaaatatcaaagactagttgatttcagctgttttgcaagagcctttttatggcttgacttacagtgaagctagatatattttgttcacatggtagaaatcctacaatggaaacttgttcaaaatgtgttatagccatgtatgggagttttagtttgaggtgagacatcattttggatatgttccttgtctcggacaagtaccaattttaatttgcattttgagat

SEQ ID NO: 16342 - DNA, 429 bp, Glycine max
  Clone ID: LIB3040-005-Q1-E1-E6
gacgcctcagttccattttcaattttaaattcctcccaaaacctaaccccaaacctaaacctccccgttaccaaagaaaaacccccttggccgattaacgtcgtcaagatgttggaactccgtctcgtgcaaggctccctcctgaagaaggttttggaatccgtcaaggagctcgtgaacgacgcgaacttcgactgctcctccaccgggttctccctccaggccatggactccagccacgtcgccctcgtcgctctcctcctccgatccgagggcttcgagcactaccgctgcgaccgcaacatctccatgggcatgaacctcaacaacatggccaagatgcttaagtgtgctggtaatgacgacatcatcaccaatcaagccgacgactgcagcgacactgtcactttcatgtccgaaagccctaca

SEQ ID NO: 16343 - DNA, 347 bp, Glycine max
  Clone ID: LIB3040-005-Q1-E1-E7
gatcatcaataggtgttttcatttgggattcaaactcaccatggtggacgccttcaaactttgcatcttccttcttgcgtcgatctgtgctttcctagtcttttctaatccagtggtgtgtagtgataaggaggacagtgtattcaagggaatcaacagctacaggcaaacacggagcctgatacccctgagccaagtttcgaaggcaacatgtttggctgatgaagttgcagaagaaatagagaagatgccctgtgaaaacgtgaaccaatactacccttcatctgttcctggtagtgggaacctcaaaatcccaaacttgcagaagcacataaatgaatgtgaca

SEQ ID NO: 16344 - DNA, 417 bp, Glycine max
  Clone ID: LIB3040-005-Q1-E1-E9
gatgccgaaaggtattaccaagatggcttcagttgtgtatctcctctttggcttccatctcattgttatcatgtcaagttccttatccgcagctagtgaagtgtttgcaaaacagtaatcatccacagaacccgtggaagaaaaactcaccgaactccacttctatttccataacagcatatcgggggaacacccaactgctatgaaaactgttttgcctcctaaggggtccattcatggttttggggctacttacatgatggatgaccctctaactgaaggaccaagtccaacttcaaagcttgtgggaagatctcatggaatatacgctttggcttcacaacatgagcctgggttgctcatggtgacaaattttctcctcactttgggcatttacaatggcagcaccctcagcat

SEQ ID NO: 16345 - DNA, 351 bp, Glycine max
  Clone ID: LIB3040-005-Q1-E1-F1
tatgtgatgatgttttgtaaaaaaaaaaaaaaacaaaaaaatcaaaaaaaaaaacagaaataaaaaaaaaaaaaaaacaaaaaaaaaaaaaaaaaaaaaaaaaaacaaaaaaaaaaaaactttaaaaaaaaaaaaaaaaaaaaaaaaaaaaaagggggccccccaaggggtccaacctttctttcccggggatgcgacttcaaaacccctccaaaggggcccccaatttcaattcccggggcgtccttttaaaacctcttgacggggaaaacccgggggtttccccatttaaccccctttgaaaaaaacccccttttcccaagggggggttatacccaaggggcccccccc

SEQ ID NO: 16346 - DNA, 391 bp, Glycine max
  Clone ID: LIB3040-005-Q1-E1-F10
gatacacaacacacatacaattactattaaactctctataatatttgctgaatccggtataattttctaataatggcgacagacgttcagcacgtcatagtttacagttaacattccacgaacgacaattataaccctccgctggcaccgttgatggagccatatgatctcagtaagtggtccatgtacagaaccgccatatctcactttatagcattactcccttctctttatatcaccgatgttgaccattagtggggataagagacattatgacactaaggtcttgtgtaatacagaatatgacggcgttggaatttagtgcatcatcttggaccttcagtcatatgatcgtcatccttgtttactggactgcctgaatcacgggatg

SEQ ID NO: 16347 - DNA, 328 bp, Glycine max
  Clone ID: LIB3040-005-Q1-E1-F11
cgggaaccaagtttgcttgcgtgtatattcattttaccatcaccgttgaatctcacaaataaaggcgcatcgacatgcatgtctcgaagaggaaagggaggcaacggtctcggacagggacgagccacaggacaccgtatggttctgacggataacattcagggaatcatcactcccgcgattcgccatctggccagacatagtggcatccagcgtatcagtggtcatagctatgacgaaactctcggtattctcaagatcattctacagaacgtcagtctcgacgctgtcatctagacttaagactctcgccgcaagatcgtcactg

SEQ ID NO: 16348 - DNA, 404 bp, Glycine max
  Clone ID: LIB3040-005-Q1-E1-F2
gagggtttttgtcgtcgctactaagagttgctgcttcttcagccactccgcacctcgcagcctctgtgccctcaacaaccatggctgaaatcgaaactaccgttccagatcccacccaaatcgacgtcaaactcttcaatcgctggagcttcgaggatgttgaggttaatgatatgtctctggctgattacattggagtgtccccatcaaagcatgctacatatgttcctcacactgctggtaggtactcagtgaagaggttcaagaaagcgcagtgccccattgttgagaggctcaccaactctctgatgatgcacgggaggaacaatggaaagaagctcatggctgtcaggattatcaagcatgccatggagatcatccacttgctcactgacctgaaccca

SEQ ID NO: 16349 - DNA, 215 bp, Glycine max
  unsure (1)..(215): unsure at all n locations
  Clone ID: LIB3040-005-Q1-E1-F3
gaggggaatttggcnaatcattggaagaaaatggcgggtggtggaaaggtttcgtccaaagtcacactaacctccgatccaaaattacccttcaaagtggttagcgttcaaaaggctgcgccttttactgccgttctcaaattcgccaccgaagaattcaaagtcccgccccaaacaagcgctatcatcaccaatgatggtgttggcataaatcc

SEQ ID NO: 16350 - DNA, 255 bp, Glycine max
  Clone ID: LIB3040-005-Q1-E1-F4
ggtctacgaatatattctaattatcaacgaatccctcgaattttagggggcatggggattgtaattctttcaacttctagaggtataatgacagatcgagaggctcgattagaaagaattggcggagaagttttatgttatatatggtaatctttctaacacccgaattatatgagaaacttcgatccatttttggtaaaaaaaaaaagaacgagaaaacgcaagtttctaaaagaacttccccctttatgtaaa

SEQ ID NO: 16351 - DNA, 412 bp, Glycine max
  unsure (1)..(412): unsure at all n locations
  Clone ID: LIB3040-005-Q1-E1-F5
ggccgaatgtgtctctccgcagcagccacacttcttcgccgtttcagctgaagagccatccgcaggtaagcaatggttaagcataataatgttatccccaatgggcacttccggaaacactggcaaaactatgtgaagacttggtttaatcaaccagcccgaaagaccagaagacggttggctcggcagaagaaggctgtcaagattttccccaggcctactgctggatctctcaggcctattgttcatggccagactctgaaatacaacatgaaagtcagagccgggagaggattttcactggaagaattgaaggctgcaggaattcncaagaaacttgctccaactattgggatttctgttgatcaccgcagaaagaatcgttctttggagagtctgcaggccaatgtgc

SEQ ID NO: 16352 - DNA, 294 bp, Glycine max
  Clone ID: LIB3040-005-Q1-E1-F6
gggggttgggacacgagagagagtgggagtcacagagcaaagtaaagcagccgattggactttgagtccgtttgttccttggttttgttatcttcagatatctttcattctttcgtattatctgtcgtttcaccccacacagatatgttggcatccatttagacctcatcactacattatctctatagcatcagaacataggacacaccttcgtttcgtttcgttcccacggccgtctccatgtccgcctcctccgcgattgcttctttcaactcctaactctccacgtgcttg

SEQ ID NO: 16353 - DNA, 386 bp, Glycine max
  Clone ID: LIB3040-005-Q1-E1-F7
gggcactgtggataatgatcgttggtgcaggaaccctagatcgtgagttccctgcctacacatctctcaggtaacagaataaagattctccggtgtttctctctatagtggaaaaggaatggggaacgaagcggttggtttggtttatgacaaatgcttgaaccagtcaggtagcatttgcatgcccggttcgcttgaaccgggtctggttcgtgggaacgtggttgtttgcgaccgtggaatcaacacgcgggtggagaaaggtaaggtggtgcgtgatgccggtggtgttgggatgattctcgcgaacatagcaccgagtggggaagagttagttgcggatagtcaactgctaccggctgtggcagtgggaagaatcgtggggg

SEQ ID NO: 16354 - DNA, 392 bp, Glycine max
  Clone ID: LIB3040-005-Q1-E1-F9
gatccacgattccttttccagtaaaacacagacgcattttagtttttttagtttctgcataaaaaacaaacccctgccacactctatctaaccttcttcttttccacgtttctttctacacacttcattttcaaaacaaggatcgtagaaaagcggttgcgttccggttcggttaattaacacaccagaaccaaaccaacctttctccgtcaacatttaattccttccgtcgctagaaaaatgcccaagccacgtctggatcggaaaaattagggcgctagggttttgttcgcttcatccgattctgcttcggattccgatcggaaatgtccgaacctcattcatcgccccgaacctccgcgtatctcgacgcgctctctcaggcgattcac

SEQ ID NO: 16355 - DNA, 312 bp, Glycine max
  Clone ID: LIB3040-005-Q1-E1-G10
gaagagtgatccttctacactaactaaagccgagcagcgagagagagaaaccctagcaaaaatgccggctggtcacggtttgagatcccgcaccagagattccttctctcgtcccttcaggaagaagggtaccatcgccctcaccacatacctcagaacctaccacgtcggcgattatgtcgacgtcaaggttaacggcaccgtccacaagggaatgcctcacaagttctaccatggccgcaccggtcgcgtctggaatgtcaccaaacgtgctgttggggtcgaagtcaacaagcaggtcggcaacagaat

SEQ ID NO: 16356 - DNA, 144 bp, Glycine max
  Clone ID: LIB3040-005-Q1-E1-G11
ggagagagatgcctccatttataaaacatcgtgtgcgcactctctcttctcctaagtttcgctcccatcaacagcaacgatggtgtagaggctcacttatcgcatgcgccatagctttgctaacaaatgcaaccagcaccgggt

SEQ ID NO: 16357 - DNA, 393 bp, Glycine max
  unsure (1)..(393): unsure at all n locations
  Clone ID: LIB3040-005-Q1-E1-G12
ggaagacgaaaagagagtggagagagagagaagtgagagtgtgagagggagcacagtgaagaagagaacgaaggaacgaggatggagaaccctcctccggcaacaaggcttgtgaaggagcacggaaccagggggccgaaaccccaggcggaanacctaaacaccaaaggctttaacggaaggaagaataccacagcaccaccaacttgttcacaagcaataccagcaacaccaatatcacccttcggtggaagagaaatacacgcagtggaagtcccttgttcctgtcctctacgactggctcgccaaccacaacctcgtctggccctctctctcttgccggtggggccctcagcttgaacaagccacttacaagaatcgtcaaagactcta

SEQ ID NO: 16358 - DNA, 417 bp, Glycine max
  Clone ID: LIB3040-005-Q1-E1-G2
gacactacaactaaacacactagctattagctatagctagaagtccctccaatccctctttgtctttgtgcttttctagttccttccaaaataccaacaaaagcaaagacaatgagttgccaagcatggcccgaacccatagttcgagtccaatccttagctgaaagtggcctaagttcaatcccttcacgctacattaggcctcactcccaaagaccctccaataccacttcttttccaactcctaaaccttttcaaactgatcatcatcatggtcatgatcagaaaacttccgatcatgaccatgatcatgatcatgttaacattcgcgtcattgacctgaaacatgttttctcggaggatccgatcctccgagaacaagtgtttgggcagggtggacaggcatgtcgggagtgg

SEQ ID NO: 16359 - DNA, 356 bp, Glycine max
  Clone ID: LIB3040-005-Q1-E1-G3
aaataaagtgaacccaatgagggagataaaagtgcagaagctcgtcctcaatatctctgttggcgagagtggagatcgtctcaccagagccgccaacgtgttggaacaacttagtggccaaaccccagtgttttccaaagcaaggtacactgttcgttcctttgggattacaagaaatgagaagattgcatgctatgtcactgtcagaggtgacaaggcaatgcaacttttggagagtggtttgaaggtgaacgaatatgaacttctcagaaggaacttcagtgatactggttgctttggctttggtattcaagaacatatcgatttgggaatcaagtatgatccttcaactggta

SEQ ID NO: 16360 - DNA, 365 bp, Glycine max
  Clone ID: LIB3040-005-Q1-E1-G4
gatccatttctcgcaacaacgcttaacctctctcattccccatttcctcacctccttcaaccgctgctaaattctagggttccgaaatggacgctggcggaaagatcaagaagggcgccggaggtagaaagggcggcggcccaaagaagaagccggtttcaaggtccgtcaaagccggtctccaattccccgtcggaagaattggccgttatttgaagaaaggaaggtacgctcagcgtgtcggtaccggtgctcccgtatacttggctgcagttctcgaatacctagctgccgaggtgcttgagttggctgggaatgccgcacgtgacaacaagaagaacaggattattccaagacacgtgctt

SEQ ID NO: 16361 - DNA, 355 bp, Glycine max
  Clone ID: LIB3040-005-Q1-E1-G5
gaactacaacacaagagactgtaccttctttttgaagtctctgtgggttggggttttggagtgggagcaccaatggctttcgtgatggcaattgtagtagtaggtgttgtcttggtgctctgtttttgctctgctctcttgaggtggaatgaagtaaggtacaggaagaaaggtttgcctcctggcacaatgggttggccactttttggggagacaactgagtttcttaagcagggtccaaacttcatgaaaacccagagagcaaggtatggcagttttttcaaatcccacatactgggttgtcctaccattgtttccatggatccagagcttaacagatacatcctaatgaatg

SEQ ID NO: 16362 - DNA, 416 bp, Glycine max
  unsure (1)..(416): unsure at all n locations
  Clone ID: LIB3040-005-Q1-E1-G6
gaacatgccgaaaagtagtaccaagatggcttcagttgtgtatctcctctttggcttccatctcattgttatcatgtcaagttccttacccgcaactagtgaagtgtttgcaaaacagtatccatccacagaacccgtggaagaaaaactcacccaactccacttctatttccataacaacataacgggggaacacccaactgctatgaaaactgttttgcctcctaaggggtccattcatggttttggggctacttacatgatggatgaccctctaactgaaggaccaagtccaacttcaaagcttgtgggaagatctcagggaatatacgctttggcttcacaacatgagcctgngttgctcatggtgacaaattttctcttcactttgggcatttacaatggcagcaccctca

SEQ ID NO: 16363 - DNA, 395 bp, Glycine max
  Clone ID: LIB3040-005-Q1-E1-G7
ggcagacgccgtgactagacactcatcgcactcgcgccatcttacggtttctccttttgtttcgcaacatggatgccgctaagaaaactaagaagacccatgatagcatcaacaacatgctcgctcttgtcatgaatagtggcaaattcaacctcggttacaagaccgttctcaaatctcttaggaactccaaaggaaaattgattatcattgctaacaactgcccccctttgagaaagtcagagattgaatactatgctatgttggcaaacgttggagttcatcattacaatgggaacaatgtggatttgggcactgcatgtggaaaatattacagagtgtgctgccttagcattattgatcctggtgattctgatatcatcaagacactgcct

SEQ ID NO: 16364 - DNA, 394 bp, Glycine max
  Clone ID: LIB3040-005-Q1-E1-G8
gcccgccgagcttagtagaacagaaaaggaggagcaggaggcatcaccgttaccaaacatggtgaaagggcgccaaggagagcgtgttagactttacgtcaggggttcaatacttggatacaagaggtccaagtcaaatcaatacccaaacacctcattaatccagattgagaatgtacacactaaggaagaagttgcgtggtactgtgggaagcgtatggcttacatttacaaagccaaggtaaagaaggacggaagccactatcgctgcatttggggtaaggtcaccaagcctcatggtaacagtggtatagttcgtgctaagttcaagtccaatctgccgcccagatcaatgggagcaacggttagagtcctcatgtatccaagcaatata

SEQ ID NO: 16365 - DNA, 100 bp, Glycine max
  Clone ID: LIB3040-005-Q1-E1-H1
gactgatacaggaacagctagcagagaaacaaagttacaagtaaagtaaattaagaagatcattaatggcttcccttgcaaccttagctgctgttcaacc

SEQ ID NO: 16366 - DNA, 165 bp, Glycine max
  Clone ID: LIB3040-005-Q1-E1-H10
aagctattttgaagcatggctgagactttttattttaaaaactttaaaagttaaaattttgaaattataaaatataaaaaagtaaaaaaaaaatgggtcaaacagattacttttatgtagccgtgttagtcattcagagtcgtataccttatcaaaatcgtgtcg

SEQ ID NO: 16367 - DNA, 374 bp, Glycine max
  Clone ID: LIB3040-005-Q1-E1-H11
gtatgatgacatcgtgacagaagtctcttcttacttgacgaaggttggttacaacccagacaacattcgctttggtctcatctctggatttgaaggtgacaacatgattgagaggtccaccaatcttgactggtacaagggaacaactctccttgaggctcttgatcaaatcaatgaacccaagaggacctccgactagcctctaatgcttccattgcacgatgtctacaatattgatggtattggtactgtgccaatgggacgtgtagagactgaggttgttaagcctgttaaggcgatgacttttggtcacactgggctgacaactgaagttaagtctgttgagatgcaccatgacgctctcacacacgctc

SEQ ID NO: 16368 - DNA, 335 bp, Glycine max
  unsure (1)..(335): unsure at all n locations
  Clone ID: LIB3040-005-Q1-E1-H3
gacctaaaaattgtaccgatatggcttcacttgtgtgtctccttttttccttgcatttcatggttatcatgtcaggttccgtaccagcaaatagtgaagtgtttacaaaagagtctcctatgtctctatccacaaaacccgtggaaagactcacccaactccacttttatttccataacaacaaaatgggggaacacccgactgctatgaaaattgttgagcctcctaaggcgtccatttctggttttgggactatttacatgatggatgaccctctaaccgaanggacaagtccaacttcaaagcttgttggaagatgtcanggaatatatgct

SEQ ID NO: 16369 - DNA, 296 bp, Glycine max
  Clone ID: LIB3040-003-Q1-E1-F4
gaggtttcagatccttaatcggccaggaccaaacagcatccgcggcagcgacggtaaccctccaacaacaacacttccgctgcgaaaaatgtctctggtggcgaacgaggatttccagcacattctgcgtgtgctgaacaccaacgtggatgggaagcagaagataatgttcgcaatgacctccatcaagggtattggaaggagattcgccaacatcgcttgcaagaaggctgatgttgacatgaacaaaagggctggtgagttgactgctgctgagttggatagtgtgatgactg

SEQ ID NO: 16370 - DNA, 280 bp, Glycine max
  Clone ID: LIB3040-001-Q1-E1-E11
gagatctgagatagaaacgaaacgttaactaagaatcaatacctcaatggccacccttgtcgttcataaccaaaattcttctgctcaagatgctaaggctctccaacaggctttcaaaggatggggggctgatcacacggccattatagcaatactgggtcacaaaaatgttcatcagaggcacgaattcagaatagcctaagaggagatttaccaagatgatctcatcaaacactttgagtcgtagatctctggtgactgtgagatagctatgtaccgg

SEQ ID NO: 16371 - DNA, 326 bp, Glycine max
  unsure (1)..(326): unsure at all n locations
  Clone ID: LIB3040-001-Q1-E1-E2
gactcaaaaacacactcttcaaattccaatccaaaccaacaataatgtctctcttccattgccatgcctttcaccaccgcatggccactctctcacccttctcaaccttcaattccaaacccctctttgcttttctaccaaacccctctttcttaactcatcatcatcaacaacaacaacatccttatcctctcaccaaaaccacaaccactgacctcaacaacaataggcctctttcactctccacactgcccagaaagttgctctgcanaccaccccaggggaaatatgtcagagaggactatctagtgaaaaagttgtcagct

SEQ ID NO: 16372 - DNA, 439 bp, Glycine max
  Clone ID: LIB3040-001-Q1-E1-E3
ggaagattgaagaacagtcgtcggctccacgctcgcccttcgctgctgcgccatcaccgtgcccttctcaaagcgattttaacctaaccgcgttctttttttcttcagaaatcgagcataaggatttgaggattgaagtattgaacaccacatcctttatacttgttgggcaagaatggagggaaaaaggagaaacacaaaaatgtttttccacatagtgctggagcgaaatatgcagctgcatccacgctactttggtcgcaaccttcgtgatgatctcgtttccaagctaatgaaagatgtggaaggcacttgcagcggccgacatggatttgtggtggcagtgacagggatagaaaacatagggaaagggctaattcgtgatggatcacggtttgtgacatttccggtgaagtaccaatgtgttgtcttcagacca

SEQ ID NO: 16373 - DNA, 303 bp, Glycine max
  Clone ID: LIB3040-001-Q1-E1-E4
gggaagattgaagaacaatcgtcggggcaacgctcgcccttcgccgctgcaccatcatcgtgcccttctcaaagcgattttaacctaaccgcgttctttatttcttcaaagatcgagcataatgatttgaggattgaagtattgaacaccacatcctttatacttgttgggcaagaatggagggacaaaggagacacacacaaatgtttttccacatagtgctggaacgaaatatgcatctgcatccacgctactttggtcgcaaacttcctgatgatctcgtatccaagctaatgagagatg

SEQ ID NO: 16374 - DNA, 300 bp, Glycine max
  Clone ID: LIB3040-001-Q1-E1-E5
ggatctatgggagatagagtagagagccgtcgctatcctagtctcttcatcccctctagacatttcagtttcaggatggaatctcaggtgaagcacgcccttgttgtcaaagttatgggtcgtactgggtctagggggcaggtgactcaggttagagtgaagtttttggatgatcagaatcgacacatcgggacgaacgtgaaaggacccgtgagagaaggaaacagtcgcactgtagttgagtctgagagagaagcaagaaggttgcgctagaggatctcttcagcgtttggctcagga

SEQ ID NO: 16375 - DNA, 439 bp, Glycine max
  Clone ID: LIB3040-001-Q1-E1-E6
ggggacagtttttgtttgacaccactcggaaatttctctgcgtctctcctattttttctgaatctaacattaacaacaagaatggcatccaacaggggtcaaggtggaattcagcagctgttggctgctgaacaagaggcacaacggattgtgaatgctgcgaaaaatgaaaaattggctaggttgaagcaagccaaggaagaggctgaaaaggagattgctcaataccgagctcaactagaggctgagtttcaaaagaaagtgtcagacagtactggagattctggagctaatgtcaagcggcttgagcaagagactgatgaaaaaatccagcacctgaaaacggaggctgcaagaatatcggatgatgttgttgccatgcttctcaagcatgtaacaagtgtgaaaaattacgaccctttgatatatattggtgctg

SEQ ID NO: 16376 - DNA, 430 bp, Glycine max
  Clone ID: LIB3040-001-Q1-E1-E8
gactccttctggtcactcttgggagaagaggtcgagtttcacagcagcaatggtgtacgtcaaggctcagaaatcaaaagcctacttcaagagatatcaagtcaagttcaagagaagaagagagggaaaaaccgattaccgtgccaggattcggttgattaatcaggacaagaacaaatataacactccgaaataccgatttgttgttcgctttagcaacaaggacattgttgcacaaataatatctgcgagcattgctggcgatattgttcttgctgcagcatatgcacatgagctgccacgatatggtcttgaagtacggcgtacaaattatgctgcagcttattgcactggtctcctgttggcccgaagagtcctcaaaacacttgacatggatgaggagtatgaacgacatgttgaggctactgga

SEQ ID NO: 16377 - DNA, 90 bp, Glycine max
  Clone ID: LIB3040-001-Q1-E1-F11
gctctcaattcctcacattaatgtgtgtctgtcacgagaaccataatgctgacacattacagtaactctctttcccgacctgaataagaa

SEQ ID NO: 16378 - DNA, 250 bp, Glycine max
  Clone ID: LIB3040-001-Q1-E1-F12
ggttgtcctacagattcttcaggaactgcgattttggatcggaacctcatctgcggcgtagcaatgggacactccaatgtttggaattctcattcaaagaactaccgtcctggttcgcgcaattgccgaatgtgtgggaatccaaatagattgatcaggaagtacggccttaggtgtctgcatgagtgcttccgtagcaatgacagcgaaagatggcctcatcaagtaccgcgaacagagcggttgtcac

SEQ ID NO: 16379 - DNA, 364 bp, Glycine max
  Clone ID: LIB3040-001-Q1-E1-F4
tcgacagctgcaaagacacaaaaggggactttcaaatttcttttccttcactttcccgagaaaaaaaaaacactctttcactttcttgactacggtctcacttcgacatggctcgtactaagcaaactgctcgcaagtccaccggcggcaaggcgccacgtaagcagttggcgaccaaggccgcccggaagtccgctcccgcgaccggaggagtgaagaagccccaccgcttcaggccgggaaccgtggcgctgagggaaatcagaaagtatcagaagagcaccgagcttctcatcaggaagcttccgtttcagagactcgtgagggaaatcgcgcaggacttcaagaaccgatttgcgttttc

SEQ ID NO: 16380 - DNA, 426 bp, Glycine max
  Clone ID: LIB3040-001-Q1-E1-F5
gattgttggcttgtgctctgctcgtgcctctagggttatcatatctccatttccatttcctctctctcagtttccaagaatcttaagctatgggaaagtcttagccaaccgtgagcgctgattaccagaaggccgttgagaaggcgaagaagaagctcagaggcttcatcgctgagaagagatgcgctcctctaatgctccgtttggcatggcactctgctggaacttacgacgtgagctcgaagaccggtggtcccttcggaaccataaagcacccctccgaactcgctcacggcgctaacaacggtcttgacatcggtgttaggcttttggagccactcaaagcggagtttcctattttgagctacgccgatttctaccagttggctggcgttgttgccgttgaggtcaccgggtgacctgaag

SEQ ID NO: 16381 - DNA, 426 bp, Glycine max
  Clone ID: LIB3040-001-Q1-E1-F6
gacacaaactttattacagttgttgtattgtaattaagcaagaatattaggcaatggagtcttctagaacttcaactactcttgctctttttttaaccatcaatttgcttttctttgtcatggcaagtggctgctacacttgcacacagcctaagccaaaccctatcccattcccttaccctaaccctagtcctgccgcgaagagctgccccagggacgcacttaagctcggagtgtgcgcagacgtgcttaatggaccaattggtgctattgtagggtcaccaccggaccacccatgttgctcagtgctagaagggcttcttgatcttgaagttgcggtttgcctctgcactgccatcaaagccaacattcttggcattaaccttaacatccccatttcgcttagcttgatacttaacgcctgcg

SEQ ID NO: 16382 - DNA, 394 bp, Glycine max
  Clone ID: LIB3040-001-Q1-E1-F7
aaagttgtgaaaagtttttcgaacacccaaaatggacttggatggatgcatgaattgacaaaagagtatgttttggaaacattgggttgacttgagtaggaaaaatgaatcctgagccctagtgtcacatgaccataaaaacttgatgcttgagtgtccacatgggtgcatgcatgactgattttgcataaaatttctgaatcatcattgttgtgtgtgtatcatggaaataatatgggacattcctttatccctgaaccgctggccaaaccaacaccctgacgtacatcgtgtctggccattctgcaagccttttgtgccaagacctcaaaccaccataaaccttgacaaaggatgagaatttccatccttgtccttggaagaaggaaccatg

SEQ ID NO: 16383 - DNA, 310 bp, Glycine max
  Clone ID: LIB3040-001-Q1-E1-F9
gtcgccgaaaaccctaacaacacaggcgcacagcgtgatccattgacgaagatggtgcagcgtctcagctatcgcaagaggcagagctagtgccaccaagttcaaccaacacagggtcgtcaggacgcctggtgggaagctcgtttatcataccaccaagaagagggccagcgggcccaagtgccccgtcactggccagaggattcaggggattccacacttgaggcgtgcagagtacgggagatcaaggttgcccagagaccgtaggactgtcacccgtgcagatggcggagtattgtcaggacgtgct

SEQ ID NO: 16384 - DNA, 155 bp, Glycine max
  Clone ID: LIB3040-001-Q1-E1-G1
gtccggcaagccatagagacacgcctcagtgcggttgtcagaagagcagatattggtagacctaagcatacagtggttacaatgcgtcataagtgatcacttaatccttcaggaatcgtcatcataagcatcatcatcatcgttcattgacaaac

SEQ ID NO: 16385 - DNA, 411 bp, Glycine max
  Clone ID: LIB3040-001-Q1-E1-G11
gagcgaaacagagagtgatttcagtgagtgatcggtgttcacttgatctcatcataatcgtcagcgtcaattgaagaagatgccgatcagaaacatcgccgtcggaaggcctgaagaggcgactcaccccgacacgttgaaggcggctttggctgagttcatctcaaccttcatcttcgtgttcgccggctcaggctccggcatcgcctacaacaagctcaccgacaacggcgctgccacccctgccggcctcatctccgcctccatcgcccatgcattcgccctcttcgtcgccgtctccgtcggcgccaacatctccggcggccacgtcaaccccgccgtcaccttcggcgccttcgtcggcggcaacatcaccttcctccgcggcatcgtctacgtcatcgcccagct

SEQ ID NO: 16386 - DNA, 371 bp, Glycine max
  Clone ID: LIB3040-001-Q1-E1-G12
gcctcaatcggcccgcaccaacagcatcggcggcgacagtcactctccgacaacaacacttccgcggcgaaaaatgtctctggtggcgaacgaggatttccagcacattctgcgtgtgctgaacaccaacgtggatgggaagcagaagataatgttcgctatggcctccatcaagggtattggaaggagattcgccaacatcgcttgcaagaaggccgatgttgacatgaacaaaagggctggtgagttgagtgctgcagagttggatagtgtgatgactgtggtggcgaaccctaggcaattcaagattccggattggtttttgaacaggaagaaggattacaaggatggaaagtactctcaggttgtgt

SEQ ID NO: 16387 - DNA, 292 bp, Glycine max
  unsure (1)..(292): unsure at all n locations
  Clone ID: LIB3040-001-Q1-E1-G2
ggatgcatgttcattcttcactgtaacaccctttcctttcatttattgcctgnggagtgtgagcaaacgaggcagaaatgaaagtcaccaacaacacaacacaaaagcaaccaattttctttttctctctctttccctcattttctatatcagtttcctcaccttctcaatttttgaacgagacacagtgaggaaactgaacccttttgtttattcagctaaaaaatcacaccatttttttttctttttatttcggggatagtgatttttatcacagaatctaanggttttg

SEQ ID NO: 16388 - DNA, 393 bp, Glycine max
  Clone ID: LIB3040-001-Q1-E1-G3
gaccggaacttcaagcgagtaaacaaacaactactagggcaagaaagaaactagagaaaaagatatggcttccacttctgcagtttcaatggttatgccggtaacttatgccagccagaagagagtggtgcctagctctgatgcattcttcaagccactcacactacggtcctccaaggtagtggcggcatcaaattccaatggaaggtttcaggtgaggacctccatgaaggagaaagttgtaacagggctcacagcagctgcattgacagcttcaatgatggttcctgatgtggctgaggctgccgtctcaccttctctcaagaacgtcttgctcagcatctcggcatgtggagttgttgttgttgccattagtggtgctgtgattcgtgt

SEQ ID NO: 16389 - DNA, 212 bp, Glycine max
  Clone ID: LIB3040-001-Q1-E1-G5
ggctgccgcctcttcttcgagttgtacactctctcttcaaccctactttaaggtttatctcctaaaacccttttcatgttgattggatgacatcaacctgctcgtgttgtctgaaactcctgcggattttaccatgattcacatgctggatcaaggtctgccatctcaacttcaggatttctccagtacttcatgtactacatagtgcgttt

SEQ ID NO: 16390 - DNA, 374 bp, Glycine max
  Clone ID: LIB3040-001-Q1-E1-G6
gagttttggtgagttgtgtaattttgtttgttcatcttgtgttgttcactgttctttcccagacccacctcaaagttgaaagcagccatgggttttttcttgaaatgggtcaacttgtttgtcttttttcatttccttgctgcaacacccatcttctcagattcctcctccagctcaaatgcaatcgccaccaccaagttccttgatttagccaaggatcctcgggttttttgattggatggttggtatcaggaggaagattcatgagaatccagaactgggttatgaggaatttgagaccagtaagctgattagagctgaattggataaactgggcatctcatataaacacccagttgcagtcacgggtgttg

SEQ ID NO: 16391 - DNA, 403 bp, Glycine max
  Clone ID: LIB3040-001-Q1-E1-G7
ggtgctccacctttatcttgctgagactctgatcagttagagttgcattcatcaatgactatcacttatttacctccggagctgcatgaaatcatgcaccgaatccgactcggattccgactgggacgattcggaagaagatcccgatttccacttgctcgtagaaactcatatcaagttctcaaagctctcacttaagcacaaggctaacgccggtgggacggttagagaacttgatagtggatgattgcaagttgtatccgacgaacattggtctgaggctaactggtacacaagatccacctatcccaagcatgcataagcatttagagtacttaatagttttgccatagcaaattgtacgatttctctgattcaccttgggattcacgattttagctgg

SEQ ID NO: 16392 - DNA, 363 bp, Glycine max
  Clone ID: LIB3040-001-Q1-E1-G9
gaagaaattggtctgtttatggtggagatcatgcatatgcgacacaaatttgatgttgacacacgcttggttgagggtattgtccttgatcatggttctaggcaccctgacatgaagcgacgtgcagaaaactgctatatcttgacatgtaatgtatctttggagtatgagaagagtgaagtaaactcaggctttttctactcaagtgcggaacagagagaagctatggttgcagctgaaagacgacaggttgatgaaaaagttaaaaaaatcattgaactgaagaataaggtttgttctggtaatgatagcaattttgttgtcctcaatcaaaaaggaattgattccccatctctggacctg

SEQ ID NO: 16393 - DNA, 146 bp, Glycine max
  Clone ID: LIB3040-001-Q1-E1-H1
gaattgcaatcaaattagttcatgctctttgcgcagttccctagctctccgtgcaagatgcagatcgtcgtcaagaccctcaccggaccgacgatcacgcttgaggtggacagctctgacaccatcgacaacgtcgcggccaagat

SEQ ID NO: 16394 - DNA, 276 bp, Glycine max
  Clone ID: LIB3040-001-Q1-E1-H10
gattcagagttgcatcgactgaaacccctagaaaagacgccactttctctctttcactagctccgttcaagttctaactaagcacttcgtcgctgcttttgcttctgtaggagatgtctctgcgagtgctgaaccctaacgccgaagtgctgaacaaatcggcggcacttcacatgaacatcaatgccgccaagggtctgcaagatgtcctgcaaaacaacctcggtcccaaaggaaccatcaaaatgctcgttggtggtgccggtgatatcaagc

SEQ ID NO: 16395 - DNA, 442 bp, Glycine max
  unsure (1)..(442): unsure at all n locations
  Clone ID: LIB3040-001-Q1-E1-H3
gacacaactaactaagaaagtcttccatagccccccaaaaatgaagagcaccatcttctttgctctctttctcttttgtgccttcancacctcatacctaccttcagccatcgctgatttcgtgctcgataatgaaggtaaccctcttgaaaatggtggcacatattatatcttgtcagacataacagcatttggtggaataagagcagccccaacgggaaatgaaagatgccctctcactgtggtgcaatctcgcaatgagctcgacaaagggattggaacaatcatctcgtccccatatcgaatccgttttatcgccgaaggccatcctttgagccttaagttcgattcatttgcagttataatgctgtgtgttgaattcctaccgagtggtctgttgtggaggatctnaacagaggacctgctgtcnaaattggtgaga

SEQ ID NO: 16396 - DNA, 317 bp, Glycine max
  Clone ID: LIB3040-001-Q1-E1-H4
gacacttactagtagtaagcatggagtcctcaaagatctatgctcatctcttaaccttcaagtttttaaagtattaagatggcagagacattcctatttacctcagagtcagtgaacgagggacaccctgacaagctctgcgaccaaatctccgatgctgtcctcgacgcttgccttgaacaggacccagacagcaaggttgcctgcgaaacatgcaccaagaccaacttggtcatggtcttcggagagatcaccaacagggccaacgttgactacgagaagatcgtgcgtgacacctgcaggaacatcggcttcgt

SEQ ID NO: 16397 - DNA, 200 bp, Glycine max
  Clone ID: LIB3040-001-Q1-E1-H5
aaaaggggacaatggggtgtcgctgcaggttggtttgagtgcgtagagcatacgtcattgcgctcacgatcttttgtgcgaacaggaccgtttggacgtcctttcaggcatcggtgagttcgtgctcgagagcgtctgtagcattctgtgagctggtgagatctacgagctcttgtcagagatgtgatcacttggtggag

SEQ ID NO: 16398 - DNA, 91 bp, Glycine max
  Clone ID: LIB3040-001-Q1-E1-H7
aagacgggtgggttaagcaacagacaaaaggaacacaagaagaaaatgcccttggctgcaaagagagataaggtatcaagaactcggatag

SEQ ID NO: 16399 - DNA, 442 bp, Glycine max
  Clone ID: LIB3040-001-Q1-E1-H8
gacacttactagtagtaagcatggagtcctcaaagatctatgcttacctcttcctctgcatgatctttctctcttccgccactcccattctcggttgtggctactgtggcaaaccccccaaaaagcacaagcctggtaaaacaccaaagacacccaaaacacccgttgttaagccaccagtcaccatccctcccattaatgttcctcccgttgttcttccaccaatagtgaagcccccaggtattctccctccaattccaattattaacccaccaaccacaccagggaagggagggaacactccatgcccaccaccaaagtctcctgcgcaggctacgtgccccattgacacgctcaaacttggtgcctgtgtggatcttcttggagggttggttcacattggtttgggtgaccctgttgcgaaacagtgctgccccgtgct

SEQ ID NO: 16400 - DNA, 424 bp, Glycine max
  unsure (1)..(424): unsure at all n locations
  Clone ID: LIB3040-001-Q1-E1-H9
gaagtaagttcatttgactctcacaaaccttgcatccatccacacatggctggcatgaactctagcgtattggcctgtagctatgccatatctggtgcagcatgctccgagctcaatgggaaggtcacttccgtggcctctgttgcatcctctggctacaagttgccattgatcaaatgtgaggccagagttcccaaagccaaagaatctgaaggaaggagaggtgcccttgttctcttggcagctacccttttcatctctgcagcctccaattcttttgccaatgctgggatcattgatgattaccttgagaggagcaaggctaacaaggaattgaatgacaagaagaggttagctactactggagcanactttgcaagagcatacaccgtggaattcggtagttgcaagttccctgagaaac

SEQ ID NO: 16401 - DNA, 406 bp, Glycine max
  unsure (1)..(406): unsure at all n locations
  Clone ID: LIB3040-002-Q1-E1-A1
aacaacatatattaaaaaaataacaacatatattaaaaaagtcagaataaaaaaacaaatcctttatagtatttcttgtaataaatgtgatttttggaatagggataaataaaccatggaaaaatctaagcgactctttatgaaatccaagcgatcttttcgtaggcgtttgcccccgatccaatcgggggaccgaattgattataaaaacatgggtttaattagtcgatttattagtgaacaaggaaaaatattatccagacgcgtaaatagattgaccttaaaacaacaacgattaataacaattgctataaaacaagctcgtattttatctttgttaccttttcttaataatgaaaaacaaattgaaaaaagcgagtcaaccgctagaactactacntttaag

SEQ ID NO: 16402 - DNA, 245 bp, Glycine max
  Clone ID: LIB3040-002-Q1-E1-A10
gcaacataggtcatcgaaaggatctcgaagacccaccaacgcacgaaagccgggatctttcagaaaatggattcctattcgaagggtgcataaccgcatggataagctcacactaacccgtcaatttgggatccaattcggttccttaggacgtatcgggaaggaattttggaatgtacatatatcgattcatacagataccgaaaacaaggttctctattgattcaaacgctctacctaccaga

SEQ ID NO: 16403 - DNA, 372 bp, Glycine max
  Clone ID: LIB3040-002-Q1-E1-A11
ggaccaaaccattttagtttagttttgaatcactggtgagggccttccatggcttccgcttgtgcttcctctgcaattacagctgttgccatctctacgccgagttccgggcagaagaatcgatcaggaagttgttttcttaatggaaggaaattgagggtgaaaaacgaaatagcagcacttgtaggacgatcgatgggcactacagtttgcacagttgctgagcctgacagacctctatggttcctacgcagcagacctcctcgatggcttgatggcactctacctggagacttcggctttagaccacttggtcatggatctgacccagacagtctgagatggacatgtcatgcagagctagtgtactgc

SEQ ID NO: 16404 - DNA, 254 bp, Glycine max
  Clone ID: LIB3040-002-Q1-E1-A12
ggaactcataatattcatcactagaagtgttggatgcatttctatttctaactaattattgtgcttattattattgttgagaaagaaaagaatggcaaagttaataaaattctttgagttgaacacaggggccaagattccttctgttgggttaggcacttggcaagctgagcctggtgttgtagccaaagctgtcaccacagccattctggttggatacaggcatattgattgtgctcaagcgtataacaatc

SEQ ID NO: 16405 - DNA, 402 bp, Glycine max
  Clone ID: LIB3040-002-Q1-E1-A2
gaatcataatcccgttgtagttccaaaaaatgctctacaaccacacttcctcgatgtcattgccttccccattgtacctgaatactacgtcgtttcgcctcacgcgccaatctccttttccttttccccgccggcgcttcaatccaccggctttccgatcagtttcgccgttgagttccagcccctctgcatcactcttcgatctcagagggggcaaaggaatgagtggattccatgacgttgaactgaaggtgcgcgactatgagttggattagtacggtgtggttaacaatgcagtttatgctagttattgccagcacggtcgtcatgaactcttgcaaaacattggtattaattgcgatgctgtggctcgcagtggtgatgcattggcattgtctgaac

SEQ ID NO: 16406 - DNA, 408 bp, Glycine max
  Clone ID: LIB3040-002-Q1-E1-A3
ggttgttcgctttgcaattttttcttctagaacaccgcctcagccacactacaaagacgcgacgacgcacagaaggcgaagaagctaaacgacgacgcagcgttatggaagacgaaatgtacggcgtgtcgtccacgacggagtactcggacggggcgctgatgacgccggagaacatattcccggcggagtaccacagcttcctaatgtcctccgccgcccggattccgatgttcggatccgacgagcttctctccgccgtcaccgccggcaacgaaaccgaaccctaccctggcgccaccatcgcaccggaaattcagcgccaaaacgacgcctcctctctcatcaaagccaaaatcgcctctcaccctcactaccctcgccttctccaagcctacatcgattgcc

SEQ ID NO: 16407 - DNA, 427 bp, Glycine max
  Clone ID: LIB3040-002-Q1-E1-A4
ggcagcagaagaacaagtagttgagaactaagaaggagaagcaaatggcttcctcaatgatctcttccccagctgttaccactgtcaaccgtgccggtgccggcatggttgctccattcactggcctcaagtccatggctggcttccccaccagaaagaccaacaatgacattacctccattgctagcaacggtggaagagtgcaatgcatgcaggtgtggccaccagttggcaagaagaagtttgagactctttcctacctgccagaccttgatgatgcacaattggcaaaggaagtagaataccttcttaagaagggatggattccttgcttggaaatcgagttggagcacggtttcgtgtaccgtgagcacaacaggtcaccaggatactacgatggacgctactggaccatgtggaagctgcc

SEQ ID NO: 16408 - DNA, 400 bp, Glycine max
  Clone ID: LIB3040-002-Q1-E1-A5
aacaacatagattaacgcaatagcaacatatcttccaaaagtccggcttcagcaacactaccttgacgcgactacgcgcagaaggcgaggaatctaaacgacgacgcaacgaaaccatggaaaaatctaagcgactctttatgaaatccaagcgatcttttcgtaggcgtttgcccccgatccaatcgggggaccgaattgattataaaaacatgggtttaattagtcgatttattagtgaacaaggaaaaatattatccagacgcgtaaatagattgaccttaaaacaacaacgattaataacaattgctataaaacaagctcgtattttatctttgttaccttttcttaataatgaaaaacaatttgaaaaaagcgagtcaaccgctagaactaatac

SEQ ID NO: 16409 - DNA, 385 bp, Glycine max
  Clone ID: LIB3040-002-Q1-E1-A6
ggaaactcaactttcaatattgcaacgctttaccgcattcatataaattacacaattgatcgaggtgctctgaaagtgagcatagacatttcagaggcatagtatcgctaatcaaactcactagctcaccacatttgagagaatactcaataccatgtgtcgagcacataataggaatgtacggcactaatattccatccactgtgacgggtaaagaaccatatatacagagaagatgatggtggctgcatgagtgcgagtgagggagtatgcggtgagggatctcttacactggtcgtttcactatattagtacacggtcagattacctatgtgatcactatcttacgtacttttgcaatttgatcccttaacttttgaaaaat

SEQ ID NO: 16410 - DNA, 243 bp, Glycine max
  Clone ID: LIB3040-002-Q1-E1-A7
cgggggttcaaaccttcatcagctatgcgattgtctccttgtgcgaacaccacttcaatgagttccggatcgggttcacttttgtggttccggaacggtcttcggatccatgacaaccccgctctcgaagtcgcttcgcgtggagcctctcatctctaccctgtctttgtcatcgacccgcatttcatggaacccgacccgaattcttccgcacccggatcctctcgcgcgggtctgaaccgc

SEQ ID NO: 16411 - DNA, 62 bp, Glycine max
  Clone ID: LIB3040-002-Q1-E1-A9
cgggatgctttcttgagtggtcgttctgcagctatttgcttgatggctgctctctccctttg

SEQ ID NO: 16412 - DNA, 415 bp, Glycine max
  Clone ID: LIB3040-002-Q1-E1-B10
gatgcttcacaattaatagtgctattagattcttaggaactttactccttcaattaattatttatgcatttggtacattatacatgcaagctgtaactagtaaaaaaaaattgaatttgaaggaggaggtgaaggctgaagtgtggagaaggattagggtttgtgtttatatatttagatatagaatagcagaaaatttggattgtgagggaaaaaatgggtagcgaagaggattcgattgagcaaagcgttgcgtcccgtcgcgaaagactgctagctctcagagccgctcaggagttgtcgagtgttcccgaacctgaacctaacggcaacaaggacgatgataatgaagaagatcaagaacctcaagaaatgaagttccgtaactacgttcctcacgacaaaaacctccagg

SEQ ID NO: 16413 - DNA, 388 bp, Glycine max
  Clone ID: LIB3040-002-Q1-E1-B11
caggggtgatttgagaggatcgcgagagggacggtagcagagattccgtgagttgcacaaatgaaaacaaatctttctgcagagaccatgaacatcccggacggcgtgagcgtcaaggttaatgccaaggtcatcgaaattgagggcccccgcggaaaattggtgcgaaacttcaagcacttgaatctcgattttcagctcatcactgacgagaacggtaaaaggaagctgaaagtggaggcctggttcggttctcggaaaacatccaccgccaatcgcagcgcactgagccacgtggagaatctgatcaccggcgtcaccaaaggctaccgctacaaaatgaggttcgtttatgcccactttcgcatcatcgcaagcatcggtaacg

SEQ ID NO: 16414 - DNA, 395 bp, Glycine max
  Clone ID: LIB3040-002-Q1-E1-B12
gaaaggtctcgtctttgacaagaaggtcagccacgccgccgggggacccacccgcatggagaacgccaagatcgccgtcattcaattccagatttcgccgcccaaaaccgacatcgaacagagcattgtggtgagtgattactctcagatggatacgattctaaaagaagagcgtagttatattctcagcatgattaagaagatcaaggccactggttgtaatgtgttgttgattcagaagagtattttgagggatgcagttactgatttgtccttgcattaccttgcaaaagctaagattttggtcattaaggatgtggagagggatgagattgagttcattaccaagacactgaattgtttgcccattgctaacattgagcattttcgcactg

SEQ ID NO: 16415 - DNA, 355 bp, Glycine max
  Clone ID: LIB3040-002-Q1-E1-B2
atagcaaaatcgtttctccaatttaatcaccattgtacaacccaattcccttcgtcgttttcgattaagagagcaatggcacgtaccaagcaaaccgctcgcaagtccaccggaggaaaggctccgaggaagcaattggcaaccaaagccgctcgcaagtcagccccggcgaccggcggagtgaagaagccccaccgcttcaggccaggaacggtggctctgagggagattcgaaagtaccagaagagcaccgaacttctgatccgaaaactcccattccagaggctcgtcagagaaatcgctcaggatttcaaaaccgatctccgctttcagagcagcgccgtttcggctcttc

SEQ ID NO: 16416 - DNA, 321 bp, Glycine max
  Clone ID: LIB3040-002-Q1-E1-B3
aatttcgaagttttatattatgttttggttttattgtaaaccaaaaaaaacccctcctactttctaataaaaaacatatgttttaaataaattttgtgactactattaattttgacacacatcccttacttacatttaatggttcaaacaattctactcaactttaaaataaatgagcccttagattatacatatttatcatgcaggaacaaccagctatcattttacattgaactagaaattcatttagaagatcaaagacaaaattttccgattaaaacgtacttaaattgaagaggggttgttggcattgtgcaccac

SEQ ID NO: 16417 - DNA, 384 bp, Glycine max
  Clone ID: LIB3040-002-Q1-E1-B4
gatccaactctctaaacaacacattaacctttctcattccccatctcctcaccttattcagccactgctaatttctagggttccgaaatggacgctggcggaaagatcaagaagggcgccggaggaagaaagggcggcggccctaagaagaagccggtttcaaggtccgtcaaggccggtctccaattccccgtcggaagaattggccgttatttgaagaaaggaaggtacgcccagcgtgtcggtaccggtgctcccgtttacttggccgcagttctcgagtacctagctgctgaggtgcttgagttggctgggaatgctgcacgtgacaacaagaagaacaggattattccgagacatgtgctattggctgtgatgaacgat

SEQ ID NO: 16418 - DNA, 416 bp, Glycine max
  Clone ID: LIB3040-002-Q1-E1-B5
atatcaataagcggaggtgatcaccatttatatagtctgtattctccttgcctgttggacatgtttagattcttttgtagaagtttatgtgagaaagaaattcgaacagaaattgcgtatcaagactttattacagattactctttatgcaaaaaaaaaaaaaaaaaaaaaaaaaaaaaaaaaaaaaaaaaaaaaaaaaaaaaaaaaaaaaaaaaaaaaaaaaaaaaaaaaaaaaaaaaaaaaaaaaaaaaaaaaaaaaaaaaaaaaaaaaaaaaaaaaaaaaaaatttaaaaaaaaaaataaaaaaaaaaaaaaaagggggcgccccaaaaagtttacagttttttttacggggtgtgagggtttaaaactcctttaaggggggcccaaattttatatagggggcgggtttttta

SEQ ID NO: 16419 - DNA, 411 bp, Glycine max
  Clone ID: LIB3040-002-Q1-E1-B6
ggacctatgtcaaggaataatagcttcagtacaactgcaaatagtgattcttctgctgctggtggcaacaatggattaaaccacagaacatctgagatgccacaaaatctacatttgcaagatgtggttcaggatattggcaatgaattcacggataatcccttccttaacagtgatcttgatgataacatgggttttggctggaaggcacgactaacacaatcttggacatgaaatcggcatatcatgtgttgatgaagtgtttatcttattatctttgtacaggacactttaaatagatgctgtttttttccttgtttttccctgttattttcttgatggaatttgtttggactcggactcggactcgagtaggtttttagagattttatttgagggtttttgtcctgc

SEQ ID NO: 16420 - DNA, 393 bp, Glycine max
  Clone ID: LIB3040-002-Q1-E1-B7
gacacttactagtagtaagcatggagtcctcaaagatctatgcttacctcttcctctgcatgatctttctctcttccgccactcccattctcggttgtggctactgtggcaaaccccccaaaaagcacaagcctggtaaaacaccaaagacacccaaaacacccgttgttaagccaccagtcaccatccctcccattaatgttcctcccgttgttcttccaccaatagtgaagcccccaggtattctcgctccaattccaattattaacccaccaaccacaccagggaagggagggaacactccatgcccaccaccaaagtctcctgcgcaggctacgtgccccattgacacgctcaaacttggtgcctgtgtggatcttcttggagggttgg

SEQ ID NO: 16421 - DNA, 388 bp, Glycine max
  unsure (1)..(388): unsure at all n locations
  Clone ID: LIB3040-002-Q1-E1-B8
ggtgccttacatcaaacattattgagtagtattaagagcattgcaatgatgatagctatctctgcaacttttatgattttcttcttgtgttcgccatcagtggctatactaatcatcaggttgccgctaccctcaccagtgacaggccctgagtccgtagcattcgaccggaacggtggagggccatatgtcggtgtttctgatggaagaattctcaaatatgctggtccaaccgatggcttcaaggaatatgctttcacttcaccaaacagaaacaagacaatctgtgatgggcttgctgatttctcagaactccaggcagcatgtgggatgccattangattgcgttttcaacatcanacantcgaactatacgtagctgatgctt

SEQ ID NO: 16422 - DNA, 378 bp, Glycine max
  Clone ID: LIB3040-002-Q1-E1-B9
ggttgagtgtagaacgctgctgccgaagcccttccggaaccctaaggtaagtgagtaatcagtggttgagaatggtggagaaggcgaagggtagaaaggaggaggtggttacacgtgagtacaccattaacctccacaagcgcctccatggctgcacatttaagaagaaagctcctaaagctattaaggagataaggaaatttgcccaaaaggccatggggaccaatgatgtgagggtggatgtgaagttgaacaagtttgtctggagccagggaatcaggagtgttccaaggaggattagagtaagaattgctcgcaagagaaatgatgatgaagatgccaaggaagagctgtactctcttgttaccgttgttgaga

SEQ ID NO: 16423 - DNA, 362 bp, Glycine max
  Clone ID: LIB3040-002-Q1-E1-C1
gagattcgtcttcagtttcagcctttctctcccactcactcactcacaggtaagcaatggcgggaaaaggagggaaggggcttcttgcagcgaaaaccaccgcggcgaataaggacaaagacaaggacaagaagagacctatttctcgctcttcccgtgctggaatccagtttcctgtgggacgtatccatatgcagctgaaacaaagggtccaagccaatggacgtgttggggcaacagctgcagtgtacttagcctcaattctagagtatctgactgctgaagttcttgaacttgctgggaatgcaagcaaggatctgaacgtgaagaagatcacaccaaggcatttgcagctggctatc

SEQ ID NO: 16424 - DNA, 419 bp, Glycine max
  Clone ID: LIB3040-002-Q1-E1-C10
ccatcaagccccaaactgacagatgggtcttccctgagaccaacaccggtatcattgtcttggctgagggtcgattgatgaacttgggatgcgccactggacaccccagttttgtgatgtcctgctccttcaccaaccaggtcattgctcagcttgagttgtggaaggagaagagtaccggcaagtacgacaagaaggtttacgttttgcccaagcaccttgatgagaaggtggctgcacttcatctgggcaaacttggatctaagctgacccagcttagcaagtcccaggctgattacatcagtgtgcctgttgagggtccatacaagcctgctcactacacgtactaagtgattgagatgatcaactgaaaagtgagtgatggaaagacaaaaatcggttttatcaatcggatttga

SEQ ID NO: 16425 - DNA, 418 bp, Glycine max
  unsure (1)..(418): unsure at all n locations
  Clone ID: LIB3040-002-Q1-E1-C11
gggagggttactttggggtttctctcgctaaccaagaaggaactaaggttttacagaatacaagctctctctctctctcgtcggttttcgtcaatcaaatccaatccaatatcaaatatgagtcgtcatcccgaggttaagtgggctcagaggcttgacaaggtctatatcacggtgcaattggctgattcaaaaaatgcaaaagtggatcttacgccagatggtatttttaccttctccggtagtgctggtgctgaagaccatcagtatgagctaaaactggagctctttgataaggttaacgttgaggagagcaaaattaatgtangagagcgaagcatattcattgtagtgcagaaggcagaggatggatggtggaaaaggttactgcgtggagaangcaagactccacattatg

SEQ ID NO: 16426 - DNA, 398 bp, Glycine max
  Clone ID: LIB3040-002-Q1-E1-C12
ggcaacgagacctaggaagcacgacgacaacaacactcgtcctcacaccgactgccaccgcgtccaaagatgattgatgatcaagatctgggtttctttgccaattttcttggcgtcttcatctttgtactggtcatagcgtatcattttgtcatggctgacccaaagttcgaaggaaactaggaatgtagactgaggtgctttgcaaatggaaatgaatttgatgcaatcaagaactgtagtttgggaatgtgaacgttaagcttactaaaactttcataaacatcaaaggagcataacatttcaattttcgctatacttatgcgtgctcccttaagttatgttttgcagttaaggaactttcgttgatagactaatgaaaacactgaatttgcttt

SEQ ID NO: 16427 - DNA, 165 bp, Glycine max
  Clone ID: LIB3040-002-Q1-E1-C2
atactactcaggagaaactacatattctcaacccatcattttccagaaaactcaaatcatcttccttaccaaatgcctcctaagtatttacgtaactggttgttgagtccattaattttgtctgcaccttggactggaacgatacttcctccccccttacatttt

SEQ ID NO: 16428 - DNA, 365 bp, Glycine max
  Clone ID: LIB3040-002-Q1-E1-C4
accttcggcacctcatgttatcagcattggacaacttatggaatcggcattagaggtagctggtcaagtggcaggaacagctatctccacttcgccccttccgtacaacaccatggctagccagtgtgaatcactcggtacatgtgcaaggaaaaagctttcaaattggctggcctttgagaatcattacagccaagcacttgatgataaatcgtttttggcaattgctgatattaggaactcagcacctgagaaggtttgatgtgcccttatttgtcattattaccaggatacagactctcttctttccttcactcaatgcccactgtactaccactatcgatcaatcgtcgttatttttagat

SEQ ID NO: 16429 - DNA, 366 bp, Glycine max
  Clone ID: LIB3040-002-Q1-E1-C6
gacattacttgtttttatttttcagcatttgaagtttcactctcttcagaggaatgatgacagcatgcaaatgcatcaaacaactagtagattgatgaatctttaggtcacattttcagtttcactctctcttcttccatggaattgtcagattttaggacaagagcttccatgtttatcagattgtgatctcaaaatggggaaatcaccaggaaaatggatcaaaatcgtactatttgggaaacagtcatccagatcaaatatttcaaagggaagagagatgattgtcaataaaaatgcagttgttgcttccaacgagttggaacatggtttgtccttagatccaacccccaatgagattgctac

SEQ ID NO: 16430 - DNA, 402 bp, Glycine max
  unsure (1)..(402): unsure at all n locations
  Clone ID: LIB3040-002-Q1-E1-C8
gacaccaagtcctgctcttcttccagagcaacaacaaacaaaccctttctttctggcttcagtttttgcagtgaaaatggcggtgactttaacatcaaccctctttatggctttgctatttgctgcttcagcttttgctgctcttcagcctagagtacctgaagcttaccttcaaaatggaaactttgaggagcagccaaaccccaaaaacctccagaaaacaaagctcatggggaaatattctttgcccaaatgggaagtcaatggtctggttgagtatgtctctgggggcccccaacctggaggcatgttcttcccagtgactcatggaatccatgctgtgaggcttggtaatgaggcctcaatctcncaaaatatcaaggtcaaacccggtcaactgta

SEQ ID NO: 16431 - DNA, 399 bp, Glycine max
  Clone ID: LIB3040-002-Q1-E1-D1
gctccacaacacagaacaaaatcaaagacaaaaaaaaacccttagccaacacaaccatcatggccacctctgctattcagcaatcagcattcactggtcaaactgctctgaagcagctcaatgagttcgtccgcaagaccggtggcgccggcaaaagtcgcactaacatgcgccgcaccgtcaagagtgctcctcacatcatttggtataggcctgaccgtcccaagtacttgggtccattctcggagcagattccatcatacctgaccgtagaaatccctggtgactaccgatgggacactgctggattatcaactgaaccggaaaccttcgccaggaaccgggatctggaggtgattcacagcagatgggcaatgcttggtgcccttggatgcacct

SEQ ID NO: 16432 - DNA, 177 bp, Glycine max
  Clone ID: LIB3040-002-Q1-E1-D10
tcagatgatgttgatcacgtttagtgcactcctcaggcttcactttgcattgtgcacagacatcaagcttctgatgacacacactcttcttcatattcttcttcatcatcgtgtgcttgttcggattgtgactaacatcatcgtgtacgcgagcattgctattgtcggcaatgtgtg

SEQ ID NO: 16433 - DNA, 66 bp, Glycine max
  Clone ID: LIB3040-002-Q1-E1-D11
ctatttgaatttaaagacatgatcttttacttcattcttcaatgaagatatcttgagatttttcac

SEQ ID NO: 16434 - DNA, 363 bp, Glycine max
  Clone ID: LIB3040-002-Q1-E1-D2
gatagcaaaacttcagcaacccttttgcatctgatctaagaatcccaacctcaaatacccattttttgtcatttcatgatctaggttatagttcgtgaaaatgacgaggatgacccgtgattttggggatactatgcaaaaagatgcagtgccggcggtgtcggctgatataatatttgcttctcttcggtttcctaattacaaaatcggagttaacaatcagatcatggagacaaaggatagtccaaaagtgctatctatgaaggaggttgttgcgcgagagactgcacagctgttggaccagcagaaacgtctgtcggttcgcgatcttgccagtaaatttgagaagggtttggcagctgc

SEQ ID NO: 16435 - DNA, 300 bp, Glycine max
  Clone ID: LIB3040-002-Q1-E1-D3
gatagcaaaacttcagcaacccttttgcatctgatctaagaatcccaacctcaaatacccattttttgtcatttcatgatctacgttatagttcgtgaaaatgacaaggatgacccgtgattttgaggatactatgcaagaagatgcagtgccggcggtgtcggctgatataatagttgcttctcttcggtttcctaattacacaatcggagttaacaatcagatcatggagacagaggatagtccaaaagtgcgatctatgaaggaggttgtttcgctagagactgcacagctgttgga

SEQ ID NO: 16436 - DNA, 420 bp, Glycine max
  Clone ID: LIB3040-002-Q1-E1-D5
gacagctcttggctttagcaaattccaattcccaattcccaattcgaaacccttattcctttcaaagaaccaaattgagtgatcgtgatggcaccaaaggcagagaagaagccagcggagaagaagcccgcggaggagaagaagtcgacggtgggagacaaggctccggcggagaagaagccaaaggccggaaagaagcttccgaaggagggaggcgccggcggagaagggaagaagaagaagagaaacaagaagagcgtggagacatacaagatctacatcttcaaggttctgaagcaggtccaccctgacattggtatctcaagcaaggccatgggaatcatgaacagcttcatcaacgacatcttcgagaagcttgcccaggaatcttctagacttgcccgttacaacaagaagccc

SEQ ID NO: 16437 - DNA, 391 bp, Glycine max
  Clone ID: LIB3040-002-Q1-E1-D6
ggagttcgatccttttccgatgtacggaaccgagaataaccgagatgattcggagcgaacggcgttcagaagagcagagaagaagtacaagctcgacgacgactacaatgcttcttccaagaacgaacagaaagaacaacctaaacccgtggacttagcggaggtccttgacgttagatctagtcgagaatgctatcaccaaaacgctgtgcttccttcgggtgttatcgttcttcacgacaagttcacgtctccggtttttgctttacaaaatcgcccaggcttttatttgaatcctggggcattaagcatagagaaacaatgtagtttgataacggacagtttgactgattttccgcagccacctaacagaacagatcacaatgccttg

SEQ ID NO: 16438 - DNA, 57 bp, Glycine max; identical to SEQ ID NO: 14594
  Clone ID: LIB3040-002-Q1-E1-D7

SEQ ID NO: 16439 - DNA, 388 bp, Glycine max
  Clone ID: LIB3040-002-Q1-E1-D8
ggtaatttgtagaattgaagagtaatttgtgaagccttcctccatcacaagtcttcaactagggtttcatatcaggctcatgagtgtgcccttcactcctatcgattatcaaatagcttcggtgatcatcataacgaactccacatttgtttgtttatcatttccatgctcgtatcattgtctaacaccagcaacaatgtcactggggtcgacttcacgttcagaagataatttgatcgagaagagtatctagaacgagcacgggagcgcgagagacacgatgatgagggtctagcgaagactatagcgatatgtccgcccgtgcagaggaatctcttgaaacatacacattatcaagtggaccttgaatcccgcttgggcaagactc

SEQ ID NO: 16440 - DNA, 403 bp, Glycine max
  Clone ID: LIB3040-002-Q1-E1-D9
gacacactcaaaccatcccttttattgaaatcctcaagcttcaatttgctttgtgctcactcatctatctattataaccaaacactcttcttcatattcttcttcttcttcttgttcttgttctatctgtgacgagcatcatggcctcgagagcagtgctattgttggctatgtgtgtgcttccggccatggttgtggccattcgcccagcaaagaaccctttttgcgtgaagggtcgcgtctactgtgacccttgccgtgctggttttgagacctcagcaaccacctacattgccggtgctgagattatgttgcaatgcaagagcagggttagcaacgaggttgtgtacaccaagaaggggtacactgactcaactggagcatacacaatgtacgtggacga

SEQ ID NO: 16441 - DNA, 183 bp, Glycine max
  Clone ID: LIB3040-002-Q1-E1-E1
agcgtgaacttcgacctgaaaagacggatttgagcagaccatgtccgaatctgctgacccacatccacgtttgtacttcgtacaccagatcgtggatcactcactcactgatgtacaactttccgaactctttgccgactatggtacaactgactcgtgcaatgtcatgcgacgaccgactgg

SEQ ID NO: 16442 - DNA, 183 bp, Glycine max
  Clone ID: LIB3040-002-Q1-E1-E10
gtcatagcttcaacaaaatggagaggaaaaaaaaaggcttgtcacagcacatgcaaataagtataatttcgaaagctccatctttcaccctctttaagtactagttagaagcctagtatgtcttacatctgatatgttctgaaaaatggacaaaagtaactttgtttcattaggtattttttc

SEQ ID NO: 16443 - DNA, 98 bp, Glycine max
  Clone ID: LIB3040-002-Q1-E1-E11
ccaacaaaaaatgggcctttgaaactaaagaaaaacaaactaagattggcccaaactgaagaaatacaaaaaaatggcttgagatcaagcctaaccac

SEQ ID NO: 16444 - DNA, 409 bp, Glycine max
  Clone ID: LIB3040-002-Q1-E1-E12
gactccactcacaactgaaaccaaaactgaaaaaaaaaacaaacaataccataacatggcttcttccaccatcacctcctccttcctaacatcacccccttcatctctcttcaacaaatcatcatccccttccttccatgccacccctactctccgccccctcgcgccacgcgcctccatgcccgcctcagcgccgccctacgacttcggatcgttccggttcgatccgattagagagtcgattgtgtcgcgcgagatgacccgcaggtacatgatcgacatggtcacccacgccgacaccgacgtcgtcatcgttggcgcgggctccgcgggtctctcgtgcgcctacgagctctccaaaaacccctccatcaacatcgccattgttgagcagtccgtcagccccggc

SEQ ID NO: 16445 - DNA, 428 bp, Glycine max
  Clone ID: LIB3040-002-Q1-E1-E2
gggaacgaaagagaatggagaacagggtaatattacaggaatggtttgaccgcgttgactcggagaaaagtggaagcataacagcggtacagctgaagactgctcttgctgtgggcaacctggaatttccgctctcagttgttcagcaaatgatcaggatgtacgatttcgacaggaatggtactatgagctttcaagaatttgttgcactcaacaacttccttcttaaggttcaacatgcattttctgatctagagaggggtcgtggttttcttgtacctgatgatgtatttgaggctttgggaaaaattggtttcatgctggattctcctgctttttactctgtctgcgagagctttgatcaaagtaaaaatgggaagtttcggctggatgacttaatatcaatctgtatattcctacaatcagca

SEQ ID NO: 16446 - DNA, 420 bp, Glycine max
  Clone ID: LIB3040-002-Q1-E1-E3
ggagctgacacatacaaacatccatcatcattattattttactccgaacgagttgacaccgattccactcactcaaccatgagccgattcaggcgttttgagctcatagaacaaccacctttcttccactcctgctactctttcccttccttcgtcctccaagactcactctctctcgacctcgacctcttgccacttcccagccacttcgacgctttcgcagatctggtgcacgcgccgtcgttcgcttaccggcgcgtggagaggcatctcgagaatgagttgcgtttgcagagcctctctgaccgtgtggcggagctggagtcgcggttcgaccgtgtgctcggcggagatcggaagtacacgtggacagcggagatcaagggagcggagaagaacgggttcgataagaagtacaag

SEQ ID NO: 16447 - DNA, 187 bp, Glycine max
  Clone ID: LIB3040-002-Q1-E1-E4
gggcatagcaaaatcgtgtctccaatttaatcaccattgtacaacccaattcccttcgtcgttttcgattaagagagcaatggcacgtaccaagcaaaacgctcgcaagtccaccggaggaaatgctccgaggaagcaattggcaaccaaagccgctcgcatgtcagccccggtcagcggcggagtg

SEQ ID NO: 16448 - DNA, 178 bp, Glycine max
  Clone ID: LIB3040-002-Q1-E1-E5
gtaaatgaaaattaactcggtattttatcaatctattttctactctctttttagaatttgtaaagtagaaaaatgggaatttaaaaatattagaaaaaaagaaaaaaaaattgaaaaaaattataaaattataatagatatatataatgaaatgattacattaaaacaatttttatac

SEQ ID NO: 16449 - DNA, 372 bp, Glycine max
  Clone ID: LIB3040-002-Q1-E1-E6
ggttcatctattttcatcatcacttccacacgtcctgtgccgagtacgattcccactcgcatcgtcatcatgattgggaccttactctggcatcattatcatctctttggtcacgcgaccttccgcattcacttttggccctgattatataactattactctcaagtaactcacagcaaacaccatttcacatcagtcaactcacgagaacgatcatcattgaaatcaatgagacatgcccggtgttattatatgtccagtgatagagtaaaatactgatgataattcattatattgaactgtatcatgttttctcccattatattattcttctctggcttacgctttggataatattggatcatcaagttt

SEQ ID NO: 16450 - DNA, 424 bp, Glycine max
  Clone ID: LIB3040-002-Q1-E1-E7
ccaacgcgtccgtagggtgccaaaagaacaaagaagggggtacttccattttcacatcacttccacacgtcctgtggcgggtaggactcccgcatgcatcgtcatcatcactgggatcttactctggcatcattatcatctctttggtcacgcgaccttccgcattcacttttggccctgattatataactattactttcaagtaactctcggcaaacacgatttcacattcgtcgactcacgagatcgctcatcattgaactgattgagacatgcccggtattattatcatgtccactgctagagtagaatactgaagatactcatgtagtggaagtgtatcatgttttctcccattaattttttcttcactggtctaagctttggatattcttggatcatcaactttagtgatccgaagatg

SEQ ID NO: 16451 - DNA, 419 bp, Glycine max
  unsure (1)..(419): unsure at all n locations
  Clone ID: LIB3040-002-Q1-E1-E8
ggtccacccgttcgttagatctaacaaccacttatcccctttctccttctaacgagtgaggaaaaatggcgcgtaagaagatcagagagtatgactcaaagaggttgttgaaggagcactttaagagactctctggcaaggagttgccgatcaagtctgcacaaattaccgcatcaactgatttcactgagctacaagagaaggaaccctggctttcatcttctaaattggttgttaaacctgacatgttatttggaaagcgtggcaaaagtggtttggttgccttgaatttggattttgcacaagttgtttcatttgtgaaggagcgtcttggaaaagaggttgagatgagtggatgcaaaggacccataacaactttcattgttgaacctttcatcncacacaatgaagagttttac

SEQ ID NO: 16452 - DNA, 229 bp, Glycine max
  Clone ID: LIB3040-002-Q1-E1-E9
cacactgagtatataaaaaataatctaagttcgattctcacataatacatccttggagaagagtgtgcaactttaagtgtgattaagtttcagatcaaagattaatcccataatcaactcaaagaaacgaaacttatgagaatactttagagtctcactggggaaccaagtcaaaaatatatattaaaagtttaccattttaaggcactaaaacctatcattaaggact

SEQ ID NO: 16453 - DNA, 354 bp, Glycine max
  Clone ID: LIB3040-002-Q1-E1-F1
ggccgaagaccctaagatcacaggcgcagagcgtgatccattgacgaagatggtgcagcgtctcacctagcgcaagatgcacagctatgccaccaagtccaagcaacacaaggtcgtcaaaacccctggtgggaagctcgtttatcagaccaccaagaagagggccagcgggcccaagtgccccgtcactggcaagaggattcaggggattccacacttgaagcctgcaaattacaagagatcaaggttacccagaaaccgtaagactgtcaaccgtgcatatggcggaattttgtctggaagtgctgtcagggagaggattatccgagctttcttagttgaacagcaaaagat

SEQ ID NO: 16454 - DNA, 409 bp, Glycine max
  Clone ID: LIB3040-002-Q1-E1-F12
gagatctgctgcttctcattgttgaaaagaaaccctagcaagtggagcaatggcagacgttgaagtcgatgtggcggcagcagcagcagcagggctgccgaagaagagaacgttcaagaagttcagttttcgaggcgtggatctcgatgcacttctcgacatgtccaccgatgaactcgtcaagatgttcagtgcccgcgctcgtagaaggttccagagaggcctcaccagaaagcccatggccttgatcaagaagctccgtaaagcgaaaagggaagctccaccaggtgagaagccagaaccagtacgcacccacctccgcaacatgattattgtgcctgagatgattggtagcattattggagtgtacaatggcaaaacctttaatcaggttgaaatcaaacctgag

SEQ ID NO: 16455 - DNA, 428 bp, Glycine max
  Clone ID: LIB3040-002-Q1-E1-F5
gatgccgaaaagtagtaccaagatggcttcagttgtgtatctcctctttggcttccatctcattgttatcttgtcaagttccttacccgcaactagtgaagtgtttgcaaaacagtatccatccacagaacccgtggaagaaaaactcacccaactccacttctatttccataacaacataacgggggaacacccaactgctatgaaaactgttttgcctcctaaggggtccattcatggttttggggctacttacatgatggatgaccctctaactgaaggaccaagtccaacttcaaagcttgtgggaagatctcagggaatatacgctttggcttcacaacatgagcctgggttgctcatggtgacaaattttctcttcactttgggcatttacaatggcagcaccctcagcattcttggcagaa

SEQ ID NO: 16456 - DNA, 421 bp, Glycine max
  unsure (1)..(421): unsure at all n locations
  Clone ID: LIB3040-002-Q1-E1-F6
ggaagtaagggatcgagcctcggaggagggaatcgcagcgaagtccactatgccgaagcaaattcacgagattaaggacttcctcctcactgctaggaggaaggatgcacgctctgtgaaaatcaagcggagcaaggatgtggtgaagttcaaggtccgttgctccaagtacctttacaccctctgtgtgtttgattctgagaaggctgataagttgaagcaatcacttcctccaggtttaagcgtgcaggatgtgtgattcttactgctgtatgaagatcaggtttttctctggattttggggattcatagttagtaaaatggttcagagaattttcgtatttgttgttacattcgggatcatgtnagtattttgtttaagacggattcaacttgcttggggaatatgtggctagttgat

SEQ ID NO: 16457 - DNA, 408 bp, Glycine max
  unsure (1)..(408): unsure at all n locations
  Clone ID: LIB3040-002-Q1-E1-F7
ggtagttccaccgagtagcaacaatgtcgaagcgaggtcgcggaggatcggcgggaaacaagttccgcatgtcgctgggtctgccggtggcggcgacggtgaactgcgccgacaacaccggcgcgaagaacctctacatcatatcagtgaaggggatctagggtaggctgaaccggttgccgtcagcttgcgtcggagacatggttatggccaccgtcaagaagggaaagcccgatctccgtaagaaggtgctgcccgccgtcatcgtccgccagcgcaagccttggcgccgaaaggacggtgtttacatgtacttcgaagataatgctggtgttatcgtgaatcccaagggtgaaatgaaaggttctgctatcactggtccaattgggaaggantgtgctgatctgt

SEQ ID NO: 16458 - DNA, 395 bp, Glycine max
  unsure (1)..(395): unsure at all n locations
  Clone ID: LIB3040-002-Q1-E1-F8
gggaaaggcaagagtgagagagaaatggagaatgcggaggagatgatgcagcaaaacgacgaggttttgtcggttgaacttccagctccttccggttggaataaactgtttttccctaagaaactgggaacaccaagaaaaagtgagattgtattcattgctccaactggagaggagatcagtaccaaaaaacaattggagcagtacctaaaggcacatcctggcaatcctgtcatttcagagtttgactggggaactggtgagacccctaggcgatcagcaaggatcagtgagaatgtcaagtcaactccaccagcagatagtgatactccaaagaaacgagctcggaaatcatcaggattaaagaaggataacanagaaactgaatctgcatc

SEQ ID NO: 16459 - DNA, 367 bp, Glycine max
  Clone ID: LIB3040-002-Q1-E1-F9
ggagagatgctaatgttgaacattggatcaatgtcgacgggggctagagtagttgctgtgaagaatgacttggcgaagttgcaacttacttcccctgtgtgcactagcaagggtgagaagattgcacttagtcgacgtgttgagaagcattggcgtcttatcgggtggggacaaatccaagctggaatcactcttgatgtcccccccgccccccatctgagttgaacactgatcacaagaaacaccagcagctataaaaaactgagatgaatttagatatgtgggaagggaggcaattgttgggaaacatttttgtgaagtggagaagaaaacgtttttttgattgttgtcttctattttgttttca

SEQ ID NO: 16460 - DNA, 383 bp, Glycine max
  Clone ID: LIB3040-002-Q1-E1-G1
ggtcttggtttatctaacaatggaagttctcttttgggggcatctggggcctctgctgtttctaagaatgacggaagtggtttggcaatgcacgaggttgttgttgaaaccggggaagaaaatgaggaagtggtttttaatgcacactcagtgttgtttgagtttgctgatggaagttggaaggaacgtggaaaaggataactgaaagttaatgtttccagtgaaaccaatacagccaaacttcgaatgacgtctaacggaaattttacattgattttgaatgcacgtctctaccctgatatgaagctcacaaatatggacaacaacggtgttacttttgcctgcatcaatagtgccagcgaacggaaaagtggtctttcaac

SEQ ID NO: 16461 - DNA, 435 bp, Glycine max
  Clone ID: LIB3040-002-Q1-E1-G10
agacgacagaaggggacaaaaaccaagtactacaagggaagaagaacttagctacaagctaaggaaggatcaaagagaatggctcaagcaatggcatcaatgactagcttacgtggttcctctcaggctgtgttggaaggtagccttggctccacacgcttgaatgtggggagtggaagcagggtggcctcagtcacacgtgcagggttcacagttagagcacagcaacaacaagtgaatggtggtgaggtacaaagtagccgtaaggcagtgctttcacttgttgctgctggtttgaccactggctcttttgttcaagctgtgcttgctgatgccaaacctatcaaagttggaccacctcccccaccttctggcggattacctggaacattgaactcagatgaaccaagagaccttaagctgccattgaaagat

SEQ ID NO: 16462 - DNA, 417 bp, Glycine max
  Clone ID: LIB3040-002-Q1-E1-G11
gattggcattgccagatgcacttgttctctctgctgatctctgctccttcttccactctgtttcgattttccacttccaaggataagcatccttatgagttatttttctcggctggtcaaagccattttttagttcctggtggaatagcattttcaactatggcgctctatggaaccaccttatccttcaatggaatttcttctactaccaaggagtttaatatcttaccatgctcattcaccagtagctttcggaagctacatcatgtttgtctaccttcctttactccaaacagattagttttgggcaaaagctttggaagaggagaccaactgtgtcttttacctggtcatatttcaaagttgcaaatgggaagattgagactgggagtaaaaagtgaagactctgagagcata

SEQ ID NO: 16463 - DNA, 401 bp, Glycine max
  unsure (1)..(401): unsure at all n locations
  Clone ID: LIB3040-002-Q1-E1-G12
gacacacagtgaatgaaggaagagagtatcatccatggcggccaccagagcagtaaccattgccagcaactccacatgctctctgcttgcaaagaaaacctttgtgggtggcactgctctttccctcaacaacctcaaattttgtcgtactaggaggtcttacacctgcagagccatctacaatcccctggttgtcgtcaaggaagaaggccaacccgaaacctttgattatagagttttctttgttgacaaatctggcaagaaggtttctccctggcatgatattcccttgcggttaggtgatgatatctttaacttcattgtcgagattcctaaagaatccagtgcaaagatggaggttgccactgatgagtctttcactcncataaaacaagatacaa

SEQ ID NO: 16464 - DNA, 388 bp, Glycine max
  Clone ID: LIB3040-002-Q1-E1-G2
gaaccaagtttgcttgcgtgtatattcattttagcatcaaggttgaatctcagagaaaaagaaacatcgacaagcatgtctggaagaggaaagggaggcaagggtctcggaaagggaggagccaaacgacaccgtaaggttctgagggataacattcatggaatcaccaagcctgcgattcgccgtctggccagacgtagtggcgtcaagcgtatcagtggtcttatctatgaagaaactcgcggtgttctcaagatcgttctagagaacgtcattcgcgacgctgtcacctacactgaacacgctcgccgcaagaccgtcactgccatggacgttgtttacgcgctcaagaggcacgggaggaccctctactgatttggcggttaga

SEQ ID NO: 16465 - DNA, 386 bp, Glycine max
  Clone ID: LIB3040-002-Q1-E1-G3
gaacgaagtttgcttgcgtgtatattcattttatcatcaaagttgaatctcagagaatgagaaacatcgacaagcatgtctggaagaggacagggaggcaagggtctcggaaagggaggagccaaacgacaccgtaaggttctgaaggataacattcatggaatcaccaagcctgcgattcgccgtctggccagacgtggtggcgtcaagcgtatcagtggtcttatctatgaagaaactcgctgtgttctcaagatcgttctagagaacgtcattcgcgacgctgtcacctacactgaacacgctcgccgcaagaccgtcactgccatggacgttgtttacgcgctcaagatgcacgggaggaccctctactgatttggcggtta

SEQ ID NO: 16466 - DNA, 383 bp, Glycine max
  Clone ID: LIB3040-002-Q1-E1-G4
gatgccgaaaagtagtaccaagatggcttcagttgtgtatctcctctttggcttccatctcattgttatcatgtcaagttccttacccgcaactagtgaagtgtttgcaaaacagtatccatccacagaacccgtggaagaaaaactcacccaactccacttctatttccataacaacataacgggggaacacccaactgctatgaaaactgttttgcctcctaaggggtccattcatggttttggggctacttacatgatggatgaccctctaactgaaggaccaagtccaacttcaaagcttgtgggaagatctcagggaatatacgctttggcttcacaacatgagcctgggttgctcatggtgacaaattttctcttca

SEQ ID NO: 16467 - DNA, 437 bp, Glycine max
  Clone ID: LIB3040-002-Q1-E1-G5
cagtaagagcatccgaaagggattacccaatcaggagacacagtatatgagttgtgtaagctatatgatctttcagcccttcggaatctcaccacgaactattactcatatgcaatcatcacgtcatccgctatgaatatcacactgaccattgcggatggcaatgctctctccctcaacaacctcatattttgtcattctaagacgacttacacctgcatagccatctacagtcccctgattgtcatcactgaacaaagcctacccaacaccattgattatacagttatctatgttgacaaatctggcatcaaggtttctccctggcatgatattcccttgcagttaagtgatgatatctttaacttcattgtctagattcctacagaatccagtgcaaagatggaagttgccactgatgagtctttcactcccat

SEQ ID NO: 16468 - DNA, 412 bp, Glycine max
  unsure (1)..(412): unsure at all n locations
  Clone ID: LIB3040-002-Q1-E1-G6
ggaagtaagggatcgagcctcggaggagggaatcgcagcgaagtccactatgccgaagcaaattcacgagattaaggacttcctcctcactgctaggaggaaggatgcacgctctgtgaaaatcaagcggagcaaggatgtggtgaagttcaaggtccgttgctccaagtacctttacaccctctgtgtgtttgattctgagaaggctgataagttgaagcaatcacttcctccaggtttaagcgtgcaggatgtgtgattcttactgctgtatgaagatcaggtttttctctggattttggggattcatagttagtanaatggttcagagaattttcgtatttgttgttacattcgggattatgttagtattttgtttaagacggatccaacttgcttggggattatgtgg

SEQ ID NO: 16469 - DNA, 424 bp, Glycine max
  unsure (1)..(424): unsure at all n locations
  Clone ID: LIB3040-002-Q1-E1-G7
ggcacttcaattgcaatcaaattagttcattctctttgcgcagttccctacctctcctttcaagatgcagatcttcgtcaagaccctcaccggaaagaccatcacccttgaggtggaaagctctgacaccatcgacaacgtcaaggccaagatccaggacaaggaaggaattcccccggatcagcaacgtctcatcttcgccggaaagcagctcgaggacggccgtaccctcgccgactacaacatccagaaggagtcaacccttcaccttgtccttcgtctccgtggtggcatgcagatcttcgtcaagactctcactggcaaaaccataaccctagaggtcgaaagctctgacaccattgacaacgtcaaggccaagattcaggacaagganggaatccccccagaccagcaacgtctcatc

SEQ ID NO: 16470 - DNA, 61 bp, Glycine max
  Clone ID: LIB3040-002-Q1-E1-G8
agaaggggattgcgattcacagaaaacaccaccaactcaacacagtcatcatcgtcactac

SEQ ID NO: 16471 - DNA, 370 bp, Glycine max
  unsure (1)..(370): unsure at all n locations
  Clone ID: LIB3040-002-Q1-E1-G9
gacaacacaacgcaacacaacgcgcactctctcttttctctcttaacacaaaaaccctatcgttcttcgcggtttcgccgattctcgccatgccgaaagccaaatccgacgccaaagccgccgatagccggttgaagcgcaagggcgctggtgctggaaggaagcaatcgaagaaagctgctaaggatcctaacaagccaaagagacctccaagcgctttcttcgttttcatgtccgagttcagagaacagtttaagaaggagcatcctaacaacaaatccgtcgctgttgtcngtaaagctggtggtgacaaatggaaatcgctgtctgatgctgaaaaggcccccttcgttgcacggccgaaaagaag

SEQ ID NO: 16472 - DNA, 294 bp, Glycine max
  Clone ID: LIB3040-002-Q1-E1-H1
aggggcagttcaagtgcaatcaaattagttcattcactttgcgcagttccctacctctcctttcaagatgcagatcttcgtcaagaccctcaccggaaagaccatcacccttgaggtggaaagctctgacaccatcgagaacgtcaaggccaagatccaggacaaggaaggaattcccccggatcagcaacgtctcatcttcgccggaaagcagctcgaggacggccgtaccctcggccgactacaacatccagaaggagtcaacccttcagcttgtccttcgtctccgtggtg

SEQ ID NO: 16473 - DNA, 264 bp, Glycine max
  unsure (1)..(264): unsure at all n locations
  Clone ID: LIB3040-002-Q1-E1-H10
cccacgcgtccgcccacgcgtccgcccacgcgtccggcggaacganaccacaaacacggctacaccagattaacttctctgaagacatcgctgttaatgactcgtcggttttgtttgaggatggtcgtggtggtcacttcatctagtatctttaagttgtatgctacttgtaacacgatcttgtccttgatcaagaacatctgatgagcactgatgtatggtcatggagcaggtacgtacattgctttcgtcagcgttactagg

SEQ ID NO: 16474 - DNA, 417 bp, Glycine max
  Clone ID: LIB3040-002-Q1-E1-H11
ggaacccttgcattctattcattcaagattcagcaagtgcgttttggaagcagagaccgaaatacttcgagatggcccgtacaaagcaaactgctcgtaagtcaactggaggaaaagctcccaggaagcagcttgcaaccaaggctgcacgtaagtctgcaccaacaactggtggtgtgaagaagcctcatcgttatcgccctggaactgttgctcttcgtgagattaggaaataccagaagagcactgagctcctaatcaggaagcttcctttccagaggttggttcgtgaaattgcccaggatttcaagactgatctgcgtttccagagccatgctgtgcttgcattgcaagaggctgctgaggcataccttgttgggctctttgaggacactaacttgtgtgccattcacgcca

SEQ ID NO: 16475 - DNA, 152 bp, Glycine max
  Clone ID: LIB3040-002-Q1-E1-H12
gcatccctacatgggcgtgacgcagcaggatcagacgcttaggacccgaaactgcgaagtttcccgtaaatctggagagacacgagaagtgactcgacgagaagtacctagctggcagtggacagcgaatgaagcatctttctcgtgcgcct

SEQ ID NO: 16476 - DNA, 226 bp, Glycine max
  Clone ID: LIB3040-002-Q1-E1-H3
cacataaggggttgtgtgtaattctgtatttatatgcaatagcgatgtagaaaaacacgttatgctgtttttgtatgaagggaatctgtatattggagatcagtctgacgcacctgagttgacttttgtcatttgggttacacggagttaactatatgtgattattccaaatatgccccaacaacacttccctttagacctctttttttttttttgtttctgtgat

SEQ ID NO: 16477 - DNA, 390 bp, Glycine max
  Clone ID: LIB3040-002-Q1-E1-H6
gattccattctctaaaccctaaacgactctatctctcttcgttttgttcttccttgcgctcctcctcgttcgttcgttctccctcgcgtagatcggcaatggcggagaccgagacgtttgctttccaggctgagatcaaccagctcctcagtctcatcatcaacaccttctactccaacaaggaaatcttccttcgtgaactcatcagcaacgcctctgatgctttggacaagattagatttgagagtttgacggacaagagcaagctcgatgctcagccagagttgttcattcatattattcccgacaagactaacaattcgctgaccattgttgacagtggcattggcatgaccaaagctgatttggtaaacaacttgggtacaattg

SEQ ID NO: 16478 - DNA, 261 bp, Glycine max
  Clone ID: LIB3040-002-Q1-E1-H7
cgggaatcataatcccgttgtaattcgacaaactgctctacaaccacacttcctcgatgtcaatgtcatgcgcactgtacctgaatagcacgtcgtttcgcctcacgcgccagtcgccttttccttttctccgccggcgcttcaatctacaggctttccgatcagtttcgccgttgagttctagcccctctgcatcactcttcgatctcagatggggcaagggaaggagttgattccatgacgttgagctgaacgtgcgcg

SEQ ID NO: 16479 - DNA, 333 bp, Glycine max
  unsure (1)..(333): unsure at all n locations
  Clone ID: LIB3040-002-Q1-E1-H9
ggcctacttcatctctcttataatcacacacacacctaccttaatagctatggaaactggaggctttcacggctaccgcaagctccccaacaccaccgctgggttgaagctgtcagtgtcagacatgaacatgaggcagcaggtagcatcatcagatcacagtgcagccacaggagaggagaacgaatgcacggtgagggagcaagacaggttcatgccaatcgccaacgtgattaggatcatgcgcaagattctccctccacacgcanaaatctcggacgatgcanaagaaacaaccaaagagtgcgtgtctgagtacatcaccttcatcac

SEQ ID NO: 16480 - DNA, 284 bp, Glycine max
  Clone ID: LIB3040-003-Q1-E1-A10
cagcaacattgatggcagcaacaagttctggcactcttaaagcaactcctttcctaggccaaggcaagggtgccaatgccaatgctcttacggatgttgtttccatgggaactgggaagtacaccatgggcaatgatttgtggtatggaccagacagagtgaaatacttgggacccttttcagctcagaccccttcatacttgaaaggagaattcccaggggattatggatgggacactgctggcttatctgctgacccggaagcatttgccaagaacaaggct

SEQ ID NO: 16481 - DNA, 165 bp, Glycine max
  Clone ID: LIB3040-003-Q1-E1-A11
acgaaagggaataccaataagttatcctccaatagttttccaggtacctcacggtttcaacctcaggagtttggaatccaggcaacgtcccttatgggaaccaccagttctggcactcctaaagcaactcccttcctaagccaatgcaacggtgccaatgccaat

SEQ ID NO: 16482 - DNA, 396 bp, Glycine max
  Clone ID: LIB3040-003-Q1-E1-A12
gaaagaaacagtgtttcatcatttgggtttcgcagaagagagagaaacccatttctagagagagaaactcgcagtcgcagacatgtcttccttcgatgccttcgccgacgacttgaacgtcaactcttcttccagtcgccagcacgacgatgacgaggacaacttctctggctacggcggctactcctccttcaccggaggattctccgccgacggagatgtcgccgtcgatcactccgccgccgcgtcgccggagatctacggcttcactgattcgaatcgcgcttactctcagtctcccttcgaatcggccaccgtagagaacgaaaacggaaacggatacggcgacggcgacggtgtttttgtctccgacggtccggtgcttcctccgccgac

SEQ ID NO: 16483 - DNA, 243 bp, Glycine max
  Clone ID: LIB3040-003-Q1-E1-A2
aggaggatggagaaataactagtggatcttcttcaaaatctgccccatctagcgatgaagattagcatgaagaggaaagagagtcaaaatgagatttgttcatgattagaatgatgttgggtaatcaagcagttgaattggatgattgtcacagagaaaataatttccatgcaaggtgactttatcaagggaagttacgctctttgatcattgatactgggagttgcactaatgtgcctaatg

SEQ ID NO: 16484 - DNA, 250 bp, Glycine max
  Clone ID: LIB3040-003-Q1-E1-A3
acacgaactaatgtatgccaatggttatatcgctgtaagtgaaacacccattagtcaatggttgctactacaactttagaatgatgagtgaggtactagtgtaacatcgtcgccatgatctactccaacattattgtcaaatcaacatcaacaggaaagacagtcaaaatgagatttcttcatgactaaaaagatgttcggtactcaaacagttgtattggatcattgtcaaagcgcaaaatattttcca

SEQ ID NO: 16485 - DNA, 408 bp, Glycine max
  unsure (1)..(408): unsure at all n locations
  Clone ID: LIB3040-003-Q1-E1-A4
ggtgtgtattaaaggattcccttctttattccttttgtaatttcattcattcttaatctttgtgaaaaataatgctcatcgagaattttaaggttgagtgtcctaatgtgaagtacaccgagactgagattcagtccgtgtacaactacgaaaccaccgaacttgttcacgagaacaggaatggcacctatcagtggattgtcaaacccaaatctgtcaaatacgaatttanaaccaacatccatgttcctaaattangggtaatgcttgtgggttggggtggaaacaacggctcaaccctcaccggtggtgttattgctaaccgagagggcatttcatgggctacaaaggacaagattcaacaagccaattactttggctccctcagccaagcctcagctatccgag

SEQ ID NO: 16486 - DNA, 384 bp, Glycine max
  Clone ID: LIB3040-003-Q1-E1-A7
gcactcactcagagaatagagaccagcttttgcttctttgtgaacatggagatgaggaaatcatgtggcttcttcttcttgctcctcctccttgtctttgcttcccaggtggtggtgcagactgagggaagagtgtgtgagtcacaaagccacgggttccatggtttgtgtaatagagaccacaactgtgctttggtctgcatgaacgaaggtttctccggtggcaggtgcaaaggcttccgccgccgctgcttttgcaccaggatttgttgagatctcatcaaacactactcttgccatgcaaattaataaatcaaagctaggccaaataaattgcatctaatctttagccatttgggagctagctacaaaaccaactcatac

SEQ ID NO: 16487 - DNA, 183 bp, Glycine max
  Clone ID: LIB3040-003-Q1-E1-A9
tagtaataattctaacaccgatgtcgtatgatatatgatgaacaaataattatatttgataaatatgtgattagaagtttaattcttaaatttggatgtataacgaaacatttattaagggagatagctagactctttaaataaattttcttaattcaataaattagtctttaacccataacc

SEQ ID NO: 16488 - DNA, 268 bp, Glycine max
  Clone ID: LIB3040-003-Q1-E1-B10
tgtctacgatctgctttctctgaactgtgacaatgtcgctcggagaaactgcttgttcatacgcagctctcatccgtcatgaagatggaattagtgtaactgctgacaagatcagcaccttgttgaaaactgcaaatgttccagtagactcttattggccaaccttgtttgctaaacttgctgagaagaaaaatcttggcgatttgatagcaaatgcggcacgcggtagtgcaccagttgctgttgcagctgcacctgttgctgcctc

SEQ ID NO: 16489 - DNA, 440 bp, Glycine max
  unsure (1)..(440): unsure at all n locations
  Clone ID: LIB3040-003-Q1-E1-B4
gatcaacatttgtctctcatctttcaatttcaatcaacggttatacccttttctatttgagcatcatcatgtccaccgcagcgcagcccaaggccaagaaaacggcgtcgtccaagaagcccctctcccatcctaccttcgccgcgatgatagcggaggcgatagcgagtctgaaggagagaaccggttcgagccaatacgcgataaccaaattcatcgaaggcaagcacaaggagttgcctccaacctacaagaagcttgttctcgttcatctcaagaagtctgttgctgctggcaagctcgttaaggtcaaaaactctttcaagctcgcaccgactaagtctgctcctgttaaagccgctgctgctcccaagaagcccaccanagctgcggctaagcccgccgccaagcccgcttccaagcccnaaagctgctgcact

SEQ ID NO: 16490 - DNA, 326 bp, Glycine max
  Clone ID: LIB3040-003-Q1-E1-B5
ggaaaagggttttacattttaatcgttctcccgtgtaacagagacacagagagagagtgtgaaaaaacgagaccatagagggaggagtctcccaaacgcgcatacctcgtgtcataatccgcgagctgatgagaggactactccacgttctagctcctcgacaacgacgcgactattaccaacacgctgctgcgcctcatgatcaccgaggtgccgacagtcgccatcgacctcgtcgagatatatgtacgcacctccgtgcgcacccaccagttcatcgctcacacacacgggctcattcacctcactaacgagcgagccatgtc

SEQ ID NO: 16491 - DNA, 413 bp, Glycine max
  Clone ID: LIB3040-003-Q1-E1-B6
aggggttgacaaaggaaacgtgtagtacgagggccaatttccaaaaaccttttgtctcgcaacctcacctcttcctccttcaatctctttcggaatttcccaaaatccttagtgggaggaagagatggttctgactcagaagattcacgaagctttcaaaggcaccgtcgagaggatcactggcccccgaaccgtttccgccttcaaagaaaaaggagttctcagtgtctccgagttcgtcaccgccggcgataatctcgttgccaaatgccccacctggtcctgggaatcgggtgatccaggcaagaggaagccatacttgccacctgagaaacagttcttgattactagaaatgtgccttgtcttcggagagctgcatctgttgaagaagaatatgaagctgctggaaggg

SEQ ID NO: 16492 - DNA, 405 bp, Glycine max
  unsure (1)..(405): unsure at all n locations
  Clone ID: LIB3040-003-Q1-E1-B7
gtactctcatatcttaaccttttgtctttctccactctcatattttcttctcttctcttcaacatgaccggtgttgctgatgaagcccccgttaccctcgacacgctgaagcaattaatggctcagttcgccaaagagagagactgggaccgttttcacagcccaagaaaccttcttttggctctggtgggtgaagtacgagaattgtctgagatatttcagtggaaaggtgaggttccaaagggtcttccagattggaaagaagaggaaaaggttcatcttggggaagagctttctgatgtgttgctttaccttgtcaggctctctgacatttgtggcgttgatcttggtaaagctgctttacganaggttcaactcaatgccatcaaatatcctgcaaaagtt

SEQ ID NO: 16493 - DNA, 311 bp, Glycine max
  Clone ID: LIB3040-003-Q1-E1-B8
gccccaaaacacaagagagagaagaaagacgaatggagggtgagggtgcagcagtgtggcaaggtgcggttttaggtggaataatcttctggcttgtttctgcttcataccttaacgctactcgcaaacttaggtctttcttacaaccttgggttactcatcacgttgacactcaaacccctattatcctcaagatccagagttacgggtttgggttcctggatgcacttttctctgggttgtcttgcgttgtttctgtgcccttttacactgcttttctccctctgctattctggagtggtcatggcaaa

SEQ ID NO: 16494 - DNA, 373 bp, Glycine max
  Clone ID: LIB3040-003-Q1-E1-B9
gacacttactagtagtaagcatggagtcctcaaagatctatgcttacctcttcctctgcatgatctttctctcttccgccactcccattctcggttgtggctactgtggcaaaccccccaaaaagcacaagcctggtaaaacaccaaagacacccaaaacacccgttgttatgccaccagtcaccatccctcccattaatgttcctcccgttgttcttccaccaatagtgaagcccccaggtattctccctccaattccaattattaacccaccaaccacaccagggaagggagggaacactccatgcccaccaccaaagtctcctgcgcaggctacgtgccccattgacacgctcaaacttggtgcctgtgt

SEQ ID NO: 16495 - DNA, 292 bp, Glycine max
  Clone ID: LIB3040-003-Q1-E1-C11
gacaccacctggttccgggtcacactacgtgcgcaggatcaagagccttctcatgcatcagccgattcaagtgtcttccgcctttcgcatgcagcagctgtagggaactcccatcgactctttggcgagataatcacaccaacagcaaaatgctcgttttttgctttgtgggtattgttcttgatcatttgagttgggaccatcgaccatggtgggtagattttcgagattctctgtcggaagaaatgtccacctgacagcgctaagtgccctgcatgacacggaagtgatg

SEQ ID NO: 16496 - DNA, 147 bp, Glycine max
  Clone ID: LIB3040-003-Q1-E1-C12
tgcgaaaacacgacaggggggaatacagaacatcgttgagatctagaagatctacatcatcagggtcttgaagcagctgcacgccgacatcgtgatctccagcgcggcggtgaggatcatgagacattttcatagacggcatcgtcg

SEQ ID NO: 16497 - DNA, 368 bp, Glycine max
  unsure (1)..(368): unsure at all n locations
  Clone ID: LIB3040-003-Q1-E1-C2
gacaccacctggttccgggtcacactacttgcccaggatcaggacccttctcatgcaacaaccgattcaagtgtttttcgcctttcgcaaacaacaactatanggaactaaaatcgaccctttggctagataatcacaccaacatcaaaaaaatcgttttttgctttgtgggtattgtttttttttttttgagttgggacaaaaaaacatggtgggtatattttcgagattctctgtcggaagaaatgtccaccgacgaacgcaaagttgcctggatgagaaggaagtgatgcccccaaacccagaagctgttgctgcagtggcaagtgctgcaactgccacttctcatggaattgaagtggctgtgg

SEQ ID NO: 16498 - DNA, 416 bp, Glycine max
  Clone ID: LIB3040-003-Q1-E1-C3
gatgccgaaaagtagtaccaagatggcttcagttgtgtatctcctctttggcttccatctcattgttatcatgtcaagttccttacccgcaactagtgaagtgtttgcaaaacagtatccatccacagaacccgtggaagaaaaactcacccaactccacttctatttccataacaacataacgggggaacacccaactgctatgaaaactgttttgcctcctaaggggtccattcatggttttggggctacttacatgatggatgaccctctaactgaaggaccaagtccaacttcaaagcttgtgggaagatctcagggaatatacgccttggcttcacaacatgagcctgggttgctcatggtgacaaattttctcttcactttgggcatttacaatggcagcaccctcagca

SEQ ID NO: 16499 - DNA, 360 bp, Glycine max
  Clone ID: LIB3040-003-Q1-E1-C5
gcactcccgcaactgctggctcaatccctcaatcccccaagaatttataatcctgaacgaagtcaaatttccaagctcccttgcgccctaagaggaagaaggtttgggtggactattttgttcagtttcgatggatccttgttatttttgtggtccttcccatctccttcaccatttatttccttacataccttggggatgtaagatccgagtggaagtcctataagacgcgtcagaaggaacatgatgagaatgtgaagaaggttatcaaacgtctcaaacagaggaatccatcaaaagatggtcttgtctgtactgctcgtaagccctggattgctgttgggatgcgaaatgttgact

SEQ ID NO: 16500 - DNA, 399 bp, Glycine max
  unsure (1)..(399): unsure at all n locations
  Clone ID: LIB3040-003-Q1-E1-C6
ggccctttcgcctacgcagagagaaattgagtttctgagataaccacttttctctttgattcatcaatggcaaccgcgaggaccgtgaaggatgtttcgcctcacgatttcgtgaaggcttacgcctcccatctcaagcgttccggcaagatggagcttcctgagtggactgatattgtaaaaacagcaaaatttaaggaattggctccatatgatcctgactggtattatgttaaggctgcctcaatggcaagaaagatttatttgagaggcggtcttggtgttggggctttccagaggatctatggtggaagcaagagaaatggaagccgttccccacatttctgcaagagcagtggggctattgcaagacacattctgcaacaattgcanaacatg

SEQ ID NO: 16501 - DNA, 390 bp, Glycine max
  Clone ID: LIB3040-003-Q1-E1-C7
gaatcaatcaatctcttctgtgaactgtgatgcatgcgagttgaaattgaatcgaaggcaaagcgaagaagatcaaagagagagaatggtttcgtatgtgaacatcttgctgtacggcgtgggagggttggtggtggcggggatggcattgctggtggcgtttcaggagaagctggtctacgttccggtgttgcctggcatcaccaagtcctacgccattaacccctctcgcctcagactcatctacgaagacgtctggctccaatcctccgatggcgttcgccttcacgcttggttcatcaagctcttccctaattgccgaggtccgaccattttgttttttcacgaaaatgctggaaatattgctcaacgtccaaaaatggtccgaat

SEQ ID NO: 16502 - DNA, 128 bp, Glycine max
  Clone ID: LIB3040-003-Q1-E1-C9
cttccaacagctgcaaaaaaaccacaaaagggtacggctgcaaaaaaaccaaaaaaggggaatttaaaaattggaactttaaccaaaaaaaaaaaaaaaaaaaaaaaaaaaaaaccggccccccaaaa

SEQ ID NO: 16503 - DNA, 347 bp, Glycine max
  Clone ID: LIB3040-003-Q1-E1-D1
gggcatgttactattctttcttcttccactactctactcattgatcgaaattcgaatgatcgctttctctgatctaaactaactgtgactgaaccggaaaatcaaccacccccaccatcattttcattctcattctcctctctctgttttttctatttcctttctttcttatcgctccccatttacttgttttttcatttttgcagggtttcttttgctcatcaccaccttcttcatattccctctccaaccatggacgtgggatcgtggagttcttctcactccaagatcaagtcgcgattcaccttccaagatcgcctcttccgcagaaagaattctcaggaaaa

SEQ ID NO: 16504 - DNA, 420 bp, Glycine max
  Clone ID: LIB3040-003-Q1-E1-D10
tattaagctgtaattaactgagattaaccacaacaaagttgattgagtgacaaaaaaaaaaaaaaaaaaaaaaaaaaaaaaaaaaaaaaaaaaaaaaaaaaaaaaaaaaaaaaaaaaaaaaaaaaaaaaaaaaaaaaaaaaaataaaaaaaaaaaaaaaaaaaaaaaaaaaaaaggggccgcccaaaaggatcaaacctaactaacccttgaaggcaacttaaaacccctccaaaagggccaccaaaatcaaatcaaggggccgccgtttaaaaactccgaaacgggaaaaacccgggcttaaccaaattaaacccccttgaaaaaaaccccccttccccaagcgggctaaaaaccaaaaaggccccaaccaatccccttcccaaaaatttgccaacccaaaaggccaaagggaaccccc

SEQ ID NO: 16505 - DNA, 271 bp, Glycine max
  Clone ID: LIB3040-003-Q1-E1-D11
ctcctccccttccgcgaagggtttaacccaacctcctccaaaattaaaggataaaggttaagagaaagggtacacacctatagtggggatagtccaaatttacactgggaaatctccaatcacagggcacaccatatataaacttttaggcgcttacaaacgtgttatagtgagatatttgaaagaaactgctcagataaaaactacgtctctcaaatatacccttgtgcgttaaaaaccttaagcgcaacctgtaataagaaacacaaat

SEQ ID NO: 16506 - DNA, 435 bp, Glycine max
  Clone ID: LIB3040-003-Q1-E1-D3
gattaccttcatctcgtcatcgtttcgttcaactttcaacgccagttcacactctctgcttcgcgtgtaccaacaagtgcaagttcgaatcaatggccagcgctcagctcacagcaatagcgtcatcgatctctacggcgtcgtttgaagggcttcgaccttccgctgttcagtttgcttccacgggcagaattagaattggcaatctctcccaaaggtccttccggggcttggttgtcaaagccgccaccgttgttgcccccaaatacactgcgataaagcctctgggagatagagtgctaataaaaattaaggaagcagaggagaaaactgagggtgggattttgcttccatcaactgctcaaacgaagcctcaaggaggtgacgtggttgctgttggggaaggaaagacagttgggaagaacaatgtagaga

SEQ ID NO: 16507 - DNA, 208 bp, Glycine max
  Clone ID: LIB3040-003-Q1-E1-D4
gaaatacatattctcttctcaaatttctcagtctccggaactcgtttctaccttcacttctcacatctcgaaccctctctttccggcaactaggttaaagttcatcaatggcaggtcgtggcaaaaccctatgatccatcgccgccaagaaggccacctcaaggagcagcaaatcctgcctccaattccccgtcggccgtatcgcccg

SEQ ID NO: 16508 - DNA, 353 bp, Glycine max
  Clone ID: LIB3040-003-Q1-E1-D5
ggtactccttcgacgatcgtcttcgccaatcgcctgcgtctctctctgaattgactagcttaaatggctggtcctaggattgcccatgctaccttgaaaggtccgagtgtggttaaggagatcataattggaataacacttggcttagctgctggtggtgtgtggaagatgcaccactggaatgaacagaggaaaaccaggaccttctacgatttactggaaaagggtgagattactgttgttgcagaggaacagtgaaaatgttcttgttttgttgcctatgctctccatttataggcttttttttcccgtgttatattcaattggctcttcaaatgtaaatgagccaacat

SEQ ID NO: 16509 - DNA, 384 bp, Glycine max
  Clone ID: LIB3040-003-Q1-E1-D6
ggggagagagaaaaaggagaaccttcttttctctctgttttgttgttattcttatttcagacctaaaaaccaaaagcaccgattctgctttctagaattacatcatcgtatcaagaaaaccttggaactacacgaaaatggtgtcggcgaacaaggagatggtcgtgtactgcttcgacaccctcctcgctcactacaacagcacggaagctccttcccctgccttcgattaggctcaacatccattgtttgttacatggaagaaagtggtgaatggtggagatcctcgtcttcggggttgcatcggaactctggaagcacgcagcttgattaatgggctcaaagattatgcactgaccagtgccctcagggaccggagatttc

SEQ ID NO: 16510 - DNA, 258 bp, Glycine max
  Clone ID: LIB3040-003-Q1-E1-D8
tatgtacagtattcgtaggcagatagtatagtacagcatgcacactcttgtggtagggtatgcgcattgtgcactcttctgtattcttacacttggatggatgattcttcccctaagttctagtgtttgtttattttttgtacaaataaaaaggaactaaaagagtgtagtgtggtgggtggtatctggcatggttgacggtgcaattatcattttgtttcggtcagaccaaatagaaaataaagagtacaatacagc

SEQ ID NO: 16511 - DNA, 170 bp, Glycine max
  Clone ID: LIB3040-003-Q1-E1-D9
gaagggataggaaaaaggaaaatgggaaaattattccggaaaccctaaccttggcaacccggaattgcccaatccgaacccggttgcctcctccacaaaagggtccgattcgccgccctcgccggtcccaaaaaattcaatccccaaaagttgcaactccccaatccatt

SEQ ID NO: 16512 - DNA, 404 bp, Glycine max
  Clone ID: LIB3040-003-Q1-E1-E1
ggtccctcttactaacactagggtttacagagaagcgaagaggcgcagccgtagcagtaactcgtggaattgctagcaatggcgaggatcaaggtttacgagctgaggcagaagacgaaggctgatctgttgaatcagctgaaggacctcaaggccgagcttgccttgcttcgtgttgctaaggtcaccggcggtgcacctaacaagctctctaagatcaaggtggtgaggttgaacattgcccaagttttgacggtgatttctcagaagcagaaggccgcgttgagggatgcctacaagaacaagaagtacttgcctctcgatctccgccctaagaagaccaggccattcgcaggaggcttactaagcaccaagcatcattgaagacagagagggagaagaag

SEQ ID NO: 16513 - DNA, 404 bp, Glycine max
  Clone ID: LIB3040-003-Q1-E1-E10
ggtgtgtagtataggattctcttctttattccttttgtaatttcattcattcttaatctttgtgaaaaataatgttcaccgagaattttaaggttgagtgtcctaatgtgaagtacaccgagactgagattcagtccgtgtacaactacgaaaccactgaacttgttcacgagaacaggaatggcacctatcagtggattgtcaaacccaaatctgtcaaatacgaatttaaaaccaacatccatgttcctaaattaggggtaatgcttgtgggttggggtggaaacaacggctcaaccctcaccggtggtgttattgctaaccgagagggcatttcatgggctacaaaggacaagattcaacatgccaattactttggctcactcacccaagcctcagctatc

SEQ ID NO: 16514 - DNA, 420 bp, Glycine max
  Clone ID: LIB3040-003-Q1-E1-E11
tgggagggttttgcgctgttgttgctgctcatcctccgtaacctccgagctctgcaccgaagaacgaagccatggggaagacacatggaatgggatctgctcgcaagctcaagtcccaccgcacgatgcatatgtgggctgacaagtcatacaagaaatcacatcttggaaatgaatggaagaaaccttttgctggttcatcccatgccaagggaattgtccttgaaaagatacgtattgacgctaagcagcccaactctgccattcgtaagttgtgccaggttcaacttatcaagaatgggaagaagattccgctttttgtcgctaatgacggttgcttgaactacattgacgagaatgacgaagtccttgatgctggatttggacgaaaaggtcatgctgtgggagaatatcctggtg

SEQ ID NO: 16515 - DNA, 360 bp, Glycine max
  Clone ID: LIB3040-003-Q1-E1-E12
atgcgcatgaaatttttcaatctcgagggagtccagcataatgggaaaggaaaatcacattcttgagatgtcatcaatgtgaagagaaagcttgtatgatataaatgaattacagaacaaatgactaaacattgtttacaccaaggacagcaacaagaaaatattgacagtatcttatattgatgtattcattccaagtctactatcccaaaattcgatagaaggatcttcacttgatcaacaaagtctgaacctgttgcatactctgttagcaaccctacagcaaaaccaaacattgcccatctgtagaaatgaaattactgattagtaagtcaaaatacagcagaacttgcaactgat

SEQ ID NO: 16516 - DNA, 239 bp, Glycine max
  Clone ID: LIB3040-003-Q1-E1-E2
tctgaccaagactacgctctagatccatcccacttcgagctcccgtcacagtcactcgtaaatgtgctccccatggcgaggatcaatgtttacaagctgcagcaaatcaccaaggctgatctgttcaatcagctgatagacctcaaggccgaacttgccctacttcatattgccaccgtcaacggctgtgcacctaacaagctctctcacatcaatgtcgtgacgttgaacattgccca

SEQ ID NO: 16517 - DNA, 382 bp, Glycine max
  Clone ID: LIB3040-003-Q1-E1-E3
ggttctagtgtgtgattgtttgttgttgtaactcgttcttcttcttttgttgttctgtgtttgtgtttgttttttctctcacctgaaaatgtcttgctgcggtggtaactgtggttgcggaagctcctgcaagtgcggcaacggctgcggaggctgcaagatgtacccagacttgagctatactgagtcaaccaccaccgagaccttggtcatgggagtggcacctgttaaggctcaatttgagggtgctgaaatgggtgtgcccgctgagaacgatggctgcaaatgtggaccaaactgctcctgcaacccctgcacttgtaagttaggtgttgggagaacaagcttcaagcagagattacccttaattaggaataatgat

SEQ ID NO: 16518 - DNA, 318 bp, Glycine max
  Clone ID: LIB3040-003-Q1-E1-E4
tcaatgcgacgttcacattcacgaatcgttgtcctcatatgatttgccatcgttgagggaagcgcgagagccctcgttgtgcacgatgagagcgaagtggaagacgaagcgcatgaggaggtctaacaggaatcgccgatggatgagacgaagatctaagtaggtgcttgaacagcgagtggagatgatgtgcttttccatctgcgagcagcttcatgacattttatgctgtcatggctcttatgataatcgtgacgtctagtggccatgggagcgttgatcatgactttattttagctttactggtctacagattgc

SEQ ID NO: 16519 - DNA, 356 bp, Glycine max
  Clone ID: LIB3040-003-Q1-E1-E6
gttctagtgtatgtgattgttgtgactcgttcttcttcgtcatgatcttcttcatttgttgtttgtgtgtatgtctttactctcaactgatgaatgtcatgctgcagtggtaactgtggttgctgaagcgcctgcaagtgcagcaacggctgctgaggcagcaagatgtacttagacttgagctacactgagtcaaccaccatcgagaccatggtcatgggagtggtaccagttaaggctcaattcgagagtgctgaaatgagtgttaccgctgataacgatggctgcaaatgtggatctaactgcacctgcaacacatgcacttgcaagtgaggtgtaggagagctaaagcttca

SEQ ID NO: 16520 - DNA, 428 bp, Glycine max
  Clone ID: LIB3040-003-Q1-E1-E7
gatacctaaaaattgtaccgatatggcttcacttgtgtgtctccttttttccttgcatttcatggttatcatgtcaggttccttaccagcaaatagtgaagtgtttacaaaagagtctcctatgtctctatccacaaaacccgtggaaagactcacccaactccacttttatttccataacaacaaaatgggggaacacccgactgctatgaaaattgttgagcctcctaaggcgtccatttctggttttgggactatttacatgatggatgaccctctaaccgaaggaccaagtccaacttcaaagcttgttggaagatgtcagggaatatatgctgaggcttcgcaacatgaacctgcgatactcatggtgacgaatttgttcttcactgaaggcatttacaatggcagcaccctcagcattcttg

SEQ ID NO: 16521 - DNA, 429 bp, Glycine max
  Clone ID: LIB3040-003-Q1-E1-E8
ggttctttgcgagatagaagagaaagccgtcgctatcctagtctcttcttcccctctacccatttcagtttcaggatggaatctcaggtgaagcacgcccttgttgtcaaagttatgggtcgtactgggtctagggggcaggtgactcaggttagagtgaagtttttggatgatcaaaaccgacacatcatgaggaacgtgaagggacccgtgagagaaggagacattctcaccctacttgagtctgaaagagaagcaagaaggttgcgctagaggatctcttcatggtttggctcaggacttaaacaaaacatcgttgtttttgttgtagttaaaggatgtcaaatgttaattgtcatggacctgaattatgcacctactatgtttgacattatgccattatgtgtgtggctgagttatgactaaatt

SEQ ID NO: 16522 - DNA, 78 bp, Glycine max
  unsure (1)..(78): unsure at all n locations
  Clone ID: LIB3040-003-Q1-E1-E9
ccctcttctaattcntctctcaaaaggactgaacgaaaaaaccttaaggttcctctgttcctcttcgccccccaaaaa

SEQ ID NO: 16523 - DNA, 436 bp, Glycine max
  unsure (1)..(436): unsure at all n locations
  Clone ID: LIB3040-003-Q1-E1-F10
ggtcctccgatagttaaaatataaccatgttacgttcaaattccaagccaatccccggcccaatccccttcctccttcccttttccctaaaaagatccaaaaacgtcttcaaaaaacaagccaataataaagggctgtcgattcccttcttccanaaaagaacatcanattcggggagtttgtggacgggaatggaaacgtagctgtcggtttgaagttgcataataaaccaagtaatgatggccttaaccgacagtttcctctagagattccgccgattctatttgaagagacttcacttccagcaggattgcacggttcacatactaaagatgtttatagtatttcagtgttgcctgangaagatgaaaatgcaaattgcgcttcaccactacctttcttgagcatcctaagggtttcctaatcaagttaaaag

SEQ ID NO: 16524 - DNA, 161 bp, Glycine max
  Clone ID: LIB3040-003-Q1-E1-F11
gaacctttttccccttcctttcacctcctcagcattcgtcagaaaaaccccataacccaaaaatgcctttcaaaaggtactttaaaattggaagggttgcccagtataccaagggcaaaaattacggccgcgccttaataattgtcaagttcattgaccaa

SEQ ID NO: 16525 - DNA, 111 bp, Glycine max
  Clone ID: LIB3040-003-Q1-E1-F12
gaatctttgttctcttcctttcagctcctcagcagtcatcagatatacgccactctccatgattgtctttcaagaggtaggtttagcttgggatggttgctcaaatgagct

SEQ ID NO: 16526 - DNA, 382 bp, Glycine max
  Clone ID: LIB3040-001-Q1-E1-E10
ggatcctagattaagccctagctagaggagagggtttaaagctctgaagcttctttcttcttctccaattaagatcgcagagagagatggggagtgacagcgaggcagagaaggagaagaagaagatgcttgcgctcgctcccattgctaaaccccttgccggaaagaagctttgcaagcgaaccctaaaacttgttcgtagagctgccgaacacaaatgcctgaaaagaggagtgaaggaggttgttaaaagcataaggagaggtcataaaggattgtgtgtgattgctgggaacatatcgccgattgatgtcatcactcatcttcctattctctgtgaagactctgacattccttatatttatgtcccatcgaaagaaga

SEQ ID NO: 16527 - DNA, 266 bp, Glycine max
  Clone ID: LIB3040-001-Q1-E1-A1
ggtgtgtagtataggattctcgtctgtattccttttgtaatttcattcattcttaatcattgtgaaaaataatgctcatcgagaattttaaggttgagtgtcctaatgtgaagtacaccgagactgagattcagtccgtgtacaactacgaaaccaccgaacttgttcacgataacaggaatggcacctatgagtggattgtcaaacccaaatctgttaaataagaatttagcaccaacatgcgatgttcgtaaattagaggtaat

SEQ ID NO: 16528 - DNA, 385 bp, Glycine max
  Clone ID: LIB3040-001-Q1-E1-A2
ggtccgaagccacttgagagaaaatggcggtgcctctgctctcaaagaagatcgtgaagaagagggtaaagaagttcaagaggcctcagagtgacaggaaaatttccgtcaagactaactggcgcacaccagagggtatcgattctcgtgttaggagaaagttcaagggatgcactttgatgccaaacattggttatggttcacacaagaatacccgccactatctcgctaatggtttcaagaaatttgttgttcacaatgtgaaggatttggaactgctcatgatgcacaacacgacttactgtgctgagattgcccacaatatatccacaagacagagaagagatatagtcgagagagccgcgcagcttgatgtagttgtgac

SEQ ID NO: 16529 - DNA, 178 bp, Glycine max
  Clone ID: LIB3040-001-Q1-E1-A3
aaggcatagccataaattctttgaataagaaaatggtatattatattatgatatatattggcttagctataatcactagaattattatatactaagtataaatatatagaaattccagtgattatagactatctttatataatagtataaataaattaaattcactgaccgtcaaaaa

SEQ ID NO: 16530 - DNA, 348 bp, Glycine max
  Clone ID: LIB3040-001-Q1-E1-A4
gaatctcccgtttctgactccctggaactggttgttggatccccgtggaagcatcataaggatgaagagcgtttcaagtcaaagcactgcaacatagtgagatctgactcataatttggcgacactctatgaaattatgaggttacctggattttgtgaggttgtcatggtattggagtcatggcgggtgaggttgtgggatttcaaaaggatcaaggcacacttgacaatggttctgacgtatgaacacctgtattgaatgacaacgataatggcaagctgcaatgttatgtgggatccgctgcggatgccatcagatttgggacacatggagaggaatctgcaaaa

SEQ ID NO: 16531 - DNA, 362 bp, Glycine max
  Clone ID: LIB3040-001-Q1-E1-A5
gataccagcaacaatttaatacctcaaaaatggttcactctctgctcctacttcatctcctcctcactctcactgcaacctctgctcaacatgacggcccttcgatcacagccaccatggagcaattctccggttacaaaatccacgaacctcactctttccaaccctcttcactctccgttgatgctcacgctcttcagaaccatattgatgagcttgcggcgtattctgactcacctgctccatcagtaaccagcgtcttgtatactgataaggatgttttacgtcgcacgtatgtaaaaacccacatggaacttgctggcctatctgtgacagaagatgctgttggtaacatatttggt

SEQ ID NO: 16532 - DNA, 365 bp, Glycine max
  unsure (1)..(365): unsure at all n locations
  Clone ID: LIB3040-001-Q1-E1-A6
aaagtggtaatgagcatggaggcaggcattggagtgatgggcaccaagttgggtatgatgagctatttcgaatccgacggagaggttgttcctgtcactgtcgtgggtttcaaagaaggcaacatcgtcacccagatcaaaactgaggccaccgatggatacgacgccgtccaggttggttaccgaagggtcagagatcgcaaattgaccaaacccgaaatcggtcatctccagaaggtcggcgccattcccatgcgccatcttcaggagttccgtcttcgagccatcgatggcttcgaccttaaccagcgccttgtttttgatgaaattttcaagganggtgatcatgttgatgtctctggcac

SEQ ID NO: 16533 - DNA, 437 bp, Glycine max
  Clone ID: LIB3040-001-Q1-E1-A8
gacaaagcctaactttcgagttctcgcatctcgcgcggttctctcggttctcggcgccggtgccgccgcgtctcgagactgttcgtcgattgcacggagccagagagcaattccgtcgcactctaagcctgcagcttcaacacgccgtcgtacctgaagcagttccgtcggactcatgccctaatctctgcatcgttgtttttcagtgatgggaaagatgcacaagaatatgaaacaagctggtgggcatggaactcgaagagaagacaccgatatgcacgaacatgaaatggacataaggaagattatgacagatgtggaaaatttaagctactcatatatgtcatggaaagaacgcagatggattgagaatagacatgttgtctctcatggtgggaagcccaaaagaatcagagattacctttacgtgtggcacg

SEQ ID NO: 16534 - DNA, 388 bp, Glycine max
  Clone ID: LIB3040-001-Q1-E1-A9
gacttcacaactcaaactgcttcattgcataattgcagataagatcaacccttctaccttcagattcgcgggaagatggcatcacttcatgctaatgtgacatcagttgtttacaacagtggcaaccgtgtttctcaatcgaaatttgcaagctcttccttcttgtctgggttcgatgttgttggtcgtgcttcaagtgcttggaagaaggaacttgtcccatcttccatttccttggtgcctagagccaccctaacatttgatcccccaactaccaattcagacataaccaagcaaaagaagcacactcttgaccctgcttctccagattttcgtcctcatccttcatttgaacagtgctttccaaagagcagcaaagaacacaggg

SEQ ID NO: 16535 - DNA, 103 bp, Glycine max
  Clone ID: LIB3040-001-Q1-E1-B1
aacgggatcaaggtttggctcccagcatacaaattcacggaacaggatctgtgcttaacgacattcgaatccacatgtccaccgcatcgcagcccaaggccac

SEQ ID NO: 16536 - DNA, 390 bp, Glycine max
  Clone ID: LIB3040-001-Q1-E1-B10
gatagtctgaggaaagtgagtgagagatagagatcgcagacacagagcagaatggcttctacccaatgtttcttgcaccaccatgctcttaccagccctgccagtgccagatccccatcactacgcatcttggttagcaccaagcctaaccagcttgtttgcaatgcacagaaacaacacacaccacacgaggatattgatgtcagcccaatctctcgccgtttagctctaactgtgctcattggtgctgctgctgttggctccaaagtccaacctgctgatgcagcctatggtgaagctccaaatgtgtttggaaagccagagacagacacagatttcctgccatacaatggagatggattcaaactatctattcgctcaaagtggaac

SEQ ID NO: 16537 - DNA, 367 bp, Glycine max
  Clone ID: LIB3040-001-Q1-E1-B11
ggtaagaaaacacaaacaacacaaaattcattgcacagtgttattttcagtatcagcatcatggctccaattgcagtgggagatgtcattccagacggcattttggcttacttggatgaagaaaacaaaccccaaactgtctctattcactctctcgccgccggcaagaaagtcatcatctttggggttcccggtgccttcactcctacatgcagcttgaagcacgtgcctggcttcattgagagagcagaagagctgaaaggaaagggtgtggacgaaataatctgtatcagcgtgaatgatccctttgtgatgaactcatgggccaaaacgttcccagagaacaagcatgttaagttccttgctg

SEQ ID NO: 16538 - DNA, 130 bp, Glycine max
  Clone ID: LIB3040-001-Q1-E1-B12
aaaaccttaggtcaggcggggtaacttccgtatttaaatcatggcaccaactgagatcggaaatgtcaatccaaacggcattttggccgacatgcgctaagatatcactcccatacactctcaattcaca

SEQ ID NO: 16539 - DNA, 435 bp, Glycine max
  unsure (1)..(435): unsure at all n locations
  Clone ID: LIB3040-001-Q1-E1-B2
gatgtggttgcgcctctgcctgtaagagtgaaaaaaccttctcttttccttctctcaagtctcaagagatttcatcatggctccaaagaaggacaaggctccaccaccttcctccaagcccgccaaatctggcggtggcaagcagaagaagaagaagtggagcaagggaaagcaaaaggagaaggtgaataacatggtgctgtttgatcagggcacctatgataagctcctttctgaagctcccaaattcaagctcatcactccttccattctttctgatcgtttgaggattaatggatcacttgcaaggaaggctataagagaattgatggctaagggttcaatcangatggtgtctgcccatgcaagccagcaaatttacaccagggcaacanacacctaagtgtggaactgatcttagcttacggagtattg

SEQ ID NO: 16540 - DNA, 335 bp, Glycine max
  Clone ID: LIB3040-001-Q1-E1-B3
cgggatagtgtgttaagcctcgccgactcggttgctatcagcgagtgagagtgagtgagtggttctcttgcagcaacacagtttagtgacaccaaacagacgggaaatgggtcgtggggtcagtgctggtggtggacagagttccttggattatctctttggcagtggggtacctgccagcagtgcaaatggtgctcgcactcaaaatgcaagtgctccatcaccaccggttgataagcaaagtccagcaccagcaccagcaccagcacctgcacctgcagcagcagcaccagcacctgcaccagcaccagcaccagcatcagctgataagcaaa

SEQ ID NO: 16541 - DNA, 57 bp, Glycine max; identical to SEQ ID NO: 12752
  Clone ID: LIB3040-001-Q1-E1-B5

SEQ ID NO: 16542 - DNA, 441 bp, Glycine max
  Clone ID: LIB3040-001-Q1-E1-B6
ggatcctttgtattcgattcttcaagattcaggtactgcgtttcggaagcagacacagatggctcgtacgaagcaaaccgctcgtaagtccacaggaggaaaggctcctaggaagcagcttgcaaccaaggctgcacgtaagtctgcaccaactactggtcgtgtgaagaagccccaccgttatcgtcctggtaccgttgctcttcgtgagattaggaaataccagaagagtaccgagcttttgattcggaagctccccttccagaggctggttcgtgaaattgctcaggacttcaagactgatctgcgtttttcagagcacgccgtgcttgcattgcaagaagctgctgaaggataccttgttgggctctttgaggacactaacctgtgtgccattcaggccaagcgtgtaaccattatgcccaaggatattcagctggc

SEQ ID NO: 16543 - DNA, 329 bp, Glycine max
  Clone ID: LIB3040-001-Q1-E1-B7
gatctggcagcagacaaacaagtagttgagaactaagaagaaggaaatggcttcctcaatgatctcctccccagctgttaccaccgtcaaccgtgccggtgccggcatggttgctccattcaccggcctcaaatccatggctggcttccccacgaggaagaccaacaatgacattacctccattgctagcaacggtggaagagtacaatgcatgcaggtgtggccaccacttggcaagaagaagttcgagactctttcctacttgccagacctcgatgatgcccaattgggaaatgaagtcgaataccttctaagggaaggatggattc

SEQ ID NO: 16544 - DNA, 400 bp, Glycine max
  Clone ID: LIB3040-001-Q1-E1-B9
gatagtctgaggaaagtgagtgagagaaagagatcgcagacacagagcagaatggcttctacccaatgtttcttgcaccaccatgctcttaccacccctgccagtgccagatccccatcactacgcatcttggttagcaccaagcctaaccagcttgtttgcaaggcacagaaacaacaaacaccacaagaggatattgatgtcagcccaatctctcgccgtttagctctaactgtgctcattggtgctgctgctgttggctccaaagtccaacctgctgatgcagcctatggtgaagctgccaatgtgtttggaaagccaaagacagacacagatttcctgccatacaatggagatggattcaaactatctattccctcaaagtggaacccaagcaaag

SEQ ID NO: 16545 - DNA, 131 bp, Glycine max
  Clone ID: LIB3040-001-Q1-E1-C10
aaatgatcttggcagcagagctctcagtacagctatcaagacgacgattaatgatgacacattcgtcgatggatgctccactaagagcatacgagcaatataaaagcggccgctcgacacgatacaggctt

SEQ ID NO: 16546 - DNA, 269 bp, Glycine max
  Clone ID: LIB3040-001-Q1-E1-C11
ttcatcagcgagacgcagcgaaacgggaatgccacgatcagacgcgaggtacatcctcaacagtagggtccgatgcgctgccatcgctattctcacatatttcaatcgctacatgtcgtaactctcataatcatttcaattggcatgaccaaacaatgctatatcaccaatatcactggaaacaggcagggaagaagaatcagccatatgacttcatgtggaacaggacctgggacaacaaccaacgggaacattactactagaactgg

SEQ ID NO: 16547 - DNA, 442 bp, Glycine max
  unsure (1)..(442): unsure at all n locations
  Clone ID: LIB3040-001-Q1-E1-C2
gactcactcatacaatagagaccagcttttgcttctttgtgaacatggagatgaggaaatcatgtggcttcttcttcttgctcctcctccttgtctttgcttcccaggtggtggtgcagacggagggaagagtgtgtgagtcacaaagccacgggttccatggtttgtgtaatagagaccacaactgtgctttggtctgcaggaacgaaggtttctccggtggcaggtgcaaaggcttccgccgccgctgcttttgcaccaggatttgttgagatctcatcaaacactactcttgccatgcaaattaataaatcatagctaggccaaataaattgcatctactctttatccatttgggagctagctaccacaaccaactcatacttggtcattggattgcttcnctttggcttctgcctttgcttatctctctacctctacg

SEQ ID NO: 16548 - DNA, 357 bp, Glycine max
  Clone ID: LIB3040-001-Q1-E1-C3
gaagactgcgacgacgatccatgtgatagactctcgtcgcgatggaacgtgtcgctgaatgcgagcgaattctgtacccagacttgactggatcctctgtagtcgctatcacgttcaacgatgggattctaatggccgctgacatgggatgttcgtagggatctaccctgcggtataagagtgttgagcgtatcatgcctattggaaagcattctcttcgtggtgctagcggggagatcagtgactttcaggagattctgcgtgaccttgacgagcttatcggatatgaccacatgtgggatgatgggaattcctcacggccgaaggatgtgcccaattatttaacccgtgtgaggt

SEQ ID NO: 16549 - DNA, 318 bp, Glycine max
  Clone ID: LIB3040-001-Q1-E1-C4
gaacacaccgcacttcaccgcccctcgtttcttcacactctgccgtgctctttcggcgcacgtcaagagattcgcaatagaaagtgagaaaaaaaaatgagtcgaggaagtgcaactgctgcgaacggcaagaagaacggtgcgacattcaccattgatttcgcgaagccggtggaggacaagatcatggacattgcgtctctccgagaagttccttcaagagaggattaaagttggtggcaaggccggtgctctcggcgacgccatcagcggtcgtacgtgagaagaccaggctcattgttacttccgacagcaaat

SEQ ID NO: 16550 - DNA, 384 bp, Glycine max
  Clone ID: LIB3040-001-Q1-E1-C7
ggcagaatcggaggtcaagccaaccactcaaaaacccacctgtgtgttgtcaccgttgcttcagttatcgtgtccatcgtcaccgccgcttcagctgccatgttgattgttgtcatcgcagtttgagctgagagcattgtttcgcctactcccttgcactgctgcttctttctccttcttcttcgcgtgtttggtctcctcgtgtctttgcgtctttcacaaaaccagcttctacgacctcccatcctcgaatacgtggtcgctctgcaagggcagcagcgccgcgcgagctcagaggactggaggagctcttggaagcgccgcgcgtcatcccctattagatgggatttgtttcgaaaatcttcctgagattattcaagaaaa

SEQ ID NO: 16551 - DNA, 371 bp, Glycine max
  unsure (1)..(371): unsure at all n locations
  Clone ID: LIB3040-001-Q1-E1-D4
gaccctagaatcccagttcaaaggtaaggtaggttaacactcttcttcatcgtcgtcgcaatgggacgtgtgatccgtgcgcagcgtaagggagcangctcggtcttcaagtcncacacgcaccaccgcaagggccctgcacgcttccggagcctggacttcggggagcgcaacggctacctcaagggcgtggtcaccgacgtcatccatgaccctggccgcggcgcgccgctcgccaaggtcgccttccgccaccctttcagatacaagaagcagaacgagctcttcattgccgccgagggcctctacaccggtcagttcatctactgcggcaagaaggccaccttgttgtcgggaacgttcctaccctg

SEQ ID NO: 16552 - DNA, 296 bp, Glycine max
  Clone ID: LIB3040-001-Q1-E1-D5
gccgttttggtttgttcgtcgccgctgcgagagagtgccctagctacctctcgagcttgccacctacgcgactgaaaagtccatttgtttttttctctcgcttttcgattgtgaaacagcgtcgcaaggagaaagaaatggatgagggaaagcataaatcgaggaaagaaaatcatgaggtgaaagatggggattctaagaggagtcaccgcgatcgtgaccgtgatagaactgacagagtaagagagaaagaaagagagagggaaagaaaagaggataaggagaggatcagagag

SEQ ID NO: 16553 - DNA, 423 bp, Glycine max
  Clone ID: LIB3040-001-Q1-E1-D6
ggggcgaggtagccagagagtgatacaatacagagtgcgttgttgctccttcgccacaactccctgccaacatgggtatctccagagattctatgcacaagaggcgtgccactggtggcaagaagaaggcatggaggaagaagagaaagtatgagcttggtcgccagcctgctaacactaagctgtcaagcaacaagacagtcaggaggatccgggttagaggtggaaatgtgaagtggagggcactgagattggatactggaaattactcctggggaagtgaagctgtaactcgcaagactcgtatactagatgtggtttacaatgcctcaaacaacgagcttgtgcgtactcagactcttgtaaaaagtgctattgttcaggttgatgctgctccattcaaacagtggtaccttcagcact

SEQ ID NO: 16554 - DNA, 421 bp, Glycine max
  unsure (1)..(421): unsure at all n locations
  Clone ID: LIB3040-001-Q1-E1-D7
gaaagacaaaaaacattatcttcaactcctttgctcgtgttgtgttttggatatttgagtgagagaacagtgaatgaggagttccaattcccatattcaatttcaaatgttcttctccatgcagcttctttgcttctacaagcacccaccaccactgtttgtacacaatattaatgaaggcatttttaagtacaagaggtttttcacaaacccttcttcttcttctcgtggcatagttcatgcagtgaaggaagattcacaatcacagcaatatgaggtagacccagataaagccagagaagcactcaaaaagcttgatgagcaaatccagtctctctccaataaaaaacaagtctccactccaaaactcagagtttcggacatgaagcttcncacagagcaagccagtcgcaatgatgag

SEQ ID NO: 16555 - DNA, 276 bp, Glycine max
  Clone ID: LIB3040-001-Q1-E1-D8
gactctcgctcaaagcataatacagtgagtttgatcttggttgggacgctcgacataatgtcgtcgacaatgcagaatcgtcattcatcctttacttcctctacagcgtcatctctgtgaacagcgacatgacttctatcttcggtgtcgttgtggtcgtcttcaggtacatgctaaagggttactactcagaacgtggttgtgaagatagcgctcctcgtcatcctcatgaatcggaggtacacgtcatcgtcttccacatcctctttggtgcaa

SEQ ID NO: 16556 - DNA, 101 bp, Glycine max
  Clone ID: LIB3040-001-Q1-E1-D9
tttcaaacgtactaaggtcaaacatttacattggtaaattaaccttgctgctctcacggattcaagttcacatatacgtacatggaacgtaaaagtccttc

SEQ ID NO: 16557 - DNA, 75 bp, Glycine max
  Clone ID: LIB3040-001-Q1-E1-E1
tgggacatctaaggtcacgcagcgctatcctctgagtttatgccttcctgtatgggagcgcgcgacccctcgtgg

SEQ ID NO: 16558 - DNA, 343 bp, Glycine max
  Clone ID: LIB3040-001-Q1-E1-C12
acgcgtccgccaacgcgtccggacgacagaagggggagttgagaggatcgtgagatgggcagtagccgagagtccgtgagttgcaaaaatgaagatcaggctttccaccgagaccatgaagatcacggacagcgtgagcatcaaagtccacgccaaggtcatccaagtttaaggccctcgcggaaggttggtgcgagacctcacgcatatgactcgcgattttcagcccatgactgacgagaaccgtactggaaagctgaacatccacgcgtggtttggttctcggaaagcattcaccgccattcgcagcgccttgagccatgtggatattcataccaccggc

SEQ ID NO: 16559 - DNA, 417 bp, Glycine max
  Clone ID: LIB3040-002-Q1-E1-D4
cacgcgtccgcacaggcgtcagaccgacactagaagacgacatacggagagatgctacatgaataaataacgtgatatcggtgaatcaagtatccttttgcatctgatctaagaatcaaaacgcaaagaccagattttgtcattacatgatcaacgttatagttcgtggaaatgacgatgatgacgcgtgattttggggatactatgcagaaagatgcaatgacggccgtgtcggctgataaaatatatgattctcttcggtttcctaattacaacatcagagttaacaatcagatcatggagacaaaggatagtccataagtgctatctatgaaggatgttgttgcgcgagagactgcacagctgttggaccagcagaaacgtctgtcagttcgcgattcttccagtaaaattgag

SEQ ID NO: 16560 - DNA, 155 bp, Glycine max
  Clone ID: LIB3040-002-Q1-E1-F3
gaaactgcggagtcacatggagagttcgatcctggctcaagaataacggctgcgtcgacaaggattacaagctgaccatacgcgatgcatagctacgtgcatcgagctttcgatacgggtcacctaaatcctattcaccggccgtcggatgggaa

SEQ ID NO: 16561 - DNA, 342 bp, Glycine max
  unsure (1)..(342): unsure at all n locations
  Clone ID: LIB3040-002-Q1-E1-H2
ggtttgtgtgtagattctgtatttatatgcaatagcgatgtaaaaaaagaggtgtatgctgtttttgtaggaaaggaatctgtatagtggaaatgagtctgaggcacctgagttgacttttgtcatttgggttacagggagttaagtagaggtgattattccaaatatgccccaacaacacttccctttagatttttttttttttttttgtttctgtgatattcatagtccctttagatgttttgtttcttcaacaggacaatgttttaataggttgaacaaatttcttaccccctttttggggcatagtatatgtgtgatttgtgtgtaaaaaaaanaaaa

SEQ ID NO: 16562 - DNA, 283 bp, Glycine max
  unsure (1)..(283): unsure at all n locations
  Clone ID: LIB3040-002-Q1-E1-H4
gagcaacatggtgaagctggcggagagatttacttgccagaagaatacgttagttccaagaggacttaaatggagcaaatcagttggaagaacttggagctagcttcccaactggcttatcagggtgtggagaagcattattaagccttaagaatangagagtaagtactgtttgtgaatgtctttggtttaagaactccgtcttatgtcaacttgtattctgttatacagttctcagcaataaactgctctggcaatctagtttcatgcaaaaaaaanaaaa

SEQ ID NO: 16563 - DNA, 79 bp, Glycine max
  Clone ID: LIB3040-003-Q1-E1-B12
gattgacctttggtcatcacaagcgaaaacccacttctggatcttctggtatggttcccctgttgcaaaaaaaaaaaca

SEQ ID NO: 16564 - DNA, 337 bp, Glycine max
  Clone ID: LIB3040-003-Q1-E1-C4
ggttatagtagcaagagccattggaattttttttttatacattggaagaatccatttttgttattaatagactagtaagaagaaaagaataactgagaaatcaaatagttattcatcaaagtctcaattattcaatgaccagaattaaacgaggatatatagctcggaaacgaaggacaaaaattcgtttatttacatcaagttttcgaggagctcattcaagacgtactcgaacgattactcaacagaaaataaaagctttggtttcggctcatcgggatagagatagcaaattcgatgggaggtgcagaaaaaagaaggcggccgctctagagga

SEQ ID NO: 16565 - DNA, 261 bp, Glycine max
  Clone ID: LIB3040-003-Q1-E1-D2
gtgatctctaactcactgttgagctagtcatacatcttcaagtgattgacgcattgttctatactcatttaattacattcgatgtacgtaatcgtgatggatatgccccgtttgttcaataaacttcaaccaacatttccggccgcacgagacgattcaagcttacgtccgcgtgcatgcgatgtcatacctcttcaatagcgtcaccctccctcatttccatggctcgtctttttacaccatctcgactgggaaaatcct

SEQ ID NO: 16566 - DNA, 65 bp, Glycine max
  Clone ID: LIB3040-004-Q1-E1-C10
gtacgggctgcgaaaagaagacgaaacagaaggggtacgggctgccgaaagaagacgaaacagaa

SEQ ID NO: 16567 - DNA, 352 bp, Glycine max
  unsure (1)..(352): unsure at all n locations
  Clone ID: LIB3040-004-Q1-E1-E4
ggcctcacaacagcagctgcagcagtaatggctcccaaacgaggtggaaaggctccggctcttgccgctaagaagaagcctgagaaggtcacgaatccgttgttcgagaagcgtccgaagcagttcggaatcggaggggcgttgcctccgaagagagacttgactaggttcgtgaagtggccaaagaatgttcaaattcagaggaagaagaggattctgaagcagaggttgaaggttcccccagctttgaaccagtttaccaaaactcttgacaaaaacctagcaacaagtctgttcaagttgcttctgaagtacaggcccgangacaaagctgaaaagaaagagaagctct

SEQ ID NO: 16568 - DNA, 204 bp, Glycine max
  unsure (1)..(204): unsure at all n locations
  Clone ID: LIB3040-004-Q1-E1-F10
caataaaaaaaacttcgtaccccattgcccagaggctcttcgttatgcgaaggtatgggggagggatattgtacgcagccttacccttgcatatgcaaagaggctgtttccggattcgaacccatgaccaacaagtcaccaaggcacaactttaccgctgcaccagggctcgccctccgaacacaatatacannnnanaaaana

SEQ ID NO: 16569 - DNA, 151 bp, Glycine max
  Clone ID: LIB3040-004-Q1-E1-H8
tcccgggtggccccacgcgtccgcccacgcgtccgaaggatgtcagggatttcaattttgagattcatcggttgtaatggaggataatgctagccccctagtagtatcaatcatagcaggacctgttttgtgatgttccttaatttgtttg

SEQ ID NO: 16570 - DNA, 151 bp, Glycine max
  Clone ID: LIB3040-005-Q1-E1-B2
caaaaggttcaagcctaagttagccttgaagggaacttcaaacccctccaaaatggccaccaaaatccaatcaatgggcgtccgtttaaaaactcctgaactggaaaaacctggcgttaaccaacttaaacccccttcagcaaatccccct

SEQ ID NO: 16571 - DNA, 366 bp, Glycine max
  unsure (1)..(366): unsure at all n locations
  Clone ID: LIB3040-005-Q1-E1-B6
ggagagtcagattcgcacgcattgcttcgcctcacaacagcagctgcagcagcaatggctcccaaacgaggtggaaaggctccggctcttgccgctaagaagaagcctgagaaggtcacgaatccgttgttcgagaagcgtccgaagcagttcggaatcggaggggcgttgcctccgaagagagacttgactaggttcgtgaagtggccaaagaatgttcaaattcagaggaagaagaggattctgaagcagaggttgaaggttcccccagctttgaaccagtttaccaaaactcttgacaaaaacctagcaacaagtctgttcaagttgcttctgaagtacaggcccgangacaaagctgaaaag

SEQ ID NO: 16572 - DNA, 394 bp, Glycine max
  Clone ID: LIB3040-006-Q1-E1-C4
acgcgtccgacaactgatagatacagatgcaaggggcatacacaaggggttattccacttgttgcattgtacttaggcaagagtattaggcaacggagtcttctctaacatcaacgacacttgctcatttgctaaccaacaatttgcgtttctttgtcatcgcaaatggctgctagacatgtacacaccataagccaaaccgtatccgattcccttacgctgagcttagtcgtgccgcgaagaactaccccagggaaccacataatcctcgagtgtgcgcaaacttgcatactggaccaagtggtgctacagtggggtcaccacgcgatcacccatgttgctcagtgccagaatggtatcctgatcttgaagttaccattagcctcagcactgt

SEQ ID NO: 16573 - DNA, 167 bp, Glycine max
  unsure (1)..(167): unsure at all n locations
  Clone ID: LIB3040-006-Q1-E1-D10
tgagactcaggtcaggcggggctacgcgctgagtttaagcatatcactaagcggaggagaagcaagaanacggccgctcgaaaagatcggacgctctatacgattgaatctgacgtccgcgtgcatccgacgtcggagctctactcaagtgtcacccaattgcaatt

SEQ ID NO: 16574 - DNA, 459 bp, Glycine max
  unsure (1)..(459): unsure at all n locations
  Clone ID: LIB3040-006-Q1-E1-D4
ttcaagggtcaaccaacccttcgttaaggttgcaaaagaagaacagaaggatacggttgcaaaaaaacaacagaagggaatcaatccatacattaaaaacaacctttggcttctttgtaaacatggaaataaggaaatcaggtggcttcttcttcttgctcctcctcccttgtctttgcttcccaggtggtggtgcagacggagggaagagtgtgtgagtcacaaagccacgggttccatggtttgtgtaatagagaacacaactgtgctttggtctgcaagaacgaaagtttctccngtggcaagtgcaaaggcttccgccgccgctgcttttgcaccaggatttgttgagatctcatcanacactactcttgccatgcaaattaataaatcatagctaggccacataaattgcatctactctttatccatttgggagctagcctacacaaacaactc

SEQ ID NO: 16575 - DNA, 173 bp, Glycine max
  Clone ID: LIB3040-006-Q1-E1-D6
taccgctcccataagacgacagatgggggcatccagtttatccacgaactcactgtgacagccacttgtgccaaacctcaagtccctcacactcggctgctctacaggctccacgcctacatcagcgtgcatgcaacttcatatctcttctatgttgccacctaaattcaatt

SEQ ID NO: 16576 - DNA, 215 bp, Glycine max
  Clone ID: LIB3040-006-Q1-E1-F4
gacactactaacatttctctcaaatctgtggtgctgcatttcaattgcctccgcttccacctcgcaaccatcagcagctctagaggatacacgcttagatatccgtgcatgccacgtcatagatcgactatgctgccccataaatgccattcactgggcgtcgcattaagacatcgagatggcgaatcagctggtgttacccctgatacacactt

SEQ ID NO: 16577 - DNA, 88 bp, Glycine max
  Clone ID: LIB3040-007-Q1-E1-A7
ggagagaagctggtgactgactttccaaatcactcctggtgaagaacactcagagtgcggtcgctctagaggatccaatcgtacctac

SEQ ID NO: 16578 - DNA, 71 bp, Glycine max
  Clone ID: LIB3040-007-Q1-E1-C1
tagaggattcaagcttacgttcgcgttcaatccaagtcataactcctccaaaatgtcacccaaattcaatt

SEQ ID NO: 16579 - DNA, 346 bp, Glycine max
  Clone ID: LIB3040-007-Q1-E1-F5
cacgcaaccgtacagcagcgaaagggacactgaaggggaccttactagctattagctcaagatagaaatacttctaataccccgttgtcctagcgcttcactagtgtcatccaaaatagcatcaaaagtaccgacaatcagttacaaggaaagtcaagactctacagtgacattcgaatccttaaagtcaaagttgccgacgttcaggtcccgatcgctacattaggctgaagtcccaaatacgctgcaataccactacgttgacaagtcctcaaccattacacactgatcagcaccatggtcataatcaaaagacttccgatccctatgattatcatgatcatgt

SEQ ID NO: 16580 - DNA, 271 bp, Glycine max
  Clone ID: LIB3040-007-Q1-E1-F9
attcacgggctgacgcacgcgtcaatacggatgcaaaaaaacaacaaaaggggagtctcatatctgactcacatcgtcatccattttgctcctttcaatcaataccaacaccttctttgctctcatgctcatctataccttcaacgtttcatgtctaactttaaccttcactgatttcgtgctccattctgtatgtaaccctcatgacaatggtcgtatacattagaacatgtctgacataaaaccatttattgtaaaaccgaacatccct

SEQ ID NO: 16581 - DNA, 303 bp, Glycine max
  Clone ID: LIB3040-007-Q1-E1-G5
cacgcgtccgcccacgcgtccgacagcagcgaaaggtccagatgcgggggaactaccacatgctaccgtcgatcaacaataatattttgcgacaaatcaggtgacgccgagtcaactcacgcattcatgcatcgattcaggcgttttgagctcatagaacagccacctttcttccactcctgccactctgatccttccttcgttctccatgactcaatctctctcgacctcgacctcttgccacttctcaaccacttcgacgctttctcaaatctgttgcacgcgccatcattctcttatcag

SEQ ID NO: 16582 - DNA, 111 bp, Glycine max
  Clone ID: LIB3040-007-Q1-E1-G9
attcacgggccgaggcacgcgtccatacggacgtcagaagaggagagaggggggcatcgccggggagccaggccaatagtggcttcaatgcgtgcttcgtggtcacctcat

SEQ ID NO: 16583 - DNA, 72 bp, Glycine max
  Clone ID: LIB3040-007-Q1-E1-H12
actcaatagtgagtcgtatgatctgtacggtggaatcttacgtacgcatggttgcgacgtcaaaactcttcc

SEQ ID NO: 16584 - DNA, 122 bp, Glycine max
  Clone ID: LIB3040-007-Q1-E1-H7
ggaaagaaaaagcaagccaacgtctctcatgcaattatggaggactttgagagaggaccaaggtaccacgcatacgctgcgttgagggaaacaaagcttcgcatgaggcaaaaaaataaaaa

SEQ ID NO: 16585 - DNA, 348 bp, Glycine max
  Clone ID: LIB3040-008-Q1-E1-A6
aacggttccgcttccaaaagaacacctaacggttccgctgccaaaagaccaccaaaagggtttcacgtcaaaatgataactgtccggtccttttaataatggaaatttacattatcacatccaatgatacatgtcgcaattaagattcacaaacggctgctctacaggatccaagcttacctgcccctccatacgatctcagctcacttccacattctcaccacatctcagctcatcgaccgtctcatcacaatttcattccctggacatccttttactacctcatcataggcaccatcctgcacattcccaattcactcgccgtcctactaatcaccatttccccac

SEQ ID NO: 16586 - DNA, 158 bp, Glycine max
  Clone ID: LIB3040-008-Q1-E1-C2
tgagacctcaggtcaggcggagctaccccctgagtttaagcatcccatatgcaaaaaattcacaatcatcagtcaagcggctcgctctacatgatccaagcttaattacgcttgcatgcaacatcctagctcttctagactgtcacctaaattcagat

SEQ ID NO: 16587 - DNA, 114 bp, Glycine max
  Clone ID: LIB3040-008-Q1-E1-C3
ccagaatttcaccagcccaaaaaaaacaaaaaaagaggcagcaccagacgatccaaacgatccaaatccacctacgcgtgcacgcgacctcaaaacgcttccacaacgacacca

SEQ ID NO: 16588 - DNA, 407 bp, Glycine max
  Clone ID: LIB3040-008-Q1-E1-D4
cggtcacgaattaccgggctgacccacgcgtcaggcgagaacacgacagccaggaagagtgtgcttggtgctcccagatcgtcctggaggatcctgtcatccattcaacaccacgcatatactaacgggaactacttgagtgccaaccagcatattgagtacatacggacagttgaattggatctagccatcatctgctgtgatgttatgatagtgattgatgagcaccttatgccttctgctgcaactggtgaatccaccgtcttttactatcacatcatacgacattattatcgttatcttgctaaatttcagtcaagccctgacaccaacgaagctgctgatcagtctactatagcatctgagtctgctaccgctgcattcacaagctgatttacctcccacac

SEQ ID NO: 16589 - DNA, 197 bp, Glycine max
  Clone ID: LIB3040-008-Q1-E1-G1
tacagtgacacaatccgtgagtttccgtaacattttgaaagctaaaaaaggagtaattacataagatgtatggttccgtaaccttacatgcgacgtcataactcttcaaaaataacacggacgctcaatacgatggaagcctacgtacacctgcatgccaggtcaaaactcttcgatactgtcacctaaactcaatt

SEQ ID NO: 16590 - DNA, 113 bp, Glycine max
  Clone ID: LIB3040-008-Q1-E1-G2
tggggaaaatgtactactaccgtggcataaacaaaatgaaaatgtaggtgctgaaatgtttcttatcttggttacaataaagtgattttgctgattccaaaaaaaataaaaat

SEQ ID NO: 16591 - DNA, 269 bp, Glycine max
  Clone ID: LIB3040-009-Q1-E1-A6
ggaatgtggcagtcatattaaacaatcaaaacccaaggtagatataatccagctacaaggcaaaattcattctcatggaataacccaaaatgagatgcataagatctatgaatcttgcaactcattgtgaaacatgctgcataactctgtgttctaacaaaagattgtgatgatcctaaccatgttaaactggataatgccctttgtccaaagctcaatgtgaccatgctgaaagttaccattacactgaaccttgtttacttgactgg

SEQ ID NO: 16592 - DNA, 99 bp, Glycine max
  Clone ID: LIB3040-009-Q1-E1-F4
gatatatattggcttagctataatcactagaattattatatactaagtataaatatatagaaattctagtgattatagactatctttatataataatat

SEQ ID NO: 16593 - DNA, 113 bp, Glycine max
  Clone ID: LIB3040-010-Q1-E1-B6
aaaaggccaacggaaggtacggtagcggcaagaccattatacggactcacgaaatatataacgcgaagaaagcagaaaaaatcggcggctctagaggattcaagcgttcgctc

SEQ ID NO: 16594 - DNA, 55 bp, Glycine max
  Clone ID: LIB3040-010-Q1-E1-D4
gaggtaccgctaccatgatacgatacaagggtacggccgaaaagaccacatacgg

SEQ ID NO: 16595 - DNA, 188 bp, Glycine max
  Clone ID: LIB3040-010-Q1-E1-D9
ttggagaataaaaaaaaaaaaaaaaaaaaaaaaaaaaaaaaaaaaaaaaaaaaaaaaaaaaaatatttaaaaaaaccaaaaaaaaaaaaaaaataataaataaaaaagcggccgccctaaaggttccaaccttacttacccttgaatgcaacttcaaaccccttcaaaagtgtcacctaatttcaatt

SEQ ID NO: 16596 - DNA, 221 bp, Glycine max
  Clone ID: LIB3040-010-Q1-E1-E10
caggtgcgaaaagaacagaaaagggttgccaatcacatacttggaaagcaaactatatctcagggtaacattcatcaattcagccactgttactcagatttccttacgcgaaaataaaaaaatgcataaaaaacaaaagagcggacgcacgagaggatccaaacttacgtacgagtgcatggaacgtcatagatcttctagagtgtcacctaaatacaatt

SEQ ID NO: 16597 - DNA, 154 bp, Glycine max
  Clone ID: LIB3040-010-Q1-E1-F2
gaataaagaagaaaacaaaaaaaaggtaaagatgaaaagaaaaaaaaaaaagggaaagagataataaaaagcgggcgctccaaaggattcaagcttaagtacgcctgcatgcgaagtcaaagctcctccaaaagggcacccaaattcaattcaa

SEQ ID NO: 16598 - DNA, 155 bp, Glycine max
  Clone ID: LIB3040-010-Q1-E1-H6
caggtaaccactgatttacgtaggtcatttatcaaccccccccccaaaagggacgctcaagaggatccaagcttacggacgctcgaaaggatcgacgcttacctacgcgtgcatgagacatcataactccactagactgtcacctaaattcactt

SEQ ID NO: 16599 - DNA, 264 bp, Glycine max
  Clone ID: LIB3040-011-Q1-E1-D8
gattctatatttcacgttttcacactcttatacatcattctcaacacattcacaacacaatcattattgccattctatctggtcgtggaaagggtggaaagggtttgcggacgcgcaagtaggatccaagcatacgtacgctcttatgcaacgtatcaacggctaccatagtgtcagctaatctcaagtcactgaccgtcggtttagtgcatcggatcagtgaattgcttgacgatgcccaccttagacttcttgcaatatacc

SEQ ID NO: 16600 - DNA, 58 bp, Glycine max
  Clone ID: LIB3040-012-Q1-E1-B3
ataagctgtaagaagaggagagaaaggtaaatagatagtaaggaacattaactcataa

SEQ ID NO: 16601 - DNA, 312 bp, Glycine max
  Clone ID: LIB3040-012-Q1-E1-B5
ccctgaaagcaaaggtggcggaggcaatggacgtcctaagaaatgttgctcagcaacaggctggcggtactgcggatcagctggcttcattatctcttaatgacaaccttgtttcttaaggtttatattttggatttatttagtgacgatgggttgttattttcggcactggctctgatacagtttcaggttgagtttgtttcgttagattagacacttttggtttgttatggaccaccaccttcttttggttgaagggcacttcaacactgattttaattatgccttgcatttggtgtaaaaaaaaaaaca

SEQ ID NO: 16602 - DNA, 273 bp, Glycine max
  Clone ID: LIB3040-013-Q1-E1-C7
cggtacttctcctacaaaaccacacactggtaccgtcgctacaagacgacacatcggtactgtctgccacaacaccacactatggtactgctgcgatacaatcacagaaggggatgagggtaatgtgtaggatgttgatgaaaaggttcattcctcttcattgaaagaaatgcggccgctcatatacgatccaatcttatctacgcgtacatgctacgtcacatctcttctatattgtcacctaacttcacttcagtggtcgtcgttttacaa

SEQ ID NO: 16603 - DNA, 210 bp, Glycine max
  Clone ID: LIB3040-014-Q1-E1-C5
ttgagattccaatacactcacattagggataacgatagcatcatcttactaatctatttctctcactctaatccactttcaactcgctcttgtctttcttatggccactctaaatgctccaaacttatatttccatacctatctgatcaattatcgtctatagtgttagttacgatcgactaattgactgtctttgtacaaggtttgatc

SEQ ID NO: 16604 - DNA, 356 bp, Glycine max
  Clone ID: LIB3040-014-Q1-E1-D4
gagagtcagattcgcacgcaatgcctcgcctcaaaacaacagctgcagcagcaattgctcccaaacgacgtggaaaggctccggctcttgccgctaagaagaagcctgagaaggtcacgaatccgttgttcgagaagcgtccgaagcagttcggaatcggaggggcgttgcctccgaagagagacttgactaggttcgtgaagtggccaaagaatgttcaaattcagaggaagaagaggattctgaagcagaggttcaaggttcccccagctttgaaccagtttaccaaaactcttgacaaaaacctagcaacaagtctgttcaagttgcttctgaagtacaggcccgaggacaaa

SEQ ID NO: 16605 - DNA, 121 bp, Glycine max
  Clone ID: LIB3040-014-Q1-E1-D8
attactattactgatcaatcaaaatatctatcaaaagtaaaaagcgaagagaagggaaaaactttaatttttttatggtaaaaaattcaattatacctgttatttcacaaaaaaaaagaaa

SEQ ID NO: 16606 - DNA, 330 bp, Glycine max
  unsure (1)..(330): unsure at all n locations
  Clone ID: LIB3040-015-Q1-E1-G12
ggagagtcagattcgcacgcatttgctcgcctcacaacagcagctgcagcagcaatggctcccaaacgaggtggaaaggctccggctcttgccgctaagaagaagcctgagaaggtcacgaatccgttgttcgagaagcgtccgaagcagttcggaatcggaggggcgttgcctccgaagagagacttgactangttcgtgaagtggccaaagaatgttcaaattcagaggaagaagaggattctgaagcagaggttgaaggttcccccagctttgaaccagtttaccaaaactcttgacaaaaacctagcaacaagtctgttcaagttg

SEQ ID NO: 16607 - DNA, 327 bp, Glycine max
  Clone ID: LIB3040-015-Q1-E1-G2
aaatcttcaatttaaacaactctctagtcaaaattgaaacacaaggtctgcttagtgtcaactgagacaaaagatacaaaataacaaaacacaaaatatagaatctatgctttttaaaaaagttttcttcaagaataaccatagagctgcctaagtactagtactaccctagataatcccaatcttgtttgccacatccaatgcatcgtaatcaggtgtcaacctgacatatgccttcttggtgccatcaggcctgatcaaggtgttcacttttttggcctggatgtcatacattttcttcaccgcatccttgatcttcttcttgtc

SEQ ID NO: 16608 - DNA, 111 bp, Glycine max
  unsure (1)..(111): unsure at all n locations
  Clone ID: LIB3040-016-Q1-E1-B4
cagaanagaagcaaaaaaaacaaaaaaaaagcgggcgccccagaaggttcaagcctaagttacccttcaagccaagttcaaactcttccaaaagggcacctaaattcaatt

SEQ ID NO: 16609 - DNA, 121 bp, Glycine max
  Clone ID: LIB3040-016-Q1-E1-D6
agatgttgggaaaaaaaaaaaaaaaaaaaaaaaaaaaaaagcggccccacaagatgatccaagcttacgtcctcgtgcatacgacatcacacctcttcaatattgtcacctatcttcacat

SEQ ID NO: 16610 - DNA, 388 bp, Glycine max
  unsure (1)..(388): unsure at all n locations
  Clone ID: LIB3040-016-Q1-E1-F5
ggagtcagattcgcacgcattgcttcgcctcacaacagcagctgcagcagcaatggctcccaaacgaggtggaaaggctccggctcttgccgctaagaagaagcctgagaaggtcacgaatccgttgttcgagaagcgtccgaagcagttcggaatcggaggggcgttgcctccgaagagagacttgactaggttcgtgaagtggccaaagaatgttcaaattcagaggaagaagaggattctgaagcagaggttgaaggttcccccagctttgaaccagtttaccaaaactcttgacaaaaacctagcaacaagtctgttcaagttgcttctgaagtacaggcccgaggacaaagctgaaaagaaggangggctcttgaaaaaggct

SEQ ID NO: 16611 - DNA, 447 bp, Glycine max
  Clone ID: LIB3040-017-Q1-E1-A3
gtaccggtcaggaattcccgggccgacacacgtccgatcaggtggcaaaaaaccacagaaaggggggccaaaagttattacaaaaagggcttcagttgggtatcccctccttggcttccatctcaatggtatcatgtcaagttccttacccgcaactagtgaagtgtttgcaaaacagtaaccatccacagaacccgtggaagaaaaactcacccaactccacttctatttccataacaacataacgggggaacacccaactgctatgaaaactgttttgcctcctaaggggtccattcatggttttggggctacttacatgatggatgaccctctaactgaagggacaagtccaacttcaaagcttgtgggaagatctcagggaatatacgctttggcttcacaacatgagcctgagttgctcatggtgacaaattttctcttcac

SEQ ID NO: 16612 - DNA, 386 bp, Glycine max
  Clone ID: LIB3040-017-Q1-E1-B1
taatttgggaattattgctcccatcgccattggtttcattgtcggcgctaacattttgttgggtggggccttctctggagccgccatgaaccccgctgtgacatttgggcctgctgtcgtgagctggacctggaccaaccactggatctactgggccgggcctctcatcggtggtggaatcgctggccttgtttacgaggttgtctttatcagccacacccacgagcagcttcccaccactgactactagagggggggaaatgaaaataaaaaaaaaaaaaaattgtgtattattgaatttctctggaatcttcctctgtgtatggttttccttccttgtgttttcttcctaattcactttcgaaggttgtacttgttcctttcgt

SEQ ID NO: 16613 - DNA, 123 bp, Glycine max
  Clone ID: LIB3040-017-Q1-E1-D5
cgtagtaagcgacgaaatgcttcggggagttgaaaataagcgtagatccggggattcccgatataggtcaacctttcgaactgctgctgaatccacgggcaggcaagagaaaaaaagataaag

SEQ ID NO: 16614 - DNA, 137 bp, Glycine max
  unsure (1)..(137): unsure at all n locations
  Clone ID: LIB3040-017-Q1-E1-G3
atgagcattgttgagattgatacaacnnacaaaaaaaaaaaaaaaaaaaaaaaaccggccccccaaaagattcaaacctaacttagcctgcaagccaagtcaaaactcctccaaaatggccaccaaaatcaattcaa

SEQ ID NO: 16615 - DNA, 294 bp, Glycine max
  unsure (1)..(294): unsure at all n locations
  Clone ID: LIB3040-018-Q1-E1-A11
gggtcgaccgacgcgtcgggaatagacgacagaaggggacttcacaactcaaactgcttcattgcataattgcagataagatcaacccttctaccttcagattcgcgggaagatggcatcacttcatgctaatgtgacatcagttgtttacaacagtggcaaccgtgtttctcaatcgaaatttgcaagctcttccttcttgtctgggttcgatgttgttggtcgtgcttcaagtgcttggaagaaggaactgtccatcttccatttcctggtgcctanagcaccctaacattt

SEQ ID NO: 16616 - DNA, 158 bp, Glycine max
  Clone ID: LIB3040-018-Q1-E1-A4
cccccacccattgatgggcataatatctgaattgtttaacttctatggcaacaaacaaaagatcaaaaaacaaaacagtttttgctgttccttgaaccaatgaacaagcatatcatgtaagtaatggatgcgctaaaattattgtgaagacgacagca

SEQ ID NO: 16617 - DNA, 256 bp, Glycine max
  Clone ID: LIB3040-018-Q1-E1-B7
actggtaccctgctcgtacggcccagaattcccgagtcgacgcatgcatccgcgcatgcgtccggtaggctgcgaacaagacgacggtacgggatacatccttttatccccgggtctagctccaaaaacatcatctcgtggtcaagattcgaaagctcactagagagtactgaagtgaaacaacgactgaaggctatggtttcgagcttgatacattcgacgccttccatttccaggctcaatgccacggtagtgt

SEQ ID NO: 16618 - DNA, 164 bp, Glycine max
  Clone ID: LIB3040-019-Q1-E1-A5
aatcttgattgtgttgagcatcttcttgatcaaatcttgaagatacagcaaaaggaaagaggaggggaaaaaaaggggcgctccagagggattaagcttaagtaagccttgaagggaagttaaaactcctccaaaagggccactaaaatcaaattaagtggcgt

SEQ ID NO: 16619 - DNA, 124 bp, Glycine max
  Clone ID: LIB3040-019-Q1-E1-B6
gaaattgtgttggagcaaaataccatcatgaagctaagaagcattctccttattgtgtgggctttgtttgctctcttgagccacgcttatggggaaatccgtttttgccaaaaaaaaataaaag

SEQ ID NO: 16620 - DNA, 152 bp, Glycine max
  Clone ID: LIB3040-019-Q1-E1-E3
agggaattaaattccaaattgaattgttaccaggaggggcaacggtaatgccttgccaaaatgatcattaaattcatgaccccccttatggcaaaggaacccaacttaaaaacttccttaagcaaccaaaaaccggtttcggccctggtccg

SEQ ID NO: 16621 - DNA, 304 bp, Glycine max
  Clone ID: LIB3040-019-Q1-E1-G12
ggagagtcagattcgcacgcattgcttcgcctcacaacagcagctgcagcagcaatggctcccaaacgaggtggaaaggctccggctcttgccgctaagaagaagcctgagaaggtcacgaatccgttgttcgagaagcgtccgaagcagttcggaatcggaggggcgttgcctccgaagagagacttgactaggttcgtgaagtggccaaagaatgttcaaattcagaggaagaagaggattctgaagcagaggttgaaggttcccccagctttgaaccagtttaccaaaactcttgacaaaa

SEQ ID NO: 16622 - DNA, 62 bp, Glycine max
  Clone ID: LIB3040-021-Q1-E1-C11
gacagcatttttgaagtagtttgtgtaaacttaaagaagagttaacgaaaaaaaaaagaaag

SEQ ID NO: 16623 - DNA, 91 bp, Glycine max
  unsure (1)..(91): unsure at all n locations
  Clone ID: LIB3040-021-Q1-E1-E6
ggtagttagttagtagtgaaaaaatgaaaatggaacaagacgtttcagtttcacactcaacacannacccaaagccctaaaggaaagacga

SEQ ID NO: 16624 - DNA, 154 bp, Glycine max
  Clone ID: LIB3040-021-Q1-E1-E7
gacccacgcatccatcaggtggcaaaaagacaacgaacggggtcatgcgttagtactgaagaactgaacatggatcacgaggtttcagtttcagactcactacatcacctacccccttatcgggcgggcgccctccctcggcggtcaggtcggc

SEQ ID NO: 16625 - DNA, 76 bp, Glycine max
  Clone ID: LIB3040-022-Q1-E1-E7
aagagttctttgttatacttatgtttcaaaaaaaaccaaaaaataaagcggccgttctagaggatccaagcttacg

SEQ ID NO: 16626 - DNA, 181 bp, Glycine max
  Clone ID: LIB3040-022-Q1-E1-F10
gacccacgcgtcagcccacgcgtccgaagacgacagaagggggatcgctctcacacctgtgattattcctcttttaacaatccacatccaaattctagggttccgaaatggacgctggcggaaagatcaagatgggcgccggacgtataaagggcagcggcacaaggaagaacccggtttc

SEQ ID NO: 16627 - DNA, 165 bp, Glycine max
  Clone ID: LIB3040-022-Q1-E1-G1
ggggatatggcgaaattggtagacgctacggacttaattggattgagtcttggtatggaaacttaccaagtgagaactttcaaattcagagaaaccctggaattcacaaagggcaatcctgagccaaatcctgttttccgaaaacaaggaagaaggggggaaagg

SEQ ID NO: 16628 - DNA, 111 bp, Glycine max
  Clone ID: LIB3040-022-Q1-E1-G6
ggatcactcagtaaatgtattttgtaccaaccggtcgctcgataggatcaaagcttacgtacccgtgcatgcaacgtccaatctccactatcgtgtcacctaaatacaatt

SEQ ID NO: 16629 - DNA, 351 bp, Glycine max
  Clone ID: LIB3040-022-Q1-E1-H11
ctaatatcgcaatcgctgaacaatgttatttaacaaaaggatcgaccacaaataaaaacaacccaactccaatcatcatcaccacgtccagcaaaatacattcaaaagctatctaaaaatttgaggaacccacagtggcgcattagaaaccatgaccatagaatttatgagagaaatattatgggcaccgtgcctctccaacaatccccaaaacgttgcttaggcttcagcaaacccaagctcagaaagcttttggtgagcctcagcgtaatcagcgaagaaggcatcttcgtccgatgcatatttctcaacaagagggcggaacacagggtcagacaaaagtgccttgtc

SEQ ID NO: 16630 - DNA, 123 bp, Glycine max
  Clone ID: LIB3040-022-Q1-E1-H2
aatgaataatacaagaaaaaaaaaaaaaaaaaaaaaaaaaaaacgggcgctccaaaagattcaagcttaagtaagcgtgcaatggaagtcatagctcctcgataatgtcacccaaattcaatt

SEQ ID NO: 16631 - DNA, 403 bp, Glycine max
  Clone ID: LIB3040-023-Q1-E1-A1
ccgggtcgaccacgcgtccatccacacaacgggacagaaccataagcttcagcaatgggaaccacacatttcgagaaaaacagcttttacatccatgaacttatgggtattctcgtatactcttgaatcttcgacatgtcatcatacttgacccttattcccattcggtgatgattacagccggaatagtgtatgcgtcatacagacaatggttcaaaggtttgtgtaatatagaccacaactgtgctttggtctgcaagaacataggtttctacgttggcatgtacacaagcttctgccgctgctacatttgcaccaagatttgttgagatctcattagtcactactcttgctaagcagattaataaatcatttcctaagccaaatacattgcatctactct

SEQ ID NO: 16632 - DNA, 215 bp, Glycine max
  Clone ID: LIB3040-023-Q1-E1-A5
gaggttaaggttgccgtgctggtggtcgagtacagatggcgggtagggtttcgacgtgctatcatccggctgttcgctcggattcacgctcatctatgcctgcatgcgacgtcatgactcttcggggatgtcattcatattcaaatcagttgacgccattttacaccatcctgactgggaacaccatttcatcacccacgatttctaccctccat

SEQ ID NO: 16633 - DNA, 170 bp, Glycine max
  Clone ID: LIB3040-023-Q1-E1-A6
gagacctcaggtcacgcggggctacccgctgagtttaagcagatcaatacgcggaggagtcctgctgcatactacatgagatcattcgagcggccgctctataggatccaggggtatctagtcctgcatccgacgtcctatctctctctaagtgtcatccaatctcattt

SEQ ID NO: 16634 - DNA, 118 bp, Glycine max
  Clone ID: LIB3040-023-Q1-E1-B1
ggagacaatggttcaccgacttggttcccttcagtgcggccgctctacaggatcaatacttacgtaagcgtgcgcgtgacttcatagctcttccatctcgtcacgtggcttcaagggc

SEQ ID NO: 16635 - DNA, 366 bp, Glycine max
  Clone ID: LIB3040-023-Q1-E1-D9
acgcgtcagagacgacagaaggggctcattacagatcttccaaacttcagagcgcaggcaaacaacttcttctctcagacatggcatctcaagatggtgtgagaaaatgaagctgtgttgcacacattctgcttgcatttgctttcatggaggagaagcttctgatatttgtgcaagggaagcgtgtggcagtcaagtattactcagatgactggccaacaaacaatgcaaagttagcttttgagaagtttgtatttaccaagactgttaagacaaatgctcgtacagaagctgaggtaacactacttgagaacaatatcattatttacaaatttgtaacagacctgcatttttttgtcactggtg

SEQ ID NO: 16636 - DNA, 284 bp, Glycine max
  Clone ID: LIB3040-023-Q1-E1-F8
cgcgtccatacaggcgtcagaacacgagtcagtggcgctgctataacacgacagaaagggattccaagtttcagtgcaaaaaaaaaaaaaagaaaaaaaaaagcggcagctgctagacgatcaagatttaagtatacgtacatgtgaattcaaagttctaccacagtgtcaccgaaatccaattcaatggcagtcgtcttagaacgtcatgatcgggaaagacaaaacgttacccataattaaactcattgcaccatgaaccacatttcgccattcggagtaat

SEQ ID NO: 16637 - DNA, 254 bp, Glycine max
  Clone ID: LIB3040-023-Q1-E1-G6
aggcgtcagacggctacaagaagagaactgataggtgttgctgcggtattattacagaaggggacaccatccagtactcttcttttcagcagatcctcatgatctctgctaagctttcttttctttgaagtcatacgtcttcaatgtcatcacatttcacacttctgtggtcgtcggatttcatgctgtctgctgtcgacacttctcgagtctacgttctgtgtccttctcttcaccctcatgttttacgcctt

SEQ ID NO: 16638 - DNA, 303 bp, Glycine max
  Clone ID: LIB3040-023-Q1-E1-H5
attcccgggactgacccacgcgtccgcccacgcgtcagtacaggcgtcagagggctacgaaaagacaaggtctgggagacggtcagttctattcgggagatcccgatgttctccggtccagtgccatggcttggggtcctggtcgctactctgagatccgcatgagggctacggatgggctgttcacggactaccacagtgacgacgaggttcatcatcaccagctactcacctactggagtggctattacagcagtcaggaaccacgagaagtgacctgtgtctggctgatgtcggcaccca

SEQ ID NO: 16639 - DNA, 398 bp, Glycine max
  Clone ID: LIB3040-024-Q1-E1-C1
cgggtcgaggcacgcgtccacccacgcgtccgaattcgagcggccgctttatccagcgactcctttacctccaaaggccacatttcttgatgatccattacgagttcttcgagcaattagatttggtgctagatttgaatttactctagatgaagatctgaaagtagctgctgcatgtgatgatgtgaaagatgctctagctgctaaaattagcagagagcgcattggaactgagagtgatctgatgatatccggaaatcaacctgtcaaagctatgacgtataattgtgatcttacactattttggattgtattcagtcttcctcctgaatttgaaccttacatttcagatgggtgttaaaggctttgcatttcttacttggatactgcatggaacc

SEQ ID NO: 16640 - DNA, 349 bp, Glycine max
  Clone ID: LIB3040-024-Q1-E1-D11
aattcgccggtcgacccacgcgaccacccacgcgtccgcccacgcgtccgggctgccatcatctacaacagagaccatgcatgggatgaccaatggattttctgggttggacctttcattggagctgcccttgctgctgtgtatcaccagatagtcatccgagccatccctttcaagacaagggcttaggctcttgtttttgtatgtgcttgcttgtattagttgttatttatgtatctggagtcttcttcatttggaaattcatgtgaatctttttgttttaatccactgtatggatgtaaattatgacatgattagttccttgattgtatctgtgacactctgcaaa

SEQ ID NO: 16641 - DNA, 143 bp, Glycine max
  Clone ID: LIB3040-024-Q1-E1-F2
gctggcgggctccctcacgttcttctgagtaaaaaaagaggaagaggaaagagttggagcaaaagtagaagaggaaaaaacaagaaggggaacaaaaaaaaaaaagcggccgccctagaggatccaagcgtacgtacgcgtgc

SEQ ID NO: 16642 - DNA, 118 bp, Glycine max
  Clone ID: LIB3040-024-Q1-E1-G12
gggcacaatgcaaggtaacacatcgacttgaaattcggccgctctagatgatccaggcgtacgtatgcgtgcatgctacgtcagagctcttccacgagtgtcacctacattcgcctcg

SEQ ID NO: 16643 - DNA, 345 bp, Glycine max
  Clone ID: LIB3040-025-Q1-E1-D12
tttttgtttttttgccttctcatcatagggtctcttttgttcttctgtcatgtttttccactcttcggctgtgatctttggaacctccaagaaattcttgttctcagcaacaagagctgcccgtcaatcactagtgaacaagaaataagctgacatggggtgcttcggtttcaatggatccttctcattcttgttcttcttgccctcattttctgcctcttgtttgaattgcatgtactgttcgagcaactccatggcagtcttctgcttctgcacgtcttccaacaacctcattgcctcagtctcacgtttttcctttgcaatcatttgcaaataagcttcttt

SEQ ID NO: 16644 - DNA, 179 bp, Glycine max
  Clone ID: LIB3040-026-Q1-E1-A1
ggattgtcacatgtcacttaacactagagataacccatttttcaaggactaaaaacaccattaaacccaaaggatcaaacttaaagtaaacataaaaaccaggtgctctataggatccaagcttacctacacttacatgagaggtcatagctcttcaatattgtcaccgaaattcaatt

SEQ ID NO: 16645 - DNA, 317 bp, Glycine max
  Clone ID: LIB3040-026-Q1-E1-A9
taacttatagcctagatgaacttaacaattatgattgcctagatgttgtgaaaatacgacatgacacacactacgagggtcagtttaaggaaattgtgagtgagattgtgaagaacaaacacaaatttcaacaatcatgggtgatacacatcatgaggaaagcacataagttggcttactcttttgttaaagcgggactatctttatcatcttatttatgtctgtatgactaagtaacttttaatcgttgtctggggtttctttgtccaagtaatggagcttgccggcaacgctacaagcggccgctctagaggatc

SEQ ID NO: 16646 - DNA, 76 bp, Glycine max
  Clone ID: LIB3040-026-Q1-E1-C4
acaagatgatcccagcttacgtccgcctgcatacgacgtcacacctctacaatagcgccacctaaaatcaaatcag

SEQ ID NO: 16647 - DNA, 92 bp, Glycine max
  Clone ID: LIB3040-026-Q1-E1-E3
gccggtttcccgaacgatttgatggtttggaatgcatttcccaagcaacgagtcttcggttcgaaaccagcagagagggaaaaaaaaagagc

SEQ ID NO: 16648 - DNA, 276 bp, Glycine max
  unsure (1)..(276): unsure at all n locations
  Clone ID: LIB3040-026-Q1-E1-H12
taatttgggaattattgctcccatcgccattggtttcattgtcggcgctaacattttgttgggtggggccttctctggagcggccatgaaccccgctgtgacatttgggcctgctgtcgtgagctggacctggaccaaccactggatctactgggccgggcctctcatcggtggtggaatcgctggccttgtttacgaggttgtctttatcagccacacccacgagcagcttcccaccactgactactagagggggggaaatgaaaaannnngaaa

SEQ ID NO: 16649 - DNA, 153 bp, Glycine max
  Clone ID: LIB3040-027-Q1-E1-A3
gaatcgcatgggcaaaccaaattcggcgctttcaacacggacactcttcacgatccacgcttaagtcctcatccatacgacatcatagcacgtctataatggcccatacattcagattcacagggcttacgtgtttgaatcatcgtgaccagt

SEQ ID NO: 16650 - DNA, 127 bp, Glycine max
  Clone ID: LIB3040-027-Q1-E1-B9
gatactgaatatttcgactatcacacaaggagtttccaccgtatatccggctgcgctcgacgttctaagcttacgttcgcgtgcctgcgacttcatacctcttccatcgtttcacctactctcaatt

SEQ ID NO: 16651 - DNA, 59 bp, Glycine max
  Clone ID: LIB3040-027-Q1-E1-C10
gattcacatacttactactgtcagtggcagagagagagaaagatgaaaacaacaaaaac

SEQ ID NO: 16652 - DNA, 358 bp, Glycine max
  Clone ID: LIB3040-027-Q1-E1-C7
gccgaaagatgagacaaagatctaagtaggtgcttgaacaaggagtggagatgatgtgcttttccatctgctaccagcttcatgacattttatgctgtcatggctcttatgatgatcttgaggtctagtggcgaggggagcttccatcttgactttagtttagctttactggtctaaagattgctgttttagtgtgggttaagttatgatagtgagagttttgtgttatctaattatgtactggtacgttttgtatactttttggtttatcttactagcttaaatattaatattttgcagatagcaaaggctgttgagaatcaaggtaagcgggcgctctagaggatccaatcttacg

SEQ ID NO: 16653 - DNA, 137 bp, Glycine max
  Clone ID: LIB3040-027-Q1-E1-C9
taccggtcaggaattcccgggccgacccacgcgtcagcccacgcgtccgaattggagcgacagcactacaggatggacgctaaagtgcgcgtcaatgcgacgtcatcactcatccataatgtcaccaagattcaatt

SEQ ID NO: 16654 - DNA, 328 bp, Glycine max
  Clone ID: LIB3040-027-Q1-E1-D2
ggatgctttgccttttctattttctagtaactttgactcactaccattgtgtttctgcttgaggagatcactgtcttcaaccacagtaaccaagccaagagacacactttatcttccttcatgagaatatgagaatgaaactcactgtgccaccactcatatcaacttggtggtaggtagggcttgtgtgtggttcagaaagaagctttacttgtaaaaaaaaggagtgagaaagatggccactacagaatagagagagaaagagccacccaatactgagcagcttgtgggccattttgaagcggccgctctttaggattcaagctta

SEQ ID NO: 16655 - DNA, 127 bp, Glycine max
  Clone ID: LIB3040-027-Q1-E1-E1
agggtggatgtcaatgcgcgaaaaaaaaggagaaacaaaaaataaaacgggcgcgctacaagatgcgatcttacgttagcgtgcatgcgaagtcataacacttctacaatgtcaccgaaattcaatt

SEQ ID NO: 16656 - DNA, 337 bp, Glycine max
  Clone ID: LIB3040-027-Q1-E1-F4
agggtcacaactcagactgcttcaatgcataattgcagataagatcaacccttctaccttcagattcgcaggaagatggcatcacttcatgctaatgtgacatcagttgtttacacacagtggcaagcgtgtttctcaatcgaaatttgcaagctcttccttcatgtctgggttcgatgttgttggtcgtgcttcaagtgcatggaagaaggaacttgtcccatcttccatttccttggtgcctatagccaccctaacatttgattccccaactaccaattcacacataatcaagctagataagcacactcttgaccctgcttctccagattttctt

SEQ ID NO: 16657 - DNA, 271 bp, Glycine max
  Clone ID: LIB3040-027-Q1-E1-F7
gttcgctacggagtaaatacacaaatggaaggtaagaaagaatcgtcttttaacttcgtcctttgtctcgtgtttatcggtactatattggacagcatgcattctgacaatattggcagcaacatttatggatagatggtaaactatcaccatagccatagatatgacagtctacgaaacgtacaaaggcgccactcgataggatccagtgcttacgtaagcgtgcatgctacgtgataatgacttctaaagtgtgacgatctcatcaatt

SEQ ID NO: 16658 - DNA, 128 bp, Glycine max
  Clone ID: LIB3040-027-Q1-E1-G1
aacaacgacgttaagagcaaacaacggtacggctgttaaatacaacagcgggcgttctacaggatccatgcctacgtacccgtgcatgcgacctcgtaactcttcgacaatgtcacctagattcaatt

SEQ ID NO: 16659 - DNA, 327 bp, Glycine max
  Clone ID: LIB3040-027-Q1-E1-H5
caatatatagaacgtagtatgggtgttgtgtccgtgttggccactgacacggacgtgggtcgaccatcggacacgacaatgggctggggtgtccgtgcttcataggttattggatcatcagatcatagatttgatatctgataactttggcagctatttttatttaactgggccttgtataacttttatttacgtcacttcatcaataaaacttccattgccttgaagtcaatgatgttcacattcacagttgacgtcacatgcaacacatccccctttcgccaactagagctgccgctcaagaggatccaagctttcgtacgcctg

SEQ ID NO: 16660 - DNA, 194 bp, Glycine max
  Clone ID: LIB3040-028-Q1-E1-E2
ggtacatttcatttgaaccgatatggcgtcacttgtatgtcaccatttttccttgcatttcatggttatcatgtcaggttccttaccagcaaatagtgaagtgtttacaaaagagtcgccgatctcacgatccacactaaccttggaatgactcacacatctcaacttttatttccagaaccccaaattggggg

SEQ ID NO: 16661 - DNA, 359 bp, Glycine max
  unsure (1)..(359): unsure at all n locations
  Clone ID: LIB3040-028-Q1-E1-E4
ggtctagaattaccgggccgacccacgcgtccaanaggatacaagggccctgtgatgggggatgcttgacgccatgcgtgatacgggccgtgctgcttttagaccaatagtggataagattcaggattctgaatgttcgcagtgcttgcattatacaatatgattgcgtgaatttcatttgcctcccatatgtattaattggttgtgactcaagtattgacatctgcatttgcgtcagcatctcctgtgatcttatacattggaatcacagatcatacgcgtatttcaaattctggggtttcttccacactacacatgatctaaagcgtcagttcatcggggtacttaaaacgagcatc

SEQ ID NO: 16662 - DNA, 418 bp, Glycine max
  unsure (1)..(418): unsure at all n locations
  Clone ID: LIB3040-028-Q1-E1-H3
cgggtccgacccacgccgtcagaacggttgcaaaaaaccaacaaaagggggtaccttcctttaaaaattaaaattagatccataaccgttaacaaaactccaaacaaaggccctttccgctcctaacaaccctccgcgggtcaatttccttgggaanactcgtttccacaagaaaatcgattttccctggaaaacaaacactcccgaatctccgatgcgactcgtttcactttaattcgatgatgatcgccactatatgccgccctgtgcgttccccgtgggaggaaccaatggatcgctgcttccgattttttccatgcctcgccgatcctggtcgaaggtcttcgttgtgcttgaagttgtgcttagtgacgattcacctgatttatgctggcgtgctcttcttgttccatgggga

SEQ ID NO: 16663 - DNA, 61 bp, Glycine max
  Clone ID: LIB3040-028-Q1-E1-H5
ggtccaggattcccgggtccaaccaagcgtccgaacggtggcaaaaaaacacaaaaagggg

SEQ ID NO: 16664 - DNA, 276 bp, Glycine max
  Clone ID: LIB3040-028-Q1-E1-H6
ggttctagtgtgtgattgtttgttgatgtaactcgttcttcttcttttgatgttctgtgtttgtgtatgttttttctctcacctgaagatgtcttgctgcagtggtaactgtggttgcggcagctcctgcaagtgtagcaacggctgcaggagctgcaagatgttcccagacttgaactatcatgaggtcaaccatcgacgagaacttggtcatgggagtggcacgtgttaaggctcaattttagggtgcttaaatgggtgtgcccgctgagaacg

SEQ ID NO: 16665 - DNA, 107 bp, Glycine max
  Clone ID: LIB3040-028-Q1-E1-H8
aggctttgttcacaaaagaactacgtaggtctgattttctcatcacaattgaggaatacgtaggagcaaagggaaacgcccttgtcgaccgaaaaaaaaaaaataac

SEQ ID NO: 16666 - DNA, 248 bp, Glycine max
  Clone ID: LIB3040-029-Q1-E1-C10
ggtaccggtcaggaattcccgggccgacccacgcgtcagaccgctggtacgacacacacatcagggaaatacgtccatctgatgggatcttagaagcgtgtgcacgatttgagcacacaactggcatttgacgtcctcatcgtcgttttcgattaagagagcaatgacacggacgatccaaagggttcacacttacatcggaggaaaggtccgtcgaagcacttggcaacgatagccgctcgcaagtc

SEQ ID NO: 16667 - DNA, 178 bp, Glycine max
  Clone ID: LIB3040-029-Q1-E1-D6
ggtcaggaattcccgggccgacccacgcgtcagcggatgcgacagtacggctgagagggaactcaaaactgagacagctttaatgcgttctcggagatttgatctgaccttccacccttcaattcgcgggacgatggcaggatctcacgctggcgtgacagaagttctcgacgacggt

SEQ ID NO: 16668 - DNA, 449 bp, Glycine max
  unsure (1)..(449): unsure at all n locations
  Clone ID: LIB3040-029-Q1-E1-G9
cggtctagaattcccgggccgacccacgcgtcagatgtttgaagtagatggcttcttcaagttttttatgtctgtgtttgatgtttgcttttgttgtggcttgctttgctcgtggcattcccacagaccaaccacccgtgctctacggagacacacacaagaatccatctacttcaaacattgagcatcatcaatggtcgggagacaaagttacacacccaatttcaacccatgtcaagttctcaagtttcacagagaattcagaaaggatactgacagaggtagattatgacggtccacatacacacccaaatccacctcctcatgctcagaagtttcgattgtaaacattgtcttctcaatgacanaaaataaataagattattatgtcacaattttaatttttcttatccttaatgtgccaaaatatttcgcatctttatgacctt

SEQ ID NO: 16669 - DNA, 177 bp, Glycine max
  Clone ID: LIB3040-030-Q1-E1-C3
gggtcgagtcacgcgtcgagtcacgcgtcgcatcggtgcaagaatacgagcagcgggggggaaagggtcagatttatcctgacaggagcaagagttatagcacagtgtagtttgcttcagcagcaggtatgggcatgttgcagagaaaggagagggtccaatgcggtcgttcctcaa

SEQ ID NO: 16670 - DNA, 113 bp, Glycine max
  Clone ID: LIB3040-030-Q1-E1-D11
agtgcggtctagaattaccgggtcgacgcacgcgtccacccacacgtccgacgacagaaggggaaacaaacaaagaactcactcaaactcaacatagagagagagagagagag

SEQ ID NO: 16671 - DNA, 146 bp, Glycine max
  Clone ID: LIB3040-030-Q1-E1-D3
tccagatgcgacaatacaatcgaagggggatgtggcagaaagaaatcaggacgtgcaaacggaaagcggggactctaaaggatccaagcttacatacgccttcatgcgacgtcataactcttccatagtatcaccgaaattcaatt

SEQ ID NO: 16672 - DNA, 350 bp, Glycine max
  unsure (1)..(350): unsure at all n locations
  Clone ID: LIB3040-030-Q1-E1-F11
gccttagggttagattcgttgttgttgttctaaaacgtccacacattctccgtcgccacaacaacaatggctccgaagaaaggtgtgaaaggttccgttgtagcagcgaagaagaaggttcaagagaaggtgacgaatcctttgttcgagaagcgtccgaagcagttcgggatcggaggcgcgctgccgccgaagcgggacctgacgcggttcgtgaagtggccgaagaacgtccaaatccaacgcaagaagcgcatcctcaagcagangctcaaggtcnctcctgcactcaaccagttcaccaaaaccctagacaagaatctcgccacgaatctatttaagatgctgct

SEQ ID NO: 16673 - DNA, 355 bp, Glycine max
  Clone ID: LIB3040-030-Q1-E1-H4
gtctagaagtcccgggtcgactcacgcgtggatgcaataagactacacaaggggaacgtaatgtaaatcagaaacctgctgtattgcgcgtagtaattcacaatttgtggtaaaccaaatggcgaaagttttcggtgattttcggttccttcactgggttgccgctggcgtcttcagcaatatccagataaggcttttcgcaactcaatcacaatatgctgatcgcctacctgcagctattgaagctgacaaccattgtgcaagtcaaacgcgatcactgattgatcagattagcttgcaacaaggacgaattgtggccctagaagaagaacggaaacgcctagaccaaaaatgt

SEQ ID NO: 16674 - DNA, 385 bp, Glycine max
  Clone ID: LIB3040-031-Q1-E1-B12
gacctaaaaattgtaccgaaatggcttcacttgggtgtcccctttttcccttgcattcaagggtaacaaggtaaggttcctaacaacaaaatagtgaaattgtttaaaaaagaatcccctaagtctctaatcacaaaaacccgtggaaagactcacccaactccacttttatttccataacaacaaaatgggggaacacccgactgctatgaaaattgttgagcctcctaaggcgtccatttctggttttgggactatttacatgatggatgaccctctaaccgaaggaccaagtccaacttcaaagcttgttggaagatgtcagggaatatatgctgaggcttcgcaacatgaacctgcgatactcatggtaacgaatttgttc

SEQ ID NO: 16675 - DNA, 53 bp, Glycine max
  unsure (1)..(53): unsure at all n locations
  Clone ID: LIB3040-031-Q1-E1-B9
gagacctcaggtcaggcggggctacccgctgagtttaaacanangatanaaaa

SEQ ID NO: 16676 - DNA, 152 bp, Glycine max
  Clone ID: LIB3040-031-Q1-E1-C6
taaatactaaattaggtttttcaaaaggagaaaagaggaaaagagcaggggagaaagagaggaagggggaaaaaaagcgggcgctctagaggatcaaagcttaagtaggcgggcatgcgaggtcatagcgcttcgagagggtcaccggaaag

SEQ ID NO: 16677 - DNA, 387 bp, Glycine max
  Clone ID: LIB3040-031-Q1-E1-F12
cgggccaacccacgcttcgaccaaaccttcgttccggtgccaaaagaccacaaaaaggggaagaagaagaagaacgagatggcgtcaattgtgaagaacgtactcaaatccgtcaaagaaaaaggtttccgggccttcctcaaggaactcaaaggtgaaaggtacctgaaaagccttcccgattggaatcccctgtcaaccaagattcacaataatggggcaacacttgttggtgttgataaatttggtaacaagtattatgagaaacttggagacacacagtttggaaggcacacgtgggttgaatatgcagagaagactagatataatgcctctcaagttccagctgaatggcatggttggctccacttcatcactgatcacaca

SEQ ID NO: 16678 - DNA, 75 bp, Glycine max
  Clone ID: LIB3040-031-Q1-E1-H12
agacgacagagaggggttgacaaacgaaaaatgtcggccgcccgcaaggttccaagcttacttaggcttgcaggc

SEQ ID NO: 16679 - DNA, 219 bp, Glycine max
  unsure (1)..(219): unsure at all n locations
  Clone ID: LIB3040-031-Q1-E2-A4
aggagaaaaaganagagttatatttcccactaaggaaatatgctatcaaggtgtaactttagagcaatcttatcggttaattggacatttacctcctttatactcgacaagttttgatatatctcgttttgtagtttcatgtttattgcttattggctgtgttaaacttcatgtcttctttagacctgnggtttcttgaagctaccaggatttatggac

SEQ ID NO: 16680 - DNA, 245 bp, Glycine max
  Clone ID: LIB3040-031-Q1-E2-B2
gtgacattttagattccaatgcacataaaatttatgtatataaagatggacactgaaatcaaatcaggcatttcatttagtcctttgtactgtatactagtagtatgttgctggccatcatttgttgaaaacttaaaatgttagaaatagtaaaagggtgacaaattgtaataatgtatttatcaaaaaaaacaaaaaaaaaaaaaaaaaaaaaaaaaaaaaaaaaaaaaagaaaaaaataaaaa

SEQ ID NO: 16681 - DNA, 193 bp, Glycine max
  Clone ID: LIB3040-031-Q1-E2-C3
aaaaaaaaaaacggccgctctaaaggatacaggccgatctacacgatccagccacatctaagctcgcctacgacgtcacctatcttcaattcagtggccgacattcatattcactggccatcggtaaaaacgtcgtgtaagggaaaaaactgccgtgaaccaaattaatcttctctgcagcagagctcctttc

SEQ ID NO: 16682 - DNA, 147 bp, Glycine max
  Clone ID: LIB3040-032-Q1-E1-C11
gtatgtcgtgctgctgttctagatccttatgtgactcatttatttagacgatagtgatacaatctgcctctcaaaatgatcccatcatatatacgcgtgcagttacattcacacttcttcaaggttgtccccttttatccattcaga

SEQ ID NO: 16683 - DNA, 163 bp, Glycine max
  Clone ID: LIB3040-032-Q1-E1-C8
cttatcaaaaaaaaactcacacaaaaatacaaatgaacaaacaatttcaaaaaaaatatttaatccatcattgaaatcaatcggctgctccaaaggatccaagcttactctatcccatgaatgctatctcaaaactcttcaagactgtcacctgatttcaatt

SEQ ID NO: 16684 - DNA, 379 bp, Glycine max
  Clone ID: LIB3040-032-Q1-E1-H2
gggccgagccacgcgtcagtacaacctgtcaggacaacagtccgggagtcgtcatttcaattttcaatgtggatattccactgtaaagcatcaagacttaactcgaaccctccccgtcacaaaagaatatcctctttgtctgattatcgtcgtcaagatgttggatctccgtctcgagcaatgctcgctcctgaagaaagttttggaatccgtcaaggagctcgataacacgtatacttcactgcaccccatgtgttcgactccaagcactggattctactacgtgaacctcattgctcaccacaatctatacgcaggtttctatcagtacgactgcgacagcaacatctccatgggcatgaatctcaacaagatggcc

SEQ ID NO: 16685 - DNA, 78 bp, Glycine max
  Clone ID: LIB3040-033-Q1-E1-D6
aacaacaaaagaaagaagaaaagaagaagggaaaaagcggccgactctaaaggatccaagcttccgtcgccctacagg

SEQ ID NO: 16686 - DNA, 137 bp, Glycine max
  Clone ID: LIB3040-033-Q1-E1-H12
tcccggcacgaattcccggctcgaccacgcgtcagttgcgatgcgacaacacaacggaacgggtacaaccaagatatcacacggtacaggtgctagaaaactacaacagggtacagtttccaaaagacgacagaaag

SEQ ID NO: 16687 - DNA, 384 bp, Glycine max
  Clone ID: LIB3040-034-Q1-E1-C10
ggagagtcagattcgcacgcattgcttcgcctcacaacagcagctgcagcagcaatggctcccaaacgaggtggaaaggctccggctcttgccgctaagaagaagcctgagaaggtcacgaatccgttgttcgagaagcgtccgaagcagttcggaatcggaggggcgttgcctccgaagagagacttgactaggttcgtgaagtggccaaagaatgttcaaattcagaggaagaagaggattctgaagcagaggttgaaggttcccccagctttgaaccagtttaccaaaactcttgacaaaaacctagcaacaagtctgttcaagttgcttctgaagtacaggcccgaggacaaagctgaaaagaaggagaggctcttgaaa

SEQ ID NO: 16688 - DNA, 293 bp, Glycine max
  Clone ID: LIB3040-034-Q1-E1-H4
ggagagtcagattcgcacgcattgcttcgcctcacaacagcagctgcagcagcaatggctcccaaacgaggcggaaaggctccggctcttgccgctaagaagaagcctgagaaggtcacgaatccgttgttcgagaagcgtccgaagcagttcggaatcggaggggcgttgcctccgaagagagacttgactaggttcgtgaagtggccaaagaatgttcaaattcagaggaagaagaggattctgaagcagacgttgaaggttcccccagctttgaaccagtttaccaaaac

SEQ ID NO: 16689 - DNA, 164 bp, Glycine max
  Clone ID: LIB3040-035-Q1-E1-E5
gtgaccaactgtgacatcaatatggatcatctttcaaatatcattatactcgaatgctcaattcctatgacacctcatgatcgcggcagcacggctacgatccaggttgagctagacgggattgctacatcagcgctcttctgtacaggcacctagattcaagt

SEQ ID NO: 16690 - DNA, 165 bp, Glycine max
  Clone ID: LIB3040-036-Q1-E1-A1
caagaaagggaagtgtgcacctaaaaaaggaagcaggctttattgtataaaatgcttgcagggtcacttcaattatagcaacaatgaagattcatgttcgatcatgaaaaaaaaagaatgacgaaagtctacagcggcctctctagaggatgcaagcttaagtat

SEQ ID NO: 16691 - DNA, 286 bp, Glycine max
  Clone ID: LIB3040-037-Q1-E1-A11
gggtcgacacaagcgtccgcccagacgttcgacagctgcgaaaagaccacagaatggggaaacactcccctttggcgctgttgttgttgccgcagcaccgaacaacttcccctgttaatcgcgtttcgtttgtgcaatgttttaaaagattgctgacgctgaagacattcaacctcctggtgttgataaaggaactggaatggtcaacgctggttttgcacgtgatgatgctcctaaggccgtgttccccagcattaatgggaaaccacgccatactggtgtaatg

SEQ ID NO: 16692 - DNA, 168 bp, Glycine max
  Clone ID: LIB3040-037-Q1-E1-B6
ggaacgattcgacctaccaatacatacagtttcatacttcacacaatcgagaccatgataaatttccaaacttcatccatcaacaatgcggccgctctagatgatacaagcttaagtactcttgcatacaacatcctagctcttccacagtgtcacctaaatccagtt

SEQ ID NO: 16693 - DNA, 323 bp, Glycine max
  Clone ID: LIB3040-038-Q1-E1-B1
gtcgacccgacgcgtcagcccacgcatccgtagaagacgacagaagggggcacccagagaggaggaagctttgagagagagagagggaggagggagagtgttgacgctccatcaagatgggtatttctagggattccatgcacaagaggcgtgccactggtggcaagaagaaggcatggagaaagaagagaaagtatgagcttgggcgtcaggccgcaaacaccaagttatcaagcaacaaaactatccggaggattcgtgttcgaggtggcaatgttaaatggagggcattgaggttggataccggcaattactcatggggt

SEQ ID NO: 16694 - DNA, 283 bp, Glycine max
  unsure (1)..(283): unsure at all n locations
  Clone ID: LIB3040-038-Q1-E1-F10
taatttgggaattattgctcccatcgccattggtttcattgtcggcgctaacattttgttgggtggggccttctctggagcggccatgaaccccgctgtgacatttgggcctgctgtcgtgagctggacctggaccaaccactggatctactgggccgggcctctcatcggtggtggaatcgctggccttgtttacgaggttgtctttatcagccacacccacgagcagcttcccaccactgactactagagggggggagatgaaaataannnanannaaaaa

SEQ ID NO: 16695 - DNA, 284 bp, Glycine max
  Clone ID: LIB3040-038-Q1-E1-G9
agggacgaggaattgagttgatatcgaaagggaaacggtggtttaagtgacgatttgctgaataagtggagatggcaaacttcaatgtcatgcataaacaaacgatagctctcatagcagccaagatcagagatcctcactgagacgctttaatcggctttctcaatatcaatgaccaatccctttccctaaccggaaaacacagagctgccccttcattacatggctccgggacctttaggactccttacaggatgccatggtcaccatagaagatgttcaca

SEQ ID NO: 16696 - DNA, 341 bp, Glycine max
  Clone ID: LIB3040-038-Q1-E1-H2
ccggtcagaaattcccgactcgaccaaccactcattcggccaagccttcgaacggtgccaaaaaaacacagaaaggaattgacaaataatatatatatatataaaagtttgctaatataaagtcaagaatataaagatatattataatatcaataactaaaatttagacaaatataacttcttttagatgaatttttctttaaaaaaattataaattgatcactatttcacttcacgcaccaatagaatttggagtgattttttctaataaaataaggaaataacaaaacaatatactacactacgtatatagtgatagatagcctcacacatgaagataa

SEQ ID NO: 16697 - DNA, 405 bp, Glycine max
  Clone ID: LIB3040-039-Q1-E1-A11
taccggtaacgaattcccggctcaacccacgcgtcagaccgctgctacataacgacacaaggggacatcaacttgagacaaacacttaaatacctatcatgggaagaaataaactacagaataagaagtggcttcaatctccgaaatctccatgtacacgtgagcaacttatgctaaccagattacggtgctgtctaactcggattcattcctcaagctactgacactacagtcttccaccgtagtgacaccatcacactcaatgtaatgtttcaactaagagcctccataatggagaaagtatgtcacggagtgcaccgcaacttcattgatagcttcaatgatgctaccggatgttgatgacgctgccattaaagcttctcacaacaacttcgtgctcatgat

SEQ ID NO: 16698 - DNA, 344 bp, Glycine max
  Clone ID: LIB3040-039-Q1-E1-B11
gaacggacgattggccatgttctctatgtttggcttccttgttcataccattgtcaccggaaagggtccattggagaacctcgccgatcaccttgctgaccctgtcaacaacaacccctgggcctatgccaccaacttcgtccccggaaagtgagcgtcaaagaacgaaatgacttttgagagtttttagctttgtgtttggtgaagtacttcagataatgtgaattatcttgtgtaaccaaatccaacttaatgttacttgctttttacaacactgtagcagcgcattaagcgcaaaaagctgccgctctaaacgatccaatcttacgtacacgtgcatgcga

SEQ ID NO: 16699 - DNA, 298 bp, Glycine max
  Clone ID: LIB3040-039-Q1-E1-D3
aattcccgagtcgacccacgcctcagataggctgaaaaaaaacaacagaaggggacgccgatcagtagtacaaccatagcctcaattgtatatcgcctcattggcttcgatcccaatggtgacatgtaacatttctcatacgcaacaaggtcaaatgtttgatgcacagtatccagctaaagaagccactagaacaacagatcaggcaacgccacttcgattatcaaacaaacacttcagtggaacacccagatgcaactaaaactgtattgccaccaactgggtccactcattgttt

SEQ ID NO: 16700 - DNA, 333 bp, Glycine max
  Clone ID: LIB3040-039-Q1-E1-E11
ggttactctcgtggtggtgacggtggtgatggaggctggagaaactagggcttgatgtcgttgattagggtttatgattatgctcagtaattttagttgtgtttgagtttgagtatctttatggttttgtgtcaccgtggttcttgtttttgaccaatatatctggttgtttatagtcgatttaatgaaatgataatcagaaattggagtaaaaaaaaaaaaaaaaaaaaaaaaaaaaaaaaaaaaaaataaaaaaaaaaaaaatcaccaaaataaaaaaagaaaaaaataaaaaaaaaggggccgctcaaaaggttccaaccttacttaccc

SEQ ID NO: 16701 - DNA, 315 bp, Glycine max
  unsure (1)..(315): unsure at all n locations
  Clone ID: LIB3040-039-Q1-E1-F3
aattcncgtaccgacccacgcctcagcccacgcgtacgtacaggcgtcagtacagcagcgagaggcagacagaaaggaatattccctacaattaaaccggccgcacgatccaatccaagctcacatagggtcgcaggacacatcatgacgcttccaaattggcacctaatgtcagtacattcgccgatcttttacaacatcttaactgagaagtcccaggttttaccgaacttggacaccgtgcatcacatccgcctttcgcaatctggcgtcatagttaaaaggcccaccacgctttacctacctaacatttgc

SEQ ID NO: 16702 - DNA, 71 bp, Glycine max
  Clone ID: LIB3040-039-Q1-E1-G11
taaaggatcaaagctaacttacccgtgaatgcaacgtcaaacccctccaaaagggtcaccaaaattcaatt

SEQ ID NO: 16703 - DNA, 103 bp, Glycine max
  Clone ID: LIB3040-039-Q1-E1-H7
aggtaaagctgccacacgacaagatccaggcatagctgcgcgtgcatgagacatcggtactcttctaaaatgtcaacaaaatgcaactgacgggacatcatta

SEQ ID NO: 16704 - DNA, 318 bp, Glycine max
  Clone ID: LIB3040-040-Q1-E1-A1
ctcacaagactctcattcatcaaatttacaacaagtgttacacatgcttctatttatagactaggtagcttccttgaaaagatttcttgagaaaacttccttgagaagcttctttgagaaaactctcttgagaagctagagcttagctacacacacccctctcataactaagttcacctccttgagaagcttcctttagaagattcctaaagaagctagagcttagctacacatacctctctaatagctaagctcacctccttgagatgagaagctagagcttagctacacaccccctataatagctaagctcacccc

SEQ ID NO: 16705 - DNA, 345 bp, Glycine max
  Clone ID: LIB3040-040-Q1-E1-E1
aggaggtgagaaaacaccacaaaggggattgcaaaaaaaaaaaaaaaaaaaaaaaaaaaagcggacgctctaaaggatccaagcttaagtaaaaccggcaggccaagaggatccacgcctacgtagtcatgcatgttaagttcaatggcctccatattgtcacctaaattcatgtcaaaggccttcggttaacaaagttaagcacggtaaaacacaggcgctttcaacatagtcgctttgaaccaaaacgccctttcggatcgtggttctaataagtagcacgaccgtaactgatcgcccttcacaagacttgtacaggctcaatggccaatggggatctccctg

SEQ ID NO: 16706 - DNA, 422 bp, Glycine max
  Clone ID: LIB3040-040-Q1-E1-H2
cccgggtggccccacgcgtcagaataatatactagttaattaaacagcattcattaatcattacgaaacataaaccctgaacatggagatgaggaaatcatgtggcttcttcttcttgctcctcctccttgtctttgcttcccaggtggtggtgcagacggagggaagagtgtgtgagtcacaaagccacgggttccatggtttgtgtaatagagaccacaactgtgctttggtctgcaggaacgaaggtttctccggtggcaggtgcaaaggcttccgccgccgctgcttttgcaccaggatttgttgagatctcatcaaacactactcttgccatgcaaattaataaatcatagctaggccaaataaattgcatctactctttatccatttgggagctagctaccacaaccaactcatac

SEQ ID NO: 16707 - DNA, 92 bp, Glycine max
  Clone ID: LIB3040-041-Q1-E1-A6
gccggtttcccgaacgatttgatggtttggaatgcatttcccaagcaacgagtcttcggttcgaaaccagcagagagagaaaaaaaaaaaga

SEQ ID NO: 16708 - DNA, 262 bp, Glycine max
  Clone ID: LIB3040-041-Q1-E1-E4
ggtctctagggtttttgatcgttgttgttctaaagcactcatccacacattctccgtcgccacgacaacaatggctccaaaaaaaggtgcgaaaggtggacttgtagcagcaaacaagaaggttcaggaaaaagtaacgaaccctttgttcgagaagcgtccgaagcagttcgggatctgaggcgcgctgccgccgaagcgggacctgactcgcgtcgataagtggccgaagaacgcccatatccaacgcaagaatcacatc

SEQ ID NO: 16709 - DNA, 306 bp, Glycine max
  Clone ID: LIB3040-041-Q1-E1-E8
gagacctcacgtcaagccgggctacccgctgagtttaaacatatcagtaacccgttgaacacaactctctgccaacatgggtaatctaccagacgctctatacgatccaagcttacctatgcttgcatgcaaaatgactgctcgtctaaaatgtcatctaaacttagttcactggctgtcatttttaaactttcagactggaaaacacttaggatgatccatcttaaacgtcttgctgtaaaatccccgttattcagattgcgtactagcaattacgcctgcagaaatcacactttcaatcacttg

SEQ ID NO: 16710 - DNA, 132 bp, Glycine max
  Clone ID: LIB3040-041-Q1-E1-G9
cggctcacatattatgggtggcaaaattaaattaaacaacaaactcaaaaagcggccgccctagaggatccaagcataattacacctgaatgcgacctcatagctcttcgaaacagtcacctaaattcaact

SEQ ID NO: 16711 - DNA, 228 bp, Glycine max
  unsure (1)..(228): unsure at all n locations
  Clone ID: LIB3040-042-Q1-E1-A3
ctaccaatggctcccgcaaaggcagagaagaagcccgcggagaagaagccggcagagaaggccccaggggagaagaagccgaaggcggagaagaagatatcgaaggaaggaggaagcgagggagggggggggagagcggggggagaagcggcggctctagacgatgcaggcttacgtaggcgtgcatgcnacgtcatagctcttcgatagtgtcacctaagttcaatt

SEQ ID NO: 16712 - DNA, 248 bp, Glycine max
  Clone ID: LIB3040-042-Q1-E1-B8
gtgacatgtgggtgatatctacagtagttgaattttctaactgaaatactgtatgacattctgaatgatctcaagctctctagtattatattcaggtagcatttacattcttccatgcgtgggggtgaaagaagtggttcgaatggtcgtctcaagaggatgaaaacttacgtgggcgtgcatgcgatctcatatctcgtcgctagtgtcgagtaaatgcagttcacagggcgtcttatatcaagttc

SEQ ID NO: 16713 - DNA, 112 bp, Glycine max
  Clone ID: LIB3040-042-Q1-E1-C5
ttaccccaagcgtttaataatatggccgtgatctgtcattaggtgcgacgagcgccactgggaaagaaaaaaggaaaacgagggaaaaaaagcggccgctctagaggatcca

SEQ ID NO: 16714 - DNA, 137 bp, Glycine max
  Clone ID: LIB3040-042-Q1-E1-C7
agacgtcagaacgaggagagaaaggacaaagataagataacagtaagagactcagagatgtctttgcaaagcggtcgatctagaggatttaagcttacgtactcatccatgagacgtcacaacgcttccatagtgtc

SEQ ID NO: 16715 - DNA, 130 bp, Glycine max
  Clone ID: LIB3040-042-Q1-E1-C9
gaaacacaaacctcacaaaaaaaaaaaaaaaaaaaaaaaaaaaaaagcgggcgccccaaaaggttcaagcctaagtacgcctgcaagccaactcaaaactcctccaaaatgtcacccaaattcaattcaa

SEQ ID NO: 16716 - DNA, 153 bp, Glycine max
  Clone ID: LIB3040-042-Q1-E1-D7
cgggtcgactcacgcgtcagcccgcgcctacaacaggagcgaaagagagactcaatggggcactcttcttcgtcacactaatcttcgaaactacacgacagcctatgtggtcgaaaatggcaaatgcccctcttcgcgtacggaaggttggag

SEQ ID NO: 16717 - DNA, 88 bp, Glycine max
  Clone ID: LIB3040-042-Q1-E1-H8
aagagaaaaaaaaaaaaaaaaaaaaaaaaagcgggcgctctagaggatcgaggtgtacgtatacgtacatgtgaagtcatagctcttc

SEQ ID NO: 16718 - DNA, 351 bp, Glycine max
  Clone ID: LIB3040-044-Q1-E1-D1
gtttttaatctttatctttggtattacaacttgattgtctaagtaactgctagttcttttctggattgtattgcgattactataataatagttttaagaactcagtcattttgtttccgttgaatgaaattgattgtcaaaatcacgtccattaagtatttgaatttttttagacatttttctacttcaaaaaaaaaaaaaaaaaaaaaaaaaaaaaaaaaaaaaaaaaaaaaaaaaaaaaaaattaaaaaaaaaaaaaaaaaaaaaaaaaaaaaaggggccgcccaaaaggttcaaaccttacttacgcgtgaatgcaacttcaaaacccttccaaagggtccccaaaat

SEQ ID NO: 16719 - DNA, 245 bp, Glycine max
  Clone ID: LIB3040-044-Q1-E1-H1
ggaaagatttgatcagctggaaagcaaaagagaaaacagaaaaaaaaaaaaaaaaaaaaaaaaaaaaaaaaaagaagaacaaaaaagataaaaacaaaaaaacgaaaaaaaaaaaaaaacaaaacacaacaaaagcggccgcccaaaaggatccaaccttacgtccccttacaagcaacgtcaaagcccttcaaaaggggcaccaaaattcaatccacgggccgccgattaacaactccccaacg

SEQ ID NO: 16720 - DNA, 194 bp, Glycine max
  Clone ID: LIB3040-045-Q1-E1-A5
tggtgaaacagccaccgaggaagagtgaaatggcactttctaacggaaccattagggtttttttatgctcatttttttggttaaactttgtttgaaatcaacgttcagcagtataattaatttgtttacagagaatgcagtacttttatcgcaattttcctggtttctactgaaaaccctccaaaaaaaaaaga

SEQ ID NO: 16721 - DNA, 293 bp, Glycine max
  Clone ID: LIB3040-045-Q1-E1-B11
gacagcaaaacaattttcaaactcaattaccattccataacctaaatctcctctttgtttccgagtcagagagcaatggcacgtaccaagcaaaccgctcgcaagtccaccggcggaaaggcgccgaggaagcaattggcgactaaagccgctcgcaagtcagctccggccaccggcggagtgaagaagccccaccgcttcaggcccggaacggtggctctgagggagatcagaaagtaccagaagagcactgaacttctgatccgaaaactcccattccagaggctcgtcag

SEQ ID NO: 16722 - DNA, 178 bp, Glycine max
  Clone ID: LIB3040-046-Q1-E1-A1
atacgaggttctctacatggttgatgctaatgatgagtatgctgttggccagcttaaggaatttgagggaaagaacttggtcactgctgcgaacgaaggcctaaaagttgatgatagcgatgacgaaaaaacaagagaaaattcaaattcagaaaaagccgccgcgctagaggatcca

SEQ ID NO: 16723 - DNA, 175 bp, Glycine max
  Clone ID: LIB3040-046-Q1-E1-C3
gagacctcaggtcaggcggggctacccgctgagtttaagcatatcaataaacaaaaaagagaagaaaaaaaaaaagggccgctctagaagatgcaagctgatgtaagcttacatgcgaggtcatagcacttcgagagggtcacctaaagtcagggtgactggacgtcattttaca

SEQ ID NO: 16724 - DNA, 409 bp, Glycine max
  Clone ID: LIB3040-047-Q1-E1-G7
aagacgacagaagggggcaggtagagagagcgagagaacaagaacataagggaaccacagcggcggtaacagaagaacaagcagagaatgggtcgagtgagaacgaagacggtgaagaaatcctctcggcaggtgatagagcgtcactactcgcgcatgaccctggacttccacacgaacaagaagcttctggaggaagtggcgataatcccgtcgaagaggctaaggaacaagatcgcggggttctcgacgcacctgatgaagcgcatccagaagggccctgtgcgcggcatctccctcaagctccaggaggaggagcgcgagcgccgcatggacttcgtccccgacgtctccgccatcaacaccgaccacatcgaggtcgacaaggaaaccctcgacatgctccact

SEQ ID NO: 16725 - DNA, 305 bp, Glycine max
  Clone ID: LIB3040-047-Q1-E1-H8
gatttcttcttcttccacattctggtagttggtgtgctctttactctttatgtaatcaccgtctatgtgtctgtcatttccatgtgttacaactctgtgagatgcgatggatacataaacaggaagacgaacttcgctcacacttgctttcgatggtctgctcaatctgaacctaattgtgatgctagggtacattttccacaccatgaaatcggaaaagaaacccaaaaccgagcggccgctcgagatgatgcacgcttacctaagcatacgtgctacgtcatagcccatcggtcgtgtcagct

SEQ ID NO: 16726 - DNA, 184 bp, Glycine max
  Clone ID: LIB3040-048-Q1-E1-A5
cgacggcagtgtttgtgttttgatttgaaaaaaaaaaaaaaaaaaaaaaaaaaaaaaacaaaaaaaaaaaaaaaaaaaaaaaaaaaaaaaaaaaaaaaaaaaaccggccgcccaaaaggatcaaacctaacttacccgtgaatgcaacgtcaaacccctccaaaagtgccaccaaaattcaatt

SEQ ID NO: 16727 - DNA, 57 bp, Glycine max
  unsure (1)..(57): unsure at all n locations
  Clone ID: LIB3040-048-Q1-E1-C12
gagacctcaggtcangcggggctacccgctgagtttaagcatatcaataagcgaagc

SEQ ID NO: 16728 - DNA, 83 bp, Glycine max
  Clone ID: LIB3040-048-Q1-E1-C5
gtcaggaattccgggctcgacccacgacttcagtagggctgcaaaagaacaacggagggggtaaccataatgctccataattt

SEQ ID NO: 16729 - DNA, 406 bp, Glycine max
  unsure (1)..(406): unsure at all n locations
  Clone ID: LIB3040-048-Q1-E1-D2
ccgggccgacccacgantcaacgggcgcgagaggacgacagaaggggagggttttgcgctgttgttgctgctcatcctccgtaacctccgagctctgcaccgaagaacgaagccatggggaagacacatggaatgggatctgctcgcaagctcaagtcccaccgcaggaggcaaaggtgggctgacaagtcatacaagaaatcacatcttggaaatgaatggaagaaaccttttgctggttcatcccatgccaagggaattgtccttgaaaagataggtattgaggctaagcagcccaactctgccattcgtaagtgtgccagggttcaacttatcaagaatgggaagaagattgccgcttttgtccctaatgaccgttgcttgaactacattgaagagaatgacg

SEQ ID NO: 16730 - DNA, 315 bp, Glycine max
  Clone ID: LIB3040-048-Q1-E1-F6
gtccatgaaattacgtgtatttaaaaaaaattacccacacgtatgtttgttaacaagtcttttaacccatgatttaaattgacgaagataaaaaaaaaaatgcacttaacccacacagattgcaatttgcaacctatatagtcagtgggtatcatcactatcatggaaagggtgcggtgttgcggtgagtttggtattgagtggctaagttcattgaagttagacgttagttagtccactgcaactgtaacggaataaagttagcattagacgtctatgaataccttctaattgtgccttccaaaaaaaaataaa

SEQ ID NO: 16731 - DNA, 333 bp, Glycine max
  Clone ID: LIB3040-048-Q1-E1-G2
gaccacgcgtcagacgacagatgggggataaacaaatcgttacggttttttggttgtgcgagtgagagtgagagagagcaatggaagacatagcagagggagtgaataacatcatcatctctgattcgtatcagagtaatcgcattcatgtctctaacaccaagaagcccctcctcttctatgttaatctggccaagagatatatgcaacatcatcatgaggtctagctctcaactctaagaatggctattgccacagtagtaactgttgctgaaattttgaaaaacaacagacttgccgttcaaaagaatatcaggacatctactgttcaca

SEQ ID NO: 16732 - DNA, 414 bp, Glycine max
  Clone ID: LIB3040-049-Q1-E1-B10
tgccaaaaaaacaacaaaagggaaaccacaaaatttatgtaactgatcaatctctttctctctctatctgtcgcttccatgcaatggcatatttgaagtcataaggttcaaaattggacaagttccgatctcacaatggggaaatcatcatcaaaatggatcatcaatgtactgtctgagataacgtcatccatatcaaatatttaaatacgcagaaagaatcatgttaatcatacaagaaagacttttaataacgtcaaaagtactataaaatggtttagccttaaaaccaaactcccatatcattgccacactttaggaagacctacagctggaaaatttagaagcagaaaaagtaatacttgagaatcaagaaatatacacaatgggatcaatttatgacaatgctgcact

SEQ ID NO: 16733 - DNA, 68 bp, Glycine max
  Clone ID: LIB3040-049-Q1-E1-C5
aattcccgggccgacccacgcgtccaaccacgcgtccgagacgacagaaggggcatatcaataagcag

SEQ ID NO: 16734 - DNA, 97 bp, Glycine max
  Clone ID: LIB3040-050-Q1-E1-A12
gccggtttcccgaacgatttgatggtttggaatgcatttcccaagcaacgagtcttcggttcgaaaccagcagagagagacaaaaaaaccaaaaacc

SEQ ID NO: 16735 - DNA, 282 bp, Glycine max
  Clone ID: LIB3040-050-Q1-E1-A4
cgggccgacccacgcgtccaaccaatcgtccgacggctgcgaaagggcgaccgaacggggaacctgatcgatctcattaccagttgccacactacaccgagattccccctaaacccgtttgcgttgttgtctgcgaagacatggcgacaaccaggagcgtgggaacgttgaacgagggtgatttgaaagggaagatggtgtgcgtgagggtcgatgtgaacgtgcctttggataacaagcttaacatcaacgatgacactagagtccgtgctgatgttgcca

SEQ ID NO: 16736 - DNA, 359 bp, Glycine max
  Clone ID: LIB3040-050-Q1-E1-D12
gcgtccgacaggagccaaaagacgaccgaaagggctgatgctggatctcccggaaatccttaacctagcatttatggcatgaagccagtccaacctgcagtggacaattttcctcaatatggacctgggcctgctgcttggggtgcacatgacatgcaacgagctcaaggacgccgataaattcctgttaagcaatcttattactggtaccttgggttgcaactttcaagatgattgactcatggttttaagaattaactactcctgaacgtcattgaatttgtctaataaatagtccctgaacttgtacgaacttttaaatacgcatatgttggttgaaggtgcagtagatgatgttt

SEQ ID NO: 16737 - DNA, 230 bp, Glycine max
  Clone ID: LIB3040-050-Q1-E1-E4
aacgaaacgacgacagaatggagattttatacagaagtaatcgatttcagtcacatagaattcacacaaaataaatgtggcaaaaacacagagaaaaaaaaacaacaaagagcggtcgctctaaaagatccaagctgacgtaggcgtgcatgcgaagtcataactcttcaacattgtgacctaaagtcaattcactgggcgtccttttacaacgtcatgagtgggaaaac

SEQ ID NO: 16738 - DNA, 138 bp, Glycine max
  Clone ID: LIB3040-051-Q1-E1-G8
ctcctcttttttcgttcactttgaattagctaggttaatttttttaacgcaaatttggtcaaggttattgaaatttctgtgtacggtgcagtgctaaaagaagatggcagtagaagtattagttttaaaaaaattatt

SEQ ID NO: 16739 - DNA, 280 bp, Glycine max
  Clone ID: LIB3040-052-Q1-E1-A12
ttacagctgctagacgacgaaatatagctcacgataagaaatcgatgtcttactccattttacggacgctctaaaggatccaatcttactgtacacatggattagacatcatatctcttctatagtgacattgagatacagatcacgtgacgtcgcattacaccttcatgacaggcaaaatcctggtattaggaaacttaatcgactagcatcacatcccaccttcgcaagcttacgttatatcaaatatgacctcatagattacacttcacaataatta

SEQ ID NO: 16740 - DNA, 419 bp, Glycine max
  unsure (1)..(419): unsure at all n locations
  Clone ID: LIB3040-052-Q1-E1-B9
gacccacgcgtccaccacgccttcgttacggttccaaaaaaacaacaaaagggaaggtttcaagcccttcgtcgctgttttttgtgtgtcgcttcttcgtangtgcagctgcaatggtgaagggacgccaaggagaacgtgtcagactctacgtgaggggtacaatccttggatacaaaaggtccaagtcaaaccagtatccaaatacatccctgatccaaattgagggtgtgaatgccaaagaagaagtagcatggtatgctggcaagaaaatggcctatatctacaaggctaaggtgaagaagaatggaagccattaccgctgcatatggggcaaggttacaaggcctcatggtaacagtggtattgtccgtgcaaaattcaagtcgaaccttttcaccaaatcaatgggagcccga

SEQ ID NO: 16741 - DNA, 365 bp, Glycine max
  Clone ID: LIB3040-052-Q1-E1-C12
tgggagggttagattcgttgatgttgttctaaaacgtcgacacattctccgtcgccacaacaacaatggctccgaagaaaggtgtgaaaggttccgttgtagcagcgaataagaaggttcacgagaaggtgacgaatcctttgttcgagaagcgtccgaagcagttcgggatcggaggcgcgctgccgccgaagcgggacctgacgcggttcgtgaagtggccgaagaacgtccaaatccaacgcaagaagcgcatcctcaagcagaggctcaaggtccctcctgcactcaaccagttcaccaaaaccctagacaagaatctcgccacgaatctatttaagatgctgctcaagtacaggccggag

SEQ ID NO: 16742 - DNA, 410 bp, Glycine max
  Clone ID: LIB3040-052-Q1-E1-D3
acgcgtccaatcgatgctacaagaccacagaaagggacacttctcataatttatgttgtgaagtttgtttactctcagaacgaatagaagatttaacgccatggatgagatattgaacaaagtggggtcttactggttctccaacaaggccatcaaggaatttaactctgtcggctatgatatcaactcactgtcaaccactattgaatgcggaaccaaatggttggtcaacaacttaaaacgaaagatgcacaaggcattaacagcagttgctaaaggagtatgatctacccataggaatctttcctctcgatgcgacatatttcgaatttaacgaacagacatgaaagcttgttgtttacattcctcaactgtgtgaagttggccacatggatacgtcagttctgcgt

SEQ ID NO: 16743 - DNA, 90 bp, Glycine max
  Clone ID: LIB3040-052-Q1-E1-E6
gagcagatcacaaagatccaagcttacgtaacgcgtgcaagccagctgctcgataggctataagctcacgtacgcgtacatgacaggtca

SEQ ID NO: 16744 - DNA, 95 bp, Glycine max
  Clone ID: LIB3040-053-Q1-E1-B5
ggtaactaaggtgctcccaatactaatcaccatgagcaacgttcaagggctaacgaacaacagctgccataatattgctgactagcgcaatctca

SEQ ID NO: 16745 - DNA, 126 bp, Glycine max
  Clone ID: LIB3040-053-Q1-E1-B6
ggttactaagggcgttacaatacacagccacataagacacttcaaacggccgttcgacacgatgcatccttacttacgcgtgcaagcgacgtctcagcacttctatattgtcacctaggttccatt

SEQ ID NO: 16746 - DNA, 323 bp, Glycine max
  Clone ID: LIB3040-053-Q1-E1-C5
gagagtcagattcgcacgcattgcttcgcctcacaacagcagctgcagcagcaatggctcccaaacgaggtggaaaggctccggctcttgccgctaagaagaagcctgagaaggtcacgaatccgttgttcgagaagcgtccgaagcagttcggaatcggaggggcgttgcctccgaagagagacttgactaggttcgtgaagtggccaaagaatgttcaaattcagaggaataagaggattctgaagcagaggttgaaggttcccccagctttgaaccagtttaccaaaactcttgacaaaaacctagcaacaagtctgttc

SEQ ID NO: 16747 - DNA, 322 bp, Glycine max
  Clone ID: LIB3040-053-Q1-E1-F10
ggagtcagattcgcacgcattgcttcgcctcacaacagcagctgcagcagcaatggctcccaaacgaggtggaaaggctccggctcttgccgctaagaagaagcctgagaaggtcacgaatccgttgttcgagaagcgtccgaagcagttcggaatcggaggggcgttgcctccgaagagagacttgactaggttcgtgaagtggccaaagaatgttcaaattcagaggaagaagaggattctgaagcagaggttgaaggttcccccagctttgaaccagtttaccaaaactcttgacaaaaacctagcaacaagtctgttc

SEQ ID NO: 16748 - DNA, 321 bp, Glycine max
  Clone ID: LIB3040-053-Q1-E1-F9
gacgcattgcttcgcctcacaacagcagctgcagcagcaatggctcccaaacgaggtggaaaggctccggctcttgccgctaagaagaagcctgagaaggtcacgaatccgttgttcgagaagcgtccgaagcagttcggaatcggaggggcgttgcctccgaagagagacttgactaggttcgtgaagtggccaaagaatgttcaaattcagaggaagaagaggattctgaagcagaggttgaaggttcccccagctttgaaccagtttaccaaaactcttgacaaaaacctagcaacaagtctgttcaagttgcttctg

SEQ ID NO: 16749 - DNA, 300 bp, Glycine max
  Clone ID: LIB3040-053-Q1-E1-H3
aggcaaaaagacaaccaaggggaagcaaaagggggaagctggtggacagatttacttgccagaagcttacgttagaaccatgaggactacttaatggagcaaatcagttggaaaaacgtgtagctagcttcccaactggcgtatctgaatgtggagaagcattatcaagccttaggagtaggacaacgagtactgtttgtgatgaatgtctatggtttaagaaaactgtctttagtcaacttgtgtgttttgttattcagttctcagcaataaactgcactggcaatctactttcatgtt

SEQ ID NO: 16750 - DNA, 145 bp, Glycine max
  Clone ID: LIB3040-054-Q1-E1-B4
ggatgaccggttaacaggaaaatctcgcgggccaaaagaaacgaaaaagcagaagaagaaaaaagcggccgctctaaacgatccaagcttacttacgcgtgcatgcaacgtcatagctcttccatagggtcaccgaaattcaatt

SEQ ID NO: 16751 - DNA, 301 bp, Glycine max
  Clone ID: LIB3040-055-Q1-E1-E12
gatgccgaaaagtagtaccaagatggcttcagttgtgtatctcctctttggcttccatctcattgttatcatgtcaagttccttacccgcaactagtgaagtgtttgcaaaacagtatccatccacagaacccgtggaagaaaaactcacccaactccacttctatttccataacaacataacgggggaacacccaactgctatgaaaactgttttgcctcctaaggggtccattcatggttttggggctacttacatgatggatgaccctctaactgaaggaccaagtccaacttcaaag

SEQ ID NO: 16752 - DNA, 249 bp, Glycine max
  Clone ID: LIB3040-055-Q1-E1-E7
atcagattgaaggttttagtcctgagggccaaggtctgcaattttcccccttaatcagcaagcatgcaatgatgcattgtaaatgaaagtcaatcatctgaaagcttgagaaaaaattatttgattgagctaaccatgcacaattttcttttcaaagttcatgtttaataataaacttaggcattacattagctaaaacatttcaaagttcatttgggcattagatcaaacacataacttgcaactcat

SEQ ID NO: 16753 - DNA, 259 bp, Glycine max
  unsure (1)..(259): unsure at all n locations
  Clone ID: LIB3040-055-Q1-E1-F9
gtctgatttccttatcgcaattaangaatacgtangagcaanggaaacaccctcgtcgaccgcaaaaaaaaaaaaaaaaaaaaaaaaaaaaaaaaaaaaaaaaaaaaaaaaaaaaaaaaaaaaaaaaaaaaaaaaaaaaaaaaaaaaagaaaaaaaaaaaaaaaaaaaaaaaaaaaaaagggccccccaaaaggatcaaacctaacttacccttgaatgcaacttaaaaccccttcaaaaatgtcaccaaaattaaatt

SEQ ID NO: 16754 - DNA, 57 bp, Glycine max
  Clone ID: LIB3040-055-Q1-E1-H5
catgtataattgagagaaggtgggaattttatattcttagttttatcctttttgaag

SEQ ID NO: 16755 - DNA, 200 bp, Glycine max
  Clone ID: LIB3040-056-Q1-E1-F7
gttcgcaagttaagcagttaggggcagctgtagtattagaaatgctattttttgtttcccttttctgtggtagtgatgtctgtggaagtataagtaaacgttttttttttctctggcaattttgatgataaagaaaatttagttcttcaaaaaaaaaaaaaaaaaaaaaaaaaaaaataaaaaacaaaaaaaaataaaag

SEQ ID NO: 16756 - DNA, 249 bp, Glycine max
  Clone ID: LIB3040-057-Q1-E1-D1
attcccggatcgacccacgcgcccacccacgcgtcagggctgccaaaaaaacaacaaaagggaaccaaacttaatccccccttggttgcagcttcagcaccaccggaaagcaattcaatccgcaatgggaaccaatttgaaggcaggaggtaattccaaaagaaccaaccttaaagccccaaatccaatggtaattaactcaaactcctcctcaaaccgttacgttttcctggtccgaagactgggaat

SEQ ID NO: 16757 - DNA, 390 bp, Glycine max
  Clone ID: LIB3040-057-Q1-E1-D2
acgcgtcaacccactcgtccgtcgggttgcttgtggtgggttcccgtgggttcattctctttgcgcagttcctttcttcatagcctaccacttttctgctttcatctactctcacttcgcttcacaaactgccatgcagagggaaactcggataccagctgcaatgtctatgccaatatctaggatcatgaaggaattcccccggatcagcaaagtctcatcttcgccggaaagcaactcgaggactgccgtaccctcgccgactacaacatccagaacgagtcaacccttcaccttgtccttcgtctccgtggtggcatgcagatcttcgtcaagactctcactggcaaaaccataagcctagaggtcgaaagctctgacaccattgac

SEQ ID NO: 16758 - DNA, 161 bp, Glycine max
  Clone ID: LIB3040-057-Q1-E1-E10
gagattagggtttctgcagccgccacactccctttctgaacgagatctcagatctctggttgatgcttcaaagaaccctaatctcatggctattgtttcctgcacttccatcattgcttccaaatgaatgaatgaatgaatgaatatcaaaaaaaaaagaa

SEQ ID NO: 16759 - DNA, 278 bp, Glycine max
  Clone ID: LIB3040-057-Q1-E1-E3
aattcccggatcgacccacgcctccatccggtcgtaagaacacgcgtcaggggtacaacagtatgacaacgggggattcactcatctctcactccctcagcatttctatctatctcatgtttcaactttcccaacgggcactcatttatctctttgagttacaatcacgcccgcaacaagtcgacagaatcgcaatccacagccacgacttcagcctccattacatcacaccactcgtatactcgcatcaccattgtgatatttgacgccaatgcgag

SEQ ID NO: 16760 - DNA, 233 bp, Glycine max
  Clone ID: LIB3040-057-Q1-E1-H7
cacgttttgcgcacaatcctgcgtaaacgcagatggacccatgttacttcctcatgatttggcttcagatgcgtacaacatcaccatcacttgagactgctcaaaagaaagagttatctccagagcagagcgggctaatataccacccttcctgcaactgatcaaaatagcttgctaggagatttaataagaggatgctctaaaggatccaagcttacataatcctgcatgcc

SEQ ID NO: 16761 - DNA, 267 bp, Glycine max
  Clone ID: LIB3040-058-Q1-E1-A8
gcttgttggaaatgcacctgcatagtctagtgcttaattaggttgctgaagagtgaagaatgagacagcctggttcgaaggggaaaagcctaaggatatatcaaaggatcctatatgtataaattaaatgttgcttttttaccttcggtattgatatctgaattctaatttgacatcctatatatgaatatatgatcaatgtgtttctttaaaaaaaaaaaactacatcacaaaaaaaaagcggccgctctagaggatccaagctta

SEQ ID NO: 16762 - DNA, 159 bp, Glycine max
  Clone ID: LIB3040-058-Q1-E1-B5
gaatatcaatatacgaagaaaaaaaaaaaaaaaaaaaaaaaagaaaagaaaaaaaaaaaaaaaaaaaaaaaaagcggacgcgctacacgataggatctaaccttaccttccattgcatgtcatatcacatctcttctatcatgtaacttaaattcaatt

SEQ ID NO: 16763 - DNA, 258 bp, Glycine max
  Clone ID: LIB3040-058-Q1-E1-C7
tacggggaactaggatccacacaacgaaaatcacttgccattcgttggttattgggggcatcccgaaatcgtccgggtcgatatatggctttcaaattaagttccgaattagtggatgctgccacatgtagtggcgatgccagacacaaaataaaagacggttacggcagctaacaagcggacgctcaagaagatccaagcttacttacgcatgcatgcgacatcatagctcttctatggtgtcacccaaagtcactt

SEQ ID NO: 16764 - DNA, 331 bp, Glycine max
  Clone ID: LIB3040-058-Q1-E1-C8
agatgtcagtacagcagagaaaggtccagatgcgggaatagtagagacaggctgacattacgatacagctgccataatccgaaaaaaatgatacggctgtcaaaagggttcaaactgacattgctgtgcattcaacatcaaaaggtatcgatgatgtcaccctacttcaagttaatggcccttcgattataaattccggtactggaaaaaccatgcctttaccggctttatcgcccttacaacaaatccccgttccgcaaccaacattatgaccaaaaggtgcattccaaattcccttcccaaaatttgctcacccggatattgcaatggg

SEQ ID NO: 16765 - DNA, 203 bp, Glycine max
  Clone ID: LIB3040-058-Q1-E1-E11
aggtacagctgcgaggagcacacagcagggattgtagcatgactagtaaatgtcaattttaaaacttagtttcaattctactccgcatcgccgattctcgccatgccgaaagccaagtgggcgctctaaaggatcgaaacttaggtacacgtgaatgcgacgtcataggtcttcgaaactgtcacctaaatctcacttcagat

SEQ ID NO: 16766 - DNA, 250 bp, Glycine max
  Clone ID: LIB3040-058-Q1-E1-E2
cgggccaaaagtggctttgctaataccattgtggctatgagtggtatgatatcatacttgtttacaattaagttttgaatagtacaacccttcacatgattatcactgataactggccgtcaaacccaaacccaaagccatttccttgcaaaagcggccttccaataggatccatccttacgtacacatgcatgccacttcataggtcttctacattgtccaccaaattcagttcaccggacgtcgtttt

SEQ ID NO: 16767 - DNA, 327 bp, Glycine max
  Clone ID: LIB3040-059-Q1-E1-F6
taaagagaatgagacatacgggggtcctctgagcagtcacgtagggctcgcatttcgcgatcgccctatacggtcgctctttcctatccttgcatgcgatctaaaagatctaccattatgtaagtgcagttcaatacattgaccgtgcttttagaaactattaactgagaagcagttgcagggatttaacttacgctccttgcaggagacgtgtcttacgttaccctgctgcatatgtaacaagtcggacccaatgtatattcacaccagttgataaccccgaatggggattgaaaggcacctactttcgacaccttcatcacagcg

SEQ ID NO: 16768 - DNA, 370 bp, Glycine max
  Clone ID: LIB3040-060-Q1-E1-A3
ttcccgactcgacccacgcgtaaggaggatgcgacagaacgggactcagcatttgcatttcctcttcatatacagtacacacttcagctggtggtagcctggtagatagtgtgcttccaaaatgaagaacaaaaggaagactttactattgctgctgctcatggctgcaactctcttttgcatgccaattgtgtcgtatgctgtttctaatgtcaacattcaagaccatctcaccaatatttctgagctggtaaaaggtccaaatagaaggcttttgtcatttgtggattgtggagagaggtgcagggtgaggtgcagtttgcactcaaggccaaagatttgcacgagagcttgcgggacatgctgtatg

SEQ ID NO: 16769 - DNA, 289 bp, Glycine max
  Clone ID: LIB3040-060-Q1-E1-E2
taattcttgagtattaatgttgattgcttgtgtcaatatgtccaagggattgggtatcagcaagtagtttagaatttgcaaccatgcggaagctagggtagaatacattagtgaattggggatgagcaagagagatgagtagagaattggggatgagcaagttcaaacctagacattcattaatcaagatcgacgtcacaatccaagtctagtatttctatctttacttaattattttattgtcatttaatttttattgcaatttattttatgttatttatttcatggc

SEQ ID NO: 16770 - DNA, 128 bp, Glycine max
  Clone ID: LIB3040-060-Q1-E1-F8
aaaaactgacggcaacatgatgtgatgtgaatgtgaatgtaatggcggccgcactagatgattcaggcttacgtccgcgtgtatgcgacgtaatacctcttctatgttgtcatctaaattcagttcag

SEQ ID NO: 16771 - DNA, 137 bp, Glycine max
  Clone ID: LIB3040-060-Q1-E1-H5
agtttaagcatatcaataaagcggaggagacgctcaaaaggatcaaagcttaagtaagcggtcgatctaaaggaataaagcttccatacgcttgcatgcgatctcatcactcgtcgacattgtcacctatcttcact

SEQ ID NO: 16772 - DNA, 322 bp, Glycine max
  Clone ID: LIB3040-061-Q1-E1-H9
gaattgcatttgtgttgagtttcttcttctgttgcgttgtgtgtgagtgtgggcacggtaagatgcagaccattgctaggcgcttagggcagcaatcgctgaggccatcgacgtcgctcaagtccatctatccaatttccgatcaccattatggaatggatcacgagcgttacgtttctaccctcgccaccaagggagttggtcacctcgttcgtaagggcactggtggacgatcctccgtcagtggcattattgctacagtattttggggcaactggattcttaagtcgttatgttgtccaacaacttgctaaaatgggat

SEQ ID NO: 16773 - DNA, 452 bp, Glycine max
  unsure (1)..(452): unsure at all n locations
  Clone ID: LIB3040-061-Q1-E11-G7
aattcccgggtcgacccacacgtccacccacgcgtccgaagacgacagaagggggcctacttcatctctcttataatcacacacacctaccttatagctatggaaactggaggctttcatggctaccgcaagctccccaacacaacctctgggttgaagctgtcagtgtcagacatgaacatgaacatgaggcagcagcaggtagcatcatcagatcagaactgcagcaaccacagtgcagcaggagaggagaacgaatgcacggtgagggagcaagacaggttcatgccaatcgctaacgtgatacggatcatgcgcaagattctccctccacacgcaaaaatctccgatgatgcaaaggagacaatccaagagtgcgtgtcggagtacatcagcttcatcaccggggaggccaacgagcgttgccaganggagcagcgcaagaacataac

SEQ ID NO: 16774 - DNA, 551 bp, Glycine max
  Clone ID: LIB3040-040-Q1-E1-A9.F1
ccctccggaaagtaattgcatggaattttgattaagcttgtattttccgtttggaatggtgaatatacagtcgattaatattaaaatgaattgtttaaatgtagttagttacctatgcagcaacaattgcacggccttgctacgaacaaaaaacttaaaacaatacttctttccgctaccaatgagattgcttcccctacgtgttaaagaataacttaaaagaattgatttttgaagaacaaacacccattaagcaagcttctttgcacgaccacttgaaggagccccatcctctttttttgatccagatgcctctggcttccgagcccacgcagtagccctatctggctcataacgataatcatagaacagctcctccccggcacaaatccgttccttggcaaaaatgcctaccctatgatctccagcaaccataataacctttgcataacaatttgggtcaggagaatggttcgcaaacttcaatttatcaccctttcggtaagcattcaggacaaactgatcattcaaattaaagagaaaagatgaat

SEQ ID NO: 16775 - DNA, 520 bp, Glycine max
  Clone ID: LIB3040-040-Q1-E1-A9.F2
ccctccgggaaagaattgcatggaattttgattaagcttgtattttccgtttggaatggtgaatatacagtcgattaatattaaaatgaattgtttaaatgtagttagttacctatgcagcaacaattgcacggccttgctacgaacaaaaaacttaaaacaatacttctttccgctaccaatgagattgcttcccctacgtgttaaagaataacttaaaagaattgatttttgaagaacaaacacccattaagcaagcttctttgcacgaccacttgaaggagccccatcctctttttttgatccagatgcctctggcttccgagcccacgcaggagccctatctggctcataacgataatcatagaacagcttctccccggcacaaatccgttccttggcaaaaatgcctaccctatgatctccagcaccataataacctttgcataacaatttgggtcaggagaatggttcgcaaacttcaatttatcaccctttcggtaagcatcaagaacaaact

SEQ ID NO: 16776 - DNA, 583 bp, Glycine max
  unsure (1)..(583): unsure at all n locations
  Clone ID: LIB3040-040-Q1-E1-F9.F1
cgtatcaacctctagatttcttaaatagccaataatcaaccataagaaacaaataaagtaatcatgaacaccacaaaataaagacaaaacctgcattaaaaagtaagaaaaaaactgcattaaaaaaacaaaggaaaaaactacactttaattcataaatctactaaattatgcagttgtacagatgggagcactggctgacctcgacacattatttccacctctgctccactggcaatattaagtttcttcaggaggtacttctgaaaaaaatcagacaggcacagtaccatcctttattcgtaagtaaacaagctgagatctgttgcaagggaacatctcctttcctgactgtattcaactgtcagttacatttatcaactgtgaaatcaagctgagagttcagcatcaagcacttcctgggattccacactcaaaaacacaaagctgatcaacattgttacgcataccaaatctttgaaactctatatcttcttgatgcaaagtttgaatcttgagacttgnttccagagagggggattggcgtttgcggcctttgaagcaacgtccatttcggagattt

SEQ ID NO: 16777 - DNA, 474 bp, Glycine max
  Clone ID: LIB3040-040-Q1-E1-F9.F2
cgtatcaacctctagatttcttaaatagccaataatcaaccataagaaacaaataaagtaatcatgaacaccacaaaataaagacaaaacctgcattaaaaagtaagaaaaaaactgcattaaaaaaacaaaggaaaaaactacactttaattcataaatctactaaattatgcagttgtacagatgggagcactggctgacctcgacacattatttccacctctgctccactggcaatattaagtttcttcaggaggtacttctgaaaaaaatcagacaggcacagtaccatcctttattcgtaagtaaacaagctgagatctgttgcaagggaacatctcctttcctgactgtattcaactgtcagttacatttatcaactgtgaaactcaagctgagagttcagcatcaagcacttcctgggattccacactcaaaaacacaaagctgatcaacattgttacgcataccaa

SEQ ID NO: 16778 - DNA, 558 bp, Glycine max
  Clone ID: LIB3040-049-Q1-E1-E3.F1
cgcaaataaaagtgaataaaagattgttgaataaacaaattcgtcaaatgtacaatgtgctcatccctgaacaggaggacgctgtaagtactaaaacacgaaaaaacgcagtcctaaattggaatttcacacagccacgagcggtgaaaatccaaaaggagataacggcgacaacggcggaatgttgaaaatatccttgacgtcactgtcccagaacccggtccacatagacggcgttaacggcatccccctaaaacaactcacatcatgctccgttattttctccttcttcaccaccgcctttacatcctccaccaccacctcctcctcctcgcggcgggcttcctctcgacgtcgacggggcgagagacggtctccgccgcggtgttaattcgagggggagttgaggatggcttggagcgcggactgaaggggctcggtcgtagcttggggcttcgatggggtgtcgaggttcgagcaaacctagaccgcgttgttcgggtcgcgatctcggcgcgaactgcccacggcgctgaggacactctgtagtgctcttct

SEQ ID NO: 16779 - DNA, 466 bp, Glycine max
  Clone ID: LIB3040-049-Q1-E1-E3.F2
cgcaaataaaagtgaataaaagattgttgaataaacaaattcgtcaaatgtacaatgtgctcatccctgaacaggaggacgctgtaagtactaaaacacgaaaaaacgcagtcctaaattggaatttcacacagccacgagcggtgaaaatccaaaaggagataacggcgacaacggcggaatgttgaaaatatccttgacgtcactgtcccagaacccggtccacatagacggcgttaacggcatccccctaaaacaactcacatcatgctccgttattttctccttcttcaccaccgcctttacatcctccaccaccacctcctcctcctcgcggcggcgcttcctctcgacgtcgacggcggcgacggagacggtctccgccgcggtgttaacttcgagggggaagttgaggatggccttggagccgcggagcctgaaggcggctcggtcgtaggccttggcg

SEQ ID NO: 16780 - DNA, 346 bp, Glycine max
  Clone ID: LIB3040-040-Q1-E1-A9.R1
gggatcaaccctgccgacagtataatccatgtggttgccaaacggcttgtggaaagcagtgtccttgtcttcaaaatggaacctggctgtgagaagtactgtggacgccccaagagctgcaataatcgatttcgtggctgtcattgtgctaagagtcaatgcagaagccgtcaatgtccatgttttgctgcagatatggaaggggatccagagtgttgtaggaattgtgtgggtcagttggtgcgttggtacacttgggattccgtagccaaagagtggacaatttattaatttagaaacattaatcttcttctcatacaacagctaagggttcttcttggaaggg

SEQ ID NO: 16781 - DNA, 423 bp, Glycine max
  Clone ID: LIB3040-040-Q1-E1-A9.R2
ggatcaaccctgccgacagtataatccatgtggttgccaaacggcttgtggaaagcagtgtccttgtcttcaaaatggaacctgctgtgagaagtactgtggacgccccaagagctgcaagaatcgatttcgtggctgtcattgtgctaagagtcaatgcagaagccgtcaatgtccatgttttgctgcagatagggaatgtgatccagatgtttgtaggaattgttgggtcagttgtggcgatggtacacttgggattcctagccaaagaggggacaattatgaatgtagaaacatgaagcttcttctcaaacaacagcaaagggttcttcttggaaggtctgatgtatccggctggggagccttcttaaagaaagtgttggtaagcatgaataccttggagagtatactggagagttgatt

SEQ ID NO: 16782 - DNA, 406 bp, Glycine max
  Clone ID: LIB3040-040-Q1-E1-F9.R1
ggatttttgttttgggtttttgctcgctgatgttttcacaaaatcggtttccactgatttcgcattcttcactcttccatgtctaaaatctccgaaatggacgttgctttcaaagacgcaaacgccaaatcccctctctgggaacaagtctcaagattcaaacttttgcatcaagaagatatagagtttcaaagatttggtatgcgtaacaatgttgatcagctttgtgtttttgagtgtggatcccaggaagtgcttgatgctgaactctcagcttgagtttcacagttgataaatgtaactgacagttgaatacagtcagggaaggagatgttcccttgcaacagatctcagcttgtttacttacgaataaaggatggtactgggcctgtctgatttttttcag

SEQ ID NO: 16783 - DNA, 403 bp, Glycine max
  Clone ID: LIB3040-040-Q1-E1-F9.R2
ggatttttgttttgggtttttgctcgctgatgttttcacaaaatcggtttccactgatttcgcattcttcactcttccatgtctaaaatctccgaaatggacgttgctttcaaagacgcaaacgccaaatcccctctctgggaacaagtctcaagattcaaacttttgcatcaagaagatatagagtttcaaagatttggtatgcgtaacaatgttgatcagctttgtgtttttgagtgtggaatcccaggaagtgcttgatgctgaactctcagcttgagtttcacagttgataaatgtaactgacagttgaatacagtcaggaaaggagatgttcccttgcaacagatctcagcttgtttacttacgaataaaggatggtactgtgcctgtctgatttttt

SEQ ID NO: 16784 - DNA, 544 bp, Glycine max
  Clone ID: LIB3040-049-Q1-E1-E3.R1
gaacacaatactcttcaaacactttaccttcttcttaagacaacaagctaaaagcgcttctaacttaagtgatggctaacgctgctgaagtttcagcgttgaaacgcatcaagttgcatcttttgggtgaactctctccactggccactccccaaaacaaatttgaccaaacaaaccctagcccctctgaatcttccaattccgaatcttcttctatttctcttaaccactacttcactgacctcctcgaacccgaaattgaatttcctctcttcgaattcgattccaaaccccaagtaatcgacctcgaaaccccgaaaaccctaatttcagctgagaagaagcctcaatttaatcggaaacgtcgctgctaatcgctgtttcgaagaagaccgagtggatccaattcggaaaccctgtagtggcggcgcggtagaacctagctgagaagaagcactacagaggtgtccgtcagcggccgttgggcaagttcggcgcggagatccgcgacccgaataagggcgggtctaggggtttggtcgga

SEQ ID NO: 16785 - DNA, 491 bp, Glycine max
  Clone ID: LIB3040-049-Q1-E1-E3.R2
gaacacaatactcttcaaacactttaccttcttcttaagacaacaagctaaaagcgcttctaacttaagtgatggctaacgctgctgaagtttcagcgttgaaacgcatcaagttgcatcttttgggtgaactctctccactggccactccccaaaacaaatttgaccaaacaaaccctagcccctctgaatcttccaattccgaatcttcttctatttctcttaaccactacttcactgacctcctcgaacccgaaattgaatttcctctcttcgaattcgattccaaaccccaagtaatcgacctcgaaaccccgaaaaccctaatttcagctgagaagaagcctcaatttaatcggaaaccgtcgctgctaatcgctgttccgaagaagaccgagtggatccaattcggaaaccctgaggtggcggcgccggagaaccagcctgagaagagcactacagaggtgtccgtcagcggccgtggggcaagt

SEQ ID NO: 16786 - DNA, 105 bp, Glycine max
  Clone ID: LIB3040-009-Q1-E1-E8.R4
aattaggtttcattgtgtgatctagaattaaaattaggttactgcttattgtaattcgtatttttcaatcgcctttttgttgtaatattcatcttatttcgaagt

SEQ ID NO: 16787 - DNA, 477 bp, Glycine max
  Clone ID: LIB3040-017-Q1-E1-G12.R3
ttctcgtttcttcttctccccaccataggaccttccgcctgtttcttgttataggctctcatgttcttctcgtactccactttccttttctcagactttgccacataaggtgctttttcagcatcagactggtcttccattttgctccagcagctttgcccacagcagacactgctttgttttcaggatgttctttgttgaataccttcctgaactcctccatgaaaacgaagaaagcacttggaggcctctttggcttgttagggtctttcgctgccttccccttgccggcgggtttcctagccttggtggcggctcccttcttattcacagcaagtttgggatcggctctcttagattcggtcttggactttcctcctttcatgacggatacgagaggggaacagggtcgggagttagggtttgggtggagagagaagagagaaagatgagaatgaatgataatactatgacatc

SEQ ID NO: 16788 - DNA, 587 bp, Glycine max
  Clone ID: LIB3040-022-Q1-E1-F10.F3
tggccggaaagatcaagaagggcgccggaggtagaaagggcggcggcccaaagaagaagccggtttcaaggtccgtcaaagccggtctccaattccccgtcggaagaattggccgttatttgaagaaaggaaggtacgctcagcgtgtcggtaccggtgctcccgtatacttggctgcagttctcgaatacctagctgccgaggtgcttgagttggctgggaatgccgcacgtgacaacaagaagaacaggattattccaagacacgtgcttttggcagtgaggaacgatgaggagttggggaaattgcttgctggagtgacaattgcacatggtggcgtgcttccaaacattaaccctgttttgttgcctaagaagaccgagagggcttccaaggaacctaaatctccatccaaggctaccaaatctcctaagaaagcttaagtgtttttattttattttatttgaatatgtaaatcagtctttagatgctttttatgtgaaagaaaaaatatctattgcaaacactgtaattcctatcgtctcgcatgtaggagtttgctacattaatgaaatcttctttatttc

SEQ ID NO: 16789 - DNA, 464 bp, Glycine max
  Clone ID: LIB3040-029-Q1-E1-E4.R3
gttagggttcccaatttctccaccgatcagaaaatgagttcaactggtggttctaccaagggcggaaggggcaagcccaaagcctccaaatccgtttcaagatcgcagaaagctggtctccaattccccgttggaagaatcgctcgattccttaaggctgggaaatacgccgagcgtgttggtgctggtgctcctgtgtacctctctgcagtgctcgaatatctcgctgctgaggttttggaattggctgggaatgctgctagggataacaagaagaaccgtattgttcctaggcacattcagcttgctgtgaggaacgatgaggaactgagcaagcttttggggtctgttaccattgccaacggaggtgtcttgccgaacattcaccagactctgcttcccaagaaggctggaaaggggaagggcgaaattggatctgcctctcaagagttttaggggttttg

SEQ ID NO: 16790 - DNA, 268 bp, Glycine max
  Clone ID: LIB3040-030-Q1-E1-E5.F4
cggcgagcataaatgggagcgccggtgccaaggcggcgagagtaacggcctttcttcaagtacctggcgacgcggctgacggggaattggaggccagctttgatggatttggaaacggacttcttcctgtcacctcttcttccagcagcgcctttgggtggggcttccattgcagatccgagaaacgagcgaaacggtttgtttcggaggaaatgcgagaaaccagttttgctttttctatttctttcaatgtttttgtagcagtgtc

SEQ ID NO: 16791 - DNA, 404 bp, Glycine max
  Clone ID: LIB3040-030-Q1-E1-E5.R3
tgttgctggcggtgaggaatgatgatgagctggggaaactgcttcaaggtgtgactattgctagcggtggagtgttgcccgacattaacccggttttgttgcctaagaagagtaccactgcgccttctgagaagtcctctactcctaagtcccccaaatctcctaagaagaaatagaagtttcattttgtaaaggcttatcgttttttatttttattttttgggggtaggggttggtaacattaccatatatatatatatagttcttaggttaggtgaaatatgatggtgtaatttagcgccaggtgttcgcttttttgcttttttggtcaccccatcgatggctgaatatgatgttaaatgtagtgggttgccaattcgtgtatggaagaagcctttttcatg

SEQ ID NO: 16792 - DNA, 406 bp, Glycine max
  Clone ID: LIB3040-032-Q1-E1-B3.F4
aacggcggtctggatctcgcgagaggtgatggtaggcttcttgttgtagcgcgcgagcctggaagatcctgagcgagcttctcgaagagtcgttgatgaagctgttcatgatccccatggctttgctggagatcccgatgtcagggtgcacttgcttcagcaccttgaatatgtagatcttgtacgtctccacgctcttcttgtttctcttcttctccttcttctcgcccgaggcgggttcctttgggatcttcttctcggcttttgttttctccgccggagccttctccgcgggcttcttctccgccggtttcttctctcccttggccatggattggggaaagagtgaagagaatgcgaattcgagtgtttggagagtagaaatgctgaaaaacgaagatggttc

SEQ ID NO: 16793 - DNA, 77 bp, Glycine max
  Clone ID: LIB3040-032-Q1-E1-B3.R3
tgaggaatttagggctttattatgatgtatattttcaatcttcgcggtgtaacggaacggcatattcttgggtaact

SEQ ID NO: 16794 - DNA, 484 bp, Glycine max
  Clone ID: LIB3040-032-Q1-E1-F8.F4
gtgcttggccaattcaccgggcagcacaagcctgaccgcggtctgaatttcccttgaagtgatggtgggtttcttgttgtagcgggcaagtctagaagattcctgggcaagcttctcgaagagtcgttgatgaagctgttcatgattcccatggccttgcttgagataccaatgtcagggtgaacctgcttcagaaccttgaagatgtagatcttgtatgtctccacgctcttcttgtttctcttcttcttcttaccttctccgccggcgcctccctccttcggaagcttctttccggcctttggcttcttctccgccggagccttgtctcccaccgtcgatttcttctcctccacaggcttcttctctgctggcttcttctctgcctttggtgccatcacgatttggtgcttcgaacggagttagggttttgaattggaaaatggaatttggtaaagcaaaagagggattgaagttgtgaatc

SEQ ID NO: 16795 - DNA, 91 bp, Glycine max
  Clone ID: LIB3040-032-Q1-E1-F8.R3
cttttctgtcccaatttgagattttaatcagtagtagacttttttttgtttgataggatttgtaattgaaagaatggtcttgggttataac

SEQ ID NO: 16796 - DNA, 235 bp, Glycine max
  Clone ID: LIB3040-043-Q1-E1-E12.F3
ttaaggacgccgcgggtttcttcatagatgaggccactgattctcttgacgccgcctctgcgagccaaacggcgaatggcgggttttgtgattccctggatgttatcgcggagcaccttcctgtgcctcttggctcctcccttacccaaacccttgcctccctttccacgacccgacatctttgctcgcttcttctgattctgattctgactgtttctttcggagtttgtttttc

SEQ ID NO: 16797 - DNA, 242 bp, Glycine max
  Clone ID: LIB3040-043-Q1-E1-E12.R4
cagtagcagggcaggactctctatggtttcggtggactaaattttagggttttgatgggcttagcagctggttatttttgtaaatggtcgtttgtttgggagtatttgattttgtgcttttttgttttttagcctttcttgttaggtgtattggtattcgcggcttcaattgaaatggaacaaagagtgttttgttttaaataaaaaataaaaaacaaaaacaaaaaaacaagcgttcgttt

SEQ ID NO: 16798 - DNA, 472 bp, Glycine max
  unsure (1)..(472): unsure at all n locations
  Clone ID: LIB3040-044-Q1-E1-G2.R4
ttctcgctcctcaagagccggtcttcagttccctgttggacgcattcatcgtcttctgaagtcaagggtgacagcacatggnaagagttggggcaacagctgcagtttattctgctgccatcctggagtatttaactgcagaggtgttggagttggccggcaatgcgagcaaagatctgaaggtgaagcgtattacccctagacatctacagctcgccatccggggagatgaagaacttgataccctcatcaaaggaacaatagctggtgggggtgttattcctcatatccacaagtcccttatcaacaagtcctcaaaggaatgaggagggtttatacattatttgaatcaagaaattgactgtaaatttggctatatcttttgatatggataatttgctccctgcattagtttggttgaactcaacttcaaaagaaatatgaaaatgtcttatttctntcatttgcnnaa

SEQ ID NO: 16799 - DNA, 669 bp, Glycine max
  Clone ID: LIB3040-044-Q1-E1-H3.F3
gctgtgtagaatacagcgttgcttgctcagcaccaacgggcttgcccatgatcatcccaggaggtcctacaacaggatgctgtggagggacatagtaatatggcatatcagctggagaattcaccaatggaatagtagccttggttattccaagtccttcctctttcaactcatctcttgggataatatcaaccaagaaatcaaaaacatcgtttctcgaaatagcagctgctatatcattcttttgtagagttctcctcttgttctcttctgtgtggatccaagatctcaacgtcaactctaatatgaacatttcacatgcttttgcaaatatgactggagcttctgcagaaatcatccggacatcttcatcagctttcattatcttttttatccgagcaagaggaagactgtggtttttaaagtcaattgtttgctcaatttcttgcatttggtttgaccagaacatttgaagctgctgttgttggtgttgctgctgttggtggtggaaatgctgtgcttgctggtatgcaagctggtgagcagaactagagaaggcagctggagcctgagttggggaaggaacagctacagcaggcgtgccagaagccaccatgggagcagtcgggtagtgagaagataggccatttggctagcacctgtggcaac

SEQ ID NO: 16800 - DNA, 153 bp, Glycine max
  unsure (1)..(153): unsure at all n locations
  Clone ID: LIB3040-044-Q1-E1-H3.F4
ttaatctacaaaccatggnaaattgggcgcgacttcctttgcgatggacggtgggtcaatgggnnggaggagaaaaccctaagtangcagcaaactgagaaagacaggtttggtttggtttggtttggtttggtttcaattaaaaagggaggc

SEQ ID NO: 16801 - DNA, 335 bp, Glycine max
  unsure (1)..(335): unsure at all n locations
  Clone ID: LIB3040-044-Q1-E1-H3.R3
atgatgaccatgcaattcaattannggtcggaaagtagcatgcaccttatgattattacaaatttacttaatgcctttaagtcagctgtagtttagtgttttgcattcgaaaaatgccaaagattgtttgaggtttcttgcactcatttatgattgtatgagctcttatgctgagttacttttggttgtgtttatttgaggtactggtgtggtagttaaattagtttgtagctgtccataagtaaacagcgtagctgcttaattaggaggtctgaaatgatgaaatagtttgtattgttattgcagaaggtaggttttattcagtatttcatttt

SEQ ID NO: 16802 - DNA, 649 bp, Glycine max
  unsure (1)..(649): unsure at all n locations
  Clone ID: LIB3040-047-Q1-E1-C9.F4
ccttgaagcctacggctgctaaagatagggacctttgcaagttccatgctgatgattatgtggcctttttgagaggcatcacccctngaacgcagcaagatcaattgagacagctgaagaggtttaatgttggcgaagactgccctgtatttgatggtctttactccttctgccagacatatgcaggaggttctgttggtggtgctctaaaattgaaccacggagcatgcgatgtcgcaataaattgggctggtggtctacatcatgcaaagaagtgtgaggcttctgggttttgctatgttaatgacattgtgctggctattttggaacttctcaaaatacatgaggtttccctaattaattccccacactatcttattgatgcatggctgttctcattttaatttagattgaatttactctttacatgaccaacatctgcaaaattccataacatccgtttggaactgtgaggttccaaaattgaaagtgtattttagaagaaagagggataagtgagtatgtgctagagaacagtggtaatgtggacgggttataatagctagtggttagtggtaattagtaagggaagtatataaatataaatactgttacaatcttgagtagggattggtttttggcttcttgg

SEQ ID NO: 16803 - DNA, 372 bp, Glycine max
  Clone ID: LIB3040-047-Q1-E1-C9.R3
atcttattgatgcatggctgttctcattttaatttagattgaatttactctttacatgaccaacatctgcaaaattccataacatccgtttggaactgtgaggttccaaaattgaaagtgtattttagaagaaagagggataagtgagtatgtgctagagaacagtggtaatgtggacgggttataatagctagtggttagtggtaattagtaagggaagtatataaatataaatactgttacaatcttgagtagggattgtttttggcttcttggcttcacttggctgtttttgttgtgactgattgatgtactgcattgtggtttactattttgctttattatggtgttgaaatgttgaattattatatt

SEQ ID NO: 16804 - DNA, 298 bp, Glycine max
  Clone ID: LIB3040-049-Q1-E1-C1.R3
gatgataatagcatttatgtaggttctgatgattttgatcatccgtgtaggtggtctggtcatttccttataaacatatttctctttccaaaaaatatttccctgctcctccttccgtaaattgctcgtctttccaaaacgtgaatagtttaaagaagggagttctctttatttgtatttctaaatccaactgtttagttaagggatggttatctcttgtagagcttttagtttgatttagagttttcttgttgaaatctggttaagtttgtatcaatataattgacttatcatcaca

SEQ ID NO: 16805 - DNA, 246 bp, Glycine max
  unsure (1)..(246): unsure at all n locations
  Clone ID: LIB3040-054-Q1-E1-G11.R3
ctgggtctgacaaggcaagctgctgcnaaaagtaagttgaanaagagctaactgacgaggagtaatggtggcattttggcactccttaaacccgatgactactattttaagggccacatattgcttagacagactagggttgtaaattttggaacatgttctagttggagttaaatgccgttaaaatccgtgcgcaatatttttttttttttgtaatgtacatgaatggtagtcactttgttttcc

SEQ ID NO: 16806 - DNA, 551 bp, Glycine max
  unsure (1)..(551): unsure at all n locations
  Clone ID: LIB3040-058-Q1-E1-C11.R4
tcccgctaaggcagngnaagaagcccgcggagaagaagccggcagagaaggccccagcggagaagagccgaggcggagaagaagatatcgaaggaaggaggaagcgagaagaagaagaagagaacaaagaagagcgttgagacctacaagatctacatcttcaaggtgttgaagcaagtgcaccccgacatcgggatctccagcaaggctatggggatcatgaacagtttcataaacgacatcttcgagaagctcgcccaggagtcatcgcgtctcgctaggtacaacaagaagcccaccattacttccagggagatccaaacggcggtgcgtttggtcctccctggggagttggccaagcatgccgtttctgaaggcaccaaggccgtcaccaaattcaccagctcttgattggtttcgtgtgtttatgtcagggttttctgttagcccgatttaattagggtttcttttcctttttatttctttgagtatgtagatgtaaaattaaagccttttatttttaaataatataattgccgtttcgagaanna

SEQ ID NO: 16807 - DNA, 325 bp, Glycine max
  Clone ID: LIB3040-061-Q1-E1-A11.F4
agaagaagcccgcacctgctaagccccaacccaagcccaagcctaagcctaagcccaagcccgctgctaaagccaaggacactaaggcaactaagtcaaaggcaccagctaagcccaaggcagctgctaagcctaaagccaaagttccagccaagcccaagcccgcccctaaaccaaaggctgctgctgctgctggttccaagcccaagcctgctgtcgccaagcccaaagggactaagccagctgccaagcccaagcccaagcccgctgctaaagcaaaggctagtgctgtcaagcccgcagcaaagaccaaagcgaagcccgt

SEQ ID NO: 16808 - DNA, 369 bp, Glycine max
  unsure (1)..(369): unsure at all n locations
  Clone ID: LIB3040-061-Q1-E1-A11.R3
ggctgctgctgcctaacaggccgcgctacatcctacagcgaacccgccaaggcttaaaggacgtctcacacggacgttcaccagggcaagaagcagctcctgctgcgaagccggctagcgaagaagtagcgcctgctaagaaagcgccagtgaagagtgtgaaaccaaagagtgtaaagtctccagcgagaaaaggctacggctaagagagggggtaggaagtgagaatgtggtgggtagagtggttttagggttagttatagcgaagatctttaagctttcagcgaagtaggctacgtctcagatagggctatggaagataaaatgtgatttttatgggaaaaaaaaaaagtaaaacatgngaaaccg

SEQ ID NO: 16809 - DNA, 664 bp, Glycine max
  Clone ID: LIB3040-061-Q1-E1-A11.R4
tgggcttggcggcggcaggcttgggcttggaagcagcagcagcagcagcctttggtttaggggcgggcttgggcttggctgtgactttggctttaggcttagcagctgccttgggcttagctggtgcctttgacttagttgccttagtgtccttggctttagcagcgggcttgggcttaggcttaggcttgggcttgggttggggcttagcaggtgcgggcttcttcttcttcgccggcgaagaagaagaagatgcagaaggtcgggtaggtgggagcttgaaggagcctttgactttgacgagttttccagcggctacaagtttcttcaaatggtagagaagaagcttcctgaagttcggtggaagctgcttgtgcttctcctcgatgaacttcgcaatcgcgtgttggctcgaaccggttttctccttcagcgaggtaattgcgtctttaatcatctcctcgtaggaaggatgagtgggagggttgcgtggtctggaaactttttaggtttgggttccttggttttcctagccttggcttcaggtgtgggctcctccttctcctccgggggaggctcggcggtggcaggttcgggagcgggttccaccgcgacagtgggctcttctgaggccatgggaatgagggaatttagggttgaaact

SEQ ID NO: 16810 - DNA, 615 bp, Glycine max
  unsure (1)..(615): unsure at all n locations
  Clone ID: LIB3040-061-Q1-E11-G7.F3
ggcggcaccaaagcagtagcaagcgtggcatattccacagtcctcttcccgagcggttcacccctcatagaggtgcggtcaccctccagctcacggtagcggtgaaggtacatggttaacggttcgatgtagtcgtcgaatccaagcttactcattgcccaaagcacgtcctctgcggttatggtcttgcgctgctccctctggcaacgctcgttggcctccccggtgatgaagctgatgtactccgacacgcactcttggattgtctcctttgcatcatcggagatttttgcgtgtggagggagaatcttgcgcatgatccgtatcacgttagcgattggcatgaacctgtcttgctccctcaccgtgcattcgttctcctctcctgctgcactgtggttgctgcagttctgatctgatgatgctacctgctgctgcctcatgttcatgttcatgtctgacactgacagcttcaacccagaggttgtgttggggagcttgcggtagccatgaaagcctccagtttccatagctataaggtagngtgtgtgtgattataagaganatgaagtaggcccccttctgtcgtcttcggacgcgtgggcggacgcgtgg

SEQ ID NO: 16811 - DNA, 296 bp, Glycine max
  unsure (1)..(296): unsure at all n locations
  Clone ID: LIB3040-061-Q1-E11-G7.R4
gcgtcatctcatcaccatcatggnaatctccaatggctcatgaaccaaatgctcgctccatataaaattaatgaagagtactgttcagtaggagaacaagacttcttggacttgattagcttaactctcagtgattggtgttagagtactgttgttgaggatggttaattttataattaagggctgggaattggggagttagtatatattcctaatcctaattatgtgcatctttaatttatggaataactttgttttttgttttaacttctgataatttggattttctgatgtcg

SEQ ID NO: 16812 - DNA, 571 bp, Glycine max
  Clone ID: LIB3040-030-Q1-E1-E5.TG
gggtaggggtttttttcttcccccaatggggaccccttcatttaaaattatatttaaccctcggtgggggggcccaaaaacaaaaaaaggacccccggcgcttaattacaccctcatattttaccctacctaaaaacatatttttttttttttggggatggtaccaaccccttccccccaaaaaaaaaattaaaaacggttagccttttccaaaagaaaattttattttttttttagagaattggggggcttaagagtaaaggactttttaaaaagggccgggggacttttttttaggaacaaaaaccgggtaatgtttgggaacacttcacccgttggaataatcacacctttaaacaggtttcccaacttattataatttcttaaccgcaggaaaaagtggctaagggtaaacctatttttttttttgggaagggcaagggttcccggcaggttcaaaaatttttgggggagatattttaaaaccggggggagataaaagggaacgcccgtgcccaaggggggaaaggaaacggctttttttaaataccttgccaacccggttaccggg

SEQ ID NO: 16813 - DNA, 556 bp, Glycine max
  Clone ID: LIB3040-032-Q1-E1-B3.TG
atgccgttccgttcaccgcgagattgaaaatatacatctaataaaccctaaattctcagaaacccactcatgagctagtgaactttgtgacagccttggtgccttcggagacagcgtgcttggcgagctcgccggggagaacaagacgaacggcggtctggatctcgcgagaggtgatggtaggcttcttgttgtagcgcgcgagcctggaagattcctgagcgagcttctcgaagatgtcgttgatgaagctgttcatgatccccatggctttgctggagatcccgatgtcagggtgcacttgcttcagcaccttgaatatgtagatcttgtacgtctccacgctcttcttgtttctcttcttctccttcttctcgcccgaggcgggttcctttgggatcttcttctcggcttttgttttctccgccggagccttctccgcgggcttcttctccgccggtttcttctctcccttggccatggattggggaaagagtgaagagaatgcgaattcgagtgtttggagagtagaaatgctgaaaaacgaagatggttc

SEQ ID NO: 16814 - DNA, 164 bp, Glycine max
  unsure (1)..(164): unsure at all n locations
  Clone ID: LIB3040-032-Q1-E1-F8.TA
aaaaaagtctactactgnttaaaactcaaatgggacagaaaanagtcttanaaaagcgataagaaagctaattcaaaagctagtgaacttggtgacagccttggtaccctcagaaacggcgtgcttggccaattcaccgggcagcacaagcctgaccgcggtct

SEQ ID NO: 16815 - DNA, 169 bp, Glycine max
  Clone ID: LIB3040-040-Q1-E1-A9.F3
ggcttctgcattgactcttagcacaatgaccagccacgaaatcgattcttgcagctcttggggcgtccacagtacttctcacagcaggttccatttttgaagacaaggacactgctttccacaagccgtttggcaaccacatggattatactgtcggcagggttgatcc

SEQ ID NO: 16816 - DNA, 627 bp, Glycine max
  unsure (1)..(627): unsure at all n locations
  Clone ID: LIB3040-040-Q1-E1-A9.F4
ggtcattgcgcgtggtcactggttctgccagggggcatttgaatgtgaacatgaagcttcttctcaaacacacaagggttcttcttggaaggtctgatgtatccggctggggagccttcttaaagatagtgttggtaagcatgaataccttggagagtatactggagagttgatttctcaatcgggaagcagataagcgaggaaagatatanntgaccgtgaaaattcatcttttctctttaatttgaatgatcagtttgttcttgatgcttaccgaaagggtgataaattgaagtttgcgaaccattctcctgacccaaattgttatgcaaaggttattatggttgctggagatcatagggtaggcatttttgccaaggaacggatttgtgccggggaggagctgttctatgattatcgttatgagccagatagggctcctgcgtgggctcggaagccagaggcatctggatcaaaaaaagaggatggggctccttcaagtggtcgtgcaaagaagcttgcttaatgggtgtttgttcttcaaaaatcaattcttttaagttattctttaacacgtaggggaagcaatctcattggtagcggaaagaagtttggtttaagtttttt

SEQ ID NO: 16817 - DNA, 335 bp, Glycine max
  unsure (1)..(335): unsure at all n locations
  Clone ID: LIB3040-040-Q1-E1-A9.R3
gctcctgcgtgggctcggngaccanagcatctggntcaaaaagggggtggggctccttcagtggtcgtgcaaagaacttgcttaatgggtgtttgttcttcaaaatcaattcttttaagttattctttaacacgtacgggaagcaatctcattggtagcgcgaaagaagtattgttttaagttttttgttcgtagcaaggccgtgcaattgttgctgcataggtaactaactacatttaaacaattcattttaatattaatcgactgtatattcaccattccaaacgngaaaatacaagcttaatcaaaattccatgcaattctttcccggaggg

SEQ ID NO: 16818 - DNA, 618 bp, Glycine max
  unsure (1)..(618): unsure at all n locations
  Clone ID: LIB3040-040-Q1-E1-A9.R4
ggcaaaatgcctaccctatnatctccagcaaccataataacctttgcataacaatttgggtcaggagatggttcgcaaacttcaatttatcaccctttcggtaagcatcaagaacaaactgatcattcaaattaaagagaaaagatgaattttcacggtcatatatctttcctcgcttatctgcttcccgatgagaaatcaactctccagtatactctccaaggtattcatgcttaccaacactattctttaagaaggctccccagccggatacatcagaccttccaagaagaaccctttgctgttgtttgagaagaagcttcatgtttctacattcataattgtcccctctttggctaggaatcccaagtgtaccatcgccacaactgacccaacaattcctacaaacatctggatcacattccctatctgcagcaaaacatggacattgacggcttctgcattgactcttagcacaatgacagccacgaaatcgattcttgcagctcttggggcgtccacagtacttctcacggcaggttccagtttgaagacaaggacactgctttccacaagccgtttggcaaccacatggattatactgtcggcagggttgat

SEQ ID NO: 16819 - DNA, 325 bp, Glycine max
  unsure (1)..(325): unsure at all n locations
  Clone ID: LIB3040-049-Q1-E1-E3.F3
gggttttcgggngtttcgggtcgattacttggggtttgngaatcgaattcgaangnggnaaattcaatttcgggttcgaggaggtcagtgaagtagtggttaagagaaatagaagaagattcggaattggaagattcagaggggctagggtttgtttggtcaaatttgttttggggagtggccagtggagagagttcacccaaaagatgcaacttgatgcgtttcaacgctgaaacttcagcagcgttagccatcacttaagttagaagcgcttttagcttgttgtcttaagaagaaggtaaagtgtttgaagagtattgtgttc

SEQ ID NO: 16820 - DNA, 373 bp, Glycine max
  unsure (1)..(373): unsure at all n locations
  Clone ID: LIB3040-049-Q1-E1-E3.F4
tcgctgctaagcgctggttccgcagcagnacccagtggcatccaatatcggcaaaccctgaaggtggcggctgccggaacaaccagcactgngcagcaagcactacagaggtgtccgtcagcggccgtggggcaagttcgccgccgagatccgcgacccgaacaagcgcgggtctagggtttggctcggaaccttctacaccgccatcgaagccgccaaggcctacgaccgagccgccttcaggctccgcggctccaaggccatcctcaacttccccctcgaagttaacaccgcggcggagaccgtctccgtcgccgccgtcgacgtcgagaggaagcgccgcctcgaggaggaggaggtggtggtggatgtt

SEQ ID NO: 16821 - DNA, 263 bp, Glycine max
  Clone ID: LIB3040-049-Q1-E1-E3.R3
tgagttgttttagggggatgccgttaacgccgtctatgtggaccgggttctgggacagtgacgtcaaggatattttcaacattccgccgttgtcgccgttatctccttttggattttcaccgctcgtggctgtgtgaaattccaatttaggactgcgttttttcgtgttttagtacttacagcgtcctcctgttcagggatgagcacattgtacatttgacgaatttgtttattcaacaatcttttattcacttttatttgcg

SEQ ID NO: 16822 - DNA, 642 bp, Glycine max
  unsure (1)..(642): unsure at all n locations
  Clone ID: LIB3040-049-Q1-E1-E3.R4
gcggcggcgcttcctctcgnacgtcgacggcggcgacggaccggtctccgccgcggtgttaacttcgagggggaagttgaggatggccttggagccgcggagcctgaaggcggctcggtcgtaggccttggcggcttcgatggcggtgtcgaaggttccgagccaaaccctagacccgcgcttgttcgggtcgcggatctcggcggcgaacttgccccacggccgctgacggacacctctgtagtgcttcttctcaggctggttctccggcgccgccacctcagggtttccgaattggatccactcggtcttcttcggaacagcgattagcagcgacggtttccgattaaattgaggcttcttctcagctgaaattagggttttcggggtttcgaggtcgattacttggggtttggaatcgaattcgaagagaggaaattcaatttcgggttcgaggaggtcagtgaagtagtggttaagagaaatagaagaagattcggaattggaagattcagaggggctagggtttgtttggtcaaatttgttttggggagtggccagtggagatagttcacccaaaagatgcaacttgatgcgtttcaacgcttgaaacgtcagcagcgttagccatcacgttagtta

SEQ ID NO: 16823 - DNA, 417 bp, Glycine max
  unsure (1)..(417): unsure at all n locations
  Clone ID: LIB3040-041-Q1-E1-E10.F5
taacacataccatatgtccaaaaatcaattacaagccaattttcttaaaggaagaaaaccagtcacggacacttagcagtatttgcctatatcccaattaatgctactaccagcagaaaacctaccctccctaacaaccccatctattgaataaaaaaaggaatctgaaaaacaaaaacaccaaccgcagccaccaatcatcttcatctttccaaccaccaactcaagcacgctcaccacgaatccttcttgccagctgaatatccttgggcataatggttacacgcttggcgtgaatggcacacaggttagtgtcctcaaagagcccaacaaggtatgcctcagcagcttcttgtaatgcaagcacggcgtggctctggaacgcanatcagttttgaagtcctgagcatttcacga

SEQ ID NO: 16824 - DNA, 408 bp, Glycine max
  unsure (1)..(408): unsure at all n locations
  Clone ID: LIB3040-041-Q1-E1-E10.R5
ttttgccgtgcttgcattcagnagctgctngagcataccttgttgggctctttgaggacactaacctgtgtgccattcacgccaagcgtgtaaccattatgcccaaggatattcagctggcaagaaggattcgtggtgagcgtgcttgagttggtggttggaaagatgaagatgattggtggctgcggttggtgtttttgtttttcagattcctttttttattcaatagatggggttgttagggagggtaggttttctgctggtngtngccttnnttgggnttttggcccctcctgctnngtgtccgtgcctgtgttttcttcctttnngannnttggcttgtnnttgntttttggccctntgtntgtgttngnntgcttctgttttngttttttcctgcgggntgtt

SEQ ID NO: 16825 - DNA, 315 bp, Glycine max
  unsure (1)..(315): unsure at all n locations
  Clone ID: LIB3040-021-Q1-E1-C2-f5
tgccgcgcccatntcattggcggtgaggaacgacgaggagttgagcaagctactcggtgacgtcaccatcgctaacggtggcgtcatgcctaacattcacaatcttctccttcccaagaaggctggtggatcatccaaggctgctgctgcagacgatgactcttaaataggggttttttttccgtgaaaagttatcgaatttattctctttggattctctctgtttttgtagtttttcagtttttgataattgtgttctgtagatgtagttaggttttcagtcactgatgtgaatagagaacgctctttttctcc

SEQ ID NO: 16826 - DNA, 488 bp, Glycine max
  Clone ID: LIB3040-021-Q1-E1-C2-r4
gattgtgaatgttaggcatgacgccaccgttagcgatggtgacgtcaccgagtagcttgctcaactcctcgtcgttcctcaccgccaattgaatgtggcgcggcacaattcgagtcttcttgttgtctctcgcagcgtttccagccaattccaaaacctcagccgcgagatattcgagtacggcggcgaggtagacaggggcgccggcgccgacacgctcagcgtattttccggccttgaggaaacgggcgatacggccgacggggaattggaggccggctttgctgctccttgaggtagccttcttggcggcgctagatcctagggttttgccgcgacctgccattgatgaactttaacctagttgccggaaagagagcgttcgagatgtttgaagtgttttgaaagaaacgagttccggtgacacagaaaactgtgacaagagaatgtatatctccccttctgtcgtctcgcagccggacgcgtgg

SEQ ID NO: 16827 - DNA, 234 bp, Glycine max
  Clone ID: LIB3040-021-Q1-E1-C2-r5
tcggccgcggggaattggaggccggctttgctgctccttgaggtagccttcttggcggcgctagatcctagggttttgccgcgacctgccattgatgaactttaacctagttgccggaaagagagcgttcgagatgtttgaagtgttttgaaagaaacgagttccggtgacacagaaaactgtgacaagagaatgtatatctccccttctgtcgtctcgcagccggacgcgtgg

SEQ ID NO: 16828 - DNA, 106 bp, Glycine max
  Clone ID: LIB3040-033-Q1-E1-F4-f7
gttagccccgatttaattaggggtttcttttcctttttatttctttgagtatgtagatgtaaaattaaagccttttatttttaaataatataattgccgttttgcc

SEQ ID NO: 16829 - DNA, 309 bp, Glycine max
  unsure (1)..(309): unsure at all n locations
  Clone ID: LIB3040-033-Q1-E1-F4-f8
catcttcgaaaagctcgcccaggagtcatcgcgtctcgctaggtacaacaagaagcccaccattactntccagggagatccaaacggcggtgcgtttggtcctccctggggagttggccaagcatgccgtttctgaaggcaccaaggccgtcaccaaattcaccagctcttgattggtttcgtgtgtttatgtcagggttttctgttagcccgatttaattaggggtttcttttcctttttatttctttgagtatgtagatgtaaaattaaagccttttatttttaaataatataattgccgttttgcc

SEQ ID NO: 16830 - DNA, 439 bp, Glycine max
  Clone ID: LIB3040-033-Q1-E1-F4-r4
tggtgaatttggtgacggccttggtgccttcagaaacggcatgcttggccactccccaggaggaccaaacgcaccgccgtttggatctccctggaagtaatggtgggcttcttgttgtacctagcgagacgcgatgactcctgggcgagcttctcgaagatgtcgtttatgaaactgttcatgatccccatagccttgctggagatcccgatgtcggggtgcacttgcttcaacaccttgaagatgtagatcttgtaggtctcaacgctcttctttgttctcttcttcttcttctcgcttcctccttccttcgatatcttcttctctgccggcttcttctccgcgggcttcttctctgcctttgcgggagccattggtaggttttttttatgaggggagaaaagtcaattaaaatttcagagaacgagtgaaagatgtc

SEQ ID NO: 16831 - DNA, 336 bp, Glycine max
  Clone ID: LIB3040-033-Q1-E1-F4-r5
ggtgggcttcttgttgtacctagcgagacgcgatgactcctgggcgagcttctcgaagagtcgtttatgaaactgttctgatccccatagccttgctggagatcccgatgtcggggtgcacttgcttcaacaccttgaagatgtagatcttgtaggtctcaacgctcttctttgttctcttcttcttcttctcgcttcctccttccttcgatatcttcttctctgccggcttcttctccgcgggcttcttctctgcctttgcgggagccattggtaggttttttttatgaggggagaaaagtcaattaaaatttcagagaacgagtgaaagatgtc

SEQ ID NO: 16832 - DNA, 300 bp, Glycine max
  Clone ID: LIB3040-033-Q1-E1-F4-r6
tcctgggcgagcttctcgaagatgtcgtttatgaaactgttatgatccccatagccttgctggagatcccgatgtcggggtgcacttgcttcaacaccttgaagatgtagatcttgtaggtctcaacgctcttctttgttctcttcttcttcttctcgcttcctccttccttcgatatcttcttctctgccggcttcttctccgcgggcttcttctctgcctttgcgggagccattggtaggttttttttatgaggggagaaaagtcaattaaaatttcagagaacgagtgaaagatgtc

SEQ ID NO: 16833 - DNA, 244 bp, Glycine max
  Clone ID: LIB3040-033-Q1-E1-F4-r7
ttgctggagatcccgatgtcggggtgcacttgcttcaacaccttgaagatgtagatcttgtaggtctcaacgctcttctttgttctcttcttcttcttctcgcttcctccttccttcgatatcttcttctctgccggcttcttctccgcgggcttcttctctgcctttgcgggagccattggtaggttttttttatgaggggagaaaagtcaattaaaatttcagagaacgagtgaaagatgtc

SEQ ID NO: 16834 - DNA, 378 bp, Glycine max
  Clone ID: LIB3040-021-Q1-E1-C2-F1A
tttttctctttttacttatatcttttggagaaaaagagcgttctctattcacatcagtgactgaaaacctaacgacatctacagaacaccattatcacaaactgaacaactactaaaacagtgagcatccatagtctctcaattcgatacacttttcacggtaacaaaacccctatttaagagtcatcgtctgcagcagcagccttggatgatccaccagccttcttgggaaggagaagattgtgattgttaggtctgacgccaccgttagcgatggtgacgtcaccgagtagcttgcttactccttcgtcgttcctcagcgccaattgaatgtggctcggcataattcgagtcttcttgttgtctctcgcagcgttt

SEQ ID NO: 16835 - DNA, 226 bp, Glycine max
  Clone ID: LIB3040-033-Q1-E1-F4-F1A
ggcaaaacggcaattatattatttaaaaataaaaggctttaattttacatctacatactcaaagtaaataaaaaggtgtaagaaaccccgaagttaaatcgggctaacagagaaccctgatataaactcacggaaccaatcaatatctggtgaatttggtgacggccttttgtgccgtcagaaacggcatgcttgggcaactccccagtgaggatgtaaacgcacc

SEQ ID NO: 16836 - DNA, 423 bp, Glycine max
  unsure (1)..(423): unsure at all n locations
  Clone ID: LIB3049-048-Q1-E1-F11
acgcgtccacctttatgggttctattgctgggattgggaattccttaacgctcccctcccttttaattcctccccctaaacctccttcctcaaaaattttaattccctccctaataaaacttataaattaaaattaaacaaaagggttttccttccttcctttcttggggaataataganataagaaaagattagtgaagttgaaatgtcgcaacgatcggtgccggcgccgttcttgacgaagacgtatcagttggtggaggatcaggggacggaccaagtgatatcgtggggtgaaagtgggaacacttttgtggtgtggaagcatgcggattttgcaaaggatttgcttccaaaatatttcaagcacaacaacttctccagctttgttcgacagctcaatacctatggattccgaaaaat

SEQ ID NO: 16837 - DNA, 393 bp, Glycine max
  unsure (1)..(393): unsure at all n locations
  Clone ID: LIB3049-022-Q1-E1-F9
aaaagacgacagaaagggaatcccaatttgaatggttaacaaagggttccccggccggctcctcaacttccccccgttccaaccaaacccaaaccaaaatcatgggcaaaaaatcctccgccggtggcaactggaaatgcaatgggaccactgaagaggtaaagaaaattgttactactttgaatgacgctaaagtccctggagaagatgtcgtagaagttgttgtgagccctccttttgtgttccttcctgttgtanaaagtttgctgcgccctgattcccatgtttcggcacaaaactgttgggttcgcaaaagtggtgcttataccggtgaggttagtgctgaaatgcttgttaatttgggaattccttgggttattattggtcactctg

SEQ ID NO: 16838 - DNA, 383 bp, Glycine max
  unsure (1)..(383): unsure at all n locations
  Clone ID: LIB3049-056-Q1-E1-F9
ggtacgcagcttcatccctaacccgtgcatagcagagtcagagacagagacgcagccatggggcggagacctgcgacgtgttatangcaaattaagaacaagccataccccaagtcacgtttctgccgtggtgttcctgatcccaagatcaggatttatgatgttggtatgaagaagaacggtgttgatgagtttcctttctgtgtccatctggttagttgggagaaggaacatgtttcaagtgaggccctggaagctgcacgcattgcttgcaacaagtacatggccaaatttgctggaaatgatgctttccacttgagagtcagggtgcaaccattccatgttcttacgatcaacaagatgctttcgtgtgctggtgctga

SEQ ID NO: 16839 - DNA, 390 bp, Glycine max
  Clone ID: LIB3049-056-Q1-E1-G1
gaccggcggcgaaggtaaggtggtgcaaacaaacaaaaaaccctaattctcgaatatcagatcggcgatcggaggaagaatctgaagttgggcgaagatggttctcgcggagttaggagggagcatttcgcgtgctcttcagcagatgagcaatgcgacgatcatcgacgagaaagtcctcaacgattgcctcaacgacatcacgcgcgcgcttctccaatccgatgttcagttcaagctcgtccgcgacatgcagaccaacatcaagaacattgtcaacctcgaagacctcgccgcaggtcacaacaagcgcaggattatccagcaggccgtcttcaacgagctctgcaagattctcgattccggaaaaacctcctttacccctaaaaa

SEQ ID NO: 16840 - DNA, 424 bp, Glycine max
  Clone ID: LIB3049-056-Q1-E1-G10
ccggccaagccttcgtgggggtggcaaaacttaatcaaaagggggtggttctggctggcaaaatcaatgggtatcaactgggaatcctaacctcgtcttcatcgctacgaagttcagctaaggccgacgaagctgtggttgtgccatatcccacccatatcgatgtcaagctcattaatcgctggagcttcgaggatattgaggttactgatatttcactggttgattacattggagtcacggcatctacgcacgccacatatgttcctcacaccgccggaaggtactccgtgaagcggttcaagaaagcgcagtgccccattgttgacaggctcactagctctctcatgatgcacggtagagacagtggcaagagactcgtggctgtgaggatcatcatgcatgctatggagattactcattt

SEQ ID NO: 16841 - DNA, 372 bp, Glycine max
  Clone ID: LIB3049-056-Q1-E1-G11
agggaaaggaaggaaggaaaattaaccttaaaaaatcccttggttaaggctttcaaattcccaaaggtccaactttgcaattgacatgggtaacccatttctcaatcccactgttgatggtttccttaaaatcggagctgtcgcagccacccaataagctgctgaaaatacttatcatattatccaaaaggggaatatctcaagtcgtgatttcgagaaaactttgaagaagatgtgtaacagaagtgtatattggggaactatagctggcgtttatgttggaatggaatatggggtagagaggatccgtggcaccagagactggaacaatgccatgattgggggtgcagtaactggggccctggtatctgc

SEQ ID NO: 16842 - DNA, 362 bp, Glycine max
  Clone ID: LIB3049-056-Q1-E1-G12
agaaggggacagcagaattggcaattggccatttcatcccccagttccatgcttcaaggttccaatcaggcacagatcccaatcctctctcaagccctaatttctcctcatttccatggccagagaccagcccattgtcgcggtggaacccgctcccgaacctgcctccgccgatcctcacccggaggagaaggaggagaccacacctgaagccatcgctaagaaaatcaaggagcccatacctaaaaaggtttccagacctcgcaaccctcgcactcatccttcctacgaagagatggttaaagatgcatttatctcgctgaaggagaaaaccggttcgagccaatacgcgaatgcgaagt

SEQ ID NO: 16843 - DNA, 344 bp, Glycine max
  Clone ID: LIB3049-056-Q1-E1-G2
ggaacttccaaattgcatttctacacatccctagcctctgtccgtaccgtcgcttgacaatggtttttcatgtgcgaaaccctgacctctgcgctcactttcgtctctctcgcttgtcgatcgattacgtcaatgtcttcttcgaagatcgtttctatgacggttgggaaaatcgatgggttaatcagagtggaaagaagatcagaacgtcgctggggaatggaatgataactctggtcaacggaatggcaacgctaatgacatcggtaatcatgtcagtgacgattacatcttcgaaggtaattcaactgactagattgacttccacgacatcggtaagaaac

SEQ ID NO: 16844 - DNA, 296 bp, Glycine max
  Clone ID: LIB3049-056-Q1-E1-G4
gaagggggctaaatttgattccacgaaaatggattgggtttggaaggattacatcgaggacgatgtactactctataagtcatcataacgatgagccacgaccatggtcgtcacatcttattgcagaacatcagcagtctaaactgggaagttcgtcacgaggtgcgagacatccgactagagtctcacgaattgcatcagagaactcgataaagtgttgcaatcattcaaagagtagactgatgacgataactcagatgatctatttatcggaatgtctgttccatttagcttat

SEQ ID NO: 16845 - DNA, 277 bp, Glycine max
  Clone ID: LIB3049-056-Q1-E1-G5
ggatacgattcctttggtttgcagtaatgggtgctctggatcacatatcggaactctttgactgctccatgtggcacttccaagcacaagaagcgcaagcacttgcagacggtggaagtgaaagtgaatatcgactgtcgaagatgccagaggaaatgtgaggaacgcattgtcccgggatgagaggaggaagacaccatgaccttggaccagtgcgccaacaaccatcagagtcgatggctacgtcggatcccacacctgtcatcgctcgcatcca

SEQ ID NO: 16846 - DNA, 354 bp, Glycine max
  Clone ID: LIB3049-056-Q1-E1-G6
ggatgttactttttatattatcagatactatttgtgaactacgtgtccaaaaccgaacaacacagtgttaattcagcaatgcttagctattagcacactacctgcaagaaacatcccaagagctgataagaaaatgcagttatatcatcatcccttggatttggaaagccagagggtgagacttgcattggaggaggagggtgtagattatacatctcaccatgtcaatcccattactgccaagaacttggattccactttcttcaagatgaatcgccatggaagagtcccggttttccaaaatggctctcacatcatttacaatactaatgataaaatccagttcatagaaag

SEQ ID NO: 16847 - DNA, 366 bp, Glycine max
  Clone ID: LIB3049-056-Q1-E1-G7
gacgcacccaccattctactacactcctctctctcactctcactctctgctccgtgatagctgtaccacgtttttctctccatctcgaaacaccatctctgcctcagtcccaacccatcaccattctcatggctgctctagctctagcacttcttcttctggctttcaccggcacttcaagtgctacatggtgcgtttgcaatgatggaagcgacgcgatcctgcagaagacgttagactatgcttgtggagctggtgctgactgtaaccctcttcacctaaacgggccttgttttcagcccaacaccgtcagggcccactgtaactacgccgtgaacagctacttccaaaagaatggtcaagctc

SEQ ID NO: 16848 - DNA, 358 bp, Glycine max
  Clone ID: LIB3049-056-Q1-E1-G8
gatcctattccatggccacttgccaaaacaaaacattaaaaaaaaggttaagtttcaatgcagtgcatggcaccatttgttgaagctgaggactggccacgcatttgttgtggctgaaaagaaagataataatggtggtggggggttttgggttgtaagtgaccaactttggggtccacgtaaaaattgcatgacagggattggatgtcggttctgttggtgttgttgggtagggccccctagttgaggtgtctaataatggaaaaaagggtagttaggataatgttgtgaataaaaaatgagtcctggctttggtggatgctaacttgttcttttcccaatttaatttgttcaccca

SEQ ID NO: 16849 - DNA, 366 bp, Glycine max
  unsure (1)..(366): unsure at all n locations
  Clone ID: LIB3049-056-Q1-E1-H1
cggggcgtctctgtatctatcttctctcggagccgctattatcnccagacgccaccgccgcagcaccagaagaagaagaagagtgatggctgagtacgacctaactccgcggatggcgccgaatctcgacaggcaccttgtgttccctctcctggagttcctgcaggagcggcagctctacgacgacgaccacatcctgaaggcgaagatcgaccttctcaacaacaccaacatggttgactacgctatggacatccacaagagcctctaccacaccgaggacgtcccgaacgatatggtcgaccgccgcgccgaggtcgttgcccgccttaagtcgctcganngaggccgccgcccccctcgtcg

SEQ ID NO: 16850 - DNA, 343 bp, Glycine max
  Clone ID: LIB3049-056-Q1-E1-H10
gatattgacaaatacaatgatatttatttttatagttacatttttttgaagggcagaaattgtagtgaaagcgataattctagtactagtataataactagtacgaatgatacaaatgatagtgattccactataggagaaagttctaataatctcgatgaaagtcaaaaatataagcatttgtggcttgaatgcgaaaattgttatggattaaattataaaaaattttttaaatcaaaaatgaatatttgtgaatactgtggatatcatttgaaaatgggcagttcagatagaatcgaacttttgattgattcgggtacttggaatcctatggatgaagaca

SEQ ID NO: 16851 - DNA, 393 bp, Glycine max
  unsure (1)..(393): unsure at all n locations
  Clone ID: LIB3049-056-Q1-E1-H11
aaaagaccaccaaaaggggaaaaggatggtccggccttccttggccccaaaaacccccggtaaaaaatggaattgtacaaccttggccacacctgatgaatagtaaatctgcccaaccatgcacggacaataaggttgcaaattcatggttaaacaatgaagcagtcaggacagcaattcatactgcacagaaaagtgtggtcagtagttgggatttatgcactgacagaatttacttcgatcatgatgctgggagcatgatcaagtaccacaagaacttaacttccaaaggttatcgtgcacttatattcagcggcgatcatgacatgtgtgttccatacacggngagtcaagtgtggacgagatcagttggatacaagattgttgatgaat

SEQ ID NO: 16852 - DNA, 451 bp, Glycine max
  Clone ID: LIB3049-056-Q1-E1-H12
gggtcgacgctacgaatcggaagcaagaagacgacagaaggggatctcagaagcaatctatcaaacacatattccgataaacagaaacaccaccgttgaatttgagaatcccggcgaggcatgttcttgctccgagtccactcggtggaagaggaccaccctctggatccccaaaccatcttccaatcccaatcccaatcccaatcccaatcccaatccaacaaccctaaattcagcgaacgcagaggcgcactccacttgttccgaacctcttcccattcctcgctcccaacccagacctctctttcttctctcctcttcatcctcgccgtccccaactacctctccttccacgacttcattcccttctgtggaccccacctcgaccgtttccaccaccttctcttcatcagaaacgacggcaccgaagatcgctatagcgtcctcatcg

SEQ ID NO: 16853 - DNA, 316 bp, Glycine max
  Clone ID: LIB3049-056-Q1-E1-H2
gaaaaggaggaagatgaaaaagaggattggagggtcgccacgtttagcaaggactaaatcctctctactctttcttcctctcttcgagagggttttatcttcttcctcttcacgtcgttcttctggcctctacaatgagcaacgagaaggacactttcaacgtcgctgatctcacttcagctctcaactaagacaatagaacagaccttgtcaatgctctcactagcaggatacagcatttggcttgacagcattctgatattctagagtctctgtcacacaatgtcaggaaccgtgtggaggttcttacagagat

SEQ ID NO: 16854 - DNA, 421 bp, Glycine max
  Clone ID: LIB3049-056-Q1-E1-H3
gagaagacaagggaatgggaatcatctcttcttcgaaggtatcgctctgtatattcaaatacacagtatactatcacattcgcttcggtacttctctcttcattgtcgcagacacaaagcagcactaaaggaagcccttcactacgccgattaagcatgtcaggcagaaaagaaacggttttggaccttgcaaagtttgtagacaaaggcgttcaagttaagcttactggtggaagacaagtgacagggactctgaaagggtatgatcaattgcttaaccttgtcctagatgaagctgtagagtttttaagagatcctgatgatcctctcaaaactactgaccagaccagaaatcttggcttaattgtttgtagaggaactgctgtgatgcttgtgttcccaactgatgggacagatgaga

SEQ ID NO: 16855 - DNA, 346 bp, Glycine max
  Clone ID: LIB3049-056-Q1-E1-H4
aaaaagacgacagaagggggatggaatttgctgccaaaggaggacatactgagtcattatggaaaatagaaaagttgaaatctgaaccaatgaagcagcacactttgataactgggttttcttgtgtcaagggtctactgttggaacgtaaacccagtgatgcagttgctgtcattcaagttctaaatcagaccttgtctgatacaaagaaatcacgcatcaagggtgaacttcagaagcttgtatccgagtggcctttggtagttagtaagcaccactaagaacctgacagcaaggcattatcaggctctttgaaatctgagagtcctggcatggttacagggtt

SEQ ID NO: 16856 - DNA, 378 bp, Glycine max
  Clone ID: LIB3049-056-Q1-E1-H5
gattcgcaacgagaacgagaggaggggttcgggtgtgagagcgagaatcagaagatgaagaaggaagacacagtgaagctgatcagtgccgaaggttttgaatttgtggtcgacaaagaagctgcaatggtttcacagaccatacataacatgcttacttctccagggagtttcgctgagaggcagcacggcgaagttacctttcctgagatcagcaccaccattctcgagaagatttgccagtacttttattggcatctccaattcgccagtgggaaggagacggaatttcccattgaacctgaattaactctggagctaatgatggctgccaattacctccatacataacattttgacttccccaagggtgatagt

SEQ ID NO: 16857 - DNA, 402 bp, Glycine max
  Clone ID: LIB3049-056-Q1-E1-H6
gaaaaggaggaagaggaaaaagaggattggagggtcgccacgtttagcaacaactaaaccctctctactctttcttcctctcttcgctagggttttagcttcttcctcttcacttcgttcttctggcctctacaatgagcaacgacaaggacaccttcaacgtcgctgatctcacttccgctctcaacgaggacaatagagcagaccttgtcaatgctctcaagagcaagatacagagtttggctggacagcattctgatattctagagtctctgtcgcccaatgtcaggaagcgtgtggaggttcttagagagatccagggtcaacatgatgaattagaggcaaaattttttgaggagagagcagctcttgaggccaaattacaaaaattgtatcaaccac

SEQ ID NO: 16858 - DNA, 336 bp, Glycine max
  Clone ID: LIB3049-056-Q1-E1-H7
gactcctctcttcttctaaggtatctctctgtatattcaaatacacagtatactatcacattcgcttcggtacttctctcttcattgtcgcagacacaaagcagcactaaaggaagcccttcactacgccgattaagcatgtcaggcagaaaagaaacggttttggaccttgcaaagtttgtagacaaaggcgttcaagttaagcttactggtggaagacaagtgacagggactctgaaagggtatgatcaattgcttaaccttgtcctagatgaagctgtagagtttttaagagatcctgatgatcctctcaaaactactgaccagaccagaaat

SEQ ID NO: 16859 - DNA, 390 bp, Glycine max
  unsure (1)..(390): unsure at all n locations
  Clone ID: LIB3049-056-Q1-E1-H9
gacttgcggctgcagcagagaagcactcatcattcttcgtttgtctaagatccgccttctctgaattgtaaaaatgtcgctcggagaaactgcttgttcatacgcagctctcatccttcatgaagatggaatcagtgtaactgccgacaagatcagcaccttgttggaaactgcaaaggttcaagtagatacctattggccaaccttatttgctaaacttgctgagaagaaaaatcttggcgatttgatagccaatgcagcaggcggtggtgcaccagttgctgttgcagctgcccctgttgctgcctcaagtggtggtggtgctgctgctgccgncccagctgctgaggagaaaaagaaggaggaacctgaagaagagagtgatgatga

SEQ ID NO: 16860 - DNA, 405 bp, Glycine max
  unsure (1)..(405): unsure at all n locations
  Clone ID: LIB3049-056-Q1-E1-F8
gattgtgattcatttgcacatttggaaagtgttgtttttctttttttcatttgcattgcaaagcaaaaaccttgcaaattgcaatggcttccaacaaggttattgccaccatcttggttctttctctccttgcctactcaacatcattcaccaatgcatgtggcacatgccacccaaaacctactccttctccccctcctccatcagggaagtgccccaaggacacattgaagctaggggtgtgtgctgatgttctaggacttgttaatgttgttgttggttcccctgtctctagcaagtgttgtgcattgcttgaaggtttggctgattcggaagctgcactttgcctttgcactgctattaaggccaatgttcttggnatcaacttgaatgtgcctatcacac

SEQ ID NO: 16861 - DNA, 369 bp, Glycine max
  Clone ID: LIB3049-054-Q1-E1-G4
gacggcaacggaagaataatcaaatttctcagatttatccgacttcgtcgcaaatccaccaaccgttatggctgccttcagcggtgatgaaacggctccgtttttcggcttccttggagccgcagctgccctcgtcttctcctgtatgggagctgcctatggcacagcaaagagtggtgtgggcgtggcttccatgggtgtgatgagacctgagctggtgatgaagtctattgtccctgttgtcatggctggagttttgggtatttatggccttattattgctgttattatcagtaccggtattaatccaaaggccaaatcttattacctctttgatggttatgcacatctctcccctggtcttgcctg

SEQ ID NO: 16862 - DNA, 128 bp, Glycine max
  Clone ID: LIB3049-054-Q1-E1-G6
ggggaccaggagaaaagttaataatgttgaatggataattaagtgtaagttctgatgggacaggaagaaccatgtaacggaggtcaactcgctctaaacttttccttccgtccacgcgcctcgctcat

SEQ ID NO: 16863 - DNA, 306 bp, Glycine max
  Clone ID: LIB3049-054-Q1-E1-G7
tggcgcgcctaaattggtatgcttagaggagattcaggtttatatttattgagtaacaaggagatattgatctacgttaagaaggcaatgcaatatcattctcagctgttggacacttcaactattatcattgtgtagattttactgggatattgacattttggttgtcacgactttggatgcagttcttagactttgatccactagatgggcctcatcacccaatgaaattcttcaatcattcgacgtagctgcaagcctcaacttcaccactggtgacggtgaagccgtgggatatatttagtt

SEQ ID NO: 16864 - DNA, 387 bp, Glycine max
  Clone ID: LIB3049-054-Q1-E1-G8
ggtgattgtttgttgttgtaactcgtccttcttctttggtgttccgtgtttgtgtttggtttttctctcaactgaaaatgtcttgctgcagtggtaactgtggtcgcggaagctcctgcaagtgcggcaactgctgcggaggctgcaagatgtacccagacttgagctacactgagtcaaccaccaccgagaccttggtcatgggagtggcacctgttaaggctcaatttgagggtgctgaaatgggtgtgcccgctgagaacgatggctgcaaatgtggaccagactgctcctgcaacccctgcacttgcaagtgaggtgttgggagagcaagcttcaagcagagatagcccttaattacgaataatgataaactaataatgtgta

SEQ ID NO: 16865 - DNA, 377 bp, Glycine max
  Clone ID: LIB3049-054-Q1-E1-G9
gaacgtgacctagccagcacaaacggcgtaagtcaagaaggtttcgtcccgtttcaatggggagcgaacagcagaacggcgaattctacctgcgttactacgtctgtcacaatgggcaagtttggtcacgacttcctggagttcgagttccgcccagactgcaagctccgctatgctaacaactccaactacaaacacgacaccatcatccgcaaagaggtttacctaacccccgccgttctccgcgaagtgcgatcgcatcatcgccgacagcgagattattaaggaagaatattacaactggccccaaccggatcgggtggggcggcaggagctccagattgttaaggggaacgagcacatttcgttcaccacgt

SEQ ID NO: 16866 - DNA, 350 bp, Glycine max
  Clone ID: LIB3049-054-Q1-E1-H1
aaaagggggccaataaaccggcaaccgatttccggcaaccctttttgcattttgcaatgccctttctcccaatttcggattttttttccttaaaaaattcaaggaaacggggttgtttgaagatttggatttgttgttgaaaagttgagcacttttttgtgtcacaagtttgattttttgggtattgagaaggttgtgaattattttttataattcttctttttttgcggtgtttcaatggggtgtgtgattgatgggcgtttcactgttgagattcaaaatggagtgagcaatggttgtggtgaagtgggtttgtggaatgatggtggtggtgccattgaggatgctgt

SEQ ID NO: 16867 - DNA, 408 bp, Glycine max
  unsure (1)..(408): unsure at all n locations
  Clone ID: LIB3049-054-Q1-E1-H10
gacatcacaacacccacccatccctcgtttcaaaaaaagggccgttattgttgttaccatccaaaaaatggccggtcttgttgtttcttcccaatgctttctcaaactcttgcttgtagtttcagtctttcatgtttcctttgctgctangaggttgaatgagctggttcaggaccagtctcagttgctacattaccacaatggtcctcttctatacggcaaaatcgccgtcaacctcatctggtatggtaacttcaaaccatcccaaaaggctatcatcaccgatttcgttacctcactgtcatccccagcgtctcagagcagccaaccctctgttgccacgtggtggaaaaccacggagaagtactaccacctgagttccagaaaggctctctctncctctctctc

SEQ ID NO: 16868 - DNA, 372 bp, Glycine max
  Clone ID: LIB3049-054-Q1-E1-H12
gcaccccacctgctaagttcgaaacacaatatatgccagctggaggtgattttaagaaccttcagtctggagttgccagggaacaattaatcatgatgcagcggccccaaactgtaaatgcaaagcaagttccagccacaagcatgagttcatcacctcctggaatagctgctagttggtatccaactaacagttctgatgctgtcagatctaataatggctttatatctcatgctcctagcactagaagcctcagtccaaactatctcaattctaatcaaatgtaccaccaacttcagtatcaacctcaacaatatcagtttgttggtggcagcagcagcaattcagtagatcaccaagggaatagcatat

SEQ ID NO: 16869 - DNA, 364 bp, Glycine max
  Clone ID: LIB3049-054-Q1-E1-H2
ggagggagctggagaggatcgggatccgtgattttgattcatctgtacttgtacagcctttttctactgcaaagggatggatgacaagtgctaactaagcactttcgtcgtcttcgtcttcatcccttcatcgccaaacacaatgaatgaattgggcgtggttgcaatcctcatttcaatagagttcttggacgttatcgtctacactgtaagcaaagcagccatgaagaagggcatgaatgactttgtctttgtcatgtactccaatgccttcgcaacttgcctcctccttcccataaccttcgtcttttacaggaaaagacctcttcctcgactcacatatttcatagttgcccaattgttt

SEQ ID NO: 16870 - DNA, 384 bp, Glycine max
  Clone ID: LIB3049-054-Q1-E1-H3
gcaacaccattgtttccaactgaaaaccgtccgtctcaagtttaatggtaactctgaaaatcctagaagaaagctgcccatctgttctgactgagctattggagtacgtggccagatttactgagcattcggacatcatgtgcaagcataggaatgaagcattacttgatggcagtgacataaatgggaagcgggtgaagcaaaggctctaatatgtgaagaacactgcacagctttctgtacatccctcttctactctccgttttaaaagatagcgagagcatggttagagggagaatatatataatcttttataggattagaggcaatttttaattttcttagcttattcatgtgtaagagatgtaaatgtaatttgtgttg

SEQ ID NO: 16871 - DNA, 410 bp, Glycine max
  unsure (1)..(410): unsure at all n locations
  Clone ID: LIB3049-054-Q1-E1-H4
gaaccaaaatgactcaagcccagattcaaccagttaaacttggaacccaaggctttgaggtttcaaaattgggattcggatgtatgggccttactggagcgtacaatgaccctctccaagaacaggatggcatatctgttatcaagtatgcgttcagtaagggaatcacattttttgatactgcggatgtttatggagccaatgctaatgaacttttggttggaaaggctttgaagcagctgcccagagaaaagattcagatagccacaaaatttggtattgcttcacgaggttttcctgatatgaagatcaanggttcgcctgaatatgtgcgatcatgctgtgaagctagcttgaagcgtcntgatgttgaatacattgatctctantatcagcacagagtggacaca

SEQ ID NO: 16872 - DNA, 388 bp, Glycine max
  Clone ID: LIB3049-054-Q1-E1-H5
gaaaaacccacttgttaaattgcaatcccctttcaaaatggtgttccaatttggtttcaagtttctatctttaaacatgtctcaccttccatctgctgctactactttttctcgtttccaactcttgaccctcaacaacacattcataatccaacctccctttctcggattcaagggtacatcatgtttttttgagaagcacagttgctgcttgagtgttaaaccattttgtgcatcccagaagaaaagggccaatatcctctgttctatgaatatgtcagcacaacaatcagatgattatgggaaaatgaagcttgaacaattaatagaccaagttcaaaagctttgggacagttctcctgaacccgtgaagaaattcccgcataac

SEQ ID NO: 16873 - DNA, 413 bp, Glycine max
  Clone ID: LIB3049-054-Q1-E1-H6
aactttagagaaaatatttgatgatcatggacgaaaaattctcttttcagagtttccacagattatacaacagggttttgcatgtcttcaaggtggtatttgtctttcaagcatggggcgacctgtctcgtacgaaagagttgttgcttggaaggtgctgaatgaagaagagaatgctcattgtatttgctttatgtttgtgaactggtcttttgtttgacatcttgttctgagtacacttgggcttattgtatcttagtgtaagataaggatttactccaagacactcgtgctttgttggttgatgttttactgtatttgcactaaatacttggattgcacattaaatgactatttatttcttagtctatgtaacttgtttccttattcaacatccagctaatatttatgca

SEQ ID NO: 16874 - DNA, 420 bp, Glycine max
  Clone ID: LIB3049-054-Q1-E1-H7
gagctttagattcttttcccctagattcagccacagttggaaaaaaaaaaaaagttgttcgagatggcacgtacgaagcaaactgctcgtaagtccacaggaggaaaggcacctaggaagcagctcgcaaccaaggctgcacgtaagtctgcaccaactactggtggtgtgaagaagccacatcgttatcgtcctggtaccgttgctcttcgtgagattaggaaataccagaagagtaccgagcttttgatcaggaagctccccttccagaggctggttcgtgaaattgctcaggacttcaagactgatctgcgtttccagagccatgctgtgcttgcattgcaagaagctgctgaggcataccttgttggactctttgaggatactaatctgtgtgccattcacgctaagcgtgtaact

SEQ ID NO: 16875 - DNA, 407 bp, Glycine max
  unsure (1)..(407): unsure at all n locations
  Clone ID: LIB3049-054-Q1-E1-H8
gatatccgtcattaaccaaatttgtgtttctccgattgcaagcaatggactccttcaattccttcttcgattcaacaaaccgatggaattacgatactctcaaaaacttccgtcaaatttctccggtcgttcagaatcacctcaagcaggtttattttactctgtgtttcgccgtggttgctgcggctgttggggcttaccttcatgtcctcttgaacattgggggttttcttactacagtggcatgcgtgggaagcagtgtttggttactctcgacaactccttttgaagagaggaaaagagtgactttgttgattgccgcatcactgtttcaagggtgctccattggacccttgataaatttggctattcanatcgattcaagccttatctttagtgcatttgtg

SEQ ID NO: 16876 - DNA, 391 bp, Glycine max
  unsure (1)..(391): unsure at all n locations
  Clone ID: LIB3049-054-Q1-E1-H9
gtggcaaagtctgagaaaaggaaagtggagtacgagaagaacatgagagcctataacaagaaacaggcggaaggtcctactggtggggatgaagaagaatctgagaagtctgtatctgaggtgaatgatgaagatgatgatgaggaaggcagtggcgaggaagaggatgacgattagagaatggactgataattgcatttatgtaggttctgatgattttgatcatctgttgtaggtggtctggtcatttcctgataaacatatttcttgcttccaaaaaatatttccctgctccctccgtaaattggttgtctttccaaaacgtgaatagtttaaagaagggagttctttatttgtacttctaaatccaactgtttagttaangggtgtt

SEQ ID NO: 16877 - DNA, 365 bp, Glycine max
  unsure (1)..(365): unsure at all n locations
  Clone ID: LIB3049-055-Q1-E1-A1
ggtagaatagagagctcctccaattagggtttttgtgatctgcagctacgatgggtaagggaacggggagtttcggtaagaggaggaacaagacccacaccctctgtgtgaggtgtggccgccgcagcttccacctccagaagagtcgttgctctgcgtgcgcttaccccgctgcgcgcaccaggaaatataactggagcgtgaaggccattangagaaagaccaccggaactggaaggatgaggtacttgcgtaacgtgcctcgcagattcaagagcggcttcagagagggtaccgaagctgcacccaggaagagaggagctgctgcctctgcctaagctttgaatgaatgacagcaatttttg

SEQ ID NO: 16878 - DNA, 442 bp, Glycine max
  unsure (1)..(442): unsure at all n locations
  Clone ID: LIB3049-055-Q1-E1-A10
aagcgtcaattcgagtggcagtagaccaccgaaagggacgccaaggtggaacccattagtaataactgggtaaacaatttggggggtcccccaataattcctcaaaacttaacctaatcgcataataatttccccaaaagggtgaacggacaagtacaacaaggatccccccaattaaaaatgcccccttttctcagatttccgactccgaactccagaatcccaactacctactcctgactaactcctaggacgatggcagagggacgaaggcctttcgccgacgacctttgggccaaacgcctaagaattggtgaagaactccgtcatcgcccggacgaacccgaagcggcgaagactcggacggcgaactttcgcgccttctcggaggcgctggagagtcncgcgatgaaggagctgcacgaggagctcgaccctttga

SEQ ID NO: 16879 - DNA, 425 bp, Glycine max
  Clone ID: LIB3049-055-Q1-E1-A11
cgagtcaagtcgtgagtgcgggaggacgacagaagggggaagcagaggcgaagtggtgccgtcatgccataaaccccagaaagcacaagcatatgaatatggcgactcccaaccctaacgtcgttttcatagacaccaacctcgatacccacttggccctcgtcgtttccgaccttgacactgtctccgacctcaaaagtaatctttttatttatttatttatttatttctatctcttcttcaattttttagagactggttctggaacaattatgccttacttcgttcataatgcttctcttccattgtagtttatgcagatccttctttcaccttcttgtcaatagtttttgttcttagtagatgggttttggttgtctgttctcaatagtgaccaactcttgtttaactttatatgacatgaa

SEQ ID NO: 16880 - DNA, 396 bp, Glycine max
  unsure (1)..(396): unsure at all n locations
  Clone ID: LIB3049-055-Q1-E1-A12
caaaaagccaccagaaggggacaacttcagacaatccataccccaaagaccaagccaagcttaacccttaatttaaaaaatggaacaaccttcttcaatggttccctcatcccaatccttggctggaaaggccttaaacctgggcccatcaccccaaaaattggaaagggtgagcattaggaagaccgtcacaaagcaagtctcctcaggaagcccatggtacggcccagaccgagtcaagtacttgggcncattctctggcgacccccgtcctacctaatcggtgagttccaggcgactacggctgggacactgctgggctttccgcagacccagaaaccttcgccaagaaccgtgaactcgaagtgatccactccacgtgggccatgctcggag

SEQ ID NO: 16881 - DNA, 321 bp, Glycine max
  Clone ID: LIB3049-055-Q1-E1-A2
agagaatgcggtctctcaccgcacgcactagcactgtctcactctctcacgcacgcatcatctcaaacttgttcgcactttttcacggatctgatctaactaagttctcgccatgaatcgccaccacgatcccaatcctttcgaggaagaagaagtcaatcctttttcgaatggtggtgctgctcctgcatccaaatcacgtattccaccattagcatctcagccactgggctttggtcaaaggcatgatgctacagttgatattcctttggatactacaaatgactccaagaaaagaagtcaagagctagctgcttggga

SEQ ID NO: 16882 - DNA, 416 bp, Glycine max
  Clone ID: LIB3049-055-Q1-E1-A3
agatgacgaacagaaggggggtgagaaaaggaaaccgtggcataatttgcacaacgcgttgagcggcgcgtgacgcacggctcatttaattacttagcagaagttagaagcgcccgtgtccgtgtttcttccttaatttcttcttcaccttattatcatcaaatgttctgagattgagctcatgttgggtgtaggtgagaaagaactcacaatagagaacaacaacacaattccatggctgattttgactcaacttatagtcctccttctcctctttgcgctcctctttttcttcaccctcctcccattgggtcccgacgaccaccaccacaacaaccttgtcaccgccgacacgccccctcctccgacaacctcttccagtgtcttctttttcgacgatattcaaattcagcaga

SEQ ID NO: 16883 - DNA, 434 bp, Glycine max
  unsure (1)..(434): unsure at all n locations
  Clone ID: LIB3049-055-Q1-E1-A4
cacgcgtccatacgacggcaaaaaaaaacaaaaggggaatgcaattaaaaaacaaggatatgagaagccgacaactatacaatgtcaggctttgccagttgtgctttctggcagggatatcattggtatagcaaaaactggttctggtaaaactgcttcttttgtacttcctatgatcgtgcatatcatggatcagcctgagcttcagaaggaggaggggcccataggggtgatatgtgcacctacccgagaattggcacatcagatttttctggaggccaagaaatttgcaaaagcgtatggggtacgtgtctctgctgtctatggtggaatgtcaaaacttgaacagttcanagagcttaaggcgggatgtgagatagttgttgctacccctggcagattgatagacatgctgaagatgaaggcattgacga

SEQ ID NO: 16884 - DNA, 281 bp, Glycine max
  Clone ID: LIB3049-055-Q1-E1-A5
ggaagagtgaagagaatggctcccaagggtttaacctttctggctgtgttaatatgcgtttcagcactgtcactgagtccttctgttgccggggaaaggcaaaataatggccttgttatgaacttctacaaggaatcatgccctcaggctgaagacatcatcacagaacaagtcaagcttctctacaagcgccacaagaacactgctttctcctggctcaggaacatcttccatgactgtgctgttcagagttgtgatgcttcactgttgctggactccac

SEQ ID NO: 16885 - DNA, 327 bp, Glycine max
  Clone ID: LIB3049-055-Q1-E1-A6
ggaatgtagaacgctgctgccgaaacccttcccgatccccaaggtaagtgagtaatcggtggttgagaatggtggagaacgccaatggtaggaaagaggaggtggttaccacatagtacaccattaacctccacaagcgcctccatggctgcacatttaagaagaaagctcctaaagctatctaaggagataacgaaatttgcccaaaatgccatggggaccagtgatgtgacggtggatgtgaagttgaacaagtttgtctggagccattgaatcacgactgttccaaggacgattatggtaagaattgctcgcaagacgaatgac

SEQ ID NO: 16886 - DNA, 209 bp, Glycine max
  Clone ID: LIB3049-055-Q1-E1-A7
caagcgaagaaggtcaaggtggcgacaggtcgtcatattcaagtctcgtcactcgctctctccgcaaatgcttacaccagagcaaaggcaacaccattggattctacatcaactatctgcccaattaccttgagatccacagcattactagcactgagtgctactaaatgcatattgccatcaagtcaagtgtccgcgataactgctca

SEQ ID NO: 16887 - DNA, 388 bp, Glycine max
  Clone ID: LIB3049-055-Q1-E1-A8
gctcctacagattcttcagcaactgcgattttggatcggaacctcttctgcggcgtagcaatgggacactccaacgtttggaattctcacccaaaaaactacggtcctggttctcgcacttgccgagtgtgtgggaatccacatggattgatcaggaagtatggccttatgtgctgcaggcagtgcttccgtagcaatgccaaggaaattggcttcatcaagtatcgctaaaagagctgttgtcacctacggaccaatattatgttctggcactatgatgttttgaagatgttatgtttgaagaaacttgagacttgtttttttcatctattttattatcagacataatgtgtggaacgaataatacttttatataaattgttttgca

SEQ ID NO: 16888 - DNA, 296 bp, Glycine max
  unsure (1)..(296): unsure at all n locations
  Clone ID: LIB3049-055-Q1-E1-A9
gcaattttccgggcatgtnactcgaaatcgagggtttttgaccgggctctttccggtaaaacttaaaccgggaagtgactatgcggccaatggggtgccctccttctgcctctttcaaggttgaagccaagaagggagagtggttacctggcttggcctccccaacttacctcaatggcactcttcctggtgacaatggatttggccctctggggctagctgaggacccagagaacttgaggtggtacgttcaagccgagcttgtgaatggacgttgggccatgttgggtgttgca

SEQ ID NO: 16889 - DNA, 358 bp, Glycine max
  Clone ID: LIB3049-055-Q1-E1-B1
gatcatcactgtcttgtccgttttctaaatctcattcttcacctgcaactatttggattgctgatttttgttaataccatatttactgatattggcgcatttctttgagaaagttactaattcctagatagaggcaaaaatgttgggaattttcaaggagaagttggttaaagcacccaaagagctgaacagtccagcttcgttgaattcatgcactaagcctaagctaagtcacgaaatccttcaggatttcatgtcctgcaattcctccaatgctttctcaatgtgctttgggaatgaagctttgctagcctattccccttcaaacaagccctccattcaacagaggttgtttagt

SEQ ID NO: 16890 - DNA, 226 bp, Glycine max
  Clone ID: LIB3049-055-Q1-E1-B10
tgccaaaagaccacagaaagggacaacaaccattacaatgggaacctcaataaaagctggaactaacttcaagcaacccaacaaagggggcaagggcaatcccaaactcaaatccacacaatgcaattccaaaggctttggctttggaaccgctgcaactaaactcaattgcccccctaaacccgatttcaaaaaatttgccccaaaatgtttccaagccaacaaa

SEQ ID NO: 16891 - DNA, 406 bp, Glycine max
  unsure (1)..(406): unsure at all n locations
  Clone ID: LIB3049-055-Q1-E1-B11
gggaggttaacaacaaggaaagttgaaattggtgccgccaatttttttgccgcaaaacgcaaccgcgaaaacaaaaccggaatggaacaataaatccccgtcgaactggaacctggcaataatggctaatccattacccctggcggcaaaaaaggatggaaaacttaacccaaaaaggacttcccttggatggtccccgaccaatggagatgcgacaaattcgtgcagagattggtgctgtatccaaagcagatggttctgccattttcgagatgggtaattacaaagtcattgctgctgtttatggccctagagaggtgcanaatangaatcaacanataagtanccatgctctggtagcttttttccttttaagttataatacattgagtgtatttttagtgta

SEQ ID NO: 16892 - DNA, 189 bp, Glycine max
  Clone ID: LIB3049-055-Q1-E1-B2
ccacgcgtccaccaagcgttccttacgcttccaaaagaacaacaaaagggaattaattattaaaaatgaatttccaagggttaccggaaggttccattgcaattaaactccctcgcacaacgccggcggacttgtgaaggttttccgtcgtatcaaagattttccgttcggccgctgaatcggacgctg

SEQ ID NO: 16893 - DNA, 285 bp, Glycine max
  Clone ID: LIB3049-055-Q1-E1-B3
caaaaagacaacagaaggggaaggtaagggcgagagagtcaagtgagtgttaacggttctggttctggaaattgatccactcaataagaaccctagcactgatatggattctcacgttgccgtagctcttgcgctttcacttgttggtggtgtcagcacttctatcggtgcaccttttgtaactgttaataaagctcccagtttgaagatgcctgggctattacaaggttttgccgctggtttgatgctgatcatagcgttctttgatttggctcacaatgcatt

SEQ ID NO: 16894 - DNA, 358 bp, Glycine max
  Clone ID: LIB3049-055-Q1-E1-B5
gaggtcaccgacgaagaactcaaggcctacgacggctccgatcccgagaagcctctcctcatggccatcaagggccagatctatgatgtttcccagagcagaatgttttatggacctggtggaccctatgctctatttgctggcaaggatgctagcacagctttagcaaagatgtcttttgaagagaaagatctaactggagatatctctggtcttggcccatttgaggttgaggccttgcaatactgggaatacaagtttatgggcaagtatgtaaaagttggaactgtcaacaagaccgttccagtaactgaatcagaatccactggcgaagcatcagaatctaatgtccatgatg

SEQ ID NO: 16895 - DNA, 384 bp, Glycine max
  Clone ID: LIB3049-055-Q1-E1-B6
gagagtcctaatcatttagttcgaaaaatggctagctgtgttgctttggcattgtctaaaattattgatccaaagaatcctctgtaccttgatgatagctgcagtggggagacaattgattgggaatttggattcactatccccaagaaagggaatctggctgcctcaaattgtggaggaaaaggtgttgaggggacaaaaatatctactgtgtcatgtccggagaaggactctgattccccttccaataaagagaaaagtatttgtttaaagggtaaaaagaagttattggactttaatgcgcttgatccagatgagattattgatccagcatcactgaatcttgaatcagacgatagcgatgaggatgctgacgatggtgct

SEQ ID NO: 16896 - DNA, 344 bp, Glycine max
  unsure (1)..(344): unsure at all n locations
  Clone ID: LIB3049-055-Q1-E1-B7
ggaactagggttacttaccacccctacgcgatggggaggttggaggagatatggggttgtgattgtttggagtttcggccacaaaggtggctgaaggatggggtgtttcaacccatgaatccgttcgagtacccggtttttcaagcggggttgagggtgtgtgtagggaaggaagtggctctgatggagatgaagagtgtggcagtttcgttgctgaggaagttccacatcgagttgctggcacccttgtcttttgggaaccctcgcttctctccggggctcactgccacttttagttttggccttcccgtgatggttcgtgaaagangaactacaacaaccac

SEQ ID NO: 16897 - DNA, 337 bp, Glycine max
  Clone ID: LIB3049-055-Q1-E1-B8
ggagttagggttatacgaaaaattatcaatgaagaggtattctagatatctttcttccatgaggtcaaggtcgtctcctggtggtgatgatgatcttgacaagttattaaacggtgtcataaagaaaaaattgaagatcatccctgagaatgtcacatggggagggcagtcaagtgatgttttcgactatcttgcaggtgattttatgagaccaagaattaatgacgttgatgaactgctgacaaaatgggtcaatgtgactgtatacaatggacaagttgatctgatttgttcaaccaacgtggctgaagcttgggttcataaactaaagtgggaa

SEQ ID NO: 16898 - DNA, 359 bp, Glycine max
  Clone ID: LIB3049-055-Q1-E1-B9
aaagaccacaaaaaggggaagaacaacgggttttcaatttcaagaaccaaaactaagggtcctccaaaactagattcgtttccaatgagctcaccagcatgtttgagcgcagcactaagcttggctctgtttgggttactcttaaacgatcatctttgaaatctaaggtgcagaggaataaattggccgctgccggtgaagcaattgagtttagatgccttatacgtgcaactgatgggaaaaagacaatttctacttcggttggaccgaaggatcaccagcgctttcaagcttcttatgcaactatcttaaaggcacatatgactgctctaaagaagagagaaaggaaagacaagaag

SEQ ID NO: 16899 - DNA, 391 bp, Glycine max
  Clone ID: LIB3049-055-Q1-E1-C1
ggtgtgagagagtgaaaacatggccactatcaagccaactggaaagaaggcatgtgtgattggagggagtggatttatggcctctttgttgatcaagcagttgcttgaaaagggttatgctgtcaataccacagttagagacccagataatactaaaaaaatacctcaccttttggcactgcaaagtttgggcgaattgaacatatttggagcagatttaactggtgaaaaagattttgatgctcctatagcaggctgtgaacttgtcttccagcttgctgcacctgtgaactttgcttctgaagatcctgagaatgacatgatcaagcctgcaatcacaggcgtcttgaatgtgttaaaagcatgtgtgcgagcaaaaggagtcaaacga

SEQ ID NO: 16900 - DNA, 113 bp, Glycine max
  Clone ID: LIB3049-055-Q1-E1-C12
agggaacgagagaaagaacatgggttcaagttcaacaaccgaaagtgtttgccttacaagaacctccgggttcaaccggtcaagggctgtcaagaaactcaaccaaccttggt

SEQ ID NO: 16901 - DNA, 394 bp, Glycine max
  Clone ID: LIB3049-055-Q1-E1-C2
ggtgtgagagagtgaaaacatggccactatcaagccaactggaaagaaggcatgtgtgattggagggagtggatttatggcctctttgttgatcaagcagttgcttgaaaagggttatgctgtcaataccacagttagagacccagataatactaaaaaaatacctcaccttttggcactgcaaagtttgggcgaattgaacatatttggagcagatttaactggtgaaaaagattttgatgctcctatagcaggctgtgaacttgtcttccagcttgctgcacctgtgaactttgcttctgaagatcctgagaatggacatgatcaagcctgcaatcacaggcgtcttgaatgtgtaaaagcatgtgtgcgagcaataagagtcaaacgagtc

SEQ ID NO: 16902 - DNA, 278 bp, Glycine max
  Clone ID: LIB3049-055-Q1-E1-C3
ggtggtgtagactgtcgaccagtgaattacaattgcacctagaaccagcgcatatctgcatggcgggaatggcattcacgacccgttgcagatcattcatttgcatgaagcttctctccatatcgcaattcaactttgatatccatcatccactgagggcttatgtcaccattggtgacctgaaagttagattgagctgaatatatttcgtgcaagtttctctgactgtatatgtcttcatgctcctaactcatgttgttagcgtatcttccaccttg

SEQ ID NO: 16903 - DNA, 389 bp, Glycine max
  Clone ID: LIB3049-055-Q1-E1-C4
caaaaaaacaacaaaagggggaagctaaacacaaccgcaatcaactgggtttgaattttgatgaacggtaaacgatgaacgcagtgaggcgtagattgttgcacactcttcgcagcgacgccccctctggaacactgaagagaagggcgttggaattggagaagaagagaaagactcggcactcgaagagcaaggaccagttcatcgtcacagttcccgaatccctctcctacctcgacaccgccaccatccccatgtacttcgccgccatcggaatcgctctcttcgccaagctcctcatgacgtacgatgattcgaggtcccaagagctgctggagcggaagataaagaatgcccctgaagggcaaggcagtgttagaatgctcact

SEQ ID NO: 16904 - DNA, 318 bp, Glycine max
  Clone ID: LIB3049-055-Q1-E1-C5
gacatttcatttctcatcctttgtccagttaaattgtcgatcaagacccagtaatctctaaaaatgctgtctccaaattccgaacgcataacacaaatcagaaagaaccgttactttgaccagagaattaatggcgattaatgttattccactgttggccatgattattgtacaattgggctatgcagggatgaatattacctcaaagcttgcaatacaatctggcatgcaccctcttgttctcgttgcttatcgccaaatttttgcaactatgtcccatgctccattcgctttttggttagaaccgaatacggctcc

SEQ ID NO: 16905 - DNA, 370 bp, Glycine max
  Clone ID: LIB3049-055-Q1-E1-C6
gctagaatccccattccagagccaaggtaggttaaacactcttcttcatcgtcgtcgcaatgggacgtgtgatccgtgcgcagcgtaagggagcaggctcggtcttcaagtcccacacgcaccaccgcaagggccctgcccgcttccggagcctggatttcggagagcgcaacggctacctgaagggtgtcgtcactgacgtcatccacgatcctggccgtggcgcgcctctcgctaaggtcgccttccgccacccgttccgctacaagaagcagaacgagctcttcatcgccgccgagggtctctacaccggccagttcatctactgcggcaagaaggccaccctcgttgtcggcaatgtgttgcctct

SEQ ID NO: 16906 - DNA, 393 bp, Glycine max
  Clone ID: LIB3049-055-Q1-E1-C7
ggcggcacaaagcattcactgtgtcggaaaaagaagaagagaaaaaagatgagcgacggaggaaaacgacaaggcggaagagcgttgccgccgccgccaagaggccctccgcctcctcccccctctcgccctcgcctcgaacccgtcgatcgcgagaagacatgtccgttactgctgcgagtgttcactaagattgggagtcaccattccatggaagattttgccgtcagaggcaaagagcccaaagacgaggttcagatttacacctggaaggacgctactctccgagaactcaccgatcttgtcaaagaagttgctccggctgcaaggagaagaaacgccaaactctccttcgcctttgtattcccccgacaaaaacggcgtttcaaagtt

SEQ ID NO: 16907 - DNA, 376 bp, Glycine max
  Clone ID: LIB3049-055-Q1-E1-C8
ggcggcacaaagcattcactgtgtcggaaaaagaagaagagaaaaaagatgagcgacggaggaaaacgacaaggcggaagagcgttgccgccgccgccaagaggccctccgcctcctcacccctctcgccctcgcctcgaacccgtcgatcgcgataagacatgtccgttactgctgcgagtgttcactaagattgggagtcaccattccatggaagattttgccgtcagaggcaaagagcccaaagacgaggttcagatttacacctggaaggacgctactctccgagaactcaccgatcttgtcaaagaagttgctccggctgcaaggagaagaaacgccaaactctccttcgcctttgtattccccgacaaaa

SEQ ID NO: 16908 - DNA, 219 bp, Glycine max
  Clone ID: LIB3049-055-Q1-E1-C9
aaaagaccaccgaaagggaaattccagaaaggaaaaaggaaccctaactggataagtcaaacatcaacatgtccgacgaagagcaccaattccaatccaaaggaaacgcccgttcctccaaaacctaacctcaacaagccggtaacaatcccaagaacggctacatcgtcatcaaaggacgcccctgcaaagttgttgaagtttccactttcaaaactg

SEQ ID NO: 16909 - DNA, 362 bp, Glycine max
  Clone ID: LIB3049-055-Q1-E1-D1
gactctgttatcaagtgatggcgatgatggcggcgacgacactcacactgacaccaccgagatggtcgtggcgtccaactcgtcgttccttttgccggcaaatgcatccagggctgagaggtttgggaatgtacagaaatggtgggagcaatgaattgaatgtttctgcctgggatgataagccctttgaaatgcttccgagcggtaacaaggcttacttggatgagcaggatgtggtgacgtttcttgatcctcctaaggacttaatccctttcgacccatcttcctataatcccgctgcatacctatggaaaaaaattgaagatattcctcaggaaaggcgacatcgacttctccgattg

SEQ ID NO: 16910 - DNA, 409 bp, Glycine max
  Clone ID: LIB3049-055-Q1-E1-D10
ccaagccttaattcgggtgccaaaagaccaccaaaagggggttggaaaaaggggaatgaatccaaacccacataatccgggggaagcttcaaattacctcaaaattgtccccaaccctaacggttctcttcccttctcatcattttaattttttccaatcaaaccatacataacataagcaccgctcttttctctccgaaatctccatctcccttcacttctgagctctggacgagatcccagatctcaccatctttcacgcactcttccatcagattcaccctttcgtttaacgcaaactcataacttgaaggttaatggctgctccatcggcaagggctcgtgccgattacgattatctcatagagcttctcttgatcggtgacagcggtgttgggaaaagttgcct

SEQ ID NO: 16911 - DNA, 253 bp, Glycine max
  Clone ID: LIB3049-055-Q1-E1-D11
acgcgtccacagagcgagaagacgacagacaggggacacagtgaaccaaacaagctaacagaacacaaaccctaatcaataaaaaattgtgttgcacaaaaaaaccatggcgggggaagagaccaccgggaagaagaaggtggtgacagaatccctatgatggctaacgggatcgtcgataatgccaaagaagcaccgagccataactggcgttggcgcatcctcaatcctcgaattgaaagctgaactatac

SEQ ID NO: 16912 - DNA, 364 bp, Glycine max
  Clone ID: LIB3049-055-Q1-E1-D12
ggtttaaggacttgtttgtttgattagtacaaagatgaaggttgctgcagaaggctgcaacttactgttattgttcattacctcttacctttcactgatctcagggcttggcgtccattctttgtcttatgatcattctgctaccacaaagtgtttggcagaacctcggagagcacagtatggaggaggcattatagtaaatccaggatttgatcacaacatagagggttggacagtatttggaaaaggagcaatcaaggagcgaatatcgaatggaggcaatagattcattgttgctcacaacagaacacatccattggatagtttctctcagaaggtccaacttaagaaaggaatgctatac

SEQ ID NO: 16913 - DNA, 364 bp, Glycine max
  Clone ID: LIB3049-055-Q1-E1-D2
gccaaaagaccacagaaaggtgtacttgcaatttgaaacaatggaaacaacaagtgctgctcaaccttcaatgcccacaaaggtgtttgcaaggaaaatgacatccgccatccaaaagccacctcaaatgtttgaaaccaaatttaaaagtgacacttgaagaaagtacttacagactttttgactcacatggcaatcctcttaattttctcaaattactttctgaaattgagtttagtttagaaattttaatcataacttgcaccattatatgtatgtttacagaaattttactgtcaaagttgtgtgatattcatgatcagtaatttttttccaaattaaagatattcctcaggaaaagaaa

SEQ ID NO: 16914 - DNA, 404 bp, Glycine max
  unsure (1)..(404): unsure at all n locations
  Clone ID: LIB3049-055-Q1-E1-D3
aaagaagacaaaaagggggtccaatgtgttaatggttggtggtggtaatccgtcctcctcctttggtggtccgtggttgtgtttgtttttttcctcacctgaaaatgtcttgctgcggtggtaactgtggttgcggaagctcctgcaagtgcggcaacggctgcggaggctgcaagatgtacccagacttgagctacactgagtcaaccaccaccgagaccttggtcatgggagtggcacctgttaaggctcaatttgagggtgctgaaatgggtgtgcccgctgagaacgatggctgcaaatgtggaccaaactgctcctgcaacccctgcacttgcaagtgacgtgttgggagagcaagcttcaatcagagatagcccttaattaggaataatgatanacta

SEQ ID NO: 16915 - DNA, 340 bp, Glycine max
  Clone ID: LIB3049-055-Q1-E1-D5
ggagagagaacttagagagaattacagagcattttccaacagtattacacgaccgattcacatacctctttctctccgaagctgcttttaatacacgtactggcacttcgattgttctcatccttaatacatacagtatctctcttcgatttgatggaacagtacaacactctgaacaacggttaacccaactgcacaggtagtctccaagtattggtgcctcatgatgagactggatgctatgctcctgaaggccccattctgttgcattaataattgtggcgtctttggtcgatcatctcacatgaacatgtgttccatgtgttacattgacatactg

SEQ ID NO: 16916 - DNA, 376 bp, Glycine max
  Clone ID: LIB3049-055-Q1-E1-D6
gacaggaacaaaaaattaacatgaagaacaatttcagattaattagaacagaaaaaactcgaatcagttcacccacacagggcattagggagacagaatccacaatggctccagagtggacagacgagaaacacagcatgtatatcaagtctatagaagcatctttcgttaatcagttatatgattctaagcaaatgaaaacttcatatgaccctgctaccacttccggccagttcaaggtactacgtggtggctgttggcaaaaaatcaattttgagagagtgaatccgcaaacgagtacgattaaccagtgtcatgacttgacggaaaatccatggattcagcactaccgatcttcaagcaaacagagaagcat

SEQ ID NO: 16917 - DNA, 349 bp, Glycine max
  Clone ID: LIB3049-055-Q1-E1-D7
ggcatgtcaacgtaattgtcatgagaaacaatttcccactagttagaccatataaaaccccagtcagttcacccacacagggtggtatggagacagcactgacacttgttccagactctcctcactagatttatcgatgtgctccacttctacaaattcatcttccgtaaagtcacttagatgattctaagcaactgaatacttcatatgactctgccatcactgcaggccatttcactgtagtagctggatgctgttggcctctactacttttgagagatttcatgtgcaaacatctacgatgaactgatgtcaggactggtcctgtcacccatggtctcactcctac

SEQ ID NO: 16918 - DNA, 372 bp, Glycine max
  Clone ID: LIB3049-055-Q1-E1-D8
gaatctctgaaaccacaattcacaaccgaaacagtttccatctctctcacaaaatgacaacaatatcaaattgctcccttctcttcctcttcctcttcctctccaccctccacatagcttccaccctctcaacccccaccaacttcatcaagtcctcctgcagcaccacccagtacccagccctctgcatccagtccctctccgtctacgcctccaccatccggcaagacccccacgagctcgtccagacagccctctccccctccctcaaccacaccgaggccaccaaaaccttcgtcgcaaaatgcaacaaattcagaggcctcaaaccgagagaatacgctgccttgaaagactgcgctgaagaaatca

SEQ ID NO: 16919 - DNA, 159 bp, Glycine max
  Clone ID: LIB3049-055-Q1-E1-D9
ggcaatgagtgagagtgttccctctcctctcctctgctcaaacaatgtcgcaaacaacgctgcacgctttcgtcgccaaaaaccttggatgtggaatggcagaaggcaagtgtctcccatgttcaagtgtttctggaagaactgctgctgtataatcct

SEQ ID NO: 16920 - DNA, 398 bp, Glycine max
  Clone ID: LIB3049-055-Q1-E1-E1
ggaggcggatagtgaaatcgtaagttggaaaatggaggaggaggaaacaatagcggttccggttaatgacgaagacgatccttcatcgacgcttctggatcccacgagttaccagctccacgacctcgactcggtcgagttgccacccagcctcaccgagttggacctcaccgcgaatcgcttgtccacgctggacccgcgcatagggaacctctcccatctccagaagctctcccttcgccaaagcctattcagcgacgccgccgttctccctctctcttcctggaacgccctctcctctctcgaggagcttgtgctgcgggataatcaattcaagaacattcctgacgtcagcgtatttaagaagcttctggttttcgatgttgctttcaacgaga

SEQ ID NO: 16921 - DNA, 382 bp, Glycine max
  Clone ID: LIB3049-055-Q1-E1-E10
gagaacagaagggagaattaggtttttagggtttacaccgagcagcgacacctccctcccgcagtagccatggttctcaaaactgaactatgccgattcagtggtgccaagatctaccccggaaagggcatcagatttgttcgtggtgattctcaggttttcctgtttgccaactcaaaatgtaagcggtatttccacaaccgcctgaagccctcaaagctcacctggactgctatgtacagaaagcaacacaaaaaggacattgctcaagaagctgtgaagaagaggagacgcgctgccaaaaagccttactctaggtccattgttggtgccactctggaagttatccagaaaaagagagctgagaagccagaagttcgag

SEQ ID NO: 16922 - DNA, 368 bp, Glycine max
  Clone ID: LIB3049-055-Q1-E1-E12
gactgcgaaccagtagggactcccattccgactcttagccgccgatctctcagggcttgcatcttctcaggtaagctgtgaagatgtacacatcaaggaagaaaatccacaaggataaggatgctgaaccaactgaatttgaagagtcagttggacaggcattgtttgatctggaaaataccaatcaggagcttaaaagtgatctgaaggatttatacataaactcagccgtgcaagttgatgtttctggaaaccgcaaggctgttgttattcatgtcccttacagattaaggaaaggtttccgtaagattcatgttaggcttgtcagggagcttgagaagaagtttagtggcaaggatgtaatcttg

SEQ ID NO: 16923 - DNA, 402 bp, Glycine max
  unsure (1)..(402): unsure at all n locations
  Clone ID: LIB3049-055-Q1-E1-E2
aaagttacagaagtaattgtaaacatggagtttggttattgtgctgtgtttctgatactgcttcttccaatctcatgtgcagattctacctcagttgataagcaattcagggaatgcttgttaacccaacttgatggaaattctgaatacattgaaaaaataaccttcacctcatcctcctcgctatatccccaagtctgggattcattggcacaaaatcctagatgggttagttccacaaggaagcctcttatcattctaacacctttccatgaatcagaaattcaagaagccattctatgcagcaaacaacttgaactgcagctcagagttagaagcggtggccatgattatgaagggctatctntacttggtaagggtccatttgtgatggttgacctc

SEQ ID NO: 16924 - DNA, 309 bp, Glycine max
  unsure (1)..(309): unsure at all n locations
  Clone ID: LIB3049-055-Q1-E1-E3
aggaatgaaaggaaagggtaatagaaacaactcaatcaatccaaaaattaaggaaaccaaaattaagggtcctgtgttgtgattctgctctgagccagttcctgtggagagaaggcgaataaacgaaaccactatatgtttgaaggaagagtgccaatccagaaactccatgacacttgttcacaaccgatgcaggtttgctgataagcanattgtgagggtccaggagacacctgatgagattccggaaggaggaacacctcacacagttagcttgctgatgcatgacaagttggtggatactgcaaa

SEQ ID NO: 16925 - DNA, 352 bp, Glycine max
  Clone ID: LIB3049-055-Q1-E1-E4
ctacgaatggatctgactgccctgcatgaggtgatggagaaaattgggtataaagatgacgagggtgcagcaactgagctttcattccaaatgtggacgaaccagatgcaggaaacattgaactcaaggaagaaaggggacgctgcttttcggcacaaggattttaaaactgcaattgatagctatacgatgttcattgatgttggaaccatggtttctccaacgatttatgcacgtcgtagtctatgttatctgatgagcaatatgcccgatgaagcacttaatgatgcgatgcaagcacaagtaatatcccccgtttggtacattgcgttttatttacaagctgttgctc

SEQ ID NO: 16926 - DNA, 357 bp, Glycine max
  Clone ID: LIB3049-055-Q1-E1-E5
gatgtttgtgtgatgaaaagcaatgcagttgaaagtgatgttgatgtgcatgagttgaaaaatagtgcagtagatagtgaatctgaaccttcaaatggtgcagttcagagtgaaattgtgtctgagatgaaaaacaatacagaggagagggaagctgaaccttcaaatggtgcagttgattgtgaagctgaacttccaaatggtgcagtggaaagtgaagctgaaccttcaactagtgctgtcgagagtgaagctgagccttcaaatggtgtagttgagagggaaactaaaccttcaagtggtgcagttgagggggaaactgaaccttcaaatggtgcagtggatagtgtagctgag

SEQ ID NO: 16927 - DNA, 211 bp, Glycine max
  Clone ID: LIB3049-055-Q1-E1-E6
gatgtttgtgtgatgaaaagcaatgcaattgaacgtgatgttgatgtgcatgagttgatcatcagtgcagtagaccagtgaggctcaaccctcaaatggcgcacttcagagtgcgattgtctccgagatgaaggacactctctacgagatggaggctgaaccttcatatcttacacttggttgtgtccctgactttcgaaatggtgcactg

SEQ ID NO: 16928 - DNA, 350 bp, Glycine max
  Clone ID: LIB3049-055-Q1-E1-E7
ggcacaagtttgttgagatagctagaagcaataagatgaaaatgaaagtgcttgttttgtttgttgctacagttttggtagcatatgaatgccatggctcagactaccagaagttccctctccaaatgaaaactgggtttggtgggcaatacagcaatgaggtggcatgtgccagttggaggcttggcgtggaagcaaacaacgtagtcaagtggcaaactgttcctgcagcttgcggagagtacatagctgactacgttctaggagaccaatatagatcagattccaaaacagttaaccaacaagcttatttctatgctaaatccctcaaactcaccaacaaagatgtc

SEQ ID NO: 16929 - DNA, 378 bp, Glycine max
  Clone ID: LIB3049-055-Q1-E1-E8
ggggcgtcaaaatctgaatcttgttcctgcctgggaaaacaacgattctatcatatgaatcagcgctgtttggggttgtctcctactcctacaccctgaattgaagcccgcctttgttttcctccaattcacttcttcgctagctcctgcttccacattccctttcccggattcgaactataatggcttgtgggagtaagagcgggaaaagtgagatcagtgaaggaggtgcaaatgattcagtggctgtgggagatgtgatatttgtcaagcttcgcggtagctcatggtggcctgtacaggttgttgatgaaaatagtgttaataagagtgttaaaccgagcaaacggaccaaacgattgccgggagacatccttg

SEQ ID NO: 16930 - DNA, 241 bp, Glycine max
  Clone ID: LIB3049-055-Q1-E1-E9
ggagtgagcaagagtgaagagcgaagagaatggctcccacaggtttaatccttttggctgtgttatgcttctcagcactgtcactgagtcgttgtcttgcggaggataatggacttgttatgaacttctacaaggaatcatgccctcacgctgaagacatcatcaaagaacaagtcaagcttctctataagcgccacaagaacactgctttctcctggctcacaaacatcttccatgactg

SEQ ID NO: 16931 - DNA, 386 bp, Glycine max
  Clone ID: LIB3049-055-Q1-E1-F1
ggatagagaaatagagataagtacggtgcgaaaagagtgaggcggagaaaaatgaagtgcccgtactgttcggcggcgcaggggcgttgcgccaccacgagcagcgggcgttcgatcacggaatgcacgtcttgcgggcgcgtggtggaagagcgacagtcgcatccccaccacgtgttccacgtgcgcgcccaggacaaccctctgtgtctggtcacatcggatctcgctctccccgcgctcaatcaaaacaacgaggaggaggaccctttcgagcccacgggcttcatcaccgccttctccacctgggccctcgagcccagcccactctacctccagtcatccctctccttctctggctacctcgccgagctcgaacgcactct

SEQ ID NO: 16932 - DNA, 339 bp, Glycine max
  Clone ID: LIB3049-055-Q1-E1-F10
aaagcatcgaattacacgatgcacgagtgctaactgatgttggtgatgttcctatccaggaaattcgagattgtggggtagatgatcacagattaatgaatgttattggtgaatctgtaaagttagtgatggaggaggatccattatgtcccttaattttaggcggtgatcactcaatatcatttccagttatcagagctgtctctgagaagcttggaggaccagttgatgttcttcatcttgatgcgcatcctgataactatgatgcctttgaacgaaacatttattcacatgcttcatcttttgctcgagtcatggaaggtgactatgttcgacgtc

SEQ ID NO: 16933 - DNA, 383 bp, Glycine max
  Clone ID: LIB3049-055-Q1-E1-F12
gacaacacagaacaaaaacacagaaaaagaaaaacccttagccaacacaaccatcatggccacctctgctattcagcaatcagcattcactggtcaaactgctctgaagcagctcaatgagttcgtccgcaagaccggtggcgccggcaaaggtcgcactaacatgcgccgcaccgtcaagagtgctcctcagagcatttggtatggccctgaccgtcccaagtacttgggtccattctcggagcagattccatcatacctgaccggagaattccctggtgactacggatgggacactgctggattatcagctgacccggaaaccttcgccaggaaccgggagctggaggtgattcacagcagatgggcaatgcttggtgccc

SEQ ID NO: 16934 - DNA, 329 bp, Glycine max
  Clone ID: LIB3049-055-Q1-E1-F2
aggggtggaaataattgcaaaactttggttcccaaactccaatggctccgcctctaactcgccaacaagaataatccttaaaagaaacgcaagggagatttgcaaatacctcctccaaaaaggagtttgctttgcgaataaagacctcaatttggcgaagcaccctgagattgacctgccgaatctgcaggtgattaagctgatgcacagtttcaagtctcgcgagtatgtgagggagacttttgcttggatgcactattactggttcctcaccaacgatggaatcgagtttctcagaacttaccttaaccttccttccgaaattgtcc

SEQ ID NO: 16935 - DNA, 398 bp, Glycine max
  unsure (1)..(398): unsure at all n locations
  Clone ID: LIB3049-055-Q1-E1-F3
gattccagcanagcgcaaagcattctccactacgattcgctcttccagaagcttccagaaaactccagatggcgcgtacaaagcaaacagcccgtaagtcgaccggcggcaaagctccccagaagcagctggcgactaaggccgcccgcaagtctgctccggcgaccggcggagtgaagaagccacacaggttcaggccaggaaccgtggccctgagggagatcaggaagtaccagaagagcacggagcttctgatccgaaagcttccgtttcagcgtttggttcgtgaaatcgctcatgacttcaaaacggatctgaggttccagagcagcgccgtttcggcgctccaggaagccgctgacgcgtacttggttggtctctttgaagacactaaccct

SEQ ID NO: 16936 - DNA, 414 bp, Glycine max
  unsure (1)..(414): unsure at all n locations
  Clone ID: LIB3049-055-Q1-E1-F4
cgcgtcaatacaagtggcaaaagaacacaaaagggaaaatttggttggtggaaaaaatccccatagaaccaaaaagtaataaatcaaagcttcgttatcttcttcaaacccctggctgaatgaaatgtcgcaggtgaatgagcaccaccaccacgcaccctccacgccagggaaattgaagccagaaaaatccccatacaaccgcctccgtatccactcctctctctccaaactcactctctggtcctccttcttcctcgcattcatcctcttcctcttcattctgtcaccgccttcgccctccgcctcnccccgccgccgctccctcggcgactcctgnggcggctcccactgggaaaagcgcgtcgccaagtccgctcgccgctcctccccctcaagctctctgtcctcgtc

SEQ ID NO: 16937 - DNA, 307 bp, Glycine max
  Clone ID: LIB3049-055-Q1-E1-F5
ggcagcgcttgagaccaagccccactcaaccaccacaccactctctctgctcctcttctacatttcaagtttttaaagtattaagatggcacaaacattcctatttacctcatagtcagtgaacgagggacacgctgacgtgctctgcgactacatctcagattctgtcctcgacgcttgccttgatgatgacgcacagagcatcgttgcttgctagatatactccaagaccaacttggacatggtcttcggagagatcaccatgatggccaacgttgactaacagaagatcgtgcatgagacctgc

SEQ ID NO: 16938 - DNA, 400 bp, Glycine max
  Clone ID: LIB3049-055-Q1-E1-F6
gattcccttcgtgtgtttcgtaacttattcggtatccttaaatcgcaactcaaaaccctagccattgaatttgggcacggatcttctcccacgctatctcaggtaacatgcctgagaatccactgcagaccttgttccataacattgaacaagtctcaagctttgttcaacaccatctctctaatttcataggccttcatcaccacccatcttcaggacccctcttgtccatctcttcctccaccaaaggcccactttcaaaaactgcaacttctgtacaactcgctgatactgctgtcaatgaaaagtctgctgccccagtgactaaggaagagcttggaagggctacttggactttccttcacattcttgcagctcagtacccggataatcctacaag

SEQ ID NO: 16939 - DNA, 369 bp, Glycine max
  unsure (1)..(369): unsure at all n locations
  Clone ID: LIB3049-055-Q1-E1-F7
gaatgacgagccgtaagaaatttggaattccttggcctgaatgcaacgacggtctgtcctacgacgacgtcgttcgagcctctgatgccggggcgacactcatagagttttactccaccaagtacaagagttctgctcccttacaaggttggttgcagcgaatagaaagtgggcagataacagttgatggaggagttgttactgattctaacacagtcctcagagttggatcaaagctaatctatcatagacttccatggaaggagccagatgcaccgcacatgatcgacgtcttatatgaagatgatgacatgattgctctaaataaagcgtctggcctgcaagttttgcctgnaggtctctaccagc

SEQ ID NO: 16940 - DNA, 376 bp, Glycine max
  Clone ID: LIB3049-055-Q1-E1-F8
gatatcattgattaagaatggcatttgattcttttgtcttttgtaacggcgtgacctggtgacaaataggcgtgttcacgtgcatttatttcactttctgtgtccaactttacttgtcaatattccattagtgccacagagagagagataatgtgaattgagccatggtacctcctccatcacaatccattgaaatttctggccacggataccaagctggggatgatacacaagacaaggtcatcaatgaatgttgctcttgttgctatgactgtacacaaggtctcatcgatttcatgtgctgcaacttatgttagaactctttagattatatttcagtgttattacgtaataccagcactatgtaaagtcaatg

SEQ ID NO: 16941 - DNA, 78 bp, Glycine max
  unsure (1)..(78): unsure at all n locations
  Clone ID: LIB3049-055-Q1-E1-G1
gacagacagagagaaagatgcagaagagagagcaaggcaagtccggcggattcgccgganggagggcgacgccacctg

SEQ ID NO: 16942 - DNA, 382 bp, Glycine max
  Clone ID: LIB3049-055-Q1-E1-G10
ggaaacagagagtgatttcagtgagtgatcggtgttcacttgatctcagcataagcgtcagcgtcaattgaagaagatgccgatcagaaacatcgccgtcggaaggcctgaagaggcgactcaccccgacacgttgaaggcggctttggctgagttcatctcagccttcatcttcgtgttcgccggctcaagctccggcatcgcctacaacaagctcaccgacaacggcgctgccacccctgccggcctcatctccgcctccatcgcccatgcattcgccctcttcgtcgccgtctccgtcggcgccaacatctccggcggccacgtcaaccccgccgtcaccttcggcgccttcgtcggcggcaacatcaccttcctccgc

SEQ ID NO: 16943 - DNA, 379 bp, Glycine max
  Clone ID: LIB3049-055-Q1-E1-G12
ccaaaccgtcgttacggttgcaaaaggacaacagaagggaattgattgtaaaaaattgctgaattggccatatgcatatgggttttatttgccggagcatgagcatgcaaaaaaacagttctttgagtacttacaacgtgaagcagaatctggtctggagagacttcatcaatgtgcggaaaaggaactacagccgttcctaagtgctgatgatccatctagagaattcaatgactttcgtacaaagctagctggattgactagtgtgactagaaactactttgagaatttagtaagggcattagagaatggtctatctgatgtgggaagtaatggagctgccttcagcaaagcaacgagctcaaaaaatgctgctggt

SEQ ID NO: 16944 - DNA, 408 bp, Glycine max
  Clone ID: LIB3049-055-Q1-E1-G2
agacaacagagggggggaaacggggaatcattgtcggcgtcggtaaattgtaatttgcatcatccctgaagctgagcctcaaaaccctagctgccggcttgtctgcaacggcatcgtttcagtatctcgttatgattagttgagaatccaaaggaatcgaatcgaatcatctcgacgagaagcaaaacaccggctatagttatgtacagagagctaggaggcgtcggatccaaatcggaggtaacttccgttgatcggaagcgaatcaatgacgtcctcgataaacagctcgaacgatcctcgccgtccacatccagagccgccggcgccatcaacggcaaggaccgctcctcctcttccctcttagccgccgccaaggactcccgctccgcctccgttcacgcccct

SEQ ID NO: 16945 - DNA, 353 bp, Glycine max
  Clone ID: LIB3049-055-Q1-E1-G5
gagagattgaactccgacgatgcctcccgtcgctcctcgatccggcgatgccatattcgccaacgtcgaacgcgtcaatgcggagctgtttactttgacgtatggcgcaattgtgcgtcaattgctcacggatctggaagaggttgaggaggttaacgagcagcttgatcaaatgggttacaatattggaatccgattgattgatgagtttttagctaagtctaatgtctcaagatgcaacgatttcagagagactactgatgtaattgcaaaagttggttttaaaatgttccttggtgttactgcatctgtgaccaattgggatgctgatggaacatgttgtactattgttt

SEQ ID NO: 16946 - DNA, 309 bp, Glycine max
  Clone ID: LIB3049-055-Q1-E1-G6
ggagcacggtgctatggacgccaaggacccgaacttcgaggatccagcggagatcgccgccgtgtgatcgcggtggtttccggtgacgagatctgtacatactaataattgctaagagacgcggttttcgaattcaataatatgaagcaagtaggagaagaagcgctttctgtgattgattgttatagatctgatctgtctctggaatttggtagtggcatggcacttgtgttgttgtacatatatcgaatggtcttggaagtgcgtgcactcatattcgcattcaagtttctacgagcttttgttagc

SEQ ID NO: 16947 - DNA, 360 bp, Glycine max
  Clone ID: LIB3049-055-Q1-E1-G7
tgggagggaaggcatgttgggaagtatattaggtatacaccagatgatctacatacctatctattagatttatttgaaggattccctgctgtattgcatcacataaggaagacaagtacatagtacatcataagatgcctttagcaagtgaactcactttatgagaattacttgaaaatggcttcctgtgtcatgtgtatttctacttggataggtgttgagttgacatgtgttaatgttataatcggattttgtgatattcgactcttcctccacgcctcttcaccaactccagttaagatttatttttttcatgttccttcgaatactgtaatatctcttgtagataatgttctgata

SEQ ID NO: 16948 - DNA, 381 bp, Glycine max
  Clone ID: LIB3049-055-Q1-E1-G8
gacttaatccaaccccaaaaaccctaggtagagagctcttcctccctttcccacagcaatggccgccgcagcacgccctctcgtcaccgtgcaggccctcgacggtgacatggcaaccgatgcctccgccaccgttcccatccctgacgtcatgaaggcctctatccgccccgacatcgtcaatttcgtacactcgaacatctccaagaacagccgccagccatacgccgtcagtcgtcgcgctggtcaccagacctccgccgaatcctggggtaccggccgagccgtctcccgtatcccccgtgttcccggcggcggaacccaccgcgccggccaatgagcctttggaaacatgtgccgcgggggacgcatgttcgcccc

SEQ ID NO: 16949 - DNA, 282 bp, Glycine max
  Clone ID: LIB3049-055-Q1-E1-G9
tattccgagacatgtgctaatggctgttaagaacgatgaagaatttgggaaattgcctgctggtgtcaccaatgcacatggtggtgtgcttccaaacattaaccctgttttgttgcctaagaagaccgagaaggctgccaaagagcctaagtctccatccaaggctactaaatctcctaagaaaggctatattaaccctttttttttttttttttttaaatctaatgttgtatatccgtgcttaaatgcctttggtgttacaagaaatttgatgtgtttctt

SEQ ID NO: 16950 - DNA, 368 bp, Glycine max
  Clone ID: LIB3049-055-Q1-E1-H1
gaatgaatagtttaatattagacacgagttgtagtctcagacgctgttattgagtcaagatgggttctttggcaaagaagggactcaacaattacgtcaaacagctccagcaacaccctttgagaaccaaggtaatcactgcaggggtactatcagcgatcagcgatgttgtgtctcagaaacttaccgggatacagaaaattcaactcaaacgacttcttttcaaagtgatttttggagccgcttatcttggaccctttggacacttttttcatttaatactggataaaattttcaaaggaaagagagattcaaaaactgtggctaagaaggttctgattgaacagttaacatccaatccttggaac

SEQ ID NO: 16951 - DNA, 338 bp, Glycine max
  Clone ID: LIB3049-055-Q1-E1-H10
gaattctaatgcaatttacgggtaacattttctggatttactagaggcatttgcatgtctaactcgtttgctgattgatttattcatcccttttgtcagatgctttgtaatataatatcatatcattcttgtccgatagggaattaaacgggatgacatacatgtgaagggttactttatgagcaaattatatcgtgtcattggagtagctatatcattaaaaattcactgaactgccatgagaactgatctttttatcgttgtaaattagattggatattagattctttcgaaggacccagtagcgcgtgtccttacgctaattccatgagtttgcc

SEQ ID NO: 16952 - DNA, 295 bp, Glycine max
  Clone ID: LIB3049-055-Q1-E1-H11
agggataactggcctggccgttttccaaaacccaatcctcaactggaactaattggaatgccgaattttggtaataccaaaattactgaaaatggcgcaattccttgaaaaagttaccaaatcccaaatagaaggcaaaatggtgggaaatttcaaaggaaaattgggtaaagcaaccaaagaactggacaatccaacctccgtgaaatcaagcaataaacccaaaccaaattcacaaaacccttaaggattcaaggtctggaaattccccaaaggcttccccaaggtcctttgg

SEQ ID NO: 16953 - DNA, 331 bp, Glycine max
  Clone ID: LIB3049-055-Q1-E1-H12
gatatcatgcaacaacatctttttcagatcttacacatcactgtctcactctcttctctttctctgcgtttctctgaaataccataacaagctctggagaaaccgccacactggtcagaaaagaaacgcaaacctaaccgcaaacggtaaccccattatgccatgcgtcacaccacaatcctcacatctcatccatcttctcacacttctctctatatccatcatcgctccttccaacgatgtaagaacctcatcattcgaatcattaagtatttcagatggagtcgaagatggtggtgatggagagtactaccacgaggtactaccatgg

SEQ ID NO: 16954 - DNA, 334 bp, Glycine max
  unsure (1)..(334): unsure at all n locations
  Clone ID: LIB3049-055-Q1-E1-H2
ggttcttgtggcaaaggaaggggactcanacaacttacggtcaagacaagctcgcagcaactacgccttgtgacgaaccacaggtagatcaactgcagcggggtatctatcaagcggatcaggcgcatgttgtggtctgcagaacacttaaccgggtatacgagaataattcgaactcacaaccgaccttcgttttcacaagtgcatttttggacgcccgcttatccttggaccctgttggacacgttttttcaatttaatactggggtaaacattttcaaacggacaagagagcattcaccataactggtggctaaagaaggttcctgattga

SEQ ID NO: 16955 - DNA, 415 bp, Glycine max
  Clone ID: LIB3049-055-Q1-E1-H3
gcaaaaaagaacaaaaggggggtttaaaaaattgtaccccggaaccccaccagcattggcaaaaccgactcctccttcacttgctgcggtcacagagcctccgccacgtgtccaaaaacgctccttcagcatatcgttgttttgggtcctctacctgtcaacgacccattagccccaatccatcattcaaaacttcctcccatcttgctattttccaaagaagatgggcatcacaaattccaactacagaggaagacgacaagattagcatcggacctcgtagtggaggacaaccaggggagggtgacaaggaaactggagtcgtttattatggcccgatctcaaacaccataaagaaagtaaaacttctgtctctctcaacttgttgcctttcggtatctcttggtccggtcat

SEQ ID NO: 16956 - DNA, 404 bp, Glycine max
  unsure (1)..(404): unsure at all n locations
  Clone ID: LIB3049-055-Q1-E1-H4
cgtgcgtcaagatgacaaaagaaggggggtgctgtaattgaaattacccataaataaagagcgcggcataacctaaacttacccttcttctctctgtgtgtgtgcgcatcaaacgcaaccagaagcagccatggccactgcaagaactgtgaaggacgtttctcctcatgagttcgtcaaagcttactcttctcacctcaagcgatctggcaagatggagctgccagagtggactgatattgtgaaaactgcaagatttaaggagttggctccttatgatcctgactggtactatgtcagagctgcttccatggcaagaaagatctacttgagaagangacttggtgttggtgcctttcagaggatttatggtgggagcaagaggaatggtagccgccctcctc

SEQ ID NO: 16957 - DNA, 334 bp, Glycine max
  Clone ID: LIB3049-055-Q1-E1-H5
accatagacaagctccgatcacaactggatgatgctatagctagtgaatgcccattttgtggcgacttgatgatccgtgagatttctttgcctttcatcaatcctgaggaagagcagcatgtgctatcatcatgggagataaaaccaagcgctggtagccagagaaacagtatcccgttacctgcatctgcatgatttgtaatatgcttgcatacttgtgtcaataaaattgcaatgcagtataggactattgattgattgtccaaattccttgcaatttgcaaggtgtggtttggttgtaaatgtctgaatccatatcctttttaaaggtact

SEQ ID NO: 16958 - DNA, 400 bp, Glycine max
  Clone ID: LIB3049-055-Q1-E1-H6
gacaccttcgaattttcttttccttcactttcccgagaaaaaaaaacacactctttcactttcttgactacggtctcacttcgacatggctcgtactaagcaaactgctcgcaagtccaccggcggcaaggcgccacgtaagcagttggcgaccaaggccgcccggaagtccgctcccgcgaccggaggagtgaagaagccccaccgcttcaggccgggaaccgtggcgctgagggaaatcagaaagtatcagaagagcaccgagcttctcatcaggaagcttccgtttccgagactcgtgagggaaatcgcgcaagacttcaagaccgatttgcgttttcagagtagcgccgtttctgcgcttcaggaagctgctgaggcctacctcgttgggttgttc

SEQ ID NO: 16959 - DNA, 363 bp, Glycine max
  unsure (1)..(363): unsure at all n locations
  Clone ID: LIB3049-055-Q1-E1-H7
ggggccttgttttcattagtaagtggcatgggtggaccaaatcaagcaacaaatgcactcacttctggacttttctttgcacttgttcaaggtggacttttccagataggacaaaagttttctcaaccacctgctgaagatactcactatgctaaaacaagacacatgttgaacaatcttggccttcagagttacgaaaagaatttcaagaaaggcttgttaacagacaacactctgcctttactcacagacagtgctctcagagatgtgaggattcctcctggacctaagcttttgattcttgaccacatccagagggacgcggatttgaaagataagccaagaagccganagtgactgata

SEQ ID NO: 16960 - DNA, 388 bp, Glycine max
  Clone ID: LIB3049-055-Q1-E1-H8
agcacaagtttgttgagatagctagaagcaataagatgaaaatgaaagtgcttgttttgtttgttgctacagttttggtagcatatgaatgccatggctcagactaccagaagttccctctccaaatgaaaactgggtttggtgggcaatacagcaatgaggtggcatgtgccagttggaggcttggcgtggaagcaaacaacgtagtcaagtggcaaactgttcctgcagcttgcggagagtacatagctgactacgttctaggagaccaatatagatcagattccaaaacagttaaccaacaagcttatttctatgctaaatccctcaaactcaccaacaaagatgtctttgtcttggacgttgacgacactactctctctaatct

SEQ ID NO: 16961 - DNA, 212 bp, Glycine max
  Clone ID: LIB3049-055-Q1-E1-H9
ccaaaagaccaccaaaagggaagaccaagaagaagaaacaaccttcaaatccctttcctgtgtccatttaattactttcaaaccacaagtccttccaaattctttaacttccttctctctaagcccaaaacctcctactgtttttggccgttaaagatgtccgggaaaagaaccaacgggttgatcaaagcaaaacctcgccgccaacaaag

SEQ ID NO: 16962 - DNA, 372 bp, Glycine max
  Clone ID: LIB3049-056-Q1-E1-A1
ggttgtgaatcaacataaatattccgttttgcgtttctctgcctaaaaggattgaaagatgggtcaagcactaggttgctatcaagttgatcagtcaaatgtggctatcaaggagcattttggaaaatttgatgatgtcctagaacctggatgtcattgcctgccttggtgtcttgggtaccagattgctggtagtttgtcactgcgtgtgcagcaacttgatgttcgatgtgagacgaaaaccaaggacaatgtctttgtcactgtggttgcatctgtgcaataccgagctgtgtctgggaaagcatctgatgcattctataggcttaccaacacaagggagcagatccaatcatatgtttttgatgtcat

SEQ ID NO: 16963 - DNA, 442 bp, Glycine max
  unsure (1)..(442): unsure at all n locations
  Clone ID: LIB3049-056-Q1-E1-A11
gggtcgacgttcgaaacggaggcaataggacaacagaagggggaaacaaaggggccatcaacaaacgaaatcctcgtcttcatcttcttcttcttcttcttctttgttcagcttccctaacgttaacgtcgtcgtcgtttatcccaaaacaaaacgatggacttcaacacttttgcaaattccatatcctcttctcatgcaattcctccaatacacacttatcgccttcaaccctctccttttcctctccacctcccattttcgaatttaaagcgttcaggtttggttaagaatcggcttattgctcgttgcacttctatgtccgatgaatttggttctgttaatgggttgcaattctcgcccaataagctttttgtggaagaggctattggggctgaatatggggaaggctttgagacttttanggcagatggaccactaa

SEQ ID NO: 16964 - DNA, 443 bp, Glycine max
  Clone ID: LIB3049-056-Q1-E1-A12
ccacgcgtccgatacggtggcaaaaaaacaacaaaaggggaatcataacaattgtcttccaaaggaaaggaaggaaaaaattcgaattccaattacggttttctcatcatcatcgactttttctcttatgcaaggaaggttctccttctccgatttcaatttgattgaacgagtagtgttaagattatgatattttttgagaagcttcgtttctctcctcacctaagccgcttcattgccggcatcatcttgttaattttctgcaattcattccaattagtctccaatttccccattcctatacagccttagattctacgtcgttaactctctccgatttgattctatattcgatattcgttgatttgattcactcctctctctctctctctctctctcgctttcgattcgacgcctgaacaagtgaacatggaccctaatca

SEQ ID NO: 16965 - DNA, 353 bp, Glycine max
  unsure (1)..(353): unsure at all n locations
  Clone ID: LIB3049-056-Q1-E1-A2
agggaaacacaatgggtaacaagaaggggaatcaataatccccttatttgggaatttccggaatccccccttggtaattaacggcaacccgaaacggtgcaatgcagtcttgtctaccatcggcgttcactgctctccaaagagaggcgagagccactganacanaacaaccatcaaatcaagtttaaatttcagttctgttctgcttctaatggtaatggggagtttcagaaacgctgcaatcaacgtcgtcagagtgatcaattccaacaaagccaccatcgctgctttcacaaacccccttcacactctcaggtttacccctttctcgtcncacactcaaaatcaaaccc

SEQ ID NO: 16966 - DNA, 131 bp, Glycine max
  Clone ID: LIB3049-056-Q1-E1-A3
gggagcgaagtgaattgacattgcagtgactcggggtgagttgagtcaccagtggtggaagatgtgactcgggtgatggtggcggtgatcgggtccagcattaggggatatgctgacctgtgcgatatcag

SEQ ID NO: 16967 - DNA, 178 bp, Glycine max
  Clone ID: LIB3049-056-Q1-E1-A4
gcgtccgacgctagcagaagagacagaatgggtgacaatctttctaactagatcagtgcctcatttttctttcagttttcctgcttcttctcttcttcaactggttttgagattgccattttcttatcttgttgagtttagcttgtttggttgagacgaattaattagtttgtgtatg

SEQ ID NO: 16968 - DNA, 382 bp, Glycine max
  Clone ID: LIB3049-056-Q1-E1-A5
gaatcatcaccattgtcttcctaaggagagggagggagagattcgaattccaattagggttttctcatcatcatcgactttttctcttatgcaaggaaggttctccttctccgatttcaatttgattgaacgagtagtgttaagattatgatattttttgagaagcttcgtttctctcctcacctaagccgcttcattgccggcatcatcttgttaattttctgcaattcattccagttagtctccaatttccccattcctatacagccttagattctacgtcgttaactctctccgatttgattctatattcgatattcgttgatttgattcactcctctctctctctctctctctctcgctttcgattcgacgcctgaac

SEQ ID NO: 16969 - DNA, 382 bp, Glycine max
  Clone ID: LIB3049-056-Q1-E1-A6
ggagagagagaggcacttggaatccaaaaatgagagaaatcatcagcattcacataggtcaggccgggatccaggttggcaactcctgctgggaactctactgcctggaacatggcatccagcccgatggcatgatgccaagtgactcctccttcggtgtagcccacgacgccttcaacaccttcttcagcgaaaccggatccggcaagcacgtccctcgcgccgtcttcgtcgatctcgagcccaccgtcatcgacgaagtccgttgtggcacttaccgtcaactcttccaccccgaacaactcatctccggcaaggaagatgccgccaacaactttgccagaggccactacaccgttggcaaggagatcgtagatctgtg

SEQ ID NO: 16970 - DNA, 379 bp, Glycine max
  Clone ID: LIB3049-056-Q1-E1-A7
gaactagatgaagagttcgacacattcccaaccaccagggcttcggacattgtgaggatgcgatatgaccgacttagaagcattgctgggaggatacagactgtggttggtgatttggccactcaaggggagaggctgcagtctttgctcagctggagagatccaagagccactgccctctttgtgattttctgtctggttgctgcaattgtactgtatgtcaccccattccaaattgtggcccttttcactggaatttatgtgttgagacacccgaggttccgccacaagcttccttcagtgcctctgaatttcttccggaggctgcctgcaagaactgattgcatgctctgaatcatggatagtgcacaaactactg

SEQ ID NO: 16971 - DNA, 403 bp, Glycine max
  Clone ID: LIB3049-056-Q1-E1-A8
gaactagatgaagagttcgacacattcccaaccaccagggcttcggacattgtgaggatgcgatatgaccgacttagaagcattgctgggaggatacagactgtggttggtgatttggccactcaaggggagaggctgcagtctttgctcagctggagagatccaagagccactgccctctttgtgattttctgtctggttgctgcaattgtactgtatgtcaccccattccaaattgtggcccttttcactggaatttatgtgttgagacacccgaggttccgccacaagcttccttcagtgcctctgaatttcttccggaggctgcctgcaagaactgattgcatgctctgagtcatggatagtgcacaaactactgagggagcagcttgctttgctttca

SEQ ID NO: 16972 - DNA, 388 bp, Glycine max
  unsure (1)..(388): unsure at all n locations
  Clone ID: LIB3049-056-Q1-E1-B10
agggaaaatcgtcctcaatttcaacctttccctcccaatcaatcaatcaaaagttaacaattgccggaaaaagaaggaaagggcttcttgcaacgaaaaccaccgccgcgaataaggacaaagacaaggacaagaagagacctatttctcgctcttcncgtgctggaatccagtttcctgtgggacgtatccatangcagctgaaacaaagggtccaagccaatggacgtgttggggcaacagctgcagtgtacttagcctcaattctagagtatctgactgctgaagttcttgaacttgctgggaatgcaagcaaggatctgaaggtgaagaggatcacaccaaggcatttgcagctggctatcaggggagatgangagctggacac

SEQ ID NO: 16973 - DNA, 395 bp, Glycine max
  Clone ID: LIB3049-056-Q1-E1-B11
aaaaaaacaacagaagggaaggttaagaaaacggaacaacttggcggtcggccttaaccaaccaaagtttcgccttggccctcaattttcccctaaagtatcctcagtcacaacagacaccgtcgtcgtcgtcgtcgtcatcaatggcaccgaagcagaccaaggctgagaagaagatcgcttacgatgcgaagctgtgcgacctaatggaggagtacggccagatcctcgttgtgaactccgataacgtgggatcgaaccagctccagaacattcgcaagggtctccgtggcgactccgtcgtcctcatggggaagaacaccatgatgaagcgctcagtcaggatgcacgctgagaaaaccggaaacaacgcctatctcaaccttatcccgctc

SEQ ID NO: 16974 - DNA, 357 bp, Glycine max
  Clone ID: LIB3049-056-Q1-E1-B12
acctcaagggaaggttaagccaacgtaataatttggcggtccgccttgactgagcaacacttcgtcatggtcctcaaattgaccgaaagggactctcactcacaacagaaaccgtcatcatcatgatcgtcatcaagggcaccgaagcagactcatcgctgacaccacgatcgcttaccatgcaacgctgtgcaacctacaggaggagtcaggtcagatgctcgttgtgaactcggataatgtgggatcaaagcaactcgacaacatctccaattggtcaccgtcgcgacgcagtcgtcctcatggggaacaagaccttgatgaagcgctcaatcaggatgcacgctgacacaaggc

SEQ ID NO: 16975 - DNA, 394 bp, Glycine max
  unsure (1)..(394): unsure at all n locations
  Clone ID: LIB3049-056-Q1-E1-B2
ggcaattaatctgcatttgcacgaacctaaactactatcgaaagtcgaaacatcccctgtcactttgactcaactcacacaccaatctccaaatccctaccaattttccctattcactcatcaattttctcgtatcaggtttgatctgaaatccaggattgctacttaggtttgcatcaatataatctgacaagagaataattttgtggtagtgtagtccaactgtccaacttagagcaagcagcatggaggatattctgttggataccaggtgggaagatgtaatctgccccatatgcttgggagttcctcataatagtgtgctccttcagtgttcatcntatgataaggggtgtcgttcttttgtatgtgacacaagtcagttgcactcaaa

SEQ ID NO: 16976 - DNA, 218 bp, Glycine max
  Clone ID: LIB3049-056-Q1-E1-B3
gacgacagcgtggggctcttgtcttctcagagtcagactgtagcagtggctcgattcacagctggagtggttatgagtatgatctcggattcttacacgactgatcgtgttctggtctcgatgatcactgtggctgtcttcgtccatgtcaatctcgcaaaggggtatttggctgagcattgtgaggttgcgtgctcagcactgagtcatggcatata

SEQ ID NO: 16977 - DNA, 208 bp, Glycine max
  Clone ID: LIB3049-056-Q1-E1-B4
gacaccaggatttgccaattgccatttcaatccccagtttcttcttcaacgtcctcttacgagcagatgtcacttctccttcccagtttcagagcctaaatcactcattcccatggtctcagaagagcccactgtcgcggtggaacacgttcgctaagatgtcaacgatgggcctctacgtgtggataaggatgagctgacacctgaa

SEQ ID NO: 16978 - DNA, 239 bp, Glycine max
  Clone ID: LIB3049-056-Q1-E1-B5
ggatttcatttcgtttgcaattgaatttcactttccctaggggcttaatatctcccctcacttgtgcctagccttatgtcatactattatcattcattctcatctttctctcttctctctccacgcagaccctagctccagatcgtgttcatctctctcatctatcatgcaacgctgtgcgtccaactactggtctaccagaacctcttccatgcttgctctgattatttgggatccag

SEQ ID NO: 16979 - DNA, 316 bp, Glycine max
  Clone ID: LIB3049-056-Q1-E1-B6
gacacaacaattccacaacgcgatctctctctattctttgaaaccaaagttcaaactctgtcttccctgggttctatttcgaaatcaacgacgatgagttccacagaggcagcagccacagagaagaaaggtggaagagggaaaccgaagacttcaaagtccgtttcccgttcctccaaagctggccttcagtttcccgtcggccgtgtcgctcgctacctcaaggccggtcgctacgcccagcgcgttggctccggttcccctgtttatctctccgcggttctcgaatacctcgctgtcgacgttttggcgcttg

SEQ ID NO: 16980 - DNA, 395 bp, Glycine max
  Clone ID: LIB3049-056-Q1-E1-B7
gttctagtgtgtgattgtttgttgttgtaactcgttcttcttcttttgttgttctgtgtttgtgtttgttttttctctcacctgaaaatgtcttgctgcggtggtaactgtggttgcggaagctcctgcaagtgcggcaacggctgcggaggctgcaagatgtacccagacttgagctacactgagtcaaccaccaccgagaccttggtcatgggagtggcacctgttaaggctcaatttgagggtgctgaaatgggtgtgcccgctgagaacgatggctgcaaatgtggaccaaactgctcctgcaacccctgcacttgcaagtgaggtgttgggagagcaagcttcaagcagagatagcccttaattaggaataatgataaactaataatgtg

SEQ ID NO: 16981 - DNA, 369 bp, Glycine max
  Clone ID: LIB3049-056-Q1-E1-B8
gttctagtgtgtgattgcttgttgttgtaactcgttcttcttcttttgttgttctgtgtttgtgtttgttttttctctcagatgaaaatgtcgtgctgcggtggtaactgtggttgcggaaacgcctgcaagtgccgcaacggctgcagaagctgcaagatgtacccagacttgagctacactgaatcaaccatgaccgataccttggtcatgggagtggcacctgttaaggctcaatttgagggtgctgaaatgggtgtgcccgctgagaacgatggctgcaaatgtggaccaaactgctcgtgcaagccctgcacttgcaagtgaagtgttgggatatcaagcttcaagcagagatagcccttaatt

SEQ ID NO: 16982 - DNA, 328 bp, Glycine max
  Clone ID: LIB3049-056-Q1-E1-B9
ggtggagcattagcagcagaacagagagagcaaaaccctagagcatccatcacaagcataggaagaagatggtgaagttcctgaagcctaacaacgcagtgatcgtcctgcatggccgctacgccgggcgcaatgcggtgatcgtgatgaccttcgacgatggaaccatggagcgcccctacggccactgcctcgtcgccggaataaagaagtatccaagcaaggtcatcaagaatgactccgcgaagaagaccgcgaagaaatctatggttaacgccttcgtgaagctcgtgaactaccagcacctcatgcccacgcgctacacgct

SEQ ID NO: 16983 - DNA, 381 bp, Glycine max
  unsure (1)..(381): unsure at all n locations
  Clone ID: LIB3049-056-Q1-E1-C1
ggtattctattcttcaagattcaggtactgcgtttcggaagcagacacagatggctcgtacgaagcaaaccgctcgtaagtccacaggaggaaaggctcctangaagcagcttgcaaccaaggctgcacgtaagtctgcaccaactactggtggtgtgaagaagccccaccgttatcgtcctggtaccgttgctcttcgtgagattaggaaataccagaagagtaccgagcttttgatccggaagctccccttccagaggctggttcgtgaaattgctcaagacttcaagactgatctgcgtttccagagccacgccgtgcttgcattgcaagaagctgctgaggcataccttgttgggctctttgaagacactaacctgt

SEQ ID NO: 16984 - DNA, 263 bp, Glycine max
  Clone ID: LIB3049-056-Q1-E1-C10
gactcacattatcggagggtcatctcagccaatcagcagttccatccgaggtgggtcttctaatcagcaagttcagctcctccttgggccgggccttcctcttcgacctcattcgcaccccacacaacgactctgccgatcccgcctgcgccctcaccgaccccgacaagaagaagggcaccaaatccaaccccgccgattcctcatccttgctcatccacaacgattgcgtcgccgaacatgcccgacaggtttctacaatg

SEQ ID NO: 16985 - DNA, 325 bp, Glycine max
  Clone ID: LIB3049-056-Q1-E1-C11
ggtgctaatcttatcgtatcactcctaatgcactcctagcctgtctgcataatttctactactttttcaatggcgtctgcatttgttgagttccgttgcattgttggcgggcttgcatgggtcagcggtcatcatgccctcgagaaagcctttgcaatctacggcgacatcgttgaatcgaacgttagcaacgaccgtgagactgcaacgtctacaggattcggatttgtgaccttcgcctcatagcagtcaatgaaagatgcgatcgcaagaatgcatggccaagaccttgaccgtcgtaacatcactgtcaacgaagctcaga

SEQ ID NO: 16986 - DNA, 395 bp, Glycine max
  Clone ID: LIB3049-056-Q1-E1-C12
ggttaattaaaatattgccggggaattgacattacattgtgggcataaaattttcaaagtcgaagcgagaacttgccatttcgacggttttagggttacggttttctcaaattgcaagaacatgggtttcaacattcaaccctatgggattcagtccatgctcaaggaatgccataagcacctttctggcctcaatgaaacggttctcaagaacatcgacgcctgcaaacaactttccactatcactcgaacttccctcggtcccaatgggatgaataagatggttatacatcacttggacaagctttttgtcacgaacgatgctaggacgattgtgaatgaacttgaagttcaccatcctgctgccaaagttttggttttggctgggaacgctc

SEQ ID NO: 16987 - DNA, 131 bp, Glycine max
  Clone ID: LIB3049-056-Q1-E1-C2
cagaagggggaaaccctaggggtatacaatccatccggttctttgaaatggtatccgaaaactgacaatggtggctcgctgtaggtgcttcgctcgagtctcattccgtttacgcgcactaacgaaggttg

SEQ ID NO: 16988 - DNA, 391 bp, Glycine max
  Clone ID: LIB3049-056-Q1-E1-C3
gactgacagagtcaaagtctctggttgtgttcacttgttatgtttaacgcttactggcgtcgtggcacgctctaagcgttacaatcgtgggtctcttcgacgaagggtgccatgcaacatgttgccacgatggtgcaggtttgtctgcaacaacttctggtggtgtgcattatgccgaccgttattgtcgtgtttgcgttgctcctctttacattaggatgatgccacaacagttccgtccttttgatcaggtagctccccttctagaagctggttcgtgaaagtgctcatgacttcaacactgatctgcgtttccagagccacgccgtgcttgcattgctagaacctgctgaggcataccttgttgggctctttgagggacactaactgt

SEQ ID NO: 16989 - DNA, 316 bp, Glycine max
  Clone ID: LIB3049-056-Q1-E1-C4
gtagtgattatatatgtacttggcttatcttctgctcggtacatgctcaaggttcttctgtttttttttgtaattcgactagtacttgcatctcaattgttttgaatgtacctaagtataatgattgatgaatgttgcatgttcgacttcacaaattatatgattgtgagtagaagcgtgggcataatcatcctgttactgtgtcgcttcttgacattaggatataccacatgagtaccttccttttgatccggaagctcccttccacatgctggttcgtgtcattgcccatgactttaagactgatttgcgtttc

SEQ ID NO: 16990 - DNA, 391 bp, Glycine max
  Clone ID: LIB3049-056-Q1-E1-C5
gatatttagcttcataaactccatgtcccttaaatgtgtggttgacatacgcatatcagataccatacacaactatggcaattcgagggtattctcattactgatttctcaacttgcaatccaatcagtttcaacatgcattcctaagcgattcattccatgctcaatgaatgccatattcacctttctggcctctatgaagcggttctcacaaacatctacgcctgcaatcaactttccactatcactcgaacttccctcggtcccaatgggatgaataagatggttataaatcacttggccaagctttttgtcacgaacgatgctgggacgattgtgaatgaacttgaaattcaccatcctgctgccaacgtttttggctttggcttgg

SEQ ID NO: 16991 - DNA, 381 bp, Glycine max
  Clone ID: LIB3049-056-Q1-E1-C7
gacaccaaattttgcaacttggtttccaattgcgtgcacccatgtcctcttttctctccttatcactctctgcgccctccctccacgattcttccttcctccatggaacaaagctctttcccttctctcgaagagtggcaccacgccgcttcaactcttcctctgccaagtgctccctcgaccacatccccaaacagttcagaaaggaaaatctcaaagatggattgatggaaaactacaagaatgcacctcaatctctatatggcctttctccttcacaaatggacatgttcatgacagaagataatcctatccgtcagcaatctgaaagagttacagaggaaagcatctcgtctgccaagaattatatggataatggtg

SEQ ID NO: 16992 - DNA, 177 bp, Glycine max
  Clone ID: LIB3049-056-Q1-E1-C8
gacaccaaattttgcaacttggtttccaattgcgtgtacccatgtcctcttttctctccttatcagtctctgctccctcgctcgaggattcgtccttcctccatggaacatagctctttcccttctctcgatcagtggtaccacgccgcttcagctcttcctctgccaggtgctccc

SEQ ID NO: 16993 - DNA, 376 bp, Glycine max
  Clone ID: LIB3049-056-Q1-E1-C9
ggggtgctgcggctgaagatctcgattagccgaaaattgcaagaacggcttcaggctcttgcgatcaacaaacgcagcgttttgatctcagatttgagggggagaggtaccgtcgttgcataatggcaacaacagtgagaagtctgaagataaagacaagtacgtgcaaacgtatagtgaatgagctgcattcttatgagaaggaagttgagagagaagctgccaaaacagctgatatgaaggaaaaaggagccgatccccatgatctcaagcaacaggaaaatgtcttggctgagtctaggatgatgattcctgactgccgcaagcgccttgaggccgctttggcagacttgacaggattattggctgagttgga

SEQ ID NO: 16994 - DNA, 391 bp, Glycine max
  Clone ID: LIB3049-056-Q1-E1-D10
gattgcaattcaaaacaatcaacctcaataacaacacgaaagcaaaagcaaaaacttttttccaagtctctgattttcctaatggctccggcaaaggcagagaagaagccggcggagaagaagccagcggcggagaacgcaccggcggagaagaagccgaaggcggagaagaagatctcgaatgaacgatggagcgagaagaagaagaagcgcacgaagaagagcgtggagacctacaagatctacatcttcaaggtcctcaagcaggttcaccccgacattggtatttccagcaaggccatgggcatcatgaacagcttcatcatcgacatcttcgagaagctcgcccatgaagcgtcacgtttggctcgctacaacaagaaagccgcca

SEQ ID NO: 16995 - DNA, 388 bp, Glycine max
  Clone ID: LIB3049-056-Q1-E1-D11
gacaaagaaagagggtttgatgcaacgctggcaacgagaaaaggttcccaaccaccaaaggaccggactaaaaccctccccccgtgaataaagaaaatggcctcaaatcggaaacttcacacttttgaggaggtggcaaagcacagccagagcaaggattgctggctcatcatttctggcaaagtgtatgatgtcacccctttcatggaggatcatcccggacgtgatgaggttttgttatctgcaacagggaaagatgcaaccaatgactttgacgatgtgaggcacagtgattctgctagagatatgatggaaaaatactacattggtgagattgatgcatcaaccgttccactaaaacggacctacattccagctcagcaagctc

SEQ ID NO: 16996 - DNA, 368 bp, Glycine max
  Clone ID: LIB3049-056-Q1-E1-D12
agggggaattcaaatccaattaaatccaatccccccggggaattccctaactccccccttaaggatgaaattcttcgccaaaaccctaacgggaaaaacaagcacccttgaggtggaaagctctgatacgatcgagaacgtcaacgccaagatccaagagattgaaggaatctcaccggaccagcagcgtctcattttcgccggaaagcaacttgaggacggccgtacccttgctgactagaacattcagaaggagagtactcttcaactcgtcctccgtcaccttggtgagatgcagatcgtcgataagacactcaccggcaagaccattgccctaaatgttgaaagctccgacaccatcgataagg

SEQ ID NO: 16997 - DNA, 361 bp, Glycine max
  Clone ID: LIB3049-056-Q1-E1-D2
gaaactttcgattttcctttccttcaactttcccgagaaaaaaaaacaatcctttaacttccttgacaacggtctcacttcgacatggctcgtactaagcaaactgctcgcaagtcgaccggcggcaaggcgccacgtaagcagttggcgaccaaggccgcccggaagtccgctcccgcgaccggaggagtgaacaagccccaccgcttcaggccgggaatcgtggcgctgagggaaatcagaaagtatcagaagagcaccgagcttctcatcaggaagcttccgtttcagagactcgtgagggaaatcttgcaggacttcaggaccgatttgcgttttcagaggtcgcgccgttttgggc

SEQ ID NO: 16998 - DNA, 195 bp, Glycine max
  Clone ID: LIB3049-056-Q1-E1-D4
ggacatttaggaggaagcaaacagatgtttatcgagattcacatgtggtggtttcagcgctgcatagaacctaatatgagagcatgctagtgaagatgcaatcgagcgttctggaatgtcggggcatggagatactcggcgtgatgagctcaatcgcgatcagcatggtccttgtgatcctgtcattgtaatcgc

SEQ ID NO: 16999 - DNA, 341 bp, Glycine max
  Clone ID: LIB3049-056-Q1-E1-D5
gaagctttgttagtgtcccagaagagaaagagaaagacacagcagagagtgatgataccagagagacaacaaggtggaggtgcgccacacgggatccgcctggctctggtggtggcactcgtgctcatagggcccttcctccttggggatcagggccacgccataacgcaggcattaccggacccgctaagcccactcggtctacgccgtctgcctatcgttcaccttctccacattgagtacctcccccccgatcggcgctctctcgtcgccggcatcctcatcatcggcgacaccctcaccagccacagcattacccgatacgctgtcagctccggcgc

SEQ ID NO: 17000 - DNA, 352 bp, Glycine max
  Clone ID: LIB3049-056-Q1-E1-D6
ggaacctttgcattctattcattcaagattcagcaagtgcgttttggaagcagagaccgaaatacttcgagatggcccgtacaaggcaaactgctcgtaagtcaactggaggaaaagctcccaggaagcagcttgcaaccaaggctgcacgtaagtctgcaccaacaactggtggtgtgaagaagcctcatcgttatcgccctggaactgttgctcttcgtgagattaggaaataccagaagagcactgagctcctaatcaggaagcttcctttccagaggttggttcgtgaaattgcccaggatttcacgactgatctgcgtttccagagccatgctgtgcttgcactgca

SEQ ID NO: 17001 - DNA, 336 bp, Glycine max
  Clone ID: LIB3049-056-Q1-E1-D7
cagcttgagcaagaagcatacagttcagttctaagagcttttaaagctcaagccgatgccattacttgggagaaagaaagtttgattacagagctgagaaaagaacttagattgtcaaatgaggagcacagagaacttctaggtcgggttaatgcagatgatgtgatacggaggataagggaatggagacaggcaggtggccatcagcctggtgtacttagtactggtcaaggtcttcatgattcaattcccagtcccacagtctctgcttctcgcaaaaagcagaagattacaccatctgtaccaccatcacgatcttttggtgggccttctcct

SEQ ID NO: 17002 - DNA, 408 bp, Glycine max
  Clone ID: LIB3049-056-Q1-E1-E1
gatccacacctctctctctctctcagaatttctatctatctcttgtttcaatttcaacaacggttactcctttttcgttttgagtttcaatcaagccatcatcatgtctaccgcatcgcaacccaaggccaagaaaacggcgtcgtccaagaagcccctctcccaccctcccttcgccgtgatgatagcagaggcggttgcgagtctgaaagagagaaccggttcgagccaatacgcgataaccaaatacatcgaagggaagcacaaggagttgcctgcaacctacaagaagcttgtcctcgttcatctcaagaaatctgttgctgctggcaagcttgttaaggtgaaaaactcctttaagctcgcaccgactaagcctgctccgggttaaggccgctggctccaaaa

SEQ ID NO: 17003 - DNA, 158 bp, Glycine max
  Clone ID: LIB3049-056-Q1-E1-E12
atcgtcatgacaatttaggctgttatggcacttatgattttgaggactactcactatgggagcgtcactcttgacttaatttgctatactggtcctagtcctggtcgattactagtgactgtgggttaagttgttatatttaatgtgttgtggtatca

SEQ ID NO: 17004 - DNA, 384 bp, Glycine max
  unsure (1)..(384): unsure at all n locations
  Clone ID: LIB3049-056-Q1-E1-E2
tgggactaacaccaagtganaaagcaacaaagcatagtgtgtaaganagggagaaaaacaagtgctgtgtagagagaaaaatggctacgtggtgcatgatcttggtggttcttgctcttgccgtggttgcaagtgccagaaacatgcccaatgacgctggtttggaggaccagaagaacttccttgggtatgggttttcgggagttggcaacaatggccttccctttggtggagtgggttctgggtttgatggtaatatgggtgggccttctgggctcggaagacttggaggattcggtgggcctggtgggcttggcggactcggaagtcctggtaaccgtgaaggacccagtcttcctctcccttgagagtttagaacacaca

SEQ ID NO: 17005 - DNA, 371 bp, Glycine max
  Clone ID: LIB3049-056-Q1-E1-E4
gtgcgagagagataggggttgagtagggggacacttttcagtgtcagttgccattcccttcgtgtgttcttctcgtgtgtttcctagttgctgtgtactgggtcgtaggggtcagtcgttcatgattctagtggttgttgcgcgcgtcggaggcacttggtgactaaagctgctcgttggtcagctctggtcacgggctgatgtgatatagctgcagctcttcatgcccggattggtggctctgagggatatcatggtgtacctgaattgcacttttgttctgatccggattctcccattccagaggctcctcagatgagtcgctcaggatttcaggtcagttgttcgtttccagagtgatcgctgtttct

SEQ ID NO: 17006 - DNA, 317 bp, Glycine max
  Clone ID: LIB3049-056-Q1-E1-E5
ggtcgtgtttttgatttgagaattgcgatcgagtcttttgacacatggcatcctcgttggcaccatctaccagcgccgccactgggttgcggctcacacactctctccgcttctctcctaagcccaacagcctacgctttgccacctcgcctggtgttactctgttatgcacgagggttactgcccacttagatgatgttgatcttgattgatcgcctactgcgacttctcctcctatggatcccatctctacggagcttcactcttaatttccttagcattaccatcctcttccctgttggaatcttattgcctgt

SEQ ID NO: 17007 - DNA, 68 bp, Glycine max
  Clone ID: LIB3049-056-Q1-E1-E6
ggtcgtgtttttgatttgacaattgatatcgactcttttgagagttggcatctgtcgttggcaccatt

SEQ ID NO: 17008 - DNA, 356 bp, Glycine max
  unsure (1)..(356): unsure at all n locations
  Clone ID: LIB3049-056-Q1-E1-E7
ggagtgagcaagagtgaagagcgaagagaatggctcccaagggtttaatctttttggctgtgttatgcttctcagcactgtcactgagtcgttgtcttgcggaggataatggacttgttatgaacttctacaaggaatcatgccctcaggctgaagacatcatcaaagaacaagtcaagcttctctacaagcgccacaagaacactgctttctcctggctcagaaacagcttccatgactgtgctgttcagagttgtgatgcttcactgttgctggactccacaagaaggagcttgtctgagaaggagacagatagaagctttgggttgagaaatttcaggttcattgnagacatc

SEQ ID NO: 17009 - DNA, 389 bp, Glycine max
  Clone ID: LIB3049-056-Q1-E1-E8
gacagcaaaacaattttcaaactcaattaccattccataacctaaatctcctctttgtttccgagtcagagagcaatggcacgtaccaagcaaaccgctcgcaagtccaccggcggaaaggcgccgaggaagcaattggcgactaaagccgctcgcaagtcagctccggccaccggcggagtgaagaagccccaccgcttcaggcccggaacggtggctctgagggagatcagaaagtaccagaagagcactgaacttctgatccgaaaactcccattccagaggctcgtcagagaaatcgctcaggatttcaaaacagatcttcgtttccagagcagcgctgtttctgcgcttcaggaagccgcagaggcttatctcgttggactctt

SEQ ID NO: 17010 - DNA, 389 bp, Glycine max
  unsure (1)..(389): unsure at all n locations
  Clone ID: LIB3049-056-Q1-E1-E9
gaagattcaaatagcaaccaacaacaaacaacccctaaagattgtcctcctcctggggggtttggaaaaaggaagaccaagaaggatgagaaaggtgagaaaaaagcggaaacaaacgcacaaggaatcggtccctatgtcacaattcaactctgttccttccctcagagccggcgataactcctccttctacgaacacttcatcctctctggcatccgagttgaccgagtccaacccggtctcgtctcctgcactttcaaagtcncctcgcgcctcgctgacaggagtgggaagttggcgagtggagcaattgcgaatctggtggacgacgttggaggtgctgtcatccatgaagaaggtctccncatgaatgtttccgttgacatgt

SEQ ID NO: 17011 - DNA, 394 bp, Glycine max
  Clone ID: LIB3049-056-Q1-E1-F1
ggttgaggctgagtgttattcttccctaaccttcgtctgaaaccctaaaacattgaatcttaagaatggaactgtcatggttgagtgccattctggtgggggctggttatctcgctttgggctacttcattggttctcagtatccccctcgtttcctcttctcacataaattatcgactaaacaaaaagatgcttcacttctcaatgacagcgacaataagaagaggaatactaagtccaaactcgaagacccccttgagattgaacaactcgctgaaattctcgatgattttaagatgatacttgttgtcaagaatgatcttaaaatgggtaaagggaagattgctgctcaatgcagtcatgcaacgttaagtctctataaaaagattcttcg

SEQ ID NO: 17012 - DNA, 410 bp, Glycine max
  unsure (1)..(410): unsure at all n locations
  Clone ID: LIB3049-054-Q1-E1-G3
aacccttaacctcccggtccccttcggtcattgcttctcccccacacacgcacagagacacacacttttgcagtcacattgagaatggggcgtgttcgcacgaagacggtgaagaaatcctcgcggcaagtgatagagaggtactactcccgcatgacgctggacttccacacgaacaagaaggttctggaagaagtggccatcattccctccaagaggctccgcaacaagatcgcggggttctccacccatctcatgaagcggatccagaanggtcccgtgcgtggaatctccctgaagctgcangaagaggaacgcgagcgtcgcatggacttcgtccccgatgtctccgccatcagggccgatcagatcgangtcgacaaggagacgctcgacatgctcgccgccct

SEQ ID NO: 17013 - DNA, 408 bp, Glycine max
  Clone ID: LIB3049-056-Q1-E1-F10
gaaattaataagggtttttaattcaggcggccaaaaaactcctccccggcaacctttggcctacaacaccccttcaacatggctgaacaaaccgagatagcttttctgaagcaaccaaaagtgtttctcagcacaaagaagactgggaagggaaagagacctgtaaaaggtgggaaccgcttttggaagtccattgggcttggatttaagactcccagggaagccatcgaaagaacctatattgacaagaagtgccccttcactggcaatgtttccatccgtggccgtatcatggctggaacatgtcacagtgctaagatgaacaggactattattgttagaatgaattatctccattttatcaagaagtaccagatgtacgagaagacgcactcaaatattcctgct

SEQ ID NO: 17014 - DNA, 340 bp, Glycine max
  Clone ID: LIB3049-056-Q1-E1-F11
aaaaggggccttcaaaagcgtaacaaacccaaaccgttcaaaaccacaaaaaaacccaccaatggggcaaaaacccgcgaggtgttataggcaaattaagaacaaaccataccccaagtcacggttttgccgtggtgttcctgatcccaagatcaggatttacgatgttggtatgtaagaagaacggtgttgatgagtttcctttctgtgtccatctggttagttgggagaaggaaaacgtttctagtgaggccctgtaagctgctcgtattgcttgcaacaagtacatggccaaatttgctggaaaagatgctttccacttgagagtcagggtgcaccc

SEQ ID NO: 17015 - DNA, 355 bp, Glycine max
  Clone ID: LIB3049-056-Q1-E1-F12
atggcaattgggcttctgttgaaacagctagattaaatgctgaaggcctctcatgcaaggttcttgacaaggaggcgtttaaaaagcaaatgttgaagacacttatatggatttgttccgttaagcttgttgtcacactgtatgaaggggttactgtaagtgtcgttgtaaatgaattccgcactgaattgtctatccttataacagaactggcatcagtatcaacaaatgaaaaggggttaaaatttgaagaatccatggaatagcgcttgtgtgcatattctcgagctgtatcccactttcccactgaagttaaagaattcaaatgtgcaaatggttagatttgttctctctc

SEQ ID NO: 17016 - DNA, 405 bp, Glycine max
  unsure (1)..(405): unsure at all n locations
  Clone ID: LIB3049-056-Q1-E1-F2
ggacaagtttgttgagaatanctaaaaacaataggatgaaaatganagtgcttgttttgttttgttgctacagttttggtancatatgaatgccatggctcagactaccagaagttccctctccaaatgaaaactgggtttggtgggcaatacagcaatgaggtggcatgtgccagttggaggcttggcgtggaagcaaacaacgtagtcaagtggcaaactgttcctgcagcttgcggagagtacatagctgactacgttctaggagaccaatatagatcagattccaaaacagttaaccaacaagcttatttctatgctaaatccctcaaactcaccaacaaagatgtctttgtcttggacgttgacgacactactctctctaatctccagtattttgctaac

SEQ ID NO: 17017 - DNA, 340 bp, Glycine max
  Clone ID: LIB3049-056-Q1-E1-F3
ggtcaagcgttctgatatcactccagcgactacgacctggtggtgttcgaattcaatctcaggatcagtggtgtcctcgctcgctgcgagcacagcgtcatcctagctgtctcccattgggctacctgagagcttctctctctgtcactcctgtcctcttgtgacatgtattagttagtcgtcagcgcgatggttcacttctctgggcaaggtacaatgtgctatctgcatcttgcgtagaggctacaggactcccttgtgattgaacagttcgctgatcatctgcaagattacattatgattcttgttgtctcgaatgttcatcacttgggttcacgga

SEQ ID NO: 17018 - DNA, 267 bp, Glycine max
  Clone ID: LIB3049-056-Q1-E1-F4
acagaaggggaatcacgctgactgaaattcctgaattcaatccaacggcgccgcaaccttcaatcctatctgcaccggccgctgtggtagaaactgcaactcctgttacaggatcaatgtctcaccctggcgctgatatcgtcgtctctcttgcgttatctccgaatcggcatcgcctttcatacgttcgtccatgggatatcggtcactaatgtatctcagtgaccagctattcattcatcatgcgtcgccgtttacatctcacca

SEQ ID NO: 17019 - DNA, 209 bp, Glycine max
  Clone ID: LIB3049-056-Q1-E1-F5
ggatacgattcctttggtttgcagtaatgggtgctctggatcacatatcggaactctgtgactgctccagtggtagttccaagcaggagaagcgcaagcaattgcagacggtggaggtgaaagtgaatatggactgccatggatgcgagaggaaagtgaggaatgcggtggatgggatgaaaggcgtgttccacatggatgtggagcgt

SEQ ID NO: 17020 - DNA, 367 bp, Glycine max
  Clone ID: LIB3049-056-Q1-E1-F6
ggagtttgggcatgtgtgagctgtggctttgcagggaagatgagtgtcagtagaacataaatgtcctcttcccagggacactctctatttcacagatctatatctaagtgtcggtgatcccctttctccttccttctctgagagacaatgacaatgacgtgggcgcgattcgattcgtggaagcagcaatactacaccacaagcggcgtggtggtaggttacgcagtatgctccagcctcctggccatcatcaacaaatacgccatcaccagattcaactacccaggcctcttaaccgcgctccagtacctcacctccgcactcgggcgtcaacgtctttgggaaattatggtttctcgaccacgac

SEQ ID NO: 17021 - DNA, 401 bp, Glycine max
  Clone ID: LIB3049-056-Q1-E1-F7
ggcatcatccaatcttatcttccttcctgcttctgcttcccttcactcccatagtttcctctcaacacccatctaccaaattcctcccatcatcttttgattcaccttatcaatttcaaattttacaacattttcactttaatcatcttctcttgtgagttctagattcccgttttgctcagatagttaaacaaaaaccaaattgtcccaacaaagtagttcttccttccattcacacatttttgtcttagtagctgcacaaaaatgtcaggtggtgttggtccaacgggcagtgacattagcctaccacaagaacaagaagttggccacaaagaaccgcaagaacaacattcactcaagaatctccacaaaaccatcaccaccaacacagacaaaccaac

SEQ ID NO: 17022 - DNA, 361 bp, Glycine max
  Clone ID: LIB3049-052-Q1-E1-G10
gagggtttggttattagggttttcgctgaccggtgcgcagtcgagcctccagaagacgaatcgaaaatgccgtcgcacaagacattcagaatcaagaagaagttggcgaagaagatgaggcagaacaggcccattccctactggatccgcatgaggaccgataacaccatcaggtacaacgcgaagcgccgtcactggcgtcgcaccaagcttggattctgaggtgtatgctctgcctaggttcaatttatccaattaattagtgttttattttcttgaggcaaaaacaatgttttgagtttttaatattttccatttgttcgaagactatattgtgtaagggaactattgtagttcatac

SEQ ID NO: 17023 - DNA, 359 bp, Glycine max
  Clone ID: LIB3049-052-Q1-E1-G11
ggatttttgagtctgcttactgagaatggtaacactaaggatgacctcaagcttcccactgatgagagtctgctcactcagataaaggatggatttgctgagggcaaggatcttgttgtgtctgtcatgtctgctatgggtgaggaacagatttgtgccctcaaggatattgggccaaagaactagcttttggtgcttgttgcttgttatttctattttctatttaagcaaagatatttttgtaagccttttatattggtttgttcaagacctggcgtatagattctagtcagactagtcttaacaatggtttttatggatgtggtgacagaaactattatcacatttttctggtttcc

SEQ ID NO: 17024 - DNA, 371 bp, Glycine max
  Clone ID: LIB3049-052-Q1-E1-G12
gaccgtaatccttacgctctctcactcacaaacgcacactgaattcaaaaacatcgaaagagagaggcatggccgagcaaaccttcatcatgatcaagccagatggcgttcaaagaggccttattggcgagattattagcagatttgagaggaagggtttttacttgaaagggttgaaactcgttactgtggaccgtccttttgctgagaagcactatgctgatttgtctgcaaagcctttctttagtggtttggtggattacattgtctctggccctgttgttgccatgatctgggagggtaagaatgttgttacaactggccgaaagattatcggagccacaaacccagctcaatctgagcctggaact

SEQ ID NO: 17025 - DNA, 287 bp, Glycine max
  unsure (1)..(287): unsure at all n locations
  Clone ID: LIB3049-052-Q1-E1-G2
caaaaggacaacagaaggggttgtgttgtgtgtcccttccctttcaaaactctcttcttcccttcaaagacccttttgaagcaaccgatggaatttcagtttcttcccagattctaccttcttgtttccttatccattctgttccttgcaccctttcacgctcaagctaaaattaaagtgacttactgcgataagaaggcagactatgctgtgaaggtgtctggagttganatatcaccagagcctgtggtgagtggccaagcggctacctttaagatctcaacaac

SEQ ID NO: 17026 - DNA, 334 bp, Glycine max
  Clone ID: LIB3049-052-Q1-E1-G3
gacagacgcttctttagaacaagcaaacacaactctgctaccctcttctctctctctcggttgtgagtgcagatttcttgcgcggtttatcatgggggatagtcagtattcgttttctctcaccacatttagcccttctggaaagcttgttcagattgagcatgctttgacggctgtcgggtctggacaaacgtctttgggaattaaagctgcagatggagttgtcattgctaccgagaagaaattgccatctatattggttgatgaagcatcagtccagagaattcagttattaacaccagatataggtgtcgtatatagtggcatgggtcct

SEQ ID NO: 17027 - DNA, 290 bp, Glycine max
  unsure (1)..(290): unsure at all n locations
  Clone ID: LIB3049-052-Q1-E1-G4
ggcagtttcaaattttcttttccttcactttcccgagaaaaaaataacacttttcactttcttcactacgttctcacttcgatatggctcgtacgaagcaaaccgctcgcaagtccaccggtggcaaggcgccacgtaagcagctcgccaccaaggccgctcggaagtccgctccggcgaccggaggagtgaagaagccccaccgcttcaggccgggagacgtggcgctganggaaatcagaaattaccagaagagcaccgagcttctcatcangaagcttccatttcag

SEQ ID NO: 17028 - DNA, 362 bp, Glycine max
  Clone ID: LIB3049-052-Q1-E1-G5
gaagattgtaagataccgatccacttcgaaagggttaggtttacgaagaaacaccaatcctctccgagaaatcaacgatgcctcgctatgatgataaatatggtaatacccgcctctatgttggacgcttgtcttcgaggacacgttcccgtgacctggagcgtgtcttcagcagatatggaagaattcgaggtgtagatatgaagaatgaggttgcggttgttgaatttagcgatcctcgggatgctgatgatgctagatatagcttggatggtcgtgatgttgaaggaagtcgtatcattgtggaatttgccaaagggggtcctcgtggttcccgggaaaacttgggtcggggtctacct

SEQ ID NO: 17029 - DNA, 337 bp, Glycine max
  Clone ID: LIB3049-052-Q1-E1-G6
ggcagtgatagagataagaaaatgtggcttgtgcagctctcaaccccatttctgaacggacatggtcattccaccacccttctctccaagcacagttcggcggtgactcagacccactgggccccaccgagtttcctgcctcaaatcaatgcgatgaagacaatgcaggggagagtggtgtgctccaccagcgacaagacggggagagtggaggtggtacagctggcccctcacccaaagtacaagaagcgcgtgaggaagaagaagaagtaccaggcccacgaccccgataaccaattcaaagtcggcgacatcgtccagctccagaagaacaggc

SEQ ID NO: 17030 - DNA, 363 bp, Glycine max
  Clone ID: LIB3049-052-Q1-E1-G7
ggcgcattgaacgaaaattagggtttgtagtgtagcaggaagaagcagcaatggcgccgaagataacacgtaaggttagcagaaaccctgaattgataaggggaatcggaaagtactcgaggtcgcagatgtaccacaagaggggcatttgggctatcaaggccaaaaacggtggcgttttacctcgccacgaccctaaacccaagcctgaagctcctgctgaaaaaccacccaaattttaccctgctgatgatatcaagaagccccttgtcaacaagcacaaaccgaaaccagctaagctcagggctagcattactcccgggacagtgttgattcttcctgccggtagatttaagggaaaga

SEQ ID NO: 17031 - DNA, 385 bp, Glycine max
  Clone ID: LIB3049-052-Q1-E1-G9
cactcccttaactttagaatccaaaaccacaaaatgaagctggtagaagtggaaggaacgcacacccttcagacaacgtactcctctcttgatgttcatgtaggccaatcttattcagtgctggtaactgcggatcaacctgctcaggattattatattgtgttttcctcacgattctcctacaaggtcctcaccaccactggagtgcttcgctatagcaactccgcaggcccggtatcaggcccaccccctggtggacctacaatccaaattgactggtctttgaaccaggcccgctccattaggacaaaccttacagcaagttggacgaggccaaacccgcaaggattcgtacattacggtatgataaacacgacaaagacga

SEQ ID NO: 17032 - DNA, 335 bp, Glycine max
  Clone ID: LIB3049-052-Q1-E1-H1
ttggtggatgaagtttggataaatcgcccaccggcagagataaatgctgttattgtacatcctgtgaaatttgcaggtcgctctgttgcagataagttgaaagatttgagaaaaaagcttgtacatgagcaaacccgtgggattattttcacagcacttgatgaagttgcatggttgtataatattcgtggaagtgatgtggcctactgtcctgttgttcatgcatttgccattgtgacatccaattctgctttcatttatgtggacacacaaaaggtttctgttgaggtacaaactcatttagtggagactggaattgaaattcaagagtatac

SEQ ID NO: 17033 - DNA, 373 bp, Glycine max
  Clone ID: LIB3049-052-Q1-E1-H10
gattgtagaactgaacaagggtttctctttctctttctctgtctgcttcttcactttctctcgtttcaatcgaaaaaaatcatgggcagaaaattcttcgtcggtggcaactggaaatgcaatgggaccactgaggaggtgaagaagattgttactactttaaatgaagctaaagtccctggagaagatgttgtagaagttgttgtgagccctccttttgtgttccttccttttgtaaaaagtttgctgcgccctgatttccatgcctcggcccaaaattgttgggttcgcaaaggtggtgcttatactggagaggttagtgctgaaatgcttgttaatttgggaattccttgggttattattggtcactctg

SEQ ID NO: 17034 - DNA, 354 bp, Glycine max
  Clone ID: LIB3049-052-Q1-E1-H11
ggggttgtttctaatggtgtctaagctctactgtgtttgaaggaggcggtccaatacacctcagtggcatatattggtgttcttagaagtatatttatcagcaatttggtaccgcccggatttgatctgtcttgccttctcttgcagtctgaagatagtgtgattggttgcctagtgaagataaagatctgtatattgagattggctgggccgagttagttcatagaatgctagcaacaatcccttcccattgggttttgtttaaagtggttagctcctaacaaggtttactcctctaaggttttggggttttttaaggttttctggctaaaattcctaaaacctttgggtttt

SEQ ID NO: 17035 - DNA, 370 bp, Glycine max
  unsure (1)..(370): unsure at all n locations
  Clone ID: LIB3049-052-Q1-E1-H12
gagaacacaacacaaacacagagaaagagagtgaataaatccagcattgttctgttctctgcaacattctccactctcaaccatggcttcaaagcttttactcatcactgtcttcgtttttgatttgattgcttttggacttgccgtggctgctgagcagagaagaagcaccgctagtgttgtgacggacaatgaaaagaattataattactgtgtctataactctgatatagcaactggctatggtgttggagcatttttgtttctcttggttagtcaagtcctgataatggtggcaagtcgatgcttctgttgcgggaagcctcttaaccctggaggctcaanggcctgtgcagttgttcctttcaaa

SEQ ID NO: 17036 - DNA, 339 bp, Glycine max
  Clone ID: LIB3049-052-Q1-E1-H2
cacgcgtcagtcgtacgctcctgaaatcttccgtcgtctccggcatcctccgctggcagccttctgatctgtcataccaaatggccaacagggttcaaatccctaccaacaattcagcactcattgctatgattgcagatgaggatactgtagttggatttttgttggctggagtgggaaatgttgacatacgtaggaagacaaattacctcattgtggattcaaaaacaaccgtcaaacaaattgaggatgcattcagagaatttacaacaagggaagatgttgcaattgtgctgattagccaatatgttgcaaatatgataacgtttttggttgata

SEQ ID NO: 17037 - DNA, 312 bp, Glycine max
  Clone ID: LIB3049-052-Q1-E1-H3
aggggatcgtgtcagaaatataaaagtttatttcctctgatcgtgtggtttctgagttctaagcactcacctctttcatacacgtttgttcgcttgttgagaagccatgggcgaggatttcgagttcccaagtgctggcaacatggaaatgcctgaggaggaagagtttgagagtccgatcctgaaggttggggaggagaaggagattgggagaatggggctgaagaagaaattgctcaaggaacgtgaacgttgggacacccctgacagtggagaccaggttgaagtgcattatactggaaccttgcttga

SEQ ID NO: 17038 - DNA, 342 bp, Glycine max
  Clone ID: LIB3049-052-Q1-E1-H4
ggcacaagtttgttgagatagctagaagcaataagatgaaaatgaaagtgcttgttttgtttgttgctacagttttggtagcatatgaatgccatggctcagactaccagaagttccctctccaaatgaaaactgggtttggtgggcaatacagcaatgaggtggcatgtgccagttggaggcttggcgtggaagcaaacaacgtagtcaagcggcagagtgttcctgcagcttgcggggagtacatagctgactacgttctaggagaccaatatagatcagattccaaaacagctatacaacaagcttatttctatgcgaaatccctcaaactcaccaaca

SEQ ID NO: 17039 - DNA, 196 bp, Glycine max
  Clone ID: LIB3049-052-Q1-E1-H5
ggcttccttccttttacttcacttatcaaaaaattcccctctctttttctctctcttcctctcagccatggtcgaccttcaaaccgtttgctgcatgtgcggtgacgttggtttccccgacaagcttttccgctgcaacagatgccgccaccgtttccaacactcgtattgtagtaactactacggggaaatagca

SEQ ID NO: 17040 - DNA, 358 bp, Glycine max
  Clone ID: LIB3049-052-Q1-E1-H6
gtactgtgtgggatttcagcttccatgctttattcaaggtcacactaaatgctaaaagtctagcgactgagttaacagttaaaaatacagacaataaagcattctcatttagtaccaccttgcacacatattttcaagcttctgtgagtaatgcatcagtaaaggggttgaaaggttgcaaaactctgaacaaagatccagatgctaaagatccagtgtacggtaaggaagaaagggaagttgtcactttccctggatttgtagattgtgcttatcttgatgcttccagtgagttgcaacttgacaatggtttgggtgatctgatatctatcaagaacacattgatcagatgctgtgt

SEQ ID NO: 17041 - DNA, 331 bp, Glycine max
  Clone ID: LIB3049-052-Q1-E1-H7
ggggccgtgcagcacataatagcgtgtggtggtcggagagaagaacgggatggagtgcgcggcgaaggggagcggaggaaggtgcggcggcagcggcagcggcggtgccacaagactctgcgctcgctgcgaagccgttgcatattgctctctctctcaccagattgcacactggagtcgtcacaaacacgagtgcgataggttgcaacagcaggtgaagagtgtcgaagtcctcaataattttcccttcactttctctcgcgaatccacgtttcaggtttgtgtgaagcaggaaactaggtgttcattttttagcaagagaggccttcat

SEQ ID NO: 17042 - DNA, 353 bp, Glycine max
  Clone ID: LIB3049-052-Q1-E1-H8
ggaggaaaataggtgaaggcctgaagggtgaatcacttctcatctgttctccattggaagccttcgtccattctgagtcagatcgaaagctcacaagcattacgagttgaaatcgttggaacctcgtcgaacaaccgttcaaatcgtcaaagacaaacgagctctgactcgccggaatctcaccggaaagcaagtctttctgaacctgtcgtgcgcggaagtcagttggcgaacttgaaattgacgcttagggcaactccaacgaaaaattccgtctaaaacgaggaaattctaaaattcccgttcgctcttgcagattcacgctcgttctctttttcgctctcgctgatcgt

SEQ ID NO: 17043 - DNA, 374 bp, Glycine max
  Clone ID: LIB3049-052-Q1-E1-H9
ggtcggaggctcgggcagttactgttactgttattatggaactcaaacaacaaaaactccttcttgttctgattctaacgcttctttttgccactgccacgcctgattctgaatacgttcgacctcttcctcgtaaaaccttaacaaccatcccatgggattcaatttccaaggcccactcctcttaccctcaacaggtacacatttctttggcaagagaacagcacatgagagttacatggataaccgatgataaacattcaccttcatatgtagaatacggaacattacctgggagatatgactcaatagctgaaagagagtgcacctcttataactatctgctatatagctcaagaaagatacatcacgct

SEQ ID NO: 17044 - DNA, 363 bp, Glycine max
  Clone ID: LIB3049-053-Q1-E1-A1
gagaatggctttcaatcaagagttagaagctgtaacccaaactttctcagggcatggagtggatgagaaatcattggtaacattactgggaaaatgggatcctctggagagagaatctttcaggaagaagacaccacatttgttcagtgaggatcatgaacgccattttcagaggtgggatgaccaatatgttcgtcttctcaagcatgaattcgtgcgttttaagaatgctgtggtgctttggaccatgcacccttgggaaagagatgctcgtttagtaaaagaggccctaaagaagggtccaaatgaatatggagtgctgattgaggttgcatgcactagattctcagaagagctattggg

SEQ ID NO: 17045 - DNA, 366 bp, Glycine max
  unsure (1)..(366): unsure at all n locations
  Clone ID: LIB3049-053-Q1-E1-A10
gggagaaagaaagactgaaagcanagtagacgagtgattgcgttgcgagtgacgacgacgaagaatcatgtcatccggcggcagcggtggtcagccgttcttctgccacgtgtgcagtcagaggattacgtgctccgatgagtcggacacactctgcccgatgtgtatggacagtttcgtagaagaatgcaaccctaacagatccaaccctaatctcttcgccgacagtgatgaatcttcggattgcgatctcaccttcgaccgcttctcacttctccctctcttgctctcatcagtctctatgtcccgatccgaacccgacatgttcgacccgatggtcttcctccagaaacatcttcaggacct

SEQ ID NO: 17046 - DNA, 373 bp, Glycine max
  Clone ID: LIB3049-053-Q1-E1-A2
aggggaaacactaaaacaagattccaaaacttcaaatccccaactgggaacccgaacggagaagaacactccccccgttcaatttcctccaaatgccgaaacgttcccaatattcccctccgaacatttccgaatgttccagttcaaggtgccgaactgtccacgtggcaggtcccacgactggaccgagtgtccctacgcccaccccgccgagaaagctcgccgccgtgacccccgcaagttccactactcaggcacctcctgccccgattaccggaaggggaactgcaagaagggcgacacgtgtcagttcgcgcacggcgtcttcgaatgctggctccacccttctcgctaccggaaccagctctgcaaa

SEQ ID NO: 17047 - DNA, 315 bp, Glycine max
  Clone ID: LIB3049-053-Q1-E1-A3
gagaggagacgacatggaagccgtaacaggctcccaccatttttccactctctccctttctttctctcacaacaaaaccttgcgctcttcttctgccaaatcaatcaggctttcctctccttcgaccaacgcttccttatcttccagaaactggttcgcgaaagaggtatggggttgggtgaactccaactccaaaggcgtcgccgtgagaaggtacacacgcggagtggtggtcagggctgaaatgttccgccagttaacaagtggccttgagactgcatggaacaactcacaggagaagaagttttgtctaag

SEQ ID NO: 17048 - DNA, 372 bp, Glycine max
  unsure (1)..(372): unsure at all n locations
  Clone ID: LIB3049-053-Q1-E1-A4
agggaagcaaaatccccctcaacaaaggcctcccaaaacgaaaaaaaaaagaagagcaattttccctcaacaaagaagaagaagccaacaatgggcgattaacttaacgaagaacaaatttccgaattcaaaggaaccctcaacctggtcgaaaaaggacgggaagggtggaacaaaaccaaaggacctggaaatggtaagccttcaatgggggaaaaaccaaatgaaggcaaaactcaagaacatgataaagaaatggatgccgatgggaatggtacnattgacntccctgagttcctaaatctcatggccaggaagatgaaggacactgattctgaggaggagctgaaagaggcattccgggttttcgac

SEQ ID NO: 17049 - DNA, 388 bp, Glycine max
  unsure (1)..(388): unsure at all n locations
  Clone ID: LIB3049-053-Q1-E1-A6
ggaggaacataagggtgttgtttatatcgtgcttgagagttgatatttgagtggtctttcaatggggcatttgggtcagaatattttgaattatgaacttgaaaatggagtcaatatgtgttgtgatgaagactgttctaagaatgagatcaatacaactcttattcagtatgctgtgaaagacctattgacgggtcttggggaagacatcaacagggaaggcattataaagacacctcttcgtgttgccaaggcactttgtgatggaaccagaggttatagtcaaagtgcgaaggaaattgtggaaggtgcacntattcctgaaactggcgtagacaacacaaaagttggtcatgcacgtggagtatgtgggcttgttattgtgaga

SEQ ID NO: 17050 - DNA, 385 bp, Glycine max
  Clone ID: LIB3049-053-Q1-E1-A7
gactcatttctttttctctatcttttgttctgctcagctcgatctacctaccttggttcttctctgttctgttatttcagtgcagcagcagaaaatgaccatcctcattgagcaacctgcccttgagttacaagttgaaggcaacaatgtgcatgctgaagaaaccaatgagcttgtattggatggtggatttccattgccaaaggatggatatatggccccagaaatcaattcatttggccactccttcagagaatatgatgctgaaagtgagaggcaaaaaggtgtggaggaattttataggttgcaacacatcaaccagacatatgactttgtgaagagaatgcgggaggaatatgggaaattggacaaagctgaaatgggc

SEQ ID NO: 17051 - DNA, 331 bp, Glycine max
  Clone ID: LIB3049-053-Q1-E1-A8
ggaacctttgcattccactcactcaagattcagcaagtgcgttttggaagcagagaccgaaacacttcgagatggcccgtacaaagcaaactgctcgtaagtcaactggaggacaagctcccaggaagcagcttgcaaccagcgctgcacgtaagtctgcaccaacaactggtggtgtgaagaatcctcatcgtcatcgccctggagctgttgctcttcgtgagattatgacataccagaagagcatctgagcacctaatcaggacgcatcctttccagacgttggttcgtgaaagtgctcaggatgtcacgactgatatgcgtttccaga

SEQ ID NO: 17052 - DNA, 316 bp, Glycine max
  Clone ID: LIB3049-053-Q1-E1-A9
ggatagatggaagacgcactgagagagatggtgttgaatgggtggaattggaaatcgaagtgaaaagaacggttgaaagtgaaagagtaagatgctattgcaattgcgctgctctcattctcagcacaaactgacacttgcctgcagttgaagaaagaatagaggatcgtggtcgatggcgtctgctagccttggaagtggtggggtcggcagttcgaggtctgttaatggtggcttcaggggttcttccagttccgtcgattggcttggcagagagatgcttgagatgacgttgagagaccacgaagacgataga

SEQ ID NO: 17053 - DNA, 236 bp, Glycine max
  Clone ID: LIB3049-053-Q1-E1-B1
gtcacctcaccgcgtcattcgcacgctgagacagcatcctccgaacactgaatcgtgattcgcagtgtatgacgagcgcttcggagctatttcactccagaaggcatcgattgggacgaagtgctctcgatctagggctcgacaccgaactcaacgccgccgattctctccgccgccactaccacctcggctgcctccgtcaccacccggagcgtgcatctgatagaattgatggg

SEQ ID NO: 17054 - DNA, 373 bp, Glycine max
  Clone ID: LIB3049-053-Q1-E1-B10
attctagggccgacgcacccgtccacccacgcatccgttacgctgcaaaagacaacgaaagggaaggaaagtggtcaattgttgaaccacgcaactacaaaaatgggtaaaaaagccaagcaaccttgtttttcctgggtggaatttaagtttaacaaaaacaacttgccaatttggaatttaaacatcttttagtcgaaacaatggatcgacactttggcaatgtgaatgagctagatatcatgtttcatttagaaaaggtacattttatgttggaggaaattgtcatgaatggttgcattgtggagacaagcaaagcaaatattctgtctccaattcagcctgcggataaaacttcttaagagaaataaaa

SEQ ID NO: 17055 - DNA, 365 bp, Glycine max
  Clone ID: LIB3049-053-Q1-E1-B11
ccaccaaccacaccagggaagggagggaacactccatgcccaccaccaaagtctcctgcgcaagctacgtgccccattgacacgctcaaacttggtgcctgtgtggatcttcttggagggttggttcacattggtttgggtgaccctgttgcgaaccagtgctgccccgtgcttcaagggcttgttgaggttgaagctgcggtgtgtctttgcaccactcttaaactgaagcttctcaacctcaacatttatgtcccacttgcccttcagctccttgtgacttgtggcaagtctcctcctcctggttacacgtgctccctctaaaccagtggaaaggattgaggaatatatggtcaaaatcgaca

SEQ ID NO: 17056 - DNA, 343 bp, Glycine max
  Clone ID: LIB3049-053-Q1-E1-B12
ggccaccagccagaggagggaagggagggaacactccatgcccaccaccaaagtctcctgcgcaggctacgtgccccattgacacgctcaaacttggtgcctgtgtggatcttcgtggagggttggttcacattggtttgggtgaccctgttgcgaacgaatgctgccccgtgcttcaagggcttgttgaggttgaagctgcagtgtgtctttgcaccactcttaaactgaagcttctcaacctcaacatttatgtcccacttgcccttcagctccttgtgacttgtggcaagtctcctcctcctggttacacgtgctccctctaaaccagtggaaaggattg

SEQ ID NO: 17057 - DNA, 364 bp, Glycine max
  unsure (1)..(364): unsure at all n locations
  Clone ID: LIB3049-053-Q1-E1-B3
gacaatgatggttgctgttccagtgacaaaagaaggtanaaggcttgaggctgcncctaggagaaacatggaaaaagctgtcaagtccaacagtgatgctttgtgggctcgaattcaggangagaatgcaaaaagtgaaaagttgttacgagaccgtatccagcaagttacaggtttgattagtaactttatgaataaggatctaccagtgatactggagaaaacagtaaagaaggaaatggcttcagttgggcaagcagtagtacgtgcaatgtctcctgctgtggagaaaataatatcttcttctattgtggagtccttccagagaagagtgggtgataaggcagttgaacaacttgataga

SEQ ID NO: 17058 - DNA, 382 bp, Glycine max
  Clone ID: LIB3049-053-Q1-E1-B5
gattgtcaaatctacagtgtttttcttttctctctcacacgaaaccctctccctccctttccctcagatttctcacttccttttctcctttccatttctcaccttctccccctctcttcatctcttctctaccccttttttggttttccttactcttacgaatcaaaacccgcaactttggacgtcgttggagggctttcgtcgctacccaccataactgacgaggggtgaccactggtagcaaggtgtattaggtccaattcatagtacctgaaagcacactttactcaaattgggaggaggtgttagtagtaggcatgatcggtccaggggctgtagaaatattagtgaaggatttgaaagtctttgacacatttaatac

SEQ ID NO: 17059 - DNA, 379 bp, Glycine max
  Clone ID: LIB3049-053-Q1-E1-B6
gtgattgtgattacctctgatgatgaatcaaacgagtagcaagctgtgaagggaaacatggcaagggaaacatctgccattaacactgccatggccttcagttctgttctctctgcaacaatcattgctgattgcggacttccacgggattttgtgatgaacattgatgcaactgacatggagtatgaactggcagcagccgagtatatcgatgatatcgacatattgtacaatgagactgagaaatatggttgtgtgcatgactacatgagttcgcagccagatatgcatgccaagatgacgtgaatccttgtggactggttgacatatatgcataggaagtttgagctcaagccagaaacgctttattcgaacatga

SEQ ID NO: 17060 - DNA, 390 bp, Glycine max
  Clone ID: LIB3049-053-Q1-E1-B8
gagggtttttgtcgtcgctactaagagttgctgcttcttcagccactccgcacctcgcagcctctgtgccctcaacaaccatggctgaaatcgaaactaccgttccagatcccacccaaatcgacgtcaaactcttcaatcgctggagcttcgaggatgttgaggttaatgatatgtctctggctgattacattggagtgtccccatcaaagcatgctacatatgttcctcacactgctggtaggtactcagtgaagaggttcaggaaagcgcagtgccccattgttgagaggctcaccaactctctgatgatgcacgggaggaacaatggaaagaagctcatggctgtcaggattatcaagcatgccatggagatcatccacttgctca

SEQ ID NO: 17061 - DNA, 283 bp, Glycine max
  Clone ID: LIB3049-053-Q1-E1-B9
caggcgtgtggttcatgatgatctggaagttgttaaagttttgagaaaatccccatttgctttcacatatgctgacatggtgaatggcttggttccaaacattgacgttttgaggcagtctggtgtgcctcaaggttcgatctctctgctgattgtccattttcccagtgtagcatatgggaagcattccagatttgtggaagctgtcaagagagttaagaaatttgggtttgatcctttgcacatactatgtgtcatcgctaggtgagtgctctaaaacatg

SEQ ID NO: 17062 - DNA, 376 bp, Glycine max
  unsure (1)..(376): unsure at all n locations
  Clone ID: LIB3049-053-Q1-E1-C1
catggatgaaagtgaatggtggattttcccagctggattggttttgtgtaaattattccagtctcaactcattaattggcatgttgccaatctggaaattcaagaccgttccttgtatagcaacgattttgagctgttctggcaatcatganggtatgttcacagcttatattcaacattaactttttaccctttttccctcttctctcgaaccatcacatgttctgagtacggtcatctaatataggtcaaagatgacatagagatggtagtaggataaacttgaggtggggagaaatagaactatagaaatcaaaataagatgttgtagaggcaatcatttactgtacacctaatgctcaatagttcttttttt

SEQ ID NO: 17063 - DNA, 275 bp, Glycine max
  Clone ID: LIB3049-053-Q1-E1-C10
aaaaggtcaagaaaaaacggaacaacaatggcggtaaatccaaccaagttaacgaatggggcttcaccgtttcgctgatgaaaagaagtgttgcattgcaaaaagggctacccattcttggtgtattcaggacttttgcagcagttggtgttgatcctgccatcataggtgttggccctgctgctgcaattcctgttgccgttaaggctgcacgtctaaatcttgatgatactgatcgttttgaaataaatgacgcatttgcctcccaattcgtg

SEQ ID NO: 17064 - DNA, 308 bp, Glycine max
  Clone ID: LIB3049-053-Q1-E1-C11
ggttctagtgtgtgagtgtatgttgtggtaacccgtccatcttctcttgtggttctgtgtttgtgtgtgtattttctctcatctgacaatgtcttgcggcggtggaaactgtggttgctgaagctcctgcaagtactgcgactgcatcggaggctgcaagatgtaggcagagttgagctacattgagtctaccatcacgagaccgtggtcatgggagtggacactgataaagctcaaattgatggtgctgatatgggtgtgtccgcgtagtaccatagctgcacatgtggagctcaatgctccatcaa

SEQ ID NO: 17065 - DNA, 369 bp, Glycine max
  Clone ID: LIB3049-053-Q1-E1-C12
agggaataagaattttaataataatggaatggaataataaccaaggggaacttccatccacaagttaatggtaaattccaaaaaggggttgcaatttaatattccaatcaaagggttggaaaaaattggcctttgggattaacaagtcaagtcccttgaaaggggaaaagacattgaaagtcatgatatgctaagacaaggtttcactcatgctttcttgatgacattcaatgggaaagaggagttcaacgcatttcagactcacccaaatcatcttgagttctcgggagtgttttcacctgctattgagaagattgtggtgctggatttcccatctaacctcgtcaaagcaccagcatgaatctcaac

SEQ ID NO: 17066 - DNA, 386 bp, Glycine max
  Clone ID: LIB3049-053-Q1-E1-C3
gataacagtcacgtgttcaaatttactgctgcgtcacctggggcctcatttgccctattcagattcagttccccttcgcgtctctcttcaaacaaaacagaactgaactcgctgactgaaactcgcaaaaattagggttttgcagtgatggcactgtccaaccgcgtccgatcgggaatctctctcttcaccaaatccacgttcctcacttccgagcgatccactctccaacgattcctcgttgccccttccatttccttcgcctccagaaattacgccaacgtgccggggcaaaaggaaaacaaagttaaggtccctctggctttgtttggaggttcaggaaactatgcctctgctttgtatattgcatctgtgaaagctaatgc

SEQ ID NO: 17067 - DNA, 370 bp, Glycine max
  Clone ID: LIB3049-053-Q1-E1-C4
agggggccacgggtaatcctgttcctgttccaacctcccaatatccacttaccctttttgtgctgccactaataaaactgcacttcaacttcaaattttcaacctttccccattcacgtcccttcttccttccaatgttcccttccatcataaattctaatcaatctcgtgaccagcaacaacaaaagcaaaagggagaatggttagcaggaagtttcaaggcagagaacttcattccagggcttgttataggtttcatttttgggttgttgttggatttatcaaagcccggtagaaatcacttgtccaagaaaatttgctcatctgccagacctcaacaacagcaaatctcagtctcaagcaatgctga

SEQ ID NO: 17068 - DNA, 382 bp, Glycine max
  Clone ID: LIB3049-053-Q1-E1-C5
acccaagcgtccatacaggcgtcagtaggctacaaaaagagaatagaaggtgagagattaatgtattgtcatattagccatggggactttcaatcactatgtgattgtaaagtgcaaagatggtgtggcagttgatgatctcattcactggttggagatcatagtcattgggattgaccaagtcaagtcctttgaatggggaaaggacattgaaagtcatgatatgctaagacaacgtttcactcatgctttcttgaggacattcaatgggaaagaggagttcaacgcatttcagactcactcaaatcatcttgagttctcgggagtgttttcacctgctattgagaacaatttggtgctggatttcgcatctatcctcgtc

SEQ ID NO: 17069 - DNA, 388 bp, Glycine max
  Clone ID: LIB3049-053-Q1-E1-C6
gggaatccatcgatccaaaaccctaattgaagttgtcttgtctgcgttctcaaacgttgttgcttgctgctgctgcatagttgatcgaaagcatgacaacatcattgtcgagcatccttttcaagggaattgcagctcgttctttcaccgcccctctaactaggtcctgttatcatggaatgagatactttgctactgtatcaaatgatcctgacacacatgatgacttcaagccagctaataaacttgagaattccaacatttctttggctgatgttattgagcatgatgtcaaggataatcctgttatgatttacatgaaaggtgtgcctgattttccacagtgtggatttagttctcttgcagttagagtgttacaacaatatga

SEQ ID NO: 17070 - DNA, 387 bp, Glycine max
  Clone ID: LIB3049-053-Q1-E1-C7
ggtgcttgtgcgtcaccgctgaatcctagctttatcttcccttcccttcaaaataatatctctgttccaaacaagtccaacaacacactgcttctatctcaaacgcacatcgagaaatgagtttgagtaatgggaaaaccgaggcaccattgccaattagtaatggggatgagaagaagccgttcaagatcttcgtagggtatgaccctcgtgaagatcttgcctacgaggtatgtcggcactccatcttgaaaaggtcctcaatccctgttgagatcataccaattaaacagtcagatctgaggaaaagtggcttgtattggcgtgagaggggccagtttgagagcactgagttctccttttcaagattcttgacaccttgccttg

SEQ ID NO: 17071 - DNA, 355 bp, Glycine max
  Clone ID: LIB3049-053-Q1-E1-C9
gcgagaggtacggggcaagagttagaagctgaaacaattgagtccttaaaagctatatttccctttccagtctatcctattggccctgctataccttatttagaactaggacaaaaccctttgaacaatgatcatagtcatgactatataaaatggctagattctcagccacctgaatcagtattgtacatttctttcggtagtttcctttcagtgtctactacccaaatggatcaaattgttgaagcactaaacagtagtgaagttcgttatctttgggtggctcgagccaatgcttcttttttgaaagaaaagtgtggagataagggcatggtggtgccatggtgtgaacaat

SEQ ID NO: 17072 - DNA, 386 bp, Glycine max
  unsure (1)..(386): unsure at all n locations
  Clone ID: LIB3049-053-Q1-E1-D1
agggacagcganacagagagtgattcagtgagtgatcggtgttcacttgatctcatcataatcgtcagcgtcaattgaagaagatgccgatcagaaacatcgccgtcggaaggcctgaagaggcgactcaccccgacacgttgaaggcggctttggctgagttcatctcaaccttcatcttcgtgttcgccggctcaggctccggcatcgcctacaacaagctcaccgacaacggcgctgccacccctgccggcctcatctccgcctccatcgcccatgcattcgccctcttcgtcgccgtctccgtcggcgccaacatctccggcggccacgtcaaccccgccgtcaccttcggcgccttcgtcggcggcaacatcaccttcctc

SEQ ID NO: 17073 - DNA, 362 bp, Glycine max
  Clone ID: LIB3049-053-Q1-E1-D11
gactcagcagtagcaaacaaaattcttcgtatttgcttcttgcttttttctttttgaaccacaaaatggccgacgacagcacagctacctgcatcgacatcctccttgccatcatcctccctcctctcggtgtcttcctcaagtatggatgcaaggtagagttctggatctgtttggtgcttactctttttggttacattcctggaattatctatgctgtctatgctatcaccaagtgatcatattcatcacctcttgtagacaatgaataatttgtcaaagtacaacggttatgcatgtttctcaactccagcattgatataatcgtttgatctcagaacaatgtgattcctttttgtttt

SEQ ID NO: 17074 - DNA, 289 bp, Glycine max
  unsure (1)..(289): unsure at all n locations
  Clone ID: LIB3049-053-Q1-E1-D12
aaaagaccaccgaaggggaataaaaattccaacaatccttaccttgcctccccataaaaaagggaaaaatttaaaccaaaaatcccctaataaaaactttacatcaacaacccccaataattgcaataaacaaataaattccacaatttacagcatcccaaaaaggattttcagacggtagaaaaccctcaaaaaataccttcagcanaattactgttacaacaaaagacaagacatctagcctaataccctacacngtgaggaaaaaattaacaaaaaaaccctagta

SEQ ID NO: 17075 - DNA, 155 bp, Glycine max
  Clone ID: LIB3049-053-Q1-E1-D3
gaatcagacttgcattgcatggccaagcattgcaagcacttcactatctcttagggagtgcttggtatgatgggtgaaaaattaaaagataggaaacgtagaagagaggagtagatgggagtgtttgttattgcatttttactttcatctctata

SEQ ID NO: 17076 - DNA, 364 bp, Glycine max
  Clone ID: LIB3049-053-Q1-E1-D4
ggggagaggcagaaagaagagaaaaaaggggaatggcatggttgcagttgcagagaatcgtgaccaagggaggtgctaatttgatctcaccactcccactttcacgattcttctcgaaatcttcttccccctatgttgtgaaagttggaattccagagtttctaaacgggattgggaagggggttgagtcccacgttcctaagcttgaatccgaaatcggtgatttccagaagcttcccctcactcccaccctcaaactcaagaagcttggcattccttgcaaacacaagaagttaatattgaaattcacacacaagttcaggctgggattatggaggccacgtgttgagtccatcaatgcctg

SEQ ID NO: 17077 - DNA, 73 bp, Glycine max
  Clone ID: LIB3049-053-Q1-E1-D5
cggctgcgagcggacgacggacggggatgcggcgtctgtccgctcttttctttgcgtctgcttcttgtctgtt

SEQ ID NO: 17078 - DNA, 337 bp, Glycine max
  Clone ID: LIB3049-053-Q1-E1-D6
aatggcatggttgcagttgcagagaatcgtgaccaaaggaggtgctaatttgatctcaccactcccactttcacgattcttctcgaaatcttcttccccctatgttgtaacagttggcattccagactttccaaacggcatagggaatgcggttgcatcccactctcgcaattgattcctccggtgtcagtctagtcctccttctctcccgtgtctcctacctccgctgtgttccaccgtatagtggttggtgctgtattcattcgaagtggaggtggtgctgttgcagctgcacctgcaggtggtgctgctgcaactgatgctgccccggctgctg

SEQ ID NO: 17079 - DNA, 254 bp, Glycine max
  Clone ID: LIB3049-053-Q1-E1-D7
ggtcaaggaaatttttcgaactgatggcgaacagttcctcaagtatccaccacctaaagtgatgcaggtggataattctgcatgaataacggataaaaaatttccaaaagaaccaattcctgttgtaaaccaaatatccattaaaactcttaaagattccaccacgtatcacactctattctcaaacccacagtgatctcacccctctataataacaacacaacatttagacccaaattggtgtgcgcacactt

SEQ ID NO: 17080 - DNA, 386 bp, Glycine max
  Clone ID: LIB3049-053-Q1-E1-D8
gattacaggagagagagagagagagagagagatgtttgggaagggaacggtgtggtcagtgttgaggcgcggcaaagaagcttgcggcggatttcacaagctgagaggaacgcctttctcttattcttcttcttcaacacctttcaagttcttatcccctcccgtctccacccattgctttcatgctttccgatcccaactaatccccaagggtcatcatgttcatgtgccacaaatgaggaacttttctaagatggtctctgctgaacaaaaggaggagggattaaagctgctagtgagtgggggttctcgtgctcagaaattggttggaatatggctctttgggtcagcggcatgggtgttcagcatggtggtgctcgggggtt

SEQ ID NO: 17081 - DNA, 339 bp, Glycine max
  Clone ID: LIB3049-053-Q1-E1-D9
gtgctcttcaaacatgggaaaacagagcacaccccaattctctgccctcaactgcatcgatctctccaaccccgacatcaaccaatccgtcaacttactcaaagaggcatgtttggattccggttttttctacgttgtcaatcatggaataagccaggaattcatggacgaggtttttgcgcagagcaagaagttcttctctcttcctcacaacgagaagatgaagactctcaggaatgaacaacacaggggatacacccctgttcttgatgagttgcttgatcctgaaaaccaagtacatggagattacaaagacgggtattatattggaattgaaaa

SEQ ID NO: 17082 - DNA, 388 bp, Glycine max
  Clone ID: LIB3049-053-Q1-E1-E1
ggaaccaaacacgaccttagtctcctccatgattcccctcaaaactcatcctcattctcccttcatcttctccgtttccaaaaccaacccactttacttctctttgctccccacttctatctctcttctctcactcaaacaacccccaccctctctctcttccaatcttctcagggtttcaaatgttggagtttcagtttgcagaaccgaacaccacgaagaagaggaagacaagggggtttcgttggagcttcacgacttgtccccaaatggggaagtgtatcagaaaacgctgcaattggttgagtgttccatgttcgctgcactcaccggtttggtctatttcttgagcaactcccttgccattgagaattacttcagttgtttc

SEQ ID NO: 17083 - DNA, 339 bp, Glycine max
  Clone ID: LIB3049-053-Q1-E1-E10
agggggcaagtcaaagtctggattttaaatccggccctggtggtatggatacaaaacggggaaattaaaaaatgccctcaaggattaagcaaatgtccgtccccaatttaaaaacctccatggagggacacttgaagaagtttcagatggctggtgcattgaaaagaaaagaacctgatggtggttgggagggagccgagagattcggttacaaacaaacttcatggcagtagtgccatggctcttcagcgcaaatattcaagagctattttggaaaatgtcagaaaaattggggatattactttgagtgttgagccatggacaacaagcaaagatgct

SEQ ID NO: 17084 - DNA, 373 bp, Glycine max
  unsure (1)..(373): unsure at all n locations
  Clone ID: LIB3049-053-Q1-E1-E11
ccacaccgatcccggccacaagtgcaagacggcgctcacctccatccaccacaaccgggagccgcctcttctccggcggagccctgtcagatctccggcctctttccggcgtcgtgggatctgacgcggccggctcggtggctgggagctccgacgtggagaatatggtgaggcaagccgacgactctctgaggaaagtgatgtacttgagctgctggggtcagggctgaaccacacgtggcgttatgaacggtggagattgaagtggtggccggagaaagtgacccgggtcgggttcggatctgagttgacctgaccgagtcagatcngatgactcggttggagagaaaaacttggaatgttccgatcctgt

SEQ ID NO: 17085 - DNA, 346 bp, Glycine max
  unsure (1)..(346): unsure at all n locations
  Clone ID: LIB3049-053-Q1-E1-E12
ggtttccaaaacactaacccctttactggttaatgacaaagagaaacaatccgaggattcggtccggtccaaaagaagggcggacttttaagaaaaaagaaccttccacccaaaggcaaaaatctggtaattgccgggggtttgacagcttttgtcattggtgcatacttctacaccatganggctgttggaggcactgatgaactgcaggtagcaattgataagtttgaagctgacaagagcaagaatgagggtgatgccaacatgccatcaaaggtctaaagcttgtacaataaagcaatactttgggtgtattcactgttttggtttgggatcaagcttttta

SEQ ID NO: 17086 - DNA, 404 bp, Glycine max
  unsure (1)..(404): unsure at all n locations
  Clone ID: LIB3049-053-Q1-E1-E3
ggactatnnttttattaattaattaataaataattaantcctcctcaacggttaatgggcgttcttcaagctcaagttggctaacctcttccggggcgcaactcagctcggccgccaactccggcggcgcaccatgacaacatcatgtcctcatccgacgccgccgatgcgctctcgcgcctcctccagcgcctcccgcccacgctctccctccccacgcgcctcccctcgccttcctccgcagccgccacgtgtcctccctgcctctcccttaacgacgtcctctcctgcgtttccaaactcggttacgcgcaactcaccgatcactcagtcccctccgaactcgccaactcggccgagtcagaagcgctggcactattcgacctttcgcaagaccagaagca

SEQ ID NO: 17087 - DNA, 354 bp, Glycine max
  Clone ID: LIB3049-053-Q1-E1-E4
gagggaccaggtgacaattactcaggttacaattgctcgtgtgtataattgggatgttcatcaacggagagttcaacatgctgttgctacaactgctcaagactagttaaaaaggagagtttattcaaacctaaattcaaaattgaaaactcataccttttgcttaaagtaagaattttatctcctgccaatttctgatttagataaattgtgggttgctcccttaatctagttccggttttaccacagtatacactagtaggagctttttcgtatatttatgttattaatgtcttggtctcttgtaaaatgcccatatgttaggttgatgggaaagttttgggttggtgtgac

SEQ ID NO: 17088 - DNA, 390 bp, Glycine max
  Clone ID: LIB3049-053-Q1-E1-E5
gactctacagtcttccatttctctctctctctctgcgccttcaaactacaaagaatggcggcgttgttccacttctctcttcttttcacagttctcctttcttccattctcttatcgaatcactcagtaaaatgcgacgaccatgatgaggaagatgatctttatcagggaatcaacaagtatagggaatcattaaacttgacatctctaacaaagaatgaaaatgcgaattgctttgctgatgaaattgctggccagttcaagaatcaaccttgtacgaataccacaggcgcaaacacagtaccaggcacggagcctcagttctccaactacccagaccttttgaataaatgtcaattgaatatttctaacacgagggatggaattgtt

SEQ ID NO: 17089 - DNA, 394 bp, Glycine max
  unsure (1)..(394): unsure at all n locations
  Clone ID: LIB3049-053-Q1-E1-E6
gtccacccacaagtccggacagaatgggacagccgcaactttaaacagagcaaaaccaaccttaaaaacctctggtttccggtacaaatataaggatttccaaggaaaaaaaggttgcaataaaaaaacccctgattccctttccaaaaaagaatggtaccatatcaaaggcccttccctcctccaagtcaagaatattggcaaaaccctcgtctctcgtacccaaggaaacaatattgcatcccaatgactcaaacatcgggtttttgacgtctcattggctgatctccaaggggatgaagaccactccttcaagaagattcgtttgagagcttaggacgttcaanggaagaatgttctgacaaacttctggggaatggatttcacaactgac

SEQ ID NO: 17090 - DNA, 382 bp, Glycine max
  Clone ID: LIB3049-053-Q1-E1-E7
gaaacaaaaacaaaagaaaagaaaactggttcttcttttcgcgttgcgttttcttggtgtctctgtcgattcttcttctgaattttaatacttaggaagtttagttttctctcttggcttctccggttggagtttccggcgaccttgtcggagattttgttgtttatttttcacaccacttgtgaaacttctcaagaaaaagaaaaaggatgtttcttgttgattggttctatggaattttggcgacccttggcctgtggcaaaaggaggcgaagattttgttcctagggttagataattctgggaagaccactttgcttcacatgctcaaagacgagagacttgttcagcatcaacctactcaatatcccacttcggagga

SEQ ID NO: 17091 - DNA, 362 bp, Glycine max
  Clone ID: LIB3049-053-Q1-E1-E8
ggaagcagaaaaacagaaaaagaaaacaattatcagcaataataaaattataggcacgattctggcatgtccaattctcaacagaatgagcttcattattcaaccgccaacggggacgagaggtcaaacccttgtttagccaacacgcgctgcagcttctgctttccctgttgcttcggttcccgtcgcgactcggccaccctcgggttcgggtggtgggagcgcgtgcgagccacgtcgtcatggtccgagtcgcgctccgaggcgcaaccggtgaccgggagtcccggtgggcggtggtggtctggcggcgtgagggcctttatgaaggtgcgcgagtggtcggagctcgcggcggggcc

SEQ ID NO: 17092 - DNA, 349 bp, Glycine max
  Clone ID: LIB3049-053-Q1-E1-E9
gagagagagctgagtcatgcacaattatgtagtgttgacaatgaagtcagtgctgcccagttgattcatgcaaatgctgatggtgagaatatgcagctctgtgatccacacattgaggttgatgaatcagatctaggctatgcagcaggtgaagaaaataatgaggacccagatgatgcggctgctgaatttagtcctgaagaactaaagcacagagtcggtgaagaaataaagcaagagcttaaccatgtgcctggagaggaaaacatcgaggaactgaatgcagccaatgagattcattttgtggaaccttcagataatatggtgattgataattcacaactttgtg

SEQ ID NO: 17093 - DNA, 321 bp, Glycine max
  Clone ID: LIB3049-053-Q1-E1-F1
gagtatgaggcttttcagtgaatgcaggtgggagctaaatctcttgcgcacatactgaggttgagttctgctgaatgattcttagtttaagtgtctttattctatgtcggagctaaatcacttgcattgtggagttatagggttttcccaacaaaaaggttcaggcaaatatatgtaaatatgctgtttatgtattgtttagcttctcatctcaatttgtatctattatttttactttaactagtgatgatgggaactaaactctacatgattgtgtcattataatgtgttctgtatatattcggatgaaaaattttgtcc

SEQ ID NO: 17094 - DNA, 311 bp, Glycine max
  Clone ID: LIB3049-053-Q1-E1-F10
aggggtgtgttgtgtgtgagaaagaaactctctctctcaattgtttccgtttggtcctgcccactgtcctgtttgtttccgtttctgttttcctttgaaaacagaagaatcaaatcaaatcaatccttcaacgttcgttcaatccttcaaatcaaatgaaatcccttccttccggttttcctttttttttccccccaaaaattaaaaatccgaaatttgccttaaaccttgaaacccaacctgaaaatttgcccccaaaaaccttaatccctttatcaaaaagggtccttgttggtttttttccaattggg

SEQ ID NO: 17095 - DNA, 345 bp, Glycine max
  Clone ID: LIB3049-053-Q1-E1-F11
gaaagaaactagggtataaaaaaaaatagaagaggggacgcagtgctatcgagtttttttttcttaatgccatggctgctctgcaatacttggaatcgctgcgcaacgcgcatcctgagctctccgattggtacaattcgctggcggatctataccagaacaagctctggcaccagcttaccctcaagcttgagcagttcgtggctctcgccgtcttccaggccggtgatgcattaatacaattatatcacaatttcatcacagactttgagaccaaaatcaaccttctcaagcttgcgcatttcgctgttatagtttctcggcagtatgctgagaaagaagctg

SEQ ID NO: 17096 - DNA, 329 bp, Glycine max
  Clone ID: LIB3049-053-Q1-E1-F12
gacatggagctctacgaatggactaagggtgacatctctgacgaacctcaaaaggaacgtgtcaatcagatgattgaagaatgtgaaacttttgaaggccaagctcctttggatgccaagtgcctcaagtgaaaatttaatccctgaaaaggtccacttttaaaaagtggcctccgttttgggaaggtaccggtttctcaaattgaaactttatggttaaattacttttaactttaattttaatgatagctagactaatatacaagtgctatatttttatgttggatgtaagcatttactaattacattgataggttttctttttcccg

SEQ ID NO: 17097 - DNA, 395 bp, Glycine max
  Clone ID: LIB3049-053-Q1-E1-F2
ggccgctctctgagaaaaacagatagtgtgggagagagaagagcggaagagaaaatgacgaccaggttcaagaagaacaggaagaagagaggtcacgtcagcgccggacacggccgtatcggaaagcaccgcaagcatcccggaggtcgcggtaacgccggtggcatgcatcaccaccgtatcctcttcgacaagtaccatcctggtttcttcgggaaggtaggcatgcgctacttccacaaacttcgcaacaaattctacaatccgatcatcaacatcgacaagctgtggtccctcctcccccaggaggccaaagacaaggccaccgccgacaaggcacccttgctcgatgtcacccagttcggttactttaaggttttgggtaaaggggtttt

SEQ ID NO: 17098 - DNA, 371 bp, Glycine max
  Clone ID: LIB3049-053-Q1-E1-F4
gagtggcacgccgagtacaaaagaagccgtcaaaagcctgaccacgcagataaaggatatggcactgaagttttcaggtgcatacaagcaatgcaaaccatgcacagggtccagtagctacaaaaaaggacataggccatatccagattttgataccatctcagaaggggttccatacccttatattggaggtgcaagctcaagttcaacccctgcatgggacttcacaacctctcactaccctggtggaagatctgaccctagatttgctggggcatatggcggtgaccgcaccccgagaggacgtgactcatcatcagtttgtgatgtagtcttagaggatgaggatgagcctaaggagtggatggcac

SEQ ID NO: 17099 - DNA, 386 bp, Glycine max
  Clone ID: LIB3049-053-Q1-E1-F5
gagtggaagagtgaataagagatatcaatatattatgataatggagggatacaataagaaggttatgattgtggggatggtgttgggcatggccatgattgggatggccaatggccaatactcgttttgtcgcatgcccagcgatgggttggcggcatgcaagccgagtgtgagtggggactatcctgctgatccctccactgcttgttgctcagccattgccaaggctgatcttaaatgcttctgccgcttcaaggattcgggccttctctctatgtatggtgttgatcccaacaagtgcatggaactccctgttaagtgcaaggttgtcgactctttccactgctagattcattagagggggcactaatcaatataaactacac

SEQ ID NO: 17100 - DNA, 334 bp, Glycine max
  unsure (1)..(334): unsure at all n locations
  Clone ID: LIB3049-053-Q1-E1-F6
gggccactcactgggaagagcaggaactgtgggagagacagcagcggaagagaaaatgacgaccaggttcacgaagaacaggaagaagagaggtcacgtcagcgccggacacggccgtatcggaaagcaccgcaagcatcccggaggtcgcggtaacgccggtggcatgcatcaccaccgtatcctcatcgacaagtaccatcctggtttcttcgggaaggtangcatgcgctacttccacaaacttcgcaacaaattctacaatccgatcatcaacatcgacaagctgtggtccctcctcccccaggaggccaaagacaaggccaccgccgac

SEQ ID NO: 17101 - DNA, 378 bp, Glycine max
  unsure (1)..(378): unsure at all n locations
  Clone ID: LIB3049-053-Q1-E1-F7
gagaagaagagagagacagacagaacaatgggggaagcaaagggaaaggaagaagaagtgttagccccagttcactcaaccgtgttcaaagaatcagaaagccttgatggaaagtgtgttaagattgagggctatgatttcaaccgcggcgtcaattatccgttgctactcagctccatggtcacaactgggtttcaagcttccaacctcggtgatgccatccaagtcgttaatcaaatgattggaggctagttgatgaacccgtagctgaggattgcagtgaccaagagagggatttggagtaccgaaaatctgtgacgtgtanagtgtttctgggtttcacttctaatcttatttcctctggtgttaaagatactg

SEQ ID NO: 17102 - DNA, 378 bp, Glycine max
  Clone ID: LIB3049-053-Q1-E1-F8
gaaggcggctacggtatgcataaagtctctgaccgtacaagagcttcactacacaactgagcccttcctcaacacgtcaaaagttcatctcatctatctgtagatcggagaaaccaagtaaaaaaaaatggagttcgacgagaagaaagcaatgatccgcgacgtggcgttacaagtcgttttcatctcgctcacgattttcagcttcctctggatgcacggcatccctcaaaacctctacgccaagctccgccaccgtcccccgaacccacgggccgtgcaagccaagcgccatttcgtcaaaggcgcgcagctcctcgcccaagccagaagatccaaaagcgcttcctccgcaacttccctcgccaaacaagccct

SEQ ID NO: 17103 - DNA, 247 bp, Glycine max
  Clone ID: LIB3049-053-Q1-E1-F9
ggatgatcccaaacgttcacgtgcctacctgggacgcggacggaggaggagcactctccccgtcgatctcttccaatgctgacacgtgctcattattctcctccgaccatttccgaatgttccagttcaaggtgcggaactgtccacgtggcaggtcccacgagtggaccgagtgtcgctacgcccaccccgccgacaaggctcgccgccgtgacccccgcaagtaccactactcaggcagctcctg

SEQ ID NO: 17104 - DNA, 355 bp, Glycine max
  Clone ID: LIB3049-053-Q1-E1-G1
agggattcaactctccaaacaacacattaacctttctcaatccccaactcctcaacttaatcaaccactgccaatttccaaggttcccaaatggaccccggcggaaaaattaagaaaggcccccgaagaaaaaaaggccgccggcctaaaaagaagccggtttcaaggtccgtcaaagccggtctccaattccccgtcggaagaatttggcgttatttgaagaaaagaaggtacgcccagcgtgtcggtaccggtgctcccgtttacttggccgcagttctcgagtacctagctgctgaagtgcttgagttggctgggaatgctgcacgtgacaacaagaagaacaagattattc

SEQ ID NO: 17105 - DNA, 341 bp, Glycine max
  unsure (1)..(341): unsure at all n locations
  Clone ID: LIB3049-053-Q1-E1-G10
gtccaaggaaaatgatgatgtaactagatgaaaaataattaccacaattagggccggaaatagatagttatagtaatgtgtttgggtttccggttcaacaactcaaaagcccgttcaatttaatccaagcatacaaaaacctttccggttggggtaaattgcacgtgtgcggatagttattcanacacatccacagtgttacaatgggatgtaatagtaatacagtttgccagtaattagtgagttaaccaaactatatatccatttgatgaagtaacacatcagttacttgaaatgagtaactagccatttcaatgcacgaaaaagtcaaccccgncgtc

SEQ ID NO: 17106 - DNA, 358 bp, Glycine max
  Clone ID: LIB3049-053-Q1-E1-G11
gagagagatcgtggaagccctgcttatcttagattgagccagaaaactgtcaattcccttggtgacctagtccccttcagcaacaagttgtactctggatgtttgcaaaagagggtagggataacagctggaatttgtgtgttgatccaaaacaaatcagagaagaagggagatatgtatgaggcaatctacagcttctactttggggactatggtcacatttcagtgcagggttcatacctgacctatgaagacacttatcttgctgtgactggtggatctggcatctttgaaggggcttatggtcaagtcaagctgcatcaaattgtgttcccctttaaattattccacacatttt

SEQ ID NO: 17107 - DNA, 306 bp, Glycine max
  Clone ID: LIB3049-053-Q1-E1-G12
gagaacagaaacagaacaaaacacaacaataaaattaaatcctaattttctaaaaaaaagagaaaagaaaatgcaaaaagtagaagagagtgtgatggagtcgttggtgtgtccaagcttcagcgcctaatcctccaaaaagctcgacgaaaacgcggattaagtcaatcgaaaagacgtgcgtttccaagaaaacgacaccgacttcgaattcgtcgcgtttcgcaaggtcgccgacggagtttttgtggacaacaacgccactccggcgttcccgatcttcgaccgcgacctcgccaccgcggc

SEQ ID NO: 17108 - DNA, 389 bp, Glycine max
  Clone ID: LIB3049-053-Q1-E1-G2
cagtggatgtggatccaaactctccaacttattccaaagtcatccataggcttcctgttccttatttaggtgacgaattgcatcacacaggctggaattcatgcagctcttgccatggagacccctcagcagaccgacgatttctcatcgtacctgcactcgtatcaggtcgagtatatgtggttgatgtgaaaacaaatccaagggctccatctttgcacaaagttgtcgagcctgccgatatcatacagaagactggattagcttatccacacacatctcactgccttgcttctggtgatataatgatctcgtgtcttggagataaagatggaaatgctgcaggaaatggatttcttcttcttgattccgaatttaatgtgaaggga

SEQ ID NO: 17109 - DNA, 397 bp, Glycine max
  Clone ID: LIB3049-053-Q1-E1-G3
aggggcaatgtaaccgaataataacaacggcccgctccctccccaacccatcacagagaaaacaaagaatcgcattagtagcagatcggactcaaccgatgaagttgaagccgcagtgaaacagaccagaataattgacgcatcatcaattagatcgagctgctagaaatgaaagatgaagacaggcttccgacgaccgccgccacgaagaatgaaagcatggattcgagtctgtttgggaaatggaggtacaaattctgggcgttagcggccatcatgcttctggcgttctggtccatgttcaccggcaccgtctcgctccgctggtccggcactctcaattcccattccagcgacatcgacactcccatccacgacgacctcgatgttctcgaaa

SEQ ID NO: 17110 - DNA, 297 bp, Glycine max
  Clone ID: LIB3049-053-Q1-E1-G4
gacacgcaactatttctgactacgtcttgctctaagcttctcactctctctcaaaaatcgttctcttcgagtttagggttttgttttgctgctgcctcgtgtatgaccttctcaaattcaacgcgttttctcctcagcttcatgatgctcccgttgtttaggatttggggtgattctaaggcttcaaaagattccttggagaattttaatccatttaaccatgcaggactgaatgaactaatggagtctaaaggtgggaaaaagaagtctagtagtagtagtagtatctcaatgctc

SEQ ID NO: 17111 - DNA, 372 bp, Glycine max
  Clone ID: LIB3049-053-Q1-E1-G5
ggaggcgagagtccagagcatagtggagaaaagaagagtgtgtgtgtgggagagtgagagcaggacagcctcccactttgtttcgtaaatgctcaattttatctccgttacccaatttaagctgtttcaattcacaaacacaacacgcactaagcaatagcaaactagtactattctcttctggttacttccaacttgttgctttgcttcgtcaccagaaaatgagtgctcatcaaaaagaaaaacacaacgcaccttcgtccaaaccaacggtttctcattcacttcacaaggttgatgatccaatgaaggtaaccgatgaaaatgaaaccttgcgtgcttctaataatcaatggaagcgaacgaatctgc

SEQ ID NO: 17112 - DNA, 353 bp, Glycine max
  Clone ID: LIB3049-053-Q1-E1-G6
gactcagccataaccaacctactccaaggaagtcccctaatcagaaccagagatggacaccaaacccaccgagatcggcagcggcaagatgttcggaggttacaacaagagattcaagcatttcagccttaccctgggatgctccatgaacttccacatctacttccctccatctccttctccctctcacaaattccctgtgctgtactttccctctggcctcacttgcaccgacgagaacttcatattcaagtcgggtgctcagcgtgccgcttccgccgagggtgttgccttggttgcccccgacacttctccgagaggcttgaatgtggaaggagaagcagacagctggg

SEQ ID NO: 17113 - DNA, 182 bp, Glycine max
  Clone ID: LIB3049-053-Q1-E1-G7
agcaaaacgaagattcccagctagcagtatccctgtatagatttagataaccttcctcacaaatataattgtagtagtcattctatgaggaggatgtgatttcctgttttgttagatgagtagagttatggttgtattatgttgtttcttcactatcataatctacttttttagattttgcc

SEQ ID NO: 17114 - DNA, 377 bp, Glycine max
  unsure (1)..(377): unsure at all n locations
  Clone ID: LIB3049-053-Q1-E1-G8
aggggaaactacaccaagtgagagaccaatcccaatatactcncaactcacaaagccatgtctccaggacctgttgtcgacgcttcccctgaagttgaagcatatgaacagcttccctccgtcgatgacgcatcccagttgaagaaatcccaaccgtacgacgatgatgcacccgttgtcgaggacgtgagggatgatgacaaggacgacgacgatgatgacgacgacgacgatgatgaagatgacaaggaagacgatgctctaggtggtgctgagggttcaaagcagatcacaagtgagaagaagagtcgaaaagcaatgttgaagctgggactataaactgtcaccggtgttagtagggtcacaatcaagagaac

SEQ ID NO: 17115 - DNA, 340 bp, Glycine max
  Clone ID: LIB3049-053-Q1-E1-G9
ggcgaaacagagagtgatttcagtgagtgatcggtgttcacttgatctcatcataatcgtcagcgtcaattgaagaagatgccgatcagaaacatcgccgtcggaaggcctgaagaggcgactcaccccgacacgttgaaggcggctttggctgagttcatctcaaccttcatcttcgtgttcgccggctcaggctccggcatcgcctacaacaagctcaccgacaacggcgctgccacccctgccggcctcatctccgcctccatcgcccatgcattcgccctcttcgtcgccgtctccgtcggcgccaacatctccggcggccacgtcaaccccgccg

SEQ ID NO: 17116 - DNA, 317 bp, Glycine max
  unsure (1)..(317): unsure at all n locations
  Clone ID: LIB3049-053-Q1-E1-H10
aaagggggaattaatacatgcccaactaataaggacaaaattgggaatggaattttggccgggaatttaccctgaaaaattttgtttaaatcatgcaagaggataagacttatgattagctcagangccgttggtttaagtccgangtctacttcttcaaaatgtacgggttccacctagctagctagaagaataattaattagtgcgtaataatgataagctgatagctgataattaagcattccttggacaccttcaacgtttacaagctccggttagaagaagagtgaatttggtacanggaaatatccatgca

SEQ ID NO: 17117 - DNA, 234 bp, Glycine max
  Clone ID: LIB3049-053-Q1-E1-H11
gggagtatacagtcttaactgagtgtgtagagcttgtaagaaagataacaggaatacatactaaccaaagcaagtataagtaactcatcagtttcttgatattaacagattcctcgagccatagttggcgacccaccatggcaccagatactactgccttaatttattggttgaattggaggttcttcctctgtgcacaatttatttaattaactatgggccaaccttcatttt

SEQ ID NO: 17118 - DNA, 331 bp, Glycine max
  Clone ID: LIB3049-053-Q1-E1-H12
aagggagcaatcaaaaaacaaacaactttcaacacatacaataatccccccccctcccctaatggatgggcggcaattccaataacccagggaatcacgccttaaggaagcgagtcgccaaacggatctggacttccaacgcacctcctctcacttcaaggaggggagcatacagtagcggctcagtgtacgacaagaaccctgatgatgagatccagtctgggcaggtcccagacgatgtgatccaggcggcaacacaatccggcaaatactgggccccacatccacagactggggtatttgggccccccggaggaagtgaccaaactgc

SEQ ID NO: 17119 - DNA, 213 bp, Glycine max
  unsure (1)..(213): unsure at all n locations
  Clone ID: LIB3049-053-Q1-E1-H2
gatattgaagcaagctcagcactgtgattcgtcgctgtggatggtgaagatgaaggggaaaagccaaagccaaaggattggaaaaaagagtagaaaaatgaagggcgcgttgagtaccactaacaacaacactagacaanttcagcttcaccaaggtcaagtgtccctcattccactccaacaaccgtcttctactactgctactacctcttc

SEQ ID NO: 17120 - DNA, 55 bp, Glycine max
  Clone ID: LIB3049-053-Q1-E1-H3
aggggaaaccgttttgtcctgttgggtaaaaaagaaagaaaagaaaagaatccaa

SEQ ID NO: 17121 - DNA, 324 bp, Glycine max
  Clone ID: LIB3049-053-Q1-E1-H5
ggcgtaaacatcgaatccaagtaaaagcgaggacatccatcaacaccatgatgttgggggagacccaccgcgcaaatccaaccgtacacgtgccaccgtggacgccggagatcttctcaccgtacaccggcaatgccgattactctccgtactcattgcatgaagcactgagtgcgcatcagcactacgaatccaccgatgctgaatcagactcggagtttccgtctcgggaaccggaagtcacggtggacgcttactcctgcgaccatttccgcatgtccgagttcaaagttcggagatgcgcacgtagcaagtcacatgact

SEQ ID NO: 17122 - DNA, 341 bp, Glycine max
  Clone ID: LIB3049-053-Q1-E1-H6
gaacaggagtggattgaggagaagtgagcctgtggagtgttttcttctgatttcatctggatctgcgagagatgacggtctttcatttcttcaattgcgcgattctcaccttcggcccccacgccgtctactattctgccacgcccttatctgagtatgatacactcggcacctctatcaaagccgctgttgtttatcttgcaacggcattagtgaagcttatttgtctagctacttttctcaaggtatcagagagcgatagctttgatccgtatcaggattttttgaaggcgttaataggttttataaatgttgctgggctttattttgccttgacccat

SEQ ID NO: 17123 - DNA, 336 bp, Glycine max
  unsure (1)..(336): unsure at all n locations
  Clone ID: LIB3049-053-Q1-E1-H7
gacccacgacntcaatccgctcgntacgatgacgacgtgaaggggagacaggaatcggattgacagaaaagtgacgcctgtggtagtgttcttcttctagatttcatgctggatctgtcgaaagatgacggtcgttcatttcttcagttgcgcgattctcatattcggaccacactccgtctagtagattgtcacgcccttatctgagtacgatatattcggcatctctatcatagctgctgttgtatatcttgtaacggcattaattatgcttatttgtctagctacttttctcaaggtttcagagagcgatagctttgatccgtatcatgagtt

SEQ ID NO: 17124 - DNA, 400 bp, Glycine max
  Clone ID: LIB3049-053-Q1-E1-H9
cacgcatccgaccgctcgagaatacgacagcgggggagaagtgagagtcggagagacatcgcgtatgtgacctccgaattgatcaatggctcactcatattcgtggctcttcctggcgacttgtgctaccctcatccctctgatttcgtcggcgataacagcggacgcaggatgagcaggaacaccatcagagatggaaatgatttggatgctctccaactccatggaacgagctgaagaagagttcatgtctggcaatgagatcacccggcgtatgttcgctagcacaaagtagaggagctacctgtgcgatccataggggcagtgtcccctgttctcaccgcggagcctcctagtaccattgccaacctggcgctcaagccacatcttaagaaccggg

SEQ ID NO: 17125 - DNA, 353 bp, Glycine max
  Clone ID: LIB3049-054-Q1-E1-A1
taatggcggaaagccaaaattccgccatataaacacgccagtgcaccttatggggccaccatggcgggcttcccttcataaatagcctatggcggttggcaaaacatctgccatgccatggccgctatttaataacactgtataccactatgcatggatggtcatgattaatagtttgtaatcacatgatcatttagaagtcaagtgcatttaacttttaatcttgaccattgaaataaaatccaattgtgtgaattttctcattttttacaagaaccaagtctaggaatattgtctgatatgtatgaatttctcttagaacttgaatggctgttgaatttttgctagatgtt

SEQ ID NO: 17126 - DNA, 362 bp, Glycine max
  unsure (1)..(362): unsure at all n locations
  Clone ID: LIB3049-054-Q1-E1-A10
ggaacctttgcaatccattcaatcaagaatcaacaagttccttttgggaagcaaaaaccgaaatacttcgagatggcccgtacaaagcaaactgctcgtaagtcaactggaagaaaagctccaggaagcagcttgcaaacaaggctgcacgtaagtctgcaccaacaactggtggtgtgaagaagcctcatcgttatcgccctggaactgttgctcttcgtgagattangaaataccagaagagcactgagctcctaatcaggaagcttcctttccagaagttggttcgtgaaattgcccaggatttcaagactgatctgcgtttccagagccatgctgtgcttgcattgcaagaagctgct

SEQ ID NO: 17127 - DNA, 159 bp, Glycine max
  Clone ID: LIB3049-054-Q1-E1-A11
gatccaaaggggcacctttgggggccagccaatcaagatttaacttgtgcatggatggttgccctgatggaactacttcgacatcgtttgtgtttcccacagtgctcgttggtcttctgcaagagggtctctggatatcctgcgttcggcaacgctgca

SEQ ID NO: 17128 - DNA, 312 bp, Glycine max
  Clone ID: LIB3049-054-Q1-E1-A12
gggggaaagcctgacaagaaaaacgaatgatggtgaaagtggcaacgtacttcgcgatgacgcttggagccttcgtgttctggcagtccatggacatactccatgtctggatcactcttcgtcaagacgaagcgaacgagaggttggagaaggaagcggagatcagaacggttagatatgaattattgcagcagcaagccagtcagaatgattctccttcgtgaaatcgaattatgttgtaattttgctttgtaagttccccttgcgtctgtgtttccaatgcaatgtcgtgtgctcaaataaaatctgcta

SEQ ID NO: 17129 - DNA, 192 bp, Glycine max
  Clone ID: LIB3049-054-Q1-E1-A3
agggggaccagttcaacccttgaatacctcacccaattaccaaggaagccaaatttggcaacaacccaattcctaatttcccccctaatttggctaataaggttaattgcaaaaaaccctgtgcccccccaaccgaaaaatcccaacccgaccttaattccaacttttggcaattcccaacctttaaacccc

SEQ ID NO: 17130 - DNA, 173 bp, Glycine max
  Clone ID: LIB3049-054-Q1-E1-A7
gggggacaagacgagcaattgccgtatttggtcagctgtgcacgttggcatcatgagagcaatcttcgaatatccattgtcatggatagatggactgcttagtatctcccatcacctttacagtcgaccgagttcccgctaaacgcagcagtttcaatagtggcatttccgag

SEQ ID NO: 17131 - DNA, 302 bp, Glycine max
  Clone ID: LIB3049-054-Q1-E1-A8
gctctccgtcaggttcatcgtcccactttcttctccttttaaggtttcctttttgtttcacctttccagatctgcatcttccattttttaggattaagcggtgagattcatgaatctgagaaatgtcagattcttctcgggatgagaatgtttacaatgcgaaattggcggatcacgtcgaccgttacgatgagatggttgagttcatggacaatgtaccagacactgtggaagttgaggagttgacggtagatgagacaaatcttctctctgtggcttacaacaacgtgattggtgctatg

SEQ ID NO: 17132 - DNA, 290 bp, Glycine max
  Clone ID: LIB3049-054-Q1-E1-B11
aggggaaacaatcaaaatgacatttaaagagaatgccgataggaactaaggaataatatttctatctaaatggtgaaccgcatctcatactaggttcatctcatcatcaatttgattgttttggtaacatggcaaaggcaaatggaaggatataaatgtttgagcagatatcggtttatgtgatgaacatgtcacctcgaatgactgtgattttagatctcaatcccattatcatgatggaaacgggcactgtgataacatgatgatctgtaactgtattcagcactgtg

SEQ ID NO: 17133 - DNA, 361 bp, Glycine max
  Clone ID: LIB3049-054-Q1-E1-B12
gactcccactgcatcttcttcaaattcctgtcctgaagatgacagcaaagtggtatctcattgtgtgtgttgtagcgatctgggccgttgatctgggttcatcatcacaccatgcccgtgccccagcaccagcaccgtcagtggagtgttcaaacctggtattgaccttatcggattgcctcaccttcgttagcaacggcagcaccgtcaccaagccacagggaacatgctgctcttccttgaaaactgtgctcaacacagcccctaagtgcctttgcgaggctttcaacagcagcgctcagttaggtttagccatcaatgtcaccaaggctgtcacgcttcccgctgcttgcaaactctc

SEQ ID NO: 17134 - DNA, 276 bp, Glycine max
  Clone ID: LIB3049-054-Q1-E1-B2
cgggactggaacattgtctcagagataccactttaccatgatattggaaggactcaataagatcgtcacgaccgtcgggatagtattaggcactgactgaaatcggatggcacatggccaataatcgtcttgtcgcatgcccatagatcggttggcggcatacagccgtgtgtgactgaggactaacctgctgatatatccactgcctttagcgcatccattgacactgcatatcctatatgcatctgccgcttcatcgattcgagcctactcacg

SEQ ID NO: 17135 - DNA, 327 bp, Glycine max
  Clone ID: LIB3049-054-Q1-E1-B3
aggggaaagcaaccggggacaagaaaatcctcaaccattttccctcgtagccaaacactctgaaattctcagttatgtcgtggcaagcgtatgtggatgatcacctactgtgtgaaatcgaaggtaaccacctcactcacgccgctatcatcggccaagacggaagcgtttgggctcagagcaccaacttccctcagttcaaacctgaggaaataactgccatcaataatgactttaatgagcctggattacttgctccaactggattgtatatcggtggcaccaaatacatggtcatccagggtgagcctggtgctgtcattcgag

SEQ ID NO: 17136 - DNA, 409 bp, Glycine max
  Clone ID: LIB3049-054-Q1-E1-B4
acaacaaaaggggaaggaaaccgattcaattcaccatttcccctcggcccggcttgttcaaatttaggagcgggaatcagacagagagagatgtcggtatcacccgtggacgtcttgcctaggagcgaaagtcatggcgcataagacaccctcatggtttcgttgccaagcccgagactctccctgatgccaccgttaatttgatggtctggcattgcactattcctggcaaggctgggactgactgggatggtggatatttcccactgacaatgcacttcagtgaagattaccctagcaagcctcccaagtgcaaattccctcaacgtttctttcaccccaatgtgtagccatctggaactgtttgcatgtcgatacctaatgaagatagtagatggagaccagctat

SEQ ID NO: 17137 - DNA, 372 bp, Glycine max
  Clone ID: LIB3049-054-Q1-E1-B5
gatgtgagcagacacaatatacaaatcttcaacaggttgtttttcttggaagaggacctgcgtgctggaaaaatactcaacatgaagttcgtcaacaacacaaaagccacagtcccgttgctaccgcgccaaatttcgaaacaaataccgttctcagaagataaaaagaagccagtgttggcgatgcttggcgtggaagcgaactcaagcaacgccaagatcatagcggagaacattggtctttgccaagagcctgcaacggatggagaaaggaaacactgcgcgacttcgttggagtccatggttgatttcgtcgtttccgcgctcgggaagaacgttggtgctttctcaacagagaaagaaaggaaactg

SEQ ID NO: 17138 - DNA, 413 bp, Glycine max
  Clone ID: LIB3049-054-Q1-E1-B6
gacattcatattttccttgcgtttccctttcattttccctcactttcacgctcgccaaacgcccctctctctcctccaatggccgaccagctcaccgacgaccagatcgccgagttcaaggaggccttcagcctcttcgacaaggacggcgatggttgtattactactaaggaacttgggactgtgatgcggtcactggggcaaaactcaactgaggcagaactgcaggatatgattaatgaggttgatgctgatggcaatggaaccatcgacttcccagagttcctcaacctgatggctcgcacgatgaaagacaccgactccgacgaagagcttaaggaggctttccgtgtgttcgacaaggattagaatggtttcatctctgcaactgagctccgccatgtcatgacaaa

SEQ ID NO: 17139 - DNA, 398 bp, Glycine max
  unsure (1)..(398): unsure at all n locations
  Clone ID: LIB3049-054-Q1-E1-B7
agggggaaacttgaagtgccatcggataagtggtggagtttgtttatttgattgattttgcaaatcaattgaatgattggatccccaatcaccccacaaggtgtgattgaaagaaaaaggggcatanggaaagttgaagttgaagtgaaaaatatgcagagtgataaggatagagaagaggacatggacaggctaagtgacttgcctgactttgttttgcttcatataatgaaatttatgagcatgaaacatgctgttcagacttgcgttttgtctaaaagatggaaggagctgtggaaacgtctcacgaatttggcgttgcattcctcagactttgccgaccttgcacatttcagcanatttttatcatggggtcctgtcgaatcgagacagctcca

SEQ ID NO: 17140 - DNA, 360 bp, Glycine max
  Clone ID: LIB3049-054-Q1-E1-B8
gggtcgtcaaagcgcgagcaagcatggaaaaaccctagctcgcgttcagctttcgtcttttacatcaggatggagtctcaggttaagcacgcacttgttgtcgaagttatgggtcgtactggatccagaggacaagtaacccaggttagagtgaaaattttggatgatcagatccgtcacatcatgatgaatgtgaaaggaactgtgcgagaaggagacattctcaccctactcgagtctgaaagggaagcaagaagattgcgctagatggtttcttttggcttgcctccaaattctaacaaaacagtgtgaatttgttgatttaaacggtagtcggtggatgtcaaacgttttagcacc

SEQ ID NO: 17141 - DNA, 167 bp, Glycine max
  Clone ID: LIB3049-054-Q1-E1-B9
ctcggcactttctttcaatctatcgatcacgccgctcagtgcaaatttttccgtcttcatctactgggttcttcccctatcccccatcgtctcagatggatccacttatcgtccgatcgcgacgatcggttgcttcaatctcaatgtgtaaatggtacggctcgagg

SEQ ID NO: 17142 - DNA, 317 bp, Glycine max
  Clone ID: LIB3049-054-Q1-E1-C1
ggaaacagagagtgatttcagtgagtgatcggtgttcacttgatctcatcataatcgtcagcgtcaattgaagaagatgccgatcagaaacatcgccgtcggaaggcctgaagaggcgactcaccccgacacgttgaaggcggctttggctgagttcatctcaaccttcatcttcgtgttcgccggctcaggctccggcatcgcctacaacaagctcaccgacaacggcgctgccacccctgccggcctcatctccgcctccatcgcccatgcattcgccctcttcgtcgccgtctccgtcggcgccaacatctccg

SEQ ID NO: 17143 - DNA, 368 bp, Glycine max
  Clone ID: LIB3049-054-Q1-E1-C10
gggcccatgacgacgtcgtccggttccgtgaagaacgcgatgcccccaggcctccaagaacccaacatcaatgccgaaccctcttcctccgccgacgattgctccaactccaacacgaagcccatcgtgttggtcaccaacagtggcggcattgagtctccgggcctcgttcacctcgtcgaagccctcgtgctccagggcctctgcgacgtccatgtctgcgttcctcaatcggacaaatcggcttcggcccactctgtcactcgcggagtaaccgttgaagctttttcggcagaaattaatggcgccaccgcctttgaagtttcaggaactcctgtggattgtgtatcactagcgttatctggggc

SEQ ID NO: 17144 - DNA, 314 bp, Glycine max
  Clone ID: LIB3049-054-Q1-E1-C11
agggggcgtccatccaacatcatcacgttcgcatgatgacgttattacggttttacacatgatgacctgcgacatcgactggccttcttcttatgcgcatttctgcgtcatctccatcctgcactccttcatatcagtcacatgtagtgggctgattatgtcccacatcaacgatgtccacatcttcggccacggactccagggcgccagcaagctctagggatgcatgcctcactaccagcttctcagctcgacctccgcttccatctccggcttgctccttgtcgcaatttcgtgcctcctcttcatggtca

SEQ ID NO: 17145 - DNA, 394 bp, Glycine max
  unsure (1)..(394): unsure at all n locations
  Clone ID: LIB3049-054-Q1-E1-C12
gggagaggtgaattcgcagacgaacattccgctcacatcgcatctgtaacaatggaagcgcgccatgcaactcttggtcggcgaacgttggaggaaattcggcaaaagagggccgcggagagattgagtaaaacctcttcgggaccagatctcacgcaggttcccagcacctccgagattgcgggaatgagcaagtccgagagcgcaaataagctctctgagacagatcttagtgctctattgtctcaattgaaaggactgcaaaagaagaacacggagttggaggaagaaaacacaaaaattagtttaaagcttcaaacgatggaaattgataatgagacaatgcacaagcanttaaatgatgtggaacanaatacagtgccatctctaagga

SEQ ID NO: 17146 - DNA, 231 bp, Glycine max
  Clone ID: LIB3049-054-Q1-E1-C2
agaaggaacaggaggattcaatggatgacccagttgcctctgatgccgacgaggacgacgacgatgctgattcagctggccattacaccgatgctgagtcaaagagcgaagctggaggacacaccacggcacatggtgtgcatgattggctcgatgaagtttgcactgcagctacctagtcagcggatcttatatcccggaaagttatatcattctcagttgtagtgtttc

SEQ ID NO: 17147 - DNA, 353 bp, Glycine max
  unsure (1)..(353): unsure at all n locations
  Clone ID: LIB3049-054-Q1-E1-C3
caacaaaagggggatttagcgtatttgccgttttgccacttcgaaaccaaattttcatccctcgtcagcatctgtgatcncttctcctcacaatgagcagatcacggcaaccaccggatttgaataagtacatggacaagaagcttcagatcaagccgaatgcaaagcgcatcgttgttggtactctccgtcgcttcgactagtttatcaacttacttgttgacaacactgttgaagtcaatggcaatgagaaaattgacatagggatggtggcaatccaacgagatactttagtcacagttgacgctcttagacctgtgaacaagacctgaattcagtggcttgtcaacatt

SEQ ID NO: 17148 - DNA, 58 bp, Glycine max
  Clone ID: LIB3049-054-Q1-E1-C4
accaaagggacaccaaacgggggaatttccaaatttcccgttcgtcaactttcccgga

SEQ ID NO: 17149 - DNA, 243 bp, Glycine max
  Clone ID: LIB3049-054-Q1-E1-C6
gacgttcacattcaggaatcgttttcttcagaaaatttgccatcgttgagggaagcgcgagagccttcgttgttcaagatgagagctaagtggaagaagaagcgcatgaggaggttgaagaggaagcgccgaaagatgagacaaagatctaagtaggtgcttgaacaaggagtggagatgatgtgcttttccatctgctaccagcttcatgacattttatgctgtcatggctcttatgatgat

SEQ ID NO: 17150 - DNA, 406 bp, Glycine max
  Clone ID: LIB3049-054-Q1-E1-C7
gttcttcatctttacgatagagccctttcttctcttcccccattttttcctcattcttcctcgcctagctagctccagaaaattaggatctgcttcagatctagtgtttccctgtcccaaatcacgagtccattgagtttgattttgtggatgaaaagcatagatagggcttttgcaaaactctccaatgtttcttgaaattatatgaccatgcgtcgaattcgtatgctgcactccttctccgtcgtgttcctctactggttctacgttttctcatgaactccctcttaaatccgtgattaattagatctatctccttagttaatccttgtcttttccaataattaagtagatctgcgtcacctttttggattagtttcatttttggttctgttatcaaatcaaa

SEQ ID NO: 17151 - DNA, 413 bp, Glycine max
  unsure (1)..(413): unsure at all n locations
  Clone ID: LIB3049-054-Q1-E1-C8
gggtgtctggttctgaattagttcagaactacattggagaaggttctagaatggtcagggaactttttgttatggccagggaacatgctccatcaattatcttcatggacgaaattgacagtattggatctgctcggatggaatctggaagtggcaatggtgatagtgaggtacagcgtactatgctggaacttctcaatcagttggatggatttgaagcttcaaacacgatcaaggttttgatggccataaatcggattgatatcctggatcaagcnctccttagacctggacggattgaccggaagattgaatttccaaaccctaatgaacagtctcggctggatattttgatcatccattcatgaagaatgaatttaatgcgtggcattgatctgaagaagattgccgag

SEQ ID NO: 17152 - DNA, 274 bp, Glycine max
  Clone ID: LIB3049-054-Q1-E1-C9
gggcccactgaagttacttgtggtggtaatgcactgaagttttatgcttctgtgcggctaaatatcaaaagaattgggtttgtcaagaatggtgaagagactttaggaagtcaagttcctgtcaacgttgtgaagaacaatcatgcccctccatttaaaactgcacactttgagattgagttcggcaacggtataagtagagaaacagagatcatagagttgaccgtaaaatacaaaatcataaagaagaatggttcactttttgaatataatg

SEQ ID NO: 17153 - DNA, 364 bp, Glycine max
  Clone ID: LIB3049-054-Q1-E1-D10
tggcattacccagagtaataatgatgtgaacagtgaattatcattttgtacatcataacaatctgcaatggcctctgctgaaaatcatgatgcttctattcacactgtgcatactattaattcagaaggctatttgatggatcagctctcacttgtcagagaggacacataccattctttgagttcatcatcatggatatgtggtgtgatgtcctcacaacgtgtttcatctatatttcatacttcaaataatggatagcttgaatggtcgtctgaaccatccaagaacatcaaatgtagggccaggccagtggaaagttgtacgccttggtcactggatagacaactgatccaagatcgtatc

SEQ ID NO: 17154 - DNA, 404 bp, Glycine max
  Clone ID: LIB3049-054-Q1-E1-D11
aaaaaaacaacaaaaggggaaaatccagaaaagaaaaaggaaaccctagcctggaaaaggtcaaacatcatcatgtccgacaaaaagcacaatttcaagtcaaaggcagacgccggtgcctccaaaacctaccctcagcaagccggtaccattcgcaagaacggctacatcgtcatcaaaggacgcccctgcaaggttgtggaaatttcgacttccaaaactggaaagcacggtcacgccaagtgccactttgttggaattgatattttcactgccaagaaacttgaggatattgtgccctcttctcacaactgtgatgttcctcatgtgaatcctactgaataccagctcattgatattgctgaggatggatttttgagtctgcctactgaaaatgggaacac

SEQ ID NO: 17155 - DNA, 347 bp, Glycine max
  unsure (1)..(347): unsure at all n locations
  Clone ID: LIB3049-054-Q1-E1-D12
ggcacacagtttactcactaactcactgtgagagcanagaagaagaagaatgaatgacgccggaaagagccacaaggcgaacggaaagctgtcgccggagactcggaaggatcggaagtcggcgacggngctgagcggatcgccgaagaagggaagccacggcgggaagttcacgtggatcggccacggctacgagcaagttgagatgccgcacggtgctatgggcgccaaggacccgaacttcgaggatcctgtggagatcgccaccgtgtgatcgcggtggtttccggtggccaagtccgtaaatagtagtaattggcgaaacgtgttttttcgtgttcaataat

SEQ ID NO: 17156 - DNA, 414 bp, Glycine max
  Clone ID: LIB3049-054-Q1-E1-D2
ggccttacaactttcgatatgaactttcaactatgaactttcaactcactcgaacaaaacaacaaaaagcttaaaaccagcaaattgaatcgctgcatctcattcacatcactgtcaccatcatcaaccacaacaccaacaccaacaacgctaactgcttctctacgctctctctctctccctctctctcaacttccagattcaagaagtagcagttactgtgcccttggttcctctggtaaacagtagtaccttgattttcatgactggtaaaacgagatccctgtttggcaaaacttttgatccttagtgtttggtgaagtagaaatattaaaaccgcagcttgagatgtgaagacatacaatggaaactacaagacggtggtttagtaagttcaggtcaaatgaataaatg

SEQ ID NO: 17157 - DNA, 279 bp, Glycine max
  Clone ID: LIB3049-054-Q1-E1-D3
tggcagtttcaaattttctgttccttcactttcccgagaaaaaaataacacttttcactttcttcactacgttcgcacttcgatatggcacgtacgaagcatagcgctcgcaagtccaccggtggcaacgcgccatgtaagcaactcgccaccaaggccgctcggaagtccgctccggcgaccggaggagtgaagaagccccaccgcttcacgccgggaagcgtggcgctgatggaaatcagaaagtaccagaagagcaccgagcttctcatcaggaag

SEQ ID NO: 17158 - DNA, 327 bp, Glycine max
  Clone ID: LIB3049-054-Q1-E1-E10
cggaaaacgagaaggtcctgctaactgaatcgatctcggaaccacctactcttgcgtctgtgtgtggcaacatgaccgcgttgaaatcatcgccaacgaccaatggaacagaaccacgccgtcttacgtcggattcactgacaccgaacgtctcatcggtgatgcggccaagaatcatgtcgccatgaaccccatcaacaccgtcttcgatgccaagaggttgattggtcgtagattcagtgaatcctctgttcagagtgatatcaaattgtagcctttcaaggtcattcctggtgctgctgacaagccaatgatcgtggttaacta

SEQ ID NO: 17159 - DNA, 383 bp, Glycine max
  Clone ID: LIB3049-054-Q1-E1-E12
cgtccgaacagaagtgagaagacgagtgaacgggggtctctgtgtagatgctgcatcctttcacagagctgtctcacgcccccagcgttcatgcattgtttcaccccttttcttctcctcacattctcctgaacttccttcttcatttcatcttcgtttatgtctatgccacacgatgacctctcaaacttcttccttctcatctcatccgccttgactctgcgacaactctctacagcgaccgtcagcgtcactgatccgcgattagtcgtagtctcatctgaacatgttagagatcttcaaggttttgtatcctagagatggctgaatctcacttattgattgatctacaccaggcctgctcttgagcttaagatctatgc

SEQ ID NO: 17160 - DNA, 376 bp, Glycine max
  Clone ID: LIB3049-054-Q1-E1-E2
gattctttgtcttttcttccccctttcctttccaccaccccactcctacactgcctgcattcctctgtcaaaaccctagattttcaaatctatggttttgttttcttaacctgttaccgacatgattcagaaactcaactcccacccttgctagtttcagttttctcttctcaatctaagcccctgcgtttttttttttttttttacattttccctcgctaacctctgccatggggttttcaatgctgattcattttcacctctaaaaccacttcctctcttaatttcttcaacttttgggcattcaaaactcatcttccttgtggtgtttctaggttaaacgagaccttgttcctcttgcaatcacttgacatga

SEQ ID NO: 17161 - DNA, 383 bp, Glycine max
  Clone ID: LIB3049-054-Q1-E1-E3
tgggacacaaatagtatctattagactcactagagtaattgcggaatcagctacaattttctaataatggcgaaagacgttgagcatgtcacagaccatggtgaatactccgcgaaggactacgatgaccctcctccggcaaagttgatcgacacacatgagcacataaagtggtccttggatagagccgccatagctgagttcatagcaacactcctttttctttacatcaccgtgttgaccactattatctacaatagacagagtgacatcataatccccggtcacaacgaatgtgactgcgttggcattttgggcatcgcttgggccttccgtggcatgatcttcatccttgtttacagcactgccggaatctctggtgc

SEQ ID NO: 17162 - DNA, 318 bp, Glycine max
  Clone ID: LIB3049-054-Q1-E1-E7
gaagctgaaggggtttcttttttaggggtagtacattgattgtacttccagttattttatcttctgagattatatttccaattttgctgtgaaaacagtaatagcgattgatttgaaactgatacatacctgagagcatcaaggaatcgacgaatagaagattcatttgtatttcttgttgatatggaaactgatgtttctatcatgtgtgttgcgttttcacaatccttagttggacaaaacccaagttctccatctgtctctctgctatggaggtgttacacccatcacattgtgcattacaagtctattgcgctg

SEQ ID NO: 17163 - DNA, 249 bp, Glycine max
  Clone ID: LIB3049-054-Q1-E1-E8
gatacgcaagaggtttatccaagagcgatgcctcagtcattgggagaaatgctgcagcagcattcatcgtcatgacgacgtgaaaattgcgctaacgtccgaatacctaattctctgccagcttcatcttactcttcagtttcaaggagtctactaccgctatatacatcaacttttgatgactacttcttaactgcttctaaaacctcacctacttcacatcattgtcctcctgtgtaatccaagtcc

SEQ ID NO: 17164 - DNA, 326 bp, Glycine max
  Clone ID: LIB3049-054-Q1-E1-E9
cgggctctcgtctcgtggaagtgtaagcaagcaaaaccctatcggctcatgctttcgttgttcgtgttttgcatcaggatggagtctcatgtgaagcacgcacttgttgtcaaagttatgggtcatactggatcagacgacaagtgaccaagttagagtgaagtttttggatgatcagaaccgtcacatcatgaggaatgtgaaacgatctgtgagagaatgagacattctcaccctacttcagtctgaaatggaatcaagaatattgcgctagatggtcacttttttttggcgtgcctccaaattcgaacaaaagcaatagtttt

SEQ ID NO: 17165 - DNA, 116 bp, Glycine max
  unsure (1)..(116): unsure at all n locations
  Clone ID: LIB3049-054-Q1-E1-F1
gcacgcgtccgaacaggagtccgtacagntgtcaagggactaccaaagggggcttccgggtttaagtttcccaaactcgttatgcacctcccttaggaatccacaattcatcttcc

SEQ ID NO: 17166 - DNA, 394 bp, Glycine max
  unsure (1)..(394): unsure at all n locations
  Clone ID: LIB3049-054-Q1-E1-F10
gatctgcaacatttttatctaccattggggtttcactgttcagtgtaactctcaagccatgtctccgggtcncgttattgacgcagccaccgaccccggcgccgaccaacaaattccctccgtcgacgacgcaatcctcaagaagaaagctcacccccaggaagatgacgctcccattgtcgaggacgtcaaggacgatgacaaagaggaaaccgaagacgaagatgaggacgatgacgacgatgacaaggaagatgacgcccaaggtggtgctgagggtgggaagcagagcagaagtgagaagaagagccgaaaagcaatgttgaagttgggactgaaacctgttactggcgttagtagggtcacantcaagaggacanagaatatccttttt

SEQ ID NO: 17167 - DNA, 286 bp, Glycine max
  unsure (1)..(286): unsure at all n locations
  Clone ID: LIB3049-054-Q1-E1-F12
ggaaaaaggaaaaaaacaaaaactggaagagagaaccatanaaaaatccaatcaaccaactcaattcatcccatccggtttatgtntatcttcagcgatgacctctactatttattaactgtcatatcaaangaaagattctgggagcaatggttatangcaaacttactggacctgtacaaggttcagtcctccagtcatttagcatatctacaatttcagagcttttgagtaaccaacactggtcagagctcaaaccccattttagaacaaccaaacctgcaat

SEQ ID NO: 17168 - DNA, 317 bp, Glycine max
  unsure (1)..(317): unsure at all n locations
  Clone ID: LIB3049-054-Q1-E1-F2
ggtgctaatcttatcttatccctctaatcactctagctgttgcaaatttctactatttttcaatggcttctgcagatgttgagttccgttgctttgttggtgggcttgcttgggtcaccggcaacgatgccctcgagaaagccttttcaatctacggcgacatcgttgaatcgaaggttatcaacgaccgtgagactggaaggtccagangattcggatttgtgaccttcgcctcagagcagtcaatggaagatgcgatcgcangaatgaacggccaggaccttgacggtcgtaacatcactgtcaacgaagctcag

SEQ ID NO: 17169 - DNA, 423 bp, Glycine max
  unsure (1)..(423): unsure at all n locations
  Clone ID: LIB3049-054-Q1-E1-F3
gaagagtgtgaactgcaaagggcttctccagcctagtttgttctaagatcttcttcttccatggaccagtacgagaaggtggagaacataggcgatggaacatacggcgtcgtttacaaggctcgcgaccgcgccaccaatgagacaatcgctctgaagaagattcgcctcgagcaggangacgaaggcgttcccagcaccgccattcgcgagatttctcttctcaaagagatgcagcatangaacattgttaggttgcatgatgtagtgcacagtgagaagcgattgtatctggtttttgagtatctggacttggatctaaaaaaacacatggattcatctccagagtttgtgaaagatccgcggcaagtaaagatgttcctttatcaaattctctgtggcattgcttactgtcattcacat

SEQ ID NO: 17170 - DNA, 300 bp, Glycine max
  Clone ID: LIB3049-054-Q1-E1-F4
aggggagggagacggtagcacatgagcttatacactaaactcgtagacaccttcactactggagtcgatggacaattcattgtgggaatcagctgagctgagtaagcatgattcaaaatggttgcattgtatcacacgggtgtgcccctctgaattctatgtcacacatgcatggcatacgtagtacctctgcttttcgttgcgcttctcgaaggcatctcaatgttgccgtctctgatatctggaactattggggagatactcgggaatgtcaaaacttgttgccatgacgaatgacat

SEQ ID NO: 17171 - DNA, 388 bp, Glycine max
  Clone ID: LIB3049-054-Q1-E1-F7
ggagctgggtttgttttcggcctttgatcttcgattctctctctttttctctcgcgaaaaccgtatcagcaatgtctggagaatcagccagcgctattcacaagggtcaagtcgatctcttagacttcattgactggtctggggttgaatgcctcaatcaaagctccacgcactctctcctcaatgctgtcaaacagggttatagagaagacgatggtttgcatctggagagtgatgcagacgatcatcttttgctctagattcctttcactcaagtcgttaaactttattcctttgttatcaaacgtcctgaagaagaatgcccaagacagtgaagctcttttctaagaaggagcacatgggatttagtaatggtaatgattttccc

SEQ ID NO: 17172 - DNA, 231 bp, Glycine max
  Clone ID: LIB3049-054-Q1-E1-F8
aggggtgcccacagtgcaacgtgacggggcctgacataatatcgatgcatatccaccaagacgctcgtcatcccaagatccccatccatgacgagaaagttgtcaatcgtcattcaatcagcatcgttccctagtcctccatacctcgcatcggtgttcgcggaaacccctcgaagtgatcacaatcgatcgtcggaatctttatgaccccaccttcattcgtagatcgca

SEQ ID NO: 17173 - DNA, 405 bp, Glycine max
  unsure (1)..(405): unsure at all n locations
  Clone ID: LIB3049-054-Q1-E1-F9
ggaacaaaacaagtgtttcgaatagattatcctaagtctttgggaatagtgctgcaatggcttcaagtcaggangaggtgacccttttgggagctactggaagcccatttgtgtgcanggttcatattgccctcaagttgaagggagttcaatacaaatatgtcgaagaaaatttgaggaacaagagtgaactgcttctcaaatccgacccagttcacaagaaggttccagtgtttattcacaatgagaagcccatagcagagtctcttgtgattgttgaatacattgatgagacatggaagaacaaccccatcttgccttctgatccttaccaaagagccttggctcgtttctggtccaaattcattgatgataaggtttttggtgctgcatggaaatccgttt

SEQ ID NO: 17174 - DNA, 61 bp, Glycine max
  Clone ID: LIB3049-054-Q1-E1-G1
gatttgtttttgtatttattttcaatggtcgttaatacaaacagggattcctttagatttc

SEQ ID NO: 17175 - DNA, 376 bp, Glycine max
  Clone ID: LIB3049-054-Q1-E1-G11
ggttccatttctcaacaacttctgctacttcctactccaaccgcacttctgctccgcaattatcatgggcaaggtcaagatcggaatcaacggatttggaagaattggccgtttggtagccagagtggctctgcagagagacgatgttgaactcgttgccgttaacgaccctttcatcaccaccgattacatgacatacatgtttaaatacgacagtgttcatggacactggaagcatcacgatgtcaccgttaaggacgagaagacccttctcttcggtgacaagccagtcactatttttggacacagaaaccctgaagagatcccatgggggtcaactggagctgacatcattgttgagtccaccggagttttc

SEQ ID NO: 17176 - DNA, 375 bp, Glycine max
  Clone ID: LIB3049-054-Q1-E1-G12
gatgtcaagatgattcctctgtcgcataatccagtctctgttcaactgcgtggaacaccctgtgactctcttcatccaattacgttccatccaattctgaataagcctcgttcttctgcctctctgttttggaactgcaaaaggagaaggaagaggaaaagctccattactatggcttctaatctcagaaccaacaatttcctgcgccatgtggaatcaatgaagcttcttccatcatgtgcaggtcacatttcacacttgaatgctgtgatacttggtgaatctctcgccactgaagaggatgatttcgttcttccaagtgatgactttgctatccaagccaatgttcagtctccagaacagtatctgaagatg

SEQ ID NO: 17177 - DNA, 335 bp, Glycine max
  Clone ID: LIB3049-052-Q1-E1-G1
ggcacagaattagggttttccaattcacagagcaacacaacgaaccaacaatggcgcagcctcagccgcagtcgcagccgcagcacgggcaagcagcgctggagcaggtgcagtgcttcggtcgcaagaagaccgccgtggccgtgacctactgcaagcgcgggcgcggtctcatcaagatcaacggctgccccattgagctcgtggagccggagatcctccgcttcaaggccttcgagcctatcctcctgttgggtaagagccgcctcgccggcgtcgacatgcgcatccgcgtcaggggtggcggccaacacctcccagatctacgccatccg

SEQ ID NO: 17178 - DNA, 278 bp, Glycine max
  Clone ID: LIB3049-050-Q1-E1-G5
ggcggagaacattcgtagagtccagcataagcatttcggcgccaatcataaagcctctgtctgagtctgaccattaattttaacatttttcattcgttcttatgataaaattaaaatcgtgcacaccaacaggaaacactatttgagttgaaaccatattggactgagaaacgattaagtgagcaacagaacactaaccagtactcatcattatctccttctccatctccatggcttccttacccagttttgctccttttgtacttctactgcatgta

SEQ ID NO: 17179 - DNA, 280 bp, Glycine max
  Clone ID: LIB3049-050-Q1-E1-G6
gacagcatatatatcaataatctattttatactatacctacattttgataattttctttgtagttgatagccatggctacccgtggaaagcttgaggttgacattgatctcaagtccaacgcagacaagtactggcaaacccttaggaattctactgaaatattccctaaggccttcccacatgattacaaaagcattgaggttcttgagggtgatggcaagtctcctggttctatccgccacataagttatggtgaaggttcaccacttgtgaaatcat

SEQ ID NO: 17180 - DNA, 276 bp, Glycine max
  Clone ID: LIB3049-050-Q1-E1-G7
ggagctagaattgaagttggccatataacataatacaacactatccttgcttcttgttagacatggcaactactacactcatgaagcttgctttcatgcttctcatgaaccttgttatctgcagcgcagaatcttccatcggcagaaagtccaatcctaacccacaagagttcgtgaagtcctcgtgcagggcaacacggtaccctgttctatgcgtcaagtctctgttggcctacgcaagcgtgattcgccgaagcgaccgacaactagccacga

SEQ ID NO: 17181 - DNA, 111 bp, Glycine max
  Clone ID: LIB3049-050-Q1-E1-G8
ggtaatagtggacgcgtgcatgttgtaagtttaattttgtgcatacatacttcatgacaaaggactgcttttggttcacaataagacttgctaatcattacttctcatgta

SEQ ID NO: 17182 - DNA, 275 bp, Glycine max
  Clone ID: LIB3049-050-Q1-E1-G9
ggaagtaagggatcgagcctcggaggagggaatcgcagcgaagtccactatgccgaagcaaattcacgagattaaggacttcctcctcactgctaggaggaaggatgcacgctctgtgaaaatcaagcggagcaaggatgtggtgaagttcaaggtccgttgctccaagtacctttacaccctctgtgtgtttgattctgagaaggctgataagttgaagcaatcacttcctccaggtttaagcgtgcaggatgtgtgattcttactgctgtatg

SEQ ID NO: 17183 - DNA, 288 bp, Glycine max
  Clone ID: LIB3049-050-Q1-E1-H1
agggactgatcgagcgagcagcgtttgtttgttccttcctcagtcgttgtgacagtgtgtgtgagtgagtgagtgagagcgacgatgggcgcgagcagcgaccccacccaagacggttccgacgagcagcagaagcgttcggagatctacacctacgaggccccctggcacatctacgccatgaactggagcgtccgccgcgacaagaagtatcgcctcgccatcgcctccctcttagagcagtaccctaaccgcgtggagattgtccagctcgacgactccaacggc

SEQ ID NO: 17184 - DNA, 356 bp, Glycine max
  Clone ID: LIB3049-050-Q1-E1-H10
ggagcaagagtgaagagcgaagagaatggctcccaagggtttaatctttttggctgtgttatgcttctcagcactgtcactgagtcgttgtcttgcggaggataatggacttgttatgaacttctacaaggaatcatgccctcaggctgaagacatcatcaaagaacaagtcaagcttctctacaagcgccacaagaacactgctttctcctggctcagaaacatcttccatgactgtgctgttcagagttgtgatgcttcactgttgctggactccacaagaaggagcttgtctgagaaggaaacagatagaagctttgggttgagaaatttcaggtacattgagaccatcaaag

SEQ ID NO: 17185 - DNA, 362 bp, Glycine max
  Clone ID: LIB3049-050-Q1-E1-H11
gataacataatacaacactatccttgcttcttgttagacatggcaactactacactcatgaagcttgctttcatgcttctcatgaaccttgttatctgcagcgcagaatcttccatcggcagaaagtccaatcctaacccagaagagttcgtgaagtcctcgtgcagggcaacacggtaccctgttctatgcgtcaagtctctgttggcctacgcaagcgtgattcgccgaagcgaccgacaactagccacgaccgctctgtcggtaagcatatcgaggagccgatcctccgcatggttggtgaagaagatgttgaaagcgagaggcatgaagcctagagaatacagagcggtgcaagactg

SEQ ID NO: 17186 - DNA, 398 bp, Glycine max
  Clone ID: LIB3049-050-Q1-E1-H12
cattcggaagaggaaggtttctaatgacttcaacatgatggatctgaaaatttacacatgtgaacaccctcagtgcccttacagtcaagttcgccttggtttccctgaccgaatttcaagggacaaccatcagttgatttgtgcttatagaggtacttcagattttgggggtccaagttttcctgttaatgagataaagccagtcgtacaccccccgtcctttgttcaacccaaatctactgctcagcctggtagtatggttccacctgttattgatctaactggacttgaagtttcagataatggccagaaaatgattactgaccttatgactaactatgacacaaatgttcgaggcaacaagaagacaagttcctgtaatcacttagctgcacaaa

SEQ ID NO: 17187 - DNA, 231 bp, Glycine max
  Clone ID: LIB3049-050-Q1-E1-H2
aagaaataaaggggtttcaatcaaaggttcacaaactggatgtctaccaatgtctatacactggggtcagaactggcagagcaatagctacctcgatggtcaaagcctctcctttaaagtcaccacaagtgatggcagaactattgtgtccaacaatgtggcggcatctggatggtcctttgggacacctacactggtgctcaattcggctagatggtgttgtccagagtt

SEQ ID NO: 17188 - DNA, 273 bp, Glycine max
  unsure (1)..(273): unsure at all n locations
  Clone ID: LIB3049-050-Q1-E1-H3
gacacagatgaagacatagagccttccaaaatgttcacgctatctcgcatgcaccctcgcacttccacttccaggcataggctgttgggagtgctgtcctctatgaaagttgaaatcggcgaccgtcttaaccattcagctggcatttctactgctacaaataacgatgctgccaaaggatatgcttccgatcgaatatttgctccttatactgtgtacaagggcaaatctgcattctcgttgatcncttgtcttccaactttcactatgttg

SEQ ID NO: 17189 - DNA, 274 bp, Glycine max
  Clone ID: LIB3049-050-Q1-E1-H5
ggaagcatcgttgtttatccattattaccaatagaattgaaaagaagaatctatatatataatataatataaaagctcgcttcgtgatcaacgattaattctgttgttgcagaatgcatatggctaattcctgagatggtaaacaatttctctctcacatttccgttgtttcctattcgctctttacaggaatacatatacgctttatgcagattctcgattttcttcgtctggtatttttttttcaatttctattattctcgctagattaggc

SEQ ID NO: 17190 - DNA, 271 bp, Glycine max
  Clone ID: LIB3049-050-Q1-E1-H6
ggtttcaatcaagggttcaagaactggttggatgccaatgtcaagaaactggggtcagaactggcagagcaataactacctcgatggtcaaagcctctcctttaaggtcaccacaagtgatggcagaactattgtgtccaacaatgttgccccatctggctggtcctttgggcaaacctacactggtgctcaattccgctagatcttgttgtccaaagttctaagtcacacattcaaatactactactatatagcataatagatatatggt

SEQ ID NO: 17191 - DNA, 121 bp, Glycine max
  Clone ID: LIB3049-050-Q1-E1-H7
gattgtgattcatttgcacatttggaaagtgcttgtttttctttttttcatttgcattgcagtgcaaacagcttgcacattgcagtggcttccactacggttatggccagcatcttggttc

SEQ ID NO: 17192 - DNA, 356 bp, Glycine max
  Clone ID: LIB3049-050-Q1-E1-H9
ggttcagttcttgaaggaaagcagagcagagaagagaagagagtttcaagaatggggagcgaagaggagaagggtgaattctacttgcgatactacgtgggccacaagggcaagttcgggcacgagtttctggagttcgagttcagacccgatggcaagctccgctacgcgaacaactccaactacaaaaacgacaccatcatccgcaaggaggtttacctcaaccctgccgttttgcgtgagtgccgccgtatcatcgccgaaagcgaaatcatgaaaggaagacgacaacaactggcccgaaccggaccgagttggacggcaagagctggagattgtgatggggaacgagcaca

SEQ ID NO: 17193 - DNA, 371 bp, Glycine max
  unsure (1)..(371): unsure at all n locations
  Clone ID: LIB3049-051-Q1-E1-A1
tggcctgngctgtgtcngaactcgctgccaattaccctaagtgtcaggaccttttcgcccagcacaacatcataaggttactcgtcggtcaccttgctttcgaaaccgtcgaggaacacagtaagtacactattgtcagcaccaaacccacttccatccacgccgtcgtcatcgccaacaacaacgtcaagaaggaagatcattttcacgacaatgaaaagaaagcacgaatgcctcatcccttgggtgataatagaccacganatctacatagagtaatcacaagtacaatcgcaatgcacgctgccaacaagcagggaaacgaaccanatcataatcatcagaccaatgggcaatggagtgataatgat

SEQ ID NO: 17194 - DNA, 377 bp, Glycine max
  Clone ID: LIB3049-051-Q1-E1-A11
gtcgttttttttcgttttcacctttctctttctttgttttacggtctttttccgttgtcgctttttctctttcttctttgttctgaatgacccactccccttcacgccgtcgtgtcgtcgctttcccacaatgaacaagaactcaaggcctcctcaccattcgcactaaagccatcaaccctttacttctctcctcacaaattatcgttactatccaaaaatgagcaaagaataacaatctcccccaagccttccactgcgagaactgtgacgacgtaggtggagtgagtgtagtggggcatgcggagaaagacagggaacgtgaagggttggggttgtagaccttggtgaagagcaagatggagaacgggtttggg

SEQ ID NO: 17195 - DNA, 333 bp, Glycine max
  Clone ID: LIB3049-051-Q1-E1-A12
gttcctctaccccctcgcgactattcatccagctcatggacaatatgaatgaaaagcctgagttgtttgctgtttctattgatccaaatttctctttttatctgcacagtgattttctgtctgtctttcctaacaaaaaggagccccatggcatcatactgcatagaaacaaacgccaatatggaaacttagatgagctttctgcaatatgctctgccatggaaggtgttaaagtagttaacggattggaatgtaagatagcttgcagctcatccaagatttcatatgttcttgacacacaagattttttcttccgaccaagaaagaaacgac

SEQ ID NO: 17196 - DNA, 344 bp, Glycine max
  unsure (1)..(344): unsure at all n locations
  Clone ID: LIB3049-051-Q1-E1-A2
ggcattggcatatattaatatggttgaggacatctcgtggggaatttgtgaaggctttcacttgtgagcttagaaaactgaagatgggtttcacaggggagttggtaagaagtgtcttctccaaaaatcgttctgatgggtctcatgaaaacaaagtgaggcgcaatagtgctaaaaatagaagaatgttatctgtgaggtcattcttgtgtggtgatgaattcaattcagtccttgcagagaatgattcagcttcagttaagagctctgaagtcacggtttcacagtccgtacatganggcttgtttaacgatgaacgagacactgaaagttaagaaactgtg

SEQ ID NO: 17197 - DNA, 397 bp, Glycine max
  Clone ID: LIB3049-051-Q1-E1-A3
aggcgtcagaaacgcatcatggggctccatgctctctcttaaactaaactaaaacgccgaaaaaaaacactttctctctttcacagtgcttcacagcagaagctacctctcctcttactcgctccgtttgctcagcaaaacggtttcttttctccaatgggtgcttcgggaaggtggtttaagtcacttcttccttttagaaagacctcaactgatcaagagaaaggtggtgacaacaagagtaagaagaagcggaagctatggatggcatcttcagaagggtccatgaagaatgttggtggtggtggtgctgctgctgcatctgattcttcccttacttatgcggtggctgtgatggttcccaaagatttcaagctcatcaagcatgaatgggctg

SEQ ID NO: 17198 - DNA, 348 bp, Glycine max
  Clone ID: LIB3049-051-Q1-E1-A4
ggcaggtagagagagcgagagaacaagaacataagggaaccacagcggcggtaacagaagaacaagcagagagtgggtcgagtgagaacgaagacggtgaagaaatcctctcggcaggtgatagagcgtcactactcgcgcatgaccctggacttccacacgaacaagaagcttctggaggaagtggcgataatcccgtcgaagaggctaaggaacaagatcgcggggttctcgacgcacctgatgaagcgcatccagaagggccctgtgcgcggcatctccctcaagctccaggaggaggagcgcgagcgccgcatggacttcgtccccgacgtctccgccatcaac

SEQ ID NO: 17199 - DNA, 349 bp, Glycine max
  Clone ID: LIB3049-051-Q1-E1-A5
gaaagcagtgaccacggagagagagagagaggttttgacgcaacacactttcactgagaaaggatctctatctaccaaggagcagaataaaacccttctctctggtaagtgaataagagaatggcttcagatcggaaacttcacactttcgaggaggtggcaaagcacgaccagaccaaggattgctggctcatcatttctggcaaggtgtatgatgtcacccctttcatggaggatcatcccggaggtgatgaggttttgttatctgcaacagggaaagatgcaaccaatgattttgaagatgttggacacagtgattctgctagagatatgatggaaaaatactaca

SEQ ID NO: 17200 - DNA, 118 bp, Glycine max
  Clone ID: LIB3049-051-Q1-E1-A6
agggaatgcaagtatccacacaaccctcccaacgattcaataacttcacacacagacaccgtgtttccaccacaccatagcatatagtactaatagattaaacgcccaagaaattaat

SEQ ID NO: 17201 - DNA, 305 bp, Glycine max
  Clone ID: LIB3049-051-Q1-E1-A7
cgaggagaaagggaaggatacgaagagagaaaaatggaacactagtgtcggaaaggcttaacatggcgacccgggagtgggccattcggacacggatggcttcgtcaacatatgggtcagatacgctgccttcgctgttctcacagtattcaatcgctagatgtggcagctctctaatcatttcagttggcatgacaaagcaatgctatatgagcaatatcactggaaacaagcgaggaacaagaatcagccatatgagttcatgtggaacaagacctgggacaagaaccaccgggaacattact

SEQ ID NO: 17202 - DNA, 309 bp, Glycine max
  unsure (1)..(309): unsure at all n locations
  Clone ID: LIB3049-051-Q1-E1-A8
gatattagggttttaatttaacgcagcttttgttttattagtatctccgtccctttcattacacaatgagcagaaacagcgatgaacctgcgatgactgaagaagcaccaaccaaacagtccctagcgaacatcttctctttgttccgcaaaatcaattttcaactccctttcctcccacccaaacctgaagaaccgaagcttgaggctcaggctcagcangagggtccgaagcctggccgtgtacagtttccgaaaagccaagtggcgctgattgcttcttcgcctctgcaagctgaacctgatgctg

SEQ ID NO: 17203 - DNA, 356 bp, Glycine max
  Clone ID: LIB3049-051-Q1-E1-A9
gaaaaacaagagattttgaatttgaaatactcccgctcccgtctccatatatttgcgaaccctttttctttgtgagagacccgttatcagagaatccagaaggcgaagaagaagaaacgacagagcaagaaggaaatggcgaccaacattgggatcatggatgcggcttacttcgtcggcagatctgagattctttcttggatcaactcaactctgcaactcaatctctccaaagtcgaagaggcatgttccggcgcggttcactgccagcttctcgatgccgctcatccagggatcgtgcctatgcacaaggtcaatttcgacgccaagagcgagtatgagatgattcagaacta

SEQ ID NO: 17204 - DNA, 83 bp, Glycine max
  Clone ID: LIB3049-051-Q1-E1-B1
aagaaaaagggacggataggcagaaggagaaatggtgacgcagggccgaaatgcttaacgtggggaaccaggactttgccatt

SEQ ID NO: 17205 - DNA, 385 bp, Glycine max
  unsure (1)..(385): unsure at all n locations
  Clone ID: LIB3049-051-Q1-E1-B10
ggagaataagccgttgcaattccctccacacgttccagttaccttatctaccacctcagccttttctcttcactcttcctttccctccaaacaaacaaaagcaaccattaccaccaccaccttgaactttcccagttacactaccaccactttgattccaaataaccaccatcaccatgttcacggctagtaaactagccttcacattaacaccacctcgtccatgcactgcacccttgacaccaatctcttcagcttctggtgttcacctcattcagttcaatggcaggcacttatgcctccgccaaaggctgtttctactttctcctatggccactgcagatcaacaagggaaagttgaagaatttgaagatgattcanatac

SEQ ID NO: 17206 - DNA, 387 bp, Glycine max
  Clone ID: LIB3049-051-Q1-E1-B12
gaccttcagcccagttactggttcacatggttatgatccttggttacagaatgctttatttccacgattgtccggtggacttaaagctcatgagagtgctactcagaatgaaatgatacatgggagtcaaagtgcatctgctagcaatcatttgcttaagacttctccggctaacaattggtccaaaaatgaatggcctgtaaaaggtactgtggaaggcttagggaattcatctgttgccaggccccataatggcaatctacatccaacctcagatgtacagtcattttggtcatcatttgattagaaagatgatatgatagtaacagggtaacaacttgataaacaccattgttctcttgagacaaatagtctcatttggggaaa

SEQ ID NO: 17207 - DNA, 321 bp, Glycine max
  Clone ID: LIB3049-051-Q1-E1-B2
ggttctagtgtatgtgattgttgtgactcgttcttcttcgtcgttatcttcttcttttgttgtttgtgtgtttgttttttctctcacctgaaaatgtcttgctgcggtggtaactgtggttgcggaagcgcctgcaagtgcggcaacggctgcggaagctgcaagatgtacccagacttgagctacatcgagtcaaccaccaccgagaccttggtcatgggagtggcaccagttaaggctcaattcgagagtgctgaaatgggtgttcccgctgagaacgatggctgcaaatgtggagctaactgcacctgcaacccctgc

SEQ ID NO: 17208 - DNA, 368 bp, Glycine max
  Clone ID: LIB3049-051-Q1-E1-B3
gatgaggcagtgtctgaaatgtgaaacttgattaggcaaaatggtgagtgaaaatggtgaatagattcctcattctaaaattaacttcatcttttccattcaccaaatccattttctttctctgctgcaacatacatagcccaatgctctctttttctttaacccattcactttaaggtttgtttggtaggatgaatggagaagaaaaaacaccggctttggctccaaagagattcatcaatcatcagatacatcaaatgctgtccttagtcttctgaaaacctacggatgctccgaaagccagttctctgtcttgccaagaggttactctcattgctcttaatcaaatctcactacattaaattctg

SEQ ID NO: 17209 - DNA, 344 bp, Glycine max
  Clone ID: LIB3049-051-Q1-E1-B4
gacaacaattccacaacgcgatctctctctattctttgaaaccaaggttcaaactctgtcttccctgggttctatttcgaaatcaacgacgatgagttccacagaggcagcagccacagagaagaaaggtggaagagggaaaccgaagacttcaaagtccgtttcccgttcctccaaagctggccttcagtttcccgtcggccgtgtcgctcgctacctcaaggccggtcgctacgcccagcgcgttggctccggttcccctgtttatctctccgcggttctcgaatacctcgctgccgaggttttggagcttgcggggaacgctgcgaaggacaacaagaaga

SEQ ID NO: 17210 - DNA, 194 bp, Glycine max
  Clone ID: LIB3049-051-Q1-E1-B5
gactgataagcaaattgatattagtagttctgattggtgttagaggtgttctttttccccagttaaatgattttacactgttgtctgttgttgtaacacatgttgctttttggattctccgtacaaatagatttggctactgtttacgttttcaatgttgtattatggtccgtctgtttcgataaagtgttccc

SEQ ID NO: 17211 - DNA, 370 bp, Glycine max
  Clone ID: LIB3049-051-Q1-E1-B6
ggtaccaaagctgaatagccattcgtattgtcgcagagaaagaaaaccctagctcaccgtttcaagatgcaaatcttcgttaagaccctcactggtaagaccatcactctcgaagtcgagagttcagataccatagacaatgtaaaggccaaaattcaagacaaggaagggatcccaccagatcagcaacggctcatttttgctggcaagcagcttgaggatggacgtacccttgctgattataacatccaaaaggagtccactctccacttggttcttcgtctccgtggtgggatgcaaatctttgttaagaccttgacgggaaagacaatcacccttgaggtctagagctccgacaccattgacaacg

SEQ ID NO: 17212 - DNA, 146 bp, Glycine max
  Clone ID: LIB3049-051-Q1-E1-B7
tgtgcgagagagcgagcgagcgagcagtttcaaatagaggatttgggattgggaaggccagggactcgccgttttctgatgctcatcttcgttgattcactcactggtcatactatctctctcgaactcgctacttctcataccac

SEQ ID NO: 17213 - DNA, 353 bp, Glycine max
  Clone ID: LIB3049-051-Q1-E1-B8
ggcgtgttggagtgtttggcaataaaaggaggagacgacgacgcggggaatctccggtctccaccgacatcccttctcttccaaatcctgtgatcccattccaatccgttccgttcagctcaatctcaaaatctcaatggccgataatgagcaaccgaataacgaggaggcaagtcctcttctccaccagccccatccccaacccatatccgaaccaccaacgccacctgagactcccgagtttctcctcggctggaccgctgatgggctccctctggcccacgccagcgtcgtgggccagcccatgggcctcgccccttggaactcctccatctgcgcctgtcccggccaac

SEQ ID NO: 17214 - DNA, 392 bp, Glycine max
  Clone ID: LIB3049-051-Q1-E1-B9
gaagaaaatttaggatgggtgggtgcatccagaagcaaagcaaaggcatgatgaggttattagggttttagagatgatgaaatgagaagtcgaatggcatcatcgtcatcggcatttctggtgatctgcatcctgcactcgttaatagcagtgacatgtggggggctgatgatgttctacatgaaggaggtctacaccttcggccacggagtgcaggccgccaccaagctcttgggatccacgccgcacgaccagcttctcatcaagacctccgattccttctccggcttgctccttgtcgcaattgggttcctcctcttcatggtctcttttgttaaagatcgtgactttcaagtcttcttcgccaagggttgcacgctcctccacctctt

SEQ ID NO: 17215 - DNA, 379 bp, Glycine max
  Clone ID: LIB3049-051-Q1-E1-C1
ggctgctgcttctttttcttcttctttttttctctctctctttcgcagcttcgagatcggggacgagccagcgatggcgaaatcaagcgccgacgacggcgagctccggcgagcttgcgacgccgcaattgaggacccgaggcagaagatcgtgatggcgctgcgcgtcgccaagagtcacggcatctttggaaaatcttcctctaagcttggtcgcatggccaagcccagggttctcgctctctccattgttggtgacgacgtggtgtttcctgcagcgaaatcgaaggggctgaggacatcggcttttcttcgagttttgaagtattctacgggaggagttcttgaacctgcaaaactatacaagctaaagcacctg

SEQ ID NO: 17216 - DNA, 204 bp, Glycine max
  Clone ID: LIB3049-051-Q1-E1-C10
ggtgctaatcttatcttatccctctaatcactctagctgttgcatatttctactatttttcaatggcttctgcagatgttgagttccgttgctttgttggtgggcttgcttgggtcaccggcaactatgccctcgagaaagccttttcaatctatggttacatcgtctaatctaaggttatcaacgaccgttagactggaatgt

SEQ ID NO: 17217 - DNA, 358 bp, Glycine max
  Clone ID: LIB3049-051-Q1-E1-C11
ggagagagagagagagagagagagagagagatagatggtgtctctgaaacttcagaagcggcttgccgctagcgttctcaagtgtggtagaggcaaagtttggcttgaccctaatgaggtcaatgaaatctccatggctaattctcgacaaaacataaggaaattggttaaggatggtttcattatcaggaagccaactaagattcattcccgttcccgtgctcgcagaatgaaggaggccaagaggaagggacgtcactctggttatggtaagcgtaagggtacaagagaggctaggctccccaccaaaatcctttggatgaggaggatgcgtgtcctcagacgattgctccgcaag

SEQ ID NO: 17218 - DNA, 393 bp, Glycine max
  Clone ID: LIB3049-051-Q1-E1-C12
gatataacactgtcactcttacaatctcagctcatagcattcttcttcttccaacgagaatcagtctttgtgttccaaatggctcgtacgaagcaaacagcaagaaagtccaccggaggaaaagctccaaggaagcagctcgccaccaaggcagcacgtaagtccgctccggcgacgggcggcgtgaagaagccccaccgtttcaggccggggacagtggctctgagggagattcggaagtaccagaagagcacggagcttctcataaggaagcttcctttccagaggctcgtaagggaaatcgctcaggacttcaagaccgatctacgcttccagagcagtgctgtctccgctcttcaggaagccgctgaggcctacctcgttgggctcttt

SEQ ID NO: 17219 - DNA, 276 bp, Glycine max
  Clone ID: LIB3049-051-Q1-E1-C2
gagtgcagaatcagagacagatggatgaggagaatggctacagtgggagtatcagcattaacgtggagactacgatagcagagagatccgtgtggcacaggaagtgccctttagcggtcgatacgtcatgtgaggaccatccgcattctatcgttatcgcgctggtcgtccccaaccctcacggcatccttggcaaatcctcctctaaccctgctctcatgtccacgcccagagttctcgcgctctccattgttggtgacgacgtggcgtttcctg

SEQ ID NO: 17220 - DNA, 162 bp, Glycine max
  Clone ID: LIB3049-051-Q1-E1-C3
acacagagttgcaagagaaagataaaagaagatggcgactcttgattccgacgtgcctatggttcccgccggcgagccctcgagcagcgccggtccttctttcaagaagcccaagcgcttcgagatccagacgtggaacgccgtcgctctctgggcttggga

SEQ ID NO: 17221 - DNA, 354 bp, Glycine max
  Clone ID: LIB3049-051-Q1-E1-C5
ggcacaagtttgttgacatagctataagcaatatgatgaaaataaatgtgcttgttttgtttgttgctacagttttggtagcatatgaatgccatggctcagactaccataagttccctctccaaatgaaaactgggtttggtgggcaatacagcactgaagtggcatgtgccaattggtggcatggtgtggaaccaaacaacgtagtcaagtggcaaactgttcctgcagcttgccgatagtacataactgactacgttctatgataccaatatacatcagattctaaaacagttaaccatgaagcttatttctatgctaaattcctcaaactcactaacacagatgtctttg

SEQ ID NO: 17222 - DNA, 345 bp, Glycine max
  unsure (1)..(345): unsure at all n locations
  Clone ID: LIB3049-051-Q1-E1-C7
gaggtgacttgttataaaacacttcatcactttgtgttttggatgtggacgtagaataatagatctgtattctgggtttgagctctagacttcttcatcctcttcttcctcttgaaatgttctcactccatcagaaatccacactttcaagattatgccttctgcttattctggttagcacatgatacataccagtcgcattagctgatgcaccctttctcaatcctctaagctagactgaaaaatctgtgatatcatgaaaccccacagagtctanctcgatatggaatacctcttcagttctcgcatcatggatcgaacccaagtccacaaactgatttgggc

SEQ ID NO: 17223 - DNA, 352 bp, Glycine max
  Clone ID: LIB3049-051-Q1-E1-C8
gcagtgtgttgagtacaaagaatgcatgacgaaaggggcatcggagagatagaatgataatagatgagtggtggtcgactttgtccattgcttggagaattatggtactaatgctgggaagcactggatcctgacagcttcgactggtcctttcagtacgaagatactctctctcttctccactggatctgctccaatcttcgctcctccaacgtcctctctctcgtagaactcaactactatgagcacttcaagcatcatcggaagctgttatatggcgacgatttggactttgcttactacatcatctctgcattctctgacactagacacactcatgatgccctttttg

SEQ ID NO: 17224 - DNA, 379 bp, Glycine max
  Clone ID: LIB3049-051-Q1-E1-C9
ggtgctaatcttatcttatccctctaatcactctagctgttgcaaatttctactatttttcaatggcttctgcagatgttgagttccgttgctttgttggtgggcttgcttgggtcaccggcaacgatgccctcgagaaagccttttcaatctacggcgacatcgttgaatcgaaggttatcaacgaccgtgagactggaaggtccagaggattcggatttgtgaccttcgcctcagagcagtcaatgaaagatgcgatcgcaggaatgaacggccaggaccttgacggtcgtaacatcactgtcaacgaagctcagacccgcgccagccgtggtggtggtggaagcggtggtttcggaagtggtggtggatacaaccg

SEQ ID NO: 17225 - DNA, 375 bp, Glycine max
  unsure (1)..(375): unsure at all n locations
  Clone ID: LIB3049-051-Q1-E1-D1
gacgttgagtaattttttttttcctcttccgcgtcnccaccaacatcaccgagaccatgtccaccgacttgcacctccaccacgagctaccaaagctccgaatcgccgccgtcgtcaaaaccgacgacgacctcncctccgacgcccaagacgaccgcaacgccgtctcctccgccgtcacacaagccgaggccgaaaacgacggtgccatcaccgtcgatgtcggcgtcaaagtcaacgacgagagttgccgtactccgacgtcgaaggagagcanaattccggcgacgatgacgtgtccgccggcgccgaggaagccgaagttcgcctcgtgtaaaagaaaactacttgaggagtttcagctcttcgatgtca

SEQ ID NO: 17226 - DNA, 293 bp, Glycine max
  Clone ID: LIB3049-051-Q1-E1-D10
gggacgctgctgctataaaaaagctcgaatactcggataaggagaaacatcttttaatggcgtcccaaatccgtgagtggtctggaatcaatacattcgcacctgctacccagactaagttgcttgaactcgtgggaaatcttaaacaagagaatgtgaagtccttgactatacttgtgatgggaaaacgaggtgttggaaaatcttcaactgtgaactccatcattggggagagagtggtttcgattagtcctttcaagtctgaagggccaatacctgtgacggtgtcacga

SEQ ID NO: 17227 - DNA, 380 bp, Glycine max
  Clone ID: LIB3049-051-Q1-E1-D11
gacacacactctgtcacgcacccaccattctactacactcctctctctcactctcactctctgctccgtgatagctgtaccacgtttttctctccatctcgaaacaccatctctgcctcagtcccaacccatcaccattctcatggctgctctagctctagcacttcttcttctggctttcaccggcacttcaagtgctacatggtgcgtttgcaaggatggaagcgacgcgatcctgcagaagacgttagactatgcttgtggagctggtgctgactgtaaccctcttcacctaaacgggccttgttttcagcccaacaccgtcagggcccactgtaactacgccgtgaacagctacttccaaaagaagggtcaagctc

SEQ ID NO: 17228 - DNA, 360 bp, Glycine max
  Clone ID: LIB3049-051-Q1-E1-D12
ggattcagagggagaaagctccctcgcacaaagcaatgcctgccatcacctgaattctatgctccttttccctttatccgcattgctctcttctctttcaccgttttttgtctctgaatatccaagatcttcaaggacaatgttatctctgagaaacatttttctgaatagcgcttgatccggcgtgaaacattcaattgttgataatttactgcttcactttgggctgtgcgagtggagcagcctattttactattaaaggcatattctcttacaaggttgatttgcagagagcatggcgtcttgggattaaatggggggacttgcaaatgtggcacagttgactggtgtagacgctgt

SEQ ID NO: 17229 - DNA, 126 bp, Glycine max
  Clone ID: LIB3049-051-Q1-E1-D2
tggggtgcattgttcgtcgttgtcattccttcttctacgtctgttgttctgtgtatgtgcttgtcctctagcacgagctatcagggcttcgaatcgtcgccgtcgtggttgccgaggattacctcc

SEQ ID NO: 17230 - DNA, 357 bp, Glycine max
  Clone ID: LIB3049-051-Q1-E1-D3
gtgttaatcaggctatatatcttctaacaacaggtgctcgggaagctgctttcagaaacatcaagacaattgctgaatgcttggccgatgaacttattaatgcagccaaaggttcatccaatagttatgctatcaagaaaaaggatgaaattgagagagttgccaaggctaatcgttaagccaacccaacaaccagtattgtggccagaaagatttcgacctttgtacttcatttatttaaattttgaatattgtgtattacttttgatgaatttagttaatttttagttcgcgtaaggattttacatgaacgatttatttagttaatttagtttgcgtaaggattttacatgaacg

SEQ ID NO: 17231 - DNA, 366 bp, Glycine max
  Clone ID: LIB3049-051-Q1-E1-D4
gggggaggaagaataattgtgaggcgagggtaaggtcgcgttgtgttgcgtcgtgtcgtgcgctgttcctctgtttctcgtttttgtgttcaaaccgaaccctagctccgcatcgcaaccatgtcgaccaagcaaggtggaaaagctaagcctttgaagaaacccaagtctgataagaaggattacgacgagattgatgtggctaacattcagaagaaaaaggaagaggagaaggcgctaaaggagttgaaagccaaggcgcaacagaagggaagctttggaggttctgggctcaagaaaagtggaaagaaataagggctctttatcatgattgtatgcattcaatattgagccctgtaattacag

SEQ ID NO: 17232 - DNA, 346 bp, Glycine max
  Clone ID: LIB3049-051-Q1-E1-D5
gatcccataagggtcacaagcaagtcctaaaaagttcactgagatatatacaactatcttcaatttcacaaaatgaagaaagtgtttgtcacatttgtagctctgctagttgtagttgttcttacagtgacagcttcagagtcaaagccaacagtcgcaacaaattcaacaccaaatgactacaattgttcacaagtgatgaataacttgtttgtttcgtgcgtagattacctcattggtggagatgctgttccttcaggtgtttgttgccaaagtgttaatgcagtgaaagcatcaacacacacataaatgcaacgagtggctgcatgtatgtgctaatacaacg

SEQ ID NO: 17233 - DNA, 346 bp, Glycine max
  Clone ID: LIB3049-051-Q1-E1-D6
gtttctgaatcagttggtgagacttttgagcctgatactgtgaaagatgctcaagttgagaatacaatggaatcagatactatagagttggaactgaagaaagagaaagggaaaggttttctatctgatctagctgtggataatcatgaggtgaaggaaacagattttcccttttcagagaacaataatgagctttttacagtttcaggaaatgagggactaagagaaactgaagtggttgtggttgaaacattttttaagtccatgatgtttggtggagaggagaaggatgttttgtcttcagttgtgacagataagttacttagagagagtgaggaaccaaatg

SEQ ID NO: 17234 - DNA, 308 bp, Glycine max
  Clone ID: LIB3049-051-Q1-E1-D7
ggacgtacacttgctgattacaacatccaaaaggagtccactcttcacttggtgctccggctccgtggtggaatgcaaatctttgttaagacattgaccggaaagacaatcacccttgaggtcgagagctctgacaccattgacaatgttaaggctaagattcaggacaaagagggtatcccaccagaccaacaaaggcttatctttgcaggaaagcagctagaagatggcagaaccttggctgattacaatatccagaaggaatctaccctccacttggtgctccgtcttcgtggtgggatgcaaat

SEQ ID NO: 17235 - DNA, 352 bp, Glycine max
  Clone ID: LIB3049-051-Q1-E1-D8
gactttcatttttttttcttccatacctttccctccttctgagtccttaccttacccaattttttctttttcccttatttgttttctctcgaaatttgcccataacgttctctttgtacctcatcttatcctgcacacacccccccctccctcccttcctataagatttatttgcgtagcattcaccatcacaatcaatcttctttatccactctctcttaattaaattaaaacaaaaaatgtgcgctgccatatccgaagtggaacaagaagagttgctcgaaaaattggaggtgttcaagattaaaggcagggacaagcatggccgcaagatccttcgcattatcgccaa

SEQ ID NO: 17236 - DNA, 376 bp, Glycine max
  Clone ID: LIB3049-051-Q1-E1-D9
gggacgctgctgctataaaaaagctcgaatactcggataaggagaaacatcttttaatggcgtcccaaatccgtgagtggtctggaatcaatacattcgcacctgctacccagactaagttgcttgaactcttgggaaatcttaaacaagagaatgtgaactccttgactatacttgtgatgggaaaaggaggtgttggaaaatcttcaactgtgaactccatcattggggaaagagtggtttcgattagtcctttccagtcggaagggccaagacctgtgatggtgtcacgatcaatggctggttttacattgaacattattgacactcctggtctcattgaaggggggtacatcaatgatatggcacttgatat

SEQ ID NO: 17237 - DNA, 388 bp, Glycine max
  Clone ID: LIB3049-051-Q1-E1-E10
ggattttcgcatgacagattctacatccattgtgatggggctttgtttggtctcatgatgcctttcgtgaaacgagctccaaaagttacttttaagaagcctgttggcagtgttagtgtttctggccacaaatttgtagggtgtcccatgccttgtggtgtgcagataacaagattggaatatgtaaatgctcttgccagggatgtggaataccttgcttctagggatgccacaatcatgggtagtcggaatggccatgctcccatattcctctggtataccttgaatcggaaaggatatagaggttttcagaaagaagtacagaaatgcttgcgaaatgcacactacttcaaaggccgccttgttgaggctgggattggtgcaatgc

SEQ ID NO: 17238 - DNA, 376 bp, Glycine max
  Clone ID: LIB3049-051-Q1-E1-E11
gagagaaagagagagaaagatgtcgaagcgtggtcgtggtggttcggcggggaacaagttccgcatgtcgctgggtcttccagtggcggcgacggtgaactgcgccgacaacacgggggcgaagaacctctacatcatttcggtgaaagggatcaaaggccgtttgaaccgtcttccctcggcctgcgttggcgacatggtgatggccaccgtgaagaagggaaaacccgatctgaggaagaaggtcttgccagctgtcatcgttcgccagcgcaagccatggcgccgaaaggacggcgtctacatgtacttcgaagataatgctggtgttattgtcaatcccaagggagaaatgaaaggttctgctatcactggt

SEQ ID NO: 17239 - DNA, 376 bp, Glycine max
  Clone ID: LIB3049-051-Q1-E1-E12
gacatcgcacatcaattattctttcgcaccttcgaaaatcaattttctgtcttctctgcgtcttcttcctctatcaatcgttttccatggctcgtaccaagcaaaccgctcgcaaatccaccggtggaaaggctcctaggaagcaactcgccaccaaggctgcaaggaaatctgcaccgacaaccggtggagtcaagaagcctcatcgctatcgccctggaactgttgctcttcgtgagatccgaaaataccaaaagagcacagagcttctgatccgcaagctccccttccagcgtcttgttcgtgaaattgcgcaagacttcaagaccgatttgaggttccagagtcacgctgttcttgcgcttcaagaagctgc

SEQ ID NO: 17240 - DNA, 291 bp, Glycine max
  Clone ID: LIB3049-051-Q1-E1-E2
tatggaagaggaggacggtacggctataatggacgagggaggggacgtggcatgcccagtcgcactttgtaggtggcagttaatgtttagtcatggacatggtggagaacaagagcctaggtagcctcccctaaaagcatcgtaactatgttagagataatgcttcattgttgtgttgcctgttatatgttttgcttcgcacaataagtaggacacttttttcctgttatgctaccctcctgttactcctctaccagagtcacttgggttggtgtaaagatgtttgtacac

SEQ ID NO: 17241 - DNA, 384 bp, Glycine max
  Clone ID: LIB3049-051-Q1-E1-E4
gtatccataggcagctgaaacaaagggtccaagctaatggacgtgttggtgccactgctgccgtatacttagcctcaattcttgagtatcttactgctgaagttcttgaacttgctgggaatgcaagcaaggatctgaaggtgaaaaggataacaccaaggcatttgcagcttgctatcagaggagatgaggagttggacacccttattaaagggaccattgctggtggtggtgtcattcctcacatccacaagtccttgatcaacaaaacagccaaggattgagctcgctctttggccttctgatttcatgttgctgtttactgagaactaagtttgtgtttaatgtgaattgatcacagtagtaggtttgtatgaatgattt

SEQ ID NO: 17242 - DNA, 339 bp, Glycine max
  Clone ID: LIB3049-051-Q1-E1-E5
gaggggaacactgctacaaatcgcgatgtgacaactgacggctgtcaacgatcactttagttccctgcccagaggctttggctgtggcatttccttccacccatttccctcattcgcatcaattccagttcattgacgacttgtagatccacaaagcactatctatttcagctgatgatgacgttcactcagcaccgtcaaatcaatctgcattgaacatgcatcgtgttcatgctcatagctatggaactgtatgtactgcaattgacaccaatgtgtgacacttctgatgcagcttggcattgcctcatccatgctgagggcactgtcatattctga

SEQ ID NO: 17243 - DNA, 398 bp, Glycine max
  Clone ID: LIB3049-051-Q1-E1-E6
cgtcggccggtggcggagttggtagggtcgcctccgccgaccccaccaccgaccgcctcttcgccagctcgcccgtgccgccgcatttcctgcagcggccgggctccgaccacttcttgccacttgtgtcagtgccggcgttgcagcagcagcagcagcgccaccaccaccagcacttggcagtggcagcttccgcggcagctggccaccgccaatttggcttgccgccgaatgggcactttgagcttcccattttatcgaggatgggggctccggtgccgggttatgcggccgaggatgtggaatccggaaggaggaatgttcttactttgtttcctgctggatattaatgaatatgtttaatggttatattcaaagttttaaaaatttctgttgtg

SEQ ID NO: 17244 - DNA, 273 bp, Glycine max
  Clone ID: LIB3049-051-Q1-E1-E7
gaccgaatccaagttctgtatttccttctcttttccaattgtttgagcgtgaatttttgcgctaatgaagtctgaaacctatgataaggggatatctgttgatgactggaaaatactggtaaagtggtaataggcaaagaagtgaagaatcacaattggtttggagggccatcgcattgaggcaagtagaaaattgacccgcccaagtggagattcaagtcggggtacgaacgtgcgactattcagggaatgaacgtggacaacccaggcttt

SEQ ID NO: 17245 - DNA, 318 bp, Glycine max
  unsure (1)..(318): unsure at all n locations
  Clone ID: LIB3049-051-Q1-E1-E8
gaattgaatcagttattagtagtggtggtagttttatttgattggttttagatccaggttaaaaggattaaactcccatctggttcaaaaaagattgttcctagtgactgtanggccatgattgggcaagttgcaggtggagggagaactgagaagcctcttctcaaggctggaaatgcttaccacaagtttagagtgaagaggaactgctggcccaaggttcgtggtgttgctatgaaccctgttgagcatccccacggaggaggtaaccaccagcatatcggtcatgctagtactgtcaggcgtgatgctcctcct

SEQ ID NO: 17246 - DNA, 385 bp, Glycine max
  Clone ID: LIB3049-051-Q1-E1-E9
tggacacttacatgaaaaggaaataatctaaagtggaaacatctgcgacattagccttacttcgtcccatgattgaagtataaattatgggtgttgaaattcaaagccatatccgtcattaaccaaatttgtgtttctccgattgcaagcaatggactccttcaattccttcttcgattcaacaaaccgatggaattacgatactctcaaaaacttccgtcaaatttcaccggtcgttcataaccacctcaagcatgtttattttactctgtgtttcaccgtggatgctgcaggtgttggggcttaccttcatgtcctcttgaccattgggggttttcttactacagtggcatgcgtgggaaacagtgtttggttactctcgaca

SEQ ID NO: 17247 - DNA, 340 bp, Glycine max
  Clone ID: LIB3049-051-Q1-E1-F10
ggagcgaagaagatattagggtttttgagtgcggtgcggcgatcctagcactctcttctgcagctttcgccgacagcttcattcaccatggctgagcaaaccgagaaggcttttttgaaacaaccaaaagtgtttctcagctcgaagaaaactgggaagggaaagagacccggaaagggtgggaaccgcttttggaaatccattgggcttggatttaagactcccagggaagccatcgaaggaacctacattgacaagaagtgccccttcactggcaatgtttccatccgtggccgtatcttggctggaacatgtcacagtgctaagatgaacaggacta

SEQ ID NO: 17248 - DNA, 381 bp, Glycine max
  Clone ID: LIB3049-051-Q1-E1-F11
gacgctcaattcattttcttctcctctctctctctcctagggttagggttttctctcttcatcactctctgtgtcgctccgtttcaatggctcagcaagacgctcaaaacggcgggtcggagaatgccgctgctgctgctacggtgtcgtttgtcgctgtgaagccgcagctcctcgtcgaagctcccaaagccaacgacgccattctgttcttcaaggctgcgtttggcgctgaggaagttggccgtacgctcaaccctaagcgcaaagctgagcacgagctccctctcatactctccgcagaactcaaaatcgctggctccaccattctcgtcgccgacctcgttgatgacacttcttcgccagcgaaaacggggggaa

SEQ ID NO: 17249 - DNA, 363 bp, Glycine max
  Clone ID: LIB3049-051-Q1-E1-F12
gtgggggtggcggtggaaggtacggcggtggtgggggtggcggcggaagctgctacaactgtggggggtccgggcattttgccagggactgcccttccagtgctcgttgatacaatagtacgggggtgtggccttgcttttgtgttctgtggttcttttgttttcttttttctaaatctgaatattaccctttagaaatagggttagctagggtgtggcttctttgcgttttcttttttcttttttcgggtttacattataagcaattagcttatgattagctcttggatttattggtttgctttttgggcttaaggaaatgagagttttggtgaggtttctgaaacatcgactaaatactct

SEQ ID NO: 17250 - DNA, 324 bp, Glycine max
  Clone ID: LIB3049-051-Q1-E1-F2
ggttctagtgtatgtgattgttgtgactcgttcttcttcgtcgttatcttcttcttttgttgtttgtgtgtttgttttttctctcacctgaaaatgtcttgctgcggtggtaactgtggttgcggaagcgcctgcaagtgtggcaacaggtgccgaagctgcaagatgtatccacacatgtgctataccgagtctcacaccacacgagaccttggcacatgagtgtgaccacttttagcgcacatctcgagtgtgcagaaatgtgtgttcccgctgagaacgatggctgcaaatgtggagctaactgcacctgcaacccctgca

SEQ ID NO: 17251 - DNA, 353 bp, Glycine max
  Clone ID: LIB3049-051-Q1-E1-F3
gaacctttgcattctattcattcaagattcagcaagtgcgttttggaagcagagaccgaaatacttcgagatggcccgtacaaagcaaactgctcgtaagtcaactggaggaaaagctcccaggaagcagcttgcaaccaaggctgcacgtaagtctgcaccaacaactggtggtgtgaagaagcctcatcgttatcgccctggaactgttgctcttcgtgagattaggaaataccagaagagcactgagctcctaatcaggaagcttcctttccagaggttggttcgtgaaattgcccaggatttcaagactgatctgcgtttccagagccatgctgtgcttgcattgcaag

SEQ ID NO: 17252 - DNA, 310 bp, Glycine max
  Clone ID: LIB3049-051-Q1-E1-F4
cacgccaagcgtgtaaccattatgcccaaggatattcagctggcaagaaggattcgtggtgagcgtgcttgagttggtggttggaaagatgaagatgattggtggctgcggttggtgtttttgtttttcagattcctttttttattcaatagatggggttgttagggagggtaggttttctgctggtagtagcattaattgggatataggcaaatactgctaagtgtccgtgactgtgttttcttcctttaagaaaattggcttgtaattgatttttggacatatgtatgtgttagaatgcttctgtttc

SEQ ID NO: 17253 - DNA, 142 bp, Glycine max
  Clone ID: LIB3049-051-Q1-E1-F6
gacttcgaatctcgtgcatgtgccgttgccgtacttcatctgccataaacttagtcgggtgtggttagtgtgagatcacattgaactcatagtggcaaggtcttgctgccgtgagtggtgtagttgctggaatccctgcata

SEQ ID NO: 17254 - DNA, 303 bp, Glycine max
  Clone ID: LIB3049-051-Q1-E1-F7
gaagagagaatgatgatgaagtctgctatgtgtgcattggtgcttgtggcactggttgtggttgaagtggggcccatggctgacgctgcggtgacttgcaacccaccacagttgactccctgtcatccggcacttcactcacgtcctgcaccttcgagtgcttgttgccaaaacctcaacgagtcaccccacgcctctgtcgctacctcacattaccaagtatcgaacaatcacttaactccccgaccggaagcctcctttccagaccttgcttcatcaacattgcccaccatttcaagcacc

SEQ ID NO: 17255 - DNA, 365 bp, Glycine max
  unsure (1)..(365): unsure at all n locations
  Clone ID: LIB3049-051-Q1-E1-F8
gaggaaagaagagagagaacaaagcacttagtgctattcaataattacgaaaaaccaacagcgagtgttgtttttgtttggtccaggctggaccagggaatgaatagagatgagaggctttcggttgaagagaactgagttaagcggcgaagccaaacgcagaatcggcggcagaaattgccaccggaagcacgtcgaagacgggtgaaccaaacacaaaattccatccaccacttctcttttcaatccccaactcaaatctgtgaagaaaatctcaatttctaaattgtaattcttagcactactgctagtantagtaaaaaaaaacaatttagaagttttatagtggttttttttcccttttt

SEQ ID NO: 17256 - DNA, 332 bp, Glycine max
  Clone ID: LIB3049-051-Q1-E1-F9
ggagaagacaagtgacaagagtgtgaactgcaaagggcttctccagcctagtttgttctcagatcttcttcttccatggaccagtacgagaaggtggagaagataggcgagggaacatacggcgtcgtttacaaggctcgcgaccgcgccaccaatgagacaatcgctctgaagaagattcgcctcgagcaggaggacgaaggcgttcccagcaccgccattcgcgagatttctcttctcaaagagatgcagcataggaacattgttaggttgcaggatgtagtgcacagtgagaagcgattgtaactggttcttgagtaccgggacttgga

SEQ ID NO: 17257 - DNA, 92 bp, Glycine max
  Clone ID: LIB3049-051-Q1-E1-G1
gagtcaaaattgtatatgcttcttcaaaggagaacggggaatccccaacccaagtggtttggagtaaaaggaagacacaatgtcatggcaat

SEQ ID NO: 17258 - DNA, 391 bp, Glycine max
  Clone ID: LIB3049-051-Q1-E1-G10
ggagttacaaaatgaagagtgacgaagccattttcgccattatcactcctctcgcaccaaaagcgatgaagctctagttgctgcttttctcgttttgatccgtacattttccctctgccgttgcggtccccgaagccgcgagattcttctgcctcgattgcgttcttcatgtgattctgcttctctctctaaccaagtattctactcattcggtttacattttaggagtagctgaatcatatgaggcagatggtcttttgttaattacctcaacttaggtagacgaatctgccttggtgaatctgtcaagattgaagaatagatttgtatatattaattaataattaatactgcagattacttgtctaccagaaaggattcaaaatgagtt

SEQ ID NO: 17259 - DNA, 378 bp, Glycine max
  Clone ID: LIB3049-051-Q1-E1-G11
gatccatattccttatcatcacttcactggtctaacctgcgacatacatttcccgctaagccgaaacagaaatgctcctcagttactctctgcacctcccaattacatcttcttactcacacacctccaaccgcagtcccaactcgagcggttacataaagttccgaacaaggtaccgcgaaaacctgcgatacctgcgagccttaaccataatcgacccaaaaaccaaaccagaggaccttcctctccccaacgacgtcgaccacatcatcgacactctcacattcctcaagtcgcactctttctccgacgccgacatccctcgcctcaagttcctgacccctgagctcttcaccaccgccgtcgtcccctccgacg

SEQ ID NO: 17260 - DNA, 389 bp, Glycine max
  Clone ID: LIB3049-051-Q1-E1-G12
ggccaaaccaactccccaaaggggaccttagagagcaatcttcttccttctctctctctctctctctctctctctttcaatggcttcctcgtcttccagaactaagtccagtgggcccgttctacgctccctctcaccctccagtagattctgctcatacaccacatccaaaacccctttctcttctccttcatccgcattcgcttcctccacaagctctggcttctcctcttcaaccttcttcaaccagccacgtcagcatcactctcaaagccatcacagccaccaccgtgccgcatcgcccacacgtgtcaatctatacagcccggcccctctctcttcgggcgtcgggttctcaatcgacccccggtctatatcaccaaaccggt

SEQ ID NO: 17261 - DNA, 251 bp, Glycine max
  Clone ID: LIB3049-051-Q1-E1-G2
ggtgaagtgtagtggtcactgacctatcgtggaagagttatgaagtataaaacttcaaatccttttgccgttagattctgagtctgagtctctgctgctatatatggcgctcacgcgtaattcttgtgttggggatgttgctgatggtgtgtcatgtcaatgtttcgtctgattgatcgattgaataagaaattctggaatatgcactccagatgcttgattcagagtcacatattgtcagagactggttt

SEQ ID NO: 17262 - DNA, 303 bp, Glycine max
  Clone ID: LIB3049-051-Q1-E1-G4
ggtctctacaagagaagcatttgtttgtagaagacaagctccttcggatgttgaataagcaggttaatcattttactggaactggaaacactccaatgagctaccctttgcagcctgctattgaagaaattgaaaggtatgcagaggagcagtgcgatgtgagaacagtaagaatgtgtcaaggtatcttaaaagccatagcaagtcgtccggatgacaaatatgtagcttatagaaaggggcttggtgttgtttgcaacaaggaagaaggctttggtgaagatgattttgttgttgagtttt

SEQ ID NO: 17263 - DNA, 110 bp, Glycine max
  Clone ID: LIB3049-051-Q1-E1-G5
gggccaagtctgaagacactcgcatcattagcagctgaagcataagctcaatcccttgcgtggatggttgattgtcagtactaattcgagtttggaagtcacttggcgat

SEQ ID NO: 17264 - DNA, 145 bp, Glycine max
  Clone ID: LIB3049-051-Q1-E1-G6
gaatctcctaggctatcattaagtactctctcacttccgctcgttagctctctctctcatggcaattcgtttcgctcctttctgcgtttaaggttgatatcaggagttttggttggtactgcgagttggaccactgcctattgtg

SEQ ID NO: 17265 - DNA, 58 bp, Glycine max
  Clone ID: LIB3049-051-Q1-E1-G7
gatcggttgaacataactgctccgtatcctgttaggtctcattcgttttcttattttc

SEQ ID NO: 17266 - DNA, 327 bp, Glycine max
  Clone ID: LIB3049-051-Q1-E1-G8
gaccaaacaaaacgacacaacaaaaccctctctctaaaaccctctctctgtctcccttccttctcatcttcaccaccaccaatggcgtcgccgccgccaccaccttctctcctcctcctcttcctcaccctcgtcgccgccacggcttcctccctcacctgcaccacccaaaagctcacggactccaagaacaacctctactccaactgcctggacctgcccgcgctcgattccttcctccactggactcacgaccccaccaacgcctccctctcggtggccttcgcggcggcgccgcccaactccggcggctgggtgtcctggggg

SEQ ID NO: 17267 - DNA, 280 bp, Glycine max
  Clone ID: LIB3049-051-Q1-E1-G9
gattgcgtgttggtgtgaatcaagaaccgctctgctatggctgctctgcaatacttggaatcgctgcgtaactcgcagcttgaactctccgattggtacaattcgctggcggatccgtaccagatgaagctctggcaccatttcactctcaatctctaacaatttgtggctcgcgacgtcttcgacgctggtgatgctttactacatgtataacataatttcatcacaaactttgatactaacatcaacgttctcaagcttgcacattctgctgttatat

SEQ ID NO: 17268 - DNA, 327 bp, Glycine max
  unsure (1)..(327): unsure at all n locations
  Clone ID: LIB3049-051-Q1-E1-H1
cctcatgtaaacattgtggcactagttcaaaatccaccccaatgatgcggcgagggccatctggtccaaggtcactttgcaatgcttgtgggcttttttgggcaaatangggtgctttgagagacctttctaagagaaatcaggaacactctcttccaccagttgaacaggttgatggaggtaatgacccagactgtcggactgccgctgccgaccctgcacaaaacaatcttgctgctttctcagagcctgttaatccagctttggtagctgatcgtaaggttttccaatctcagaaaatgttggagtagttgactctggcataag

SEQ ID NO: 17269 - DNA, 368 bp, Glycine max
  Clone ID: LIB3049-051-Q1-E1-H10
ggcagagtagaagtcgagatggacaaccttccaaattcaaagctttatgggaaagagaagatgaaaggagagcaagaattagaagatgaagaaagcttctcgcgtgctatgctgctttgcagctccgttgtggtttccatggcgctgcaatcggcaacggagctgggcgtatttgacgtgttgcaagaagcgggggctaagctctctgcgaaagagatagcatccaagctttcctgcgacaacaaccctgaagcagactcaatgctggatcgccttctagcccttctagcctctcactccattcttaactgttctctcattctcgaccaccaaaacctggggacctttcagaggctctacacgatcac

SEQ ID NO: 17270 - DNA, 364 bp, Glycine max
  Clone ID: LIB3049-051-Q1-E1-H11
gagggcgctagggttttgttcgcttcatccgattctgcttcggattccgatcggaaatgtccgaacctcattcatcgccccgaacctccgcgtatctcgacgcgctctctcaggcgatccacaagaagcttcagcgggcgttggctaattcctcgcagaggcgcaatttgttgcaggagctgtttgcggacatagctttagaagtcgatgaccgagccaaagatgtgattgtcaacaaggaagaagatggcatttctcccgcagaggatattaatgatggtccgttatgcttctacgatgtgcttgctgattaatttgtgctagtgtctgagagtagaaaactatccttgactggatggtcaac

SEQ ID NO: 17271 - DNA, 271 bp, Glycine max
  Clone ID: LIB3049-051-Q1-E1-H12
catcatcttccttgttcgctctgaattcgcgggactcggtggcctgagagtttctccttctgaattcataggctcggtgaccacagtaggcgatgttttgcaaaacgttacctccattctcaagtctgagttcgtcagcaatgtcaacaataatgagtttcatctttatgatgccgccgccatttttgcctgtctcgatttgttagacttgtcagctgatgaactcagctggtccatttccgctgttcaaagtcccaagggaatgataaca

SEQ ID NO: 17272 - DNA, 374 bp, Glycine max
  Clone ID: LIB3049-051-Q1-E1-H2
gacccacaagtcatcaaacttcaattgagtttcaaagagatcagtggtagctagtgtggtgcaattgtgttgatcaaggatggaacaaaagaagtttgtggcactattaatggtggttgtggtaatggcttcttctatgtggaaagggtccaaaggtcttagtctctgtaacatggacgaaggtggattggaggcttgcaagccctcagtgactcagccaaacccagttgatccatcccctgattgctgcaaggctttggctggtgctgacttgaaatgcctttgctcttacaagaactcatcagagttgccttttcttggaattgatcgaactcctgctacttcacttcctgcaaagtgcaatctcactcccc

SEQ ID NO: 17273 - DNA, 353 bp, Glycine max
  Clone ID: LIB3049-051-Q1-E1-H3
gaatccaaacctagctaagtgctcttacaaagagaggagtgagtgagaaacaagatatttaaagttacaaaaaatggagagagtggcaaaggtggtggtgatgttggccatggtggtgctggtgctaattgcttcaaatgttgaagggggacgattactgaagcaagagaatgtggatcagcccgagaccttccttggtgggatatttccaagcccaagcccaggtttcagcttcaccggtgtgggctttggcccatctgggttttgcactttccctggtggttgtaccggtaccccttctttgcccactattcccggtgctggcgtgtcactaccagttccaccacatgcat

SEQ ID NO: 17274 - DNA, 374 bp, Glycine max
  Clone ID: LIB3049-051-Q1-E1-H4
gactgcactcttattaataaatatcagtgcttggaaagcaaaagagaagatccatagctaagatagatctcgagatgggtcgtggcaagattgagataaagttgattgagaaccccaccaacaggcaagtcacctactccaagcgaaggaatggtatcttcaagaaagctcatgaactcagtgttctctgtgatgccaaggtttcactcatcatgttctctaaaaacaacaagatgcatgaatacattagccctggcctcacgacaaaaaagatcattgatcagtatcagaagactttgggggatattgatctgtggcattctcactatgagaaaatgcttgaaaacttgaagaagctgaaagatattaacaat

SEQ ID NO: 17275 - DNA, 372 bp, Glycine max
  Clone ID: LIB3049-051-Q1-E1-H5
ggagttgtgtgtatgtgagataagctgccatgtcgatcttgtccgttccgtcaccaacacagcgttgttccatttcgatttctcggctgccattgccattgccattgccgtttcaattgcaagtaagaagaagagcaaaagggggaaaagtggtaatgagcatggaggcaggtattggagtgatgggcaccaagttgggtatgatgagctatttcgaatccgacggagaggttgttcctgtcactgtcgtgggtttcaaagaaggcaacatcgtcacccagatcaaaactgaggccaccgatggatacgacgccgtccaggttggttaccgaagggtcagagaccgcaaattgaccaaacccgaaatgggtc

SEQ ID NO: 17276 - DNA, 320 bp, Glycine max
  Clone ID: LIB3049-051-Q1-E1-H6
gacatcactgcattttcaagtgcagcctatacttgagtttctatctagccataacttgtagtttacttcaaacttctaagcaacatggtggacctcactttcacagatgagttcactagcagtgtccagccaagaagattgttcaaggctttgatccttgatgctcctaacctcatccccaagctgatgcctgaggccattaagaatgttcaactggctgaagggaatggaagccctggaagcattcaggagataactattgctgaaagtggtaacatcaaacagttgcagcatagaattgatgcaatagaccttgagaa

SEQ ID NO: 17277 - DNA, 345 bp, Glycine max
  Clone ID: LIB3049-051-Q1-E1-H7
ggccgcagttctcgagtacctaactgctgaggtgcttgagttggctgggaatgctgcacgtgacaacaagaagaacaggattattccgagacatgtgctattggctgtgaggaacgatgaggagttggggaaattgcttgctggtgtcaccattgcacatggtggtgtgcttccaaacattaaccctgttttgttgcctaagaagacggagagggctgccaaggagcctaagtctccatccaaggctactaaatctcctaagaaggcctagattatcctttttttttttttttttaaatctagtgttgtatatcggtgcttaaatgcctttggtgtaacaagaaa

SEQ ID NO: 17278 - DNA, 321 bp, Glycine max
  Clone ID: LIB3049-051-Q1-E1-H8
ataaacccggcggtgacgttcgggttgtttttggcgaggaaagtgtcgcttacaagagctgttgggtacatggtggctcacgtgttgggggccataaatggggtggggcttgtgaaagctttgcagaagagctactatcacaggtacaaaagtggcgtgaacatgctcgctgatggttacagcaaaggaaccggtttgggcgctgagattactggcacctttattcttgtctacaccgtcttctctgctaccgattccaagagagtagcaagagactcccatgttcccgtgttggcaccacgtccaattgggtttgcagtg

SEQ ID NO: 17279 - DNA, 388 bp, Glycine max
  unsure (1)..(388): unsure at all n locations
  Clone ID: LIB3049-051-Q1-E1-H9
ggatcctttgtattctattcttcaagattcaggtactgcgtttcggaagcagacacagatggctcgtacgaagcaaaccgctcgtaagtccacaggaggaaaggctcctangaagcagcttgcaaccaaggctgcacgtaagtctgcaccaactactggtggtgtgaagaagccccaccgttatcgtcctggtaccgttgcccttcgtgagattaggaattaccagaggattaccaaccttttgttccggaacctccccttcaagaggctggttcgtgaaattgcacaggacttcaagactgatctgcgtttccagagccacgccgtgcttgcattgcaagaatctgctgaggcataccttgttgggctctttggggacactaacctg

SEQ ID NO: 17280 - DNA, 304 bp, Glycine max
  Clone ID: LIB3049-052-Q1-E1-A1
gcctgaaaaagaccaacagaatctactctctttttttctaccttagattccttctccaacaatggctctcgccgtttccactacttcttcctcttcagcagctgctgcagcttctagctccttcttctctcgtctcggatcttcctccgacgcaaaagctcctcaaatcggttcgtttcggcttccggagaggtcgcttgtttcgtctgttgttgtcgatgtggctcaacgacgctccttggtgaggccactcaacgccgaaccgcaacggtacgattctattgttcctcttgcagcaactatc

SEQ ID NO: 17281 - DNA, 332 bp, Glycine max
  unsure (1)..(332): unsure at all n locations
  Clone ID: LIB3049-052-Q1-E1-A10
gggaaaacactttgattctaaaacacttgagcagtggcaccaacattcattttaatgcatttgatgctctacgtggctggaaacaggaagcattgccgccagttgaagtttctgcggcggctaaatggaaatttagaagcaagccctctcagcaagtaatacttgattacgactatacatttacaacaccttattgtggaagtggcactatggagattgataaagatccgaatganggagagagagagacttctaaggaaaccagtgatatccattgggaagactgcaaggatcaaattgatgtagttgcactagcatccaaggagccaata

SEQ ID NO: 17282 - DNA, 343 bp, Glycine max
  Clone ID: LIB3049-052-Q1-E1-A11
tgctgagtcatgacagaaggggaaagctgaactcctttcagactcgattacaatgctattagctagatcgccgcgttgtctctcacacatatgtcactgggtcgttgttttcgctgctgtcgctggtcctgtggtgggcttgtaccagggatcatggtcgcaagttgaactgctcgcaggtgagcacctgacacttctctactggcgctaccacaacgcttcatgcccctgactgtggctcttctgcagatcatattgtgctacaagatcactgaccttctgatccgcttgactcccaatcgagaggctcttcctacgaatgactcaggttttcactttaggt

SEQ ID NO: 17283 - DNA, 341 bp, Glycine max
  Clone ID: LIB3049-052-Q1-E1-A12
ggttcatatgatgaatgcttcaaagttcattaaatgtgttactgttggagatggagctgttgggaaaacctgcatgctcatttgctacaccagcaacaagttccccactgattacataccaacagtatttgataattttagtgccaatgttgctgtggatggaagcattgtcaatttggggctatgggacacagcaggccaggaagactacagcaggttgaggccattgagttatagaggagcagacatttttgtcttagcattctcactgattagcagagctagctgtgaaaatgttctcaagaagtggatgccggaattgcgtagaattgcacctaatg

SEQ ID NO: 17284 - DNA, 342 bp, Glycine max
  Clone ID: LIB3049-052-Q1-E1-A2
ggcgtttacatacacaaatatcggaatcattcattcaagactgagactcactcctccctccgtcaccatcgttttgtgcgtgagcgtttctccatttctttccccatcagcgaaaagacagaacaagctctgttgactttttccattttccaattttctcggtgattctatcagcctccgacacaatcgcgcgccaaacgttgaatcggtgccaccacgcaggggagagtctctaagagaccaacatgagtgtggattcaaagagaaatgcctctaatggccaggagaaaatgttaccatcactagaacagcaggcattgatcaatgaggtgagaacgttaa

SEQ ID NO: 17285 - DNA, 326 bp, Glycine max
  Clone ID: LIB3049-052-Q1-E1-A3
ggttcaaagcacgccgtgtttcgctatctctcccattctctcgcatctcaatacccttttgatttgtgaaaggaaagcaaacatgcttgatcaggtccaacaccctacaatcatggacaaggttgctggccagctccatctccgttctggtgtttctggtattaggagttatgaaggagcctactgccaccccacaatgtaccaaagaccctcttttggcaagtactcgaatgctgcattgcagtatcctgtgatgccctcatgcaaagctactatggatttgtctgctgctgcaacaactgcctcccccgtctttgttgctgctc

SEQ ID NO: 17286 - DNA, 223 bp, Glycine max
  Clone ID: LIB3049-052-Q1-E1-A4
gaaaagttaaagatatttttgacgcatacacaccactcaaaaccctagtcacacccattccataaaaacaaagctttttcgtcctttgccactttcccggaaaatcctcctcattttttctggaaaatttatcttccgttttctcgctgacaccaccgcacactcttcacgccttctctcactctaatctattatggccgatgaaggtgttgcgaacggcggc

SEQ ID NO: 17287 - DNA, 344 bp, Glycine max
  Clone ID: LIB3049-052-Q1-E1-A5
gggagagagaaaaaggagaaccttcttttctctgtttttttgttgttattcttcttccagacctaaagacccaaagcaccgattctgatttcaagaattacatcatcatatcaagaaaaccttggaactacacaaaaatggtgtcggcgaacaaggagatggtcgtgcactgctttgacaccctcctcgctcactacaacagcacggaagcaccgcagcgggccttcgatcaggctcaacatccattgtttgttacatggaagaaagtggtgaatggtggagatcgtcgccttcggggatgtattggaactctggaagcacgcagcttgatcaatgggctcaaa

SEQ ID NO: 17288 - DNA, 378 bp, Glycine max
  Clone ID: LIB3049-052-Q1-E1-A6
gacgctcaattcattttcttctcctctctctctctcctagggttagggttttctctcttcatcactctctgtgtcgctccgtttcaatggctcagcaagacgctcaaaacggcgggtcggagaatgccgctgctgctgctacggtgtcgtttgtcgctgtgaagccgcagctcctcgtcgaagctcccaaagccaacgacgccattctgttcgtcaacgctgcgtttggcgctgaggaatttggccgtacgctcaaccctaagcgcaaagctgagcacgagctccctctcatactctccgcagaactcaaaatcgctggctccaccattctcgtcgccgacctcgttgatgacacgtcctcgccagcgagaaacgggg

SEQ ID NO: 17289 - DNA, 393 bp, Glycine max
  Clone ID: LIB3049-052-Q1-E1-A7
tgggggaaattacgcttttgattcaggatgatgtggggggtcttcaggttctcaagggtggtaacaagtgggtcactgttcagcctctgtcagatgctatccttgttctattggctgaccaaactgagattataaccaatggaaagtacaggagctgtgagcatagggcaatcactaatcctgatagagcaaggctctctgtggcaacatttcatgaccctgctaagacagtcaagatttcccctgcttctgagctgatgaacgactcatcactagctaaataccgtgatgttgtttatggagactatgtatcatcatggtataccaaaggccctggacgaaaacgacatattgatgcacttttgctggatccttaagctaatgctttttttc

SEQ ID NO: 17290 - DNA, 319 bp, Glycine max
  Clone ID: LIB3049-052-Q1-E1-A8
ggtatttgtgagtgtgtgagagagagagcgagcagtttcagacacagagagaggggtttgggattggagggattgacgctgcgtctcttcctcttctctttcgatccatccctcattcctaatcctccaatccaaccacctcagcctcacactcacatatacacatatctgaacgcgtatcgtccctcctatggcttcaaagcgcatcctcaagcggctgcagcggacttgcagaggacccagcaacttcttgcagcgctggtccagtacctgacgacatgttccattggcaagcaacaataatgggtcctgctgatag

SEQ ID NO: 17291 - DNA, 357 bp, Glycine max
  unsure (1)..(357): unsure at all n locations
  Clone ID: LIB3049-052-Q1-E1-B10
ggcgcctctgcttgcaagagtgaaaaccttctcttacccttctctcaagtttcaagagatttcatcatggctccaaagaaggacaaggctccaccaccttcctccaagcccgccaaatctggcggtggcaagcagaagaagaagaagtggagcaagggaaagcaaaaggagaaggtgaacaatatggtgctgtttgatcagggcacctatgacaagctcctttctgaagctcccaaatacaagctcatcactccttccattctctctgatcgtttgaggattaatggatcacttgcaaggaaggctataagagaattgatggcaagaggttctatcangatggtgtctgcccatgca

SEQ ID NO: 17292 - DNA, 371 bp, Glycine max
  Clone ID: LIB3049-052-Q1-E1-B11
ggtcatttgccaggctgtagttgcagctgctataggagcaaagtttggaattgatggaaaccctggtgatttgccaaaatggtatgcagttgttgtggttctcttcatttgcatttacgtatcagcatttgcctggtcatggggtcccctaggttggttggtgcctagtgagatctttcccttggagatccgttctgctgctcaaagtataaatgtgtcggtgaacatgtttttcactttcttgattgcacaagtcttcttgacaatgctttgccacatgaagttcggcttgttcatcttctttgcctttttcgtgttgatcatgacattcttcatctacttcttcttgcctgaaaccaagggcattccca

SEQ ID NO: 17293 - DNA, 333 bp, Glycine max
  Clone ID: LIB3049-052-Q1-E1-B12
ggtcccaattctttccactcgcgaaatccagagatatcgatcaacagattcgtgcgacacgttaaattgttttcaaggttgcgcatatccaggatgcaggcatcgcgggcaaggttgttcaaagagtacaaagaggtgcagcgggaaaaggccgttgatcctgatattcaactagtttgtgatgattcaaacatttttaaatggaccgctcttatcaagggaccctctgagactccttttgagggtggtgtgttccagcttgccttttctgttccggagcagtatcctctacagccacctcaagtccgggttttgactaaaatatttcaccct

SEQ ID NO: 17294 - DNA, 338 bp, Glycine max
  Clone ID: LIB3049-052-Q1-E1-B2
ggtagccatagaatttcacattttatcttttgcattgagcaactaactcactcgcgccatggctgctaccatcatcaccacatgcaagctctcactgcttttgagtcttctctcagtttcacttttgctgggtgtgaggtctgatacccttcagaatgtaggcgcaattccccccacatgcaagcgcatagagtgtcccagctatgatgtcattcacgtagggaacggctactaaatccgtcgctataattcacccgtttggatttcaaacagccccattcaggacatttctctcgttgaagccacaagaaccggcttcaggaggttatttgactata

SEQ ID NO: 17295 - DNA, 358 bp, Glycine max
  Clone ID: LIB3049-052-Q1-E1-B3
ggtggagcaatagcagcagaacagagagagcaaaaccctagagcatccatcacaagcagaggaagaagatggtgaagttcctgaagcctaacaaggcagtgatcgtcctgcagggccgctacgccgggcgcaaggcggtgatcgtgaggaccttcgacgagggaaccagggagcgcccctacggccactgcctcgtcgccggaataaagaagtacccaaggaaggtgatcaagaaggactccgcgaagaagaccgcgaagaaatctagggttaaggccttcgtgaagctcgtgaactaccagcacctcatgcccacgcgctacacgctcgacgtggatctaaaggacgctgttacccc

SEQ ID NO: 17296 - DNA, 337 bp, Glycine max
  Clone ID: LIB3049-052-Q1-E1-B4
ggaagaagaatggcgactgagaatgagaagagaaagcggaaagaaagtagtgatgttagaagcaaaaagaagaagaagcagagaagcgaagatgaagaggcgacgaagcagttgcgtttctttgagtcggcgatgggtattgagctttcgtcgctggagttggaatccctcaaagataataagtgcattttggaggtatcagaagccgctgattcaggcaggagagtattgggcagaactattagggcagcgtttggcgcgtcttgggaagaggctctctgcgaagggaagcctgtagagggaaaactcattgctggaagccccgcagttcttatca

SEQ ID NO: 17297 - DNA, 390 bp, Glycine max
  Clone ID: LIB3049-052-Q1-E1-B5
ggacttaagagagagttttacttttgcaaatcaaatctctcaatctctccctattttcgatctctctctcttttcaatctctctcttccatggctgtcaaatcacaatccccaccattgcatcaccagtttctcagcacaaccccaaacgactacaccagcgatattgaatcaattgatcaagaaggtccagaatcactttcaaaccctactccattcatggaaaatgcagaacaacatcaccatgaagatcaaaaatcaatgaagaacaagaggtacaagtttctcttgtttagaaattatgttttgctctttgtgggatcagtctcctctagtttgctcacaaaatattactttaaccacaaagggtcaaacaaatgggtctctacat

SEQ ID NO: 17298 - DNA, 325 bp, Glycine max
  Clone ID: LIB3049-052-Q1-E1-B6
ggagtgtgtgagagagcgagcgagcgagcagtttcaaagagaggatttgggattgggaaggcgagggattgcgctgcgtctcttcctcttctctttcgattcatccctcattcataatcttccaatccaacaacctcagcctcacactcacacatacacacatctgaacgcgtatcgtccctcccatggcttcaaagcgcatcctcaaggagctcaacgacttgcagaaagacccaccaacttcttgcagcgctggtccagtagctgaggacatgttccattggcaagcaacgattatgggtcctgctgatagtccttatgctgg

SEQ ID NO: 17299 - DNA, 276 bp, Glycine max
  unsure (1)..(276): unsure at all n locations
  Clone ID: LIB3049-052-Q1-E1-B7
ggtcacaccaccgaagaaggcttcaggaatctacatagctttttcctcagagcgttgaaaattcccagactctctcgcttcctcaaaatttcgccctctttcattcaattctcttctctgctcttctcttctgttcccaccttctgatccatcatccctcgttttctccgaacaatggctgctggtgtcactgtcaagtccgaggttccagaagcntgcgcccctgaaggagtatgttccaacacggaggaaaaccaactggtttaaaacaatttg

SEQ ID NO: 17300 - DNA, 334 bp, Glycine max
  Clone ID: LIB3049-052-Q1-E1-B8
gcaatcagaactgctaaagactgtggctggatgcgaggaggaatttagtggagaaggaaagtgtcgaagtgtgtgggctcaattttctgatggtggtgacaccaatgataggagtgtaagacaacaaacctgggaaaatggtgttgaaagaagtcaaagcttatgggttcacctttcggatggtgttaacaacaatgataggagtccagggcaagaagcctgacaagggattccgttgggagaagttaacgtgtcatttgtacaggaccaacctgcagggattcctccattgcatgcagtgttgtctttcttttcttttaacgggggatagtgg

SEQ ID NO: 17301 - DNA, 317 bp, Glycine max
  Clone ID: LIB3049-052-Q1-E1-B9
ggcggacggattcagagacagaacgactcggtatttctcttcctctaaagaccgagtccgactcggagggcgaagaaggcaaactcagtatcctttccttccttcactacacgcgagagagacctcagtgtctgagacgcatgcaacgtgcattttcctatatgaaggacaccatcactccgtgttcgcgtctgcgtcgtttcggatctatcgtcatcgtttgtgtcttcttcttccactactttagttgagaatctcatcccaagagacctagctggagcctccgcccgccatcgccgctgcctccaacggtcaga

SEQ ID NO: 17302 - DNA, 365 bp, Glycine max
  Clone ID: LIB3049-052-Q1-E1-C11
ggaagaagaagagtgtttctcacatcacatggcctccttgcccttggggcaccaccaccaccaccacaaaccggcggcggcggctatacatccgtcgcaaccgccgcagtctcagccgcaacccgaagttcctcgccggagctccgatgtggagaccgataaggatatgtcagctactgtcattgaggggaatgatgctgtcactggccacataatctccaccacaattggaggcaaaaatggggaacctaaagagaccatcagttacatggcagaacgtgttgttggcactggatcatttggagttgtttttcaggcaaagtgcttggagactggagaagcagtggctattaaaaaggtcttgc

SEQ ID NO: 17303 - DNA, 375 bp, Glycine max
  unsure (1)..(375): unsure at all n locations
  Clone ID: LIB3049-052-Q1-E1-C12
gaaaacaaacctgtatcatcttcttcgtctttcctttgtctctcttctttcccctctctttcgagggtttttctttttcttttttccctttttttatttttcctttattttgtttttttctttctcttgtttttcagttttgcttccatttcctttgaatccccatttattcttcttcttctgcaaccctaaccctagaattgaagatgcagcctcagaggttaaggcagcaagccatgatgcaaccatctctctaccaccaccctgctctacttactcctcctcagatagagcctatcttgagtggaaatctgccacctggctttgattcgagttcatgccgcagtgtttatgtangcaacattcatccccaag

SEQ ID NO: 17304 - DNA, 130 bp, Glycine max
  Clone ID: LIB3049-052-Q1-E1-C2
ggggagtactggttcacttggaactcagacactagatattgtggcagagagtccagaggagtttaaagttgtggcacttgcagctggttcaaatgttactcttcgtgcagaccaggtacggcgatttaag

SEQ ID NO: 17305 - DNA, 338 bp, Glycine max
  Clone ID: LIB3049-052-Q1-E1-C3
cctccgggatcgtgttgaacgactccgtgcgctgggttaccttccacagcggctacgatttcggctacctcctgaagctgttgacatgccggagcttgccggacacgcaggccgggttcttcgatctgatcaagatgtattttccgatggtatatgatatcaagcacctgatgaagttctgcaacagcctccatggagggttgaacaagctcgcggggttgtgggaggtggagagggttggcctctgccatcaggctgggtctgatagtttactcacttcttgtacatttagaaagttgagggatacgttcttcagtggctccacggagaaatatgct

SEQ ID NO: 17306 - DNA, 351 bp, Glycine max
  Clone ID: LIB3049-052-Q1-E1-C5
ggagccgcgactttcaaattccttgttcttcttcatgtgtgtctccctctcgtataaatacactaccatcttccatttcctcttcaaatccaattcaccaaacatggttgatctagattggcaaacaaagatggttcactccaacatgcctccaaagtcccccaaactctctctcccggataataacattccaatcccccttcgccagaacgagatgagggcagcgtcgtctccaatctgcgctgcctacgacaactacctccgcctccctgagctcagagccctctgggcctccaacgacttccctaattgggccaacgagcccatcttaaagcccaccttacacgccct

SEQ ID NO: 17307 - DNA, 314 bp, Glycine max
  Clone ID: LIB3049-052-Q1-E1-C6
gagcctcagcagaagcagaacgaggagaagcagaaggagcaaaagcaatggcgccgaagaagccgagaaccacgacaaggaaccctgatttggttagggggattggcaagtattcgaggtcgcagatgtaccacaagaggggcatctgggccatcaaggccaaaaacggtggcgttttgccccgccacgatcccaagcccaagcccgaggccccggcccagaagccgcccaagttctaccccgcggacgatgttaagaagcccctcgtcaacaagcacaagcccaaacccgcgaaactcagggctagcattact

SEQ ID NO: 17308 - DNA, 327 bp, Glycine max
  Clone ID: LIB3049-052-Q1-E1-C7
ggttgccagttcaggaaaacaaataaagttctcctttgaaacttctctgggctatgttattttgaaagaagttacttcgcatcaataatgggttcaggtgattggtttaagacaataattagcttaagaaaatcaaaagaaggcagatcaaagaaagcaaagggtatcttaactcaagagaaactaaatgcatcaaagtcaaacgaggtatccaggaaaagaatccagtggtttaacaaatggtattaaaagtgaaaaccttgtgtcagctggggtgtcagttgaaactattgctgcaacaaggattcagactgcatttcgagctta

SEQ ID NO: 17309 - DNA, 374 bp, Glycine max
  Clone ID: LIB3049-052-Q1-E1-C8
gacccacacgtaagggagcgaggcgtgagatagatagattccatcggtgcgtttctgctctgctagggtttcatcttcttgcatcagctccgtcgcaatgaaaccaggcttcatctgaatccgattcgccttcgccccttctcctccttcactttcaccttctccgaatcctctaccaattattatgatgagctgcatcttcctctctcagaacctgcgcgtctttggtcccggcttgaatcccttcgcacggtaggggatcgccaatcgggggggtgtgtctcgctaaataccaattcccctctccgattttcggggtcgcggtacttggtcgttttgccttgttcgtggtcgtcgtttttgcgttaattgct

SEQ ID NO: 17310 - DNA, 391 bp, Glycine max
  Clone ID: LIB3049-052-Q1-E1-C9
ggcagtgagaagaagagggggtcagagtgagaaagagaaagagagaattcgtaaaccctaatttcggaaagatcggcgatgactgcctccaaggatcgcgagaacttcgtctacatcgccaaactcgccgagcaggccgagcgttacgaagagatggtggaatcaatgaagaacgttgcgaatctcgacgttgaactgacggtggaggagcggaatttgctttctgttgggtacaagaatgtgattggtgctcgcagagcgtcctggaggatcctgtcttccattgagcagaaggaagatacacaagggaacgagttgaatgctaagcggattaaggagtacagacagaacgttgaattggagctatcgaacatctgtaatgatgttatga

SEQ ID NO: 17311 - DNA, 395 bp, Glycine max
  Clone ID: LIB3049-052-Q1-E1-D1
ggacatcactgtcactgtatttgcgcgtccttaccttacttacctctttgtctgtctttccttctctttttcattttgaaggcaaattcgcggcctcgagtcttttctttttctgtatcgtttttactttccatcacttccattttccgtcatcatggaggatgctgctgcttctgctaatgctgcagaggatagagaaaacaagttcctaactatggcagttgaagaagcatataaggcggttgaaagtggccatggtcgcccatttggtgcagttattgttcgaaacgatgaaatactttcaagctgtcataacatggttgtaagaaatgctgatcccactggccatgctgagattactgctaatagagaagcttgtcgagagctgaatcaag

SEQ ID NO: 17312 - DNA, 383 bp, Glycine max
  Clone ID: LIB3049-052-Q1-E1-D10
ggaaaagaactagtataaaaaacagaaacccaacatttttctcgtgaaacgttcttcgttgaccatggagctctctgtgcccttcagattccgatcacggaacctcctctcaccctctacacacatacccatcacctacccttccaagcatcaaccaccctttttaactaagtttgtcaacaaacccaagatttctaaactaacggtgagagcgcagagaagggcacccattgaagggctgagcgatgagttgaacgctatagcccgttgtaaccttgactttgcttacactcgaagaagggtccgcgctgctttcgctgatatgcagcagcagctggatcattgcttgttcaagaatgctcctgctgggatcagaactgaag

SEQ ID NO: 17313 - DNA, 351 bp, Glycine max
  Clone ID: LIB3049-052-Q1-E1-D11
ggcagtttcaaattttcttttccttcactttcccgagaaaaaaataacacttttcactttcttcactacgttctcacttcgatatggctcgtacgaagcaaaccgctcgcaagtccaccggtggcaaggcgccacgtaagcagctcgccaccaaggccgctcggaagtccgctccggcgaccggaggagtgaagaagccccaccgcttcaggccgggaaccgtggcgctgagggaaatcagaaagtaccagaagagcaccgagcttctcatcaggaagcttccatttcagaggctcgtgagagaaatcgcgcaggatttcaagaccgatttgcgtttccagagcagcgctg

SEQ ID NO: 17314 - DNA, 394 bp, Glycine max
  Clone ID: LIB3049-052-Q1-E1-D12
ggggcttgaaactcaaaactataataatgggttcttcttctcctccggacactagcaagagcataaagctagagcgatacaacagctacatcaggagactcaacagcaccaaactcctcaacgcctcctccaaactcctcttccgtgccactatcttagtcgcactcatcctcgtcttcctcttcaccttcaactaccctcccctcgccccagacttcacctcccaccgccacctccactcccactcccacttcctctcctcctcctcctccttcgcctcctgggagaagcaggtccgccactcctccacccctcgccgccccaacggcctcaccgtcctcgtcaccggcgccgctggcttcgtcggcagccaatgctcccttgccctcaaaaa

SEQ ID NO: 17315 - DNA, 333 bp, Glycine max
  Clone ID: LIB3049-052-Q1-E1-D2
gatgagaaaaaggagaacatgaatttgaaggctacagagttgaggcttggtcttcccggattccaatcgcctgaaagggaaccggatcttttctctttaagctcaccaaagcttgatgagaagccactcttccctttgcttcctactaaagacgggatttgctcgtccgggcagaaagctgttgtttctggcaacaaaagaggttttgctgataccctcgatgggttttctcagggggacgtttgctggtaatacacggatgaaacccgtgctatcacctagaccttctggagctcaaccttctgctatgaaagaaacaccaagcaaattgtc

SEQ ID NO: 17316 - DNA, 339 bp, Glycine max
  Clone ID: LIB3049-052-Q1-E1-D3
gatcgcagcacgctctttcatctctcactcatggcaacaacactcatgtttttccgaccaaccatgatccgggcctccgctggttctcccgccaagcccgacccgagaaacaggaagcccgtttcctccaactggtgggctcctctgttcggatggcccgcggatccggactacatgggcccattgcagaaggcgagtgagaaatcggatccggagctggaagtgggcctggacctgggcccggccagatccaagttcacagcggggtgcttcacggagaagaaggccaaagagctgagaaagaagaccgtggaaacgtcgacgtttcatgacatcatg

SEQ ID NO: 17317 - DNA, 324 bp, Glycine max
  unsure (1)..(324): unsure at all n locations
  Clone ID: LIB3049-052-Q1-E1-D4
ggggtgcgttaggggtttctaatttttgtaacagagcgaaacacttccgtcagtggtgtccgcatatccttcccgccgataacctttccggtgatcgttcttcgctcacgcacgcgttacgctgaaggcatgaatgcgttcaaggcatacaaggcctgtgtgccaattgcttggagccccaatatctatataactctggtgaggggtaggcganggaccangaggctccataggcgcactttggaagcacttcgcttgcgcaaatgcaatcgagcggtcatgcgatggaacacacctacagttagggggaatgctccaaacagt

SEQ ID NO: 17318 - DNA, 367 bp, Glycine max
  Clone ID: LIB3049-052-Q1-E1-D5
gattgtatttttaattagaaaaggcgcagaaacagaaacagaaagaatggctggtcccggcaaatgcttcctcgtgacgggtcctccgggtgtgggaaaaaccactcttattatgaaagtattcgagtccctcaaagtcaatccatccctcaagcttcagggcttctacactcgggaaattaggcgcgccggccagagggttggttttgacgtgcgcagactcgacggtcgcactgccccacttgcttccatcgacatttcaacccccgagtctctcagatggcctaatgttggcaagtataaagttgatgttgcttccttcgagtcactagcacttcccgagttacaagttagagaagacactgga

SEQ ID NO: 17319 - DNA, 245 bp, Glycine max
  Clone ID: LIB3049-052-Q1-E1-D6
gcacacaaaaggagcatcgagtaggtttcctactcccttctcatcgttggcaagatgagtgccatgaaattttgccgtgaatgcaataacattctgtaccctaaggaagacagagaccagaaagttcttctcttcgcttgccgcaactgcgaccatcaggaggttgctgataacttctgtgtgtataggaatgagatacaggatggggttggagagctcaggcaggtgttgcacgatgtcgctgc

SEQ ID NO: 17320 - DNA, 338 bp, Glycine max
  Clone ID: LIB3049-052-Q1-E1-D7
ggtttcttgtagcattcagtgaaacactagctagggtattgggagctctcgttgtttcggagttagggaccttacgcagccatggccactgctacgaatgccgccgccgccccaccacgccagctctcccagaaggaagctgacatccacatgatgttggccgccgacgtccacctcggcaccaagaactgcgacttccaaatggaacgttagatcggcaagcgccgcaaggacgggatctacattattaaccttgggaagacgtgggagaagcttcagctagcagctagggttatagttgcaattgagaacccccaggatatcattgttcaatctgc

SEQ ID NO: 17321 - DNA, 230 bp, Glycine max
  Clone ID: LIB3049-052-Q1-E1-D8
gaagggagaatagacagatcgaaggagacatttacaaaatgcgctttccctgtctcaaaatctcgcacactcactccatttttacctttctctctcgctcgcaaacacagattctacacaacaacgttttacccatggcatccagtgtgatcttgaacgaactcatagatctcgacaaggatcctcctacctcaagcagtcgccagtcatgttgcggaggagatgtgtca

SEQ ID NO: 17322 - DNA, 365 bp, Glycine max
  Clone ID: LIB3049-052-Q1-E1-D9
ggctgttccaagtcccatagcagcgatgggaatcgatcttaaggctgggggtaagagcaaaaagaccaaaagaacagcaccaaaatccaatgacatctacctcaaattacttgtcaagctttatcggttccttgttcgaaggactggcagcaatttcaatgctgttatactcaagcgcttgttcatgagcaaggttaacaagcctccaatttctttgtcaaggttaattaagtatacaaaggggaaggaggataaaattgctgtaatagtggggactgtaactgatgatatcagagtatatgaagttccagcattgaaaattacagcactcaagtttactgagagagcacgtgcaagaatagaaa

SEQ ID NO: 17323 - DNA, 307 bp, Glycine max
  Clone ID: LIB3049-052-Q1-E1-E1
ggggtgagttgttgtctatctcttcttctctttgtgttttggctgtggacgtaaaataatggctctgtcttttggttttgggctcttgtcttcttcttcttcttcttcttctttatgtgttctccctccatcagaaacccacactttcatgatgaggccttctgcttcttctggtttgcgcatgatgcgtaggagtcgcattacctgttgcaccctttctcagtcttctaagccagcccgcaaaatccgtggtatcatgaaaccccgcaaagtctcccccgagatggaagacctcgtcggcgctccc

SEQ ID NO: 17324 - DNA, 371 bp, Glycine max
  unsure (1)..(371): unsure at all n locations
  Clone ID: LIB3049-052-Q1-E1-E10
ggtgcgtcggagctgtctgtgcaaatttgcgttgttcttcgcggcacacctcactcactgaacggtaagtatggcggacaaggctgttacaatccgaacccgaaagttcatgaccaacaggcttctttccaggaagcagtttgtcgttgatgtccttcatccagggagggcaaatgtttccaaggctgaacttaaggagaagctggctaggatgtatgaagtgaaagaccctaatactgtatttgtcttcaaattccgaacacattttggaggtggcaaatccactggatttggtttgatttatgatacagtggagaatgccaagaagtatgagcccaaatacaggcttatcangaacggccttgacacca

SEQ ID NO: 17325 - DNA, 382 bp, Glycine max
  unsure (1)..(382): unsure at all n locations
  Clone ID: LIB3049-052-Q1-E1-E11
gagcaacagcttcttttgttccgcataggagtgttgttgggttgctggtacttctgaaaagcccaccccaaagtcgaaacgaaagcgcagagagagcgaaacgatgtcgtacgacgatgtggagatcgaggacatggagtggaacgaggagttgcaggcgtacacgtacccgtgcccgtgcggggacctgttccagatcacgaaggaagaccttaagctcggcgaagagattgctcgatgccctagttgctctctctacatcaccgtcatctacaaactcgacgatttcctctccgattccgatcagnatcgaccanacaacggcctccaaccttccaagcagcaacncctcaacgttgcttgaatttcagatgtcctgaca

SEQ ID NO: 17326 - DNA, 348 bp, Glycine max
  Clone ID: LIB3049-052-Q1-E1-E12
ggcctaggaatgttttagaggatcgatttgggattctgacacctttgaatcagaaccgaaccctaatttcccattcactcatccttccctgcaaaattttcttgccagctgtgacagtcagtgacccccaacctttgcacctcggctctccatagtttatgatcattcgtgagatcttcggaggcatttcctggccaaccgtgacacgaatgctgctttgccttgttccgtccctgcgttgttctgttttgtgatctcctcaacacagcaaccatcctccaaccttcgataacattttcaaggttggtcgctccatgccactgtttgggattgacaactatgacacag

SEQ ID NO: 17327 - DNA, 311 bp, Glycine max
  Clone ID: LIB3049-052-Q1-E1-E2
ggagcaagagtgaagagcgaagagaatggctcccaagggtttaatctttttggctgtgttatgcttctcagcactgtcactgagtcgttgtcttgcggaggataatggacttgttatgaacttctacaaggaatcatgccctcaggctgaagacatcatcaaagaacaagtcaagcttctctacaagcgccacaagaacactgctttctcctggctcagaagaatcttccatgactgtgctgttcagagttgtgatgcttcactgttgctggactccacaagaaggagcctgtctgagaaggaaacagata

SEQ ID NO: 17328 - DNA, 139 bp, Glycine max
  Clone ID: LIB3049-052-Q1-E1-E4
ggctacctgaagggtgtcgtcactgacgtcatccacgatcctggccgtggcgcgcctctcgctaaggtcgccttccgccacgcgttccgctgcaggaagcagaacgagctcttcatcgccgccgagggtctctacaccg

SEQ ID NO: 17329 - DNA, 278 bp, Glycine max
  Clone ID: LIB3049-052-Q1-E1-E5
ggaggccttagagagagaaagagaatgtcgtcgacggtgctggacgtgacgcgggcggcacacgaggaagtggagcggttggagcggctgatagtgaaggagctccagaatgaccctgcctccaacaaagagcgcttgtatcagagtcatcgggtgcgaaacatgatcgacaccagtacttccaccactgaaaagcttattggggtatatggggaggggcacaatgcaccgaaggacgagattgctgcactcggaggccaaaccgccactggaattaa

SEQ ID NO: 17330 - DNA, 331 bp, Glycine max
  Clone ID: LIB3049-052-Q1-E1-E7
ggacaccgattagattaggggcttcgaacaaggagccccgaaacccaaaccctaatctgattcgctttcgattatggcgtctgagagcgcttctcgatcgagttccgcggccgattcgtacattgggagcttgataagcttgacctctaagagtgagatcagatacgaaggtattctctacaacatcaacaccgaagagtcgagtattggcctcagaaacgtgcggtcttttggaacagaaggaaggaaaaaggatggcccacaaatccctcccagtgacaaggtttatgagtatatacttttccgtgggactgacatcaaggatttacag

SEQ ID NO: 17331 - DNA, 367 bp, Glycine max
  unsure (1)..(367): unsure at all n locations
  Clone ID: LIB3049-052-Q1-E1-E8
aggggacacaatattttaagacgcacataaacttcctctgtcactacccactcctctctctgtctccgcctttcgcattgcaagcgctctctttctttgcttttccttccccctttcagtttcttcaacgctgcaactatccatggcaaaccgctggctcagacccgaggtgtatccactgttcgctgcggttggtgccgctgttgggatctgtgggattggagttggttcgtaatagctgcatcaaccctgaagtcagggtgaacaagganggaagaaaggcaggagtgttggagaactttgctgagggagagaagtatgctgagcatttcctgaggaagttatgtcgcaacagaactcctgagat

SEQ ID NO: 17332 - DNA, 355 bp, Glycine max
  Clone ID: LIB3049-052-Q1-E1-E9
ggaattcgtcgccgagatttcctctaacatgttcctcaaactaactattctagctgctaatttctaccatgctcatattaatattaatatcatatcatatcatctacatgcataatgcattgcacctaaacatgccacatacttaattatttatcattagatactaaataattgaaccactgttacaaaatagcattatataagtccatgaaacgccgtatataatgcttttgttattattattagcgttgcttcttgcgccattgagccattttccttttttcagcagcactagttccgtgtttgtgtctaatcaatgatgttgtgttgtgctctgttttcctctgacttgtat

SEQ ID NO: 17333 - DNA, 364 bp, Glycine max
  Clone ID: LIB3049-052-Q1-E1-F1
gggcactcagtagagaattaaatagaatcaagaaagcatgcatatgatgaagaaggtgtgtgggtttgcaatagtggtgatggcagcactttttctggtggagatgagtcccatggcagaggctgtgacttgtagccctgtggagttgagtccctgtttgggggcaatcacgtcctcttcaccaccatcgacaacttgttgccagaaggtgagggaacacaggccatgcctctgtggttacctcaaaaaccctagtctgaggccatatgtcaactctcctggttccagaagggttgctagctcttgtggggttcccttcccaacttgttagtcactttttacttcatatatatgtaataaactc

SEQ ID NO: 17334 - DNA, 362 bp, Glycine max
  unsure (1)..(362): unsure at all n locations
  Clone ID: LIB3049-052-Q1-E1-F10
ggtagcattcagtgaaacactagctagggtattgggagctctcgttgtttcggagttagggaccttacgcagccatggccactgctacgaatgccgccgccgccccaccacgccagctctcccagaaggaagctgacatccagatgatgttggccgccgacgtccacctcggcaccaagaactgcgacttccaaatggaacgttacatcttcaagcgccgcaacgacgggatttacattattaaccttgggaagacgtgggagaagcttcagctagcagctanggttatagttgcaattgagaacccccaggatatcattgttcaatctgcaaggccttatgggcaaagagcggttctgaag

SEQ ID NO: 17335 - DNA, 367 bp, Glycine max
  unsure (1)..(367): unsure at all n locations
  Clone ID: LIB3049-052-Q1-E1-F11
ggaaaagagaaggcggatgacagtgatgaagagcagggtgccgcggcgcctaggcctgttgtttctgggatgaaaagagatgatgggtctgtgacttatgaagagcttcagcaaaggcttcgtcgcaggctcgaagagtttcgtgcaagtcgtaatactgggaattcggataggaagagggatgaaagaaatgctaggagaggatataaggacaagaaacgcaagagggatgaagaaactgaggaaggtaaccctgtgcgtggtgaattggcggcggagaaagtgaagaaggatgctgcagaggcctccaaggatcttgtgtttggacatgttaaacttcagaatgaggaaatgctanggaaaaaga

SEQ ID NO: 17336 - DNA, 338 bp, Glycine max
  Clone ID: LIB3049-052-Q1-E1-F12
ggcagcagaaagaaatgaaaggccaacaacagctcaaaaaatctaaagtggtgaaaattgactcaagaaaatcatgggaacaccacataactaatgcaaccaataaaggctatcctgttatggttcatttctctgcttattggtgcatgccttctataactatgaatcctttttttgaagaactggcctccacctatcaaagtgttctctttctgaatgttgatgttgatgaggtcaaggaagtagcttccaagttggaaatcaaagccattcctacctttttgttgatgaatcgaggagctctagtggataaaactgtgggtgcaaaccctgatgag

SEQ ID NO: 17337 - DNA, 346 bp, Glycine max
  Clone ID: LIB3049-052-Q1-E1-F2
ggtgtgcctttgcagtagtactttgttcgctacttcgcttctacactccactccattctctgaagtgcaggaacaatgtctgagaaaatcacagctgaaaaacttttaaacacccttgtggaaacacttactgaaaagcaaaaatctggattattttttgaagaagacaagtcaagctcagtgagctcccaattcaatagactatttggacgccaggagactgtgcaccatattttagggggtggaaaatctgctgatgtcttgttatggaggaacaagaagatcgctgctagcgttttatccgcagcaacagctatatgggtgctttttgaatggcttaattata

SEQ ID NO: 17338 - DNA, 359 bp, Glycine max
  Clone ID: LIB3049-052-Q1-E1-F3
gagacaaacaataatttaaattgttctctggtgttcttgctattaattaatagtaatttccactgctccagttccaaatatatatacttactagtttcctacacactccttaattactatttttcactttctcctttcaatatgaggaaccccactcacaagtcccctgaggttgaagatgatggtgattttaaagttcatctgttctcttcagcatgcgagttgcttgagaagcttcatgaaaaatggagttcagtggagaaaccaccatacccagctatgtattctagtatttatggaggtatcatacttgatccagcaatgatggtaatccccattgatgatcacatggttcacag

SEQ ID NO: 17339 - DNA, 384 bp, Glycine max
  Clone ID: LIB3049-052-Q1-E1-F5
gtggacagacaagaattaggcccgaagaaagtgataccatcagccttgaccttgggatgggaattagcccagctgctgaaaacacaccaaacagtcaagggagaatgatgctttctgaatttggggatagtcaaactcacaccagcaattccaatttcaattttgttcatactacgacagtgccggggtactttggtgtgctaaataacaggctctgacccatatggttctagagaaaatccaagtgatggtccatctttaaaccattctgcttatccttgccctcagaacatagggagaatactaatgggtccttaaaattgtttgtacaacaaaaaactaaataaaatgaaattctgagttggattttgcgttttcgttttt

SEQ ID NO: 17340 - DNA, 299 bp, Glycine max
  Clone ID: LIB3049-052-Q1-E1-F6
gaacaagcaaaaaaaaagagtcttctgttatcctttcaacgctaccagatgccggaaaacaggcaggttctgaggaatgctgattctagtgacaacattgaagcaattcggcgtttgaaaatcaatgataattgggatagagatgctgcagctcaatctacccaatatccagatcgacccggtgaacctgagtgcttgtattatttgaggactgggagcgtgtggttatgggagtaactgtcgctaccatcaccctgctcatatttcaattggtactcattatggtgaagaactccctc

SEQ ID NO: 17341 - DNA, 315 bp, Glycine max
  Clone ID: LIB3049-052-Q1-E1-F7
ggtgagtgagacatgtggggatgggttctctttgagtaggatttaggttgatacctcacataaaagcaaagtggcatccaagttggacttcatgataagctacttgtttgttggtcgactttggtagcgatttgaggctcttatacccccatgctgctatagatatctttatattttccccaaaaatccagatccaagcttggcatctaatatctgggatatcaatcttcatatattttcttttgataatgatcttgattacgagagctcggtgttttttttatattattattgggggcgtgagaaacttttttt

SEQ ID NO: 17342 - DNA, 280 bp, Glycine max
  unsure (1)..(280): unsure at all n locations
  Clone ID: LIB3049-052-Q1-E1-F8
gattgcagtaagtaacagcgaacgaagaagaagaagaagaagaagaagaagaacgcagaagccacgatgagtggcagagccatgatctcctgtttctctcctccttcaacaactccatgctctgcccccattccactctggcgccgaaacctcgtcctccatgcaactcctccaccttcgctacacctcctctcgcggcggagccacctcgttggcggcgggagganggtgtgggtgaatgtgaagtccgagaagaacttatccgaatgccccaagtacg

SEQ ID NO: 17343 - DNA, 358 bp, Glycine max
  Clone ID: LIB3049-052-Q1-E1-F9
ggagagagagagagagagagagagagagagatagatggtgtctctgaaacttcagaagcggcttgccgctagcgttctcaagtgtggtagaggcaaagtttggcttgaccctaatgaggtcaatgaaatctccatggctaattctcgacaaaacataaggaaattggttaaggatggtttcattatcaggaagccaactaagattcattcccgttcccgtgctcgcagaatgaaggaggccaagaggaagggacgtcactctggttatggtaagcgtaagggtacaagagaggctaggctccccaccaaaatcctttggatgaagaagatgcgtgtcctcagacgattgctccgcaag

SEQ ID NO: 17344 - DNA, 268 bp, Glycine max
  Clone ID: LIB3049-050-Q1-E1-G3
gagttagggtgagttgcatgcgctgtcatcgctccgttgacgactcgatgtgcatcgcaattcgccatcagtagttattcagagatggtgactggcaagtccccgtcgtcacgaaactgattctcatcatcaacccttcgacccaacacatcatcggggagatcccagcagctactaaggaagacgttgatctcactgtcgctgccgccaaagctgccctctctcgcaacaacggcgccgattgggcctccgcttccggctccattcg

SEQ ID NO: 17345 - DNA, 373 bp, Glycine max
  unsure (1)..(373): unsure at all n locations
  Clone ID: LIB3049-048-Q1-E1-H4
ggtctcaaaacaaatagtggaagagtaggaaacgagattgacgaaccctaagctgaaagaagaaaaaatgtctggcgttaagagaacactgaagcagttcaccttccgaaccggcaagaccgccggtcgcaactcggccgggcgcataaagttctttcaccgcggccgcggagccaagcgcttgcaacgaaccgtcgatcacaaacggaataccgcttcttctctcggcgtcgtcgaaaggatcgagtacgaccctaaccgctcctccaaaatcgccctcgttcgctggatcgaanngcgtcatcaccgtcgccgccgcgctgcctccgccaacgccgcttcgcccaagctcctccatctcgattccgccact

SEQ ID NO: 17346 - DNA, 299 bp, Glycine max
  Clone ID: LIB3049-048-Q1-E1-H6
gatccaactcaggaagggaaggcgagacagctcaatcctacacatgacatctcaatctcaatctctttcgtagtgttttttgtttttaaatacataaaaaaccattcattctgtttcgttccactccctaatagctgctacagttacagcataacttctattctatatttctttctactcgcaagcaaatcagaagaagagaatggcagcagcagaggggctaaacagagagcagtacgtgtacttggcgaagctgtcggagcaagcggagcggtacgaagagatggtggagttcatgc

SEQ ID NO: 17347 - DNA, 335 bp, Glycine max
  Clone ID: LIB3049-048-Q1-E1-H7
ggatttcatttcgtttgcaattgaatttcaatttccctaggggcttaatatctcccctcacttgtgcctagccttatgtcatagtattatcattcattctcatctttctctcttctctctccacccaaaccctaactcccgaccctgttcccctctcgtatccgtcatgaaaggaggaaagtccaagaccgaatctaagagagccgatcccaaacttgctgtgaataagaagggagccgccaccaaggctaggaaacccgccggcaaggggaaggcagcgaaagaccctaacaagccaaagaggcctccaagtgctttcttcgttttcatggaag

SEQ ID NO: 17348 - DNA, 376 bp, Glycine max
  Clone ID: LIB3049-048-Q1-E1-H8
ggtcacagagctggtgaggctgccattgtctatgaacatggagctgatgttgaggcactaatgccaaaactacggcgatctgattactacacactgcctcgtatacatgaactggcggccaaggaaagagctgaaccaggattctgcagtcatgttaaggacttcgtggttggaaggcaaggttatggcagcatcagattcttgggtgagacggacgtgcgacggctcgatcttgagtccctcattcagtttaacaaccgggaggtgattgtatacatggatgatttaaagaaacctcctgttggacaagggctgaataagcctgctgaggtgacactactcaacataaaatgtttcgacaaaaaaactggccatc

SEQ ID NO: 17349 - DNA, 388 bp, Glycine max
  Clone ID: LIB3049-048-Q1-E1-H9
ggagataaagaaggcattgataatcatagctatggcaacggcgagtgcaagttgtgcggtatcatttagaaacagcttcggtgtgagtaaaccctcggatcttgggttcttgagctctcgtctgaacggcctcagaatctgcttccccaaattgccacccacacccctcactgcttctcccttccccacacccctccctatcgttgccaagagagtgtgtcccttcactggaaagaaatcaaacagggccaacaaagtatcattttcaaaccacaagacaaagaaactgcagtttgtgaaccttcagtacaagagaatttggtgggaagcaaggaagcgctacgtaaagcttcgtttgtcaactaaggcattgaagacgatagagaag

SEQ ID NO: 17350 - DNA, 289 bp, Glycine max
  Clone ID: LIB3049-049-Q1-E1-A1
ggtaaatcttggaacaggcaatcatcatttggcagcggaggcagaggaggttcttccaggcctccttttgggggacaaagaggagtctgcaagtattatgagagtggacgttgcaggaaggggacttcttgtgattttctacacacttagttgtagggctaattaattagtggcagagaaacatctcttactgtacagtattttccaatttcatggctaaacgttgtattaggatgcgtcatgtatgtagaacttgtgcattgtagtatctcgtttatttgtcttgccc

SEQ ID NO: 17351 - DNA, 353 bp, Glycine max
  unsure (1)..(353): unsure at all n locations
  Clone ID: LIB3049-049-Q1-E1-A10
gatactccttaattcttacaatttattatctttctccaagaactcttccaattttttctctcccttcctctttagcttcaaccgcaaggcatcaacagcaagaaccttctttgccttcattctcgccgtcgtcgctctcttcttcgccgccgccaatgctcaagacctctccccgggctccgagtcccgatgccggaaccggcgggaatcgtttcgagctccgttcgcatgatcggagcttcggttgtgctgtcattgatggctatcttgaagcattgaattcgttaattttcgttggtttgtacanaattgattccgtttatatacagagtggtgattatgagctttggtat

SEQ ID NO: 17352 - DNA, 311 bp, Glycine max
  unsure (1)..(311): unsure at all n locations
  Clone ID: LIB3049-049-Q1-E1-A11
gacacaacttttctccaaaatcgagattaagacgttgttccctttgcgccgtcccacaagcaatttagcacagcgcacaaaggtgtggtggggcaaaggaagtttcaagttggtgttgttgcaggtgaaaaatgtggttcgtgtacgtgtgcgaccaggaagacaaggaacttggaagacaacaagctcctgggtcgtgtcnctactgtggagccaaagttgaagccatggatgttgagatccagtccangctctgcttcttgcccctctgcttcaagatcaagagaaagtacctttgtaaccactgcgct

SEQ ID NO: 17353 - DNA, 323 bp, Glycine max
  Clone ID: LIB3049-049-Q1-E1-A12
tgacaagcgtgtgattgagaggttcgagaaggaagctgccgagatgagcaagatgtcattcaagtatgcctgggtgctcgacaagctcaaagctgagcgtgaaacaggaattaccattgatattgctttgtggaagtttgaaaccaccaagtactactgcacggtcattgatgctcctggacatcgtgaccttatcaagaacatgattactggtacctcccatgccgactgtgctgtccttactattgactccaacactggtggttttgaaactggtatttctaacgatggacacacccgtgagcatgctcgtcttgctttca

SEQ ID NO: 17354 - DNA, 356 bp, Glycine max
  unsure (1)..(356): unsure at all n locations
  Clone ID: LIB3049-049-Q1-E1-A2
ggaacttcaagggcaaaaaaagttgtgctgtgccgcctcttccgtangcagcagcaatggcctcaaatcccaaaactttgacctttgaggaagtagctaagcacaacaacaaaaaggattgctggattattatcaatggaaaggtgtatgatatcacaccatttttggatgagcatccaggaagtgatgaagttttgctgacgtcaacagggaaggatgccaccattgattttgaagatgtgggccacagtgattctgctatagaaatgatggaaaaatacttcattgggaaagttgacactcncactcttccacccaaagttagccatagtctgccacaaactacacaaacacat

SEQ ID NO: 17355 - DNA, 278 bp, Glycine max
  unsure (1)..(278): unsure at all n locations
  Clone ID: LIB3049-049-Q1-E1-A3
gtatacaaagtcaacagatctaaatgaataaaaaatagtatttatggctacgcaaaccgttgaggataattctagatctggtccaagacgaactgttgtangggatttattgaaaccattaaattcagaatatggtaaagtagctccggggtggggaactactcctttgatgggtgttgcaatggctctatttgcgatatttctatctattattttggagatttataattcgtccattttactcgacggaatttctatgaattagattcacaagaatc

SEQ ID NO: 17356 - DNA, 374 bp, Glycine max
  unsure (1)..(374): unsure at all n locations
  Clone ID: LIB3049-049-Q1-E1-A4
gctgaaatagtgaaactaacgaagcaaagatgtcgtccatgctgcgcttccctttctcgtttcctcagccccgaaggcctcaattccctcgcccattcaccgcattcgccgccgccgttgccggagcctccgccgccgtcgtggccgtctcctcctccgaccgctcctttctccggaatgctctgaattccttcttctcttctgacctatcaatgcctctctggggttcactgagtttggccgacagtggggtttccgtggttgagtcaaaaaccggaacttcgttcccttcggttttagacagttctcagaaactctgcggaattggcttgcggaaaanaagcattttgggattgaagaacattgatgtatac

SEQ ID NO: 17357 - DNA, 360 bp, Glycine max
  Clone ID: LIB3049-049-Q1-E1-A5
gatcatcctaattaaacaaacaacttttcacacatgaccatgctacctcattcattaactatgattgcaacactaataatcatttttcttgcacaaacacttgtgggggtgagttcacttcctgaagctgataaaataaccaatttgccggggcagccacgggtcgaatttcagcaatattctggttatgtcaccgtggatgatcaaaatcaaagagctttgttttactactttgttgaggctgaagaaaacccttcttccaagccattagtcctatggttgaatggagggcccggttgttcatcgattggagttggagcttttgctgagcatggtcctttcagaccaagtgacaacaat

SEQ ID NO: 17358 - DNA, 343 bp, Glycine max
  Clone ID: LIB3049-049-Q1-E1-A6
gaggactgggaggatagaactgaagtggctgtgtggtgttacagttgagttgagcgatctcttctcttttcttgtcttgtcttttgcaatggctaatgcaattataatgccgggttttctgcttcgacccactacccagacgacgccgtttcggttgcccaatcacactcactccttccattcccctcgctgctccctttccctcacaccccaatcggctaaagcttttgcagttccaaggaggaaagcattgtccttgatcttatcgagttactttctctcggaggctggtttagcattggctcaacagtctcctgtgttccgcgaatacatagacgcattt

SEQ ID NO: 17359 - DNA, 324 bp, Glycine max
  Clone ID: LIB3049-049-Q1-E1-A7
gagttgagagttgaaagacatgggtacggtggctccaagagttgaaagcttggcgagcagcgggataaagtgtatcccgaaggaatacgtgaggcctcaagaagagctcaagagcatacggaacgtgtttgaggaggaaaagaatgaagggctacaggttccgacaattgacttgagagagatagattcggaggacgaggttgttcgagggaaatgtcgtgagaagctgaagaaagcggcggaggagtggggtgtgatgcacttggtgaaccatgggatccccgatgagctgataaagcgggtgaagaaagcacgggaaacgtt

SEQ ID NO: 17360 - DNA, 306 bp, Glycine max
  Clone ID: LIB3049-049-Q1-E1-A9
ggagcctgtggagtgttttcttctgatttcatctggatctgcgagagatgacggtctttcatttcttcaatcgcgcgattctcaccttcggcccccacgccgtctactattctgccacgcccttatctgagtatgatacactcggcacctctatcaaagccgctgttgtttatcttgcaacggcattagtgaagcttatttgtctagctacttttctcaaggtatcagagagcgatagctttgatccgtatcaggagtttttgaaggcgttaataggttctatagatgttgctgggctttaatttg

SEQ ID NO: 17361 - DNA, 243 bp, Glycine max
  Clone ID: LIB3049-049-Q1-E1-B1
cacggggacttgagagcttccgtacaggtgtaaggtggctccaagagtgtggagtaacttcgtgatcaacgggatcatctgttgccagagggagtacatgaggtctcacgaagagctcattagcatgaggaacgtgtttgaggaggaaatataggaatggctacatgttcgaacgggtgatcttgtaaatatctattcagatgactatgttgttcaatggatatttcctgagaagctgatcaa

SEQ ID NO: 17362 - DNA, 52 bp, Glycine max
  Clone ID: LIB3049-049-Q1-E1-B10
gatctcttacaacgaaaccctcttcatcttgttctatctgtgacgagcatca

SEQ ID NO: 17363 - DNA, 268 bp, Glycine max
  Clone ID: LIB3049-049-Q1-E1-B12
gactccgaagtccccaataaagtccaaattggaagccgaaggaaatctcatcgtgtgattgaaatttgcccagtgtgacgatggcgatggaactggaccagaatcaggaacatcaattaaggtttcccttctggaaatcgctccgtcgcaggttcagagcccagtcacctttcctcgctcatagcaacctcgaacgggaacttctcgccaaacaacctgccttggaattaacacaagacagacaacagcctcagacatggatgcaaca

SEQ ID NO: 17364 - DNA, 342 bp, Glycine max
  Clone ID: LIB3049-049-Q1-E1-B2
gattccagtgtttttcatttcatcgtgcattcaatggccaccacagcagctctatccggaaccatggtgagcacctccttcatgaggaggcaacctatgaccaccacaagcctaaagacattccccaacgttggtgaagctctttttggtctgaaaagtggacgaggtggtcgtgtcacttgcatggcctcgtacaaggtgaagctcataaccccagaaggagaagtggagtttgaatgcccagatgatgttttcattgttggcaaggcagaggacgaaggcattgaacttccctactcgtgcagggccggttcttgcgtttcctgtgttggcaaaattgtg

SEQ ID NO: 17365 - DNA, 356 bp, Glycine max
  Clone ID: LIB3049-049-Q1-E1-B3
ctgccagaagagacagagagggaggaataagatgcgaatatataacaaataatttgtactttcatcaatacaaaatcccgttgtatttttctcagatggcgcgaacgaatcagctggcgactaacgcggctcgcaagtcggctccggcgaccggcggcgtgaagaagccgcacagattcaggccgggaaccgtggtgctgcgcgggatccggaagtatcagaagagcacggagctactcatccggaagcttccgttccagcgcttggtccgcgagatcgcgcaggacttcaagaccgacctccggttccagagctccgccgtctccgcgctccaggaggccgccgaagcttacttg

SEQ ID NO: 17366 - DNA, 276 bp, Glycine max
  Clone ID: LIB3049-049-Q1-E1-B4
ggtctagatgacgatacaacgggactacgggaaacagacatctcaattgatacagattccatctgatggtaatcaatacactaccataacgtctaacagttcccgagcttcgacatcctcttatggcaatacgaattctcctatatccacagatgtggatgtcaaccaattgccagatgagattggattatgggtacaattcaaactcaactcttaccagcactgcatgtcagagtgtagtcaatgagacactatctgtgatccccattacatata

SEQ ID NO: 17367 - DNA, 236 bp, Glycine max
  Clone ID: LIB3049-049-Q1-E1-B5
ggcgggtgccagctgttcaaccactttgctttcttcttccttagtttcgtttggttagttagggttttcctttccacaacttcactttcttcttcacttcttgcaatcacacaatacaacaacgcaattcctccacaaactgaaaaaaaaacacacaatttcgctcactacagaactcgcacgtgcccttactttcctgtcacgtgtgcggtggagtttagtctccattagagatg

SEQ ID NO: 17368 - DNA, 354 bp, Glycine max
  Clone ID: LIB3049-049-Q1-E1-B6
gacgctcaattcattttcttctcctctctctctctcctagggttagggttttctctcttcatcactctctgtgtcgctccgtttcaatggctcagcaagacgctcaaaacggcgggtcggagaatgccgctgctgctgctacggtgtcgtttgtcgctgtgaagccgcagctcctcgtcgaagctcccaaagccaacgacgccattctgttcttcaaggctgcgtttggcgctgaggaagttggccgtacgctcaaccctaagcgcaaagctgagcacgagctccctctcatactctccgcagaactcaaaatcgctggctccaccattctcgtcgccgaactcgttgatgaca

SEQ ID NO: 17369 - DNA, 390 bp, Glycine max
  Clone ID: LIB3049-049-Q1-E1-B7
gaggaacaagaagcgaaaatataacaaataatttgtactttcatcaaaacaaaatcccgttgtatttttctcagatggctcgaacgaagcagctggcgactaaggcggctcgcaagtcggctccggcgaccggcggcgtgaagaagccgcacagattcaggccgggaaccgtggcgctgcgcgggatccggaagtatcagaagagcacggagctactcatccggaagcttccgttccagcgcttggtccgcgagatcgcgcaggacttcaagaccgacctccggttccagagctccgccgtctccgcgctccaggaggccgccgaggcttacttggtcggtctcttcgaagacacgaacctctgcgccattcatgccaagcgtgttacta

SEQ ID NO: 17370 - DNA, 372 bp, Glycine max
  Clone ID: LIB3049-049-Q1-E1-B8
tgtcaatgccattgcagcaacaagaagggatacagacttctcagttcagccatgtcccttctgttgatcagccattaaatgccaaaaggtttaccggttctcgagcttcaacatcttctgagggcgataggaattttcctagagccactgatgtgaatgtcaaccaattgcccgatgaacttgggttaggggacacttcaaactcaactcctaccaagacttcagcacagagtgttgtcaacaagactccatctgtgatccccattacagatactttgaaggttgatgttctgaatggcaatagccatagtagtaataaccagaatgcaagttcttctttcaagaatcagccctcacaatttgaccattcct

SEQ ID NO: 17371 - DNA, 281 bp, Glycine max
  Clone ID: LIB3049-049-Q1-E1-B9
ggtagttgaaggagcagaagaagaagaagagaaggtggtaccgccttcaattctctttttctctctccatttctcatcctcatcatcttattattcctcttccatctctattctccataacacccaccacaccacttgtgaaaaacctcattaatatcacacactgacatgtatctctgagctccaatccaatacaagaccacaccttgtcgtgtcggacgaaccttggtgtctgtttttttttttttttcattattttctccgaagagatgaggaagggc

SEQ ID NO: 17372 - DNA, 255 bp, Glycine max
  Clone ID: LIB3049-049-Q1-E1-C1
gatgctcagttcattttcttctccactctcgctctcatatggttagggttttctcgcgtcatcaatctctgtgtcacacggtttcaatggctcagcaagactctcaaatcggctggtcagagaatggcgctgctgctgctacagtgtcgtttgtcactgtaaaaccgcagctccacatcaaatctccctcagccaatgacgccattctgttcttcaaggctgcgtttggcgctgatgaagttggccgtacgcaca

SEQ ID NO: 17373 - DNA, 224 bp, Glycine max
  Clone ID: LIB3049-049-Q1-E1-C10
ggagggcgaggaagccacatagagacacaatacagagtgagttgttgctccttcgccacaactctctgccaacatgggtatctccagagattctatgcacaagaggcgtgccactggtggcaagaagaaggcctggaggaaaaagagaaagtatgagcttggtcgccagcctgctaacactaagctgtcaagctacaagacagtcaggaggatccgtgttagag

SEQ ID NO: 17374 - DNA, 265 bp, Glycine max
  Clone ID: LIB3049-049-Q1-E1-C12
gaaacaagtacctcccatgactcacagcatagagccctgaagttgtgatgttccgccatacccatattcctcaatcaggacaccgaatgtcctaattcgggtaactgctacctacatcatggctactgtgttcacattgtggtggtaataagcacaggtttttcacatctcttcacacacagaaccacctcggtttcatccttttcagcacccttatctcaaagctttttcatttttggtgggtttttttctcgtacatagttgt

SEQ ID NO: 17375 - DNA, 341 bp, Glycine max
  unsure (1)..(341): unsure at all n locations
  Clone ID: LIB3049-049-Q1-E1-C2
gatccaactctctaaacaacacattaacctttctcattccccatctcctcaccttattcagccactgctaatttctagggttccgaaatggacgctggcggaaagatcaagaagggcgccggaggaagaaagggcggcggccctaagaagaagccggtttcaaggtccgtcaaggccggtctccaattcnccgtcggaagaattggccgttatttgaagaaaggaaggtacgcccagcgtgtcggtaccggtgctcccgtttacttggccgcagttctcgnagtactagctgctgaggtgcttgagttggctgggaatgctgcacgtgacaacangaagaa

SEQ ID NO: 17376 - DNA, 345 bp, Glycine max
  Clone ID: LIB3049-049-Q1-E1-C3
ggtggatgcaatttggaaatgactatgtattggggtattggccttctttcctgttctcatatttggctgacagtgcttccatgattgagtggggaggtgaagttgtaaattctgagcctgatggtcagcacacatcaactcaaatgggaagtggtcatttccctgaagagggttttggcaaagcaagctacttcagaaacattcaagtggttgatagctccaataatctcaaggctcccaaaggcattggcaccttcactgagcaatcgaactgttatgatgtccaaacaggcagtaatggggattggggccattacttttactatggaggccccggtaaaaatc

SEQ ID NO: 17377 - DNA, 350 bp, Glycine max
  Clone ID: LIB3049-049-Q1-E1-C5
ggaaacagagagtgatttcagtgagtgatcggtgttcacttgatctcatcataatcgtcagcgtcaattgaagaagatgccgatcagaaacatcgccgtcggaaggcctgaagaggcgactcagcccgacacgttgaaggcggctttggctgagttcatctcaaccttcatcttcgtgttcgccggctcaggctccggcatcgcctacaataagctcatcgacaacggcgctgccacccctgccggcctcatctccgcctccatcgcccatgcattcgccctcttcgtcgccgtctccgtcggcgccaagatctccggcggccacgttaacgccgccgtcaacttcggcg

SEQ ID NO: 17378 - DNA, 272 bp, Glycine max
  Clone ID: LIB3049-049-Q1-E1-C6
ggaaacagatattgctctcagtgagtgatcggtgtccatctcatctcatcatactcctcagtgttaattgacggctgtgctcatcgtgtccaactgcgtcgcaaggttgggtatgacgagtcggcccgtacgttgacatgggtcgtgtgctgagttgaattcagcttcgacgtccgtcaacgccggtctgggattcggcctcggcaacactgaccgttacttcaacaacggttcgtatcctgagcgtgtcagtagcggtgctcacgtttact

SEQ ID NO: 17379 - DNA, 291 bp, Glycine max
  Clone ID: LIB3049-049-Q1-E1-C7
gggcagtcataagacatcctaggcagcagcaatatctagcgagtaagtctttgttcttgttctcatcattcatcgcagcttattcgatcaggggatgtgtacgtagagttattgattcagagcctgatcgactgtatagttcatatcacatgcgaagttgtcatttccattggggaggttttggcacagcaagctacctcagtcacattcatctggttgatacctccacttatctcaatgcacccaaatgcattggcatcttcactgagcaatcaaactgttatgatgtcc

SEQ ID NO: 17380 - DNA, 346 bp, Glycine max
  unsure (1)..(346): unsure at all n locations
  Clone ID: LIB3049-049-Q1-E1-C8
agttcaagaaatatttgcatcttaacagcaaatggagccatatctaatgtgacacttcgacaacctgcctcatctggtggaactgtgacttatgaggggcgatttgagatcctatcacttggaggttctttttttcttgctggaactgaaagagctggggggctgagtgtgtccttgtcagggccagatggccgtgtgttgggcggcggagttgcaggtcttctgatagctgcttnccctgttcagattgttttggcgagctttgtttctgatgttcgcaagcacttgaagcgtgcaaagaagacggagaatgaaaaggtttcgacagcaggaggccaaagcagct

SEQ ID NO: 17381 - DNA, 338 bp, Glycine max
  unsure (1)..(338): unsure at all n locations
  Clone ID: LIB3049-049-Q1-E1-C9
gaaccaggctctggctcggaaccttcgacacggcggaggaagctgctttggcttacgacaaagccgcgtataggctccgagacgacttcgcgaggctgaacttcccgagcctgaaaggctcgtgccccggggaggagtacaagcctgtgcattccgcggtggacgctaagctcgacgcgatttgcgccaacttggcggaaatgcagaagcaagggaagacggagaaaggtgccaggtcagcgaagaaatccaaagcaaggtccgaaccangaggccaagcccgaacctcaagcttccgccgaaagtgagggttctgcggattcttctccgctgtctga

SEQ ID NO: 17382 - DNA, 298 bp, Glycine max
  unsure (1)..(298): unsure at all n locations
  Clone ID: LIB3049-049-Q1-E1-D1
gaacacagaacanaaacaaagaaaaaaaaaacccttagccaacacaaccatcatggccacctctgctattcagcaatcagcattcactggtcaaactgctctgaagcagctcaatgagttcgtccgcaagaccggtggcgccggcaaaggtcgcactaacatgcgccgcaccgtcaagagtgctcctcagagcatttggtatggccctgaccgtcccaagtacttgggtccattctcggagcagattccatcatacctgaccggagaattccctggtgactacggatgggacactgct

SEQ ID NO: 17383 - DNA, 333 bp, Glycine max
  Clone ID: LIB3049-049-Q1-E1-D10
ggtatttggaggaaggaaggtaaaggaagcaaacgcaagagcaagagcaagagcgaaagcggcagagaagatggaaggagaaaaaggttctcagcagccacagttggtgctcgcggacaagctattccttctccggcaacccgatgtgcaagacattgacaaggttcgctacaaagaggatgtcttcactcatgtcaaggaaaacgatatggtccctctgtacgaaaccctagtcgctgattccgtgttggaacttggatcgtgcccttttggactctatgcgcgctaaaattgacgaacaagctcacaagctccacgaaaagattgctgatg

SEQ ID NO: 17384 - DNA, 331 bp, Glycine max
  Clone ID: LIB3049-049-Q1-E1-D2
accacgcgtcaagcccacgccgttcggttacggcttgccaaaaaaacaacaaaaggggaaaaaagaaattgaaaaaaaaaaaaaatggcgtcaaccggaccggtgcctttttggagggcaagcgggaataacatacatcaaatactcaaacatatgcgccaatctggtcaggaatttccctcaaggaaccctaaaggctgaagccatctctcgtgagaaggtccattttgctctctccaaatgggtcgacgccaagcctgaaaaacctactattcgttcagacaccccagagcagtgatccggaatagttggaagctataaatgcataaat

SEQ ID NO: 17385 - DNA, 347 bp, Glycine max
  Clone ID: LIB3049-049-Q1-E1-D3
aaactaggcatggtttctctctctagcttggacgagtgaattagattcatcatcaagatgtcgtctctgatagcagaagatgtgaagagcagatcagaggtgttacacggggacgaaatgtgccaagtgaagtccaaggagcttctcaaggaaatcgccctccccaacggccttcttcccctcaaggacatggaggagtgcggctacgacagacaaaccggcttcgtctggctcaaacaaaagaagagttacacccacaagttcgacaagatcggaaagcttgtctcctacgcgcccgaggtaactgctcatgtccaacaaggtaaaattaccaaactcaacggggt

SEQ ID NO: 17386 - DNA, 283 bp, Glycine max
  Clone ID: LIB3049-049-Q1-E1-D4
ggcggcaagaggacaacggaaggggaacctggtttcctccgccttaacccttcccttcacagaagcgtaaaaccaaaaggcttgactagagaaggagagagagagagcttcgaatcgaaactcagaagtagaaggaagcacaaatcacaatcgctatggctaggtacgaccgagcaatcaccgtgttctcccctgacggccatctcttccaggtcaagtacgccctcaaagccgtccgcaagggcaacgccgccgtcggcgtccgcggcaccgacaatgttgt

SEQ ID NO: 17387 - DNA, 377 bp, Glycine max
  Clone ID: LIB3049-049-Q1-E1-D5
gattccttgagaagattctggtgaatgcgtagaaaaggaaaataaagaaattagcgtgaaaaatgttgggtgtgttcagcagctccatagtgtcgccgccggaggagctcgttgccgccggcagccgtacaccgtcgccgaagatgacggcggcggcgctgcggaagtggttcgaggagaagaacccctccgcagtgtcggtggaggtcggagagcatgtccagctcgcttatacccaccagaacgagtcgccgtttcagcccagatcctttgctgtgaaggatgaggtattctgcttgtttgagggagcccttgacaatttgggcaacttgagacaacaatatggattggccaagtcaaccaatgaagtaatgttg

SEQ ID NO: 17388 - DNA, 354 bp, Glycine max
  Clone ID: LIB3049-049-Q1-E1-D6
gatcgacaaaaagataaagggtgaataattagcagctccttctagttccggtgtcggtgtgggtgtttgaaccgggttaaggatcttcatatgttcaatcatatacggtaatctgatcaggaactacctcatcgaatcctacaaggcatgatcgctatatctccttcagaacgtccattttgctctctccaaatgtgtcgacgccaagcctgaaaaacctactattctttcagacaccccataacaatgatacggaatagctggaagctttcaatgcataaatcgttgagatctggcagttcattgtcattttgtatccttctgtgatgtttaattcaattgcatcgttttttt

SEQ ID NO: 17389 - DNA, 320 bp, Glycine max
  Clone ID: LIB3049-049-Q1-E1-D7
gaaactaggcattggtttctctctctagcttggacgagtgaattagattcatcatcaagatgtcgtctctgatagcagaagatgtgaagagcagatcagaggtgtaccacggggacgaaatgtgccaagtgaagtccaaggagcttctcaaggaaatcgccctccccaacggccttcttcccctcaaggacatggaggagtgcggctacgacagacaaaccggcttcgtctggctcaaacaaaagaagagttacacccataagttcgacaagatcggaaagcttgtcccctacgcgcccgaggtaactgctcatgtccaa

SEQ ID NO: 17390 - DNA, 290 bp, Glycine max
  unsure (1)..(290): unsure at all n locations
  Clone ID: LIB3049-049-Q1-E1-D8
gattctcagtcgtcgcgtgtactttcttgcgaaacagaagggcgaaggggcaaacacaacttttttgtttttttgtagagcgagagagaaaaaaatgttggggatcttcagcagttccgtggtgtcgccgccggaggagctggtggctgccggcagcagaacgccgtcgccgaagacgacggcggggaagctgctgaancggttcgtggagaacaaggcgtccgcggtgtcgctgcaagtgggagaacacgtgcagttggcttacacgcaccacaacgagtcaccgtggc

SEQ ID NO: 17391 - DNA, 156 bp, Glycine max
  Clone ID: LIB3049-049-Q1-E1-D9
tggggaaaaatcagttgtgcagagcaaggcaattaaaaaggaaaaaggaaaataaatataaatataaaaaaaaaagaagccaagcttcgttcatgttcctcaactgaaaccctctttgcgggcaaatcaaaaccctattccaattctccattcact

SEQ ID NO: 17392 - DNA, 374 bp, Glycine max
  Clone ID: LIB3049-049-Q1-E1-E1
aggtgcaatctgttgtaaggcccattaagaaggatttgaaaagggccattctcaagaagaaccctcttaagaatctcaactcgatgctgaagctgaatccttatgccaagactgctaaaaggatggcccttctcgctgaggcacagcgggttaaggtcaagaaggaaaagctcgacaagaaaaggaagactgtctctaaggaggaaccttctgccatcaaggctgctgggaaagcatggtatcacactatggtgtcagattctgattatacagaattcgacaacttttcaaattggttgggtgtttcacattaaacttcatgatttattttttcgtattagaattttgttttttatgctcatcagaactaaata

SEQ ID NO: 17393 - DNA, 291 bp, Glycine max
  Clone ID: LIB3049-049-Q1-E1-E10
gactgcgaaaccagcaggggctccaattcctactcttagccgcagatctctcagggcttgcatcttctcaggtaagttgtgaagatgtacacatcaaggaagaaaatccacaaggataaggatgctgaaccaactgagtttgaagagtcagttggacaggcattgtttgatctggaaaataccaaccaggagcttaaaagtgatctgaaagatttatacataaactcagctgtgcaagttgatgtttctgggaaccgcaaggctgttgttattcatgtcccttacagatta

SEQ ID NO: 17394 - DNA, 234 bp, Glycine max
  Clone ID: LIB3049-049-Q1-E1-E11
gattgacaaaacagatcgggctcatattcctacacattaccgcaaatctctcacggcgtgaatcttatcacgtgaattgtgaagacgtcgtcctcacgtagcaaaatcaacacggttcgagatgctaaatgtactcagtgttcttagtcaattagataggtactggttaatactcaccgtaccatctacaagattcactatcatctcatacgacttattcagccattcaactat

SEQ ID NO: 17395 - DNA, 393 bp, Glycine max
  unsure (1)..(393): unsure at all n locations
  Clone ID: LIB3049-049-Q1-E1-E12
ggagtgtgagtgtgagtgtgagtgtgttgttctctctgcgaaatgcgaatgtgattcgaagaagctcgatgagaatgcgagagttagggtttcaggaacgaaggtcgtggangcggagaggcggcgacaccagccccgactccgtcatcttcactctcgaatccaacttgagcctcttctcctccgcctccgccagcgtcgaccgctgctccttcgcctccgacgcgcacgaccacgactccttagcctccgaaatctcactccatttggcagcacangatcatgacggtgatttcgcccatagcgaaagctggagcggtccagatccggatctggatccgaataaacgacaacaacaacgacatgcagatacagattcacatgcaacacaca

SEQ ID NO: 17396 - DNA, 330 bp, Glycine max
  Clone ID: LIB3049-049-Q1-E1-E2
ggtctcgtggaattgtaagcaagcaaaaccctagcggcgcctgctttctttgttcgtgttttgcatcaggatggagtctcaggtgaagcacgcacttgttgtcaaagttatgggtcgtactggatccagaggacaagtgacccaggttagagtgaagtttttggatgatcagaaccgtcacatcatgaggaatgtgaaaggacctgtgagagaaggagacattctcaccctactcgagtctgaaagggaagcaagaagattgcgctagatggtctctttttttctggcttgccctcaaattcgaacaaaagcaatatttttcttgatatt

SEQ ID NO: 17397 - DNA, 396 bp, Glycine max
  unsure (1)..(396): unsure at all n locations
  Clone ID: LIB3049-049-Q1-E1-E3
cggtcaggaatccgggcgaccacgcgtcaaccacgccttcgttacggtggcaaaagaacaacaaaagggggtggcctccaaaccccaaccaaccatcccaaaaccctaacctcgcgtttctggctttcgtcctttaacatcaggatggagtctcaggtgaagcacgcacttgttgtcaaagttatgggtcgtactggatccagaggacaagtaacccaggttagagtgaaatttttggatgatcagaaccgtcacatcatgangaatgtgaaaggacctgtgcgagaaggagacattctcaccctactcgagtctgaaagggaagcaggaagattgcgctagatggtttcttttggcttgcctccaaattcgaacanaacagtgtgattttgttga

SEQ ID NO: 17398 - DNA, 173 bp, Glycine max
  Clone ID: LIB3049-049-Q1-E1-E4
caaaagatcaacgaaagggggttaattcttaaggtttttaatctctctcatcacacttgaatcatttaaggtcctcctaaaagaattttcctctataagttgggtatctggaatgtctacttcactgtagaggttacatatcatcatcatcttggatttgcactcattctcct

SEQ ID NO: 17399 - DNA, 348 bp, Glycine max
  Clone ID: LIB3049-049-Q1-E1-E5
acccacgagtcagacggctcctacatgacgacacaagggatcgacgaagcggtaaaatgagtcagtatgcttcatcatgatgaactttgggaataattattcggacgatgccttcacgcacctgatttggtgggcatattattggagcagacagttggaactcacgatccgctttccattttccctttagttcctaatgggtgtgacttctctctgctccgggattggctggttgaatttgtcagcgactacaagactgaaacatcggtcagacatggatgccatgctatcattcaggcagactgtgtcagtcgattgtgtcactattacaatgaggtattgcatggg

SEQ ID NO: 17400 - DNA, 352 bp, Glycine max
  Clone ID: LIB3049-049-Q1-E1-E6
gcctaattgctattctctctctttcacagcacactcctcccagggtttctccaccaagagggaaatggctcccaaaccgcctagtacgggtctgtttgttggactgaacaagggacatgtcgtcaccaagaaggaattgcccccacgcccctcggatcgtaaggggaaaacaagcaagagggtgcactttgtgaggaacctcataagagaggttgctggttttgcaccctatgaaaagcgtataactgagttgctgaaggttgggaaggataagagggcacttaaggttgcaaagagaaagcttggaacccacaaacgtgcaaagaagaagcgtgaggaaatgtccaatgtt

SEQ ID NO: 17401 - DNA, 333 bp, Glycine max
  Clone ID: LIB3049-049-Q1-E1-E7
ggagaatatagtatggcacaatctagtggcaaaaaattggttgagtggctggttgcagcattattgttcattgccttgttgagtggtactgcacatgctgttgcaatatgtaacattgactcaagtcaactgaacttgtgtcgtgctgcagttactggtcaaaaccctccaccacctgatgagaaatgctgtgcagttattcgccaggccaatttgcgttgcctctgcagttacaagtctatcctaccttcatttggaattaaccccaataatgctttggccttgcctgctaaatgtggtctacaattgcctcctaattgttgagtgctgtga

SEQ ID NO: 17402 - DNA, 208 bp, Glycine max
  Clone ID: LIB3049-049-Q1-E1-E8
gcaaaaagacaacagaagggcattggctcacaaaattataagaattggcaccatggtgccgcctccgaaacaaaaccaagccccgaagttccagattcaatgtccgaagaaacccacaggaaagaaaaaagacctgaggactatccacgaactctctctgttgttggagttaatgttctaaacggtatcagaattaatgagatgttaa

SEQ ID NO: 17403 - DNA, 240 bp, Glycine max
  Clone ID: LIB3049-049-Q1-E1-E9
ggtaaacaaaaaccatcagcaacataaaaaaaaaaaatagaaagaaaaatgatgctcggagaacaccatcgcgggaatccgacggtcctcgtgccaccgtggccagcccacgacgatccgacggctgagatgtactccgcgttcttaacaaacgacgtcaatgctggtgagtactctccgtaccatcttcaagaagcactaacggcgctgcagcgttttctgccgtcaaacgaaacggac

SEQ ID NO: 17404 - DNA, 391 bp, Glycine max
  unsure (1)..(391): unsure at all n locations
  Clone ID: LIB3049-049-Q1-E1-F1
ggttctagtgtgtgattgtttgttgttgtaactcgttcttcttcttttgttgttctgtgtttgtgtttgttttttctcccacctgaaaatgtcttgctgcggtggtaactgtggttgcggaagctcctgcaagtgcggcaacggctgcggaggctgcaagatgtacccagacttgagctacactgagtcaaccaccaccgagaccttggtcatgggagtggcacctgttaaggctcaatttgagggtgctgaaatgggtgtgcccgctgagaacgatggctgcaaatgtggaccaaactgctcctgcaacccctgcacttgcaagtgangtgttgggagagcaagcttcaagcagagatagcccttaattaggaataatgataaactaata

SEQ ID NO: 17405 - DNA, 310 bp, Glycine max
  Clone ID: LIB3049-049-Q1-E1-F10
gattcaaagagtaaaattaaagccaacagcagcttctggatttatctaacgaaacctccgtagttcatcatcatcgtccgtcatcatatcataatcatcaccgaatcaaaccaaacctatcttttaattcagaacttttattttgggatacgccgtcgtttcggcaacgccggcggagcctcctcctccagccatggccgccgcagacaaagcgaaaccctcgaagacgatgctctcgctccccgtgagcgtcattgttttggccatcgcctaaatttacttctccatcgtgttcgtcttcatcgaccgc

SEQ ID NO: 17406 - DNA, 333 bp, Glycine max
  unsure (1)..(333): unsure at all n locations
  Clone ID: LIB3049-049-Q1-E1-F11
gaagaaggtgtgacactactgtcatactgcactgcttataacttttttctctttctctcaattcaattgccttctcccctgcgaatctcttctccacgtatcggagaacatggggaacaagatgaatgcgatcgcgttgtgcttgttagtgtcgaccctgttggtttctgcggtgtantgtgcaccgaatgctgggctccgtaggattgggctgaagaagattaaattggaccctaaaaacaggcttgctgctcgagttgggtccaaggatgttgattctttccgggcttctattagaaagtttcatctccaaaacaactttggtggcactga

SEQ ID NO: 17407 - DNA, 353 bp, Glycine max
  unsure (1)..(353): unsure at all n locations
  Clone ID: LIB3049-049-Q1-E1-F12
gggccgctcactctctagggtttttatttctctcttctctctgcatcgcttcaggttcttctgaaaagatgtctcgcgtgtatgttggtaacttggattcacgagtcaccgagagagatctcgaaggcgaattccgtgttttcggagttattcggagtgtttgggttgcacgtagacccacctggttaagcttttattgactttgatgaccgcagagatgcacaggatgctatccgtgaattggatggcaagaatggttggagggttgagctttctcacaactctagaggtggangtggtggtcgtggtggtcgctctggtggttctgatttgaaatgttacgagtgtggtga

SEQ ID NO: 17408 - DNA, 341 bp, Glycine max
  Clone ID: LIB3049-049-Q1-E1-F2
accacgcgtcaaacgagtgccaaaaaaagaacaaaaggggcaacaaccgtttaaccttgtcaaaaatggcaaaattgatgaaggtcgatggaaaattgaagtcaagacatgagtttcccccggaggagtttgttgaaaacttgaagttaatggagcatagatatggtgcgaaggaatttgtgacaagcaaggacagtagccttttatctccgggcacattctatctcactgaagttgactccatgtatcggagattctattcaaagaaaactaaagaaagcagtttgactcacgctgagaacggtgtgattgctaatggcgttgctaatggccactgatgt

SEQ ID NO: 17409 - DNA, 224 bp, Glycine max
  Clone ID: LIB3049-049-Q1-E1-F4
aaacctaacctaaccctccaaacaatccaaccggtgccaaattccaacaattttccaagggcttcggcaaaggttaattcccgtgccttggttggtgggcttgcttgggtcaccggaaacaatgcccccaaaaaagccttttcaaccaacgggaaaatctttaaaccaaaggttaccaacaaccttaaaactggaaggtcaaaaggatccggatttgtaacctt

SEQ ID NO: 17410 - DNA, 190 bp, Glycine max
  unsure (1)..(190): unsure at all n locations
  Clone ID: LIB3049-049-Q1-E1-F5
nggacaacgtactaatttcacatgaagccaagacacaacatgaactttggtcgaaacttccgttgttccaagtactctgaatttctgttcccggaagaagaagaccatacatgnnntgctcagtttgcctgtagtcagtcctagtggactgaagttgcagggtttcctcggcactcccttgagttcctca

SEQ ID NO: 17411 - DNA, 277 bp, Glycine max
  Clone ID: LIB3049-049-Q1-E1-F6
ggaaaactgttgtgagtttcgggtatgtttcaaatggcttcaggaaaggttaagttccggtgccttgttattcggcttgcttgggtcagcggcaactatgccctcgagaaacccttttcagtctacagcgacatcgttgaatccaaggttatcaaccaccgtgagactggaaggtccagacgattcggatttgtgaccttcgccgcagaacactcaatgaaagatgcgatctcaggaatgaacggccacgaccttgacggtcgtaacatcactggtc

SEQ ID NO: 17412 - DNA, 347 bp, Glycine max
  Clone ID: LIB3049-049-Q1-E1-F7
ggtctacaatgatggaagaatattcagtctctattacggaagcaattcaggctttagtgaatgcctcagagcgacttccagttggtgggaatgttagggtatgattatagacaagtgaatgatgcttattttctttctgttatgcatattcattggaattgtctgcatgttctaattcacataaatatattatgtcacaggttgatgtaagacaactgggggaggcactgaattcagcatcgaagatgatggaaacaatgatttccaatatacaaagattcatgccaaaggtgaaacagataagagaatggagtttcatgcttgcttttttaacatggatattaaaa

SEQ ID NO: 17413 - DNA, 383 bp, Glycine max
  Clone ID: LIB3049-049-Q1-E1-F8
ccatccgaccgtatacgtctcagtactgtagctgttgcacgtttctacgaggtctacaatggcttctgcatatgtagtcttcagttgcgttgcttggcgggcttgcttgggtcaccggcaacgatgtcctcgagaaagccttttcaagctacggcgacatcgttgagtcgaatgttatcaaccatcgtgagactggaaggtccagaggattcggatttgtgaccttcgcctcagagcagtcaatgaaagatgcgatcgtaggaatgaacggccaggaacttgactgtcgtaacatcactgtcaacgaagctcatacccgcgccacccgtggtagtcgtggaggcagtggtttcggaaattgtggtggatacaatccctgtatc

SEQ ID NO: 17414 - DNA, 368 bp, Glycine max
  unsure (1)..(368): unsure at all n locations
  Clone ID: LIB3049-049-Q1-E1-F9
gaagataataaggtttggtagaaaagagaagaggatggatctttttatttcctttccttaaccccctccctctctccctctcagtagaaaaccccagaccccaaacacatcatcatctttcattcattcctttctatttctccagttagaactcgtttccctaactcggccgagtccgcaccagcgagtcatcatggcgaatcacccctcccaagcctccaccgacgacttccttgaccaaatcctcggcctctcgaccttcgcctccgccgacgcctctccgatgatgcttcagctcaactccggcgacgccgccacccacctagcctccttcnacgcgccgcnctaccagctcgggctcagcctgg

SEQ ID NO: 17415 - DNA, 339 bp, Glycine max
  unsure (1)..(339): unsure at all n locations
  Clone ID: LIB3049-049-Q1-E1-G1
ggcggcacaaagcaattcacggtgtcggaaaaagaaaaaaaaaaaaaaaatgagcgacggaggaaaacgacaaggtggaagagcgttgccgccgccgccaagaggccctccgcctcctcccccctctcgccctcgcctcgaacccgtcgatcgcgaaaagacatgtccgttactgctgcgagtgttcactaagattgggagtcaccattccatggaagactttgccgtcagaggcaaagagcccaaagacgaagttcagatttacacctggaaggacgctactctccgagaactcaccgatcttgtcaaagaagttgctccggctgcaangagaagaaa

SEQ ID NO: 17416 - DNA, 330 bp, Glycine max
  unsure (1)..(330): unsure at all n locations
  Clone ID: LIB3049-049-Q1-E1-G10
gaatcacagctcttggctttagcaaattccaattcccaattcccaattcgaaaaccttaatcctttcaaagaaccaaattgagtgatcgtgatggcaccaaaggcagagaagaagccagcggagaagaagcccgcggaggagaagaaatcgacggtgggagacaaggctccggcggagaagaagccaaaggccggaaagaagcttccgaaggaaggaagcgccggcggagaagggaagaagaagaagagaaacaagaagagcgtggagacatacaagatctacatcttcaaggttctgaagcangtcnaccctgacattggtatctcaag

SEQ ID NO: 17417 - DNA, 153 bp, Glycine max
  Clone ID: LIB3049-049-Q1-E1-G11
ggtactccatcatttccttggtcctcctccttctcctcattccggtctccaaccttcaaaggcactttctttcctttccaatgagcttccaataatctcacgccttgcaatcgtagttgcaccctccaaactccttcccgtttccttcatctg

SEQ ID NO: 17418 - DNA, 319 bp, Glycine max
  Clone ID: LIB3049-049-Q1-E1-G12
gattgtgtgacaatgtgaggatctcactcaacgcacaggcttcatgtcctccgcgtcctgatagatcaccacctcggaaggaaagatcacaccacagaagccagttgttgagagctacgttggtagggcatcatcgattcgatgcgaattatcaggcatgacttgtccttccatttcgatttagagcccgagacgatctatcgaggccacctctaaagattattcttagatcgcctcgatagtcgatcactacaacaagctggttaaactagcggcgacggctttctacgatgatctgacgagtacatgagagaatcaa

SEQ ID NO: 17419 - DNA, 302 bp, Glycine max
  unsure (1)..(302): unsure at all n locations
  Clone ID: LIB3049-049-Q1-E1-G2
cttccttacggctccaaaaaaacaacaaaagggaactgcaaaccattaggaactcccattccaactcttacccgccaatctctcagggcttgcatcttctcaggtaacctgtaaaaatttacacatcaaggaaaaaaatccacaaggataaggatgctaaaccaactgaatttgaagagtcagttggacaggcattgtttgatctggaaaataccaatcangagcttaaaagtgatctgaanngattatacataaactcagccgtgcaagttgatgtttctggaaaacgcaaggctgttgtt

SEQ ID NO: 17420 - DNA, 335 bp, Glycine max
  Clone ID: LIB3049-049-Q1-E1-G3
caaaagggggtgctaacctaacctaacccctctaaccatcctacctgttgcaaatttcaactaatttttcaatggcttctgcagatgttgagttccgttgctttgttggtgggcttgcttgggtcaccggcaacgatgccctcgagaaagccttttcaatctacggcgacatcgttgaatcgaaggttatcaacgaccgtgagactggaaggtccagaggattcggatttgtgaccttcgcctcagagcagtcaatgaaagatgcgatcgcaggaatgaacggccaggaccttgacggtcgtaacatcactgtcaacgaagctcagacccgcgcc

SEQ ID NO: 17421 - DNA, 354 bp, Glycine max
  unsure (1)..(354): unsure at all n locations
  Clone ID: LIB3049-049-Q1-E1-G4
ctgcaaaagaacaacagaaggggagggaaagaagaagaagaagaaggaatctggcttggaattaaccaatcaaaattggtaacagaaatagcaataacaatttggttaacaaaaaccctaaggtggaaaaagaaggggtttactctaaccggcaatcaaattcggaagcctttgacttgtgttcactctgtaattctcgcaatggaggttcagattccaaatcacactgttttcgacatgccttcacttctccaagctgtggtcgccgacactgttctcgccgctgctcaatctattgctttgattggatatctgcttactaatggcactagttcagtgtcaacanatttgact

SEQ ID NO: 17422 - DNA, 367 bp, Glycine max
  Clone ID: LIB3049-049-Q1-E1-G5
gatggaaatcgcctcttcaccaaagtgctgaacaagggtgatgtgtttgtgttcccaattggtctcattcatttccaactcaatgtgggatatggcaatgctgctgccattgctgctcttagcagtcaaaatcctggagccatcaccattgcaaatgctttgtttaaagctaatccacctatttcttctgaagttctcgccaaagctttccaggtggacaagagcataattgattatcttcaatagcaatcttggtacgacaacaataactaatttgggagtatggatgagcatttcacactagctagttactgtataattgatcactttagtgtttcaatcaccccatacaacagatctaataaat

SEQ ID NO: 17423 - DNA, 381 bp, Glycine max
  Clone ID: LIB3049-049-Q1-E1-G6
caacaactatggtgataagagtgatgtaaatggcttatctgaccccaaaaacaagaccaagcatattgaaggaattaatgcaaccgaggtaactggacaagcaaacttggagattggcagccagtgaagttttcagtgagattagattctcatttttctaatttatatgtatccagggactgtggtcttgtttcttgcaacaagcatcttcactttgtttttccttttaacttatgagcacttgctgctgtgtgcattgtgtaattagtgaaagtgtttatttgtaatttatttcaaattatttgtaaaattcaatcatgttgctcataagagcaatttgagcatttgtttgtctgtctgaagtccaggatcagattgttt

SEQ ID NO: 17424 - DNA, 350 bp, Glycine max
  Clone ID: LIB3049-049-Q1-E1-G7
gagctagggtttcagtggtgttagatctgtacccgcctagccattgatttggaaaagtccaagcttcaaagatgagtaagcttcagagtgatgctcttagagaagctatctcaggaatcatgactgattccaaggaaaagaacaggaaatttgtggagaccattgaactccaaattgggctgaaaaactatgatccccagaaggacaagcgttttagtggctctgttaagttgcctcacattcctcgccccaagatgaagatttgtatgcttggagatgcccaacacgttgaagaggctgagaagataggattggactacatggatgttgaggccttgaagaagcttaac

SEQ ID NO: 17425 - DNA, 418 bp, Glycine max
  Clone ID: LIB3049-049-Q1-E1-G8
aagcccggcccaacccacacgtcagcccacgcgtccgcccacgcgtccgttacggcgccaaaaaaaccaacaaaagggggcacctgaaaaacatttaatttccgaattaaaaaatctaaaccaggtcttggcaaccttacttgaatatatcacggcgtgtgtaatccaaaggtacccatcacacacacgccgataatatgggacaacagcgcagtttgtgcgcacagagcgcaaatttctcacaggtcgcttctagatactccgatatctgagagtgttgattatatactgtgcaaccatgtttgagattggtgtagttcacagctgatgaaataactgctatcatgaataactttaacgagcctggatcacttgctccaactggattgtttctcgctgccaacaaatacatggtcat

SEQ ID NO: 17426 - DNA, 341 bp, Glycine max
  Clone ID: LIB3049-049-Q1-E1-G9
gagagaaaaaaagtcatgtaggtggggttgagtgaataatagttaataatttaaaattcacatcataatggaaccttagcatcgaaggacaaattatagaatgttgtgtgtgtataaattccaccaaagccaccccaccaaattcctcctcatcaaaccaagacatagcaaacgatccaaactcttttttcatttgcagcatcaaaatgagtggtagcaacgatggtagcggcagctagagctctaggtttttgaaggtggctagtgcagctgccgctacagccgccgttgccggcggtttatatgccattctttcatcctcaacctctgctagctctgag

SEQ ID NO: 17427 - DNA, 378 bp, Glycine max
  Clone ID: LIB3049-049-Q1-E1-H1
ggcacaagtttgttgagatagctagaagcaataagatgaaaatgaaagtgcttgttttgtttgttgctacagttttggtagcatatgaatgccatggctcagactaccagaagttccctctccaaatgaaaactgggtttggtgggcaatacagcaatgaggtggcatgtgccagttggaggcttggcgtggaagcaaacaacgtagtcaagtggcaaactgttcctgcagcttgcggagagtacatagctgactacgttctaggagaccaatatagatcagattccaaaacagttaaccaacaagcttatttctatgctaaatccctcaaactcaccaacaaagatgtctttgtcttggacgtttacgacactaatc

SEQ ID NO: 17428 - DNA, 372 bp, Glycine max
  Clone ID: LIB3049-049-Q1-E1-H10
gaaagcggtgactgtgagaatggaaagaaggaggcgtggaggttatagtggtcgacgcatagttgcaagcagaagagggagcggcaaaagcaatgccaacaacaacaacaacaacaacaacaaaaacaacaacaacatcaatgtcatcaagaagcttcagagccgcgaaatttggtcgaagcctcatcgagcttttgcttctgtcactgcttctcacagattccgctctatgtgcttgacgcaccaatacgacactcatgatccctccaagactccctcttccctttggcccttcttgatgaagagaactaaggttgtcgaaattgtggctgcaaaaaacgtggtctttgctctttaccattctggtttgtg

SEQ ID NO: 17429 - DNA, 319 bp, Glycine max
  Clone ID: LIB3049-049-Q1-E1-H11
gaatctagtggaagagtgaataagagatatcaatatattatgataatggagggatacaataagaaagttatgattgtggggattgtgttgggcaatgccattattgggatggccaatgggcaatactcgttttgtcgcatgcccagcgatgggttggcggcatgcaagccgagtgtgagtggggactatcctgctgatccctccactgcttgttgctcagccattgccaaagcttatcttaaatgcttctgccgcttcaatgattcgggccttctctctatgtatggtgttgatcccaacaagtgcatgggactccctg

SEQ ID NO: 17430 - DNA, 371 bp, Glycine max
  unsure (1)..(371): unsure at all n locations
  Clone ID: LIB3049-049-Q1-E1-H12
gacaccacaacttgcatctcatttctcatttctcacattattattcacatctccatctagatctctctctctctcgctccgaagaaattcatcaacagacttgtgattaatttgcaattgttcaagtgatctatcaagaaattgataattcaatgggaaagtacgaaaaagagcttaatctcgaagctacagagttgagattggggttgcctgnaagcgatgagcctgggaaacgttctattgttagaagcaataagagatcttcaacagaagcaagcgatgaagagtgcataagcaagggcaacatgaattctaatggttctgatatcacaagtgatgaacaanacaatcttgtgccacctgcaaaagca

SEQ ID NO: 17431 - DNA, 355 bp, Glycine max
  unsure (1)..(355): unsure at all n locations
  Clone ID: LIB3049-049-Q1-E1-H2
aatgacaaatccgtgaaggaccttgttctgttgctgtttgagactgctcttctcacttctggtttcagccttgacgagcccaacacttttggaaacaggatccacagaatgttgaagcttggactgagcattgacgaggatgcaggtgaagctgatgctgaaatgcccccactggaggaggccgaggctgatgctgagggcagcaagatggaggaggttgattaaaattaaatatgatgcgtttcttgtaaatagcgtctctaatgccttttttggcaatgtttttttcccctttttatattttggattgatcacagtgttcaatggatatttacccaattagctaaaanaaaaa

SEQ ID NO: 17432 - DNA, 322 bp, Glycine max
  Clone ID: LIB3049-049-Q1-E1-H3
aagaacaagatcttctacgccagcgagtccctcgtgaagcgcgccaccaacgtcgcccgccccaacctggtctccctcggcacctgcatcgggaaatacacccacggcggcagcttccacctcaccgtccaggccctcaacttgctcgccgccaacgccaagcacaaggtctggctcaagccccagtccgagatgtccttcttgtacggcaaccatgtcttgaagggcgctctcgggaaactctccgaaaacatcgctgccggtgacggggttgtcgtcttctccatggccgacgtgccgttgggtttcggtgtcgccgcca

SEQ ID NO: 17433 - DNA, 385 bp, Glycine max
  Clone ID: LIB3049-049-Q1-E1-H4
ggaggaagaagcaataatggcgccgaagataacacgtaaggttagcagaaaccccgaattgataaggggaatcggaaagtactcgaggtctcaaatgtaccacaagaggggcatttgggctatcaaggccaaaaacggtggcgttttacctcgccacggccctaaacccaaacctgaaactcccgctgaaaaaccacccaaattttaccctgctgacgatgtcaagaaaccccttgtcaacaagcacaaacccaaacccgcgaagctcaaggctagcattactcccgggacagtgttgattcttcttgccggtagatttaagggaaagagggtcgtctttttgaagcagcttccttctgggttgcttcctgtaactggtcctttc

SEQ ID NO: 17434 - DNA, 348 bp, Glycine max
  Clone ID: LIB3049-049-Q1-E1-H5
ggtcgcacacagtttactcactaactcactgtgagagcaaagaagaagaagaatgaaggacgccggaaagagccacaaggcgaacggaaagctgtcgccggagactcggaaggatcggaagtcggcgacggggctgagcggatcgccgaagaagggaggccacggcgggaagttcacgtggatcggccacggctacgagcaagttgagatgccgcacggtgctatggacgccaaggacccgaacttcgaggatcctgtggagatcgccaccgtgtgatcgcggtggtttccggtggccaagtctgtaaatagtagtaattggcgaaacgtgttttttcgtgttcaata

SEQ ID NO: 17435 - DNA, 386 bp, Glycine max
  Clone ID: LIB3049-049-Q1-E1-H6
gacctcaaaaaacaaaaatcaataccttagagaaaacaaaagcacagaatcgaaggaagagttcttttttgagagagattgggatggcttcgacgaagaagatcacactgaagagttcggacggcgaggccttcgaggtggaggaggcggtggcggtggagtcccagacgatcaagcacatgatcgaggacaactgcgccgacagcggaattcctctccccaatgttaccagcaagattctggccaaggttatcgagtattgcaagaagcacgttgaggccaattgcgctgatgagaagcccagtgaggatgaactcaaggcttgggacgctgatttcgtcaaggttgatcaggccacactctttgatctcattctggctgcaaat

SEQ ID NO: 17436 - DNA, 342 bp, Glycine max
  Clone ID: LIB3049-049-Q1-E1-H7
ggagggcgaggaagccacatagagacacaatacagagtgagttgttgctccttcgccacaactctctgccaacatgggtatctccagagattctatgcacaagaggcgtgccactggtggcaagaagaaggcctggaggaaaaagagaaagtatgagcttggtcgccagcctgctaacactaagctgtcaagcaacaagacagtcaggaggatccgtgttagaggtggaaatgtgaaatggaaggcattgagattggatactggaaaattactcctggggaaatgaagctgtaactcgcaagactcgtgtactagatgtggtttacaatgcctcatacaatg

SEQ ID NO: 17437 - DNA, 337 bp, Glycine max
  Clone ID: LIB3049-049-Q1-E1-H8
gacccacacgtcaggccacgcgtccgcccaagcgtgggtccggctgtcataggactatacattgggacactaacaaatctcacttttccatttgccatccgttgggttgtgtacagtgtgaatgggttggcttatgatgtgtgttccatagaactccaactagtcacagaatcctgtgtgggacaaattgcactttgacactcctaaagcgtgcgcagcataaaggcatacacaccacatgggatggatacagctctcactaagctcagcagcatgcaggtagcgttgacgaggtcatggatctccagataggcgatcgacgatttcgctaagatct

SEQ ID NO: 17438 - DNA, 288 bp, Glycine max
  Clone ID: LIB3049-049-Q1-E1-H9
ggttggcttgtgctctgctcgtgcctctagggttatcatatctccatttccatttcctctctctcagtttccaagaatcttaagctatgggaaagtcttacccaaccgtgagcgctgattaccagaaggccgttgagaaggcgaagaagaagctcagaggcttcaacgctgagaagagatgcgctcctctaatgctccgtttggcatggcactctgctggaacttacgacgtgagctcgaagaccggtggtcccttcggaaccataaagcacccctccgaactcgctc

SEQ ID NO: 17439 - DNA, 272 bp, Glycine max
  Clone ID: LIB3049-050-Q1-E1-A1
ggcagttcaaagcgaagaaagattcgaaacgaagaaagaaagcgttgtgaagaatggcggaagagggacaagtgatcggtgtccacagcgtagaggagtggaaggaacatctcaagaagggagaagagtccaagaaattgattgtggtggattttactgcgtcttggtgcggtccatgccgtttcattgccccaattcttgcagagtttgctaaaaagttgccgaatgtcaccttcctcaaggtggatgtggatgaattggagactgtttcc

SEQ ID NO: 17440 - DNA, 366 bp, Glycine max
  unsure (1)..(366): unsure at all n locations
  Clone ID: LIB3049-050-Q1-E1-A10
atcgcgaggctgcaagaaaaagtcggttgagaaagaaagcttatgttcaacagctcgaaagtagtcgcttaaagttgacccaactggagcaagagcttcagagagctaggcagcagggaatctttatatcaaactcaggtgatcaagcacattcaatgagtggaaatggggctatggcatttgatgtagaatatgcaaggtggctggaagagcagaatcgacaaattaatgagctaagagcaggtgtaaattctcatgcaggtgatacagaacttcgcatgattatcgatggtataatggcacattatgatgagataattacgctgaaggccaatgcagctaacgctgatgtcntccatttgctgt

SEQ ID NO: 17441 - DNA, 361 bp, Glycine max
  Clone ID: LIB3049-050-Q1-E1-A11
ggcagcgcttgatttgaggccaggcaagccccactcaaccaccacacctctcctcgttcacgctacccctttctgctcttcttctacctttcaagttttaaaagtataaagatggcagagacattcctatttacctcagagtcggtgaacgagggacaccctgacaagctctgcgaccaaatctccgatgctgtcctcgacgcttgcctcgagcaggacccagacagcaaagttgcctgcgaaacatgcaccaaaaccaacttggtcatggtcttcggagaaatcacgaccaaggccaacgttgactacgagaagatagtgcgtgacacctgcaggaacatcggcttcgtctcaaatgatg

SEQ ID NO: 17442 - DNA, 369 bp, Glycine max
  Clone ID: LIB3049-050-Q1-E1-A12
gggaaaccagtgaagtgatgagccaagacctcaagcgagactacgtcgtttcggaggagatcggccggggaagattcggcaccgttttccgctgctcctccgcagactccggtcactcctacgccgtcaaatccatcgacaaggtggcaataaccgccgccggagactccctcgacgcgcaatgcctattgacggagcccaagatcgttcagcttctctcccctcaccctcacatcgtaaacctccacgatctctacgaagacgaaaccaaccttcacatggttctcgacctctgttacgaatcgcagtttcaccaccgcgtcatgtccgaaccagaaccgcttcggtgatgtggcaactcatgcaaag

SEQ ID NO: 17443 - DNA, 273 bp, Glycine max
  Clone ID: LIB3049-050-Q1-E1-A2
gcgtggccagggtgtcgcagagcgatggccctcacagctttgcggtcacgcgtgccgtgccggggccatcctgtggagatgttcttcgagtgatgcagcaccagcccgagctcatgttcgagacactcaagcaccgcgcgcaggagtatgtcagccacgagaacgcagcagcgcttctggctgctggccttgctcgcacctttgacagaatgccttatctgctgtctctgtcttcctttgtggctgacgatgttgccgctgctgttcctgctg

SEQ ID NO: 17444 - DNA, 283 bp, Glycine max
  Clone ID: LIB3049-050-Q1-E1-A3
gatgtcatagtattatcattcattctcatctttctctcttctctctccacccaaaccctaactcccgaccctgttcccctctcgtatccgtcatgaaaggaggaaagtcccagaccgaatctaagagagccgatcccaaacttgctgtgaataagaagggagccgccaccaaggctaggaaacccgccggcaaggggaaggcagcgaaagaccctaacaagccaaagaggcctccaagtgctttcttcgttttcatggaggagttcaggaaggtattcaacaa

SEQ ID NO: 17445 - DNA, 57 bp, Glycine max
  Clone ID: LIB3049-050-Q1-E1-A4
ggatgtggtactgttatcattcattctcatctttctctcttctctctctacccattc

SEQ ID NO: 17446 - DNA, 266 bp, Glycine max
  Clone ID: LIB3049-050-Q1-E1-A5
gtacacagcctcaacaaccctaaggcaatgcagacgcagagcagagatctcacgcacatcgggtgccagatatcacgccacagtgttattcgcttattatcaacatgccataccccaagtcacggttttgccgtggtattcctgataccaagatcacgatttacgatgttggtatgatgtacaatggtcttgatgagtttcctttctgtgtccaactggttacttggaataaggcaaacgtttctacttacgtcctggaagctact

SEQ ID NO: 17447 - DNA, 280 bp, Glycine max
  Clone ID: LIB3049-050-Q1-E1-A6
gagagatctcactcaactcaatcgcctccactctctcccgcaaaccattcttcttctcttctctccctctgagcctttcatcgctcctcggagagatggctgcgtccgaagaatcatcaaccactcagatggttggcaatgcttttgtgcagcagtattactccatagtgcatcaagagccagaccaagtccacagattttaccaggagtctagcatcctaagtcgacctgaagaagatggtaccatgacaatggtgactactactctggaaattaataa

SEQ ID NO: 17448 - DNA, 276 bp, Glycine max
  Clone ID: LIB3049-050-Q1-E1-A8
gtggttgagaaattagatagcctaatggtgctggcatttttgcatcttgaatcctgtcaaaacagtggccgtttggctgaggtattcaataccctactggcttcatttcagagaactgtattaaatgcgtacaagtcaaaatttacccagtttgtgatgttctatgcatgtgcactggaccctgaaggatgtggtgtgaaatttgcgatggttcttgcagatatgtttggaggtgatgctaatccccctattactaggatgagtgctgttgcttat

SEQ ID NO: 17449 - DNA, 386 bp, Glycine max
  Clone ID: LIB3049-050-Q1-E1-A9
gaagcagaagcaggcgagtgaggaagagcgaagagtgaagagaatggctcccaagggtttaacctttctggctgtgttaatatgcgtttcagcactgtcactgagtccttctgttgcgggggaagggcaaaataatggccttgttatgaacttctacaaggaatcatgccctcaggctgaagacatcatcacagaacaagtcaagcttctctacaagcgccacaagaacactgctttctcctggctcaggaacatcttccatgactgtgctgttcagagttgtgatgcttcactgttgctggactccacaagaaggagcttgtctgagaaggaaacagatagaagctttgggttgagaaatttcaagtacattgagaccatcaaag

SEQ ID NO: 17450 - DNA, 271 bp, Glycine max
  Clone ID: LIB3049-050-Q1-E1-B1
ggagagtgagtgagtggttctcttgcagcaacaaggtttagtgacaccaaacagacgggaaatgggtcgtggggtcagtgctggtggtggacagagttccttggattatctctttggcagtggggtacctgccagcagtgcaaatggtgctcgcactcaaaatgcaagtgctccttcaccaccggttgataagcaaagtccagcaccagcaccagcaccagcacctgcacctgcagcagcagcagcaccagcacctgcaccagcaccagca

SEQ ID NO: 17451 - DNA, 340 bp, Glycine max
  Clone ID: LIB3049-050-Q1-E1-B10
ggaactggaggggcttcaggtgccataatctcaaccttagataacagattattgcacagcaaaaaccttgtaaaaggagaattagaatcacctctctctaaggatgttggaaggaaaggctatggtgaaagaaacagacatgtcaaccaagatgcagatccatgccatggcctctgcttctcaggcccttgatctctacgatgtttatgattgcatctctattgctgcccatatcaagaaggaatttgatagtgtgtacgggaatgggtggcaatgtgtggtaggatccaattttgggtgctatttcacccattcatcaaggactttcatctattttgct

SEQ ID NO: 17452 - DNA, 383 bp, Glycine max
  Clone ID: LIB3049-050-Q1-E1-B11
agggatcgaagcaaaaaatgaaaacccaaagtgcttctctcctctgtctttttctctctcttgctatccttttggctagtggcactgctgcaagtgcaactccaagaagcgcagtgccaagccaccatgtttcaacattcaacagaagcctttttccttccacttttctctttggaattggttcttctgcttaccaggcagaaggagcagcaagtgtagatgggagaggaccaagcatatgggacacctacactagacagcatactgaaaagatttgggatcatagcaccggtgacatgggggctgatttttatcatcgatacaagggtgacataaaaatagcgaaagaaattgggctggactctttcagattctctatctca

SEQ ID NO: 17453 - DNA, 356 bp, Glycine max
  Clone ID: LIB3049-050-Q1-E1-B12
gaaatcttgtgtctattgtattttatctctttccatatgcttccaaccatggaggatccaaatcaagctccagaagcgtcttctcagaagaaaatgggaagagggaagattgaaatcaaacggatcgagaacaccaccaataggcaagtcaccttctgcaagcgccgcaacggtttgctgaaaaaagcttatgaattatcagttctgtgtgatgctgaagttgcccttgttgtcttctcaacccgtggccgtttgtatgagtatgccaacaacagtgttagggccactattgagaggtacaagaaggcaaatgctgctgcttcaaacgcagaatccgtatctgaagctaacacaca

SEQ ID NO: 17454 - DNA, 286 bp, Glycine max
  unsure (1)..(286): unsure at all n locations
  Clone ID: LIB3049-050-Q1-E1-B2
gataaggataaagacaaggacaagagcaaagatagagataaaagtaaaagcagtactgcagatgacaaagggttcccaagacaagctgagggtctcaacgcaggtaaaccccatcaaaaggaaattaagcaagacaataagaagggtatcttgtttgagaacagactcaccaaacagtatgctggcaacaatggggagaaggctanagagaaaaatcatctggctgaagagaacaaggattcaaagttcctcctggagttggatcggaggattaaggatgatgatg

SEQ ID NO: 17455 - DNA, 270 bp, Glycine max
  Clone ID: LIB3049-050-Q1-E1-B3
gttgtgtgtaagtgtgaagagaagagaatggtagtaggattgaatgtgcctcagccatttctgtcaccagtttgcaagacggcaccttacccacttgatctcatcgccaccgccgcgtccctccacttcggccaccttctccgccgccgcgcgacccaccatctccgccttggggttcttcttcactcctgtttcaagaaactcgctcctttaactcacatttttagattgaacgataagtggtgtcaaagatgctttcaactcaatggg

SEQ ID NO: 17456 - DNA, 276 bp, Glycine max
  Clone ID: LIB3049-050-Q1-E1-B4
gacgtttttagggtttacaccgatcagccagacctcccgcagcatccatggttctcacggctgaaggatgcctaatcagtggcgccaagatctacgcatgaaagggcaatcgctttgttcgtggtgattctcaagttttcctgtttgcaagctcaaagtgttcgaggtatttcgacaatcgtctgaagccttcaaatctcacctggactgcaatgtatatgcagcatgtcaacttcgacattgctcaagaagctgtgatgaagacgatatctgctg

SEQ ID NO: 17457 - DNA, 273 bp, Glycine max
  Clone ID: LIB3049-050-Q1-E1-B5
ggagataagatttgagtttgggcatgtgtgagctgtggctttgcagggaagaggagtgtcagtagaaaataaatgtcctcttcccagggacactctctatttcacagatctatatctaagtgtcggtgatcccctttctccttccttctctgagagacaatgagaatgacgtgggcgcgattcgattcgtggaagcagcaatactacaccacaagcggcgtggtggtaggttacgcagtatgctccagcctcctggccatcatcaacaaatac

SEQ ID NO: 17458 - DNA, 225 bp, Glycine max
  Clone ID: LIB3049-050-Q1-E1-B6
ccagccgtcagaacacgagtcagtgggactgcgtaaacgaaatcttgcgatagtgcacagtaactctcgtaacagatctctcgaatccgctctaaatgagaatcccatttgatcaacgtcgaccttggttgatcccccgatatctcatcacacgattcagacatcaccacgactcatatcacgatcgttcagcgcattgtttatctcagagattccgtctatttc

SEQ ID NO: 17459 - DNA, 275 bp, Glycine max
  Clone ID: LIB3049-050-Q1-E1-B7
ggcacacaaccactctttcttcttcttctcttaaaagagcctttgctttttctttaggcctttccgaattaagtacttgtttcattttctctcgaagcaagaaaaatgttcatcgagagtttcaaggttgagagtcctaacgtgaagtacacagagactgagagtcagtccgtgtacaactatgaaaccactgaacttgttcacgagaacaagaatggcacttatcagtgggttgtcaagcccaaaactgtcaaatatgaatttaaaaccaacac

SEQ ID NO: 17460 - DNA, 281 bp, Glycine max
  Clone ID: LIB3049-050-Q1-E1-B8
gggattagaaatttttcccaaagctgatcgagaagccagccaggccaggagttgaagaatgggaagggggaagatcgaaatcaaaagaatcgagaacacaacaaatcggcaggtgaccttctgcaagagaagaaatgggcttctgaagaaagcttatgagctgtcagtgctgtgtgatgctgaagtttccctcatcgtcttctccagccgtggccgtctctatgagtattccaacaacaacataagatcaaccatagagaggtacaaaaaagcctgttcgg

SEQ ID NO: 17461 - DNA, 396 bp, Glycine max
  Clone ID: LIB3049-050-Q1-E1-B9
gacgttgagtaattttttttttcctcttccgcgtccccaccaacatcaccgagaccatgtccaccgacttgcacctccaccacgagctaccaaagctccgaatcgccgccgtcgtcaaaaccgacgacgacctcccctccgacgcccaagacgaccgcaacgccgtctcctccgccgtcacacaagccgaggccgaaaacgacggtgccatcaccgtcgatgtcggcgtcaaagtcaacgacgagagttgccgtactccgacgtcgaaggagagcaaaattccggcgacgatgacgtgtccgccggcgccgaggaagccgaagttcgcctcgtgtaaaagaaaactacttgaggagtttcagttcttcgatgtcacgaataaggaggacatggacg

SEQ ID NO: 17462 - DNA, 264 bp, Glycine max
  Clone ID: LIB3049-050-Q1-E1-C1
ggagtgagtagtgagaatggagtttcaagggttaccggaaggttgcattgctagtatactctctcgcactacgccggcggacgtgtgtaggttttccgtcgtatcaaagattttccgttcggccgctgaatcggacgctgtgtggaaacgttttctcgcttccgattaccgttccatcatttcccagtctccttcgcctctcaactatccttccaagaaggagctctatctcgctctctcggatctccctatcatcatcgatca

SEQ ID NO: 17463 - DNA, 378 bp, Glycine max
  unsure (1)..(378): unsure at all n locations
  Clone ID: LIB3049-050-Q1-E1-C10
gaatagagagatagagcgtgtgtgtgtgtgtgtttgaaagaagataaggatgacagggcaagtggtggtgaccaacggtggcggatgcgctgctgtcgggaagggccggagagccgccgccggcgaagaggagcagaacccggcgtcaccggtggcgcttctgctggcggcgctgaggaagtcaatggtggcctgcagcgtggacagtcccgacgatgtaatctccgccgtccatcatcccatggagatcggatggcccacaaacgttaagcatgttagtcatgtcacgttcgatcgcttcaatggctttctgggtcttcctcttgagttagaggttcatgtccccgctcctgctcccagtgctanntgtagtgtgtt

SEQ ID NO: 17464 - DNA, 357 bp, Glycine max
  Clone ID: LIB3049-050-Q1-E1-C11
gaatagagagatagagcgtgtgtgtgtgtgtgtttgaaagaagataacgatgacaaggcaagtggtggtgaccatcggtgtcggatgcgctgctgtcgggaagggccggagagccgccgccggcgaagaggacgcagaacccggcgtcaccggtggtgcttctgctggcggcgctgatgaactcaatggtcgcctgcaacgtggacagtcccgacgatgtaatctccgccgtccatcatcccatggagatcggatggcccacaaacgttaagcatgttagtcatgtcacgttcgatgccttcaatggctttctgggtcttcctcttgaattagaggttcatgtccccgctcgtgctc

SEQ ID NO: 17465 - DNA, 269 bp, Glycine max
  Clone ID: LIB3049-050-Q1-E1-C12
tgagtcgtattaactacagaaggggaatagagagatacaccgtgtgtgtgtgtgtgtatgaaagaatgataaccgatgacacggcaattggtggtgaccaccggtggcggattcgctgctgtcgggaacggccccagagccgccgccggcaatgagcaccacatcctgtcgtcacaggtgatacttctgctggcggcgcttacgaagtcaatgctcgtctgcaacatggacattccccacgatgtaatctccaccctccatcatctcat

SEQ ID NO: 17466 - DNA, 131 bp, Glycine max
  Clone ID: LIB3049-050-Q1-E1-C2
ggagtgagtagtgagaatggggtttcaatggttaccggaaggttgcattgcgagtagactctctcgcactacgcgtgcggacgtgtgtacgttttccgtcgtatcagagattttccgttcagccgctgaat

SEQ ID NO: 17467 - DNA, 273 bp, Glycine max
  Clone ID: LIB3049-050-Q1-E1-C4
gacttgcggctgcagtagagaagcactcttcgttcttcgactgtctacgatctgctttctctgaattgtgaaaatgtcgctcggagaaactgcttgttcatacgcagctctcatccttcatgaagatggaattagtgtaactgctgacaagatcagcaccttgttgaaaactgcaaaggttccagtagactcttattggccaaccttgtttgctaaacttgctgagaagaaaaatcttggcgatttgatagcaaatgcggcaggcggtggtgc

SEQ ID NO: 17468 - DNA, 203 bp, Glycine max
  Clone ID: LIB3049-050-Q1-E1-C5
cggggagtgagtagtgagaatggagtttcaagggttaccggaaggttgcagtgctagtatactctctcgcactacgccggcggacgtgtgtaggttttccgtcgtatcaaagattttccgttcggccgctgaatgggacgctgtgtggaaacgtgttctcccttccgattaccgttccgtcatttccgagtcgccttcgcctc

SEQ ID NO: 17469 - DNA, 270 bp, Glycine max
  Clone ID: LIB3049-050-Q1-E1-C6
gcagcgcaagagaaggcgacagaaggctgctgctccccccgcacaaactgctggtgaatcaagatataatttgagacgactcaaaactggagcaacaacttcatctgctagagctatgtctggtggtggcaaagaaagtcagggagaggttgatcgtgtaaaagatacagaagagggaattattgactcaaaaacttctcattcacattcagtgggcattactaatgagaatggtgaaagcatacatcttgagcagtctctgaaaggtgt

SEQ ID NO: 17470 - DNA, 203 bp, Glycine max
  Clone ID: LIB3049-050-Q1-E1-C7
gacggcaagagaagaataatcgagagacagatcatgctgatgatcttcttaacttctcagatttatccgacgtcgctgcatatccaccaaccgttatggctgcgttcagcggtgatgaaacggcaccgtcttgcggcgtccttggcgctgcagcagaggtcgtcgtcgcctgtaagggagctgccgaaggtactgccgcgagt

SEQ ID NO: 17471 - DNA, 279 bp, Glycine max
  Clone ID: LIB3049-050-Q1-E1-C8
gacagacaccgacacagatctgtcttccgaagcaggaactaaatatggctgacttgttggaatggtcaaagcaagataagaaacgaatgcttcatgtcgtctaccgtgttggtgaccttgatcgcaccatcaaattttacacagaatgtttaggaatgaagcttttgaggcaaagagatatcccagaggagaaatatgctaatgcttttcttggatttggccctgaagaatcccattttgttgttgaattaacatataattatggggttacctcgtatg

SEQ ID NO: 17472 - DNA, 410 bp, Glycine max
  Clone ID: LIB3049-050-Q1-E1-C9
gagtgagagagagagaaggcaagatgtcgaagagaggacgcggtggttcggcggggaacaagttccggatgtcgctgggtctgccggtggcggcgacggtgaactgcgccgacaatacgggggcgaagaacctctacatcatatcggtgaaagggatcaaagggcgtttgaaccgtctcccctcggcttgcgttggcgacatggtgatggccaccgtgaagaaggggaaacccgatctgaggaagaaggttttgccagctgtcattgttcgccagcgcaagccatggcgccgaaaggacggcgtctacatgtatttcgaagataatgctggtgttattgtcaatcccaaaggagaaatgaaaggttctgctatcactggtcccattggaaaagagtgtgccgatctgtgg

SEQ ID NO: 17473 - DNA, 282 bp, Glycine max
  Clone ID: LIB3049-050-Q1-E1-D1
gaaataacaaatcaaaatactcaaaggatttaaaatgacagaggccgacacagatgatgttggtacgaagtgtaacttctcgttcgcattcaacaacatcaatttctcagaccgaattctcaacattgaggttatacccgaccctcatttcatccgcgcccaatcccattcgctctctaccctcgctccaaatcgtaagagacgcagactctctcttatgaaagccaatgatgtcctcttgcaacctgaggaaaaattaaattgtaatttaccagatgcaga

SEQ ID NO: 17474 - DNA, 358 bp, Glycine max
  Clone ID: LIB3049-050-Q1-E1-D10
ggtactatactataataatgatgataatgtgaatgaaccacatacagagcagtggaatggatcagtgatgagatatcgtccaaaacagcatatcatactcgcaacaaatcagacactttcactcacccttcatcatatggggatggatgccctggaacggcgctgtacaactggttcgccaacattctcacaccgacctataacactatcaacaacacacatcaaccagctccttctcatcctgattctcctaaaccttctctcgctcgatgtcagcatcatcctcgaatgtcccgcatcatgatcgagccatctgttgaatttcaactgcagtggatccatcctcccctttcggcac

SEQ ID NO: 17475 - DNA, 350 bp, Glycine max
  Clone ID: LIB3049-050-Q1-E1-D11
ggaatgaaagctgtagtagctatgtacaccaatttcaaattgggagaatagaaagaagaagcttcttgttcatctcctgctctgtcattttgtacgcctattgataattggcatatgatgcataaatcatctcagaaagtttcaatgtcattctttggtcccttgtataggaacataaacaaagggtacaacttggttttctttataattggcgtatcactaagaatagctgcagttttatgccttaaactatctttcagtttacaggcctttctgtatcctgtgattaccccaatcacaacaattcttccaccaccattatcatcatcacgactattatctgtgactga

SEQ ID NO: 17476 - DNA, 383 bp, Glycine max
  Clone ID: LIB3049-050-Q1-E1-D12
gctgtaacaaaatggatgctactacacccaagtattccaaggccaggtatgatgaaattgtgaaggaagtctcttcctacttgaagaaagtaggatacaaccctgacaagattccttttgttcctatctctggttttgagggagacaacatgattgagaggtccacaaaccttgactggtacaagggtccaactctgcttgatgcacttgaccagattagtgagcccaagaggccctctgacaagcccctcaggcttccccttcaggatgtgtacaagattggaggtattggaactgtgccagtgggacgtgttgagaccggtgtcttgaagcctgaaatggtgggtgacttttgcacaactggactgacaactgaaatcaaa

SEQ ID NO: 17477 - DNA, 169 bp, Glycine max
  Clone ID: LIB3049-050-Q1-E1-D2
cgggggggtgtaaaatgacagaggccgacacagatgatgttggtacgaagtgtaacttcgcgttcgcattcaacaacatcaatttctcagaccgaattctcaacattgaggttatgcccgaccctcatgtcaggcgcgccgaatcccagtctcgctctaccctcgctcc

SEQ ID NO: 17478 - DNA, 282 bp, Glycine max
  Clone ID: LIB3049-050-Q1-E1-D3
ggtggaagtatttgcagaactttgtttcccaacctccattgcctccgcttctacctcgctaccatgatcattcctgagaagaaccgcaaggagatctgcaaatacctcttccaagagggagtttgctttgcgaagaaggacttcaatttggcgaagcaccctgagattgaggtgccgaatctgcaggtgattaagctgatgcagagtttcaagtctcgcgagtatgtgagggagacttttgcttggatgcactattactggttcctcaccaacgatggaatc

SEQ ID NO: 17479 - DNA, 284 bp, Glycine max
  Clone ID: LIB3049-050-Q1-E1-D4
ggagagagagagagagagagaggcacttggaatccaaaaatgagagaaatcatcagcattcacataggtcaggccgggatccaggttggcaactcctgctgggaactctactgcctggaacatggcatccagcccgatggcatgatgccaagtgactcctccttcggtgtagcgcacgacgccttcaacaccttcttcagcgaaaccggatccggcaagcacgtccctcgcgccgtcttcgtcgatctcgagcccaccgtcatcgacgaagtccgttgtggcac

SEQ ID NO: 17480 - DNA, 274 bp, Glycine max
  Clone ID: LIB3049-050-Q1-E1-D5
ggcaaccaaaatgactcaagcccagattcaaccagttaaacttggaacccaaggctttgaggtttcaaaattgggattcggatgtatgggccttactggagcgtacaatgaccctctccaagaacaggatggcatatctgttatcaagtatgcgttcagtaagggaatcacattttttgatactgcggatgtttatggagccaatgctaatgaacttttggttggaaaggctttgaagcagctgcccagagaaaagattcagatagccacaaaa

SEQ ID NO: 17481 - DNA, 267 bp, Glycine max
  Clone ID: LIB3049-050-Q1-E1-D6
gcagaactgtctacgttgggaatctacccggtgatatccgtgaaagagaagttgaagatttgtttctgaagtacggacacataacacacatcgacctaaaggttcccccaagaccacctggttatgcatttgtagagtttgaagatgctcaagatgctgaggatgcaattcgtggtcgtgatggctatgattttgatggccaccggttacgggtggagcctgcccatggtgggcgcggtcattcatcctcaaaagatcggcacaata

SEQ ID NO: 17482 - DNA, 276 bp, Glycine max
  Clone ID: LIB3049-050-Q1-E1-D7
ggatttcatttcgtttgcaattgaatttcaatttccctaggggcttaatatctccccgcatttgtgcctagcctcattattatcatagtaggtattcattccccttatctttctctcttctctctccccgcccaaaccctaactccctaccctattccgctttctctcatccatcatgaaaggaggaaagtccaagaccgaatctaagagagccgatgccaaacttgctgtgaataagaagggcgccgccaccaagactaggaaacccgccggaaa

SEQ ID NO: 17483 - DNA, 267 bp, Glycine max
  Clone ID: LIB3049-050-Q1-E1-D8
tatctttggattaaatgctcttgctggaaagtcaatacacggtggttctgcaaaaggaccttggaactacaccaatgccgagtcctttattcgatacactgttagaaatggctacaccatttatggatgggaacttggaaatgaattgagtgggaatggagttggaacaagcattacagcagagcaatatgctttggatgttgctgctttacacgatgtagtttacaatgcatacaaaaagattgagcctaagccactagtcattgc

SEQ ID NO: 17484 - DNA, 391 bp, Glycine max
  unsure (1)..(391): unsure at all n locations
  Clone ID: LIB3049-050-Q1-E1-D9
ggttctagtgtgtgattgtttgttgttgtaactcgttcttcttcttttgttgttctgtgtttgtgtttgttttttctctcacctgaaaatgtcttgctgcggtggtaactgtggttgcggaagctcctgcaagtgcggcaacggctgcggaggctgcaagatgtacccagacttgagctacactgagtcaaccaccaccgagaccttggtcatgggagtggcacctgttaaggctcaatttgagggtgctgaaatgggtgtgcccgctgagaacgatggctgcaaatgtggaccaaactgctcctgcaacccctgcacttgcaagtgaggtgttgggagagcaagcttcaagcagagatagcccttaattangaataatgataaactatta

SEQ ID NO: 17485 - DNA, 281 bp, Glycine max
  Clone ID: LIB3049-050-Q1-E1-E1
gaatcccaagagagttggaaaacaaagtatagagtgaaagaatgggtgagaaaagcaagattttgatcataggaggcaccggctacatcggcaaacatatagtggaagcaagcgcaaaggctggaaatcccacttttgctttggtgagggaatccacactctctgacccctccaaggcacaactcatccacaattttgaggctttgggcgttaatttggtccgcggggatctgtacgatcatgagaagttggtgaaagctatcaagcaagtagatgtcgtc

SEQ ID NO: 17486 - DNA, 387 bp, Glycine max
  Clone ID: LIB3049-050-Q1-E1-E10
ggttctagtgtatgtgattgttgtgactcgttcttcttcgtcgttatcttcttcttttgttgtttgtgtgtttgttttttctctcacctgaaaatgtcttgctgcggtggtaactgtggttgcggaagcgcctgcaagtgcggcaacggctgcggaggctgcaagatgtacccagacttgagctacaccgagtcaaccaccaccgagaccttggtcatgggagtggcaccagttaaggctcaattcgagagtgctgaaatgggtgttcccgctgagaacgatggctgcaaatgtggagctaactgcacctgcaacccctgcacttgcaagtgaggtgttggagagctaaagcttcaagcagaaatggcccttagaaataatgataaa

SEQ ID NO: 17487 - DNA, 354 bp, Glycine max
  Clone ID: LIB3049-050-Q1-E1-E12
gggagacttaaatgaaaaggaaataatcttaagtggaaccttctgcgaaattagccttccttcgtcccttgattgaagtataaattatgggtgttgaaattcaaagccatatccgtcattaaccaaatttgtgtttctccgattgcaagcaatggactccttcaattccttcttcgattcaacaaaccgatggaattacgatactctcaaaaacttccgtcaaatttctccggtcgttcagaaccacctcaagcaggtttattttactctgtgtttcgccgtggttgctgcggctgttggggcttaccttcatgtcctcttgaacattgggggttttcttactacagtggcatg

SEQ ID NO: 17488 - DNA, 284 bp, Glycine max
  Clone ID: LIB3049-050-Q1-E1-E2
ggagcaagagtgaagagcgaagagaatggctcccaagggtttaatctttttggctgtgttatgcttctcagcactgtcactgagtcgttgtcttgcggaggataatggacttgttatgaacttctacaaggaatcatgccctcaggctgaagacatcatcaaagaacaagtcaagcttctctacaagcgccacaagaacactgctttctcctggctcagaaacatcttccatgactgtgctgttcagagttgtgatgcttcactgttgctggactccacaagaa

SEQ ID NO: 17489 - DNA, 209 bp, Glycine max
  Clone ID: LIB3049-050-Q1-E1-E3
gagatgaacatttttaaattaatctctcaactcatccgaatatctatgagatagtcctgcttgtgctgtggatagggattggtgtctgctcaagtttatgatagatggcatgaattcccgtatattgctggactctgcattgagttgcgtgttggcttcttctcctgtttgcagaaggcaacaattcttgattgggtgtgtgggaggct

SEQ ID NO: 17490 - DNA, 284 bp, Glycine max
  unsure (1)..(284): unsure at all n locations
  Clone ID: LIB3049-050-Q1-E1-E4
ggatttcatttcgtttgcaattgaatttcaatttccctaggggcttaatatctcccctcacttgtgcctagccttatgtcatagtattatcattcattctcatctttctctcttctctctccacccaaaccctaactcccgaccctgttcccctctcgtatccgtcatgaaaggaggaaagtccaagaccgaatctaagagagccgatcccaaacttgctgtgaataagaagggagccgccaccaaggctangaaacccgccggcaaggggaatgcagcgaaag

SEQ ID NO: 17491 - DNA, 275 bp, Glycine max
  Clone ID: LIB3049-050-Q1-E1-E5
catgtcttcctccggctatagttgttgcagatctcggatgttgtaaaattagtgtatgatgtgaagctatgggctggaaaatgtggatgtaggagatttcgggacgaaaggcctcaaaacgcttcgtcgtttgtggttactgagtcctgagtgatcttgtcatccgacctttgccatgacaggtgcgcttgcttggcaggtcaaaatatgttaataaaaaaagttttattggtttagggagagatcgcacgggagttgcccggggtctctctctc

SEQ ID NO: 17492 - DNA, 269 bp, Glycine max
  unsure (1)..(269): unsure at all n locations
  Clone ID: LIB3049-050-Q1-E1-E6
gaagaagagcaagaagagtaagagcaagagggtttcgttgaagaagaagtacaaggtcataaggaaggtgagggagcacaacaggaagaaaacgaaggaggcgaagaagcttcgcttgagtgggaagaagaaggttgagaaggaccctggtattcccagcgattggcccttcaaggagcaggaactcaaagcgcttgaagctcgaagggcgaaggctattgaggaattggagcanaagaaagcggaacgcaaggagagggctcggaaaa

SEQ ID NO: 17493 - DNA, 277 bp, Glycine max
  Clone ID: LIB3049-050-Q1-E1-E7
gagtgcccccgtctcttcctcctctctccgcatcgctgcgttttccgaatcgaaaggtacgtaagtaacaatggtggaggccaagggtaggaaagaggaggtcgtcactcgagagttcaccatcaacctctacaaacgcttgcatggctgcacattcaagaagaaggctcctaaagcaattaaggagataaggaagtttgctcagaaggcgatggggacgaatgatgtgagggtggatgtgaagctgaacaacgctgtgtggagccaggggattcgg

SEQ ID NO: 17494 - DNA, 274 bp, Glycine max
  Clone ID: LIB3049-050-Q1-E1-E8
ggtgctggtggtgcagaaagggccattttctgaatgcgctctatctatctcttccgatctggctactaaccctaacccgcttcgaaccgtggcttcctcggcctcgcagaacctctctcgaagaaaatcttcttcttcgtcttcgttttctcaacaaacttccgggtcgatccggatcgtttaccgcgaacctcggatcccatcggaatccaattttccgatctggcagcagaactggttcatcgcattgctcttcctcatggctctcggattc

SEQ ID NO: 17495 - DNA, 356 bp, Glycine max
  Clone ID: LIB3049-050-Q1-E1-E9
ggtgacaatctttcttagctagatcagtgcctcatttttctttcagttttcctgcttcttctcttcttcaactggttttgagattgccattttcttatcttgtttagtttagcttgtttggttgagaggaattaattattttgtataaaacaatgaaggagagtgtaggaaaccctttgcgtcttcaatctgtgaatcatatctccctcatatgcagatcagtggaacaatcaatggatttctatcagaacgttcttggattttaccccatcaggaggcctggctctttagattttgatggggcatggctattcggctacggaattggaattcatttgctagaagcagagaaccct

SEQ ID NO: 17496 - DNA, 257 bp, Glycine max
  Clone ID: LIB3049-050-Q1-E1-F1
ggaccccaacttcttttatatcaccaaggtttctgagtccaatagggacgccaatgaagagagtgcttgtaaacatgaagggttacttggaggaagtgggacaccttaccaaactcaaccctcaagatgcttggcttcccatcaccgagtctcgcaatggaaatgctcactatgctgcatttcacaacctcaatgctggtgttggctttcaggccctcgttttgcccgttgcttttgcttatcttggctggagttgg

SEQ ID NO: 17497 - DNA, 374 bp, Glycine max
  Clone ID: LIB3049-050-Q1-E1-F10
gaagatgaacgatgtccaaggcctatgtgctacaaggcttatggaagtggaaaggaagatagtcctatgtgtgacgtgccagggtttgaaaacagcaagatgaaattgctaaggcatgtttcatttgtggattgtccgggacatgatattcttatggctacaatgcttaatggagcagcaatcatggatggagcgttgctactcatagctgctaatgaaagctgcccacaaccacaaacatctgagcatttagctgctgtagaaatcatgcgtctacagcacataataatccttcagaacaaggtagacttgattcaagaaaatgtcgcaatcaatcagcatgaggcaatttcaaagtttatacaaggaactgt

SEQ ID NO: 17498 - DNA, 262 bp, Glycine max
  Clone ID: LIB3049-050-Q1-E1-F11
gacgcacacatggtgctgccactgtcactcttctcttctcctttctgcttcgccgattctctatttttgcgcgcaatcgaatgtggaactttgcatcgaattgcattgctggaactgtgggactgaaaaatgattcaaagcctactcattctgcttcggaatgttctgatgatgaaaactctgttataggcagagaggaagggctggaatgcccaatatgctgggaatctttcaatattgttgaaaatgtgccctatgtttt

SEQ ID NO: 17499 - DNA, 367 bp, Glycine max
  Clone ID: LIB3049-050-Q1-E1-F12
gaaacaaacaatagaaaagcgaaaacaaatgtcattttcgaggttattgagagtccagaatcctggtctctgtctactcttcaattattcccaacctctcacctcttcatcttcttcttccttacctttgaccagagacagagcagcactcacattcacaacgaaggtttcctattcatcagacatggtgaaggcaatcagagttcacgaactcggtggccctcaagttctgaagtgggaggatgtggaaattggagatccaaaagaaggcgaggtccgtgtgaggaacaaagccattggggttaatttcattgatgtctactttcgcataggagtttacaaagccccttcttttcccttcactcca

SEQ ID NO: 17500 - DNA, 203 bp, Glycine max
  Clone ID: LIB3049-050-Q1-E1-F2
gactgcgactggagtggttccctcagacatatctgtaacgctgcttcttctgtgaggcatcaatggagacaaaagctttgtccttcgctctgtctctcaatgacctcaccaacaaccgcttcacttccaatacgccacatgctgccgccgaaggttccgtccttaccgtcagaggctcttcttcgggtagtcgatagaggcct

SEQ ID NO: 17501 - DNA, 283 bp, Glycine max
  Clone ID: LIB3049-050-Q1-E1-F3
gagggatagggatagggatggagaaagtgaaggtgcttcggcgactcctcgagacaccaggggttcaccaggggccagcctgtttcgacgctctgggtgcgaagctcatagaatccgctggcttcccctactgcatcaccagtggcttctccatcgccgcttccaggttgggtctgcccgacaccggcttcatctcctacggcgaaatgctggagcagggccaactcatcacccaagccgtttccattcccgtcattggcgacgccgacaacggctacggcaa

SEQ ID NO: 17502 - DNA, 218 bp, Glycine max
  Clone ID: LIB3049-050-Q1-E1-F4
ggtccaatggggtaatggttggtggtggtaatccgtcctcctcctttggtggtccggggttggggttggtttttcccccaaccgaaaaaggtcttgcgccggtggaaatggtggttccggaacccccggaaattgcggaaacggttgcggaggctgcaaaatgtacccaaactggaccaaaacggattcaacaacaacggaaaccttggccatggaat

SEQ ID NO: 17503 - DNA, 266 bp, Glycine max
  Clone ID: LIB3049-050-Q1-E1-F5
ggaacctttgcattctattcattcaagattcagcaagtgcgttttggaagcagagaccgaaatacttcgagatggcccgtacaaagcaaactgctcgtaagtcaactggaggaaaagctcccaggaagcagcttgcaaccaaggctgcacgtaggtctgcaccaacaactggtggtgtgaagaagcctcatcgttatcgccctggaactgttgctcttcgtgagattaggaaataccagaagagcactgagctcctaatcaggaag

SEQ ID NO: 17504 - DNA, 265 bp, Glycine max
  Clone ID: LIB3049-050-Q1-E1-F6
gaattaaagggagggtaccagctgtcaaatagtgctttccacacactttcaccaatttataaattatttgcagttacactccaagtctactttttctttggcagcttagccttcctattttggaaaccctcttcactgctctcccaccttttttgtgtgtatgtgtaggagcttctcttctactctattcactgcactcttattaataaatatcagtgcttggaaagcagaagagaagatccatagctaagatagatctcgagat

SEQ ID NO: 17505 - DNA, 276 bp, Glycine max
  Clone ID: LIB3049-050-Q1-E1-F7
gggcgcggcacacacagacacacacatttcgtcggaatgggaagggtgattcgcgcacagcgtaagggtgcggggtcggtgttcaagtcccacacccaccaccgcaagggtccggcgaggttccgcagcctcgacttcggcgagcgcaacggctacctcaaaggggtcgtcaccgatatcatccacgaccctggtcgcggtgctcctctagccaaggtggcgttccgccaccccttccgctacaagaagcagatggagctcttcgtcgccgccgag

SEQ ID NO: 17506 - DNA, 248 bp, Glycine max
  Clone ID: LIB3049-050-Q1-E1-F8
ggaggagactgagaaaacagaagaaaacaaaatggaagacacagtttctgcgttgaggtctttgatggtttctcactctccgccgctggatgccttagtggtgccctctgaagattatcacctgagcgaatatgtgtctgcacgagaaaagcgccgcgaattcgtttccggcttcactggaagtgccggcttggcacttataacaaagaaagaagcactgctgtggacggatggacggtattttttgc

SEQ ID NO: 17507 - DNA, 395 bp, Glycine max
  Clone ID: LIB3049-050-Q1-E1-F9
ctgtgattgaaccatttgtcatagcaacaaacaggcatcttagtgtgctccaccctatttataaacttttgttgcctcactatcgtgacaccatgaacatcaatggactcgcaagacaatcactcatcaatgcaggtggcattattgagcaatcatttctgcctgggccatttgctgtggagatgtcttcggcagtttacaaggggtgggttttcactgatcaagcccttcctgcggatcttatcaagagaggaatggcagtggaggatccatcctctccctatggccttcgccttgtgatagatgactacccttatgctgttgatggactagagatatggagtgctatccagacatgggttaaggactacgtctccttgtactatgccacggat

SEQ ID NO: 17508 - DNA, 271 bp, Glycine max
  Clone ID: LIB3049-050-Q1-E1-G1
gaagctcaagaagggtcttctcagaagaaaatgggaagagggaagattgaaatcaaacggatcgagaacaccaccaataggcaagtcaccttctgcaagcgccgcaacggtttgctgaagaaagcttatgaattatcagttctgtgtgatgcggaagttgcccttgttgtcttctcaacccgtggccgtttgtatgagtatgccaacaacagtgttagggccaccattgaaaggtacaagaaggcaaatgctgctgcttcaaacgcagaat

SEQ ID NO: 17509 - DNA, 366 bp, Glycine max
  Clone ID: LIB3049-050-Q1-E1-G10
gaaccacagcttaattctctctactactgctagctgtgacttgttttgagttcaatcaaatcgcattggtatctgaaatcaggaaagatggttagcgtagctgagatcaggcaggcacaaagggcagaaggcccagcaaccatccttgccattggaactgcaaacccaccaaaccgtgttgatcagagcacctatcctgattactacttcagaatcaccaacagtgaccacatgaccgagctcaaagagaaatttcagcgcatgtgtgacaagtctatgatcaagacgagatatatgtacctaaacgaagagatcttgaaagagaatccaaacatgtgtgcttacatggcaccttctttggatgct

SEQ ID NO: 17510 - DNA, 367 bp, Glycine max
  Clone ID: LIB3049-050-Q1-E1-G12
gattgcgtgttggtgtgaatcaagaaccgctctgctatggctgctctgcaatacttggaatcgctgcgtaattcgcaccctgagctctccgattggtacaattcgctggcggatctgtaccagaagaagctctggcaccagctcactctcaagctcgagcagtttgtggctctcgccgtcttccaggctggtgatgctttaatacaattatatcacaatttcatcacagactttgagacgaaaatcaaccttctcaagcttgcacattttgctgttatagtttctcggcagtattctgaaaaagaagctgctgttggttatcttggaggggtcattcagaaacttcaagacactatggagcatcgca

SEQ ID NO: 17511 - DNA, 275 bp, Glycine max
  Clone ID: LIB3049-050-Q1-E1-G2
aatgattaaatgaaccaagattttaccatgactgcaattttagagagacgcgagagcgaaggcctatggggtcgcttctgtaactggataaccagcaccgataatcgtctttacattggatggtttggtgttttgatgattcctactttattgaccgcaacttctgtatttattagcgcttttattgctgcccctccagtagatattgatggtattcgtgagcctgtttctggatctctactttatggaaacaatatcatttctggtgccattat

SEQ ID NO: 17512 - DNA, 335 bp, Glycine max
  Clone ID: LIB3049-048-Q1-E1-H3
gagggttttatctcattaacgtttcttctcttcactctgcccgctgcatcaatggcttcagagaagaaactttcgaacccaatgagggagataaaagtgcagaagctcgtcctcaatatctctgttggcgagagtggagatcgtctcaccagagcctccaaggtgttggaacaacttagtggccaaaccccagtgttttccaaagcaaggtacactgttcgttcctttgggattagaagaaatgagaagattgcatgctatgtcactgtcagaggtgacaaggcaatgcaacttttggagagtggtttgaaggtgaaggaatatgaacttctcag

SEQ ID NO: 17513 - DNA, 375 bp, Glycine max
  unsure (1)..(375): unsure at all n locations
  Clone ID: LIB3049-046-Q1-E1-H2
gagagcgagaaagtgagaggagagagaaagtagcagatcctccatggcctccagcaaggaacgtgaaaacttcgtctacgtcgccaagctcgccgaacaagccgaacgctatgaagaaatggtggaagcaatgaagaatgtggcgaagctaaacgtggaattgacggtagaggagcggaaccttctgtcggttgggtacaagaacgtggtgggtgctcgtanggcttcgtggaggattctttcctcgattgaacagaaagaagaagctaaagggaacgatgtgagcgtgaagaggataaaggagtatacgctgaacgtggagtctgagttgtccaatatctgcagtgatatcatgactgttattgatgaatacct

SEQ ID NO: 17514 - DNA, 382 bp, Glycine max
  Clone ID: LIB3049-046-Q1-E1-H3
agggggccaagtttcctggttccgtccgcaattttcaattccaactccctctcaaatgcaattccccatccaacaaaagtttctcatcaattctgtttcccaaaagcaatttatttaaatactgaatttgggtaaatttctttctcaaatataattagttttacaattagtttacttccttttccttggattgtagccggggtttcctgttgtgagagaaacaactttaatctctgttttgggaacatctggggtctcaatttagtggaagttaaattttgaaactttggacgaagatggcgaattgggtccaaaagaagatcactgattcccttctttccattatccgaagaagagctgaaccaaaccacttggctttctc

SEQ ID NO: 17515 - DNA, 423 bp, Glycine max
  Clone ID: LIB3049-046-Q1-E1-H4
gacccaaacaaacatgagtagggtcatagatgacgacagaaggggagaagtaagagaaagagagacatcgcgtttgttagctccgaattgatcaatggctcagtcatattcgtggctcttcctggcgacttgtgccaccctcttccttctgatttcgtcggcgacaacagcggacgcaggaggagcaggaacagcaccagggatggaaatgacgtggatgccctccatctccatggaaggagctgaagaagagttcatgttggacaacgagattaaccggcgcatgttagcgagcacaaggtacataagctactgtgcgatccataggggcagtgtcccctgttctcaccgcggagcctcctactaccattgccaacctggcgctcaggccaacccttaccatcgtggctgcagtgccattac

SEQ ID NO: 17516 - DNA, 403 bp, Glycine max
  Clone ID: LIB3049-046-Q1-E1-H5
ggaagtaagggatcgagcctcggaggagggaatcgcagcgaagtccactatgccgaagcaaattcacgagattaaggacttcctcctcactgctaggaggaaggatgcacgctctgtgaaaatcaagcggagcaaggatgtggtgaagttcaaggtccgttgctccaagtacctttacaccctctgtgtgtttgattctgagaaggctgataagttgaagcaatcacttcctccaggtttaagcgtgcaggatgtgtgattcttactgctgtatgaagatcaggtttttctctggattttggggattcatagttagtaaaatggttcagagaattttcgtatttgttgttacattcgggatcatgttagtattttgtttaagacggattcaacttgcttgggg

SEQ ID NO: 17517 - DNA, 371 bp, Glycine max
  unsure (1)..(371): unsure at all n locations
  Clone ID: LIB3049-046-Q1-E1-H6
gactcacaactcagtgaaagagaatccgaggcgaagagaagagaaaaattaagatggaggggaaggagcaggatgtgtcgctgggagcgaacaagttcccggagagacagccgattgggacggcggcgcagagccaagacgacggcaaggactaccaggagccggcgccggcgccactggttgacccgacggagtttacgtcatggtccttttacagagcaaggatagcagagtttgtggccacttttctgtntctatacatcactgtcttaaccgtcatgggagtcgccggggctaagtctaagtgcagttacgttgggattcaaggaatcgcttgggccttcggtggcatgatcttcgccctcgtttac

SEQ ID NO: 17518 - DNA, 360 bp, Glycine max
  Clone ID: LIB3049-046-Q1-E1-H9
gaagagagtagcattcctattgctaattcctagtgtatactactccacagtacacagcacccttttagtactagccaccattcaactttctctcttcccacactcccttcactttttacaccttcctttcttactctgctcatcttcttggccatcctaggtagttagtagtttttggaggatgaggttgttgtgtttgtgtttaacgttgttgctgtttctggctagtgtggcaatggcagaagaagattcagatcataataagcactccctaaaagccacgtcacacgcgcagattcagtgcacaatgtgttcctcttgtaacaacccttgcaaccaagttccatctccgccaacaac

SEQ ID NO: 17519 - DNA, 332 bp, Glycine max
  Clone ID: LIB3049-047-Q1-E1-A1
ggcgcattgaacgaaaattagggtttgtagtgtagcaggaagaagcagcaatggcgccgaagataacacgtaaggttagcagaaaccctgaattgataaggggaatcggaaagtactcgaggtcgcagatgtaccacaagaggggcatttgggctatcaaggccaaaaacggtggcgttttacctcgccacgaccctaaacccaagcctgaagctcctgctgaaaaaccacccaaattttaccctgctgatgatatcaagaagccccttgtcaacaagcacaaaccgaaaccagctaagctcaaggctagcattactcccgggacagtgttg

SEQ ID NO: 17520 - DNA, 392 bp, Glycine max
  unsure (1)..(392): unsure at all n locations
  Clone ID: LIB3049-047-Q1-E1-A10
ggagtttatgtggttgcgcctctgcctgtaagagtgaaaaaaccttctcttttccttctctcaagtctcaagagatttcatcatggctccaaagaaggacaaggctccaccaccttcctccaagcccgccaaatctggcggtggcaagcagaagaagaagaagtggagcaagggaaagcaaaaggagaaggtgaataacatggtgctgtttgatcagggcacctatgataagctcctttctgaagctcccaaattcaagctcatcactccttccattctttctgattgtttgaagattaatggatcactttgcaggaaggctataagagaattgatggctaggggttcaatcangatggtgtctgcccatgcaagccagcanattttacaca

SEQ ID NO: 17521 - DNA, 293 bp, Glycine max
  unsure (1)..(293): unsure at all n locations
  Clone ID: LIB3049-047-Q1-E1-A11
gggagttgggtanggtgaattgcaatttcaattaattagaattcaacgtttgcaaattgcatattgttcttctcttcctctcttcctctgactccatgtcgtcgataacgggcatccaggggcaacctcttgaggttacggtggtttcgtgctccaagttgaaggacacagaatggatttcaagacaagatccgtacgtttgtgttgagtatggcagcacaaagttccgaaccagaacctgcacagacggcggaaaaaacccggtattccaagagaagttcatctttcccctc

SEQ ID NO: 17522 - DNA, 303 bp, Glycine max
  Clone ID: LIB3049-047-Q1-E1-A12
gacgcatagagagagagagagagagaagcagaggaagaaggagaagaaggagatcttgagagatcaggtcgcaactcgtcatggggagagaagttacaggaatgcaagttgtggacaagaagccaaatggtgttataccagcttcaaatggtagttctaatgataaagtatgcttttctcctaaaatgggagcaactaaggttcaggcgaaggatcacaaggtaaatgaatgtaccaaaactaactcctttgaggagaaaagccatgagaagatggatggtttgagtgccaaaacaacaaact

SEQ ID NO: 17523 - DNA, 246 bp, Glycine max
  Clone ID: LIB3049-047-Q1-E1-A2
gagaagagagagagagagagagagagagtcctgaaacttgggtgcgattccttcactcacaacaacaacacatcactatggctcttctgagtcgagcctcttcacgcttccctcagctggtttcccctcaaagggtagtttcactccacacaacgctcccatctctgaacgcatccccatccacagccacgcctacaccatatgccccgccaccggctccgttcgcttcctctcccgccggggttt

SEQ ID NO: 17524 - DNA, 396 bp, Glycine max
  Clone ID: LIB3049-047-Q1-E1-A3
gacggcggaagagcatcaaattaacaacttctggagaagaagaagaatgtggacgcggatactcgcacgagcaacacgtgctgttgccgttgccggcaactattcactcattaatcaacccatctctgaccctatctttctcaaaatccccaaatcaacttttccccaaattttcaataaccctcgatttttggtcacctccaacctcgacaatgagctctcaccggattcttcagtgagcggcggtgacagacagctcgcagaacaagaagaaggatgacgaggacgagacacgtacgaggttgattccgacacgttggagagtgtgctacgtcttctcgcaaacagcgctgatgggtcccttgagtcgtgtttggatgacatggatttgacact

SEQ ID NO: 17525 - DNA, 397 bp, Glycine max
  unsure (1)..(397): unsure at all n locations
  Clone ID: LIB3049-047-Q1-E1-A4
ggcatttctcaaaggaacaaagaaacaaagaagtaaacacactgtttcatactttcgtttcgttcattcggcgtagaagcaaaagagagagatagagagagggaaaaaggttgctaccaacaacaaacaaaaacagtgttgcttgattccgcggtggcgagaaccgacgtgagcggcggaggagaggcgcggaacggtggtcttcaaggttttctgacgtctctgttctcgaccctcggcggtgttttcgggtcaacgtttcaagaaccgcatcaaagtgttatcatggcttccagattggnacaacagcaacaccccaacaatgttggtggtgagaataagcagaanaacatgggcggtgaaggaagaaacagaagggtgctgcangatattggga

SEQ ID NO: 17526 - DNA, 416 bp, Glycine max
  Clone ID: LIB3049-047-Q1-E1-A5
gggcactcagtagagaattaaataaaatcaagaaagcatgcatatgatgaagaaggtgtgtgggtttgcaatagtggtgatggcagcactttttctggtggagatgagtcccatggcagaggctgtgacttgtagccctgtggagttgagtccctgtttgggggcaatcacgtcctcttcaccaccatcgacaacttgttgccagaaggtgagggaacaaaggccatgcctctgtggttacctcaaaaaccctagtctgaggccatatgtcaactctcctggctccagaagggttgctagctcttgtggggttcccttcccaacttgttagtcactttttacttcatatatatgtaataaactccccctactgttggctggaaattatatatatatatatatatatgttgaagaaa

SEQ ID NO: 17527 - DNA, 368 bp, Glycine max
  Clone ID: LIB3049-047-Q1-E1-A6
ggaaaaaggaagaaaggtaatagagagagagagaaagagaagaggagagagaaacaaagaagagtgttcccacattacatggcctccttgcccttggggcaccaccaccatcaccaaccggcggcggcgactatacacccgtcgcaaccgccgcagtgtcagccgcaacccgaagttcctcgccggagctccgatatggagaccgataaggatatgtcagctactgtcattgaggggaatgatgccgttactggccacataatctccaccacaattggaggcaaaaatggggaacctaaacagaccatcagttacatggcagaacgtgttgttggcactggatcatttggagttgttttccaggcaaa

SEQ ID NO: 17528 - DNA, 248 bp, Glycine max
  Clone ID: LIB3049-047-Q1-E1-A7
ggacactcgcttcacagttacatattctcagaaaagcatgcattgtgagagacaacgtctctgggtttccaatagtgctggggccctcacctcttctggtgcacacaactcccatggcagccgctgtcccatgtatccccgtctcgtcaagtccatgtttcgcggcattcacattctctctcccattttcgacaccttgttgctcgaaggtgaggtcacataggcttcttcactgtactgacgtcata

SEQ ID NO: 17529 - DNA, 407 bp, Glycine max
  unsure (1)..(407): unsure at all n locations
  Clone ID: LIB3049-047-Q1-E1-A8
ggagcaagagtgaagagcgaagagaatggctcccaagggtttaatctttttggctgtgttatgcttctcagcactgtcactgagtcgttgtcttgcggaggataatggacttgttatgaacttctacaaggaatcatgccctcaggctgaagacatcatcaaagaacaagtcaagcttctctacaagcgccacaagaacactgctttctcctggctcagaaacatcttccatgactgtgctgttcagagttgtgatgcttcactgttgctggactccacaagaaggagcttgtctgagaaggaaacagatagaagctttgggttgagaaatttcaggtacattgagaccatcaaagaagctttggaaagggaatgcccangagttgtttcctgtgctgataacctcg

SEQ ID NO: 17530 - DNA, 358 bp, Glycine max
  Clone ID: LIB3049-047-Q1-E1-A9
gggtagcgcagagaaagaactagaactagaactagggtttcatctttgccatcagaaacaacaatgatttacgacgttaactctccccttttccgatccttcctcagccagaaaggaggctcctccgataagaggaaaacggatgaacagaagccaaaagagcagaaacccaaagccagcgagaacaaacctataatgacagagtgacaacaaatttgctgcattcagttgtagaatgataataggtggtagatattgcatttggttctacaaaattaagatcattttggctgtgttctgaggtatatgtggtgttttagactttgttattgtaatggtttgattttggatatgggta

SEQ ID NO: 17531 - DNA, 382 bp, Glycine max
  Clone ID: LIB3049-047-Q1-E1-B1
ggcgataaaacggagaaaagaaaaaagaaaaatgtaagtggaagaagagaaagtggcatcgcttaggtacagatacagacacaacctggtaaaaatcccgaccccagtgccgcacaattttccttcactcgcagcggaggtttacttttgatctagtacctgctatccctatgtataagcatggacttctagcatactattgtttgattaaccaagttcttccatattggttgaggaagcctcgagtcaatatttagtttttgctgccatctgtgggtttctgatggatgatgccgggcatcgtgaaaatggaaggcacaaagcagcagatcaatataaatctgctcaaggacagtggttgatgcaacatcagccttccatg

SEQ ID NO: 17532 - DNA, 363 bp, Glycine max
  unsure (1)..(363): unsure at all n locations
  Clone ID: LIB3049-047-Q1-E1-B10
ggaacctttgcattctattcattcaagattcagcaagtgcgttttggaagcagagaccgaaatacttcgagatggcccgtacaaagcaaactgctcgtaagtcaactggaggaaaagctcccaggaagcagcttgcaaccaaggctgcacgtaagtctgcaccaacaactggtggtgttaagaagcctcatcgttatcgccctggaactgttgctcttcgtgagattaggaaataccagaagagcactgagctcctaatcaggaagcttcctttccagaggttggttcgtgaaattgcccaggatttcaagactgatctgcgtttccacgagcatgctgtgcntgcattgcaagaggctgctg

SEQ ID NO: 17533 - DNA, 395 bp, Glycine max
  Clone ID: LIB3049-047-Q1-E1-B11
ggaatgataaacttgtaaatcattagctatttcacacaataatttctaaatgaacagaaatcttaaataaatcactacaaatacgttccatttccatacaagttaaaccagttcttttgattcaaacacgggaagggtgaaaagttattaattagctattgtttcttgcttatcttgtctaaattcgacctattcctatgtgcagtgtgatccagaagaaccaggatcttgcgactccggatgcaatggtggattgatgaatagtgcttttgagtacagcctgaaatctggtggggtcatgcgcgaggaagactacgcttattcaggtgcagacagcggaagctgcacattcgaccaccggagcattgcatcatcagtggcaaagctgagtgtcg

SEQ ID NO: 17534 - DNA, 392 bp, Glycine max
  Clone ID: LIB3049-047-Q1-E1-B12
gacacacaacaaagttctcattttttctcattcctttccgaccatggcatcaccggcatccaacccccaaagcgccgagactaagaaaagccgtggccgccaaagggttgacattaagaaaatgagcaacgaggccaacctccaagtcacgttctctaagcgccgcagcgggcttttcaagaaagccagtgagctttgcactctctgcggcgctgaagtggctctggtggtgttctcgccggggcagaaggtgttctccttcggccaccccagcgtggatggcgtgattgagcgctatctcactggggtcgcaccgccggaggcggacaacatgaattacatcgatgtgcaccgcatggccaaagtggttgaccttaacgcccagctgactc

SEQ ID NO: 17535 - DNA, 253 bp, Glycine max
  Clone ID: LIB3049-047-Q1-E1-B2
ggaattcgaagcaaacacgaaccctaactttcgagttctctcatctcgcgcggttctctccgttctcggcgccggtgccgccgcgtctcgaaactgttcgtccattgcacggaaccacagagcaattccgttgcaatctaagcctgcagcctcaacacgcccttcgtacctgaagcagttccgtcggactcaagcctcaagtctctgcatctttgtttttcagtgatgggaaaaatgctcaagaataagaaac

SEQ ID NO: 17536 - DNA, 382 bp, Glycine max
  Clone ID: LIB3049-047-Q1-E1-B3
gcctgtcacaaacacagattcacttcgaaactgaacgctgcagcagaagatgttcaaaaaattttctggcgaagatgtgtctgcacagaaccaagtgaaggcatctgttcaacgaaaaatacgacaaagtattgctgaagagtatccgggccttgaacctgttttggatgatatacttcccaagaagtcccctcttatagttgctaaatgtcagaaccatctcaatctggttcttgtgaacaacgtgcctttgtttttcagtgtccgtgatggaccatacatgcccaccttgcgacttctccatcaatatccaaatataatgaaaaagttacaagttgaccgtggtgcaattagatttgtcttggcgggtgcgaacataatg

SEQ ID NO: 17537 - DNA, 396 bp, Glycine max
  unsure (1)..(396): unsure at all n locations
  Clone ID: LIB3049-047-Q1-E1-B4
gatagcactagcaagcataattgttggagctccaaaccagacgggactactctctagctccgtccacgtgccgtcgtacgctctgaaatcttccgtcgtctctggcatctccgctgccagccttctgatctgtcataccaaatggccaacagggttcaaattcctaccaacaattcagcactcattgctatgattgcagatgaggatactgtagttggatttttgttggctggagtgggaaatgttgacatacgtatgaagacaaattacctcattgtggattcaaaaacaaccgtcaaacaaattgaggatgcattcacagaatttacaacaagggaggatgttgccattgtgctgattagccaatatgttgcanatatgataaggtttttgggt

SEQ ID NO: 17538 - DNA, 344 bp, Glycine max
  Clone ID: LIB3049-047-Q1-E1-B5
gtctgtcacacacacacattcacatccagactgctggctgcagcaatatatgttcaacttacttgctggcaaatatgtgtctgcacagaactaagtgcatgcatctgttcaacgatacatccgactaagtcttgctgataactagccgggccttgagcctgtgttggatgatatacttcccaagaagtcccctcttgatacttgctagtctgtcagaaccatctcaagctggttcttgtgaacaacgtgcctttgtctttcagtgtccgtgatggaccatacatgcccaccttgcgacttctcgatcaatatccacatataatgaattagttacttgttgatcg

SEQ ID NO: 17539 - DNA, 371 bp, Glycine max
  Clone ID: LIB3049-047-Q1-E1-B6
gagaattagggtgagaacaaaattgcgaagaaccctaattgattgattgattgattgattcccatggcgtcccgaagaggtggagtctcactcccagaaagaccaagcaacaactcaggctccgtcctggcgaagatctcgcgctcctccatcgtcacccgcggcaaggaagccgccgtcgacgccgcattcgtcgccaagaagctcctccgcagcaccggcaaggccgcgtggatcgccggcaccaccttcctcgtcctcgtcgtccctctgatcgtcgagatggaccgcgagcagcagctcaacgacctcgagctccagcaggccagcctcctcggcacccccgcccccaaatgaaaatttgaggtttt

SEQ ID NO: 17540 - DNA, 387 bp, Glycine max
  Clone ID: LIB3049-047-Q1-E1-B7
gaccgtagcagatctcattcattcttttcttttctttccattcaatcacgccctctcttcccttcccttggcgcaatgaattccaacttcaatttcgatttcgatctcggcatcggatccaaccgtcccaaatcccttaacgaccagaaaaaccccaaaccaactccctattcttcctattccaccaccaccaccgcttcctattcctcctcccaacccaataaacaacctgcatggacccaccaaccctcccccactcagaccaccgccttgcccggtggccccccctccatggtcggagacatcttcggcaagagctggggaacccctcaaccttcttctgcttccaaaaacatcgggatcgtcaataagaaccctaaccttttc

SEQ ID NO: 17541 - DNA, 305 bp, Glycine max
  Clone ID: LIB3049-047-Q1-E1-B8
ggttgctgttgttgttgttcatggtgttaagtgatagataacagaagggagagcagaacctagaaatcgcgttggttcgttggtttatgacttggagtgaaaccctaactaatattgaagatgagcattcggaggttgagtgccgaagaatcgcaaacactttactctctcctcagagcagagcaacgttcgctccatgagatcctctctcaattcaacgctgcaatcccttccaggcgccatttcactctctcttcctatctcctcatcctattgcaggacaataaggtgctcagcaccactga

SEQ ID NO: 17542 - DNA, 295 bp, Glycine max
  Clone ID: LIB3049-047-Q1-E1-B9
gatgagtcatgagatacacttttcagttcatgaaacacaacagtaatcctcaaattctctctctattcaaagagaaaaaatcatcgtccacttgcaaccaacacaatttggtatcaaaatgggcctgtcaagtctcccagcaccatctgaaggagtgttatgtgtgcttcttgtaaacactgccttgtctatatccatattcaaaggcattgttaggacaattctacaaattgtcggtatccgcgtttcgtcgttgtctccttcaccagacatctcccgaaacccacctgagcca

SEQ ID NO: 17543 - DNA, 381 bp, Glycine max
  Clone ID: LIB3049-047-Q1-E1-C1
gaggaccaaacacaacatataatgaaatgaaataacccaatctgttctgttccaatttcctaacttgaaagccaaaacgaaacaaacggggttttggaaatggaacgagaaaatctaaactgggaaaagaaatgaaagcttaagcctttgagtctgaggtgaggtgactcaccgagtcgtggctcgctagctttttaataacattttcgtatatgtcaagttgaagttttttttttttttttttaaaaaaggttttaaaaaaaccattgtttgactcaaaaagcagagagaagagtggggactggagaatgaatagggagtgttggcgaagtagatctgaaaggtgaagaatttgagtacgtaaaacccaaagttttcaac

SEQ ID NO: 17544 - DNA, 337 bp, Glycine max
  Clone ID: LIB3049-047-Q1-E1-C11
gaatgaataaaaccaacttgtctactcgtaaatcgtaatctcctaagctataacaacgtcctctctctctctccctccctctctctctctctcatggcaacttgtttcgctccgttctccgtttcaggtggatctcatgagctgtggttaacaaagcgagtcggacctaagctcactgttcaaaggagatcaaaccttgtgatcaagaggaaccacacttcttcaattagtgcagaataccgtgataatagaggaggtggaggtggggattttgttgctggctttcttctgggtggtgcagtttttggaactctagcttatatcttttgctcccaga

SEQ ID NO: 17545 - DNA, 407 bp, Glycine max
  Clone ID: LIB3049-047-Q1-E1-C12
gagaaatgaaagcatccgcactgcgtaacgtgaaatctttcactctcagccgccattctcccacttccaactccatcttcccgggctttctttgtcaatctcactctcgccaccgccgaatccaccattctcgaaatcgaatcatgtctgccagatctgtcaactccgagtggagcacgcgcccctctcggcattcacttgactgctcacccgctctccaacttcacgattggcctctgtcaactctccgtcagccgcgacaaagacagctacatcgcccacgcgtcgcatcgccaatctggatgctgcatcaaagggcgcccagcgtgttcttttgcccgatatttggaacagtccttactccaactatagttttcctgtctacgctgaggatattgacgctggtg

SEQ ID NO: 17546 - DNA, 241 bp, Glycine max
  Clone ID: LIB3049-047-Q1-E1-C2
gacggtgagactcgcaccaacaccagcacttcaaagaagacagaatcaagcagaacttggagttggagagagagaattccgaccctaattgtaaaatggaggacgagacagagactatggtggagaagagggagataatcaacaacgtaatgtgtcatttgacagaccctgatggaactccgttgggtgctcctatgtacctacctcagaatgctggtcctcaacatctcagccagattgt

SEQ ID NO: 17547 - DNA, 395 bp, Glycine max
  Clone ID: LIB3049-047-Q1-E1-C3
gggtgctaccttaattatagctctaacaccacacctctgcctctggatcaagcaccttcacagtcaccactgaaacaaaaacaccataataccaaaaaaaaaaaacagaaagaagaaagatctcttatctttctttttaactacccttcattcaaatccttttttttcttttccatgtctcgcactcccaactacgagttccaggaatggtggaacaagcagcgcgaaaagaacaccaataccaacaacctcgaccccctcgacgacagccttaaaaaactcgagtacggccactcctctccgccgccgttcacggcgctagacgtggaactcctcactgccgcgaactccgccacctccgaccacgaccgctccggcaggaaagaacgctcccg

SEQ ID NO: 17548 - DNA, 403 bp, Glycine max
  Clone ID: LIB3049-047-Q1-E1-C5
ggaggagtgtttggttaaacccttgcattgcagttgttgccggaaatgaattctatggcggtgagacttgcgaagcatctccgactctctgcactgacctcattttcactcggtggtgtgccgagaagcggagcttcatggtactcgacctccctatctggaggtgaaaatgatcaccctttacctgataatgatgcacctaagaaggaagcattggatgaagagtttgatgattttcttggcgaaaagcctgagttacagctgcaaggtgtggatcccaagaagggttggggatttcgtggcgtgcacaaggcaattatttgtggaaaagttggccaagcccctgttcaaaagatactgaggaatggtagaaatataaccatctttacagttgggacagggg

SEQ ID NO: 17549 - DNA, 203 bp, Glycine max
  Clone ID: LIB3049-047-Q1-E1-C6
aaaagggaaataaaagaaatggaaaaaggtggcaaatccggaacaaccggctcaatggctccctgttcaaaagctgcaatgcctctccaaaacctgaattccccaatcctcccaaatcacttggaagagaaatccatgacctgaaaattgaaatgctgaaagagcgtttcacgaggaaaaaaatgtaactctgcgctatcaca

SEQ ID NO: 17550 - DNA, 394 bp, Glycine max
  Clone ID: LIB3049-047-Q1-E1-C7
agattgcgtcgttgtttgttgtttcccttcatctattttttcttcgcccccttttgtgtttctttttttggttgtttgttctttcttctcgttcgtcgctttgtgatctctctctgcaaccatgtccgccgagaaagagagagagacccaggtttacttggccaagcttgccgagcaggccgggagatacgaagaaatggttgagtgtatgaagaaagtagcaaaacttgatcttgatctaactgtggaagaaaggaacctcctctcagtgggatacaaaaatgtgattggtgcacgaagggcctcttggcgcatcatgtcctcaattgagcagaaggaagagtctaagggaaatgagcacaatgttaaactgatcaagagttactgccaaaaa

SEQ ID NO: 17551 - DNA, 265 bp, Glycine max
  Clone ID: LIB3049-047-Q1-E1-C8
gggggggcagagtttcaggttgaattgggcaacttttagtgctggtgagaggtcgcgccacgacgattctccagattacagcatatttgttggtgacttggctgcagatgttactgattatcttcttcaggagacatttagggctcgttataactcggtgaagggtgcacaagttgtcattgatacgctaactggccggaccaagggatatggctttgtcaggttttcagatgagagtgagcatgtgagggccatgactgacatg

SEQ ID NO: 17552 - DNA, 188 bp, Glycine max
  Clone ID: LIB3049-047-Q1-E1-C9
gatggccacctctgctattcagcaatcagcattcactggtcaaactgctctgaagcagctcaatgagttcgtccgcaagaccggtggcgccggcaaaagtcgcaacaacatgggccgcaccgtcaagagtgctcctcagagcacttgggatggccctgagcgttccaagtacttgggtccaatctcgg

SEQ ID NO: 17553 - DNA, 374 bp, Glycine max
  unsure (1)..(374): unsure at all n locations
  Clone ID: LIB3049-047-Q1-E1-D1
ggaagttttgtggtgtggtttagtgtcaaatggcggcgagtagaagcacttttcctctgatgaaatacttgagagtgcgcgtcgacgctcttccccgcaacactcccttaaccctcgctcccaactttttgattcgccgcttctgtgaagaggttaggggttgttttctcgacaagtctgaggtcacagatcgcgtcatttcctgcgtcaaaaacttccagaaagttgatccttcaaaggttaaccctaatgctcacttccagaatgaccttggattggatagtttagattcggtagagattgtgatggctcttgaggangagtttgggttcgagattcctgataatgaggcagacaagatcaactccattaaa

SEQ ID NO: 17554 - DNA, 388 bp, Glycine max
  unsure (1)..(388): unsure at all n locations
  Clone ID: LIB3049-047-Q1-E1-D10
ggattctttgtattccaatcctcaagattcaagtactgcgtttccgaagcagacacagatggctcgtacgaagcaaaccgctcgtaagtccacaagaagaaaggctcctaagaagcagcttgcaaccaaggctgcacgtaagtctgcaccaactactggtggtgtgaagaagccccaacgttatcgtcctggtaccgttgctcttcgtgggattaggaaataccagaagagtaccgagcttttgattcggaagctccccttccagaagctggttcgtgaaattgctcaagacttcaagactgatctgcgtttcccagagcacgccgtgcttgcattgcaagaagctgccgaggcataccttgttgggctctttgangacactaacctg

SEQ ID NO: 17555 - DNA, 396 bp, Glycine max
  Clone ID: LIB3049-047-Q1-E1-D11
gcgattagaaatatttataaagacggaggtgttggcgctttttatgctggtatctcaccaactctggttggcatgcttccatacagtacatgtttttatttcatgtatgatacaataaaggaatcttactgccggaccaaaagtaagaaatctctaagccgtccagagatgcttttgattggagctcttgcaggttttactgccagtacaattagcttccccttggaggtagcaaggaagcgcctgatggtgggtgctttgcaaggtaagtgcccgccaaacatggcagcggcactttcagaagttattagagaagaaagtctgaagggtctctacagaggatggggtgcaagctgtttgaaggtcactgcatcctctggtatcacctggatgttt

SEQ ID NO: 17556 - DNA, 259 bp, Glycine max
  Clone ID: LIB3049-047-Q1-E1-D12
gaaggaaaaataaggttttaagggttacaaccaacaacgaaaactccctcccgcaataccatgggtcccaaaactgaactatgccgattcagtggtggcaagatctaacccggaaaagggatcagatttgttcgtggtgattctcaagttttcctgtttgccaactcaaaatgtaagccggtaatttccacaaccgcctgaagccctcaaagctcacctggactgctatgtacagaaagcaacacataaaggacattgc

SEQ ID NO: 17557 - DNA, 276 bp, Glycine max
  Clone ID: LIB3049-047-Q1-E1-D2
gatgcacaagtttgttgagatagctagaagcaatatgatgaaaatgaaagtgcttgttttgtttgttgctacagttttggtagcatatgaatgccatggctcagactaccagaagttccctctccaaatgaaaactgggtttggtgggcaatacagcaatgacgtggcatgtgccagttggatgcttggcgtggaagcacacaacgtaatccagtggcaaactgttcctgcaacttgcggagagtacatagctgactacgttctaagagaccaaga

SEQ ID NO: 17558 - DNA, 364 bp, Glycine max
  Clone ID: LIB3049-047-Q1-E1-D3
ggagacgagggtaaggtcgcgttgtgttgcgtcgtgtcgtgcgctgttcctctgtctgtcgtttttgttttcagaccaaaccctagctccgcatcgcaaccatgtcgaccaagcaaggtggaaaagctaagcctttgaagaaacccaagtctgataagaaggattacgacgaggttgacatggctaacattcagaagaaaaaggaagaggagaaggcgctaaaggagttgaaagccaaggcgcaacagaagggaagctttggaggttctgggctcaagaaaagtggaaagaaataagggctctttatcatgattgtatacatccaatattgagccctgtagtttattaccatgataacttctgt

SEQ ID NO: 17559 - DNA, 374 bp, Glycine max
  Clone ID: LIB3049-047-Q1-E1-D4
ggcccgaacgcggccgaagtcaccgccggtggcgctgaagagggcggaggagcggtcggagtggtgggcggtggacggcgaagtgcacgagatcggcgatctcgtgccgctacgtgagcgcttcgtgattccccgagagaacatccccaacaagcgccgcaagcagctcagagaacagttcatgcgccgaacgcgcctcgttcttaaggaatccgagcatgatccttggtgcaaaaagtatatggagctgtataatgaactaagagaaaactgggagaggctttattgggatgagggttacactaaaaagcttgctcaggatcatgcaaactatgagtctgctgaagatgatgatggagatttctccccataca

SEQ ID NO: 17560 - DNA, 374 bp, Glycine max
  Clone ID: LIB3049-047-Q1-E1-D5
caagaacaagaaggatttacccacaggtgcagtggtagaggcaaaacctcaactggttgggattcatgagcgagtaagaagtgacatcaatggtagccaaccaccaacatcagctgccttgggcacatcagaaggaggcaagcgggtgccgactgcaacaaatcctaatgctgaagatgctgcagaccttttaagaatgtgtttgcagtgtgggattcccaagacctactccaatgcacgcggaatggtctgccctgtatgtggtgatcgccctccaaaggatgatacaagcgcagaatccaagaagaaaggatcaactgtcaaagataaggaaaaatctaaaaggatgaagggtcaatcatcccatgcaacct

SEQ ID NO: 17561 - DNA, 65 bp, Glycine max
  Clone ID: LIB3049-047-Q1-E1-D6
caacatcaagacggatttacccacacgtgcactagtacaggcaaaatctcaactggttgggattc

SEQ ID NO: 17562 - DNA, 374 bp, Glycine max
  Clone ID: LIB3049-047-Q1-E1-D7
gagggttttgcgctgttgttgctgctcatcctccgtaacctccgagctctgcaccgaagaacgaagccatggggaagacacatggaatgggatctgctcgcaagctcaagtcccaccgcaggaggcaaaggtgggctgacaagtcatacaagaaatcacatcttggaaatgaatggaagaaaccttttgctggttcatcccatgccaagggaattgtccttgaaaagataggtattgaggctaagcagcccaactctgccattcgtaagtgtgccagggttcaacttatcaagaatgggaagaagattgccgcttttgtccctaatgacggttgcttgaactacattgaagagaatgacgaagtcctgattgct

SEQ ID NO: 17563 - DNA, 318 bp, Glycine max
  Clone ID: LIB3049-047-Q1-E1-D8
ggaagtgtatttggtcactgacctatcttggtagagatttgaagtttaaaccttcaaattaatcaaaccattttaatttgcctatagattctgagtcactgctgctatggcgctacgcgtacttcttgtgttggggatgttgctgatgttgtgccttgttaaggtttcatctgatccaaagatagaagaagaaatactggaagcagaagaagaactgcagtttcccgataaccagccacttatcgtgagagacgcgaacagaatgctaatgcaagatatggattgtggtgggttgtgcaagacgaggtgcagtgcaca

SEQ ID NO: 17564 - DNA, 369 bp, Glycine max
  unsure (1)..(369): unsure at all n locations
  Clone ID: LIB3049-047-Q1-E1-E1
ggagcaagggaaagcaaaaggagaaggtgaataacatggtgctgtttgatcagggcacctatgataagctcctttctgaagctcccaaattcaagctcatcactccttccattctttctgatcgtttgaggattaatggatcacttgcaaggaaggctataagagaattgatggctangggttcaatcaggatggtgtctgcccatgcaagccagcaaatttacaccagggcaacaaacacctaggtgtggaactgatcttagcttacggagtattggtaggaatagtaatgaagtattgttcttttgcactttgggaagcatctcatatggttctatcagttctagattgtcgctgaatccgatgctc

SEQ ID NO: 17565 - DNA, 401 bp, Glycine max
  Clone ID: LIB3049-047-Q1-E1-E10
ggatcaaacacagagagcgcagtccaaccctcaaaatgcattcattcggctacagagccaacgcgttgctaacctttgccgtaaccattctggcgcttatgtgcgctatggcttctgtatccgacaacttcagcacccccactccctctgcacaagtccaggttctgaacatcaactggtttcagaaacaacccaatggcaacgatgacgtcagcatgacgatgaatatttccgcagacttgcattcccttttcacatggaacacacaacacgtctttgtttttctagctgctgagtatgaaactcctaagaattccttgaatcagatatccctatgggatggtatcattccctctaaagagcatgcacagttttggattcctacatcaaataaataccgc

SEQ ID NO: 17566 - DNA, 333 bp, Glycine max
  unsure (1)..(333): unsure at all n locations
  Clone ID: LIB3049-047-Q1-E1-E11
gcctcaacaacctaaaaaatattcactaagatttatttcccttattttattcatttattctttgttcctagtctttatcttataatttctcattgcttgcccggtaattcaagatcaacttggaaaatttgcaagatttgggatgaaatctggtcggatcttgctttgtgggatggggattttggtgggtcttatttcaatacaaagctcttcctctctcaatcccatctccctctcttcttcttcttcntcttcttcataacacaagcacaaaacataaacctttcttctcaaacaaccttttttccaattcaatccttggttcctcaaaaa

SEQ ID NO: 17567 - DNA, 346 bp, Glycine max
  Clone ID: LIB3049-047-Q1-E1-E12
ggcagcaacgcagtgttgtgagtgagttgggttttttccttggttttcctgagctgtgttttattctctttatctctctctctgccctctcatcttcgagctccgatggcgagcctgtggcgcgcggcgaccggcatgacggaaaacgccaccgattatgacggcgtctagttctggtccaaccccgagcgcaccggctggctcaccaagcatggcgagtacatcaagacctggcgccgccgctggttcgtcctcaagcaaggcaagctcttctggttcaaggaatcctccgtcacgcgcgcgtctcgtccacgctgcgtcgttcccgtcgccacgtgtctcacag

SEQ ID NO: 17568 - DNA, 77 bp, Glycine max
  Clone ID: LIB3049-047-Q1-E1-E2
ccacgcgtcaggagtgatgtgagagaagaagagatgggtagaggagaagatcgagaaggggtcgcaataaccagggg

SEQ ID NO: 17569 - DNA, 336 bp, Glycine max
  Clone ID: LIB3049-047-Q1-E1-E3
gaatgaataaaaccaacttgtctactcgtaaatcgtaatctcctaagctataacaacgtcctctctctctctcactccctctctctctctctcatggcaacttgtttcgctccgttctccgtttcaggtggatctcatgagctgtggttaacaaagcgagtcggacctaagctcactgttcaaaggagatcaaaccttgtgatcaagaggaaccacacttcttcaattagtgcagaataccgtgataatagaggaggtggaggtggggattttgttgctggctttcttctgggtggtgcagtttttggaactctagcttatatctttgctccccag

SEQ ID NO: 17570 - DNA, 280 bp, Glycine max
  Clone ID: LIB3049-047-Q1-E1-E4
acgcgtaagcacacgcgtccgatgcaaaattgttgcaagacccaaaagaggaagtatcaacgtgaacaacagatagtggcggccacccctacttcagctggtccagaaatagtgacagcagcaatacctatctcacaagcaaatgctgctgatggtgagaactttctgatacctatacctatccatcagattccagaccaaaaccagagagaatctatcagtgtttcaagtgaccaacagaacctagatgccactcctgatcctgccgttacttggaaag

SEQ ID NO: 17571 - DNA, 216 bp, Glycine max
  Clone ID: LIB3049-047-Q1-E1-E5
gttgccgcagtcgcaacagagagacagcacgaggagattcatttgcaggagacgattcaatggcgccggagatgccccgaagcacgtccaggaagaccgacttggtacggggaatggggatgctatcgaggtcactgatgtatgtcagtaggggcagttgggcgctctgtgccaaaaagagccgtgttttgccgctccgcgatatagagcctcacc

SEQ ID NO: 17572 - DNA, 354 bp, Glycine max
  Clone ID: LIB3049-047-Q1-E1-E7
gattcagaaacaaacgaaacccagtagacatggcgaaatcggcgtcgaattctctgatgcagagcctgaagcggttcataaagaagccatgggagatcacgggcccgtgcgcggaccctgagtacaaatccgcattgcccttggccgtggagtaccgcctcagctgccccgccaccgtcaaggagaagcccatcatccccaactccctcccggagaccgtctacgacatcaagtacttcacccgcgaccagcgccgcaaccgccctcccatacgacgcaccgtcttgaagaagcccgacgtcgagaagctcatgaaggaacagaccttcgccgtctccgactttccgcccgttt

SEQ ID NO: 17573 - DNA, 127 bp, Glycine max
  Clone ID: LIB3049-047-Q1-E1-E9
gacaacaagcaactcttctctcaatttttcttttctggtcaccatcatgccgaccgggacaaatgttagaatcgcgttctccgatgatgctgcaaggagggcagcattcaggaaaacgaggattgga

SEQ ID NO: 17574 - DNA, 357 bp, Glycine max
  Clone ID: LIB3049-047-Q1-E1-F1
gaacaatggcaacttcgttattccgcagcataaggagagctttctttgctctcagattctcgtactctacctcgttttcggtctctcccaggtcagttgttgggaggactcagatgtgtgtttgttctccgttgaggcactgtgtcccggtgggagagcaaggttattggtggggtttgagaaatttgagctatggcagggtgaaccttgtgataacgggagggaagaccaagtttgagactcatgaggaagagcctccgaagaaggacaagtggacgacaaagaagaggttgaagatgcagaggaagagagagaaggagaagaggagagcggccaacagggaaggaccccgtcaac

SEQ ID NO: 17575 - DNA, 246 bp, Glycine max
  Clone ID: LIB3049-047-Q1-E1-F10
gcaccacgattaacgtacccaaaggagtggcagcgacgattcggctcacggtgccggcccgaggagctcggccggcgccaccggttggaccggcgctgggtcagtaccggctgaacctgatggcgttctgcaaggacttccatgcccgcacccataagtacaacgcggacacatccatcgccgttacgataaacgcgtacaaagactccaacttcgagttcaccgttcagtcaccgccggtgtctt

SEQ ID NO: 17576 - DNA, 404 bp, Glycine max
  unsure (1)..(404): unsure at all n locations
  Clone ID: LIB3049-047-Q1-E1-F11
tatgatgacccaccagtgatttacactcgctcacattctctggttggcccttcaacttgtgttagtcaatcacttaagcttggcaaactcaccatacatgagactgaggattcattggaactagtggagcatgtcaatggagaggccattaaagacatcaaagaatcttcctttgttgaggaatcattgaaagatgaagatgggaatctcatgaagatccacagagttagcattgacgatttcgagattttgaaggttgttgggcanggtgcatttgcaaaagtttatcaggtgaggaaaaagggtacttctgaaatatatgctatgaaggttatgcggaanggacagatttatggagaagaancatgctgaatacatgaaagctgagagggatatttggacaa

SEQ ID NO: 17577 - DNA, 392 bp, Glycine max
  Clone ID: LIB3049-047-Q1-E1-F12
aggggggaaaacaaatcgttctcaatttatcacaatgtaaaaccaaattcccttcgtcgttttcgattaagagagcaatggcacgtaccaagcagaccgctcgcaagtccaccggaggaaacgctccgaagaagcaattggcaaccaaagccgctcgcaagtcagccccggcgaccggcggagtgaagaagccccaccgcttcatgccaggaacggtggctctgaaggagattcgacagtacgataagagcaccgaacttctgatccgaaaactaccattccagaggctcgtcagagacatcgctcaggatttcaaaaccgatctccgctttcagagcagcgccgtatcggctcttcaggaagccgcggaggcttatctcgttggactcttt

SEQ ID NO: 17578 - DNA, 382 bp, Glycine max
  unsure (1)..(382): unsure at all n locations
  Clone ID: LIB3049-047-Q1-E1-F3
ggagccaagagtatgaagaacctcgggatttgaggtcaaatcctttccaaggtggagggaatgatgcaatcctatcccgcaagggcattgggtagaagactccgagtatattgggctagagatccaagggaaggccctagggttctcatgagccttagggtagatttcgagcccatgggctaagtatgagctcgcatatctttgtaaatattagaataggtttttccttcgtttgggccttgtattttggccattctagtagtatagggttttagccttgtatttcgggcattttgggtagtctttgtagtaaggactttttttttttgtattttcatgtnttttgtcatggatgtgagctcagctattatanggggtgtgt

SEQ ID NO: 17579 - DNA, 124 bp, Glycine max
  Clone ID: LIB3049-047-Q1-E1-F4
ctccccaaacaaaacaacaaaaccaaactcaaaaacaaactcaaaaccaaactccccaaaactaaggttttgcattgaaggcactgtgcaaacgcgtcagatttggaaactctctccttaacaa

SEQ ID NO: 17580 - DNA, 268 bp, Glycine max
  Clone ID: LIB3049-047-Q1-E1-F5
ggcgcattgagcgaaaattagggtttgtagtgtagcacgattcctcagtaatggcgctgaagacatcctatcccgcagcggcattgcgtagtagactccgagtatattgggctacacatcgatgggaatgccctagggttctcatcatccttacggtagatttctaccccatgggctaagtattagctcgcatatctttgtaaatattagaataggtttttccttcctctgggccttgtattttggccactctactagtataaggttt

SEQ ID NO: 17581 - DNA, 411 bp, Glycine max
  Clone ID: LIB3049-047-Q1-E1-F7
gagataactgcggcctttagaccacatcaacaccacgacgagatctggatatcgtgttttggggcctgaattctagatcttgttatcggcttcgacgaaggagatctggttgtcgcggatataacgcctcgccgccgcgtcgtaagcacccgctgcctcctccaccgtgtcgaagccccagccagtggcagcaccgcccgatgcagtcgcgtatcttcgttaaccacctcccccgcgatcccttcctcgctccttggtagctcttgctcacggacgattgcgcgaaaatccctttctaaacaatagaaccttttcttagattctgtggaaaaagcttctcaagctttgaataagataaacaacaatgtcttcacttgcagctgctagagcagacaacttttactatcctcc

SEQ ID NO: 17582 - DNA, 213 bp, Glycine max
  Clone ID: LIB3049-047-Q1-E1-F8
ggccattgttgttgctattatcatccgcagctgcttttattcgcaccgcaaacagtgagccatggccgtcggaaagaacaagcgcatctccaaggggaagaagggtggcaagaagaaggcagctgatccctttgccaagaaggattggtatgacattaaggctccttctgtttttcaagtgaaaaatgttggcaaaaccctcctctctcgtac

SEQ ID NO: 17583 - DNA, 359 bp, Glycine max
  Clone ID: LIB3049-047-Q1-E1-F9
gacactacaactaaacacactagctatagctagaatcccctccaatccctctttgtctttgtgcttttctttagttctttccaaaacagcaacaatgatgagttgccaagcatggcctgaacccatagttcgagtccaatccttagctgacagtggcctaagctcaatcccttcacgctatattaggccacactcccaaagaccctccaacaccacttcttttaaactttcacaaaccgaacatgatcatggtcacggtcgagagactcgtgaccatgatcatgttaacatccccgttattgacctggaacatcttttctcggaggatgaaatcctccgagaaaagatattccgacacg

SEQ ID NO: 17584 - DNA, 345 bp, Glycine max
  unsure (1)..(345): unsure at all n locations
  Clone ID: LIB3049-047-Q1-E1-G1
gaaggaattgtgagagcgtgtgctttttgcgttctctctctaaatccaacgtttggagtgtttctctctcactcctctctgcaagatccgcaccccaaaccctagcaaacccctaccacagagggagctgtgaagaacaacaacacgcaccgtcaccaccaccctcgctcgctccttctgatccagttggactagcttttggaaacaattacaatggcaacttcagagcagcaagtccctcnccaaactcctgcagctgatattgttggcaatgcttttgtggatcaatactnacatatgttgcatgaaagccctgagcttgtgcataggttttaccaagatgtc

SEQ ID NO: 17585 - DNA, 357 bp, Glycine max
  Clone ID: LIB3049-047-Q1-E1-G10
ggtggaagtatttgcagaactttgtttcccaacctccattgcctccgcttctacctcgctaccatgatcattcctgagaagaaccgcaaggagatctgcaaacacctcttccaagagggagtttgctttgcgaagaaggacttcaatttggcgaagcaccctgagattgacgtgccgaatctgcaggtgattaagctgatgcagagtttcaagtctcgcgagtatgtgagggagacttttgcttggatgcactattactggttcctcaccaacgatggaatcgaatttcccagaactttaccttaacttccttccgaaattgtccctgctactttgaagaaacaggccaagccacct

SEQ ID NO: 17586 - DNA, 386 bp, Glycine max
  Clone ID: LIB3049-047-Q1-E1-G11
caggccaatttgcgttgcctctgcagttacaagtctatcctaccttcatttggaattaaccccaaaaatgctttggccttgcctgctaaatgtggtctacaattgcctcctaattgttgagtgctgtgaagcagttaacgaaggtcaagttcattacaagcaccttaattagtagtcttcaattgctttcaggtgttttactaacactgaagaataaattttaagacaggatttgatgcccctcaaataacggtgcagttggttttaatcagcgtcctgtgtccaaaagtttgtgagtagatgtgtacaataataatggttgatgtacacgaatactttgtatctgtactttttttccctccatgtctatgtctacatttatatat

SEQ ID NO: 17587 - DNA, 316 bp, Glycine max
  Clone ID: LIB3049-047-Q1-E1-G12
ggggaaaaagacataaattcttccttcccctaacctaagcggaggagtagtagtagtagtagtagtatcaattcgcattctcattcacttctcccacactgttctattttcaagactctttccatagcacttgcttcactctctctcgctctctctcgcgagcagcaggaagtgccatggcgggtgcgatgggtatgaaggtcgacaagattcgccaaatcgtgcgtctcaagcagctgatgactcgctggaagcacatcagcctccgccgccgctcctccgacgagccctccggcgtgcgacgcccttcctccgg

SEQ ID NO: 17588 - DNA, 153 bp, Glycine max
  Clone ID: LIB3049-047-Q1-E1-G2
gactccagtgtggaaaatcaaaacaaggtgccatctttgtttggtaaacatgaccatggccatgcccctgtttctgatgttccttcttctgcacataacttgggtggcatcgtcggatctccgacctaggttttactcaaaaacatgtccaaa

SEQ ID NO: 17589 - DNA, 335 bp, Glycine max
  unsure (1)..(335): unsure at all n locations
  Clone ID: LIB3049-047-Q1-E1-G3
gggcctttgatgtttgtcagctttttcttgcgtccatagttcatggcgtgtgttcaagtcatcacagttcgtctctttgcattggctcttgcaaaaattgacccctcaacatgccaaatggtgcagggcagagtcttctgcgttgactgcactcacaactatgacttatctgatattaaggtttcagtgacgtgtgatggtgtgaaaaaactggctttggcaactacagaaaatgatggctccttcaaggttgatcttcccttagaccacacaaaaccttcttctgtgaagaattgcttagcanaacttcttggcgggccagttcagctttatgt

SEQ ID NO: 17590 - DNA, 278 bp, Glycine max
  Clone ID: LIB3049-047-Q1-E1-G4
ggatcatggccggatgtgaaaacttaaagggcacagattgggacactgttgttgccactcaccttccgctgaagctcactctcactccgtccatcacgcaacagtatttcagttgcatgatcacccatataccctcatattcgcccctataggacccgcagatcacacgtttccgcgttttctacgtgttgcttcttctgggcgtgataacacccgcaccgggggtccactgtattcaccccattgtcactgacagcggttttaagaaatatcagctt

SEQ ID NO: 17591 - DNA, 352 bp, Glycine max
  Clone ID: LIB3049-047-Q1-E1-G6
gatggtgattatgtctgccttgttcagcttcatattcccaccaccatcttctctggtggtttcggggatgtcagtgataagccttgtgtcactggctaatgctggcttctcagagattagagggaagcatttgaactattcaaagttttggaatgctaatccctctgcagaaaagcaggtcaagttgtctagcaaagctggcatgcctttgctgtacactcctgcttttcttgctggccttgcatccttctggatctttcctcatcaaggcctcagatccaccctccttcagtctgcagttaccctgcatttcttcaagagggtctttgaggttgtgtttattcacaaatat

SEQ ID NO: 17592 - DNA, 311 bp, Glycine max
  Clone ID: LIB3049-047-Q1-E1-G7
ggacagtgatagttatcgctagctagttatgaccaatgctatgtatgctagtattatgaaaactcagctatgaagtattacacattttgttgtaaaatagaatgagttatttcttttagatgtgtaattagttttctcccagagaaccatggtattagctttttctactttagggcttttctagttatgacttcgataaccaggtttaagaatttagcattgctgttggggtggacctctatattagacctcgagattatatgagttgggtatttttaattttaagacctttttggtgcaaaacaatggtg

SEQ ID NO: 17593 - DNA, 386 bp, Glycine max
  Clone ID: LIB3049-047-Q1-E1-G9
ggtgatgaagaatgtttgtggaccatttacagctgcaaaaactgtttatgaggacgaacaaggtttcttgatcattatcagtctgccattcgtggatcttcctagtgtgaaagtttcatggaggaacactgttactcatggtatcataaaggtttcttgtgtgagcatatcttgcaagccatttattaaaagaaacgataggacattcaagctttcagagccatcgtcagagcactgccctcctggtgagtttgttcgtgaaatcccactttcaactcgaattcctgaagatgccaatatagaagcgtactacgatgggccaggatctgtgcttgagataatggtgccaaaacttcttccaggagcagaagagcatgaagtttgtg

SEQ ID NO: 17594 - DNA, 442 bp, Glycine max
  Clone ID: LIB3049-047-Q1-E1-H10
cacgcgtcaggagggctcttgggtatcaagccttgtgttggctgttataaaataagcttcaatttgaaacgccaaaactccatcaccggaacaagacccaggcaggtgtcgcagtacgcggagaaaggacgctatataaatatatttgtccccgatgctctctatttcagccactcgtatattcttcctccgctcaacaactataagattatcttcttcttcttcttctcttcaattcttctccaatcccaaccgcaccctcttccgtccctttcttcacacttccttcaaaccacttccttcgtctttctctttccgaacagatcacactatggccacctcaaacgccaaatcagtccatgatttcaccgttaaagatgccaagggaaatgatattaaccttggtgactacaaaggaaaggtccttatcattgtcaatgtt

SEQ ID NO: 17595 - DNA, 360 bp, Glycine max
  Clone ID: LIB3049-047-Q1-E1-H11
gaggcacatcctggtgacaatgtgggattcaatgttaagaatgttgctgttaaggatttgaagcgtggttatgttgcctcaaactcaaaggatgaccctgcaaaggaggctgctaacttcacagcccgagtcatcatcatgaaccaccctggtcagattggaaatggctatgcccctgtcctcgactgccacacttctcacattgctgtcaagtttgctgaactcatgaccaagattgacacgcgatccggcaaagagcttgagaaggagcccaagtttttgaagaactgtgatgctggttttgttaagatgattccaatcaaacccatggttgtttaaactttctccgagtatcctcca

SEQ ID NO: 17596 - DNA, 304 bp, Glycine max
  Clone ID: LIB3049-047-Q1-E1-H12
cctagagcatctatcacaagcagatgaagaagatggtgaaattcctgaagcctaacaacgcagtgatcgtcctgcaaggccgctatgccgggcgcaaggcggtgatcgtgacgaccttcgacgagggaaccagggagcgcccctaccgccactgactcgtcgccgggataaagaaatacccaagcaaggtcatcaagaacgactccgcgaataagaccgcgaagaaatctacggttaacgccttcgtgaagctcgtgaactagcagcacctcatgcccacgcgctacacgctcgacgtggatct

SEQ ID NO: 17597 - DNA, 388 bp, Glycine max
  Clone ID: LIB3049-047-Q1-E1-H2
ggtgtctgctcactcgctcttctccgccacttctgaatctattgaatcaacaatcatgtcggacgaagagcaccatttcgagtccaaggccgacgccggagcctccaaaacctaccctcagcaagccggtaccatccgcaagaacggctacatcgtcatcaaaggccgcccctgcaaggttgtggaagtttccgacttcaaaactggaaagcacggtcacgctaagtgtcactttgttggaattgatattttcactgccaagaaacttgaggatattgtgccctcttctcacaactgtgatgttcctcatgtgaatcgtactgattaccagctcattgatattgctgaggatggatttttgagtctgcttactgaaaatggtaacact

SEQ ID NO: 17598 - DNA, 242 bp, Glycine max
  Clone ID: LIB3049-047-Q1-E1-H4
agggggctcaggtgaagtaaaatccttccactgtggtgactctgcgatgggtgcctagaagtatgtttcagagctatagcgcaagaagcagtctgatgtcatgcgcttcttgcagcgggtgaagtgctgggagtataagcagcagccttccattgtgcatttgacaacgtctagtcgacctgatcaagatcgtcgcttgggcttcaaggctaaacaaggctatgtgacttaccgtgttcgtg

SEQ ID NO: 17599 - DNA, 342 bp, Glycine max
  Clone ID: LIB3049-047-Q1-E1-H5
gaggcgcggcgggatcatcacgagattgcaaaatgaagttcaacattgcaaatcccaccactgggtgccagaagaagctggaaatcgatgacgacctgaagcttcgggcattttgggacaagaggatctcccaggaggtccttggtgacgccctgggtgaggagtttaaaggatatgttttcaaaatcactggtgggtgtgacaaacaaggattcccaatgaagcaaggagtgttgacccctggtcgtgttcgactcttgctccatagaggaactccttgtttccgtggatatggaaggcgcaatggagagcgtagaaggaaatctgttcgtgggtgcattg

SEQ ID NO: 17600 - DNA, 404 bp, Glycine max
  unsure (1)..(404): unsure at all n locations
  Clone ID: LIB3049-047-Q1-E1-H6
ggtgaacagtgaccgacattgcttcttccctgcgtcgtcgtttttttcttctctcctctttgttagggtttgctcggttccatttttcccaaaccattcggcacaacatcgaaatttccccattgtccgcttccgcaacgaaataactctaccgtgccctacgataaggggtttctcagagcaggagcaatgtcttccccttatctacctgccacaactgactcacttgctctcgcaactgaggccaaagacccatctgaggccatctccattctttatcgggtgcttgatgatccttcttcttcaccagatgctctgcgtatgaaagagcaagcaatcacaaacctcactaagcttctcactgatgagaatangggagaggatctgcgcagccttcttactca

SEQ ID NO: 17601 - DNA, 382 bp, Glycine max
  Clone ID: LIB3049-047-Q1-E1-H7
gatttgtgagtgtgtgagagagagagcgagcagtttcagacacagagagaggggtttgggattggagggattgacgctgcgtctcttcctcttctctttcgatccatccctcattcctaatcctccaatccaaccacctcagcctcacactcacatatacacatatctgaacgcgtatcgtccctcctatggcttcaaagcgcatcctcaaggagctcaaggacttgcagaaagacccaccaacttcttgcagcgctggtccagtagctgaggacatgttccattggcaagcaacaataatgggtcctgctgatagtccttatgctggaggtgtattcctagtcactattcacttccctccggattatcctttcaagcctcc

SEQ ID NO: 17602 - DNA, 354 bp, Glycine max
  Clone ID: LIB3049-047-Q1-E1-H8
gaatatgtaccaatggtggacaaagctgttgatgctgcctggaagagccaaacatcactccagaggtctcaaacttcaaaaggaacacctcccctccctgacactacaaacacccctgaagggattcaagctccgattgtggtagctctaactgtcttctttatgacgctgtttactctcttccgttcagtcgcatgccatgtgaccaagaaacttcctgccgtatcatctaatgatgatcagggcacttcagagccaactcttgatgcaacaaaaacaaactatgaagactatcgtcctccttcaccaactccagcatatgtagaggcaaatctcctttcctcaatgatgaaa

SEQ ID NO: 17603 - DNA, 349 bp, Glycine max
  unsure (1)..(349): unsure at all n locations
  Clone ID: LIB3049-047-Q1-E1-H9
gaaaccgggtggattaacacgcaacaaccaatgacaattaatccaagacaatggcgcctgggaataataatccttcaaaaggaacaatcctttggccttccccgttttttcccttgtgtttttggccaattgagttaacgctgaatatagccatggattggggataagaaaacaattgcaggattcggtatgcatcttctgacctagtgttacgttctctgcttatagagagaganaaaagagagatcggctatgaaggcagccaatggaagacaatttaacttggactaacctttgactctttcagcatttctgaatggtgtggttgtataagtaactttaacccctc

SEQ ID NO: 17604 - DNA, 371 bp, Glycine max
  Clone ID: LIB3049-048-Q1-E1-A1
ggggtctagttagagtgaatccatgaccgtgaccatggcggctgcgtttacaagtacaagtgcaacactgagactgtcaaatgttggagagagcagaggtttgcagctgcgtaagtgtaaccctaatcctaataagctgaaggttatgggggggtttggaggttgttctggagtggcagtgggtgtgagagaaagaaaaggaattggaagggttagggttcgggttcgggcgagttcttcgtcggacgaggcagtgagtgcgcagtcaaaagtgactcagaaagtattctttgacgtcagtattggaaatccagttgggaagcttgtgggacgtattgtgattggactgtaccgcgacgatgtccccaaac

SEQ ID NO: 17605 - DNA, 289 bp, Glycine max
  unsure (1)..(289): unsure at all n locations
  Clone ID: LIB3049-048-Q1-E1-A10
ggagcatctttgcttgttaatgcccttagctttttactcctcttattctttgagctagttttagcatggatgctcatttttttcttaggaattttactgctgcttaactactccaagtaaaggtgcaaatcatgcatatacaaagttggaaaaagttgaccttgtaaagttgtgttatttcaggaaaagtttagtgatgttgtcaactggctcaaagcaaatgccactaanggcagaaatttggctgctgatgctggtgttgccttttctgggaaaaagctcttgcctg

SEQ ID NO: 17606 - DNA, 373 bp, Glycine max
  Clone ID: LIB3049-048-Q1-E1-A11
gagagaaagagagagaaagatgtcgaagcgtggtcgtggtggttcggcggggaacaagttccgcatgtcgctgggtcttccagtggcggcgacggtgaactgcgccgacaacacgggggcgaagaacctctacatcatttcggtgaaagggatcaaaggccgtttgaaccgtcttccctcggcctgcgttggcgacatggtgatggccaccgtgaagaagggaaaacccgatctgaggaagagggtcttgccagctgtcatcgttcgccagcgcaagccatggcgccgaaaggacggcgtctacatgtacttcgaagataatgctggtgttattgtcaatcccaagggagaaatgaaaggttctgctatcact

SEQ ID NO: 17607 - DNA, 326 bp, Glycine max
  Clone ID: LIB3049-048-Q1-E1-A12
gggtgcatttgcaaagtgaacctcaaaatcagcctctaatatttttctcactgtctctccaaagaacttgatagagagatggcagctgcaacatctggtgctgtgttaaatgggttgggatcttccttcttgagtggaggaaacaggagccaaacccttctggcctctgctattggaggcaaagttggtgctgctgttactgttaatcccagaagactcattgtggtagctgctgctgcaccaaagaagtcatggctccctggtgttagaggtggtggcaatctcgtcgacccagaatggcttgatggattcgctacaggtgacta

SEQ ID NO: 17608 - DNA, 387 bp, Glycine max
  unsure (1)..(387): unsure at all n locations
  Clone ID: LIB3049-048-Q1-E1-A2
ggaaaaagggagtgcctgataacccaaaaccgaccgcaccaccgttttcctttgctttgcgttccaaaatggtcaaaacctcagagattattacatgcaaagctgctatttgctggggaatangaaaacctgtgactgtggaagagatacaagtagaccctcccaaagccaccgaagttcgagttaagatgctttgtgccagtatatgctccacagacatctctagcacaaaaggattcccacataccaattttcctatagcacttggacacgaaggagttggtattatagagagtgtcggtgatcaagtaacgaatctgaaagaaggggatgtggtaattccaacatacataggcgagtgccaagaatgtgagaattgtgtttcac

SEQ ID NO: 17609 - DNA, 448 bp, Glycine max
  Clone ID: LIB3049-048-Q1-E1-A5
ttcccggtacgactcacgggtcgatacacgcgtcagacacacgcgtccgggacaacacagaacaaaaacaaagaaaaaaaaaacccttagccaacacaaccatcatggccacctctgctattcagcaatcagcattcactggtcaaactgctctgaagcagctcaatgagttcgtccgcaagaccggtggcgccggcaaaggtcgcactaacatgcgccgcaccgtcaagagtgctcctcagagcatttggtatggccctgaccgtcccaagtacttgggtccattctcggagcagattccatcatacctgaccggagaattccctggtgactacggatgggacactgctggattatcagctgacccggaaaccttcgccaggaaccgggagctggaagtgattcacagcagatgggcaatgcttggtgcccttggctgcacctcccc

SEQ ID NO: 17610 - DNA, 358 bp, Glycine max
  Clone ID: LIB3049-048-Q1-E1-A6
gatggtggcacttactactcttgtgttgtgtgctactagtaatgaaatgaaattccacgcaaaactccacaaaagccaccttctttgattcaagaaatcaacaccgagtttccaaaatcccattttgttttcccttccttttttcctatataaaccaaccttttaatttccttctgaattaatactccttgatctggtgtgaagatggacactactgactgggaagtcctttcttatgatggcctttctgattttgatgactatgacttgtgcacctcaccaaaattcaagaaagcctctgaagcatcaaggaattttcatccaagggtgcctaaacagattcttcatattccaattc

SEQ ID NO: 17611 - DNA, 372 bp, Glycine max
  unsure (1)..(372): unsure at all n locations
  Clone ID: LIB3049-048-Q1-E1-A7
ggtgcaaagctgcatcaactactggatacaaatcctagagctaatgctgtagcagctggttgaaaccagtaactgcactggctaattatgtaattttggcatattacaagcccaaaattacagcttggtgctaacagttttcagagggatggatcagctgaattttacaatctaattccgtctatatagaccagaactaattctttgcttgtgagtttcttagggcataaactctgtattttactagatttcacagaattgaatgacaactttaaaagtttgtaaattgaagagtattaaggatttagtttagactttaagagaggcttgtcggccgctgtataattggttgtgtantaactatattggtgt

SEQ ID NO: 17612 - DNA, 347 bp, Glycine max
  Clone ID: LIB3049-048-Q1-E1-A8
ggaactttgcaagagtattaacccagatgaagctgttgcttatggtgctgcagtgcaggctgcgattctcagtggcgagggtaatgagaaagtgcaggatcttcttttgttggatgttactcctctatccactggtttggagactgcaggaggagtcatgactgtgttgattcccagaaacacaaccattcccaccaagaaggagcaggtgttctcaacctactctgacagccagcccggtgtgttgattcaggtctatgaaggtgaacgaacgaggactcgtgacaacaatttgcttggcaaatttgagttatctggaattcctcctgctcccagaggtgttcctc

SEQ ID NO: 17613 - DNA, 342 bp, Glycine max
  unsure (1)..(342): unsure at all n locations
  Clone ID: LIB3049-048-Q1-E1-A9
ggaagaaggcaaatcgcgaagactagatctgatctgagagaatggctcctcggtctagcagcaaggacgcccaagaccttttccgcgctctttggtctgcttatgctgcaacccccactaatctcaagatcattgatctctatgtcatctatgccgtattcaccgctttcatccaggttgtttacatggctttggttggatcatttccatttaactccttcctatcaggagtactttcttgtgtangaactgctgttcttgctgtttgtctcaggattcaagtgaataaagagaataaggaattcaaggatcttgcacctgagcgcgcttttgcggattttg

SEQ ID NO: 17614 - DNA, 195 bp, Glycine max
  Clone ID: LIB3049-048-Q1-E1-B10
cagctgaaatggcacttttctgcttgtacattttatatatgcatcctttttcaccggtgtttatattgcagcaagagttttttcggaagctgatggaagtattcagaatgtgtgaagacttggaaaaaatgaagggcctcaaaagaatttccaaataatccaaaggaatggtccgccaaataatccaacgaattt

SEQ ID NO: 17615 - DNA, 369 bp, Glycine max
  unsure (1)..(369): unsure at all n locations
  Clone ID: LIB3049-048-Q1-E1-B11
ggtgacagtgaagagatggaaggcatagtacacgggacagttgaagtgaatggcataaaaatgcatgttgctgagaaaggtgaaggtcccgtggtcttgttcctccacggcttcccggagctctggtactcctggcgccaccagattctggctctcagcaacctcggctaccgcgccgtggctccagatctccgcggctacggagacaccgaggcaccagcttcaatcagcagctacaccatcctccacttagtttctgacatcgtcgcgctcattcactcacttgctgtggattaagtcttcctcgtagcccatgattggggggctgtcataggttggtacctctgcntgttttcgcccgacagaatc

SEQ ID NO: 17616 - DNA, 291 bp, Glycine max
  Clone ID: LIB3049-048-Q1-E1-B12
ggtgacagtgaacagatggaaggcatagtacacgggacagttgaagtgaatggcataaaaatgcatgttgccgagaaacgtgaacgtcccgtggtcctgttcctccacggcttcccggagctctggtactcctggcgccaccagattctggctctcatcaacctcggctaacgcgccctggctccagatctccgcggctacggagacaccgatgcaccagcttcaatcagcagctacaccatcctccacgtactttctgacatcgtcgccctcattcactcacctgctgtg

SEQ ID NO: 17617 - DNA, 383 bp, Glycine max
  Clone ID: LIB3049-048-Q1-E1-B3
gattatatatgaaatttatattcgtatttctttttgtatttaaaaatattcgttgaacctagttaattgaaattagtctaacgtttgtatttgttacaaaaaaagctttttgaattccccgtaaaaatagattgcgctaatgaaaaagctttcaatgttgtaaaatatcccttctttttccataaagtgttccgaatccttttttttgatatagaagtgcgcttttttggaactgccatataattagtatagcttttgattgttatagaattcgatgtgaaagacatttttatgaaaatatatttatctttaattagccatatattttatctatcttaattcccattttttactatttcaagtaaaacattgaatattataat

SEQ ID NO: 17618 - DNA, 456 bp, Glycine max
  unsure (1)..(456): unsure at all n locations
  Clone ID: LIB3049-048-Q1-E1-B4
ggtactgctatagcacaatttggttccacgtttgttcaagaaattggtgttactagngggttttgcttgttgcacgggggaatacactatttttccatactgttggtgtttttggttgcatcactcctcccttgcgtatttagcaactctgcgtttgctaatagggtttgcgaaccacttgcacagtacttaggcttctttgggaattgccttgccagtcacttcttacatgagctctgggcgctttcgaaagtttactttcaatggtgaacttggttttctctaaactgaatggatggaacgtttcctggagagatcgagttgaatgatctgattaccactnagatgacaaattctatacgtgtcaatggtgtgtcagaantgacctcttactgcctttggtggagacatattttgagctgtcataaattatgtaactgggcctgccattccact

SEQ ID NO: 17619 - DNA, 376 bp, Glycine max
  Clone ID: LIB3049-048-Q1-E1-B6
ggagacatggccgaagaagaggaagaatcagagctcagcgataagcagaaggtggagatcgcgaaatggttcctcctcaactctcctcccggagaaatccaatacgttgccaaagatgtgaaatcgattctcaacaacgacgatttgtacaaggaagccgcttccgaggcttttccctattacaacaaatcgcacttgatttccattccaatgcccaaccgaagcggagacgtactggttacttcgttcggtgagcttgagggtaatgcatttcttgaacctaggactgcgcaagttgcaattgttgaccatgctaaacaagtttgtacagaggtgagacctgccacagacgaagaactttcatctccatatattg

SEQ ID NO: 17620 - DNA, 344 bp, Glycine max
  Clone ID: LIB3049-048-Q1-E1-B7
ggtccctactcagttcacagagaaagatggctgcggaaaacgttgtagagttcacagacttacccgtcaagagacctagagaagaagaagaagaagaacaaaccaatggagtctccaacgacgccgtttcaacgctacccaatgaccctcaataccctggtatctctgctgttattcccggttggttctcagaaatcagcccaatgtggcctggggaggcgcactccttgaaggtggaaaagattttgtttcaagggaagtctgacgaccagaatgtcatggtcgtccagtcatcaacatatggcaaggtgcctgtttcggatcgagtcaaccagcccacacac

SEQ ID NO: 17621 - DNA, 395 bp, Glycine max
  Clone ID: LIB3049-048-Q1-E1-B8
ggcggtctttctattgtccagcttctgtgcggctttctctgtgggtgaagcgagttttggcgatggagaaaggaggaaagggcgcttcgctgttcagcaaagggggactaggatcccaaaaagggaaagatgacagtgcaacaaaatcagcaaagaagaggatggttcagttttcttctgatggtccatcatttgaatctggagtaagcagtagttcactcccttcacaaaaatctggtggaaaaggtaagaatgtattcccaaagttcttattgtgttcatcagtttggtaacattgcatttgagcgcatcttgattacaatctttaaattgattgctcataattttcttgctttcttagtcaagttactttttactggactgctgtttttttt

SEQ ID NO: 17622 - DNA, 356 bp, Glycine max
  Clone ID: LIB3049-048-Q1-E1-C1
gtcgaggattgcggacaccattctggattcctctccgctttcgatttattcagtcgacagcgttcttcttccgcaggaactgttcgcgaagtcgccgtctcccgctccggcgccggaatcggtttcttctcctactcctgcaccgtcaccagtggcggaagcgccttcgccgtttcccgcgtcgcctccggctcccgcgggagagagtcccgctggtgctccggcggaagcgccatcatcagaagctgagcggagtagttccgccggtaagaatgacggggttcacgtgaaagcttctgcggctctcactgttgcagtgtctgcattgtctgcatttgtgatttctgccaccttta

SEQ ID NO: 17623 - DNA, 377 bp, Glycine max
  Clone ID: LIB3049-048-Q1-E1-C10
ggaatctcgttcttcctttgccttctccttcttcttcaaccctttttctttctctttctttcgcactttcattctctaaaaaaatctaagtccctttggtcttcatcttctgttctgatccaggtatggcttctaaacgcatcttgaaggagctcaaggatttgcagaaggatcctcctacctcatgcagtgcaggccctgtggctgaggacatgtttcactggcaagccacaatcatgggacctgctgatagcccatatgcaggtggtgttttcctagtttcaattcattttcctcctgactatcccttcaagccaccaaaggttgcttttcggactaaggtgttccacccaaacatcaacagcaatggcagtata

SEQ ID NO: 17624 - DNA, 366 bp, Glycine max
  unsure (1)..(366): unsure at all n locations
  Clone ID: LIB3049-048-Q1-E1-C12
aatggaccggcgcagatgccctaaacggtgctcctcccaacaattggggaaggccttactttcaaaggaattcccaacagcatctctatctaatgagagtgtgtggtgtgtggtgtgtggttttctttccttccaacgtacctctcattgacaaataaacgtgcaaacttatgtgtgcataattttcttatgtatgcttaagttttgtaattggatgctatctagtttttcatatctaatanggtgttgtgtcagtttttatgtatagtattgtgctcctatcatgttcacccgtatcatgttcacccgtatgtaagtctgatattctgatctatgaatgtcaaatcaaatttctctatgtcaccg

SEQ ID NO: 17625 - DNA, 362 bp, Glycine max
  Clone ID: LIB3049-048-Q1-E1-C2
gacccccttctagacatagttcttctccctctgttctctattctctacactgtgaaaccaagatgaaggtagcatttgcagctgttctacttatatgccttgtcctcagctcctccttgttcgaggtgtcaatggctggttctgctttctgttcctccaagtgctcgaagaggtgttctagagctgggatgaaggacaggtgcatgaagttctgcgggatttgctgcagcaagtgcaactgtgtgccatctgggacttatgggaacaagcatgagtgcccttgctacagagacatgaagaactccaagggcaaggccaaatgcccttgattattttttttttttcaccatccacacatcaac

SEQ ID NO: 17626 - DNA, 348 bp, Glycine max
  Clone ID: LIB3049-048-Q1-E1-C3
gatcatatcattgtccgttttcaaaggctatcactaaatctcattcttcatctgcagctatttggattgctgattaatgttaactgatattggtgcttttctttgagaaagtgtgtacaccttttggattagagaaaacaagagaggtgacattggaagctaactcagagagaggcaaagatgttgggaaatttcaagcagaagttggttaatgccaccaaggagctgaacagtccagcttctttgaattcatgcattaagcctaacctaagtcatgaaatcctgaacggttcatgtcctgcaaatcctccaatgctttctcaatgtgctttgggaatgatgctttgc

SEQ ID NO: 17627 - DNA, 314 bp, Glycine max
  Clone ID: LIB3049-048-Q1-E1-C5
gcctaaaaggacaatctaagacttcggtgggatctaggttagcaaccagcgatctgggacttttctttctcccccacaccacacccagattcaaaaactcgctctgctctgctctgcaattccccttccgtttcgtttcgatctcaaaacatgttcttcttcgattggttctatggcattctagcttccctcggtctctggcagaaagaagccaaaattctcttccttggtctcgataatgcagggaagaccacacttcttcacatgctcaaagacgagagattagttcagcaccagccgacccaacaccccac

SEQ ID NO: 17628 - DNA, 109 bp, Glycine max
  Clone ID: LIB3049-048-Q1-E1-C6
gacgctcaattcattttcttctcctctctctctctcctaaggttagggttttctctcttcatcactctctgtgtcgctccgtttcaatggctcagcaagacgcctcaaa

SEQ ID NO: 17629 - DNA, 395 bp, Glycine max
  Clone ID: LIB3049-048-Q1-E1-C7
ggactcagccatgcaaggacggcacgagctgccggcggcgcgtgtgcttcttcgcgcacacgccggagcagctgcgcgtcctgccgatgcagagtccgcgtagcgtggcaaactcatcggagtcctacgacgggtctccgatgaggcaggtttcgttgtcgtcggcggcggcggcggcgttcatgtcttctccggcggcttctctctctccgccagagtcgccgccatcggtgaacgagatggtggcttctctgcgtaatttgcagcttgggaaaatgaaatcgatgcctcataatagaaacgtgtcggtcgggtcgccgaggggatcggtactccgaccgggttttttaagccttccaacaacgccaactcagcaaccggttcggtctggggtg

SEQ ID NO: 17630 - DNA, 389 bp, Glycine max
  Clone ID: LIB3049-048-Q1-E1-C9
gagtctttaccaatcaacaaagcctctcttatctttttcaccaaaaatggcaacattcatgctgaagttggtgcttcctctacttttcctgttcatgattcctccgaaaacagcgtatgcggagtttgagcaatggtgtgtagctgatgagcagaccacggagtctgagttgcaggcagccttggattgggcttgtgggaaagggggtgcagattgtagcaaaattcaagtaaaccaaccttgctatttaccaaacacattgaaagaccatgcttcttatgccttcaacagctactatcagaagttcaagcacagtggaggttcttgctactccagaggagctgccataacaacagaagtggatcctagtcatggttcttgtcactatg

SEQ ID NO: 17631 - DNA, 306 bp, Glycine max
  Clone ID: LIB3049-048-Q1-E1-D1
ggtctcgtgcaagtgtaacccaaaaccctagcggcgcctgctttcttcgttcgtcttttgcatcagccatcaggatggagtctcaggtgaagcatgctcttgttgtcaaagttatgggtcgtactggatccagaggacaggtgactcaggttagagtgaagtttttggatgatcagaaccgtcatatcatgaggaatgttaaaggagcagtgagagaaggagacattctcaccctactcgagtctgaaagggaagcatgaaggtttcgctagagggtaattttttcttgatctttacggtagttag

SEQ ID NO: 17632 - DNA, 394 bp, Glycine max
  Clone ID: LIB3049-048-Q1-E1-D10
gcccgcgtccacccacacgtccgcccacgcgtccggtaacctccttgcattgcaccggattgctaccctgcgccatgatgagctgggtcaggaaacccttctgaatctgttacttcataactacctacactacaacctatatgatcaggcagagaagttgaggtctaaggctccacgttttgaggcacattcaaaccagcagttctgccgttatctcttctaccttgggaaaattcgcacaattcagctggagtacaccaatgcaaaagacttgctcttgcaggctgctcgtaaagctcccagtgcagcacagggttttcagattcaatgtaacaagtgggctgtgatagtgcgtttgttattgggagaaatacctgagaggataatctttatg

SEQ ID NO: 17633 - DNA, 388 bp, Glycine max
  Clone ID: LIB3049-048-Q1-E1-D11
aaccccgaaataagacttccgtttgccggaattcttccaaggctccgtaatcccgaaagcaaaacaatccgaaacctgccccaccttcagtgcatagtaaaagaaaccctccgtgtgcacccaccaggcccgctactctcgtgggctcgccttgctgtgcacgacgttacggttggcggcaagcacgtgattcccaagggcaccaccgcgatggtgaacatgtgggccataacccacgacgagagggtgtgggccgagcccgagaagtttaggcccgatcggtttgtggaagacgatgtgagcataatggggtctgatttgaggttggcacctttccggttcggaagaagagtgtttcctgggaatgcccttggtttggcctccgttc

SEQ ID NO: 17634 - DNA, 385 bp, Glycine max
  unsure (1)..(385): unsure at all n locations
  Clone ID: LIB3049-048-Q1-E1-D12
ggttgatgtgagggtgaggcatanagttactccggaaaggaattttaattgggcagtgtgtgggtgtgctacttcccgagctgcaccatctttccctgtcgccagtgcaagctctccccaacgcaccttcttcaaccttctgcctctttccaaatctctcttctccgcgtacgggcttctcaaaccaccaccaccacctccaccacaagaaccagaacaaggaaaagtcgaaggctcaagagcgactccgagatctgcaatgatatccgccaattcctcgattcggttggcctcccggaggaccacattccctccaccaaagagcttctgctccacggatggaatgacttggcaaacattgtcagaangagaaggcataaacaaa

SEQ ID NO: 17635 - DNA, 342 bp, Glycine max
  Clone ID: LIB3049-048-Q1-E1-D2
ggaacttcaattctctttccaacaatttctctctctctctctgtttttttttttttttgccctaactcaaaaggtttcctccttctctccctctcctccaagcatttttgctcccaagaattcttcttcctccttgccctcttcttccctgtcttttaagccttcttttgtgttgaacagagcaaatttcacctcccggggttttttgaactgtgcccatgtctaaagtcttcagctttaccggaaatgatgatttttatcatgggggtcctatttatcctaacccgaaggaaccgtgtctcttcttgtctcttggccgtcaagttgatgtttaccttcctc

SEQ ID NO: 17636 - DNA, 347 bp, Glycine max
  Clone ID: LIB3049-048-Q1-E1-D5
ggttgtgtgagtgaagaagcagagggagtagcggcattaaaaatgcagatcttcgtgaaaactctgacagggaagactataaccctcgaggtcgagagcagcgacaccatcgacaatgtcaaggccaagattcaagacaaggaaggcattcctccggatcagcagcgtttgattttcgccggaaagcagcttgaagatggaaggaccctggccgattacaacatccagaaggaatcaacccttcatctcgtcctcaggcttcgtggtggcatcattgagccttcgctcatggctttggctcgcaaacaccatcaggacaacatgatttgccgcaagtcccatgcccg

SEQ ID NO: 17637 - DNA, 345 bp, Glycine max
  Clone ID: LIB3049-048-Q1-E1-D6
gggttgtccacatgtgcagaacttgaagcttcgtacgagtgcttttctgtcatacaagggattactatcaggtttcatggctgccccatgagtttagatcctgtttttgccagagtgacttcgtcttcttcatagtgcgctccttggtgtcctttttaactgtcgtttgtgtttaacgttccatatttgatctccctgcgtttttataactgtgcccatgtcgattttcttcagctttactcggtcatgatcatttttagcatgggggtcctatttatcctatcccttctgaaccgtgtcccttcttgtcccttggccgtcatgttcctgttttaccttcctctt

SEQ ID NO: 17638 - DNA, 327 bp, Glycine max
  Clone ID: LIB3049-048-Q1-E1-D7
gatccacaacgatgagcgtaccgaaggcagtggcagcgacgatccggctcacggtgccggccggaggagctcggccggcgccaccggttggaccggcgctgggccagtaccggctgaacctgatggcgttctgcaaggacttcaacgcccgcacccagaagtacaaggcggagacacccatggccgttacgataacggcgtacaatgacaacaccttcgagttcaccgttaagtcgccgccggtgtcgtggtacctgaagaaagccgccggcgtggaatccggtaccagccggcccggtcacgtgaccgcctcctcgttgtccgtgt

SEQ ID NO: 17639 - DNA, 343 bp, Glycine max
  Clone ID: LIB3049-048-Q1-E1-D8
gacaacaaaatcataaaccaacactacagcacctctagatttttattttcttcactgttcacactattttctcctttcctttcacattatcccttcccttttttaaacaagccatcttgcttttgtttcttctcttctcatcaccaacacggtgtgtgtccttcatcctggattagagccacaaacataacacattccgctttgactttggaggctaagggcctaaggcaggttcccaatcactgtgatatcatggaatccccacaatccgttgtgtcaccattcaagagctctgtcttgggtgaagctgagaagtataggtctgatgttttcacacaaagct

SEQ ID NO: 17640 - DNA, 278 bp, Glycine max
  Clone ID: LIB3049-048-Q1-E1-D9
ggcagtttcaaattttcttttccttcactttcccgagaaaaaaataacacttttcactttcttcactacgttctcacttcgatatggctcgtacgaagcaaaccgctcgcaagtccaccggtggcaaggcgccacgtaagcagctcgccaccaaggccgctcggaagtccgctccggcgaccggaggagtgaagaagccccaccgcttcaggccgggaaccgtggcgctgagggaaatcagaaagtaccagaagggcaccgagcttctcatcaggaag

SEQ ID NO: 17641 - DNA, 358 bp, Glycine max
  Clone ID: LIB3049-048-Q1-E1-E1
ggacgaaaaatggaccgcaggcgaaaatacccaacactatttactacaaccaacggacaagcttcgttctggcgaagaatggcggcgccgggctcatccgccggcggcggcggagggacggcgaagactacggtggcggagcagatctcgcaggcggtgcagtccacctccaacctcctccaccttatgcggcactcttctcctgcccaggctcaactggttaagcttcctaagaatctttggcaaaggtttccaccatcaagaatacagagcaggttttggagcagttgcctggggtgatatcatctcttgacgcacacatggaaaatgggttgcaaaatgttccacatctaaagac

SEQ ID NO: 17642 - DNA, 339 bp, Glycine max
  Clone ID: LIB3049-048-Q1-E1-E10
gacaacaaggaaggaagaggtcaggtttcttgctcagcttttgtgtttcctctattcccattatccttctatgtttgagcataaattcaggatcttgttctttctttcttgatactacaacccgtgttcttccaaaaacaactgtagttttctgccttagcccatgttggggtatttgtctagatacccactaattcattgctgagggatattcaactttcacctttatcttgaatcttttattataattaacttgaggattttcttcctcttttctttgtttttttctttctttcattcttttctaaaatgagaaatgcacatgtgatacatcaacca

SEQ ID NO: 17643 - DNA, 371 bp, Glycine max
  unsure (1)..(371): unsure at all n locations
  Clone ID: LIB3049-048-Q1-E1-E2
ggccgcaagcagagatgacaacccgatttaagaagaaccgcaagaagcgcgggcacgtcagcgccgaacaagggcgtaatggaaagcaacgcaagcaccccggcggccggggaaatgccggcggcatgcaccaccacaggatcctcttcgaaaagtaccaccccggggttctttcnggaaggtanggatgaggtactttcataagctccgcaacaaattctactcccccatcgtcaacatcgacaagctatggtctctgataccccaagacgcgaaggacaaagccctaaaatcgaaggacactgcccctctaatcgacgtcactcagcacgggtacttcaaggttctcggaaaaggtgtgctgccccaaa

SEQ ID NO: 17644 - DNA, 412 bp, Glycine max
  unsure (1)..(412): unsure at all n locations
  Clone ID: LIB3049-048-Q1-E1-E3
gggctttttcttctcgccactcccctcaattcacccccattctagaggagcgtgaatttgacgacttgagtggccatgacattataagccactccagaagctcccaccctccaacccccattgtccacaagcacactaaatccaatcacaacaaccacaagaaaaagagatcagattccgaggaagatggctccgtctcttgcaacaagtgcagacctcactcccgcgacaaaatcttcatccttcccttggatcactcctccaccaacaactctcacaaaccctcttccttactcgccagccccaacggtattttcaggtcncttgtttccaagctcacccgcaagagtcccatgtcntcntcttcatcccaagaccctctcccaacctccagagaggaacaatggaaaat

SEQ ID NO: 17645 - DNA, 354 bp, Glycine max
  Clone ID: LIB3049-048-Q1-E1-E4
ggcaacgcctttaacagacttaacaacaacacaaaaccggttaacgtccgttcaagccaacaactccccccccccttcctaatgcctcctttccaaaagttaaaatggcccaagaaactttcctattcacatctgaatcagtgaacgaggggcaccccgacaagctctgtgaccagatctccgatgctgtgctcgatgcatgcttggagcaggaccctgacagcaaggttgcctgtgaaacctgcaccaagaccaacatggtgatggttttcggagagatcacaaccaaggccaacgtggactatgagaagattgtgcgtgacacatgcaggaacattggttttgtctctgatg

SEQ ID NO: 17646 - DNA, 387 bp, Glycine max
  Clone ID: LIB3049-048-Q1-E1-E5
gacagctcttggctttagcaaattccaattcccaattcccaattcgaaacccttattcctttcaaagaaccaaattgagtgatcgtgatggcaccaaaggcagagaagaagccagcggagaagaagcccgcggaggagaagaagtcgacggtgggagacaaggctccggcggagaagaagccaaaggccggaaagaagcttccgaaggagggaggcgccggcggagaagggaagaagaagaagagaaacaagaagagcgtggagacatacaagatctacatcttcaaggttctgaagcaggtccaccctgacattggtatctcaagcaaggccatgggaatcatgaacagcttcatcaacgacatcttcgagaagcttgccaggaat

SEQ ID NO: 17647 - DNA, 292 bp, Glycine max
  Clone ID: LIB3049-048-Q1-E1-E6
gatagaagaagcagaaagagaagcattagcaaaagcaagaagaactagtctaagcagaaatggcctcttcagtgatggcatctgtggccctcaaacctgcccctttcactgttgagaagtcctcagttagaggccttccctccctctcaaggaactcctcctcattcagagttgtggccagtggtggccagaagatcaggactgacttgccttatggaatttatggtggcatggccttgagggacggagttgatacatctcgaaggaacggacccggaaatggcgtgtaact

SEQ ID NO: 17648 - DNA, 384 bp, Glycine max
  Clone ID: LIB3049-048-Q1-E1-E7
ggagagaaagagtgaggagagaattacagagcattttccaacacgattacacgaccgaatcaaaccctctctttctctccgaagccgcgtttaataacctactcgccttagaatgttcttccccttcattatactgttctcttttcgatttgagggaacagtacaagagtgtgaggatcggttaacccaactgcacaggtagtcactaaaataatggagtctcacgatgagactggatgccaggctcctgaacgccccattctttgcattaataattgtggcttctttggaagagcagctaccatgaacatgtgttccaagtgttacaaggacatgctgttgaagcaggagcaggacaattttgcagcatcgtcggttgaaaac

SEQ ID NO: 17649 - DNA, 393 bp, Glycine max
  Clone ID: LIB3049-048-Q1-E1-E8
gacagaaatggctctcaaggccgcccatgtcaccgacgtcccttccctggacctggtgaccgagaatgcctctctgtccctctgctcctcccgcttccccaacggggtggaaatgagtcggagtgacttcaagatgccaaagttcgtcgtgatcggacacagaggtaatggcatgaacgttctgcagtcttccgatcgaagaatgagagccatcaaggaaaataccatcttgtccttcaacaaagccgccactttcccgctcgatttcatcgaattcgacgttcaggtgacgagagatgactgcccagtcattttccacgacgatttcatcttcacagaggagaatggttctgtgtttgggaagagattatcggagccgaatctgtctgagtt

SEQ ID NO: 17650 - DNA, 383 bp, Glycine max
  unsure (1)..(383): unsure at all n locations
  Clone ID: LIB3049-048-Q1-E1-E9
ggagccccgagaggagcttaccagaatgctttatcgggtaagtttgttccagcgttggaaacgtgcgctcggattaaaataaccgacccgaacccgaaatgggatatggaaacaatgcccggtgctagagtcatgagtgacatggttttactcccgaacggcgacgttttgattgttaatggagcagccgtanggactgcgggctgggaattgggccgtaacccgctactgagtccgtttctttataaaccaaataatcgggtcgggtcgagatttgaggttcaaacatcgtctgatattccgagaatgtacccctccagtgccgttttgcttcgtgacggtcgcgttctggttgctgggagcaaccctcacatttattacaa

SEQ ID NO: 17651 - DNA, 363 bp, Glycine max; identical to SEQ ID NO: 7753
  Clone ID: LIB3049-048-Q1-E1-F1

SEQ ID NO: 17652 - DNA, 315 bp, Glycine max
  Clone ID: LIB3049-048-Q1-E1-F12
aggggcctcctaataatgaactggaacaacctcaaaccgaaaacaacaatcccaaccaatattaataaacaatacaaaataaaggaaaattcgagccacaacctccgcggaatggggtgcagcgcggggatcattggtgtggacttggccaaggatattctccaggcgaaccctaataactacgcggtggtggtgagcacggagatggtggggtacaactggtaccaggggaaggacaggtctatgcttatcccgaatagcttcttccgcatggggtgttctgctgttctgctttccaaccgtcgaagggactat

SEQ ID NO: 17653 - DNA, 378 bp, Glycine max
  Clone ID: LIB3049-048-Q1-E1-F2
ggcagcgcttgagaacaagccccactcaaccaccacaacactctctctgctcctcttccacctttcaagtttttaaagtattaagatggcagagaaattcccatttacctcaaagtcagtgaacgagggaacacctgacaagctctgcgaccaaatctccgatgctgtcctcgacgcttgccttgaacaggacccagacagcaaggttgcctgcgaaacatgcaccaagaccaacttggtcatggtcttcggagagatcacaccaaggccaacgttgactacgagaagatcgtgcgtgacacctgcaggaacatcggcttcgtctcaaacgatgtgggacttgatgctgacaactgcaaggtccttgtaaacattgag

SEQ ID NO: 17654 - DNA, 366 bp, Glycine max
  unsure (1)..(366): unsure at all n locations
  Clone ID: LIB3049-048-Q1-E1-F3
gatccaaggcacggcaagtacatggcttgctgcttgatgtaccgtggtgatgttgtccctaaggatgtcaatgctgctgttgccaccatcaagactaagaggactgttcagtttgttgattggtgtccaactggattcaagtgtggtatcaactaccagccaccttctgttgttcctggtggtgaccttgctaaggttcagcgtgctgtatgcatgatcagcaacaacaccgcagttgctgaggtgttctctcgcattgaccacaagtttgatctgatgtatgccaagagggcttttgttcactggtatgttggtgagggtatggaagaaggggagttttctgaggctcgtgangaccttgctgct

SEQ ID NO: 17655 - DNA, 388 bp, Glycine max
  Clone ID: LIB3049-048-Q1-E1-F4
gaatgtgagtccgttacactcaaaacaactggcttcaattgaggccccttcccaattgccaaaacaacttccagttttcccaaccgaaaaataaggaccactttgggccttctccctcctggtccggggttggttaaaataagcaattgccccaagaaagattttgccccgccccttcggaaccgaaatcaaagcccctttattggaaagtcgacaatcccactctctctcctagccaccttcaagatttgcctggattcacacgcagtgtctataagagtaatcatgctttgatatcaccagaaagtcatgtatatggccctttgcctgattggatcaacacgttaggcacacatttaatttcaccagaaatgggttcacaccttgt

SEQ ID NO: 17656 - DNA, 299 bp, Glycine max
  Clone ID: LIB3049-048-Q1-E1-F5
gggtccattttgcgcaggcaatgggaaagagcaaggttctttgttgtggggggaactgggtatgttgggaagagaataattaaaacaagtttaaaacaaaggcatgaaacctatgttcctcaacgttcaaaaaaaagtccaaaccttgaaattaagcaaatgctgccttcaatccagaaaccaggttctcaacttgtggaagcctctgtctctgattaccaaaacttggtggaagctgttaagcctgtggaagttgtgaattgcaccatgtctggggttcaatttttgctctcacaact

SEQ ID NO: 17657 - DNA, 371 bp, Glycine max
  Clone ID: LIB3049-048-Q1-E1-F6
gaacacagaacaaaaacaaagaaaaaaaaaaacccttagccaacacaaccatcatggccacctctgctattcagcaatcagcattcactggtcaaactgctctgaagcagctcaatgagttcgtccgcaagaccggtggcgccggcaaaggtcgcactaacatgcgccgcaccgtcaagagtgctcctcagagcatttggtatggccctgaccgtcccaagtacttgggtccattctcggagcagattccatcatacctgaccggagaattccctggtgactacggatgggacactgctggattatcagctgacccggaaaccttcgccaggaaccgggagctggaggtgattcacagcagatgggcaatg

SEQ ID NO: 17658 - DNA, 367 bp, Glycine max
  Clone ID: LIB3049-048-Q1-E1-F7
gaaggagagatgtaaagaagagaaaggcaacaacagcagatgggttggggcagaagagataggaggacaagttggtaatttggttggggttgcggttgcggttgggcgcggtgcgtggccacccttgtttaatttttttcaaaatccctaatctgaatcccaatgccattgatgtgaattggtgcaaagcaatgatttcgaatccggaattgatccactacgcctgcatcgctcgatcggagactatcctggggcagcaccagagcgagaaggagcccaacatggaggccttggcggcccaatgcgtggcccaaacacctcccaaccactccctattctcccacaccgtcaaccaacgcacatacac

SEQ ID NO: 17659 - DNA, 383 bp, Glycine max
  Clone ID: LIB3049-048-Q1-E1-F8
gcttcctcccagtgcagcatcgtagagaaataagggaaaaatggtgtcgctgaaactgcagaagcgcctctccgcaagcgtgctcaagtgcggcagaggaaaggtttggcttgaccccaatgaagtcaacgaaatctccatggccaattctcggcaaaacatcaggaagttggttaaggatgggtttatcatcaggaagccaaccaagattcactcccgctcacgtgctcgtaggatgaaggaggcaaagaggaagggccgccactccggttatggtaaacgtaagggtacaagggaggcaaggcttcccaccaagatactctggatgagaaggatgcgtgtgctcagacggttgcttcgtaagttacaggaatcaaagaaaa

SEQ ID NO: 17660 - DNA, 279 bp, Glycine max
  Clone ID: LIB3049-048-Q1-E1-F9
agaaccagaacgtcaacgtgttattcaatgcttaaaagctgctgtagagagaagagcatctgagggtgttcgattagagttatgcacagaagacaggcatgggcttctagcagaagtggtgagaacattccgagagaatgggctcaatgtgaccagggctgagatatctaccatagggaatatggctaaaaatatattctatgtaacggatgcgattggaaatccagctgattctaaaattatcgaatctgttatgcagaaaattgggttaagcaattt

SEQ ID NO: 17661 - DNA, 370 bp, Glycine max
  Clone ID: LIB3049-048-Q1-E1-G1
gcatcggaagcagaagagttctctgaagtgttctcaaagcctctcagatctcttccttatgattcgcctgggcaaacatttgtgggttttgagaagcctgagggattgtcaattgctggaaaattttctaacgttctgaaatttattgttaaagaggttgacccaaccactggtgagacagaagatgatggcgttgaagatgaataccaactagaggatttagaggttgtcaccgcagactacatgttgaaagtgggagtgtctaatttcaggagtgcatgggaaagcattggccctgactgtgagcgagtggatgaatatggtcttggccccagggagagtttggctgaagctgtaaataccgtcatta

SEQ ID NO: 17662 - DNA, 385 bp, Glycine max
  unsure (1)..(385): unsure at all n locations
  Clone ID: LIB3049-048-Q1-E1-G11
agggaatttaatggtaatggtccttcaaccccgttacgttcccggctccccggcaatcaaaagccaaaaaggcctttcaaaaggtactttaaaatcgggagggttgccaaaatcaactacggcaaggaatatggcaggctcgtcgtcatcgtcgacgtcattgaccagaacagagcacttgtcgatgcccctgatatggtgaggtcccaagtcaatttcaaaaggctttcccttaccgacatcaagattgacatcaagaaggtcnctaagaagaaagatcntgtcaaagccatggaggatgctgatgttaagaacaagtgggagaagagttcatggggtagaaaactcattgttagaaagagaaggcatccctcaatgattttga

SEQ ID NO: 17663 - DNA, 309 bp, Glycine max
  unsure (1)..(309): unsure at all n locations
  Clone ID: LIB3049-048-Q1-E1-G12
gatagttgcagctaacatggtgaacaatcctgtggtgataatagacatagatagattgaggcataaaacattggtacgcgacagatanggtgactcacgttggtgttggttgtaagcacatcactagcatacacactatttcctttccacacaagctgtgttattgttatctatctatcaatcacaagaacaaacagcattagcaatggcgaccacagcggcgttgtgtggcactatgttgaacacctccttcctgaggaggcangcttcagtgaacatcacaagcctcaaggctaacgctaacactgt

SEQ ID NO: 17664 - DNA, 393 bp, Glycine max
  Clone ID: LIB3049-048-Q1-E1-G2
ggttcggagtcgttaccttccatttgttcctctcttccgctcgtaactgcgccgacaactcctgatcgtaatggcaccgccaccaagaccttaatctgggaacaacaacctaactttggtcgctccaacctccgccttccccttccggcctgtttaaggaagcattaaactcaagtaccttaaaggcaaagccaaatctcatcagaaagctcaagagaaggctcatcattgaaagcaatgagagatccccggtgctattatctgtccatgggtggagtagaatactgaaataattcattacaaggaactgtaccatgttttctcccttttttttttctggtttaagctttggataatcttgaagcattgagtttagtgcactgaaaatgttca

SEQ ID NO: 17665 - DNA, 348 bp, Glycine max
  Clone ID: LIB3049-048-Q1-E1-G3
gatccgagaacgtggttgtgacaggatcattgagctcggcaagaatggaagaacacaggttgagcttgagaatgagcacgcttgtcttcactctttccattatcatcatcgtactctcttacccagcacaaccacttgcgttgaaccattctccgaaattcctaggaaaattcgcagcaacagcacgaacccattcaaattccgagccaccgccgcaattccactacgaaaaaagatacttccaacagcgcctcgaccacttcagcttctcggagctacccacgtttcctcaacgctaccttatcggcaccgaacactggggtggcccacatcgcctgggcccaattt

SEQ ID NO: 17666 - DNA, 362 bp, Glycine max
  Clone ID: LIB3049-048-Q1-E1-G4
gaatgccgcggaaacagaacaaggaatcaatcccctcgcaacgggaatccccgtgggtttcaacctccccggggtaattttccaaaatttcacatccaaggagaaaaatcacaaagattaggaatcctaaccaactgaaattgaggaatcagttggacaggcattgtttgatctagaaaataccaacaatgagctgaaaagtgatctgaaagatttatacataaactcagctgtccaaattgatgtttctggcaaccgaaaggctgtggttatccatgtcccctacagactaaggaaaggattccggaagattcatgtcaggcttgtgagagaacttgagaaaaagtttagtggaaaagatg

SEQ ID NO: 17667 - DNA, 384 bp, Glycine max
  Clone ID: LIB3049-048-Q1-E1-G5
gacggaaatgcagaaagtggagtttgttactgtggggttccagcgttgagaaaaacctaattaacgaaccaaaaccctaaaatctggaaaaatggaatcgagcgttctggaatggctgggcgtggagataattggcgtgatgagccccgtctcgatctgcatgttccttgtggtcctactggtgtactccctctcctcgccgtccaccaccgccaccaccatcgccaccgccgccaacctcgtctacgctgagaacccctccgacaccgccgcgcagaagctcgagggcgcggtcctcaacgccgtcgtcttcatcgtcttcatcgcgctcgcaaccttcctcctcgtcctcctctactactacaactgcaccgccttcctcct

SEQ ID NO: 17668 - DNA, 397 bp, Glycine max
  Clone ID: LIB3049-048-Q1-E1-G6
ggatttcagtgagtgatcggtgttcacttgatctcatcataatcgtcagcgtcaattgaagaagatgccgatcagaaacatcgccgtcggaaggcctgaagaggcgactcaccccgacacgttgaaggcggctttggctgagttcatctcaaccttcatcttcgtgttcgccggctcaggctccggcatcgcctacaacaagctcaccgacaacggcgctgccacccctgccggcctcatctccgcctccatcgcccatgcattcgccctcttcgtcgccgtctccgtcggcgccaacatctccggcggccacgtcaaccccgccgtcaccttcggcgccttcgtcggcggcaacatcaccttcctccgcggcatcgtctacgtcatcgcccagctc

SEQ ID NO: 17669 - DNA, 383 bp, Glycine max
  Clone ID: LIB3049-048-Q1-E1-G7
gatgcacaagtttgttgagatagctagaagcaataagatgaaaatgaaagtgcttgttttgtttgttgctacagttttggtagcatatgaatgccatggctcagactaccagaagttccctctccaaatgaaaactgggtttggtgggcaatacagcaatgaggtggcatgtgccagttggaggcttggcgtggaagcaaacaacgtagtcaagtggcaaactgttcctgcagcttgcggagagtacatagctgactacgttctaggagaccaatatagatcagattccaaaacagttaaccgacaagcttatttctatgctaaatccctcaaactcaccaacaaagatgtctttgtcctggacgttgacgacactactctct

SEQ ID NO: 17670 - DNA, 362 bp, Glycine max
  Clone ID: LIB3049-048-Q1-E1-G8
gaagaagaaaccaatagataacaaactagagatagagtgagagtgagagtgagagtgagagacatgtataggttcagcaacacagtgatcgggttcttgaacttgttcacacttttagcatccataccaataattggagcaggtctatggatggcaaggagcagcacaacctgtgaaaattttctccaaacccctcttttggttataggatttgttgtgcttgtggtgtcactagcaggcttcattggtgcatgctttcatgtggcatgtgcactatggttgtacttggtggtcatgttgttcctcatagcagcactgatgggtttgactatacttggttttggggtgactagcaagggtgg

SEQ ID NO: 17671 - DNA, 357 bp, Glycine max
  Clone ID: LIB3049-048-Q1-E1-G9
cgaagtccattcactattttctacaatccaagagcatgcccctcagaatttgttattcctctggccaaatacagaaaatctgtatttgggactcaggtctcagttggcatgagatttggcatgatgtttgagacagaagaatcgggtaagcgcagatatatgggtacaatagttggtatcagtgatgtggatcctttaaggtggcctggttctaaatggcgaaatattcaggtggagtgggatgagccagggtgtggtgataagcagaacagagttagtgtgtgggagattgagactcctgaaagcctttttatctttccttctttgacttcaggtctaaaacggccattaccatct

SEQ ID NO: 17672 - DNA, 348 bp, Glycine max
  Clone ID: LIB3049-048-Q1-E1-H1
tatgaaaaggaggactgctccacccctagtttgggtgttttacaaggatgcctttgcatgaattatgattacaagaaaacccattttgttgtgtggatgatgaaggattatggggtgagagaatcttgggttaaattggttagcattccttatgtgcctaatcctgaagatttttcgtactcagggccttattacatttcagagaatggtaaagtgttgttgatgtttgagtttgacttgattctgtatgatccgagaaataactcttttaagtatcctaaaattgagagtggtaagggctggtttgatgcagaggtctatgttgaaactctggtttcgccaatgaag

SEQ ID NO: 17673 - DNA, 360 bp, Glycine max
  Clone ID: LIB3049-048-Q1-E1-H10
ggcggagatcaatatttgtcgctgaggtcgatcgtcgataaaaggcaatgtttttgtgggattggttttatgggattctagcgtcgcttggcctgtggcagaaggaggccaagatcttattcttgggcctcgataacgctggcaaagccaccttgcttcacatgctcaaagatgagagattagtccagcatcagcctacccaatatcctacatcagaggagttgagtattgggaagatcaagtttaaagcttttgatctcgggggtcatcagattgctcgaagagtttggaaagattactatgcccaggtggatgcagtggtgtacttggttgatgccttatgacaggaaagatttgctg

SEQ ID NO: 17674 - DNA, 305 bp, Glycine max
  Clone ID: LIB3049-048-Q1-E1-H11
tgggacatcttcagttttgaaattagaaaccatctcatcctctctcaccggccttttaatccccctttttccaatttccccttttgcaatttccattaaaattccttcttcctacctataccctcagaaacttcaataacattgacggtcggtgttccaatttggtttcttcataattcttcttagatattcatactttgagactcataattcagagttgtagttttaacatgtgcttttgtctttgatcgtttctgtactaaatggacttgacaagtgttgtaaagttctaacaagtatttgat

SEQ ID NO: 17675 - DNA, 196 bp, Glycine max
  Clone ID: LIB3049-048-Q1-E1-H12
cagcagcacacgacgacatgggggtgcagcatacaaatcgatatgggaaaccgtccagattcaaaacattaagggactgaggctctcacaggtgaccagcaattacaccaggtgcaacacttccctcttgctagtctgcattgcagttccattgtcgctactaccgctctacactcgctatctgatcgggacctat

SEQ ID NO: 17676 - DNA, 382 bp, Glycine max
  Clone ID: LIB3049-048-Q1-E1-H2
aaaagggattcgtgacaaaacgttttttgcaactgcgatactggctatgcgacaacctaaacgcctaatcctaacaaggtgtcctaaccggcttttgattggtgaataacaatttccccccggcccctgttgggctggggcaagctccaaaatctgatctctcgcacatggactcatcacattacaacatttttaatcctgggatttggactttggtccttgaaagatgctatatttgaacaaggggatgcggaagaattggctgaagttgaagttaaattggataaagattggaaggctagcaatggagctacaaaaaatagcaataaggatgatgatgccacaaaaaagcataaacggtcatttttatctcagttttttt

SEQ ID NO: 17677 - DNA, 363 bp, Glycine max
  unsure (1)..(363): unsure at all n locations
  Clone ID: LIB3049-045-Q1-E1-A6
ggcacaccagaaacattgtgattttcaaggtaggcttttctccagaagatagaagatgtttggccaacttgagcatgagctagagctgcacgtgccggcgagtgaggcatgggatctgtttggtgcccttgaaataggaaaacttgttgcccaagagctgccggaattgtttcaaaaggtggagctaacagaaggagatggaggggttgggactgtcctcaaactaacttttgctccaggtgtacctgggccagctggttacaaagagaagttcactaagattgataatgagaagcgcataanagaaacagaggtagttgaanganggtacttggagttaggantcactctatttagagttcg

SEQ ID NO: 17678 - DNA, 368 bp, Glycine max
  Clone ID: LIB3049-045-Q1-E1-A7
ggagagaaagtgagagagaattacagagcattttccaacacgattacacgaccgaatcaaacccctctttctctccgaagctgcttttaatatcgtactggccttcgattgttctcctctttaatacatactgttctctcttcgatttgagggaacagtacaagagtctgagcatcggttaacccaactgcacaggtagtctccaaataatggagcctcatgatgagactggatgccaggctcctgaacgccccattctttgcattaataattgtgggttctttgggaaaacagctacaatgaacatgtgttccaagtgttacaaggacatgctgtttgaacaggagcaggacaaatttgcagcatca

SEQ ID NO: 17679 - DNA, 267 bp, Glycine max
  Clone ID: LIB3049-045-Q1-E1-A8
gatatagcgaagtttcatttctttggattagaaatttttcccaaagctgatcgagaagccagccaggccaggagttgaagaatgggaagggggaagatcgaaatcaaaagaatcgagaacacaacaaatcggcaagtgaccttctgcaagagaagaaatgggcttctgaagaaagcttatgagctgtcagtgctgtgtgatgctgaagtttccctcatcgtcttctccagccgtggccgtctctatgagtattcaacaacaacataa

SEQ ID NO: 17680 - DNA, 366 bp, Glycine max
  unsure (1)..(366): unsure at all n locations
  Clone ID: LIB3049-045-Q1-E1-A9
gacgaatttttatttattcaacgatagagtggaagcagaagtgaatgggaaattgaatttccatgagcggtggggttgtggttagaagagaagagaacttgagaagataacattctcgggttttgttttgttgagaattctgagcgtttgatttgatgatcataacacaatgagggatatttgtangaacttccagcgaggcagctgtcaatatggagaaaggtgtagatatttacatgttcagcaacagcggaaacctaatgttaatgggtttggaggacagagcagttctcatcaacagcaaaatacaaatccctttggattttggtctggctctggctcacaacaacagcagaagggtaatcc

SEQ ID NO: 17681 - DNA, 331 bp, Glycine max
  Clone ID: LIB3049-045-Q1-E1-B1
gggatggaagccttgtctttactttgctagagggtactgtaaaaatgggactagttgcaggttccttcatggtggacttggagatgctgatgttggtggtgctgctgctgcaatggttggctctcccagcaagattgagatgatggagcagtgccatgagctcttaagatccaaatcttttcagcaacaaagattggctgctgcttctcaactcatggcctcttccatttttccgtactccccaaagagcatgaatttcctgttgcagcagcaacagaatgatactcaaaaaacggcagctgcagctctgatgatgagtgaggatttgcat

SEQ ID NO: 17682 - DNA, 349 bp, Glycine max
  Clone ID: LIB3049-045-Q1-E1-B10
ggcaccaaatttcgtgtttgaaactctcgtgtgtgtcgtttttgttcttgcagttaagagagtacaaattccatggcttctaaaatcgaaagcgagaattcaaccgatacttctccatcatcgccaaagaacatatacaaaggtccagatgatgggcagcagcggtttttgcttgaattggagtttgttcagtgccttgccaatcctacctacatccactatttggctcagaatcgatactttgaggatgaagcattcattggatacttaaagtatcttcaatattggcaacgccctgaatatattaaatttattatgtatcctcattgcctctactttcttgagctgc

SEQ ID NO: 17683 - DNA, 358 bp, Glycine max
  Clone ID: LIB3049-045-Q1-E1-B11
gatagcgaaacagagagtggtttcagtgagtgatcggtgttcacttgatccttcataagtcgtcatcatcatcatcatcatcaccgttgattgaagaagatgccgatcagaaacatcgccatcggaaggcctgaagaggctactcaccccgacacgttgaaggcggggttggctgagttcatctccaccttgatcttcgtgttcgccggttcaggttccggcatcgcctacaacaagctcaccgacaacggcgccgccactcccgccggcctcatctccgcttccatcgcccatgctttcgccctcttcgtcgccgtctccgtcggcgccaacatctccgggggccacgttcaacccg

SEQ ID NO: 17684 - DNA, 341 bp, Glycine max
  unsure (1)..(341): unsure at all n locations
  Clone ID: LIB3049-045-Q1-E1-B12
gagtctcgatcagtttcattcattggaagatatgggaacattagaacaaattgatgcccctcaaaccaggtcatcatcatcttcatcttcttccattgatagcaacaaccacccttctaggactaggactccaccaccctcttccccttcatcaagtgcctgcagaaacagaactgatttgagcactgacctcagacttggtcttagcatctctccttcttctcaatctgaattacccttcaattcaacaccaagggaggaaagttttgactggccaccaattaagtctatattgaggagcacccttgtggggaaacanagccatctgagccaaagaccct

SEQ ID NO: 17685 - DNA, 373 bp, Glycine max
  unsure (1)..(373): unsure at all n locations
  Clone ID: LIB3049-045-Q1-E1-B2
tcctgacatgaccataattaataggcagcttggctggaatcctaaaacctcactttgggacctgcttgaatcaactctcacctatcagcacaggacttatgctgaagccgttaagaaagtcattgcaaagcccgtggcaagttaaacttgtatggtattgaattgcattgagaagagtgtttctgcctataggggcacttatatatagttcaatggttgattttatttatatacatggtaatttcccccttggttttggtagccaatgtagccaacgtagcccatgccttatttattgcatttttatgaagaagtangaatttattattaattatcaaggacaatatgtgctactgcaatgtgattttctcgc

SEQ ID NO: 17686 - DNA, 345 bp, Glycine max
  Clone ID: LIB3049-045-Q1-E1-B3
ggcagtttctataataatggaagggcaatttctccttcattaatttatatgcctatgcctaagttttttcacaattggaatagccttgtcttctacactcccccaagctcttagattctaatccactgtggttttccaacctcagaatttcctcaaaacttggtgatgctggctagaacatctgtaacttcatcaaacaaaggaaaaagaagaagaaagaaagtacttctccaattgctattactgcttttctgacagcagattatgtgaaaccagaagagagaaccttgagaagtcaggactatatccgtttccttggcatcagtatcaattaacaactttctc

SEQ ID NO: 17687 - DNA, 312 bp, Glycine max
  unsure (1)..(312): unsure at all n locations
  Clone ID: LIB3049-045-Q1-E1-B4
gaactcaaacaacanaaataagacattgtttggtttggttacttgctcgaatttcctcgaatcgcttaatttgtatttgattagttaaaccgcaacgcggaatctcttttctcgaactggctaactctcaggcaagtggttcggacgctgattccagcaacaagcggctggtgctcgcactgtatgacgccctaaactccggcgactccgacgccgtcgtcaagatcgtcgccgccgacctcgagtggtggttccatggtccgccctcacaccagtttttgatgcgcatgctcaccggcgactccgctgccg

SEQ ID NO: 17688 - DNA, 266 bp, Glycine max
  Clone ID: LIB3049-045-Q1-E1-B5
gagaatgaggtgggaggattgattgagaatcgttcgagactgcaaaatccaaaaccaaaaccaaacacaacacagcattcgtcattcaccgccttgtctcgtcttcttctgtctccgaacacggaatctctctgaatcgcgggattaagagaggaatatgcaacagaggcttaagttgcagcaacaacaacaagccctcatgcagcaagctttgcttcaacagcagcagatgtaccaccctggcatgctcgccgctgctatgtctc

SEQ ID NO: 17689 - DNA, 295 bp, Glycine max
  Clone ID: LIB3049-045-Q1-E1-B6
caatacgacaggtcgtgatatgcctatgtttagtatgcagcttgcgatggtgtcctatgctctctctttgggacctgcttgtgtcaaatctcagggtatcattacatgacttatcccgtctccgtgtgcattctcattgcgaatcccgtggcatcttaaacttgtctggtgttgaattgcattgagattcagtgtttctgcctataaggtcacctagattcatttcaatggctgactttatttaactacatggtagattgcaccttggtttcggcatccaatctattcaacctag

SEQ ID NO: 17690 - DNA, 317 bp, Glycine max
  Clone ID: LIB3049-045-Q1-E1-B7
ggtgcctaaaatcgatgacttcgcaaaatggtgacgagagccaccacccaccaccgcaagcgcaagctgaaaaggttactgaagttggatggtacgttcttggcgaggatcaacaacagattggcccttacgccttctctgagttgtgccagcatttcttgaatggatacctctccgaaaatacgtttgtgtggtctgaaggaagtagtgagtggcagcccttgtcctcggtttctgacctgtgggctcaaattaaccggcaaggacctgattcttcaactactgtgtctgctcctgatgttgatgagtttgaaaga

SEQ ID NO: 17691 - DNA, 355 bp, Glycine max
  Clone ID: LIB3049-045-Q1-E1-B9
gaagagtgaagagcgaagagaatggctcccaagggtttaatctttttggctgtgttatgcttctcagcactgtcactgagtcgttgtcttgcggaggataatggacttgttatgaacttctacaaggaatcatgccctcaggctgaagacatcatcaaagaacaagtcaagcttctctacaagcgccacaagaacactgctttctcctggctcagaaacatcttccatgactgtgctgttcagagttgtgatgcttcactgttgctggactccacaagaaggagcttgtctgagaaggaaacagatagaagctttgggtggagaaatttcaggtacattgagaccatcaaagaag

SEQ ID NO: 17692 - DNA, 326 bp, Glycine max
  Clone ID: LIB3049-045-Q1-E1-C1
gacggtggccggtggcggtgagtggtgtgtttgggaaagcgtaagagtaagaatggagggtggagaggaaggattggagatgatggtggactcaaaggacttacagcaacagagcaaagcgttggacaaactcactgatcacgtcgaggatcgccaactcgattccactcgcgtccaagaggccatggcttccatcgctgcttctgccgaagctgatcgcaatgccatgcgcatcagggaaaaagaattggctgctgttaagataaatgcagcagatgttgatataattgcaaatgaactagagtttggacaaaaaggtgctgaaa

SEQ ID NO: 17693 - DNA, 330 bp, Glycine max
  unsure (1)..(330): unsure at all n locations
  Clone ID: LIB3049-045-Q1-E1-C10
gatcgcatttcatagcactcaccctcattaccaacacgaaagcatagccaaaaccttttttcgaagtctctgattttcctaatggctccggcaaaggcagagaagaagccggcggagaagaagccagcggcggagaaggcaccggcggagaagaagccgaaggcggagaagaagatctcgaaggaagganggagcgagaagaagaagaagcgcacgaagaagagcgtggagacctacaagatctacatcttcaaggtcctcaagcaggttcaccccgacattggtatttcccagcaaggcatgggcatcatgaacagcttcatcaacgac

SEQ ID NO: 17694 - DNA, 373 bp, Glycine max
  unsure (1)..(373): unsure at all n locations
  Clone ID: LIB3049-045-Q1-E1-C11
gttgcaaaaggttcaggtttacttcaaatcaatggctgtttcatatgttcacatgcttcaatgcaacaggggtttccacaagggtaacctctcctatcctaattgcagttacaaggcgaggaggagccaccgtttagtttttgcttctatgcacacaccagaacctaaggtagactcattactggacagtgtaaaatgggataccaaaggtttggttgtggcaatagctcagaatgttgacacangggccatattaatgcaaggttttgccaacagagaagcaatagctacaactatatcttctcgaaanggcacattctatagccgatcacgatctacattgtggaccannagagaaacctctaataatttt

SEQ ID NO: 17695 - DNA, 348 bp, Glycine max
  Clone ID: LIB3049-045-Q1-E1-C12
gggaaacaaaagatggcaggtttgggaatatggatgggtttcgttagcctgtgtcttctgtctgtatcagtatcaggtctgctccaacgcctagagcaccctgtcaaagctgatggctcacttagccttatggtcattggagactggggaaggaaaggaacatacaaccaatctcaagttgccactcagatgggaagggttgctgcaaagttaaatatcgactttgtgatatccactggagacaatttctacgatgatggattgactggtatagatgaccctgcatttgaaatttccttctcaaaaatctacactgccaagagcctccaaaagcaatggtataatgtg

SEQ ID NO: 17696 - DNA, 351 bp, Glycine max
  Clone ID: LIB3049-045-Q1-E1-C2
cactttcaatatctcagtagttgtgcatggtactgtttctgagaagtcattaaattgtgaactagatccatatgagatccctaagagcatgggaatattccgcttgctcgaaagcccaaaagatattactactgccacagttgcccaaaggataatggctaatcatgaagcttatgtgaaacgcaatgctaagaaaactaggagtgagcagagatactatgaagagaaaaaatacgtctctggagactagagtgtatataatgatcttttacattagttcggtactgctcttcaagcttgaccctgtcacagagatgccaccactatagtatgaattgaatctatacacac

SEQ ID NO: 17697 - DNA, 347 bp, Glycine max
  Clone ID: LIB3049-045-Q1-E1-C3
gacagaagaatagtagcaatcagagactgaagacgagcttccccttgcgccgaagggccaccgatggttgaaaccgagatggatgcagaaactgttgcaaatgtggttccaccaaaggagactccaaatagtgtttccatttctcatcattcctcacaccctccccttaatgagaggattatttcatccatgaccaggagatctgttgctgcacacccatggcatgaccttgagaataggactggtgctcaaattatcttcaattgtgtgattgaaattgggaaagggaccaaggtgaaatatgaactggacaaaaagtcggggcttatcaagatcgaccgcgtgct

SEQ ID NO: 17698 - DNA, 316 bp, Glycine max
  unsure (1)..(316): unsure at all n locations
  Clone ID: LIB3049-045-Q1-E1-C4
ggcaattctggtgtgtatggtgcaggatacggtcctggggtaaccagtgcttgggactgattttcaacctgatagcattatatactgtcttgggtattaggtgcagacatacacctagggtgatttttctcccttttttgtcttctttttaagtttatggtctttaaatttatttttaccttggtgtttcaagcctattcattttgtgcggtttataatgctaatcactaaagggagatgtgggtgtgtatgtggcatcattaccgcatcagtagaggtcgtgcagtgtcagtangtgttggcaatggcgattact

SEQ ID NO: 17699 - DNA, 376 bp, Glycine max
  Clone ID: LIB3049-045-Q1-E1-C5
ggattgaaatcaaacctcagcaccactaggtcaagcttctgtctcagtcactgtttctccggcctcgcttcttctctcagattcagataccaattcggtttcttctgaaccaaacttggttcgagaaattcggccgttaattttccatggccaacaatccatcacagcttctcccatcagagttgattgaccggtgtataggttcaaaaatttgggtgataatgaagggtgacaaggagcttgttggtactcttagaggctttgatgtttatgtcaacatggtccttgaagatgtcactgaatatgaaatcactgctgaagggagacggataaccaagcttgatcagattttactcaatggaaacaacattgccat

SEQ ID NO: 17700 - DNA, 381 bp, Glycine max
  Clone ID: LIB3049-045-Q1-E1-C6
gatccacacccacactgtcacctttccgttcatttcctctgttttttcttcaaatccattgtttcgtggaaatcccgaaatttaaccatgcttctccgaaccgccgcctccgccgcttctgcttcgtccctctccctcttcagccctacctccgaacctctccgttcggttcccgctcgtggattggtggttcgcgccgcgaaaggatccacgaaccaccgcgccctaaccggcgtgatctttgaaccgttcgaagaggtgaagaaggagctcgatctcgttcccaccgttccataagcttctctcgcccgccaaaaatacgttgacgaatctgaagccgccgtcaacgagtaaatcaatgtggagtataacgtttcctac

SEQ ID NO: 17701 - DNA, 365 bp, Glycine max
  unsure (1)..(365): unsure at all n locations
  Clone ID: LIB3049-045-Q1-E1-C7
ggcacagaattagggttttccaattcagagagcatcacaacgaaccaccactggcgcagcctcagccgcagtcgcagccgcatcacgggcaagcagcgctggagcaggtgcagtgcttcggtcgcaagaagaccgctgtggccgtgacctattgcaagcgcgggctcggtctcatcaagatcaacggctgccccattgagctcgtggagccagagatcctccgcttcaaagccttcgagccgatcctcctgttgggtaagagccgcttcgccggcgtcgacatgcgcatccgcgtcaagggtggcggccacagctcncagatctacgcgatctgcgagagcatcgccaacgcgctcgtcacgttc

SEQ ID NO: 17702 - DNA, 317 bp, Glycine max
  Clone ID: LIB3049-045-Q1-E1-C8
tgtcgagatgacgacaggacggaggtaagggcgcgcagcgtcgttacatgcttggagtaggatcagtgatattgctggtgtggtggcttcctgtgctgacacgccagctcagggtggctggtgtggtgctggtgctcacacacattagagcactacgtcgatgagacatgatagtggccataaggtaatcaatttcgacagtgaaaacttcgggaacagacacggtgagcacattgctacttagagagaaggcaacgagcatcatttgagaaggcgccaggaagacgctgacatcaacaccttcttaaggggagttg

SEQ ID NO: 17703 - DNA, 356 bp, Glycine max
  Clone ID: LIB3049-045-Q1-E1-C9
gaagccaaattctttgacaagattcttcaagaagaaattgggggtgtgaaaggccattttggaccaattaatgcattggcttttaaccctgatggaaaaagtttttcaagtggaggtgaagatggttatgtacggttgcaccacttcgacccagattatttcaacatcaaaatatagtgcctgatggtttgtggttaaaattaggtggttcctagaagttagcatttaattattctcaaccaacatttaattatatattggtaatatggaagagttttttttttaaatgaaattatgcatttttggcttatgttgtattaacattattatcatttttggttggagtggcactctta

SEQ ID NO: 17704 - DNA, 296 bp, Glycine max
  Clone ID: LIB3049-045-Q1-E1-D1
gagacaccattaggttttcattctctttctctctctctctgattcgatcgatttcgattgttgaattcatcccatcgtggagccttcaaatttgtagttgaacaacgatggtgctgccgctatttgctgctttcattctcttttttgcttttattccgaatggattgttagcagttccttccaccgtccccgcattcctttggtcatcacattatgaactggcctctgaaaatggattgaaggaatctgtaaatttacaagtcattttccccaaagatctagcaaaatctgttttt

SEQ ID NO: 17705 - DNA, 346 bp, Glycine max
  unsure (1)..(346): unsure at all n locations
  Clone ID: LIB3049-045-Q1-E1-D10
gaatccactgtgttttactataagatgaaaggagattattatcgttatcttgctgaatttaagtcaggcaatgagaagaaggaagctgctgatcagtctatgaaagcatatgagtctgctaccgctgcagcagaggctgatttacctcccacacatcccatccgattgggtctagctttaaatttctctgttttctattatgagatcttgaactcncctgaaagagcctgtcatcttgcgaagcaagcttttgatgaagctatttctgagcttgacaccttgaatgaggagtcatacaaagatagcaacttaatcatgcaacttctcaagggacaactaactttgt

SEQ ID NO: 17706 - DNA, 317 bp, Glycine max
  Clone ID: LIB3049-045-Q1-E1-D11
ggaagcccaaagtgcaacgtactttgcaaaaaccctaaaccctctctttctctctccgcgactctgtactcatcaatggcgacgcaatcgttagacgaagaaacaactaagaaagtcatacgacaggtcgagttttatttcggcgacagcaaccttctcaccgatggtttcatgaggaagagtatcactgaaagcgaagatggcatgattagtttggcgctgatttgctcgtttaatcgaatgcgaaaacaccttaatttgggtgatgttaagcccgatgaagttggcccaagaaacgtgaatactgttgctcaaac

SEQ ID NO: 17707 - DNA, 367 bp, Glycine max
  unsure (1)..(367): unsure at all n locations
  Clone ID: LIB3049-045-Q1-E1-D12
ggtctagaaaaatttacacaatattttaagacgcacataaacttcctctgtcactacccactcctctctctgtctccgcctttcgcattgcaagcgctctctttctttgcttttccttccccctttcagtttcttcaacgctgcaactatccatggcaaaccgctggctcagacccgaggtgtatccactgttcgctgcggttggtgccgctgttgggatctgtggattccaattggttcgtaatatctgcatcaaccctgaagtcagggtgaacaaggagggaagaaaggcaagagtgttggagaactttgctganggagagaagtatgctgagcatttcctgangaagtatgtgcgcaacagaac

SEQ ID NO: 17708 - DNA, 176 bp, Glycine max
  Clone ID: LIB3049-045-Q1-E1-D2
gggcagctcgttacatcttggagaggatcactgagattgctggtgtggtggtttccattgattccaagccaattcaaggtgattggaatggtgctggtgctcacacaaactacagcactaagtccatgagaaattattgttgctatgaaatgattaaaaaccgcaattaaaaattt

SEQ ID NO: 17709 - DNA, 261 bp, Glycine max
  Clone ID: LIB3049-045-Q1-E1-D3
tggggtgtggaagtatttgcagaactttgtttcccaacctccattgcctccgcttctacctcgctaccatgattattcctgagaagaaccgcaaggagatctgcagatacctcttccaagacggagtttgctttgcgaagaaggacttcaatttggcgaagcaccctgagattgacgtgccgaatctgcaggtgattaagctgatgcagagtttcaagtctcgcgagtatgtgagggagacctttgcttggatgcactaat

SEQ ID NO: 17710 - DNA, 345 bp, Glycine max
  Clone ID: LIB3049-045-Q1-E1-D4
cggggttctaatgtgtaattgtttgttattgtaactcgttcttcttcttttgttgctcagtgtttgagtttgttttttctcacaactgaaaatgtcttgctgcagtggtaactgtggttgcagaaactcctgcaagtgctgcaacggctgcagaagctacatgatgtagccagacttaagctacactgagtcaaccaccatcgacaccatggtcataggagtaggacctgctaaggctcaatttgaaggtgctaaaatgggtgtgctcactgataacgatcgctacaaatgtggaccaaaatgctcatgcaactcctgcacatgcaagtgaggtgttaggatagc

SEQ ID NO: 17711 - DNA, 337 bp, Glycine max
  Clone ID: LIB3049-045-Q1-E1-D5
gactactaccaagtgaaaaagcaactaagcatagtgtgtaagaaagggagaaaaacaagtgctgtgtacagagaaaaatggctaggtggtgcatgatcttggtggttcttgctcttgccgtggttgcaagtgccagaaacatgcccaatgacgctggtttggaggaccagaagaacttccttgggtatgggttttcgggagttggcaacaatggccttccctttggtggagtgggttctgggtttgatggtaatatgggtgggccttctgggctcggaggacttggaggattcggtgggcctggtgggcttggcggactcggaggtcctggtaacgg

SEQ ID NO: 17712 - DNA, 348 bp, Glycine max
  Clone ID: LIB3049-045-Q1-E1-D6
gggagcagagcagagaagagaaacaaaaggtggggtcagtggaaattatcatcatacaatttcacttaacccttcaagctcaagacagcacagcaatcacatcgcatgtcccttatatatatacttattcattgcctctgaaccttatcaaaacacttctcaatctctctctctccaatggccaaagacctcgaaacggagattcaaagtgggttgcctcgcaaggactaccacgacccaccccccgccccattctacgaccccgccgagctccgaaagtggtccttcctccgagccctcatcgccgagttcgtcgccacctccctcttctccacgtcaccatcctca

SEQ ID NO: 17713 - DNA, 192 bp, Glycine max
  Clone ID: LIB3049-045-Q1-E1-D7
ggtgagtgaagaagcagagggggtagcggcattaaaaatgcagatcttcgtgaaaactctgacagggaagactataaccctcgaggtcgagagcagcgacaccatcgacaatgtcaaggccaagattcaagacaaggaaggcattcctccggattagcagcgtttgattttcgccggaaagcagcttgaaga

SEQ ID NO: 17714 - DNA, 342 bp, Glycine max
  Clone ID: LIB3049-045-Q1-E1-D8
gaagacagtaaggtgccatagcacttaggctcaagaacattatttctttcccaagaaaaaagatggcgaataacgaggaagacgcatgttcttccttcaccgatttcccagaggacattcaggtgtgcatcctctcgttcctgggcccaccggagatcgcaaccctagcctgcacttcgaagcgaatgggctctctctgcgccaccgactccaagctctggttctctatgtgcgagcgcaggtggggctcctacacccgcatcacccagtgggcccaaggaaaaaaccccactctctccttcaagcacctctacaacaccctccaccgctgggagaatctcc

SEQ ID NO: 17715 - DNA, 368 bp, Glycine max
  Clone ID: LIB3049-045-Q1-E1-D9
ggagagaagttattagggtttttgagtgcggcggtccaaacactcttctctgcagcttttgcctacaactcccttcaccatggctgaacaaaccgagaaagcttttctgaagcaaccaaaagtgtttctcagcacaaagaagactgggaagggaaagagacctggaaaaggtgggaaccgcttttggaagtccattgggcttggatttaagactcccagggaagccatcgaaggaacctatattgacaagaagtgccccttcactggcaatgtttccatccgtggccgtatcttggctggaacatgtcacagtgctaagatgaacaggactattattgttagaagggaatatctccattttatcaaga

SEQ ID NO: 17716 - DNA, 307 bp, Glycine max
  unsure (1)..(307): unsure at all n locations
  Clone ID: LIB3049-045-Q1-E1-E1
gacacactaagtgcaacaaagttttaacatgaaaggcaataatacacttttgttgcatttattctacactactctcttcctgtttcttgtagtgtcaagttcatcttcaacagggaatgaaagtaacgatgacactaacagtaaagaagtttatatcgtgtacatgggagctgcagattcaacanaagcttctcttanaaatgagcacgctcagattctgaaatcattgctaagaaggaatgagaatgccctagtacggaactacaagcatggtttctctgggttcgcagctcgtctatcaaaagag

SEQ ID NO: 17717 - DNA, 376 bp, Glycine max
  Clone ID: LIB3049-045-Q1-E1-E10
gactcaaaattaaccacaagcataagcacaagcgcaagcacaagcacttctctaattccctttcacactctattacagatttcacaagtgcttacacttcaaatggctttggaagctcttcaatcacccaccacagccactccatcgtttagtccctttgaagaaaccagtctcagttacttagtgacaccgtggacgaaaggaaagcgttctaagcgtagccgcacggagcaacaactgcaacacccttcatgcaccgaggaagagtacctcgctctttgtctcatcatgctcgctcgcggcggcgccggcagtgtctccaccgccaaacccgctgtctccgacaacaattctgcgccgctatccgccgccaaac

SEQ ID NO: 17718 - DNA, 362 bp, Glycine max
  Clone ID: LIB3049-045-Q1-E1-E11
gatgcttgaagacggtggattagaacctcaacaagagaaagagactcgtcagagaatatgatccttgcggtgctgtttgccaacgctgagggcaatatcctcatcgaacgttttcatggagttcctgcagaggagcgtctgcactggcgttcattcttagtcaaactaggagctgataatcttaagggtgtcaaaaacgaagagctcctagttgcttgccacaaatcggtttatattgtatacacagtgcttggcgatgtcagcatctatgtcgtgggcaaggatgagtatgacgaacttgccttgtccgaagtgatctttgtgataacctcagctgtgaaggatgtatgttggaagccccc

SEQ ID NO: 17719 - DNA, 354 bp, Glycine max
  Clone ID: LIB3049-045-Q1-E1-E12
cagtcacacgaagcagtaatgaagggcttcacttcacaaattgtcttaaattttttgaagaaatggaaggtgaagattccattgaaatctcggattcatcaccctcccacctttcacccagttcattgcaaaatcaagctcttgctggatcagtagataaaatgatgcccggaaagagttataatacacctccagcattgcagaatctgttcaatggatctaaacctaatagcataaactggggagaaggtggtaatgcccattcttcaagaagtgccaattcactagataatcgattgaccagagacataggacttcagtttaatgcagtcgagtttaaaagatctactgaag

SEQ ID NO: 17720 - DNA, 218 bp, Glycine max
  Clone ID: LIB3049-045-Q1-E1-E2
cattggggacactctcgcgacgtcatcttcattgacatatcgtcagcaatattacagcattatcttgtgactcatcaggcacatcacaccattatgaattgttaacagtcatttggtgttacatcgtcatacctatgatgtttatcaagtctgcagcaatggcgcccgctccatccttaacctggacatgcttcattctgtgcgtctggtgcttttca

SEQ ID NO: 17721 - DNA, 302 bp, Glycine max
  Clone ID: LIB3049-045-Q1-E1-E3
cattgggattcgagctgatgggaacaagtttgtccctgtaattccgagggatactacaatgccagcacggaaggagctagttttcacaactactcatgacaatcaaactgaggcgttgatccttgtctatgaaggagagggtgaaaaggcagaagaaaaccacctattgggatatttcaagataatgggaatacctgctgctcctaaaggagttccagaaatcaatgtgtgcatggacatagacgctgcaaacgtgctaagagttttagctggtgttgtgatgcctggtttctcccaacctg

SEQ ID NO: 17722 - DNA, 338 bp, Glycine max
  Clone ID: LIB3049-045-Q1-E1-E4
ctaccaaagtctctgaacattccactctcaacattagaggctaggctgcctgaagtatcatcagctttgaagaaagaggaagaggaaagtggtgcagtttctgggtcaagtgcacaattgtatgtagtatgtagaaggggaaatgattctcaaagggctgttcagtatcttcacaaaatgggtttcacttctgccaaggatattgttggtggcttagaatcttggacccacaatgtggaccatcagttccctacatattagctgacacctctagctatgttaaatatcactttcattaagaaagaggatgccgacgaaaaaataaaaacggccgctct

SEQ ID NO: 17723 - DNA, 61 bp, Glycine max
  Clone ID: LIB3049-045-Q1-E1-E5
cagtcacacgacgcagtaatgaaaggcttcacttcacaagttgtcttacattttttgacca

SEQ ID NO: 17724 - DNA, 270 bp, Glycine max
  Clone ID: LIB3049-045-Q1-E1-E6
gttgggggaaacctacgaagggaacaagatgggagaggaagcgaagaaagcttataaagaggctttggagttggagccacagttgaatgtggctcaagaagcgctcagcaggttgggatcgtcgtaatttggtgttgagtgatgtgagctttaagatgtgatcgatcgctttggttattgtatgtttaatttataactgttgtttctaatcttcgattatggagagtaattgaatgttaagtttgagcaagcaataaaatgattttcgtc

SEQ ID NO: 17725 - DNA, 386 bp, Glycine max
  Clone ID: LIB3049-045-Q1-E1-E7
gggacgacgaagaagaagaatccaaaagcaatcccatctgtgtgtttgcacatcggaagggagggctatcaaactctaaggattgctctgaatcggtttcgtcttcttcgtttttcttcaaaatcctcgtgacagatctaatctaatcagccttttgggggtgtttcagacattgcatgcatatgggtggttgtgttggatgctataaaaggccttcactgagtcccacagtggatgtgccatcaaaagggttggcaacacaaagtaacgtagtgaggaaaccgagttcatcagaggatttttggaccaccagcacgcatgatatggacaacagcgctgttcagtcacaagggagcatctcttcagccagtctaacaaaacaagct

SEQ ID NO: 17726 - DNA, 371 bp, Glycine max
  unsure (1)..(371): unsure at all n locations
  Clone ID: LIB3049-045-Q1-E1-E8
gaggaaggtaaaggaagcaaacgcaagagcaagagcaagagcgaaagcggcagagaagatggaaggagaagagggttctcagcagccacagttggtgctcgcggacaagctattccttctccggcaacccgatgtgcaagacattgacaaggttcgctacaaagaggatgtcttcactcatgtcaaggaaaacgatatggtccctctgtacgaaaccctagtcgctgattccgtgttggacttggatcgtgcccttttggactctatgcgcgctaaaattgacgacgagctcaccaagctcgacgaaaagattgctgatgccgaggaaaacttangagagagtgaagttcgtgaggctcatttggcaaaat

SEQ ID NO: 17727 - DNA, 390 bp, Glycine max
  Clone ID: LIB3049-045-Q1-E1-E9
gcagttcaaggagttgtttatgttaagtcctgcaagtatgctggggttgacaccctcttgggagccacaccactacttggtgccgttgtgaagctccaatgcaacaacaccaagtacaagctggttcaaacaagtaaatctgacaagaacggctacttctacattgaagcaccaaagagcataaccacgtacggggcccacaagtgtaacgtggttttggttagtgcaccctatgggcttaaggcctcaaatctccatggtggtgtcactggtgctcttctcaagcccgagaagcctttcttgtctaagaggcttccttttgtgctctacactgttgggcctcttgcatttgagcccaattgccattaaatgcaagaaattatggatata

SEQ ID NO: 17728 - DNA, 334 bp, Glycine max
  Clone ID: LIB3049-045-Q1-E1-F10
tgccctaagcttcactcattgctctatttctgccaccagatgacaaatgctgcactcataacggtggctaagaactgcccgaattttatccgattcaggctgtgtatccttgatgcaacaaaacccgaccctgatacaatgcagccactggatgaaggttttggcgcaattgttcagtcttgcaggcgactcaggcgcctatccctctcggggcaattgaccgaccaggttttcctttacataggaatgtacgctgagaagcttgaaatgctgtccattgcatttgctggggagagcgacaagggaatgctctatgtgttgaatggatgcaaga

SEQ ID NO: 17729 - DNA, 340 bp, Glycine max
  Clone ID: LIB3049-045-Q1-E1-F11
gggcagatggggtcctctgctagagcaagccactttcaggaaccgtcaccgtctctatctttccgaacagactgatggcagtgttcccaatactcttgttaaacccagggttgctgcagagtttaatgaagaagctcgctctccctttttcaagaagtacaaaactgtattacatcctggcgaggtgaatagaatcagggagtttcagcaaaacagtaagatagtagctactcacacggattgtcctgaggtacttatatgggatgttgaaactcaacctaatcgtcatgctgttctgggggctaacacttctcgtccagacttggtattaactgggcat

SEQ ID NO: 17730 - DNA, 280 bp, Glycine max
  Clone ID: LIB3049-045-Q1-E1-F12
gaggaaccaaagtgaataactcttattacgataaattgaaattggtactgatcattgctgtgctcaactgttcattgttaatttttagcgtccctatactaattaaacagcatgagtgtggatttgaacaaaactgcctccaacggtcatgataaaatggtaatatcacaagaacatcaggcaaagatcactaaaggtaaaagggttaaaaggccactaacaaattaaggatccgtgtactgttctgaagcttccaaccccaaggtattaaaggccccaa

SEQ ID NO: 17731 - DNA, 385 bp, Glycine max
  Clone ID: LIB3049-045-Q1-E1-F2
gacacaccacacacatagtagctattatactctctagagtaattgcggaatctgctagaattttctaataatggcgaaagacgttgagcaggtcacagagcaaggtgaatactccgcggaggactaccatgaccctcctccggcaccgttgatcgacccagatgagctcacaaagtggtccttgtacagagccgccatagctgagttcatagcaacactcctttttctttacatcaccgtgttgaccattattggctacaagagacagagtgacaccaaaatccccggtaacaccgaatgtgacggcgttggcattttgggcatcgcttgggccttcggtggcatgatcttcatccttgtttactgcactgccggaatctctggg

SEQ ID NO: 17732 - DNA, 364 bp, Glycine max
  unsure (1)..(364): unsure at all n locations
  Clone ID: LIB3049-045-Q1-E1-F3
ggccctcatggcgatgctggtctcaccggccgcaagatcatcatcgatacttatggaggatggggtgctcatggtggtggtgctttctccgggaaggaccctaccaaggttgataggagtggtgcttacattgtgagacaggctgctaagagcattgtggcaagtggacttgccagaaggtgcattgtgcaagtgtcttatgccattggtgtgcctgagcctttgtctgtgtttgttgacacctatggcactgggaagatccatgataaggagattctcaacattgtgaaggaaaactttgatttcaggcctggtatgatctccatcaaccttgatctcaagangggtggaaataacaggtttt

SEQ ID NO: 17733 - DNA, 295 bp, Glycine max
  Clone ID: LIB3049-045-Q1-E1-F4
catcacttcaagggaaattcagaccgcggtcaggcttgtgctgcccggtgaattggccaagcacgccgtctctgagggtaccaaggctgtcaccaagttcactagctcttgaactgactattatgccccttcgcttcgatctaggtgtctctgttaggaatatgttttatgttgaagtgttggtttattttttctttttggtgaaagcaatttgtaagtgaagaatatgggatttgttgatccttctttgtatggaattagttgctaatacagagacgtatattattcctatcat

SEQ ID NO: 17734 - DNA, 327 bp, Glycine max
  Clone ID: LIB3049-045-Q1-E1-F5
cacgctaagcgtgtaactattatgcccaaagatatccagctggcaagaaggattcgtggtgagcgtgcttgatgtggtggtggtggtggtggttgtgaagatgatgatgggtggctgcggatggtgttttgttattcagatttctcttttattcaaagatagggttgttagggagtaggtattaattgtgatacgggcaaatactgctaagtgtccatgactgtgtcttcttcctttcagaaaattggcatgtaattgatttttggacatatgtgtctgtctgtcataatgtttatgtttttacgggatgtgtgcagccactttggc

SEQ ID NO: 17735 - DNA, 377 bp, Glycine max
  Clone ID: LIB3049-045-Q1-E1-F6
gaaagtgaaggtgacgatggaattggaagttgacgagaacgacttgaaagccgccggcgctgaactcttcgccgaaggtggccggcgaggcattcgtatcaatggctggttgatcgagactcggaggcactccatactgaactcttccacattccaagagtgggaacagaaactcgatacgtctcatttaccagaaatggtttttggggaaaacactttgattctaaaacacttgagcagtggaaccaacattcattttaatgcatttgatgctctacgtggctggaaacaggaagccttgccgccagttgaagttcctgcggcggctaaatggaaatttagaagcaagcccttctcagcagtaatactagattacg

SEQ ID NO: 17736 - DNA, 385 bp, Glycine max
  Clone ID: LIB3049-045-Q1-E1-F7
ggagtgagtagtgagaatggagtttcaagggttaccggaaggttgcattgctagtatactctctcgcactacgccggcggacgtgtgtaggttttccgtcgtatcaaagattttccgttcggccgctgaatcggacgctgtgtggaaacgttttctcccttccgattaccattccatcatttcccagtctccttcgcctctcaactatccttccaagaaggagctctatctcgctctctcggatcgccctatcatcatcgatcagggtaaaaagagctttcaattggagaaaaagagtgggaagaagtgttacatgcttgctgctagagctctcagcattatttggggtgacactgagcaatactggaactggacaaccgataca

SEQ ID NO: 17737 - DNA, 362 bp, Glycine max
  Clone ID: LIB3049-045-Q1-E1-F8
gctctgactgctgatgagaatgctcagcctgtacgagtttgtgaccggtgcatggcggaagtgtctcagcggctgactagtgcaaaagagtcatcaagtaaacctgcattgcagagtcatgaggatcttgcaaggaaacttcaggaggagctggagagaaatcgaaagacatcaggttccaagtctgatggatctgcaagacggatgaaggaagttgcatgtcccatttgcactgtccatctgcaggttcaggtgcctagctcgggttcagagacaattgagtgtggagtttgccagcacccatttcttgtgagcgctcattgagttcagataaacatgaatacggaagcggtgtctacgtg

SEQ ID NO: 17738 - DNA, 387 bp, Glycine max
  unsure (1)..(387): unsure at all n locations
  Clone ID: LIB3049-045-Q1-E1-F9
tggaaccatagaaacaaaatcatattttcaaacgatagccccaacaccagtaagatactagatgatgccattttcttttgctggagctgattgaggaacctggaaaaaggattcgacaatccttttcatcaatggtcaagccatatcagagaagggttttgtaattagtggaaaatagctccacagatagggatcaccaatatatacttagagttttggttctttaatccatcatgattagttttgtattaaggaaccaaacctccacatgggagacttcattggtgattgtaaaaatcacagtacgacttgtactgaaacttatctaatatataatattatttttggcagatananaaatggtttggaaagacattgtcaattttc

SEQ ID NO: 17739 - DNA, 362 bp, Glycine max
  Clone ID: LIB3049-045-Q1-E1-G10
gaacggaaactggtgacacagtttagagagagagagaaacaaagcaaaagccatttggatcctctcttctcttctttgatctccgttacccttttcgttttctcaacacagagagagagagagagtctttcggagttcgtttgcgtgtgttgtgtgatcagtcaccgatggcagcaccacctgcgagggcacgtgccgattacgattacctcatcaagcttcttcttattggcgatagcggtgtcggaaagagttgtctgcttttgcgattttctgatggttccttcacaaccagttttatcaccaccattggcattgattttaagataagaaccattgaacttgatggcaaacgcattaag

SEQ ID NO: 17740 - DNA, 374 bp, Glycine max
  unsure (1)..(374): unsure at all n locations
  Clone ID: LIB3049-045-Q1-E1-G11
gaaggtagatcccaatgcttttgtagccaggcgatcaaagaattcaacattgccagatcacagcccccttccagatgctttctgtaatgtggctgatgaagatatgtgggtgaaaatgaacaatggttatattgcggaccttgattcccttcaaactactcctcccaccaaccgaaaagttcagtcattcccgacaagtgatgcaactgttggttgtacaagtgaaattgagaagtatgaacgagaggttcaagatttgaggaaacaactggaactagctaaagaaagaatanatgaactcgagcaaaagcattcagaagaagtgccatcaagcaagcaattaatcgttgagacacccaaacatcaacaagaaa

SEQ ID NO: 17741 - DNA, 357 bp, Glycine max
  Clone ID: LIB3049-045-Q1-E1-G12
gacgcgagcaaacagtttctgagtttcttctattttctgttcccaatttgtttcggatctctgttcacgaaccctaaatctgacgttaattcaccatgatctgaacacaacgtggttcccatctgatccactgcatcgtctttctcaattgtcgaaagatgagtacaagtggttaatgagattgaggaacttgcgttgtttgggcgaaacaaagcagagatgtacctgaaggagccgctatggagtgaaacagggaaaggcgatggaagtgcaaaaacagaggattatggtgcagtgagtgaggtcgtgaagtcactgcagcaacagagagtgtatagagaagtcactctcgcgctc

SEQ ID NO: 17742 - DNA, 396 bp, Glycine max
  Clone ID: LIB3049-045-Q1-E1-G2
ggacgccaccagcagcgaagtgagtgagtctctgattctcaacaatggtagctgcaaaaccaaagtagacaactttagtagctgcaaatccgaaatagacaacctaagaagtaagaaccccttctttagtgtttgatgtcttgtttgttaatgcaatccctcaagtcacaccctgctcttttattttccctttccaatcacttctctttctcttctcactctgtcagatcctttctctcttctttctccacatgccaacactcaaaggaaagcacttccattattgattatctaaatgccaagttcgatttctcgagaactcaatccttctacatctcaaaacgtgtttcaagcagcacattcccccaaaaccccttgtctgtgctcagttttttc

SEQ ID NO: 17743 - DNA, 361 bp, Glycine max
  unsure (1)..(361): unsure at all n locations
  Clone ID: LIB3049-045-Q1-E1-G3
ggcacaagtttgttgagatagctagaagcaataagatgaaaatgaaagtgcttgttttgtttgttgctacagttttggtagcatatgaatgccatggctcagactaccagaagttccctctccaaatgaaaactgggtttggtgggcaatacagcaatgaggtggcatgtgccagttggaggcttggcgtggaagcaaacaacgtagtcaagtggcaaactgttcctgcagcttgcggagagtacatagctgactacgttctangagaccaatatagatcagattccaaaacagttaaccaacaagcttaattctatgctaaatccctcaaactcaccaacaaggatgtcccttgtctgga

SEQ ID NO: 17744 - DNA, 373 bp, Glycine max
  Clone ID: LIB3049-045-Q1-E1-G4
gagtgcagcatcgtagagaaataagggaaaaatggtgtcgctgaaactgcagaagcgcctctccgcaagcgtgctcaagtgcggcagaggaaaggtttggcttgaccccaatgaagtcaacgaaatctccatggccaattctcggcaaaacatcaggaagttggttaaggatgggtttatcatcaggaagccaaccaagattcactcccgctcacgtgctcgtaggatgaaggaggcaaagaggaagggccgccactccggttatggtaaacgtaagggtacaagggaggcaaggcttcccaccaagatactctggatgagaaggatgcctgtgctcagacggttgcttcgtaagtacagggaatcaaagaaa

SEQ ID NO: 17745 - DNA, 385 bp, Glycine max
  Clone ID: LIB3049-045-Q1-E1-G5
gccacatcacgacatcacatcgcagagaagaacagagagagatccatccatcaattccaatggccgatcagctcaccgacgaacagatctccgagttcaaggaagccttcagcctcttcgacaaggacggggatggttgtattaccaccaaggaacttgggaccgtgatgcggtcacttggccagaacccaactgaggcagagctgcaggacatgataaatgaggttgatgctgatgggaatggtaccattgatttcccagaattcctgaatctcatggctcgcaagatgaaagacactgattcagacgaggagctgaaggaggctttccgcgtgtttgacaaggatcagaatggcttcatctctgcagcggagctcccgcatgt

SEQ ID NO: 17746 - DNA, 366 bp, Glycine max
  Clone ID: LIB3049-045-Q1-E1-G6
ggaggagactgagaagacagaagaaaacaaaatggaagacacagtttctgcgttgaggtctttgatggtttctcactctccgccgctggatgccttagtggtgccctctgaagattatcacctgagcgaatatgtgtctgcacgagacaagcgccgcgaattcgtttccggcttcactggaagtgccggcttggcacttataacaaagaaagaagcactgctgtggacggatggacggtatttttttgcaggctgagaaagaacttagtgctgggtggaagctaatgcgaattggtgaagatcctgctgtagatatctggatggccgataatttgccaaaagaagcatccgttgggggttattcct

SEQ ID NO: 17747 - DNA, 343 bp, Glycine max
  Clone ID: LIB3049-045-Q1-E1-G7
gagcgaaacagagagtgatttcagtgagtgatcggtgttcacttgatctcatcataatcgtcagcgtcaattgaagaagatgccgatcagaaacatcgccgtcggaaggcctgaagaggcgactcaccccgacacgttgaaggcggctttggctgagttcatctcaaccttcatcttcgtgttcgccggctcaggctccggcatcgcctacaacaagctcaccgacaacggcgctgccacccctgccggcctcatctccgcctccatcgcccatgcattcgccctcttcgtcgccgtctccgtcggcgccaacatctccggcggccacgttcaacccgccgtc

SEQ ID NO: 17748 - DNA, 372 bp, Glycine max
  unsure (1)..(372): unsure at all n locations
  Clone ID: LIB3049-045-Q1-E1-G8
gaaagacagacagatctgaagtgtgtgtagagttaacaagaccagagagagagacgaagccgaacgaaacataaataaaaccttgctcttttttcacgccctagctcattttcttctccgttctcttctctctgttcctcactcactcgcatttattcaccatgactaagcaacaagctaattggtctccatacgataacaacggaggatcatgtgttgcaattgctggagcagattactgcgtcatcgccgcggatacgaggatgtccaccggttacaatatcctcactcgcgattactccaaaatctcncaactggcggagaagtgtgttatggcttcttctggttttcaagctgatgtcaaagctttgc

SEQ ID NO: 17749 - DNA, 364 bp, Glycine max
  Clone ID: LIB3049-045-Q1-E1-G9
gaggtcgtgttgcagaggccacaacgtttttcattagaaattttcagttccaccacattctctgaactgaagaaacctcttgcactgtggacgcagcctccgccggcggcattaccgccattgaagctcattcaagctttttttcaccgttcctcacaagactaggtttgaagctgttatcattggaaattagcacttctttgttagtgaaagattagagcaggataaaaatgctcagacgaaggctatctgttctctcaacgtcaatcatcagaaggtcaaatcatagcaaacccattctcagatacccatctatccaatctcacccctttcagctccgtcactctcccagtgcttaccgaat

SEQ ID NO: 17750 - DNA, 348 bp, Glycine max
  unsure (1)..(348): unsure at all n locations
  Clone ID: LIB3049-045-Q1-E1-H1
ggaacagtacccggtttcgacactcgcgtctcagcctcagtttcggatctctcncttctctcaccaatttccaggatttgaaaaatggcagattccaaaccaggattgaggaagccagtgttcaccaaggtcgatcagcttcgtccagggaccagcgggcacactttaactgtgaaggtggtcgatgctaagatggtgatgcagaaaggtcgttctgatggtcctcaatcncgccaaatgcgaattgctgaatgtttggttggtgatgagactggaatgatcatattcactgccagaaatgatcaagtggatatgatgaaagagggtgctactgtgaccctgcgcaat

SEQ ID NO: 17751 - DNA, 357 bp, Glycine max
  Clone ID: LIB3049-045-Q1-E1-H10
gagagaaagagagagaaagatgtcgaagcgtggtcgtggtggttcggcggggaacaagttccgcatgtcgctgggtcttccagtggcggcgacggtgaactgcgccgacaacacgggggcgaagaacctctacatcatttcggtgaaagggatcaaaggccgtttgaaccgtcttccctcggcctgcgttggcgacatggtgatggccaccgtgaagaagggaaaacccgatctgaggaagaaggtcttgccagctgtcatcgttcgccagcgcaagccatggcgccgaaaggacggcgtctacatgtacttcgaagataatgctggtgttattgtcaatcccaagggagaaatgaa

SEQ ID NO: 17752 - DNA, 396 bp, Glycine max
  Clone ID: LIB3049-045-Q1-E1-H11
gattcagattacattgcaaaaatggcatcattcaccatgacagcttccatccttggcagcccagccgtcaccaaccggtcggcagtagcaacgcagaggagatcactcgtagtgaatgctgccaaagctgttgaagcagaaaaggtcagttatgacaatgacatggatggtagcaatggaaggaggaacttgatgttcgccgcggcggcggctgctgtttgctctgttgctgggatggcagtggcagatgagcctaaaccaggaaccccagaagccaagaaaaagtatgctccgatttgtgtcaccatgccaactgctaggatttgtcgcaattgagggactttggtttttattttacttctgatgattggaaatgtacaatggggttgttgtaat

SEQ ID NO: 17753 - DNA, 361 bp, Glycine max
  Clone ID: LIB3049-045-Q1-E1-H12
acgacagaaggggattcagattacattgcaaaaatggcatcattcaccatgacagcttccatccttggcagcccagccgtcaccaaccggtcggcagtagcaacgcagaggagatcactcgtagtgactgctgccaaagctgttgaagcagaagaggtcagttatgacgatgacatggatggtagcaatggaaggaggaacttgatgttcgccgcggcggcggctggcgtttgctctgttgctgggatggcagtggcagatgagcctaaaccagtaaccccagaagccaagaaaaagtatgccccgatttgtgtcaccatgccaactgctacgatttgtcgcaattgagggactttgggct

SEQ ID NO: 17754 - DNA, 357 bp, Glycine max
  Clone ID: LIB3049-045-Q1-E1-H2
gacacaccgtttgttctattcttaactcaacttctgctacccactctcttcttccaagtccaaccacgcttttctctacagtcatgggcaaggtcaagatcggaatcaacggatttggaagaattggccgtttggttgccagagtcgctctgcaaagagacgatgtggagctcgttgccgttaacgaccctttcattaccaccgattacatgacatacatgtttaaatacgacagtgttcacggacactggaagcatcacgatgtcaccgttaaggacgagaagacccttctcttcggtgacaagccagtcactgtttttggacacaggaaccctgaggagatccatgggggtcaac

SEQ ID NO: 17755 - DNA, 365 bp, Glycine max
  Clone ID: LIB3049-045-Q1-E1-H3
ggcagaaatggggaataacagacaaaggagattcagaactcatcgcgcacaatcaagtcgacaccaccaccaacaactcttactagaggacgattctcaaagctctcttccagaaaatggtgagggcgaggaagaggatgaggaactcacggaacctaaaataaagcttgctatgtgggattttgggcaatgcgatgccaaaaagtgcactggacgcaagctttcaagattgggcatgctaaaagagttacgtgtgagtaatggttttggcggcattgttttaagtccggctggaaatcaatgtgtctcaatagaagattactctttaatccagaagaaaggattggctgttgtggattgttcat

SEQ ID NO: 17756 - DNA, 371 bp, Glycine max
  Clone ID: LIB3049-045-Q1-E1-H4
gaaggatccgcttttctcgcttcttcccttgcagatcctacaaagttttttcctaccctctctctctctctctctctctctcggaggccactgcttattgtgtcattttcattctgatttcaccacttatttgacaaccctttttccatttcatttttcttgtttttaaagttgagcaaaaggcataggcttaccaattatgggcaaggagtggtattttgctggaagatcatctaagagaggtgtacgacgaggtgctgaggctgaaacacaagccccttctggttgcatgtgtgctgtttttcagttctttgatttccatccttttcactttcccaacataaaccaacaacaccaacaagatcaacaag

SEQ ID NO: 17757 - DNA, 373 bp, Glycine max
  Clone ID: LIB3049-045-Q1-E1-H5
gcttcacggcaacagaagaataatcaaatttctcagatctatccgacgtcgtcgcagatccaccaaccgttatggctgccttcagcggtgatgaaacggctccgtttttcggcttccttggagccgcagctgccctcgtcttctcctgtatgggagctgcctatggcacagcaaagagtggtgtgggcgtggcttccatgggtgtgatgagacctgagctggtgatgaagtctattgtccctgttgtcatggctggagttttgggtatttatggccttattattgctgttattatcagtaccggtattaatccaaaggccaaatcttattacctctttgatggttatgcacatctctcctctggtcatgcctg

SEQ ID NO: 17758 - DNA, 364 bp, Glycine max
  Clone ID: LIB3049-045-Q1-E1-H6
gatcacgcaaaaggatggatgatggaagaaacaaagagaagggaaatatcaggaggtgcgagtaccggagccaaacgcgggtgtgtgtgtgtgtgagggagagagagatgcagttccattcagaaactccaaactaaacatccctggcgacaaccttaggaatctcgatcgctgaaaaaacctatgcagccccgaacacactctctgcattccaacttgtttaagtcatgcctttcgattcacccttctctcaataaatttttaatcagattcttggccaccgccacactcataataaagttttgtttttccaaataaagggaatggcgactcctgttgagcctccaaatgggatcagaactga

SEQ ID NO: 17759 - DNA, 261 bp, Glycine max
  Clone ID: LIB3049-045-Q1-E1-H7
gacggcaacagaagaataatcaaatttctcagatctatccgacgtcgtcgcagatccaccaaccgttatggctgccttcagcggtgatgaaacggctccgtttttcggcttccttggagccgcagctgccctcgtcttctcctgtatgggagctgcctatggcacagcaaagagtggtgtgggcgtggcttccatgggtgtgatgagacctgagctggtgatgaagtctattgtccctgttgtcatggctggagttttggg

SEQ ID NO: 17760 - DNA, 367 bp, Glycine max
  unsure (1)..(367): unsure at all n locations
  Clone ID: LIB3049-045-Q1-E1-H8
aaggtggtattatatgacaatgttttggagacttggtaagaagttaatactggctaataaccttaagaaacctttttgggttaacccaaggtaaccccaactgaaaatcacatactaatttcttgaaataccgagattcatttaaagggttgacctcccccaacaaatgtttttccatatacacagacctggaaattggaaccttgcaaaagcctaaagaacaaggttaactggtaaccatgtcacaacatgctgtccaatggtacgatactagtgtttttgaagacaattttattggttgagtggaccactgangagaaaggttgaggactccagaaacaatctcatatgcttgggacgtatgctg

SEQ ID NO: 17761 - DNA, 139 bp, Glycine max
  Clone ID: LIB3049-045-Q1-E1-H9
gagatcgaagcttgtactcgaatgagagtttagagtaagcaccttgcgaccagcgctctccgttcactatatccccgcacactgtcgtattcacgacggatttacgggttactcgctcacggtgcggctgaagtttcct

SEQ ID NO: 17762 - DNA, 195 bp, Glycine max
  Clone ID: LIB3049-046-Q1-E1-A10
gattgttggcttgtgctctgctcgtgcctctagggttatcatatctccatttccatttcctctctctcagtttccaagaatcttaagccatgggaaagtcctaaccaaacgttaacgccgaataacaaaaaggcctttaaaaagggaagaagaagctcaaaaggctcaacgctgaaaagaaaatcgctcctccaa

SEQ ID NO: 17763 - DNA, 357 bp, Glycine max
  unsure (1)..(357): unsure at all n locations
  Clone ID: LIB3049-046-Q1-E1-A11
ggttctagtgtgtgattgtttgttgttgtaactcgttcttcttcttttgttgttctgtgtttgtgtttgttttttctctcacctgaaaatgtcttgctgcggtggtaactgtggttgcggaagctcctgcaagtgcggcaacggctgcggaggctgcaagatgtacccagacttgagctacactgagtcaaccaccactgagaccttggtcatgggagtggcgcctgttaaggctcaatttgagggtgctgaaatgggtgtgcccgctgagaacgatggctgcaaatgtggaccaaactgctcctgcaacccctgcacttgcaagtgangtgttgggagagcaagcttcaagcagag

SEQ ID NO: 17764 - DNA, 353 bp, Glycine max
  Clone ID: LIB3049-046-Q1-E1-A12
cgcgtcaggggttctactgtatgtgattgttgtgactcgtcctccttcgccgtaacctcctcctttggtggttgggtggttggtttttcccccaacctgaaatgtccttccgccgggggaactggtggttccggaacccctggaagttccggaaccggtgccgaaggtggaagatgttcccaaacctgaactacaacgaattaaccaacaacgaaaacttgggcaagggaattggaccaatttaagcgcaattctagaatgctgaaatgggtgttcccgctgagaaaaatagctgcaaatgtgtagctaactgtacctgtgaaccctgcacatgcacatgaggtgtttgagag

SEQ ID NO: 17765 - DNA, 411 bp, Glycine max
  Clone ID: LIB3049-046-Q1-E1-A2
gagactaattttacattggaatcttccttaaggtatgttgctgactgttctcaagctgtagttgtacacatgtaactctgtcaacattttcagaccaaatccaacgttgtttctggcaaaaatggatgcattccgtttatcacattcatttatgctcagcaccaacatccacagcccctcctctctctgcacccttcgttccctctccaccaatccccgcaacaggtggttcaaggtggaagccaccgccggcggcagccagaagaagaacaataacaaggccttcgacgcggcggcgttcgaggcggagcgacttgccctcgacgcagaggcccggcgaaccatggcggacgccgccgacccgaaggcctggaaatggataatccggaagagaatatgggatatgatgga

SEQ ID NO: 17766 - DNA, 395 bp, Glycine max
  Clone ID: LIB3049-046-Q1-E1-A3
ccacacgatcataaaggggaaggtttagatttccgggatcagacatgaaagcatccgcactgcttaacttgaaatctttcactctaaaccggcattctccaacttcaaactccgtcatccccccctttctttgtcaatcccacccccgacaacggccaaatcaacaattctcgaattcacatcaagtctgacacatccgtcaaactccgaacgagcacgcgccccttccagcaatcccctgcccccgtccccctctcgtcaacttcaaaattggcccctgtcaactctccgttcagcccgacgaagacagcaacatcgcccacgctcgcaacgccattcaggatgctgcatcaaacggcgcccagcttgttcttttgcccgaaatttgggacagt

SEQ ID NO: 17767 - DNA, 400 bp, Glycine max
  unsure (1)..(400): unsure at all n locations
  Clone ID: LIB3049-046-Q1-E1-A4
gacatcgcacatcaattaatccttcgcaacctccaaaatcaaatttccggcctctctgcgtcctcctcctccaacaatcggtttccaagggccgtaacaagcaaaaccgtccgcaaatccaccggtggaaaggctcctagggaacaactcgccacccaaggctgcaaggaaatctgcaccgacaaccggtggagtcaagaagcctcatcgctatcgccctggaactgttgctcttcctgagattcgaaaatacgaaaagagcacagagcttctgatccgcaagctccccttccagcgtcttgttcgtgaaaatgcgcangacttcaagaccgatttgaggttccaaagtcacgctgttcttgcgcttcaggaagctgcggaggcttacttggtgggtttg

SEQ ID NO: 17768 - DNA, 377 bp, Glycine max
  Clone ID: LIB3049-046-Q1-E1-A5
cactctctccgttcatctcttcttcttccaatgctgacaagtgctcattattattctcctccgaccatttccgaatgttccagttcaaggtccggatctgtccacgtggcaggtcccacgattggacggagtgtccctacgcccaccctgccgagaaggctcgccgccgtgacccccgcaagtaccactactccggcaccgcctgccccgattaccagaaggggaactgcaagaggggcgacacttgtcagttctcgcacggcgtcttcgaatgctggctccatccttctcgctaccggacccacctctgcaaagacggaaccacttgccgccgcagagtctgcttcttcgctcacaccaccgaacaactccgcctc

SEQ ID NO: 17769 - DNA, 372 bp, Glycine max
  Clone ID: LIB3049-046-Q1-E1-A6
ggcttcaaactcactcctttctttccattccctcactttcacacccacaagtcacacccacttggttccttcctccaccccattatttttttctctttttttgatccaaacatgtcctccacacacccaaaaaacccagcaacgacaacaacatccactactctcatcgtgctctcaattatactcctttgttttccgacaaccgcaaaaaccgacaaccctccatgcccttatccgtgttacccaccacccattggaacggttactcccaccactccttcaggtggttccactgttccaccagcaccacctcaacccggattactatatccaccacctttcgggaattacccctattaccccacaccacct

SEQ ID NO: 17770 - DNA, 365 bp, Glycine max
  Clone ID: LIB3049-046-Q1-E1-A7
ggcctgcaagtgtgagtgatatttgagcttaaaccctagccgctcttctcttcattcttcactttggaaacaatcataatggcgttctgtaataaggttggaaatgtcttgaggcagggtgctgctcgcagcacacatgcccctgttgcgtccatgcttaattacatccgctgcatgtcttcaagcaagcttttcattggaggcctttcatatggagttgatgaccagtctcttaaggatgcattttctggctttggagatgtggttgatgcaaaagttataactgatagagacagtggaagattaaggggatttggatttgtcaacttctccaatgatgagtctgcaagttcggcactctctgc

SEQ ID NO: 17771 - DNA, 370 bp, Glycine max
  Clone ID: LIB3049-046-Q1-E1-A8
gcttcctccgaaaaccctaacaacacaggcgcagacgcaaacgcaaacgcaaacgcaaacgcaaacgcagagcgtgatccattgacgaagatggtgcagcgtctcacctaccgcaagcggcacagctatgccaccaagtccaaccaacacagggtcgtcaaaaaccctggtgggaagctcgtttatcagactaccaagaagagggccagcggacccaagtgccccgtcactggcaagaggattcacgggatttcacacttgaggcctgcagagtacaagaggtcaaggttacccagaaaccgtaggactgtcaaccgtgcatatggtggagttttatctggaagtgccgtcagggagaggattatccgag

SEQ ID NO: 17772 - DNA, 339 bp, Glycine max
  Clone ID: LIB3049-046-Q1-E1-A9
gctccacagaagcagtagaaaacagaacttcgttgcaaaatatgggtgcttctgacaacaacaacaactttctccaagttgtcttcaataactttgatgttcttgctctgcccttggttacgcttgtttaccctttatatgcttcaattaaggccatcgagaccaagtctactactgatgatcaacaatggctcacgtattggattctgtattccattctcacaatctttgagctcacattcgccaaagttcttgaactgcttcccatttggccttttgccaagttgatattcagttgctggttggttctgcctcacttcaatggggctgcagttgttt

SEQ ID NO: 17773 - DNA, 340 bp, Glycine max
  Clone ID: LIB3049-046-Q1-E1-B1
ggagagagaaagagaaagatcatcagtgagagattcttcattcctcctcccaatccctattccaaattcttatctaagctaacgatgatgatgaattagaaattcgtggtttccctaaaccaaactcgattcaacctctcattttctgaatttcaatggccgatcactcagattcttctcctctcgttcctccccttcccctcaccggaccttctgagatcgacctcgaagctggtccctccgaacaaatccagtgccgaatttgtctcgaaactgacggtagagatttcatagccccttgtaagtgcaaaggtacatcaaaatatgtgcatcgagaatg

SEQ ID NO: 17774 - DNA, 342 bp, Glycine max
  Clone ID: LIB3049-046-Q1-E1-B10
gagggttttggtttttgtaaggcgaaaacagtgagagcggtgtggtgcttagtgctcacaccaattaccaatggcagtggagaagacggagcaagaactccgcaacgagatcgatgagcttcttcgccaacagcgcgagatttcggaaaggcttcgagatcctcgaggtcttcgcagaggtgccttgccgggtcctcctgctctccgcactaacggtgttcgccaacgaccctttattcgccctggagacaggaacgattctgaagatcaacctccttccaagcgtcgactttcatctgccgtcgttaaagtggatgatggggacttgcctgaagatgctga

SEQ ID NO: 17775 - DNA, 331 bp, Glycine max
  Clone ID: LIB3049-046-Q1-E1-B11
gagggttttaggaaacagacacagtcttgcgagtgaacacaagttacaacaatggctttctttggtagaattgggaatttgttacgacagacagcgagcaggcaggttagttcaaaattgcgttcgcccccttcattttttcaggctatacgctgtatgtcatctgccccaagcacaaaactgtttattggaggtgtttcatattctactgacgagcaaagcttgagggaagctttttcaaaatatggtgaagttgttgatgctcggataattatggatcgtgaaactggtagatccagaggatttggctttattacatacacttcggttg

SEQ ID NO: 17776 - DNA, 310 bp, Glycine max
  Clone ID: LIB3049-046-Q1-E1-B12
ggagcaagagtgaagagcgaagagaatggctcccaagggtttaatctttttggctgtgttatgcttctcagcactgtcactgagtcgttgtcttgcggaggataatggacttgttatgaacttctacaaggaatcatgccctcaggctgaagacatcatcaaagaacaagtcaagcttctctacaagcgccacaagaacactgctttctcctggctcagaaacatcttccatgactgtgctgttcagagttgtgatgcttcactgttgctggactccacaagaaggagcttgtctgagaaggaaacagat

SEQ ID NO: 17777 - DNA, 273 bp, Glycine max
  Clone ID: LIB3049-046-Q1-E1-B2
ggagagagaaagagaaagatcatcagtgagagattcttcattcgtcttctcattctctattctaaattcttatctaagctaacgatgatgatgaattacaaattcgtggtttccctaaaccaaactcgattcaccctctcattttctgaatttcaatggccgatcactcagattcttctcctctcgttcctccccttcccctcaacggaccttctgagatcgacctcgaagctggtccctccgaacaaatccagtgccgaatttgtttcgaaa

SEQ ID NO: 17778 - DNA, 368 bp, Glycine max
  unsure (1)..(368): unsure at all n locations
  Clone ID: LIB3049-046-Q1-E1-B3
caaaggggggttcaaaaaattcacccccccttcaagggtttcttccgctcccaaaacaatctcgcctccaacctctctctctctctctctctctctctcttcaattttcgttgcattcgcagggcacttctccgctcgcaatgccgtttccggcgaaaccaacgcgggatttcgacgagtcggcgagtccgtcgaacaacctgtgggtggggaatctggcggcggacgtcaccgacgctgatctgatggagctcttcgccaaatacggcgcactcgacagcgtgacttcctattccgctcgcagttacgctttcgtgttcttcanacgcgtcgaagacgccataaccgccaagaacgctctccaagga

SEQ ID NO: 17779 - DNA, 394 bp, Glycine max
  Clone ID: LIB3049-046-Q1-E1-B4
aggggctcctgcctttgggagaacaaaacagtgttcaactaacccacacctttctccccccaagttgccaatccccccaatttaagggccccaagccctttcaaatccatggaggaggtccccaaccaacttaaaattggaacggcaaaattcaaggtggttccttccccggttccttcatttgcggcccctcctaaccggaacacaaccttgtttgggattgggaatattaccactgtctaattcgccaaaattggctcatcctttggtggacactctccagcaatgaagaaacttgagcatttttcagttcagaaggttacaggggatggacggtgtctgtttcgtgcactggtcaaaggaatggcttacaataagggaaccactctcaatc

SEQ ID NO: 17780 - DNA, 397 bp, Glycine max
  Clone ID: LIB3049-046-Q1-E1-B5
gagaggaaagcattttcatttttcaacttgagagaagaagagaaggggaaaaggaaaaaaaggcaaaatgggtaaggatctgagcgatgagcaagtgtcttcaatgaaggaagctttctctttattcgacacagacggtgacggtcggatcgcgccgtcggagctggggatcctgatgaggtctctgggagggaacccgactcaggcccaactcaaagccatcgtggccgaagagaacctcacggctcccttcgacttcccccgattcctcgatcttatggccaaacacatgaaacccgaacccttcgatcgccaactccgcgacgccttcaaggtcctcgacaaggactccaccggcttcgtcgccgtctccgagctccgccacatcctcaacaac

SEQ ID NO: 17781 - DNA, 387 bp, Glycine max
  Clone ID: LIB3049-046-Q1-E1-B6
gagaggaaagcattttcatttttcaacttgagagaacaagagaaggggaaaaggaaacaaaggcaaaatgggtaaggatctgagcgatgagcaagtgtcatcaatgaaggaagctttctctttaatcgacacagacggtgacggtcggatcgcgccgtcggagctggggatcctgatgaggtcgctgggaaggaacccgactcaggcccaactcaaagccatcgtggccgaaaaaaacctcacggctcccttcgacttcccgcgattcctcgatcttatggccaaacacatgagacccgaacccttcgatcgccaactccgcgacgccttcaacgtcctcgacaaggagtccagaggcttcgtcacggtctccgaactccgccacat

SEQ ID NO: 17782 - DNA, 289 bp, Glycine max
  Clone ID: LIB3049-046-Q1-E1-B7
ggagcaagagtgaagagcgaagagaatggctcccaagggtttaatctttttggctgtgttatgcttctcagcactgtcactgagtcgttgtcttgcggaggataatggacttgttatgaacttctacaaggaatcatgccctcaggctgaagacatcatcaaagaacaagtcaagcttctctacaagcgccacaagaacactgctttctcctggctcagaaacatcttccatgactgtgctgttcagagttgtgatgcttcactgttgctggactccacaagaaggagc

SEQ ID NO: 17783 - DNA, 365 bp, Glycine max
  unsure (1)..(365): unsure at all n locations
  Clone ID: LIB3049-046-Q1-E1-B8
ggaatgggaggaagaataattgtgaggcgagggtaaggtcgcgttgtgttgcgtcgtgtcgtgcgctgttcctctgtttctcgtttttgtgttcagaccgaaccctagctccgcatcgcaaccatgtcgaccaagcaaggtggaaaagctaagcctttgaagaaacccaagtctgataagaaggattacgacgagattgaggtggctaacattcagaagaaaaaggaagaggagaaggcgctaaaggagttgaaagccaaggcgcaacagaagggaagctttggaggttctgggctcaagaaaagtggaaaganataagggctctttatcatgantgtatgcattcaatattgagccctgtaatt

SEQ ID NO: 17784 - DNA, 361 bp, Glycine max
  Clone ID: LIB3049-046-Q1-E1-B9
atctctcgagtcattaaaaactgccatagttgtgggcggaactaacattgaaaagcagaggttcgaactaagagcgggagttgaaatagctgtggccacccctggaagattcattgatcacttacaacaaggcaacacttccctctctagaatttcttttgttgttctggacgaggcagatagaatgcttgatatgggttttgaaccacagataagggaggtaatgagaaatcttccagagaagcatcaaacactgctgtttagtgcgactatgcctgtggagattgaagaattatcaaaggagtacttggctaacccagtgcaagtgaaggtggggaaagtgagtagccaacaactaatg

SEQ ID NO: 17785 - DNA, 296 bp, Glycine max
  Clone ID: LIB3049-046-Q1-E1-C10
gagcgaaacagagagtgatttcagtgagtgatcggtgttcacttgatctcatcataatcgtcagcgtcaattgaagaagatgccgatcagaaacatcgccgtcggaaggcctgaagaggcgactcaccccgacacgttgaaggcggctttggctgagttcatctcaaccttcatcttcgtgttcgccggctcaggctccggcatcgcctacaacaagctcaccgacaacggcgctgccacccctgccggcctcatctccgcctccatcgcccatgcattcgccctcttcgtcgccg

SEQ ID NO: 17786 - DNA, 339 bp, Glycine max
  Clone ID: LIB3049-046-Q1-E1-C11
gatttcaatggcaactcaaggtcaagtcattacctgcaaagctgcggtggcctgggaacccaacaagcccttaactgtccaagacgttcaggtggctccgcctcaggccggcgaggtccgtgtccaaatcctcttcaccgctctctgccacaccgatgcttacacttggggcggcaaggattccgaaggtctcttcccctgtattcttggccatgaagctgcagggattgtggagagtgttggagaaagtgttactaatgttcagcctggggatcatgtcattccctgttatcacgctgagtgtggggagtgcaagacgtgcaaatcagggaagacaaa

SEQ ID NO: 17787 - DNA, 236 bp, Glycine max
  Clone ID: LIB3049-046-Q1-E1-C12
tgggatttcaatggcaactcaaggtcgggtcattacctgcagagctgcggtggcctgttaagcgatcaagtccttacatgtccaacacgttcatgtggttccgcctcacgctgtcgaagtccgtgtcgacctcctcttgagcgcgctccgccacaccgatgcttacacttggggcggcgaggatcccaagggtcccttcacctgtattctcggccatgaagctgcagggattgtgg

SEQ ID NO: 17788 - DNA, 244 bp, Glycine max
  Clone ID: LIB3049-046-Q1-E1-C2
tgggatagctgagagagaaaggaaaggttaactaagaagcaatacttcaatggccacccttgttgttcataaccaaacttcttctgctcaagatgctgaggctctccaacaggctttcaaaggatggggggctgatgacaaggccattatagcaatactgggtcacagaaatgttcatcagacgcaagaaatcagaaaagcctatgaggagatttaccaagaggatctcatcaaacgccttgag

SEQ ID NO: 17789 - DNA, 397 bp, Glycine max
  unsure (1)..(397): unsure at all n locations
  Clone ID: LIB3049-046-Q1-E1-C3
aggggactcccgttaatacaacacaacaaacatacatagagaaaatcaaccaaattaaaatcaacaacttaattaaggcagaccagaagatcaaaagtnctacggagagaaacaaagctcatggctggttgcaaagatcgagggtcttcaggagacagggttatcagggcntgtttgggacgacaagttattatcaggggaattgaacaagaacgaagacccaaagggtgctcatggtggtgaccttaaccttaaccttaacgttagaacaacaccacccatccagagaagtcgctccaacggcggctaccgcaccggaaaagtctcgccggcgatcgagcctcnctctcccaagctctctgcttgcggcttctgcagcgccttcggaaaaacaagg

SEQ ID NO: 17790 - DNA, 402 bp, Glycine max
  Clone ID: LIB3049-046-Q1-E1-C4
gtatccaaagtgaattcaattccctcctaatttcgtcataatggtctcgaaatcctagaagaatttcgggcaattacgcccataagaatcgttgttcccaacgggtatgaacaaaccttaaaacacgatcgatggaacaacatcaccagcatcaaaggaggtgctaaacaaggatgtctaattgaagaagagtgccacacacccacataaccctctcaaaaattaagcaccaacccattggtgtgccctccagctccaaagaaacacgagtagtgccccgaagacacaatttagacccgccatcacaacaagggttcttcaaagttccccatgatctggcttcggtcttcgtcctacgcacacccaaccttccaagaagaacagcacagcaagctcttttca

SEQ ID NO: 17791 - DNA, 57 bp, Glycine max
  Clone ID: LIB3049-046-Q1-E1-C5
tgacgaggagattaaaggaatggtggttcagcataccagcagctcctgttacactgg

SEQ ID NO: 17792 - DNA, 369 bp, Glycine max
  Clone ID: LIB3049-046-Q1-E1-C6
ggaggagaggaggaagaaggagaagctgaagaagaagaacaagacgaatgagaaggaggagagagggaagggagcggtgacgaattcttgggggaactatggtgttattacagagactgatatgtggaccaaacgaccagacttcactgcatggttggcagaacgtaacgcaggtgaatctggagaatatgtccaattgggaagaaccacagatgttcacagaattcatggaggatcacaacacagctacctttccttccacatagtactacaatcgtgatgcttactacacgcgtgaaatggatacggagatgaaataacgttttaagaacgtccaggcaacagagcgcactactttcaatgatgaag

SEQ ID NO: 17793 - DNA, 281 bp, Glycine max
  Clone ID: LIB3049-046-Q1-E1-C8
ggccctcgaaaatcaataagatgatggctatgcagaacatgcctcgtcctacaggtgctgatgctgctggtcatccactatgtgagctagatctccatcctcgagtcgaagagtgggatagacggaagatgtttgggggaccttggtctgatccagatgttttggattctgcaaatgatgcctaagacttgtgagtttaattcctcttgagtccagctcattggacatttgtgatgtctatgttggagccgtcggcttatggctaatgaagctcatgatgt

SEQ ID NO: 17794 - DNA, 334 bp, Glycine max
  Clone ID: LIB3049-046-Q1-E1-C9
gaacgaaaatgagtagtagggtttggtgtgtggtgatggcatcagcgctggcgttgatgttgcaatggcacgaagcattcagctcctacgctggctccgcaagtgcgatcatcgacccttccaaggccaaacaagtttcgtggaaaccgagagctttcgtttacgagggtttcctgacggaattggaatgcgatcacctgatttccatcgccaaatcggagctgaagagatccgcggtggccgataatttgtccggcgagagcaagctgagcgaagtcagaacgagctccggcatgttcattcccaagaacaaggattcaattgttgctggtgt

SEQ ID NO: 17795 - DNA, 310 bp, Glycine max
  Clone ID: LIB3049-046-Q1-E1-D1
gaacaaaaataacgtgacactgctaagagagtgagagaaattggccgccgccgtggccgccgcatagagtggaagtagtaaggatcaatggcagttccagggaagcgcaacggcatgaacgacgacgaagaggaattagacgacaacgcccttttcgaagaacaaggtgccgtcgaagacgacgccgatacccctcctcacctccgcgacctctccgccgccgctcagctaggcgacgtccacgccctccgtatcgctcctgataacttgactggtagtattgatgagccagtggaggatggggatactg

SEQ ID NO: 17796 - DNA, 339 bp, Glycine max
  Clone ID: LIB3049-046-Q1-E1-D10
gagtctcagtttcagtttcggatctctctcttctttcacaccaatttccagcatttgaaacatggcagattcaaaatcaggattgaggaaaccagtgttcaccaaggttgatcagctttgcccggggaccagtgggcacactttaactgtgaaggtggtcaatgctaagatggtgatgcagagaggtcgctctgatggtcctcaatctcgtcaaatgcgaattgctgagtgcttggttggtgatgagactggaatgatcatattcaccgccagaaatgatcaagtggatacgatgacagagggagctactgtgatcctgcgtaacgccaaaattgacat

SEQ ID NO: 17797 - DNA, 355 bp, Glycine max
  Clone ID: LIB3049-046-Q1-E1-D11
caccattgaaattgattctctatacgagggaattgatttctactccactgttactcgtgccagatttgaggagctcaacatggatctcttcaggaaatgtatggagccggtggagaaatgtttgagggatgctaagatggacaaaagaagtgttgatgatgttgtccttgttggtggttctaccagaattcccaaggttcaacaactgctgcaggacttctttaatggaaaagagctttgcaagagcattaatcccgatgaggctgttgcatatggtgcggctgttcaggctgcaatcttaagtggtgagggcaatgagaaggttcaggatcttctcctcctggatgtcactcct

SEQ ID NO: 17798 - DNA, 353 bp, Glycine max
  Clone ID: LIB3049-046-Q1-E1-D12
gatatcagaagctcagacctagggatttcggccgtttgctccccaaaaaggaaagaagcagattctgtcctttgaaatcaacaagaaaagatgtcaggtgaagaggtagctgttgcagttgaggtacctgctacttcaattccaggtgagccaatggacatcatgactgctctacagcttgtgctgagaaaatctctggcctatggtggtcttgcacgaggtcttcatgaaggtgccaaggtgatcgagaagcatgctgcacagctctgtgttctagcagaagattgtgaccaacctgattatgtgaaactggtgaaggctctttgtgcagagcacaaagttagtcttttgac

SEQ ID NO: 17799 - DNA, 363 bp, Glycine max
  Clone ID: LIB3049-046-Q1-E1-D2
gatggaaatttcgagattcctgaaattatggcaattttctatattcttcttcccaacggtcaacatcttttggctgttgctgtggctgttgcaggttcttctccgaaacttcaaagttaacagaaaaaggacctaacaacctaatcctccctcgtcactcattctccaccttcacttaacggtctcaaataattgaagatttatcgaagggatttgtttttgtttgtgtgctgtgttgaaagtgaaattaagcattaatgtgttgggagctatgagattgtattgtttagcttgtggtgagccttaattactgcgttggttagatataaaatgccatctaattacttttcaaggctcggagtt

SEQ ID NO: 17800 - DNA, 391 bp, Glycine max
  Clone ID: LIB3049-046-Q1-E1-D3
gatggaaatttcgagattcctgaaattatggcaattttctatattcgtcgtcccaccggtcatcatcttttggctgtggctgttgctgttgcatgttcttctccgaaacttcaaagttaacagagaaagaccctaacaacctaatcctccctcgtcactcattctccaccttcacttaacggtctcaaataattgaagatttatcgaacggatttgtttttgtctgtgtgctgtgttgaaagtgaaatttagcactaatgtgttgggagctatgagattgtattgtttagcttgtggtgagccttaagtactgcgttggttagatataaaatgccatctaattacttttcaacgctcggagtttcgattcggagattcgttgtggggaaag

SEQ ID NO: 17801 - DNA, 382 bp, Glycine max
  Clone ID: LIB3049-046-Q1-E1-D4
ggctcctcaaacaagggaaaacagagcacaacccaattctccgccctcaactgcaacgatttcccaaacccgacatcaacaaacgtcaactactcaaagaggatgtttggattccggttttttctacgttgtcaatcatggaataagccaggaattcatggacgaggtttttgcgcagagcaagaagttcttctctcttcctcacaacgagaagatgaagactctcaggaatgaacaacacaggggatacacccctgttcttgatgagttgcttgatcctgaaaaccaagtacatggagattacaaagaggggtattatattggagttgaaaaacgtgaagatgattcacaatcgaagaaacctttttatggaccgaataac

SEQ ID NO: 17802 - DNA, 399 bp, Glycine max
  Clone ID: LIB3049-046-Q1-E1-D5
aaggatcagcagggagaattaggtttttagggtttacaccgagcagccacacctcccgcagcagccatggttctcaaaactgaactatgccgattcagtggtgccaagatctacccaggaaagggcatcagatttgttcgtggtgattttcaggttttcctgtttgcaaactcaaaatgtaagaggtatttccacaatcgcctgaagccttcaaagctcacctggactgcaatgtacagaaagcaacacaaaaaggacattgctcaagaagctgtgaggaagaggagacgtgctgccaaaaagccttactctaggtccattgttggtgcgaccttggaagtaatccagaaaaagagagctgagaagccagaagttcgagatgcagctaggggaagctgc

SEQ ID NO: 17803 - DNA, 169 bp, Glycine max
  Clone ID: LIB3049-046-Q1-E1-D6
tcatgaaagtgtcaatttgtaattaagaaaaaagtgagacgtgattggatttcttaaattagatttgttcatatctgtatgttaagatgtatttgatctggatatataggaacatcctagtttcaatatgaattaatgagaattataataaagatgctttgagtcgtac

SEQ ID NO: 17804 - DNA, 400 bp, Glycine max
  Clone ID: LIB3049-046-Q1-E1-D7
gctctcacgatctcaacggagccctctcttcaggtcaccatctagactgcaatcatggctgatggaccacagcatccatcagttgttcagaagctagctggacagtcttacctggtgtccaggcttagccccaactttaactctaggaattattctgcaactggttcttacgtcaatggcggaatgcactcgcctgggttggctgttgtgtcacctgtatctccagttactgtgcatgctccagcagagaaaggagcgagtggatttctagtggattttctgatgggtggagtatccgctggctgtatcgaagacagctgctgctccaattgaacgagtcaaattgcttatccaaaatcaggatgaaatgataaaaagtggtcggctatctgagccatac

SEQ ID NO: 17805 - DNA, 393 bp, Glycine max
  Clone ID: LIB3049-046-Q1-E1-D8
gagagtagcatctgagtcttgtgtttagcgtacgggattgaaaatgagtatgtacggtagggatccgtggggagggccgttggagatccacgccacagactccgccaccgacgacgagcgcagccggaatctccaggagctggaccgaggcgctttacacgagacacaacagagctggctcttgggcgccggagaacagaagaagaagaagaaaacgtacgtacatcttggctgcatcatcgtcagccgcaagctcttcatctggacactcggcactctcgccgtctgcgccttcctcgccggcttcatcaacctcatcgtcaaaaccgtcccccgccatcaccacaagccaccccctcccgacaactacaccatcgccctccacaaagccct

SEQ ID NO: 17806 - DNA, 283 bp, Glycine max
  Clone ID: LIB3049-046-Q1-E1-D9
gatcatagcatcagaatccagtctcaaccgtctggcatcgctcaccagtcagtcccgtatgcatgagtctggaggcctctcgtagatgtcatgcacagaggacagtcccggatagaatcgcagccagacgctcccgtacctgctgtgaagcacattggagcagccaccacagctctgactcttgcgcgcccggggacagcagctgaagatcttaacgttcgtacatcgtggccgcgtcatccccacctgcacacgcatgagttgaagactgtgctctctcccc

SEQ ID NO: 17807 - DNA, 376 bp, Glycine max
  unsure (1)..(376): unsure at all n locations
  Clone ID: LIB3049-046-Q1-E1-E1
tggagagatcaaactcatttttgaccatgcttttgccgctttccaagttcaagatgaagaatattcctgtggtggacttgggtgcaggttcaattgacaacattattacacagtcttctgtaattcacatgttggcagaatgtgctggtcttcagtggtttgagagttggggaaccaagaaactgtctgaagttggtcttcccatggtgacaccanatcatattatcaaggtttacgaaagatgaacagtgcttcaagcatttaaactgatgangaaaaagangaatggagggttgccagtgatggacaggggtagcagcacggcaattggtaacataagcctgaaagatgttcaattcctcctaactgctcctga

SEQ ID NO: 17808 - DNA, 370 bp, Glycine max
  Clone ID: LIB3049-046-Q1-E1-E10
aggggagtggtgcacagtggttggtttcagcagcagcttgtgctgaaacactcaagtgtggggtgctatgtatgccatggtggctttagttcagtgattgaagctatggtcaatgagtgtcaactggtgctgttgcctttcaagggtgaccagtttttcaattctaaactcattgccaatgatttaaaggcaggggtagaggtgaataggagtgatgaagatgggttctttcacaaagaggatatactggaggcattgaaaactgtcatgttggaggataacaaagagcaagggaagcaaataagagaaaaccacatgcaacggagcaagtttttatcaaataaggaaattcagaacaaattcatcacag

SEQ ID NO: 17809 - DNA, 361 bp, Glycine max
  Clone ID: LIB3049-046-Q1-E1-E11
gaggacaggggaatggcaaccatgtcccttacatttgcatttgcacttccttcaatcccctctctcagccaatgccatggccgtgctctttacgtcaagcccctccactgcactcccattcaacaacgccacgttggtgcagaggcaggtattgtttgtgagccttgcaatggaacggggtggttagtttgtgacttttgtaatggccaaaagaccaacgtcaaagccgaaaacaataaacgtatctaccgtagatgtccctcctgcaaagccgttggatatgtcttgtgttcaaagtgcaaggtcttcaaatgcgtcacttttcctaatttcaacgactctgagaactgaattcatcatc

SEQ ID NO: 17810 - DNA, 305 bp, Glycine max
  Clone ID: LIB3049-046-Q1-E1-E12
gttgaggttatggacatggtccagaatgttgggggtggtaagaggtcaacgtatgaccctgatgagcttgaagaagaacagcgagagcgacagaggaagaataaaattaatgtagaattccaaacctttgtgaatcgggtgaatgatctctggggacaacctcaattcaatggccttgacctggagtttgatcaacctcttagagagcttggcttccctggtgtgcctcataaatcttcagtatttatcgtacctacttctgcctgccttgttgaactgatagagaccctttccttgttgtcacg

SEQ ID NO: 17811 - DNA, 402 bp, Glycine max
  Clone ID: LIB3049-046-Q1-E1-E2
ggagaacaaaacaagtgtttcgaatagattatcctaagtctttgggaatagtgctgcaatggcttcaagtcaggaggaggtgacccttttgggagctactggaagcccatttgtgtgcagggttcatattgccctcaagttgaacggagttcaatacaaatatgtcgaagaaaatttgaggaacaagagtgaactgcttctcaaatccaacccagttcacaagaaggttccagtgtttattcacaatgagaagcccatagcagagtctcttgtgattgttgaatacattgatgagacatggaagaacaaccccatcttgccttctgatccttaccaaagagccttggctcgtttctggtccaaattcattgatgataaggtttttggtgctgcatggaaatc

SEQ ID NO: 17812 - DNA, 359 bp, Glycine max
  Clone ID: LIB3049-046-Q1-E1-E3
agggatttttaacctgaaacaaacacattaccaaaccccaataaaactaacctcaatccgcaacccttcggttaaccaaaaatccgaaaatttaatgactcaagggcggcaacaagattaaattaataatttaaccttgcaatttgggttacctggcctaacaattcaaagggtgttagttcaggttcaactagtgagcctacaattcaccttcccctggtgttttgccttaggcgactgccccagatatttcctcaattttccccactccaagagccaatcaaccaatgagttctggtgctccttttggggccgaagcaccagcaccggcaaccagttcaggagagtttgagggcaag

SEQ ID NO: 17813 - DNA, 405 bp, Glycine max
  Clone ID: LIB3049-046-Q1-E1-E4
gatttttatcttgaatcatacacattactagactccagtattactaacttcagtctgcacccttccgtttaaccaaaattctgagagtttagtgactcatggctgccactatgattaagttattattttaccttgccattttggttatcttgcttaccaattcacagggtgtgagttcaagttcaactagtgagcctacaatttcagcttctcctgctgttttgccttaagcgactgacccagatatttcctcaattttccccattccaagagccaatcaaccaatgagttctggtgctccttttggggccgacgcaccagcagcggcatccagttcaggagagtttgagggcaagatctcctctgcttcagctaagttgaattgtgcaggtgccattgttggtg

SEQ ID NO: 17814 - DNA, 397 bp, Glycine max
  Clone ID: LIB3049-046-Q1-E1-E5
gaggacaggggaatggcaaccatgtcccttacatttgcatttgcacttccttcaatcccctctctcagccaatgccatggccgtgctctttacgtcaagcccctccactgcactcccattcaacaacgccacgttggtgcagaggcaggtattgtttgtgagccttgcaatggaacggggtggttagtttgtgacttttgtaatggccaaaagaccaacgtcaaagccgaaaacaataaacgtatctaccgtagatgtccctcctgcaaagccgttggatatgtcttgtgttcaaagtgcaaggtcttcaaatgcgtcacttttcctaatttcaacgactctgagaactgaattcatcatcaactttcttttttcacattttcaatgccaaaattca

SEQ ID NO: 17815 - DNA, 283 bp, Glycine max
  Clone ID: LIB3049-046-Q1-E1-E6
ggagcaagagtgaagagcgaagagaatggctcccaagggtttaatctttttggctgtgttatgcttctcagcactgtcactgagtcgttgtcttgcggaggataatggacttgttatgaacttctacaaggaatcatgccctcaggctgaagacatcatcaaagaacaagtcaagcttctctacaagcgccacaagaacactgctttctcctggctcagaaacatcttccatgactgtgctgttcagagttgtgatgcttcactgttgctggactccacaaga

SEQ ID NO: 17816 - DNA, 392 bp, Glycine max
  Clone ID: LIB3049-046-Q1-E1-E7
gggggttattggacacattcttcagcgactgcgtttttggatcggaacctcttctgcggcgtagcaatgggacactccaacgtttggaactctcacccaaaaaactacggtcctggttctcgcacatgccgtgtgtgtgggaaaccacatggactgatcaggaagtatggccttatgtgctgcaggcagtgcttccgtagcaatgccaaggaaattggcatcatcaagtatcgctaaaagagcacttgtcaactacggaccaatattgtgttctggcactaggatgttttgaggatgttatgtctgaagaaacttgagactttcttttttcatctaattaactatcagacgtaatttgtggtactaagaatacttttatataaattgttttg

SEQ ID NO: 17817 - DNA, 378 bp, Glycine max
  Clone ID: LIB3049-046-Q1-E1-E8
ggttctagtgtatgcgattgttgtgactcgttcttcttcgtcgttatcttcttcttttgttgtttgtgtgtttgttttttctctcacctgaaaatgtcttgctgcggtggtaactgtggttgcggaagcgcctgcaagtgcggcaacggctgcggaggctgcaagatgtacccagacttgagctacaccgagtcaaccaccaccgagaccttggtcatgggagtggcaccagttaaggctcaattcgagagtgctgaaatgggtgttcccgctgagaacgatggctgcaaatgtggagctaactgcacctgcaactcctgcacttgcaagtgaggtgttggagagctaaagcttcaagcagaaatggcccttagaaat

SEQ ID NO: 17818 - DNA, 326 bp, Glycine max
  Clone ID: LIB3049-046-Q1-E1-E9
ggtgctaatcttatcttatccctctaatcactctagctgttgcaaatttctactatttttcaatggcttctgcagatgttgagttccgttgctttgttggtgggcttgcttgggtcaccggcaacgatgccctcgagaaagccttttcaatctacggcgacatcgttgaatcgaaggttatcaacgaccgtgagactggaaggtccagaggattcggatttgtgaccttcgcctcagagcagtcaatgaaagatgcgatcgcaggaatgaacggccaggaccttgacggtcgtaacatcactgtcaacgaagctcagacccgcgcc

SEQ ID NO: 17819 - DNA, 431 bp, Glycine max
  unsure (1)..(431): unsure at all n locations
  Clone ID: LIB3049-046-Q1-E1-F1
gatatgcaccctgtggggaaaaacaanacacacaataataaacaaaataaaaactttctcctcctccttcaatgtgacaattggtggtggttgttgccctttggtccgtttccccccaatgccaaaggttggtctttcgagaaggccttcaatcgctttatccccgtatccggcttttctccttggtgctggttcctgtcctgccgctttttctcaacaaaccaacatccatcaatgatgataacnaagccaattaactttgttagcctctcgctgtgtctgaaaactcttaaaagtttggccaagactttggagccacagtttggagactttgtgttggcaacgggttaattgggtttcttggactcagcatgtggaaaccgttggtgggggttggaggtggaggcattttcgttcccatgctcaatctg

SEQ ID NO: 17820 - DNA, 343 bp, Glycine max
  Clone ID: LIB3049-046-Q1-E1-F10
gatcacaaaccaaacaacttctaacacatacactactctctctctctctcttattgtatggccgccaattccagtagccgagggatcaccgccttagggaagcgagtcgccaaccggatctggacttccaacgcacctcctctcacttcaaggaggggagcatacagtagcggctcagtgtacgacaagaaccctgatgatgagatccagtctgggcaggtcccagacgatgtgatccaggcggcaacacaatccggcaaatactgggccccacatccacagactggggtatttgggccccccggaggaggtgaccaaactgcttctgccattcactctgatg

SEQ ID NO: 17821 - DNA, 265 bp, Glycine max
  Clone ID: LIB3049-046-Q1-E1-F11
gaacgcagggcaggggcataagtggtagttaacagcaagagagaggaaagcagaatgaagaagggaagggcgttgagcgtggcaattaacgtgttgtgtttggccaaaatttgcaatgccattgaatcaacgcaacacacaattatacactccgaatccgaattccaaattaaggtccaacctacctccggttggatgttcgctcctggcctccaaaattccctctaaaaagccaacttgaatggcttccaaaaggtggtccaat

SEQ ID NO: 17822 - DNA, 315 bp, Glycine max
  Clone ID: LIB3049-046-Q1-E1-F12
gatcactcggtggggacagaagtggcagttagttgctctgcagaggaatcctcatctggttcagcaacggcatttatcgttgcaatctacgtatagtatgtggaagtttggtgtaatacaataggattcttccgatcaggttggtcacagtcgaagtccagttcacacatggagcgctgacgatgtgccgttcagtgatcctcacgaggatgctagagatgtttcggaaagttcacctgcaatgacatccagatctgcttccacttcacatgacgcgccaaattgggtttcgttccgtatccattcgctaatctc

SEQ ID NO: 17823 - DNA, 208 bp, Glycine max
  Clone ID: LIB3049-046-Q1-E1-F2
aggggagcccaatctattcttcatgttcatcatgcctggagctgttatggttttggttttggcttcttccatcttgaactcttctcatcgtggcgagtgacacgactctgaggaccaatgatgtcgattatgacgcttctacggctcaccaagagcgtggttaacctgtccaatacgttcttcgcataatcgctttacacaaagctct

SEQ ID NO: 17824 - DNA, 385 bp, Glycine max
  Clone ID: LIB3049-046-Q1-E1-F3
aggggcacaaatttgttgagacagctagaaaccataagatgaaaatgaaaattcctgttttgtttgtttccacagttttggtatcatatgaaatccattgctcaaactaccacgaatttccctctcaaatgaaaactgggtttggtaggcaatacaccaatgaggtggcatgtgccagttggaagctttgcgtggaagcaaacaccctactcaagtggcaaactgttcctgcagcttgcggagagtatatagctgactacgttctaggagaccaatatagattcagattcaaaacagttaaccaacaagcttatttctatgctaaatccctcaaactcatcaacaaagatgtcgttgtcttggacgttgacgacactactctctc

SEQ ID NO: 17825 - DNA, 381 bp, Glycine max
  unsure (1)..(381): unsure at all n locations
  Clone ID: LIB3049-046-Q1-E1-F4
agggggatgattccaaacgttcaaatccccaactgggaagccggacggagaagagcaatccccccgtcgatttctttcaatgctgacacgtgctcattaatctcctccgancatttccgaatgttccagttcaaggtgcggaactgtccacgtggcaggtcncacgactggaccgagtgtccctacgcccaccccgccgagaaggctcgccgccgtgacccccgcaagtaccactactcaagcacctcctgccccgattaccggaaggggaactgcaagaggggcgacacgtgtcagttcgcgcacggcgtcttcgaatgctggctccacccttctcgctaccggacccagctctgcaaagacggaacaaattgccgccgc

SEQ ID NO: 17826 - DNA, 387 bp, Glycine max
  Clone ID: LIB3049-046-Q1-E1-F5
gattctgagtaatcacaaacacaactaagaagccaatccaaacgaatctgcggtgatccaaagaacctccactccccaccatcacatgtcacgtcgcccccacgcagcgccgccgccgccgccgcggtcactccacaagcaacagtcgtggtcgccggacatgctccgcgacgaggcgtggcagcggcggaaggacaacaaccaccccgtgaaccgccgccagcaccggctgagcaagagcctctcggaggacgacttggacgaactgaaggcgtgcttcgagctcgggttcgggttcgattcgcccgaaatcgacccgaaactgtcgaacacaatccccgctttggagttgtaccatgccgttaacaaacagttacaacaccacag

SEQ ID NO: 17827 - DNA, 305 bp, Glycine max
  Clone ID: LIB3049-046-Q1-E1-F6
gagggttattcattataatcactactaataagccattccaaaggaatctgcggtgatttatagaacctcctttactcattattgtatgtcgcgtcgccttgacgcagtgcctcctctgttgccattgtcactccacaattaatactcgttgtcgctggacattttctacgacgatgcctggtagctgctgattgacaccaatcaatccgtgaattgtctccacgcatctcgcttaacactatcctttcggacgactacttggaccaattgaaggcgtttttagagctctggtttgggttttattc

SEQ ID NO: 17828 - DNA, 210 bp, Glycine max
  Clone ID: LIB3049-046-Q1-E1-F7
gattctgagtggtcacaaactcaactaataagccaatccacacgaatctgcggtgatccgtagaacctccattccccatcattatatgtcacgtcgcccccacgcagcgccgccgctgtcgccgctgtcacgccagaggccacactcgtggtcgccggacatgcgccgcgacgaggcgtggccgctgccgatggacaaccttcaccccgt

SEQ ID NO: 17829 - DNA, 406 bp, Glycine max
  Clone ID: LIB3049-046-Q1-E1-F8
ggttctagtgtgtgattgtttgttgttgtaactcgttcttcttcttttgttgttctgtgtttgtgtttgttttttctctcacctgaaaatgtcttgctgcggtggtaactgtggttgcggaagctcctgcaagtgcggcaacggctgcggaggctgcaagatgtacccagacttgagctacactgagtcaaccaccaccgagaccttggtcatgggagtggcacctgttaaggctcaatttgagggtgctgaaatgggtgtgcccgctgagaacgatggctgcaaatgtggaccaaactgctcctgcaacccctgcacttgcaagtgaggtgttgggagagcaagcttcaagcagagatagcccttaattaggaataatgataaactattaatgtgtagctaaaaa

SEQ ID NO: 17830 - DNA, 361 bp, Glycine max
  Clone ID: LIB3049-046-Q1-E1-F9
ctccctcattttttctcttctctctttctcccatgcttctgtcctagatttctgtgttgcagattatgcaggtcctattggacctgcaggatattcctgcaagaagccttcaaaggtcacagcagatgattttgcttacagtggccttggcattgctggtaacacctcaaacattatcaaagctgcagtgacccctgcatttgatgctcagtttgctggtctcaacggtcttggcatttccgcagcacgtttggacttagcagcaggtggagttataccacttcacactcatcctggagcttcagaattacttgttgtaattgaagggagcatcctagctggattcatttcttctgccaac

SEQ ID NO: 17831 - DNA, 409 bp, Glycine max
  unsure (1)..(409): unsure at all n locations
  Clone ID: LIB3049-046-Q1-E1-G1
catgagtgaggggttactggaagactgtgctcagcttgtcaaagcaaattcaattcaaggaaataaagtgaacaatgtcgatgttgtttacacaccctggtctaatttaaagaaaactgcttcaatggatgttggccaagttggttttcacaactcaaaaatggttcgaactgtaagagttgagaagaggataaatgagattgttaacaggctaaacaagacaaaagtggaaaggaaacctgatttgaaagctgagcgagaagcagttaatgcagctgagagagctgagagaaaacaacaactgagagaaaaaaaacgtcgggaggaattgggaaggcttgaaaaggagaaacaaacagagcttaagagctacaaaggtttgatggttgcagaanatatgacatccaac

SEQ ID NO: 17832 - DNA, 344 bp, Glycine max
  Clone ID: LIB3049-046-Q1-E1-G10
gggtttgagcgtattgaggcaatgacgcgaccttacggtgtgaaggggggccggaagcgaaagcacgccgaacccaaatacgacgaagaagaccaagaaacgcaaccaaaaaaagctgtggtggaggtggagcacaacaaagaagaagaacaacagcaacaaacaccagagggggatgaattgagcggtatcccaattacgcccagtgagaacaacaccaacaaacccaacgtcatcttcattctagaaaaagcttctttggaagtcgccaaagtcggcaagacatatcagctcttaaactccgacgaccatgccaatttcctccgcaaaaataacaagaatcc

SEQ ID NO: 17833 - DNA, 318 bp, Glycine max
  Clone ID: LIB3049-046-Q1-E1-G12
gacacgtctgtggctaaagaagcaccagtaatttcatcggcacaacaatcatcatctggttcaaccaatacatttttggatgagccctatgacgatgatgcggatgattggttgaaacaagaggatacttctgaaatggttggtcccagtggaacttcagttcacaccgggaatgacgacgatgtgtcattcactgatcctgaggaggatgatggtgatgtacatgaaagttcgatgacaactagatcaagctctgattcatcaacagaagactctcgagattgggttcagttacgtataacttcgccgaactctgat

SEQ ID NO: 17834 - DNA, 394 bp, Glycine max
  unsure (1)..(394): unsure at all n locations
  Clone ID: LIB3049-046-Q1-E1-G2
gaaggaaagggaagccaaagcgaaaccctaaccctaacggagagatggcggagcacttggcatcgatattcgggacggagaaggacanggtgaactgtccgttctacttcaagatcggcgcgtgcaggcacggcgaccggtgctcccggcttcacacgaagcccacaattagcccaacgttggttctgtcgaacatgtaccagaggcccgacatgaacatgaacatcatcaccaaccccgatcagccccagccccaatctctcgaccccgataaggtccaggatcacttcgacgacttctacgaagatctctttgaggagcttagcaagtacggccccattcagagcttgaatatttgcgacaacctcgccgatcatatggttggaaatgtgta

SEQ ID NO: 17835 - DNA, 361 bp, Glycine max
  unsure (1)..(361): unsure at all n locations
  Clone ID: LIB3049-046-Q1-E1-G3
gacaaaacaacacgaactcctggaaaatcacggacgtccaccccgaaccaaatgtcacacctaacctttcctcactgttcctttccccctttcttttgtttgttttcttacttccaagctccaccttctccaaatcanaacagaggcttttttgttttgttttcttattctgctgtttatttattctccttgtcgaggaaaggatccaccccatcacccatgtaacaacaacaacaatccatcatcatctcctgggaacctgcgattcgaggtttccgaggttaatcgggtactccgagaaaaagaagaacaagggtctttttatttatttatttttcattttaaaaattgaatttttggg

SEQ ID NO: 17836 - DNA, 377 bp, Glycine max
  Clone ID: LIB3049-046-Q1-E1-G4
gactctaaggcagacaagaaccctaactctgttgtcttgtcttcttcgtttggattaaggttgcaggtaatgctatggcgaacaaccatgaacctaatctcatagacttctcctccgtcggtgaaccctcgaaggttctcatggacaactatgtgacgatactcacagaatttgtggcctccaacgatcaaggaaatccatgaagtctcacttcaaggttcactacgtcctgatggcctctacatatttccacatcttgcacccaaagactatgcctcaaccacctgcttacattcaaattctactgttgattatgtgattacttcttcttctagttgttctaaaacaaagttactatttcattgtaaatccagttc

SEQ ID NO: 17837 - DNA, 399 bp, Glycine max
  Clone ID: LIB3049-046-Q1-E1-G5
ggaacggaaaagcactggcgcagctaccctgaggcttctcttctcttctcttctctgtcgtgagtcaccatggtgagggttagtgtgctgaacgatgctctgaagagcatgtacaatgctgagaaaaggggaaagcgccaagtcatgattaggccatcctccaaagtcattatcaaattccttttggtgatgcaaaagcacggatacatcggagagtttgagtatgttgatgaccacagggctggtaaaatcgtggttgaattgaacggtagactgaacaagtgtggggttattagtccccgttttgatgtgggcgtcaaagagattgaaggttggactgctaggcttctcccctcaagacagtttgggtatattgtattgactacctctgctggcatc

SEQ ID NO: 17838 - DNA, 406 bp, Glycine max
  Clone ID: LIB3049-046-Q1-E1-G6
ggaacaagcaaaattaagcacaaaagcccaaccctctctctcgctgctggtctcccccatttggcattcgcagatcgaatacgagtaatttcactgaatcttattgaagatgtttctcacaagaactgagtatgaccgaggagtcaacaccttttctcctgaaggccgtttatttcaggttgaatatgcaatcgaagccatcaagctgggatcaactgcgattggattgaagacgaaagagggtgttgtccttgcagttgaaaagcgcatcacttcaccactgctggagccaagtagtgttgagaaaattatggaaattgatgagcacatacgatgtgcaatgagtggattgattgctgatgctcgaacacttgttgagcatgcacgggttgaaactcagaatcat

SEQ ID NO: 17839 - DNA, 432 bp, Glycine max
  Clone ID: LIB3049-046-Q1-E1-G7
acccaagcgctcaatacaggcgtcagcaacgaacgagtcagcggagaagtccggcgagaagacgaaagaacggagccctctctctcgccgctggtctcccccacttggcattcacagatcgaagacgagtactttcactgaatcctactgaagatgtctctcacatgaactgagtataatcgatagagtcaacaccttttctcctgaaggccgtttatttcaggttgaatatgcaatcaaagccatcaagctgggatcaactgcgattggattgaagacgaaagagggtgttgtccttgcagttgaaaagcgcatcacttcaccactgctggagccaagtagtgttgagaaaattatggaaattgatgagcacatacgatgtgcaatgagtggaatgattgctgatgctccaacacttgttgagcatgcacg

SEQ ID NO: 17840 - DNA, 101 bp, Glycine max
  Clone ID: LIB3049-046-Q1-E1-G8
ggagagaatcttgtgcagcaacgcagtgttgtgagtgagttgggtctggtctttggtatttggcagtcgtatattacgctcgggttctttcactgtatcct

SEQ ID NO: 17841 - DNA, 346 bp, Glycine max
  Clone ID: LIB3049-046-Q1-E1-G9
ggttctagtgtgtgattgtttgttgttgtaactcgttcttcttcttttgttgttctgtgtttgtgtttgttttttctctcacctgaaaatgtcttgctgcggtggtaactgtggttgcggaagctcctgcaagtgcggcaacggctgcggaggctgcaagatgtacccagacttgagctacactgagtcaaccaccaccgagaccttggtcatgggagtggcacctgttaaggctcaatttgagggtgctgaaatgggtgtgcccgctgagaacgatggctgcaaatgtggaccaaactgctcctgcaacccctgcacttgcaagtgaggtgttgggaaagcaagc

SEQ ID NO: 17842 - DNA, 390 bp, Glycine max
  Clone ID: LIB3049-046-Q1-E1-H1
cgatcatgatgctgggagcatgatcaagtaccacaagaacttaacttccaaaggttatcgtgcacttatattcagcggcgatcatgacatgtgtgttccatacacggggagtcaagtgtggacgagatcagttggatacaagattgttgatgaatggaagccttggtcatccaatggtcaagttgctgggtatacacaaggatacgacaaaaatcttacttttctgaccgtaaagggatctgggcatactgttccggaatataaaccacgagaggcattggacttttacaaacgctttctcgctggattgccaatatgatatagaggaaaagagaagatggagtaacgctgcttcctaatttgtttgtactttgttaataataatgattt

SEQ ID NO: 17843 - DNA, 363 bp, Glycine max
  Clone ID: LIB3049-046-Q1-E1-H10
ggggggggggggtggggcatgttgttatgttgatgatgccgtacgtggaaaaagcaagcaaactggagtaggtcacggccaacgaagatagagatgatttggattcctcaattttggatgggaaatcgaccagaccaagaacattgatgtgcctgaattgtgtttagttatttgtttgtaccctggtgtttataaatctgacaaggttgatcctgaagtctaatcaaaattcgattggttttttcagaaggatgtggtggggaaaaaaagatggaggaaaggaagggaaagaaccatcttttcttcttttggggatgtaatggactttacctaaatgttctttctcctcaacctttcctttta

SEQ ID NO: 17844 - DNA, 362 bp, Glycine max
  Clone ID: LIB3049-046-Q1-E1-H11
gacagcgcaacagagagtgatttcagtgagtgatcggtgtgcagttgatctcatcataatcgtcagcgtcaattgatgaagatgccgatcagaaacatcgccgtcggaaggcctgaacaggcgactcaccccgacacgttgaaggcggctttggctgagttcatcacaagcttcatcctcgtgttcgccggctcaggctccggcatcgcctacaacaagctcaccgacaactgcgctgccagttctgacgggctcatcaccgccaccatcgcccatgcattcgccctcttcgtcgccgtctccgtcggcgccatcatctccggcggccacgtcaaccccgccgttaccatcggcgccctcgt

SEQ ID NO: 17845 - DNA, 377 bp, Glycine max
  Clone ID: LIB3049-045-Q1-E1-A5
ggcagtcaccacagagagagaggttttgatgcaacgctgtcactgagaaaggatctctatctacgaaggagcggaataaaacccttctctctgtgattaagagaatggcttcagatcggaaacttcacacttttgaggaggtggcaaagcacaaccagaccaaggactgctggctcatcatttctggcaaggtgtatgatgtcacccctttcatggaggatcatcccggaggtgatgaggttttgttatctgcaacagggaaagatgcaaccaatgactttgaagatgtggggcacagtgattctgctagagatatgatggaaaaatactacattggtgagattgatgcatcaaccgttccactaaaacggacctac

SEQ ID NO: 17846 - DNA, 334 bp, Glycine max
  Clone ID: LIB3049-043-Q1-E1-B4
gatacaacatggatccgtgccccttcgtgcggatcctcgtcggaaacctcgccgtcaagtccccggcatcatcaaagccctcttctttctccggcaaagtccacccttcgagttcccccttcttctgcaagatcctactccagggacttgattcgaattccacttctcctagagtgtccagtgtccctctgatatcagactccgacccacaccctcactccttcgccgcctcctttgatttctccaaagcctaaatcttgaaagcctcgaggaagcccctgatgaagatctccgtctacaagggccccaccactcgctcctgcgtcttcacctc

SEQ ID NO: 17847 - DNA, 333 bp, Glycine max
  Clone ID: LIB3049-043-Q1-E1-B5
gaaatcaggagagcatgcatatgaacatgatgatgaagaaggtgtgtgggtttgcaatagtgatggtggcagtgcagcttctggtggaggtgagtcccaaggcagaggctgtgacttgtacccctgtggagctgagtccttgtttgggggcaataacttcctctcaaccaccatcaacaatttgttgccagaaggtgagggaacaaaggcaatgcctctgtggttacctcaaaaacccaagtctaaggccatatgccaattcgcctggctccagaagggttgctagctcttgtggggttccctttccaacttgttaattaccttcatatcata

SEQ ID NO: 17848 - DNA, 321 bp, Glycine max
  Clone ID: LIB3049-043-Q1-E1-B7
gactcaccacttcaaaacactcataacacaaagcacaaagcaaagctcatccttgagttaaaaaatggcagcagcttcttccatggctctctcatccccatccttggctggcaaggccgtgaagctgggcccatcagccccagaagtgggaagggtgagcatgaggaagaccgtcaccaagcaggtctcctcaggaagcccatggtacggcccagaccgagtcaagtacttgggcccattctctggcgagcccgcgtcctacctaaccggtgagttcccaggcgactacggctgggacactgctgggctttccgcagaccc

SEQ ID NO: 17849 - DNA, 262 bp, Glycine max
  Clone ID: LIB3049-043-Q1-E1-B8
gggagttgagttgagaaggaaaggctgaagaacacatagagagagagagagaagtgcagaaaaaatgagactgttcgatccatggcctgttttcttcaagagagaatggaagcggaattggcccttcttggttggattcgccagcaccggaactctcatcaccaaactttcccttggtctctctgaggaggaagccaacaagtcgaaatgcgtccaggcacacaagaggtgacctgagaggggaagagcggcagtggctttg

SEQ ID NO: 17850 - DNA, 351 bp, Glycine max
  Clone ID: LIB3049-043-Q1-E1-B9
gacaacactcatagtagagtaaccaaaaggagagtgcaataactcgttgtacattcctagtgtgtgggagagacatggctaagatgtgtgttttggtgttggttcttgctctggctgtggccacaagtgccagaaacgttcccaaccccaaggatgctggtcttaaggaccagaagaacttcatcagctatggtggagttggtggttattccgggattgggaacaatggactgccttttggaggagctggtgccggaataggtggtggttttggcggaggtggtggacttggtggtggcctcggcggtcctaccggtgggatcggagggtttggcggtaccggtagcggtg

SEQ ID NO: 17851 - DNA, 325 bp, Glycine max
  unsure (1)..(325): unsure at all n locations
  Clone ID: LIB3049-043-Q1-E1-C1
gaagcagaagaaattggcttatgggtcggccattagggcgcttgattttgctatgacgaagtacccgccggcttgtgagcgttttgtggatgttttggggttgaagaccgcgtttgcggctttcatgggtaagattcctttaagtaagaagaacaagaaagaaaggtaccaagaggatttggaggagcgcattgtgtcactgattgcgtcattatttggtggaatcttgaggggttctangagagaaagattattaagtaaatttgttgaaaatgagtgtgagaagatagacaggctaatggaactatacatcagatattcagat

SEQ ID NO: 17852 - DNA, 169 bp, Glycine max
  Clone ID: LIB3049-043-Q1-E1-C10
cccactcgtcagtcccgtcggttcagctcctacgtaagcgtacatgggggctgcgaactctactctctgtgttcgcatgttcagttcactggcagtatgagcgacggctgactgacagtgggtgcactagcgttgcccccctcgctaacagggcgtccgcctcctcttt

SEQ ID NO: 17853 - DNA, 364 bp, Glycine max
  Clone ID: LIB3049-043-Q1-E1-C11
gcagctcatcgaggatgtcgaaggaagtgagccagcagaggaaggactacgtagaccctccgccagcccccctcatcgacttggccgagattaagctctggtccttctacagagccctcatcgccgagtttatcgccacactcctcttcctctacgtcaccgtcgccaccgtcattggccacaaaaaacagaccggaccatgtgacggcgttggccttctcggcatcgcatgggccttcggtggcatgatctttgtcctcgtctactgcaccgccggcatttctggtggacacatcaaccctgcggtgacttttggcctgttcctggcccgctaggtgtctctcattcgtgccctgttctacat

SEQ ID NO: 17854 - DNA, 384 bp, Glycine max
  Clone ID: LIB3049-043-Q1-E1-C12
ggcgtcgctccgcaccagtttcaccgcacgaatatcttgttgtttggagcgatccgagaaaaactctgtaaacatgttggtttaccaggacctccttacaggtgatgagcttctctctgactccttccgttacaaggaaattgagaatggaatgctgtgggaagttgaggggaagtgggttgttaaaggagcagttgatgtagacattggtgcaaacccttctgctgagggtggaggagaagatgagggagttgatgatgcagctgttaaggttgttgacattgttgacacattcagacttcaggagcaacccgcattcgataagaagcagtttgttaccttcatgaagaggtttatcaagaatttgactcccaagctcgatgc

SEQ ID NO: 17855 - DNA, 317 bp, Glycine max
  Clone ID: LIB3049-043-Q1-E1-C3
gaggaactaggaactagaaccttcatcaaacaaatttgtgagagaaagtgttcctcaattttggaagagcagagaaaacaacaaaggctaaaaggaagggaaaagaaacaccaaatttgctaaacctttgtcactctactcactgcaagtgcaacatcctctctttcccatggattaccttaaatctgcgcttccttctcaaataatgtcagaacgaggctccaatctggttgttatcaacccaggttctgcagatgttaggattggcttgggttcacaggataccccttttaatattcctcattgcattgcgcgcc

SEQ ID NO: 17856 - DNA, 291 bp, Glycine max
  Clone ID: LIB3049-043-Q1-E1-C4
gctctcactctccatataacatttcacattggcaacctttctcattgattccattgaacagagtgtgaacaggaagagatagatagagaggcaaagacaaacatgtaatgcaaatgcaaatgcaacaataatcccctttccttcccttcccttcccgacaaaaccctagaggagtacactacattacacactatctatcaactgtggaaattcaattaggaatgccgtttctgaatatgccataaagccacagccactttctgtgtcggcccccgtccgtaccaattttcc

SEQ ID NO: 17857 - DNA, 341 bp, Glycine max
  Clone ID: LIB3049-043-Q1-E1-C5
gatgaagacgacgacgacgacgacgaagatgacaaggaagacgatgctcaaggtggtgctgagggttcaaagcagagcagaagtgagaagaagagccgaaaagcaatgttgaagctgggactgaaacctgttactggtgttagtagggtcacaatcaagagaacagagaaatattcttttcttcatctcaaaacccgatgtcttcaagagtccaaattctgagacctatgtcatatttggggaggcgaaaatagaggacttgagctctcagttgcagacacaggctgctcaacagttcaggatgccagatatgggatctgtaacggcaaaacaagaagatg

SEQ ID NO: 17858 - DNA, 320 bp, Glycine max
  Clone ID: LIB3049-043-Q1-E1-C6
ggtgaaggaacctcactctgttgctgcattcccccatggcttctgcttcagattttgcgttagcggtttcttctgaactcgagtcagttttgaggctgaagactgttaactactttgttacgaggaggccatggctcgatctttatggagttaacgtgagacctgttgcgcctgttgggagtgcaagtaggaggccttacgtggatcctgcacttatacatcgttccttgcctgatgagctgctttttgaggtttttgctcgaatgactccatatgatttggggaaggcatcttgtgtttgtcgaaaatggaagtacaca

SEQ ID NO: 17859 - DNA, 345 bp, Glycine max
  Clone ID: LIB3049-043-Q1-E1-C7
cacagacagttacatgagatcagctattgattactttgaggtgacaagagcaaggccttctcttgcttgcacccttctcatcacaacttggtctaggctttcctttcacaccactgattttggatggggtgaccctgttctgtcagggccagtgtcactgccagagaaggaagtgattctgttcctctctcatggacaagagaggaggaacatcaatgtgcttcttggtttgcctgctcctgtcatgaagattttccaagatttgatgcagatgtaattagggtcatacatatattatatcttatgtgattatttttctaagcttattattattagtagtagtag

SEQ ID NO: 17860 - DNA, 281 bp, Glycine max
  Clone ID: LIB3049-043-Q1-E1-C8
ggtagtagtagggggagcgggatttgaaattcaaaaaaacaaggaagccgttggagatggagatggagaagacgggcgcaggagtagcactgttgtcggcgaaggaggcattcgagaagcttgagaaggtcggagaagggacatacgggaaggtgtacagggcacgagagaaggccaccggaaagatcgttgctctcaagaagactcgcctccacgaggaccaagaaggcgtccctcgcaccactctcccgcgaggtttccatcttgcgaatgctctctcg

SEQ ID NO: 17861 - DNA, 73 bp, Glycine max
  Clone ID: LIB3049-043-Q1-E1-C9
aaatttccccacccgaaatgccaatgggaaaccccctggtaccgggccattaaccccgggggtgttgggggta

SEQ ID NO: 17862 - DNA, 336 bp, Glycine max
  Clone ID: LIB3049-043-Q1-E1-D1
gagggggttggttcatttgatctgcgagtggagaagagaatcgtgatgggaggaggacacggtcacggcaccacctacaaaggagttaccgttcatcacccaaagcgctggcacactatcaccggcaagggtttgtgcgcggtcatgtggttttgggtattctacagggcagagcaagacggtcctgttgtattgggctggaggcatccttgggagggtcatcacgatgatcatggcaagggccattaagcattccttaggcatgagctccaagaacaggaagaacagaatttgaagtgtctgttgctgtgggtgtgctgttagttgaaatgttta

SEQ ID NO: 17863 - DNA, 353 bp, Glycine max
  Clone ID: LIB3049-043-Q1-E1-D10
gaaggacatcatcatggttgaccacatgaagaaaatgaagaacaatgccattgtttgcaacattggtcactttgacaatgagatcgacatgctggggctggagaactaccccggcgtgaagcgcatcaccatcaagccccaaaccgacagatgggtcttccccgagaccaatgtcggcatcattgtcttggccgagggtcgtttgatgaacttgggatgcgccacaggacaccctagttttgtgatgtcctgctccttcaccaaccaggtcattgctcagcttgagttgtggaaggagaagagtaccggcaagtacgagaagaaagtttacgttttgcccaagcaccttgatg

SEQ ID NO: 17864 - DNA, 381 bp, Glycine max
  Clone ID: LIB3049-043-Q1-E1-D11
ggagaaggaaaggctgaagaacacatagagagagagagagaagtgcagaaaaaatgagactgttcgatccatggcctgttttcttcaagagagaatggaagcggaattggcccttcttggttggattcgccatcaccggaactctcatcaccaaactttcccttggtctctctgaggaggaagccaaaaagtcgaaattcgtccaggcacacaagaggtgacgatatactcaccaaaccctagcttttttctcacgcattctcgctatttttttatatatatatttccttgatgtgaatgtgcatcaatgtgcttctcgtttgtccgactatttaaatttgaaatttcaactcatttgagttcaatgcgtgtatttggtac

SEQ ID NO: 17865 - DNA, 378 bp, Glycine max
  Clone ID: LIB3049-043-Q1-E1-D12
gagagagcattattcgatttcgtattgcactctctcatctcatctcccattctcattctagccaacatccccttttcttcttctcacttctctccaagttttttcttcacatttctctgcctttgatctgcacacacaacaacatccctctaaaaaacatagagggataaaataaaaacatgaagaaatttgtactcaagttagatttgccagatgacaaggcaaagcagaaggccctgaaaacagtttcaacactttcagggattgatgccatctctatggacatgaaggagaagaaattaacagtgataggaacagttgatccagtgaatgttgtgagcaaactccgcaagtaatggcagacagacgtactctcag

SEQ ID NO: 17866 - DNA, 349 bp, Glycine max
  Clone ID: LIB3049-043-Q1-E1-D2
ggaacctttgcattctattcattcaagattcagcaagtgcgttttggaagcagagaccgaaatacttcgagatggcccgtacaaagcaaactgctcgtaagtcaactggaggaaaagctcccaggaagcagcttgcaaccaaggctgcacgtaagtctgcaccaacaactggtggtgtgaagaagcctcatcgttatcgccctggaactgttgctcttcgtgagattaggaaataccagaagagcactgagctcctaatcagggaacctccgttccagaggttgggtcgtgaaattgcccaggatttcaagactgatctgcgtttccagagccatgctgtgcttgcagt

SEQ ID NO: 17867 - DNA, 335 bp, Glycine max
  Clone ID: LIB3049-043-Q1-E1-D3
cactactcaggcacctcctgccccgattaccggaaggggaactgcaagaggggcgacacgtgtcagttcgtgcacggcgtcttcgaatgctggctccacccttctcgctaccggacccagctctgcaaagacggaacaaattgccgccgcagagtgtgcttcttcgcccacaccagcgaccaactccgcgtcgtgacggactcatcgtcgtcgtcgtttgtttcctctcccacttcggtgctcattaactcttcgttctccgattcttcgccgtacagcttcgtccgcggaatagttaaactggatgaggaagggtcgtattcgggtctgacccg

SEQ ID NO: 17868 - DNA, 346 bp, Glycine max
  Clone ID: LIB3049-043-Q1-E1-D4
gacatcacaaaccaaacaacttctaacacatacactactctctctctctctcttattgtatggccgccaattccagtagccgagggatcaccgccttagggaagcgagtcgccaaccggatctggacttccaacgcacctcctctcacttcaaggaggggagcatacagtagcggctcagtgtacgacaagaaccctgatgatgagatccagtctgggcaggtcccagaccatgtgatgcaggcgggaacacaatccggcaaatactgggccccacatccacagactggggtatttgggccccccggaggaggtgaccaaactgcttctgccattcactctgatgc

SEQ ID NO: 17869 - DNA, 335 bp, Glycine max
  Clone ID: LIB3049-043-Q1-E1-D5
gcacaagtttgttgagatagctagaagcaataagatgaaaatgaaagtgcttgttttgtttgttgctacagttttggtagcatatgaatgccatggctcagactaccagaagttccctctccaaatgaaaactgggtttggtgggcaatacagcaatgaggtggcaggtgccagttggaggcttggcgtggaagcaaacaacgtactcaagtggcaaactgttcctgcagcttgcggagagtacatagctgactacgttctaggagaccagtgtagatcagattccagaacagttaaccaacaagcttagttcgatgctaaatccctcaaactca

SEQ ID NO: 17870 - DNA, 297 bp, Glycine max
  Clone ID: LIB3049-043-Q1-E1-D6
gacccccccttttttttaagataatttctctcaagtgttaaaacgtgagagattttgcaatggatataagaactggtagctaagtcgaagaagtatcagtcttttagggaatcttccaattgattgaccaagccaaataatatatggatatagatatatagatagatctatcgatatatatatctaactaatataggaatcttaaatagataattagtctattcataagaggagatgagatcatattagggatatagccgattctttcctttgtttgggctactggccaaccgccgg

SEQ ID NO: 17871 - DNA, 332 bp, Glycine max
  Clone ID: LIB3049-043-Q1-E1-D7
gctctttctttctctcaaagtgttgaacttgaagttgcagagagaaaatggattgagaattctctctcttttctctttctcttcccaactttccttccttgggatcattctgcttctttgctatggaagactcagattcagttgctacgctgatagattccacaacttctaagatacagcagctgcaaaaggcatttgctgaacttgaaagttaccgagctgttactctgaacttgaaatggaaagaactcgaggaacattttcatggtctggagaaatccttgaagaagcgctttcatgaattggaagaccaggaaaaagagtttgagaac

SEQ ID NO: 17872 - DNA, 348 bp, Glycine max
  Clone ID: LIB3049-043-Q1-E1-D8
gaccgcacagaattagggttttccaattcacagagcaacacaacgaaccaacaatggcgcagcctcagccgcagtcgcagccgcagcacgggcaagcagcgctggagcaggtgcagtgcttcggtcgcaagaagaccgccgtggccgtgacctactgcaagcgcgggcgcggtctcatcaagatcaacggctgccccattgagctcgtggagccggagatcctccgcttcaaggccttcgagcctagcctcctgttgggtaagagccgcttcaccggcgtcgacatgcgcatccgcgtcaagggtggcggccacacctcccagatctacgccatccgccagagcatcg

SEQ ID NO: 17873 - DNA, 338 bp, Glycine max
  Clone ID: LIB3049-043-Q1-E1-E1
gacgctagtttccattgaaattgtcaggtggaataaaaagctagaaaaagaaacaaggttttccccgaaaagggaatagaaatgcatgaatcttcaatgtttgtttgagtcttccgatttaatcctcctcgtcactttcagatcttttcttagatctttatttcttgttctggttgtcttctttcgcgacaacaaacctctcccttttctcttttccaaacactttcgccctctttgatcttgaataagagcttcaaattcggttcaaccaattgggggggcataaaaagatcatgttttgagcctcgccatcaatcgcgctcttcagattcaattct

SEQ ID NO: 17874 - DNA, 340 bp, Glycine max
  Clone ID: LIB3049-043-Q1-E1-E10
gaatcgcaatggcaccggaatcagaggctccccctaacttctggggccacaccccggaagaagaatactacacctcccaaggcgttcgcaacaccaagtcccacttcgaaacccccaacggcaaaatcttcacccagtccttcctccctctcaacctccaaccccaccaagtcaaagccaccgtctttatgacccacggctacggctccgacaccggctggctcttccagaaaatctgcatcaacttcgccacctggggctacgccgtcttcgccgccgacctcctcggccacggccgctccgacggtctccagtgctacctcggcgacatggacaaaat

SEQ ID NO: 17875 - DNA, 391 bp, Glycine max
  Clone ID: LIB3049-043-Q1-E1-E11
ggcctccaatctattcactgtctaggaaaactccaatgaaaacattcttcattctctgttccatatactcactcttcaatccttgtgttttgaacacttcatacttacttccattgctatgatttggtgcatagaaagcctctaaatatggcagccacaagcacggataagttggaggcaggaacagtttcaagttatgacaggaaaagtgaaatcaaggcatttgatgattcaaagactggtgtccaaggactggtagaaaatggtgtaacaaaagttccacttatgttctatagtgaaaactctaatctcaatgatggcgtaaccggtgcatcatattcaaagatcagcatccccataattgacctcacaggcatccatgatgatccta

SEQ ID NO: 17876 - DNA, 368 bp, Glycine max
  Clone ID: LIB3049-043-Q1-E1-E12
gatgtatcagcaattgagcatataatataactgttgcgagctttgagtttgactaactataaacaaaaaacttcactatattcaaatacccttttgttttgtgtacaaaatgtgtccactaacaccgagtgacttgctgcggattttcgagaaggtggacgtgaatggcgatgggtttttgagccttgaggagttgaagatgctgctagagaagacagggttcggttatagcattgaggaattggagtctttggtgggaaagaaaagcctcgacttcagtgagttcttgttcttttatgaatctaggttgaagcagaacaataatggggagaaggaattaagggctagtgggggggatgatagtgatg

SEQ ID NO: 17877 - DNA, 336 bp, Glycine max
  Clone ID: LIB3049-043-Q1-E1-E2
gagttgaaaagtgtacaatggctttggaaactcttgcttccaatgagttctccaacttcattatctatgacactatctctgcaactccatttagcagccatggctctccggaggctagtttcttggaaagtttagtgaactatcaggagcatgaccctgcatttgataacagcgcattgaggacccgaaatcaccaagccggcgaacaagaaagcgttggcaggaggcagaatgtggtgggggtgcaagtgcaagggaggaagaagaggagaaggaaaccaagggtttgcaaaaacaaggaagaggctgagacacaaagaatcacccacattacag

SEQ ID NO: 17878 - DNA, 340 bp, Glycine max
  Clone ID: LIB3049-043-Q1-E1-E5
gaatggaatggataatatgaattgaagaggccgaactgtgcagaagcagaatgtgcattcactcggggaactgaaaaatgtgggtatatattcatgatcttgatgagctcttcaattgttttatgcgacaacttaatcctctttaatcagaagctgcttttgaagtctttcgtctcgcgtggttcatccaactttgtgattcagttaagcagcaaaacgaggcgtcttaacgggttcatttcaaaagcggaaaagcatagtggccattcaaggaaaagcagttggtggcagaaattctttttcgaagatgatgggaattggcttggtttgagagacgatg

SEQ ID NO: 17879 - DNA, 335 bp, Glycine max
  Clone ID: LIB3049-043-Q1-E1-E6
ggctcagtggtcactcactcaccccttcctttctaactcctcaaattgtgtgttctgagaatggaaatgcctccttctccatcggggcattccgcactctccatcccataaaagtcccagatccaagatggcttaccaccatcaaaaatcccttttggacaccgtagactgctccgaagagcattggataggggaaggtgaatttgaccaagcagaggaggagtacggtaacagtaatagcaatactagcagcacctgagtagggagctcgccggagtcctcccctcagttgttgctcgaaagcgaaatgtgttgggacgaacaagagttggcat

SEQ ID NO: 17880 - DNA, 335 bp, Glycine max
  Clone ID: LIB3049-043-Q1-E1-E7
ggttctagtgtgtgattgtttgttgttgtaactcgttcttcttcttttgttgttctgtgtttgtgtttgttttttctctcacctgaaaatgtcttgctgcggtggtaactgtggttgcggaagctcctgcaagtgcggcaacggctgcggaggctgcaagatgtagccagacttgagctacactgagtcaaccaccaccgagaccttggtcatgggagtggcacctgttaaggctcaatttgagggtgctgaaatgggtgtgcccgctcagaacgatggctgcaaatgtggaccaaactgctcctgcaacgcctgcacttgcaagtgaggtgttg

SEQ ID NO: 17881 - DNA, 343 bp, Glycine max
  Clone ID: LIB3049-043-Q1-E1-E8
gatggtgggggaaggcaatattgattcgtaatcaaccccttctttgggtgttatccattggttttgagttggtggagtacacttttcgtcacatgttgccaaatttcaacgagtgctggtgggacagtattattcttgacatcttgatctgcaattggtttggaatatgggcaggaatgcatactgttagatattttgacgggaaaacatacaaatgggttggtctaagccagcagcctaacataataggaaaagtgaaacgaacattaggccaattcacaccagcacagtgggacaaagacgagtggcatccactgcttggtccttggcgtttcattcaagt

SEQ ID NO: 17882 - DNA, 370 bp, Glycine max
  Clone ID: LIB3049-043-Q1-E1-E9
ggccggcatgcagccatcacagtcacaggcccagcaacaacagccgtcagcaactggaggattttacaggccaccagacatagggttttatgggcaaagccattcatcaacacaaccagcaccagtacctaggcagtgagcgttattcaaacgtcaaaaatcaacagctaagattgctgccatctttgtatcaagttcatttaggaaacttctgtacaccaaggggaggctatgtagtaatgtaaatcagtagaaaattaaatgtggcaagaattctgtcatgaccatagtcgactgtgatcttcatgacaactgtgatcattagctgacaactgtgatcttcatgaccataatcgactactgtttaaat

SEQ ID NO: 17883 - DNA, 336 bp, Glycine max
  Clone ID: LIB3049-043-Q1-E1-F1
gagcgccaatgtttttttcagaggagtttcatcttgtaatcaaaagagtttatcttatagtaagaaatcgatgtcttactccattttaaggaacaaaacaagagaacaatagcctgacaaagggtttagccataaaatcgaatccatcattgatttgagatattgataaggtgaatactcatttctcgtcaatgctaggcataatgcgggtatagggacctaaaaaagattatcttttcgtcctatcttatgaactttaaggtgtatgaagtgtcatttcctatcttagattttaattttagtaggtagataaagagtccatttaacttaagttga

SEQ ID NO: 17884 - DNA, 400 bp, Glycine max
  Clone ID: LIB3049-043-Q1-E1-F11
agggggagcacacagaaagcaaagtgtctctctaacctctgcaaaagtccaaggttgcacagttttaactgcttaggcttttgtcttcaaaattaaaactgtgcaactttggttgcagagtcataagtgttaagttgtgtatgcatgaaagtgggcttgagttaattgtgcctcttgtatgatggaatccctttggaaactgttgtacttgctagagcctgcgcctgtcacacttatcattacagctgtggctgtgacatttggcgcagcatttcgagctctaaactatgggaaagaaatggagcataatcgtgacttatgtgaagcatcgattacattggataggtcacaagcattgatgatcccggtgatgagctcttttagcttgcttttgatggtc

SEQ ID NO: 17885 - DNA, 349 bp, Glycine max
  Clone ID: LIB3049-043-Q1-E1-F2
gagtgagagagagagaaggcaagatgtcgaagagaggacgcggtggttcggcggggaacaagttccggatgtcgctgggtctgccggtggcggcgacggtgaactgcgccgacaatacgggggcgaagaacctctacatcatatcggtgaaagggatcaaagggcgtttgaaccgtctcccctcggcttgcgttggcgacatggtgatggccaccgtgaagaaggggaaacccgatctgaggaagaaggttttgccagctgtcattgttcgccagcgcaagccatggcgccgaaaggacggcgtctacatgtatttcgaagataatgctggtgttaatgtcaatcccaa

SEQ ID NO: 17886 - DNA, 335 bp, Glycine max
  Clone ID: LIB3049-043-Q1-E1-F3
ggatcgaggaaaaaaaatatcattttttagctctcacagaaagagagagagagagagagagtgtgtgtttatttgagtttgcgatttgtgatttctgatttgttggcccaacttggcaaagcaatggctctttctgtatcccttatgcaactcagttgcgtctctcgtcgtcacaataatccctcatcatcatcatcaccggtgacccttttgcccaaatccctcgttccttgtggaatttccctgaaactgaaagggttggtttttttggagtaaaagtagttcagtgtgtggaagaagaagagtgggagttgggagtatcagtgtgaatgcct

SEQ ID NO: 17887 - DNA, 333 bp, Glycine max
  Clone ID: LIB3049-043-Q1-E1-F4
gagcttctcagtcatttcaattgttccgagatcaaccttggatcaggtttagggaatggctgcaatcttagctcgaaaatcactccttgctcttcgtgcgcgccaattggctgtaagcggtcaagggctgcacagctcccaatactatggccttcggttaagtgcacactccttctctaccaaaagagaggatgaggaaagggagcaactcgcaaaggacatttcaaaggattggagttctgtctttgaacgtagcattaacactctctttctcactgaaatggttcgaggactaatgctgactctgaaatacttccttgaaacaaaagttac

SEQ ID NO: 17888 - DNA, 333 bp, Glycine max
  Clone ID: LIB3049-043-Q1-E1-F5
ggatttcaaatcttggattcgattccatcacttatagttctctcttctctttcttttcctttctttctccgccgaagatggcgccgcccacgccagcagttgaaggcgcccaggcgccgcaagggcggcagcaacagccgcaaggagggtttggcctcaccggaatcatacgcatggtcgttttctggtacttcgcttccaaattcttttcccccaaaaaacctaccgaagcttccgctctcatctccaatctcgttcagaaagcacagcctctggatatgtggctttatctctccgagcacgagaagttcaatgactttggcagtgaaagtt

SEQ ID NO: 17889 - DNA, 341 bp, Glycine max
  Clone ID: LIB3049-043-Q1-E1-F6
ggtggtttgtttgactaaaccctaggagtaggagccgctttttggttgcgacttgggaggaagaagaagaagaagatgtctgcaactgcaagtgcaactttgctaggcatgccggggccatgggcttacgactatcacgagccatctgatccctatacaactaaaattggaggactccctgactggccccctcccataaacaccgatttgcttcgctgcgccgagtgcaccggccaactatgtctggtggcgcaggtttacgctcccctttctcaccaccggactctcttcgttctcggttgcgtctcgcccaattgcggaaccgcttggcgcgttcttcg

SEQ ID NO: 17890 - DNA, 304 bp, Glycine max
  Clone ID: LIB3049-043-Q1-E1-F7
gccaagcaaaaccctaatccctctttcttcctcttcctcagtagtgcgattttcgattctcttctctgcaactatgcctaaccctaaggtcttcttcgacatgaccatcggcggtcaacctgccggccgcatcgtgatggagctctacgccgacgtgactcggagcaccgccgagaacttccgcgcgctctgcaccggcgagaagggcgccgggcggagcggcaagcccctccactacaaaggctcgtccttccagcgcgtgatggcgagcttcatgtgccagggcgggaacttcaccgccgga

SEQ ID NO: 17891 - DNA, 341 bp, Glycine max
  Clone ID: LIB3049-043-Q1-E1-F8
gactctgcagcagcacctttaaacgccgaaggttcatccaatctccgaaggccttcaccggattgcaaccatgtcgaggagaaaggttagggagccaaaggaggaaaacgtgactctgggcccagctgttagagatggtgaacatgtttttggagtcgctcgcatctttgcctccttcaatgacaccttcattcatgtcactgatctgtctgggagggaaacacttgtccgcatcactggcgggatgaaggttaaagctgacagagatgaatcatctccatatgctgctatgcttgctgcgcaggatgttgctgctagatgcaaggaactgggcataactg

SEQ ID NO: 17892 - DNA, 204 bp, Glycine max
  Clone ID: LIB3049-043-Q1-E1-F9
gacgcagaagaagcatcttaaggttccgaatgatcatcctgacgacggtgggattcagcgacgtactacgttgtctagtacaaaggatagggttgctggtgagggtgtagtgaagccttctgctactgttgaacaaagtgggaatgttggtagtggtaatgttggtgtgaatgctggtgctgctgctgctgccaagcgtttcaa

SEQ ID NO: 17893 - DNA, 344 bp, Glycine max
  Clone ID: LIB3049-043-Q1-E1-G1
attcatctattgctttacatgctcgtgagatgaacagagagtcaatcctactgaagaagttgcagaaagcttgctctgtcctggaaatatctggccctcccatggttcattttgaaaatgagtccttccagaatcacctcaactttctacaaaatatacatctccatgatcattttgtgcatgatgagatagagctagaacaagagttagttgctgtgtgtgaaaccgtattggacatatagctaaattgtgctggttccagttccacttttcacaagtctgataccatgccagcgccacatcgaaaactccctctgagctctgcaaagaaggaagagatagct

SEQ ID NO: 17894 - DNA, 374 bp, Glycine max
  Clone ID: LIB3049-043-Q1-E1-G10
gaaagaaaggagagctggaatcacatggacttgtctttctctttctgggtctccattaaatttttcttctctcccttctttctctctctctctctctgaccattctcttcttcttctttttcttctcctctctctctctcccctccgccatggctgaggataaggagatgtctacctctgtcatcaatgggaatgattccctaactggtcacatcatatctacaactattggaggcaaaaatggggaacccaaacagactattagctacatggcagaacgggttgtaggaactggatcatttggagtcgttttccaggcaaaatgcttggaaactggggaggcagtggcaattaaaaaggttttacaagacaga

SEQ ID NO: 17895 - DNA, 375 bp, Glycine max
  Clone ID: LIB3049-043-Q1-E1-G11
ggcaagcgatacgaaaaataaatttcagttttttctcataatgggttccaccaatgccaataatgaaacggtcgcagagattccggagtggatccgcgtcttcaaagatggcaccgtggaacgcccacttgattttccgatcgtgccacccactctcaacactggactctcatccaaagacatcaccatctcacaccaccctccaaaaccaatttctgcacgcatttaccttccaaacatcaccaattcccagactaagaaacttcccatctacgtctactttcacggtggtggcttcttctttgaatccgctttctccaaacttttcaatgaccattttctcaagttggtccctcaagccaacattatagtggt

SEQ ID NO: 17896 - DNA, 387 bp, Glycine max
  Clone ID: LIB3049-043-Q1-E1-G12
ggcagcaacagcagcattcactgaaagcactcagtagggcttgcggtttcagagtttgtgacgcacgcatccatggccaccaccaccaacgccgccgcagccccgccgcgccagctctcccagaaggaagccgacatccagatgatgttagccgccgacgtccacctcggcaccaaaaactgcgacttccaaatggaacgttacatcttcaagcgccgcaacgacgggatttacattattaaccttgggaagacatgggagaagcttcagttagcagctagggttattgttgcaattgagaaccctcaggatatcattgttcaatccgcaaggccttatggtcaaagagcggttctgaagtttgctcagtacactggtgctcatgct

SEQ ID NO: 17897 - DNA, 341 bp, Glycine max
  Clone ID: LIB3049-043-Q1-E1-G2
gacgctatgttaatgtagttgtgtgtgttgtgttgcacactctccacactccacagagagagagaaaagggtcaaatagttacaacctttgcttctttccctccatagtcccattttttttatttttttttccattcaacaacacaacacaacaccgcaacctcagacagacaaacatcatggacgcaggttacaatcctcgtaccgtcgaagaggtctttagggatttcaagggtcgcagagctgctttgattaaagccctcaccactgatgttgaagagttctaccagcagtgcgattccgagaaggaaaatctttgcctttatggatttccaagtgag

SEQ ID NO: 17898 - DNA, 364 bp, Glycine max
  Clone ID: LIB3049-043-Q1-E1-G3
gacatcacaaaaattacaacaccaatctcacccatttcaaaaaaaggccgttagtgttactattcgtaaaatggccactcttgttctttaccaattctttctcaaactcttgctcctaatttcagtctttcagctttcctttgctgctaggagactcaaccagctggttcaggaccagtcacagttactccattaccacaacggtcctcttctatacggcaaaatcgccgtgaacctaatctggtatggtcacttcaaaccatcccaaaaggccatcatcaccgatttcgttacctcactgtcatccccatcgtctcagagcagccagccatctgttgccacctggtggaaaaccacgggaaat

SEQ ID NO: 17899 - DNA, 195 bp, Glycine max
  Clone ID: LIB3049-043-Q1-E1-G5
ggcacttcaattgcaatcaaattagttcattctctttgcgcagttccctagctcgcctttcaagatgcagatctgcggcgagaccctcaccggaaagaggatcacccttgaggtggaaagctctgacaccatcgacaacgtcaaggccaagatcgaggagacggagggaattcccccggatcagcaacgtctcag

SEQ ID NO: 17900 - DNA, 344 bp, Glycine max
  Clone ID: LIB3049-043-Q1-E1-G6
gaattcagagagagcgagacggcagcacgcgcaaaaatggtgaagtttctgaaaccaaacaaagccgtcatcgtccttcagggacgctacgccggcaaaaaagccgtgatagtgcgaaccttcgatgaaggcacgcgcgagcgcccctacgggcactgcttggtggcagggataaagaagtaccctgcgaaggtgatcaagaaggattcggccaagaagacggccaagaagtcgcgtgtgaaggcgttcgtgaagctcgtgaactaccagcacctcatgcccacgcgctacacgctcgatgtcgatttgaaggacgcggttacccccgacgtgctccaagccaa

SEQ ID NO: 17901 - DNA, 322 bp, Glycine max
  Clone ID: LIB3049-043-Q1-E1-G7
gaagagggacagtgcagataagttttgatgagaattctatttccattaggtccatcttgatttggggttattagcttttgttagttgagtgtctgtttttcttgtttgctttaactggtactacttctgctccctagttatcctacttgtttgctttgttccttgtttttagtagcttcggttagctgtgtctcaccatgctttgttactctccattttcatatttattttttggttattgttatgaacctagaacaattggatgcatttgtgttttttacatgtggttggctaatgctgttaatattttatatcttttgac

SEQ ID NO: 17902 - DNA, 309 bp, Glycine max
  Clone ID: LIB3049-043-Q1-E1-G8
gatagcatatcatgaggcgttcgcaacttgcacactcaattttctcactcaagcgtcgttcaaggctcgtacaaatgaagcggttcgcaagtctacgggtgggaacgatcctaggaagcacatcaccaccatggctggagtaaactctgtatctacgaccgattgagtcaagacgactcatcactatcttcttgcaactgttgctcttcgagagatcatgggctaccaaaatagcacagagcttcggatgcgcaagctcgactttcagcgtcctgttcgtgagatcgcgcaagaagtcaggactgattt

SEQ ID NO: 17903 - DNA, 319 bp, Glycine max
  unsure (1)..(319): unsure at all n locations
  Clone ID: LIB3049-043-Q1-E1-G9
ggaatcagaagaagcgagcgaagatgtcgggtcgtggaaagggaggcaagggtttgggaaagggaggagccaagaggcacaggaaggtgcttcgtgacaacatccagggtatcaccaaacccgcaattcggcgtttggctcgcagaggtggtgttaagagaatcagtggtctcatctacgaggagacacgtggcgtcctcaagatcttcctcgagaacgttattcgcgacgctgttacctacaccgagcacgctagaagaaagaccgttaccgctatggatgttgtttatgctctcaagaagcanggcangactctcta

SEQ ID NO: 17904 - DNA, 337 bp, Glycine max
  Clone ID: LIB3049-043-Q1-E1-H1
gtatgacatagctcaacaacgaattggatgggctaactatgactgttctttgtctgtaaatgtttcggtgactacaagtaaggacgagtacatcaatgcggggcagcttcatgtcagcagctccgaaatacacattctttctaagttactacctgtaagctttgtggctcgctctatgtacataatgttggtatgaaaatttttatgtgaagtgttgggaatcaaagtcatcagtcaggataatgtaaaaataagttttcaacattaagcatgggaagaaagatcaagtgagaagacgaagatttatgttccaagtagcttggaagaaatgcagatt

SEQ ID NO: 17905 - DNA, 333 bp, Glycine max
  Clone ID: LIB3049-043-Q1-E1-H10
ggtggaagtgaaggaggagagggagaagaagaagaagtaggaggaagaaaaggggaaaacgcaaagaaaaaaagaggaagatagatcaagatctcccttgcgtttgtctcagttgaagaaattcaagagcagaacgagactaactcaacggtatcagacgtttcagggtttcagcacttccattttttttttttccggatttgagttggaagaagatcaaagaggttcctagttgcttggattgttcctctgggtggtggagactttgtgtatttttaaaatattgacaattcaaaatgccaaaggagagaagggataggtctttgtcacatg

SEQ ID NO: 17906 - DNA, 397 bp, Glycine max
  Clone ID: LIB3049-043-Q1-E1-H11
gatatctgtgattcatcaaatttgtgtttccccgaccccgattgcaagcaatggacgccttcaattccttcttcgattcaagaaaccgatggaattacgatactctcaaaaacttccgtcagatttctccggtcgtgcagaatcacctgaagcaggtttattttactctgtgttttgccgtggttgctgcggctgtcggggcttaccttcatgtcctcttgaacattgggggttttcttactacagtggcatgcatgggaagcagcttttggttactctccacacctccttttgaagagaggaagagggtgactttgttgatggccgcatcactgtttcagggttcctctattggacccttgattgatttggctattcatatcgattcaagccttat

SEQ ID NO: 17907 - DNA, 333 bp, Glycine max
  Clone ID: LIB3049-043-Q1-E1-H2
gcacattcacaacacagaagagggaagaagaagaagaagaagaagaaaaagagaagaagtagtttggtgtgttaattgttcgagagagaaatggacgactacacgagggaaatgatggacctgaagacactggtcactcgcactctcgagaagaaaggcgtccttgccaggatccgtgccgaactcagagcgagtgtgttcgaggccatcgaagaggaagatcatgtgattgagaaggaacaagccctacctcctgcattgcttggtagctgcaacgatcgagctaaacagcttcacgcttctcctcaagggagacttctttcggcgatgata

SEQ ID NO: 17908 - DNA, 336 bp, Glycine max
  Clone ID: LIB3049-043-Q1-E1-H3
gacatcacaaaccaaacaacttctaacacatacactactctctctctctctcttattgtatggccgccaattccagtagccgagggatcaccgccttagggaagcgagtcgccaaccggatctggacttccaacgcacctcctctcacttcaaggaggggagcatacagtagcagctcagtgtacgacaagaaccctgatgatgagatccagtctgggcaggtcccagacgatgtgattcaggcggcaacacaatccggcaaatactgggccccacatccacagactggggtatttgggccccccggaagaagtggacaaactgcttctgccattc

SEQ ID NO: 17909 - DNA, 325 bp, Glycine max
  Clone ID: LIB3049-043-Q1-E1-H4
tccacagtttatactgatggttgctgcaagttcagttggagaggaactcttttacagggctgctgttcagggggcattggctgatatatttttacgaggcagtaatcttataacagatgttcagggaatggcatcattgaccggtgtgctgcctccatttgttccatttgctcaggcatttgcagctgtacttactgctgtccttactggttctctctattacatggctgcctctcctaaagatcctacttatgttgttgcacctgttttacaatctcgctctggtcgccaagatttgaaaaagctatttcaagcctggtatgag

SEQ ID NO: 17910 - DNA, 327 bp, Glycine max
  Clone ID: LIB3049-043-Q1-E1-H5
ggcaatagagactagagaagagagaggtgttggtgccctaatcgtgagaagaaaggaaagggaaaagaggaaaatggtgtgcataaggaaggcgacggtgaaggaccttctggcgatgcaggcgtgcaacctgttctgcctccctgagaactaccagatgaagtactacctctatcacatcctctcctggccccagctcctctacgtcgccgaagactacaacggccgcatcgtcggcgacgtcctcgccaagatggaggaagaaaccaccgactgccacggccacatcacctcgctcgccgtcctccggagccagcgggagctcgg

SEQ ID NO: 17911 - DNA, 333 bp, Glycine max
  Clone ID: LIB3049-043-Q1-E1-H6
gagtgagagagagagaaggcaagatgtcgaagagaggacgcggtggttcggcggggaacaagttccggatgtcgctgggtctgccggtggcggcgacggtgaactgcgccgacaatacgggggcgaagaacctctacatcatatcggtgaaagggatcaaagggcgtttgaaccgtctcccctcggcttgcgttggcgacatggtgatggccaccgtgaagaaggggaaacccgatctgaggaagaaggttttgccagctgtcattgttcgccagcgcaagccatggcgccgaaaggacggcgtctacatgtatttcgaagataatgctggtg

SEQ ID NO: 17912 - DNA, 333 bp, Glycine max
  Clone ID: LIB3049-043-Q1-E1-H8
gacaatttagaacttcataatactgaaaacaaagtagcatagatattcaaggtaagatgggagagaagaaagttttggctcttgtcatgcttgttgtggcttatggtttggcagtaacaacattcactgcttgtcaacttcctccaacgtgcaatgggtatgagccattaatttaccaatgtgtgccttatttggttaatccaggcccttctactccaactcctcattgttgtgatggagcaagagtggcgattcatagagccaacaatgctcaagctattaagaatttctgtagttgtttggaggatgctggaccaaatttatattttcaaa

SEQ ID NO: 17913 - DNA, 328 bp, Glycine max
  Clone ID: LIB3049-044-Q1-E1-A1
gatatcagaagcgcagacctaagatttcggccgtttgctccccaatgaaacaagcacactgtttcttttgaaatcagctagaaaagatgtcaggtgaagatgtatctgttgcagctgaggcacctgctgcttcaattccaggtgagccaatggacatcatgactgctctacagcttgtgctgagaaaatctctggcctatggtggtcttgcacgaagtcttcatgaacgtgctaacgtgatcgagaagcatgctgcacagctctgcgttctagcagaagattgtgaccaacctgattatgtgaaactggtgaaggctctttgtgcaga

SEQ ID NO: 17914 - DNA, 321 bp, Glycine max
  Clone ID: LIB3049-044-Q1-E1-A10
tggagagatggattgatgaaaattcacatgccaggctacttcagctcgatcagcaagggtgtggcaaccattatggcctcttactccagttggaatggagtaaaaatgcatgctcagcatgatcttattactggcttcctcaagaatactctccatttcaagggctttgtcaattcagattttgagggtcttgataggatcacctctccacctcgtgcaaatatcacttactcaattgaagcaggagtttctgctggcattgacatgttcatggttccaaagcattacacagaattcatagatgttctaaccatgttggtg

SEQ ID NO: 17915 - DNA, 302 bp, Glycine max
  Clone ID: LIB3049-044-Q1-E1-A11
tggacagatggattgatgagcactcacatgccatgctacttcagctcgatcagcaaaggtgtggcaaccattatggcctcgtactcgacttggaatggactaagaaatccatgctcagcaggatcgtattactggcttcctgaataagactctccatttctcgggctttgtcaattcagaatttgagggtcttgagaagatcacctctccaactcgtgcatgtaacactgagtcacttgagcccggagtttctgcaggcattgacatgttcatggtttcaaagcattacacacaactcatag

SEQ ID NO: 17916 - DNA, 367 bp, Glycine max
  Clone ID: LIB3049-044-Q1-E1-A12
gtctctgtaaaaactcttgtctttctctctctcccgaagataaggcagagaagagaaggagagaggcttgtacctggagagaaaagaggagacaataatacatggggaagcagggtctaaacacggtggagcaacaatctgtggcaccgacagcatccaagtttccattgagcttttgggaagccacggtggcttcaacggtggcgctggtttttgcggtgggtcttctcggcgtgtacctcaccatgcccgattccgattacagcttccttaaactcgctcgtaccctcgaagaccttcaactcctacgagatgaccttgagagctatacaagtgactacactgcacaagtcttggtggggtactg

SEQ ID NO: 17917 - DNA, 300 bp, Glycine max
  Clone ID: LIB3049-044-Q1-E1-A2
gagagaagagagatggatccagacgcgttggcacacgcactcctggcgcactactacagcaccttcgacaccaacatgaacagcttaacgaatctctaccacgatggttccatgctcactttcgaacggcacaagatccatggcgcttccaacatccttgccaagctcacctccctcacttttcagcagtgccaccactcaatctccatcgtcgactgccagccctccgtgcttcaactccggcatgctcgtcttcgtcagcagaaaccttcagctcgccggcgaacagcacactctcaa

SEQ ID NO: 17918 - DNA, 370 bp, Glycine max
  Clone ID: LIB3049-044-Q1-E1-A3
aaaaagaaaaaaagggaatcacaaaaaaagcaaaacctcccaagataagttataattataaacaacaactaacaaaataacccccccaaaaatccccccttgggtttgttttggtgtcctaaagaattgttttaactcgaaaaatcaacatgtcttcccagctccaaatggttcctctaagcaaacttcgttaccaaaggctaaggcatgaaaaagggtgggatgatgaaagggaaaggaggtcaagaagctggttcaggtttagaagggttcccattacgagaaggtttagactcaaaattccaagcttgagaagactttggagaaaaagggctaagttggtttcttccatgagaatttcatatgctaa

SEQ ID NO: 17919 - DNA, 389 bp, Glycine max
  Clone ID: LIB3049-044-Q1-E1-A4
ggcacaagtttgttgagatagctagaagcaataagatgaaaatgaaagtgcttgttttgtttgttgctacagttttggtagcatatgaatgccatggctcagactaccagaagttccctctccaaatgaaaactgggtttggtgggcaatacagcaatgaggtggcatgtgccagttggaggcttggcgtggaagcaaacaacgtagtcaagtggcaaactgttcctgcagcttgcggagagtacatagctgactacgttctaggagaccaatatagatcagattccaaaacagttaaccaacaagcttatttctatgctaaatccctcaaactcatcaacaaagatgtctttgtcttggacgttgacgacactactctctctaatctc

SEQ ID NO: 17920 - DNA, 360 bp, Glycine max
  Clone ID: LIB3049-044-Q1-E1-A5
cacccaccgctcttttaattccacatgaaaccgttgagcgtttttcaactctcactaccttcataagggaacactccaattctccacctccacaacatacccttttgagttttgattctctctcctcacatagctaggtggtattgaatattgggagggtcaaagtttgtgaaggaacttgaagaagtaaatgcatggatcgaggggaccaaatgacatttcctggctctgcatcttactatatgcagagaggaatacctggtgctggaaatcaacctgaactgcacaattcacctaatattcgaccgttgtctaattcgaatctaccgtttcaatcaagcattgggggtggtggtacca

SEQ ID NO: 17921 - DNA, 345 bp, Glycine max
  Clone ID: LIB3049-044-Q1-E1-A6
ggcgagcgagggtttgtgaacatgacgacgattcgcaggttttgctgcaacgatcttcttcgctttgccgccgtcaatctcgaccatctcaccgaaacattcaacatgtccttctacatgacctatcttgcaagatggcctgactatttccacgttgccgaatgccctggaaatcgaatcatgggttacattatgggtaaagttgaggggcaacgagaatcttggcatgggcatgtaactgcggtgacggttgctccagagtatccgaagcagcagttagccaaaaaacttatgaatctgctggaagacatcattgacaatattgataaggctttttttgttgat

SEQ ID NO: 17922 - DNA, 378 bp, Glycine max
  Clone ID: LIB3049-044-Q1-E1-A7
ggtcccctttcattctaatacattccaatgtttcccagtgccggcgttcccaagaagcggcaacgcaccaccgccgccaaccgttcctcctccacagttggcaccatctcctccctctccgacgtaaccctaatcgaaatctcccaaaaccctcgaccttcctctcccatgaccgacgaccgcccctctcccgcggcggaagacgctctccattataacgacgcttccaccgccgacgtcgtcctccgcctcttcatcgacgctccctctccgctcgattccgtttccaactccgaccaccacgtctacctccactccgacgtcctccgccgctccaaatacttctccgcgctcctctccgaacggtggatcggccgc

SEQ ID NO: 17923 - DNA, 366 bp, Glycine max
  Clone ID: LIB3049-044-Q1-E1-A8
caggttgatctctttggacaagatttaatcggtgacctcatggatgctccaacatctgttcctgtagaaaagccagcaactagtaatgtaccagaggttgatctttttgcagatgcagcatttgtatcagcagaacctcatgtggacaaaggagccatttctcaaccacaggctgaggtggatctattttcttcacaaccagccattcctacagttacaccaacagttgatttgttttccattcctgaaccggcagtgcagccagacaccaagtcagagaagtctgttcctatgaataacagcactattgatccctttgctgctgttcctcttaataattttgatggatctgatatttttggtgac

SEQ ID NO: 17924 - DNA, 359 bp, Glycine max
  Clone ID: LIB3049-044-Q1-E1-A9
cgacccacacgtcaaccgatgcgtcagcacaagcgtccgtgatgttgcgacatgcgagtgaaaggaaaaatggaataatgagtgatcacaagccagactccttcaacaccataagcaaagctgagacaaccaatatagcccctcaccccacttagaagtcacgccgggatccaggtcagcatcatctgatgagaaggctcctgcctgaaacatggcatttaaacggactgcgtcatgcctactgacacgatcttgagtggatccactatcccctcgtaccttcatcagctacaccagtatagccagacttgttgcccgtactgacatcttcaaggtcccaacccacgtcatacaatacg

SEQ ID NO: 17925 - DNA, 289 bp, Glycine max
  Clone ID: LIB3049-044-Q1-E1-B1
ggtaacgtgtgagtacccatgccatgtggagataggcaaccgatgaacacggtgcattcgaacgatgaactgggacgactgtccctaacagcgaagacagtgatgtaaatgcttcgagacacgggcattctggtgggtcactacgatagtaacatcatcaattcatgaggtcagctccaactgctgcaaccacataaaccccgacgaactgtgcatcaccaagtccaagaaggacaactccggagagcagatataagtcttcatccccgacgagacgattgacatcgtc

SEQ ID NO: 17926 - DNA, 381 bp, Glycine max
  Clone ID: LIB3049-044-Q1-E1-B10
cccaagaggaatgctagagattctcatgtgccggttttggctccacttccaattggctttgctgtgttcatggttcacttggcaaccatcccagtaacaggcactggcattaaccctgctaggagtctaggagctgctgtcatgtacaaccaacagaaggcctgggatgaccattggatcttttgggttggaccatttattggagcatccattgcagccttctaccaccaattcatcttgagagcaggtgctgctaaggctcttggatcattcaggagcaaccccgctatttgagtcaatttaatttcttcttcatgatgagttcaaaatgaagatgaaattataagaacaatatcaatattgtcaataatggcaattgct

SEQ ID NO: 17927 - DNA, 302 bp, Glycine max
  Clone ID: LIB3049-044-Q1-E1-B11
gacaggcagaaaccctaaccttccaaaatcctaatcctgaggcactgtgatatggcaagagccgtttcctcttcctgcgcgcgcctcacaatgcgcctcttctccagcattatcaccagcatcactaccgcggcgttcaccgttacattacccacatcctcgtcactctcagtctcaactcgtctattcctcttccatcactcgcatgccaatgtcagtctctccacacgcgtctccggaatcaggtgccgtgtcaactgctccggcgatccagcatactcgccgctgaactcagcttcatc

SEQ ID NO: 17928 - DNA, 362 bp, Glycine max
  unsure (1)..(362): unsure at all n locations
  Clone ID: LIB3049-044-Q1-E1-B12
gacacgagtaaactggcacatatcttcccttttccttccttcctctcccaaaatcaaaacccctctcctgtgttgttgtgagagaaaaacacagagacagagacagagggtagtagttgagttgagcgagtggggggaagtagcgaagaatgagtatgttgaaaggaggtgaaatgggtggagaagganggagagaaggggattgggagtgcagcagttgcaacaacaggaactacgccttcagatcattctgcaacagatgcaagcaaccccgcctcctcgtcgattccaaaacccccgctgattccaagtggctcncccgtatcggcgattggatcntgcacggttgcactaacaacaat

SEQ ID NO: 17929 - DNA, 390 bp, Glycine max
  unsure (1)..(390): unsure at all n locations
  Clone ID: LIB3049-044-Q1-E1-B2
gaccaacaacacgtagtattatttcattgatttctccctcttcgctctctctcagtgaccagagacagatgatgatggagatggcgaagcgaaacgctgtcgttgcggcactcgcggcgttggtgctactcgcggcgagtgtggcggtggatgctcaggagaactcggacgtgaagacgctggtgaagtacaagcacgggaagaagtactgcgacaaaggatgggaatgtaagggctggtcaatttactgttgtaacctcaccattaccgattatttccagacctaccagttcgagaatctgttctccaagcggaactcgccggtggcgcacgcggtcggattttggggactaccactccttcatcngccgcgccgcgctttttgagccg

SEQ ID NO: 17930 - DNA, 387 bp, Glycine max
  Clone ID: LIB3049-044-Q1-E1-B4
gacacactcaaatccaattccactcccaccgaccaaaacgcgcaacacgttgtaattaaaacgacaccgaaactaatgggcgtcatcagcgaaaacccgaatccggacccggttgtgatccgccaggtttgggcttcaaatctcgaatccgaattccaactcatccgcgaactcatcgaccactatccttttatctcgatggacacagaattccccggtgttgttttccgaccacacctggatcccacaaaaccctacaaccaccgcaacaacaatcgcaaccgccactccgaccactaccgcctcctcaagtccaacgtcgacgctctcaaactcatcaagtcggcctaattctcaccgacgccgccggcaaccttcccgatctcg

SEQ ID NO: 17931 - DNA, 361 bp, Glycine max
  Clone ID: LIB3049-044-Q1-E1-B5
tcccggctatgctgacaacatatgtgaaagtgtattctacttcagttgcaatgcttcttacggcagttgtttctgtgttcctttttggcttccatctctcccttgccttcttcctgggcacagttgttgtctctgttgcaatttatctgcactctgctgggaagatacaaagataactatggcttctgtcttctgtttttcctatactggatttttttattcattgttgtttagccttgagcaaacgaatacatattagttcactgtaatagtgtgtgtatctcaacattcaacaaggatagaaccaggcttaggttcgattgccaaaaaaaaaaaaataaaaaaaaaaaaaaaaccggcg

SEQ ID NO: 17932 - DNA, 385 bp, Glycine max
  Clone ID: LIB3049-044-Q1-E1-B6
gatccacatcaaaacacaagcaaatcctagaaattaagctcattgagaaacataaactatcttgacaaaatgaaacaagttttcgtagcattcttagctctgcaagttgtgttagtccttacaattatggctgcagatccagcagggaagggctatgattgtgaaaaggcaaaaaggtcactaaagtcttgcatggaatacctcactggtaatgttgatagcccttcagctgcatgttgcaatggtgtcaaggaattgaaagcatcagcaccaacaatagatgaaaaaattgctgaatgtcagtgcattgaagaagcactaactcccattcctaacttcaggcaggacagagccattgcacatcctaaggaatgtggtgttgatg

SEQ ID NO: 17933 - DNA, 321 bp, Glycine max
  Clone ID: LIB3049-044-Q1-E1-B7
gattgaaaccaaaagaacagcttctccaacaacatcttctcagagtaatgcgaatactggaggcattggatgaaaaaggctgtcgtatccccctaacctctggggattctgaacttgctgagaaattagccagaatatctagaaagctgagacgatctggatcggaactgtctagagtagtacaagtcctactaagtgtatctcatgttaaagctaagaacaacggacttggtatctccgtatagcgtccagggtcatccatcattcatgaacagagtcttggtgatctatgctaagtgtcactgcatcaactggacgcca

SEQ ID NO: 17934 - DNA, 385 bp, Glycine max
  unsure (1)..(385): unsure at all n locations
  Clone ID: LIB3049-044-Q1-E1-B8
ggttctagtgtgtgattgtttgttgttgtaactcgttcttcttcttttgttgttctgtgtttgtgtttgttttttctctcacctgaaaatgtcttgctgcggtggtaactgtggttgcggaagctcctgcaagtgcggcaacggctgcggaggctgcaagatgtacccagacttgagctacactgagtcaaccaccaccgagaccttggtcatgggggtggcacctgttaaggctcaatttgagggtgctgaaatgggtgtgcccgctgagaacgatggctgcaaatgtggaccaaactgctcctgcaacccctgcacttgcaagtgangtgttgggagagcaagcttcaaacatagataccccttaattaggaataatgataaa

SEQ ID NO: 17935 - DNA, 341 bp, Glycine max
  unsure (1)..(341): unsure at all n locations
  Clone ID: LIB3049-044-Q1-E1-C1
tcagaaaggaacttccactgagaggttttgatgatgaaatgagagctgcagtggcaagaaatcttgaaagcangggaattaatttgcatccaaggaccaaattgacacagttgatcaaaacagaggatggcattaaagttactacagatcatggtgaagagctgattgcggatgctgtactgtttgccactggtacggctcctaagtctaagacgctgaatttagaaactgtaggtgttgagcttgacaacactggagcaataaacgtggatgagtattcccgcacaagcatacctagcacatgggctgtgggtgatgtcacaaaccgaatgaatctaact

SEQ ID NO: 17936 - DNA, 382 bp, Glycine max
  Clone ID: LIB3049-044-Q1-E1-C10
ggagctccttacgtaaattctccacgaatcaaccctgagcagtgaccataaccacactctctcaagtctctagagagaagctaccagactccacaacacatactcaattagctaatccctctcacacttacagaccatgccaaacgcatacatgcttctccttttcctcttccttctggcgctcttctcagccatgacaacaccgtcaatctccgcgatcgacaccttcatctttgccggctgctcacagcccaagttcacgccgggttccgcctacgaatataccgtcaactcgctcctcaccactctcgtcaactccgccgccttcgccagctacaacaacttcaccgtcaccgcctcctccgacgccgtctacggcctc

SEQ ID NO: 17937 - DNA, 380 bp, Glycine max
  Clone ID: LIB3049-044-Q1-E1-C11
gacaccatgaacatcaatggactcgcaagacaatcactcatcaatgcaggtggcattattgagcaatcatttctgcctgggccatttgctgtggagatgtcttcggcagtttacaaggggtgggttttcactgatcaagcccttcctgcggatcttatcaagagaggaatggcagtggaggatccatcccctccctatggccttcgccttgtgatagatgactacccttatgctgttgatggactagagatatggagtgctatccagacatgggttaaggactacgtctccttgtactatgccacggatgatgcagttaagaaagactcagaactccaagctttggtggacggaaactgttgagaagggtcacggtgact

SEQ ID NO: 17938 - DNA, 375 bp, Glycine max
  Clone ID: LIB3049-044-Q1-E1-C12
gagtatagaaatatagcaatatccattgacaaaatcacaaatcacaaacataatgtgtagatcaattcatgcacccctcttgcttgttcttatgtgtttgatgaatggatcgaattttgcatatgatccttttgaatcttcccttagttttgaacctgaaccacatgtagacatcaacgtactctttgtttccttttacaatggtatggcccctaacaatccaaatgtgaacttgttctacaataaccaaaaagatggggtttatttgtcaccaggaaaaggtttctctaaattggacaatcttaacgggcgtaaatctgtagtaatgtattggaatggaaattgtgcttctttctttgcatatgatcccagcgc

SEQ ID NO: 17939 - DNA, 387 bp, Glycine max
  Clone ID: LIB3049-044-Q1-E1-C4
gagacacgagtggcttttgttactgcgctgcgtgcagaaacagagaaggagagaagaatggacgaggagaatggttacagtgggagtagcagctcaaacttggagactacaaaagcagagagatctgtgtggctgatgaagtgccctttggtggtggctaagtcatggcaggctcatcctccttctcaacctctcgccaaggttgtgctctcccttgatcctctccaccctgaagaagacgatccctctgcagtccagtttacaatggagatggctggctccgaagctgtgaatatgccaaaaacttattcattgaatatgtttaaaagacttggtcccaaggtgtgtcctctccgagactagccaaggtggcaaggttgcaatgga

SEQ ID NO: 17940 - DNA, 362 bp, Glycine max
  Clone ID: LIB3049-044-Q1-E1-C5
gacacaacacatcgttttttcagcatatgtctcaaaggcccacggttcctcactcctcttccatagcctgcggccttcactctcatctcctggtctccagtgagatgaaccctagctccaattggtccctttaatcaattacctcttaattagtaattacttaatctcaattagcctttcactctcccacacaacaacatcatgggcgtcaaaggttttgtcgaatgacgcatcgcttccatcattgcaggatgttccacacacccacttgatctcatcaaggtccgcatgcagcttcagggcgaatacaatttgcccaaattggttcataatctccgacccgcactcgccttccaaaccgg

SEQ ID NO: 17941 - DNA, 229 bp, Glycine max
  Clone ID: LIB3049-044-Q1-E1-C6
caacaagaagaacctagctgctagtgataatcagggaaatgacaactcagcatctttgtctggcaagaaggttattgttcctggtcctgcacaggaaattcccaagaggagcatgtgttgtcagtaatcccaactttatttatgatttataatttgtttaaatttactagattttcatggttatgtgttcctatcaccaatttttaatgatttggtgcatttcctttcg

SEQ ID NO: 17942 - DNA, 377 bp, Glycine max
  unsure (1)..(377): unsure at all n locations
  Clone ID: LIB3049-044-Q1-E1-C7
agggaaacatatgtcaaggtttattttgagaattttgccaattgaaatcgcatgttatgcttcaaaggaggaaatttcaagagcaatcaagcctcttgtggaacagtactttcctgtggaaactcaaaatccacacaagtttgctgtactgtatgaggcacgggcaaatactggtgttgacaggatggaaatcatcgatgctgtggcaaagtcagttcctggaccccataaagttgatctaaaaaatcctgataaaactatagtagttgaaattgccaggactgtgtgcttgatcggggtcatcgagaaatacaaggaactttccaagtataatctgaggcagttaacatctcgtanagactgagccttcaggcaac

SEQ ID NO: 17943 - DNA, 108 bp, Glycine max
  Clone ID: LIB3049-044-Q1-E1-D1
atattggcttgcatttatgttgttatattgagtcatgtttccgtaatatttgttgttcttatgcatgacttttgtctacgttggattcttggaatgtctttggagaat

SEQ ID NO: 17944 - DNA, 349 bp, Glycine max
  Clone ID: LIB3049-044-Q1-E1-D10
gactcaccacttcaaaacactcataacacaaagcacaaagcaaagctcatccttgagttaaaaaatggcagcagcttcttccatggctctctcatccccatccttggctggcaaggccgtgaagctgggcccatcagccccagaagtgggaagggtgagcatgaggaagaccgtcaccaagcaggtctcctcaggaagcccatggtatggcccagaccgagtcaagtacttgggcccattctctggcgagcccccgtcctacctaaccggtgagttcccaggcgactacggctgggacactgctgggctttccgcagacccagaaaccttcgccaagaaccgtgaactc

SEQ ID NO: 17945 - DNA, 119 bp, Glycine max
  Clone ID: LIB3049-044-Q1-E1-D12
gtgaggtggtgagagatgtgcctccaggcgcaaaagccaccggggtctccggggagtgatcttccggctgatcggcccgaccgtgctttctccgatgcctcgatgctgatgatcatctt

SEQ ID NO: 17946 - DNA, 299 bp, Glycine max
  Clone ID: LIB3049-044-Q1-E1-D2
gaaaaaggaacggtggagatggaggctagcatcatggatggtccaaaacgacgatgcggcgccgtttcgggtcttaccaccgttaagaacccgatctcgcttgctcgtttggttatggacaaatccccgcattcctacctcgccttctccggcgccgaagaatttgctaggcaacagggtgtggaggttgtggacaacgagtactttatcacacctgacaacgttggcatgctcaagctggcaaaggaagcaaacacaatcctgtttgattaccgaatcccaacatcggggtacgagac

SEQ ID NO: 17947 - DNA, 385 bp, Glycine max
  unsure (1)..(385): unsure at all n locations
  Clone ID: LIB3049-044-Q1-E1-D3
gaaatgagaatgtagatggcttgaatgaactgaacagatgccctaaggccaaaggtggcaaaaaccacaaaggttttgcaccaactattttggcagtcaaatggcagaacttgcctgcaagtttacgcaccgatgaagataaagacaagactagtaccgttccggaccgtgatcagtataacaaagctgattttccataataatatactgatgctaaattttttgtcatcaagtcttacagtgaggatgatatccataagactattaagtataacgtgtgggccagtacccataatggcaacaagaatcttgatgctgcatatcatgacgcacagcagaaacctgntggctgccctgtttttctctttttctcagttaataccag

SEQ ID NO: 17948 - DNA, 389 bp, Glycine max
  Clone ID: LIB3049-044-Q1-E1-D4
gacacattgtgagtatcaacaagaatactcataatataggtagcatatagagctatagttatattgatattgctatttgttaagctcttatttcctcggccatggctaataatgaacgtgatctcttctcggcggagattgtgaatcgtggaattgaaccgtcgggacccaacgctggctcgttgacattctctgtgagggtgaggaggcgcctaccggattttctgcaatcggtgaaccttaagtacgtgaaattgggttaccattatctcataaaccatggcatatacttgttcaccatacccgttcttctcgtggtgtttagtgctgaagttgggagcctcagcaaagaggacctatggaagaagctttgggaagacgcgcgttac

SEQ ID NO: 17949 - DNA, 384 bp, Glycine max
  unsure (1)..(384): unsure at all n locations
  Clone ID: LIB3049-044-Q1-E1-D5
ggagaaagacccttttattattattgaagtccaaacaacatacaagcatggaacaagatcgaaggtttgagctcatcgaccaagcaattcagaagcttgtacacgacaacaccaacaaagtccaagaatccctccataacaatgatgctcaataccaacaccctctttcccaccttctctctgtctctcagttgaaaatgttgaaaggagaagagatacttgagcaattcgaagcttctagttcttctgagccggtggcttctataactcaggaaacagaaagtgaaaatgaggatgctggggaaagtaagggaagtgaanatgatgagataatcaaagaactgaagaagttgaagaggcagaacttcgtgactcattgtcttc

SEQ ID NO: 17950 - DNA, 388 bp, Glycine max
  Clone ID: LIB3049-044-Q1-E1-D6
ggaacctttgcattctattcattcaagattcagcaagtgcgttttggaagcagagaccgaaatacttcgagatggcccgtacaaagcaaactgctcgtaagtcaactggaggaaaagctcccaggaagcagcttgcaaccaaggctgcacgtaagtctgcaccaacaactggtggtgtgaagaagcctcatcgttatcgccctggaactgttgctcttcgtgagattaggaaataccagaagagcactgagctcctaatcaggaagcttcctttccagaggttggttcgtgaaattgcccaggatttcaagactgatttgcctttccaagagcaatgcggtgcttgcattgcaagaggctgctgaggcataccttgttgggctctttg

SEQ ID NO: 17951 - DNA, 349 bp, Glycine max
  Clone ID: LIB3049-044-Q1-E1-D7
gactgatctgcgtttccacagccactccgtgcttgcattgcaagaagctgctgatgcataccttgttgggctctttgaggacactaacctgtgtgccattcacgccacgcgtgtaaccattatgcccaaggatattcagctggcaagaaggattcgtggtgagcgtgcttgacttggtggttggaaacatgaagatgattggtggctgcagttggtgtatttgtttttcagattccattttttattcaatatatggcgttgttagggatggtaagttttcagctggtagtatcactaactggtatacatgcacatactgctaagtgtccgtgactgtgttttcttcctt

SEQ ID NO: 17952 - DNA, 317 bp, Glycine max
  Clone ID: LIB3049-044-Q1-E1-D8
aaatgggacgctcaattcattttcttctcctctctctccctcctagggttagggtttctctcttcatcactctctgtgtcgctccgtttcaatggctcatcaagacgctcaaaaccgcgggtcagagaatgccgctgctgctgctacggtgtcgtttgtcgctgtgaagccgcagctcctcgtcgaatctcccaatgccaatgactccattctgttcttcaaggctgcgtttagcactgaggaatttggccgtacgctcaaccctaatcgcagagctgagcacgatctccctctcatactcttcgcagaaattaaaa

SEQ ID NO: 17953 - DNA, 338 bp, Glycine max
  Clone ID: LIB3049-044-Q1-E1-D9
gagacatagcgtcaccgtcagttgaatgaaaactgggctcgctgacactgcagaagcggctcgccgcgagcatgctcaagtgtggcaaaggaaaggtttggcttcacaccaatgaagtcaacaacatctccatgaccaattctcatgattacatagtgaagctggttaatgataagtttaacatcaggaaccacaccacgattcagactctctcacgtacacgtcgaatgaatgagtccaacacgaaaggacgtcactctggatacagtactcgtaacggtacaacggaagcaaggcttcccactaaacttccatggatgatgaaaacgcgtgtgctc

SEQ ID NO: 17954 - DNA, 376 bp, Glycine max
  unsure (1)..(376): unsure at all n locations
  Clone ID: LIB3049-044-Q1-E1-E1
gaccctcaacaacctaaaaaatattcactaagatttatttcccttattttattcatttattctttgttcctagtctttatcttataatttctcattgcttgcccggtaattcaagatcaacttggaaaatttgcaagatttgggatgaaatctggtcggatcttgctttgtgggatggggattttggtgggtcttatttcaatacaaagctcttcctctctcaatcccatctccctctcttcttcttcttcttcttcttcataacacaaacacaaaacataaacctttcttccaaccaaccttttttccaattcattctttgtttctntcaaaatcttcaatccattttcaccttttcacaaatggggatggctgc

SEQ ID NO: 17955 - DNA, 378 bp, Glycine max
  Clone ID: LIB3049-044-Q1-E1-E10
ggttctagtgtgtgattgtttgttgttgtaactcgttcttcttcttttgttgttctgtgtttgtgtttgttttttctctcacctgaaaatgtcttgctgcggtggtaactgtggttgcggaagctcctgcaagtgcggcaacggctgcggaggctgcaagatgtacccagacttgagctacactgagtcaaccaccaccgagaccttggtcatgggagtggcacctgttaaggctcaatttgagggtgctgaaatgggtgtgcccgctgagaacgatggctgcaaatgtggaccaaactgctcctgcaacccctgcacttgcaagtgaagtgttgggagagcaagcttcaagcagagatagcccttaattaagaataa

SEQ ID NO: 17956 - DNA, 384 bp, Glycine max
  unsure (1)..(384): unsure at all n locations
  Clone ID: LIB3049-044-Q1-E1-E11
ggtacgcagcttcatccctaacgcgtgcatagcagagtcagagacagagacgcagccatggggcggagacctgcgaggtgttataggcaaattaagaacaagccataccccaagtcacgtttctgccgtggtgttcctgatcccaagatcaggatttatgatgttggtatgaagaagaagggtgttgatgagtttcctttctgtgtcgatctggttagttgggagaaggaaaatgtttcaagtgaggccctggaagctgctcgcattgcttgcaacaagtacatggccaaatttgctggaaaggatgctttccacttgagagtcagggtgcacccattccatgttcttatgattaacangatgctttcgtgtgctggtgctgat

SEQ ID NO: 17957 - DNA, 344 bp, Glycine max
  Clone ID: LIB3049-044-Q1-E1-E12
gactaatgaaatgtacaatggttgttctgatgattctgcttatgggagtgatgagaacagcactgacactgattcttatcctgctccaaaggctcacagcaacaggaacaacctcagtgtccagaaggggaagaagaagaagaaattgaagtcaaagaaaagcaaggcacatgagtgtccaatttgcaacaagattttcaggtcaggccaagccttggggggtcacaaaaggtcccattttgttgggggttctgaggaaaacacacttgtgataatgccaagtgctcctcctgctgctgttccttgcctcattgatctcaatctaccagcaccggttgatgaat

SEQ ID NO: 17958 - DNA, 392 bp, Glycine max
  Clone ID: LIB3049-044-Q1-E1-E2
ggccattgttgttgctattatcatccgcagctgcttttattcgcaccgcaaacagtgagccatggccgtcggaaagaacaagcgcatctccaaggggaagaagggtggcaagaagaaggcagctgatccctttgccaagaaggattggtatgacattaaggctccttctgtttttcaagtgaaaaatgttggcaaaaccctcgtctctcgtactcagggtaccaagattgcttctgaaggactcaagcatagagtgtttgaggtctccttggctgatcttcaaggggatgaggatcatgcattcaagaagattaggttgagagctgaaaatgtgaaaggaaaaaatgtcctgacaaattcctggggaatggatttcacaacagacaagctga

SEQ ID NO: 17959 - DNA, 392 bp, Glycine max
  Clone ID: LIB3049-044-Q1-E1-E3
gccccattcccaaaatttctcattctccctttcctctccgaaccctcgatcactctcacgcgctcctatattcgctcctccaccgtcgctctctcgaacaaccacaacaccatcttcatcacatggcaaacgcagcatctggtatggcagtccatgatgaccgcaagttgaggtttttggagctgaaggcaaaaaggacacaccgtttcatagtttttaagattgaggagcagcagaagcaggtcattgtggagaagcttggtgagcctgcccagggctgtgaagatttcactgccagccttcctgctgacgagtgccgttatgctgtttatgattttgagtatctgactgaagggaatgtccctaaaagcagaatttttttcattgcgtgg

SEQ ID NO: 17960 - DNA, 292 bp, Glycine max
  Clone ID: LIB3049-044-Q1-E1-E4
taatcccagtggatgtctatttgccgggctgtccacctaaaccggatgctattatagatgctataacacaacctcgtaagaaaatatctcgagaaatatatgaaaatcaattgagttctcaacgagagaatagatgttttacaaccaaccacaagtttcagattgggtacagtactcatactggcaattatggtcaagaattattctagcaactggcatctacttcagagataccatctgacacattttttttaaagtacaataggaaatagcaattcacttttttttaatt

SEQ ID NO: 17961 - DNA, 374 bp, Glycine max
  Clone ID: LIB3049-044-Q1-E1-E5
taatcccagtggatgtctatttgccgggctgtccacctaaaccggaggctattatagatgctataacaaaacttcgtaagaaaatatctcgagaaatatatgaaaatcaaatgagttctcaacgagagaatagatgttttacaaccaaccacaagtttcatattggatacagtactcatactggcaattatggtcaagaattattctatcaactgccatctacttcagagataccatctgacacattttttttaaagtacaataagaaatagcaattcctttttttttaatttcatcataatgtaaataggaaagactaataccaaattcattaaaaaattcaggagaagcaaaaaaatgcaaggtcgtttgtc

SEQ ID NO: 17962 - DNA, 386 bp, Glycine max
  Clone ID: LIB3049-044-Q1-E1-E6
ggaaaccatcaagcttggaggaagttgatccgagtgaagtggaagccgtctttaaacctttaggaccagaagttggggagttgagagtgtaattttggaaggaaaatgtactcttctcatttcttcaaatgcattatagaattgtaagcactgcataaaataaatagatggtgttttcattgggtctgacttccagttcaggaccagcgtgttgcttgtactgtcaccatatgataacatgaggtccatgtttttggaaaggtcaaatgatcatgttgcttccattatacccatttgggagaaatgaaggctagtttcctcaatcaacttctctaaatgttctcaataaattacgtgaattacccattaagaattttgcgcaaaaa

SEQ ID NO: 17963 - DNA, 390 bp, Glycine max
  unsure (1)..(390): unsure at all n locations
  Clone ID: LIB3049-044-Q1-E1-E7
gagaggtagctatagagagagaaacagaggtcatggatggtttgcaaagatctgaggtgtctttcaggagacagggttcatcagggcttgtttgggacgacaagttattgtcaggggaattgaacaaagtgaacaacaacgaagaccaaaagggtggtggttctggtggtgaccttaaccttaaagttagaactacaccacccaacaccaccatccagagaagccgctccaacggcggctaccgcaccggaaaagtctcgccggcgatcgagcctccctctcccaagctctctgcttgcggcttctgcagcgctttcgggaaaacaagggaaaagggccgtgctaagcatcgatcaaggtangttttttctcgtcgccggagacggtggt

SEQ ID NO: 17964 - DNA, 390 bp, Glycine max
  Clone ID: LIB3049-044-Q1-E1-E8
ggggcgaggtagccagagagtgatacaatacagagtgcgttgttgctccttcgccacaactccctgccaacatgggtatctccagagattctatgcacaagaggcgtgccactggtggcaagaagaaggcatggaggaagaagagaaagtatgagcttggtcgccagcctgctaacactaagctgtcaagcaacaagacagtcaggaggatccgggttagaggtggaaatgtgaagtggagggcactgagattggatactggaaattactcctggggaagtgaagctgtaactcgcaagactcgtatactagatgtgggttacaatgccctcaaacaacaagcttgtgcgtactcagactcttgtaaaaagtgctattgttcaggttgat

SEQ ID NO: 17965 - DNA, 377 bp, Glycine max
  Clone ID: LIB3049-044-Q1-E1-E9
gggaggagtttcttcgtggatcttaccctcttgtttgcatatattcacattcttctgtctccgcgtcatctccttctgaactaagaaatggggttgtctttcaccaagctttttatccggctctttgctaacaacgacatatgtattcacatggtaggtcatgatgcggctggtaagattatgatcttgtacaagctcaacctgggatacattgtcacaagtattctcacaattggattcatgtgtgtacactgtgcattatgagaatattatctttacagtatgggatgttggtggccacgataagatgcgtcctttatggatacactacttccacaacactcacggtgctatccctggtggtggatatcatttat

SEQ ID NO: 17966 - DNA, 380 bp, Glycine max
  Clone ID: LIB3049-044-Q1-E1-F1
gacacagagttgcaagagaaagataaaagaagatggcgactcttgattccgacgtgcctatggttcccgccggcgagccctcgagcagcgccggtccttcttccaagaagcccaagcgcttcgagatcaagaagtggaacgccgtcgctctctgggcttgggacatcgttgtcgataactgtgctatctgccggaaccacatcatggatctctgcatcgagtgccaagccaaccaggctagcgccactagcgaggaatgcactgtggctcggggagtttgtaaccatgcttttcacttccattgcatcagtcgatggctcaagactcgtcaagtttgtcctctagataacagtgagtgggagtttcagaaatatggccac

SEQ ID NO: 17967 - DNA, 375 bp, Glycine max
  Clone ID: LIB3049-044-Q1-E1-F10
gagatcgggagggttgctcaaatcaactacggcaaggaatatggcaggctcgtcgtcatcgtcgacgtcattgaccagaacagagcacttgtcgatgcccctgatatggtgaggtcccaagtcaatttcaaaaggctttcccttaccgacatcaagattgacatcaagagggtccctaagaagaaagatcttgtcaaagccatggaggatgctgatgttaagaacaagtgggagaagagttcatggggtagaaaactcattgttagaaagagaagggcatccctcaatgattttgataggttcaagataatgttagccaagatcaagagggcagcggttgtaaggcaagagcttgctaagctgaagaagagcgct

SEQ ID NO: 17968 - DNA, 372 bp, Glycine max
  Clone ID: LIB3049-044-Q1-E1-F11
gaaagcaaaacagatcacaacacaacacacgtgtgtgattgtttatgtgactgacacatacatactacacactattgaatcactcatctggtggttgcatccattctgcttcttccttctccactcatctctttcgctcctcgtcgctctccatattcatatacatggcgctctcatccctctttaaccattctcttctcttccatcaagtccatcgcttctactaagggagatggtggagcaatggaattgggtggtgatcaaacagagcttatatttttggcgactggaaccagtgaaggggttccacgtgtcagctgcttgacgaaccctttagtcagatgtgaggtgtgttcaaaagctgctcaaccg

SEQ ID NO: 17969 - DNA, 302 bp, Glycine max
  Clone ID: LIB3049-044-Q1-E1-F12
agtgcaaaaagaatatggatgctgcagcagaatcaactgctgccacagaagaagtaattgaacttttatttaaaacaatggaaccttaaaaggttttgaaaaaaccaattgtaaaggaacttaaaattggctccagaattaagctccaaaatccgcaataactatgcgtctaaagttgcgcctccgtgaaaatggacctgaagaatactcaatccttcctttaaacaaaattctcaatgaatttgaaattttaggaagtgcgcaaccgctggctcaaagcattcaatcaaaaaatctaaact

SEQ ID NO: 17970 - DNA, 369 bp, Glycine max
  Clone ID: LIB3049-044-Q1-E1-F2
taggcacaccctcacaaacgcaaatcccttggttggccagcttgaccagcttcatgggattaacctcccttttgaatcagaaccaagtagtggtattaggccacaaaataacagtggaaataaactgtttgatcagtccattcagaatgatctaccaaataaattggaaatggagcaaaactacaatatggaagagcatgagccaaaagatgaagaagatgtggatgagggagagaatcttccacccggttcctacgagattttgcaattagaaaaagaagaaatcctcgcccctcacacacatttccgtacaatatgtgggaaaggattcaagagggatgcaaatctccgaatgcacatgcgcggcca

SEQ ID NO: 17971 - DNA, 317 bp, Glycine max
  Clone ID: LIB3049-044-Q1-E1-F3
aggggagagagcagcgagtgttgtgttggcaattaggacagagacgatggatgccgctcaagttggagggaggagccactgtcggttcccttctccgatgtgttgcaatttctcactgttcacatcgctggagccgaagatcactagaggttcttcagctggaatgtgacgtatggtgacatttaaccacttggtgttcaccaaacgggaatattgataaacgggcaaatcttatatccagatattcattctgttaccaacgacatcctcatcatcaatgtcttcaacagcttggctgagccctttcttctctcttg

SEQ ID NO: 17972 - DNA, 380 bp, Glycine max
  Clone ID: LIB3049-044-Q1-E1-F4
gattcctttttggtgaaatataagttttcctctttagttgttgacttcttgtttatttttctgattaatgagaaaaatccactttggttgttcacttgtatatgtatctcagtctcaggtggtggtgcatcgctgagttgtgtgagagtgagaaagagagagtgtgtgtgtgtgcagaagatgtggccattcagcagaaaaggggcttctggtttttcatcatcatccacggcagagcaagtcactgaaggaattgatggaactggtctcactgccattgtcacaggagcatccagtggtattggcactgaaactacacgttgtccttcaattgcgtggtgtccatgtgattatgggtgtgagaaatatgcttgctgcta

SEQ ID NO: 17973 - DNA, 348 bp, Glycine max
  Clone ID: LIB3049-044-Q1-E1-F5
gaacaaagaaagaaagaagttcggagtgagagaacgtaagcggcgttgttccttctttgttcattgttcattcacatacactattctctctttctcgcaaactctcaaaccctgaaacctttttctttgttgttgtttcgttctaacaccttcactttggtgggacgaagaacctgaaaaaaaaaaccttttttatttatttggtgaaactgagacataaacgtgtttttcctcggagacacaggcatcctttcgattacttgaacatatggtttgctcgtaatgttccttgttcgtgttcagttgctaccctcttggcccctttttaagtttcggtgattttccgga

SEQ ID NO: 17974 - DNA, 342 bp, Glycine max
  unsure (1)..(342): unsure at all n locations
  Clone ID: LIB3049-044-Q1-E1-F6
gggtcctttgtattctattcttcaagattcaggtactgcgtttcggaagcagacacagatggctcgtacgaagcaaaccgctcgtaagtccacaggaggaaaggctcctaagaagcagcttgcaaccaaggctgcacgtaagtctgcaccaactactggtggtgtgaagaagccccaccgttatcgtcctgataccgttgctcttcgtgagattaggaaataccataagagtaccgagcttttgatccggaagctccccttccaaaagctggttcgttaaaatgctcaagacttcangactgatctgcgtttccagagccacgccgtgcttgcattgcaaga

SEQ ID NO: 17975 - DNA, 372 bp, Glycine max
  Clone ID: LIB3049-044-Q1-E1-F7
ggaatcgtggaatcttcatgcaatgcttcttcccattttcacactttgttaacacttaattttctgatcccaatctcgttaagcttcttagcaacaacacaaaatgagcgccatctctttcagttccatccattttcacacttggaaaaaccccaaggggtttggaaaggtgagaaaacaaccacatgggaagctacttgtaaagtgttccagccagagtgggaacccatcttcttcgcaaaatgcggttcgtgttggtgttgttggagctagtggctacactggttctgaagttctgcgactcttggcaaatcatccacagtttgggattgcactgatgactgcggataggaaagctgggcagccaatctc

SEQ ID NO: 17976 - DNA, 385 bp, Glycine max
  Clone ID: LIB3049-044-Q1-E1-F8
gacaccacctattgtgtatccacctgtagtccctgtgccaccattaccacccattgtgactccaccaaaccctccaagtgaaacaccatgtccaccaccaccaccaccaccagtggtgccatatccaccaccagcacaaccaacatgccccattgacagcctaaaactgggggcatgtgtggatgtgctcggtggcctcatacacattggcataggcagcagtgccaagcagacatgttgtccagtgcttgcagggcttgtggacttggatgctgcagtgtgtctctgcacaaccattacggctaagattctcaacatcaacatcatcatccctattgctccttcaccttccattgactgtggcaagaccccacctgatggattc

SEQ ID NO: 17977 - DNA, 393 bp, Glycine max
  Clone ID: LIB3049-044-Q1-E1-G1
gaccgttccatttctcaacaacttctgctacttcctactccaaccgcacttctgctccgcaattatcatgggcaaggtcaagatcggaatcaacggatttggaagaattggccgtttggtagccagagtggctctgcagagagacgatgttgaactcgttgccgttaacgaccctttcatcaccaccgattacatgacatacatgtttaaatacgacagtgttcatggacactggaagcatcacgatgtcaccgttaaggacgagaagacccttctcttcggtgacaagccagtcactatttttggacacagaaaccctgaagagatccatgggggtcaactggagctgacatcattgttgagtccaccggagttttcaccgataaggacaag

SEQ ID NO: 17978 - DNA, 256 bp, Glycine max
  Clone ID: LIB3049-044-Q1-E1-G10
gaagaatttttgattcttttcccctagattcagccacagtttcggaggagaagaaaatagtcgttcgagatggcccgtacgaagcaaactgctcgtaagtccacaggaggaaaggctcctaggaagcagcttgcaaccaaggctgcacgtaagtctgcaccaactactggtggtgtgaagaagccacatcgttaccgtcctggtaccgttgctcttcgtgagattaggaaataccagaagagtaccgagcttttga

SEQ ID NO: 17979 - DNA, 345 bp, Glycine max
  Clone ID: LIB3049-044-Q1-E1-G11
ggatcttttcttccactactacaaaacatagtttttacgatggtgattcgactatggttttatcaaaaccgttgtcattttgaaggtagtgacatttttgtaattagtgtgactttttcaatgatggtttttgaaaaattgtctttgaaattggtaatcgatggcagttttggtatgacccatcattataagtttgaggttatatggttgttttgggatgttgtattttggtccctatatatggttgtcctggaatggaattaagtttttagaatgataggtgtgacttcgttatggtgatggatttgaggttagctcatggtgcttctagaagattcaagcttt

SEQ ID NO: 17980 - DNA, 260 bp, Glycine max
  unsure (1)..(260): unsure at all n locations
  Clone ID: LIB3049-044-Q1-E1-G12
gggctcaagctttatttcacgtagctgactttaccgtcagctcaattggaatggtttttcgctatgttcgcaggcaagtgagacgatccatcaatgcccttatctgcctcgaaagaaccggtgtcatccaaacatggtgaagaggtggcaactggatcaataatagctgaaacttctactgtacanggttcggcttgcccaactgtccaagcttgagatctatttttagatatgcttaacacancacatgcaaatcgaac

SEQ ID NO: 17981 - DNA, 391 bp, Glycine max
  Clone ID: LIB3049-044-Q1-E1-G2
gactccacaaaattcatgattcatcaacgacacgacacccaaaatgaagctagaagaatcggtgtccaactccaacatcactgccccgctccttccaccggaagatccgagtccgagtccgcaaaatggatcaatctccggagcggtgttcaacataacaaccaccatgatcggtgccggaatcatgtccattccggcgaccatgaaggttttaggcatagttccggggttggtggtgatcgtgttggtggcactgataacagatgtgactgtggagtttatgctaaggtacacaagttccggtaaatcctccacttacgccggcatgatggccgaatcccttgggctccataggatccctcgcagttaagatttgcgtcatcataaccaa

SEQ ID NO: 17982 - DNA, 379 bp, Glycine max
  Clone ID: LIB3049-044-Q1-E1-G3
gacgattcaaaccctaatcccgcagttacaagtttctatcactgtcactgttctcaagtttctttaccatctttcaaattccattttcttcgaagtcatacacttttcactaaaataaaaatcaattaatcggagcagcatgttagggtttcgaaaagccaatttcagagcaggcttgaaaccctagattccacaaatccatgccagcttgatctcgcggtgcttccgtcaatggcgatcatcggcggtgcgcttcgccaggcgttcatgccgaagcgcgagtacgagagcctcagagaagaagacaaggcgtggggtaagcttcagagaaccgtaacggtggcttccgtggccgtcatcgtgctcgcaatcgtcgtgt

SEQ ID NO: 17983 - DNA, 395 bp, Glycine max
  Clone ID: LIB3049-044-Q1-E1-G4
gatcgtcgtcgtggtcgtgtcgcagcaaaaccaagccacccactaacttgtttggtccaagacatggctctgatcctgcatgctaccaaaacaaacaagaatgccttcaagactctgattgcggcagagtacagtggcgtccaagtggaattggcccctaatttcgagatgggtgtctctaacaaaactcctgaatttctcaagatgaatcctattggaaaggttcctgttttggaaacgcccgatggtccagtctttgagagcaatgcaatcgctcgttacgttgctcgactaaagggtgacaacgctttgttctcatcctctgccatttgataaggccacaattgaccagtggattgatttttcatccttggagatcgatgctaatctcatga

SEQ ID NO: 17984 - DNA, 372 bp, Glycine max
  Clone ID: LIB3049-044-Q1-E1-G5
ataggaatggattattggggtacaccagcttcatccaacattcctgcacttggcagaaaggttccatctactgcagttgctggagggatggttaccgttggatctcgggatagtgctcagtcacaactttggctacaggatgaaagagagcctaaaaggcaaaggcggaagcagtctaacagggaatctgctcgtatgtccaggttgcgaaagcaggctgagtgtgatgagttagctcagcgtgctgaggctttgaaggaagaaaatgcttctctccggtctgaagtaaatcgaatcaagagtgattatgagcagctagtctccgagaattcaactctcaaggatagactgggggaactacctgcgaatgat

SEQ ID NO: 17985 - DNA, 381 bp, Glycine max
  Clone ID: LIB3049-044-Q1-E1-G6
gggcacacagtttactcactaactcactgtgagagcaaagaagaagaagaatgaaggacgccggaaagagccacaaggcgaacggaaagctgtcgccggagactcggaaggatcggaagtcggcgacggggctgagcggatcgccgaagaagggaggccacggcgggaagttcacgtggatcggccacggctacgagcaagttgagatgccgcacggtgctatggacgccaaggacccgaacttcgaggatcctgtggagatcgccaccgtgtgatcgcggtggtttccggtggccaggtctgtaaatagtagtaattggcgaaacgtgttttttccgtgttcaataatgtgaagcgaatcggagaagaagcgttttctcc

SEQ ID NO: 17986 - DNA, 276 bp, Glycine max
  Clone ID: LIB3049-044-Q1-E1-G7
acagcagaaatagagtccatggagaaggctggtcgtgaagcccatgaggctaagttacggatggcagcaatgtttcaagcagagcaggctcgggcagatttacagtctcatgctgaaatgatgtctcgagcagccatgatagggagtgcactatggtcgcaaggcaatgacattgtgattggccacgacatgggagatcaggatcaagcatgtaaccccggtgagatcattaatggatggggaaacaatacacagtgagatgacaatgagccatct

SEQ ID NO: 17987 - DNA, 336 bp, Glycine max
  Clone ID: LIB3049-044-Q1-E1-G8
tggggcacaagtttgttgagatagcgaaaagcaataagatgatcatgagagtgcgtgttttgtttgttgctacagttttggtaacatatgaatgtcatggctcagactaccagaagttccctctccaaatgacaactgggtttggtgggcaatacagcaatgaggtggcatgtgccatttggacgcttggcgtggaagcaaacaacgtagtcaagtggcaaactgttcctgcagcttgcggagagtatataactgactacgttctaggagaccaatatagatcagattccaaagcacttaatcaacaagcctagttctatgctaaatccctcagac

SEQ ID NO: 17988 - DNA, 376 bp, Glycine max
  Clone ID: LIB3049-044-Q1-E1-G9
cggtgagggcaagcaggaagaatgctatgaagagctgttgcaagttggtgaaggtggcggtggatggagctccttatctaagaaaagtggatcttgacatgtacgatagttatgagcatttgatgagggaattagagacaatgttttgtggcttagccattcgtaatcatttgatgaatgagaggaaactgatggatcctggaaatgggattgaatacatgcccacctatgaggacaaagatggtgactggatgttggtcggggatgtaccctggaaaatgtttgttgaatcatgcaagaggataagacttatgattagctcagaggccgttggtttaggtccgatgtctacttcttcaaaatgtacgggttccac

SEQ ID NO: 17989 - DNA, 385 bp, Glycine max
  Clone ID: LIB3049-044-Q1-E1-H10
gaaaggaaaggggaacccaaaccgaaaccctaaccctaacggagagatggcggagcacttggcatcgatattcgggacggagaaggacagggtgaactgtccgttctacttcaagatcggcgcgtgcaggcacggcgaccggtgctcccggcttcacaccaagccgacaattagcccaacattggttctgtcgaacatgtaccagaggcccgacatgaacatgagcattatcaccaaccccgatcagccacaaccccaatcccttgaccccgacaaggtgcaggatcacttcgacgacttctacgaagatctcttcgaggagctcagcaagtacggccccattcagagcttgaatatttgtgacaacctcgccgatcacatggtt

SEQ ID NO: 17990 - DNA, 411 bp, Glycine max
  Clone ID: LIB3049-044-Q1-E1-H11
cccacgaatcaatacggatgcgacaagacaacaggaagggaaaaggacagtaatctaaagtcaaattaagatgaatgccattactatcattttgaattgttctgcttgttctttccgttgggattgaaaatgaggggccattgaaagtgattgaatcaagaacctgtcaagataggttgggcgcgctaaactgtatacaagacgaatgtcatattagttgcataaaaaaacatggaaagttaacaaaagttgggtgcagtatgcctttatatgattgcatatgtctctacccatgttaataagtgtttgaccttcttcctacattgtccctatatgaatgtcaatttatttgtaccagacaatgatggaatcaaagaaaataaaattacttttttacaataaaaactttcc

SEQ ID NO: 17991 - DNA, 386 bp, Glycine max
  Clone ID: LIB3049-044-Q1-E1-H12
gttgctaaaaaactgaggctgaactctgcaagtcctgttgcagatgctgagagcattgtatcaaaggctattcgtgatggtgcaattgatgctacattggatcatgccaatggttggatggtgtccaaagaaactggagatatttactccacaaatgagcctcagttagcctttaattctcggattgctttctgtcttaacatgcacaatgaggcggttcgagcacttcgatttccaccaaacacacacaaagagaaggaaagtgctgaaaagagaagagagagacaacagcaagagcaagagctggctaagcatattgtagaggaagatgacgatgatttctgataattgttttttttcaacctatgaaatgctatctggatacc

SEQ ID NO: 17992 - DNA, 358 bp, Glycine max
  Clone ID: LIB3049-044-Q1-E1-H2
gtacttgggagctctcggctcgctaaccccagctacttctccctcatccactcacaaaatgtgccaggccctctccgccccatcgcctccgtgtacggctcttctctccttccttttcttcctcctcacggtggtgggcccggtctcggtctcggcatggcggccgtggccccagaaaaacaatatgaacaccaccgattacgccttcggggactccaagaaatacgaggggtcctcggagttcgtgaagctgaggtaccacatgggaccggtcctcacgaccaacatcactgtccacaccatcctggtacggcaagtgggagcggaaccagaagaagatcatccgcgagttcataaa

SEQ ID NO: 17993 - DNA, 392 bp, Glycine max
  Clone ID: LIB3049-044-Q1-E1-H3
gacaccacacaccacacacatagtagctattatactctctagagtaattgcggaatctgctagaattttctaataatggcgaaagacgttgagcaggtcacagagcaaggtgaatactccgcgaaggactaccatgaccctcctccggcaccgttgatcgacccagatgagctcacaaagtggtccttgtacagagccgccatagctgagttcatagcaacactcctttttctttacatcaccgtgttgaccattattggctacaagagacagagtgacaccaaaatccccggtaacaccgaatgtgacggcgttggcattttgggcatcgcttgggccttcggtggcatgatctccatccttgtttactgcactgccggaatctctggggg

SEQ ID NO: 17994 - DNA, 421 bp, Glycine max
  unsure (1)..(421): unsure at all n locations
  Clone ID: LIB3049-044-Q1-E1-H4
gcagaaaaacaacaaaaggggaaaaaaaaaaaaaaaaaaaaggactttggaaccaaaaattaaaaaaatcaacaagcaatcaacaaaaggtcaanggcccggaattcaagggtttgggaaactccctggctgtgggaaactcctaactggccctgggaaaaattggaatccaagcccgaattgcaataatgccaaagtgactcctccctccgtgttacccacgacgccttcaacaccttcttcagcgaaaccggatccggcaagcacgtccctcgcgccgtcttcgtcgatctcgagcccaccgtcatcgacgaagtccgttgtggcacttaccgtcaactcttccaccccgaacaactcatctccggcaaagaagatgccgccaacaactttgccagaggccactacaccgttggcaaag

SEQ ID NO: 17995 - DNA, 393 bp, Glycine max
  Clone ID: LIB3049-044-Q1-E1-H5
aggaagttcaaagtgtaggacgagaaagtagacacagccatgtccactactggtactgttctggcttccactccaacacaaaggctattaggcaaagtggcattggttactggtggagcgtctggaattggagaaagcattgtgcgcctcttccatatccatggtgctaaaatatgtatagctgatgtgcaagacaaccttggaaagcaggtctgtcagtctcttggtgatgaagcaaatgttgtttttgtccattgtgatgttacagtagaggatgatgtttcccatgcagtggacttcactgtgggtaaatttggcaaccttcacatcatagtcaacaatgccggaatttctggatccacttgttccgatatccgcaatgcagacttatca

SEQ ID NO: 17996 - DNA, 374 bp, Glycine max
  Clone ID: LIB3049-044-Q1-E1-H6
gaccgttccatttctcaacaacttctgctacttcctactccaaccgcacttctgctccgcaattatcatgggcaaggtcaagatcggaatcaacggatttggaagaattggccgtttggtagccagagtggctctgcagagagacgatgttgaactcgttgccgttaacgaccctttcatcaccaccgattacatgacatacatgtttaaatacgacagtgttcatggacactggaagcatcacgatgtcaccgttaaggacgagaagacccttctcttcggtgacaagccagtcactatttttggacacagaaaccctgaagagatcccatgggggtcaactggagctgacatcattgttgagtccaccggag

SEQ ID NO: 17997 - DNA, 359 bp, Glycine max
  Clone ID: LIB3049-044-Q1-E1-H7
gggctcatggattgtacgccagagtgttggtagtactccttgtttactgggaaaggcggttgattgcaactatattcggggtcccaagtatttagaaattgatgttgatattggttcttctactgttgctaatggagttttgggtctggttattggtgtgattacaacattggtggttgatatggcttttcttgtacaggcaaatacacctgatgaattgcccgagaggcttattggagctgttcgtatttctcatttagagctcaaatctgccatcgtcccaaaactggaaccagatccgtcatgactgaccgagtcgtttctgttcttctatacaaaatcatttgtttgcaatatgc

SEQ ID NO: 17998 - DNA, 349 bp, Glycine max
  unsure (1)..(349): unsure at all n locations
  Clone ID: LIB3049-044-Q1-E1-H8
aaccatatgaggagaaagagtgggaaacagatgaggaaattgattctgtacaatctgcccctgttgctgctgtttgtgcacctgttcctatacaacctagtgaaagccatatttcagttgctaattacatccatccctctacaagtggatgtgctggattgacctctgtatcatgtgtatcagaattgatgccatcttgctcgacacatccttcagcacctagcaatccagttggcactgtatcatgtgtatcagaattgattccctcttgctcggaaccacatcatttgccatcanacaatcaagttggctctgtttcatgtgtctcagaattcatgccctcttgctc

SEQ ID NO: 17999 - DNA, 383 bp, Glycine max
  Clone ID: LIB3049-044-Q1-E1-H9
ggagccacacaaaaaccaatccacaccctataaaaaaacactctttgtgtgtctgcattttgattgattccctcattcttcatccatagacatggccaccgtcacttctgcagccgttgctattccctcattcactggcctcaaggcaagcgcaggcaaagtgagtgccgcagttaaagtctcagctccccaagccacaaggttgggcatcaaggcttcgctgaaagacgttggagtcgctgttgtggccactgccgcgagtgcagtgctggctagcaacgccatggccattgaagtgttgctgggtggtgatgacgggtctctggctttcgttcccaacaatttctccgtggcctctggggagaagatcgtgttcaagaaca

SEQ ID NO: 18000 - DNA, 391 bp, Glycine max
  unsure (1)..(391): unsure at all n locations
  Clone ID: LIB3049-045-Q1-E1-A1
ggggcgaggaagccacatagagacacaatacagagtgagttgttgctccttcgccacaactctctgccaacatgggtatctccagagattctatgcacaagaggcgtgccactggtggcaagaagaaggcctggaggaaaaagagaaagtatgagcttggtcgccagcctgctaacactaagctgtcaagcaacaagacagtcaggaggatccgtgttagaggtggaaatgtgaaatggagggcattgagattggatactggaaattactcctgnggaagtgaagctgtaactcgcaagactcgtgtactagatgtggtttacaatgcctcanacaatgagcttgtgcgtactcagactcttgtcaaaagtgctatcgttcaagttgatgc

SEQ ID NO: 18001 - DNA, 332 bp, Glycine max
  Clone ID: LIB3049-045-Q1-E1-A10
ggagtgagtgagatagagagagacgcttcgcaaatctcaatcgaatctcagaaaaatgagagaaatcatcagcattcacataggtcaggccgggatccaggtcggaaactcctgctgggaactctactgcctcgaacatggcatccagcccgacggcatgatgccttctgactccaccttcggtgtagcccacgacgccttcaacaccttcttcagcgaaaccggatctggcaagcacgtcccccgtgctgtcttcgtcgacctcgaacccaccgtcatcgacgaggtccgctgcggcacctaccgtcaactcttccaaacccgaacaactc

SEQ ID NO: 18002 - DNA, 353 bp, Glycine max
  unsure (1)..(353): unsure at all n locations
  Clone ID: LIB3049-045-Q1-E1-A11
gacagcanaacaattttcaaactcaattaccattccataacctaaatctcctctttgtttccgagtcagagagcaatggcacgtaccaagcaaaccgctcgcaagtccaccggcggaaaggcgccgaggaagcaattggcgactaaagccgctcgcaagtcagctccggccaccggcggagtgaagaagccccaccgcttcaggcccggaacggtggctctgaaggagatcagaaagtaccagaagagcactgaacttctgatccgaaaactcccattccagaggctcgtcagagaaatcgctcaggatttcaaaacagatcttcgtttccagagcagcgctgttttctgcgc

SEQ ID NO: 18003 - DNA, 200 bp, Glycine max
  Clone ID: LIB3049-045-Q1-E1-A12
ggtgctaatcttatcttatccctctaatcactctagctgttgcaaatttctactatttttcaatggcttctgcagatgttgagttccgttgctttgttggtgggcttgcttgggtcaccggcaacgatgccctcgagaaagccttttcaatctacggcgacatcgttgaatcgaaggttatcaacgactgtgagactgga

SEQ ID NO: 18004 - DNA, 275 bp, Glycine max
  Clone ID: LIB3049-045-Q1-E1-A2
gagagagagagagagagagatgggaaggggaagagtggagttgaagaggattgagaacaagatcaacaggcaagtgacctttgcaaaacgaaggaacgggcttttgaagaaagcttatgagctttccgttctttgtgatgccgaggttgctctcatcatcttctccaatagaggaaagcagtacgagttttgcagcggttcaagcatgctcaaaacgctggagaggtaccagaaatgcaactatggagcgcctgaggacaatgtggcaacaaatg

SEQ ID NO: 18005 - DNA, 328 bp, Glycine max
  Clone ID: LIB3049-043-Q1-E1-B3
gaaacgaaacctcatccatggcttctcttctccgttgcaacggagtcttcctctcccccttacctccccaacccagacgcgaccccatccttcccaaattctttctcccccaatccccaaatcctaaaccgtcacgcctcctgacggtgcgcgcggatgtgaaagagacctcctccgccgccgccaccaccaccaccaccacttcctccgacgacaagatccgcgaaatcctccgcaaccgcgactacgacaagaaattcgggttcagcgtggacatcgagtctttgacaatcccaaaagggctctcgaaagaaaacatccgtctgat

SEQ ID NO: 18006 - DNA, 363 bp, Glycine max
  unsure (1)..(363): unsure at all n locations
  Clone ID: LIB3049-045-Q1-E1-A3
gaccaacagttttgtgagtgaagcctttccagtgtgcagctgcatctgcagccggttcaatcattcaaaattgtcaagttgtttggtttggagcaatcatcattgtccaaattgcaattttttcagaaggatagcaagaatttgggaagttgctgaagcaatanggagtagtggatacggtttaggatcattgttataataggcaaaattgatggtaatcgtacatagtggctaggaagggatataatggctactgctgcagttattggactcagtggaagaaagaggctcttgagttcatcataccattactctgatattatagaanagctttcttatggcagtgattttggattcacacac

SEQ ID NO: 18007 - DNA, 344 bp, Glycine max
  Clone ID: LIB3049-045-Q1-E1-A4
gatattgacaaatacaatgatatttatttttatagttacatttttttgaagggcagaaattgtagtgaaagcgataattctagtactagtataataactagtacgaatgatacaaatgatagtgattccactataggagaaagttctaataatctcgatgaaagtcaaaaatataagcatttgtggcttgaatgcgaaaattgttatggattaaattataaaaaattttttaaatcaaaaatgaatatttgtgaatactgtggatatcatttgaaaatgggcagttcagatagaatcgaacttttgattgattcgggtacttggaatcctatggatgaagacat

SEQ ID NO: 18008 - DNA, 269 bp, Glycine max
  Clone ID: LIB3049-041-Q1-E1-C7
ggagatggaacaaataaagcacagaacagttgacgtgaatggcataaaactgcatgttgcagagaaacgacagggtccagtcgtgttgttcctccacggcttccctgagctctggtactcatggcgccatcagattctctctctcagctcgctcagcaactgcgccgtcactcccgatctccgtggctacggtgacaccgaagcaccaccttcaatcagcagctacaactgcttccacatagtgcgtgatctcgttgcgcttattcact

SEQ ID NO: 18009 - DNA, 264 bp, Glycine max
  Clone ID: LIB3049-041-Q1-E1-C8
gcactgtgaagccgcaactccccgtcgaatctccctaaaccaactacgccattctgttcctcaaagctgcgtttggcgcttaggaattttgctgtacgctcacccctaactccagaactcatcacgagctcccactcatactctccgcacaatccacaatcgctcgctcaatcattctcgtcgccgacctcgttaatgacaattcttcgctagcgacaacagcgggaaacggtgtcatattgtgcgtggtcacggaggacgtag

SEQ ID NO: 18010 - DNA, 258 bp, Glycine max
  Clone ID: LIB3049-041-Q1-E1-D1
gattgcagcatggtgtcttcctcccaacacattctggtcaccggtggtgccggtttcattggcacccacaccgtcgttcagcttctcaaagctggcttcagcgtttcaataatcgacaatttcgataactccgtcatggaagcagtggaccgcgtccgccaagtggttggccctctgctttctcagaacctccaattcacccagggcgatctccggaatagggatgacttggagaaactcttctccaaaacaacattt

SEQ ID NO: 18011 - DNA, 355 bp, Glycine max
  Clone ID: LIB3049-041-Q1-E1-D10
ggagtgcagtgatagagataagaaaatgtggcttgtgcagctctcaaccccatttctgaacggacatggtcattccaccacccttctctccaagcacagttcggcggtgactcagacccactgggccccaccgagtttcctgcctcaaatcgatgcgatgaagacaatgcaggggagagtggtgtgcttcaccaacgacaagacggtggcagtggaggtggtgcggctggcccctcacccaaagtacaagaggcgcgtgaggaagaagaagaagtaccaggcccacgaccccgataaccaattcaaagtcagcgacatcgtccagctccagaagaacagcccatcagcaagacaa

SEQ ID NO: 18012 - DNA, 356 bp, Glycine max
  Clone ID: LIB3049-041-Q1-E1-D12
gagccaagtgaagggtgaatcatctcctctcctctcttctacgatggccatggacagtgtttatgcttcgtctttaactagcaatttatatttatagatatgttcctcccctcttcttcttcattttcagccacccgcgccatttctacctcgcagtcgataggctccagttcaaaatgcaaacagtgattgaactggtggctcgacgtccatgcttcctcatcgtggtctgctgcagcacgcgcaacgacctcgactctctctgctctccccttcctttcgtcttctgctctgctctctctcaaactcattttcttcctcgtaatttacacgcgctacagtgttttcctaattcg

SEQ ID NO: 18013 - DNA, 262 bp, Glycine max
  Clone ID: LIB3049-041-Q1-E1-D2
gattgcagcatggtgtcttcctcccaacacattctggtcaccggtggtgccggtttcattggcacccacaccgtcgttcagcttctcaaagctggcttcagcgtttcaataatcgacaatttcgataactccgtcatggaagcagtggaccgcgtccgccaagtggttggccctctgctttctcagaacctccaattcacccagggcgatctccggaatagggatgacttggagaaactcttctccaaaacaacatttgatg

SEQ ID NO: 18014 - DNA, 270 bp, Glycine max
  Clone ID: LIB3049-041-Q1-E1-D3
gaagagtgaagagcgaagagaatggctcccaagggtttaatctttttggctgtgttatgcttctcagcactgtcactgagtcgttgtcttgcggaggataatggacttgttatgaacttctacaaggagtcatgccctcaggctgaagacatcatcaaagaacaagtcaagcttctctacaagcgccacaagaacactgctttctcctggctcagaaacatcttccatgactgtgctgttcagagttgtgatgcttcactgttgctggac

SEQ ID NO: 18015 - DNA, 252 bp, Glycine max
  unsure (1)..(252): unsure at all n locations
  Clone ID: LIB3049-041-Q1-E1-D4
ggggattgagggctcggtctgcgtcgaagcaagcttctctccatttgcacgacgacgaggaggagtgtangccttggcgtccaaggttaaccatgtctttgtcgtgggcctccgccctcatgatcaccattctccttctcctcctcgccgcggtcatcgtcgcatgcttcactctcccaatcgaaaagatgatgaatgacttcttattatgggtcgatcacgatcttggtccctggggcccacttgttctgg

SEQ ID NO: 18016 - DNA, 263 bp, Glycine max
  Clone ID: LIB3049-041-Q1-E1-D6
ggcagttcaattccaatatattccattctctctgtgtatttccctacctcacccttcaagatgcagatcttcgtcaagaccctcaccggcaagaccatcacccttgaggtggaaagctctgacaccatcgacaacgtcaaggccaagatccaggacaaggaatgaatccccccggactagcaacgtctcattttcgccggaaagcaacttgaggacggccgtacccttgctgactacaacattcagaaggagagtactcttca

SEQ ID NO: 18017 - DNA, 270 bp, Glycine max
  Clone ID: LIB3049-041-Q1-E1-D7
gaagagtgaagagggaatagaatggctcccaagggtttaatctttttggctgtgttaagcttctcagcactgtcactgattcgttgtcttgctgacgataatggacttgttatgaacttcgtacaaggaatcatgccctcaggctgaatacatcatcaaataataagtcaagcttctctacaaacgccacaagaacactgcattctcctggctcagaaacatcttccatgactgtgctgttcagagttgtgatgcttcactgttgctgga

SEQ ID NO: 18018 - DNA, 273 bp, Glycine max
  Clone ID: LIB3049-041-Q1-E1-D8
ggtgggtgttattcatagaaccgaatactcatcgttgatcagttgatgaaccgagttcttcagcgggatcgaattttcatacattttgccaaaaagatcaaattttgaagcaattgtttttgtgggcaacgttcattctttctgatccttcgaaaaatcaattttcggctttgggatcaatcggaaatggagaaggtgatgaacattctgaagccaaagccaaatccgcagcaactattgagggattggcagcgtaagcgtcgccaagagtgc

SEQ ID NO: 18019 - DNA, 297 bp, Glycine max
  Clone ID: LIB3049-041-Q1-E1-D9
gatacgtgttattgccaaatgccatttcacaccgcagttgcctctgtcagcatcctcttcacgagcagatatcattgctgcttcccagttgcaaattcggatctcacacattcccaagagcttatgtgagcaaagtgtcgccgtgcaaatcgatccaaaaatcgactttgccgagcgtgatcgggcagagatggatgaggtgagaactaatgccaatgctaagataagtccagaacaacgattgagggagttgccacataagagtatcctgggatgtagcattactaagaggacatg

SEQ ID NO: 18020 - DNA, 259 bp, Glycine max
  Clone ID: LIB3049-041-Q1-E1-E1
gacaaaacaagtgtttcgaatagattatcctaagtctttgggaatagtgctgcaatggcttcaagtcaggaggaggtgacccttttgggagctactggaagcccatttgtgtgcagggttcatattgccctcaagttgaagggagttcaatacaaatatgtcgaagaaaatttgaggaacaagagtgaactgcttcccaaatccaacccagttcacaagaaggttccagtgtttattcacgatgagaagcccatagcag

SEQ ID NO: 18021 - DNA, 346 bp, Glycine max
  Clone ID: LIB3049-041-Q1-E1-E10
ccggctcgacccacagcgtcagtcgggtggcaaaaaaccaccaaaggggaagtcaaggtggggtggacgaccacggagaagttatcgcacgacacgtgaaagaatccatctggtatgtgcgatcgatcatctcctctgctaaatacaatggaactgatagcccagcagctaagctactacaatggcactgacccagcgaagccgatctacgtggcggtgaacggacgagtctacgacgttaccacgggaaaatccatctacagccccagcagcagcaaagccatgttcgccggcacagacaccggcaagaccctcgagatgatgagcaagaacgacgatgacatct

SEQ ID NO: 18022 - DNA, 356 bp, Glycine max
  Clone ID: LIB3049-041-Q1-E1-E11
gaggtgaaggtggggtggaagaataaggataagttattgaaagaaaggtgaaagaatccattggtatgtgcgatcgatcatctcctctgcgaaatacaatggagctgacagcccagcagctgagccaatacaacggcactgacccatcgaagccgatctacgtggcggtgaaaggccgagtctacgacgttacctccggaaaatccttctacggccccggcggcccctacgccatgttcgccggcaaagacgccggcagggccctcgccaagatgagcaagaacgacgatgacatctccccctccctcgacggcctctccgacaaggacatcggcgttctcaacgactgggagaac

SEQ ID NO: 18023 - DNA, 320 bp, Glycine max
  Clone ID: LIB3049-041-Q1-E1-E12
ggagtggaagagtgaataagagatatcaatatattatgataatggagggatacaataagaaggttatgattgtggggatggtgttgggcatggccatgattgggatggccaatggccaatactcgttttgtcgcatgcccagcgatgggttggcggcatgcaagccgagtgtgagtggggactatcctgctgatccctccactgcttgttgctcagccattgccaaggctgatcttaaatgcttctgccgcttcaaggattcgggccttctctctatgtatggtgttgatcccaacaagtgcatggaactccctgttaag

SEQ ID NO: 18024 - DNA, 277 bp, Glycine max
  Clone ID: LIB3049-041-Q1-E1-E2
gagacgcagcagcaaaaagtttcaaatttggtactttggcaccctccacgtagtagttctcaccatgtccgacactggaagaagtgccaacaacaatggttccaagcggagcctgccatcatgcacgagtgcaagggaaaatgagagcgaaaacagtgcaaagaaaccaaatttggatggcaaaggtgagaaattcggtgaagccgagacacccaacaagagcaaagtccaaaatcaaaatggtggaaaatcttccgcctcatgtttggaatctaaa

SEQ ID NO: 18025 - DNA, 275 bp, Glycine max
  Clone ID: LIB3049-041-Q1-E1-E3
gagtcaaacaatgtcctaaagaaattcaattgaaactcccaatttctgaacgacacactacactatactactattctatgccctttccccctttttcgtctctagggttactgcaactgctacaagaagaagcttccgcaatggagcgagacggcgtcgtttcacagccagttgcggttatcgcttgcatcgcagtggccgtgttctacgtggccatcctctacgctcccaccgtgctccttcgtctcccacctcctccttccttcaaaacctac

SEQ ID NO: 18026 - DNA, 270 bp, Glycine max
  Clone ID: LIB3049-041-Q1-E1-E4
gggtggtgctggttctctgtggtggcttaaaggtctacaatacacctatcgaaagctgaggtattgtcaaagtacttgccttgggactcattttttaatccaattcggtggtcatcggtgtagcaagttcattctgacgtagttttttaagtgttacgttgaaatttgttttactgtagaaatggggttgttttttgttcagtgtactcgaatgttgtgcgtgattgggtcattggaagtgtaggtgggtttttggtttagtgtattgaa

SEQ ID NO: 18027 - DNA, 270 bp, Glycine max
  Clone ID: LIB3049-041-Q1-E1-E5
ggcagcaggtgcaggaaaattaatctccctttcattttctctgcatctgtactctccaaaatgccgtccttagaggaggagctcttcccttcaaccccaggcaagttcaagatcgagcgggcccaccacatgaaccgccagctctaccgctgcttcgcctccaccagcaccatgttcctgtgggccctctttttaatcgccctcaccgcttcatatctcagcttccaaggcttcgttgattccggcagccgctacctctccgcctcctgg

SEQ ID NO: 18028 - DNA, 274 bp, Glycine max
  Clone ID: LIB3049-041-Q1-E1-E6
gacactaagcgtgaactaatatcgaaattcaattataccctgaccctgtgttagtttcgtgtgttgagaagcagagagaggcagagatgcaaggaagcgcagctgacggtgaagccttggatttcgagcctgaggacgatgacttgatggacgaggacggcgcccccgacgccgacgcttctccgcctcaacctaagctcaaatccgccatcaccgccgccgccgcccccaaaaagaccaagggtcgcggattccggcaggacaccgacgccaa

SEQ ID NO: 18029 - DNA, 271 bp, Glycine max
  Clone ID: LIB3049-041-Q1-E1-E7
ggaaagcatattcttcaatttaaacacagaaacaaaatcaccaccttcaaagtcttctctctcgagaatcagcgaataaaactagggtttccgatcgtcgtcgaggagaatgccgaagaacaagggaaagggaggaacgaaccggaagcgcgggaagaacgaggcggacgacgagaagcgggagcttgtgttcaaggaggacggccaggagtacgcgcaggtgcgccggatgctggggaacggccgctgcgacgcgatgtgcatcgacggc

SEQ ID NO: 18030 - DNA, 270 bp, Glycine max
  Clone ID: LIB3049-041-Q1-E1-E8
gaagcactttactttttttttcagccatggagtttcattgccttccaatatttctttatctcaatttgatgttgatgacagccaatgctgcgttaactcctagacattactgggaaacgatgcttccaagaactcccttgccgaaagcaatcacagagctactaagccttgaaagtacgtccatatttgaatatgccgggaatgatgaccagtcagaaagtacgtccatattaggatacgctggctataatcaagacgaggatgatgtga

SEQ ID NO: 18031 - DNA, 359 bp, Glycine max
  Clone ID: LIB3049-041-Q1-E1-E9
gaccgtcacaccccaatcgtagccgtcgcactttgcgttttctgcgtcatctccgattccccgacaatggccacccaaatgagcaagaagagaaagttcgtagctgatggagtgttcttcgctgaactgaacgaggttctgacaagggagttagccgaggacggatactccggcgtggaagttagggttacgccgatgcgcaccgaaatcatcagcagagccaccagaacccaagccgttctcggtgagaagggaaggagaatcagggaacttacctcggtggttcagaagaggttcaagtttcccgagaacagtgttgaactttaagctgaaaaggtcaacaatacgggtctttgcgc

SEQ ID NO: 18032 - DNA, 257 bp, Glycine max
  Clone ID: LIB3049-041-Q1-E1-F1
gaatgacaaaatgtcaaagattggaaaagatgtcacggtccgcttctcggtgataggtacaaagtggatggaagcagaaagggaatttcaggcattggtcagtttggaaggggattatctgggaccaatttcaactccggatatttagctacattttctttgttgccttgtcttctgaaatggatgaaatattttccatatgaagtcagttcttgtaattaatgataactctgtctgccttccttttagaactgtga

SEQ ID NO: 18033 - DNA, 361 bp, Glycine max
  Clone ID: LIB3049-041-Q1-E1-F12
gagggttttgcgctgttgttgctgctcatcctccgtaacctccgagctctgcaccgaagaacgaagccatggggaagacacatggaatgggatctgctcgcaagctcaagtcccaccgcaggaggcaaaggtgggctgacaagtcatacaagaaatcacatcttggaaatgaatggaagaaaccttttgctggttcatcccatgccaagggaattgtccttgaaaagataggtattgaggctaagcagcccaactctgccattcgtaagtgtgccagggttcaacttatcaagaatgggaagaagattgccgcttttgtccctaatgacggttgcttgaactacattgaagagaatgacga

SEQ ID NO: 18034 - DNA, 268 bp, Glycine max
  Clone ID: LIB3049-041-Q1-E1-F2
ggggttgggttgggttgtcattgttggtatatcaacggttgatactaatcaatcactcatctgcctctcattgtagtctaagatggacacgcgcggatactatgaggaggatctaccgaaacctgtggatctgatcacaggatgttccacgggagggataggccacgcgtttgcacgcgccttcgctgaaaacaattgcacggtggtggccaccagcaggtcgcggtcgatcatggtggagttggaacacgatcacatgttctttttg

SEQ ID NO: 18035 - DNA, 302 bp, Glycine max
  Clone ID: LIB3049-041-Q1-E1-F3
aggcgtcagtacaggctgcgagagggacgactgactgggactaacaagccaggtatccacaaaaaatggagagaagtgcggtctctcatcgcacgcatctagcactgtctcactctctcacgcacgcatcatctcaaacttgttcgcactttttcacggatctgatctaactaagttctcgccatgaatcgccactacgatcccaatcctttcgaggaagaagaagtcaatcctttttcgaatggtggtgctgctcctgcatccatatcacgtattccaccattagcatctcagccactggg

SEQ ID NO: 18036 - DNA, 273 bp, Glycine max
  Clone ID: LIB3049-041-Q1-E1-F4
ggcactttcagattttcttttccttcactttcccgagaaaaggataacacttttcactttcttcactacgttctcacttcgatatggctcgtacgaagcaaaccgctcgcaagtccaccggtggcaaagcgctacgtatgcagctcgccaccaaggccgctcggaagtccgctccggcgaccggatgagtgaagaagccccaccgcttcatgccgggaaccgtggcgctgagggaaatcagaaagtaccagaagagcaccgagcttctcatca

SEQ ID NO: 18037 - DNA, 269 bp, Glycine max
  Clone ID: LIB3049-041-Q1-E1-F5
cggtctggatactttggtgctgcgattaagcttcaaccaggttacactgcaggagtcataacatctttatacctttcaaacaaccaagactacccaggacaccatgatgaaatagacattgagttccttggtaccacgccggataagccatatgtcttgcagacaaacgtatacgtcagaggaagtggagatgggaatattatagggagagagatgaggattcacctttggttcgacccaacacaagattttcacaactatgctattct

SEQ ID NO: 18038 - DNA, 234 bp, Glycine max
  Clone ID: LIB3049-041-Q1-E1-F6
gaatcaaagtgaaacagtaagatgtttttggtggtaagagcctgtggttcttcttctgcacatattcagcccactctcacaccgcagcgtagtagcataaacgtcgtcgttagatgctccatcagcagcgtgcaggagaaagaagagaagggcactgaattggactcttcggtgtcattccctctgataagggcggcgaagagggtggttctggtgaggcacggccagagcacg

SEQ ID NO: 18039 - DNA, 299 bp, Glycine max
  Clone ID: LIB3049-041-Q1-E1-F7
ccaggcgtcagcccacgcctcagcgcgagacgtccatgctgctgctacaagactacacattggggcaatcatcactgttccactcatatgtcatttcgcgtcatgatgctgtcgttcttcgtctgcatcgattcacaccactctcacagcgtcacatacttgcaggggactcctcattagatattcgatcaacattctgcaagatagcgtacgcagaggcacatgatctgaactcttctgaggcattcccgctaatacgagttgcaaatcgagtgattctggttcagcaacatcatagc

SEQ ID NO: 18040 - DNA, 271 bp, Glycine max
  Clone ID: LIB3049-041-Q1-E1-F8
gctctcgtctcgtggaagtgtaagcaagcaaaaccctagcggcgcctgctttctttgttcgtgttttgcatcaggatggagtctcaggtgaagcacgcacttgttgtcaaagttatgggtcgtactggatccagaggacaagtgacccaggctagagtgaagtttttggatgatcagaaccgtcacatcatgaggaatgtgaaaggacctgtgagagaaggagacattctcaccctactcgagtctgaaagggaagcaagaagattgcgct

SEQ ID NO: 18041 - DNA, 361 bp, Glycine max
  Clone ID: LIB3049-041-Q1-E1-F9
gaaaaccagggaagattctatttcatttccttgccaacttagagagagagagagagagagatggcaattgggttcatggaggtgcagcttgtgaaagcaaagggtcttcaggaaacagatatctttgctcatatggacccgtatgtacggttacaatacaaaggtcaagagcgcaagagcagtgtaattcatgagggcggcagaaatcccatatggaatgagaaatttgtattcagagtggaataccctggatcaggtgatcaatacaagctcaaccttagaatcatggacaaggatgtattttctgcagatgactttgtcggccaggctacaatctatgtgaaggatttattggcggaag

SEQ ID NO: 18042 - DNA, 247 bp, Glycine max
  Clone ID: LIB3049-041-Q1-E1-G1
ggatcctttgtattctattcttcaagattcaggtactgcgtttcggaagcagacacagatggctcgtacgaagcaaaccgctcgtaagtccacaggaggaaaggctcctaagaagcagcttgcaaccaaggctgcacgtaagtctgcaccaactactggtggtgtgaagaagccccaccgttatcgtcctggtaccgttgctcttcgtgagattaggaaataccagaagagtaccgagcttttgatc

SEQ ID NO: 18043 - DNA, 302 bp, Glycine max
  Clone ID: LIB3049-041-Q1-E1-G10
agggatacctgagagagaaaggaaaggttaactaataagcaatacttcaatggccacccttgttgttcataatcaaacttcttctgctcaagatgctgaggctctccaacaggctttcaaaggatggggggctgatgacaaggccattatagcaatactgggtcacagacatgttcatcagaggcaagaaatcagaaaagcttatgaggagatttaccaagatgatctcatcaaacgccttgagtccgagatctccggtgactttgagagagctatgtaccggtggatgttgcagcctgcgg

SEQ ID NO: 18044 - DNA, 324 bp, Glycine max
  Clone ID: LIB3049-041-Q1-E1-G11
gacaacacaatctcacagcgcaggaattgaaggaaagatagagaaatgtggaagagagccttggtcggcgccgtgggtgctctccggcggccatattcgtcgggaggtggcggcatctcctccgccgtgaactcaatgctcctccgctctctaaaggatcactatcaagaagtcgccaaaatgaacatgccccctaaagtgagtcctccttcgccgttcacgatcgtgaagggagctctggactcgcacggtccggttctgaagcgcagctacggcgacgaagaggtgagcatctatgtcatgcggttgttgaccccgaggacg

SEQ ID NO: 18045 - DNA, 336 bp, Glycine max
  unsure (1)..(336): unsure at all n locations
  Clone ID: LIB3049-041-Q1-E1-G12
gacgtttgttacaaaatcctttcacataccataccatactataaatacaattcaactccccgtccgcttttccaattttcccctctcccctctgctctccttcctatttctcaatcgagcaacacagcacaatccttaaactctctctctctctctcgctctcttcaatttcgttgatggcgtcacaagcaagcctcctccttcagaagcagctcaaagatctttgcaagaaccccgtcgatggcttttccgccggtttggtcgacgaaaccaacatttttgaatggagtgtgactataattggacctctcgatactctttaagangggggaattt

SEQ ID NO: 18046 - DNA, 290 bp, Glycine max
  Clone ID: LIB3049-041-Q1-E1-G4
aaaaaacaacaaaaggggttaaccctttgattataacaaatactcatcaaggaaggcaagttggccaccaacataatacttacttttcccgtaatttggcttatgacggtgaatggcatagacccttgtgcctctcaagccgataattccgacctgaacgtgattcccatctacagcaaatgctcaccgttcaaaccaccaaagtcagactcatcgtgggacaacagaattataaacatggcctcaaaagacccactccgattcaaatacttgtccaccttactgggcca

SEQ ID NO: 18047 - DNA, 261 bp, Glycine max
  Clone ID: LIB3049-041-Q1-E1-G5
agcgaaacagagagtgatttcagtgagtgatcggtgttcacttgatctcatcataatcgtcagcgtcaattgaagaagatgccgatcagaaacatcgccgtcggaaggcctgaagaggcgactcaccccgacacgttgaaggcggctttggctgagttcatctcaaccttcatcttcgtgttcgccggctcaggctccggcatcgcctacaacaagctcaccgacaacggcgctgccacccctgccggcctcatctccgcc

SEQ ID NO: 18048 - DNA, 269 bp, Glycine max
  Clone ID: LIB3049-041-Q1-E1-G6
gataactaatgggtagagacaacgccgtatgagtcgcgtctgataatacaaatatacagtgagctctcgcttcaagccctagggcgctgctcccgattttctctcttcggattgagtgaattgtgaaatgggttggaaagctgctgagaaattcattaggcactggaaagttgtcagaggggataatgttatgataataatgggcatagataatggcgagactgggactattaagcgtgtcattcgctctcagaatcgtgtcaatgttg

SEQ ID NO: 18049 - DNA, 269 bp, Glycine max
  Clone ID: LIB3049-041-Q1-E1-G7
gacggacgagggtttcgtttcgggtttgacgttgttcacaatcactttctgcgcttcactcagtcccttcgtgcggttttctttctttgtcgaacacgtgcgaaaatgcgtgagattcttcacatacatggagggcaatgcggaaaccagatcggagcgaagttctgggaagtggtgtgcgcagagcacgggatcgattccacggggaggtatcagggggacaacgagttgcaactcgagcgagtcaacgtctattacaatgaagcgag

SEQ ID NO: 18050 - DNA, 234 bp, Glycine max
  Clone ID: LIB3049-041-Q1-E1-G8
ggagcaagagtgaagagcgaagagaatggctcccaagggtttaatctttttggctgtgttatgcttctcagcactgtcactgagtcgttgtcttgcagaggataatggacttgttatgaacttctacaacgaatcatgccctcaggctgaagacatcatcaaagaacaagtcaagcttctctacaagcgccacaagaacactgctttctcctggctcagatacatcttccatga

SEQ ID NO: 18051 - DNA, 357 bp, Glycine max
  Clone ID: LIB3049-041-Q1-E1-G9
gagaatgatattgatgttggggaggaggttgtgcttatgactaccaagggtgaggctattgctcttgggattgctgagatgactactgctgttatggccacttgtgatcatggggttgtggccaagatcaagagggtggtcatggatagggatacttatcccaggaagtggggcttgggcccgagggcgtccatgaagaagaggcttattagtgaagggaagctcgataagcatgggaggcccaatgagaagaccccccaggagtggcttaggaatttggttttgccaactggtggggatagtgtgattgctggcttggctgctgcgccggaaactgaggatgacaagattcagaag

SEQ ID NO: 18052 - DNA, 144 bp, Glycine max
  Clone ID: LIB3049-041-Q1-E1-H1
gcgtccgtcctggcgtctgccctcgcgtcggttcggctgccggacgttgcctttcggggcttcctttttttgttttcttcttcctcgttccctgtctcgcttttctctcttcctcgtgctgttttgctttcttttctcggcgcc

SEQ ID NO: 18053 - DNA, 360 bp, Glycine max
  Clone ID: LIB3049-041-Q1-E1-H10
gagtgcagaaatggtatcatgatgaaggctatgcctgcgctcaggtcgttaatttcgggaacctcaacaccaaggaggttgtttgtgaggttgttgaaggggatatcacacaattggatattcagttccaggataagcttggtaatgttgttgaagggaacacccaagtccctgtcattcaaagagagcttccccggcagctgcgctcaggttacactttcaatattgaagcagggaagcaagctttaagaaatgtgaactcccttgctttgttttcaaatattgaggtcaatccgcgccctgatgagactaatgaaggaggtaaaattgttgaaattaagctaaaggagttagaacaga

SEQ ID NO: 18054 - DNA, 343 bp, Glycine max
  Clone ID: LIB3049-041-Q1-E1-H11
ggcagccaaagaaaagaaaatcctcaattttctgagcagccaaacactctctctctgtctctcgaaaattctcagtttgcagagaaaatctgaatcatgtcgtggcaagcgtatgtcgacgatcaccttctgtgtgacatcgaaggtaaccacctcactcacgctgctatcatcggccaagacggcagcgtttgggctcagagtaccgacttccctcagttcaaacctgaggagataactgccatcatgaatgactttaatgagcctggatcacttgctccaactggattgtatctcggtggcaccaaatatatggtcatccaaggtggaaccggtgctgtca

SEQ ID NO: 18055 - DNA, 354 bp, Glycine max
  Clone ID: LIB3049-041-Q1-E1-H12
ggcagccaaagaaaagaaaatcctcaattttctgagcagccaaagactctctctctgtctctcgaaaattctcagtttgcagagaaaatcggaatcatgtcgtggcaagcgtatgtcgacgatcaccttctgtgtgacatcgaaggtaaccacctcactcacgctgctatcatcggccaagacggcagcgtttgggctcagagtagcgacttccctcagttcaaacctgaggagataactgccatcatgaatgactttaatgagcctggatcacttgctccaactggattgtatctcggtggcagcaaatatatggtcaacaagggtgaacccggtggtgtcattcgagggaag

SEQ ID NO: 18056 - DNA, 270 bp, Glycine max
  Clone ID: LIB3049-041-Q1-E1-H2
ggttctagtgtgttattgtttgttgttgtaactcgttcttcttcttttgttgttctgtgtttgtgtttgttttttctctcacctgaaaatgtcttgctgcggtggtaactgtggttgcggaagctcctgcaagtgcggcaacggctgcggaggctgcaagatgtacccagacttgagctacactgagtcaaccaccaccgagaccttggtcatgggagtggcacctgttaaggctcaatttgagggtgctgaaatgggtgtgcccgctga

SEQ ID NO: 18057 - DNA, 271 bp, Glycine max
  Clone ID: LIB3049-041-Q1-E1-H3
ggcttattttaatttttctagcttttgctttgcttagattctgttctgcagagagagagagagagagtttcagaatttagagagagaattttattttgttttttcggttatctttattggtttctcttacatcgtttttgtaggcgctgaggaagaagctttggcagcataactttgttggggagcataaaattcaggcaagcccttgaagttggagagtattagatgggaatcttagaattttctctttagaccaaagaaatggaggtat

SEQ ID NO: 18058 - DNA, 264 bp, Glycine max
  Clone ID: LIB3049-041-Q1-E1-H4
cgaaatgaatataggtacagaagaagaacagaggcttcaacaaaaattcagacacaatggagaagagcccaagctctttctgattacaaacagcagaagaaagcaactgttacacttcaatgtctatggagagctaaagtggcaaggaaagagctcagaaagcttcggatggctgcaagggaaactggggcacttaaggaagcaaaggacaagttggacaaacttgttgaggagcttacatggagaatagatatcgaaaagcac

SEQ ID NO: 18059 - DNA, 248 bp, Glycine max
  unsure (1)..(248): unsure at all n locations
  Clone ID: LIB3049-041-Q1-E1-H5
gatccatttttttgttttcttcaaacatcacaacaatgtctccattttctctcttcctcttcaccacattgctatcttttctcggcgccgccgacgcgcgactcaccttggacttctacaaggacacgtgtccgcagttcagccagatcataagggacaccgtcacaagcaagcagatcgccagccccaccaccgccgccgccacgctccgcctcttcctccacgactgcctcctcnccaacggctgt

SEQ ID NO: 18060 - DNA, 268 bp, Glycine max
  Clone ID: LIB3049-041-Q1-E1-H6
ggcacaagtttgttgagatagctagaagcaataagatgaaaatgaaagtgcttgttttgtttgttgctacagttttggtagcatatgaatgccatggctcagactaccagaagttccctctccaaatgaaaactgggtttggtgggcaatacagcaatgaggtggcatgtgccagttggacgcttggcatggaatcaaacaacgtagtcaagtggcaaactgttcctgcagcttgcggagactacatagctgactacgttctaggaga

SEQ ID NO: 18061 - DNA, 273 bp, Glycine max
  Clone ID: LIB3049-041-Q1-E1-H7
ggaagaggaagccgcagcgcttcgcgagatgcaagccaaggtcgagaaggagattggcagcgttcaagatcctgcgaatgcagctgcttctcaagcacacaaggaggaggcagatgctcggtctgtttttgttggcaatgttgattatgcatgcacaccagaagaagtgcagcaacactttcagtcctgtggtactgtaaacagggtcactatcctgacagacaactttggccagcctaaaggttttgcttacgtggaatttgttgaagctga

SEQ ID NO: 18062 - DNA, 250 bp, Glycine max
  Clone ID: LIB3049-041-Q1-E1-H8
gattgttgggatctccatacgccggatctgctaaaatacgcttgatccatatgggcctcctcgaccacttgtgggacgacaccgtcgccggcccaaggccggaaaacggtctcggcaagctccggaaacaccacaccttcactttccgacctagctccggcaaggaagcggagggcgggagcgtgagatcgtacggtgacgaatcgtcggaggaagcgactagagtgacgcgtagtatcatgatcgtgaa

SEQ ID NO: 18063 - DNA, 298 bp, Glycine max
  Clone ID: LIB3049-042-Q1-E1-A1
ggtacttggttatgaacatcagatattggctggttatgaacgtttgtaaattttgtcatcatggcagggatcatgctggtggaaatgaaaagataaagcaattggtgcctggaatcaagccacaccaaaggtcacataagctattatgttactggcaaagaggaggagcagcctgctgtttttactggagacacactgtttattgctgattgtgggaaatttttcaaaggaactgcagagcagatgtatcagtcactatgtgtaacattaggttcattaccaaagccaacacgagttt

SEQ ID NO: 18064 - DNA, 368 bp, Glycine max
  Clone ID: LIB3049-042-Q1-E1-A10
aaagggaaaaaaaaaaggcaataatccaaaattcaaattaaaataaaggccattactataattttgattgttctgcttgttctttccgttgggattgaaaatgaggggccattgaaagtgattgaagcaagaacctgtcaagataggttgggcgcgctaaactgtatacaagacgaatgtcatattagttgcataaaaaaacatggaaagttaacaaaagttgggtgcagtatgcctttatatgattgcatatgtctctacccatgttaataagtgtttgaccttcttcctacattgtccctatatgaatgtcaatttatttgtaccagacaatgatggaatcaaagaaaataaaattactttttgac

SEQ ID NO: 18065 - DNA, 368 bp, Glycine max
  Clone ID: LIB3049-042-Q1-E1-A11
gaatttgaaaacattttccccagttctcgcaatcccgcaccccccaacccccgcgtatggcttcctcggcaacagacgataacccaagatctgtaaaaagagtagctgttgttggtgctggggtaagtgggcttgctgcggcttacaaattgaaatcacatggtctggatgtcactgtatttgaagctgagggaagagctggagggaggttgagaagtgtttctcaagatggtctaatttgggatgagggagctaatacaatgactgaaagtgaaattgaggttaaaggtttgattgatgctcttggacttcaagaaaagcagcagtttccaatatcacagcataagcgctatattgtgaaaaatggg

SEQ ID NO: 18066 - DNA, 397 bp, Glycine max
  unsure (1)..(397): unsure at all n locations
  Clone ID: LIB3049-042-Q1-E1-A2
gacactcattccatttttacctttctctctcgctcgcaaacgcaaataataaaaaacaaagctttaaccaaggcatccaagccgatcttgaaagaactcaaagatttccaaaaagatcctcctacctcatgcagcgcccgtcctgttgctgaagacatgtttcactggcaagcaacaattatgggtcctccagacagtccttatgctggaggtgttttcctagtcactattcatttccctccagattatccctttaagccacccaaggttgcattcaagacgaangtatttcacccanatataaatagcaatggaagcacttgccttgacatattgaangagcagtggagccctgcgctaactatttcaaangtgttgctctcaatttgttccctgt

SEQ ID NO: 18067 - DNA, 325 bp, Glycine max
  Clone ID: LIB3049-042-Q1-E1-A3
ggggcgatctaatggaagagtgaattagagatatcaatatattatgataatggagggatacaataagaaggttatgaatgtggggattgtgtttggcattggcatgattgggattggcaatgggcaatactcgttttgtcgcatgcccaaccattggtttgccggattcaaacccaattttaattgggaataacctggtgattccttcactggcttgttcctcagccattgccaaggctgatcttaaatgcttctgccgcttcaaggattcgggccttctctctatgtatggtgttgatcccaacaagtgcatggaactccctgt

SEQ ID NO: 18068 - DNA, 374 bp, Glycine max
  unsure (1)..(374): unsure at all n locations
  Clone ID: LIB3049-042-Q1-E1-A4
ggtgacaatccttcctaaccaaattgccaattttggctaaaattttcccggcaactcccctccttaaacgttttccggtttggttttgaaaatgccattttcctccaactttttacaaacattaaagggaattacaagggaaaacccttgcgccttcaatctgtgaaacatatctccctcatatgcagatcagtggaacaatcaatggatttctaccagaacgttctgggattttaccccatcatgaggcctggctctttagattttgatggggcatggctattcggctacggaattggaattcacttgctagaagcagagaacctgaaaatttgccanagaagaaggaaatcaatcccaaggataatcatata

SEQ ID NO: 18069 - DNA, 395 bp, Glycine max
  Clone ID: LIB3049-042-Q1-E1-A5
gaagagtcagaaagcttgaaaatcaaagacaccaaataagaacacatgtttttacctatatcgattgccggcacagacctgaccctttcaaacctctctctctctctctcatacaaagttccttccttcagctgcatcatgtaccctgctgcaactgcaagacattcaattcattaacaacactcgcattattcaaactccaaaccaacgcatgcatgatttcacaaattaacatgctttcccttttcttcttcctatcttcctcttttctaatccttttcttcttccgaaaaacctctgcacttcacatcctcaaccaatgggtcctccccttctcgaaaacgtctcaaccttcacaaatccttcaaaatccctcgctataatcttcactctca

SEQ ID NO: 18070 - DNA, 387 bp, Glycine max
  Clone ID: LIB3049-042-Q1-E1-A6
ggctctgaggggggggttttcggtgttcccctctttgtgttcgttcgcgacgatggggtccatccccgatccaggcgagttgagcgagttgactcagccgagcttcgacgagttccagcgccaaacctctctcatgaccagctgcaccctcctctggaaggagctctccgaccacttctcctccctcgagcaagacctcaaccacaaatccgaagccctcaagcgcaagattcacaccctcgacaactccacctcggactccctccgcctcctcgaccaccgcgaaacctctctcgacgccactctccagatcgccctccggacgctcgacacgcgccggcacgctgctctctccgccctcctccacgacgctgacgacacctcccc

SEQ ID NO: 18071 - DNA, 301 bp, Glycine max
  Clone ID: LIB3049-042-Q1-E1-A7
atctataggttgtttcgtttattttttactatgacatagtgttttccttggtttcaaatgatgtcatcttattcttgggatctgcacattagtacaacggggatgctaaggagactgggttgaagagacaaattcttgttgggttttgatgctgggagatgtgaaactcatccgtgatgtccctctgtattttgtaatagtagcattttcttctcgattttgtacttccaagtgatccttgcaccttaaaaacaaactattaactactgtaaattttattaaatgctggtgctgatgaaca

SEQ ID NO: 18072 - DNA, 361 bp, Glycine max
  Clone ID: LIB3049-042-Q1-E1-A8
gacgcatacgccacgcacaacacaacacaattctcagcttcttcagcgttcttttttttctctctctctctcttccttacgcacccaagagagagaaagagaaagagaatcgatcgacgctgctagagaagtagaagaagatggcgggtggtgctcccaaacaattgttcggattcggagttgtggcgttgcttgccactctcattcttcctctctttatgcccgccgctgttcaggctcaatccgcagcccctgcacctgcccctgctagcgacgggtcctcccttgattaagggatagcttatgtgttgatgttgctggctctggtactcacatacatcatccactcggcctaaatttc

SEQ ID NO: 18073 - DNA, 385 bp, Glycine max
  Clone ID: LIB3049-042-Q1-E1-A9
aaccaaggcttcagccaaaccgcggccaagccttcgttacggtggcaaaaaaacaacagaagggaaccttaagggatttcagttagacacaaaccgctggaaccccctggagttaaaaaaggaaaagtcgactaaagataaggtaaattggatgtcatgcatatatacttctgatctcaagaaaattgttccccattttaaaactcatcctatggactgttctgcatgttatatttcttcttaattaaatgggttttgcagctaacaaaaaattgaacaaaattgtcctgatgatgtcaacaagataaatccagcatgtacaacaagagaagaaactgatgagtcagaggatgaagaaaacaacatcgacgatatatccaagaat

SEQ ID NO: 18074 - DNA, 394 bp, Glycine max
  unsure (1)..(394): unsure at all n locations
  Clone ID: LIB3049-042-Q1-E1-B1
ggacccatcatgggctgaggcatgggtcacacttggcagagcacaacttaattttggtgagcctgataatgctattgaaagctttgaccgtgctctagctctcaagcctgattatgaggaagctcaagatgataggaaaactgcatcacgtcttgttaagaagagaaagcaacttcactcatctggcctgagtgccactcaaaatcgttatatggttggtgaaaaggatgaaaaccagtaaatgtacacaacaagtgtgaaagttatgtttaatgtccaatgtantgcatgntttggaactcgtcaaaaattaaaaatctcgtcaattttgcccaaaaacgtgaaagctataactattagcttctggttaaagatggaaagtcacatcgacaac

SEQ ID NO: 18075 - DNA, 274 bp, Glycine max
  Clone ID: LIB3049-042-Q1-E1-B10
ggagtgatttcagtgagtgatcggtgttcacttgatctcatcataatcgtcagcgtcaattgaagaagatgccgatcagaaacatcgccgtcggaaggcctgaagaggcgactcaccccgacacgttgaaggcggctttggctgagttcatctcaaccttcatcttcgtgttcgccggctcaagctccggcatcgcctacaacaagctcaccgacaacggcgctgccaaccctgccggcctcatctccgcctccatcgcccatgcattcgccct

SEQ ID NO: 18076 - DNA, 395 bp, Glycine max
  Clone ID: LIB3049-042-Q1-E1-B11
ggaggctgaaacaaagaattgaaattaacagcaaaaagtaggagctgcagcagctcccccgaagcttatctcagcggcagactctgaaagctgtttgagtagcctcaacccggagaatagcaccaatgggagaggaggaaaacaaaccagaggaacccatggcaaaggagaaaaacccagaggaagaagcaacccaagagaaaaaaccggagcaagagtccaaagaggaagttgctgctgctgctgctgctccgccaccgccaccgccaccgccaccgcccgagattgtgctcaaagtgttcatgcattgcgagggttgcgcccgcaaggttcgtcgcttcctcaaaagaattccagttgtcgacgatgttgtcaccgattgcaaatctcacaag

SEQ ID NO: 18077 - DNA, 376 bp, Glycine max
  Clone ID: LIB3049-042-Q1-E1-B12
ataccgaaacagaaagtggtttcagtgagtgatcggtgttcacttgatccttcataagtcgtcatcatcatcatcatcatcaccgttgattgaagaagatgccgatcagaaacatcgccatcggaaggcctgaagaggctactcaccccgacacgttgaaggcggggttggctgagttcatctccaccttgatcttcgtgttcgccggttcaggttccggcatcgcctacaacaagctcaccgacaacggcgccgccactcccgccggcctcatctccgcttccatcgcccatgctttcgccctcttcgtcgccgtctccgtcggcgccaacatctccggcggccacgtcaaccccgccgtcaccttcggcgcctt

SEQ ID NO: 18078 - DNA, 404 bp, Glycine max
  unsure (1)..(404): unsure at all n locations
  Clone ID: LIB3049-042-Q1-E1-B2
gacaatgcaggatggcatcctatttgacaatattctgatagctaacgatgataaagttgcagaatcctatcgggagaccacatggaagcccaagtttaccattgagaaagaaaaacagaaggctgaagatgaggctgcaactggttcagatggtattgcaggcttccagaagaaggtatttgacctcttgtacaagattgcagacattcccttcctgagcgaccacaaatctaagatatacgatctcattgagaaagctgagaaacagccaaatctcactattggaattcttgtagcggttgtggttgtcttcgtgtcaattttcttcaggctcatatttggtggcaagaaacccgcanaggtggagaagaaaccagaacgcacagaagcttccaataaccaag

SEQ ID NO: 18079 - DNA, 297 bp, Glycine max
  Clone ID: LIB3049-042-Q1-E1-B3
ccaaaagaccacagaaaggggtcccctcaaagaatttaattttaattcctggggtgggggttccaacgcttttccccttcaacaatggcaaccggaacaatactccaattgccaaacaaaattggccaaaacttaagggccttttgagtgggttgaaacggaaagtccccactccttcaccgaaccaatttttccccccccaaagttgcatccttttgtgtgggcctaaaccccctggctgtgtccttcagtggtaagctccttggtgggtttagtttaattttgactgaacgaatg

SEQ ID NO: 18080 - DNA, 394 bp, Glycine max
  unsure (1)..(394): unsure at all n locations
  Clone ID: LIB3049-042-Q1-E1-B4
gatagtaaggtgtgaatcagcancaacagcacacanagacacagacacagattgttatcccaacgttttatcctttcagctttaagctcaccgaactaactcagcattcaacaacaatggtgatgctcatccgttgctcatgcgtcttcgctcgccctcgcttctcacaacctcaattctacggcaacaacaccaaacccttactcccagggaaattagcttttctttctctaaaacctgacaagggtgttccacactttgaagatacgcttgatgggtcttctaagatttcatgtttggtgcactgctcaaagtgtaaggaagacatacaccaaacgttcccatcactgatatttgttgcgagcaatgttttgatgttctctatgcctaacac

SEQ ID NO: 18081 - DNA, 279 bp, Glycine max
  unsure (1)..(279): unsure at all n locations
  Clone ID: LIB3049-042-Q1-E1-B5
gatcgcatttcatagcactcaccctcattaccaacacgaaagcatagccaaaaccttttttcgaagtctctgattttcctaatggctccggcaaaggcagagaagaagccggcggagaagaagcctgcggcggagaaggcaccggcggagaagaagccgaaggcggagaagaagatctcgaaggaagganggagcgagaagaagaagaagcgcacgaagaagagcgtggagacctacaagatctacatcttcaaggtcctcaagcaggttcaacccgac

SEQ ID NO: 18082 - DNA, 309 bp, Glycine max
  Clone ID: LIB3049-042-Q1-E1-B6
ggaagctgagtggactgaaatcggtggagaacgcgcacgatgattcggtgtgggcggtcacatgggtacccgcaaccgccaaccggccaccgctcctcctaaccggttccctcgacgagaccgtcaggctctggcgctccgacgacctcgttttggagctcaccaacaccggccactgcctcggcgtcgcctccgtcgccgcccaccccctcggctccgtcgtcgcctcctcctccctcgacagcttcgtccgcgtgttcgatgtcgattccaacgccaccatcgccaccctcgaggctcctccctctg

SEQ ID NO: 18083 - DNA, 285 bp, Glycine max
  unsure (1)..(285): unsure at all n locations
  Clone ID: LIB3049-042-Q1-E1-B7
gaagaaaggaagaaacataccgaatgagagcatcaaactcttcttcttcgatttccattgcgaagcgttactttttcttcttctttctcttcattttcttcgctcttcgatcttcgtccggggactgctccgaataccaccaccaccactcgccgatggccacgatcggaggcttacacgactcccaaggctctcaaaacagcgtcgaaaccgaagccctcgctcgattcgccgtagacgaacacaacaagaagcagaattcgcttctggagtttgctanggtgg

SEQ ID NO: 18084 - DNA, 383 bp, Glycine max
  unsure (1)..(383): unsure at all n locations
  Clone ID: LIB3049-042-Q1-E1-B8
ggagataagtggtccagattcgtcgagagaaaggccaattttgatcccttggctattcttgcacctggacagaaaattttttcccgaatccctcaacccttgtctatcacttaaatattaattattttagattaatatattgcttttttttctttttctttttctcaacccactgtgaccattttgtcttgatttcatttttttttctctctttctcttgactcccccctttccttttgtttctgtccccaatcgctccaaccatttaccacaccgttgtagccatattgtaaatgaatattttgggggtgaaattaatatcaatcttgatcttttgtactgccgaaaaaatanaaataaanaataaaaaaaaaagcggccgc

SEQ ID NO: 18085 - DNA, 385 bp, Glycine max
  unsure (1)..(385): unsure at all n locations
  Clone ID: LIB3049-042-Q1-E1-B9
caaccgataattctctttcccatactctctctgtgttcttctgttctctctgtttcttcagattttctccctcctcagcgcctgtgaagtttgattgcttcattctttgaagtgaatttgacaattaagtaaattggttgagaagggttcattcctcttcattggaagaataaaacaaatattgcaggtggattttttctgatggcaactaatgaaaatcttccaccaaatgtaataaagcaactagccaaggaattaaaaaatattgatgaatcacctcctgaggggattaaagttgtggtaaatgatgatgatttttcaataatatatgctgacattgaagggccaanctggaactccttatgataatggagttttccgcatg

SEQ ID NO: 18086 - DNA, 246 bp, Glycine max
  Clone ID: LIB3049-042-Q1-E1-C1
gggcgacacaaaaatcttgttaggctgcttggatactgtgttgagggagcctacaggatgcttgtgtatgagtatgtagacaatggcaatctagagcaatggctgcatggggacgttggagctgtaagccctttgacatggaacatacggatgaacattatattgggaactgcaagaggattggcctatcttcatgagggtcttgaaccgaaagttgtccaccgagatgtgaaatcaagttacata

SEQ ID NO: 18087 - DNA, 382 bp, Glycine max
  Clone ID: LIB3049-042-Q1-E1-C10
ggaaaaaaggaaaaggaacgaagcaatcgcaagtcgtctgttctgtcccgcgggagcagacgacctgtcttcatcgccaaacaacctcaaaaacattcatcaacgttcactattaatccatccatcattaagtaagaaaataaggttcgatttttttatctttgttttgcttctgatccatcatggaggtgccgagttcctgggatgcccttcgcaaacaggcaagaaaacttgaagctcagttggatgagcagatgaattcttatcgtaaattggtttctaataatgtttctacaaaagctgacgctgcagagagtgatctagagtcttggattgagcgtttactaaaacaactccaacaagtaaacacacagatgcaagc

SEQ ID NO: 18088 - DNA, 389 bp, Glycine max
  Clone ID: LIB3049-042-Q1-E1-C11
aaggtacatgagagggaagatactggggaggttgatgttctcactaaaggagacaacaattatggtgatgacaggctactgtatgctcacggtcaactttggctgcaaaggcaccacattatgggtagagccgtcgggttcttaccttacgtaggctgggtgaccatcattatgactgaaaagcctattatcaagtatattctcattggtgctttggggttgctcgtgataacttcgaaagattaaatgatgaatctgaagtcaaactgcggtctaacctccgatggtagtgtgagcagaatataatgttaagattaaatgatgaatctgaagtcattttgtaccatgcaaagtatgggggacactataatgttaagaattaatgcaaa

SEQ ID NO: 18089 - DNA, 377 bp, Glycine max
  unsure (1)..(377): unsure at all n locations
  Clone ID: LIB3049-042-Q1-E1-C12
gaccatcaaggcttttgctgagttgggtaagggtacatttgaccatttcaggattgttgtcaaattccaaccacaccacaacaacaacttctctgctgtgcgatggctccgtagaggactgcctcaacgttcaccacttggactcacagcttcccaccatctccagcacccacttccgcagaatcctcgctggagaaaaatgctgcagaggtaacactcagactgcaggtacaggtgatcccaataatcccaacttctgttcgaccgcaaccggttatcgtaagtgtggggccgcaactgatcctggtcaacccaaccgatgtgctgatccaaatgccttccacangggttgccatatttaagctatttatgtatta

SEQ ID NO: 18090 - DNA, 389 bp, Glycine max
  Clone ID: LIB3049-042-Q1-E1-C2
ggtgctctgctcgtgcctctagggttatcatttctccatttccattttctctctcacttttcaagaatcgtaagctatgggaaagtcttacccaactgtgagtgctgattaacagaaggccgttgagaacgcgaagaagaagctcagaggcttcatcgctgagaagagatgcgctcctctaatgctccgtttggcatggcactctgctggaacctttgacaagggcacgaagaccggtggacccttcggaaccatcaagcaccctgccgaactggctcacagcgctaacaacggtcttgacatcgctgttaggcttttggagccactcaaggcggagtttcctaatttgagctacgccgatttctaacagttggctggcgttgttgccg

SEQ ID NO: 18091 - DNA, 241 bp, Glycine max
  unsure (1)..(241): unsure at all n locations
  Clone ID: LIB3049-042-Q1-E1-C3
agggaactcaccgaatcgcaacgattgaagtttcacatcaaccttaaccaatttaagggttccgttccttaacctacctttgacgtatctaaaccttaaatttgggattangtctgagcaatctggttggtaaaacctttggtcttagagagtcaagttttatgtctggattagacgatcaaattcccactgccttcgatccttttgctgatgcaaatgctgatgactccggtgctgggtc

SEQ ID NO: 18092 - DNA, 369 bp, Glycine max
  Clone ID: LIB3049-042-Q1-E1-C4
gatacagtagtattttaattgcaacacgttacggccaacttaattaattaaacaaaaacaaggtaattaattaattaacaagaattaaaaccaaaaaaaaggctcccaaaggtttaatctttttggccgtgttatgcctctcagcactgtcactgagtcgttgtcttgcggaggataatggacttgttatgaacttctacaaggaatcatgccctcaggctgaagacatcatcaaagaacaagtcaagcttctctacaagcgccacaagaacactgctttctcctggctcagaaacatcttccatgactgtgctgttcagagttgtgatgcttcactgttgctggactccacaagaaggagcttgtctg

SEQ ID NO: 18093 - DNA, 307 bp, Glycine max
  Clone ID: LIB3049-042-Q1-E1-C5
ggatccaacaaagaaaaatggaaatgtaagaatacaatgcaataggaaccctcaaagtgatgcaccaatcataaaacctctagatcctgaagaattcaagaggcaaggctatatgatggttgatttccttgctgattatattatgaatgttagccattatcccgttttaagtaaagtagaacctggttatcttaaacaaagattaccaacttctgctccatgtggtccagaacccattgaatccatacttaaagatgtgcaagatcacatcatccctggcctcacacattggcaaagtcctaatttt

SEQ ID NO: 18094 - DNA, 388 bp, Glycine max
  unsure (1)..(388): unsure at all n locations
  Clone ID: LIB3049-042-Q1-E1-C6
ggttctagtgtgtgattgtttgttgttgtaactcgttcttcttcttttgttgttctgtgtttgtgtttgttttttctctcacctgaaaatgtcttgctgcggtggtaactgtggttgcggaagctcctgcaagtgcggcaacggctgcggaggctgcaagatgtacccagacttgagctacactgagtcaaccaccaccgagaccttggtcatgggagtggcacctgttaaggctcaatttgaaggtgctgaaatgggtgtgcccgctgagaacgatggctgcaaatgtggaccaagctgctcctgcaacccctgcacttgcaagtgaagtgttgggagagcaagcttcaaacanagatagcccttaaataggaataatgataaacta

SEQ ID NO: 18095 - DNA, 402 bp, Glycine max
  unsure (1)..(402): unsure at all n locations
  Clone ID: LIB3049-042-Q1-E1-C7
ggcaggtagagagagcgagagaacaagaacataagggaaccacagcggcggtaacagaagaacaagcagagaatgggtcgagtgagaacgaagacggtgaagaaatcctctcggcaggtgatagagcgtcactactcgcgcatgaccctggacttccacacgaacaagaagcttctggaggaagtggcgataatcccgtcgaagaggctaaggaacaagatcgcggggttctcgacgcacctgatgaagcgcatccagaagggccctgtgcgcggcatctccctcaagctccaggaggaggagcgcgagcgccgcatggactttcgccncgaagtctccgccatcaaaaccgaccacatcgaggtcgacaaggaaaccctcgacatgctccactccctcggt

SEQ ID NO: 18096 - DNA, 342 bp, Glycine max
  Clone ID: LIB3049-042-Q1-E1-C8
catcaatggaaaatttcaagaatttgagtcccatgagacggacgatacagaaagtatgttgggattggatcatacacatatctttgatctccaagcgtatgctttcaaaaataataatcagtttgaagaagtggcttgggaaaaggaatggaaccatgtggaggttacatatcaaagtgtgttagacgatgaagaagaagagagtgaagaaggtgtgttagacgatgaagaagaagagagtgaagaaggtgtgttagacgatgaagaagaagagagagaagaaggtgtgttagagttagagagctcagtcattaaagcaattggaatccatatagtcagaga

SEQ ID NO: 18097 - DNA, 436 bp, Glycine max
  Clone ID: LIB3049-042-Q1-E1-C9
gccggcccaacgcgtcagccacgccttcggcggtggcaaaaagacaacaaaagggggaaactaaacccaaacaggttcctaccatagtctgaggaaagtgagtgagagaaagagatcgcagacacagagcagaatggcttctacccaatgtttcttgcaccaccatgctcttaccacccctgccagtgccagatccccatcactacgcatcttggttagcaccaagcctaaccagcttgtttgcaaggcacagaaacaacaaacaccacaagaggatattgatgtcagcccaatctctcgccgtttagctctaactgtgctcattggtgctgctgctgttggctccaaagtccaacctgctgatgcagcctatggtgaagctgccaatggtgttgggaaagccaaagacagacgcagatttcctgccatacaatgg

SEQ ID NO: 18098 - DNA, 403 bp, Glycine max
  Clone ID: LIB3049-042-Q1-E1-D1
gaaagagagagagagaaaagcgtgaatcatgtcggacgaagagcatcacttcgattctcaggcggatgcgggagcgtccaagacgtatcctcagcaggctggtaccattcgcaagaatggctacatcgtcatcaaatccaggccttgcaaggttgtagaggtctctacgtcaaagacaggcaagcatggacatgcaaagtgtcactttgttgcaattgatatttttaatgggaaaaagcttgaagatattgttccatcatcccacaactgtgatgttccacatgtgaatcgcactgactatcagcttattgatatctctgaagacggctttgtgaatccgttgactgataatggaaataccaaggatgatctgaagcttcctactgatgaggcattgcttgct

SEQ ID NO: 18099 - DNA, 406 bp, Glycine max
  Clone ID: LIB3049-042-Q1-E1-D10
ttcattaaggcggcaataaaacaacaaaagggggtgtaaggacttgtttgtttgattactcaaaagataaaggttgctgcaaaaggctgcaacttgctgttgttcattacctcttaccttttactgatcccaaggcttggtgtccattctttgtctcattataattctgctaccacaacatgtttggcaaaacctcggacagcaaagtatggaggacgcattctcgtaaatccaggatttgatcccaacatacacggttggacagcatttggtaatggatcaatcaatgaggtactgtcaaatggacgcaatagattcattgttgctcacaacagactacacccatcacatagtttctctcagaaggtccaacttacgacacgaatgctgtacacctttaccgctt

SEQ ID NO: 18100 - DNA, 293 bp, Glycine max
  Clone ID: LIB3049-042-Q1-E1-D11
tctctgagttttgacctacaacactctccaaacccctcttgtgtgttgtaaccgccccgtgatcaacaatggcggaaactgctgatatatctcaatctctcgcagaggaatattatgtgaatgacatgcacacaactgtagttgataaagctgttgaggtcatataagttgaaaatccaaatgtagctgcttctgaggaaccatttactgaaaaaactgtggaagaaacaactcatgttgcacctgcagttgctcatgatatcactgaaatcatcccacctcctgctgaaaaa

SEQ ID NO: 18101 - DNA, 139 bp, Glycine max
  Clone ID: LIB3049-042-Q1-E1-D12
aggctgcaaaaagacaacagaaggggggttccattcaagttccgatccaaaaaccttttcctcattcgcggccccttcgtcacggcaaaattcaaatccccgtgtaactccgtcaaaccaaccttttccccccccccaa

SEQ ID NO: 18102 - DNA, 373 bp, Glycine max
  unsure (1)..(373): unsure at all n locations
  Clone ID: LIB3049-042-Q1-E1-D2
gaagcgcagttcgttccacgttgttgtccgctctgtggctctctacatttcatcattcatcggaaaaatggctctcgaggttgctgttaaggctgctgttggtgctccaaatgttctcggagattgtccattttcccaaagggtcctcttaactttagaggagaagaaaatcccttacaaactccacctcatcgatctcagtagtaaacccgaatggtttttgggtgtgaatcccgaagggaaggtgccagtggttcattttgatggcaaatgggtggctgattctgatgtgattgtggggatactcgangangagtaccagaaccctctctcgtcactcctcctgaatttgctccgtgggattaaagatatt

SEQ ID NO: 18103 - DNA, 153 bp, Glycine max
  Clone ID: LIB3049-042-Q1-E1-D3
aaagaaatcaaaagatgatgaagatggaaagaagaaaaaacagaagaagaaaaaaggacccaaattgcaccaaaagggcaaatgtccggtttcatgttcttttctaaatttggaagagagaatctaaagaaaactaatcctggaatttcattt

SEQ ID NO: 18104 - DNA, 255 bp, Glycine max
  Clone ID: LIB3049-042-Q1-E1-D4
agggaacacactcaaacaaacaaaccccgtccacaaaggcggcttccactcccgtcccagcttttcccccttccgttccctttcgcttttcgtgtccccgttaacgcacttcgatacctctgaaccctaatcagacgcaaccaccgtataaggtttccatcctcctctcatactttgcctgaatgctttcgtgtttcgtttctctcttttcatttcaatttctgatacggtccgctgttgattgtactatatcct

SEQ ID NO: 18105 - DNA, 295 bp, Glycine max
  Clone ID: LIB3049-042-Q1-E1-D5
atgagttcgctacggtatttgggcagcggcggcgcgccgctcaggaaggaggtcgccgaggactttagagcccaattccccaacgtggaaattgggcagggctatggtttgactgaaagtggacgaggggcagctagagtgttggggcctgatgagtctaagcgccatggttctgtgggtcgactatcagaaaatatggaggccaagatagtggaccctgttactggagaagcattatctcctggccaaaaaggggagctctggttgcgaagtccaacaatcatgaaaggttatg

SEQ ID NO: 18106 - DNA, 382 bp, Glycine max
  Clone ID: LIB3049-042-Q1-E1-D6
gatgtcatagtattatcattcattctcatctttctctcttctctctccacccaaaccctaactctcgaccctgttcccctctcgtatccgtcatgaaaggaggaaagtccaagaccgaatctaagagagccgatcccaaacttgctgtgaataagaagggagccgccaccaaggctaagaaacccgccggcaaagggaaaggaacgaaagaacctaacaagccaaagaaggcttcaaattgcttcctccgtttcaaggaaggatttcaggaaggaattcatcaaaaaaaatcctgaaaacaaagcagtgtctgctgtgggcaaagctgctggagcaaaatggaagaccatgtctgatgctgaaaaagcaccttatgtggcaa

SEQ ID NO: 18107 - DNA, 264 bp, Glycine max
  Clone ID: LIB3049-042-Q1-E1-D7
ggtactctagctgtcatcgaccatatcactttcgtcaccatcacagacacattcgttgcaatcatccatctcacttccacaaattcctccaaattctaaccatacccttcacgagtccatcttccataacttcttcacacatccgtcttttcactcgtctgttgcacgatcgtctgcctcaaagatgttggtatttgggattgatcacctggagttggatatggttaaaagttatggagtggtctgatttgcaaatgatatcat

SEQ ID NO: 18108 - DNA, 376 bp, Glycine max
  Clone ID: LIB3049-042-Q1-E1-D8
gaggactagatatttttttctctctcctcttcgccgctaattaacccttttctccccagcattcaatttctattagtatccaaaccttgattgcgttcttggattttcttgtgggtagggggtttctcctctctttctctgatattcgcactgcctaccgcaaactcgctatgaggtggcacccggacaagtgggctctgaatcccgcaaccgccggcgaagccaagcgccggtttcagcaaatccaagaagcctactcagttctctccgatcagtctaaaaggtcaatgtacgatgcggggctctacgattctttggaggaagaaagacaacagggattttgtgacttcatgcaagagatgatctcgatgatgaa

SEQ ID NO: 18109 - DNA, 416 bp, Glycine max
  Clone ID: LIB3049-042-Q1-E1-D9
ccaagcgttcggtagggtggcaaaaggacaccataagggggattcggccaacccctaaaaggcacttcttagttctccctctcccactaaaaaccatagtaatctagataataattaacatcagccctcactccttcgcacaccaaacccttccttcctatctctcactaatctaatggaatccgcagcactgtcgcgcataggcctggcgggcctggcggtgatgggccaaaacctagccctaaacatcgcagaaaaggggttcccgatctccgtgtacaaccgcacggcctccaaagtggaccagaccgtagatcgtgcccgcaacgagggctccctccctctcacgggccaatacacacctcgcgacttccatctctcccgtcagcgccccagatccgtcatcatcctcgtca

SEQ ID NO: 18110 - DNA, 345 bp, Glycine max
  unsure (1)..(345): unsure at all n locations
  Clone ID: LIB3049-042-Q1-E1-E1
catcatccctattgctcttcagcttctcattgactgtggcaagaccccacctgatggattcaagtgtgcagatagttagttaatatatatttaatcactaaggtccccaaggaccaaggaattgcataactcatgcatgaataaaaacaggttgagaagatcgatgtagtgaaggaattctctttcgtttctctttcatcaagttgttgctgtataccaaaggccaaggacaacataattgtactaaganggacaatgttggtttacttgttcagactggataattttctgacatgccttgtatacaaagtcatgcaatattgccatggcatttatttaattatt

SEQ ID NO: 18111 - DNA, 351 bp, Glycine max
  Clone ID: LIB3049-042-Q1-E1-E10
ggtgaagtgtattggtcactgacctatcttggaagagttttgaagtttaaaccttcaaacccttttgcctttagattctgattctgagtctctgctgctatatatggcgccacgcgtatttcttgtgttggggatgttgctgatggtgtgccttgttaaggtttcgtctgatccaaagagagaagaagaaatactggaagaagaactacattttcccgataacgagccacttattgtgagagacgggaacagaaggctaatgcaagacatagattgtggtgggttgtgcaagacgaggtgcagtgcacattcgagacccaacttgtgcactagggcgtgtgggacgtgctg

SEQ ID NO: 18112 - DNA, 403 bp, Glycine max
  unsure (1)..(403): unsure at all n locations
  Clone ID: LIB3049-042-Q1-E1-E11
aaaaaaaaacaaaagggggttgccttgttggtaaaaaaaaaaaagaaaagagtggaatcgaagacgaagacgaagatggaggacgcatcagcatcaaagttcatcccacaccaaatcggaggggtccaaaacgacgtgcttcgatttggtctccatggagtcaagagcgacatcgttggttcccaccctcctcaatcctcactccaatctacaaggagaatggatgaagcgatgaagaagcaatgcaaagttaacctgtacggaactgcttttcccctgaaggaggagcttgacaggcaaatcctgtctaggttccagcggcctcctggaccaattccatcttcaatgctgggtttggagactgttacangaagtgttgatcactttggttttgaggattgtc

SEQ ID NO: 18113 - DNA, 73 bp, Glycine max
  Clone ID: LIB3049-042-Q1-E1-E12
aaggctgcaaaaaaacaacaaaagggaaccaaaacccgtaagtccttccccaataaattgcctgcttttggcc

SEQ ID NO: 18114 - DNA, 397 bp, Glycine max
  unsure (1)..(397): unsure at all n locations
  Clone ID: LIB3049-042-Q1-E1-E2
gatctttagttggacgcgcaagcctacgacaaatttaaaaccctagtcgccgttgccatccaaccatcttctgtttaccgtcgtcgtcgtcccgccgttcctctgccgtcgtcgcacgaacacccagcagagagcttcgaagccacgcaggcgggaacgaccagccatcccagcgtcgtcgttgcagtcggaaggttgcaccacaccaggccgtcgcgttgtaaggttccaagctttttagacagctgacaagagacaacaagatattgcaaaaaaaaagcaaaaagctgctccagtttgagcatanaggcacacccccttcctcctttagatcnactcctcntgtttgtgataataaaanagaatcagacacacaaactaggagactcccccctca

SEQ ID NO: 18115 - DNA, 399 bp, Glycine max
  unsure (1)..(399): unsure at all n locations
  Clone ID: LIB3049-042-Q1-E1-E4
gaaaccaaaaaccaatagcaatacatttccgatttccagacagaggaactactcagcttagcttgagtattttcaagaggggatcaaagggaagaagaagggaaggactcaaacttgcacacgcaacctttggttcctttcccaacactcaccatggtggcagattctaagtccaattccgacctctccttcggaaaaatctttgccagcagtgctttctctgcatgtttcgctgaggtgtgtactattcctttggatactgccaaagtgaggcttcagcttcaaaagcaagctgtagctggtgatgttgtctccttacctaaatataagggtatgctgngaacagttggnancattgccagngaagaaggtctttcagcactctggaagggcattgtg

SEQ ID NO: 18116 - DNA, 401 bp, Glycine max
  Clone ID: LIB3049-042-Q1-E1-E5
gacaccaaacgagccatttgggagttaggttctgcacgctctgcttccagcgagtgttctttcttcgtttcaacaccttaatttgcacacgctgcttcttcagcttgagaaatggcacaagaaacctttctattcacatctgaatctgtaaacgagggtcaccccgacaagctgtgcgaccagatctctgatgcagtgctcgatgcgtgccttgaacaggaccctgacagcaaggttgcctgtgagacatgcaccaagaccaacatggtcatggtctttggagagatcacaaccaaggccaacgtagactatgagaagattgtccgtgacacatgccgcgaaattggattcatctctgatgatgttggtcttgatgctgacaaatgcaaggtgttggtcaa

SEQ ID NO: 18117 - DNA, 345 bp, Glycine max
  Clone ID: LIB3049-042-Q1-E1-E6
ggaagcggatggagtcgaaccgcgagtccgcacggcgatcgcggatgaagaagcagaagctgctcgaagacctatccgacgtagcgagtcgccttcaaggcgagaacgtgcgcttagcgcagagcataaaggcgaaggaggaagcgtacgttgagatcgaagccgcgaacgacatcctcagagcatagaccatggaactcgccgaccggttaaggtttctgaactccattctcgagatcgccgatgaggtcggcggcggtggtgaatccttcgagattccgcagattccagaccctctcttcatgccctggcagattccccaccctatgatggcgtcacctgaca

SEQ ID NO: 18118 - DNA, 344 bp, Glycine max
  unsure (1)..(344): unsure at all n locations
  Clone ID: LIB3049-042-Q1-E1-E7
gtgattggcttttacgtgactgcaaaactggtgaaatcttgacaagagcttccagtgtttgggtcatgatgaataagctaacacggaggctgtctaaaattccagaagaagtcagacaggagataggatcttattttgtggattctgatccaattctggaagaggataacagaaaactgactaaacttgacgacaacacagcggattatattcgtaccggtttaagtcctaagtggagtgatctagatatcaatcagcatgtcaacaatgtgaagtacattggctggattctggagagtgctccacagccaatcttggagagtcatgagctttcnttcatgact

SEQ ID NO: 18119 - DNA, 395 bp, Glycine max
  Clone ID: LIB3049-042-Q1-E1-E8
ggatgagagagagaagagaaccgttggcgttgggtgcatcgtgcatgtgacaaacaaaccatcaaataaaaaaaaaggtgatgggttaagcaagagcgttgaatccggtagctttatccaaaattgtaggtaaagtgggggcgaaattacatttgggatgcatttggtttgcattttggtttgcgtgtgttttgtcctatctgggtgcgtcaaccccacaagtgtaaagtcacccagcttcagcatttctataaatgccctattccttacacttctctcttgtttaattttagctttaggttcttcggtgagagttagagagagagaagaaggcttttttcttcttttttttttcttttttgttggtttctcttgttcttttttgtaggtactga

SEQ ID NO: 18120 - DNA, 373 bp, Glycine max
  unsure (1)..(373): unsure at all n locations
  Clone ID: LIB3049-042-Q1-E1-E9
ggtgaagtgtattggtcactgacctatcttggaagagttttgaagtttaaaccttcaaacccttttgcctttagattctgattctgagtctctgctgctatatatggcgccacgcgtatttcttgtgttggggatgttgctgatggtgtgccttgttaaggtttcgtctgatccaaagagagaagaagaaatactggaagaagaactacattttcccgataacgagccacttattgtgagagacgggaacagaaggctaatgcaagacatagattgtggtgggttgtgcaagacgaggtgcagtgcacattcgagacccaacttgtgcactanggcgtgtggcacgtgctgtgtgaggtgtaagtgtgtccca

SEQ ID NO: 18121 - DNA, 245 bp, Glycine max
  unsure (1)..(245): unsure at all n locations
  Clone ID: LIB3049-042-Q1-E1-F1
cccgaaggaatacgtgaggcctcaagaagagctcaagagcatanggaacgtgtttgaggaggaaaagaaggaagggctacaggttccgacaattgacttgagagagatagattcggaggacgaggttgttcgagggaaatgtcgtgagaagctgaagaaagcggcggaggagtggggtgtgatgcacttggtgaaccatgggatccccgatgagctgatagagcgggtgaagaaagcaagggaaa

SEQ ID NO: 18122 - DNA, 380 bp, Glycine max
  Clone ID: LIB3049-042-Q1-E1-F10
cagaagggggactcgggttttctctcggagctccgtcgggtcacgggtcgcaaatccgggttgaccctgccacgtgtcttcattgacggaaggtacattggtggggccgaggagttgaggtggctgcacgagagtggcgagctcaagaagcttctcgagggcttgcccgcagtggattcccacctccgcgtgtgccacgtgtgcgacgatcataggttcgtgctatgcggggagtgttccggtgcgcgcaaggtgtacgcggagaaaggtgggttcaagacgtgtgcggcttgcaacgagagtggcctgatcagatattgctgaagttggaaaagcctttataatccttggtagcttcaatgttttggagcttaatggtg

SEQ ID NO: 18123 - DNA, 384 bp, Glycine max
  Clone ID: LIB3049-042-Q1-E1-F11
gccttcgttacggtgccaaaaaaacaaaaaaaggggaattgaagttttaataaaatcctcagataagattaaactatggttagagactaggggtatttaaaatcgaattaaattatatattatattgtcaaagtgataatcttgtattttaaaatgagcagattacctgattgagttcggaaagtgtaatcgattttacaatcatcttcttttgttagggtccttttgatttaaagatatgaaagtgaattgggatgacaaaagaggaaatgtttaaattaaaataaagtgttgaggaatgagatttgtctttttttgaaacttaaatgtactcaagtgtaattaaatcaaatttattattaagggtgtaagtggttttttggc

SEQ ID NO: 18124 - DNA, 76 bp, Glycine max
  Clone ID: LIB3049-042-Q1-E1-F12
ggggcccaaagggggaactgttttttttccaaaatttcttttgccatttaacaagggttccctacttggggtttta

SEQ ID NO: 18125 - DNA, 358 bp, Glycine max
  Clone ID: LIB3049-042-Q1-E1-F2
gatactcgcttccctctctctgcgttcggcaccagcgaaacgctcttcgttatctttttctcgactccgcggcgtagatccgaggagttcgggaaaccctaactcatcttccttcacaacagaacaacgcttcttttccctatccatcatctcaactgaagtcatggctggactagcacctgaggggtcacagttcgatgctcgtcaatatgattccaaaatgagtgacttactttcatctgatggacaggacttcttcacatcctatgacgaggtttatgatagttttgacgctatgggtttgcaggagaatcttctcaggggaatttacgcatacggttttgagaagcccatcagc

SEQ ID NO: 18126 - DNA, 394 bp, Glycine max
  unsure (1)..(394): unsure at all n locations
  Clone ID: LIB3049-042-Q1-E1-F3
gaatctaatggaagagtgaataagagatatcaatatattatgataatggagggatacaataagaaggttatgattgtggggatggtgttgggcatggccatgattgggatggccaatggccaatactcgttttgtcgcatgcccagcgatgggttggcggcatgcaagccgagtgtgagtggggactatcctgctgatccctccactgcttgttgctcagccattgccaaggctgatcttaaatgcttctgccgcttcaaggattcgggccttctctctatgtatggtgttgatcccaacaagtgcatggaactccctgttaagtgcaaggttgtcgactcttttcactgctagattcactananggggcactaatcaatataaactacacaag

SEQ ID NO: 18127 - DNA, 334 bp, Glycine max
  unsure (1)..(334): unsure at all n locations
  Clone ID: LIB3049-042-Q1-E1-F4
gaagtacaatatgtgggcttccacattaacaacagaaggcccaacggagaactcgaaaccccaagttgaatctttgtgtctgctatagcactggaaagttgtagccgtangtagcagttgcacacggcgcaaaggggaacaagaagaagaagatggtgtccttgaagcttcagaagcggctcgccgctagcgtcctaaagtgtggcagaggcaaggtctggctcgttcaaatgaagtcaatgaaatctccatggccaattctcgacaaaacataagaaagttggttaaggatgggtttattatcangaagccaactaagattcactctcgctct

SEQ ID NO: 18128 - DNA, 395 bp, Glycine max
  unsure (1)..(395): unsure at all n locations
  Clone ID: LIB3049-042-Q1-E1-F5
ggttctagtgtatgtgattgttgtgactcgttcttcttcgtcgttatcttcttcttttgttgtttgtgtgtttgttttttctctcacctgaaaatgtcttgctgcggtggtaactgtggttgcggaagcgcctgcaagtgcggcaacggctgcggaggctgcaagatgtacccagacttgagctacaccgagtcaaccaccaccgagaccttggtcatgggagtggcaccagttaaggctcaattcgagagtgctgaaatgggtgttcccgctgagaacgatggctgcaaatgtggagctaactgcnactgcaacccctgcacttgcaagtgaggtgttggagacctaaagctcaagcagaaatggcccttagaaataatgataaaaactatatg

SEQ ID NO: 18129 - DNA, 309 bp, Glycine max
  Clone ID: LIB3049-042-Q1-E1-F6
gatttcactttgatctgatcccaattccattcattcattcattcgttcttcttctttcaccaacaacaaagaaagcagagaaactttcatttcatatattttcagcatcgcagcaaaggagatcaatcaatcaaaaaccatggcaggcttcagtggcgacgaaaccgctcctttcttcggcttcctcggtgccgctgcggccctcgtcttctcctgtatgggagcggcgtatggaacggcaaagagtggggtggacgtggcgtcgatgggcgtgatgagggcggagctggtgatgaagtcgatggtgcc

SEQ ID NO: 18130 - DNA, 402 bp, Glycine max
  Clone ID: LIB3049-042-Q1-E1-F7
ggcagcgcttgatttgaggccaggcaagccccactcaaccaccacacctctcctcgttcacgctacccctttctgctcttcttctacctttcaagttttaaaagtataaagatggcagagacattcctatttacctcagagtcggtgaacgagggacaccctgacaagctctgcgaccaaatctccgatgctgtcctcgacgcttgcctcgagcaggacccagacagcaaagttgcctgcgaaacatgcaccaaaaccaacttggtcatggtcttcggagaaatcacgaccaaggccaacgttgactacgagaagatagtgcgtgacacctgcaggaacatccgcttcgtcccaaatgatgtgggactggatgccgacaactgcaaggtcctcgtcaacatt

SEQ ID NO: 18131 - DNA, 221 bp, Glycine max
  Clone ID: LIB3049-042-Q1-E1-F8
gcgataagacgacacaacgggatgggtgctccatacagtgtcgggcgtcactcctttccatactttcttctaagcacacactgatctcacacagcacctaagtttttttctggggatggatctgaacagaatcatgtgtgttgatattgataggaagaccaattaggtgattcaggaagatggtatagaagatttcattgattcagcatccattgggttca

SEQ ID NO: 18132 - DNA, 359 bp, Glycine max
  Clone ID: LIB3049-042-Q1-E1-F9
cagtaaggcggcagtaaaggagcgaaagggggccaaaaaggggaagttttcccaatccaaggttcccggagccacttaaccaaccaaccctccttacaaattcacttacagttccacctccacgcgcaactgccacgatcatgttgtccggattcaccaacctgctccacgtcctagccctgctaaccggtttatgcaattgcagggtaacagcatcaaatggcgacgtgcacaccctagacacaaacactcacttcatcccacaagtccgacacctccgaatccactcttcctcgaagcggttcgaatgttcctcagagttcgtgatcctcaaagatgacatgggacctgtgctatcg

SEQ ID NO: 18133 - DNA, 406 bp, Glycine max
  Clone ID: LIB3049-042-Q1-E1-G1
ggagagaagagggtcagagtgagaaagagagagagagagagagaaactgagagaaattcgcaaaccctaatttcggaaagatcggcgatggctgcctccaaggatcgcgagaacttcgtctacatcgccaagctcgccgaacaggccgagcgatacgaagagatggtggaatcaatgaagaacgttgcgaatctcgacgttgaactgactgtggaggagcggaatttactttctgttgggtacaagaatgtgattggtgctcggagagcatcgtggaggatcctgtcttccattgagcaaaaggaagaaacaaaagggaacgagttgaatgcgaagcggattaaggagtacaggcagaaggttgaattggagctttcaaacatctgtaatgatgttatgacagtga

SEQ ID NO: 18134 - DNA, 245 bp, Glycine max
  Clone ID: LIB3049-042-Q1-E1-G10
cacgcttcagggatgcagaaaaaatatgaaggaaaccgcaccagggtgttacaattgcggcaaacctgttcactggtcacgggattgccctttctccgctcccaattccaatcctaaccctaaccctaaccctaaccctaaccccgccaccactctcaatccaaatactcgaaatccttcgtcgtcctccttcaagcccaaaatccccggcgaaaagcccaagaaactcccccgaacaaagccta

SEQ ID NO: 18135 - DNA, 364 bp, Glycine max
  Clone ID: LIB3049-042-Q1-E1-G11
caagccttcagttaggtggcaaaaagacgccagaaggggaactaagtggtgaataattccggatcagggaaccatgcttataggaatgatgatgactcaaggtgtgtgggtttgcaatagtgatggtggcagtgcaacttctggtggacgtgagtctcaaagtacaggctgtgaaatgtacccctgtggatctgaatccttgtttgggggcaataacttcctctcaaccaccatcagaaatttgttgccacaaggtgagggaatcttggcaatgcctctgtggttagttaaaaaccccaattctaaggccatatgctaattctccggtttcaaaaagggttgcaaccccttttggggtcccctt

SEQ ID NO: 18136 - DNA, 396 bp, Glycine max
  Clone ID: LIB3049-042-Q1-E1-G12
cttccttacggttccaaaaggccgccaaatggggacccccatttcatttccttctcatctctctctctcctagggttagggttttctctcttcatcactctctgtgttcgctccgttttcaatggctcagcaagacgctcaaaacggcgggtcggagaatgccgctgctgctgctacggtgtcgtttgtcgctgtgaagccgcagctcctcgtcgaagctcccaaagccaacgacgccattctgttcttcaaggctgcgtttggcgctgaggaagttggccgtacgctcaaccctaagcgcaaagctgagcacgagctccctctcatactctccgcagaactcaaaatcgctggctccaccattctcgtcgccgacctcgttgatgacacttcttc

SEQ ID NO: 18137 - DNA, 200 bp, Glycine max
  Clone ID: LIB3049-042-Q1-E1-G2
gaacctacgttgccctcagatccaaccaaatccatcgtcaccaagaagaccccttttgcctaatcagctttaccgcactcttcaacagtgtcgccgataaggttcagcccatcctttgctccctatgccatttccccaaggatggcaagtgcaacggttgtgggaagttacgaagaataacgcaagtcatatgagcgcgt

SEQ ID NO: 18138 - DNA, 291 bp, Glycine max
  Clone ID: LIB3049-042-Q1-E1-G3
agggggaagagaaaaaggcacaaagcccaagttgtggggcccaatcccaactccccggttaacaaaaaccaaaatatcaattaaattctcggaaaaacaaagtttcatttcaattcagtcttattattagggtttgccgattgagagagaaagagaaatgggagaacgaaaaggaatcccaatggctttggggctcttggcgatgaccctcttcttcattgcttcctcttcctctcacctcgttcgcgcttccgatgacgccgacgacgcgatcttctacgagtcgttcga

SEQ ID NO: 18139 - DNA, 451 bp, Glycine max
  Clone ID: LIB3049-042-Q1-E1-G4
cccggctcgaccaagccgtcagccaagccttccttaaggttccaaaagaacaccaaaaggggaaattattctggtccttgaacaaattattgaaaaccggaggcaaaaaactgaaaaccaaaaaaccaatggcctttaaaccggtaacccagtcagcacttcctccgaattcaaaaggaaaaatcaccttgctcaaaaaccccaaaaaacccttcgcccttgctcatccctttgccgacgccgtcctcgtctctctcataatcgccttcgtcccctatacgaagatagattgggacgcttacatgtcacaggttaccgggtttctcggtggagaacgagattaccgcaacctcaagggtgacactggtcctctcgtctaccctgctggctttctctacatttactctgctttcaagtatcttaccgaaggacaagttaccctgctcagatt

SEQ ID NO: 18140 - DNA, 330 bp, Glycine max
  Clone ID: LIB3049-042-Q1-E1-G5
ggtggagagaggggcactgactcacacccacaatagtcgggggcagcttcaaagtacctccacattgtctcctactcttactgttctcttctcttctcatcatttttattttttccaatcaaaccaaacaaaacataagcaccgctcttttctctccgaaatccccatctcccttcacttctgagctctggacgagatcccagatctcaccatctttcacgcactcttccatcagattcaccctttcgtttaacgcaaactcataacttgaaggttaatggctgctccaccggcaagggctcgtgccgattacgattatctcataaagct

SEQ ID NO: 18141 - DNA, 329 bp, Glycine max
  Clone ID: LIB3049-042-Q1-E1-G6
gatccaaagcagaacaaagagccattgaactttgactataatattcagagttcagattactcactctaatcttctaagttttcattttggggtttaagtttctgaaggaaaaaaaaatgataaagtttgttctatttttgttctgctttgcctctgcactgaccctttcagtatcggagtccgaatcagcttcagtgcaacctcatgctgctgaacctttctctgttggatatattcagatgaagactgcagcgaactgttcttacctggtagttatatctacgagttgttcatcgcctaagttcacaacggataagatcggtatcacg

SEQ ID NO: 18142 - DNA, 342 bp, Glycine max
  Clone ID: LIB3049-042-Q1-E1-G7
ggcacaagtttgttgagatagctagaagcaataagatgaaaatgaaagtgcttgttttgtttgttgctacagttttggtagcatatgaatgccatggctcagactaccagaagttccctctccaaatgaaaactgggtttggtgggcaatacagcaatgaggtggcatgtgccagttggaggcttggcgtggaagcaaacaacgtagtcaagtggcaaactgttcctgcagcttgcggagagtacatagctgactacgttctatgagaccaatatagatcagattccaaaacagtttaccaacaagcttatatctatgctaaatccctcaaactcaccaaca

SEQ ID NO: 18143 - DNA, 399 bp, Glycine max
  unsure (1)..(399): unsure at all n locations
  Clone ID: LIB3049-042-Q1-E1-G8
gacgctcaattcattttcttctcctctctctctctcctagggttagggttttctctcttcatcactctctgtgtcgctccgtttcaatggctcagcaagacgctcaaaacggcgggtcggagaatgccgctgctgctgctacggtgtcgtttgtcgctgtgaagccgcagctcctcgtcgaagctcccaaagccaacgacgccattctgttcttcaaggctgcgtttggcgctgaggaagttggccgtacgctcaaccctaagcgcaaagctgagcacgagctcnctctcatactctccgcagaactcaaaatcgctggctccaccattctcgtcgccgacctcgttgatgacacttcttcgccagcgaaaacggggggaaacggtgtcgttttgtgct

SEQ ID NO: 18144 - DNA, 433 bp, Glycine max
  unsure (1)..(433): unsure at all n locations
  Clone ID: LIB3049-042-Q1-E1-G9
tcccggcccgaccaagccttcattaaggtggcaaaagaccaccgaaagggggaaaatttcaacaaaaacttccctaataaaacccctccttcaaattccttctttcattcattccaagcctgaaatggcagcggcaccagcagctaccttcactattggaaccaccggttccctaggccaaagaggaaactcgcttcctcaattaaagtcttctgggttgaaattcaactcccagaatcatttgaagagcttctgcggcctcaaggccatgtcatccgtgagatgtgagtcagaatcgtctttcttggttaacaaaactggtgctgctctgcgggcgtcttttgcatccaaggctcaaaaggaaaacgaccaaaacttcaactacaactcgcagcctcaggcttcgtacanagttgcagttcttggtgctgct

SEQ ID NO: 18145 - DNA, 99 bp, Glycine max
  Clone ID: LIB3049-042-Q1-E1-H1
aagccttcagccaagccttcgttacggtgccaaaaaaacaacaaaagggggctccaaattcaaaatttaaccaaaaggcaaaaaacgttcccccaaacc

SEQ ID NO: 18146 - DNA, 386 bp, Glycine max
  unsure (1)..(386): unsure at all n locations
  Clone ID: LIB3049-042-Q1-E1-H10
gaatctattggaaaattgaataagagatatcaatatattatgataatggagggatacaataagaaggttatgattgtggggatggtgttgggcatggccatgattgggatggccaatggccaatactcgttttgtcgcatgcccagcgatgggttggcggcatgcaagccgagtgtgagtggggactatcctgctgatccctccactgcttgttgctcagccattgccaaggctgatcttaaatgcttctgccgcttcaaggattcgggccttctctctatgtatggtgttgatcccaacaagtgcatggaactccctgttaagtgcaaggttgtcgactctttccactgctagattcattaganggggcactaatcaatataaac

SEQ ID NO: 18147 - DNA, 386 bp, Glycine max
  Clone ID: LIB3049-042-Q1-E1-H11
aaaagggggtcctaaaagtaatttaacaaaaacttgggaacgcccgaatttaaccttctttgctcttctcttgcagtctgaagatagagattggttgcctagtgaagataaagatctgtatattgagattggctgggcggagttacttcatagaatgctagcaccaatcccttctcattgggttttgtttacagtggttagctcctaacaggctttactcctagggttttttgggttttagggtttctgcctaagatgcttatatcttttggtttttgttcgggtttatccttctctttgccttttttcttttttctttcttttattttactttgttggtcgtttcctgtcttgtaaatttagatctactttgttgcagagcagct

SEQ ID NO: 18148 - DNA, 367 bp, Glycine max
  Clone ID: LIB3049-042-Q1-E1-H12
gaagggcaaggaagccacatagagacacaatacagagtgagttgttgctccttcgccacaactctctgccaacatgggtatctccagagattctatgcacaagaggcgtgccactggtggcaagaagaaggcctggaggaaaaagagaaagtatgagcttggtcgccagcctgctaacactaagctgtcaagcaacaagacagtcaggaggatccgtgttagaggtggaaatgtgaaatggagggcattgagattggatactggaaattactcctggggaagtgaagctgtaactcgcaagactcgtgtactagatgtggtctacaatgcctcaaacaatgagcttgtgcgtactcagactcttgtc

SEQ ID NO: 18149 - DNA, 373 bp, Glycine max
  Clone ID: LIB3049-042-Q1-E1-H2
aaaattcctaaaatttgcatgcactgtttcttcaaacaatggcattacgcgagcttattgtgatggggttattgctgctggtttgtcttgcaaaggtttcatctgatgttaacatagaaaaggagcaatatgaagaatttcgctttcctgttgaccatcttatcgtgagaggcgggaacagaacgctaatgcaggacatagattgtggaggattgtgcaagacaaggtgcagtgcccattcaaggccaaatgtgtgcaacagggcttgtggcacatgttgtgtgaggtgcaagtgtgttccacctggaacttccggcaacatggagctttgtgggacctgctatactgatatgaccacccatggtaacaagac

SEQ ID NO: 18150 - DNA, 424 bp, Glycine max
  Clone ID: LIB3049-042-Q1-E1-H3
cggtctagaatccggccgaccacgctcagcagcgtccgtacgctgcaaaacaaaagggataaaacaaaagagagaaaaatctgcgtagagtatacaacgaggggcaagagtacctggaagcctcactccttttgtgacggtaacatgtatagttgcagccatgggtgggttaatcttcggttacgatatcggaatttcaggtggggtgacatccatggatccgtttctgctcaagtttttcccgtcggtgttccggaagaagaattccgacaaaacggtgaaccagtactgtcaatacgacagccaggcactgacgatgttcacgtcgtcgctgtatctcgccgcgttgctgtcgtcgttggttgcctccacgtcacacgtaggttcggccgaaaactctccatgcttttcggaggcttgcttt

SEQ ID NO: 18151 - DNA, 223 bp, Glycine max
  Clone ID: LIB3049-042-Q1-E1-H4
tgggacagctacttagagtcacatataaaagcgctccggctgttagaggtactctcacccgatcgcgggccaggtctgggctctaatcctcactccttttgtgacgggtccctctttaattgcagtcatccgtgggttcactccttactacttccgcgtctctccctgttctgtggacctcccacggatccctctcttctcaagttcttcccttccgtgttcc

SEQ ID NO: 18152 - DNA, 385 bp, Glycine max
  unsure (1)..(385): unsure at all n locations
  Clone ID: LIB3049-042-Q1-E1-H5
gggggcaagtttcactcttgaagggttttgaggggtgtcaacttgtgtttggagactccgaggttgagtttgaaggtgcattctttgaagggtgtttttgttatgggttctagttgtggttgtggtgtaactcttgttcttgttttctgcttatggggtgtgttgatctccctctcttctgctgctaggctcagtgcttcaaggcagaagcttgaggttactaagcatttgaatcgcctgaacaagcctcctgttaagaccattcagagtccagatggggatacaatagactgtgtaactgttttcaagcaacctgcattttgacatcctttctcaaagatcacangatttcagacagacctactttcaccctgatgggcttttt

SEQ ID NO: 18153 - DNA, 403 bp, Glycine max
  unsure (1)..(403): unsure at all n locations
  Clone ID: LIB3049-042-Q1-E1-H6
gatcctcagacatcgtaaaaccctagtaaaacccttgcgtgcttggaaatggcgctcaactcaattcttcgcaagtcgggttctttcgcgagggctcttgctgtctcgggtcaattgacgaagaataaccacctgggtcatcgcactttactctccaccgccatcagccagcaccagcaccaggattcgcttgttccaaggttccacttttcttctgtagcttccaagaagaaaccaacctccgatgagaaccttctccggctcatcgaatccgaaatcgaatgcgcccaagagaccgacgatcataacgcagctgaagaagttcgggtaattttccgtttaannatatcgatagtcccggacaacagacaataacgcttgagagaatgtaccaagacgagga

SEQ ID NO: 18154 - DNA, 368 bp, Glycine max
  unsure (1)..(368): unsure at all n locations
  Clone ID: LIB3049-042-Q1-E1-H7
gggagctgagctgagaaaacccccaaccccaacctcaaccttaacctctcctcactttcttttcaaccagaactatgattaagctttttaaagtaaaggaaaaacagagagaactggcagaaaatgcgagtggcggaccacccgttaagaagcaaagtgccggcgagttgcgtcttcacaaagatataagcgagctgaatctaccaaaatcatgtaccatgcaattccccaatggcaaagatgacctgatgaactttgaagtttcaattcgacctgatgatggatattacttaagtggcacatttttgttttcctttcaagtgtnctccatctatcccacatgaagcacanaggttaaatgcaagaca

SEQ ID NO: 18155 - DNA, 372 bp, Glycine max
  Clone ID: LIB3049-042-Q1-E1-H8
ggtattgcatctgaattggaggggctttggttcacagaaaataggaaaccaaaccctaatataagtcccaaatcacaatcacagcatcagaagagaggtctctcgccgattgttttgtatctgcagttcactccttacgaattccgagtatctccgtttgctgtggcctttcactttcttctctaatcagcgcgtagaaccacaacaacgcttcgcaggaccaaaagaactgttatagtgtgtacaaactgccggcgaatatggaagaagatgattatgtggagtatgtgcccgtggccaagcgtcgtgccttggaagctcagaagattctccaacgcaaagggaaaggctctgctgtcactgacgatgatt

SEQ ID NO: 18156 - DNA, 282 bp, Glycine max
  Clone ID: LIB3049-042-Q1-E1-H9
ggataatttcacaccttatctatctaatactatactatacaaaaagttctcagtgacagagtagagtaacggaggcatgccgatgacgatggcgatgacggcgtcgcagttgcggtgggggtggagaccgacgccgaagcagcagcaacgacgccgtatggttccggtggtgtgttccatcgctataaagaacgctcagaacaaagagagagcgaaactgaaaaacctcttcgaaaaaccgtacaaaaggtgccgcattgctcccaccaaaggcgtttcctt

SEQ ID NO: 18157 - DNA, 342 bp, Glycine max
  Clone ID: LIB3049-043-Q1-E1-A1
gacgcagcgagcgagccacgaaaatattcatcacacagggttttggtttattattccaatttttggttttcccttttgttggatattagagtgtgtaagaaagagaagagagagaaatgggaaggggaagagtggagttgaagagaattgagaacaagatcaacaggcaagtgacctttgcaaaacgaaggaacgggcttttgaagaaagcttacgagctttccgttctttgtgatgccgaggttgctctcatcatcttctccaatagaggaaaactgtacgagttctgcaggagttcaagcatgctcaaaacgctagagaggtaccagaaatgtaactatg

SEQ ID NO: 18158 - DNA, 395 bp, Glycine max
  Clone ID: LIB3049-043-Q1-E1-A10
gaatctagtggaagagtgaataagagatatcaatatattatgataatggagggatacaataagaaggttatgattgtggggatggtgttgggcatggccatgattgggatggccaatggccaatactcgttttgtcgcatgcccagcgatgggttggcggcatgcaagccgagtgtgagtggggactatcctgctgatccctccactgcttgttgctcagccattgccaatgctgatcttaaatgcttctgccgcttcaaggattcgggccttctctctatgtatggtgttgatcccaacaagtgcatggaactccctgttaagtgcaaggttgtcgactctttccactgctagattcattagacggggcactaatcaatataaactacacaagg

SEQ ID NO: 18159 - DNA, 365 bp, Glycine max
  Clone ID: LIB3049-043-Q1-E1-A11
gatccatactcaaaatacaaaaatggagagagtagctaaggtgttggtgatgttgagcatggtggtgttggtgcttgcatcaaatgctgaagggggacgattacttgaggaagagaatgtggatcagccccagaccttccttggatcaggtggaggccttggtgggatatttccaagcccaagcccaggcttcagcttcaccggcgtgggctttggcccatctgggttttgcactttccctggtggttgcaccggtactccttctttgcccactattcccggtgctggtgggtcactaccagtaccaacacatgcataaggaaatggctttggtagaagacctatattattacttaatgctaaag

SEQ ID NO: 18160 - DNA, 392 bp, Glycine max
  Clone ID: LIB3049-043-Q1-E1-A12
ggagcgaaagaggggttttggaacgtgcaagatccggtgctctaatctctgcattctgtgatggctccaaaaccgataacgagtcccgtccccgattcgtggtaccccacgctctccgtcttcaccctcgccatcggcctcgtcttaaccgcctctttcttcatttatgaagcaacatcttctaggaaaagtcgttcacttgttcaggagctgacaactggtgcagtggcttcagtcttcttgggttttgggtccttgttcctcctacttgcttctggtgtttatgtctaatttaaacattgaattggatgaaaattttgctaagcagatagctttaaatgaaaaattgcattggacgttttagtttgatatccgactctagggtatgttct

SEQ ID NO: 18161 - DNA, 116 bp, Glycine max
  Clone ID: LIB3049-043-Q1-E1-A2
cgtcgatacagctgcaaaaagaggagagagaggggttcgagtgtgtaagtggttgctgttgtaacgcgatcgtcatcatttgttgctcagtgttagtctttggtatttctttcaac

SEQ ID NO: 18162 - DNA, 127 bp, Glycine max
  Clone ID: LIB3049-043-Q1-E1-A3
ggagttgttgtctatctcttcttctctttgtgttttggctgtggacgtaaaataatggctctgtcttttggttttgggctcttgtcttcttcttcttcttcttcttcttaatgtgttctccttcaac

SEQ ID NO: 18163 - DNA, 328 bp, Glycine max
  Clone ID: LIB3049-043-Q1-E1-A4
aagagagataagtgtagagagagagagaaaaaagtggcttgacacgtattgtcggcttcaagagctgcctcttacctgaagatctctgtgtttcagataagcgtttctaatgttactaaagaggtcaagtctctagagtctcatgcgtgggtaaaacttgatggaaattatacagtcatcgtcataactgatcatgcccaatatcatttgggtgatcttgtatatgttgatttgccagaagtgggatcaactgtgacacacggacgtagttttggtggagttgacagtgtgaaggctactagtgatattaactctcctatttcaggaa

SEQ ID NO: 18164 - DNA, 326 bp, Glycine max
  Clone ID: LIB3049-043-Q1-E1-A5
gacactcgaagattaagcaagcaatggctattactacaccttccaattcttcaactctcctctccctttctctattgctcatctccctctccctcgctgagtcgcaatctttcatcggagtaaactacggccaggtcgccgacaaccttccggcgccggacgacacggccaacctcctcaaatccacaaccatcggaaaagtccgtctctacggtgccgatcccgccatcatcaaggccctcgccaattccggcatcggaatcgtcatcggcgccgccaacggcgacattccgagtctcgccggcgatcccaacgcgggcactcag

SEQ ID NO: 18165 - DNA, 369 bp, Glycine max
  unsure (1)..(369): unsure at all n locations
  Clone ID: LIB3049-043-Q1-E1-A6
catctagatcaagtgatggtcccacatgcgacggtgtggaagatgggaaaaagactgagaactcccttgattgcgggttatttggagttaatttgactaacaattgtagcaacgttattactactccttcagagagggaacagagaggtccaagctcaangtgttgttcttagtggccccaaagaaactattcctgcagctgcatgtgaaactgagaagggttagactcccaactattcactgtccaacaaagggcagaagcagattatttctgaggcatcaccaaatcagtggcagaacaggcaggccactgtactatccatgacgacgcggactaagggtgcaatgccaagggttcgcctttggccc

SEQ ID NO: 18166 - DNA, 274 bp, Glycine max
  Clone ID: LIB3049-041-Q1-E1-C6
ggagtgagcaaaagtgaagagcgaagagaatggctcccaagggtttaatctttttggctgtgttatgcttctcagcactgtcactgagtcgttgtcttgcggaggataatggacttgttatgaacttctacaaggaatcatgccctcaggctgaagacatcatcaaagaacaagtcaagcttctctacaagcgccacaagaacactgctttctcctggctcagaaacatcttccatgactgtgctgttcagagttgtgatgcttcactgttgct

SEQ ID NO: 18167 - DNA, 344 bp, Glycine max
  unsure (1)..(344): unsure at all n locations
  Clone ID: LIB3049-043-Q1-E1-A7
gagcgttcattttgtaatatagaagcaagaaagatagagagactgacaacacctctctctctctcccctcgttgatcccaaatctattaggggtttttattcgatgctattcggcctgaagctttcgtttcgcggatttttttaattattttttttcctgcctatcaggaaagttgaaaaaaagatggaccatgacaagactggatgcgaagctcccccagaaggtcctatattgtgcatcaccaactgcggattttttggaagtgcagctaccatgaacatgtgttctaagtgccacaaagacatgatgctgaaacaggagcaggcanggcttgtagcatcat

SEQ ID NO: 18168 - DNA, 383 bp, Glycine max
  Clone ID: LIB3049-043-Q1-E1-A9
gaaagcagagaagagtgtggactagagaatagggagtgatggcgaagtagatctgaaaggtgaagaatttgagtaggtgaagcccaaagttttcaactttgaattaaagggtcatcaaatgctttaacgttttggtttttttctgccttccgacactctcagaaaatgccgcacccttctttccacaagcttcttctaccctccactgtccaacccaaccaacaactgaggcttccagataattttatgaggaaatatgggggtgaactattgccaattgttaccctctctgttcctgatggtagtgtctggcgtgtaggattgaaaaaggcagacaacaagtattggttccttgatggttggaaagagtttgttaaacacta

SEQ ID NO: 18169 - DNA, 358 bp, Glycine max
  Clone ID: LIB3049-043-Q1-E1-B1
gaccgacgcgtccgagaagaagacagaagggggcctcccccttcttcgctcccacccttcgttgacctcctattctcccctcatcggagctcaaatctccgatcccttcatccatatcgcttcaccgcaactttctcttcatccatcgcaaggttagattcctcactcctctactacttccatttctagggttcctacttcaagcctagttcactcctaatttctcagaatcactccttcttcttcgatggatctaatacgcctgtgtttgtttcagatctagttgaatctcaaccgcgctcctccgagtcgaagctccacccactcaaatcctcttcagatctggggggtttgattg

SEQ ID NO: 18170 - DNA, 297 bp, Glycine max
  unsure (1)..(297): unsure at all n locations
  Clone ID: LIB3049-043-Q1-E1-B10
ggaccctgaggaggcaaccaccattaacgagctgaagaagcctgttgtggagaaagaagctccagggcatgccatatgagggcatgcacgtacggcctcggaggggaaccagaaaattatgttaacaaaataatctggaaccctaatgtatcagtgtcatcatcagtgtgtagtttaagctagctttgctatggttacgttctttgagatgagagtcttgatgaacagtaccattctgatgtattgctttccttgaaagttaatgcatgcttcttatcttctgtctagccaaaanaa

SEQ ID NO: 18171 - DNA, 363 bp, Glycine max
  Clone ID: LIB3049-043-Q1-E1-B11
gatgcatatagcttatctagctccttcacctccttagtttcgaaagcatggcctccctggcggcttccaccgcggctatgtcagaaatccttggaaacaccgttaacctcagatgcgcaaccaggtctgctccatcaccaactacacctgccaccttcaataccgtcgcacttttcgccaagaagaagccagctccaactctaaataaaaagcctgccgctgtatcgcacgccaatgaggatctcgccaagtggtatggtcctgacagaacgatcttcttgcctgagggtctcttggaccgatctgagatccccgagtacgtgaccggagaactgactggagattatggttatgatccgtttg

SEQ ID NO: 18172 - DNA, 357 bp, Glycine max
  Clone ID: LIB3049-043-Q1-E1-B12
ggcaagagtgaagagcgaagaaaatggctcccaagggtttaatctttttggctgtgttatgcttctcagcactgtcactgagtcgttgtcttgcggaggataatggacttgttatgaacttctacaaggaatcatgccctcaggctgaagacatcatcaaagaacaagtcaagcttctctacaagcgccacaagaacactgctttctcctggctcagaaacatcttccatgactgtgctgttcagagttgtgatgcttcactgttgctggactccacaagaaggagcttgtctgagaaggaaacagatagaagctttgggttgagaaatttcaggtacattgagaccatcaaagaag

SEQ ID NO: 18173 - DNA, 324 bp, Glycine max
  Clone ID: LIB3049-043-Q1-E1-B2
gggttacccgcgtgagcaatatcaggaatttcagtattttgtggtgatagactttggggctacctgtgacaaggataaaaatccccaccctcaagaaataattgagtttccatctgttatagtgagtagcatcactggccagctggaagcgtgttttcaaacatatgtgaggcccacctgcaatcagcttctgagtgatttctgcaaggatctgaccggcatccagcaaattcaggtggacagacgtgttacattgagtgaggctctactaaggcatgacaaatggcttgagaagaagggaataaagaattccaactttgctgt

SEQ ID NO: 18174 - DNA, 355 bp, Glycine max
  Clone ID: LIB3049-039-Q1-E1-E10
gacaccttcgaattttcttttccttcactttcccgagaaaaaaaaaacactctttcactttcttgactacggtctcacttcgacatggctcgtactaagcaaactgctcgcaagtccaccggcggcaaggcgccacgtaagcagttggcgaccaaggccgcccggaagtccgctcccgcgaccggaggagtgaagaagccccaccgcttcaggccgggaaccgtggcgctgagggaaatcagaaagtatcagaagagcaccgagcttctcatcaggaagcttccgtttcagagactcgtgagggaaatcgcgcaggacttcaagaccgatttgcgttttcagagtagcgccgttt

SEQ ID NO: 18175 - DNA, 384 bp, Glycine max
  Clone ID: LIB3049-039-Q1-E1-E11
gacattgatgttgtttttgaattgttttgtttgatttttttgttctgtctctctcttgtgggtcataacaattggtttttctaatgatttttattgatgctatcaatttggctaaagggtgatccttcatatccaaattcgaaacccagtttgagattttagaatttgattgagttggattcgttttcattggttgttggagtgtgaagaaattctgtcttcagttaatggacgctcttcattctcaaatgtgatcaatacgatgtttccttgcatgtcaagagtttataattgatatgtttcctaaaatattaaataaaacaatataaatgatataggcatgtgatctgtgacatagttctgtttgttaaaattgaggctgat

SEQ ID NO: 18176 - DNA, 363 bp, Glycine max
  Clone ID: LIB3049-039-Q1-E1-E12
ggctgcagcaagggctcaacgcacgcaggaggaggagattgatcgagagaagagaagatgactacacgcttcaagaagaacaggaagaagagaggccacgtgagtgccggccatggccgcatcgggaagcaccggaagcaccctggaggacgcggtaatgccggaggcatgcaccaccaccggatcctctttgacaagtaccaccctgggttcttcggcaaggtcggaatgtgctattttcacaagctccgcaacaaattctactctccgatcctcaacatcgacaagctctggtccctggttccgcaagaagtgaaggacaaggcctccaaggagaacaaggcgccgctgatcgacgtcacg

SEQ ID NO: 18177 - DNA, 370 bp, Glycine max
  Clone ID: LIB3049-039-Q1-E1-E2
gactctaatcggtaatcagatccggcccaaaccctttgacttgtcttctctctttcactctgttgttcttctcgcaatggaggttcagattccaatccacaccgtttttgacgtaccctctcttctccaagctgtggccgccgacactgttctcgccgctgcgcaatctatcgctttgattggatatctgctgactaatgacactaattcagtgtcaccaaatttgacagcagcgaatggaaggtttcctttagaagacctttttgggaggaaacatgcttatctagaaaacaagaatagtgaaacagaggacgacgacgaagatggagatgaggatgatgaagatggacatgatcaggatgatgatgga

SEQ ID NO: 18178 - DNA, 406 bp, Glycine max
  Clone ID: LIB3049-039-Q1-E1-E3
gacacagctattcctcttaagcttgctactgagtttccacactgcataccttaggtcttccgaattcgaagttaatttgcaagatggctaaggaaaaggctcagatcaacattgtggtggttggtcatgtggaccctgaggaggcaaccaccattaacgagctgaagaagcctgttgtggagaaagaagctccagggcatgccatatgagggcatgcacgtacggcctcggaggggaaccagaaaattatgttaacaaaataatctggaaccctaatgtatcagtgtcatcatcagtgtgtagtttaagctagctttgctatggttacgttctttgagatgagagtcttgatgaacagtaccattctgatgtattgctttccttgaaagttaatgcatgcttctta

SEQ ID NO: 18179 - DNA, 404 bp, Glycine max
  unsure (1)..(404): unsure at all n locations
  Clone ID: LIB3049-039-Q1-E1-E4
ggtctccccagcattcatattaatatcatgccctccttctgcatccaaaccttcattttgtagtgggtgggggtttctcatttctctgccgttccatggatcgggaaggaggatccaacggcggatcttgctactactccgttctcgggattcgtanggacgcctccttctctgatattcgcactgcctaccgcaaactcgctatgaggtggcacccggacaagtgggctcagaatcctgcaaccgctggcgaagccaagcggcggtttcagcaaatccaagaagcctactcagttctctccgatcagtctaaaaggtcaatgtacgatgcggggctctacgatcctttggaggaagaggaccangacttttgtgacctcatgcaagagatgatctcaatgatg

SEQ ID NO: 18180 - DNA, 399 bp, Glycine max
  unsure (1)..(399): unsure at all n locations
  Clone ID: LIB3049-039-Q1-E1-E5
gggcaagaagtcaccataactactgattatgacattaagggggatccggagatgatatccatgagttacaagaagctgcctgtccacttgaagcctggaaataccatactgtgctctgacgggacgattactctcactgtcttgtcttgtgaccctgatgctggtactgttagatgtcgttgtgaaaacactgcaacgttgggtgagagaaaaaatgttaaccttcctggtgttgtggtggatctacccacacttactgagaaggataatgaagacattcttggatggggtgtacccaacaagattgacatgattgctctttcatttgttcgtaaaggctcggatcntgttaatgtccgcaaggttctggggccacatgcaaagaatattcagttgatg

SEQ ID NO: 18181 - DNA, 323 bp, Glycine max
  unsure (1)..(323): unsure at all n locations
  Clone ID: LIB3049-039-Q1-E1-E6
ggtgtgtttgtggcctctctctctctctcagccgtcgcagtctctgccaaacactcgctcatccaaaattatgatcatttctgtgccgtaaattcgccggtaacacgagatctcaacttctcgcgccgttttcttttccccctttaaaaaaagtacaagttcaggttaagttagggttccatggcttcggagacgaaggtcgtgaatctggctgaggaagccaagctcgccagagaaggtgtaacgactccctcatatgcttttaccaccatctgcaagtcnctcgtcgctggtggagtcgccggangagtatcacgaacagc

SEQ ID NO: 18182 - DNA, 404 bp, Glycine max
  Clone ID: LIB3049-039-Q1-E1-E7
gagcgaaacagagagtgatttcagtgagtgatcggtgttcacttgatctcatcataatcgtcagcgtcaattgaagaagatgccgatcagaaacatcgccgtcggaaggcctgaagaggcgactcaccccgacacgttgaaggcggctttggctgagttcatctcaaccttcatcttcgtgttcgccggctcaggctccggcatcgcctacaacaagctcaccgacaacggcgctgccacccctgccggcctcatctccgcctccatcgcccatgcattcgccctcttcgtcgccgtctccgtcggcgccaacatctccggcggccacgtcaaccccgccgtcaccttcggcgccttcgtcggcggcaacatcaccttcctccgcggcatcgtctacgtcatcg

SEQ ID NO: 18183 - DNA, 269 bp, Glycine max
  Clone ID: LIB3049-039-Q1-E1-E8
gactcacaccaaaatttgccaattgccatttcaatccccagtttcttcttcaacgtcctcttacgagcagatcccaattctccttcccagttccaaaccctaattccctcattcccatggccgcagaagagcccactgtcgcggtggaacccgctcccgaatctgccaccgccgagcctcccccggaggagaacgaggagttgccacctgaagccagcgccaagacaaccatggacatcggcaccagagaggtttccagaacaggcaac

SEQ ID NO: 18184 - DNA, 371 bp, Glycine max
  Clone ID: LIB3049-039-Q1-E1-E9
ggggaaggatttgaagtgggttattgttgtttgtggatttcttcattgttttgctctaaaaatggagagagattttctgggtctgagctcaaaagaaccattggctatgatgaaggaagagatgaatattgatattggaagcaaagacacaggtttcacaaatggagcagtggtaaaatggcccttcatgaacaaagtatatgtccatcctcttttgatgtcattcaatcctcctcaggtgaattctgtgaaccatcctcatggtatgaagatgttttcagttcccaatcaagcaatttcagtttccatgggacatccatccctaaagaatcattttgcaactgttggtcagaatatgaatgttgctactg

SEQ ID NO: 18185 - DNA, 408 bp, Glycine max
  Clone ID: LIB3049-039-Q1-E1-F1
gacagaaaagaaaaaggaaaccctagctggataggtcaaacatcatcatgtcggacgaagagcaccatttcgagtccaaggcagacgccggtgcctccaaaacctaccctcagcaagccggtaccattcgcaagaacggctacatcgtcatcaaaggacgcccctgcaaggttgtggaagtttcgacttccaaaactggaaagcacggtcacgccaagtgccactttgttggaattgatattttcactgccaagaaacttgaggatattgtgccctcttctcacaactgtgatgttcctcatgtgaatcgtactgattaccagctcattgatattgctgaggatggatttttgagtctgcttactgaaaatgggaacaccaaggatgacctcaagcttcccactgatg

SEQ ID NO: 18186 - DNA, 371 bp, Glycine max
  unsure (1)..(371): unsure at all n locations
  Clone ID: LIB3049-039-Q1-E1-F10
aacccatgagaaagaaccggagcaagagtccaaagaggaagttgctgctgctgctgctgctccgccaccgccaccgccaccgccaccgcccgagattgtgctcaaagtgttcatgcattgcgagggttgcgcccgcaaggttcgtcgctccctcaaaggattcccaggtgtcgacgatgttgtcaccgattgcaaatctcacaaggtggtcgttaagggagagaaagcggatccgctcaaggttttggagagaatacagaggaagagtcacagacaggtcgagcttctttctccgatcccgaaacctcaagaggagaagaaggtccaagacgaagagaagcccaagcccanacccgaagagaagaaagaag

SEQ ID NO: 18187 - DNA, 341 bp, Glycine max
  Clone ID: LIB3049-039-Q1-E1-F11
aacccatgagaaagtaccggagcaagagtccaaagaggaagttgctgctgctgctgctgctccgccatcgccaccgccaccgccaccgcccgagattgtgctcaaagtgttcatgcattgcgagggttgcgcccgcaatgttcgtcgctccctcaaaggattcccaggtgtcgacgatgttgtcaccgattgcaaatctcacaaggtggtcgttaagggagagaaagcggatccgctcaaggttttggctagaatacataggaagagtcacagacaggtcgagcttctttctccgatcccgaaacctcaggaggagaacaatgtccaataggaagacaagc

SEQ ID NO: 18188 - DNA, 346 bp, Glycine max
  Clone ID: LIB3049-039-Q1-E1-F12
ggaggatcgcgtgagcactcctcttcagatccgcacaagcattgcatatcaaatcaagcatcctgttccttatctctgtctctgcatttcccttccttcttcttctctctctctctctaaaaccctaattctatacatggaagggaaatctcaaatctaatgactaattaattaatccatcgatcaagcatggagtccgaactcaaagacctcaattcgaagccgccgaacggcaacggcaacagcgttcgcgatgaccgtcctctgctgaagccggagcctccggtctccgccgacagcatcgccgatatggagaagaagttcgccgcttacgtccgccgcgacg

SEQ ID NO: 18189 - DNA, 111 bp, Glycine max
  Clone ID: LIB3049-039-Q1-E1-F2
ggcagcgcttgagaccaagccccactcaaccaccacaacactctctctgctcctcctctaactttcaagtttttaaagtaataagattgaagagacattcctaattaactc

SEQ ID NO: 18190 - DNA, 406 bp, Glycine max
  unsure (1)..(406): unsure at all n locations
  Clone ID: LIB3049-039-Q1-E1-F3
gaggtttgtgatagtgattgcctccctctgctgccgtccctaatctgaaggctcccgccatctgcgatcggatttcatggctccaaagaaggacaaggctcccccaccttcatccaagcctgccaagtctggcggtggcaagcagaagaagaagaagtggagcaagggtaagcaaaaggaaaaggtgaataacatggtgctcttcgatcagggtacctatgacaagctcctctctgaggcacccaaatacaagctcattactccttccattctctctgaccgtttgaggattaatggatcacttgcaaggaaggctattanggaattgatggctagaggttcaatcangatggtgtctgcccatgcaagtcagcagatttacactagagctacaaacacctagatg

SEQ ID NO: 18191 - DNA, 379 bp, Glycine max
  unsure (1)..(379): unsure at all n locations
  Clone ID: LIB3049-039-Q1-E1-F4
gaagggaggangcattangtgtagaaagagcgaaagagagagagatggcgtcggggtggggaatcacaggaaacaaaggtcgctgctacgatttctggatggatttcagcgagtgcatgtctcgctgccgagagcccaaggactgtgctcttctccgcgaagactacctcgagtgcctccaccattccaaggagtttcaacgacgaaaccgaatttacaaggaggagcagcgcaaactaagggctgcttccaggaaaggccaagaggatggggttaatgaacatcatcattagcacctgaagttaattttcaatttaagcttctgaacaaattattgtgatanaacgtttgtgatttgcttggatcggtattcctgcat

SEQ ID NO: 18192 - DNA, 404 bp, Glycine max
  unsure (1)..(404): unsure at all n locations
  Clone ID: LIB3049-039-Q1-E1-F5
gacttgcggctgcagtagagaagcactcttcgttcttcgactgtctacgatctgctttctctgaattgtgaaaatgtcgctcggagaaactgcttgttcatacgcagctctcatccttcatgaagatggaattagtgtaactgctgacaagatcagcaccttgttgaaaactgcaaaggttccagtagactcttattggccaaccttgtttgctaaacttgctgagaagaaaaatcttggcgatttgatagcaaatgcggcaggcggtggtgcaccagttgctgttgcagctgccccagttgctgctgctgctggtggtgctgctgccgcagctccagctgctgaggagaanaagaaggaagaaccggaagaagagagtgatgatgatatgggattcggcttgt

SEQ ID NO: 18193 - DNA, 397 bp, Glycine max
  Clone ID: LIB3049-039-Q1-E1-F6
ggtgtggaccgggttcgtcctcggaccggacccggacctccgtggtcaacgggctcaagaagaagctgaaggatgctatggagagttttaacgagattcgccagcttgtgtcctcggagtaccgcgagaccgtgcagcggcggtacttcaccgtcaccggcgagaatcccgatgacaagactctcgatctcttgatctccactggtgagagtgagactttccttcagaaggccattcaagagcaaggaaggggtagaattctggacaccatcacggagattcaagagaggcatgatgctgtcaaagagatagaaaagaatctcaaggagttgcaccaagtgttccttgacatgacagtgttggtgcaacatcaaggtgagcaattggatgatattga

SEQ ID NO: 18194 - DNA, 302 bp, Glycine max
  Clone ID: LIB3049-039-Q1-E1-F7
gtaggttgagttagcagaagccctcaccaaagttgggtcgctttctcatggtgtggttggttatatatgtagaccaaatcttgggggacactgcactgtggagtggggtccagaatattatatcctccaacaacaaatttcacttctatgggactgtacaagttaacttgtcattagtcattcattacattagatggctcctcctttatgctattactgtttcttcttcttgttatcttgtttgagtaagttcttcaggattgcttatatgaaaacaatttatagcatttgtaagtacttcc

SEQ ID NO: 18195 - DNA, 272 bp, Glycine max
  Clone ID: LIB3049-039-Q1-E1-F8
gaatgcaaacaaccaaacacaaaccattccccacactctcccctcttctttttcattgtcattcttcaccattattctgcaatatgttgctactcatcactcactctcatcaccaacattttttaacagtcatttggaattacatcaccttatctctgatgttttaaaaatcttcatcatttgctccctctccgaccttaaactggacatgctcgattctgtgcttctggcgcttttcgtgccgtgcctcggcatgagcgccgttttcatcg

SEQ ID NO: 18196 - DNA, 387 bp, Glycine max
  Clone ID: LIB3049-039-Q1-E1-F9
gattagggagaagaagagtaagaaggttaagaataatggtaatgatgacggtgtgagtttggaagggactaggttgagtggtactaagcatggtgttgatggtaagggtgtagagaaagcttcggctaaggtggaacgaaatgggaaggttggtaatggtaatgttggtgtgaatggtggtgctgctgctgctgccaagcgtttcaaggctgttgatctggccccggcgaatgctacaaaggatgtgtatgcttccatcttcacttcgtcgaggaagtctgagtttaaagaaacttatagctgtaggtctcttcctcttggaagaaaccgattcaggtgtctggtatacagttgtctctactgttttattgttatccaatgtactga

SEQ ID NO: 18197 - DNA, 385 bp, Glycine max
  Clone ID: LIB3049-039-Q1-E1-G1
ggtaataaggctgtgttttgtgacaatggtcagattcatgatcttgtcatagaatgtgacacctcaggggtgtctgatccgtgccttataattcgcatagatagcaaaaccgtgatgcaggtgaagcggctcaagtggaagtttagggggaatcacaccatcttggtggatggacttgcagtggaagttttctgggatgtctataattggctttttggtacatcccttggaaatgctgtctttatgttcagaacatgcatctccgaggaaaaattgtgggttggtcaacccctttctgatgcaaatgtggtgcaatggtccttctctcagaggtttttctgagacaagtcgcaaggtctcggcttctcacagattttatacgcgt

SEQ ID NO: 18198 - DNA, 308 bp, Glycine max
  unsure (1)..(308): unsure at all n locations
  Clone ID: LIB3049-039-Q1-E1-G10
gatcgcacaacattattctttcgcaccttgcagaatcaattttctctctcaatcgtctttcatggctcgtaccaagcaaaccgctcgcaaatccaccggtgggaaagctcctangaagcaactcgccaccaaggctgcaagaaaatctgcacctaccaccggtggagtcaagaagcctcatcgctatcgtcctggaactgttgctcttcgtgagatccgaaaataccaaaagagcacagagcttctgatccgcaagctcccctttcagcgtcttgttcgtgaaatcgcgcaagacttcaagactgatt

SEQ ID NO: 18199 - DNA, 375 bp, Glycine max
  Clone ID: LIB3049-039-Q1-E1-G11
ggatgagctggaagcaatgcttgatgtggtagatccccagcctggtggaaggtcagcatcgctctacttcaacagaaggacatttgatatgcctgatggagtcatcaggacggaaatagaagaaggggttgcacaggttgtgcaaatgcttgaagaagcagagaatagtagtgaagcatgaccgtgagatcacgacagtaatatctatctgtttatttcgtgttttccttctgcagttgtagtctgtctgcagagacgtattttagtctaagatttcaagacttctaaattatgctttcgatccaatggtatctgttctactgaacctttggcactttctgaacgacatgattggcttgtgttagagctgtgttc

SEQ ID NO: 18200 - DNA, 391 bp, Glycine max
  unsure (1)..(391): unsure at all n locations
  Clone ID: LIB3049-039-Q1-E1-G2
gcttcgtcccttgattgaagtataaattaggggtgttgaaattcaaagccatatccgtcattaaccaaatttgtgtttctccgattgcaagcaatggactccttcaattccttcttcgattcaacaaaccgatggaattacgatactctcaaaaacttccgtcaaatttctccggtcgttcagaatcacctcaagcaggtttattttactctgtgtttcgccgtggttgctgcggctgttggggcttaccttcatgtcctcttgaacattgggggttttcttactacagtggcatgcgtgggaagcagtgtntggttactctcgacacctccttttgaagagaggaaaagagtgactttgttgatggccgcatcactgtttcagggtgcct

SEQ ID NO: 18201 - DNA, 268 bp, Glycine max
  Clone ID: LIB3049-039-Q1-E1-G3
ggagagagagagagagagagaggcacttggaatccaaaaatgagagaaatcatcagcattcacataggtcaggccgggatccaggttggcaattcctgctgggaactctactgcctggaacatggcatccagcccgatggcatgatgccaagtgactcctccttcggtgtagcccacgacgccttcaacaccttcttcagcgaaaccggatccggcaagcacgtccctcgcgccgtcttcgtcgatctcgagcccaccgtcaccgacg

SEQ ID NO: 18202 - DNA, 384 bp, Glycine max
  unsure (1)..(384): unsure at all n locations
  Clone ID: LIB3049-039-Q1-E1-G4
aggggaagaagaaaaagaagtgaaatatagagagtgaagaagaagaaatagaaggttttggtgtttggtgtttgaatcgtgaaaatgttcagaaaccagtatgacacggacgtgacgacatggagcccggccgggaggctgttccangtggagtacgcgatggaggcggtgaagcaaggctcggctgcgatagggctccgatccaagacccacgtggtcctcgcatgcgtcaaacaaggctaactccgaactttcatcgcaccagaagaagatcttcaaggtcgacaaccacatcggcgtcgccatcgccgggctcaccgccgacggccgcgtcctctcncgctacatgcgatccgagtgcatcaactataactacacctacga

SEQ ID NO: 18203 - DNA, 376 bp, Glycine max
  Clone ID: LIB3049-039-Q1-E1-G5
ggagtgaggagactgagaaaacagaagaaaacaaaatggaagacacagtttctgcgttgaggtctttgatggtttctcactctccgccgctggatgccttagtggtgccctctgaagattatcacctgagcgaatatgtgtctgcacgagacaagcgccgcgaattcgtttccggcttcactggaagtgccggcttggcacttattacacagaaagaagcactgctgtggacggatggactgtattttttgcaggctgagaaagaacttagtgctgggtggaagctaatgcgaattggtgaagatcctgctgtagatatctggatggccgataatttgccataagaagcatccgttgggggttgatccctggtgca

SEQ ID NO: 18204 - DNA, 398 bp, Glycine max
  Clone ID: LIB3049-039-Q1-E1-G6
gactgccactttgatttgattcgtgtgcacatataaggtggggcatggcctacaccctttccaacactctcccactctcactcgccttcttcccagaccgcaccctccttcatccaccctccacacacctcttcctctctcgccccctcagattcaaaagtctttgcgtcgtcaatctcaagagacctgttcccccgctaaaagcatcgatggcggagaccaacaacaacgttgccgtcgaggtcttcgaaaaagaggatcttgccgtgtccctggccaaatacgtcgccgatctctccaacaaattcacttccgaaagaggggctttcactgtctgcttgtctggcggctctttgatcaattatctccggaaacttctggaactccttatgttgata

SEQ ID NO: 18205 - DNA, 382 bp, Glycine max
  unsure (1)..(382): unsure at all n locations
  Clone ID: LIB3049-039-Q1-E1-G7
gattgcacgagcgagtatgaagttcccgactcagtagcccagtcacacctaaacaaaaccctaacgaaaccctgcggaggaaaacgtcgtcgcagcaaccttcacattagcgatggccattgttctccgtcttggaagcagaagcagaagcaaagggaaccacccttcttctcatatcgtgttcttctccacctccaattccaattccaactccaactccaactccaattctcctttctctgacctcttcagtgaaatcaaaaacaatttcaaagaatcctctccctctccttcaaacaacccgcgctcctcgaatttccgcgacgagatcaacanaaacctccatgaattccgcgcccgggacaacgcgcctccgccgcaa

SEQ ID NO: 18206 - DNA, 381 bp, Glycine max
  Clone ID: LIB3049-039-Q1-E1-G9
gtcagatgttttgggacactgaggtatctttctttttgaggatacgtcgctccagaggacagatgaagatagagatttcactatggggctgttctgtgttctcttctttgaattgaaccttcccatctctttcttctcacttcccccccctttccttttcccacttttgaattgccttttcctttccagaattttattctaccaagatgcatgtttttgtcatgtaatgcagattttcacgaggcggttttcttgtgtcttgaaagactgtgtctgtgactgagtttttctttggtaggtttcttcacttcaccgttcccacttgcattattattattcaaagaccccagtagcagcatttgcatttccctcacgctgcac

SEQ ID NO: 18207 - DNA, 284 bp, Glycine max
  Clone ID: LIB3049-039-Q1-E1-H1
gacacacgtgtcatttcccacttctgagtaatcatcaccgatctcagctcatgaggtagaggtttttttcgatgcattacacgttctggctggacaaatatcgtcccaaaaccctcgaccaggttatggtccacagcgacatcgctcgcaatcgcaacaaattgctcactgaacacgattgcccccatttactcttctatggcccatcaggctcttgcaataaaacccgaatcatggttcttctcacgaagatgttcgtacctgatgccgaaaacgtgaacgtg

SEQ ID NO: 18208 - DNA, 342 bp, Glycine max
  unsure (1)..(342): unsure at all n locations
  Clone ID: LIB3049-039-Q1-E1-H10
cggggcacatatacaacgaagctttcgcgtcttccgcggtgcgaagaaccaagagggagggccacgtgttggtggcgttcttcggtgacagcagttacgggtggttcgagccgtcggagctcatcccatttgacgcgaatttcgcggagaaatcgcggcagataagttctagaaacttcctgaaggccgtggaggaggccgtggatgaggccagtagaagatgcggccttggattggtttgtacgtgtangggccccgggaattttcgcccaaccgatgtggaagggtattattctgttcaggtgccggattatgagcctggagtgtantctaatgctcaga

SEQ ID NO: 18209 - DNA, 377 bp, Glycine max
  Clone ID: LIB3049-039-Q1-E1-H11
gaaggactaaaaaccaccaatcaaaaaccatgaatgctaagagagaaaagggagagtgctttgaaaatgggaaagtttagttcaagttacagtacttctgattttgttcactttggagttctacttccctttcttctgttatcacagttgttctttcaacttgcatggtgtggctccatagtaaagttccttcctggattagagggaccccttccttttgttcttgaaaccgggtatgtgggagtgggtgaatcagaggatgtgcaggcattctactacttcattgagtcagagaacaatccaaaggaggatcctctcatgctttggctcactggtggccctggttgctcagctttctctggccttgtcattgaaat

SEQ ID NO: 18210 - DNA, 318 bp, Glycine max
  Clone ID: LIB3049-039-Q1-E1-H12
gggagtgagcaagagtgaagagcgaagagaatggctcccaagggtttaatctttttggctgtgttatgcttctcagcactgtcactgagtcgttgtcttgcggaggataatggacttgttatgaacttctacaaggaatcatgccctcaggctgaagacatcatcaaagaacaagtcaagcttctctacaagcgccacaagaacactgctttctcctggctcagaaacatcttccatgactgtgctgttcagagttgtgatgcttcactgttgctggactccacaagaaggagcttgtctgagaaggaaacagataga

SEQ ID NO: 18211 - DNA, 325 bp, Glycine max
  Clone ID: LIB3049-039-Q1-E1-H2
gagagaagagaagagaggagagggggggagaaggggttgcagagagagagagagagagatgtcatcatcttcagacctggacaggcaaatagagcagttgaagaggtgtgagcctcttaaggagtctgaagtgaaggcgctttgcctcaaagccatggaaatccttgtcgaagagagcaacgttcaaagggtcgacgcccctgtcaccatatgtggtgatattcacggtcagttttatgacatgaaggagcttttcaaagtacgaggggattgccccaaaactaactatttgtttctgggggattttgttgataaaaggttttac

SEQ ID NO: 18212 - DNA, 401 bp, Glycine max
  Clone ID: LIB3049-039-Q1-E1-H3
ggcgaagagaatgggtgggtctagcagtagcagcaaggacgcccaagaccttttccgcgctccttggtctgcttatgcttcaaccccaacaaatctcaagatcattgacctctacgtaatctatgccgtcttcaccgctctcatccaggttgtttacatggctttggtgggatcatttccatttaactccttcctatcaggagtactttcttgtgtaggaactgctgttcttgctgtctgtctcaggatccaagtgaataaagataacaaggaattcaaggatcttgcacctgagcgtgcttttgcggattttgttctctgtaatttggtgcttcatttggtgatcatgaacttccttggttaaattggttcgtgtggctgttgttgttttcgattgaacc

SEQ ID NO: 18213 - DNA, 366 bp, Glycine max
  Clone ID: LIB3049-039-Q1-E1-H4
aaccactcttaatttgaagccatggtctcgtttcacaaggcgctggccgagagtactccaaagccagaaattcatgcagaattcgaagcatcatcaaagaaaagaaagtgggaagagccattaaccgaaggtttcttcaaggatcaaatagagaaaaggaaatccgtctttgatatagagcttcaccctgagacccctttttcttcagataaatggcgtcaatacctcactattcagtcagggcagatacagttgtgtaacacaagaacaacaacagagaaccccaaaaaaagctcccgaagaacaccttcttctcatcacatgagttttaaacctgagctaaatttgatgtgtgaatcaccgagg

SEQ ID NO: 18214 - DNA, 401 bp, Glycine max
  Clone ID: LIB3049-039-Q1-E1-H5
ggaaggcgtgctgattctgtgcttttcccccaaaagaagcaaaaccactgtcactcgaacaagaacaagaagatgaagattaacgtcaagactctcaaggggactcactttgtccttcaagtgaaccctcaagacacggttgctgttgtgaagaagaatatagagacagcgcaaggtgctgatgtttaccctgctgcgcaacaaatgcttattcatcaggggaaggtgcttaacgatgccacaacccttgaggaaaataaagttgttgagaataattttgtggtgatcatgttaagcaagaataaggtatcaagtggagcctcatctgcgccctcaaacctgggaaaccaacctcaaagttctttgcctcctacttcatcaacatctcaacctcctgcatc

SEQ ID NO: 18215 - DNA, 357 bp, Glycine max
  Clone ID: LIB3049-039-Q1-E1-H6
gtatctttcttgtggttgccacaaaggttttttcctatgatgaagatctcaagacagtggttcctgcacctgctccactagtgaaggcaccaactcctgcctctccagtgaaatcaccatcttaccctccagggtcagtgaccacaccaactgttaaggtgccccctcctcctcagtccccagtagtgaagccaccaactccaacaccagcccctgttaaggtaccccctccacagtccccagtagtgaagccaccaacaccaacatccccagtggtgtaccctcctcctcctgttgctccatctccaccagctcctgtagtgaaatcaaagaaggattgcattccactatgtgatt

SEQ ID NO: 18216 - DNA, 404 bp, Glycine max
  unsure (1)..(404): unsure at all n locations
  Clone ID: LIB3049-039-Q1-E1-H8
ggatacaatacagagtgcgttgttgctccttcgccacaactctctgccaacatgggtatctccagagattctatgcacaagaggcgtgccactggtggcaagaagaaggcctggaggaaaaagagaaagtatgagcttggtcgccagcctgctaacactaagctgtcaagcaacaagacagtcaggaggatccgtgttagaggtggaaatgtgaaatggagggcattgagattggatactggaaattactcctggggaagtgaagctgtaactcgcaagactcgtgtactagatgtggtttacaatgcctcaaacaatgagcttgtgcgtactcagactctttgtcaaagtgctatcgttcaggttgatgctgctccattcanacagtggtatcttcagcacta

SEQ ID NO: 18217 - DNA, 353 bp, Glycine max
  Clone ID: LIB3049-039-Q1-E1-H9
cgatcccagtccgcaaggaggacgaggtgcaggtggtgcgcggaacatacaagggtcgcgaggggaaggtgacgcaggtgtaccgtcgcaagtgggtcatccacatcgagcgcataacccgcgagaaggtgaatggctccaccgtcaacgttgggattcacccctccaaggtggttgtcacaaagctcaaattggacaaggatcgcaaggccattctcgatcgcaaggccaagggtcgtgccgccgccgataaggagaagggtaccaagttcgctcccgaagacatcatgcaaaccgttgattagtctctttatcatacaaaccaattaagtacccttcagaaaagagagatg

SEQ ID NO: 18218 - DNA, 344 bp, Glycine max
  Clone ID: LIB3049-040-Q1-E1-A1
ggagttgaattgaagacagcttcagaatcagatctggtgtggtgtggtggctgttactgttagcacttagcagcgatggccaaagcgtcgatattcatttacatactcgtcgcagcggcgcttctcttattcctctctcattccccggataagcactccggccaccgccaccgccgcctcaagctccgctccaacgtcaccctcgccccctcgcgccaccacgccgtcgccttcgaccctctcgtcgctgagctcgatcgccaccgcgaggacaaggagtgggagaagcagataatccaccaggcccatcccgaactggagtcggactcggccccgggccacga

SEQ ID NO: 18219 - DNA, 247 bp, Glycine max
  Clone ID: LIB3049-040-Q1-E1-A11
gattcaagggacggcaggggtagggatgattattattctcctgagcgatcaagatcttattctaggtctctctctcccagtggtgggaaggactacaggaagtcccctcgtcttagggagaatggtcggagtcctaatgacaagaaggatcagacacccagcagatccgagagtcctaggggcaatgatcgtagtccttcaaggtctcgttcacggtcatacagtccacgctgatttgtgagcaggc

SEQ ID NO: 18220 - DNA, 97 bp, Glycine max
  Clone ID: LIB3049-040-Q1-E1-A12
gattcaagggacggcaggggtagggatgattattattctcctgagcgatcaagatcttattctaggtctctctctcccagtggtgggaaggactacg

SEQ ID NO: 18221 - DNA, 345 bp, Glycine max
  Clone ID: LIB3049-040-Q1-E1-A2
caagcacaagcaacactacaacctctacattttcaagaacgagaaagccttcaagctcggtaacatcactcaagccactcttctcagcaacccctacacatggcatccatctcggcctggttttttctactttaccttccacaatgggtcactcaaggcatgccaagattctcaaaagctagccatagaggtagcttcttcagcaatggctccagaacattctccagtggcaacaccagctccttcttctggtggagaggtgccatcttctccttcgtttccgtggccttttcgtcctggacaagaagcttcttcacctggtcctgcaccacaagcacaagcaca

SEQ ID NO: 18222 - DNA, 376 bp, Glycine max
  unsure (1)..(376): unsure at all n locations
  Clone ID: LIB3049-040-Q1-E1-A3
ggcgcattgaacgaaaattagggtttgtagtgtagcaggaacaagcagcaatggcgccgaaggtaacacgcaaggttagcagaaaccccgaattgataaggggaattggaaagtactcgaggtcgcagatgtaccacaagaggggcatttgggctatcaaggccaaaaatggtggcgttttacctcgccacgaccctaaacccaaacctgaaacacccgctgaaaaaccacccaaattttaccctgctgatgatatcaagaagccccttgtcaacaagcacaaacccaaacccgctaagctcagggctagcattactccgggaacagtgttgattcttcttgctggtagatttacnggaaaganggtactcctttt

SEQ ID NO: 18223 - DNA, 328 bp, Glycine max
  Clone ID: LIB3049-040-Q1-E1-A5
gaggcgcggcgggatcagcacaagattgcaaaatgaagttcaacattgcaaatcccaccactgggtgccagaagaagctggaaatcgatgacgacctgaagcttcgagcattttgggacaagaggatctcccaggaggttcttggtgatgctctgggtgaggagtttaaaggatatgttttcaaaatcaccggtgggtgtgacaaacaaggattccctatgaagcagggagtgctgacccctggtcgtgttcgacttttgctccatagaggaactccttgtttccgtggatatggaatgcgcaatggagagcgtagaacgaagtctgt

SEQ ID NO: 18224 - DNA, 349 bp, Glycine max
  Clone ID: LIB3049-040-Q1-E1-A6
gtcctcccgaaggaatctctctcaccggttattccttttccctcactacttcatacgcttaagttcgcgacacaggcatgggtgcaccatcgacgaagtacacccaccagagctgcactagcagatgctccggttccgaacatgattgagccatttaacccgagtctagactcctcagtataagcgtcacagataccgacgcaatcgactcctccagctacgacaaatagacgaagttttctacgcgcgattgacattaggtagctcatcaacgagatttcgatcgccagagcttcagatactcggctcggatacgaattccgcggactgtgacagacgtctctgggaa

SEQ ID NO: 18225 - DNA, 359 bp, Glycine max; identical to SEQ ID NO: 15480
  Clone ID: LIB3049-040-Q1-E1-A7

SEQ ID NO: 18226 - DNA, 398 bp, Glycine max
  Clone ID: LIB3049-040-Q1-E1-A8
ggaggtcaaacaacttaatgaattgatgggctcgtgtgggcaaggcttccaagtgtacattattggacatttccaacaattccaattgatctcaattctcgcagtcaccagtgttagaactataagagtacctaatcaaatagtgttttgaccaaagaggtcgatttagtttagtagcagttatgaacacgaacatgaatgttattttgtgtctccagttcctatgtttctttcgtttaagtactttgttcactaaagcatctgcaataaatgtggaaacatatgaatctgatagaataactgatcttcctgaccaaccttcaagctcctcagtatcacacttttcaggttacatcactgtcaatcgaaaacatgggaggacacttttctactggtta

SEQ ID NO: 18227 - DNA, 251 bp, Glycine max
  Clone ID: LIB3049-040-Q1-E1-A9
ggctccacaaccgaatcgccatggcgtcccaggatagtatcggcatcatgcaggcacggcatagttaccggaatttatggcatatcgatctcatgagatccattcaggccgatactccttagtgttgcctcacgttgtggtgtgcaccgacctgtgtcgtatcttcttcccaaactaactttccaccaatttttctcgcttcgattcctcgtcccttggagctcataaccatgatagtgtcaaaattagct

SEQ ID NO: 18228 - DNA, 377 bp, Glycine max
  unsure (1)..(377): unsure at all n locations
  Clone ID: LIB3049-040-Q1-E1-B1
gagtcttgatcagtttcattcattggnagatatgggaacattagaacaaattgatgctcctcaaacccagtcatcatcatcttcttcttcttccatcgatagcaacaacaacccttctaggactaggactccaccatcctcttccccttcatcaagtctatgcagaaacagaactgatttgagcactgacctcagacttggtcttagcatctctccttcttctcaatctgaatcacccttcaattcaacacgaagggaagaaagttttgactggccaccaattaagtctatattgagaagcacccttgtggggaaacaaagctatctgaaccaaagaccctctttgtttgtcaaagtctatatggaaggaatcccat

SEQ ID NO: 18229 - DNA, 248 bp, Glycine max
  Clone ID: LIB3049-040-Q1-E1-B10
gaagagccatttcttttctttctcaatggctttacactttgatttgatacactgtctgttgagctgattccaaagcattattattacgttattaacttccccaaacgagaatccccctccttacacatcacaacaccacaaacccaacaccatcatcatcgttcacgccaagtaaacgatcctctcttctccacctcaccctttctctctcttctctctcatttttctctctgttacttcacaatacc

SEQ ID NO: 18230 - DNA, 236 bp, Glycine max
  Clone ID: LIB3049-040-Q1-E1-B11
gagagaagagagtagaagatacgaagatttgaggcatttatataatcgaaattggaagcgaggaaggaaaatcgaaatcgaaaatggcagtaatggagaggttgaagatgttcgtcgttcaagagccagttgtcgccgcttcctgtctcatcgctggcttcggtccttttcctcctgcttttgtgaagcccaagttggattcatatcaggcaaccaagcaacctcctcaacctgcc

SEQ ID NO: 18231 - DNA, 240 bp, Glycine max
  Clone ID: LIB3049-040-Q1-E1-B12
gacagctcttggctttagcaaattccaattcccaattcccaattcgaaacccttattcctttcaaagaaccaaattgagtgatcgtgatggcaccaaaggcagagaagaagccagcggagaagaagcccgcggaggagaagaagtcgacggtgggagacaaggctccggcggagaagaagccaaaggccggaaagaagcttccgaaggagggaggcgccggcggagaagggaagaagaac

SEQ ID NO: 18232 - DNA, 405 bp, Glycine max
  Clone ID: LIB3049-040-Q1-E1-B2
gcactcagtaaaattagccccctaccagtgctcaaggaaatcttccgcactgatggtgaacaagtcctcaagtttccaccacctcatgtcatcaaagttagtaagtctgcatggatgactgatgaagaatttggaagagagatgcttgctggtgttaatccatgcctaattgagtgccttcaagtgttccctccaaagagcaagctagatcccacagtgtatggtgatcaaactagtacaataaccaaagaacacttagagatcaaccttggtggactctctgtggaacaggcactgagtggtaacagattgttcatattagatcaccatgatgcattcatcgcatatctgaggaagatcaatgaccttgccactgcaaagtcctatgccacaagggacatcctt

SEQ ID NO: 18233 - DNA, 313 bp, Glycine max
  Clone ID: LIB3049-040-Q1-E1-B3
cacgcgtcagtacaactgtgagacaagcctcagtggagagtcgacatcatgtcctcctgagtgccacattcaggtgtgcttaccattggttttgacaccatcgttgacatgctcggctctgctctgtctgtgcggtctcttgcagtcggactggcttctatatcatttcctagtgcataagcagatctggtcaatgtaattttacgcgagggttgtgttgaccacatcctaacacctagctactaccactgcgttttgtatctacagctcaactgcttacaagatttactcctcgatggtattgcagtttttt

SEQ ID NO: 18234 - DNA, 423 bp, Glycine max
  Clone ID: LIB3049-040-Q1-E1-B4
cacgcgtcaagccaagcgtccgtgatcacttttggtttcaccggccccgtgttgtcctctttttgattcactttatccttttccaaaatgcttttgagatagcattttttttctggatatgggttacatatggatttgactcctgtataatgggacaagttcgatacattgttccaaggcttgttattggggtatttattcaggtactatgtagctacagcaccctgccactgtatgcaattgttacgcagatgggaactcactataagcgggcaatatttaatgatcatttgcgacaaaacattgttggttgggcacagaacgcgaagaagaggaaaggactaaaagctgatggcaatcctggccaacgaagttctcatgagagtgctaatacacgaatccagcttgggtcaattttcaaga

SEQ ID NO: 18235 - DNA, 347 bp, Glycine max
  Clone ID: LIB3049-040-Q1-E1-B5
gcatctcctaacattgctcaaaaggtaggtctcggtttcgttatttccactgtgtaacgttgaagtctcttacgttaccaactgtggttcagacgaaggatggaggttgttttggcgtcgtcgtccgtcgacggcggaatagggtgctgggaccttcacaccggcgcggagcagctccgctacaaatcttgcacctccccttctcacggactcatctccgtcggtgctcgcttcatcgcttcgtcgcagcttcgtgatgatcccgcagccactggctatgttctctactggtcctggtctaagcctcaagttgaagtgaagattttcccgctgaacaaatcaaacta

SEQ ID NO: 18236 - DNA, 385 bp, Glycine max
  unsure (1)..(385): unsure at all n locations
  Clone ID: LIB3049-040-Q1-E1-B6
gctctgaaaactgaaaagtaaaggcgaaagactttaggtttggaattgggaattagggttgttcgcgtcacgaagatgatcgaggtggtgttgaacgatcgattggggaagaaggtgcgcgtgaagtgcaacgacgatgacaccatcggcgacctgaagaagctggtggcggctcagacgggcacaagagccgacaagatccgcatccagaagtggtacaccatatacaaggatcacatcactctcaaggattacgagatccacgacggcatgggtctcgaactctactacaactaaacacaaggtctatacccatctcaattcctctttttatagatactagctangggtttgttttttaaggttcccacattttgatttgttt

SEQ ID NO: 18237 - DNA, 353 bp, Glycine max
  Clone ID: LIB3049-040-Q1-E1-B7
ggaagtaaagaacagaactaaacactaactggatcaaaactaaagggtattcttccggcgattgtattgtatattgacgctcacagatttctgggagcgacagttgcaacttcgattcgacttgaagagagggaggaaggtggaaattggcaaattataagaatacgctgaaatgtcagcgcttttcaatttccattcatttctaactgtgatacttctgggaatatgtgcctgcacttatttcaagatgcagtttccggcgatccttgaccagaaaactgggtttcgtggtttcttctggaaggcggcaagaatacgggcgtccgttctatgcttgaccgcagtttgatatg

SEQ ID NO: 18238 - DNA, 402 bp, Glycine max
  unsure (1)..(402): unsure at all n locations
  Clone ID: LIB3049-040-Q1-E1-B8
gatagtattatcattcattctcatctttctctcttctctctccacccaaaccctaactcccgaccctgttcccctctcgtatccgtcatgaaaggaggaaagtccaagaccgaatctaagagagccgataccaaacttgctgtgaataagaagggagccgccaccaaggctaggaaacccgccggcaaggggaaagcagcgaaagaccctaacaagccaaagaggcctccaagtgctttcatcgttttcatggatgagttcaggaacgtattcaacaaagaacatcctgaaaacaaagcagtgtctgctgtgggcaaagctgctggagcaaaatggaagaccatgtctgatgctgaaaaagcaccttatgtggcanagtctgagataaggatagtggagtac

SEQ ID NO: 18239 - DNA, 248 bp, Glycine max
  Clone ID: LIB3049-040-Q1-E1-B9
gatcgcagcacgctctttcatctctcactcatggcaacaacactcatgtttttccgaccaaccatgatccgggcctccgctggttctcccgccaagcccgacccgagaaacaggaagcccgtttcctccaactggtgggctcctctgttcggatggcccgcggatccggactacatgggcccattgcagaaggcgagtgagaaatcggatccggagcgggaagtgggcctggacctgggccggcccag

SEQ ID NO: 18240 - DNA, 388 bp, Glycine max
  unsure (1)..(388): unsure at all n locations
  Clone ID: LIB3049-040-Q1-E1-C1
gataatcgtcagcgtcaattgaagaagatgccgatcagaaacatcgccgtctccgtcggcgccaacatctccggcggccacgtcaaccccgccgtcaccttcggcgccttcgtcggcggcaacatcaccttcctccgcggcatcgtctacgtcatcgcccagctcctcggctccatcgtcgcctccctcctcctggccttcgtcaccgcctccactgttccagcattcggactctccgctggagttggagttggcaacgccttggtgttggagatcgtgatgaccttcggtctggtgtacacggtctacgcaactgccattgaccccaagaagggtaatttgggaattattgctcccatcgccattggtttcattgtcngcgctaaca

SEQ ID NO: 18241 - DNA, 273 bp, Glycine max
  Clone ID: LIB3049-040-Q1-E1-C10
agccgtcagtacagcagcgaaaggaggacagaagggggatgtgatgctttcacatccatcacaccaccatggaaaacatgtaactgttggtctacatggtgcagctgtccgtgttgtggatctaagaacattaagattaaatcaaattccagtgtgaataagaagataaataataaggataatttaaagcatatgcatgcactagaaaatattgatgacggaattgaacgaattgataatgataactcatcattaacgtctcaatctaagttt

SEQ ID NO: 18242 - DNA, 88 bp, Glycine max
  Clone ID: LIB3049-040-Q1-E1-C11
gagcgaaacacagagtgatttcagtgagtgatcggtgttcacttgatctcatcataatcgtcagcgtcaattgaagaagatgccgatc

SEQ ID NO: 18243 - DNA, 251 bp, Glycine max
  Clone ID: LIB3049-040-Q1-E1-C12
gaagcaaaaccctaatccctctttcttcctcttcctcagtagtgcgattttcgattctcttctctgcaactatgcctaaccctaaggtcttcttcgacatgaccatcggcggtcaacctgccggccgcatcgtgatggagctctacgccgacgtgactccgagcaccgccgagaacttccgcgcgctctgcaccggcgaggagggcgccgggcggagcggcaagcccctccactacaaaggctcgtccttc

SEQ ID NO: 18244 - DNA, 388 bp, Glycine max
  Clone ID: LIB3049-040-Q1-E1-C2
ggaccataataacctcaacgccagcaccggcggctggcagttacccgaaactctccaggagtcaacgcagttgaccaatttctcttgtatgggctgcaacctcaccggcccaatacctcaatttctcggctccatgaactcactgtcgtttttgaagctctctaacaactacttaacgggtgacattccccggagtttaaacgactctgcgttgcaggttctgtggctgaacaaccagcagggagagcgtctcagtgggggaattgatgttgtggcttctatggtttctctcacgagtttgtggcttcacggaaacgctttcactgggacgatccccgagaacattggggctttgagctctttgaaggagctcaaccttaatgggaac

SEQ ID NO: 18245 - DNA, 437 bp, Glycine max
  unsure (1)..(437): unsure at all n locations
  Clone ID: LIB3049-040-Q1-E1-C3
cgcgtcagggcccggtctcggtctcggcatggcggccgtggccccagaaaaacaatatgaacaccaccgattacgccttcggggactccaagaaatacgaggggtcctcggagttcgtgaagctgaggtaccacatgggaccggtcctcacgaccaacatcactgtccacaccatctggtacggcaagtgggagcggaaccagaagaagatcatccgcgagttcataaactcaatatccgcggcgaactcggcgcacccctccgtggccgggtggtggcgcaccgtacagctctacacgaaccaaaccggggccaacatttcaaaatcggttcgactcggcgaggagaagaacgaccggttctattcccacgggaaatccctgacncgcttatccatacagactgtgatanagagcgccatcacagccaaaacgagg

SEQ ID NO: 18246 - DNA, 398 bp, Glycine max
  Clone ID: LIB3049-040-Q1-E1-C4
ccacgcgtcaatacgactccaaaaaaacaacaaaagggggtaagtttaaattaacattgtgttgcaattgaggagttaaggtattgattgtaaccaaaaaaaattagaaatggagaatcatcgacgtcgtactcaagtgacaacaagcgatgatgaagacgaacaagatcaagaagaggtattgaaacggtctcgtcctgtggaagacgctaatcctattggcgagcctcttaactattctggaaaagggaaaagcacgaagtggcactatgactcctttgaattcaatggcatccaatatactattggggatcatgttcatttcaaacccgatgaaaatggccaaaaaccatatgctggaattattaacgacattacacatggaaataatggcaatg

SEQ ID NO: 18247 - DNA, 393 bp, Glycine max
  unsure (1)..(393): unsure at all n locations
  Clone ID: LIB3049-040-Q1-E1-C5
gagaggaacaaagaaaggaaaagagaaaaaaatttctcagaagagtctccgctgaaagttttggtttcttgaagatgtcgttgctctccgatcttatcaaccttaacctctccgacatcaccgataaagtgatcgccgagtacatatgggtaggtggatctggcatggatatgaggagcaaagcaaggacactctcaggaccggttaaagacccttcgaagcttcccaagtggaactatgatggttccagcactggtcaagctcctgggcaagatagtgaagtgatcttatatccacaagcaattttcaaggatccattcaggangggtagcaatatcctggttatgtgtgatgcttacactcctgctggggaacccattcctacaaacaaga

SEQ ID NO: 18248 - DNA, 353 bp, Glycine max
  Clone ID: LIB3049-040-Q1-E1-C6
ggtgccacattgtcatattttattattacctaagcttttgtcacttagaacaaatttttggtcagttttgaaaaatgggttctggaaaccaggaggtatcaatgttggtggagaatggtggtggtgggaacaacaacgtgaagggattgctgagcaaggaaatgagacatggcagaacggcacataacatgtcatcttcttcgttgcgcaagaaatctgacctaactcttctgtctaaggttcattctgacaccctcaagaatttgttggtgaatttgcaagatgttattctgggaaccaagctctctagtattttccctgccattccccttgccattgttgctcaaagctat

SEQ ID NO: 18249 - DNA, 346 bp, Glycine max
  Clone ID: LIB3049-040-Q1-E1-C7
ttcgtcaaggttgatcaggccacactctttgatctcattctggctgcaaattacttgaatatcaatagccttttggaccttacttgccagacagtagcagacatgatcaagggaaagactcctgaggaaattcgcaagacattcaacatcaagaatgacttcacccctgaggaagaggaggaagttcgtacggaaaaccaatgggcctttgaatgagtttataattctgctactttttaaatttcaatgaaaagatatgccctatagttgctagtttacttgtgttttatgtttcgcgtttctgacttgtcattttttattttaacttgtgggggcaatcttgaaa

SEQ ID NO: 18250 - DNA, 360 bp, Glycine max
  unsure (1)..(360): unsure at all n locations
  Clone ID: LIB3049-040-Q1-E1-C8
ggaagttttgtggtgtggtttagtgtcaaatggcggcgagtagaagcacttttcctctgatgaaatacttgagagtgcgcgtcgacgctcttccccgcaacactcccttaagcctcgctcccaactttttgattcgccgcttctgtgaagaggttaggggttgttttctcgacaagtctgaggtcacagatcgcgtcatttcctgcgtcaaaaacttccagaaagttgatccttcaaaggttaaccctaatgctcacttccagaatgaccttggattggatagtttagattcggtagagattgtgatggctcttgaggaggagtttgggttcgagattccctgatatganggcagacaga

SEQ ID NO: 18251 - DNA, 248 bp, Glycine max
  Clone ID: LIB3049-040-Q1-E1-C9
gggtgcgaaaccctgacctccgctttctcattcttctctctctcttgtccatcacttccgccaaggtcttcttcgaggagcgtttcgatgacggatggggaaatcgttgggttaaatcagattggaaaaaagatgagaacctggctggggagtggaaccacacctctggccaatggaatggagacgctaatgacaaaggtattcaaaccagtgaggattacagattctacgctatttcagctcagtaa

SEQ ID NO: 18252 - DNA, 370 bp, Glycine max
  Clone ID: LIB3049-040-Q1-E1-D1
gatcaaatgtgtgtggttccagttttttgggtggcaaagtggcagctgctgccaacaacgtcaatctccagaaccgaattctattttcattctcgtattagattatatactacacatgttgtaggcgtttcactttgtttcctcgtactcttcgaaaattcggtgactcactcgctctcatcgacttggacgatatttcgtggacaagagttccactttcccgcagttctcatttatttcctaaatggagctcaatgaagatcctggaccaattgataattatgttctttatgatcaagataatcatgtatcttcagcagtttgggatggacatgagcgtggtgtacttagatgccatgaacacacttca

SEQ ID NO: 18253 - DNA, 249 bp, Glycine max
  Clone ID: LIB3049-040-Q1-E1-D10
gagtgtgagtgtgagtgtgagtgtgttgttctctctgcggaatgcgaatgtgattcgaagaagctcgatgagaatgcgagagttagggtttcaggaacgaaggtcgtggaggcggagaggcggcgacaccagccccgactccgtcatcttcactctcgaatccaacttgagcctcttctcctccgcctccgccagcgtcgaccgctgctccttcgcctccgacgcgcacgaccacgactccttagcctc

SEQ ID NO: 18254 - DNA, 228 bp, Glycine max
  Clone ID: LIB3049-040-Q1-E1-D11
tgggacagactctctgaaagagagagaatatgacgcggggaaagcagatgatcgaagcgcagattcgattcgcagagaggaatgagaagggagagggctctcagctcgaggccagagccgttggtctcaaagtcacctgcctcatctgtaaggctcatcttgcaaatcacaaccaacttgttgatcagtacgcttccaaacatccgacggagaaaccacctgcagaga

SEQ ID NO: 18255 - DNA, 276 bp, Glycine max
  Clone ID: LIB3049-040-Q1-E1-D12
gggtatctccagagattctatgcacaagaggcgtgccactggtggcaagaagaaggcctggaggaaaaagagaaagtatgagcttggtcgccagcctgctaacactaagctgtcaagcaacgagacagtcaggaggatccgtgttagaggtggaaatgtgaaatggagggcattgagattggatactggaaattactcctggggaagtgaagctgtaactcgcaagactcgtgtactagatgtggtttacaatgcctcaaacaatgagcttgtgcg

SEQ ID NO: 18256 - DNA, 412 bp, Glycine max
  Clone ID: LIB3049-040-Q1-E1-D2
aagacacagaaggggatcaaatgtgtgtggttccagttttttgggtggaaactggcagctgctgccaacaacgtcaatctccagaaccgaattcgattttcattcccgtattagattatatactacacatgttgtaggcgtttcactttgtttcctcgtactcttcgaaaattcggtgactcactcgctctcatcgacttggacgatatttcgtggacaagagttccactttcccgcagttctcatttatttcctaaatggagctcaatgaagatcctggaccaattgataattatgttctttatgatcaagataatcatgtatcttcagcagtttgggatggacatgagcgtggtgtacttagatgccatgaacacacttcaatgcttggatagtggaagctcacacctaa

SEQ ID NO: 18257 - DNA, 338 bp, Glycine max
  Clone ID: LIB3049-040-Q1-E1-D3
tgttgacaaggatggaccaaagcggcaaagagaatcttctcctcgtagaaaacctcctccctcaccacggaggagatctcctgtacctagacgagctggatctccaagacgaccagattctccacgtcgccgtgcagattcccctgttcgtcgccgattagacgcgccttaccgtcgtggaggagactgacctcctatgaggcggcctgtgtcccctgtacgaggtcttcccccatctctacctagacgccctcgatccccatccaggctgtcatcgagaatgagtcctggaagtctaggtcgaacacgttcacgtcaacagtttgccatgcgccgat

SEQ ID NO: 18258 - DNA, 358 bp, Glycine max
  Clone ID: LIB3049-040-Q1-E1-D4
gaccccttttattgaaatcctgagcttccattgtgctcactcatctcttacaacgaaaccctcttcatcttgttcaatctgtgacgagcatcatggcctctagagcagtgttattgttggctatgtgtgtgcttccggcgatggttgtggccattcgcccagcacagaaccctttttgcgataagggtcgtgtctactgtgacccttgccgtgctggttttgagacctcagctaccacctacattgctggtgctgagattatgttgcaatgcaagagcagggttagcaacgaggttgtgtacacgaagaacgggtacaccgactcaaccggagcatacacaatgtacgtggatgagga

SEQ ID NO: 18259 - DNA, 341 bp, Glycine max
  Clone ID: LIB3049-040-Q1-E1-D5
gatcacaaaccaaacaacttcgaacacatacactactctctctctctcttattgtatggccgccaattccagtagccgagggatcaccgccttagggaagcgagtcgccaaccggatctggacttccaacgcacctcctctcacttcaaggaggggagcatacagtagcggctcagtgtacgacaagaaccctgatgatgagatccagtctgggcaggtcccagacgatgtgatccaggcggcaacacaatccggcaaatactgggccccacatccacagactggggtatttgggccccccggaagaagtgaccaaactgcttctgccattcactctgatg

SEQ ID NO: 18260 - DNA, 402 bp, Glycine max
  Clone ID: LIB3049-040-Q1-E1-D6
gacagagggagtgaacaacatcaacatctccgattcttacaagaagaatcgcattcaggtctccaacaccaaaaagcccctcttcttctacgtcaatctcgccaagaggtatatgcaacagcataatgaagttgagctctcagcactaggagtggctattgctacggtggttactgttgctgaaatcttgaaaaacaatgagcttgctgttgaaaagaaaatcacaacatcaacagttgacatcaaagatgattctagaggcagacctgtccaaaaggccaagattgaaatattactggggaagactgaaaaatttgatgagttgatggctgctgctgctgctgctgctgcagaagatggtgaaaacggagatgttgaagagcacgccgcataagttcatcg

SEQ ID NO: 18261 - DNA, 382 bp, Glycine max
  Clone ID: LIB3049-040-Q1-E1-D7
ggttctagtgtatgtgattgttgtgactcgttcttcttcgtcgttatcttcttcttttgttgtttgtgtgttgttttttctctcacctgaaaatgtcttgctgcggtggtaactgtggttgcggaagcgcctgcaagtgcggcaacggctgcggaggctgcaagatgtacccagacttgagctacaccgagtcaaccaccatcgagaccttggtcatgggagtggcatcagttaaggctcaattcgagagtgctgaaatgggtgttctcgctgagaacgatggctgcaaatgtggagctaactgcacctgcaatccctgcacttgcaagtgaggtgttggagagctaaagcttcatgcagaaatggccttataaataatgat

SEQ ID NO: 18262 - DNA, 389 bp, Glycine max
  Clone ID: LIB3049-040-Q1-E1-D8
ggtatgtgattgttgtgacgcgttcatcttcgtcgctatcttcttcttttgttgtttgtgtgtttgttttttctctcacctgaaaatgtcttgctgcggtggtaactgtggttgcggaagcgcctgcaagtgcggcaacggctgcggaggctgcaagatgtacccagacttgagctacaccgagtcaaccaccaccgagaccttggtcatgggagtggcaccagttaaggctcaattcgagagtgctgaaatgggtgttcccgctgagaacgatggctgcaaatgtggagctaactgcacctgcaacccctgcacttgcaagtgacgtgttggagagctaaagcttcaagcagaaatgagccttagaaataatgataaatactatatgt

SEQ ID NO: 18263 - DNA, 249 bp, Glycine max
  Clone ID: LIB3049-040-Q1-E1-D9
gtgagacaattagcttcttctcgctggactgctgctactcagtttgctatagttgctagcctttctgcattaagccatcaccttcaaaagccaagtagtgaagacaatagagatatccttgataaaagaaaggatgcaattagaacacttcaagaagttctagtggggaagcatgatgaagacatagaagagacactgtataaataccatattcctacagatagatggtggtctaacctctgtaaagtc

SEQ ID NO: 18264 - DNA, 386 bp, Glycine max
  Clone ID: LIB3049-040-Q1-E1-E1
gctcctttgtttgattaaggttttttcgcttcttctattcactctgttacggtgcaacctagcagcctccaaatccaatggcttcagagaagaaactttcgaacccaatgagggagataaaagtgcagaagctcgtcctcaatatctctgttggcgagagtggagatcgtctcaccagagccgccaaggtgttggaacaacttagtggccaaaccccagtgttttccaaagcaaggtacactgttcgttcctttgggattagaagaaatgagaagattgcatgctatgtcactgtcagaggtgacaaggcaatgcaacttttggagagtggtttgaacgtgaaggaatatgaacttctcagaaggaacttcagtgatactggttgc

SEQ ID NO: 18265 - DNA, 250 bp, Glycine max
  Clone ID: LIB3049-040-Q1-E1-E10
gacccagagaggaggaagctttgagagagagagagggaggagggagagtgttgacgctccatcaagatgggtatttctagggattccatgcacaagaggcgtgccactggtggtaagaagaaggcatggataaagaagagaaagtatgagcttgggcgtcaggctgcaaacaccaggttatcaagcaacagaactatccggaggattcgtgttcgaggtggcactgttaaatggagggcattgaggttgg

SEQ ID NO: 18266 - DNA, 247 bp, Glycine max
  Clone ID: LIB3049-040-Q1-E1-E11
gactcactgtccaatccaatgtgtgactatcaaactccccttttcccatgaaaccctcttccaccaccgtcacatacccctaccgccatggccacactccacaacaaccaaccaattccccgtccagcgccgccgtttccatccaatccgcctaccgcgcccaccgcatccgcgtcctctaccggaaaatcgccgccgtcgatgccgaagccgatcggctgcagcgcctgatccagcggcaggacac

SEQ ID NO: 18267 - DNA, 247 bp, Glycine max
  Clone ID: LIB3049-040-Q1-E1-E12
gacccttagcctctctgttcgcgtcagtcattgcttctcctccacacacgcacagagacacacactttggcagtcacattgagaatggggcgtgttcgcacgaagacggtgaagatctcctcgcggcaagtgagatacaggtactactcccgcatgacgctggagttccagacgaataagaaggttctggaagaggtggccagcattccctcctagaggctccgcaacaatatagcggggttctcca

SEQ ID NO: 18268 - DNA, 368 bp, Glycine max
  Clone ID: LIB3049-040-Q1-E1-E2
gggggtgttaaggagacggtgagatgccttcgtctaagcttgctcaaactggcctcgtctatgctgtattgggcagttgtggaatacaaagatctttgaacatctcctttactacatttttgcaacacctacccctttctctctctctctttcactcatcctaggtttgatttttccttctctcaattcccaacctcgcatctcccattattttattctcaaaccacgacaacaaaagcacaaacttggtttctcaatttcttcctctcgatcctacccgagttaaattaaaaacaagaggagagaaaacaaaacagaacaaaataaaggtttggtcttttgaagtgggagtgaggaatcagacatct

SEQ ID NO: 18269 - DNA, 371 bp, Glycine max
  Clone ID: LIB3049-040-Q1-E1-E3
ggttctagtgtatgtgattgttgtgactcgttcttcttcgtcgttatcttcttcttttgctgtttgtgtgtttgttttttctctcacctgaaaatgtcttgctgcggtggtaactgtggttgcggaagcgcctgcaagtgcggcaacggctgcggaggctgcaagatgtacccagacttgagctacaccgagtcaaccaccaccgagaccttggtcatgggagtggcaccagttaaggctcaattcgagagtgctgaaatgggtgttcccgctgagaacgatggctgcaaatgtggagctaactgcacctgcaacccctgcacttgcaagtgaggtgttggagagctaaagcttcaagcagaaatggccct

SEQ ID NO: 18270 - DNA, 401 bp, Glycine max
  unsure (1)..(401): unsure at all n locations
  Clone ID: LIB3049-040-Q1-E1-E4
tggggttagtgatacttctaatttcaaaccgttgtaatcccttggaaatttttttcactctcttagcatctanggtttactctatcattttttgcgtttcaagattttctgaatttcttttaccaattttgttcgcgttttaaggtcaatattcatgcatcttattagtgcatggagaatccctgtgaggtgctcggttccaaagggttaattagaaggcatgaatttgtgaggatcataatccagtgtctatattcattacggtacagtagctctgcatcgtgtttggaatcggaatctggtatttcgtacaagtccaatgaggttaagttgcttgaatcacttattttgaacgggagttgggacgaaagcattgattatctcaattccataaaggatga

SEQ ID NO: 18271 - DNA, 347 bp, Glycine max
  Clone ID: LIB3049-040-Q1-E1-E5
ggcacacaaccactctttcttcttcttctcttaaaagagcctttgctttttctttaggcctttccgaattaagtacttgtttcattttctctcgaagcaagaaaaatgttcatcgagagtttcaaggttgagagtcctaacgtgaagtacacagagactgagattcagtccgtgtacaactatgaaaccgctgaacttgttcacgagaacaagaatggcacttatcagtgggttgtcaagcccaaaactgtcaaatatgaatttaaaaccaacacccatgtccctaaactaggggtaatgcttgtggggtggggtggaaacaatggctcaaccctcaccggtggtgt

SEQ ID NO: 18272 - DNA, 387 bp, Glycine max
  unsure (1)..(387): unsure at all n locations
  Clone ID: LIB3049-040-Q1-E1-E6
gatagcgcagtttcatttctttggattagaaatttttcccaaagctgatcgagaagccagccaggccagagttgaagaagaatgggaagggggaagatcgaaatcaaaaggattgagaacacaacaaatcggcaagtgaccttctgcaagagaagaaatgggcttctgaagaaagcttatgagctgtcagtgctgtgtgatgcagaagttgccctcatcgtcttctccagccgtggccgtctctatgagtattccaacaacaacataagatcaacaatagagaggtacaaaaaggcatgttctgatcactcaagcgcgagcactaccacagaaatcaatgctcagtattatcaacaagaatctgcaaagctgcgacagcanatacag

SEQ ID NO: 18273 - DNA, 389 bp, Glycine max
  Clone ID: LIB3049-040-Q1-E1-E7
gggccttggtgtgaaccatagccatggctacttcatcaaccacattattgctatcatcactcatacctgcaagcatcccatcattcaactctggaaaccattcagtttttttgcttcaaaaccgttctttgaatcgacccaagaagagagtttccttcgttgttcaagcagccaagccccctattggtgtggaaattccaaaggtgcagcctcaatttaagcctccgtttcttgggttcactaagactgcagaagtatggaactctagagcttgcatgattggaatcattggagtttttattgtagagtttataataaacaagggcatacttcaagtgattggggttgatgttggcaaaggccttaatattcctctctgaacattattt

SEQ ID NO: 18274 - DNA, 366 bp, Glycine max
  Clone ID: LIB3049-040-Q1-E1-E8
cgatgcaaggggggcattggtgggaaccatagccttggatacctcagcaatcacattattgctatcagcactcatacatgcaagcatcgcatcattcaactctggaaaccattgggtatttttgcttcaaaacggttcgttgaatcgacccatcgatgagtgtttcgctccttgttcatcacatccaattcccctattggtgtggaaattctaaatgtgcagtcacgcattagtcgtccgtatcgtgggttcactacgactgcgtcactatggatctctaaagcttgcatgattgtgaatcattgtagtttttagtgtagactgtatagttcacacaggcacacttcatgtaattggggtctatgt

SEQ ID NO: 18275 - DNA, 100 bp, Glycine max
  Clone ID: LIB3049-040-Q1-E1-E9
cgtcagtctcggcgcgaggggggctctgtgggggccctcgctcttggctcctttctcgttcctgttgttgctcttggggcttatctgtgcgctcgggctc

SEQ ID NO: 18276 - DNA, 335 bp, Glycine max
  Clone ID: LIB3049-040-Q1-E1-F1
gggatgaaggtgtgcttggcatgcaaattggtgaatttgctcgtctccggtgctctccggattatgcttatggtgctggtggctttcctgcttggggaatacggcccaactctgtcttggaatttgaaatcgaagtcttaagtgcgcaatggaaaccttggtagtctgtctctgtcctaaagaataaaattcttccattttcatggacttgtacaatggtatccccacattgtgacttgtgggtgatatctacagtggttgagttgtccaagtgaaatactaaataactttctgaatgatctcaaactcgctaatattatattgggtagcctaaa

SEQ ID NO: 18277 - DNA, 251 bp, Glycine max
  Clone ID: LIB3049-040-Q1-E1-F10
ggttctagtgtgtgattgtttgttgttgtaactcgttcttcttcttttgttgttctgtgtttgtgtttgttttttctctcacctgaaaatgtcttgctgcggtggtaactgtggttgcggaagctcctgcaagtgcggcaacggctgcggaggctgcaagatgtacccagacttgagctacactgagtcaaccaccaccgagaccttggtcatgggagtggcacctgttaaggctcaatttgagggtgctc

SEQ ID NO: 18278 - DNA, 248 bp, Glycine max
  Clone ID: LIB3049-040-Q1-E1-F11
gatagcacagtgtatatagttgtcaacatcgctcctctcattcttctccgcagagaagacatggctcctctctcgctagtgtaagctagattattagttttttagtgaggtgctgctgaaatccctaattcgactttccacttgattacgatccgttcacccttcttaggatggcaaatgctgcataagatttctcccaattcgggatttcacaggaggataaggataagcttgttggggaattgatc

SEQ ID NO: 18279 - DNA, 253 bp, Glycine max
  Clone ID: LIB3049-040-Q1-E1-F12
gggatgcagaactcaaaacctgtgaacgcaagagcgttgaaggaacgtccaacgtgggagtcggtgtcacacaggtgctatgaacattctcttcaactgacacaagttgaagaatttcagctaaatgggtttagaatttttatccttgtttcagctggaaacatagagattgctatggcttattggcattacatttgcagtgatcttaactttccagtacctcgagtttccatatggaactgttctactctct

SEQ ID NO: 18280 - DNA, 388 bp, Glycine max
  Clone ID: LIB3049-040-Q1-E1-F2
gacattcaatcactcacacatgcccctatcttccttagctacctagattattcacttcaattcctcacaagcaacaccgtttcttgctccaatggcagctttgtatctcccaataagcatgttggcactcattgttgttgtttctcttggtttgtggagtggtgttcaaggtgcaccacaagtgccatgctacttcatttttggtgattctttggttgataatgggaacaacaaccagctccagtctttggctagggctgattacttgccttatgggattgacttccctggtggaccttctggaaggttttccaatgggaaaaccactgttgatgcaattgctgaacttttgggattcgatgattacatacctccatatgctgatgct

SEQ ID NO: 18281 - DNA, 377 bp, Glycine max
  Clone ID: LIB3049-040-Q1-E1-F3
gagtcttcgatggaattgtcccagatcacaaaccacattaataatagactcccacgttctcttctctctccgtctctctctctctcttcatttctcattgactctctctttctctctctctctgcacagtgccaatggcggatccaatcgcgaaggctctgatcgcgtttgcgctcgtagcttgtcttttgctgtgcttgcaagcttccaccgatgtcgccttcatcgtcgctcacaaaaaggcctccctcaacagattcaagtccggcgccgaaagggtctccgtcaccatcgacatctacaaccaaggaatctcgacggtctatgatgtaagcttatcagacgatagctggtcaagtgatgcctttgatgtaatc

SEQ ID NO: 18282 - DNA, 377 bp, Glycine max
  Clone ID: LIB3049-040-Q1-E1-F4
gggcctggtgggcttggcggactctgaagtcctggtaacggtgaaagacccagtcttcctctcccttgagagttgagaccacacaccttcgtgtatctttcgcgtcgctactttgctactacagcctatatagtcgttcgtttaatgtttcgttgcgaaaataattgtggcgtgaggtgttatgttctaacaaatctaggctttgtcgcctggaataaatagtagtacctagtactactagtttgtgattttcattttgttgtcatgcgccaagtagctctactgtgatttcatggtttgtaacgagtgggtgttatagtttcctacatgttatcatgtaaggttctgtgactttgatgggatgcagatgtacactc

SEQ ID NO: 18283 - DNA, 376 bp, Glycine max
  Clone ID: LIB3049-040-Q1-E1-F5
ggcgctctttcaattttctctctcttcccccaattttcccagaaaattcatccaacattttctaggcagccaaacacttcccaccatgaacagatccgctctcctcgctgcctccgtcgccgccgcgtcggccaccgctgcttccctttcctcctccgcaaaactctctctccaggacggtggggctcagagagaccacggcggatcctcgccggcggcgagttcggcgtcaacggagaagttcgcgccgcggttcgacgggttgcggttcattgaaacgctgattactgcgcacagatgaacgcgcggtgttcaaacgcgcttttggggtttttttttaccctaatcttttttgatcttgcactgtctagaaaat

SEQ ID NO: 18284 - DNA, 400 bp, Glycine max
  Clone ID: LIB3049-040-Q1-E1-F6
gaattaaccagcgcttcaaacatttctcattcacaactttacccactcttcattctagcaattcgaattcccaatccaaaaccctaataccttcaaagaacctagtagtgaatcagtgatggcacctaaggcagagaagaagccagcggagaagaagccggtggaggagaagaagtcgacggtgggagacaatgctccggcggagaagaagccgaaggccggaaagaagcttccgaaggagggaggagccggcggagaaggggggaagaagaaaaagaggaacaagaagagcgtggagacatacaagatatacatattcaaggttctgaagcaggtccaccctgacattggtatctcaagcaaggccatgggaatcatgaacagcttcatcaacgacatc

SEQ ID NO: 18285 - DNA, 401 bp, Glycine max
  Clone ID: LIB3049-040-Q1-E1-F7
gaattaaccatcgcttcaaacatttctcattcacaactttacccactcttcattctagcaattcgaattcccaatccaaaaccctaataccttcaaagaacctagtagtgaatcagtgatggcacctaaggcagagaagaagccagcggagaagaagccggtggaggagaagaagtcgacggtgggagacaaggctccggcggagaagaagccgaaggccggaaagaagcttccgaaggagggaagagccggcggagaaagggggaagaagaaaaagaggaacaagaagagcgtggagacatacaagatatacatattcaaggttctgaagcacggtcaccctgacattggtatctcaagcaagggcatgggaatcatgaacagcttcatcaacgacatct

SEQ ID NO: 18286 - DNA, 386 bp, Glycine max
  Clone ID: LIB3049-040-Q1-E1-F8
ggagtcgagaaacggcgcactccgtctgttcctcaccgtcaccggcgcgcgcaccctctgttccagcgactcctaattaagttgggaaataaaaaagacttcaaatttcccagatggctgcagcctttgcttccagatgctctcgtgtgggccgttctctgtctggtggattaagcaacagttcccctggtttatttacctcatcacatggcatgacatgcaacaatttgttttctcagcaacaacgtaccttcatacagatgaggactgttctcaaggttgtcgataactcaggtgctaaaaaggtgatgtgcatacaggcattgaaagggaagaaaggcgcaagattacgtgacacactaatagcatctgtgaaggaagcacat

SEQ ID NO: 18287 - DNA, 269 bp, Glycine max
  Clone ID: LIB3049-040-Q1-E1-F9
ttccaaaaaaagaaaaaaaggggccccattaacgaaaattaaggtttggaatataccctgaacaagccaccattgcccccaaagttacactccatggtaacaaaaccccccaatttaaaaagggaaattgaaagttatccaagtcccaaattttccaccagaagggccatttggccaaccatggccaatactgtggccttttaactcgccaacaacctaaatccaaaacttaaacacacgcctaaaaaccacccaaaatttacccttcc

SEQ ID NO: 18288 - DNA, 390 bp, Glycine max
  Clone ID: LIB3049-040-Q1-E1-G1
ccacgcgttcattacagtgccaaaagaagaacagaaggggaaaagcaacaacggaaatcaaaagggagacaaaaagtttagatcgagaaagatgggaaaggagagtagcaaaaatacggttccggtgacgcagtggctgaatcgaatggtctcagaaccttactacctcttccatttcttaaccttcttctcctatttcgtcgttcgcagctccgcaacccaaatcttagcgcctcatctcactcaccatctccttcgtcgcgaaatacaaacactgctactgttcgcgatattggctttcatcaagggaataaaagaataaacatgggaagcctttatagctgatgtgcttttcctgcccaagatttgtccttttctcctagcctttac

SEQ ID NO: 18289 - DNA, 246 bp, Glycine max
  Clone ID: LIB3049-040-Q1-E1-G10
ggagtggtgcgtttgggaaagcgtatcactggatggcggagaagaacgagtggaaatgatggtggactcaaaggacttacagcagcagagcaaagcgttggacaaactcactgaccgcatcgaggatcgccaactggattccactcgcgtcctccaggccatggcttccatcgctgcttcagcgcaagctgatctcaatgccatgcgtattagggagaaagaattagctgctgttaagataaatgc

SEQ ID NO: 18290 - DNA, 225 bp, Glycine max
  Clone ID: LIB3049-040-Q1-E1-G11
gaaaacagaatgaatagagagagatggtgtagaattgaatgggtggaaagtgaaagagtaagacaccacaaagtgtaacttgagtgattagatctgatgagtgcagaaagaaggaaggattgttggtgatcgatcatcgatcatcgatcatcgatggcgtctgctagccttggaagtggtggggtgggcagttccaggtctgttaatggtggcttcaggggttcc

SEQ ID NO: 18291 - DNA, 239 bp, Glycine max
  Clone ID: LIB3049-040-Q1-E1-G12
ggtaacatagagaagattctccgggaagaaaaggccaaagtgaggaaattcatggacaagactctttgtaataactaaaatttttgaagtttgatagtagttaaatgaatttacataacccatgttacacgacgagtgaaattggatatgagtgtatgagcaaagccaaagtgatcgtgtggcagagcagcgagagagaaagctcttcttgttctgatgtcggatcatcttccgcgaga

SEQ ID NO: 18292 - DNA, 390 bp, Glycine max
  Clone ID: LIB3049-040-Q1-E1-G2
gatccacccttcttgtctcaactctcaagtcatggcattttctttcactcaacgatttttcctttctccttcacttcttcttctccttctcctgattgctctctctgcttcttctcttactcccacttgtttttctgacagtgtttttgattctcaagcagcgcatgctgggaggaaccttcttcaggctaaaaaaagttgtcctgtgaatttcgagtttttaaactacacagtaatcacaagcaaatgcaaaggaccccagtacccacccaagcaatgctgtgctgcatttaaagagtttgcttgcccttatgccaatgctttaaacgattcaacgaatgattgtgctgcaatcatgtttagttacattaatctctatggaaagtaccc

SEQ ID NO: 18293 - DNA, 386 bp, Glycine max
  Clone ID: LIB3049-040-Q1-E1-G3
ggtgtgtggattgacgtgtcgcacggtgggtgtagcagtagattccgcctccaagaaaagaaagagcaatgcaagctgcatcttcaggcatcggatacggtctaaaatatcaggctagatgcatatccgatgtgaaggcagacacagatcacactagcttcctcgctggcactctcagcctcaaagaagaaaatgaggtacatctgattcggctttcgtcgagtggaaccgaactcttctgcgagggattgttctctcatcccaacgagatctgggaccttgtttcttgcccctttgatcaacggatcttttcaaccgtctactctaacggtgaaacgtatggggcagcaatatggcagatccccgagctatatggccagttaaat

SEQ ID NO: 18294 - DNA, 376 bp, Glycine max
  Clone ID: LIB3049-040-Q1-E1-G4
gaagatcttcagatcgatgacaacagcgacaatgcttcttcgtagctcatccacgccgattctcaattctcgcatccctcactcgaatctcaagcccaaggattcgcctcacgaacctgaaatccttcaccggagcccgcggacgcgctcgctcacgctctccgcgtcgttgagttcgctgtcgcctagcagaatgacgcgagcgttgtcggagactgatctttccgcgcgctccaaaacggcgtcgttcggctccgctttgttttccttctacgagtcggacgatggagacgttgcggttgttgatggatgcggagttggcggcagcggcggtggatgggacaatggtgacggcggaagttcggggttttgggat

SEQ ID NO: 18295 - DNA, 354 bp, Glycine max
  Clone ID: LIB3049-040-Q1-E1-G5
ggaaacagagagtgatttcagtgagtgatcggtgttcacttgatctcatcataatcgtcagcgtcaattgaagaagatgccgatcagaaacatcgccgtcggaaggcctgaagaggcgactcaccccgacacgttgaaggcggctttggctgagttcatctcaaccttcatcttcgtgttcgccggcccaggctccggcatcgcctacaacaagctcaccgacaacggcgctgccacccctgccggcctcatctccgcctccatcgcccatgcattcgccctcttcgtcgccgtctccgtcggcgccaacatctccggcggccacgtcaaccccgccgtcaccttcggcgcctt

SEQ ID NO: 18296 - DNA, 318 bp, Glycine max
  Clone ID: LIB3049-040-Q1-E1-G6
ggtcggtgtgggtgtttgaatctggtgaaggatgtcaattgttccaaccacacacggtgatgccaacggctccatccccttcgcttcgtggggttaattcgtggattttcctctacctccttccatctccggcttcttcaccggcttggagattcagattctgattcagatcatccctgaagacacatatggactggagggagactcccagaccacaggtgtagaaactggtgctatcgagctatcaccaagaggacatgctggttgagctccaagacgagaaggtgctccatgtcaacgtggatagcggcatcttca

SEQ ID NO: 18297 - DNA, 388 bp, Glycine max
  unsure (1)..(388): unsure at all n locations
  Clone ID: LIB3049-040-Q1-E1-G7
gaggagaagactgaaagaagaagaagaagaaaattgagggaggatgtggctcgagattatcttcggtttggtcatttacagattgttccggcgcttcttctacgacgacgacgttttggacatcgaaggatcggattcttctgctcttttctccgtcgcggataggcttaaaaaaactttacggagcaaatgtgtatgtgggtcttcggattcccgatgccgatactgcttctcgacagggcattgatatggttcttctcactaaacaagagctatgggtgatatctgtgaaaaacttctctggaattttgacaattggtggcgatggttgttgggtctgtgaaagggcagacanacatanagcagagcgtcaccctgattctgtgga

SEQ ID NO: 18298 - DNA, 344 bp, Glycine max
  Clone ID: LIB3049-040-Q1-E1-G8
gattgtatatcatttacaatttcaatctctctctctctctgtctctctctctctagacttacattttgtgaatggctgaagtggaagagggacacgtcatcggcgtccacatcgttgatgactggaagttgcaactccagaatgcaaaagactctcaaaaaactgattgtggtggattttactgcttcctggtgtggtccatgccgttttatggcccggttcttgcagagattgcaaagaaaactcctgaattgatcctcctcaaagtggatgtggatgaagtgaggcctgttgctgacgaatattccattgaagctatgccaaacttcctcttcgtgaaagat

SEQ ID NO: 18299 - DNA, 248 bp, Glycine max
  Clone ID: LIB3049-040-Q1-E1-G9
ggagtggtgcgtttgggaaagcgtagcaatggagggcggagaagaaggagtggagatgatggtggactcaaaggacttacagcaacagagcaaagcgttggacaaactcactgaccgcgtcgaggatcgccaactggattccactcgcgtcctcgaggccatggcttccatcgctgcttctgcccaagctgatcgcaatgccatgcgtattagggagaaagaattagctgctgttaagataaatgcac

SEQ ID NO: 18300 - DNA, 367 bp, Glycine max
  Clone ID: LIB3049-040-Q1-E1-H1
tgttgacaaggatggaccaaagcggcaaagagaatcttctcctcgtagaaaacctcctccctcaccacggaggagatctcctgtacctagaagagctggatctccaagacgaccagattctccacgtcgccgtgcagattctcctgttcgtcgccgattagactctccttatcgtcgtggaggagacacacctcctaggaggcggcctgtgtctcctggaagaggtcgttctccatctccacctagacgccttagatcccctgcaaggctgtcacctagaaggatacgtggaagtccaggtcgaagacgttcacctccacctcctcccaggcgccgatcaccacctagacgaccacgtaatcctcct

SEQ ID NO: 18301 - DNA, 254 bp, Glycine max
  Clone ID: LIB3049-040-Q1-E1-H10
gattgagaagtaagatggaggttgttacgcgccgtaagtaatttgtttgttggattggaattgagaaaacagcaacaaggggaaatgggagatagagaagaacaaggcgagggtgctggctcctccttggaattggaagctcctattccagagacccaaaaagaaatcccaatttcagatggcatcgcattcaacaatcagagcgcgattttccaagccatcgaggttgtggaacgagactcgttggccatcgc

SEQ ID NO: 18302 - DNA, 236 bp, Glycine max
  Clone ID: LIB3049-040-Q1-E1-H11
gggaggagtgaataagagatatcaatatattatgataatggagggatacaataagaaggttatgattgtggggatggtgttgggcatggccatgattgggatggccaatggccaatactcgttttgtcgcatgcccagcgatgggttggcggcatgcaagccgagtgtgagtggggactatcctgctgatccctccactgcttgttgctcagccattgccaaggctgatcttaaat

SEQ ID NO: 18303 - DNA, 254 bp, Glycine max
  Clone ID: LIB3049-040-Q1-E1-H12
gatgctgaaggacatttgtctactagccctaatcagttagatggtgacaaaagagctaccaatcataaatcagtgaatttggagggaagcctgttggttcagcacctgcaaaaaaagaagagagtccaggctttcaatgaagctcaagaagctctgatcaaagttctatatgagcaattcaaggatcacagaagatgcagttacatgatagccaatgcactggatgaggatggtaaaatcactgctgctcaagt

SEQ ID NO: 18304 - DNA, 410 bp, Glycine max
  Clone ID: LIB3049-040-Q1-E1-H2
gataggaacgaaaagaaagcgcaagatattaagctttggggagttttcatcttcggattaatcggcgccaccgtcactgctttctccctgtccaggtcgcaggcaaaaggaggcagctctttccgaacagcatttcaagaagaagcatggaagaggtacaataagcgattgcaagaggagtatgaggaggagatggagagggtggaacgaataagacgtatgcaaagtgtgtttaatagagaaagggataagcatagaagaaactacgagagctggaaggaaaatggtgccggtgcacatcatcaacatttccaaagagatgattggtattggaaggctgaagcatccttcagagagcagtgggccaatcaacatactcaaagagggagcgggaactattcgttatcaca

SEQ ID NO: 18305 - DNA, 401 bp, Glycine max
  Clone ID: LIB3049-040-Q1-E1-H3
ggttgaacggcgaggtagaacgacgacccccttctgcgttttgaccttcaatctcaatcatggccaaagctgaaggtggcaaggaaccaataaatgaacaagcagtagcaaatatgtatgctgcaatgaggtctgagctcaaccaaatttactccaaaataactgaactggagatggaagttagtgagcacacattggttaccaatgccattcaaccacttgaccaatctagacgatgctatcgtatgattggaggggtgcttgtggagagaaccatcaaagaggtcttgcctgctgtgcagcgaaataaagaaggactcgaagaggttgtggcaaggcttaacgaggcgttggaaaagaagaaaaaggaaatttctgagtttgaggctaaatataaaatc

SEQ ID NO: 18306 - DNA, 339 bp, Glycine max
  Clone ID: LIB3049-040-Q1-E1-H4
ggacatatttggatgtaatttctcagattcgtcttcagtttcagcctttctctcccactcactcactcacaggtaagcaatggcgggaaaaggagggaaggggcttcttgcagcgaaaaccaccgcggcgaataaggacaaagacaaggacaagaagagacctatttctcgctcttcccgtgctggaatccagtttcctgtgggacgtatccataggcagctgaaacaaagggtccaagccaatggacgtgttggggcaacagctgcagtgtacttagcctcaattctagagtatctgactgctgaagttcttgaactagctgggaatgcaagcaagga

SEQ ID NO: 18307 - DNA, 392 bp, Glycine max
  Clone ID: LIB3049-040-Q1-E1-H5
ggaggatgaagggaagcagcaagaggaagacggagaaggagaagatagaggatgaagtggaagaaatgttgcgagcggcgcaagaccaaatcctcttaaatctcacccaagcccacatagcagcccgtccttctccggatcatgatcatgatctggatctggatctggatctggagcgtcgattccaggccctcaaaatgaaaaccaaatctcaacctcaagatgatctctctgccagattcgatgccctaaaagccaaatcatcatcttctgttgtcacagcatccaattccaacgcccaatttgattatgctgaagaagaccagaggctcaagttcagaaactcatccagtgggctaaggatgctgcacgtctcgattcttctccccctc

SEQ ID NO: 18308 - DNA, 400 bp, Glycine max
  Clone ID: LIB3049-040-Q1-E1-H6
ggagcaccaactacctacccctttctttgattttgtgtcccaccctgcatcttagcagagccactctgatcactaaaatgccattgttaacttcctctttgttcaacatggttcctctcttctctcttcttttgttctcactcatgattcgttatagtacttctcaggatccaccttcacctggttactaccctagttccaaaattagtcccgttagctttggtgagggatttagaaacctttggggacctcagcatcagaaactagaccaagactcattaacaatctggcttgactcttactcagggagtggattcaagtcacttcactcttatcggtctggatactttggtgctgcgattaagcttcaaccaagttacactgcaggagtcataacatc

SEQ ID NO: 18309 - DNA, 338 bp, Glycine max
  Clone ID: LIB3049-040-Q1-E1-H7
gagaacagaatgagggtagtgcggtttgccggtgagatctgttgtttaagtttagtgctgcaatgtaatgtcttgctattgctatatcttttctttctcatagatagatttagatctataaactcccttcgttgctgaacgcggttaaggttatgatttatgaatgcgatctaattaaggcacaatgacaaggagacaagcaagttccacgagacgtggcggtctttcaagaatcttgcattccaaatccaaatcttctcctctactctccatatcccttgtcctctttggagccatccttctcatcctttatgcttgtagcgggtcaggtgttttgg

SEQ ID NO: 18310 - DNA, 396 bp, Glycine max
  unsure (1)..(396): unsure at all n locations
  Clone ID: LIB3049-040-Q1-E1-H8
gacaacactcatagtagagtaaccaaaaggagagtgcaataactcgttgtacattcctagtgtgtgggagagacatggctaagatgtgtgttttggtgctggttcttgctctggctgtggccacaagtgccagaaacgttcccaaccccaaggatgctggtcttaaggaccagaagaacttcatcagctatggtggagttggtggttattccgggattgggaacaatggactgccttttggaggagctggtgccggaataggtggtggttttggcggaggtggtggacttggtggtggcctcggcggtcctaccggtgggatcgganggtttggcggtaccggtagcggtgtcngtggcggtattggtggtggcgttgggactggcgttggtggtg

SEQ ID NO: 18311 - DNA, 249 bp, Glycine max
  Clone ID: LIB3049-040-Q1-E1-H9
aaaataagaatgaatgaaaggcattagaaatcagtgaccggcgtgagagagcaaagatggtggttcttggcaccacctcaccttcaatttcctgcttgccgtcttcaactcaaaccgactacaaggcgcgtcgatactgttcttttccgcaacgcccacgcccacgcccacgcgcttcacgtttcttttgcggatcccctttcgctccaaatgccatccattctccttctctgtctgtgacgaatgaac

SEQ ID NO: 18312 - DNA, 272 bp, Glycine max
  Clone ID: LIB3049-041-Q1-E1-A1
gaatctagtggaagagtgaataagagatatcaatatactatgataatggagggatacaataagaaggttatgattgtggggatggtgttgggcatggccatgattgggatggccaatggccaatactcgttttgtcgcatgcccagcgatgggttggcggcatgcaagccgactgtgagtggggactatcctgctgacccctccactgcttgttgctcagccattgccaaggctgatcttaaatgcttctgccgcttcaaggattcgggccc

SEQ ID NO: 18313 - DNA, 363 bp, Glycine max
  Clone ID: LIB3049-041-Q1-E1-A11
gaatctagtggaagagtgaataagagatatcaatatactatgataatggagggatacaataagaaggttatgattgtggggatggtgttgggcatggccatgattgggatggccaatggccaatactcgttttgtcgcatgcccagcgatgggttggcggcatgcaagccgagtgtgactggggactatcctgctgatccctccactgcttgttgctcagctattgctaacgctgatcttaaatgcttctgccgcttcaatgattctggccttctctctatgtatggtgttgatcccaacaagtgcatggatctccctgttaagtgcaacgttgtcgactctttccactgctaaattcattag

SEQ ID NO: 18314 - DNA, 364 bp, Glycine max
  unsure (1)..(364): unsure at all n locations
  Clone ID: LIB3049-041-Q1-E1-A12
ggttctagtgtgtgattgtttgttgttgtaactcgttcttcttcttttgttgttctgtgtttgtgtttgttttttctctcacctgaaaatgtcttgctgcggtggtaactgtggttgcggaagctcctgcaagtgcggcaacggctgcggaggctgcaagatgtacccagacttgagctacactgagtcaaccaccaccgagaccttggtcatgggagtggcacctgttaaggctcaatttgagggtgctgaaatgggtgtgcccgctgagaacgatggctgcaaatgtggaccaaactgctcctgcaacccctgcacttgcaagtgangtgttgggagagcaagcttcaagcagagatagccc

SEQ ID NO: 18315 - DNA, 274 bp, Glycine max
  Clone ID: LIB3049-041-Q1-E1-A2
agggttctagtgtatgtgattgttgtgactcgttcttcttcgtcgttatcttcttcttttgttgtttgtgtgtttgttttttctctcacctgaaaatgtcttgctgcggtggtaactgtggttgcggaagcgcctgcaagtgcggcaacggctgcggaggctgcaagatgtacccagacttgagctacaccgagtcaaccaccaccgagaccttggtcatgggagtggcaccagttaaggctcaattcgagagtgctgaaatgggtgttcccgc

SEQ ID NO: 18316 - DNA, 272 bp, Glycine max
  Clone ID: LIB3049-041-Q1-E1-A3
gaccactactcctccgaagtctttgaagtcatacagaccattgaaaagacttagtcatagcagcagacacggaaaggcacgtacacgaccaccgtttacctgttttttgaacgttgaaattaattgacctgcgcctgcgcgtgtcactgtttgagagcacacacacaatgtcctcccaatctgacgccgttggctgtaacttgaacgagacggagctcaccttatgccttcccggtaccaaaactaatggcacaaaacgtggcttctccgac

SEQ ID NO: 18317 - DNA, 270 bp, Glycine max
  Clone ID: LIB3049-041-Q1-E1-A5
ggagttagccaagtgaagggtgaatcatctcctctcctctcttctacgatggccatggacagtgtttatgcttcgtctttaactagcaatttatatttatagatatgttcctcccctcttcttcttcattttcagccacccgcgccatttctacctcgcagtcgataggctccagttcaaaatgtgattgaactggtggctcgacgtccatgcttcctcatcgtggtctgctgcagcacgcgcaacgacctcgactctctctgctctccc

SEQ ID NO: 18318 - DNA, 273 bp, Glycine max
  Clone ID: LIB3049-041-Q1-E1-A6
gggatgctgaaccaaagtgggatgccgaacctaataattgggatgtagaaaatccaattgagttgccgggaccatcagatgatacagaaataggatctgcaaaggaggttgtgccccattttggagataaatgggttgtgtcaaagggacaatttcttggcattctggtttgcaaccacgcatgtagaactgttcagagttctcacgtggttgctcccaaagctgagcacgatgataacactctagatttgctcttggttcatgggagtggaa

SEQ ID NO: 18319 - DNA, 265 bp, Glycine max
  Clone ID: LIB3049-041-Q1-E1-A7
ggaagccagcgagtgagcgagcgagcgaggtagggttttcgttgttcccccgtctttgaattcagttcgcgacgatggggtccatccccgatccatgcgagttgagcgagttgactcagccgagcttcgacgagttccagcgccaaacttccctcatgaccagctgcaccctcctctggaaggagctctccgaccacttctcctccctcgagcaagacctcaaccacaaatccgaagccctcaaacgcaagattcgcaccctcga

SEQ ID NO: 18320 - DNA, 272 bp, Glycine max
  Clone ID: LIB3049-041-Q1-E1-A8
ggcacggggggggggtagaagggactgaatccagtggtagatgaggtgaaatgagagcattggtgagagttgagagagagtgagttatgttatcaatgttatggtgaaagtgaaaccacaagcaaagctgaaagagaagctattcagtgattttgattcagatcgtgtctgtgtctacaaccatgtacagcggctccagcgacggcgaaagccatgacgctcctcaaaatcagaggaaaattccgcctgcatcctccatgctatgggtccgc

SEQ ID NO: 18321 - DNA, 358 bp, Glycine max
  Clone ID: LIB3049-041-Q1-E1-A9
ggtgaaaataaagttgctattgttggagttttcccgaaattttctggagaggagtttgacaacttttctgccttagcagagaagttgcgttctgattatgactttggtcacactctgaatgccaaactccttccaagaggagagtcatcagtttctgggcccgtagttaggctgttcaagccattcgatgaactttttgttgacttccaggatttcaatgtggaagctctagagaagtttgttgaggagtctagtacccctgttgttactgtctttaacaatgaaccgagcaatcaccctttcgttgtcaaattcttcaacagtcccaacgcaaaggcaatgttgttcatcaacttca

SEQ ID NO: 18322 - DNA, 260 bp, Glycine max
  Clone ID: LIB3049-041-Q1-E1-B1
ggcagcatcgtagagaaataagggaaaaatggtgtcgctgaaactgcagaagcgcctctccgcaagcgtgctcaagtgcggcagacgaaaggtttggcttgaccccaatgaagtcaacgaaatctccatggccaattctcggcaaaacatcaggaagttggttaaggatgggtttatcatcaggaagccaaccaagattcactcccgctcacgtgctcgtaggatgaacgaggcaaagaggaatggccgccactccggtt

SEQ ID NO: 18323 - DNA, 330 bp, Glycine max
  Clone ID: LIB3049-041-Q1-E1-B10
gggaacaagctttttatgccatgacgttaattaattaatagtatatataaaaatcctagtacaaaaaaaagaacacaaacgttgttagttgccagaaccgaacaggagaacattgcaggcactaccagcagccatcttaaattttccccttttgggttttttcttcttttttttttgttttttttttatctcagtgttgggatgtttatgagtactatgtttatagtattattaatgtttatagttattgatttttgggttaacctttcgagggagggtcagacgggaatggagtgttgggaatgtaagatatatgttcaggtgtgatta

SEQ ID NO: 18324 - DNA, 326 bp, Glycine max
  Clone ID: LIB3049-041-Q1-E1-B11
caacgggaacgagagactatactacggcacaatctagtggcaaaaaattggttgagtggctggttgcaacattattgttcattgccttgttgagtggtactgcacatgctgttgcaatatgtcacattgactcaagtcaactgaacttgtgtcgtgctgcacttactggtcaaaaccctccaccacctgatgagaaatgctgtgcacttattcgccaggccaatttgcgttacctctgcagtttacagtctatcctaccttcacttggaaataaccccaaaaatgctttggccttgcctgttaaatgtggtctacaattgcctcct

SEQ ID NO: 18325 - DNA, 314 bp, Glycine max
  Clone ID: LIB3049-041-Q1-E1-B12
tggggaataaaaggtgtgagttgtaagggttgggtaagggaatatgagattgtaattggtccaaggcatatcatcttatccatatcgacatccaaaatctcctactttactctctctctctctctgacaatctcaccacttgtattgtctcaagcaatcatggcaatggcaatccaagcctctctcttaaccccacccctctccggtctcaaaaccagcgaccgcgcctcagtgccatggaagcataactccagcctctccttctccagtccgaagctactcaagttctccagaacaatcagagcagcattcgc

SEQ ID NO: 18326 - DNA, 261 bp, Glycine max
  Clone ID: LIB3049-041-Q1-E1-B2
ggttctagtgtgtgattgtttgttgttgtaactcgttcttcttcttttgttgttctgtgtttgtgtttgttttttctctcacctgaaaatgtcttgctgcggtggtaactgtggttgcggaagctcctgcaagtgcggcaacggctgcggaggctgcaagatgtacccagacttgagctacactgagtcaaccaccaccgagaccttggtcatgggagtggcacctgttaaggctcaatttgagggtgctgaaatgggtgt

SEQ ID NO: 18327 - DNA, 270 bp, Glycine max
  Clone ID: LIB3049-041-Q1-E1-B3
ggaaggagctagtccaaacttcaaagcaccttcactctcttaaaaacattctcttcaactcttttccattttattattcttccaaaactggaccttactttacccgaatctaaatcccaacccgaaccaaccatgttcggaccaacccaaaccgcttcccaacctccgaaatccactctcaaattcctctgcagctacggcggcaaaattctcccccgctaccccgacggcaagctccgttacctcggcggccatacccgcgtcctcgcc

SEQ ID NO: 18328 - DNA, 274 bp, Glycine max
  unsure (1)..(274): unsure at all n locations
  Clone ID: LIB3049-041-Q1-E1-B4
gaacaaagggagatacatatacattaaattacatagatcaatgcttgcttagttaacgctatgaagttgcgttccaactactctttttagtctctttatctttattcttcttctattctcatgcccccaccttatacgcctcttcccccatcaaccttctttctttgcattcttccttcactttcttcncttcttcaaccccaactcatgcatgtccctctctatcttctcccaatgaaatgaaccatcaaaaaaacccaccaccccaattgca

SEQ ID NO: 18329 - DNA, 270 bp, Glycine max
  Clone ID: LIB3049-041-Q1-E1-B5
ggacgatcgaaatctggtaagaggctgtaatcaatcaaccaaagcaacgatgtcgtggtttacaaggacaatcgcaaactcactcaaactcgacgacgacgacaatggcggtgacctaaaatcccctccgaagaaacccgattcggaacccgttcaacccgattccgcatccacccccaatcccaccacgcgcggcgtcaaagaggatttttccgagctcaccaaatccttttcccgccagctctggggagtcgcctccttcctcgcccc

SEQ ID NO: 18330 - DNA, 238 bp, Glycine max
  Clone ID: LIB3049-041-Q1-E1-B6
ggccgtaaacctctgcgctctctctctctgtctcctacgattcgttttgccccttttgttgccctaatttcaaccatgcctcgccgtaactccggtggaagatctgcccgtcctgctcctcgggcagctcctcgtcctgctccagttcaacatgctcctcctccaacccctgctcagagtggtggtggatctaagcttggtggcattggtccaaccatagctcaaggtatggcttttg

SEQ ID NO: 18331 - DNA, 267 bp, Glycine max
  Clone ID: LIB3049-041-Q1-E1-B7
ggaaccgagatcggagaagaagaagagaatgggaacctcggtggcggatctagctccgggtctgtcacggaagctgaagaaggttcaagaatctcggatcgacacgccctatctcttgtcttcgctcaacacgctctcttccttctacgacgacaacactcctcaggcgcgtcgcaacctccgatccaccatcgagaagcgctccctctccatcaactgcgaattcctcgacgcttcccacgccgcgcagctggccttggatagcgt

SEQ ID NO: 18332 - DNA, 273 bp, Glycine max
  Clone ID: LIB3049-041-Q1-E1-B8
ggtgctaatcttatcttatccctctaatcactctagctgttgcaaatttctactatttttcaatggcttctgcagatgttgagttccgttgctttgttggtgggcttgcttgggtcaccggcaacgatgccctcgagaaagccttttcaatctacggcgacatcgttgaatcgaaggttatcaacgaccgtgagactggaaggtccagaggattcggatttgtgaccttcgcctcagagcagtcaatgaaagatgcgatcgcaggaatgaacg

SEQ ID NO: 18333 - DNA, 351 bp, Glycine max
  Clone ID: LIB3049-041-Q1-E1-B9
ctgaaggaggtcagtgaggaggttgccaagtacaaggttggagctcctgctcgtgttggtttggttgccccaattgatgttgttgttcctcctggcaacacagggctcgattcctcccagacctctttcttccaggtgctcaacattcctaccaagattaacaagggtactgttgaaatcattacccctgtggagctcattaagaatggagacaaggttggatcttctgaagctgcattgcttgccaagctagggataatgcccttctcgtatgggcttgtggttcattctgtttatgataatggttcagtgttcagtcctgaggttcttgatcttactgaggatgacctt

SEQ ID NO: 18334 - DNA, 268 bp, Glycine max
  Clone ID: LIB3049-041-Q1-E1-C1
gaagaaacaaccactactgatgatagttcgttcactgtgactggcttgttggagcagataaatgcaaccagagatttatctgattacttgtggtactccacagatgttgtgatcaattccaatgaaggatttttgaggaatggaaagaatcctgttcttacagttttgtctgctgggcatgctttgcatgtttttatcaacaatcagctgtcaggaactgcatatggaagcttagaggcccccaaactaacctttagcgaaagtgtga

SEQ ID NO: 18335 - DNA, 326 bp, Glycine max
  Clone ID: LIB3049-041-Q1-E1-C10
ggagaaaaacgagccaattcatcattttctctcttctctgcttcttcttgttcaaatcttaggagctgaggagaatcaatcgagagaaatatgtctggtatcgctcgtggacgccttgctgaggaacgaaagtcatggcgcaaaaaccatccacacggtttcgttgccaagcccgagactctacctgatggcaccgtaaatttgatggtctggcattgcactattcctggcaagaccgggactgattgggagggtggatatttcccactgacaatgcacttcagtgaagattaccctagcatgcctcccaagtgcaaatttcctca

SEQ ID NO: 18336 - DNA, 362 bp, Glycine max
  Clone ID: LIB3049-041-Q1-E1-C11
ggatagcaagagagacatgcgagttcgactctcgttctatccatccatgttcagcagtccttgtccatgttggaactgttgatggcagtaccgctcaactacgagatgcttgaaagtagttgcttttactgtatttattgatattgggttagtgttccgtgtaccgcaccgagccttaataggttgtttgagattctgtaagtaactactccgtgcttcaattggtcaaagtaaatgaaatgaaacgttgatatcaatcactttttatataagaagtcattagcaaaaatcttaagaaaagaaaggtaggtttcttacttatgaaaaggttattggactcttgtgctagaattgcttttttt

SEQ ID NO: 18337 - DNA, 348 bp, Glycine max
  Clone ID: LIB3049-041-Q1-E1-C12
gacatcacaaaccaaacaacttctaacacatacactactctctctctctctctcttattgtatggccgccaattccagtagccgagggatcaccgccttagggaagcgagtcgccaaccggatctggacttccaacgcacctcctctcacttcaaggaggggagcatacagtagcggctcagtgtacgacaagaaccctgatgatgagatccagtctgggcaggtcccagacgatgtgatccaggcggcaacacaatccggcaaatactgggccccacatccacagactggggtatttgggccccccggaggatgtgaccaaactgcttctgccattcactctgatgc

SEQ ID NO: 18338 - DNA, 277 bp, Glycine max
  Clone ID: LIB3049-041-Q1-E1-C2
ggcagtttcaaattttctgttccttcactttcccgagaaaaagataagacgtttcactttcttcactacgttctcacttcgatatggctcgtacgaagcaagccgctcgcaagtccaccggtggcaaggcgccacgtgagcagctcgccaccaagggcgctcggaagtccgctccggcgaccggatgagtgaagaagccccaccgcttcaggccgggaaccgtggcgctgacggaaatcagaaagtaccagaagagcaccgagcttctcatcaggaa

SEQ ID NO: 18339 - DNA, 277 bp, Glycine max
  Clone ID: LIB3049-041-Q1-E1-C3
gacaatataacgctttataatgcgtaatctctcctttctcccttaacaccgttacactatcgttcttcgctgcttcgctgaatctcgctacgccgaaagcacacatctgacaccataaccgcctgagaaccggttgaatcgcaagggcgctggtgctggcacgaagcaatcgacgaaagctgctaaagatactaacaagccacagagacctccaagcgctattcgtcgttttcatggtacgacttcagatagcagtttaagaacgagcatcctaaca

SEQ ID NO: 18340 - DNA, 264 bp, Glycine max
  Clone ID: LIB3049-041-Q1-E1-C4
cggggttctagtgtgtgattgtctgttgttgtaactcgttcttcttcttttgttgttctgtgtttgtgtttgttttgtctctcacctgaaaatgtcttgctgcggtggtaactgtggttgctgaagctcctggaagtgcggcaacggctgcagaagctgcaagatgtagccagagttgagctacactgagtcaaccatcaccgagaccttggtcatgggagtggcacctgttaaggctcaatttgagggtgctgaaatgggtgt

SEQ ID NO: 18341 - DNA, 268 bp, Glycine max
  Clone ID: LIB3049-041-Q1-E1-C5
ggatgcaggagaggatgaatggtatagggttttccccggcgggatacagtcccgtaatcccttcttcatcctgttttcctaaaaaattgagagtccagccgcaacgggccttgagctctgacccctacgttctggaactcgccgaaaccctagaagactccttcccctcctctccctccaccccactccctctccagaacctccgcctctcctcctcccaatccctcctctccactccatggccctcccgccgcgacgagcccttccg

SEQ ID NO: 18342 - DNA, 409 bp, Glycine max
  Clone ID: LIB3049-039-Q1-E1-E1
ggaagttcaacatactaagtaggagagttaaaaatgggtctagagagccactctagaatttgaaaataacacctttatatatataatgatagataatgttcaattctactcataatcttattgctctaataaacagttactcaaatgtcgcagtctctgcacgtaaagacttcatcaacatttatacgacttcacttttttttttttttgaaggattatacgacttaattcactgagtagctcgagtggtggggtagcaatatattggaccagaacataactcatgaatatacaagcaagttagccggctcaagttcaaaataagaatttttaccatgatactatgggtcaaaacataacaagagaggggagcatctcagctcaggatttcatggatgtaacttccggg

SEQ ID NO: 18343 - DNA, 55 bp, Glycine max
  Clone ID: LIB3049-037-Q1-E1-B12
tgggattgcattattcacttcagagttcaattcattcactgtcgtcgctctttct

SEQ ID NO: 18344 - DNA, 67 bp, Glycine max
  Clone ID: LIB3049-037-Q1-E1-B4
gatctcacgcagttgcagattgatttgactatcagtgtttcacttctgccttagcccgtttcagggt

SEQ ID NO: 18345 - DNA, 274 bp, Glycine max
  Clone ID: LIB3049-037-Q1-E1-B8
acgcgtcagacagctgcaagaagacaacgaaaggggacagcatatataccattaaccaattttaaactatacctacattttgataattttctttgtagttgaaagccatggctacccgtgaaaagcctgaggttgacattgatcggaggtccaaggcagacaagttactggcaaacccttaggatttctactgatcgattccctaagggcttccgacatgagttaacaaaccattgatgttcttgagggtgatggcaagtctcctgggttctat

SEQ ID NO: 18346 - DNA, 168 bp, Glycine max
  Clone ID: LIB3049-037-Q1-E1-B9
caagggaaaaaaaggaggtcgatattcattaaattttctagattaatggttgcttagttaaagctattaagttgcgttccaaatattccttttaatccccttaacgttattcctcgtcgattctcaaggccccaacttttatccctcgttcctcaataaactttcttc

SEQ ID NO: 18347 - DNA, 117 bp, Glycine max
  Clone ID: LIB3049-037-Q1-E1-C1
tgggcattttcgcggcgcacagctgaagtgtctgcttcttccgattccggcacgcccccatcaccatggtgaatgttccgaaaagagataagacatactgcatgagtaaggagtgct

SEQ ID NO: 18348 - DNA, 77 bp, Glycine max
  Clone ID: LIB3049-037-Q1-E1-C10
agggcaaagagatgtgggtctatgtctgagcacgctcgttggtgatactcgttcgagatcttgtgttgttctctgtt

SEQ ID NO: 18349 - DNA, 130 bp, Glycine max
  Clone ID: LIB3049-037-Q1-E1-C6
cggggaagaacgaatctcctaagactgataaaaactcagtggatttgaattcctctccttccttgaatacaattgccgtgaatggaacaatccccgtcgcttcgacgttcgcaatcgctatcgcttccgt

SEQ ID NO: 18350 - DNA, 339 bp, Glycine max
  Clone ID: LIB3049-037-Q1-E1-C8
ttttttttttttttttgtttttttgtttttttttttttgtgtttttgtgtttttttttttttttgtgttttgttgttgtttttgtttttttttttttttttttttgttttttgtttttttttttttttttttttttgttgtttttttttttgtttttgtttttttttttgttgttgttttttttttttgtttttgttgtttttttttttttgtttttttttgtttttttttgttttttttttttttttttttttttttgttttttttttttttttttttttgttttttttttgttttttttgttgtgtttttttgtgttttttcttttttttgtttttt

SEQ ID NO: 18351 - DNA, 334 bp, Glycine max
  Clone ID: LIB3049-037-Q1-E1-C9
tacggcagcgaaagggacaaagaaaggggttctaatgtgtgattgtttgttgttgtaactcgttcttcatcttttgttgttctgtgtttgtgtttgtcttttcactcacctgaaaatgtcttgctgcggtggtaactgtagttgctgaagctcatggaagtgcggcaacggctgcagaagttgcaaaatgtagccagagatgagctacactgagtcagacatcatcgagactttggtcatgggagtggcacctgttaaagcacaatttgagggtgctgaaatgggtgtgctcgctgacaatgatcggtgcaaatgttgatcacactgctcctgc

SEQ ID NO: 18352 - DNA, 100 bp, Glycine max
  Clone ID: LIB3049-037-Q1-E1-D11
ggagtgcagtgatatagattacaaaatgtagcttgtgtagcttctagttccttttctgaatagacattgtcatttctggatccttctctcaaagcatatt

SEQ ID NO: 18353 - DNA, 336 bp, Glycine max
  Clone ID: LIB3049-037-Q1-E1-D9
aggggggattgaggggtcggtctgcgtcgagtcatgcgtctctccatttgcacgacgactaggaggagtgtaggcgttggcgtccatggttaaccatgtcattgtcttgtggcctccgcactcaggattaccattctccttctcctctctcgcctcggtcatcgtcgcatgcttcaatcgcttactcgagacgctgatgaatgacttcttactatgggtcgatcactatcgtggtctctgtggcccacttgttctggctgttgcttatattccattgactgtcatggctgttccatcgtcagtgcttactcagggtggaggttatcctttttgggc

SEQ ID NO: 18354 - DNA, 226 bp, Glycine max
  Clone ID: LIB3049-037-Q1-E1-E1
cggggggcaatcgtgtaacgcagtcgtattggactggaataggcacatagagaagattcaattccaatcccaaccgaacaaactagaaattatggttcatatcccatttcctcagatttcatctcacatttcccattggtttgtcttgcgtggtcggttttgctgtccctcttacttctcacggtgtcttcccgttttcctcgcctttactcttttctcttttctc

SEQ ID NO: 18355 - DNA, 208 bp, Glycine max
  Clone ID: LIB3049-037-Q1-E1-E10
gattggtgctagttctccgtagcggtttataggtccacactatccttaactataagctacagtattgtcatattctctgccttgtggactcatttttaaatccatgtctgtggtcactggtataacaagttcattctgaagtagttttttaaattttattttcacacttcttttattgtatagattgcgttattttgagggtattcta

SEQ ID NO: 18356 - DNA, 310 bp, Glycine max
  Clone ID: LIB3049-037-Q1-E1-E3
gtgttgttggttttttttttttttttttttttggttgtgttgttctttttttttgtttttttgtggtttttttttttttttgttttgttttttttgttttttttttttcttttgtttttttttttttttgtttttttttttttttttttttttttttttgttgttttttgttgtttgtgtttgttctttttgtggttcttttttttttgtttttttttttgtttttttttgttttttgtttgtttgtgtttgttgttcttttgtgtttttttgtttttttgttttttttttgtttttttggttttgtttt

SEQ ID NO: 18357 - DNA, 139 bp, Glycine max
  Clone ID: LIB3049-037-Q1-E1-E6
cgggacactcgtttggtttcatctctttctctctctctctctctagtctatctatcttatttttctctctctaaaatcctctgtgagaacgtgcacagcaatcgctacagaggtgggctctctgattatggtgatgggt

SEQ ID NO: 18358 - DNA, 179 bp, Glycine max
  Clone ID: LIB3049-037-Q1-E1-E9
aggtggtgctggttctctgtggtggtttatacgtctccaatatacctatcgaaacactaatgtattctcaaagtacttgctttgtgactcattttctaatctatttcggtggtcatcggtgtaacatgttcattctgaagtagtttttgaagttttacgttcacatctgttttattgta

SEQ ID NO: 18359 - DNA, 210 bp, Glycine max
  Clone ID: LIB3049-037-Q1-E1-F1
ggctttcgtcaattctgaggtaaaagaaagtagagagaaagagagagagagagagagagagagagtcataatcataagtcatacctgatttccattctctctgagagacggtgcgagattggcataatggcgaaatcagccgttttgatcggaatagactagccgggaacacaggctgagctgtaaggatgtctgagcgacgtgtgggag

SEQ ID NO: 18360 - DNA, 363 bp, Glycine max
  Clone ID: LIB3049-037-Q1-E1-F2
ttttgttttttttttgtttttttttttttttttttttttttttgttttttttgttttttttttttttgttttgttttttttttttttttttgtttttttttgtttgtttttttgtttgttttgtttttttttttttttttttttttgtttttttttttttttttttttttttttttgtttgttgtttgtttttgttttgtgtttttttttttttgttttttttttttgttgtttttttttgttttgtttttttttttttttttttttttttttttttttttggtgttttttttttttttttgttttgtttttttgtgttttgttgtttttgttgttgtttttttttttttttttttttttttt

SEQ ID NO: 18361 - DNA, 109 bp, Glycine max
  Clone ID: LIB3049-037-Q1-E1-F6
ctgcgagaagcgaacgaatgggagagctcttggctttaccagtttccaattctcaattcacaattcgaaatacttattcctttcaaataaccacattcagtcatcgtga

SEQ ID NO: 18362 - DNA, 324 bp, Glycine max
  Clone ID: LIB3049-037-Q1-E1-F9
ggcactttcaaattttcatttcctacaccttcacgagaaaaggatagcacttttcactttcttcactacgttctcacttcgatatggctcgtacgaagcaaaccgctcgcaagtccaacggtggcactgcgctacgtatgcagctcgccaccaatgccgctcggaagtccgctccggcgaccggatgagtgaagaaaccccaccgcttcatgccgggaaccgtggcgctgacggaaatcagaaagtaccacaagatcaccgagcttctcatcaggaagcttccatttcacaggctcgtgagacaaatctcgcatgatttcaaga

SEQ ID NO: 18363 - DNA, 234 bp, Glycine max
  Clone ID: LIB3049-037-Q1-E1-G1
ggcagtttcaaattttcttttccttcactttcccgagaaaaaaataacacttttcactttcttcactacgttctcacttcgatatggctcgtacgaagcaaaccgctcgcaagtccaccggtggcaaggcgccacgtaagcagctcgccaccaaggccgctcggaagtccgctccggcgaccggaggagtcaagaagccccaccgcttcaggccgggaaccgtggcgctgaggg

SEQ ID NO: 18364 - DNA, 170 bp, Glycine max
  Clone ID: LIB3049-037-Q1-E1-G11
gcgatacgacgacaacaacggggttgggacgaatacagctctcacatgagcactgaattgtatggagagatatagacctgtggtatagagccttggtctgcgccgtgggtgctctccggcggtcatagtcatcgcgaggtgggggcctctcctcggccgttcagtcagtg

SEQ ID NO: 18365 - DNA, 75 bp, Glycine max
  Clone ID: LIB3049-037-Q1-E1-G4
gaactaagtagagagtaaaatcaaatcaggagagcatgcatatgaacatgatgatgaagacggtgtgtgggtttg

SEQ ID NO: 18366 - DNA, 73 bp, Glycine max
  Clone ID: LIB3049-037-Q1-E1-G5
gactgaagattacggcgattgagagggagagtttgagaacggtgaacaccgcggcgttcctccgcccctccct

SEQ ID NO: 18367 - DNA, 346 bp, Glycine max
  Clone ID: LIB3049-037-Q1-E1-G9
ggttcatcctttgggtatctcacacacacatgatggacgcaaatttggccaccattataatacttactttctccgtactttggcttatcacggtaaatggcataaactcttgtgcctctcatgcggcttactcctacctgaacgttattcccatctacaacaaatgctcatcgttcaatgcaccaaagtcaaacacatcgtgggagatcacacttatatacatagcctcattataccactctgatccatatacttgtccaacttactgggccaaaatcacgatctcacagtaccatacactttcgactagatcttcaacatcgttatctacatcctcaaggtcaaa

SEQ ID NO: 18368 - DNA, 202 bp, Glycine max
  Clone ID: LIB3049-037-Q1-E1-H10
gcgggagtggcgcgatggtatcatggtgaaggcgatggacgggcgcttcatcagaagtttcggcacactggagaagagcccacgctctttctgattacaaacagcagaggaatgcaactgttacacttcagtgtctatggagagctaaagtggcacggaaagagctcagaaagcttcggatggctgcaagggaaactggggc

SEQ ID NO: 18369 - DNA, 60 bp, Glycine max
  Clone ID: LIB3049-037-Q1-E1-H3
ggagtttgtgtgtaaccctagctagcctcaatgcagatattcgtgaaatctctaatgggg

SEQ ID NO: 18370 - DNA, 322 bp, Glycine max
  Clone ID: LIB3049-037-Q1-E1-H9
acgcgtcagcttaagcgtccgtagagcagcgagaggacaagagaagggcgaaatgaatatatgtacagaagaagaacaaaggcttcagcaagaattcagacacagtggagaagatcccaagctctttctgattacaaacagcataagaacgcaactgttacacttcagtgtctatggtgagcgaaagtggcaaggaaagagctcataaagcttcagatggctgcaagggaaactggggcacttatggaagcacacgacaacttggacaaacttgttgaggagcttacatggacaatagatatccagaacagatgaggacgga

SEQ ID NO: 18371 - DNA, 384 bp, Glycine max
  Clone ID: LIB3049-038-Q1-E1-A1
ggttttcattgggtgctgatcggaacaaacagggaatagaagagaggagaagatgggtttcataatggaatttgcggagaacttggtattaaagttgatggaagatccgaaggaaagggatcggaggttcagggagcacgtttatagagtgaaggacaggtgcgagaagacgaaggagatgtggagctaccctatgcgaccctatgggttttggacattcgaacgccacaattctcagcttgcttgggatgcacagattagccaagtggccgggaggagggacccttatgatgatctcctccaacatttctcttacccacctaagtgagtgttgctgaacttgccacaagcattatcggtgaaaaggatgaatttgtcgtaatt

SEQ ID NO: 18372 - DNA, 321 bp, Glycine max
  Clone ID: LIB3049-038-Q1-E1-A10
ggtcgtcgtggaggtttcagcaatggtgaaactggtgaaggtgaagacggacgacctcgaagagcatttgatcgtcgcagtgggactggacgaggaaatgaattcaaacgtgaaggttcaggacgaggtaactggggaacccaaactgatgaacttgctcaggtaactgatgaggttgtgaatgaaacggaatagaatttgggtgatgagaagcctgcagttgaagaagatgtagctgatggaaacaaggacagccctactaatgaaaccgacgaaaaagagcctgaagataaggaaatgactctggacgaatatgaaaaa

SEQ ID NO: 18373 - DNA, 341 bp, Glycine max
  Clone ID: LIB3049-038-Q1-E1-A11
gagcgaaacagagagtgatttcagtgagtgatcggtgttcacttgatctcatcataatcgtcagcgtcaattgaagaagatgccgatcagaaacatcgccgtcggaaggcctgaagaggcgactcaccccgacacgttgaaggcggctttggctgagttcatctcaaccttcatcttcgtgttcgccggctcatgctccggcatcgcctacaacaagctcatcgacaacggcgctgccacccctgccggcctcatctccgcctccatcgcccatgcattcgccctcttcgtcgccgtctgcgtcggcgccaacatctccggcggccacgtcaaccccgccg

SEQ ID NO: 18374 - DNA, 301 bp, Glycine max
  Clone ID: LIB3049-038-Q1-E1-A12
gatgatggtaatagcagcagcaacaacgaggatggggagttgacgggggctaagcctgctcgtccgtcttacaacgcttttgagataatctcgtccttgtcgcatgggttcgatctgaggaatttgtttgaggcgaggaagcggtcgccgtcaatgttcatttccaagttttcggcttcggcggtgatggcgaagctggagggggtggccaagaagctgaactttagggtgacggggaagaaggagttcatggtgaggatgcaaggggcgacggaagggacgaaggggaagctggccatga

SEQ ID NO: 18375 - DNA, 389 bp, Glycine max
  Clone ID: LIB3049-038-Q1-E1-A2
ggagagagaagtgttcacgtctttgagaaatgggtgcttcggcatcggtcacagaaaaatccatccatgaattcatggtcaaggatgctaagggcagagacgtgaacctcagcacctacaaagggaaggttcttcttgtagttaacgtcgcttcaaaatgtggatttacaaattccaattacacccagttaactgagctttacagcaaatataaagacagaggtcttgagatactggcatttccatgcaaccagtttctgaaacaagagcccgggagtagccaggaggcagaggaatttgcctgtacaaggtacaaggctgagtatcccatttttggaaaggtacgtgtcaatggacctgatacagcacctgtctacaaattccttaaa

SEQ ID NO: 18376 - DNA, 282 bp, Glycine max
  Clone ID: LIB3049-038-Q1-E1-A4
gatgaggaacatggacagttcacagctttctaggcacatgaacaaccatcacgtggaggagcatgcagagattcttagatcatggagctccaggcatgcacatatgactcatcacatatcgtagaaaggtgcttcgactgctactcgtcacctgcaagtgtgtgctgacagctgtgtgatgtgtcagtctcctcctcttcagctcctgagatgtacactcgtcatcatcaactggcatttatgcgttacccatttatgccatgtgcgccctatattatccag

SEQ ID NO: 18377 - DNA, 389 bp, Glycine max
  Clone ID: LIB3049-038-Q1-E1-A5
gctctctctgaattggaattcaactcttctctttctctttctcttctcttctgtcgaagaagaagaagcagaagtagttacagaaacatgctggagaatcttcaggctcctccgccaacggaatcggccccagtggtgaagcgctatgctcctcccaaccagaggaaccgttctgccaacaggcgcaaatcatctgatcggcttgatcggacaaacagtatcgggaatgacttagaaaagaatcaagttgcttattcaagaagtgttcacattccagatcacggagatgctggtagcagtaatcttcttaatgagaatcactattcaagattaatagctttagaacggtgtagttgtagtgcagctgcccagctgcttaatgatcgttg

SEQ ID NO: 18378 - DNA, 297 bp, Glycine max
  Clone ID: LIB3049-038-Q1-E1-A6
cacgggggaaagaagggaggagacgggtgtcaatggcagactctttgggtgtttcagtttcaactcttggttcattctctcttagtaggcccacactccatttatcgatctcccattaatatctctctctgtgcctctcaatctcatttccctgctgctgcatttggtcagctgacacgttccaatccacacctgtacgccgctgtctcctcagactccaaagccgctacttcgctatacctatttcaactcgatctctataataactgcagatgtgctaaatgaaactctcactgc

SEQ ID NO: 18379 - DNA, 387 bp, Glycine max
  Clone ID: LIB3049-038-Q1-E1-A8
ggtctcaaaagatatccctccctttgattgcatatatctgagaatcacccttttattgattcaaactttggaaatctcaatcttcacccttatgattgaaattaacatgaagcatcaaggcaagcttagagtgtttcttccaaatatgataatacttgtaaccatccttctccattcaacaacatggattagtgcacaggaagttgaggatgaaagtgagtttgattacataaaacggagtgagaagggtccctcacactggggggaactgaagaaggaatgggaaacatgtaagagtggcaaaatggcatctccaattgatttgtcaagccacagagtgagagtggtgccaaagttaggggagcttaagaagtactatacgcctca

SEQ ID NO: 18380 - DNA, 282 bp, Glycine max
  Clone ID: LIB3049-038-Q1-E1-A9
gacaagctaggcacaacaaaaccacaatctaagttagtgttgagagaagagtgcgtttgtttgtttgaaattaagtagtaaagatgtttggaatcatcggaggaaacaagggtcacaagataaaggggaacttggtgattatgcgaaagaatgtgttggatatcaacagcatcaccagtgttaagggtgtcattggaaccggcattaacatcattggaggtgtcgtcgacaccgttactgctttggcgtcccacatctccatccagctcatcagtgccacca

SEQ ID NO: 18381 - DNA, 391 bp, Glycine max
  unsure (1)..(391): unsure at all n locations
  Clone ID: LIB3049-038-Q1-E1-B1
ctcaaatcaaatgcttagcagctgtagaagaagagattgttacatctggatttgataataagataaggcgagtttctttacatagggatcagtgtggagatactgaagccattgatataggaagtcaaccaaaggacttgagtgttgcacttctttctcctgaacttgctctagtttcaattgattcaggagttgtcatgttgcgtggtaccaaaattgtgtcaaccataaatcttgggtttattgtgacagcatctgctgtctcacctgatggaagtgaagccattatcggtggacaggatggtaaattgcacatatattctgtttctggtgatactcttgtagaagaggtagtccttgagaaacatangggtgctattagtgtcatacg

SEQ ID NO: 18382 - DNA, 342 bp, Glycine max
  Clone ID: LIB3049-038-Q1-E1-B10
gctatcatcactgtcttgtccgttttctaaatctcattcttcacctgcaactatttggattgctgatttttgttaataccatatttactgatattggcgcatttctttgagaaagttactaattcctagatagaggcacaaatgttgggaattttcaaggagaagttggttaaagcacccaaagagctgaacagtccatcttcgttgaattcatgcactaagcctaagctaagtcacgaaatccttcaggatttcatgtcctgcaattcctccaatgctttctcaatgtgcattgggaatgaagctttgctagcctattccccttcaaacaagccctccaat

SEQ ID NO: 18383 - DNA, 359 bp, Glycine max
  unsure (1)..(359): unsure at all n locations
  Clone ID: LIB3049-038-Q1-E1-B11
ggtagttccaccgagtagcaacaatgtcgaagcgaggtcgcggaggatcggcgggaaacaagttccgcatgtcgctgggtctgccggtggcggcgacggtgaactgcgccgacaacaccggcgcgaagaacctctacatcatatcagtgaaggggatcaagggtangctgaaccggttgccgtcagcttgcgtcggagacatggttatggccaccgtcaagaacggaaagcccgatctccgtaagaaggtgctgcccgccgtcatcgtccgccagcgcaagccttggcgccgaaagggcagtgtttacatgtacttcgaagataatgctggtgttatcgtgaatcccaagggtgaaatg

SEQ ID NO: 18384 - DNA, 307 bp, Glycine max
  Clone ID: LIB3049-038-Q1-E1-B12
ggcactaccagtggataacaagaatatccagacgagattccagaagatcagtcgcatccctcatcggcatggaggaacactggcagcctcgacaggattactccctgcaatcaggttctgtcttctatcaatgcaccagatctcactactctgcatgattatgggagcagtggttgtcttggatcctttatgcaatccgccacataattgctactgcagatgttccgccaaaacgatttatgaatcaaagtgtggcagcagacaatcctatcacatcacacgatttctggatcaccagcacgcatga

SEQ ID NO: 18385 - DNA, 328 bp, Glycine max
  unsure (1)..(328): unsure at all n locations
  Clone ID: LIB3049-038-Q1-E1-B2
agagttggtggggtggtgaccaactgggccttggtttcattgaaccatgacactcaatcctgcatggaccccaatgtgatggacgctaatgtggtggtgagttcttgtggccatgatggaccctttggagccactggggtgaagaggctcaagagcattgggttaattgatagtgtgcctgcgatgaaggcacttgacatgaacaaggctgangatgccattgtgaggctcactanggaggttgtgcctggcatgattgttactgggatggaagttgctgagattgatggtgctccaaggatgggttcaacatttggagcaatgatga

SEQ ID NO: 18386 - DNA, 393 bp, Glycine max
  unsure (1)..(393): unsure at all n locations
  Clone ID: LIB3049-038-Q1-E1-B3
gatccacaacgatgagcgtaccgaaggcagtggcagcgacgatccggctcacggtgccggccggaggagctcggccggcgccaccggttggaccggcgctgggtcagtaccggctgaacctgatggcgttctgcaaggacttcaacgcccgcacccagaagtacaaggcggagacacccatggccgttacgataacggcgtacaaggacaacaccttcgagttcaccgttaagtcgccgccggtgtcgtggtacctgaagaaagccgccggcgtggaatccggtagcagccggcccggtcacgtgaccgcgtcctcgttgtccgtgcggcacgtgcacgagatcgcgaaggcganacagtccgattcgtacctccagaacatgcctctcgagt

SEQ ID NO: 18387 - DNA, 387 bp, Glycine max
  Clone ID: LIB3049-038-Q1-E1-B4
gacggcactcgttttcgttctcgttctggtttacagatctttgcgaacgacgtttacagcgctcaaccaaagatgcagaacgaggaaggacagatcactgagctttacattcctaggaagtgctccgccacaaacagattgattaccgctaagggccatgcttcggttcagatcaacattgggcatgtggatgagaatggcgtctacaatggccatttctccacttttgccctctgcggattcatccgtgctcagggtgatgctgacagtgctctagaccgcttgtggcagaagaagaaagttgaagttaagcaacagtacacacccatgatagtttgttacttcgttatgtattaatttctactcttgctagagatatttgagtac

SEQ ID NO: 18388 - DNA, 265 bp, Glycine max
  Clone ID: LIB3049-038-Q1-E1-B5
gagtcactgagggatccactcaagattgccacaagaaattcatccttacatatcccatcacagggtgccatattaagctggaatccaatgacgacctgaagcttcgagcagttcgggacaagaggttcccccacaaggttcctggtgatgctctgagtgaagagttgaacggagatgtgatctggatcacctctgggtgtgacagatacagattccctatgtcccaaggaatcctgatcactagtcgtttttgatcttagctcca

SEQ ID NO: 18389 - DNA, 343 bp, Glycine max
  Clone ID: LIB3049-038-Q1-E1-B6
gaggaagagaagagaggatagataggcctcagaagcagaacaacaatggccactgccactgtttcactttcaacactatgcgctaccttcggaacccattgcgccatttcccacgaccctaaacctcttttttctcaacctttcagtctcaatcgctttccttctacctcttacaagctcactttatcgcctcgctcacctatttcaacccttcctaaggtctctgaatccgcggttgccgaagccgaaaccggttcgtccgagcccgaaccggaccaacatgtcccggctcagccttcctcctgggaaaccggtctcttccctggtcgtatgactggtggac

SEQ ID NO: 18390 - DNA, 221 bp, Glycine max
  Clone ID: LIB3049-038-Q1-E1-B7
aagatacaggggtcactgacacagagagacactcgtcacagatcccatttcaatctcatgactatgcgcgaccttcgtgaacattcatatccgtcacgcagggatccacgtcggaaattcctgctgggaacactattgactgcatgccggcatccacctagaaggcatcattccctccgacgccaccttcggtgtagcccactacacgttcaaaatcttct

SEQ ID NO: 18391 - DNA, 384 bp, Glycine max
  Clone ID: LIB3049-038-Q1-E1-B8
ggaagtaagggatcgagcctcggaggagggaatcgcagcgaagtccactatgccgaagcaaattcacgagattaaggacttcctcctcgctgctaggaggaaggatgcacgctctgtgaaaatcaagcggagcaaggatgtggtgaagttcaaggtccgttgctccaagtacctttacaccctctgtgtgtttgattctgagaaggctgataagttgaagcaatcacttcctccaggtttaagcgtgcaggatgtgtgattcttactgctgtatgaagatcaggtttttctctggattttggggattcatagttagtaaaatggttcagagaattttcgtatttgttgttacattcgggatcatgttagtattttgtttaagac

SEQ ID NO: 18392 - DNA, 230 bp, Glycine max
  Clone ID: LIB3049-038-Q1-E1-B9
gatgaccatgaaattgcatccagatgtcccgtatgtcgtcaggagattcgagattcagtgcggacttattaagcttgtacagacacatagtgagttttctgttcactctgcagcaggaaacttttatgactgctactgtacacatcatttgttctttactagttctatgatatatggaatattcagttttacggacaacttgcttctgcgcttgttacctgtaaacttag

SEQ ID NO: 18393 - DNA, 391 bp, Glycine max
  Clone ID: LIB3049-038-Q1-E1-C1
ggagggagatgcagtagaatagtaatagtggtaacaaaaggcaacagagaacagaagagaaaggaaaagagagggtttggtgagttacccaagagaaaggatgaagagagagcgccagcagcttggttccaacgcaggaacctcaagctgcggttattcaagcggaaaatcgaatctttgggaggaagaaggaggcatggacgagcttcttgcagtggtgggttacaaggtgaggtcatcggacatggcggaagtggcgcagaagctggagcgtcttgaggaagccatgggaaatgtccaagatgacctcacggacctttcaaacgacgccgttcattacaacccttccgacatctccaactggctccaaaccatgctttccaattttgac

SEQ ID NO: 18394 - DNA, 346 bp, Glycine max
  unsure (1)..(346): unsure at all n locations
  Clone ID: LIB3049-038-Q1-E1-C10
ggcggcacaaagcattcactgtgtcggaaaaagaagaagagaaaaaagatgagcgacggaggaaaacgacaaggtggaagagcgttgccgccgccgccaagaggccctccgcctcctcccccctctcgccctcgcctcgaacccgtcgatcgcgaaaagacatgtccgttactgctgcgagtgttcactaagattgggagtcaccattccatggaagactttgccgtcagaggcaaagagcccaaagacgaggttcagatttacacctggaaggacgctactctccgagaactcaccgatcntgtcaaagaagttgctccggctgcaacgagaagaaacgccaaac

SEQ ID NO: 18395 - DNA, 348 bp, Glycine max
  unsure (1)..(348): unsure at all n locations
  Clone ID: LIB3049-038-Q1-E1-C11
gaaggaaagtgagtggaagccaggggcaatccgatagaaaagggttttatttccttttctcttcaattattttcttttcctgtctttgttgttcagttccgttgttgtgttgtgtgctgcaacacaatcggtggtctgagaaatcctgtttgtgttgggtttgttatggctcggagagcagaggaagagtacgattacctgttcaaggttgtactgatcggtgattccggtgttggaaaatccaatcttctgtcccgattcactcgcaacgagttntgcctcgaatncaagtccatcattgggagtcgaattcgccactcgcactcttcaggtggagggaagaaactg

SEQ ID NO: 18396 - DNA, 343 bp, Glycine max
  Clone ID: LIB3049-038-Q1-E1-C12
gaaaggcagaggagagagtaacgaaggttgcttctaactgttcagaatcatgtcttggtgcaccattgagtccgatcccggtgtgtttacagaacttattcagcaaatgcaagtgaaaggagtacaggttgaggaactttattcattggatcttgactctctcaacagccttaggcctgtttatgggttgatttttcttttcaaatggcgtccaggagaaaaggatgaccgagtggttatcaaagatcccaaccctaacttgttttttgctagtcaggtaattaataatgcttgtgcaacccaagcaatcttgtccattcttatgaattcaccagacattgac

SEQ ID NO: 18397 - DNA, 390 bp, Glycine max
  Clone ID: LIB3049-038-Q1-E1-C2
gagcgaaaaatggctgcaccaacaccgattcagaaaactgaagaggagtggaaggtcattctctcccccgagcagtttcggatccttcgccagaaaggaactgaattgaagggtacaggagaatataacaagttttatgaagaaggaatttacaactgtgctggctgtgggactcctctttacaagtcttcaaccaagtttgattctggttgtggttggcctgctttctttgagggttttcccggtgccatcgatcgatcccctgacccagatgggaggaggactgagataacttgtgcagcatgtggtgggcacttgggtcatgttttcaaaggagagggattcaagaccccaactgatgaacgccattgtgtcaatagtatttctgtc

SEQ ID NO: 18398 - DNA, 324 bp, Glycine max
  Clone ID: LIB3049-038-Q1-E1-C3
gaccgaatgcttgctgtgatcaacatgtaaatccagacgtttggatgagtgtaacgtcaatctctaccgctatcatttgcagatgcatcactagaacagaacgtatttcactggtatagtagaatatgtcaatttatcagatcaatgaaatgtcacatgagcaggatgatgagagccacgataaaaatcatcagccatctttgaatctggttgtggttgacctgcttacgttgagggttttcaacaggatatcgatcgattacctgacccagataggacgaagactgagaaaacttgtacatcatgtcatgtgcacatgagtca

SEQ ID NO: 18399 - DNA, 393 bp, Glycine max
  Clone ID: LIB3049-038-Q1-E1-C4
ggatcacaaatctttcgctaacactcattaattgcaagaatggcacttcgttgcttggtgatgtccctttctgttctcttcactcttggtcttgcgagagaaagccatgccagagacgaagatttttggcatgctgtttggccaaacactcccattccaagttcattgcgagatcttctaaagcctggccctgcaagtgttgaaatcgatgatcaccctatgcaaattgaagaaacacagtacccgaaaaccttcttctataaagaagaccttcatccaggcaaaacaatgaaagtacaattcagcaagcctccctttcaacaaccatggggtgttggtacatggttaaaggaaattaaagacactactaaagaacgatatagttttgaagag

SEQ ID NO: 18400 - DNA, 383 bp, Glycine max
  Clone ID: LIB3049-038-Q1-E1-C5
gaggcgcggcgggatcagcacaagattgcaaaatgaagttcaacattgcaaatcccaccactgggtgccagaagaagctggaaatcgatgacgacctgaagcttcgagcattttgggacaagaggatctcccaggaggttcttggtgatgctctgggtgaggagtttaaaggatatgttttcaaaatcaccggtgggtgtgacaaacaaggattccctatgaagcagggagtgctgacccctggtcgtgttcgacttttgctccatagaggaactccttgtttccgtggatatggaaggcgcaatggagagcgtagaacgaagtctgttcgtggttgcattgtcagtccagatctctctgttttgaacctggtaattgtgaag

SEQ ID NO: 18401 - DNA, 349 bp, Glycine max
  Clone ID: LIB3049-038-Q1-E1-C6
tgggaggcccagcgggatcagcacaggagtgcatgatgaagttcaacattgcaaatcccaccactgggtgccagaagaagctggaaatcgatgacgacctgaagcttcgagcagtttgggacaagatgatctcccacgaggttcatggtgatgcactgggtgaggagtttaaacgatatggtatcacactcaccggtgggtgtgacagacaaggactccctacgaaccacggagtgctgatccctgctcgtgttcgacttcagctccatagaggaatcccctgtttccgtggatatagatcgcgcaatggagagcgtacaacgaagtctgttcatggttgcattgtcag

SEQ ID NO: 18402 - DNA, 358 bp, Glycine max
  Clone ID: LIB3049-038-Q1-E1-C7
ggtgagtgagatagagagagacgcttcgcaaatctcaatcgaatctcagaaagatgagagaaatcatcagcattcacataggtcaggccgggatccaggtcggaaactcctgctgggaactctactgcctcgaagatggcatccagcccgacggcatgatgccttctgactccatcttcggtgtagcccacgacgccttcaacagcttcttcagcgaaaccggatctggcaagcacgtcccccgtgctgtcttcgtcgacctcgaacccaccgtcatcgacgaggtccgctgcagcacctaccgtcaactcttccaccccgaataactcatctccggtaatgaagacccgccaacaac

SEQ ID NO: 18403 - DNA, 385 bp, Glycine max
  Clone ID: LIB3049-038-Q1-E1-C8
gggtgtgtgagcgtcaacaatggcttcttcgtcttcagaatcggcggtgtcggagcgaagaggaataccaggggctcagttcgtagaggatgtccaaacttacctcactcaatcgggtctcgatgttggttcagccctggcttttctccaagagagacttcagcagtacaaggtagtagaaatgaagcttcttgctcagcaaagggatcttcaggcaaagataccagatattgaaaagtgcttagacgttgttgctacattgaaagctaagaagggtactggtgaggaacttattgctgattttgaggtatcagaaggcatctattcacgagcacgcatagaagaaaccaattccgtgtgtttatggctgggagctaatgttatg

SEQ ID NO: 18404 - DNA, 161 bp, Glycine max
  Clone ID: LIB3049-038-Q1-E1-C9
gatttttaaaacagtatgtatccatcatccagaaacatattcaacaacgcaactcattcaacgggcgacattggatgcattagctccatcgcatgttctcatccattgcgcgttcaagcaatcaactcaatccctagcctcattattcattaccactatca

SEQ ID NO: 18405 - DNA, 386 bp, Glycine max
  Clone ID: LIB3049-038-Q1-E1-D1
gatcatcatatcatgtcttatacaactgatgaagtgatcaacttgtaatgtaacacttttgagttgcattgttgcatcaccgcaagtccacaacatggctgccactgccgctgcaggcatagcttccttgttttcttcttctattaacagtgtcaaatgtcttcgttcctccaagaactgctccattatagacccccttataaccacagtgccctcaaaccgtggcatgtttgtgtcacacttggtggaacctttgtccattgggggtgccattaattcgcacaagttgtgggggcctagaatttctgctgctgttgcacaagaagaggctgttgttgtggctgatgatgaggtagatgatggtgctggtttagttgaagaagaga

SEQ ID NO: 18406 - DNA, 232 bp, Glycine max
  Clone ID: LIB3049-038-Q1-E1-D10
tgggatagcgaatacagtatgtctcggtcaccctgaatcatagatagaaactcaacacattcagcctagacattggagagcatcggcttaatgcaggttcataatcattgtgagatcaaggaatctttacaatcgattgtgtcatcagtcaagaactgagtcatggagtaaccctacaagtataagtccgatgttgtcatagatgcctcgggtcaacaggacaaagacattg

SEQ ID NO: 18407 - DNA, 290 bp, Glycine max
  Clone ID: LIB3049-038-Q1-E1-D11
gacagactcaggaatcaatagacaaatatctattaacaagacaacgcaacgcttctctttctttctttctatccctacttcgcctctgtttcatttggcccattgtttctcataagccacactctttgtttgaagcttaaactcgctctaagccccatccttaatttactcaatctcatcaatgtttcatcatctggattccattccttgagtctcatgctggatatgccaatcctttcatcctcatttctgatatccttgtgtgcatgatcacatcttttccaaggatt

SEQ ID NO: 18408 - DNA, 325 bp, Glycine max
  Clone ID: LIB3049-038-Q1-E1-D12
gactgcaacatgctttctcatactagcacctctggttgtgctatggtgttggaagctacaagtgtgggtgtggctgaagccaacgagattggagagagcattataggcacaaggccctcaggggaatccctacagcctcttgattggggatactatcgacatgtacacagtgctcatgcaagctgccagatctcagcaatctacaatttctcttctcactaaggataatgatgcagcacgacatatcacaacctttaaccatcaaattgtcaacaaattcagcaagaattcatttttttgggaatgtagcaaaccacaagtggta

SEQ ID NO: 18409 - DNA, 214 bp, Glycine max
  Clone ID: LIB3049-038-Q1-E1-D2
gatgagatgttgatcaatggagcgtgttgtccactgggcaattttttcagaacctttttcgctctcgcaagctcacctcttcctcgttcactgtctgtcggacattcgcaagatccgcactgagaggacgacatggttctgacgcagaagtttcatgagcaccatcaactgcatcgtctagaggattacaggaccacgaaccgtttccgtgttt

SEQ ID NO: 18410 - DNA, 375 bp, Glycine max
  Clone ID: LIB3049-038-Q1-E1-D3
gatacatgatcagaggaagaaacgttcttttaatagggcaaacttagaatcgacacgaacaatcgccatgaatcacaacatcctcttcgtgtctgctctgcttctgaatctcgtatccaattcgttccaaaaccctaaccctaaaacccccaaatcaacgtcatcgcaggctcacgtggagctcatcaagcacggcttacccgtcggtcttctccccgccaccagcgtcttgggctacgccgtgaaccgtacctccggtgactttaccgtcaagctcggcggagcgtgcaagatcacgctcccgcctgaaaactacgtcgccacctattccgacaccatcacacggaacatcgtgaacgggaaaatcgctgaact

SEQ ID NO: 18411 - DNA, 384 bp, Glycine max
  Clone ID: LIB3049-038-Q1-E1-D4
gcttgaaggatgcttcttcaattccctttccttctttcttagctttgaagaccaactcatttcaacttaacccatcaaaaccatcgctctctattttcgtcctttctacctttctccgatcccaatccctaatctttctctcttcaaactctaattttttcatctggggagatcggctgacgaatcgagaggatctcatcgctcgcaagggattagggtttcaatcgatcgcatcacatatcacaatcatgtttagccggatgttcggtaaacctaaacaggaaaccaatgctgttgccactttggacaagctaaacgagacacttgaaatgctggagaaaaaggagaaagtgctccttaaaaacgtggcagcagaagttgaaa

SEQ ID NO: 18412 - DNA, 358 bp, Glycine max
  Clone ID: LIB3049-038-Q1-E1-D5
gatacagggtggtctgcagtattgacagagtctacagtacattgttagctttaatgatgagaacgttgcggctgggaatggactgtgacggcgaggagttgacggcgcatgagaccgcgttgtatgaccgtcaaattagggtttggggagctgatgctcaaagaagattaagcatatctcatgtcttagtctatggactgaaaggaactgtagctgagttttgcaagaatattgttctggctggagtaggtactctgacttgagtagatgaccgggctggcacggaggaaatgctttcctccaactttctcatcactcgcgatgacaatgtgtatactggaaagacccttgcagaact

SEQ ID NO: 18413 - DNA, 262 bp, Glycine max
  Clone ID: LIB3049-038-Q1-E1-D6
gatacagggtggggtacagtactgacagaatcaacattagattgacaccattatcaaatacaatgtcgcggctgtgaatggactgtgacggagtagagttgtcgatacacgatagcacaatgtgatgagttcatagtccggtttggagatctgatgctaagagaataatatacaaatcgtcaactcttagtctatggtcttacacgttcagtagatgagtttggcaagaattatattctgagcaggagtatgtagtctgaat

SEQ ID NO: 18414 - DNA, 251 bp, Glycine max
  Clone ID: LIB3049-038-Q1-E1-D7
gaagcccaagcgcaaacccactcaggtccaccgtcgccgttccaagcctgttccaacaccgttctcccgccaatgtccaccccaatttccccaaaacaaggtccgaattccttttcagccccaattggcttaaaacccaccaggattaaagccaaaattgttccctcaccccatgaaaatggccatcattgagaacccaaaaaaccttgcaaccttaatgaaccccttaaaccttccttcaagcccaaaaa

SEQ ID NO: 18415 - DNA, 315 bp, Glycine max
  Clone ID: LIB3049-038-Q1-E1-D8
ggaagtccaagggagaaaacgcaacacattagacgagtacatttctagaattcagaagacgtaatgccctttcgacgtcgtcgagagccaccttaacattttccattcaatgactaaattatcatcactactataataaactttacctataaacgcatccatgccttccccttcagttcgcagactcacaatggccgcaatatccgactccttatcactgaagcacagtttctctctgaatcgagctcctccgtcgtcctcttccagcaaattcaaattcaggagatgttatgccgtgttcgccaatgagaatcg

SEQ ID NO: 18416 - DNA, 382 bp, Glycine max
  unsure (1)..(382): unsure at all n locations
  Clone ID: LIB3049-038-Q1-E1-E1
ggcattagaatgagtctttattcatattctactactttcactttagaaaccatatcttgagcctccaaggaatccaaaggaagagggttatctatataaagaagccatgattcagtagtattcataatcatatatactaaagccaagccaaatatttgtacccaaaaacaaaccatatacatgtcgagtttgagtttcctaaagttcaattatagcttctcatggaagccctccgcttcacgcaaaaatgtagtcaagaagaacagcttcatatcaagacagacatcgaatgaaggacaaagtttccttccaaaagaagaggaaatgaaatgggtgttccagaaatttgacaccaacanagatggcaaggtttctcttgaag

SEQ ID NO: 18417 - DNA, 325 bp, Glycine max
  Clone ID: LIB3049-038-Q1-E1-E10
ggggatacaagagccatccctttccactgttgatttgctccgtcttcacccagtgttcgaagagaagtctgtgacgcagctagcgtcccatttgctctgtcgtacgtgtttggtggccatcgtcatcactgagctctgtcgaaggtgtgtgtcgctatctccattcgtctactcaggccctgttcaaggtgtgtcgcgccgctgtcgtgtcgtacgaactgcttggttgcggcttcagtatcggcttagcagacccttactcatctgggatttaaagaatcatggccaaagctgaaggtggcaaggaaccagtacatgaacaagc

SEQ ID NO: 18418 - DNA, 257 bp, Glycine max
  Clone ID: LIB3049-038-Q1-E1-E11
ggtggtagtttggcagcgacacgtatcttcatcaataatcgcagaagcagtttccggtgcatctcatcgtcttccaaaatgaacgacgcagatgtctcgaagcaaatccagcagatggtgcgtttcatccgccaggaagctgaggagaaagccaacgagatctctgtatctgccgaagaggaattcaatatcgagaagctgcagttggttgaagccgaaaagaagaagatcaggcaagaatacgaacgcaaagagcg

SEQ ID NO: 18419 - DNA, 323 bp, Glycine max
  Clone ID: LIB3049-038-Q1-E1-E12
gctctttttgctgtgggaagaggaaccctagctacggtttggaagaagctgatccgagaagatggtgcagcgtctcacccagcgcatacgccacagctatgctaccaaatccaaccagcacagagtcgtcaagactcccggtggcaagcttgtttatcagaccacgaataagatggccagcggacccaagtgccctgtcactggaaagaggattcaagggattccatatttaatgccagcagagtataatagatcaaggttacacagacatcgaaggactgtgatacgtgcatatggtggtgtgttgtcaggcactgctgtta

SEQ ID NO: 18420 - DNA, 363 bp, Glycine max
  Clone ID: LIB3049-038-Q1-E1-E3
gaaggaggaagtggaacacaaaactgtaaacctataaccccacaagaaaaagaagaagaaagaaagttgaagtggtttgagttagctgagaagagggtgctccattaagggccactctcatcaaacactttgatcatcaaatccatttaagtgaattggttgaatctgccaaaacgggtctccctctgtggatgcttggtttgggtgcggacctcttgtgggccgacatgaaccgtctcctcgcctttctcttccaccagggagtgttggatgagcaattcttgcagcttcagcagctgcaggatgagacctccccaaacttcgtctccgaggttgtcaacatttatttccacgaatccgaaa

SEQ ID NO: 18421 - DNA, 366 bp, Glycine max
  Clone ID: LIB3049-038-Q1-E1-E4
gggggcaattagagattcttcttcgggtggttttgacagataggtcattttgtgccgtgcatggtgatggtcttctctgattgaaattccacacactgcctcctctctccaatttggtacaccggttagatggtatgcagcagttgtgtaaggtctttggttgttcaagctggaaccttcgtcaacagagtgagaatcaacgaatttgggaggagtttgctggcggttcagagtttttctcattggccgattcgtgaatacaagacaatcacagggatgatggttgatacgggttctatgtcaagtgctggaccccttgttgatatgatgccagggaaagatgatgatggtcgatttgctagtgga

SEQ ID NO: 18422 - DNA, 372 bp, Glycine max
  unsure (1)..(372): unsure at all n locations
  Clone ID: LIB3049-038-Q1-E1-E5
gagagagaggggtttgggattggagggattgacgctgcgtctcttcctcttctctttcgatccatccctcattcctaatcctccaatccaaccacctcagcctcacactcacatatacacatatctgaacgcgtatcgtccctcctatggcttcaaagcgcatcctcaaggagctcaaggacttgcagaaagacccaccaacttcttgcagcgctggtccagtagctgatgacatgttccattggcaagcaacaataatgggtcctgctgatagtccttatgctggaggtgtactcctaattacaattcacttccctccggattatcccttcaagcctcctaaggttgcctttangactaaggtgtttcacc

SEQ ID NO: 18423 - DNA, 384 bp, Glycine max
  Clone ID: LIB3049-038-Q1-E1-E6
ggcagctcagggagaatgtcgagggatgtgagccagcagaggaaggactacgtacaccctccgccagcccccctcatcgacttggccgagattaagctctggtccttctagagagccctcatcgccgagtttatcgccacactcctcatcctctacgtcaccgtcgccatcgtcattggccacgaacaacagaccggaccatgtgacggcgttggccttctcggcatcgcatgggccttcggtggcatgatctttgtcctcgtctactgcaacgccggcatttctggtggacagacttacgctgcggtgacttttggcctgttcctgtcccgcattgtgtctcgcatttgtgccctgttctacatagtagcgcagtgtttgggt

SEQ ID NO: 18424 - DNA, 271 bp, Glycine max
  Clone ID: LIB3049-038-Q1-E1-E7
gcgatcaaggggtctgagagtgagtggtgtcaagtctgatctcatcccatacttctctcattcattgttgcgactttggagtcgtgttgcgatgtctagctcgctgaatctgatctatccctcgcgacacgagtatggacaaggggaacgcgtcaatccgagacgtctaagaacaaagtgaccagtagttgcatggatgatgttctcggggagcgggtatataaggaactacgatctctcagttgtgatttggccgtgaaaactcgcagtt

SEQ ID NO: 18425 - DNA, 383 bp, Glycine max
  Clone ID: LIB3049-038-Q1-E1-E8
gaggcaaggaagaaggtaaaagtagatggcgttgaatttgactgggtacatggtactgcaagtgtctctattatggctatggcagtgacagtgacaccctaccctttcttttggtttggctcaaaaggaaaaatccaacactctcctaggcacaacaccattgactacactgcaaccctctttcacacttgtgcgttgaccactttaaacttggacgtttcgcgtcacgtgccataccaatgctatgaaatgaacccattacccatccttgccgctgccatatatatacgtgcgtttcctagctaccgacctaccatgaatctgtggatctcttttctttggattttatcattattgtcattattactgatatacgatcacat

SEQ ID NO: 18426 - DNA, 253 bp, Glycine max
  unsure (1)..(253): unsure at all n locations
  Clone ID: LIB3049-038-Q1-E1-E9
agccgtcagtacaggaccgaaagggatcacgaaggcggtgtgtgtccttcatcctggattatgagccacagacataacacattccgctttgactttggacgctaagggcctaatgcaggttcccaatcactgtgatatcatggaatctgcacaatccgttgtgtcaccattcaggagctctgtcatgggtgaatctgagaagtatangtctgatgttttcacacattgctcgggtcctttgttcaaggacatt

SEQ ID NO: 18427 - DNA, 319 bp, Glycine max
  Clone ID: LIB3049-038-Q1-E1-F1
ggttctagtgtgtgattgtttgttgttgtaactcgttcttcttcttttgttgttctgtgtttgtgtttgttttttctctcacttgaaaatgtcttgctgcggttgtaactgtggttgcggaagctcctgcaagtgcggcaacggctgcggaggctgcaagatgtacccagacttgagctacactgagtcaaccaccaccgagaccttggtcatgggagtggcacctgttaaggctcaatttgagggtgctgaaatgggtgtgcccgctgagaacgatggctgcaaatgtggaccaaactgctcctgcaacccctgcact

SEQ ID NO: 18428 - DNA, 373 bp, Glycine max
  Clone ID: LIB3049-038-Q1-E1-F10
gacggacgagggtttcgtttcgggtttgacgttgttcacaatcactttctgcgcttcactcactcccttcgtgcggttttctttctttgtcgaactcgtgcgaaaatgcgtgagattcttcacatacagggagggcaatgcggaaaccagatcggagcgaagttctgggaggtggtgtgcgcggagcacgggatcgattccacggggaggtgccagggggacaacgagttgcaactcgagcgagtcaacgtctattacaatgaagcgagttgcggaaggttcgtgccgagggcggtgctcatggatctagagccagggaccatggacagcgtcagatctggtccctacggtcagattttccgacctgaaaact

SEQ ID NO: 18429 - DNA, 274 bp, Glycine max
  Clone ID: LIB3049-038-Q1-E1-F11
gtactggaaccagtgtgggccgggtttcggattttaacaagagtagcggtgtggtgagtgtgagtactgatagcgaagagcttactagtagctacacagagagtgataagttgatgtctgggactgttttcactgagattgtggatccaaatccacgttgagagaatcaaagtgatctcaagaatgaagacctaatactactagggctagcttgaggctcacaagttatgtgtttagtttcagaatatagacttgtaatattacaatgtctgtg

SEQ ID NO: 18430 - DNA, 333 bp, Glycine max
  Clone ID: LIB3049-038-Q1-E1-F12
ggagcgaagaagatattagggtttttgagtgcggtgcggcgatcctagcactctcttctgcagctttcgccgacagcttcattcaccatggctgagcaaaccgagaaggcttttttgaaacaaccaaaagtgtttctcagctcgaagaaaactgggaagggaaagagacccggaaagggtgggaaccgcttttggaaatccattgggcttggatttaagactcccagggaagccatcgaaggaacctacattgacaagaagtgccccttcactggcaatgtttccatccgtggccgtatcctggctggaacatgtcacagtgctaagatgaac

SEQ ID NO: 18431 - DNA, 391 bp, Glycine max
  Clone ID: LIB3049-038-Q1-E1-F2
gagtgagtgagtagtgagaatggagtttcaagggttaccggaaggttgcattgctagtatactctctcgcactacgccagcggacgtgtgtaggttttccgtcgtatcaaagattttccgttcggccgctgaatcggacgctgtgtggaaacgttttctcccttccgattaccattccatcatttcccagtctccttcgcctctcaactatccttccaagaaggagctctatctcgctctctcggatcgccctatcatcatcgatcagggtaaaaagagctttcaattggagaaaaagagtgggaagaagtgttacatgcttgctgctagagctctcagcattatttggggtgacactgagcaatactggaactggacaaccgataccaat

SEQ ID NO: 18432 - DNA, 388 bp, Glycine max
  unsure (1)..(388): unsure at all n locations
  Clone ID: LIB3049-038-Q1-E1-F3
ggtaaactcatagtggattgcacaggtgaaggtgccttgtttgtggaggctgaggcaaactgttccatggaagagattggtgacatcacaaagcctgaccctgggactcttggtatgcttgtttatgacattcctgaagcaaaacacattcttcagatgcctcctttggttgctcaggtgaccaagttcaaatgtggaggctttgcgcttgggctgtgcatgaaccactgcatgtttgatggaattggtgcaatggaatttgtgaactcttggggagaagcagccagggacttgccactctcaatccctccagtgctagacagaagcatgctcaaggcaagannacctccanagatagagcaccctgcacaagaatttgctgacattg

SEQ ID NO: 18433 - DNA, 391 bp, Glycine max
  Clone ID: LIB3049-038-Q1-E1-F4
gacaccatccagtactcttcttttcagcacaacctcttcatctctcccaggctttcttttctttgcaacaacactaccaaaaatgtcaccagatttcacacttttgttctccccggaactcatgcagtcccctatcatcactttccaagccactttctgtgtccttctcttcaccctcatgttcacgccgttcttcactcctggtgggcttccttgggcctgggcccggcccagaaccatcatccctggcccagtaactgccctgctcggggtcttcacgggttccacacctcacagcgctttatccaaactggcccgcacttatcacgcggaaaagctcatggctttctccatcggtttaacccggttcgttatctccagcgaaccggaa

SEQ ID NO: 18434 - DNA, 380 bp, Glycine max
  unsure (1)..(380): unsure at all n locations
  Clone ID: LIB3049-038-Q1-E1-F5
gaaattgtgttggagcaaaataccatcatgaagctaagaagcattctccttattgtgtgggctttgtttgctctcttgagccacgcttatggggaaatccgtttttgccaaaaagaaatgacgttggatgggtcatgtccacttgggacttcaggggaaagctgctttctggaattcctgaatagattgggagcaagtgccatgcctatgaattgctcttgcaaagatgatccttcccataataaacgccaatgcacttgtaatgttgtgtgtaacacatgagacaattttgcctctagagtgcacttcagtccanattattcataaaatacaaaaacgtgtactgatcntgtaatttctctacatatgttgagaatttt

SEQ ID NO: 18435 - DNA, 364 bp, Glycine max
  Clone ID: LIB3049-038-Q1-E1-F6
ggcagttcaattccaatatattccattctctctgtgtaattccctacctctcccgtcaagatgcagatcgtcgtcaagaccctcaccggcaagaacatcagccttgacgtggaaagctctgacaccatcgacaacgtcaaagccaagatccacgacaaagaacgaatccccccggatcagcaacgtctcattttcgcctgaaagcaacttgaggacggccgtacccttgcaggctacaacattcagaaggagagtactcttcacctcgtcctccgtcaccgtggtagcatgcagattctcgattagacactcatcgggaagacccataacctagaaggtgaaagctccgacaccatcgataacg

SEQ ID NO: 18436 - DNA, 317 bp, Glycine max
  Clone ID: LIB3049-038-Q1-E1-F7
gggtgtcggtggcattgttgttggagtgagcgaagaacatgtattctagagattcatggggtggaccgttggagataaacgcgacggactcggcgactgaggaccagcggagccggaacctgcatgacgttgacagggcagcgctgtcgcatcccttggatgagacgcagcatagctggctccttggccccggcgatcagaagaggaagaagtacgtcgatctcggctgcatcatcgtcagccgcaagatcttcaagtggaccctcggcacaatcatcttcgccgccttcctcgccggcctcatcgccatcatcgtc

SEQ ID NO: 18437 - DNA, 342 bp, Glycine max
  Clone ID: LIB3049-038-Q1-E1-F8
gggtgtcggtggcattgttgttggagtgagcgaagaagatgtattctagagattcatggggtggaccgttggagatacacgcgacggactcggcgacggaagacgagcggagccggaacctgcatgacgttgacacggcagcgctgtcgcatcacttggatgagacgcagcatagctggctccttggccccggcgagcagaagatgacgaagtacgtcgatctcggctgcatcatcgtcagccgcaagatcttcagctggacgctcggcacaatcctcttcgccgccttcctcacgggactcatcggcctcatcgtcaacaccgtacctcgccaccgccaca

SEQ ID NO: 18438 - DNA, 267 bp, Glycine max
  Clone ID: LIB3049-038-Q1-E1-F9
gacaacaaaatttgccaattgccatttcaatcctcagtttctttcttcaacgtttccatcatacacagatcccaatcctctctcaagccctaatttcccctcatttccatggccacagaagagcccactgtcgcggtggaacccgctcccgaacctgcctccgccgatcctcccccggaggagaaggaggagaccaaacctgaagccaaggctaagaaaaccaaggagcccaaacctaaaaaggtttccagacctcgcaaccctccc

SEQ ID NO: 18439 - DNA, 395 bp, Glycine max
  unsure (1)..(395): unsure at all n locations
  Clone ID: LIB3049-038-Q1-E1-G1
ggtcagcgtcaaaaccctgtctaagctccccaaaacgcaaaacccgcggcaccatctcattttcatttcccgcccaacatggcagacaacaaaaagcgccggcgaaaggaccccgccggcgacgagctccccttcaaaaacaagctgaaaccggactccgcaatcatggaaaccctaaagcagttctccgcctcatcctcctcctcctccgcctccgtctcacaaaccctaaccctccaggacctctccctccccttccgctgccgcgaggtggcggacctctccctctcctccgtgcagtccaacatcgagtccctcattctccggatcgcccactccatcctctctggccacggcttctccttcgacgtcccctcncgctccgccgccaacca

SEQ ID NO: 18440 - DNA, 344 bp, Glycine max
  unsure (1)..(344): unsure at all n locations
  Clone ID: LIB3049-038-Q1-E1-G10
gactagcaagaacataaagctagagcgatacaacagctacatcaggagactcaacagcaccaaactcctcaacgcctcctccaatatccctcttccgtgccactatcttagtcgcactcatcctcgtcttcctcttcatcttcaactaccctcccctcgccccagacttcacctcccatcgtcaccttgactcccactcccacttcctctcctcctcatcctccttcgcctcctgagagaagcagatccgccactcctccaaccctcgccgccccaacggccacaccgtcctcgtcaccggcgccgctggcttcgtcngcagccactgctctcttgccctcaaa

SEQ ID NO: 18441 - DNA, 235 bp, Glycine max
  Clone ID: LIB3049-038-Q1-E1-G11
gactaacagggatataaagctgcagcgattcaccatctctatcaggatactcaatagcacctaattcctcacagcctcctcggttccatcttccgtggcactttctgagtctcattcatcctcgtcttcctcttcatgttcatatacttctaccctcactctaaatttcaactcggatggtcaccttgattcgcaatccaatttccgctacgcttcatcctccttcgcttcctga

SEQ ID NO: 18442 - DNA, 320 bp, Glycine max
  unsure (1)..(320): unsure at all n locations
  Clone ID: LIB3049-038-Q1-E1-G12
ggagtgtttgggttgcacgtagaccacctggttatgcttttattgactttgatgaccgcagagacgcacaggatgctatccgtgaattggatggcaagaatggttggagggttgagctttctcacaactctagaggtggaggtggtggtcgtggtggtcgctctggtggttctgatttgaaatgttacgagtgtggtgaacctggtcattttgctcgtgaatgccgcatgcgtggtggttcaggaagacgccgtagccgtagtccgcccagattccgtangagcccaagttatgggcgaagtcctcgtgggcggtcccct

SEQ ID NO: 18443 - DNA, 380 bp, Glycine max
  Clone ID: LIB3049-038-Q1-E1-G2
ggaggagaagaaaatgaagcagggaaaaatatttgactttgatgatggcagctcgcagtctttgcaggctactctctcgctctctctcttcttccagttcttctggagctgcttctctgcttcactcactaggaagaaaccctggagggtggagaaacattaacagatttagcacggctgcagcagttgaggaactaatcactccacaagtttcaatacgttacacacagaacctgataaatgggcaatttgtggatgctgcatcatggaaaacatttccaacatatgatccgcgctcaggagaagtgattgctaatgttgctgaacgggatgttgaagatatcaaccgtgcagtatcagcagctcgcaaggcctttgat

SEQ ID NO: 18444 - DNA, 394 bp, Glycine max
  Clone ID: LIB3049-038-Q1-E1-G3
ggaacgaagacagcgaaggagctacgctgcgagatttagaaattgaatccctaatttcgaggttccgactcctgtggagtgatcatatagcgaattttgtgttagcgaatcaatttgcagagtaaggaataaggatgggaaaaaaccaagcctacaaagctatgcagagagccaggctcggcggcgcctccgccggccccgacgaggttgaagacggcatgaatggcatgcagctcgtttggctagccttaacacctctcacaccattacctgggaggagtacaaaatgaagcaaaaggaagaagaattgagaaaaggggaattggaagcagatgcagataggatgatgagagagtacagagctcaactagatgctgaaagggctcgtaagctt

SEQ ID NO: 18445 - DNA, 392 bp, Glycine max
  unsure (1)..(392): unsure at all n locations
  Clone ID: LIB3049-038-Q1-E1-G4
ggtaactctttcttttgagttaattttatcaaaatatacttaatttgctttcaatcaaaatcacccactccactcttagcttatcatcatttactgagattttaaacgatcgtctcttattatacattgaaaggtaaattattaaaaagtttaatgtaaatttaattagagacgatttttataacatataagaaagatgttacatgttttgatagatgattcgtgtaattaacattttgaaacatcatattattaatattttatacataaaaatttatgtatatataatttttgtatgattttttgtttacatagtcggcccccgacgaattgaatgttgggttagtccctgcaaataataatgattttctgnacattcaaacagtagctct

SEQ ID NO: 18446 - DNA, 386 bp, Glycine max
  Clone ID: LIB3049-038-Q1-E1-G5
catgaagctcttagaagagtacgaaagtggcggggttgtgagtgaagcttgccaatgcatccgtgatctgggaatgcctttctttaaccatggggtagtgaagaaagctttgattatggcgatggagaaaaagaatgatcatatgctagatctactgcaggagtgcttcagtgagggcctgatcaccattaatcagatgacaaaaggtttcacccgaataaaggatggtcttgatgatctggctctggacattccaaacgccaaggagaaatttggcttctatgtggagcatgctcagtcgaagggctggcttctacccttatttgattcgcctgccacagatgcctaattaccgccggcggcagctttttgaggacgtttgtgtc

SEQ ID NO: 18447 - DNA, 383 bp, Glycine max
  Clone ID: LIB3049-038-Q1-E1-G6
cgggatctggcagcagaaaaacaagtagttgagaactaagaagaaggaaatggcttcctcaatgatctcctccccagctgttaccaccgtcaaccgtgccggtgccggcatggatgctccattcaccggcctcaaatccatggctggcttccccacgaggaagaccaggactgatattacctccattgctagcaacggtggaagagtacaatgcatgcaggtgtggccatcaattggcaagaagaagttcgagactcgttcctacttgccagacctcgatgatgcccaattggcaaaggaagtcgaataccttcaaatgaaacgatggattccttgcttggaattcgacttggagcacggtttcgtgtaccgtgagcacaaca

SEQ ID NO: 18448 - DNA, 328 bp, Glycine max
  unsure (1)..(328): unsure at all n locations
  Clone ID: LIB3049-038-Q1-E1-G7
ggtcacgagcgagataggaaggaagagaagagagatagggagagcgagcgtgagaggaagatcttcgatttagggttttcaatttcgtattcagcaaggcggcgagtgtgagatttttagagagagagaggtgagaacgctgagtgctctgctgagagattccattgccccaagagaaggaagatgaggagaatgtggatatatatatatatatttttctttctgtttagttatcctcagagtggtggatanggatttttcactctgcagcgttccgttcctttccactgtgatttgttgacgtttctgatggagcagcgaaagcttg

SEQ ID NO: 18449 - DNA, 369 bp, Glycine max
  Clone ID: LIB3049-038-Q1-E1-G8
gatcacaagaagcacaatttctctctttctttttgtgtccaaaatggctcctagttctactcacaatactgggttctatgtgcttatgctagttgggatagtgattagcactatggttgctacctgtgctggtagcttctaccaagactttgatcgaacatggggtggtgaccgtgctaagatattcaatggtggccagcttctatctctttcccttgacaaagtctctggctctggcttcaaatcaaagaaagaatacctatttgggaggattgatatgcagctcaagctcgttgctggcaactctgctggcactgtcactgcgtactacttgtcatcccaagggccaacacatgatgagattgattt

SEQ ID NO: 18450 - DNA, 282 bp, Glycine max
  Clone ID: LIB3049-038-Q1-E1-G9
ggagcaagagtgaagagcgaagagaatggctcccaagggtttaatctttttggctgtgttatgcttctcagcactgtcactgagtcgttgtcttgcggaggataatggacttgttatgaacttctacaaggaatcatgccctcaggctgaagacatcatcaaagaacaagtcaagcttctctacaagcgccacaagaacactgctttctcctggctcagaaacatcttccatgactgtgctgttcagagttgtgatgcttcactgttgctggactccacaag

SEQ ID NO: 18451 - DNA, 365 bp, Glycine max
  Clone ID: LIB3049-038-Q1-E1-H1
gcttttaagtttgaaaatgccccatctctttgggtattaatgtgttggcacgatctctgatttgttttgttgtttttgtttttgcaggaaagaagcagagtgtttcttttgaaatcagctagaaaagatgtcagggtatgccatttccccccactaggagaagttcctttttttctcttaaattttgaaattaatatttagtagaacgaccttttcaaaatcatgttactgttgcctgagaatggttccttcagtacgaaaattttggtagcgaggacacatttactaattacaatgtctgtttgtgggtatgcgctgccttgaggttagattttggtgggttcaagtttcgtttttttaacata

SEQ ID NO: 18452 - DNA, 332 bp, Glycine max
  Clone ID: LIB3049-038-Q1-E1-H10
ggggtcggcccgatatggcttactttttcttcacaaaggatatattgaaagggaagcagatatctgttttcgagggtcccaatggacgatcagttgcgagggactttacttacattgatgatattgtgaagggatgtttgggggcgttggatactgccaacaggagcactgggagtgggccggcccagttgcggctctacaatctgggcaacacttctcccgtggcggtgagtaagctggtgaggatattggagaagttgctcaaggttaacgccaacaagaaactcttgccaatgccgcccaatggggatgtttttttcacccatgctgat

SEQ ID NO: 18453 - DNA, 227 bp, Glycine max
  Clone ID: LIB3049-038-Q1-E1-H11
gaaagagtgaaattggaaattgcatttgaataatgatgtccatattccggcaatacaccttggacgactcattctcgcaagtgttggtgtccccgaaattcctgaaggagtaccaaatagccctgaccttcgcaagcgactacgacgacgacggcgtccccaccaacggggttttccggccaacctgggacctaaccaaagtgaccccggaatcaatcacgcgattc

SEQ ID NO: 18454 - DNA, 298 bp, Glycine max
  Clone ID: LIB3049-038-Q1-E1-H12
ggagcagtgtttaagttgtgtttggcagcgcggaggggcaagctagggagtaagagatggatttggaccaatggatctccaaggtgaaggatggccagcaccttctcgaagaggagcttcaacttctttgcgaatatgttaaagagatccttagtgaggagtcaaatgtgcagcctgtcaacagtccagtgacggtttgtggtgatattcatggtcagtttcatgatctaatgaaacttttccagactgggggtcatgtgccggagacaaattacatttttatgggagactttgttga

SEQ ID NO: 18455 - DNA, 372 bp, Glycine max
  Clone ID: LIB3049-038-Q1-E1-H2
gggggaaacatatacaaaacatttcgtccgaaactaatataacgtgttcctccttggaagaagccatagccataacatagccaccagaagacaaaacccaccttagttattagaagaaaagaaaactacataaaattaagctttgttcggtggtgaccatggggagcaccgactcatcaagcggttcacaacaaccgaacctgccacctgggtttcggttccaccccaccgatgaagagcttgtggttcactacctcaagaaaaaaacagcttctgctcctcttccggtagccataatcgccgaggttgatctctacaagttcgatccatgggagctacccgctaaggccgcgtttggggagcaggagtggt

SEQ ID NO: 18456 - DNA, 366 bp, Glycine max
  Clone ID: LIB3049-038-Q1-E1-H3
ggggcatggagttggttcatcacagaacataatggaataccaacaacagaaacaacaatggaagaggtcacaaaggacaaaaccctcttcttcttcttcttctcacatcaacaatctcgatgatggttgtcttatgcacattttcaacttccttcctcctattccagatcgctttaataccgccctcgtttgccacagatggaattacttggcatgtcatcctcgcttgtggcttcgggttgatcgatcagttaaagagttatctgaacccggtgttttcccaaacattgaaaccgctgtatctgcttcaaagacaggtgataccattttaatagcagctggtggaactcatcatgttgcaaacat

SEQ ID NO: 18457 - DNA, 418 bp, Glycine max
  Clone ID: LIB3049-038-Q1-E1-H4
cgacccacacgtcagccgacacgtcgatactgaagggggggcatggagttggttcatcagagaagataatggaataccaacaacagaaacaacaatggaagaggtcacaaaggataaaaccctcttcttcttcttcttctcacatcaacaatctcgatgatggttgtcttatgcacattttcaacttccttcctcctattccagatcgctttaataccgccctcgtttgccacagatggaattacttggcatgtcatcctcgcttgtggcttcgggttgatcgatcagttaaagagttatctgaatccggtgttttcgcaaacattgacaccggtgtatctgcttcaagaccaggtgataccagttgattaccagctggtggatctcatcgagttgcaggcactcaactagggaaacc

SEQ ID NO: 18458 - DNA, 390 bp, Glycine max
  unsure (1)..(390): unsure at all n locations
  Clone ID: LIB3049-038-Q1-E1-H5
ggcacaagtttgttgagatagctagaagcaataagatgaaaatgaaagtgcttgttttgtttgttgctacagttttggtagcatatgaatgccatggctcagactaccagaagttccctctccaaatgaaaactgggtttggtgggcaatacagcaatgaggtggcatgtgccagttggaggcttggcgtggaagcaaacaacgtagtcgagtggcaaactgttcctgcagcttgcggagagtacatagctgactacgttctangagaacaatatagatcagattccanaacagttaaccaacangcttatttctatgctagatcgctcgaaactcacaacagagatgtctttgtcttggacgttgacgacactactctctctaatctca

SEQ ID NO: 18459 - DNA, 287 bp, Glycine max
  Clone ID: LIB3049-038-Q1-E1-H6
ggcacacgtttgttgaggtaactagaaccactaacatgaaactgaaagtgcctgttttgtgcgttgccacactgctggtagcatatgaatgccatggctcagattaccagatgttccctctccaaatgaatactgcagtttgctgggcacgacggcaatgatgtggcatgtgccaattagacgcttgagcgtggaaccagacaccttagtcgagtaggacactgttcctgcagcttgcggagactacatagctgactacgttctatgagaccactatagatcagatt

SEQ ID NO: 18460 - DNA, 392 bp, Glycine max
  unsure (1)..(392): unsure at all n locations
  Clone ID: LIB3049-038-Q1-E1-H7
ggtgattcctcagttcaacaactctcagcaacatgcacaatcctcccccgccaggcggtccaggccctcaccaccaccccggcccaccggctccgccaccacatgctcatccatctcctccgcctcctgggcctccacaccaccaccacggcccacccggcccaccgcatgcttatccaactcctccgcctcctgggcctccacaccaccatcccggcccacccgaaccaggctttcatcaacaccatggcccacccgggccaccgtatgctcatccaactcctccgcctcctgggccancgggacctcccccctccaaggcctccacactaccaacaccaccggttgctgatgtaatgcatatggagcttatgaataacgattctacatat

SEQ ID NO: 18461 - DNA, 382 bp, Glycine max
  unsure (1)..(382): unsure at all n locations
  Clone ID: LIB3049-038-Q1-E1-H8
ggagacagcaagcctaaaggaaataaggaataatatttctatctaaatggtgaaccgcatctcaaactatgttcctctcttcatcattttgattgttttggtaacagggcaaaaacaagtggaaggatataaatgtttgacagatatgggtttatgtgatgaacgtatcacctcgagtgagtgtgatcttagatgtaaatcccattataatgatggagaggggcactgtgataacatgaacatctgtaattgtattcaccattgtgtctctcctcagccaaataaagacaccgagcctataaggaagtgcacaagtggccttggactttgcagtattgatcactgctatgatgattgttgcaattcanaatgtgctaaacaa

SEQ ID NO: 18462 - DNA, 278 bp, Glycine max
  Clone ID: LIB3049-038-Q1-E1-H9
ggagctttgtgagggcggggagctcttcgaccgcatcgtggcgcgaggccactacaccgaacgcgccgccgccgccgtcaccaagaccatcgtcgaagtcgttcagatgtgccacaagcaaggtgtgatgcatcgggatctcaagccagaaaactttttgtttgcaaataaaaaggaaactgcggctttgaaggctatagattttgggttgtcggtgttctttaaaccaggggaaaaatttaatgagattgttggaagtccatattacatggctcctg

SEQ ID NO: 18463 - DNA, 403 bp, Glycine max
  Clone ID: LIB3049-039-Q1-E1-A1
ggtctcgctctgcacaaaccctaacaccaaaaccagaagcgaaatcgcaatcgcaatccagcgaatatgaaggtcgtcgctgcatacttgctcgcagtgttgggagggaatccttccccttctgccgatgacatcaaacacatcctcggcgcagttggagctgaggctgagaatgagttgattgagttgctcttgactgaagtcaagggaaaagacttcaatgagctaattgctagtggaagtgaaaagatgtctgcagtgtctggtggcggtgcagcggttgccgttgctgctgcaccagctggaggtgctgctgcacctgctgccgaagcaaaggaagaaaagaaagtagaagagaacgacgagtctgatgatgatatgggtttcagtttgttcgactaaa

SEQ ID NO: 18464 - DNA, 377 bp, Glycine max
  Clone ID: LIB3049-039-Q1-E1-A10
gcgggtttgaaggtgtaccacgtccccaaagttggggagcttgacctaacgggtctggaaggcgagatcaagcagtacgttggcctctggaacggtaagcgaatctccgccaatcttccttacaaggttcagtttctcaccgacatccccggtcgtggtcctgtcaagttctttgcccacctcaaggaagatgaattcgactatctttagtcactgtactgcactgcactgccctgcacgtcactgttgtttaggtgtccctgtacttgttggtaaaagcaatggtatccttcggcaaatctgtcttttgaacctactatgattttactgacctcgaaaactcaactcaacaatgatgttttgtgcactttcatgtt

SEQ ID NO: 18465 - DNA, 368 bp, Glycine max
  Clone ID: LIB3049-039-Q1-E1-A11
gacgatcaccaattaaattcttgatcataagcttaagagtccaaatccgagcaacttgaactaattgtcgaggacgccttcattgccacctatgttatgcatcctcttcaaactcacactcttcatacataattagatacattggttgcgcgctcttcctcgtttcctttgtctttctctttcggctttttccatcccttcctttctgcatgcagtgatgctgtgataaactgtgttagagcaacatcatggaacttttcaacatgtaatgattaagaaggaagatcattcatttaactgattaatggcactgatttccgagctactggctaacacaatactcttggtgatgaggcatttttctctac

SEQ ID NO: 18466 - DNA, 350 bp, Glycine max
  Clone ID: LIB3049-039-Q1-E1-A12
gctcacccagttgcagaaagaaaagaccatcaaagtttcacttcagccttatccggtttagggtttcggtttttgacccaacctttgacgtatcgaaaccttaagtttcggatcaggtctgagcaatctggttggtagaacctttggtcttagagagtcaagttttatgtctgaattagacgatcaaattcctactgccttcgatccttttgctgatgcaaatgctgatgactcgggtgctgggtcaaaggagtatgtgcatattcgcgtacagcagcgaaatggaaggaaaagcctgacaaccgttcagggattggaaaaagaattcagctataacaagatacttaaga

SEQ ID NO: 18467 - DNA, 363 bp, Glycine max
  Clone ID: LIB3049-039-Q1-E1-A2
ggtcgaggccgcgtcagggggcatagggaaggaaaagtggtgttggtggttgtcctcctcattggtatggcaaccctttcctccatcctctcctcctctcttcctcttttccatcgctagcctaaccctaacccttcgctctttcgcccctccctttctctctctttctctcgcactaaaccccgttcccccttcctcgttctcgctgcctcttctcatgatttcgcctccaactccaagaaatcagtgctcagcgagttgatacgagagatagaacctctggatgttagccagattcagaaggatgttccaccaattacagcagatgccatgaagaggactatatctggtatgccgggcgtg

SEQ ID NO: 18468 - DNA, 416 bp, Glycine max
  Clone ID: LIB3049-039-Q1-E1-A3
gatccaatccaattgaattctccagagagaagaagaaacttaatcgatcatcacttcacttcactaatacatcatggcagacgagacccagaacaagtatgagagctctgaggttgaggtccaggatcgtggtgtttttgactttctcggtaagaaaaaggatgaagaagacaagcctcatcctcaggaggaggtcatcgccaccgagtttcaaaaagtcactgtctcagaccaaggagagaacaagcacagcctcttagaaaagcttcaccgatctgacagcagctctagctcttcaagtgaggaggaaggagaagatggagagaaaagggagaagaagaagaaggaaaagaaagggctgaaagagaagatcgaggagaaaatagagggtgatcatcatcatcacaaggatgagg

SEQ ID NO: 18469 - DNA, 404 bp, Glycine max
  Clone ID: LIB3049-039-Q1-E1-A4
agggggacgaagcggcgtcgttttgactgggaagtgaagtttgtttctgtctccaacaaggcgaatcgtgtggctgataagctcgccaacgatgctcggaaattggcttgtgatgatgtttgtgaggagtatcttcatcccccggctaactgtaaccagttgctcttggaggatgagataggctgtgagagcttttagtcctttttttttttcttcttctttcaaaaataagaaaagaaaaattactatgacaaggtttttgaaggacaccatgggctacttaattaatttggcaatcatggaagattaagtgctttaaattgggtgggaattaacttataaattgaagccactgcatcttcaactagtttgatgcatgtatgatgtatctattattaggttgt

SEQ ID NO: 18470 - DNA, 409 bp, Glycine max
  Clone ID: LIB3049-039-Q1-E1-A5
ggaacctttgcattctattcattcaagattcagcaagtgcgttttggaagcagagaccgaaatacttcgagatggcccgtacaaagcaaactgctcgtaagtcaactggaggaaaagctcccaggaagcagcttgcaaccaaggctgcacgtaagtctgcaccaacaactggtggtgtgaagaagcctcatcgttatcgccctggaactgttgctcttcgtgagattaggaaataccagaagagcactgagctcctaatcaggaagcttcctttccagaggttggttcgtgaaattgcccaggatttcaagactgatctgcgtttccagagccatgctgtgcttgcattgcaagaggctgctgaggcatgccttgttgggctctttgaggacactaacttgtgtgccat

SEQ ID NO: 18471 - DNA, 309 bp, Glycine max
  Clone ID: LIB3049-039-Q1-E1-A6
gagggaagcaaggacgatgagtatagtatgagtaatcagattcagagtgtatagtgattctgattctttcattttccatagattagcaagcaatcgagcgagggagggagagagagagagagagagagagaatggttcgggaagtatcagagagttgcattgatagcttattgacggagatggtggcgtgctattgcaaccgattctacgcaaacaagcctgaactcgccgcacgccggatcgaggccattggatatcaggtataccatggattggcctcggttcacggatcatctggaaggcatcaag

SEQ ID NO: 18472 - DNA, 406 bp, Glycine max
  unsure (1)..(406): unsure at all n locations
  Clone ID: LIB3049-039-Q1-E1-A7
gagcttaaacgacgccgcgctgatcaacgactccttacgtaaacgacgacggtgtcagacaaacggtgccggttggtggtgccgccacgctattacgctaatcgtatccatcaccctcatcaaaacccctcctttctcttaatttagaaaccctaattcagaagaaaaaagtcaccttctccagaatttgcgcggtaatggcatcttcttcagactcatggatgaaggaatataatgaagctgtgaaacttgctgatgatatcactggcatgatttctgaacgtagttcattccctgcatctggaccagaaacccagcgacatgcatctgctataagaaggaagatcacgatattggggaccagacttgatagcttgcaatctcttttgtcaaaggtcnctgcaaa

SEQ ID NO: 18473 - DNA, 390 bp, Glycine max
  unsure (1)..(390): unsure at all n locations
  Clone ID: LIB3049-039-Q1-E1-A8
gccaacatttttgcccaggtctgaagatgaaagggagatgtgctcaagaacaatctattgcacaaatatcgacaagaagcttactcaagcagatgtcaaacacttcttcgaatctatttgcggagaggttcatcgcttgaggcttcttggggattaccatcattcaactcgaattgcatttgttgagttcgcactggcggagggtgcaattgcagctctgagctgtagcggtgtgatcttgggttcactgcctataagggttagtccatcaaagacaccagtgcgccctcgtgctcctcgtcnccccatgcactgaatcatcctttctcgtgtttctgctgctgctgcaactcggagatatatttacatatatacatacatagaaacaga

SEQ ID NO: 18474 - DNA, 373 bp, Glycine max
  Clone ID: LIB3049-039-Q1-E1-A9
gacacctggattgaaggttccttggcttcttcacactcacagcgtgccaccatcacgctacactaagagtgcaggaacatcctgtatgggttggaaagcagctgagaaactcattaggcactggaaaattctcagaggagataatgttatgataacaaggggcaaagataagggtgagaccgggattctaaagcgtgtcattcgctctcaaaatcgtgtcattgtagagagtaaaaacccggtaaagaagcatataaagcaagggcaaggtcatgaagggggcatctttacagtggaagccccactgcatgcctccaatgtgcaagttcttgacccagtgacagggtatgtcattgttcagatattgaactgg

SEQ ID NO: 18475 - DNA, 323 bp, Glycine max
  Clone ID: LIB3049-039-Q1-E1-B1
gacagacaactattccgcttaaacctgctactgagtttccacactggataccttacgtcttccgaattcgaacttcatttgcgatatggctactgaaaaagctcacatcaacattgtggtggttggtcatgtggaccctgacgaagcaaccaccattaacgagctgaataatcctgttgtggagaaagaagctccagggcatgccatatcatggcatgcacgtacggccaccgaagggaaccagaccattatgttaacaaaataatctggaagcctaatgtatcagtgtcatcatcactgtgtagtttaagctatcattgcta

SEQ ID NO: 18476 - DNA, 394 bp, Glycine max
  unsure (1)..(394): unsure at all n locations
  Clone ID: LIB3049-039-Q1-E1-B10
ggttctagtgtgtgattgtttgttgttgtaactcgttcttcttcttttgttgttctgtgtttgtgtttgttttttctctcacctgaaaatgtcttgctgcggtggtaactgtggttgcggaagctcctgcaagtgcggcaacggctgcggaggctgcaagatgtacccagacttgagctacactgagtcaaccaccaccgagaccttggtcatgggagtggcacctgttaaggctcaatttgagggtgctgaaatgggtgtgcccgctgagaacgatggctgcaaatgtggaccaaactgctcctgcaacccctgcacttgcaagtgaggtgttgggagagcaagcttcaagcagagatagcccttaattaagaataatgatanactattaatg

SEQ ID NO: 18477 - DNA, 386 bp, Glycine max
  Clone ID: LIB3049-039-Q1-E1-B11
ggcacaagtttgttgagatagctagaagcaataagatgaaaatgaaagtgcttgttttgcttgttgctacagttttggtagcatatgaatgccatggctcagactaccagaagttccctctccaaatgaaaactgggtttggtgggcaatacagcaatgaggtggcatgtgccagttggaggcttggcgtggaagcaaacaacgtagtcaagtggcaaactgttcctgcagcttgcggagagtacatagctgactacgttctaggagaccaatatagatcagattccaaaacagttaaccaacaagcttatttctatgctaaatccctcaaactcaccaacaaagatgtctttgtcttggacgttgacgacactactctctccaat

SEQ ID NO: 18478 - DNA, 319 bp, Glycine max
  Clone ID: LIB3049-039-Q1-E1-B12
gaggcgaggtagccatagagtgatactgtacagagtgcgttgttgctccttcgccataactccctgccaatatgggtatctctagagattctatgcacaagaggcgtacgactggtggcaataacaaggcatgggcgaagaagagaaagtatgagcttggtcgccatcctgctaatactaagctgtcaatcaccagcacagtcaggatgatcagggttagaggtggaaatgtaaatttgaagtcactgacattggaaactggaaattactcctggggaagtgaaactgtaactctcaagactcgtatactaaatgtggt

SEQ ID NO: 18479 - DNA, 409 bp, Glycine max
  Clone ID: LIB3049-039-Q1-E1-B2
gacgaaaaagcgagagtaataatcaaagtgcctcgagctgtgaaatcaccaacacggaatcaaatcaacacatttgaatggaaggagagaaagacgagtgcgggaggaaccttacgtgaaggtgacaaaccgccgcgatcgcgtagttgtcgttgacaccgcagatgctggtgtcgtgatttggaaattacaaaaaattagggtttaaaccttctttttgatgaaacggtgactttaggagacaataagaagcaactcaggtttaagaaaagcggtgagtttaagtgaacagatctcggccacacattttatccaacggtttagctttctcaaattgcagacgattcgttcccgttcagtggtggtggcccactggcggctatcttccatgggtaaaacataaaaccat

SEQ ID NO: 18480 - DNA, 411 bp, Glycine max
  unsure (1)..(411): unsure at all n locations
  Clone ID: LIB3049-039-Q1-E1-B3
aggggatacgcaaatactgatccttttttgcttgaaaggactctatatccatccatcggattgcaacttcatcccatccagaacagaacagaacagaactggtggttgcattgaatcggaagggtaagtgggaagacgtgtcttgttttgtagctttcccttccctctctcttttccccgccgcatgtgccggattaaacgcgaactgcttccataattcacctcctccaatcaaccatcacaaagtttcccactgattggatggaaaaagcatgttaatttcgaagtttggctgaattgattcctgatgccctgggggtaatcttcaccaatctttctcttcangagaaggtaacagtgatccccagggtgtgcaaatcatgggctaatgcagttaactggacttactgc

SEQ ID NO: 18481 - DNA, 411 bp, Glycine max
  Clone ID: LIB3049-039-Q1-E1-B4
gagaaaaaaggggttgagatttgagagaaagagaaagaggaggttaacacacacacacacacacacaaagcagaacaagagaagtatccccccataacaaaaccgtactacacaataaagcacaccaaccattcatttccttttgcccacatttactatcccacattatgtttcctcagacaatcgcagtgccacagaaccaactagccactccttcctgtacttagctacctcacttctaccttcttatttcttccacaacccttttttcctcccttcaacatatgcacccactttgtcttcatctctttaaacagcttctcctcattgtttaatttgtcactgatactgatggcaacactgatgggagggtgcttttggctttggtggcagctgaagcagcagtgccaa

SEQ ID NO: 18482 - DNA, 391 bp, Glycine max
  Clone ID: LIB3049-039-Q1-E1-B5
gaaacaggagagcaaccaaagctatacgttggagtggaggtgaggggagtgtttgtgtccgagggaacaataaagggcaaacaaacaacaaaacaaaggaaagaaaagatgttacagttcccggcgtatatgacgcagtacccattgtccacgatgaccattccgacgtcgtttctgctacccgctcagtggccccagccccaaaacgaagaactccttctcgccatggaagagtccgatttcgaaaaaaaatgcaacgagatcaggaagatgaacagcaacctaattgtgataggacaaaccactaacgacaatgataacgaagactttgacaatgaggcagatgaccattatgctgacaatgcacaggaaatctagggcgaagaatttg

SEQ ID NO: 18483 - DNA, 368 bp, Glycine max
  Clone ID: LIB3049-039-Q1-E1-B6
ggtgctttggagactgcaagtgcaaccttgcttgcagctctcaaagctgaaaaaatatttgctgtattctctgctgcacattagcaccattcactcactcactgccccaaaaccacatgctcttccacatccctatataaaatcttttcaatcttcataatcatcatcatcaccaccaactccaactcaaactctccaaaacctgccacttcaaccttcctatatattccttccctcactctcttctgcttctatcatctttctgagaggcttgttgacacacaaaaaatgatcaccttaacagacttctaccatgtgatgactgcaatggtgccactctatgtgggcatgatactagcctatggctc

SEQ ID NO: 18484 - DNA, 383 bp, Glycine max
  unsure (1)..(383): unsure at all n locations
  Clone ID: LIB3049-039-Q1-E1-B7
gatgccatgtgggtttttggagagaaccaaagagaaaggcatggtttttccttcatgggcaccccaaattcaaatccttagccacagttcagttggagggttcttgactcactgtggttggaattcgatccttgagagtgtgctaaagggtgtgccattcatcacatggccactgtttgcggagcagaaaatgaatgcgattttgctatgtgagtgtctcaaagtgggagtgaggccaagagttggtgaaaatggtttggtggaaagggctgaaattgtgaccgtgataaagtgtccaatggaagaggaagaaggtaaganaatgcgtgaaagaatgaatgagttaaaagaagctgctactaatggtctcaaacaagatgggg

SEQ ID NO: 18485 - DNA, 329 bp, Glycine max
  Clone ID: LIB3049-039-Q1-E1-B8
ggcagcaacagcagcattcactgaaagcactcagtagggtttgcggtttcagagtttgtgacgcacgcatccatggccaccaccaccaacgccgccgcagccccgccgcgccagctctcccagaaggaagccgacatccagatgatgttagccgccgacgtccacctcggcaccaaaaactgcgacttccaaatggaacgttacatcttcaagcgccgcaacgacgggatttacattattaaccttgggaagacatgggagaagcttcagttagcagctagggttattgttgcaattgagaaccctcaggatatcattgttcaatccgc

SEQ ID NO: 18486 - DNA, 363 bp, Glycine max; identical to SEQ ID NO: 7753
  Clone ID: LIB3049-039-Q1-E1-B9

SEQ ID NO: 18487 - DNA, 254 bp, Glycine max
  Clone ID: LIB3049-039-Q1-E1-C1
gagtgagattgttgcaatggtgtgtgcaatctcatcatcaccgttctcaactctctcgtttcggcgtctcgtcgtgagcaatgcgacggtgtctccgtgcaagccgcgtgccgtgaaactcttaacggcgcttccgagcgcggggcggaggcagttgctgttttttctaacggcgacgacagcgttcacggcgagggaagcggcatccgtggcgcaggacattcccttgttcgggatacggaagagtctaaaga

SEQ ID NO: 18488 - DNA, 372 bp, Glycine max
  Clone ID: LIB3049-039-Q1-E1-C10
ggcggcacaaagcattcactgtgtcggaaaaagaagaagagaaaaaagatgagcgacggaggaaaacgacaaggtggaagagcgttgccgccgccgccaagaggccctccgcctcctcccccctctcgccctcgcctcgaacccgtcgatcgcgaaaagacatgtccgttactgctgcgagtgttcactaagattgggagtcaccattccatggaagactttgccgtcagaggcaaagagcccaaagacgaggttcagatttacacctggaaggacgctactctccgagaactcaccgatcttgtcaaagaagttgctccggctgcaaagagaagaaacgccaaactctccttcgcctttgtattccccgac

SEQ ID NO: 18489 - DNA, 433 bp, Glycine max
  unsure (1)..(433): unsure at all n locations
  Clone ID: LIB3049-039-Q1-E1-C11
acggtctatatntccggtcgccccacgcgtccaacagctcctacataacgatgcaaggaggaggcagtggggggaagaactgtaacactatactgtcacactataaccccacagaaagaaaattaaaatggattgtttaagtggatagaatgatccgccaataaggtgcactctcaacggccactctcatcatcaactctaattatctgaactagttaaatcaactggttcagtccgccatcagtggtcgcccgctgtggatgcttagctcgtgtgcggacatcttatgcgtcgacacgaattgtcccttcaccattcactgctagcagagaatgtcggacaaccacatcatgcacctgcagcaactgcacgatgatacctctccaaagttcttcacatatgttgtcaacattcagttccacttctcagaaat

SEQ ID NO: 18490 - DNA, 377 bp, Glycine max
  Clone ID: LIB3049-039-Q1-E1-C12
caggggaagaactggtagaaaaccaacaacaaaagactctaagagtgagtcaccatccagcagcacctacatcccaagagatgagaactttggtcacttgaagtcatcagatttccttacatatggaataaaatccatagctcaaaccgttttacctacatttcaatctgcatttggtttaaatgccgagtttgataggtttgacgacgtgcgtggactctttgaaggtggaattcatctccctacagatgcactcagtaaaattagccccctaccagtgctcaaggaaatcttccgcactgatggtgaacaagtcctcaagtttccaccacctcatgtcatcaaagttagtaagtctgcatggatgactgatgaag

SEQ ID NO: 18491 - DNA, 410 bp, Glycine max
  unsure (1)..(410): unsure at all n locations
  Clone ID: LIB3049-039-Q1-E1-C2
ggccgtgaaaccctagaaagaaacgacgacgtaaatggaggtggagcccgtggagccgcagtcgctgaagaagctaagcttcaagtctctgaagcgcgctctcgatctcttctctcccatccacggacacctcgctactcccgatgccgaaagcaagaaaatacgcactagccacaaggtgagcgtggagtatggtggaatcaaaagcactgccaatcaacctcctcctcgtcaagttagttctgccacccaggatccagggtcctctaacactctggctcttccaggtcccggagattccaaggattctcagaaaggaggaccccaaaatgccttggttgttggtccaactatcncatccacaacaccgaatgatactggttttcagaacaaaagtacagcggttgttt

SEQ ID NO: 18492 - DNA, 407 bp, Glycine max
  Clone ID: LIB3049-039-Q1-E1-C3
gaaaacaagtagggaataacgtgtaggaaactacattggttttacgacacgacttgaatcacaaactaattttatctgaaatatctctttcatagaacggagaaagacacgatgcaggaagcgacgaaggtgataataatcggtgccggaacttctggtatcgccaccgccggttgcttaacgaagcaatcaataccttacataatgctcgagagagaagactgtttcgcttcgctgtggcagaaatacacctacgatcgtctccaccttcatttgaggaagcaagtttgcgagttaccgcacttaccgtttcccaagtcttaccctcactacgtgcctcggaagcagttcatagactacttgggaaactacgttaaccactttgagattaagcctctgtaccagcg

SEQ ID NO: 18493 - DNA, 380 bp, Glycine max
  Clone ID: LIB3049-039-Q1-E1-C4
ggagtttgcattttgtagtcactagtcacaatttgttggaggagaagagatggtttggccaattaggtccagaataagttctcttctctgttctaaggcacctttagttggttcatacatctatgactcatgtgggtgcttacgcttttctgctccaaccagctcctccataacaaggcattggccaaaaattatggattgggtacaaatggaccgttgccgtgcagcagcatcgttaccttccatcaaagagaaacaaccagaaagtcatactaatcgtgtcagactcggtcaagaaatcaaaggtcttgatgaacggaatatcgctgaaatttatagctatcaaaactgtttggtttgatgaaccaaaggtttctgag

SEQ ID NO: 18494 - DNA, 384 bp, Glycine max
  Clone ID: LIB3049-039-Q1-E1-C5
gattcattctcgcaacaaacaaaactctctctcactctctcaatctccttctcttgcaagcaccctcccacacactgtccaacgttaaccgatcataaacccatctctgtctacctttatttgatccaaagtgggctcacaaaaacgtgaaacatttcattcccgtgagactttcctccaccgatgcagattgaatttcaggaatcctgcgtgtctgcgatacgtgtgagacctgagatttgctagtcagttacatttttgagaacagtttacatcttttcttcggcaaagttagggcactgcataacgtttcgcaatgcccatggatgccacagtcagcggaactccaactgttcaataccataacatacctgaccaccaatt

SEQ ID NO: 18495 - DNA, 374 bp, Glycine max
  Clone ID: LIB3049-039-Q1-E1-C6
ggcggtaggcgcagtacgccactgtccacaccacaccccctttgctgcttccaccactccctaaccttcgctctcacacactctctttcatccatcgtcatctctgaattggaaactcattattattaaatgaaattacgaaaacgaagaaaccaaacaatagtagcttagttaattgaattgaatgaatctcaatggaacctcttctcttcaacgactccacattctcttcagctaacccttctttgtctgagatttggccctctcatttcccctccgatcacactcccaggaagaggcgcctctccccctcgagtgattctgccaccaataaacatatcaagttatcagcaccagaatcccaagatcaaaac

SEQ ID NO: 18496 - DNA, 408 bp, Glycine max
  Clone ID: LIB3049-039-Q1-E1-C7
gaatgaaagaaagaggcacatttcagcccttattcaatgctttaccaaactcactcatcatcctccagtctttcaatttcatcccttcacttctttccacaaccccatcatcttttccctcttttcttctctctcaggcggagaaagaaatggagtgtttggaagcagcgttgaagagcagtttcaggaaagacatggccctcaaacaaacgttgttcctagaggagttctcgtcctcctctaacgttcaaaacgtcgtcgcttcctccgacgacttgttcgctgacgacctcctcaacttttcactcctcgaaaacaacaccaacaacaataacaacaacgaagaacccgaccaacaactcaacaaccacgactccaccacccctcagaacaaccaggaaaattaca

SEQ ID NO: 18497 - DNA, 381 bp, Glycine max
  Clone ID: LIB3049-039-Q1-E1-C8
gagcgtagttgaggttttgccacttcgaaaccaaattttcttccttcgttggcatctgtgatctcttctcctcacaatgagcagatcagggcaaccaccggatttgaagaagtacatggacaagaagcttcagatcaagctgaatgcaaatcgcatggttgttggtactctccgtggcttcgaccagtttatgaatttagttgttgacaacactgtggaagtgaatggcaatgagaaaaatgacatagggatggtggtaatcagaggaaatagtgtggtcactgttgaggcgcttgaacctgtgaacaggacttgatttctgtggcttgtaaacattctatataagtaatttctgggttatggttgtgtatttgaacaatg

SEQ ID NO: 18498 - DNA, 340 bp, Glycine max
  unsure (1)..(340): unsure at all n locations
  Clone ID: LIB3049-039-Q1-E1-C9
ggacgtgttggtgtgcagagaggcaagagaggagttgaatggaaacggtggtctctcgcgctgtcctcgttctctgcactccgcacccaaccacaactcaccctttcactaaacctaacaaactcctccgttcctccctcagccgcggcgccgcttccttatccgccaccagcaaatgggcggagcgcctcattgccgatttccaattcctcggcgacgccgccgcctccacttccacctccactctcagcccctcctccgtcnctccccgcctcgattctcctgagcgctacgtgtcgattcctctcgaactgtaccgcattctcggcgccgaaccgca

SEQ ID NO: 18499 - DNA, 412 bp, Glycine max
  Clone ID: LIB3049-039-Q1-E1-D1
ggagtgtgtcttttggattcgatcacttcgacatctcccattgacgacgcgcttgccctagcagcagcttctctcctctgccgtttgccgtgctccgcgctcctcgtccgtttgtgcctgagctcccgtccatgccgcccatgtaacttccgttaccactcacaaaggcagataacgtggttggccaatttcataaacttcaaaaacctccacctcaggctcaactatctgactcaacttcagagggatcacatcgtgagcttccttcgcttaacattgttcgtagtgcttttgttaaggtcatggatgttccactgccactggataaattggctttagatttgattgataatgagccctcccctgcaaacatgagcaacagcaggatatatgtaattctggtggcaactgg

SEQ ID NO: 18500 - DNA, 291 bp, Glycine max
  Clone ID: LIB3049-039-Q1-E1-D10
ggagttgtacttgatcacagagctcacgaggttgacatctccaatatgtcccggctgattaagcaactcagtttacttttccgattaattctgagtcactgctgctatggcgctacgcctagttcctgtgttggggatgttgctgatattgtgccgtgttaaggtttcatcggatcctgagatattagaagaacaattggaatcaacattggagctgcacctttctccataaggagccacatatcatgggagactcgaacataaagctattacagtatatggattgtggtg

SEQ ID NO: 18501 - DNA, 359 bp, Glycine max
  Clone ID: LIB3049-039-Q1-E1-D12
caataagagccttttggctttgaaggaatgcattcgtgctttggacaatgatcagatccatattccttttcgtggaagcaagcttacagaagtgctccgtgactcctttgttggaaattcgaaaactgttatgatctcttgtatatccccaaatgctgggtcatgtgaacacacacttaataccttgagatatgcagaccgagttaaaagcctatccaagagtggaaatcctagaaaggaccaggccacaaatccagtaccaccagcaattaaagaggtttcatccacatcttcacttccagctagtgttggtgcagatgattttaatggtcaatgtcaagaggtaaaaacaatggaca

SEQ ID NO: 18502 - DNA, 327 bp, Glycine max
  Clone ID: LIB3049-039-Q1-E1-D2
gggacaatagacggggacactaatcgtgaaccaatatcgaccttcaactataccctgaccctgtgttaatttcctgtgttgagaagcaatgagaggcagagatgcagagaatcacaccttacagttaaaccctggagttcaagccttaagacgataacatgatggacgaggaccgcacccctgacgccgacacttcaccgccacaacctaaactcaaatccgcgatgaccgccgccgcagcaccgatcaagaccaccggtcgcagattccggcaagacatcgaagccaaccgtgagactcgcatctccagttccgaattcgactcgc

SEQ ID NO: 18503 - DNA, 293 bp, Glycine max
  Clone ID: LIB3049-039-Q1-E1-D3
aggggaaggtgaggatgaacacgaagaggaaaccagagagaaaattccactgtattcgaagcatgtgtaagtttcctgtgttaagaagcaaggtgaggcagcgctgctaggaatcacatctgacggttcaaccttggatttcaatccttaagacgatgagatggtggacgaggacggcacccttgacgcccacacttctccgctctcatcctacattcaagtcggctatgaccgcgtccggagctccggtctagaccaacggtcgcagattccggcaggacgtcgacgccaac

SEQ ID NO: 18504 - DNA, 402 bp, Glycine max
  unsure (1)..(402): unsure at all n locations
  Clone ID: LIB3049-039-Q1-E1-D4
ggcaccgtcacttcctctaccgctttcttcctcctcattaaggcgcaactctctctctctctttctttttctttgttaggtttggtgacacttagttagaaagagcgtgcgaagagggtggggagaagatttagtgttgtggccatggcggagtctgagaagagtactgtgcttgttacgggagccggtggtcgcacaggacaaatagtttacaaaaaattaaaagagaggccaaaccaatatgtggctagaggtctggttagaacagatgaaagcaaacagaacattggtgctgcagatgacctctttgttggggatataagacatgctgaaagtattgttcctgcaattcaaagtatanatgctctcataatcctcacaagtgctgttccacagataaaa

SEQ ID NO: 18505 - DNA, 348 bp, Glycine max
  Clone ID: LIB3049-039-Q1-E1-D5
ggggtggagcgtgcgaagggagagggggtcagtcaaggtcagcatagaaagactccctctcagttccgacgaggcggcgactctgcattcccacccacctaacttctctctctttcgctctctagggtttcgccatttatccctaattaagctaatttcaatttcatttttaaggctgtgtttgaaagtgtgttcaatgggtactccggaattcccagatctgggagagcactgtgctgtctcggattgcaagctcatcgatttcgtgccattcacctgcgattgctgcgaccaggttcgtccactttcctctctcaatctcaatctccattagacccccagcatccg

SEQ ID NO: 18506 - DNA, 353 bp, Glycine max
  Clone ID: LIB3049-039-Q1-E1-D6
ggaacttcaagggcaaaaaaagttgtgctgtgccgcctcttccgtaggcagcagcaatggcctcaaatcccaaaactttgacctttgaggaggtagctaagcacaacaacaaaaaggattgctggattattatcaatggaaaggtgtatgatatcacaccatttttggatgagcatccaggaggtgatgaagttttgctgacgtcaacagggaaggatgccaccattgattttgaagatgtgggccacagtgattctgctatagaaatgatggaaaaatacttcattgggaaggttgacacttccactctttcacccaaagttagccatagtctgccacaacctacacaaaca

SEQ ID NO: 18507 - DNA, 402 bp, Glycine max
  Clone ID: LIB3049-039-Q1-E1-D7
accagggtaaagaacaaactagattagctcagaaagcagacactaaggccagccatgacatatttattgctagaaacaaaggtatagaaaatatgataactattgacttacatgggcagcacgtgaaacaagcaatgagaatgctgaaactacaccttctgtttggatcatatgttccctctgtccagactctaagggttattacaggatgtggatcacatggtgttggaaagtctaagctgaaacaatcagttataaaccttttagatagagaagcaattgaatggagggaagagaaccagggaactgtattgattaaactcagcggatggagagagtatagctttctagacaccagcagtgacagtgacagtaatgattaagcatgtctaagtgcatcag

SEQ ID NO: 18508 - DNA, 379 bp, Glycine max
  Clone ID: LIB3049-039-Q1-E1-D8
gacagctattcctcttaagcttgctactgagtttccacactgcataccttaggtcttccgaattcgaagttaatttgcaagatggctaaggaaaaggctcagatcaacattgtggtggttggtcatgtggaccctgaggaggcaaccaccattaacgagctgaagaagcctgttgtggagaaagaagctccagggcatgccatatgagggcatgcacgtacggcctcggaggggaaccagaaaattatgttaacaaaataatctggaaccctaatgtatcagtgtcatcatcagtgtgtagtttaagctagctttgctatggttacgttctttgagatgagagtcttgatgaacagtaccattctgatgtattgctttc

SEQ ID NO: 18509 - DNA, 362 bp, Glycine max
  Clone ID: LIB3049-039-Q1-E1-D9
ggaagtgtatttggtcactgacctatcttggtagagatttgaagtttaaaccttcaaattaatcaaaccattttaatttgcctatagattctgagtcactgctgctatggcgctacgcgtacttcttgtgttggggatgttgctgatgttgtgccttgttaaggtttcatctgatccaaagatagaagaagaaatactggaagcagaagaagaactgcagtttcccgataacgagccacttatcgtgggagacgcgaacagaaggctaatgcaagatatggattgtggtgggttgtgcaagacgaggtgcagtgcacattcgaggcccaacttgtgcactaaggcgtgtggcacgtgctgtg

SEQ ID NO: 18510 - DNA, 280 bp, Glycine max
  Clone ID: LIB3049-037-Q1-E1-B10
gaaacttcagagccctctattgcctctctttcttcgcttattgttgcactttcttcgtcctagatatttcctggtcggtactctttttagtctctttatctttattcttcttctattctcatgcgcccatcttatacctctcttcattcatcatctttctttctttgcattcttccttcactttcttcccttcttcgatcccaactcattcatgtccctctctatcttctcgcattgatcttatcgatcactctcatctagcactgcattttcattacca

SEQ ID NO: 18511 - DNA, 246 bp, Glycine max
  Clone ID: LIB3049-034-Q1-E1-F3
gattccttttcctttctatctctctctcttcttatatttccacattccacgtgaaccttctagaactataatagaaagaaaccctccattccatggctccgccgctcgaacacaacggcgtttccacgagcggtgactctcagagattcattcccaagccgtttctcaacaaaacctaccagctcgtcgacgattacaccatcgacgatgtcaattcgtggaacgaatctggattgtccttcaacg

SEQ ID NO: 18512 - DNA, 376 bp, Glycine max
  unsure (1)..(376): unsure at all n locations
  Clone ID: LIB3049-034-Q1-E1-F4
gagggtttcagtggtgttagatctgtacccgcctagccattgatttggaaaagtccaagcttcaaagatgagtaagcttcagagtgatgctcttagagaagctatctcaggaatcatgactgattccaaggaaaagaacaggaaatttgtggagaccattgaactccaaattgggctgaaaaactatgatccccagaaggacaagcgttttagtggctctgttaagttgcctcacattcctcgccccaagatgaagatttgtatgcttggagatgcccaacacgttgaagaggctgagaagataggattggactacatggatgttgagggcttgaagaagcttancannaacaagaaattggtgaaaaaactagcc

SEQ ID NO: 18513 - DNA, 363 bp, Glycine max
  unsure (1)..(363): unsure at all n locations
  Clone ID: LIB3049-034-Q1-E1-F5
gatagtatcggctataagtggacagtgggataagtggtttggtggtggcaacttgccggcgtttgtgttgggtgccgtggcggctgccgtgagtgccgtgttagcggttgttctgctgccaacaccaaagccagcagatgtggccaaggttacttccgtcactgctgggagtttccattagtatatattatagagttttacatgcatgggacaatattagatggagacttttaatttaaatttggtgagtgtgtattatttaggtattagacccatcanataactctttaaggtgggcttaagttttatccttgttttctctaatanatatatgtacaacaacattaaaaaattataaatcca

SEQ ID NO: 18514 - DNA, 382 bp, Glycine max
  unsure (1)..(382): unsure at all n locations
  Clone ID: LIB3049-034-Q1-E1-F6
gacgcacattcacaacacaacacagaagcggaaaaaagaagaaggaagaaaagttagcagtagtttggcgtggtaattggtagagcgagaaacagagaaatggacgattacacgagggaaatgatggacctgaagacactggtcactcgcactctcgagaagaaaggcgtcctcgccaggatccgtgccgaactcagggcgagtgtgttcgaagccatcgaagaggaagatcgtgtgattgagaaggaacaaggtctacctcctgcattgctaggtagttgcaacgatcgagctaagcagcttcacgcttctcctccagggagacttcttacngcaatgatatgtgaataccttgactgggcgcagctcagtcatacgctaa

SEQ ID NO: 18515 - DNA, 374 bp, Glycine max
  unsure (1)..(374): unsure at all n locations
  Clone ID: LIB3049-034-Q1-E1-F7
ggagttggatacttgcatgagggcttgaacagtcttgatcgtgacattgtgactcagctatttgaagctggctggattcaagtctgtgttttaaacagttccatgtgttggggagtgacattgtcggctcatttggtagttgtgatgggcacgcaatactatgatgggcgagagaatgcacagacagattaccccgttactgatcttctgcagatgatgggttcatgcagcccgtcttttggtagacaatttctggaaaatgtgtcatcttgtgccatgctcctcgtaaggagtactacangaagttcctatatgaagcattcccggttgaaagcccatctcatcacttcttgcatgataacttgaacgctgaa

SEQ ID NO: 18516 - DNA, 314 bp, Glycine max
  unsure (1)..(314): unsure at all n locations
  Clone ID: LIB3049-034-Q1-E1-F8
gaattagaattagaatataagatagtagaaaagaaagggaataaggaaacccttcttcacttctacctctaatctaggaataggaaaaagatgggcagcactagtgcgagtgccctcaggctatcgtcgatggtcagcgtgtccccgaattgcaattgctcatcgatgacgcttacgaagaagacggcgatggcgatggcgatggctcctttttcacttgcaatgaaaatcaaaagcaaaaggggtggtattaggtgcgaggtggctattaatgcggtggatgaggagtcgaggacgtcnacggaggagacgaa

SEQ ID NO: 18517 - DNA, 375 bp, Glycine max
  Clone ID: LIB3049-034-Q1-E1-F9
ggaatgaatgattttaattgagcggcggggcagaggaaggggcagagttttggagtttgaaagagaaaatattgattgcagttgagttctaatgagtaacgaatacgattacctgttcaagcttctcctaatcggagactcttccgttggaaaatcctgcttgcttctcagattcgctgatgactcctatgtcgacagctacataagtaccattggagttgatttcaaaatcagaacggtggagctggaagggaaaaccgtcaagctgcagatttgggatacagctggacaggagcgattcaggactataacaagcagttattatagaggagcacatggaattattattgtctatgatgttactgagatggaaag

SEQ ID NO: 18518 - DNA, 345 bp, Glycine max
  Clone ID: LIB3049-034-Q1-E1-G1
ggttggattgttgctagcagctatgggatttgacaatagcactcgtttatatcttgcctctcacaaggtctatggtggagaggcaaggatttcaactttgagggaattatttcctctgatggaaggcaagaagagccttgcttcatctgaagagcgttctcagataaagggaaaagcttctctattagctgcacttgactactatgttggcttgcatagtgacatcttcatctctgcttctccaggaaatatgcacaatgcattggttggacaccggacatacttgaacttaaagactataagggcaaatatggcattgatgggtcagcttttcctgaataaaac

SEQ ID NO: 18519 - DNA, 389 bp, Glycine max
  Clone ID: LIB3049-034-Q1-E1-G10
gagtgttccatccatcccttcttcatcttctacttctatctccctacatactcattcaaacagacatgaaaattatggaatcattagctcttatcttctacagtactcttgttttagctacgatttcagttccagcaactaactccagaatcatccatcaaaaaaacaatgccaatctgattgaagaaacttgcaagcagacaccccatcacgacctttgcatccaatacctctcctccgaccctcgcagcaccgaagcagatgtgacagggctggcacttattatggtcaacgtaatcaaaatcaaagcaaacaatgcattggacaaaatccaccaactgcttcagaaaaaccctgaacctagtcaaaagggaacactgagttcgtgt

SEQ ID NO: 18520 - DNA, 399 bp, Glycine max
  Clone ID: LIB3049-034-Q1-E1-G11
gaccagacaggctcccaccacctcccccttgtactgaaatctccattctccaaaactgcttcaactcttctcattttctttctctctctctctgcctcgcactggagtaccctctccaatttccttcaaatcccatcaaataagtttctcttataccctctgaatattcttcatcatcatcatcattaatcatggctcttttgatgtattttgtgctttttcttgccctcgctggccattcaagtgctctttactgtgtatgcaaagatggtgtgggtgatcaagctcttcagaaagcaatagactatgcatgtggtgctggagctgactgtacccctattcttcaaaatggagcctgttttcaacccaacactgtgaaggatcactgcaactatgctg

SEQ ID NO: 18521 - DNA, 362 bp, Glycine max
  Clone ID: LIB3049-034-Q1-E1-G12
ggagtgtgtgagagagcgagcgagcgagcagtttcaaagagaggatttgggattgggaaggcgagggattgcgctgcgtctcttcctcttctctttcgattcatccctcattcataatcttccaatccaacaacctcagcctcacactcacacatacacacatctgaacgcgtatcgtccctcccatggcttcaaagcgcatcctcaaggagctcaaggacttgcagaaagacccaccaacttcttgcagcgctggtccagtagctgaggacatgttccattggcaagcaacgattatgggtcctgctgatagtccttatgctggaggtgtattcctagtcactattcactttcctcggatt

SEQ ID NO: 18522 - DNA, 370 bp, Glycine max
  Clone ID: LIB3049-034-Q1-E1-G2
tcattttctttttcacttaatttctatcttttttttattttcaaaactcctacattgttttcccccctttaaattagggctaggttgttggatcttgcttcttggtatcgttttattttttctttatatatttattcggttttcggtggacatcgatagacgactagtcaaccaagagcctcgtcaattgaactccgaaagaaacatatttttatgggctgagaaattgttgttttttacggctatgatgggttgagaacattttgctcgtaatcttaatgaaagtagaaaaaccgttttgaacacgaatcctatgttttgtaattaatcatgttgactacgcgagggatctgcatttgcagctcttgac

SEQ ID NO: 18523 - DNA, 347 bp, Glycine max
  unsure (1)..(347): unsure at all n locations
  Clone ID: LIB3049-034-Q1-E1-G3
gacagtaaaagaaaaaggaaaagcaatagcagatcgaagataacaatgtctttatttgctacaagtgtttccacactacgggtgcttatattgttattatcaacgttgaacaatactatggcagtgaaagcacttattagggttacaaatgatctgggagttctagacataactgtttcctgcaaggttgatgataatcatccacacgttctcagccccggtacttactatgagtggaacttttctcctgataacgaatttggaacggaaccattattcagtaattgttcccttcaaagggaaacgtgngcattatcacacatttgatctgtaactaaaagttcgtg

SEQ ID NO: 18524 - DNA, 299 bp, Glycine max
  unsure (1)..(299): unsure at all n locations
  Clone ID: LIB3049-034-Q1-E1-G4
ggccgctctctgagaaaaacagatagtgtgggagagagaagagcggaagagaaaatgacgaccaggttcaagaagaacaggaagaagagaggtcacgtcagcgccggacacggccgtatcggaaggcaccgcaagcatcccggaggtcgcggtaacgccggtggcatgcatcaccaccgtatcctcttcgacaagtaccatcctggtttcttcgggaaggtangcatgcgctacttccacaaacttcgcaacaaattctacaatccgatcatcaacatcgacaagctgtggtccctcct

SEQ ID NO: 18525 - DNA, 304 bp, Glycine max
  Clone ID: LIB3049-034-Q1-E1-G5
ctatgacaacaaggatggaacagtttttgttgcatctggttctaatggccagattgggctctactggggtgttgcagctgatggttccatagttatttctgaaaacctggagcttataaaagcaagctgtgctaaatcatttgcaccatttccgaatgggtgtatgtttcatagtgagcatggtctcatgagcattgaacatccaacaaagaagatgaaagcaatgcctaagattgacagcgagggatttatgtgtggggctaacttcaatgttgactctcagacaaagattcaagtgatgcct

SEQ ID NO: 18526 - DNA, 341 bp, Glycine max
  unsure (1)..(341): unsure at all n locations
  Clone ID: LIB3049-034-Q1-E1-G6
ggcaacaagatggacaccacaaggaagtcttcagtcgcactgacattcgtaatggcgttcttcatcattgcatcagatatgtgtatggaatcagaagcaaggggacccattgtgcatgtgcattgttttagggacgatgactgcaaatatcgtccttgtagagctaaatgtggttgcgtatgtagtaatagctactgtacatgtgtattttcttttatggataatgttcttactcagtgcaccacaaattgaagtaacgaggtcctgtcatgcaatcancaagtgagaatgagaacaatanaggattgcatcttaattgtgtatgaaaaatcttaatttta

SEQ ID NO: 18527 - DNA, 341 bp, Glycine max
  Clone ID: LIB3049-034-Q1-E1-G7
gagagtagagcctaagcacacacctctcagtagccaagtccacacactctctcattctcatctctctcgccgtaccccaggaaattaaagagcagaaaaaatatggtttcccttgaacctattgagggcaacctcagatctagtgatgcaccttcaagtcctagaatatctttctcagcagagttcttagatgagaacaacttcatctccatcagtccaaacgctgagtatgaggggccagatcaagagaaggaatgtgagagagcaaggaatgctgctgagtttgagtttctctcaaacaacacgaggaacagcaacacagtggtaactgctgacgagct

SEQ ID NO: 18528 - DNA, 373 bp, Glycine max
  Clone ID: LIB3049-034-Q1-E1-G8
ggtcactcataatcaccaaatagaagccataaacaaatgaatgccatagcagcagaacaagtgctggagccatggcacaagctagacgacaaagtcgttttggtgacgggtgcttcctcggggctcgggcgagatttctgcatcgacctcgccaaagctggctgctgtgtcgtcgcggcagctcgtcgcctcgatcgcctcacttccctctgccacgagatcagccaccgatggccctcgaacgtcggtatccaccgcgcggtggcggtggtgcttgatgtcgccgccgatggccccgccatcgacagggctgtgcagaaggcctgagacgcctttggccgcgttgattccttgattaacaacgctggtgtca

SEQ ID NO: 18529 - DNA, 307 bp, Glycine max
  Clone ID: LIB3049-034-Q1-E1-G9
aggggaacatataggtgtcgtatcgatgattaacgagtcattgttgcaactagagcaggaagcattgcacatttaattaagcaatcgtgtgcacgaaattgctattccagagttatgagcgttaatggctatcagcataatacaatatttgcgatgagggacattaaatagtgggaagagcttacctatgatgacaggattttctcaattgatgaacgacgtccttgttactgtggcttcccaaagtgcctaagtatactaaatgatactgacgcagaagaacgagctgctaccctatatgcaccac

SEQ ID NO: 18530 - DNA, 379 bp, Glycine max
  Clone ID: LIB3049-034-Q1-E1-H1
gatagagggtggtctgcagtattgaaagagtctacagtacattgttagctttaatgatgagaaggttgcggctgggaatggacggtgacggcgaggagttgacggcgcaggagaccgctttgtatgaccgtcaaattagggtttggggagctgatgctcaaagaagattaagcaaatcacatgtcttagtctatggaatgaaaggaactgtagctgagttttgcaagaatattgttctggctggagtaggtagtctgactttagtagatgaccgggctgccacggaggaaatgctttcctccaactttctcatccctcccgatgaaaatgtgtatagttggaagaccctgcagaactttgttgtaattcacttaaagac

SEQ ID NO: 18531 - DNA, 342 bp, Glycine max
  Clone ID: LIB3049-034-Q1-E1-H10
gagagaaacctcttagctgacacatcgaagatcgttgacaagaacagcaaggtttataagcgaaaaggcgatttgagaaagatcgtcaccgaaagcctttcctctctcggttacgattcttccatttgcacatcgaaatgggacaaaaccccaacctaccctgccggtgaatatgaatacatcgatgtggttgtggaaggtgagaggttgataattgatatcgattttcgatcggagttcgagatagctcgatcgacgggaacctacaaggcgattcttcagtctctgccgttcactttcgttggaaaatcggatcgactctgccagatcgtcgccgccgtg

SEQ ID NO: 18532 - DNA, 377 bp, Glycine max
  Clone ID: LIB3049-034-Q1-E1-H11
cggcaaggggaaggcagcgaaagaccctaacaagccaaagaggcctccaagtgctttcttcgttttcatggaggagttcaggaaggtattcaacaaagaacatcctgaaaacaaagcagtgtctgctgtgggcaaagctgctggagcaaaatggaagaccatgtctgatgctgaaaaagcaccttatgtggcaaagtctgagaaaaggaaagtggagtacgagaagaacatgagagcctataacaagaaacaagcggaaggtcctactggtggggatgaagaagaatctgagaagtctgtatctgaggtgaatgatgaagatgatgatgaggaaggcagtggcgaagaagaggatgacgattagagaatggactgat

SEQ ID NO: 18533 - DNA, 242 bp, Glycine max
  Clone ID: LIB3049-034-Q1-E1-H12
ggggctttggtttcgtcgtttttgcggatcctaacattctagatagggttttggaagacaaacatgtcatagacggcaaaacggttgatgccaaaaaagccttctcaagagaggatcaacaaatttctgtcacttccagaggtggaaattccaattctggcatgaattctgaaaatggaggaaacatcaagactaaaaagatatttgttggaaggttgccctccaacctgactgaagaaaaa

SEQ ID NO: 18534 - DNA, 314 bp, Glycine max
  unsure (1)..(314): unsure at all n locations
  Clone ID: LIB3049-034-Q1-E1-H2
gaccttgttaaggagagaatatagtatggcacaatctagtggcaaaaaattggttgagtggctggttgcagcattattgttcattgccttgttgagtggtagtgcacatgctgttgcaatatgtaacattgactcaagtcaactgaacttgtgtcgtgctgcagttactggtcaaaaccctccaccacctgatgagaaatgctgtgcagttattcgccaggccaatttgcgttgcctctgcagttacaagtctatcctaccttcatttgggattaaccccannnatgctttggccttgcctgctaaatgtggtc

SEQ ID NO: 18535 - DNA, 305 bp, Glycine max
  unsure (1)..(305): unsure at all n locations
  Clone ID: LIB3049-034-Q1-E1-H3
gattactcattacatttcaaagtcccaacctgtggtgcgtctatatcgattcctttggtcattgccaagggataatanacaaatacaacaaagcaaactatcctcccaagtttagcaaagaaagttctaaatttgtcaccagttgccaatcaactctgaacaagggtgtctttttccttgagggttcacacattctcttcttgggagggttctgattccgaggttgaaaaatgtctgctgctgtgtcctccacaacctctcatttagaggaagagcttaaaaacaacaacaacaacaacaaacaa

SEQ ID NO: 18536 - DNA, 354 bp, Glycine max
  unsure (1)..(354): unsure at all n locations
  Clone ID: LIB3049-034-Q1-E1-H4
gaggtgtagcagcagagagtgcggtaggctcttccgagacccgaagcagccatggggatcgatctcaaggccggaggtaagagcaaaaagaccaaaagaacagcacccaagtccaatgatatctatctcaagctcttggtcaagctttatcgcttccttgttcggagaactggcagcaacttcaatgctgttatacttaagagattgttcatgagcaaggttaacaaacccccattgtctttgtcaaggttgattaagtatacgaaagggaaagaagataagattgcagtgggtggtgggtctataaccggtgatantcgtgtttatgaagttccacattgaaagttacagcac

SEQ ID NO: 18537 - DNA, 266 bp, Glycine max
  Clone ID: LIB3049-034-Q1-E1-H6
gaaaggagttaaagagtaaaagcaccgtctccgtctccactctcggcttcttcttcgttgcgctttttcccaaaaccaattgcatcactctcgtccgttaccgccgctgccctagaccaccgcaagcgacgtcgcacaccgccttcatccgttagggcaaaaatgagtcgaggaagtggaggtggatacgatcgtcacatcactattttctcccctgaaggacgtctctttcaagtggagtatgctttcaaggctgtgaaggctgc

SEQ ID NO: 18538 - DNA, 368 bp, Glycine max
  unsure (1)..(368): unsure at all n locations
  Clone ID: LIB3049-034-Q1-E1-H7
gagagctgcaagggatcaactgaggagagtgagagaaaagagaagagaagatgacaacacgctccaagaagaacaggaagaagaggggccacgtcagcgctggccacggtcgaatcggaaagcacaggaagcaccctggaggacgcggtaacgccggaggcatgcaccaccacaggatcctcttcgacaaataccaccctgggttcttcggcaaggtangaatgcgctattttcacaagcttcgcaacaaattctactctccgatcctcaacatcgacaagctgtggtcnctggtcccgcaagaagtgaaggacaaggcctccaaggagaacaaggcgccgctcatcgacgtcacgcagttcgggtac

SEQ ID NO: 18539 - DNA, 377 bp, Glycine max
  Clone ID: LIB3049-034-Q1-E1-H8
ggccataagaaagagcaagtcgaaaagttcatctctccctctctctcacacatcgcagccatgagcctcttcggtataggcagaaaccagagaacattccgcccgaaaaaaagtactccttctggaagtaagggagctcaacttagaaaacatattgatgccacgttgggtagtggaaatctgagggaagcagtaaagctacctcctggggaggatttaaatgagtggctagctgtcaacactgttgatttcttcaaccaggtgaatctgctttatgggtaccttacagagttctgtactcctgagaattgtcggacgatgtctgcaggacccaagtatgaatatagatgggcagatggtgtacaaattaagaaacc

SEQ ID NO: 18540 - DNA, 391 bp, Glycine max
  Clone ID: LIB3049-034-Q1-E1-H9
ggtcctcactcgtgtgcgcgtctatcccaaagagagtgagcgagtcagtactgagtagggtttcaaatttccaatcggaatcggaaaaaatgggcggcggcggcggcgatcacggccatggacacggacacggcgatttcaggaacaaggtctggagtatgagcggtggcccttactgccgtcccaagcactggaagcgcaacaccgccattgccatggtcggcgtcgttctcatctgcatccccatcgctatgaaatccgctgaactcgagcaacggccacatcaccctgttcgccccatcccttctcaactctggtgcaagaactttggcactaaagactataatgattcatgattcatcaattgcataacttgagtggatgttcacat

SEQ ID NO: 18541 - DNA, 342 bp, Glycine max
  Clone ID: LIB3049-035-Q1-E1-A10
ggagcaagaggaagaaacaacctcataatcgctttcttgtgttcgattagatattgccttcagaccagagtctgagtcctctgagacgttccttcagtccttcacctcctttctctctaggcgcaaaacctcgtactgtttgtggcggctaaggatgtcagggaaaggggcgaacgggttgatcacatgcaaaacctccgacgctaacaacatagacaatgacaagaggaaacccatctcacgttcttcacatgccggccttcagttcccagttggccgtatccatcggcttttgaagtcaaggacaaccgccaacggtagagttggggccacagctgctgt

SEQ ID NO: 18542 - DNA, 269 bp, Glycine max
  Clone ID: LIB3049-035-Q1-E1-A11
agaagggggagaagtggaaagggagcctcagtaaccgtttcctgtggtcgattagatattgccttcataccagcatctgcgtcctctgcgacgttccttcaatccttcacctccattctctctaggccgagagtctcgtactgtttgtagacgctaaggatgtcagggaaaggggctaacgggttgatcacatgcaaatcctccgccgctaacgagatagacaatgccaagaggatccccatctcaccttcgtcacatgccgggcttca

SEQ ID NO: 18543 - DNA, 304 bp, Glycine max
  Clone ID: LIB3049-035-Q1-E1-A12
gaagggacgaaaacgaaacgcgaacggataacagtagagtaagagtagcaggagcagaatgaaagaaagaacgaaaatggcgagcggcgcctcaccgcaactgcaaatgaggttgaagtcctctttcatcggagatcgtctcttacgctgttcaacttcaaggcaccaacctcttcctcaactattccgttacaaccctggaaccaagcatgtttcgatgcagttatctagaacactttctggcttgaccaatctcttttttaatagaagaaatttggatgaattgcctaacagcaagcgtaaa

SEQ ID NO: 18544 - DNA, 249 bp, Glycine max
  Clone ID: LIB3049-035-Q1-E1-A2
gaagtcatacagaggttccgatgagtagtaaattctcgcactaaagagctttcatgagccacactgctcataattccacaagacagaaatgctcctagcgaatcaacttacatggagcgcttcaacctccatctgcactaacgactgggccatctacatacccatatccgttaaatactattacagttgcacatcctgaaattaggcaataccaacagaatcacgatcatgtaataatgaaactcccct

SEQ ID NO: 18545 - DNA, 271 bp, Glycine max
  Clone ID: LIB3049-035-Q1-E1-A3
ggagcaaaaccctaatccctatttttcttcctcagtagtgtcatttacgcttctcttctctgcagcaactatgcctaaccctaaggtcttcttcgacatgaccatcggcggtcaatctgctggtcgcatcgtgatggagctctacgccgacgtcactccccgcaccgccgagaacttccgcgcgctttgcaccggcgagaacggcgttcggcggagcggcaagcccctccagtaaaaaggctcgtccttccagcgcgtggatccgagtttc

SEQ ID NO: 18546 - DNA, 389 bp, Glycine max
  Clone ID: LIB3049-035-Q1-E1-A4
ggattcagccacagtttcggaggagaagaaaatagtcgttcgagatggcccgtacgaagcaaactgctcgtaagtccacaggaggaaaggctcctaggaagcagcttgcaaccaaggctgcacgtaagtctgcaccaactactggtggtgtgaagaagccacatcgttaccgtcctggtaccgttgctcttcgtgagattaggaaataccagaagagtaccgagcttttgatcaggaagctccccttccagaggctggttcgtgaaattgctcaggacttcaagactgatctgcgtttccagagccacgccgtgcttgcattgcaagaagctgctgaggcataccttgttgggctctttgaggacactaacctgtgtgccattcacgct

SEQ ID NO: 18547 - DNA, 249 bp, Glycine max
  Clone ID: LIB3049-035-Q1-E1-A5
gaccaacaacacgtagtattatttcattgatttctccctcttcgctctctctcagtgaccagagacagatgatgatggagatggcgaagcgaaacgctgtcgttgcggcactcgcggcgttggtgctactcgcggcgagtgtggcggtggatgctcaggagaactcggacgtgaagacgctggtgaagtacaagcacgggaagaagtactgcgacaaaggatgggaatgtaagggctggtcaatttact

SEQ ID NO: 18548 - DNA, 337 bp, Glycine max
  Clone ID: LIB3049-035-Q1-E1-A6
ggtagttccaccgagtagcaacaatgtcgaagcgaggtcgcggaggatcggcgggaaacaagttccgcatgtcgctgggtctgccggtggcggcgacggtgaactgcgccgacaacaccggcgcgaagaacctctacatcatatcagtgaagaggatcaagggtaggctgaaccggttgccgtcagcttgcgtcggagacatggttatggccaccgtcaagaagggaaagcccgatctccgtaagaaggtgctgcccgccgtcatcgtccgccagcgcaagccttggcgccgaaaggacggtgtttacatgtacttcgaagataatgctggtgttat

SEQ ID NO: 18549 - DNA, 364 bp, Glycine max
  Clone ID: LIB3049-035-Q1-E1-A7
ggaggataatgtgagcaaacacaatatacaaatcttcaacaggttgtttttcttggaagaggacctgcgtgctggcaaaatattcaacatgaagttcgtcaacaacacaaaagccacagtcccgttgctaccgcgccaaatttcgaaacaaataccgttctcagaagataaaaagaagcaagtgttggcgatgcttggcgtggaagcgaactcaagcaacgccaagatcgtagcggagaccattggtctttgccaagagcctgcagcggagggagaaaggaaacactgcgcgacttcgttggagtccatggttgatttcgtcgtttccgcgctcgggaaaaacgttggtgctttctcaacagag

SEQ ID NO: 18550 - DNA, 389 bp, Glycine max
  Clone ID: LIB3049-035-Q1-E1-A8
ggcagcatggtgtcttcctcccaacacattctggtcaccggtggtgccggtttcattggcacccacaccgtcgttcagcttctcaaagctggcttcagcgtttcaataatcgacaatttcgataactccgtcatggaagcagtggaccgcgtccgccaagtggttggccctctgctttctcagaacctccaattcacccagggcgatctccggaatagggatgacttggagaaactcttctccaaaacaacatttgatgccgtgatccactttgctggcttgaaagcggttgctgaaagcgttgcgaagccccgtcgctattttgattttaatttggttggcaccatcaacctctacgaatttatggcaaagtataattgcaaaaagat

SEQ ID NO: 18551 - DNA, 378 bp, Glycine max
  unsure (1)..(378): unsure at all n locations
  Clone ID: LIB3049-035-Q1-E1-A9
ccaagccttcattacggttgcaaaagaacaacaaaaggggttttaattgaaaaaccaaaggaattaccggaattaaaaatgcaaatctcgtgaaaatctgaaggaaactaaccctcagtcagagagcgacacatcgacaatgtcaaagccaagattcaagacaaggaaagcattcctccggattagcagcgtttgattttcgccggaaagcagcttgaagatggaaggaccctggccgattacaacatccagaaggaatcaacccttcatctcgtcctcaagcttcgtggtggcatcattgagccttccctcatggctttggctcgcanatacaaccaggacaagatgatttgccgcaagtgctatgcncgtctgcat

SEQ ID NO: 18552 - DNA, 395 bp, Glycine max
  Clone ID: LIB3049-035-Q1-E1-B1
gatgtggtagtggggtaacgatacgtaataagttctatcattgaggaagtttcctgtgcatcgtctccgaaaatgaacgacgcagatgtctcaaagcaaatccagcagatggtgcagttcatccgccaggaagctgaggaaaaggccaacgagatctctgtctccgccgaagaggaattcaatatcgagaagctgcagttggtcgaagccgacaagaagaagatcaggcaagaatacgaacgcaaagagcgccaagttgaaattcgcaagaagattgagtactcgatgcggctaaatgcttctcggattaaagttcttcaagctcaagatgacgtgatcagttccatgaaagaagctgcatccaaggaactgttgaatgttagtcatcatcatca

SEQ ID NO: 18553 - DNA, 291 bp, Glycine max
  Clone ID: LIB3049-035-Q1-E1-B10
ggttctaatgtgtgattgtctgttgttgtaaatcgttcatcatcatatgtgtcagtgttgtgtatgtttgatctctcaccggaaaatgtcttgctgctgtggtaactgttgtttctgaagctcttgcaagtgctgcaacggctgctgaggctgcaagatgtacccagacttgagctacaatgagtcaactagcatcgagatcttggtcataggagtggcacctgttaatgctcaatttgatggtgctgaaatgggtgtgcccgctgacaatgattgctgcaaatgtggacc

SEQ ID NO: 18554 - DNA, 368 bp, Glycine max
  Clone ID: LIB3049-035-Q1-E1-B11
gaactaagtagagaataaaatcaaatcatgagagcatgcatatgaacatgatgatgaagaacgtgtgtgggtttgcaatagtgatggtggcagtgcagcttctggtggaggtgagtcccaaagcagaggctgtgacttgtacccctgtggagctgagtccttgtttgggggcaataacttcctctcaaccaccatcaacaatttgttgccagaaggtgagggaacaaaggcaatgcctctgtggttacctcaaaaacccaagtctaaggccatatgccaattctcctggctccagaacggttgctaactcttgtggggttccctttccaacttgtcaattaacttcatatcatatcatatatagtatg

SEQ ID NO: 18555 - DNA, 353 bp, Glycine max
  Clone ID: LIB3049-035-Q1-E1-B12
gatcgctttcagcaggcacgcagattctctccatccttctctctatccagattttgattctttcgattaaacccgcaatatccatctcaccaaaaccctacgcaactcatccatgacgcttggcttaggacgatgcagtgtcctggttcctaggaacttcagattgctggacgagcttgaacgtggagaaaaacgaattggagatggcacagttagctatggaatggatgatggtgatgacagttacatgccctcttggactggcaccactaatggcccccataatactgtacatcaacgaagaatttatcaattgaaactgctttgtgagtaacacttcccagaaaaacccc

SEQ ID NO: 18556 - DNA, 306 bp, Glycine max
  Clone ID: LIB3049-035-Q1-E1-B2
atcaacgacaggagaggcatgcaacaggcgtctcagcatctcacatacgattccatcctcggaaccttcaatgctgatgtcaagcctgttggcagcaatgtcatctccgtggatggaacagaaagcacagttgtttctgatcgcagccctgcgaaccttccatgggacgacttggggatagacttggtgattgaaggaacaggggtgtttgtatacagagaaggtgcagggaaacacattcaagcaggatctaataatgtgctcatcaatgctcctgttaccggagatatcctcacctacatcgtt

SEQ ID NO: 18557 - DNA, 331 bp, Glycine max
  Clone ID: LIB3049-035-Q1-E1-B3
gagaacctgcatggcccaacgatcttttatatatttttccagtagtaattctaggtactattgcctgtaacgtaggcttagcggttctagaaccatccatgattggggaacccgcggatccatttgcaactcctttggaaatattacccgaatggtatttctttcccgtatttcaaatacttcgtacagtgcccaataagttattgggcgttcttttaatggtttcggtacctacaggattattaacagtaccctttttggagaatgttaataaattccaaaacccatttcgccgtccagtagcaaccaccatctttttgattggtactgt

SEQ ID NO: 18558 - DNA, 364 bp, Glycine max
  Clone ID: LIB3049-035-Q1-E1-B5
gggtttatgtgatgtcttcgtctagtcacaattccaaattcaagaaattttttaaacttgacatatctgctatcacattttccgtttcctgcgattcgactatggtcgatgaaaagctttcataaccggtgcttaaacgtgagcagcttgacgaactcgtgagtagtctatattttgaacaacgaattctagatctccgacttcttcaagacctcgagaacaatgatgcatgtaggaaaaatgggagcctgaaaaagttaaatgaccagagtgatgtcagtggatttagaacttgctccataactcagcatgattcgcttccgaatcagaagtgcttgatgaatcaagatcatgtgattcaaga

SEQ ID NO: 18559 - DNA, 363 bp, Glycine max; identical to SEQ ID NO: 7753
  Clone ID: LIB3049-035-Q1-E1-B6

SEQ ID NO: 18560 - DNA, 212 bp, Glycine max
  Clone ID: LIB3049-035-Q1-E1-B7
gtcatccaagaacctgagttagaccaacggaatttgtatctaggtaattggggttacaacacccggaaagaaagagagggtgctgcagctatccccagaattcatgttcttgggctctccgacttcagcaagaagttaaaataggggtcttcatttcattggattgtcaactgtcagtcattgaaccacatatttttcttccagctcatttt

SEQ ID NO: 18561 - DNA, 290 bp, Glycine max
  Clone ID: LIB3049-035-Q1-E1-B8
gacaatccaacgggaaaacgcgtcatcataaatgccgcccatcaacttctcatacccttttattcattccattcgtttctacggtattcttttctttgccgagaaattcagatactgcatttcgatccacattgaccacgtcggtatccaggttggaaatgcctgctgggaactctattgccttaaacacggcaatcaccccgatggacatatgccgagtgacaacatcgttagcggatgatatgacgccttcatcaaatttgtcagcgagaccggcgccggaaagcacg

SEQ ID NO: 18562 - DNA, 347 bp, Glycine max
  Clone ID: LIB3049-035-Q1-E1-B9
gaatgttggttggaaatttaagtataactaccgaatggacgggacgagcactgacagatgtcaactcgcgctgaacttttccttccgttcaatcgccgccatgctcatcctctccgtcacagtcacctcaaccgatcatgttctaaacgtctcgctctcaggacatctggagatgattcaacattctatagcttcaacattttgtgagtatagtctgcgcagatgtaaaatggacttgcctaaacgtgatacacatctgactgttgctgtgacgaatatacattgagagatctgcacaatgattataaactcatggtgccaacctctgttggaagctcttcattttc

SEQ ID NO: 18563 - DNA, 250 bp, Glycine max
  Clone ID: LIB3049-035-Q1-E1-C1
acagaaaggggagagagagtgacatggaatgagagggagcagacggttctattagaagattcaaagatgtgagactcctcctccccatcaatgcgtcttgaataacaacgatacaaggggccttaaacggtaatcactggacgttcatgggaatggtttttacgcatgtacgcaaacagggtttaacacttccatgagaatccgcagcaattccagcagtcaattttaccttctgtgatcgagaaataca

SEQ ID NO: 18564 - DNA, 361 bp, Glycine max
  Clone ID: LIB3049-035-Q1-E1-C10
cgggattgtgattcattagcacatttgcaaagtgttatttttctttttttctcatttgcactgcaaattgcaatggcttccaacaaggttattgccaccatcatggtgctttctctccttgcctactcaagatcattcaccaatgcatgtggcacatgccacccataacctaccccttctcctcctcctccatcaggaaagtgccctaaggacacatttaaactaggggtgtatgcaaatattctaggtcttgttactgttgttgttggctcacctgtctccagcaagtgttgtgcattgcttgaaggtttggatgatttggaagctgcactttgcctttgcactgctattaaggccaatg

SEQ ID NO: 18565 - DNA, 141 bp, Glycine max
  Clone ID: LIB3049-035-Q1-E1-C11
gatcgcaaagcggcctcaacatctgacacagactctatccctaatccctatcttcatctctgctctctccgcacgctttggagcctctgatggcagtttctggttatgacttgtacgtgttattcgcgtgctatccgtgca

SEQ ID NO: 18566 - DNA, 328 bp, Glycine max
  Clone ID: LIB3049-035-Q1-E1-C12
gatagcgcagttgcaattcattggattacaaatttttcccaaagctgatcgagaagccagccaggccagaaagagttgaagaagaatgggaagggggaagatcgagatcaaaaggattgagaacacaacaaatcggcaagtgaccttctgcaagagaagaaatgggcttctgaagaaagcttatgagctgtcagtgctgtgtgatgcagaagttgccctcatcgtcttctccaaccgtggccgtctctatgagtactccaacagcaacataagatcaacaatacagaggtacaaaaaggcatgttctgatcactcaagcgcgagcact

SEQ ID NO: 18567 - DNA, 252 bp, Glycine max
  Clone ID: LIB3049-035-Q1-E1-C2
ggaaatcgagagaacgagtgaggagagaattacagagcattttccagcacgagttacacgagggtaatcgaaccctctctttcgctcggaagctgcgtttaatatcttactcgccttagattgttcttctctttcattatactgttctcttttcgatttgagggaacagtacgagagtgtgaggatcggttagcccaagtgcacaggtattcactagggtaatggagtctcacgatgagactggatgcgagg

SEQ ID NO: 18568 - DNA, 367 bp, Glycine max
  Clone ID: LIB3049-035-Q1-E1-C3
ggcagcaacagcagcattcactgaaagcactcagtagggtttgcggtttcagagtttgtgacgcacgcatccatggccaccaccaccaacgccgccgcagccccgccgcgccagctctcccagaaggaagccgacatccagatgatgttagccgccgacgtccacctcggcaccaaaaactgcgacttccaaatggaacgttacatcttcaagcgccgcaacgacgggatttacattattaaccttgggaagacatgggagaagcttcagttagcagctagggttattgttgcaattgagaaccctcaggatatcattgttcaatccgcaatgccttatggtcaaagagcggttctgaagtttgctc

SEQ ID NO: 18569 - DNA, 391 bp, Glycine max
  Clone ID: LIB3049-035-Q1-E1-C6
ggcgagagagaatcgtaacaaaagcggtaaccggagtaagttgtctctacgatttgagccatggcaacaacaacaccctcaaaccgatcatcagaggcgtttgctctcatggcaatcctcagcactctgctttgcacggcggtggcggcgaaggagagcgtgtacgagatactccccaagtacggcctcccgagcggtctgttaccggacaccgtcaccgactacacgctcgacgaggacgggcaattcgtcgtcgttttggcgaagccctgctacatacagttcgattacttagtttactacgagaccaagatctccggcaagctcagctatggctccatcaccaacctcaagggcattcaggtccagcgcctcttcatctggttcaacg

SEQ ID NO: 18570 - DNA, 337 bp, Glycine max
  Clone ID: LIB3049-035-Q1-E1-C8
gatagcaaaatcgtttctccaatttaatcaccattgtacaacccaattcccttcgtcgttttcgattaagagagcaatggcacgtaccaagcaaaccgctcgcaagtccaccggaggaaaggctccgaggaagcaattggcaaccaaagccgctcgcaagtcagccccggcgaccggcggagtgaagaagccccaccgcttcaggccaggaacggtggctctgagggagattcgaaagtaccagaagagcaccgaacttctgatccgaaaactcccattccagaggctcgtcagagaaatcgctcaagatttcaaaaccgatctccgctttcagagc

SEQ ID NO: 18571 - DNA, 332 bp, Glycine max
  unsure (1)..(332): unsure at all n locations
  Clone ID: LIB3049-035-Q1-E1-C9
gatcacatttaaaatcaaaacaacaaattttcagactcaacaagcttcgaaccaaatcttattgagaaaatgtctggtcgtggaaagggtggaaagggtttgggaaagggaagtgccaagaggcacaagaaggttcttcgtgacaacatccagggcatcacgaaacctgcgattcgtatgttagcgagaagaggtggcgtgaagaggatcagtggtttgatctacgaggaaaccagangagttctgaagatattcttggagaacgtgattcgcgatgctgtgacctacactgagcacgctangaagaagacggttactgctatggatgttgt

SEQ ID NO: 18572 - DNA, 293 bp, Glycine max
  Clone ID: LIB3049-035-Q1-E1-D1
ggaaatcgagagaaagagtgaggagagaattacagagcattttccaacacgattacacgaccgaatcaaaccctctctttctctccgaagctgcgtttaatatcttactcgccttagattgttcttctctttcattatactgttctcttttcgatttgagggaacagtacaagagtgtgaggatcggttaacccaactgcacaggtgttcacaataatatagtggtctcacgatgagacaggggatgacacgcccgagagcgccacactctgtgctaaaaaatgtggggtctc

SEQ ID NO: 18573 - DNA, 299 bp, Glycine max
  Clone ID: LIB3049-035-Q1-E1-D10
gatagtcagcctttgcgttagatagagaacagaccatgtgtgagagagagaattgtgaagcacgggaagatctataaacgtgttatctgaccaaactttggaacatcacgcttctcactcctcatacgtttcacttgtgacaacctctaagtgacaagagtggcacattcaatcttttagtggcaatttggcgatatatcttaagttctgggctgtgagtatattagatcaaatgtccttccgcagcatagttcgtgatgtaagggatggctttggaagcctatcaaggagaagttttg

SEQ ID NO: 18574 - DNA, 345 bp, Glycine max
  Clone ID: LIB3049-035-Q1-E1-D12
aggatggaaaacgctaaatgctgatgctggctcttatgggtttattcattctggctgtgctgttagtcgtttcagcaatgtcacagactcattctgttgcgggggatgggcagtgtcatggccttgttatgaacttctattaggaatcatgctctcgtgctgtagatatcatctcagttacgtctagcttctctacatgtgccacatgaatactgctttctcctgactcacgaacatcatccatgactgtgctgttcagagttgtgatgcgtcactgttgctggactccacaagaaggagcttgtctgacaaagaagcagatataaacgttgggttgataaattt

SEQ ID NO: 18575 - DNA, 347 bp, Glycine max
  unsure (1)..(347): unsure at all n locations
  Clone ID: LIB3049-035-Q1-E1-D2
ggattggtgatgtagtacaacttgtagatgagaaaaagtattaccaatcttgctgtgttgatggagtaacatataggctgcagggtcatgctcttttccccaccggccatgggaaactaactccttctaaactccagtctatgtgggaagattgcaaaactgggttaaagtgggttaaggtgacaaactgctactttcctgatgatttgcctgngaatattggtcatccgtgtatatctgaggtcaacgaggtttatgaatctaatagtgatagaactgaaatggctagctctattcgagggccatgtgaagtcctcncatctgataaatttaaacaagagaatgac

SEQ ID NO: 18576 - DNA, 371 bp, Glycine max
  Clone ID: LIB3049-035-Q1-E1-D3
gacagctcttggctttagcagattccaattcccaattcccaattcgaaacccttattcctttcaaagaatcaaattgagtgatcgtgatggcaccaaaggcagagaagaagccagcggagaagaagctcgcggaggagaagaagtcgacggtgggagacaaggctccggcggagaagaagccaaaggccggaaagaagcttccgaaggagggaggcgccggcggagaagggaagaagaagaagagaaacaagaagagcgtggagacatacacgatctacatcttcaaggttctgaagcaagtccaccctgacattggtagctcaagcaaggccatgggaatcatgaacagcttcatcaacgacatcttcga

SEQ ID NO: 18577 - DNA, 343 bp, Glycine max
  Clone ID: LIB3049-035-Q1-E1-D4
gctcgacgagtacctcagtgtgagcgttctgccatactcctgcgttcaatcgacttcaccatcttcttcatcttctgctgtctcccccatagatggattggcaagggcaaaagctagcggagcaactgatgcagataatgctgcttgcatttgctgtgattgcatttgttggtggatatgtcatggcttctttccaaatgatgattctcatatatgctgggggtgtggttttcaacaccttgctcactgtccccaattggccccttttcaatcgccgtcaacttacgtggttggatcaactgaggtggagaaacatcccaagccacaaccatctgtcaatgta

SEQ ID NO: 18578 - DNA, 328 bp, Glycine max
  Clone ID: LIB3049-035-Q1-E1-D5
gatagcacaagattactcatacgcaccttgcagattgacatttctctcacagtcgtctttcatggcacgtacaatgaacaccgctcgcatatcgaccggtgggaaggctcctaggaggcaactcgcaacgaaggctgcaagattctctgcaactatcaccagtggagtcaagaagcctcatcactaccatcatgcaactgttgcccttcgtgagatcagaagatgcagaatagcaaatagcttctgatctggaagcatccctttcagcgatttgtacgtgaaatcgcgcacgacttcaagattgctttgacgttccagagtcacgcgg

SEQ ID NO: 18579 - DNA, 345 bp, Glycine max
  Clone ID: LIB3049-035-Q1-E1-D6
gacaacaaaatttgccaattgccatttcaatcctcagtttctttcttcaacgtttccatcatacacagatcccaatcctctctcaagccctaatttcccctcatttccatggccacagaagagcccactgtcgcggtggaacccgctcccgaacctgcctccgccgatcctcccccggaggagaaggaggagaccaaacctgaagccaaggctaagaaaaccaaggagcccaaacctaaaaaggtttccagacctcgcaaccctcccactcatccttcctacgaggagatggttaaagatgcaattacctcgctgaaaggagaaaacggtttcgagcaatacgcg

SEQ ID NO: 18580 - DNA, 365 bp, Glycine max
  Clone ID: LIB3049-035-Q1-E1-D7
cattgcttggagcacacagtgttggtcgaacccactgtgtcaacttggtgcaccgtttgtacccacagattgatccagctccgaaccctgaccacgtccctcacattctgaagaagtgccctgatgccattccagaccctaaggccgtgcaatacgtgagaaacgactgtggcacccccatgattcgagacaacaattactacagaaatagattggacaacaagggcttgttgatagtggatgaccaactagccaatgacacgaggaccaagccttatgtgaagaaaatggccaagagccaggactatttcttcaaggagtttcctagagccattactttgctctctgagaacaaccctctcact

SEQ ID NO: 18581 - DNA, 353 bp, Glycine max
  Clone ID: LIB3049-035-Q1-E1-D8
tatctggggagagaatgtttcctgcagatcgttctttggtcaggtctatggtccgacagttttctacttctattttaactcctggagctgatgatagtgcatttccatctgacttattgtccaaaaagactctggcaacatctgagcgtactatagggctttgccaggatcgtttaattccagttaccaactttcataatgaagacaagggctatatggttttacctggatatgtttttgatttacctattcggaaggacattattcatcgtgttgttacgtggcagcttgcaaaacgacaacaggggactcactcaacaaagactatcagtgaggtcaatgggactgggaga

SEQ ID NO: 18582 - DNA, 261 bp, Glycine max
  Clone ID: LIB3049-035-Q1-E1-D9
gagagtcagcccttgagttagatagagaacagacaagtgtgtgagagagagaattgtgaagcacgggaggatctaaaaacgtgttatctgaccaaactttggaacatcacgcttctcactcctcttaggtttcagttgtgacaacctctaagtgacaagagtggaacattcaatcgtttagtggcaatttggcgatatatattaagttctgggctgtgagtatattagaacacatgtccttccgcagcatagttcgtgatg

SEQ ID NO: 18583 - DNA, 304 bp, Glycine max
  unsure (1)..(304): unsure at all n locations
  Clone ID: LIB3049-035-Q1-E1-E1
gaccgcacagtttctgaattctgggtgttgagtttcattttctccatttttttttctctcgcttggatgtgtgagtttcaatccaggagatcagggattacactatatttgagaatctgaaagagtgactatgtggtctatttgagcgtgtgaagtttgtgtttgtgtgaaaggtgtgaggcttattattcatacaagagtttgtgtctgttcacagaactgatggtggtgtggtgtgtgtcggtggcaatgtacgcaactttggtggagaggggtaganagagagctggacatgtcaagaaag

SEQ ID NO: 18584 - DNA, 327 bp, Glycine max
  Clone ID: LIB3049-035-Q1-E1-E10
ggtctcatggtattgttagcaggcattagcctatcggcgcctgctttctgtggtcgtgtgttgcagcatgatggagtcccaagtgaagcatgcacttgttgtcaaagttatgggtcttactggatccacacgacatgtgacccacgttacagtggagtttttggatgatcagacatgtcatatcatgaggaatgtgaaacgacatgttagacaaggagacattctcatcctactcgacatctaaagggaaccaagatgattgcgctagatggtcacgattgtttggcatgtctccaaattcgaacatgagcaatatgtatcttgata

SEQ ID NO: 18585 - DNA, 293 bp, Glycine max
  Clone ID: LIB3049-035-Q1-E1-E11
gacagagaatgaattttatatcccctgactaaggttgaagaaaaccccctttttcccctttggcttgaggattcggcagagtatagagtacagaggagtgtgtaaagaaacgcaacttgggggttgggttgttcttttctttgttattgtttttttttttttaatgtatgttgtgttttgaaataacttgccatttggcaactctagttagaaacaatgtttgatgtataagtattagtgtataacttgaatgttctctttttcatgaatccaaaaagctgttggtttgttgc

SEQ ID NO: 18586 - DNA, 368 bp, Glycine max
  Clone ID: LIB3049-035-Q1-E1-E12
gaatcgacgtttttatttatttatttttcgccgttctttgttgcgagcttgtgtttctatctatcgctggcctctttggtagtattttcaatcttcaaaaggtttagggttttacgatttctgaatctcaacgacgttttggcgcttagaatggaagaagaacaatctgtgaacggcacgatgtctgggtccaaaacgacgcaggagttggcgatggaagggcatgagtacttggaagaaaccatagagaacgctttccagatcctctcttccatgaacgacgagctctgcaaccccgttttatggtctacctctccctccagctcccccaaatgccgacgccacttccgacaactccaaccaccaag

SEQ ID NO: 18587 - DNA, 162 bp, Glycine max
  Clone ID: LIB3049-035-Q1-E1-E2
acgcgtcaattcagtcgtgagaccacgagtccgtggagctgttagaagatcacaatatgggtttgttcgtgacatgaggatccctcgcattataggatcgcagagtattacgatttgtgtgagacgtgtatgtggcttattgatttgtagtgtcgttactca

SEQ ID NO: 18588 - DNA, 196 bp, Glycine max
  Clone ID: LIB3049-035-Q1-E1-E3
tgcgatgcgacaacacaacggggaggggttgaagtcgagacagctcagaattcagcaagtgcggtatggacagcagagagcgaaatacttcgagatggcccgtacacaacaaactgctcgtaagtcaactggaggaaaagctcccatgaagcagcttgcatacaaggctgcacgtaagtctgcaccaacaactggt

SEQ ID NO: 18589 - DNA, 384 bp, Glycine max
  Clone ID: LIB3049-035-Q1-E1-E4
acaatttagaacttcataatactgaaaacaaagtagcatagatattcaaggtaagatgggagagaagaaagttttggctcttgtcatgcttgttgtggcttatggtttggcagtaacaacattcactgcttgtcaacttcctccaacgtgcaatgggtatgagccattaatttgccaatgtgtgccttatttggttaatccaggcccttctactccaactcctcattgttgtgatggagcaagagtggcgattcatagagccaacaatgctcaagctattaagaatttctgtagttgtttggaggatgctggaccaaatttatattttcaaaagcagagtttggtgccacttccagcagcctgcaatattaaaccttcctttga

SEQ ID NO: 18590 - DNA, 305 bp, Glycine max
  Clone ID: LIB3049-035-Q1-E1-E5
caacggggaggcgcgcacgttcagagagcgagagaacaagaacataagggaaccacagcggcggtaacagaagaacaagcagagaatgggtcgagtgagaacgaagacggtgaagaaatcctctcggcaggtgatagagcgtcactactcgcgcatgaccctggacttccacacgaacaagaagcttctggaggaagtggcgataatcccgtcgaagatgctaaggaacaagatcgcggggttctcgacgcacctgatgaagcgcatccagaaggggcctgtgcgcggcatctccctcaagctcc

SEQ ID NO: 18591 - DNA, 389 bp, Glycine max
  unsure (1)..(389): unsure at all n locations
  Clone ID: LIB3049-035-Q1-E1-E6
cctccccgaaaacgatgtcgttcgaggtggaggaggaggaggcgttcgagcacacgctcctggtggtgcgcgaggtgtcggtgtacaagatcccgccgcgaagcacctccggcggctacaagtgcggcgagtggctccagtccgacaagatctggtcggggcggatccgcgtcgtgtcccggcgcgaccgctgcgagattcgcctcgaggatccgagctccggtgagctcttcgccgcctgcttcgtctacgccggccagcgcgagaccgccgtcgagcccgtcctcgactcgtcgcgctacttcgtcctcaagatcgaggatggccaatgcaagcacgccttcattggcctanggttcaatgagcgcaacgaggccttcgatttcaac

SEQ ID NO: 18592 - DNA, 384 bp, Glycine max
  Clone ID: LIB3049-035-Q1-E1-E8
aatggccactctctttaacttcaactccacccttcgcccctcttgttatcatccctcctcaccctcctcatcttatccccacttcttcaagacactctccacaactttcttgggccacaccgtaaccctcaaatatgctgccacttccgcaagcatccctccccgttcactctccgctcacatgtcatgggacggtcctctctcttccgtcaaattgatcattcagggtaaaaatctcgagctcactgatgcagtgaagcagcatgtggaagacaaagtggggaaagcggttcagaagcacagtcacctagtgagagaggttgatgtgaggctttctattcgaggaggaggtgaatttgggcgaagacccagaactcgtagatg

SEQ ID NO: 18593 - DNA, 226 bp, Glycine max
  Clone ID: LIB3049-035-Q1-E1-E9
ggggttttgtgctgttgatcactgcttcatcgcttcaataatactcccgattctctatcctgatctacgattccattgtgaagactcatggaatgggagctgcattcatacttaagtctcagtgcatgaagcaaaggtaggctgataagtcatacaagaaatcccatcttgcgaattactggacgaaaccttttgccggttcatcacatgccattggaattgtcct

SEQ ID NO: 18594 - DNA, 274 bp, Glycine max
  Clone ID: LIB3049-035-Q1-E1-F10
ggcgagtaagacaaatgcagcatttcgtggatttgcaagagaattcggagttgggtgagtcgaattcatggctttcagcgaaagagcagtccggtgcggcacccaacaccaatttggatcgcgtcctcttcaacgacctcgtcgagattgtccctctcgttcagtcactcatcgatcgtaaagcaagccgttcattcacgcggcgtggttccatgatctacaccgaagacacccacaagagaatcattgtccaaaagaacaacagattcaaaaa

SEQ ID NO: 18595 - DNA, 364 bp, Glycine max
  Clone ID: LIB3049-035-Q1-E1-F2
ggtgtgagttgagtctgtggtgataatgatgatgatgatgtgttccatgtggatgtgggttgtccttgtggccattgctggtgcccttttactcctaagatctatcctcaagaatgtaaattggtggctctatgaatccaaattgggtgtgaagcagtactctttgccaccatgtgacatgggatggcccttcattggcaacatgtggtcctttctcagtgctttcaagtccaatgaccctgattccttcatctcctccgttgtctccagattcggaagaactggaatgtacaagaccatgatgtttggaaatccaagtataattgtgacaacaactgaaatatgcaacaaggtgcttacagat

SEQ ID NO: 18596 - DNA, 363 bp, Glycine max
  unsure (1)..(363): unsure at all n locations
  Clone ID: LIB3049-035-Q1-E1-F4
ggagattttgtggttactgaagcacaaaacaaagaagcattatgttactagaatatcttattgattaatatttaatttaataatgtatatttctcaagtcaattcgtcgtaaacattaaacacgcgcttcgagctattggcgattgcaattgtcttttctcgattctcatatctcgatattcgagtcttgataacttattagtaattctccgattgccgccgcgaactggactcaccttcgccggagtcatgtcgttttggacggctttgtcgtttgcgttcttcactcatgtcgtttgtatcgtcgtttcactanggaccaaagtacgatggattgaacttgtgtgcattaatcgtggaatc

SEQ ID NO: 18597 - DNA, 206 bp, Glycine max
  Clone ID: LIB3049-035-Q1-E1-F5
gatagcgcagtttcatttctttggactagaaattgttcccaaagctgatcgagaagccagccaggccagaaagagttgaacaacaatgggaacggggaagatcgacatcaataggattgagaacacaacaaatcggcaagtgaccttctgcaagagaagaaatgggcctctgaagaaagcttatgagctgtcagtgctgtgtgatg

SEQ ID NO: 18598 - DNA, 390 bp, Glycine max
  Clone ID: LIB3049-035-Q1-E1-F6
ggaggcagggcagaggagaaggccttgtgattcatcatgacgaatgaacccaacaacaagtacgatgtttttctgtgtttagttggcccagatacccgctacaccttcgctggtaatctctataatgctttgcgccgcaacagaatcaatacctttttcacagaagataatcatcatgatgagctactactcatgaatggcgaccaaatttcaccctttgctctaagagcaattaaagaatcaaacttgttaattgttgttctctctccaaactacgcatcatccccaaggaatcttgatgaatttgtggccatcgttcggtgtataaagaggaagaagcagctgctgcttcccgtcttttacaaagtggaacgaggggaaataatggat

SEQ ID NO: 18599 - DNA, 114 bp, Glycine max
  Clone ID: LIB3049-035-Q1-E1-F7
catcagtcgtgctgccagacgagagaacaggggagacaggaagcggttctcagattttggaaaatcctcaaatcacgtggaattcagtcacattcatactactgaacaatattt

SEQ ID NO: 18600 - DNA, 375 bp, Glycine max
  Clone ID: LIB3049-035-Q1-E1-F8
ggcagtttcaaattttcttttccttcactttcccgagaaaaaaataacacttttcactttcttcactacgttctcacttcgatatggctcgtacgaagcaaaccgctcgcaagtccaccggtggcaaggcgccacgtaagcagctcgccaccaaggccgctcggaagtccgctccggcgaccggaggagtgaagaagccccaccgcttcaggccgggaaccgtggcgctgagggaaatcagaaagtaccagaagagcaccgagcttctcatcaggaagcttccatttcagaggctcgtgagagaaatcgcgcaggatttcaagaccgatttgcgtttccagagcagcgctgtttccgcgcttcaagaggctgctg

SEQ ID NO: 18601 - DNA, 290 bp, Glycine max
  unsure (1)..(290): unsure at all n locations
  Clone ID: LIB3049-035-Q1-E1-F9
ggtggtcagtttagtcacggtggtggcgtgtgctaaaatggcgcgcgcgagcatcgatttcgtaacgtaaccctacctataaggtagaactgttattgaaccaaaattaaccttgtgttgtagcgtttctttcactctcactcactcgctgaattgaaatttgaaatcctagaagagaagtacgatgtggaagtggttgttctctcgggagccagcgccgccgccgccgccggtggttctggtaccgccgctcttcgacttccctcncctcgccgcgcgcaatcgcatgc

SEQ ID NO: 18602 - DNA, 300 bp, Glycine max
  Clone ID: LIB3049-035-Q1-E1-G1
ggggtccttcttcctgtactccctgatggtcgtcgaagagaacaatggtgatcttcacaaatagaaagcatctggcttcatatatgattttgtactggctgatttgtggtaagtgctttacacaatgcttgttaaattcaacttcgttatttagacttgcttgatcctcttttgaaagttgtgataatatttgtacagaaggttgacttttaattgcaagctctgcagattaacatgttaatttatagtagctgatatacatttctttggccaaaaaataggttttaccctctttgaaaa

SEQ ID NO: 18603 - DNA, 339 bp, Glycine max
  Clone ID: LIB3049-035-Q1-E1-G10
tgggatgaacggtgaaccggaatccccttcgaactgcattatattgcagcgagtcacacacactctgaacaacgcccatcatgcaggccagtgataggtttagcatcaattcccagcttgagcatctccaagccaaatatgttggaactggccatgccgatttgcacagatttgagtgggcagtgaacattcaacgagatagctatgcatcatatattggccactaccctttactgggattccttgcaactgctgaaaatgaatctattggtagagaacactacagctttatgcagtaaatgctcctgccttgtggattgcctccgaaacagaagaaga

SEQ ID NO: 18604 - DNA, 296 bp, Glycine max
  Clone ID: LIB3049-035-Q1-E1-G11
gaggtaagtgagagccatgaagggttatgagccccgttcaagctcttcatgtgcagcttgcaagctattgaagagaagatgcataccaaattgtatttttgcaccttactttaggtctgatgagtgcaagaagtttgcaaaggtgcacaaggtgtttggagccagcaatgtgagcaagattctgattgaagtgccagaagagcagagagaggacacggtgaattctctggcttatgaggctgaggcaaggctgagagacccggtttatggatgcattggtgccatagctctgttgc

SEQ ID NO: 18605 - DNA, 350 bp, Glycine max
  Clone ID: LIB3049-035-Q1-E1-G12
ggtgccattggtgctgtcatcatccgcagctgctgttactcgcaccgcaaacaaacagtgagccatggacgtcggaaagaacaagcgcatctccaaagggaaaaagggtggcaagaagaacgcagctgatccctttgccaagaaggattggtatgacattaaagccccttctctttttcaagtgaagaatgttggcaaaaccctcgtctctcgtacgcagggtaccaagattgcttctgaaggacttaaacatagagtgtttgaggtctccttggctgatcttcaaagggatgaggatcatgcattcaagaagattaggttgagagctgaagatgtgcaagggaagaatg

SEQ ID NO: 18606 - DNA, 344 bp, Glycine max
  unsure (1)..(344): unsure at all n locations
  Clone ID: LIB3049-035-Q1-E1-G2
tggggtgctaatcttatcttatccctctaatcactctagctgttgcaaatttctactatttttcaatggcttctgcagatgttgagttccgttgctttgttggtgggcttgcttgggtcaccggcaacgatgccctcgagaaagccttttcaatctacggcgacatcgttgaatcgaaggttatcaacgaccgtgagactggaaggtccagaggattcggatttgtgaccttcgcctcagagcagtcaatgaaagatgcgatcgcaggaatgaacggccaggaccttgacggtcgtaacatcactgtcaatgaagctcagacncgcgccagccgtggtggtagt

SEQ ID NO: 18607 - DNA, 386 bp, Glycine max
  Clone ID: LIB3049-035-Q1-E1-G3
ggatgatttgaaccttgatgatccaaatccggctcaggattcctcttcctctacacagaaagttgatgaacgtagtaaggaacaggtggaggattttgatcttccggatttcgaggttgtggataaaggggttgaggttcaagagaaggaagaagatggaggagaggaagctgaggaacctgtccaggaggaatcaacttcaagtgaggttgtcaaggaagtagtgcttgatcatgtgcaccttactagattgtcagagcttgattcaattgctcagcagataaaagctctcgagtctatgatgggagaagatgataagtttacgaatgtagaggaagagacagaaccacagaggctagatgcagatgaagaaactgtgactaggg

SEQ ID NO: 18608 - DNA, 369 bp, Glycine max
  Clone ID: LIB3049-035-Q1-E1-G4
acccccaaactctgcatcggaagaaaccctagccactctcccggcgtcacgatgcagatcttcgtgaaaaccctaacgggtaaaacgatcacgttggaggtggagtcttcggacaccatcgacaacgtgaaggccaagatccaggacaaggaaggcatccctccggaccagcagcgcctcatcttcgccgggaagcagctggaggacggccgcaccctcgccgactacaacatccagaaggagtccacgcttcacctcgtcctccgcctccgtggcggcgccaagaagcgcaagaagaagacctacaccaagcccaagaagatcaagcacaagcacaagaaggtcaagctcggcattcgtcagttctac

SEQ ID NO: 18609 - DNA, 386 bp, Glycine max
  Clone ID: LIB3049-035-Q1-E1-G6
gaagacgttttcgggtctcagatacaatctccagccagaattcaagtgcatcaaaatgtgaaccagcaactgagaggctatccctccaacctttacaattcaagcgtgataggatcgccctcattcagggttgatccatctggggcagcagccgcaatggctttgaatccaagaaatgctgcctttgctaatcggagccagagctttatggttaacggtgatactgagtttccttctcctgctacctctactgctgccaagccttctaccttctctggttggggtccctctgatggcaagttagattggtccatccgtggtgatgaactaaagaagccgagcaaatcttcttctgtaggatttttgaagcagcagtagtcctttta

SEQ ID NO: 18610 - DNA, 371 bp, Glycine max
  Clone ID: LIB3049-035-Q1-E1-G7
gggagaaagaaagaaggaaagcaaagtagacgagtgattgcgttgcgattgacgacgacgaggaatcatgtcttccggcggcggcggtggtaagccgttcttctgccacgtgtgcagtcagaggattacgtgctccgatgagtcggaaccattctgcccgatgtgtatggaaagtttcgtagaagaatgcaaccctaacaatcccaaccctaatctcttccccgacagtgatgaatcttcggatcccgaactccccttccaccgcttctcacttctccctctcttgctctcatcagtctctaggtcccgattcgaacccgacgtgttcgacccgatggtcttcctccaagaacaccttcaggaccttcgcg

SEQ ID NO: 18611 - DNA, 323 bp, Glycine max
  Clone ID: LIB3049-035-Q1-E1-G9
gaggatggatcagagctgcatgctcttccctgcaaccatcatttccattcgtcgtgcattgtgaaatggctgaagatgaatgcaacttgtcctctctgcaagtacaatattctcaatggaaacgaacaagtgtgacagaaagcgaagaacctaccaagtcccaactgggtgtttcaacaactgttgtgtaatatgtatatataatttcaagacatgaaagagtttacttccctactcgctgggttttgatggttgtttcgtttagctgtttctgtagagaaaagatatatagagcatttattgacgaataagttagcaactgt

SEQ ID NO: 18612 - DNA, 329 bp, Glycine max
  Clone ID: LIB3049-035-Q1-E1-H1
ggtaaatgcaagtttacagtacggtaaattctactggcaaagaattggatgtgtggctggctgcagcattatcgtacattgccatggcgcgtggtagtgcacatgctgttgcatcaagtagcattgacgcaagtcatctgaagttgtgtcgagctgcacttactggtcaaaaccctccaccatgtgatgagaaatgctgtacagttacacgccaggccactttgcgttgcctctgcagttacagttctatcctaccttcatttggcatataacgccagttctactttgaacgtgcctgctaaatgtcgtctacgattgcctcatagatg

SEQ ID NO: 18613 - DNA, 352 bp, Glycine max
  unsure (1)..(352): unsure at all n locations
  Clone ID: LIB3049-035-Q1-E1-H10
gaggaacaagaagcgaaaatataacaaataatttgtactttcatcaaaacaaaatcccgttgtatttttctcagatggctcgaacgaagcaaacggcccgcaagtccaccggcggcaaggcgccgcggaagcagctggcgactaaggcggctcgcaagtcggctccggcgaccggcggcgtgaagaagccgcacagattcaggccgggaaccgtggcgctgcgcgagatccggaagtatcagaagagcacggagctactcatccggaagcttccgttccagcgcttggtccgcgagatcgcgcangacttcaagaccgacctccggttccagagcttcgccgtctccgcgct

SEQ ID NO: 18614 - DNA, 325 bp, Glycine max
  Clone ID: LIB3049-035-Q1-E1-H11
gaagatattagggtttttgagtgcggtgcggcgatcctagcactctcttctgcagctttcgccgacagcttcattcaccatggctgagcaaaccgagaaggcttttttgaaacaaccaaaagtgtttctcagctcgaagaaaactgggaagggaaagagacccggaaagggtgggaaccgcttttggaaatccattgggcttggatttaagactcccagggaagccatcgaaggaacctacattgacaagaagtgccccttcactggcaatgtttccatccgtggccgtatcttggctggaacatgtcacagtgctaagatgaac

SEQ ID NO: 18615 - DNA, 316 bp, Glycine max
  Clone ID: LIB3049-035-Q1-E1-H12
ggtggttcttgtttgcgagattgaagcgtaagcatcggctaacctaacctcgtcgtcctctctactagtttcagctatggccgatgaagctgtggttgttgcagatctcacccagatcgatgtcaagctcattaaccgctggagcttcgaggatattgaggttactgacatttcactggctgattacattggagttgcggcatccattcacgccacatatgttcctcacaccggcggaaggtactccgtgaatcggttcacgaaggcgcagtgccccattgttgacatgctcagcaactctctcatgatgcacggt

SEQ ID NO: 18616 - DNA, 377 bp, Glycine max
  Clone ID: LIB3049-035-Q1-E1-H2
ggcagtttcaaattttcttttccttcactttcccgagaaaaaaataacacttttcactttcttcactacgttctcacttcgatatggctcgtacgaagcaaaccgctcgcaagtccaccggtggcaaggcgccacgtaagcagctcgccaccaaggccgctcggaagtccgctccggcgaccggaggagtgaagaagccccaccgcttcaggccgggaaccgtggcgctgagggaaatcagaaagtaccagaagagcaccgagcttctcatcaggaagcttccatttcagaggctcgtgagagaaatcgcgcaagatttcaagaccgatttgcgtttccagagcagcgctgtttccgcgcttcaggaggctgctgaa

SEQ ID NO: 18617 - DNA, 376 bp, Glycine max
  Clone ID: LIB3049-035-Q1-E1-H3
gaatgatagtcacgtctcaccttccgagacccttttcttgaaggaaactctaatccaccaaaatcttgccttttcttggtgaagaacaacaagaagaataataccaataataacaacaacaataataataaatatattattgttgttaatattgttattaaaaatatgacggaagtgcttcagttgccttcatcctcaagctgttcgcgtcgtccatgtggtagtctcacacccaatgatgggtcgcacccaatttcccttattaacgctcctcccactgtggaagatcaaagggtggaaattgaagaagaagaagagaaagaaagggaaagggagagggatcagctttctaatttgacccttttgattgctacgt

SEQ ID NO: 18618 - DNA, 338 bp, Glycine max
  Clone ID: LIB3049-035-Q1-E1-H4
ggttaaggagagaatatagtatggcacaatctagtggcaaaaaattggttgagtggctggttgcagcattattgttcattgccttgttgagtggtagtgcacatgctgttgcaatatgtaacattgactcaagtcaactgaacttgtgtcgtgctgcagttactggtcaaaaccctccaccacctgatgagaaatgctgtgcagttattcgccaggccaatttgcgttgcctctgcagttacaagtctatcctaccttcatttggaattaaccccaaaaatgctttggccttgcctgctaaatgtggtctacaattgcctcctaattgttgagtgctg

SEQ ID NO: 18619 - DNA, 336 bp, Glycine max
  Clone ID: LIB3049-035-Q1-E1-H5
gaggaattgggtggcaactaccttttggatcacatgcatgagttcgaggaacaatagatctcctttcgaatttgccaaattatttcgtgtcatcttttttctcgatgggtctttgttacatactatcgtttaatgaggtagtgcttttgataatgtcaaatctcaagtggataagggatgttttattcgccaccatatgattgcccatgtatttatcatttcgagcccgtccatggtttcttagtatttcatatacttacttgtttgccttgtattactggtattgtgcatccatttaacgtgtgtaattgtgcatgcttgttgattcgcaaaacg

SEQ ID NO: 18620 - DNA, 334 bp, Glycine max
  Clone ID: LIB3049-035-Q1-E1-H6
ggtggcaccacgaggaaggaatcacccaagtttcgtccttgaccatatgtgaagtcatcgctcatcagctgctcctatttgacacacattcatgtcatcatctgcattcattcccaataccatctctctctctctctttctctctgcttccttcagttcaatggcttccaaagagatagccagagagctccctcctctcctccgcgtctacaacgacggaaccgtggaacgcttcctaggttccccgcacgtgccaccctctctcttagaccccgaaacattagtctcctcgaaagacatcgtcatctccgaaaacccctccatctccgcgcgc

SEQ ID NO: 18621 - DNA, 340 bp, Glycine max
  Clone ID: LIB3049-035-Q1-E1-H7
gacccatattcgtttccctactcattccaccctttgattaataataatcatagccacacccacccacccaccctttgcccccacaaaatgtcacattcattctctttccccttaacaccccttgtgctcactttataaaccacaccatcatttagtcatcatctaaactaaaccactctctcttcattctctttctcttttcctttcacacagactcctcttatgatgggtcttgatcaagatgctagcagcaactctggacttcagcttattctacggttagctttgactgccaccatcaccaccactccatcatcaccaccatccatttccaacaagc

SEQ ID NO: 18622 - DNA, 281 bp, Glycine max
  Clone ID: LIB3049-035-Q1-E1-H8
ggttaaggagagaatatactatggcacaatctagtggcaaaaaattggttgagtggctggttgcagcattattgttcattgccttgttgagtggtactgcacatgctgttgcaatatgtaacattgactcaagtcaactgaacttgtgtcctgctgcagttactggtcaaaaccctccagcacctgatgagaaatgctgtgcagttattccccaggccaacttgcgttgcgtctgcagttacaagtccgatcctaccttcatttggaattaaccccaagaa

SEQ ID NO: 18623 - DNA, 338 bp, Glycine max
  Clone ID: LIB3049-035-Q1-E1-H9
gagaagaaaaagagagagagagagatacaaaatagaaagtaaaaattagaaaaactcttgtacttggtttcatgccagattagggaactcttttagttgtcaattagatcacagagacatggaggttgctatggaactggaagatgatcttttttttgctgatttgagcaaggaaattgctctactaattatggatgaagatgaagatcctcttgcttcttgtcctcctgactctcttcaggctttttctgggacaattcatcctcctccacagtttgctttcatctatgagcatgctttgagaagagaaagcaaagggacaagtgtgtttaaccctc

SEQ ID NO: 18624 - DNA, 250 bp, Glycine max
  Clone ID: LIB3049-036-Q1-E1-A11
acataacggggaccagttaaaccactataccccaagccctatacaatcaaaccttaacacacacccatttgattcagtttccatggctagcctcaaggttgcatttttggctgcagtgctctgcatggttgtggtgagtacacccatggcacatgcagctatcacgtgcgggcaagtgacgaatagcctgattaactgtatcccgtaactccacatccgacgaatgtcgccgtctggatgcttccaagga

SEQ ID NO: 18625 - DNA, 144 bp, Glycine max
  Clone ID: LIB3049-036-Q1-E1-A12
ggagtgagcaagagtgaagagcgaagacaatggctcccaagggtttaatctttctggctgtgttatgcttctcagcactgtcactgagtcgttgtcctgccgatgataatggacttgtttacaacttctacatggaatcatgcc

SEQ ID NO: 18626 - DNA, 54 bp, Glycine max
  Clone ID: LIB3049-036-Q1-E1-A5
tgacttgcagatttcaaacattgctactaattccctccttttttcttcttcttt

SEQ ID NO: 18627 - DNA, 286 bp, Glycine max
  Clone ID: LIB3049-036-Q1-E1-A6
ggactcgctaggtttgccaaaccaactccccaaaggggaccttagagagcaatcttcttccttctctctctctctctctctctctctctttcaatggcttcctcgtcttccagaactaagtccagtgggcccgttctacgctccctctcaccctccagtagattctgctcatacatcacatccaaaacccctttctcttctccttcatccgcattcgcttcctccataagctctggcttctcctcttcaaccttcttcaaccagccacgtcagcatcactcctcaa

SEQ ID NO: 18628 - DNA, 228 bp, Glycine max
  Clone ID: LIB3049-036-Q1-E1-A8
ggagcaagagtgaagagcgaagagaatggctcccaagggtttaatctttttggctgtgttatgcttctcagcactgtcactgagtcgttgtcttgcggaggataatggacttgttatgaacttctacaaggaatcatgccctcaggctgaagacatcatcaaagaacaagtcaagcttctctaccatgcgccacacgaacactgctttctcctggctcagacacatct

SEQ ID NO: 18629 - DNA, 314 bp, Glycine max
  Clone ID: LIB3049-036-Q1-E1-A9
cagcagggggtgttggtggtgctgtttttcgcccccgttgacgcgcattttccggcaaccggagagcttccaacgttccgcgaggcgccggcattccgcaacggaagagaatgccgcaaccgcgcgcggagcgactccgtgatccacatcgcgatgacgctggacgcgacctagctccgcggctccgtcgccggtgtgttctccgtcctgcggcacgcatcatgtccggagaacatcgtgttccactttatcgggaccacgcgccgaagcacggagctccgccgcatcattaccgcgacgttcccgtagctcgc

SEQ ID NO: 18630 - DNA, 370 bp, Glycine max
  Clone ID: LIB3049-036-Q1-E1-B11
gcatcagcctggattcgtcctttctctgctctttgtcctctctgacacatttggggccttggttactgtgtttttgcaccagggtattgggagggacgtttagagttgctgagtctggctccttctctgggaaagacgatcagtaccctccaccacgaccactcactgaggctgacgagggtcacaaagtgggcccttttacaggcgcctattgctgagttcattgcacttttgtcttcctcgacattactgtgcccacagttatagggtacaagcaccagccgggtcatgctgatgcctgtggtggggttggcattcttggcattgcatgggcctttggtggcatgatcttcatccttgtctactgcac

SEQ ID NO: 18631 - DNA, 160 bp, Glycine max
  Clone ID: LIB3049-036-Q1-E1-B12
gttgtggccatgaatcagaaggaaagctcaacgaaccaatttatgaagattcattcagcttacgcaactttatctgacccagagaagcgagctcaatatgacagagaaatctatagatacagaagatttgccaatatggaagcaagaaatcagacctttt

SEQ ID NO: 18632 - DNA, 57 bp, Glycine max
  Clone ID: LIB3049-036-Q1-E1-B6
ttggcaacagtcggtgccttcaatttccggtcgcccgaccttcctgttttgctttgt

SEQ ID NO: 18633 - DNA, 55 bp, Glycine max
  Clone ID: LIB3049-036-Q1-E1-B8
ggagagtgcggtcggctcttccgtgacccttaccacccatggggctcgctctccc

SEQ ID NO: 18634 - DNA, 179 bp, Glycine max
  Clone ID: LIB3049-036-Q1-E1-B9
ggttaagggttgctggtatggtctactggcatttgtcatcagctattactcgctctatggatcttcctagagttgctggagaaaggaatcgagatgaggagtggcatcctgtatctcaagtacacgatgtattcgcaagagatgactgcagtggatttggtgatactactggtaagaca

SEQ ID NO: 18635 - DNA, 141 bp, Glycine max
  Clone ID: LIB3049-036-Q1-E1-C2
tggggttctagtgtatgtgattgttgtgactcgttcttcttcgtcgttatcttcttcttttgttgtttgtgtgtttgttttttctctcacctgaaaatgtcttgctgcggtggtaactgtggttgcggaagcgcctgcaag

SEQ ID NO: 18636 - DNA, 58 bp, Glycine max
  Clone ID: LIB3049-036-Q1-E1-C3
tagggtctcttactgtgtctttgaacgcttctttctctctcttcttcccttgctctgt

SEQ ID NO: 18637 - DNA, 81 bp, Glycine max
  Clone ID: LIB3049-036-Q1-E1-C4
ccacgcgtagaggctgcgagatatcacgaaggggcagacaggattcccaatttagaccaaataatcctccgctggtctctc

SEQ ID NO: 18638 - DNA, 139 bp, Glycine max
  Clone ID: LIB3049-036-Q1-E1-C5
ggaacctttgcattctattcattcaagattcagcaagtgcgttttggaagcagagatcgaaatacttcgagatggcccgtacaaagcaaactgcgggtaagtcaactggaggaaaagctcccaggactcagcttgcccc

SEQ ID NO: 18639 - DNA, 89 bp, Glycine max
  Clone ID: LIB3049-036-Q1-E1-C7
cgggcactaagcctaagctaagtcacgacatccttcacgatttcatgtcctgcaattcctcttgtgccttctcaatgttctttgggatt

SEQ ID NO: 18640 - DNA, 121 bp, Glycine max
  Clone ID: LIB3049-036-Q1-E1-C8
ggaggctgaggaaagtgagttaggatagccccagacatagaaactcgacgttactcacttactcaactaccaccagcaccaccatgttctgatattcccccaggggcacacagtcactctt

SEQ ID NO: 18641 - DNA, 245 bp, Glycine max
  Clone ID: LIB3049-036-Q1-E1-D10
gaagacgacaaaaggggaaatagaacaagagaggataagagaaataacttgtgcatacaacagtacagcgtcccgttgtctttttctcagatggctcgaacgaagcatgcggcacgcaagtctaccggcggcaaggcgccgcagcagcagctggagactaacgcggctcgcaagtccgctccggagacccgcggcgttaagaagccgcacaaattcaggccgggaatcgtggcgccacgctagat

SEQ ID NO: 18642 - DNA, 407 bp, Glycine max
  Clone ID: LIB3049-036-Q1-E1-D12
tgccgaagaaagaacgaacaagaaagggggaactcacaaactccaataacacaagggagaaagcaagctcaacccagagttttaaaaatggcagcagcctcctccatggctctctcttcccatccttggctggcaaggccgtgaagctgggcccatcagcccccgaagtcgggagggtcagcatgaggaagaccgtaccaagcaggcctcctccggaagcccatggtacggcccagaccgcgtcaagtacttgggcccattctctggcgagcccccgtcctacctcactggcgagttcccaggtgactacggctgggatactgctggggcttcggccgacccagaaaccttcgccagaaaccgtgagctcgaagtgatccactccaggtgggccatgctcgggggcc

SEQ ID NO: 18643 - DNA, 307 bp, Glycine max
  Clone ID: LIB3049-036-Q1-E1-D2
tccaaaaaaacaacaaaaggggatttcaattcattttgaattgaaaccgcggagattttgcagctgcatcatcgatcatcgtcacctcatggacggacacgattcacaagacccgaagcagagccctgctgacatgactgcctttgtgcaaaatcttctccagcagatgcaaaatacgttccagacaatgtccgactccattgttacaaagattgatgatatgggaagtcgcataaatgagttggaacacagcatcactgacctaagagcagagatgggagtggagtcctccccatcacctgcgacc

SEQ ID NO: 18644 - DNA, 97 bp, Glycine max
  Clone ID: LIB3049-036-Q1-E1-D5
gggtgttgtagctgaaggaacatgaaagggtacaaggtttggaactcaaccttcatacctttcaataataatctctccccaaattaccccttaaccc

SEQ ID NO: 18645 - DNA, 198 bp, Glycine max
  Clone ID: LIB3049-036-Q1-E1-D6
ggtggagcaatagcagcagaacagagagagcaaaaccctagagcatccatcacaagcagaggaagaagatggtgaagttcctgaagcctaacaaggcagtgatcgtcctgcagggccgctacgccgggcgcaaggcggtgatcgtgaggaccttcgacgagggaatcagggagcgcccctacggccactgcctcgtcg

SEQ ID NO: 18646 - DNA, 214 bp, Glycine max
  Clone ID: LIB3049-036-Q1-E1-E10
ggcagcctcaagaatccacacaaactcagggtagggcagagagagagagagagagagagagagagagagagactgggacggttggccacctgggttcatgctcgtcctggtattcagacttatccctcactcgcgcatctccaagtctcgaagcttcctttccagaggttggttcgtcatgttgcccaggttttcaactctgatctgcgtttcc

SEQ ID NO: 18647 - DNA, 238 bp, Glycine max
  Clone ID: LIB3049-036-Q1-E1-E11
gtatatatgggatgcatgagcccgcttctgtggctttctcagctctaaatctcgcaatgcattttcatggttgggtctcccttttcactcttatatactagaaattgcctctaacagatggatagaacgcgtattatgagtatgctagtttgttgcatacgtattggcttgttataatgaactcctggttctggaatgttgttttccaaagtccgagatattcatataacagggattt

SEQ ID NO: 18648 - DNA, 203 bp, Glycine max
  Clone ID: LIB3049-036-Q1-E1-E12
ggatttcttctccgcacattctgtttagggttctgctgagttgctgtccgatcgcgtgtcatcgcgctcaccgtcaccggcaaggtgactacacacagggactccagttaaatgccatacacgatgaccctagaacattgaaaatcttccactctctcgtgtccagtgacacgataccgcgaggaatcttgatacgtccaaac

SEQ ID NO: 18649 - DNA, 151 bp, Glycine max
  Clone ID: LIB3049-036-Q1-E1-E5
gaaagaggtcaaaatcgtgaagtcagaccacgagatgtcgttggtatcaagcatgttcgggtgtggagtggtgatagctgcgtcgcaagccgagggaagtgtaacgagagtctattgtggattgacgattgtgtgttcgtctgggccgcac

SEQ ID NO: 18650 - DNA, 122 bp, Glycine max
  Clone ID: LIB3049-036-Q1-E1-E7
gaatctgcagcatcacctttaaacgccgaaggttcatccaatctccgaaggccttcaccggattgcaaccatgtcgaggataacggttagagagccacacgaggaggggcttactctgggcc

SEQ ID NO: 18651 - DNA, 206 bp, Glycine max
  Clone ID: LIB3049-036-Q1-E1-E8
ggaacctttgcattctattcattcaagattcagcaagtgcgttttggaagcagagaccgaaatacttcgagatggcccgtacaaagcaaactgctcgtaagtcagctggaggaaaagctcccaggaagcagcttgcaaccaaggctgcacgtaagtctgcaccaacaactggtggtgtgaacaagcgtcatcctcatcgcccctgg

SEQ ID NO: 18652 - DNA, 308 bp, Glycine max
  Clone ID: LIB3049-036-Q1-E1-E9
ggaacctttgcattctattcattcaagattcagcaagtgcgttttgggagcacagaccgaaatacttccagatggcgcgtacaaagcaaactgctcgtaagtcaactggaggaaaagctcccaggaagcagcttgcaactaagggtgcacgtaagtctgcaccaacaactggtggtgtgaagaagcgcgacgttatcgccctggaactgttgctcgtcgtgagattaggaaataccagaagagcactgagctcctaatcaggaagcttcctttccagacgttggttcgtgaaattgcccagaatttca

SEQ ID NO: 18653 - DNA, 307 bp, Glycine max
  Clone ID: LIB3049-036-Q1-E1-F11
gcgtacgagagaacgacagatggggaaaggtctgcagttctgatgatgatgatctacatatttttgcggagctgcatcatcagtctcacaacgcagatcagattcacgtccctatccccagcatccagaagtttcacattcacatctagtttccaatgcctgcgagtcatactgctatatggtgtaacatggggcatagatcccgagtatcaaaattggcaccgggaatccatgtcggaataccatggtgactaaatggagtatgctgttgtcgatctgatatggcatgacgtccatgatgactttt

SEQ ID NO: 18654 - DNA, 222 bp, Glycine max
  Clone ID: LIB3049-036-Q1-E1-F12
gagacgacgaagggaagaaagaagatggaaatgaaattgaaagagaagacctgttttcggaacaacgagacacgttctaacatcctcgacaaactccaagacgattctcgccactgggctcgcttagcctgtgtctacaccaaattcccttccctcgttagggatttccgttggaagaccaaacgctccctatcatcccccaagacctcctctccgccgtcg

SEQ ID NO: 18655 - DNA, 72 bp, Glycine max
  Clone ID: LIB3049-036-Q1-E1-F3
ggtggagcgaagtgaattgaacttgaagtgactcggggtgagttcacccagcagtggccgaacatgtcaccc

SEQ ID NO: 18656 - DNA, 96 bp, Glycine max
  Clone ID: LIB3049-036-Q1-E1-F4
acgcgtacgaacagccgtcagtagagctgcgagaggaagatagaaggggacagaccagatctcggaaaccctcgctcgataggtcgtacttcatca

SEQ ID NO: 18657 - DNA, 264 bp, Glycine max
  Clone ID: LIB3049-036-Q1-E1-F6
gacgcccttgatcaagcttcgcttcacgggcttggatgtgactttgccctacgagaacaccctcatacacaccgcctacggcggcatggcgtgcttggcgatggcggcggcgccgaataacgtgaactcggtgctcaatgtcattgccaactatcagcaacagaaccttagagttttgtttgataccgttagtaatacggttggcatagcgcgtgagctttgtaaccagctagttgacggtgtgcaacttctgtccgtcctcct

SEQ ID NO: 18658 - DNA, 102 bp, Glycine max
  Clone ID: LIB3049-036-Q1-E1-F7
ggatggtacgttttagaaagtaaaatagctactactggttaaaaagaaatgtttttttttgaccattctcaagtgcacatgcacttcagatgatccagatct

SEQ ID NO: 18659 - DNA, 214 bp, Glycine max
  Clone ID: LIB3049-036-Q1-E1-F8
gaccagttccctggttgaaacgaagcgaaatttccacctgcatcaccttcaaacctgcgcttcttttgaaccgatttgtgctgttttgttagtgaagcacatcgagtggcaactgtcgaacaggcatggcaagcctgttgacaacatcagccatcagctattctcctctcaacaatggttccaaggatttcagaaagtcagggaattcctccaa

SEQ ID NO: 18660 - DNA, 302 bp, Glycine max
  Clone ID: LIB3049-036-Q1-E1-F9
tcgggacaactgaatttgccgatttgcattttaagccggagtttcattcgtcagcgtttcaattttggacagcatctcagcccatcacactgcacaatgtacttccacattcaagtgtgctttgcgatgtatggtggcggtgcaactagtggcggatcttggggcagaaagtcatctaacggaggttgaagctgatactcgacgagagccacctgtgtttccttactgtgatatatttttgtagtagtgacatatattgacttccatgtctatttttcttactacatttcagtgtatcatag

SEQ ID NO: 18661 - DNA, 82 bp, Glycine max
  Clone ID: LIB3049-036-Q1-E1-G2
ccacgcgtacgaatacgcctgcgagaacacggaaaggggcagttcaaagccaaaaaagaatccaaaccaaaaaagaaagcct

SEQ ID NO: 18662 - DNA, 233 bp, Glycine max
  Clone ID: LIB3049-036-Q1-E1-G3
gggccttatcctatcggaaatcttactcacagcagagccaccaaatacttgtgttgtgtcgattctctgccatccatgattcatcacttacaaactaatactacttgctttcaataacaacacaaacacactctttggtgaccacaacaacactaacaatggctgcctcactacacgctgcagccaccttcatgcaacccaccaaggttggcataccctcccgcaacctcaaa

SEQ ID NO: 18663 - DNA, 130 bp, Glycine max
  Clone ID: LIB3049-036-Q1-E1-G4
cggggttctagtgtgtgaatgtttgttgttgtaacacgttcctcctcctttgttgttctgtgtttgtgtttgttttttcgcccacctgaaaatgtcctgctgccgtggtgactgttgtttccgaagctcc

SEQ ID NO: 18664 - DNA, 249 bp, Glycine max
  Clone ID: LIB3049-036-Q1-E1-G5
ccacgcgtaagatcgcttgccaaaagaacacgaaagggaagctgggaaattcaatataacggtcggaaaaaaaagttatatcctagtttcccctaattcaaatacaccccatgtcatgaaaattcccaccctcttcaataaggcgtatacatcatgaagaggtgtgctattagcactttgcacacatcttaaattgttgaaacttcccattcctagctagggtcagtctcaaatgtttaaacgtcatgg

SEQ ID NO: 18665 - DNA, 277 bp, Glycine max
  Clone ID: LIB3049-036-Q1-E1-G6
gactgcagaggtgtattttctcacttctcagcactcagcagcgatatcagttgaagaaacagaaacaaacaaaagaggcagaagatgttgtgggtggacaaatatcgtcccaaaaccctcgaccaggttatggtccacaccgacatcgctcgcaatctcaagaaattggtaacggaacaggattgcccccatttactcttctatggcccatctggctccggcaagaaaacccctaatcagtggctctcctccgccagatgttcggacctggtgccga

SEQ ID NO: 18666 - DNA, 233 bp, Glycine max; identical to SEQ ID NO: 18662
  Clone ID: LIB3049-036-Q1-E1-G7

SEQ ID NO: 18667 - DNA, 150 bp, Glycine max
  Clone ID: LIB3049-036-Q1-E1-G8
ggttgggtacgtcaattccaatttcaacgtttcatattgcatactgttcttctcttcctctctgtgttcccattgactctatgtcgtccaccccgtttttctgggggccacctctttacgttaccgttgtttcgtgcctcctcttctctc

SEQ ID NO: 18668 - DNA, 57 bp, Glycine max
  Clone ID: LIB3049-036-Q1-E1-G9
aggactcgttttcttcagacttttgccatcgtttagagacgcttgagagccttagtc

SEQ ID NO: 18669 - DNA, 194 bp, Glycine max
  Clone ID: LIB3049-036-Q1-E1-H3
cgtcttaaggttgtctcataattggaagggaacggttgggtaagaccactcttgcccgtaagatctataacaacaatcaagtgcagctgcggtttccttgccttgcatgggtttttgtgtccatccattacagacccacggaaatttttctcaaccttctcaaatgtttaaagtcatccacatctgaatttgaa

SEQ ID NO: 18670 - DNA, 115 bp, Glycine max
  Clone ID: LIB3049-036-Q1-E1-H6
ggttgtggagtacatctgagttgtgagcaatagattctccaaatttggcggcaatgggtgggcccaccgccgacgatctgtcgaccatccgcctgacttgctacgcgtgtccccc

SEQ ID NO: 18671 - DNA, 201 bp, Glycine max
  Clone ID: LIB3049-036-Q1-E1-H7
ggagtttcattactatgatttaatttaatttgattttgcagcgacgagaccacagtccacaagacccagaagcaccaccgcgaccggcgaatccagccaccgtgtgcggcttcgaattgagtccgagaacgcagttagacaggctttatattgacacttgagacctgaacggacgctgctaccattggtcactcttcccat

SEQ ID NO: 18672 - DNA, 212 bp, Glycine max
  Clone ID: LIB3049-036-Q1-E1-H8
ggacttaaaatttgcttctcttttccttccttcactgtttctttattctcttttagagaaaatcaaaataacaatattatataaaatattgcacctttattttgaatgttcaatttctactgttttggtgccaacttgaatcacttcaactcatagtttcactattcacctcaccttctgacactttcgtttcactcctccatctttcctcc

SEQ ID NO: 18673 - DNA, 199 bp, Glycine max
  Clone ID: LIB3049-036-Q1-E1-H9
gagaatggtttgattactccatagatggatgtttttgcgtttggggttgtgcctttggagcttctttcggggatagaacctcgtcgtttgttgacaccaggtaggatgcggggacactctccaggctcctgccggttagaacctcatggagcccccgaatccttcttatcacaccactagtcatcagccatctcacttt

SEQ ID NO: 18674 - DNA, 191 bp, Glycine max
  Clone ID: LIB3049-037-Q1-E1-A10
ggtttgtgcagatgagatgacatggaagccgtaataggctcccaccactttttccactctctccctctgctttctctcacaatatttgccctgcgtctcttcttctgtctagatatttaggctttcctcctcgtcgaccaactcttccttatcttctataaactggttcgcgaaagatgtatctggttggg

SEQ ID NO: 18675 - DNA, 267 bp, Glycine max
  Clone ID: LIB3049-037-Q1-E1-A12
agggagactgatcgtgggagtgagagtgtgatgttgtaaatcgttcgtcttcttttgttgttctgtgtttgtgtttgtttttgtctcgcacctgagaatgtcgtgctgcggtgggaagcgttgttgctgtagctcctgtaagtgctggaagggctgcggacgctgcatgatgtatccagatttgagctatagtgtgtcaagctatcagctgataccttggtcatgggagtgggatctgttaatgttcaatttgagggtgctgaaatg

SEQ ID NO: 18676 - DNA, 140 bp, Glycine max
  Clone ID: LIB3049-037-Q1-E1-A5
ggtaaggacttgtttgtttgattagtaaaaagatgaaggttgctgcagaatgctgcaacttactgttactgttcattacctcttacctttcactgatctcacggcttggcgtccattctttgtcttatcatcattctgct

SEQ ID NO: 18677 - DNA, 77 bp, Glycine max
  Clone ID: LIB3049-037-Q1-E1-A7
ggcctccgtcacttttctcatctgctgttcctgcgcgtgaatccgcctcatgttcgccaaagccatggttattcatc

SEQ ID NO: 18678 - DNA, 93 bp, Glycine max
  Clone ID: LIB3049-037-Q1-E1-A9
gtccgcccaagcgtccgcggaagcattcggccacgcgtctgcccactcgtccgggggacacaacaattccatgggtaaacctaacaacttagt

SEQ ID NO: 18679 - DNA, 278 bp, Glycine max
  Clone ID: LIB3049-034-Q1-E1-F12
gaactagcaatatgaaatttgcaatgaatggctgcatattgattggaactttagatggggccaatgttgaaataagggaagaggttggtgcagacaacttcttcctctttggtgccaaggctcatgaaattgctgggctgaggaaagaaagagcagagggaaagtttgtgcctgatccacgatttgaagaagttaaagaatttgtcagaagtggcgtttttggatcttacaactatgacgaattgatgggattcttagaaggaaatgaacgttttggt

SEQ ID NO: 18680 - DNA, 391 bp, Glycine max
  Clone ID: LIB3049-032-Q1-E1-G4
ggcttctctcgccatacatcacaacagaaccaaactcagaaccacactcacaaccaagctcgccaaaactaaggttttgcattgatggcactgtgcgaccgcgtcagatcgggaatctctctcttcaccaaatccacgttccttacttcccagcgatccagtctccaatgatccctcgttgcccctttcagttccctcgcctccagaaattacgccaacgtgccggggcaaaaggaaaccaaagttaaggtccctctggctttgtttggacgttcaggaaactatgcctcagccttgtatactgcaaccgttaaagccaattgcattggaaaaggttaagactgagctttcgcaatttgttgaggcagtatagaatagtcccatattttca

SEQ ID NO: 18681 - DNA, 299 bp, Glycine max
  Clone ID: LIB3049-032-Q1-E1-G5
gactcatctcttacaacgaaaccctcttcatcttgttctatctgtgacgagcatcatggcctcaagagcagtgttattgttggctatgtgtgtgcttccggcgatggttgtggccattcgcccagcaaagaaccctttttgcgtgaacggtcgtgtctaccgtgacccttgccgtgctggttttgagacctcagctaccatctacattgctggtgctgagattatgttgcaatgcaagagcagggttagcaccgacgttgtgtatacgaagaatgggtacaccgactcaaccggaacat

SEQ ID NO: 18682 - DNA, 380 bp, Glycine max
  Clone ID: LIB3049-032-Q1-E1-G6
ggaatgtataatgttgcgtaaggaactataaaatctctcatttctgttctcttcacgcacaccaacaaaacctctctctctcatcggaatctcccaaaagaatggacgacaaaacgcagcagtccgagagtaagcaaaacgacaacgacgaggaagttgcgccaaaacgacaagaccctaacccgtcgtctggcgggtggggcctttcgccgctctcgtttctctccgatcttcagaaggccgccgctgttgccgccgaagagatctctcgcaatgctgctgtagttgcagagactgcatcaaagggcattgcaaaatttccaaaccaaggatgacgattcagaaaaagagtatgaaggagatgaaggatctgcagctga

SEQ ID NO: 18683 - DNA, 384 bp, Glycine max
  Clone ID: LIB3049-032-Q1-E1-G7
gggagctaagtgaattgaaattgaagtgactcggggtgagttgactcagcaatggcggaagaggtgactcgggtgatggtggcggtgaacgagtcgagcattaagggataccctcatccttcgatcagcagcaaaggggctttcgactggaccatcaacaagatcgttcgcgacaacgtctctgccttcaaccttctttttcttcacgttcaagtccccgatgaagattgttttgatgacatggatagtatctttgcttctcctgacgattttaagaacatgaatcacagagatagaattagaggagttcatctgctggaatacttcatcaataggtttccagaaatttggggtggtttgtcaagcatggataatgcatggtga

SEQ ID NO: 18684 - DNA, 372 bp, Glycine max
  Clone ID: LIB3049-032-Q1-E1-G8
ggacaccaaattcaatcaaagattgattcaattcaatgggttcagtaatgctcagtggaactgaaaagctcactctcagaaccctaaccgggaacggcttaggtttcactggttcggatttgcacggtaagaacttcccaagagtgagtttcgctgctaccactagtgctaaagttcccaactttagaagcatagtagtacccaagtgtagtgtctcggcttccaggccaagctcgcagccaaggttcattcagcacaaaaaagaggccttttggttctataggtttctctcaattgtgtatgaccatgttaattaaccctggccattggaccaaggacatgagggatgatgcccttgaacccgctgatctc

SEQ ID NO: 18685 - DNA, 385 bp, Glycine max
  unsure (1)..(385): unsure at all n locations
  Clone ID: LIB3049-032-Q1-E1-G9
ggagtgagcaagagtgaagagcgaagagaatggctcccaagggtttaatctttttggctgtgttatgcttctcagcactgtcactgagtcgttgtcttgcggaggataatggacttgttatgaacttctacaaggaatcatgccctcaggctgaagacatcatcaaagaacaagtcaagcttctctacaagcgccacaagaacactgctttctcctggctcagaaacatcttccatgactgtgctgttcagagttgtgatgcttcactgttgctggactccacangaaagagcttgtctgagaaagaaacagatagaagctttgggttgagaaatttcanggtacattgagacatcanagaagctttggaaagggaatgcccagg

SEQ ID NO: 18686 - DNA, 377 bp, Glycine max
  Clone ID: LIB3049-032-Q1-E1-H1
gattgaaactaaactccaagttcctaccatagtgctaggaaagtgagtgagagaaagagatcacatagcagaatggcttctactcaatgtttcttgcaccaccatgctcttaccacccctgccagatccccatcacaacgcatcatggttagcaccaagcctaaccagcttgtttgcaaggcacagaagcaagaggatattgatgtcagcccaatctctcgccggttagctctaaccgtgctcattggtgctgctgctgttggctccaaagtccaacctgctgatgcagcttatggggaagctgccaatgtgtttgggaaagccaaagacagacacagatttcctgccatacaatggagatggattcaaactatcga

SEQ ID NO: 18687 - DNA, 388 bp, Glycine max
  Clone ID: LIB3049-032-Q1-E1-H10
gggttctgtcctcttttctcttctccctttttctctctgtctctctctctcggtctcgctcttcttctcatcaagcacagagttacagactcaccgatcttccgattctctttcgtcttggtttatgagctcgaaggagagacccactcttggtggcacgcggattaagacccgcaaacgaaatattgctgcgccgctggaccctgcagcattctcggatgcagtggtccagatttatttggataatgctggtgatctggaacttattgctaagagtattgaatcttcagaccttaacttttcaagatacggtgacaccttttttgaggttgctttcactgggggtcgtacacaacctggaactaccaagcctgatgagggggaccgc

SEQ ID NO: 18688 - DNA, 367 bp, Glycine max
  Clone ID: LIB3049-032-Q1-E1-H11
ggacttgtacgtagacagacactacaacatcgtatgtgtgagagtgaagtgggaaaaagcatatcagattcaccccacattattattttatcttcctagtttccaagacattattttgtgtacattattctttgaatctgggatgccccaaactcctagaattgtaactgttttcaaccttgatcttactcaacatcatatccacactccaaaagggttaaaagaataaaccacttctgaaaacattgcaacaacaacaagaacaaggaacttcacaagtggggggaaaagctagtcatattttactgttattgtttttttttttttttttttgctgctttttctttttctgttgtgcatgtctgac

SEQ ID NO: 18689 - DNA, 377 bp, Glycine max
  Clone ID: LIB3049-032-Q1-E1-H12
ggtgctcactcatctatctattataaccaaacactcttcttcatattcttcttcttcttcttcttgttcttgttctatctgtgacgagcatcatggcctcgagagcagtgctattgttggctatgtgtgtgcttccggccatggttgtggccattcgcccagcaaagaaccctttttgcgtgaagggtcgcgtctactgtgacccttgccgtgctggttttgagacctcagcaaccacctacattgccggtgctgagattatgtttgcatgcaagagcagggttagcaacgaggtttgtgtacacaagaaggggtacactgactcaactggagcatacacaatgtacgtggacgaggatcacgcagatcaaatatgc

SEQ ID NO: 18690 - DNA, 390 bp, Glycine max
  Clone ID: LIB3049-032-Q1-E1-H2
ggttctagtgtatgtgattgttgtgactcgttcttcttcgtcgttatcttcttcttttgttgtttgtgtgtttgttttttctctcacctgaaaatgtcttgctgcggtggtaactgtggttgcggaagcgcctgcaagtgcggcaacggctgcggaggctgcaagatgtacccagacttgagctacaccgagtcaaccaccaccgagaccttggtcatgggagtggcaccagttaaggctcaattcgagagtgctgaaatgggtgttcccgctgagaacgatggctgcaaatgtggagctaactgcaactggaaaccctgcacctgcaatttaggtgttggagagctaaagcttcaagcagaaatggcccttagaaataatgataaaaac

SEQ ID NO: 18691 - DNA, 102 bp, Glycine max
  Clone ID: LIB3049-032-Q1-E1-H3
ggttctagtgtatgtgattgttgtgactcgttcttcctcgtcgttgtcgtcttcttttgttgtttgtgtgtttgttttttctctgccctgaggctgtcttgc

SEQ ID NO: 18692 - DNA, 231 bp, Glycine max
  Clone ID: LIB3049-032-Q1-E1-H4
gacagaaaggggctgccgctccccgaaaaaaacagatactgtgggaaaaaaaagagcgggacagaaaatgacgaccaagttcaagaagaacaaggagaagagaaggcacctcaacgccggacacggccgtatcggaaagcaccgcaagcatcccggaaggtccccgtaacgcccgtggcatgcaacaacaccgtaacctcatccacaagtaccaacctgggttcctccgga

SEQ ID NO: 18693 - DNA, 385 bp, Glycine max
  Clone ID: LIB3049-032-Q1-E1-H5
ggttctagtgtgtgattgtttgttgttgtaactcgttcttcttcttttgttgttctgtgtttgtgtttgttttttctctcacctgaaaatgtcttgctgcggtggtaactgtggttgcggaagctcctgcaagtgcggcaacggctgcggaggctgcaagatgtacccagacttgagctacactgagtcaaccaccaccgagaccttggtcatgggagtggcacctgttaaggctcaatttgagggtgctgaaatgggtgtgcccgctgagaacgatggctgcaaatgtggaccaaactgctcctgcaacccctgcacttgcaagtgaggtgttgggagaacaaccttcatgccaagatagcccttaattaggaataatgataaa

SEQ ID NO: 18694 - DNA, 281 bp, Glycine max
  Clone ID: LIB3049-032-Q1-E1-H6
ggtagcattcagtgaaacactagctagggtattgggagctctcgttgtttcggagttagggaccttacgcagccatggccactgctacgaatgccgccgccgccccaccacgccagctctcccagaaggaagctgacatccagatgatgttggccgccgacgtccacctcggcaccaagaactgcgacttccaaatggaacgttacatcttcaagcgccgcaacgacgggatttacattattaaccttgggaagacgtgggagaagcttcagctagcagct

SEQ ID NO: 18695 - DNA, 283 bp, Glycine max
  Clone ID: LIB3049-032-Q1-E1-H7
gatcattatcactaccactagacagatgtcaaccctagtctactcgcttttcacttgttcactttcttccaaactctcaagcccaacgtagtcccttttcttctcccaccaacttcaccgtcttcttcctcgatcatgtcgcacttctagggcaactagcatgatgagcttattgccaatgctgcttacattggcacacctggaaagggtattcgtgctgctgatgagtcaacagggacaattggcaagcgtttggccagcatcagtgtatagaatgttgaat

SEQ ID NO: 18696 - DNA, 300 bp, Glycine max
  Clone ID: LIB3049-032-Q1-E1-H8
gttgtagaaaagacattggatttcttgttccatgtctctgttttgaagcaccttgatctctgcatacagagtttactcttgaataggaggggtaaaacctttggctggcaacatgaagaagaggattacatgcacttaagcagaatgttatcatctcatttcaggagcagatggttgtctgtaaaggtgaagtctaaatctgtggatggcagtagttcctctggcattaagacctctccaaaggttggtgcttgtttggaaaccatatatgaggattcagacacgtcttccgtgacaact

SEQ ID NO: 18697 - DNA, 373 bp, Glycine max
  Clone ID: LIB3049-032-Q1-E1-H9
ggagcaaaaccctaatccctatttttcttcctcagtagtgtcatttacgcttctcttctctgcagcaactatgcctaaccttaaggtcttcttcgacatgaccatcggcggtcaatctgctggccgcatcgtgatggagctctacgccgacgtcactccccgcaccgccgagaacttccgcgcgctttgcaccggcgagaagggcgtagggcggagcggcaagcccctccactacaagggctcgtccttccaccgcgtgatcccgagtttcatgtgtcagggtggcgacttcaccgccggaaacggaaccggcggcgagtccatttatggcgccaagttcgccgaccagaacttcgtgaagaagcacaccggt

SEQ ID NO: 18698 - DNA, 403 bp, Glycine max
  Clone ID: LIB3049-033-Q1-E1-A1
ggcacatcagtattcatatttcatatcatataagatagcaaagcctataacccatggagtcaaacaacatgccagacttgaacggtgtcactaagaagactaaaggtcgacaaaaggtccacacacatctccactacttgtctaaccaaattgctattgagaagaagcgctcaaaggatttaaatcatttagcgaaggttgcagaggatcagttctggtgggctaggcctattgaaagcatgaccaattcccaacttgacaagtatgacaagatgttagaggagtttaagagacaactcacagaaaaacgtgggaagctcaactgatgatgccctatttaaagttttagtcaatgttttttaatttaatatgttttagaatgagcactagcttaatcaaatta

SEQ ID NO: 18699 - DNA, 267 bp, Glycine max
  Clone ID: LIB3049-033-Q1-E1-A10
ggagagaaaatatggccatatcaatcagattcgttgagttgaacacaggggccaagactccttctcttgggttagggacttggcaagctgaacctggtgttgtacctgaagctctcaatacagccattcacgttggatacaggcatattgactgtgctagtgcgtataataatcaagcagacattggttctgctcataagaagctttttgatgatagtgtggtgaatcgtgaggacttatggatcacttctagactctggtgttcag

SEQ ID NO: 18700 - DNA, 339 bp, Glycine max
  Clone ID: LIB3049-033-Q1-E1-A11
ggaggcatgcaagaagagagaggagtcgtactgcacaagtttcacacttcctctcatgtttttactgcatttgggactcttcactcttctcgacatcttcatctctgtcaagtttccatagcacagagagaaaactgggtgttttgagataataatgctgaggaagaggaacaggtcagtgcagaaggatcaacaccacatgtgtgaagccaattcggagcactattctcaatctcatcatgctttggtggggcgcaacaacatcaagggacactcaattttcaatgtcccttgtctgtttgtgggtcttggtccaaaagggttgttggattctgattc

SEQ ID NO: 18701 - DNA, 271 bp, Glycine max
  Clone ID: LIB3049-033-Q1-E1-A12
gagaacatcaaaatcacattgagacagcaagcctaaaggaaataaggaataatatttctatctaaatggtgaaccgcatctcaaactatgttcctctcttcatcattttgattgttttggtaacaaggcaaaaacaagtggaaggatataaatgtttgacagatatgggtttatgtgatgaacgtatcacctcgagtgagtgtgatcttagatgtaaatcccattataatgatggagaagggcactgtgataacattaacgtctgtaattg

SEQ ID NO: 18702 - DNA, 271 bp, Glycine max
  Clone ID: LIB3049-033-Q1-E1-A2
gacgagaagacgacatttcggggaattcgtaccatgaaagtaatttctagggtgtcccgaatgttgcactaccaatcggctctcgcgctgtacgcctgagaaggatgccggatttccggttgtccctgtagatttcattcagggggagcatcaggatctttattaacacatattatagccacttagaattattccagtcattcccaatcgacattacatctcatataaatctccaactaggatgacgtactatgtataacagatcacctta

SEQ ID NO: 18703 - DNA, 259 bp, Glycine max
  Clone ID: LIB3049-033-Q1-E1-A3
cagggggggatttccatggatctcctgaaccgtgtgcactctctttctgtgccgtctcatcttcgaactccgatggcgaacctgtggcgcgcggcaaccggcatgaccgacaatgccaccgattacgacagcgtctagttctggtctgaacccgagcggatcggctggctcaccaagcacggcgagtacatcaagacctggcgccgccgctggttcgtcctcaagcaacgcaagctcttctggttcaaggactccgccg

SEQ ID NO: 18704 - DNA, 359 bp, Glycine max
  Clone ID: LIB3049-033-Q1-E1-A4
gggacatggttagataaatccgttgctggtttctagaacgctcttcttcaaagcgtgccgcaaacttttgcatccgaatccccgtttgttttggcagaagccatggccgatgacttcgacttcgcagataaagttcctccttcgttcgatcgcctgggaaatgtgatcaaggattccggatctaaagcgttaaatccgggtttaattgtcctcctggttgttggtgggttgcatttgacattcctcagtggaaattatgtgctctacacatatgcacagaacatcctccctcctagaaaaaagaaacccgtgtcaaagaataagattaaaaacgagatactaaagcaaggtgtctctgc

SEQ ID NO: 18705 - DNA, 399 bp, Glycine max
  Clone ID: LIB3049-033-Q1-E1-A5
gagagagaaagaagagaagatgaagcatagtgcttcctccactgatattctctgcttctccattccctgaaccaacattttcaatttttaatacatataaacttctggggttgtttgttgttgtaaaagttgaaagcttttggggggtgtctgatccattaggatcatcatcattcatcagcacatggcaaagccagcggtgttggagtctgatccaggggtgatggtgaagaacgccaaagagttgaagagggagcttcagatgttggtgaagtctagtgtgcatgatgacgattgcagcactgagaccattgatcaggccaaagagactctctgtgttctcaaagagttgaagctcagaaacatgtcttcactgtctctgaagcttcacaacaagag

SEQ ID NO: 18706 - DNA, 385 bp, Glycine max
  Clone ID: LIB3049-033-Q1-E1-A6
ggtgtttggaggtggaaacttagggtatgatttctgattccccttccttctcgctcgttcactgctttaatccatcagctatccttctaactcatatttcttcactgattcaagatacgatcaagtttccttatcatttgctcctaattacgtttaccctatacacacttttccagttattcaccagtaccaacaactgacgaatttcacgttgttggagaaattgttctgttggggggatatgatgtcgatggagaatgaagcttcaagctccacacctacgcgcaaattgtcgtgcactgcatgcctcgacgctgtctaattctgctactcgccggttcatcaaatgcagcactattacaagcttggtaaatttgacaattgt

SEQ ID NO: 18707 - DNA, 402 bp, Glycine max
  Clone ID: LIB3049-033-Q1-E1-A7
gatgctcaattcattttcttctcctctctctctctcctacggttacggttttctctcttcatcactctctgtgtcgctccgtttcaatggctcagcaatacgctcaaaacggcgggtcggtgaatgccgctgctgctgctacggtgtcatctgtcactgtgaagccgcagctcctcgtagaagctcccaaagccaacgacgccattctgttcttcaaggctgcgtttggcgctgaggaagttggacgtacgctcaacactaaacgcacagctgagcaagatctccctctcatactctccgcagaactcaaaatcgctggctcaatcagtctcgtcgccgatctcgttgatgacacttcttcgccagctaaaacggtgggaaacggtgtcgttttgtgcttgg

SEQ ID NO: 18708 - DNA, 389 bp, Glycine max
  Clone ID: LIB3049-033-Q1-E1-A8
ggctgcgtttctttctctgcacttcagagttcaaaccctagcgaagcatccactgtcgccgtcgcacactcgcacgccgctcacaagtttatgggctacgctgatgtcctgaagttgttgttggccgtggtggtttggtgcactgcgtacgttactgttgtaattctcgcgtcctttcgaaccgtttgcacattctgaaaccttgcaatttcattgatcacatgggttatgcacagcttgtcatatgtcctgctggtattggcaactccacgtattgctcatgtttgtatgaagactgtgttgctgcacagcgatcgatacatgttgtgaatcttgaacctgctgctgaaagttttgacaatcctgttgcgatggatataatggaactc

SEQ ID NO: 18709 - DNA, 380 bp, Glycine max
  Clone ID: LIB3049-033-Q1-E1-A9
ggaggctgagttctgtaattgtgttttggctgtggacaatggctctgtcttctgggcttttcttgtgttcttcttcccgtgttctcccaccaccagaaacccacactttcatgaggaccaggccttcttctgctgccttgcgcaccatttccgttagctgttgcaccgtctctcagtcgtctaagccagcccgcaaaatccgtggtatcatgaaaccccgcaaagtctcccccgagatggaagacctcgtcggcgctcccgagatggctcgaacccaagtcctcaaacggatttgggcttacattaaggacaacaatccttcagaccctacagacaagaggactataaattgcgatgaaaaactgaagaaggtgtttgca

SEQ ID NO: 18710 - DNA, 279 bp, Glycine max
  Clone ID: LIB3049-033-Q1-E1-B1
gatactcaactcactttcgtcgtcgctcacgctcacttccgggtacgagcgtcacggttcattagcctcagccaccagcagttcaatttgagcagcttcatgcactcatacagccgctcagacaatgacgtcatcatctgacaaagtgtctatctctagtccgtatcgcccctatattatagctccgccttgcaccagccgactactcatcctcaattcctcacgcttttcttaacctcacaggcggttgccggtggtgttcgtgctgctgtcaagcct

SEQ ID NO: 18711 - DNA, 300 bp, Glycine max
  Clone ID: LIB3049-033-Q1-E1-B10
gatgcttcacaaacggtatatgctgtatacctctgttctctctccccctccccgattcgttttgcccctttcgttgccctaatttcaaccatgcctcgccgtaactccggtggaagatctgcccgtcctgctcctcgtgcagcacctcgtcctgctccagttcaccatgctcctcctccagcccctgctcagagcggtggcggatctatgcgtggtggcattggttcaaccatagctcaaggtatggcttttggcactggaagtgcactggcacacagggctgtcgaagctgtcaagggt

SEQ ID NO: 18712 - DNA, 313 bp, Glycine max
  Clone ID: LIB3049-033-Q1-E1-B11
gggcactcagtagagaattaaataaaatcaagaaagcatgcatatgatgaagaaggtgtgtgggtttgcaatagtggtgatggcagcactttttctggtggagatgagtcccatggcagaggctgtgacttgtagccctgtggagttgagtccctgtttgggggcaatcacgtcctcttcaccaccatcgacaacttgttgccaatgtgagggaacaaaggccatgcctctgtggttacctcaaaaaccctagtctgaggccatatgtcaactctcctggttccagaatggttgctagctcttgtggggttcc

SEQ ID NO: 18713 - DNA, 262 bp, Glycine max
  Clone ID: LIB3049-033-Q1-E1-B12
ggcagcaacagcagcattcactgaaagcactcagtagggtttgcggtttcagagtttgtgacgcacgcatccatggccaccaccaccaacgccgccgcagccccgccgcgccagccctcccagaaggaagccgacatccagatgatgttagccgccgacgtccacctcggcaccaaaaactgcgacttccaaatggaacgttacatcttcaagcgccgcaacgacgggatttacattattaaccttgggaagacatgggaga

SEQ ID NO: 18714 - DNA, 404 bp, Glycine max
  Clone ID: LIB3049-033-Q1-E1-B2
cagctgccagaaaacacacaagggggtggaagtatttgcagaactttgtttcccaacctccattgcctccgcttctacctcgctaccatgatcattcctcagaagaaccgcaaggagatctgcaaatacctcttctaagagggagtttgctttgcgaagaaggacttcactttggcgaagcaccctgagattgacgtgcccaatctgcaggtgattaagctgatgcagagtttcaagtctcgcgagtatctcagggagacctttgcctggatgcactattactggttcctcaccaacgatggaacccagtttctcagaacttaccttaaccttccttccgagagtgtccctgctaccttgaagaaacaggccaagccacctgtcacgccctttggcgggccatc

SEQ ID NO: 18715 - DNA, 286 bp, Glycine max
  Clone ID: LIB3049-033-Q1-E1-B3
cacgcgtgactacagctgccatataaccacgcatggggagaccgcatttgcaaaatctagcgacccagactacattacgtcgccgtctacctcacccccaggttacgtccagacagatataccacggagatctgcaaatgacacatcgaatcaggagtttaccttgctaaacacgatgtcactttggcgagtcattctcacatgcatatcacatatccgcaagtgattaggctgatgcatacttttcactctccccagtacgtgacggacacttatgcatcgatgc

SEQ ID NO: 18716 - DNA, 400 bp, Glycine max
  Clone ID: LIB3049-033-Q1-E1-B4
ggagtgtgagagaaaccagtgactgacttttcgagaaagaaaaacaaaaatgagtttccgtcattccatcatgaacgctcttcccaatcgcctcttcttcctcttcgtttctgcattagtttctgcgaagaaaactggtgatgtgacggagctgcaaattggcgtgaagcataaaccagtatcatgtgaagttcaggcacacaaaggtgacagagtcaaagtacactataggggaaaactcactgatggaactgttttcgattctagctttgaaagaaataatccaattgaatttgagcttggtactggtcaagtgatcaaaggttgggaccacggattattgggaatgtgtcttggtgagaagcgtaagctgaaaataccatcaaaacttgggtatgga

SEQ ID NO: 18717 - DNA, 390 bp, Glycine max
  unsure (1)..(390): unsure at all n locations
  Clone ID: LIB3049-033-Q1-E1-B5
gggggaagaagagataggggtggtggcaatgtgttaccaatatcatatcatatattctttcatcttcttgggttagggttctacacttgcaatctcctttcacacccacccacccttcaaccatttcaattccttccctcacccaaaccgcactatcgttcttcgacacggtcctgtttattaagcggtttggataaaagaatagaagcgtaaaatggccttcgtagcacatcaacctcagggtttgtttgtgacatcttcctcgaggcgtttgccatggagcaaaaggctgaagttgaagcagtgtttaacanaacatcacatgattggaagaactgaccggcattgcctagtaaagtggaatgcttgtttaagtttagggcctccttg

SEQ ID NO: 18718 - DNA, 367 bp, Glycine max
  Clone ID: LIB3049-033-Q1-E1-B7
gatgctcccttgcttcactctcatcaaacaccacctttactcaactcctcccaattaaagttctttgggacacattcaacaagtttagttcaccaatcaaccttgttcctatattcacattcatatcatattataaattacattgacaagccttctccacttttttttttcacttctaaacattcagaaatgggagttggaggcacactggagtacttgtctgatctaatgggcagtggccaccaccaccacaagaagaagaagaagcagttccaaaccgtggagctaaaggtgagaatggattgtgatggttgtgagcttaaggtcaagaacgctctctcctcactaagtggggtgaaatctgtgg

SEQ ID NO: 18719 - DNA, 309 bp, Glycine max
  Clone ID: LIB3049-033-Q1-E1-B9
gattctaagatcgatcatcttcaatttccctatattacttgcaatattgattgaacactactagatcatgtgtataccgttgtatagctagctagctagctttctattgtctaatatacctttgtctgtgttgtaaattaaggtgcaagaagcaagtaatccctcataatacacacacacacatatatatatatataatggcggattggggtccagtggtgatagcagtggtgctgtatgtgttgctaagccctggtcttgtgtttcaattgccagggaagagcagagtggtggagtttgggaacatgc

SEQ ID NO: 18720 - DNA, 90 bp, Glycine max
  Clone ID: LIB3049-033-Q1-E1-C1
aaggggtaacagagagggttcgatctcgcaggcctggctgtttcacacacgggcgttcaatatcgccgatctcactgcatcggaggtggt

SEQ ID NO: 18721 - DNA, 292 bp, Glycine max
  Clone ID: LIB3049-033-Q1-E1-C10
gaactcaagtcattagcattcttctttgactttttggtctaaaaccggtttctcttgtcacaccaaatggaccgacccgccgccatattttccgacaccgtcaacctcaacggcacggtgacgcagctgtctctgctcgccgacgggaggctgtggtggccggagggcggtcaacgcaatttgagcatcgagaaagatgttctcgggttcaccggcgacggtcccgatataaggctcaaaacaatcgtggaaaccgaagatggatgctgtggcggtgcaagcagagcaaaac

SEQ ID NO: 18722 - DNA, 375 bp, Glycine max
  unsure (1)..(375): unsure at all n locations
  Clone ID: LIB3049-033-Q1-E1-C11
gaattcttaatataataatagagattgtagaaattagcagtaactggtgttgagtagctttggtcccttgtttttgttgtgctatggcgcctgatgctgccgccgccaacggcaaaaagagaagacgctatcttcctcataacaaggcagtgaagaagaagggttcgtaccctctgcggccaggcgtgcaaggttttttcatcacttgcgatggcggcagagaacaccaagcctctcgtgaagctctcaatattctcgattccttttatgaagagctagttgatggggaaactttcangttgtaaaggagttacccagcaaaacctttaaataaaaaaatcacgtttgcagattctgactcttctagtagcgatg

SEQ ID NO: 18723 - DNA, 271 bp, Glycine max
  Clone ID: LIB3049-033-Q1-E1-C12
aatgaaagacctcgtggatatggtggtggtggcggcggctttggtctatatggtgctgtaggtggctgtggttatgaaggtggtggtggtatcggttatcgtggaaatgtttctgatggttatggtggttgcaactatactcgaaatgataggggtggttatggatatggtgcactgcagttatggatcaggcagcaattacggggatagtcgccctgtcaataagtactcgggatgctatagtggtactaacagttgacattttggtgat

SEQ ID NO: 18724 - DNA, 397 bp, Glycine max
  Clone ID: LIB3049-033-Q1-E1-C2
gaagaagagagagagagagaaagagagaagagaggagggtgtgtttctggtttttggaaatttcagcccccatcgaaaaacaagaagccccaacgatagtaatcatcgaaggaatttgaaaggtcgaaacttgagcatctgggatcgcgaaattggggattttggttaaaagggtataatcttcggaactgattgatggcaaaactgtacgtgaaggcggtgccaccggcggatctgaacaggaacacggattggttcacgtaccctggcgtttggaccagttacatcctcatccttttcttttcttggatcctcgtactctctgtcttcggttgttctcctggcatcgcttggaccatcgttaatctcgcacactttgctgtaacatatgactttt

SEQ ID NO: 18725 - DNA, 175 bp, Glycine max
  Clone ID: LIB3049-033-Q1-E1-C3
gaaatcgaaagtgttttggaaatagcaaaaacgcactttctctctcgtctcgttgctggcagatttctctattcggactctctctcactcttcaatctattccacaggggcttcgaacttgtcatcactgcattttgcctttctatgggaatttgaaaagcctaattttcgtttt

SEQ ID NO: 18726 - DNA, 396 bp, Glycine max
  unsure (1)..(396): unsure at all n locations
  Clone ID: LIB3049-033-Q1-E1-C4
gggggaagaagagatangggtggtggcaatgtgttaccaatatcatatcatatattctttcatcttcttgggttagggttctacacttgcaatctcctttcacacccacccacccttcaaccatttcaattccttccctcacccaaaccgcactatcgttcttcgacacggtcctgtttattaagcggtttggataaaagaatagaagcgtaaaatggccttcgtagcacatcaacctcagggtttgtttgtgacatcttcctcgaggcgtttgccatggagcaaaaggctgaagttgaagcagtgtttaacaaaacatcacatgattggaagaactgaccggcattgcctagtaaagtggaatgcttgtttaagtttaaggcctccttgcttttg

SEQ ID NO: 18727 - DNA, 112 bp, Glycine max
  Clone ID: LIB3049-033-Q1-E1-C5
gaatcataaagtggttgataaatagcaatgtcttatgacactggacggatattattagaaggttatgtctgtgacgaaggtgtctcagcacgtctatgattgggatggccaa

SEQ ID NO: 18728 - DNA, 394 bp, Glycine max
  Clone ID: LIB3049-033-Q1-E1-C6
ggttctagtgtatgtgattgttgtgactcgttcttcttcgtcgttatcttcttcttttgttgtttgtgtgtttgttttttctctcacctgaaaatgtcttgctgcggtggtaactgtggttgcggaagcgcctgcaagtgcggtaacagctgcggaggctgcaagatgtacccagacttgagctacactgagtcaaccaccaccgagaccttggtcattggagtggcaccagttaatgctcaattcgagagtgctgaaatgggtgttcgcgctgagaacgatggctgcaaatgtggagctaactgcacctgcaacccctgcacttgcaagtgatgtgttggagagctaaaacttcaagcagaaatggcccttagaaataatgatacaaactata

SEQ ID NO: 18729 - DNA, 398 bp, Glycine max
  Clone ID: LIB3049-033-Q1-E1-C7
gaaatcgaaaaagttttgaaaagaaaaaaaacgctctttctctctcctctcgttgctgccatagttctctactcgttctctctctctctctctagtctataccacacaagcttcgaacttgtcagcaccccattttgcgtttccaggggaatttcaaaaccctaattttcgttttcggagttctctaactcctcgctggaaaactgaaaccctagggttttccccctttttggttcttggcgtctaaatttgcttcattttcatgatttgtgtagcgatttcttccacttaagatgactaagggtacctcgaaaccggggggtactggaagcggtggcttccacgcggttcacgcggagcgtgacctagaatcgaattgggaagttgacctcgccaag

SEQ ID NO: 18730 - DNA, 377 bp, Glycine max
  Clone ID: LIB3049-033-Q1-E1-C9
gatcgcacaacattattctttcgcaccttgcagaatcaattttctctctcaatcgtctttcatggctcgtaccaagcaaaccgctcgcaaatccaccggtgggaaggctcctaggaagcaacccgccaccaaggctgcaagaaaatctgcacctaccaccggtggagtcaagaagcctcatcgctatcgtcctggaactgttgctcttcgtgagatccgaaaataccaaaagagcacagagcttctgatccgcaagctcccctttcagcgtcttgttcgtgaaatcgcgcaagacttcaagactgatttgaggttccagagtcacgcggttcttgcgcttcaggaagctgcggaggcttacttggtgggtttgtttg

SEQ ID NO: 18731 - DNA, 253 bp, Glycine max
  Clone ID: LIB3049-033-Q1-E1-D1
atatgagggccgatttcaaatattatgcttgtctggttcttacttgggtgctgaagaacgtggacctcacaatagaacgggtggcatgagtgtttccctttctagtcctgatggtcatatcattggtggtggtgttaataggcttgttgctgcaaacccagtgcatgtggtagcatgcagtttcgtatatgggggctccaagccaaagactaaagaagtgaccactaccactactactacaaaagatagcagt

SEQ ID NO: 18732 - DNA, 296 bp, Glycine max
  Clone ID: LIB3049-033-Q1-E1-D10
gggaaggagccgtaccagcagcggaagctctagcttgggcagcgaatcacaatggcgagaggattgaagaagcatttgaagaggcttaatgccccaaagcattggatgcttgacaaactgggtggtgcatttgctcctaagccctcatctggaccacacaaatccagggaatgcctgccactcatactcattttgcgaaaccggctgaagtatgctctgacataccgtgaagtcattgctattctgatgcagcgacatgtccttgttgatggcaaagtcaggacagacaagacata

SEQ ID NO: 18733 - DNA, 309 bp, Glycine max
  Clone ID: LIB3049-033-Q1-E1-D11
ggttgttgttgttgtgcattttgcactttgcaaaaatttggttgcagaggcagagaggaggcaacaccacaccacaccgcaccactctctacactctcactctgcaacactcaaatctcgtttccacctaaacgacttcgttttgcgttcttttcccttcttctgatttaggtttcagagggaaaaggagcagcgatggactcacgcacgtataatcctcgcaccgtcgaagaggtttttagggatttcaagggccgaagagctggtctcatcaaagccctaaccactgatgttgaagattttacaacc

SEQ ID NO: 18734 - DNA, 292 bp, Glycine max
  Clone ID: LIB3049-033-Q1-E1-D12
gaagagcagcaatgagtattagaatccatcatgcattggcattgcttattgctacaaagccattacacactcacatatcctcaaagataagaaacaaagcaccataactcatagcaaggtggccaaaaggccaagatttggtaagcctagcatgctccaagtctcttgccatccacaagtcgcttccagtagaaagcaatctctttctgagtctctattgcagctttcttaatcttctcaccagtctcactagtgatagctgtgatatgaacagctttggtagtgagggggc

SEQ ID NO: 18735 - DNA, 390 bp, Glycine max
  Clone ID: LIB3049-033-Q1-E1-D2
agaagaatcccatttataacattgataggagcttgggagctcgcaatggaggcaggccatttaaatatgaaggaaatctttatcgtatgggtcaggactgtggtgatacatatgggagaaagttgcgtgtttttaagatagaaactctcactattgatgaatacaaagaagttgaagtacccttaggctttgttgaatcaaacaagggtcgaaatgcttggaatggggctcgataccatcacttagatgtgcagcacctgccatctggtgggtgggttggtgtcatggatggggatcatgttccttctggagattcagtccggcgattcacggttggttgtgcttctgttgccgtcgctgctatactcattgtactattgggtgtgctac

SEQ ID NO: 18736 - DNA, 403 bp, Glycine max
  Clone ID: LIB3049-033-Q1-E1-D3
gacactaaacgtggacgaatatcgaacttcaattataccctgaccctgtgttagtttcgtgtgttgagaaacatagataggcagatatgcatcgaagcgcatctgacggttaagccttggatttcgagcctgaagacgatgacttgatggacgaggacggcgcccccgacgccgacgcttctccgcctcaacctaaactcaaatcctccatcaacgccgctgccgcccccaaaaagaccagaggtctcggattccggcaggacaccgacgccaaccgtgacactctcctcttccgctccgacttcgagtctctcaccaccgatggcggctctgggcctcaaagatccattgaaggatggatcattctggtcacgggtgtgtaagaggaatcgcatgaagacga

SEQ ID NO: 18737 - DNA, 161 bp, Glycine max
  Clone ID: LIB3049-033-Q1-E1-D4
aacaaaccgagaaagcttttctgaagcaaccaaaagtgtttctcagcacaaagaacactgggaagggaaagagacctggaaaaggtgggaaccgcttttggaagtccattgggcttggatttaagactcccagggaagccatcgaagggaactataatgac

SEQ ID NO: 18738 - DNA, 399 bp, Glycine max
  Clone ID: LIB3049-033-Q1-E1-D5
gagtggaagagtgaataagagatatcaatatattatgataatggagggatacaataagaaggttatgattgtggggatggtgttgggcatggccatgattgggatggccaatggccaatactcgttttgtcgcatgcccagcgatgggttggcggcatgcaagccgagtgtgagtggggactatcctgctgatccctccactgcttgttgctcagccattgccaatgctgatcttaaatgcttctgccgcttcaatgattcgggccttctctctatgtatggtgttgatcccaacaagtgcatggaactcactgttaagtgcaaggttgtcgactctttccactgctagattcattagagggggcactaatcaatataaactacacaagggcacttaat

SEQ ID NO: 18739 - DNA, 375 bp, Glycine max
  Clone ID: LIB3049-033-Q1-E1-D6
ggactagagaagaagagtgatatggcttgtaattctatctcccaagcagcttcaatgggcacacaaatatgcacccaaatagcttccatattctcaaagcccacccatccatacccggccccactagaccttttagtcaccgaactcacctccgttgcctctcaaaaaggcaacgtttttctatactgcgtgggccgcgaaggcctcatgctcaaggccctctgcatgcgcctcttccacctgggcctctcggcccactttgtcttcgacatgaccacaccccccatagccgccggcgacctcctcatcgcctctgccggccccggcggattctccaccgtcgatgccctctgcgccgtggcgcgctcaaacggc

SEQ ID NO: 18740 - DNA, 399 bp, Glycine max
  Clone ID: LIB3049-033-Q1-E1-D7
ggagtgaggagactgagaaaacagaagaaaacaaaatggaagacacagtttctgcgttgaggtctttgatggtttctcactctccgccgctggatgccttagtggtgccctctgaagattatcacctgagcgaatatgtgtctgcacgagacaagcgccgcgaattcgtttccggcttcactggaagtgccggcttggcactttatacaaagaaagaagcactgctgtggacggatggacggtattttttgcaggctgagagagaacttagtgctgggtggaagctaatgcgaattggtgaagatcctgctgtagatatctggatggccgataatttgccaaaagaagcatccgttggggttgattcctggtgcatttcaattgatactgctcaaagat

SEQ ID NO: 18741 - DNA, 281 bp, Glycine max
  Clone ID: LIB3049-033-Q1-E1-D8
gaactaagtagagaataaaatcaaatcaggagagcatgcatatgaacatgatgatgaagaatgtgtgtgggtttgcgatactgatggtggcagtgcagcttctggtggaggtgagtcccaaggcataggctgtgacttgtacccctgtggagctgagtccttgtttgggggcaataacttcctctcaaccaccatcaacaatttgttgccaaaaggtgagggaacataggcaatgcctctgtggttacctcaaaaacccaagtctaaggccatgtgccaat

SEQ ID NO: 18742 - DNA, 383 bp, Glycine max
  unsure (1)..(383): unsure at all n locations
  Clone ID: LIB3049-033-Q1-E1-D9
ggatagcaagagagacatgcgagttcgactctcgttctatccatccatgttcagcagtccttgtccatgttggaactgttgatggcagtaccgctcaactacgagatgcttgaaagtagttgcttttactgtatttattgatattgggttagtgttccgtgtaccgcaccgagccttaataggttgtttgagattctgtaagtaactactccgtgcttcaattggtcaaagtaaatgaaatgaaacgttgatatcaatcactttttatataagaaatcattagcaaaaatcttaagaaaagaaaagtaagtttccttacttatgaaaaggttattggacccttgtgctanaattgcttttttttggggagaaaaatgaaaatt

SEQ ID NO: 18743 - DNA, 342 bp, Glycine max
  Clone ID: LIB3049-033-Q1-E1-E1
gactgcaactttgctctctgtgaggcttcaatttctaactaaggtttcgcttagagtaagcactaaccatgggggtcttcacctttgtcgtccgcaaatctggcagcgaatggagcgccaagcaacattccggcgacatcgaggcctctgccgattccaccttcgatctccaacggaagctcgtgcaagccgctctctccgttgattccaccggtggagttcagtcctccatctctcccgtgtcatctacctccgctgtgttccaggtgatagtaggttgtgcattattcgttggacgtggtggtggtgctgtatcaactgcacctgcacgtggtgctgccg

SEQ ID NO: 18744 - DNA, 301 bp, Glycine max
  Clone ID: LIB3049-033-Q1-E1-E10
gagggtttttgtcgttgcgactaagagttgctgcttcttccgccactcagcacttcgctccctctgtgcttcaccaaccatggccgaaatcgaagctaccgttccagatccctctcaaatcgacgtcaaacttttcaaccgctggagcttcgacgacgttgaggttactgatatgtctctggctgattacattggagtgtccccgtcaaagcatgctacatatgttcctcacactgctggtaggtactcagtgaagaggttcaggaaggcgcagtgccccattgttgagagactcaccaac

SEQ ID NO: 18745 - DNA, 164 bp, Glycine max
  Clone ID: LIB3049-033-Q1-E1-E11
ggttgttgttgtcgttgcttctgcactttgcagcatcttggttgcatcagcagttcggacgctctgtgattcgacaccgcaggactctctagactctcacgctgcagcatctctcatctcgtttccacctaactttatcttccttttgcgtccctttcacttct

SEQ ID NO: 18746 - DNA, 305 bp, Glycine max
  Clone ID: LIB3049-033-Q1-E1-E12
gatccccaacagtaaaagaagaaaccggattcatactctctccctcccctctgtctctctttaccaccggacctgcttttaaagcttgttcttcctctttcacatgaatacactagtcatggacacaacaaactcatcaacccctcgacctcaacctcaacctcaagactcatcctcctccaagaggcacttccactggaccaacaaggttggaaatgaagaccctcaactcctctccacttcagaaacaatgtccaaaatcatagaagaagacacatacacaatggaagaagaagaacaacaag

SEQ ID NO: 18747 - DNA, 136 bp, Glycine max
  Clone ID: LIB3049-033-Q1-E1-E3
gatgagcttgagtaaacttatatgatatatatttacgttcattcacagtatgtaattaagatgtctcaattgtaaatttaaatacttgaaaatttttatcatatcacatattttagggtatgttgtccattggttg

SEQ ID NO: 18748 - DNA, 228 bp, Glycine max
  Clone ID: LIB3049-033-Q1-E1-E4
caaaaaaccacccgtcgggggcccatttaaaaaaaacaaatccccgaaattgagggtttcaacttggggggaaccacccaaattgaggaactggaattttacggaaaccccacttagaattcatcaaaaacggcattcaacaagaaaccttggccttccttatccggcctccaaggaaaggtaattcccttaaaggggtcccttgccccataacaaagttttaacaaa

SEQ ID NO: 18749 - DNA, 404 bp, Glycine max
  Clone ID: LIB3049-033-Q1-E1-E5
gaaagcaaaagtgttcccatcatttgctttcgcagaagagagagaaacccatttctagagagagaaactcgcagtcgcagacatgtcttccttcgatgccttcgccgacgacttgaacgtcaactcttcttccactcaccaccacgacgaagacgaggacaacttctccggttacggcggctactcctccttcaccggaggattctccgccgacggcgatgtcgccgtcgaccactccgccgccgcgtcgccggagatctacggcttcactgatccgaatcccgcttactctcagtctcccttcgaatcggccaacgtagagaacggaaacgaaaacggaaacggctatggccaaggcgacggcgacggcgacggcgtttttatctccgatggtccggtgcttc

SEQ ID NO: 18750 - DNA, 377 bp, Glycine max
  Clone ID: LIB3049-033-Q1-E1-E6
ggagtgagtgagtgagtgagtgtgtgtgagagagaaagagaaagagaaagagagagaaagcagagaaaacccgaagcagttttctcactctttttaatcggaacctctcattccgcgttcagattgcgtcccccatttggtccgtacaatggagcggtacgggcgggccagcgaagggtcgcagtctgatccgtcgccggaatggactttggccgccggcgccgacgccggcctcgaagagtcgtcgtggcaactcggattagccggtgctgaatcgtaccctatgcgtcccgacgaggctgattgtatctactatttgagaacgggattttgcggttacggcacacgctgtcgtttcaaccatcctcgagaacgtg

SEQ ID NO: 18751 - DNA, 384 bp, Glycine max
  unsure (1)..(384): unsure at all n locations
  Clone ID: LIB3049-033-Q1-E1-E7
gaccgcaatacaaccttagattctcggagcgagagcgagaaacagaaacctatttttattttctctcttcatatcacttagactgagactggatgcttctgtatccatcatattatatgatgattattgaattgattatgcgttcagatttcacttcaggatcactttgacagtttgacttgtccggcaccaacttctggtattactattgtctgagttctcaggagttctttcacagaaggtagatgggttctagaatcccatctcataagcttagcaatggcctctacgtatcaggacggccgggagcagccanagaaagactccaacaatgacatcaacagccgtgccatataccggtggagacataaaaaagtctggaga

SEQ ID NO: 18752 - DNA, 398 bp, Glycine max
  Clone ID: LIB3049-033-Q1-E1-E8
ggaccttggcgcatgcttcaggttaattgggatgaacctgaagtcttgcagaatgcaaagcgagtcagtccttggcaggttgaacttgtttcccttccatttgcacttcatacagtatactcccctaacaaaaggcttagatctgaccagggttctgggctgttaagtaatatggagggagaccccttctttcctatgacagggttccctaactcgacaatggaacacatgacagggttccctaactcgacagtgggacacatggataaatcattgttgagttatgatacttttcctgctggcatgcagggagccaggcatgatctattttctccatcaagtttttccaactttttaaatgataagtcctatctgtatatgggtagtggttcatttgg

SEQ ID NO: 18753 - DNA, 366 bp, Glycine max
  Clone ID: LIB3049-033-Q1-E1-F1
acatcagtgaaggtgacacaaaacggtatctagggaacacaacattggagagtatcgagctagaaccacagaaaggaccggttcatgatcaatatcactgatcatgttggttctatttcttcttcatcctcaagatcatcttctgtttctggaagatcaagtgggtcatcattcgtatctgattcatttgaggatctaacagcctctgcgtcctcttctgcatcaacatcagctgatgatcaacttgtagttgtagctgatccattgggtgacatgacatcgctctttcaacaacttctcatcaacatggggctatcacaattctaccagggagagtcacaaaccttcacttcactgacccatgtg

SEQ ID NO: 18754 - DNA, 378 bp, Glycine max
  Clone ID: LIB3049-033-Q1-E1-F10
gcttctgcgagcatgttccctacacggatccatacactcccagtaaacatttttcattctcagcaccagtcagcaacatccctttcctttccacaagacaccaaagttcacagcttttttgttctttcacctcgattcacgaactgggtcatcctctgattgtggattattggatttcattttgcgacacaccaaacccccaagactttgacttccaaagccagctctttgtggtttgccaggttgccagttactgttgatatcataatggattccccacaatctgttgtgtcacccttcaggagctcagtgttggggtagagtgagaagcacaagtctgaggttttccaaggaaactctagtcctttttcaaggaca

SEQ ID NO: 18755 - DNA, 370 bp, Glycine max
  Clone ID: LIB3049-033-Q1-E1-F11
gaaggaagaaggaggcgtaagttactagcaacaccctacgacatcgaaaggttcaagatcatggaagaaaagcgcctctccatgctccgcgcgctaaaaaaagcgatcccattcaaccaaattacgtctctctcgttcccttcccttcctcttggcccccaaaattctgtttcacaatcctaactccgaaaccaacaatggaacaacccccgaagcccgaaactgtgcccgaatcccacgtcccgaacggccactccaccaccaccaccgccacaaccaccgtcacaaacggatcgggatcggaattggatcccaggtcccgaaggaacgcgccgcatcgtcgtccggcagcacgaaaaaatcggtgcac

SEQ ID NO: 18756 - DNA, 323 bp, Glycine max
  Clone ID: LIB3049-033-Q1-E1-F12
ggatctgttgattacagcaatcttggagctttcacgtacttggtgcatggaaatggcatttgtgccggatactctctattttcagcggtgattgctgctatgccatgcacttccactatacctcgtgcttggactttctttctgcttgatcaagtgctgacatacataattccatcggctggagcagtgtcaacagacgttctatacctgacatgagaatagatacactacatcaacgtggagctcaccatgtggctcttttggtcgattttgccataacgtcacagcatcagtatctatcatacttgtggcaatgttttgct

SEQ ID NO: 18757 - DNA, 213 bp, Glycine max
  Clone ID: LIB3049-033-Q1-E1-F2
cacgcggacgtacagctgtcaaaaatccagctaaagggactgccacagaggggcactagggactcactctcttcacagcaggactcacagtggctttcatcttctcggggtaagttttgatcatgtacacatcatatgaagacaattcagaaggctaacgatgtggatccaactcaatttgatgaatcagttggtaatgacagtgtttgatct

SEQ ID NO: 18758 - DNA, 395 bp, Glycine max
  Clone ID: LIB3049-033-Q1-E1-F3
gtctcaaagaaacttctgaagatggctggcatagcattcggaagcttcaatgattctgtcagttttgcctccatcaaggcctacattgctgagttcatctcaagccttctctttgtttttgccggtgttggttcagccatagcctatgctaagttgacatcagatgcagctcttgatccaactgggttggtagccgttgctatttgccatggttttgctctcttcgttgctgtttctgttggagccaacatttctggtggccatgtgaaccctgctgtgacctttgggttggctcttgggggccacatcaccatcctcactggtctcttctactggattgcacagcttctcggctccatagtggcatccttactcctcaagtttgtcactggcta

SEQ ID NO: 18759 - DNA, 405 bp, Glycine max
  Clone ID: LIB3049-033-Q1-E1-F4
ggagagagagagagaaatggagaagacaggagtgttatcggcgaaggaggcattcgagaagcttgaaaaggtgggagaagggacatatgggaaggtgtacagagcaagagagaaggcaactgggaagatcgtggctctgaagaagactcgtctccacgaggacgaagaaggtgtccctcccaccactctccgtgaggtttccattctgcgaatgctctctcgcgatccccatgtcgttaggttaatggatgtcaaacaaggtcagaacaaggaagggaagacagtgctctacttggtatttgagtacatggacaccgatctcaagaaattcatacgctctttccgtcaatctggggaaaccattcctcgccatatcatcaaaagcttgatgtaccagctttgcaa

SEQ ID NO: 18760 - DNA, 386 bp, Glycine max
  Clone ID: LIB3049-033-Q1-E1-F5
gagagaaaccctaggaagcagcagcggcggcaacagggagagaagatgaagttcaatccacgtgtgtcgagcagccgccgcaagagccgaaaggctcatttcacggcgccatcgagcgtgcggcgggtgcttatgagcgcccctctgtcggcggagctgcggtctaagtacaacgtgaggtcgatcccagtacggaaggaggacgaggtgcaggtgatgcgaggaacatacaagggtcgcgaggggaaggtgactcaggtctaccgtcgaaagtgggtgattcacattgagcgcataacccgcgagaaggtgaatggttccaccgtcaacgttgggattcacccctccaaggttgtgctgaccaagctcaaattggacaaggaccg

SEQ ID NO: 18761 - DNA, 395 bp, Glycine max
  unsure (1)..(395): unsure at all n locations
  Clone ID: LIB3049-033-Q1-E1-F6
ggcagtagaatagtaatagtggtaacaaaaggcaacagagaacagaagagaaaggaaaagagagggtttggtgagttacccaagagaaaggatgaagagagagcgccagcagcttggttccaacgcaggaacctcaagctgcggttattcaagcggaaaatcgaatctttgggaggaagaaggaggcatggacgagcttcttgcagtggtgggttacaaggtgaggtcatcggacatggcggaagtggcgcagaagctggagcgtcttgaggaagccatgggaaatgtccaagatgacctcacggacctttcaaacgacgccgttcattacaacccttccgacatctccaactggctccaaaccatgctttccaattttgaccctctcncctccg

SEQ ID NO: 18762 - DNA, 398 bp, Glycine max
  Clone ID: LIB3049-033-Q1-E1-F7
gacactcaattcattttcttctcctctctctctctcctagggttagggttttctctcttcatcactctctgtgtcactccgtttcaatggctcagcacgacgctcaacacggcgggtcagagaatgccgctgcagctgctacggtgtcatttgtcgctgtgaagcctcatctcctcgtcgaagctctcaaagccaatgacgccattctgttcttcaacgctgcgtttggcgctgacgaagttggtcgtacgctcaaccctaatcgcaaagctgagcacgaactctctctcatactctccgcagaactcataatcgctggctccaacattctcgtcgccgacctcgttgatgacacttcttcgctagctaaaactgtgggaaacagtgtcgttttgtgc

SEQ ID NO: 18763 - DNA, 370 bp, Glycine max
  Clone ID: LIB3049-033-Q1-E1-F8
gtgttgtgttgaagtagcaagctagcaaagatgtttggcatcttaggaggcaataaggggcacaagatcaagggtactgtggtgttgatgagcaagaatgtgttggacttcaacgaaatagtgtccactactcagggtggtttggttggtgctgccaccggcatcttcggtgctgccaccggtattgttggtggagttgtcgatggtgctactgccatcttcagtcgcaacattgccatccagttgatcagtgccaccaagactgatggacttggaaatgggaaagttggaaagcaaacctatttggagaaacatcttccttcgttaccaaccttgggagacaggcaagatgcattcagcgtttattttg

SEQ ID NO: 18764 - DNA, 303 bp, Glycine max
  Clone ID: LIB3049-033-Q1-E1-F9
caagcagtggttgaatgagattgatagatatgcaaatgacactgtatgcaagcttcttgtggggaataaatccgatctagttgataacaaggctgttgactcgctaacagccaaggcatttgcagatgagcttggtatccctttccttgagacaagtgctaaagactcaatcaatgtggagcaggctttcttgaccatggcagcagagattaagaagaagatgggaagccaaacaactactggtaagtcggcagaaagtgttcaaatgaatgggcaaccaatcccacagaagagcaactgctg

SEQ ID NO: 18765 - DNA, 367 bp, Glycine max
  unsure (1)..(367): unsure at all n locations
  Clone ID: LIB3049-033-Q1-E1-G1
ggagtggaagtagtagcaagtacgtcgtatatgtggttgatcttttgctggttgtttgttttgttccttccaattgtcagatctgaatcaccggactcactcttcacactcactcacactgaatggcttctgaaggcgaccctcaccaccgccaccaccaccatcaagatcacgatcatcatcatcatgatcatgatcaccatcatcatcacgatggagagggagagaccaactcatgggtangtaaggatgggaaggtgtaccatagccacgatggtctggcgccgcattctcaagaacccatttactcccccggctacttcaccagaagagctccaccgcttctcaacagaaacttcaacgaaag

SEQ ID NO: 18766 - DNA, 334 bp, Glycine max
  Clone ID: LIB3049-033-Q1-E1-G10
gggtgctcgaagaagtcccattcattgcactgatagcatcgatagggatcgatcttaacgctgggggtaagagcaattcgaccaaacgaacagcatcaaagtccaatgacatctacctcaaattacatgtcaagctttatcgattccttgttcgaatgacagacatcaatttcaatgccgtgatactcaagcgcttgttcatgagcaaggttaacaagcctccaatttcattgtcaaagttaattaagtatacaaaagggaaggacgataaaattgctgtactactggggactgtaactgatgatatcagagtatatgacattccaccattgaa

SEQ ID NO: 18767 - DNA, 292 bp, Glycine max
  Clone ID: LIB3049-033-Q1-E1-G11
ggggcgaggtggccatacagtgagacgatacagagtgcgttgttgctccttcgccacaactcgctgccaacatgggtatctccagagattctatgcacaagaggcgtgccactggtggtaagaacaacgcatggaggaagaacagaaagtatgagcttggtcgccagcctgctaacactaagctgtcaagcaacaagacagtcaggatgatccgggttagaggtggaaatgtgaagtggacggcactgatattggatactggaaattactcctggggaaatgaatctgtaac

SEQ ID NO: 18768 - DNA, 409 bp, Glycine max
  Clone ID: LIB3049-033-Q1-E1-G2
ggtagcaaaactgacatagttcagacttcagacttcccattccaatttccaagtttttcaaagaaggtgagtgatgagcatggagcatttgccaggagaattggtgtccaacgtgctctcaaggttaccatcgaaggtgttgcttctatgcaagtgcgtgtgcaagtcctggttcgatctcataaccgatcctcagtttgtttccaattactatgttgtctacaacagtcttcaaagccaagaggagcatctcttggtaattcgaagaccctttttttctggcctcaaaacttacatttctgttctttcttggaacaccaatgaccccaaaaagcatgtttcttctgatgtttctaaacctccctatgaatacaactcctgacacaaatactggaccgaaatcttgggt

SEQ ID NO: 18769 - DNA, 380 bp, Glycine max
  Clone ID: LIB3049-033-Q1-E1-G3
gagaatggagacgggcattaaagtgaggaaaagtacttacaagttttgggtccatgattcatcgtgcgtatctaaaacatcttcaaatctatctttgaccgtcgtactctttttaattttggctcatcatcacccttcgccatttcgccgctgttgcagactctgctcaaaatacacaaacaacagccaccacactttcattcacccaccaccctcttacaatacaatatctccattttgcccttctttcccccctcatctctataaatattttaatctctctcccatttcattcattaagcatacactcacacttttctttctcatcctctcattcattactctgatccgacggctgcgatcttctcgtttctccaatc

SEQ ID NO: 18770 - DNA, 338 bp, Glycine max
  unsure (1)..(338): unsure at all n locations
  Clone ID: LIB3049-033-Q1-E1-G4
ggaacacaacacaagtacttacagacatacatactctctcaatttctctctcttcttactttttctctccaaaccttacatgcacaaagttgtgtacccatggaatttgcttgcttagactaatcaaccaagttttgcattttgtgtaaccaaaactctatctctttaatttttttcttctggggttggcaaagtcagcatgcaagagcaagatttctaagctggttgatggtttgagttccaaaaaattgaactttttgttgaattgaaatttgggttggtgaaaggggtgttgatgaacagatgaagaacgaagagcacgctcgtantttgtttgg

SEQ ID NO: 18771 - DNA, 398 bp, Glycine max
  Clone ID: LIB3049-033-Q1-E1-G5
ggcagcgcttgagaccaagccccactcaaccaccacaccactctctctgctcttcttctacctttcaagtttttaaagtattaagatggcagagacattcctatttacctcagagtcggtgaacgagggacaccctgacaagctctgcgaccaaatctccgatgctgtcctcgacgcttgccttgaacaggacccagacagcaaggttgcctgcgaaacatgcaccaagaccaacttggtcatggtcttcggagagataccaccaaggccaacgttgactacgaggagatcgtgcgtgacacctgcaggaacatcggcttcgtctcaaacgatgtgggacttgatgctgacaactgcaaggtccttgtaaacattgagcagcagagccctgatattgc

SEQ ID NO: 18772 - DNA, 398 bp, Glycine max
  unsure (1)..(398): unsure at all n locations
  Clone ID: LIB3049-033-Q1-E1-G7
gacaacactcatagtagagtaaccaaaaggagagtgcaataactcgttgtacattcctagtgtgtgggagagacatggctaagatgtgtgttttggtgttggttcttgctctggctgtggccacaagtgccagaaacgttcccaaccccaaggatgctggtcttaaggaccagaagaacttcatcagctatggtggagttggtggttattccgggattgggaacaatggactgccttttggaggagctggtgccagaataggtggtggttttggcggaggtggtggacttggtggtgggctcagcggtcctaccggtgggatcgganggtttggcggtaccggtagcggtgtcggtggcggtattggtggtggcgttggaactggcgttggtggtggc

SEQ ID NO: 18773 - DNA, 148 bp, Glycine max
  Clone ID: LIB3049-033-Q1-E1-G8
gggtttaagtgggtgcactgatgtcaatgttcttgcttgagattcgtcaacttgcagaaatccaagcaatggctgcatctaagaaactgattacaagaaaagagtgggagaagaagcttaatgatgtgaagatttggaaagaagacat

SEQ ID NO: 18774 - DNA, 305 bp, Glycine max
  Clone ID: LIB3049-033-Q1-E1-G9
gacacacacgtaacttcatctgggttgcagggaaaaagaaaaataaaatgggttccgataataccaacttggagttcttgaaggagatcggtttgggctcctccaacattggttcttacattaatggccaatggaaagccactggttcttctgtcacttctgttaatccttctaacaatcagagcatagctcaagtgactgaagcgactttgcaagattatgaggagggattgcaagcttgcagtgaagcagccaagacatggatgactattccggcaccgaagagaggtgagattgtgagacag

SEQ ID NO: 18775 - DNA, 331 bp, Glycine max
  Clone ID: LIB3049-033-Q1-E1-H1
ctgccatacgacgagatacgggggagcgagcgagcagtttcaaatagaggatttgggattgggaaggcgagggattgcgctgcgtctcttcctcttctctttcgattcatccctcattcataatcttcgaatccaataacctcagcctcacactcacacatacacacatctgaacgcgtatcgtccctcccatggcttcaaagcgcatcctcaatgagctcaaggacttgcataaagacccactaacttcttgcagcgctggtccagtagctgaggacatgttccattggcaagcaacgattatgggtcctgccgacagtccttatgctgg

SEQ ID NO: 18776 - DNA, 296 bp, Glycine max
  Clone ID: LIB3049-033-Q1-E1-H10
ggaacagctttttgcagatgtcactggctcctcctgttgcagtccttattctcagcttgttggctactttcctagtggtgattcactccccgattgcatttatagaatcttttaccagcccttattggacagaaagacacttcacgctttctctctcacatccctttctctatgctcacatatatatataataaaactctacaactggccaatataatcagcttttgctccctgactcatgagtatatgatatatactttttatgtgttgtgtaccactttagattactacttact

SEQ ID NO: 18777 - DNA, 306 bp, Glycine max
  Clone ID: LIB3049-033-Q1-E1-H11
ggcacaagtttgttgagatagctagaagcaataagatgaaaatgaaagtgcttgttttgtttgttgctacagttttggtagcatatgaatgccatggctcagactaccagaagttccctctccaaatgaaaactgggtttggtgggcaatacagcaatgaggtggcatgtgccagttggaggcttggcgtggaagcaaacaacgtagtcaagtggcaaactgttcctgcagcttgcggagagtacatagctgactacgttctacgagaccaatatagatcagattccaaaacagttaaccaacaag

SEQ ID NO: 18778 - DNA, 322 bp, Glycine max
  Clone ID: LIB3049-033-Q1-E1-H12
gaatctagtggaagagtgaataagagatatcaatatattatgataatggagggatacaataagaaggttatgattgtggggatggtgttgggcatggccatgattgggatggccaatggccaatactcgttttgtcgcatgcccagcgatgggttggcggcatgcaagccgagtgtgagtggggactatcctgctgatccctccactgcttgttgctcagccattgccaaggctgatcttaaatgcttctgccgcctcaaggattcgggccttctctctatgtatggtgttgattccaacaagtgcatggaactccctgtta

SEQ ID NO: 18779 - DNA, 395 bp, Glycine max
  unsure (1)..(395): unsure at all n locations
  Clone ID: LIB3049-033-Q1-E1-H3
tggctcgcaaggtgtctttgatccgagccatcatgtacatggtggctcagtgcttgggtgctatctgtggagttggtttagttaaggctttccaaaagtcttacttcaacaagtatggtggtggggctaattccctcgctgatgggtacagcacaggtactggattgggtgctgagatcattggcacctttgttttggtgtacactgtcttctctgccactgaccctaagaggaatgctagagattcccatgttccggttttggctccacttcccattggatttgctgtgttcatggttcacttggccaccatcccagtcactggcactggtatcaaccctgctangagtcttggagctgctgttatctacaaccaagataagccatgggatgac

SEQ ID NO: 18780 - DNA, 412 bp, Glycine max
  Clone ID: LIB3049-033-Q1-E1-H4
ggttctagtgtgtgattgtttgttgttgtaactcgttcttcttcttttgttgttctgtgtttgtgtttgttttttctctcacctgaaaatgtcttgctgcggtggtaactgtggttgcggaagctcctgcaagtgcggcaacggctgcggaggctgcaagatgtacccagacttgagctacactgagtcaaccaccaccgagaccttggtcatgggagtggcacctgttaaggctcaatttgagggtgctgaaatgggtgtgcccgctgagaacgatggctgcaaatgtggaccaaactgctcctgcaacccctgcacttgcaagtgaagtgttgggagagcaagcttcacgcagagatagccctttaataggaataatgataaactattaatgtgtaactaagaacttatg

SEQ ID NO: 18781 - DNA, 391 bp, Glycine max
  unsure (1)..(391): unsure at all n locations
  Clone ID: LIB3049-033-Q1-E1-H5
gggatttgcgtcgccgcaagcattgcagagtgacagcagcggcagcttggcctgaggttagagatggttagccaaaggcagcgactcgctcggaagcgatacaaatcggaacaccctgagctctttccgaagcccaagcccacaccccccaaagaccccgacaagaagaaaaagaagaacaaaaacagcgctttcaagcgcaagaagcccgagcccaagcccggctccagaaaaagacaccttctcagagtccccggcatgaagcccggcgagagctgtttcatctgcaaggccatggaccacatcgccaagctctgccccganaaggccgaatgggaaaagaacaagatatgtttgcggtgtcgacgacgcggtcatagagctaagaact

SEQ ID NO: 18782 - DNA, 392 bp, Glycine max
  unsure (1)..(392): unsure at all n locations
  Clone ID: LIB3049-033-Q1-E1-H7
ggagtgagtagtgagaatggagtttcaagggttaccggaaggttgcattgctagtatactctctcgcactacgccggcggacgtgtgtaggttttccgtcgtatcaaagattttccgttcggccgctgaatcggacgctgtgtggaaacgttttctcccttccgattaccattccatcatttcccagtctccttcgcctctcaactatccttccaagaaggagctctatctcgctctctcggatcgccctatcatcatcgatcagggtaaaaaggtaggtancgtgttgtgtgtttcgcatcccttaanaacttttctgttgatttaatttgatggttaattctctgatgtctggaacgcagagctttcaattggagaaaaagagtgggaag

SEQ ID NO: 18783 - DNA, 383 bp, Glycine max
  Clone ID: LIB3049-033-Q1-E1-H8
ggatcacatatggggatgagtggattgaggagaactgagcccgtcgagtgttttcctctgatttcatctggatctgcgacagatgacggtctttcatttcttcaattgcgcgattctcaccttcggcccccacgccgtctactattctgccacgcccttatctgagtatgatacactcggcacctctatcaaagccgctgttgtttatcttgcaacggcattagtgaagcttatttgtctagctacttttctcaaggtatcagagagcgatagctttgatccgtatcaggagtttttgaaggcgttaataggttttatagatgttgctgggccttattttgccttgacccagttgactcacaggaacatctctcagaatcata

SEQ ID NO: 18784 - DNA, 312 bp, Glycine max
  Clone ID: LIB3049-033-Q1-E1-H9
ggagcaagagtgaagggcgaagagaatggctcccaagggtttaatctttttggctgtgttatgcttctcagcactgtcactgagtcgttgtcttgcggatgataatggacttgttatgaacttctacaaggaatcatgccctcaggctgaagacatcatcaaataacaagtcaagcttctctacaagcgccacaagaacactgctttctcctggctcagaagcatcttccataactgtgctgttcagagttgtgatgcttcactgttgctggactccacaagaaggatcttgtctgagaacggaacagatag

SEQ ID NO: 18785 - DNA, 348 bp, Glycine max
  Clone ID: LIB3049-034-Q1-E1-A1
gacgctcaattcattttcttctcctctctctctctcctagggttagggttttctctcttcatcactctctgtgtcgctccgtttcaatggctcagcaagacgctcaaaacggcgggtcggagaatgccgctgctgctgctacggtgtcgtttgtcgctgtgaagccgcagctcctcgtcgaagctcccaaagccaacgacgccattctgttcttcaaggctgcgtttggcgctgaggaagttggccgtacgctcaaccctaagcgcaaagctgagcacgagctccctctcatactctccgcagaactcaaaatcgctggctccacattctcgtcgccgacctcgttga

SEQ ID NO: 18786 - DNA, 384 bp, Glycine max
  Clone ID: LIB3049-034-Q1-E1-A10
gattgcatttgagctcaagtcattttttttcctctcactcactagtattttttatgtcctgtttcttgaaactacaagaagggtcatttctctttttctagttatctcatctcacaccctttaatgtaacctagagagaatcaaaataataccactttcctagtttcaaactcaacttttgagggtcttttctccaataaaaacacacaagagttttagtcatttagctaacagtgttcatatgatgaatgcttcaaagttcattaaatgtgttactgttggagatggagctgttgggaaaacctgcatgctcatttgctacaccagcaacaagttccccactgattacataccaacagtatttgacaatttcagtgccaatgt

SEQ ID NO: 18787 - DNA, 386 bp, Glycine max
  Clone ID: LIB3049-034-Q1-E1-A11
gacagctcttggctttagcaaattccaattcccaattcccaattcgaaacccttattcctttcaaagaaccaagttgagtgatcgtgatggcaccaaaggcagagaagaagccagcggagaagaagcccgcggaggagaagaagtcgacggtgggagacaaggctccggcggagaagaagccaaaggccggaaagaagcttccgaaggaaggaggcgccggcggagaagggaagaagaagaagagaaacaagaagagcgtggagacatacaagatctacatcttcaaggttctgaagcaggtccaccctgacattggtatctcaagcaaggccatgggaatcatgaacagcttcatcaacgacatcttcgagaagcttgcccagga

SEQ ID NO: 18788 - DNA, 318 bp, Glycine max
  Clone ID: LIB3049-034-Q1-E1-A12
ggaacttctcacgttcatttctacacatccctagctctgtcgttccgtcgttgacgatggcgtttcgggtgcgaagccctgacctccgctctctctttcttctctctctcttgtccatcgcttccgccaatgtcgtcttcgaagagcgtttcgatgacgggtgggaaaatcgatgggttaaatcagattggaaaaaagatgagaacgtggctggggagtggaaccacacctctggtcaatggaatggagacgctaatgacacaggtattcataccagtgaggattacagattctatgctatttcagctgagtaccctg

SEQ ID NO: 18789 - DNA, 283 bp, Glycine max
  unsure (1)..(283): unsure at all n locations
  Clone ID: LIB3049-034-Q1-E1-A2
gactcgcagttgtattgttgaacaagggtttctctgtctgcttcttcactttctctcgtttcaatcgaaaccaaaacaaaaacatgggcagaaaattcttcgtcggtggcaactggaaatgcaatgggaccactgangaggtaaagaagattgttactactttgaatgaggctaaagtccctggagaagatgtcgtagaagttgttgtgagccctccttttgtgttccttcctgtcgtaaaaagtttgctgcgccctgatttccatgtttcggcacaaaactg

SEQ ID NO: 18790 - DNA, 261 bp, Glycine max
  Clone ID: LIB3049-034-Q1-E1-A3
ggggaggaagcacagaccacaggggcatatcccaaatttgtttacacagtggctcacataacatacattgactaactgagggtttggtacttaagttcaacttagttaaaattgtttgtgtctggaattggagtttggaagtggctctcattgctgcaatttccaattgtgcagttgccactgatgcagctggagttgcaggaaatgtctctgcctttgggttgtctgtgtcgcccatacccacatttaggacgattatca

SEQ ID NO: 18791 - DNA, 209 bp, Glycine max
  Clone ID: LIB3049-034-Q1-E1-A4
gaaaggtgggcgaggtagccagagagtgatacaatacagagtgcgttgttgctccctcgccacaactccctgccaacatgggtatctccagagattctatgcacaagaggcgtgccactggtggcaagaagaacgcatggaggaagaagagaaagtatgagcttggtcgccagcctgctaacactaagctgtcaagcaacaagacagtc

SEQ ID NO: 18792 - DNA, 353 bp, Glycine max
  unsure (1)..(353): unsure at all n locations
  Clone ID: LIB3049-034-Q1-E1-A5
ggaaacacccattcaacattttctctgtctatctctcgttgtagcgtagcgcagcagttgaatttggaaaacaagatgtctcaccgcaagttcgagcacccgagacacggttcccttggctttctcccaaggaagcgagcttctcgtcatcgcggaaaggtgaaggctttcccaaaagacaatcctagtcaaccatgcaggttgactgcctttgtgggctacaaaagctggaatgacccacattgttagagaggttgagaaacctggatcaaagcttcacaagaaagagacatgtgaagctgttactatcattgaaactcctccattggntgttgttggagttgtgggatatg

SEQ ID NO: 18793 - DNA, 348 bp, Glycine max
  Clone ID: LIB3049-034-Q1-E1-A6
gcagtctcaccctgccacaacactacactagcaagcacacacctttagcacaatcaccaatggcttcttccgacagcaagcttcccctgaaacccatccctggaagctacgggcttcctttctttggacccatgagtgacagacatgactatttctacaagcaaagacgcgacaagttctttgccgaacgaattaagcagtacaactctacggttatacgaaccaacatgccaccgggtcctttcatttcctctaatcctagagtcatcgctctcctcgacggtgtctccttccccattcgattcgacaactcaaaggtcgataagcgcgatgttctcgactgcacct

SEQ ID NO: 18794 - DNA, 363 bp, Glycine max
  Clone ID: LIB3049-034-Q1-E1-A7
ggacaaatttgaggattcgtacagagtaatggtgttttctaatggtgataaatgctggaatggtccagataggagtttgaaggtcaagttaagatgcgggttgaaaaacgagattactgatgtagatgaaccaagccgttgcgaatatgtagctgtattatctaccccgaccctttgccaagacgaaaggctgaaggagttacaactcaaactagaccttttgaatttcggaaatacagcaaaccatgacgagttgtgaacaaccgggacagattttaactggtagtatgatgatcatagagcaaatgaagaagtggtgccctaagttttgtatgctagagcttacacaaatatgatatcggg

SEQ ID NO: 18795 - DNA, 312 bp, Glycine max
  Clone ID: LIB3049-034-Q1-E1-A8
gattgtaacagagaaagaaacatttgagcaaaaatggttcaagcacagcctctacaacatgttggtaatggtgcagggaaaggagatcaagcttattttgatccaagtgctccaccacccttcaagattgcaaatatcagagcagcaattccaaaacattgctgggagaagaacacattgagatctctgagttatgttctgagggaagtgttgggagtgactgcattggtagctgcagcaatcggcttcaatagctggttcttctgggcactctattggcctgcacaaggcacaatgttttgggcacttttt

SEQ ID NO: 18796 - DNA, 394 bp, Glycine max
  Clone ID: LIB3049-034-Q1-E1-A9
ggttctagtgtatgtgattgttgtgactcgttcttcttcgtcgttatcttcttcttttgttgtttgtgtgtttgttttttctctcacctgaaaatgtcttgctgcggtggtaactgtggttgcggaagcgcctgcaagtgcggcaacggctgcggaggctgcaagatgtacccagacttgagctacaccgagtcaaccaccaccgagaccttggtcatgggagtggcaccagttaaggctcaattcgagagtgctgaaatgggtgttcccgctgagaacgatggctgcaaatgtggagctaactgcacctgcaacccctgcacttgcaagtgaggtgttggagagctaaagcttcaagcagaaatggcccttagaaataatgataaaaactata

SEQ ID NO: 18797 - DNA, 371 bp, Glycine max
  unsure (1)..(371): unsure at all n locations
  Clone ID: LIB3049-034-Q1-E1-B1
gctgatccgaaacgaacctcaacaacgctgaacgcagaaaggggaaaaaggggattagggtttaggaagcagcgacaacaatggatttcacagcggagaagaaggaatcagagagcaacaccgaaaatgctcatccaacaactttagattcttcttctcaattggcatcggcacttgattccagcaacaaagaaatcgaagaacgacgagctcgtgaactcaaagccggtcttcancccctcaagcacaagtttgtcttctggtacacgcgccgaacacctggagttcgaaatcaaacatcatacgaaggacacatanagaanattgttgaatttagtacggttgaaggattttgggtctgctactgccat

SEQ ID NO: 18798 - DNA, 386 bp, Glycine max
  Clone ID: LIB3049-034-Q1-E1-B10
atagcgaagtttcatttctttggattagaaatttttcccaaagctgatcgagaagccagccaggccaggagttgaagaatgggaagggggaagatcgaaatcaaaagaatcgagaacacaacaaatcggcaagtgaccttctgcaagagaagaaatgggcttctgaagaaagcttatgagctgtcagtgctgtgtgatgctgaagtttccctcatcgtcttctccagccgtggccgtctctatgagtattccaacaacaacataagatcaaccatagagaggtacaaaaaagcctgttcggatcattcaagtgcgagcactaccacagaaatcaatgctcagtaatatcaacaagaatctgctaagctgcgacagcaaatacagat

SEQ ID NO: 18799 - DNA, 388 bp, Glycine max
  Clone ID: LIB3049-034-Q1-E1-B11
gacacatgcccatcatcaaagtttcttcctttctctgctctttgtcttctctgacacatttggggccttgttgagtgtgtttttgcaagagggtatggcgaaggacgttgaggttgctgagcgtggctccttctctgggaaggactaccaggaccctccatcagcaccactcattgatgctgaggagctcacaaagtggtccttttacagggctcttattgctgagttcattgccactttgctcttcctctacattactgtgcccacagttatagggtacaagcaccagacggatcatgctgatgcgtgtggtggggttggcattcttggcattgcatgggcctttggtggcatgatcttcatccttgtctactgcactgctgggatt

SEQ ID NO: 18800 - DNA, 369 bp, Glycine max
  Clone ID: LIB3049-034-Q1-E1-B12
gggattgaggagaagtgagcctgtggagtgttttcttctgatttcatctggatctgcgagagatgacggtctttcatttcttcaattgcgcgattctcaccttcggcccccacgccgtctactattctgccacgcccttatctgagtatgatacactcggcacctctatcaaagccgctgttgtttatcttgcaacggcattagtgaagcttatttgtctagctacttttctcaaggtatcagagagcgatagctttgatccgtatcaggagtttttgaacgcgttaatacgttttatagatgttgctgggctttactttgccttgacccagttgactcacaggaacatctctcagaatcataaatttc

SEQ ID NO: 18801 - DNA, 305 bp, Glycine max
  Clone ID: LIB3049-034-Q1-E1-B2
gggagttcatagttgttacaggctggacggtgtaagagtcttgtgtgttcagtttaacaaaccgatcaagctgtcgtgtggtgtacccactgatctgtaaccgtggtctcgacaacaacaacaacaacaacactattgttcagaacataaaagatcccaaataacaagaccacacaccatgagtgtcatcgacattctcaccagagttgattccatttgcaaaaagtacgacaaatacgacgtcgaaaagcaaagggactccaatctctccgccgacgatgcattcgccaaactctaagcctccg

SEQ ID NO: 18802 - DNA, 361 bp, Glycine max
  unsure (1)..(361): unsure at all n locations
  Clone ID: LIB3049-034-Q1-E1-B3
gacacagagttgcaagagaaagataaaagaagatggcgactcttgattccgacgtgcctatggttcccgccggcgagccctcgagcagcgccggtccttcttccaagaagcccaagcgcttcgagatcaagaagtggaacgccgtcgctctctgggcttgggacatcgttgtcgataactgtgctatctgccggaaccacatcatggatctctgcatcgagtgccaagccaaccaggctagcgccactagcgaggaatgcactgtggcttggggagttttgtancatgcttttcacttccattgcatcagtcgatggctcaagactcgtcaagtttgtcctctagataacagtgagtggga

SEQ ID NO: 18803 - DNA, 257 bp, Glycine max
  Clone ID: LIB3049-034-Q1-E1-B4
ggcacaagtttgttgagatagctagaagcaataagatgaaaatgaaagtgcttgttttgtttgttgctacagttttggtagcatatgaatgccatggctcagactaccagaagttccctctccaaatgaaaactgggtttggtgggcaatacagcaatgaggtggcatgtgccagttggaggcttggcgtggaagcaaacaacgtagtcaagtggcaaactgttcctgcagcttgcggagagtacatagctgactac

SEQ ID NO: 18804 - DNA, 367 bp, Glycine max
  unsure (1)..(367): unsure at all n locations
  Clone ID: LIB3049-034-Q1-E1-B5
ggcacttcaattgcaatcaaattagttcattctctttgcgcagttccctacctctcctttcaagatgcagatcttcgtcaagaccctcaccggaaagaccatcacccttgaggtggaaagctctgacaccatcgacaacgtcaaggccaagatccaggacaaggaaggaattcccccggatcagcaacgtctcatcttcgccggaaagcagctcgaggacggccgtaccctcgccgactacaacatccagaaggggtcaacccttcaccttgtccttcgtctccgtggtggcatgcagatcttcgtcaagactctcactggcanaaacataaccctagaggtcgaaagctctggacacattgacaac

SEQ ID NO: 18805 - DNA, 360 bp, Glycine max
  unsure (1)..(360): unsure at all n locations
  Clone ID: LIB3049-034-Q1-E1-B8
ggaggaagcgcagcagcagcagctataccacgttgcttgaagaaactgataaaaagcgctgccgttgtgtctttcagtcttcgttggatcatcttcacaatcacatcatcagaacacaaagaagagaagagacccttcatcttgttattccactcgggctaggccaattttccctctaacagtcaattttcattcagattcgtaaatttctcgattagatcacgaagtgttggtgtgattgtttgtaccttctggtggtggagcttgttggaaattggagatgagtcagaggggtttaatatatagctttgttgccanagggactgnttgtttancagagcacacgcaatatacggggaa

SEQ ID NO: 18806 - DNA, 388 bp, Glycine max
  unsure (1)..(388): unsure at all n locations
  Clone ID: LIB3049-034-Q1-E1-B9
ggagagaaagtgagagagaattacagagcattttccaacacgattacacgaccgaatcaaacccctctttctctccgaagctgcttttaatatcgtactggccttcgattgttctcctctttaatacatactgttctctcttcgatttgagggaacagtacaagagtctgagcatcggttaacccaactgcacaggtagtctccaaataatggagcctcatgatgagactggatgccaggctcctgaacgccccattctttgcattaataattgtggcttctttggaagagcagctaccatgaacatgtgttccaagtgttacaaggacatgctgttgaagcaggagcaggacaaatttgcagcatcatccgttganaacattgtgaa

SEQ ID NO: 18807 - DNA, 259 bp, Glycine max
  Clone ID: LIB3049-034-Q1-E1-C1
tcagtagagcagagaaagggatatcaaaagggctgattcttttggaacctcgcgattcctgaccgtccaagtgttaaccatcggattaaggtctatcgactcactacgtatgcagcgtatagagctcatgagaaggagtccgagatcattatctactctgctcagccatccatgtaagaagtcttcctcgcaattggtcttctagcttgtatccgtcgccttacacgtcgcataactttgatctcatactatcatcgcc

SEQ ID NO: 18808 - DNA, 393 bp, Glycine max
  unsure (1)..(393): unsure at all n locations
  Clone ID: LIB3049-034-Q1-E1-C10
gaactcaagtcattagcattcttctttgactttttggtctaaaaccggtttctcttgtcacaccaaatggaccgacccgccgccatattttccgacaccgtcaacctcaacggcacggtgacgcagctgtctctgctcgccgacgggaggctgtggtggccggagggcggtcaacgcaatttgagcatcgagaaagaggttctcgggttcaccggcgacggtcccgatataaggctcaaaacaatcgtggaaaccgaagatggatgctgtggcggtgcaagcagagcaaaactagtccgaaacgacgtcgtttttcggccatcgtccgaggaaacgcatangctctggtgccagaagcttggcgaattcatcgattctctcggacgacccaag

SEQ ID NO: 18809 - DNA, 379 bp, Glycine max
  Clone ID: LIB3049-034-Q1-E1-C11
ggaggaagagcaaggacacaacacaaagaagcaaaagaagacatggcgttgcagtggctgattctcacttacgtggtcgcagctgaggctgccgtggccattctgccaacccttcccacgcccaaactcctaagggaccgtttcgcctctctcgtttccctcattcgtcaacccgcgcttttcattgtcccctttgcggggttccaactccttgatatatactggaaaaatgagcatccgttgatgtgtacctctgaagtttgtactgctgcggagagagatcgatatgagaaatctatatacaaagctcagaggaatgtaatactgtgtgttacagcatgtcttctccactggtctatcagccgcatttgcaagtatc

SEQ ID NO: 18810 - DNA, 399 bp, Glycine max
  Clone ID: LIB3049-034-Q1-E1-C12
ggaaatcgagaagaagaagaagaagaagatggagaagtatcagatctggagcaggagaatagcgttggcagcgtttgcgtttgctctgctgttccaatcggcctcagcagacgacgtcgttgtgctctctgaagataacttcgagaaggaagttggtcaggacagaggagctctcgttgagttctatgctccttggtgtggacactgcaaaaagcttgctccagaatatgaaaagcttggtagcagcttcaagaaagccaaatctgttttaattggcaaggttgactgtgatgagcataagagtttgtgcagcaagtatggagtctctgggtacccaacaattcagtggtttccaaaaggatctcttgaagccaaaaagtatgaagggccacgcactgc

SEQ ID NO: 18811 - DNA, 240 bp, Glycine max
  Clone ID: LIB3049-034-Q1-E1-C2
gaagaagagagagagagagaaagagagaagagaggagggtgtgtttctggtttttggaaatttcagcccccatcgaaaaacaagaagccccaacgatagtaatcatcgaaggaatttgaaaggtcgaaacttgagcatctgggatcgcgaaattggggattttggttaaaagggtataatcttcggaactgattgatggcaaaactgtacgtgaaggcggtgccaccggcggatctgaac

SEQ ID NO: 18812 - DNA, 379 bp, Glycine max
  Clone ID: LIB3049-034-Q1-E1-C3
gaactccaaagatccaatttcactatataaattgtgacgaaagcaaaatgaattcacatagctgagagagaaaggaaaggttaactaagaagcaatacttcaatggccacccttgttgttcataaccaaacttcttctgctcaagatgctgaggctctccaacaggctttcaaatgatggggggctgatgacaaggccattatagcaatactgggtcacagaaatgttcatcagaggcaagaaatcagaaaagcttatgaggagatttaccaagaggatctcatcaaacgccttgagtccgagatctctggtgactttgagatagctatgtaccggtggatgttgcagcctgcggatcgtgatgctgttttggtgaatg

SEQ ID NO: 18813 - DNA, 234 bp, Glycine max
  unsure (1)..(234): unsure at all n locations
  Clone ID: LIB3049-034-Q1-E1-C4
gacatgtaaacaggaacaaagaggtgttccaagaaactacaaaactagtactcaatcccatctttttgcaatcccagtttcaacgatctctangagaagatggattatcagtacattctangagggaatatggcttgtagttttgcctttttgtatgttgtgtaaagttttggagcaaaggtcacagattcaagtccaatacatgttaagagtaatgaatgtgcaaagatatca

SEQ ID NO: 18814 - DNA, 216 bp, Glycine max
  Clone ID: LIB3049-034-Q1-E1-C5
cgaggaagacagggatcggagggatgacgcggacttcctgcataagcatcctcagtgaatcttctgatattgacacggaaaccattgggtcatccagcaggcctccgaggacattgattttgcccttgtgatatgccgaacatgataccaacgacgcctaatgtcacttccattgaacgcacatgccatccacaacatctcaacctaggaccaagt

SEQ ID NO: 18815 - DNA, 313 bp, Glycine max
  Clone ID: LIB3049-034-Q1-E1-C6
ggttctagtgtgtgattgtttgttgttgtaactcgttcttcttcttttgttgttctgtgtttgtgtttgttttttctctcacctgaaaatgtcttgctgcggtggtaactgtggttgcggaagctcctgcaagtgcggcaacggctgcggaggctgcaagatgtacccagacttgagctacactgagtcaaccaccaccgagaccttggtcatgggagtggcacctgttaaggctcaatttgagggtgctgaaatgggtgtgcccgctgagaacgatggctgcaaatgtggaccaaactgctcctgcacccct

SEQ ID NO: 18816 - DNA, 382 bp, Glycine max
  Clone ID: LIB3049-034-Q1-E1-C7
gctcaaagacaacaatggcaccaacagccaagactctgacttacctggcccaggagaaaaccctagaatcgagcttcgttcgggacgaggaggagcgtcccaaggttgcctacaacgaattcagcgacgagatcccagtgatttctcttgccggaatcgacgaggtggatggacgcagaagagagatttgtgagaagatcgtggaggcttgcgagaattggggtatattccaggttgttgatcacggtgtggatcaacaactcgtggccgagatgacccgtctcgccaaagagttctttgctttgccaccggacgagaagcttcgttttgatatgtccggcgccaaaaaggggtggatcattgtctccagccatctccaagg

SEQ ID NO: 18817 - DNA, 199 bp, Glycine max
  Clone ID: LIB3049-034-Q1-E1-C8
gaccgccgttctcatctctcttcccagttctcacctcaccgctgcatcttcacgtcgtctctaacgagggaaaatgagtcgaggaggtgcagcagcagcgaagggaaagaagaagggtgctacattcaccattgactgtgcaaagccagtagaagacaagatcatggacattgcttctctcgagaagtttcttcaagag

SEQ ID NO: 18818 - DNA, 318 bp, Glycine max
  Clone ID: LIB3049-034-Q1-E1-C9
gggagcaatacatatcattcattcagaggcaacaaaggagttgtaaattaagagcatggctgcacaagctcttgtatcatcatcatctcttaccttctcagccgaggctacaagacaaagtcttggaccaagatcactccaatctccatttggcttctcaagaaaagcctcctttcttgttaaggcagctgctactccccctgtcaagcaaggatcagacagacctttgtggtttgcatcaaagcaaagtctttcctacttggatggcagccttccgggtgactatggatttgaccctctgggactttcggaccctga

SEQ ID NO: 18819 - DNA, 366 bp, Glycine max
  unsure (1)..(366): unsure at all n locations
  Clone ID: LIB3049-034-Q1-E1-D1
ggtatactaaagattaaagaatagtataatatagaagattggggttagggtttgatcgcaacgcaatggctggcaccggcatccatccataccaccagcaatgggctccggcggcagccgctcctcctcctcctcctccggcagccgccggcggtcctcctcctcacccaggggaggaggttcgaactatattcataactggtcttccggaagacgtgaaagagagagagctgcagaatctgctgagatggttgcccggtttcgaagcatctcaattgaatttcaaagctgagaagcccntggggtttgctctcntctccgcaccacaccaagcactcaccgccaaagacattcttcaagacatgc

SEQ ID NO: 18820 - DNA, 403 bp, Glycine max
  Clone ID: LIB3049-034-Q1-E1-D10
gacaacacaggcgcagagcgtgatccattgacgaagatggtgcagcgtctcacctaccgcaagaggcacagctatgccaccaaatccaaccaacacagggtcgtcaaaacccctggtgggaagctcgtttatcagaccaccaagaagagggccagcgggcccaagtgccccgtcactggcaagaggattcaggggattccacacttgaggcctgcagagtacaagagatcaaggttacccagaaaccgtaggactgtcaaccgtgcatatggcagagttttgtctggaagtgctgtcacggagacgattatccgagctttcttagttgaagagcaaaacattgtgaagaaggtcttgaagattcagaaggcaaatgaaaagcaagcctcacaggcttgaattt

SEQ ID NO: 18821 - DNA, 341 bp, Glycine max
  Clone ID: LIB3049-034-Q1-E1-D11
ggaacctttgcattctattcattcaagattcagcaagtgcgttttggaagcagagaccgaaatacttcgagatggcccgtacaaagcaaactgctcgtaagtcaactggaggaaaagctcccaggaagcagcttgcaaccaaggctgcacgtaagtctgcaccaacaactggtggtgtgaagaagcctcatcgttatcgccctggaactgttgctcttcgtgagattaggaaataccagaagagcactgagctcctaatcaggaagcttcctttccagaggttggttcgtgaaaatgcccaggatttcaagactgatctgcgtttccagagccatgctgtg

SEQ ID NO: 18822 - DNA, 349 bp, Glycine max
  Clone ID: LIB3049-034-Q1-E1-D12
gtaagtcaactggaggaaaagctcccaggaagcagcttgcaaccaaggctgcacgtaagtctgcaccaacaactggtggtgtgaagaagcctcatcgttatcgccctggaactgttgctcttcgtgagattaggaaataccagaagagcactgagctcctaatcaggaagcttcctttccagaggttggttcgtgaaattgcccaggatttcaagactgatctgcgtttccagagccatgctgtgcttgcattgcaagaggctgctgaagcataccttgttgggctctttgaggacactaacttgtgtgccattcacgccaagcgtgtgactattatgcccaaggatat

SEQ ID NO: 18823 - DNA, 228 bp, Glycine max
  Clone ID: LIB3049-034-Q1-E1-D2
gaccgcggttctcatctctcttcccagttctcacctcaccgctgcatcttcacgtcgtctctaacgagggaaaatgagtcgaggaggtgcagcagcagcgtagggacgtggtgaggtgctacgttcagcattgactgtgcttagccagtagaatccaagatcatgggcattgcttctctcgagaattttcttcaggagaggatcaccgttggtgggacggctggtggt

SEQ ID NO: 18824 - DNA, 223 bp, Glycine max
  Clone ID: LIB3049-034-Q1-E1-D3
gaagttactagggttttagaagccagcagcagtaggcaaaaatgtcgagttccatgatgacgctctcaaggaggctctattgctctctgcttcgaacccccaatgcatatcgccacttctccaccgatcaccttttcgactcggacgaggccgactcagcacccgacccaaccgcacccgacgccgttcaagaagaagaaaagttcgtcatcgattgccccct

SEQ ID NO: 18825 - DNA, 355 bp, Glycine max
  unsure (1)..(355): unsure at all n locations
  Clone ID: LIB3049-034-Q1-E1-D4
gaaattcgaaattccaatccaatttccctatctctctctgtctctatatctgtatttctgaattttgggaatagaaaaaccctaagcaaagcaaagcggtaaggatggggaacacggagaagctgatgaaccagatcatggaattgaaattcacttcgaaatcgctgcagcgtcaatcgcgtaagtgcgagaaggaggagaaatcggagaagctgaaggtgaagaaggcgatcgagaaaggcaacatggacggcgctcgaatctacgcggagaacgcgattcgtaagcgcacggagcagatgaactacctccgcctggcctcgcgcctcgacgccgtggtcgnccgcctcgacac

SEQ ID NO: 18826 - DNA, 344 bp, Glycine max
  unsure (1)..(344): unsure at all n locations
  Clone ID: LIB3049-034-Q1-E1-D5
gacgctcaattcattttcttctcctctctctctctcctagggttagggttttctctcttcatcactctctgtgtcgctccgtttcaatggctcagcaagacgctcaaaacggcgggtcggagaatgccgctgctgctgctacggtgtcgtttgtcgctgtgaagccgcagctcctcgtcgaagctcccaaagccaacgacgccattctgttcttcaaggctgcgtttggcgctgangaagttggccgtacgctcaaccctaagcgcaaagctgagcacgagctccctctcatactctccgcagaactcaaaatcgctggctccaccattctcgtcgccgacctc

SEQ ID NO: 18827 - DNA, 373 bp, Glycine max
  Clone ID: LIB3049-034-Q1-E1-D6
agaagaatcccatttataacattgataggagcttgggagctcgcaatggaggcaggccatttaaatatgaaggaaatctttatcgtatgggtcaggactgtggtgatacatatgggagaaagttgcgtgtttttaagatagaaactctcactattgatgaatacaaagaagttgaagtacccttaggctttgttgaatcaaacaagggtcgaaatgcttggaatggggctcgataccatcacttagatgtgcagcacctgccatctggtgggtgggttggtgtcatggatggggatcatgttccttctggagattcagtccggcgattcacggtttggtttgcttctgttgcggtcgctgctatactcattgt

SEQ ID NO: 18828 - DNA, 371 bp, Glycine max
  Clone ID: LIB3049-034-Q1-E1-D7
gaaactaaagataaacaaaatttagaaacaaaaacatgttggtgaaggtgtacggtccaacctatggagcccccaagagggtgctggtgtgtctgattgagaaggaaattgagtttgaaacagtacatattgatctcttcaagggagagaataaggaacctgagttcctaaagctgcagccatttggatcacttcctgttattcaagatggtgattatactctctatgaatctcgtgcaataatcagatactttgcagagaagtataaagaccaagggacagacttgttgggaaagacaatagaagaaaaaggtctagtggaacaatggcttgaagtagaagctcataacttttcaccaccactctacaat

SEQ ID NO: 18829 - DNA, 206 bp, Glycine max
  Clone ID: LIB3049-034-Q1-E1-D8
ggcagtttcaaattttcttttccttcactttcccgagaaaaaaataacacttttcactttcttcactacgttctcacttcgatatggctcgtacgaagcaaaacgctcgcaagtccaccggtggcaaagcgccacgtaagcagctcgccaccaaaggcgctcggaaatccgctccggcgaccggaggagtgtagaagccccaccgc

SEQ ID NO: 18830 - DNA, 308 bp, Glycine max
  unsure (1)..(308): unsure at all n locations
  Clone ID: LIB3049-034-Q1-E1-D9
ggatcatgcattcaagaagattaggttgagagctgaagatgtgcaagggaagaatgtcctgacaaatttctggggaatggatttcacaactgacaagctgaggtcattggtgcgaaaatggcaaactctaattgaagcccatgtggatgtgaagacaactgataactacacattgaggatgttttgcattggatttaccaagagaagagctaaccaagtgaagagaacctgctatgcacaatcaagccagattagacagattcgtaggaagatganggagatcatgaccaaccaagcaacatcctgtg

SEQ ID NO: 18831 - DNA, 373 bp, Glycine max
  Clone ID: LIB3049-034-Q1-E1-E1
gatggaagaattggagtgtaacagcctcagctgcaattgatgacattcacattcacgcgacggtgcactgagtgagtaattgcctactttaaccttttctcaccgctgccaccaacgccctctaccatggactccgttccgtttcgcgatggcagcatacacaccattctcgactcccgatattttcactctccgctggatgttagtcatagtttgcacactcattcctcgttgattcggaggctttctcaagaaacggagttagaggttggtaacgtatcttaatttaccgctacaccatggtattgccatatgttagtaggaaatcggagtagcatccatgtgattatgtgaatattcttcatatacatgt

SEQ ID NO: 18832 - DNA, 400 bp, Glycine max
  Clone ID: LIB3049-034-Q1-E1-E11
ggaacaacattgtatgaacagagaacagttgagttgaggctaatcaatgctatatagagcgcaatcatagtccctctttcttctcttccgccatcgttttctttgaaacgcacagcttcaatcaccgaccacaccacccatcaacgacatgcttcctctttcccttctcaagactgcccaaggccaccctatgttggtggaactgaaaaatggggagacatataacgggcatttggttaattgcgacacatggatgaacatccatctgcgagaagtcatttgtacatctaaagacggagatagattttggaggatgcctgaatgctacatacgaggcaatacaatcaagtaccttcgagtacctgatgaggttattgataaagttcaagaagaaaccaag

SEQ ID NO: 18833 - DNA, 378 bp, Glycine max
  Clone ID: LIB3049-034-Q1-E1-E12
ggaaagcgcatttactagtgtttaccaactccctcacgcccccaaggccaagaaaagaaaacacacacttttttagccttccctctctctctctctttctcttctccattctccatttttttttcttcttatcacgcgtttgtgaccacaaccaagtacgaaagttgagatttttagcatacccatttccacacaatgtccaacaagtccccagttttccccatcccagacccccaacacttcagcgactatggatttgaccctcaaatcaactatttccaggtgttggaagaagcatgaagcacaagcgcgagacagcgagatccatagactccatccacttcaagctccagaagcccatatccaaggacgactcac

SEQ ID NO: 18834 - DNA, 303 bp, Glycine max
  Clone ID: LIB3049-034-Q1-E1-E2
ggaggaacaaagaaaggaaaagagaaaaaaatttctcagaagagtctccgctgaaagttttggtttcttgaagatgtcgttgctctccgatcttatcaaccttaacctctccgacatcaccgataaagtgatcgccgagtacatatgggtaggtggatctggcatggatatgaggagcaaagcaaggacactctcaggaccggttaaagacccttcgaagcttcccaagtggaactatgatggttccagcactggtcaagctcctgggcaagatagtgaagtgatcttatatccacaagcaat

SEQ ID NO: 18835 - DNA, 136 bp, Glycine max; identical to SEQ ID NO: 18747
  Clone ID: LIB3049-034-Q1-E1-E3

SEQ ID NO: 18836 - DNA, 366 bp, Glycine max
  unsure (1)..(366): unsure at all n locations
  Clone ID: LIB3049-034-Q1-E1-E4
ggagtgagtgagtgagtgagtgtgtgtgagagagagagagaaagagaaagagagagaaagcagagaaaacccgaagcagttttctcactctttttaatcggaacctctcattccgcgttcagattgcgtcccccatttggtccgtacaatggagcggtacgggcgggccagcgaagggtcgcagtctgatccgtcgccggaatggactttggccgccggcgccgacgccggtctcgaagagtcgtcgtggcaactcggattagccggtgctgaatcggtacctatgcgtctcgacgatgctgattgtatnctactattgagaacgggattttgcggttacggcacacgctgtcgtttcaaccatcc

SEQ ID NO: 18837 - DNA, 369 bp, Glycine max
  unsure (1)..(369): unsure at all n locations
  Clone ID: LIB3049-034-Q1-E1-E5
gaaacaagcataagattaattgagagacgcagaaggtaaagatcgaagaatggaagggtcttcaccatccattgaagaagagagaacagccactttctatgtgtaccatccttgctattttcttcaacaagcactcagggctctcttgaagtgtgtaggtattgatgagtctgaaaacacaatgtgttcacaggccaataaacaagagaaaagctcactgccacaaactccttctgcagatgatcctattacaaactctccaacccacaaaagcttcccagatgctgcagattcaccttccacaactaatcanaccattatcattgcaagtttaatggcaacgcgtggcagtcgagggtctaaaattag

SEQ ID NO: 18838 - DNA, 374 bp, Glycine max
  Clone ID: LIB3049-034-Q1-E1-E6
gtagaaccaaaggtataccaaagaagggtcaacaggcagaaaaaggttgttgctgggaaatggtgtggcaaagtttggatgtccaatcacgtccatccccttttagcaaaaagagactccgaagatgttgaggatgagaaactcttacttgggtggatattacctgatgagaaattggagagatcagaaattaccctcaaaagtgagactactagcacaacatcaggtaagaagatgaaaatgacagctgagaatggacgatccaagaaaggaagttatgccaacgacaaatgtagttgcacataattccactgaaggtaaacacaactcacagccatggaggattcttagaactaagaaagctaggtgtgttg

SEQ ID NO: 18839 - DNA, 347 bp, Glycine max
  Clone ID: LIB3049-034-Q1-E1-E7
gaccgcaatacaaccttagattctcggagcgagagcgagaaacagaaacctatttttattttctctcttcatatcacttagactgagactggatgcttctgtatccatcatattatatgatgattattgaattgattatgcgttcagatttcacttcaggatcactttgacagtttgacttgtccggcaccaacttctggtattactattgtctgagttctcaggagttctttcacagaacgtagatgggttctagaatcccatctcataagcttagcaatggcctctacgtatcaggacggtcggagcagcccattagaaagaactccaacaatgacatcaacagc

SEQ ID NO: 18840 - DNA, 356 bp, Glycine max
  unsure (1)..(356): unsure at all n locations
  Clone ID: LIB3049-034-Q1-E1-E8
ggtgcacttgaatgagagagagatatcctgaagtgagggttttcacttggtggtgaccacctatagtgatggaactgatatttacatagactccaattacattcaagatatatggccattcaccactaaacttgggctttcgttttcggtcttctaggcaacgtgatctcctttatggtgttccttgcgctattaccatctttttaccaaatctacaagtaaaaatcatccgaagggtttcaatcactaccttaagttgttgcactgttcagttcaatgctctggatcnactatgcattttgcaaactggatgctatcctccttctcattactattaactcctttggatgtgtgat

SEQ ID NO: 18841 - DNA, 382 bp, Glycine max
  Clone ID: LIB3049-034-Q1-E1-E9
ggccgctcactctctagggtttttatttctctcttctctctgcatcgcttcaggttcttctgaaaagatgtctcgcgtgtatgttggtaacttggattcacgagtcaccgagagagatctcgaagacgaattccgtgttttcggagttattcggagtgtttgggttgcacgtagaccacctggttatgcttttattgactttgatgaccgcagagatgcacaggatgctatccgtgaattggatggcaagaatggttggagggttgagctttctcacaactctagaggtggaggtggtggtcgtggtggtcgctctggtggttctgatttgaaatgttacgagtgtggtgaacctggtcattttgctcgtgaatgtcgcatg

SEQ ID NO: 18842 - DNA, 379 bp, Glycine max
  unsure (1)..(379): unsure at all n locations
  Clone ID: LIB3049-034-Q1-E1-F1
gacacaccgtttgttctattcttaactcaacttctgctacccactctcttcttccaagtccaaccacgcttttctctacagtcatgggcaaggtcaagatcggaatcaacggatttggaagaattggccgtttggttgccagagtcgctctgcaaagagacgatgtggagctcgttgccgttaacgaccctttcattaccaccgattacatgacatacatgtttaaatacgacagtgttcacggacactggaagcatcacgatgtcaccgttaaggacgnagaagaccttctcttcggtgacaagccagtcactgtttttggacacaggaaccctgaagagatcccatgggggtcaactggagctgatatcattgttga

SEQ ID NO: 18843 - DNA, 396 bp, Glycine max
  unsure (1)..(396): unsure at all n locations
  Clone ID: LIB3049-034-Q1-E1-F10
ggtttcggacaagaatatccctcaagacattggaataagacaaaccctatccttggtctgttccttcattcttattgtctccccgcatcgtacgccgccgacacagcttcgaatcgctgccaagtgctaacaaacgcctctgagtctctgacaccaacgcaactctctctgctcacatttttgaaggagatggtgaacgtgatggagtggcagaagcagcgttggcaaccgaatgggaacgcggaaatgatgtacgtgaaagtgatgaccgacgaacagctcgagactctgcgcaaacagattgcagtttacgcaaccatctgtgaacaactcatcgaaatgcacaaaaacatctcctcgcaccaagatcttgcanggattaggctggggaatatg

SEQ ID NO: 18844 - DNA, 391 bp, Glycine max
  Clone ID: LIB3049-034-Q1-E1-F11
ggtttcggacaagaatatccctcaagacattggaataagacaaaccctatccttggtctgttccttcattcttattgtctccccgcatcgtacgccgccgacacagcgttcgaatcgctgccaagtgctaacaaacgcctctgagtctctgacaccaacgcaactctctctgctcacatttttgaaggagatggtgaacgtgatggagtggcagaagcagcgttggcaaccgaatgggaacgcggaaatgatgtacgtgaaagtgatgaccgacgaacagctcgagactctgcgcacacagattgcagtttacgcaaccatctgtgaacaactcatcgacatgcacataaacatctcctcgcaccaagatcttgcagggattatgctgggg

SEQ ID NO: 18845 - DNA, 381 bp, Glycine max
  Clone ID: LIB3049-032-Q1-E1-G3
ggtagttccaccgagtagcaacaatgtcgaagcgaggtcgcggaggatcggcgggaaacaagttccgcatgtcgctgggtctgccggtggcggcgacggtgaactgcgccgacaacaccggcgcgaagaacctctacatcatatcagtgaaggggatcaagggtaggctgaaccggttgccgtcagcttgcgtcggagacatggttatggccaccgtcaagaagggaaagcccgatctccgtaagaaggtgctgcccgccgtcatcgtccgccagcgcaagccttggcgccgaaaggacggtgtttaacatgtacttcgaagataatgctggtgttatcgtgaatcccaagggtgaaatgaaaggttctgctatcactggt

SEQ ID NO: 18846 - DNA, 250 bp, Glycine max
  Clone ID: LIB3049-030-Q1-E1-H11
gaaataaggggaaaaaatggtgtcgctgaaactgcagaagcggctggccgcaagcgtgctcaagtgtggcagaggaaaggtgtggcttgaccccaatgaagtcaacgaaatctccatggccaattctcggcaaaacatcaggaagttggttaaggatgggtttatcatcaggaagccaaccaagattcactcacgctcgcgtgctcgtaggatgaaggaggcaaagaagaagggccggcactctggttat

SEQ ID NO: 18847 - DNA, 256 bp, Glycine max
  Clone ID: LIB3049-030-Q1-E1-H12
gagtgaagtgatgagccaagacctcaagcgagactacgtcgtttcggaggagatcggccggggaagattcggcaccgttttccgctgctcctccgcagactccggtcactcctacgccgtcaaatccatcgacaaggtggcaataaccgccgccggagactccctcgacgcgcaatgcctattgacggagcccaagatcgttcagcttctctcccctcaccctcacatcgtaaacctccacgatctctacgaagac

SEQ ID NO: 18848 - DNA, 268 bp, Glycine max
  Clone ID: LIB3049-030-Q1-E1-H2
ggagcaagagtgaagagcgaagagaatggctcccaagggtttaatctttttggctgtgttatgcttctcagcactgtcactgagtcgttgtcttgcggaggataatggacttgttatgaacttctacaaggaatcatgccctcaggctgaagacatcatcaaagaacaagtcaagcttctctacaagcgccacaagaacactgctttctcctggctcagaaacatcttccatgactgtgctgttcagagttgtgatgcttcactgttg

SEQ ID NO: 18849 - DNA, 278 bp, Glycine max
  Clone ID: LIB3049-030-Q1-E1-H3
gagtattcagattacattgcaaaaatggcatcattcaccatgacagcttccatccttggcagcccagccgtcaccaaccggtcggcagtagcaacgcagaggagatcactcgtagtgaatgctgccaaagctgttgaagcagaaaaggtcagttatgacaatgacatggatggtagcaatggaaggaggaacttgatgttcgccgcggcggcggctgctgtttgctctgttgctgggatggcagtggcagatgagcctaaaccaggaaccccagaagc

SEQ ID NO: 18850 - DNA, 312 bp, Glycine max
  Clone ID: LIB3049-030-Q1-E1-H4
ttcgtccaagccttcgccggtggcaaaaagacaacagaaggggttcaattcaatttctttcaaacacacactttctctctctatctctctctctctctctctctggttgtctttcattttgttcattgttgttgatgatgtcacgcgccgccgtgttattacacgcgcaggaggaggaggaggaggagtgtagtacttcgacgtcgtcgtcgatcgggaggaacagcgacgtgtcgtcggagagatcaatggatgaaggagaaaacgaggtggaaagtgcctaccatggacctttgcatgccatggaaactt

SEQ ID NO: 18851 - DNA, 276 bp, Glycine max
  Clone ID: LIB3049-030-Q1-E1-H5
attcccaattctgaggaaatatggcttgctgctttcaagctagaatttgaaaaccatgaacctgagagagctaggatgctgttggctaaagccagagagagaggaggtacagaaagagtctggatgaaatcagcaattgtggagagagaactggggaacattgaagaggagaggagattgttagatgaaggtctgaagcaattcccttcattctttaaattgtggttgatgcttggccagcttgaggaacagcttgctgagaatgcaaagaggctt

SEQ ID NO: 18852 - DNA, 276 bp, Glycine max
  Clone ID: LIB3049-030-Q1-E1-H6
gtctcacttctcctttcctctttcatgacgcccataacctttcgatatacccttctctctgtctcttgaggtcactagaatttgttaaccttctctctcgaattctcttctctcgaaccctgcggctgcgcctcgaggccttgcgtccgtcgccattgctcgtgatcgcgagtgagctgaattgaagacaacttcagaatcagagatttggtgtagtgtcgtggttgtttctatttagcggtgatggccaaagcatcgatatattcatttacatac

SEQ ID NO: 18853 - DNA, 251 bp, Glycine max
  Clone ID: LIB3049-030-Q1-E1-H7
ggttctagtgtgtgattgtttgttgttgtaactcgttcttcttcttttgttgttctgtgtttgtgtttgttttttctctcacctgaaaatgtcttgctgcggtggtaactgtggttgcggaagctcctgcaagtgcggcaacggctgcggaggctgcaagatgtacccagacttgagctacactgagtcaaccaccaccgagaccttggtcatgggagtggcacctgttaaggctcaatttgagggtgctg

SEQ ID NO: 18854 - DNA, 252 bp, Glycine max
  Clone ID: LIB3049-030-Q1-E1-H9
gattgctctgaattttctgcatcatattgcacacagagatcatgatcgaaaatggcgacgttgaaggttcctgcacaacttccttctccattggaagacagtgagcaattgcgaaaagcttttcaagggtggggaacgaatgaaggattgataatatcaatcctgggtcacagaaacgcggctcagcgtaagttgattcgtgaagcttatagtacaacccatggagaagatcttcttaaagatttagacaaa

SEQ ID NO: 18855 - DNA, 154 bp, Glycine max
  Clone ID: LIB3049-031-Q1-E1-A1
cgggatgcaggattatcacgactccagacgggatacaaggcgaaaggcatgacatgatgctcattcgaatcacaggtcgctggtaagccgacctactaatcttacctaacgagccaccttgggattcctgctccacaatgttctgaggctcatt

SEQ ID NO: 18856 - DNA, 314 bp, Glycine max
  Clone ID: LIB3049-031-Q1-E1-A10
gggagctgagctgagaaaacccccaaccccaacctcaaccttaacctctcctcactttcttttcaaccagaactatgattaagcttttttaaagtaaaggaaaaacagagagaactggcagaaaatgcgagtagcggaccacccgttaagaagcaaagtgccggcgagttgcgtcttcacaaagatataagcgagctgaatctaccaaaatcatgtaccatgcaattccccaatggcaaagatgacctgatgaactttgaagtttcaattcgacctgatgatggatattacttaggtggcacatttttgttttc

SEQ ID NO: 18857 - DNA, 312 bp, Glycine max
  Clone ID: LIB3049-031-Q1-E1-A11
gggagctgagctgagaaaaccgccaagcgcaacctcaaccgtaacctctccacactttcttttcaaccagaaggatgattaagcttttttaaagtaaaggaaagacagagagaactggcagaaaatgcgaatagcggaccacccgttaagaagcagagtgccggcgagttgcgtcttcacaaagatataagcgagctgaatcgaccaaaatcatgtaccatgcaattccccaatggcaaagatgacctgatgaactttgaagtttcaattcgacctgatgatggatattacttaggtggcacatttttgttt

SEQ ID NO: 18858 - DNA, 299 bp, Glycine max
  Clone ID: LIB3049-031-Q1-E1-A12
ggtgttggtggtgctgtttttcgcccccgttgacgcgcattttccggcaaccggagagcttccaacgttccgcgaggcgccggcattccgcaacggaagagaatgccgcaaccgcgcgcggagcgactccgtgatccacatcgcgatgacgctggacgcgacctacctccgcggctccgtcgccggtgtgttctccgtcctgcggcacgcatcatgtccggagaacatcgtgttccactttatcggcaccacgcgccgaagcacggagctccgccgcatcattaccgcgacgttcccgt

SEQ ID NO: 18859 - DNA, 392 bp, Glycine max
  Clone ID: LIB3049-031-Q1-E1-A2
ggtgctaatcttatcttatccctctaatcactctagctgttgcaaatttctactatttttcaatggcttctgcagatgttgagttccgttgctttgttggtgggcttgcttgggtcaccggcaacgatgccctcgagaaagccttttcaatctacggcgacatcgttgaatcgaaggttatcaacgaccgtgagactggaaggtccagaggattcggatttgtgaccttcgcctcagagcagtcaatgaaagatgcgatcgcaggaatgaacggccaggaccttgaccgtcgtaacatcaatgtccaacaaacctcaaacccgcgccagccgtggtggtggtggaggcggtggtttcggaagtggtggtggatacaaccgcggtagcggtgg

SEQ ID NO: 18860 - DNA, 279 bp, Glycine max
  Clone ID: LIB3049-031-Q1-E1-A3
ggagcaagagtgaagagcgaagagaatggctcccaagggtttaatccttttggctgtgttatgcttctcagcactgtcactgagtcgttgtcttgcagaggataatggacttggtatgaacttctacaaggaatcatgccctcacgctgaagacatcatcacagaacaagtcaagcttctctacaagcgccacaagaacactgctttctcctggctcagaaacatcttccatgactgtgctgttcagagttgtgatgcttcactgttgctggactccac

SEQ ID NO: 18861 - DNA, 393 bp, Glycine max
  unsure (1)..(393): unsure at all n locations
  Clone ID: LIB3049-031-Q1-E1-A4
gaatctagtggaagagtgaataagagatatcaatatattatgataatggagggatacaataagaaggttatgattgtggggatggtgttgggcatggccatgattgggatggccaatggccaatactcgttttgtcgcatgcccagcgatgggttggcggcatgcaagccgagtgtgagtggggactatcctgctgatccctccactgcttgttgctcagccattgccaaggctgatcttaaatgcttctgccgcttcaaggattcgggccttctctctatgtatggtgttgatcccaacaagttccatggaaccccctgttaagttcaaggttgtcgactctttccactgctagattcattanagggggcactaatcaatataaactacaca

SEQ ID NO: 18862 - DNA, 374 bp, Glycine max
  Clone ID: LIB3049-031-Q1-E1-A5
gagacaagacaaagaccatgagatgatagtcgtaggaaccacggtgagaagagaagaagaattattattacacacaaaacaaacgcagttgatgttgctgctctagactgttctgcgactctttacgcaactatattttcgtttttgccgggatagggttttcggttttcttcactgctctctcaccaggggcgagttgtgaatggaagcacaaggcataaagtataaagcataaagcatagttagttgagtcaatggaaggtgttgatcaaagaaatagttctgcatttggtgttccagttcccaagaccacaaaccaagaatctccgtaggcaccatctcaccctagtatcaatgtttcaccttcagcaact

SEQ ID NO: 18863 - DNA, 373 bp, Glycine max
  Clone ID: LIB3049-031-Q1-E1-A6
acagaaaagaaaaaggaaaccctagctggataggtcaaacatcatcatgtcggacgaagagcaccatttcgagtccaaggcagacgccggtgcctccaaaacctaccctcagcaagccggtaccattcgcaagaacggctacatcgtcatcaaaggacgcccctgcaaggttgtggaagtttcgacttccaaaactggaaagcacggtcacgccaagtgccactttgttggaattgatattttcactgccaagaaacttgaggatattgtgccctcttctcacaactgtgaagtccctcaagttgaaccttactgattaccagctcattgatattgctgaggatggatttttgagtctgcttactgaaaatgg

SEQ ID NO: 18864 - DNA, 390 bp, Glycine max
  Clone ID: LIB3049-031-Q1-E1-A7
aggggcgtcgatttttactttctttcgccattcttttttccttctccaacccacattcttcttattccagaatatacacccaaattcctctttcctagggttttagtccaaagggttttggatgcatcaccatcaccatgagagccaaattgtttgtgttcccaatacgatgcaggaactggtgcttctccagaaccatcgatcactctctctccgcttcccatgcttcctctcaatccccctcaaccctcaaagacttgtggaccaacatcaacgttggtgataaacccctgaacaccaaaactgagctctttgtccattacatcggcaacaagaatgaatattgcttggattggcttgcgtaaggcgccggatgggtctttcatgaac

SEQ ID NO: 18865 - DNA, 387 bp, Glycine max
  Clone ID: LIB3049-031-Q1-E1-A8
ggtggaagtatttgcagaactttgtttcccaacctccattgcctccgcttctacctcgctaccatgatcattcctgagaagaaccgcaaggagatctgcaaatacctcttccaagagggagtttgctttgcgaagaatgacttcaatttggcgaagcaccctgagattgacgtgccgaatctgcaagtgattaagctgatgcagagtttcaagtctcgcgagtatgtgagggagacttttgcttggatgcactattactggttcctcaccaacgatggaatcgagtttctcataacttaccttaaccttccttccgaaattggtcctggcaactttgaacaatcaggccatgcaacctggcaggccctttggcggcccatccggtga

SEQ ID NO: 18866 - DNA, 394 bp, Glycine max
  unsure (1)..(394): unsure at all n locations
  Clone ID: LIB3049-031-Q1-E1-A9
ggaactgtgaagtgtatttggtcactgacctatcttggtagagatttgaagtttaaaccttcaaattaatcaaaccattttaatttgcctatagattctgagtcactgctgctatggcgctacgcgtacttcttgtgttggggatgttgctgatgttgtgccttgttagggtttcatctgatccaaagatagaagaagaaatactggaagcagaagaagaactgcagtttcccgataacgagccacttatcgtgagagacgcgaacagaaggctaatgcaagatatggattgtggtgggttgtgcaagacgaggtgcaatgcacattcnaggcccaacttgtgcactagggcgtgtggcacgtgctgtgtgaggtgcaagtgtgtcccacctgg

SEQ ID NO: 18867 - DNA, 397 bp, Glycine max
  unsure (1)..(397): unsure at all n locations
  Clone ID: LIB3049-031-Q1-E1-B1
ggttctagtgtgtgattgtttgttgttgtaactcgttcttcttcttttgttgttctgtgtttgtgtttgttttttctctcacctgaaaatgtcttgctgcggtggtaactgtggttgcggaagctcctgcaagtgcggcaacggctgcggaggctgcaagatgtacccagacttgagctacactgagtcaaccaccaccgagaccttggtcatgggagtggcacctgttaaggctcaatttgagggtgctgaaatgggtgtgcccgctgagaacgatggctgcaaatgtggaccaaactgctcctgcaacccctgcacttgcaaattganggtgttggaaaagcaagcttcaagcagagatagcccttaattaggaataatgataaactattaatgt

SEQ ID NO: 18868 - DNA, 376 bp, Glycine max
  unsure (1)..(376): unsure at all n locations
  Clone ID: LIB3049-031-Q1-E1-B10
gaggcgaagagatggccaccgttccagggcagctcgtgtgggagatcgtcaagaaaaacaattccttcttggtcaagcagtttggaaggggcacccagagcgtcgaattcagcagagagagcaacaatctctacaacctcaattcgttcaagtactctggtttggcaaacaagaaaactgttactgttcagcctgagggcaaagatcaggctgtgttgttggctacaaccaagacaaagaagcaaaacaagcccgctgcattgctccacaaatctgtgatgaagaaggagttcaagangatggcaaaagctgttgaaaaacaagttggcaaaaaataactaaaggcctgaatctcagaaggctgcccttgcaaggt

SEQ ID NO: 18869 - DNA, 381 bp, Glycine max
  Clone ID: LIB3049-031-Q1-E1-B11
ggtactgaggttccatatgggttgctggtatggtctactggagttggtccatcagctattattcgctctttggatcttcctaaagctcctggtggaaggattggcattgatgagtggcttcgtgttcctacagtagaggatatattctcaataggtgactgcagtggatttgttgaaagtactggaaaaacaccactaccggctttagcccaagtggcagaaaggcaaggtaaatatttaggaatcttactaaacaaaatacgtaaagccaatggaagccgtgcagacagtgcaaaagatgtagactttggggattagtttgtttacaagcacaggggaagcatggcatctatagggagttacaaggctctattggacctc

SEQ ID NO: 18870 - DNA, 301 bp, Glycine max
  Clone ID: LIB3049-031-Q1-E1-B12
ggtactgaggttccatatgggttgctggtatggtctactggagttggtccatcagctattattcgctctttggatcttcctaaagctcctggtggaaggattggcattgatgagtggcttcgtgttcctacagtagaggatatattctcaataggtgactgcagtggatttgttgaaagtactggaaaaacaccactaccggctttagcccaagtggcagaaaggcaaggtaaatatttaggaatcttactaaacaaaataggtaaagccaatggaggccgtgcaaacagtgcaaaagatg

SEQ ID NO: 18871 - DNA, 388 bp, Glycine max
  Clone ID: LIB3049-031-Q1-E1-B2
ggagaaagaagaggtgatatctattaatgaaggtttgatgtcagaactcgaaggcttgactgaaaaactgaatacatcaacctctgaactatataatttgatggaggaaatttcagctcttaaacaaagattggaagaatctgatatcaaccaagaaaaattgaaaagctctgttgaagtactgatggaagaaaaggaggagttggctatgcaactcactgattcccttttggaaatagaggaggaaagggcaatatggtctgccaaagagaaagatgcacttctagccatagaagaacaaaccaaggtcaaacaatttgcaaattacatcattatcaccagaattattagaagtgaggaatgaattggaatcttgtagagaagaatg

SEQ ID NO: 18872 - DNA, 386 bp, Glycine max
  Clone ID: LIB3049-031-Q1-E1-B3
ggtttcagtttgttgaggttataccaccttcctccaatcaatatactctacctatctatctcttcttctttgcaaatcaataatgggtttggatttgttcttttggtttgtgctttgtttgcctctcaactttgcttttttagcctcaacgttctaccaggttttgatgttgtctgacttggaagctgactttatcaacccctatgacgctgcatctcggattaactactttatcgttcctgagtttattgggcacggattgttgtgcgctttctgccttttaactggtcattggatcatgtttttgaataacgttccggtaaaatgctaccatgtgatgctgtacatgaaacggaaacatctcattgatgttactgaggtgttta

SEQ ID NO: 18873 - DNA, 354 bp, Glycine max
  Clone ID: LIB3049-031-Q1-E1-B4
acacaaccacctgaccaaagagaacgtgagaaaacggtcgaacaactggtgaagtcattgatggctacacacgaagagagtgcggtgaaagagcctttggatatcattatgctcagcctcgacgagcgtatctatgtcaaacgccgttccgacagagagcttcatggcaaacatcacgcttatgatcagcatcttaatatgattcatggtgatgtctaagaaactgttactacagtggaaatcgatgatcagacatatcaacaaaattgtaagaactacaaggcggacagttcctttcctgtttgtcagggcagatcgggtgatattggtttccccgccattgacgactgcatg

SEQ ID NO: 18874 - DNA, 261 bp, Glycine max
  Clone ID: LIB3049-031-Q1-E1-B5
tgggacggacaagggtttcgtctcgggtttgacgttgttcacaatcactttctgcgcttcactcattcccttcgtgcggttttcgttctttgtcgaactcgtgcgaacatgcctgagattcttcacatacagggagggcaatgcggaaaccagatcggagcgaagttctgggacgtggtgtgcgccgatcacgggatcgattccacggggatgtatcagggggacaacgagttgcaactccagcgagtcaacgtcgattac

SEQ ID NO: 18875 - DNA, 387 bp, Glycine max
  Clone ID: LIB3049-031-Q1-E1-B6
gatggaaacattgttgcctctttgttagcacataaattaggagtaactcagtgtaccattgctcatgctctagaaaagaccaagtaccctgagtctgacatttactggaaaaaatttgaagagaaatatcacttctcatgccaatttactgctgatctttttgcaatgaaccacacagactttatcatcaccagcaccttccaagagattgctggaagcaaggacactgttggacagtatgagagtcacactgccttcacccttccaggactctaccgtgttgttcacggtattgatccctttgatccaaagttcaacatcgtctcttccggttgccgacatgagcataaacttcgcatacactgaaactgagcgtaggttaacaga

SEQ ID NO: 18876 - DNA, 262 bp, Glycine max
  Clone ID: LIB3049-031-Q1-E1-B7
ggagtaagatttttcttgttcctttgttggtgggtttcctttccgcttcaggttcagcttcaacttcaaattctcagtgaaaccaattcagctgagtccaaatcccaaatccgaatcaaaatccgaagtgagatttgcgatggagaggcttcagcgaatgtttgcaggtgcatgtggagcgctagggcaacctcccccagattccccaactctcgattcctccgagcaggtctacatctcctcacacgctctcctcaagatg

SEQ ID NO: 18877 - DNA, 381 bp, Glycine max
  Clone ID: LIB3049-031-Q1-E1-B8
ggcactcagtagagaattaaataaaatcaagaaagcatgcatatgatgaagaaggtgtgtgggtttgcaatagtggtgatggcagcactttttctggtggagatgagtcccatggcagaggctgtgacttgtagccctgtggagttgagtccctgtttgggggcaatcacgtcctcttcaccaccatcgacaacttgttgccagaaggtgagggaacaaaggccatgcctctgtggttacctcaaaaaccctagtctgagaccatatgtcaactctcctggttccagaatggttgctagctcttgttggggttccctctccaactttgtagtcactttttacttcatatatatgtaataaactccccctactgttggctgg

SEQ ID NO: 18878 - DNA, 381 bp, Glycine max
  Clone ID: LIB3049-031-Q1-E1-B9
gacaacacaacacaacgcgcactctctctttttctctctgttttttgttctctcttcgctcaaaccctatcgttcttctcgttttcgccgattctcgccatgccgaaagctaaatccgacgccaaagccgccgatagcaggttgaagcggaagggcgctggtgctgggaggaagcaatcgaggaaagctgctaaggaccctaacaagccgaagagacctccaagcgctttcttcgttttcatgtccgagttcagagagcagttcaagaaggagcatcctaacaacaaatccgtcgctgttgtccgcaaagctggtggtgaaaaatggaaatccctatctgatgctgaaaaggcccctttcgttgctactgctgagaagaag

SEQ ID NO: 18879 - DNA, 200 bp, Glycine max
  unsure (1)..(200): unsure at all n locations
  Clone ID: LIB3049-031-Q1-E1-C10
gtccgtcttgctgcgagctgccgcccgggggggattcgctcgctcgcttcggtgtccttttttcttcttctcttccgctctctcttctctgtgtctcggnggcgccttttgggggcttctggctggttgttcgggtgcttctgctctttgggtcctttttcttcgctttggcttctctgttgctttcggccttttggttg

SEQ ID NO: 18880 - DNA, 379 bp, Glycine max
  Clone ID: LIB3049-031-Q1-E1-C11
ggcacaagtttgttgagatagctagaagcaataagatgaaaatgaaagtgcttgttttgtttgttgctacagttttggtagcatatgaatgccatggctcagactaccagaagttccctctccaaatgaaaactgggtttggtgggcaatacagcaatgaggtggcatgtgccagttggaggcttggcgtggaagcaaacaacgtagtcaagtggcaaactgttcctgcagcttgcggagagtacatagctgactacgttctaggagaccaatatagatcagattccaaaacagttaaacaacaagctttattccatgctaaatccctcaaactcaccaacaaagatgtctttgtcttggacgttgacgacactactct

SEQ ID NO: 18881 - DNA, 292 bp, Glycine max
  Clone ID: LIB3049-031-Q1-E1-C12
ggcacaagtttgttgagatagctagaagcaataagatgaaaatgaaagtgcttgttttgtttgttgctacagttttggtagcatatgaatgccatggctcagactaccagaagttccctctccaaatgaaaactgggtttggtgggcaatacagcaatgaggtggcatgtgccagttggaggcttggcgtggaagcaaacaacgtagtcaagtggcaaactgttcctgcagcttgcggagagtacatagctgactacgttctaggagaccaatatagatcagatttcaaaac

SEQ ID NO: 18882 - DNA, 254 bp, Glycine max
  Clone ID: LIB3049-031-Q1-E1-C2
gccaaaagaagaccgaaggggaacgtggaagaaattatttagcgtcaaccgtcgcactcgggccttcgttcagcacagtttcgcaatccctttcgaagaaacgcgttttgtcgtccctttctgagcgtgggcctttgtttcggacttggaccccacattcgcgcacattcgcaccacagtatatcccccctttcgatgaattcgcgtgccctttcacagtttccaccaggacctagtcccaaaggttcacctta

SEQ ID NO: 18883 - DNA, 270 bp, Glycine max
  Clone ID: LIB3049-031-Q1-E1-C3
tggggcgaaagaaagatcgttctcgatgacagaggggagcggtgacaaaactctgcgaaagatcgcagacgcattcaatgatcttgcaaacgtcttcaccgattctcagagcgtataagcagaggtcaaggttgctcccttctctcatgcatgctctctcgtctcccctctcgacggttgcctgggcgtctccttcaagttcggcgaaatggattacgtcgcgaaggttcatgatctggcacaggcgtccagctctagtcagaatctgca

SEQ ID NO: 18884 - DNA, 96 bp, Glycine max
  Clone ID: LIB3049-031-Q1-E1-C5
ggaaaagaagagtactaactcgagcttgttcttctcctcaatatacctctttctcaatccctatccatctctctcgttcctcaacttcagagctct

SEQ ID NO: 18885 - DNA, 387 bp, Glycine max
  Clone ID: LIB3049-031-Q1-E1-C6
gaaatcaggagagcatgcatatgaacatgatgatgaagaaggtgtgtgggtttgcaatagtgatggtggcagtgcagcttctggtggaggtgagtcccaaggcataggctgtgacttgtacccctgtggagctgagtccttgtttgggggcaataacttcctctcaaccaccatcaacaatttgttgccacaaggtgagggaacaaaggcaatgcctctgtggttacctcaaaaacccaagtctaatgccatatgccaattctcctggctccagacaggttgctagctcttgtggggttccctttccaacttggtaaatatccttaaaaccatatcaaaatatagtatgtaataaaccctgttggctggaaattacatatatatata

SEQ ID NO: 18886 - DNA, 384 bp, Glycine max
  Clone ID: LIB3049-031-Q1-E1-C7
ggcagcgcttgatttgaggccaggcaagccccactcaaccaccacacctctcctcgttcacgctacccctttctgctcttcttctacctttcaagttttaaaagtataaagatggcagagacattcctatttacctcagagtcggtgaacgagggacaccctgacaagctctgcgaccaaatctccgatgctgtcctcgacgcttgcctcgagcaggacccagacagcaaagttgcctgcgaaacatgcaccaaaaccaacttggtcatggtcttcggagaaatcacgaccaaggccaacgttgactacgagaagatagtgcgttgacactgcaagaacatcggcttcgtctcaaatgatgtgggactggatgccgacaactgc

SEQ ID NO: 18887 - DNA, 371 bp, Glycine max
  Clone ID: LIB3049-031-Q1-E1-C8
ggtgcctctcgtctccctttgcacaaaccctaacacctaaaagccagaagaagcgaaatcgtaatcgcaatctagcggatatgaaggtcgtcgctgcatacttgctcgcagtgttgggagggaatccatctccttctgccgatgatatcaaaaacatcctcggcgcagttggagctgaggctgagcatgagttgattgagttgctcttgaccgaagtcaagggcaaagacttcaatgagctacttgctagtggaagtgaaaagatttctgcagtggctggtggtggtgcaaccgtttgccgtggcggttgaaccagctggaggtgctggtggcggtgctgcacctgctgccgaagcaaaggaagaaaagaa

SEQ ID NO: 18888 - DNA, 373 bp, Glycine max
  Clone ID: LIB3049-031-Q1-E1-C9
gattcactcactcacttcagtgtcattttttcttattctcttcctctctctctactctgagacacaaaggaaaattataagaaattatggctggttattcaaaagcttcagctctttggatcctttttcttctctttggcttctctgtagctaaggaaattttggttggaggtaagactgatgcatggaaggtttcagcctctgaatcagattcactcaaccaatgggcagaaaagtctcgtttccaagttggagactatcttgtttggaaatatgatggtggaaaagactcagtgttgcaagtgagcaaagagaactatgtgaattgcagcatctcaaaccccataaaggagtacaatgatgataccacaaa

SEQ ID NO: 18889 - DNA, 189 bp, Glycine max
  Clone ID: LIB3049-031-Q1-E1-D1
tgggatagaactgacaagggcgatacacctcatttcgcgaagcattagattagacttccagatttaacctccacgatgcagcagcactctgtgttgtactacaaacacataggttatgcacttttctttcttttctcttcatcctcaatccatcatatctattccatttgctcactggagagaatcacg

SEQ ID NO: 18890 - DNA, 298 bp, Glycine max
  Clone ID: LIB3049-031-Q1-E1-D10
gagtggaagagtgaataagagatatcaatatattatgataatggagggatacaataagaaggttatgattgtggggatggtgttgggcatggccatgattgggatggccaatggccaatactcgttttgtcgcatgcccagcgatgggttggcggcatgcaagccgagtgtgagtggggactatcctgctgatccctccactgcttgttgctcagccattgccaaggctgatcttaaatgcttctgccgcttcaaggattcgggccttctctctatgtatggtgttgatcccaacaag

SEQ ID NO: 18891 - DNA, 310 bp, Glycine max
  Clone ID: LIB3049-031-Q1-E1-D11
gactcaaaaagagggttaacaagaaaaaaaaaaacttgaaataccttcaactcgaagaacacaaccactgaaaaaagagaaagtgagaaaagggtcgaacaactggtgaagtcattgatggctacagaggaagagagtgcggtgaaggagcctttggatctcattaggctcagcctcgacgagcgtatctatgtcaaactccgttccgacggagagcttcgtggcaaacttcacgcttatgatcagcatcttaatatgattcttggtgatgttgaagaaattgttactacagtggaaatcgatgatgaga

SEQ ID NO: 18892 - DNA, 262 bp, Glycine max
  Clone ID: LIB3049-031-Q1-E1-D12
gaagaacaagaagcgaaaatataacaaataatttgtactttcatcaaaacaaaatcccgttgtatttttctcagatggctcgaacgaagcaaacggcccgcaagtccaccggcggcaaaggcccgcggaagcagctggcgactaaggcggctcgcaagtccgctccggcgaccggcggcgtgaagaagccgcacagattcaggccgggaaccgtggcgctgcgcgagatccggaagtatcagaagagcacggagctactcat

SEQ ID NO: 18893 - DNA, 404 bp, Glycine max
  Clone ID: LIB3049-031-Q1-E1-D2
gacaaaccaaacaactactactactactgcacacactctctctctctctctcattgtatggccgccaattcgagtagccgagggatcaccgccttggggaagcgagtcgccaaccagatctggacttccaaccccccctcagctcctctcacttccaggaggggagcaatatcagctgcatacagtagcagcggcgggtcagtgtatgacaagaaccctgatgatcagatccactctggggcggtcccagacgatgtgatccaggcaacacaatccggcaaatactgggccccacacccacagactggggtaatttgggccccccggaggaccaggagacgaagctgcatctgctcccacttccacttccacttctgatgccctggaagagaaggcctggtttc

SEQ ID NO: 18894 - DNA, 390 bp, Glycine max
  Clone ID: LIB3049-031-Q1-E1-D3
gggttgcgtcgatgggcgtgatgaggccggagctggtgatgaaatcgatcgtgccggttgtgatggctggtgtgttgggtatctacggtttgatcattgcggttatcataagtacgggcattaaccctaaggccaaatcgtactatctttttgacggctacgcccacctcccttcaggtctcgcttgtggcctcgctggcctctccgctggcatggccatcggcatcgttggcgatgccggtgttagagcaaatgctcagcagccaaagctttttgttggaatgatactcatcctcacttttgctgaggcctttggaattatacggtcccattgttggcatcatcctctcttctcgtgctggccaatccaaggctgactaataaattttc

SEQ ID NO: 18895 - DNA, 326 bp, Glycine max
  unsure (1)..(326): unsure at all n locations
  Clone ID: LIB3049-031-Q1-E1-D4
gactaacgcgtacgtccagncgtcagtaaagcagcgagaggagaacagaagggggcttacgagggaatgatcttaaccggagtcatccacagaacgacgtcgtcactgtctctcacaggtcacaagtcttcagtcccacttgcaacctctctctctcgccggtcgctgaatctttctccgcatccgcaacctatgccgtatccgcctttgagacgacaatcgaaggatcagcgggtgaacggacctggcgtggacatgccgatcaagcactagaacgaccgctacgatttcgttcgcgacaacggctcctggaatttcggggtcgc

SEQ ID NO: 18896 - DNA, 280 bp, Glycine max
  Clone ID: LIB3049-031-Q1-E1-D6
ggagttggatgagtttctgaagctttctatggagatgaagaatccactgtcctgcatggctgtgcccacggtttctgttcacgttaatgtgtgttgttgggtttagttggtttggtttgtcagcctaagttagtggatgttctgcccacggctgtccctacggtttctgttcaagtttatgtgtgttgtttggttcgtctgttgacgtttacagatgtcgttcggttgagttcgtttggtatgtgttacctgctaaatttagttctgcactgctaaggtt

SEQ ID NO: 18897 - DNA, 392 bp, Glycine max
  Clone ID: LIB3049-031-Q1-E1-D7
agggggttgcgtcgatgggcgtgatgaggccggagctggtgatgaaatcgatcgtgccggttgtgatggctggtgtgttgggtatctacggtttgatcattgcggttatcataagtacgggcattaaccctaaggccaaatcgtactatctttttgacggctacgcccacctcccttcaggtctcgcttgtggcctcgctggcctctccgctggcatggccatcggcatcgttggcgatgccggtgttagagcaaatgctcagcacccaaagctttctgttggaatgatacccatcctcatttttgctgaagcctttggattaacacggccccattgttgggatcaccctcccttcccgtgctggccaatccagggctgactaataaatttt

SEQ ID NO: 18898 - DNA, 360 bp, Glycine max
  Clone ID: LIB3049-031-Q1-E1-D8
gattgtagattggtcttgttatgttatgatatcaatcaagatagataaccaaccattttgtgtccaccaaaacaaaacccctcaactcctcacccactagctatgggagagaaagagaagagaaacaagaacaagatgcaaaagcaccaacaccccaatgaccaaagcacaaagcagaactctgatttctccttcaagccaagctcagaggtaaagggtatcaaatttggaggccagttcatagtgaagtccttcacaatcagaagagcaagacccctggaacctctccaaggttctttctttcgcaccaaccaacaacgccaacaaaccaaaggacaagctccccttcccttccaccac

SEQ ID NO: 18899 - DNA, 376 bp, Glycine max
  Clone ID: LIB3049-031-Q1-E1-D9
ggttctagtgtgtgattgtttgttgttgtaactcgttcttcttcttttgttgttctgtgtttgtgtttgttttttctctcacctgaaaatgtcttgctgcggtggtaactgtggttgcggaagctcctgcaagtgcggcaacggctgcggaggctgcaagatgtacccagacttgagctacactgagtcaaccaccaccgagaccttggtcatgggagtggcacctgttaaggctcaatttgagggtgctgaaatgggtgtgcccgctgagaacgatggctgcaaatgtggaccaaactgctcctgcaccccctgcactttcaagtgaggtgttgggagagcaagcttcaggcagagatagcccttaattaggaat

SEQ ID NO: 18900 - DNA, 243 bp, Glycine max
  Clone ID: LIB3049-031-Q1-E1-E1
tgggaagagtttgaagaagcagcttgaatttgtctctgtgcagagcagaaccccataacatacagtttgagagagatgggtatgaattgcggtggcgttgtggttcggtttggtttgtgggtggtggcgatgtgcattgcatgctacatagtggccccccctctctactggcacctcagtgaactcctcaagcactcctctgtttcttcttcctcttcttcttgcgctccttgcgtctgcgat

SEQ ID NO: 18901 - DNA, 306 bp, Glycine max
  Clone ID: LIB3049-031-Q1-E1-E10
ggttctagtgtatgtgattgttgtgactcgttcttcttcgtcgttatcttcttcttttgttgtttgtgtgtttgttttttctctcacctgaaaatgtcttgctgcggtggtaactgtggttgcggaagcgcctgcaagtgcggcaacggctgcggaggctgcaagatgtacccagacttgagctacaccgagtcaaccaccaccgagaccttggtcatgggagtggcaccagttaaggctcaattcgagagtgctgaaatgggtgttcccgctgagaacgatggctgcaaatgtggagctaactgc

SEQ ID NO: 18902 - DNA, 353 bp, Glycine max
  unsure (1)..(353): unsure at all n locations
  Clone ID: LIB3049-031-Q1-E1-E11
gacctcacccagttgcagaaagaaaagaccatcaaagtttcacttcagccttatccggtttagggtttcggtttttgacccaacctttgacgtatcgaaaccttaagtttcggatcaggtctgagcaatctggttggtagaacctttggtcttagagagtcaagttttatgtctgaattagacgatcaaattcctactgccttcgatccttttgctgatgcaaatgctgatgactcgggtgctgggtcaaaggagtatgtgcatattcgcgtacagcagcgaaatggaaggaaaagcctgacaaccgttcaaggattgaaaaangaatcagctataacaagatacttaaagat

SEQ ID NO: 18903 - DNA, 311 bp, Glycine max
  Clone ID: LIB3049-031-Q1-E1-E12
gtcagtacagcagcgagaggagtacaaaaggggatctcacccaggttgcacgaacgacaacaccatcaaactttcacttcagccgtatccgggttagggtttccgcttatgacccaacctttgacgtatcgaaaccttaagtttcggatcaggtctgagcaatctggttggtagaacctttggtcttagagagtcaagttttatgtctgaattagacgatcaaattcctaatgccttcgatcctattgctgatacaaatgccgaagactcagattctgggtcaaaggagtatgtgcataatcgcgtacagc

SEQ ID NO: 18904 - DNA, 147 bp, Glycine max
  Clone ID: LIB3049-031-Q1-E1-E2
gacacacccctcagcacatacctccgtcgcgccttcaaaactctatcgatcgggattctctacctgtcctgccacgtatggatcgcgatccatggctcgtatcaaccattttgtgtccaaatcgacacgtcgactccgctcctcaga

SEQ ID NO: 18905 - DNA, 402 bp, Glycine max
  Clone ID: LIB3049-031-Q1-E1-E3
gatgaaaaagggagtgcctgataacccataaccgaccgcaccaccgttttcctttgctttgcgttctacaatgtcgaaaacctcagagattattacatgcaaagctgctatttgctggggaataggaaaacctgtgactgtggaagagatacaagtagaccctcccaaagccaccgaagttcgagttaagatgctttgtgccagtatatgctccacagacatctctagcacaaaaggattcccacataccaattttcctatagcacttggacacgaaggagttggtattatagagagtgtccgtgattaagttaacaaatctgaaaaaaggggatgtggtaattccaacatacataggcgagtgccaagaatgtgagaattgtgtttcagaaaaaaccaatt

SEQ ID NO: 18906 - DNA, 406 bp, Glycine max
  unsure (1)..(406): unsure at all n locations
  Clone ID: LIB3049-031-Q1-E1-E4
ggcagcgcttgatttgaggccaggcaagccccactcaaccaccacacctctcctcgttcacgctacccctttctgctcttcttctacctttcaagttttaaaagtataaagatggcagagacattcctatttacctcagagtcggtgaacgagggacaccctgacaagctctgcgaccaaatctccgatgctgtcctcgacgcttgcctcgagcaggacccagacagcaaagttgcctgcgaaacatgcaccaaaaccaacttggtcatggtcttcggagaaatcacgaccaaggccaacgttgactaccanaaggatattgcttgacacctgcaggaacatcggcttcgtctcaaatgatgtgggactggatgccgacaactgcaaggtcctcngtcacattgag

SEQ ID NO: 18907 - DNA, 390 bp, Glycine max
  Clone ID: LIB3049-031-Q1-E1-E5
gacgtagcgactatcggcggcgacggagctaagattctggtggaggacttggtcagcgcggaggagcgcgtggttgttatcgtgggcgaggagtccgctgcgcaggttgcgttggttagggtttttgagagaacggtggatgaagaaactaagaattcgacagtgtcgtgtaaattggtggcccccagctatcaggttggctgtgtgctcggccgacgaggcaaaatcgtcgaaaagatccggcaagacactggggcccacattagggttttgcccaaagaccaacctcctcttcctcctcctcccggtgaagaattcattcacgaataccagaaacctttgggccaactgaagaaaagcggttctatccggtttcagcttgtttttatg

SEQ ID NO: 18908 - DNA, 391 bp, Glycine max
  Clone ID: LIB3049-031-Q1-E1-E6
gattgttcccttacttcatgttggttgcttttgaagctggtggggtactacgatctctcatcttgtttctttcataccccttggtgtggttggtgggtgaaaaccaacttggtttgaagatcatggttttcttgagcttcattggcctcagaaaggacacattcagaacaggatcagctgttctggcaaagttcttcttagaagatgttggattggaaggctttgaggccgtaatatgttgtgagagaaaagtggcatctagtaagttgccaagggtcatggttgaaaatttcctcaaggaccatttatgggtttaatccggttatagccttcagaattgaagtccttcagtggcttccttttgggagtttttgacagtaagaaccaatta

SEQ ID NO: 18909 - DNA, 363 bp, Glycine max
  Clone ID: LIB3049-031-Q1-E1-E7
gatcctgcattatctttttagctcaaatttttgtgaagcatttttattggtagaaatggagagtgagtccgtgaagcgcagaattcacatgattgctgctcactttgcacccaatgatgatatttcaactaccaacgttctgcctatgaactgcagtggcagtctgaactctgtactccggagatgtgataataaggtgtattttgcacgccaagcttctgcttctcttggttaatttatgaggcagacttcaattgaagagggtggctcaacttcctttattgctcctaaaacaaatcatggtgctgctgcatccgaatggtcctccggatgccagggccaccatgttttgctatacctgca

SEQ ID NO: 18910 - DNA, 301 bp, Glycine max
  Clone ID: LIB3049-031-Q1-E1-E8
tggggaagagagagagagagagagagagtcctgaaacttgggtgcgattccttcactcacaacaacaacacatcactacggctcttctgagtcgagcctcttcacgcttccctcagctggtttcccctcaaagggtagtttcactccacacaacgctcccatctctgaacgcatcgccatccacagccacgcctacaccatatgccccgccaccgcctccgtccgcttcctctccctccggcgtttcgaatgcggcagagttcgtgatctcgaacgtggacgatctgatgaactgggcccg

SEQ ID NO: 18911 - DNA, 311 bp, Glycine max
  Clone ID: LIB3049-031-Q1-E1-E9
ggcagccaaagaaaagaaaatcctcaattttctgagcagccaaacactctctctctgtctctcgaaaattctcagtttgcagagaaaatctgaatcatgtcgtggcaagcgtatgtcgacgatcaccttctgtgtgacatcgaaggtaaccacctcactcacgctgctatcatcggccaagacggcagcgtttgggctcagagtaccgacttccctcagttcaaacctgaggagataactgccatcatgaatgactttaatgagcctggatcacttgctccaactggattgtatctcggtggcaccaaata

SEQ ID NO: 18912 - DNA, 427 bp, Glycine max
  Clone ID: LIB3049-031-Q1-E1-F1
tgcgagaataggacagaacgggacagacacaaatcacaaaccccatttccaaccccacattgaacctaaaaaagcaatgtcacctccaccattttccccgcctctctctatttcccttctctttgtcttcctgttagcaccattactcttagctcaatctccaccttctccttctccttcttcttcttcttcttcttctgttgcctgcaaatgcacactatatccaagttctccataaaacaaagcctcaaacaggcaacaaaactagccaaagtctttgacgactttctccaacgtccacaaaaatcaccttccctcaaccatgctgtaaatgcagtcacttggttaatggaatctgacctaaaacaacttcaatgtggactacttggcgttctatatccgaggagctcaaatccgcaagctcctc

SEQ ID NO: 18913 - DNA, 308 bp, Glycine max
  Clone ID: LIB3049-031-Q1-E1-F10
ggaggggttgggcggcgggatagacttcatggtggtggattccacgcgcggaaacttctccagagtgctgaggctggcgaagctgagtaacaaaggcgcggttcttatatgcaagaacgtgaactccgccaccaatattgcttcttcttcgggtttcagatggcggagcgtgctcgaagaagggtcagggtcgcgtcgtgtggttcgttcggtgtttcttcctgtggggaaggggcttgacatagcacacgtgtcggccattggggggggctccgctgctaagagatggttcaagcatgttgaccaac

SEQ ID NO: 18914 - DNA, 274 bp, Glycine max
  Clone ID: LIB3049-031-Q1-E1-F11
gataactagtcgtagtattatttcatcgattctctcccttctctttctctctgcgacaccagatgatggagacgacggcgaagcgaaacgctgtcgttgcgccaatcgcggcgttgttgttggtggtgctactcgcggcgagtgtggtggtggaggctcaggagaactcggacgtgaagacgctggtgaagcacatgcacgggaagaagtactgcgacaaaggatgggaatgtaagggctggtcaatttactgttgtaacctcactattactga

SEQ ID NO: 18915 - DNA, 337 bp, Glycine max
  Clone ID: LIB3049-031-Q1-E1-F12
tcagtgaaactggagttgctgttatgctaaatctgagggaccttgattgtcatgctctcagttttggaacgcaattcagctcataacaatgcagaatgaagttccacattcaagtttgttttgcgatgtttgttggtggtgctgctattggtgtatcttggggcataaagccaagaaccgaaaattgaagctgatagtcgaggaaggctacctgtgtttctttagtgtaatatatttttgtagtattgatatatattgacttccatgtttatttttcttattagttttcagtgtaacatagtatttatacattagttaaaaattggtttgcacaaag

SEQ ID NO: 18916 - DNA, 389 bp, Glycine max
  Clone ID: LIB3049-031-Q1-E1-F3
ggttctagtgtgtgattgtttgttgttgtaactcgttcttcttcttttgttgttctgtgtttgtgtttgttttttctctcacctgaaaatgtcttgctgcggtggtaactgtggttgcggaagctcctgcaagtgcggcaacggctgcggaggctgcaagatgtacccagacttgagctacactgagtcaaccaccaccgagaccttggtcatgggagtggcacctgttaaggctcaatttgagggtgctgaaatgggtgtgcccgctgagaacgatggctgcaaatgtggaccaaactgctcctgtcaacccctgaacttgcaattaaggtgttgggagagcaagcttcaagcagagatagcccttaattaggaataatgataaacta

SEQ ID NO: 18917 - DNA, 374 bp, Glycine max
  Clone ID: LIB3049-031-Q1-E1-F5
gacacttcttcattccttcaacttcagcctcaacctcaacccacttaccagtttttccaaattttcattctttttccctttccatgagttgatgcatctttttcaagctaattaagcttgaattagctggtggggttttttaaattcgtcgataaaaattacagtgttctgctatttttttttcttcttcttgtgtttttgtttgcagattcaggaactggtgtgtgagatttcttcaactcggggtttcattgacataaatgcaaacaatcttgaattcgaaggcagtaagtgattacttaaatccctgaaagacatgcagttaaccctggtttcggcggaaatgacgaacttgcagagctcggaagaataca

SEQ ID NO: 18918 - DNA, 395 bp, Glycine max
  Clone ID: LIB3049-031-Q1-E1-F6
ggccgactgtgctgtccttattattgactccaccactggtggttttgaagctggtatttctaaggatggacagacccgtgagcatgctcttcttgctttcaccctaggtgtgaagcagatgatctgttgctgtaacaagatggatgccactacccccaagtactctaaggctaggtatgatgaaatcgtgaaggaagtctcttcttacttgaagaaggttggttacaacccagacaagattccctttgttcccatctctggttttgagggtgacaacatgattgagaggtccaccaaccttgactggtacaagggaccaactcccccttgaggcccttaaccaaatcaatgagcccaagacgccctccgacaagcctctaaggcttccattgcag

SEQ ID NO: 18919 - DNA, 323 bp, Glycine max
  Clone ID: LIB3049-031-Q1-E1-F7
ggctgtgaagtgtgaattaaaatatattcaattttgcgtttctctgcctaaaaggattgaaagatgggtcaagcattcggttgctaccaagtcgatcagtcaaatgtggctatcaaggagcattttggaaaatttgatgatgtcctagagcctggatgtcactgcctgctttggtgtcttgggtaccagattgctggtagtctgtcgctgcgagtgcagcaacttgatgttcgatgtgagacgaaaaccaaggacaatgtctttgtcaatgtggttgcatctgtgcaataccgagctgtgtctgagaaagcatctgatgcatt

SEQ ID NO: 18920 - DNA, 367 bp, Glycine max
  Clone ID: LIB3049-031-Q1-E1-F8
gatactcactcgcacctaactccgccatggcttctcttcccaccactttcgctataaccaaatctgcatcctccataaacaaggtggaccactctctggtcaagatcaaaccatacaacttctctctcaatctaaatcgtcaagggaccatgcaagcatctttaaccagaaggcctctaacaattcaagctacgtatagtgatggtggaaggcccagcagtgctagtgtatttgttggtgggtttctcttgggaggattaatagttggtactcttggttgcgtgtatgcacctcagatcagcaaggccctagctggaacttacaaggaaggatttaatgagaaaattgccaaagtttatatatgatg

SEQ ID NO: 18921 - DNA, 385 bp, Glycine max
  unsure (1)..(385): unsure at all n locations
  Clone ID: LIB3049-031-Q1-E1-F9
gacagcatatatatcaataatctattttatactatacctacattttgataattttctttgtagttgatagccatggctacccgtggaaagcttgaggttgacattgatctcaagtccaacgcagacaagtactggcaaacccttaggaattctactgaaatattccctaaggccttcccacatgattacaaaagcattgaggttcttgagggtgatggcaagtctcctggttctatccgccacataagttatggtgaaggttcaccacttgtgaaatcatcctttgagaagattgaggctgttgattangaaaagaaaggaatgtcctacaacaaccattgatggggaactcttccagcactacaaaacattcaagggagacatt

SEQ ID NO: 18922 - DNA, 129 bp, Glycine max
  Clone ID: LIB3049-031-Q1-E1-G1
gctgcagaaaaagccggaggggatatgagaaaaaccgggacggttatatctctttgggtatgatcgcctctctctgagcgctgcatctcatgttcatcgatgatccttgcactttccttgagggaaatg

SEQ ID NO: 18923 - DNA, 298 bp, Glycine max
  Clone ID: LIB3049-031-Q1-E1-G10
ggaagacaccgagcgacaaagatccacgatgacggacgaaaccgaacaattggaaccgttgtttgattacagccgggttcaacctctgaaccccatccacctccatgatgattttgatgattacgaagatgtgatttgcgttgatagtaaaaagaggaagaattcccaggctgttgggaatgagaagactaatgggaaaggagttacagtggtggacattgaggatgatgattggttgcctcctccaccaaagatcgcaagtaatgcacagaagaacaccgacgaggactcaactttg

SEQ ID NO: 18924 - DNA, 388 bp, Glycine max
  unsure (1)..(388): unsure at all n locations
  Clone ID: LIB3049-031-Q1-E1-G11
gtatgaggcaatctacagcttctactttggggactatggtcacatttcagtgcanggttcatacctgacctatgaagacacttatcttgctgtgactggtggatctggcatctttgaaggggcttatggtcaagtcaagctgcatcaaattgtgttcccctttaaattattctacacattttatcttaagggcatcaaggacttgcctcaggagcttctttccaagcctgttgagcccagcccatctgttgagcctagcccatctgccaaggcctgtgagccacatgctgttatttctggcctcaacgactaaaccaccattgacccaatgaggattcacattttttttgtttcttttttaaggaaaaaattcggttacagtttctta

SEQ ID NO: 18925 - DNA, 394 bp, Glycine max
  unsure (1)..(394): unsure at all n locations
  Clone ID: LIB3049-031-Q1-E1-G12
gacttgcggctgcagtagagaagcactcttcgttcttcgactgtctacgatctgctttctctgaattgtgaaaatgtcgctcggagaaactgcttgttcatacgcagctctcatccttcatgaagatggaattagtgtaactgctgacaagatcagcaccttgttgaaaactgcaaaggttccagtagactcttattggccaaccttgtttgctaaacttgctgagaagaaaaatcttggcgatttgatagcaaatgcggcaggcggtggtgcaccagttgctgttgcagctgccccagttgctgctgctgctggtggtgctgctgccgcaactccagctgctgaggaganaaagaaggaagaaccggaagaagagagtgatgatgatatggga

SEQ ID NO: 18926 - DNA, 400 bp, Glycine max
  Clone ID: LIB3049-031-Q1-E1-G3
gagtgattttctatttttatatcctctgctatttgtaactttccctcttattgcaaaaccaattgaacaactgaacataaaatttctcttttcaacctggaatttgctagtcttgttccacttcgattcagttcaccgatcttcattgcttcctcttttggatccgcttcattcgcgttcaaaccaacgactaatcataactcttctaccggatccctcattttttccctttcctttctgcgttaaattcatatcggagaaggagagagagaaactgcgacatgaacaaagcgactcttccgttgacgttaattggcgatggaaaacgttacacaaaagggtgacaaaggtggcggagcccgggtaacctcgtcattgcgcttcaggtcctcaacaccat

SEQ ID NO: 18927 - DNA, 408 bp, Glycine max
  Clone ID: LIB3049-031-Q1-E1-G4
gtgtccaaagagaaaaatgcaaagcacacgcgccttaatctttcagatcctcgggattgttgtattccgccaaagaataagattgtgggagatgtcatcatggtggatcgaggcaactgcacattcacaaaaaaaagcaaatattgcacagaatgctaatgcttcggccatcctcatcataaataaccaaaaagaactgtacaagatggtttgcgaacctgatgaaactgatttgaacatacacatacctgctgtcatgcttccattagatgcaggtacaaggctggaaaaaatgctgacgactacttcatccggtgtcggttcacctgtactcaccatttcgaccagctgttgacatagcagaagtatttccttggatgatggcagttcttacaatattgtgtgcat

SEQ ID NO: 18928 - DNA, 224 bp, Glycine max
  Clone ID: LIB3049-031-Q1-E1-G5
gagggttttatctcattaacgtttcttctcttcactctgcccgctgcatcaatggcttcagagaagaaactttcgaacccaatgagggagataaaagtgcagaagctcgtcctcaatatctctgttggccagagtggagatcgtctcaccagagcctccaaggtgttggaacaacttagtgtgcaaaccccagtgttttccaaagcaaggtacactgttcgttc

SEQ ID NO: 18929 - DNA, 367 bp, Glycine max
  unsure (1)..(367): unsure at all n locations
  Clone ID: LIB3049-031-Q1-E1-G6
gctgtttgtgtggttggcggtgaaaggtcccttgttgccaacttatcagctgcaaattgctataagtctgagcatttgacgagaccggaaaattgggcattagttgaaaaggccaagtatttctacatttctggctttttcctcactgtatctcctgattccatacaattagttgctgaacatgcagctgcaaataacaagttcttcatgatgaacctttctgccccatttatctgtgagttcttcaaggatgcactgaataaagttctgccatatatggactacgtttttggtaatgagactgaagcangaacattttccaaagctcaaggctgggagactgataatgttgaggaaatagctttga

SEQ ID NO: 18930 - DNA, 390 bp, Glycine max
  Clone ID: LIB3049-031-Q1-E1-G7
ggatctgcattccttgttgtcgtctggcatgtcttcatccaaacagtgaaactgacttgacgataaagaagcatttccatcaattgaagtgatgattgagagtgggtatggcactcagactcagaggaaaatgggttttgattccattcttttggttttgcctgattccgttttgcttctcacaacagaagctgcgcttgcgctttggaaaaaatggagagttcaagatcttgcaaattgctgacttgcactttgccaatgggaagactacccactgcttggatgtgcttccttctcagtatgcttcttgctctgacctcaaacacaacggccttaatccaaaggatcatcctttctgagaaacctaaccttattgtcttcactggagat

SEQ ID NO: 18931 - DNA, 179 bp, Glycine max
  Clone ID: LIB3049-031-Q1-E1-G8
cggggtgtccacggagaccgctgctctgcaccgcgccttattctttcagatcctcgggattgttgtattccgcccacgactcagattgtgggagatgtcaccatggtggatcgatgccactgcgcattccccgcacactccctgtattgcccagaatgctaatgcttcggccatcctca

SEQ ID NO: 18932 - DNA, 278 bp, Glycine max
  Clone ID: LIB3049-031-Q1-E1-G9
ggaagacaccgagcgacaaagatcgacgatgacggacgaaaccgaagaattggaaccgttgtttgattacagccgggttcagcctctgaaccccatcgacctcgatgatgattttgatgattacgaggatgtgatttgcgttgatagtaaaaagaggaagaattcccaggctgttgggaatgagaagactaatgggaaaggagtaacagtggtggacattgaggatgatgattggttgcctcctccaccaaagatcgcaagtaatgcacagaagacca

SEQ ID NO: 18933 - DNA, 294 bp, Glycine max
  Clone ID: LIB3049-031-Q1-E1-H1
aggatgggcagcgcttgatttgggggatgggaagccccagtcaaccaccagaggtttcctcgtgcacgctggccctttctgcacgtcttcgagctttcaggttttatgagtttgaggatgggagtgagattcggacttagctcagagtcagtgtaggatggaaatcctgacatgcggtgctgccagatctcgtatggtgtcctcgacgcttggctggagcaggacccaggcagcaaagttgactgcgagatatggaccaatgccgacttggacatggtcttcgggaagatcacg

SEQ ID NO: 18934 - DNA, 386 bp, Glycine max
  Clone ID: LIB3049-031-Q1-E1-H10
gtctgcaaaatttgtgcttgatctcggaggctcactcctctgggctgattgtgcatccagaaccaccccatcttccaccctcgcccccattttccaccgttcaattcgctgcctcacagcaaagggtcctgaaattgagacccacaggtggctctcgagtcttgcaaatcctatagatcaagatcagccatgtcaaattacagcagagaacagcatcacggggaaaagggtcaccgaaggagagcttgtggaagacctagtgattcatcgttctcacgagcttctcttcacgtgctcgcccacttttcttttgaatggtttagccactgatgctaaaggcattataggtcttgataaatctcgtatttctttctcatcacaagttt

SEQ ID NO: 18935 - DNA, 306 bp, Glycine max
  Clone ID: LIB3049-031-Q1-E1-H11
tctctcatagcaatcaaatcacactcccatcttctcatctcgtaaaccctaaaccccgttttcagtgacatcgagatcgatcgaacatggatgaggagtacgatgtgatcgtgttgggcacgggtctcaaggagtgcattctcagcggtcttctctccgtcgatggcctcaaggttctgcacatggacaggaatgactattacggaggagaatccacttcgctcaatcttattcagctttggaagagattcaggggagatgacaagcctcctccacatttgggagctagcagggactattacatcg

SEQ ID NO: 18936 - DNA, 378 bp, Glycine max
  Clone ID: LIB3049-031-Q1-E1-H12
gacacttactagtagtaagcatggagtcctcaaagatctatgcttacctcttcctctgcatgatctttctctcttccgccactcccattctcggttgtggctactgtggcaaaccccccaaaaagcacaagcctggtaaaacaccaaagacacccaaaacacccgttgttaagccaccagtcatcatccctcccattaatgttcctcccgttgttcttccaccaatagtgaagcccccaggtattctccctccaattccaattattaacccaccaaccacaccagggaacggagggaacactccatgcccaccaccaaagtctcctgcgcatgctacgttgcccattgacacgctcaaacttggtgcctgtgtggatc

SEQ ID NO: 18937 - DNA, 194 bp, Glycine max
  Clone ID: LIB3049-031-Q1-E1-H2
gatacattctcttgtcacagttttctgtgtcaccggaactcgtttctttcaacacacttcaaacatctcgaacgctctctttccggcaactaggttaaagttcatcaatggcaggtcccggcaaaaacgtaggatctagcaccgccaagaaggctacctcaaggagcatcatcgccggcctccaatatcccgtc

SEQ ID NO: 18938 - DNA, 256 bp, Glycine max
  Clone ID: LIB3049-031-Q1-E1-H3
tgagtgggacagctgcagtaccaccggctggcatgcacgctccaatgcggataatccgtgtcaggccaccacctcgcatagggatctcgacatccatcgtgatcgcgcacatccggggcatcttgggtctgtgaagaatgcggccgttacggcctttgtctgtgtgtctaactcctaccacatcgctactcaaagatcaggacctttgagatctgctgttggaaccgtcgtagacaccgtttccaccgtgctgggt

SEQ ID NO: 18939 - DNA, 260 bp, Glycine max
  Clone ID: LIB3049-031-Q1-E1-H4
ggaagagcaagcaaataaaacccaaacaaacgcttctcattctctctctactcgttttgaagatgtttctcacaaggactgagtatgaccgaggagtcaacaccttttcccccgaaagacgtttgtttcaagttgagtatgcaatcgaagccatcaagctgggatcaactgcgaatgggttgaagaccaaagagggtgttgtcctcgcagttgggaagcgcatcacttcgccgctcctggagcccaataatgttgagaaa

SEQ ID NO: 18940 - DNA, 398 bp, Glycine max
  Clone ID: LIB3049-031-Q1-E1-H6
gacaacacagaacaaaaacaaagaaaaaaaaaaacccttagccaacacaaccatcatggccacctctgctattcagcaatcagcattcactggtcaaactgctctgaagcagctcaatgagttcgtccgcaagaccggtggcgccggcaaaggtcgcactaacatgcgccgcaccgtcaagagtgctcctcagagcatttggtatggccctgaccgtcccaagtacttgggtccattctcggagcagattccatcatacctgaccggagaattccctggtgactacggatgggacactgctggattatcagctgacccgggaaactttcgccaggaaccgggagctggaggtgattcacagcagatgggcaatgcttggtgcccttggctgcaccttc

SEQ ID NO: 18941 - DNA, 369 bp, Glycine max
  Clone ID: LIB3049-031-Q1-E1-H7
gatgcttgaagacggtggattagaacctcaacaagagaaagagactcgtcagagaatatgatccttgcggtgctgtttgccaacgctgagggcaatatcctcatcgaacgttttcatggagttcctgcagaggagcgtctgcactggcgttcattcttagtcaaactaggagctgataatcttaagggtgtcaaaaacgaagagctcctagttgcttgccacaaatcggtttatattgtatacacagtgcttggcgatgtcagcatctatgtcgtgggcaaggatgagtatgaccaactttcccttgtccaaattgatctttgtgataacctcagctgtgaaggatgtatgtgggaagcccccaagtga

SEQ ID NO: 18942 - DNA, 385 bp, Glycine max
  Clone ID: LIB3049-031-Q1-E1-H8
gacacacacacagagttgcaagagaaagagagcgagattccgatggcgactctggattccgacgtgcctatggttcccgccggcgagccctcgagcagcgccggtccttcttccaagaagcccaagcgcttcgagatcaagaagtggaacgccgtcgctctctgggcttgggacatcgttgtcgataactgtgctatctgccggaaccacatcatggatctctgcatcgagtgccaagccaaccaggctagcgccactagcgaggaatgcactgtggcatggggagtctgtaaccatggctttcaacttccattgcattagtcgatggctcaagacccgtcaagtttgtcctctagataacagtgagtgggagtttcagaaatat

SEQ ID NO: 18943 - DNA, 253 bp, Glycine max
  Clone ID: LIB3049-031-Q1-E1-H9
gactctcgcaactgctgccttactctctcactctctcaggagtatataatctgagcgatgtcagatctcgaggctcccttgcgccctaagaggaagaaggtttgggtggactattttgttcagtttcgatggatccttgttatttttgtggtccttcccatctccttcaccatttatttccttacataccttggggatgtaagatccgagtggaagtcctataagacgcgtcagaacgaacatgatgagaatg

SEQ ID NO: 18944 - DNA, 318 bp, Glycine max
  Clone ID: LIB3049-032-Q1-E1-A1
gacggcactcgttttcgttctcgttctggtttatagatctttgcgaaggaggtttacagcgctcaaccaaagatgcagaacgaggaaggacagatcactgagctttacattcctaggaagtgctccgccacaaacagattgattaccgctaaggaccatgcttcggttcagatcaacattgggcatgtggatgagaatggcgtctacaatggccatttctccacttttgccctctgcggattcatccgtgctcagggtgatgctgacagtgctctagaccgcttgtggcagaagaagaaagttgaagttaagcaacag

SEQ ID NO: 18945 - DNA, 236 bp, Glycine max
  unsure (1)..(236): unsure at all n locations
  Clone ID: LIB3049-032-Q1-E1-A10
gaaaaatgctgagacagcatccactactaatgatattgcttctgttgacggcacttctatcaaacaaggtcgccctcccttagattttgacttaaatgtggcagatgaaagatgttttgaggatgttggtttgcgtggttctttagaagctggaccacttgatcgtagcactgggggatttgatcttgatttaaataaagttgacgagactcctganattggcactttctcgctaa

SEQ ID NO: 18946 - DNA, 357 bp, Glycine max
  unsure (1)..(357): unsure at all n locations
  Clone ID: LIB3049-032-Q1-E1-A11
gacttcaattgcaatcaaattagttcattctctttgcgcagttccctacctctcctttcaagatgcagatcttcgtcaagaccctcaccggaaagaccatcacccttgaggtggaaagctctgacaccatcgacaacgtcaaggccaagatccaggacaaggaaggaattcccccggatcagcaacgtctcatcttcgccggaaagcagctcgaggacggccgtaccctcgccgactacaacatccagaaggagtcaacccttcaccttgtccttcgtctccgtggtggcatgcagatcttcgtcaagactctcactggcaaaaccataaccctagaggtcgaaagctcntgacaca

SEQ ID NO: 18947 - DNA, 364 bp, Glycine max
  unsure (1)..(364): unsure at all n locations
  Clone ID: LIB3049-032-Q1-E1-A12
ggtgttggatgaggcgaaactcgagagtgtaaggttttgcatttcatttgacgaagagtgagagagtcttatctgtcgtctctgatctctgatcgcatcttcattccgaaaatggctgtttcggctatcactggagcgaggctaactctagggatgtctctttcctcttccacgcgatcacgaaccgtcgcaatggccgtatctatcgaccccaagaccgataacanactcactcttaccaagtccgaggaagcttccgctgcggccaaagagctgatgcctggaggcgtgaactccccagttcgtgccttcanatccgtgggtggtcanacaattgtgattgattcagtcaaagggtctcgta

SEQ ID NO: 18948 - DNA, 395 bp, Glycine max
  unsure (1)..(395): unsure at all n locations
  Clone ID: LIB3049-032-Q1-E1-A2
gaccgcacagaattagggttttccaattcacagagcaacacaacgaaccaacaatggcgcagcctcagccgcagtcgcagccgcagcacgggcaagcagcgctggagcaggtgcagtgcttcggtcgcaagaagaccgccgtggccgtgacctactgcaagcgcgggcgcggtctcatcaagatcaacggctgccccattgagctcgtggagccggagatcctccgcttcaaggccttcgagcctatcctcctgttgggtaagagccgcttcgccggcgtcgacatgcgcatccgcgtcaagggtggcgggcacacnctccaagatcaacgccatccgccagagcatcgccaaggcgctcgtcgcgttctaccagaagtatgtcgacgaacagag

SEQ ID NO: 18949 - DNA, 339 bp, Glycine max
  Clone ID: LIB3049-032-Q1-E1-A3
ggttctagtgtgtgattgtttgttgttgtaactcgttcttcttcatttgttgttctgtgtttgtgtttgttttttctctcacctgaaaatgtcttgctgcggtggtaactgtggttgcggaagctcctgcaagtgcggcaacggctgcggaggctgcaagatgtacccagacttgagctatactgagtcaaccaccaccgagaccttggtcatgggagtggcacctgttaaggctcaatttgagggtgctgaaatgggtgtgcccgctgagaacgatggctgcaaatgtggaccaaactgctcctgcaaaccctgcacttgcaagtgaggtgttgggaa

SEQ ID NO: 18950 - DNA, 300 bp, Glycine max
  Clone ID: LIB3049-032-Q1-E1-A4
ggggtggaaagtgaaagagtaagacaccacaaagtgtaacttgagtgattatatctgatgagtgcagaaagaagggaggattgctggtgatcgatcatcgatcatcgatcatcgatcatcgatggcgtctgctagccttggaagtggtggggtgggcagttccaggtctgttaatggtggcttcaggggttcttccagttccgtcgattggcttggcagagagatgcttgagatgtctttgagagaccacgaggacgatagagatagtgagcctgacatcattgatggtttgggtgctga

SEQ ID NO: 18951 - DNA, 311 bp, Glycine max
  Clone ID: LIB3049-032-Q1-E1-A5
ggcagcgcttgatttgaggtcaggcaagccccactcaagcagcacagctctcctcgttcacgctacccctttctgctcttcgtctacctttcaagttttaaaagtacacagatggcagacacattcctatttatctcagagtcggtgaatgacggacaccctgacaagctctgcgacgaaatctccgatgctgtcctcgacgcttgcctcgagcaggactcagacagcaaagttgcctgcgaaacatgcaccacaaccaacttgggcatggtcttcggagaagtcacgaccaacgccaacgttgactacga

SEQ ID NO: 18952 - DNA, 276 bp, Glycine max
  Clone ID: LIB3049-032-Q1-E1-A6
gatagcacatcaattaatcttacgcaacttcgaatctcacattacagtcctccccgcgtagtcttcctctatcagtccttcttcaaggctcatattatacaaatagctcgcatgatccaacagatgtgaaatgcacctaagaatcagttcaccaccagagactgcaaagaaattctgcaagaaaatcggtgaagttatcaaccatcattgctatcaccatgaaactgataccctacttgagatccaaacataccacaagagcaaattgcttctgat

SEQ ID NO: 18953 - DNA, 328 bp, Glycine max
  Clone ID: LIB3049-032-Q1-E1-A7
ggcggtgtgttgtggttgttggttggttgggtaacataatcgcagcgaaaatggggaggggttggtggtggaaagtggcggtgttgggggtgctagtggcggtggtttggagagggtggcagggcggtggatttgacaaggaggcaccgttcagttttgttcgagaatggtcggagaagttagggatttgggcgatcccgctctacttgtcgctcgacaccgtctccatcgctctctgtttgccctctgcgatcatcatcgaaatcaccgtccctctcctcttcggtttcttaccttccgtcatctgtgtcatctccgccaaaatcct

SEQ ID NO: 18954 - DNA, 385 bp, Glycine max
  unsure (1)..(385): unsure at all n locations
  Clone ID: LIB3049-032-Q1-E1-A8
ggttctagtgtgtgattgtttgttgttgtaactcgttcttcttcttttgttgttctgtgtttgtgtttgttttttctctcacctgaaaatgtcttgctgcggtggtaactgtggttgcggaagcccctgcaagtgcggcaacggctgcggaggctgcaagatgtacccagacttgagctacactgagtcaaccatcaccgagaccttggtcatgggagtggcacctgttaaggctcaatttgagggtgctgaaatgggtgtgcccgctgagaacgatggctgcaaatgtggaccaaactgctcctgcaacccctgcacttgcaagtgaggttgtgggaaaagcaagcttcaggcagagatagcccttaattangaataatgataa

SEQ ID NO: 18955 - DNA, 317 bp, Glycine max
  Clone ID: LIB3049-032-Q1-E1-A9
ggccttcttaggcactaaaatagagactgtatttatcctgagggaaattgaggggcaaggtgataataacagtaacagggatgagtgatatcatttcatttcagagggattaattattgttttatttttaagtgtggagtgctgtgcaggtcaaggcccttttacttgttcgtccggttgttcccatcttctctctcgtaccaatcaaatcacacttttgtgttgtgttgggaaaccctaaaccccgttttcggtgagatcgagatcgatcgaacatggatgaggagtacgatgtgatcgtgttgggcacgggtctc

SEQ ID NO: 18956 - DNA, 379 bp, Glycine max
  unsure (1)..(379): unsure at all n locations
  Clone ID: LIB3049-032-Q1-E1-B1
ggttctagtgtgtgattgtttgttgttgtaactcgttcttcttcttttgttgttctgtgtttgtgtttgttttttctctcacctgaaaatgtcttgctgcggtggtaactgtggttgcggaagctcctgcaagtgcggcaacggctgcggaggctgcaagatgtacccagacttgagctacactgagtcaaccaccaccgagaccttggtcatgggagtggcacctgttaaggctcaatttgagggtgctgaaatgggtgtgcccgctgagaacgatggctgcaaatgtggaccaaactgctcctgcanaccctgcaacttcaatttgnggtgtttggagagcaagcttcaagcagagatagcccttaattangaataa

SEQ ID NO: 18957 - DNA, 107 bp, Glycine max
  Clone ID: LIB3049-032-Q1-E1-B10
ggattgagtttgcctgtcgcactgctctcacccatctgaaaatgtcattcaccttgcccactccgccttctacagcgcggtcttcagcatctctcattcatacaacg

SEQ ID NO: 18958 - DNA, 373 bp, Glycine max
  unsure (1)..(373): unsure at all n locations
  Clone ID: LIB3049-032-Q1-E1-B11
gacaacaacaatttcttgttcccaaaccctctccctccccaattctccaccaaaacctccgccaccgcccgccgcctaacacaccctctctccgcccggctatggacgcgcgaccgccggaatccgccgcgccggcagcctcgaccgaggacttcgtccacgtcgcggatctgaagatggagagcctctctgagagcatcgttcgaatcgacgagccttccgaagccgacgccgccgcttcctccgctccggcggaatccgatcgccgtccggccacgctcccgccggaactctcaagaaacgtgagagtcctgtcgtgcgagtcctccgccgaaggcggcgtctgcgacgtttacttggtcggcancgctca

SEQ ID NO: 18959 - DNA, 229 bp, Glycine max
  Clone ID: LIB3049-032-Q1-E1-B12
gacaacaacaatttcttgttcccaaaccctctccctccccaattctccaccaaaacctccgccaccgcccgccgcctaacacaccctctctccgcccggctatggacgcgcgaccgccggaatccgccgcgccggcagcctcgaccgaggacttcgtccacgtcgccgatctgaagatggagagcctctctgagagcatcgttcgaatccacgagccttccgaagccga

SEQ ID NO: 18960 - DNA, 240 bp, Glycine max
  Clone ID: LIB3049-032-Q1-E1-B2
aggggctgcggtagttggctcactctctttctctcagaaaaacactccgagtacaaagaccctctctcctcgcctctttgcattcgagttaaagaagcgaagaaaaagaaacatgtcagacgcgttctgcatcgactgcaagaaggaaactgaagtggtgttcgaacacgccgccggcgacaccgtgttctccgaattgcggcttgtccccgaatcccaatccaatcgacgaagaactcg

SEQ ID NO: 18961 - DNA, 356 bp, Glycine max
  unsure (1)..(356): unsure at all n locations
  Clone ID: LIB3049-032-Q1-E1-B3
ggagaggatcgtgagagggacggtagcagagattccgtgagttgcaaaaatgaaaacaattctttctgccgagaccatgaacatcccggacggcgtgagcgtcaaggttaatgccaatgtcatcgaagttgagggcccccgcggaaaattggtgcgagacttcaagcacttgaatctcgattttcagctcatcactgacgaaaacggtaaaaggaagctgaaggtggaggcctggttcggttctcggaaaacatccgccgccattcgcatcgccctgagccacgtggagaatccgatcaccggcgtcaccaagggctaccgctacaaaatgaggttcgtttatgcncattttccca

SEQ ID NO: 18962 - DNA, 293 bp, Glycine max
  Clone ID: LIB3049-032-Q1-E1-B4
gggatccatcgaacttctggacacacaatacataagagatttccttgttctatttactgcgtaaccgttcggctatctcatatatgaacaacaacatgttaggaatgaagagacggatagatgatcatgaagggtccttggatttggcaaaatgtcttatgccgttttcttgtccaatagaaagcaacaagacacaacagaaaagttttggttctgtggaatttgactgcaagacgtacaactgcaaattctcttcttttcatgcactgggatggcacatggcaaaccacaat

SEQ ID NO: 18963 - DNA, 385 bp, Glycine max
  Clone ID: LIB3049-032-Q1-E1-B5
gacagcatatatatcaataatctattttatactacacctacattttgataattttctttgtagttgatagccatggctacccgtggaaagcttgaggttgacattgatctcaagtccaacgcagacaagtactggcaaacccttaggaattctactgaaatattccctaaggccttcccacatgattacaaaagcattgaggttcttgagggtgatggcaagtctcctggttctatccgccacataagttatggtgaaggttcaccacttgtgaaatcatccgttgagaagattgaagctgttgatgaggaaaagaatgtagtgtcgtacactatcactgatggggaactcctccagcactacacaacattcaacggagacattt

SEQ ID NO: 18964 - DNA, 373 bp, Glycine max
  Clone ID: LIB3049-032-Q1-E1-B6
gaggatgggtgggtgcatccagaagcaaagcaaaggcatgatgaggttattagggttttagagatgatgaaatgagaagtcgaatggcatcatcgtcatcggcatttctggtgatctgcatcctgcactcgttaatagcagtgacatgtggggggctgatgatgttctacatgaaggaggtctacaccttcggccacggagtgcaggccgccaccaagctcttgggatccacgccgcacgaccagcttctcatcaagacctccgattccttctccggcttgctccttgtcgcaattgggttcctcctcttcatggtctcctttgttaaagatcgtaactttcaggtcttcttcgccaagggttgcacgctcct

SEQ ID NO: 18965 - DNA, 309 bp, Glycine max
  Clone ID: LIB3049-032-Q1-E1-B7
gaggatgggtgggtgcatccagaagcaaagcaaaggcatgatgaggttattagggttttagagatgatgaaatgagaagtcgaatggcatcatcgtcagcggcatttctggtgatctgcatcctgcactcgttaatagcagtgacatgtggggggctgatgatgttccacatgaaggaggtctacaccttcggccactgagtgcacgccgccaccaagctcttgggatctacgccgcacgaccagcttctcatcaagacctccgattccttctccggcttgctccttgtcacaattgggttcctcctct

SEQ ID NO: 18966 - DNA, 356 bp, Glycine max
  Clone ID: LIB3049-032-Q1-E1-B8
gagagggacacgaactcaaaccgtttaagctcctccgagttttgacctacaacactctcgaatcccctcttgtgtgttgtagccgccccgtgaccatcaatggcggaaactgctgtcgacaaatcccaatctctcgctgaggaatattatgtgaaggataagcaaacagctgtagttgaaaaacctgttgaggtcaaagaagttgaaaacccagaggaggctgcttctgaggaacccgttgctgagaaaactgtggaagaaacaactcctgttgcccctgcagttgctcaggaaagcagttaaattaacccttcttcctgctgaagaaagcactgaagagcaaagtactggaaatg

SEQ ID NO: 18967 - DNA, 321 bp, Glycine max
  Clone ID: LIB3049-032-Q1-E1-B9
ggattgagtttggctgtcataatctctctctcatccgaaaatgtcattcaccttgcaaactccgccttctacaactctctcttctgcatctcccattcacagaacaataacaagatacaccacattctccttctcgcttcgtcctccaacaactcttcacttcaatccccacaggtccctccctctaattcgcgcttccaattcttctatcaatgccgcttcgaccactgaactggacgctgtgtccgccttcagccagatcgttcccgaaaacgttcttttccgatgatttccaaaagtttccttccaactgctgctact

SEQ ID NO: 18968 - DNA, 211 bp, Glycine max
  Clone ID: LIB3049-032-Q1-E1-C10
ggcagcgcttgatttgaggccaggcaagccccactcaaacaccacacctctcctcgttcacgctacgcctttctgctcttcttctacctttcaaggtgttaaaagtataaagatggcagagacgattcctatttacctcagagtcggtgaactagggacacccttgacgagctctgagacgaaatctccgatgctgtcgtcgacgcttgcc

SEQ ID NO: 18969 - DNA, 339 bp, Glycine max
  unsure (1)..(339): unsure at all n locations
  Clone ID: LIB3049-032-Q1-E1-C11
gatcgcacaacattattctttcgcaccttgcagaatcaattttctctctcaatcgtctttcatggctcgtaccaagcaaaccgctcgcaaatccaccggtgggaaggctcctangaagcaactcgccaccaaggctgcaagaaaatctgcacctaccaccggtggagtcaagaagcctcatcgctatcgtcctggaactgttgctcttcgtgagatccgaaaataccaaaagagcacagagcttctgatccgcaagctcccctttcagcgtcntgttcgtgaaatcgcgcaagacttcaagactgatttgaggttccagagtcacgcggttcttgcgct

SEQ ID NO: 18970 - DNA, 385 bp, Glycine max
  Clone ID: LIB3049-032-Q1-E1-C12
ggttctagtgtatgtgattgttgtgactcgttcttcttcgtcgttatcttcttcttttgttgtttgtgtgtttgttttttctctcacctgaaaatgtcttgctgcggtggtaactgtggttgcggaagcgcctgcaagtgcggcaacggctgcggaggctgcaagatgtacccagacttgagctacaccgagtcaaccaccaccgagaccttggtcatgggagtggcaccagttaaggctcaattcgagagtgctgaaatgggtgttcccgctgagaacgatggctgcaaatgtggagctaactgcacctgcaacccctgcacttgcaagtgaggtgttggagagctaaagcttcaagcagaaatggcccttagaaataatgata

SEQ ID NO: 18971 - DNA, 264 bp, Glycine max
  Clone ID: LIB3049-032-Q1-E1-C2
cggggtggttgggcgcggtgcggagccggacacaacgtcgtgccgttcaatcccctccgtgttcatcactccaatacacattcttcccttcttgcgtgttgtcacggcaccattaacatcctaagcagtaatcgtcgtcagaatatcactgattccctcagatggctattccctaatcgcaatgccattgatgatagttgcaatgatttctaagctagaattgatccactacgcgtggagggctcgatcggagacgatgctggg

SEQ ID NO: 18972 - DNA, 387 bp, Glycine max
  Clone ID: LIB3049-032-Q1-E1-C3
gatttattcggcgagtgtcatttccttcccttccctcacgatctgaggaagacaccaatcttctctccacgcccttcttgggtaaccgtctgaagtgcagcaatggcagatggattgcattcgcagcatccatcggtagttcagaagttatctggacagtcttatcttgtgtccaggcttgctcctaatcactccagaaactgttctaccactggtagttacttcaatggaggtttgcagtcttcaggtttggttccagtcacggcacacgcgccggctgagaaaggggtgtctggatttttgttggatttcctgatgggcggagtgtccgcggcggtgtccaagacagctgcggctccaatcgaacgagttaagttgctcatccaa

SEQ ID NO: 18973 - DNA, 299 bp, Glycine max
  Clone ID: LIB3049-032-Q1-E1-C4
ggcacagccggccagtgttcatactcaaccatcactcaagatctaaagtctgcaccttgcttccgagtcagcgattcatggcatgtacctacgaaatcgctcagcaagtccatcggctgaaatcgcacgaggaagccgttggtcacaaatgatgcgcacagttctaccctgggtccaggctgactcacaatcactcaacactccgtgccaggaatggtagttactatggagataggtctgcagtcttcaagtttggatcgagtcatggcacacgcgccggctgagaggcgcgtgtccgg

SEQ ID NO: 18974 - DNA, 308 bp, Glycine max
  Clone ID: LIB3049-032-Q1-E1-C5
ggaagtcgagaagaggaagaagacgaagatggagaagtatcaaatgtggtgcaggagaagagtcttagtaacgtttgcgtatgcgctgctgttctaatcagtctgagcagacgacgtcgttgtgctctcttaagataacttctagaatcgaactttgtcaggacataggagctctcgttgagttctatgccccttggtgtggtcactgctcaaagcttgctccagaatatgtgaagcttggtagcagcgtcactatggccaaagctgtgttaattggacaagttgactgtgatgagcataatagtttg

SEQ ID NO: 18975 - DNA, 335 bp, Glycine max
  Clone ID: LIB3049-032-Q1-E1-C6
gagattagggtagtagcagaaagaaagagtaaccaggtggtagggtttctaattcttttcatcctcttcgcagagcctcagtagcttcgcattagcaatggcgagaatcaaggtgtacgagctgaggaacaagacaaaagcagagcttctgaaccaactgaaggatctcaaagcagaactcgctctcctccgcgtcgccaaggtcaccggcggagccccgaacaagctttccaaaatcaaagtggttaggctttcgatagcgcaggtgctgacggtgatttcccagaagcaaaaagcagcgctgagagaggcttacaagaagaagaaataccttc

SEQ ID NO: 18976 - DNA, 368 bp, Glycine max
  Clone ID: LIB3049-032-Q1-E1-C7
ggatttgagatagtccagactctcattgttgatatagagcctgatgttaatgtcaagagagcaatgaacgagattaacgcagctgctagattgaggttggctgcaaatgagaaggctgaagcagaaaaaatactgcagatcaaaaaagctgagggagaagcagaatccaaatatctgtcaggactcggtatcgctcgccaacgtcaagccattgtggatggactgagggacagtgtgcttgctttctctgagaacgtgcctgggacaacagctaaagatgtcatggacatggtgctggtgactcaatactttgacaccatgaaagagattggagcatcttcaaagtcctcatctgttttcataccaca

SEQ ID NO: 18977 - DNA, 386 bp, Glycine max
  Clone ID: LIB3049-032-Q1-E1-C8
ggccgcaagcagagatgacaacccgatttaagaagaaccgcaagaagcgcggccacgtcagcgccggccacggccgtattggaaagcaccgcaagcaccccggcggccggggaaatgccggcggcatgcaccaccacaggatcctcttcgacaagtaccacccggggttcttcgggaaggtagggatgaggtactttcataagctccgcaacaaattctactcccccatcgtcaacatcgacaagctatggtctctgataccccaagacgcgaaggacaaagccctaaaatcgaaggacactgcccctctaatcgacgtcactcagcaccggtaactcacggttctcggaaaaggtgtgctgccccaaaaccagcccattgttgtg

SEQ ID NO: 18978 - DNA, 373 bp, Glycine max
  Clone ID: LIB3049-032-Q1-E1-C9
ggcagcgcttgatttgaggccaggcaagccccactcaaccaccacacctctcctcgttcacgctacccctttctgctcttcttctacctttcaagttttaaaagtataaagatggcagagacattcctatttacctcagagtcggtgaacgagggacaccctgacgagctctgcgaccaaatctccgatgctgtcctcgacgcttgcctcgagcaggacccagacagcaaagttgcctgcgaaacatgcaccaaaaccaacttggtcatggtcttcggagaaatcacgaccaaggccaacgttgactacgagaagatagtgcgtgacacctgcaggaacatcggcttcgtctcaaatgatgtgggactggatg

SEQ ID NO: 18979 - DNA, 261 bp, Glycine max
  Clone ID: LIB3049-032-Q1-E1-D10
gataaaaaagtgatttagggtttttgcacagtctcttacatataaagggaagtccttatcttatagtatcggtcagctcttccatttcgcaatccgttccaaaccacataagcttcaacaaagatggatgtagaaaagttgaagaagatggccagttctgttcgaactggtgggaagggtactatgagaaggaagaagaaagctgtccacaagactactactacagatgacaaaaggcttcaaagcaccctgaagaggata

SEQ ID NO: 18980 - DNA, 381 bp, Glycine max
  Clone ID: LIB3049-032-Q1-E1-D11
aaaaagaagagggaggagggaggaaggaggaaggagagagactttatatacgaggtaacagggcactgtggaattgcgcgtgtgggtgtgttgtttgaggttgttgtcgctggttgtgttgtgttgtgttgtgtgggttttatgagagtgagtttcacatggggagggtttttgttcttgaattggatggcagatcttacggatgcaaattctgcaacacccctcttgccctcgctgatcacattctctctcggaatttcaactgcagtcaagggagagcctaccttttcagcaaagtggtgaacgtaatacttgggcctcaggtggagagaatgatgatatctggactgcacactgttgaagacatattttgttgcaact

SEQ ID NO: 18981 - DNA, 360 bp, Glycine max
  Clone ID: LIB3049-032-Q1-E1-D12
ggcagcaacagcagcattcactgaaagcactcagtagggtttgcggtttcagagtttgtgacgcacgcatccatggccaccaccaccaacgccgccgcagccccgccgcgccagctctcccagaaggaagccgacatccagatgatgttagccgccgacgtccacctcggcaccaaaaactgcgacttccaaatggaacgttacatcttcaagcgccgcaacgacgggatttacattactaaccttgggaagacatgggagaagcttcagttagcagctagggttattgttgcaattgagaaacctcaggatatcattgttcaatccgcaaggccttatggtcaaagagcggttctgaag

SEQ ID NO: 18982 - DNA, 388 bp, Glycine max
  Clone ID: LIB3049-032-Q1-E1-D3
ggagagagacaaagataatgcaaatttgttcaggtacttggcgtgatgtggtcttgacgattttgctaaagtggtggttactgcagttgccacaaacagcaaaacaagagcatcatatttgaacatgcaaattatcagtttctccatagtttccttggaaggagggtctgcgagtgcttgtacattttgcctccatatccaggtatggattactactgtagatgtgtgcccctggagaagttgtaatgaattccataagtaggaccagctcactggtaccttcacttccttttcattttgattgctgcagttccatatgatgacgacttaatttgatgcctgtgttaataatttcacccaacccccataaaggacatagaaatcgtgt

SEQ ID NO: 18983 - DNA, 280 bp, Glycine max
  Clone ID: LIB3049-032-Q1-E1-D5
ggagatcaactgtcgaaacacttccgatacagcaacttgcagacactgctgcagatggatctgcagcatcaacatggaggcgtgttgaaacctcatcgatatcgccctgctactgttgctcttcatcatattacgaaacgtgagttgatcatagatctcctattcaggaagcttcctttccacaggttggttcgtgaaagtgcccaacatttccagtctgagtagcatttccatagcaatgctgtgcttgcattgcaatgacgatgcctacgcatacctt

SEQ ID NO: 18984 - DNA, 244 bp, Glycine max
  Clone ID: LIB3049-032-Q1-E1-D6
ggtgagtgagggattgagtttttcctctgttttttttttttttttttctgtctatgatccattttactgaactctgattccttttcctttttacatcaactcttggcttcttagtgtgtcacaatgacttcagtcctttccactaagggtgtgtttgacttaagagcaagcctcaattggaatatgggattttttttctctttcattctggccattcatctcgctcttgggacattttgttctc

SEQ ID NO: 18985 - DNA, 337 bp, Glycine max
  Clone ID: LIB3049-032-Q1-E1-D7
gggtggtgtggtttagtgtcaaaatggcggagagtggaagcactttaccactgaggaagtacttgagagtgcgcgtggacgctcttccccgcaacactcccttgaccctcgcttccaacttgttgattcgccgcttctccgaagaggttaggggttgttttctcgacaagtccgaggtcacagatggcgtcacttcctgcgtcaaaaacttccagaaagtcgatgcatctaaggttaaccctaatgctcacttccagaatgaccttggattggatagtttagattcagtagagatcgtgatggctcttgaagaagagtttgggttcgagattcctga

SEQ ID NO: 18986 - DNA, 298 bp, Glycine max
  Clone ID: LIB3049-032-Q1-E1-D8
gaccgcgaaacgcacatttcactattcattctcgtttccctttcggtaatttccaattactagttactaatttctccatgctttcttcatcttacgcttaatccttatggtttcgtttaattgttgttctaattgccgcttgttgcagactgtgattgtttgttaactgaacttttcgagcaaaatgtctggacgtggaaaggggggcaagggtttgggaaagggaggagcgaaacgacaccgtaaggtgttgcgcgataacattcagggaatcaccaagcctgcgattcggcgtttg

SEQ ID NO: 18987 - DNA, 381 bp, Glycine max
  Clone ID: LIB3049-032-Q1-E1-D9
ggggcgtcaaaatctgaatcttgttcctgcctgggaaaacaacgattctatcatatgaatcagcgctgtttggggttgtctcctactcctacaccctgaattgaagcccgcctttgttttcctccaattcacttcttcgctagctcctgcttccacattccctttcccggattcgaactataatggcttgtgggagtaagagcgggaaaagtgagatcagtgaaggaggtgcaaatgattcagtggctgtgggagatgtgatatttgtcaagcttcgcggtagctcatggtggcctgtacaggttgttgatgaaaatagtgttaataagagtgttaaaccgagcaaacggaccaaacgattgccgggagacatccttgtta

SEQ ID NO: 18988 - DNA, 370 bp, Glycine max
  unsure (1)..(370): unsure at all n locations
  Clone ID: LIB3049-032-Q1-E1-E1
ggcccaccattgttcttccacagccttaacctctcgggttataaaaccttcgtgggggggggggcacacacatcttcgggcagcgtcagcttagaattattattagtgtgaaattattaattaattcttggctagacaacaacatggcctccgccgcagccgcagacggactcttccggccgatctacgagggctgcatctccgcctacgacaacgacgtggagcgccgcccctaccacaagaactgcggctgcgctctgcacagcaagtcgaggaggaacagcagcagagcgtgcaggcacaagttgccaaaatgcancaccgtgtcctaccctatgaggagggcttggagtgaagggaatttgtcaat

SEQ ID NO: 18989 - DNA, 269 bp, Glycine max
  Clone ID: LIB3049-032-Q1-E1-E10
ggcagttcaattccaatatattccattctctctgtgtagttccctacctctcccttcaagatgcagatcttcgtcaagaccctcaccggcaagaccatcacccttgaggtggaaagctctgacaccatcgacaacgtcaaggccaagatccatgacaaggaaggaatccccccggaccagcaacgtctcattttcgccggaaagcaacttgaggacggccgtagccttgctgacgacaacattcagaatgagagtactctttacctcgt

SEQ ID NO: 18990 - DNA, 382 bp, Glycine max
  unsure (1)..(382): unsure at all n locations
  Clone ID: LIB3049-032-Q1-E1-E11
gacacaagattgagacacgaaacagaaaatgccaggactcacagcaccttccgattactcccaagaacccccccgccactcttctcttctcatcaacgccaaggaacctttcaatgcggagccaccgcgtgctgcgttggttgcttcctacgtcaccccttccgatttcctctataagaagaacacggtccaatcccatcgttgagaacatcaacagatattccgtgaacgtgtccggcttggtggagcgtcncaaacagctcttcatgatagatatatggatgcttccaaagtataatgtcactgccacgttgcagtgtgcaggtaatcgaaggactgctatgagcaagaccaaaacagtgaagggagttggctgggatgt

SEQ ID NO: 18991 - DNA, 365 bp, Glycine max
  Clone ID: LIB3049-032-Q1-E1-E12
gaccacaagatggcgaggcaattgaaagagatgggagtagtgaagagtggtgaagaagagcttggaattggaactcttgtttttgtgttatgtgtgaccctctctcttattgcaactatcatcttcttctgtgcagatgaagtgcccaagaactccaagaaagcctcccaagacaacaactacggtggttctgcctgcgccaccgggtgtggggcagcatgtggtggaggctgcggtggttgagggttcaggcacgtacggtacacctctgaattgtgacgtgaaggaactaactaacgagacgagagtatctattaatctatttggcacatgtttctgtttttttcgttctagtcaaaatggta

SEQ ID NO: 18992 - DNA, 285 bp, Glycine max
  Clone ID: LIB3049-032-Q1-E1-E2
ggagaaatgaaagtgaagagaggaagcagagtgtgtgactgttccccaatttcctgtgcttagagtgaagaagcatttagaaaaagcaagacacgatgccttcggctcaagatccattctacgttgtcaagcaagaaattcaagaatctattgataagctaaaatccacttttcaccaatgggaaaacactgctgatgttggcgagcgatccagtctatcaaaggaagttcttgctagttgtgaaagcattgcatggcaggtggatgaattggacaaagcaattt

SEQ ID NO: 18993 - DNA, 303 bp, Glycine max
  Clone ID: LIB3049-032-Q1-E1-E4
ggacaccgacacagatctgtcttccgaagcaggaactaaatatggctgacttgttggaatggtcaaagcaagataagaaacgaatgcttcatgtcgtctaccgtgttggtgaccttgatcgcaccatcaaattttacacagaatgtttaggaatgaagcttttgaggcaaagagatatcccagaggagaaatatgctaatgcttttcttggatttggccctgaagaatcccattttgttgttgaattaacatataattatggggttacctcgtatgacattggcgatggctttggacattttg

SEQ ID NO: 18994 - DNA, 286 bp, Glycine max
  Clone ID: LIB3049-032-Q1-E1-E5
tcagtgggatcgagaatatatttgagaatggggaatcagtacctacttctggttaccctggtgtcagtctcctagggtgatcggtcggaaccaccgccgttcttatcgatccctcgcactgacgctttcaattctcaattcgccaatatcgcttcatcttcgcagacctatttgcacacacgcacttgggacaattgcaattttgacacatgtcctcttcggcgagacttaggacatatccggcgttatccacagtccagtcgaccaagcctttgacggatatggc

SEQ ID NO: 18995 - DNA, 307 bp, Glycine max
  Clone ID: LIB3049-032-Q1-E1-E6
gtcttactttgagagacagtggcagcggtggtactctgaaattgatcctctcagtctcaggaacacggtgcgttagtaaaaagtgaaaaagaaatggcagaactgagtttgggaattctaattgatattgttgatgaggaatggatgagagacactcttcctgatgatgatcttccactgcccccaacactggttgttaggacagatgatactgaggactcaaatcaggagattcaacaagttaatgtggatgcttggcacgatcttgcctttggtcaagaatagaagtttcatcattaactaatgt

SEQ ID NO: 18996 - DNA, 350 bp, Glycine max
  Clone ID: LIB3049-032-Q1-E1-E7
ggtcaaccgacttccctctcccgtgtcgtgttgtgtcttcttctctaaaatcaataaccctaacttctgaacctttcatcgcatcgccaccgattcccaatctccactaatcaaagaaaagaaaatgagtagatgctcgaccagaactacctacgttgggaatctacccggtgatatccgtgaaagagaagttgaagatttgtttctgaagccaaatggctacacagccaaactctcctccgcctcctcctctttctactggtgtagcatcgcattcgccgtcaccaccattgaagccgactagaaaaggtctcacgcctaagatcattggcgactagacaagttggggc

SEQ ID NO: 18997 - DNA, 334 bp, Glycine max
  Clone ID: LIB3049-032-Q1-E1-E8
aggcgtcagtacaggagagaaagggacacagaacggggagatcggaggacaaaatattctcacgcggaacacaatgtctatatacactcaaatctacgcagcaacggctgatcggaaaaatcgggccttacatcgtacttcatgactccgccatctacactcaatccctctgacgacgaccccatcaccaacaatattgcagctcagcagcctcaaatgcccaaaacagttccttcaaccgaaaccgtctccgaacgagacgattccgtctacggcttcttcagaaatgccgttatgaaagtataatccgcatagtcaagtttggatgattcat

SEQ ID NO: 18998 - DNA, 390 bp, Glycine max
  unsure (1)..(390): unsure at all n locations
  Clone ID: LIB3049-032-Q1-E1-F1
gctgatcttgtggaagagttttctcttggggatgggaagattgtgaagattactggtattaaggagatggggaagaccaccactgtgcttgtacgtgggtctaatcagcttgtgctcgatgaggctgagcggagtttgcacgatgctttgtgtgttgttaggtgtttggttgccaagaggtttctcattgccggcggtggtgcccctgagattgagctctccaggcagctgggtgcctgggctaaggtgttgcatgggatggagggttactgtgtgagggcattcgctgangcgcttgaagttattccctatactctggctgaaaatgcctggtttgaacccgattgccattgttactgagctaaggaatcgtcatgcacagggtgagat

SEQ ID NO: 18999 - DNA, 362 bp, Glycine max
  unsure (1)..(362): unsure at all n locations
  Clone ID: LIB3049-032-Q1-E1-F10
ggttcaacgagatggagcaaataaagcacagaatagttgaagtgaatggcataaaaatgcatgttgcagagaaaggagagggtccagtggtgttgttcctccacggcttccctgagctctggtactcatggcgccaccagattctctctctcagctccctcggctaccgcgccgtcgctcccgatctccgtggctacggtgacaccgaggcaccaccttcaatcagcagctacaactgcttccacatagtgggtgatctcgttgcgcttattgactctctgggtgtncaacaagtgttccttgtggctcatgactggggagccatcataggttggtatctctgcatgtttcgccctgacaaa

SEQ ID NO: 19000 - DNA, 252 bp, Glycine max
  Clone ID: LIB3049-032-Q1-E1-F11
ggttcaacgacgatggggcatataaagcagagcatagttggagtgaatggcataagaatgcatgttgcagagaaacgacagggtccagtggtgttgttcctccacggcttccctgaggctctggtacgcatggcgcgaccagtatctctctcctcagctccctcggatatcgcgcagtcgctccagatctccatggctactgtgacaccgaagcaccaacttcaatcatcagctacaactgcttccacataa

SEQ ID NO: 19001 - DNA, 384 bp, Glycine max
  Clone ID: LIB3049-032-Q1-E1-F12
ggtgtgtaagtgtgaagagaagagaatggtagtaggattgaatgtgcctcagccatttctgtcaccagtttgcaagacggcaccttacccacttgatctcatcgccaccgccgcgtccctccacttcggccaccttctccgccgccgcgcgacccaccatctccgccttggggttcttcttcactcctgtttcaagaaactcgctcctttaactcacatttttagattgaacgataagtggtgtcaaagatgctttcaactcaatgggttgaactatcttcaactgtcaaccggtgatttgacttcctcatggtcaactagtttctctttctttaatgggggaagagatggaggccgccgctatggaaaggctgggatgtccaa

SEQ ID NO: 19002 - DNA, 164 bp, Glycine max
  Clone ID: LIB3049-032-Q1-E1-F2
ctcattgtctctcattctgaggctcacagacataggcactcacacgactatgcttgaaggttggtcggaaccacatgtgcacgaagggtcttagcggaattatcatgacaccatctatggtgttcggtgtaagcttccgcagagctttcacagtggcggcggtg

SEQ ID NO: 19003 - DNA, 375 bp, Glycine max
  Clone ID: LIB3049-032-Q1-E1-F3
ggagtgagcaagagtgaagagcgaagagaatggctcccaagggtttaatctttttggctgtgttatgcttctcagcactgtcactgagtcgttgtcttgcggaggataatggacttgttatgaacttctacaaggaatcatgccctcaggctgaagacatcatcaaagaacaagtcaagcttctctacaagcgccacaagaacactgctttctcctggctcagaaacatcttccatgactgtgctgttcagagttgtgatgcttcactgttgctggactccacaagaatgagcctgtctgaaaaggaagccgattggaagctttgggttgagaaatttcaggtccattgagaccatcaaagaagctttggatagg

SEQ ID NO: 19004 - DNA, 390 bp, Glycine max
  Clone ID: LIB3049-032-Q1-E1-F4
caccatctagggtttttctttttctcatggctagtttgtcaactaggattttcttcatcatgtcccttgtgtgcctggctctcggtccaatggcacaatgggaaatgacatgtggccaggttgtgagcaacctgaccccatgcatctcctatgtggtgtatggtggaaccaatgttcctgaacagtgctgcaatgggataagaaatctctatggcatggctcagatcaaaccagaccgccaagctgtttgcaactgcatcaagaacggtgttaggaacagtggcttcaactactctgacttcaacctcaaccttgggcggcaaaccttcccacgaaaatgtggggtcaacattccctaccagatcagccccaacacacactgcactaggg

SEQ ID NO: 19005 - DNA, 315 bp, Glycine max
  Clone ID: LIB3049-032-Q1-E1-F5
gggtgtctctgatgcggttgggagtggggacagggagggtttgtcattaggtaaaggtaaagcagcacaagtgtcattcatttctctgcaatggatatggatctctagcattcgcattcatcccctccttttctccatgcctccgtcttcacccgttattttcttgtcctgaatgcattcccagaatgttgtagagatggaaggcaagacataaattcgtatgatatcagctgctgcctttgttgaaggggggattcaagaatcctgtgatgatgcttgcagcatatgccttgatgagttttgtgcaagtgatcc

SEQ ID NO: 19006 - DNA, 310 bp, Glycine max
  Clone ID: LIB3049-032-Q1-E1-F6
gagaacacacacgagaactagagcagataaacagtgtgtctgctctagaagacattttagtgccattaggagagaagaaccttgccttttcacattagaactagaacaaaaccagaaatgctgcttagagaaaccattcgcaagaccagggttttatttcacaagactctccgaagcttcaagtctgtcatctttggagggtatcaaaaactacccatatctctctccttcaatccgtatctcggtcgcagtggcattgcaagaacttacagttgcgagcaattctactacgagtttgatgacatgctgc

SEQ ID NO: 19007 - DNA, 320 bp, Glycine max
  unsure (1)..(320): unsure at all n locations
  Clone ID: LIB3049-032-Q1-E1-F7
gacgcgtgccacataacttggatcactatttcttcttcttagttctcactctcactgtctccgtcgtctttttctccaaagtttcggtgctgacggatagaacactacctattcagccgccatgcacactctcctccgatccactctcaggaccaagactgcttcatctttagcatatgctgtggtttccagaagtgctcacgaaaatctccttcaggctcccttattgtctagatcaaatagcactgaggcttcattggcaaaggataattcctctaatgatgtaaaaaatggtcaagggtacaaaggtcatantatgc

SEQ ID NO: 19008 - DNA, 384 bp, Glycine max
  Clone ID: LIB3049-032-Q1-E1-F8
gagagaataaaatcaaatcaggagagcatgcatatgaacatgatgatgaagaaggtgtgtgggtttgcaatagtgatggtggcagtgcagcttctggtggaggtgagtcccaaggcagaggctgtgacttgtacccctgtggagctgagtccttgtttgggggcaataacttcctctcaaccaccatcaacaatttgttgccagaaggtgagggaacaaaggcaatgcctctgtggttacctcaaaaacccaagtctaaggccatatgccaattctcctggctccagaagggttgctagctcttgttgggttccctttccaaccttgtaaataaccttcatatcatatcatatatagtatgtaataaaccctgttggctggaaa

SEQ ID NO: 19009 - DNA, 383 bp, Glycine max
  unsure (1)..(383): unsure at all n locations
  Clone ID: LIB3049-032-Q1-E1-F9
ggttctagtgtgtgattgtttgttgttgtaactcgttcttcttcttttgttgttctgtgtttgtgtttgttttttctctcacctgaaaatgtcttgctgcggtggtaactgtggttgcggaagctcctgcaagtgcggcaacggctgcggaggctgcaagatgtacccagacttgagctacactgagtcaaccaccaccgagaccttggtcatgggagtggcacctgttaaggctcaatttgagggtgctgaaatgggtgtgcccgctgagaacgatggctgcaaatgtggaccaaactgctcctgcaacccctgcacttgcaagtgaggtgttgggagagcaagcttcaagcagagatagcccttaattangaataatgata

SEQ ID NO: 19010 - DNA, 383 bp, Glycine max
  Clone ID: LIB3049-032-Q1-E1-G10
ggtgcatcagtctctttgcaaaaggatatgggttcaatgaggatgagatcagcccctcaaaacattcgtaagaaatggtggcgccaagtacgcattgttctagctattgatgcagctgtgtgtatattactatttatcatctggttagtaatatgtcatggtatatcctgcattcgatagaattcaaacttcttgtgtgactctgaaattgaatcactatcatatttggaacttgagattttccatgcatgatctgatcagcaacagaaattggtttctttgatggggcatgtaaatggaagttacatactggtcatgttgattagattcttagtgctatttgcaggcacgtgcttcttgtcacccatatataggcattttac

SEQ ID NO: 19011 - DNA, 369 bp, Glycine max
  unsure (1)..(369): unsure at all n locations
  Clone ID: LIB3049-032-Q1-E1-G11
ggagagcaaagacgaagaagaaacacccagtacccttcttacatcttaatttatttttctgaagacttttttttttttttaatttcttcatttccaccattttctgttacgccaagctgcgtcggcgacgcgaattgtgattactgaacggtgaattttgaggatctgctacgtttttcaacattgaataaggtgtatgtatcagacaagtatttgtcagaatcacattgttaattctcttctaaagatttcattcgttcatcttcggtatttanaggcgctccataatttctagttttgcagatacatttttctctggaaaaatctctgaatttcggaactctggactatctgctagattgtgcctga

SEQ ID NO: 19012 - DNA, 366 bp, Glycine max
  Clone ID: LIB3049-032-Q1-E1-G12
ggcgtagaagagagtgaaagtaaaaggaaagctaaaaagagcagagtagcctccactgcaccaccatcatattttggctttataaaaaagccatagaactcattagaacttccccctttcccctttcttcttcttcttcttctctctaatttcatttccttgattatagctttcaattaatgggcttctacgctgaagatcctctctcaggcttgacaataggccaggccatatatgaggtagctctcatgattgcagttctgagatgggtcttgtgcttgatcttcagagtgatcaacgacagaagaacaacacaatccgacgagaccccaacaccagaaccatgttctcagatgacaagggaca

SEQ ID NO: 19013 - DNA, 392 bp, Glycine max
  Clone ID: LIB3049-032-Q1-E1-G2
ggatgaacaatcaaccaagaaaacagtgagcacagttcagttgcacaccttctctgtgcttcttcttcgatgttcaattacaataacaccaactcgcttcatgaaacaccccactccaatttcgccctgtcacaatcgcatcactcatgcattggccactgtcacataaccgcgatcgctggatacgacaccctttcgtcctagggtttcccctccaccactatggccatcagaggcgtcaatttcaaatggttcgatggctttttcttgtccatgctcgccaccagcatagctattgtggcaattaatttggaaccggtgacaatcctgtactcaccctttgcacatatggactgtggttgactacgctgctgttttcactttccggcttt

SEQ ID NO: 19014 - DNA, 256 bp, Glycine max
  Clone ID: LIB3049-030-Q1-E1-H10
gaaaaaaaaaaaatactaatagaatagaaatagaactgtcttttcatatagatatcccttcaacacaacataggtcatcgaaaggatctcgaagacccaccaacgcacgaaagccgggatctttcagaaaatggattcctattcgaagggtgcataaccgcatggataagctcacactaacccgtcaatttgggatccaattcggttccttaggaggtatcgggaaggaattttggaatgtaataatatcgattca

SEQ ID NO: 19015 - DNA, 406 bp, Glycine max
  Clone ID: LIB3049-029-Q1-E1-A4
gagctcagtgtgtggttgaactattattcagattctgctgttttgagcatgcatgccttgttgcagaataaataaacaaacttgtgaaatccaggaataaaaaagccacctttgaggttcagatttgatatactcttacaaaagagcatagatttgatttttctattggtgtttatcttggttcagtttttatggaattgatggtgtgtggaaagcttaaggggtgccttgttcttgtgttctttgctgcactgttggtgggtttagtgaatggaattggtgttaattggggcacacaattaacacaccctttgccagcatccactataatgagaaatgctaaaggacaatggtattcagaaagttaagctttttgatgctgaccctgatattcttaatgctctta

SEQ ID NO: 19016 - DNA, 277 bp, Glycine max
  Clone ID: LIB3049-029-Q1-E1-A5
gacccaaacacggttctaacatatctcattccaatttcgcccctcgccggaaaaagaaaacctcaccgcaacgttcgattcagtttccgatggcgccagcgctgaacctcgccgccggaggaattccgctgagtttctcttcctccgtcgaccgctccgccagctttccacggcggtcctcggtccgcgccgtcgcggctgaggcggtggatacgcagcggccggcggcgagcctttacgaagtgctgcgagtccagcgagacgcatcgccgaacga

SEQ ID NO: 19017 - DNA, 392 bp, Glycine max
  unsure (1)..(392): unsure at all n locations
  Clone ID: LIB3049-029-Q1-E1-A6
ggatcttacatcaataaaagtcttctaactcttggaactgttatttcaaagttgactgaaggcagagctagtcacataccttatagggactccaaattgactagattacttcagtcttcgctcagtggtcatggacgtatatctctcatttgcacagtaacaccttcatctagtaatgctgaagagacacataatacattgaagtttgcccaccggacaaagcacattgaaatacaagcagcccagaacacaataattgatgaaaagtcacttatcaagaaataccaacatgagattcagtgcttanaggaagaattggaacaaatgaagcggggtattgtctcagttcagcaaaaggnactggtgaagttgactttgtgcctctaaaacaa

SEQ ID NO: 19018 - DNA, 398 bp, Glycine max
  Clone ID: LIB3049-029-Q1-E1-A7
ggccgagggggagctgaagtgcaacaagtgagcaacggagaaggccaaagcccgttactcttcttcttcagttgacttaatccgtctctagggcatacgtcagcgcgtgtgcttaatcgagagttgacgaagaagatggagaataacccgaaggagcaagcggagcagcaaagggtcaatttcaacggagaccctcacattcacgacaatggcaacgtattccaccacttccaacccacacccgccgtcgattctggttacgctcttaaccattccatggctcgccctctccgcaaacgcccctggcatcactccaacaacggaaactctccaaatcaattggacgtttcgtgtaaagtttatgttgcacctgttccaagaacggccacggaggatga

SEQ ID NO: 19019 - DNA, 405 bp, Glycine max
  Clone ID: LIB3049-029-Q1-E1-A8
gatacagaatacagattgacagagtccaacgttgcattgcagaggtttggtgtttgtcatgtcataaggcatgggcgatagggtggaaacgcttgccagattagcccagtggaaaatcgacaacttcggactttgttcctacaaaaaatctgaccccttcaaggtcggaatctggaactggtacttttcaatagtgaggaataggtacctctacatacatctttttccagaaccttcgcaggttttgaaggataacccaccctttgctcgattcattcttcgagtctccaatgccggatcatcccgcagctttcatatttcccctgttcaagaaaagctgcttaggacacatgacgactttgtctggcctgtggatacaacttttgttggtcgcttcatcattga

SEQ ID NO: 19020 - DNA, 390 bp, Glycine max
  Clone ID: LIB3049-029-Q1-E1-B1
ggcgctcatttcagaaacactgagtgtccctactctctaaccttttctctctcactaaccctaatcccaactaattcgaatttcgcttccgtcgtgtctccttccatttcacaaggtcaattcatcttaacccaattcttctctttctttttgttctttttctatgtagtctcttgttatttctgttccttaattccgcgcgtaggtacaacatttcacgccgcttaacgttagggtttcaaatttgacaaatcttgccaattcgtttttttcttttctccctcctttttaaagcaattcgccgattccgttaaagaatttcaaatccaaaaatttcatgggaagcaacgataatttcggcgacgggattttcaaaacccgtccccatct

SEQ ID NO: 19021 - DNA, 372 bp, Glycine max
  unsure (1)..(372): unsure at all n locations
  Clone ID: LIB3049-029-Q1-E1-B10
ggagtaagttaaagcaaggagtatattgctctataatcaaattaagatgaaggccatcactcttgtttttattgttctgttggctctttccattggaattgaaaatgaaggaccattgaagttgatagaagcaagacagtgcgaagaaacactgtataagtttagctgtgcaagtaacaaatgtggcactgattgtcgtaataaacatggaaagtttgcaagtggtacatgcaatgccattgaagattgcatatgtcgctatccatgttaataaatgtttgacctttttccaacgttgtccctatagaaaatgttgtntatatatgtaactggcaatgatggaattaaagaaaataaagttactcattttgt

SEQ ID NO: 19022 - DNA, 385 bp, Glycine max
  Clone ID: LIB3049-029-Q1-E1-B11
ggcttttgctagtggtactgtcttagctttgattctctgttctctgttttgttctgtttcgcgtattgtcttcatacaggaacttgaacaatgaagaatgcaaagggcaagggagcagcaagggcctcaaaagaatcactgaagcccgttgatgaccgaaaggttggaaagcggaaggcttccggtaagcctgggagaagtagtgcaccaaagaaggagaagaaggccaagaaagaccccaacaagcctaaaagaccacccagtgctttctttgtgttccttgaggagttcaggaagacctttaaggctgagaatcctaatgtgaaagctgtatcagttgttgggaaagctggaagagagaaatggaaatccttgtccagtgctg

SEQ ID NO: 19023 - DNA, 387 bp, Glycine max
  Clone ID: LIB3049-029-Q1-E1-B12
gaaatgagctggattcaatcagtgatgttcatagctggatatgacatagaggaccctctagaactcttgctcaacagaactaccatgtttaaaagatctttcaaggccaagtctgactttgtaaaggagccaataccaaaatctggtctagaaggagcttggaaactgcttctagaagaagaaatagcattcctgatattggaaccttatggtggtagaatgaatgacatttcagaatctgaaaatccttttccccacagaaagggctacttgtacaacatacaatacctgatcaactgggaagtcaatagtgacgaagcatccaagaggcatctacaatgggctaaaatggtttataaatacatgactccttatgtctcaaaatcc

SEQ ID NO: 19024 - DNA, 399 bp, Glycine max
  unsure (1)..(399): unsure at all n locations
  Clone ID: LIB3049-029-Q1-E1-B2
gaggggacaaggcagatctatagactatagtagtagaccagaaggaaagggaaggtttcctgcgctgcgtgtgttcccttccctaagcacaccacatggaacatttggagcaatggaaacaacaatttctccggtggtggcgcgtcgcagtccacaccgtccccccaattcagctctacgccgtcgccgccgtccttatcctcaccaccgttctccttctctcaattcgcttcttgaagcgcgcaaagtccaacaccattgttctcactggcctctccggcgccggcaaaactgtcctcttctaccaacttaagggatggttctaatcacgagggtnacgttacgtccatggaacctaacgaggacactttccttcttcattctgaaacagtcccgaag

SEQ ID NO: 19025 - DNA, 411 bp, Glycine max
  Clone ID: LIB3049-029-Q1-E1-B4
ggaaccagagagtgatttcagtgagtgatcggtgttcacttgatctcatcataatcgtcagcgtcaattgaagaagatgccgatcagaaacatcgccgtcggaaggcctgaagaggcgactcaacccgacacgttgaatgcggctttggctgagttcatctcaaccttcatcttcgtgttcgccggctcaggctccggcatcgcctataacaagctcagcgacaacggcgctgccatccctgccgggctcatctccgcctccatcgcccatgcattcgccctcttcgtcgccgtctccgtcggagccaacatctccggcggccacgttaacccggccgtcaccttaggcgccttcgtcggcggaaacatcaccttcctccgcggcatcgtctacgtcatcgcacagctcct

SEQ ID NO: 19026 - DNA, 390 bp, Glycine max
  Clone ID: LIB3049-029-Q1-E1-B5
gagtcacagaaaaacaaaatcctaacaaaccctacgaaggaaaacgtcgtcccaacaatcttgattgagttcagcgatggcccttgttctccgtctaggaagcagaagcagaagaagaagcgtgttgttcttctccaccaactccaactctcccttatcttcccttttcaatgacaatctcaaacaatcctctccctcaaacaccacgcgttcctcctttcgcactccccctaactcccaaccaggtttcaccgacgacatcaacagaaacctccacgaattccgcgcccggaccaccgctcctccatcgcaacaaaacccctttcccagaagcaaactattcgtgattatctcagacgtaacttcgatcagttggatcagaatcaaact

SEQ ID NO: 19027 - DNA, 331 bp, Glycine max
  Clone ID: LIB3049-029-Q1-E1-B6
gacacattcaggctacaattgtgatcttcacaaatcaacaacgtctctcactgttactctgaaaattgacttcaagttagtataactggctgtcaagttgtaatggcattggtctctggaagaagttctgcactgaacctaaatgcacctctattcatacctgctgctcttcggcacgtggaggatttttcaactcaatggtgggatcgtgtgaaatcttcaacatggtttcgtgattataggttgagccaacataaggaggaagaattttaagttgccagttactctagtaacgattacattgagaacatgctcccagaaacttttgatc

SEQ ID NO: 19028 - DNA, 395 bp, Glycine max
  Clone ID: LIB3049-029-Q1-E1-B7
ggcatctctgtggcctggtttcttgttaagcaggtcctcaccagcttttagatacatagctttcaatcaatcgcaattttctcacattccctttttgccctttctatctctctcgtcgttcgcgcacaatgaaggatcgtctaatggaatcagttgaaatgccacgcggccaaggtcacggaggtggtggtgacattgagttacgagaatatgcaaggaattcaggagacctgggcttggatagtttcttcaagaaggttgaagagcttgataaacaatatgctaagctggataagcttctgacagagctccagtatgctcatgaggaatcccaagctgttgaaagagctcttccatgaaggctatattgccgagaatggagaaagatgttgatg

SEQ ID NO: 19029 - DNA, 403 bp, Glycine max
  Clone ID: LIB3049-029-Q1-E1-B8
gagatacagaaccagcactagattatgagctccggctcctccgttctcgacctcggttgcgcccccggcggctggcagagcttgggtccattacgtaacggcggctccaaagaaggtcaaggtgcgattctagggttcagaccatctccgccggctaaaaggtctttcccccaaggagaacgggttctgcatgattctctcggatatgtgccttggaagcagaattcgcacgatgcttcttcttcggagtgttgaaagttggagggcaccttgctattaaggttctcgagagtgaggatgcaaagggttcttccttgctagcttacttgtccgcatcatatatgaatgatgtgttgttcaattcaattgcttttggttgtgtttctaatgtgttgttgtttgg

SEQ ID NO: 19030 - DNA, 337 bp, Glycine max
  Clone ID: LIB3049-029-Q1-E1-B9
gaaacacagagcaaccaccgatcaaagaagaaacaaccgcaacagatctccgtttctcgccaaacaaacacaaaatggctgccttcagcggcgacgaaaccgcacctttctttggcttcctcggagccgccgctgccctcgtttttttcctgtatgggagcggcgtacggaaccgcgaagagcggcgtcggggttgcgtcgatgggcgtgatgaggccggagctggtgatgaaatcgatcgtgccggttgtgatggctggtgtgttgggtatctacggtttgatcattgcggttatcataagtacgggcattaaccctaagggcaaatcgtactatc

SEQ ID NO: 19031 - DNA, 381 bp, Glycine max
  unsure (1)..(381): unsure at all n locations
  Clone ID: LIB3049-029-Q1-E1-C10
ggaggacaaaagaagaagtatcactcatataatactctgtatcatttcatttcgataatcatccatagctactgaagaaaatggcaaccatctctgctgctatcacaaccccatcgatctcccgcgcaactcttgtgcaaaagcgggtctcatctcccgttcttggtttgccagcaatgggtaaggtgggaagagtgatttgctccatggaggaaaaaccttattctgtgaaggaaagcagctctagcatgtttgggatgggggcatctctgatggcagctgccagcgctgcagccatgtcaggcncagccatggccttggtagatgagagactgagcactgaaggaaccggacttccctttggcctcagcaacaatcttc

SEQ ID NO: 19032 - DNA, 281 bp, Glycine max
  Clone ID: LIB3049-029-Q1-E1-C11
ggatgacgtaagtgtaagtatcattcatataatactctgtttcacttcatttcgataatcatcgagatctattgatcacagtggcacccatctctgctgctatcacagttccatcgctctcacgcgcaactcttgtgcagaagcgggtctcatcgccagttcttggtttgccatcactgcttaatgtcgtcatagtccattgctccatcgaggaatcaccttattctgtgaatgaaagcagctctagcatcttgagctattatgcatctctgatggtacct

SEQ ID NO: 19033 - DNA, 366 bp, Glycine max
  Clone ID: LIB3049-029-Q1-E1-C12
ggaaaatggtggtgttagtctatgaagagtcaccctgacctgagtaaaatttccatttccagagcctcaaatcagactcttctattcctttctctcatgaatcaattcagttctctcacactcagctgtcagctcaagtaaccctccctcagaagtcagaaccgggtcttctgtatgtcgtccaagttctctaaagataggaatgggaatatatctcagcagtcgacaaactgagaagttttctgaagatggggaaaatgactgtcttagatatggtttatcgtacatgcaatggtggcgtgcaacactggaagatgctcatgctgcatatactgatctggatgaggtcacgtcattttttggtgt

SEQ ID NO: 19034 - DNA, 365 bp, Glycine max
  Clone ID: LIB3049-029-Q1-E1-C2
ggaggaaagaagagagagaacaaagcacttagtgctattcaataattacgaaaaaccaacagcgagtgttgtttttgtttggtccaggctggaccagggaatgaatagagatgagaggctttcggttgaagagaactgagttaagcggcgaagccaaacgcagaatcggcggcagaaattgccaccggaagcacgtcgaagacgggtgaaccaaacacaaaattccatccaccacttctcttttcaatccccaactcaaatctgtgaagaaaatctcaatttctaaattgtaattcttagcactactgctagtagtagtaaaaaaaaacaatttagaaagtagtagagtgtttttttttcttttt

SEQ ID NO: 19035 - DNA, 263 bp, Glycine max
  Clone ID: LIB3049-029-Q1-E1-C3
ggggacacatcaaccctgcagtgacattctggttgttcctgggacgcacggtgtctttggtgaaggcgtcgttgtacatgataccacagtgcgcaggtgcaatctgcggtgctgggttggtcaaatggttccataaatcgtagtacaacaagtaccgacgtggacttaacactgttagcgaaagctacaacaaatgtaccgctttgggagctcacataatcggtacgccttgttcttgtccacaccgttttctccgccactga

SEQ ID NO: 19036 - DNA, 408 bp, Glycine max
  Clone ID: LIB3049-029-Q1-E1-C4
ggggacacatcaaccctgcggtgacattcgggttgttcctgggacgcaaggtgtctttggtgagggcgttgttgtacatgatagcacagtgcgccggtgcaatctgcggtgctgggttggccaaagggttccagaaatcgtactacaacaggtacggaggtggagttaacactgttagcgatggctacaacaaaggtaccgctttgggagctgagataattggtacctttgttcttgtctacaccgttttctccgccactgatcctaagaggagcgctagggactctcatgttcctgtgttagcaccacttcccattgggtttgccgtcttcatggttcacttggctacaatccctgtcactggaaccggcattaaccctgcaaggagtttcggaccagctgtgatct

SEQ ID NO: 19037 - DNA, 371 bp, Glycine max
  Clone ID: LIB3049-029-Q1-E1-C5
gcaacacatgggttgatgccatgcaagccccactcaaccaccacacctcacctcgttcacgctacgcctttctgctcttcttcgaactttcaagtttgaaaagtataaagatggcagagacattcctagttacatcagagtcagtgaacgagggacactctgacaagctctgcgagcaaatctccgatgctgtcctcgacgcttgcctcgagcatgacccatacagcaaagttgcctgccaaacatgcaccaaaaccaacttggtccttgtcatcggagaaatcacgaccaaggccaacgttgactagcagaagatagtgcgttacaactgcccgaacatttgctatctctcaaattatgtgggactggat

SEQ ID NO: 19038 - DNA, 396 bp, Glycine max
  unsure (1)..(396): unsure at all n locations
  Clone ID: LIB3049-029-Q1-E1-C7
gagcgtgagtcgagggtgttcaccacagtttacactcacgagagtacccattttctcttctcaatttctcaagtgtgccgagaaaatcatggtggacgcagcagaacgtagatacttggaggatgatgattcatctctcatgaaaactatcaagggcgcaacaactggtttagtggctggaactatctggggtactgtagttgccacctggtatgatgtcccccgtgtcgagagaaatgttgctcttccagggctgattaggactatcaggatgatgggcaactatggtttgacctttgctgccatangacgagtctacataggtgtanagcanttggtgcaaaactataggatgaagagggatttagtcaatggagctgttggcggatttgttgc

SEQ ID NO: 19039 - DNA, 390 bp, Glycine max
  Clone ID: LIB3049-029-Q1-E1-C8
ggaattgcgagattaaacgacaccactgaagcgaaggaaggggcgtacggttctgttgtggttggagatccgaattttgattatcgaatcgcaaaattctgaatcaatcaatcaatcaatcagtaatcagagccatcaacgactgcaatggtctgcgagaagtgtgagaagaaattatcgaaggtgatagtaccagacaagtggaaagaaggggccagcaatactaccgagggtggtggccgcaagatcaacgagaacaagcttctctccaagaaaaacagatggaccccttacggaaacactaagtgcaacatttgcaaagcaacaggtgcaccagaatgctaagtactgccacacctgtgcttactctaaaggagtttgtgcaatgtg

SEQ ID NO: 19040 - DNA, 382 bp, Glycine max
  unsure (1)..(382): unsure at all n locations
  Clone ID: LIB3049-029-Q1-E1-C9
ggttctagtgtgtgattgtttgttgttgtaactcgttcttcttcttttgttgttctgtgtttgtgtttgttttttctctcacctgaaaatgtcttgctgcggtggtaactgtggttgcggaagctcctgcaagtgcggcaacggctgcggaggctgcaagatgtacccagacttgagctacactgagtcaaccaccaccgagaccttggtcatgggagtggcacctgttaaggctcaatttgagggtgctgaaatgggtgtgcccgctgagaacgatggctgcaaatgtggaccaaactgctcctgcaacccctgcacttgcaagtgaggtgttgggagagcaagcttcaagcagagatagcccttaattangaataatgat

SEQ ID NO: 19041 - DNA, 406 bp, Glycine max
  unsure (1)..(406): unsure at all n locations
  Clone ID: LIB3049-029-Q1-E1-D1
gggagagagaaagtttgattacacagctgagaaaagaactgagattgtcaaatgacgagcacagagaacttctaggtcgagttaatgctgatgatgtgatacggaagataacggaatggacacaggcacgtggccatcagcctggtgtacttagcactggtcaatgacttcatgattcaattcccagtcccacagtctctgcttctcgcacaaagcataagattacaccatctgtaccaccatcacgatcttttggcggaccttctcctccatttcacccccaaacactgactgcacctcaacaaccatcttctgcagcaaaaccttggacctgctccggggtcaaagggaaagaancacatacctggtcaaatattacctggtgtatcttcaatgaagcagtatc

SEQ ID NO: 19042 - DNA, 367 bp, Glycine max
  Clone ID: LIB3049-029-Q1-E1-D12
catgaggaaagaggtagagttttgcaggccatggatgggtgcggctataaagctgcagctggtggatctctttctaataccttagttgccctcgcaaggcttggaagtcgctccgaaaaagttcctgctataaatgtggcaatgaccggtagtgtagggagtgatctattagggggcttctacagggaaaaattacgccgagcaaacgtgcaatttctttctgcaccaatcaaggatgggactactggaacagttataattctcacaactccagatgcccagcgcacaatgcttgcatatcagggcacatcttcaactgttaactatgatgcatccttagctaatgcagtttccaagacaaacatac

SEQ ID NO: 19043 - DNA, 398 bp, Glycine max
  Clone ID: LIB3049-029-Q1-E1-D2
gacatcgcacagcattactctttcgcaccttgcagaatcaattttctctctcaatcgtctttcatggctcgtaccaagcaaaccgctcgcaaatccaccggtgggaaggctcctaagaagcaactcgccaccaatgctgcaagaaaatctgcacctagcaccggtggagtcaagaagtctcatcgctatcgtcctggaactgttgctcttcgtgagatccgaatataccaatagagcacagagcttctgatccgcaagctcccctttcagcgtcttgttcgtgaaatcgcgcaagacttcaagactgatttgaggttccagagtcaagccgtttcttgcgcttaaggaagctgctgaggcttacttggtgggtttgtttgaagacaccaacctttgtg

SEQ ID NO: 19044 - DNA, 326 bp, Glycine max
  Clone ID: LIB3049-029-Q1-E1-D3
aattctagtctcgaccgacgcgtcagtacggcagtcagtaaagaaccgaagggggaacagtagggggcagatatcgatattctagcacaatcgatggataccatcagtcggctatcattgcttggatcgtgtttggcattatcatgattgggattgcaacaggtcattgctcgttttgtcgcattatcatcttcgggttggcagcattcgtaccgaatgtgattgcggattttcctgctgatacctctgcagcgttttgcttcgtcatatccaatgctcatatttcattcttcagctgcttctcggcttcatgccttctctctatg

SEQ ID NO: 19045 - DNA, 393 bp, Glycine max
  Clone ID: LIB3049-029-Q1-E1-D4
ggcagccaaagaaaagaaaatcctcaattttctgagcagccaaacactctctctctgtctctcgaaaattctcagtttgcagagaaaatctgaatcatgtcgtggcaagcgtatgtcgacgatcaccttctgtgtgacatcgaaggtaaccacctcactcacgctgctatcatcggccaagacggcagcgtttgggctcagagtaccgacttccctcagttcaaacctgaggagataactgccatcatgaatgactttaatgagcctggattcacttgctcaactggattgtatctcagtggcaccaaatatatggtcatccagggtgaacccggtgctgtcattcgagggaagaagggtcctggtggtgttactgtgaagaagaccggtgcg

SEQ ID NO: 19046 - DNA, 313 bp, Glycine max
  Clone ID: LIB3049-029-Q1-E1-D5
ggaaattaaggatgactgaaaaacacaatatgaaaggatcagtgatgcatcacatcatagccaaagttttttgtcaagataacactataactttgaagtgttttcttttcttattctcttcacaatatgaattataaagcatgtaatgtacggccaatttggaataacacaccagcagatgccagcacagatctcatctcaagctgtgcaaacccactctgaacatccattctctatatcagccgtatctgctacctcatcatgtgctgcacaacagctgattccacactcaatgccagattctaaagtgaaa

SEQ ID NO: 19047 - DNA, 316 bp, Glycine max
  Clone ID: LIB3049-029-Q1-E1-D6
ggcataggcagggatagatagagacaagcttgaagcatgtcagacgaagatcatcacttcgattctcacgcggatgcgggagcgtccaacacgtatccgcagcaggctggtaccattcgcaataatggctacatcttcatcacatccaggccttgcactgttgtataggtctctacgttaaacacaggcaaccatggacatgcaaagtgtcacttcgttgcaattgacattttcaatgggaaaagtcttcatgatatttttccatcatctcacagctgtgatgttccacatgtgactcgcactgactatcatctta

SEQ ID NO: 19048 - DNA, 317 bp, Glycine max
  Clone ID: LIB3049-029-Q1-E1-D7
gacagccgcagcgttatttagtgaaaagcgacctttacgacctatggctgtctgacagactaagaggatttccagaggagagcacggtcgctacaatagagccgctgatgcctttgccaacatagactggtaccataccaatgccacttctctcttccaggtcaagaatattcgcaaaatcctcgtctctcgtacacatggaaccatcattgcagtccaatgactcacacatcaggtttttgaagtctcattggctgatctccaacgggattaatagcactccttcaacaacattcgtttgagatctgacgactttc

SEQ ID NO: 19049 - DNA, 315 bp, Glycine max
  Clone ID: LIB3049-029-Q1-E1-D8
gatcgtgatggataccgtggaggtccccgaggaggacctgttggtgactttggaggagacaagggaggagctcctgctgaccacaggccctcttttgggggtcctggcggaacgcccggctttggtcgtggatctggtggttttggagcgccaaccatctcaaatcttccccaagtataatgttttctgctttattttttgtctacttttctacaaagacatgtctgtaattgggatcaatgataattttccatctcttatagatcgttttatcggcctgatctttaccttatattcagtttttcgttcaatgaa

SEQ ID NO: 19050 - DNA, 402 bp, Glycine max
  Clone ID: LIB3049-029-Q1-E1-E1
gggttttgaagcccaaaattagtttagtggatatggggactgcatcatctattctaactcaatacgacatcgaggaagttcaggaacactgcaataatttattttcccagcaggaaattgtgtccttatatcaaaggttttgtcaacttgaccgcaacgccaagggatttatttccgcagatgagttcttgtccgttcccgaatttgccatgaatctactttctcagaggctgctcaagatggtcgacggtttgaattttaaagactttgtggccttcttatctgcattcagtgccaaagcgagcgcacaacagttcatagagcttactttcaaagtacatgatcaagaccgcaatggaaaggtgtctttcaaagatatgctggaagtgctaaaagatttgt

SEQ ID NO: 19051 - DNA, 387 bp, Glycine max
  unsure (1)..(387): unsure at all n locations
  Clone ID: LIB3049-029-Q1-E1-E10
gagggcttgtcaagtgtgaacttggaattccatggacgacatggctgcctactactcacagccccaaccgtcgggccttctcccttaccagtactaccaacagccgcctccgccacctcctccgccgatgatggcggtagtgccaccgccccccggcgcggttgtcccgccggcgcaccacctgcatccgccttacgtggctcagcatcagcagcaagcggtgttcggttcctacggtgctcctcaatcctccacccacgaggttcgcactctcttcgtcgctggcctcnccgaagacgtaaaaccccgcgaaatctacaacctcttccgcgaatttcccggttacgagtcctcgcatcttcggagtccctctaattcgtcgcagcc

SEQ ID NO: 19052 - DNA, 369 bp, Glycine max
  Clone ID: LIB3049-029-Q1-E1-E11
ggcagcaaacaagtgagtgagtgagttgctttgtctcattcactcagctacttctccatccatctccacctaaaaatgcaacccctacactttcattttcttgagcccttttttctcttcaatcctatacacagtgtctggtgtaatgcaagcgtagtttttttttttttgcctctgtgactctgtagatctgacccatgcggggataccgaaaaaataaaggattttgatttctgggttttgttttttggcgcattgggtcattggaaaagtggagtgattgttgctggggggtcatgggttccaatggtagcaaagccacttcttcgtctttcgggtattcttcttcttcatcgtcttcttcgggga

SEQ ID NO: 19053 - DNA, 229 bp, Glycine max
  Clone ID: LIB3049-029-Q1-E1-E12
ggcagcatgcaagtgagtgagtgagttgctttgtctcattcagtcagcgacgtctccatcgatctcgacgtagtgatggaacccctacactttcattttcttgagcccttttttctcttcaatcctagatacagtgtcaggtgtaatgcaggcgtagttggtttctttttgcctctgttactcgatagatctgacgtatgcggggataccgagtaacaactggattttg

SEQ ID NO: 19054 - DNA, 201 bp, Glycine max
  Clone ID: LIB3049-029-Q1-E1-E2
ggcatcgaacagcattactccatcgcatcttgaagcataaattttctcccacactcgtcgcttcatggctcgtaacaagtgcatcaatcgtcaaatgcactagttagaccgatcgtaactggtaaccctacagccaaggttctagaaaatccgaagctagcacctatggcagtctgctgctgctactgctgctttcatgca

SEQ ID NO: 19055 - DNA, 407 bp, Glycine max
  Clone ID: LIB3049-029-Q1-E1-E3
gaaggtaaagatcgaagaatggaagggtcttcagcatcatcgcatgaagaagagagaacagccactttctatgtgtaccatccttgctattttcttcaacaagcattcagggctctcttgaggtgtctaggtattgagtctgaagccacaatgtgttcaaaggcagaagaagagaaaagctcactgtcacaaactactgctgcagatgatcttattacaaactctccaagctgcaacatatcccacaaaaactcccaagatgctgcagatccaccatccacaactaatcaaaccattatcattgcaagttcaatggcaaagcgttgaaaatccaggtctaaaattagccatgggtcaggccctcagcataattaaatacataccatgcatgggccatggctttggac

SEQ ID NO: 19056 - DNA, 387 bp, Glycine max
  Clone ID: LIB3049-029-Q1-E1-E4
gggccagaaccaatggacatctctacaacatcaacatctcagctatgtggaattcctagttcagatgtgacaattttggaaggtcatacttcagaagtgtgtgcttgtgcatggagccctacaggatctcttcctgtatccggatctggagattcgacagctcgtatctggacaatagcagaagggagatgtaagcctggttcagagaatggccctttgaatgtgttggtgttgaagcatgttacgggtaagacatatgagaagagtaaacatgttactacacttgactggaatggggaatggacacttctcgcaactggatcatataatgggcaagcatgaatttggacgaacaatggttaactgaagagtacattaagcaagcac

SEQ ID NO: 19057 - DNA, 402 bp, Glycine max
  Clone ID: LIB3049-029-Q1-E1-E6
caagaagacttttaagttttatgaagctggaggtgatggaattgcatactcggttggtgccaatttcacacctcacatccttacagtaaatgatggcgaggacgttactatggagattatgtccttctctcaacaaggatatcgagcaatttgcattctgtctgcaaatggcacaatttcaaatgttacactacgccaaccaacttcttctggtggtactttaacatatgaggggcggtttgaaattctttccttgtctggttcatatataacaactgagaatggattaacaaagagcagatctggtggtatgagcatctctttggccggtccagaatgtccaagtaatggggggtggattggctggtttgctggtagctgcaggtcctgtgcaggttgttg

SEQ ID NO: 19058 - DNA, 381 bp, Glycine max
  unsure (1)..(381): unsure at all n locations
  Clone ID: LIB3049-029-Q1-E1-E7
agacactaatataattagatctgttcttcatacacaaacttgggatttccgatctcaggtaagatcggttcaggatcatgggatccttttctatcagataggaagggctgtttcacaaaatgtacttctaagtaattgctccatagatcctatatctatctatatgaagaagaaatcatgtgacgggggggattcttatttgtacaaatggtacttcgaacttggaacgagtatgaagaaattaacgatacttctttaccttttgagttgttctgccggatcggtcgctcaagacctttggtctctacccggacctgatgaanaaaatgggatcacatcttatggactcgttgagaataattctgatctagttcatggcct

SEQ ID NO: 19059 - DNA, 359 bp, Glycine max
  Clone ID: LIB3049-029-Q1-E1-E8
gcaaaaagaagagttccctaaaggcaagcgtaaagctcgaaaacgcaggcgccttgctcttcagggaagagcagtgaaggatgtcagaaggagacagaaagctgactcgctaacggatgaggatctcggtccattctccaattctagtgaagagagcatgttcagtgaagatgaaattcaggctggcagaatacgtccagcaggaagttcatcagatgaggcaggtagtgcctaatatgaatatgagccagctgaataattcaacaggtttgtttttgccaggattaaataattgttggaatgcagtctttgcgaccttgttcagtggaggatggattgccggtgcttggtgcaatgtc

SEQ ID NO: 19060 - DNA, 380 bp, Glycine max
  unsure (1)..(380): unsure at all n locations
  Clone ID: LIB3049-029-Q1-E1-E9
ggtctaaggggtgccctgagatcacattgaacaatggtgaaggctgtggccgttcttggcagcagtgagggtgtcactggaactattcacttcgttcaggagggaagtggtccaaccaccgtaactggatctcttgctggtcttaagcctggtctccatggtttccatgtccatgccttgggggacactaccaatggttgcctctcaactggatcacatttcaatcctaataacaaggagcatggtgcccctgaggatgagaatcgtcatgctggtgatcttgggaatgttaatgtcggtgatgatggtactgtcagcttcactattactgacagccagattcctctcactggaccaaacaacatcatangaggggcggt

SEQ ID NO: 19061 - DNA, 405 bp, Glycine max
  Clone ID: LIB3049-029-Q1-E1-F1
ggagaggtgcaggttgaaaatgcttttatccagtaccatgattctctctaattctccaattgcatccccttcactaccaacttcaacgggtgccaagttggaaactttttccctgaaaaatgatggggttatcagaattagaggagctactgcttcttcagtggcacccagaatccgaaaaacagcaacatgttctgtatcgaaagatggtaatgcctctgttgagactgatgtacctttccctgctgattactctgagcttctggaacaagccagagtaactgcagatttggctataaaggataacagacagctaatggagactgagttttccacagcctggacccgggtcggtgccaggtgatggggaacgtggaattgaaatgactgagagcatgcaattga

SEQ ID NO: 19062 - DNA, 208 bp, Glycine max
  Clone ID: LIB3049-029-Q1-E1-F10
gaccacaagatggcgaggcaattgcaagagatcggagtagtgaagagtggtgaacacgtacttgtgactcgcacacgagttcaagtgctagcggccgtggtcaccttcgctgccggtgacagtggcaggtgtaaggcacgcttgcgctgttgttctgtggctcagtacctgcatccatctcaccgtcgctcggatcccgactaagttg

SEQ ID NO: 19063 - DNA, 389 bp, Glycine max
  Clone ID: LIB3049-029-Q1-E1-F12
tgggggagaggacggtatgatggaaacatggcacctgagatcgacatgagtgactggcgaaaaggctctcagtggtttgaaattaaccgagaactagctcttaggatagttgaagacaatacttactatcctaagctcaaagaattctgcaaaccacacaaatgttatgttgatgagcactattttcagacaatgttaacaattaatactcctcatcttttggcaaatagaagcctcacttatgtggactggtcaaggggtggtgctcacccagctacctttgggaaggatgacatcaaagaggaattcttcaagaaaattttgcaagatcagacatgtctttataataaccagccatcttccctttgcttcttatttgcaagaaaatt

SEQ ID NO: 19064 - DNA, 411 bp, Glycine max
  Clone ID: LIB3049-029-Q1-E1-F2
gacacgggacgtgattatgggatctgtagtcctgtgactccgaacaccctcctccctctatatatctatatccaaatctcccttcaattctcaatctctgaaaccacaattcacaaccgaaacagtttccatctctctcacaaaatgacaacaatatcaaattgctcccttctcttcctcttcctcttcctctccaccctccacatagcttccaccctctcaacccccaccaacttcatcaagtcctcctgcagcaccacccagtacccagccctctgcatccagtccctctccgtctacgcctccaccatccagcaagacccccaacagctcctccagacagccctctccctctccctcaaccataccgaggccaccaaaaccttcgtcgcaaaatgcaacaaattcaga

SEQ ID NO: 19065 - DNA, 411 bp, Glycine max
  Clone ID: LIB3049-029-Q1-E1-F3
atgggggaatggtgtgataagagtgccttaaatggttcagctctttatagctagccagccacactcattcatttcatcccatttaaaaccaacaaaacgacgttgcgcttgcatctccaatctccgatcagcttctcccgtgtttccatctcaatctgaatcaaagccgttgctcgatcatgtgttgttgtgaatttgtttgatcgagtgagaagatgaatcctctgtgctgcattgctccggtttctatcgatcgggaccgggcgaaccctgtggtggccaaatcgccgagtcagtgtcagctatggctcgatgcctccatcatgaacgttaacctagccctccaaatcgagcttctccattcaggattcctccgtcggcgccgattccgtcaaggacaccgccgccgcg

SEQ ID NO: 19066 - DNA, 412 bp, Glycine max
  unsure (1)..(412): unsure at all n locations
  Clone ID: LIB3049-029-Q1-E1-F4
ggaagaactttgagttgcaaaaagaagagttccctaaaggcaagcgtaaagctcgaaaacgtaggcgccttgctcttcagggaagagcagtgaaggatgtcaggaggagacagaaagttagctcgctaacggatgaggatctgggtccattctccaattctagtgaagagagcatgttcagtgaagatgaaattcaggctggcagaatttgtcctgctggaagttcatcagatgaggcatgtagtgcctaatatgagctagctaaataactcaacaggtttgtttttgcaagaataaataattgttggcttgcagtcttcgcgagcttggtaangtgaaggatggattgcgggtgcttagtgtgatgtcacagcgtatcagtagtgtaaatatttgtagcattagttgtttc

SEQ ID NO: 19067 - DNA, 392 bp, Glycine max
  unsure (1)..(392): unsure at all n locations
  Clone ID: LIB3049-029-Q1-E1-F6
gcttgctagccagccagatcatctgcaaggacttgttctccttccttcccaacagccatgtcttcttttcttcccgcctcagccgagtcacttgatctggcagtggaggccaaagacccgtctgagtccatctccattctttatcaggtacttgatgatccttcttcttctccagatgctctgcgcatgaaagagcaggccatcacaaacctcactgagcatctcatggaacagaatatggcagaggatttgcacagccttcttacacagttgaggcccttcttttccttgattcctaaggcaaaaactgcaaagatagtgaagggcataattgaaacggttgcanaaataccagggacttctgatctacaaattacactatgcaaagaaat

SEQ ID NO: 19068 - DNA, 402 bp, Glycine max
  unsure (1)..(402): unsure at all n locations
  Clone ID: LIB3049-029-Q1-E1-F7
ggtgctaatcttatcttatccctctaatcactctagctgttgcaaatttctactatttttcaatggcttctgcagatgttgagttccgttgctttgttggtgggcttgcttgggtcaccggcaacgatgccctcgagaaagccttttcaatctacggcgacatcgttgaatcgaaggttatcaacgaccgtgagactggaaggtccanaggattcggatttgtgaccttcgcctcagagcagtcaatgaaagatgcgatcgcaggaatgaacggccaggaccttgacggtcgtaacatcactgtcaacgaagctcaagaccgcgccagccgtggtggttgttgaggcggtggtttcggaattggtggtggatacaaccgcggtagcggtggatatggtggtg

SEQ ID NO: 19069 - DNA, 384 bp, Glycine max
  Clone ID: LIB3049-029-Q1-E1-F8
gggagacacagagcgagagagaatcgtaacaaaagcggtaaccggaataagttgtctctacgatttgagccatggcaacaacaacaccctcaaaccgatcatcagaggcgtttgctctcatggcaatcctcagcactctgctttgcacggcggtggcggcgaaggagagcgtgtacgagatactccccaagtacggcctcccgagcggtctgttaccggacaccgtcaccgactacacgctcgacgaggacgggcaattcgtcgtcgttttggcgaagccctgctacatacagttcgattacttagtttactacgagaccaagatctccggcaagctcagctatggctccatcaccaacctcaagggcattcaggtccagcgcc

SEQ ID NO: 19070 - DNA, 385 bp, Glycine max
  unsure (1)..(385): unsure at all n locations
  Clone ID: LIB3049-029-Q1-E1-F9
ggagtctcaacctaattccccattcatccatctttacgtgtttgttggattccatggccaaaagctccttcaagcttgaacatcccttggaaagaagacaggctgagtctgctcgcattagagacaagtatcctgatagaatacctgtgattgttgagaaagcggaaagaagtgacatcccagacatcgataagaagaagtaccttgtcccagcggatttgactgttggtcagtttgtttatgttgtccgtaaaaggattaaggtcagtgcggagaaggctatttttgtttttatctacaacactctacctccaactgccgctttgatgtcntctatttatgaggaanataaggacgatgatgggtttctttacatgacatacag

SEQ ID NO: 19071 - DNA, 295 bp, Glycine max
  unsure (1)..(295): unsure at all n locations
  Clone ID: LIB3049-029-Q1-E1-G1
cgggattgcaaacgttgaataatgagatattgttgtgacaaggcatcttatccatagttgtgcatacataataaattgcaagttgagacccacagcataggaattgaagagcatggaaagtgaccagaaagtccaaatagcttcttggagtgaggtcatgtcaggtgctggggtggagtttcatcaaggggctcctaatttgggacaacgtggtggtagtggccttcagagacaacctagtatgaccaagaacaattgtctttgttctccaancacaaattctggttcgtttcgt

SEQ ID NO: 19072 - DNA, 382 bp, Glycine max
  Clone ID: LIB3049-029-Q1-E1-G10
gggcgcgggtgaggtagaacccttccacggtggtgactgcgcgatgggtgcctacaagtatgtttcagagctatggcgcaagaagcagtctgatgtcatgcgcttcttgcagcgggtgaggtgctgggagtataggcagcaaccttccattgttcgcttgacaaggtcgacccgccctgacaaggctcgtcgcttgggcttcaaggctaagcagggctatgtgatataccgtgttcgtgttaggaggggtggccgaaagaggccagttcccaaaggtattgtttatgggaagcccacaaaccagggtgttacccaactgaaatttcagcgtagcaagaggtcagttgctgaggagcgagctggacggaagctgggtggactt

SEQ ID NO: 19073 - DNA, 180 bp, Glycine max
  Clone ID: LIB3049-029-Q1-E1-G11
gagaattgcgttatcgagagagagagagagaaacgccatttagtgtcgtctgcacacatggcgtccctacagggcttcaccatcaccaactaccatttagtggatgaggatcaatacgtttcacacactgcatactcctcggtgcatgaacgtatgcaatatatcagctcttcacattca

SEQ ID NO: 19074 - DNA, 154 bp, Glycine max
  Clone ID: LIB3049-029-Q1-E1-G12
tgggggagttggattatcaaaagagatggcgagaaacgcattgagtgtcgtctgcacacatgtcgtcgcttcagggcttcaccatcaccagctaccatttagtgcatcaggagtaatacgtttcacactctgcatactccttggtgcatgaacg

SEQ ID NO: 19075 - DNA, 273 bp, Glycine max
  Clone ID: LIB3049-029-Q1-E1-G2
tcacgaaagggatcttcacagactccaacttgcggaaatttccgaggctgggtttacctccaagatcagataaatattcgggaaaattaacaactctcattagacacggagaacgtgactcagccgttatactcaccgctttcgatatatcataggactgtaaactccacaatcactttgatgccgcgtttcaaggttccatcacatgggaatctaactctgtctacatcaacatctctatgatcagtgttcgaatcagttacctcaatgcca

SEQ ID NO: 19076 - DNA, 200 bp, Glycine max
  Clone ID: LIB3049-029-Q1-E1-G3
gtgagggaatggtgttctcagattggaacttcaggctacatctcgttgctgggtgtcactactaatcgttatcatcatctcggttaagttctgtctcactgagtcacgcatgcatcacctctcttctatcagtctctcttgtgtatctatctcagtctgattcagtgcacttgcgtctctgatgtgtcgttctgacgttg

SEQ ID NO: 19077 - DNA, 263 bp, Glycine max
  Clone ID: LIB3049-029-Q1-E1-G4
gattgtgactgcgctgcatcaccatcgagcccaatccattcacgagcatttcgcacgagatgattggatgtctgaattggccacggttgatgccaatttgtcgttctttaaatcacttttttttcaacctttgttacatatatagttattgctgtagtcttgactccggaattttgtcatttatcacattctcgttattggtatatgcacaggttggcaaatgtgtcacttcactcccgatctttcaaccaccaacaagtatt

SEQ ID NO: 19078 - DNA, 403 bp, Glycine max
  Clone ID: LIB3049-029-Q1-E1-G5
ggtagttccaccgagtagcaacaatgtcgaagcgaggtcgcggaggatcggcgggaaacaagttccgcatgtcgctgggtctgccggtggcggcgacggtgaactgcgccgacaacaccggcgcgaagaacctctacatcatatcagtgaaggggatcaagggtaggctgaaccggttgccgtcagcttgcgtcggagacatggttatggccaccgtcaagaagggaaagcccgatctccgtaagaaggtgctgcccgccgtcatcgtccgccagcgcaagccttggcgccgaaaggacggtgtttacatgtacttcgaagataatgctggtggtatcgtgaatcccaagggtgaaatgaaaggttctgctatcactggtccaattgggaaggagtgtgctga

SEQ ID NO: 19079 - DNA, 394 bp, Glycine max
  Clone ID: LIB3049-029-Q1-E1-G6
gatcatcagaatccacagtttccgttagcgctctccaatacaaaataaccactcactgaatattcggtcgaagatgtccgccgccgaagaagctaaagttcccgccgtcgaaaagccggtggaggaggtgaaggcgccgaagcttgccaaggagaagaaacctaaggctccgaaggaaaagaagccgaaacaggccaaaactgcttctcatcctccatatctccaggtaatttcgcgtaaatttctttcatgaatccacaattattacgtgattgttatttttttgtttgttgatttttttttggttgtcttaatgtttgtagatgattaatgacgctttgattgctctgaacgagaaaggaggatcgagtccatatgcgatagcgaagtacat

SEQ ID NO: 19080 - DNA, 404 bp, Glycine max
  Clone ID: LIB3049-029-Q1-E1-G7
gatattgaaggtgagttttggaaataataaattaatgtagatataaaaagaagggtgtattgaggaggaggataaacatttgggtctgtctccgccttggccaaatccctagcctcttgttgtttgattgagatgacgatggcgttgttagcgggtcagagctccatttccgcgcttccctttgttaacccaacttccttgagcttcaaacctctcgcctttaccaaatccctagctctcccttcagcacagaggccaacttcgctgaggctgaaatgcaagatggagagcgacggcgacattctgcgggggagcactcgcacggtgaccaccctgaatggactcgccttgttgctggtgaagaaggcggccattccagtgttgaacatcaacatcaacagcag

SEQ ID NO: 19081 - DNA, 400 bp, Glycine max
  Clone ID: LIB3049-029-Q1-E1-G8
ggaggtactgtaatcagagaagaggttggccttactttggacaaagctgggaaagaggttctcggatatgcctccaaggtggttctcaccaaggatacaaccacaattgttggtgatggaagtacccaggaagcagtgaacaagagagttgcacagattaggaacctaattgaggctgctgagcaagagtatgagaaagaaaagctgaatgagagaattgctaaattatctggtggtgtggctgtcatacaggttggtgcacaaactgagactgagctcaaggaaaagaaattgagagttgaagatgctcttaatgctacaaaggcagctgtagacgagggtattgtagttggtggtggttgcactcttctgagacttgcatcaaaggtggacacaatca

SEQ ID NO: 19082 - DNA, 386 bp, Glycine max
  Clone ID: LIB3049-029-Q1-E1-G9
gaccccagaagatcgaacaaggatctccacgaagacaaacctctgttctcaactgtgtttctttacctctcacctactttcagaccatacccaggctgagaagatgcagcagacaccgcctatgattcctatgatgccttcgttcccacctacgaacataaccaccgagcagattcaaaaataccttgatgagaacaagaagctgattctggcaatattggacaatcaaaatcttggaaaacttgcggaatgtgcccagtaccaagctcagcttcaaaagaatttgatgtatttagctgcaattgctgatgcccagcctcaaaacacagccatgcctccacagatggcaacacaccctgccatgcaaccaggattctatatgcaac

SEQ ID NO: 19083 - DNA, 412 bp, Glycine max
  unsure (1)..(412): unsure at all n locations
  Clone ID: LIB3049-029-Q1-E1-H1
gatagtactgttaaacgcaaaggcgatgaaacaacagaaagaagaggtaaggttgtatcgtatcatcattcattcatccatccatctgtgttctgtgtgccatttccattgccaccaccgatcactctctcacccaccaactgataccagtaacttcttcaccttcctttccttccccaattaaaattaaacaaaaaaaaaaaacgaataaacaaaaaaaactgtccactaaggttgaggcacgtgacccatcccgcccttcctctcgctcatctcaaatccatgcttctgaattagggtttccatttggatttcgcagttctggtgcccccaatttgagcgacggaaaaggaaaagggaaaagggatgaggatganggtttggggatccgagatcgtgttcgccctattgc

SEQ ID NO: 19084 - DNA, 387 bp, Glycine max
  Clone ID: LIB3049-029-Q1-E1-H10
cggggaaggatcgtaaaatcaagtctgggacgattttgattggaatgaagaagactttggtgttctacactggtcgagcacccaaggggaataggaccaattgggttatgcatgagtatcgccccactttgaaggagcttgatggtaccaatcctggacagaatccatatgtcctttgtcgcttgtttaagaaacatgatgagagccttgaagtttcacactgtgatgaagcagagccgactgcttccactcctgtggctgcctattactccacagaggaaatacaatctgatctggctgttgttgcaggatcgccgtcacaagttacagaagatgataagcatcagtcaatgatccctgcacactctgaggaagcaatatccaatg

SEQ ID NO: 19085 - DNA, 380 bp, Glycine max
  unsure (1)..(380): unsure at all n locations
  Clone ID: LIB3049-029-Q1-E1-H11
ggagggcgaggaagccacatagagacacaatacagagtgagttgttgctccttcgccacaactctctgccaacatgggtatctccagagattctatgcacaagaggcgtgccactggtggcaagaagaaggcctggaggaaaaagagaaagtatgagcttggtcgccagcctgctaacactaagctgtcaagcaacaagacagtcaggaggatccgtgttagaggtggaaatgtgaaatggagggcattgagattggatactggaaattactcctgnggaagtgaagctgtaactcgcaagactcgtgtactagatgtggtttacaatgcctcanacaatgagcttgtgcgtactcagactcttgtcaaaagtgctatcg

SEQ ID NO: 19086 - DNA, 411 bp, Glycine max
  Clone ID: LIB3049-029-Q1-E1-H2
gtacacagcctcaacaaccctaacgcgtgcacagcagagagagacgcagccatggggcgaagacccgcgaggtgttataggcaaattaagaacaaaccataccccaagtcacgtttctgccgtggtgttcctgatcccaagatcaggatttatgatgttggtatgaagaagaacggtgttgatgagtttcctttctgtgtccatctggttagttgggataaggaaaatgtttcaagtgaggccctggaagctgctcgcattgcttgcaacaagtacatggccaaatttgctggaaaggatgctttccacttgatagtcaaggtgcacccaatccaaggttcctaggatcaacagcatgcattcgtgtgctggtgctgatacgctccaaactggaatgagatgtgcttttgg

SEQ ID NO: 19087 - DNA, 376 bp, Glycine max
  Clone ID: LIB3049-029-Q1-E1-H3
gagggttttgtgttgttgtcgctgctcatcctccataacctccgagctctacaccgaagaacgaagccatggggaagacacatggaatgggagctgctcgcaagctcaagtctcaccgcaggaggcaaaggtgggctgataagtcatacaagaaatcccatcttgggaatgaatggaagaaaccttttgccggttcatcccatgccaagggaattgtccttgaaaaggtaggtattgaagctaagcagcccaactctgctattcgtaagtgtgccagagttcaacttatcaagaaatgggaagaaaattgcagcttttgtccctaatgatggttgcttgaactacattgaagagaatgacgaagtcttgattgctg

SEQ ID NO: 19088 - DNA, 293 bp, Glycine max
  Clone ID: LIB3049-029-Q1-E1-H4
gagcgaaacagagagtgatttcagtgagtgatcggtgttcacttgatctcatcataatcgtcagcgtcaattgaagaagatgccgatcagaaacatcgccgtcggaaggcctgaagaggcgactcaccccgacacgttgaaggcggctttggctgagttcatctcaaccttcatcttcgtgttcgccggctcaggctccggcatcgcctacaacaagctcaccgacaacggcgctgccacccctgccggcctcatctccgcctccatcgcccatgcattcgccctcttcgtcg

SEQ ID NO: 19089 - DNA, 403 bp, Glycine max
  Clone ID: LIB3049-029-Q1-E1-H5
ggttgagtatattttcttttggtcataaccactttgggagagagagagagatggcttacaacaaaggggtgcatagcagcagtggagggagtcacagaggaaggccttatgtgttggtattgcttatcacatttgggattgcactgcttggtgtcatggtgcttcacaagctcagagagaggcgcatctgcacccttcttgtcaaagaggaagaccaacagattcttgctcttcagcttctcttgcagaaggaaagagatcgcagcaaagagttgagaagcaagaatgaagagatgaaggggaagttatacacactgagaagtcagaaaatggagcctggtaaaaacagttggggagatgcaatccaccctggattcgctgaaagatgagcagaagctgatgg

SEQ ID NO: 19090 - DNA, 321 bp, Glycine max
  Clone ID: LIB3049-029-Q1-E1-H6
ggcacacaaccgctctttcttcttcttctcttaaaagagcctttgctttttctttaggcctttccgaattaagtacttgtttcattttctctcgaagcaagaaaaatgttcatcgagagtttcaaggttgagagtcctaacgtgaagtacacagagactgagattcagtccgtgtacaactatgaaaccactgaacttgttcacgagaacaagaatggcacttatcagtgggttgtcaagcccaaaactgtcaaatatgaatttaaaaccaacacccatgtccctaaactaagggtaatgcttgtggggtggggtggaaac

SEQ ID NO: 19091 - DNA, 400 bp, Glycine max
  Clone ID: LIB3049-029-Q1-E1-H7
gagcccaaaatattttcatagcattttcagaggaaaatggcgggtacggtttcgacttgtttcttcttcgtgtttcttctttctctccttcttccttttcagatctccgctgaggaatcctcggagaaggagttcgtactcacattggatcactctaactttcacgacactgtcggcaagcacgatttcatcgtcgtcgagttctacgccccatggtgtggtcactgtaagaagcttgctccggagtatgagaaagctgcttctatcttgagtagtcatgatcctcctattgttttggctaaagtagatgccaatgacgagaagaacaaagacctttgcacacaatatgatgttaagggattcccaacaattaatattctgagaaatgggggaaagaatg

SEQ ID NO: 19092 - DNA, 391 bp, Glycine max
  Clone ID: LIB3049-029-Q1-E1-H8
ggtgacagttccattcattttcggagcgcttttgttattgcgcacataaaaaattcgcagcggcaccactttgcttcaacctctaccctttcacgacactcgaagcccccgctggccaggactcgatgggaaaggagagccaaacgtccgctatggaaatcgacgctccaaaatcgatgaattccgatctgatcgttccaaaattctccatcaacgtgctgcagctcttaaaatctgcgcaaatgcagcatggcttgcgtcatggagactacactcgctataggaggtattgcacagctcgtttgaggaggttatataaatcctttgaagtttaccaatggtcttggcaaatatgcaaaaagggccttaactgagtctactgtcaccgaag

SEQ ID NO: 19093 - DNA, 389 bp, Glycine max
  unsure (1)..(389): unsure at all n locations
  Clone ID: LIB3049-029-Q1-E1-H9
ggtacctgtggagcaatagcagcagaacagagagagcaaaaccctagagcatccatcacaagcagaggaagaagatggtgaagttcctgaagcctaacaaggcagtgatcgtcctgcagggccgctacgccgggcgcaaggcggtgatcgtgaggaccttcgacgagggaaccagggagcgcccctacggccactgcctcgtcgccggaataaagaagtacccaagcaaggtcatcaagaaggactccgcgaagaagaccgcgaagaaatctaaggttaaggccttcgtgaagctcgtgaactaccagcacctcatgcncacgcgctacacgctcgacgtggatctaaaggacgctgttacccccgatgttctagccaccaaggacaag

SEQ ID NO: 19094 - DNA, 279 bp, Glycine max
  Clone ID: LIB3049-030-Q1-E1-A1
gatatcagaagctcagacctagggatttcggccgtttgctccccaaaaaggaaagaagcagattctgtcctttgaaatcaacaagaaaagatgtcaggtgaagaggtagctgttgcagttgaggtacctgctacttcaattccaggtgagccaatggacatcatgactgctctacagcttgtgctgagaaaatctctggcctatggtggtcttgcacgaagtcttcatgaaggtgccaaggtgatcgagaagcatgctgcacagctctgtgttctaaca

SEQ ID NO: 19095 - DNA, 251 bp, Glycine max
  Clone ID: LIB3049-030-Q1-E1-A10
gatcctgaaacggttcgcagagaggcagcataacgctaaagccctaaacccccatattgagctttctccctctctctccgtcttcgatggcaacatctcttctgaaaactccgctcaatgtgttcaacagacaccagaatcacgtcgcattcttctccaatggcacaagtgcaagaagcagtgctccaatttcgcagaagaggagatcgcgtccaatccccgtagtgtcaatggcattcacaacggttcaa

SEQ ID NO: 19096 - DNA, 306 bp, Glycine max
  Clone ID: LIB3049-030-Q1-E1-A11
ggtcccgacttcccgggaacgaaccatccgtccaaccgtcagcccaaacctctctttatggtgccaacaattccaaacaaggggggaaatgacccccggacaattaacctttaataaaattcccaccggttttttggtttgtattttcaatttgtttcccggggctccctcttatgtcaccgctggctcaaagtctccacctcaaaatgccttttcacttatgttttcataagataactttcatctattttttctcgcttcgattcctcgtcccttggagctcataaccatgataatgtcaaaatt

SEQ ID NO: 19097 - DNA, 251 bp, Glycine max
  Clone ID: LIB3049-030-Q1-E1-A12
gagctaaagaatcgtcatgcacagggtgagataaatgctggaataaatgtaaggaaggggcacattaccaacatcttggaggagaatgtggtgcagcccctgcttgtgagcaccagtgcgatcaccttggcgacagagtgtgtgcggatgattttgaagattgatgatattgtaactgtgatgtacagttgattgaacaatgacgaacttggagagaaactgaatcatccattatcctctttttttttttt

SEQ ID NO: 19098 - DNA, 253 bp, Glycine max
  Clone ID: LIB3049-030-Q1-E1-A2
gagagaaaggcaccgcaacacaaaagcaaccaattcgctctctctctctgatttcctattcctttatatcagtttcctcaccttctcactttttgaacgagacacagtgaggaaactgaacccttttgtttgttttttcagctgaaaattcagaccaatatatattttgagtattttttttcctttgatttcgtggaaagttattatcacagaatctgatggttttgtagacagaacttcaggtttaacaatg

SEQ ID NO: 19099 - DNA, 276 bp, Glycine max
  Clone ID: LIB3049-030-Q1-E1-A3
ggccgtcgcacggtgagactcgcaccaacaccagcacttcaaagaagacagaatcaagcagaacttggagttggagagagagaattccgaccctaattgtaaaatggaggacgagacagagactatggtggagaagagggagataatcaacaacgtaatgtgtcttttgacagaccctgatggaactcctttgggtgctcctatgtgcctacctcagaatgctggtcctcaacacctcatccagattgttaataagcttctaaacaatgaggagaa

SEQ ID NO: 19100 - DNA, 276 bp, Glycine max
  Clone ID: LIB3049-030-Q1-E1-A4
ggagagaaagtgagagagaattacagagcattttccaacacgattacacgaccgaatcaaacccctctttctctccgaagctgcttttaatatcgtactggccttcgattgttctcctctttaatacatactgttctctcttcgatttgagggaacagtacaagagtctgagcatcggttaacccaactgcacatgttttaaactgccgtcatggtatcatcgtggtgttgcgggaaattgtggacaaatgtgcccgttgtggctgtaaattgtgg

SEQ ID NO: 19101 - DNA, 277 bp, Glycine max
  Clone ID: LIB3049-030-Q1-E1-A5
gaagctcaagtcaagaaagaggggaaagatgaaaagcttgatggcgatgctgcattgaacaaatttttccgcgaaatatatcaagatgcagatgaggatacaagaagagcaatgaaaaagtcatttgttgagtctaatgggacagttctgtctacaaactggaaagaagtgggaacaaagaaggtagagggaagtcctcctgatggcatggagttgaagaaatgggaatattaagacattttctggatcagtgttgcatatatttttatgtgggatt

SEQ ID NO: 19102 - DNA, 275 bp, Glycine max
  Clone ID: LIB3049-030-Q1-E1-A6
gacacacactgaaacaaggcttttcagtttttactgcgtttccgttggcttcgttatgccactgagagctcagattatgactaaagataattatttattggattagacattcacaatttgtgtcaaactggactgatttcccattatcactactggccaagaatgagcttgctttcaagaatgaggcattatttacccaatggtttatgtagacaacctcttcatccaacagtaatgcggcttaactctagtaacttaaatgtattttcaagaca

SEQ ID NO: 19103 - DNA, 272 bp, Glycine max
  Clone ID: LIB3049-030-Q1-E1-A7
gacacacactgaaacgaggcttttcagtttttactgcgtttccgttggcttcgttatgccactgagagctcagattatgactaaggataattatttattggattagacattcacaatttgtgtcaaactggactgatttcccattatcactactggccaagaatgagcttgctttcaagaataaggcattatttacccaatggtttatgtagacaacctcttcatccaacagtagtgcggcttaacgctagtaacttaaatgtattttcaag

SEQ ID NO: 19104 - DNA, 277 bp, Glycine max
  Clone ID: LIB3049-030-Q1-E1-A8
gatccaactctctaaacaacacattaacctttctcattccccatctcctcaccttattcagccactgctaatttctagggttccgaaatggacgctggcggaaagatcaagaagggcgccggaggaagaaagggcggcggccctaagaagaagccggtttcaaggtccgtcaaggccggtctccaattccccgtcggaagaattggccgttatttgaagaaaggaaggtacgcccagcgtgtcggtaccggtgctcccgtttacttggccgcagttc

SEQ ID NO: 19105 - DNA, 237 bp, Glycine max
  Clone ID: LIB3049-030-Q1-E1-A9
accgagggggggagacgcaaggggtggccaagcgtcccaggagagtatcggcaagatgcaggcacggcagagttaccggaatttatggcatatcgatctcatgagatccattcaggccgatactccttagtgttgcctcacgttgtggtgtgcaccacgtgtgtcgtaccttcatcgcaaacgaactctcgatgacgatctgtcatcgtacatacgttgtcccggggacatgtcacc

SEQ ID NO: 19106 - DNA, 238 bp, Glycine max
  Clone ID: LIB3049-030-Q1-E1-B10
gcggtcacttggccagaacccaactgaggcagagctgcaggacatgataaatgaggttgatgctgatgggaatggtaccattgatttcccagaattcctgaatctcatggctcgcaagatgaaagacactgattcagaggaggagctgaaggaggctttccgcgtgtttgacaaggatcagaatggcttcatctctgcagcggagctccgccatgtgatgaccaatctcggtgagaag

SEQ ID NO: 19107 - DNA, 242 bp, Glycine max
  Clone ID: LIB3049-030-Q1-E1-B11
aaaagggaaggccccaggccaataccaaatggaatcaccccatccaaggatgaaatttgacgccgtcaattctcccgcggcttccgttctcgtttccgccaaagatggcactgcttttgctcattgcgacaattgcaagaacaatgtgccggttgcactcatcgacatgcacagttgcaaccttgaagctaaaattaaaatgaacctagacgctcaagttgtggaacaggctgcttaagcta

SEQ ID NO: 19108 - DNA, 279 bp, Glycine max
  Clone ID: LIB3049-030-Q1-E1-B12
gatatggatgaaagtaaaagggctgtacctacctccaaagggcaagcacttgctgatgagtatggtatcaagttctttgaaactagtgcaaaaaccaacatgaacgtggaagaggtcttcttttcaatagcaagagatattaagcaaaggcttgcagacacagattcaagagctgagcctcagactatcaagattaaccaacctgaccaggcaaccagtggtggtcaacctgcgcaaaagtcggcttgctgtggttcatgaaaagaatcagtatctgta

SEQ ID NO: 19109 - DNA, 277 bp, Glycine max
  Clone ID: LIB3049-030-Q1-E1-B3
ggagcaagagtgaagagcgaagagaatggctcccaagggtttaatctttttggctgtgttatgcttctcagcactgtcactgagtcgttgtcttgcggaggataatggacttgttatgaacttctacaaggaatcatgccctcaggctgaagacatcatcaaagaacaagtcaagcttctctacaagcgccacaagaacactgctttctcctggctcagaaacatcttccatgactgtgctgttcagagttgtgatgcttcactgttgctggactcc

SEQ ID NO: 19110 - DNA, 214 bp, Glycine max
  Clone ID: LIB3049-030-Q1-E1-B4
agccaaagcccaatccaacccaactcaacctccaaacacaaaaaccttccttcaaaaccaagcaattcattcccaataataatgtctcaaaccctcggttccgatgagccaccccaaaccaccgattcccacaccccctccctcctccacctctccttcaaccaggactccggttgcttcgccgccgccaccgaccgcggcttccgcatctata

SEQ ID NO: 19111 - DNA, 273 bp, Glycine max
  Clone ID: LIB3049-030-Q1-E1-B5
gacacacactgaaacgaggcttttcagtttttactgcgtttccgttggcttcgttatgccactgagagctcagattatgactaaggataattatttattggattagacattcacaatttgtgtcaaactggactgatttcccattatcactactggccaagaatgagcttgctttcaagaataaggcattatttacccaatggtttatgtagacaacctcttcatccaacagtagtgcggcttaacgctagtaacttaaatgtattttcaaga

SEQ ID NO: 19112 - DNA, 264 bp, Glycine max
  Clone ID: LIB3049-030-Q1-E1-B6
ggaacctttgcattctattcattcaagattcagcaagtgcgttttggaagcagagaccgaaatacttcgagatggcccgtacaaagcaaactgctcgtaagtcaactggaggaaaagctcccaggaagcagcttgcaaccaaggctgcacgtaagtctgcaccaacaactggtggtgtgaagaagcctcatcgttatcgccctggaactgttgctcttcgtgagattaggaaataccagaagagcactgagctcctaatcagga

SEQ ID NO: 19113 - DNA, 274 bp, Glycine max
  Clone ID: LIB3049-030-Q1-E1-B7
gacacttgattagctgaggaggaagagagaaaaaccatggcaataacactcaacaatggcttcaagatgcctatcattggattgggcgtgtggcgcatggaaggaaacgaaatcagggacctaattctcaattccatcaaaattggttatcgccattttgattgtgctgctgactacaaaaacgaagcataagttggagatgcgcttaaggaggcttttgatagtggccttgtgaagagagaggatctcttcattaccaccaagctttggaatt

SEQ ID NO: 19114 - DNA, 277 bp, Glycine max
  Clone ID: LIB3049-030-Q1-E1-B8
ggccgaatgtgtctctccgcagcagccacacttcttcgccgtttcagctgaagagccatccgcaggtaagcaatggttaagcataataatgttatccccaatgggcacttccggaaacactggcaaaactatgtgaagacttggtttaatcaaccagcccgaaagaccagaagacggttggctcggcagaagaaggctgtcaagattttccccaggcctactgctggatctctcaggcctattgttcatggccagactctgaaatacaacatgaaag

SEQ ID NO: 19115 - DNA, 237 bp, Glycine max
  Clone ID: LIB3049-030-Q1-E1-B9
aaggaaaggttaactaagaagcaatacttcaatggccacccttgttgttcataaccaaacttcttctgctcaagatgctgaggctctccaacaggctttcaaaggatggggggctgatgacaaggccattatagcaatactgggtcacagaaatgttcatcagaggcaagaaatcagaaaagcttatgaggagatttaccaagaggatctcatcaaacgccttgagtccgagatctc

SEQ ID NO: 19116 - DNA, 255 bp, Glycine max
  Clone ID: LIB3049-030-Q1-E1-C1
gagacaaagttttgttgcaaagcaaaaactactacgaggagctttcctccatacgaatcaaaggaggagagagagagagagagagagaggagacacagacacaaaggaaacggaaaaagcaacacacaaaaaaaaagaggtctgtgcctcctcttatatgtaatagctagtttccgagacaagaaaaaaaaataaaagtaaaaagagaacatggattatgaaaacaacagttggatttgggagggggtaaactac

SEQ ID NO: 19117 - DNA, 251 bp, Glycine max
  Clone ID: LIB3049-030-Q1-E1-C10
catattaataagctttttatcaaccatccagacaggttcaggcagtatggattgtgggataggtattcagaattgtatcctgatgcatatttggtttacacaattggtgttagtgactatacgaaggattggttttatgcacaggctccgatgaaaaaagtggataacactcttcaaggaacaacttggcaaatcaagttcgaaatctgtaatgttgttaaaggaagtacatacaaactgagagttgcaat

SEQ ID NO: 19118 - DNA, 282 bp, Glycine max
  Clone ID: LIB3049-030-Q1-E1-C11
gccttcgtccaagcgttcgttacggtgccaaaagaacacaaaaagggggttcaattgtgtgattgtttgttgttgtaactcgttcttcttcttttgttgtttgtgtgtttgttttttctctcacctgaaaatgtcttgctgcggtggtaactgtggttgcggaagctcctgcaagtgcggcaacggctgcggaggctgcaagatgtacccagacttgagctacactgagtcaaccaccaccgagaccttggtcatgggagtggcacctgttaaggctcaatt

SEQ ID NO: 19119 - DNA, 254 bp, Glycine max
  Clone ID: LIB3049-030-Q1-E1-C12
ggcactcagtagagaattaaataaaatcaagaaagcatgcatatgatgaagaaggtgtgtgggtttgcaatagtggtgatggcagcactttttctggtggggatgagtcccatggcagaggctgtgacttgtagccctgtggagttgagtccctgtttgggggcaatcacgtcctcttcaccaccatcgacaacttgttgccagaaggtgagggaacaaaggccatgcctctgtggttacctcaaaaaccctat

SEQ ID NO: 19120 - DNA, 266 bp, Glycine max
  Clone ID: LIB3049-030-Q1-E1-C2
ggagagtgtaaggttttgcatttcatttgacgaagagtgagagagtcttatctgtcgtctctgatctctgatcgcatcttcattccgaaaatggctgtttcggctatcactggagcgaggctaactctagggatgtctctttcctcttccacgcgatcacgaaccgtcgcaatggccgtatctatcgaccccaagaccgataacaaactcactcttaccaagtccgaggaagctttcgctgcggccaaggagctgatgcctggagg

SEQ ID NO: 19121 - DNA, 265 bp, Glycine max
  Clone ID: LIB3049-030-Q1-E1-C3
ggagagagagagagagagagagagagagagagagatagatggtgtctctgaaacttcagaagcggcttgccgctagcgttctcaagtgtggtagaggcaaagtttggcttgaccctaatgaggtcaatgaaatctccatggctaattctcgacaaaacataaggaaattggttaaggatggtttcattatcaggaagccaactaagattcattcccgttcccgtgctcgcagaatgaaggaggccaagaggaagggacgtcactc

SEQ ID NO: 19122 - DNA, 278 bp, Glycine max
  Clone ID: LIB3049-030-Q1-E1-C4
gaacagagaaaactttcaatttctggttttctgaatttcggatggttgactctaattttaggagctggaaaaggtactaaatctaaagttggacgaaatgtggatccaaggattcagtttttggatcaaaggtttctctttgctggccttaatatctgtaatttccgctctggaacccggactgggatcgacccgcgtcgtccttcagacaaagtatggagatattgaatttggtttctatccaactgttgcacctaaaactgtggaccacatttata

SEQ ID NO: 19123 - DNA, 258 bp, Glycine max
  Clone ID: LIB3049-030-Q1-E1-C5
gacgttcacattcaggaatcgttttcttcagaaaatttgccatcgttgagggaagcgcgagagccttcgttgttcaagatgagagctaagtggaagaagaagcgcatgaggaggttgaagaggaagcgccgaaagatgagacaaagatctaagtaggtgcttgaacaaggagtggagatgatgtgcttttccatctgctaccagcttcatgacattttatgctgtcatggctcttatgatgatcttgaggtctagtgg

SEQ ID NO: 19124 - DNA, 278 bp, Glycine max
  Clone ID: LIB3049-030-Q1-E1-C6
ggcagtttcaggttttcttttccttcagtttcccgatcaacaaataacacgtttcactttctgcactacgttctcacttcgatatggctcgtacgaaccaaatcgctcgcaagtccaacggtggcgaggcgccaggtaagcagctcgccaccaaggccgctcggaagtctgctccggcgacgggaggagtgaataagccccaccgcttcaggccgggaaccgtggcgctgagggaaatcagaaagtaccagaagagcatgcaagcttctcatcaagaa

SEQ ID NO: 19125 - DNA, 273 bp, Glycine max
  Clone ID: LIB3049-030-Q1-E1-C7
gactcgcagttgtattgttgaacaagggtttctctgtctgcttcttcactttctctcgtttcaatcgaaaccaaaacaaaaacatgggcagaaaattcttcgtcggtggcaactggaaatgcaatgggaccactggggaggtaaagaagattgttactactttgaatgaggctaaagtccctggagaagatgtcgtacaagttgttgtgagccctccttttgtgttccttcctgttgtaaaaagtttgctgcgccctgatttccatgtttcgg

SEQ ID NO: 19126 - DNA, 278 bp, Glycine max
  Clone ID: LIB3049-030-Q1-E1-C8
gagagggaaggggattagatagggaggatgaggggcggtgacgagcgatcgatcgggattcgaaagaagggaagcggagtgagacagtggctggtcctgtacggcagaggagagacggaggtggtggacgccgcgaagcacgccatcatgaggaggacgggactcccctctcgtgacctgcctatattggaccctctcttgtcatacccttctacccttctgggtcttcatacggccatcgtcatcaacttggagcacatcagggccatcatcaccgc

SEQ ID NO: 19127 - DNA, 284 bp, Glycine max
  Clone ID: LIB3049-030-Q1-E1-C9
cttcggccaagccttcgttccggttccaaaaggacaacataagggggtgactgtggactgagaaaaacgacgacgaattgcgattcttcgccggcaccgctaacaaccaagaacgaaggagttgcatgcaatgctgcaaagagaatgaataggtgaagtgtcttgctttgtaaaacattgattgatttggattgggtgtttgtaaaggcaattcaaaattcagcgaccgggttcagggggtgacttgccccaaggaggtgagtacaaaccttcttcatcttttc

SEQ ID NO: 19128 - DNA, 278 bp, Glycine max
  Clone ID: LIB3049-030-Q1-E1-D1
ggagcaagagaagagaaagaggagcacataataaccctcaaactccatttcactcacagaaaaatagagatatagagagagaaagtgctgcagaatacacacatacacaccacttcttcaagagagagaggtgtgtgaaggaaaataagaactgaaagaaaaattttgcaaaggaagatatgaaactttgcaaatttaacaactgagaaagaagatctgtgatttctctctctctttttgttgttgttgttgtttgcagagaaaatcacacaaaagca

SEQ ID NO: 19129 - DNA, 252 bp, Glycine max
  Clone ID: LIB3049-030-Q1-E1-D10
ggccctttcgcctacgcagagagaaattgagtttctgagataaccacttttctctttgattcatcaatggcaaccgcgaggaccgtgaaggatgtttcgcctcacgatttcgtgaaggcttacgcctcccatctcaagcgttccggcaagatggagcttcctgagtggactgatattgtaaaaacagcaaaatttaaggaattggctccatatgatcctgactggtattatgttagggctgcctcaatggca

SEQ ID NO: 19130 - DNA, 243 bp, Glycine max
  Clone ID: LIB3049-030-Q1-E1-D12
gagggttttgtgctgttgtcgctgctcatcctccataacctccgagctctacaccgaagaacgaagccatggggaagacacatggaatgggagctgctcgcaagctcaagtctcaccgcaggaggcaaaggtgggctgataagtcatacaagaaatcccatcttgggaatgaatggaagaaaccttttgccggttcatcccatgccaagggaattgtccttgaaaagataggtattgaagcta

SEQ ID NO: 19131 - DNA, 279 bp, Glycine max
  Clone ID: LIB3049-030-Q1-E1-D2
gggaacaacacgtagtattatttcattgatttctccctcttcgctctctctcagtgaccagagacagatgatgatggagatggcgaagcgaaacgctgtcgttgcggcactcgcggcgttggtgctactcgcggcgagtgtggcggtggatgctcaggagaactcggacgtgaagacgctggtgaagtacaagcacgggaagaagtactgcgacataggatgggaatgtaagggctggtcaatttactgttgtaacctcaccattaccgattatttcca

SEQ ID NO: 19132 - DNA, 278 bp, Glycine max
  Clone ID: LIB3049-030-Q1-E1-D3
ggcgagagaagttattagggtttttgagtgcggcggtccaaacactcttctctgcagcttttgcctacaactcccttcaccatggctgaacaaaccgagaaagcttttctgaagcaaccaaaagtgtttctcagcacaaagaagactgggaagggaaagagacctggaaaaggtgggaaccgcttttggaagtccattgggcttggatttaagactcccagggaagccatcgaaggaacctatattgacaagaagtaccccttcactggcaatgtttc

SEQ ID NO: 19133 - DNA, 264 bp, Glycine max
  Clone ID: LIB3049-030-Q1-E1-D4
gttctagtgtgtgattgtttgttgttgtaactcgttcttcttcttttgttgttctgtgtttgtgtttgttttttctctcacctgaaaatgtcttgctgcggtggtaactgtggttgcggaagctcctgcaagtgcggcaacggctgcggaggctgcaaggtgtacccagacttgagctacactgagtcaaccaccaccgagaccttggtcatgggagtggcacctgttaaggctcaatttgagggtgctgaaatgggtgtgccc

SEQ ID NO: 19134 - DNA, 275 bp, Glycine max
  Clone ID: LIB3049-030-Q1-E1-D5
gatacaaagcctaacgcaaaaccctagttttgtcttgcaggcgaagagatggccaccgttccagggcagctcgtgtgggagatcgtcaagaaaaacaattccttcttggtcaagcagtttggaaggggcacccagagcgtcgaattcagcagagagagcaacaatctctacaacctcaattcgttcaagtactctggtttggcaaacaagaaaactgttactgttcagcctgagggcaaagatcaggctgtgttgttggctacaaccaagacaaa

SEQ ID NO: 19135 - DNA, 268 bp, Glycine max
  Clone ID: LIB3049-030-Q1-E1-D6
ggcacgtgtcatacgttgtgtttttcggggttccgtttctactcctacattaccccagtctcgtgaatgtcccagaagcacataatattttcatagcattttcagatgaaaatggcgggtacggtttcgacttgtttcttcttcgtgttacttctatctctccttcttccttttcagatccccgctgatgaatcgtcggagaaggagttcgtactcacattggatcactcgaagtttcacgacactgtcagcaagcaggatttcatcg

SEQ ID NO: 19136 - DNA, 274 bp, Glycine max
  Clone ID: LIB3049-030-Q1-E1-D7
ggccgtttctagtgcgattccatatttccatccattttcgtctccgtcatctttcttttcccctgaaactgaaagtgaagacagcaacaacaatgtcttcttcatcttcttcgttcacgagtctccacatcacggcctagacgcgatagtgaacgtcaactccctcttcagcctcgccgtcttcatcggcctaacctggaaccccaacgacccttccaacagcctcaactccgatccggcgtgtgcccccaccgccgccatcgccgagaacctc

SEQ ID NO: 19137 - DNA, 254 bp, Glycine max
  Clone ID: LIB3049-030-Q1-E1-D8
gatctacttcaccaaattgacatgcgagacaatcattacactgattggatggaatatcatgaggaatggattaatatctggaaaaacaaacacaacgatattttagatgggcaatgggttgaaggaatagtgacacatacaccaacatacatggaatggtatagaaaaaacactattttgttcttgtctgttgaacaacagctacatgatccatgcacaacaattatacaaaatgatgcagggtcaggtgttga

SEQ ID NO: 19138 - DNA, 248 bp, Glycine max
  Clone ID: LIB3049-030-Q1-E1-D9
ggccctttcgcctacgcagagagaaattgagtttctgagataaccacttttctctttgattcatcaatggcaaccgcgaggaccgtgaaggatgtttcgcctcacgatttcgtgaaagcttacacctcccatctcaagcgtttcgagaagatggagacttccgaatggggcagcattttgaagacatagaagatatactgtatagataccatattcctacagatagattgtggtctagcctctgtaaa

SEQ ID NO: 19139 - DNA, 275 bp, Glycine max
  Clone ID: LIB3049-030-Q1-E1-E1
gaaactcaattttacaaaaacctggaagaaagacacagccattgtttacttttcattgattgagccaaagctttgtattttctgcgataattttccattgggtggaagaaagtctcaacctttattcgaaagagcaaggatctgagttgagttgagtgatcatgtgtggtggtgcgattatctccgacttcataccggcaggtcccgccagcggggcgcggcgcgtgaccgccgacatcctgtggccgagtttgaggaagcgcttctcgaagccg

SEQ ID NO: 19140 - DNA, 247 bp, Glycine max
  Clone ID: LIB3049-030-Q1-E1-E11
gcttcgttcctttgcctctttcgcttttgcttcctaagtttttttttttgtgtcgatggcgggaaaaggagggaaggggcttgtggccggaaaaaccacggcagcgaacaaggacaaagacgaggataagaagaggcccgtctctcgttcatcccgtgctgggatccagtttcctgtgggacgtatccacaggcagttgaagcaaagggtgcaagcaaatggacgtgtgggggctactgctgctgtg

SEQ ID NO: 19141 - DNA, 242 bp, Glycine max
  Clone ID: LIB3049-030-Q1-E1-E12
gaccgaagaaaacatcactgcgccgcgctgccacaccaaataaacacaaacatggacgcatcaaaactcaatcaattgaagcatttcatcgaacagtgcaagtccaacccttccctcctcgctgatccttcactctccttcttccgcgactatcttcaaagtctcggcgcgaaacttcctgagtctgcttattccgaatcgacgggcgtggagagggatgaggacatagaggatcttacgga

SEQ ID NO: 19142 - DNA, 269 bp, Glycine max
  Clone ID: LIB3049-030-Q1-E1-E2
ggagctattcccattttctggaactacaactatggtgctgttggagaagctttgaagatcgacctactcagccatccagaatacatagagcagaatgccacccttgctttccaggctgctatttggagatggatgacaccaatgaaaaagtcacagccctctgcgcatgatgcctttgtcggcaactggaagcctagcaagaatgatactatggagaatcgtcttcctggatttggcactacaatgaacattctctatggggatggtgt

SEQ ID NO: 19143 - DNA, 276 bp, Glycine max
  Clone ID: LIB3049-030-Q1-E1-E3
ggcacgccttgttcggtgaagtgagtagtgagtgctgaatcgaatcgaatcgattctccgaacatggcggcgagcgatcgcacagtgttgcaattctcttcatcatcttcttcttcttcgcagatcttgtccgcgaaggtccaccctctggtcatcttcaacatctgcgattgctatgttcgacgccctgaccaagccgaccgcgtcatcggaaccctactcggctccgtccttcccgacggaaccgtcgatatccgaaattcctatgctgttccc

SEQ ID NO: 19144 - DNA, 321 bp, Glycine max
  Clone ID: LIB3049-030-Q1-E1-E4
gtccaaccaagccttcgttccggcgccaaaaaaccaccaaaaggggaacccaaattgtagccactatttggtttaggaaatgggaacccttgggagagcgatctacaacgttggtaactggattcgacggactggacaggccattcatcgtctcggttccctcctccagtgcggttactacgtctaacagcacctgtctacgcatcgaactctgatggacatatttgataaggttcctgtcgttgatgaggatgtatttgttgcgcctactgcctccgtcattggagacgttcaacttgcaagaggatcatccatttggta

SEQ ID NO: 19145 - DNA, 268 bp, Glycine max
  Clone ID: LIB3049-030-Q1-E1-E5
gaagacatatatgatacccaaataggtattcagacaatgcaaaatgagcttggggtattgcaccacaaggtctacgccacgcaagtttgggatctcattcactgtgccacaccgtgtcactgcagagatcaatggctataagatagtcatagggaagcaccctttgaggatcactagaattccctcaagaggaccaagtcagtttcataggatcatgcaagaggttgacaaaaggccatcatccaatttgactctgacacatcacaaa

SEQ ID NO: 19146 - DNA, 274 bp, Glycine max
  Clone ID: LIB3049-030-Q1-E1-E6
ggaagtgtatttggtcactgacctatcttggtagagatttgaagtttaaaccttcaaattaatcaaaccattttaatttgcctatagattctgagtcactgctgctatggcgctacgcgtacttcttgtgttggggatgttgctgatgttgtgccttgttaaggtttcatctgatccaaagatagaagaagaaatactggaagcagaagaagaactgcagtttcccgataacgagccacttatcgtgagagacgcgaacagaaggctaatgcaa

SEQ ID NO: 19147 - DNA, 261 bp, Glycine max
  Clone ID: LIB3049-030-Q1-E1-E7
gcaccttcgttagatttccccctcaacattttttgtttttctctccatcccaattatcgccacctcctctttcttcaaatttcaatctcagaggatgggtggtgaggaattgtgtttgatggagaactcagggaaagggaagaggctgtggaagaaggtgaagtaccagctggtggagtaccactccttgcccggttatttgagagacaacgagtacattctcggtcactatcgatccgaatggcccatcaggcatgtttt

SEQ ID NO: 19148 - DNA, 267 bp, Glycine max
  Clone ID: LIB3049-030-Q1-E1-E8
ggaacctttgcattctattcattcaagattcagcaagtgcgttttggaagcagagaccgaaatacttcgagatggcccgtacaaagcaaactgctcgtaagtcaactggaggaaaagctcccaggaagcagcttgcaaccaaggctgcacgtaagtctgcaccaacaactggtggtgtgaagaagcctcatcgttatcgccctggaactgttgctcttcgtgagattaggaaataccagaagagcactgagctcctaatcaggaagc

SEQ ID NO: 19149 - DNA, 235 bp, Glycine max
  Clone ID: LIB3049-030-Q1-E1-E9
ggcacaagtttgttgagatagctagaagcaataagatgaaaatgaaagtgcttgttttgtttgttgctacagttttggtagcatatgaatgccatggctcagactaccagaagttccctctccaaatgaaaactgggtttggtgggcaatacagcaatgaggtggcatgtgccagttggaggcttggcgtggaagcaaacaacgtagtcaagtggcaaactgttcctgcagcttg

SEQ ID NO: 19150 - DNA, 264 bp, Glycine max
  Clone ID: LIB3049-030-Q1-E1-F1
ggggaagcattggtggctagctaagcgaagctaaaaccaaactcttcagcagtttgtttttgcttagcttcttcttctgcttttgctttctccaccaccacaaccaccatgtattctgccactgcctccaacactttcttccttctctcttgtttccttctcttctgtctcctctcagctccttcctgtgtttccatgttctctggtattgagacaggagatttagaaaaaagagatgatttgtttccacagattctaagagac

SEQ ID NO: 19151 - DNA, 245 bp, Glycine max
  Clone ID: LIB3049-030-Q1-E1-F10
gatcgcacatcaattattctttcgcaccttcggaaatcaattttctgtcttctctgcgtcttcttcctctatcaatcgttttccatggctcgtaccaagcaaaccgctcgcaaatccaccggtggaaaggctcctaagaagcaactcgccaccaaggctgcaaggaaatctgcaccgacaaccggtggagtcaagaagcctcatcgctatcgccctggaactgttgctcttcgtgagatccgaaa

SEQ ID NO: 19152 - DNA, 248 bp, Glycine max
  Clone ID: LIB3049-030-Q1-E1-F11
ggaccttcccttgatttcatttcgtttgcaattgaatttcaatttccctaggggcttaatatctccccgcatttgtgcctagcctcattattatcatactagatattcattccccttatctttctctcttctctctcgccgcccaaaccctaactccctaccctattccgctttctctcatccatcatgaaaggaggaaagtccaagaccgaatctaagagagccgatgccaaacttgctgtgaataa

SEQ ID NO: 19153 - DNA, 243 bp, Glycine max
  unsure (1)..(243): unsure at all n locations
  Clone ID: LIB3049-030-Q1-E1-F12
gaatgaagccagcgagtgagcgagcgagcgatgtanggttttcgttgttcccccgtctttgaattcagttcgcgacgatggggtccatccccgatccaggcgagttgagcgagttgactcagccgagcttcgacgagttccagcgccaaacttccctcatgaccagctgcaccctcctctggaaggagctctccggccacttctcctccctcgagcaagacctcaaccacaaatccgaagccc

SEQ ID NO: 19154 - DNA, 277 bp, Glycine max
  Clone ID: LIB3049-030-Q1-E1-F2
gagattaaattgcatttctgttactctttctttattcgtcaatagaagaagaagatcgaacgaaggctccttccgttattccattcagcgattccatggtggcgagaggcgtgccggcaatggcggcggtggccgttgccgcccttgacttgacggaatcctccaactggtggcgggacatcaaccgctccccgctctggcaggatcgcattttccacctcctcgccatcctctacggaatcgtcgccgccgtcgctctcgttcaattagtgcgaat

SEQ ID NO: 19155 - DNA, 276 bp, Glycine max
  Clone ID: LIB3049-030-Q1-E1-F3
ggtggctgaagaaggtgaaaagggggcaagtttcactcttgaagggttttgaggggtgtcaacttgtgtttggagactccgaggttgagtttgaaggtgcattctttgaagggtgtttttgttatgggttctagttgtggttgtggtgtaactcttgttcttgttttctgcttatggggtgtgttgatctccctctcttctgctgctaggctcagtgcttcaaggcagaagcttgaggttactaagcatttgaatcgcctgaacaagcctcctgtt

SEQ ID NO: 19156 - DNA, 263 bp, Glycine max
  Clone ID: LIB3049-030-Q1-E1-F5
gaatccgaagtgggaaggcacacgcttgtttacgcaacgcaagcgattgttagttgtattcgatggactacgatttcagaagcatgtcgggcccatagcctccgatgtaccgtccgccaccgccaccgtcaccgatgtatcgtccatcaccgtatcaacagaatcctactccttcttcaggacttggcgttagggttggtataaagccggaatatacgatcacaccgccgcctcatttatcatcacttgctggagataatcca

SEQ ID NO: 19157 - DNA, 278 bp, Glycine max
  Clone ID: LIB3049-030-Q1-E1-F6
gagagtgttggggataacacgacacgaaactcatcacttagttgccatccatcttctttttttatttgcttccaccatttcccaccgatgtacacactcaacgccgattccggcacggcgccgcatccgcgccgcaacatcatgctccctcagcgtcgctccgccaatgcctgtcatctctgccgccggcagcgccagcccctgccccatgaccctcgtctccagcttcatcggctccgatgccgctgctgattgccgctccttcgcgcagctcctcg

SEQ ID NO: 19158 - DNA, 277 bp, Glycine max
  Clone ID: LIB3049-030-Q1-E1-F8
gattgcaaacttgatagctagagtgcctatggagaacatactctatcttggtggtccaaatattgcctcagaaatctacaacaaggagtatgccaatgcaagaatctgtggagctgagaaatggcggaaacctctggcgaagtttttacgacaaccacactttattgtctgggataacagtgacctcgtcacgcatgaggtcatgggtggcttgaaaaatgtctatgcaataggagctggaatggtagctgcccttaccaatgagagtgctacaagc

SEQ ID NO: 19159 - DNA, 250 bp, Glycine max
  Clone ID: LIB3049-030-Q1-E1-F9
ggagaagaagaagaagaagaagatggagaagtatcagatctggagcaggagaatagcgttggcagcgtttgcgtttgctctgctgttccaatcggcctcagcagacgacgtcgttgtgctctctgaagataacttcgagaaggaagttggtcaggacagaggagctctcgttgagttctatgctccttggtgtggacactgcaaaaagcttgctccagaatatgaaaagcttggtatcagcttcaagaaa

SEQ ID NO: 19160 - DNA, 276 bp, Glycine max
  Clone ID: LIB3049-030-Q1-E1-G1
ggccgactgtgctgtccttattattgactccaccactggtggttttgaagctggtatttctaaggatggacagacccgtgagcatgctcttcttgctttcaccctaggtgtgaagcagatgatctgttgctgtaacaagatggatgccactacccccaagtactctaaggctaggtatgatgaaatcgtgaaggaagtctcttcttacttgaagaaggttggttacaacccagacaagattccctttgttcccatctctggttttgagggtgacaa

SEQ ID NO: 19161 - DNA, 254 bp, Glycine max
  Clone ID: LIB3049-030-Q1-E1-G10
gagagtgagttgggtaattgttggagggtctatttttcagtccataaatacctgtctgctaggccaacccacttccatattttgcatcctttgtacctgagttcaaggttaacaccaaataacacatatagtgcagattcataagctttcaaccatggaggatccaaatcaagctcaagaagggtcttctcagaagaaaatgggaagagggaagattgaaatcaaacggatcgagaacaccaccaataggcaag

SEQ ID NO: 19162 - DNA, 241 bp, Glycine max
  Clone ID: LIB3049-030-Q1-E1-G11
tggggcaactaagtagagaataaaatcatatcaggagagcatgcatatgaacatgatgatgaagaaggtgtgtgggtttgcaatagtgatggtggcagtgcagcttctggtggaggtgagccccaaggcataggctgtgacttgtacccctgtggagctgagtccttgtttgggggcaataacttcctctcaaccaccatcaacaatttgttgccagaaggtgagggaacaaaggcaatgc

SEQ ID NO: 19163 - DNA, 245 bp, Glycine max
  Clone ID: LIB3049-030-Q1-E1-G12
gatagcgaagtttcatttctttggattagaaatttttcccaaagctgatcgagaagccagccaggccagaaggagttgaagaatgggaagggggaagatcgaaatcaaaagaatcgagaacacaacaaatcggcaagtgaccttctgcaagagaagaaatgggcttctgaagaaagcttatgagctgtcagtgctgtgtgatgctgaagtttccctcatcgtcttctccagccgtggccgtctcc

SEQ ID NO: 19164 - DNA, 273 bp, Glycine max
  Clone ID: LIB3049-030-Q1-E1-G2
ggagttcagtccatcataatcttaccataactaggccatcataacactcacgattctattgctcatactctacttggccatgctcctaccgcatgcgacatgagtatgagcaacctaataatgacacctagaaaaatccctacgaggtagcccccatgatcgacgagctgacgtatccctgtcgtttacaagctctacctgcattgctagggatgcttcaatacgatccaacgcacctgtcgccacttcgaatgtctggaaaccgttatggca

SEQ ID NO: 19165 - DNA, 276 bp, Glycine max
  Clone ID: LIB3049-030-Q1-E1-G3
ggagttcgcaaatgtgctacttctgtgccttgtccttagctcttctttcttggaaatctcaatggctggttctcctttctgtgactcaaagtgcgcgcagaggtgtgccaaagctggggttcaggacagatgcttgaggttttgcgggatctgctgcgagaagtgcaactgtgtcccatctgggacttacggaaacaaggacgagtgcccttgctacagggacatgaagaactccaagggcaaggacaaatgcccttgaagaatatctaatttcat

SEQ ID NO: 19166 - DNA, 278 bp, Glycine max
  Clone ID: LIB3049-030-Q1-E1-G4
gaatcctccaaattttgggttttgggaatttggaaaggacaacccttgggggttgggttctcaagatagatagacccttgggatttcgtcaccatgggtctcgtcggtcttggcaacagatcccaacagacatttcgtccaaaacagagtgctccatctggaagtaagggtgctcaacttcagaaacacatcgatgccacgttgggtagtgggaacttgagggaggctgttaaactgcctcacggtgaagatattaatgaatggctagctgtaaacac

SEQ ID NO: 19167 - DNA, 274 bp, Glycine max
  Clone ID: LIB3049-030-Q1-E1-G5
gagagctcagtagacggccactttcagtcttctgatatgaaccgtcaagatccaggtaggcatggttaccatgattcaaagcctacttattcctttacaactgatatccatggtgttcagcaccaaaatgatgcctcaagaaacaaaaatgacctctatgcattagttactcatgaacaacctcacaagttcaatggtgtacttgaatcacttaaacaagctaggatatccctacaacaggaactcaagagattgccactagtagagggtgggc

SEQ ID NO: 19168 - DNA, 277 bp, Glycine max
  Clone ID: LIB3049-030-Q1-E1-G6
gagagctcagtagacggccactttcagtcttctgatatgaaccgtcaagatccaggtaggcatggttaccatgattcaaagcctacttattcctttacaactgatatccatggtgttcagcaccaaaatgatgcctcaagaaacaaaaatgacctctatgcattagttactcatgaacaacctcacaagttcaatggtgtacttgaatcacttaaacaagctaggatatccctacaacaggaactcaagagattgccactagtagagggtgggcaca

SEQ ID NO: 19169 - DNA, 275 bp, Glycine max
  Clone ID: LIB3049-030-Q1-E1-G7
gatcgcacagcattattctttcgcaccttgcagaatcagttttctctctcaatcgtctttcatggctcgtaacaggcagaccgctcgcaaatccaccggtgggaaggctccgaagaagcaactcgccaccaaggctgcaagaagatctgcatctatcagcggtggagtcaggaagcctcatcgctatcgtcctgtaactgttgctcttcgtgacatccgaagataccaagagagcacagagcttctgatacgcaagctccactttcagcgtcttg

SEQ ID NO: 19170 - DNA, 277 bp, Glycine max
  Clone ID: LIB3049-030-Q1-E1-G8
ggagactcgaagtgtgaagcactgagcagttgaggaaatgggaacccttgggagagcgatctacagcgttggtaactggattcgagaaactggacaggccattgatcgtctcggttcccgtcttcagggcggttactacttccaagagcagctctctaggcatcgaactctgatgaacatatttgataaggctcctgttgttgacaacgatgtatttgttgcgccaagcgcctccgtcattggagacgttcaacttggaagaggatcatccatttgg

SEQ ID NO: 19171 - DNA, 237 bp, Glycine max
  Clone ID: LIB3049-030-Q1-E1-G9
gatggcaaaatcgtttctccaatttaatcaccattgtacaacccaattcccttcgtcgttttcgattaagagagcactggcacgtaccaagcaaaccgctcgcaagtccaccggaggaaaggctccgaggaagcaattggcaaccaaagccgctcgcaagtcagccccggcgaccggcggagtgaagaagccccaccgcttcaagccaggaacggtggctctgagggagattcgaaa

SEQ ID NO: 19172 - DNA, 263 bp, Glycine max
  Clone ID: LIB3049-030-Q1-E1-H1
atttgtaaatagaaatgatcagtcatggatcctgataagtgaatttctgttctctgggtttttggtggatgattatgtgcatcaaggtttgtttttcccacttgctttccgtaaatgtgaaattgggaacatgctgatccgttttatattctataattcctgtagagttttttttttcttcctgtgaaagcattaaccataatgcttggagatcacagttataaccttgatttcgtcactgaaaagttttggctgagtttcaa

SEQ ID NO: 19173 - DNA, 399 bp, Glycine max
  Clone ID: LIB3049-029-Q1-E1-A3
gactctctcacctttctcctaaaacatctcaatgggttcttcttctattacaacatcgcccgcaaccatgaccatggctgcgatcgtgctcctgttcacggtctttgccgtttcctccgccctagacatgtcgataatctcgtacgacagcgcccacgcggacaaggccgccacgttgcgcaccgaggaggagctgatgtccatgtacgagcagtggctcgtgaagcacgggaaggtgtacaacgcgctcggcgagaaggagaggcgcttccagatcttcaaggacaacctgcgattcatcgacgaccacaactccgcggaggacccaacctacaagctcggactgaaccggttccctgatctcaccaacaaggaatacagggccaagtacttgggaac

SEQ ID NO: 19174 - DNA, 341 bp, Glycine max
  Clone ID: LIB3049-027-Q1-E1-B11
ggagctggcctgggctgtgatattggggcagcgcagcaatacgtaacaagttctatcattgaggaggtttccggtctccgaaaatgaacgacgcagatgtctcgaagcaaatccagcagatggtgcggttcatccgccaggaagctgaggaaaaggccaacgagatctctgtctccgccgaagaggaattcaatatcgagaagctgcagttggtcgaagccgacaagaagaagatcaggcaagaatacgaacgcaaagagcgccaagtcgaaattcgcaagaagattgggtactcgatgcagctgaatgcttctcggattaaagttcctcaagctcaagat

SEQ ID NO: 19175 - DNA, 269 bp, Glycine max
  Clone ID: LIB3049-027-Q1-E1-B12
gattttgtttgataccgtcaataataaggttggcatagcccgtgaggtttgtaactagctggttggctacatttttatttatttatttattaatatgtaccagtggctttcttgattatctaactaggtttggatctttcgttgggttcaaaaacgtgatggtgtgggtgtgtggccacggcgaataagcttgccttgtgtgcctttggaagatatgcaatgtgaaatatgacctatctagtactattttatcttagatcgatcgttgt

SEQ ID NO: 19176 - DNA, 265 bp, Glycine max
  Clone ID: LIB3049-027-Q1-E1-B2
gataaatcatactgctctatagaaagaagccgactgtactgtagagcgacttttgagttcaaatgatgactgagtttgcagtgttgagttttgacaatcgcactggtgaggaccgaaaccatggtttagaacattttaaatatccatcgtgaaactggggaatccatgagctgtgttaatcattgcagttcgcacgacggaaattacactgtcgagaaggtgaccaaggtgcacaacctgatattcatggaccataggttcaagg

SEQ ID NO: 19177 - DNA, 355 bp, Glycine max
  Clone ID: LIB3049-027-Q1-E1-B4
ccaagccttcacccaagccttcgttacggctccaaaaaaacaaaaaaagggaaataatggaatcctgtgtaaccccaattttaaaccaaaggataataatttcaacaaaatttcctggcctttgaaaagtaccaaaaatggtcccttagaaaataacaatgctggaacgactccttacttggtgcaccatggatgcatacactttgcattcaagttttgaaatttataatgccaaaagggatgattcaaagtgtgatagccaatgtaatcgaaccatgaaaaacgatggatgctatttttataatcagttccaaggccccttggagaagatgttgttttggaatattccaaaact

SEQ ID NO: 19178 - DNA, 180 bp, Glycine max
  Clone ID: LIB3049-027-Q1-E1-B5
gaatgatgggattcttgtgtatctccattgtaaatcgaatgatcatgattttcaccaacatttgggggccgttggatagtaccaccattagtcctttagacataacattgctggcactactctttattggtgcaccatggattcacacactttgcatccatcttttgaccatttataatc

SEQ ID NO: 19179 - DNA, 265 bp, Glycine max
  Clone ID: LIB3049-027-Q1-E1-B7
cagtatactggaaatgttgatcgtggatttccagttgtcaagcttcattttgaagattctctatcagtgacagtttatcctcatgactacctgttccagtttaaagatggtatctggtgtattggctggcagaaaagtgtggcacaaacaaagaatggaaaggacatgacccttcttggagatttggtgctatcaaacaaactagtgatatatgatcttgaaaatatggccattggatggactgactacaattgcttcttccagc

SEQ ID NO: 19180 - DNA, 403 bp, Glycine max
  Clone ID: LIB3049-027-Q1-E1-B8
ggtagttccaccgagtagcaacaatgtcgaagcgaggtcgcggaggatcggcgggaaacaagttccgcatgtcgctgggtctgccggtggcggcgacggtgaactgcgccgacaacaccggcgcgaagaacctctacatcatatcagtgaaggggatcaagggtaggctgaaccggttgccgtcagcttgcgtcggagacatggttatggccaccgtcaagaagggaaagcccgatctccgtaagaaggtgctgcccgccgtcatcgtccgccagcgcaagccttggcgccgaaaggacggtgtttacatgttactctcaagataatgctggtgtaaccgtgaatcccaagggtgaaatgaaaggttctgctatcactggtccaattgggaaggagtgtgctg

SEQ ID NO: 19181 - DNA, 359 bp, Glycine max
  Clone ID: LIB3049-027-Q1-E1-B9
gattgtatatcatttacaatttcaatctctctctctctctgtctctctctctctagacttagattttgtgaatggctgaggtggaagagggacaggtcatcggcgtccacaccgttgatgagtggaagctgcaactccagaatgcaaaagactccaaaaaactgattgtggtggattttactgcttcctggtgtggtccatgccgttttatggccccagttcttgcagagattgcaaagaaaactcctgaattgatcttcctcaaagtggatgtggatgaagtgaggcctgttgctgaggaatattccattgaggccatgccaaccttcctcctcctgaaagatggcgagatcgtggac

SEQ ID NO: 19182 - DNA, 275 bp, Glycine max
  Clone ID: LIB3049-027-Q1-E1-C1
gggactaaaatcagcaacatacatattcgagactcctcctcctaagtcctaaccctaatcatcctcgggcgcagcttcgccttcttacccctccttcctctctcagcttccttctttctacgagggagagtgtcgctagcattcctccttaagcgtttatgtttaatgtttctttgtgacttggtgtttggtttctgtgatggcagatactcggagagtttgcatgcatttctgtgttttggaggaatgtatcacttcgtgtctggtggaaatgt

SEQ ID NO: 19183 - DNA, 320 bp, Glycine max
  Clone ID: LIB3049-027-Q1-E1-C10
gaatctagtggaagagtgaataagagatatcaatatattatgataatggagggatacaataagaaggttatgattgtggggatggtgttgggcatggccatgattgggatggcctatggccaatactcgttttgtcgcatgcccagcgatgggttggcggcgtgcaagccgagtgtgagtggggaccatcctgctgatccctccactgcttgttgctcagccattgccatggctgatcttaaatgcttctgccgcttcaaggattcgggccttctctctatgtatggtgttgatcccaacaagtgcatggaacgccctgt

SEQ ID NO: 19184 - DNA, 285 bp, Glycine max
  Clone ID: LIB3049-027-Q1-E1-C11
gaacaacatcactctaagtaaaagaatctcggtgttgtcatcacacctcgctagatccagcccgatcatggtctcagacaagcaagcggctcttgccgtcactccctctgatgctgatgctcctaccatatttgacaagatcatccatacagatgattccttctacagtggtttatgacgatgacaaggtgcttgccttcaaggacataactcctcaagctcctacacatacagcgtatccctcctaaaatcacagacgggttaagtggtctatccaacgctgat

SEQ ID NO: 19185 - DNA, 300 bp, Glycine max
  Clone ID: LIB3049-027-Q1-E1-C12
gatccacaacgatgagcgtaccgaaggcagtggcagcgacgatccggctcacggtgccggccggaggagctcggccggcgccaccggttggaccggcgctgggtcagtaccggctgaacctgatggcgttctgcaaggacttcaacgcccgcacccagaagtacaaggcggagacacccatggccgttacgataacggcgtacaaggacaacaccttcgagttcaccgttaagtcgccgccggtgtcgtggtacctgaagaaagccgccggcgtggaatccggtagcagccggcccggtc

SEQ ID NO: 19186 - DNA, 382 bp, Glycine max
  Clone ID: LIB3049-027-Q1-E1-C2
ggcggcataaaggaccaaccatgtcgcctagtttcgtcttcgacccgcctagcgacgaagaaatcgaacactctgaacacgaagaagaagaagaatccgaagaagaaccagagtcaggatcaggaacaggatcagaatcagagtcagaaggagaaggagaagaagaagaagggcacgaagaagcgcgggttccgaagaagaagaagaagaaaacgcagtctccatgggactttgctaaatacacggaatcagtggcggaggaacacgctcgcaggagcacaacctcggtcgacgagaaaatctccaaagcactcaaacaaggttcaaggcggctcgttgctgagcctgaccacagctccgagtccgaacctgatgaacagga

SEQ ID NO: 19187 - DNA, 319 bp, Glycine max
  Clone ID: LIB3049-027-Q1-E1-C3
caagccttcgttagggtgccaaaagaccaacgaaaggggaagccttgttcaccaattaagtctttgaaaagaaacagtaattggaaaatggcttcaaagagtgtttcagccgttgccctaattctggtctccctcaacctccttttcttctccatggttagctccaacctcctaatgacccctgcccttgtctcatcaataatatctaggaaaaagtgccccgaattacatgtttgcgccactattttgcctcctcatcataagccatatcagggttgctgccccctcatcgccggtcatattgatcctgaagccgccg

SEQ ID NO: 19188 - DNA, 176 bp, Glycine max
  Clone ID: LIB3049-027-Q1-E1-C5
ggcagcttaatcgacaaattatttctcctatattcctcttcgttcctcctagccatcaacaaatgggtcagtgggatcactattattcataaccatcggcataagagtattcgtcatgatcaggatcaagattagaatcatcttcttacggagtatgatatgtataatatgggcac

SEQ ID NO: 19189 - DNA, 396 bp, Glycine max
  Clone ID: LIB3049-027-Q1-E1-C6
tgagatcggacgattgataggggacatggtgtttgagttcgagaatggggtgcaagtagtgattcccaaggagagggttctggctaccgtggagggtggggtccactgcgtagggattgcgaactctgataaattgggtgcggccagtaacattattgggaattttcatcagcagaatctgtgggtagagtttgatctggtcaatcgcagagtgggtttcggtacggctgattgtagcagattgtctaactagaatgggggtttaacgattggatatgtgttggtgcatgtaacttgcgtgtgtcagctgtaggtaactagagaatttgtatgtagggaatatcaacgtgtcacgtgtgtgatcaggcacatgatcatgatgatgtggttgaaatc

SEQ ID NO: 19190 - DNA, 295 bp, Glycine max
  Clone ID: LIB3049-027-Q1-E1-C7
gatcaatggaaaacgagaattgcacttttgttgctcagcctattcaaagaaagcgcaaacgttatgccattcgtgatttcccagaaggatgtggctcctatggcaaaagggttgatcctaacaattttcgccaattaaatgacactattttggagttgggactgcaagatttggaagatgaagaattgataagtgctgctgaagttgttgtagcgtgtgactcctccaatgtgtcaaagttttcttctttttcagaaggggttctttgtgatggttcagaattcgcatcatctga

SEQ ID NO: 19191 - DNA, 308 bp, Glycine max
  Clone ID: LIB3049-027-Q1-E1-C8
ggttcaaagcacgccgtgtttcgctatctctcccattctctcgcatctcaatacccttttgatttgtgaaacgaaagcacacatgcttgatcaggtccaacaccctacagtcatggacaaggttgctggccagctccatctccgttctggtgtttctggtattacgagttatgaaggagcctactgccaccccacaatgtaccatagaccctcttttgggaattactcgaatgctgcattgcactaccctgtgatgccctcatgcaaagctacgatggatttgtctgctgctgcaacaactgcctccc

SEQ ID NO: 19192 - DNA, 308 bp, Glycine max
  Clone ID: LIB3049-027-Q1-E1-C9
gaaaataggaaagacacccacaagtcatcaaacttcgattgagtttcaaagagatgggtggtagtgtggtacattgtgttgatcaaggatggaacaaaagaagtttgtggcactattaatggtggtggtggtgatggcttcttctatgtggaaaggatccaaaggtcttagtctctgtaacatggatgaagatggattggaggcttgcaagccctcagtgactcagccaaacccagttgatccatcccctgattgctgcaaggctctggatggtgctgacttgaagtgcctttgctcctacgagaact

SEQ ID NO: 19193 - DNA, 333 bp, Glycine max
  Clone ID: LIB3049-027-Q1-E1-D10
gacagacagagagaaagatgcagaagagagagcagggcaagtccggcggatccgccggaggaggggcgacgccacctgcgaagagaggccgtcccttcggcagcggtaacaacagttcctctgccgctgcttcagccgcggattcggcggctccgtcaaccctccttggtccttcccttcacgttcacaactccttcgccgatcagaacaacagaagaattgtcttggctcttcaaagtggtctgaagaatgagctaacatgggctttgaatacacttacgctgctctcctttaaagaaaaggatgacatgcgcaaggatgcgactccccttg

SEQ ID NO: 19194 - DNA, 288 bp, Glycine max
  Clone ID: LIB3049-027-Q1-E1-D11
gaagagagcatgcatatgaacatgatgatgaaaacagtgtgtgggtttgcaatattgatagtggcagtgcatcttcaggtggaagtgagtccctacgcacacgctgtgacgtgtatccctgtggagctgagtccatgtttgggggcaataacctcattccaactatcatcaacaatttgttgccacaaggtgaaggaacaaatgcaatgccactgttgttacctcaaaagcccaagtccaatgccatatgccaattctcctgtctccagaaaggttgctagcccttgt

SEQ ID NO: 19195 - DNA, 272 bp, Glycine max
  Clone ID: LIB3049-027-Q1-E1-D12
ggcagtttcaaattttcttttccttcactttcccgagaaaaaaataacacttgtcactttcttcactacgttctcacttcgatatggctcgtacgaagcaaaccgctcgcaagtccaccggtggcaaggcgccacgtaagcagctcgccaccaaggccgctcggaagtccgctccggcgaccggaggagtgaagaagccccaccgcttcaggccgggaaccgtggcgctgagggaaatcagaaagtaccagaagagcaccgagcttctcatc

SEQ ID NO: 19196 - DNA, 310 bp, Glycine max
  Clone ID: LIB3049-027-Q1-E1-D2
cacaaaagggggtcctagtgtgtgattgtttgttgttgtaactcgttcttcttcttttgttgttctgtgtttgtgtgtgttttttctctcacctgaaaatgtcttgctgccgtggtaactgtggttgcggaagctcctgcaagtgcggcaacggctgcggaggctgcaagatgtacccagacttgagctacactgagtcaaccaccaccgagaccttggtcatgggagtggcacctgttaaggctcaatttgagggtgctgaaatgggtgtgcccgctgagaacgatggctgcaaatgttgaccaaactg

SEQ ID NO: 19197 - DNA, 427 bp, Glycine max
  Clone ID: LIB3049-027-Q1-E1-D4
accaagcgttaataccggtgccaaaaaaacaaaaaaaggaatttaacccacaattttttggaaaaaggaaacctcaaggaaaggattcaattaatcacaagccaaccggaaatattttccaatttagccaacataaatttgcaacaaatgttgttgaaaaatgtttggagtatggtgatgctactgatcggcagttgttaattgcggagattgttggacatgacaaacaaaatgataatttattgacaatgatgaaagaccaatttgcaaattatgtgatccagaaggtttttgagatctgttctgaaaatcagcgagcaacattactttctcgcataagacttcatgctcacgctttgaaaaaattcaacttatggaaaacacattgtggctcggtttgaacagctacttggagaagagaacaaac

SEQ ID NO: 19198 - DNA, 190 bp, Glycine max
  Clone ID: LIB3049-027-Q1-E1-D5
atgttacgcagcatgtgttggatagaggacatcctcaggaaaggagtcacattattcacatggctatctggacatacttggcaattaagccagcatatctttgcatcagctgttgttgataaatgtttggagtatcgtgatgctattgatcgggagttgtaatctgcggcgattgttgagactcacaatc

SEQ ID NO: 19199 - DNA, 402 bp, Glycine max
  Clone ID: LIB3049-027-Q1-E1-D6
aaacaaagcgagagcattccattgttgttatattgtattgtagccggagaagaagagaagagatagcggcgaagaaagaaagatgacggaggcatatataaggaagaagcccgggatggcgagcgtgaaggacatgccggttctccaggacggtccaccaccaggcgggttcgctccggtccggttcgcccggcgcatccccaacaagggccccagcgccgttgccatcttcctcactgctttcggcgctttctcttggggcatgtaccaggtcggccagggcaacaagatccgaagggcactgaaggaagaaaagtatgctgcccggcgattcatacggcctgtgctacaggctgaagaggatgagagatttgttaaagagtggcataaatatctcgagta

SEQ ID NO: 19200 - DNA, 375 bp, Glycine max
  Clone ID: LIB3049-027-Q1-E1-D7
aaacaaagcgagagcattccattgttgttatattgtattgtagccggagaagaagagaagagatagcggcgaagaaggagagatgacggaggcatatataaggaagaagcccgggatggcgagcgtgaaggacatgccggttctccaggacggtccaccaccaggcgggttcgctccggtccggttcgcccggcgcatccccaacaagggccccagcgccgttgccatcttcctcactgctttcggcgctttctcttggggcatgtaccaggtcggccagggcaacaagatccgaagggcactgaacgaagaaaagtttgctgcccggcgattcaatacggcctgtgctacaggctgaagaggatgagagatttg

SEQ ID NO: 19201 - DNA, 256 bp, Glycine max
  Clone ID: LIB3049-027-Q1-E1-D8
aaattaagcgagagcattccattgttgttatactgtattgtagccggataataagtcacgagatagccgctaataggggaagatgactgaggcatatataaggaacaagcctgggatcgcgatcgtgaatgacatgccggttctccatcacggtcgttcatcactcgggttcattccggtccggttcgtcctgcgcatctttgtcaatgtgcctatcgccgttgccatcttcctcactgttttccgctctttctct

SEQ ID NO: 19202 - DNA, 364 bp, Glycine max
  Clone ID: LIB3049-027-Q1-E1-D9
gtcaatgatgcaacaaaccaagttgcggatgatccaaaaagattatctcttatggaggagcagctcaacaacatcttacgtggatgtgatggtgagaaagtagccaggaccagtttctccatgggttccacccatatggatcggcggcttcaccaaatgttgttcgctgatcgggattatgaaagttatgcggtagcaagagaagttgatagtcctccctctttaaggccaagaatcacaatagaacgttgtgaggaaaaagggtactcagtggtcagtgtcaagtgcaaagatagggcaaaactcatgtttgacattgtttgcactcttactgatatgcaatatgttgttttccatgccacag

SEQ ID NO: 19203 - DNA, 358 bp, Glycine max
  Clone ID: LIB3049-027-Q1-E1-E1
ggtaacgactcagtcaaacactctgtaactctttattttattttctttctttctttctccgatcgcatagctcgctcgcaaccaccatgccttcccgaagaagaactctcttgaaggtcatcattctcggtgacagtggggtggggaagacatctttgatgaaccagtatccttcggtttctgtctacaaactccgtgttctttacttttttttttaatttgcgtttcaatttgttttctattgtttagtactgcatgaaaactatgtattttcccctaacatacgcaatttagatatgtgaataagaagtttagttatcagttcaaaggaaacaatggaaccgaatttttaacccaa

SEQ ID NO: 19204 - DNA, 272 bp, Glycine max
  Clone ID: LIB3049-027-Q1-E1-E10
ggagaacatcgaggaaaagataaagggtgaataattagcagctccttctagttccggtgtcggtgtgggtgtttgaggctggtgaaggatgtcaattgttccaatcagataaggtgatgccaaaggctccaaacccattcgcttcgtagggtcaacacgtggattttcctcacactccctggagctccggctatcatcacggcttggaattcggattcggattccgatcaaccgtgaacacacgtatggactggagggagattcctatagcg

SEQ ID NO: 19205 - DNA, 355 bp, Glycine max
  Clone ID: LIB3049-027-Q1-E1-E11
gacacacactctgtcactcagccaccattctactacactcctctctctcactctcactctctgctccgtgatagctgtgggacgtttttctctccatctcgaaacaccatctctgcctcattcccaacccatcaccattctcatggctgcactagctctagcacttcttcttctggctttcaccggcacttcaagtgctacatggtgcgtttgcaaggatggaagcgacgcgatcctgcagaagacgttagactatgcttgtggagctggtgctgactgtaaccctcttcacctaaacgggccttgttttcagcccaacaccgtcaggggccattgtaactaccccgttaacagc

SEQ ID NO: 19206 - DNA, 368 bp, Glycine max
  Clone ID: LIB3049-027-Q1-E1-E12
gagtggaagagtgaataagagatatcaatatattatgataatggagggatacaataagaaggttatgattgtggggatggtgttgggcatggccatgattgggatggccaatggccaatactcgttttgtcgcatgcccagcgatgggttggcggcatgcaagccgagtgtgagtggggactatcctgctgatccctccactgcttgttgctcagccattgccaaggctgatcttaaatgcttctgccgcttcaaggattcgggccttctctctatgtatggtgttgatcccaacaagtgcatggaactccctgttaagtgcaaggttgtcgactctttccactgctagattcattagagggggcact

SEQ ID NO: 19207 - DNA, 400 bp, Glycine max
  Clone ID: LIB3049-027-Q1-E1-E2
ggttgcatccaaataagaacaagcatgtcaagctttcaaatctgtgctcaaacagtcacatcatggaccacaaccaccagaacaacaacagggtgccaagaatccatgcattcttatcaccaacaccgccttctcctcccatgctttccttcattgctgctctttccatcacaacactaatcttcatgtgcctctacgttttgtcacccattgtttccgtggccattcttctagccctttacatcaccaccctcttcctttgcaggttcatgcaagataggagagaattgagagaaagaacctcttttcatgcacaaacaccacaaaattatcaaaaggttattaagggtttccaataaccttttttgggttgttgaggaaaaaaggggtggcaagaggc

SEQ ID NO: 19208 - DNA, 431 bp, Glycine max
  Clone ID: LIB3049-027-Q1-E1-E3
accacgccttcacccaagccttcgttcaggtgccaaaaggacaacaaaagggaacaacacccatttcttttctctatcttttgttctgctcagctcgatctacctaccttggttcttctctgttctgttacttcagtgcagcagcagaaaatgaccatcctcattgagcaacctgcccttgaattacaagttgaaggcaacaatgtgcatgctgaagaaaccaatgagcttgtattggatggtggatttccattgccaaaggatggatatatggccccagaaatcaattcatttggccactccttcagagaatatgatgctgaaagtgagaggcaaaaaggtgtggaagaattttataagttgcaacacattaagccaaaccttataactttgtaaaaagaatgcggaaggaatatgggaaattggacaaa

SEQ ID NO: 19209 - DNA, 372 bp, Glycine max
  Clone ID: LIB3049-027-Q1-E1-E4
gagtcacaggtgtttgcaatactagcgatagctgataagagagataccaacaagaaaagaaaaaaagaagagttgagattccctttgaagaaaagatggcatcccataggcaaagctatgaagctggtcaaactaagggccgaactgaggaaaagacgaaccagacgatgggcaatattggagagaaggctcaagctgcaaaggagaagacccaggaaatggcccaagctgcaaaggagaagacccaacaaacagcccaagctgccaaggacaagacttgcgacacttcccaagcggcaaaggagaagacccaacaaaatacaagagctgctcaacaaaagacctcagagatgggccagtccacgaaggaat

SEQ ID NO: 19210 - DNA, 390 bp, Glycine max
  Clone ID: LIB3049-027-Q1-E1-E6
gatcgcatttcatagcactcaccctcattaccaacacgaaagcatagccaaaaccttttttcgaagtctctgattttcctaatggctccggcaaaggcagagaagaagccggcggagaagaagccagcggcggagaaggcaccggcggagaagaagccgaaggcggagaagaagatctcgaaggaaggagggagcgagaagaagaagaagcgcacgaagaagagcgtggagacctacaagatctacatcttcaaggtcctcaagcaggttcaccccgacattggtatttccagcaaggccatgggcatcaataacaagcttcatcaacgacatcttcgagaagctcgcccaggaagcgtcgcgtttggctcgctacaacaagaagcccac

SEQ ID NO: 19211 - DNA, 308 bp, Glycine max
  Clone ID: LIB3049-027-Q1-E1-E7
gaccgggacagatattctagttacagaaggttttcccctaggcgtttcaggagcccaccaccgcgtggaagaactcctccaaggtatcgaagcaggaggagcaggacaccatctgtttcacgcagtccacgatatcgagctcgacgatatagccgaagtaggagcccagttcgtagtaggagtccagttcgcagtcgttccccagttgatcgatcccgccccactcgtgtggagaggcgtgcatcttcttctcggagcaggagtccatccaaatcccggtctaggtctaggtccaggtcatccgtgga

SEQ ID NO: 19212 - DNA, 374 bp, Glycine max
  Clone ID: LIB3049-027-Q1-E1-E8
gggagtggaagtagtagcaagtacgtcgtatatgtggttgatcttttgctggttgtgtgctttgttccttccaattgtcagatctgaatcaccggactcactctccacactcactcacactgaatggcttctgaaggcgaccatcaccaccaccaccaccaccatcaagatcacgatcatcatcatcatgatcatgatcaccatcatcatcacgatggagagggagagaccaactcatgggtaggtaaggatgggaaggtgtaccatagccacgatggtctggcgccgcattctcacgaaaccaattaatcccccggctacttcaccagaagagctccactgcttctcaacagaaacttcaacgaaagagcctt

SEQ ID NO: 19213 - DNA, 332 bp, Glycine max
  Clone ID: LIB3049-027-Q1-E1-E9
gtcattgaagatgccccatcttatcctggagtggagcatgtaggtggagatatgtttgcgagtgttccgaaagctgatgctatttttatgaagtggatttgccacgattggagtgatgagcactgcttgaagtttttgaagaactgctacgaggcactaccagacaatggggaggtgattgtggcagaatgcattcttccaatggctccagactctagcttggccacaaaaggtgtggttcacatcgatgtgatcatgttggcacataatccaggtgggaaagagagaacagagaaagagtttgaggctctggccaaagggtctggattcca

SEQ ID NO: 19214 - DNA, 309 bp, Glycine max
  Clone ID: LIB3049-027-Q1-E1-F1
ggctgcataagaggagaggcttaaggcttttctttacactgtccaaattgtgaattatttcaagaattccttccacaccttcaaagttagaagccatggaaacttctcatcctctttctattgaaagcttctcttatagttggttagtgaacctgaagccatcactagaaagcctagatggctccctcagaacttcccttgatgcttctgatgaaacttcttccttcattgaaatggatccaagaatgacaccttctaaaagattcttcagaaactcccaagatttcaaatttgacttcccaatctcgc

SEQ ID NO: 19215 - DNA, 321 bp, Glycine max
  Clone ID: LIB3049-027-Q1-E1-F10
ggttctagtgtgtgattgtttgttgttgtaactcgttcttcttcttttgttgttctgtgtttgtgtttgttttggggctcacctgaaaatgtcttgctgcggtggtaactgtggttgcggaagctcctgcaagtgcggcaacggctgcggaggctgcaagatgtacccagacttgagctacactgagtcaaccaccaccgagaccttggtcatgggagtggcacctgttaaggctcaatttgagggtgctgaaatgggtgtgcccgctgagaacgatggctgcaaatgtggaccaaactgctcctgcaacccctgcacttg

SEQ ID NO: 19216 - DNA, 365 bp, Glycine max
  Clone ID: LIB3049-027-Q1-E1-F11
gagcatatatatcaataatctattttatactatacctacattttgataattttctttgtagttgatagccatggctaggcgtggaaagcttgaggttgacattgatctcaagtccaacgcagacaagtactggcaaacccttaggaattctactgaaatattccctaaggccttcccacatgattacaaaagcattgaggttcttgagggtgatggcaagtctcctggttctatccgccacataagttatggtgaaggttcaccacttgtgaaatcatcctttgagaagattgaggctgttgatgaggaaaagaaggtagtgtcgtacactatcattgatggggaactccccaacaactacaaac

SEQ ID NO: 19217 - DNA, 355 bp, Glycine max
  Clone ID: LIB3049-027-Q1-E1-F12
ggttgttacttttgctttaacacattacactcacactctttgtgaaaaaggggagtttcttattctttctagacgcgtccattgatcggcgatttcttagacatggcggagcatcacgaacacgaggaagtgaagggtgagtccttgttggagaagatttctgggaagatccacgaccacgattcgtcatcttcgtcggattccgacaacgagaaaaccagcgcttctgactccttgaagtcaaaggttttcaggcttttcggcagagaaaagccattcaccatgttcttggtggcggaaaaccggccgacgtttttctctggagaaacaagaagatatctgcatcgacactcgg

SEQ ID NO: 19218 - DNA, 399 bp, Glycine max
  Clone ID: LIB3049-027-Q1-E1-F2
ggaacctttgcattctattcattcaagattcagcaagtgcgttttggaagcagagaccgaaatacttcgagatggcccgtacaaagcaaactgctcgtaagtcaactggaggaaaagctcccaggaagcagcttgcaaccaaggctgcacgtaagtctgcaccaacaactggtggtgtgaagaagcctcatcgttatcgccctggaactgttgctcttcgtgagattaggaaataccagaagagcactgagctcctaatcaggaagcttcctttccagaggttggttcgtgaaattgcccaggatttcaagactgatctgcgtttccagagccatgctgtgccttcattgcaagaggctgctgaggcataccttgttgggctctttgaggacactaact

SEQ ID NO: 19219 - DNA, 335 bp, Glycine max
  Clone ID: LIB3049-027-Q1-E1-F3
tataaaaaattccttggttccgtatagtctttttatactatatttaaagagttacttgtaacgtaatacaaataaactcgagtatggatattgtcaggaagactatttgactttgttttttcaaccccccaataaattcgaatattatggttatgacactgtttttttcagatttcatttttctataatagagagttctattatagaaatttcgattgtaaaatacaataaaattggattcgatactaaacataaaatagatatctatatagatagataatttgaaacaaaatcaattaaaatatggaaaaggtactctaagggggaatttttgt

SEQ ID NO: 19220 - DNA, 345 bp, Glycine max
  Clone ID: LIB3049-027-Q1-E1-F4
accacgcgtccagccaggcgttcgtaaaggcgccaaagggacaccgaaaggggaatttaaaagatttttacaagggccctttccgagaatccgttagtttcaaaaattaaaacgattctttccaccgagaccatggacatcccggaaggcgttagcctcaaagttcatgcctaggtcatcgaagttgaaggcccccgccgaaaattggtgcgagacttcaagcatttgaatctcgattttcagctcattactgacgaaaactgtaaaagaaagctgaaaatcgacgcgtggtttggttctcggaaaatatcagccgccattcgcatcgccatgagccacgtggag

SEQ ID NO: 19221 - DNA, 380 bp, Glycine max
  Clone ID: LIB3049-027-Q1-E1-F6
ggtaaagaagagtgttgaagccttttcttttcttcttcctctgtcttgtcttcaacctcgttttcttttcttcgtcttctatcaccgattccgattcgctactctttcttcttcttccttttttattgatcctctctgcgatcacgaattttcccattttctccgtttcctcggcgaccaaacggaggagaagaacgcagttctgaaaacgattggaaaatgctgggaactgcactgcaattcagcggcgttcgcggcgaggatcggttttacattccggtgaaggcgaggaagaaccagaatcagcggaaacagagttccagaaccaaggaacaacgaacctgaaaacgcggatttagcttcgaagaacaaagtcgatg

SEQ ID NO: 19222 - DNA, 311 bp, Glycine max
  Clone ID: LIB3049-027-Q1-E1-F7
ggaaatgaaaattgtgggggactcaaattgattgaaatcaaacctcaccaccgctgctaggtcaagcttctctgtcggtcattgcatctccaatctcgcttcttctctcagattcagataccaattcggtttcttccgaaccaaacttgtttttgagaaattcggcaattgattttccatggccaacaatccgtcacagcttctcccatcagagttgattgaccggtgtataggttcgaaaatttgggtgataatgaagggtgacaaggagcttgttggtactcttagaggctttgatgtttatgtcaaca

SEQ ID NO: 19223 - DNA, 275 bp, Glycine max
  Clone ID: LIB3049-027-Q1-E1-F8
ggagcaagagtgaagagcgaagagaatggctcccaagggtttaatctttttggctgtgttatgcttctcagcactgtcactgagtcgttgtcttgcggaggataatggacttgttatgaacttctacaaggaatcatgccctcaggctgaagacatcatccaagaacaagtcaagcttctctacaagcgccacaagaacattgctttctcctggcccagagacatcttccatgactgtgctgttcagagttgtgatgcttcactgtttctggact

SEQ ID NO: 19224 - DNA, 359 bp, Glycine max
  Clone ID: LIB3049-027-Q1-E1-F9
gatgatgagaggttctttgctgaccccaatgacagtttgatagacaggagatcagagtgcacatctctttcatcggaaggttatctttctgataatccatggccttttggaaggaaatatgtggaggttctcaatagttctaaagctgattctgctattagcccaggatgtacaaagtctgaaattcctcagaaggtgttggaatctttgtttaatattcccaaaagcactgaacatgacaaagataccatgaattggagaaatgtagtaaagaaaatccagtctttgggacctgggttcaatgtttctccgcatgttgcagaatcccagcaacatacgtgtgccaaaggagatgaata

SEQ ID NO: 19225 - DNA, 314 bp, Glycine max
  Clone ID: LIB3049-027-Q1-E1-G1
ggtgtaaggacttgtttgtttgattagtaaaaagatgaaggttgctgcagaaggctgcaacttactgttattgttcattacctcttacctttcactgatctcagggcttggcgtccattctttgtcttatgatcattctgctaccacaaagtgtttggcagaacctcggagagcacagtatggaggaggcattatagtaaatccaggatttgatcacaacatagacggttggacagtatttggaaaaagagcaatcaaggagcgaatatcgaatggacgcaatagattcattgttgctcacaacagaacacatc

SEQ ID NO: 19226 - DNA, 369 bp, Glycine max
  Clone ID: LIB3049-027-Q1-E1-G10
ggattcagccatttttgttccagcgagtctcctttcttatttcttcggttcctctcttcttctcttttcccccaaaacacaagagagagaagaaagacgaatggagggtgagggtgcagcagtgtggcaaggtgcggttttaggtggaataatcttctggcttgtttctgcttcataccttaacgctactcgcaaacttaggtctttcttacaaccttgggttactcatcacgttgacactcaaacccctattatcctcaagatccagagttacgggtttgggttcctggatacacttttctctgggttgtcttgcgttgtttctgtgcccttttacactgcttttctccctctgctattctggagtgg

SEQ ID NO: 19227 - DNA, 340 bp, Glycine max
  Clone ID: LIB3049-027-Q1-E1-G11
gaccttgttaaggagagaatatagtatggcacactctagtggcaaaaaattggttgagtggctggttgcagcattattgttcattgccttgttgagtggtagtgcacatgctgttgcaatatgtaacattgactcaagtcaactgaacttgtgtcgtgctgcagttactggtcaaaaccctccaccacctgatgagaaatgctgtgcagttattcgccaggccaatttgcgttgcctctgcagttacaagtctatcctaccttcatttggaattaaccccaaaaatgctttggccttgcctgctaaatgtggtctacaattgcctcctaattgttgagtg

SEQ ID NO: 19228 - DNA, 314 bp, Glycine max
  Clone ID: LIB3049-027-Q1-E1-G12
gcattaaggatttcttgagtgattgtgctgtggaatgagccgtggaatttatgaagcatttgatgtgagaattgttagtgcaggtacatgcccagaatgctactcaataatgaattaaaactgtttacggcctatgctgttgtggttggtgtttgagctataaggtacaggaggatatataaaggcttgagctcgattgccattcattttacactttggctgagctacgagacaccaattctgatagagatcgtaaccttgctctatgttgcataggatagttactatttttcgtatcattattataatatttt

SEQ ID NO: 19229 - DNA, 399 bp, Glycine max
  Clone ID: LIB3049-027-Q1-E1-G2
ggaacctttgcattctattcattcaagattcagcaagtgcgttttggaagcagagaccgaaatacttcgagatggcccgtacaaagcaaactgctcgtaagtcaactggaggaaaagctcccaggaagcagcttgcaaccaaggctgcacgtaagtctgcaccaacaactggtggtgtgaagaagcctcatcgttatcgccctggaactgttgctcttcgtgagattaggaaataccagaagagcactgagctcctaatcaggaagcttcctttccagaggttggttcgtgaaattgcccaggatttcaagactgatctgcgtttccagagccatgcctgtgcctgcattgcaagaggctgctgaggcataccttgttgggctctttgaggacactaac

SEQ ID NO: 19230 - DNA, 306 bp, Glycine max
  Clone ID: LIB3049-027-Q1-E1-G5
ggagaccaaacgtggtaacgctttgaatctttgaattcattcaaagatcccccttctgtctccctctctacgcatatcagggcactatggctgccatggtgaaacagatgtctttgatcgtgtcactgttcggcgtggtgtccttcattttgggtgttgttgctgaaaacaagaagcctgcggcaggaacacccgtgcctggtttggatggtgtctctgtcacctgcaagtacccagctgatccaactgttgcattggggtatctttctacagcatttcttgttgcatccactgtgactggatatc

SEQ ID NO: 19231 - DNA, 136 bp, Glycine max
  Clone ID: LIB3049-027-Q1-E1-G6
ggggggaacatcagatagcagtggttgcattgtgtcacgacgattcgatcgttttatctatgatgttgctgggttcagcttcttggatttcaagtggtgtaaatgatcacatacatcatattactttcaatgctgt

SEQ ID NO: 19232 - DNA, 312 bp, Glycine max
  Clone ID: LIB3049-027-Q1-E1-G7
gatcggttcagtgaaaaggggatgcctactgcgcccattgtctccttcaacgacgccaaataaatacctcaaaacgataccttgacagagttgggtattgatatttgcattaaagttcataatctggtgaattactgctaggggcaaggctctgccgtcatttgaggggtgccctgtgaaagttcctgggatgatgcgacgtggttctggtttaggttctgctgcttctcaccgttctcgggagtcccttcctcttcctcagctgttggagaataaaattgctgctcaggaatcagaaatagagcagcttgt

SEQ ID NO: 19233 - DNA, 308 bp, Glycine max
  Clone ID: LIB3049-027-Q1-E1-G8
ggaacgtgatcgatctcgttaccagttgccacactacagcgacattccccctacacccgtttgcgtggttgtctgcgaagagttggcgactaagaggagcgttggaacgtttaatgagggtgatttgaaagggaagagggtgttcgtgagggtcgatgtgatgttaccgttggatgactgccgcaacatcgttcaggactctgtagtgcgtgctgctgttgtcaccatcgagtacttaaccggtcatggagccagagtgatcctattcgagcccatgggacctcctatcggtgtaattgctagtgaca

SEQ ID NO: 19234 - DNA, 347 bp, Glycine max
  Clone ID: LIB3049-027-Q1-E1-G9
tgatcaattttataagattgaatcgactaaaaaatgaaatgaatcatttcatattgatagtattgctatgcttagtcccgaaagaaccagatttcgtaaacaacatagaggaagaatgaaaggaatatcctatcgagggaatcatatttgcttcggaagatatgctcttcaagcacttgagccagcttggataacatctagacaaatagaagcgggacggcgggcaatgtcacgaaatgttcgccgaggtggacaaatatgggtacgcatatttccagacaaaccggttacagtaagacctactgaaacacgtatgggttcaggaaaaggttctcccgaatattggg

SEQ ID NO: 19235 - DNA, 270 bp, Glycine max
  Clone ID: LIB3049-027-Q1-E1-H1
gacatttgtgccatttttgaaatttgattcttagaaaccctaatttcgtcgttgtttcaatactctcttccttgggaaaatcaaaaggtgctcgcaggtgcagcgtttagttcaaagattgtaagcgatcttacatcgtgaatcattgataaagtaacatttatttgtgaaacgtcactggttcgtgtctgaattgaagaagtgtcatcaccatgagattgagaaagggaaataaagtggagatccgtggcaatgctgatgggcttactg

SEQ ID NO: 19236 - DNA, 363 bp, Glycine max
  Clone ID: LIB3049-027-Q1-E1-H10
gggcgaggtagccagagagtgatacaatacagagtgcgttgttgctccttcgccacaactccctgccaacatgggtatctccagagattctatgcacaagaggcgtgccactggtggcaagaagaaggcatggaggaagaagagaaagtatgagcttggtcgccagcctgctaacactaagctgtcaagcaacaagacagtcaggaggatccgggttagaggtggaaatgtgaagtggagggcactgagattggatactggaaattactcctggggaagtgaagctgtaactcgcaagactcgtatactagatgtggtttacaatgcctcaaacaacgagcttgtgcgtactcagactcttgt

SEQ ID NO: 19237 - DNA, 323 bp, Glycine max
  Clone ID: LIB3049-027-Q1-E1-H11
ggacatcaaagagctctactacaagagaaacagtgttcaccttgaggatgaagtgtccaaggaaacttctggggactacaagaagttcctcctcactctcttggggaaataagactaagttaagaacttgctctaagggcatcttagtaatgggtttttgttaattatgtcattggtttctggtttgtgcgatttcattatgttagttttccagtaagagtttgttatatctggttaagtttttgagacaacaagaactcgtgtcttgtttgagggcatgcgtgccatttcttagggttgtgttggtacttggcatgctctta

SEQ ID NO: 19238 - DNA, 321 bp, Glycine max
  Clone ID: LIB3049-027-Q1-E1-H12
gacgcatagagagagagagagagagaagcagaggaagaaggagaagaaggagatcttgagagatcaggtcgcaactcgtcatggggagagaagttacaggaatgcaagttgtggacaagaagccaaatggtgttataccagcttcaaatggtagttctaatgataaagtatgcttttctcctaaaatggaagcagctaaggttcaggcgaaggatcacaaggtaaatgaatgtaccaaaactaactcttttgaggagaaaagccatgagaagatggatggtttgagtgccaaaacaacaaactgtaatactgacttgcctg

SEQ ID NO: 19239 - DNA, 443 bp, Glycine max
  Clone ID: LIB3049-027-Q1-E1-H2
aaccaagccttagaacaagccttcgttacggctgcaaaaagacaacaaaagggggtccagtatccgagagcatggcaattgctcgctatgttaacccacctgaaaggtgataacactttgtatggatcttctttgattgaacatgcccacattgaacaatggattgatttttcatcattggagattgatgctaatattatcaagtggtatgccccaagagttggacgaggaccatatcttcctccagctgaggaggctgcaatttctgcactaaagagagctttggctgctttgaacactcaccttgcttccaatacttacctggttgggcattctgtgaccctggctgacatcataatgacatgcaatttaaaatttgggttttgcaaacaccctggttaagtgctttacctctgagtttcctcatgttgagagatactttt

SEQ ID NO: 19240 - DNA, 310 bp, Glycine max
  Clone ID: LIB3049-027-Q1-E1-H3
ggatcctttgtattctattcttcaagattcaggtactgcgtttcggaagcagacacacatggctcgtatgaatcaaaccgctcgtaagtccacacgaggaaaggctcctatgaagcagcttgcaaccatggctgcacgtaagtctgcaccaactactggtggtgttaagaagccccaccgttatcgtcctggtaccgttgctcttcgtgagattaggaaataccagaagagtaccgagcctttaatcctgaagctcccctccacatgctggttcgtgaaattgctcacgacttcaagactgatctgcgtt

SEQ ID NO: 19241 - DNA, 403 bp, Glycine max
  Clone ID: LIB3049-027-Q1-E1-H4
gagagacgcagatatctgtaatttgtgtctgctcactcgctcttctccgccacttctgaatctattgaatcaacaatcatgtcggacgaagagcaccatttcgagtccaaggccgacgccggagcctccaaaacctaccctcagcaagccggtaccatccgcaagaacggctacatcgtcatcaaaggccgcccctgcaaggttgtggaagtttcgacttccaaaactggaaagcacggtcacgctaagtgtcactttgttggaattgatattttcactgccaagaaacttgaggatattgtgccctcttctcacaactgtgatgttcctcatgtgaatcgtactgattaccagctcattgatattgctgaggatggatttttgagtctgcttactgaaaatg

SEQ ID NO: 19242 - DNA, 326 bp, Glycine max
  Clone ID: LIB3049-027-Q1-E1-H5
atattccgagaatgtaccactccagtgccgttttgcttcgtgacggtcgcgttctggttgctgggagcaaccctcacatttattacaaatttacgaatgttttgttcccaacggagttacggttggaagcgttttctccttggtatcttgagcctggattctctagcgtgcgtcccacaatagtgtttcctgcgtcccaaacaaaactcaagtacggtcagacgttgaggcttcggtttgaggtgatgagcgcgactttggttggggattcggtgtcggttacgatgctgtcgccgccatttaacacgcactcgttctccatgaat

SEQ ID NO: 19243 - DNA, 396 bp, Glycine max
  Clone ID: LIB3049-027-Q1-E1-H6
ggttctagtgtgtgattgtttgttgttgtaactcgttcttcttcttttgttgttctgtgtttgtgtttgttttttcgctcacctgaaaatgtcttgctgcggtggtaactgtggttgcggaagctcctgcaagtgcggcaacggctgcggaggctgcaagatgtacccagacttgagctacactgagtcaaccaccaccgagaccttggtcatgggagtggcacctgttaaggctcaatttgagggtgctgaaatgggtgtgcccgctgagaacgatggctgcaaatgtggaccaaactgctcctgcaacccctgcacttgcaagttaagtgtttggagagcaaccttcaagcagagatagcccttaattaggaataatgataaactattaatgtg

SEQ ID NO: 19244 - DNA, 390 bp, Glycine max
  Clone ID: LIB3049-027-Q1-E1-H7
gacttcttcgttttcgacgatccccttctccttctctctctctttttcgcctcattccattttcagctatcaatggctccagtagcagcagcatcttcagattcaatcaagccaagagatgtttgcatcgttggtgttgcacgtacaccaatgggtggatttcttggtactctgtcatctctatctgccaccaagctaggctctatagctattgaagctgctcttaaaagggccaatgttgatccatcccttgtggaagaagtattttttgggaatgttcttagtgctaatttggggcaagctcctgcaagacaggcggccctgggggcaagaatatccaattcagttatctgcactaccgttaacaaagtttgtgcatcaggaatgaaa

SEQ ID NO: 19245 - DNA, 401 bp, Glycine max
  unsure (1)..(401): unsure at all n locations
  Clone ID: LIB3049-027-Q1-E1-H8
gagggaaaagagggtgcaaggtgcatcttctttttgttgttctctcaaactttaataatctcataaattagcagaacgaagaggaacaaaaacaagaagaagaattggattcgaaaatcgtagcgtagcgttggtgcgattgaacgatacgatgggaagaggaaaattcaagagcaagcccactggtcgccgccagttctccaccccggaagatatgcttgctggaacctctaaccgtcctcgaacttttagacagaaagaagctgagcatgaagaggaagaacccgaggaagtatctggagatgaatctggagaagaatctgaagaaagaaacttctaaganaaaaggaacacaaggggttattgagattgaaaatnccaacttagtaaagccaaagacc

SEQ ID NO: 19246 - DNA, 325 bp, Glycine max
  Clone ID: LIB3049-027-Q1-E1-H9
gatgaagatgtttctgaatgcaagattagacctagccgaagtggtaggtttaggtccaagatggtgaagcttgtttctaagaaatttcgtgggtctaagaaagagaaaaagggtgaggtgaataaacacaatgagggtgagtcagggagtgaaatttcaagcgctgtgggggaagaaaagttaccaattttagaaattgaagtagaggaagagaatggggataataagtcaagtaacagtaaacttgattgtggaatcacttgttcctatgataatgagaagagagtggaaagagttgggaattcaggttcttccatggttttag

SEQ ID NO: 19247 - DNA, 341 bp, Glycine max
  Clone ID: LIB3049-028-Q1-E1-A10
ggaacctttgcattctattcattcaagattcagcaagtgcgttttggaagcagagaccgaaatacttcgagatggcccgtacaaagcaaactgctcgtaagtcaactggaggaaaagctcccaggaagcagcttgcaaccaaggctgcacgtaagtctgcaccaacaactggtggtgtgaagaagcctcatcgttatcgccctggaactgttgctcttcgtgagattaggaaataccagaagagcactgagctcctaatcaggaagcttcctttccagaggttggttcgtgaaattgcccaggatttcaagactgatctgcgtttccagagccatgctgtg

SEQ ID NO: 19248 - DNA, 313 bp, Glycine max
  Clone ID: LIB3049-028-Q1-E1-A11
ggggtgaagcttgtctagcaagtcgcattgaaaattgtaagctgcactgcagagagtgagagcgaatggtaagagtatcagcggttcgattaagcgccaccatgttctcctcaacctctctcagaaaccctaacttcctcctccttccaactcgcttcgacgcacccgttcttcgctcccacacgctttccttctccaatcgcctctcgcttcgatgctacgctgctcgcgccgccttcgacagagttcccgttctcaatcccatcgtcgaaatggacggtgatgaaatgacgaggattatatggaggatgat

SEQ ID NO: 19249 - DNA, 242 bp, Glycine max
  Clone ID: LIB3049-028-Q1-E1-A12
ggagcttttctttctctctttctttgctctcttttcttttaggtttccactctctctcacacacaggcgctgcaataatctctcttctctacttcagtctctcaactactgcctaaccaaaccttccatttccgcaggcagtttcttaaatttggagtctgatgtctccgccactgctggttactgaataagactaacgacacaccaatgcctctatcgtatcatctgcatcttcaccctct

SEQ ID NO: 19250 - DNA, 390 bp, Glycine max
  Clone ID: LIB3049-028-Q1-E1-A3
ggccgcaagcagagatgacaacccgatttaagaagaaccgcaagaagcgcggccacgtcagcgccggccacggccgtattggaaagcaccgcaagcaccccggcggccggggaaatgccggcggcatgcaccaccacaggatcctcttcgacaagtaccacccggggttcttcgggaaggtagggatgaggtactttcataagctccgcaacaaattctactcccccatcgtcaacatcgacaagctatggtctctgataccccaagacgcgaacgacaaagccctaaaatcgaaagacactgcccccctaatcgacgtcactcagcacgggttcttcaaagtttctcggaaaaagtgtgctgccccaaaaccagccccattgttgtgaa

SEQ ID NO: 19251 - DNA, 359 bp, Glycine max
  Clone ID: LIB3049-028-Q1-E1-A4
ggagagaaagtgagagagaattacagagcattttccaacacgattacacgaccgaatcaaacccctctttctctccgaagctgcttttaatatcgtactggccttcgattgttctcctctttaatacatactgttctctcttcgatttgagggaacagtacaagagtctgagcatcggttaacccaactgcacaggtagtctccaaataatggagcctcatgatgagactggatgccaggctcctgaacgccccattctttgcattaataattgtggcttctttggaagagcagcttacatgaacatgtttttccaattgttacaaggacatgctgttgaagcaggagcaggacaaatt

SEQ ID NO: 19252 - DNA, 320 bp, Glycine max
  Clone ID: LIB3049-028-Q1-E1-A5
ggaaaattttgagtttgataatggcaaatggtaacacgcagcagcctggtagctattgaaaagtgtttgtctgcggttcgatttcgaccactcaaaccctaacgtttccaacttgcaagggcttcgctccagaagggttacgatggattttgacgagtatgagtatttagagaaagcagttgaaaaccctgaagttaatcacagggctaatggtggggacaaaaatgtgaaatccgaagagagagggcgtaatgggagttcaaagcataaggatgatgatgatgatgatgttgttgatctccatcccaggcattcaaaat

SEQ ID NO: 19253 - DNA, 286 bp, Glycine max
  Clone ID: LIB3049-028-Q1-E1-A6
ggaaaattttgagtttgataatggcaaatggtaacacgcatcagcctggtagctattgaaaagtgtttgtctgcggttcgatctcgagcactcaaacgctaacttttccaacttgcaagggcttcgctccagaaaggttacgatcgagtttgacgagtctgaatatttagagaaagcatttgataaccctgaagttaatcacagggctaatggtggcgacacaaatgtgacatccgaagacagatggcgtaatgggagttcacagcataccggatatcatgatgat

SEQ ID NO: 19254 - DNA, 355 bp, Glycine max
  Clone ID: LIB3049-028-Q1-E1-A7
gacccaagcgtaagtacagctgtcagaagagcacagaaaggggtagagaatgggacaaatcaaacaactactactactactgcacacactctctctctctctctctcattgtatggccggggttcgagtagcccatggatcaccgacttggggaatcgagtctccaatcagatctgtacttccaaccccccctcagctcctctcacttccaggaggggagcaatagcagctgcatacactagcagctgcgggtcactgtatgacaagaaccctgatgatcagatccactctggggcggtcacagacgatctgattcatgcaacacaatccggcaaatactgggccccaaacccac

SEQ ID NO: 19255 - DNA, 324 bp, Glycine max
  Clone ID: LIB3049-028-Q1-E1-A8
ggccaaacaaaaactcagaaaacacagggaaagaaagagttgagtgatggcggcttgtctgcaactgtggcaatggaaactagcgagaccctttgactcattaccggtgcgaaggtcaattcctttgagtctgaggtgttcggccgcgccctcttcttccaagccgacgcgctcctacagcatcactctcatccccggcgacggcatcggccccgaaatcatctcggcggccaaagacgttcttgtcctcgccggttatctcgaagggattaaatacgacttccgcgagatgcttatgggtggagctgcattggatgccacggg

SEQ ID NO: 19256 - DNA, 372 bp, Glycine max
  Clone ID: LIB3049-028-Q1-E1-B1
ggagtgagtagtgagaatggagtttcaagggttaccggaaggttgcattgctagtatactctctcgcactacgccggcggacgtgtgtaggttttccgtcgtatcaaagattttccgttcggccgctgaatcggacgctgtgtggaaacgttttctcccttccgattaccattccatcatttcccagtctccttcgcctctcaactatccttccaagaaggagctctatctcgctctctcggatcgccctatcatcatcgatcagggtaaaaagagctttcaattggagaaaaagagtgggaagaagtgttacatgcttgctgctagagctctcagcaatatttggggtgacactgagcaatactggaactg

SEQ ID NO: 19257 - DNA, 307 bp, Glycine max
  Clone ID: LIB3049-028-Q1-E1-B10
ccagttgatccatcccctgattgctgcaaggctttggctggtgctgacttgaaatgcctttgctcttacaagaactcatcagagttgccttttcttggaattgatcgaactcttgctacttcacttcctgcaaagtgcaatctcactcccccagataattgctcataattaagcttctctgaactattatttgtgctctctttgtgtgttgtaatcttttttctgcagatagatgacctattgagaaaaaaggaaataatcgtactctaatttctatatctcttttttttgtgtgctaatatgtttt

SEQ ID NO: 19258 - DNA, 234 bp, Glycine max
  Clone ID: LIB3049-028-Q1-E1-B11
ggaatcgagttaggatgatattgtgtggacgtacatggttatggctgatacttctgctggcttcagttcaatcacggggatctgagaggaccgatgtggcatatctcacgctatcgtacggagatcaattcctgttgggtgttcgagttctcggcaactccatacgcgacacgggattcaacaagtacatggtcattttggtctctgacggtctcactgactctgccaataccc

SEQ ID NO: 19259 - DNA, 331 bp, Glycine max
  Clone ID: LIB3049-028-Q1-E1-B12
gcccacacgcacgcagaagcagaagcagaagcgcaagcgcgtgtaaccctaattagggtttgcaagccgatttgggattcgcctttcgcgtgatcgcagcgctggatccgtaccgtgttcctccgtctacggaagcgccttttgctcgatccttcgccgatctcggaagcatgtacggtccccgaggggcaatgttgggaagcgggggggtttcggacgggtacgaggttggctcaaagagacaaagaatgatggaatccaatccatacttcgcagtgagcagcggaacaggcaacttaccttatgggtatgctggtggcttccagccccc

SEQ ID NO: 19260 - DNA, 384 bp, Glycine max
  Clone ID: LIB3049-028-Q1-E1-B2
ggactccgcagctgcagagctcaaaaccctagagaggaggaagagagagcgtgcaagttccggccaccaccgaccatgagattcaagcgcaggaatggaggtcgcaacaaacacggccgcggccacgtcaaattcatccggtgctccaactgtggcaaatgctgtcccaaggacaaggccatcaagaggtttctggtgaggaacattgttgaacaggctgcagtcagagatgtgcaggaagcttgtgtctatgaacaatatactcttccgaaactctatgtgaagatgcagtactgtgtttcttgtgctatccactctcatgttgtgaaggttccaatcccgcactgacaggaggaaacgtgagcctccacagagattcatcag

SEQ ID NO: 19261 - DNA, 368 bp, Glycine max
  Clone ID: LIB3049-028-Q1-E1-B3
ttttttttggtttttttttgttttgtttgttttttttttttttttttgttttttgtggtgtttttttttgtgtttggttttttgttttttttttttttttgtttttgttttttttttttttttttgttgttttttttttttttttttttttttttttttttttttttttttttgtgtttgttttttgttttttgtttttttttttttttttttttttttttttttgttttgtttttttttttttttttttttttttttttgttttgttttgttttttttttttttttttttttttttttgtttttttttttttttttttgtgtttttttttttttttgtgtttttttttttttttttttttttttttt

SEQ ID NO: 19262 - DNA, 381 bp, Glycine max
  Clone ID: LIB3049-028-Q1-E1-B4
ggttgtgtgtaagtgtgaagagaagagaatggtagtaggattgaatgtgcctcagccatttctgtcaccagtttgcaagacggcaccttacccacttgatctcatcgccaccgccgcgtccctccacttcggccaccttctccgccgccgcgcgacccaccatctccgccttggggttcttcttcactcctgtttcaagaaactcgctcctttaactcacatttttagattgaacgataagtggtgtcaaagatgctttcaactcaatgggttgaactatcttcaactgtcaaccggtgatttgacttcctcatggtcaactagtttccccttcctttaatgggggaggagatggaggccgccgctatggaaaggctggga

SEQ ID NO: 19263 - DNA, 377 bp, Glycine max
  Clone ID: LIB3049-028-Q1-E1-B5
tggggtgccaaacaggaatgctcagttgaaaaggtataatagtgatggtcccatgttgtcgccgcgaaccatggcttctcctgtcagggggaatgtgaatgctcgacctgcttcgccgagtaagctttgggcgggatcatccccctctaggggagttagtcctgctagggtgaggagcacggttgccagttctatcaatagtggttcaagtaacacaccctcgattcttagcttctctgctgatgtgcgaagagggaagattggggaagatcggatatttgatgcgcatacattgaggcttctgtataaccggtatgtgcagtggcgtttcgtgaatgcaagggcagatgctacatttatggtgcagaaactgaatg

SEQ ID NO: 19264 - DNA, 306 bp, Glycine max
  Clone ID: LIB3049-028-Q1-E1-B6
gattcagacttgcatcaactggtacccctatgaaaaaccccagtttctctctttcactattgccgttcaagttctaagcaatcactcagactaattttgcttctctcgaagatgtctctacgaatgctgaaccccaacgccaatgtgccgaacaaatctgcggcacttcagatgaacatcaatgccgccaagggtttgctagatatcctcaaaatcaacctctgtctcaaaagatgcatcaaaatactcgttggtagtatcggtggtatcaagcttatccaagatggcaacagtctcttgaaagag

SEQ ID NO: 19265 - DNA, 376 bp, Glycine max
  Clone ID: LIB3049-028-Q1-E1-B7
ggataacaaagggtttaagttgggcacgctagacatcgtcttcaatcacggtctaaagtgacactgtagactctggctcacgccttagacgacgaagctcgctctgtactctcactcacctgaacggatccttcttcttccttatcgcgaaatccgttacttcaaaacctaattgcgtgagtgtggtttctgatttgtgttgaagcgaagatgaggattatgattaagggcggtgtttggaaaaacaccgaagatgaaatcctgaaagcggctgttatgaaatatggtaagaaccagtgggctcgaatctcttcgctccttgttcccaaatccgccaggcattgcaaagctcgctggtatgagtggctcgatccct

SEQ ID NO: 19266 - DNA, 366 bp, Glycine max
  Clone ID: LIB3049-028-Q1-E1-B8
gaggggaaaggttccatgtgaacggcacttgcacatgggttagtcgatcctaagggacgggggaagcgcgtctgatagcgctctgtgcgcgtactccgaaagggaatcgggttaaaattcctgaaccgggacgtggcggctgacggcaacgttagggagtccggagacgtcggcgggggccccggaaagagttatcttttctgtttaacagcctgcccaccctggaaacggctcagccggaggtagggtccagcggctggaagagcaccgcacgtcgcgtggtgtccggtgcgcccccggcggcccttgaaaatcccggagaccgagttgctccaagccccggtcgtactcataaccgcatcaggt

SEQ ID NO: 19267 - DNA, 325 bp, Glycine max
  Clone ID: LIB3049-028-Q1-E1-B9
ggtaacaaaaataacgtgacactgctaagagagtgagagaaattggcggcggcggtggcggcgggatagagtggaagtagtaaggatcaatggcagttccagggaggcgcaacggcatgaacgacgacgaagaggaattagacgacaacgcccttttcgaagaacaaggtgccgtcgaagacgacgccgatacccctcctcacctccgcgacctctccgccgccgctcagctaggcgacgtccacgccctccgtatcgctcttgataacttgactggtagtattgatgagccagtggaagatggggataacgctcttcatttgac

SEQ ID NO: 19268 - DNA, 309 bp, Glycine max
  Clone ID: LIB3049-028-Q1-E1-C1
gacggttcatttgaaaattctgctggcgctctcgcgctcacgtttgtttgtttctcgttttcgcaatctcgatcttttggctcggaaacatgtattcgagtgcaagccagtttgacggcaatgcagccttctccggtggtggattcatgccttctcagaccacccagggccctgactcttcattcgttccctccaagaatcgtgacgctcagtccttgcttcctctgacggttaagcacatatatcatgcgtctcagtcaagtgatgataaaatcaatttgatcattgactgtgtggacgttaccaatg

SEQ ID NO: 19269 - DNA, 325 bp, Glycine max
  Clone ID: LIB3049-028-Q1-E1-C10
aggggttctagtgtatgtgattgttgtgactcgttcttcttcgtcgttatcttcatcatttgttgtatgtgtgtttgtttgggctctcacctgaaaatgtcttgctgcggtggtaactgtggttgcggaagcgcctgcaagtgcggcaacggctgctgaggctgcaagatgtacctagacttgagctacaccgagtcaactaccaacgagaccttggtcatgggagtggcaccagttaaggctcaattcgagagtgctgaaatgggtgttcccgctgagaacgatggttgcaaatgtggagctaactgcacctgcaatccctgca

SEQ ID NO: 19270 - DNA, 376 bp, Glycine max
  Clone ID: LIB3049-028-Q1-E1-C11
ggcacacagtttactcactaactcactgtgagagcaaagaagaagaagaatgaaggacgccggaaagagccacaaggcgaacggaaagctgtcgccggagactcggaaggatcggaagtcggcgacggggctgagcggatcgccgaagaagggaggccacggcgggaagttcacgtggatcggccacggctacgagcaagttgagatgccgcacggtgctatggacgccaaggacccgaacttcgaggatcctgtggagatcgccaccgtgtggtcgcggtggtttccggtggccaggtctgtaaatagtagtaattggcgaaacgtgttttttcgtgttcaataatgtgaagcgaatcggagaagaagcgttttc

SEQ ID NO: 19271 - DNA, 352 bp, Glycine max
  Clone ID: LIB3049-028-Q1-E1-C12
gatataaatccaattataaatagactgattttcagaaatattagtatatatttatatgcatacaatgatgcaaacaaacaggaaccgtttggcagcttaatgcttcaagatctattatttgttacttcttccaatttatctgtaacttgtactcccctgccccttttaagaatacttatttacttattattttatttgcagtaatttcagctccttctgatgtcaaaacacatgagcagaaagatgataaccttccagttgacatcaaattgcctgttaagcatgtattatccagagagcttcagctgtactttgacaaagtggccgagcttactttgagtgagtttgaatc

SEQ ID NO: 19272 - DNA, 317 bp, Glycine max
  Clone ID: LIB3049-028-Q1-E1-C3
gaagtgacagtcagccactgaagaaagacaagagaagaaacattggttttcctaagcgcccgccattgtcaagcaggattgtacgatacaagaacaagaagatttcccaattctcgttctgaaaatcggaattaaacactattaatacatttgtgatctgtgatatcttctatctgatacagcatcatggttcagctaatgaagtctgaatcggataatcactgtttgaaaaaggtgaagttggatgttcaagatgaaatcccccctcttcacagtcataagcgatacagattggaatccccacccaagtgtggttc

SEQ ID NO: 19273 - DNA, 382 bp, Glycine max
  Clone ID: LIB3049-028-Q1-E1-C4
gagggttttagaagccagcagcagtaggcaaaaatgtcgagttccatgatgacgctctcaaggaggctctattgctctgtgcggcgaacccccaatgcatatcgccacttctccaccgatcaccttttcgactcggacgaggccgactcagcacccgacccacccgcacccgacgccgttcaagaagaagaaaagttcgtcatcgatcgccccctcgagaatggcctcgacgttggcatctacagggctattctggtacggaaggccgggcaggctcctttgcagaagaagcttaagagtggcacctccgttactcctctctccgtccgcaccggaaggaattcacaccaacggcaggcctcgcgtcaacgagaaccctaag

SEQ ID NO: 19274 - DNA, 283 bp, Glycine max
  Clone ID: LIB3049-028-Q1-E1-C5
gcaacaatctgtgtatttagtgcttcaaacctcagattacgttgtcggatcaatccatctgggtatgctcctgcaagtgtcagttccaacatacaaccacttgtaatcgctgcacacccacaagaaccaaatcagtttgctttatgactgtcggactgtggagttcatgtttttgaaccccttgaatctgaatgcaagtggggtgtgcctcctccgatttagaatgggtctgcacgcaatgtggcagcgacttcagttggaccttcagatcaagctcaaagat

SEQ ID NO: 19275 - DNA, 361 bp, Glycine max
  Clone ID: LIB3049-028-Q1-E1-C6
gacacgcaactatttctgactacgttttgctctacgcctctccctctctctcaaaaatcgtgctctgcgattttagggtttcgttttgctgctgcctccgttccccccttctcataaacaacgcgttttctcttctgcttcgtatctattctttgcttttggttttggttgattcaaggccttcacagcattcgttgcggcattttaatcgatttatccaagcaggactgaatgaactaatggagtctaaaggtgggaaaaagaagtctagtagtagtagtagtaaatcattgttctacgaagctcccctcggatacagcaattaagaacttaaaaccaaacggtggaatcaggaaattca

SEQ ID NO: 19276 - DNA, 379 bp, Glycine max
  unsure (1)..(379): unsure at all n locations
  Clone ID: LIB3049-028-Q1-E1-C8
ggtaagtaaaagatctcgaacgtagtatgtaacttctccacagcgcagagcagagcaacgtttttttatttattggtaggattagaagaaatgggagttggaggcacactggagtacttgtctgatctaatgggcagtggccaccaccaccacaagaagaagaagaagcagttccaaaccgtggagctaaaggtgagaatggattgtgatggttgtgagcttaaggtcaagaacgctctctcctcactaagtggggtgaaatctgtggagataaaccgaaaacagcagaaagtgacagtaactgggtatgttgaaccaaacaaggtgctgaaganggcgaaatcaacagggaagaaggctgagatttggccctatgtgc

SEQ ID NO: 19277 - DNA, 230 bp, Glycine max
  Clone ID: LIB3049-028-Q1-E1-C9
gaacccatcctaaataagcatcgtaattcatactccctcggtccttccttccttcttctgcgcaataactgtgtgtgggtccaatcaacttaccaccctcttccagacgtagttcttctccctctgttctctattctctatactgtgaaagcaacatgaacgtcacattttcagctgttctacttaaatgccatgtcctcagctcctccatgttcgacgtgtcaatggca

SEQ ID NO: 19278 - DNA, 378 bp, Glycine max
  Clone ID: LIB3049-028-Q1-E1-D1
ggaacacaacacagcacaacacaacattctttcgtgaaactcagaaaaccctaaacccctctcaaaccttgtagattccgacgtcctagaattagttactggtttagtagcttagcttcactcactttctatttcttccagaatgccaaatccaaagcacattattctgcagagctttgtcttcccctgcctgcttcttcgggcatcgtcaaaatccacgatcgagccatgcccgaactccgactcatgcaacgcgcttctgggctacaccctctacacggacctcaaagtctccgaggtggcgtcgctgttccaaatcgatcccaatttgctcctcaacgcgaacgccatcgatatctcctaccccgacgtcgagca

SEQ ID NO: 19279 - DNA, 337 bp, Glycine max
  Clone ID: LIB3049-028-Q1-E1-D10
ctgccataagacgagataagggcaacttccctcagtgcagaccttgaggaaatacctgccatcaataattgactttaatgagcctggatcaggtgctccaactggattgtacatcggtggcaccaaatccatggtcatccagggtgagcctggtgctgtcattcgagggaagaagggtcctggtggtgttactgtgaagaagaccggtgcggccttgatcattggcatttatgatgaaccaatgactccaggtcaatgcatcatggtaattgaaatgcttggcgattatctcattgatcacggtctcaaatcattgctctatgtcatgtgatcgtgc

SEQ ID NO: 19280 - DNA, 357 bp, Glycine max
  unsure (1)..(357): unsure at all n locations
  Clone ID: LIB3049-028-Q1-E1-D11
ggggttttgcgctgttgttgctgctcatcctccgtaacctccgagctctgcaccgaagaacgaagccatggggaagacacatggaatgggatctgctcgcaagctcaagtcccaccgcaggaggcaaaggtgggctgacaagtcatacaagaaatcacatcttggaaatgaatggaagaaaccttttgctggttcatcccatgccaagggaattgtccttgaaaagataggtattgaggctaagcagcccaactctgccattcgtaagtgtgccagggttcaacttatcaagaatgggaagaagattgcgcttttgtccctaatgacggttgcttgaactacattgaanagaatgac

SEQ ID NO: 19281 - DNA, 355 bp, Glycine max
  Clone ID: LIB3049-028-Q1-E1-D12
ggagtccgagtgtgagagaaaccagtgactgacttttcgagaaagaaaaacaaaaatgagtttccgtgattccatcatgaacgctcttcccattctcctcttcttcctcctcgtttctgcattagtttctgcgaagaaaactggtgatgtgacggagctgcaaattggcgtgaagcataaatcagtatcatgtgaagttcaggcacacaaaggtgacagagtcaaagtacactatatgggaaaactcactgatggaactgttttcgattctagctttgaaagaaataatccaattgaatttgagcttggtactggtcaagtgatcaaacgttgggaaacaggattattgggaatg

SEQ ID NO: 19282 - DNA, 281 bp, Glycine max
  Clone ID: LIB3049-028-Q1-E1-D2
gagagataaggaaggcattgataatcatagctatggcaacggcgagtgcaagttgtgcggtatcatttagaaacagcgtgcgtgtgagtaaaccctcggatcatgggttcttgagctctcgtctgaacggcctcagaatctgcgtccccaaattgccacccacatccctcactgcttctcccttccccagacccctccctaacgttgccaatacactgtgtaccttcactggaaagacatcaaacagggccaacatactgtcaccttcaaaccacacagac

SEQ ID NO: 19283 - DNA, 319 bp, Glycine max
  Clone ID: LIB3049-028-Q1-E1-D3
gacctcgagagcagtgctattgttggctatgtgtgtgcttccggccatggttgtggccactcgcccagcaaagaaccctgtttgcgtgaagggtcgcgtctactgtgacccttgccgtgctggttttgagacctcagcaaccacctacattgccggtgctgagattatgttgcaatgcaagagcagggttagcaacgaggttgtgtacaccaagaaggggtacactgactcaactggagcatacacaatgtacgtggacgaggatcacgcagatcaaatatgcagtgccaagcttgtaagcagccctcaccctcaatgc

SEQ ID NO: 19284 - DNA, 310 bp, Glycine max
  Clone ID: LIB3049-028-Q1-E1-D4
gggcaccagagctcctactctgctgtgacaactatgggacatctattgatgtttggtcagttggatgtatctttgcagagcttggtggccgaaaaccgattttccctggttcagagtgtctcaaccagctgaagttgattatcaatatccttggtagtcaaagggaggaggatattgaattcattgataacccaaaggcaaagaagtatatcaaatcacttccttattctcctggaacccccctttcgcaactttatcctaatgcgcatccattggcaattgatcttctggcaaagatgcttgttttcca

SEQ ID NO: 19285 - DNA, 372 bp, Glycine max
  Clone ID: LIB3049-028-Q1-E1-D5
gagagggagacggtagcagataagcctaaacacgaaactcgcaaattccctcaacactggagtcgctggaaaattcattctgggactcggctgagctgaccaagcatgattcaaaatggttgcattgtatcccaagggtgtgcccctctgaattctaggtcacgcaaccatggcatacctagtacctctgcctttcgttgcgcttctctaatgcctcccaaggttgccgtctctaacatccggagcttttggggacataatctggaatgtaaacccttgttgccaagaggaatgacattgacaaacacgtttgctgtatcaagcctgcgtgttaaggaagggtcaaatcatctctttcgtgctctccctctt

SEQ ID NO: 19286 - DNA, 378 bp, Glycine max
  unsure (1)..(378): unsure at all n locations
  Clone ID: LIB3049-028-Q1-E1-D6
gagggaaacaacctgagaaagtgtgcacctcggtcaaaaaacctgccggcactcgtatctgtgacaccgtgttcaattcggatccaaaaatctgatttatcgggtctcttcccaactcccccacctccaaccaacttccaccagtagtaaacagaaatacaagcataagcaaaagaagacccgcgacacatcgcaacatcgtatcatgtctgcaacaaacgtcgccaaagtgctgttacaactacaaccaccctccaaatcgaacccactctgcgtgccggtgataggactcggcaccgccgcggtccacaacgactgtgacacngctaaagctgcagtcataaaggctatcaaactcggttacagacacttcgacac

SEQ ID NO: 19287 - DNA, 314 bp, Glycine max
  Clone ID: LIB3049-028-Q1-E1-D7
gtggagaaaactcatcagaaaccccaacacctactctagcctaattggcctcacgtggtctcttgtttcattcaagtggaatgtggagatgcctgccataatagcaaagtctatctccatattgtcagatgcagggcttggcatggccatgttcagtcttggtctcttcatggctttgcaaccgagggtcatagcatgtggaaattccaccgcagcttttgccatggctgtgagattccttacaggtccagctgtcatggcagctgcttccgttgctgttggactcaaaggtgttctcctacatgttgccaatg

SEQ ID NO: 19288 - DNA, 55 bp, Glycine max
  Clone ID: LIB3049-028-Q1-E1-D8
tactgggattctcattcatttccacattctcaaattattctttttctttttttca

SEQ ID NO: 19289 - DNA, 333 bp, Glycine max
  Clone ID: LIB3049-028-Q1-E1-D9
agctactcagattgtttcgatgagactgagtcgtgctgagccacccttgagaaaggagatagtggaatatatgctggatgtgggttcccacatgtggagtatgagaagaagcaaggccaactttttcaggattatgggggttttgggtggattaattgctgtaggaaaatggtttgaccagatttgcaactggaaaaatccaatcacgacggtgctgatccatatcctgttcataatattggtcatgtaccctgagcttatcttacccacaatcttcctttacctctttttgattggagtttggtactacagatggagaccaagggaccccct

SEQ ID NO: 19290 - DNA, 380 bp, Glycine max
  unsure (1)..(380): unsure at all n locations
  Clone ID: LIB3049-028-Q1-E1-E1
ggaactcaactgaaagtgagtgtgtgaaggtanggttttagaaactgatcctacggcatgttcatgtttttggttagcagagtgactaaggattcaatttcacgcaaccgcaatgcctttgcttcttttgctttctctagcaggtgtgctcattcattatcatttgccacagtagaagcagaagagatatcaggttctaggcctgctgaagttttgaacctggtgcaaggtaaatgggtaggatcttcaaattggaacacaattgcagatcctttaaatggtgactcatttattaaagttgctgaagttgatgaaacaggcattcagcctttttataaaaagcttgtcaagctgtcccaaacatggtgtacacaatcctt

SEQ ID NO: 19291 - DNA, 333 bp, Glycine max
  Clone ID: LIB3049-028-Q1-E1-E10
caagacacgacaggggtgaattgtatagtgtctctgacctatcatggtataaagatgatgtttggatccactaagaaagttatccatgtggggagtgccgttagacatggacatgattcggatggccaatcgccaatactccttttgtctcaggaccatccataggttggcgccatgcaagccgactgtgaatggggactatcctgctgatccctccactgcttgttactcagccattgccaccgctgatcatacatgcatctgccgcttcacggattcaggccttctctctatgtatgatgttgatcccaacaagtgcatgaaactccctgt

SEQ ID NO: 19292 - DNA, 350 bp, Glycine max
  Clone ID: LIB3049-028-Q1-E1-E11
ggtgggaagataaagaaaaaggataagcaagaggttgttattgagaaggtcgtacgtaacaagcgaaagtgcatcaccactgtgaagggactggaactttttggtgtcaagctcagtgatgcttccaagaaactcgggaaaaagtttgctactggagcctctgttgtcaagggacctactgagaaagaacaaattgatgttcaaggggatatagcttatgatgttgtggagttcattacagatacatggcctgatgttcctgaaacagcaattttctttatagaagatgggagaaaggtcccagctgcttgattttgatatcctggcattaaaactaaggactgattgca

SEQ ID NO: 19293 - DNA, 245 bp, Glycine max
  Clone ID: LIB3049-028-Q1-E1-E2
gatccatactcaaaatacaaaaatggagagagtagctaaggtgttggtgatgttgagcatggtggtgttggtgcttgcagggaatgctgaagggggacgattacttgaggaagagaatgtggatcagccccagaccttccttggattaggtggaggccttggtgggatatttccaagcccaagcccaggcttcagcttcaccggcgtgggctttggcccatctgggttttgcactttccctggtg

SEQ ID NO: 19294 - DNA, 384 bp, Glycine max
  Clone ID: LIB3049-028-Q1-E1-E3
gaacttcgaagatgaccagctcgccaatatgaccaccgacgacgtcgtcagagcttctcgtcttctcgacaacgagattcgcagcctcaaagaagagttgcagaggaccaatttggagttggaatcgtacaaggacaagatcaaggagaatcaggagaagattaagctcaataagcagttgccctacctcgttgggaacatcgttgagatattggaaatgaacccagaagacgaagctgaagaagatggtgccaatattgatcttgactcacaaaggaagggaaagtgtgttgtgctaaagacttctactcgacagaacatccttccaactgttggttgggcttgtggaccctgacaagttaaaacctggtgatctggttggtg

SEQ ID NO: 19295 - DNA, 264 bp, Glycine max
  Clone ID: LIB3049-028-Q1-E1-E4
gtcattcagcgcctcctcgtcgtcaatcctttcgttaatctcttagtcatcgctctcatctgaataatctagatcgcttggggcgcttttctccgtcacgcttttcgtgaccggatctgtatggatttgatccagatctacacgtcgatagtggttttggccgggtcgttcatagatctggtgcgtagaggctcagatctacggtaccgaggtacaatcgagaagcgatgaccagaacgcagattcgacggtatatccagccga

SEQ ID NO: 19296 - DNA, 375 bp, Glycine max
  Clone ID: LIB3049-028-Q1-E1-E5
ggaacctttgcattctattcattcaagattcagcaagtgcgttttggaagcagagaccgaaatacttcgagatggcccgtacaaagcaaactgctcgtaagtcaactggaggaaaagctcccaggaagcagcttgcaaccaaggctgcacgtaagtctgcaccaacaactggtggtgtgaagaagcctcatcgttatcgccctggaactgttgctcttcgtgagattaggagataccagaagagcactgagctcctaatcaggaagcttcctttccagaggttggttcgtgaaattgcccaggatttcaagactgatctgcgtttccagagccatgctgtgcttgcattggcagaggctgctgaggcataccttg

SEQ ID NO: 19297 - DNA, 377 bp, Glycine max
  Clone ID: LIB3049-028-Q1-E1-E6
ggtgtgtctcaaacccaaagaacacggagttggcggcgaccctttctctctctgatttcgatcatggcagctgttgctcgttcttctgacaaaactgcagatttattgcagaatttgactctggactctgagtccaaagccattggagttgctgagcctgcgaagaagaatggacctgctttttccaatggggcagctaaagggagggccaagccattcaatccaaattcatgctttgttccaaatggatacccatctgcgtattattatggaggttatgatgggcaaggtgattggaatgcttattccagatatatgaaccttgatggaaggaatggtcagggtgttaatggggatagctgctcttacatgtacca

SEQ ID NO: 19298 - DNA, 304 bp, Glycine max
  Clone ID: LIB3049-028-Q1-E1-E7
ggttctagtgtgtgattgtttgttgttgtaactcgttcttcttcttttgttgttctgtgtttgtgtttgttttttctctcacctgaaaatgtcttgctgcggtggtaactgtggttgcggaagctcctgcaagtgcggcaacggctgcggaggctgcaagatgtacccagacttgagctacactgagtcaaccaccaccgagaccttggtcatgggagtggcacctgttaaggctcaatttgagggtgctgaaatgggtgtgcccgctgagaacgatggctgcaaatgtggaccaaactgctcc

SEQ ID NO: 19299 - DNA, 332 bp, Glycine max
  Clone ID: LIB3049-028-Q1-E1-E8
ggagtacaagaacatcagcttcactgtgtgggatgttggtggtcaggacaagatccgtccactgtggaggcattatttccagaacactcagggtctcatttttgtggttgatagcaatgatagagatcgagtggttgaggcaagggatgagctgcacagaatgttggatgaggatgaacttagagatgctgttttgcttgtttttgccaacaagcaagatcttcctaatgcaatgaatgctgcagaaataactgacaagcttggacttcattcactccgtcaacgccactggtatatccagagcacttgtgcaacttctggagagggtctct

SEQ ID NO: 19300 - DNA, 329 bp, Glycine max
  Clone ID: LIB3049-028-Q1-E1-E9
ggttcacaacaacccaatcatatgctgccactcctaggatccaacatggctcaaacactaaactgcagaacactacaaccaatggactcaactatgatcaagtcactgtcccacaatccaaaaaacgccaattccaccgcattcacaaggcactttgccaaaaaatctggtgtttttatcaagatcatggcttctgctacacccacagcagctcctatcacctttggattcaagaatttgttggaaacattcactgttaatgtgcatagagcagagaacaggccactgaatgtgcccttaatagccccttttaccattgctacctctag

SEQ ID NO: 19301 - DNA, 287 bp, Glycine max
  Clone ID: LIB3049-028-Q1-E1-F1
ggcacccctttaaatgtgactatgtaaacgtcaggttatcaacacagatccccacgcacattcaatgtctttctgatcatagtggacaatgaatctattacaagtatacacattgcacatacatcctatgctacctatagtccgtgtactagggcaacaccaactaccacattaaacacatctcagataccatgttctacgcttgcctcaatcatgaaccagacaccaagtttacctgtaagatcttcaccatggccaacttcgtcatattcttcagataattcacc

SEQ ID NO: 19302 - DNA, 335 bp, Glycine max
  unsure (1)..(335): unsure at all n locations
  Clone ID: LIB3049-028-Q1-E1-F10
agggaccagctcgcggagctcccgccatggaaccccactgccacctcaatgcaaccacgacagctgccacaagaaatcgtccactgcgagaacaaatctctcgcgatggacgattcaatgaccgctgccttcagtagccgcggcgaaagcaacgctttcgcctcccaccaacaagtggaggataatgaaaatgctaacaacattagcagcagcagcggcaacaaatacaataccggttctgggtttctgcccgcgtctttggacactgacaacattgcggagacaatcaagactttctttcctgntggaagcgactcgacgtcgtttcagagtta

SEQ ID NO: 19303 - DNA, 307 bp, Glycine max
  Clone ID: LIB3049-028-Q1-E1-F11
ggcaaagcataacaaagagtcattgaactttgactatatttttcagagttcatattatgcttctcgtttgaattttgattttgggggtttaagtttctgaaagaaaaaaaaaattgatacacgtcgttctttttgttgttcggctttgcctctgcactgaccctttcagtatcagagtccaaatctgcttctgtgcaacctcatgcatctgaatctttctctgttggatatattcagatgaatactgcagcgaactgttcctacgtgataattatatctacgagttgttcatcgccaaagttcacta

SEQ ID NO: 19304 - DNA, 350 bp, Glycine max
  Clone ID: LIB3049-028-Q1-E1-F12
gacaagaaaaaaccgacaaagattgcggagtatcctccgccagctagttcttccatataatataaccactttattacagggaaataataacattaattctctttggattagacttagatcaaatcaaagtgttcttcttgcttggtcacagactcatagtcacttccatggagaacactggtttgtgtgtactatgctttatactactcctgttggggtgtgtcatttcctcagaatgtaagtatataagatacaacacaacatctaccattgttcctgggaaactcaacgttcacttggtccctcagactcacgatgatgttggatggttgaagaccattgaccagtac

SEQ ID NO: 19305 - DNA, 352 bp, Glycine max
  Clone ID: LIB3049-028-Q1-E1-F2
acgcgtcagcggaagcgtgggcggacgcgtgggtggagatgatgtacaaggacattattcaggcactcagagctaagggaatcgatgaagatcctcgaaactatttgacattcggctgcggtggcaaccgggaagtgaagaaaccaggagaatatgagccttctgagcaaccagatcctgattcagattatcagagagcccaagaggcccgacgattcatgatttatgttcataccaagatgatgatagttgatgacgaatacataatcgttggatctgccaatatcaaccaaaggtcaatggatggtgctagggactctgagattgccatgggtgcttatcagccctatca

SEQ ID NO: 19306 - DNA, 383 bp, Glycine max
  Clone ID: LIB3049-028-Q1-E1-F3
caagacaaggacggagactggatgctcgtcggtgacgtgccctgggaaatgttcgttgaatcatgccagcgccttcgcgggatggaaggttctgaggctatcggccttgcaccaagagccgtggaaaagtgcaagaacagaagctgaagtgattttagggttcggccacaacaatcggcttggttgttcatctgtgtcacaaggaagcaaatgtactcgagcaagatcgagtctcttttaggaataagagtttaattataattattattattatgtgtctctgtaattttcttatatgtgtattatacgaatgagaaaatagttggaaattccttaaggaacaagaaataatattgaagatgtttatatgatcccgtttttgt

SEQ ID NO: 19307 - DNA, 310 bp, Glycine max
  Clone ID: LIB3049-028-Q1-E1-F4
gaaataagaagaagcattttgtgactgaaaaaaggttttagatcgtaaaaactaatcactacgaaaacaagagatatcgaagatggctctgcccaaagctaaggagatcgtgtcgtccaattccgtcgtcgttttcagcaaaacctattgccctttctgcgtcgatgtgaagaagctcttcggtgacctcggtgccaattacaaggccatcgaactcgacactgaatccgatggaaaagagctccaagcagcattagttgagtggacggaccagcgaaccgtgcctaatgtgtttattggtggaaaccac

SEQ ID NO: 19308 - DNA, 67 bp, Glycine max
  Clone ID: LIB3049-028-Q1-E1-F5
ggttttggagggagagaaagaaaaaaggggaatttcaatggcgtcaagggtttctctgaacgccaac

SEQ ID NO: 19309 - DNA, 379 bp, Glycine max
  Clone ID: LIB3049-028-Q1-E1-F6
ggttccactccctaatagctgctacagttacagcataacttctattctatatttctttctactcgcaagcaaatcagaagaagagaatggcagcagcagaggggctaaacagagagcagtacgtgtacttggcgaagctgtcggagcaggcggagcggtacgaggagatggtggagttcatgcagaaggtggtggtggggtcgacgccggcgtcggagctcacggtggaggagcgcaacctcctctcggtggcctacaagaacgtcatcggctcgctgcgtgccgcgtggcgcatcgtctcctccatcgagcagaaggaggaaggccgcaagaacgaagaacaaggtctccctcgtcaagcactacagatccaaggtcg

SEQ ID NO: 19310 - DNA, 380 bp, Glycine max
  Clone ID: LIB3049-028-Q1-E1-F7
gagaggagaacagatccaaacccctaaacaagaaagtgagtcactgacccaatgatggaatatgtacaaagttggtaggtaatgtattgacataggttggagagattttaaattagacaagaaagtaactaaataataaattattatttattttgaaaaaataatttaattgttacaaaaaatgattcaaatttgattaaggggaggagggtgtgggtgaaaaaataaaagaaagttgatactcctctcttccttccctttatcttatccgcagagagagtggtgtgttgcgaattgcaatggcagttaaccgtcctgtccttcctgttcaccaaaatccaaccattaccattaactgttgctcctcaccaattcctccc

SEQ ID NO: 19311 - DNA, 370 bp, Glycine max
  Clone ID: LIB3049-028-Q1-E1-F8
gactcagccgctgcgaggcgaacagagagacccgaagccagatttcaagatgaagttcaacattgcgaatcccacgactggttgtcagaagaagctggagatcgatgatgacctgaagctacgagcattttgggacaagaggatctcacaagaggttgttggtgatgctctgggtgaggaattcaaaggctatgtcttcaaaattactggaggttgcgacaagcaaggatttccaatgaagcaaggagtgttgacccctggtcgtgttcgcctcttgctgcatagaggaactccttgtttccgtggttatggaaagcccaatggacagcgtaggaaggaggtcggtccctgggtgcattgtcagccctga

SEQ ID NO: 19312 - DNA, 244 bp, Glycine max
  Clone ID: LIB3049-028-Q1-E1-F9
ggagttacagccgcagcttgaaacagagcagagcgaccttgaagagctatggctgtcggaaaggggaagaggatttccaagggaaagaaaggtggcaagaagaaagccgctgatctctttgccatgatagactggtacgatctcaaggccccttctctcttccatgtcaagaatattggcacgatcctcgtctctcgtacccagggaaccaagattgcatccgaacgactcaaatctccggttt

SEQ ID NO: 19313 - DNA, 381 bp, Glycine max
  Clone ID: LIB3049-028-Q1-E1-G1
gattgaaagatgaaataaccaactataccttgcttctattggtaacggtcaccaaacacactacaatgctgaaagtgagaccctggatttgcacaacccattaccccttttcaatttcagatcaccctctctcattcccaatcgccattctcaatccaatttctcttcgcctttcgcaatcgcatccaactcccacaatcccatgcgctaagacgcgcggctggtcccaaccatccaatcgaaaaattcttcaactggcttccaccgtcgcgttcaatctcaagatcctgccggatcccttcaattccctcgctggcgaaatccccccgcggcaatcccagactctgagctttctcgtcggtggtggccggatagggaaaa

SEQ ID NO: 19314 - DNA, 356 bp, Glycine max
  Clone ID: LIB3049-028-Q1-E1-G10
gatgcttggaaagaaagaaaattgagacatcatatttagtaatatagagatagaggctctttaggagtgataaaacatgttggaaggtaaagctgtgatagaggatactgacatgccagataagatgcagatccaagccatggcatccgcttatgaagctctggatctctatgatgtttttgattgcacatccattgctgcccacataaaaaaggagtttgatacaaagtatggttctggatggcagtgtgtggtgggatcaagttttgggtgttttttcacccattccaagggaacattcgtctactttactctggagactctcaatttcctcatcttcaaaggggcttcttatc

SEQ ID NO: 19315 - DNA, 362 bp, Glycine max
  Clone ID: LIB3049-028-Q1-E1-G11
ggctctgctgttgcgttgcgtctttcattttcacactcaaccctttcttcatccttttatctcgtctctgccaaaacgatgccgtttgctctggagaataacggaggagttacgatcggacggtcctccttcgcttactgcgtcgcgatctgcgatcgtgattttccggaggatgattccgactccagctccgactcctccatcggaaggaacagcatctcgtcggaagattcctccgaccgggaagacgccgtcgaagttgaggttcagagttccttcaaaggccctttggataccatcaatgatctagaggaagatttacccgtcaagaaaggcatatctaagttctatagcggcaaatc

SEQ ID NO: 19316 - DNA, 351 bp, Glycine max
  Clone ID: LIB3049-028-Q1-E1-G12
ggtgtgagttcattaacatatacaaattctctgtgttgtgttgtgtacttgtgttaattgtgttgttgttgtaggaaagttaagtgaagagagaatgatgatgaagtctgctatgtgtgcattggtgcttgtggcactggttgtggttgaagtggggcccatggctgaggctgcggtgacttgcaacccaacacagttgactccttgtcttccggcaattaattcacgttctgcaccttcgagtgcttgttgccagaagctgaaggagcataagccatgcttctgtggctacctcaaaaaccctagcttgaagcagtatgttaactctcctaatgccaaaataaccgttag

SEQ ID NO: 19317 - DNA, 380 bp, Glycine max
  unsure (1)..(380): unsure at all n locations
  Clone ID: LIB3049-028-Q1-E1-G2
gacaagtccaaagtttgattccaaaatgcgatcctcaagcattcgcagcttcaccatcttcaccctctttctcattgcgatcctcccccacggacacgcaacaactccaacctccaaacttcgcctcaaacctctctcttctcccttttcaaccgccctcgaaaccctccagaaacaactcgggtacaccttcaagagcatcgatcttcttcgtcgcgccatgacacacgcttccttctccgaagaaaacaacaaagctttcgccattctcggcgccagcgtcatcgaaacctccgtctctttccatctgctctccagagacgttgatccttccttcanaagaactgaaccgtcgattgtcccaaatcaccaacgtcgat

SEQ ID NO: 19318 - DNA, 387 bp, Glycine max
  Clone ID: LIB3049-028-Q1-E1-G3
ggctctaaataatagaaaagtactgtgggatcatcgaggagcgagggaacccaaggccaaatgcctcaactcaaccctctcactctcacgctctcatactcattcgctcactcgctcaccctctagggttttttggaatcagaaaacgaaatagggttttagcggaacgatcatggcaccagctagggttttcggggcaatcgccggcagagcgttcatggcggcggcggcgaagagcgcggcgaagaagaaacccgctccgtccagcggagccgctgcgaaagccgctgtgaagaagacggccgcgcccaggaccaccaactccggcatacaaaaaggtggttccggtgtcttccgagctcggagacttcctcggcgctcctcaag

SEQ ID NO: 19319 - DNA, 240 bp, Glycine max
  Clone ID: LIB3049-028-Q1-E1-G4
gctataatactacataatggggctctaaataatataaatctactgtcgcatcatctacgacctatgcgaacccaatgtcatctgcctcaactcaaccctcgcactgtcacgctctcatactcattctctcactcgctcaccctctacggttttttgcaatcaccaaactaaatatggttttatccccactatcatcgtaccatctaaggttttctcggcaatcgcccgcatacctttcat

SEQ ID NO: 19320 - DNA, 378 bp, Glycine max
  Clone ID: LIB3049-028-Q1-E1-G5
gaaacagagagtgagagagagggcaaaaccctagctttggagtcttccctcccatctcccacttcttgcaatctctgcagccatggcgagtaccaaagttcagagggttatgacccaacctattaacttgattttcaggtttcttcagagcaaagcgcgcattcagatttggctttttgagcagaaggatttgaggattgaaggccgaatcatcggttttgatgaatacatgaatttggttcttgatgatgctgaagaagtgaacgtcaagaagaaaagcagaaagacattagggaggatccttcttaaaggagacaacataaccttgatgaataacacggggaaatgattaacactctggcacagttgtaaactccg

SEQ ID NO: 19321 - DNA, 382 bp, Glycine max
  Clone ID: LIB3049-028-Q1-E1-G7
ggactgtcagcagcgcattatagcacaccacacaaaaaagcaaaacagagagaacaactgttactcacacacgccatgggtaaatgaatggtttttgagcaacagcagttaaaagagaaaagggattcagcgaagatgacatcggttggtgtggcaccaacttcgggtttgagagaagccagtgggcatggagcagcagctgcggatagattgccagaggagatgaacgatatgaaaattagggatgatagagaaatggaagccacagttgttgatggcaacggaacggagacaggacatatcattgtgactaccattgggggtagaaattgtccagcccaagcagactataagctacatggcagagcgtgttgtagggcat

SEQ ID NO: 19322 - DNA, 374 bp, Glycine max
  unsure (1)..(374): unsure at all n locations
  Clone ID: LIB3049-028-Q1-E1-G8
ggttctagtgtgtgattgtttgttgttgtaactcgttcttcttcttttgttgttctgtgtttgtgtttgttttttctctcacctgaaaatgtcttgctgcggtggtaactgtggttgcggaagctcctgcaagtgcggcaacggctgcggaggctgcaagatgtacccagacttgagctacactgagtcaaccaccaccgagaccttggtcatgggagtggcacctgttaaggctcaatttgagggtgctgaaatgggtgtgcccgctgagaacgatggctgcaaatgtggaccaaactgctcctgcaacccctgcacttgcaagtgaagtgtttggagagcaggcttcangcagagatagcccttaattagga

SEQ ID NO: 19323 - DNA, 376 bp, Glycine max
  Clone ID: LIB3049-028-Q1-E1-G9
ggcagccaagaaaagaaaatcctcacccattttcttcgtagccaaacactctgaaattctcagttatgtcgtggcaagcgtatgtggatgatcacctaccgtgtgaaatcgaaggtaaccacctcactcacgccgctatcatcggccaagacggaagcgtttgggctcagagcaccaacttccctcagttcaaacctgaggaaataactgccatcaataatgactttaatgagcctggatcacttgctccaactggattgtatatcggtggcaccaaatacatggtcatccaaggtgagcctggtgctgtcattcgagggaagaagggtcctggtggtgttactgttaagaaaaacggttgcggccttaataattg

SEQ ID NO: 19324 - DNA, 374 bp, Glycine max
  Clone ID: LIB3049-028-Q1-E1-H1
ggagagagagagaaatggagaagacaggagtgttatcggcgaaggaggcattcgagaagcttgaaaaggtgggagaagggacatatgggaaggtgtacagagcaagagagaaggcaactgggaagatcgtggctctgaagaagactcgtctccacgaggacgaagaaggtgtccctcccaccactctccgtgaggtttccattctgcgaatgctctctcgcgatccccatgtcgttaggttaatggatgtcaaacaaggtcagaacaaggaagggaagacagtgctctacttggtatttgagtacattgacaacgatttcaagaaatcatacgctctttccgtcaatctggggaaaccattcctccccatatca

SEQ ID NO: 19325 - DNA, 302 bp, Glycine max
  Clone ID: LIB3049-028-Q1-E1-H10
aagggttctcatttcgcaaccatcggccgcacttactcttgttctcaagggattcgattttctctgcactcacttctagggtttcctccgcgctatcagcaatcatggccgacgaaacaccaaatgagatgaaggaggaggttccagaaattgttccttttgatcctaccaagaagaagaagaagaagaagattacaattgtagatcctgctgatgaccctgtggagaaattggctgagaagacagaaaacctctcagtttctgagggggttgagactgcatttgctggtttgaaaaagaag

SEQ ID NO: 19326 - DNA, 343 bp, Glycine max
  Clone ID: LIB3049-028-Q1-E1-H11
ggaacttctcacgttcatttctacacatccctagctctgtcgttccgtcgttgacgatggcgtttcgggtgcgaagccctgacctccgctctctctttcttctctctctcttgtccatcgcttccgccaatgtcttcttcgaagagcgtttcgatgacgggtgggaaaatcgatgggttaaatcagattggaaaaaagatgagaacgtggctggggagtggaaccacacctctggtcaatggaatggagacgctaatgacaaaggtattcaaaccagtgaggattacagattctatgctatttcagctgagtaccctgaattcagcaacaagggtaagacact

SEQ ID NO: 19327 - DNA, 190 bp, Glycine max
  Clone ID: LIB3049-028-Q1-E1-H12
gacgcatagagagagagagagagagaagcagaggaagaaggagaagaaggagatcttgagagatcaggtcgcaactcggcatggggagagaagttacaggaatgcaagttgtggacaagaagccaaatggtgttataccagcttcaaatggtagttctaatgataaagtatgcttttctcctaaaatgga

SEQ ID NO: 19328 - DNA, 322 bp, Glycine max
  Clone ID: LIB3049-028-Q1-E1-H2
ggcaatagccaagagatagaagggaaaagtgggaacacacagaaagccagagaaccagagagagagagagagagagagagagtgtgcttctctctgcacttgcactattgcaggcctcagctttgtttggttttggattgagaaagttgatatagttagagaaagagaaagtgtacatctttctatcatatagtgtatatatatatatatatattgcgtgtgtgagagatgcagcagcacctgatgcagatgcagcccatgatggcagcctactaccccaacaacgtcaccactgatcacattcagcagtatctggatgaga

SEQ ID NO: 19329 - DNA, 265 bp, Glycine max
  Clone ID: LIB3049-028-Q1-E1-H3
cggggacagaaagactgaggagaaaattacagaacattttccaacacaattacacaaccgaatcaaaccctctctttcgcgccggagctgcgtttaatatcttacactccatagattattcttctctttcattatactgttctcttttcgatttgacggaacagtacaagagtgtgaggatcagttaacccatcttcatatgtagtcactaaaataatgtattctcactatcacactagctgccacactcctgaacgctccattc

SEQ ID NO: 19330 - DNA, 384 bp, Glycine max
  unsure (1)..(384): unsure at all n locations
  Clone ID: LIB3049-028-Q1-E1-H4
gtggtaacactgttgctatggttggtttggatcagttcataacaaagaatgctactttgactaatgaaaaggaagttgatgcccatcccattcgagctatgaagttttctgtctcacctgttgttcgtgttgctgttcaatgtaaggttgcatcagatcttcccaagcttgttgaaggtcttaagcggttggccaagtcagatcctatggttgtttgtaccattgaggagtctggtgaacacattgttgctggtgcaggagagcttcatcttgagatctgtttgaaggacttgcaggatgatttcatgggtggagctgagatcantaaatctgaccctggtgtgtcattcagggagactgtcctggagagatcatgccgcactg

SEQ ID NO: 19331 - DNA, 296 bp, Glycine max
  Clone ID: LIB3049-028-Q1-E1-H5
gaagaagagaaaggagttttctcacatctggctcatggagtatctcaagctgctcatggttaccctccaggggcataccctccacctcctggggcataccctccttaccaagggtacccacctgctcatggctaccctccacaaggtggctatcctccggctggttatccccctgctggctatcctcctgctgctggtggttacccccctgctggttaccctccacatggttatcctggatcatctgctccacatggatctcatgcgcctgggcacggcggtatcggggcattgcc

SEQ ID NO: 19332 - DNA, 380 bp, Glycine max
  Clone ID: LIB3049-028-Q1-E1-H6
ggagcgagacggcagcacgcgcaaaaatggtgaagtttctgaaaccaaacaaagccgtcatcgtccttcagggacgctacgccggcaaaaaagccgtgatagtgcgaaccttcgatgaaggcacgcgcgagcgcccctacgggcactgcttggtggcagggataaagaagtaccctgcgaaggtgatcaagaaggattcggccaagaagacggccaagaagtcgcgtgtgaaggcgttcgtgaagctcgtgaactaccagcacctcatgcccacgcgctacacgctcgatgtcgatttgaaagacgcggtaacccccgacgtgctccaagccaaggataagaaggttactgctctcaaggagaccaagaagcgcctcgag

SEQ ID NO: 19333 - DNA, 379 bp, Glycine max
  Clone ID: LIB3049-028-Q1-E1-H7
ggagagaaagagtgaggagagaattacagagcattttccaacacgattacacgaccgaatcaaaccctctctttctctccgaagctgcgtttaatatcttactcgccttagattgttcttctctttcattatactgttctcttttcgatttgagggaacagtacaagagtgtgaggatcggttaacccaactgcacaggtagtcactaaaataatggagtctcacgatgagactggatgccaggctcctgaacgccccattctttgcattaataattgtggcttctttggaagagcagctaccatgaacatgtgttccaagtgttacaaggacatgctgttgaagcaagagcaggacaattttgcagcatcgtcggttg

SEQ ID NO: 19334 - DNA, 296 bp, Glycine max
  Clone ID: LIB3049-028-Q1-E1-H9
gatccatactcaaaatacaaaaatggagagagtagctaaggtgttggtgatgttgagcatggtggtgttggtgcttgcgtcaaatgctcaagggggacgattacttgaggaagagaatgtggatcagccccagacgttccttggatcaggtggaggccttggtgggatctttccaatcccaagcccaggcttcagcttcactggcgtgggctttggcccatcgtgggttttgcactttctctggtggtcgccccggtacctcgtctttgcccactacacccggtgctcgtcggtca

SEQ ID NO: 19335 - DNA, 392 bp, Glycine max
  unsure (1)..(392): unsure at all n locations
  Clone ID: LIB3049-029-Q1-E1-A1
ggtaccgtacgtacatggcctacgtcgatacggcagcgttttgaggtattctgcaattgttaccgaactcattccccttttttccgtcgttcttctcaatttgtctgagaaattcgtgaaggaacctcactctgttgctgcattcccccatggcttctgcttcagattttgcgttagcggtttcttctgaactcgagtcagttttgaggctgaagactgttaactactttgttacgacgaggccatggctcgatctttatggagttaacgtgagacctgttgcgcctgttgggagtgcaagtangagggcttacgtggatcctgcacttaaacatcgttccctacccggatgagctgctttttgaggtttttgcccgaatgactccatatga

SEQ ID NO: 19336 - DNA, 385 bp, Glycine max
  Clone ID: LIB3049-029-Q1-E1-A10
gaatctagtggaagagtgaataagagatatcaatatattatgataatggagggatacaataagaaggttatgattgtggggatggtgttgggcatggccatgattgggatggccaatggccaatactcgttttgtcgcatgcccagcgatgggttggcggcatgcaagccgagtgtgagtggggactatcctgctgatccctccactgcttgttgctcagccattgccaaggctgatcttaaatgcttctgccgcttcaaggattcgggccttctctctatgtatggtgttgatcccaacaagtgcatggaactccctgttaagtgcaaggttgtcgactctttccactgctagattcattagagggggcactaatcaatataaa

SEQ ID NO: 19337 - DNA, 394 bp, Glycine max
  unsure (1)..(394): unsure at all n locations
  Clone ID: LIB3049-029-Q1-E1-A11
ggggtttcgcagaagagagagaaacccatttctagagagagaaactcgcagtcgcagacatgtcttccttcgatgccttcgccgacgacttgaacgtcaactcttcttccactcgccagcacgacgatgacgaggacaacttctctggctacggcggctactcctccttcaccggaggattctccgccgacggagatgtcgccgtcgatcactccgccgccgcgtcgccggagatctacggcttcactgattcgaatcgcgcttactctcagtctcncttcgaatcggccaccgtagagaacgaaaacggaaacggatacggcgacggcgacggtggttttgtctccgaacgtccggtgcttcctccggcgacggagatggagccggaggaagg

SEQ ID NO: 19338 - DNA, 379 bp, Glycine max
  Clone ID: LIB3049-029-Q1-E1-A12
ggagacttcacagtgtggataagcttttcggttgtgccttgttttcattccaacacagtttgaaagcaatgcaggtcacctatgatttttgtccttcgtagaaggacactttctcatagccacgatctctctctctctctctctctctctctcttgcgttgcatttccatttccagtttccacccatggctgctctcacttctctctctttctcagcagtgactcattgctcagaaagaaagtaaccctttcctccactcgttttctcgcctcctcctcagaactccttgggttccgaaacgatttctcgtaccactatgttggtgttcgagcttccaattctgcgtctaaaatggttgttcaatgcatgtcttctgcc

SEQ ID NO: 19339 - DNA, 393 bp, Glycine max
  Clone ID: LIB3049-029-Q1-E1-A2
ggataaaatgatgagtaaattattttgacctaaaccttaaccttaacctatgtttaaaaaataaattattttgaaaccctaggttggagatggtggtgggaggaacagcagatttcttctacaaagaagctcaacggttagggtatgtggctcgctccgccttcaagctccttcagatacagaaccagcacaagattatcagccctggctcctccattctcgacctcggctgcgcccccggcgggtggctccaggtggcttgccagagcttgggtcccttccgcggccgcggctccgtcctcggcgtccacacaaagaaagtcaaggtaacccctcttcactgcgattctagggttcaaaccatctccgctgacgtcaccacgctcccccacc

SEQ ID NO: 19340 - DNA, 239 bp, Glycine max
  Clone ID: LIB3049-027-Q1-E1-B10
tggggtaataacactcacgtgacactgctaccagagtgagagaaattggctgcggcggtcgcggcggggtacagtggacttactccggataaatggcagtttcagtgatgcgcaaccgcattaacgaccacgactatgaattacaccaccacccccttttctactaccatcgtgccttccaagaagacccctatgctcccccacacgtccttgacctccccgcttccgctcatccacgc

SEQ ID NO: 19341 - DNA, 380 bp, Glycine max
  Clone ID: LIB3049-025-Q1-E1-A6
gggtctcctttgaggcatgcaattgagtcttcgtgcgccaagactctggcaccggcaccgtttgtgtcttctcctgggtcggtgtcgccgcctctggagtctccgccgatgtcgccgatgactgtgagtgttaatgagatggtggcgtctttaaggaacttgcaactggggaaggtgaagtctttgccttcttcttggaatgtcatggggccttccgggttcggatctccgagagggcccatgatccgacccggattcttcagccttccgacaaccccgacccaggcaccgactcgcggtggggtcaactactttgacaagtgggatcagagttgcgaggaggagcctgttatggaaagggtggagtctggacgaaacat

SEQ ID NO: 19342 - DNA, 405 bp, Glycine max
  unsure (1)..(405): unsure at all n locations
  Clone ID: LIB3049-025-Q1-E1-A7
ggcacttcaattgcaatcaaattagttcattctctttgcgcagttccctacctctcctttcaagatgcagatcttcgtcaagaccctcaccggaaagaccatcacccttgaggtggaaagctctgacaccatcgacaacgtcaaggccaagatccaggacaaggaaggagttcccccggatcagcaacgtctcatcttcgccggaaagcagctcgaggacggccgtaccctcgccgactacaacatccagaaggagtcaacccttcaccttgtccttcgtctccgtggtggcatgcagatcttcgtcaagactctcactggcaaaaccataaccctagaggtcgaaagctctgacnacattgacaacgtcaagggcaagattcaggacaaggagggaatcccccc

SEQ ID NO: 19343 - DNA, 364 bp, Glycine max
  Clone ID: LIB3049-025-Q1-E1-A8
ggctgctattgcgttgtatgtcacacccttccagctgcctattcttctgactggattctacttgatgaggcaccccatgcttcgaagcaaggtgccgcctgctccggttaatttcttccgcaggttgccttctctcacagacagcatgctgtaaatggacactcttggtgtgttcttgaatcttgaaaacttatctgctgctgccagtgtttgaatctggcattagtttttggcagtggttgtagaatcattggagctatctcactttgtgttggtttattgagtgttgactgttgatgcaactgcatacttagtgtggtaaaactccaatgtagttttcatgttaatcagcgtttgtgaactt

SEQ ID NO: 19344 - DNA, 307 bp, Glycine max
  unsure (1)..(307): unsure at all n locations
  Clone ID: LIB3049-025-Q1-E1-A9
ggaagttttgtggtgtggtttagtgtcaaatggcggcgagtagaagcacttttcctctgatgaaatacttgagagtgcgcgtcgacgctcttccccgcaacactcccctaaccctcgctcccaactttttgattcgccgcttctgtgaagaggttaggggttgttttctcgacaagtctgaggtcacagatcgcgtcatttcctgcgtcaaaaacttccagaaagttgatccttcaaaggttaaccctaatgctcacttccagaatgaccttggattggatagtttagattcggtanagattgtgat

SEQ ID NO: 19345 - DNA, 310 bp, Glycine max
  Clone ID: LIB3049-025-Q1-E1-B1
gagacatatgtaataatgatatcatgtataatttgatgataatagattttgtattcttcctctgaagccataacctaaccttaaaaggctaaaaccttttgtgtttgcgccgctctaaagccaagcctgagactcgcgactcaccaccactgctcgccggcctctaattttgaaagcttctgcgcctcccacgccatttttgatactctctttgtgttcgcatagtgagatatggggaagaaggcgaagaaagctatgaagaagaatttgaaaagggcttcctttaataagaatccatctgaagatgctg

SEQ ID NO: 19346 - DNA, 324 bp, Glycine max
  unsure (1)..(324): unsure at all n locations
  Clone ID: LIB3049-025-Q1-E1-B10
gggagcaagagtgaagagcgaagagaatggctcccaagggtttaatctttttggctgtgttatgcttctcagcactgtcactgagtcgttgtcttgcggaggataatggacttgttatgaacttctacaaggaatcatgccctcaggctgaagacatcatcaaagaacaagtcaagcttctctacaagcgccacaagaacactgctttctcctggctcagaaacatcttccatgactgtgctgttcagagttgtgatgcttcactgttgctggactccacaagaaggagcttgtctgagaangaaacagatagaagctttgggt

SEQ ID NO: 19347 - DNA, 295 bp, Glycine max
  Clone ID: LIB3049-025-Q1-E1-B11
gtacttttgatgtctctttacttaccattgaggagggtatctttgaggtgaaagccacagctggggacacccatcttggaggtgaggattttgataacaggatggtcaaccactttgttcaggaatttaagagaaagaacaagaaagatatcagtggcaaccccagagcacttaggaggttgaggactgcctgtgagagggcaaagagaactctatcttcaactgcccaaaccaccattgaaattgattctctctatgagggaattgatttctactccagcattactcgtgctag

SEQ ID NO: 19348 - DNA, 315 bp, Glycine max
  Clone ID: LIB3049-025-Q1-E1-B12
gagtggaagagtgaataagagatatcaatatattatgataatggagggatacaataagaaggttatgattgtggggatggtgttgggcatggccatgattgggatggccaatggccaatactcgttttgtcgcatgcccagcgatgggttggcggcatgcaagccgagtgtgagtggggactatcctgctgatccctccactgcttgttgctcagccattgccaaggctgatcttaaatgcttctgccgcttcaaggattcgggccttctctctatgtatggtgttgatcccaacaagtgcatggaactccctgt

SEQ ID NO: 19349 - DNA, 401 bp, Glycine max
  Clone ID: LIB3049-025-Q1-E1-B2
gagaaggactcaattgagagagagagatggagaagccaggaggaggaggagtgttatcggcgaaggaggcattcgagaagcttgaaaaggtgggagaagggacatatgggaaggtgtacagagcaagagagaaggccacggggaagatcgtggctctgaagaagactcgtctccacgaggacgaagaaggtgtccctcccaccactctccgtgaggtttccattctgcgaatgctctctcgcgatccccatgtcgttaggttaatggatgtcaaacaaggtcagaacaaggaagggaagacagtgctctacttggtccttgagtacatggacaccgatctcaagaaatcattcgctctttccgtcaaactggacaaaccgtttcaccccaaaccatcaaaa

SEQ ID NO: 19350 - DNA, 406 bp, Glycine max
  unsure (1)..(406): unsure at all n locations
  Clone ID: LIB3049-025-Q1-E1-B3
ggggcgaggtagccagagagtgatacaatacagagtgcgttgttgctccttcgccacaactccctgccaacatgggtatctccagagattctatgcacaagaggcgtgccactggtggcaagaagaaggcatggaggaagaagagaaagtatgagcttggtcgccagcctgctaacactaagctgtcaagcaacaagacagtcaggaggatccgggttagaggtggaaatgtgaagtgganggcactgagattggatactggaaattactcctgnggaagtgaagctgtaactcgcaagactcgtatactagatgtggtttacaatgcctcaaacaacgagcttgtgcgtactcagactcttgtaaaaagtgctattgttcaggttgatgctgctccattcaaaca

SEQ ID NO: 19351 - DNA, 397 bp, Glycine max
  Clone ID: LIB3049-025-Q1-E1-B4
ggcagcgcttgatttgaggccaggcaagccccactcaaccaccacacctctcctcgttcacgctacccctttctgctcttcttctacctttcaagttttaaaagtataaagatggcagagacattcctatttacctcagagtcggtgaacgagggacaccctgacaagctctgcgaccaaatctccgatgctgtcctcgacgcttgcctcgagcaggacccagacagcaaagttgcctgcgaaacatgcaccaaaaccaacttggtcatggtcttcggagaaatcacgaccaaggccaacgttgactacgagaagatagtgcgtgacacctgcaagaacatcgggctcgtctcaaatgatgtgggactggatgccgacaactgcaaggtcctcgtca

SEQ ID NO: 19352 - DNA, 367 bp, Glycine max
  unsure (1)..(367): unsure at all n locations
  Clone ID: LIB3049-025-Q1-E1-B5
ggctgtgaagtgtgaattaaaatatattcaattttgcgtttctctgcctaaaaggattgaaagatgggtcaagcattcggttgctaccaagtcgatcagtcaaatgtggctatcaaggagcattttggaaaatttgatgatgtcctagagcctggatgtcactgcctgccttggtgtcttgggtaccagattgctggtagtctgtcgctgcgagtgcagcaacttgatgttcgatgtgagacgaaaaccaaggacaatgtctttgtcaatgtggttgcatctgtgcaataccgagctgtgtctgagaaagcatctgatgcattctataggcttaccancacaagggagcagatccaatcatatgttt

SEQ ID NO: 19353 - DNA, 315 bp, Glycine max
  Clone ID: LIB3049-025-Q1-E1-B6
ggaggttttcttagttattgttaccatttgctcccagcactgagcttaaccgagcttcacaaagatgaatcgggaaaaattgatgaagatggccggttcggttagaactgggggaaagggcaccgtgtgaagaaagaagaatgctgtccacaagacaacaaccacagatgacaaaaggcttcagagcaccctgaagagaataggggtgaatgccatcccggctattgaggaggtcaatatctttaaggatgacgtacttatccagtttctaaatcccaaagttcaagcatgcattgctggctaatacttgggttg

SEQ ID NO: 19354 - DNA, 363 bp, Glycine max
  unsure (1)..(363): unsure at all n locations
  Clone ID: LIB3049-025-Q1-E1-B7
ggaaaccaacttgctgaagctgacgaattcgaggacaagatgaaggagttggagagcatttgtaaccccatcatagcaaagatgtaccaaggagctggtggtgatgcgggtggagccatggatgaggatggtcctgctgctggcagtggaagcggtgctggacccaaaattgaggaagtcgattaagcagaccaattgtcatgggttgttcttgattttgcgaagacccttttgaagtttagataataacctgtcttgtcattatgttttggatttggattttacttttctcgtttttttaatgtacttttccccgtttcaacttaacaatgatataagttgcatatggtcccganaaanaaa

SEQ ID NO: 19355 - DNA, 188 bp, Glycine max
  Clone ID: LIB3049-025-Q1-E1-B8
gagacacagagtgttggcaaatgggttcaagtccaggctttcaatgatttactttggaggtccacctttgagtgagaaaatagcaccattatcctctctcatgaaaggaaaagaaagtctatataaagagtttacctggtttgagttacacaaatcaatctacggttcaagattatctaaaaatagac

SEQ ID NO: 19356 - DNA, 195 bp, Glycine max
  Clone ID: LIB3049-025-Q1-E1-B9
ggtctgcgcctgatttctcagtgctctcacacactcattcggtgctccgaatctcagattctacggttagggttcccaagttctccgccgatcataaaatgagttcaactggtggttctaccaagggcggaaggggcaagcctaaagccgccaaatccgtctcctgatcgcagaaagctggtccccaattcctcg

SEQ ID NO: 19357 - DNA, 401 bp, Glycine max
  unsure (1)..(401): unsure at all n locations
  Clone ID: LIB3049-025-Q1-E1-C1
ggaatttggcagattcattagaagaaaatggcgggtggtggaaaggtttcgttcaaagtcacactcacctccgatccaaagttacccttcaaagtgtttagcgttccagaggcggcaccttttactgccgttctcaaattcgccgccgaagaattcaaagtcccgccccagaccagcgctatcatcaccaacgatggtgttggcataaatccccagcagagcgcaggcaatgtcttccttaagcatggttcagaactgcgcctgattccgcgtgatanggtccgtgccttttagatgttaccggtgtctgacttgatattgaccttttttgcaaaatacatgaactgttgtagcttcctaagtagagtaatcaataaatacaatgttactgatttcatata

SEQ ID NO: 19358 - DNA, 354 bp, Glycine max
  Clone ID: LIB3049-025-Q1-E1-C11
ggttataacccgcactgagtagtgatccgttagggttttagtttgttaaaaaagaactgcaattcccaaagcggttgggacggtggtggtgaaggcatcagtaacagttagggtttcccaatggaggagcaggcgtcccagatcggccgctccctggtgaagcagctggcatgctgcaagaaaaccactcgagacaaatccctccgcctcctcctgaaatcatggctcccgtcgcagtcccagcccctctccgacgacgatgccaagaagctttggaagggcctcttctactgcatgtggcactccgacaagcccctcgtccaatccgacctcctcgatcgcctcccctctctc

SEQ ID NO: 19359 - DNA, 407 bp, Glycine max
  Clone ID: LIB3049-025-Q1-E1-C12
gaattccaagtagccacagctctcctctcactttcatttctacatccctggctctgttccgtcgatgacgatggcgtttagggtgcgaaaccctgacctccgctttctcattcttctctctctcttgtccatcacttccgccaaggtcttcttcgaggagcgtttcgatgacggatggggaaatcgttgggttaaatcagattggaaaaaagatgagaacctggctggggagtggaaccacacctctggccaatggaatggagacgctaacgacaaaggtattcaaaccagtgaggattacagattctacgctatttcagctcagttacctgaattcagcaacaagggattagacacttatcctccaatttcctgtcaagcatgaacagaagcttgactgcggtggt

SEQ ID NO: 19360 - DNA, 303 bp, Glycine max
  Clone ID: LIB3049-025-Q1-E1-C2
ggaaataggaagattcttgcgtaagcagcatcttcctctctcttattctattcccttattttccctttttgtttcttatttctcaaaattcaaagaacctgaaatcaaccacaaccttctcctatatataatacacacttctgcattgctattccttctcagcattctccttagcctcagcattgttggctagcacttaacactttccaaccaatcagtaccagcaacttcttgctggtactcaagttgtcctgcatcttctgtgggggatgacatgactcaaaacagcatactgaatcacag

SEQ ID NO: 19361 - DNA, 393 bp, Glycine max
  unsure (1)..(393): unsure at all n locations
  Clone ID: LIB3049-025-Q1-E1-C3
gaagggatcgagcctcggaggagggaatcgcagcgaagtccactatgccgaagcaaattcacgagattaaggacttcctcctcactgctaggaggaaggatgcacgctctgtgaaaatcaagcggagcaaggatgtggtgaagttcaaggtccgttgctccaagtacctttacaccctctgtgtgtttgattctgagaaggctgataagttgaagcaatcacttcctccaggtttaagcgtgcaggatgtgtgattcttactgctgtatgaagatcaggtttttctctggattttggggattcatagttagtaaaatggttcagagaattttcgtatttgttgttacattcgggatcatgtnagtattttgtttaagacggattcaacttgct

SEQ ID NO: 19362 - DNA, 176 bp, Glycine max
  Clone ID: LIB3049-025-Q1-E1-C5
cattacgcatagttgttaagtttcgttcagagtcacactcagatcctatcctgggttgggcttcaaactgtttagcattccagaggcggcaccttttattgcctttctcagattcaccacccactaattcaatttctcgccccatatcagcgctttcatcaccaactatggtgttt

SEQ ID NO: 19363 - DNA, 350 bp, Glycine max
  Clone ID: LIB3049-025-Q1-E1-C7
gaatccaaacctagctaagtgctcttacaaagagaggagtgagtgagaaacaagatatttaaagttacaaaaaatggagagagtggcaaaggtggtggtgatgttggccatggtggtgctggtgctaattgcttcaaatgttgaagggggacgattactgaagcaagagaatgtggatcagcccgagaccttccttggtgggatatttccaagcccaagcccaggtttcagcctcaccggtgtgggctttggcgcatcctggttttgcactttccctggtggttgtaacggtaccccttctttgcccactattcccggtgccggcgtgtcactaccatttccaccacatg

SEQ ID NO: 19364 - DNA, 318 bp, Glycine max
  Clone ID: LIB3049-025-Q1-E1-C9
ggttctagtgtgtgattgtttgttgttgtaactcgttcttcttcttttgttgttctgtgtttgtgtttgttttttctctcacctgaaaatgtcttgctgcggtggtaactgtggttgcggaagctcctgcaagtgcggcaacggctgcggaggctgcaagatgtacccagacttgagctacactgagtcaaccaccaccgagaccttggtcatgggagtggcacctgttaaggctcaatttgagggtgctgaaatgggtgtgcccgctgagaacgatggctgcaaatgtggaccaaactgctcctgcaaaccctgcac

SEQ ID NO: 19365 - DNA, 407 bp, Glycine max
  Clone ID: LIB3049-025-Q1-E1-D1
ggagtgaaattggaaattgcatttgaataatgatgtccatattccggcaatacaccttggacgactcattctcgcaagtgttggtgtccccgaaattcctgaaggagtaccaaatagccctgaccttcgcaagcgactacgacgacgacggcgtccccaccaacggggttttccggccaacctgggacctaaccaaggtgaccccggaatcaatcacgcgattcaaggataagaaccccgacgtggacatcaaagtcttcatcagcatcggcaaccgcggcaaccggcaacccttcaaacccctcaacaaacaaacctggattcagaaacgcaccatgtccctcaccagcctcatcaacaacctccacgtcgtccacggcatcgacgtcctctacgaccacatcgat

SEQ ID NO: 19366 - DNA, 323 bp, Glycine max
  Clone ID: LIB3049-025-Q1-E1-D11
gaacaccaaaacagaaccaaagttatggataccctctctcagcttagccttctttgcctttgcctttccttctttccccttttcgcttcccctgctttgctgtttcaggggttcaactgggaatcaagtaagaaaggtggttggtacaactcgctgaagaacactattcctgaccttgcaaatgctggaattacacatgtttggctccctcttccctctcaatctgtttcacctgaacgttatcttccaggaaggctatatgatcttgatgcatcaaagtttggaacaaacgatcaattgaagtccttaaatgctgctttcca

SEQ ID NO: 19367 - DNA, 323 bp, Glycine max
  Clone ID: LIB3049-025-Q1-E1-D12
ggcgcattgaacgaaaattaaggtttgtaatgtaacaagaagaagcaacaatggcgccgaagataacacgtaaggttagcagaaaccctgaattgataaggggaatcggaaagtactcgaggtcgcagatgtaccacaagaggggcatttgggctatcaaggccaaaaacggtggcgttttacctcgccacgaccctaaacccaagcctgaagctcctgctgaaaaaccacccaaattttaccctgctgatgatatcaagaagccccttgtcaacaagcacaaaccgaaaccagctaagctcagggctagcattactcccggg

SEQ ID NO: 19368 - DNA, 262 bp, Glycine max
  Clone ID: LIB3049-025-Q1-E1-D2
ggcggtgagacgatgggggagaacgagaaaggagagcgatggagcggagcgatgacaaatctgacggagatggcctccaatctcgactctctccagaagcttctcctcaccaaagccgtcttcgtcgacgacgacaccttctccaaagcctccctcgccgccgaccaggcccgcacaatcaagctcctccagcaacgagtccagaccttggaaagaaaggtcgacgccgccatcacaaccgccgcccgggctcgctccaaaa

SEQ ID NO: 19369 - DNA, 394 bp, Glycine max
  Clone ID: LIB3049-025-Q1-E1-D3
ggttttgaaatcgagtaaatggaagcgacattctcttcaacgacggcaagaggatactggaatcagacacgtggttcgacagaacctttgttgctgagagtagatgaggctcgcgatcggaaaccgagttcactgtccattgcgcggcctagcaagttcgtgcagctgtcacttgctcgaaccaggaagagttctttctttaaggtgttatctgctgaaaaggaacaaattcacgttgtagagggaagtcgtgttgatgagttatatgatgcaatggttacacgtattccgcctttggtcccagtgtcatcaaatcctaatcacaagcttttagttgggctggctggtcctcctggtgctggacaaagcactccagcacatgaagtagccagac

SEQ ID NO: 19370 - DNA, 310 bp, Glycine max
  Clone ID: LIB3049-025-Q1-E1-D4
ggcttaaaactaaaacagagggaagcaactggtgcaggaacagaacgagaaaggaaacgaagagaagagaagagaaggagaaggagaagggtttggtagttggttacttagtttgtttgattaacgactgcgcactacacgatccccacaatccagacgcttgttattatctccatccatttcatttcattcccacaaccacgctcatctaagtttcaatttcaatcccttttctttttcctttttatgttaaattccactttcgcgaaccccaaattccctccctccttttccctttctctctgttctg

SEQ ID NO: 19371 - DNA, 400 bp, Glycine max
  Clone ID: LIB3049-025-Q1-E1-D5
ggtgtggcactcaaacattgtttgttgtaggaagaggaatcttgagaaatggcaggggacagcaagagcaagattctgttcatcggagggactggttacatcggaaaattcatcgtggaagccagcgccaaagctggccacccaactttccttttggtgagggagtccactctctccaaccccgcaaaatcacccctcatcgacaatttcaaaggcctcggtgtcaatcttgttttaggagatctatacgatcaccaaagtttggtgagtgctataaagcaggtcgatgtggtaatttctactgtaggacacctgcagctagctgatcaagataagatcatttctgcaattaaagaagcaggaaatgttaagaagttctatccatctgagtttggaaatg

SEQ ID NO: 19372 - DNA, 210 bp, Glycine max
  Clone ID: LIB3049-025-Q1-E1-D9
atttcttgtccaactctacgtcactttgtgttttggctgtggacctcaaataatgggacattcctttgattgtgggctcttgtctacttcttcctcttcgtcttcattatgtattctccatccatcagaaattcacactttcatgaatacgacatatgcttcctctgatttgcacatgacccctaccaatctcaatacctttagatccat

SEQ ID NO: 19373 - DNA, 245 bp, Glycine max
  Clone ID: LIB3049-025-Q1-E1-E1
ggttcaaagaaacttgacaccgattagattaggggcttcgaacaaggagccccgaaacccaaaccctaatctgattcgctttcgattaaggcgtccgagaacgcttcccgattgagttccgcgggcgaatcgtacattgggaacttgataagcctgaactccaaaaatgagattagatacgaagggaatccccacaacatcaacaacgaagagtccaatattggcctcaaaaacgttcggtcctt

SEQ ID NO: 19374 - DNA, 224 bp, Glycine max
  Clone ID: LIB3049-025-Q1-E1-E10
gcgtcctcatcatatcaagacataccagactatccaaactcttttttcatttgcagcatcaaaatgattcgtagcaggcatgggatctggagctcgacctctacgtttttgaacgtcgctactccacctgccgctacacccgccgttgccggctgtttatatgctattctttcaacctcaacctctgctatctctgagatctcactgccctttggcatcccact

SEQ ID NO: 19375 - DNA, 296 bp, Glycine max
  Clone ID: LIB3049-025-Q1-E1-E12
agggataaagttgttgacttccactggaatgcatatgatccatggacgattgttagtgtgtctgatgactgtgaaagtactggaagaaggggaacgttgcaaatatggcgcaagaatgaatttatttacaaaccaaaagataaaggtttgggccaacctgagaaattccaatctcaagttgttgcgtgttcctctaagactggaaaattgatatatctcttgcgcaaaattaatttataataatagcgctgttgtataaaatttaacatttgctgtatatgtcacaggacatttta

SEQ ID NO: 19376 - DNA, 371 bp, Glycine max
  unsure (1)..(371): unsure at all n locations
  Clone ID: LIB3049-025-Q1-E1-E2
agcttgaaagatgatataatgcgcttatatcaaccagttcatttactagttggaacaccaggaagaatattagatcttgccaagaaaggtgtttgtattctgaaagattgcgctatgcttgttatggatgaagccgataagcttctgtccccagagtttcaaccatccaatagagcagctgattcattttcttcctacaacccgtcaaatcctgatgttttcagccacatttcctgttactgtaaaggatttcaaagataggtatcttcaaaagccttatgtcatcaatcttatggatgagctaactctgaagggtattacacaattttatgcattcgtggnagagagacagaaagtccactgcctaaata

SEQ ID NO: 19377 - DNA, 367 bp, Glycine max
  Clone ID: LIB3049-025-Q1-E1-E3
ggagagagagagagagagagaggcacttggaatccaaaaatgagagaaatcatcagcattcacataggtcaggccgggatccaggttggcaactcctgctgggaactctactgcctggaacatggcatccagcccgatggcatgatgccaagtgactcctccttcggtgtagcccacgacgccttcaacaccttcttcagcgaaaccggatccggcaagcacgtccctcgcgccgtcttcgtcgatctcgagcccaccgtcatcgacgaagtccgttgtggcacttaccgtcaactcttccaccccgaacaactcatctccggcaaggaagatgccgccaacaactttgccagaggccactacaccg

SEQ ID NO: 19378 - DNA, 330 bp, Glycine max
  Clone ID: LIB3049-025-Q1-E1-E4
gcaagagttgagcccctagtcaacatgggtcagatcagcagggtgactgtacccatgaatctttcccttgctgtagttgcagagcttgatgatctaactgtcggtggtctcattaacggctatggtatagaaggaagctcccacaaatatggtttgttcgctgatactgttgtggcctatgaaattattttggctgatggcactcttgtgagagccaccaaggacaatgagtactctgatctatactatgccattccgtggtctcagggaacactcggccttcttgttgctgctgagatcaggcttatacccgttaaggagtacatgaag

SEQ ID NO: 19379 - DNA, 410 bp, Glycine max
  Clone ID: LIB3049-025-Q1-E1-E5
ggtgaggtcaggtcgaacagcaagacgaggaaaacgcacgtagcgtcaccgccatcttccatctaaaaccccaaaacttaacatgcccaatctgtgtcgaaaaatgtttcaataatggttctgttccgcaagttcctaaaacaaatactcgtcgacaacacccaaaccaaaacaaaagcccgaacctttttcacctcaacctcaaccgcaaccgcattcccatggtgcgcgcctcaccataacaaccgcctcttccggtccccaggcccaggcccaggcccaggccctctcttcctcgctcggcctccatggaaactctctcagtccgccacccctctctattcgcacggaaacgccttcaatttgcttcgctccacagcccctctccagttccctgatccggttccctc

SEQ ID NO: 19380 - DNA, 242 bp, Glycine max
  Clone ID: LIB3049-025-Q1-E1-E6
atggagcttgatacatgatataatgcacttatatcaaccatttcatttaccaatctggcacaccaggaataatattacatcttgccagcacaggtgtttgtattctgaaacaattcgctatgcttgttatctgataagccgaataacttctgtccccatagtttcaaccatctatacatcacctgattcaatttcttcctacaacccctcaaatcttgatcttttcacccatatttcctgtt

SEQ ID NO: 19381 - DNA, 387 bp, Glycine max
  Clone ID: LIB3049-025-Q1-E1-E8
gagagacagagtgtatctgtaactgaaacgcgctggaatcaaatcttagcaaatcctaaatcaaactcaaaggatcgaactttggtttgagatttcatcactgattgtgattctcttctcctacaaaacttggcacccgatctctctctataatcaaatatcattcaacaataatcctcatttgttattccctattttctagtgagaagagatattcatgagagatgttgagcatttgcatctggtgaaatccatttgaagattctggcgtgattttttagggtacttccgaaatcgctcttcgaattgaatcggaggatttaaaagaagtgtttttttttttgtttgctttaattttcttccttttgttgttgtttgtttgttgtc

SEQ ID NO: 19382 - DNA, 332 bp, Glycine max
  Clone ID: LIB3049-025-Q1-E1-F10
gaggaggaacataaacataaagatttgggtctccgttctcggcgaaatccctagcggattgaggtgacgatggcgctgtcactgggtcagaactccatttcctcgcttccctttgttagacaacacaggcacaccccaagtccttcttccacttgcttgagcttcaaacctcaagccctcccttcttcacccagcccaagtcttacttgtactacgaaatgcactcgcacgctgtccacgctgatgggactcgccctgttgctgatgaagaaggcggccactccagtgttgagcatcaacagcgacagcgtgtccacgatgggcactttgtt

SEQ ID NO: 19383 - DNA, 303 bp, Glycine max
  Clone ID: LIB3049-025-Q1-E1-F11
ggagttgagaggatcgtgagaggggcagtagccgagattccgtgagttgcaaaaatgaagacgattctttccaccgagaccatgaacatcccggacggcgtgagcatcaaagttcatgccaaggtcatcgaagttgagggcccccgcggaaaattggtgcgagacttcaagcatttgaatctcgattttcagctcattactgacgaaaacggtaaaagaaagctgaaaatcgacgcgtggtttggttctcggaaaacatccgccgccattcgcaccgccttgagccacgtggagaatcttatc

SEQ ID NO: 19384 - DNA, 138 bp, Glycine max
  Clone ID: LIB3049-025-Q1-E1-F12
gacgtgccgtttcatttgatcatcacatgaaaatggtgtccgaaagcattctcctgggcattggtaaccctctcctcgacatctccgccgtcgtcgaacaagacttctttaaaaaatatgatatcacctcaaacaatg

SEQ ID NO: 19385 - DNA, 288 bp, Glycine max
  Clone ID: LIB3049-025-Q1-E1-F2
ggtaacaaaaataacgtgacactgctaagagagtgagagaaattggcggccgcggtggcggcggcatagagtgggagtagtaaggatcaatggcagttccagggaggcgcaacggcatgaacgacgacgaagaggaattagacgacaacgcccttttcgaagaacaaggtgccgtcgaagacgacgccgatacccctcctcacctccgcgacctctccgccgccgctcagctaggcgacgtccacgccctccgtatcgctcttgataacttgactggtagtattgatg

SEQ ID NO: 19386 - DNA, 404 bp, Glycine max
  unsure (1)..(404): unsure at all n locations
  Clone ID: LIB3049-025-Q1-E1-F3
gaatttttcctcgtgagtgtcactcttgaagacattccaaatcatggaaccattcactttgtttgcaactcatgggtttacaatgcaaaaagttacaaaagggatcgcattttctttgctaataagacatatcttccaaatgaaactccaactccactagtgaagtacagaaaagaagaattggaaaatctaagaggagatggaaaaggagagcgcaaggaatatgataggatctatgattatgatgtctataatgatttgggtaacccagacaagagcaatgatctagctcgtcctgttcttggagggtctaatgcctatccatatcctcgcaggggaagaactggtagaaaaccaacaacanaagactctaagagtgagtctacatccagcagcacctacat

SEQ ID NO: 19387 - DNA, 392 bp, Glycine max
  Clone ID: LIB3049-025-Q1-E1-F4
ggttctagtgtatgtgattgttgtgactcgttcttcttcgtcgttatcttcttcttttgttgtttgtgtgtttgttttttctctcacctgaaaatgtcttgctgcggtggtaactgtggttgcggaagcgcctgcaagtgcggcaacggctgcggaagctgcaagatgtacccagacttgagctacaccgagtcaaccaccaccgagaccttggtcatgggagtggcaccagttaaggctcaattcgagagtgctgaaatgggtgttcccgctgagaacgatggctgcaaatgtggagctaactgcacctgcaacccctgcacttgcaagttaggttgttggagagctaaagcctcaagcagaaaatggccctagaaataatgataaaaact

SEQ ID NO: 19388 - DNA, 326 bp, Glycine max
  Clone ID: LIB3049-025-Q1-E1-F5
tgcaaggggaagcaacaccgggcatcaatgatacgcgcaattgatacgggctccaattgatggcgttacgctcacgacgtgcgcgcagtacctgttcagacttctcgtagagtcctgacacaacctcccaaaacaaactcatcgctgtcgtcgaccgctgtcgcctccatctccgcagactgtttcaacatatcgtcgcaacctcgcttcatatattcgctatacacaagcttcagtatgatcggtcagcaagctaaggcaaagccgcaaggatctgacgtgagtgtgtgaagtgactgaggtaagtgattcatgcatgtgcttca

SEQ ID NO: 19389 - DNA, 392 bp, Glycine max
  unsure (1)..(392): unsure at all n locations
  Clone ID: LIB3049-025-Q1-E1-F6
gacccgagctagggtttctgagtttatgtggttgcgcctctgcctgtaagagtgaaaaaaccttctcttttccttctctcaagtctcaagagatttcatcatggctccaaagaaggacaaggctccaccaccttcctccaagcccgccaaatctggcggtggcaagcagaagaagaagaagtggagcaagggaaagcaaaaggagaaggtgaataacatggtgctgtttgatcagggcacctatgataagctcctttctgaagctcccaaattcaagctcatcactccttccattctttctgatcgtttgaggattaatggatcacttgcaagggaaggctaatangagaaatgatggctaggggttcaatcaggatggtgtctgcccatgc

SEQ ID NO: 19390 - DNA, 161 bp, Glycine max
  Clone ID: LIB3049-025-Q1-E1-F7
aacgggaagttttcctcgcgagtgtcactcttgaaaacattccacatcatggaaccattcactttgtttgccactcatgcgttggcggggcaatcgcttaccacagggatcgcattttctttgctaacaagacatatcttccaaatgcaactccaactcca

SEQ ID NO: 19391 - DNA, 304 bp, Glycine max
  Clone ID: LIB3049-025-Q1-E1-F8
ggactatgcttgtggagagggtggtgctgattgcatggagatctcaccgcagggaaactgttataatccagacaccttggttgctcatgcctcctatgctttcaacagttactggcagaagcacaagagaagtggtggaacatgcagctttggaggaactgccatgttgataaattctgacccaagtttccttcactgtcggtttattcttagctaagtgaatagaagtggcgtggcgactttctgtttttgttgcagatagtgtggaggattttatgttaaggtcacttttcttttggataac

SEQ ID NO: 19392 - DNA, 313 bp, Glycine max
  Clone ID: LIB3049-025-Q1-E1-F9
gagattgggaagcattggtggctagctaagctaagctaaaactaaactctttcagtttgttttagcttcagcttcttctgcttcttttgctttttccaccacaaccacaaccatgtcttctgccactgcctccaacactttcttccttcactcttgtttcctcctcttctgtctcctctcggctccttcctgtgtttccatgttctctggtattgagacaggagatttagaaaaaagagatgatttgtttccacaggttctaagagacgaggcagtggcaaggctttatgagcttgggaaggtgagtgatgct

SEQ ID NO: 19393 - DNA, 318 bp, Glycine max
  Clone ID: LIB3049-025-Q1-E1-G1
atgactcaatattttgacacaatgaaggagattggtgcatcctccaaatccaatgctgttttcattccacatggacctggtgctgtgagtgatgttgcttcacaagtaaggaatggtcttctccaaggaaatgcaacaacagagtcttgaagacatacacatatatcatcataccatgatttcctcctccaggcacttgtagtttagctttgcaactaaatctttatatatgctactattatgaatcatccatggcaagttggcaactaatgccttctatatgtatatggtcttcctaatcaaccatggcaactttcg

SEQ ID NO: 19394 - DNA, 320 bp, Glycine max
  Clone ID: LIB3049-025-Q1-E1-G10
gggccgaaagaaagaaacctaacagcgccatagcgttctctaagctatcgtgcgaggtccctcgacctccgcacaaccccagcaccaaggggctgtgcctgtcgtcgtcttccacgcccatgtcggaacccgacacccaggcgccgccgccgcctccgttcctgctccagcgcccgccgcttctgcagtcggcgtcgccgctcttcaagcagcggtcgtggtcgccggacgccttccgcgacgaggcgtggctccgccgcaaggggaactggaagaaccgccgcagtaagagcgtcaccgatgaggacgtggacgagctc

SEQ ID NO: 19395 - DNA, 348 bp, Glycine max
  Clone ID: LIB3049-025-Q1-E1-G11
cacactcacagacacagtctctctaatctaatggatgcaaagtctgctgaagctgttgttcccttagaaccattgaagtatcagacatggttcttgaaagtttcgatccactgtgaaggttgcaggaggaaagttaagaaggttctacagagcattgatggtgtttttaccacaacggttgacccgcaacagcaaaaagtaaccgtcactggaagcgttggagttgagacgctcataaggaaactggtcaaagccggaaaacacgccgagatttggccggagaatctcgccgccgggaagggaaagaactccggcaaagacaagaagcagcagcagcagcagaagaag

SEQ ID NO: 19396 - DNA, 407 bp, Glycine max
  Clone ID: LIB3049-025-Q1-E1-G12
ggaacctttgcattctattcattcaagattcagcaagtgcgttttggaagcagagaccgaaatacttcgagatggcccgtacaaagcaaactgctcgtaagtcaactggaggaaaagctcccaggaagcagcttgcaaccaaggctgcacgtaagtctgcaccaacaactggtggtgtgaagaagcctcatcgttatcgccctggaactgttgctcttcgtgagattaggaaataccagaagagcactgagctcctaatcaggaagcttcctttccagaggttggttcgtgaaattgcccaggatttcaagactgatctgcgtttccagagccatgctgttcctggcatgcaaaaggctgctgaggcataccttgttgggctctttgaggacactaacttgtgtgcc

SEQ ID NO: 19397 - DNA, 77 bp, Glycine max
  Clone ID: LIB3049-025-Q1-E1-G2
cgcgtaagacgaaccgacttgaatcatcttgatgaattcagcactactggaaagttgcctagggtgctgcttctttc

SEQ ID NO: 19398 - DNA, 395 bp, Glycine max
  Clone ID: LIB3049-025-Q1-E1-G3
gggatgatgatgaacacttttatgaagctggtttaccttggtggaggtgttaaaatgcttgaaatgtgtgcttggattgaggataaggatctttatagctaatgttttcatctttcctcagttttacatgcagatattcagaaggtggaagactggtcacggatcactgtatactggtttctcctgctgtggtgtaagaatgatgcaatattttcttgaggttgtagaggggaggcaatgagactatcgctggtttgaaaagtgaaacacaaataaaagggaaagaggagcttcatatggggatttaaattgtgcacgctgtcatatactggtgactgtggcgattcctgtaaccacatttctagcagaatcaagtctgaacaggtaaaccagag

SEQ ID NO: 19399 - DNA, 390 bp, Glycine max
  unsure (1)..(390): unsure at all n locations
  Clone ID: LIB3049-025-Q1-E1-G4
gctctgaaaactgaaaagtaaaggcgaaagactttaggtttggaattgggaattanggttgttcgcgtcacgaagatgatcgaggtggtgttgaacgatcgattggggaagaaggtgcgcgtgaagtgcaacgacgatgacaccatcggcgacctgaagaagctggtggcggctcagacgggcacaagagccgacaagatccgcatccagaagtggtacaccatatacaaggatcacatcactctcaaggattacgagatccacgacggcatgggtctcgaactctactacaactaaacacaaggtctatacccatctcaattcctccttttaaagatactagctagggttttgttttttagggtcccaaattttgatttgtttttcggc

SEQ ID NO: 19400 - DNA, 400 bp, Glycine max
  unsure (1)..(400): unsure at all n locations
  Clone ID: LIB3049-025-Q1-E1-G5
ggggattggttcttcttccacttccaacgccatgcctctttttggaattttccagataccctcatttatggacataatcactgacctcgccatgttcattactccgctatggattgcggttatcgtcggcgtcgtcgtgggctgggcgtggaagcccaaatgggcctttcaccccaaagacgctcttctcaagtttcgctctcctcgccctcccaatccccaaaacgacaccgcttttacctactccgccaccagttcctccgcgcgtgagaaagacgcgagtgggagaactgtggtgacggaagacgatttgctgcatccgtggaagttggtttanggaaaaagacggagggcgggcatggattcagatgatggaccgttcttaccccgacatgaccta

SEQ ID NO: 19401 - DNA, 391 bp, Glycine max
  unsure (1)..(391): unsure at all n locations
  Clone ID: LIB3049-025-Q1-E1-G6
ggagaagtgagtgagtagtgagaatggagtttcaagggttaccggaaggttgcattgctagtatactctctcgcactacgccggcggacgtgtgtaggttttccgtcgtatcaaagattttccgttcggccgctgaatcggacgctgtgtggaaacgttttctcccttccgattaccattccatcatttcccagtctccttcgcctctcaactatccttccaagaaggagctctatctcgctctctcggatcgccctatcatcatcgatcagggtaaaaagagctttcaattggagaaaaagagtgggaagaagtgttacatgcttgctgctanagctctcagcattattttggggtgacactgagcaatactggaactggacaaccgata

SEQ ID NO: 19402 - DNA, 388 bp, Glycine max
  Clone ID: LIB3049-025-Q1-E1-G7
gaccattcgccattccaatgtcaccttctttttgcacatccctcttcctcttcacactctcccttctcttcttcctattcttctccctctccgtctccgtccacagcggccaccacgacgacggtgacgccgactccgacgccacccccgacctccgtgctcggcccttgattctcgcgaaggtgtggtgcctgatcgtgatcttcatcgccaccttcgtctcgggcgtttccccctacattctgaaatggaacgaggggttcttggttctggggacccagtttgctgggggagtgtttctgggaactgccatgatgcattttctcagcgacgcctatgagaccttcggggacttgactcaaaaggagtaccctttcgccttcatgcg

SEQ ID NO: 19403 - DNA, 173 bp, Glycine max
  Clone ID: LIB3049-025-Q1-E1-G8
gaccattcgccattccaatgtcaccttctttttgcacatccctcttcctcttcacactctcggttcgggtcttcccattcatctcactctccgtcggggtccacaccggccaccatgaccacggtgaccccgactcctacaccaccctccaccctccgtgctcgggtcttgac

SEQ ID NO: 19404 - DNA, 310 bp, Glycine max
  Clone ID: LIB3049-025-Q1-E1-G9
gactgcgaaccagtagggactcccattccgactcttagccgccgatctctcagggcttgcatcttctcagctgtgaagatgtacacatcaaggaagaaaatccacaaggataaggatgctgaaccaactgaatttgaagagtcagttggacaggcattgtttgatctggaaaataccaatcaggagcttaaaagtgatctgaaggatttatacataaactcagccgtgcaagttgatgtttctggaaaccgcaaggctgttgttattcatgtcccttacagattaaggaaaggtttccgtaagattcatg

SEQ ID NO: 19405 - DNA, 403 bp, Glycine max
  Clone ID: LIB3049-025-Q1-E1-H1
ggacgaaagcggcgacactgacgcgaattgggaccaaacgctcacaattccgttgccaccaaagcctctcgaggatcaaacgttgtacatcgacgtggtccacgccggctcggaggaggacaccaagccgcttatcggctcggctcggctcaagctggtggacattctcgacgacgttggaatcggcgagcgcgtgagccgcacgctctcgctgaagcgtccctcggggaggccgcacgggaaggttgaggttagcgtgacaatcagggagcccagctaccgtgcgcagggtgggtacaacgcgcctccttacggcgtgagggattattccctgcgccgcaggggtatggtgggtatcctccatatggggccccaccacaacaggcgtattattccgctccac

SEQ ID NO: 19406 - DNA, 319 bp, Glycine max
  Clone ID: LIB3049-025-Q1-E1-H10
cggggaacaagtcttctggtgctgtttttctcgcacgctctcagcatacgatgttttcgtttcccaattactatcagcgaaaggctgagggtgtcgtgaccaaagccatggaactcaaatttgttctctttctgctccttctgcttgcagttgctggttacggactcgcttccaatgcgacactgaactagacttgtggatacttcaatggttctctcaatacggaccctaaagtgccttgtccaattggttggcttatggaccctaacaagaccaagtgctttctccatgttgggaggcctcaatcctggcatgactc

SEQ ID NO: 19407 - DNA, 304 bp, Glycine max
  Clone ID: LIB3049-025-Q1-E1-H11
gaccacacaccacacacatagtagctattatactctctagagtaattgcggaatctgctagaattttctaataatggcgaaagacgttgagcaggtcacagagcaaggtgaatactccgcgaaggactaccatgaccctcctccggcaccgttgatcgacccagatgagctcacaaagtggtccttgtacagagccgccatagctgagttcatagcaacactcctttttctttacatcaccgtgttgaccattattggctacaagagacagagtgacaccaaaatccccggtaacaccgaatgt

SEQ ID NO: 19408 - DNA, 130 bp, Glycine max
  Clone ID: LIB3049-025-Q1-E1-H12
gctgctagcagagggaagttctacacttttttgtttggattgatcgagtgtactttttcttttcgagattggcttggtgtgcagtggaaaaagggtggaaaagagtggtaagggggaaggcggcgccctc

SEQ ID NO: 19409 - DNA, 354 bp, Glycine max
  unsure (1)..(354): unsure at all n locations
  Clone ID: LIB3049-025-Q1-E1-H2
gataatttatttaattattttctccctacaaaatcttgatctctctgctgttgtggagtggtgttgtgttaatctcattcacacattcacagttatactctctctctctttgtcgctcggatcactgatctcatctcaattttcagatatgtcgacatctgataagccagaagtggtggaaaggggtagcaaggatgaaaaacacaaggaagatgatcaagaggaggggaagggtggattcattgagaaggtgaaggatttcattcatgacattggtgagaagattgaggaagctattgggtttgggaagcnaactgctgacgttactgcgattcacattcnatcgattaatct

SEQ ID NO: 19410 - DNA, 399 bp, Glycine max
  Clone ID: LIB3049-025-Q1-E1-H3
gggtctgcgtaatagtcacaccaaaaacgagacacgacatgggtccaaaatcgttcggaaaagcattcgtcgtgcactacgtaaccaccttcaacaccaccggagaaatcccgctaatctctaggatgtaggttacacgctcactttccaaggtcaaaaccatccacggctctcacagcaacgtcgccaaactcacctcccttcacttccaacagtgacagcatcccatgatcagcgtggatacgcaggactcaagcgtcaactgcgacatgctcagcttcggcagcggcaatgctccagctctgcggtaataaataccccctcaagttcatacgtatgtgcgatctgacaccagcaccacagggaagctattatgtgtcgaatgacatattccggttg

SEQ ID NO: 19411 - DNA, 312 bp, Glycine max
  Clone ID: LIB3049-025-Q1-E1-H4
ggcaggagggatacggtgagaaagaacagtccagtggtggcacagcgtttgtcaacagatcataatgtagctgatgaagaggtgagaaaagaagttgaagctctccatcctgatgactcgcacattgtggtttataaccgtggagtttggaggattaagggcattatacaggtgtcaagatctatcggtgacgtgtatttgaagaaacctgatttctaccgagacccggtttttcagcagtttggaaatcctattcctttgaagcgtcctgtaatgacagctgaaccatcaatcattattagggagcttgag

SEQ ID NO: 19412 - DNA, 400 bp, Glycine max
  Clone ID: LIB3049-025-Q1-E1-H5
ggtgtgaggcgagggtaaggtcgcgttgtgttgcgtcgtgtcgtgcgctgttcctctgtttctcgtttttgtgttcagaccgaaccctagctccgcatcgcaaccatgtcgaccaagcaaggtggaaaagctaagcctttgaagaaacccaagtctgataagaaggattacgacgagattgatgtggctaacattcagaagaaaaaggaagaggagaaggcgctaaaggagttgaaagccaaggcgcaacagaagggaagctttggaggttctgggctcaagaaaagtggaaagaaataagggctctttatcatgattgtatgcattcaatattgagccctggtaatacaattgcttacatgataacttctcttattattgtggcctactttattgctaa

SEQ ID NO: 19413 - DNA, 352 bp, Glycine max
  Clone ID: LIB3049-025-Q1-E1-H6
gacagcaagtgaagaggtggtgaagtgaacacaatggagagaagggttggctatgaggtgctggtggctttggtgacccgtttggttttctcatttgcttgtgccactgcttcatcatcaggaccaacaaaactccaccaccgtgtggagcaattcaggaggaatctgcttgctaatggccttggtagaactcctccaatggggtggaacagttggaatcatttcagctgtcaaattaacgaaaaaatgatcagagaaactgctgatgcccttgtttctactggtctgtcaaagcttggatacacttatgtcaatatagatgattgttgggctgaattaaatccggatgcta

SEQ ID NO: 19414 - DNA, 285 bp, Glycine max
  Clone ID: LIB3049-025-Q1-E1-H7
gacatcatattcacatgtggtgcgataaacacaatggatacaagggctttctataaagtgctcgtggctttggtgacccgtatggttttcacatttgctatgtaccaccgcttcaccatcaagaccaatatcaactccaccaccgtgtggatcaattcatcgacgaatctgcttgctacttgccttggcacaactcctctaacgtcgtagaacacttgcaatcattctaactgtcaaattactcacactcatgtcacagatactgctgacgcccttgtttctact

SEQ ID NO: 19415 - DNA, 341 bp, Glycine max
  unsure (1)..(341): unsure at all n locations
  Clone ID: LIB3049-025-Q1-E1-H8
gatactaaacacgatttattttgtcttttttctttatcacagctgcaatcaacaagacttagaatgcgatgagcaaaaatagacctcaattccgaattcagagatagcacgcaccaggagaagccatggctactcaatccccttcacctcagaacctaggtggtgaaattgagcaaacagaaaatgtagattagcataataggggagaagagcttggtaaacagagttcagacacatcggtgtttgtgaactcagagccaatgcgtgaggaacanattcagaatgctgttaaatttctgtcgcacccgaaagttagaggttctcctgtcatccacagacga

SEQ ID NO: 19416 - DNA, 333 bp, Glycine max
  Clone ID: LIB3049-025-Q1-E1-H9
ggaacaagtcttctggtgctgtttttctcgcacgctctcggcatacgatgttttcgtttcctaattagtagcagcgagattctgaggttgtcgtgaccaaggccatggaactgaaatttgttctctttctgctccttctgcttgctgttgctggttatggactcgcttccaatgcgacactgaacgagacttgtggatacttcgatggttctctcaatagggaccctaaagtgccttgtccaattggttggattatggaccctaacaagaccaagtgctttctccatgttgggaaggctcaatcttggaatgactcagagacctgttgtagta

SEQ ID NO: 19417 - DNA, 320 bp, Glycine max
  Clone ID: LIB3049-026-Q1-E1-A10
gataaatttgagtataatggagcaacagagcttgtatttgatgtgcagttcatgttgaagagtgcaatgcatttttatggtttttcacatgaggtaagaactgaagcaaggaaggttcatgatctcttttttgatatcttgaaaattgcatttcctgatacggacttccgagatgcaagaagtgcactttctttctccagtcaagctactgccagtacagtaacatccccaaggcaagtggctgtcggccaaagcaagaggcacaggctgataaacgagatggaaactgagtcatacgctttgcagaggtcactgcaacg

SEQ ID NO: 19418 - DNA, 375 bp, Glycine max
  Clone ID: LIB3049-026-Q1-E1-A11
ggaattcacgagtgaaaattgctttggggattgcacgcgctttagagtacctacatgaagtttgttcaccatctgttgttcataagaatataaagtcggccaacatattgcttgatacagattttaatcctcatctttctgacagtggattggcaagctatattccaaatgcaaaccaggtattaaacaataatgctggatctggatatgaagctcccgaagttggtttgtctggtcattatactcttaagagtgatgtttatagcttcggagttgtcatgttggaacttcttagtggacggaaaccgtttgatagctcaaggccgaggtctgagcaagcgttggttcgatgggcaacacctcaactccatgata

SEQ ID NO: 19419 - DNA, 226 bp, Glycine max
  Clone ID: LIB3049-026-Q1-E1-A12
gacaaaccaaacaactactactactactgcacacactctctctctctctctctcaatgtatgggcgccaattccagttaccgaaggattaacgcctttgggaaaccaatccccaaccaaatttggacttccaaccccccctcagctcctctcacttccaggaagggagcaatagcagcttgcatacagtatcaaccggcggtcaatgtatgacaagaaacctgatg

SEQ ID NO: 19420 - DNA, 302 bp, Glycine max
  Clone ID: LIB3049-026-Q1-E1-A2
ggttctagtgtgtgattgtttgttgttgtaactcgttcttcttcttttgttgttctgtgtttgtgtttgttttttctctcacctgaaaatgtcttgctgcggtggtaactgtggttgcggaagctcctgcaagtgcggcaacggctgcggaggctgcaagatgtacccagacttgagctacactgagtcaaccaccaccggagaccttggtcatgggagtggcagctgttaaggctcaagttgaaggtggctgaaatgggtgtgcccgctgagaacgatgggtgcaaatgtggaccaaactg

SEQ ID NO: 19421 - DNA, 313 bp, Glycine max
  Clone ID: LIB3049-026-Q1-E1-A3
ggatgaatagatagagacttcatgtttgccttgtatggtagaatggttttaatgttatttatttatttttgtgtgtattggggacgtgcagaactgcttactctcttgggagcttagagtaataggttgggaagtaacttatggggcagaatttgtgccaagctcagaaggaagctacacagtaattgtccagaaggctagaaaggttgcttcatcagaagaaccagtgctttgcaacagttttaaggttggtgaacctgggaaagttgttctcaccattgacaacacaagctctaagaagaagaagctcttg

SEQ ID NO: 19422 - DNA, 289 bp, Glycine max
  Clone ID: LIB3049-026-Q1-E1-A4
gtgcattgagatgttctttgaaattgctgagaacaaggaagactataacaagttttatgaagccttctctaagaatctgaaacttggtattcatgaggattctcagaacaagacaaaacttgctgaattgctcaggtatcactccaccaagagtggtgatgagatgaccagcctcaaggactatgttaccaggatgaaggaacggcagaatgacatctactacattactggtgaaagcaagaaagctgttgagaattcccctttccttgaaaagcttaagaagaagggg

SEQ ID NO: 19423 - DNA, 343 bp, Glycine max
  Clone ID: LIB3049-026-Q1-E1-A5
ggagaagcattagcactaggagcagcaacaactagtctcagctgaaatggcctcttcagtgatggcatctgtggccctcaaacctgcccctttcactgttgagaagtcctcagtgagaggccttccctctctctcaaggaactcttcttcattcagagttgtggccagtggcaagaagatcaagactgacaaaccttatggaattaatggtggcatgggctttgagggatggaactgatgcatctgggaggaaaggaaagggaaagggtgtttaccagtttgtagacaaatacggtgcctaatgtcgatggttacagtcctatctacgacaccaaggactggt

SEQ ID NO: 19424 - DNA, 339 bp, Glycine max
  Clone ID: LIB3049-026-Q1-E1-A6
ggtgaggacaaaagaagaagtatcactcatataatactctgtatcatttcatttcgataatcatccatagctactgaagaaaatggcaaccatctctgctgctatcacaaccccatcgatctcccgcgcaactcttgtgcaaaagcgggtctcatctcccgttcttggtttgccagcaatgggtaaggtgggaagagtgagttgctccatggaggaaaaaccttattctgtgaaggaaagcagctcgagcatgttggggatgggggcatctctgatggcagctgccagcgctgcagccatgtcaggcccagccatggccttggtagatgagagactgag

SEQ ID NO: 19425 - DNA, 305 bp, Glycine max
  Clone ID: LIB3049-026-Q1-E1-A8
gatacattctcttgtcacagttttctgtgtcaccggaactcgtttctttcaaaacacttcagacatctcgaacgctctctttccggcaactaggttaaagttcatcaatggcaggtcgcggcaaaaccctaggatctagcgccgccaagaaggctacctcaaggagcagcaaagccggcctccaattccccgtcgggccgtatcgcccgtttcctcaaggccggaaaatacgctgagcgtgtcggcgccggcgccccggtctacctcaccggcgtactcgaatatcgcgcggctgaggttttgga

SEQ ID NO: 19426 - DNA, 307 bp, Glycine max
  Clone ID: LIB3049-026-Q1-E1-A9
gacatcgcacaacattattctttcgcaccttgcagaatcaattttctctctcaatcgtctttcatggctcgtaccaagcaaaccgctcgcaaatccaccggtgggaaggctcctaggaagcaactcgccaccaaggctgcaagaaaatctgcacctaccaccggtggagtcaagaagcctcatcgctatcgtcctggaactgttgctcttcgtgagatccgaaaataccaaaagagcacagagcttctgatccgcaagctcccctttcagcgtcttgttcgtgaaatcgcgcaagacttcaagactg

SEQ ID NO: 19427 - DNA, 173 bp, Glycine max
  Clone ID: LIB3049-026-Q1-E1-B10
ggccgagcaacagtgaatttggccaccataccataccatgagcataagggcgcgcgcgcgcaaaggattatggtttcgaacgtagcgattttggagcttccatttcgatttatacttgcgcacgatctggtactttcgcttctcttactgtagctcttaataatgcacatttt

SEQ ID NO: 19428 - DNA, 328 bp, Glycine max
  Clone ID: LIB3049-026-Q1-E1-B11
ggtgtttcttctgttttgaaatgtgcaaccagctggaagaagacagaagacttggcttacacaccagcaccatcattcgcatctcatctattctactcgatcaaacaataataaccgattattcccacttttccttttctttttcttttgatttgggctttcggtttcacgtaacataacgcaacgtttgcagaaaagccaagcttgtcttcagtttctctttgtcgctagtaacagaatattacaaagtaacggctttctgagtggagcgcttgatttcgtttggtgggtcaacttcaagtttcgattttgttcatttttctctcgt

SEQ ID NO: 19429 - DNA, 240 bp, Glycine max
  Clone ID: LIB3049-026-Q1-E1-B12
gtaacattggaaggcatcgatttcgacattgaacttggttccaacctctattggggcgaccttgccaaggaactagatgctctcaggcaccaaaacgaccactacttctacttgtccgcagccccacaatgttttatgcctgattaccacctcgacaatgccatcaaaactggtcttttcgatcatgtaaacgttcagttctacaataaccctccatgccaatactcacctggcaatact

SEQ ID NO: 19430 - DNA, 334 bp, Glycine max
  unsure (1)..(334): unsure at all n locations
  Clone ID: LIB3049-026-Q1-E1-B2
gttcccgaagaaggagtancgtagaggaagagtgcgaaagaaagatcgttctcgatgacagaggggaacggtgacaaaactctgcgaaagatcgcagacgcattcaatgaccttgcaaacgttttcaccgattctcagagcgcagaagcagaggtcaaggttgctcccttctctcatgcctgctctctcgtctcccctctcttcggttgcttgggcgtcgccttcaagttcgccgaaatggattacgtcgccaaggttcatgatctggcagaggcgtccaagtctattcagaatctgcagtctctgattgagctggatgtgcaagctaacactg

SEQ ID NO: 19431 - DNA, 332 bp, Glycine max
  Clone ID: LIB3049-026-Q1-E1-B3
cttacctgagcagattcagagtgcaaagtgtgagagaaagacaatgccgaagtctcaatttcgaaccccatttctggtttctcttccccttttgttattcatcttcaacctcaccccttcgcacgcactctatggagcatcctcacccgtgcttcaagtcactccctctaacttcaagtccaaggttctgaattcaaatggagttgttcttgttgaattctttgcgccatggtgtggacactgtcaggctctgactcctatatgggagaaggcagctacggtgttgaagggtgttgttactgtggcagcaattgatgctgatgcgcatccgt

SEQ ID NO: 19432 - DNA, 362 bp, Glycine max
  Clone ID: LIB3049-026-Q1-E1-B4
gatcataaaattatattttttaggcgcattctcattcaccaatggcgttcaccgtcgccagtggcagtggcgtggctataatcccctgcggcaacaccggcaccgccgcactcttccctcaccgaacgagaagaaacctccacgtggcgcgcgcgaagaagcccctcaacggcgacgacgtttccgtttacgctgagctcctcaaagccgaagtttccgttttggaaaataataagcctctcgacgacaacgatgccgctttgaagttcctagacaagatagaccgtcagtttcaacagcccgatttatgggaacgaccccagtgggactggctcggcatcttcatcaagttttcccccatc

SEQ ID NO: 19433 - DNA, 339 bp, Glycine max
  Clone ID: LIB3049-026-Q1-E1-B5
ggggtggaaagtgaaagagtaggacaccacaaagtgtaacttgagtgattagatctgatgagtgcagaaagaaggaaggattgttggtgatcgatcatcgatcagcgatcatcgatggcgtctgctagccttggaagtggtggggtgggcagttccaggtctgttaatggtggcttcaggggttcttccagttccgtcgattggcttggcagaaagatgcttgagatgtctttgagagaccacgaggacgatagagatagtgagcctgacatcattgatgggttgggtgctgagacgggtcacgtgataagaaccagcgttggtggccgaaatggtcaa

SEQ ID NO: 19434 - DNA, 298 bp, Glycine max
  Clone ID: LIB3049-026-Q1-E1-B8
ggttgaaagaaatcgaaagaagggaggagaagggtgtcaatggcagagtgtttgggtgtttcagtttcaactcttggctcattctctcttagtaggcccacaatcttttatcgatctcccattaatatctctctctttgcctctcaatctcatttccctgctgctgcatttggttatttgacaccttccaacccacacctgtacgccgctgtctcctccgactccaaggccgctacttcgctagacctaactcaacccgatctcgatgatagcggcggcggtgctaacggaaacgcta

SEQ ID NO: 19435 - DNA, 292 bp, Glycine max
  unsure (1)..(292): unsure at all n locations
  Clone ID: LIB3049-026-Q1-E1-B9
gattagtaaaaagatgaaggttgctgcagaaggctgcaacttactgttattgttcattacctcttacctttcactgatctcanggcttggcgtccattctttgtcttatgatcattctgctaccacaaagtgcttggcagaacctcggagagcacagtatggaggaagcattatagtaaatccaggatttgatcacaacatanagggttggacagtatttggaaaaggagcaatcaaggagcgaatatcgaatggaggcaatagattcattgttgctcacaacagaacacat

SEQ ID NO: 19436 - DNA, 285 bp, Glycine max
  unsure (1)..(285): unsure at all n locations
  Clone ID: LIB3049-026-Q1-E1-C1
ggagaaaggatanggtttagggttggcaaaggaaggaagggatggaagcagctgtggtggacgtcggctctaagcttctcaaagcggactttgcaattcctgagcagactcccgccatgataattcccactcagatgaagcaattgctcgatgatggatcagtcactgatagttcactggctgacaatgtcaccgttgatcccgtcgtgcgaggatttattagagattgggatgccagtggagatttgttgcaccatgttttgtagactggcctcggatgggaaa

SEQ ID NO: 19437 - DNA, 331 bp, Glycine max
  Clone ID: LIB3049-026-Q1-E1-C10
gaaaccaacacaacaaagaggagttaataattgaagaaaatgtccaagtatggaacatctctattggtgccttctgttcatgaacttgtgaagcaacctatcaccaaagttccagatcaatatcttcatccaaatcaagatcctcctgatatatctaacacaaccttaccacaagttccagtcatcgaccttagtaaattgttatctgaagatgtcactgagctagagaagctaggcgatgcatgcaaggaatgggggttcttccagctgattaatcatggagtcaacccttcaatggtggaaaacgtgaagagagatgttcaagagtttt

SEQ ID NO: 19438 - DNA, 328 bp, Glycine max
  Clone ID: LIB3049-026-Q1-E1-C11
gaccgtttcggttaacactttccaatacaataatcactaactgaatattcgatcggagatgtctgccgccgccgaagaagctaacgctcccgccgtcgaaaagccggttgaggaggtgaaggcgccgaaccccgcgaaggagaagaaacctaaggctccgaaggaaaagaagccaaaacaggccaaaacagcttcacatcctccatattttcagatgattaaggaggctttgatcgctttgaacgagaaaggaggatcgagtccttatgcgatagcgaagtacatggaggagaagcacaaggcggtgctccctgcgaatttcaagaag

SEQ ID NO: 19439 - DNA, 352 bp, Glycine max
  Clone ID: LIB3049-026-Q1-E1-C2
gatccagatctggcagactagtatccgatcctctgtcctctcgaagctttcatcgttcaacatattctcaccatctcagtcatgggcctgctatcttgttttaggtctaccgtcctgagaaaatgttccaaaggaagctctggcatgtcaagattcctgtatacgaacaattttcaacgaaacttgatttcgtctggtggcaatgaatcgtattatgggtattttaacaggagattatacacttcactttatatgggaactggaactgtgggtgggattacaagtgctagaatcagggtgccaaatgtaggatgtgaaggattcatgtgctcaagtcatctgtcaatcactc

SEQ ID NO: 19440 - DNA, 348 bp, Glycine max
  Clone ID: LIB3049-026-Q1-E1-C3
ggagtgagcgtagttgaggttttgccacttcgaaaccaaattttcttccttcgttggcatctgtgatctcttctcctcacaatgagcagatcagggcaaccaccggatttgaagaagtacatggacaagaagcttcagatcaagctgaatgcaaatcgcatggttgttggtactctccgtggcttcgaccagtttatgaatttagttgttgacaacactgtggaagtgaatggcaatgggaaaaatgacatagggatggtggtaatcagaggaaatagtgtggtcactgttgaggcgcttgaaactgtgaacaagacttgatttctgtggcttgttaacattctatat

SEQ ID NO: 19441 - DNA, 292 bp, Glycine max
  Clone ID: LIB3049-026-Q1-E1-C4
gacacgagagaagagaagagaagagctattgtgatttgtgagtgatatgagtatgtcgattatgcatgcaatgtcaatcagaagcagcgctttcttttgcgttcaaataaattgctccgattcaaagcaaggccgtggtcttggagaaaacactaacagtaacaggattaacaccaacaaatctgacaagggattggtgtctcagcagaggcaagggatcagcagataagcagttctcgcggtctatctgtctagggaccccgtttagggttacaacgtgacggcaaatcta

SEQ ID NO: 19442 - DNA, 173 bp, Glycine max
  Clone ID: LIB3049-026-Q1-E1-C5
gaaaggtacaaaacaagaacccctcgtgcgctccaaaaccctaaaacctgaaagcatacgctacttctgcttcgtggcgatgttggaaatcaaaaccgccaagacgcgcaagggcaagcgggagctagagaaacgcgctcgcaagctcgtggaatcggggaagaagacgctga

SEQ ID NO: 19443 - DNA, 314 bp, Glycine max
  Clone ID: LIB3049-026-Q1-E1-C6
ggcgttgaagcaagaagatgaagccgcttcagcagccaaaactgagaagcttcgttctgtacaagctcagttcctcgccaatcaccacaatcacatagatagcagggaagcgctagatttgagcgcgaagcttctagaagtgaatccagagtgctacacagcttggaagtacagaaagctcgccgttcaacattttctctctaactccgagtgggagtcccagtcgatcttcgagggcgagctcaaactcgtggagaatgcgttgaggaagaagttcaagtcttacggggcggtggcatcagggaagatggggt

SEQ ID NO: 19444 - DNA, 89 bp, Glycine max
  Clone ID: LIB3049-026-Q1-E1-C7
attcccagaatgtgaatccagctgtaaagtcaaggccacttggggaggatagccaccgtgaccgcagggactcaagtactgatggtacc

SEQ ID NO: 19445 - DNA, 350 bp, Glycine max
  unsure (1)..(350): unsure at all n locations
  Clone ID: LIB3049-026-Q1-E1-C8
gaggaacaagaagcgaaaatataacaaataatttgtactttcatcaaaacaaaatcccgttgtagttttctcagatggctcgaacgaagcaaacggcccgcaagtccaccgggggcaaggcgccgcggaagcagctggcgactaaggcggctcgcaagtcggctccggcgaccggcggcgtgaagaagccgcacagattcaggccgggaaccgtggcgctgcgcgagatccggaagtatcagaagagcacngagctactcatccggaagcttccgttcaacgcttggtccgcgagatcgcgcaggacttcaagaccgacctccggttccagagctccgccgtctccgcgc

SEQ ID NO: 19446 - DNA, 384 bp, Glycine max
  Clone ID: LIB3049-026-Q1-E1-C9
gagcgtttcacacctagacaattggctcagaagaaaagaaaagcaaccaaaaatggttctcacatccactgccacacacccagatgaacaagaccagagcctaaactatacttttgcttccagatatgtgcgtgaacctattccaaagttcaagatgccggagaaatccataccaaaagatgctgcttatcagataataaacgatgagttgatgttggatggtgcaccaaggctcaacttggcctcgtttgtgaccacttggatggagcctgagtgtgacaagctcataatggcttcacttaacaagaactacgttgacatggatgagtatcctggtcacactgagctcccagaacggtggtgttatatcatagcaaatctaat

SEQ ID NO: 19447 - DNA, 195 bp, Glycine max
  Clone ID: LIB3049-026-Q1-E1-D1
ggcgttttcttcgtcacaacaacccttctctgattcgtcgtcaatttttgtgtctcgtcgtagaaaagcttaggtcagatttctgggtttgtcttttctgagaatctggagtggggctaagtcaagatgccgtgggtttccttgtttgtggatgacaaaagaaattgtgttcgcgtggtggggttttttcgtgtg

SEQ ID NO: 19448 - DNA, 357 bp, Glycine max
  Clone ID: LIB3049-026-Q1-E1-D10
gagaggaaaaatgttgattcgacgattgccttggacggcgatttcttttgccgcaccacttcccttctgtttcggcgctaccaatggacttcccattcgcaagcaacttaactcttctctcttctccttcttctgctccagctccggcgtcaatctccctctacaacctggtcacgaaacggatactcgtcactcgcagtctctgaaacccggtctttacctcgttggaacgccaatcggaaatctcgaagatatcacactgagggctattcgcgtgctgaactcggctgacgtcatactctcagaggacactaggcactctgggaagttgcttcatcactacaacatcaaaacacc

SEQ ID NO: 19449 - DNA, 291 bp, Glycine max
  Clone ID: LIB3049-026-Q1-E1-D11
gggattgagaattctctctcttttctctttctcttcccaactttccttccttgggatcattctgcttctttgctatggaagactcagattcagttgctacgctgatagattccacaacttctaagatacagcagctgcaaaaggcatttgctgaacttgaaagttaccgagctgttactctgaacttgaaatggaaagaactcgaggaacattttcatggtctggagaaatccttgaagaggcgctttcatgaattggaagaccaggaaaaagagtttgagaacaaaacaa

SEQ ID NO: 19450 - DNA, 337 bp, Glycine max
  Clone ID: LIB3049-026-Q1-E1-D12
gtcctcatcaaaccaagacatagcaaacgatccaaactcttttttcatttgcagcatcaaaatgagtggtagcaacgatggtagcggcagctggagctctaggtttttgaaggtggctagtgcagctgccgctacagccgccgttgccggcggtttatatgccattctttcatcctcaacctctgctagctctgagatggaagtgccgtttggcagcgcacggcgtgagagcaaagaacgtgacgatggtggctccgggtctcatcctcgcgagggtgccaccacggtcagtcgttggaagaaacctgagattggttgggtgaagctgaacgtggat

SEQ ID NO: 19451 - DNA, 292 bp, Glycine max
  Clone ID: LIB3049-026-Q1-E1-D2
ggcgtacgcagcttcatccctaacgcgtgcatagcagagtcagagacagagacgcagcgatggggcggagacctgcgaggtgttataggcaaattaagaacaagccataccccaagtcacgtttctgccgtggtgttcctgatcccaagatcaggatttatgatgttggtatgaagaagaagggtgttgatgagtttcctttctgtgtccatctggttagttgggagaaggaaaatgtgtcaagtgaggccctggaagctgctcgcattgcttgcagcaagtacatggccaa

SEQ ID NO: 19452 - DNA, 289 bp, Glycine max
  Clone ID: LIB3049-026-Q1-E1-D4
gaatcattcattgatcgctgaaacgatacgatgacagggaaggcgaagccgaagaagcacacggcgaaggagatcgcggcgaaggtggacgcggcgaccacgaaccgcggcggcgggaaggcgggtatgaaggaccgaaccgggttggagaagggcgggcacgcgaaatacgagtgccctcactgcaaggtgacggcgccggacgtgaaatcgatgcagatccaccacgacgcgcgtcaccccaagatccccgtcgaggaggacaaagttgtcaatcggcacgccacca

SEQ ID NO: 19453 - DNA, 353 bp, Glycine max
  Clone ID: LIB3049-026-Q1-E1-D5
ggttcaagaggctgagaagtacaaatcagaagatgaagagcacaagaagagggtagaggccaagaatgcattggagaactactcatacaacatgaggaataccattaaagacgagaagattggaggaaaacttgacccagctgacaagaaaaagattgaggatgccattgagcaggccatccagtggctagacagcaaccagcttggagaggcagatgaatttgaggacaaaatgagggagttgggaagcatctgcaaccctatcattgccaagatgtaccacgggtggtgctggtccagaactcggtggtgcaatggacgatgatgttcctgctgctggaaagcggtgcggg

SEQ ID NO: 19454 - DNA, 340 bp, Glycine max
  Clone ID: LIB3049-026-Q1-E1-D6
gaagaaaattactttttccaagaagcagctggtgccattttttgtaaatgtccagcgtgagggcctggaatatctacttcaattagtgaaggacgggaaactgaagtctgttattgactccaaatttcctttgagcaaagctgaagatgcttgggctaagagcattgatggccatgctaccggaaaaatcattgtggagccataggtacagtttgcttggaattgttgtatttctagtttctacatatctggacaaggtttgtgtaaagctcatatgaaaatgaataactagggatatcgtaggccgtaaggattttaagttaatgtgttttcatttgat

SEQ ID NO: 19455 - DNA, 343 bp, Glycine max
  Clone ID: LIB3049-026-Q1-E1-D7
gatggttgaaggcgaaggcgtttgaaatcgagtaaatggaagcgacattctcttcaacgacggcaagaggatactggaatcagacacgtggttcgacagaacctttgttgctgagagtagatgaggctcgcgatcggaaaccgagttcactgtccattgcgcggcctagcaagttcgtgcagctgtcacttgctcgaaccaggaagagttctttctttaaggtgttatctggctgaaaaggaacaaattcacgttgtagacggaagtcgtgttgatgagttatatgatgcattggttacacgtattctgcctttggtctcagtgtcatcaaatcctaatcaca

SEQ ID NO: 19456 - DNA, 356 bp, Glycine max
  Clone ID: LIB3049-026-Q1-E1-D8
tgatgtggtgattgcagacaaatttgctcctgatgctaatagcaaggtcgtgccagcatctgccatccctgatggctggatgggattggatattggtccagattctgttaaatcattcagtgaagcattggatactacccaaaccatcatatggaatggaccaatgggagtgtttgagtttgacaagtttgctgttggtacagaggctattgcaaagaagctggctgacctcagtggaaaagcggtgaccacaattattggaggaggagattctgttgcacctgtggagaaagtaggagttgctagtgtcatgagccacatatctactggtggtggtgccagtttggagttattgg

SEQ ID NO: 19457 - DNA, 365 bp, Glycine max
  Clone ID: LIB3049-026-Q1-E1-D9
ggggtgagttgttgtctatctcttcttctctttgtgttttggctgtggacgtaaaataatggctctgtcttttggttttgggctcttgtcttcttcttcttcttcttcttctttatgtgttctccctccatcagaaacccacactttcatgatgaggccttctgcttcttctggtttgcgcatgatgcgtaccagtcgcattacctgttgcaccctttctcagtcttctaagccagcccgcaaaatccgtggtatcatgaaaccccgcaaagtctcccccgagatggaagacctcgtcggcgctcccgagatggctcgaacccaagtcctcaaacggatttgggcttacattaaagacaacaatc

SEQ ID NO: 19458 - DNA, 276 bp, Glycine max
  Clone ID: LIB3049-026-Q1-E1-E1
agagaatgctgatttaagagcattattgagatcaatgcaggtggatatgcgtgatttcttaaatgctcctaatggactaccaaagcaatctttcactggcaatgaaagagttgaaagtgatccttcacaatctccattggttgggaaaatggatgtatttgaccttccttttcacatggccagagatcaaatagaagaaagtcttcgcaacaaaatggcttctaaaaaggagcgtttggttcagttgcaagatggtcagaaagaagcagaagttac

SEQ ID NO: 19459 - DNA, 366 bp, Glycine max
  Clone ID: LIB3049-026-Q1-E1-E10
tgatggacagggtctatcatttgatttgctggataagctcaattttgatactgatgacactggttccattgtcgtgtatgggggtggtgccttggtggctctgtggctaacatcagcggttattggcgcaattgattctatcccattgtttcccaagctgttggaagttgtggggcttgcatatacagtgtggttcacttcccgttacctgcttttcaagcaaaatagagatgaattgggtgctaaaatagaagagctcaagggacaaatttttggttcagaggataattgattgctctgaacggatgaattgtttgtgctgccacttaaaacaatgtacagttacagttaccgttgttttaattt

SEQ ID NO: 19460 - DNA, 316 bp, Glycine max
  Clone ID: LIB3049-026-Q1-E1-E12
gagtaaagaagtaactaatcaaccacaaacctaaacaaccccttttgcctaaagctccttccttttctccaatggcaacctgggttttatcagaatgtggcttaaggcctcttccaccagtgtttccacggtcaacaagacccatttcgtgccaaaaaccttcaaagtctagatttttaagcacaaacaagggtgtgccagatctgaatctccaagcaagagggttaacatgctgtagttttagggatagaaagtgggaattgggagtgagtgctccactgaaagttgccaccaatgaaggagaggaagaagagag

SEQ ID NO: 19461 - DNA, 310 bp, Glycine max
  Clone ID: LIB3049-026-Q1-E1-E2
ggaatggaagtcactcactgtgggttttgggagtgattttttggtttgactaggtggcctaacttgttagtgggttgtaccattgattgccattctgaaatctcaagctctcttgtttgttcgtggacatgtgcctggatccaatttgcatggagctgtaccaccattggtgatcgcttccaatttgtgcaaagtggacccgcatgacgcatgtttcaaatccctccatttcccctttcttttagcgatgatttgtgggttcctccatttcactgttgtttttaggtacttttttggtcattcctgtgtc

SEQ ID NO: 19462 - DNA, 212 bp, Glycine max
  Clone ID: LIB3049-026-Q1-E1-E3
gattggggttggggttggggttggggatgggggtaagcaacaacatcaccgcagtgctgaacttgatagctacgctggcctcaatcccgatcatagcctccggcatttggctggcatcgaagcccgacaacgagtgcgtggccaacttccggtggcccattgtcatcatcgggatcctcatcgtcctcgtttcgctggccggttttgtcggt

SEQ ID NO: 19463 - DNA, 360 bp, Glycine max
  Clone ID: LIB3049-026-Q1-E1-E4
ggaggaagacaccaatcttctctccacgcccttcttgggtaaccgtctgaagtgcagcaatggcagatggattgcattcgcagcatccatcggtagttcagaagttatctggacagtcttatcttgtgtccaggcttgctcctaatcactccagaaactgttctaccactggtagttacttcaatggaggtttgcagtcttcaggtttggttccagtcacgggacacgcgccggctgacaaaggggtgtcgggatttttgttggatttcctgatgggcggagtgtcggcggctgtgtccaagacagctgcgggtccaatcgaacgagttaagttggtcatccaaaaccaggatgaaatga

SEQ ID NO: 19464 - DNA, 356 bp, Glycine max
  Clone ID: LIB3049-026-Q1-E1-E5
gtggtctgaggacttaggaattacaagcagatgcattgaagctgttgctgcaaaagttctaagtcacccttctaaggtgagtttgtcacatagccattcacgaagagtgagggatgatgtgtcttgcaatggcaaccaaagtgtgaggcataacaagtcaggaaacaaaggatggtgggctgaagatttggcagaacttagcatagacttgtattggagaaccatgatagctatcaaatctgggtggaagattccctcaaatcttattggagatgcattgaagatctatgcatctaggtggctaccaaatgagtacaagaatggaggacatatcaagaagcaagctgttgctgact

SEQ ID NO: 19465 - DNA, 210 bp, Glycine max
  Clone ID: LIB3049-026-Q1-E1-E6
gggggcatggagttggttcatcacagaacataatggaataccaacaacagaagcaacaatggaggaggtcacaaaggacaaaaccctcttcttcttcgtcttctcagatgaacaatctcgatgatggttgtcttatgcacattttcaacttccttcctcctagtccagatcgctttaatagcgccctcgtttgccacagatggaattact

SEQ ID NO: 19466 - DNA, 326 bp, Glycine max
  Clone ID: LIB3049-026-Q1-E1-E7
ggccgccaccagcaggatcgcgtattcgtgattgtttccgaaaacccttgtctctgaaatcaacaccaaaatcgtgaagtgtactaagcgaagccattgcaggcgtgagaatggggaagaaagcaaaagggtcaaggaagggtaagaaggcatggagggctaacatcagcaccgaagagatcgaagatttcttcgaaaaatcaacaaaggaggctctttctggtggctctctccaggccgtttcgagcgattccctcttttatgaagacaagtccaaagatcgtgcggtgaagaagaagattgagaagcatagggagagagtgctc

SEQ ID NO: 19467 - DNA, 374 bp, Glycine max
  Clone ID: LIB3049-026-Q1-E1-E8
gttctttcatgaatcctggttatggaatcccaacttctcatcaaggagttggggctccaccagacactcatcctggcagtcatggttacctccctccatatggcatgccagttatgaattcatcaatgtcagagtcagttgttgaacaggggaaccaattctctgcactaggttctcacgggcataatggtcatttacccggaggagggaaagccaatcataacacagacaacaaaggctcttgtaagttaccagttcagagaaatggagcagtatcgcatgtcctgaaacatcagacatctaaggattttgagttgcaggagacttcagccagtagtcctagtgaaatggcacaaggatgaagcactgggcaa

SEQ ID NO: 19468 - DNA, 339 bp, Glycine max
  unsure (1)..(339): unsure at all n locations
  Clone ID: LIB3049-026-Q1-E1-E9
gagggtttacaccgaggagacacaccttcagcagcagcagccatggttctcaaaaccgaactatgccgattcagcggtgccaagatctacccagggaaaggcatcagatttgttcgtggtgattctcaggttttcctgtttgctaactcgaaatgtaagaggtatttccacaacaggttgaagccatcaaagctcacctggactgcaatgtacagaaagcaacacaagaaggacattgctcaagaagctgtgaagaaaagaagacgtgctgccaaaaagccttactccaggtccattgtcggtgccactttgganggttatccaganaagagagctgag

SEQ ID NO: 19469 - DNA, 330 bp, Glycine max
  Clone ID: LIB3049-026-Q1-E1-F1
ggtgtttggcgaacttgaattcattggcttgtgtggctttctccctccaaaaaactcccctcttttccgtcggagaatggcgtcatcttcacaaagccgctgtggcagcggcagcgccgcctcacgactgaggaacgcagcttccaccttctgctccgactcacagcctctccttgccgatatccgaaaaaccgtgcttatgatgaaggacatcgcacttcaagtggggaaagacaacgtccctgacaaggcgaaggaactggaagatgcggttattgagttagtagggctatctgagctcagtgtgcaattttcatcagcgggtcaagc

SEQ ID NO: 19470 - DNA, 344 bp, Glycine max
  Clone ID: LIB3049-026-Q1-E1-F10
gacgttgagtaattttttttttcctcttccgcgtccccaccaacatcaccgagaccatgtccaccgacttgcacctccaccacgagctaccaaagctccgaatcgccgccgtcgtcaaaaccgacgacgacctcccctccgacgcccaagacgaccgcaacgccgtctcctccgccgtcacacaagccgaggccgaaaacgacggtgccatcaccgtcgatgtcggcgtcaaagtcaacgacgagagttgccgtactccgacgtcgaatgagagcagaattccggcgacgatgacgtgtccgccggcgccgaggaagccgaagttcgcctcgtgttaaaggaaa

SEQ ID NO: 19471 - DNA, 286 bp, Glycine max
  Clone ID: LIB3049-026-Q1-E1-F11
gaataataattatagtaatagttagttcaccagacagacacatggaaccaaagtgcaccataaactgtcgccggccggagttcgttccgacccctctgccggagagtcctcgtgtgcccatggagtttctgtcacgctcatggagtgcctcagctcttgaggtctcaaaagctcttgcacctcactcttcttacaacaactcctcttccattccagaacaaacttctgcttctgctcccaaccacaacaacaaccctttttctgaagacttgtcaaacatctcctc

SEQ ID NO: 19472 - DNA, 316 bp, Glycine max
  Clone ID: LIB3049-026-Q1-E1-F12
ggaacctttgcattctattcattcaagattcagcaagtgcgttttggaagcagagaccgaaatacttcgagatggcccgtacaaagcaaactgctcgtaagtcaactggaggaaaagctcccaggaagcagcttgcaaccaaggctgcacgtaagtctgcaccaacaactggtggtgtgaagaagcctcatcgttatcgccctggaactgttgctcttcgtgagattaggaaataccagaagagcactgagctcctaatcaggaagcttcctttccagaggttggttcgtgaaattgcccaagatttcaagactga

SEQ ID NO: 19473 - DNA, 360 bp, Glycine max
  Clone ID: LIB3049-026-Q1-E1-F2
gacgagaggttagggcattttgatttttcattgtctactcgtctttgattctatcataataacccatacatttcaaatttaaaaccctctaaatcaatttagactatccggaaagctccttggcgcactatcgtggcaatttcaggccgccacatacggcggcaccttatagttcctcacccttggccggcctttgcagtttagcgtcttccgacaggatggttgaggtcgatttcagtagagccttcgggaataatgacgaaactagatctgcgagcatagaaccagatctgctaccagacggtggtggtgggagttatcgtgggtgcgggtgaaagaaaatgcgaagagaaacaaaag

SEQ ID NO: 19474 - DNA, 354 bp, Glycine max
  Clone ID: LIB3049-026-Q1-E1-F4
gcacaagtttgttgagatagctagaagcaataagatgaaaatgaaagtgcttgttttgtttgttgctacagttttggtagcatatgaatgccatggctcagactaccagaagttccctctccaaatgaaaactgggtttggtgggcaatacagcaatgaggtggcatgtgccagtcggaggcttggcgtggaagcaaacaacgtagtcaagtggcaaactgttcctgcagcttgcggagagtacatagctgactacgttctaggagaccaatatagatcagattccaaaacagttaaccaacaagcttatttctatggcaaatccctcaaactcagcaacaaagatgtctttgt

SEQ ID NO: 19475 - DNA, 353 bp, Glycine max
  Clone ID: LIB3049-026-Q1-E1-F6
gggttccgggggggggtaccgagtaggccgctgcaaatgccattttattttgctctacctcctcacttctagggttcgcagcttgtctctcaaacaatggcgctgttccttctctacgaatccgcttcgggctacaccctgttcgaggttcacggcctcgacgaaatcggccagaacaccgaagcggttcggaactccgtttcggacctcaacaggttcggcaaagtcgttaagcttcgctccttcaaccctttcacttccgctctcgatgctctcaaacagtgcaacgccgtctctgaaggcatattaactgatgagctgaggactgttttggagactaacctgcctaaagt

SEQ ID NO: 19476 - DNA, 365 bp, Glycine max
  Clone ID: LIB3049-026-Q1-E1-F7
gatatttatttctcctgctgcgacgactggtacatgatcagcagttcccccattttaagttagattattatcacacctcgtgaacacagattgcagttggtgcggaggatcgatctcgccatgaatttcaattgcactgctaacaaggagcaaaagaaaaccgtagaccaatctatcttattgtgctgcaagttctttgtctctgaatcacgcaacaatgccactctcaatgcagtagaacgagctgcaaggtcaaacccagaaactgtgattgtgaacatgtttcatgatcgagcttataacagggcaaggtacgaccttgtgtcgtatgttttgcatgactgcacaggaaatcccatatacag

SEQ ID NO: 19477 - DNA, 363 bp, Glycine max
  unsure (1)..(363): unsure at all n locations
  Clone ID: LIB3049-026-Q1-E1-F8
gaccgcgaaacgcacatttcactattcattctcgtttccctttcggtaatttccaattactagttactaatttctccatgctttcttcatcttacgcttaatccttatggtttcgtttaattgttgttctaattgctgcttgttgcagactgtgattgtttgttaactgaacttttcgagcaaaatgtctggacgtggaaaggggggcaagggtttgggaaagggaggagcgaaacgacaccgtaaggtgttgcgcgataacattcagggaatcaccaagcctgcgattcggcgtttggctcgcangggtggtgtgaagcgtatcagtgggctcatctacgaggagacacgtggcgtgctcaa

SEQ ID NO: 19478 - DNA, 313 bp, Glycine max
  Clone ID: LIB3049-026-Q1-E1-G1
ggattacaacttcaattgaatcacttggcatcgcttctcctctctcccaagaaagaatcatcaatggcgattgaacacgaagacgatctcaaagacgagaagaaccctcgacctctcgacgaggatgacatcgccctcctcaagacctacggtttgggaccttactccacaagcataaaaaaggcggagaaggaaatcaaagatatggccaagaaagtgaatgacttatgtggtataaaggagtctggatacgggtttagctgcaccaagccagtgggatcttgtttctgataagcaaatgatgcaggaggag

SEQ ID NO: 19479 - DNA, 379 bp, Glycine max
  unsure (1)..(379): unsure at all n locations
  Clone ID: LIB3049-026-Q1-E1-G10
ggtgtcaaactctatttttgtttcattcatacaaatacaaattaataaaaacaacaggttctttgctccttgtggctctcatcaggctctgatcacacttcgatggcaaagtttggattatctccactcttggtgctttccatattgttgctgatcatgagtggtggtgcagtgagaggccaaagagaaatggtgcctgccttgttcatatttggtgactctctcattgacaatggcaacaacaacaaccttccttcctttgctaaggccaactattacccttatggcatcgacttcaatgganggcctaactgtccccttcccaatggtacactatggttgatgaaatagctgaactgcttggacttcccttgattcc

SEQ ID NO: 19480 - DNA, 342 bp, Glycine max
  Clone ID: LIB3049-026-Q1-E1-G11
gatccaactctctaaacaacacattaacctttctcattccccatctcctcaccttattcagccactgcgaatttctagggttccgaaatggacgctggcggaaagatcaagaagggcgccggaggaagaaagggcggcggccctaagaagaagccggtttcaaggtccgtcaaggccggtctccaattccccgtcggaagaattggccgttatttgaagaaaggaaggtacgcccagcgtgtcggtaccggtgctcccgtttacttggccgcagttctcgagtacctagctgctgaggtgcttgagttggctgggaatgctgcacgtgaccacaagaagaac

SEQ ID NO: 19481 - DNA, 404 bp, Glycine max
  Clone ID: LIB3049-026-Q1-E1-G12
gactactaccaagtgaaaaagcaactaagcatagtgtgtaagaaagggagaaaaacaagtgctgtgtagagagaaaaatggctaggtggtgcatgatcttggtggttcttgctcttgccgtggttgcaagtgccagaaacatgcccaatgacgctggtttggaggaccagaagaacttccttgggtatgggttttcgggagttggcaacaatggccttccctttggtggagtgggttctgggtttgatggtaatatgggtgggccttctgggctcggaggacttggaggattcggtgggcctggcgggcttggcggactcggaggtcctggtaaccgttaagggaccaatctcttctctcccttgagagttgagaccacacaccttcgtgtttctttcggtcgc

SEQ ID NO: 19482 - DNA, 338 bp, Glycine max
  Clone ID: LIB3049-026-Q1-E1-G2
gattccgtggccgtatttaaaaaaacactgtttctcttctctgtacctccccctatatattcctcccccgttattattagagcacagaaagaatttctgtgcctgttttgattagaagggaggagggagaagaagaagaagggagggaatagaaattaacccagtgtttgatcaatttgtatggttcaagattgaacacaaaaaatggcggttactactcgcactctatctgccacagaagagaaacactggtggcttaccaaccgaaaggtaaggtatcacacccttttgctctaattacatcatgttttgtgtagcaagggagggaaaggggaggg

SEQ ID NO: 19483 - DNA, 337 bp, Glycine max
  unsure (1)..(337): unsure at all n locations
  Clone ID: LIB3049-026-Q1-E1-G3
ggaaaacanaagacaaatttatagaaatggtgaggaatctaactaaactggtgttcccacaaagcaaggtatagctcaatggcatcatcatttgtgggtactttattacccaaccacttcacacaaaccaaacactcagctgttcctgcaagtagatcaggtgctccaagaaagaggagagtgcacttagcaacaacaagagcagagaccatgactactgtcatagaaaaactgggcattaagattgagaggaaccctcctgagtccaagctcactcaactgggtgttaggcaatggcccaaatggggttgccctccaagtaagttcccatggacat

SEQ ID NO: 19484 - DNA, 369 bp, Glycine max
  Clone ID: LIB3049-026-Q1-E1-G4
ggcaagtgtgagtgatatttgagcttaaaccctagccgctcttctcttcattcttcactttggaaacaatcatatggcgttctgtaataaggttggaaatgtcttgaggcagggtgctgctcgcagcacacacgcccctgttgcgtccatgcttaattacatccgctgcatgtcttcaagcaagcttttcattggaggcctttcatatggagttgatgaccagtctcttaaggatgcattttctggctttggagatgtggttgatgcaaaagttataactgatagagacagtggaagatcaaggggatttggatttgtcaacttctccaatgatgagtctgcaagttcgggactctctgcaatggacgg

SEQ ID NO: 19485 - DNA, 355 bp, Glycine max
  Clone ID: LIB3049-026-Q1-E1-G6
ggcacaagtttgttgagatagctagaagcaataagatgaaaatgaaagtgcttgttttgtttgttgctacagttttggtagcatatgaatgccatggctcagactagcagaagttccctctccaaatgaaaactgggtttggtgggcaatacagcaatgaggtggcatgtgccagttggaggcttggcgtggaagcaaacaacgtagtcaagtggcaaactgttcctgcagcttgcggagagtacatagctgactacgttctaggagaccaagatagatcagattccaaaacagttaaccaacaagcttagttctatgctaaatccctcaaactgcacaacaaagatgtccttgt

SEQ ID NO: 19486 - DNA, 330 bp, Glycine max
  Clone ID: LIB3049-026-Q1-E1-G7
ggggctgcaggttcgtgctttcccgccgccgctatactgccaccgtctccgccagcgatggcagaggatgattcaaagcctctgaactacatcgccgaagtcatactcaagaagaggaaaagcaccgaagcatgggcgttaaggaaaaaagaacagttccagcagaagaaattccaatccatcagaaagcccgaggatttcatccacgagtatcgcaacaaggaagtggaccttagaagaatgaagcggagggtgaacaggaaagtgcctgaagctaactccaacactatgataatcattcggatacaggggaaaagagacacgcatcct

SEQ ID NO: 19487 - DNA, 407 bp, Glycine max
  Clone ID: LIB3049-026-Q1-E1-G8
ccggctcgacccaagcgtcaggggaggaaaggaaagggttttgtagagggagagaattccaaaccaaaaatccgaaataaataattttttttttttaaaaaaaaagaaccgggtgtgggtgttgttggtgttggcggaggcagatcggagatctgtgatagatatagatggagggagttggggcccggcttgggcggtcctcgacccgctacggaccggccacggtgtgcactggaccggtccggaagtggaagaagaaatggatccacgtgtccccttcttctgcttcctcgaagtccaacgccaataatcatcacaaccacgcttcccatgcctctcatcttctcctctacaagtgcgaccctctcacgcacagccagaacaccgccactactaacaacgccaac

SEQ ID NO: 19488 - DNA, 323 bp, Glycine max
  Clone ID: LIB3049-026-Q1-E1-G9
gggttttacttttcttctcagtaacaatgtccttcattcccgacgagatttgaattttgaagcatatattattgatcccttcctcgtcgaccatcgatttgcactgcacaaatactcggactcggagaccccttcacggagctccgtcgtgggctcgtggccaagcaccacggcaaagatcggtacctgctctcatcgccggtggcctcaaggacttgggcaccaaaaatcccgttctctacctcgatttcgaagttcccgcctaattcacacggcttatgctgaagacactgctgctgctgctgcaagaaaataaaattaaa

SEQ ID NO: 19489 - DNA, 330 bp, Glycine max
  Clone ID: LIB3049-026-Q1-E1-H1
gacatcacatttcgttgcgcctctgttctctgtcactgctgcgtctctcgtaaccatgcctaagcaaatccacgagattaaggatttccttctcactgctagaaggaaggacgcaaggtcggtgaagatcaagaggagcagagatgtggttaagttcaaggtcagatgctcgaagtacctctagacactttgtgtgtttgacccagagaaagctgataaattgaagcaatctcttcctccaggtttgagtgttcaagacctgtaaaggtacacggggagagaccaagaagaagcaattcattggttcttctgaacgtcgtttctctgtag

SEQ ID NO: 19490 - DNA, 398 bp, Glycine max
  Clone ID: LIB3049-026-Q1-E1-H10
gaggcacaaattatggttgcatgaacatggcaggtttcgcggcaaacatcggcttcaacatctcgtcccactttccctgtcgcgttttttcaattcaccggagtatttggaagtttcagattgtctgcttgaagagaagagagtatagttcttctgttcctattaggtacatttccagcacatcctgcagggtgaaaatacttgaaactgcactgccagtgaaaagccttggatattgtagctgtcctgatgttaatgtgctcaagataaatggtggaaaagatgtgcaggcaacaattgcacattgtgaaatttctcaagacccgaatgaaatttgccctgaacttattatttgatgacagtgaacaagattcttttgatcaaatggaagaggttgg

SEQ ID NO: 19491 - DNA, 313 bp, Glycine max
  Clone ID: LIB3049-026-Q1-E1-H11
ggaaagaatggaatgaagaaaaagaagtgcttaggagtgattgctgcagcaagttggaggagtaaggtaacaaagaaactccaaattgaatccaaggtaaccatctcagcatgtggctctctcaacactcctcctctaatgatttctagtggaacaaaaaatccaaacattggaaggaatctccatctccagcctgtccaatttgcatggggttacttcccagaagacatgacaacaaacttcagcggcaacaactacgatgggggtatcataacttcgatccacatgaatatgcaaaagattccaacccaaa

SEQ ID NO: 19492 - DNA, 400 bp, Glycine max
  Clone ID: LIB3049-026-Q1-E1-H12
ggttccaagacgcggctgcgtcggtctctctcggtttcaactgtgaactgtgagctggtaatggtttcataaatctcactgcatccatggcttcggagaagatttcctcgattctcttgttttctgctgtaattttgcttgtccgtgatgctccttctgccatagctggggacatagttcacgacgacgattcaactcccaaaaagcccggttgcgagaaccagttcgttctggtaaaagtgcaaacttgggtcaatggtgtcgaggatgttgaatttgttggtgtgggtgccagatttggcagagctattgtgttcaaagagaaaaattgcaacaaaaccccccttatcctttcagatcctcgggattgttgtattccgccaaagaataagattgtggg

SEQ ID NO: 19493 - DNA, 382 bp, Glycine max
  Clone ID: LIB3049-026-Q1-E1-H2
gccacgcgtcagagacgacagaaggggacttttcattgattgagccaaagctttgtattttctgcgataattttccattgggtggaagaaagtctcaacctttattcggaagagcaaggatctgagttgagttgagtgatcatgtgtggtggtgcgattatctccgacttcataccggcaggtcccgccagcggggcgcggcgcgtgaccgccgacatcctgtggccgagtttgaggaagcgcttctcgaagccgctgctggacgatgatttcgaggctgggttcagagaattcaaggatgattcggaaatcgaggatgttgatgacgaggacgatgaagacgaggaggagttgaagaagaagccctttgggttctctcgct

SEQ ID NO: 19494 - DNA, 301 bp, Glycine max
  Clone ID: LIB3049-026-Q1-E1-H3
ggaacctttgcattctattcattcaagattcagcaagtgcgttttggaagcagagaccgaaatacttcgagatggcccgtacaaagcaaactgctcgtaagtcaactggaggaaaagctcccaggaagcagcttgcaaccaaggctgcacgtaagtctgcaccaacaactggtggtgtgaagaagcctcatcgttatcgccctggaactgttgctcttcgtgagattaggaaataccagaagagcactgagctcctaatcaggaagcttcctttccagaggttggttcgtgaaattgccca

SEQ ID NO: 19495 - DNA, 344 bp, Glycine max
  Clone ID: LIB3049-026-Q1-E1-H4
gaagagagagaagaagaagttgttgggttgagttgggtttggattggatttctaatctaatctatacctttctttttcctatgcttttaaggcacaaatccttctcccttctctcgtctttcttcttcttctcctgacccttattattattccttgcccttaccctttaggcaagggaaggaagaaagaataactatattattatctttattgtaatctatctttttattataattataagtataattagtgttgttagtattccttaaatacggattcgccgtgtctctccaacgattcggtttctggattcaaagacaaggagtcaatggttgagccctttt

SEQ ID NO: 19496 - DNA, 315 bp, Glycine max
  Clone ID: LIB3049-026-Q1-E1-H5
gaggccagttcccaaaggtattgtttatgggaagcccacaaaccagggtgttacccaactgaaatttcagcgtagcaagaggtcagttgctgaggagcgagctggacggaagctgggtggacttagggtcctcaattcttactgggtgaatgaggactctacttataaatactttgaggtgattctggtggatgtggctcatgctgctattagaaatgatcccagaatcaattggctcgccaatccagtgcacaagcacagagagctgcgtgggctcaactctgctgggaaaagcaacaggggtttacgtggcag

SEQ ID NO: 19497 - DNA, 93 bp, Glycine max
  Clone ID: LIB3049-026-Q1-E1-H7
cttgctggtctatggggcacttctttagggggaagtgagccacgccgtgttgatgctgccgtggcacaactaaagaagttgccattttaccat

SEQ ID NO: 19498 - DNA, 367 bp, Glycine max
  unsure (1)..(367): unsure at all n locations
  Clone ID: LIB3049-026-Q1-E1-H9
gaaaaacaatagtcacagcgagtgtggttgcgtttctccgttctgagaaggttttggtcggcgaagtgaagtcttctccttcaacaacaacaaggggttgccgtgaagcatggatgaagctgaatttcaacgccttctccaacttttccccgttgttcgttctcgcgattacaccgcagaagcaacatcatccagacaaattgcatctgggtcagcacagaatgagttaaaggaatggcaagatgcatgggacgaaagggataaggattttgagaagcaaggaattaatcaacaagattcattttggagcaagctaaagtcagaggctgctangaaggtgggtgcagaagaaagcgagagattttgc

SEQ ID NO: 19499 - DNA, 102 bp, Glycine max
  Clone ID: LIB3049-027-Q1-E1-A10
tggggcactgcaaatcacttttctactttgagtcttcttgatccttctttttctccttgaactcagtggtggcagatcaagtcgttcttcaacatttcgggc

SEQ ID NO: 19500 - DNA, 352 bp, Glycine max
  Clone ID: LIB3049-027-Q1-E1-A11
ggagcaagagtgaagagcgaagagaatggctcccaagggtttaatctttttggctgtgttatgcttctcagcactgtcactgagtcgttgtcttgcggaggataatggacttgttatgaacttctacaaggaatcatgccctcaggctgaagacatcatcaaagaacaagtcaagcttctctacaagcgccacgagaacactgctttctcctggctcagaaacatcttccatgactgtgctgttcagagttgtgatgcttcactgttgctggactccacaagaaggagcttgtctgagaatgaaacagatagaagctttgggttgagaaatttcaagtacattgagaacaat

SEQ ID NO: 19501 - DNA, 266 bp, Glycine max
  Clone ID: LIB3049-027-Q1-E1-A12
ggaggtgcagttgctgcagagtgaggcgttcgattaacgtttggcgatcacagaagagaagggaatggagttttctcaagatgattttgatcggttactgttattcgaacacacgcgaaagactgctgaagcaaactacgcagagaatcctcaagatgctgataatctgaccaggtgggggggagctttgatcgagttgtcgtcattccacgctcctagggatgccatggcgattactgatgatgccctttcgaccctggaggagt

SEQ ID NO: 19502 - DNA, 317 bp, Glycine max
  Clone ID: LIB3049-027-Q1-E1-A2
tggggtaaatgccttcctaagatgtcatggatctggctgtattattatgcgtctcaacacggtcactgcggggttcggttgcgggacaatggaattataatcgactagttatgaacttccacagggcatcatgcactcatgttgaggatatcatcataaaagtagtcatacttcactagattcgccatatgaccactgctttctcctgcctcacgaacatcttccatgactgtgctgttcatacttgtgatgcttcactgttgctggactccacaataaggagcttgtctgacaagcgaacaaattcaaacctttgg

SEQ ID NO: 19503 - DNA, 309 bp, Glycine max
  Clone ID: LIB3049-027-Q1-E1-A3
gaaccaggaccaaccaggacttggaaccaggttaattaaggagagggtatagtatggcccagtctagtggcaaaactttggtgcagtggttggtagcagcattgctcattgccttgttgggtggtgcacaagctgttgcaatatgtaacatagactcaagtcaattaaacttgtgtcgtgctgcagttactggtcaaaaccctccaccaccggatgagaaatgttgtgcagttattcgccaagccaatttgcgttgcctctgcagttacaagtctatcctaccttcattcggaataaaccccaaaaatg

SEQ ID NO: 19504 - DNA, 338 bp, Glycine max
  Clone ID: LIB3049-027-Q1-E1-A5
ggaaaccatcaaccacaatcctcatcacatcctaacccaagatcaccaccataacagtgatgatgatgatgatgatgaagcccatggcacatcacaaccccagcatcatagaagaagaagaaagtacaaaaggccaggtctgatattcctcccaactaaagagatcataagagacacatacaggcttgccaccattgcaagagacttaggtctggacttgtaccctacaccatcactctctcacatcatcttctccaacccatcatcatccaaaccctcatcactttccatctctttttcctgctctcttcaaagcgaagctggtcccaattcccttc

SEQ ID NO: 19505 - DNA, 402 bp, Glycine max
  Clone ID: LIB3049-027-Q1-E1-A6
ggaagagtgaagagaatggctcccaagggtttaacctttctggctgtgttaatatgcgtttcagcactgtcactgagtccttctgttgcgggggaagggcaaaataatggccttgttatgaacttctacaaggaatcatgccctcaggctgaagacatcatcacagaacaagtcaagcttctctacaagcgccacaagaacactgctttctcctggctcaggaacatcttccatgactgtgctgttcagagttgtgatgcttcactgttgctggactccacaagaaggagcttgtctgagaaggaaacagattgaaaccttgggttgaagaaatttcaggtacattgagaccatcaaagaagctttggaaagagaatgccctgcagttgtttcatgtgctga

SEQ ID NO: 19506 - DNA, 285 bp, Glycine max
  Clone ID: LIB3049-027-Q1-E1-A7
ggaatagtgaagacactggctctcaagggtttaacctttctggctgtgttaatatgcgtttcatcattgtcactgagtgcgttctgttgcggcggaagggcaagatcatggtcttgttatgaacttctacaaggaatcatgctctcaggctgaagacatcatcatagaacaagtcaagcttctctataagcgccacatgaacactgctttctcctggctcacgaacatcttccatgactgtgctgttcagagttgtgatgcttcactgttgctggactccacaag

SEQ ID NO: 19507 - DNA, 308 bp, Glycine max
  Clone ID: LIB3049-027-Q1-E1-B1
gataaatgaaaatgatcactgcttaacaatcatctgttctgtaactttttttcaatataattttagaattgggtttgaagtctggagttgaatctgttgttctggagtacatccacaacttggttgacatcttgaaagatacgacctttgagaaaggtaacgcaggccttgttaagaattatttggaagcacgtgggacatttaacactctcaaaggtatcatagctctgcaatcttataatcgtggccagttggttcgactaacagctatttctgcattacaatgtgttaagtcaatagttgaattt

SEQ ID NO: 19508 - DNA, 301 bp, Glycine max
  Clone ID: LIB3049-025-Q1-E1-A5
gcgggagacgacataagggggctcactggcgacataccagaaccctacgacccttccggctccgatcgcacgcgccctgatcgccccgtatgacgaccggctgtgaccttggtggcgccgagcatgatgccgatcccgggtagagcgggcagcttgcagcgcatgacagccattgttcacaccctcactcacactgaaagctggtccattgacttgtcttgggaatactataccacgtttcgggacgcaagagtcaatgcccacacacttccctagacattttgtcaacgccgcacacgat

SEQ ID NO: 19509 - DNA, 399 bp, Glycine max
  Clone ID: LIB3049-022-Q1-E1-H1
gacgaacaaggcttccttctcagaacctccgccaaacttagcggcgatttttccagcttccatttcccccctcaccttcttcttatacccctcacactctcttcttcctcgtccaccccatttctctctctttctaacaatggctcaggtcgtggcttcacgatccattcaaagcaccccattgtgccccacttctggatctgcacgtgacagaacccaaaacctgttgaagcctccatcttttgcttccaaggtgttccctttgggagagaacaataacaaacgctccaaactcaggctcagaagccttcagatcagtgcaaggaaatctgccccttctgaagtcatccccatgtcacccgaagatgattcaaaaattgaggagcatttgcaacattt

SEQ ID NO: 19510 - DNA, 395 bp, Glycine max
  unsure (1)..(395): unsure at all n locations
  Clone ID: LIB3049-022-Q1-E1-H11
gagggtttcattggggttaattcggtacccgcctagccattgatttggaaaagtcaaagcttcaaagatgagtaagcttcagagtgatgctcttagagaagctatctcaggaatcatgactgattccaaggaaaagaacaggaaatttgtggagaccattgaactccaaattgggctgaaaaactatgatccccagaaggacaagcgttttagtggctctgttaagttgcctcacattcctcgccccaagatgaagatttgtatgcttggagatgcccaacacgttgaagaggctgagaagataggattggactacatggatgttgaggccttgaagaagcttaacanaaacaagaaattggtgaaaaaactagccaaaaaatatcatgcctttt

SEQ ID NO: 19511 - DNA, 339 bp, Glycine max
  Clone ID: LIB3049-022-Q1-E1-H2
gatgttaggaaggctctttatgcagccaaaatctgtagttatgcacagggaatgaatttgatccgtgcaaagagtattgaaaagggttgggatttgaagttgggtgaactggcccggatttggaaagggggttgcattattagagcaatattcttagacagaatcaagcaggcatatgaaagaaaccctaatctggcaaaccttcttgtggatccagagtttgcaaaggaaataattgattaccaatctgcctggaggagagttgtttgccttgctatcaattctggtattagcactccaggtatgtctgctagtcttgcttagtttgacacttacaga

SEQ ID NO: 19512 - DNA, 367 bp, Glycine max
  Clone ID: LIB3049-022-Q1-E1-H3
gatgttaagaaggctctttatgcagccaaaatctgtagttatgcacagggaatgaatttgatccgtgcaaacagtattgagcggggttgggatttgaagttgggtgaactggcccggatttggaaagggggttgcattattagagcaatattcttagacagaatcaagcaggcatatgaaagaaaccctaatctggcaaaccttcttgtggatccagagtttgcacaggaaatcattgattaccaatctgcctgcaggagagttgtttgccttgctatcaattctggtattagcactccaggtatgtctgctaatcttgcttattttgacacttacagaaaggaacagtttccagccaatttggtgc

SEQ ID NO: 19513 - DNA, 359 bp, Glycine max
  unsure (1)..(359): unsure at all n locations
  Clone ID: LIB3049-022-Q1-E1-H4
gaaccattcaaacgcacactctctctcaccaaagccttcctagaacgaaaaaaaaaagaagagcaattttccctcaccaaagaagaagaagcaaacaatggccgatcaacttaccgatgaacagatctccgagttcaaggaagccttcagcttgttcgacaaggacggcgatggttgcatcacaaccaaggagcttggaactgttatgcgttcattggggcaaaacccaactgaggcagagctccaggacatgatcaatgaagtggatgctgatgggaatggtaccattgacttccctgagttcctaaatctcatggccaggaagatgaaggacactgattctgaggangagctgaaag

SEQ ID NO: 19514 - DNA, 169 bp, Glycine max
  Clone ID: LIB3049-022-Q1-E1-H5
ttctactacatgcttcagtgttcatctcggacaaggtttgttagatctctatgttaatcctttggttccggttcagcgggtcgcagctgcgccactgtcggattcaaccgcttctgcctggaatctttcttccaatagctttaattgcttcatgtcacaatccatacac

SEQ ID NO: 19515 - DNA, 362 bp, Glycine max
  Clone ID: LIB3049-022-Q1-E1-H6
ggatcctttgtattctattcttcaagattcaggtactgcgtttcggaagcagacacagatggctcgtacgaagcaaaccgctcgtaagtccacaggaggaaaggctcctaggaagcagcttgcaaccaaggctgcacgtaagtctgcaccaactactggtggtgtgaagaagccccaccgttatcgtcctggtaccgttgctcttcgtgagattaggaaataccagaagagtaccgagcttttgatccggaagctccccttccagaggctggttcgtgaaattgctcaggacttcaagactgatctgcgtttccagagccacgccgtgcttgcattgcaagaagctgctgaggcataccttg

SEQ ID NO: 19516 - DNA, 342 bp, Glycine max
  Clone ID: LIB3049-022-Q1-E1-H7
ggagagagaaaggaagacaagagagaatggcagagaaaacgtttaaaatgaaaacccaatgacccaacacagattcacaagtcagtttcagagagagagagagagagagagatccactcttacaagtcaactaagtctcactctccacattcatttcacacacaccttccccatgaaatgacccttttgctcttccctctttgcctccatcttcttctcctttgactcaacaaccccccctctctctcacagagagacactttctctctctacaccgtaatggacgccggcgaagccctctctgacgatccgaatcggcccaattccgccgccgacgcagct

SEQ ID NO: 19517 - DNA, 365 bp, Glycine max
  Clone ID: LIB3049-022-Q1-E1-H8
ggatgtccttgcactttagctgttctgttacaaagaaagaacaccaaataatgcagtccatgttaaccatccgtgccacccatggccttcctctgtgtctctcagggatgattcaccctcttgctctctctcacgagatagcggatcacgaccgtaggagacgcaccatgaggaagcaaaggcaaagatcactcaccagagagggtgtagtgcatgatgcggttcgagaaattcactttgtggaggtcaaaggtgagaccgatttgcatgatctctcccacactcatcacctggggttgtcagcaagagctgcttaaaatttagctgcttctccaaaattgattaatctcgctagctcctaacac

SEQ ID NO: 19518 - DNA, 192 bp, Glycine max
  Clone ID: LIB3049-023-Q1-E1-A1
ggaggcgacggtaaggtcgcgttgtgttgcgtcgtgtcgtgcgctgttcctctgtttcgcgtttttgtgttcagaccgaaccctagctccgcatcgcaagcatgtcgacgaagcaaagtggaaaagctagacctttgaagaaagccaggtctgataagaaggattacgacgagattgatgtggcgaacattc

SEQ ID NO: 19519 - DNA, 343 bp, Glycine max
  Clone ID: LIB3049-023-Q1-E1-A10
gggaccagaggaagaagaaaacaccaattatcgtttaaccagtacagttatgctgactctgactacaaataatgagtcatccggaactttcagtttatctggttcaattaggcgtcagatgagtatgaagctatcagttgctgatgggcatctttgtaacatgggaaggatgattgaagaaatggagagtaagctgaggaactcactagatcaggtatactttgggaaaacaagagaaatggtttgcacactgagaccaccatctgaagtggcacagttgagaatgcctgatagcgcctgagagctgatgtgccgttacttggtgtagcagagagaaatttac

SEQ ID NO: 19520 - DNA, 141 bp, Glycine max
  Clone ID: LIB3049-023-Q1-E1-A11
aggcgtcagaagaaccctcagggggactgacacacacagatattctggcggaacaatcgtccctctcttcacttcattcccatttaccacttcacttctacagcatcagattactcctcatccgtcatccgatccatccat

SEQ ID NO: 19521 - DNA, 389 bp, Glycine max
  Clone ID: LIB3049-023-Q1-E1-A12
gacggtgactgcggaaatggttgcatgtattgcagtcgagtccctgtcgatcctggagaagatgcatgcaagaggctatgtgcatggagatgtaaaaccagagaactttttacttggtcaaccttctacaccacaagaaaagaaattgtttcttgtagaccttggattagcaacaaagtggagagacacctccagtgggcagcatgttgaatatgatcaacgtcctgatatgtttagagggactgttcgatatgccagtgttcatgctcatttgggaagaactgctagtagaagggatgatcttgaatctcttgcatatacactcatcttccttcataaaggcaagttaccctggcaaggttatcagggtgatcataaatccttccttg

SEQ ID NO: 19522 - DNA, 200 bp, Glycine max
  Clone ID: LIB3049-023-Q1-E1-A2
cctactcaacatcattcagcaatgcatgtggcagatgccacccagaaccgactccttctcccgcctcagcgatcagggaagtgccccaaggacacattgaaggctaggggtgtgtgctgatgttctaggacttgtgaatgttgttgttgggtcccctgtcgctagcaagtgttgtgcattgcttaaaggtttggctgatt

SEQ ID NO: 19523 - DNA, 263 bp, Glycine max
  Clone ID: LIB3049-023-Q1-E1-A5
ggattaaacgaagttaacggattgagagtggatgcctgttctgtggagaccaatatggtagttattgacattgaagagggtacaaagactacagcagaaaagatatgcaagtagatggaagaacgtagtatccttgtgatgcacgagagttcatcaagaatgagagttgttctccatcagcagatatcagcaagtgatgtgcaatacgccttgtcatgcgttcagcaagctgtagctgttaaaggagtacagaaggaaatggg

SEQ ID NO: 19524 - DNA, 128 bp, Glycine max
  Clone ID: LIB3049-023-Q1-E1-A6
ggtgaggaaggaagatgagtttgagggcatcagagatagcgaggaagttgaatctgcaacctcacgcagagggtgggttttacgtggagacattccgagaggagtccgtcgagctttcgacctcgcag

SEQ ID NO: 19525 - DNA, 56 bp, Glycine max
  Clone ID: LIB3049-023-Q1-E1-A7
gacggggtgcctcacgtcgccctttgcagaaaccctaacacctagacgccagagga

SEQ ID NO: 19526 - DNA, 70 bp, Glycine max
  Clone ID: LIB3049-023-Q1-E1-A8
ggtccttgagcggatgatagcgagaatgtgtttacttgcagttccatcttcgcgcccctgtgaagtcacc

SEQ ID NO: 19527 - DNA, 347 bp, Glycine max
  Clone ID: LIB3049-023-Q1-E1-A9
ggctcattgagctaatattagggtttgtagtgtatcaagaacaagcatcactggcgccgaagatcacacgtaaggttagcagataccctgaagtgataatgggaatccgatagtactcgaggtcacacatgtatcacaagacgggtatttgggctatccaggccaattcaggtggcgttttaactcgccactatcctataaccaagcctgaaactctcgctaaaatagcgcccaaattttaccctgtccgatgatatcacgaagccccttgtcatcaagcacacaccgataatagctaagctcagggctagcagtactcacgggatagtgttgactcttcctgccgg

SEQ ID NO: 19528 - DNA, 224 bp, Glycine max
  Clone ID: LIB3049-023-Q1-E1-B10
agggacagcgaaacagagagtgatttcagtgggtgatcggtgttcacttgatctcatcataatcgtcagcgtcaattgaagaagatgccgatcagaaacatcgccgtcggaaggcctgaagaggcgactcaccccgacacgttgaaggcggctttggctgagttcatctcaaccttcatcttcgtgttcgccggctcaggctccggcatcgcctacaacaagct

SEQ ID NO: 19529 - DNA, 378 bp, Glycine max
  Clone ID: LIB3049-023-Q1-E1-B11
ggaaacaaaagaaaacaaaagattaggttttgtgatgtcgggcatggagaggcttcagaggatgttcgcgggtgcaggtggagcgctgggccatcccccaccggattcccccaccctcgattcctccgagcaggtctacatctcctccctcgcccttctcaaaatgctcaaacacggaagagctggggtacccatggaagtgatgggtctgatgttgggggagttcgtggatgagtacaccgttcgcgttgtggatgtgtttgcgatgcctcagagtgggaccggtgttagcgttgaagctgttgatcatgtttttcagactaatatgcttgatatgttgaagcaaactggaaggccggagatggttgtggggtggta

SEQ ID NO: 19530 - DNA, 388 bp, Glycine max
  Clone ID: LIB3049-023-Q1-E1-B12
gacccatcatttttcattgcatcttcttcaatttgtgtgttcactctctcctcgtggctatagttttgcacagtaaataaactgaactgaagctatatagaagcaagtggtgattaattacttactatagacaattatatatatatatattaattacaccaatttataaggtctttatctatctagctagctaggtaaaattaacatgtctagcagaaggtccaggcagcaatctgcatccacaaggatctccgatgaccaaatcatcgaccttgtttccaagttgcgtcaacttgttcctgagattcgcgataggcgttctgataaggtatcagcatctaacgtcctacaagagacctgtaactacatcagaagcttacacagagaa

SEQ ID NO: 19531 - DNA, 194 bp, Glycine max
  Clone ID: LIB3049-023-Q1-E1-B2
cgcatactatttcatgtggaagttgtctgctctagcagagcatggttccctacgcacagagaacgcatgggcaggaagatggtggacttggctagggacgtgggcaagggtggaacaccttcgtaccgtcgacacctgcatgttgttgttaccggttaggatgatgaggatagatacattgacatcccccaaat

SEQ ID NO: 19532 - DNA, 257 bp, Glycine max
  Clone ID: LIB3049-023-Q1-E1-B5
ggatgctttgtattctattcttcaagattcaggtactgcgtttcggaagcagacacagatggctcgtaggaggcaaactgctcgtgagtcgagacgcggaaaggcgccgaggaagcagcgtgcaatcaaggctgcaggtaagtgcgcagcagctactggtggtgtgaggaagcccgagggttatcgtcgtgggaccgttgggcgtcgtgagattaggaagtaccatgaggggtacggagcttttggtccgggagctc

SEQ ID NO: 19533 - DNA, 189 bp, Glycine max
  Clone ID: LIB3049-023-Q1-E1-B6
gactacaccgagtcgcagaaaacgaaaaacgcgatcatagtttcacttcggccttatccagtttacggtttcggttctcgaccctatctttcacgtatcgaaaccttaaatttacgatcaggtctgagcaatctggttggtagaacctttggtcgtagtgagtcaggttttatggtgcgaattagacga

SEQ ID NO: 19534 - DNA, 191 bp, Glycine max
  Clone ID: LIB3049-023-Q1-E1-B8
ggatcaccacagagaagatgcttctgattctcagaaattaacatgaagggcatggtggatttgaagtaaataaattcagctgtgtcgtgattgatgagtttggaagcatttgcattgagaattggttgttgctctcgagagccagttctgaagtacacgagagtgtacgtgtgtgagagagagtgtcaagt

SEQ ID NO: 19535 - DNA, 368 bp, Glycine max
  Clone ID: LIB3049-023-Q1-E1-B9
gggtgtgggcatatatccaaccaaaaagggacattttgcgggtatttgtgagtgtgtgagagagagagcgagcagtttcagacacagagagaggggtttgggattggagggattgacgctgcgtctcttcctcttctctttcgatccatccctcattcctaatcctccattccaaccacctcatcctcacactcacatatacacatatctgaacgcgtatcgtccctcctatggcttcaaagcgcatcctcaaggagctcaaggacttgcagacagacccaccatcttcttgcagcgctggtccagtagctgaggacatgttccactggcaagctacaataatgggtcctgctgatagtccttatgct

SEQ ID NO: 19536 - DNA, 205 bp, Glycine max
  Clone ID: LIB3049-023-Q1-E1-C1
ggaagttttgtagtgtggtttagtgtcaaatggcggcgagtagaagcacgtttcctctgatggaatacttgagagtgcgcgtcgacgcgcttccccgcaacactcccttaagcctcgctccgaactttttgattcacgccttctgtgagaaggttaagggttgttttcgcgacaagtcggaggtcagagatggcgtcatttcgtg

SEQ ID NO: 19537 - DNA, 238 bp, Glycine max
  Clone ID: LIB3049-023-Q1-E1-C10
ggcagtttcaaattttcttttccttcactttcccgagaaaaaaataacacttttcactttcttcactacgttctcacttcgatatggctcgtacgaagcaaagcgctcgcaagtccaccggtggcaaggcgccacgtaagcagctcaccagcaaggccgctcggaagtccgctccggcgactggaggagtgaagaatgcccaccgcgtcaagccgggaatcgtagcgctgaaggaaat

SEQ ID NO: 19538 - DNA, 390 bp, Glycine max
  Clone ID: LIB3049-023-Q1-E1-C11
gagagcgggtaccaccgacgatggatactggcggaggcggagcatcacctacagccgccatgtcgcggtggaagttcgcggcgtggcggcagtaccagcacctgctggacaaatcgacgccgcacgtcggacgccggtggctggggttcgcggcggtggcgcttttgtacttgctgcgcgtgtactttgtggaaggcttctacgtcgtttcgtacggcttaggcgtatacatcctcaaccttctgatagggttcctctcccctcaggtggaccccgagaccgcgattctcaacgccgacgaccctatactctccatcgccgcctcagacgagtttcgccccttcgttcgccgcctccccgagttcaagttctggtactcaatcacgaaag

SEQ ID NO: 19539 - DNA, 356 bp, Glycine max
  Clone ID: LIB3049-023-Q1-E1-C12
ggaccagcgtccaagcagcaatgatgcatggagcacacggatcatggacaagtatgggcatgacacttcggaatttacttacatcccatcagaatcaacaaggttccagcaagtcaactcgcaaccaactgaacaaaagagccgctgcactataatgtgatatattttgcatactttgtgtacacaattcttgctgtaccgcatcactccatggcatggtaacatcttcatgatactgtgtaatattgtgctgagacgtcaaacatttactctggtgttgcttaagtccatagttaggggaagtgagtagtgaaatcgttacatgccccaatttaccgctttgcagccaatgtctt

SEQ ID NO: 19540 - DNA, 194 bp, Glycine max
  Clone ID: LIB3049-023-Q1-E1-C2
ggtgtgtgtggcggttagaagtgggggaatggaagagaaatactcaagcctggaaattgtggaggagagcccaaactcgggtgtgttctttcttatcgtaaatcgtccgtcacgacggaacgctctctcgcgcgaattcttcagcgagttcccgagaagcgctgcacgcactggatgacaacccggacggtgaa

SEQ ID NO: 19541 - DNA, 251 bp, Glycine max
  Clone ID: LIB3049-023-Q1-E1-C4
gatcttcctaattgtgatatacttccaaggatttcgtgtggttttgcctgtgagatgagggaatgcccgtggaccgcaggggtcgtagcgaatcaagttagtttagagctcgagcaatgggcattagtcgtcagtctgcgcttgtttccagtccctaagtcatttctcagcgtctacagagaaggtacagtgcaaacttcattgtggatctagtgggcagatggaaggattctgactatggaggtggtcag

SEQ ID NO: 19542 - DNA, 161 bp, Glycine max
  Clone ID: LIB3049-023-Q1-E1-C5
ggaagaagcagagggaatagcagcattaagaatgcagatcttcgtgaaaactctgacaaggaagactagtaagcctcggagtcgagagcagcgaaggatcgacgatagtcaagagcgagggttcaagagaaggaggggagtcgggccgggtgagcagcgtg

SEQ ID NO: 19543 - DNA, 202 bp, Glycine max
  Clone ID: LIB3049-023-Q1-E1-C6
ggcccataaccttttcgggtgattgttcttcttcgctcagccacgcacacgttacgctcaaggcatgaatgcgttcaaggcatataacgcctgtgtgccaattgcttggaaccccaatatcgagatagctctacttaggggtattccggggaccagaacgcgccagaggcgcactttggaagcagttcgcttgcgcaaatgc

SEQ ID NO: 19544 - DNA, 84 bp, Glycine max
  Clone ID: LIB3049-023-Q1-E1-C8
aggaggtgagattgggagtggcagtgaggcgggcgcccgtgagttccactgtgaggtttggatcctgtggcgagtccatcgcgt

SEQ ID NO: 19545 - DNA, 375 bp, Glycine max
  Clone ID: LIB3049-023-Q1-E1-C9
ggcagtttcagattttcttttccttcactttcccgagaaaaaaataacacttttcactttcttcacgacgttctcacttcgatatggctcgtacgaagcaaaccgctcgcaagtccaccggtggcaaggcgccacgtaagcagctcgccaccaaggccgctcggaagtccgctccggcgaccggaggagtgaagaagccccaccgcttcaggccgggaaccgtggcgctgagggaaatcagaaagtaccagaagagcaccgagcttctcatcaggaagcttccatttcagaggctcgtgagagaaatcgcgcaggatttcaagaccgatttgcgtttccagagcagcgctgtttccgcgcttcaggaggctgctg

SEQ ID NO: 19546 - DNA, 344 bp, Glycine max
  Clone ID: LIB3049-023-Q1-E1-D10
ggaactgaactgaactgaaccggatccagagagtgctcctaaacgacgccgtttcgcatgcatcagtatggtattcccagcgaatcaaatcaatggacaacggaaagggagtgatgggatcgggacgactgaaatggggcgttgacttctccgagaattccacttctcgcaatattcccgatcatcctgtcttctgtcacacttctctcgatcaggacaattcaacgcgcaatcgccaaaataaggactctgaatctaactgtaaagcccaaaaagcatgggaggtaacataagccactatgaacaatttgctactgatggtgttcatgatgtgtatggatggt

SEQ ID NO: 19547 - DNA, 360 bp, Glycine max
  Clone ID: LIB3049-023-Q1-E1-D11
gatccaaacacttatctttttctctctcttccctcttcaatcttcacattttctctatggagaatcatggcaacaagcgagtctgggaccagtcctctgactccaacactcagcgggtcgactcgcccgagtctaagattcgtcgagttgactcgtccgattcgggtattaactcgtccgagtctcaactcgaatcggtcctcgactcgtcggaggtgcagctacaagacgacatttttaacatgcttgacgacacggacaatgtgcccgagcgtgactcggtgcagggtcttgactcagtgatcaaaagcttcgaggatgagataaatgctccaggttcggattctggttccggtgacc

SEQ ID NO: 19548 - DNA, 392 bp, Glycine max
  unsure (1)..(392): unsure at all n locations
  Clone ID: LIB3049-023-Q1-E1-D12
ggaatgggaggaagaataattgtgaggcgagggtaaggtcgcgttgtgttgcgtcgtgtcgtgcgctgttcctctgtttctcgtttttgtgttcagaccgaaccctagctccgcatcgcaaccatgtcgaccaagcaaggtggaaaagctaagcctttgaagaaacccaagtctgataagaaggattacgacgagattgatgtggctaacattcagaagaaaaaggaagaggagaaggcgctaaaggagttgaaagccaaggcgcaacagaagggaagctttggaggttctgggctcaagaaaagtggaaagaaataagggctctttatcatgattgtatgcattcaatattgagccctgtaattacagttgctnagatgataacttctctt

SEQ ID NO: 19549 - DNA, 88 bp, Glycine max
  Clone ID: LIB3049-023-Q1-E1-D2
agagaagagaaaaaggaggccctagctggagaggtcaaacatcatcaggtcggacgaagagcaccagttcaagtcgaaggcagacgcc

SEQ ID NO: 19550 - DNA, 134 bp, Glycine max
  Clone ID: LIB3049-023-Q1-E1-D5
gagaaatgtcaggtgttggccctctttctcaagattgggaacccgtcgtcctccgcaagaaggctcccactgccgccgccaagaaggatgggaacgccgtcaacgcgcgccgccgctccggcgccgagatcgaa

SEQ ID NO: 19551 - DNA, 251 bp, Glycine max
  Clone ID: LIB3049-023-Q1-E1-D6
cgggaaattgaacctcggtagcctctatttggaggctggaactcaacctttgtcagtggttatgggctagcattgcaagacttcctttttgaatctccggatggcagaagatacctcaatttgtacttgtggttgccctcgtgtcgagagagtggttgcgaggttgagtggaaacattgtgctgcgagagggatgcaaggatgccagagttgagagtccttttgaagtgaagcaacatctagagatgaagt

SEQ ID NO: 19552 - DNA, 382 bp, Glycine max; identical to SEQ ID NO: 10057
  Clone ID: LIB3049-023-Q1-E1-D9

SEQ ID NO: 19553 - DNA, 396 bp, Glycine max
  Clone ID: LIB3049-023-Q1-E1-E10
gatataaagaacgaaaaatccactaacagcagcaagcttatctctgcagcattgaacaccaattgaacaccaatctgcagcattgaacaccaattcaacgccaatgggtcaggaagaggaaaaatcccaagaaaacaaagtggaggagaaaaaagtagaagaagaagaaaagaaagaagaagagaaaaaatcagatgagaagaagttcaaggagaaatctgcgccgccagaaatcgtgcttaaagtgttcatgcattgtgaaggttgtgctcgcaaggttcgtcgctccctcaaaggattcccaggggtcgaagatatactcacagattgtaagtctcacaaggtggtcgtgaaaggagaaaaagcggatccgctgaaggttctagagagagtaca

SEQ ID NO: 19554 - DNA, 380 bp, Glycine max
  Clone ID: LIB3049-023-Q1-E1-E11
gaactaagtagagaataaaatcaaatcaggagagcatgcatatgaacatgatgatgaagaaggtgtgtgggtttgcaatagtgatggtggcagtgcagcttctggtggaggtgagtcccaaggcagaggctgtgacttgtacccctgtggagctgagtccttgtttgggggcaataacttcctctcaaccaccatcaacaatttgttgccagaaggtgagggaacaaaggcaatgcctctgtggttacctcaaaaacccaagtctaaggccatatgccaattctcctgactccagaagggttgctagctcttgtggggttccctttccaacttgttaattaccttcatatcatatcatatatagtatgtaataaaccctg

SEQ ID NO: 19555 - DNA, 399 bp, Glycine max
  Clone ID: LIB3049-023-Q1-E1-E12
gggtgaataactaaagcgtgatcctaaagcagaagagcagcgaaatcagtgaaccacgaagatgaagatgaagacgaagacgccattgaagcagctgaagctcgcggttcctgctcaggaaacccccatcacgtctttcctgactgcaagtggaacattccatgatggagatctactcttgaatcagaaagggttgcgtcttatctctgaagaaaaagaatcacggccttcagatggtaaggaactggaatttgacttcttgctggacgatcttgagaccatcaaagtaattggaaaaggcagtggtggtgtggtacaacttgttcgccataagtgggttggaagattgtttgctttaaaggttattcagatgaatatacaagaggatattcgaaaaca

SEQ ID NO: 19556 - DNA, 106 bp, Glycine max
  Clone ID: LIB3049-023-Q1-E1-E2
gatgcctttagtttcttcgagccgaaacaggaaaatttgaagatatgttccttttttgttacgacggttgttgtttccaacggtagagcggtagatgatgggaacg

SEQ ID NO: 19557 - DNA, 167 bp, Glycine max
  Clone ID: LIB3049-023-Q1-E1-E6
ggtttatagatctttgcgaaggaggtttacaacgctcaagcagggatgcagaacgaggacagacagatcactgcgctttacattcctaggaactgctccgccacaggcagattgattagcacgcgcgaccatgcttcggtgcagatgaacagtgggcatgtgggtga

SEQ ID NO: 19558 - DNA, 182 bp, Glycine max
  Clone ID: LIB3049-023-Q1-E1-E7
ggccattgttgttgcgattatcatccgcagctgcttttattcgcaccgcaaacagtgagccatggccgtcggaaagaacaggcgcatctccaaggggaagaagggtgggaggaagaaggcagctgatccctttgccaggaaggattggtatgacattaaggctccttctgtttttcaagtga

SEQ ID NO: 19559 - DNA, 182 bp, Glycine max
  Clone ID: LIB3049-023-Q1-E1-E8
taatgggtctttgactaattctgttgacggtttggcgcacttcgttgggattgccgagcatgatgaaatcactgggatcggtgaaaagactcggcaactcgtcagggaagggggttgcctgccttttctggtgcattcagatctgcagatgtcagccatgtgtgtgacacctgactggctcg

SEQ ID NO: 19560 - DNA, 385 bp, Glycine max
  Clone ID: LIB3049-023-Q1-E1-E9
gaagaagtacatggataagaagcttcagatcaagctgaacgcaaatcgcatggttgttggtactctccgtggctttgaccagtttatgaatttagttgttgacaacactgtggaagtgaatggcaatgagaaaaatgacatagggatggtggtaattagaggaaatagtgtggtcactgttgaggcgcttgaacccgtgaataggacttgatttctgtttgttgtaaacatttatatgagtatttcctggttttaacggttgtgtatttgaacaatgtagctatggagagtcacatgtaattgtggatcttaagaagagggtcatgttggccactcatttgggttcttcgggctaaattgttcgggaaggatacctatagtgttt

SEQ ID NO: 19561 - DNA, 313 bp, Glycine max
  Clone ID: LIB3049-023-Q1-E1-F1
gaattcacttgcggctgcagcagagaagcactcagcagtcgtcggttgtcgaagatccgccttctctgaattgtaaggatgtcgctcggagaaactgcttgttcatacgcagctctcatccttcatgacgatggcatcagtgtgactgccggacaaaatgagcaccttggttggaactgcaaaggttcaagtagatacctattgggcaagcttatttggtaaacttgctgagaagaaaaatcttggcgatttgatagccaatgcaccaagcggtggtgcaccagttgctgttgcagctgcccctggttgctgc

SEQ ID NO: 19562 - DNA, 394 bp, Glycine max
  unsure (1)..(394): unsure at all n locations
  Clone ID: LIB3049-023-Q1-E1-F10
gcaggaactatggttaggccttccataacaactaatgagattgataaagcagtgcaccagatgataattgatgctggtgcttatccctcaccccttggctatggtggatttccgaaaagcgtgtgcacatcagttaatgagtgcatgtgccatggaatacctgattctcggcagttacagaatggtgatattattaacattgatgtgacagtctacctggatggatatcacggagacacgtcaaagacatttttttgtggggaagtcagtgatgaactgaaaaatcttgtcaaggtaactgaagaatgcctggagaagggaatagctgcgtgcaaggacggtgctctctttangaaaattggaaagagaatcagtgagcatgctgaaaagtatg

SEQ ID NO: 19563 - DNA, 379 bp, Glycine max
  Clone ID: LIB3049-023-Q1-E1-F11
ggagcagtgttgtaattgaagagggaactagattaggtggcgagtgaagagaagatcggtgaaggagtgaggtagcaacagcactgccactgccactaccaatagcagaatgggaaccttgggcagagctttctacgccgtcggattttggatccgcgagaccggccaagccatcgatcgcctcggctctcgtctccaaggcaactacctctttcaagaacagctatctaggcatcgacctctgatgaatctgttcgacaaagctccctcggttcacagggatgcatttgtggcccccagtgcctccctcctcggcgatgtccacgttggcccagcttcctccatttggtatggatgcgttctcagaggtgatgttaac

SEQ ID NO: 19564 - DNA, 154 bp, Glycine max
  Clone ID: LIB3049-023-Q1-E1-F12
gtgagggattaagggagagaggtaggttgaaatgcctgccccttagtcatgtgcaaaatagtgctaagatctgtattgtaaaatggccacattggtcttagtaaaagagttatgcatatgctgcactggtagcgcccagcctgcacttcacaat

SEQ ID NO: 19565 - DNA, 284 bp, Glycine max
  Clone ID: LIB3049-023-Q1-E1-F7
gatcgagagaaagtgagagagaattacagaccattttccaagacgattacacgaccgaatcaaagccctctttctctccgaagctgcgtttaagatcgtagtaggcttcgattgttctcctctttaagacatactgttctctcgtcgatgtgagggaagagtcgaagactctgagcagcggttaagccaactgcacaggtagtctccaaatagtggagcgtcatgatgacactggatgcgagggtcctgaagggcgccattctttgcattaagaagtgtggctt

SEQ ID NO: 19566 - DNA, 207 bp, Glycine max
  Clone ID: LIB3049-023-Q1-E1-F8
ggagtcgaaatggctgaagcagagagtgtgcagattcctcaagtcaaacttgggactcaaggccttgtggtttcaaagttagggttggggtgtatgaggcttaggtggggctataatgatccacgtccggaggaggaagggagatctgttagtaagcatgcgttcagcgaaggaatcactttttttgagacatctgatgtctagggg

SEQ ID NO: 19567 - DNA, 359 bp, Glycine max
  Clone ID: LIB3049-023-Q1-E1-F9
ggagtcgaaatggctgaagcagagagtgtgcagattcctcaagtcaaacttggaactcaaggccttgtggtttcaaagttagggttggggtgtatgacccttagtggacgctataatgatccacttcctgaagaggaaggcatatctgttattaagcatgctttcagccaaggaatcactttttttgacacatctgatctctatgggctcgaccatgctaacgaatttttgctcggaaaagctttgaagcagttacctagagaaaagatccaggtagccacgaaatttggcgttgcagtagcaaaatttcctaattttcaaatcaaagggacaccggagtatgtgccgtcgtgttgtga

SEQ ID NO: 19568 - DNA, 382 bp, Glycine max
  Clone ID: LIB3049-023-Q1-E1-G10
ggcgtacgcagcttcatccctaacgcgtgcatagcagagtcagagacagagacgcagccatggggcggagacctgcgaggtgttataggcaaattaagaacaagccataccccaagtcacgtttctgccgtggtgttcctgatcccaagatcaggatttatgatgttggtatgaagaagaagggtgttgatgagtttcctttctgtgtccatctggttagttgggagaaggaaaatgtttcaagtgaggccctgaaagctgctcgcattgcttgcaacaagtacatggccaaatttgctggaaaggatgctttccacttgagagtcagggtgcacccattccatgttcttaggatcaacatgatgctttcgtgtgctggtgc

SEQ ID NO: 19569 - DNA, 362 bp, Glycine max
  Clone ID: LIB3049-023-Q1-E1-G11
gacctccgtagggtttggttattagggttttcgctcacccgtgtgcagtcgagcctcccgaagaaaaagcgaaaatgccgtcgcacaagacattcagaatcaagaagaagttggcgaagaagatgaggcagaacaggcccatcccctactggatccgcatgaggaccgacaacaccatcaggtacaacgcgaagcgccgtcactggcgtcgcaccaagcttggattctgaggtgcttgctttgcctcgattcagtttatccaattaattagtgttttattttcttgagccaaaaacaatgctttggagtttttaatattttgcattttattccaagactatattgtgtaaggaatttattgt

SEQ ID NO: 19570 - DNA, 378 bp, Glycine max
  Clone ID: LIB3049-023-Q1-E1-G12
ggagctgagctgagaaaacccccaaccccaacctcaaccttaacctctcctcactttcttttcaaccagaactatgattaagctttttaaagtaaaggaaaaacagagagaactggcagaaaatgcgagtggcggaccacccgttaagaagcaaagtgccggcgagttgcgtcttcacaaagatataagcgagctgaatctaccaaaatcatgtaccatgcaattccccaatggcaaagatgacctgatgaactttgaagtttcaattcgacctgatgatggatattacttaggtggcacatttttgttttcctttcaagtgtctcccatctatccacatgaagcaccaaaggttaaatgcaagacaaaggtctatca

SEQ ID NO: 19571 - DNA, 229 bp, Glycine max
  Clone ID: LIB3049-023-Q1-E1-G2
attcgcatggttagcttatagacagcctcacctgctacttttgggtgagccaacgaatcatttggctagtgggacaattgactcattgagcgaggcattggctgaatgggatggtgggatggggcttgttacgccaggagtttgggctcataaatcaggtggcccatgagatgatcgtgtgtgctgctcaagctgtgaccagagaggaaggtgacattatggatttcaa

SEQ ID NO: 19572 - DNA, 58 bp, Glycine max
  Clone ID: LIB3049-023-Q1-E1-G5
taaaggggggttcagaagaatggctccatcgtggcattccacactccagtaaggtccc

SEQ ID NO: 19573 - DNA, 139 bp, Glycine max
  Clone ID: LIB3049-023-Q1-E1-G6
ggcagagcagagagggaagaggaagaaagtcttaagttgtttcttgttttctctgtcgtttcgttcccttaatctttgatctctggagttacaagttagaagagaagaaatagacaagagatataaagatgtggaagaa

SEQ ID NO: 19574 - DNA, 254 bp, Glycine max
  Clone ID: LIB3049-023-Q1-E1-G8
gtggattagttcaccatccatgcaggagttcttctgagatacgttccattaacggctaagcgcatgacgggaatagtctcaagaggagggtctattcatgcagagtggtgcttagcttagcacacagagaattttgcttatgagcactgggatgagatagttgagatctgcagtcagtaggatgtgggcctatccattggggatggggtaagagctggatccatcgatgatgcgagtgagggcagggcagttcg

SEQ ID NO: 19575 - DNA, 379 bp, Glycine max
  Clone ID: LIB3049-023-Q1-E1-G9
gagacgccattgtcaaacccttttcacttctctctagggttttagcactctctctctctctcgttttcgttcttcctttctgcctctctcagtcacacaccttctcgatgaccaacgacaacatcgccgtgacagatctcacttctgccctcaatgaagataatcgcgccgacctagtcaatgctctcaagagcaagattcagagtctggctggggcgcattctgatgttctagagactctatccccgaatgtcaggaagcgtgttgaatctcttagagaaattcagggtaaacatgatgaactagaggcagacttcttgaatgagagagaagctcttgaagcaaagtacaaaaactgtatcagccattgtacacaaag

SEQ ID NO: 19576 - DNA, 123 bp, Glycine max
  Clone ID: LIB3049-023-Q1-E1-H1
aggaccaagaatgaagagcgaggagaatggctcccaggggtttaatcgttttggctgtgttatgcgtctcagcactgtcactgagtcgttgtcttgcgggggataatgggggtgttagcaact

SEQ ID NO: 19577 - DNA, 371 bp, Glycine max
  Clone ID: LIB3049-023-Q1-E1-H10
ggaacttctcacgttcatttctacacatccctagctctgtcgttccgtcgttgacgatggcgtttcgggtgcgaagccctgacctccgctctctctttcttctctctcttgtccatcgcttccgccaatgtcttcttcgaagagcgtttcgatgacgggtgggaaaatcgatgggttaaatcagattggaaaaaagatgagaacgtggctggggagtggaaccacacctctggtcaatggaatggagacgctaatgacaaaggtattcaaaccagtgaggattacagattctatgctatttcagctgagtaccctgaattcagcaacaagggtaagacactagtctttcaattttctgttaagcacgaaca

SEQ ID NO: 19578 - DNA, 389 bp, Glycine max
  Clone ID: LIB3049-023-Q1-E1-H11
gacactaaaaaaaaaaaagaaaaaaggagaagcatactcagcgcggcggtggaagatggtggcgacggcgatcgaggaagtgcgaaccctctggattggcgatttacagtactgggtggacgagtcctatctctctcagtgcttcgcccacaacggcgaagtggtttccattaaaatcatccgcaacaagctaacgggccagcccgagggctacggcttcgtcgagttcgtctcgcacgcctcggccgaagcctttctccgaacctacaatggagcccaaatgcccggcacggagcagaccttcaggctcaattgggcctcgttcggggactccgggcccgaccactccatcttcgtcggggatctcgcccccgacgtcaccgattttc

SEQ ID NO: 19579 - DNA, 391 bp, Glycine max
  unsure (1)..(391): unsure at all n locations
  Clone ID: LIB3049-023-Q1-E1-H12
gttgtagaaaagacattggatttcttgttccatgtctctgttttgaagcaccttgatctctgcatacagagtttactcttgaatangaggggtaaaacctttggctggcaacatgaagaagaggattacatgcacttaagcagaatgttatcatctcatttcaggagcagatggttgtctgtaaaggtgaagtctaaatctgtggatggcagtagttcctctggcattaagacctctccaaaggttggtgcttgtttggaaaccatatatgaggattcagacacgtcttccgtgacaactccgtgctgtaattctataatgataaaatgggctcaccacgaaactacacttccagttcacgtttaccttaatccaatctcagcaattttcc

SEQ ID NO: 19580 - DNA, 187 bp, Glycine max
  Clone ID: LIB3049-023-Q1-E1-H5
gctagaagcccagttcaaaggtaaggtaggttaacactcgtcgtcatcgtcgtcgcagtgggacgtgtgatccggtgcgcacgataagggagcaggctcggtcgtcaaatcggagacgcagcagcggaagggccctgcaggcgtcaggagcctggaggtgcgggagcgcaaggggtacctcaagggc

SEQ ID NO: 19581 - DNA, 330 bp, Glycine max
  Clone ID: LIB3049-023-Q1-E1-H7
gatccagaggggttcccacaaatcagtcaaaagtttaactttcataggctgtttggtttttatttttgttgttcagtcgaatgtcactcaagagtcacaactcacagcaatgtataagtagaacttattttaagcctgccaagtgatttgggcttcagctacttatatgtcagttctagtagcctcctctctttatgtgtcaagaagaattgttatcctgttattgtagagcatccttgaaaagttgtacagagttttgctgatgagttaagaatcaggttggtgcaggttagtacttttagtaaaacttgcgaggaacaaattgatagt

SEQ ID NO: 19582 - DNA, 380 bp, Glycine max
  Clone ID: LIB3049-023-Q1-E1-H9
ggggatcccaattcacggaacctactctctaccctccagggttccttctttcacctctgcaatttctactccgccacgccctacgacattgttcgtcgtaaccctctcttcgttccacttaggaagagaaaagggtttgtttggatatggaaggtgacgagcacatgaacgaggttccatcagagaacagcaacttgggaagtgattctttggaaaaggagaacattttggaagatgaaaaggaggatttgcaagatgggttgaagttgaaggtggtcactgaggaagtgagtggaggattgctcgctgagaatggttgcatttctcttgaggatgggagtctcaaaagaagccttgagactgttgggacatctgtatca

SEQ ID NO: 19583 - DNA, 368 bp, Glycine max
  Clone ID: LIB3049-024-Q1-E1-A1
gatgaaggaaggaggtgaatgaaagacttttgtgacaggtagcagctcagctaaatgcaatggttggttaacgttaatgctgtgttgtggacacactctcacatctcatatctcatatctcaatctccgtgtgtttagatgtctctcaatttgcaactaaaaaataaaaatgttgagacaatcggttttcagtttgttcgtagtaactctttctctttcacttttccttttcaccatcaatatcaatgtcatgcccatgcctctctctcttttccctcaccaccacgcactcgcttttgccctccgacaaccgtcttctctgccgttacggcggagcatccagccgcgccaccggtgaggatggtggc

SEQ ID NO: 19584 - DNA, 379 bp, Glycine max
  unsure (1)..(379): unsure at all n locations
  Clone ID: LIB3049-024-Q1-E1-A10
gtcatacgtacgctttcttgcaagagaagcagatgaatctcgtttacgtgaagtgtgtgagagtttccttggacctccaactgggatggttgaggaaacatcttcagattcaaagaacttagcatgggatcctatggtgcttggaatgaggaagcacaagcttcttagggaagacattcttccatccatggcatcaaacagaaaagtccagagattacttaatgaattcatggatcttttatccgaatatgagatcattgatgctaatcaagagcaatcaaaccccacagtaccaaaatcatccttgccagaaaccaatccaatttgagagcagttcaatagcancagatcaggagcacactgctccaccaaaattgga

SEQ ID NO: 19585 - DNA, 308 bp, Glycine max
  Clone ID: LIB3049-024-Q1-E1-A11
gaacgcatagtcacatagtacactctggtctgaactctgaatctttctggtgtcgtgtcccatttgaattgaattgcatcttgaaagatggcggaggaggagaagccaaatggagaagaacaagtgaaggacaacaacaacaacaacttatacgacgccgttcagcgtctgatcttggaaccttccaagatcaaggcctccctcatccctctcttccccgaagcttctagaacctactctcgccaactcctccactggtcccgtcaaggttctcccctccgacgcatcctcttcatctccattgggat

SEQ ID NO: 19586 - DNA, 297 bp, Glycine max
  Clone ID: LIB3049-024-Q1-E1-A12
ggttgtcaaggatttcggggaggaacatgaagcatacaatgttgttctgcagcatgtgaaaaccaactgaggagttgctgcagcatgcctagatttgtgggttttagtttgaagttattgtatgagtctatttttgcctctatcatagggatattgatggtttagtacaattatacccgttctcaatgttgctgagtgaatgcatttttaactactattggttttctgtgtttttaagactgacctgttgaattattaattgcttagacctcatgatagaacatcctcttcatctcc

SEQ ID NO: 19587 - DNA, 371 bp, Glycine max
  Clone ID: LIB3049-024-Q1-E1-A2
ggttctagtgtgtgattgtttgttgttgtaactcgatcttcttcttttgttgttctgtgtttgtgtttgttttttctctcatctgaaaatgtcatgctgcagtggaaactgtagttgccgaagctcctgcaagtacagcaaccgctgctgacgctgcaagatgtacccagacttgagctacactgagtcaaccagcaccgataccttggtcatgggaatggcacctgttaaggctcaatttgaaggtgctgaaaagggtgtgctcgctgagaacgatagatgcaaatgtcgaccaaactgctcctgcaacccttgcacctgcaattgaggtgttgggacagcaagcttcaagcatagatatcccttaatta

SEQ ID NO: 19588 - DNA, 388 bp, Glycine max
  Clone ID: LIB3049-024-Q1-E1-A3
agaacaacagaagggggatcgagcgagcagcgtttgtttgttccttcctcagtcgttgtgacagtgtgtgtgagtgagtgagtgagagcgacgatgggcgcgagcagcgaccccacccaagacggttccgacgagcagcagaagcgttcggagatctacacctacgaggccccctggcacatctacgccatgaactggagcgtccgccgcgacaagaagtatcgcctcgccatcgcctccctcttatagcagtaacctaaccgcgtggagattgtccagctcgacgactccaacggcgagattcgttccgacacctccctctccttcgagcaaccttaccctcccaccaaagccatcttcatcccccgacaagactgccaccgccccg

SEQ ID NO: 19589 - DNA, 303 bp, Glycine max
  Clone ID: LIB3049-024-Q1-E1-A4
cggggctcctggggagtctccccttttgaatggtactagtactagttatttgacttgttctctgcgcatggaagccatgaaaggagcaagagttggcgtgggcgaggaccacgacatgggtgacggaatgcaatgcagtgaccacccttacagaaacaaccctggcggtatctgcgccttctgccttcaagacaaactcggcaagcttgtttcctcctcgttccctccccctctccttcatccttcttccccttcctcctcctccactctcccttccatctcctcgcgtcctccctcctcagc

SEQ ID NO: 19590 - DNA, 299 bp, Glycine max
  Clone ID: LIB3049-024-Q1-E1-A5
ggctcaatggcgacatagcagaaccctacgacccttccggctccgatctcacgctccctgatcgccccgcaagactatcctctgtgaagttggtggcgccgagcttgatgccgaagctgggtagagcgggcagcttgcagagcaggatagccattgttcatagcctcactcacactgaaagctgggccattgacttgtcttgggatataatagcacgttttggcaagcaagagtcaatgcctagagagttctttacagattttgtgaaggcggcacaagatgaaaggcgacacttcagt

SEQ ID NO: 19591 - DNA, 303 bp, Glycine max
  Clone ID: LIB3049-024-Q1-E1-A6
gaacaacagcagatgggttggggcagaagagatatgaggacaagttggcaatttggctggggttgccgttgcagttgggcccggtgcgttggcagccttgttcaagttttttcaacatccctaatctgaaacccaatgccattggtgtgacatggtgcaaagcaatgatttcgaatccggcattgatccactacgcctgcatcactccattcggagactatccctggggagcatcatagcgagaaagatcccaacatggatgccttggcgggccaatgcgtggcccaaaacactccaaccact

SEQ ID NO: 19592 - DNA, 338 bp, Glycine max
  Clone ID: LIB3049-024-Q1-E1-A7
gatctctcgttcgattcttgggattccacttctcgcccgcgttctttttttgcgttttcttcttcttcttcttcttcgtcttcttcttcgtctcactttttacctaagattttgtggaacatgtccggggaagaggaagaaaacgccgcagagctcaaaattggagacgagtttttgaaggcaaagtgcttaatgaactgtgaagttttattgaatcttgagcacaaatatgagcagcttcaacagacatctgatgatcgcatgaatcaaatttctcatgtatttgaaaagtcactgcaatatgttaaacgtttcagtcgctataaaaatcctgatgc

SEQ ID NO: 19593 - DNA, 334 bp, Glycine max
  Clone ID: LIB3049-024-Q1-E1-A8
gagacgatcgctcattcttctctgaaggacctacatctcagttccgatcgtaaattacttgcccctctgggaagtggtggccctcgcaatgttcgggacatttcttcatcaatggtctgagcatcactaccagtgaaaatcacgaaacttttaactcttgcagattttctcaaaactatgacgagactctgatcctatatactgctgccatgacagatatacgtggaagcattatgacctgcattacacaaacatgggaaatgatggcatcaaagcatactatgcgatgataaactctctgcatttaatgtctcacctgaaggaaagtttcttg

SEQ ID NO: 19594 - DNA, 316 bp, Glycine max
  Clone ID: LIB3049-024-Q1-E1-A9
gatagagaagagagatggatccagacgcgttggcaaaggcattcgtggagcactactacagcaccttcgacaccaacaggaacggcttagcgaatctctaccaggagggttccatgctcactttcgaagggcagaagatccaaggcgcttccaacatcgttgccaagctcacctccctcccttttcagcagtgccaccactcaatctccaccgtcgactgcctgccctccggcgtcaacgccggcatgctcgtcttcgtcagcggaaaccttcagctcgccggcgaacagcacactctcaagttcagccagatgtt

SEQ ID NO: 19595 - DNA, 250 bp, Glycine max
  Clone ID: LIB3049-024-Q1-E1-B1
gatgagagcttgccgttcctgcttgacttttgtgacaggtaccatctcagcattctgcaatggttgcttaccgttggtgaagtgttgtggcaacattctcacatctcatatctcataatctcaagctccgtgtgtttatatgtctctccattcgcacgtgggcattaacgttgttgctttcgtcagttttcacgttgatcgcaatcgctctctctcttccactttccctgttcctgaccaagtttcatgt

SEQ ID NO: 19596 - DNA, 358 bp, Glycine max
  Clone ID: LIB3049-024-Q1-E1-B10
gacatttgaagaaaaagaaaaagcagtagcagatcgaagataacaatgtctttatttgctagaagtgtttccacactactggtgcttatattgttattaccaacgttgaacaatactatggcagagaaggcacttattggggttacaaataatttgggaagtcaaaacttaactgtttcctgcaagattgataatcatccacaccttctcggccccactgattactatgagtggaagttttctcctgaatataatgacgaatttggaacggaaccattattcagtaattgttcctttcaatgggaaagtgcccaacaattcatttgatctctacgtacttgttagggatggtgattgc

SEQ ID NO: 19597 - DNA, 315 bp, Glycine max
  Clone ID: LIB3049-024-Q1-E1-B11
ggtgctaatcttatcttatccctctaatcactctagctgttgcaaatttctactatttttcaatggcttctgcagatgttgagttccgttgctttgttggtgggcttgcttgggtcaccggcaacgatgccctcgagaaagccttttcaatctacggcgacatcgttgaatcgaaggttatcaacgaccgtgagactggaaggtccagaggattcggatttgtgaccttcgcctcagagcagtcaatgaaagatgcgatcgcaggaatgaacggccaggaccttgacggtcgtaacatcactgtcaacgaagctc

SEQ ID NO: 19598 - DNA, 305 bp, Glycine max
  Clone ID: LIB3049-024-Q1-E1-B12
gggctcaagctttatttcacgtagctgactttaccgtcagctcaattggaatagtttttcgctatgttcgcaggcaagtgagacgatccatcaatgcccttatctgcttcgaaagaaccggtgtcatccaaacatggtgaagaggtggcaactggatcaataatagctgaaacttctactgtacagggttcggcttgcccaactgtccaagcttgagatctattttagaatatgcttaacacaacacatgcaattcgaacgttgttttctttggaagattgaaagtaactccgttgggttcaatg

SEQ ID NO: 19599 - DNA, 180 bp, Glycine max
  Clone ID: LIB3049-024-Q1-E1-B2
tggggcgttccttctccttctgtccgctgcgactctctttccttccctctttttccgaatctgaattggggagcgatccaatttctctttggattgagaagaccactgaaaaggagatttctgatgatgatgacgaggaagagaataaggattacgacggttaagttgaagatctggatg

SEQ ID NO: 19600 - DNA, 353 bp, Glycine max
  Clone ID: LIB3049-024-Q1-E1-B3
gctcttccgccatccgttttctttgaaacgcacagcttcaatcaccgaccacaccacccatcaacgacatgcttcctctttcccttctcaagactgcccaaggccaccctatgttggtggaactgaaaaatggggagacatataacgggcatttggttaattgcgacacatggatgaacatccatctgcgagaagtcatttgtacatctaaagacggagatagattttggaggatgcctgaatgctacatacgaggcaatacaatcaagtaccttcgagtacctgatgaggttattgataaagttcaagaagaaaccaagagccgtgcagattcgcaaacacctggtgttggg

SEQ ID NO: 19601 - DNA, 374 bp, Glycine max
  Clone ID: LIB3049-024-Q1-E1-B5
ggggagggagcccttcattgagtctccgaggaaccctagactccaaattggtaaatctctctttgcaaaatctccgaggaacccaacggcattgctaaatttctttgctggaatttaagggcagggttgctggtgatgcatttcttagtggggttatctttagcttagcttctgaccaaagtcttttccagggctagcatcactgacaacaacaatcatgggttacttcgacctcaacatcccctaccctgatccttcccctgccaacaagcccactgagcaaggtaaccgtacgaagctggcagtgaaggccatggagtttggctacaccggaatcgcttacaaccgcacgattaagggcgtcatgtccgata

SEQ ID NO: 19602 - DNA, 359 bp, Glycine max
  Clone ID: LIB3049-024-Q1-E1-B6
ggttagctttttatgttatgtgaggcccttcctctcattctcttttgactttctcaaatggcctttgcaagtgtcgtagccattgtcgcatttcttcttctacaacctctttcagctacttctgacctcctttctcctctgctttctcccatctttgatgatgtatgcaaagaagtggaatgtggaaaaggaacatgtaaaccttccaagaacagcactttcttctttgaatgcgagtgccacccgggttggaagagagctccttcaaatgataagatgggtttgaagtttcttccttgcatagttcccaattgtacattggactactcttgctccaaagcccctgcccctgttcaaga

SEQ ID NO: 19603 - DNA, 361 bp, Glycine max
  Clone ID: LIB3049-024-Q1-E1-B7
gaccgcgaaacgcacatttcactattcattctcgtttccctttcgactgtgattgtttgttaactgaacttttcgagcaaaatgtctggacgtggaaaggggggcaagggtttgggaaagggaggagcgaaacgacaccgtaaggtgttgcgcgataacattcagggaatcaccaagcctgcgattcggcgtttggctcgcaagggtggtgtgaagcgtatcagtggtctcatctacgaagagacacgtggcgtgctcaagatctttctggagaacgtgattcgtgacgccgttacctacactgagcacgctaggagaaagaccgttacggcaatggatgtggtttatgctctcaagagac

SEQ ID NO: 19604 - DNA, 362 bp, Glycine max
  Clone ID: LIB3049-024-Q1-E1-B8
agggagccgtagcagcggaagctctagcttgggtagcgaatcacaatggcgagaggattaaagaagcatctgaagaggcttaatgccccaaagcattggatgcttgacaaactgggtggtgcatttgctcctaagccctcatctggaccacacaaatcgagggaatgcctgccactcatactcattttgcgaaaccggctgaagtatgctctaacataccgtgaagtcattgctattctgatgcagcgacatgtccttgttgatggcaaagtcaggactgacaaaacataccctgctggttttatggatgttgtatcaatccctaaaacaaatgagaacttccgcctgctgtatgacaccaa

SEQ ID NO: 19605 - DNA, 352 bp, Glycine max
  Clone ID: LIB3049-024-Q1-E1-B9
gatgaagatgatgatgaggaaggcagtggcgaggaagaggatgacgattagagaatggactgataattgcatttatgtaggttctgatgattttgatcatctgttgcaggtggtctggtcatttcctgataaacatatttcttgcttccaaaaaatatttccctgctccctccgtaaattggttgtctttccaaaacgtgaatagtttaaagaagggagttctttatttgtacttctaaatccaactgtttagttaaggggtgtttatctcttgtagagcttttagtttgatttagagttttcttgttgaaatctggttaagtttgtaacaattataattgccttaccatcc

SEQ ID NO: 19606 - DNA, 358 bp, Glycine max
  Clone ID: LIB3049-024-Q1-E1-C1
gatgacaaatttgcaatgcaacttcacatgtaacaagctaaccctctcaccatgcaaagagtatgacttagaaatgtccatataatgtcacattctcaaccccattatagtgaagtacatacaacattctcagttgcttatccacacacactcaaacatgggaacctatgtggaaaatttcgcaagtgaggaggaacatgtctttcgtagccaatactcatctgtccctgtccctgacaatgtgacattgccggaattcgtgctccaaaatgctgaattgtatgcagacaaggttgcatttgtggatgctgtgactggaaaaggggttacttttagtgaggtggtgaggggtgtacac

SEQ ID NO: 19607 - DNA, 365 bp, Glycine max
  Clone ID: LIB3049-024-Q1-E1-C10
gattttcatcaacagaagaagaagaagaagatcgaacgaaggctccttccattattccattcagcgattccatggtggcgagaggcgtgccggcgatggcggtggtggccgttgccgcccttgacttgacggaatcctccaactggtggcgggacatcaaccgctccccgctctggcaggatcgcatcttccacctcctctccatcctctacggaatcgtcgccgccgtcgctctagttcaattaattcgaatacaatggagagtgccggagtatggttggaccacgcagaaggtctttcactttcccaatttcaatggtaatggggggtccggtgtttggttttggtcttccgtcgggatgtgc

SEQ ID NO: 19608 - DNA, 305 bp, Glycine max
  Clone ID: LIB3049-024-Q1-E1-C11
gactcactactattcccacaacacaacattagcgtactctgttttactctctatctctctctctctctgtctcagccaacaacacaacaatcaatgtacgctgcatcaaccatgaaatccatgtacaagcctccattgcccagatctccaattcgccttcgaccctctcatgctgttcattcatcaaactctatcgctcttcaaaccccaccaggttccttgaccaaatctcagaaacctgttatctctccaaacatgcgacccgaataccgcaccatttcgtgcgaattacgggctctgaccaa

SEQ ID NO: 19609 - DNA, 370 bp, Glycine max
  Clone ID: LIB3049-024-Q1-E1-C12
ggaagagaatgggaacctcggtggcggatctagctccgggtctgtcacggaagctggagaaggttcaagaatctcggatcgacacgccctatctcttgtcttcgctcaacacgctctcttccttctacgacgacaacactcctcaggcgcgtcgcaacctccgatccaccatcgagaagcgcgccctctccatcaactgcgaattcctcgacgcttcccacgccgcgcagctggccttggatagcgtggagaacgaggtcgattcgctcgccgcgtgctgcgacaggatagcaaaggctttgaataattgtagtgccaacaacggctgacattatcggtaccacagagaggctcaaacaagagcttgaaa

SEQ ID NO: 19610 - DNA, 374 bp, Glycine max
  Clone ID: LIB3049-024-Q1-E1-C2
gacgttcacattcaggaatcgttttcttcagaaatttgccatcgttgagagaagcgtgagagccttagtcgttcaagatgagagctaagtggtagaagaagcgcatgaggaggttgaagaggaagcgccgaaagatgagacaaagatctaagtaagtgcttgagcatgagttgagatgagctttccatctgctaccaacctcatgacattttaagctgttatggctcttatgatcttgaggtctagtctctaggggagcttcactcttgacgtagtttgctttactggtcctggtcctggtccaagactattgagtgtgggttaagttgtgatgtttagtgttttgtggtatctaattaggtactggtttttat

SEQ ID NO: 19611 - DNA, 372 bp, Glycine max
  Clone ID: LIB3049-024-Q1-E1-C4
ggtcgattattttcttttcttcttcctctctcttcgttctctctctctctctcttattcctttctctccgaatccacgtcctagatccgttgttctcttcccacagttctcactgaatcaggatccattttgataccaagttgctgttgaatatcgagtttgctctttagagatctgtttccctctagacaacggtctgtgtgacctgttattttagttgaatcgaagccgcgaccaaatcttcctgatctttgcctgaggtgatggcatcggcgggtgtagcacctgcttctggagtaagagatgtgaatgcaaattcggttgctgttgaaaggttgcctgatgagatgaatggcatgaaaattagggatg

SEQ ID NO: 19612 - DNA, 286 bp, Glycine max
  Clone ID: LIB3049-024-Q1-E1-C6
ggaaaccgagaagaagaagatggagatgtatcagatctggagcaggagaatagcgttgggagcgttcgcgtttgttctgcttttcctatcggcctcagcagacgacgtcgttgtgctctctgaagataacttcgagaaggaagttggtcaggacagaggagctctcgttgagttctatgctccttggtgtggacactgcaaaaagcttgctccagaatatgaaaagcctggtagcagcttcaagaaagccgaatctgctttaatccgcaaggttgactgtgatgag

SEQ ID NO: 19613 - DNA, 117 bp, Glycine max
  Clone ID: LIB3049-024-Q1-E1-C7
ggaaaccgagaagaagaagatggagatgtatcagatctggagcatgagaataccgttgggagcgttcgcgtgtggccggctttgcccaacggcctcagctaacgacatctttgttct

SEQ ID NO: 19614 - DNA, 346 bp, Glycine max
  Clone ID: LIB3049-024-Q1-E1-C8
gattgtgattcatttgcacatttggaaagtgttgtttttctttttttcatttgcattgcaaagcaaaaaccttgcaaattgcaatggcttccaacaaggttattgccaccatcttggttctttctctccttgcctactcaacatcattcaccaatgcatgtggcacatgccacccaaaacctactccttctccccctcctccaccagggaagtgccccaaggacacattgaagctaggggtgtgtgctgatgttctaggacttgttaatgttgttgttggttcccctgtctctagcaagtgttgtgcattgcttgaaggtttggctgattcggaggctgcactttg

SEQ ID NO: 19615 - DNA, 317 bp, Glycine max
  Clone ID: LIB3049-024-Q1-E1-C9
gacggcaacagaagaataatcgagacacagatcatagtgatcattttttaatttctcagatttatccgacgtcgctgcagatccaccaaccgttatggctgccttcagcggtgatgaaacggcaccgtttttcggcttccttggcgccgcagctgccctcgtcttctcctgtatgggagctgcctatggcacagcgaagagtggcgtgggcgtggcttccatgggtgtaatgagacctgagctggtgatgaagtcgattgttcctgttgtcatggctggagttttgggcatttatggccttattattgctgttatta

SEQ ID NO: 19616 - DNA, 378 bp, Glycine max
  Clone ID: LIB3049-024-Q1-E1-D1
ggtagaatagagagctcctccaattagggtttttgtgatctgcagctacgatgggtaagggaacggggagtttcggtaagaggaggaacaagacccacaccctctgtgtgaggtgtggccgccgcagcttccacctccagaagagtcgttgctctgcgtgcgcttaccccgctgcgcgcaccaggaaatataactggagcgtgaaggccattaggagaaagaccaccggaactggaaggatgaggtacttgcgtaacgtgcctcgtagattcaagagcggcttcagagagggtaccgaagctgcacccaggaagagaggagctgctgcctctgcctaagctttgaatgaatgacagcaatttttgctgggtcagtgaa

SEQ ID NO: 19617 - DNA, 374 bp, Glycine max
  unsure (1)..(374): unsure at all n locations
  Clone ID: LIB3049-024-Q1-E1-D10
ggttaaagccagcatcatataatttcatttcccattctactcactcacacacacacacactctctttccatgggtccgtttcgtaaacccttccttgcatttctctcggttgttctatttctgggtctctatgaggcagcagcagaacagactcagactcacaagagtacttacattgtacacgtggcgaaatcggagatgcccgagagcttcgagcaccacgctgtgtggtatgagtcgtcactgaagaccgtgtctgactcggcggagatgatttacacctacgacaacgccatccacggctacgcgacgagattaancgctgaagaagccccttttgctccaacgccaaacggggattctggctgttttgc

SEQ ID NO: 19618 - DNA, 312 bp, Glycine max
  Clone ID: LIB3049-024-Q1-E1-D11
gacagacaagggtttcttccgggttcacgtttcacaatcactttttgcgcttctctcactcactcactcttcttcttcctcttcgtgtggttttctttctcgaactcgaacgaagatgcgtgagattcttcacatccagggagggcaatgcgggaaccagatcggagccaagttctgggaggtggtgtgcgcggagcacgggatcgattcaacggggaggtaccaaggggacaacgagttgcaactcgagcgagtcaacgtctactacaatgaagcgagttgcggaaggttcgtgcctagggcggtgctcat

SEQ ID NO: 19619 - DNA, 309 bp, Glycine max
  Clone ID: LIB3049-024-Q1-E1-D12
ggggagataagaaaatgtggcttgtgcagctctcaaccccatttctgaacggccatggccatggctccagccttctctggaaacccagttcggccgtgactcagacccactgggccccgccgagtttgctgcctcaaatcagatgcgataaccaattcactgtcggcgacatcgtccagctccataagatcaggcccatcagcaataccaacgcctttctcgcactccccgtacccaagatgtcctccaccacgcacgagccccagcccgatgagctttccattcccttcgagtcccagccccaggcct

SEQ ID NO: 19620 - DNA, 380 bp, Glycine max
  Clone ID: LIB3049-024-Q1-E1-D2
aaaaggggagaagtgagtgagtaatgagaaaggagtttcaaaggttaccggaaggttgcattgctagtatactctctcgcactacgccggcggacgtgtgtacgttttccgtcgtatcaaagattttccgttcggccgctgaatcggacgctgtgtggaaacgttttctcccttccgattaccattccatcatttcccagtctccttcgcctctcaactatccttccaagaaggagctctatctcgctctctcggatcgccctatcatcatcgatcagggtaaaaagagctttcaattggagaaaaagagtgggaagaagtgttacatgcttgctgctagagctctcagcattatttggggtgacactgagcaatactgg

SEQ ID NO: 19621 - DNA, 90 bp, Glycine max
  Clone ID: LIB3049-024-Q1-E1-D3
gtgccaaaagaccacaaaaagggttataacttataaaaaaaggtgttaaggtaacaattgaaaatttaaatccgccattaaatcctaaaa

SEQ ID NO: 19622 - DNA, 414 bp, Glycine max
  Clone ID: LIB3049-024-Q1-E1-D4
ccacgcgtaagtacagccgtcagtagagcagagaaaggggcacaagttgggtgagatatcatgaagcaagtggataagtatgcaattgcatgttaagatcggcactaaaatctgggtagcaagccataagtactctatatgcagaactaaagtaagacagaagtgcatctgctatgtcaggcagtcaatcaatggcaatgatagataggcttcaatagaagaatgcagcaatgcacatggaagccttgcagtatcaaagaatgatggaagaacaatctgagtatgatcacgacgctttgcaacttttgaatgagctcatgatgaagagggacaaagagaagctagagctagaaaaggagattgaagtatatagaaagaaggttcatgaatatgacgtaagagataagatgatga

SEQ ID NO: 19623 - DNA, 333 bp, Glycine max
  Clone ID: LIB3049-024-Q1-E1-D5
gagagaagcactcatcattcttcgtttgtctaagatccgccttctctgaattgtaaaaatgtcgctcggagaaactgcttgttcatacgcagctctcatccttcatgaagatggaatcagtgtaactgccgacaagatcagcaccttgttggaaactgcaaaggttcaagtagatacctattggccaaccttatttgctaaacttgctgagaagaaaaatcttggcgatttgatagccaatgcagcaggcggtggtgcaccagttgctgttgcagctgcccctgttgctgcctcaggtggtggtggtgctgctgctgccgccccagctgctga

SEQ ID NO: 19624 - DNA, 369 bp, Glycine max
  Clone ID: LIB3049-024-Q1-E1-D6
ggagtgaggagactgagaaaacagaagacaacaaaatggaagacacagtttctgcgttgaggtctttgatggtttctcactctccgccgctggatgccttagtggtgccctctgaagattatcacctgagcgaatatgtgtctgcacgagacaagcgccgcgaattcgtttccggcttcactggaagtgccggcttggcacttatgacaaagaaagaagcactgctgtggacagatggacggtattttttgcatgctgagaaagaacttagtgctgggtggaagctaatgcgaattggtgaagatcctgctgtagatatctggatggccgataatttgccaaaagaagcatccgttggggttgatccct

SEQ ID NO: 19625 - DNA, 242 bp, Glycine max
  Clone ID: LIB3049-024-Q1-E1-D7
gaaataaatggacaaacttcaagaagttgtgacaaatcaaaactggggaatccactctgagggcatgtcatcaatcactcccatctatggcttggcacaatgcttccaagacctttccagcattgattgccttcaatgctttgcatccagccgcaccaagctccctcgctgcctccttcagtttcagctcgaatttacctttatggctgcttccttcgctatgataactacagtttctacac

SEQ ID NO: 19626 - DNA, 228 bp, Glycine max
  Clone ID: LIB3049-024-Q1-E1-D8
cgggaaataaatggactaacttcaagaagttgtgacaaatcacaactggggaattcactctgagggcatgtcatcattcggacccaggtatggcttggcacaatgcttccagcacctttccatcattgattgccttcagtgctttgcatccagccgcaccatcctcacttcctgcctcacttcggtttctgttctattttatcatgattgctgcttccttctctatga

SEQ ID NO: 19627 - DNA, 375 bp, Glycine max
  unsure (1)..(375): unsure at all n locations
  Clone ID: LIB3049-024-Q1-E1-D9
ggagtcttgtgtttgagagattaagacctttttgcattgcaaatggctgctgcaactgctggagttgttggtggaaatggttcgtctgcttcttggatgcgattcaaaggcaaggaaaggaagcaaaccaagatgaacaagtcaaggattagttgctcttattcttcttctgtgatggatccttacaagaccttaagaatacaacgcggtgcctctgaatctgaggtcaggaaggctttcaggcagcttgctctgcagtaccatccagacgtgtgcagagggagcaattgtggggtgcagtttcgcgaaatcaacgaagcttatgatactgttaatggcaaccttangaggagaatcaaatgcgacagaatcgta

SEQ ID NO: 19628 - DNA, 171 bp, Glycine max
  Clone ID: LIB3049-024-Q1-E1-E1
cagattagggatttcgttctctaccgaaaccgcaagccaagttggaaattctgcttcggttgaagggttcctctcggtgtgggttttcaatggagaaaaatgatggtttgtggtggctaatggtggatgtgggtgatggagaaagtacttggaactttagaaatggatttg

SEQ ID NO: 19629 - DNA, 307 bp, Glycine max
  Clone ID: LIB3049-024-Q1-E1-E10
ggaattctcagaacaaaaaacaatattgaaaactccaaagtcttgtccttctcaagcacttgctctaactccaattcaaccatggttgcgagactcgcggtaacagcgctggtgctgatagctttggcaacaatttctctccaatcttcagcttcagcttcatcagtgggtaaattcgtcgacgaaaccatcacttcccacaagatcgtcattttttccaaggcctattgcccgtactgtagaagagcaaaagctgttttcaaagagttgaaccaagttccacatgttgttgagctcgacgagagag

SEQ ID NO: 19630 - DNA, 374 bp, Glycine max
  Clone ID: LIB3049-024-Q1-E1-E11
gatataagcggatgtgtgagtttgcatggttggatagcaatggcagcgaagaaggtgtgtgtaacaggtgctggaggattcgtagcgtcttggcttgttaagcttcttctttccaaaggctacattgtccatggaactgtgagagaccctgaacctgctactcagaaatatgaacacttgctcaaactccacggagcttctgaaaacctcactctcttcaaggcagatctcttgaactacgaatttcttcgctcagcaatttctggatgcactgcagttttccatcttgcttgccctgtaccctcaatcagtgttcccaaccctcaaggttaaatgaattgagcccgctgtgaaaggaacaactaatgtacttg

SEQ ID NO: 19631 - DNA, 312 bp, Glycine max; identical to SEQ ID NO: 8548
  Clone ID: LIB3049-024-Q1-E1-E12

SEQ ID NO: 19632 - DNA, 374 bp, Glycine max
  Clone ID: LIB3049-024-Q1-E1-E2
actccccatcaatgcagctatgtggagttagaagtgatatcgctaatgcagcgaaggcgttgttttggcaagcaagaaagggcctctcatttgtattaacctttgaatcagagagagacagaaatgcagccattatggttgccaggaaatatgctcttgattgcaatgtcgtgctcgctgggccagatgatctagtgtaggagcaaaatttaactgactgagtttttccatcaaacgtgagatttatcagattcttggtgtgagtatacatgtgtgcttgttttgttaaagatatgatttcatctttgtgattgggtttcactaattgagttgcattgttttaagcatgttttttatttgcctaatcatgttgt

SEQ ID NO: 19633 - DNA, 390 bp, Glycine max
  unsure (1)..(390): unsure at all n locations
  Clone ID: LIB3049-024-Q1-E1-E3
aaaaaacacaaaaaggggacgggaacaaaaccaaggcaggtgttccagtacgcggaaaaaggacgctatatanatatatttgtccccgatgctctctatttcagccactcgtatattcttcctccgctcaacaactataagattatcttcttcttcttcttctcttcaattcttctccaatcccaaccgcaccctcttccgtccctttcttcacacttccttcaaaccacttccttcgtctttctctttccgaacagatcacactatggccacctcaaacgccaaatcagtccatgatttcaccgttaaagtatcttttttgtttttgttttgcatatgcatgtaaattttagattttangttaaccccccctttttttatccttttgca

SEQ ID NO: 19634 - DNA, 80 bp, Glycine max
  Clone ID: LIB3049-024-Q1-E1-E4
cggggtagttccaccgagtagctatggtgtctaacctatgtctccgatgatatgctggatattcgtttctcttcttgctt

SEQ ID NO: 19635 - DNA, 288 bp, Glycine max
  Clone ID: LIB3049-024-Q1-E1-E5
aattggacgctatatttctagatttgtgcttcgatgtctctcgagttcatcgactcgtaaattcttactccgtgcaataactataagtttatcttcttcatcttcttcgcatctggtcttctccaattggaattgcaccctcttccgtccctttcttcacatttccttcagaccatttccttcgtctttctctttcgcattaattcacactatgtccacctcaaacgtcaaatcagtctaatattatagcgtctaagttatcttttttgtttatgttttgcatattca

SEQ ID NO: 19636 - DNA, 83 bp, Glycine max
  Clone ID: LIB3049-024-Q1-E1-E6
ggttctagtgtgtgattgtttgttgttgtaactcgttcttcttctttcgttgttccgtgtttgtgtttgttttaggggtcagg

SEQ ID NO: 19637 - DNA, 371 bp, Glycine max
  unsure (1)..(371): unsure at all n locations
  Clone ID: LIB3049-024-Q1-E1-E7
gagtggaagagtgaataagagatatcaatatattatgataatggagggatacaataagaaggttatgattgtggggatggtgttgggcatggccatgattgggatggccaatggccaatactcgttttgtcgcatgcccagcgatgggttggcggcatgcaagccgagtgtgagtggggactatcctgctgatccctccactgcttgttgctcagccattgccaaggctgatcttaaatgcttctgccgcttcaaggattcgggccttctctctatgtatggtgttgatcccaacaagtgcatggaactccctgttaagtgcaaggttgtcgactctttccactgctagattcattananggggcactaat

SEQ ID NO: 19638 - DNA, 372 bp, Glycine max
  Clone ID: LIB3049-024-Q1-E1-E8
gggggaagaagagataggggtggtggcaatgtgttaccaatatcatatcatatattctttcatcttcttgggttagggttctacacttgcaatctcctttcacacccacccacccttcaaccatttcaattccttccctcacccaaaccgcactatcgttcttcgacacggtcctgtttattaagcggtttggataaaagaatagaagcgtaaaatggccttcgtagcacatcaacctcagggtttgtttgtgacatcttcctcgaggcgtttgccatggagcaaaaggctgaagttgaagcagtgtttaacaaaacatcacatgattggaagaactgaccggcattgcctagtaaagtggaatgcttgttt

SEQ ID NO: 19639 - DNA, 378 bp, Glycine max
  unsure (1)..(378): unsure at all n locations
  Clone ID: LIB3049-024-Q1-E1-E9
tggatattgaggttccacaagcggtacttcctgatactgtatttgaagcagttgttcgaattccttatgatatgcaagtgaaacaagttcttgctaatggtaaaaagggagctttgaatgtgggggctgttcttattttaccggaaggttttgaattggcaccccccgatcgtatttcgcctgagattaaagagaagataggcaatctgtcttttcaaaactatcgtcctacaaaaaaaatattcttgtggtaggccctgttcctggtcaaaaatataaagaaataacctttcctattctttcnccggattccactactaagagagatgttccattccttaaaatatcctatatacgtaggtgggaacaggggaaggg

SEQ ID NO: 19640 - DNA, 375 bp, Glycine max
  Clone ID: LIB3049-024-Q1-E1-F1
ggtatttggggtttaggaaaaaggtgaagggcgaagacacgttcttctctcaagtgctgaaaaaaaggaaatagcagaaagttatatggataacaaatcaccgagcaataaggcatctgaggagctggcacgtgagttgcttattgctatctctgattctttaccagataaaactctggattccgattttgtgcccgaaagcaaggacgcagacagctttgcaagaccaaacggtgattgggatgacaagtttaggtctgaattgatttcaatctcctatgttgaatctcccgatgtcaaaatctgatatattacgagtctagactgttagtaacttatgctacccttctggtttgttatgtggatgaatttccg

SEQ ID NO: 19641 - DNA, 105 bp, Glycine max
  Clone ID: LIB3049-024-Q1-E1-F10
tgggaagcatgcaccaacgtgaataccctaattcggagggtttcagttttcgccctcttttctcatctccaacatctccgtcgtcccgggtgctactcttcctgt

SEQ ID NO: 19642 - DNA, 378 bp, Glycine max
  Clone ID: LIB3049-024-Q1-E1-F11
gcttcgggccagaccttcaacatcggcaactacgtcgtcagggtcaaattgggaacccctggtcaacttttgttcatggtcctcgacaccagcaccgacgaggccttcgttccatgctcgggctgcacgggctgctccgacaccactttctcgcccaaagcctccaccagctatggcccattggactgctctgttccccagtgcggtcaggtccgcgggctttcgtgccccgccacaggtaccggcgcgtgctccttcaaccaatcctacgcgggctcatctttctccgccaccctagtccaagactcgttaagattagccactgatgttatccccaactactccctcggctgcgtcaacgccatcaccggcgcctct

SEQ ID NO: 19643 - DNA, 288 bp, Glycine max
  Clone ID: LIB3049-024-Q1-E1-F12
ggcgtgtgtgagagagaatcagaatcagaagatgaagaaagaagacacagtgaagctgatcagttccgaaggtttcgaatttgtggtcgacaaagaagctgcaatagtttcacagaccatacataacatgcttacttctccagggagtttcgctgagaggcagcacggcgaagttacctttcctgagatcagcaccaccattctcgagaagatttgccagtacttttattggcatctccaattcgccagtgggaaggagacggaattttccattgaacctgaattaac

SEQ ID NO: 19644 - DNA, 363 bp, Glycine max
  Clone ID: LIB3049-024-Q1-E1-F2
cacccttgaggtggaaagctctgacaccatcgacaacgtcaaggccaagatccaggacaaggaaggaattcccccggatcagcaacgtctcatcttcgccggaaagcagctcgaggacggccgtaccctcgccgactacaacatccacaaggagtcaacccttcaccttgtccttcgtctccgtggtggcatgcagatcttcgtcaagaccctcactggcaaaaccataaccctagaggtcgaaagctctgacaccattgacaacgtcaaggccaagatccaggaccaggatggaatccccccagaccagcaacgtctcatcttcgccggaaagcaacttgaggactggcgcaccctcgccga

SEQ ID NO: 19645 - DNA, 110 bp, Glycine max
  Clone ID: LIB3049-024-Q1-E1-F3
acagaaaggggtatttgaggtttacgaaaaaggtgaaaggccaaaacacgttcctcccccaaatgctgaaattcaggacatagcacgaagttatatggattacaaatcac

SEQ ID NO: 19646 - DNA, 364 bp, Glycine max
  Clone ID: LIB3049-024-Q1-E1-F4
ggtgtgagtgaagaagcagagggagtagcggcattaaaaatgcagatcttcgtgaaaactctgacagggaagactataaccctcgaggtcgagagcagcgacaccatcgacaatgtcaaggccaagattcaagacaaggaaggcattcctccggatcagcagcgtttgattttcgccggaaagcagcttgaagatggagggaccctggccgattacaacatccagaaggaatcaacccttcatctcgtcctcaggcttcgtggtggcatcattgagccttccctcatggctttggctcgcaaatacaaccaggacaagatgatttgccgcaagtgctatgcccgtctgcatcctagggctgtga

SEQ ID NO: 19647 - DNA, 347 bp, Glycine max
  Clone ID: LIB3049-024-Q1-E1-F5
gaaggattcaaagtgaagtgaagtgccccctgtcctacttcacttttagttttctctctcctctctctccttctctctccttggtccttggagttacaagaagttgtttgttcctgtccttaatttcttcaaccttctcaacacgtttaatatcactaaccacttcctcgttgaatcatagcataaccacttggtctgtgtttgtttttgcaacttcatattgtacataaaaacatggatgatgaatatgctaagcttattagaaggatgaacccaccaagggttgtgattgacaacaatgcctgtgaaaacgcaactgttattcaggttgacagtgtcaacaaaca

SEQ ID NO: 19648 - DNA, 318 bp, Glycine max
  Clone ID: LIB3049-024-Q1-E1-F6
tcatgaactacatcgaagacttccgaatccggacacaccctttctccgcgtgcctcacacagtccggctacacgaacctctaggacgccgttattacgcacgcatcgacagcactcgacgatgccgacaagctacgtctcaaccgatacgaaacgtgccacaacgtcgtcttcactgcagggttcaacgcactatggacggtgaaagaaccagttcccctacatcgtaaaatggctaaggctaaacggcgaaaagctccatgctgacctcgctcgtgaggttcggggcgtggtgaacgacgagggacgtgtcacgttc

SEQ ID NO: 19649 - DNA, 310 bp, Glycine max
  Clone ID: LIB3049-024-Q1-E1-G10
gacggcactcgttttcgttctcgttctgatctttgcgaaggaggtttacagcgctcaaccaaagatgcagaacgaggaaggacagatcactgagctttacattcctaggaagtgctccgccacaaacagattgattaccgctaaggaccatgcttcggttcagatcaacattgggcatgtggatgagaatggcgtctacaatggccatttctccacttttgccctctgcggattcatccgtgctcagggtgatgctgacagtgctctagaccgcttgtggcagaagaagaaagttgaagttaagcaacag

SEQ ID NO: 19650 - DNA, 381 bp, Glycine max
  Clone ID: LIB3049-024-Q1-E1-G11
ggggggatgggatatcagtaacttgaacctggcagatgccatggtcaaggccaaagtgtttgatatcgatctgcacaaacacttcaagccttacatggaatctatggttccactccccggaatctatgaccccgatttcattgctgccaaccaacgagaccgtgccaacaacgtgatcaaaggcacatagacagaacaagttcaacatctcatcaacgacattaaggagtttaacgaaagcactaacgttgacaacgtggttgtcctgtagacagccaacacagatacgtacagcaacctacttgtgggactaaacgacaccaatggaaatctccttgtcttccttggacaggaaccatgctgacatttccccttccacct

SEQ ID NO: 19651 - DNA, 308 bp, Glycine max
  Clone ID: LIB3049-024-Q1-E1-G12
ggtggaagtatttgcagaactttgtttcccaacctccattgcctccgcttctacctcgctaccatgatcattcctgagaagaaccgcaaggagatctgcaaatacctcttccaagagggagtttgctttgcgaagaaggacttcaatttggcgaagcaccctgagattgacgtgccgaatctgcaggtgattaagctgatgcagagtttcaagtctcgcgagtatgtgagggagacttttgcttggatgcactattactggttcctcaccaacgatggaatcgagtttctcagaacttaccttaacct

SEQ ID NO: 19652 - DNA, 378 bp, Glycine max
  Clone ID: LIB3049-024-Q1-E1-G4
ggatgatcgtggtgctggtggcttctttctcaacggacacgatttcttccatttccattttcttctgattccttctctttctgcccatctcatctcatctcattttgttttggtccaccctcatcatattgaagactccgccatatagggggcatctttgtttctctttcattcttcttgtgtgtttgtgattattgccctgtcctctgcattcctttaattcccccattcatttcccacctttctctcacaaaccaaactcatcatggccgttcaagctcaatacccttccaatgtactactcttcctaaacagcaaaaccgggcaagaagcacatgattattcattgcaatctccgccaggacaacaactccttga

SEQ ID NO: 19653 - DNA, 348 bp, Glycine max
  Clone ID: LIB3049-024-Q1-E1-G5
ggacattatcttttctcttcacaaaaacaaaaacaaagtaagagttcactcaatctcactgtgttgtgagttgtgtgtgagcaccaaccaacaatggtgtctctgactccgttatgtttctttattaccttgttgatcgctggtgcagacgcagcggcggagccccaaacggtgcgttttgacaccggggggttgagcagagacacctttcccaaaggattcttattcggaacggccacgtctgcgtaccaagtggagggtatggcccacaaagacggtcgcggcccaagcatttgggacgtcttcatcaaaaaacccgggattgtcgcaaataatggcacgggagaa

SEQ ID NO: 19654 - DNA, 366 bp, Glycine max
  Clone ID: LIB3049-024-Q1-E1-G6
gaggctatcaatggattgacccctcggagggccgacacttttgagaagattgataagattgggcaaggtacatacagcaatgtttacaaagctagggatactttaacggggaaaattgttgctctaaagaaggtccgttttgacaatttagagcctgagagtgtcaagttcatggccagagagattttgattctccggcgtctggatcatcccaatgtcatcaaactggaaggcttagtgacttctagaatgtcatgcagtttatatcttgtgtttgaatacatggtgcatgatttggctggacttgccacaaacccagcaatcaagttcacagagtctcaggtaaaatgttacatgcatcagtta

SEQ ID NO: 19655 - DNA, 369 bp, Glycine max
  Clone ID: LIB3049-024-Q1-E1-G7
ggactcactcttgttttcgcttcgctactcatcatcctaagaagtaccaggaagaaacaaacaatgtttctcaaagtccagctgcactggaatgtcatcatcgctgctgaaaatctgcaaccggaaggtctgatgcttcatagggcaatcattgtccgccttctgagtgactttgctgtgaagaaggccaccaaagatctgggatactttcttgcagtgaccacactggagaaaataggggaatgaaaggtcagacaacatactggggatgtgctcttccctgtggtttttaatgccatcaccttcaagtttttcaagggtgagatattacagggtgttgtccacaaggttctgaagcatggagttttc

SEQ ID NO: 19656 - DNA, 378 bp, Glycine max
  Clone ID: LIB3049-024-Q1-E1-G8
gagggagaattaggtttttagggtttacaccgagcagcgacacctccctcccgcagtagccatggttctcaaaactgaactatgccgattcagtggtgccaagatctaccccggaaagggcatcagatttgttcgtggtgattctcaggttttcctgtttgccaactcaaaatgtaagcggtatttccacaaccgcctgaagccctcaaagctcacctggactgctatgtacagaaagcaacacaaaaaggacattgctcaagaagctgtgaagaagaggagacgcgctgccaaaaagccttactctaggtccattgttggtgccactctggaagttatccagaaaaagagagctgagaagccagaagttcgagatgc

SEQ ID NO: 19657 - DNA, 378 bp, Glycine max
  Clone ID: LIB3049-024-Q1-E1-G9
gtacacaggataaacctgccacacctcattagtagtagccagtagattcaaagttgagagaaacaaacaaacaaaagaaagccaagcatctcccaacacaccatcatcatcatcatcatcaaagccaagcacaacaatggcactcaaaagggcatcgtggttgctgctgctgccactgttatctgcagttgctgctgctgccaccaacaccaacagtgtgtaccatccttgttctgatgccaggattcagagatctgatggcttcacttttggcattgccttcagttccagggactctttcttctacaaccagaaccagtccctccagctctctcccctgttgacggagcctctctctcgcttcctccaacgctcagc

SEQ ID NO: 19658 - DNA, 368 bp, Glycine max
  Clone ID: LIB3049-024-Q1-E1-H1
ggggtttgatcttcttgatatatgcatcaatgggccaaaagaaaagttagattccaccgttattagccagcctgctatttatgtcacaagtcttgctgctatagagctacttcgtgcacgtgaaggaggtcagcagattattgactcagttgatgttacatgtggtttaagcctgggagaatatactgctctggcatttgctggggctttcagctttgaagatggactcaagttggtcaaactgaggggagaggccatgcaggatgccgctgatgctgctagaagtgctatggttagtgtgataggactggactcagagaaggtccaacaattgtgtgatgcagccaatcaggaagttcctgaagctg

SEQ ID NO: 19659 - DNA, 376 bp, Glycine max
  Clone ID: LIB3049-024-Q1-E1-H11
gattctctcacagggttccatcttttaaaatgactggtcaggaaagagttggtgttcctgtaggatcttatgaacttgatccggtatctttgccaatgaatcttgaagagattgctgttgctgaacatttggaagtaaaggagggtcattgtccatctagtggggtgggcacaaggtattcagatatgtcgaaattcacaatgaactcagagggagaagcttctactgaaaaggttaagtgggaaagaagcaattcagcagaggagaacaaggatcctgttgatcatataggtaatggtagtgacccttcagcttcagccgcagatgccttttgaaattcctgattctgagttctgcaattttgatgctgagaggt

SEQ ID NO: 19660 - DNA, 277 bp, Glycine max
  Clone ID: LIB3049-024-Q1-E1-H12
ggaagagagagagaggcaaggaacgaacgacgtattctctctcctccactcacctcaaatccaaatccaaatcccaattctccagtctttgctatggcatcaatttcgtccttatctctcacttctgtttccctccccaaatctcaatctctggaccccaagaaaatctctgattcttcttcctcctctggcagcaggagtcaaagttgttgttgcgcgccatcgttccaacgaagaaagatgcttctatcttccgccgccatcgttgccggaacct

SEQ ID NO: 19661 - DNA, 377 bp, Glycine max
  unsure (1)..(377): unsure at all n locations
  Clone ID: LIB3049-024-Q1-E1-H2
gggaaatttgtccggtataatgtcagcagcagtggaaaatccgtccgttgaaatgccgggaaatttgtccggtgtaatgccgacaacagtgggaaatccatccgttgaaatgttgggaaatcagtccggtgtaatgatgacagcagcgggaaatccattcaccgttgaaatgcctgattctgctgcaattccttgaccaaccaaattttgagacttgataaaggcttatgttatatttagtataaatagctgatagcatatgttttatgttatattgaactcagtcattatagtactcttgaacaatgtctgcacttgatcctggaatattatttataattgcagatggttatgtttaatccatangagggcataaa

SEQ ID NO: 19662 - DNA, 379 bp, Glycine max
  Clone ID: LIB3049-024-Q1-E1-H3
aggggtggaacaataacaacagaacaaagagagcaaaaccctagagcatccatcacaagcagaggaagaagatggtgaagttcctgaagcctaacaaggcagtgatcgtcctgcagggccgctacgccgggcgcatggcggtgatcgtgacgaccttcgacgagggaaccagggagcgcccctacggccactgcctcgtcgccggaataaagaagtacccaagcaaggtcatcaagaatgactccgcgaagaagaccgcgaagaaatctatggttaaggccttcgtgaagctcgtgaactaccagcacctcatgcccacgcgctacacgctcgacgtggatctaaaggacgctgttacccccgatgttctagccaccaa

SEQ ID NO: 19663 - DNA, 369 bp, Glycine max
  Clone ID: LIB3049-024-Q1-E1-H4
ggagtggaagtagtagcaagtacgtcgtatatgtggttgatcttttgctggttgtttgttttgttccttccaattgtcagatctgaatcaccggactcactcttcacactcactcacactgaatggcttctgaaggcgaccatcaccaccaccaccaccaccatcaagatcacgatcatcatcatcatgatcatgatcaccatcatcatcacgatggagagggagagaccaactcatgggtaggtaaggatgggaaggtgtaccatagccacgatggtctggcgccgcattctcacgaacccatttactcccccggctacttcaccagaagagctccaccgcttctcaacagaaacttcaacgaaagag

SEQ ID NO: 19664 - DNA, 359 bp, Glycine max
  Clone ID: LIB3049-024-Q1-E1-H5
ggaggaagagggtgttgtagggaatgaatatatatatatacatatatatcctcatgttcttgttttccacattcatattttccttgcgtttccctttcattttccctcactttctcgctcgccaaacgcccctctctctcctccaatggccgaccagctcaccgacgaccagatcgccgagttcaaggaggccttcagcctcttcgacaaggacggcgatggttgtattactactaaggaacttgggactgtgatgcggtcactagggcaaaacccaactgaggcagaactgcaggatatgattaatgacgttgatgctgatggcaatggaaccatcgacttcccagagttcctcaacc

SEQ ID NO: 19665 - DNA, 378 bp, Glycine max
  Clone ID: LIB3049-024-Q1-E1-H6
gagacccaattgcgtcaaattcacgatgatcaccatcatgatggtcgccgacaccgtcgccgtaaccgccgccaaaggcctcggcgtccttcgggcctatcaatccacctgtaacttttccgtcgccgatcagatctccgccatgattcagacttacgacgccgtcgcgccgccgccggtcaagcctactacctacaggctaagacgccgaacgctcctccggagaaaacaacttaccaaacgcagattatcaggtgacgactccggggacgccgggaacgaggggttcctcttcggtgacggcggagacggtccttttggaggtggatgtgacttcggtggcggcggcgtccgtggtggtggttgggatttcaatag

SEQ ID NO: 19666 - DNA, 362 bp, Glycine max
  Clone ID: LIB3049-024-Q1-E1-H7
gaagtgtgagtgatatttgagcttaaaccctagccgctcttctcttcattcttcactttggaaacaatcataatggcgttctgtaataaggttggaaatgtctcgaggcagggtgctgctcgcagcacacatgcccctgttgcgtccatgcttaattacatccgctgcatgtcttcaagcaagcttttcattggaggcctttcatatggagttgatgaccagtctcttaaggatgcattttctggctttggagatgtggttgatgcaaaagttataactgatagagacagtggaagattaaggggatttggatttgtcaacttctccaatgatgagtctgcaagttcggcactctctgcaat

SEQ ID NO: 19667 - DNA, 336 bp, Glycine max
  Clone ID: LIB3049-024-Q1-E1-H8
gacggatcgcctgagtagaagaacgaatgctggtgaaagtggcgacgtacttcgcgatgacgcttggagccttcgtgttctggcagtccatggacaagctccatgtctggatcgctcttcgtcaggacgaaatggatttttaggttaaattgatccattgaggaactatgacgcaatggctatactgactggcatcagcagtctagagtagaagatgttaatcagagtaatgaatagtggggtgccattattgtgctatggctgatcattgtagctgccagtcacttcatggcactcctaccatcgcgtggttagtggctgcattgcagtacacag

SEQ ID NO: 19668 - DNA, 365 bp, Glycine max
  Clone ID: LIB3049-024-Q1-E1-H9
gagagctttagattcttttcccctagattcagccacagttggaaaaaaaaaaaagttgttcgagatggcacgtacgaagcaaactgctcgtaagtccacaggaggaaaggcacctaggaagcagctcgcaaccaaggctgcacgtaagtctgcaccaactactggtggtgtgaagaagccacatcgttatcgtcctggtaccgttgctcttcgtgagattaggaaataccagaagagtaccgagcttttgatcaggaagctccccttccagaggctggttcgtgaaattgctcaggacttcaagactgaatcgcgtttccagaaccatgcggtgcttgcattgcaagaagctgctgaggcatacc

SEQ ID NO: 19669 - DNA, 404 bp, Glycine max
  Clone ID: LIB3049-025-Q1-E1-A1
ggcacaagtttgttgagatagctagaagcaataagatgaaaatgaaagtgcttgttttgtttgttgctacagttttggtagcatatgaatgccatggctcagactaccagaagttccctctccaaatgaaaactgggtttggtgggcaatacagcaatgaggtggcatgtgccagttggaggcttggcgtggaagcaaacaacgtagtcaagtggcaaactgttcctgcagcttgcggagagtacatagctgactacgttctaggagaccaatatagatcagattccaaaacagttaaccaacaagcttatttctatgctaaatccctcaaactcaccaacaaagatgtctttgtcctggacgttgacgacactactctctctaatctccagtattttgctaac

SEQ ID NO: 19670 - DNA, 336 bp, Glycine max
  unsure (1)..(336): unsure at all n locations
  Clone ID: LIB3049-025-Q1-E1-A10
gacagcacagatattttctcaaagggaaatagcaccatttggcattttacaatttccaagctatggccaaatcaactgggtcacttgtctttctctctattttcactttgctcctttcttgcaacttangagggcacttaaagtttgctaatggaatgctagaccaggaaagttggtgcgtagcaaaaccttcaacaagtgatgttgcactgaatgataacattcaatatggttgcattgccttgggtgattgcaaaatgatccaaccaggtggatcctgcttctacccaaacactctgttaaaccatgcctctgttgtcatgaatcagtactatg

SEQ ID NO: 19671 - DNA, 292 bp, Glycine max
  Clone ID: LIB3049-025-Q1-E1-A11
gaacttgggatgcgccactggacaccccagttttgtgatgtcctgctccttcaccaaccaggtcattgctcagcttgagttgtggaaggagaagagtaccggcaagtacgagaagaaggtttacgttttgcccaagcaccttgatgagaaggtggctgcacttcacctgggcaaacttggagctaagctgacccagcttagcaagtcccaggctgattacatcagtgtgcctgttgagggtccatacaagcctgctcactacaggtactaagtgattgagatgatcaactga

SEQ ID NO: 19672 - DNA, 331 bp, Glycine max
  unsure (1)..(331): unsure at all n locations
  Clone ID: LIB3049-025-Q1-E1-A12
gaatgcaacactctcttctaattcncatctacagttagccccaaatctggggttagggtttcctctgcgtcgatggcttcgaattcgatcgacggcgacgccgttacggggtcgggactgtgcataaacgacgtgttaagggacgacgagctgcgttccattctggggcgagtggagagcgagaaggacaaggaaacgttcgggttggtctgcaagcgatggcttcggttgcagagcacggaaaggaagaaactcgccgcacgtgcgggtcnccacatgctccgaaaaatggccgataggttcacacgcttagtccaactggacctcgctc

SEQ ID NO: 19673 - DNA, 404 bp, Glycine max
  Clone ID: LIB3049-025-Q1-E1-A2
gatcccatttgaaatcaaaatcaaaaacaccaaatcctctaattcaagtttgcaccaagttttcctgagaaaatgtctggtcgtggaaagggtggaaagggtttgggaaagggaggtgccaagaggcacaggaaggttcttcgcgacaacattcagggcattacgaaacctgcgattcgtaggttagcgagaagaggtggcgtgaagaggatcagtggtttgatctacgaggaaaccagaggggttctgaagatattcttggagaacgtgattcgcgatgctgtgacttataccgagcacgctaggaggaagacggttactgccatggatgttgtttatgctctcaagagacagggaaggaccctctatggctttggaggctaaagagttgtttttcttgttgt

SEQ ID NO: 19674 - DNA, 406 bp, Glycine max
  unsure (1)..(406): unsure at all n locations
  Clone ID: LIB3049-025-Q1-E1-A3
ggggcgaggtagccagagagtgatacaatacagagtgcgttgttgctccttcgccacaactccctgccaacatgggtatctccagagattctatgcacaagaggcgtgccactggtggcaagaagaaggcatggaggaagaagagaaagtatgagcttggtcgccagcctgctaacactaagctgtcaagcaacaagacagtcaggaggatccgggttagaggtggaaatgtgaagtggagggcactgagattggatactggaaattactcctgnggaagtgaagctgtaactcgcaagactcgtatactagatgtggtttacaatgcctcaaacaacgagcttgtgcgtactcagactcttgttaaaagtgctattgttcaggttgatgctgctccattcaaaca

SEQ ID NO: 19675 - DNA, 275 bp, Glycine max
  Clone ID: LIB3049-025-Q1-E1-A4
ggatccatgggcatatactatggttgtccttcttctcctccacacaccgtgagggctggctggtcagaaatgagaatggcttcagcattgtccctgcatctctcaacccctttctcccaactccaccctagtctcaaacctaaaaaactccatgatttccccactctctccctctccaaacctcgaaaactcagcgtgaactccgtggacatctccaaagaagacacgcccgtgaaacccgaatcggaactggagaacttggggccgcggcggct

SEQ ID NO: 19676 - DNA, 357 bp, Glycine max
  Clone ID: LIB3049-022-Q1-E1-G9
gacacaccgtttgtccaattcttaactcaacttctgctacccactctcttcttccaagtccaaccacgcttttctctacagtcatgggcaaggtcaagatcggaatcaacggatttggaagaattggccgtttggttgccagagtcgctctgcaaagagacgatgtggagctcgttgccgttaacgacccttttcattaccaccgattacatgacatgcatgtttaaatacgacagtgttcacggacactggaagcatcacgatgtcaccgttaaggacgagaagactcttctcttcggtgacaagccagtcactgtttttggacacaggaaccctgaagagatcccattggggtca

SEQ ID NO: 19677 - DNA, 388 bp, Glycine max
  Clone ID: LIB3049-020-Q1-E1-H9
gtagactctatagtagaagctgatgatgcccgatttgattattttgttaaaaaggttttacccagaataaatgatttagatcagggagggaccatgttgtttaccaattcttattttgaatttattcgaatccgaaattttttgaagtcacaaaatgcctccttttgtctgcttggggagtaacaatccatgtccattattatgtcattagttgaatgtgattatttgatactagtgattttttctaaattcatattaggtagttcttatgttgcattttgatttatgagtggtcttttttgttaatttaggtatacaacccaaagtgatatttctcgtgcgcgtgtttggttctatgaaggaaaaataaaaattttggtttacactg

SEQ ID NO: 19678 - DNA, 335 bp, Glycine max
  Clone ID: LIB3049-021-Q1-E1-A1
gaagaggttgagtgtcaaacaatctttttataaattgtaggaaaacaattgattgtcatgttactaaagccttattatgttttttgaaacacagtgggaggacttttgaatgcaacatgtgggaatgctacagagctcatcatagcaatttttgctcttagcaataacaaaattgcagtggtaaagtattctttgctgggttccataatttctaaccttcttctggttcttggaacctctctattctgttgtggcattgcaaacattagaaaggagcaaaaatatgatagaagacaggcagatataaacttgcttatgctgtttgtggcattgct

SEQ ID NO: 19679 - DNA, 321 bp, Glycine max
  Clone ID: LIB3049-021-Q1-E1-A10
gagagatagaagcagtgacacagctttgtgcctaactagcatcgcagtggcagagacgcacgcagttgccgcatcagtccgcatcaactgcacgtttgtttgatctctcttcacccttcaaattgcaagtgtgaccgtcgaagaagaggaatctttcttgcaattccaatcatgactttgctagaagtaattaaggatgcttcagtcaattcaaaaccacttgattcacctttggactacccaattgttctgaacccaggtggtatcttacctaatttaaagcctgaagttgaagatgaatcttcttcatccctcataaaa

SEQ ID NO: 19680 - DNA, 318 bp, Glycine max
  Clone ID: LIB3049-021-Q1-E1-A11
ggaggcggaacctggagtggaagtgcgatcccagtgttagtgtgtatttcctctcttctcactccgggatcgatattttcaagaacagatcgaaaagccgttcatcgatttgttggatctgtgagtgagaagatggttactaagacagaggagactcaattgaacaggctcgaaaaccaggtcgataacggcggcggcggcgcgtgggagtacctctgcctcgtgcggaagctcaaagttcggcggtcggagaaagttctgaagcacggtctctccatcttgaacgacctcaaacaacgattctctctcggctccgat

SEQ ID NO: 19681 - DNA, 300 bp, Glycine max
  unsure (1)..(300): unsure at all n locations
  Clone ID: LIB3049-021-Q1-E1-A12
aagtatttgatgggttggaactacaattatggtatcgtaaaatttaagaaattcccttgtatatgttattagtgttgtcaaccaatcatttcacatttttcactttgcactccgaatagaggatgagagttcccaattgttcatcattcttcactctacccctacgtcatttcattaccttagcanacacattgggtttcattctcatgatcttgttcatatctgggattcattagttcccctctttttctttattatcacaattctcaacccaatcaatcaaagaccaatcaaaggctt

SEQ ID NO: 19682 - DNA, 309 bp, Glycine max
  Clone ID: LIB3049-021-Q1-E1-A2
agggaaagagaatatgggtttcatatgtgggttccaagctcaacaatcatttttggatcctaaatgagagacaagccaaaacctttcaaaatacacatgctgcaaaatgctcaaccaatcatcagccatgggagaggttgacgcagcattcatccaagacccaccacagatgccaaagctctccaccatccaagccgaaagaattcccataattgatctctctccaataaacaatcacagagtttcagacccttctgctattgaatgcttaatgaaggagataagtagtgcatgcaacgagtggggttt

SEQ ID NO: 19683 - DNA, 263 bp, Glycine max
  Clone ID: LIB3049-021-Q1-E1-A3
gatgcatcatacaggcaaaaacttgtgcgtcttcacttcttccattctcctgcaccgacaactcaattaccatcacagatggtggcataagcgacatggggaagcttgatctactggtgccaatcagtgcaaatggacgtgtccctgactctcccaggctcacctctcctcagccctctctgtcacatccaattcgttggaatcagggacacgccaatcgtctccgtagtatacgacgccgattcagcactcttcgatgtcgt

SEQ ID NO: 19684 - DNA, 369 bp, Glycine max
  Clone ID: LIB3049-021-Q1-E1-A4
gggcgataaccccttcacatcatagatcacgcttcttcagtactataattttagccttattagttaatttttttaaagaaattttttactttcctataaatatcactggatactcccttttcactcacaaacaactttctttctttttttataactctccagcagttacttgcctataaatatcactgtatcctcccttttcactcacaaacaactttcttcctcttttataactccagcaatagttcttctttgagaagttattcgctggtatgaacagtatagaaggagcttttgtcaaagagaagaaagaagcattttgaggaattaatgaagcattgagcttaaaccggattttggtcgtggact

SEQ ID NO: 19685 - DNA, 329 bp, Glycine max
  Clone ID: LIB3049-021-Q1-E1-A6
gaagctgagcgactttgtgggaagagtgaaagaagaagcgcagttaatgaaggtataagactgcagaaactgagagagaaagagatctggaagagatgagtgaagcgcagaagcaggtttggaaaggggccattcctctccagattcacctccacgaatccgaagtcaccactctccctcctcctccacccgctctcgtgttggcacctcggatagggtacttacctttgctgatttcgctcttgaagcctcagttcagcaccacgcttccccctggagtcgacaccatttggtttgagtacaaaggcctccctctcaagtggtatata

SEQ ID NO: 19686 - DNA, 254 bp, Glycine max
  Clone ID: LIB3049-021-Q1-E1-A7
gaatctagtggaagagtgaataagagatatcaatatattatgataatggagggatacaataagaaggttatgattgtggggatggtgttgggcatggccatgattgggatggccaatggccaatactcgttttgtcgcgtgcccagcgatgggttggcggcatgcaagccgagtgtgagtggggactatcctgctgatccctccactgcttgttgctcagccattgccaaggctgatcttaaatgcttctgccg

SEQ ID NO: 19687 - DNA, 336 bp, Glycine max
  Clone ID: LIB3049-021-Q1-E1-A8
gattgaagtatagattgaacacacacatagaaacccaacagcaagaatgaagaagatgattctaaccctcttcttcaatatcattttatctctcctctccctctcccacgcctccgtggtggatttctgcgtagcagactacacaggccccaatggccccgcagggtactcatgcaagagcccagcaaaggtcacggtggacgacttcgtctactccggccttggcaccgccggcaacacctcaaacatcatcaaagccgcggtgacgccggcgttcgacgcgcaattccccggcgtcaacgggcttggaatctccattgcacgcctagacctagc

SEQ ID NO: 19688 - DNA, 385 bp, Glycine max
  Clone ID: LIB3049-021-Q1-E1-A9
gaacgacaacttccccaacacgttgtgttactctcttcgtcttcgtcgttttcataccccttctcccttcaaaccctgggaaaattctcgaacaatgccccttctccctccgtaactcaccaatccatccataaatacacacacaaacattttcattcaacatttttttattacttctttgtatcggtctaatatccacacatttccacattaaataaatacacacacattttagttttttcatgtacccattcgcgtgcgatagaattttctagagcgagagatttcggcgtaatgggtccaaacgcggcggcggcgaaacaagcggagaaacttcgaaattgacggcaacacttacttcaaaaaagaccgtttcggtgccgcc

SEQ ID NO: 19689 - DNA, 348 bp, Glycine max
  Clone ID: LIB3049-021-Q1-E1-B1
ggactgtcagcagcgcattatagcacaccacacaaaaaagcaaaacagagagaacaactgttactcacacacgccatgggtaaatgaatggtttttgagcaacagcagttaaaagagaaaagggattcagcgaagatgacatcggttggtgtggcaccaacttcgggtttgagagaagccagtgggcatggagcagcagctgcggatagattgccagaggagatgaacgatatgaaaattagggatgatagagaaatggaagccacagttgttgatggcaacggaacggagacaggacatatcattgtgactaccattgggggtagaaatggtcaacccaagcagact

SEQ ID NO: 19690 - DNA, 314 bp, Glycine max
  Clone ID: LIB3049-021-Q1-E1-B10
ggcccacttttccttcttccatggtttgcctctctctctctctctctctctactctcctttcatttcagaaatcatggggaaataaacataattaatctccgaaataaacaaaacatttttcgtgacattcgatgaatgatatgaaggtgagaagtgggttgtgcgtgtggccaaatttgagacaactttgctttagaaaaggcattctatatgggtttatgcgattgttttctactccgttgaaaacgctgcgtggagctagccgctcgctgagagtggctcaattttgcagtgttgccaatatgtcttcctc

SEQ ID NO: 19691 - DNA, 383 bp, Glycine max
  unsure (1)..(383): unsure at all n locations
  Clone ID: LIB3049-021-Q1-E1-B11
gactctttctccgagaacannnnnnnnnnnnaaaaaaaaatccgcgattcgctcttctcttggaaaagtgaaaaccagaagtacgaacgaaagagaagagcgatttagaagtgagagaagatggggttgtcgttcacgaagctgttcagcacgttgtttgcgaagaaggaaatgaggattctgatggtaggtctcgatgctgctggtaagacaaccatcttgtacaagctcaagcttggagaaatcgtcaccactatccccaccatcggatttaatgttgagactgcggagtacaagaacatcagcttcactgtgtgggatgttggtggtcaagaacagattccgtcaactgtggaggcattatttccagaacactcagggtc

SEQ ID NO: 19692 - DNA, 288 bp, Glycine max
  Clone ID: LIB3049-021-Q1-E1-B2
ggctaccagctgcgcccacacaatccattgattcattcagtgagcgagaaagtgagaagttgtggccaccaatttttaatttcatttttatataaaggaagaagaatcatcatctgtatacattactagccattagctaaacagacaaatgtgtttcagagtattattaggagtttctcttcatatcttgatttatctcattaatcttgctcctgcatatcctcatcaccacaccttgctttcagaaattgtgcagaatagcaagttcgaagataagggaatactata

SEQ ID NO: 19693 - DNA, 314 bp, Glycine max
  Clone ID: LIB3049-021-Q1-E1-B3
taggggctaacagctgcgcccacacaatccaatgattcattcagtgagcgagaaagtgagaagttgtggccaccaatttttaatttcatttttatataaaggaagaagaatcatcatctgtatacattactagccattagctaaacagacaaatgtgtttcagagtattattaggagtttcgcatcatatcctgatttaactcattaatcttgctcctgcatatcctcttcaccagaccttgctttcagaaattgtgcagaataggaggttcgaagataagggaatactatatggaagtatgatatgaggcgct

SEQ ID NO: 19694 - DNA, 170 bp, Glycine max
  Clone ID: LIB3049-021-Q1-E1-B5
gatcgtgcaaatgatagatttgtgcggaagggtgagacaactcggggaaagaaggggagggtggcaagtgtaaaggataaaaatgatttcccagttccttgtttgaacatcgaattttgatagttaccaaatgggaaatatgagaaattaaagcactttctgctccaacg

SEQ ID NO: 19695 - DNA, 362 bp, Glycine max
  unsure (1)..(362): unsure at all n locations
  Clone ID: LIB3049-021-Q1-E1-B6
ggttttctttctgttattacacaacacactctgtgaaaaagggggagtttcttattccttctagacgcttccattgatcggcgatttctgatacatggcggagcatcacgaacacgaggaagtgaagggtgagtccttgttggagaagatttctgggaagatccacgaccacgattcctcgtcttcgtcggattccgacaacgacaaaaccagcgccactgattccttcaagtctaatgttttcaggcttttcggcagagaaaagcccattcatcatgttcttggcggtggaaaaccggctgatgtntttctatggagaaacaagaagatatccgcatcgacactcggagttgcgaccgcta

SEQ ID NO: 19696 - DNA, 289 bp, Glycine max
  unsure (1)..(289): unsure at all n locations
  Clone ID: LIB3049-021-Q1-E1-B7
ggagcaaaaccctaatccctatttttcttcctcagtagtgtcatttacgcttctcttctctgcagcaactatgcctaaccctaaggtcttcttcgacatgaccatcggcggtcaatctgctggccgcatcgtgatggagctctacgccgacgtcactccccgcaccgccgagaacttccgcgcgctttgcaccggcgagaagggcgtanggcggagcggcaagcccctccactacaagggctcgtccttccaccgcgtgatcccgagtttcatgtgtcaaggtggcgac

SEQ ID NO: 19697 - DNA, 374 bp, Glycine max
  Clone ID: LIB3049-021-Q1-E1-B8
gaagcactttacgtttttttcagccatggagtttcattgccttccaatatttctttatctcaatttgatgttgatgacagccaatgctgcgttaactcctagacattactgggaaacgatgcttccaagaactcccttgccgaaagcaatcacagagctactaagccttgaaagtaggtccatatttgaatatgccgggaatgatgaccagtcagaaagtaggtccatattatgatacgctggctataatcaagacgaggatgatgtgagcatacacaatatacaaatcttcaacaggttgtttttcttggaagaggacctgcgtgctggcaaaatattcaacatgaagttcgtcaacaacacaaaagccacag

SEQ ID NO: 19698 - DNA, 380 bp, Glycine max
  Clone ID: LIB3049-021-Q1-E1-B9
ggagtttcagaatttagagagagaattttattttgttttttcggttatctttattggtttctcttacatcgtttttgtaggcgctgaggaagaagctttggcagcataactttgttggggagcataaaattcaggcaagcccttgaagttggagagtattagatgggaatcttagaattttctctctagaccaaagaaatggaggtatatggaaattctatggttgcagctccttcaaatgttatttatctgtccagtattttgggccaaggcggtccaattcccggtcacagatgcaactggaaatgtgaaaatgaacatgtttgtggaaacatgttacccctgaggctaacagggctgactcacatttgtgataaaaa

SEQ ID NO: 19699 - DNA, 350 bp, Glycine max
  Clone ID: LIB3049-021-Q1-E1-C1
tggggagaatgaagcgagtgtgtagattctcttctgacgcaacaacgcgagcagctctgttgttgctcatgcaatcccatcataatttccatggattctcaaaccccaaaaccactttctctccctccttcgccaccgccctatctcatcatcgcaatgttcataccgtcccaaacatatactctgacatcactcccttgttcaccgccaagtcttgctcttcgccgaaacaggatctcatcaacaaggtcacgattctcaaaaacgagctcattagagattcctgcgactctgctagggttcagaccattttggacgatagtttcgacactttgtttcggcgtcacccc

SEQ ID NO: 19700 - DNA, 308 bp, Glycine max
  unsure (1)..(308): unsure at all n locations
  Clone ID: LIB3049-021-Q1-E1-C10
gagagggtgtttatttttcagtgaacgtgcacttgctgtggctgcaacacaattgacttctcttangtacttgtgggtgcaaggttatggtgtatctccatctggacgtgatcttttggtaatggctcgacccttttggaacattgagttgattccttctagaaaggtggctacgaataccaatccagatgagactgtagttgttgagcatcctgctcatattcttgcatattattctcttgcanggcaaggatcagattttccagatactgttgtgcctttggacactgccacatgcgttgatacct

SEQ ID NO: 19701 - DNA, 244 bp, Glycine max
  Clone ID: LIB3049-021-Q1-E1-C11
acgcgtcagtccagctgcaaaagaccaccgaaggggctacgtgctgatcattcttcttcatctcatgatgaagccagtgcttttcctttaagtccttgataattgcgtacttgtgtgaatttcactcgaagccagactgatgttcatcgtaagtttcaaggttgagagtctttacatgtcatacacaaggactcgacagcagtccctgtacaactagggaaccactcgacttgttcacgagagg

SEQ ID NO: 19702 - DNA, 379 bp, Glycine max
  unsure (1)..(379): unsure at all n locations
  Clone ID: LIB3049-021-Q1-E1-C12
ggaggatgaagggaagcagcangaggaagacggagaaggagaagatagaggatgaagtggaagaaatgttgcgagcggcgcaagaccaaatcctcttaaatctcacccaagcccacatagcagcccgtccttctccggatcatgatcatgatctggatctggatctggatctggagcgtcgattccaggccctcaaaatgaaaaccaaatctcaacctcaagatgatctctctgccagattcgatgccctaaaagccaaatcatcatcttctgttgtcacagcatccaattccaacgcccaatttgattatgctgaaaaagaccaaaaggtcaagtttcagaaactcatccagtgggctaaggatgctgcacgtctcga

SEQ ID NO: 19703 - DNA, 298 bp, Glycine max
  Clone ID: LIB3049-021-Q1-E1-C2
tcaacggggacattgatacgggtgtgaaaatactcttctgaggcattaacgcgaggagctctgttgttgctcaagtgatcccatcaggatttccatggattcgcaaaccccaaaaccacgttctcaccctccttcggcagcgggcaatctcatcatcgcaatgttcaaaacgtcccaaacatatatcccgacatcactcccatgttcatcgacaagtcttgctcttcgccgaaacaagatttcaacaacaaggtcacgaatctcaaagacgagctcattagaaattcctgcgactctg

SEQ ID NO: 19704 - DNA, 81 bp, Glycine max
  Clone ID: LIB3049-021-Q1-E1-C3
gaaacacgacaggaggggaacgcaattgccacatcgatttcttcatggatttcaccttgagcacaaggctttacgtttcac

SEQ ID NO: 19705 - DNA, 284 bp, Glycine max
  Clone ID: LIB3049-021-Q1-E1-C4
gaaactagaaaggagaataaagaaatgggcgcaacgaagagtggacgagttaaacttggagcacaaggccttgaggtttcaaagttgggattctgatgtctgggtcttactggagcgtataatgagcctctcccggaacaggatggcatagctattatcaagtatgcattcagtataggaatcacattttttgataccgctgatgtttatggagccggtgctaatgaaattttgcttggaaatgctctgaagcacctacctagagaagagatccagcttccccc

SEQ ID NO: 19706 - DNA, 336 bp, Glycine max
  Clone ID: LIB3049-021-Q1-E1-C5
gaaagtgcttgttttgtttgttgctacagttttggtagcatatgaatgccatggctcagactaccagaagttccctctccaaatgaaaactgggtttggtgggcaatacagcaatgaggtggcatgtgccagttggaggcttggcgtggaagcaaacaacgtagtcaagtggcaaactgttcctgcagcttgcggagagtacatagctgactacgttctaggagaccaatatagatcagattccaaaacagttaaccaacaagcttatttctatgctaaatcgctcaaactcaccaacaaagatgtctttgtcttggacgttgacgacactactct

SEQ ID NO: 19707 - DNA, 328 bp, Glycine max
  Clone ID: LIB3049-021-Q1-E1-C6
gaaagtgcttgttttgtttgttgctacagttttggtagcatatgaatgccatggctcagactaccagaagttccctctcgaaatgaaaactgggtttggtgggcaatacagcaatgacgtggcatgtgccagttggaggcttggcgtggaagcaaacaacgtagtcaagtggcaaactgttcctgcagcttgcggagagtacatagctgactacgttctatgagaccaatatagatcagattccaaaacagttaaccaacaagcttatttctatgctaaatccctcaaactcaccaacaaagatgtctttggcttggaccttgacgac

SEQ ID NO: 19708 - DNA, 341 bp, Glycine max
  Clone ID: LIB3049-021-Q1-E1-C7
gaccgcgaaaaccagatcaatttcgtcatggatctcttccaccagcgcgtggagcagtctcaactcaccgatcccctctccaacgacgccgttttcggcgtcatcgacggaatcgacttaggtttccccgccgccgacgacttcttcatcggacggagattctccgtcggatccgacgaatccgacggaggacactctcactcgcacgcggggattgacgacggtgtcctggggttctgcgcgcattccgacgaagactacaacgaaaacgacgacgttgcgagcatccctctctgctgggacgcgcttcaattgggaagacacaacaacaactacgatga

SEQ ID NO: 19709 - DNA, 323 bp, Glycine max
  Clone ID: LIB3049-021-Q1-E1-C8
gactactacttgatcacatcgtattctctatgctattccgattaatcaatcatagatagatccattattcatagttaaacataataactgttgtgttacatctcgtgaattgttacaactgcttaaccattttctattgcagatggcttcgtcggttctctccgcagcttcacactctgtctcatcctcatgttctctgtccaccacgcacaagggaaagcccatgattagagacaacactttgggattccacagaggacccaattccttctctagttcaaggtctaaaggtcggatctctatggctgttgcagttaacgttt

SEQ ID NO: 19710 - DNA, 373 bp, Glycine max
  Clone ID: LIB3049-021-Q1-E1-C9
gaagttactagggttttagaagccagcagcagtaggcaaaaatgtcgagttccatgatgacgctctcaaggaggctctattgctctctgcttcgaacccccaatgcatatcgccacttctccaccgatcaccttttcgactcggacgaggccgactcagcacccgacccacccgcacccgacgccgttcaagaagaagaaaagttcgtcatcgatcgccccctcgagaatggcctcgacgttggcatctacagggctattctggtatggaaggcggggcaggctcctttgcagaagaagcttaagagtggcacctccgttaatcctccccccgttcggaacggaagggattcacaaaaaccgcaggcctcgcg

SEQ ID NO: 19711 - DNA, 386 bp, Glycine max
  unsure (1)..(386): unsure at all n locations
  Clone ID: LIB3049-021-Q1-E1-D1
gagcctcagcagaagcagaacgaggagaagcagaaggagcaaaagcaatggcgccgaagaagccgagaaccacgacaaggaaccctgatttggttagggggattggcaagtattcgaggtcgcagatgtaccacaagaggggcatctgggccatcaaggccaaaaacggtggcgttttgccccgccacgatcccaagcccaagcccgaggccccggcccagaagccgcccaagttctaccccgcggacgatgttaagaagcccctcgtcaacaagcacaagcccaaacccgcgaaactcagggctagcattactccagggactgtgttgatcctgcttgctgggaagttcaagggaaaaanggttgttttcctgaagcagctccca

SEQ ID NO: 19712 - DNA, 382 bp, Glycine max
  Clone ID: LIB3049-021-Q1-E1-D10
ggcacaagtttgttgagatagctagaagcaataagatgaaaatgaaagtgcttgttttgtttgttgctacagttttggtagcatatgaatgccatggctcagactaccagaagttccctctccaaatgaaaactgggtttggtgggcaatacagcaatgaggtggcatgtgccagttggaggcttggcgtggaagcaaacaacgtagtcgagtggcaaactgttcctgcagcttgcggagagtacatagctgactacgttctaggagaccaatatagatcagattccaaaacagttaaccaacaagcttaattctatgctaaaatcctcaaactcaacaagcaaaaatgtctttgtcttggacgttgacgacactactctct

SEQ ID NO: 19713 - DNA, 264 bp, Glycine max
  Clone ID: LIB3049-021-Q1-E1-D11
ttggggcagcttggtagttgcattgaaatggaggtggtacgtatgttggagttagtcgctagagttttgcgcatcacaccaatgtcacggcccataccagcagatgttccggcatcagaatgaaaactcggttaggttggcaatacaccaatgatgtggcatgtgacagttctcggcatggcatggaagcaaacgacgtattccaatgtcacgctgttcctacaccttactgccattagatacctcatcacattctatgacatc

SEQ ID NO: 19714 - DNA, 335 bp, Glycine max
  Clone ID: LIB3049-021-Q1-E1-D2
ggagcgagctagatcaggtcacatatatgaacaacatgttcggtcaatatcctttgttttcactggcttctctagccacattccgtgtcggaaccgaggccgcgaacgcgcccgagaatcctcctcctccgctcacaggcgctgcgagggagttcttggaagcgcagaagcattctggagcccaagtatgcctggaagcactcagctggagcgagaagctggggaacgtgtctagtctgatggtccgttaccagcggaacaacaacgggtgcgagttcgcgaacttaacggcgatcaggtatagcaggaatcaactgtcggcatgggtgacggat

SEQ ID NO: 19715 - DNA, 199 bp, Glycine max
  Clone ID: LIB3049-021-Q1-E1-D3
aaaaggggaatgaccctgggcgaattcaataaccacaaaggattcatccttcatcgcctcctcaaggctcgttgttgcatgggtagaccctggctcaaggccttggctcgcaaatactggcaagagaagatgatttgccgcaagtgctatgcacgtctgcatcctatggctgtgaactgccgcaagattaagtacggtc

SEQ ID NO: 19716 - DNA, 277 bp, Glycine max
  Clone ID: LIB3049-021-Q1-E1-D4
ggaaagactctgaaccagtgcaatctccagtatgactccacgcttcatggacttcttaggcctcgcagtttcatgaaatagccctgtggcatagacatggctagtaatcacagagtgggtaaaataatttgccgcaaatgtgctccacgtcaggatcttatagcctttcatcgccgcctggcttggtcaggtcttacacagtaatggaggcctcaagacatgattcagtaacttctgtgtgatggtgttggtcacagtcttcgtgttggtcaatgtt

SEQ ID NO: 19717 - DNA, 327 bp, Glycine max
  Clone ID: LIB3049-021-Q1-E1-D5
ggagatatttcgaatttcgatactttgatcagatccacaacactccttcatccatgacgcttggctcttcaggatccagtgtcgtggttccaaggaacttcagattgctggaggagcttgagaagggagaaaaaggaatcggagatggaacagttagctatggaatggatgatggtgacgacatttacatgcgctcttggactggaaccattattggcccctataatactgtacatgaaggaagaatttatcaattgaagttgttttgtgataaagactacccagaaaagcccccaagtgttcggtttcattcacgaatcaatatga

SEQ ID NO: 19718 - DNA, 320 bp, Glycine max
  Clone ID: LIB3049-021-Q1-E1-D6
ggtagttccaccgagtaccaacaatgtcgaatcgatgtcacggaggatccgcgggaaacaagttccccatgtccctgggtctgccggtgcctgcgaccgtgaactgcgccgatgccaccggcgcgaagaaccgcaacatcatagcactgaaagggatcaatggtacgctgaaccggttgccgtcaacatgcgtcagagacactcttatggccaccgtcatgatgggacagcccgatctccgtatgaaggtgctgctcgccgtcatcgtccgccatctcatgccttggcgccaaaaggacggtgtttacatctacttcaat

SEQ ID NO: 19719 - DNA, 325 bp, Glycine max
  Clone ID: LIB3049-021-Q1-E1-D7
tggggtagttccaccgattaccaacattgtccattcgacgtcattgacgatacgccgtaaacaagttccccatgtccctcggtctgcaggttgctgcgacggtgaaacgtcccgttgctaccggcgcgaaaaatcggaacatcattgcagctgaaagcgatacattggtcgacttaacggttgctgtctgctacattccgataactcttacagtggaagtataaatgggaacgctcaatctgtgtatgatggtattgctcaccactttcatttgctttctcatacctttgagccaaaatgaccgtgtagtcttcggtttcaaaca

SEQ ID NO: 19720 - DNA, 326 bp, Glycine max
  unsure (1)..(326): unsure at all n locations
  Clone ID: LIB3049-021-Q1-E1-D8
gaacaaggtcaagagatagatctatttggcgagattgctggcatatcctttagcccggacacagaggctctatttgtgggtattgctgaccgaacctatggtagcttgttagagttcaacagaaaacgtcactataattacctagactcgttttgatggagtggagtgcctcaagatgtacagcaactactccatgtgcatatccaccagaggattcctcaaataggtttgaaatatatatggtgaaatgtttttctagggttatttttctgttgaatttagtggagaagcaagttgtaaattttggctatangaagctatttttg

SEQ ID NO: 19721 - DNA, 320 bp, Glycine max
  Clone ID: LIB3049-021-Q1-E1-D9
gacgaaaacggcgtcgccgccgtagctcctgcaaaaacgacgcgtcgtcgcacaagactccgtcgccacaagttgagcttgtgcagcaagaaacccctgcgtcgggttccgctctgtctgcctccgacggcctgtctcgaagcttctggaaagccggggactacgttgttggtccctcctcaaagcccactcccttccaaggtcacttggaacatgctcgggtgcaccccaagtttttgcattctaatgcaacttcccataaatgggcttttggagcaattgctgagcttgtggataatgctgttgacgagattcaaaat

SEQ ID NO: 19722 - DNA, 314 bp, Glycine max
  Clone ID: LIB3049-021-Q1-E1-E1
ggttctagtgtgtgattgtttgttgttgtaactcgttcttcttcttttgttgttctgtgtttgtgtttgttttttctctcacctgaaaatgtcttgctgcggtggtaactgtggttgcggaagctcctgcaagtgcggcaacggctgcggaggctgcaagatgtacccagacttgagctacactgagtcaaccaccaccgagaccttggtcatgggagtggcacctgttaaggctcaatttgagggtgctgaaatgggtgtgcccgctgagaacgatggctgcaaatgtggaccaaactgctcctgcaacccct

SEQ ID NO: 19723 - DNA, 295 bp, Glycine max
  Clone ID: LIB3049-021-Q1-E1-E10
cggggaaacagagagtgatttcagtgagtgatcggtgttcacctgatcccagcataaccgtcagcgttgatcgaagaccatggcgatgatgaagatcgccgtcgggaaagcctgaacacgggacgcaagccttaggcgttaaatgtcgccttggctgagtctacctcatccctcatccgtctgttcgtcggctaaagatcaggtctcacctgatcgtcactttttccaaggcgtactgccagtcctgctggggagaactaggtgtctactgcgcattgaatcacgttccacatgt

SEQ ID NO: 19724 - DNA, 324 bp, Glycine max
  Clone ID: LIB3049-021-Q1-E1-E11
gaataccaaattttcaattcctttggataaaaaattttccccaaagctgatcgagaagccagccaggccaggagttgaagaatgggaagggggaagatcgaaatcaaaagaatcgagaacacaacaaatcggcaagtgaccttctgcaagagaagaaatgggcttctgaagaaagcttatgagctgtcagtgctgtgtgatgctgaagtttccctcatcgtcttctccagccgtggccgtctctatgagtattccaacaacaacataagatcaaccatagagaggtacaaaaaagcctgttcggatcattcaagtgcgagcact

SEQ ID NO: 19725 - DNA, 361 bp, Glycine max
  Clone ID: LIB3049-021-Q1-E1-E2
gattgtagattgtagatccatccactcgctcgcacaggcatcacgtgagtttgttgtgatttgaatggagggaagtggacgtggcggtggcagtggcggtggttcaccttctgcacctgtgaagcaatacttgcaggaattctcgaagctttttcagtactatctggataaatccactccccatgccctctacagatggattgggactttcgtgattgcatccatctacgttctgcgtgttgtttatttgcaggggttttacattgtctcctacggcctcggaatctaccttctcaatctcttgattggctttctctcccctttggttgatccagagctcgattcctccaacgcccctatg

SEQ ID NO: 19726 - DNA, 392 bp, Glycine max
  Clone ID: LIB3049-021-Q1-E1-E3
gtatgattgtgcatttgtacttggaggaagaaacaccaaacgagaactgaaaaagaaataagaaatacacaaatggcagagcttctgttattcttgaagccgttctgagtcctcaagtgcctaaacttttggttttttttaatcctgggactaacatgtaatggctcccagatcaattcaaccaagcatgggtaaatgtaaaagtccacaatcaacaatcaaagtcaattatggtgatgtggcaagtgatgtttgggtagttgatgtggccagtgttgacatggtagtaatgtggtaagtgacgtggcaaagctgtggtagatgattggatgtgactcaagttttgacttgcatgtgtaagcatgtacgcaaaaagaaaagagaagataaaa

SEQ ID NO: 19727 - DNA, 221 bp, Glycine max
  Clone ID: LIB3049-021-Q1-E1-E4
gggatgggatgtcattgatgactgctgtggtgcctacctccttattcaactgtgcgctcgctcttgtccctttcactgtcacaagtggccggggccgctgccggtgttcatgttcctgacctgcaaatcttatgctcttcatgcatcctcagacttttatggagtggctaccatgtctagtcctccaatcattcatcctcgtcttcgtccacttccttctc

SEQ ID NO: 19728 - DNA, 319 bp, Glycine max
  Clone ID: LIB3049-021-Q1-E1-E5
gagtggaagagtgaataagagatatcaatatattatgataatggagggatacaataagaaggttatgattgtggggatggtgttgggcatggccatgattgggatggccaatggccaatactcgttttgtcgcatgcccagcgatgggttggcggcatgcaagccgagtgtgagtggggactatcctgctgatccctccactgcttgttgctcagccattgccaaggctgatcttaaatgcttctgccgcttcaaggattcgggccttctctctatgtatggtgttgatcccaacaagtgcatggaactccctgttaag

SEQ ID NO: 19729 - DNA, 278 bp, Glycine max
  Clone ID: LIB3049-021-Q1-E1-E6
gacagaaaccatgacgacggtggtgcccacctccgaagaaaacgctgcgctctctgttgtccgattcgcctctgagatcgcctgggccgatgccagtctcgaggttgctgagcctcaaattattagactctgcatggaggctgaagaatttttcgttatgggaaaaaggtttgtactagcatcattgatgattaccacctctgcagaattggtttccacagttgtttctgaaacttataaatcctccatcttcaccatcatctgcattcttgtgacaa

SEQ ID NO: 19730 - DNA, 313 bp, Glycine max
  Clone ID: LIB3049-021-Q1-E1-E7
ggtggtggtggtcgcggtggtggagggggatacaaccgtagccgtggccgtggaggctatggccgcggctgtggatatggcggtggcggtggcggtggctatggcggtggcagagaccgtggttatggtggtggtggtgaccgtggttactctcgtggtggtgacagtggtgatggaggctggataaactatggcttgatgtcgttgattatggtttatgattatgctcactaattttagttgtgtttgagtttgagtatctttatggttttgtgtcaccgtagttcatgtttttgaccaataaatctggttg

SEQ ID NO: 19731 - DNA, 360 bp, Glycine max
  Clone ID: LIB3049-021-Q1-E1-E8
gatgtcattggcgagtgatcaataaaatactaagttatttagtattatgttctgtcgtaatcctttcaagtcacaagctttaaaagagggtgtaagtgtaacttttcaattcctcaacctcaagataataataaagctaaatcatagtagtgaggagtgactagtacaaacagaatccaaagctttttttttcttcttcttcttcttctttctaacgccatgtctgggagccaccaagagcagccactgttagagaactcgttcatagaagaagacgagccgcaagaaacagcttatgattcgtcggagaagatagtggtggtcggagtcgacgagtccgatgacgaggagaattggggg

SEQ ID NO: 19732 - DNA, 379 bp, Glycine max
  Clone ID: LIB3049-021-Q1-E1-E9
gagagacagagtgtatctgtaactgaaacgcgctggaatcaaatcttagcaaatcctaaatcaaactcaaaggatcgaactttggtttgagatttcatcactgattgtgattctcttctcctacaaaacttggcacccgatctctctctataatcaaatatcattcaacaataatcctcatttgttattccctattttctagtgagaagagatattcatgagagatgttgagcatttgcatctggtgaaatccatttgaagattctggcgtgattttttagggtacttccgaaatcgctcttcgaattgaatcggaggatttaaaagaagtgtttttttttttggtttgctttaattttcttccttttgttgttgtttg

SEQ ID NO: 19733 - DNA, 201 bp, Glycine max
  Clone ID: LIB3049-021-Q1-E1-F1
ggagtgagggcattgttgtttatgtatagataaatggcatcatctcagtccagtaagagagttgacgctgtcgattcgggggctgcttccgttctccttcgcgccaaagatggtagtgcttttgctcgatgcgacgactgccagaataatgtgccggttgcactcatcgacatgcatagttgcagccttgaagctaagatt

SEQ ID NO: 19734 - DNA, 201 bp, Glycine max
  Clone ID: LIB3049-021-Q1-E1-F10
aaaaggggtaaggaaaaccctaaaaaacaattccaaaaacgccgtttaccgggttggtgccaaccctcaaccaaattgaatgggtccccaagggtggctaaccccaacaaatccgaaaccttctgtttctgttactgggtttaaatacccttccgcttctgctgctgccacgtctcttgcccaagacgctcagaacaaagg

SEQ ID NO: 19735 - DNA, 304 bp, Glycine max
  unsure (1)..(304): unsure at all n locations
  Clone ID: LIB3049-021-Q1-E1-F12
ggagtatcaacaaagaatactcaatataatatagtgggtaacaataagcttattataataataatattgttaagctagctctaaaccaatggtaaataacgtgatctgttctccgggagattgtgaaccgtggaattgaatcgtcangaccaaacgctgggtccttgacgttttcggtgagggtgagaangcgcttaccggattttcttcaatcggtgaaccttaagtacgtgaaattgggttaccattatctgataaaccatggcatatacttgttcaccataccggttcttctcgtggtgtt

SEQ ID NO: 19736 - DNA, 367 bp, Glycine max
  Clone ID: LIB3049-021-Q1-E1-F2
gataccatagaagaagcacaaagagaagcattagcactaggagcagcaacaactagtctcagctgaaatggcctcttcagtgatggcatctgtggccctcaaacctgcccctttcactgttgagaagtcctcagtgagaggccttccctctctctcaaggaactcttcttcattcagagttgtggccagtggcaagaagatcaagactgacaaaccttatggaattaatggtggcatggctttgagggatggaactgatgcatctggcaggaaaggaaagggaaagggtgtttaccagtttgtagacaaatacggtgctaatgtcgatggttacagtcctatctacgacaccaaggactggtctcca

SEQ ID NO: 19737 - DNA, 387 bp, Glycine max
  unsure (1)..(387): unsure at all n locations
  Clone ID: LIB3049-021-Q1-E1-F3
gtttcaatgtgtgattgtttggtgttgtaactccttcctgctcctttgatggtccgtgattgggtttgtttttttcctaactgaaaatgtcgtgctgcagtggtaactgtggttgctgaaactcctgcaattgcaggaactgctgctgacgctgcaagatgtacccagacttgagctacactgagtcaaccaccaatgagaccttggtcatgggagtggcacctgttaaggctcaatttgagggtgctgaaatgggtgtgcccgctgagaacgatggctgcaaatgtggaccaaactgctcctgcaacccctgcacttgcaaatgangtgttgggagagcaagcttcaagcagagataacccttaattatgaataatgataaactat

SEQ ID NO: 19738 - DNA, 310 bp, Glycine max
  Clone ID: LIB3049-021-Q1-E1-F4
ggcacaagggggagacagagaggggttccacccagttcatgtatgctattgtcattcgttcatcttacccctgcgtcgttcctctcgaactcgatttttcttccaaaagaacatgacgtgggaatgggaagactatgaatacagcatcaccggcacctaacgcgaacgcgactccggctccgattcctacctcaatttcgatttcatcgacgcactctccagagacaacgattactaggaaatactggaagtggatgacgactctacgggtgacgctattcgtgtcaattacgttagccacgcgctgaag

SEQ ID NO: 19739 - DNA, 322 bp, Glycine max
  Clone ID: LIB3049-021-Q1-E1-F5
ggagtgagggcattgttgtttaggtacagaaaaatggcatcatctcagtcgaagaagagagttgacgctgtcgattctcgcgctgcttccgttctccttcgcgccaaagatggaagtgcttttgctcgatgcgacgactgcaagaagaatgtgccggttgcactcatcgacatgcacagttgcagccttgaagctaaaattaaaatgaacctagatgctcaagttgtggaacaggctgctgaagctaagaagccagagaggaagaagcccaaatccaaagagcctatggcaaaaaagggcaaagttgagaaagtgaagaaag

SEQ ID NO: 19740 - DNA, 358 bp, Glycine max
  unsure (1)..(358): unsure at all n locations
  Clone ID: LIB3049-021-Q1-E1-F6
ggtctcgcggcactgatgttcaagtacaaaaaacatgacatcatctcactctcgcaatacagttaacactatcgtctcccccgctgcttccgttctccttctcgcaaggaatcgatctgcttttgctcaatacgacgactgcatcaagagatgtacttgttgcacacgtcgacatgcacagttgcaactttcacgctgctgttatcatgggcctagatgctcatgttctggatcatgctgcagatgctaaggtgccaganatgactagtcccagatccacagatcctatggcaaataaggctaaagttaataatgttaagaaagtcaacgatcctaacatgcctaagcgtcctcccac

SEQ ID NO: 19741 - DNA, 337 bp, Glycine max
  Clone ID: LIB3049-021-Q1-E1-F7
ggaattcctgcccctgacaaacctcaaccacttggtaccatcgctgctgcaccatggggctcagcactcatattgccaatctcttacacttacatagccatgatgggttctaaaggactcaccgatgcatcaaagatagccattttgaatgcaaactacatggcaaaacgattggagaattattacccggttcttttccgtggagtcaatggaacagttgctcatgaattcatcattgacttgagaggctttaagaatactgctggaattgagcctgaagatgttgcaaagcgcctcatggactacggttttcatgcaccaacaatgtcatggcctg

SEQ ID NO: 19742 - DNA, 329 bp, Glycine max
  Clone ID: LIB3049-021-Q1-E1-F8
gagcacaaacgttaaccaccgattccatttactgctgctacaactgcccaaaagttagcttccgcaaattccacactttcgattcagattctctctctcaaacctgctttcacaaacactcatgtggaaagggtgaggagcacaagaaacccttcatatggaaaaactctgaaattagggttttggtttcccccatagggagataatgaccgtagaaataatgaaagagggacgggatgatgaaacagctgttgggtaggcccgggacgattagcgggttcctgttgatgttcagccaatgcaccttcggtgccgcttcgattgccatt

SEQ ID NO: 19743 - DNA, 318 bp, Glycine max
  Clone ID: LIB3049-021-Q1-E1-F9
ggttctagtgtgtgattgtttgttgttgtaactcgttcttcttcttttgttgttctgtgtttgtgtttgttttttctctcacctgaaaatgtcttgctgcggtggtaactgtggttgcggaagctcctgcaagtgcggcaacggctgcggaggctgcaagatgtacccagacttgagctacactgagtcaaccaccaccgagaccttggtcatgggagtggcacctgttaaggctcaatttgagggtgctgaaatgggtgtgcccgctgagaacgatggctgcaaatgtggaccaaactgctccctgcaaccctgcac

SEQ ID NO: 19744 - DNA, 268 bp, Glycine max
  Clone ID: LIB3049-021-Q1-E1-G1
gaacaaacacgactcacacattgcatctgctaactctctctctctgcgctctccactgaaccgagtctgaaatatgagaagagggaactaactccaatggctgcacgtgtggctgcaaggtacggatccagaaggctatttagcactggttctgggaaaatacttagcgaggaggaaaaagctgcagacaatgcttactttaagaaagctgagcaagataagttggagaagcctgctcgcaagggtcctcaatcagaagctgtctcgg

SEQ ID NO: 19745 - DNA, 306 bp, Glycine max
  unsure (1)..(306): unsure at all n locations
  Clone ID: LIB3049-021-Q1-E1-G10
ggaagaaatattaatacacacaaaacanacgcagtttatgttgccgccctagactgttctgccactctttacgcaactatattttcctttttgcccagataaggttttccgttttcttcactgctctctcaccaaaggcgagttgtgaatggaagcacaaagcataaagtaaaagcatanagcatagttagttgagtcaatggaacgtgttgatcaaagaaatagttctgcatttggtgttccagttccaagaccaccaaaccagaaatctcgtatgccaacatctcaccctagtatcaatgtttc

SEQ ID NO: 19746 - DNA, 274 bp, Glycine max
  unsure (1)..(274): unsure at all n locations
  Clone ID: LIB3049-021-Q1-E1-G11
accacgcgtcagccagcgtccgccacgccttcgttacggtgcaaaaaacaacaaagggaaaagcacaaaaggaaattaacgcaaaaagtatcaaaaaaataactcggaaatagtttcactctgatcaaaatcaaactgaggtantgttcaatttctctctcatcgctataatagatcatcgaattacagatctttgaagattccatttagtgtcgaataacaacggaatcaaatcaaatcaaatcaaatcaatctcgattggaattttacgaat

SEQ ID NO: 19747 - DNA, 237 bp, Glycine max
  Clone ID: LIB3049-021-Q1-E1-G2
acgacagaacgggaacacatacgactcatatattgcatctgctaactctctctctctgcgctctccactgaatcgagtctgaaataggagaagaggtaggaactccaatcgctgcacgtgtggctgcaacgtaccgatccagaaggctatttagcagtggttcttggataatacttatccaggaggacttagctgcatagaatgctttatttattaatgctgagcattataatttgg

SEQ ID NO: 19748 - DNA, 210 bp, Glycine max
  Clone ID: LIB3049-021-Q1-E1-G3
acggaagggggggagaccgccgcattttggcagctacagagaggaatgagctcgactcgtctaaattgaccttggatcatcgtctttggggccgtctccaatacgtttttcgttggtcatcttaaggcttcttccagcatgaacagcccggccatggttgcttacgagctcaacgcttcgcacaataacgtttcccacttcgtgcttttt

SEQ ID NO: 19749 - DNA, 392 bp, Glycine max
  unsure (1)..(392): unsure at all n locations
  Clone ID: LIB3049-021-Q1-E1-G4
tatggccagtgagaaagccatggcatctcaaactgctgaggcaaagaaggacaagagggaaactgggttggccattcctaaggatttggattctgcattggctattcctggagttggaagaagcagagatcaacatccacatgtgtatagggtttctcctgaacagaggaaggctcttggctctggttcaaccaaagctttgaaggaccatatgaagtcctctgcaactgatggtaaaatgcaacagtggttccgtgaaggtcttgcanggccaatgttaagttctggcatgtgcactgaagttttccagtttgatgcttctccaagtcctggagcaatagttcctgcaacatcagtacccaatgtttccaccgaaaaacatcagaatgcta

SEQ ID NO: 19750 - DNA, 349 bp, Glycine max
  Clone ID: LIB3049-021-Q1-E1-G5
ggggagaaggaagaagattgacagagagagagaggaaggagcgcgaaaagactaaattgaccttggatcttcgtctttcctctctctccgattcgtttttcgttggtcttctaaaagcttcttccaccatgaacagcaaggccaacgtttccaaagagctcaacgccaagcacaagaaggtttctctcttcgtgctttttctttttattattatttcaatttcgatttgtgaatcctgcattcgctgattaaataattgcctcggatcattaatcggaacttgttcttggatttgaatccgtcgctgtccgatatgcatatcgcgaaattttgaaagtgagaaagtttc

SEQ ID NO: 19751 - DNA, 331 bp, Glycine max
  Clone ID: LIB3049-021-Q1-E1-G6
ggtgagaatgaagaagattgacagagatagataggaaggagcgcgatcagactaaattgaccttggctcatcgtctttcctctctctccgattcgtttttcgttggtcttctaagaacttcttcgaccatgaacagcaaggccaatgtgtccaaagagctcaacgccaagcacaagaaggtttctctcttcgtgcttgttcgttttattagtatttcaatttcgaattgtgaagcctgcattcgctgattatataattgcctcggatcattaatcggaacttgttcttggatttgaatccgtctctgtccgatatgcatatcgcgaaattt

SEQ ID NO: 19752 - DNA, 337 bp, Glycine max
  unsure (1)..(337): unsure at all n locations
  Clone ID: LIB3049-021-Q1-E1-G7
gatccagaacagaacagaacagaagtactttggctcttttcactggtggttgcattgaatcggaggggtaagtgggaagacgtgtcttgttttgtagctttcccttccctctctcttttccccgccgcatgtgccggattagacacgaactgcttccataattcacctcctccaatcaaccatcacaagatttcccactgattggatggaaggagcatgtgaatttcgaagttgggctgaattgattcctgatgccctgngggtaatcttcaccaatctttctcttcaggagaaggtaacaatgatccccaaggtgtgcaaatcatgggctaatgca

SEQ ID NO: 19753 - DNA, 303 bp, Glycine max
  Clone ID: LIB3049-021-Q1-E1-G8
gggtgaaaggatgtgcaagattaaaccattctcctgccatgaattgttgtttcctgagacgatttgggcgttttggaactgtgtggactgcggcgtttggttccactctgtcgtgctctaatgacagtgctctttttagagcttcggttgcatcttcggtccctgagccattgcataaatcactatggttgacctgtcctgtgttgcgtgatgtgtctccgcaatcctcaccttttctcgactaattcggaatgcgtccgctctaatcttaaacagtcagtctcgttacaacatcgtgtgtat

SEQ ID NO: 19754 - DNA, 382 bp, Glycine max
  Clone ID: LIB3049-021-Q1-E1-G9
ggtactcatcgtgacgaaattaacccaacagcacacagcactttccccaaatcaaatcatcgaaaccctaactcgcgattcccgatcgaaaccctaactcgcgatggcgatcttgctgggcgaaattcttcaatcgctggagctgtggctgaagctgatcaagaacccgcagcctcagccctacgtgaaccctaatctggaccccgttttgctggtgcccggtgtcggaggctccatgctgcacgccgttgacgaatccgaaggaagccgagaacgcgtctgggttcgcttcctcaacgccgagtacacgctcaagaacaagctttggtcccctttacaatccttcaaccggaaaaaccgagtccatggattcaaattcaag

SEQ ID NO: 19755 - DNA, 374 bp, Glycine max
  Clone ID: LIB3049-021-Q1-E1-H1
gggacctttcattggtgctgcacttgcagcactctaccaccaggtcgtaatcagggccattcccttcaagtccaagtgattcaatcaaaccgttcatgcttaatcaagttgggaacaacaaaaaaaatcaaaacaatgtttctgggtttcggtttcatttcatcaagatgatctgtttatctttttttttttaattttaatttaaagtctttgtattttgtatgtaaagatgtaaaattatgattattaggtggtgcatgtgttgcgtcatgggccaatgttatcctctgcttttaagttggaagaggcccagctcacgtgtgatgtacggctgtgattgtgtaatttgcaaaatcaaaaaatacccccgaatt

SEQ ID NO: 19756 - DNA, 241 bp, Glycine max
  Clone ID: LIB3049-021-Q1-E1-H10
ggcacacagtttactcactaactcactgtgagagcaaagaagaagaagaatgaaggacgccggaaagagccacaaggcgaacggaaagctgtcgccggagactcggaaggatcggaagtcggcgaacgggctgagcggatcgccgaagaagggaggcacggcgggaagttcacgtggatcggccacggctacgagcaagttgagatgccgcacggtgctatggacgccaaggacccgaact

SEQ ID NO: 19757 - DNA, 115 bp, Glycine max
  Clone ID: LIB3049-021-Q1-E1-H11
cgcgtcagcccaagcttcgttacggttgcaaaaaaacaacagaaggggggaattgaacggcaatcacaacttcaaaaacgttccaattggcaacttttccccatttgggttaaac

SEQ ID NO: 19758 - DNA, 244 bp, Glycine max
  Clone ID: LIB3049-021-Q1-E1-H12
ggcaaacaatttactcactaactcactgtgagagcaaagaatcagaagaaatgaacgacgccggaaagagccacacggcgaacggaaagctgtcgccggagactcggaacgatccgaagtcggcgacggggctgaacggatcgccgaagaatggaggccacggcgggaagttcacgttgatccgccacggctacgatcaagttgagatgccgcacggtgctatggacgccaatgacccgaactt

SEQ ID NO: 19759 - DNA, 325 bp, Glycine max
  Clone ID: LIB3049-021-Q1-E1-H2
gtgggcggatgcgagaaggagagagaatgggggatcggagtaatgattaacatgggctctgttgactgtagaacgctgctgccgaaaaccttcccgatccccaaggtaagtgagtaagcggtggctgataatggtggagaaggcgaacggtacgaaggatgaggtggttaccatacagtacaccattaagctccacaaacgcctccatggctgcacatttaagaagaaagctcctaaagctattaaggagataaggaaatttgcccaaaaggccatggggaccaatgatgtgagggtggatgtgaagttgaacaagtttgtctgg

SEQ ID NO: 19760 - DNA, 339 bp, Glycine max
  unsure (1)..(339): unsure at all n locations
  Clone ID: LIB3049-021-Q1-E1-H3
aaaaggggtcccctcccctgggaattttagcaagcaaaaacctaaccgggcctggcttccttggtcctgtttttcaacaaggatgagtcccaagttgaacacgcacttgttgtcaaagttatgggtcgtactggatccagangacaagttgaccaggttagagtgaagtttttggatgatcagaaccgtcacatcatgaggaatgtgaaaggacctgtgagagaaggagacattctcaccctactcgagtctgaaagggaagcaagaagattgcgctagatggtctcttttttttggcttgcctccaaattcgaacanaagcaatatttttcttgatat

SEQ ID NO: 19761 - DNA, 360 bp, Glycine max
  Clone ID: LIB3049-021-Q1-E1-H4
cgatgcgacaggacgacagaaggggagcctcagcagaagcagaacgaggagaagcagaaggagcaaaagcaatggcgccgaagaagccgagaaccacgacaaggaaccctgatttggttagggggattggcaagtattcgaggtcgcagatgtaccacaagaggggcatctgggccatcaaggccaaaaacggtggcgttttgccccgccacgatcccaagcccaagcccgaggccccggcccagaagccgcccaagttctaccccgcggacgatgttaagaagcccctcgtcaacaagcacaagcccaaacccgcgaaactcaaggctatcattactccacagactgtgttgatcctgc

SEQ ID NO: 19762 - DNA, 363 bp, Glycine max
  Clone ID: LIB3049-021-Q1-E1-H5
gactcatatgattcttctttaaaattacactaaaacaatgtgcaaaagacaaggcgatttgcgtaattgtcaaccaccacaccaaccaagccgcgtcgttctttttagtcactgataagaacaaacttccaccgtccgcggccatggcaacgctgtcttccgccgtcactctcgccgctaaacccctctcactacccctaaaccaccgcgccagagcggcggcggcgttccactctcccaaacctcatctcaagagagcggaattcaaatttttttcgaatggctcagctgcctctgtccactcccttacccgccgcctccgcgtttcctccaacgacgctcacttcaattcgggtcccgaag

SEQ ID NO: 19763 - DNA, 334 bp, Glycine max
  Clone ID: LIB3049-021-Q1-E1-H6
gatatagaatcaatgttatacgcctcatgttatgttatggcactccctaacagagctaaatattcttccttggtttcattttttttcctttctctttctgcaactgcaacttgaataggcaggctattttaaccagcatggacaggctcacgctgagaccagacaattcctgcttcttttcacacattcaaagagcttactcacacaccccttttaccagaactacctcgtttcaacgttttcactttcatctctcaccatccaaccacaccctcaggctcagaatagtttctagctctcagcaaaatgccaaagaaacccatacagtgtccat

SEQ ID NO: 19764 - DNA, 322 bp, Glycine max
  Clone ID: LIB3049-021-Q1-E1-H7
tgctactacaacagtaggtgttgagattggccaaggtttgagagatgtagatattaaaaattatattaaagttgagaaggtcccaggtgggcagctggaggattcgagagttctcaagggagtcatgataaacaaagatgtggttgcccctggcaaaatgaggagaaggattgttaacccacacatcattcttcttgattctccccttgagtataaaaagggtgaaaaccaaacaaatgccgaactgctcaaagaagaagactggagtctcttattgaagatggaagaagaatatattgaggagctatgcatgcagatattg

SEQ ID NO: 19765 - DNA, 355 bp, Glycine max
  unsure (1)..(355): unsure at all n locations
  Clone ID: LIB3049-021-Q1-E1-H8
gtgggaacaatggaagacataaaatctctgaaaggggaagttgatgcactaaaattatccggtggaaccggcagagccagcggcagaaaagacaataacggtgataaaggcaatgccgacaatgttgctgccagtaaaatgaaaggcttcatatcaaagaagatactctctaaaatttggtctagcaaagaaaaaagtggtgatctaagtagctctgatacttcagagagccctgcttctactgttgtagaggaaacaaaatctaccccatctagaagtangaggcattcagtatcttagaccatgttatgcagactttagagctccattcagttactgtataatcatctcaact

SEQ ID NO: 19766 - DNA, 385 bp, Glycine max
  Clone ID: LIB3049-021-Q1-E1-H9
gagaaatgcaaatgtcaagattcacccaattccgagctctactccgcggcaccaccagccaccagcgctcccctctccgccaccccgccgtcgccgattcttcatttgcatcaaaaccctcagtctctaatgcctccgcgttccgcccctcttcgccggtgttcacccgcaacaacgcctcggcaatagcacctttcgattcttctcctccaatttcgacaaaggatttgcgcagaaggtgtttgataagcctgcggcagcagtgacttcggccttttcgcggtaccgcgaggcaattgggttgcaaatcgaggcgttcttcaagaggaataacccggttcctttggggcgccggtggagttgtgctctgcgccgttctgtggag

SEQ ID NO: 19767 - DNA, 359 bp, Glycine max
  Clone ID: LIB3049-022-Q1-E1-A1
gaagaagaagaagaagaagatggcattgggtgttcctgctcttcccctgacatacgtggctcacgttctggcacttgttgccagcatcttggtcgtgctctgggtcctcaattttaggggtggcttggcttgggattctgataacaaggccctcatcttcaatcttcatccagttcttattgtcattggcttactagtccttgggggtgaagctattataagctacaaagcattacccctgaagaaggaagtgaagaaattgatacaccttgttttccatgccatcgcattaatacttggaatagttggaatttatactgccttcaagtatcacaatgaaagtgggattgccaatctct

SEQ ID NO: 19768 - DNA, 389 bp, Glycine max
  unsure (1)..(389): unsure at all n locations
  Clone ID: LIB3049-022-Q1-E1-A10
gatgaggaaatcgtggcaaataaaggaccacctgttttgtccatggangagaagctggcccttgtcagtggattgaagtgggtggatgaggtcataactgatgctccttatgcaattaccgagcaattcttgaatcgtctctttcatgaatataaaattgattatgtcatacatggtgatgatccttgcttgcttccagacggaactgatgcatatgctgcagcaaagaaagctggtcgttacaagcaaattaaacgtactgaaggagtttccagtacagacatcgtangaagaatactgtcttctttaagagatcannaaaaattgtgaagatcataatggcaccgaggtaaaacctcaagaagaaaacagtcaaaggctttccacat

SEQ ID NO: 19769 - DNA, 330 bp, Glycine max
  Clone ID: LIB3049-022-Q1-E1-A11
ggtctcgtggaagtgtaagcaagcaaaaccctagcggcgcctgctttctttgttcgtgttttgcatcaggatggagtctcaggtgaagcacgcacttgttgtcaaagttatgggtcctactggatccagaggacaagtgacccaggttagagtgaagtttttggatgatcagaaccgtcacatcatgaggaatgtgaaaggacctgtgagagaaggagacattctcaccctactcgagtctgaaagggaagcaagaagattgcgctagatggtctcttttttttggcttgcctccaaattcgatcaaaagcaatatttttcttgatattt

SEQ ID NO: 19770 - DNA, 413 bp, Glycine max
  unsure (1)..(413): unsure at all n locations
  Clone ID: LIB3049-022-Q1-E1-A12
gcaaaagaccaccaaaagggggaagttaaaaaggttgaaacccttgggccggggaaaattgattgtgataatttcaaggcaaaccttctaatccacaagaataagccggaaattataaatgtgaacataggtacaacggtaaaaggggctgtggatgatcttgatctggtcatacngaaacttgaagaagctggattttcacatgacagattctacatccattgtgatggggctttgtttggtctcatgatgcctttcgtgaaactagctccaaaagttacttttaagaagcctattggcagtgttaatgtttctgggcacaaatttgtanggtgtcccatgccttgtggtgtgcagataacaagattggagtatgtaaatgctcttgccagggatgtggaataccttgcttc

SEQ ID NO: 19771 - DNA, 368 bp, Glycine max
  Clone ID: LIB3049-022-Q1-E1-A2
gaagccaacatcgaaatttggcaaaacatttaatttctatctaaaatggtgacttatatctcaaactattctcttctctttgtaatgctggctctgactataacaggcctaatagaagtaaaaggaaacacatgttcacaaccattgggtggatgtggtcctatgggacaatgtgaccagagatgtaaagctctacacattgatggacaaggatcttgtgacttaggcttgtgcacttgctactacggttgtgcaaggcctccaccaagtccaaccccacctaaaatatgcaataatggttttggggtttgcactcttcagtgtggtgatgcatgctgtaatgcaaattgtgcaagaaaatattatca

SEQ ID NO: 19772 - DNA, 369 bp, Glycine max
  Clone ID: LIB3049-022-Q1-E1-A3
caacgaggaacggatgacatcagtaagtaacacctgaaaatacaaacgagttccttcaccttttcggcgatttagcttcagcactggctttacaggtaaatgttctggctgtaaagatgttgcacatgtgccacatcagagctccatagcagcacttaaatctagttcagaaaatgtgagaggttatgctaactcaaaaatttcacgcaatgataaacctggtaatgctgtcaaaagcaggtctagtagccctttaaggagactactggatcccctgctgaaaccgaagacatcagaccatcgctcggtggagtcatctcaaaacgattcagtggtaatacagaagaattgtaagtcagctaatggggg

SEQ ID NO: 19773 - DNA, 357 bp, Glycine max
  Clone ID: LIB3049-022-Q1-E1-A4
cagggggcaatgaaaaagttcaggatcttctcctcctgaatgtcacgcctccgtcacttggtttggagactgccggtggtgtgatgactgtcctgatcgctacgaacactacaattccaacaaatatcgaacaagttttctcaacatactctgataactagcctgatgtgcttatccaagtctttgaaggtgaaagatcatagaccatagataacactttgttgggcaaatttgaactatctggcattcctcctgcacacaacggtgttcctcagattacagtgtgctttgacattgatgccaatggtatcttgaatgtctctgccgaatattaaaccactggccatataagtcaga

SEQ ID NO: 19774 - DNA, 344 bp, Glycine max
  unsure (1)..(344): unsure at all n locations
  Clone ID: LIB3049-022-Q1-E1-A5
ggtattgagcgtggagaaagagaaagatgatgaggttaaggtggagtttagtcgtaacggtcacgttcgctgttttgctgttttggattggatcgctgcaagttcaagcctctaattctgtttccgccttcgttcaaaacgccatctactccaacagaatcgccgttttctccaaatcctattgcccctactgtttgcgcgccaaacgcttgcttgctgagttcaatgagaaaccgtttgtggtggagctcgatttgcgagatgatgggtatcaaattcagagtgttcttctggatttgataggtagaaggacagtcncgcaagtatttgtgaatggcaaacat

SEQ ID NO: 19775 - DNA, 396 bp, Glycine max
  Clone ID: LIB3049-022-Q1-E1-A6
gaagtattcttcaaaaaaagaaggatctaagtcatgctcttgcccatactcttgcccttgctcacgaaataccaacccaattcattggaaagattctataaaaatcaaggtaatggtgaacaaatcaaataataagattgtgttggccgaagcagatggagattttgttgattttcttttcagcttcctcacaacaccccttggatctattctgaaccttactaacggcaaatttcccttgggaagcattggtaacttgtacagaagtgtgaagcgtctcgatccatcatggttcaaatggtcatctaaggaatccttactgaatctgatggtggctcctcaattttggttgcaatagcagcccatttcaagaagactacactcctaattattggt

SEQ ID NO: 19776 - DNA, 364 bp, Glycine max
  Clone ID: LIB3049-022-Q1-E1-A7
gaaggaaattgaggacaaaatctcagggaggaacaagaattcaagccttaggaaccgtaatggaccggcgcagatgccctacactgtgcttcttcctaccagtggggaaggccttactttcagaggaattcccaacagcatctctatctaatgagagtgtgtggtgtgtggtgtgtggttttctttccttccaacgtacctctcattgacaaataaacgtgcaaacttatgtgtgcataattttcttatgtatgcttaagttttgtaattggatgctatctagtttttcatatctaatagggtgttgtgtcagtttttatgtatagtattgtgctcctatcatgttcacccgtatcatgttcac

SEQ ID NO: 19777 - DNA, 278 bp, Glycine max
  Clone ID: LIB3049-022-Q1-E1-A8
gaagtagactgctgacatagacggatggacgtacgccacgtcagtccttacgtgccgttgggcactctttcatatgcgcgttcataggcatggtcccaacactttctcacggccatgctttcaggccaattactaatagcatctctaccgttccacagtcagcagtcggtgatgtgcgcttctctatccaactaacggccgtctcagttgaccagctgtcgtagtctcagccgattcatctcgttacatatgtataactggttgagctccgtgtatgg

SEQ ID NO: 19778 - DNA, 329 bp, Glycine max
  Clone ID: LIB3049-022-Q1-E1-A9
ggccaactcggttgctatcatcgagtgagattgagtgattggttctcttgcagcatcaaggtttagtgacaccattcagacgggaaatgggtcgtggggtcaatgctggtggtggacatagttccttggattatctctttggcagtggggtacctgccatcagtgcaaatagtgctcgcactcaaaatgcaagtgctccttcaccaccggttgataagcaaagtcgagcaccatcaccagcaccagcacctgcatctgcagcagcagcatcactaccacctgcagcatcaccaacaccagtaccagctgataagcaaattccagctgga

SEQ ID NO: 19779 - DNA, 387 bp, Glycine max
  Clone ID: LIB3049-022-Q1-E1-B1
gcacaagtttgttgagatagctagaagcaataagatgaaaatgaaagtgcttgttttgtttgttgctacagttttggtagcatatgaatgccatggctcagactaccagaagttccctctccaaatgaaaactgggtttggtgggcaatacagcaatgaggtggcatgtgccagttggaggcttggcgtggaagcaaacaacgtagtcaagtggcaaactgttcctgcagcttgcggagagtacatagctgactacgttctaggagaccaatatagattagattccaaaacagttaaccaacaagcttatttctatgctaaatccctcaaactcaccaacaaagatgtctttgtcctggacgttgacgacgctactctctctaaact

SEQ ID NO: 19780 - DNA, 330 bp, Glycine max
  Clone ID: LIB3049-022-Q1-E1-B11
gatcgaaaccgaaaatgaaaacccagagtgcttctctcctctgtctttttctctctcttgctatccttttggctaattttactgctgcaagtgcaactccaagaagcgcagtgccaagccaccatgtttcaacattcatcagaagcctttttccttccacttttctctttggaattggttcttctgcttatcaggcagaacgtagaccaagtgtacatgggagaggacgaagcatatgggacacctacactagacagcatactgaaaagatttcggatcatagcaccggtgacatgggagccgatttttagcatcgatatcatggtgacc

SEQ ID NO: 19781 - DNA, 382 bp, Glycine max
  Clone ID: LIB3049-022-Q1-E1-B12
ggtacctgtgacaagaacttcgtccgagaaatattcagaattttgcatgccaacctcagatttgtctaaggagcaatgtaaatcatgtgatatttgcagacgatcagagtttattttaaaccctatcctagtgtgctctggttgcaaggtttcggtgcacttggattgttatcgtagtgtgaaagaaacaacaggtccgtggtactgtgagttatgtgaagatttgtcctctagaagctctggggcagctgctatcaatttctgggagaagtctgttgtagaatgtgctctctgtggtggtactactggtgcttttagaaagtcttctgatggtcaatgggttcatgccttctgtgctgagtgggtttttgagtctacattc

SEQ ID NO: 19782 - DNA, 391 bp, Glycine max
  Clone ID: LIB3049-022-Q1-E1-B2
gacttgtcattgttatttttgttttacattttgtcacaatctgtgactgttcgagttatccgaggcccctcttttatatggtcgttaataaaaatggcttcgacccttttcacaaagatgcttttgggccaacgattgatccatccttattcgttcctcactcaccatccacatattctctcttctctattcagtaaacggctgttttgtagacgaactgtcccagtctcagcctatacatcccaaaacatcaaaacaactggttaggctccttgtatggcttcatcctcagttggtagaaaggctacatattcaacacaatctgtatcaacaaatgagccagttgtatctgtagattggctttatgataacctgaatgagccagatatca

SEQ ID NO: 19783 - DNA, 394 bp, Glycine max
  Clone ID: LIB3049-022-Q1-E1-B3
gacatgacaatgtccaaaacagtaccttgccgtttattatcagacaagacagcattacccttctagtgttatcatcgacattcttaactcttaagaactgattcaccaacgacccctctgaatttcagaaactatcaatgaagggggaagtgcagcttcagcctccagcggttatgcaaaaccctagtgattcggaccctttgctccataaccaggaggaggaggaggaggatgagtcaccgggaagctctggtgagatcaagaatgaggaagaagacgttgaggctggattactcgcctgttgtcgaatttgcctcgaaagcgattccgacccagatgatgaattgatatctccgtgcatgtgcaaagggaaccaacagtttgtccatcgttc

SEQ ID NO: 19784 - DNA, 127 bp, Glycine max
  unsure (1)..(127): unsure at all n locations
  Clone ID: LIB3049-022-Q1-E1-B4
gacttgtcattgtcaatatcagtattatgccttgtcacaantctataactgatcaatttacttcaagtgctaccttcaaaaggccgatggcttaagaggtcactcaccatttaaccctcagactttt

SEQ ID NO: 19785 - DNA, 367 bp, Glycine max
  Clone ID: LIB3049-022-Q1-E1-B5
tagggaggaggatggtgctgtgattctcaaattggctggtggactcaccattttgatcttttgcttggagtgggtggttttgacacttgcatttttcttgaagtattatgcttgtgttgaggggaatagtggggctgttgtgcctgtgaggagtgggaaggtgcagcaggatgaggacttgaaggattggccttggccttttcaagtttgattcttgtgatgacaagaagaaacacaagaataacaatgacatgttccttttgaagttgttgcagctgttttgatgataatctttcaaatatgttgattcgttggagaattggatgcttttttctcctgatagagatatatgtgtgtgtgtttgtgt

SEQ ID NO: 19786 - DNA, 361 bp, Glycine max
  Clone ID: LIB3049-022-Q1-E1-B6
taaggacgaggatggtgctgtgattctcaaattggctggtggactcaccattttgatcctctgcttggagtgggtggttttgacacttgcatttttcctgaagtattatgcgtgtgttgaggggaatagtggggctgttgtgcctgtgacgagtgggaacgtgcagcaggatgaggacctgaatgattggccttggccatttcaagtttgactcatgtgatgacaagaataggcaccgcagtaccactgacatgttccttttgaacttgttgcagctgtattgatgactatcttatcggatatgttcattcgttaggcaattggatgcgtttttctcctgatatagatatacgtgtgtgtg

SEQ ID NO: 19787 - DNA, 256 bp, Glycine max
  Clone ID: LIB3049-022-Q1-E1-B7
ggaatccagaagccgaagctagggcaccaccagtgttcaacagagtacaagcagatgctgtttttgttcttcgcctctgagactaagcgtgtcgccaatgccttacgagattgaattcgccgctgcggtaaaagcagccactctcgctgctcgtctctgcaagaacgtacagaaggctcttcagcaatccgatgtgcagtcgccgtctgacctaagtcctgtcacaatgtgctgattatggttcacaagcattggt

SEQ ID NO: 19788 - DNA, 313 bp, Glycine max
  Clone ID: LIB3049-022-Q1-E1-B8
ggagttgagaggatcgtgagaggggcagtagccgagattccgtgagttgcaacaatgaagacgattctttccaccgagaccatgaacatcccggacggcgtgagcatcaaagttcatgccaaggtcatcgaagttgagggcccccgcggaaaattggtgcgagacttcaagcatttgaatctcgattttcagctcactactgacgaaaacggtcacagaaagctgaaaatcgacgcgtggtttggttctcggaaaacatccgccgccattcgcaccgccctgagccacgtggagagtcgtatcaccggcgtca

SEQ ID NO: 19789 - DNA, 217 bp, Glycine max
  Clone ID: LIB3049-022-Q1-E1-B9
gcagacactcatgagatagatgacagaactctagacagagcatcaccaagatcagcatacgtgagcccttgtccagtttttggcgggaggggttcttcacttcttgaggatcgcatcggcttcttttacatttgttttggataaaacattttgctgatagtgaatttttactttctcttgttttcctctcttttcgacattttcttcctcttcttct

SEQ ID NO: 19790 - DNA, 349 bp, Glycine max
  Clone ID: LIB3049-022-Q1-E1-C1
gacagaagatatcttgactgggttcaagatgcatgctcgtggttggatttccatctattgcatgccacctcgcccagcatttaagggttctgctcctatcaatctttctgatcgtctcaatcaggtgcttcggtgggccttgggttcaattgagatctttctaagcaggcattgtcccttgtggtatggctacaatgggaagttgaagcctctgatgaggcttgcttatattaacaccattgtctacccgtttacctcaatcccattgattgcttactgtacgcttcctgcattttgtcttctcacaaataaatttattattcctgagataagcaactttgccagtatg

SEQ ID NO: 19791 - DNA, 382 bp, Glycine max
  Clone ID: LIB3049-022-Q1-E1-C10
ggttcaatggtagttaatggtggtaacccttccttcttcgtcgtaaccttcttcttttgttgtttgtgtgtttgttttttctctcacctgaaaatgtcttgctgcggtggtaactgtggttgcggaagcgcctgcaagtgcggcaacggctgcggaggctgcaagatgtacccagacttgagctacaccgagtcaaccaccaccgagaccttggtcatgggagtggcaccagttaaggctcaattcgagagtgctgaaatgggtgttccgctgagaacgatggctgcaaatgtggagctaactgcacctgcaaaccctgcacttgcaagtgaggtgttggagagctaaagcttcaagcagaaatggcccttagaaataatga

SEQ ID NO: 19792 - DNA, 222 bp, Glycine max
  Clone ID: LIB3049-022-Q1-E1-C12
ttcttcgttacccaaatcccaagggtcccttttcccccttaatcaaaaccttcttccttttcccggttgcaattttcaactgcttccaactcgccgtgttgctcctcctcctcctccatcactcccaaggttaaatccaacgataacaacaactgctacctcgtctccgctaaacattctcccgctaacacgtccgcttcggtttcttcacgcaccttcctc

SEQ ID NO: 19793 - DNA, 102 bp, Glycine max
  Clone ID: LIB3049-022-Q1-E1-C2
gcctccgaaaaccctaacagcacaggcgcagacgcaaacgcaaacgcaaacgcaaacgcaaacgcagagcgtgatccattgacgaagatggtgcaccgtctc

SEQ ID NO: 19794 - DNA, 375 bp, Glycine max
  Clone ID: LIB3049-022-Q1-E1-C3
gagtggcagagagtgtggttaaccctccaaagcaagcagtttcagtatttgctgatactcagagcagtgaaatcaaagatcgcatatttgatgaatttaacagtttgtctgttgtataccaaaagccttcttatatgttcactgataaggaacaccgatggacatttgagtttgcagatgaacttggaaatctatctattagtgcagaatcttcagattctgttgttccagctgagagagtggaaacatatgacaaggatctgcttctaagtacttcagaaaaggatgacggaagagatcctggtatcaatggttctgtctataatgctccatcctataatggttcttctgccccttctacaacttcacaaccac

SEQ ID NO: 19795 - DNA, 308 bp, Glycine max
  Clone ID: LIB3049-022-Q1-E1-C5
ggctaccaagggcattgcccttacggatgtgggcaacgaaataatttggagaccacgcatcccgagtgaaccacttgttgcataagttgttcatagatactagagggcacctacagttgacgaatagcagtcgtcatcttcagtgactcagaaagtggatgagatatctgatggtcgagaacggaatgacctacatacaacagcatgaacgtagagtcaatgtcccaccttagcaatgattaatagagacaatgtcatcacaatttaacagtctactgcacaaggcttgttgaatattgtagatcact

SEQ ID NO: 19796 - DNA, 307 bp, Glycine max
  Clone ID: LIB3049-022-Q1-E1-C6
ggcaaccaagggcattgcccttacggatgtgggcaacgaaataatttggagaccacgcatctcgagtgaaggacttgttgcagaagtcgttcagagatgttagagggcaccaaccgtttacgaatgccagtcgtcaccttcagtcactcagcaactggatgagatatctgatggtcgagaacggagtgacctacatacaacaggatgaccgtagagtcgatgtcgctccttagcaatgaacagtagagacaatgtcatcactagttcacagtctactgctcagagctcgttgacgattgtagatcag

SEQ ID NO: 19797 - DNA, 371 bp, Glycine max; identical to SEQ ID NO: 7855
  Clone ID: LIB3049-022-Q1-E1-C7

SEQ ID NO: 19798 - DNA, 389 bp, Glycine max
  Clone ID: LIB3049-022-Q1-E1-C8
ggcaccaactcaaaatattcacgactctctcgaagttagtttaggtttagggttaagttttcttttccttcaatcttgcaagaaattcttctccgcacgatgcctcccgggcctctctgaaatccccatgacgtgaacgccccgatgcacgtgccaaatcgccgccgttcgtgttgcagtttagccccaattttcccacggttgatctgtgtcaaagtaacggcgaaattcctctttttcaatttctctctcttagtttcgatttggtgttgaatggatgcttgctgaattcgccttgctataccttcagcttcttttcgaacaccacacgtgttctctgaaaacggagctagtcctaaaggcgtaaatcgaaacgcggtcgtttttca

SEQ ID NO: 19799 - DNA, 386 bp, Glycine max
  Clone ID: LIB3049-022-Q1-E1-C9
tagtggagtgagtactgagaatggagtttcaacggtgtacggaacgttgcattgctagtatactctctcgcactacgccggcggacgtgtgtaggttttccgtcgtatcaaagattttccgttcggccgctgaatcggacgctgtgtggaaacgttttctcccttccgattaccattccatcatttcccagtctccttcgcctctcaactatccttccaagaaggagctctatctcgctctctcggatcgccctatcatcatcgatcagggtaaaaagagctttcaattggagaaaaagagtgggaagaagtgttacatgcttgctgctagagctctcagcattatttggggtgacactgagcaatactggaactggacaatcgat

SEQ ID NO: 19800 - DNA, 370 bp, Glycine max
  Clone ID: LIB3049-022-Q1-E1-D1
gacaaagcttacaaatgagaaagttccctttttcaatgctcctatatatctgaaaaacatgactcagattggaaaagttgatgaaatatttggtcccatcaatgaagcttacttctcaattaagatgatggaagggattgttgctacttcttattcatctggcgacaagttttatattgatccaaggaaactgttgcctcttgcaagatttcttccacaacccaagggacaatcagctggtagaggtggaggtggaggaggtcgtggtggaggtagaggtggccgtggaggcggtggttttcgtggaaggggcggtccaaggggtgggagaggtggtcctcctaagggtggtggtttcaagggaaagggg

SEQ ID NO: 19801 - DNA, 430 bp, Glycine max
  Clone ID: LIB3049-022-Q1-E1-D10
accacgcgtccatacaggctgccaaaaaaacaacaaaaggggggattggcagcacaaaaaggtttgtttccctccccaaaaaattgccgcacctttcgtttttttttcgtgatgttagtcggtataagctggtgacggagaattagagagattatccaatccagtatccattgatcccgagatctagcttcactctgcgaaacgatcaccgtgtcatctccatctatctatcgctttcaaatctgtaagttttttttatttttcgtttcgcaagatctacagagtcatcttcgcaataaacaatcattctttctgatctgccaaacaatgtctcacagataggataataataattattcttccttacccattagctcgtagctagaattgcagccgcaaaatgatgcctcaaaatccttacaaatgccca

SEQ ID NO: 19802 - DNA, 375 bp, Glycine max
  Clone ID: LIB3049-022-Q1-E1-D11
acccacgcaaacagccacgcgaccgtgacggagcgggggaatggcagcacaaagaggtttgtttccctccccaaaaaattggcgcacctttcgtttttttttcgtgatgttagtcggtagaagctggtgacggagaattagagagattatccaatccagtatccattgattccgagatctagcttcactctgcgaaacgatcaccgtgtcatctcgatctatctatcgccttcaaatctgtaacttttttttttttttcgtttcgcaagatctacagagtcatcttcccaacaaacaatcatgcgttctgatttgccaaacaatgtctcacagaaacgattataataattagtcgtccttacccattagctcgta

SEQ ID NO: 19803 - DNA, 82 bp, Glycine max
  Clone ID: LIB3049-022-Q1-E1-D12
accaacgcgtcgaccaagccttccgtacggtggcaaaaaaacaccagaaggggacaataagtttcaacagttagtaggtgcc

SEQ ID NO: 19804 - DNA, 372 bp, Glycine max
  Clone ID: LIB3049-022-Q1-E1-D2
gaggtcatcgatttagaaaggcattggaggagctagtgtggcttagtcgctaaatttgttacgataaagaaattaattcagcaacaaatacaatgggttctcttatggcaggatgggactctctgatcttggatcctgaatcagctacaatagagaggaatcgatcactcaccaaagaagaaattaatgcttactggagagtaaagaaggagacagagttagaacacctcagagctatgtccaaactatctgagactattcatgcccgaaaatttgaggattcagagaattctcataagtcaagtaccgtgaccttggccagcataaaggaatccttaagcatggacgttgaccagaaaagtttagagcaac

SEQ ID NO: 19805 - DNA, 332 bp, Glycine max
  Clone ID: LIB3049-022-Q1-E1-D3
ggaatcactatagaatttgtgaggtcagtccaaacttcagtttcaaagatgcctcgtggaacgcttgaagttgttctgatcagcgccaaatgaatcgatgacaatgattttctctccagcattgatgcttatgtgattcgcacatacagggcacaggagaaaaagatcactgtgcaagaagatgctggatccaagccacaatggaatgagagctttcttttcactgtctctgacagtgcatctgaacttaatctaaagataatggataaagacaactttagtcaagatgattgtcttggcgtggcatccattcatctggatccagtgtttga

SEQ ID NO: 19806 - DNA, 380 bp, Glycine max
  Clone ID: LIB3049-022-Q1-E1-D5
gagggtattgcactgcggctgctacttcggctccatcttctccgatctcctcaaactctatcagcgcagaaccaagccgctatcaccatggggaagacacatggaatgggagctgcccgcaagctgaagtctcaccgtaggagacaaaggtgggctgacacgtcatacaaaaagtctcatctgggaaatgaatggaagaagccttttgctggttcatcccatgccaagggtattgttcttgaaaagattggtattgaggctaagcagcccaactctgccattcgaaaatgtgccatggttcaactcatcaaaaatgggaagaagattgctgcatttgtgccaaatgacggttgcttaaattatactgaatagaatgatga

SEQ ID NO: 19807 - DNA, 304 bp, Glycine max
  Clone ID: LIB3049-022-Q1-E1-D6
ggaacaggagatggaggtcgacgatcaggctgaagatgatggtgctaatggggtcacaagtgaacaagaaggaacagtgaaaaagaagaagaataaaaaggatagtaacggagaagctttggaggctggtggagagtctaagaagaagaaaaagaaatcaaaaaagaaggatacggagtaaactatgatgtattgcagctttaactgttgaaatcgaatcttttatgttatagttttggacaatgttaaatttgctttgtactttaccagttgctgcaccagtataaacttcatgttgacttac

SEQ ID NO: 19808 - DNA, 394 bp, Glycine max
  Clone ID: LIB3049-022-Q1-E1-D7
tgatataagcagagttcgaggtgttgttgacaatgctaaccgaattttagcgattaacaaggactttggttcatttgacaaatacatttgggattttgtcaatcacaaacccatctccacgcaatacaagttcggccacaagataccagtgaagacatcaaagtcagagagcataagcaaagacatgatcagaaggggctttaggtgtgtaggtccaacggtgcttcattcatttatgcaagcagctggactcaccaatgaccacttaatcacttgccatagacacttgcagtgcaccttattggcatcaaccccccattgtaccacagagcactttctatagttccaatttcaattgagaaaaatgagattgatccagatgagatcaagacca

SEQ ID NO: 19809 - DNA, 345 bp, Glycine max
  Clone ID: LIB3049-022-Q1-E1-D8
gacagcagataatagggtcaaagaataaaaaggaccgttagctgacacaaccatcatggccacctgtgctattcagcaatcatcagtcagtggtcaaactgtccagaagcagctcaatgagttcgtccgcaagagcggtggctccggcataagtctcatgaacattagctgtaccgtctcgagtgctccacagagcatttggtacggcgctgacagttccatggtactgggtccattgctggaccagtttctatcacatctgaccggagaattccctggtgactacggatgggacactgctggattattagatgatccggacatctttgccaggaaacggggaac

SEQ ID NO: 19810 - DNA, 323 bp, Glycine max
  unsure (1)..(323): unsure at all n locations
  Clone ID: LIB3049-022-Q1-E1-D9
ggaatgtagtcaaatcacaaacaacccaccaattataagttgccgtttcccctctcacttgctcgccgaattggaagaaaccttcggtcgtgtcctgcggcattgaaccctgaacacatgactcaaagcaagagacaatccagatccatggaaccattacagagatgagaagacaatctcctccgttatagttcctcagangatgangaagaggaagagatagagaagggctggctgatgtaacatttgaggagttgcagaaagctcgctcgaatgggacacatgcatttttccagaaacccaaagaagacaaaaaatttaaa

SEQ ID NO: 19811 - DNA, 361 bp, Glycine max
  unsure (1)..(361): unsure at all n locations
  Clone ID: LIB3049-022-Q1-E1-E1
gactccaagccctcaccaaatacttctcttggcattttgtgtcccttctctctttctcttgctcgatattttccaaccaaaataattattaaaaccaaacgtagctaggcaccactgctangaatggcaagtgagatatttcttgcccttctgatcacaacctttgtggttgcagcctctgctggtaacttcaaccgagactttgagataacatggggtgatggtcgtgccaaaatcctcaatagtggggaacttctcaccttgtccctagacaagacctctggctctggatttcgttctaagaatgagtacttgtttggaaaaattgacatgcaactaaaactcgtgcctggtaactctg

SEQ ID NO: 19812 - DNA, 393 bp, Glycine max
  unsure (1)..(393): unsure at all n locations
  Clone ID: LIB3049-022-Q1-E1-E10
gagaacangngcanagaagaaaaaaacccttagccaacacaaccatcatggccacctctgctattcagcaatcagcattcactggtcaaactgctctgaagcagctcaatgagttcgtccgcaagaccggtggcgccggcaaaggtcgcactaacatgcgccgcaccgtcaagagtgctcctcagagcatttggtatggccctgaccgtcccaagtacttgggtccattctcggagcagattccatcatacctgaccggagaattccctggtgactacggatgggacactgctggattatcagctgacccggaaaccttcgccaggaaccgggagctggaggtgattcacagcagatgggcaatgcttggtgcccttggctgcaccttcccag

SEQ ID NO: 19813 - DNA, 239 bp, Glycine max
  Clone ID: LIB3049-022-Q1-E1-E11
agggggttccaaattaccaaaagaagaaaccagggaaggttcctcccgaaggttttggcctaaatggccccaaaattttttccatccaagggccaaaacggcctttgaagcctttcaaaaaggggaacaaggtttttgaaaataaattccctttccttggatccaaggacaacaaccctgtggcctttcggaaaccccttgtccttggaaattggaaaaatcccatgcaaaaagggctt

SEQ ID NO: 19814 - DNA, 342 bp, Glycine max
  Clone ID: LIB3049-022-Q1-E1-E12
cccgggccgaccaacccttccataaggctccaaaaaaacaccaaaaggggaacccaaataatcccaattgcaattattaattggccttgcttctaaggatgccaaaaaaattggtggaaaaaattttaaggttgtaccaaaaaaagggtttccaaaatcaccatctcggaacaaaagatagcaagctgatattactgactccaaggatggagcaacaagcaagatgcagaaacacgacagccacgcatcccgatccattctagatctaaatatgcctgtagacgatggtgaagagggtgtcaatgacaatgaccatgagagtgactccatgtcataaaacac

SEQ ID NO: 19815 - DNA, 351 bp, Glycine max
  Clone ID: LIB3049-022-Q1-E1-E2
ggaagtaaaaaacacagagcaaccaccgatcaaagaagaaacaaccgcaacagatctccgtttctcgccaaacaaacacaaaatggctgccttcagcggcgacgaaaccgcacctttctttggcttcctcggagccgccgctgccctcgttttttcctgtatgggagcggcgtacggaaccgcgaagagcggcgtcggggttgcgtcgatgggcgtgatgaggccggagctggtgatgaaatcgatcgtgccggttgtgatggctggtgtgttgggtatctacggtttgatcattgcggttatcataagtacgggcattaaccctaaggccaaatcgtactatctttttga

SEQ ID NO: 19816 - DNA, 327 bp, Glycine max
  unsure (1)..(327): unsure at all n locations
  Clone ID: LIB3049-022-Q1-E1-E4
ggtgtgcggcaagtgtctcatcacgtctcgcgatctcttcaaaggcgaaggggaaggcttcaggggtttgaaaaaggttgatattgaagccatggttcttgactccattctgacttctcctcgtctcaagtctccatctttcaagangcagtttacaaaggatgaactgggtagttggtccacactttttcagangcatcgcttcctcttatctgctcttgttctgctaactctcctctgcactgtttatctttactttgctgtcactttaagggccagtggcacctgttccgggttgactggagcccagaaagcttcatgccatat

SEQ ID NO: 19817 - DNA, 320 bp, Glycine max
  Clone ID: LIB3049-022-Q1-E1-E5
gatgtcactggagagtgatcactaggatactaagttatttactactatgttctgtcgtaatcctttcaagtcacaagcgttaaaagagggtgtaagtgtcacttttcaattcctcaacctcacgattgtaataaagctaactcataggattgaggactgactagtagaaacagaagccagagcttttattttcttcttcgtcatcttctttcgagcgccatgtcggggagccatcaagagcagcgactgttatagaacgcgtccatagaagacgacgagccgcaggaaacagcttatgattcgtctgataagatagtggt

SEQ ID NO: 19818 - DNA, 305 bp, Glycine max
  Clone ID: LIB3049-022-Q1-E1-E6
ggtcaatggtgggagtggttactcgtgcaactccttctgctgctctgggtgtgcggtggttgtgtctctcatctcacacagtcgaacagctcttgcaactgtggtaactgtagctcctgcaactcctgcaactgctgcaacggctgcagaagctacaaaaagttgacatacactgactcaactagaatcgacaccatggacatcgtagtcataccagttaaagctgaaattgctcatgttgaaattgctgaaatcgctgataacgatgacaacaaatgttgcacaaattgctcatgcagctcctg

SEQ ID NO: 19819 - DNA, 394 bp, Glycine max
  Clone ID: LIB3049-022-Q1-E1-E7
gagagagaagagggtcagagtgagaaagagagagagagagagagaaactgagagaaattcgcaaaccctaatttcggaaagatcggcgatggctgcctccaaggatcgcgagaacttcgtctacatcgccaagctcgccgaacaggccgagcgatacgaagagatggtggaatcaatgaagaacgttgcgaatctcgacgttgaactgactgtggaggagcggaatttactttctgttgggtacaagaatgtgattggtgctcggagagcatcgtggaggatcctgtcttccattgagcaaaaggaagaaacaaaagggaacgagttgaatgcgaagcggattaaggagtacaggcagaaggttgaattggagctttcaaacatctgtaatgat

SEQ ID NO: 19820 - DNA, 333 bp, Glycine max
  Clone ID: LIB3049-022-Q1-E1-E8
gagcacttgtttgtgttaggtactctaaatcttgagttgagcctgcgcaaaaaccctaaaccctgtgaatgaagaagacgatgaacagtggcgaagaaaatgggggcaagctcaagttcaagggcgcggagaggtcagcttacttcgcacgcagagaggcagcgaaggttttgaaagtgattctcgaaggagacgccaaacgccgcgctctagcctcgagcatagcgctcattcatcaaccttccgttagacataagaaggccatattcgctctcacttgtcaaatcctaacatatcttcccattatctacgatgtcttggaagctgcctcta

SEQ ID NO: 19821 - DNA, 416 bp, Glycine max
  Clone ID: LIB3049-022-Q1-E1-E9
cttcgttacggtgccaaaaaacaacaaaagggggcgccccccgaaaaaaaccaaatattttggaaaaaaaaaaaggggaaaaaaaaatgacaacaagtttcaaaagaaacaggaaaaaaaaaggtcacgtcagccccggacacggccgtatcggaaagcaccgcaagcatcccggaggtcgcggtaacgccggtggcatgcatcaccaccgtatcctcttcgacaagtaccatcctggtttcttcgggaaggtaggcatgcgctacttccacaaacttcgcaacaaattctacaatccgatcatcaacatcgacaagctgtggtccctcctcgcccaggaggccaaagacaaggccaccgccgacaaggcacccttgctcgatgtcacccaattcggttactttaaagttttgggt

SEQ ID NO: 19822 - DNA, 373 bp, Glycine max
  Clone ID: LIB3049-022-Q1-E1-F1
agagcaactcaacacaacgaaccaaaccaacaatgtcgcagccgcagcctcagtcgcagccgcaacacgggcaagcggcgctggagcaggtgcagtgcttcggtcgcaagaagacggcggtggccgtgacctactgcaagcgcgggcgcggcctcatcaagatcaacggctgccccatcgagctcgtcgagccggagatcctccgctttaaggccttcgagcccatcctcctgttgggaaagagccgcttcgccggcgtcgacatgcgcatccgcgtcaagggcggcggccacacctcccagatctacgccattcgccagagcatcgccaaggcgctcgtcgcgttctaccagaagtacgttgatgaacagag

SEQ ID NO: 19823 - DNA, 371 bp, Glycine max
  Clone ID: LIB3049-022-Q1-E1-F10
gcacaagaggaaggaggtcgtgcattgcgttccgcgtcaggagattgatgttctcacgagcagaacacagggatttctggctcttttcacaggggatccgggtgaaattcgtgcggaggtcagatagcacatttacagcagtgtggcagagtggagagaagaaggataggcagagattgtgcctggtgtacgtttcattgattaggtgcacatgcctgacagagagtgcttttcttgccttaatctggctctggagaataagatagctctcagaatagttgtggctagcacccgaaggatcagcactatcaggggaagtaattacatatccccacagtggattcccaatgatctgcttgaacgactcgtca

SEQ ID NO: 19824 - DNA, 393 bp, Glycine max
  Clone ID: LIB3049-022-Q1-E1-F11
gaaaaggcattataatggtaacttccaaatttgaattgttcaatttcaatttcttccgcaaaagttgcaactacttcctcagaaaaaaagtttctaagttaaggaaatccagagagacaaaaatggccggtgacggtgcagctacatgcatagacatcctccttgccatcattctccctcctcttggagtctttctcaaatatggctgccaggtggagttctggatttgtttggtgctgaccctttttggttatatacctggaattatctatgctgtctatgctatcaccaagtgatcaccctttaactttgtgtggacaataaacaaatgtcatgggcgattctgtctttcaactcagatattagtgtctctttaatatatcgccaatgttg

SEQ ID NO: 19825 - DNA, 401 bp, Glycine max
  Clone ID: LIB3049-022-Q1-E1-F12
aggggaaatccagagaaagagtgaggggagaatttcagaggaattttcaacaagaattcacgaacgaatcaaaacctctccttctccccgaaagtgggtttaaaaacgtaatccccttaaaatggtcctctcgttcatgaaactgttctcgtttcgatttgagggaacagtacaagagtgtgaggatcggttaacccaactgcacaggtagtcactaaaataatggagtctcacgatgagactggatgccaggctcctgaacgcaccattctttgcattaataattgtggcttctttggaagagcagctaccatgaacatgtgtttcaagtgttacaaggacatgctgttgaagcaggagcaggacaattttgcagcatcgtcggttgaaaacattgtgaa

SEQ ID NO: 19826 - DNA, 293 bp, Glycine max
  Clone ID: LIB3049-022-Q1-E1-F3
tcgggacgctgctgaagagtccactgacatcattcccctggatgtcgctctactcactctcggaattgaaactgttggtggagtcatgacaaagttcattcgcagaaatcctgttatcgcaagcatggagtctcacgtgttcagcaccctatcatgaccattagactacagtcgccattcatgttttcgaaagcgacacgagtctcacacaggacatgccgccttcgtgggaattttgatatgtccagacatcctcgatccccatcgggtacgcctcacattgaactgacctt

SEQ ID NO: 19827 - DNA, 389 bp, Glycine max
  Clone ID: LIB3049-022-Q1-E1-F4
ggcagtggagagagagtgttagcactaaaaatgtcgaagttaatcttcgtgttccttgcactaattcctcttcgctgcatctccttctcgccagagaaaccctcagatcggcgcatcctcgttttgctcgatgacttcgccatcaaatcctctcactctctcttcttcaactccctcaaatctcgcggcttcgatctccaattccacgtcgccgacgaccccaaaattgcgctccagagatacggccagtacctctacgacgctctaattctcttttcccccaccattgaacgttttggaggattcattgacgcggctgcaattttggattttgttgattcgggtcatgatttgatcgttgctgctgatagcaatgcatctgaattaat

SEQ ID NO: 19828 - DNA, 381 bp, Glycine max
  Clone ID: LIB3049-022-Q1-E1-F5
aatatagaaggatggattttgaagaattttgtgcagctgcattgagtgtgcatcaacttgaagctcttgatcgttgggaacaacatgcccgctgtgcatatgaactctttgataaagacggaaacagggctattgtcattgaagagcttgcttcagaacttggacttggtccctctatccctgtgcatgtcgttcttcatgattggatacgccatactgatggcaagttaagttatcttgggtttgtcaaattattacacggtgtgtctagccgaagccttgcaaaggttcaatgaaatttacagcagaagccctatggatatgctgaattttctctgccttgtgtggcccgaccatagttgaatttgtaactagtgcgtg

SEQ ID NO: 19829 - DNA, 380 bp, Glycine max
  Clone ID: LIB3049-022-Q1-E1-F6
gctctggaagaggagtgaagcagcagagggaggagcggcattaaaaatgcagatcttcgtgaaaaccctaacggggaagaccataaccctcgaggtcgaaagcagcgacaccattgacaatgtcaaggctaagattcaagacaaggaaggcatccctccggatcagcagcgtttgattttcgccggaaagcaacttgaagatggaaggaccttggccgattacaacatccagaaggaatcaacccttcaccttgtcctcaggcttcgtggtggcatcatcgagccttccctcatggctttggctcgcaaatacaaccaggacaagatgatttgccgcaaatgctatgctcgtctgcaccctaaggctgtgaactgccgta

SEQ ID NO: 19830 - DNA, 390 bp, Glycine max
  Clone ID: LIB3049-022-Q1-E1-F7
ctggagagacatacaatggtgaagatctagtgtgctactcttggggttataacagccgtggccaattaggcttgggggatcgagagagcagactgcatccggaagttgttagaacatttgacgaggagtccccttatgaggtagcatgtggtgcctttcacactgctttgctcattcgtaaaaagaaacctactgacacagtagaaagcacatgctggacctttggccttgggggtaatggccagcttgggcatggaactacacatagcacattatttcctacacctgttaaagaattgccacaaaatgtatcacttatctgtgttgactgtggtttgtttcatactagtgttgtttcctcagatggggatgtgtggtcatggggaatgg

SEQ ID NO: 19831 - DNA, 431 bp, Glycine max
  Clone ID: LIB3049-022-Q1-E1-F8
acccacacgtcaatacggccgccagaagaggagcgaaggggttcaagcaggggcgctagaggagtcgacagccaacctctggaggatctgaatgacgtgtacagctatcatagaggaccagacggtgaacacgatgcccctcgacgtctaaagcatcgacacgattgacaatgtcagggctaagatgcaagacctggaaggcatcactccggatcatcagcatttgattttcgccggtaagcaacttgaacatggaacgaccttggccgagtacaagtatccagaaggaatcaacccttcaccttgtcctcaggcttcgtggtagcatcatcgatccttccctcatggctttggctcacacatacaaccacgacaccattatttgccgcaaatgctatgctcgtctgcagcctacggctgttaactgccgt

SEQ ID NO: 19832 - DNA, 380 bp, Glycine max
  Clone ID: LIB3049-022-Q1-E1-G1
gacaacaaaatttgccaattgccatttcaatcctcagtttctttcttcaacgtttccatcatacacagatcccaatcctctctcaagccctaatttcccctcatttccatggccacagaagagcccactgtcgcggtggaacccgctcccgaacctgcctccgccgatcctcccccggaggagaaggaggagaccaaacctgaagccaaggctaagaaaaccaaggagcccaaacctaaaaaggtttccagacctcgcaaccctcccactcatccttcctacgaagagatggttaaagatgcaattacctcgctgaaggagaaaaccggttcgagccaatacgcgattgcgaagttcatcgaggagaagcacaagcagct

SEQ ID NO: 19833 - DNA, 361 bp, Glycine max
  Clone ID: LIB3049-022-Q1-E1-G10
gcaggtttaagcattttctagacacaaggcacttactgcaggtggccactttctagaagtcagaagaaccactagcatgtctgttttatctattgcttagacaaccgaaggtagaaacatcatcagtctagagctttctgagcatcatcaatctagagcttcccatcagttatcagcctatatggattttagataggcacattctgctttaatgtgatattcagatgtttgcattagactgtcgctattctggattcgatatttagttagaaacatggtggagttgtgttaatgtgtattattgtaggtcatacttgctagaaatttgcttgaaatagtacttgttctccatctttccttt

SEQ ID NO: 19834 - DNA, 420 bp, Glycine max
  Clone ID: LIB3049-022-Q1-E1-G11
ccaagccttcgatcaggcggcaaaagacgaacacatgggaactggaaggtgtgaccccaagagcccgcatggcaacgccgtcggttcaacggccgtcgtcgccgtcgtcacgccggacaaaatcgtcgtctcaaactgcggcgactcccgcgccgtcctctgccgcaacggcgtcgccatccctctctcctccgatcacaagccggatcgacccgacgaattactccgagtccaatccaagggagggcgcgtgatttactgggacggtccgagagtgcttggtgtgttagcaatgtctcgagccatacgtgacaattatctgaagccgtacgtgatttcagaaccggaggtgatggtgacggagcggacggatgaggacgagtgtttgatactggcgagtgatgggttgtgggatgtggt

SEQ ID NO: 19835 - DNA, 360 bp, Glycine max
  Clone ID: LIB3049-022-Q1-E1-G12
gacaacttcaatcccccttttgctttacaaaattcaattttccaaatcaaaaccctaactccgttcgaagcaccaaatcgtgatggcaccaaaggcagagaagaagccagcagagaagaagcctgtggaggagaagaaatcgacggtgggagacaatgctccggcggagaagaagccaaaggccggaaagaagcttccgaaggaaggaggcgccggcggagaaggtaagaagaagaagagaaacaagaagagcgtggagacatacaagatcgacatcttcaaggttctgaagcaggttcaccctgacattggtatctcaagcaaggccatgggaatcatgaacagcttcatcaacgacat

SEQ ID NO: 19836 - DNA, 300 bp, Glycine max
  Clone ID: LIB3049-022-Q1-E1-G2
ggtgagacgatggtaaggtcgcgttgtgttgcgtcgtgtcgtgcgctgttcctctgtccgtcgttatagtttaaacatcacacacgagctacgtatcgcacacattgtatagcaagcaaggtggaaaatgtaaccgtttgaagacgatcaagtctgataatcaacgatatctaccacgttgagatagcgaagattcagaagataaacgaagaggagaaggcgctaaaggagttgaaagccaaaggttatcagaacggaaactttggacgttcagggctcataagaagtggagggaaataa

SEQ ID NO: 19837 - DNA, 338 bp, Glycine max
  Clone ID: LIB3049-022-Q1-E1-G3
gatgagacgatgtgccagttgcgatttgaatcctcagtttctttcttcaacgtctcgatcatagacagatcccaatcatctcgcaagagctaagttcccctcatttctatagccagagaagtagccactgtcgccgttggaccagctcccgtacctgcctcacgcggatccacccacgttgagataacgaagagaccagaactgaagcgaagaggaaaaggcaccaaagagacttaacctaaaaaggtttccagaccgtcacaatctcacgttcagcgttcctacgaagtgatggttaatgatgcaactacctcactaaaggagaaaaccggttcgag

SEQ ID NO: 19838 - DNA, 367 bp, Glycine max
  Clone ID: LIB3049-022-Q1-E1-G4
gacttctaagctgtgataagaaaacatatacagaattgatatggaaggatatctgagtattagccaatgaagtgacccgtgcgtggatccccaccctatctgtgccttatcctatgtatgcgaattaaatgaagcaagcattcataaagcataactgaagaaaactaaggaaggaaggaaggaaggaagagtgagcgtgaaagatgccttcggcgaggctttcagggtcaccaaggctcgacgttgctattgacatgggcaatccatttctcaatctcactgttgatggtttccttaagatcggagctgtcgcagccacgcgatcagctgctgaagatacttatcatattatccgaaacgggaatat

SEQ ID NO: 19839 - DNA, 314 bp, Glycine max
  Clone ID: LIB3049-022-Q1-E1-G5
ggggatcatgttgctgtaaaagcgcttccggctatgagtacacgcccttcatatgatgatggctccaatgctgagatgggcatattggggctatgccgacagaggcatattgttaggttcttgggctcctgttcaaatcatgacataaaccttctggtctatcagtacatgcccaatggaactttacgcgatgttctacatggaaagaacgggggtcattttcatttggatccacagtattcaattgcggtggaggcagtcatggtgctttgccactagtcttatgaatgtactccagtcactgtctatcgtga

SEQ ID NO: 19840 - DNA, 169 bp, Glycine max
  Clone ID: LIB3049-022-Q1-E1-G6
gaatctagtggacgagtgaataagagatatcaatatattatgatactggagggatacaatacgacggttatgattgtggggatggtgttcggcatggccatgagtgggatggccagtgctcaatcctccttttgtcgcatgcccatcgatgggttggctgcctgtacgc

SEQ ID NO: 19841 - DNA, 387 bp, Glycine max
  unsure (1)..(387): unsure at all n locations
  Clone ID: LIB3049-022-Q1-E1-G7
ggcacaagtttgttgagatagctagaagcaataagatgaaaatgaaagtgcttgttttgtttgttgctacagttttggtagcatatgaatgccatggctcagactaccagaagttccctctccaaatgaaaactgggtttggtgggcaatacagcaatgaggtggcatgtgccagttggaggcttggcgtggaagcaaacaacgtagtcaagtggcaaactgttcctgcagcttgcggagagtacatagctgactacgttctangagaccaatatagatcagattccaaaacagttaaccaacaagcttatttctatgctaaatccctcaaactcaccaacaaagatgtctttgtcttggacgttgacgacactactctctctaatc

SEQ ID NO: 19842 - DNA, 375 bp, Glycine max
  Clone ID: LIB3049-022-Q1-E1-G8
ttgggacagctatccctcatcagcatgctgctgagtatcctgcttgctttgtttatgtctaccgatttggaagtatatgtgcgccatggctcaggctaccgcacatatcctcaccgtgttagttcggcatttggagggcaatgaagcaatgaggtggcatgtgccaattaaacgcgtggtgtagaagcaaacaccatagtcaagtggcagactgttcctgcatcttgcctcgaatgcgtagctgactactttctacgagaccaatactgctcagattccataacagttacccaacaagcttatttctatgccaaatccctcaaactcaccatcacttatgtctttgtcttggacgttcacgaccctactctctct

SEQ ID NO: 19843 - DNA, 273 bp, Glycine max
  Clone ID: LIB3049-020-Q1-E1-H8
ggtgccacattgtcatattttattattacctaagcttttgtcacttagaacaaatttttggtcagttttgaaaaatgggttctggaaaccaggaggtatcaatgttggtggagaatggtggtggtgggaacaacaacgtgaagggattgctgagcaaggaaatgagacatggcagaacggcacataacatgtcatcttcttcgttgcgcaagaaatctgacctaactcttctgtctaaggttcattctgacaccctcaagaatttgttggtga

SEQ ID NO: 19844 - DNA, 367 bp, Glycine max
  unsure (1)..(367): unsure at all n locations
  Clone ID: LIB3049-019-Q1-E1-B1
gataataagagttttaatattattgtattgtagtagtagccatggggactttcaatcactatgtgattgttaagttcaaagatggtgtggcagttgatgatctcattcaagggttggagaagatggtctttgggattgaccatgtcaagtcctttgaatggggaaatgacattgaaagtcatgatatgctaagacaaggtttcactcatgctttcttgatgacattcaatgggaaagaggagttcaacgcatttcagactcacccaaatcatcttgagttctcgggagtgttttcacctgctattgagaagattgtggtgctggattttccatctaacctcgtcaaagcancagcatgattctcaac

SEQ ID NO: 19845 - DNA, 355 bp, Glycine max
  Clone ID: LIB3049-019-Q1-E1-B11
gagagaaagagagagaaagatgtcgaagcgtggtcgtggtggttcggcggggaacaagttccgcatgtcgctgggtcttccagtggcggcgacggtgaactgcgccgacaacacgggggcgaagaacctctacatcatttcggtgaaagggatcaaaggccgtttgaaccgtcttccctcggcctgcgttggcgacatggtgatggccaccgtgaagaagggaaaacccgatctgaggaagaaggtctcgccagctgtcatcgttcgccagcgcaagccatggcgccgaaaggacggcgtctacatgtacttcgaagataatgctggtgttattgtcaatcccaagggagaaatg

SEQ ID NO: 19846 - DNA, 361 bp, Glycine max
  Clone ID: LIB3049-019-Q1-E1-B12
gatttttctgctgtgaaaacccgagagtgttgggggaaaacaatgaaaatcttgtgaaaacagttgaaaaatgttgttttgggagaagacagacattacaatttgcaacggctacattgttgggtggttgtctctctctcttcctttttttcccttacacggcaaatccaaacccaacaacagctttcaaaagtgttaggtgtaaagaaagtaaagagagtgagagagtgagagagaaaaaaaagcaaaggcccacctgtgttaattttgcaatggaatcacaaagagaatatgagaaagaagaagaagcactagtgttgaaaacaacaaaagtggtggagtatttggtgccaaagatgtc

SEQ ID NO: 19847 - DNA, 350 bp, Glycine max
  Clone ID: LIB3049-019-Q1-E1-B2
gggttttggttgggattcaaacaaaccgcattcgcactgtgcatccctttcttccttcctcgtcttattctccaaccccctccaaaacctccttctcactcttcttctttctgctactctccctctaaacaacgtcgtttctcgtcgtacagccatgtcatacgactacctcttcaagtacatcatcatcggcgacacaggtgtagggaaatcgtgcctgctcctgcaattcaccgataagaggttccaaccggttcatgatctcaccattggtgtcgagttcggcgctcgcatggtctccatcgattctcgacccattaagcttcagatatgggataccgctgggcaag

SEQ ID NO: 19848 - DNA, 362 bp, Glycine max
  Clone ID: LIB3049-019-Q1-E1-B3
taacttgagattattttttttctttccccaaacccaaagaggcatgagttgcaacgggtgccgcgtccttcgaaagggttgcagcgagtcttgtatcctgcggccgtgtctacagtggatcgatacgcccgaagcacaaggccatgccactgtcttcgttgccaaattctttggccgtgccgacctcatgtccttcatttccaacgtccctgaaccccaaaggcccgctctgtttcaatctctgttgttcgaagcgtgtggaagaacggtgaaccctgtcaacggtgctgttgggcttttatggaccggaaactggcacgtgtgccaagcggcggttgagacggtgctccgcggcggcaccg

SEQ ID NO: 19849 - DNA, 361 bp, Glycine max
  Clone ID: LIB3049-019-Q1-E1-B4
ggagtgagcaagagtgaagagcgaagagaatggctcccaagggtttaatctttttggctgtgttatgcttctcagcactgtcactgagtcgttgtcttgcggaggataatggacttgttatgaacttctacaaggaatcatgccctcaggctgaagacatcatcaaagaacaagtcaagcttctctacaagcgccacaagaacactgctttctcctggctcagaaacatcttccatgactgtgctgttcagagttgtgatgcttcactgttgctggactccacaagaaggagcttgtctgagaaggaaacagatagaagctttgggttgagaaatttcaggtacattgagaacatcaaaga

SEQ ID NO: 19850 - DNA, 346 bp, Glycine max
  Clone ID: LIB3049-019-Q1-E1-B5
ggagtgagcaagagtgaagagcgaagagaatggctcccaagggtttaatctttttggctgtgttatgcttctcagcactgtcactgagtcgttgtcttgcggacgataatggacttgttatgaacttctacaaggaatcatgccctcaagctgaagacatcatcaaagaacaagtcaagcttctctacaagcgccacaagaacactgctttctcctggctcagaaacatcttccatgactgtgctgttcagagttgtgatgcttcactgttgctggactccacaagaacgagcttgtctgagaaggaaacagatagaagctttgggttgagaaatttcaggtacat

SEQ ID NO: 19851 - DNA, 396 bp, Glycine max
  unsure (1)..(396): unsure at all n locations
  Clone ID: LIB3049-019-Q1-E1-B6
ggccaaactagtagcaagaagtaagtcacgtttttctccgttttcattcatcacaatattaaagcttttagtttccttcagtatgggggacacttacgttttggccacaccgaagcgcaaccgttccgatgacgtggacggcggcgaggcgaagaagctgctgttgcagcagggcgaggcagacccggcggcggcgctggcgagcgcgcggcacgagttcggggagcacggcggggtgaacatgtcgatcgaggcgtcggcgacgttcacggtgatggagccggagacgatgcggcgcatgttcgccggagaactcggccccgaccgcgacttcttcatctacagccgccacttcaacccgancgtgctgagcctcagtcgcctcatggccgccct

SEQ ID NO: 19852 - DNA, 348 bp, Glycine max
  Clone ID: LIB3049-019-Q1-E1-B7
gtgatgaaccggtctggaagtcacgattcgacgctgagccaccagtcggaggcggcgaatgcggtggagagcgagagcatgctgtcggcggagacgccggagacttcgattctcttccgagaagaaccggaaacgaacccgaagcgtgtgagcgatgatgttggtttagagcttacgcttgggttcgaaccggtttcacgtgcgcggcccgtggttccggtgaagaaaagaaggattgagttgaaaaattttagtggctcggctgagagtggctcgtgcaagatggagctggggcttgaatgttcggcttgaggaactcgtggctcggctcagttttgactccatcat

SEQ ID NO: 19853 - DNA, 382 bp, Glycine max
  Clone ID: LIB3049-019-Q1-E1-B8
gacaataatctttggcacaaacacacacacacccacctcctccatccttgttctccacaattctagctacccagcacaaaaattgtagtcatgttggggaagaggccccggccactgatcggaaaaatctccgaattattggtctccggcggtcgtgccgccgtgcttttcgatgccctcggaagccctagaagcccgtttgacatgatgaacttaaagatgcaatcaccaaagggcctaaaaagctatgaccttggtggtgttggtctaggaattgtggtggcccttgataaatcatcatccgaggaacaaggccatgtttgcacatcaaattcaaaccgattccgtacaatcccggttactaaccaacgtgggtttcaaa

SEQ ID NO: 19854 - DNA, 338 bp, Glycine max
  Clone ID: LIB3049-019-Q1-E1-B9
cattgtactgatttgaaagtgcggtttggaataaactcaaagttttttgatagtgctggccggccacgattgagttttgtggttgatccatcaccaagtctatgtaatgttcttgatgcatgtgaccgtgtagcacagaagttaaccgtggattctggtagcagctctgattggaggcctgttgttattaggaaagaaggcttcttcaactatcctactgtcagattacacatacctactgcagtagtggcagacattgctatttatgccacggaaatatatcaaagagaatcatctggaacagtgcaaagacttctcttcagtaagtttgatgctgc

SEQ ID NO: 19855 - DNA, 382 bp, Glycine max
  unsure (1)..(382): unsure at all n locations
  Clone ID: LIB3049-019-Q1-E1-C1
gatgtattagtattttcctaaaaaaaagattccaccaccaaattatatatgatattttaagcgttgtttggggaagggtgattagaccccgactcaattacaccacgcttctaaattctgagaatgaattcgtaagatcgaagcaatagcctttttctctgccgccactggtttcgatcccacacccacaaacgcaaaccctccatcctttgaatgctcttgcgttttcctttcactacctcattcctaactcacacacacacaacgggtgatatcaatgtcgactcctgctangaagaggctcatgagagatttcaagaggctgcaacaagacccgcctgcaggaatcagcggggcacctcaagataacaacataatgctg

SEQ ID NO: 19856 - DNA, 354 bp, Glycine max
  unsure (1)..(354): unsure at all n locations
  Clone ID: LIB3049-019-Q1-E1-C10
agggatctcattctcatcaagttattatcanataattaattaaattcctcgtggaatcttgttgaagccatgtctacagctggtcaggtcatcaagtgcagagctgcggtggcatgggaagcagggaagccactatcgatagaaaccatagaagtggcaccaccccagaaaggtgaagtgcgtttgaagatcctcttcaactccctttgccgtacagatgtttactggtgggatgctaagggccagactccgctgtttcctcgtatcttaggccacgaagcttcggggattgtggagagcgtgggcaagggtgtgacacatctgaaaccaggttgacatgctctcccaatattc

SEQ ID NO: 19857 - DNA, 353 bp, Glycine max
  Clone ID: LIB3049-019-Q1-E1-C11
ggtaagataccgatccacttcgaaagggttaggtttacgaagaaacaccaatcctctccgagaagaaatcaacgatgcctcgctatgatgataaatatggtaatacccgcctctatgttggacgcttgtcttcgaggacacgttcccgtgacctggagcgtgtcttcagcagatatggaagaattcgaggtgtagatatgaagaatgattttgcctttgttgaatttagcgatcctcgggatgctaatgatgctagatatagcttggatggtcgtgatgttgaaggaagtcgtatcattgtggaatttgccaaggggggtcctcgtggttcccgggaaaacttgggtcggggt

SEQ ID NO: 19858 - DNA, 402 bp, Glycine max
  Clone ID: LIB3049-019-Q1-E1-C2
gaaatgactgccacatactccactttcatattccctttagtcacaccaagatcaacttttcagttgagaggtttatccttgattactaagagcaccaagccaacccatatgagcaaaaacaccaagtagtgttttcactcacactgtttaacaaattcttgctccaatggagagcatattttttcagtctctctcccttgcaaagattccaaagtctcaaacttcacctctgctgaattcaccactcttgtttcactccaatgcaacctcagttgctttcagttcggtaccctatcatcaccaccatttgctcaagtgctttctgtttagatccaaagcaaacgaaaagcagaacctggtgggagttttacgtgcctctgaggctgcaacaaccccaacaac

SEQ ID NO: 19859 - DNA, 352 bp, Glycine max
  unsure (1)..(352): unsure at all n locations
  Clone ID: LIB3049-019-Q1-E1-C3
gggtactgtctaacctttgattcctcggttctctgttttgttctgtttcgcgtattgtcttcatacaggaacttgaacaatgaagaatgcaaagggcaagggagcagcaagggcctcaaaagaatcactgaagcccgttgatgaccgaaaggttggaaagcggaaggcttccggtaagcctgggagaagtagtgcaccaaagaaggagaagaaggccaagaaagaccccaacaagcctaaaagaccacccagtgctttctttgtgttccttgaggagttcaggaagacctttaaggctgagaatcctaatgtgaaggctgtatcagttgttgggaaagctggangagagaaa

SEQ ID NO: 19860 - DNA, 341 bp, Glycine max
  Clone ID: LIB3049-019-Q1-E1-C4
ggcattttcgtgtgaaaaaaaaaatcctcagaaccaaaatcggttttcttctgtctctgatctctcaaagcttcaaattctccttgtttggtttgtttgtgtgtttggagtatgatgtcgccgccggcggtggtaacggaggatgaggggcggagcaacgtgtcgtcgaccgtggcgtccggttcttcgcaatccttggaccgtttctctcagaatggggctggattgaaagaacgaaattacttagggttatctgattgctcatcagttgatagcagtgcctctactgtgccaagcttgtgtgatgagaaaaaggagaacatgaatttgtacgctacaga

SEQ ID NO: 19861 - DNA, 362 bp, Glycine max
  Clone ID: LIB3049-019-Q1-E1-C5
gacattggtatgcataagaagagggtactctggcaggggtagtgtaagaattaaagataggaatttggaagttggaatttggttggtttgagactcgagtattgaagctgtggatgcatattcttttggatgcaaacagtttagactgacggtgttgtttccacggtatattttgatagaggaaggtcgcggaatcaagactatttcagctgagttactcttctataagactttcttttcacacttccggtctctcaagcgtggatgacgacttgttcactactgtatttaatttctcttcatatgtgaaaattgtagaaaagacagtctcaagtgttataaaatcgctgtatatacacagc

SEQ ID NO: 19862 - DNA, 382 bp, Glycine max
  Clone ID: LIB3049-019-Q1-E1-C6
ggggagtgggagagaaagatgccgaagaggacaacgcacacatactcaagcgaggatgcagctccggagggtcctcactccgatctctttgtatattactgcaaacattgcggatcccatgtcctcataacagatacccaattgcagaaaatgcctaaaaggaaaaccgacaaagcttatgtactggacaagagcaaacatctggccagattgaacatgaacgaaggcgggaaagtagtgttaaaacgaggggaggggaaaatggagaaacaattccgcatgaactgtatggggtgtggactgttcgtatgctaccgggcggaacaagagttggagttatcgtctttgatatatgttcttgatggtgccctcagtactgttg

SEQ ID NO: 19863 - DNA, 355 bp, Glycine max
  Clone ID: LIB3049-019-Q1-E1-C7
gggggtttggccgtgtaagataagagggcagccaacaagaagcaaaacactgaaacaaaagcaaaaaagagctgtgagacagtgatggctcacggtgcttacagcaagcggcgcgtgagcgcaacgcgtcgatccaactccaagcctctgggcatcgccaagaagcccaagcccaagcccaagccctccgtttccctcaaaaaccagattcgatcccttgagcgcatgctccgcaagaatctgcctcccgaggtgcgagacgcgcaggaacagaagttggaggcgctgaagaagcagcaggagattcacactcgcctcgccgccgaacgcaagatattcttacgcgaccgaaaga

SEQ ID NO: 19864 - DNA, 368 bp, Glycine max
  Clone ID: LIB3049-019-Q1-E1-C8
gaacctcatgcattctattcttctctttctctctctctctctctcactttctctacctttctatgaatttctgttgcattaaattttctctgcagaaaaaaaagagcttccacaatggtaagcgctgcaattgctcgtaacgtcgtcggcgtaataggcaatatcatttcctttggcttgttcttttcacctgctccaactttctatggaattgtaaagaagaagacggtggaggagttcaagccagatccttatatagcaacggtgttgaattgtgcgttttgggtgttctatggaatgccttttgtgcaaccaaacagcattttagttgtcactatcaacagcgttgggcttgcgttcgagtttgt

SEQ ID NO: 19865 - DNA, 367 bp, Glycine max
  Clone ID: LIB3049-019-Q1-E1-C9
caggaccagcaggcatggctccccgcggttccgccgccgccaccgctggcatgcgccgccgccgtctcggcggaggaaacagctccgccagcaccggcgtcggaggcggcagcagcaacatgctgaggttctacacggacgatgctccggggctgaagatttcgccgacggtggtgctggtgatgagcctctgcttcatcggcttcgtcaccgcgctccacgtgttcggcaaactctaccgctccaaatctggcggcaccgtttgatcttacgatcctcttttggatttgtagttctgatccgcatccgatcgctttggtttcggtttttaattccgtaattttgttaacacttgctattttgttgt

SEQ ID NO: 19866 - DNA, 383 bp, Glycine max
  Clone ID: LIB3049-019-Q1-E1-D1
ggggggggaaacagcacaacacgtcgaactaccctccctcactcaaaaccctcgacgctcactccctctctcacatcgcaagccagccaccgcctccactggtggcactgtcataatccggcgcgaagttgccccctcaacgtgggagagtgtcgctgaagaagttgtttcgggtacggctaagagatttctgggaatctcatcctgaggaatgccagcacacaaaccagttgttgggttatcatggcaaccacagttgcctattccatcatcattcaaagccactgatgggtctcataccaaacctcaaactgaggcatcaagcagcactgttaggaaatccagttcagagctggttgatggccttttcgtccctccaaacg

SEQ ID NO: 19867 - DNA, 375 bp, Glycine max
  Clone ID: LIB3049-019-Q1-E1-D10
gtggtaggtgagttgggacttgtggcggcgagattgctgctgctccaaacgttacaggagagaaagccttctttgccgtgaattcggatcgagatcaatgggttcagcggagaaagagccactgttaacagcggagggaactcgatcaaactcaaagcacgagtcctcctcccatgggcaacttgagagaattctctccgacgacaccctacccttcctcaaccgtgtgggacccgccacctggatcgggttgaagctcctcttcttcctcgccgcccctgccgtcatcgtctacctcatcaactacctcatgtccatgtccaccaaatcttctccggccacctcggcaacctcgaactcgcggccgcctccctc

SEQ ID NO: 19868 - DNA, 352 bp, Glycine max
  Clone ID: LIB3049-019-Q1-E1-D11
gatccccaatcagagagaaaagttagggttcacaacttttccttttccttttgcttgcgaatctgaatcaaataatcaatcatccattcattattcatcatgtcgtcggcgaagaaaatcacgctgaagagttcggacggcgaggctttcgaggtggaggaggcggtggcgctggagtcgcagacgataaagcacatgatcgaggacgactgcgccgacagcggcatccctctgccgaacgtgacgagcaagatcctggcgaaggttatcgagtactgcaagaagcacgtcgaggccgcgaatcccgaagacaaaccctccgaggacgatctcaaggcctgggacgctgaat

SEQ ID NO: 19869 - DNA, 307 bp, Glycine max
  Clone ID: LIB3049-019-Q1-E1-D12
gacacgcatagagagagagagagagagaagcagaggaagaaggagaagaaggagatcttgagagatcagcgtcatggggagagaagttacaggaatgcaagttgtggacaagaagccaaatggtgttataccagcttcaaatggtagttctaatgataaagtatgcttttctcctaaaatggaagcagctaaggttcaagcgaaagatcacaaggtaaatgaatgtaccaaaactaactcttttgaggagaaaagccatgagaagatggatggtttgagtgccaaaacaacaaactgtaatactgac

SEQ ID NO: 19870 - DNA, 348 bp, Glycine max
  unsure (1)..(348): unsure at all n locations
  Clone ID: LIB3049-019-Q1-E1-D3
ggggactacaatggtaatgttatagaattgtatgtaaaaaataaaaatggagaagaaagagaagcgggcctgagaagcgaaaagaaggcctgngcttagttgataagcataactgggtgaggaagaaagaaagagagtgaagaagatggcgtcgagcggagcggtaccgttttggagggcggcggggatgacgtacataacatactcaaacatatgcgcgaatctgctcaggaattgcctcaaggaaccctacaaggccgaatccctctctcgtgagaagctccattttgttctctccaaatgggtcgacgccaagcctgaaaaacctactattcgttcagacacccc

SEQ ID NO: 19871 - DNA, 378 bp, Glycine max
  Clone ID: LIB3049-019-Q1-E1-D4
ggaagagaaatgggaggaagaatgcacacgatatcagactcggaggtgacgagcaacagcatggagcagtcgtcgccggcgcgttctcctccgcggcgggcactcgactacgtccagagtccttcagactacgacgtggagaaactgtcctacggctcaagccccatgggttcccgacaccaccatttccactactacctcgcttcccccatccatcactctcgcgaatcctccacctctcgcgtctccgcttcactcacagaccctcgcaacttctcctcctcctcatcctgtcagaagctctatcctcacctcaatcgcgacgttgaccccgacgactatgacgacgccgaccagcacctcatgcagtcctcccgc

SEQ ID NO: 19872 - DNA, 330 bp, Glycine max
  Clone ID: LIB3049-019-Q1-E1-D5
ggaagagaaatgggaggaagaatgcacactgtatcagactcggaggtgacgagcaacagcatggagcagtcgtcgccggcgcgttctcggcggcggcgggcattcgattacgtccagagtccttcagactacgacgtggagaaactgtcctacggctcaggcctcatgggttcccgacacgatcatttcgacgactagctcgcttcccccatcggtcactctcgcgaatcctcaatctctcacttctctgcttcactgcacctacctcgcaacttctcgtcctcatcatcttgtcagatgcgctatcctcacctcaggtcgcgacgttga

SEQ ID NO: 19873 - DNA, 325 bp, Glycine max
  Clone ID: LIB3049-019-Q1-E1-D6
gctcctacagattcttcagcaactgcgattttggatcggaacctcttctgcggcgtagcaatgggacactccaacgtttggaattctcacccaaaaaactacggtcctggttctcgcacttgccgagtgtgtgggaatccacatggattgatcaggaagtatggccttatgtgctgcaggcagtgcttccgtagcaatgccaaggaaattggcttcatcaagtatcgctaaaagagctgttgtcacctacggaccaatattatgttctggcactaagatgttttgaagatgttatgtttgaagaaacttgagacttgtttttttc

SEQ ID NO: 19874 - DNA, 390 bp, Glycine max
  Clone ID: LIB3049-019-Q1-E1-D7
gaagcaactaagcaagatatcatcacattgcaaagaaaatacacattacattactaagtctttgttcatttgagtagtagtgatggctagcctcaaggttgcatgtgtggttgctgtgatgtgcatggttgtggtggccatgagtgctgcacccatggcacaggccgcaatcacgtgcgggcaggtcgccggcgacatgtctccgtgcttcagttatcttcgaagcggcggaaaaccgtcgcaggcctgctgcaacggagtgaagtccctcagcagcgcggcgaagaccaccgcggaccgccagggggcgtgcagttgcctgaaaaaccttgccaataatatgggacagagtttgaatgccggcaacgcagcctctctccctggcaaatg

SEQ ID NO: 19875 - DNA, 338 bp, Glycine max
  Clone ID: LIB3049-019-Q1-E1-D8
gatctagagtttgtgaggaaggaagatgagtttgagggcatcagagatagcgaagaagttgaatctgcaacctcacccagaaggtgggttttacgtggagacattccgagaccattccgtccagctttcgacctctcagctcacccccgaatacaaagtggatcgccctgtatcgacctccatctattttctcgttccttctgggagtgtgtctcgcctccatcgcataccctgcgccgaaacctggcatcattacatcggcgaccctctcaccgtagtggaattgaatgagaaagatgggagcgtaaaattcacttgccttggatcagatctgactc

SEQ ID NO: 19876 - DNA, 380 bp, Glycine max
  unsure (1)..(380): unsure at all n locations
  Clone ID: LIB3049-019-Q1-E1-D9
gtactctatttgtaaatgggatacctcagaaatataacaagagagaggctcttcttgctcattttaagaagtttggggaagttattgacatctatattccattaaacagtgaacgggcttttgtgcaattctccaagagagaagaggctgaagctgctttgaaggcaccggatgcggtaatgggtaatcgttttatcaagctatggtgggctaatcgtgatagcattcgcaaagatagtactacaagtgggaatggtgtgattgtaactccccgtgggcaagcacctgcttttgttccatctcatcctgttgtcactgatangggtaaagacatccatcaagctgatgcttcaaagactatgtatgaagtatcatcgcct

SEQ ID NO: 19877 - DNA, 390 bp, Glycine max
  unsure (1)..(390): unsure at all n locations
  Clone ID: LIB3049-019-Q1-E1-E1
ggtccttctttgcgagattgaatcgtaagcagcggctaccctaatcctctcctcttcctctctactaatttcagctatggccgacgaagctgtggttgttccagatcccacccagatcgatgtcaagctctttaaccgctggagcttcgacgatattgagattactgacatttctctggctgattatatcggagtggcgacatccaagcacgccacgtatgtgcctcacaccgccggcaggtactcggtgaagcggttcaggaaggcgcaatgccccattgttgagaggctgaccaactctctcatgatgcacggtagaaacaatggcaagaaactcttggctgttaggatcatcaaacatgctatggagattantcatttgttgactga

SEQ ID NO: 19878 - DNA, 369 bp, Glycine max
  Clone ID: LIB3049-019-Q1-E1-E10
gataactagtcgtagtattatttcatcgattctctcccttctctttctctctgcgacaccagatgatggagacgacggcgaagcgaaacgctgtcgttgcgccaatcgcggcgttgttgttggtggtgctactcgcggcgagtgtggtggtggaggctcaggagaactcggacgtgaagacgctggtgaagcacatgcacgggaagaagtactgcgacaaaggatgggaatgtaagggctggtcaatttactgttgtaacctcactattactgattatttccagacctaccagttcgagaatctcttctccaagcggaactcgccggtggcgcacgccgtcggattttgggactaccactcgttcaacg

SEQ ID NO: 19879 - DNA, 354 bp, Glycine max
  Clone ID: LIB3049-019-Q1-E1-E11
ggcacaagtttgttgagatagctagaagcaataagatgaaaatgaaagtgcttgttttgtttgttgctacagttttggtagcatatgaatgccatggctcagactaccagaagttccctctccaaatgaaaactgggtttggtgggcaatacagcaatgaggtggcatgtgccagttggaggcttggcgtggaagcaaacaacgtagtcaagtggcaaactgttcctgcagcttgcggagagtacatagctgactacgttctaggagaccaatatagatcagattccaaaacagttaaccaacaagcttatttctatgctaaatccctcaaactcgccaacaaagatgtctttg

SEQ ID NO: 19880 - DNA, 373 bp, Glycine max
  Clone ID: LIB3049-019-Q1-E1-E12
gatcgtagaactgaagattcagttcgggatttttgcgcttcgtcctcaatttgcagcgcgtgagtgagggaacatggacggtgccgaattgtccaacataaagaaatggattgtgatgtatcctgtttacataaactccaaaaaaacgatggccgaaggaagacgcattggcctcgccaaagcctgcgaaaaccctacttgcgctgaaatcggtgattgctgcagctatctgaagcttccttttgcaattgagatagacaaggcgtaccctcgtgatttcatgcagagagggcgcctgagggtgttgctgaagaaggaggatggaactctctttaattcaaacatctcatccaaaaataaaattttgaatgac

SEQ ID NO: 19881 - DNA, 335 bp, Glycine max
  unsure (1)..(335): unsure at all n locations
  Clone ID: LIB3049-019-Q1-E1-E2
gtggaattgacggtcgaggagcggaaccttctgtcggtagggtacaagaacgtggtgggtgctcgtanggcttcgtggaggattctatcgtcgattgaacagaaagaagaagctaaagggaacgatgtgagtgtgaagaggataaaggagtataggcagaaggtggagtctgagttgtccaatatctgcagtgatatcatgactgttattgatgaacaccttattccccctagctctgctggtgaacctagtgtctttttctacaaaatgaanggggactattaccggtacctcgcggagttcaagtccggtgatgagagaaaagaagctgctga

SEQ ID NO: 19882 - DNA, 382 bp, Glycine max
  Clone ID: LIB3049-019-Q1-E1-E3
ggcacaagtttgttgagatagctagaagcaataagatgaaaatgaaagtgcttgttttgtttgttgctacagttttggtagcatatgaatgccatggctcagactaccagaagttccctctccaaatgaaaactgggtttggtgggcaatacagcaatgaggtggcatgtgccagttggaggcttggcgtggaagcaaacaacgtagtcaagtggcaaactgttcctgcagcttgcggagagtacatagctgactacgttctaggagaccaatatagattagattccaaaacagttaaccaacaagcttatttctatgctaaatccctcaaactcaccaacaaagatgtctttgtcttggacgttgacgacactactctctc

SEQ ID NO: 19883 - DNA, 343 bp, Glycine max
  Clone ID: LIB3049-019-Q1-E1-E4
gaattctgaatcagaagaagcgagcgaagatgtcgggtcgtggaaagggaggcaagggtttgggaaagggaggagccaagaggcacaggaaggtgcttcgtgacaacatccagggtatcaccaaacccgcaattcggcgtttggctcgcagaggtggtgttaagagaatcagtggtctcatctacggggagacacgtggcgtcctcaagatcttcctcgagaacgttattcgcgacgctgttacctacaccgagcacgctagaagaaagaccgttaccgctatggatgttgtttatgctctcaagaggcaaggcaagactctctacggtttcggtggttaatt

SEQ ID NO: 19884 - DNA, 387 bp, Glycine max
  Clone ID: LIB3049-019-Q1-E1-E5
acgaggaggctttctaaggggggcaccgaaatgaggtttgggatagtgcaaacactactgagttccatcaaacacaacgacgatgagctctgcccggacctaaggacatgatgtctgctaactcagtcggcatcattagcatgctccacagcgctctccgcgtctatgtcacgactctcttctgtgatctccgtgctgcttagaatgccatcgaactccacaatgaatctgatggaaatcagctccatgaatcagtactcttatggcatgactagcgaaccgttcagtacgtgtgtagcggtggaaaccacattggtggctgtgaaacaacaactgcccggcacacacattggaagctggttcctcagctgataccagctggagctg

SEQ ID NO: 19885 - DNA, 402 bp, Glycine max
  Clone ID: LIB3049-019-Q1-E1-E6
gaccagactcaggggatggtgaactacaactgcaatgacctttatgtccctacgttatgccacttggactcatcggttccgttaaagatggaggaagaggtgcaaagcggcgtgagaaaccaacgggtcgggaataataattcgtggtttcttcagaatgatttcacacaggggtttcagaattcggttgacacgtgtgggtttaaatacccggttcagccggtcgggttcgggttcagaaattgaaccggctgatggattaataatagtaatgtttaaatcgggtttatttggtgtaaataggtggggattctttgggcttaactcgtgggggttttagattccttttttagaaaaggaagaagaaggtgcaaattttggtcctcaatttcggctaaagat

SEQ ID NO: 19886 - DNA, 381 bp, Glycine max
  Clone ID: LIB3049-019-Q1-E1-E7
gtggacgtccatttttgtgggtcgttagagaaaaggtaattaatggaaaaaaagaagaggaggatgagctttgttgtttcagagaggaattggagaagtgggggaagatagtgacatggtgttctcatgtggaggttctttcgcattcttctgtgggttgttttttaacacactgtgggtggaattcgaccatggaaagccttgtttctggggttccaatggtggcgtttcctcagtggactgatcagatgaccaatgcgaagctcatagaagatgtgtggaagatatgggtgagagtggatcatcacgtgaacgcaaatgggatacttgaaggaaaggaaattgatgcatgtttggatgtggtgatggggagtggtgaca

SEQ ID NO: 19887 - DNA, 320 bp, Glycine max
  Clone ID: LIB3049-019-Q1-E1-E8
ggtcttgcacgcgaagagatggccaccgttccaaggcagcttgtgtgggagatcgtcaaggaaaacaactccttcgtggtcaagcagtttggaaggggcacccaaagcgtcgaattcagcagacagagcaacaatctctacaacctcaattcgttcaagtactctggtttggcaaacaagaaaactgttactgttcagcctgatggcacagatcaggcagtgttgttggctacaaccaagacagagaagcaaaacaagcccgctgcattgctccacaaatctgtgatgaagaatgagttcaggacgatggcaaaagctgt

SEQ ID NO: 19888 - DNA, 375 bp, Glycine max
  Clone ID: LIB3049-019-Q1-E1-E9
gactctcatcatagtcactgacacagttacgctctaaccggttattcaactccgcatccaattcaatgcaatgttgagaaataaaactcaccactagcttcttcaaccaccatcaacaatgaggtattattcccaattcaaacacttatcccatttcctcaaaaccctaacccgacgaccccaaaaccctaccttcgcttctgcacggatctcacagaaccttccaccgcgtccctcccacgcgcgtgactactgcagcagcggcggcgcgtcgctgtcgcagggttcggagaaggtggcggcgatcgtggacgaagtgatggggctgacgctgctggaagtgatggacctggtggaggtcatgcgcgagaagcg

SEQ ID NO: 19889 - DNA, 337 bp, Glycine max
  Clone ID: LIB3049-019-Q1-E1-F1
acagaacttttgttgagattgtcttccaaaacaacgagaaaatcgttcagagctaccatcttgatggctactctttctttgtcgttggtatggacgggggacagtggacacctgctagcaggaaccagtacaatctccgagatgcagttgcacgttgcaccacacaggtataccccttttcatggactgctatttatattgcccttgacaatgtgggaatgtggaacttgaggtctgagttttgggcacgacaataccttgggcaacagttatatttacgcgtttatacagcatcaacctcaatcagagacgagtttccctgttcaaagaatgcaat

SEQ ID NO: 19890 - DNA, 356 bp, Glycine max
  Clone ID: LIB3049-019-Q1-E1-F10
ggaacctttgcattctattcattcaagattcagcaagtgcgttttggaagcagagaccgaaatacttcgagttttctgaagttgttgttggttgttgattaagatggcccgtacaaagcaaactgctcgtaagtcaactggaggaaaagctcccaggaagcagcttgcaaccaaggctgcacgtaagtctgcaccaacaactggtggtgtgaagaagcctcatcgttatcgccctggaactgttgctcttcgtgagattaggaaataccagaagagcactgagctcctaatcaggaagcttcctttccagaggttggttcgtgaaattgcccaggatttcaagactgatctgcgtt

SEQ ID NO: 19891 - DNA, 275 bp, Glycine max
  Clone ID: LIB3049-019-Q1-E1-F12
gacatcgatatctgcgttctttttccagcttatgcgtgacggcacacacacattttacactcttttcatcggctcgctgttgcttcgctgtagtctcatggatgaatcagtcgaattcagcgttctggattcaatgggaatcacgttcatcggggtgaattatcaaggcggtgtcgctaacgcgtgagattctctgaacatgcattgagtgtatattcgcaaccgaacatcggacaagatcagtcatctcaatgagaatatatatatgtatcgct

SEQ ID NO: 19892 - DNA, 340 bp, Glycine max
  Clone ID: LIB3049-019-Q1-E1-F2
cgcgtccactgagagatcacgacagaatgggtggaattgacggtcgaggagcagaaccttctgtctgtaaggtacatcaacgtggtgggtgctcgtatggcttcgtggatgattctagcgtcgattgaacagaaagaagaagctaaagggaacgatgtgagtgtgaagaggataaaggagtataagcacaatgtggagtctgagttgtccaatatctgcagtgatatcatgactgttattgatgaacaccttattccccctagctctgctggtgaacctagtgtctttttctacaaaatgaacggggactattaccggtacctctcggagttcaagtccg

SEQ ID NO: 19893 - DNA, 375 bp, Glycine max
  Clone ID: LIB3049-019-Q1-E1-F3
gaagagagaaatatcttgttgagttgatttctgatcccaaattgagtttgagtttcagccatggtatctgtttctctgctcttattcctatctttctttgccttctttgcaccctctgaatctcacgacaaagtctcgttggaattgtactacgaaagcttatgcccctacagcgccaacttcatcgtgaatcacctcccaaaaatcttcaccccagatcttgccccaatcgttcacctcaaactcgttccttggggcaatgccaaactccgtgccaacgccacctttgactgccagcatgggccatatgagtgcttgctgaacacagttgaagcctgtgcaattcacatctggcctcaactcagcaaacatttt

SEQ ID NO: 19894 - DNA, 310 bp, Glycine max
  Clone ID: LIB3049-019-Q1-E1-F4
ggggagttggatgatggtactaaaattgcagtgaaacgaatggaagcaggtgtgattagtagtaaggccttggatgaattccagtctgagattgcagttctatcgaaagtccaacaccggcatctggtgtctcttttgggttattctacagagggtaatgaaagaattctagtgtacgagtatatgccacaaggggctctcagtaagcatcttttccattggaagagccatgatctggagcccctctcttggaagaggagactcaatattgccttggatgttgccagagggatggagtatccccatactc

SEQ ID NO: 19895 - DNA, 373 bp, Glycine max
  Clone ID: LIB3049-019-Q1-E1-F5
ggctgcagcaagggctcaacgcacgcaggaggaggagattgatcgagagaagagaagatgactacacgcttcaagaagaacaggaagaagagaggccacgtgagtgccggccatggccgcatcgggaagcaccggaagcaccctggaggacgcggtaatgccggaggcatgcaccaccaccggatcctctttgacaagtaccaccctgggttcttcggcaaggtcggaatgcgctattttcacaagctccgcaacaaattctactctccgatcctcaacatcgacaagctctggtccctggttccgcaagaagtgaaggacaaggcctccaaggagaacaaggcgccgctgatcgacgtcacgcagttcgggt

SEQ ID NO: 19896 - DNA, 386 bp, Glycine max
  Clone ID: LIB3049-019-Q1-E1-F6
ggcacaagtttgttgagatagctagaagcaataagatgaaaatgaaagtgcttgttttgtttgttgctacagttttggtagcatatgaatgccatggctcagactaccagaagttccctctccaaatgaaaactgggtttggtgggcaatacagcaatgaggtggcatgtgccagttggaggcttggcgtggaagcaaacaacgtagtcaagtggcaaactgttcctgcagcttgcggagagtacatagctgactacgttctaagagaccaatatagatcagattccaaaacagttaaccaacaagcttatttctatgctaaatccctcaaactcaccaacaaagatgtctttgccttggacgttgacgacactactctctctaat

SEQ ID NO: 19897 - DNA, 283 bp, Glycine max
  Clone ID: LIB3049-019-Q1-E1-F7
caggggcacaagtttgttgagataactagaatcattaagataaacctgaatgtgcttgttctgtttgttgctccagttttggtgacatatgtatgctacggctcagactaccatccgttccctctccatatcactactgggtttggtgggcattacagcactcacgtggcatgtgtcatttcgaggcttggcgtgctccattcaacgtcctcgcctggctgcccgttcttgcaccctccgcacagtacttcactcactacgttctacgataccaatatctcat

SEQ ID NO: 19898 - DNA, 356 bp, Glycine max
  Clone ID: LIB3049-019-Q1-E1-F8
catgttgtcatgtttgacttccccttgaattccattgactaccttcatcgcactggtagaactgctcgtatgggtgcaaaagggaaggtaacaagtttagttgctaaaaaggacttggacttggccagcaaaatagaggacgcattaaggaagaatgagagtttggaggctatcacaaaagaaagtgtccgaagggacattgcaaggacccaaaatcaaagcactgagaagggaaagagcaaaagattggttaaagtttcaaaagttatgggcaaatctggtagtcgttttggttctgggaataatggatcaggtatgaaatctggtaaagggtcaccagtcaaatctatgaagaa

SEQ ID NO: 19899 - DNA, 253 bp, Glycine max
  Clone ID: LIB3049-019-Q1-E1-F9
ggagtagcgatggagaagaagaagggtgagctaaagtcaattttccttcctttcctttccactagtcacataatcccgctagtggacatggccagactcttcgccttgcacgacgtcgacgtcaccatcatcaccaccgcacataacgccaccgttttccaaaagtccatcgatttagatgcgagtcgcggtcgccccatcagaacgcacgttgtcaacttccccgccgcacaagtgggtctccccgttggga

SEQ ID NO: 19900 - DNA, 361 bp, Glycine max
  Clone ID: LIB3049-019-Q1-E1-G1
acaccacataactaaaacacccatactctctctttctctttcattctttgatgcctttctacaaaaacacaaccttttaactgttattttttttttttcgtttgctccttattttcttcgccgaatcctagaatgtcatcgccggggttccctggcggcggtagtgcgtctgagtttttcgctggagcgggtgttttcggcggcagatccattccgggggccaccatgaacaaccccaacgccgccgcttccgccaccatcaacaacctccaccctctctaccgaacccaacaacaacagaaccttcccgcaatgtttctagatccttcctcgcagatcgcccaacgccaaacaccaacct

SEQ ID NO: 19901 - DNA, 352 bp, Glycine max
  Clone ID: LIB3049-019-Q1-E1-G10
ggaagttgagaggcttaagattgctaccggagaggcattgaaccaatccgagtcttttaatctgggaatgcaccagatgccatatgcagggccaaatttcttttcaattccaccacattcaggtccttctgggcaccagaacatgcaattgccaccatttggtcactcccaatccaccgtgccgactcatcagctgcaacaaacaaattctcaccaaatgtcagatatattgcaaaacgaccaacttggtcgtttgcaaggactcgatattagtagcaaaggaacacccatggtgaagtctgaaaggccctcaatatctgcaaatgagaattgcaccacattttgaaatttt

SEQ ID NO: 19902 - DNA, 370 bp, Glycine max
  Clone ID: LIB3049-019-Q1-E1-G11
gacagcacaatatgctatgctatgctctctaatccgtatccgccgtcacgctcctttccaccacactctccgctctctcttgccgattaaccgtttctcctcctcctcctcctcctccgcctccgccgccgccgccgccgccatggttgctcacgcgaaggacgaggcgtaccttagcgcggcgattccgaagcgcgtccgtctcttcgagaccatccaggcggagcagcgcacgcagcgcctctcgctttcgccggatcctatcaaggtcactctccccgacggcaacgtcaaggacgcgaagaagtggctctcgacgccgctcgacgtggcgcgcgaaatctcgaaagatttggccaacagcgcgctc

SEQ ID NO: 19903 - DNA, 378 bp, Glycine max
  Clone ID: LIB3049-019-Q1-E1-G12
gaaaaaaaatttagagcaaaattctaaggatcaggacagattttttcagcaggtgaagagctctaaagatgggttttctgtcattgctgaatattttggaaaagggatcatcagcaaaataagtaatggatccacttctggtcccgtatccggaactgcatcatccagtagtggtttctaaggcttgagatttctggcacttgctttctgcacttattctccatttaacattaaacaagttgggctttggatattggatgaaatttagttattttttcgggttttgattttctttaatattgcttgttgactggggtccaaacttcatattttccataatgtgctgactgttataaagaaaccaggagtggttccttc

SEQ ID NO: 19904 - DNA, 386 bp, Glycine max
  Clone ID: LIB3049-019-Q1-E1-G2
ggttctagtgtgtgattgtttgttgttgtaactcgttcttcttcttttgttgttctgtgtttgtgtttgttttttctctcacctgaaaatgtcttgctgcggtggtaactgtggttgcggaagctcctgcaagtgcggcaacggctgcggaggctgcaagatgtacccagacttgagctacactgagtcaaccaccaccgagaccttggtcatgggagtggcacctgttaaggctcaatttgagggtgctgaaatgggtgtgcccgctgagaacgatggctgcaaatgtggaccaaactgctcctgcaacccctgcacttgcaagtgaagtgttgggagagcaagcttcaagcagagatagcccttaattaagaataatgaataac

SEQ ID NO: 19905 - DNA, 409 bp, Glycine max
  Clone ID: LIB3049-019-Q1-E1-G3
gcaaaaaaacaacagaaggggatcagagaaatatcttgttgagttgatttctgatcccaaattgagtttgagtttcagccatggtatctgtttctctgctcttattcctatctttctttgccttctttgcaccctctgaatctcatgataaagtctcgttggaattgtactacgaaagcttatgcccctacagcgccaacttcatcgttaatcacctcccaaaaatcttcaccccagatcttgccccaatcgtgcacctcatactcgttccttggggcattgccaaactccgtgccaacgccacctttgactgccagcatgggccatatgagtgcttgctgaacacagttgaagcctgtgcaattcacatctggcctcaactcagcaaacattttcctttcatctactg

SEQ ID NO: 19906 - DNA, 260 bp, Glycine max
  Clone ID: LIB3049-019-Q1-E1-G4
gacacatagcacaacacagcctcgttcctttgctgaccaactcggttgttgtgtttcactttcagtttcagctacggttatcgcatccttgactcactttgccctaactcccctctccgctgttcacaacactatccgtttcacccggacccacaagtctcgccttcgttgcaccttagatgccaatgtttccgacatgagcgttaacgcgccacaaggtttgtttccactcgagccacaccattacctacgatcgaggc

SEQ ID NO: 19907 - DNA, 376 bp, Glycine max
  Clone ID: LIB3049-019-Q1-E1-G5
gatgtgggtcaagttgcacaaataaaatgtggtaacataaaggtatattatatgcttcaaattaagtgaccccaagtttttaatgttattccttcttttttgaatatgttgttctagcggacgtttcttccttcgaccacgtttcctcgtgatttttagtttgtgggtttcagttgtccttttattaaaaaaataaataaataaattcaagtgaccccattatgttgattcaggagtattgtgtttttggggaattgtagggggcctaagattcgatgttggggttgtttgtgcaggtgatggagggtgtgaaggagataacaagaaatggtgccaaatttatggatggaaaagaaaaggaattcgatgctataat

SEQ ID NO: 19908 - DNA, 319 bp, Glycine max
  Clone ID: LIB3049-019-Q1-E1-G6
gaaacgaaaaggccaagcaaagaactccgtagcaagaagttgaatgagcgatgatgggtgctgattgaagcatgagaagccaagaagtccaaggagcatacatgcagttcactccaacatgatgtgagaactcctccttcaccatgtccaagtgaaagatgcacttgagcacgtaaagtaaagacaaagtagtggcagtgagcagtgccacacaccaaagtagtagaaacgcgatggaaggcatcaaattgaatccatgccagagagtttgtgagtccctgttgtgtttactcaaactctttcagagcaaagcttgtgc

SEQ ID NO: 19909 - DNA, 373 bp, Glycine max
  Clone ID: LIB3049-019-Q1-E1-G7
gacagcttcaaactcaaactcacctcaacttccacttgctgttttccacgttatcctttccaaaaacctgttcttttctcaaatgggtggttcaggaagatggctcaagtccctcatttctctcagaaagccctccactattgatcaagagaagggtggtgacaagagtaagagaaagtggaagttatggaagagcacttcagaagggtttgggattggatcatcaatgcagaaggggcatggtggtggtggatcctttgtggtggacgatggagcatttgctgctgctttggctgctgtggtcagaactccactcaaagactttatggtcattaagcaggaatgggctgccattcgaatccaagcagtgttt

SEQ ID NO: 19910 - DNA, 367 bp, Glycine max
  Clone ID: LIB3049-019-Q1-E1-G8
ggggtttggtgaatgagaatcggattgaagaagaagaagacgaccagcggtgcagcttcgaaattgctggccatggcgaagaagctaagctcgaagcccaccattttgttcatcttcgtctctttcatgcttttttgcgcctttcttcctgttttcgctcctcttccttctttctcctctcaccattctcatcgcaatacagttaacagaaagttcgagatcgccaacgataggttctggaaagatggtgaaccatttcagatcatcggtggtgacgtgcattattttcgagtgcatccagagtactgggaagatagactgctaaaagccaaggcattgggcttgaacacaattcagacatatgttc

SEQ ID NO: 19911 - DNA, 378 bp, Glycine max
  Clone ID: LIB3049-019-Q1-E1-G9
gagagaaagagagagaaagatgtcgaagcgtggtcgtggtggttcggcggggaacaagttccgcatgtcgctgggtcttccagtggcggcgacggtgaactgcgccgacaacacgggggcgaagaacctctacatcatttcggtgaaagggatcaaaggccgtttgaaccgtcttccctcggcctgcgttggcgacatggtgatggccaccgtgaagaagggaaaacccgatctgaggaagaaggtcttgccagctgtcatcgttcgccagcgcaagccatggcgccgaaaggacggcgtctacatgtacttcgaagataatgctggtgttattgtcaatcccaagggagaaatgaaaggttctgctatcactggtcc

SEQ ID NO: 19912 - DNA, 374 bp, Glycine max
  Clone ID: LIB3049-019-Q1-E1-H1
ggacaagacaaagaccatgagatgatagtcgtaggaaccacggtgagaagagaagaagaattattattacacacaaaacaaacgcagttgatgttgctgctctagactgttctgcgactctttacgcaactatattttcgtttttgccgagatagggttttcggttttcttcactgctctctcaccaggggcgagttgtgaatggaagcacaaggcataaagtataaagcataaagcatagttagttgagtcaatggaaggtgttgatcaaagaaatagttctgcatttggtgttccagttccaagaccaccaaaccagaaatctcgtatgccaccatctcaccctagtatcaatgtttcaccttcagcaactc

SEQ ID NO: 19913 - DNA, 353 bp, Glycine max
  Clone ID: LIB3049-019-Q1-E1-H10
gggaaagaaacgtacaaaaaacttctggttgcatcacggcctaaaggctttgcacagagaaattatgaacaccttgtgtcattaacccatggtgactttggaagcagtgctgtgggacgtgtcacgttttttctactaaaacttgctgcattagaaaccgtgaggagattctccaggagtaaatgtccgtgtgtatggcgaggcctacagggtctccaaatccttgtctatccaccattcaaatggattcagaggtgggcacccttcaggggtttggtgaaaagcatgcaggtactatcaagacctctattagtcctttctattgcaaccgtctttactgatcaaccacaatg

SEQ ID NO: 19914 - DNA, 358 bp, Glycine max
  Clone ID: LIB3049-019-Q1-E1-H11
aagggcattcctactctgaaatcattaatgagagtgtcattgaggctgttgactctttgaatcctttcatgcatgctcgtggtgtttctttcatggttgataactgttcaaccacggctaggttgggttcaaggaaatgggctcctcgatttgactacatcctaacccagcaggccatggtggcggtggacaatggaacacctattaaccgggacttaatcagcaacttcctgtcagacccagtgcatggagccattaaagtttgcgctgaactgagacccacagtagacatttctgtgccaccagatgcagactttgttcgtccagagttgcgtttcagcaattagaacttaaaatc

SEQ ID NO: 19915 - DNA, 369 bp, Glycine max
  Clone ID: LIB3049-019-Q1-E1-H12
gacggcaacagaagaataatcaaatttctaagatctatccgacgtcgtcgcagatccaccaaccgttatggctgccttcagcggtgatgaaacggctccgtttttcggcttccttggagccgcagctgccctcgtcttctcctgtatgggagctgcctatggcacagcaaagagtggtgtgggcgtggcttccatgggtgtgatgagacctgagctggtgatgaagtctattgtccctgttgtcatggctggagttttgggtatttatggccttattattgctgttattatcagtaccggtattaatccaaaggccaaatcttattacctctttgatggttatgcacatctctcctctggtcttgcctg

SEQ ID NO: 19916 - DNA, 320 bp, Glycine max
  unsure (1)..(320): unsure at all n locations
  Clone ID: LIB3049-019-Q1-E1-H2
ggcgctagttctgagtattctgatcgctccctgagagagctcgtcgcggcggttgcagaagaagattgcaagatgaagttcaacatcgcgaatcccaccactggatgccagaagaagctcgagatcgacgacgatctgaaactgcgagcattttgggacaagaggatctcacaggaggtcatcggagatgcactcggtgaggaatttaagggctatgtcttcaaaattaccggaggttgtgacaaacaaggatttccaatgaagcagggagtgctgactcctggtcgtgtnagacttttgcttcacaggggaactccttg

SEQ ID NO: 19917 - DNA, 347 bp, Glycine max
  Clone ID: LIB3049-019-Q1-E1-H3
caaaacggcgggtcggagaatgccgctgctgctgctacggtgtcgtttgtcgctgtgaagccgcagctcctcgtcgaagctcccaaagccaacgacgccattctgttcttcaaggctgcgtttggcgctgaggaagttggccgtacgctcaaccctaagcgcaaagctgagcacgagctccctctcatactctccgcagaactcaaaatcgctggctccaccattctcgtcgccgacctcgttgatgacacttcttcgccagcgaaaacggggggaaacggtgtcgttttgtgcttggagacggaggacgtggatggggcagtagctaatgcggtgagcgctggtgc

SEQ ID NO: 19918 - DNA, 339 bp, Glycine max
  unsure (1)..(339): unsure at all n locations
  Clone ID: LIB3049-019-Q1-E1-H4
gggagtatggacgtgtgttagttggctaatgaggagtcctcatttttcttcatctgtatctgaaccctaatcccttcggaattggaaagaataagaatcatcaatggagggagtgctgtccgcgaatgagcaacagagcatggtctcttctttcctggaggtcgctcagggccagaccgccgagactgcgcgccagttcctccaggccacaagttggaagcttgaggaggctcttcagctgtttctgatanggagtgaaggtggggccgtgccgttgccggtgccgccgcctccgttgttgcacactccgccttcggaaaatgtcgattccctggacga

SEQ ID NO: 19919 - DNA, 352 bp, Glycine max
  Clone ID: LIB3049-019-Q1-E1-H5
gcttttgtgaaacctagccagccagcgattgccgccatttgcttctcctccgaacgatccaacaattcaacggccctgtgtttgttaattgagattttagattcaacgctttaacattggtacaatggcttccaacatctcaccttctgcctttgataaagagcagatatttggaatggctgaaaaggagatggagtatcgggttgaattattcaacaagatgacccagacatgtttcaataagtgtgttgacaataggtacaaggaatccgagctaaatatgggtgaaaatagttgcattgaccgctgtgtttcaaaatactggcatgtgactaatctaattggtcagctg

SEQ ID NO: 19920 - DNA, 382 bp, Glycine max
  Clone ID: LIB3049-019-Q1-E1-H6
ggagaagaaaaatgggaggaagaatgcacacgaaatcagactcggaggttacgagcaacagcatggagcagtcgtcaccgtcgcgttcccctccgcggcggccactctactacgtgcagagcccttcgaaccacgacgtggagaaaatgtcgtacggttcaagccccatgggttccccacaccaccatttccactactacctctcttcccccatccaccactcccgcgaatcctccacctctcgcttctccgcttccctcaaaaaccctcgcagcaacttctcctcctcctcctcctggaagaagctccacccacacgccaaccccgacgccggcctcgacgacgacgacgacgacgacgacggcgacgacgacctcaacac

SEQ ID NO: 19921 - DNA, 412 bp, Glycine max
  unsure (1)..(412): unsure at all n locations
  Clone ID: LIB3049-019-Q1-E1-H7
gatcgcacaacattattctttcgcaccttgcagaatcaattttctctctcaatcgtctttcatggctcgtaccaagcaaaccgctcgcaaatccaccggtgggaaggctcctaggaagcaactcgccaccaaggctgcaagaaaatctgcacctaccaccggtggagtcaagaagcctcatcgctatcgtcctggaactgttgctcttcggtaatttgctcctttcagtaattgttttgttttttcttctccttcgcgttttgaattttcgcgaattattgttttttttttcgtggtttcagtgagatccgaaaataccaaaagagcacagagcttctgatccgcaagctcncctttcagcgtcttgttcgtgaaatcgcgcaagacttcaaggtatgttctaaattcaaaa

SEQ ID NO: 19922 - DNA, 404 bp, Glycine max
  Clone ID: LIB3049-019-Q1-E1-H8
ggcacttcaattgcaatcaaattagttcattctctttgcgcagttccctacctctcctttcaagatgcagatcttcggcaagacactcacagggaagaccatcacacctgtggggggaaactctgagaccatagagaaagtttaagggcaaatttcaggacaagggagggattcccccggttatcaaagtctcaacttcgccgggaaacagctccacgacgggcgtagtctcgccgactacaacatccacaaggagtgaacccttcatcatgtcgttcgtccccgtggtggcatgcagatcttcgtcaagactctcactggcaaaaccataaacctacaagtcgaaagctctgacaccaatgacaacgtcaatggcaagattcatgacaaagaaggaatccccc

SEQ ID NO: 19923 - DNA, 333 bp, Glycine max
  Clone ID: LIB3049-019-Q1-E1-H9
ggattacaattcttcaaatgaaaagccataactgtcccgaatgatagcttccggttaactttaatctttggttgcatgtacaagatacgccattatctgttttgcatattcatcatactacatggcctgaccatggagttcccaattatacatatgctgttcgtgaaatttttaaaagattatatcatttagaaccaaaccttggccccatagtggtgcactgcagtgccgatattggtagaactggaacatattgcacaaattcacaacacaattcagagaatacttgctggtgatatctctgctgtaaatattgctgacacagtcactacg

SEQ ID NO: 19924 - DNA, 355 bp, Glycine max
  Clone ID: LIB3049-020-Q1-E1-A1
ggccacgtcatgacgagagtagcgatgatctagtgaggagattttggtgggaagatattttcgacgattttcgcggttgtgggcgaaagctggctgccagcgatagtgaatcagaatcgtaagttcgacaaagaagcaagcaaggttattattctttgtggttgcggaacgaagcatgctgttgctgttcgagaatggatgagttgaacggcgccatgacgacggagaatagcaatgcggaggtggttcgatgggagaggtttctgccgcggatggtgctcagagtgctgcttgtagaagctgatcattccacgcgccaaatcatcgccgcgcttcttcgcaaatgcagttacac

SEQ ID NO: 19925 - DNA, 360 bp, Glycine max
  Clone ID: LIB3049-020-Q1-E1-A10
ggcggtggccgtgacctactgcaagcgcgggcgcggcctcatcaagatcaacggctgccccatcgagctcgtcgagccggagatcctccgctttaaggccttcgagcccatcctcctgttgggaaagagccgcttcgccggcgtcgacatgcgcatccgcgtcaagggcggcggccacacctcccagatctacgccattcgccagagcatcgccaaggcgctcgtcgcgttctaccagaagtacgttgatgaacagagtaagaaggagatcaaggacattctggtgaggtacgatcgtaccttgctcgtcgcggattccaggcgctgcgagcccaagaagtttggtgggcgtggcgcacg

SEQ ID NO: 19926 - DNA, 370 bp, Glycine max
  Clone ID: LIB3049-020-Q1-E1-A11
ggatttgatttgatcatttcaatcttcaatttttttttatatatccaccaatccgcaaagtgcaaatttctaatctttcacgtattgggttcttctcttttccctcttcgtctccgatcgatccaattctcttcccatggctacgatcggacacaacaatctcaatgccaaattggttcttctcggggacatgggtgctgggaaatccagcctcgttttgcgctttgtcaagggtcaatttctcgaatttcaggaatcaacaataggggcagcgttcttttcacagacgctggcagtaaatgatgcgacagtgaagtttgagatttgggacacagcaggacaagagaggtaccatagcttggctcccatg

SEQ ID NO: 19927 - DNA, 344 bp, Glycine max
  Clone ID: LIB3049-020-Q1-E1-A12
ggcacaccaaacaaacaaaaccaaaccaaacccaacccaccctttagatattccctagtgtcacctttgtgttaaacttccaactccactcttttttttcttcttcctctttcctcagccattactctctctctgacacctacctgtgtctcttcattatttttcttctgccttcaaacaaagtgatgaaagaggtgacggttgaagctgaaggaggagcaccaggagtggtgcaagagggtggaaaaggaaccacggttaggccagacatacacaacagtgccatgaaaattttgagggctagagagccttataatgggtacactgaggaagtgggagagaag

SEQ ID NO: 19928 - DNA, 378 bp, Glycine max
  Clone ID: LIB3049-020-Q1-E1-A2
ggaagaaaaaaattgattctaaaaatcagtctcaacagagataaacaaatggcaaaagcttcattgttgtttccttacttgatagttataattctcatagcatttggaacaggttttgcaaatgcatgtaacttcccgtgtcattctcggaacggttgtggtaatctacactgccctggttgcttaaagcaatgcgtcaacttttgttgcctttgtgattgtagtccaccacccaatggaaatgtttcataaacaaagaatcataataattaaataaacttgagattccattgctcaaattatgatgtatgaactccctgcctttgcatttgtaataagagaagatgaaataatcaacaacattggcatctctctaaa

SEQ ID NO: 19929 - DNA, 341 bp, Glycine max
  Clone ID: LIB3049-020-Q1-E1-A3
gctcacttaaatagtttatctctcatttgacatgatatctagaaccaggttgaggaaataatgaaaaccgtccctcaccggggacctactgtcctcggggggcctttctagtcattgcacttatctcagtgacctgcttccgcttttcgacgaacctttctcctttttcagccattgctgaccaccatcacttttttggcgacactgtccctgggtgagcctttctgattgtctcacttattcttacgacctattttcgcttttcaatggctctttctctttctcaagcgacttttcgagccactatcgaccatcgtcactttttcgaccaacgccacaac

SEQ ID NO: 19930 - DNA, 395 bp, Glycine max
  Clone ID: LIB3049-020-Q1-E1-A4
acacaccgtttgttctattcttaactcaacttctgctacccactctcttcttccaagtccaaccacgcttttctctacagtcatgggcaaggtcaagatcggaatcaacggatttggaagaattggccgtttggttgccagagtcgctctgcaaagagacgatgtggagctcgttgccgttaacgaccctttcattaccaccgattacatgacatacatgtttaaatacgacagtgttcacggacactggaagcatcacgatgtcaccgttaaggacgagaagacccttctcttcggtgacaagccagtcactgtttttggacacaggaaccctgaagagatcccatgggggtcaactggagctgatatcattgttgagtccacgggagttttca

SEQ ID NO: 19931 - DNA, 377 bp, Glycine max
  Clone ID: LIB3049-020-Q1-E1-A5
gaccgtcaccgattgattattctcatcgccgcgctcttgaaagcttgaaccgagatacgattttttttttaaagcgtttaggcgaattcagcgagagttgcggctgggaatggacggtgacggcgaggagttgacggcgcaggagaccgctttgtatgaccgtcaaattagggtttggggagctgatgctcaaagaagattaagcaaatctcatgtcttagtctatggaatgaaaggaactgtagctgagttttgcaagaatattgttctggctggagtaggtagtctgactttagtagatgaccgggctgccacggaggaaatgctttcctccaactttctcatccctcccgatgagaatgtgtatagtggaaaga

SEQ ID NO: 19932 - DNA, 388 bp, Glycine max
  Clone ID: LIB3049-020-Q1-E1-A6
ggaggcaaaggcatttggatccgacgacctcgttggttttcctttgtaagttgtaagcatttggcaccagcaagccctgtcttcttcttcgatcagattagggcatttcatttctgcgatggccgcagcacccgctagagctcgtgccgattacgattacctcatcaagcttcttcttatcggcgacagcggtgtcgggaagagttgtctgcttttgagattttctgatggctcattcacaaccagttttatcaccaccattggtatcgattttaagataagaaccattgaactagacggcaaacggattaagttacaaatctgggatactgctggtcaggaacggtttcgaactattaacacagcttattaccgtggagccatgggt

SEQ ID NO: 19933 - DNA, 173 bp, Glycine max
  Clone ID: LIB3049-020-Q1-E1-A7
catctgggctcacttggatcctttatcgctcagttgctatgatatctagttccacgttgtcgcagtaacgtctaccgtccctcatcgttgacctagggtcctcggggggtctttcgactcattgcaattatctcagtgccctgcttccgcttttccactaacctttctccttt

SEQ ID NO: 19934 - DNA, 404 bp, Glycine max
  Clone ID: LIB3049-020-Q1-E1-A8
ggacgggggggttgttaaattaaagaaggaaggaacgccgcaatggcaatggcaatggagacgagaaggcgaggttgatgattgtgatggcggtagcagacacaaacaggaatggcagtggcatcctccttcatcatcatcatcgtcgtcatcatcgctctcatcttcttctccctaaaccctcctcctgcaccatcacgtaagtcacttctcctcaccacttcatcgtcttgctccaacgaatccaatggccttctcatctaccactgcatcttcccccaaacttcctctttctcaatcccctccctctcgctcgtcctcctcctccacttctacatcctcaacaccaccgcgcagcaccacttctccctcgtcaccacaaagctcgcctcccacctcaacct

SEQ ID NO: 19935 - DNA, 337 bp, Glycine max
  Clone ID: LIB3049-020-Q1-E1-A9
ggactcgagagttttcaaatcgtaaaacctaaataaatacatcactgccttcagaaaacgactgcgcctagcttctagccaccctttaatcttcgtcaacgttacttttccacctcgtacgagggattcaattgagagggaaagggactgatggcagacaacacacagtcttactgggaaggctacaaagcgttttggtcagagaggttttcctttttgagcaactattcgaggttcatcaaccgtgataaacccatcccttcctggtcaagctctgatgtcgaggagttcattgcttctgatcctgttcatggacccgtcctgaaaagtgctagag

SEQ ID NO: 19936 - DNA, 363 bp, Glycine max
  Clone ID: LIB3049-020-Q1-E1-B1
gacatcgcacatcaattattctttcgcaccttcgaaaatcaattttctgtcttctctgcgtcttcttcctctatcaatcgttttccatggctcgtaccaagcaaaccgctcgcaaatccaccggtggaaaggctcctaggaagcaactcgccaccaaggctgcaaggaaatctgcaccgacaaccggtggagtcaagaagcctcatcgctatcgccctggaactgttgctcttcgtgagatccgaaaataccaaaagagcacagagcttctgatccgcaagctccccttccagcgtcttgttcgtgaaattgcgcaagacttcaagaccgatttgaggttccagggtcacgctgttcttgcgc

SEQ ID NO: 19937 - DNA, 372 bp, Glycine max
  Clone ID: LIB3049-020-Q1-E1-B10
ggccgcaaacagagatgacgacccgattcaagaagaaccgcaagaagcgcggccacgtgagcgccggtcatggccgtatcggaaagcaccgtaagcaccccggcggccggggaaacgccggtggcatgcatcaccacaggatcctgttcgacaagtaccatccgggcttcttcggtaaggtgggaatgaggtacttccataagcttcgcaataaattctactcccccatcgtcaacgtcgaaaagctatggtctctcataccccaagacgcgaaggaaaaagccctaaaatcgaaggacactgcccctctaatcgacgtcacacagcacgggtacttcaaggtcctcggaaaaggtgttctgccccaaaatc

SEQ ID NO: 19938 - DNA, 364 bp, Glycine max
  unsure (1)..(364): unsure at all n locations
  Clone ID: LIB3049-020-Q1-E1-B12
gattcaaactgaacaagaaagataaagcattccatagcctcccataaaaatgaagaatactatcttctctgctctctttctactttgtgccttcaccacctcatacctaccttcaaccaccgcggtggtcgataccgacggtgatattcttcagaatcctggcacatactttatcttgtccgtttttcgacccggcggcggagtagaattcgccgccactggaaacgaaacttgccctctcactgtcgtgcagactctcttcgggaggggctttccagcaatattatcgtcncggttacgaatcnctttcatcggcgaaggacaactcttcagcatcctgttccgtantgtgccatggtgcgcc

SEQ ID NO: 19939 - DNA, 355 bp, Glycine max
  Clone ID: LIB3049-020-Q1-E1-B2
gtacatgaaggtgaaaggtaatgttttcaagaacaagagagtcttgatggagagcattcacaagtccaaggctgagaaggcaagagagaagactttgtctgatcagtttgaggctaagcgtgcaaagaacaaggctagcagggaaaggaaacttgctcggagggaggagcgcttagcccaaggtcctattgacaagacatctactgcacccagtgccccagctgccacagcaccccagtctacccaagcgccaaagaaattcaagaagtgagtagcatatcctggaattcaaaggacgtggagtctttaatagctctggcaaaatctttagtctgctaaagtagttgtgacgaat

SEQ ID NO: 19940 - DNA, 398 bp, Glycine max
  Clone ID: LIB3049-020-Q1-E1-B3
gagaaagagaaagaaagaaaaagagaaaaagaaaaaggagaaagacctaattttgtcactgtaattcttcttcttcaaagaaaaccccaatttcgaacgcttcaaattcaattcaggaaaccctagtgattaatttcgttgcgaaacggcgattcaagattatcgtgagccagaagatggtagcggaagcggaaattatctgtcagcagaacattccgatgttggacgtgaagtatcatatttgcgtggctcaagaacacaacgtgaaggttgaggtttcacccaaatcaccttcacctcctgttccgatctttggccaagcagtgagttgctctgagatcattaaagattccattttggaggcccctgcgatgaattttttcccaaatgtgcgttct

SEQ ID NO: 19941 - DNA, 284 bp, Glycine max
  Clone ID: LIB3049-020-Q1-E1-B4
gggttgcaacaccacaacttcctttgctagcgtctcatctgtgtcgacattgcatcaacgactacatccctagtattattgctcatattgattgaacactactagatgatgtgtataacgttgtacagctagctagctagctttctattgtctaatatacctttgtctgtgttgtaaattaaggtggaagaagcaagtaatccctcataatacacacacacacatatatagatatataatggcggattggggtccactggtgatagcagtggtgctgtttgtgt

SEQ ID NO: 19942 - DNA, 363 bp, Glycine max
  Clone ID: LIB3049-020-Q1-E1-B5
gatactacacacagacacacagaggatcatatacacatacaacttcacaacatccacacagtccaacatggcttaattgatctctcttcaaactccttgcattctttctatcgttacaacaatgactttcgaagagaagacaatttagcataccgctttacacctcagttcccagctacacccttcaagagtgtgtcgtggggctatgcttcaaattgatcagcatcctccttcatcatccgtatgtgtacatacactacaatcgaagtcccaccatagccttcaagggtctctcatgaagcttccatgccttcagagcatgcataatcgtcgcattctcaggtgcgaccaatgcacttgtgg

SEQ ID NO: 19943 - DNA, 402 bp, Glycine max
  Clone ID: LIB3049-020-Q1-E1-B6
gaatttatttcttgcttgagttatgcctatttaatttccattcacttggattttttttattctaagatcgatcatcttcaatttccctatattacttgcaatattgattgaacactactagatcatgtgtataacgttgtatagctagctagctagctttctattgtctaatatacctttgtctgtgttgtaaattaaggtgcaagaagcaagtaatccctcataatacacacacacacatatatatatatataatggcggattggggtccagtggtgatagcagtggtgctgtttgtgttgctaagccctggtcttgtgtttcaattgccagggaagagcagagtggtggagtttgggaacatgcaaaccagtgcagtgtctatcttggtccacacaatca

SEQ ID NO: 19944 - DNA, 398 bp, Glycine max
  Clone ID: LIB3049-020-Q1-E1-B7
ggcgacagagcatgtcccgtttcctaggaaaatcccttaggactaaggggcccttgtttctgcacaaaattttgggaatctcgtccgagtcgcataacatcctggttttatcaaggtatcgccgccacttttcacattcccttccccacaatacttcaaatttggttccaagtaccgggtctctccaaattcggttctttgcctctgaggccgctgctgccaccactgaaccctcaacctccgatgggctcacggtccaaggaattctggccaataattggaacattctcgacgaaaacgacggcgattggaagagtcatgccaccgccatagctcaatctattcacttgatcaaacgccgtttacattgggaaaaattgaaggtgaggttggatatg

SEQ ID NO: 19945 - DNA, 398 bp, Glycine max
  Clone ID: LIB3049-020-Q1-E1-B8
ggaaacagagagtgagagagagggcaaaaccctagctttggagtcttccctcccatctcccacttcatgcaatctctgcagccatggcgagtaccaaagttcagagggttatgacccaacctattaacttgattttcaggtttcttcagaacataacgcgcattcagatttggctttttgagcagaaggatttgaggattgaaggccgaatcatcggttttgatgaatacatgaatttggttcttgatgatgctgactaagtgcacgtcaataagaaaagcagaaagacattatggatgatccttcttaaaggagacaacataaccttgatgatgaacacggggaaatgattaacactctggcacagttgtaaactccgttcctattcaacaagaaag

SEQ ID NO: 19946 - DNA, 358 bp, Glycine max
  Clone ID: LIB3049-020-Q1-E1-B9
gaacgaccacaccctcaaaaccatttccaactaccaactactctctctatcactctcccatggcttcctcttccctctttctctcactctctctcaccctttgccttgtttcctctctctgctatgctcacaaatcttccttaaccctacctgtgacaaaagacgattcaacccaccaatacctaacaaccctctcttatggcacccctgttgagtctgcaaaattcgtgcttgatctcggaggctcaatcctctgggctgactgtgcatccagaaccaccccatcttccacccttgccccaatcttccatcgttcaattcgctgcctcacggcaaagggtccttaaattgagacaca

SEQ ID NO: 19947 - DNA, 405 bp, Glycine max
  Clone ID: LIB3049-020-Q1-E1-C1
gggtgctgtgagtgagattacccatagatagagagcgcggcataacctaaacttacccttcttctctctgtgtgtgtgcgcatcaaacgcaaccagaagcagccatggccactgcaagaactgtgaaggacgtttctcctcatgagttcgtcaaagcttactcttctcacctcaagcgatctggcaagatggagctgccagagtggactgatattgtgaaaactgcaagatttaaggagttggctccttatgatcctgactggtactatgtcagagctgcttccatggcaagaaagatctacttgagaggaggacttggtgttggtgcctttcagaggatttatggtgggagcaagaggaatggtagccgccctcctcatttctgcaagagcagtggtgctgttg

SEQ ID NO: 19948 - DNA, 333 bp, Glycine max
  Clone ID: LIB3049-020-Q1-E1-C10
gtagatccattggagaaatttctttctccctcaccaacaaataaatgctcagaggagctacaaagaaaaataaataaattcctggagtataagaaggctggaaaaagctttaatgcagaagttcgcaacaggaaggactatcgtaaccctgacttcttactgcatgcagtgaggtaccaggatattgatcaaatagggtcttgcttcagtaaagatgtatttgaccctcatggatatgatcaaagtgacttctatgatgaactagaagctgatatgaggcgcgaaagtgagaagaaagagcaagagaagaagaaagcacagaaggttgaattt

SEQ ID NO: 19949 - DNA, 386 bp, Glycine max
  Clone ID: LIB3049-020-Q1-E1-C12
ggcgtcgctccgcaccagtttcaccgcacgactatcttgttgtttggagcgatccgagaaaaactctgtagacatgttgcgtattatcatgacctccttacacgtgatgagcttcactctgagtcgttccgttacaaggaaagtgagaatggaatgctgtgggaagttgaggggaagtgggttgttaaacgagcagttgatgtagacattggtgcaaacccttctgctgagggttgaggacaagatgacggacttgatgatgcagctatgaacgttgtagacatatgttgacacattgagacttcacgagcatatcgcattcggtaagaaccactttgtcacgttcagtaatatgtttatcaagaatttgactcccaagctctatg

SEQ ID NO: 19950 - DNA, 369 bp, Glycine max
  Clone ID: LIB3049-020-Q1-E1-C2
ggttctagtgtgtgattgtttgttgttgtaactcgttcttcttcttttgttgttctgtgtttgtgtttgttttttctctcacctgaaaatgtcttgctgcggtggtaactgtggttgcggaagctcctgcaagtgcggcaacggctgcggaggctgcaagatgtacccagacttgagctacactgagtcagccaccaccgagaccttggtcatgggagtggcacctgttaaggctcaatttgagggtgctgaaatgggtgtgcccgctgagaacgatggctgcaaatgtggaccaaactgctcctgcaacccctgcacttgcaagtgaagtgttgggagagcaagcttcaagcagagatagcccttaat

SEQ ID NO: 19951 - DNA, 387 bp, Glycine max; identical to SEQ ID NO: 10473
  Clone ID: LIB3049-020-Q1-E1-C4

SEQ ID NO: 19952 - DNA, 396 bp, Glycine max
  Clone ID: LIB3049-020-Q1-E1-C6
gggagtgtgtcgtgtggtgtgagacagtgtaactcggaagcgcagcagcaatggcaagagcgactctccttcacttgctgcggtcacagagcctccgccacgtgtccaaaaacgctccttcagcatatcgttgttttgggtcctctacctgtcaacgacccattagccccaatccatcattcaaaacttcctcccatcttgctattttccaaagaagatgggcatcacaaatcccaactacagaggaagacgacaagattagcatcggacctcgtagtggaggacaaccaggggagggtgacaaggaaactggagtcgtttattatggcccgatctcaaacaccataaagaaagtaaaacttctgtctctctcaacttgttgcctttcggtatctc

SEQ ID NO: 19953 - DNA, 381 bp, Glycine max
  Clone ID: LIB3049-020-Q1-E1-C7
gatcgcttcggctgccattgaaagaaactgttgaatcgcgtcgattaaggtgattttcgtttcgtgctttcacttttgaactcctttcaattttcctttggtttttcgtaaatcaagtttgctttttacttcctttcgaacccgaaatttgtcattttcaaaacgaagtggtccttgtttatatgaatttcgagaggaactaggttgctatgaaacaaacatggtttggtcttgatgacgaaattgagtgacctcttattagtatgaattgaactgtggagctgatagtattaatttcagtttcctttctgagggtattgtttcatgctctaattcccttttgtttgatttgatgcatctcaatttcttttgcaggttttg

SEQ ID NO: 19954 - DNA, 402 bp, Glycine max
  Clone ID: LIB3049-020-Q1-E1-C8
ggcaactaagtagagaataaaatcaaatcaggagagcatgcatatgaacatgatgatgaagaaggtgtgtgggtttgcaatagtgatggtggcagtgcagcttctggtggaggtgagtcccaaggcagaggctgtgacttgtacccctgtggagctgagtccttgtttgggggcaataacttcctctcaaccaccatcaacaatttgttgccagaaggtgagggaacaaaggcaatgcctctgtggttacctcaaaaacccaagtctaaggccatatgccaattctcctggctccagaagggttgctagctcttgtggggctccctttccaacttgttaattaccttcatatcatatcatatatagtatgtaataaaccctgttggctggaaaatatatata

SEQ ID NO: 19955 - DNA, 328 bp, Glycine max
  Clone ID: LIB3049-020-Q1-E1-C9
gaagcacaaaccttattcaacactcatatccttacccggttcctttcatgggaattcatttcggcttcaaccttgatcccaaaggcccgaagttcctgccaatcccctaaccgaccgttgaagagttccccgaacaattgtgggacctcgttcactcctccccctggttccgcgactactggctccgcgagtgcttccaagatccccagttccaaaacgacgacgctttcgacttcgactttgacctagatctccaagatgaagatgaaagggaacgaaaggaagggaacgacgtggtgtcgttggggctgctgaaatggcgaagctg

SEQ ID NO: 19956 - DNA, 362 bp, Glycine max
  Clone ID: LIB3049-020-Q1-E1-D1
gaaacaaaaaccatcagcaacataaaggaaaaaaatagaaagaaaaatgatgctcggagaacaccatcgcgggaatccgacggtcctcgtgccaccgtggccagcccacgacgatccgacggctgagatgtactccgcgttcttaacaaacgacgtcaatgctggtgagtactctccgtaccatcttcaagaagcactaacggcgctgcagcgttttctgccgtcaaacgaaacggacgcagactcggactcctcggaggcggctcagcccgacgcggcggtggacgcgtacacgtgcgaccatttccgcatgtacgagttcaaggtccgtcgatgcgcacgtggcaagtcacacgactgga

SEQ ID NO: 19957 - DNA, 363 bp, Glycine max
  Clone ID: LIB3049-020-Q1-E1-D10
gattcctcaagaactagggtttgcagtcactgctctgtttcaccgagtttgggcgtttagatcagaaccaaatcgtgttctcttccattggcaaacatggcaactcaaatgagcaagaagagaaagtttgttgcggacggagtgttctttgccgaactgaacgaggttctgacacgtgaattggcggaggacggttactccggcgtcgaagttagggttacgccgatgcgcaccgagatcatcatcagagccaccagaacccaagccgttctaagtgagaagggaaggagaattagggaacttacctcagtggtgcagaagaggttcaaaattcccgaaaacagcgtcgagctttatgctgag

SEQ ID NO: 19958 - DNA, 344 bp, Glycine max
  Clone ID: LIB3049-020-Q1-E1-D11
ggacacacaccgaacactcaaacacacacagtgtgcagcagcagcagcaacaacaagagaagaagatggctctgcaactatgggagacattgaaggaggccatagttgcctacacggggctctccccgcccaccttcttcacccttctggccctgatcctagccctatactacgtcgtttctgggctcttcccctcttccgaccaccgccacaacaccgcctcgcgcgacttggagccccagatggagcctctgcgaccccccgttcagatcggcgaggtcaccgaggacgacctcaaggcctacgacggcaccgatcccgagaagcctctcctcatggccatc

SEQ ID NO: 19959 - DNA, 344 bp, Glycine max
  Clone ID: LIB3049-020-Q1-E1-D12
agaaaattgatgttgttttttgacttaaagtaaaacccgaaagcctttcctgtttgtgctcagtctcgcaaagacactctacgcactcatcctcgcagcctttcctatgctcctcctaccctgtgtccagcaaatacgcgaactgattctgctatgatgctcactctcatcgtcgtgtccaccttctcgtaaacccagtttgctgtgatgctttgccaagtccagggtacacactcatttgctgtacaacatctacagagttttggtgcgctaacaaggaactatacagtttggttaatgaagaatcgcgcttagcgcgacaaaccaagcttagtggacatgat

SEQ ID NO: 19960 - DNA, 389 bp, Glycine max
  Clone ID: LIB3049-020-Q1-E1-D2
ggtgtgaagtttttgtcagaaacaaacagaataagaaagagaggaagccgtagattccaacgctttctctctgagtcacacacacacacacattgcagcaacaacaacaaccacacccgattccatgagtcgctacgatcccaatcccttcgacgaagaaccggtcgaggttaatcccttcgcggatggagcagctaaaggaaaaggctcagggcaatcaagttatagtggaggtgcattttatactactaacactggaagtgttccctcctcaaactcaaggctctcaccccttccaccagagccttatgatcgtggggcaactattgacatccccctaaataatgcaaaggacgcaaaagcaaaggagaaggaacttcaagctaaag

SEQ ID NO: 19961 - DNA, 405 bp, Glycine max
  Clone ID: LIB3049-020-Q1-E1-D3
gaggcctccgacgacgagctaggtcttccacccgccggaaactcgtcggcgccggaggagaagaacgtggagaccgagttggtccgagtcgcgtctgactcgtccggaatcggcgagttgtgggagtttgaggaacagattccgagatacgactcgtttgatttgggaatgggatttggctatgagtgtgatacgaccgaatacgctgcgtttggtggacttttcgatcattcggatttgtattatgactcgtggcggcacgagaccttgccaacacaatagaagatttaatgaaaacaaaaggaaaaaaacggttttagagatgtaaatattttcttctctctcagctttttcttttttcttttttgttcccttctcttgatgaagggaattacagaagaaaga

SEQ ID NO: 19962 - DNA, 395 bp, Glycine max
  Clone ID: LIB3049-020-Q1-E1-D4
ggaagtttaacggctattcctggaatctcagatatgattgatgatactgtgaactcaattgttactgacatgctccaatggcctcataggattgtggctccacttggtggcattcctgttgataccagtgaactggagcttaaaccccagggaaaacttgcactgactgttgtcaaagcaactgctttaaagaatatggaaatgattggaaagtcagatccttatgtagttgtgcatattcgaccattatttaagtataaaaccaaggttattgataacaacctgaatcctatttggaatgagaaattcgagttgattgcagaagacaaggagaaccaatcactcattcttgaggttcttgataaagacattgggcaagataagcgattgggaat

SEQ ID NO: 19963 - DNA, 399 bp, Glycine max
  Clone ID: LIB3049-020-Q1-E1-D5
gcggatggagttgtcgaaagtgggggcataatcaacatgatggggacctatcaaatagcattggttgctcacagtatgaataaaccagtttatgtcgctgctgagagctacaagtttgctcgcctttaccctcttgaccaaaaggatttagcccctgcattacgccctattgattttggcgtacctattccatcgaaggttgaggttgaaaggtccgcgcgggactacacccctcctcaatacctgactctgcttttcacagatttaggtgttcttactccatctgtcgttagtgatgagctcatccagctatacttatagtaatccatccatgtatatttttccccctattttccctatcaagatcatgtatttcacatgaaacaattttgtgacaag

SEQ ID NO: 19964 - DNA, 392 bp, Glycine max
  Clone ID: LIB3049-020-Q1-E1-D6
gggatggaacacgtggttctgattccaagatggtcaaaaaggcttcatttaaactttcatggttcagcaaaggtgatcaaagtgatcagtacaaacacgacattgtctcttttgaaagaggaaatataaccactgcagagcgcagtagtaagcagatctctttgaagtgggagtcatgcccacagacagtgcttatattgaccaaaccaaattcagtttcagttcaaattctgtgtgctgaaatgattacatggttaaggcagcaaaagaatctacacatctatgtggaaccacatgtcagggttgagcttttgacagaatcatcatactttaactttgtagaaacttggaatgatgataaggaagttttgaggctacacactaaagttgac

SEQ ID NO: 19965 - DNA, 388 bp, Glycine max
  Clone ID: LIB3049-020-Q1-E1-D7
ggggtgctggtggtgcagaaagggccattttctgaatgcgctctatctatctcttccgatctggctactaaccctaacccgcttcgaaccgtggcttcctcggcctcgcaggacctctctcgaagaaaatcttcttcttcgtcttcgttttctcaacaaacttccgggtcgacccggatcgtttaccgcgaacctcggatcccatcggaatccaattttccgatctggcagcagaactggttcatcgcattgctcttcctcatggctctcggattcttcgccctcgctctcttcctcttcatcactttcgactctgacatcgctccttcttccaccgcatccgccgcttcctccgaaggcgtcgaggttacttacggcacggttctga

SEQ ID NO: 19966 - DNA, 398 bp, Glycine max
  Clone ID: LIB3049-020-Q1-E1-D8
gatagctgagagagaaaggaaaggttaactaagaagcaatacttcaatggccacccttgttgttcataaccaaacttcttctgctcaagatgctgaggctctccaacaggctttcaaaggatggggggctgatgacaaggccattatagcaatactgggtcacagaaatgttcatcagaggcaagaaatcagaaaagcttatgaggagatttaccaagaggatctcatcaaacgccttgagtccgagatctctggtgactttgagagagctatgtaccggtggatgttgcagcctgcggatcgtgatgctgttttggtgaatgtggcaatcaagaatggcaccaaagaccaccatgtgattgcagagattgcttgtgtcctatcagctgaagagctct

SEQ ID NO: 19967 - DNA, 378 bp, Glycine max
  Clone ID: LIB3049-020-Q1-E1-D9
gacaggcaaaaaccctagccttcgaaaaccctaatcctgaggcactgtgatatggcaagagccgtttcctcttcctgcgcgcgcctcacaatgcgcctcttctccaccaccaccaccaccaccaccaccaccgctgcgttcgccgttacattacccaaaccctcgtcactctcagtctcaacgcgtcgattcctcttccctctctcccatgccatcgtccctccctccacccgcgtcgccggaatccggtgccgtgtcaaccgcgccggcgactcagcgtactcgccgctgaactcagcttcgtcatcgtcgtcgtcgttcagcgaccggcctcccacggagatggcgccgctctttcccggctgcgactacaaccac

SEQ ID NO: 19968 - DNA, 406 bp, Glycine max
  unsure (1)..(406): unsure at all n locations
  Clone ID: LIB3049-020-Q1-E1-E1
gttgatcggagattccggtgtgggaaaaagtagcctactagtcagctttatttcaagttctgttgaagatctttcccccaccattggtgttgattttaagatcaaaacgctcacagtgggtggcaagagattgaaattgacgatttgggatactgctgggcaggaaaggttcaggactctaaacagttcttactatagaaaagcacaaggaatcattctcgtttatgatgtcacaaggagagaaacctttacaaacttatcagaagtgtggtctaaggaagtggaactctactcaactaatcaggattgtgtgaagatactagttggaaataaagttgatagagatactgaaagggctgtgagcanggaaagagggttagcacttgctaaagatttggggtgtttg

SEQ ID NO: 19969 - DNA, 378 bp, Glycine max
  Clone ID: LIB3049-020-Q1-E1-E10
ggagcagagaaggagtttaggaagtgtttggttacttctgagattctgctgttccttagagagcgagcgatgacggtagcagcaggaatgggttacgctctgctagcgttaggaccctctctctccatcttcgtttctgtcatttccaaaaaacccttcctcattctcaccgttctctccagcacactgctgtggcttataagtttgattgtgctgtctggaatatggaggggggttttgcctctcaacacaacagcttggtggccttttggaatactcattttctcatctgttgcttttcaagaagccctcaggcttttctcctggaaaatatataagaggttacaagatatgttagatgcctttgctgatagaata

SEQ ID NO: 19970 - DNA, 371 bp, Glycine max
  Clone ID: LIB3049-020-Q1-E1-E11
gaagccttatccaccctcaatctcttccttcccaacagttccacacgttttctttactcctcaagcccttcagtgccatttttttctagaaaaaaactgtttccagttttattcaatccacaactgaaaacagaggactctgtttttgtgctgagaaaacaaaaaaatggcttccctttatgatgtgcttggtatttcagtgggtgcaagctgcatcgaaataaaggctgcttacagaaagctggcaagaacataccatcctgatgttgtggccatgaatcagaaggaaagctcagcgaaccaatttatgatgatccattcagcttactcaactttattctgaccagagaagcgagctcaatatgacagag

SEQ ID NO: 19971 - DNA, 377 bp, Glycine max
  Clone ID: LIB3049-020-Q1-E1-E2
gatagctgagagagaaaggaaaggttaactaagaagcaatacttcaatggccacccttgttgttcataaccaaacttcttctgctcaagatgctgaggctctccaacaggctttcaaaggatggggggctgatgacaaggccattatagcaatactgggtcacagaaatgttcatcagaggcaagaaatcagaaaagcttatgaggagatttaccaagaggatctcatcaaacgccttgagtccgagatctctggtgactttgagagagctatgtaccggtggatgttgcagcctgcggatcgtgatgctgttttggtgaatgtggcaatcaagaatggcaccaaagactaccatgtgattgcagagattgcttgtg

SEQ ID NO: 19972 - DNA, 362 bp, Glycine max
  Clone ID: LIB3049-020-Q1-E1-E3
gaacccaattaatctttgttttcaattccttatctcaataattctctttctccttcttctataactctcctctgtttactctgtttttttcacaaaacaacatggctgcatacagagaacccatgaacatgaacatgagcgacagagccccggtttctccgcagcaaccacactcgccgtggcattctccggttccgtaccttttcggtggtttagcagcgatgttgggtctcatagccttcgctctgttgatccttgcatgttcctattggaagctctccgggtacctcgaagggaacggggaaacagaacgggacctggaagctggcgaaacggaacaagaccagaaacctgcgaaaccg

SEQ ID NO: 19973 - DNA, 441 bp, Glycine max
  Clone ID: LIB3049-020-Q1-E1-E4
gcgtccagcacgagtccggggccataagtaagagcaagtcgaaaagttcctctctctctcacacacacacatcccagccatgagcctcttcggtataggcagaaaccagagaacattccgcccgaaaaaaagtactccttctggaagtaagggagctcaacttcgaaaacatattgatgccacgttaggtagtggaaatctgagggaagcagtaaagctacctcctggggaggatttaaatgagtggctagctgtcaacactgttgatttcttcaatcaggtgaatctgctttatggtacccttacagagttctgtactcctgagaattgtcggacaatgtctgcaggacccaagtatgaatatagatgggcatatggtgtacacattaagaaacctagtgaggtttctgcctcaaaatatgttgaatatccaatggactg

SEQ ID NO: 19974 - DNA, 401 bp, Glycine max
  Clone ID: LIB3049-020-Q1-E1-E5
ggcacaagtttgttgagatagctagaagcaataagatgaaaatgaaagtgcttgttttgtctgttgctacagttttggtagcatatgaatgccatggctcagactaccagaagttccctctccaaatgaaaactgggtttggtgggcaatacagcaatgaggtggcatgtgccagttggaggcttggcgtggaagcaaacaacgtagtcaagtggcaaactgttcctgcagcttgcggagagtacatagctgactacgttctaggagaccaatatagatcagattccaaggcagttaaccaacaagcttatttctatgctaaatccctcagactcaccaacagagatgtctttgtcttggacattgacgacactactctctctaatctccagtattttgct

SEQ ID NO: 19975 - DNA, 404 bp, Glycine max
  Clone ID: LIB3049-020-Q1-E1-E7
gaataataataatacttcagaaaactcaactagtcctcattgtcactgcgtcacgaaccctaatcccttttcttcttcttctcttcccttactctcatcctcgattcagtggcagaggtgacggaattcacgtgatttccatgagtggctccgttttccttgaatcgaacaccacgtctgttcacggttcgcggtttccgaaattgagctcgattcctcgtcagtggtgatcgtcagtgcatgcatcctcggattggtaatgtgcgagcttgatccatctatttgcggcgttttgagttaattttgcctgactgggaaatcatggcgcagagtaattgggaagcagataagatgcttgatgtttatatttatgattatttggtgaagaaaaagttgcataacac

SEQ ID NO: 19976 - DNA, 363 bp, Glycine max
  Clone ID: LIB3049-020-Q1-E1-E8
ggggattggactagcagcagcatcgacatctattcctcccggtacctgtattgtatcagaaggaacgtgatatcatgatgctgtaaagagagagagatatgagataattcacaattcctcctttatcttgtttcatagcagtgaagaaaaaaacagagaaagcatgggcgtggacttctacaagattcttcaggtagatagaagcgccaaagatgaggatctcaagaaagcatatcgaaggctagccatgaagtggcaccctgataagaaccctaacaacaagagagaggctgaagctaaattcaagcaaatctctgaagcttatgatgttttgagtgatccacagaagcgaggagtgtatga

SEQ ID NO: 19977 - DNA, 374 bp, Glycine max
  Clone ID: LIB3049-020-Q1-E1-E9
atgcaagggctggaaatgagaaaaaagcccttcaaagtctaggcgttctggaagctaggaaggatgaattaggtcaagctgagtttgagagaattataagtggccttattgatggtgggtttcagaaggatgcacaaagaatatgtcagatcatggaggcacagggttttgatgcatcaagggttaagtttaaactttcgaaacctgtctccagagcaccgagtttgagatagtttagtggtcatgagtagggccattttagtctttctctgccaagtgaccaacaaatacgctgccttattaaggaagcatggtctgctggatttatcataccatgtaacaaataaggatgagtttatgcttgtcagtttttc

SEQ ID NO: 19978 - DNA, 398 bp, Glycine max
  Clone ID: LIB3049-020-Q1-E1-F1
ggagaccaaacgtggtaacgctttgaatctttgaattcattcaaagatcccccttctgtctccctctctacgcatatcagggcactatggctgccacggtgaaacaaatgtctttgatcgtgtcactgttcggcgtggtgtccttcattttgggtgttgttgctgaaaacaagaagcctgcggcaggaacacccgtgcctggtttggatggtgtctctgtcacctgcaagtacccagctgatccaactgttgcattggggtatctttctacagcatttcttgttgcatccactgtgactggatatctgtctttgttttacccttacaaaggaaagtctattccacaaggggttctgtttaagcacaccactttcacagtgttcttcaacatttccttg

SEQ ID NO: 19979 - DNA, 353 bp, Glycine max
  Clone ID: LIB3049-020-Q1-E1-F10
ggtagctgaggatattattactcagcaaaaattcatggaagttccaatcaagtatccggcaaaactcacccttagggtggttcttacttgtatcatggcggccaccggtgggttgatttttggctatgaccatggtgtttcaggtggagtgacctccatggattccttcctgaagaagttcttcccatctgtatatgaaaaggagtctaacgtgaagccttcttcaaaccagtactgcaaattcaacagtcagatactgacactgtttacatcttccctttatctaagtgctcttgctgcgggtcttggggcatccagcataacccgaatgttgggaagacgtgcaactatga

SEQ ID NO: 19980 - DNA, 344 bp, Glycine max
  Clone ID: LIB3049-020-Q1-E1-F11
ggagacagagagaatgagtacggtgggagaagggaaggtgagtagtaatggtcatggatgttgcaaatcagggccaggctatgcttccccactggaagccatttctggtcccagagagtctctcatttatgtaacctctgtctacacagggaccggaatagagaagccagactatttggcgacagtggatgtggatccaaactctccaacttattccaaagtcatccataggcttcctgttccttatttaggtgacgaattgcatcacacaggctggaattcatgcagctcttgccatggagacccctcagcagaccgacgatttctcatcgtacctgcactcg

SEQ ID NO: 19981 - DNA, 348 bp, Glycine max
  Clone ID: LIB3049-020-Q1-E1-F12
ggttggattgttgctagcagctatgggatttgacaatagcactcgtttatatcttgcctctcacaaggtctatggtggagaggcaaggatttcaactttgagggaattatttcctctgatggaaggcaagaagagccttgcttcatctgaagagcgttctcagataaagggaaaagcttctctattagctgcacttgactactatgttggcttgcatagtgacatcttcatctctgcttccccaggaaatatgcacaatgcattggttggacaccggacatacttgaacttaaagactataaggccaaatatggcattgatgggtcagcttttcctgaataaaaccat

SEQ ID NO: 19982 - DNA, 373 bp, Glycine max
  Clone ID: LIB3049-020-Q1-E1-F2
gatccaactctctaaacaacacattaacctttctcattccccatctcctcaccttattcagccactgctaatttctagggttccgaaatggacgctggcggaaagatcaagaagggcgccggaggaagaaagggcggcggccctaagaagaagccggtttcaaggtccgtcaaggccggtctccaattccccgtcggaagaattggccgttatttgaagaaaggaagatacgcccagcgtgtcggtaccggtgctcccgtttacttggccgcagttctcgagtacctagttgctgaggtgcttgagttggctgggaatgctgcacgtgacaacaagaagaacaggattattccgagacatgtgctattggctg

SEQ ID NO: 19983 - DNA, 379 bp, Glycine max
  Clone ID: LIB3049-020-Q1-E1-F3
gaacccagagaaaaaaaaacatcatttgaaccaagtgaagttgagttacaagcttataaaatgggtttttcttggataagagggaagtgcattggtaagggcgcgtttggcaccgtcagcgtcgcgcttcgcaaacgcgacgatcaaactcaaaatttcgcggtgaagtccgtggatttaaaaacgggtctcccgggtcagctcgaagcgttggagaatgagattcggattctccggcgcatgtcctctccgcacgtggtaacttttctcggcgacgacgccacgtgcgagcagcggaaccttcacatggagtacatgccacgtggtacgctcgctgacctggacgctgacgtggacgaagttttagtgagacgctaca

SEQ ID NO: 19984 - DNA, 381 bp, Glycine max
  Clone ID: LIB3049-020-Q1-E1-F4
gacactaaaaaaaaaagaaaaaaaaagtcttaatttgtttcttgttttctctgtcgtttcgttcccttaatctttgatctctgagttacaagttataacaaaagaaataaacaacacatataaatatttgtaagaaaatatatatatgatcatgggttttcttcacaaactatgggacgaaacgttggcgggtccagcaccggaaacgggtctggggaagctccgaaagtacaactcgttctccggcggaagctccgtccggtcaacggtggcggagcatgttccgataagtcgcagcatcaccattgttcgctcccaatctggtttcggaaccaccaccaccacctctgctccttctgcgcctaacaaccctcgcaaccc

SEQ ID NO: 19985 - DNA, 387 bp, Glycine max
  Clone ID: LIB3049-020-Q1-E1-F5
gtttctagcaatcctctttttgtcaatagtgttgctaaaggtgtttagtttctgtaaatgcttttatgaccataattttttcattaaggttatcgaacttcatgcttgatagtatatgatctaaacaactttctcagtgacgattgtttcttgactcatgtcatgagttatgctggttccaagtttatgtgtaatcaatacttgggaatgcatttaacttatagtagttgagaatatttaaactgtgttaatgtggcatgaccatatcagaatatattgattttcatatttttcatactactgtctattctatgtgatccatcaaatacgttgattatacattctaacagcatatcctaaaacgaatttagtgattgatatgccttt

SEQ ID NO: 19986 - DNA, 387 bp, Glycine max
  unsure (1)..(387): unsure at all n locations
  Clone ID: LIB3049-020-Q1-E1-F6
ggagatggaagaagagggttctcagcagccacagttggtgcttgccgagaagctattccttctccgacaacccgttcaagacattgacaaggttcgctacaaggaggatgttttcactcacatcaaggaaaacgagatggtccctttgtacgagaccctagtcgccgattccgtgttggacttggatcgtgcccttttggacttcatgcgcgctaaaattgaagacgagctcaccaagctcgacgaaaagattgctgatgctgaggaaaacttangagagagtgaagttcgtgaggctcacttggcaaaatccttgttttttatccggattatggacaaggagaaagccttggaacatctcaagataacagaaaccaagacagttgc

SEQ ID NO: 19987 - DNA, 388 bp, Glycine max
  Clone ID: LIB3049-020-Q1-E1-F7
gaacccagagaaaaaaaaacatcatttgaaccaagtgaagttgagttacaagcttataaaatgggtttttcttggataagagggaagtgcattggtaagggcgcgtttggcaccgtcagcgtcgcgcttcgcaaacgcgacgatcaaactcaaaatttcgcggtgaagtccgtggatttaaaaacgggtctcccgggtcagctcgaagcgttggagaatgagattcggattctccggcgcatgtcctctccgcacgtggtaacttttctcggcgacgacgccacgtgcgagcagcggaaccttcacatggagtacatgccacgtggtacgctcgctgacctggacgctgacgtggacgaagttttagtgagacgctacacgttgtgcc

SEQ ID NO: 19988 - DNA, 365 bp, Glycine max
  Clone ID: LIB3049-020-Q1-E1-F8
gggggaagagaaatgagaagatgggcaccaccttgatgagatgctcccacgcaaacgctctcttcagagctctcaaacccaaaccccgcaattcttcactgccactttcttcaatggccatcaacaaaggtaatagtaataaggcatatgatgcattgctgttggatgctgggggcaccctattgcaattggcaaagccagttgaggagatttatgccactattggatccaaatatggtgtgactgtggatccagctatgataaagcacggatttaagagagcatttgctgctccgtggcctgaaaagctgcgctaccagggagatgggaggccattttgggaacctgtagtttctgaagccact

SEQ ID NO: 19989 - DNA, 359 bp, Glycine max
  Clone ID: LIB3049-020-Q1-E1-F9
gatgggagtggttatggatatggtggaggcaggtatggatcaggcggcaattatggggacagtggctctggcaataactattcaggaggctatgctggtaatgccggtggtgtaggcaatcatggaagctctactggttttgccagtaatggatatgatggaagtgttgtggatggtggtgttggtgcaggtagtggcactagctttgctgatggctatgatggaagtgcggggtctgaatttggcagcagtggccaattagatagcaaagcaagcagcaaaggagatgaggattttggtgattacagggatgacaacgatgcagatgattttgccaagaaggcttgatggaatttaat

SEQ ID NO: 19990 - DNA, 348 bp, Glycine max; identical to SEQ ID NO: 9032
  Clone ID: LIB3049-020-Q1-E1-G1

SEQ ID NO: 19991 - DNA, 379 bp, Glycine max
  Clone ID: LIB3049-020-Q1-E1-G10
gaagaatcactggtgtagcattatgagcatgcaaagagagaagatggcgaagaaatccattggaagcttaatgcgaaagaagctttctgatatcaccaacaacaccaatcctcctctctctcaacaacaacttgacactactcttccctccgataacaatttcattcaacaactcctcaaggaaagaacagcgttgattcaactccttgcggaaagaaataaaataattgaagcgagtggggtggagctgcggaggctgagagcagatgtgacgaagctgcaaatccaaaactggaaccttgctcagtccaatagccacatgttagcggagcttaacatggggagggaaaggattaaaacgctgcaacatgaaattttg

SEQ ID NO: 19992 - DNA, 360 bp, Glycine max
  Clone ID: LIB3049-020-Q1-E1-G11
gatacacaggatagacatgaaaagtaaactccataccatatatgcttaatttaatgtatgccgtactgtaatagttgtaatttggtacttattttagagcacttgcctacggcctgcttggtgcttgcctactatctacattaataatctaaagattagattacattatattaaagagagaatcaatataattcagagacatgcactttacctgaccaggctcttctataaagggctccatcatgttggtttagtttgcaagattttggcagtaacgaagggaatgcatgaagtgctgacaatggtgattagcaatgaacaagttgttcctggagccaaatattgtgtcacacgttccac

SEQ ID NO: 19993 - DNA, 393 bp, Glycine max
  Clone ID: LIB3049-020-Q1-E1-G12
ggagcaagagtgaagagcgaagagaatggctcccaagggtttaatctttttggctgtgttatgcatcgcagcactgtcactgagtcattgtcttgcggaggataatggacttgttatgaacttctataatgaatcatgccctcaggctgaagacatcatcattgaacaagtcaagcttcactacaagcgccacacgaacactgctttctcctgtctcaaaaacatcttccatgactgtgctgttcatagttgtgatgcgtcactgttgctggactccacaagaaggagcttgtctgataaggaaacagatagaagctttgggttgagaaatttcaggtacattgagaccatcaaggaagctttggtaaaggaatgcacaagaattgtttcctg

SEQ ID NO: 19994 - DNA, 410 bp, Glycine max
  unsure (1)..(410): unsure at all n locations
  Clone ID: LIB3049-020-Q1-E1-G2
gaccgcgaaacgcacatttcactattcattctcgtttccctttcgactgtgattgtttgttaactgaacttttcgagcaaaatgtctggacgtggaaaggggggcaagggtttgggaaagggaggagcgaaacgacaccgtaaggtgttgcgcgataacattcagggaatcaccaagcctgcgattcggcgtttggctcgcaggggtggtgtgaagcgtatcagtggtctcatctacgaggagacacgtggcgtgctcaagatctttctggagaacgtgattcgtgacgccgttacctacactgagcacgctangagaaagaccgttacggcaatggatgtggtttatgctctcaagagacaaggaaagaccctctacngatttggaggctattttgttttttttttttt

SEQ ID NO: 19995 - DNA, 365 bp, Glycine max
  unsure (1)..(365): unsure at all n locations
  Clone ID: LIB3049-020-Q1-E1-G3
gactcactcaaactcaacacagagagagatatggcagattacgacgagagatacgaagggaacggagaagaagaggaacttcacaattctcttcctcatcctcatccccagcctgattcctctcctcaccccacccacgacgatctcaccgattccaaatctcaccatgggtctcgcgattatgacagagactcttccagaagcagagataaggaacgggagaaagggagagacagggaaaaaaaaagagagaagggaagggacagggaaagggatagaagtanggatagggattcagagagaagtanggacaaggacagagatagggagaagagcaaggacagggaganggaccgggaacggga

SEQ ID NO: 19996 - DNA, 390 bp, Glycine max
  Clone ID: LIB3049-020-Q1-E1-G4
gtcagatgggagttcagcaaccccactccattcatcaggagtcgtgagtttctttggcaagaagggcacactgcttttgcttcaaaggaggaagcagatgcagaggttcttgagattctggaattatataggcgtatatacgaagagtatttggcagttcctgtcataaagggtaagaaaagtgagcttgagaagtttgctggtggactctacactactagtgttgaggcatttattccaaacactggtcgtggtatacaaggtgcaacttctcattgtttgggccaaaattttgctaaaatgtttgagataaactttgaaaatgaaaagggagagagagcaatggtctggcagaattcatgggcctatagtactcgaactatcggtgtc

SEQ ID NO: 19997 - DNA, 388 bp, Glycine max
  Clone ID: LIB3049-020-Q1-E1-G5
gaaaactctgcatcggaagaaaccctagccactctcccggcgtcacgatgcagatcttcgtgaaaaccctaacgggtaaaacgatcacgttggaggtggagtcttcggacaccatcgacaacgtgaaggccaagatccaggacaaggaaggcatccctccggaccagcagcgcctcatcttcgccgggaagcagctggaggacggccgcaccctcgccgactacaacatccagaaggagtccacgcttcacctcgtcctccgcctccgtggcggcgccaagaagcgcaagaagaagacctacaccaagcccaagaagatcaagcacaagcacaagaaggtcaagctcggcattcttcagttctacaaggtcgacgattctggaaaagt

SEQ ID NO: 19998 - DNA, 406 bp, Glycine max
  Clone ID: LIB3049-020-Q1-E1-G6
ggttggggtgttctgtcaaagtccaagacggaggtggtcctccttctcttccctcaaacacagacacagacacaagaacaagtttgcaagtcatgaaagctctaattttaatcctcacgctatgcagcttctcacaagcagcaacctccatagtcagtcaaccccaacccaaagagtctttcaagctcaaccaaaccaagccacagaatgatgaggctagtagttcctgtagttacacggtgagcataaaaacaagctgcagttctcccccctacaccagagattacatcagtcttgcatttggtgatgcttatggctaccaggttcagttcctacctacggatacatttgaaaaaaaatgaatgaatccactgcaggtttatgttccaagactggacggtcctcg

SEQ ID NO: 19999 - DNA, 396 bp, Glycine max
  unsure (1)..(396): unsure at all n locations
  Clone ID: LIB3049-020-Q1-E1-G7
ggcgaaacgcagctgcgcaatccaaagcacgaggaccactctctactcaaactccaccatctgtcatctacgccttcgcccctctcgtgtttcccacaacggttactccttctccctctcctatttcaacccatgccatggcttgtctgagccgctaccaccaccaccaccacccccgcggcgccacctggctctcttcccctgacgaaatgctccaacactgccccctctccgcccaccaccgccgtctccgcgatgacgacgccgaacctatctaccttccctctctctcctccgcctaacgcatctttcccgtctacgccatgggcgcncccgacncgacaccagaacccgaattagacggacccgacccgatttggaacgctgtcanggacg

SEQ ID NO: 20000 - DNA, 403 bp, Glycine max
  Clone ID: LIB3049-020-Q1-E1-G8
aacccagatgtgtgttcgcatcaatactatgcagcgcattcgcatggaattaggggttttggaaaagaggatagttgccaatctcagcagttctagatccactaatgcggatatagcaaatggggtgagcttgaagttcaagctttccgcatctgctgctgtggaaggcatccatcaactctgcgagtgcatagcatacaaaatcgttttccatgaactctggcatgttatttgggatggcctttatgttggagaagttgcatctgctaggattgagccttttcttcaggagcttgagcaatacttggagattgtatcatctacagtgcatgataaagttagaacacgtgtaattgttaaagtaatgcaggcttcttttgatgggtttctgttgggtttgtta

SEQ ID NO: 20001 - DNA, 371 bp, Glycine max
  Clone ID: LIB3049-020-Q1-E1-G9
gcctacaagagttaacttggtaaaaaatcctggctttgaggagggtccattccccattttcaactcaaccaatggtgttttgctcacgcctcaacaacaagatggcttctccccactccctggttggattattgagtcactcaaggctgtgaagttcattgattcaaagcatttcaatgtcccatttgggctgggagcagcggagcttgtggcatgcagggaaagtgccattgcccaaatcatcagaacagttaccaacaaagtctacaacatcacattttcagttggagatgccaaaaatgggtgtcatggatcaatgatggttgaagcatttgccgctaaagataccttcaaagttcccttcaaatctg

SEQ ID NO: 20002 - DNA, 379 bp, Glycine max
  Clone ID: LIB3049-020-Q1-E1-H1
ggactccgagtctgtctttgttgcgtttcgagtgtctgtggaatccctaaccctaatttattgtgtggcgaaatgggatcaattggggtactcctggtggctcaggtgataccgtacctggagcaagagctggacaagcgctacaagctgtttcgggcgtatgatcagccgcagacggcgcaggttctaagccagcacgcgagctcgatccgtgcggtggtcggaaactcgaacgccggcgccgacgcggagctgatcgaggcgctgccgaagctggagatcgtgtcgagcttcagcgtgggagtggacaggatagacctggacaggtgcaaggagaaaggaattcgcgtcaccaacacgccggacgtgctgaccgatg

SEQ ID NO: 20003 - DNA, 390 bp, Glycine max
  Clone ID: LIB3049-020-Q1-E1-H10
ggcggtgaaggcagcgagggaagggaagcatctttagctccaatggcggatacctcaggtcgatccagggacctcgacaagctccttctccgccctggcaatctcgtcggtcccaggttcgaaccaggcgctgagttgcgagatgaccttcaggccttcgccaaagtgttggtggtaggggccggtggcttaggttgtgagttgttgaaggatttagccctctctggtttccgaaaccttgaggtcattgatatggatcgcgtagaggttactaatctcaaccgccaattcttgttcagacttgaagatgttggcaaacccaaagccgaggtagctgccaagcgtgtcatggagagaattactggtgtcgaaattgtgccccacttttgc

SEQ ID NO: 20004 - DNA, 386 bp, Glycine max
  unsure (1)..(386): unsure at all n locations
  Clone ID: LIB3049-020-Q1-E1-H11
gagtggaagagtgaataagagatatcaatatattatgataatggagggatacaataagaaggttatgattgtggggatggtgttgggcatggccatgattgggatggccaatggccaatactcgttttgtcgcatgcccagcgatgggttggcggcatgcaagccgagtgtgagtggggactatcctgctgatccctccactgcttgttgctcagccattgccaaggctgatcttaaatgcttctgccgcttcaaggattcgggccttctctctatgtatggtgttgatcccaacaagtgcatggaactccctgttaagtgcaaggttgtcgactctttccactgctagattcattaganggggcactaatcaatattaactacac

SEQ ID NO: 20005 - DNA, 323 bp, Glycine max
  Clone ID: LIB3049-020-Q1-E1-H12
aacaacaacagcaacaacaacaacaacaacaacaacaaagtggagtttctcctcttcctaggaggtcacctcgtacctccaaaacattaaggatggggttcagatagaaattttcagtttttgcatttcattttgtttccttgcacagtttgtttcaatagaggaaaggcataaatacattggtcattctgacatctgtgctacttttgtttcattgctgttgctgctccgatttcaatctgcaattttcttctctcattcaccatgacttgcagagtaatgtattcatcagctttgttgataactaatttctgtcagagaac

SEQ ID NO: 20006 - DNA, 212 bp, Glycine max
  Clone ID: LIB3049-020-Q1-E1-H2
gacacacatttattcatgaactgcctttgcagaaaacttttgtaaagacaaccattttagcaaagaaaattggtgtaattaaattctcaatcttctttacattttcactgtcagaactgtagcacgtgactctttagtgaaaccttcactccatggtttcctcattgccctttgaagcttgaactcggataatgatcgtgacattggatgat

SEQ ID NO: 20007 - DNA, 282 bp, Glycine max
  unsure (1)..(282): unsure at all n locations
  Clone ID: LIB3049-020-Q1-E1-H3
aaaaaaagttgttgctgatcatgaagaaggtggtgatgatgattactctagcgattaacattttttcctgtanttggtgtgttgctttccttgganggggtaagcctttccaactttcctttgggttcaattttaaaaatttgcccaaaaaaaagaattacggatttggtaataaatacctaaattaagcctgttgtaagcttttcttggtcccaataaataaatgggtttaacacggattaagtgtatcaaagtgaatttaagttttttttttggaatttt

SEQ ID NO: 20008 - DNA, 335 bp, Glycine max
  Clone ID: LIB3049-020-Q1-E1-H4
ggggacaaggacggagtgttacataaagcgttagcctcactcatcactgggactccaatggagcctcccacatcctacatttccaccgatgaacttcgcaagcataacacgcgccacgacgcctggatctccatccacggcaagatctacgacgtctcctcctggctccaccgccaccccggcgggcccctcccactcctcaccctcgccggcaccgacgccaccgacgccttcctcgccttccaccctcccaacaccgcctccctcctcctccccgccttctccacctcccaacgtctttccgaccacaccgtctccgccgcctcctccgacta

SEQ ID NO: 20009 - DNA, 394 bp, Glycine max
  Clone ID: LIB3049-020-Q1-E1-H5
ggttgtcagtgtcttacgagggtagggctcagctcagccatattctatctctacgccgctaactctctctcactctcgcgctctctctttcacaaccttcactttactctctctgacagctaaaatgcaaggaggatttcaatcatttttgtcacacgggaatgtcattagaaatgctgttctacaacgggtgcgcatggtgaaccccctgttacagccaattgtctcttcgcggtttgaatctgttacacctgctcgcattgaggagcatggttttgagagcaccacaatttcagacatcttgaatgataaaggcaagggtgctgatggctcctggctttggtgcaccacagatgataccgtttatgatgctgttaaatcgatgacccaaaac

SEQ ID NO: 20010 - DNA, 355 bp, Glycine max
  Clone ID: LIB3049-020-Q1-E1-H6
cactctgccgtgatcacaatcttgccgctctctttattgatctgcttcagtccaatggacttgataatgtacagatggtttctgctacagctctggagaatttatcccaagaatcgaaaaacttgaccagattacctgagatgccattgccgggtttttgtgcttctgtgttttcatgcttcagcaaaaagccagtcataactggatcgtgtaggctccaccgagggatatgttctttaaaagaaacattttgtctctacgaagggcaagcagtgcttaagttagtaggtctgctggaccacacaaatgtgaatgtggttgaggcagcacttgctgctttatctactttaataga

SEQ ID NO: 20011 - DNA, 338 bp, Glycine max
  Clone ID: LIB3049-020-Q1-E1-H7
gttgcagttcatgaatcagtcgcagtatgatatttacatctgcgattagctatcttgtcgtgtctttgctgtgtagctttcgttcgcgggggtatgcgtttctgtcttgcatttggatgcactttcacgtgtctgtctcggaacggttgtggtggttcagattgtactgactgcttttatccatgttttaagcttttcttgctccgagaatgtagtccagttttataatgtattgtgtctttcacagtgattctatgtaattattttgtcttgtgaatccaatgctctgtatacgatgtacaaacacatgcctatgcacctttgtgtgataatataac

SEQ ID NO: 20012 - DNA, 349 bp, Glycine max
  Clone ID: LIB3049-019-Q1-E1-A9
gcacacagtttactcactaactcactgtgagagcaaagaagaagaagaatgaaggacgccggaaagagccacaaggcgaacggaaagctgtcgccggagactcggaaggatcggaagtcggcgacggggctgagcggatcgccgaagaagggaggccacggcgggaagttcacgtggatcggccacggctacgagcaagttgagatgccgcacggtgctatggacgccaaggacccgaacttcgaggatcctgtgaagatcgccaccgtgtgatcgcggtggtttccggtggccaggtctgtaaatagtagtaattggcgaaacgtgttttttcgtgttcaataatgtg

SEQ ID NO: 20013 - DNA, 255 bp, Glycine max
  Clone ID: LIB3049-017-Q1-E1-B12
cggggtgttggattggtttccattcccaattcccaatcgtgtggggtggccatggattctctactggcgaaatatgcctcttcagatgaagaagaagatcaacagtcatccccaacaacaacgacgacgttttcctcccttcctcaacccaaactttctctgtttcaatcccttcctcaacccaaatcttctctgtttcaatcgcttcctccacccacacaaccttccaccgaaagctcttccctcgctaaccct

SEQ ID NO: 20014 - DNA, 417 bp, Glycine max
  unsure (1)..(417): unsure at all n locations
  Clone ID: LIB3049-017-Q1-E1-B3
ggaacaaaacaagtgtttcgaatagattatcctaagtctttgggaatagtgctgcaatggcttcaagtcaggaggaggtgacccttttgggagctactggaagcccatttgtgtgcagggttcatattgccctcaagttgaagggagttcaatacaaatatgtcgaagaaaatttgaggaacaagagtgaactgcttctcaaatccaacccagttcacaagaaggttccagtgtttattcacaatgagaagcccatagcagagtctcttgtgattgttgaatacattgatgagacatggaagaacaaacccatcttgccttctgattcttaccanagagccttggctcgtttctgggtcanattcattgatgataaggtttttggtgctgcatggaaatccgttttcacagctgatg

SEQ ID NO: 20015 - DNA, 317 bp, Glycine max
  unsure (1)..(317): unsure at all n locations
  Clone ID: LIB3049-017-Q1-E1-B4
tgaggtgcangaacctgaagagaagattgagagaaatgatgagaaaaacactaatatcgagggagtaactgangaaggcattaaaagtgtcataaattttcttaaagaaaaaattcaaggattgaaaatcaaagtcatgaatgttagcgttgaagaggaagcagcagaaaacaatgattctattaagcaattgatggaggaagatagcaataaaactggctccagtgagaatcatgaagaggaagttaataatctctatgaacctgatgcggtcactctataaagagatggagatgccacacaagaagaaaaggatt

SEQ ID NO: 20016 - DNA, 390 bp, Glycine max
  unsure (1)..(390): unsure at all n locations
  Clone ID: LIB3049-017-Q1-E1-B5
gaggcagtagtagtgttactttccaatttgaattgttccattttcatttctttcgcaaaagttgcaactacttcctcagaaaaaaagtttctaagttaaggaaatccagagagacaaaaatggccggtgacggtgcagctacatgcatagacatcctccttgccatcattctccctcctcttggagtctttctcaaatatggctgccaggtggagttctggatttgtttggtgctgaccctttttggttatatacctggaattatctatgctgtctatgctatcaccaagtgatcaccctttaactttgtgtggacaataaacaaatgtcatgggcgtttctgtcnttcaactcagatattagtgtttcttaatatatcgccaatgtgtc

SEQ ID NO: 20017 - DNA, 274 bp, Glycine max
  Clone ID: LIB3049-017-Q1-E1-B6
gtggctggtgtcctttctacgcgtgtcatgcagctaagtcttcgttgtgaaactaagacaaaggacaatgtgtttgttaatgtggttgcctcaatccaatatcgagcattggcagaaaaggcatcagatgcttactacaaactcaccaataccaaagcacagatacaatcctatgtctttgatgttatcagagctactgttccaaagatggaacttgatgctgtttttgagcagaagaacacaattgcaaaagcagtggacgaagaacttggga

SEQ ID NO: 20018 - DNA, 352 bp, Glycine max
  unsure (1)..(352): unsure at all n locations
  Clone ID: LIB3049-017-Q1-E1-B7
ggttgaagaaagaaacatgtacgagcagcattatatttctgcacttctaagagaaaagcatcatattagaagcatacgcaaaacattgacagaaatagatcaggaaggagaaattctgccagatggaacactttctgtggacggacaagaaatttcagttgtttacttccgggctggctacacaccaaaggactatccttcagaatcagaatggagagctaggctactgatggaacaatcttctgctatcaaatgccctaccatatcttatcatttggttggcgccaaaaagattcaacaggaacttgcaaagcctggtgttcttgagaagtttgtagaanacaaagaccac

SEQ ID NO: 20019 - DNA, 353 bp, Glycine max
  Clone ID: LIB3049-017-Q1-E1-B9
ggagcctttttttttcagtctaatttgttgtgttgtgtccacccagattcaaaattcaacttggaatctcttatatttgtcttcattttccagtcttatcttcctgtttgcttgtgacttctggtgtgtatcatgtgggtgtgaagtggatgttaaaacttaaaagtctcacctttttggctcattggtgatttgttttgttacattggtctggaatctgaagatggttgttcattgttaggcattgaggtttctgagcattgattttgatttggtggagaaagatgaaggatttctgtgggacacctggcactgttcttgggcttgttcttaagatgtcacagttcgttttt

SEQ ID NO: 20020 - DNA, 343 bp, Glycine max
  Clone ID: LIB3049-017-Q1-E1-C1
gacctatcaagttaatttgcgtctatattcattttggcatcgaggttgaatctcatcggagagagaaaaaccataaccatgtctggaagaggaaagggaggcaagggtctcggaaagggaggagcgaaacgacaccgtaaggttctgagggataacattcagggcataacgaagcccgcaattcgccgtctcgcgagacgtggcggcgtgaagcgtatcagtggtctcatctacgaagaaacccgcggtgttctcaagatcttcctcgagaacgtcattcgcgacgctgtcacctacactgagcacgctccgcgaaagaccgtcactgccatggacgttgttt

SEQ ID NO: 20021 - DNA, 335 bp, Glycine max
  Clone ID: LIB3049-017-Q1-E1-C10
gccactcactctgtttactctatcacaatcttattatactactatcttcttctttctctctttttttcttctaatatttaattatcaaaatttgtttttatagatgatataaaaattcgttttttgtgttgacgacttgcattattgcatatacataggcagcacaaaatccttttgttgagtcagtgagagaaagagagagagagggtgtcagtgatgcccttttgcttgatccctcatttgtcaagataataagaagagggtacataacttggtggtgatttgatacacaagaagaatgttgggtcgggctgcattttcccgaactgggagtt

SEQ ID NO: 20022 - DNA, 357 bp, Glycine max
  Clone ID: LIB3049-017-Q1-E1-C11
gacacacatttattcatgaactgcctttgcagaaaacttttgtaaagacaaccattttagcaaagaaaattggtgtaattaaattctcaatcttctttacattttcactgtcagaactgtagcacgtgactctttagtgaaaccttcactccatggtttcctcattgccctttgaagcttgaactcggataaagatcgtgactttggctgattctggaaatgggttctcggattcagcttctgcctatttgcttttggctgcacttgacatgcttcagcttcttttttggtagcatagtgagtgtgagaggagatgcaactgtgcaagggagtgttgccattgatggcaaggctgtg

SEQ ID NO: 20023 - DNA, 311 bp, Glycine max
  unsure (1)..(311): unsure at all n locations
  Clone ID: LIB3049-017-Q1-E1-C2
ggttctagtgtgtgattgtttgttgttgtaactcgttcttcttcttttgttgttctgtgtttgtgtttgttttttctctcacctgaaaatgtcttgctgcggtggtaactgtggttgcggaagctcctgcaagtgcggcaacggctgcggaggctgcaagatgtacccagacttgagctacactgagtcaaccaccaccgagaccttggtcatgggagtggcacctgttaaggctcaatttgagggtgctgaaatgggtgtgcccgctgagaacgatggctgcaaatgtggacaanactgctcctgcaacc

SEQ ID NO: 20024 - DNA, 292 bp, Glycine max
  Clone ID: LIB3049-017-Q1-E1-C3
ggcagttcaattccaatatattccattctctctgtgtatttccctacctctcccttcaagatgcagatcttcgtcaagaccctcaccggcaagaccatcacccttgaggtggaaagctctgacaccatcgacaacgtcaaggccaagatccaggacaaggaaggaatccccccggaccagcaacgtctcattttcgccggaaagcaacttgaggacggccgtacccttgctgactacaacattcagaacgagagtactcttcacctcgtcctccgtctccgtggtggcatgc

SEQ ID NO: 20025 - DNA, 393 bp, Glycine max
  unsure (1)..(393): unsure at all n locations
  Clone ID: LIB3049-017-Q1-E1-C4
gaggggcttaatatctcccctcacttgtgcctagccttatgtcatagtattatcattcattctcatctttctctcttctctctccacccaaaccctaactcccgaccctgttcccctctcgtatccgtcatgaaaggaggaaagtccaagaccgaatctaagagagccgatcccaaacttgctgtgaataagaagggagccgccaccaaggctangaaacccgccggcaaggggaaggcagcgaaagaccctaacaagccaaagaggcctccaagtgctttcttcgttttcatggaggagttcangaaggtattcaacaaagaacatcctgaaaacaaagcagtgtctgctgttggcaaagctgctggagcanaattggaagacatgtctgat

SEQ ID NO: 20026 - DNA, 287 bp, Glycine max
  Clone ID: LIB3049-017-Q1-E1-C5
gggaatcaacctcgatacactacgtcctgagccttgtgttgaggggtactcaactcctgagggttattctgcaaaggcagtccatcccatagcacttgggaaggtgatgagcattgcaaagatgatgaagtcagagtttgatagtgagaactatacactttctgccattggtggcgttgagacaggtggtgatgctgctgagtttatccttctcggggcatacactgttcatgtgtgcactggggttatgatgcatggctatggtctttgtaagaaactatgtcttg

SEQ ID NO: 20027 - DNA, 395 bp, Glycine max
  Clone ID: LIB3049-017-Q1-E1-C6
ggaacctttgcattccattcattcaagattcagcaagtgcgttttggaagcagagaccgaaatacttcgagatggcccgtacaaagcaaactgctcgtaagtcaactggaggaaaagctcccaggaagcagcttgcaaccaaggctgcacgtaagtctgcaccaacaactggtggtgtgaagaagcctcatcgttatcgccctggaactgttgctcttcgtgagattaggaaataccagaagagcactgagctcctaatcaggaagcttcctttccagaggttggttcgtgaaattgcccaggatttcaagactgatctgcgtttccagagccatgctgtgcctgcattgcaagaggctgctgaagcataccttgttgggctctttgaggacact

SEQ ID NO: 20028 - DNA, 357 bp, Glycine max
  unsure (1)..(357): unsure at all n locations
  Clone ID: LIB3049-017-Q1-E1-C8
gacagacaagggtttcttccgggttcacgtttcacaatcactttttgcgcttctctcactcactcactcttcttcttcctcttcgtgtggttttctttctcgaactcgaacgaagatgcgtgagattcttcacatccagggagggcaatgcgggaaccagatcggagccaagttctgggaggtggtgtgcgcggagcacgggatcgattcaacggggaggtaccaaggggacaacgagttgcaactcgagcgagtcaacgtctactacaatgaagcgggttgcggaaggttcgtgcctanggcggtgctcatggatctggagccagggaacatggacagcgtcagatctggtcccta

SEQ ID NO: 20029 - DNA, 372 bp, Glycine max
  Clone ID: LIB3049-017-Q1-E1-C9
gaacacaacacaatactatgcattccctatgggcatagctttgagcagcaattgtgatcttatcagctatggcggagaaacacaaccttaagaatccagctgtgaagcggattctccaagagctcaaggagatgcaatcaaacccatccgatgactacctgagcctccctcttgaggaaaatatatttgaatggcaatttgctataagggggcctcgtgatactgaatttgaaggtggtatttatcacggacggattcagctgccttcagaatatcccttcaaacctccttcgtttatgttgctcacacctagtggccgttttgagacccaaaccaagatttgcttgagcatatcaaatcatcaccctgagc

SEQ ID NO: 20030 - DNA, 349 bp, Glycine max
  unsure (1)..(349): unsure at all n locations
  Clone ID: LIB3049-017-Q1-E1-D1
ggaggtanggtggaagctcgcgcagctggcggagaggatccacgtgcagttcgagtaccgcggcttcgtcgcaaacagcctcgccgatctcgacgcctccatgctggatctccgagaagacgagtccgtggcggtgaactccgtcttcgagtttcacaagctcctcgcccgccccggcgcggtggagaaagtcctctccgtcgttcggcagattcggcctgagatcctcaccgtcgtcgagcaagaagcgaaccacaacggactgagttttgtcgaccggttcaccgagtcactgcacttattatcaactcctatcgactcgctggagggtcgcctgtgaaccgaacga

SEQ ID NO: 20031 - DNA, 373 bp, Glycine max
  Clone ID: LIB3049-017-Q1-E1-D10
ggctagtggagaacacagatatcaaacttgtaggaattgattacctatctgttgcttcttatgattacttgattccatctcaccttgtttttctaaaagacagggagatcattctcgtggaaggcttgaagcttgatgatgttccagcagggttatattcagtccattgcttacctcttaggttggctggtgctgagggatcaccaatacggtgcattctgattaaaaattagggtgtccacatgtctgtgttcggtgtccgcgtcggtgtcggtgcttcataggctggaactgataaattggcatgggggtgtggtgtccttatggagcaagatagtttcaatgttgtgcaacaacttttgtagcttatgtt

SEQ ID NO: 20032 - DNA, 371 bp, Glycine max
  unsure (1)..(371): unsure at all n locations
  Clone ID: LIB3049-017-Q1-E1-D11
gagtaaaagacagaaacaagaagaaagagattcgagagaggagaggaaagaaatttgaagaaacagcaaaggaaaatttctattttgacgccttctcttttactgtatgtaatgtgaatcttgtcacttcccaacaccaaccactgataattccatgccttcttattaaccccaccattttgcctctcctcagaatttcatgtgcgtcttgtgttctccaattccctccaactacaccacaggggctggttagtgcctttactgtgacctcctctttcaagtgatgagagggggtctcagaattttccatttcaggttgggatcagacacccttttgagcanattaagaaaaccagagagcanaatctcac

SEQ ID NO: 20033 - DNA, 338 bp, Glycine max
  Clone ID: LIB3049-017-Q1-E1-D12
gctctctctgaattggaattcaactcttctctttctctttctcttctcttctgtcgaagaagaagaagcagaagtagttacagaaacatgctggagaatcttcaggctcctccgccaacggaatcggccccagtggtgaagcgctatgctcctcccaaccagaggaaccgttctgccaacaggcgcaaatcatctgatcggcttgatcggacaaacagtatcgggaatgacttagaaaagaatcaagttgcttattcaagaagtgttcacattccagattacggagatgctggtagcagtaatcttcttaatgagaatcactattcaagattaatagc

SEQ ID NO: 20034 - DNA, 395 bp, Glycine max
  Clone ID: LIB3049-017-Q1-E1-D2
gaatgccttaaacatttagctcactatcttctactaaatagttagcaataaactcttagcaatgccaaaacccaacccatatcgaataccaattcccaaataggagtaactttgcaatgccaattcgacacgatttttattattgtacccacaagtcatgaaaattcttaacctaagaaccacttattattatgtattaggtgcaaagctcacgagcaacaccaagccttgagttgggcacgtcgaagagcacacggtgggtttgctgttgcaagtttgcgattacgttcagcaccgagttcacattgtccggtggcggtgccatggccaagcacgtgacgctgccggcggtgctatgtatgaggatgttgtccggtgggagtgtcacgttcatg

SEQ ID NO: 20035 - DNA, 274 bp, Glycine max
  Clone ID: LIB3049-017-Q1-E1-D3
ggattaaattgcatcaacaagtctctatgatatggatcaaatgagtcagcaaaggcatggctattttcattccgaaagtatccatttcagaggcagcaacatctctccgcctaatgtatgcacactcgtgacagcctcagggcacggaactaatctagattcccattatttactagatgcttatgacaatggtatgatgtatggaatgacacaatacaatggagttcaacatcaacataatcttgatatgggtgttccagctgctgccaacata

SEQ ID NO: 20036 - DNA, 281 bp, Glycine max
  Clone ID: LIB3049-017-Q1-E1-D4
gatactcaaaaccctaacacacggaggagaacacaaacagcgcgagacagaggcacagagagaaaatggtttcggggtcagggatctgtgccaagagggtaattgtggacgcacgacaccacatgctggggaggctggcatcgatcgtggcgaaagaacttctgaatgggcagaaggtggtggtggtacgctgcgaggagatttgcatctccggtgggctcgtcaggcagaagatgaagtacttgcgtttcctccgcaagcgcatgaacaccaagccctct

SEQ ID NO: 20037 - DNA, 407 bp, Glycine max
  Clone ID: LIB3049-017-Q1-E1-D5
gtgataaattttgaaaaaatattcatttaaaaataaatcgtaaattgaaccacgactgtgtacatataggtcagaaatagatttataacttctaaaaaacaatagatgaaaatagggaaaaaaaatgaaagaatgatttacactaatttaagtgtatttttcttgacattattttgacatattaattgtattttatattttacgatacataatttatattgtgctaaatgtatttttaactattactcatttcaatttcaattaaaaacaaatttatattagaaacaaggatgaaaaaagaaaactcaaagagataagatgctaattatttaaaaacaaaaaatcaaattgaaccttaaaaaaacaaacctttcacttgtgcacctaaaaaaactgaaatcgatgtt

SEQ ID NO: 20038 - DNA, 391 bp, Glycine max
  Clone ID: LIB3049-017-Q1-E1-D7
ggtgttgtgtttggccatagtttgcagtgcgatcgagtcaccgcaacacacagtagtacactccgagtccgatttcgggatcaggctctatcgtacctctgtttggatgtccgctcctgccctcgacatttccttcgaaaaagccacctggaatggcttccacaggttgttccagttcacagaaggtgccaacttgaatttctctcgaattccaatgaccattcccgtgttgacaaccgcggtccccggagcgggtcctcttcaatcccaaggctattacgttagtttgtacttacccgttaagttccaaggtgatcctccggtgcctcttccagaactcaatatcaagccctatgaattcagcagccactgcgttgcggttaggaagttc

SEQ ID NO: 20039 - DNA, 403 bp, Glycine max
  Clone ID: LIB3049-017-Q1-E1-D8
gagggaggaaaagaggtagagattagggtttggtattttccacatgagaggattggagtgaaagtgagaaaatggaggaatcaggatcagggggtgtgtggtggtgttgttccccattgaagatgatagtggagtcgctaaggattatgagctgcaacaaagtggtgttcgcatccatcatgctcctcaccacccttcctctatcgaccctggtaatttcccaatccatctccacccactccctcacctcccaaatccagcacctggaggccctcgcacacttcacctccacacgtttcgaggcccgccacgtctgccaagaatcccgccacgaagccctctccctcctccgcatcaaggccctcttctccctcccctcctacctcctcccccttcgcggcgc

SEQ ID NO: 20040 - DNA, 352 bp, Glycine max
  Clone ID: LIB3049-017-Q1-E1-E10
ggatttcccgctctgaaaaccctaactaccactgagactaagttgagctgagaagagaagctgggagcgaatggggcagaagcagcgttcgagttccgatgccgacaacgaagtcaagaaacgacgccgtgttggtttcccaggcgttgattctggagttgaggccaaagactgcatcacaatctatctagtttcaagcaaggaagaattcgatgctccagagagttttgtcattcatcctgtggatctgaatagctttttgatgatgatgggaaaatttatggctatgagggtttgaagattaccatctgggttagcagcatatcattttatgcatatgctgatattacat

SEQ ID NO: 20041 - DNA, 361 bp, Glycine max
  Clone ID: LIB3049-017-Q1-E1-E11
gaaggtaaccggcgtttgtaaaattctctttctctctctctggcctcatactaccgctaccggagccgctatatcatgttggagccaattgttgctgtcacgtttaattttcatcattactaagttagtttaatagactctgtgctccattcattcaaatttcatatttatataggaacaaaacacactcctctccgctcttcccaattcctcaccccattgtcgattcccaaaccctacattttcgcccaacggcggattagtttccctattcctcactcaccaattaagtgtaagatggaggatgatgagaaacccacgggtaactcccatggcattgctgatatggatgttgctgatg

SEQ ID NO: 20042 - DNA, 349 bp, Glycine max
  Clone ID: LIB3049-017-Q1-E1-E12
ggtgacgagaaagagtgatttctctctctcacacacacacactctcagaagtgagaacacacttgggctccattgcctctgaatgaaaaatcttacacaccccacaacgacaccgttttgacaaggttaaacaatgggatctaacattttctgagaaaattgttggttttttttccttgacgttggagccatcgaacagtttgtgaaatctgagatctaagctcctgggaacggttgttgaaagctttggattataattttgaattttggtttctcggttctctgaagtgagggaaaaatgcagaggcctccacctgaagattttctgttgaaggagaccaagccccac

SEQ ID NO: 20043 - DNA, 202 bp, Glycine max
  Clone ID: LIB3049-017-Q1-E1-E2
gaccgcaaactctctctgtaaagtgcaaagcctctattttttcttgtgaatttgaaggacgatgagttccacagaggtcgcagccacaacgaagaagggtggaagagggaaacccaagaccacaaagtccgtttcccgttcctccaaaaccggccttcagttccccgtcgggcgcgtcgctcgctaactcaagggcggtcgc

SEQ ID NO: 20044 - DNA, 361 bp, Glycine max
  Clone ID: LIB3049-017-Q1-E1-E3
gcatgcataagcgagctaaaagccacacttaagcgtggtttgtagatcttagtcatatttcaggaaataaggtagttaagcgtaagctccatcacgcttaagcgagagcaaagttgagctttagctgtttcttggatttgaagcttaagcgtaaaagaagctatgcctaagcgtggctgaagttggtttccaaggattgtagcttcagcgtaaaaggatgacacttaagccaggaccactttccaaaactggggcatactggtggttgcgcttaagcatgtctgcacctacgcttaagcgcccttacttcatcaaatcttttcctttctttcagcactacaagcccatatctttgcaaata

SEQ ID NO: 20045 - DNA, 416 bp, Glycine max
  Clone ID: LIB3049-017-Q1-E1-E5
ggacgagtacctcagtgtgagcgttctgccatactcctgcgttcaatcgacttcaccatcttcttcttcttctgctgtctcccccatagatggattggcaagggcaaaagctagcggagcaactgatgcagataatgctgcttgcatttgctgtgattgcgtttgttggtggatatgtcatggcttctttccaaatgatgattctcatatatgctgggggtgtggttttcaccaccttgctcactgtccccaattggccccttttcaatcgccatccacttacgtggttggatccaactgaggtggaaaagcatcccaagccacaaccatctgtcaatgtaactcaaaagaagaaacccgttaagaagtaggttttttttattataaaccttttttgggggatgatatatctttga

SEQ ID NO: 20046 - DNA, 258 bp, Glycine max
  Clone ID: LIB3049-017-Q1-E1-E6
ggcagttcaattccaatatattccattctctctgtgtatttccctacctctcccttcaagatgcagatcttcgtcaagaccctcaccggcaagaccatcacccttgaggtggaaagctctgacaccatcgacaacgtcaaggccaagatccaggacaaggaacgaacccccccggaccagcaacgtctcattttcgccggaaagcaacttgaggaccgccgttaccttgctgactacaacattcacaaggagagtact

SEQ ID NO: 20047 - DNA, 411 bp, Glycine max
  Clone ID: LIB3049-017-Q1-E1-E7
gtggacgagctattcagaggtcttcttgctgctcaaagagattcctctgctggtggagttcacaacaagcaggaggaagagaaagcaattacggggttattggatggaagtggagagtatactcttgtttatgaggataatgaaggagacaggatgcttgttggggatgtgccatggcacatgtttgtatcaacagtgaagaggctacgagtgttgaagagttctgagctttctgcttttacccttgggagtaagcaagacaagataccccttgactcagcaatgaaatgaacagcggtttgaggttttgatcacctgctgaaaacttgaagactcttcctaatttgacgttttggttctattgtctgatgaaaagaacatggaatgaagctagttgcgtacatttacact

SEQ ID NO: 20048 - DNA, 322 bp, Glycine max
  Clone ID: LIB3049-017-Q1-E1-E8
atggaggagaagcacaaggcggtgcttcctgcgaattttaagaagatactaggtctgcaactgaagaaccaagctgcgagagggaaactcgtcaagatcaaggcttcgtacaagttagccgaagccgcgaagaaggtgaaggagagcaccgccaaagcgacgaaggaatcgcgtccgaaacgaaacaaaatcgcaaccgccgttgctccgaagaaaaccgaggcggttaaaaagcccgcgaagaaggtcgggccgaagaaaacgaagaaagtgtcgacgcctgcgaagcccaagcaacccaagtccaataggtctccgacca

SEQ ID NO: 20049 - DNA, 367 bp, Glycine max
  Clone ID: LIB3049-017-Q1-E1-E9
ggaaggcagagaaaatcaagaaccccaactataaaggaaaatggaaggcaccattgattgataacccagatttcaaggatgaccccgacctctatgttttccccaacttgaagtacgtggggattgaattgtggcaggtgaaatctggtactttgtttgacaatgtcttaattactgatgatcctgagtatgctaagcagctggttgaagaaacatggggcaagcacaaggatgctgagaacgcagcatttgacgaggccgagaagaagagggaagaggaggaatcaaaggatgacccagttgactctgatgctgatgatgaagaggaagatgctgatgaagctggcaatgactccgatgctgaatc

SEQ ID NO: 20050 - DNA, 307 bp, Glycine max
  Clone ID: LIB3049-017-Q1-E1-F1
ggtacctaaaaaacctcggtttcactctcttctctctccctttcctctactattcgctgatctcaattgcgtctcacccatccatcaaccttccaatacttctcggcaaaaccaccgacggtagcttccccttgttctcactcataatcttcagcccttacatctatttcgtcagaatcttctctctgctccgaagacttcgaagcggggaacctacttacacccaagtccatgagggtctctatgtcggtggctggccaccgttgcctcagaagctgccacctgggtgacccgccatcgttgattg

SEQ ID NO: 20051 - DNA, 360 bp, Glycine max
  Clone ID: LIB3049-017-Q1-E1-F10
gggacgcgacgaggggaaacacgagccgtcggatttgatcacggaaaccatgaatctgacggctccaaacctttcacttcccagtgaaactgaaacattcttgagcgcagcaatttccctcaaggacaaggtggtggaggagacttggaaccggagagatcaagtggttgatccgacggtgtacacgggactgttgggcaccgcctttacttgcttgcggtcctaccaggttaccggttgccggaacgacttaatattatccagcgaaatcattgacacgtgtgtcaccgctgcacgtgcctccctcaggcacgtgacttttttgtgtggtagaggaggcgtttatgcgcttggtgctgt

SEQ ID NO: 20052 - DNA, 339 bp, Glycine max
  unsure (1)..(339): unsure at all n locations
  Clone ID: LIB3049-017-Q1-E1-F11
gacatcacgacatcacatcgcagagaagaacagagagagatccatccatcaattccaatggccgatcagctcaccgacgaacagatctccgagttcaaggaagccttcagcctcttcgacaaggacggggatggttgtattaccaccaaggaacttgggaccgtgatgcggtcacttggccagaacccaactgaggcagagctgcaggacatgataaatgaggttgatgctgatgggaatggtaccattgatttcccagaattcctgaatctcatggctcgcaagatgaaagacactgattcagangaagagctgaaggaggctttccgcgtgtttgac

SEQ ID NO: 20053 - DNA, 319 bp, Glycine max
  Clone ID: LIB3049-017-Q1-E1-F2
gctagaatcccagttcaaaggtaaggtacgttaacactcttcttcatcgtcgtcgcaatgggacgtgtgatccgtgcgcagcgtaagggagcacgctcggtcttcaagtcccacacgcaccaccgcaagggccctgcacgcttccggagcctggacttcggggagcgcaacggctacctcaagggcgtggtcaccgacgtcatccatgaccctggccgcggcgcgccgctcgccaaagtcgccttccgcaccctttcagatacaagaagcagaacgagctcctcattgccgccgatggcctctacaccggttagttcaa

SEQ ID NO: 20054 - DNA, 311 bp, Glycine max
  Clone ID: LIB3049-017-Q1-E1-F3
tctgaagaagtgccctgatgccattccagaccctaaggccgtgcagtacgtgagaaacgaccgtggcacccccatgattctagacaacaattactacagaaatatattggacaacaagggcttgttgatagtggatcaccaactagccaatgacaagaggaccaagccttatgtgaagaaaatggccaagagccaggactatttcttcaaggagttttctagagccattactttgctctctgagaacaaccctctcactggcacaaagggtgagatcagaaagcagtgcaatgctgccaacaagcaccatg

SEQ ID NO: 20055 - DNA, 263 bp, Glycine max
  Clone ID: LIB3049-017-Q1-E1-F4
gattttcgcggtgagttagaactgataatcaagagagtgactactggtcggcgacagcgaactacttccgtgtaatggcgacctccgtcgcagtcgccggcgctttgacggcgcatgatcgccggattctgacagcggtgaacgtcggagcgtcgagcctgtcgttggccggttccagcttcattgtagtgtgctacctcctcttcaaggagctccgcaagttctccttcaagctcgtcttctaactcgctctctctgatatg

SEQ ID NO: 20056 - DNA, 404 bp, Glycine max
  unsure (1)..(404): unsure at all n locations
  Clone ID: LIB3049-017-Q1-E1-F5
gcacaagtttgttgagatagctagaagcaataagatgaaaatgaaagtgcttgttttgtttgttgctacagttttggtagcatatgaatgccatggctcagactaccagaagttccctctccaaatgaaaactgggtttggtgggcaatacagcaatgaggtggcatgtgccagttggaggcttggcgtggaagcaaacaacgtagtcaagtggcaaactgttcctgcagcttgcggagagtacatagctgactacgttctangagaccaatatagatcagattccaaaacagttaaccaacaagcttatttctatgctaaatccctcaaactcaccaacaaagatgtctttgtcttggacgttgacgacactactctctctaatctccagtattttgctaacc

SEQ ID NO: 20057 - DNA, 401 bp, Glycine max
  unsure (1)..(401): unsure at all n locations
  Clone ID: LIB3049-017-Q1-E1-F6
gacaacaatctaagagtgagttttgtttatttgaaattaacaagtagcaaagatgtttggaatcatcggaggaaacaagggtcacaagataaaggggaacttggtgattatgcgaaagaatgtgttggatatcaacagcattaccagtgttaagggtgtcatcggaaccggcattaacatcattggaggagtcgtcgacaccgttactgctttggcgtcncacatctccatccagctcattagtgccacaaggctgatggacatgggaaaggaaaatttggaaagctacaaatttaagaggacaagtgtcgttaccaaccttgngagctggcgaagatgcatacgatgttcattttgaatgggacaatgacctcngaattcccggtgcattttacattaag

SEQ ID NO: 20058 - DNA, 403 bp, Glycine max
  Clone ID: LIB3049-017-Q1-E1-F7
ggtctcgtggaagtgtaagcaagcaaaaccctagcggcgcctgctttctttgttcgtgttttgcatcaggatggagtctcaggtgaagcacgcacttgttgtcaaagttatgggtcgtactggatccagaggacaagtgacccaggttagagtgaagtttttggatgatcagaaccgtcacatcatgaggaatgtgaaaggacctgtgagagaaggagacattctcaccctactcgagtctgaaagggaagcaagaagattgcgctagatggtctcttttttttggcttgcctccaaattcgaacaaaagcaatatttttcttgatatttatggtagttagtcggtgctaaaggggttatagcaccctatcttattgttttggatcaaatttcattcgaatta

SEQ ID NO: 20059 - DNA, 363 bp, Glycine max
  Clone ID: LIB3049-017-Q1-E1-F9
gatacattctcttgtcacagttttctgtgtcaccggaactcgtttctttcaaaacacttcaaacatctcgaacgctctctttccggcaactaggttaaagttcatcaatggcaggtcgcggcaaaaccctaggatctagcgccgccaagaaggctacctcaaggagcagcaaagccggcctccaattccccgtcggccgtatcgcccgtttcctcaaggccggaaaatacgctgagcgtgtcggcgccggcgcccctgtctacctcgccgccgtactcgaatatctcgcggctgaggttttggaattggctggaaacgctgcgggagacaacaagaagactcgaattgtgccgcgccacattc

SEQ ID NO: 20060 - DNA, 419 bp, Glycine max
  unsure (1)..(419): unsure at all n locations
  Clone ID: LIB3049-017-Q1-E1-G1
ggtggagaaaagggcaatgactcacacccacaatagtcgggggcagcttcaaagtacctccacattgtctcctactcttactgttctcttctcttctcatcatttttattttttccaatcaaaccaaacaaaacataagcaccgctcttttctctccgaaatccccatctcccttcacttctgagctctggacgagatcccagatctcaccatctttcacgcactcttccatcagattcaccctttcgtttaacgcaaactcataacttgaaggttaatggctgctccaccggcaaggctcgtgccgattacgattatctcatanagcttctcttgatcggtgacagcggtgttgggaaaagttgcctccttctgcgtttctccgatggttctttcaacactagtttcatcacaactat

SEQ ID NO: 20061 - DNA, 359 bp, Glycine max
  unsure (1)..(359): unsure at all n locations
  Clone ID: LIB3049-017-Q1-E1-G10
gagttgtgcaaaggaggaagaggaaaaagaggattggagggtcgccacgtttagcaacaaccaaaccctctctactctttcttcttctcttcgctagggttttagcttcttcctcttcacttcgttcttctggcctctacaatgagcaacgacaaggacaccttcaacgtcgctgatctcacttccgctctcaacgaggacaatagagcagaccttgtcaatgctctcaagagcaagatacagagtttggctggacagcattctgatattctagagtctctgtcgcccaatgtcaggaagcgtgtggaggttcttaaagagatcagggtcaacatgatgaattanaggcaaaatttttt

SEQ ID NO: 20062 - DNA, 387 bp, Glycine max
  Clone ID: LIB3049-017-Q1-E1-G11
gaccttcttagttgaaactcccaaacaaacgtagtaggaggcaacatgaaatttctcgtttccattacaaaaggcggggcaaactaatcttccagtagtatggcaactgagaatccaattagaatctctgaagctgggagtaaatggccgtcttttaaggaagctgcaacttttggctcaccatcccgtcacatggcaacataggatttgggtatattttttgaatggccataggtttcatggtcgtggaaaggatgtggtacccaacagcagtggcagtgcacctccaagcatggaaggctcatttctggccatagaaagcttgttatcccagaacaccacctggaatgcgagcttgggatctctgaacagagatatgcaaaaaga

SEQ ID NO: 20063 - DNA, 349 bp, Glycine max
  Clone ID: LIB3049-017-Q1-E1-G12
gaaaaaatattgatggcaagtttcgtacagaggaggaaaacaaaaattaatttgaaaagcaagttgaaaaagaaagtagaagagtctccaccatgggtgaagaacttgctaagctttgttgaacttccaccaactgaagttatcctcagaagattgtttctctttggcttcatgggtggctggagtattatgaattctgctgaaactggacctgcttttcaagtggcaatctctttggctgcttgcatatattttctcaacgaaaagacaaagagcttggctagagcattcattattgggtttggagctctagtggctggatgggtctctggttcattgctggtaccta

SEQ ID NO: 20064 - DNA, 86 bp, Glycine max
  unsure (1)..(86): unsure at all n locations
  Clone ID: LIB3049-017-Q1-E1-G2
aactgctgtttgattttatgactcaacattgagtgctgtaaaaaaaaaaaaanaaaaaaaaaaaaaaaacggccgcccaaaagatc

SEQ ID NO: 20065 - DNA, 214 bp, Glycine max
  Clone ID: LIB3049-017-Q1-E1-G3
ggagaacaaaacaagtgtttcgaatagattatcctaagtctttgggaatagtgctgcaatggcttcaagtcaggaggaggtgacccttttgggagctactggaagcccatttgtgtgcagggttcatattgccctcaagttgaagggagttcaatacaaatatgtcgaagaaaatttgaggaacaagagtgaactgcttctcaaatccaaccca

SEQ ID NO: 20066 - DNA, 214 bp, Glycine max
  Clone ID: LIB3049-017-Q1-E1-G4
gactacacacttacatttctctaacacttcacaatctctgtttcagctttctctcttttctacaatggcttgcaccaacgtcgtgttgacgctagtcgccgcattgttggtaacctccgtcgtggctcagtctccggagtcctcaccagctctgtctccaaagcgaacccccgtctccacacctcataagtctccctcgccggcgatttctccc

SEQ ID NO: 20067 - DNA, 134 bp, Glycine max
  Clone ID: LIB3049-017-Q1-E1-G5
gcagcttcaacgtatctccacattgtctcctactcttactgtgctcgtggcgtggcatcattttcatttgttccagtcactccagtcctagcatagccatcgctcttttctcccctacgatcctcatctccctc

SEQ ID NO: 20068 - DNA, 303 bp, Glycine max
  Clone ID: LIB3049-017-Q1-E1-G7
gaaacacaaacacaaacatagggtaactcgaatgcaatgcaaaactttgatccaaatcaaatgctgataaaattgaagggtcccttagatcttctttgaggtcactgttgcatctctcacctttgctccaacgccacgttgctttggttggagggagatgattgatggagtccaatgaggatgggagcatgtcaaatagagagttcatgccaattggaaccccaatggtaaaaccaaaatttaaggcaaaccttaataaaggaattatccagaaggaaaaaaatcaattccaaaaaggttttt

SEQ ID NO: 20069 - DNA, 353 bp, Glycine max
  Clone ID: LIB3049-017-Q1-E1-G8
ggcagcgcttgagaccaagccccactcaaccaccacaccactctctctgctcttcttctacctttcaagtttttaaagtattaagatggcagagacattcctatttacctcagagtcagtgaacgagggacaccctgacaagctctgcgaccaaatctccgatgctgtcctcgacgcttgccttgaacaggacccagacagcaaggttgcctgcgaaacatgcaccaagaccaacttggtcatggtcttcggagagatcacaccaaggccaacgttgactacgagaagatcgtgcgtgacacctgcaggaacatcggctccgtctcaaacgatgtgggacttgatgctgacaa

SEQ ID NO: 20070 - DNA, 333 bp, Glycine max
  Clone ID: LIB3049-017-Q1-E1-G9
ggtgtgcaaaacagagatgagtgcaaatcagaggagtactgctccaccctttaaggaggaatttgcaactgtactaaggatgactcattccttaaatgatgctcaacctgtacctgcaacaccagcatcattttgcaatcctactaattgcaatattggttgtgacgatgttgttcagaaccaaaaaaatgagaatgaaaccccacctgcgacacaaaattcaaagccaaaacgaggaagacccttcaaaacgccacctgaatcgattaaaaattggtatgttatacgcaaagaacgaaagatcgccaacaggttcgatacgagttattttca

SEQ ID NO: 20071 - DNA, 159 bp, Glycine max
  Clone ID: LIB3049-017-Q1-E1-H1
ggttctgggtgtttttcttatctgtgttttgtttcaattgcgcgaggtgggtttttctaaggtttggaggctatgccgaaagcgggttgaataagctcaagtgaagaaaatgattctcacaaagcagtaccgatgcatacactcagctaactgtcaatg

SEQ ID NO: 20072 - DNA, 343 bp, Glycine max
  Clone ID: LIB3049-017-Q1-E1-H10
ggttttgggggatgggatatcagtaacttgaacctggcagatgccatggccagggccaaggtgtttgatatcgacctgcagaaacagttgaggccttacatggaatctatggttccactccccggaatctatgaccccgatttcattgctgccaaccaaggagaccgtgccaacaacgtgatcaagggcacaaagaaagaacaagttcaacaaatcatcaaagacattaaggagtttaaggaaagcactaaggttgacaaggtggttgtcctgtggacagccaacacagagaggtacagcaacctagttgtgggactaaacgacaccatggaaaacctctttg

SEQ ID NO: 20073 - DNA, 351 bp, Glycine max
  Clone ID: LIB3049-017-Q1-E1-H11
gaccgatcgaagtagcagcacacagaaaatgggcactcgagaggtgtacgaagagaaactaaggaccggaaatctccaccacgatcccaccatcaaccctggcctcggttccgctcgatgccctcgctgtctctctctcctcaaccctaatttcgaaagaggcgagtggaccatcactcccgtcttgcacgacgccactgccgtcgctgggtcggggattggtggtatgcttggttttgttcatggtttcaatacaggtttacctcttcttcaaaatggtctgaagggaccgaagtggcttccttttgttgttgggattcctccattgttgatattctccggcctaagtgc

SEQ ID NO: 20074 - DNA, 329 bp, Glycine max
  Clone ID: LIB3049-017-Q1-E1-H12
ggtctgtaaattgtaaattgcatcatccctgaagctgaacctcaaaaccctagctgtccgcctgtctgcaacggcgtcgttatgatcagttgagaatccaaaggaatcgagtcgaatcatttgaccggcgacagttatgtacagagagcgaggaggcgtcggatccaaatcggaggtaacttccgttgatcggaagcgaatcaacgacgtcctcgataaacagcttgaacgttcctcgccttccacatccagagccgccgccatcaacggcaaggaccgctcctcctcttccctcttagccgccgccaaggactccccgctcgcctccg

SEQ ID NO: 20075 - DNA, 266 bp, Glycine max
  Clone ID: LIB3049-017-Q1-E1-H2
aggggggagaaaatagagaagagagatggatccagacgcgttggcaaaggcattcgtggagcactactacagcaccttcgacaccaacaggaacggcttagcgaatctctaccaggagggttccatgctcactttcgaagggcacaagatccaaggcgcttccaacatcgttgccaagctcacctccctccctttccagcagtgccagcactcaatctccaccgtcgactgccagccctccggcgtcaacgccggcatgctcgtct

SEQ ID NO: 20076 - DNA, 238 bp, Glycine max
  Clone ID: LIB3049-017-Q1-E1-H3
ggaattacacctccaccacacacggtttagggcacactcaatgtgctcacattgacactgttaggccatatctcctttttttctctgacctgtacttaggtaaaactcacaaatactatacctttgatctggggaaacagttacattcatacgacatcattccaccaacattaaacaacttccgtttttgatgttcgagtcaacttctgtacactcaactgcaaaggcttttgtggac

SEQ ID NO: 20077 - DNA, 238 bp, Glycine max
  unsure (1)..(238): unsure at all n locations
  Clone ID: LIB3049-017-Q1-E1-H4
gacaacactcatagtagagtaaccaaaaggagagtgcaataactcgttgtacattcctagtgtgtgggagagacatggctaagatgtgtgttttggtgttggttcttgctctggctgtggccacaagtgccagaaacgttcccaaccccaaggatgctggtcttaanggacagaagaacttcatcagctatggtggaattggtggttattccgggattgggaacaatggactggcttt

SEQ ID NO: 20078 - DNA, 370 bp, Glycine max
  unsure (1)..(370): unsure at all n locations
  Clone ID: LIB3049-017-Q1-E1-H5
ggccacaatggttgtccctcttaggcactttcttgttttctctctcaccctcatatccatcatcttccacacccatggagcgttctctgagcaatcaataatcaagttacccacagaccaaccaagggtagagaaactgacccacttgcattttttctaccacgacatcttagagggcaagaacatcacggtggtgaaaatcatcgagccatcagcgagcgaggttcgtggagcaactgggtttggaaccactttcatgatggacaatgttttgaccganggtccagagctgagctcgaagcacgttgggagggctcacgggctgtttggcttggcctctttggaggaccgtggaatggtgatgctcatt

SEQ ID NO: 20079 - DNA, 353 bp, Glycine max
  Clone ID: LIB3049-017-Q1-E1-H6
gatgccgttaaagtaacaatgggccctaaggggcgtaatgtggttattgagcaaagttttggagcacctaaagtgacgaaagatggagtaaccgttgctaagagcattgaattcaaggacaaagtcaagaatatcggtgccagtcttgtaaagcaggttgctaatgctactaatgacgtggctggtgatggaaccacttgtgctacaattcttactaaagcaatatttacggaaggatgtaaatcagttgcagctggaatgaatgcggtggacctgagacgaggtataaatatggctgttgatgctgtggtgacaaatctgaaaagcagaacacgtatgattagcacttctga

SEQ ID NO: 20080 - DNA, 383 bp, Glycine max
  unsure (1)..(383): unsure at all n locations
  Clone ID: LIB3049-017-Q1-E1-H7
gaggaagcaggaagccgacgtttgaggaaaatatataaagggtatggaatagggttgggagggatcaaaacccacaacacaacacggcactgagttattagtaattgtgttgtgttgtgttgagcagagagaaggatcaagaaaggataagaagaaagagggaatagggttagggttagggttagggttaggttgaggatgccgaagaacaagggaaagggaggtaagaacaggaagaggggaaagaacgaggcggacgacgagaagcgagagctggtgttcaaggangacgggcaggagtacgcgcaggtgctccggatgctgggtaacgggcggtgcgaggcgatgtgcatcgacgggacgaagaggctctgccacatccg

SEQ ID NO: 20081 - DNA, 403 bp, Glycine max
  unsure (1)..(403): unsure at all n locations
  Clone ID: LIB3049-017-Q1-E1-H8
gcccttcaatccttcaattcaagtttcaagcacttctacttccttctctcaatggatgcaaaacctcctcaacttgcttcacaacctttgaactatcagacatggttcttgaaagtttccatccactgtgaaggttgcaggaggaaagtaaagaaagttctgaggagcattgacggtgttttcactgcaacaatagaccaacagcagcagaaagtaacagtcaccggaagtgttggtgtagagatccttctcaggaaactgatcagagccggaaaacacgccgagatatggccggagaatctcaacctcgacgacganagaatcgccggcaaagggaagaaaaagaagaagaagaagaagaatgaagcacgagaaccacagagcttgggaaacaagggagctg

SEQ ID NO: 20082 - DNA, 363 bp, Glycine max
  Clone ID: LIB3049-017-Q1-E1-H9
gatcttgagtaagtaatatctcccactcattcacttactttgacattcacattcagaacacaagcagaatgcagagaggcacgccggtgagaaagccacacaccaacacctccgatctcctcacttggtcggaaactcctccgccggattccgccgccgccgccaccactcgctctggccagccttccgatagaatcagtaaggttctccacggcggccagctcaccgacgaagaagctcagacgctagccaagagcaaaccatgctcagggtataaaatgaaagaaatgactggaagtggtatatttgctgccaatggggaagattctgcatcagaagccaattctgcaaatttgaataaca

SEQ ID NO: 20083 - DNA, 274 bp, Glycine max
  Clone ID: LIB3049-018-Q1-E1-A1
gacatagctgagagagaaaggagaggttaactacgaagcaatacttcaatggccacccttgttgttcataaccaaacttcttctgctcaagatgctgaggctctccaacaggccttcaaatgatggggggctgatgacaaagccgttatagcaatacttggtcacacaagtgttcatcagacgcaagaaatcagataagcttatgaggagatttaccatgaggatctcatcaaacgccttgagtcccagatctcgggtgactttgagagaacta

SEQ ID NO: 20084 - DNA, 354 bp, Glycine max
  Clone ID: LIB3049-018-Q1-E1-A10
ttcccaagagaggtttggctttataacatcggattaggtagtcttgtgtacaacgttgagaagatttgtgatgaatctggtgaggatccggattgcagcaggtcggtgactgggaatagcattgctgatcacttagtctattatggcgtagacatgggatcagatgagcctagttcatgcagaattgttatggattctcatgttcagaatactagcatcagagattcaagaggaaacttaatcttgtccagagatcctgcaacccccctcatcaaattgggtggagagggtgacaatcaggaaaatcccattaatgttgattgaattggcattagatatctcttgcatgatatg

SEQ ID NO: 20085 - DNA, 381 bp, Glycine max
  Clone ID: LIB3049-018-Q1-E1-A11
gggcacagaatgaaaatagtttcgtcgaattctagcttgaatatacacaagtgcgttaggtaatcagaagtgtgaattggagtgtatggattcagaagaatcaatctggagaggtcgataaacataaactccaattggttttgttttgtcggcaatgagggttctgcaacttggattgtttcttgctctggcatctggattcgcagccatttccatttacatcaccggcctctcagatccttttgtatatcccagttatcacctcacagatgaagacacccaagcattgctttcgctgcacgacactttccagaagtgtgtgactgcaaatggacttggcctaaaagcaaccaggggcacagattattgccaaaccacaat

SEQ ID NO: 20086 - DNA, 370 bp, Glycine max
  Clone ID: LIB3049-018-Q1-E1-A12
aatgttaatgaggagtactttgatcactgtgattacactgtggatacctttaattccattgatgtggcttctgtatcgccaactttcggctgctaatagtcccgcaaggaagcagagaccaaatggtcagacagttggatttgatgatgtggaaggtgttgattctgcaaaagtagagctcgtggagatagtttcatgtctgcaaggggatataaattaccgaaagctaggggcaaagttacctagaggtgtgttgctggtgggtcctcctggaactgggaagacactacttgcgcgtgcagtggcaggggaagcaggtgtaccctttttcactgtatctgccagtgagtttgtggagttgtttgttgga

SEQ ID NO: 20087 - DNA, 88 bp, Glycine max
  Clone ID: LIB3049-018-Q1-E1-A2
gatagcagtgtgagagaaagtgttgcagagttgcacacggagatggcggtggccgccaattctgctgaaaaaaccctccaaactagct

SEQ ID NO: 20088 - DNA, 248 bp, Glycine max
  Clone ID: LIB3049-018-Q1-E1-A3
gatcgatttctcgcattaactcttgacctctcacattcgccaattccgcagctcgcgcaatcgctgctaaattccagggttccgcaatggactctggcggaaagctcaagaatggctcctgatgtacaactgggtgccgtcgatggacgtagctcgtcttcaagttcgtcagctactctcaccagttcgccgtcgggacatttagccgttatttgtcgtaaggtaagtacgctcaacgtgtcggtaca

SEQ ID NO: 20089 - DNA, 298 bp, Glycine max
  Clone ID: LIB3049-018-Q1-E1-A4
gatgtcaaattcctctacgctctcttgttcaagggctgtgcaaggatcctcccagagggacgccttgacaacttgtgcaacccacaactgatccaggcgcagagcatacttgcgagctgggctgttcaagttgtgctcatcgtgtctgttaattgtcatcgaattgatcgacgaccacttggtgatagacgtcaccccctctaccctggaggggcctttgaatcaccaggtacagctgatgaatctagatcattctctgaattctacgtcactgaggtcaagaacggtcccttggcta

SEQ ID NO: 20090 - DNA, 357 bp, Glycine max
  Clone ID: LIB3049-018-Q1-E1-A5
gacaaacaacttctttcaaggaaaatggctcttcgtggatttcttctgggacttttcttaatggtcactcatgtcaaggggtatggttttggaggttggaccaatgcacattccaccttcgatggaggtggtgatgcttctgggacaatgggtggggcttgtggttatggaaatctgtatagccaaggttatggaactgatacaacagcactgagcactgctctgttcaacaatggcttaagctgtggtgcatgctatcaaattaaatgtgtgaatgatccacagtggtgccttcctggctccatcatactcactgtccacaaagttctgtccacctcgtggttggtgtgaccctcc

SEQ ID NO: 20091 - DNA, 267 bp, Glycine max
  Clone ID: LIB3049-018-Q1-E1-A6
ggttattgaagagtagggataatagaatccgtatcgtagcaaaacgcacgagttaggggcggcgatgggaggttcatcggaggatttctcggtggtggtgcgggcgtcggacctcggcgtcgatgcgcgacctttcctcgaggacgatcgacagcaggaagaagggagttggcacgactgttcccactacctctcccccgagcaggacttcgccgatctcgatcagttgcaattcctccgcctccagggctccgacaagaactccaa

SEQ ID NO: 20092 - DNA, 327 bp, Glycine max
  Clone ID: LIB3049-018-Q1-E1-A7
ggaaacagagagtgatttcagtgagtgatcggtgttcacttgatctcatcataatcgtcagcgtcaattgaagaagatgccgatcagaaacatcgccgtcggaaggcctgaagaggcgactcaccccgacacgttgaaggcggctttggctgagttcatctcaaccttcatcttcgtgttcgccggctcaggctccggcatcgcctacaacaagctcaccgacaacggcgctgccacccctgccggcctcatctccgcctccatcgcccatgcattcgccctcttcgtcgccgtctccgtcggcgccaacatccccggcgggcacgt

SEQ ID NO: 20093 - DNA, 363 bp, Glycine max
  Clone ID: LIB3049-018-Q1-E1-A9
ggacgatccaagtgatagacactcgtcgcgatgggacgtgtagctgaatccgagcgaactctgtacccatacgtgactggatcctctgtagtcgctatcaaatacaaagatgggattctaatggccgctgacatgggaggttcgtatggatctaccctgcggtacaagagtgttgagcgtatcaagcctattggaaagcattctcttcttggtgctagcggggagataagtgactttcaggagattctgcgttaccttgatgagcttatcctatatgacaacatgtgggatgatgggaattctctagggccgaaggaggtgcataattatttaacccgtgtgatgtataatagacgtaacaag

SEQ ID NO: 20094 - DNA, 320 bp, Glycine max
  Clone ID: LIB3049-018-Q1-E1-B1
gagttcaattccaatatattccattctctctgtgtatttccctacctctcccttcaagatgcagatcttcgtcaagaccctcagcggcaagaccatcacccttgaggtggaaagctctgacaccatctacaacgtcaaagccaagatccaggacaaggaaggaatccccccggaccaacaacgtctcattttcgccggaaaacaacttgaggacggccgtacccttgctgactacaacattcagaatgagagtactcttcacctcgtcctccgtctccgtggtagcatgcagatcttcgttaagacactcaccggcaaga

SEQ ID NO: 20095 - DNA, 353 bp, Glycine max
  Clone ID: LIB3049-018-Q1-E1-B10
ggtctaatatttgcagtgctgaaaatgtcgcagttgttggaaaaggccaaaaactatgttgcggagaaagtcaccaacatgcccaagccagaggcgagtgtcaccgacgtggacttcaagcgcgtgagccgcgacagcgtcgagtacttggccaaggtctccgttcagaacccttattccacttccattcccatttgtgagatcaagtactccctcaaaagtgctggcagggagatagcagcaggaacaatacctgacccagggtcattgaaggcaagcgacacaacaatgttggatgtgccagtgaaggtgcctcatagcatattactgagcttggcaaaggacattggtgc

SEQ ID NO: 20096 - DNA, 356 bp, Glycine max
  Clone ID: LIB3049-018-Q1-E1-B11
actgaaccgaactgaactgaaccggatccagagagtgctcctaaacgacgccgtttcgcaagcatcagtagtgtagtcgcagagaatcaaatcaatggagaagggaaagggagtgatgggatcgggaggacgaagatggggcgttgacttctccgacaattccacttctcgcgatattcccgatcctcccggtttctgtcgcacttctctcgatcaggacgattcaacgctcagtcgccagaagaaggacgctgaatccaactggaaagcccagaaagcttgggaggtagcacaagcccctatgaagaatttgctaatgatggggttcatgatgtggatggctggtagcacagtcc

SEQ ID NO: 20097 - DNA, 267 bp, Glycine max
  Clone ID: LIB3049-018-Q1-E1-B12
ggattgaatggcgattaccatcatgacagtgataccgttgtgaacgccaatgacatgactcaaggtagcatcagtttcgcagaggtactgctgattcagatcgcgcaacgcatctgaaactactgagttcaacaatgcgattcgggcaagtagtaggtgttgactctactgaagtaaagctcttgcatatatattgatgtcggataggcgatattgctgacagatagctctgtgcagagtgacctgtacgtgcgttgctggtaggtc

SEQ ID NO: 20098 - DNA, 352 bp, Glycine max
  unsure (1)..(352): unsure at all n locations
  Clone ID: LIB3049-018-Q1-E1-B2
gatcccatttgaaatcaaaatcaaaaacaccaaatcctctaattcaagtttgcaccaagttttcctgagaaaatgtctggtcgtggaaagggtggaaagggtttgggaaagggaggtgccaagaggcacaggaaggttcttcgcgacaacattcagggcattacgaaacctgcgattcgtaggttagcgagaagaggtggcgtgaagaggatcagtggtttgatctacgaggaaaccagaggggttctgaagatattcttggagaacgtgattcgcgatgctgtgacttataccgagcacgctangaggaagacggttactgccatggatgttgtttatgctctcaagagac

SEQ ID NO: 20099 - DNA, 362 bp, Glycine max
  Clone ID: LIB3049-018-Q1-E1-B3
ggaacctttgcattctattcattcaagattcagcaagtgcgttttggaagcagagaccgaaatacttcgagatggcccgtacaaagcaaactgctcgtaagtcaactggaggaaaagctcccaggaagcagcttgcaaccaaggctgcacgtaagtctgcaccaacaactggtggtgtgaagaagcctcatcgttatcgccctggaactgttgctcttcgtgagattaggaaataccagaagagcactgagctcctaatcaggaagcttcctttccagaggttggttcgtgaaattgcccaggatttcaagactgatctgcgtttccagagccatgctgtgcttgcattgcaagaagctgct

SEQ ID NO: 20100 - DNA, 351 bp, Glycine max
  Clone ID: LIB3049-018-Q1-E1-B4
gattgaaagaaactgttgaatcgcgtcgattaaggttttgagatttctaagctttcatctcagacagtgaaaaaatgatagatataagtacacttaatgctgcacagattactgtgctgggatctgccttttgtgctatgctttccatgcatttcacgtcgcagttactgtctcaacatctcttttattggaagaatccgaaagagcaaaaggctattatcattatcattctcatggctccaatctatgcagctgtctcctttgtgggtctcttggatatcagaggaagcaaggagtttttcacctttttggagtcagttaaagaatgttatgaagctttggtcattgcca

SEQ ID NO: 20101 - DNA, 351 bp, Glycine max
  Clone ID: LIB3049-018-Q1-E1-B5
gaccgcacagaattagggttttccaattcacagagcaacacaacgaaccaacaatggcgcagcctcagccgcagtcgcagccgcagcacgggcaagcagcgctggagcaggtgcagtgcttcggtcgcaagaagaccgccgtggccgtgacctactgcaagcgcgggcgcggtctcatcaagatcaacggctgccccattgagctcgtggagccggagatcctccgcttcaaggccttcgagcctatcctcctgttgggtaagagccgcttcgccggcgccgacatgcgcatccgcgtcaagggtggcggccacacctcccagatgtacgccatccgccagagcatcgcca

SEQ ID NO: 20102 - DNA, 336 bp, Glycine max
  Clone ID: LIB3049-018-Q1-E1-B6
ggagcaaagccctaatccctatttttcttcctcagtagtgtcatttacgcttctcttctctgcagcaactatgcctaaccctaaggtcttcttcgacatgaccatcggcggtcaatctgctggccgcatcgtgatggagctctacgccgacgtcactccccgcaccgccgagaacttccgcgcgctttgcaccggcgagaagggcgtagggcggagcggcaagcccctccactacaagggctcgtccttccaccgcgtgatcccgagtttcatgtgtcagggtggcgacttcagcgtcggaaacggaaccggcggcgagtcgatttatggcgccaa

SEQ ID NO: 20103 - DNA, 374 bp, Glycine max
  Clone ID: LIB3049-018-Q1-E1-B7
ggactggaatgcaggatttgcttatgcaaagaatggagtgcctattggtcctagagctaattcttattggctttacaatgtaccatggggcatgtacaaatcattgatatacataaaggaacgttatggaaacccaactgttatcttatctgaaaatggcatggatgatccgggtaatgtgactcttcccaagggtttgcatgacaccacaaggataaactattacaaaggctatttgactcaactaaagaaagcagttgatgatggagcaaatgtggttgggtactttgcatggtcattgctggataactttgaatggaggttgggttacacatcaaggtttggcattgtctatgttgatttcaaaagcctca

SEQ ID NO: 20104 - DNA, 348 bp, Glycine max
  Clone ID: LIB3049-018-Q1-E1-B8
gtcaacctgcattcctctcatacactgcctcaacaattgccgtgacattgttcttggttttgtattgtgctccccgttatggccagactaatattttggtttatactggaatatgctcgatagttgggtccttgacagtatgtggtcccagtggtcgctggtatctggcagacagtgggtctgtgcctggagatcttttacttataataggaaaggcacttacccatgctactgttggcctatgtcctgctgcatcatatagagcttctcctgattattttttgagtcctaatggtggaggaaggacttctcttgcatatagactcatgccacagggcaatgctatat

SEQ ID NO: 20105 - DNA, 355 bp, Glycine max
  Clone ID: LIB3049-018-Q1-E1-B9
gacatgttccatagttcttgctctgggtgggtaaagatgaaaggtgctagtagagtcttatgcttgtttctggcggcatttttgtggtttaatgctcaacatgcttttgtaagttgtgctttgacatttgagttgcaaagcaaaattgctaaagccaaccaagagggaccttacctaggtttaatcataccaaattcttttgaactagaccctcttcttcagaatcctggctacacagctagtgacaccatcatagacttcgctggaaggagatttcgctttggagccattggtgacaagcctgttatactggtcatgacaggattgagcgtgataaatgcagctataacgactc

SEQ ID NO: 20106 - DNA, 299 bp, Glycine max
  Clone ID: LIB3049-018-Q1-E1-C1
ggagcgaggacaccatggccaagagcaacgaagaggaagaggaagcagtggcgccaatggtgaagttgggttcttacggtggtgaggttcggttggtggttggtggggaggaatccgctgcggaggagaccatgctgctttggggtagtcagcaacccacactttccaaacccaatgccttcgtctcgcaagcttccttgcaactctccctcgactcttgtgggcactctctctccattcttcaatccccgtcctcattgggaacgcctggagtaagtggagcagtgatgtgggacagt

SEQ ID NO: 20107 - DNA, 366 bp, Glycine max
  Clone ID: LIB3049-018-Q1-E1-C10
ggaaactcgttctagtgtgtgattgtttgttgttgtaactcgttcttcttcttttgttgttctgtgtttgtgtttgttttttctctcacctgaaaatgtcttgctgcggtggtaactgtggttgcggaagctcctgcaagtgcggcaacggctgcggaggctgcaagatgtacccagacttgagctacactgagtcaaccaccaccgagaccttggtcatgggagtggcacctgttaaggctcaatttgagggtgctgaaatgggtgtgcccgctgagaacgatggctgcaaatgtggaccaaactgctcctgcaacccctgcacttgcaagtgaagtgttgggatagcaagcttcaagcagagat

SEQ ID NO: 20108 - DNA, 368 bp, Glycine max
  Clone ID: LIB3049-018-Q1-E1-C11
ggaatccgaggcgaagagaagagaaaaattaagatggaggggaaggagcaggatgtgtcgctgggagcgaacaagttcccggagagacagccgattgggacggcggcgcagagccaagacgacggcaaggactaccaggagccggcgccggcgccactggttgacccgacggagtttacgtcatggtccttttacagagcagggatagcagagtttgtggccacttttctgtttctatacatcactgtcttaaccgtcatgggagtcgccggggctaagtctaagtgcagtaccgttgggattcaaggaatcgcttgggccttcggtggcatgatcttcgccctcgtttactgcaccgctggcatctc

SEQ ID NO: 20109 - DNA, 370 bp, Glycine max
  Clone ID: LIB3049-018-Q1-E1-C12
gggtggaagatggattatcatcaggacaaccctgcagttttcttcactaccatcaagaacaccaagcaactgaaagtcccagaggagtttctgaagcatttgaataaagacttgtggagtaattcagttcttataggcccttctggtgataagtggcaagtaactattttgaagaaaggaaataacgtgtatatggacaatggttggtcacaatttctgaaagacaattcagtggtgcttgatgagttcttgctttttacatatcatggaggaaactgcttctatgttcaaatttttggtgggaatggattggagaggctatgccgcaaagaagcaagagaagaacaagctgctacccctcaattttttg

SEQ ID NO: 20110 - DNA, 359 bp, Glycine max
  Clone ID: LIB3049-018-Q1-E1-C2
ggcacttttccaaaccacttttaactgctgcagatgatagcgaagaggtatcagccagaagggaagagagggaaaaatttgcattggagcacatagcaaaatgccagcactctgctgttagcaggctagcaaatccaattgctaaatgggacataaagggtacacaaacagcattgctgcaacctttctctcctatagtgatagctgctgatgagaatgaacgtatcaggatatggaaccatgaggaggcaacactactgaacagttttgataatcatgattttcctgacaaaggaatttctaagctctgccttgtaaatgagcttgatgagagcttgcttcgtgctgcgtcatctgat

SEQ ID NO: 20111 - DNA, 340 bp, Glycine max
  Clone ID: LIB3049-018-Q1-E1-C4
ccgggccgacctacgatgttgaagccgtaggtacacatgcagggaaagtcatagatcttctaacgagttgccttgtttcatttcatgggttgtctctcgtttcatttcttgcggataatcatctgatattacgaagtttagtcaccttgcataaaactaccagatatgcaacagtgttttaacagatcacggccgttgagatcgattcttccaacaattgccaatgacttttagtgacatcggatatatacatgtatccagcttttaaacatcgttgatttagtgactacacgcaccatcttagtcagactttcacaaggtataccatgcattccatact

SEQ ID NO: 20112 - DNA, 325 bp, Glycine max
  Clone ID: LIB3049-018-Q1-E1-C5
ggaagaccaagacgaagaagaagaaacaagagcagcgagaaactgagtgaggaaaggatgaagaaagcagagtgagtcccgttccattccgtatcgttcatcacattagattgattcctctccaaaaaacgctctcaattgcacgttcctcaatcgcacttatgggcgaacagacgctaggtcaagcagaatccctaatcgaacctcaacctctcgccgccccctcctcaactgccgtccccgacggtgccacggtggactccgaactaaacaatgtccctgcggcgggaacatccccagccacgaaaatcccgctccgtccccg

SEQ ID NO: 20113 - DNA, 296 bp, Glycine max
  Clone ID: LIB3049-018-Q1-E1-C6
gagggttttctgagttattgttaccatttgctcccagcactgagcttaacggagcttcacaaagatgaatcgggaaaaattgatgagtatggccggttcggttagaactgggggaaagggcaccgtgagaagaaagaagaaggctgtcgacaagactacaaccaggagtgatagaaggcttcagagcaccctgaagagaataggggtgagtgccatcccggctattgaggaggtcaatatcattaaggatgacgtagttatccagtttctaaatctcatcgttcaagcatccagtg

SEQ ID NO: 20114 - DNA, 355 bp, Glycine max
  Clone ID: LIB3049-018-Q1-E1-C7
ggaaggagctagtccaaacttcaaagcaccttcactctcgtaaaaacattctcttcaactcttttccattttattattcttccaaaactggaccttactttacccgaatctaaatcccaacccgaaccaagcatgttcggaccaacccaaaccgcttcccaacctccgaaatccactctcaaattcctctgcagctacggcggcaaaattctcccccgctaccccgacggcaagctccgttacctcggcggccatacccgcgtcctcgccgtcgatcgctccattccattctccgagctattgctgaagctggaggagctctgcggcgcctccgtgaggtacctccgctgccaat

SEQ ID NO: 20115 - DNA, 356 bp, Glycine max
  Clone ID: LIB3049-018-Q1-E1-C9
ggcttttcgatttcggattttgatagcaacgttggaaggaaaggtgagagcagaatcgttggaagaatctggtattgtgtcgtggttgttgttttcgcgatcaaaacgatgtcgtcgccggacattgtctcgatattggataactcgaaggagctcgatcgggttaggaaagaacaggaggatattctgtcggagatcaacaagcttcacaagaagcttcaagcaactcctgaagtggttgagaagcctggggataactcattggcaaggctgaaatttttgtatactcaagcaaaagaactttcagaaagtgaagcaagtatttccaacttactggtaaaccaaattgatgccct

SEQ ID NO: 20116 - DNA, 289 bp, Glycine max
  Clone ID: LIB3049-018-Q1-E1-D1
ggagctatgtggattacgcagaaggcaaagcagatgagctttctaactaatctttagtgaggcctctaataatctccgtttcaacagcaagctcagtcttaagcagcaagcgagagctgaatcaagccttccaagttccatcaggagcgtcccaaccctcttcgtcgtcgtcgtcttcgtctgcgtaatcgaagcaagctcatgcatacgaaggaaacagacgacagagactgcaaccatgtacgttgatcacgcgttttcgatttcggacgaggatgtcatgatggga

SEQ ID NO: 20117 - DNA, 366 bp, Glycine max
  Clone ID: LIB3049-018-Q1-E1-D10
ggctgggttaatgcacatgccaccttctatggaggaagtgatgcctcaggaacaatgggtggggcatgtggatatggaaacctctacagccaaggttatggaacaaatactgctgctttgagcactgctttgttcaacaatggtcttagttgtggctcatgctatgagataaggtgtgtgaatgaccataggtggtgcctccctggctccattatggtcactgccaccaatttctgtcctccaaacaatgctttaccaaacaatgcaggagggtggtgcaaccctccaatgcaccattttgacctctctcaacctgttttccttcgcattgcacaatacagagcaggaattgtgcctgtttcctac

SEQ ID NO: 20118 - DNA, 374 bp, Glycine max
  Clone ID: LIB3049-018-Q1-E1-D11
caatcacatcagcatcactctcgtcgccgccgtcgtcgaccaccgcaagagccatcgcactccgccgtcatccgttagggcaaaaatgagtcgaggaagtggaggtggatacgatcgtcacatcactattttctcccctgaaggacgtctcttccaagtcgagtatgctttcaaggctgttaaggccgcaggaatcacctcaattggtgtccgaggaaaggattcgatttgtgttgttactcagaagaaggttccggataagcttttggacaacacaagtgttacacacctctttcccatcaccaagtaccttggtttattggctactggcatgacagctgatgctaggacactggtccaacaagcaagaaatg

SEQ ID NO: 20119 - DNA, 353 bp, Glycine max
  Clone ID: LIB3049-018-Q1-E1-D12
gggggtttggccgtgtaagataagagggcagccaacaagaagcaaaacactgaaacaaaagcaaaaaagagctgtgagacagtgatggctcacggtgcttacagcaagcggcgcgtgagcgcaacgcgtcgatccaactccaagcctctgggcatcgccaagaagcccaagcccaagcccaagccctccgtttccctcaaaaaccagattcgatcccttgagcgcatgctccgcaagaatctgcctcccgaggtgcgagacgcgcaggaacagaagttggaggcgctgaagaagcagcaggagattcacactcgcctcgccgccgaacgcaagatattcttacgcgaccgaaa

SEQ ID NO: 20120 - DNA, 336 bp, Glycine max
  Clone ID: LIB3049-018-Q1-E1-D2
gatagcgaaacagagagtggtttcagtgagtgatcggtgttcacgtgatccttcataagtcgtcatcatcatcatcatcatcagcgttgattgaagaagatgccgatcagaaacatcgccatcggaaggcctgaagaggctactcaccccgacacgttgaaggcggggttggctgagttcatctccaccttgatcttcgtgttcgccggttcaggttccggcatcgcctacaacaagctcaccgacaacggcgccgccactcgcgccgggctcatctccgcttccatcgccgatgcgttcgccctcgtcgtcgccgtctccgtcggcgccaacatc

SEQ ID NO: 20121 - DNA, 342 bp, Glycine max
  Clone ID: LIB3049-018-Q1-E1-D3
ggccgaggaaaagaaagaaagaagaaaaaaaacagcgccctagatttgctcttcgttgcttcggaagaaagagaaaaacaaataacaatggcgttcgcttctttcctcggcagagttctcttcgcttccgtcttcatactctctgcttaccaagaatttaacgaatttggagttgatgggggacctgcagcaaaagcactcagacctaagtttgatgcctttacacatcgagtgcattctcaagttggctttcaacttcctgagattgatctgaaatttttaattgctggggctattgctctgaaggggcttggaggggttcttttcatatttggcagctct

SEQ ID NO: 20122 - DNA, 359 bp, Glycine max
  unsure (1)..(359): unsure at all n locations
  Clone ID: LIB3049-018-Q1-E1-D4
ggagaaataaccaacagaatctactctctattttcctagcttagattccttctccaatggctcttgccgtttccactacttcttcctcttcagctgcagcagcagcagcagcgtcgagctctttcttctcgcgccttggatcttcatcggacgctaaagctccgcaaattggttcctttcggtttccggagaggcctcaagtttcgtctggtgttgttaatttaactcaaagacgctcctcggtgaggccactcaatgccgaaccgcaacggaatgattctgttgttcctcttgcagcaactatcgttgctcctgaggttgagaaggagaaagaagattttgagcaattancgaaagac

SEQ ID NO: 20123 - DNA, 255 bp, Glycine max
  Clone ID: LIB3049-018-Q1-E1-D5
ggaagatccccgtgcgctcaattacattcggttccatgtgccgtcgttttctgtcgcgagcgcagtttcgcagtttctcagtcagcagcatggcaggagcagtatgtggagtgagaaatgcggtagtgcaggatttggaaaggggttctcgggctcagtatcctggaatgcacgagagccatgaactgacgttgtcgttcatcaggttagtggactccatagtcaccatcgagttgctcgtaaccattcgtcgtc

SEQ ID NO: 20124 - DNA, 374 bp, Glycine max
  Clone ID: LIB3049-018-Q1-E1-D6
gggaaggagccgtagcagcagcggaagctctagcttgggcagcgaatcacaatggcgagaggattgaagaagcatttgaagaggcttaatgccccaaagcattggatgcttgacaaactgggtggtgcatttgctcctaagccctcatctggaccacacaaatccagggaatgcctgccactcatactcattttgcgaaaccggctgaagtatgctctgacataccgtgaagtcattgctattctgatgcagcgacatgtccttgttgatggcaaagtcaggacagacaagacatatcctgctggtttcatggatgttgtatcaatccctaaaacaaatgagaacttccgcctgctgtatgacaccaaagggcg

SEQ ID NO: 20125 - DNA, 368 bp, Glycine max
  Clone ID: LIB3049-018-Q1-E1-D7
gacaacagaatttgccaattgccatttcaatcctcagtttctttcttcaacgtttccatcatacacagatcccaatcctctctcaagccctaatttcccctcatttccatggccacagaagagcccactgtcgcggtggaacccgctcccgaacctgcctccgccgatcctcccccggaggagaaggaggagaccaaacctgaagccaaggctaagaaaaccaaggagcccaaacctaaaaaggtttccagacctcgcaaccctcccactcatccttcctacgaagagatggttaaagatgcaattacctcgctgaaggagaaaaccggttcgagccaatacgcgattgcgaagttcatcgaggagaa

SEQ ID NO: 20126 - DNA, 251 bp, Glycine max
  Clone ID: LIB3049-018-Q1-E1-D8
gaattttcctctttttctgtcctaaccatcatgcccggtaatggtttcccttggaactcgtaagattttcaaccacattcaataatggcacgtttaataatttccttttccggtaaaaaatcaattttggaaagttttaaactgaaaattaagaatgccaattaaagtcacatgaagtacatttgattaaattggaaatgttcaataagtattgggaatgaattgtccctcctggtggtcctctctgctgg

SEQ ID NO: 20127 - DNA, 335 bp, Glycine max
  unsure (1)..(335): unsure at all n locations
  Clone ID: LIB3049-018-Q1-E1-D9
gaccaacctactcatgtttacacatttatcctccgtccggatgcaacctacagcatcctgattgataatgtggagaatcacactggtattctctactctgattgggatattctccctccagagacaatcaaagatcccgantgctaacgaaacgacaagattgggatgacgaagaatttagtcctgatcccgacgataataaaccagatgggtatgatgacatcccaaaagagctcccagatcctgaagccaagagacctgacgattgggatgatgaggaatatggtgagtggacaccccctaccattgccaactctgattactatggcccatgg

SEQ ID NO: 20128 - DNA, 382 bp, Glycine max
  Clone ID: LIB3049-018-Q1-E1-E10
gatcctctcaaacttgcattttagcaatggccaaatggatctcatttgctgctctttttgcaatacttttactactcatctctcctgagcttgcaagtgctgcccaacctagtcttattcttcaactcggccgaaaacttttccaatgcggcagcgccgccgtccctgttcgtggaaataccccatccaatggccgctcctagaggatataccccaccaccaaaacacccactctatggctgaatatttgagatgttagcatccttctttaattttgtgataaaaaaaatacttttaaagatgtataattgtgtgtcattactataatatatgtcatgtatgcttaatttcactgaaccatgtgtactactgcttatcggtc

SEQ ID NO: 20129 - DNA, 348 bp, Glycine max
  Clone ID: LIB3049-018-Q1-E1-E11
gacccaaacgtccagctgggagacaataaaggagagacaggcatatcatcagcagtctcgtcaacgcagtcgccaaccactatcaaagccatcacactccaccatcatctcgttagggcaactatgattcgacgaagtgatagtggatagcatcgtctcatcactagccgtctcctagtgaaggatgtcttcttcgactgtcgcagtatgccttcatagctgttaaagacacaggatttacctcaactgatgtcctatgtcacgagaccacttgtgttgttagacacaagattgtgtcggataagcttttggataacacaagtgttacgcacctcgttcccatcacca

SEQ ID NO: 20130 - DNA, 372 bp, Glycine max
  Clone ID: LIB3049-018-Q1-E1-E12
ggcataattcatgcgtaaatagaaaacctggtaaacaaatttgaaatggctttcttgcatcaccactttggcaggtattcaaccatcgcatcacatcacatttacaaataaaactcaaaatccacacaccaccttgtctatatattatcatatttattgtaagcatcaccactaactctactgctactttcacctttcatcatcattcaattttagtccaatggagtggtctttctccatatccgtggtgctgtttcttacccttctcattcaaatacatggaagtggttatcttgatcacaagcaagcaagaggctttgcagagaattatggttgtaatttgttccaaggaagctgggtttatgatgattc

SEQ ID NO: 20131 - DNA, 340 bp, Glycine max
  Clone ID: LIB3049-018-Q1-E1-E2
gcttgttcatgtgtgttgcattggtttcatggctcttttgacagatatcttaccatatatctatgactttattttttttggtagacttgttgtttagagggcctttttgcatcccaaaaggtggacgcttgtgttatatgaggttgtgaattgctgttgatttgttttatgcagcttcgatagatgccaatttgatccagtacatggaggggagatgactcagctggaatatcagaactttttaaagccataaccagaaacagccttgtgagacgcgatgtgaacaaatcctgagcgcgtgacatttcagcttaggtaggttatgcagagatgtatactg

SEQ ID NO: 20132 - DNA, 358 bp, Glycine max
  Clone ID: LIB3049-018-Q1-E1-E3
ggcgtcgacaaaaaccctaactcttaatcttttttctcttcctttcacctcctcagcagtcgtcagaaagactccataacccaaaaatgcctttcaagaggtacgttgagattggaagggttgctcagatcaactatggcaaagagtacgggcggctcgtgatcattgtcgatgtcattgaccagaatagggctcttgttgatgctcccgacatggtgaggtcccaagtgaacttcaagaggctctcgctcactgacatcaagattgatattaagaggattcccaagaagaaggatctcattcaagccatggaggctgctgatgttaagaacagatgggagaagagttcttggggcag

SEQ ID NO: 20133 - DNA, 347 bp, Glycine max
  Clone ID: LIB3049-018-Q1-E1-E4
gaatctgaatgttattgtgatcatcgatttgctttgactctgttcattttttaacctacaagaatgatcctagaaataaggcaataaagaaccaaaaactaggtgcagttgcagggtgtaaaattaatggtttctgacaaataacattatatatactgcccgaatgttgaaaatgtttccattgtttgctgcatatggagcatcttgcgaggtgtgcaaaaatgttgccgagggctacccaaataatcaagagaataggagatagttgtttgcttggaggcattggtgaagatatcgctagacaaattatcttggaatgttttctgtttagacgttataccaacact

SEQ ID NO: 20134 - DNA, 358 bp, Glycine max
  Clone ID: LIB3049-018-Q1-E1-E5
ggaggtttggttgttgaaatcggcaggggacggaaatatcgagagagacagacagagcgacgtcggagaaagaaagaaaggaatgagtgaaagagggatggtaggagaaagatgagaatggcgtgaatgtgaggagagaagagcctgaatattagaatcggatacccttaaagaagcggagataggagtgtgcgcctccaaacccaaggggcttcggaggggctcttcatcggaggcggtgctatattcccctccggattcccccaccatgaagagcctcttcaagcccaagccccgcactccttccgatagcgtcaaacaaacgcgagatcttcttcgccgtctcacctcccgagat

SEQ ID NO: 20135 - DNA, 353 bp, Glycine max
  Clone ID: LIB3049-018-Q1-E1-E6
gagggaagaataagagggatgtacaaagaacgagagcgagttggtgtttctgtttccgcttccaaatcggaggatcggaagcgaatcaacgacgttctcgataagcacttggaacgatcctctccttccacttctcgccccagcacctccgcctccaagaattccaacctccaagtggaggaatctgaaacggagagtgaagagtctgatgttagtggctctgatggggatgacacctcttggatctcgtggttctgtaatctcagagggaatgagttcttttgtgaggtggatgatgattacatacaggatgactttaaccgatgtgggttgagcagtcaagtggcctacta

SEQ ID NO: 20136 - DNA, 349 bp, Glycine max
  Clone ID: LIB3049-018-Q1-E1-E7
gatcgcatagggtaaggtttgggttggtgtcgttcctttccgatgggttgtatggatttgtgattggtggagatttgacggcacacgcattatcaaaatccttactgtgtttctttcgcggtcattgcctcttttctgttcgtggcttcaggatttttttaattctgcagctccgaaatatagataaaccaatcatcaggctgtagaggagaatggcagaatctatatctagcttctggggtccagtcacgtccaccaaagagtgttgtgaaataaattatgcttagtcgtcttacattgctgaattttttaatacaatatgcaacattccaacaatacttttggctct

SEQ ID NO: 20137 - DNA, 329 bp, Glycine max
  Clone ID: LIB3049-018-Q1-E1-E8
gagaacagaacccaaccaaagcagctatggcggcgatgcagaggccactcaagagaaccattgcaatcgccaagcaacgcgcgtgcttttcccctctcctaccctccgccgctgccgccgccgccgccgataccgtcgcgcctccgcagctccccccgttcgatcaccagccgcacccttacaacggtccctccgccgatgaagtcttcgccaagcgcaaaacgttcctcggtccttccgtcttccactactataagaaacctctgaatatcgtggaagggaagatgcaatatctttatgatgatagtgggaggcgttaccttgatgca

SEQ ID NO: 20138 - DNA, 368 bp, Glycine max
  unsure (1)..(368): unsure at all n locations
  Clone ID: LIB3049-018-Q1-E1-E9
ggtctcgtggaagtgtaagcaagcaaaaccctagcggcgcctgctttctttgttcgtgttttgcatcaggatggagtctcaggtgaagcacgcacttgttgtcaaagttatgggtcgtactggatccagaggacaagtgacccaggttagagtgaagtttttggatgatcagaaccgtcacatcatgaggaatgtgaaaggacctgtgagagaaggagacattctcaccctactcgagtctgaaagggaagcaagaagattgcgctagatggtctcttttttttggcttgcctccaaattcgaacaaaagcaatatttttcttgatatttatggtagttagtcggtgctaaangggttatagcaccct

SEQ ID NO: 20139 - DNA, 357 bp, Glycine max
  Clone ID: LIB3049-018-Q1-E1-F1
gagatctagctagaatcttgccgtcttctgctctctcgatagttcttttctcgcgcagaggataagcaacctttacctcataaccttgctgaatcgcatcaaatgaaaccctttttcaacgctcacagatgagtttctgccaccaaatcattgcgactctcctcaagtctagtcatcgcaactcaacaatgtctcagatccgtgatagagagactaaaagaatcaattggaaaaccctagttctatatatatatgatggaaaaaatgctttttgctggttttgaggcaatgcattaaattggattttggagatgcagggctgaagaagcattggaacgtagccaacctgtggattta

SEQ ID NO: 20140 - DNA, 329 bp, Glycine max
  Clone ID: LIB3049-018-Q1-E1-F10
gggacgcgacgaggggaaacacgagccgtcggatttgatcacggaaaccatgaatctgacggctccaaacctttcacttcccagtgaaactgaaacattcttgagcgcagcaatttccctcaaggacaaggtggtggaggagacttggaaccggagagatcaagtggttgatccgacggtgtacacgggactgttgggcaccgcctttacttgcttgcggtcctaccaggttaccggttgccggaacgacttaatattatccagcgaaatcattgacacgtgtgtcaccgctgcacgtgcctccctcaggcacgtgacttttttgtgtg

SEQ ID NO: 20141 - DNA, 369 bp, Glycine max
  Clone ID: LIB3049-018-Q1-E1-F11
gacaccacaccgagtcgcagaaaaagaaaaaagcgatcatagtttcacttcggccttatccagtttagggtttcggttctctaccctatctttcacgtatcgaaaccttaaatttacgatcaggtctgagcaatctggttggtagaacctttggtcttagtgagtcaagttttatgtctgaattagacgatcaaattcctactgccttcgatccttttgctgatgcaaatgctgatgactcgggtgctgggtcaaaggagtatgtgcatattcgtgtacagcagcgaaatggtaggaaaagcctgacaaccgttcaaggattgaaaaaggaattcagctataacaagatacttaaagacgtcaagaaag

SEQ ID NO: 20142 - DNA, 317 bp, Glycine max
  Clone ID: LIB3049-018-Q1-E1-F12
gatctatttgtgtatctgcaaaaaggaatcctacccttcattattttgttgtaccttaagcttggttcggacttgtggacagctccaatttgatcactccattacaaataagatatcaatccaatccaatccatctaaatggctctcacaattcacattatttcccctttcttctcaatcacgaccacctccaccgctgatctctccaaccgtcgaatctcctgcactgctgcctgtgattgacgcatcagctatgccgcactcgcatcagacttggcggcgaaggtcgccataatgatcacacatacggcgaatgc

SEQ ID NO: 20143 - DNA, 341 bp, Glycine max
  Clone ID: LIB3049-018-Q1-E1-F2
gagggattgtttcacagaacacctctgaaattcaaatcccttttttttgtttgatattaatctatggtaggatatagaatctgaagctgaaaaaaggggttaattgttttgcagaatcagtataattgtagagagcgagatggatcactatggttcttctggaggaagctggacaatgatcccaacccacaattcccaatcccaatcgaaccaggacgctaacctctttctgcaacaacaacaacagtttctccagtcacaaccttttcagcaagcactagcgcctcaatctccatttcaacaggagcagcagcagcgtcttctacagcaggagcaacaac

SEQ ID NO: 20144 - DNA, 355 bp, Glycine max
  Clone ID: LIB3049-018-Q1-E1-F3
gataaggctgaatttgacacaccttcctctcatctaatatctccacttttccattccttatcgcccatgttcttccaatatatttcttttacacctgtttttatggtgaaaatatcctgttcatctcattagtgaatcaatataaccagagtctgttatgcagttcttcacatttcaatgatgtctaatgtcttcaagatgaaatagttttgtagcatgttaatcaagggaaagtacgaacctggagatttgcgtcctgtacaacttagtctcgaaacattaaaaaggtgtattttgacccttaagttttttcaatgggtttaaaacaacctctatgataatttttccattaaaa

SEQ ID NO: 20145 - DNA, 355 bp, Glycine max
  Clone ID: LIB3049-018-Q1-E1-F6
ggagcaagagtgaagagcgaagagaatggctcccaagggtttaatctttttggctgtgttatgcttctcagcactgtcactgagtcgttgtcttgcggaggataatggacttgttatgaacttctacaaggaatcatgccctcaggctgaagacatcatcaaagaacaagtcaagcttctctacaagcgccacaagaacactgctttctcctggctcagaaacatcttccatgactgtgctgttcagagttgtgatgcttcactgttgctggactccacaagaaggagcttgtctgagaaggaaacagatagaagctttgggttgagaaatttcaggtacattgagaccatcaaa

SEQ ID NO: 20146 - DNA, 288 bp, Glycine max
  Clone ID: LIB3049-018-Q1-E1-F7
ggggcgaggaactgtggcgacgtgcttgtcgggacaaggacagcggaacaggttggcgtcgatccatggcagactacgacaggagcgtccagcaccagtcgaaagaaacagccttccaggccctgaacagcataatccaccgccacttcgagaagaccctggagaacgagcgtgccatcgaccgccagaagaaggagctctacaagctcgtcgagatattcttcatcttcctgggcctcgtcgtcctgatcctggcccactccccccgccgccaatgccgccactgct

SEQ ID NO: 20147 - DNA, 365 bp, Glycine max
  Clone ID: LIB3049-018-Q1-E1-F8
ggtggttcttgtttgcgagatagaagcgtaagcagcggctaccctaacctcgtcttcctctctactaatttcaactatggccgacgaagctgtggttgttccagatcccacccagatcgatgtcaagctctttaaccgctggagcttcgaggatattgaggttactgacatttcactggctgattacattggagttgcggcatccaagcacgccacatatgttcctcacaccgccggaaggtactccgtgaagcggttcaggaaggcgcagtgccccattgttgagaggctcaccaactctctcatgatgcacggtagaaacaatggcaagaaactcttggctgttaggatcatcaagcatgcta

SEQ ID NO: 20148 - DNA, 328 bp, Glycine max
  Clone ID: LIB3049-018-Q1-E1-G1
gagagtggtggagtgtgcagacacagcgtcgcagtcgcaaccctattcagaagacccgcagcttcaagctagtgacagccatcagccatgggtcatatgcatagctgccgtaaaggtatatcctcgtctgcattgccccacatacggacacctcctaactagctcaagcatctcattcgcaaggatgtcaaaaatgaatatctgctagtttgcgaagaaatgtttgactccctctcaaattcgtctcattctcagacattcacacggtattgctcaggtcattatcgtcactggcatcataatccttcgcatcctcaaagctcaggta

SEQ ID NO: 20149 - DNA, 349 bp, Glycine max
  Clone ID: LIB3049-018-Q1-E1-G10
gagtgggagagagagaaggcaagatgtcgaagagaggacgcggtggttcggcggggaacaagttccggatgtcgctgggtctgccggtggcggcgacggtgaactgcgccgacaatacgggggcgaagaacctctacatcatatcggtgaaagggatcaaagggcgtttgaaccgtctcccctcggcttgcgttggcgacatggtgatggccaccgtgaagaaggggaaacccgatctgaggaagaaggttttgccagctgtcattgttcgccagcgcaagccatggcgccgaaaggacggcgtctacatgtatttcgaagataatgctggtgttattgtcaatcccaa

SEQ ID NO: 20150 - DNA, 362 bp, Glycine max
  Clone ID: LIB3049-018-Q1-E1-G11
ggaagctatgagtttgaaacatccctatctatgtctttaattatatgttcctgaaacatcactctctaggctttaactttgaacctagctagctactatccctttgtttccttaaattagtttatctatatatatacacactcctgtgacaaacaatagtgtcttactgtcttatattgtccccttttactgctattccctctctgtctcctttctgtttttctgtcttacataacaaatagatacaaacattgaaattgttgagttttttttttttttgcattttattatattgtttctcatgatgttgagaacaactgaaaaggtgtgctacactcctgattttaatgagaaaccaatca

SEQ ID NO: 20151 - DNA, 364 bp, Glycine max
  Clone ID: LIB3049-018-Q1-E1-G12
ggccgcaagcagagatgacaacccgatttaagaagaaccgcaagaagcgcggccacgtcagcgccggccacggccgtattggaaagcaccgcatgcaccccggcggccggggaaatgccggcggcatgcaccaccacacgatcctcttcgacaagtactacccggggttcttcgggaacgtatggatgatgtactttcataagctccgcaacaaattctactcgcacatcgtcaacatcgacaagctatggtctctgataccccaatacgcgaatgacaaagccctataatcgaaggacactgcccctctaatcgaggtcactcagcacgggtacttcaaggttctcggaaaaggtgtgctgcc

SEQ ID NO: 20152 - DNA, 359 bp, Glycine max
  Clone ID: LIB3049-018-Q1-E1-G2
gagggaagcacaaccaagcttctctgttaaaaaaaaattatgcgtctaaagggccaaagcttagaaagttgaaactttttttgttgaggtgaaagtgaaatggttggcaacgataatctgagggctgaggacttgaacttgtgctttaagaagcttatgatggtggccgggagtgggaacagtgagaaatgggtgaacttgaaggttggggtgatcaccgagtggaaggatattcctgcggagcttctgatgcaaattctgtcccttgtggatgatcagacggtgatcatagcttctggagtttgtcctggatggagagatgctacttacgttggccttgctcgtttatcactctcatg

SEQ ID NO: 20153 - DNA, 310 bp, Glycine max
  Clone ID: LIB3049-018-Q1-E1-G3
gactctctttcgtcagtttcgggggaagagatccagcagcaatggtgtacgtcaaggctcagaaatcaaaagcctacttcaagagatatcaagtcaagttcaagagaagaagagagggaaaaaccgattaccgtgccaggattcggttgattaatcaggacaagaacaaatataacactccgaaataccgatttgtggttcgctttagcaacaaggacattgttgcacaaataatatctgctagcattgccggcgatttagttcttgctacagcatattcacatgagctgccacgatatggtcttgaagt

SEQ ID NO: 20154 - DNA, 358 bp, Glycine max
  Clone ID: LIB3049-018-Q1-E1-G4
ggttctagtgtgtgattgtttgttgttgtaactcgttcttcatcttttgttgttctgtgtttgtgtttgttttttctctcacctgaaaatgtcttgctgcggtggtaactgtggttgcggaagctcctgcaagtgcggcaacggctgccgaggctgcaagatgtacccagacttgagctacactgagtcaaccagcaacgagaccttggtcatgggagtggcacctgttaaggctcaatttgagggtgctgaaatgggtgtgcccgctgagaacgatggctgcaaatgtggaccaaactgctcctgcaaaccctggacttgcaagtgaggtgttgggagagcaagcttcaaacagaga

SEQ ID NO: 20155 - DNA, 335 bp, Glycine max
  Clone ID: LIB3049-018-Q1-E1-G5
gagttcaagtaatactaaactaaaactcaacagaaaagtgtttcatttgtttctcccaagtcagaacacaacacaacacaactaaacaacaatgtcgatcgctttttccttcttcactccactctcttccaaatccgttccatccttttccctctctaccccttctctctgttttcgcctcactcccctccgccgccccaccgatcgcttttaccctctctgctcctccgccggaggacctggcggcggatccttcggaggccacggcggtcgcggacacggaggacatggtggcggcggcggcggcggcggtcacgacaacgacgacaatgaga

SEQ ID NO: 20156 - DNA, 354 bp, Glycine max
  Clone ID: LIB3049-018-Q1-E1-G6
ggagtccgagaggcatcatggcgacactggattccgacgtgaccgtgtttccggccggcgaagcctccagcagcgccggtccttcttcgtccaccaagaagccgaagcgtttcgagatcaagaagtggaatgcggtttccctctgggcttgggatattgtcgtggataattgcgctatttgtcggaaccatatcatggatctctgtattgagtgccaggccaaccaggctagcgccactagcgaggaatgcactgtaccttggggagtttgtaaccatgcttttcacttccattgcataagccgatggctcaagacccgtcaagtatgtcctctagataatagcgagtgggaat

SEQ ID NO: 20157 - DNA, 341 bp, Glycine max
  Clone ID: LIB3049-018-Q1-E1-G7
ggattttatgtagtcatcatctagcagatccaaatctcgaaatcccctcaatttctggagaagattctccttcattaagtgaagcttcagcttcaagtccttttccattctcatcaaacctgcctggaaaagagataataaatatacgatacttctttctccgaagctactgttcctactcttctcttccactctcatcatcctcatcttcttcttcgcattcctcacctcacacccctcaaacccttcaaaccctaccttcaccgccttcaacacccgcctctccttcaatgccaggactgagggtaaggatgggttttttgtcgacgttggtgccaacg

SEQ ID NO: 20158 - DNA, 292 bp, Glycine max
  Clone ID: LIB3049-018-Q1-E1-H1
ggttctagtgtgtgattgtttgttgttgtaactcgttcttcttcttttgttgttctgtgtttgtgtttgttttttctctcacctgaaaatgtcttgctgcggtggtaactgtggttgcggaagctcctgcaagtgcggcaacggctgcagaggctgcaagatgtacgcagacttgagctacactgagtcagtcaccatcgagaccttggtcatgggagtggcacctgttaatgctcaatttgatggtgctgaaatgggtgtgcccgctgataatgatggctgcaaatgtgga

SEQ ID NO: 20159 - DNA, 353 bp, Glycine max
  Clone ID: LIB3049-018-Q1-E1-H10
gagggaggacaggtagttggtgtgaggcaatgacgcggcctttcggtgtgaagggggggatgaagctaaagcacgcggaacccaaatacgacgcccatgacgaagaacaataagaacaaacgcaaccaaataaaactgtggtggaggtggagcacaaccatcaagaagaagaagaaactccagcaccagcaccatatgatgatggattgagctgtatcccaattgcgcccagtgcgaacaacactaacactcccaacgtcatcttcattcttgaaaaagcttcattggaagtcgccaaagtcggcatcacatatcagctcctaaactccgacgatcatgcgaatttcctccgc

SEQ ID NO: 20160 - DNA, 363 bp, Glycine max
  Clone ID: LIB3049-018-Q1-E1-H11
gactctcattgttgatatagagcctgatgttaatgtcaagagagcaatgaacgagattaacgcagctgctagattgaggttggctgcaaatgagaaggctgaagcagaaaaaatactgcagatcaaaaaagctgagggagaagcagaatccaaatatctgtcaggactcggtatcgctcgccaacgtcaagccattgtggatggactgagggacagtgtgcttgctttctctgagaacgtgcctgggacaacagctaaagatgtcatggacatggtgctggtgactcaatactttgacaccatgaaagagattggagcatcttcaaagtcctcatctgttttcataccacatggtcctggcgc

SEQ ID NO: 20161 - DNA, 266 bp, Glycine max
  Clone ID: LIB3049-018-Q1-E1-H12
ggttgtgtgagtgaagaagcagacggagtatcggcattaaaaatgcagatcttcgtgaaaactctgatagggaagaccataaccctcgacgtctagagcagctacaccatcgacaatgtcaatgccaatattcacgacaaggaacgcattcctcctgtatagcaacctctgattttccccgtaaagcaccttgattattgaacgaccctggccgattacaacatccataatgaatcaacccttcatctcgtcctcaggcttcgtgg

SEQ ID NO: 20162 - DNA, 89 bp, Glycine max
  Clone ID: LIB3049-018-Q1-E1-H2
ggattgaagccatcgactgagtgagcgagccagctaaggttttcggtgttcccctctctgtgttcgttcgcgaacaatgggtccatccc

SEQ ID NO: 20163 - DNA, 298 bp, Glycine max
  Clone ID: LIB3049-018-Q1-E1-H3
aaacggggaggcaaactatgaaaattcacattgcgtcactcctccgtcgttttctctctcttgctaaccttctggataatgtcactgcttcaagtgcaagcctaagaagcacagtgccaacacatcaagttttaacattgagccaaatcctttttccttcaaattttcgctttgaaattcgttcttctgcttaccagacataacgagcagcaactgtacatgggagaagaccaagcatatgggaaacctacactatacagcatactgaaaagatttgggatcagaacaccggtgacat

SEQ ID NO: 20164 - DNA, 376 bp, Glycine max
  Clone ID: LIB3049-018-Q1-E1-H4
acgcgtccatggcggagagaggacgacagaaagggggattctagtcagtcaagattcagcaagtgcgttttggcagcagagaccgaaatacttcgatatgggccgtacaaagcaaactgctcgtaagtcgactggaggaaaagctcccaggaatcagcttgcaaccaaggctgcacgtaagtctgcaccaacaactggtggtgtgaagaagcctcatcgttatcgccctggaactgttgctcttcgtgagagtaggaaataccagaagagcactgagctcctaatcatgaagcttcctttccagatgttggttcgtgaaattgcccatgatttcaagactgatctgcgtttccagaggcatgctgtgcttgcagta

SEQ ID NO: 20165 - DNA, 289 bp, Glycine max
  Clone ID: LIB3049-018-Q1-E1-H5
ggcagtttcaaattttcgtttccttcactttcccgaggaaaaaataacacttgtcactttcttcactacgttctcacttcgatatgggtcgtacgaagcagaccgctcgcaagtccaccggtggcaaggcgccacgtaagcagctcgccagcaaggccgctcggaagtccgctccggcgaccggaggagtgaagaagccccaccgcttcaggccaggaaccgtggcgctgagggaaatcagaaggtaccagaagagcaccgagcttctcatcaggaagcttccatttca

SEQ ID NO: 20166 - DNA, 331 bp, Glycine max
  Clone ID: LIB3049-018-Q1-E1-H6
gggcgaaacgaactctctctccttggccaccgcgacgcgccatcacataacttcttctcattcttcattcactctttctttctcttcttctgtttgtttctctttcaatctcaaacacactctttctctctctctataaatcttctttttctatgtcaattttgtcaacaaaaaatcagcataaagggccacaaaatccgtttttcttatcttccaattaatagagtaactgattaagcgcttcctcttcaacaacaaaaaacatacaccagaaaggagttacattttcttctcttcttcgtctccttcaacttcaatttgggtcatcaaa

SEQ ID NO: 20167 - DNA, 350 bp, Glycine max
  Clone ID: LIB3049-018-Q1-E1-H7
gaggctcctttttgattacgaaaatgtggaagagaacgggttttgaagaagaagcagttcaattgatcaactcagatttcagggaccgaagtctagctgctaatagactcgcccatcatgccatcaaacttggtggcattggctttggagcctcttttttcggattgtttgctgccattgctgctagttatctgttgattttggatcgtacaaactggaaaacaaatattctcacagcactactcattccatacattttcttcagcttgccttcattaattttcgacgtcttcaggggagagcttggaaaatggattgctggagttgctgttgtattacgccttttcctt

SEQ ID NO: 20168 - DNA, 374 bp, Glycine max
  Clone ID: LIB3049-018-Q1-E1-H8
gaagctgaggggctggagaaaattgagaacctccagagtcatgacaacacagagatttatgaaaaggcggtcaagattcttgagacatactggttggaggaggaagatgagactatgcctccaggggatgcttctcagtcagggttcaactttggtagcagtgacgctcctactgtgccatccggtggattcaactttaattagaagatattcatgctctactggggagttttgggtggtctatccgtaaagtcctccattatgacgcgacagcagttgggggataagtcaacgtcgtgtcattgtcctaatgtccttgggtcgtacgaagtccagcaagttaatacatggttgctggaatggcttgggttttt

SEQ ID NO: 20169 - DNA, 353 bp, Glycine max
  unsure (1)..(353): unsure at all n locations
  Clone ID: LIB3049-018-Q1-E1-H9
ggctctctcatccccatccttggctggcaaggccgtgaagctgggcccatcagccccagaagtgggaagggtgagcatgaggaagaccgtcaccaagcaggtctcctcaggaagcccatggtacggcccagaccgagtcaagtacttgggcccattctctggcgagcccccgtcctacctaaccggtgagttcccaggcgactacggctgggacactgctgggctttccgcagacccagaaaccttcgccaagaaccgtgaactcgaagtgatccactccaggtgggccatgctcggagccttgggctgcgtcttcncggagttgctgtcccgcaacggggtgaagttcggag

SEQ ID NO: 20170 - DNA, 354 bp, Glycine max
  unsure (1)..(354): unsure at all n locations
  Clone ID: LIB3049-019-Q1-E1-A1
ggtctgcgcctgatttctcagttctctcacacactcattcggtgctccgaatctcagattctagggttagggttcccaatttctccaccgatcagaaaatgagttcaactggtggttctaccaagggcggaaggggcaagcccaaagcctccaaatccgtttcaagatcgcagaaagctggtctccaattccccgttggaagaatcgctcgattccttaaggctgggaaatacgccgagcgtgttggtgctggtgctcctgtgtacctctctgcagtgctcgaatatctcgctgctgaggtcttggaattggctgggaatgctgctanggataacaagaagaatcgtattgttc

SEQ ID NO: 20171 - DNA, 370 bp, Glycine max
  Clone ID: LIB3049-019-Q1-E1-A10
gaatgaagcaaagtgagaaaattccccttctctcccaaacatgggaacctttaacctgctcaaatactggaaaactgctgataatggcaaaatcggccctccctaaaacgaagggcctttcctccaatttgaatttggcaaaactcacagaaacactttaacttaacgccttctccctctaattttaacacacacatgttctccacagaaaaactcacatctaaacctcacatcacacatctcacaaattcacagtggatgaggtgcccacagtgtccctgtgcgccaaaacctctcagcacgggaaagttgctgaaactgccaaagtgaaatttggtcataagcacgggaaagttgctctgcctgcggg

SEQ ID NO: 20172 - DNA, 353 bp, Glycine max
  Clone ID: LIB3049-019-Q1-E1-A11
gattctggatttcattgtttctatttatcaatatgtgtcagccaatccaaattgaatgatgcaagggctgatttcatgtgctctgataagctttgacctaatttggctacaagaattcatccattgtaaaagattgttaaatttaacgagtatctgagaagtattgctacttttatttattttttttctgtttgtgaccctatagattttatgaaagaaacactgttcaattttggtacgttttttgtaagtaccatcctgcttgcgtgggcatgactattgaagaagcaaagaaattggaacattttgtttgttcagaatgttcatctgatgatgacatgaagaaaccccat

SEQ ID NO: 20173 - DNA, 363 bp, Glycine max; identical to SEQ ID NO: 7753
  Clone ID: LIB3049-019-Q1-E1-A12

SEQ ID NO: 20174 - DNA, 386 bp, Glycine max
  Clone ID: LIB3049-019-Q1-E1-A2
ggggattggttcttcttccacttccaacgccatgcctctttttggaattttccagataccctcatttatggacataatcactgacctcgccatgttcattactccgctatggattgcggttatcgtcggcgtcgtcgtgggctgggcgtggaagcccaaatgggcctttcaccccaaagacgctcttctcaagtttcgctctcctcgccctcccaatccccaaaacgacaccgcttttacctactccgccaccagttcctccgcgcgtgagaaagacgcgagtgggagtcctgtggtgacggaagacgatttgctgcatctgtggaagttggttgaggaaaaagacggagggcgggcatggattcagatgatggaccgttctaccc

SEQ ID NO: 20175 - DNA, 364 bp, Glycine max
  unsure (1)..(364): unsure at all n locations
  Clone ID: LIB3049-019-Q1-E1-A3
gggaaaagaaaagaaaaagaaaaaagttgctagggttttcactgcacttgaggttcgtanaggagagaaattcaaattcagtgtaaagaaattagatttttgaacgaaagcgacgaactttaagttcatggaccgcttgcgtcctaggaatcgagcggtcttttctggatttacaaatgccgagattgagaaaatggagaaattgttgagggaacctacgggggggtcattgggcaaggaattttaccaaaaactggctcgaagtttcaactattcctctggccgtgctggcaagcctatcataaaatggacagagattgagagttggtttcagactaggctccaagactcaccacaagtccct

SEQ ID NO: 20176 - DNA, 385 bp, Glycine max
  Clone ID: LIB3049-019-Q1-E1-A4
ggtatttgtgactgtgtgagagagagagcgagcagtttcagacacagagagaggggtttgggattggagggattgacgctgcgtctcttcctcgtctctttcgatccatccctcattcctaatcctccaatccaaccacctcagcctcatactcacatatacacatatctgaacgcgtatcgtccctcctatggcttcaaagcgcatcctcaaggagctcaaggacttgcagaaagacccaccaacttcttgcagcgctggtccagtagctgaggacatgttccattggcaagcaacaataatgggtcctgctgatagtccttatgctggaggtgtattcctagtcactagtcactttcctccggattatcctttcaggcctcct

SEQ ID NO: 20177 - DNA, 356 bp, Glycine max
  unsure (1)..(356): unsure at all n locations
  Clone ID: LIB3049-019-Q1-E1-A5
ggcacaagtttgttgagatagctagaagcaataagatgaaaatgaaagtgcttgttttgtttgttgctacagttttggtagcatatgaatgccatggctcagactaccagaagttccctctccaaatgaaaactgggtttggtgggcaatacagcaatgaggtggcatgtgccagttggaggcttggcgtggaagcaaacaacgtagtcaagtggcaaactgttcctgcagcttgcggagagtacatagctgactacgttctangagaccaatatagatcagattccaaaacagttaaccaacaagcttatttctaagccaaatccctcaaactcaacaacaaaagatgtccttgg

SEQ ID NO: 20178 - DNA, 408 bp, Glycine max
  Clone ID: LIB3049-019-Q1-E1-A6
ggaacgacgaagaccaagacgaagaagaagaaacaagagcagcgagaaactgagtgaggaaaggatgaagaaagcagagtgagtcccgttccattccgtatcgttcatcacattatattgattcctctccaaaaaaccctctcaattgcacgttcctcaatctcacttatgggcgaacagacgctaggtcaagcacaatccctaatcgaacctcaacctctccccgccccctcctcaactgccgtccccgacggtgccacggtggactccgaactaaacaatgtccctcggccgacaacatccccagccacgaaaatccccctccgtccccgcaagatccggaaggtctctccgggaccctcaaactccgaatcccaaaccgaaaccccaaacccgccaaaaccgggg

SEQ ID NO: 20179 - DNA, 348 bp, Glycine max
  unsure (1)..(348): unsure at all n locations
  Clone ID: LIB3049-019-Q1-E1-A7
ggccatcattagaccaggaatgaatcattcctcctggtcctgatcctaaatanggttagggttatggtttatgcaatcgaattcctgagacggtgcatttgtacgtaatcgatggcgaatcgcacggatcctgcagctaagagcataaggggcacgaaccctcagaacctggtggagaagattctccgatcgaagatataccagaacacctactggaaggagcaatgtttcgggttaacggctgagacgttggtggacaatgccatggagctcgaccacctcggcggcacctacggcggaaaccgcaaacccacgccgttcatgtgcctcgtcatgaagatgctccag

SEQ ID NO: 20180 - DNA, 349 bp, Glycine max
  Clone ID: LIB3049-019-Q1-E1-A8
gacaacaaaatttgccacttgccatttcagtcctcagtttcgttcatcaacgtttccatcatacacagatctcaatcctctctcaagctctaatttcccctcatttccatggacacataatagcccactgtcgcggtggaacacgctcccgaacctgcctccgccgatcctcccccggtggagaatgaggagaccaaacctgaggccagggctaagaatcccaatgagcccagacctatagaggtttccagacctcgcaaccctcccactcatccttcctacgaagagatggttaaagatgcaattacctcactgaacgagacaaccggttcgagccaatacgcgattg

SEQ ID NO: 20181 - DNA, 314 bp, Glycine max
  Clone ID: LIB3049-015-Q1-E1-C11
ctgaaacacagcaaagcaatgaggcggttttatctgaaacacaagaaagcaatgaggaggcggttttatctgaaacacagcaaagcaatgaggtggttttatctgaaacacaacagagcaacgaggtgattttatctgaaacacaacaaagcaatgaggtggttttaccagaaacacaacaaagcaacagggtggttttacctgaaacacagcaaacagatgaggcggttttatctgaaacacagcaaagtgatgagctgattacatatgaaactcagcccaacaatgatgtagtcatgtcagatgcacaactg

SEQ ID NO: 20182 - DNA, 369 bp, Glycine max
  Clone ID: LIB3049-015-Q1-E1-C12
aggggacatggaatcaatttgtccatcattttcaaataaagtacacattgttattcatatttatgtcacccgagaatcagatcctccattggaagagggatatagttacaaaccaataaaatcttcattctgtcctatggctagtgattgtggcatgtctgttttggttggtacaggagacaatttttggtctggactatatgtcatctcatctaccgttggctttgtgatattgctggctttgttgtatgtttactacgtaaccccatttcacatagaaacatggtggtacaggggactactatatgtaatctgcatggttgcaagtgttgttatctttggtggttctgtggttgcaatgtggcatat

SEQ ID NO: 20183 - DNA, 331 bp, Glycine max
  Clone ID: LIB3049-015-Q1-E1-C2
gaacgtcgaatggggtatgagagtggattggttggttggttgattaatgattatagtgttatatataccgtcccttgttttctgagtttccgtgcagcaaaaaaaagtgtgaagtgcagagggatcattgacctgctgcgacgaacacgacgtcgtttttgtttccctctgtgagtgatgggattcttcaaaagggtagctggatttcttgggtttggaaaccacaaacacgattccaaggatgagaccgacgacggtcaacctcgagtgagagaaaccgtcgtcgatcgcccccacctcgctcccgttctcactccctctacttccggcg

SEQ ID NO: 20184 - DNA, 356 bp, Glycine max
  Clone ID: LIB3049-015-Q1-E1-C3
gacacagaaaggaaagatgatgcatcctctgacaatgatgagaagaaaggtcaatattctaagttctggaatgagtttggtagatccattaaacttggtatcatctaggatgccaccaacagaaatcgtttggcagaactgctcagatttgagagcaccaagtctgagggtaaattgacatctctggatcagtacatatctacaatgaaaactgggcagacggatatcttttacataactggaaccagcaaagaacaactggaaaactcgcccttccttgagcggcttaagaagaaatattttgaggttattttcttcacggattcagttgatgagtacttgatgcaatacctgat

SEQ ID NO: 20185 - DNA, 386 bp, Glycine max
  Clone ID: LIB3049-015-Q1-E1-C4
gacaaagaaaagaaagaagatgcatcctctgacaatgatgagaagaaaggtcaatattctaagttctggaatgagtttggtaaatccattaaacttggtatcatcgaggatgccaccaacagaaatcgtttggcaaaactgctcagatttgagagcaccaagtctgagggtaaattgacatctctggatcagtacatatctagaatgaaaactgggcagaaggatatcttttacataactggaaccagcaaagaacaactggaaaactctcccttccttgagcggcttaagaagaaaaattttgaggttattttcttcacggattcagttgatgagtacttgatgcaatacctgatggattatgaagacaagaagttcaaaatgtg

SEQ ID NO: 20186 - DNA, 340 bp, Glycine max
  Clone ID: LIB3049-015-Q1-E1-C5
ggcagccaagaaaagaaaatcctcacccattttcttcgtagccaaacactctgaaattctcagttatgtcgtggcaagcgtatgtggatgatcacctactgtgtgaaatcgaaggtaaccacctcactcacgccgctatcatcggccaagacggaagcgtttgggctcagagcaccaacttccctcagttcaaacctgaggaaataactgccatcaataatgactttaatgagcctggatcacttgctccaactggattgtatatcggtggcaccaaatacatggtcatccagggtgagcctggtgctgtcattcgagggaagaagggtcctggtggtgt

SEQ ID NO: 20187 - DNA, 374 bp, Glycine max
  Clone ID: LIB3049-015-Q1-E1-C6
catggctttgggaataaaaaggagaaatctccaaatcctcagaagagaaaccctcaggttgcaacacatggggatagctcttctggaatagcccaactctgtgttcgcataaatactttacaatggatcctgggtgaatttgatgttctggaacaaagaataattaccctattatggaactctgagtctgctcatgtataagatttttcaaatggattaacacagaagtctgaactatttccagccgcatgtcttgaaggaatccagcaactctgtgaggctgcatcatacagaaatgtcttccatgatctaagccaggctttatgggatggtttatatgttggggattcatcatcttcaagaatttagccatg

SEQ ID NO: 20188 - DNA, 371 bp, Glycine max
  Clone ID: LIB3049-015-Q1-E1-C7
gatagaagaagcgcaaagagaagcattagcactaggagcagcaacaactagtctcagctgaaatggcctcttcagtgatggcatctgtggccctcaaacctgcccctttcactgttgagaagtcctcagtgagaggccttccctctctctcaaggaactcttcttcattcagagttgtggccagtggcaagaagatcaagactgacaaacttatggaattaatggtggcatggctttgagggatggaactgatgcatctggcaggaaaggaaagggaaagggtgtttaccagtttgtagacaaatacggtgctaatgtcgatagttacagtcctatctacgacaccaaggactggtctccaaccggtgatg

SEQ ID NO: 20189 - DNA, 311 bp, Glycine max
  Clone ID: LIB3049-015-Q1-E1-C8
ggttcacgaggtggaggcggaggcggaggtgtttaccgtggaagttccaccaacaatgcacctgctccatccattgaagatcctgggcatttcccaaacttgggtgccaagtgaggccttgctagaacccttttgtcacatccctgtcctaatttcaattttgggttcgcttaggtgaacttaatcaggaaaataactatggtacttggatttcctggattggaacgttcacttaattttatgccttgaaagtgtaaatttatgttgttgttcttcatacagtcctgtacccttgaagcctgatccccctt

SEQ ID NO: 20190 - DNA, 375 bp, Glycine max
  Clone ID: LIB3049-015-Q1-E1-D1
ggatgtgagcatgggaatgtgggtagagcaattcaacagttcaaggccagttgagtatgtgcacagcttcaagttctgccaatttgggtgcattgaagattacttcactgcacattaccaacctccaagacaaatgacctgtatgtgggataagttgcaacaaaagggacaacccctatgttgcaacatgagataataacatagtctatgatcataatattcgtattatatttatgtacataggcactgaggacctttatgatctccacatattcatttactgtttaacctctcttttttttttttcttttcgattctcccaaaaatagaaggcctaggtgtatcatataaagttggatactgcagctattgctg

SEQ ID NO: 20191 - DNA, 356 bp, Glycine max
  Clone ID: LIB3049-015-Q1-E1-D10
gaatgaaaaccagagtgaagcagtgaagaagggaacaatgatggaaggccggaaccgaaaattaaccccgaagccgtcaacggattccctccaatcaatccaaagtttcaaccttttccgaaaaggttaccccctaatccaataattgcaaccaaaccttcaactccggtcccaattaacccggaaaaaaaggaattacaccaacctccaaatttggttggaacatgtccttacatgtgcccaagtaaacatattataataacaatatctaatgtatgaatatgaaatcaatttcataatttcatgttagcagagttgcaatgttggattttgtatgatggcatgtctcctttggt

SEQ ID NO: 20192 - DNA, 328 bp, Glycine max
  Clone ID: LIB3049-015-Q1-E1-D11
gaagaatattatgagaggaagagaaattataggccacagtactttgctgaagattatgaacagaccaagaatcgacacgagtattaccattacactgctgaagaagtctcgcctttgtggcatgatcgacttaaaatcctgtttgtgactgatggaacacttggaattcactacgagaccccgtctttcgatgggtctgtgatgggaactgaagatgtgctcataacaccatatacttgtgatagaacatgctcgggtgatgctgttgtggctgccattttaagaacacttaccacttgccctgaaatgtttgaaactcaagatgttt

SEQ ID NO: 20193 - DNA, 361 bp, Glycine max
  Clone ID: LIB3049-015-Q1-E1-D12
gattcaacatctcgcaaaacgattcaaaaccagacacacacacaaacaaacgctgaatctctcgtcgttctttttatttgcggtttcttcttcttctcacgttctacgtaacattttctaaaacatgtctggggaagaggaagaaaacgccgcatagctcaaaattggagaccagtttttgaatgcaaaatgcttaatgaactgtgaagtttcattgattcatgagcacaagtatgaacagcctcatcagacattcgatgatcccatgaatcaagtttctcaagtatttgaaaagtccctggagtatgtgaagcgttttacccgctataaaattcctgatgctgttagacgagttcgagaa

SEQ ID NO: 20194 - DNA, 406 bp, Glycine max
  Clone ID: LIB3049-015-Q1-E1-D2
gtcatcaagaagtcaaggatcaaagcctcttaatgatttagataagatgattcccaaagcaagggtaataagcaaggaggaaatttcagtgaaggaagccaaagagaagctattgcaagatatggaacagatgaaggagagattttccaaactgttgttgggtgaggacatgtccggtggatgaaagggtgtttcgtctgctttggcactgtcaaatgctttcacaaaccttgctgcttctatttttggtgaacaaaagcgcctagaaccgatgccggcagaaaggaaagcataatggagaaaagaaactgattggcttctatcagtcacggattacgttgttgaaatggttccttcacaacaaaagtctaatgatggttcaaatatggagattatgacgacacga

SEQ ID NO: 20195 - DNA, 317 bp, Glycine max
  Clone ID: LIB3049-015-Q1-E1-D3
atttgggatctcgtgtaactgaaactgaaactgcttctgcttcggaagcttctttctttgggggcaacaatgatgaacaaaactcttctcctcacttatttctacttgttcatctacattttgctttcttctggagtcattttgtacaacaagtgggttttgtctccaaagtactttaactttccgcttcccatatcactcaccatgattcacatgggcttttctggggcagtggcattttttcttgtccgggtctttaaggttgtcactcctgttaaaatgacatttgaaatatatgctacttgcctgataccaat

SEQ ID NO: 20196 - DNA, 393 bp, Glycine max
  Clone ID: LIB3049-015-Q1-E1-D4
gggtcttgggtgggacaacaaagcgcatagaaaaacgcggtttttgttcctcctgctctctctgactctgtctcggtgcagcacaaatcttccttcttcatcaattccacgaactcaaacaacaaataattcattctttcaaatttcaattctaacatagaaataagaataaaaatgggttgtttcgccagcaaaaacgctgacaccaatgccattacggctgcgcgttggcgatccacgggcattgttgctttgcgcgattccaaattaaagacgtttccggatgaaattcttgagttagacacatctgttcgcactcttgacttgacgcataatctgatagttgacattccagtggaaatcagcacattaattaatgtacagcgcctgata

SEQ ID NO: 20197 - DNA, 73 bp, Glycine max
  Clone ID: LIB3049-015-Q1-E1-D5
gggtcttgggtgggacaactgatcgcaaagaaagatgcggtttctgtgcctctctgctctctctgactctgtc

SEQ ID NO: 20198 - DNA, 343 bp, Glycine max
  Clone ID: LIB3049-015-Q1-E1-D6
gagagttaataatccgaaactaggttaaatataaccttacctaaatactagagggaaagaaagatagaagttgagctgagtgagtcacagttgttctcattgaagcagaagaagaaatggcggcttctctgcaactgttccaatgcaaactagcgagaccctttcggtccttccctttgcgaaggtcaactccccctctgagtctgaggtgttgcgcttcgcccccttcttcctacagcatcactctcattcccggcgatggtatcggccccgaaatcatctctgtggccaaagacgttcttgtcctcgtgggttctctcgaagggatcaaattcgagttcca

SEQ ID NO: 20199 - DNA, 390 bp, Glycine max
  unsure (1)..(390): unsure at all n locations
  Clone ID: LIB3049-015-Q1-E1-D7
gaatctagtggaagagtgaataagagatatcaatatattatgataatggagggatacaataagaaggttatgattgtggggatggtgttgggcatggccatgattgggatggccaatggccaatactcgttttgtcgcatgcccagcgatgggttggcggcatgcaagccgagtgtgagtggggactatcctgctgatccctccactgcttgttgctcagccattgccaatgctgatcttaaatgcttctgccgcttcaaggattcgggccttctctctatgtatggtgttgatcccaacaagtgcatggaactccctgttaagtgcaacgttgtcgactctttccactgctagattcattacanggggcactaatcaatattcactaca

SEQ ID NO: 20200 - DNA, 373 bp, Glycine max
  unsure (1)..(373): unsure at all n locations
  Clone ID: LIB3049-015-Q1-E1-D9
gacacaaggcaacattgttaggttgttgggtttctgttcanatcatgagacaaaccttttggtctatgagtacatgcccaatggaagtttaagtgaggttcttcatggaaaaaaggggggtcatttgcattgggacaccaggtataaaattgcggtggaagctgccaaggggctttgctatctgcaccatgattgttcgccactcattgtccatcgtgatgtgaagtcaaacaacatccttcttgattcaaatcatgaagcccatgttgctgattttgggcttgctaagttcctgcaagattctgggacatctgaatgcatgtctgctattgctggttcatatggatacatagctccagagtatgcctacaca

SEQ ID NO: 20201 - DNA, 367 bp, Glycine max
  Clone ID: LIB3049-015-Q1-E1-E1
ggcaactgtttacaacaataataagttaataactcgcgtagcgcaaggaacagcataaacgacgctgcgctgaacaacgccggtgtcagacaaacggtgccggttggtggggccgccacgctattacgcctaatcgtatccatcaccctcatcaaaacccctcctttctcttaatttagaaaccctaattcagaagataaaagttactttctccagaattagcgcgctaatggcatcttcagactcatggatgaaggaatataatgaagctgtgaaacttgctgatgatatcaatggcatgatttctgaacgtagttcgtttcctgcatctggaccagaaacccagcgacatgcatctgctataaga

SEQ ID NO: 20202 - DNA, 294 bp, Glycine max
  Clone ID: LIB3049-015-Q1-E1-E10
gggttatcagtctaatggaacagtatcaccgtttctcttccacttacgcaaatatggtgcagtcattgtcagtcttctcgtctactttcttcttcgctgattcacaattttttcgcgcaatctacagtaacccttgtgccaatcgttaactattacttgaggtattgatcatgctttctgactagttgattacatattgtatttcataatttggaaatttgcattgaattgcatctccggtaacgttcgactgaaacatgatttggaacctactcattctgcgtcttaatcttc

SEQ ID NO: 20203 - DNA, 337 bp, Glycine max
  Clone ID: LIB3049-015-Q1-E1-E11
ggaagcacaagagaagagaagagaagagaggagagggggggagaaggggttgcagagagagagagagagagatgtcatcatcttcagacctggacgggcaaatagagcagttgaagaggtgtgagcctcttaaggagtctgaagtgaaggcgctttgcctcaaagccatggaaatccttgtcgaagagagcaacgttcaaagggtcgacgcccctgtcaccatatgtggtgatattcacggtcagttttatgacatgaacgagcttttcaaagtacgacgggattgccccaaaactaactatttgtttctgggggattttgttgataaaaggtttta

SEQ ID NO: 20204 - DNA, 384 bp, Glycine max
  Clone ID: LIB3049-015-Q1-E1-E12
gatgtttttccctttaaagatcttgtcatgacacaatttttgagtcaagcaaacaggttctaacaactaggtggatctgccatgcaaacaccagggtcaggagaaaaactgaaagagcccttttcaagaacccaacgcccttctttccactttactctgcagcagtttcgtcactgtcatctccttcatttctggtatctggtagtgtatcaagatcagttagagcctcagccacatcctcgtgtatatgagtatcagaagaatcaattgcatcttgttcagctgaatccatagttttgttggcagaagaagagtctgatgtttcatcagtttcacctgttagtgtgtcacctttgaacatctcatcctctgtggcatcaacat

SEQ ID NO: 20205 - DNA, 80 bp, Glycine max
  Clone ID: LIB3049-015-Q1-E1-E2
ggtgtttgggtcgtaaaattgtacagatagcagtcccatgccgacgtgacgacatggatccctgctgggctgctgttcca

SEQ ID NO: 20206 - DNA, 384 bp, Glycine max
  Clone ID: LIB3049-015-Q1-E1-E4
ggagtcacccgctgcaaatccaactcgtgcatttgaagaaagaaaaaaaaaaaagggttggtttttggttttggtttggttaactccttccacttccacccatggtctccgaatccgaactcatcggccgcctccgcgagttcctccggagctccgacctcaacaccaccaccaccgccaccgtccgccgccagttggaggccgatttcggaatcgacttatccgaccgcaaggcattcattacggaacacgtcgacttgttcctccagactgagcacaaccaatcacaacaagaagaagaagaaaatgaagaaaaacaccaaaacgaacacgtagaggaacaagaagacgatgcgcctaataatcccgaacatagccaaccct

SEQ ID NO: 20207 - DNA, 394 bp, Glycine max
  Clone ID: LIB3049-015-Q1-E1-E5
attgtacataaaggagaaactacagaagacattgccaagagagaagggcgcttcgcaagggaggtggcaatgttgtctagagtgcaacataagaatttggtgaagtttattggtgcgtgtaaggagccagtaatggtgatagtcactgagctgttattaggaggaacattgcgaaagtatttgtttagcatgcgccccaaatgcttggatagacatgttgcgattggttttgcgcttgatattgctcgggcaatggagtgcctgcattctcatgggatcatccaccgtgatcttaaacctgataacttgctattgactgaagaccagaaaacagtcaagctagcggattttggtttagcaagagaagagtcattaactgagatgatgactgctg

SEQ ID NO: 20208 - DNA, 388 bp, Glycine max
  Clone ID: LIB3049-015-Q1-E1-E6
ggatttcagacacaacttcgcttatgaaatctcttcttccaattccttctttcattcattcccaggctgagatggcagcggcaccaacagctaccttcactattggaaccaccggttccctatgccagagaggaaactcgcttcctcaattaaagtcttctgggttgaaattcaactcccagaatcatttgaagagcttctgcggtctcaaggccatgtcatccgtgacatgtgagtcagaatcgtctttcttggttaacaaagctggtgctgctctgcgggcgtcttttgcatccaaggttcaaaaggaaaacgaccaacacttcaactacaactcgcagcctcaggcttcgtacaaagttgcagttcttggtgctgctggagggat

SEQ ID NO: 20209 - DNA, 368 bp, Glycine max
  Clone ID: LIB3049-015-Q1-E1-E7
tggggtagctagaagactaaatcttggggaagtccttgctttgaggtcagacttgcagcatatcaataaaattgttctcatctttcacgcataaccttatctgaccttcgtcaatcctgtaagtagtagaagtatgaagatggtatagacattctgactcagatcaaagtcggtaaatgaaggacaagctgaagcgctctgcgaccagatctcaggagcagtcttcgagtcttgggtcgagcatgaaccagacagcatagttcactgcgagccattcatcaagacctacttgatcatgtgcatatgagaaatctcaatcagagccaatttctgaatgcatcaagatagtgcgtgacacatgcatgaac

SEQ ID NO: 20210 - DNA, 387 bp, Glycine max
  unsure (1)..(387): unsure at all n locations
  Clone ID: LIB3049-015-Q1-E1-E8
gagaacatagcagctgaaacccacgggaaacaaacccattcataaatgatagacaaatgagttgtttgagaaattgagtgtgagaagaggaataagaatagatattgcaatttggaagggatgaatctaaggccattggggccattggttaggatggctgtagttatatttggtggagtggccactttgaacttggcttctgctgctaccatcaaagtgcttcggtttgcgtctgagaagaaacgggaaaaagttgcgttgccgtgtanggtttgtagagggaaggggttttatatatgcaaactgtgcaatgggaactccaccatatcttggtcaccaatgttcgaccctattgcaattaacccctgcgtttgtccgacttgcgaa

SEQ ID NO: 20211 - DNA, 244 bp, Glycine max
  Clone ID: LIB3049-015-Q1-E1-E9
gagttgtcagtctgtaatgttcagttaccagttgctggctgacgaagacgactgaaaggcaactatcgactgcctacggatctacatacatctcaccttgtcacgtaaaagagcacatctgactaaagtcagcttcgtgcaactcataaggttatccacgatgtcaggatgatgctttccaatagagggataccagacccagtttgacatagatagagcctttgcgactcttaccgatcctgaa

SEQ ID NO: 20212 - DNA, 412 bp, Glycine max
  unsure (1)..(412): unsure at all n locations
  Clone ID: LIB3049-015-Q1-E1-F1
ggcacaagtttgttgagatagctagaagcaataagatgaaaatgaaagtgcttgttttgtttgttgctacagttttggtagcatatgaatgccatggctcagactaccagaagttccctctccaaatgaaaactgggtttggtgggcaatacagcaatgaggtggcatgtgccagttggaggcttggcgtggaagcaaacaacgtagtcaagtggcaaactgttcctgcagcttgcggagagtacatagctgactacgttctangagaccaatatagatcagattccaaaacagttaaccaacaagcttatttctatgctaaatccctcaaactcaccaacaaagatgtctttgtcttggacgttgacgacactactctctctaatctccagttatttgctaancatggatt

SEQ ID NO: 20213 - DNA, 374 bp, Glycine max
  Clone ID: LIB3049-015-Q1-E1-F10
gacaacacaacacaacgcgcactctctctttttctctctgttttttgttctctcttcgcttaaaccctatcgttcttctcgttttcgccgattctcgccatgccgaaagctaaacccgacgccaaagccgccgatagcaggttgaagcggaagggcgctggtgctgggaggaagcaatcgaggaaagctgctaaggaccctaacaagccgaagagacctccaagcgctttcttcgttttcatgtccgagttcagagagcagttcaagaaggagcatcctaacaacaaatccgtcgctgttgtcggcaaagctggtggtgaaaaatggaaatcgctatctgatgctgaaaaggcccctttcgttgctactgctga

SEQ ID NO: 20214 - DNA, 336 bp, Glycine max
  Clone ID: LIB3049-015-Q1-E1-F11
agtgcacctggttaacgatatagtatagcatggcacagtctagttgcaaaactttggtgcagtggttggtagcaacattgctcagtgccttgttgggtggtgcacaagctgttgcaatatgtaacatagactcaagtcaattaaacttgtgtcgtgctgcagttactggtcaaaactctccaacatcggatgagaaatgttgtgcagttgttcgccaagccaatttgcgttgcctctgcagttacaagtctatcccaccttcatttggaataaaccccaaaaatgctttggccttgcctggtaaatgtgatcagcaatggcctcctaattgttgag

SEQ ID NO: 20215 - DNA, 317 bp, Glycine max
  Clone ID: LIB3049-015-Q1-E1-F12
ggaaaaaagttttcagtttcagaaagaaagcagaagcaatagcaatgggttggatcggtgagactgttgattccatcaaatctcttcagatccgccaggtcctcacccaggctgtgagcctacgcatgactgttacgtctgcactgataatatggacggcattgatgtgcgttactggcagtgaatctcccgttgttgttgttctttctggaagcatggaacccggattcaagcggggagacatcttgttcttgcacatgagtaaagatcctattcgggcatgggagaatgttgtgtctaatgttgatggacgtgag

SEQ ID NO: 20216 - DNA, 418 bp, Glycine max
  unsure (1)..(418): unsure at all n locations
  Clone ID: LIB3049-015-Q1-E1-F4
ggagcaagaagacgacagaagggggaacctttgcattcaattcattcaggattcagcaagtgcgttttggaagcagagaccgaaatacttcgagatggcccgtacaaagcaaactgctcgtaagtcaactggaggaaaagctcccaggaagcagcttgcaaccaaggctgcacgtaagtctgcaccaacaactggtggtgtgaagaagcctcatcgttatcgccctggaactgttgctcttcgtgagattaggaaataccagaagagcactgagctcctaatcaggaagcttcctttccagaggttggttcgtgaaattgcccaggatttcaagactgatctgcgtttccagagccatgctgtgcttgcattgcaagaagctgctgangcataccttgttgggctctttgaggacact

SEQ ID NO: 20217 - DNA, 378 bp, Glycine max
  Clone ID: LIB3049-015-Q1-E1-F5
ggaactcattaggaagggagataaggttggatcttctgaaactgcattgcttgccaggctaggcatattgcccttctcatatgggcatgtggttctctctgtttatgataatggttcagtgttcagccctgaggttcttgatcttactgaggattacctcattgggaagtttgctgctggtatctcaatggttacttcacttgcactggctatttcatatccaatacttgctgcatcaccatacatgtttgtcaatgcctacaagaatgttcttgctgttgcggttgagacagattattctttcccggaagcagacaaggtcaaggagtatctgaatgaaccaagtaaatttgccgttgccgccgtagctgctcctgc

SEQ ID NO: 20218 - DNA, 366 bp, Glycine max
  Clone ID: LIB3049-015-Q1-E1-F6
gagaatagagagctcctccaattagggtttttgtgatctgcagctacgatgggtaagggaacggggagtttcggtaagatgaggaacaagacccacaccctctgtgtgaggtgtggccgccgcagcttccacccccacaagagtcgttgctctgcgtgcgcttaccccgctgcacgcaccaggaaatataactggagcgtgcatgccattacgagaaataccaccggaactggaacgatgaggtacttgcgtaacgtgcctcgcagattcaagagcggcttcagagagggtaccgaagctgcacccattaagagatgagctgctgcctctgcctaagctttgaatgaatgacagcaatttttgctg

SEQ ID NO: 20219 - DNA, 230 bp, Glycine max
  Clone ID: LIB3049-015-Q1-E1-F7
ggagacgaacgccctagtatgctcagtaagatggcttcctttgtatccttcccactgccgcttcttgcagtccttatccgcatgcgggaatggcttgctacttactatcaggcgattaagaagccaccagtgtacatgcctccggtgtacaatccagcactgtacaatccatcggtttaccagccaaaatcaccggtttatacagcgaagccgcttgtttacgcgccacc

SEQ ID NO: 20220 - DNA, 353 bp, Glycine max
  Clone ID: LIB3049-015-Q1-E1-F8
ggcagcgcttgatttgaggccaggcaagccccactcatccaccatacctctcctcgttcaggctacccctttctgcccttcttctacctttcaggttttaagagtatatagatggcagagacattcctatttacctcagagtcggtgaacgagggacaccctgacaagctctgcgaccaaatctccgatgctgtcctcgacgcttgcctcgagcacgacccagacagctaagttgcctgcgaaacatgcaccataaccaacttggtcatggtcttcggagatatcacgaccaaggtcaacgttgactacgagaagatagtgcgtgacacctgcaggaatatcagcttcgtctc

SEQ ID NO: 20221 - DNA, 356 bp, Glycine max
  unsure (1)..(356): unsure at all n locations
  Clone ID: LIB3049-015-Q1-E1-F9
ggatcatagangggtgttcactgatgtgtgcattgggtggcctggttcaatgcctgatgatcaggtgttggaaaaaagtgcccttttttcaaagggctaatggggggcttttgaagggggtttggattgtggggagttcagggtaccctttgatggattgggttttggtgccttatagccagcagaatctgacttggactcagcatgctttcaatgagaagattggggaggttcagaangtggctatggatgcttttgctaggttgaaanggaagtggagttgcttgcagaagaagactgangtgaagctgcangacttgccagtcgtgcttggggcatgctgcgtgctgcataat

SEQ ID NO: 20222 - DNA, 417 bp, Glycine max
  unsure (1)..(417): unsure at all n locations
  Clone ID: LIB3049-015-Q1-E1-G1
gaccttctcttctctaagcactttactttttttttcagccatggagtttcattgccttccaatatttctttatctcaatttgatgttgatgacagccaatgctgcgttaactcctagacattactgggaaacgatgcttccaagaactcccttgccgaaagcaatcacagagctactaagccttgaaagtaggtccatatttgaatatgccgggaatgatgaccagtcagaaagtaggtccatattaggatacgctggctataatcaagacgaggatgatgtgagcaaacacaatatacaaatcttcaacaggttgtttttcttggaagaggacctgcgtgctggcaaaatattcaacatgaagttcgtcaacaacacanaagccacagtcccgttgcttacgcgccaaatttcgaa

SEQ ID NO: 20223 - DNA, 383 bp, Glycine max
  Clone ID: LIB3049-015-Q1-E1-G10
ggggacgaagattaattgtgaggcgagggtaaggtcgcgttgtgttgcgtcctgtcgtgcgctgttcctctgtttcgcgtctttgtgttcagaccgatccctagctccgcatcgcaaccatgtcgaccaagcaaggtggaatagccaagcctttgaagaaactcaagtctgataagaaggattacgacgagattgatgtggctaccattcagaagataaccgaagatgataacgcgctaaatgagttgacagccaatgcgcaacagaacggaagctttggaggttctgggctcaagaaaagtggaaagaaataagggctcgttatcaagattgtatgcattcagtattaagccctgtaagtacagtagctatcatgataactt

SEQ ID NO: 20224 - DNA, 291 bp, Glycine max
  Clone ID: LIB3049-015-Q1-E1-G11
ggtgcagagtttgttgagcataatagccattttcttctgattcttccaaatctatggttagggattccatttcccaacttcctcgttctctcccgaatcgttttcccttttctttttcctcctgaaaaattttccctcaatttttctctctcttgcagattactataagcactcttcctcgatatacccttttccgagatatacattgttttattttcccgggaaaatactcctcacaattttctggtccaacctattcgtcctttatatcaatccatcatcgatttgttg

SEQ ID NO: 20225 - DNA, 387 bp, Glycine max
  Clone ID: LIB3049-015-Q1-E1-G5
atcttaaaagcatgttgaagcccctggtcacaattcttgtgttcttgatggttgccagtgctcaagatagtctgagtgataataccatttttgaagggaagcaaactgtgcgtgtctacaatggcatgaatgatggcattcttgtgtatctccattgtcgatccaaggacaatgatcttggccaacatgttcttgcctttggagagttcaaaaatggtccttcaatgataacctttttggcacaactcttttttggtgcacaatgaatgcaagcaatgtgcatgcaagttttgaagtttatcgtgccaaaactgaggaaaataagtgtgatacccaatgcaatagaattctaaaaaaagacggaggctatttttttaatcagttcgt

SEQ ID NO: 20226 - DNA, 330 bp, Glycine max
  Clone ID: LIB3049-015-Q1-E1-G6
gagactaggttaaaaaagctacagatttctttttgctgattttggaaaattttcgtgtgattagcatcttgcagtagtgattgctggtcctcgtatcaatgtacacagactactgccatctctagatttcaggtgcagggtttttgattctatgtgcttctacaattttcttgctgtgtctgcagctttcacatcgactgttattaaaagctgttaatgaaggtagttttcaggaaaagatcagaaattttagcatattgtttttcaaccaatatctgtaatatgaataacggtgttttgccaaagaagattattaaccaaattcaaaaa

SEQ ID NO: 20227 - DNA, 394 bp, Glycine max
  Clone ID: LIB3049-015-Q1-E1-G7
gaaaataacgaacgctagatagaattttatagagagagagagtttttagagagagaaaggatgaagatcacggcattgttggtgcttaaatgcacaggtgagggttccgatcccgttattctggcgaacgcttccgacgtcagccacttcggttacttccagcgttccagcgtcaaggagttcatcgtcttcgtcggtcgcaccgtcgcccgtcgcacccctcagggccaacgccaatccgtacaacacgaagagtacaaggtgcacacatacaacagaaatggtctttgcgcgttgggatttatggatgatcattacccgattcggagtgcgttttctcttctcaaccaggtaatagatgaatatcaaaaaaactttggcgagtcatggagaa

SEQ ID NO: 20228 - DNA, 366 bp, Glycine max
  Clone ID: LIB3049-015-Q1-E1-G8
gaagatacgagagctagactgcaggctcagtttgctcaaatgcgacctgttggaatgccaccatctgttggtcctcgtgtgccaatgtatcccccaggtggtccaggtattggtcaacaattattttatagccaaggccctcctgctatcattccttcccagcctggatttggctatcaacaacaacttatgcctggtatgaggccaggtgcagctcctgtgccgaattttttcgtgccaatggttcagcagggacaacagggacagcgtctcggtggaaggcgtccaggtgcagttcagcaatctcagcagccagttcctatgatgccacagcagatgcttcctaagggacgtgtctatcgttat

SEQ ID NO: 20229 - DNA, 386 bp, Glycine max
  unsure (1)..(386): unsure at all n locations
  Clone ID: LIB3049-015-Q1-E1-G9
gaacctcgttgtggttttccaatgctgcgaagtcgaagatctagctagaggcagagaacgttctccctaatcttctgccgatggcgatcttctacgctttggtggccagaggcaccgtcgtcctggcggagttcagcgccgtcaccggcaacaccggcgccgtctcccgccgcatcctcgagaagcttccggcggagtccgactccaggctctgcttctctcaggatcgctacatcttccacatactccgatcggatggcatcacctacgtctgtatggccaacgacaccttcggaaggagaattcctttctcgtacttggaagatatccaaatgaggtttatgaagaactacagtagagttgccaattnatgcacagcttatgca

SEQ ID NO: 20230 - DNA, 345 bp, Glycine max
  Clone ID: LIB3049-015-Q1-E1-H1
agcaaaaaacccaatcaaaattctaagtctctttgtttacgttgttcgtttccctcattgctttgttctcttctctcttctctctcacattcaacttcaaaggcgtagagtgagatccgaacgatgaagagagtattcggcgtcaagaagaacaaggatcctcctccttccattcaagatgcttccgataggattactaaacgaagtgactcggtggatgacaagattaagaagcttgatgccgagcttagtagatataaggagcagattaagaaaactagacctggtcctgcccaggaagctgttaaagctagagccatgagagttcttaagcaaaaacgaatg

SEQ ID NO: 20231 - DNA, 382 bp, Glycine max
  Clone ID: LIB3049-015-Q1-E1-H10
ggttctagtgtgtgattgtttgttgttgtaactcgttcttcttcttttgttgttctgtgtttgtgtttgttttttctctcacctgaaaatgtcttgctgcggtggtaactgtggttgcggaagctcctgcaagtgcggcaacggctgcggaggctgcaagatgtacccagacttgagctacactgagtcaaccaccaccgagaccttggtcatgggagtggcacctgttaaggctcaatttgagggtgctgaaatgggtgtgcccgctgagaacgatggctgcaaatgtggaccaaactgctcctgcaacccctgcacatgcaagtgaagtgttgggagagcaggcttcaagcagagatagcccttaattaggaataatgat

SEQ ID NO: 20232 - DNA, 291 bp, Glycine max
  Clone ID: LIB3049-015-Q1-E1-H11
tctcctcctttgtggtgtcgagctgagaataccagttgctccagtagccggcactaagcaacatggcggacaaggcagtcaccatccgaaccaggaagtttatgacaaacaggcttctctccagaaagcagttcgtcattgatgtccttcatccagggagggctaatgtttccaaggctgaactgaaggagaagctgggaagaatgtatgacgtgaaagacaccaacactgtatttgtcttcaagttccgaactcattttggtggtggcaagtccactgggtttggtttga

SEQ ID NO: 20233 - DNA, 318 bp, Glycine max
  Clone ID: LIB3049-015-Q1-E1-H12
tggggtgatatatattgagattcgtaagttataactgacatagttttctgagacaatggtgattattattatcgagagaatggcaagctcctcggaggatggacaagtcattagctgtcacaccgttgacgcatggaatgatcaactccagaatggcaaccaatccaagagactcattgttgtggattttactgcttcttggtgtggaccatgccgtttcattgcaccattcttggctgagctggctaagaagtcacaagtgtcgtattcctaaaggtggatgtggacgaattaaagagtgtttctcaagactgggct

SEQ ID NO: 20234 - DNA, 362 bp, Glycine max
  Clone ID: LIB3049-015-Q1-E1-H2
gagactagagagtgagaggtgggaaatggcgtacctgaacgctaggcgcaccttagcatctaccctgtcacgagctctttcttcttcatccgctagcgcctctcgctttcgcttcgcattcgcattcgcgttgctccccgccaaacaaaccgcacccaaccctcactgggcgagtttcgcggttcggactcaatcttcgggttcgggttactcgcccctggacgacccgtccccgaactggagcaaccgtcccccgaaggagaccattcttctcgatggctgcgactacgagcactggctcatcgtcatggagttccccgataaccctaaaccctctgaggaccacatggtcaacgcctatg

SEQ ID NO: 20235 - DNA, 222 bp, Glycine max
  Clone ID: LIB3049-015-Q1-E1-H3
ggcacctgtgagtaatatttgagcttaaaccctaaccgctcttctcttcattactcactttggacacaatcataatggcgttctgtactaacgtcggaaatgtcttgaggcacgctgatgctcacagcacacatacacctgtcgcgtccatgcttacatacatcagcagacactcttcatgcaagcttttcagtgcaggcctattatacggattgatgacca

SEQ ID NO: 20236 - DNA, 341 bp, Glycine max
  Clone ID: LIB3049-015-Q1-E1-H4
ggatctttcacaactataccaagtgataatataaaaatgaaggcacaaatagatttggaagcccctgctcctcccgagatagaggaggatgctgttcctgaagaaaagaagcttgaaactgctctagcatcaccgcaagtcccacaaggcacagttgaacagccaaaggatgatgaacttattacaaatgcagcagaggcaattgttgtcttgtcatctcttacctgggaagtggatgatggtgtgatcagtccatcagaaagtccaaaggtggacctgctaagttggtttgcagatgttgtttcctcctcatgcaaagatgagggaaagtgtgatgtttc

SEQ ID NO: 20237 - DNA, 406 bp, Glycine max
  unsure (1)..(406): unsure at all n locations
  Clone ID: LIB3049-015-Q1-E1-H5
gggcctgggccgtggcccgctgtccttgctctcccaatccgggtcaaattactcgggcatcttctcttactgtctccctagcttcaagtcctactacttctctgggtcgctcaagctcgggcccgtgggccagcccaagagcattcgcaccaccccgcttcttcgcagccctcaccgtccttctctttactacgtgaacttcaccggaatcagcgtgggacgtgtcctggtaccctttcccagcgagtatcttgggtttaacccgaatacaggatccggaaccataattgattcgggcacggttataacccggttcgtggagcccgtttacaacgcggtgagggaggagttcaggaagcangtggggggcactacattcacgagcattggagccttcgatacgtgt

SEQ ID NO: 20238 - DNA, 372 bp, Glycine max
  unsure (1)..(372): unsure at all n locations
  Clone ID: LIB3049-015-Q1-E1-H6
ggggggaaaacacaatcattccgttctcttaacctaaccggagtagtgatagtattagtatcaattcccccactattccattctagtattctattttatctctttttctttcttcgttttcaaaactctttccgacaactcagaaaccaaagcactcgcttctccttctctctctctctctctcataggcgtgcaggtgcaatggcgggtgcgatgaatatgaaagtcgacaagattcgtcaaatcgtgcgtctcaaacagcttatgacgcgctggaagcacatcagcctccgccgccgctccgacgacgaaccctccgccgcgcgccgccctccccccggcttcatcttcgtctacgtgggcancgaacgc

SEQ ID NO: 20239 - DNA, 385 bp, Glycine max
  unsure (1)..(385): unsure at all n locations
  Clone ID: LIB3049-015-Q1-E1-H7
ggagtgcagtgatagagataagaaaatgtggcttgtgcagctctcaaccccatttctgaacggacatggtcattccaccacccttctctccaagcacagttcggcggtgactcagacccactgggccccaccgagtttcctgcctcaaatcgatgcgatgaagacaatgcaggggagagtggtgtgcttcaccagcgacaagacggtggcagtggaggtggtgcggctggcccctcacccaaagtacaagaggcgcgtgaggaagaagaagaagtaccaggcccacgaccccgataaccaattcaaagtcggcgacatcgtccagctccagaagaccaggcccatcagcaagaccaaggcctttctcgcactcnccgttcccaaa

SEQ ID NO: 20240 - DNA, 357 bp, Glycine max
  Clone ID: LIB3049-015-Q1-E1-H8
gggcacttgagatttgaaaacttgatctgcctttgctttgttatttcattaagagcagccctttgggccatatattggttacctcaactgcttttctgttcatctttccacaattaatgtaaagttccctttatttgttctgtcttttcagtcttttttcaaagtgaattcctgagattttttgttttcaactgagggcactaaaagaattgaactgactggaacttccacttgtcctgctgggtctctgacatttgaagtgtgttgttttccttatggtgagtggatcctaagttcatgaattccctcttttctccagccaatttgttttgttgctgattaaattagttctgtctg

SEQ ID NO: 20241 - DNA, 308 bp, Glycine max
  Clone ID: LIB3049-015-Q1-E1-H9
gacagactatgaaaccatctatctcccaatttctctctctaaaaccgccgtctccttctcagaccagccgctgcagcattttctctgcgactctcgctcggaccagcacttggatgtgactggtttcggcatcggttagatcgaccatggcggaggtttccggcgagggagtagcggaggcgacggtgtccacgccggcgccgccgttggcggtgtctggatctttcaaggaagggaagagctcttcgcggaggcgcgcgcattcgatgaggccgagcctcgacgcggacgagttcatgaacctgttg

SEQ ID NO: 20242 - DNA, 372 bp, Glycine max
  Clone ID: LIB3049-016-Q1-E1-A1
gactcacagcagagccaccaaatacttgtgttgtgtcgattctctgccatccatgatccatcacttacaaactagtactacttgctttcaataaaaacaaaaacacactctttggtgaccacaacaacaataacaatggctgcctcactacaagctgcagctaccttcatgcaacccaccaaggttggcatagcctctcgcaacctcaaatctacacaatgcatttctaaggcttttggcttggaacctgctgcagctaaactcacttgctcccttcagcctgatctcaaagaatttgctcaaaaatgtgtcgacgctaccaaaattgcatgattcgcccttgccacctctgctctcgttgtttctggagca

SEQ ID NO: 20243 - DNA, 363 bp, Glycine max
  Clone ID: LIB3049-016-Q1-E1-A10
ggaacctcaaaatcagtctctaatatttttctcactgtcttgtctctccagagaactgtatagagagagatggcagctgcaacatctggtgctgtgttaaatgggttgggatcttccttcttgagtggaggaaacaggagccaaacccttctggccactgctattggaggcaaagttggtgctgctgctgttactgttagtcctagaagactcattgtggtagctgctgctgcaccaaagaagtcatggctccctggtgtcagaggtggtggcaacctcgtcgaaccagaatggcttgatggatcgctaccaggtgactatggctttgacccactaggccttgggaaggacccagcattcctc

SEQ ID NO: 20244 - DNA, 186 bp, Glycine max
  Clone ID: LIB3049-016-Q1-E1-A11
ggaacctcaaaatcagtctctattatttttctcattgtcttgtctcatccatataattgtatagagagatgagggcagctgaatgatctgatgctgtgttaaatgggttgggatcttacttcttgagtgtacgaatcacgagccagccccttctggccactgctattagaggcacagtttgtgctg

SEQ ID NO: 20245 - DNA, 386 bp, Glycine max
  unsure (1)..(386): unsure at all n locations
  Clone ID: LIB3049-016-Q1-E1-A12
gagaagctcagacctagggatttcggccgtttgctccccaaaaaggaaagaagcagattctgtcctttgaaatcaacaagaaaagatgtcaggtgaagaggtagctgttgcagttgaggtacctgctacttcaattccaggtgagccaatggacatcatgactgctctacagcttgtgctgagaaaatctctggcctatggtggtcttgcacgaggtcttcatgaaggtgccaaggtgatcgagaagcatgctgcacagctctgtgttctagcagaagattgtgaccgacctgattatgtgaaactggcgaaggctctttgtgcagagcacaatgttagtcctttgacagtctcaagtgcanagacccttggagaatgggctggtt

SEQ ID NO: 20246 - DNA, 368 bp, Glycine max
  Clone ID: LIB3049-016-Q1-E1-A2
tcaggaatcgttttcttcagaaaatttgccatcgttgagggaagcgcgagagccttcgttgttcaagatgagagctaagtggaagaagaagcgcatgaggaggttgaagaggaagcgccgaaagatgagacaaagatctaagtaggtgcttgaacaaggagtggagatgatgtgcttttccatctgctaccagcttcatgacattttatgctgtcatggctcttatgatgatcttgaggtctagtggcgaagggagcttccatcttgactttagtttagctttactggtctaaagattgctgttttagtgtgggttaagttatgatattgagagttttgtgttatctaattatgtactggtacttttt

SEQ ID NO: 20247 - DNA, 367 bp, Glycine max
  Clone ID: LIB3049-016-Q1-E1-A3
gggacgacgtgagtagctgaggaggaagagagaaaaaccatggcaataacactcaacaatggcttcaagatgcctatcattggattgggcgtgtggcgcatggaaggaaacgaaatcagggacctaattctcaattccatcaaaattggttatcgccattttgattatgctgctgactacaaaaacgaagcagaagttggagatgcgcttaaggaggcttttgatagtggccttgtgaagagagaggatctcttcattaccaccaagctttggaattctgatcaaggccacgttcttgaggcgtgtaaagacagtctcaagaagcttcagttaacgtatctagatttatatcttgttcactttcctg

SEQ ID NO: 20248 - DNA, 377 bp, Glycine max
  Clone ID: LIB3049-016-Q1-E1-A4
gataaaaggagatccaaagtaaagaacacagatggcatgacaccacgaaaccaaattaaaaactgcgccttctctgtctctgtttgttcttctcactttatattctctctctgtgtatatctcttcactcttattattccttctcttctcaacgacgatggaggacccatcagcagcaacaacgttgttgctgaacagcgaatattcgaggctgttcgtcgaggacacggacttgtacaatcgcattgtgttgggaaccctcttgccgcacttcgtgtggggcccactcccgcacttcctccagacgtggcttcgcaattacctcggcggcgtcctcctctacctcctctccggcctcctgtggtgcttctacattt

SEQ ID NO: 20249 - DNA, 370 bp, Glycine max
  Clone ID: LIB3049-016-Q1-E1-A5
gaattgtataatgggtatccttgttcttctttctctattgtctatagtcatctccattgttctcttcattacccacacacacaaaagaaacaacactccaagaggaccaccaggtcctccacctcttcctctcatcggcaaccttcaccaactccacaactcatccccacatctctgcctatggcaactcgccaaactccacggtcctctcatgtcgtttcgcctcggcgccgtgcaaaccgtcgtggtttcatcggccagaatcgccgaacaaatcttgaaaacccacgacctcaacttcgcttccaggcctctcttcgtgggcccgagaaagctctcttacgacgggttggacatgggcttcgcaccg

SEQ ID NO: 20250 - DNA, 372 bp, Glycine max
  Clone ID: LIB3049-016-Q1-E1-A6
gaagacttaagagtgaagagtgaagagtgagagagagagagagagagaggcacttggaatccaaaaatgagagaaatcatcagcattcacataggtcaggccgggatccaggttggcaactcctgctgggaactctactgcctggaacatggcatccagcccgatggcatgatgccaagtgactcctccttcggtgtagcccacgacgccttcaacaccttcttcagcgaaaccggatccggcaagcacgtccctcgcgccgtcttcgtcgatctcgagcccaccgtcatcgacgaagtccgttgtggcacttaccgtcaactcttccaccccgaacaactcatctccggcaaggaagatgcccgcaacaac

SEQ ID NO: 20251 - DNA, 393 bp, Glycine max
  Clone ID: LIB3049-016-Q1-E1-A7
gacgctcaattcattttcttctcctctctctctcctaaggttagggttttctctcttcatcactctctgtgtcgctccgtttcaatggctcagcacgaggctcaatacggcgggtcggagaatgccgctgctgctgctacggtgtcgtttgtcgctgtgaagccgcagctcctcgtcgaagctcccaaagccaacgacgccattctgttcttcaaggctgcgtttggcgctgaggaagttggacgtacgctcaaccctaatcgcaaagctgagcacgagctccctctcatactctccgcagaactcaaaatcgctggctccaccattctcgtcgccgacctcgttgatgacacttcttcgccagcgaaaactgtgggaaacggtgtcgttttg

SEQ ID NO: 20252 - DNA, 391 bp, Glycine max
  Clone ID: LIB3049-016-Q1-E1-A8
gatcatcagaatccacagtttccgttaacgctctccaatacaaagtaaccactcactgaatattcggtcgaagatgtccgccgccgaagaagctaaagttcccgccgtcgaaaagccggtggaggaggtgaaggcgccgaagcttgccaaggagaagaaacctaaggctccgaaggaaaagaagccgaaacaggccaaaactgcttctcatcctccatatctccagatgattaaggacgctttgattgctctgaacgagaaaggaggatcgagtccatatgcgatagcgaagtacatggaggagaagcacaaggcggtgcttcctgcgaatttcaagaagatactacgtctgcaactgaagaaccaagctgcgagagggaaactcgtcaag

SEQ ID NO: 20253 - DNA, 315 bp, Glycine max
  Clone ID: LIB3049-016-Q1-E1-A9
ctcgacccaaacgtacgtacagctgtcagaagaggagagaaagggggagctgagctgattataccaccaaccccaacctcaaccttaacctcgcttcactttcttttcaaccagatctatgattaagctttttaaagtgaaagaaaaacagatagaattggcataaaatgcgagtggcggaccatgcgttaagaagcaaagtgccggcgagttgcgtcttcaaaaagatataatcgagctgaatctattatattcatgtagcattcaattcaccaatggcattgatgacctgatgaaccttgaagtttcaattcg

SEQ ID NO: 20254 - DNA, 390 bp, Glycine max
  unsure (1)..(390): unsure at all n locations
  Clone ID: LIB3049-016-Q1-E1-B1
gacatcttcttttacgtattgaatctcagaattctctaaaagagatctttttctgctctttgaagaaagaagggtctttgcttgattttggagatgtctctgctctcagatctcatcaaccttaacctctccgataccaccgagaaggtgatcgcagagtacatatggatcggtggatcaggaatggacctgaggagcaaagcaaggactctcccaggaccagttagcgacccttcagagcttcccaagtggaactatgatggttccagcacaggtcaagctcctggtgaagacagtgaagtgattttatacccacaagccattttcagggattcattcanaaggggtaacaatatcttggttatctgtgatgcctacactcctgctgga

SEQ ID NO: 20255 - DNA, 283 bp, Glycine max
  Clone ID: LIB3049-016-Q1-E1-B10
gacacttactagtagtaagcatggagtcctcaaagatctatgcttacctcttcctctgcatgatctttctctcttccgccactcccattctcggttgtggctactgtggcaaatcccccaaaaagcacaagcctggtaaaacaccaaagacacccaaaacacccgttgttaagccaccagtcaccatccctcccattaatgttcctcccgttgttcttccaccaatagtgaagcccccaggtattctccctccaattccaattattaacccaccaaccacacc

SEQ ID NO: 20256 - DNA, 290 bp, Glycine max
  Clone ID: LIB3049-016-Q1-E1-B11
ggcgaaatgggaaaacgagagaagcagaagcagaggcacgagaagggacaccgtggaatacggtctttcaactatcttcaagaggaccatgattttgatgacactccaagaccctcaccctctgaagaagaatgtgctgatgacagcactgaggaaaaagaagaagaagaagaagaagaaggtcatgaagaccaatctcatgatatgccttccaagttcctcctttaccaacaatctgtgcagtcacccaaaggagatataagttatttgcaaaagttctttctcatgta

SEQ ID NO: 20257 - DNA, 370 bp, Glycine max
  Clone ID: LIB3049-016-Q1-E1-B12
gataaaaattcaaaataataaagtattcaaatatcatcatccattcctctaaccctctttcaaccttcacagatctcactagccataccacaaatcattcattctccttccctttctaaacccctttttccaaatcaaggagcaacgggacctgctgaagatgactccaggattatagtctttagggtgttttttttttctttatgtttttgctgactatggcttatgatgccattatggactatgttttttctattctgctttagttgtttttgttatctcttatttagcaatagctagttagttggtggaactttgaagtggttaatttgcacttttgcttgaagctgactatagcttgttggtcgtg

SEQ ID NO: 20258 - DNA, 396 bp, Glycine max
  Clone ID: LIB3049-016-Q1-E1-B2
ggacacttctttagaacaagcatgcataactctgctaccctcttctctctctctcggatttcttgcgcggtttatcatgggggatagtcagtattcgttttctcgcaccacatttagcccttctggaaagcttgttcagattgagcatgctttgacggctgtcgggtctggataaacgtctttgggaattaaagctgcaaatggagttgtcattgctaccgagaagaaattgccatctatattggctgatgaagcatcagtccagaatattcagttattaacaccaaatataggtgtcgtatatagtggcatgggtcctgattttcgagttttggttcggaaaagcaggaaacaagccgatcagtatcgccgtttacattaagacacaattcctgt

SEQ ID NO: 20259 - DNA, 359 bp, Glycine max
  Clone ID: LIB3049-016-Q1-E1-B3
ggccaacctttttttttagtattttttttctataaaacctaacctcagcctcaattatcaccttctttgccatagccctttcttttctctactcttcccccattttttcttctttaatccctcgcctatatcttcagaaaattagatctgcttcagatctagggtttcccttttccaaatcacgagtccgttgagtttgattttgtggatgaaagcatagggatagggcttttgcaaacctctccaatgtttctcgaaattatatgaccatgcgtcgaattcgtatgctgcactccttctccgtcgtgttcctctactggttctacgttttcgcatgaactccctctcaaatccgtaat

SEQ ID NO: 20260 - DNA, 383 bp, Glycine max
  unsure (1)..(383): unsure at all n locations
  Clone ID: LIB3049-016-Q1-E1-B4
ggttgtgtgagtgaagaagcagagggagtagcggcattaaaaatgcagatcttcgtgaaaactctgacagggaagactataaccctcgaggtcgagagcagcgacaccatcgacaatgtcaaggccaagattcaagacaaggaaggcattcctccggatcagcagcgtttgattttcgccggaaagcagcttgaagatggaaggaccctggccgattacaacatccagaaggaatcaacccttcatctcgtcctcaggcttcgtggtggcatcattgagccttccctcatggctttggctcgcaaatacaaccaggacaagatgatttgccgcaagtgctatgcccgtctgcatcctanggctgtgaactgccgcaagaaaaa

SEQ ID NO: 20261 - DNA, 410 bp, Glycine max
  unsure (1)..(410): unsure at all n locations
  Clone ID: LIB3049-016-Q1-E1-B5
gacgccttgttcggtgaagtgagtagtgagtgctgaatcgaatcgaatcgattctccgaacatggcggcgagcgatcgcacagtgttgcaattctcttcatcatcttcttcttcttcgcagatcttgtccgcgaaggtccaccctctggtcatcttcaacatctgcgattgctatgttcgacgccctgaccaagccgaccgcgtcatcggaaccctactcggctccgtcctttccgacggaaccgtcgatatccgaaattcctatgctgttcctcacaacgagtctatcgaacaggttgcattggatatagagtacaccacaatatgttaatatcccaccanaaagtgaatccaaatgaaatcatagtaggatggtattcaaccggtcttggagtaactggtggtaatgc

SEQ ID NO: 20262 - DNA, 380 bp, Glycine max
  Clone ID: LIB3049-016-Q1-E1-B6
ggcgtacacagcctcaacaaccctaacgcgtgcagagcagagagagacgcagccatggggcgaagacccgcgaggtgttataggcaaattaagaacaaaccataccccaagtcacggtttcgccgtggtgttcctgatcccaagatcaggatttacgatgttggtatgaagaagaagggtgttgatgagtttcctttctgtgtccatctggttagttgggagaaggaaaacgtttctagtgaggccctggaagctgctcgtattgcttgcaacaagtacatggccaaatttgctggaaaggatgctttccacttgagagtcagggtgcacccattccatgttcttaggatcaacaagatgctttcgtgtgctggagctga

SEQ ID NO: 20263 - DNA, 358 bp, Glycine max
  Clone ID: LIB3049-016-Q1-E1-B8
gacgcagtgttcggtaatgtgattactcagtgctcaaccgagtcaaatcgattctcctgatgatggtggctatggatcgcacagtgttgcggttctcttcatcagctgctgcatctgcggatatcttgtctgcgaaggtctacgctctggtcatcgtaagtatctgcgattgctatgttcgacgctctgactatgcagaatgtgtcataggttggttactcgactccgtcctttccgagtgaagcgtcgaaatccgaaattcctactttgttcctctaaataagtctatcgacgaggttggattggatatacagtaccatcacaatatgttaatatgctatcataacgtgaatctaaa

SEQ ID NO: 20264 - DNA, 376 bp, Glycine max
  Clone ID: LIB3049-016-Q1-E1-B9
ggcagtttcaaattttcttttccttcactttcccgagaaaaaaataacacttttcactttcttcactacgttctcacttcgatatggctcgtacgaagcaaaccgctcgcaagtccaccggtggcaaggcgccacgtaagcagctcgccaccaaggccgctcggaagtccgctccggcgaccggaggagtgaagaagccccaccgcttcaggccgggaatcgtggcgctgagggaaatcagaaagtaccagaagagcaccgagcttctcatcaggaagcttccatttcagaggctcgtgagagaaatcgcgcaggatttcaagaacgaatttgcgtttcaagagcagcgctgtttccgcgcttcaggaggctgctg

SEQ ID NO: 20265 - DNA, 401 bp, Glycine max
  Clone ID: LIB3049-016-Q1-E1-C1
ggggctcttgggtatcaagccttgtgttggctgtaatagaataagcttcaattggaaacgccagagctccatcaccggaacaagacccaggcaggtgtcgcagtacgcggagaaaggacgctatataaatatatttgtccccgatgctctctatttcagccactcgtatattcttcctccgctcaacaactataagattatcttcttcttcttcttctcttcaattcttctccaatcccaaccgcaccctcttccgtccctttcttcacacttccttcaaaccacttccttcgtctttctctttccgaacagatcacactatggccacctcaaacgccaaatcagtccatgatttcaccgttaaagatgccaagggaaatgatattaaccttggtgactac

SEQ ID NO: 20266 - DNA, 376 bp, Glycine max
  Clone ID: LIB3049-016-Q1-E1-C10
gtatgcagtgtgtgttgatcctttttttttctgtttcttctctttgtgagatactgaaaatcactttttctttgttgacctatgagatctacttgctccattattttatattttatttttttggtgcctttctttggatttgtttaatttgttagcttcaacaattaaggacaaaattatttagtgactcctcattttttatatttattattatgtgaacttgtggctttttgtaagaagccctatatgtgcttcattgctccattagaatagtaagagttcatttctaatttgatcttttttgtaagggatggtagatttatcagatctagtaatatgggacatgatctggtggatatctaatattttgtgtact

SEQ ID NO: 20267 - DNA, 298 bp, Glycine max
  Clone ID: LIB3049-016-Q1-E1-C11
ggttgttgtaaggcaagtgagcgtcggttggaagcagagagatggaaggttgggaccccaatacgaagtcgacgctgacacagatccctctgctgacgacgaaggcgggtccacgagacggagcggcatggacgcagaggcttaacgaagagtacaaggctctgatagcgtacacgcagatgaccaagtccaacgacaacgattggttccgtatctccgccgccaatctggaaggcactcgctggaccggtcaatgctggtacgttcacgatctcctcaagtacgacatcgacctcca

SEQ ID NO: 20268 - DNA, 382 bp, Glycine max
  Clone ID: LIB3049-016-Q1-E1-C12
ggttctatctaattcagtttttttctcccatcataaaaaaccgaccctctccttgccctcttcaccaaccaatggctcccccaaaggccgagaataagcccgcggagaaaaagcccgcagagaatgctccggcggagaataagcccaaggtcgagaagaagatatcgacggaaggaggaagcgagaagaagaagaatagaacaaagaagagcgtggagacctagaagatttacatcttcaaagtgctgaagcaggttcaccccgacatcggaatctcaagcaaggccatggggatcatgaacagtttcataaacgacatcttcgagaagctcgcccaggagtcgtcgcgattggctaggtataacaagaagcctaccattac

SEQ ID NO: 20269 - DNA, 382 bp, Glycine max
  Clone ID: LIB3049-016-Q1-E1-C2
gacaccaaaatttgccaattgccatttcaatccccagtttcttcttcaacgtcctcttacgagcagatcccaattctccgtcccagtttcaaaccctaattccctcattcccatggcctcagaagagcccactgtcgcggtggaacccgctcccgaacctgccaccgccgagcctcccccggaggagaaggaggagcccaaacctgaagccaaggctaagaaaaccaaggaacccaaacctaaaaaggtttccagaccacgcaaccctcccactcatccttcctacgaggagatgattaaagacgcaattacctcgctgaaggagaaaaccggttcgagccaacacgcgattgcgaagttcatcgaggagaagcacaagcag

SEQ ID NO: 20270 - DNA, 354 bp, Glycine max
  Clone ID: LIB3049-016-Q1-E1-C3
ggggttgggttgggttgtcattgttggcatagcaacaagttgacactaatctaatcacctcctctgcctctctttgtattctacgatggacacgcactgccacgatgaggatgagccaccgaaacctgtggttctgatcacaggatgttccacgggagggataggccacgcgcttgcacgcgccttcgctgagaagaaatgcagggtggtagccatcagcacgtcgctgtcgagcatggcggagctggaacacgaccagatgttctttttggaagagttggatgttcagtccgatgagagcgtgcgtaaggtggttgatgctgttgtcgacagatacggtcgcatcgacgtgct

SEQ ID NO: 20271 - DNA, 402 bp, Glycine max
  Clone ID: LIB3049-016-Q1-E1-C4
gaatttgagaaagaggattcgccatttcaattctctctctctctctttcaattcgcagagaggttcagtttgtgtcatgtgcatacagcaatcggattgtttggatcagaagtcaattcgaggtgtagatggaacttgaagcaagtaatcaacccaagcaagagcgttcaaggacaagatggacagcatcccttgacaagatatttgcagacttggttgtcaagcagattcaactggggaacagaccaaacaatgtttttgacaagaaaacatggaatcacattcgtgatgagtttaataggcaaacagaccttaatttcaacaataatcaattgaggaagcatctagatgttcttcggactcgcttctataatttgaaatctgcttatgatcaaaataatg

SEQ ID NO: 20272 - DNA, 327 bp, Glycine max
  Clone ID: LIB3049-016-Q1-E1-C5
ggagtaagatttatcatgctccattgttggtgggtctccctcccgcttcgggttcagcttcgtcatctaattctcagttaaaccaattcatctgagtccatagctcaaatctgaatcaaaagcctaaatgagatttgcgacagataggcttcagcgactgtatccatgtgcaagtggagcgctagggcaccctcacccaaattctgcaaatctcgattcctccgagcatgtctacatcaccacactcgctctcctcaagatgcttaagcactgaaaggctggggttcccaagtatgtgatgggtctgatgcttggagaattcgtgga

SEQ ID NO: 20273 - DNA, 332 bp, Glycine max
  Clone ID: LIB3049-016-Q1-E1-C6
ggagactagggtaaggtcgcgttgtgttgcgtcgtgtcgtgcgctgttcctcagtctgtcgtgtttgttgacagaccagatcctagctcagcatcacaaccatgtcgacaaagcaaggtggaaaagctaagcctttgaagaaacccaggtctgataagaaggattacgacgaggttgacatggctaacagtcagaagaaaaacgaagacgagaaagcgctaaaggagctgaaagccaaggcgcaacagaagggaagctttggaggttctgggctcaagaatagtggacagaaataagggctctttaacatgattgtatacatccaatattga

SEQ ID NO: 20274 - DNA, 379 bp, Glycine max
  Clone ID: LIB3049-016-Q1-E1-C7
ggagagtggagagagagagaagtgagagtgtgagagggagcacagtgaagaagagaacgaaggaacgaagatggagactcctcctccgcaacaaggcgtggtgaagaagaaggagacaaggggccgaaaacccaagccgaaagacgaacacgccaaggcgttgaaggaagggagaaaaacacagcaacaacaacatgatcagcagcaacaacaacaacagcaacatcaaccttcggtggacgagaaatacacgcagtggaagtcccttgttcctgtcccctacgactggctcgccaaccacaacctcgtctggccctctctctcttgccggtggggccctcagcttgaacaagccacttacaagaatcgtcaaagactc

SEQ ID NO: 20275 - DNA, 348 bp, Glycine max
  Clone ID: LIB3049-016-Q1-E1-C9
gaagaaaacatcgtgaagcatgtctggaacaggaaagggagggaagggtctaggaaagggaggagcgaaacggcaccgtaaggttctgagggataacattcagggaatcacgaagcccgcgattcggcgtctggcgcgacgtggtggcgtgaagcgtatcattggtctcatctatgaacaaactcgctgtgttctcaagatcttcctcgataacgtcattcgcgacgctgtcacctatactgagcacgctcgccgcaagaccgtcactgctatggacgttgtttacgctctcaagacgcaaggcaagaccctctatgggttccgggggtaaaagatttgggaattgga

SEQ ID NO: 20276 - DNA, 317 bp, Glycine max
  Clone ID: LIB3049-016-Q1-E1-D1
gattgggtggtgctgagtcaagaaagtggctgaaattgggttatggttttggggtgaatccaacagatccacgtttgagccacacacactttgtctttctggctttgttttcattgtcccaatcctagcccaaactttcttgtggctctgacaatcaattacccgttttgttttttactctttagactctccgccacctgaacattacgcatccaactcatagcattcaccccatcattagcaccgtcacttgttcgtttcaacgttcttctagtgatacgttaatgccttctgaatccgttcaaattttttcaact

SEQ ID NO: 20277 - DNA, 382 bp, Glycine max
  Clone ID: LIB3049-016-Q1-E1-D10
ggtggacgagatctgattatctagtttgctctggcttttggaaatccgaataatcaaaaccaaacacacgcaaggaagaagaagaaaccctaaaaaattattaagaaataagatgcggctgaatttgtgccacgtttcgcttggtttcgttctgaaattcctgaatttccttcaatgcttcgttggcctttccattctgctctattccctatggatgttcaacgaatgggaccatagtgtccctcctgatcctcctcttcctcccgccttccatttctatctcaaactcaattccatcaacctacccgctccatggttcatctacaatttcatgggaattggaatattggtgttatgcatttctttcttgggttgcattgca

SEQ ID NO: 20278 - DNA, 314 bp, Glycine max
  Clone ID: LIB3049-016-Q1-E1-D11
gggatgcttgacacatacttaaatgtcttggctttgtggcttctgtttcttctttttgctagttgggtggcatatgtgttttttgaggatacaatacaggggaaaacagtattcacttcctatggtactacgttgtatcagctatttcttttatttaccacatccaataatccagatgtttgggttcctgcatacaagtcgtcacgttggtattgcctgtttttcgtactcattgtgctggtgggagtttactttgttacaaacttgatccttgctgttgtttatgacagtttcaagagtgagcttgtaaaaca

SEQ ID NO: 20279 - DNA, 383 bp, Glycine max
  Clone ID: LIB3049-016-Q1-E1-D12
ggcaccaaaaatatgtagtcacgctcacacatgggatccaccttgatgcaacttttcttcttaaaaagatagatagaatctaatcacgctctttctccgctgcctgtaactcaaaatggcagagaattccaacggcaatggcgtctacgtcgatgaagaagaagaagaagaagaaataaagttgaagcagaaaaggcaaagactgaaagagaccttgccggaggtccttaaccgcatcgcctccgccattctcttccaggaacccgccgatgccggatccctacttcgccggatcaaggtctccgtcgccgacaacgctactctcctccccgaaagctttcagaaactccgcccgcgacgttctcatctggactcgccgcggc

SEQ ID NO: 20280 - DNA, 382 bp, Glycine max
  Clone ID: LIB3049-016-Q1-E1-D2
ggagattggatgcgagagttctgagaagaaaagagaagatcggtgagtgaggaagcaaatagcaatagcaccgccaccgtcaccactgccactgccactgccactagcaacagcagaatgggaaccttgggcagagttttctacgccgtcggattttggatccgcgagaccggccaagccatcgatcgcctcggctctcgtctccaaggcaactacctctttcaagaacagctgtctaggcatcgacctctgatgaatctgttcgacaaagctccctcggttcacagggatgcatttgtggcccctagtgcctccctcctcggcgatgtccacgttggccccgcttcctccatttggtatggatgcgttctcagaggtgatg

SEQ ID NO: 20281 - DNA, 399 bp, Glycine max
  Clone ID: LIB3049-016-Q1-E1-D4
ggagattggatgcgagagttctgagaagaaaagagaagatcggtgagtgaggaagcaaatagcaatagcaccgccaccgtcaccactgcgagtgccactgccactagcaacagcagaatgggaaccttgggcagagttttctacgccgtcggattttggatccgcgagaccggccaagccatcgatcgcctcggctctcgtctccaaggcaactacctctttcaagaacagctgtctaggcatcgacctctgatgaatctgttcgacaaagctccctcggttcacagggatgcatttgtggcccctagtgcctccctcctcggcgatgtccacgttggccccgcttcctccatttggtatggatgcgttctcagaggtgatgttaacagcattactaat

SEQ ID NO: 20282 - DNA, 378 bp, Glycine max
  Clone ID: LIB3049-016-Q1-E1-D5
cttgtatgttcataataagactcaataacctaattttcattcatattaagaaagatcattattgatgaatttaattaacagtgatgctaattaggatgaaaactactcacataaattcacaccaattcaaaactgacccatcaagttattacctaaacattcaagtagaagagaaaataaaaactacctctaatcagttaatggcaacataggattcaattcgtagaataatatttcctacttaatattatttttccttaactaatgataataaacattggctgtagtcttagatattttttttataagcaaataaattattgaatgaaagcaagacagaatgggtaaaagatgtaccaagttctgcgtatactgcaa

SEQ ID NO: 20283 - DNA, 356 bp, Glycine max
  Clone ID: LIB3049-016-Q1-E1-D6
gaagaataagaggaacagggaacaaaaccctgatgttgagataattgttgccacgcagaacggtaacgtggatagtgccaatggaatgcatgttagagaggcaaaaaaggagaaaacttccatcaacaaaaagagaaagagcaaggacaagaatctagttaggaaacgaaaaccgaaaggccaagaggttgatttggatgagcaaagtgatggagtagtggacaatcctcattctaaagctgaggagatccaagggttagatgggcacatagattctgattctggagcagctatcaaaccatgtaggtcaaagaaagacaagaagaaaagaaaggaggttcaagattcaccggaaa

SEQ ID NO: 20284 - DNA, 381 bp, Glycine max
  Clone ID: LIB3049-016-Q1-E1-D7
ggaagtttggaaatttgacacctaccccacaccatcatggcctgcatcgacaaattttgggttttcgccctcgctcttctcctcctcgcttcccctctcctccaagttgctaggtgccagtcagactctgatgatgtagtggaggctgctgaagaatcaggtgatattggcattgttggtgatgatgtccaagactttggtgatgggactttcccttctgctccaggaattgaaacaataagtgtatttccgaaaaatagtgcaagattgataacagctggagaagagtcagagctgcttgttggtgttaaaaatgatggggattcaagcttgaatgttattgcgatcaaggctagtgttcaccttccttttgatcaccgt

SEQ ID NO: 20285 - DNA, 399 bp, Glycine max
  Clone ID: LIB3049-016-Q1-E1-D8
gagagaaggaaagcgagagtcggaagagatttggcgcgagttgaaaaccctagtgagttccaatgatctccactcccttaacctcatgcaacacaccatattgggaaggttgcaggatagcaatgcggtgttgtcgcatttcaacgacttctctcagcactgctttgctgagatttccggcgacatcgctagaaacacgcgtgttttgaggtctgtcaagtccgaccttgattatatctttcagaagctcaggtattcttttttaggagggtagtttgtcctgaaaactgcatatttgttgagatgtttttgtggatgtaggcgagtggtgtcaaactattaaattatctgtctgtcactatttctatcagtgatgtgtttcctgtgtgatcctatagt

SEQ ID NO: 20286 - DNA, 245 bp, Glycine max
  Clone ID: LIB3049-016-Q1-E1-D9
ggatactctcactcgtgcattccaacctaccctttactcttcttcctcaattccacacttcagcatggatcgttttccgatcgtccttctcttcgccaacctcaacactctcgcctccggtgcccgccatgatattctccggttaccctctgagtcatctacttttttcaaatgcacccggcggcgatgaaaatcatgagggcacgatgtgggccgtcttaactgccggtttcaatggctactgg

SEQ ID NO: 20287 - DNA, 368 bp, Glycine max
  unsure (1)..(368): unsure at all n locations
  Clone ID: LIB3049-016-Q1-E1-E1
ggcacttcacatgtttttttttgtaacggttttgggtgtgagagtgaagagcacacttcaactatcgagaaccgttgacctccatggctgtgacatcacctcttgtcgtagcaggttctcaacttcggtgtcacaattttagaagaaccagacactgggctcttacactgagttgggaaaaacagcagctgaagagagcacagaagtgtggtggggatgagaatccatggaagccagtgaagatagtgatgcgtgtggttgatcatcatccaagggatggtgatgtctcctatggactgcacaaggatttggtctcncttccaaagccattatccatatctgatattgtggctgcttctgatgatcat

SEQ ID NO: 20288 - DNA, 339 bp, Glycine max
  unsure (1)..(339): unsure at all n locations
  Clone ID: LIB3049-016-Q1-E1-E10
gaggggcaaagagatcgaggaaggtgataatggaattttggccagaatttcttgctagtagtacgggtaaagagtttgtggctggaggatttggaggcactgctggtataatctcaggttacccattagacacgctccgtgtgatgcaacaaagctccaacaatggctctgctgccttcaccatcctcagaaatttggtggccaaggaaggaccaactgctctgtaccgtggcatggctgcacctttggcctctgttacatttcagaacgctatggttttccaaatttacgcagttctctctanggcatttagcacgtccgtttctgtcaacgaccctt

SEQ ID NO: 20289 - DNA, 318 bp, Glycine max
  Clone ID: LIB3049-016-Q1-E1-E11
gagtgcgatgaggataatgcagctggaagtgagattcgcagtgttgtcttggctgggcagcgcttttatgagaaagagggtctgcctgcagatcccatggctaaaattgatcagacccggatgtggaatgttggtgaccctgtctgttctacaaggccacctggtgatctacgtccatcatcaccatttactgctagggtctacctggcattgatgatggcccatattgacatcctgaggaagaacgtgcattcctactccgatactaataccgagagtgtcactgagtctgtcgattctctgaatcctatcaagcat

SEQ ID NO: 20290 - DNA, 380 bp, Glycine max
  Clone ID: LIB3049-016-Q1-E1-E12
gattgattaacatggtggtagtaaaacgcttcagccatacgtgacattgaatgttgcttctccttaattaggatgttactgataccgaataaaggttggatcaagaacagtggggacataacattgtgtccgtaggttccttcactcagtgcaaacatttcaccacacacttttttcaaacccaatcatcgctgttaacttggacaatatttcaaagaagataaacatgtgattctctttcagttccttgccttctatggggttgaacttggagcacaaccataaccataacaatttcatcatttcatgcacagtggtagaagttattatcctctgctcagctcaccctatataaatcccctaattacggcacttaaaaa

SEQ ID NO: 20291 - DNA, 375 bp, Glycine max
  Clone ID: LIB3049-016-Q1-E1-E2
cttcattgtgcctccgaaccaaaacctgaagcctagaaccttcttccgtctcacagtttgccggaatcagcgatggatcctcagcctgagccagttagctacatctgcggagattgtggaatggagaatacgctgaagcctggtgacgttatacagtgccgtgagtgcggttaccgtatcctttacaagaagcgcactcgtcgcattgtccaatacgaggcacgctgaagaaaactgctctgacattggcaagtaatttccatggaaattgttactacatctgtgttgtgatattgaagaactacttttaattctacagtaccattgcttttgggtgatgtttagaaaaggataaaaactttgaaatgtgaatat

SEQ ID NO: 20292 - DNA, 378 bp, Glycine max
  Clone ID: LIB3049-016-Q1-E1-E3
ggctgaattggaattggaaaatgcttgaggcaatggaaagttcggtcaatggtgggtttacccatttgcagagctgtggagatagcagcgaagaagagttatcggtgcttcctcgtcacaccaaagtggtcgtaacaggaaataaccgcaccaaatcggtgctcgttggtcttcaaggtgttgttaagaaagccgttggactaggtggatggcattggctggttcttacaaatggtattgaagtgaagctacaaaggaatgctcttagcgtgattgaagcacccaccggtaacgaggaagatgatgaccttgagtttgaaaatatgccgtggaatggatcagatttggcatcggacgatacacagaagttccacaagc

SEQ ID NO: 20293 - DNA, 342 bp, Glycine max
  Clone ID: LIB3049-016-Q1-E1-E5
ggagctagaattgaagttggccatataacataatacaacactatccttgcttcttgttagacatggcaactactacactcatgaagcttgctttcatgcttctcatgaaccttgttatctgcagcgcagaatcttccatcggcagaaagtccaatcctaacccagaagagttcgtgaagtcctcgtgcagggcaacacggcaccctgttctatgcgtcaagtctctgttggcctacgcaagcgtgattcgccgaagcgaccgacaactagccacgaccgctctgtcggtaagcatatcgaggagccgatcctccgcatggttggtgaagaagatgttgaaag

SEQ ID NO: 20294 - DNA, 357 bp, Glycine max
  Clone ID: LIB3049-016-Q1-E1-E6
gtcgctgtgaagccgcagctcctcgtcgaagctcccaaagccaacgacgccattctgttcttcaaggctgcgtttggcgctgaggaagttggccgtacgctcaaccctaagcgcaaagctgagcacgagctccctctcatactctccgcagaactcaaaatcgctggctccaccattctcgtcgccgacctcgttgatgacacttcttcgccagcgaaaacggggggaaacggtgtcgttttgtgcttggagacggaggacgtggatggggcagtagctaaggcggtgagcgctggtgcagttgcgaagggcgaagtagcggaaggtgaagtcgcgtgctgcggccggcgcgtgggg

SEQ ID NO: 20295 - DNA, 373 bp, Glycine max
  Clone ID: LIB3049-016-Q1-E1-E7
ggatccaaagacgcatcttttgcttcactcgtcatcactacgcagatcgcagcaaaccagactaaactccgacgatgcctcccgtcgctcctcgatccggtgatgccatattcgccaacgtcgaacgcgtcaatgcggagctgtttactttgacgtatggcgcaattgtgcgtcaattgctcacggatctggaggaggctgaggaggttaacaagcagcttgatcaaatgggttacaatattggaatccgtttgattgatgagtttttagccaagtctaatgtctccagatgcaacgatttcagagagacgactgatgttattgcaaaggttggttttaaaatgttcctcggtgttactgcatctgtgaccaa

SEQ ID NO: 20296 - DNA, 377 bp, Glycine max
  Clone ID: LIB3049-016-Q1-E1-E8
ggtcttgcaggcgaagagatggccaccgttccagggcagctcgtgtgggagatcgtcaagaaaaacaattccttcttggtcaagcagtttggaaggggcacccagggcgtcgaattcagcagagagagcaacaatctctacaacctcaattcgttcaagtactctggtttggcaaacaagaaaactgttactgttcagcctgagggcaaagatcaggctgtgttgttggctacaaccaagacaaagaagcaaaacaagcccgctgcattgctccacaaatctgtgatgaagaaggagttcaggaggatggcaaaagctgttgaaaaccaggtggccaaaaattactacaggcctgatctcaagaaggctgcccttgc

SEQ ID NO: 20297 - DNA, 227 bp, Glycine max
  Clone ID: LIB3049-016-Q1-E1-E9
ggcacagattagggtaaccaaagttccaaatcctacacgctacgattttaattttctggttttctctttttcaatcggtgcttcctccggcggtccgtgggactgtctttggcgcgtgattcctagttccccgcttacctatgcttcactcgactcacattgtacagttcatgccggagacatggctgaatctcatctgacgatagttatttcgcatcttcattgca

SEQ ID NO: 20298 - DNA, 380 bp, Glycine max
  Clone ID: LIB3049-016-Q1-E1-F1
gacggcaacagaagaataatcgagacacagatcatagtgatcattttttaatttctcagatttatccgacgtcgctgcaaatccaccaaccgttatggctgccttcagcggtgatgaaacggcaccgtttttcggcttccttggcgccgcagctgcccccgtcttctcctgtatgggagctgcctatggcacagcgaagagtggcgtgggcgtggcttccatgggtgtaatgagacctgagctggtgatgaagtcgattgttcctgttgtcatggctggagttttgggcatttatggccttattattgctgttattatcagtaccggtattaatccaaaggccaaatcctattacctctttgatggttatgcacatctct

SEQ ID NO: 20299 - DNA, 384 bp, Glycine max
  Clone ID: LIB3049-016-Q1-E1-F10
ggcacaagcaaagttctcccacaaacctcttctttctcttcctcccaaacatgtttctctttctctctctctctcttaattcctgaaaagcaagtagctaaggaaaacaaaaacatcatcacagaaactcacaaaggaaaaacaaacaaacaaacaaaatgtcttctccaagcaagcggcgagaaatggacttgatgaaactgatgatgagtgactacaaggtggagatgattaatgatggaatgcaagagttttatgtgcacttccatggacccaatgagagtccttatcatggaggtgtatggaaagtaagagttgagctgccagatgcgtatccttattaatctccttgcatatgctttatcaataagatctatcacccaa

SEQ ID NO: 20300 - DNA, 371 bp, Glycine max
  Clone ID: LIB3049-016-Q1-E1-F11
ggcgagccctggcagcacacacatctttgtgtctcaaaaatggaacctattgacaaccatctcacctctttcttccaccaccaccagcaacaacaacaacaccaccagcaccagcaccagcatccgccgccgccgccgccgaccacggcgtcgccgaccaacggtctcttgccgaacgcggatgggtcccacatgctgtaccctcactcggtcgcgtccgcggtgtcgtcgcagcttgaaccggcgaagcggaagcgggggcggccgaggaagtacggcacgccggagcaagctctggccgcgaagaaagccgctacgacgtcgtctcagtcgttctctgcggacaagaaagcccactctccgaccttccc

SEQ ID NO: 20301 - DNA, 371 bp, Glycine max
  Clone ID: LIB3049-016-Q1-E1-F12
gatgtgttctagcaattttcctgtgtcgtatcatcaaagcgacggattggtgggggtggcgccttcggccattggcacgtacacctcctaaaaacgacaactcgtttccacggcttggtattttagcaggcaaaacgcaaggacctgggcgagtggcgaaatggcagttccagcagagaggaaccacaaccatttctcagttttgatcgtactctttcttttcctcgtccacaatgctctctgcattaggttcccggatcggatcgcccaacccgccctcgacccgctcgaccaacaccgcctgcgggtcgccgtcttcgccctcgggaacctctggaaatccgaagcggtgttcggttgtttaccgggcg

SEQ ID NO: 20302 - DNA, 416 bp, Glycine max
  Clone ID: LIB3049-016-Q1-E1-F2
gggtcgagcacgcgtccatgcagatgccagaacacaatcgaaaggacaaactcttgccatgtaaacgtgataatcggtttccccttcaccttctcggttgctttttcatattctccccttcactccttcccctattgggctaaatattcatcatcagtgaccactggactcacaatgggagcactcaagtagtcagaacaagagttcctatgttacattaatcactttcctcagggaaacatgttatcatggtaggaatgagtcatatgtggttgttcctcctctgtggttgtacttcgtcgcgccctgatttgtacgctcctcctcttcagtgttaggtacacaaaagttgcgcataaaatgcataggtgattgctaaactgcctggtaaggtgagaattccttgggtaaccatt

SEQ ID NO: 20303 - DNA, 315 bp, Glycine max
  Clone ID: LIB3049-016-Q1-E1-F3
agggggagtcaatgcattcaggattcaccaattgcgttttggatccagataccggtattcttcgagatggcacgtactcacccaagtgctcgtatgtcaactggacgaaaagctcccaggaagcagcttgcaaccaaggctgcacgtaagtctgcaccaacaactggtggtgtgaagaagcctcatcgttatcgccctggaactgttgctcttcgtgagattaggaaataccagaagagcactgagctcctaatcatgaagcttcctttccagatgttggttcgtgaaattgcccaggatttcaagactgatctg

SEQ ID NO: 20304 - DNA, 372 bp, Glycine max
  unsure (1)..(372): unsure at all n locations
  Clone ID: LIB3049-016-Q1-E1-F4
ggagctgaaaacanacgaaacctcatccatggcttctcttctccgttgcaacggagtcttcctctcccccttacctccccaacccagacgcgaccccatccttcccaaattctttctcccccaatccccaaatcctaaaccgtcacgcctcctgacggtgcgcgcggaggtgaaagagacctcctccgccgccgccaccaccaccaccaccacttcctccgacgacaagatccgcgaaatcctccgcaaccgcgactacgacaagaaattcgggttcagcgtggacatcgagtctttgacaatcccaaaagggctctcgaaagaaaccatccgtctgatctcgtccctgaaagaggagccccagtggatgct

SEQ ID NO: 20305 - DNA, 365 bp, Glycine max
  unsure (1)..(365): unsure at all n locations
  Clone ID: LIB3049-016-Q1-E1-F5
gagagtgaaattggaaattgcatttgaataatgatgtccatattccggcaatacaccttggacgactcattctcgcaagtgttggtgtccccgaaattcctgaaggagtaccaaatagccctgaccttcgcaagcgactacgacgacgacggcgtccccaccaacggggttttccggccaacctgggacctaaccaaggtgaccccggaatcaatcacgcgattcaaggataagaaccccgacgtggacatcaaagtcttcatcagcatcggcaaccgcggcacccagcaccccttcaaacccctcaacaaccaaacctggatccagaacgccaccatgtcnctcaccagcctcatcaacaacct

SEQ ID NO: 20306 - DNA, 388 bp, Glycine max
  Clone ID: LIB3049-016-Q1-E1-F6
gaaaggacgaaattgagtttaagatctgattgggcggcgacgatggagaacaacgacagtatcatatcgcgggagaagatcgaccaggcggccgtgtggctcggctccgccgtctcttccgctttcttttcctctttggaacgcttttcctgcgtcaacgtcgccacctctgaccccgacaacgacgaagacgacgacgattattactccaccaccaccgccactcccaccgccgcatccaccaccaccactagccctccctccattcagatcgacgggaaaaaaacaaacgacgtctccaacctccccgtttgagacaatataacgacgacgtcgttgctgcgctgtgtatagacctttttccttttccttctttcgtgtgtgttat

SEQ ID NO: 20307 - DNA, 172 bp, Glycine max
  Clone ID: LIB3049-016-Q1-E1-F7
tggggaaacgacaattttaaatttcagatcagattgcgtctccacaatccttaacaacgacattaacaactcactttagaagatctaggaatcggccatctacctcagatactccctctcttccgcgatcactttcatcttactcacacgtttactgcgtcaacatcaccac

SEQ ID NO: 20308 - DNA, 375 bp, Glycine max
  Clone ID: LIB3049-016-Q1-E1-F8
ggaacttctcacgttcatttctacacatccctagctctgtcgttccgtcgttgacgatggcgtttcgggtgcgaagccctgacctccgctctctctttcttctctctctcttgtccatcgcttccgccaatgtcttcttcgaagagcgtttcgatgacgggtgggaaaatcgatgggttaaatcagattggaaaaaaggtgagaacgtggctggggagtggaaccacacctctggtcaatggaatggagacgctaatgacaaaggtattcaaaccagtgaggattacagattctatgctatttcagctgagtaccctgaattcagcaacaagggtaagacactagtctttcaattttctgttaagcacgaacaga

SEQ ID NO: 20309 - DNA, 377 bp, Glycine max
  Clone ID: LIB3049-016-Q1-E1-F9
ggaagggaagtaaataaacgacactcacactatactaaagaatttcgtttcgtttgtacaaaacaaaagctagcaccgttctgcggcggtcccctccgtcatcgtctttacagagcttccccggtgaccacaatcgccattcgccgccgcagacgacggcgctcatggctcagccgccgttcgatccgttctacctttaccaacatgatgagcagagcaacatcaacacgctatttgtctccggtccaccagacgacgtgaaggcgcgtgagattcacaacctcttccgccgccgccccggcttcgactcctgccaactcaagtacaccggccgcgctaaccaggtcgtagcatttgccacgtttttcaaccaccaa

SEQ ID NO: 20310 - DNA, 392 bp, Glycine max
  Clone ID: LIB3049-016-Q1-E1-G1
gatagcgaagtttcatttctttggagtacaaatttttcccaaagctgatcgataagccagccaggccaggagttgaagaatgggaaaggggaagatcgaaatcaaaagaatcgagaacacaacaaatcggcaagtgaccttctgcaagagaagaaatgggcttctgaagaaagcttatgagctgtcagtgctgtgtgatgctgaagtttccctcatcgtcttctccagccgtggccgtctctatgagtattccaacaacaacataagatcaaccatagagaggtacaaaaaagcctgttcggatcattcaagtgcgagcactaccacagaaatcaatgctcagtattatcaacaagaatctgctaagctgcgacagcaaatacagatgctgc

SEQ ID NO: 20311 - DNA, 377 bp, Glycine max
  Clone ID: LIB3049-016-Q1-E1-G10
gatcacaacactaacacagattttgattcgattcgattcgattcagtcgaggttttaagcagcagcaagatgtctgggcgtggaaagggaggaaagggattgggaaaaggaggagcaaaacgacatcgtaaggtgctccgcgacaacattcagggaattacgaagccagcgattcgtcgtttggctcgcaggggtggcgtgaagcgtatcagcggtttgatctacgaggagactcgcggtgttctcaagatcttcttggagaatgtcatccgtgacgccgttacttacacggagcacgctaggaggaagaccgttacggctatggacgttgtttatgcgcttaagaagcagggaaggaccctctacggatttggtgg

SEQ ID NO: 20312 - DNA, 384 bp, Glycine max
  Clone ID: LIB3049-016-Q1-E1-G11
aattgctgttgtactagagtatttagaagatgcaaaggaacatgggcaaaagaaaggagatgatttacttgcttcagtgcgaattattgggagctatcttgcagaagcacctgtagcatgcaaggagaaggttcaagatcttttagggtatatgctttctctcgaaggtgaagatgaacaaaggcccttctacgctgtttgctttctgctacctatgttgtctcaaattactatggagattgaaggatgcaaagctttggcttcatgtaaaggacttgaggccgttttagattgcttcagtaaattagttgggtcacatgcttttctggttgaggataatggttgcatctttatggcatgtgatacaataatgaatcttttatt

SEQ ID NO: 20313 - DNA, 379 bp, Glycine max
  Clone ID: LIB3049-016-Q1-E1-G12
ggggagcagtgatttgaaagatttagagagttgggggaagaagaagaagtgtgattgaaacatgcttcagattcggcttagtaaggctcctgcatcagaaggttcggcagggttgaagctgtcgccggttgagactgttacagttgcgtgccccgatcatcttgtccttgctgatcttccagttgcaaagggcattggcgccgccactgttgcctcccttgttaagactttgggccgtagatctcgccgccagcttggcgagcgagtccatttctgtgttcgctgtgatttcccgatcgctgtttatggacgcctgagcccttgtgagcatgccttttgtctggattgtgctagaagtgattcaatgtgctacctgtgt

SEQ ID NO: 20314 - DNA, 283 bp, Glycine max
  Clone ID: LIB3049-016-Q1-E1-G2
gacctcacccagttgcagaaacaaaagaccatcaaagtttcacttcagccttatccggttcagggtttcggtttttgacccaacctttgacgtggcgaaaccttaagtttccgatcacgtctgagcactctggttggtataacctttggtcttagagagtcatcgttttatgtctgaattacacgatcaaattcctactgccttcgatccttttgctgatgccaatgctgatgactccggtgctgggtcaactgactatgtgcatattcgcgtacaacaacga

SEQ ID NO: 20315 - DNA, 352 bp, Glycine max
  Clone ID: LIB3049-016-Q1-E1-G3
gatggcaagctgatacagcctagctcaacccagaagatgcaaaggatagccattactagtcatcgttcccgtttgggtagcaatgattgctcgaatcatcgagactgtgtctgataaggtaccagcacaccttttcgcataatcagtagcacacactgtgaatgaaccattgctggtggtaaacgtatatgacttagagccatcgaatgtctctgtatatatactacacatgcggtttaatgtgtggcacaatgaagagccggctcatcgtgcatagctcccaatagatttgagaagccgtattactggattactatgacatcatggggcgatagctggggagagaatggat

SEQ ID NO: 20316 - DNA, 392 bp, Glycine max
  Clone ID: LIB3049-016-Q1-E1-G4
gacacacatttattcatgaactgcctttgcagaaaacttttgtaaagacaaccattttagcaaagaaaattggtgtaattaaattctcaatcttctttacattttcactgtcagaactgtagcacgtgactctttagtgaaaccttcactccatggtttcctcattgccctttgaagcttgaactcggataaagatcgtgactttggctgattctggaaatgggttctcggattcagcttctgcctatttgcttttggctgcacttgacatgcttcagcttcttttttggtagcatagtgagtgtgagaggagatgcaactgtgcaagggagtgttgccattgatggcaaggctgtgattggaaacattgatgaagattttgtgtgtgcaac

SEQ ID NO: 20317 - DNA, 363 bp, Glycine max
  Clone ID: LIB3049-016-Q1-E1-G5
ggagtacagaaagaaaaggactatccatacaccgggagagatggcacctgcaaatttgacaaaaccaaagttgcggctactgtatctaattacagtgtggtttcccttgatgaagaacaaattgctgcaaacctagtaaagaatggccctcttgcagttgctatcaatgcagtttttatgcagacatatgttggtggcgtctcatgcccatacatctgtgggaagcatttggatcatggggttcttctagttggttatggtgaaggtgcatatgctcccattcgttttaagaacaaaccttactggatcattaagaattcatggggcgagagctggggagagaatggatattacaagatctgc

SEQ ID NO: 20318 - DNA, 367 bp, Glycine max
  Clone ID: LIB3049-016-Q1-E1-G6
ggttctagtgtgtgattgtttgttgttgtaactcgttcttcttcttttgttgttctgtgtttgtgtttgttttttctctcacctgaaaatgtcttactgcggtggtaactgtggttgcggaagctcctgcaagtgcggcaacggctgcggaggctgcaagatgtacccagacttgagctacactgagtcaaccaccaccgagaccttggtcatgggagtggcacctgttaaggctcaatttgagggtgctgaaatgggtgtgcccgctgagaacgatggctgcaaatgtggaccaaactgctcctgcaacccctgcacttgcaagtgaagtgttgggagagcaagcttcaagcagagatagccctta

SEQ ID NO: 20319 - DNA, 332 bp, Glycine max
  Clone ID: LIB3049-016-Q1-E1-G7
gaggaacttgaagctggtattcagtctgttgatagtctgtcaagcactcccactggagtggaaacacctgatgttattgacctccggaagcaacagaggaaggagcctgagaggcctctttatcaagtactcgaagagaaggaagaaaaaattgctcctggaactttgcttggaaccactcacacttatgtggttggcactggcacacaggacaagtcaggtgctaaaagggttgatctgcttagaggtcagaagacagataaagtagatgtcactttacagcctgaagagttggaagccatggaaaatgttttgcccgcgaagtacgaaga

SEQ ID NO: 20320 - DNA, 397 bp, Glycine max
  Clone ID: LIB3049-016-Q1-E1-G8
gggacgcacatccggagggaccaaagtccagtaataaaaagacaaaaacagcttctgacaagcaaaaaccgagcccaaagtgttctcagaagaagatgaaaggcagtatgtctaatagataacgaataagatgatgcctgtctagatactgattagtgatccagaaacgtagaccaaagaggtcaagagaagaatataaatgaaaagtttgaaaactccacattccagagcggacccattttccacctccacgtgatttcagtctggaggttctaaagcagaaaccattcaacacgccttaagatgtggtggtgacttctcacaatagaataatttactaaatacttggccgtaagtattctatcaaacttgtaaattgacatttatggagagattg

SEQ ID NO: 20321 - DNA, 231 bp, Glycine max
  Clone ID: LIB3049-016-Q1-E1-G9
tgggggcgttcttcaattgaggcatgttattctctgctcactcttccaactactactgttgttcttcttcgtcgtcttggtcttcgcatcttcacaatcacatccaatagagacacgttgactttgctggaagaagaagatgaagagaatggaacaatcgcatttggatgacataatcaatcgcctcctcgaaattcctaccctaccggctaagcaggttcagctatccga

SEQ ID NO: 20322 - DNA, 387 bp, Glycine max
  Clone ID: LIB3049-016-Q1-E1-H10
gggcgacagaaactgcgaaggtgactgactgagagagaagagaaaaacaatgtcagggctgaaggaattgctgaagaaagggttaggtttaggcgacatggcgttcaacgccggcggcggagccataacctggttccccggccacatggccgccgctacacgtgctatccgccaccgcctcaaactcgctgacctcgtcatcgaagttcgcgacgctcgcattcccctctcctccgccaacgccgacctccagccacacctctccgctaaacgacgcgtcgtcgcactcaataaaaaagacctcgccaaccctaacatcatgcataaatggacgcattaattttgagacgtgtaatcagaattgcgttgcgatcaacgcgcacagca

SEQ ID NO: 20323 - DNA, 318 bp, Glycine max
  Clone ID: LIB3049-016-Q1-E1-H12
gatctcgcgttggtgcaaagcatccttcgcttcaatctctctctctctctttgcgctttctgcaaaccgaacatttcatctccaaagggatcaacaggtcgaaggagaaatggggctgacattcacgaagcttttcagccggcttttcgcgaagaaggaaatgcgaattctgatggttggtcttgatgctgctggtaagaccactatcctctacaagctcaagctcggagagatcgttactacaattcctaccattgggttcaatgttgagactgtggaatacaagaacattagcttcactgtttgggatgttggtgg

SEQ ID NO: 20324 - DNA, 278 bp, Glycine max
  Clone ID: LIB3049-016-Q1-E1-H2
gcttgatggacgcttctgatgaagctctagaaattagacggcgagcaaaagactttgcccaaaaggccagacaagctgttctagaaggaggttcatctcacaacaatttaacggccctgattcatcatcttatacttctcaggcacgccaggcttctcgcttaatcaaatactcattaatatatgtatttttcgcatttagttgcttcttcaatggtcataaatgcatccacattgataaggaaaacctaaaaaaataaactggtatatgattaccct

SEQ ID NO: 20325 - DNA, 311 bp, Glycine max
  Clone ID: LIB3049-016-Q1-E1-H3
ggaagttcagaccacttcaaaattcaaatttgaaaacagcgatatacaaatacagaaatggcattattgtccggaaacatcaacggtttgtaccgggagaacaaaaccaccgccactaacaaatctccgattctctcccaggccatcatctccctcggcggcaaacccgacctacaacatgagcacacggacaccgacgtggtgctcccgcaattccacctgaccatggcgtactggccttgcacccggactaccaggctcgcacggtgggagcgcgcacacatgctccacttcaaccctccgcaggaact

SEQ ID NO: 20326 - DNA, 413 bp, Glycine max
  Clone ID: LIB3049-016-Q1-E1-H4
gtcgacccatgcatccatacggcagagaacaaacgacagggatccatctctctaaacaacacattaacctttctcattccccatctcctcaccttattcagccactgctaatttctagggttccgaaatggacgctggcggaaagatcaagaagggcgccggaggaagaaagggcggcggccctaagaagaagccggtttcaaggtccgtcaaggccggtctccaattccccgtcggaagaattggccgttatttgaagaaaggaaggtacgcccagcgtgtcggtaccggtgctcccgtttacttggccgcagttctcgagtacctagctgctgaggtgcttgagttggctgggaatgctgcacgtgacaacaagaagaacaggattattccgagacatgtgctattggctg

SEQ ID NO: 20327 - DNA, 363 bp, Glycine max
  Clone ID: LIB3049-016-Q1-E1-H5
ggggatttggcgaagtcggtttagggtggaaaaggataagaatgacggtgtgcgcagtgcgcctttccctcacacacactccctcctaattgcaatttaataaatccacctcactccttcatccattgaatgattctatcttccaatggatcctcctctcatcactgactccacattctcccccgcttactctctcgccgagatttggcccggaatgccccatttcccccctcccttcatctacgtctcctccgccgatcactccaccctcaccgacctcactgccaccccgcgcaagagaaaggattgctcctcatcgtcgtcctccgcctccgccgccgccgccgacgacgacgactgctc

SEQ ID NO: 20328 - DNA, 380 bp, Glycine max
  Clone ID: LIB3049-016-Q1-E1-H6
ggaggaccacttgaagatgtttcagatggctggtgcattgaaaagaaaagaacctgatggtggttgggagggagccgagagattcggttacaaacaaacttcatggcagtagtgccatggctcttcaacgcaaatattcaagagctattttggaaaatgtcagaaaaattggggatattattttgagtgttgagccatggacaacaagcaaagatgctacccttgttgctgatgtgcctcttcggttctgacttgataaagcgatcagggcctctgatgcagttgttttgtatgaatctgctcccagattgtcgcttgcagataaatgtttttcctgtgtagatatctgactgaaaacagcatgcgtgataatgccgcct

SEQ ID NO: 20329 - DNA, 225 bp, Glycine max
  Clone ID: LIB3049-016-Q1-E1-H7
gaagttcagaccacttcaaaattcaaacttgaaaacagcgatatagaaatagacaactggcattactgtccggaaacatgaagggtttgtatcgacagaacacaaccatcgccaccaaaaaatctcctattctctccccggccatcatcaccctcggcggaaaacccgacctagaacatcagcacaacgagatgcacgtggtgccgccgcatattcgacctgaac

SEQ ID NO: 20330 - DNA, 354 bp, Glycine max
  Clone ID: LIB3049-016-Q1-E1-H8
gatcccatatccttttgttttgttctcttcagtctgtttgcgagtgcgagtgaaaaaaaatgggtgggggaggagctatgaggtcggcggcgaatatagccggaattggcgtgtccaaagcagcgctccggccttcggcgctccctacggagcagacggtccgcaacgcgtcgcgaccaacggcggtctccggagtgtcgtcgcagtcagcgaaatccgcggatgtggcgccgctgcacacggcagctgcctgagacgattgggacttcgccgacgatggcgaattggtcgtgccgaggatggtgttcggttctgtccccactctcgatgaagctaatgaagccaccgcagagt

SEQ ID NO: 20331 - DNA, 375 bp, Glycine max
  Clone ID: LIB3049-016-Q1-E1-H9
ggcagttcaaagcgaagaaagattcgaaacgaagaaagaaagcgttgtgaagaatggcggaagagggacaagtgatcggtgtccacagcgtagaggagtggaaggaacatctcaagaagggagaagagtccaagaaattgattgtggtggattttactgcttcttggtgcggtccatgccgtttcattgccccaattcttgcagagtttgctaaaaagttgccgaatgtcaccttcctcaaggtggatgtggatgaattggagactgtttccaaggagtggggaattgaggctatgccaaccttcctgttcttgaaagaaggcaagctggtggacaaggttgtgggtgccaagaaagaggagctgcaattgacaa

SEQ ID NO: 20332 - DNA, 282 bp, Glycine max
  Clone ID: LIB3049-017-Q1-E1-A1
gagataacaatcatcatcccctctccccaacggataaagagagagaagggtcccttcattctctcacacagaaaaatggcagcgtcagtttcgtgctcatggctaacccttccctcccaaatgaggagcctctccctcacatcctcttcttcatccctttgcatctccaattccgcttctctcagtttctccagaaacctctcacgccctttcttctcaaaaggtaactccttgtcgctaagcacagtactgaggcgcgcgtctgtggtttgcgaggctgcg

SEQ ID NO: 20333 - DNA, 346 bp, Glycine max
  Clone ID: LIB3049-017-Q1-E1-A10
gaacctcatgcattctattcttctctttctctctctctctctctcactttctctacctttctatgaatttctgttgcattaaattttctctgcagaaaaaaaagagcttccacaatggtaagcgctgcaattgctcgtaacgtcgtcggcgtaataggcaatatcatttcctttggcttgttcttttcacctgctccaactttctatggaattgtaaagaagaagacggtggaggagttcaagccagatccttatatagcaacggtgttgaattgtgcgttttgggtgttctatggaatgccttttgtgcacccaaacagcattttagttgtcactatcaacagcg

SEQ ID NO: 20334 - DNA, 333 bp, Glycine max
  Clone ID: LIB3049-017-Q1-E1-A11
ggcagcgcttgatttgaggccaggcaagccccactcaaccaccacacctctcctcgttcacgctacccctttctgctcttcttctacctttcaagttttaaaagtataaagatggcagagacattcctatttacctcagagtcggtgaacgagggacaccctgacaagctctgcgaccaaatctccgatgctgtcctcgacgcttgcctcgagcaggacccagacagcaaagttgcctgcgaaacatgcaccaaaaccaacttggtcatggtcttcggagaaatcacgaccaaggccaacgttgactacgagaagatagtgcgtgacacctgc

SEQ ID NO: 20335 - DNA, 370 bp, Glycine max
  Clone ID: LIB3049-017-Q1-E1-A12
gggtgacaagggagcaagggtcctttgattggttcaaaggggtgatgaatgaggtggctgaagaggatcataagggggtgattgagctccacaactattgcactagtgtctatgaagagggtgatgctcgctcagctcttattgctatgttgcaatctctaaaccatgccaagaatggcgtggacattgtctctggcacgcgtgtaaagtcccactttgctaaacctaattggcgcgctgtctacaagcgcattgcggttagtcatccacgagctcgtgttggggtattttactgtgggccaccagcgctaaccaaagagcttggtcagttagcttcggatttctctcacaacacaaacacgaaatatga

SEQ ID NO: 20336 - DNA, 315 bp, Glycine max
  Clone ID: LIB3049-017-Q1-E1-A2
ggtgcacagaattaacacagagagagaaataaaagagaaaccctaattttgttactgttattcttcttcaaagaaaaccccaaatttgaacgcttcaaattcaattcaggaaaccctagtgactaatctcgttgcgaaacggcgattgaagatgatcgtgagccagaaggtggtagcggaagcggaaattatctgtcagcagaacattccgatgttggacgtgaagtatcatatttgcgtggcgcaagaacacaacgtgaacgttgacgtttctcccaaatcatcttcacctttccctccgatcttttggcaagc

SEQ ID NO: 20337 - DNA, 303 bp, Glycine max
  unsure (1)..(303): unsure at all n locations
  Clone ID: LIB3049-017-Q1-E1-A3
ggtattagcacaaaacaaacaaaccctaactctaacccttgtcgaaaccccttatccgatcatggctactgatgcccgtgactcgcgtcgcaagtatcgccgatcatcctctccggaggacgtggacagatcctcgaagcgccacaagcaccgccaccacagccaccgccaccgccacgggagcaaaaaacgcgacgaagagattaaattcgatgatcgaacaattggtgcggttcctttctcaactccgcacgggcatctcnctgacgacgatgatgtggaggaaggagagattcttgaaga

SEQ ID NO: 20338 - DNA, 307 bp, Glycine max
  Clone ID: LIB3049-017-Q1-E1-A4
gacaagaaaactgtagaaagagtaagaaggatttggaattgacaatttccatggcggcggcgacgaacttgttagcaacactgggggatctggagagggactccttcgtggctcttctttcgaagctgatcgctgaatccaagtacgtccagaacaacccgccggagctcattccccaagaggacagagtggtgaagcacgtcttggacgttctgttaccgttcagcaccaccatcggcggtggacccttgcccgttacacacgtcagctaacacgcccggcagagggaacctcatcgtggagtacc

SEQ ID NO: 20339 - DNA, 296 bp, Glycine max
  Clone ID: LIB3049-017-Q1-E1-A5
gacgctcaattcattttcttctcctctctctctctcctagggttagggttttctctcttcatcactctctgtgtcgctccgtttcaatggctcagcaagacgctcaaaacggcgggtcggagaatgccgctgctgctgctacggtgtcgtttgtcgctgtgaagccgcagctcctcgtcgaagctcccaaagccaacgacgccattctgttcttcaaggctgcgtttggcgctgaggaagttggccgtacgctcaaccctaagcgcagagctgagcacgagctccctctcatactc

SEQ ID NO: 20340 - DNA, 359 bp, Glycine max
  unsure (1)..(359): unsure at all n locations
  Clone ID: LIB3049-017-Q1-E1-A6
gccttcaacgctcagcactcaaatcctctgagagaaaaaaaaattagggttttgcatttcgggtcagacagactcagacatgggaggaggcaatgcccagaagtcaaagatggctcgcgagaagaacctcgagaagcagagggctgccgctaagggaagccagttggattcaaacaagaaagccatgtctattcagtgcaaagtgtgcatgcanacatttatatgcaccacatcagaagtgaagtgcaaggagcatgctgaagccaaacaccccaaatctgatctccatgtttgttttcctcatcttaaaaagtgaaagagtgcatgttgaggcatgatatatcaatatatggcctgtt

SEQ ID NO: 20341 - DNA, 301 bp, Glycine max
  Clone ID: LIB3049-017-Q1-E1-A7
gatgacatatctccaacataaaggaccacctcaccctccccctccattactcccactgcatcttcttcaaattcctgtcctgaagatgacagcaaagtggtatctcattgtgtgtgttgtagcgatctgggccgttgatctgggttcatcatcacaccatgcccgtgccccagcaccagcaccgtcagtggagtgttcaaacctggtattgaccttatcggattgcctcaccttcgttagcaacggcagcaccgtcaccaagccacagggaacatgctgctcttccttgaaaactgtgctc

SEQ ID NO: 20342 - DNA, 257 bp, Glycine max
  Clone ID: LIB3049-017-Q1-E1-A8
gagagtagtttatctatctgcaacagcaacagggtgacagtgacactgtcgtaggatggagaaggtggtatgtgtgaccggcggcagtggctgcattggttcatggctcgtccatctcctcttggatcgcggctacaccgttcacgccaccgtccaaaatctcaacgatgaggccgagacgaagcatctacaatccctcgacggagcgtccacacgcctccgcctcttccagatggatctcctccgccacgacaccg

SEQ ID NO: 20343 - DNA, 367 bp, Glycine max
  Clone ID: LIB3049-017-Q1-E1-A9
gataggaagtttatagcaaacatttcagtctcaaacggagtgttaagggaagaactcctcaaatggagacacctttagtgatccagaagttcacttcagaatctgactacttgccggtgaaaagcttgaaggatttgaagtttgttttgtggacagagacagtgaagatatggagaatagcattccctatggcactgtctgcactgcttcagtttctcacaatctcctcaacttccatctatgctggccatcttggagacactgaactttcttctatctctgtttaccaaggtgtcatcagtgccatctattttgacttgttgtttggtatgtcatctgcattggtaacactttgtggccaagcttt

SEQ ID NO: 20344 - DNA, 383 bp, Glycine max
  unsure (1)..(383): unsure at all n locations
  Clone ID: LIB3049-017-Q1-E1-B1
gaattcagagagagagagaaagagagtctcttgctctgtatctttgatttgatcattccaatcttcaatttttctatatatccatcaatccgctgagtgcaaagttctaatctttcgcctattgggttctactcctttctctcttcgtttccgatcgatccaattttcttcccatggctacgatcggacacaacaatctcaatgccaaattggttcttctcggggacatgggtgctgggaaatccagcctcgttttgcgctttgtcaagggtcaatttctcgaatttcaggaatcaacaataggggcagcgttcttttcacagacgctggcagttnatgacgcgaaggtaaagtttgagatatgggacacagcaggacaagag

SEQ ID NO: 20345 - DNA, 360 bp, Glycine max
  Clone ID: LIB3049-017-Q1-E1-B10
gacacacagctattcctcttaagcttgctactgagtttccacactgcataccttaggtcttccgaattcgaagttaatttgcaagatggctaaggaaaaggctcagatcaacattgtggtggttggtcatgtggaccctgaggaggcaaccaccattaacgagctgaagaagcctgttgtggagaaagaagctccagggcatgccatatgagggcatgcacgtacggcctcggaggggaaccagaaaattatgttaacaaaataatctggaaccctaatgtatcagtgtcatcatcagtgtgtagtttaagctagctttgctatggttacgttctttgagatgagagtcttgatgaacag

SEQ ID NO: 20346 - DNA, 280 bp, Glycine max
  Clone ID: LIB3049-015-Q1-E1-C10
gactcacttcagtgtcattttttcttattctcttcctctctctctactctgagacacaaaggaaaattataagaaattatggctggttattcaaaagcttcagctctttggatcctttttcttctctttggcttctctgtagctaaggaaattttggttggaggtaagactgatgcatggaaagtttcagcctctgaatcagattcactcaaccaatgggcagaaaagtctcgtttccaagttggagactatcctgtttggagatatgatggtggaaaag

SEQ ID NO: 20347 - DNA, 345 bp, Glycine max
  Clone ID: LIB3049-013-Q1-E1-C10
ggcagtgatagagataagaaaatgtggcttgtgcagctctcaaccccatttctgaacggacatggtcattccaccacccttctctccaagcacagttcggcggtgactcagacccactgggccccaccgagtttcctgcctcaaatcaatgcgatgaagacaatgcaggggagagtggtgtgctccaccagcgacaagacggtggcagtggaggtggtgcggctggcccctcacccaaagtacaagaggcgcgtgaggaagaagaagaagtaccaggcccacgaccccgataaccaattcaaagtcggcgacatcgtccagctccagaagaccaggcccatcagc

SEQ ID NO: 20348 - DNA, 378 bp, Glycine max
  Clone ID: LIB3049-013-Q1-E1-C11
gacccacgcgtccacccacgcatccgcccacgcgtccggacgacagaagggggatttgaggttgagagattgagtttcatattaacatagggaaaggttgcagtttggttaatttaacattttcaagtgtgcagggaggcatggttgaggccttaagcatttacaagaagtggaaatgctacagcttggactacgaaggatctcggaagctggttttcagcttgagagaacccaattcttgtttggttaagaacaatgcaatcagaatcttcactaggaacagaggccgtgactttaagatcagtggctgtttcccggataagtgttgtagcattgttgactctaaaggcaacgaggtagcacaagtggggatgatga

SEQ ID NO: 20349 - DNA, 346 bp, Glycine max
  Clone ID: LIB3049-013-Q1-E1-C12
gatagaaagagaaaatgaagtcggtgggtagggttggcggaggagaatcagagcaacgtggacattttcagatgccactgcactatccaaggtacacacaggctgactatgaaacaatgcctgagtggaggcttgattctttgctcaaagagtacggcttaccaatcattggagatcttcatcaaaagagaaactttgccatcggagcctttctttggcctcactgaacctcctttgtttgtaatcatcatcactaattaagcttattatctactatttttgtgtgatttggcagtgcggtacatattttcatttcttcgtttcagagatatatatgttagaaact

SEQ ID NO: 20350 - DNA, 267 bp, Glycine max
  Clone ID: LIB3049-013-Q1-E1-C2
gaggtgacctcatccgtggttgttgagattgagaaaaatacagagaggcactgtagatcagatgccagatcgaaccaccaagacctgcaatttttaattttcattcagattcccttttcacttttaattcaaaaccctaattttcttttttccaccctccagcgtcgccgtttctcaacaagtcttaccctaatcgtcaaccattcaccaataacgagttcagagacccaaactttgtgctaattagttcattccccagtacgcact

SEQ ID NO: 20351 - DNA, 328 bp, Glycine max
  Clone ID: LIB3049-013-Q1-E1-C3
atctgtgaaaacattatatggaaggcatttagtcccaccactattaacagtggacgtggagctgaatttgaaggtgctgttattgctctgttccatttgctgataactagaacagacaaggtccgtgctcttcgtgaggcattttaccggcagaatcttcccaacgtgacaaatttgcttgctactgtcttgatcttcctaattgtcatatacttccaaggtttccgggtggtcttgcctgtaaggtcaaagaatgctcgtgggcagcagggttcatatccaatcaaattgttttatacctccaatatgcccatcattcttcagtctg

SEQ ID NO: 20352 - DNA, 348 bp, Glycine max
  Clone ID: LIB3049-013-Q1-E1-C4
ggcaactaagtagagaataaaatcaaatcaggagagcatgcatatgaacatgatgatgaagaaggtgtgtgggtttgcaatagtgatggtggcagtgcagcttctggtggaggtgagtcccaaggcagaggctgtgacttgtacccctgtggagctgagtccttgtttgggggcaataacttcctctcaaccaccatcaacaatttgttgccagaaggtgagggaacaaaggcaatgcctctgtggttacctcaaaaacccaagtctaacgccatatgccaattctcctggctccagaacggttgctagctcttgtggggttccctttccaacttgttaattaccttc

SEQ ID NO: 20353 - DNA, 353 bp, Glycine max
  Clone ID: LIB3049-013-Q1-E1-C5
gaagagatttgggggacatattgtggctggatatgcgtgtcaggtcaatttttctccagatggacgatttgtcatgtcgggggatggtgaacggaactgttggttctgggactggaagacttgcaaggtctacagaactctcaagtgtcacgaacgtgtttgcattggttgcgagtggcatcccttggaacagagcaaggtacccacgtgtggctgggatgggatgattaagtattgggactagtttctcctgatcaacctgttgctggaatcagttggcacaagcagggcaaagaaaggcactacttcacgacaggacagataagaaacattgaattcaaaatgttgaaaaa

SEQ ID NO: 20354 - DNA, 357 bp, Glycine max
  Clone ID: LIB3049-013-Q1-E1-C6
gactccagtgtggaaaatcaaaacaaggtgccatctttgtttgttagacatgaccatggccatgcccctgtgtctgatgttccttcttctgcacatagcttgggtggcatcgtcggatctccgacctgggttttactcaaaaacatgtccaaaagcggaactcatagtccgagatgtgatgaagaaggcccttatgagggaacccaaaagtgttgcctctgttatgcgcttccagttccatgattgctttgtcaacgggtgagatggttctatgttgcttgatgatacaccaacgattctgggggagaaattgagcctctcaaatataaattcgctgacatcgtatgaagttgtcga

SEQ ID NO: 20355 - DNA, 353 bp, Glycine max
  Clone ID: LIB3049-013-Q1-E1-C7
gccactaacagagccattaaatcttctctcaacatatttgtgattccatgcccaacgccctaccctgaaaatatggtagccgagagagatgttaacggtaacggcctcggatagggaagaacaacgctaatattcacctacggaaccctgaagcgaggcttctccaaccacccccttctccaagacctcattcgctccggcgacgcctccttcatcggaacctaccgcaccgccgccaaatatcctctggtctgtgggccttacaaggtccccttcctcctcaacattcccgggtcgggtcatggggtccatggcgagctttactcggtctccacgcgctgcctcaagcgcat

SEQ ID NO: 20356 - DNA, 391 bp, Glycine max
  Clone ID: LIB3049-013-Q1-E1-C8
ggttctagtgtatgtgattgttgtgactcgttcttcttcgtcgttatcttcttcttttgttgtttgtgtgtttgttttttctctcacctgaaaatgtcttgctgcggtggtaactgtggttgcggaagcgtctgcaagtgcggcaacggctgcggaggctgcaagatgtacccagacttgagctacaccgagtcaaccaccaccgagaccttggtcatgggagtggcaccagttaaggctcaattcgagagtgctgaaatgggtgttcccgctgagaacgatggctgcaaatgtggagctaactgcacctgcaacccctgcacttgcaagtgaggtgttggagagctaaagcgtcaagcagaaatggcccttagaaataatgataaaaact

SEQ ID NO: 20357 - DNA, 199 bp, Glycine max
  Clone ID: LIB3049-013-Q1-E1-C9
gataccaaacccaacccaacccaaccaactatatttcaaccagccgcggcgactaaacaacgaccacaccctcaaaagcatttcgaactaccaactactctctctatcactctcccatggcttcctcttccctctttctcgcactctctctcagcctttgcgctgtttcctctctctgctcagcacacatatcttcctt

SEQ ID NO: 20358 - DNA, 310 bp, Glycine max
  Clone ID: LIB3049-013-Q1-E1-D1
ggtctcgagcaatagcaacacagcaatagcttctggtgatctcgttttctcacattgctctcttccccctttctctctcctctttctctctcttccattgcttctccataagcaacgccacgcgaggtcaattgcgcaatcgccatgactgtgatgactcctgctcccattgaccagcagcaggaggacgaggagatgcttgtcccgcacacggatttagctgagaataatcaccaacccatggaagttgtggctcaacctgatgctgccaacactgtggagagtcagcctgtcgaggattcttcaacgt

SEQ ID NO: 20359 - DNA, 334 bp, Glycine max
  Clone ID: LIB3049-013-Q1-E1-D10
gagagtcagtcagagatatagaaatggcttcgtggtgcagtgttcgaagcttccaggttccggcgatggaaggcagcgcactgcgcaaccgtgcttcattggccgccagagtggggtgtttgtccgtggccggcacctccttctggcgttcctcttcgtcaccgaagcactctttgtcattcacatgcttgagcatttcttccgaaactcgtattaaggaaaatgttcaaacagaaggggcacctgcggctctgggaccatattctcaagcaatcaaatccaacaaccttctttttgtgtctggtgttcttggccttgttcccgagaccgggaa

SEQ ID NO: 20360 - DNA, 347 bp, Glycine max
  Clone ID: LIB3049-013-Q1-E1-D11
atttctagtgatattgttactttcatccgatctcaacacaaggataggaaactaaggctgcttaaaatggaggatgtaagcatgggaatgtgggttgagcgatataacaataccattgcagcagtccagtactcccacaattggaagttttgtcagtatggatgcatggagggctacttcactgcacattaccaatcaccaaggcagatgatctgtctttgggacaaattgtcaagaggtcgagctcgttgctgcaacttcagatgaccacacgaacaactttgcttcttggacgtgtcactgtatctctgtattctttatacccttgtgctgatcctaagttcacc

SEQ ID NO: 20361 - DNA, 343 bp, Glycine max
  Clone ID: LIB3049-013-Q1-E1-D12
ggtgacagaacagcagaagggaagaagatggacttactggagttatgggcaattttcggccccggcgtcgccggcgctgtcttcggcgccggatggtggatctggcttgacgcggtcgtctgcagcttggtcaccgttcccttccttcactaccttcccggaattttcgcatcttttgcggctttgatgttcaattgcgttagaaaagaagacatcgattattctccatatgacgaaggcgagtggagactgaagctgtggctcttcattgcatatgttgtatcctttgtttctttagctggatcagctggcctactgatccaagattcacttgataaatctg

SEQ ID NO: 20362 - DNA, 375 bp, Glycine max
  Clone ID: LIB3049-013-Q1-E1-D2
gaagggggaacagtggaacaccgcacccgttgttgcgatgctaagctttgcactgacacaacatctttctcttcttcgaagttgtattgtatctgttcacgacgctcttctcgcacattctttcgctcctctctcttttaccgtctctgtacttgctttctctctgactttacctcgctcgcttttcacatctaataagcacagtaagagttgaagaaagacagtaatttcaatgtacttgaggagaatacaatgcagagatcggacatgggctttggtgttgcagccatcgaaatacttctttaggccaagattctctgatcaacgatattttcaatctttgtcccctaagaccactgtggaaaaatatgcttc

SEQ ID NO: 20363 - DNA, 363 bp, Glycine max
  unsure (1)..(363): unsure at all n locations
  Clone ID: LIB3049-013-Q1-E1-D4
gagaagaaggttggttgattggtcncattgattccgaagagaaaagaaaagatgtttgagccacaacagctatacactcgcgcgaagaccgaggaattcgacctcgaatcaggagaaaccctctacccagagctgagcgtcggcgagaaccagctccgatggggtttcatccgcaaggtctacggcatcctctccgcgcagatcgtcctcaccaccctcgtctccgtcaccaccgttttctatactccaatcaatgacctcctcaagggcaattccaccctcctcctcatcctcctcttccttcccttcatctttttgattcccctgttgaagtaccagcagaagcatcctcataattacatc

SEQ ID NO: 20364 - DNA, 357 bp, Glycine max
  Clone ID: LIB3049-013-Q1-E1-D5
ggagactgcttctgttttatatcacccaatgcaacactctcttctaattcccatctacagttagccccaaatctggggttagggtttcctctgcgtcgatggcttcgaattcgatcgacggcgacgccgttacggggtcgggactgtgcataaacgacgtgttaagggacgacgagctgcgttccattctggggcgagtggagagcgagaaggacaaggaaacgttcgggttggtctgcaagcgatggcttcggttgcagagcacggaaaggaagaaactcgccgcacgtgcgggtccccacatgctccgaaaaatggccgataggttcacacgcttagtcgaactggacctcgctc

SEQ ID NO: 20365 - DNA, 332 bp, Glycine max
  Clone ID: LIB3049-013-Q1-E1-D7
ggtgctctttcgtggttgtgccacctctataattctcttccactgtcttgtgttctcctgcaagcctgcaaccacaaaaaccaaatagtttttttggtcaaactcaaagcttttaacttaacagaagcaagaatggtaaaacggagttaagcaagacaaaggaagaaagaatggtgagagagcataacattaacagtggatggccaccaataggggccccactactgaacgtgcagagagatgagtatgatcagcattggagcagcttcgatagctctgtgaatgctgtttcttttggctttgttgccactgccattcttgtttccatgttc

SEQ ID NO: 20366 - DNA, 343 bp, Glycine max
  Clone ID: LIB3049-013-Q1-E1-D8
gacggcatttgtcggcggtgacgaaaggaaagaagaagaagaagcgttctttcggagagttcgaagatgtcgggcgttaccaacaacaacgaggaagacaagaagccaaccgaacagggagcacacatcaaccttacggttaaggggcaggatgggaatgaagtttttttcaggatcaagagaagcactcaattgaagaagcttatgaatgcttactgtgaccgacagtcggtggatttcaactccattgcttttctgtatgatggacgccgcctccgagctgagcagactccagatgagttggaaatggatgacggggacgagattgatgccatgcgttcac

SEQ ID NO: 20367 - DNA, 347 bp, Glycine max
  Clone ID: LIB3049-013-Q1-E1-D9
ggttctagtgtgtgattgtttgttgttgtaactcgttcttcttcttttgttgttctgtgtttgtgtttgttttttctctcacctgaaaatgtcttgctgcggtggtaactgtggttgcggaagctcctgcaagtgcggcaacggctgcggaggctgcaagatgtacccagacttgagctacactgagtcaaccaccaccgagaccttggtcatgggagtggcacctgttaaggctcaatttgagggtgctgaaatgggtgtgcccgctgagaacgatggctgcaaatgtggaccaaactgctcctgcaacccctgcacttgcaagtgaggtgttgggagagcaagct

SEQ ID NO: 20368 - DNA, 308 bp, Glycine max
  Clone ID: LIB3049-013-Q1-E1-E1
gacccccaaaccctgctgcataggaagaaaccctagcctctcaccctccctgcgacacgatgcagatcttcgtgaaaaccctaacgggtaagacgatcacccttgaggtggagtcttctgacaccatcgacaacgtgaaggccaagatccaggacaaggaaggcatccctccggaccagcagcgcctcatcttcgccggaaagcagctggaggacggccgcaccctcgccgactacaacatccagaaggagtccaccctccacctcgtcctccgtctccgcggtggcgccaagaagcgcaagaagaag

SEQ ID NO: 20369 - DNA, 349 bp, Glycine max
  unsure (1)..(349): unsure at all n locations
  Clone ID: LIB3049-013-Q1-E1-E10
ggccacaaagtgcgagaagcctatcagcaaacagagtctcttcttgacacacagggaaggcagagagtatcatccatggcggccaccagagcaataactatagccagcaactccacatgctctctgcttgcaaagaaaccctttgtgggtggcactgctctttccctcaacaacctcaatttttgtcgtactangaggtcttacacctgtagagccatctacaatccccaggttgtcgtcaaagaagaaggccaacccgaaaccctcgattatagagttttctttgttgacaaatctggcaagaaggtaccctttttgttttacttttattgggccagttttgtttttc

SEQ ID NO: 20370 - DNA, 372 bp, Glycine max
  Clone ID: LIB3049-013-Q1-E1-E11
ggagttgagaggatcgtgagaggggcagtagccgagattccgtgagctgcaaaaatggagacgattctttccaccgagaccatgaacatcccggacggcgtgagcatcaaagttcatgccaaggtcatcgaagttgagggcccccgcggaaaattggtgcgagacttcaagcatttgaatctcgattttcagctcattactgacgaaaacggtaaaagaaagctgaaaatcgacgcgtggtttggttctcggaaaacatccgccgccattcgcaccgccttgagccacgtggagaatcttatcaccggcgtcaccaagggctaccgctacaaaatgaggttcgtttatgcccattttcccatcaacgcaagc

SEQ ID NO: 20371 - DNA, 348 bp, Glycine max
  Clone ID: LIB3049-013-Q1-E1-E12
gaaccaagtttgcttgcgtgtatattcattttagcatcaaggttgaatctcagagaaaaagaaacatcgacaagcatgtctggaagaggaaagggaggcaagggtctcggaaagggaggagccaaacgacaccgtaaggttctgagggataacattcagggaatcaccaagcccgcgattcgccgtctggccagacgtggtggcgtcaagcgtatcagtggtcttatctatgaagaaactcgcggtgttctcaagatctttctagagaacgtcattcgcgacgctgtcacctacactgaacacgctcgccgcaagaccgtcactgccatggacgtttgtttacccctc

SEQ ID NO: 20372 - DNA, 382 bp, Glycine max
  Clone ID: LIB3049-013-Q1-E1-E2
ggttctagtgtgtgattgtttgttgttgtaactcgttcttcttcttttgttgttctgtgtttgtgtttgttttttctctcacctgaaaatgtcttgctgcggtggtaactgtggttgcggaagctcctgcaagtgcggcaacggctgcggaggctgcaagatgtacccagacttgagctacactgagtcaaccaccaccgagaccttggtcatgggagtggcacctgttaaggctcaatttgagggtgctgaaatgggtgtgcccgctgagaacgatggctgcaaatgtggaccaaactgctcctgcaacccctgcacttgcaagtgaagtgttgggagagcaagcttcaagcagagatagcccttaattaggaataatgat

SEQ ID NO: 20373 - DNA, 354 bp, Glycine max
  Clone ID: LIB3049-013-Q1-E1-E3
ggctgcaaatggacgtcgcagtcactgccgttcggtcaccgctgatcgtcctgggaagtccggtcaacgggtccgcctcagctcggttgggttccacttttgggttttccagaaagctatgcttgaattcagtatttatcccgaagcaagttcgtagaagagggtttgttgttagagctgcatcctcatctccggagtgggatgatgccaagatcgctcctcttcagctggagtccccaattgggcagtttctttctcagattttgaaagatcacccgcatcttgtgcctgctgccgtcgaccagcaactccagcagctccaaactgaccgcgatgctcatctacaagaccaac

SEQ ID NO: 20374 - DNA, 240 bp, Glycine max
  Clone ID: LIB3049-013-Q1-E1-E4
ggctgcaaatggacgtcgcagtcactgccgttcggtcacctctgatcgtcctgggaagtccggtcaacgggtccgcctcacctccgttgggttcgacctttgggttctccagaaagccaggcttcacctcagtacttatcccgaatcaagttcgtacaacagggtttgttctcacagctgcatcctcagctccggagctcgatcatgccaagatcgcgcctcttcaggtggacgtcccca

SEQ ID NO: 20375 - DNA, 352 bp, Glycine max
  unsure (1)..(352): unsure at all n locations
  Clone ID: LIB3049-013-Q1-E1-E5
ggagttctctaaggatgttcttgatgaacgtgccaagaaagcagaagcttggcatcgtgattctgcagttcgtgcacagtacactaggccatcaccaccaatcacatgtgccactttcgcccaagatgttctagaaggaagagcaaaggcttcacaagaacacgatcacaagcatcaacccctaatatttggaccagctagccttgtaaatggaaacataacaactgagagagaaagaatggcagctcaggtcttccaacctagtcataggatgccaactatgagcattgacgangccgggctaaaagacatggacataatgaacacatggcacgagagaaatgtcaaactc

SEQ ID NO: 20376 - DNA, 340 bp, Glycine max
  Clone ID: LIB3049-013-Q1-E1-E6
ggtgtttgaaagatcatatggatgacagggcatgtggtggtgaccaacggtggcggatgcgctgctgtcgggaagggccggagagccgccgccggcgaatatgagcagaacccggcgtcaccggtagcacttctgctggcggcactgaggaagtcaatggtggcctgcaccgtggacagtctcgacgatttaatctccgccgtccatcatcgcatggagatcggatggcccacaaacgttaagcatgttagtcatgtcacgtacgatcacgtcaatggctttcagggtcttcctcttgagttaaaggttcatgtcctcgctcctgttctcagtgctagtg

SEQ ID NO: 20377 - DNA, 339 bp, Glycine max
  Clone ID: LIB3049-013-Q1-E1-E7
gaagattggatggtggaaatggaatcggcagctgaaaaccctaattacccggcggtggactacaagcgaccttccatcttgtcatttcctcggaggcccgccctcagagttacatccgagttcgatagtgaaagcgcagtcttcttccataagatttcctgcaagttgttggacagccttgccaagttcaagttttcgttcaaccacagcggtaagggcggcgacatctccgaacctcaattcagctttgtctccaagcaccttagcctccactacgacctcgaaggacataatgctctcgttaagacctccatcgatcttgctcccagtttgcaactc

SEQ ID NO: 20378 - DNA, 375 bp, Glycine max
  Clone ID: LIB3049-013-Q1-E1-E8
gactgcagaggtgtattttctcacttctcagcactcagcagcgatatcagttgaagaaacagaaacaaacaaaagaggcagaagatgttgtgggtggacaaatatcgtcccaaaaccctcgaccaggttatggtccacaccgacatcgctcgcaatctcaagaaattggtaacggaacaggattgcccccatttactcttctatggcccatctggctccggcaagaaaaccctaatcatggctcttctccgccaaatgttcggacctggtgccgaaaaggtgaaggtggataataggacctggaaagtggatgctgggagtagatctcttgatttagagctgacaacattatcaagtgccaatcacattgaaatg

SEQ ID NO: 20379 - DNA, 228 bp, Glycine max
  Clone ID: LIB3049-013-Q1-E1-E9
cgtttctgagggtaccaaggctgtcaccaagttcactagctcttgaattagctatcttatcgcttttctaagactcttttctgtcccaatttgagattttaatcagtagtagacttttttttgtttgataggatttgtaattggaagaatggtcttgggttgatccttttgtgtattgaagtggcaagatgtattgattatataggaacgcagtattgtttagtatcc

SEQ ID NO: 20380 - DNA, 364 bp, Glycine max
  Clone ID: LIB3049-013-Q1-E1-F1
gggaacctggagtggaagtgcgatcccagtgttagtgtgtatttcctctcttctcactccgggatcgatattttcaagaacagatcgaggagccgttcatcgatttgttggatctgtgagtgagaagatggttactaagacagaggagactcaattgaacaggctcgaaaaccatgtcgataacggcggcggcggcgcgtgggagtacctctgcctcgtgcggaagctcaaagttcggcggtcggagaaagttctgaagcacggtctctccatcttgaacgacctcaaactaagattctctctcggctcggatgaatggaacttgtatgagcaggttgctgttgctgctatggaacggcaatgt

SEQ ID NO: 20381 - DNA, 337 bp, Glycine max
  unsure (1)..(337): unsure at all n locations
  Clone ID: LIB3049-013-Q1-E1-F10
ggggtacgtatgttgtgttcttcattttccaattgcatgttatctctcatttctcaattcaatttctcccctttccctcttccccttaatctgtgaggaaaagggaattatgggttctctttatttcagttcaatttttccttttagtgttaaaaatattacctttattattattattattattgtgtggagattgattcatgtaatttgttgaagggttgaagatgagaatttgtggagcagcaatcagcagcagctacaccaccacgtccaattcccttttagtgtttgcttcctcttcnctctccagtcctgcaaaaaccaagttcctgccctc

SEQ ID NO: 20382 - DNA, 356 bp, Glycine max
  Clone ID: LIB3049-013-Q1-E1-F11
tatgaaagtgacgcctggttaaatgatttgtgtgatcaagttgatgaaaaagttgtttttaagccattcaactttgattctattgctgagaaagtaataaaaagcattgacacgcaatttcaaaagatgttaggatcagagtttatacttgaaattgagtatgaggtcatgacacagatacttgcagctgcttggtatcagacaagaaaaaagcagtggaggattgggttgaacatgttcttggcagaagcttagctgaagctcatcagaagtaccgctttgtacctgaatttgtgatgaaactggttaactgtgaaagaatttttttggaagaacaatctcctggagtatgcctt

SEQ ID NO: 20383 - DNA, 319 bp, Glycine max
  Clone ID: LIB3049-013-Q1-E1-F12
ggtaatagtggatgtagagagagaaagaggcagagagagggttcttttcttcttctcgtccttccttcttcgttgttgctcttgttctagagagagaaagagagagtgaatcttggagagataagcgcctgctccttcggcatttccgtcagacaaagttaacacttccaagaccgacgtagctgctactgctattattaatcaattcaattcaattcaattcgcctcttcaccattccctattgtagtagatgaactctcccaagattttgattagtagcggaatttgaaggtgagagagaatgggagaaaatgaaga

SEQ ID NO: 20384 - DNA, 331 bp, Glycine max
  Clone ID: LIB3049-013-Q1-E1-F2
gaagcttgtctcttgggatgacatccactggggatacagttcacgtaccattgacctgcttgtaaccgttgccaagaagtctgtttaattaatgtggttcgaacattaagtgtcggtcaagctgcgatttattatcgtgcacatggaaatattgcgaagtctgaataaattggtttccggaacgagtgttgtcactcagtcatcaacagtacacccggttcttgttgcctcatccgtgtcagggatggacttttttggagtcctagacacgtgcagatgtagtcagggtttattgaatcagatagcagatatttgctctcaatatatcacc

SEQ ID NO: 20385 - DNA, 366 bp, Glycine max
  Clone ID: LIB3049-013-Q1-E1-F3
gagggcgaggaagccacatagagacacaatacagagtgagttgttgctccttcgccacaactctctgccaacatgggtatctccagagattctatgcacaagaggcgtgccactggtggcaagaagaaggcctggaggaaaaagagaaagtatgagcttggtcgccagcctgctaacactaagctgtcaagcaacaagacagtcaggaggatccgtgttagaggtggaaatgtgaaatggagggcattgagattggatactggaaattactcctggggaagtgaagctgtaactcgcaagactcgtgtactagatgtggtttacaatgcctcaaacaatgagcttgtgcgtactcagactcttgtc

SEQ ID NO: 20386 - DNA, 377 bp, Glycine max
  Clone ID: LIB3049-013-Q1-E1-F4
ggaagatggacaaaaatcggcgacgatccaaatccagttctttcatttacggtcctaagtgacacactcgattctggctccgcctcagacgaagaagctcgctctggattctcactcacctgaacggatccttcttcttccttatcgcgaaatccatacttcaaaccctaatcgcgactgcggtttatgatttgtgacacaacacaaagttgacgaaggtggtttttcagcatttgtattctagtattcttctacataagttgaagcgaaaatgaggattatgataaatggcggtgtttggaaaaacaccgaagatgaaatcctaaaagcagctgttatgaaatatggcaagaaccagtgggctcgaatctcttctc

SEQ ID NO: 20387 - DNA, 376 bp, Glycine max
  Clone ID: LIB3049-013-Q1-E1-F6
gaggcgtaagaagtcaagttcaaaaggagaagttcaggaacaatgcagaaaaaacgtggaaacttcaactcatatagcagatcaggatgtgacgaaaccatgtgatgtagccttatgcaatacttcagatgattgctcccatggacagtggggaaatattgtgctaaagcatttatatcagtcattaggtgatggcaatggcggcatagaggggtgcataagggaagcacttattcattatcctaaacataatcataccactacagttatggaaacttttaaaattgacaaagatggacaagaatgctctttgcaatttgagccactttctcatagaacagagaaggaagctaatgggcatgcagatgtcaggtgt

SEQ ID NO: 20388 - DNA, 380 bp, Glycine max
  unsure (1)..(380): unsure at all n locations
  Clone ID: LIB3049-013-Q1-E1-F7
gaggaaagaagagagagaacaaagcacttagtgctattcaataattacgaaaaaccaacagcgagtgttgtttttgtttggtccaggctggaccagggaatgaatagagatgagaggctttcggttgaagagaactgagttaagcggcgaagccaaacgcagaatcggcggcagaaattgccaccggaagcacgtcgaagacgggtgaaccaaacacaaaattccatccaccacttctcttttcaatccccaactcaaatctgtgaagaaaatctcaatttctaaattgtaattcttagcactactgctagtagtagtanaaaaaaacaattagaaagtagtagagtgtttttttttctttttttcgtttgttttacttt

SEQ ID NO: 20389 - DNA, 361 bp, Glycine max
  Clone ID: LIB3049-013-Q1-E1-F8
gggagcgaagtgaattgaaattgaagtgattcggggtgagttgactcagcaatggcggaagaggtggctcgggtgatggtggcggtgaacgagtcgagcattaagggataccctcatccttcgatcagcagcaaaggggctttcgactggaccatcaacaagatcgttcgcgacaacgtctctgccttcaaccttctttttcttcacgttcaagtccccgatgaagatggttttgatgacatggatagtatctttgcttctcctgacgattttaagaacatgaatcagagagatagaattagaggagttcatctgctggaatacttcatcaataggtgtcatgaaattggggtggtttgtc

SEQ ID NO: 20390 - DNA, 351 bp, Glycine max
  unsure (1)..(351): unsure at all n locations
  Clone ID: LIB3049-013-Q1-E1-F9
gaaccattattccatttcattccttctcgatggctactactcaaggacaagtcattacatgcaaagccgcggtggcctgggaacccaacaagccattgtccatcgaggacgttcaggtggcgccgccgcagaatggagaggtccgtatccaaattctctacactgctctctgtcacaccgatgcttacacttggagcggcaaggatccagaaggtcttttcccatgtatacttggtcatgaggctgcggggattgtggaaagtgtangagaaggagttactgcagttcagccaggtgatcatgtcatcccttgttaccaggctgagtgtggagagtgcaagttttgcaaat

SEQ ID NO: 20391 - DNA, 332 bp, Glycine max
  Clone ID: LIB3049-013-Q1-E1-G1
ggacgaacctcaaattcaacatttgttacagtctgctgagaccatcagaaaagactaccctaatgaagattggctgcatttgaccgcactcatccatgatcttggaaagattcttgcgcttcctagctttggtgagcttcctcagtgggctgttgttggagatacatttcctctgggctgtgcctttgatgagtcaaatgttcatcataagtatttcaaggacaacccggattacaaatgccctgcttatagcactaaaaatgggatctacacagaagggtgtggattagacaacatagtgatgtcatggggacatgatgattacatgtata

SEQ ID NO: 20392 - DNA, 284 bp, Glycine max
  Clone ID: LIB3049-013-Q1-E1-G10
gaaaggattaggaaggggatgaagacatttttggaacaaaatgtcattaaaaacccatgtgccagtgacatgagatcttctgtcaacagagtcatcaaagtgaaggggcatgggatggtgaggggtagttgctgttatgatagccaatacagtatggagatttttgttgggcgaaaaaaggacaagggattaatataattaacttgtgtagtggcaattcatgcatttataatcgcactcaggatcatgtatcaatcaatataattgttctcacacaattcagc

SEQ ID NO: 20393 - DNA, 337 bp, Glycine max
  Clone ID: LIB3049-013-Q1-E1-G11
ggcacatgttcatcctttgattatatcacatactcaccatggaggctaagttggccaccaccataatacttattttctccgtaatttggcttatgagggtgaatggcatagacccttgtgcctctcaagcggataattccgacctgaacgtgattcccatctacagcaaatgctcaccgttcaaaccaccaaagtcagactcatcgtgggacaacagaattataaacatggcctcaaaagacccactccgattcaaatacttgtccaccttagtgggccaaaagaccgtgtccacggccccaatcgcttcgggccagaccttcaacatcggcaacta

SEQ ID NO: 20394 - DNA, 333 bp, Glycine max
  Clone ID: LIB3049-013-Q1-E1-G12
ggaggatttatggggacaaaagctcagcaaattgaatatcctgtgcgaactaaccagattcctaaggagattcctgcacgtaaatatccgtcatggcttcttgttcttggtgcaggaactcttccatttggaacccttttcattgagcttttctttatcctttccagtatctggcttgggaggttctattatgtatttggtttcttgttggttgttcttctattgctggttattgtttgtgctgaagtgtcagtggtcctcacatatatgcatctttgtgtggaagattggcagtggtggtggaagtcattctttgcttcaggctctgttgct

SEQ ID NO: 20395 - DNA, 378 bp, Glycine max
  Clone ID: LIB3049-013-Q1-E1-G3
gacgctcaattcattttcttctcctctctctctctcctagggttagggttttctctcttcatcactctctgtgtcgctccgtttcaatggctcagcaagacgctcaaaacggcgggtcggagaatgccgctgctgctgctacggtgtcgtttgtcgctgtgaagccgcagctcctcgtcgaagctcccaaagccaacgacgccattctgttcttcaaggctgcgtttggcgctgaggaagttggccgtacgctcaaccctaagcgcaaagctgagcacgagctccctctcatactctccgcagaactcaaaatcgctggctccaccattctcgtccccgacctcgttgatgaaacttctttgcaagcaaaaacggggg

SEQ ID NO: 20396 - DNA, 402 bp, Glycine max
  Clone ID: LIB3049-013-Q1-E1-G4
gatgtaacatataatgatgttggcggttgtaaggagcagattgaaaagatgcgagaagttgttgaacttcccatgcttcatccagagaaatttgtcaagcttgggattgatcctccaaagggtgttctttgttatggccccccaggaactgggaaaacacttttagccagggctgtggctaataggactgatgcttgttttataagggttattggaagtgagctagttcagaaatatgttggtgagggggctaggatggttcgtgaactatttcaggtggctcgttcaaagaaggcatgcattgtgttttttgatgaagttgatgcaattggaagtgcacgatttgatgatggccttggtggtgacaatgacgttcagcggcacatgcttgaaattgtgaat

SEQ ID NO: 20397 - DNA, 282 bp, Glycine max
  Clone ID: LIB3049-013-Q1-E1-G5
gaggcatgagatgtcagcttgataacgatgtctacacgacccctcaagtctccacctccatacttgagccatacagcatgtgggacgtgacaatctcacgtgaagtacaccgatgtcgccgtcagattgagagacgaagcgcacaatgacgatcagttggcgcacaccagacatagcacttcctagcgtgaacgaacctcgctggatctagtggctgcatgtgaggatcctcttagacagcatcccagatgtgtgctgaggactacaatgatgaagtcattg

SEQ ID NO: 20398 - DNA, 377 bp, Glycine max
  Clone ID: LIB3049-013-Q1-E1-G8
gacagcatatatatcaataatctattttatactatacctacattttgataattttctttgtagttgatagccatggctacccgtggaaagcttgaggttgacattgatctcaagtccaacgcagacaagtactggcaaacccttaggaattctactgaaatattccctaaggccttcccacatgattacaaaagcattgaggttcttgagggtgatggcaagtctcctggttctatccgccacataagttatggtgaaggttcaccacttgtgaaatcatcctttgagaagattgaggctgttgatgaggaaaagaaggtagtgtcgtacactatcattgatggggaactcctccagcactacaaaacattcaaggg

SEQ ID NO: 20399 - DNA, 375 bp, Glycine max
  Clone ID: LIB3049-013-Q1-E1-H1
ggctatctggtgagagaggaaggaggttgtgggattaattaaaggaagaagaagaaatccttttatgtgggagtaacagcagaagcaaaacaaaacatcatagacagacacaacattatctttcaactgttgctctgcctctgcacagagaatggtgtgggaggggaaacagacatgatctatctgtgttcacagcaccactgtttccctgcctcacacccttatctagaagaacaagaatcagcacatacacccgccacaacgccatagtcatcatcacttagaagaacttcacaatttttactttcttggatatggcgagtcttgctcttgaaaccgacgatgtaatctcagatatatacccttcaactggga

SEQ ID NO: 20400 - DNA, 342 bp, Glycine max
  unsure (1)..(342): unsure at all n locations
  Clone ID: LIB3049-013-Q1-E1-H10
gattcttatgaggccactttgtccatggctggtgcaaaagtaaaaggcatcactttgcgccctccagattttgctgtccctcttgaagagttgaagtccaccatctcgaagaatacccgtgccattcttataaacactcctcacaaccctactggaaagatgttcactcgtgaggagctcaattgcattgcatctctttgcattgagaatgatgttctggttttcactgatgaagtttatgacaagttggcttttgatatggagcacatatcgatggcttctttgcctggaatgttcganaggacagtgacattgaactccttggggaagacattctcctta

SEQ ID NO: 20401 - DNA, 357 bp, Glycine max
  Clone ID: LIB3049-013-Q1-E1-H11
cacacagcttatcccttcaccttcttcttcctccttaaaccctatcacactctccctaaaccctaaatccccaacctctccgccgcagcagcatttcaatctcgatattctccggcaccggcgccggaggcctaattccactcttcggtgctccgcctcctcgttctcggagaagcaccacacgaactcctcgaactccgacgacgtggtggagctccccctgttccctctccctctggtcctcttccctggcgccatcctccccttgcagatcttcgagttccgctaccgcatcatgatgcacacgctcctccacaccgacctacgcttcggcatcatctacaccgacgccgtctc

SEQ ID NO: 20402 - DNA, 352 bp, Glycine max
  Clone ID: LIB3049-013-Q1-E1-H12
gggtggggtaccagaaaatatagcaagaaaggctatttcaatagcatcatccaaaatgcctatacgaactcaattcattatttcagggtaataaattagaaccaaaggaaagaggtctttaagatgaaaacaaaaaatgcaaatgtaggttcctttttttgaacacaaaatatttttacttccattttttgactgaaagaataaaaaaatgatatgattcaacctcaaactcattcgaatgtagctgataatagcggagcacgcgaactgatgtgtattcgaatcctaggagctagtaatcgacgatatgcttatattggtgacattgttgttgctgtaatcaaacaagcag

SEQ ID NO: 20403 - DNA, 345 bp, Glycine max
  Clone ID: LIB3049-013-Q1-E1-H2
gatataatgggaagacgcatcgtttgtcttacggcattccttacctcacccaccgcaacacaatacccataaaccaaagccccaacccgactctcttctcatttatcctccctaaagcttcaacctttgggacgcccctcccactttgttttcttctctttcttcattttccttttcggtggggattaggataaccctcctctatttttcaactctaattttgatcatcatcaccttcacccacttcactcttacaaggaagaacaaccctttctctctctctctctgttctgtgttgattctgtgcttcagctttccacaaagttaagggaaagatggcaatga

SEQ ID NO: 20404 - DNA, 334 bp, Glycine max
  Clone ID: LIB3049-013-Q1-E1-H3
ggtgtcctattggtggaggaatgcttgttacctactcctttttaagttcccaaattccccaaagaagcctaaggccaaaccaaaccaaacgtatcagaataaacaaagaaagtcctctctctaatggagcggtacaaatgcaagctctgctccagaacattctccaatggcagagccctcggtggccacatgaacgctcacttagccaccctcactcttcccccccaaaaccaacaaccaccactttctccctctgctgctgcttccttctcttctaattcctcttcagaacatgaacatgccacacacgatgaaaagtccctgatttatgggt

SEQ ID NO: 20405 - DNA, 381 bp, Glycine max
  unsure (1)..(381): unsure at all n locations
  Clone ID: LIB3049-013-Q1-E1-H4
tcagtcgtgcagccagatgacgacagaagggggatcctttgtattctattcttcaagattcaggtactgcgtttcggaagcagacacagatggctcgtacgaagcaaaccgctcgtaagtccacaggaggaaaggctcctangaagcagcttgcaaccaaggctgcacgtaagtctgcaccaactactggtggtgtgaagaagccccaccgttatcgtcctggtaccgttgctcttcgtgagattaggaaataccagaagagtaccgagcttttgatccggaagctccccttccagaggctggttcgtgaaattgctcaggacttcaagactgatctgcgtttccagagccacgccgtgcttgcattgcangaagctgctg

SEQ ID NO: 20406 - DNA, 351 bp, Glycine max
  Clone ID: LIB3049-013-Q1-E1-H5
ggaagccagcgagtgagcgagcgagcgaggtagggttttcgttgttcccccgtctttgaattcagttcgcgacgatggggtccatccccgatccaggcgagttgagcgagttgactcagccgagcttcgacgagttccagcgccaaacttccctcatgaccagctgcaccctcctctggaaggagctctccgaccacttctcctccctcgagcaagacctcaaccacaaatccgaagccctcaaacgcaagattcgcaccctcgacaacactacttccgactccctccgcctcctcgatcgccgcgaaacctccctcgacgccacgctccagatcgccctccgcacgctcg

SEQ ID NO: 20407 - DNA, 381 bp, Glycine max
  Clone ID: LIB3049-013-Q1-E1-H6
gattcttatgaggccactttgtccatggctggtgcaaaagtaaaaggcatcactttgcgccctccagattttgctgtccctcttgaagagttgaagtccaccatctcgaagaatacccgtgccattcttataaacactcctcacaaccctactggaaagatgttcactcgtgaggagctcaattgcattgcatctctttgcattgagaatgatgttctggttttcactgatgaagtttatgacaagttggcttttgatatggagcacatatcgatggcttctttgcctggaatgttcgaaaggacagtgacattgaactccttggggaagacattctccttaacaggatggaagaatggttgggccatagcgaccccacac

SEQ ID NO: 20408 - DNA, 360 bp, Glycine max
  Clone ID: LIB3049-013-Q1-E1-H7
ggcagttcaattccaatatattccattctctctgtgtatttccctacctctcccttcaagatgcagatcttcgtcaagaccctcaccggcaagaccatcacccttgaggtggaaagctctgacaccatcgacaacgtcaaggccaagatgcatgacaaggaaggaatccccccggaccagcaacgtctcattttcgccggaaagcaacttgaggacggccgtacccttgctgactacaacattcagaaggagagtactcatcacctcgtcctccgtctccgtggtggcatgcagatcttcgttaagacactcaccggcaagaccataaccccagatgttgaaagctctgacaccatcgat

SEQ ID NO: 20409 - DNA, 328 bp, Glycine max
  Clone ID: LIB3049-013-Q1-E1-H8
gaagcagcttaacaacaaagcaccatttctcttccctcaactaaactcatattccaaaacgcagagccaaaccatgtcgttccccttcagccactctcacgccacccacacccaccaccgcagggacggcgacgacgacgaacgacccaccgtttaccctccgccgggaaactccttcagcaacccgccacctccgttctacggcgtccctcaaccaccaccccctcagccggagacccacgtgttccattccgctcacgtgacaccaggacacgtgtcccatgacttcaacaactaatccggttccccggcttcaacccccttccac

SEQ ID NO: 20410 - DNA, 373 bp, Glycine max
  Clone ID: LIB3049-013-Q1-E1-H9
gatgaacaaaataatacgtgcatacatagctatctagctagcaagtgggacaagagatatatatacgtggtaccctagagtgccattctgtagtttatttctgctcaccaaggcttatcacatcacaatttgtgcattgcctcgtgtcctttttcttctttgcgtgccagaaatcttacacacacaggtatctagcaaatgggttctcaccagcaagaaccatggctattggagaatgggaaaccgagggtgttgaccaaggagaataggcatggccgttctgcacacagcatgtcctccacgtctttgcgcatgaagtctagccgaactcttgtctccaagcttccatgtgccacactcagaagcatccttt

SEQ ID NO: 20411 - DNA, 183 bp, Glycine max
  Clone ID: LIB3049-014-Q1-E1-A1
ggagctttagattcttttgccccgagagtcagccacagttggaaaaaaaaaaaaggttgtccgagatggcacgtacgaagcagactgctcgtaagtccagaggagggaagggacctaggaagcagctcgcaaccaaagctgcacgtaagtctgcaccaactacgggtggtgtgaagaagccac

SEQ ID NO: 20412 - DNA, 352 bp, Glycine max
  Clone ID: LIB3049-014-Q1-E1-A10
gaccgttccatttctcaacaacttctgctacttcctactccaaccgcacttctgctccgcaattatcatgggcaaggtcaagatcggaatcaacggatttggaagaattggccgtttggtagccagagtggctctgcagagagacgatgttgaactcgttgccgttaacgaccctttcatcaccaccgattacatgacatacatgtttaaatacgacagtgttcatggacactggaagcatcacgatgtcaccgttaaggacgagaagacccttctcttcggtgacaagccagtcactatttttggacacagaaaccctggagagatcccatgggggtcaactggagctgac

SEQ ID NO: 20413 - DNA, 346 bp, Glycine max
  unsure (1)..(346): unsure at all n locations
  Clone ID: LIB3049-014-Q1-E1-A11
gacagacacaatttctctcgaacaacaaatatgagaataatgtattggttccttgttttgtttcgcaatctcacatatggtagtgttttagatgctagccatggtaaaacacttccttctactgttgtggttggcactgtttactgtgacacgtgttttcaacacactttctccacaagaagccatttcatttcaggtgccctagtagctgtagaatgcaaagttggggattcagtgccaagtttcagtaaagaagtgaagacacatgagcatggtgaattcaaagtggacggtacattaaaagtgtgganacatgcaaaaagaatcaagggatgcactttcaaat

SEQ ID NO: 20414 - DNA, 352 bp, Glycine max
  Clone ID: LIB3049-014-Q1-E1-A12
gactcacttagcaatcaatcaaaacattcccaataacaataatatacacatcttcaattaagctccttctcctatagccatggctctttctaagcttataattgcttcccttcttgcgtcgcttctccttcttcatttcgttgatgctgatcaatcggcacatgcacaaacgcaggggtctcttcttcagcagatagattgtaacggagcatgtgctgcgaggtgccgtttatcatctcgtccacgcctctgccaaagagcttgtggaacttgttgtagacgctgtaactgcgtgccacctggcactgctggaaaccaagaagtgtgtccctgctatgcaagtttgactact

SEQ ID NO: 20415 - DNA, 155 bp, Glycine max
  Clone ID: LIB3049-014-Q1-E1-A4
cccgaaggtttatcgcgacgcaaggcgtgatccaaggagacaggcataccttgtgcggagtcgagtgacaagtcgctggagcagcgcccgacagaagttaccgaacgcgtgagctggggagtctagcacgaaaagagagggatgctcaccagcat

SEQ ID NO: 20416 - DNA, 202 bp, Glycine max
  Clone ID: LIB3049-014-Q1-E1-A5
ggaagcagtggaacaaagcaaggaagagaaagaaatttgtttctctctaaatagtctccgctgaactttttggtttcttcaagatgtcggtacgctgggatcttagcaggcttaacgtctccgacatcaccgataaggtgatcgccgactacatatgggttgggtgatctggcatggatatgaggagcggagcagggactct

SEQ ID NO: 20417 - DNA, 204 bp, Glycine max
  Clone ID: LIB3049-014-Q1-E1-A6
gatcctaaggttgcgccacgaagaaggcaaaagaaggacagcacttcctcaaagggttggcacataaaaccggttctgcagccagtgctttgtgtcgcaaggcaatggtagccttacacggttggatcgttcgggagtgccctaggtgagttgaaagaaagtcctgagactgctaagtaggatgcaaaagttgctggtgatgga

SEQ ID NO: 20418 - DNA, 309 bp, Glycine max
  unsure (1)..(309): unsure at all n locations
  Clone ID: LIB3049-014-Q1-E1-A7
ggaagtgcttcataagcgtgttgtaggccaagaccctgctgttaaggcaattgctgaggctatccaacgttcaagagcaggtctttcggatcctcatcgtccaattgccagcttcatgtttatgggacctacaggtgtaggaaagacagagctggctaaggcacttgcagcctacttgttcaacactgaagaagctcttgtacggattgatatgagcgagtacatggaaaaacatgctgtttcaagattgattggggctccacctggatatcgttggtacgaggaangagggcaacgtactgagatagt

SEQ ID NO: 20419 - DNA, 295 bp, Glycine max
  Clone ID: LIB3049-014-Q1-E1-A8
ggaaagctgaaatccttgctgggggcctctcagaccccaaaagcctgagaagaaaaaccccttcttatttattaccgttgccccttcctctcagtgtaggaggaaacgatgagcacttggagaagccttcttctgcgaattggggacaagagccccgaatatggaccctcctccgattacaaagatcacattgatacgtgctttggcgcccttccccgcgagctcgaccactcccaatccgagattctcgagttccttcccaagtgtgctgagcagttgcctcacaagattcctc

SEQ ID NO: 20420 - DNA, 190 bp, Glycine max
  Clone ID: LIB3049-014-Q1-E1-A9
ggggtctctctcattcttcacccgctcagacgcagtggatcagaagcctaagcctcagacatggccagagggtttgggaagcacctgaggatgctcactgctccatggattggagccttgactatctttgtggtgcttttgcatccaggctatcagcttgacctcatcagttcggggagtgtcttcctct

SEQ ID NO: 20421 - DNA, 145 bp, Glycine max
  Clone ID: LIB3049-014-Q1-E1-B1
ggtgctaatcgtagctgagcgcgctaagcactctagctgttgcaaatttctactagttgtcaatggcttctgcaggtgttgagttccgttgcgttgttggtgggcgggcttgggtcgcgggcaacggggcccgcgagaaagcctt

SEQ ID NO: 20422 - DNA, 360 bp, Glycine max
  Clone ID: LIB3049-014-Q1-E1-B10
ggcgcattttgtgaaaaaaaataaaaagtggggataggggtactatttgttgggtttttcttgctatcttgtgttgtgtgtgtggagggtgtggagccaaaagcctcacccacttgtacatttccggcagtttacaactttggggactcaaactcagacactggaggcatatcagcttcatttgtgccaattcctgcaccttatggcgagggcttctttcacaagccttctggaagggactgtgatggccgtctcattgtagatttcatagctgagaagctaaacttgccatacttaagtgcttatctgaattcccttggaaccaattaccggcatggggcaaattttgccactggggga

SEQ ID NO: 20423 - DNA, 361 bp, Glycine max
  Clone ID: LIB3049-014-Q1-E1-B11
ggaattggacgggccattgataaccttgtgtagttcttgcggcggaagacaaagaagtttaaataaatgggtctagctttaatcgtcggactcctcggccttctgattctatttcacgccgcttattcaactattcagtataggggccttttgaagattacggaggaagagttttcagggcctccattcgacgtggtgattgagctgtttcttggattgttgctttgtttttgggctgccctcactgcgccggggaagtttctatccatacatcctcactctgaagataacagaattgtctctttacctgccaacctagacttcatgatcttcaaccaccgaggcaaggcctttcctgtgg

SEQ ID NO: 20424 - DNA, 267 bp, Glycine max
  Clone ID: LIB3049-014-Q1-E1-B3
gacggcaacagaagaataagcgagacacagatcatagtgatcattttttaatttctcagagttatcggacgtcgctgcagatgcaccaggcgtgagggctgccgtcagcggtgatgaagcggcaccgtttttcggcttccttggcgccgcagctgccctcgtcttctcctgtatgggagctgcctatgggacagcgaggagtggcgtgggcgtggcttgcaggggtgggatgagagctgagctggtgatgaagtcggattgttcctg

SEQ ID NO: 20425 - DNA, 103 bp, Glycine max
  Clone ID: LIB3049-014-Q1-E1-B4
cagaaaagacagaggggggccgagcccgagaaggtgtgcgggagccgtttgtggacgaggatgtgagcataaggggggctgatttgaggttggcacgtttcgg

SEQ ID NO: 20426 - DNA, 332 bp, Glycine max
  Clone ID: LIB3049-014-Q1-E1-B5
gaacacatttgattcaataaacaaatcgttagggtttttggttgtgagagtgaaagagaacaatggaaggcataacagagggtgtgaacaacatcaacattaacatctccgattcgtataagaagaatcgcattcaggtctctaacaccaagaagcccctcttcttctacgttaatctcgccaagagatatatgcaacagcatgatgaggtcgagctctcagctctaggaatggctattgccacagtagtaactgttgctgaaattttgaaaagcaacggacttgctgttgaaaagaaaatcacgacatcaactgtttacataaaggatgac

SEQ ID NO: 20427 - DNA, 290 bp, Glycine max
  Clone ID: LIB3049-014-Q1-E1-B7
gggatttggagagcaagagtatcgttgaggatttgaaggttgacctcaagactgaggctgatgccacctccggtggtggtaacgccaacaagaggaaggttatttattgcacaagtttgaactggagtgcggatggaagcactttgtttagtggctataccgatggtgtggtcagggtttgggctattggacgttattaggttaaactttttagtgttttcacatgcgaatctgtttttgagttttgggacaaagttacttactgctttacggtggaattgatttttatg

SEQ ID NO: 20428 - DNA, 256 bp, Glycine max
  Clone ID: LIB3049-014-Q1-E1-B8
ggtgatatgacttgtttcgtctctttcttccacctgtgattcttaactacgcgcacgttcctccggccaaggcaaatcggaaaatgggtgtggactattacaaacttcttcaagtggatcgaaatgtcagtgatgaggatctcaagaaagcctatcgcaagcttgctatgaagtggcaccctgataagaaccctaacaacagaagggatgctgaagccaaattcaagcaaatctcagaagcctatgatgttttgag

SEQ ID NO: 20429 - DNA, 373 bp, Glycine max
  Clone ID: LIB3049-014-Q1-E1-C10
ggaaacagaagctgcagaagaagaagataacgtacaagcatcaatcaagctctcactgctattccccaaaatatttcaaaaaacaaaacaagaagaagaaaaaactgcaatgtatggaaaagtggttctctcgttcatcttcgtgctcttgctcgtcttctcttactcaattttcattggcaccctcgacattcgatcttatttcttccctcgcctaaagttacccgcggctgcacctgctccctgtgcacccgagcctcctcttcgggttttcatgtacgatctccctcgccgattcaacgtcggcatgattgaccgccggagcgcgtcggagacgcccgtcaccgttgaggactgggccgcgttgcccgtg

SEQ ID NO: 20430 - DNA, 353 bp, Glycine max
  Clone ID: LIB3049-014-Q1-E1-C11
ccatggaggttggatgatgaaaattatctgctggtgccttctggtaatctttatgtttttcgttccaaatgagatcatcagcttctatgaaacaatatcaaagtttggctcgggcatgtttcttcttgttcaagtcatgctcttgttggattttgttcatggatggaatgacaaatgggttggatatgatgaacaattctggtacattgctctatttgttgtttcccttgtttgttatgtggcaacatttgcattctcaggagttctctttcacttcttcacgccatctggacaagactgtggactcaatgtctttttcattactatgaccatgattcttgcaattgtttttg

SEQ ID NO: 20431 - DNA, 357 bp, Glycine max
  Clone ID: LIB3049-014-Q1-E1-C12
gagagcatagaaaggaaacgaaaaaacagagtacccgacagaatttgaaaacaaaggctgaaatttgaagaaactgagatcattgggtgtgaaatatatggcagaggttgtcttgctagtcgatgatttgaaactactttctgcgattcctcgctgtagaatttgtcatgaagaagagtttgaaagcgtagaaaccttggaagcaccttgtgcttgttctggaaccgttaagtttgctcatagagattgcatacagagatggtgcaacgaaaaaggaaatacaacctgtgaaatatgtctccagcaacacgaacccggatatacagctcctccgccaaagaagtccaagataaatga

SEQ ID NO: 20432 - DNA, 80 bp, Glycine max
  Clone ID: LIB3049-014-Q1-E1-C3
gacagaaggggagttgtagaagaagagtgttgaagccgtttctgtgcgtggtccgctgtcttgtcgtcaacctcgttttc

SEQ ID NO: 20433 - DNA, 262 bp, Glycine max
  Clone ID: LIB3049-014-Q1-E1-C5
ggacttggtgctaactagattgaggatagtgatctttgtcttcgccagcaacatcgtccacgtggaagaggagatcggggggagcctgagatagcggagcttttagaggccgcactttttagttgtggtgtgtgagattttgatttgatgggaaaatatcttgacgctgcggccaggctggcggagctgtcgcggattgtgtcagctgctggcggggcccagcaggccaaagagagcgctacccagattgcccaaccgtgtg

SEQ ID NO: 20434 - DNA, 156 bp, Glycine max
  Clone ID: LIB3049-014-Q1-E1-C6
gagagacagacacacactcggttctgccttcacaaaaaaattatcgagatcccctttttctcctaagaaaagcgatggccaacggtcccggtcgcgactctgacatcggcaagaaggccagggatctgctgttcaaggagtaccacagtgaccaga

SEQ ID NO: 20435 - DNA, 308 bp, Glycine max
  Clone ID: LIB3049-014-Q1-E1-C7
ggaggcacacagaaaaaatgggttcttcttcttctatgtggacggtgtgtgtgattttggcatcactggcctctgcagcactctgtgccaacgcacgcaggccagtgggatgtacaatttggccgaaactacgtgcccacatgggcctttgatcacatcaaatatttcaatggtggttctgacattcagcttcatcttgacaagtacactggtagtggcttcgagtccaaagggtcttacttgtttggtcacttcagcatgtacatgaagatggttcctggagattctgctggcacactcactgcttt

SEQ ID NO: 20436 - DNA, 156 bp, Glycine max
  Clone ID: LIB3049-014-Q1-E1-C8
gagagtgaggcacacagaaaaaatgggttcttcttcttctatgtcgacggtgtgtgtgattttggcagcagtgagcgctacaggactctgtgtgaggggacgcaggcgagtggatctacaagttggccgaaacgacgtgcccagatggggctgtga

SEQ ID NO: 20437 - DNA, 349 bp, Glycine max
  unsure (1)..(349): unsure at all n locations
  Clone ID: LIB3049-014-Q1-E1-C9
ggagcgtagttgaggttttgcttttgccacttcgaaaccaaattttcttcgttcgtccttctgtgatctcttcttccaccatgagcaggtcagggcaaccaccggatttgaagaagtacatggataagaagcttcagatcaagctgaacgcaaatcgcatggttgttggtactctccgtggctttgaccagtttatgaatttagttgttgacaacactgtggaagtgaatggcaatgagaaaaatgacatanggatggtggtaattagaggaaatagtgtggtcactgttgaggcgcttgaacccgtgaataggacttgatttctgtttgttgtaaacatttatatgag

SEQ ID NO: 20438 - DNA, 68 bp, Glycine max
  Clone ID: LIB3049-014-Q1-E1-D1
gggtgctaagttatttgcgtagggatcgtcctcagcttctgcattcttcatcagcgtcgtcgcgcgtg

SEQ ID NO: 20439 - DNA, 325 bp, Glycine max
  Clone ID: LIB3049-014-Q1-E1-D10
gacaatcgaacgggaaaaggcgtcttcataaacgccgcccaaaacttctcatacccttttattcattccattcgtttctagggttttcggttctttgccgagaaaatgagagagtgcatttcgatccacattggccaggccggtatccaggttggaaacgcctgctgggaactctattgccttgaacacggcattcagcccgatggacagatgccgagtgacaagaccgttggcggaggagacgacgccttcaacacatttttcagcgagaccggcgccggaaagcacgtgccccgcgccgtcttcgtggatcttgaacccaccg

SEQ ID NO: 20440 - DNA, 342 bp, Glycine max
  Clone ID: LIB3049-014-Q1-E1-D11
gggagggttggttcatttgatctgcgagtggagaagagaatcgtgatgggaggaggacacggtcacggcaccacctacaaaggagttaccgttcatcacccaaagcgctggcacactatcaccggcaagggtttgtgcgcggtcatgtggttttgggtattctacagggcaaagcaagacggtcctgttgtattgggctggaggcatccttgggagggtcatcacgatgatcatggcaagggccattaagcattccttaggcatgagctccaagaacaggaagaacagaatttgaagtgtctgttgctgtgggtgtgctgttagttgaaatgtttactttga

SEQ ID NO: 20441 - DNA, 332 bp, Glycine max
  Clone ID: LIB3049-014-Q1-E1-D12
ggagagtgatttcagtgagtgatcggtgttcacttgatctcatcataatcgtcagcgtcaattgaagaagatgccgatcagaaacatcgccgtcggaaggcctgaagaggcgactcaccccgacacgttgaaggcggctttggctgagttcatctcaaccttcatcttcgtgttcgccggctcaggctccggcatcgcctacaacaagctcaccgacaacggcgctgccacccctgccggcctcatctccgcctccatcgcccatgcattcgccctcttcgtcgccgtctccgtcggcgccaacatctccggcggccacgttaaccccgccg

SEQ ID NO: 20442 - DNA, 265 bp, Glycine max
  Clone ID: LIB3049-014-Q1-E1-D3
gacacacagctattccgcgtaagcttgctactgagtttccacactgcataccttaggtcttccgacttcgaagttaatttgcaagacggctaagggaaaggctcagagtaggattgtggtggttgggcatgtggaccctgatgacgcaagcaccattaacgagctgaagaagcctgttgtggggaaaggagctccagcgcatgccatatgatggcatgcgcgtacggcctcggacgggaaccagaaaattatgttaacaaaataa

SEQ ID NO: 20443 - DNA, 270 bp, Glycine max
  Clone ID: LIB3049-014-Q1-E1-D4
gatagaaaggagaggagggatagagcgcgttccgctaagcattaaattagaattccagatttgagctcgaagaggcagcagcacccggtgttgtatggcaaacgcagaggagatgcacgtttcgttcgtgtctcgtcgtcttctatccataatttcaattccatttgctcggctggagcgagtcaggcgggggcgaagcgggatgactcggggctggtgccactggaggaacaagagggagaactcgcggacatgcgcgtcgcggggagg

SEQ ID NO: 20444 - DNA, 256 bp, Glycine max
  Clone ID: LIB3049-014-Q1-E1-D5
ggaagcttagtttcctttataaatacccactctcttctccatgagtttttctccaacacaaagaccagggccgccgccgcgacggagattatcagaaggggccaccgccaccgagattatcacaacgcgccgccgcagcattcacctccccggagatcgaccctttgcatcgcagtgagctttctggcgcgcgatgtatcggagcgctgccttgggaagccacggctgaggtcgctctccgctgccaccaccgtcg

SEQ ID NO: 20445 - DNA, 174 bp, Glycine max
  Clone ID: LIB3049-014-Q1-E1-D6
gagagtgaaattggaaattgcatttgaataatgatgtccatattccggcaatacaccttggaggactcagtctcgcaagtggtggggtccccgaaattcctgaaggagtaccagatagccctgaccttcgcaagcgactaggacgacgacggcgtccccaccaggggggttttc

SEQ ID NO: 20446 - DNA, 294 bp, Glycine max
  Clone ID: LIB3049-014-Q1-E1-D7
gacagccacatcgaaatactgttgtagaaagctttgtgttgtattgtggctgagccaccacaattctgagtcctttctcttcgcggcagtttgcttcctccgtagcagatcgtaaggaacttttgccttgtaagtgtaactattggtaccatggtgtaaacctaaagcattggaagaactgagacattgccttatgaagactgtgggagtaggctctagtagagtgacattgtctctaagataaaattctcaactcagagagatggtcataggctcaataagtaatgccagata

SEQ ID NO: 20447 - DNA, 328 bp, Glycine max
  Clone ID: LIB3049-014-Q1-E1-D9
gacagctttcttgaactgcatccaaagagttcctttgcatgcatgccatggcactcttactcccaaatcttgttttgcggttcaataaagctgtgggaagatacagatagggtcaacaacggactagcttatctcaaactccagattcttctctaaatcttcctatccaattatatatagggataaaattattgcaaagtattttttttcctttttcttttgtgatttgacttaatttaaatcattttcagatttaaaccatcgacttttcagatatatctctatatgtgatcagaattctcaaatgcaatattatgagagaataaac

SEQ ID NO: 20448 - DNA, 304 bp, Glycine max
  Clone ID: LIB3049-014-Q1-E1-E1
ggggaaagagacagaaccgagaatggttgcgactttgagtcttccgatcatagacctctcgtcgccccatcgtcgttccacagccaattccattcgtcaggcatgggtggaatatggtttcttttaccttgtgaaccatggggtggacaccgattttgtgagcaaagtcgtcgagcagagttgcaagttcttctcgcttccggtccaacgcaaaatggacctggggcgcaagggagatagaggctacactcctctctaggctgagacacgtgatgcgacttcaggctgcaaaggtgatccaaaa

SEQ ID NO: 20449 - DNA, 297 bp, Glycine max
  Clone ID: LIB3049-014-Q1-E1-E10
gctagtggcagtgaccaaactccatttctcactcgccgtcgtctcttccgtctagggtttctcctcttcacaaaaatggttgccgcaaaaaaaactaagaagacccatgagagcatcaacaacaggctcgctctcgtcatgaagagtggcaaattcaccctcggttacaagaccgttctcaaatctcttaggagctccaaagggaaattgattatcattgctaacaactgcccccctttgaggaagtcagagattgaatactatgctatgttggcaaaggttggggttcatcattac

SEQ ID NO: 20450 - DNA, 369 bp, Glycine max
  Clone ID: LIB3049-014-Q1-E1-E11
ggagcaaaaccctaatccctatttttcttcctcagtagtgtcatttacgcttctcttctctgcagcaactatgcctaaccctaaggtcttcttcgacatgaccatcggcggtcaatctgctggccgcatcgtgatggagctctacgccgacgtcactccccgcaccgccgagaacttccgcgcgctttgcaccggcgagaagggcgtagggcggagcggcaagcccctccactacaagggctcgtccttccaccgcgtgatcccgagtttcatgtgtcagggtggcgacttcaccgccggaaacggaaccggcggcgagtcgatttatggcgccaagttcgccgacgagaacttcgtgaagaagcacac

SEQ ID NO: 20451 - DNA, 282 bp, Glycine max
  Clone ID: LIB3049-014-Q1-E1-E12
gaaactcaattatacaaaaccctgaagaaagacacagccattgtttacttttcattgattgagccaaagctttgtattttctgcgataattttccattgggtggaagaaagtctcaacctttattcgaaagagcaaggatctgagttgagttgagtgatcatgtgtggtggtgcgattatctccgacttcataccggcaggtcccgccagcggggcgcggcgcgtgaccgccgacatcctgtggccgagtttgaggaagcgcttctcgaagccgctgctgga

SEQ ID NO: 20452 - DNA, 257 bp, Glycine max
  Clone ID: LIB3049-014-Q1-E1-E2
gggagtagaaagagaaatagaaggagaagagaataataatttttccgggaaaattcaagttccaatcggaatcggaatcggaatctgaaatgagtagtacggtttgcgttcgactatgcggtctgctgatctcgaaatgccatcaagtgtgggggtcctacgcaggttccgctagctccatcgtcaagccttccaaggtcaaacagatttcctggaagccaagagggttcgtttaggaaggtttcctcacggatttg

SEQ ID NO: 20453 - DNA, 254 bp, Glycine max
  Clone ID: LIB3049-014-Q1-E1-E3
gaacgcgaaaggcctctcatattgaaaccagggcaacatatatgaatacgaatcgccacgccgctacgttttcgtcagctacatagctccatcacggcagcattagggtttatcatctgcttcaatggggaagggaacagggagcttccgtaagaggaggaacaagacccacactcgctgtgtgaggtgtggccgccgcagcttccagctccagaagagtcgcggcgccgcttgtgctttccccgctgcacgca

SEQ ID NO: 20454 - DNA, 151 bp, Glycine max
  Clone ID: LIB3049-014-Q1-E1-E4
gaagagtttgaagaagcagcttgaatttgtcgctgtggagagcagaaccccagaacagacagtttcagagagatgggtatgaggtgcgggtggcgttgtggttccgtttggtttgtgggtggtggcgatgtgcattgcagggtacatagtg

SEQ ID NO: 20455 - DNA, 294 bp, Glycine max
  Clone ID: LIB3049-014-Q1-E1-E5
cggcaggatatgggcatgacgtggacgtcaattcttgtaccatctgctgagaagcggattatggaagcaattgctgatgctcattgctatcaggtgctccgggcaaatgaagttgagtttgaaattgtgtcaactgagaggaccaatattgtggatatacggagtcgtgagtgctcgtgtcgccgttggcagttgtatggcttaccttgtgcgcatgctgcggcggcacttatttcttgtgggcacaatgcccacatgtttgctgaaccatgcgtcactgggcaaagttacaga

SEQ ID NO: 20456 - DNA, 304 bp, Glycine max
  Clone ID: LIB3049-014-Q1-E1-E6
ggttctagtgtgtgattgtttgttgttgtaactcgttcttcgtcgtttgttgttctgtgtttgtgtttgttttttctctcagctgaaaatgtcttgctgcggtggtaactgtggttgcggaagctcctgcaagtgcggcaacggctgcggaggctgcaagatgtagccagacttgagctacactgagtcaaccaccaccgagaccttggtcatgggagtggcagctgttaaggctcaatttgagggtgctgaaatgggtgtgcccagtgagagagatggcggcaaatgtggaccagactgctcc

SEQ ID NO: 20457 - DNA, 249 bp, Glycine max
  Clone ID: LIB3049-014-Q1-E1-E7
gagaaaccagaacgctctctcacgcagtcgcagtgagtgaaaaggaagaccctaattgcggtagtctcagtggcttcgagagagagaaagaatggcagagaatcgtgttctccgtggcaccatgcgcgcccacagcgacgttgtgacggcgagtgccactcccatcgacaactccgagatgatcgtcaccgcctcacgcgacagatccatcatcgtctggcatcggaccaaggaggacaagacttacgg

SEQ ID NO: 20458 - DNA, 273 bp, Glycine max
  Clone ID: LIB3049-014-Q1-E1-E8
gaagagagatggatttgtaacttcatcaaacaaccttggttattagaagcatcagaaattttaaattagaatgggttatgcgcatttttgaactgtaatattcagcatgatttgtaagcttattttttagaatgggttatgcctatcccatgctacaatttgtaagcttatttttttgttagtgttttgtgttcagcgtgtggtctaattcgttgtcgtttgtgttagtttttttggtttagtcttttggtgaggcgacggggggggggggag

SEQ ID NO: 20459 - DNA, 344 bp, Glycine max
  Clone ID: LIB3049-014-Q1-E1-E9
ggttctggaaagattgcaatgcatgtcttagagaagctaattgcttatggtgctcttcccatttcagtatcagattctagaggatatttggttgatgaggatggatttgactacatgaaaatatcatttttgagagacatcaaagctcaacaaagaagtttacgagactattcaaagacctatgctcggtccaaatattatgatgaagcaaaaccatggagtgaaaggtgtgatgttgcatttgcttgtacttcacagaatgaaattgatcaatctgatgccattaatttggttaattcaggttgtcgtatactagtagaatgttcaaacatgccttgtacccc

SEQ ID NO: 20460 - DNA, 272 bp, Glycine max
  Clone ID: LIB3049-014-Q1-E1-F1
ggtatatcatttacaatttcaagctctctctctctctgtctctctctctctagacttagattttgtgaatggctgaagtggaagagggacaggtcatcggcgtcgacaccgttgatgagtggaagctgcaactccagaatgcaaaagactccaaaaaactgattgtggtggattttagtgcttcctggtgtggtccatgccgttttatggccccagttcttgcaggagattgcagagaaaactcctgaattgatcttcctcaaagtggatgt

SEQ ID NO: 20461 - DNA, 311 bp, Glycine max
  unsure (1)..(311): unsure at all n locations
  Clone ID: LIB3049-014-Q1-E1-F10
ggagagagagagagagagaatggtttccagggttcacaagagaacagcactgtataggagcatacaacagcttcgttcaatcactaactcccatgcgcgccgtaaaacgtctgtgatactggatgcatcgaagtacatacgtggtttaaagcagaagctgcaagaattgaaccaattagcagttgctgcagcccaaaaggacattgagtatggtccagtaatgcccatgctaaaagtggaaccacaagaagaggggtttatgatcaaggtgctgagtcaaaggagttgtcangggttgttggcgtttatat

SEQ ID NO: 20462 - DNA, 289 bp, Glycine max
  Clone ID: LIB3049-014-Q1-E1-F11
cggtattaaggtgacatatagataaatatattggtttcctaagttcacaccataacttcactgtatacgatcatactttacctccattcattcagaaagtgcgattcaccactttattacgtctttgatactggatacatctcgatacatatacttgttattgcataagctgtcacaattcatatacttaccacttgctgcaaccaatcatgacattatctgtggtccattgattttaatacgttcattgcaaccacttaactaaagctcaatcctcatagtgctttct

SEQ ID NO: 20463 - DNA, 326 bp, Glycine max
  Clone ID: LIB3049-014-Q1-E1-F12
gagtgaagtgatgagccaagacctcaagcgagactacgtcgtttcggaggagatcggccggggaagattcggcaccgttttccgctgcgcctccgcagactccggtcactcctacgccgtcaaatccatcgacaaggtggcaataaccgccgccggagactccctcgacgcgcaatgcctattgacggagcccaagatcgttcagcttctctcccctcaccctcacatcgtaaacctccacgatctctacgaagacgaaaccaaccttcacatggttctcgacctctgttacgaatcgcagtttcaccaccgcgtcatgtccgaac

SEQ ID NO: 20464 - DNA, 242 bp, Glycine max
  Clone ID: LIB3049-014-Q1-E1-F3
gagagacaagagccgttactactaatatctacagtagaagcgacgagtagtggagcaagagcttcagcgcagcagtgtccacgacgacgaagccgccgggaccacgagctccggggacgagcccgccacgcctcgcggcggcggaacccgacaccggcgcttccgcggcgttcgcaagcgccgctggggcaaatgggtcgccgaggtcctggaggcgaggaaaaagtcacgcagatggctcg

SEQ ID NO: 20465 - DNA, 274 bp, Glycine max
  Clone ID: LIB3049-014-Q1-E1-F4
ggggggacagacacaaatcacaaagcccagttccaaccccacattgaacctaaaaaagcaatgtcacgtccaccattttccccccctcgctcgagttcccgtctcgttgtcggcctgttagcagcattactcttagctcaatcgccaccttcgccttctccttcgtcgtcgtcttcgtcttctgttgcctgcagaggcacactatagtccaagttctccataagacaaatccgcaaacagggaggaaaactagccaaagtcgttgaggactttc

SEQ ID NO: 20466 - DNA, 289 bp, Glycine max
  unsure (1)..(289): unsure at all n locations
  Clone ID: LIB3049-014-Q1-E1-F5
gaccgcgaaacgcacatttcactattcattctcgtttccctttcgactgtgattgtttgttaactgaacttttcgagcaaaatgtctggacgtggaaaggggggcaagggtttgggaaagggaggagcgaaacgacaccgtaaggtgttgcgcgatagcattcagggaatcaccaagcctgcgattcggcgtttggctcgcangggtggtgtggggcgtatcactggtctcatctacgaggagacacgtggcgtgctcaagatcgttctggagaacgtgattcgtgacg

SEQ ID NO: 20467 - DNA, 258 bp, Glycine max
  Clone ID: LIB3049-014-Q1-E1-F6
gatcgatgaggaaattgaaacaatgccaaggccaagaagatgctaatacttttggtaactctttaaattgtcacgactacaaggaaagttcatggcgccatggacagatgatcccagctgatgtgaatcaaggtttacctgaacgcatgaaagcagcttggttacagaagcaatgggttgaatcgcgcacacttcagttagaagaacagaagcggcaaattcaggtcgagatgctggaactagagaagcagagattca

SEQ ID NO: 20468 - DNA, 308 bp, Glycine max
  Clone ID: LIB3049-014-Q1-E1-F7
gatagtaacttcttgaacagtggtccgtgggctccaccaccagcaccgccacctctgccaccagcacagtttcagcggatgaggacatataccagggtagataaacgcggagctgtgggaaggtccatagacataacacgatattcaggttaggaggagcttagagaggatctagctcgtaggtttggcatagagggacagctggaggatcggcaaaggataggttggaaacttgtctatgtagatcatgagagtgatgttcttcgacgtggagatgatccttgggaggagtttgtgaactgtgtccg

SEQ ID NO: 20469 - DNA, 290 bp, Glycine max
  Clone ID: LIB3049-014-Q1-E1-F8
cgggattgtgcctccgaaccaaaacctgaagcctagaaccttcgtccgtctcacagtttgccggaatcaacgatgggtcctcagccggagccagttagctacatctgcggagattgtggaatggagaatacgctgaagcctggtgacgttatacagtgccgtgagtgcggttaccgtatcctttacaagaagcgcactcgtcgcattgtccaatacgaggcacgctgaagaaaactgctctgacattggcaagtaagttccatggagagtgtgacaacatctgtgttgtg

SEQ ID NO: 20470 - DNA, 345 bp, Glycine max
  Clone ID: LIB3049-014-Q1-E1-F9
ggctctttcgtggttgtgccacctctataattctcttccactgtcttgtgttctcctgcaagcctgcaaccacaaaaaccaaatagtttttttggtcaaactcaaagcttttaacttaacagaagcaagaatggtaaaacggagttaagcaagacaaaggaagaaagaatggtgagagagcataacattaacagtggatggccaccaatatgggccccactactgaacgtgcagagagatgagtatgatcagcattggagcagcttcgatagctctgtgaatgctgtttcttttggctttgttgccactgccattcttgtttccatgttcttagtcatggctatc

SEQ ID NO: 20471 - DNA, 295 bp, Glycine max
  Clone ID: LIB3049-014-Q1-E1-G1
ggcacaagtttgttgagatagctagaagcaataagatgaaaatgaaagtgcttgttttgtttgttgctacagttttggtagcatatgaatgccagtggctcagactaccagaagttccctctccaaatgaaaactgggtttggtgggcaatacagcaatgaggtggcatgtgccagttggaagcttggcgtggaagcaaacaacgtagtcaagtggcaaactgttcctgcagcttgcggagagtacatagctgactacgttctagggagaccaagatagatgagattccaaaaca

SEQ ID NO: 20472 - DNA, 361 bp, Glycine max
  Clone ID: LIB3049-014-Q1-E1-G10
gacacacgcagtagctagcgcccccttgtttgtaggtccgaggttaagggaaacatcggtgtggtgtggttttgattcgctgtgtccaatccaatccaatccattctctttccctcttcttctcatatcgttttaaaggtttcatcttttcttaattccagctagtctgacttagatatggcggtaaaaccaacagttgcattaagggctattcttgttggaggcatagcagcatttgctaaaatagcaggtgctatgaaagctgcaggtggtgcaaaaatgggcgcagctgcagctgccatgacagcagcagcaactgcagctgtggcagggtccaaacaagagcaaacagatgcttctc

SEQ ID NO: 20473 - DNA, 344 bp, Glycine max
  Clone ID: LIB3049-014-Q1-E1-G11
ggaggttggtaagacggtgaaatccgaacccctccatcaaagtgaagaaaagagaagtaggctctacggttttcgcgagtaagtgtgggtcagaattcaaaatccgaatcagcaactccaattcaaaaccggttatccgaatcgaaatttataaaagtaccaaatcctctgtgactgctagttaatcagagagagtagtgagccaaagctgggaagttaaacttggttgcatgcgaagagcaagaaatatgagaccaaacatcgtttctgaggccgggttgcctactaggatgagtcaatggtgggaaagcattccgtttctcacttctgcagtggtggttgtc

SEQ ID NO: 20474 - DNA, 255 bp, Glycine max
  Clone ID: LIB3049-014-Q1-E1-G12
gacaagtggaaataatatatgcgttaaccacctacacgctcgatccttaaatcttacaattggaacttcacattattcgtgttctgtcatcggggtatgtgattcctcacggagggtagtgcacacacttcacatcacgctgtcacgtcgatgacggagatcatacgctgcacgactccaaacacgcctttcagtcaaggccctccatacagatttacatagtagactcttacggaaacaatgtctggcttcccg

SEQ ID NO: 20475 - DNA, 266 bp, Glycine max
  Clone ID: LIB3049-014-Q1-E1-G3
gactgcgaaccagtagggactcccattccgactcttagccgccgatctctcagggcttgcagcgtctcaggtaagctgtgaagatgtacacatcaaggaagagaatcgacagggataaggatgctgaaccaactgaatttgaagagtcagttggacaggcattgtttgatgtggaaaataccaatcacgagcttaagagtgatctgaaggatttatagatgaacgcagccgtggaatttgatgtgtctggaaaccgcaaggctgtt

SEQ ID NO: 20476 - DNA, 271 bp, Glycine max
  unsure (1)..(271): unsure at all n locations
  Clone ID: LIB3049-014-Q1-E1-G4
cggggttgttaatatgagcacgagcaagagcgctcttttggtatgaaagcctctccttcaaccctgaagctcagagccatggatgatgcgtctacgtgcggtcagcagatggacgggcagagagaggagagaagggttacagacacttatagagagctatgtgaaagacgagagaggtaagagggtgaagtgtggttatgagattccactgcaactggaggaggcgtcgagggggatcncagggagtgcgaagttcagaggtaggaatttg

SEQ ID NO: 20477 - DNA, 293 bp, Glycine max
  Clone ID: LIB3049-014-Q1-E1-G5
ggagatttggatttgggggaacatttggttgattagggtttcttcgggtgctaatgctcttgttttctcacagtcacacagcagtggaagcagtcacagagggagtgaacaacatcaacatctccgattcttacaagaagaatcgcattcacgtctccaacaccagagagcccctcttcttctacgtcaatctcgccaagaggtatatgcaacagcataatgaacttgagctctcagcactaggaatggctattgctacggtggttactgttgctgaaatcctgaaaaacaat

SEQ ID NO: 20478 - DNA, 260 bp, Glycine max
  Clone ID: LIB3049-014-Q1-E1-G6
ggaaagtgagggagagagaatggaggaagaggcagggatctaccgtctagcggaggacagcctccggcagatagtccgcaggctgccactgagggaaatagtgatgtgccgctcagtgtcaaaattcttcctgcagctgctctcaacaccgtcgttcctccaggtcctctccagcgccgatccacccctccagctcctggccctccgcagccgccgccacacgccgtctcacacctctctccccctcttcgaccccgcca

SEQ ID NO: 20479 - DNA, 268 bp, Glycine max
  Clone ID: LIB3049-014-Q1-E1-G7
gatgcatagcaattcccaattcctaattgtttaaacctaattctcatttcgtcatcgttcgattcgtctcctcctaaagatgcagatcttcgtgaaaactttgaccggtaagaccatcacccttgaggtggagtcctccgagaccatcgagaacgtgaaagctaagattcaagacaaggaagggattccagctgaccagcagagacttatctttgcgggtaaacagcttgaggatggtcgaacccttgccgactagggcatccaaaag

SEQ ID NO: 20480 - DNA, 286 bp, Glycine max
  Clone ID: LIB3049-014-Q1-E1-G8
ggagatagaagggaaaagtgggaacacacagaaagccagagaaccagagagagagagagagagagagagtgtgcttcgctctgcacttgcactagtgcaggcctcagctttgtttggttttggattgagaaagttgatatagttagagaaagagaaagtgtacatctttcgatcatatagtgtagatatagaggatatatattgcgtgtgtgagagatgcagcagcacctgatgcagatgcagcccatgagggcagccgagtaccccaacaacgtcagcactgatc

SEQ ID NO: 20481 - DNA, 368 bp, Glycine max
  Clone ID: LIB3049-014-Q1-E1-G9
ggcggcacaaagcattcactgtgtcggaaaaagaagaagagaaaaaagatgagcgacggaggaaaacgacaaggtggaagagcgttgccgccgccgccaagaggccctccgcctcctcccccctctcgccctcgcctcgaacccgtcgatcgcgaaaagacatgtccgttactgctgcgagtgttcactaagattgggagtcaccattccatggaagactttgccgtcagaggcaaagagcccaaagacgaggttcagatttacacctggaaggacgctactctccgagaactcaccgatcttgtcaaagaagttgctccggctgcaaggagaagaaacgccaaactctccttcgcctttgtattccc

SEQ ID NO: 20482 - DNA, 270 bp, Glycine max
  Clone ID: LIB3049-014-Q1-E1-H1
ggtgaagagaatggctcccaagggtttaacctttctggctgtgttaatatgcgtttcagcactgtcactgagtccttctgttgcgggggaagggcagaataatgggcttgttatgaacttctacaaggaatcatgccctcaggctgaagacatcatcacagaacaagtcaggcttctctacaagcgccagaagaacactgctttctcctggctcaagaacatcttcgatgactgttgcggttcagagttgtgatgcttcactgttgctgg

SEQ ID NO: 20483 - DNA, 353 bp, Glycine max
  unsure (1)..(353): unsure at all n locations
  Clone ID: LIB3049-014-Q1-E1-H10
catattgttcaatataagcatgcagtgggttgaacttgtgatagatttgctaaacctatatttcttactatatccattttagtatttagtatagtcacaccttcaataaagtagttttgtttgactgcattgacatcacattgttaagaggtatgctcaactttatgtttcttatcgtatccattttgctttttatatgcctttaacgctgttgctctttccaggattggttttctttactattcgatggtggaatcctgctacctttgaagccatgcatccagagggaactgctangagacctacgtggccttacgtcgaagataaatcctatctctggacatggctgtttt

SEQ ID NO: 20484 - DNA, 344 bp, Glycine max
  Clone ID: LIB3049-014-Q1-E1-H11
ggcagcctcaagaatccacacaaactcagggtagggcagagagagagagagagagagagagagagagagagaatgggagggtgggctatcgcggtgcatggtggcgctggtgtcgaccctaatctcccactcgagcgccaagaagaagcgaaacaacttctcacgcgctgtctcaatcttggaatctctgctctaaattctaatcttcccgccatagatgtcgtcgaacttgtggtgagggaattggaaacggatccgctgttcaattcgggccgtggatctgccctgacagaaaaaggaacggtggagatggaggctagcatcatggatggtccaaaacgacg

SEQ ID NO: 20485 - DNA, 340 bp, Glycine max
  Clone ID: LIB3049-014-Q1-E1-H12
ggacaagagtggggactggagaatgaatatggagtgttggcgacgtagatctgaaaggtgaagaatttgagtaagtaaaagccaaagttttcaactttgagtcaaagggtcatcaaatgctttaacgttttggttatttctgccttccgacactctaagaaaatgccgcacccttctttctacaagcttcttcaaccctccactgtccagatcaaccatcaactgaagcttcaggataattttatgaggaaatatgggggtgaaatctctccaattgttacactctctgttcctgaaggtaatgtctgacatgtatgaatttatatagcagacaacaaat

SEQ ID NO: 20486 - DNA, 271 bp, Glycine max
  Clone ID: LIB3049-014-Q1-E1-H2
gagatcgcacatcaattattctttcgcagcttcgaaaatcaattttctgtcttctcggcgtcgtcttcctctatcaatcgttttccatggatcgtaggaagcaaaccggtcacaaatcgagcggtgggaaggctcctatgaagcaactcgccagcaaggctgcaaggaaatctgcacgggcgaccggtggagtcaagaagccgcatcgctatcgccctggaagtgttggctcttcgtgagatccgaaggtaccaaaagagcacagagcttc

SEQ ID NO: 20487 - DNA, 290 bp, Glycine max
  Clone ID: LIB3049-014-Q1-E1-H4
gagggggcagcgcttgatttgaggccaggcaggccccactcaaccaccacacctctcctcgttcacgctgcccctttctgctcttcttctacctttcaagttttaaaagtataaggatggcagagacattcctatttacctcagaatcggtgaacgagggacaccctgacgagctctgcgaccaaatctccgatgcggtcctcgacgcttgcctcgagcaggacccagacagcaggagttgcctgcgagacatgcaccaaaaccaacttggtcatgggcttcggggaaat

SEQ ID NO: 20488 - DNA, 273 bp, Glycine max
  Clone ID: LIB3049-014-Q1-E1-H5
gtggtagtgtggcagcgacacgtagcaacttcaataatcgcatcgcagaagcagtttccggtgcatctcagcgtcgccgaaaatgaacgacgcagatgtctcgaagcaaatccagcagatggtgcggttcatccgccaggaagctgaggaaaaggccaacgagatctctgtctccgccgaagaggaattcagtatcgacaagctgcagttggtcgaagccgacaagaagaacatcaggcaagaatacgaaggcagagagcgccaagttgaaat

SEQ ID NO: 20489 - DNA, 310 bp, Glycine max
  Clone ID: LIB3049-014-Q1-E1-H6
ggatatgatgtaatgtaacattaaaatcacagaaacaacaacgctcactgattaccaatccatcgtttttgaagtccacataaggctaaactaaggacctctctctgcaaaacaaaaccactctcttccttccaacgaatctctgccacacaacagataactctgaacatataatcaacctaagacccgcctctgattctgaacaacaaaaggtatgttctgtcctttctctaagattgatgatatgagatgagatgggtttgtgttgttgggaacagatagcacgttgttttttctttccgttcatgtt

SEQ ID NO: 20490 - DNA, 295 bp, Glycine max
  Clone ID: LIB3049-014-Q1-E1-H7
gacattagcattccacctcaaagcaacacaagaacactctcttgaacattcatggatccagtgagcgtgtggggtaacacgcccttggcgacggtggatcccgagatccatgacctcatcgagaaggagaagcaccgccaatgccgcggcatcgagctcatcgcctccgagaacttcacctccttcgcagtcatcgaggccctcggcagcgccctcaccaacagatactccgacggcatgcccggcaaccgctactacggcgggaacgagttcatcgaccagatcgaaaacctct

SEQ ID NO: 20491 - DNA, 294 bp, Glycine max
  Clone ID: LIB3049-014-Q1-E1-H8
gagaagaagaagatggagatgtatcagatctggagcaggagaatagcgttgggagcgttcgcgtttgttctgcttttcctatcgggctcagcagaggacgtcgttgtgctctctgaagataacttcgagaaggaagttggtcaggacagaggagctctcgttgagttctatgctccttggtgtggacactggaaaaagcttgctccagaatatgaaaagcttggtagcagcttcaggaaagccaaatctgttttaatcggcaagggtgactgtgaggagcacaagagtttgtgc

SEQ ID NO: 20492 - DNA, 333 bp, Glycine max
  Clone ID: LIB3049-014-Q1-E1-H9
gaagcagcttaacaacaaagcaccatttctcttccctcaactaaactcatattccaaaacgcagagccaaaccatgtcgttcgccttcgggcactctcatgccacccagacccaccaccgcagggacggcgacgacgacgatcgacccaccgtttaccctccgccgggaaactccttcagcaacccgccacctccgttctacggcgtccctcagccaccaccccctcagccggagacccacgtgttccattccgctcacgtgacaccaggacacgtgtcccatgacttcaacaactactccgctccgccgcctctaccccattcccaccatca

SEQ ID NO: 20493 - DNA, 322 bp, Glycine max
  unsure (1)..(322): unsure at all n locations
  Clone ID: LIB3049-015-Q1-E1-A1
gatactcaattcattttcttcttctgcttcaccttctcttctcttctctcatagggttagggtttttttctcttcattgctctctctgtcgttttatttccatggctcagcaagatgctcagaatggtgggtcggagaatgccgctgctgcggtgtcgtttgtcgctttgaagccgcagctcctcatcgaagctcccaaagcgaacgacgccgttctgttctacaaggccgcgtttgccgctgangaggttggccgtacgctcaaccctaagcgtaaagcggagcacgagcttcctctcatactctccgcagagctcaaaat

SEQ ID NO: 20494 - DNA, 113 bp, Glycine max
  Clone ID: LIB3049-015-Q1-E1-A11
gaaagatgggcgaagtagacttaaaagccaagagtaaagcttcccttggttcactctcattggctgtctcattcatcacgggtatggccatggattctattcacatcgaagga

SEQ ID NO: 20495 - DNA, 315 bp, Glycine max
  Clone ID: LIB3049-015-Q1-E1-A12
gcccaaaatattttcatagcattttcagaggaaaatggcgggtacggtttcgacttgtttcttcttcgtgtttcttctttcgctccttcttccttttcagatctccgctgaggaatcctcggagaaggagttcgtactcacattggatcactctaactttcacgacactgtcagcaagcacgatttcatcgtcgtcgagttctacgccccatggtgtggtcactgtaagaagcttgctccggagtatgagaaagctgcttctatcttgagtagtcatgatcctcctattgttttgggcaaagtagatgccaatga

SEQ ID NO: 20496 - DNA, 397 bp, Glycine max
  Clone ID: LIB3049-015-Q1-E1-A2
gacactattcctgattccgaatccgagaacgtggttgtgacaggatcattgagctcggcaagaatggaagaacacaggttgagcttgagaatgagcacgcttgtcttcactctttccattatcatcatcgtactctcttacccagcacaaccacttgcgttgaaccattctccgaaattcctaggaaaattcgcagcaacagcacgaacccattcaaattccgagccaccgccgcaattccactacgaaaaaagatacttccaacagcgcctcgaccacttcagcttctcggagctacccacgtttcctcaacgctaccttatcagcaccgaacactgggtgggcccacatcgcctgggcccaattttcttctactgcggcaacgaaggcgacatcg

SEQ ID NO: 20497 - DNA, 351 bp, Glycine max
  unsure (1)..(351): unsure at all n locations
  Clone ID: LIB3049-015-Q1-E1-A3
aacaacaaaaggggttcaaggaaaaggccaaaccttcccaataataacttcccttcctaaaaggaaccataaggcaattacaagaaagggaaagggttaaccacaagttactcaatgaaatcttctaaaacaaagccgtaacaatggctttgccctagctccacaagagacaaatttgtctgtggatggaacttttgaacatgctctagaangatattctggttttggtagtaccaaaaccagattatctgaaacctatttccctcaaccttctacatggggattacattatgctaatggtttccttcattcatctgagaaacctgaatctggacctgcaagccctcagct

SEQ ID NO: 20498 - DNA, 403 bp, Glycine max
  Clone ID: LIB3049-015-Q1-E1-A4
ggagaaaacacaatcgagaaaaactcccgatgtctctgtcccctcgcgttccctctgtttcgattctgtcaccaccgttcagagacatccacgttctcatctgtttctgaatctcttcttagtcgatacactcgctcccaatctcacctgaataagaagaacatggcgattatggtgatggtgggattgggcctattggacttcctcgtcgctggggtttctttaatcattggtttgggcttcattgccttcattgcttccattctctgcgccactgcgttcttcaacaacgccaaggacgtctcctgagattgaagcctccattaaatgcgactatgtggccacagttgtcagcaatttacccccacaacatcaaggattgcaacgaaacagcgaccatata

SEQ ID NO: 20499 - DNA, 246 bp, Glycine max
  Clone ID: LIB3049-015-Q1-E1-A5
ggaggtatgggaatctaaaacagcagatagtctaactctcatcacattctttctcacgttttctcaggctctagaggtcaggcaggtattgctcatcatcagtcttgcgaatcgcatgcttatacgacaatctcttacccatatcatcactcttgagcttagatgattgaatgcatggtgtacatctgcatgtgccaatttggcatactcgtcaatgtgaataaattaatcatagttctcatcttc

SEQ ID NO: 20500 - DNA, 382 bp, Glycine max
  Clone ID: LIB3049-015-Q1-E1-A6
ggtccttctttgcgagattgaatcgtaagcagcggctaccctaatcctctcctcttcctctctactaatttcagctatggccgacgaagctgtggttgttccagatcccacccagatcgatgtcaagctctttaaccgctggagcttcgacgatattgagattactgacatttctctggctgattatatcggagtggcgacatccaagcacgccacgtatgtgcctcacaccgccggcaggtactcggtgaagcggttcaggaaggcgcaatgccccattgttgagaggctgaccaactctctcatgatgcacggtagaaacaatggcaagaaactcttggctgttaggatcatcaaacatgctatggagaatattcatttg

SEQ ID NO: 20501 - DNA, 360 bp, Glycine max
  Clone ID: LIB3049-015-Q1-E1-A7
ggcgtcaattacgttatattgattgtgctgtacacgattctggtctctgcagagtaggtttgcattttccgaaaatcgaagttcgatttcaggacttgaccgttgagacttacgtacatgtcggtagcagagctctgccaacgattcccaatttcatttgtaatatgactgaggctcttttaagacagttgcggatgtacagaagaaagagaagcaaattgacaattctagcagatatcagtgggattattaaaccttcaaggctaacgttgctgttgggtccgccaagctctggaaaaacaacactactattagctcttgctggtacgctatgacctgggttgcagatgtcagggaaca

SEQ ID NO: 20502 - DNA, 389 bp, Glycine max
  Clone ID: LIB3049-015-Q1-E1-A8
ggaaggaaagtgagtggaagccaggggcaatccgatagaaaagggttttatttctttttctcttcaattattttcttttcctgtccttgttgttcagttccgttgttgtgttgtgtgctgcaacacaatcggtggtctgagaaatcttgtttgtgttgggtttgttatggctcggagagcagaggaagagtacgattacctgttcaaggttgtactgatcggtgattccggtgttggaaaatccaatcttctgtcccgattcactcgcaacgagttttgcctcgaatccaagtccaccattggagtcgaattcgccactcgcactcttcatgtggagggaagatctgtgaaagctcaaatactggataccgccggacatgaacgattca

SEQ ID NO: 20503 - DNA, 267 bp, Glycine max
  Clone ID: LIB3049-015-Q1-E1-A9
ggttctagtgtgtgattgtttgttgttgtaactcgttcttcttcttttgttgttctgtgtatgtgtttgttttttctctcatctgaaaatgtcttgctgcggtggtaactgtggttgcggaagctcctgcaagtgcggcaaaggctgcggatgctgcaagatgtacccagacttgagctacactgagtcaaccaccaccgagaccttggtcattggagtggcacctgttaaagctcaatttgagggtgctgaaattggtgttcccgc

SEQ ID NO: 20504 - DNA, 362 bp, Glycine max
  Clone ID: LIB3049-015-Q1-E1-B1
ggcgttgttgcagggcaatgtgattgaggcagatagtgaaatcctaagattgtttagttggaagatggaggcagtggaatcaatagcggttccggaaccggacgaagacgatccttcatcgacgcttctggatctctcgagttaccagctccacgaccttgactcggtcgagttgccacccagcctcaccgagttggacctcaccgcgaatcgcttgtccacgctggacccgcgcatagggaacctctcccatctcaagaagctctccctccgccaaaacctcatcaccgacgccgccgttctccctctctcttcctggaacgccatttcctctctcgaggagcttgtgctgcgcgataatc

SEQ ID NO: 20505 - DNA, 386 bp, Glycine max
  Clone ID: LIB3049-015-Q1-E1-B2
caataaggatcaaggctgaaagaattcctgatgcaagctcccagactaatctcttccctgagcattatgggcaggaggatctgatgactgcacttctaaaacagcaagaaggcatgggaccagctgagaatgagtttgaatttgatggatattctctagacaacattcctgtctagaacaaatcctttctgactgaagttgccagtgtaaatagtttgttacacaagcacatgatcatcctgctgttagctgttttggaattgagtctaattgttcaacaaacagaatttggttgatgtcaaatattcagacttctggggagtagcatattgtgatggtttactctggatgctcaagatgaatcagctcaaatctcaactgcatat

SEQ ID NO: 20506 - DNA, 311 bp, Glycine max
  Clone ID: LIB3049-015-Q1-E1-B5
gaagctattggaaaagtgagtgagagatctcaatatcctcagataatggagggatacgttgcgaaggttatgaatgtgcggactggagttgggcatggccatgattgggatggccaatggcaaatactcctgttgtcgcatgccctgctataggttggcggcatgcaagccgagtgtaagtcgggatcagcctgcgtataccaccactgattgttactcacccattgctatggccgatcttaaatgcctctgccgcatcgaggattccggccctctctcgctgtatggtgttgatctgacctcctgcatgg

SEQ ID NO: 20507 - DNA, 401 bp, Glycine max
  Clone ID: LIB3049-015-Q1-E1-B6
gtctgaagttaagggtaaggatatagttgagcttattgctgccggtagggaaaagttggccacggttccttctggtggtggtggtgccgttgccgtcgccgcagctcctgtgggaggtgctgctgctgctgctcctgctgctgaggcaaagaaggaggaaaaggtggaggagaaagaggaatctgatgatgatatgggtttcagtctcttcgattaattggtgtagtctattcagcttttttgttcagaacatattcttaattaacactagagcatgagtttgtcaaagttttgttctaaggagtaatttactgtgttttttaatatcaatgaccaaccaagttggatgaatttggtttgatattttagtgttttgatgttatggaatttcattttggtaa

SEQ ID NO: 20508 - DNA, 252 bp, Glycine max
  Clone ID: LIB3049-015-Q1-E1-B7
tggggttcatgaggtggaggcggtagcagaggtgtttaccgtggaacttcccagacttatgcagctgcagcatcaactgaacatcctgcgtgttacacatacttgggtgcgatctgatgccttgcgataatcctgtcgtcacacccgcatccgatgttcactattatgttctcatctttgacattagtctcgctaagatctatcgacattgcatttcacggactgtaaggttcattccatcttatgccttga

SEQ ID NO: 20509 - DNA, 402 bp, Glycine max
  unsure (1)..(402): unsure at all n locations
  Clone ID: LIB3049-015-Q1-E1-B8
ggcgcctgatttctcagttctctcacacactcattcggtgctccgaatctcagattctagggttagggttcccaatttctccaccgatcagaaaatgagttcaactggtggttctaccaagggcggaaggggcaagcccaaagcctccaaatccgtttcaagatcgcagaaagctggtctccaattccccgttggaagaatcgctcgattccttaaggctgggaaatacgccgagcgtgttggtgctggtgctcctgtgtacctctctgcagtgctcgaatatctcgctgctgaggttttggaattggctgggaatgctgctagggataacaagaagaatcgtattgttcctaggcacattcagcttgctgtgaggaacgatgangaactgagcaagctttt

SEQ ID NO: 20510 - DNA, 337 bp, Glycine max
  unsure (1)..(337): unsure at all n locations
  Clone ID: LIB3049-015-Q1-E1-C1
gaggtattggtgggtgaaatcaaaaaccctatccctcagtctcatcacgttttttgagctatgtttcaagagagttagttaaggacaataaggcanggaagaataacaaggatgtacatagaacgatagcgagttggtgtttctgtttccgcttccaaatcggatgatctgaagcgaatcaacgacgttctcgataagcacttggaacgatactctccttccacttctcgccccatcacctccgccgccaagaactccaacctccaagtggaagaatctgaaacggtgactgaacagtctgatgttactggctctgacggggatcgcacctcttgga

SEQ ID NO: 20511 - DNA, 366 bp, Glycine max
  unsure (1)..(366): unsure at all n locations
  Clone ID: LIB3049-013-Q1-E1-C1
gaaatggtagcaatgaagcagtgactagaggtggtgaggaaggtgatttggactgtgattcaatgtcataattgtccaatatgtttgaaggatctgaagctcttggttccgttctacaacctcgggcttggcctttcttccccaaccatttcttaacctttcactctctcttatgcatatcaagcatgccttcatcctggacttgtgattcaacatgcaggaaacttgaataacacgccagtaaacaaattgacatgattgctttgtttttatgcaaatgtcttcaattattgactgctgatgctattatgatttggttcatatttgttttttatgtancatatacagtcaaaggtttaaacccta

SEQ ID NO: 20512 - DNA, 325 bp, Glycine max
  Clone ID: LIB3049-011-Q1-E1-C11
ggtgttctgagctgctacaatcaatggagaggaaaagaagccatgcatctttcatcatgtgtgcaatgctggttggattgctctctcagagccttgtcattcctgttttatccaccactgtagtccatcatacgagctagtacagcccagatttatctgcgggaagtcggctcacaggctcacacactagtagtcctccatctcatggccatgggagctctccaccctcagatcacaatagtccaagtactccatcaacatcctcatgtgcaacctgtggatcatcacccccacaacatcatgatccaacaccctcaactccatc

SEQ ID NO: 20513 - DNA, 303 bp, Glycine max
  Clone ID: LIB3049-011-Q1-E1-C12
gatacactgctacttccgtgacatcgctttgctaatcctctctctctctcagacgcatcaatttccaaccatgacggactacatgcaagaacaggatatggaaattgaagcattagaagctatacttatggatgagttcatagaaatacattctggtgaaagcggcctaagtacttccaatcgatgcttccaaatcaacgttgttgcgcaggatgacgatgcagatgggtcaataactaatccagctcaactggctttgatcttttcacacagagaaccatatcctgatgaagctccactttt

SEQ ID NO: 20514 - DNA, 374 bp, Glycine max
  Clone ID: LIB3049-011-Q1-E1-C2
gaacatcgtcctaataacccccccttccctcttctaattcaaaacctcagcaatgttcagatacttttccgattccgtcgcgaatttccgattcatcgaagaagaagagaaaacctaaatcgcagatccgaacgcagtagaaaaaccatggcggaagaacaccgatgcgaaactcccgaaggtcacctactctgcgccaacaactgcggcttcttcggtagcaccgccacgatgaacctctgctcgaaatgctatggcgcgatccgcttgaaagagcaagaagaagccccgacgaaatctacaatcgaaaccgcgctctcttcttcctcgttgaaaccgtcgttcttcacgttaactccaacgttggtggatgt

SEQ ID NO: 20515 - DNA, 301 bp, Glycine max
  Clone ID: LIB3049-011-Q1-E1-C3
ggtgtgtgcgttccaaacattattgtttcctaccaagttctctgtctggggagttcttagcaccaccaccagcttctgcagtagctttaagctacgacagattttccttgaccatggggcaaaagcatttagtgacggtgttctgtttatgggctttaaaatgtccccttcttcaatctttctcctttggaattccgaaaattggtttgaagaagagacccctaaatcttgatactattaaggctgctagaaaggcaaaagaaggtctaaaatctgttagaccaatgatgggtgcacatga

SEQ ID NO: 20516 - DNA, 398 bp, Glycine max
  Clone ID: LIB3049-011-Q1-E1-C4
cagaagggggaaaggatcttgaaaggggcattacccgaaattccgtgagttgcaaaaatgaagacaattctttccaccgagacaatgaacatcccggacggcgtgagcatcaaagttcaatgcaaagtcatcgatgttgagggcccccgcggaaaattggtgcgagacttcaagcatttgaatctcgattttcagctcattactgacgaaaacggtaaaagaaagctgaaaatcgacgcgtggcttggttctcggaaaacatccgccgccattcgcaccgccttgagccacgtggagaatcttatcaccggcgtcaccaagggctaccgctacagaatgaggttcgtttatgcgcattttcccatcaacgcaagcatcggcaacagcaacaagtctat

SEQ ID NO: 20517 - DNA, 345 bp, Glycine max
  Clone ID: LIB3049-011-Q1-E1-C5
gagggttttgcgctgttgttgctgctcatcctccgtaacctccgagctctgcaccgaagaacgaagccatggggaagacacatggaatgggatctgctcgcaagctcaagtcccaccgcaggaggcaaaggtgggctgacaagtcatacaagaaatcacatcttggaaatgaatggaagaaaccttttgctggttcatcccatgccaagggaattgtccttgaaaagataggtattgaggctaagcagcccaactctgccattcgtaagtgtgccagggttcaacttatcaagaatgggaagaagattgccgcttttgtccctaatgacggttgcttgaactaca

SEQ ID NO: 20518 - DNA, 388 bp, Glycine max
  Clone ID: LIB3049-011-Q1-E1-C6
gacagttcctttttctaactaccatttcctctttttgtgcatcctctctcgtgtcctctccctcttcaactactactactttatcactacactacaacatactctaatggaacaaaccttcctctttctctttcgccccacacattagcaacctacgaccactctgcttcacaattccaaaatgggttgctgcgtcagtaccaacagatctcattcttcaccctcaagcaagcctttggagacaccaagatctgccgcgaaaggttcagaaaacagagcaccgccaccggaggaagaaaccgtgaaggaagtgttgtctgaaacacccaaatggaagcccaaattcgaagcggggaagccaacagagaccgaagttgagaacgagaag

SEQ ID NO: 20519 - DNA, 350 bp, Glycine max
  Clone ID: LIB3049-011-Q1-E1-C7
gaggtgcaggaaaattaatctccctttcattttctctgcatctgtactctccaaaatgccgtccttagaggaggagctcttcccttcaaccccaggcaagttcaagatcgagcgggcccaccacatgaaccgccagctctaccgctgcttcgcctccaccagcaccatgttcctgtggccctctttttaatcgccctcaccgcttcatatctcagcttccaaggcttcgttgattccggcagccgctacctctccgcctcctggggccggatccagtgggagaagcaggtcccgcactcccgccagatccaccgtcaaggcggcatgtccgtcctcgtcaccggcgctgc

SEQ ID NO: 20520 - DNA, 380 bp, Glycine max
  unsure (1)..(380): unsure at all n locations
  Clone ID: LIB3049-011-Q1-E1-C8
gacacaacattgatttctgagattcagatgatggcgagtgagtcgcaaaactgggtgttcatggtcactgcacagacaccaaccaacattgccgttatcaagtattgggggaaaagagacgaaaccctcatcttaccggttaacgacagtatcagtgtcactctcgatcccagccacctctgcaccaccaccactgctgccgtcagtcccgctttccaccaagatcgcatgtggctcaatggaaaggagatttctctttctgggggcaggttccagagctgtttaagggagatccgtgctcgtgcttgtgatgttgaggatgaaacaaacggtatanagatcacaaacgaggattgggggcaaatgcatgtacacattgc

SEQ ID NO: 20521 - DNA, 281 bp, Glycine max
  unsure (1)..(281): unsure at all n locations
  Clone ID: LIB3049-011-Q1-E1-D1
gatcagcacaagattgcaaaatgaagttcaacattgcaaatccaccactgggtgccagaagaagctggaaatcgatgacgacctgaagcttcgagcattttgggacaagaggatctcccangaggttcttggtgatgctctgggtgaggagtttaaaggatatgttttcaaaatcaccggtgggtgtgacaaacaaggattccctatgaagcagggagtgctgacccctggtcgtgttcgacttttgctccatagangaactccttgtttccgtggatatg

SEQ ID NO: 20522 - DNA, 325 bp, Glycine max
  Clone ID: LIB3049-011-Q1-E1-D10
ggaacctttgcattctattcattcaagattcagcaagtgcgttttggaagcagagaccgaaatacttcgagatggcccgtacaaagcaaactgctcgtaagtcaactggaggaaaagctcccaggaagcagcttgcaaccaaggctgcacgtaagtctgcaccaacaactggtggtgtgaagaagcctcatcgttatcgccctggaactgttgctcttcgtgagattaggaaataccagaagagcactgagctcctaatcaggaagcttcctttccagaggttggttcgtgaaattgcccaggatttcacgactgatctgcgttt

SEQ ID NO: 20523 - DNA, 395 bp, Glycine max
  Clone ID: LIB3049-011-Q1-E1-D2
gaagggggggaacccccagcaagaatccccaattccaaaaattcccaattccccctttctccccgaaccccgattaatcccaggcgcccccatattcggccctccacggtcgcgctctcgaacaaccacaacaccatcgtcatcacatggcaaacgcagcatcgggtatggcagtccatgatgactgcaagttggggtttttggagctgaaggcaaagaggacacaccgtttcatagtttttaagattgacgagcagcagaagcaggtcattgtggagaagcttggtgagcctgcccaaggctatgaagatttcagtgccagccttcctggtgacgagtgccgttatgctgtttaagagtttgagtatcggactgaagggaaggtccctaaaagc

SEQ ID NO: 20524 - DNA, 268 bp, Glycine max
  unsure (1)..(268): unsure at all n locations
  Clone ID: LIB3049-011-Q1-E1-D3
aacacaaaacggcaagcaaggagatggatgctgccgcgcgtgctgctgctaatgatgctgctgcaaggaatgcaatgctatctgcatccagcgacaaaaagagaacgcacactacaatcaacagccagtgcggtaaacggcgtgtcaaagtgactgtatcttctctttggtgtttaattttccttttgtcctttttcatttgctatctttctatgtcatatatatgagcatatgctctttgttcatttgcaaatgcanaataaacact

SEQ ID NO: 20525 - DNA, 364 bp, Glycine max
  Clone ID: LIB3049-011-Q1-E1-D4
ggcatttcaattccaatatattcaattccccctgtgtatttcccaacctctcccttcaagatgcagatcttcgtcaagaccctcaccggcaagaccatcacccttgaggtggaaagctctgacaccatcgacaacgtcaaggccaagatccaggacaaggaaggaatccccccggaccagcaacgtctcattttcgccggaaagcaacttgaggacggccgtacccttgctgactacaacattcagaaggagagtactcttcacctcgtcctccgtctccgtggtggcatgcagatcttcgttaagacactcaccggcaagaccataaccctagaggttgaaagctcggacaccatcgataacg

SEQ ID NO: 20526 - DNA, 287 bp, Glycine max
  Clone ID: LIB3049-011-Q1-E1-D5
gaaggagcaggtggagggtttggtgggtgttaatatttgacttgtgcattccacacgctgcttccgattgaaggcatctaaggagagaaaaatgcacgatttctgcttcacgatcccctacggattgatgttagtgggtggtggactgttcgcctacataagcaaagggagcatcgcttctctcgccggaggcgccggctccggtttgcttctcatcgtcgccggctatctcagtctcaatgctttcggcaaacgaaaaaactcttacctcgctctctttctcgaga

SEQ ID NO: 20527 - DNA, 384 bp, Glycine max
  Clone ID: LIB3049-011-Q1-E1-D6
gaagcacacagtagacaagaaagagtgtgtgtcaacgtagtaacataaatgcaactgcttctctttctcttttcattcagatgagatcaatgcacttccatttccacctcctcctctagggtttctctttatccctttcttccacgcatccctcctccgaattcaattccccttacattcaactctcctttgccgaatctgcaacaattacacaaaatgaattgctaacaacacgcacacacactctccgtgttttttccccctctcttttttaagaagaacgcgctttctcgtatctcctcgtttgaagaagcgagacggcatcgcattcgatgagtgatgcgaaggaaagaagtgggttttgcgtgtggccagatgcgagac

SEQ ID NO: 20528 - DNA, 318 bp, Glycine max
  Clone ID: LIB3049-011-Q1-E1-D7
gatacacataccactgtacctcgttctcacgaaaaccttcaactaggaatccatcgagccagagtgttgtgttgctagtgcaagaggcaccaacatagatagatacatacgtgcgtgcgtacgtaggaagggtacgtacgcggtagtacacaacacaccaacacaccgttttgcactctgttctgatcatgagggcgcacaagatgggtgttatcgtggggatcactgttgctactgcttctgcttcttaagccttttcttttcttctgtgggttccccctctttcgatattccgcactttagagagacaaccagaca

SEQ ID NO: 20529 - DNA, 373 bp, Glycine max
  unsure (1)..(373): unsure at all n locations
  Clone ID: LIB3049-011-Q1-E1-D8
ggtacttgtgttgtgtgagatagccagccatgtcgatcttttctattccctcaccaacgtaccgttgttcaatttcaatttcaatttctcggcagccattgccatgttctttcacggctcaagtgataagaagagggaaagggaaagtggtaatgagcatggaggcaggcattggagtgatgggcaccaagttgggtatgatgagctatttcgaatccgacggagaggttgttcctgtcactgtcgtgggtttcaaagaaggcaacatcgtcacccagatcaaaactgaggccaccgatggatacgacgccgtccaggttggttaccgaagggtcagagatcgcanattgaccaaacccgaaatcggtcatct

SEQ ID NO: 20530 - DNA, 203 bp, Glycine max
  Clone ID: LIB3049-011-Q1-E1-E1
gaagggcaaaataatggccttgttatgaacttctacaaggaatcatgccctcacgctgaagacatcatcacagaacaagtcaagcttctctacaagcgccacaagaacactgctttctcctggctcaggaacatcttccatgactgtgctgttcacagttgtgatgcttcactgttgccggactccacaagaaggagcttgtc

SEQ ID NO: 20531 - DNA, 242 bp, Glycine max
  Clone ID: LIB3049-011-Q1-E1-E10
gacggtcaagtcaatttcttctcctctctctcactcgtacggttacggttttctcacttcatcactctctgtgtcgctccgtttcaatggctcaggatgacgctcaaacactgccggtcagataatgccgctgctgctgctatcgtgtcgtttgtctctttgaagccgcagctcctcgtccaatctcccaaagcctacgacaccattcggttcttcaaggctgcctttggctctgatgaagt

SEQ ID NO: 20532 - DNA, 333 bp, Glycine max
  Clone ID: LIB3049-011-Q1-E1-E11
ggcttacaagaaagccgccatcaagaatcaccctgacaagggcggtgatcccgagaagtttaaagagctggcacaagcatatgaggttctgagtgaccctgagaagcgtgagatatatgatcagtatggtgaagatgcgcttaaggaacgaatgggtggtggcggtggccatgatccgtttgatatcttttcatctttctttggaggtgggagtccctttggatcaggtggaagtagtcgacgtaggatgcagaggcgcggaaaagatgtggttcaccctctcaaggtctctctggaggacctttatctcgggacttctaagaagctctccct

SEQ ID NO: 20533 - DNA, 352 bp, Glycine max
  Clone ID: LIB3049-011-Q1-E1-E12
ggctgcagcaagggctcaacgcacgcaggaggaggagattgatcgagagaagagaagatgactacacgcttcaagaagaacaggaagaagagaggccacgtgagtgccggccatggccgcatcgggaagcaccggaagcaccctggaggacgcggtaatgccggaggcatgcaccaccaccggatcctctttgacaagtaccaccctgggttcttcggcaaggtcggaatgcgctattttcacaagctccgcaacaaattctactctccgatcctcaacatcgacaagctctgggtcccggtttcccaagaattgaagggaagggcctccaaggagaacagggcgccgctga

SEQ ID NO: 20534 - DNA, 390 bp, Glycine max
  Clone ID: LIB3049-011-Q1-E1-E3
cgggtccctttgaaccacacaatagggagcccgagccctccactgccgattcaaagtgagatgggaggaaaaatgccatccgtcaagccaactgcattgcggttctatgggagttttaatccaacagttacaggcataacaattcaaaatagtccacaatgccatctcaagtttgacagctgtaatggggtcatggtccataatgtgaccatatcatctcctggggacagtcctaacacagatggaattcaccttcagaactccaaagatgtgttaatatacggcagcaccatggcctgccgagatgactgtatttcgatacaaactggatgctcgaacgtatacgtacacaatgtcaactgtggaccaaggcatggaatcagcattgga

SEQ ID NO: 20535 - DNA, 365 bp, Glycine max
  Clone ID: LIB3049-011-Q1-E1-E4
gtcgcttggtagttgtgaatcccttacacggattagaatgggagagaactttttgaatggttccattccgagagggctttttggacttcccaaactaacacaggttgagcttcaggataattatctctctggagagtttcctgaggtgggttctgttgctgttaatcttggtcagattactctctctaacaaccagctttctggggttctacctccctccattggtaacttctccagcgtgcagaagctccttcttgatggcaacatgttcacgggtcggatacctccccagattgggaggttgcaacagctttctaagattgattttagtggcaacaagttctcgggtcctattgtgcctgaga

SEQ ID NO: 20536 - DNA, 319 bp, Glycine max
  Clone ID: LIB3049-011-Q1-E1-E6
ggaccgagtggccaactgggtcggcgccaacgttgcctctgctttctttgcatccttggagcggtgctcttgcatcaacctcagcatcaaagacaacgaagatgacaccaacaacgatgatcgccctctcttcctctctcaccccactactcctttttcctccaactccaacgttcactcttgatcctatgattcctgtgttcacttgttaaaaaaaaattactcttttctttttgtgttttgtgtaattcgtggatcctgaattaactttcctgtcatgaatatatgggaatttggccgaaaaaaaaaccgacatgag

SEQ ID NO: 20537 - DNA, 347 bp, Glycine max
  Clone ID: LIB3049-011-Q1-E1-E8
tggacaacaagggcttgttgatagtggatcaccaactagccaatgacaagaggaccaagccttatgtgaagaaaatggccaagagccaggactatttcttcaaggagttttctagagccattactttgctctctgagaacaaccctctcactggcacaaagggtgagatcagaaagcagtgcaatgctgccaacaagcaccatgaggagccttaattgcttcccgcttaatttgggccttgaattttcttccccttctctatgtggaggaaatctgtaagatattatgcaaaacataattaacgtgttttcctttaaacgggttggttgattggttcagtgaaccga

SEQ ID NO: 20538 - DNA, 324 bp, Glycine max
  Clone ID: LIB3049-011-Q1-E1-E9
ctctgatgatgatgaaaaatataactttcgttcttccgatatttccatgaggaaaacgtttggagacctgaactgaagaggctttcttatgcttgacttcgtattccttctgcccaaagagggtgacctgttatttgtcacaatattcaagtgttttatgttttgttgtatagatattttgttgtttgctcgtagctttatctacatatttccacttatatttggcatcaagtcttatatgttttcttgtatagatactatgcacgtcaaagctagttctagcttaagtatcaaatagccttttaatgtgaatttttggggttg

SEQ ID NO: 20539 - DNA, 353 bp, Glycine max
  Clone ID: LIB3049-011-Q1-E1-F1
ggcgggaaaggtttcggtcatttcttttttccttgctttttcttgctagaattgttcaattcggctcctatattcttgggaattttgtaattttttttttatatattaatttaacgcggattgtggaaattactactgatacacctgtgtttctgtctgtaatttgttattcatagaattttgtgaatagtgctgttataatcgaaaatactgatcatttgtggcttaagaaacttgtttttttttttgttttttttttgttttgtcacttggtaatttgctagtgcttctcaattattgaatttgagtccaacaatggtggcagagaaatgtcactttcaagagaacattgt

SEQ ID NO: 20540 - DNA, 268 bp, Glycine max
  Clone ID: LIB3049-011-Q1-E1-F11
cgggacaacatatccgctgcatctaaacctactcggtctcaccaccctccgtttttcaaactccccatccttttcactcattaataaaccatgatacgtccctttggtccaccatgaacatcaagcacaacaattgaactatctcgcaactggccataaccattaataagcctacatccttcatgcatggcaaaatactatttacaaatttacatacaccaagaagtgtatattagaaccactgttaaatcagcttactaaccatata

SEQ ID NO: 20541 - DNA, 380 bp, Glycine max
  unsure (1)..(380): unsure at all n locations
  Clone ID: LIB3049-011-Q1-E1-F2
gtccgtcaaggccggcctcaaattccccgtcggaagaattggccgttatttgaagaaaggaaggtacgcccagcgtgtcggtaccggtgctcccgtttacttggccgcagttctcgagtacctacctgctgaagtgcttgagttggctgggaatgctgcacgtgacaacaagaagaacaggattattccgagacatgtgctgttggctgtaaggaacgatgaggagttggggaaattgcttgctggtgtcaccattgctcatggtggtgttcttccaaacattaaccctgttttgctacctaagaagactcaggttgctaaggaaccanaatctccatccaaggctaacaagtctccaaagaaagcttaaatgtttttat

SEQ ID NO: 20542 - DNA, 368 bp, Glycine max
  Clone ID: LIB3049-011-Q1-E1-F3
gatcaacacataaatttttcacctcttcacatctcaaagattctgtagcaccctcaaaaagatcgaaaatgacaccatcattttcaacaccaatgaaatccgtgttcctctcaatggttatgatattgatatccatcatcatttatcaaggtaatgctcaattacctcaacctatgcctaatcaaacaaccatggtgttctacctacaagacatagcaaaagggtctagtgccacagttaccccagtggctggcatcaagggaagcgattggacctacaccacatttggatccatatttgtggtggatgaccctgtcacgctgagcataagcccagcctccgaaatggtgggccggggcccaaggcct

SEQ ID NO: 20543 - DNA, 393 bp, Glycine max
  Clone ID: LIB3049-011-Q1-E1-F4
gctaagctgaaagaagaaaaaatgtctggcgtgaagagagcactgaggcagttcaccttcggaaccggcaagaccgccggtcgcaactcggcggggcgcataacgtccttccaccgcggcggcggagccaagcgcttgcaacgaaccgtcgatcacaaacggaataccgcttcttctctcggcgtcgtcgaaaggatcgagtacgaccctaaccgctcctccaaaatcgccctcgttcgctggatcgaaggcgtccatcaccgtcgccgccgcgctgcctccgccaacgccgcttcgcccaagctcctccatctcgattccgccactaacgacgctaacagcattcgcggcgttttccctctcaattcgatgctgccgcacactcacgctgga

SEQ ID NO: 20544 - DNA, 381 bp, Glycine max
  Clone ID: LIB3049-011-Q1-E1-F5
gacaatcgaacgggaaagggcgtcttcataaacgccgcccaaaacttctcatacccttttattcattccattcgtttctagggttttcttttctttgccgagaaaatgagagagtgcatttcgatccacattggccaggccggcatccaggttggaaacgcctgctgggaactctattgccttgaacacggcattcagcccgatggacagatgccgagtgacaagaccgttggcggaggagacgacgccttcaacacatttttcagcgagaccggcgccggaaagcacgtgccccgcgccgtcttcgtggatcttgaacccaccgtgatcgacgaagtccgaaccggtgcgtaccgggagctcttccaccggagcagctga

SEQ ID NO: 20545 - DNA, 378 bp, Glycine max
  Clone ID: LIB3049-011-Q1-E1-F6
gacagattagggtaaccaaagttccaaaccctaaacgctacgattttaattttctggttttctctttttcaatcggtgcttcctccggcggcgcgtgggagtgtctttggcgcgtgattcctagttccccgcttacctatgcttcgctcgacccgcattgtagagttcacgccggagagacggcggaatctcaccggacgatcgtgatttcgcatcttcatggcttccgcctaccggaacgaacctaattggccacggcatagaagcggtggagctggattcatgggaaaagttactttctctaaccctaaccctaaccctaattctaaccctaaattagcgaatggaaagaagacccaatcggcgtccgataatgct

SEQ ID NO: 20546 - DNA, 385 bp, Glycine max
  unsure (1)..(385): unsure at all n locations
  Clone ID: LIB3049-011-Q1-E1-F7
gattgaagaaaaaaggaagggtaagtaaattgggaatggtggtggtagtgccaggtgtctgtctgaggagaaaatagaataaaaagctatgaaattttggcacaaggtctgattgtagaattgaagaagatgactggggggggtatcactatgcaatcgacgccgggaagctcaagatacttggatttgtatccagagcggaagatgtcctttttcaaaaatccttacattctcggactggctgctgtcgccggcatcggtggtctcctcttcggctacgacactggtgtgatatcaagggctcttttatacattaaggatggttttgangaggttagaaacagcaatcttctccaggaaacaatagtcagcatggctattgccg

SEQ ID NO: 20547 - DNA, 386 bp, Glycine max
  Clone ID: LIB3049-011-Q1-E1-F8
gaaagtactgcctaagtcgtcctcatatcttccaccctttggcttattagtgggagcaatacatatcattcattcagaggcaacacaggagttgtaaattaagagcatggctgcacaagctcttgtatcatcatcatctcttaccttctcagccgaggctacaagacaaagtcttggaccaagatcactccaatctccatttggcttctcaagaaaagcctcctttcttgttaaggcagctgctactccccctgtcaagcaatgatcagacagacctttgtggtttgcatcaaagcaaagtctttcctacttggatggcagccttccgggtgactatggatttgaccctctgggactttcggaccctgaaggaacaggatggttca

SEQ ID NO: 20548 - DNA, 255 bp, Glycine max
  Clone ID: LIB3049-011-Q1-E1-F9
tggggggtgaacacgacggcttagagttagatagagtctcgcggagactcaaacccgcatctgtcattttcgagcttcatccatcaacagtgcgtccgcttatggtctgacctcgccacacgtttggatgacactaaacgactcctagctcatgctcatcataatcgtctattctccatacacccactcgccgccacttctaatctgggctccctgcacgttgctaagtttctcgtcagaacatcagtttacacc

SEQ ID NO: 20549 - DNA, 298 bp, Glycine max
  Clone ID: LIB3049-011-Q1-E1-G1
gagaggtggaagatggattatcatcaggacaaccctgcagttttcttcactaccatcaagaacaccaagcaactgaaagtcccagaggagtttctgaagcatttgaataaagacttgtggagtaattcagttcttataggcccttctggtgataagtggcaagtaactattttgaagaaaggaaataacgtgtatatggacaatggttggtcacaatttctgaaagacaattcagtggtgcttgatgagttcttgctttttacatatcatggaggaaactgcttctatgttcaaattt

SEQ ID NO: 20550 - DNA, 381 bp, Glycine max
  Clone ID: LIB3049-011-Q1-E1-G10
gcaactacatttgaattttgcgcaacctcattcttatttgttatattaaattaaattgatccaggggaaatcagaaatactctgattgacttatatatggatcttattaattgaaacgaaattgagttgtctgtagcgacgatgagttgcttttcgtgctttgtttctcgtgggaaagatgtgagaagggttgaaattgacaatggctctcgatctgctacttcttcttctgaggggaaggggaagaagagtgtgagtaacaaaggaactagtacggcagcggctagttttggttttcccgaactcgcagacgcaacgaaggggtttcaaagaagttaaccttacttgggggaaggtggttttggaacgggttacaagggt

SEQ ID NO: 20551 - DNA, 304 bp, Glycine max
  Clone ID: LIB3049-011-Q1-E1-G11
gagatgtgttgagatccactgctgcagaatccaatttgtgacactaaatctaagttactatgactgcgcagacccaagaggagcttcttgcgcaacacctcgaacagcaaaagatccatgatgatgaacctgtcgtcgaggatgatgatgacgaggaagtggatgatgatgatgacgatgaggatgatgaccatgacgaaggactagaaggtgatgcatctggtaggtcgaagcagaccagaagtgaaaagaagagtcgcaaggcaatgcttaaacttggaatgaaacctgtcacaggtgtcag

SEQ ID NO: 20552 - DNA, 382 bp, Glycine max
  Clone ID: LIB3049-011-Q1-E1-G12
gtccttcaaaaattcacctcaccttttcttttccctattagctccgaacccgaacctgtaaaatggatctactcgacccgaaccgtttccgcaaccgcaagcaacccaccctctcctcgcgggaacgcttcctcggcgtcccatcccacgcgccgcgactcgaaaacccttcctccgacgacgtcgttttctccaacaacgacgacctaatcgaagacgacgtcgttttctccaacaacgttgactccaccgaaccctcttcttcctcttctccaatccctaatcaccacaaccacaaccacaatagccaccacaaaggctttgcataccgtccctccgacgcgtccttcggcatcctcgccgcgctgccggagaacgacca

SEQ ID NO: 20553 - DNA, 392 bp, Glycine max
  Clone ID: LIB3049-011-Q1-E1-G2
gatgcatagcaattccaaattccaaattgtttaaacctaattctcatttcttcatcgttcgattcttctcctcctaaagatgcagatcttcgtgaaaactttgaccggtaagaccatcacccttgaggtggagtcctccgacaccatcgataacgtgaaagctaagattcaagacaaggaagggatcccacctgaccagcagagacttatctttgcgggtaaacagcctgaggatggtcgaacccttgccgactacaacatccaaaaggaatccactctccacctcgtgcttcgcctcaagggtggcatgcaaatctttgtcaagactttgactggcaagaacatcaccctcgaggtcgaatcctcggacaacattgataatgtcaaggcca

SEQ ID NO: 20554 - DNA, 382 bp, Glycine max
  Clone ID: LIB3049-011-Q1-E1-G3
ggaggagatccttgtccaagagtcatgaagaaactctctgtggaggccatttgcacctgatcattttcaacatctgaaaataagtggaataaagtttccatattgatttattctgcaattgaatacatggtgttttgggtcagctaagtttacacttgtagaccaccactggcattaatttggctttaccaaggtgaaattgcaaatgaatacacaccatgtggttgaaagcctgctgggatgattgttgtggttttatgtgtatatatattggtgttgtggttgttatactgaagtggacgagagggtgaaaaagttacctgatgcacattgagacgacatcgattgagtccatgtgcaaaattggtttttgtttgtgtgg

SEQ ID NO: 20555 - DNA, 384 bp, Glycine max
  Clone ID: LIB3049-011-Q1-E1-G4
ggagaaataaccaacagaatctactctctattttcctagcttagattccttctccaatggctcttgccgtttccactacttcttcctcttcagctgcagcagcagcagcagcgtcgagctctttcttctcgcgccttggatcttcatcggacgctaaagctccgcaaactggttcctttcggtttccggagaggcctcaagtttcgtctggtgttgttaatttaactcaaagacgctcctcggtgaggccactcaatgccgaaccgcaacggaatgattctgttgttcctcttgcagcaactatcgttgctcctgaggttgagaaggagaaagaagattttgagcaattagcgaaagaccttgaaaattcatctcctcttgaga

SEQ ID NO: 20556 - DNA, 196 bp, Glycine max
  Clone ID: LIB3049-011-Q1-E1-G5
gtaatacagggcttcatctcaccatatccattccccattagcgcagcacgcgagcctgtagcatggttctactcaaggcgtacagtttccagcaacctcagggagcccgggctctcctcgcgggacatcttcctcggtgtcccatcccactcgccgcatctccaatatccttcctctgattacctcgatttctcca

SEQ ID NO: 20557 - DNA, 353 bp, Glycine max
  Clone ID: LIB3049-011-Q1-E1-G6
gagaccaaacaaaacactgcacctggttagggatggagtatagcatggcacagtctagttgcaaaactttggtgcagtggttggtagcagcattgctcattgccttgttgggtggtgcacaagctgttgcaatatgtaacatagactcaagtcaattaaacttgtgtcgtgctgcagttactggtcaaaaccctccaccaccggatgagaaatgttgtgcagttgttcgccaagccaatttgcgttgcctctgcagttacaagtctaccctaccttcatttggaataaaccccaaaaatgctttggccttgcctggtaaatgtggtctgcaatggcctcctaattgttgagtg

SEQ ID NO: 20558 - DNA, 314 bp, Glycine max
  Clone ID: LIB3049-011-Q1-E1-G7
ggagtggaagtagtagcaagtacgtcgtatatgtggttgatcttttgctggttgtttgttttgttccttccaattgtcagatctgaatcaccggactcactcttcacactcactcacactgaatggcttctgaaggcgaccctcaccaccgccaccaccaccatcaagatcacgatcatcatcatcatgatcatgatcaccatcatcatcacgatggagagggagagaccaactcatgggtaggtaaggatgggaacgtgtaccatagccacgatggtctggcgccgcattctcacgaacccatttactctccc

SEQ ID NO: 20559 - DNA, 302 bp, Glycine max
  Clone ID: LIB3049-011-Q1-E1-G8
tgggagacccaattgcgtcaaattcacgatgatgaccatcatgatggtcgccgacaccgtcgccgtaaccgccgccaaaggcctcggcgtccttcgggcctatcaatctacctgtaacctttccgtctccgatcagatctccgccatgattcagacttacgacgccgtcgcgccgccgccggtcaagcctactacctacaggctaagacgccgaacgctcctcaggagatcacaacttaccatacccatattatcatgtgacgactccggggacgccgggaaccaggggttcctcttcggtg

SEQ ID NO: 20560 - DNA, 284 bp, Glycine max
  Clone ID: LIB3049-011-Q1-E1-G9
gattgtgattcatttgcacatttggaaagtgttgtttttctttttttcatttgcattgcaaagcaaaaaccttgcaaattgcaatggcttccaacaaggttattgccaccatcttggttctttctctccttgcctactcaacatcattcaccaatgcatgtggcacatgccacccaaaacctactccttctccccctcctccatcagggaagtgccccaaggacacattgaatctaggggtgtgtgctgatgttctacgacttgttaatgttgttgttggttcc

SEQ ID NO: 20561 - DNA, 179 bp, Glycine max
  Clone ID: LIB3049-011-Q1-E1-H1
acgctgtcgttgcggcactcgcggcgttggtgctactcgccgcgagtgtggcggtggatgctcaggagaactcggacgtgaagacgctggtgaggtacaagcacgggaagaagtactgcgacaaaggatgggaatgtaagggctggtcaatttactgttgtaacctcaccattaccgat

SEQ ID NO: 20562 - DNA, 315 bp, Glycine max
  Clone ID: LIB3049-011-Q1-E1-H10
gaagagagaaagacataaagaattggcgtgagtcgctcgcaagtttgtgatggcggcctcttcttcctctctctctgcctccgacgactcttcttctcaccgtcgcaggcgtcaccaccgccatcgccgataccgtgataaggactctctcaagattcgaaagaagagcaagtcccaatcccaatcccgcggagaacgacgccgtatgcatcaccgccactcttccgattccgattcctattcttcatcttccctctctgattactccagaagtgaaagttcttctgatagtgagcatgaaacatctcaccgttc

SEQ ID NO: 20563 - DNA, 327 bp, Glycine max
  Clone ID: LIB3049-011-Q1-E1-H11
gggcacaacagtcagtggtccggctccagagtggagaagaaaagtatcacagggcatggcagcaaatttgtgatattagtcaggctgaatttgaaaaggtctatcaacgtcttggagttcgattggaagcaaggggagagagctactataatgatttaatccctcaaactttggagagattggataatttaggactgattgaagaagatgatggtgctcgtgtgatatttgttgagggtgtaaatataccaattattgctgtgaaaagagatggtggctacaactattcttcaactgatctagcagcactttggaatcgtccaaatg

SEQ ID NO: 20564 - DNA, 383 bp, Glycine max
  Clone ID: LIB3049-011-Q1-E1-H12
ggattgattgaagccagcgagtgagtgagcgagccaggtagggttttcggtgttcccctctttgtgttcgttcgcgacgatggggtccatccccgatccaggcgagttgagcgagttgactcagccgagcttcgacgagttccagcgccaaacctctctcatgaccagctgcaccctcctctggaaggagctctccgaccacttctcctccctcgagcaagacctcaaccacaaatccgaagccctcaagcgcaagattcacaccctcgacaactccacctcggactccctccgcctcctcgaccaccgcgaaacctctctcgacgccactctccagatcgccctccgcacgctcgacacgcgccgcacgctgctctctccgc

SEQ ID NO: 20565 - DNA, 394 bp, Glycine max
  Clone ID: LIB3049-011-Q1-E1-H2
ggaattcattaatttcggtgtagtccaggttcatttcactcactctggttttcaatagtccaaagttgtcgacaaacgtaacacactacacacgtacgaagagttacaagcagaggtgacagatggctcttagtgaaggtgacaagcatctaaaatgagctcaataacttcaacttatcggtttcaacactcactttcgtctctttcattcacggaggattaattacatcatcactgtccccaacacacgaaatctctcacactatggctcttagcatcaagaacagtgaaattgaatttgttgatcatgaaggtggagaatcattagcacatgcagatctagtttcaccatggacaccacaccaatgcaggaccgtgcagatcaaaagggtat

SEQ ID NO: 20566 - DNA, 375 bp, Glycine max
  Clone ID: LIB3049-011-Q1-E1-H3
gaaaattaaaccagcaaaatcttatcttagcaatagctacccctatcacaacaatactctattaggcaaaaacaccaaatgggagaggaaaaagagcagcctaagaatgaaaccgagaagaagcccgaggaggccgccgcagcccccaagaaagacgacggacccatccctgtcgtttacaaactcgacttgcattgcgagggatgcgtcaagaagatcaaacgcacatgtcgccacttccaaggtgtggaaaccgttaaggcagatctatcgtcgaacaaagtgactgttaccggcaaattggatgccgagaagctgcgagataagatcgccgagagaaccaagaagaaggttgacatcatctcagctccgccc

SEQ ID NO: 20567 - DNA, 396 bp, Glycine max
  Clone ID: LIB3049-011-Q1-E1-H4
gacaatcgaacgggaaaaggcgtcttcataaacgccgcccaaaacttctcatacccttttattcattccattcgtttctagggttttcttttctctgccgagaaaatgagagagtgcatttcgatccacattggccaggccggtatccaggttggaaacgcctgctgggaactctattgccttgaacacggcattcagcccgatggacagatgccgagtgacaagaccgttggcggaggagacgacgccttcaacacatttttcagcgagaccggcgccggaaagcacgtgccccgcgccgtcttcgtggatcttgaacccaccgtgatcgacgaagtccgaaccggtgcgtaccggcagctcttccacccggagcagctgattagcggcaaggaa

SEQ ID NO: 20568 - DNA, 355 bp, Glycine max
  Clone ID: LIB3049-011-Q1-E1-H5
gagggcgcaatagaaaatacaaagccgtagaagagggctcgctcttttgtgtttgtccgcgaaggaaagaaactctatccttagctatcgcgatggatcggtaccagaaggtagagaagccaagagctgaaactccaatcgatgaaaacgagatccggattactagtcagggaaggatgcgtaactacattacttacgccatgagcttgcttcaggagaaaggttctaatgaaattgttttcaaagcaatggggagagctatcaacaaaaccgtgacaattgtggagttgatcaagaggaggattgtgggcctccaccagaatacagcatttggatcaactgatatcactgatac

SEQ ID NO: 20569 - DNA, 378 bp, Glycine max
  unsure (1)..(378): unsure at all n locations
  Clone ID: LIB3049-011-Q1-E1-H6
gatcagagaaagtgaaagtgtctgagagtgtgtgtgtgacttatggagtccaattcagagttcgacgtgattatcatcggagctggcgtcatgggcagctccaccgcctaccacgccaccaaacgcggccttaaaacccttctcctggaacagttcgacttcctccaccactgtggctcctcncacggcgaatcccgcaccatccgcctcacctatccccaccactactactaccctttagtcatggactcttaccgcctctggcaagaggcgcaggcccaagtccggctacagatctacttccaagcccatcacatggacatggcccatcacaacgagcccgccatgcgcgccctcatcgactaatgcggcaacctc

SEQ ID NO: 20570 - DNA, 294 bp, Glycine max
  unsure (1)..(294): unsure at all n locations
  Clone ID: LIB3049-011-Q1-E1-H7
gaaagcgagagaagccagcttggaatctatgtgacagacactgaacaacacgcacacaatgtcaaagcctctgttcaaaacctctccaaaactcctcgatcaagcaacatccacaacaacctctccacatttatctcctccgttagtctccgctctatcaggtcacatgatccacctcattgcgccttagtcagggatccaatggatcggaaacattctctctagatcggaagttcgagttcgggaatcgcatttggagcaccatgatncacgcacgatgttctcaaactgtat

SEQ ID NO: 20571 - DNA, 373 bp, Glycine max
  Clone ID: LIB3049-011-Q1-E1-H8
ggggagagaatagagaagagagatggatccagacgcgttggcaaaggcattcgtggagcactactacagcaccttcgacaccaacaggaacggcttagcgaatctctaccaggagggttccatgctcactttcgaagggcagaagatccaaggcgcttccaacatcgttgccaagctcacctccctcccttttcagcagtgccaccactcaatctccaccgtcgactgccagccctccggcgtcaacgccggcatgctcgtcttcgtcagcggaaaccttcagctcgccggcgaacagcacactctcaagttcagccagatgttccatttgataccaacacctcagggaagctattaagtgttgaatgacata

SEQ ID NO: 20572 - DNA, 388 bp, Glycine max
  Clone ID: LIB3049-011-Q1-E1-H9
gacggcactcgttttcgttctcgttctggtttatagatctttgcgaaggaggtttacagcgctcaaccaaagatgcagaacgaggaaggacagatcactgagctttacattcctaggaagtgctccgccacaaacagattgattaccgctaaggaccatgcttcggttcagatcaacattgggcatgtggatgagaatggcgtctacaatggccatttctccacttttgccctctgcggattcatccgtgctcagggtgatgctgacagtgctctagaccgcttgtggcagaagaagaaagttgaagttaagcaacagtagacacccaaggaaagttggtaacttcgtaaggtattaatttctacccttgctagagatatttgagtac

SEQ ID NO: 20573 - DNA, 293 bp, Glycine max
  Clone ID: LIB3049-012-Q1-E1-A10
gggaggttgtttgcctttgccatttttcttcgaatccctggctgaacttgagacttgggagtgaactgaaaaagcataaagtatggcttcgacggcagcgtaccttgctcggcgcgcggcgcagaaggagagggttcggatcctctaccgccgcgccctcaaagacactctcaactgggccgtacatcgccacctcttctacgacgacgcttcaaacctccgcgaaaggttcgaggagaacagacacgtggaagaccctgataccattgacaggctcataacggatgctgaag

SEQ ID NO: 20574 - DNA, 323 bp, Glycine max
  Clone ID: LIB3049-012-Q1-E1-A11
ggaacctttgcattctattcattcaagattcagcaagtgcgttttggaagcagagaccgaaatacttcgagatggcccgtacaaagcaaactgctcgtaagtcaactggaggaaaagctcccaggaagcagcttgcaaccaaggctgcacgtaagtctgcaccaacaactggtggtgtgaagaagcctcatcgttatcgccctggaactgttgctcttcgtgagattaggaaataccagaagagcactgagctcctaatcaagaagcttcctttccagaggttggttcgtgaaattgcccaagatttcaagactgatctgcgt

SEQ ID NO: 20575 - DNA, 332 bp, Glycine max
  Clone ID: LIB3049-012-Q1-E1-A12
gaaactcaagtaggctatactaaggtgaaaaaggagagatggcagctgcaacatctagtgctgtgttaaacgggtttggatctcacttcttgtgtggaggaaagaggagccatgcccttcttgctgctagcattggagggaaagttggtgcttctgttagtcctaaaagagttattgtggcagttgctgctgcaccaaagaagtcatggatccccgctgtaaaaggtggtgggagtttcatagacccagaatggcttgatggctcgctaccaggtgactatggttttgacccactaggactaggaaaggacccggcattcctgaaatggtat

SEQ ID NO: 20576 - DNA, 446 bp, Glycine max
  unsure (1)..(446): unsure at all n locations
  Clone ID: LIB3049-012-Q1-E1-A2
caggtccaaccaacccttagttccggtgccagaagaagacaaaaagggggacaagtttggttagaaaaccaaaaacaataaagatgaaaatgaaagtgcttgttttgtctgttgctacagttttggtagcatatgaatgccatggctcagactaccagaagttccctctccaaatgaaaactgggtttggtgggcaatacagcaatgaggtggcatgtgccagttggaggcttggcgtggaagcaaacaacgtagtcaagtggcaaactgttcctgcagcttgcggagagtacatagctgactacgttctaggagaccaatataggtcagattccaaaacagttaaccaacaagcttatttctatgctaaatccctcagactcacgaacanagatgtctttgtcttggacgttgacgacactactctctctaatctccagtatttt

SEQ ID NO: 20577 - DNA, 264 bp, Glycine max
  Clone ID: LIB3049-012-Q1-E1-A3
ggggctcacacactaacacaactgttctgtacctttcttcctctcctcaacttgtttcctacttaacgcgtttccgtgaaccaatcgccgatctcgcgctttatctataaagcgcgagatacctcaccgcaaccagtggaactcaccgaattgaactcaagttttttctcttctctcggtttcatcgccatggatgaagaagtgcgcaagatcttcagcaagttcgacaagaacggcgaccgcaagatctcgtgcgccgagctg

SEQ ID NO: 20578 - DNA, 400 bp, Glycine max
  Clone ID: LIB3049-012-Q1-E1-A4
ggcacaagtttgttgagatagctagaagcaataagatgaaaatgaaagtgcttgttttgtttgttgctacagttttggtagcatatgaatgccatggctcagactaccagaagttccctctccaaatgaaaactgggtttggtgggcaatacagcaatgaggtggcatgtgccacttggaggcttggcgtggaagcaaacaacgtagtcaagtggcaaactgttcctgcagcttgcggagagtacatagctgactacgttctatgagaccaatatagatcagattccaaaacagttaaccaacaagcttatttctatgctaaatccctcaaactcaccaacaaagatgtctttgtcttggacgttgacgacactactctctctaatctccagtattttgc

SEQ ID NO: 20579 - DNA, 391 bp, Glycine max
  unsure (1)..(391): unsure at all n locations
  Clone ID: LIB3049-012-Q1-E1-A5
gaaatttgaatgattcaacctgcaaaaccctaaaccctttctctctctgcataagcacagtcacatagatgaggaagaagcttctgttcgcaaccactaaaggcctctcctttcgctccaatcgcaacttcactcccaaatccaatcacttattctatgaggtatgctattctgctgatccgccgaaattccagcagcgtggatggtcacatgctgcttctgtcccttctgaggaaccagaagccccaaaaggccaaaaaagggttccaagacatcaaaggagagctatggtggagtctttcgtgaacaagtatagagcagagaatgctgggaaattcccanaaatatcagatacccagaaacaagttggtggcagttgttatgttatccg

SEQ ID NO: 20580 - DNA, 367 bp, Glycine max
  Clone ID: LIB3049-012-Q1-E1-A6
gaccacaccgagtcgcagaaaaagaaaaaagcgatcatagtttcacttcggccttatccagtttagggtttcggttctctaccctatctttcacgtatcgaaaccttaaatttacgatcaggtctgagcaatctggttggtagaacctttggtcttagtgagtcaagttttatgtctgaattagacgatcaaattcctactgccttcgatccttttgctgatgcaaatgctgatgactcgggtgctgggtcaaaggagtatgtgcatattcgtgtacagcagcgaaatggtacgaaaagcctgacaaccgttcacggattgaaacaagaattcagctataacaagatacttaaagacgtcaagaaag

SEQ ID NO: 20581 - DNA, 387 bp, Glycine max
  Clone ID: LIB3049-012-Q1-E1-A7
gaaccaactgagttagattttggtgttatcctttgatataaactaagctctttcatttttccaatattaaaacttccagcttcttccttcctctgtgactcaaactgcatcaaccaagttagtgggattttctataaattgttgtcaatttgtcatgtcatgtatatgagaaactcatgaaaactctggtggtgacttattagttctctcggcaagtaaggatttcaaacaaactaaagttgaagagagtataaatgactttggaaactcttcaatccaatgagttctccaacttcattatctatgacactatctctgcaactccatttagcagccatggctccccagaggctattttcttggaaagttttgtgaactatcaggagc

SEQ ID NO: 20582 - DNA, 367 bp, Glycine max
  unsure (1)..(367): unsure at all n locations
  Clone ID: LIB3049-012-Q1-E1-A8
ggttcatcagcttattctcaaacctgatatggagtttgtggataccagaaaactacaattacaacatcaacaacaactgcaacaacagccgcaacattttcatgtgttggcagtggacgacagtgtcatagataggaagctattggggaggctccttagaggttcttcatgcaaagttacctgtgtggactctggagacaaggctttgaaatatcttgggctaatagatgagcttgatgatacttcttcaacctctttagaatcagaatcttctcatcctccacctcaaccattacaacgagagggaatcaaagtgaatttgatcatgacagactattgcatgcctgngatgagtggctatgattta

SEQ ID NO: 20583 - DNA, 360 bp, Glycine max
  Clone ID: LIB3049-012-Q1-E1-A9
gggtgaccaaatgcaaagacggcattgaaattgaacacaatccatgactaacacaagcgcagacgacaacgtaacactgctccaaacatatcaatttcaataatgttttcttctgcaatttctccgaagcccttccttcggtccctcgtcattgatcgttacgctcagagcacaactactgcaaccaggtgggagtgtttggggtttaacaagtcagaaaatttcagtaccaagagagagttgtgtgctgaggggttcaagctgaattgcttggttgaaaatacagagatggatgtggagtcatcatcatcatcatctttggtggatgatgcctcctttagcttaagtgaagaggattta

SEQ ID NO: 20584 - DNA, 291 bp, Glycine max
  Clone ID: LIB3049-012-Q1-E1-B1
agtaccggttaggtaaacccagccctacgtacgggtaccagaagaccacagaaaggggaaatgtggtgtggcaaaacgtaacgccaatgcaatgatatgataagcgcagagcagagagagagaaaacgcaaaaggaataattggtcctggattcctttcgattcgacgacctcgttcgttccttctccttccaagttctaaccatttcccactgtcttcgattttaaggcattaaatctgccatggcagcagcacccgctagagctcgtgccgattacgattacctcatca

SEQ ID NO: 20585 - DNA, 324 bp, Glycine max
  Clone ID: LIB3049-012-Q1-E1-B10
gtcgcatcgcttcgctccctacccttgggctagggttttacctgtgcgtcttctccgaaagcaagctagggtttgtccgtgtggcagaatgggaaggtatcgaagccggagcaggagctacagcccccggcggcgaagcaggagcccaccggcaccgcgcggacggaaccgctatgtcgacgatcgctacggtgacagcaggtcttacagagaccgccgctcacctcttccttccggcttgcttgttcgcaatcttccccttgatgccaggcctgaggatcttaggatcccatttgagcgctatggtcctgtgaaggatgttta

SEQ ID NO: 20586 - DNA, 330 bp, Glycine max
  Clone ID: LIB3049-012-Q1-E1-B12
gatagatagagagcgcggcataacctaaacttacccttcttctctctgtgtgtgtgcgcatcaaacgcaaccagaagcagccatggccactgcaagaactgtgaaggacgtttctcctcatgagttcgtcaaagcttactcttctcacctcaagcgatctggcaagatggagctgccagagtggactgatattgtgaaaactgcaagatttaaggagttggctccttatgatcctgactggtaatatgtcagagctgcttccatggcaagaaagatctacttgagaggaggacttggtgttggtgcctttcagaagatttatggtgggaa

SEQ ID NO: 20587 - DNA, 439 bp, Glycine max
  Clone ID: LIB3049-012-Q1-E1-B2
caggtccaaccaacccttaggccaagcattcggccaagccttcgccggtgccaaaagaacaacaaaagggaaattacaacgtcactcttaaaatcccagctcatagcattcatcttcttccaacgagaatcagtctttgtgttccaaatggctcgtacgaagcaaacagcaagaaagtccaccggaggaaaagctccaaggaagcagctcgccaccaaggcagcacgtaagtccgctccggcgacgggcggcgtgaagaagccccaccgtttcaggccggggacagtggctctgagggagattcggaagtacaagaagagcacggagcttctcataaggaagcttcctttccagaggctcgtaagggaaatcgctcaggacttcaagaacgatctacgcttccagagcagtgctgtctccgctcttcaagaagccgctg

SEQ ID NO: 20588 - DNA, 405 bp, Glycine max
  Clone ID: LIB3049-012-Q1-E1-B4
gaaggggaactaagtagagaataaaatcaaataaggagagcatgcatatgaacatgatgatgaagaacgtgtgtgggtttgcaatagtgatggtggcagtgcagcttctggtggaggtgagtcccaaggcagaggctgtgacttgtacccctgtggagctgagtccttgtttgggggcaataacttcctctcaaccaccatcaacaatttgttgccagaaggtgagggaacaaaggcaatgcctctgtggttacctcaaaaacccaagtctaaggccatatgccaattctcctggctccagaagggttgctagctcttgtggggttccctttccaacttgttaattaccttcatatcatatcatatatagtatgtaataaaccctgttggctggaaattatatat

SEQ ID NO: 20589 - DNA, 373 bp, Glycine max
  unsure (1)..(373): unsure at all n locations
  Clone ID: LIB3049-012-Q1-E1-B5
gaagcttaagatgactaaggagttagaaactctcatggggaaagtgagaggtttgagccttctatctcttggtggttgcttcgatggctgctatgaccacactcaagcctatggattagggacaaggatctggaacttcagtgatcgaccagtggagctgcagataagggtgggatcaatactgaagaaggttcacactttgaagccagggtcatgtaagaggctgagaagtaaacgcatatacaaggcatatatgcctggtaagagtggcaatgatggtgggggattgaagagtttgctgtattactatgatgaaacttgccacccttatgtttggattcatgacatanggggtggttccatgaggatggtt

SEQ ID NO: 20590 - DNA, 378 bp, Glycine max
  Clone ID: LIB3049-012-Q1-E1-B6
ggagtcagtgtgtgacatttttttcttcatttctctcttacaattttttgcaatggcacaaacacaaacccagagaccctgttcaagcgtcctcgattctctgggggaagaaattgtgagaatcgtcgcacccgtttcaatatgcatgttcctggtcgtaatcctggtctcaattctcaacaccgattcttctctcttcgtcgcatcgatgagcatggtcaccatcgcgtacaacgaaacaacctcggactccacctgggacaagttcctaggagcccttctgaactccttagccttcgtcgtccttgtcaccttcgcaaccttcgtcttggtcctcctcttccacttccgatgcaccaggttcttaaaactctacat

SEQ ID NO: 20591 - DNA, 381 bp, Glycine max
  Clone ID: LIB3049-012-Q1-E1-B7
gctccgaaaaccctaacaacacaggcgcagacgcaaacgcaaacgcaaacgcaaacgcaaacgcagagcgtgatccattgacgaagatggtgcagcgtctcacctaccgcaagcggcacagctatgccaccaagtccaaccaacacagggtcgtcaaaacccctggtgggaagctcgtttatcagactaccaagaagagggccagcggacccaagtgccccgtcactggcaagaggattcaggggattccacacttgaggcctgcagagtacaagaggtcaaggttacccagaaaccgtacgactggtcaacgtgcatatggtggagttttatctggaagtgccgtcagggagaggggatatcgagccttcttagttgaag

SEQ ID NO: 20592 - DNA, 351 bp, Glycine max
  Clone ID: LIB3049-012-Q1-E1-B8
ggggaggggaggagagatcgacgacagggattcgaaagaacggaagcggagtgaggcaatggctggtactggacggcaaaggagagacagaggtggtggaggccgggaagcacgccatcatgaggcggacgggactccccgcgcgagacctgcgtatattggaccctctcttgtccgatgcctccacccttcatggccgtgacagggccatcgttatcaacttggagcacatcaaggctatcatcaccgcccaagagctcctcctcctcaagtctcacgactcctccgtcacccgcttccttcatgagccccaggcaatgatcattcgccaccacaaccatgctgatgctg

SEQ ID NO: 20593 - DNA, 142 bp, Glycine max
  Clone ID: LIB3049-012-Q1-E1-B9
ggaagcataacataacataacgaaaactaaattccaaataacccaatgaatcatcatcctctgaattcaactcgctcgcacatgggaatcgattgatcaacatcgcccagatctacaactgccttcgactggacatcaacta

SEQ ID NO: 20594 - DNA, 345 bp, Glycine max
  Clone ID: LIB3049-012-Q1-E1-C1
aaaacaagggagcagcttctggtagtaagctgcaggagctcaacaatgcagtgattgtacaaagcttgactactcagctgactaaagaacacctttccaatttccaagctgttgtttttactgatatcagtcttgagaaagcctttgagttcaatgattactgccacagtcatcagcctcctattgcctttattaaaactgaagttagaggcctttttggttctgtgttctgtgattttgggcctgagtttactgttgttgatgtggatggtgaagaaccccatactggcattattgcatccataagcaatgacaaccctgctctagtatcctgtgttgatgatg

SEQ ID NO: 20595 - DNA, 378 bp, Glycine max
  Clone ID: LIB3049-012-Q1-E1-C10
ggaggaaaggcgaggataattttttgcggagggaaggaggaaaacgacgacgcattgaatggagaatcagaaggcatcggcgtattacgagaacagagcggttcagttcggggtagtgagcaccgactggctcgctcaggcccagtccgccaccgtccattctcctcctcacaacaacgatgacgacgaagagataccgttctcggtgatatcggagttcgacaggtggcgcaaacaccccgatttggcggaggccgtggccgccattcgcgccttggccgccgtcatccgctccagcaaggcctccaccatgatgcagctcgaaatccaactcaaaaacgccttccaataccctcaaatgccgggatacaacctcca

SEQ ID NO: 20596 - DNA, 346 bp, Glycine max
  Clone ID: LIB3049-012-Q1-E1-C12
acgacagaaggggaactaagtagagaataaaatcaaatcaggagagcatgcatatgaacatgatgatgaagaaggtgtgtgggtttgcaatagtgatggtggcagtgcagcttctggtggaggtgagtcccaaggcagaggctgtgacttgtacccctgtggagccgagtccttgtttgggggcaataacttcctctcaaccaccatcaacaatttgttgccagaaggtgagggaacaaaggcaatgcctctgtggttacctcaaaaacccaagtctaaggccatatgccaattctcctggctccagaagggttgctagctcttgtggggttccctttccaacttg

SEQ ID NO: 20597 - DNA, 395 bp, Glycine max
  Clone ID: LIB3049-012-Q1-E1-C2
gggacaagtttgttgaaaaagccagaaagcattagatgaaaatgaaagtgcgtgttttgtttggttgctacagttttggtagcatatgaatgccatggctcagactaccagaagttccctctccaaatgaaaactgggtttggtgggcaatacagcaatgaggtggcatgtgccacttggaggcttggcgtggaagcaaacaacgtagtcaagtggcaaactgttcctgcagcttgcggagagtacatatctgactacgttctaggagaccaatatagatcagattccaaaacagttaaccaacaagcttatttctatgctaaatccctcagactcaccaacaaagatgtctttgtcatggacgttgacgacactactctctctaatctccagta

SEQ ID NO: 20598 - DNA, 195 bp, Glycine max
  unsure (1)..(195): unsure at all n locations
  Clone ID: LIB3049-012-Q1-E1-C3
gggagttatagtcccagtgctgatgtcagcgagtcggagagctgcagcagcttctccgcccgccgcttcgacgccgacggagcttccagttcagccaacctctcaccgcgccccgtcgctgctcactttaacttcccgccggcgcaagtcttgcttnccgtcattggcggcaaagacgtcttcgtttgggatcac

SEQ ID NO: 20599 - DNA, 390 bp, Glycine max
  Clone ID: LIB3049-012-Q1-E1-C5
gagggttttatctcattaacgtttcttctcttcactctgcccgctgcatcaatggcttcagagaagaaactttcgaacccaatgagggagataaaagtgcagaagctcgtcctcaatatctctgttggcgagagtggagatcgtctcaccagagcctccaaggtgttggaacaacttagtggccaaaccccagtgttttccaaagcaaggtacactgttcgttcctttgggattagaagaaatgagaagattgcatgctatgtcactgtcagaggtgacaaggcaatgcaacttttggagagtggtttgaacgtgaacgaatatgaacttctcagaaggaacttcagtgatactggttgcttcggcattggtattcaggagcatattgat

SEQ ID NO: 20600 - DNA, 389 bp, Glycine max
  Clone ID: LIB3049-012-Q1-E1-C6
gacggcaacagaagaataatcgagacacagatcatagtgatcattttttaatttctcagatttatccgacgtcgctgcagatccaccaaccgttatggctgccttcagcggtgatgaaacggcaccgtttttcggcttccttggcgccgcagctgccctcgtcttctcctgtatgggagctgcctatggcacagcgaagagtggcgtgggcgtggcttccatgggtgtaatgagacctgagctggtgatgaagtcgattgttcctgttgtcatggctggagttttgggcatttatggccttattattgctgttattatcagtaccggtattaatccaaaggccaaatcctattacctctttgatggttatgcacatctctcttctggtc

SEQ ID NO: 20601 - DNA, 384 bp, Glycine max
  Clone ID: LIB3049-012-Q1-E1-C7
ggaggtgcagttgctgcagagtgaggcgttcgattaacgtttggcgatcacagaagagaagggaatggagttttctcaagatgattttgatcggttactgttattcgaacacacgcgaaagactgctgaagcaaactacgcagagaatcctcaagacgctgataatctgaccaggtgggggggagctttgatcgagttgtcgtcattccaagctcctagggatgccaaggcgatgattgatgatgccctttcgaagctggaggagtctttgctgatcaatccaactaagcatgacactctttggtgcttgggaaatgcaaacacgtcttatgcttttctaatccctgatataactgaggcaaagggttattttgacaaggcact

SEQ ID NO: 20602 - DNA, 391 bp, Glycine max
  Clone ID: LIB3049-012-Q1-E1-C8
ggtcggaaaaagaagaagagaaaaaagatgagcgacggaggaaaacgacaaggtggaagagcgttgccgccgccgccaagaggccctccgcctcctcccccctctcgccctcgcctcgaacccgtcgatcgcgaaaagacatgtccgttactgctgcgagtgttcactaagattgggagtcaccattccatggaagactttgccgtcagaggcaaagagcccaaagacgaggttcagatttacacctggaaggacgctactctccgagaactcaccgatcttgtcaaagaagttgctccggctgcaaggagaagaaacgccaaactctccttcgcctttgtattccccgacaaaaactgccgtttcaaagttcaagaggtgggcaagacat

SEQ ID NO: 20603 - DNA, 317 bp, Glycine max
  Clone ID: LIB3049-012-Q1-E1-D10
gacatcacgacatcacatcgcagagaagaacagagagagatccatccatcaattccaatggccgatcagctcaccgacgaacagatctccgagttcaaggaagccttcagcctcttcgacaaggacggggatggttgtattaccaccaaggaacttgggaccgtgatgcggtcacttggccagaacccaactgaggcagagctgcaggacatgataaatgaggttgatgctgatgggaatggtaccattgatttcccagaattcctgaatctcatggctcgcaagatgaaagacactgattcagaggaggagctgaa

SEQ ID NO: 20604 - DNA, 365 bp, Glycine max
  Clone ID: LIB3049-012-Q1-E1-D11
gacagacaagggtttcttccgggttcacgtttcacaatcactttttgcgcttctctcactcactcactcttcttcttcctcttcgtgtggttttctttctcgaactcgaacgaagatgcgtgagattcttcacatccagggagggcaatgcgggaaccagatcggagccaagttctgggaggtggtgtgcgcggagcacgggatcgattcaacggggaggtaccaaggggacaacgagttgcaactcgagcgagtcaacgtctactacaatgaagcgagttgcggaaggttcgtgcctagggcggtgctcatggatctggaaccagggaccatggaaaacgttaggatctggtccctacggtcag

SEQ ID NO: 20605 - DNA, 339 bp, Glycine max
  Clone ID: LIB3049-012-Q1-E1-D12
agagggagagatattcaagaggaagacaccaattatgaagagaaagatagtttgccaaaccctttgcaagcagcagcagcatcagctttggccttttctgttggtgcaatggtgccattgcttgcagcatcatttataagggaatataaggtgaggcttggagtgattgttgctgctgtgacttttgctttggtggtgtttggttggttaggggctctgtggggtaaggctccagtattgaggtctgctttgagggtcttgtttgggggttggatggccatggcaatgacttttgggctaaccaagttgattggatcaagtgcactttagtatagtttt

SEQ ID NO: 20606 - DNA, 348 bp, Glycine max
  Clone ID: LIB3049-012-Q1-E1-D2
cctctctctctcctaaggttagggttttctctcttcatcactctctgtgtcgctccgtttcaatggctcagcaagacgctcaaaacggcgggtcggagaatgccgctgctgctgctacggtgtcgtttgtcgctgtgaagccgcagctcctcgtcgaagctcccaaagccaacgacgccattctgttcttcaaggctgcgtttggcgctgaggaagttggccgtacgctcaaccctaagcgcaaagctgagcacgagctccctctcatactctccgcagaactcaaaatcgctggctccaacattctcgtcgccgacctcgttgatgacacttcttcgccagcgaaaa

SEQ ID NO: 20607 - DNA, 189 bp, Glycine max
  Clone ID: LIB3049-012-Q1-E1-D3
ggatagcaaaatcgtttctccaatttaatcaccattgtaaaaccaattcccttcgtcgttttcgattaagagagcaatggcacgtaccaagcaaaccgctcgcaagtccaccggaagaaacgcttcgaggaagcaattggcaaacaaagccgctcgcaagtcaaccccggcgaccggcggagtgaagga

SEQ ID NO: 20608 - DNA, 387 bp, Glycine max
  Clone ID: LIB3049-012-Q1-E1-D4
tacgctcacgaattcccaggcccaaccaacccttaattccggcaccaaaagacgaacgaatggggaaacttgaacctttaaaggaccttaaaggcacaggttttcctcccctcaacgtcaaatccaatccaattcactttgattgtgtgtctctccgatcttcaaatccgcaacaaccatggtcaggggattgctcaacaagctcgtctctcgctccctctccgtcgccggaaaatggcagcacaaccaactccgccgcctcaacatccacgagtaccacggcgctgaattgatgagcaaacacggacttaatgttccgacaggcgtggctgtttcctctgttgaagaggttagaaacgccatcaaggaccttttcccaaatgaaaa

SEQ ID NO: 20609 - DNA, 375 bp, Glycine max
  Clone ID: LIB3049-012-Q1-E1-D5
gaaaccaaggaggagattgtttatgatcatgattacccttgtagaagtaatgacagtaatgatggggggacaaagacagagttggatcatcatacacttgcatcagaagagaaattgggaattgaggatgaggcaggagatatgaatgctgatcttaacttcacagagcccgaacttagagataggagctacaatgacagcagtaaccttaaagtgtgtactggtaggacaattgaatctatgaaggaaacaagtgagacttctggtgctattgtgaatgatgacttggagtcaattctaagacaaagagcattggaaaatctaagacagtctcgggagattcagtctagtgcaaaagctcctgatcagaacaat

SEQ ID NO: 20610 - DNA, 392 bp, Glycine max
  Clone ID: LIB3049-012-Q1-E1-D6
ggcagccaaagaaaagaaaatcctcaattttctgagcagccaaacactctctctctgtctctcgaaaattctcagtttgcagagaaaatctgaatcatgtcgtggcaagcgtatgtcgacgatcaccttctgtgtgacatcgaaggtaaccacctcactcacgctgctatcatcggccaagacggcagcgtttgggctcagagtaccgacttccctcagttcaaacctgaggagataactgccatcatgaatgactttaatgagcctggatcacttgctccaactggattgtatctcggtggcaccaaatatatggtcatccagggtgaacccggtgctgtcattcgagggaaagaagggtctggtggtgttactgtgaagaagacggtgcg

SEQ ID NO: 20611 - DNA, 388 bp, Glycine max
  Clone ID: LIB3049-012-Q1-E1-D7
gataacagcaaggattccaaggccgctggcgacaagagattcaaaacgctgcccccagcagagtctcttcctaggaatgaaaccattggaggctacatctttgtttgcaacaatgataccatggctgagaatctcaagagacaactctttggtctgcctccacgatacagagattctgttcgggccattactccggggttgccccttttcctttacaactattccactcaccaactccatggaatctttgaggctgcaagctttggagggtcaaatattgattcatcagcttgggacgataagaagtgccctggtgaatctcgtgtctccgcccatgtacgagtgataactaggaaaacttgtgaaccactggaggaggattccttca

SEQ ID NO: 20612 - DNA, 390 bp, Glycine max
  Clone ID: LIB3049-012-Q1-E1-D8
gggcacatgttcatcctttgattatatcacatactcaccatggaggctaagttggccaccaccataatacttattttctccgtaatttggcttatgagggtgaatggcatagacccttgtgcctctcaagcggataattccgacctgaacgtgattcccatctacagcaaatgctcaccgttcaaaccaccaaagtcagactcatcgtgggacaacagaattataaacatggcctcaaaagacccactccgattcaaatacttgtccaccttagtgggccaaaagaccgtgtccacggccccaatcgcttccggccagaccttcaacatcggcaactacgtcgtcagggtcaaattggggaaccctggtcaacttttgtcatggtcctcg

SEQ ID NO: 20613 - DNA, 323 bp, Glycine max
  Clone ID: LIB3049-012-Q1-E1-E1
ggttctaatgtatgtgattgttgtgactcgttcttcttcgtcgttatcttcttctattgttgtttgtgtgtttgtttcttctctcacctgaaaatgtcttgctgcggtggtaactgtggttgcggaagcgcctgcaagtgcggcaacggctgcggaggctgcaagatgtacccagacttgagctacaccgagtcaaccaccaccgagaccttggtcatgggagtggcaccagttaaggctcaattcgagagtgctgaaatgggtgttcccgctgagaacgatggctgcaaatgtggagctaactgcacctgcaacccctgcac

SEQ ID NO: 20614 - DNA, 366 bp, Glycine max
  Clone ID: LIB3049-012-Q1-E1-E10
ggtgccgaaggataggaacgtgacgtgggatgctgaggaagaggaggaaaacaagaagaggttgctgaagggtgttgccaagaacgtgaaatggacggctgagatcacgggaaaaggggagaagagtgggagctcgagaaagtacacgtttcaggtgcagagtggggatgctgagaagaaaaaggagaaggagaaggagaaggagaagaagaagggaaatggatcgcgcattgtggagattcacgagccaagtggtcatagagatgtggttttgagacaggcatttgccaagaggttcggagctgttcaaaatgagaagggcaaaaagaaggacttgtccccctcaagatgctgcattgttgatcc

SEQ ID NO: 20615 - DNA, 376 bp, Glycine max
  Clone ID: LIB3049-012-Q1-E1-E11
ggtttgattagggtttgtcattagcacttcttcttttcacactgccgctgcaacaatggcttcagagaagaaactttcgaacccaatgagggagataaaagtgcagaagctcgttctcaatatctctgttggcgagagtggagatcgtctcaccagagccgccaaggtgttggaacaacttagtggccaaaccccagtgttttccaaagcaaggtacactgttcgttcctttgggattagaagaaatgagaagattgcatgctatgtcactgtcagaggtgacaaggcaatgcaacttttggagagtggtttgaaggttaaggaatatgaacttctcaaaaaggaattcaattgatacgggttgcttcggctttgg

SEQ ID NO: 20616 - DNA, 54 bp, Glycine max
  Clone ID: LIB3049-012-Q1-E1-E12
tggggtatcattagggtttgtcattacgtcttcttcttttcacaatgacgcttc

SEQ ID NO: 20617 - DNA, 344 bp, Glycine max
  Clone ID: LIB3049-012-Q1-E1-E2
aaccaagccttcaccgaagccttggccgctgccaaaagaccacagaaaggggaaccagaattaaaaaccaagaagaagctcccaaaggtttaaacttttggctgtgttaagcttctcagcactgtcactgagtcgttgtcctgcggaggataatggacttgttatgaacttctacaaggaatcatgccctcaggctgaagacatcatcaaagaacaagtcaagcttctctacaagcgccacaagaacactgctttctcctggctcagaaacatcttccatgactgtgctgttcagagttgtgatgcttcactgttgctggactccacaagaaggagcttgtctg

SEQ ID NO: 20618 - DNA, 295 bp, Glycine max
  Clone ID: LIB3049-012-Q1-E1-E3
acgattgataaggtttggaggaacacgaaggttcgaaaatggtggtgaagattcggctatccccgttgggatgtaagaacaaacccttctatcgggtcatggccgctgatagcagatccctagagatggcaaacacctcgaagttctcggttactacaatcccttaccaggtcaagatggtggcaagagaatgggtctcaacttcgacagactgaagtattggctttctgttggagctcagccttcggaacctgttgaaccgcttctattccgagctggaatgctgcccccacct

SEQ ID NO: 20619 - DNA, 346 bp, Glycine max
  Clone ID: LIB3049-012-Q1-E1-E4
acgcctgaaagaagataaaaaacagaggctgcacaagctccaagaattagcttctcagttgattgatctttggaatctaatggatactcatcccgaggaaaggagactatttgaccatgttacctgtaatatgtcagcttctgttgatgaagtcactgttcctggtgcccttgctctggatctgattgagcaggctgaagtggaagttgagagacttgatcagctgaaagccagcaggatgaaggaaattgctttcaagaagcaagcagagctcgaagagatatttgcccgtgctcatatagaagtagattcagatgctgcccgggaagaaagatatggcattgat

SEQ ID NO: 20620 - DNA, 250 bp, Glycine max
  Clone ID: LIB3049-012-Q1-E1-E5
cacactcagaggaactgacacacggcgtcgatgcattctgtggaagagcttgttgggttctctcagctttcacctttccaggctcggatgcaaagaaaaatcgcaatcattcctgaataaggcaccaccactatttctgggtattgggatgttgcagcaggaatggctcatcgttgtaacatccgattgttaggcaggagtgaagagaatgtatcagatacaggacatgcagactcaccacagagaggtc

SEQ ID NO: 20621 - DNA, 389 bp, Glycine max
  Clone ID: LIB3049-012-Q1-E1-E6
gatagctgagagagaaaggaaaggttaactaagaagcaatacttcaatggccacccttgttgttcataaccaaacttcttctgctcaagatgctgaggctctccaacaggctttcaaaggatggggggctgatgacaaggccattatagcaatactgggtcacagaaatgttcatcagaggcaagaaatcagaaaagcttatgaggagatttaccaagaggatctcatcaaacgccttgagtccgagatctctggtgactttgagagagctatgtaccggtggatgttgcagcctgcggatcgtgatgctgttttggtgaatgtggcaatcaagaatggcaccaaagactaccatgtgattgcagagattgcttgtgtcctatcagctg

SEQ ID NO: 20622 - DNA, 383 bp, Glycine max
  unsure (1)..(383): unsure at all n locations
  Clone ID: LIB3049-012-Q1-E1-E7
gggtgagggtttggagcttgagggtttggtgagtgaagggtatgagttgttgggtgtttttaactggagtgaccattttccggttttggggtggttggatttgcagggtgtgaggaagaggtgtacgtgtttggttgaaaaggttaatgtttttgttggaggggttattaaggagcatagggtgaagagggagaggggtgagcgtgtgaaggatgaaggaactggggattttgttgatgttttgcttgatttggagaaggaaaacaggctcagtgaagctgacatgatcgctgttctttgggaaatgatatttaagggaactgacacngtggcaattctgctagagtggactctggctcggatggttctccaccctgaaatca

SEQ ID NO: 20623 - DNA, 390 bp, Glycine max
  Clone ID: LIB3049-012-Q1-E1-E8
gatagactaaagtgtgtcaaactcactatgatactgacactactgcctcctccaaaatcaccattcttgaatacccttttgctcctctgcactactctcctcctcccaccttgctacctggctctccctgaccctgatgctgatgcggttcagccaatcatcccaaacccctcatcttcaacaggaacaatccctgcattcccagaacaagctgatgctgcagggtgccctctcagcctctcagatgagcactacgaaggcataaagagtgcatgtggctccaacaaacatgctgcagatgatgatgatgacctccaccgtagcagatgctgtcctgtgctggcagcgtggctctattctgcatactcagccactgcccttagtggtgga

SEQ ID NO: 20624 - DNA, 309 bp, Glycine max
  Clone ID: LIB3049-012-Q1-E1-E9
gacaacaaaatttgccaattgccatttcaatcctcagtttctttcttcaacgtttccatcatacacagatcgcaatcctctctcaagccctaatttcccctcatttccatggccacagaagagcccactgtcgcggtggaacccgctcccgaacctgcctccgccgatcctcccccggaggagaaggaggagaccaaacctgaagccaaggctaagaaaaccaaggagcccacacctaaacacgtgtccagaccttgcaagcctcccactcatccttcctacgaagagatggttagagatgcaattacc

SEQ ID NO: 20625 - DNA, 255 bp, Glycine max
  Clone ID: LIB3049-012-Q1-E1-F1
gaatctagtggaagagtgaataagagatatcaatatattatgataatggagggatacaataagaacgttatgattgtggggatggtgttgggcatggccatgattgggatggccaatggccaatactcgttttgtcgcatgcccagcgatgggttggcggcatgcaagccgagtgtgactggggactatcctgctgattcctccactgcttgttgcccagccattgccaaggctgatcttaaatgcttctgccgc

SEQ ID NO: 20626 - DNA, 382 bp, Glycine max
  unsure (1)..(382): unsure at all n locations
  Clone ID: LIB3049-012-Q1-E1-F10
ggaagtaagcaagcattacgtggcacatgaaaacagtaagatcagtgatagaaatgattcagttaaacttgcaaatttcttgatgcctccaagttccggacctagaggatggaaaaatagttccaaaaatgatgccaaagagaaacatggagctgactccaagccaaagacaagtcatactgaaaggattaaggattcttcaaatcaattcaagaatgcttcccagagtgaaagtaaggtggagagagcacctcactctgcaagtgatggagcaacaggatcaatcttgttttcaacgctggcaacttcggtggatgctcatcccactaanaagagcaatcttcatcaagagcaagtaaagggaaacttgcgcctgcccata

SEQ ID NO: 20627 - DNA, 338 bp, Glycine max
  Clone ID: LIB3049-012-Q1-E1-F11
gactgatattttatattttaaccagctatatatattacaagaaaacatagatagtgtgtgttcatcagcttattctcaaacctgatatggagtttgtggataccagaaaactacaattacaacatcaacaacaactgcaacaacagccgcaacattttcatgtgttggcagtggacgacagtgtcatagataggaagctattggagaggctccttacaggttcttcatgcaaagttacctgtgtggactctggagacaaggctttgaaatatcttgggctaatagatgagcttgatgatacttcttcaacctctttagaatcagaatcttctcatcct

SEQ ID NO: 20628 - DNA, 363 bp, Glycine max
  Clone ID: LIB3049-012-Q1-E1-F12
ctctgaattgtaaaaatgtcgctcggagaaactgcttgttcatacgcagctctcatccttcatgaagatggaatcagtgtaactgccgacaagatcagcaccttgttggaaactgcaaaggttcaagtagatacctattggccaaccttatttgctaaacttgctgagaagaaaaatcttggcgatttgatagccaatgcagcaggcggtggtgcaccagttgctgttgcagctgcccctgttgctgcctcaggtggtggtggtgctgctgctgccgccccagctgctgaggagaaaaagaaggacgaatctgaatgaggagattgatgatgatatgggatttggcttgttcgattagggaca

SEQ ID NO: 20629 - DNA, 432 bp, Glycine max
  Clone ID: LIB3049-012-Q1-E1-F2
ccaacccttcgttccggcaccaaaagaacacagaaaggggaacggaacaatttgcaaaaagttgggctggatttgtggacgatgtaagaaaacacaaacaacacaaaattcattgcacagtgttattttcagtatcagcatcatggctccaattgcagtgggagatgtccttccagacggcattttggcttacttggatgaagaaaacaaaccccaaactgtctctattcactctctcgccgccggcaagaaagtcatcatctttggggttcccggtgccttcactcctacatgcagcttgaagcacgtgcctggcttcattgagagagcagaagagctgaaaggaaagggtgtggacgaaataatctgtatcagcgtgaatgattcctttgtgatgaactcatgggccaaaacgttcccagagaacaagca

SEQ ID NO: 20630 - DNA, 277 bp, Glycine max
  Clone ID: LIB3049-012-Q1-E1-F3
aggggaaactttgcaatccaatcaatcaagattcagcaagtgcgttttgggagcagagaccgaaatacttcgagatgggccgtacaaagcaaactgctcgtaagtcaactggaggaaaagctcccaggaagcagcttgcaaccaaggctgcacgtaagtctgcaccaacaactggtggtgtgaagaagcctcatcgttatcgccctggaactgttgctcctcgtgagattacgaaataccagaagagcactgagctcctaatcaagaagcttccttt

SEQ ID NO: 20631 - DNA, 375 bp, Glycine max
  Clone ID: LIB3049-012-Q1-E1-F4
ggcacatgttcatcctttgattatatcacatactcaccatggaggctaagttggccaccaccataatacttattttctccgtaatttggcttatgagggtgaatggcatagacccttgtgcctctcaagcggataattccgacctgaacgtgattcccatctacagcaaatgctcaccgttcaaaccaccaaagtcagactcatcgtgggacaacagaattataaacatggcctcaaaagacccactccgattcaaatacttgtccaccttagtgggccaaaagaccgtgttcacggccccaatcgcttcgggccagaccttcaacatcggcaactacgtcgtcagggtcaaattgggaacccctggtcaacttt

SEQ ID NO: 20632 - DNA, 333 bp, Glycine max
  Clone ID: LIB3049-012-Q1-E1-F5
ggggcgaggtagccagagagtgatacaatacagagtgcgttgttgctccttcgccacaactccctgccaacatgggtatctccagagattctatgcacaagaggcgtgccactggtggcaagaagaaggcatggaggaagaagtggaagtgaagctgtaactcgcaagactcgtatactagatgtggtttacaatgcctcaaacaacgagcttgtgcgtactcagactcttgtaaaaagtgctattgttcaggttgatgctgctccattcaaacagtggtaccttcagcactatggtgttgagattggtaagaagaagaagacagctgccaag

SEQ ID NO: 20633 - DNA, 285 bp, Glycine max
  Clone ID: LIB3049-012-Q1-E1-F6
gagtaacaagagacccagtctcgtttcgctctgtattgtttcactctgtaaaagactcattgcagcaagtgcgtcgtcgtggtgattgaggagcgctgagcgaaatgcggggtggtgtttccctgtggttggcgttagcctccgtagcagcggctgcaagagtgtcttgcggtggtttggcggggacatgactcgcactggaaatggggattacaatgaaccagccagtgaacttgtaggtactcagactctgggacagagtgctattgtgcacgttgatgctgc

SEQ ID NO: 20634 - DNA, 391 bp, Glycine max
  Clone ID: LIB3049-012-Q1-E1-F7
ggcaactgtttacaacaataataagttaataactcgcgtagcgcaaggaacagcataaacgacgctgcgctgaacaacgccggtgtcagacaaacggtgccggttggtggggccgccacgctattacgcctaatcgtatccatcaccctcatcaaaacccctcctttctcttaatttagaaaccctaattcagaagataaaagttactttctccagaattagcgcgtaaggctaatggcatcttcagactcatggatgaaggaatataatgaagctgtgaaacttgctgatgatatcaatggcatgatttctgaacgtggttcgtttcctgcatctggaccagaaacccagcgacatgcatctgctataagaaggaagatcacgatattag

SEQ ID NO: 20635 - DNA, 312 bp, Glycine max
  Clone ID: LIB3049-012-Q1-E1-F9
caaggaagctatcctggcagctctccatacttcggtcatggatgttttactgccggattcattgacatttggcttcaggcttgttagagatggttctgaatcaggaaaaccttattctgataaagattctgaattacttgaatcacctgcttcaataggttctgtgagtgcacatgaaatgacaccaatggaagttctggttcgcaataacaccaacgatatgattaacatgagtcttaatattagatgcagagatgtagctggggaaaattgtgtagatggtaccaaagcaactgttctatgggacggtgt

SEQ ID NO: 20636 - DNA, 321 bp, Glycine max
  Clone ID: LIB3049-012-Q1-E1-G10
gattcccaagtcggaatcctgcaataaccccttccaattggtgaaggtggagagctgggtggacggtgaggaagggcatgtccacaatggcgtcagtgccagatttgggtctgtgttgccggacaaacctgacaagagtgtcagaactcccgcaatattcgctaatcccatagactgctgttccaattcaacttcaaagttatctggctcagttgctctctgtgtccgtgggggctgtgacttcactgttaaagcttattttgctcaatctggagctgctactgccatcttggtcattaacgactcagaagatctctttga

SEQ ID NO: 20637 - DNA, 377 bp, Glycine max
  Clone ID: LIB3049-012-Q1-E1-G2
gatgcttcaacagatgaatggctacagggaactgcttatactcagtctctgtcaagcaagtcaaagaagaagaagtagataaacaatttctcacgttcagccactcactagactctaccatggatatggaatacagaatcctgtaactgactagggttgagtatgagagaacacgaggaagtagttgtgaaattttggctgaaagatccagctttctgttgtagcttaagaatttttacttttctacatttgaatgaagttgagctttttctaaactaacaaggatttcagttaggaaggatacaacttttgagatgtggcataatttttattagataacgtgtgttttacttttagcacaagaaaggccatagtct

SEQ ID NO: 20638 - DNA, 283 bp, Glycine max
  Clone ID: LIB3049-012-Q1-E1-G3
aacagcaacgttgtagagggaaacctttgcgggaaaatcactgacagtaaaacgatctttccgccttccgtagcgccgccgttgaatacgaaagtgaacgcctccaccgggatcctggggctggaactgtgccgaacgccagggaagtgctgattgggctgtacagcaagacgctgaaagagatccacaacgttcccgaagatcaagggtaccgcaaggccgtcgagagcttcatcaagcacaggctcggcgtgtgccacgacgacgacgactgggagaacat

SEQ ID NO: 20639 - DNA, 386 bp, Glycine max
  Clone ID: LIB3049-012-Q1-E1-G5
tgaggacaaaatctcagggaggaacaagaattcaagccttaggaaccgtaatggaccggcgcagatgccctacactgtgcttcttcctaccagtggggaaggccttactttcagaggaattcccaacagcatctctatctaatgagagtgtgtggtgtgtggtgtgtggttttctttccttccaacgtacctctcattgacaaataaacgtgcaaacttatgtgtgcataattttcttatgtatgcttaagttttgtaattggatgctatctagtttttcatatctaatagggtgttgtgtcagtttttatgtatagtattgtgctcctatcatgttcacccgtatcatgttcacccgtatgtaagtctgatattctgatctatga

SEQ ID NO: 20640 - DNA, 384 bp, Glycine max
  Clone ID: LIB3049-012-Q1-E1-G6
gatcgcatttcatagcactcaccctcattaccaacacgaaagcatagccaaaaccttttttcgaagtctctgattttcctaatggctccggcaaaggcagagaagaagccggcggagaagaagccagcggcggagaaggcaccggcggagaagaagccgaaggcggagaagaagatctcgaaggaaggagggagcgagaagaagaagaagcgcacgaagaagagcgtggagacctacaagatctacatcttcaaggtcctcaagcaggttcaccccgacattggtatttccagcaaggccatgggcatcatgaacagcttcatcaacgacatcttcgagaagctcgcccaagaagcgtcgcgtttggctcgctacaacaagaag

SEQ ID NO: 20641 - DNA, 386 bp, Glycine max
  Clone ID: LIB3049-012-Q1-E1-G7
gttcctgtgtatgtttttgacttggattacacttcgttgttgttgcttgatcggtatcatcagtcggtcgcctttaaggacatggtgattgctgttaggacgaggaacacgcagaccgtgagtgattatagttgtaatggtaggcatgtgttcacacagacgagggagcttgagcgtcctattgtagggtcgattcttcagagtatgtggggggtgtcgccgactcatttgaattggagcccccagcacattgagactttggtggattatacgtggagtatggggcagacaccctttgggccgttttctgagatgttgagtttgtcctttgtgcagaaggatgctgccaggaggaatgttctgttgacatcgctgaattacagcat

SEQ ID NO: 20642 - DNA, 381 bp, Glycine max
  Clone ID: LIB3049-012-Q1-E1-G8
gactcacaactccataacacaaggcagaaagcaagctcatcctagagttttaaaaatggcagcagcctcctccatggctctctcttccccatccttggctggcaaggccgtgaagctgggcccatcagcccccgaagtcgggagggtcagcatgaggaagaccgtcaccaagcaggcctcctccggaagcccatggtacggcccagaccgcgtcaagtacttgggcccattctctggcgagcccccgtcctacctcactggcgagttcccaggtgactacggctgggacactgctgggctttcggccgacccagaaaccttcgccagaaaccgtgagctcgaagtgatccactccaggtgggccatgctcggggccttggg

SEQ ID NO: 20643 - DNA, 315 bp, Glycine max
  Clone ID: LIB3049-012-Q1-E1-G9
gaaaaggattaggggatagtggcaagcgaggaaggaagtgaagtttcaaggttgacgcaaagaattgaattgaagtgataagtattatatagcatgcaaagaaaatggtaaggtaaggtaagatcgatagcagaaaaggaaaaaatgacgatggacgatgatagctccatatatgtagggggtcttccctacgacgccaccgaagaaaccattcgcaccgtcctcaatttgtatggcgctatccttgatgttaagataatcaacgacccacgcaccaggggcaagtgctattgttttgttactttcacaaatcct

SEQ ID NO: 20644 - DNA, 399 bp, Glycine max
  Clone ID: LIB3049-012-Q1-E1-H1
gacgacagaaaggggagacagcgcacggtgtagcacatcattcctcgatcgagctcgctccaatggcagagacaccaaacaaaggccacatcgtgatggtacctctcatggcacaaggtcacctcatcccatttctcgcactagcaagacaaatccaacaaaacacaagcttcaccatcaccatagccaacacaccccaaaacattcaacaccttcgatctgcactttcttcttctactactcctaatcatcaaatccatcttgctgagttagtacccttcaactctacccaacactccaacaaagacaacaacacacaaaacgctcccctcactgacctattgaaacttggctatgcatcactcacccttgagcctccttttcgctccttgatatcac

SEQ ID NO: 20645 - DNA, 365 bp, Glycine max
  Clone ID: LIB3049-012-Q1-E1-H10
ggagagagagagagagagaggcacttggaatccaaaaatgagagaaatcatcagcattcacataggtcaggccgggatccaggttggcaactcctgctgggaactctactgcctggaacatggcatccagcccgatggcatgatgccaagtgactcctccttcggtgtagcccacgacgccttcaacaccttcttcagcgaaaccggatccggcaagcacgtccctcgcgccgtcttcgtcgatctcgagcccaccgtcatcgacgaagtccgttgtggcacttaccgtcaactcttccaccccgaacaactcatctccggcaaggaagatgccgccaacaactttgccagaggccactacaccg

SEQ ID NO: 20646 - DNA, 336 bp, Glycine max
  Clone ID: LIB3049-012-Q1-E1-H11
ggagaatggagtttcaagggttaccggaaggttgcattgctagtatactctctcgcactacgccggcggacgtgtgtaggttttccgtcgtatcaaagattttccgttcggccgctgaatcggacgctgtgtggaaacgttttctcccttccgattaccattccatcatttcccagtctccttcgcctcgcaactatccttccaagaaggagctcgatctcgctctctcggatcgccctatcatcatcgatcagggtaaaaagagctttcaattggagaaaaagagtgggaagaagtgttacatgcttgctgctagagctctcagcattaattggg

SEQ ID NO: 20647 - DNA, 318 bp, Glycine max; identical to SEQ ID NO: 12670
  Clone ID: LIB3049-012-Q1-E1-H12

SEQ ID NO: 20648 - DNA, 401 bp, Glycine max
  Clone ID: LIB3049-012-Q1-E1-H2
gattccatagaaatgtcaggtgttggccctctttctcaagattgggaacccgtcgtcctccgcaagaaggctcccactgccgccgccaagaaggatgagaaagccgtcaacgccgcccgccgctccggcgccgaaatcgaaaccctaaaaaaatataacgctgggacaaataaagcagcatctagcagcacttcattgaacactaagaggctggatgatgatactgagagtctagctcatgagaaggtaccaactgaacttaagaatgccataatgcaagctaggatggacaagaaacttactcagtctcagcttgctcaactgatcaatgagaagcctcaagtgatccaggagtacgagtcatgaaacgccattccaaaccagcagataattggcaagtt

SEQ ID NO: 20649 - DNA, 377 bp, Glycine max
  Clone ID: LIB3049-012-Q1-E1-H3
gggagagcattgagaacgttcaaactccacaactaacaaagattatccaaagtgcgattcgcatggccaccaacattcgtagagcaacctatcgctttctccctgccatggacacagattctttctccgattccaccttcgaattccacgaatccgatctctacaactccgcgcgcgctaactctcccgaacttgccaaatccgtacgctcctccagatttcacaactactcctcttcctctgccgcccgcgtcggtgctccggcgtcgcttccggtgaacgtgccggactggtcgaagattctcggcgatgagtacggacggaaccagaggaggaactacgacgacgacgacgaagcgcggagcgatgaggaagat

SEQ ID NO: 20650 - DNA, 387 bp, Glycine max
  Clone ID: LIB3049-012-Q1-E1-H5
ggagtgctaagagacaatggagctgtgcactcgaaccttcacaagtttctttcttttcaacccttcttcctcttcaaaccccctgtttcttcgtgctaatgccaacgctaaaacacccttcaaattcaattcccttaaactctcatctttcccccctcatattcacctcttccaaccctttctctctcctcacacttcttctcccttcacactctcagctgcttctgcttcttcttcttcttcttcttcttcagttgcagttggcacagaacaggaccgtcttccagcagaattgaatgtcactgaaacagcggaacccaattccagagttagattgcatgtggaggtgccatcattggtatgtgacgattgttacaagacggtcat

SEQ ID NO: 20651 - DNA, 391 bp, Glycine max
  unsure (1)..(391): unsure at all n locations
  Clone ID: LIB3049-012-Q1-E1-H6
gagggaacttcctcgaatcgcatctcgaatctcaatcacaatttcgctccctttgctcacatgcgacaaatggtcagggctagaacgctaatcaagatgtcaaagccacttgccgacgccggaggcgaaatcgacaccctaaaaaggatataacgctgggacaaataaagcagcatctagcagcacttcattgaacactaagacgctggatgatgatactgagagtctagctcatgagaaggtaccaactgaacttaagaaggccataatgcaagctaggatggacaagaaacttactcagtctcagcttgctcaactgatcaatgagaagcctcaagtgattcaggagtacgagtcangaaaggccattccaaaccagcagataattggc

SEQ ID NO: 20652 - DNA, 387 bp, Glycine max
  Clone ID: LIB3049-012-Q1-E1-H7
gacagcacaagttgtttatcggaacgttgccacaaacgttgttgttttcagataaacacgtgactatctatctatcaatctccatctctgagttcaaccgaaccaaactccgaagctatggcagagctccaaaccaaggttgaacctgttccagtcccggctctggctccggtggagcccgagccaccgctggctgaggcgccgccgctcgagcagaaagcggtggtggtgcctccacctgttccggcagcagcagaggaaaccaaagctcttgttgttgtggagaaggagaaggagaatgagaagataccagaacctgtaaaaaagaatgccacaggtggatcccttgatagagacattgctcttgcagaaatagagaaagagaaa

SEQ ID NO: 20653 - DNA, 406 bp, Glycine max
  Clone ID: LIB3049-012-Q1-E1-H8
tgatttagaagggggttaagaacataacgaagccacgcatgataataacaatacccttcttcgtttcttccctctccactcggcactcacaattctcaacccaaccaccccctattaaccctcaccgcaatctctgattcgatcttcttcaatttcggggtttcccatataccacaaggcataggcctgtgtgaatttgcgatatgctgggtaattgtcgccaagacccaatctcttgggtactcctttaccaacccccaccgccgcattaattgtttttctattggaatcggacaaaggttccactgcgactgaaactttcaaaggccaaaaaatgctcgattcggtccttctagcgcttttcttgccgtgccttggcatgagcggggtttttatcgtctacatg

SEQ ID NO: 20654 - DNA, 316 bp, Glycine max
  Clone ID: LIB3049-012-Q1-E1-H9
gtccaaattccattttcttcgaagccatacacttttcactaaaacaaaattgattaatgttagggttttggaaagccaatttcagagcagactcgaaaccctagattccacaaatccatgccagcttgatctcgcagcttccgtcaatggcgatcatcggcgacgcgcttcgccaggcgttcatgccgaagcgcgagtacgagagcctcagagaagaagacaaggcgtggggcaagcttcagaggcccgtgacggtggcttccgttgccgtcatcgtgctcgcaatcgccgtgtccactgttatcagtttgaaaat

SEQ ID NO: 20655 - DNA, 153 bp, Glycine max
  Clone ID: LIB3049-013-Q1-E1-A1
actctttgtgattctgattcaatccattactataccttccccgaaatgcttctacaaattggttttaatgaacgtgttcctataacacaagaattttttattgaaactgttgctgtcaaacacaatgatcatataccctctgttctctttcct

SEQ ID NO: 20656 - DNA, 338 bp, Glycine max
  Clone ID: LIB3049-013-Q1-E1-A10
gacaacacagaacaaaaacaaagaaaaaaaaaaaacccttagccaacacaaccatcatggccacctctgctattcagcaatcagcattcactggtcaaactgctctgaagcagctcaatgagttcgtccgcaagaccggtggcgccggcaaaggtcgcactaacatgcgccgcaccgtcaagagtgctcctcagagcatttggtatggccctgaccgtcccaagtacttgggtccattctcggagcagattccatcatacctgaccggagaattccctggtgactacggatgggacactgctggattatcagctgacccggaaaccttcgccaggaac

SEQ ID NO: 20657 - DNA, 358 bp, Glycine max
  Clone ID: LIB3049-013-Q1-E1-A12
gagagcgatgctaataatgtttggtatgtatgtatgtatgtatgaggctggctaacaggtgagagtcagacacgcacacgcgtaggtttaatttcatctctcaaagaaatgaatccattgaatatttgtatccttgcttcgctttgcttgcatgcttccttccccattcaaatctctctcagttgtttgttatttaattgaatttaattttgtgatcggaatcggaatcggaatctgagtggatgtggattgggtggtgaaccggtgaaagatgctacgacgggctgccgagtatcggcgcccggcacgacagatgttttcatattggatctggcttctccttgcattctcctccatc

SEQ ID NO: 20658 - DNA, 348 bp, Glycine max
  Clone ID: LIB3049-013-Q1-E1-A2
agtgaaggaagttgctgacaaactggcaagttttgtggctaaaaatggaaggcaatttgaggatgtaacacgccaaaaaaatcctggggatacacctttcaaatttttgtttgatgagagatgtgctgaatacaagtattatgaatatcggcttgctcaagaagaagatgctcttgggcaatcaagggaatcacaggtgcctcgtaacgggggtacaagcacttcatcttccaaacaggctagtggtcatcagagatcatctcagcagcatacataccaaattcctgcatctgctttatatgaaagtcctgacaatccaagagcttctggattttcaattcaaacatc

SEQ ID NO: 20659 - DNA, 358 bp, Glycine max
  unsure (1)..(358): unsure at all n locations
  Clone ID: LIB3049-013-Q1-E1-A3
gactgcaactttgctctctgtgaggcttcaatttctaattagggtttcgcttagagtaaccaataaccatgggagtcttcacctttgtcgtccgcaaatccggcagcgaatggagcgccaagcaacattccggcgacatcgaggcctccgccgattccaccttcgatctccaacggaagctcgtgcaagccgctctcgccgttgattcctccggtggagttcagtcctctttctctcccgtgtctcctacctccgctgtgttccaggtgatagtgggtggtgcagtattcgttggaggtggtggtggtgctgttgcagctgcnactgcangtggtgctgccgcagctgatgcctgccc

SEQ ID NO: 20660 - DNA, 356 bp, Glycine max
  unsure (1)..(356): unsure at all n locations
  Clone ID: LIB3049-013-Q1-E1-A4
ggagttcctgcagaggagcgtctgcactggcgttcattcttagtcaaactaggagctgataatcttaagggtgtcaaaaacgaagagctcctagttgcttgccacaaatcggtttatattgtatacacagtgcttggcgatgtcagcatctatgtcgtgggcaaggatgagtatgacgaacttgccttgtccgaagtgatctttgtgataacctcagctgtgaaggatgtatgtgggaagcccccaagtgagcgccttttccttgacaagtatggaagaatttgtctgtgtctggatgaaattgtatggcaaggatatttggaaaatacagaanaggatagaatcaanagactgat

SEQ ID NO: 20661 - DNA, 347 bp, Glycine max
  Clone ID: LIB3049-013-Q1-E1-A5
ggttttcctctgttctttctctctctctctctctgtacacaccacatctttcagtttcactaacaatgacggtttcttctgagaattgcgtctctagcagccagagttctctcactagacttgctccacttgaagcagtgctctttgatatagatggaactctttgtgattctgatccactccattactatgccttccgcgaaatgcttctagagattggttttaatgaaggtgttcctataacagaggaattttttattgagactgttgctggcaaacacaatgatgatatagcctcggttctctttcctggtgatctggaacgaggtttaaagtttgttgatgat

SEQ ID NO: 20662 - DNA, 221 bp, Glycine max
  Clone ID: LIB3049-013-Q1-E1-A6
ggctgccacaagactacagaatggggttttcctctgttctttctctctctctctctctgtcgacaccacatctttcagtgtcactaacattgactgtttcgtctggggactgggtctctagcaccgagcgttctctcactacacttgccccacttgaacgaatgctctctcccgtacatcgcactcgctccgattcagatccactcccctacgatgccttc

SEQ ID NO: 20663 - DNA, 78 bp, Glycine max
  Clone ID: LIB3049-013-Q1-E1-A7
gaggttaatttctttgtttgtgatgaaaatgttgagagcagattcaggatgccagagaactcaacaccaaacgatgca

SEQ ID NO: 20664 - DNA, 353 bp, Glycine max
  Clone ID: LIB3049-013-Q1-E1-A8
ggtctataaagtaagtttcattttatcctttgaagtgtgtgagagagtgaaaacatggccactatcaagccaactggaaagaaggcatgtgtgattggagggagtggatttatggcctctttgttgatcaagcagttgcttgaaaagggttatgctgtcaataccacagttagagacccagataatactaaaaaaatacctcaccttttggcactgcaaagtttgggcgaattgagcatatttggagcagatttaactggtgaaaaagattttgatgctcctatagcaggctgtgaacttgtcttccaccttgctacacctgtgaacctttgcctctgaagatcctgagaatg

SEQ ID NO: 20665 - DNA, 343 bp, Glycine max
  Clone ID: LIB3049-013-Q1-E1-A9
aggctatgacttgcttaagaaaatcaaggaatcttcatctttgagaaacataccagtggtgattatgtcatctgaaaatgtgccgtcaatgattaacagatgtttggaggaaggagccgaataatttttcttgaagcctgtgaggttgtcagatttgaacaagcttaaaccccacatgaagaaaaccaagttcaaagatcacaagcaagaaacagtagaaatgtttgaagactcagaagttcaacagcaacagtcacaacaacaaatcatcatccaaaatgagcatcaccaagcaccaaaattacaagttcttcagccagagtcagaatcagagtcacatcca

SEQ ID NO: 20666 - DNA, 358 bp, Glycine max
  Clone ID: LIB3049-013-Q1-E1-B10
gaagaccaaacaaaacttggcaccaggttaattaaggagagggtatagtatggcccagtctagtggcaaaactttggtgcagtggttggtagcagcattgctcattgccttgttgggtggtgcacaagctgttgcaatatgtaacatagactcaagtcaattaaacttgtgtcgtgctgcagttactggtcaaaaccctccaccaccggatgagaaatgttgtgcagttattcgccaagccaatttgcgttgcctctgcagttacaagtctatcctaccttcattcggaataaaccccaaaaatgctttggccttgcctggtaaatgtggtctgcaatcacctcctaattgttgagtg

SEQ ID NO: 20667 - DNA, 195 bp, Glycine max
  Clone ID: LIB3049-013-Q1-E1-B11
gacacattcatattttccttatctctatatataccccattcctctcgttcttgtttttccacattcatattttcctttcgttggctttcattttccctcactttctcgctccccaaatgctcctctctctcctccaatggccgaccatctcaccgacgaccagatctctcagttcaacgatgccttcaccctctt

SEQ ID NO: 20668 - DNA, 351 bp, Glycine max
  Clone ID: LIB3049-013-Q1-E1-B12
gcaccacaaaccacataattcgacaacactctctcctaattgttcaacttctggagctacttccaccccactagctaccttcattgtattttcagtctccaaactccaaagggaaaatgagcagaccaggagattggaactgcaggacatgcaaccgcctgaacttccagagaagagagtcgtgccagcgatgcggggagcctaggagtggtggcggcggcgactacggcggaggcttcggtggtggcagaggctcttcctcctttggcttcaccactggcccggatgttcgccccggtgactggtactgcaccgtcggaaactgtggagcccacaacttcgccagccgct

SEQ ID NO: 20669 - DNA, 358 bp, Glycine max
  Clone ID: LIB3049-013-Q1-E1-B2
ggctaacaatatttttataaggtttactggttagcaacccagtgtgtgattcctcagttcaacaactctcagcaacatgcacaatcctcccccgccaggcggtccaggccctcaccaccaccccggcccaccggctccgccaccacatgctcatccatctcctccgcctcctgggcctccacaccaccaccacggcccacccggcccaccgcatgcttatccaactcctccgcctcctgggcctccacaccaccatcccggcccacccgaaccaggctttcatcaacaccatggcccacccgggccaccgtatgctcatccaactcctccgcctcctgggccaccgggacctccccct

SEQ ID NO: 20670 - DNA, 416 bp, Glycine max
  Clone ID: LIB3049-013-Q1-E1-B3
gatctggcagcagaagaacaagtagttgagaactaagaaggagaagcaaatggcttcctcaatgatctcttccccagctgttaccactgtcaaccgtgccggtgccggcatggttgctccattcactggcctcaagtccatggctggcttccccaccaggaagaccaacaatgacattacctccattgctagcaacggtggaagagtgcaatgcatgcaggtgtggccaccagttggcaagaagaagtttgagactctttcctacctgccagaccttgatgatgcacaattggcaaaggaagtagaataccttcttaagaagggatggattccttgcttgggattcgagttggagcacggtttcgtgtaccgtgagcacaacaggttcaccagatactacgatggacgctactgga

SEQ ID NO: 20671 - DNA, 361 bp, Glycine max
  unsure (1)..(361): unsure at all n locations
  Clone ID: LIB3049-013-Q1-E1-B4
ggagtgagcaagagtgaggagcgaagagaatggctcccaagggtttaatctttttggctgtgttatgcttctcagcactgtcactgagtcgttgtcttgcggaggataatggacttgttatgaacttctacaaggaatcatgccctcaggctgaagacatcatcaaagaacaagtcaagcttctctacaagcgccacaagaacactgctttctcctggctcagaaacatcttccatgactgtgctgttcagagttgtgatgcttcactgttgctggactccacaagaaggagcttgtctgagaaggaaacagatagaagctttgggttgagaaatttcanggtacattgagacatcaaaga

SEQ ID NO: 20672 - DNA, 381 bp, Glycine max
  unsure (1)..(381): unsure at all n locations
  Clone ID: LIB3049-013-Q1-E1-B6
ggtgctaatcttatcttatccctctaatcactctagctgttgcaaatttctactatttttcaatggcttctgcagatgttgagttccgttgctttgttggtgggcttgcttgggtcaccggcaacgatgccctcgagaaagccttttcaatctacggcgacatcgttgaatcgaaggttatcaacgaccgtgagactggaaggtccagaggattcggatttgtgaccttcgcctcagagcagtcaatgaaagatgcgatcgcaggaatgaacggccaggaccttgacggtcgtaacatcactgtcaacgaagctcagacccgcgccagccgtggtggtggtggaggcngtggtttcggaagtggtggtggatacaaacgcg

SEQ ID NO: 20673 - DNA, 334 bp, Glycine max
  Clone ID: LIB3049-013-Q1-E1-B7
cggtggcatggcaatgatgccaatgatgttatcagatggaaggattgtatacatagtgcaacagccagggtttcaacagcctgccccagtatcccgacatgggaggagtggtggcagtagctccagtggtgggaaatgcagtactgatgataatcgcaatcgtgggcatggccgctatcatccctactaacttaatgggctttaaggagctagcaaaacaacgaattgcacctgaggcctaaaagtgttgacgattcaaggcacagcgcccaactgattaagacaaacagggcgctgctgtgaatgcaattatgattttgttatacatctacct

SEQ ID NO: 20674 - DNA, 359 bp, Glycine max
  Clone ID: LIB3049-013-Q1-E1-B8
ggacaccctcatttccactaccaactattctctctcgttctctgatttctgaaatccctcacccatggcttcctcttccctctctctctcactctctctcaccctttgccttgtttccactctctgctacgctcacacatcttccctaaccctacctgtgacaaaagaccattcaacacaccaatacctaacaatcctctcttatggcacccctgttgagtctgcaaaatttgtgcttgatctcggaggctcactcctctgggctgattgtgcatccagaaccaccccatcttccaccctcgcccccattttccaccgttcaattcgctgcctcacagcaaatggtcctgaaattggga

SEQ ID NO: 20675 - DNA, 273 bp, Glycine max
  Clone ID: LIB3049-013-Q1-E1-B9
gatcttttgcttctgtctctctccaccataaccaatacatcaaagacacccttcaataacttctttctcttctctattggatttcaatctctccctgtcactctgatttttttgtcgttttcaattttcatggagggtcatcatctggatcacgggctccagcagttacaacaacatcagcacactcatcacaacatcacaactactaacgtagagtggcacttataggttcccccaatggactcatccaagataccatatacttcctcgtga

SEQ ID NO: 20676 - DNA, 358 bp, Glycine max
  Clone ID: LIB3049-011-Q1-E1-C10
gacttcgcaggtactttagtatgaggcaccaaagctccaaggttcaggctttgtatgaacattgcaaaaccatcttatcgccctctggatcaccccctccttcgtcccaagctttgcagaagctttcttcgattctggacactattcaacctgctgatgttggccttaaagaagaaactgcagacgatgatcgagggcatggattttttggcactaatgcacttagtagattagctcgatgggctcaaccaataacatatgtggacattcatgaatgtgataattttgcgatgtgtatattttgtttccccaactcctcaattaatcctcctcaataccatccggggatgactgtatt

SEQ ID NO: 20677 - DNA, 306 bp, Glycine max
  Clone ID: LIB3049-009-Q1-E1-C4
ggtatagtgaatggcaaacaaagatacgcaatcaatagtgtgtcttacgttgctccagacactcctcttaagctcgccgactactttaaaatccctggcgttttccgtgtcggaagcttttccgacaggcccactggcggtggcatataccttgacacatctgtgctgcaaactgactacagaacatttgtggagtttgtcttccaaaacgacgaagacatcattcagagctatcatctcgatggctactctttcttcgtggttggtatggatggaggacagtggacacctgctagcaggaacacg

SEQ ID NO: 20678 - DNA, 318 bp, Glycine max; identical to SEQ ID NO: 12670
  Clone ID: LIB3049-009-Q1-E1-C5

SEQ ID NO: 20679 - DNA, 294 bp, Glycine max
  Clone ID: LIB3049-009-Q1-E1-C6
cacgactgatgttgcgacccaggtcatctcgggtgacacttgacctcttgtccatcatggaggagcctgtgacaacaatccgaattttgggtattgagattcaaccttacctcccaccaccacctgggtctgtccgaattttgggtgttgagcttcgaccttaccttccaccacctgggccattgtgggaacctgacgctcctgtatccaacacaaacatgaagccacaaccctcataattggtctaccctgttccgagaacgaatcaattcggatggcacagctggatttgag

SEQ ID NO: 20680 - DNA, 329 bp, Glycine max
  Clone ID: LIB3049-009-Q1-E1-C7
ggttagtttggatttggaactaccaaaagccgaacgtcgcacaaaaaccccaaacctagcaaccattgagttttgtttgctttgaaacatcgtgtgcacagtaccccagaagatcgaacaaggatctccacaaagacaaaccccagttctcaactgtgttttacctctctctcacctactttcagaccatacccagggtttttgctttttctttttaaattagtttcagtgacattaacgaggctgagaagatgcagcagacaccgccaatgattcctatgatgccttctttcccacctacgaacataaccaccgagcagattcaaaaa

SEQ ID NO: 20681 - DNA, 294 bp, Glycine max
  Clone ID: LIB3049-009-Q1-E1-C8
ataagcgacaattattgaacatatttggaattgtttaccgatacaagaagatgaaagaaatgagtgctgcagaaaggaaagcaaattttgttcctagagtttgtatatttgggggaaaagcatttgctacatatgtgcaagccaagagaattgtgaaatttattacagatgttggggcaacagtaaatcatgatcctgaaataggagatctacttaaggttgtttttgtccctgattacaatgtcagtgttgctgatatgcttattccagcaagtgaattgtcacaacatatca

SEQ ID NO: 20682 - DNA, 280 bp, Glycine max
  Clone ID: LIB3049-009-Q1-E1-D1
ggtcctgcaggcgaagagatggccaccgttccaaggcagctcgtgtgggagatcgtcaagaaaaacaattccttcctggtcaagcagtttggaaagggcacccagagcgtctaattcagcagagagagcaacaatctctacaacctcaattcgttcaagtactccggtttgggcaacaagaaaactgttactgttcaacctgaaggcaaagatcaagctgtgttgttggctacaaccaagaacaagaagcaaaacaagcccgctgcattgctccacaaat

SEQ ID NO: 20683 - DNA, 300 bp, Glycine max
  Clone ID: LIB3049-009-Q1-E1-D10
gacatgtggaacggatagactcacacaacggcgtgctccttatcacccaataattccactgttaccatgtctcctgcccactgaagtcgaagccctaatggcgtcacaggttcttcgacaccacgcactgtttgcgcccaagcaaagtctcccttcatcatcgcgtgacttcacgtcaatttcgacggttccctccgacctattgctattcgcgttgctctcctctcactgctaagcctagtttcgctgttagagctgactccaatgtcgaatgctctggttaagccaccgcagaagttc

SEQ ID NO: 20684 - DNA, 339 bp, Glycine max
  Clone ID: LIB3049-009-Q1-E1-D11
ggacaagagtgtgaactgcaaagggcttctccagcctagtttgttctcagatcttcgtcttccatggaccagtacgagaaagtggagaagataggcgagggaacatacggcgtcgtttacaaagctcgcgaccgcgccaccaatgagacaatcgctctgaagaagattcgcctcgagcacgaggacgaacgcgttcccagcaccgccattcgcgagatttctcttctcaaagagatgcagcatatgaacattgttaggttgcaggatgtagtgcacagtgagaagcgattgtatctggtttttgagtatctggaccttgatcaaaaaaacacatggatt

SEQ ID NO: 20685 - DNA, 382 bp, Glycine max
  Clone ID: LIB3049-009-Q1-E1-D12
gtgacaatctttcttagctagatcgccatttttgcttacaattttcctgctacttctcttctttaactgttttctgttttgtttttgagattgccattttcttctacttttttacaacaatgaaggagagtaccatgggaaaccctttgcgccttcaatctgtgaaccatatctccctcatatgcagatcagtggaacaatcaatggatttctaccggaacgttctgggattttaccccatcaggaggcctggctctttagattttgatggggcatggctattcggctacggaattggaattcatttgctagaagcagagaaccctgaaaatttgccaaagaagaaggaaatcaatcccaaggataatcatatatctttcca

SEQ ID NO: 20686 - DNA, 359 bp, Glycine max
  Clone ID: LIB3049-009-Q1-E1-D3
ggccctctcactagcaacattcacactctgcggagctcccaaagcaagcactaatctaacaaacgcaatttaaaaaccgcaacaaacttttctctctttcgttcacacacttattctctggcttctttttcttcttccattttcgcttctcgtagcattttcggaacactcatggcttccattgccggatccagctgcgtcgctctccgaaccgccaatttcgcctcctccgataaccggaaaatcggtcagatccggcaatggtctccaattctcactaatctccgtcctgtttccggtcttcgccaccgatcaaatactccgtttagctcctccggtgtaagagcacaagttgctac

SEQ ID NO: 20687 - DNA, 379 bp, Glycine max
  unsure (1)..(379): unsure at all n locations
  Clone ID: LIB3049-009-Q1-E1-D4
gggtactgacaatggaacaacaaaaggaaaccttccgggtcgggaaataaaaacccgaacttgaaaagaggcaaaactccgatccacgttgaggttggagcttggagtgagtcaaacacgaaggaagaagaatggcgtctctgaggagtggagcttcttcgttgttgaatcgcctttcgaaatcgcttcttcttcattccaacaaaaaccctaatcctcaatctcagttattactcccttctctctctagactccccggtgcgatttctccccaaaacgacgccgaattcccccacacacaaggctttctctaaccctgtggcctcncctctctccgcttcttcctacctcatggggaaagctcctccgtcagatgatc

SEQ ID NO: 20688 - DNA, 377 bp, Glycine max
  Clone ID: LIB3049-009-Q1-E1-D5
gacgttcacattcaggaatcgttttcttcagaaaatttgccatcgttgagggaagcgcgagagccttcgttgttcaagatgagagctaagtggaagaagaagcgcatgaggaggttgaagaggaagcgccgaaagatgagacaaagatctaagtaggtgcttgaacaaggagtggagatgatgtgcttttccatctgctaccagcttcatgacattttatgctgtcatggctcttatgatgatcttgaggtctagtggcgaagggagcttccatcttgactttagtttagctttactggtctaaagattgctgttttagtgtgggttaagttatgatattgagagttttggtgtatctaattatgtactggtacgtt

SEQ ID NO: 20689 - DNA, 334 bp, Glycine max
  Clone ID: LIB3049-009-Q1-E1-D6
gggcacgacgcacatgtggctatgcttatcggcgctgccaagattttgaaaactcgagagcatttattaaagggaactgtaattctgttattccagccagcagaggaagctggtaatggagcaaaaagaatgatgcaagatggtgctttggaggacgtggaggctatatttgcagctcatgtatcccatgaacatccaactggtataattggctcaaggcctggacccctccttgcaggttgtggattcttcagagctgtcattagtggcaaaaagggtcttgctgccaatcctcaccgttctgttgatccagttttggctgcttcagctgcag

SEQ ID NO: 20690 - DNA, 379 bp, Glycine max
  Clone ID: LIB3049-009-Q1-E1-D7
gattttctctcgtcaaatttatccattcaccacagagtttcttcaatggcccagcctcaaccagagtcccacgccaccaatggctcacacgagccattgctcaaaatcccaaagctccaccaaaacggcgacgtttccgcaaccgctccctttctccgcgtcaagaagctctccgacaaggccgttttgccctctagggcttcccctctctccgccggttacgatctctctagcgcggtggagacgaaggtcccggcgagagggaaggctctggtggccactgacatcagcatcgcgattccagagggcacatatgctcgcgttgcgccgcgttcggggttggcgtggaagcactcgatcgacgtgggtgcgggggtga

SEQ ID NO: 20691 - DNA, 351 bp, Glycine max
  Clone ID: LIB3049-009-Q1-E1-D8
gatggtaacatagtaacacatagtttcaggtgggttctaaaacaaaagaaaaaccgagaaagagttctaagctttgtctgtgactggtgagagccagtagcgaaagaaagtgaagatggcgctatggatggaaaagggtccagagccattaaccgaaagcgaaaaagcagaccttgaagccattgctgcactcaaagagtctgctgcttttgaattcaaggaaaagggtaaccaatatgtgaagatgggtaagaagcattactctgatgccattgattgctacacaagggcaattgatcagaaagccttgagtgactctgagaactctattctttttgcaaatagaacaca

SEQ ID NO: 20692 - DNA, 255 bp, Glycine max
  Clone ID: LIB3049-009-Q1-E1-D9
gaaaaaaaaaaaaacaactttgccggctgcgctgctgcctaatagcgcgttgcatctgctacctatcatacatagtttcgccaaaccgccgaatccgttgagcgtttctaccgtatcgctcaagaaagaagcagtggctggtggtgttggttgtggtggaagtggttttgccgatcaattgtggtacagggtacgaaagaaaaaaaagtttaaaatgagttcagacagccgtatcatgagcacaagcaggagccc

SEQ ID NO: 20693 - DNA, 381 bp, Glycine max
  Clone ID: LIB3049-009-Q1-E1-E10
gaaaagaggaaggttgtggtaaataaataacctaacctaacccttgcgacttgcgacttgcgagtgagactgaggttgggtttggaaggcaagggcttgtgttgtcacaatccaagagagaagtaatggcgaacatagacatcgaagggatcttgaagcagcagcagccttatgatgggcgcgttccgaagacgaagatagtgtgtactttgggccctgcttctcgatccgtagaaatgaccgagaagcttctgagggcagggatgaacgttgctcgtttcaatttctctcatggcacccacgactatcaccaggaaaccctcaacaatctcaagactgccatgcacaacactggcatactctgtgccgtcatgcttgaca

SEQ ID NO: 20694 - DNA, 264 bp, Glycine max
  Clone ID: LIB3049-009-Q1-E1-E11
gaaaaaacgaatggtgtggtaaataaataacctaacctaacccttgcgacttgcgacttgccagtgacactgacgttgggtttggaaggcaagggcctgtgttgtcacaatccaagagagaagtaatggcgaacatagacatccaacggatcttgaagcagcagcagccttatgatgggcgcgttccgaagaccaagatagtgtgtactttgggccctgcttctcgatccgtacaaatgaccgagaagcttctgacggcacgga

SEQ ID NO: 20695 - DNA, 384 bp, Glycine max
  Clone ID: LIB3049-009-Q1-E1-E12
gacagagtataaggccaaggaggtttcaaggcaaggagagccttgaccaggaaggaatatttcaaattcacccacttactgtcaatctccatgtgtatgatgacgagatttctgatcttgagtctgcaaaactcactactctaaagtttgagtacttgatgcagttgaatattatatgtgttggaaacaaagcatctaatgatggtcccgagaatgacatcttaagcgatttattccctgatgacacaggccttgagcttcctcaccagtcagctaagctctttgttggggatgctataatgttcaatggtgatagaacttcacgtccttacaaatgggctcagcacttagcgggtattgacttcatgcctgaggtggctccct

SEQ ID NO: 20696 - DNA, 324 bp, Glycine max
  unsure (1)..(324): unsure at all n locations
  Clone ID: LIB3049-009-Q1-E1-E2
gaagtgaggtggtgattgaaacgaaacgcacagggccatcggcgatgggagacgacagtggcagcaaccggtcaaagccggagtggctgcagcagtatgatctaatagggaagattggagaaggcatctacggtctcgtcttcctcgctcgcatcaagtcttccaccaatcgcggaaaatccatcgccataaaaaaattcaagcaatccaaggatggcggtggtgtctctcccancgccatacgtgaaatcatgttactcanggagataacgcacgagaatgttgtgaagcttgtgaatgttcacattaatcatatggacatgt

SEQ ID NO: 20697 - DNA, 343 bp, Glycine max
  Clone ID: LIB3049-009-Q1-E1-E3
gattgtatatcatttacaatttcaatctctctctctctctgtctctctctctctagacttagattttgtgaatggctgaagtggaagagggacaggtcatcggcgtccacaccgttaatgagtggaagctgcaactccagaatgcaaaagactccaaaaaactgattgtggtggattttactgcttcctggtgtggtccatgccgttttatggccccagttcttgcagagattgcaaagaaaactcctgaattgatcttcctcaaagtggatgtggatgaagtgaggcctgttgctgaggaatattccattgaggccatgccaaccttcctcttcttgaaaga

SEQ ID NO: 20698 - DNA, 272 bp, Glycine max
  unsure (1)..(272): unsure at all n locations
  Clone ID: LIB3049-009-Q1-E1-E4
ggcattttcaaatttccttttccttcactttcccgagaaaaaaataacacttttcactttcttcactacgttctcacttcgatatggctcgtacgaagcagaccgctcgcaagtccaccggtggcaaggcgccacgtaagcagctcgccaccaaggccgctcggaagtccgctccggcgaccggangagtgaagaagccccaccgcttcaggccgggaaccgtggcgctgagggaaatcagaaagtaccagaagagcaccgagcttctcatc

SEQ ID NO: 20699 - DNA, 378 bp, Glycine max
  unsure (1)..(378): unsure at all n locations
  Clone ID: LIB3049-009-Q1-E1-E5
gaaagaagaagcgaagaaaaaaaacacacacacacaaacacaagcacagttgaaaatggctctgcttaccctctcttcgctgcaatgaagaaacgtttgtttttcttctccgaagaagaaaaatggctctcggcgacgatgcgcagcaccactctccctcgttcctcgatgcccttctctgcgaagagcgagaaaccttcgaggaagactttgatgagaacggttatgagcgtgagaccgaaaacaacgaaccctctgtgataaagtcgcaatctttgcccttggttttgcacgataatgacctgttctgggaagacgaagagctcgtgtcgttaatcgcgaaagaaggagaganccatttgtgttttcatggtgtcg

SEQ ID NO: 20700 - DNA, 358 bp, Glycine max
  unsure (1)..(358): unsure at all n locations
  Clone ID: LIB3049-009-Q1-E1-E6
gacacactaagcgtgaactaatatcgaaattcaattataccctgaccctgtgttagtttcgtgtgttgagaagcagagagaggcagagatgcaaggaagcgcagctgacggtgaagccttggatttcgagcctgaggacgatgacttgatggacgaggacggcgcccccgacgccgacgcttctccgcctcaacctaagctcaaatccgccatcaccgccgccgccgcccccaaaaagaccatgggtcgcggattccggcaggacaccgacgccaaccgtgacactcgcctctccggctccgacttcgactcttctcacancgaagggcggcccgggcctcanagatccattgaagga

SEQ ID NO: 20701 - DNA, 351 bp, Glycine max
  Clone ID: LIB3049-009-Q1-E1-E8
gatccgaaatccaaataatgaatgatccggaaagaaaaccctagccccgaagtagcacgtgactgtgaaaataggagtagtagcgagcgccgcaaggcgaaatcacactatctctgctgaaacgcaaatgcttttacatcgaccgtccaatcaagtgccacgtcatcgatccgcgtgaaatcgattttgaacggccaggatcagcgctgcagaaaaactgggggaagcgaagggaagaggctggtaacttggctgttttctccattctcgcgtgctcggttttggatcgaatttttttttctccgtttgtttgcggaacaacgagtttcgaaatcccgtggagaacgtaac

SEQ ID NO: 20702 - DNA, 65 bp, Glycine max
  Clone ID: LIB3049-009-Q1-E1-E9
cggcagagagcaacatactccaaatgtcccctgacaacatttccggtgattcacgacgtgcactg

SEQ ID NO: 20703 - DNA, 309 bp, Glycine max
  Clone ID: LIB3049-009-Q1-E1-F1
gaggctgggttcaaagaattcaaggatgattcggaaatcgaggatgttgatgacgaagacgatgaagacgaagaagagttgaagaagaagccctttgggttctctcgctccagcaacaaggctgcttctaagcctctctctcgtggatcagcaactgtggaatcaaaggggcaagctgagaagtgtgccaagagaaagaggaagaaccagtatcgtggaatccgtcagcgtccatggggaaagtgggctgctgagatccgtgacccaagaaagggggttcgtgtttggcttggaactttcagcactgct

SEQ ID NO: 20704 - DNA, 336 bp, Glycine max
  Clone ID: LIB3049-009-Q1-E1-F10
gaaattctatatgagctgaaagagcattcggtgggtctaaactgtgggcgttgggattacattttcagttatgttaaaaccttccagactcacccagatcgtctactaccagacagggtccaggttggcatgactcaacatttcatgaagagttactctgatctcctcatcaggacatgccacaggcgcggtgtgcatgctatgggaggaatggcagcacagattccaatcaaagatgacccagttgcaaatgaggcagcactggaacttgtaaggaaggacaagcttagagaagtgaacgcaggccacgatggaacttgggctgcacatcctggt

SEQ ID NO: 20705 - DNA, 320 bp, Glycine max
  Clone ID: LIB3049-009-Q1-E1-F11
ggagtccgcaacgagcagcagctcctggacgatgaacatagccaccaacacaaccttcataaacttccccttccaactctcaccactcgcatctcgcgcgtgccaccaacgcgccactctctccctctctttccctcctcttcctctctccaaaaccgccatgtcctccgccgctccggtcaccgaactcagcgacgagtccgacttcgaatctctcctctctcccgacggccacatctccatctgcggcttcggctctctcctctccgagagaagcgcccgaagcactttccccgacttggccaactttcggaccgcac

SEQ ID NO: 20706 - DNA, 373 bp, Glycine max
  Clone ID: LIB3049-009-Q1-E1-F12
gacccttatttatccagattaaaatagccttcagcagaatataagaagctgcaaagttcccttcttttggggcagagtcaattcatcaattaggagttgggtgagagaatggaagcctcagagcagaacaattcaaaggtagtgttgattgattctttgcagtcatgggagttccacgtcaaccaagcctataatcagaatactcctgttgttgttcacttcactgcttcatggtgcatgccatcggcggctatgactcctgtttttgaagaactggcttcaagctatccggaagttctgtttctcactgttgatgttgatgaagtcaaggaggtagccaccaaaatggatgtaaaggcaatgccaacatttt

SEQ ID NO: 20707 - DNA, 111 bp, Glycine max
  Clone ID: LIB3049-009-Q1-E1-F2
acaaagaaaggggaaaaaaaattccttaagaaaaagaaaaagaaggtaaataaagaaaattaaaaaaaaaaaggggttttggtttttgtgtttgttgtttaaaccttaaaa

SEQ ID NO: 20708 - DNA, 314 bp, Glycine max
  Clone ID: LIB3049-009-Q1-E1-F3
gaggaaggggatcttatatacctcctggtcaaccaaatggaactcataagcctggattgcatcctgctggatatcctgtgccaagggttcctttgcctccttttcatggtggtccccaatctcaaccatatgccattccatctcgcggggcagttcatggacccgttggggcagttcctcatgttccatctccagggagtcgaggttttggggctgggagaggtaattctggtgctccaatcggcaatcatctaccacatcaacaatgcacccaacagcctattgggaatattggatctacatttaacttccct

SEQ ID NO: 20709 - DNA, 328 bp, Glycine max
  unsure (1)..(328): unsure at all n locations
  Clone ID: LIB3049-009-Q1-E1-F4
ggggttggggtttggattgtaccggcaaacttagggtggactcactctcgatctcaccgataaccaaccaacgtggcttcttctcctcaggtaaatggaaaattggtgaagcgggctattttgtataaattggaggaaatgttttaattttgtttctcaagttcagcttcttgctgtacaagtaatagactattattagacttgccagaaatcaccaactgggttgctctttctaaccaggttctctaagtcaactttcagtttttgattgttgaggatggtgctggttttggccctgngggatttgcacataccccacaaggctcct

SEQ ID NO: 20710 - DNA, 366 bp, Glycine max
  Clone ID: LIB3049-009-Q1-E1-F5
atccaagtgaataaagagaataaggaattcaaggatcttgcacctgagcgcgcttttgcggattttgttctctgtaatttggtgcttcatttggtgatcatgaacttccttggttaaattgggtttgtgtggcggttgttgtttctgattgaacccttggataataaaaattaaatagtagtatacctagacttttgtaatagtatttatagacagtagccggcattctactaattgctttagctttatgttgattacccccaccccccatttttggttccctgttttgaacgaagagattttgccatcttttgaagtttaaagtacttttgaatggcgaaataaagaaagtaatggtaataatgc

SEQ ID NO: 20711 - DNA, 348 bp, Glycine max
  Clone ID: LIB3049-009-Q1-E1-F6
gtcgtggagttgatcaatggatcatccgaagaaggccaggaaacaaccaatgatgacactcccgagaagaatcctcaatataccactgtttatgttggcaatcttgctccggaggttacttctgttgatctccatcaacattttcattctcttaatgccggaattattgaagatgttagggtgcaacgagacaaaggttttgggtttgtgagatacagtacccatgctgaagcagctcttgctatacagatgggtaatgcccgaattctatttggcaaacctatcaagtgttcatggggtagcaagcctactcctctgggaactgcctctactcctcttctgccaact

SEQ ID NO: 20712 - DNA, 312 bp, Glycine max
  Clone ID: LIB3049-009-Q1-E1-F7
gaatctcaatgctattattagtgggaaagcaggcttttcttccaacacgccttcttcaattaatccaaacatatcatgtgaaagtaagactccacaagtagaggatatacaagatggttctagtgtgcttcacctggcatgcataattagtgattctgcaatggtagagctgctcctacagtatggtgcagacataaatgctattgattctagagggaggacacctctacattacagcactatgagagggaagaatgcaactgcaagagtgcttattacaaggggggccaatccacttgccgtagacaaaga

SEQ ID NO: 20713 - DNA, 342 bp, Glycine max
  Clone ID: LIB3049-009-Q1-E1-F8
ggttctatctgtgacgagcatcatggcctcgagagcagtgctattgttggctatgtgtgtgcttccggccatggttgtggccattcgcccagcaaagaaccctttttgcgtgaagggtcgcgtctactgtgacccttgccgtgctggttttgagacctcagcaaccacctacattgccggtgctgagattatgttgcaatgcaagagcagggttagcaacgaggttgtgtacaccaagaaggggtacactgactcaactggagcatacacaatgtacgtggacgaggatcacgcagatcaaatatgcagtgccaagcttgtaagcagccctcaacctcaatg

SEQ ID NO: 20714 - DNA, 313 bp, Glycine max
  Clone ID: LIB3049-009-Q1-E1-F9
gacggcgaggaaccacatagagacacaatacagagtgagttggttgctccttcgccacaactctctgccaacatgggtatctccagagattctatgcacaagaggcgtgccactggtggcaagaagaaggcctggaggaaaaagagaaagtatgagcttggtcgccagcctgctaacactaagctgtcaagcaacaagacagtcaggaggatccgtgttagaggtggaaatgtgaaatggacggcattgagattggatactggaaattactcctggggaagtgaaactgtaactcgcaagactcgtgtaccag

SEQ ID NO: 20715 - DNA, 277 bp, Glycine max
  Clone ID: LIB3049-009-Q1-E1-G1
gtcctttctttctttctgctacttttttttctctcacctcacaacagaagcagcaatgaagaagaagatgatggcaagcaccgccatctccgtcgtcttcgccgcgctcttcctcttctcctccgtccactccttctacctccccggcgtcgctcctcgcgattttcaaattggtgaccccctctctgtcaaagtgaacaagttatcatccaccaagactcaacttccatatgactactacttcttgaagtattgcaaacccagggggatattgaac

SEQ ID NO: 20716 - DNA, 361 bp, Glycine max
  Clone ID: LIB3049-009-Q1-E1-G10
ggtgtgtggctgtaaaacttctctagttggccctgacactgaaactctctctgtcacttcccattcccaaacgatgccgtacccgtggttaagcttaacccctaactcctccacacgcgtgaggatcgccgctagaggcagaggatccgacggcaatccgcacctttgtgggtgtatgcggtttcagtttcagtttcagtgagagtgaaagagttaaaagctgctgggaaagcttcttgaaaagatgaatgttcctggtttgacaagagaaaatgttgctagttatttgcaggttcaattttatgtgtatttaatcttgaatacttgcaatatttggtaacaaagatcgttgaatttgagc

SEQ ID NO: 20717 - DNA, 383 bp, Glycine max
  Clone ID: LIB3049-009-Q1-E1-G11
ggttctagtgtgtgattgtttgttgttgtaactcgttcttcatcttttgttgttctgtgtttgtgattgttttttctctcacctgaaaatgtcttgctgcggtggtaactgtggttgcggaagctcctgcaagtgcggaaacggctgcagaggctgcaagatgtatccagacttgagctacactgagtcaatcatcaccgagaccttggtcatgggagtggcacctgttaacgctcaatttgagggtgctgaaatgggtgtgcccgctgagaacgatggctgcaaatgtggaccaaactgctcctgcaacccctgcacttgcaagtgaagtgttgggagagcaatcttcaagcatagatagcccttaattaggaataatgata

SEQ ID NO: 20718 - DNA, 377 bp, Glycine max
  unsure (1)..(377): unsure at all n locations
  Clone ID: LIB3049-009-Q1-E1-G12
ggctgcatcctacattatagttgagacttttgaactaaaatcctgcagtagggtttatactcattcacgcaaaccctaatcccaaatgctttccttctctgtttctggtttccctccattcccacttcgcagggcatatccaagaagagtaagtgcaagctttgacattgacaccccacaagaccccaattcagtcaaccctaatggctcgaatgctaaatttgaagaagaagaagaagaatttcgaaagggaaaggagatagggagagtgatacgtggtggtggggttttcattggaaggaagaagaaggcggcgaaggagaaagttcaatgggtttgctgcaattgtgggtacagtgcanggcaatggtggggca

SEQ ID NO: 20719 - DNA, 303 bp, Glycine max
  Clone ID: LIB3049-009-Q1-E1-G2
ggaggcggatagtgaaatcgtaagttggaaaatggaggaggaggaaacaataccggttccggttaatgacgaagacgatccttcatcgacgcttctggatctcacgagttaccagctccacgacctcgactcggtcgagttgccacccagcctcaccgagttggacctcaccgcgaatcgcttgtccacgctggacccgcgcatagggaacctctcccatctccagaggctctcccttcgccaaaacctattcagcgacgccgccgttctccctctctcttcctggaacgccctctcctctct

SEQ ID NO: 20720 - DNA, 378 bp, Glycine max
  unsure (1)..(378): unsure at all n locations
  Clone ID: LIB3049-009-Q1-E1-G3
tggtccaagattgaaagcattctctgattggttactgaaaactatggtgttgggcaaacttgatgccatctttccagctgctactcgtgaatatgcaccattgattgaggaattatggaatgatgctgccattaaggctacatacgaaaggagaagcgaattagaaatgctgcctagtgttgccggttatttcttagagcgggctgttaaaatattaaggacagattatgaactctctgatttagatatcctttatgccgagggagttacttcatctaatggggtggcttgtgtggagttttcatttccccaatcagtgtctgangaaactgttgacactnacgatcgatatgattctttggtcaggtatcaactaat

SEQ ID NO: 20721 - DNA, 325 bp, Glycine max
  Clone ID: LIB3049-009-Q1-E1-G4
ggaacctttgcattctattcattcaagattcagcaagtgcgttttggaagcagagaccgaaatacttcgagatggcccgtacaaagcaaactgctcgtaagtcaactggaggaaaagctcccaggaagcagcttgcaaccaaggctgcacgtaagtctgcaccaacaactggtggtgtgaagaagcctcatcgttatcgccctggaactgttgctcttcgtgagattaggaaataccagaagagcactgagctcctaatcaggaagcttcctttccagaggttggttcgtgaaattgcccaggatttcaagactgatctgcgttt

SEQ ID NO: 20722 - DNA, 345 bp, Glycine max
  Clone ID: LIB3049-009-Q1-E1-G5
gattgtagaactgaacaagggtttctctttctctttctctgtctgcttcttcactttctctcgtttcaatcgaaaaaaatcatgggcagaaaattcttcgtcggtggcaactggaaatgcaatgggaccactgaggaggtgaagaagattgttactactttaaatgaagctaaagtccctggagaagatgttgtagaagttgttgtgagccctccttttgtgttccttccttttgtaaaaagtttgctgcgccctgatttccatgtctcggcccaaaattgttgggttcgcaaaggtggtgcttatactggagaagttagtgctgaaatgcttgttaatttggga

SEQ ID NO: 20723 - DNA, 355 bp, Glycine max
  Clone ID: LIB3049-009-Q1-E1-G6
atgattatgaaggtgatacttggaaagttgcagcaggagatgttcctattcatgatttcaccgaatcggaatctccttatctcttggctggtttacttggaaaacttcatgtaataactaaagatgctaatcacaacattacagtgttgcaggctgacatgcaaaatgaacatgctgagtcagctttctctcaatcaatattgtcatcaccagataactcgatcagtgaagatgctgaatcttctgcagaaacacagggagaattttggaaggttcttgcaactaggagtggtagatctgctgaactagttaactgtcaatcccttaaaatatgaaagtaaaaatgggggcaagg

SEQ ID NO: 20724 - DNA, 381 bp, Glycine max
  Clone ID: LIB3049-009-Q1-E1-G7
gacaccggatgaagattttggcattctcttagaagctgctgtaatgtatgatagacgtgttgctgccatattaggtgaagatgattcagtagatgaggaggtcatttggaaagaaatatccgatggaaaacaatgtttatatcccagattgttattcatcataactggcaaaggcccagaaaaagagaagtatgaggtaaaaataaagagaatgaaacttaaacgtgtggcatttcgtaccatgtggctgtcagctgatgattatccattactgctaggatcagctgatctaggtgtttgtctgcatacttcatcatcaggattagaccttccaatgaaagttgtggatatgtttggctgtggactgcctgtttgtgctgt

SEQ ID NO: 20725 - DNA, 357 bp, Glycine max
  Clone ID: LIB3049-009-Q1-E1-G8
gacacctcagaagaacagaacagaaccaccagtgcttttcaaagacggatttgatctctagtctgtctaccaagtggaatgaaccagacaccccccctcagacttgatgctgtggagagtggagttcaaccacaagtccaaaacctttaatggtttcagcaatggcgttcttaaataaaattggaaatctggtcaagaattctgctgtcaagcacatcaatcaagatttttcagtgtctaccccatcacttttccaagcaattagatccatgtcatctgcaaagctttttgtcggaggtatttcttacagcactgatgatatgagtttgccagagtcttttgctcgccatggaaaag

SEQ ID NO: 20726 - DNA, 221 bp, Glycine max
  Clone ID: LIB3049-009-Q1-E1-H10
tgggaatctagtggaagagtgaataagagatatcaatatattatgataatggagggatacaataagaaggttatgattgtggggatggtgttgggcatggccatgattgggatggccaatggccaatactcgttttgtcgcatgcccagcgatgggttggcggcatgcaagccgagtgtgagtcgggactatcctgctgatccctccactgcttgttgctc

SEQ ID NO: 20727 - DNA, 368 bp, Glycine max
  unsure (1)..(368): unsure at all n locations
  Clone ID: LIB3049-009-Q1-E1-H11
gatatctaaccgaaatgataaaattgaaagctcctccctcagaatacataaccagttaaccacacacacttcggttaatcagaaagaagctaatcggaatcgcaagacaccgccgacgacgacatggccgccgccgtgacagatatggcccgccgccacacgattagccaaatactggtggacctcctcaagtttgccgtcggttccgccatcgacggctctcgcaaaatcatccctggtaagaagcaggtagataagatggtgccagaaggattgataaacatacccttgccaaaccctgtaaatgcnangaaacaccctgatttaaaggttgcaaatgatctccattttgagacaaaaatggagga

SEQ ID NO: 20728 - DNA, 386 bp, Glycine max
  Clone ID: LIB3049-009-Q1-E1-H12
ggaaaaaccgataatttccaatcacaatggcagatcaactcaccgatgaacagatctcggagttcaaggaagccttcagtttgttcgataaggatggcaatggttgcatcacaacaaaggagcttgggactgttatgcgttcgttgggtcagaatccaacagaggctgagctccaagacatgatcaatgaagtagatgctgatgggaatggcaccattgacttccctgagttcttgaacctcatggctagaaagatgaaggacactgattctgaggaggagctgaaagaggcgttccgagtgtttgacaaggaccagaatgggttcatttctgctgctgagctccgccaatgtgatgacaaccttggggagaagctcactgatgaa

SEQ ID NO: 20729 - DNA, 300 bp, Glycine max
  unsure (1)..(300): unsure at all n locations
  Clone ID: LIB3049-009-Q1-E1-H2
gggccttgattttgctgggaaggcattatatactgctgtatgggttgctgctgtgtcattgttcatggagttgctaggtttctccacacagaattgggtaactgctggtggtttgggcacagtattgctcactctagcaggtcgtgagatatttacaaactttctttcgagcataatgatccatgcaactcggccatttattgtgaacgagtggattcaaacgaagattgaaggatatgaggtttctggcacagttgagcatgtanngctggtggtcacaaccatcatcagaggtgatga

SEQ ID NO: 20730 - DNA, 319 bp, Glycine max
  Clone ID: LIB3049-009-Q1-E1-H3
gaccgttaaactcttcaattctccaacaactcactccatgagtctctcgttctctctttctctagaaacagtcttctcttttctcttttctcttcttctctctttttcagttgcaacatgagatgatgacagagataacaaacctaagcacagacctcatagagctgatcctgtccctcctcccaatccccatcctaatcagagcctccacagtgtgcaagctatggcactccataatctcctcatcttccttctccaccctctccaaccacctcaaccaaccatggttcttcctccatggcattcacaacatctcctc

SEQ ID NO: 20731 - DNA, 320 bp, Glycine max
  Clone ID: LIB3049-009-Q1-E1-H4
ggatccaaagtcgcatcttttgcttcactctacgcagatcgcagcaaaccagagattgaactccgacgatgcctcccgtcgctcctcgatccggcgatgccatattcgccaacgtcgaacgcgtcaatgcggagctgtttactttgacgtatggcgcaattgtgcgtcaattgctcacggatctggaagaggttgaggaggttaacgagcagcttgatcaaatgggttacaatattggaatccgattgattgatgagtttttagctaagtctaatgtctcaagatgcaacgatttcagagagactactgatgtaattgca

SEQ ID NO: 20732 - DNA, 337 bp, Glycine max
  Clone ID: LIB3049-009-Q1-E1-H5
gtaagaagatcagagagtatgactcaaagaggttgttgaaggagcactttaagagactctctggcaaggagttgccgatcaagtctgcacaaattaccgcatcaactgatttcactgagctacaagagaaggaaccctggctttcatcttctaaattggttgttaaacctgacatgttatttggaaagcgtggcaaaagtggtttggttgccttgaatttggattttgcacaagttgtttcatttgtgaaggagcgtcttggaaaagaggttgagatgagtggatgcaaagggaccataacaactttcattgttgaacctttcatcccacacaaatg

SEQ ID NO: 20733 - DNA, 356 bp, Glycine max
  unsure (1)..(356): unsure at all n locations
  Clone ID: LIB3049-009-Q1-E1-H6
ggaggcaatagtagcagcaattcacactggtctttgcttctcgttactcatttctcacctaactttctattcttctcagtctcagatcagaaccttagccatggcagcgttccagaagatcaaggtcgccaaccccatcgtcgagatggacggagatgaaatgactagggttatctggaagtcaatcaaggacaagctcattttgcccttcttggagttggacatcaagtattatgacttaggccttccttaccgtgatgagaccgatgatanagttacaattgaaagtgcggaagcaactctcaagtataatgtggcaattaagtgcgcaactattactccagatgaagctcgtg

SEQ ID NO: 20734 - DNA, 326 bp, Glycine max
  Clone ID: LIB3049-009-Q1-E1-H7
gactgagattgggattaattttgggttgtggcaattgcaatgttctcacagtgccattttctctcagtccccaatacccaataatagtgcctttcgtctgagagccatggcacctcacagctcgcctcttgaactcaaccacttcgccgaggtcggtaacaaagttgccgatgctgccggagaaattattcgcaaatacttcaggaaaaacttcgacgttattcacaaacatgatctcagtccagtaaccattgctgatcaatcggctgaggaggctatggtttcaatcatactagacagtttcccttctcatgctatttatggag

SEQ ID NO: 20735 - DNA, 376 bp, Glycine max
  Clone ID: LIB3049-009-Q1-E1-H9
gaatctagtggaagagtgaataagagatatcaatatattatgataatggagggatacaataagaaggttatgattgtggggatggtgttgggcatggccatgattgggatggccaatggccaatactcgttttgtcgcatgcccagcgatgggttggcggcatgcaagccgagtgtgagtggggactatcctgctgatccctccactgcttgttgctcagccattgccaaggctgatcttaaatgcttctgccgcttcaaggattcgggccttctctctatgtatggtgttgatcccaacaagtgcatggaactccctgttaagtgcaacgttgtcgactctttccactgccagattcattacagggggcactaat

SEQ ID NO: 20736 - DNA, 311 bp, Glycine max
  Clone ID: LIB3049-010-Q1-E1-A1
ggagagcgcaatcgtatcgtatcgctctcttatatcttcagacaaaacaaaccaaaaaccaaaccacccccaattcccgaaaccctaaccctacctcctcgcccccatgcccatggctaagaaacgaaagcttcgatcctccaacccagaacccaccaaacccgtcgagccacagcaacagaaccatgagactgttgaactcgaccaacagcaacccatccccgaaccaaccctagaagactccaacaccatggccatcgacgaaccagaacatgaacaagaagaagaaccgcaaaacgccgaaagcgaac

SEQ ID NO: 20737 - DNA, 373 bp, Glycine max
  Clone ID: LIB3049-010-Q1-E1-A12
ggcgtgaagacgacgacgatggagatgctacgcagaagcagcagaagaatcttcgtctccgcgtgtgtgtggttgcttctgtcgctgtcaccgtcaccgcccagtgttgttaacgcctcccatggcgtattcaacgtgaagtgcaagtaccaggaccgctccctctccgccctcaaagcccacgactaccgccgccagctctctctcctcgccggcgttgacctccccctcggcggctccggccgccccgacgccgtcgggctttattatgctaaaatagggattggaactcctccgaagaattactatttacaagtggacactggcagtgatattatgtgggtaaattgcattcagtgcaaagagtgcccca

SEQ ID NO: 20738 - DNA, 327 bp, Glycine max
  Clone ID: LIB3049-010-Q1-E1-A3
ggaactgtgaagtgtatttggtcactgacctatcttggtagagatttgaagtttaaaccttcaaattaatcaaaccattttaatttgcctatagattctgagtcactgctgctatggcgctacgcgtacttcttgtgttggggatgttgctgatgttgtgccttgttaaggtttcatctgatccaaagatagaagaagaaatactggaagcagaacaagaactgcagtttcccgataacgagccacttatcgtgagagacgcgaacagaacgctaatgcaagatatggattgtggtgggttgtgcaagaccatgtgcagtgcacatt

SEQ ID NO: 20739 - DNA, 323 bp, Glycine max
  Clone ID: LIB3049-010-Q1-E1-A5
gaaagaggaacctgagagagagaatcagaggaagaagatgatctataggaagtggagtctccttaccggcccggtcgccattctcggcggcgtagtcgtcgccatcgccgccgcaaacgtcatcttcgtcaagaatgatcctttcctcaaaccagaggagaggaagtatgaaaatgaacctgctaccaagtaggagaaaagagacaacagaagtttgcgttttgatgtcttttaaaccctgatttatgagctctgtatactgttttgcaagacatgctctgggtagttaataagattgagattctgattggagtctggactct

SEQ ID NO: 20740 - DNA, 381 bp, Glycine max
  Clone ID: LIB3049-010-Q1-E1-A8
ggttcacaagtttcgtttccaggtttcggcgcaatcggcttctgcttcaaggaaggagagcttgttattctctatcaacaagtaaaatgtcaggtgaagagggtgtcattgcagttgagccagctgctgctgctgctgccatcccaggcgagccaatggatatcatgactgccttacaacttgtgctcagaaaatctctggcttatggtggtttgtcgcgtggccttcatgaaggtgcaaaagtgattgagaagcatgctgcacaactctgtgttcttgcagaagactgtgaccagcctgactatgttaaactggttaaggccctttgtgcacatcacaatgttagcctgccgacagttccgagtgcaaagacccttggag

SEQ ID NO: 20741 - DNA, 318 bp, Glycine max
  Clone ID: LIB3049-010-Q1-E1-A9
ggagctccacgttggttgtttgatatcgattattgaacaagcggaagaaagaaacgcagtgtggaagatgccgacacgttgtgaaatatgctgcgagataatgatcgcgatcttgatccctcctctcggagtttgctttcgccacggttgttgcagcgtcgaattcatcatctgcttgctcctcacaattctaggttatattcctggtataatctatgctctctatgctattatcttcgtcgatcgtgaccagtactttgatgaatacaggcgtcctctctatgcacaatactgatgataattttagtttgtatgcct

SEQ ID NO: 20742 - DNA, 362 bp, Glycine max
  Clone ID: LIB3049-010-Q1-E1-B1
ggcacccagagaggaggaagctttgagagagagagagggaggagggagagtgttgacgctccatcaagatgggtatttctagggattccatgcacaagaggcgtgccactggtggcaagaagaaggcatggagaaagaagagaaagtatgagcttgggcgtcaggccgcaaacaccaagttatcaagcaacaaaaccatccggaggattcgtgttcgaggtggcaatgttaaatggagggcattgaggttggataccggcaattactcatggggtagtgaagcagttactcgcaagactcgtattctagatgttgtttacaatgcctcaaacaatgagcttgtgccaactcagaccctggtc

SEQ ID NO: 20743 - DNA, 378 bp, Glycine max
  Clone ID: LIB3049-010-Q1-E1-B10
gaccactgaagcgaagaaaggggcgtacggttctgttgtggttggagatccgaattttgattatcgaatcgcaaaattctgaatcaatcaatcaatcaatcagtaatcagagccatcaacgactgcaatggtctgcgagaagtgtgagaagaaattatcgaaggtgatagtaccagacaagtggaaagaaggggccagcaatactaccgagggtggtggccgcaagatcaacgagaacaagcttctctccaagaaaaacggatggaccccttacggaaacactaagtgcaccatttgcaagcagcaagtgcaccagaatgctaagtactgccacacctgtgcttactctaaaggagtttgtgcaatgtgtggcaagca

SEQ ID NO: 20744 - DNA, 318 bp, Glycine max
  Clone ID: LIB3049-010-Q1-E1-B11
gaacccaattaatctttctttacaattccttctctcaataattctcctctgtttttcacaaagcaacatggctgcatacagagaacccatgaacatgaacatgagcgacagagccccggtttctccgcagcaaccacactctccgtggcattccccggttccgtacttgttcggagggttagcggcgatgttgggtctcatagccttcgctctattgatccttgcatgttcctactggaagctctcagggtacctcgaagggatcggggaaacagaacgggacctagaagctggcgaaacggagcaggaccagaaacc

SEQ ID NO: 20745 - DNA, 376 bp, Glycine max
  Clone ID: LIB3049-010-Q1-E1-B12
gaaggaaacccaccgtaagcgataagcaatagaattcagagagagagagaaagagagtctcttgctctgtatctttgatttgatcattccaatcttcaatttttctatatatccatcaatccgctgagtgcaaagttctaatctttcgcctattgggttctactcctttctctcttcgtttccgatcgatccaattttcttcccatggctacgatcggacacaacaatctcaatgccaaattggttcttctcggggacatgggtgctgggaaatccagcctcgttttgcgctttgtcaagggtcaatttctcgaatttcaggaatcaacaatacgggcagcgttcttttcacagacgctggcagtaaatgacgcga

SEQ ID NO: 20746 - DNA, 379 bp, Glycine max
  Clone ID: LIB3049-010-Q1-E1-B2
gggaatccatttggtagaaaacaagaataggaaccgaaaaactaccatagccactacttgcttccacttctgattcagagactcttaggcattccacattctcaaccccgaaccctaagagcagagcgaaaatgacaaccaccttcgcgaccgtcgcacgactcggtggcgcattactgtcatccacctcatctcgtctcacctcatggtttgtgaaatccccagtgattgctaggaatcccttgaggcaagctgtggcaatgggaaatgggaggattacatgccttgagaggaattggctgcgggcagattacagtgttattgggtttgggttgattggttggctagcaccctcaagcatacgggctatcagcggtaa

SEQ ID NO: 20747 - DNA, 396 bp, Glycine max
  Clone ID: LIB3049-010-Q1-E1-B3
gaccgaagaaaacatcactgcgccgcgctgccacaccaaatagacacaaacatggacgcatcaaaactcaatcaattgaagcatttcatcgaacagtgcaagtccaacccttccctcctcgctgatccttcactctccttcttccgcgactatcttcaaagtctcggcgcgaaacttcctgagtctgcttattccgaatcgacgggcgtggagagggatgaggacatagaggatcttacggaggagcacgagaaggtagaagaagaagaagaagaagaggacgatgtaattattgaatccgatgttgagcttgagggtgaaacctgtgagcctgatgatgatcctccacagaagatgggagacccctctgtcgaggttactgaatagaaccgtgat

SEQ ID NO: 20748 - DNA, 376 bp, Glycine max
  Clone ID: LIB3049-010-Q1-E1-B4
gaattattaacataataatcttaaagaactagtttaaagtggaagaaagggatgaacacagttgacttgaccttactcgattccttccaacagcgctcttcttctccctggtcataattcatttgcaattcttgttgaaacaatgcatctagagctagagacttggacaattttggttgctattgtgtgcatcttgctatttcttctgaaggagtttgttatgggagggaagagctcagaagggagtggtaggaggtatgattttggtgcttcttcatcttcaagggataatagctatggtggataccctccgcaatcaccatacacttcttatcacacacctcagcaccctttgtcatcagcatcaatatcagct

SEQ ID NO: 20749 - DNA, 373 bp, Glycine max
  Clone ID: LIB3049-010-Q1-E1-B5
ggattcccttgtgctgcctgctttttaatgtttctgttcacacttcaaacctttctcttcttctcttttattattctgcttcttcctttgtcagcttctgctaatctcttgtaagatactgctaatcctaactgggtgcttagtcgtgtttgatcacattgtctgaatccgaatatatatgcttcaatttggagatcacaaaccttgtctctatcaaaacgtaccaacactctggactcttttatgacgcgtgcttttaatgcacatgcttctcttactttcagacttcaattacgccctctctgactgttatctggatgagaacaagtccttaattctgaagattttttaaagccagaattctggcaagctg

SEQ ID NO: 20750 - DNA, 389 bp, Glycine max
  Clone ID: LIB3049-010-Q1-E1-B6
gatagtaatacttactgagtgcttacagttgctgcgtcgcaaggtaccggcggcgacggagaactatcttctcaattttcgatcactgcattggttctgttgacaagggttttgttcttcctgacttgcatacttgatggcttcaaagttgcagaagttgcaggccacagcatctcaagcgtctcaatttgtatccagtcgtggaactaactactacaagcaattgctggaacagaacaagcaacacattcaggagcctcctacagtagagaaatgcaacctgttggcaaagcaattgttttacactcgccttgctagtattccgagtcgtaatgagtccttttggaaggaacttgattatgccaagaatttgtggaagaacaggaaag

SEQ ID NO: 20751 - DNA, 354 bp, Glycine max
  Clone ID: LIB3049-010-Q1-E1-B7
gggggggccaattttttcatagaattttcagaggaacaatggcgggtagggtttcgacgtgcttcttcttcgtgtttgctctttctctccttcttccttttcagatctccgctgaggaatcatcggagaaagagttcgtactcacattggatcactctaactttcacgacactgtcagcaagcacgatttcatcgtcgtcgagttctacgctccatggtgtggccactgtaagaagcttgctcccgagtatgagaaagctgcttctatcttgagtagtcatgatcctccggttgttttggctaaaattgatgccaatgaggagaagaacacagaccttgcatctcaatatgatg

SEQ ID NO: 20752 - DNA, 382 bp, Glycine max
  Clone ID: LIB3049-010-Q1-E1-B8
gggagtggaagtagtagcaagtacgtcgtatatgtggttgatcttttgctggttgtttgttttgttccttccaattgtcagatctgaatcaccggactcactcttcacactcactcacactgaatggcttctgaaggcgaccatcaccaccaccaccaccaccatcaagatcacgatcatcatcatcatgatcatgatcaccatcatcatcacgatggagagggagagaccaactcatgggtaggtaaggatgggaaggtgtaccatagccacgatggtctggcgccgcattctcacgaacccatttactcccccggctacttcaccacaagagctccaccgcttctcaacagaaacctcaacgaaagagccttcaccgtcg

SEQ ID NO: 20753 - DNA, 331 bp, Glycine max
  Clone ID: LIB3049-010-Q1-E1-B9
ggatatcaaggactaaaaaccaccaatcaaaaaccatgaatgctaagagagaaaagggagagtgctttgaaaatgggaaagtttagttcaagttacagtacttctgattttgttcactttggagttctacttccctttcttctgttatcacagttgttctttcaacttgcatggtgtggctccatagtaaagttccttcctggattagagggaccccttccttttgttcttgaaaccgggtatgtgggagtgggtgaatcagaggatgtgcaggcattctactacttcattgagtcagagaacaatccaaaagaggattctcccatgcttt

SEQ ID NO: 20754 - DNA, 389 bp, Glycine max
  Clone ID: LIB3049-010-Q1-E1-C1
gaggatttggttgagaaggcaaaagggtttgccttcaaaggaatggatgtgtctcagcggattttcactagtagtagaactgtgcttggaagcagtacaatgtttatgttctccattgcgaagtccataatctctggagccgcggaggttttcaattttgtgtctcagtcgatggtgtttatttgggttttgtattacctcatcacatcagagagtggtggagtgacagaacaagtgatgtgcatgcttccaatttcgaactccactatggacagatgtgttgaggttttggataaagctatttcaggagtccttttggccactgctgagattgcattttttcaagggtgtcttacgtggcttttgtttaggttgaacagaatacattt

SEQ ID NO: 20755 - DNA, 370 bp, Glycine max
  unsure (1)..(370): unsure at all n locations
  Clone ID: LIB3049-010-Q1-E1-C10
gggcgaggtagccagagagtgatacaatacagagtgcgttgttgctccttcgccacaactccctgccaacatgggtatctccagagattctatgcacaagaggcgtgccactggtggcaagaagaaggcatggaggaagaagagaaagtatgagcttggtcgccagcctgctaacactaagctgtcaagcaacaagacagtcaggaggatccgggttagaggtggaaatgtgaagtggagggcactgagattggatactggaaattactcctggggaagtgaagctgtaactcgcaagactcgtatactagatgtggtttacaatgcctcanacaacgagcttgtgcgtactcagactcttgtaaaaagt

SEQ ID NO: 20756 - DNA, 339 bp, Glycine max
  Clone ID: LIB3049-010-Q1-E1-C11
gacatttctgtagctctatggccgaaatgatacagtttgtttccttattctaaaccccaaagtagcaatagttagattagagtacatagtttttgtcacacctcacttctctccgatttgcgcttgttcttcttcttggtcaactcgatcgtaagtcgtagaactagaagggtgagggcaatatggaggtaacaaaagggaaggaaactaaaattgttttgacgaaacccttccaattggaagctgaatcagatttagaaccgtcttatagagccccccatctcctacatcgcttgttaagtttactcaagaacgtgcggccaggattagatctcacaa

SEQ ID NO: 20757 - DNA, 369 bp, Glycine max
  Clone ID: LIB3049-010-Q1-E1-C12
ggagagagagagagagggaaactctggattccacctcttcccgtccttcgtgacggtcctcttccttcgacctcttcagggtgatcaggctttgaatcttaaggttcttgttatattttttgagacatggaaagaatttgtttcttgccaagttgcttccagaattggttgctttcattccaagaagtgcttgaccgcagattcctcatctttggagattatcttctggtttcctttgttaattgcacctagttttctgttctactttaaggatcagcacagtgcacttaatgcttgtttcttctgagactagtgctgcatctttaaggaacatatacaatgcattcctgaaccaacatcaagttgaaa

SEQ ID NO: 20758 - DNA, 376 bp, Glycine max
  Clone ID: LIB3049-010-Q1-E1-C2
gatatagaaatatagcaatatccattgacaaaatcacaaatcacaaacataatgtgtagatcaattcatgcacccctcttgcttgttcttatgtgtttgatgaatggatcgaattttgcatatgatccttttgaatcttcccttagttttgaacctgaaccacatgtagacatcaacgtactctttgtttccttttacaatggtatggcccctaacaatccaaatgtgaacttgttctacaataaccaaaaagatggggtttatttgtcaccaggaaaaggtttctctaaattggacaatcttaacgggcgtaaatctgtagtaatgtattggaatgggaattgtgcttccttctttgcatatgatcccagcgcag

SEQ ID NO: 20759 - DNA, 385 bp, Glycine max
  Clone ID: LIB3049-010-Q1-E1-C3
ggaaccactaaacgatgatcccaaacgttcaaatccctacctgggacgcggacggaggaggagcactctccccgtcgatctcttccaatgctgacacgtgctcattattctcctccgaccatttccgaatgttccagttcaaggtgcggaactgtccacgtggcaggtcccacgactggaccgagtgtccctacgcccaccccgccgagaaggctcgccgccgtgacccccgcaagtaccactactcaggcacctcctgccccgattaccggaaggggaactgcaagaggggcgacacgtgtcagttcgcgcacggcgtcttcgaatgctggctccacccttctcgctaccggacccagctctgcaaagacggaacaaattgccg

SEQ ID NO: 20760 - DNA, 381 bp, Glycine max
  Clone ID: LIB3049-010-Q1-E1-C4
ggcatcatagagtaagtgagtgagagaaggagattctgatttgatctctcagatctgagcttaccgtcgccggaatccaactcaacctgggtcggattcttgggtatcatcgcatcgccattcgttttagcctctcaataagagattttagttcgcttcaaattcgaggtttgatttgaagttgaaagttggaatagcttaactgttgtgtaaaacaaccaacacacacgagcatgggaagccaagacaacaacgtagaattgtcatccaattcatttctagcttacaaatctgctaaggtgtttgttgctggtcaccggggtcttgttggctcggccattggtcgcaagctcacccaacttgggttcactaatctagtct

SEQ ID NO: 20761 - DNA, 394 bp, Glycine max
  Clone ID: LIB3049-010-Q1-E1-C5
gaccgtttcggttaacactttccaatacaataatcactaactgaatattcgatcggagatgtctgccgccgccgaagaagctaacgctcccgccgtcgaaaagccggttgaggaggtgaaggcgccgaaccccgcgaaggagaagaaacctaaggctccgaaggaaaagaagccaaaacaggccaaaacagcttcacatcctccatattttcagatgattaaggaggctttgatcgctttgaacgagaaaggaggatcgagtccttatgcgatagcgaagtacatggaggagaagcacaaggcggtgctccctgcgaatttcaagaagattctaggtctgcaactaaagaaccaaactgcgagagggaaactcgtgaagatcaaggcttcgtac

SEQ ID NO: 20762 - DNA, 378 bp, Glycine max
  Clone ID: LIB3049-010-Q1-E1-C7
gggatgcattcattgtctccaattttttttttcgtgtcgttactttcatctctaactactcttcttctgcatcatttctctgttgcagcaccggttacgaaaattcgtggaaccgatttctggtgttgagctgcgattgcatgtggaaatcgatttctgattaatcttggaagtttgatgtgcttgcttgcttttggtttgaatttgaagtggtcttaatggggaatatactgaatctgaacaattccaagactagatggaaggattcctacggggttttgcaaggtgaatcctgcaagagacagatgttgtcaccaaacccttgcgggtacaacgcatgactgattccgtcccttcctgatgagatatcaatacaga

SEQ ID NO: 20763 - DNA, 393 bp, Glycine max
  Clone ID: LIB3049-010-Q1-E1-C8
gcacaaaagatggggttcactcccacaagtactgcaacatgctttctcataatagcacctctggttgtgctatggtgttggaagctactaaagtgggtgtggctgaggccaaagagattggagagagcattaagggcacagggccttcaggggaatccctacagcctcttgattggggacactaaggaaatgtacacagtgctcatgcaagctgccagatctcaacaatctacaagttcttttctctctaaggataaggatgcagcaccacatatcacaacctttaaccatcacattgtcaacaaattcggcaagaattcatttttttgggaaggtaccaaaccaaaagtggtaatcactgaccctgagcaaatcaaagaagtcttcaacaag

SEQ ID NO: 20764 - DNA, 359 bp, Glycine max
  Clone ID: LIB3049-010-Q1-E1-D1
ggaaggggtgaggtagcaacagcactgccactgccactaccaatagcagaatgggaaccttgggcagagctttctacgccgtcggattttggatccgcgagaccggccaagccatcgatcgcctcggctctcgtctccaaggcaactacctctttcaagaacagctatctaggcatcgacctctgatgaatctgttcgacaaagctccctcggttcacagggatgcatttgtggcccccagtgcctccctcctcggcgatgtccacgttggcccagcttcctccatttggtatggatgcgttctcagaggtgatgttaacagcattactattggatcgggaactaatatacaagacaat

SEQ ID NO: 20765 - DNA, 372 bp, Glycine max
  Clone ID: LIB3049-010-Q1-E1-D10
gatagccatagattcccattttggcagccactctttctctctaccctccaacgtgctctccttccaatcacactcacaataacaaactaaccaattcaaagttcacacacacacagcttgggaagaaaatcgagaattttccgagaaaatccgaagaaggcgggccatggtttccccggaaaacagcaattggctgttcgattacccgctgatcgacgacgttattcccgtcggcgacgcctccttttccgtctccgcctccgccttctcctggcccccacctcccgccaatgtcagtgttgaaattgatgcttcgcttggggattctgatggccccaaagatactgctttgaagaaaagggctagatgtga

SEQ ID NO: 20766 - DNA, 331 bp, Glycine max
  Clone ID: LIB3049-010-Q1-E1-D11
gagggagaattaggtttttagggtttacaccgagcagcgacacctccctcccgcagtagccatggttctcaaaactgaactatgccgattcagtggtgccaagatctaccccggaaagggcatcagatttgttcgtggtgattctcaggttttcctgtttgccaactcaaaatgtaagcggtatttccacaaccgcctgaagccctcaaagctcacctggactgctatgtacagaaagcaacacaaaaaggacattgctcaagaagctgtgaagaagaggagacgcgctgccaaaaagccttactctaggtccattgttggtgccactctg

SEQ ID NO: 20767 - DNA, 373 bp, Glycine max
  Clone ID: LIB3049-010-Q1-E1-D12
ttcaccggcgtagaagaaccaccaaacaagcccaggaaatcctcgtcacggttcaatccaatatagactccgaaaaaactcgaaccggtttgctcgcgaagtccaccacgaacccggtttaccggctcagcgtattcgaaccgaaaacgggttcatggagcgagttacccttgggacccgaactcgccttcgggttacccatgttctgtcggatagcgggtgtcgggttcgaccttgtcgtaatgggcgggtgggacccagactcgtggaaagcgtcgaattcggtttttatctacaacttcctgtcggccaagtggcggcgtggggccgacatgccgggtgggccccgcacgtttttcgcatgcgcgtcgga

SEQ ID NO: 20768 - DNA, 392 bp, Glycine max
  Clone ID: LIB3049-010-Q1-E1-D2
ggaaaccgagaagaagaagatggagatgtatcagatctggagcaggagaatagcgttgggagcgttcgcgtttgttctgcttttcctatcggcctcagcagacgacgtcgttgtgctctctgaagataacttcgagaaggaagttggtcaggacagaggagctctcgttgagttctatgctccttggtgtggacactgcaaaaagcttgctccagaatatgaaaagcttggtagcagcttcaagaaagccaaatctgttttaatcggcaaggttgactgtgatgagcacaagagtttgtgcagcaaatatggagtctctgggtacccaacaattcagtggtttccaaaaggatctcttgaacccaaaaagtatgaagggccacgcactgctg

SEQ ID NO: 20769 - DNA, 389 bp, Glycine max
  Clone ID: LIB3049-010-Q1-E1-D3
gataaccatggcgtctaactctgcttccgctctttacttccttttatgcctatcgcccatcactttgcttctttctgcgtttcgtgctcaagctcaatctcatgctccagctcccactttcaagtactgtgaaaagaatgcagactatgctgtgaaggtgagtggagtggaaatattgcctgaccccgtggagagaggagtgccattcacctttaagattccagcttatactcctgaaccaattcaaagcggggacttgttatatgaaatttcttatgctggaatagaagcacaacctgctacatttctccatgatctctgtgaggaagcaccatgcccagtacctgcacgcaactttgtgcccgttcacaacgaattattgcctccgg

SEQ ID NO: 20770 - DNA, 302 bp, Glycine max
  Clone ID: LIB3049-010-Q1-E1-D4
ggggaaaagagaggcacctgagtcaatgctggtcagagacacgcacccctcccccgcaaactctctctcacacaaactgtggcgtgttcgcgaaacccgagacgtttctcttttcaacaccataaaacgcacagcacagcacagcacagcatctccaaaccttcccttttctctccttccgctacgctgcgccatggctcagcgccgcatcccccagcctctctcagagccagacaccacatgatacgattcccaccacaaaccgcagcgaggcagtggaaacagatcaagtcgccgaatcg

SEQ ID NO: 20771 - DNA, 384 bp, Glycine max
  Clone ID: LIB3049-010-Q1-E1-D5
ggcaggactgaagaagtgagggcaagaactttgcagcataccagcatgagcatgaagctcttccagctcttctccctactcccattcttcctctacttctacacaatagaagcagccgttggcccattgcaactgacacacccactggaccccttaactcagcaagaaatcaccctcgtcaaaaccatagtcctaaaaaagtaccccaagccagccaaccgcgtcttcttccactacgtcggcctcgacgatcctgacaaggccgccgtcctcaaatggctctcctccggcgcccggacgccgcgcaacgccttttccatcgccctcatcaatggccaaatccacgagctcaccgtcaaccttctctcgccgcgaaacgttgtc

SEQ ID NO: 20772 - DNA, 372 bp, Glycine max
  Clone ID: LIB3049-010-Q1-E1-D6
ggggaaaagagaggcacctgagtcaatgctggtcagagacacgcacccctcccccgcaaactctctctcacacaaactgtggcgtttcgcgaaacccgagacgtttctcttttcaacaccataaaacgcacagcacagcacagcacagcatctccaaaccttcccttttctctccttccgctactctgcgccatggcccagcgccgcagcccccaacctctcccagagccagacaccaaaggaaacgattcccaccacaaaccgcaacacaacaaggaaacagaccgagtcgccgaatcgccttccgccgccgagtcgcagcgtggcgagttacggagctcccaacgagcctcgtaaggagtccaatttaga

SEQ ID NO: 20773 - DNA, 380 bp, Glycine max
  Clone ID: LIB3049-010-Q1-E1-D7
gagagaaagagagagaaagatgtcgaagcgtggtcgtggtggttcggcggggaacaagttccgcatgtcgctgggtcttccagtggcggcgacggtgaactgcgccgacaacacgggggcgaagaacctctacatcatttcggtgaaagggatcaaaggccgtttgaaccgtcttccctcggcctgcgttggcgacatggtgatggccaccgtgaagaagggaaaacccgatctgacgaagaaggtcttgccagctgtcatcgttcgccagcgcaagccatggcgccgaaaggacggcgtctacatgtacttcgaagataatgctggtgttattgtcaatcccaccggagacattaaacgttctgctatcactggttcca

SEQ ID NO: 20774 - DNA, 388 bp, Glycine max
  Clone ID: LIB3049-010-Q1-E1-D8
gatgtgggtgggatgccactgcgtgatgcatcaatctcccagcaaattcctgttggggctttagcaacagctctggctaatgcttctccagagcagcagaggacgatgctgggtgagaatctctacccccttgtggaacagttagagcctgacaatgctgccaaagtgacaggcatgcttcttgagatggaccagactgaagttctgcatttgctcgagtcgccagaagccctgaaagcaaaggtggcggaggcaatggacgtcctaagaaatgttgctcagcaacaggctggcggtactgcggatcagctggcttcattatctcttaatgacaaccttgtttcttaacgtttatattttggatttatttaatgacgatgggttgtta

SEQ ID NO: 20775 - DNA, 379 bp, Glycine max
  Clone ID: LIB3049-010-Q1-E1-D9
ggttctagtgtgtgattgtttgttgttgtaactcgttcttcttcttttgttgttctgtgtttgtgtttgttttttctctcacctgaaaatgtcttgctgcggtggtaactgtggttgcggaagctcctgcaagtgcggcaacggctgcggaggctgcaagatgtacccagacttgagctacactgagtcaaccaccaccgagaccttggtcatgggagtggcacctgctaaggctcaatttgagggtgctgaaatgggtgtgcccgctgagaacgatggctgcaaatgtggaccaaactgctcctgcaacccctgcacttgcaagtgaggtgttgggagagcaagcttcaagcagagataccccttaattaggaataat

SEQ ID NO: 20776 - DNA, 372 bp, Glycine max
  Clone ID: LIB3049-010-Q1-E1-E1
ggaataatcaatcagtgaaatagctaagtatcatgagtagtagaggtgaaagcagtggtggtggacaaagctccttaaattacctctttggatcagaagaacagccaaagcctcctcccccaaagacagtttcatatccattgccaccttatggaattgacatcgataacaaccacaatccccctactggtcaaggccaacacctgggaaacgttctcaccaatcgtccatcgacaaaagttcaatcggttccaagtggacactcatcgcttggatacctgttcggagacaagtgatatcgatcatgttttcattttattatcccgatcgatatatccaattcactgatagtactgcatattggtgcctctg

SEQ ID NO: 20777 - DNA, 378 bp, Glycine max
  Clone ID: LIB3049-010-Q1-E1-E10
gattcaaaatggatcttattctatcgttgatcagagatttctctatgaaaaatatgaatcggagtttgaagaaggggggggagtcctcgacccacaacagatagaggaggattttttcaatcacatcgtttgggctcctagaatatggagcccttggggctttctattttattgtattgaaaggcccaatgaattgggatttccctattgggccaggtcatttcgggacaagcggatcatttatgatgaagaggatgagcttcaagagaatgattcagagttctcgcagggtggaaccatgcagtaccagacacgagatagatcttccaaagaacatggcttttttcgaataaaccaattcattttggaccccgcgga

SEQ ID NO: 20778 - DNA, 381 bp, Glycine max
  Clone ID: LIB3049-010-Q1-E1-E11
ggcgtgctgtctccttattttctcaaaaactgcatgaaccctctctttttcaccgaaccttcctttgttctttcccttcaattttttattcacggcaaagatgggtgagagtaacagcaacaagaagaggaagttaatttgccgcgaagaagaacatgaagaggaggaggagaccaaaatggagacgttctttgctctggtgagaaacttccgcgacacacgtgatcggtggatgggtctgaggtcaggtgaccgcaagagcaagaggggtaagattatcactgccaacgaagaaaatatagtttggaaacccacgtttcagcttgacgatttcgctgatgagcaagctcggtgccgaaactctttggaacctagtgcgtc

SEQ ID NO: 20779 - DNA, 382 bp, Glycine max
  Clone ID: LIB3049-010-Q1-E1-E2
gaaacaaaggcagagcagagttgttgcgattaagaagatgaagagagtggagtttatggggctggggctgttagtggtggtgatgatgggatgttgtgggtctgcgactgctgcggatgacttggcaaccaagtgttcggcggtgattcagaaggtaataccgtgtctgaacttcgcgacggggaaggaagaaatgcccaaaaaggaatgttgcgacgccgccacggccataaaggagagcaacccagagtgcttgtgctacatcattcaagagacccacaagggtagcccacaggtcaaaagcttgggcattcaagaggccaagctgcttcagctcgcttctgtttgcaacgtcaaaaacgccagcatcaccaactgtcct

SEQ ID NO: 20780 - DNA, 377 bp, Glycine max
  Clone ID: LIB3049-010-Q1-E1-E3
ggcctacgcagagagaaattgagtttctgagataaccacttttctctttgattcatcaatggcaaccgcgaggaccgtgaaggatgtttcgcctcacgatttcgtgaaggcttacgcctcccatctcaagcgttccggcaagatggagcttcctgagtggactgatattgtaaaaacagcaaaatttaaggaattggctccatatgatcctgactggtattatgttagggctgcctcaatggcaagaaagatttatttgagaggctgtcttggtgttggggctttccagatgatccatggtggaagcaagacaaatggaagccgtcgcccacatttccgcaacagcagttgggcctattgcagacacatttctgcac

SEQ ID NO: 20781 - DNA, 392 bp, Glycine max
  Clone ID: LIB3049-010-Q1-E1-E4
gaattcctcgaattctagaatccctagaaagaaggcaaggatgtggatggtggtgctttcttccccgcaaaccctagcacaaacagcgttcctccgaaattcaattcccagcccaaccagagtgtccctttctctcaaaaccccgtgttcttcattaacagcaaaatgccagcaacaacaaaaaactcaagaagacggcattcccgcggacgaggttaaaatccttgcgaaattcaagtcccgccacaactacatccgcgttctagaagtttctagaaaagcagaacaccccttccgcggctccaggctcctccttctcgacacccccggaaacatccacagcatatctttcctcttcaagtccctcaccaatacttacttcgacgtcctcg

SEQ ID NO: 20782 - DNA, 328 bp, Glycine max
  Clone ID: LIB3049-010-Q1-E1-E5
ggtagctaaacaaagggcaagagacggcgagttgagttttgaaagcgtgtgcgtgggagggtccgaagttggagatagtgattctggttctgttctgttcttctttctactcacaacaacatcagaatcagaaacaacaatggccatcactaacttggaagatgttccctctctggatctcatgactgagctccttcgtcttctcaagtgctcttccaaacctgacaagcgtcttattcgcattggcccacctggatctggacaatgcatccagtcaccaatcatatcagatgagtactgcttaggccacttagctaccagtgatatg

SEQ ID NO: 20783 - DNA, 364 bp, Glycine max
  Clone ID: LIB3049-010-Q1-E1-E6
ggcaactaagtagagaataaaatcaaatcaggagagcatgcatatgaacatgatgatgaagaaggtgtgtgggtttgcaatagtgatggtggcagtgcagcttctggtggaggtgagtcccaaggcagaggctgtgacttgtacccctgtggagctgagtccttgtttgggggcaataacttcctctcaaccaccatcaacaatttgttgccagaaggtgagggaacaaaggcaatgcctctgtggttacctcaaaaacccaagtctaaggccatatgccaattctcctggctccagaagggttgctagctcttgtggggttccctttccaacttgttaattaccttcatatcatatcatatat

SEQ ID NO: 20784 - DNA, 392 bp, Glycine max
  unsure (1)..(392): unsure at all n locations
  Clone ID: LIB3049-010-Q1-E1-E7
ggccctttcgcctacgcactgcggagagagaaattgagtttccgagataaccagttttctctttgattcatcaatggcaactgcgaggaccgtgaaggatgtttcgcctcacgatttcgtgaaggcttatgcttcccacctcaagcgttccggcaagatggagcttcctgagtggaccgatattgtaaaaacagcaaaatttaaggagttggctccatatgatcctgactggtactacattagggctgcctcaatggcaagaaagatctatttgagaggtggtcttggtgttggtgctttccagaggatctatggtggaagcaaaagaaatggaagccgtcccncacatttctgcaagagcagcggtgcaattgccagacacattctgcaac

SEQ ID NO: 20785 - DNA, 386 bp, Glycine max
  Clone ID: LIB3049-010-Q1-E1-E8
ggttctagtgtgtgattgtttgttgttgtaactcgttcttcttcttttgttgttctgtgtttgtgtttgttttttctctcacctgaaaatgtcttgctgcggtggtaactgtggttgcggaagctcctgcaagtgcggcaacggctgcggaggctgcaagatgtacccagacttgagctacactgagtcaaccaccaccgagaccttggtcatgggagtggcacctgttaaggctcaatttgagggtgctgaaatgggtgtgcccgctgagaacgatggctgcaaatgtggaccacactgctcctgcaacccctgcacttgcaagtgacgtgttgggagagcaagcttcaagcagagatagcccttaattacgaataatgataaac

SEQ ID NO: 20786 - DNA, 386 bp, Glycine max
  Clone ID: LIB3049-010-Q1-E1-F1
gaattcagtcattcttattattattagggtttggcgattcagagagaaagagaaatgggagaacgaaaaggaatcccaattgctctggggctcttggcgatgctcctcttcttcattgcttcgtcctcttcctctcacctcgttcgtgcttccgatgacgccgacgacgcgatcttctacgagtcattcgacgaggattttgacgggcggtggattgtgtccgacaaggaggattacaacggtgtctggaagcatgctaagagtgatgggcatgatgattatggacttcttgttagtgaacaagcccggaaatatgctatagtcaaaaaacttgacgagcctgtcagtcttaaggatggaacagttgttcttcagtttgagactcg

SEQ ID NO: 20787 - DNA, 384 bp, Glycine max
  Clone ID: LIB3049-010-Q1-E1-F10
ggccgaaaacctaatcagaaaaaaaatcgtagttggaggcgccgcactccactccactccaatcaatcagatactagcgatggggaggaagcgaaaggtagcaccggaatcttctgtatccgccgagcccccgctgaagcaacaccaaccaaaacccgaaaatgccgctcaggaatacgaagaagaggtcgaagaggaagttgaggaagaagaggtagaggaagaggtcgaagaggaagaagaagaagaggaggacgaagaggacgaggaagaagaagaagaagaccaaaaagaccaataccagcaccaacaacaacagcaagacgaagacgacgaaccgatctccaagcttctggaaccgttgagcaaggaccagctcctcat

SEQ ID NO: 20788 - DNA, 353 bp, Glycine max
  Clone ID: LIB3049-010-Q1-E1-F11
ggttctagtgtatgtgattgttgtgactcgttcttcttcgtcgttatcttcttcttttgttgtttgtgtgtttgttttttctctcacctgaaaatgtcttgctgcggtggtaactgtggttgcggaagcgcctgcaagtgcggcaacggctgcggaggctgcaagatgtacccagacttgagctacaccgagtcaaccaccaccgagaccttggtcatgggagtggcaccagttaaggctcaattcgagagtgctgaaatgggtgttcccgctgagaacgatggctgcaaatgtggagctaactgcacctgcaaaccctgcacttgcaagtgaggtgttggagagctaaaagc

SEQ ID NO: 20789 - DNA, 380 bp, Glycine max
  Clone ID: LIB3049-010-Q1-E1-F12
gggaagccaaattaggcttccattctgattctactattttatctgcctagttttagggtactgtttatcatcgttagaatctgaaggtgtgaagagtgaagatggcagaagaaaaagaatcaacgtcaattcctcttagtcaaggggacaatgcatctcgcgacgatcccgaagacccagccaagtctccactaagctcgcccaactcttccactcgcagggcttgctgctttgttctccagagttgggtctctaagaaatttatgactggatgcgtagttctttttccagttgctgttaccttcttcattacatggtggtttattcagtttgttgatggtttctttagtccaatatactccaggctcggcatagatgtg

SEQ ID NO: 20790 - DNA, 344 bp, Glycine max
  Clone ID: LIB3049-010-Q1-E1-F2
gacttgcggctgcagtagagaagcactcttcgttcttcgactgtctacgatctgctttctctgaattgtgaaaatgtcgctcggagaaactgcttgttcatacgcagcgctcatccttcatgaagatggaattagtgtaactgctgacaagatcagcaccttgttgaaaactgcaaacgttccagtagactcttattggccaaccttgtttgctaaacttgctgagaagaaaaatcttggcgatttgatagcaaatgcggcatgttgtggtgcaccagttgccgttgcagctgccccagttgctgctgtctctggtggtgtcgctgccgcagctccagttgctt

SEQ ID NO: 20791 - DNA, 395 bp, Glycine max
  Clone ID: LIB3049-010-Q1-E1-F3
ggagatagatagagcatagaaaggaaacgaaaaaacagagtacccgacagaatttgaaaacaaaggctgaaatttgaagaaactgagatcattgggtgtgaaatatatggcagaggttgtcttgctagtcgatgatttgaaactactttctgcgattcctcgctgtagaatttgtcatgaagaagagtttgaaagcgtagaaaccttggaagcaccttgtgcttgttctggaaccgttaagtttgctcatacagattgcatacatatatggtgcaacgaaaaacgaaatacaacctgtgaaatatgtctccagcaatacgaacccggatatacagctcctccgccaaagaactctaagataaatgatcaagcactgtctattaagggaggaggaa

SEQ ID NO: 20792 - DNA, 391 bp, Glycine max
  Clone ID: LIB3049-010-Q1-E1-F4
gacacacacatattctttgttgcaatatcacaaacacctcgtccgtcacaatgcagctagctgtggcggccaacgctgtcgtttcaccgtcgccgttccgacctcatccccttctccggtcatccttctccggcgtctccgttaagctcactccccaatccataacgttttcacgcttgaagcccctcaccgtcttcgccgccaccaagaaggccgtcgctgtcctcaaggggacctccgccgtcgaaggcgtcgccactctcatccaagaagacgatggcccgacgacagtttctgttagcatcactggccttactccggggcttcatggttttcacctacatgagtatggtgataccacaaatgggtgtatatcaacacgagcacattt

SEQ ID NO: 20793 - DNA, 392 bp, Glycine max
  Clone ID: LIB3049-010-Q1-E1-F5
gggcacaagtttgttgagatagctagaagcaataagatgaaaatgaaagtgcttgttttgtttgttgctacagttttggtagcatatgaatgccatggctcagactaccagaagttccctctccaaatgaaaactgggtttggtgggcaatacagcaatgaggtggcatgtgccagttggaggcttggcgtggaagcaaacaacgtagtcaagtggcaaactgttcctgcagcttgcggagagtacatagctgactacgttctaggagaccaatatagatcagattccaaaacagttaaccaacaagcttatttctatgctaaatccctcaaactcaccaacaaagatgtctttgtcttggacgttgacgacactactctctctaatctcca

SEQ ID NO: 20794 - DNA, 392 bp, Glycine max
  Clone ID: LIB3049-010-Q1-E1-F6
gacacaccttcgaactttcttttccttcactttcccgagaaacaatcaacactctttcactttcttgactacggtctcacttcgacatggctcgtactaagcaaactgctcgcaagtccaccggcggcaaggcgccacgtaagcagttggcgaccaaggccgcccggaagtccgctcccgcgaccggaggagtgaagaagccccaccgcttcaggccgggaaccgtggcgctgagggaaatcagaaagtatcagaagagcaccgagcttctcatcaggaagcttccgttccagagactcgtgagggaaatcccgcaggacttcaagaccgatttgcgttttcagagtagcgccgtctctgcgcttcaggaagctgctgaggcctacctcgtt

SEQ ID NO: 20795 - DNA, 394 bp, Glycine max
  Clone ID: LIB3049-010-Q1-E1-F7
gacaacacaacgcaacacaacgcgcactctctcttttctctcttaacacaaaaaccctatcgttcttcgcggtttcgccgattctcgccatgccgaaagccaaatccgacgccaaagccgccgatagccggttgaagcgcaagggcgctggtgctggaaggaagcaatcgaagaaagctgctaaggatcctaacaagccaaagagacctccaagcgctttcttcgttttcatgtccgagttcagagagcagtttaagaaggagcatcctaactacaaatccgtcgctgttgtcggtaaagctggtggtgacaaatggaaatcgctgtctgatgctgaaaaggcccccttcgttgccacggccgaaaagaagaaacaagagtatgagaaaactat

SEQ ID NO: 20796 - DNA, 395 bp, Glycine max
  Clone ID: LIB3049-010-Q1-E1-F8
gactcaccacttcaaaacactcataacacaaagcacaaagcaaagctcatccttgagttaaaaaatggcagcagcttcttccatggctctctcatccccatccttggctggcaaggccgtgaagctgggcccatcagccccagaagtgggaagggtgagcatgaggaagaccgtcaccaagcaggtctcctcaggaagcccatggtacggcccagaccgagtcaagtacttgggcccattctctggcgagcccccgtcctacctaaccggtgagttcccaggcgactacggctgggacactgctgggctttccgcagacccagaaaccttcgccaagaaccgtgaactcgaagtgattcactccaggtgggccatgctcggagccttgggctgcg

SEQ ID NO: 20797 - DNA, 377 bp, Glycine max
  Clone ID: LIB3049-010-Q1-E1-F9
ggtcttgcaggcgaagagatggccaccgttccagggcagctcgtgtgggagatcgtcaagaaaaacaattccttcttggtcaagcagtttggaaggggcacccagagcgtcgaattcagcagagagagcaacaatctctacaacctcaattcgttcaagtactctggtttggcaaacaagaaaactgttactgttcagcctgagggcaaagatcaggctgtgttgttggctacaaccaagacaaagaagcaaaacaagcccgctgcattgctccacaaatctgtgatgaagaaggagttcaggacgatggcaaaagctgttgaaaaccaggtggccaaaaattactacaggcctgatctcaggaaagctgcccttgc

SEQ ID NO: 20798 - DNA, 394 bp, Glycine max
  unsure (1)..(394): unsure at all n locations
  Clone ID: LIB3049-010-Q1-E1-G1
ggtgaagaaaaggtggtgcaaggtaaaacctttgtgcctttaaatcctcaatgtccaagtcttgcaaagggttggccatggagctagtcaagtgtctcagtgaatctgattgtgttaaggttgagaagagatcatataaggaatgtgttggagagaagagtccatgtataccaagtgagtgtgttggactcagggaaacctatttcaattgcaagagaggccaggttgacatgagagctaggattcgtggaaacaagggctattaatgatctcatcatacatttgaaaactctgaagttgttctgtccagttgaggttctttcaatttttagctcaagacgaagtcaacanaagtaagagatgacggtgaatcagagaaatgggaggccttgtt

SEQ ID NO: 20799 - DNA, 356 bp, Glycine max
  Clone ID: LIB3049-010-Q1-E1-G10
cacgcatcagaaaaaccaacattgaatcttctattgagaaacttaaatcagcagtaaccagagcacaaagcattggttgtgggaaacagttctctccaattgtattttatggatctccctgtggcatccctcccaaaaagccaacccgtatgttatggcgaatgttacgtgagatatgccccaatgtctctcagcaaaatatattgagcataaggaaggaagtttggatgacattcccaaggcaggatgaagcaatgaagtttgccaaaggacaagaagatgttcatgttttcagctatcaagaccactttaatggccaaagaaggttccttgtgtctacatatacagaattctgg

SEQ ID NO: 20800 - DNA, 365 bp, Glycine max
  Clone ID: LIB3049-010-Q1-E1-G11
ggaactgtgaagtgtatttggtcactgacctatcttggtagagatttgaagtttaaaccttcaaattaatcaaaccattttaatttgcctatagattctgagtcactgctgctatggcgctacgcgtacttcttgtgttggggacgttgctgatgttgtgccttgttaaggtttcatctgatccaaagatagaagaagaaatactggaagcagaagaagaactgcagtttcccgataacgagccacttatcgtgagagacgcgaacagaaggctaatgcaagatatggattgtggtgggttgtgcaagacgaggtgcagtgcacattcgaggcccaacttgtgcactacggcgtgtggcacgtgc

SEQ ID NO: 20801 - DNA, 300 bp, Glycine max
  Clone ID: LIB3049-010-Q1-E1-G12
gagatgaatcatatgccggcaagtacaagaaaatattagctgcatgcatgcaatcccagttcacaaagccggcgggcacagttaatttggtgcatggtgactttgttccaagcttcaattatatgtatatataagtcataggcacaatacaattacaaatacaatggcatattattcttattaaaaggcacaaaagcaagaatttgatattggttcctaaggttggggttcctggtttttcccctcatggaaccttaattgccagaaggaaggaaatttaaccgccttgaaagatatagg

SEQ ID NO: 20802 - DNA, 393 bp, Glycine max
  Clone ID: LIB3049-010-Q1-E1-G2
aggggttgtcttctgaagagaatttttttttttttatcattcatgggtttttttgtagcacatgtagtgcaaggatcagcactagcccttcttggattatggcacaccatccacaccatcagatcttacctggtgaagggccctgccaacttcactgtaggattctggtaccagtttaacactacccctcagtctagacttaaacacttagaacttgtttctattttatccttttccatccttgcatttttcgatcaaattctagacttccctcatttccactatgcctttaagcttgacaactttgagcatgcaactatgttcatacaccttgctttgtttgctggtttctccctctccactgagttgactgattcacttgacctcttctcc

SEQ ID NO: 20803 - DNA, 389 bp, Glycine max
  Clone ID: LIB3049-010-Q1-E1-G3
gatccttttactttcgggtgcagagtttgttgagcgaaagagccattttctgattctaccaaatctagggttagggattcaatttaccaacttcctctctctctctctctctcttcctattcttttccttcctccgacaaattttccctctccctctttctctctcttgcagattacgataatcacttttcctcgatctacccttttccgaaagaaacatggttttattttcccgggaaaattctcctcccagttttctcggccaaccttctgtcctatatatcattccttcttcgatttgttgtagaattccaatttcctaggttttctcgatcgatctattgatccgccaatttcaatttgggttcatattgttaggtgctgttcca

SEQ ID NO: 20804 - DNA, 382 bp, Glycine max
  Clone ID: LIB3049-010-Q1-E1-G4
gactcatccttcattaccaagcatatctcatttgaatacattccttgtagtttatactgaaagatgggtttgaagatggcgttactgatcctaggcctttccctcatgctccttttggtctcctctgaggtggcatccacgaatacaaaagaggaggcaaatggagtggatgatgccaaatatcccggtggaagctatggagggggttacccaggtcatggcggtggcggttatcctggccatggcggtggcggttatcctggccatggcggtggtggtggctatcctggtcatggtggtggccaccctggtcatggtggccggtaccctggccgtggtggtggatactgtacgcatggctgttgcggtggccggacattac

SEQ ID NO: 20805 - DNA, 390 bp, Glycine max
  Clone ID: LIB3049-010-Q1-E1-G5
ggttctagtgtatgtgattgttgtgactcgttcttcttcgtcgttatcttcttcttttgttgtttgtgtgtttgttttttctctcacctgaaaatgtcttgctgcggtggtaactgtggttgcggaagcgcctgcaagtgcggcaacggctgcggaggctgcaagatgtacccagacttgagctacaccgagtcaaccaccaccgagaccttggtcatgggagtggcaccagttaaggctcaattcgagagtgctgaaatgggtgttcccgctgagaacgatggctgcaaatgtggagctaactgcacctgcaacccctgcacttgcaagtgatgtgttggagagctaaagcttcaagcagaaatggcccttagaaataatgataaaaac

SEQ ID NO: 20806 - DNA, 201 bp, Glycine max
  Clone ID: LIB3049-010-Q1-E1-G6
aagggtttggttgttaaggtattcgcccctcagagtgaagtcgatcgtcatgcacacttcacgagattccggtcgctcatgacagacaatctcaggaagaatttcgcgaagtcaatgatgcacaacatgtctaacccttacagtatttgcataggatgtaggtgatgatgatgcactgcccgacacgttgtcatcggcgtc

SEQ ID NO: 20807 - DNA, 397 bp, Glycine max
  Clone ID: LIB3049-010-Q1-E1-G8
gagtgcagcatcgtagagaaataagggaaaaatggtgtcgctgaaactgcagaagcgcctctccgcaagcgtgctcaagtgcggcagaggaaaggtttggcttgaccccaatgaagtcaacgaaatctccatggccaattctcggcaaaacatcaggaagttggttaaggatgggtttatcatcaggaagccaaccaagattcactcccgctcacgtgctcgtaggatgaaggaggcaaagaggaagggccgccactccggttatggtaaacgtaagggtacaagggaggcaaggcttcccaccaagatactctggatgagaaggatgcgtgtgctcagaccgttgcttcgtaagtacagggaatcaaagaaaattgacaagcacatgtaccatgat

SEQ ID NO: 20808 - DNA, 353 bp, Glycine max
  Clone ID: LIB3049-010-Q1-E1-G9
ggagggcatcaaatcaatagagtgaagcagatcaagaggaagaggagggcacaaccaatgacaatggggcccaccgataaagaattggaagagcagcttctcgacgccggtaacaagctcctcctagatcctccctcctcagcggaggagctcctcccactcctcgaccaagtagagtgttgcctatcgagggttgagcagtcccctattgactctatgcaaaatgcactctctccatcattgaaagcattgattgcggacaaacttttaagccactcagatgatgatgtcaaagttgcagttgcctcttgcatcagtgaaataacacgaatcactgcacctgaagctcctta

SEQ ID NO: 20809 - DNA, 394 bp, Glycine max
  Clone ID: LIB3049-010-Q1-E1-H1
ggcgtcacataaacaaaaaaataaactggggagaagcatgttgttgatgttgggactatgcttcctattgttctctgcatttccacttgcgttctctgagagatgccacccacaagacaagaaagcgttgctccaactccagaaggacctcggcaacccttatcacatcatatcctggaacgcaaaggaggattgctgcgagtggttctgctgcgttaagtgtgacgagaaaacaaaccgcgtcattagcgttgccttatcatccccttttccagacaccaatctctcggcccaaatacctccctctgtgggtgacctcccttacctcgagtccctcgtcttccacaaattccccaaactcgtgggcccaatccagcccgcaatcgccaaactc

SEQ ID NO: 20810 - DNA, 344 bp, Glycine max
  Clone ID: LIB3049-010-Q1-E1-H11
ggagttgagaggatcgtgagaggggcagtagccgagattccgtgagttgcaaaaatgaagacgattctttccaccgagaccatgaacatcccggacggcgtgagcatcaaagttcatgccaaggtcatcgaagttgagggcccccgcggaaaattggtgcgagacttcaagcatttgaatctcgattttcagctcattactgacgaaaacggtaaaagaaagctgaaaatcgacgcgtggtttggttctcggaaaacatccgccgccattcgcaccgccctgagccacgtggagaatcttatcaccggcgtcaccaaaggctaccgctacaaaatgaggttcgt

SEQ ID NO: 20811 - DNA, 324 bp, Glycine max
  Clone ID: LIB3049-010-Q1-E1-H2
gagagtggtggggggtgcagtggagcgtcgcagttgtaaccctaatcagaagaagcgcagcttcaagcgagtgacagccaccagccatgggtcgtatgcacagccgcggtaagggtatatcctcttctgctttgccctacaaaaggacacctcctagctggctcaagatctcttctcaagatgtcgaagaaaatatctgcaagtttgcgaagaaaggtttgaccccgtctcagattggtgtcattctcagagattctcacggtattgctcaggtcaatagcgtcactggcagcaaaatccttcgcatcctcaaagctcacggac

SEQ ID NO: 20812 - DNA, 393 bp, Glycine max
  Clone ID: LIB3049-010-Q1-E1-H3
gagacaatcaaacctatggtggatggtgggactgaaggtttcaagggccatgctagggttatcatgccagggattacaccatgctttgagtgtactatctggctttttccacctcaagtgaagtttcctttgtgtaccctggctgaaacccctagaactgctgctcactgtattgaatacgcccacttgattaagtggaatgaggttcatggcggagtggcttttgatccagataaccctgagcatatgaaatgggtctatgacgaggctgtcaagagggctgagctttttggcattcctggggttacttattctcttacccagggtgtcgtgaagaacatcataccagctatagcttcaacaaatgcaattatatcagcagcatgtgcacta

SEQ ID NO: 20813 - DNA, 400 bp, Glycine max
  Clone ID: LIB3049-010-Q1-E1-H4
gggagtcccacgaaattagataattttcgataaatttgaaggaattaagttctcttatgctgaggaatatttaggtcataaaaaacaagttggaaccctttctgtgtagttccatcgcatcaaaccctggcaatggcagctacggccatacagaggttcccccaacacaaatacgtagacgcagttcgctggcttcccctacaatccgcattcgaccgattcgcagttttggcactcttcgacttcgattccgatgcttcctccatcgaaatccactctctcaacccaaaccccctctcattggaaccacactcttcgtggtcctctccttcccgcgtttcctccctcaaggcctcgcacttcctccagaagcccctcattgtcgcttccacttcctccg

SEQ ID NO: 20814 - DNA, 373 bp, Glycine max
  unsure (1)..(373): unsure at all n locations
  Clone ID: LIB3049-010-Q1-E1-H6
gagagagagagaggctgaaacaaagaagtgaaaataacagcaaaaagtaggagctgcagcagctcccccgaagcttatctcagcggcagactctgaaagctgtttgagtagcctcaacccggagaatagcaccaatgggagaggaggaaaacaaaccagaggaacccatggcaaaggagaaaaacccagaggaagaagcaacccaagagaaaaaaccggagcaagagtccaaagaggaagttgctgctgctgctgctgctccgccaccgccaccgccaccgccaccgcccgagattgtgctcaaagtgttcatgcatttccacgggttgcgcncgccaaggctcgttcgctccctcaaagggatcccaagtgt

SEQ ID NO: 20815 - DNA, 391 bp, Glycine max
  Clone ID: LIB3049-010-Q1-E1-H7
ggagttacagccgcagcttgaaacagagcagagcgaccttgaagagctatggctgtcggaaagaataagaggatttccaagggaaagaagggtggcaagaagaaagccgctgatccctttgccaagaaagactggtacgatatcaaggccccttccctcttccaggtcaagaatattggcaaaaccctcgtctctcgtacccagggaaccaagattgcatccgaaggactcaaacatcgggtttttgaggtctcattggctgatctccaaggggatgaagaccactccttcaagaagattcgtttgagagctgaggacgttcaagggaagaatgttctgacaaacttctggggaatggatttcacaactgacaagtttaggtctttggtgc

SEQ ID NO: 20816 - DNA, 250 bp, Glycine max
  Clone ID: LIB3049-010-Q1-E1-H8
caacgttacaagcatcagctatagttattcaatcagggttgagagcattagcagcacgaaatgaatataggtacagaagaagaacaaaggcttcaacaaaaattcagacacaatggagaagagcccaagctctttctgattacaaacagcaaaagaaagcaactgttacacttcaatgtctatggagagctaaagtggcaaggaaagagctcagaaagcttccgatggctgcaagggaaactggggcact

SEQ ID NO: 20817 - DNA, 378 bp, Glycine max; identical to SEQ ID NO: 19967
  Clone ID: LIB3049-010-Q1-E1-H9

SEQ ID NO: 20818 - DNA, 387 bp, Glycine max
  Clone ID: LIB3049-011-Q1-E1-A1
gagtctctaaaacctcagcaacaaacactcttcttctctccgccgtctctctccattctctctttccttccccttttcgagacgacaagatggtgaagaagagcaagaagagtaagagcaagagggtttcgctgaagaagaagtacaaggtcataaggaaggtgagggagcacaacaggaagaaaacgaaggaagcgaagaagcttcgattgagtgggaagaagaaggttgagaaggatcctggtattcccaacgattggcccttcaaggagcaggaactcaaggccctcgaggcgcgaagggcgaaggcaattgaagaattggaacaaaagaaagccgaacgcaaggaaagggctcggaaaaggaaattgggcttgctagaggatg

SEQ ID NO: 20819 - DNA, 393 bp, Glycine max
  Clone ID: LIB3049-011-Q1-E1-A10
gatcgcatttcatagcactcaccctcattaccaacacgaaagcatagccaaaaccttttttcgaagtctctgattttcctaatggctccggcaaaggcagagaagaagccggcggagaagaagccagcggcggagaaggcaccggcggagaagaagccgaaggcggagaagaagatctcgaaggaaggagggagcgagaagaagaagaagcgcacgaagaagagcgtggagacctacaagatctacatcttcaaggtcctcaagcaggttcaccccgacattggtatttccagcaaggccatgggcatcatgaacagcttcatcaaacacatcttcgagaaaactcgcccaggaagcgtcgcgtgtggctcgctacaacaagaagcccaccat

SEQ ID NO: 20820 - DNA, 227 bp, Glycine max
  Clone ID: LIB3049-011-Q1-E1-A11
tcaaattctcgattggaattttatgaatctaggaacgaagggttacgattatggtaaggattgggaagccataagactaagagaacgagaggaagaacatgtcgattcaaaatgccagaagaggatttggtggacatcaaatttaggttgtatcatggttccgatatccgatccttcaggtattcctccgccgacaacggtcgatatgcctaatcaaaaggattgtc

SEQ ID NO: 20821 - DNA, 329 bp, Glycine max
  Clone ID: LIB3049-011-Q1-E1-A12
ggaacttctcacgttcatttctacacatccctagctctgtcgttccgtcgttgacgatggcgtttcgggtgcgaagccctgacctccgctctctctttcttctctctctcttgtccatcgcttccgccaatgtcttcttcgaagagcgtttcgatgacgggtgggaaaatcgatgggttaaatcagattggaaaaaagatgagaacgtggctggggagtggaaccacacctctggtcaatggaatggagacgctaatggcaaaggtattcaaaccagtgaggattacagattctatgctatttcagctgagttacctgaattcaacaac

SEQ ID NO: 20822 - DNA, 320 bp, Glycine max
  Clone ID: LIB3049-011-Q1-E1-A2
gcatgcatatgatcatgatgatgaacaacgtgtgtgggtttgcaatagtgatggtggcagtgcagcttctggtggaggtgagtcccaacgcagatgctgtgacttgtacccctgtggagctgagtccttgtttgggggcaataacttcctctcaaccaccatcaacaatttgttgccacaatgtgacggaacaaatgcaatgcctctgtggttacctcaaaaacccaagtctaatgccattatccaattctcctgtctccaaaagggttgctagctcctgtggggttccctttccaactttttaaattaccttcatatca

SEQ ID NO: 20823 - DNA, 384 bp, Glycine max
  Clone ID: LIB3049-011-Q1-E1-A3
ggggcaaacacaattttttttatcttcttttttattttttgtagagagagagagagagaaaatgttggggatcttcagcagttcagtggtgtcgccgccggaggagctggtggccgctggcagcagaacgccgtcgccgaagacgacggcggggaagctgctgaaccggttcgtggagagcaaggcgtcggcggtgtcgctgcaggtgggggaacacgtgcagttggcttacacacaccacaacgaatcaccgtggcatcccagatcatttgctgttaaggatgagatattctgcttgtttgagggggctctagacaatttgggcagcctgagacaacagtatggactggccaagtcagccaatgaagtgattttggtgattga

SEQ ID NO: 20824 - DNA, 372 bp, Glycine max
  Clone ID: LIB3049-011-Q1-E1-A5
ggattcgaccggttgctggagcaggtttcgcagatcgagatcaacggcctcgggagggctgagaatccaccggcgtctaaggcggctatagagtcaatgccgacggtggaaatcaccgagtctcacgtcgcgtcggagacgatctgcgccgtgtgcaaggaagccttcgagcttggcgcgttggcgcgtgagatgccgtgtaagcatctctaccactccgattgcattctcccgtggctttcgatgcgaaactcgtgtccggtgtgccgccacgagttgccgtcggagcaaaccgcgccggaaacaagaatctccggccagatcgaagaaggaggtgtagggtttaacatatggaggttgccgggcggggga

SEQ ID NO: 20825 - DNA, 350 bp, Glycine max
  Clone ID: LIB3049-011-Q1-E1-A6
ggtgcatctcaccatcactctcgctcttgcaattattcctcttctcgcaatccgcactaaaattctagggttccgaaatggacgctgacggaaagatcaagaagggcgccggcggaagaaagggcggcggcccaaagaagaagccggtttcaaggtccgtcaaagccggtctccaattccccgtcggaagaattggccgttatttgaagaaaggaaggtacgctcagcgtgtcggtaccggtgctcccgtatacttggctgcagttctcgaataactagctgccgaggtgcttgagttggctgggaatgcagcacgtgacaacaagaagaacaggattattccaagacac

SEQ ID NO: 20826 - DNA, 350 bp, Glycine max
  Clone ID: LIB3049-011-Q1-E1-A7
gacacacatactcgcttccctctctctgcgttcggcaccagcgaaacgctcttcgttatctttttctcgactccgcggcgtagatccgaggagttcgggaaaccctaactcatcttccttcacaacagaacaacgcttcttttccctatccatcatctcaactgaagtcatggctggactagcacctgaggggtcacagttcgatgctcgtcaatatgattccaaaatgagtgacttactttcatctgatggacaggacttcttcacatcctatgacgaggtttatgatagttttgacgctatgggtttgcaggagaatcttctcaggggaatttacgcatacggttttg

SEQ ID NO: 20827 - DNA, 378 bp, Glycine max
  Clone ID: LIB3049-011-Q1-E1-A8
gacactcattatttctcatcatccttacccatctccacgcatgatatgatcactgtcacggttacatgcacatgagatttgacttttaacaccatctttgtgttacaggaaaagtactcttttaccatggcttccacttttgaaggtggctcagactcagagaaagagaacactgttgagagtgaagaagaagagtgtccagtaaaacaagttgaactcaccgttcctaaaaccgatgatcccaccatgcagcttctcacgttcagaatgtgggttctgggggttctttcatgcgtgttgttgtcctttgtgaatcagttcttttggtacagaacacagcctctgattgtaacctcaatttcagctcagattgctgtg

SEQ ID NO: 20828 - DNA, 310 bp, Glycine max
  Clone ID: LIB3049-011-Q1-E1-A9
ggtgtgtgggatgagaagatgatgatgaaacattgggagaataaattggctagagagagagagatagagggttgggttggttttcttcctcctcttcctaaatagactctaatctcaatcctcattacacacatatcgacagatttcttcaatcctctctcaatcttttctgttttcttttccactctttaatatcctcgttttcgccgattcaaaaacaactatgattttgtattttgttgtaattttcttcctagatgtatttgactcggttgtctgaatcaattgttgcagcatggtccggaaccac

SEQ ID NO: 20829 - DNA, 315 bp, Glycine max
  unsure (1)..(315): unsure at all n locations
  Clone ID: LIB3049-011-Q1-E1-B1
ggaccgcatagagtgagacacacacggtcactgcccaaattgatccacagaacacagaacacagcaaggtaaaaaaaattcgagctttatttgtctcaaatggcanaagaagaggagcaacaacaacaacaacaacaccaccttacgcatacaccttaattctgaacatcttcagcaagaggagaacatgggcatgtctatttctggttgtttacggtacccttttggcatcttcatggaacttactcaaatccacgctttcatggtacaatctgcaagttgaatcctccaccacctcggccgtggccggcgctc

SEQ ID NO: 20830 - DNA, 322 bp, Glycine max
  Clone ID: LIB3049-011-Q1-E1-B10
gaaagcgaaaaaagcaaaaatgcaatctatgtccctgacgctgagcaagaggctctccaattcaaagcctctcttcagaatctcttccaacctcgtcgctcacgcatcctccgccacaacctctccgccgccaccttcgccgccagtcccctctccatccgccctcaacagcctcctcaccgctccgtggtccgccactcagtcacgcggaatcacgctctctggatctgatgttcgagtcgggaatctcattggaaaccgaggacgcgctcacgaggttctcaaactgtatcgccctcttgaaggaacgggcaaagccact

SEQ ID NO: 20831 - DNA, 88 bp, Glycine max
  Clone ID: LIB3049-011-Q1-E1-B11
gggaagcataacataacataacgaaaactaaatcccaaataacccaatgaatcatcatcctctgaattcaactcgctcgcacatggga

SEQ ID NO: 20832 - DNA, 345 bp, Glycine max
  Clone ID: LIB3049-011-Q1-E1-B12
ggttctagtgtatgtgattgttgtgactcgttcttcttcgtcgttatcttcttcttttgttgtttgtgtgtttgttttgtctctcagctgaaaatgtcttgctgcggtggtaactgtggttgcggaagcgcctgcaagtgcggcaacggctgcggaggctgcaagatgtacccagacttgagctacagcgagtcaaccaccaccgagaccttggtcaagggagtggcaccagttaacgctcaattcgagagtgctgaaatgggtgttcccgctgataatgatggctgccaagttggaactaactggtgctggcatccctgcaatttccggttagggttttgagaa

SEQ ID NO: 20833 - DNA, 261 bp, Glycine max
  Clone ID: LIB3049-011-Q1-E1-B4
caacaaaagggggaacctttgcattcaattcattcaagattcagcaagtgcgttttggaagcacagaccgaaatacttcgagatggcccgtacaaagcagactgctcgtaagtcaactggaggaaaagctcccaggaagcagcttgcaaccaaggctgcacgtaagtctgcaccaacaactggtggtgtgaagaaccctcatcgttatcgccctgaaactgttgctcttcgtgagattacgaaataccagaagagcactga

SEQ ID NO: 20834 - DNA, 318 bp, Glycine max; identical to SEQ ID NO: 12670
  Clone ID: LIB3049-011-Q1-E1-B6

SEQ ID NO: 20835 - DNA, 340 bp, Glycine max
  Clone ID: LIB3049-011-Q1-E1-B7
gacaaagggaacggttgatgaaaatgtgtacgagattgcaaaaagaaagctagtattagatgctgctgttctcgagtccatggaggagattaatgaaggtgaattgcccgagaagaccatgggagagatattgtctgcaattttattgagttaaaatattgatctaagaaaaacagtttaatttatcatcacttcattcctatagttccaatcttgaattaatctgttgatttgggatagaagagaactggctgcctacaaattggcaagaatgcggtaccagtattgatgtacattataatcaatacgagaattagtataaaaagtcatggcgaagacc

SEQ ID NO: 20836 - DNA, 315 bp, Glycine max
  Clone ID: LIB3049-011-Q1-E1-B8
tggggcagttcaattccaatatattggagtcccactgtgtgattccctaccgctcccttcaggacgcagatcttcgtcaagacgcgcaccggtaagaccatcacccttgaggtggaaagtcctgataccatcgacaacgtcaatgccaagatccatgacaatgaaggaatcgccccgggccaccaccgtctcaatttcgccggaaagcaccctgaggacggcagtacccttgctgacgacatcattcagaaagatagtactcttcacctcgtcgtcggtcaccgtggtggtatgcagatcatcgataagacactc

SEQ ID NO: 20837 - DNA, 129 bp, Glycine max
  Clone ID: LIB3049-011-Q1-E1-B9
aagggggacaagtagaggacttcattctgtcacgagtacaagcatcttcacattgtcagaaaaaatgtgtcctcgcatgcattagatgaggaggggtctcaccttcgggctgctgagtctcctgatgca

SEQ ID NO: 20838 - DNA, 291 bp, Glycine max
  Clone ID: LIB3049-011-Q1-E1-C1
gaaagaacgaacaagaaagggggggttcctaagtggtgttgatttgttttgtttgtttgtaactccttcttcttcttttgttgttctgtgtttgtgtttgttttttctctcacctgaaaatgtcttgctgccgtggtaactgtggtttcgggagctcctgcaagtgcggcaacggctgccgaggctgcaagatgtacccagacttgagctacactgagtcaaccaccaccgagaccttggtcatgggagtggcacctgttaaggctcaatttgagggtgctgaaatgggtg

SEQ ID NO: 20839 - DNA, 317 bp, Glycine max
  unsure (1)..(317): unsure at all n locations
  Clone ID: LIB3049-009-Q1-E1-C2
ggttcaattttttgattgtttgttgttgtaactcgttcttcttcttttgttgttctgtgtttgtgtttgttttttctctcacctgaaaatgtcttgctgcggtggtaactgtggttgcggaagctcctgcaagtgcggcaacggctgcggaggctgcaagatgtacccagacttgagctacactgagtcaaccaccaccgagaccttggtcatgggagtggcacctgttaaggctcaatttgacggtgctgaaatgggtgtgcccgctgagaacgatggctgcaaatgtggaccanactgctcctgcaacccctgca

SEQ ID NO: 20840 - DNA, 295 bp, Glycine max
  Clone ID: LIB3049-007-Q1-E1-C5
ggaagttgtcgtgtctgcgttctcaaacgttgttgcttgctgctgctgcatagttgatcgaaagcatgacaacatcattgtccagcatccttttcaagggaattgcagctcgttctttcaccgcccctcgaactaggtcctgttatcatggaatgagatactttgctactgtagcagatgatcctgacagacatgatgacttcaagccagctaataaacttgagaattccaacatttctttggctgatgtgattgagcaggatgtcaagggatatcctgttatgagttacatgaa

SEQ ID NO: 20841 - DNA, 165 bp, Glycine max
  Clone ID: LIB3049-007-Q1-E1-C6
gagcatccaaaatggcgcattcgtctgttatagtcgtcctctgcactctccttctcttcttttctccgtcaattcgtgcctccgacgatgacgtggcgctgcacgcgaagaagctcatcagagacctcaacttgttccccgaggctggagtcgacatcgttcccg

SEQ ID NO: 20842 - DNA, 196 bp, Glycine max
  Clone ID: LIB3049-007-Q1-E1-C7
ggacgtattttggtgcgtgcaggtcccggtgttagaattggggtttccgtttcgattgtacctaccggccaacttagggtgcagtcactctcgatctcagcgatcaccaacgtgccttcttctcctcaggttcccttaggcaactttcggttttttgattgttgaggatggtgctggttttagccctggggaattt

SEQ ID NO: 20843 - DNA, 323 bp, Glycine max
  Clone ID: LIB3049-007-Q1-E1-C9
ggcagcgcttgatttgaggccaggcaagccccactcaaccaccacacctctcctcgttcacgctacccctttctgctcttcttctacctttcaagttttaaaagtataaagatggcagagacattcctatttacctcagagtcggtgaacgagggacaccctgacaagctctgcgaccaaatctccgatgctgtcctcgacgcttgcctcgagcaggacccagacagcaaagttgcctgcgaaacatgcaccaaaaccaacttggtcatggtcttcggagaaatcacgaccaaggccaacgttgactacgagaagatagtgcg

SEQ ID NO: 20844 - DNA, 322 bp, Glycine max
  Clone ID: LIB3049-007-Q1-E1-D10
gaatttaatgtggtgataggaagttcgaggcagtgattatttgtcagagtcagatgtagttcaagcatgccaaaggtcattggatgagaggcagagtttgaatgtgtggcggttccttgaagcaattaatgggagatatgacataagtgaaggattgagaaaattacagtgtcgttcactaatttttgttggggatatgtctcctttccacgctgaggctcttcatatgacgtccaagttggatagacgactcagtgccctagtcgaggttcaagcgtgtggatcaatggtaacagaggagcaacctcatgccatgttaata

SEQ ID NO: 20845 - DNA, 297 bp, Glycine max
  Clone ID: LIB3049-007-Q1-E1-D11
gaactgtagctcatttgctctttcataggcctttggatttaactgggaattatcctgataagcttgagtcacctatttctgctaagatacaatatgaaagcaaagaagctaacctcgagaagtttcctatgggatgcttgccagatgaggacatgaaaagtaatcaacaaatttctccccaagtgcttgaggcccagcctcaggaccaatttaaaaacagtcattgcagagactcctcagagaatgcttctaacaatgatctagctgatgctggagatcaagtgcttgaagcctctc

SEQ ID NO: 20846 - DNA, 159 bp, Glycine max
  Clone ID: LIB3049-007-Q1-E1-D2
gaactgttgatggcagtaccgctcaactacgagatgcttgaaagtagttgcttttactgtatttagtgatattgggttactgttccgtgtaccgcaccgagccttaagacgttggttgagattctggtagttactactccgtgcttcaattggtcaaag

SEQ ID NO: 20847 - DNA, 247 bp, Glycine max
  Clone ID: LIB3049-007-Q1-E1-D3
ggtctagaaaaatttacacaatattttaagacgcacataaacttcctctgtcactaccgactcctctctctgtctccgcctttcgcattgcaagcgctctctttctttgcgtttccttcggcctttcagtttcttcaacgctgcaactatccatggcagaccgctggctcagacccgaggggtagcgactgttcgctgcggttgttcccgctgttgggatctgtggattccggtgggttcgtaatat

SEQ ID NO: 20848 - DNA, 327 bp, Glycine max
  Clone ID: LIB3049-007-Q1-E1-D4
gattattatcatagtagatattcattccccttatctttctctcttctctctccccgcccaaaccctaactccctaccctattccgctttctctcatccatcatgaaaggaggaaagtccaagaccgaatctaagagagccgatgccaaacttgctgtgaataagaagggcgccgccaccaagactagggaacccgccggaaaggggaacgcagcgaaagatcctaacaggccaaagaggcctccaagtgctttcttcgttttcatggaggaattcaggaaggtgttcaagaaggaagatcccgacaagaaagcagtgtctgctgtgg

SEQ ID NO: 20849 - DNA, 139 bp, Glycine max
  Clone ID: LIB3049-007-Q1-E1-D5
ggagagagagagaggcacttgggatccaaaaatgagagagatcatcagcattcacataggtcaggccgggatccaggttggcaactcctgctgggaactctactgcctggaacatgggatccagcccgatggcatgatg

SEQ ID NO: 20850 - DNA, 292 bp, Glycine max
  Clone ID: LIB3049-007-Q1-E1-D6
gaccttctcttctctaagcactttactttttttttcagccatggagtttcattgccttccaatatttctttatctcaatttgatgttgatgacagccaatgctgcgttaactcctagacattactgggaaacgatgcttccaagaactcccttgccgaaagcaatcacagagctactaagccttgaaagtacgtccatatttgaatatgccgggaatgatgaccagtcagaaagtaggtccatattacgataggctggctataatcaggacgaggatgatgtgagcaaacac

SEQ ID NO: 20851 - DNA, 259 bp, Glycine max
  Clone ID: LIB3049-007-Q1-E1-D7
ggaggatcatgcccatggaatgaagtaactaacccagtcccttgacttggctcgctagttcgattcgattcgattctcggagatgaagaagggcttgtgttggctttgagtttgtgtttgggttcatcatcggagcaattaaattcgcgagaatgggagaatctcggtttcatcggacttgtcgtgtgctccgactgcaagactctctctgagtacgtcaacgacaaagggaataggaagaatcagggtcatgacaccg

SEQ ID NO: 20852 - DNA, 341 bp, Glycine max
  Clone ID: LIB3049-007-Q1-E1-D9
ggaggaagaagggcggcggccctaagaagaagccggtttcaaggtccgtcaaggccggtctccaattccccgtcggaagaattggccgttatttgaagaaaggaaggtacgcccagcgtgtcggtaccggtgctcccgtttacttggccgcagttctcgagtacctagctgctgaggtgcttgagttggctgggaatgctgcacgtgacaacaagaagaacaggattattccgagacatgtgctattggctgtgaggaacgatgaggagttggggaaattgcttgctggtgtcaccattgcacatggtggtgtgcttccaaacattaaccctgttttgttg

SEQ ID NO: 20853 - DNA, 306 bp, Glycine max
  Clone ID: LIB3049-007-Q1-E1-E1
ggacaaccccaacacttccgaaccttgcattgtatctacccacttctcaaccaacaatggcaatggcaacccaagcctctctcttcaccccacccctctccggtctcaaacccagcgaccgagccaccgcgccatggaaacaatcctccaccctctccttctccacctcgaagcccctcaagttctcgcgaacaatcagagcagcagccaccgaccagaccacagaggcaccggttgggttcaccccaccggaactggagccaaacaccccttccccgattctccgaggcagaaccgggggggctc

SEQ ID NO: 20854 - DNA, 384 bp, Glycine max
  unsure (1)..(384): unsure at all n locations
  Clone ID: LIB3049-007-Q1-E1-E10
cttgcaattcagcatattcttccttgtgtgaaggaattgtcatcagattcttcacagcatgtccggtctgctttggcttcagtaataatgggaatggctccagtgttgggaaaggaagcaacaattgagcagcttcttcctattttcctttcccttttgaaggatgaatttcctgacgtacgcctaaacattatcagcaagcttgatcaagtgaatcaggttataggaatcgatctgttatctcagtctttgttaccagccattgttgagcttgctgaggatangcattggagggtccggcttgcaattatagaatatatacccctaatgggaaatccatttgggggctaggttttttgatgacaagcttggtgccctttgcat

SEQ ID NO: 20855 - DNA, 302 bp, Glycine max
  Clone ID: LIB3049-007-Q1-E1-E11
ggcctacacccattctacactcgcctccttccaaaaccgcaccctccacacacctcttcctctttcgccccctcagattcaaaagacctgtccccccgctgaaagcgtcgatggcggagaccaacaacaacgttgccgtcgaggtccttgaaaaagaggatcttgccgtgtccctggccaaatacgtcgccgatctctccaacaaattcacttccgaaagaggggctttcactgtttgcctgtctggcggctctttgatcaactatctccggaagctgctggaaccgccttatgttgatact

SEQ ID NO: 20856 - DNA, 388 bp, Glycine max
  Clone ID: LIB3049-007-Q1-E1-E12
caccgtcattggccacaaaaaacagaccggaccatgtgacggcgttggccttctcggcatcgcatgggccttcggtggcatgatctttgtcctcgtctactgcaccgccggcatttctggtggacacatcaaccctgcggtgacttttggcctgttcctggcccgcaaggtgtctctcattcgtgccctgttctacatggtagcgcagtgtttgggtgctatctgcggtgtcgggttggtgaaggccttcatgaagcactcctacaactccctcggcggcggtgctaactccgtcagcgctggctacaacaaaggcagtgctccgggtgcggagattaaccggaacttcctccctgtgtcaacacggttttctcggctaccgacccca

SEQ ID NO: 20857 - DNA, 311 bp, Glycine max
  Clone ID: LIB3049-007-Q1-E1-E2
agacgaggaaaagcttgcatcaagaaagttttgcttagtaattgtctccaggaactcatggagcttcaccaggaaagtgaagaagaagtcacggacacagagcaagccgaaaactggttctctttgacttctgctcaacgcatatgtgacatgtttcttgctcttgataaagatacaaatgggacattaagcaagcaggagctgcgagaatatgcagatgcgactctggctgatagtgttattgagagagtatatgatgaacatgttcgacgtggaaagagtggtggtgggaacgcccgagagatggattt

SEQ ID NO: 20858 - DNA, 259 bp, Glycine max
  Clone ID: LIB3049-007-Q1-E1-E3
aggggttcccttgcgttggaaatattagtcacaggcttcactttacaggatgggacttctcactacatgaaaggccttgttctcctgctgtgctacattgttattggggcatgcttcttcgtacaaataacatcctgttactaatcatcctgatgttactaatatcacacttaaactatgctctagaccaatttgaaccgcttaattagtaggctttggcctatttgttgtcccttcctaacatgaagactggtgccat

SEQ ID NO: 20859 - DNA, 267 bp, Glycine max
  Clone ID: LIB3049-007-Q1-E1-E4
gaaagatagagagactgacaacacctctctctctctcccctcgttgatcccaaatctattaggggtttttattcgatgctattcggcctgaagctttcgtttcgcggatttttttaattagtttttttcctgcctatcaggaaagttgaaaaaaagatggaccatgacaagactggatgcgaagctgagccagaaggtcgtagattgtgcatcaccaactgcggattttttggaagtgcagctaccatgaacatgtgttcgaagtgc

SEQ ID NO: 20860 - DNA, 267 bp, Glycine max
  Clone ID: LIB3049-007-Q1-E1-E6
ggtattggagttaagcagtcaacaagaatacttgaggctgaaagcacgttatgaagctctacaacgttctcaaaggaaccttatgggagaagatcttggccctctaagcagcagagagcttgaatcacttgaaaggcagctagattcgtctttgaagcaaatcagatcaatagggacccaagtcatgctggatcagctttctgatctacaacgtaaggaacactttctaggtgagtcaaacagagatctcagagcaaggttggaaga

SEQ ID NO: 20861 - DNA, 274 bp, Glycine max
  Clone ID: LIB3049-007-Q1-E1-E8
ggccatatataaaatactcgaatcgaatccggttccaatttccaactccgcctcttgttcagaagtcgcttctgtgtcgttacaggtcattcttaaggtgacaatttctctgcacgacatgtctgatgaacgagctgtgcatcctgattgccggaatgctagtaacccttatcatgaatgcagtgagtacggttttagagtaatagctgaagctaaaattaggtcacaacaacaggaatcagaagttggacaagctagtggtgggagcaactct

SEQ ID NO: 20862 - DNA, 356 bp, Glycine max
  Clone ID: LIB3049-007-Q1-E1-E9
gaagagtgacccagagagagtttctcaccaaacacacacttctcttctcttctcttctcttcattttctgtggttctcactttcttttctctaatcttctaatctcttattttcttcccccctctgttactccccgcttctctgaatccctttctgttaatcatctgtctttcaactcgtgattttttgggtttgcctcaccaaaaagattcaaactttgaaaatttttctcgaaagccaggtgttttcagaatcgagatccagctttttttttgtttgtttttaaaaaattattattttctttcgttcagccgcgagggttgtttttgattcctcaaaagctccccttccttttt

SEQ ID NO: 20863 - DNA, 288 bp, Glycine max
  Clone ID: LIB3049-007-Q1-E1-F1
gaaaataaaactcattcacagttgacaacaaaagtctctctctctctctctctctctctcggtgtgtctctatctcattcccgttgtagcaacggcttggcgacacgatgcatagacaatccttgggttctccttctcccaaagtccccaagctcatcagcgacgaagacgacgatgctcccaaacctcaccgtctgagtctcagcctctcctcgccgccgcctacgcggccgcacaagttcgtccacctcattcctctcctcactctcctctgcttcgtcgtcctct

SEQ ID NO: 20864 - DNA, 318 bp, Glycine max
  Clone ID: LIB3049-007-Q1-E1-F10
gagcgaaacagagagtgatttcagtgagtgatcggtgttcacttgatctcatcataatcgtcagcgtcaattgaagaagatgccgatcagaaacatcgccgtcggaaggcctgaagaggcgactcaccccgacacgttgaaggcggctttggctgagttcatctcaaccttcatcttcgtgttcgccggctcaggctccggcatcgcctacaacaagctcaccgacaacggcgctgccacccctgccggcctcatctccgcctccatcgcccaagcattcgccctcgtcgtcgccgttcccgttgggcgccaaaatcc

SEQ ID NO: 20865 - DNA, 317 bp, Glycine max
  Clone ID: LIB3049-007-Q1-E1-F11
tgggaggcagtgacacaacacaacacagccgcccttggaattaaccatgaaaggcgtgttttcggcgcccggtgattacgtccacttcaagtcccaagtccctcttcacaaaattcctattggcactaagcagtggcggtattacgatttcggtccaaaagccgtgcctccgcttatatgtcttcctggaaccgccggaaccgccgatgtatactataaacagatcatgtcattatctatgaagggttaccgtgtcatatctgttgacatacctcgtgtatggaataatactgagtggattcaagcatttgaaaaag

SEQ ID NO: 20866 - DNA, 306 bp, Glycine max
  Clone ID: LIB3049-007-Q1-E1-F12
gcaacaaaacaaccatcatcatggccacctctgctattcagcaatcagcattcgcaggtcaaactgctctgaagcagctcaatgagttggtccgcaagaccggtggcgccggcaaaggtcgcaccaacatgcgccgtaccgtcaagagtgctcctcagagcatttggtatggccctgatcgtcccaagtacctgggtccattctcagagcagattccgtcatacctgaccggagaattccccggtgactacggatgggacactgctggactatcagctgacccggaaaccttcgccaggaaccggg

SEQ ID NO: 20867 - DNA, 274 bp, Glycine max
  Clone ID: LIB3049-007-Q1-E1-F2
ggtagctgaggatattattactcagcaaaaattcatggaagttccaatcaagtatccggcaaaactcacccttagggtggttcttacttgtatcatggcggccaccggtgggttgatttttggctatgaccatggtgtttcaggtggagtgacctccatggattccttcctgaagaagttcttcccagctgtatatgagaaggagtctaacgtgaagccttcttcaagccagtactgcaaattcaacagtcagatactgacactgtttacatct

SEQ ID NO: 20868 - DNA, 174 bp, Glycine max
  Clone ID: LIB3049-007-Q1-E1-F3
gacaacacatagataagaagacagaaagatccaacactcaatcttccaacttccaatccctcgctttccgaacaaaatgtccattaacaacgaatccaagccgccaacggtgattgggaaaagccggccctacaacgtcgtcaagaatccgccgtccaaaagcaaagccgccga

SEQ ID NO: 20869 - DNA, 304 bp, Glycine max
  Clone ID: LIB3049-007-Q1-E1-F4
ggttcccttgcgttggcaataatagtcacaggcttcactttacaggatgggacttctcactacatgaaaggccttgttctcctgctgtgctacattgttattggggcatgcttcttcgtacaaagaacaccctttaataatcaagctgatgttactaacatcacacttaaaccaaccactaatgcagttttaagcgcttaattagtatgctttggcctatttgttgtcgcttcctaagatgaagaatggtggcatcgatccaaaccaaaaatcagattcaaattcaatggattgattattgttt

SEQ ID NO: 20870 - DNA, 177 bp, Glycine max
  Clone ID: LIB3049-007-Q1-E1-F5
caagtgatcatattcatcacctcttgtagacaatgaataatttgtcaaagtacaacagttatgcatgtttctcaactccagcattgatataatcgtttgatctcaggacaatgtgattcttttttgggtttcggtctatcagactcgagtcgttttcagttttcagggtggggtttt

SEQ ID NO: 20871 - DNA, 291 bp, Glycine max
  unsure (1)..(291): unsure at all n locations
  Clone ID: LIB3049-007-Q1-E1-F6
ggagtgagcaagagtgaagagcgaagagaatggctcccaagggtttaatctttttggctgtgttatgcttctcagcactgtcactgagtcgttgtcttgcngaggataatggacttgttatgaacttctacaaggaatcatgccctcaggctgaagacatcatcaaagaacaagtcaagcttctctacaagcgccacaagaacactgcgttctcctggctcagaaacatcttccatgactggtgctgttcagagttgtgatgcttcactgttgctggactccacaagaagg

SEQ ID NO: 20872 - DNA, 277 bp, Glycine max
  Clone ID: LIB3049-007-Q1-E1-F7
gacccaaaaccaacctactccaaggaagtccccgaatcagaaccagagatgggcaccaaacccaccgagatcagcagcggcaagatgttcggaggttacaacaagagattcaagcatttcagccttaccctgggatgctccatgaacttccacatctacttccctcgatctccttctccctctcacaaagtcccggtgctgtgctttcgctctggcctcacttgcaccgacgagaacgtcaggttcaagtcgggtgctcagcgtggggcttccgccg

SEQ ID NO: 20873 - DNA, 274 bp, Glycine max
  Clone ID: LIB3049-007-Q1-E1-F8
gaatttatggcaagcaaaggtctagatgctgtccaaactaaggtcaaggacatggattgggagagcaccttccacgtgcgtcacctccctgaatcaaacatctcagagatccctgatctcattgatgagtacaggaaggtgatgaacgattttgctttgaggttagagaaactagcagagcagctgttggacttgttgtgtgagaatcttggcctagagaaagggtacctcaagaaggcgttctatggatcaagaggaccaacttttggcacca

SEQ ID NO: 20874 - DNA, 303 bp, Glycine max
  Clone ID: LIB3049-007-Q1-E1-F9
ggattgagagtgggtatggcactcagactcagaggaaaatgggttttgattccattcttttggttctgcctgattccgttttgcttctcacaacagaagctgcgcttgcgctttggaaaaaatggagagttcaagatcttgcaaattgctgacttgcactttgccaatgggaagactacccactgcttggatgtgcttccttctcagtatgcttcttgctctgacctcaacaccaccgccttcatccaaaggatcatcctttctgagaaacctaaccttattgtcttcactggagataatata

SEQ ID NO: 20875 - DNA, 302 bp, Glycine max
  Clone ID: LIB3049-007-Q1-E1-G1
ggaagtgatgggagattagcattgggcaaaattggagctctctgtgagcagcttagagaacttagcagtcaagggtatgaagtcatattggtaacttcaggtgctgttggtcttggcaggcaaaggcttagataccgcagattggccaatagcagcttttctgatcttcaaaagccacagggagagcgtgatggaagagcatgcacagctgttgggcagagtagtctcagggcgctgtatgataccatgttcagccagcttgatgtgacgtcttcggaacttcttgtgaatgatgggttttt

SEQ ID NO: 20876 - DNA, 301 bp, Glycine max
  Clone ID: LIB3049-007-Q1-E1-G10
gactacggcctcgaggtctccgtcggcctcccgcagcccgccgctcacgccgtccctgccaaggaggccgacaaggtcgacgacgacgacttgtctcgccgcctggccgaactcaaggctagaggttaattactctgtaagaatactatcatcgtttctcgattctcattgctgacgcactggaacattatatactatatgtttgtgtatatttaaccgagttcggttggcacttgttatgtggactccccccttgaggggtgttatggccttcgcctcacgttagtgtcatcgtgtgaat

SEQ ID NO: 20877 - DNA, 365 bp, Glycine max
  Clone ID: LIB3049-007-Q1-E1-G11
ggagcgagctagataaggtcacatatatgaacaacatgttcggtcaatatcctttgttttcactggcttctctagccacattccttgtcttaacccacgccgccaccgcgccggagaatcctcctcctccgctcacagccgcggcgagggagttcttggaggcgcacaaccaggcaagagccgaagtgggcgtggaagcactcagctggagcgagaagctggggaacgtgtcgagtctgatggtccgttaccagcggaacaagaaggggtgcgagttcgcgaacttaacggcgagcatgtacggcgggaaacagctgtgggcaagggttaacggagttgcccccccccttgttgttggaggattg

SEQ ID NO: 20878 - DNA, 400 bp, Glycine max
  Clone ID: LIB3049-007-Q1-E1-G12
gagtgagagagagagaaggcaagatgtcgaagagaggacgcggtggttcggcggggaacaagttccggatgtcgctgggtctgccggtggcggcgacggtgaactgcgccgacaatacgggggcgaagaacctctacatcatatcggtgaaagggatcaaagggcgtttgaaccgtctcccctcggcttgcgttggcgacatggtgatggccaccgtgaagaaggggaaacccgatctgaggaagaaggttttgccagctgtcattgttcgccagcgcaagccatggcgccgaaaggacggcgtctacatgtatttcgaagaatatggctggtgttaatggtcatccccaaaggagaaatgaaaggttctgctatcactggtcccattggaaaagagtgt

SEQ ID NO: 20879 - DNA, 202 bp, Glycine max
  Clone ID: LIB3049-007-Q1-E1-G2
ggtagttccaccgagtagcaacaatgtcgaagcgaggtcgcggaggatcggcgggaaacaagttccgcatgtcgctgggtctgccggtggcggcgacggtcaactgcgccgacaacagcggcgcgaagaacctctagggcatagcagtgaaggggatcgagggtaggctgaacggggtgccgtcagcttgcgtcggagacat

SEQ ID NO: 20880 - DNA, 248 bp, Glycine max
  Clone ID: LIB3049-007-Q1-E1-G3
gagataggtttgtgatagtgattgccgccctctgctgccgtccctaatctgaaggctcgcgccatctgcgatcggatttcatggctccaggcaaggacaaggctcccccaccttcatccaggcctgccaagtctggcggtggcaagcagaagaagaagaggtggagcaagggtgagcatgacgaaggcgtgaataacatggtgctcttcgatcagggtacctatgacaggccccgcgctgaggcaccc

SEQ ID NO: 20881 - DNA, 288 bp, Glycine max
  Clone ID: LIB3049-007-Q1-E1-G4
ggagtgagagaagagagagaatatttctgttcgtgcagatagatagatagatggctcggagctccacaagaatgaaatgggtctccatcttcacacttctattcctctcccactcgcccctcacaaccttcgcagaagatgggctagtggcgaatggagattttgaggttagcccatcaggtgggttccctaacgaggcgattgtggagggccccagcgaggtcccagactggaagtcaaacggcaacgttgagctagtggaatcggggcaaaaacagggtgggatga

SEQ ID NO: 20882 - DNA, 307 bp, Glycine max
  Clone ID: LIB3049-007-Q1-E1-G5
ggaacggaaaagcactggcgcagctaccctgaggcttctcttctcttctcttctctgtcgtgagtcaccatggtgagggttagtgtgctgaacgatgctctgaagagcatgtacaatgctgagaaaaggggaaagcgccaggtcatgattaggccatcctccagagtcattatcaaattccttttggtgatgcaaaagcacggatacatcggagagtttgagtatgttgatgaccacaggggtggtaaaatcgtggttgaattgggcggtagactgaacaagtgtggggttattagtccccgttttg

SEQ ID NO: 20883 - DNA, 289 bp, Glycine max
  Clone ID: LIB3049-007-Q1-E1-G6
ggaatcccttatcaagcaggggtttcgcgggccgagaccaagtcaaaccgagacggtgacactggctgagtggaatttccgccgccattcgaagctacagcgatggccatagccgccaccatttccgttcctctcacatcccccacccgccgcactctcgcctccgtcaatagcctctctccccattctcccagatccactttgcccacaccgcaacgcactttcaaataccctaattcggcgcctcgtcgcgtcctctatgagcaccgaaaccgccgtcaaaacctcc

SEQ ID NO: 20884 - DNA, 302 bp, Glycine max
  Clone ID: LIB3049-007-Q1-E1-G7
gacggcagtgtgaaaagggagggagagagaagagaagaatctaaaaaggaagcaacatttctgtttccgcttcttcatctcatctcagcacaagaaagaaagaaagaaacttcaatcctcacacaaacgaaaacaaatatctttcacttcttctgcatccgacgctagaagaggtgtcgggacaaacaagcttcggttcgccggaacgatgaccggcggcggatcgacggggaggttgccaacatggaaggagagagaaaacaacaagaggagagagaggagacgaagagcgatcgccgcta

SEQ ID NO: 20885 - DNA, 268 bp, Glycine max
  Clone ID: LIB3049-007-Q1-E1-G8
ggagacggtgacgctgttgctggtgaacctggcggggataatggagacggccgacgagtcgctgcttccgggagtgtacaacgaagttggcacggcgctccacaccgagcccaccggtttgggttacctcactctcttccgatccatcgtacagtcctcctgggagcccgtcgccgcgtagctcgccgtgcgccacaaccgcgcccacgtcaacgccgtcggggccttcctctgggccgccgccaccttcctcgtcgcgttctcctcc

SEQ ID NO: 20886 - DNA, 302 bp, Glycine max
  Clone ID: LIB3049-007-Q1-E1-G9
gactgacatatttacgtgtagtctcgctggttttcgttgcttcctttcttcgttgcgacgccaatggcttctacgggcgaaaaagcaatggatgtcgaagatgcagagaatgaagtttcagtttcatctgctattctcaattcgatagcatctcggcagaatgaagttctttctccagaagatcttgcttgggttgaatcctgcctagttaaagattctgatatttcagacactgattggatccctttgaaaaatgctttattagatattatcagctcccaacctcaatctttcagcactga

SEQ ID NO: 20887 - DNA, 291 bp, Glycine max
  Clone ID: LIB3049-007-Q1-E1-H1
atgctttcatagtgtttgacaagtccacttctagcctttttgtggcttctgatcaagctggcaaggttcctctctattggggaatcacagctgatggttacgtagcatttgctgatgatgcagatttgcttaaaggttcttgtgggaagtcgcttgcttctttcgctcaaggatgtttctacgctagagcagttgggggattgagatgctatgagaatccagagaatgggattactgcagtccctgctgaggaggaggagatctggggtgcatttttcaagggggaaagga

SEQ ID NO: 20888 - DNA, 309 bp, Glycine max
  Clone ID: LIB3049-007-Q1-E1-H10
ggagagagagagagagaatctttcgaagttcgtttgcgtgtgttgtgtggtcagtcaccgatggcagcaccacctgcgagggcacgtgccgattacgattacctcatcaagcttcttcttattggcgatagcggtgtgggaaagagttgtctgcttttgcgattttctgatggttccttcacaaccagttttatcaccaccattggcattgattttaagataagaaccattgaacttgatggcaaacgcattaagttacaaatctgggatacagctggtcaggagcgatttcgaactattaccacagct

SEQ ID NO: 20889 - DNA, 310 bp, Glycine max
  Clone ID: LIB3049-007-Q1-E1-H11
ggaagcaaactaacttgagctgagaaatgtccgaaaacggagaagagaaattactcgctgtggcgcggcacatagccaaaacgctgggccacaacaacaccatgtctgatgacatattccaaatactatcgaacttcgatggaagattctcgagagagaatctttctgagaagggcgcagatgtggatcccagaggctgcgccgcactggatcattccctcaaatccctagaccgccggatctctccctacgtctcctccgaccgcacaatctgggccgacgccgccgattctgctgccttcctcgacgc

SEQ ID NO: 20890 - DNA, 266 bp, Glycine max
  Clone ID: LIB3049-007-Q1-E1-H2
gaccgagacattagaatatcgtatctttgcttttccttctctttctcttttttcctccaacttggagtttttctctcttcaaaggcaatgttccctgcagttatgtccaattccaattcctgctccgaagaggccactgtctcctgtggtacaagaatcagtggagtcaatcacgttggtgagaacgagcatttctgcagaagaacctcaaaagatcaagaaaaagagaaacctcgctggaaacgctgacccagatgctgaagtga

SEQ ID NO: 20891 - DNA, 272 bp, Glycine max
  Clone ID: LIB3049-007-Q1-E1-H3
ggaagcgacagtccagatgtgtgtcgaagaaaatggtgtgactcacagaggggaactgctttggcacaaagcaggctcccaagccatgatagtgtagtctacaatttcgcagtaaccggaggttgtcacagcagagatgatcaatgttgtgggcttacaggacatggagacatacatgtcacaactggggtaaatggatatcgaagatcggatcttgtgctcttacctcactcgcagtcatagtatgcatttttgcatcctcagctgggtta

SEQ ID NO: 20892 - DNA, 307 bp, Glycine max
  Clone ID: LIB3049-007-Q1-E1-H4
gagcatccaaaatggcgcattcttctgttatagtcttcctctgcactctccttctcttcttttctccgtcaattcgtgcctccgacgatgacgtggcgctgcacgcgaagaagctcatcagagacctcaacttgttccccgacgctgacgtcaacatcgttcccgttgctaattgcaccctccaagcgcgcaggatcgtcgagaagcgcctgaggttcccgaagctgctagcttcggattccgagccttcggttgaggatttgggtcaccacgctggggattgacccatttaggattcacatgcggc

SEQ ID NO: 20893 - DNA, 289 bp, Glycine max
  Clone ID: LIB3049-007-Q1-E1-H6
ggtatcagtgaattgaatctaacgagcatcgaagctcacgaattgaattgaattgagtttctttgtctccagagatgaagaagggcgtccatccacagaagcaatggatatcctacgttacacaaacggggtaggttgatgcatgtgatgatgacaaacatacaccctgttgggaaagtttaccacttccgagctaagcgccaaatggccgagagtttaggacagattgctaagttcagacatcgctttgggctagaaaatccagagggcaatgaaaaatgacgtgtcc

SEQ ID NO: 20894 - DNA, 311 bp, Glycine max
  Clone ID: LIB3049-007-Q1-E1-H9
ggcatacaatacatacatcagtgccgtcgtttcggtgaataagtgtcgtttaaagatgcacagtctgcaacagaacgcttccgaatggagcggtgtttccatagacgacgctttcggcatcgacgacaccaatctcttccagaaactcggcctccataccttcattaacctctccaccaatttctacaacagggtttacgatgacgaggaagaatggtttcgttcaatattcgcgaattctgagaacgagaatgccattcaataccaatacgagttcttcgtgcagcgaatgggtggtcctcctcactttt

SEQ ID NO: 20895 - DNA, 404 bp, Glycine max
  Clone ID: LIB3049-008-Q1-E1-A1
gacggcactcgttttcgttctcgttctggtttatagatctttgcgaaggaggtttacagcgctcaaccaaagatgcagaacgaggaaggacagatcactgagctttacattcctaggaagtgctccgccacaaacagattgattactgctaaggaccatgcttcggttcagatcaacattgggcatgtggatgagaatggcgtctacaatggccatttctccacttttgccctctgcggattcatccgtgctcagggtgatgctgacagtgctctagaccgcttgtggcagaagaagaaagttgaagtttagcaacaattgacaaccacagaaaagttggttacttcgttatgtattaatttctactcttgctagagatatttgagtactatgattgtcgtttt

SEQ ID NO: 20896 - DNA, 319 bp, Glycine max
  Clone ID: LIB3049-008-Q1-E1-A11
gggcatatatagcagtactatacaacggacagagcgagcgagctagataaggtcacatatatgaacaacatgttcggtcaatatcctttgttttcactggcttctctagccacattccttgtcttaacccacgccgccaccgcgccggagaatcctcctcctccgctcacagccgcggcgagggagttcttggaggcgcacaaccaggcaagagccgaagtgggcgtggaagcactcagctggagcgagaagctggggaacgtgtcgagtctgatggtccgttaccagcggaacaagaaggggtgcgagttcgcgaact

SEQ ID NO: 20897 - DNA, 372 bp, Glycine max
  Clone ID: LIB3049-008-Q1-E1-A12
gacacttcaaaatcctctggtaacccttattttatctattctctctctttcttttgtgttctaagcagctagaagcaatggagaggaaaagaagccatgcctctttcaccatgtttgcaatgcttgttggagtgatctctcagagccttgtcattcctgtagtatccaccactgttgaagatcagaagaactactacaccccagatccacatgctggaagtcacccctcaggctcacacagtagtactcctccatctcatggccatggaagctctctaccctcacatcatcacagtagtcgaagtactcgatcaacaccctcaggtggaaactgtggattatcacctccacaacatcatgattcaacaacaa

SEQ ID NO: 20898 - DNA, 399 bp, Glycine max
  Clone ID: LIB3049-008-Q1-E1-A2
ggagcaagagtgaagagcgaagagaatggctcccaagggtttaatctttttggctgtgttatgcttctcagcactgtcactgagtcgttgtcttgcggaggataatggacttgttatgaacttctacaaggaatcatgccctcaggctgaagacatcatcaaagaacaagtcaagcttctctacaagcgccacaagaacactgctttctcctggctcagaaacatcttccatgactgtgctgttcagagttgtgatgcttcactgttgctggactccacaagaaggagcttgtctgagaaggaaacagatagaagctttgggtgtagaaaattccaggtaaattgagaccatcaaagaatctttggaaagggaatgcccaggagttgtttcctgtgctg

SEQ ID NO: 20899 - DNA, 395 bp, Glycine max
  Clone ID: LIB3049-008-Q1-E1-A3
ggcacaagtttgttgagatagctagaagcaataagatgaaaatgaaagtgcttgttttgtttgttgctacagttttggtagcatatgaatgccatggctcagactaccagaagttccctctccaaatgaaaactgggtttggtgggcaatacagcaatgaggtggcatgtgccagttggaggcttggcgtggaagcaaacaacgtagtcaagtggcaaactgttcctgcagcttgcggagagtacatagctgactacgttctaggagaccaatatagatcagattccaaaacagttaaccaacaagcctaattccaagccaaattccctcaaactcaccaacaaagatgtctttgtcttggacgttgacgacactactctctctaatctccagta

SEQ ID NO: 20900 - DNA, 390 bp, Glycine max
  unsure (1)..(390): unsure at all n locations
  Clone ID: LIB3049-008-Q1-E1-A5
ggtgtgattgtttgttgttgtaactcgttcttcttcttttgttgttctgtgtttgtgtttgttttttctctcacctgaaaatgtcttgctgcggtggtaactgtggttgcggaagctcctgcaagtgcggcaacggctgcggaggctgcaagatgtacccagacttgagctacactgagtcaaccaccaccgagaccttggtcatgggagtggcacctgttaaggctcaatttgagggtgctgaaatgggtgtgcccgctgagaacgatggctgcaaatgtggaccaaactgctcctgcaacccctgcacttgcaagttaagtgtttggaaaacaaagcttcagccagagatagcccttaattangaataatgataaactattaatgtgt

SEQ ID NO: 20901 - DNA, 388 bp, Glycine max
  Clone ID: LIB3049-008-Q1-E1-A6
gattgaaggtcaacttcaaatccctaatctctcaattacaactgcaactacttttccctccaatttcgcttcaccacacatgcatggattctttgattttcatcttctctcgcgttttctgattctgatcttagggttccttatcccccaactttattgcttcctcacgcgtctttatcttttttcttttcgttgatccaaccttttccactaaagcttcgattttttgctttttattttttttttatcttttttgtagtttgtttgtattgtttcgttagggaattaggaatcttcgattttcaagcgccgcttatatcctttgtttgctggtaattaataagggtccggtggtgtgtaggtggctgaagtttcgtgagaattttac

SEQ ID NO: 20902 - DNA, 385 bp, Glycine max
  Clone ID: LIB3049-008-Q1-E1-A7
ggatgttgtggtgcaacacaacagtacaatacaatacaatggtccgaaccgggttcgaaacgcagcacgagcagcaacaacagtcaaactcaaaacagtgggaatgcgaagacctataaatagcgaacacttgagccttgtctttgttagtttggaattggaactaccgaaagccgaaccttaaacacaaacgccaaatctagcaactattgagttttgttttctttgaaacatcgtgtgcacagtaccccagaagatcgaacaaggatctccacgaagacaaacctctgttctcaactgtgtttccttaactcctaactaaacttccagaccatacccaggctgagaagatgcagcagacaccgcctatgattcctatgatgcc

SEQ ID NO: 20903 - DNA, 396 bp, Glycine max
  Clone ID: LIB3049-008-Q1-E1-A8
gaacacacaaagtgtgtgtgagagagagagagagagagagagtagtgatgggtggttgtgaagtagagtttgaggcagatcagtgcaagatgccaaagctacccttgttgaaccctcctacaatgcattctccagagagatcagggatgaaaactccaccacttttcacctcagcttcagttccatttggttgggaagaggagccagggaagccaaggccttgcactgatattgtgagcttctccaaccctactccaaagtgcttggaacttcctccaaggttgctacttgattcccaaagcaacaacaacaaaagcatgaaactttcatcaaccaacaacggttttggagggaccatacccctatgtggctaccaccaacaacacttgcaactcc

SEQ ID NO: 20904 - DNA, 379 bp, Glycine max
  Clone ID: LIB3049-008-Q1-E1-A9
ggaggaaagaaggaatagtgagtgatgttaaagatcaaggcagctgcggatcatgctggacattcagcacaactggggctttagaagcagcctatgcacaagcatttgggaagagtatctctctttctgagcagcagctagtggattgtgctggccgtttcaacaactttggctgtaatggtgggttgccatcacaagcctttgagtacatcaaatacaatggaggacttgagacagaggaagcatacccctacactggaaaagatggtgtatgcaaattctcagctgaaaatgttgccgttcaagtcattgactcggtcaatatcaccttgggtgctgagaatgaattaaaacatgcaattgccattggttcggccgg

SEQ ID NO: 20905 - DNA, 351 bp, Glycine max
  unsure (1)..(351): unsure at all n locations
  Clone ID: LIB3049-008-Q1-E1-B1
gaacagaagaatcctcaattctcattgtccctgttttttgtttggaggggaaaaaaagatattctttcttctttttgctgaaacccaataaagcgaaatcgcaaagggtgtcttggaaaagggtggtttcattaaaaagcaaggatctttgggggggaaagagaagagaataagggcaagctttgttttggggcaatgggagatttggagaagcaagagagggtggaagaggatgcggaaggagagaaggagaggcttttgganggtatggcggttttggattttgacatgctttgttcctccggtgcgttggcaaattcccaatggaatttggggaaagcttgggggtgg

SEQ ID NO: 20906 - DNA, 357 bp, Glycine max
  Clone ID: LIB3049-008-Q1-E1-B10
gaaagggagagaggatccatgtccaaatacggttgggttggacagataatgcgtccctgctgacaccaccaacccccaagacgcgaaaacggttctaagaatttgcgaaggaaagagctaccggagatggagattcactacagtaacagctacttcgaaaggcgccccatccacaagtccaaagctgccgctgtcaaatgggtcaaagaatgggttccccaagatcttgtgacaacacgagggaagtgcatgatcttaaaatgggtaacagaggataccttgaagaccttgatagaaaatgtaaaagatccatcaatgccacagccagtacctgagccaactactgaagttactttt

SEQ ID NO: 20907 - DNA, 328 bp, Glycine max
  Clone ID: LIB3049-008-Q1-E1-B11
ggtggaaagaacgagcacacagagaaggaaacatggcgttggagcaagcagtatcatcgtcatcaagcacattgaggaacgttctcaccttccccaaaaccctaatttcaaaaccccaattccaagtcgctgcttctccctcatggaaaacacagcggcgttgggggaacttgaagtgctccatgacgacaacgccatcataccctaagccctcggagattccgtggcagaaggagctctgcaactccgtcaacctcatcggcaatgtcgcggcccccgtcgaaatcaaacacctcccctccggcaaggtcgtcgcctggacccgcct

SEQ ID NO: 20908 - DNA, 346 bp, Glycine max
  Clone ID: LIB3049-008-Q1-E1-B12
ggtgagagagcgagcgagcgagcagtttcaaagagaggatttgggattgggaaggcgagggattgcgctgcgtctcttcctcttctctttcgattcatccctcattcataatcttccaatccaacaacctcagcctcacactcacacatacacacatctgaacgcgtatcgtccctcccatggcttcaaagcgcatcctcaaggagctcaaggacttgcagaaagacccaccaacttcttgcagcgctggtccagtagctgaggacatgttccattggcaagcaacgattatgggtcctgctgatagtccttatgctggaggtgtattcctaatcactaatcaatt

SEQ ID NO: 20909 - DNA, 403 bp, Glycine max
  Clone ID: LIB3049-008-Q1-E1-B2
gatagcgaagtttcatttctttggattagaaatttttcccaaagctgatcgagaagccagccaggccaggagttgaagaatgggaagggggaagatcgaaatcaaaagaatcgagaacacaacaaatcggcaagtgaccttctgcaagagaagaaatgggcttctgaagaaagcttatgagctgtcagtgctgtgtgatgctgaagtttccctcatcgtcttctccagccgtggccgtctctatgagtattccaacaacaacataagatcaaccatagagaggtacaaaaaagcctgttcggatcattcaagtgcgaacactaacacaggaattccatgcccaattataccaacaagaatctgctaagctgcgacagcaaatacagatgctgcaaaattctaa

SEQ ID NO: 20910 - DNA, 400 bp, Glycine max
  Clone ID: LIB3049-008-Q1-E1-B3
ggcagcgcttgatttgaggccaggcaagccccactcaaccaccacacctctcctcgttcacgctacccctttctgctcttcttctacctttcaagttttaaaagtataaagatggcagagacattcctatttacctcagagtcggtgaacgagggacaccctgacgagctctgcgaccaaatctccgatgctgtcctcgacgcttgcctcgagcaggacccagacagcaaagttgcctgcgaaacatgcaccaaaaccaacttggtcatggtcttcggagaaatcacgaccaaggccaacgttgactacgagaagataatgggttgaaaccggcaggaacatcggtttcgtctcaaatgatgtgggactggatgccgacaactgcaaggtcctcgtcaac

SEQ ID NO: 20911 - DNA, 392 bp, Glycine max
  unsure (1)..(392): unsure at all n locations
  Clone ID: LIB3049-008-Q1-E1-B4
ggcgcatctatgacttaatacctaatttgccatagaagggctcgatcccagacctangcgcaagggaatttgtttangtanggctcaagctttatttcacgtagctgactttaccgtcagctcaattggaatagtttttcgctatgttcgcaggcaagtgagacgatccatcaatgcccttatctgcttcgaaagaaccggtgtcatccaaacatggtgaagaggtggcaactggattaataatagctgaaacttctactgtacagggttcggcttgcccaactgtccaagcttgagatctattttagaatatgcttaacacaacacatgcaatccaaacttggtttccttggaaagatttgaaagtaactccgttgggttcaatgcccgct

SEQ ID NO: 20912 - DNA, 399 bp, Glycine max
  unsure (1)..(399): unsure at all n locations
  Clone ID: LIB3049-008-Q1-E1-B5
ggcagttcaaagcgaagaaagattcgaaacgaagaaagaaagcgttgtgaagaatggcggaagagggacaagtgatcggtgtccacagcgtagaggagtggaaggaacatctcaagaagggagaagagtccaagaaattgattgtggtggattttactgcttcttggtgcggtccatgccgtttcattggcccaattcttgcagagtttgctaaaaagttgccgaatgtcaccttcctcaaggtggatgtggatgaattggagactgtttccaaggagtggggaattgaggctatgccaancttcccggttcctaaaagaagggaaacctggtggacaaggttgtgggtgccaagaaagaggagctgcaattgacaatagccaaacatgccgcaattgc

SEQ ID NO: 20913 - DNA, 332 bp, Glycine max
  Clone ID: LIB3049-008-Q1-E1-B6
ggcaagagtgaagagcgaagagaatggctcccaagggtttaatctctttggctgtgttatgcttctcagcactgtcactgagtcgttgtcttgcggaggataatggacttgttatgaacttctacaaggaaccatgccctcaggctgaagacatcatcaaagaacaagtcaagcttctctacaagcgccacaagaacactgctttctcctggctcagaaacatcttccatgactgtgctgttcagagttgtgatgcttcactgttgctggactccacaagaaggagcttgtctgagaaggaaacagatagaagctttgggttgagaaatttc

SEQ ID NO: 20914 - DNA, 386 bp, Glycine max
  Clone ID: LIB3049-008-Q1-E1-B7
ggaagaaaagagttttggattttggtgctgtgagaaatttatagagagagaaagagagatgtgtttggtttgtggaataattggtgacttgaatcgttgaatgagatattattgagtttgattcagaaatgaacaaagacgaaagcgataggaacgaaaagaaagcgcaagatattaagctttggggagttttcatcttcggattaatcggcgccaccgtcactgctttctccctgtccaggtcgcaggcaaaaggaggcagctctttccgaacagcatttcaagaagaagcatggaagaagtacaattagccaattgcagaaggattatgaggaggagatggagagggtggaacgaataagacgtatgcaaagtgtgtttaataa

SEQ ID NO: 20915 - DNA, 352 bp, Glycine max
  Clone ID: LIB3049-008-Q1-E1-B9
aacccagagcgtgctatagattacttgtattctggaatccctgaagcagcagaagttgctgtgccagttcctcaaacagctgggatttcttctggagcagttcctgtaggacctaattcatctcccttaaatatgtttccacaggagacgatttctagcactggtgctggacttggatcgctagacttccttagaaataacccccagtttcaagcattgcgttcaatggtgcaatccaatccacaaattctacagcctgtgcttcaggaacttggtaagcagaatcctggtcttttaagactgattcaagagcatcatgaggagtttctgcagttgataaatgaacctgttg

SEQ ID NO: 20916 - DNA, 353 bp, Glycine max
  Clone ID: LIB3049-008-Q1-E1-C1
ggtggtcgtgtttgttcaataatgctacaaaattcctccatgtcttccctcctcctccaccggatcaacggtggcggtggtgcaaccacggccaccaactgtcacgacaccgtctttatgacggtgccggatggcgtagcgcgctaccacacccacgcggtagcgccgaaccagtgctgctcctcggtagcgcaagagatcggggcctcggtcgccaccgtgtggtcagtgttgcgccgcttcgacaacccgcaggcctacaagcaacttttaagaacctgcaatttcatccgcggggacggcgacgtcggcacgctccgggaggttcacgtcatctccggcctgcccgctgc

SEQ ID NO: 20917 - DNA, 337 bp, Glycine max
  Clone ID: LIB3049-008-Q1-E1-C10
gattcttccaaacgtggagaatctcttgaccctgaagtgtaccctcgtcccacaggggaggtgtatatatgtgggatgtcgaaggaggaagaggtgccggatgatccagaggagataagaggaaaccctgaatcgattgcgatgcttaagaaagtgacgaagacggtgtcgagctatcttggggaaggagtggcacgtatgaaggcagagcaagcgtgtttcttgccgtgcacggatgatggggtacctgtcataggagaggttccaggggtgaaggggtgttatgtggcaacggggcataactgttggggtattctcaatggtcctgccactggtg

SEQ ID NO: 20918 - DNA, 348 bp, Glycine max
  Clone ID: LIB3049-008-Q1-E1-C11
ggcattctattcattcaggattcagcaagtgcgttttggaagcagagaccgaaatacctcgagatggcccgtacaaagcaaactgctcgtaagtcaactggaggaaaagctcccaggaagcagcttgcaaccaaggctgcatgtaagtctgcaccaacaactggtggtgtgaagaagcctcaacgttatcgccctggaactgttgctcttcgtgagattaggaaataccagaagagcactgagctcctaatcaggaagcttcctttccagaggttggttcgtgaaattgcccaggatttcaagactgatctgcgtttccagagccatgctgtgcctgcattgcaagaa

SEQ ID NO: 20919 - DNA, 333 bp, Glycine max
  Clone ID: LIB3049-008-Q1-E1-C12
gaccgcacagaattagggttttccaattcacagagcaacacaacgaaccaacaatggcgcagcctcagccgcagtcgcagccgcagcacgggcaagcagcgctggagcaggtgcagtgcttcggtcgcaagaagaccgccgtggccgtgacctactgcaagcgcgggcgcggtctcatcaagatcaacggctgccccattgagctcgtggagccggagatcctccgcttcaaggccttcgagcctatcctcctgttgggtaagagccgcttcgccggcgtcgacatgcgcatccgcgtcaagggtggcggccacacctcccagatctacgcca

SEQ ID NO: 20920 - DNA, 258 bp, Glycine max
  Clone ID: LIB3049-008-Q1-E1-C2
gaagagaaagagtgaggagagaattacagagcattttccaacacgattacacaaccgaatcaaaccctctctttctctccgaagctgcgtttaatatcttactcgccttagattgttcttctctttcattatactgttctcttttcgatttgagggaacagtacaagagtgtgaggatcggttaacccaactgcacaggtagtcactaaaataatggagtctcacgatgagactggatgccaggctcctgaacgcccc

SEQ ID NO: 20921 - DNA, 301 bp, Glycine max
  unsure (1)..(301): unsure at all n locations
  Clone ID: LIB3049-008-Q1-E1-C3
ggggaagctctgggtatctggacatatacccagagaggaaagtctctgcctttcanaacccttacattatgggcttcactgctgtcgctagcattggtggattgctctttggctacgacactggtgttatatctggagcccttctctatatcaaagatgattttccggaggtcaggcacagtaattttctccaggaaacaattgtcagcatggcagtggctggtgcaattgttggggcagcagcaggtggttggattaatgacgtttatgggagaaagaaggcaaccctcattgcagatgt

SEQ ID NO: 20922 - DNA, 400 bp, Glycine max
  Clone ID: LIB3049-008-Q1-E1-C4
caaaaaaattttaataatttaaccaatttcgtaaattcaaaaccccccaaggacccaacatcaattccggataacccaataacggttgccgaagtccaccactagtgaatgattttgcgagtaagtggaaggctgcaatacagctgatgcataaagacgttatcacttctttcagcaacttcttgtgtggtatggagatcttaagggctgcgttgactcagttgttgctttattacacaagactctcggattgcatcaagaggatcgttggtggttctgcattgaacaacgatcttgtttccatatcttcaatcaagtatgaaattaagaaataatccccggattttcaaatttgtcaaagatgccatagttatatactggatctaattcacaatcaatg

SEQ ID NO: 20923 - DNA, 260 bp, Glycine max
  Clone ID: LIB3049-008-Q1-E1-C5
gaacgcaaagaattaaggttttccaattcacagatcaccacacgtattcaaggctggcacagcctcagccatagtcacagcggcgataccggctagcaccactggaacatgtccaatgcttcggtcgcaataagactgccttggccgtgactttacgtaagcacgagcacagtcatatcacgatcgactgctgctccagcgatctcgtggatcatgacatctacctcttcaacgccagcgattctttcctcctctcgggt

SEQ ID NO: 20924 - DNA, 400 bp, Glycine max
  Clone ID: LIB3049-008-Q1-E1-C6
gacagagagaggggtttgggattggagggattgacgctgcgtctcttcctcttctctttcgatccatccctcattcctaatcctccaatccaaccacctcagcctcacactcacatatacacatatctgaacgcgtatcgtccctcctatggcttcaaagcgcatcctcaaggagctcaaggacttgcagaaagacccaccaacttcttgcagcgctggtccagtagctgaggacatgttccattggcaagcaacaataatgggtcctgctgatagtccttatgctggaggtgtattcctagtcactattcacttccctccggattaacctttcaaggctcccaaaggttgcctttaggactaaggtgtttcacccgaacatcaatagcaatggtagcat

SEQ ID NO: 20925 - DNA, 359 bp, Glycine max
  Clone ID: LIB3049-008-Q1-E1-C7
gaccctccattaatgtcccctcctcgattttccaaaccctctctctctctctctaccctaatctccttctcgcccaccctctatataatactccatacaacatagcataacattcgtatatacacacagtaccaaccactcttttttacttatggcatctttcatcttcacacctgtactctttcttcttatcatctccgccgtccttctcttcctccaccgccgatcccgctgccggcgcttccgcctaccgcctggtacactcgggctccccttcgtccgcgaaaccttacaagtcaataccagcttacaagagtgacaacccggaacccttcatgggacagcgcgtgaaacggtac

SEQ ID NO: 20926 - DNA, 402 bp, Glycine max
  Clone ID: LIB3049-008-Q1-E1-C8
gagcctcagcagaagcagaacgaggagaagcagaaggagcaaaagcaatggcgccgaagaagccgagaaccacgacaaggaaccctgatttggttagggggattggcaagtattcgaggtcgcagatgtaccacaagaggggcatctgggccatcaaggccaaaaacggtggcgttttgccccgccacgatcccaagcccaagcccgaggccccggcccagaagccgcccaagttctaccccgcggacgatgttaagaagcccctcgtcaacaagcacaagcccaaacccgcgaaactcaaggctagcattactccaaggaatgtgttgattccggcttgctgggaggttcaggggaaagagggttgttttcctgaagcagctcccatctggattgcttctt

SEQ ID NO: 20927 - DNA, 368 bp, Glycine max
  Clone ID: LIB3049-008-Q1-E1-C9
ggaaccgaaacgaacctcaacaacgctgagcgcagaaaggggaaaaggggattagggtttaggaagcagcgacaacaatggatttcacagtggagaagaaggaatcagagaacaacgccgaaaatgctcacccaacaacgttagattcttcttctcaattggcatcggcacttgattccaacaacaaagaaatcgaagaacgacaagctcgtgaactcaaagccggacttcaccccctaaagcacaagtttgtcttctggtacactcgtcgaacacctggagttcgaaatcaaacatcatatgaggacaacataaagaaaattgttgaattttgtaacggttgaaggattttgggtctgctactgcca

SEQ ID NO: 20928 - DNA, 388 bp, Glycine max
  Clone ID: LIB3049-008-Q1-E1-D1
gagtggaagagtgaataagagatatcaatatattatgataatggagggatacaataagaaggttatgattgtggggatggtgttgggcatggccatgattgggatggccaatggccaatactcgttttgtcgcatgcccagcgatgggttggcggcatgcaagccgagtgtgagtggggactatcctgctgatccctccactgcttgttgctcagccattgccaaggctgatcttaaatgcttctgccgcttcaaggattcgggccttctctctatgtatggtgttgatcccaacaagtgcatggaactcccctgttaaattccagggttgtcaatccttttcactgctagattcattagagggggcactaatcaatataaactacac

SEQ ID NO: 20929 - DNA, 304 bp, Glycine max
  Clone ID: LIB3049-008-Q1-E1-D10
ggtggctaaaaaaggtgggaatcggattacgttctgcctgcacaggcgaaaaccctaatcctgaggcactgaaagtgtgatatggcaagagtcatttcctcttcctgcgcacgcctcgcaatgtgcctcttctccaccaccaccacagcgaccgcgttcaccatcactttacccaaaccctcatcacgctcgctctcgtcgcgtcgattcctcttcgctctctcccatgccatcgtccctccctccattcgcgtcgccggaatccggctgccgcgttaaccgcgccggagaatcggtgtactca

SEQ ID NO: 20930 - DNA, 308 bp, Glycine max
  Clone ID: LIB3049-008-Q1-E1-D11
ggagctgcacacaaggagcgttctggatttgagggtccctggacctctaatcctcttattttcgacaactcatacttcacggagttgttgagtggtgagaaggaaggtctccttcagctaccttctgacaaggctcttttgtctgaccctgtattccgccctctcgttgataaatatgcagcggacgaagatgccttctttgctgattacgctgaggctcaccaaaagctttccgagcttgggtttgctgatgcctaagcaacgtttaggggattgttgaagaggcatggtgcccataatatttctct

SEQ ID NO: 20931 - DNA, 363 bp, Glycine max
  Clone ID: LIB3049-008-Q1-E1-D12
cagaatgctgacattcctatgtctgatgccgtttcggatgaatttgcatttggaagcaacgtgttggggcttgtcaagccttgggaaggagaaaggatccatgaggaatttggatcagatgatcttgaactcacacttgatgaagtcacaaatatgaattgaatgtgataatgtaaacattgacttttgttggttttgatcagtagatatgttagaaggtaagtgaggtggtgagtgcaggcagttgttttcttttatccttttatttatttttattttggtgactttcccttttcattctatagttctccagtaatatacatgcttatttagatgtggagtggatttgcaacccattcaatt

SEQ ID NO: 20932 - DNA, 406 bp, Glycine max
  Clone ID: LIB3049-008-Q1-E1-D2
ggaaccactaaacgatgatcccaaacgttcaaatccctacctgggacgcggacggaggaggagcactctccccgtcgatctcttccaatgctgacacgtgctcattattctcctccgaccatttccgaatgttccagttcaaggtgcggaactgtccacgtggcaggtcccacgactggaccgagtgtccctacgcccaccccgccgagaaggctcgccgccgtgacccccgcaagtaccactactcaggcacctcctgccccgattaccggaaggggaactgcaagaggggcgacacgtgtcagttcgcgcaaggggtcctccaatgcgtggttcaacccttctcgctaccggacccagctctgcaaagacggaacaaattgccgccgcagagtgtgcttcttcg

SEQ ID NO: 20933 - DNA, 397 bp, Glycine max
  Clone ID: LIB3049-008-Q1-E1-D3
ggatccaaagtcgcatcttttgcttcactctacgcagatcgcagcaaaccagagattgaactccgacgatgcctcccgtcgctcctcgatccggcgatgccatattcgccaacgtcgaacgcgtcaatgcggagctgtttactttgacgtatggcgcaattgtgcgtcaattgctcacggatctggaagaggttgaggaggttaacgagcagcttgatcaaatgggttacaatattggaatccgattgattgatgagtttttagctaagtctaatgtctcaagatgcaacgatttcagagagactactggtgttattgcgaaaggtgggttttaaaaggttccttggggttacggcatctgtgaccaattgggatgctgatggaacatgttgtagta

SEQ ID NO: 20934 - DNA, 313 bp, Glycine max
  Clone ID: LIB3049-008-Q1-E1-D4
gtctcacatttttacagaacctcgttgtggacagacctattagttatgaggaggttgaggttgagacacgtctcattagactttgtcaggaggtgttggagttctatattgaagttgcaggttctggaacagtatctgaatcttctcatggtaaacagctgcattggttaattcctcttggctcggggaagcgaagagaattggctgcacgtgcaccgcttgttgtgaccactcttcaagctatttgtaatttgggagagatatctttcgagaagaacctggctcattttttccctctcctctcaagcttgat

SEQ ID NO: 20935 - DNA, 195 bp, Glycine max
  Clone ID: LIB3049-008-Q1-E1-D5
ggagtgagtcaaacacgaaggaagaagaatggcgtctctgaggggtggagcttcttcgttgttgaatcgcctttcgaaatcgcttcttcttcattccaacaaaaaccctaatcctcaatctcaattattactcgcttctctctctagactccccggtgcgatttctccccaaaacgacgccgaatttccccaaac

SEQ ID NO: 20936 - DNA, 398 bp, Glycine max
  Clone ID: LIB3049-008-Q1-E1-D6
gacgtcgagcaccatatcctcccctccaagctcttcctgaaaattcccatctcctgctcttgcgtcgacggcattcgcaaatccgtcgctactcactacaagacccgcccctccgacaccctctcctccatcgccgacgccgtctacgccggcctcgtctcctccgaccagctccgcgaggccaattccatctccgacccttcggttctcgatgtcggacagaacctcgtcgttcctcttccttgcacgtgcttcaacggctccgataactctctccccgcgatttacctctcttatgttgttcgccccgttgataccctcgctggcaatggcggcaaggtactctacaaccctcactgatttgatgaatgttaatgccatgggaagcactgctatta

SEQ ID NO: 20937 - DNA, 395 bp, Glycine max
  Clone ID: LIB3049-008-Q1-E1-D7
ggagaagaagaagaagaagaagatggagaagtatcagatctggagcaggagaatagcgttggcagcgtttgcgtttgctctgctgttccaatcggcctcagcagacgacgtcgttgtgctctctgaagataacttcgagaaggaagttggtcaggacagaggagctctcgttgagttctatgctccttggtgtggacactgcaaaaagcttgctccagaatatgaaaagcttggtagcagcttcaagaaagccaaatctgttttaattggcaaggttgactgtgatgagcataagagtttgtgcagcaagtttggaatctccgggttacaaacaattcagtggtttccaaaaggatctcttgaagccaaaaagtatgaagggccacgcactgctg

SEQ ID NO: 20938 - DNA, 318 bp, Glycine max
  Clone ID: LIB3049-008-Q1-E1-D8
ggtagctacatactttgcgagtagctgttcttctgcgtctgttttacaagtgttcgagatccagcatctgtagcaacggcagcagagtcggacaccaagcatcacgagacgatggaaggaagttattcacaaacgatgcagattgatccgcatcgggctcgatttccatgcaccgttgtgtggtcaccacatcctgtgatcacgtggatcattccttgcatcggtcacattggcatcagcatacacgatggcgtgatactggcttttgcacggcctaattttgtgtgtgtggacaaatttgcatttggagctgccaac

SEQ ID NO: 20939 - DNA, 351 bp, Glycine max
  Clone ID: LIB3049-008-Q1-E1-D9
ggtggataaaaagggtgggaatcggattaggttctgcgtgcacaggcgaaaaccctaatcctgaggcactgaaagtgtgatatggcaagagtcatttcctcttcctgcgcacgcctcgcaatgcgcctcttctccaccaccaccacagccaccgcgttcgccgtcactttacccaaaccctcatcactctccctctcgtcgcgtcgattcctcttccctctctcccatgccatcgtccctccctccacccgcgtcgccggaatccggtgccgcgttaaccgcgccggagactcggcgtactcaccgctgaactcggggtcgtcgtcctccttcttcaagcgaccgcccccc

SEQ ID NO: 20940 - DNA, 376 bp, Glycine max
  Clone ID: LIB3049-008-Q1-E1-E1
gacatacaaacgacgcatccttctctttctttcggctttgatttctctctcctcgactcgatcccaattccactagggattcaattccgatgcgattccgagcttgttagatccacgacaaggtttcgttccccagattcttttgtaaaaaaaaattcttcctctgcccaacaggtaagttgtaaaaaaatggaccatgacaagactgggtgccaagctcctcctgaaggtcctatattgtgcatcaacaactgtgggtttttttggaagtgcagctaccatgaacatgtgtttcaaattggcaccaaggccatattgctgaaacaggagcaggccaagcttgcagcatcatccattgggaatattatgaatgggt

SEQ ID NO: 20941 - DNA, 305 bp, Glycine max
  Clone ID: LIB3049-008-Q1-E1-E11
gacaacagttcggaaggcccggttcaggtgttgcatgactcaaccaatgactgctgactgatcctgtgaaagcaaatgcaaatgcaaatgcaaatgcaaaaaagtcataaaaacatagactggaatatttgggggcaagatgaaactctggtagtgaaggggtgactatattatagctttgtgtatctgtgtgttttatttatttcttctgaagaaaaaaatgaaaatcttatctggagaccttttgcttattcggtttctgtttactgaatgtctgttctgaattagtaaaaagaagatgctgt

SEQ ID NO: 20942 - DNA, 139 bp, Glycine max
  Clone ID: LIB3049-008-Q1-E1-E12
gacaacagttccgaaggcccggttcatgtgttgcagtgacccacggggctcactgctgactgatcctgtggaatcaggggcagatgcaaatgccaatgcacatcagtcacagaaacatatactgcgcatatttggcggc

SEQ ID NO: 20943 - DNA, 404 bp, Glycine max
  Clone ID: LIB3049-008-Q1-E1-E2
tgggaaagcaaatacagaaaaaaagagtcaagcggcgagcaatggcgacatcgctggtgcgatcgggttttcttcgaagcgccctaagaggaagcgctcgtggctcccaggttccgaagcgaaactttgcttcctctggtcatcacgatgatgcatatgagacggccaaatgggagaagattacatatctaggcattgttagttgcactggtttagccgtttataatctatcaaagggccacccacacttcaaagaacctcctgcttacccatatttgcatatccgcaataaggaattcccctggggtcccgatggactatttgaaaccaagcaacaattgacagcataattggtttaatgaaggtatttgtggcactggtgggcattcgttttgtcaatgttc

SEQ ID NO: 20944 - DNA, 321 bp, Glycine max
  Clone ID: LIB3049-008-Q1-E1-E3
gcacaatgggaaagcaaatacacgacagaagagtcaagcggcgagcaatggcgacatcgctggtgcgatcgggttttcttcgaagcgcgctaggaggaagcgctcgtggctcccaggtgccggggcgaaactttgcttcctctggtcatcaagatgatgcatatgagacggccaagtgggagaagattacacatctacgcattgttagttgcactggtttagccgtttataatctatcaagcggccacccacacttcaaagaagctcctgcttacgcatatttggagagccgcagtaatggagtcccctggggtcccgaga

SEQ ID NO: 20945 - DNA, 399 bp, Glycine max
  Clone ID: LIB3049-008-Q1-E1-E6
ggagaaagaaagactctgcaaaaacctatcctgaaacggttcgcagagaggcagcaaaacgctaaagccctaaacccccatattgagctttctccctctctctccgtcttcgatggcaacatctcttctgaaaactccgctcaatgtgttcaacagacaccacaatcacgtcgcattcttctccaatggcacaagtgcaagaagcagtgctccaatttcgcagaagaggagatcgcgtccattccccgtagtgtcaatggcatccacaccggttcaaacttctctcgaaaaaactgaactttcgtccaaaagcaccggtcctccaataatgggtaaagccatttactggaaaaatgggaaaggctgtgattaatgcggcggaagctgctggactgaatg

SEQ ID NO: 20946 - DNA, 396 bp, Glycine max
  Clone ID: LIB3049-008-Q1-E1-E7
gtggtactggattggccaaggggttccaaaaagcatactacaacaggtatggaggtggtgccaactctgttgctgatggctacaacaatggtactgctttgggtgctgagattattggtaccttcgttcttgtctacactgtcttctctgccactgaccctaagaggaacgctagggattcccatgttcctgtactggcgccacttcctattggatttgccgtgttcatggttcacttggctacaatcccaattactggtactggcattaacccagcaaggagtttcggagcagctgtaatctacaacgaagacaaaatctgggaatattaattgaaaatcctgggttggaccaattgttggagcagcagtggctgcattttaccaccaatacatc

SEQ ID NO: 20947 - DNA, 400 bp, Glycine max
  Clone ID: LIB3049-008-Q1-E1-E8
ggggcgaggtagccagagagtgatacaatacagagtgcgttgttgctccttcgccacaactccctgccaacatgggtatctccagagattctatgcacaagaggcgtgccactggtggcaagaagaaggcatggaggaagaagagaaagtatgagcttggtcgccagcctgctaacactaagctgtcaagcaacaagacagtcaggaggatccgggttagaggtggaaatgtgaagtggagggcactgagattggatactggaaattactcctggggaagtgaagctgtaactcgcaagactcgtatactagatgtggtttacaatggcttcaaccaccaaccttgtgcgtactcagactcttgtaaaaagtgctattgttcaggttgatgctgctccat

SEQ ID NO: 20948 - DNA, 394 bp, Glycine max
  unsure (1)..(394): unsure at all n locations
  Clone ID: LIB3049-008-Q1-E1-F1
aggggacctcccctccccaaacaacttaacttttttttcaagcaaggggtttcaattgccttcaataatttcttacctcaatttgatgttgatgacagccaatgctgcgttaactcctagacattactgggaaacgatgcttccaagaactcccttgccgaaagcaatcacagagctactaagccttgaaagtaggtccatatttgaatatgccgggaatgatgaccagtcagaaagtaggtccatattaggatacgctggctataatcaagacgaggatgatgtgagcaaacacaatatacaaatcttcaacaagttgtttttcctggnanagggacttccttgctggaanaatattcaacatgaagttcgtcaacaacacaaaagccacagt

SEQ ID NO: 20949 - DNA, 355 bp, Glycine max
  Clone ID: LIB3049-008-Q1-E1-F10
taccattgaaaatgatttgtgccctttttgtcagagcaaagctgaatctgcctcccacttattcttcctgtgtcataaagttatgcctctatggtgggaattcagctcatgggtaaaggaacctagagtgctccattggaggcctatggataatttcatccagcactattccatgtcaggattgaaagacactaacagaaggtggaaaatcgggtggatagcagctacaacatcaatatggaagcttagaaacgacattatcttcaacaatcagccttttgtcatctccaagctggtggataatacaattttcctctcttggtcctggatgagggggtgggaaaaggattttact

SEQ ID NO: 20950 - DNA, 346 bp, Glycine max
  Clone ID: LIB3049-008-Q1-E1-F11
gtgataaaggtcgatacagcttatgttgacattggaaaaccagttggtgactaccagccaaattggggttcgatgagctttctaattgattttatgcgacccactgtctccgaaggaccttcatggtacagtctgttaaagaaagctggaggtggctgcaatgacctcctatacagtggccacatgcttgtagccgtactcacagccatggcttggacggaagcatatggaggattcagttctgctcttgtatggcttcttgtgatgcacagtgcccaaagagaaatacgagaacgccatcattacactgtagactgcattgtggccatctatgtggggattctct

SEQ ID NO: 20951 - DNA, 359 bp, Glycine max
  Clone ID: LIB3049-008-Q1-E1-F12
ggtagttccaccgagtagcaacaatgtcgaagcgaggtcgcggaggatcggcgggaaacaagttccgcatgtcgctgggtctgccggtggcggcgacggtgaactgcgccgacaacaccggcgcgaagaacctctacatcatatcagtgaaggggatcaagggtaggctgaaccggttgccgtcagcttgcgtcggagacatggttatggccaccgtcaagaaggaaaagcccgatctccgtaagaaggtgctgcccgccgtcatcgtccgccagcgcaagccttggcgccgaaaggacggtgtttacatgtacttcgaagataatgctggtgttatcgtgaatcccaagggtgaaatg

SEQ ID NO: 20952 - DNA, 404 bp, Glycine max
  Clone ID: LIB3049-008-Q1-E1-F2
gaagccaaaagatgccaaatgcaattattaattggacgtgcttctgatgatgccaaaagaattggtggcacaaatgttaatgttgtacccagaaaagggttttccaaatcatcatctctgaacaaaagaaagcaagctgatattagtgactccaaggagggagcaacaagcaagatgcagaaacaagacagcgaggcatctcgatcctttctagatctaaatatgcctgtagaggatggtgaagagggtgtcaatgacaatgaccatgaaagtgaatccatgtcagaaaacacagacgcctggttgagtgatttccttgattaaaatgtacagaaaattggtttttaacccattcaattttcattgaacttgctgagcaagtattgaaaagaattggcatgcta

SEQ ID NO: 20953 - DNA, 401 bp, Glycine max
  Clone ID: LIB3049-008-Q1-E1-F3
gaactacgtgtataggttggatcacatagaagaatacgcccattcatacttcaacaatggtgaaattcatacctcaagtgatctccatcgctgggttgatgcaactgatagaagataaacctcaacgtgttttaaaaaatatcatatgtgcatgtggtttggaaacaaagctccttggcagcggacaaccttgttactactaagccctgcctttctttgtctcgacctctttgctatcacttgcagccatggagtgacaagtgattgtgaagtctgcttggttggatcgtaatggaaggtttagtaataacaataagagttcaagacaaattgcatcaagttctaaaccagaggaagcatatatctttaattgttgatgatttctgtccttagaacagaaa

SEQ ID NO: 20954 - DNA, 412 bp, Glycine max
  unsure (1)..(412): unsure at all n locations
  Clone ID: LIB3049-008-Q1-E1-F4
aaaaggggaatacccaaaaaaacaatttgggttaaatttgccttcccttttcaaggaacctcattgaaaaaacaaaaaacaatggctgaaacaaagttgagcatgatgaaggacaaaagatggtcactccgtggaatgactgctctcgtcacaggagccacccgaggcatanggcatgccattgttgaagaattggcagactttggagcaactgttcatatatgtgcacgtaatcaagatgatattgataagtgtttagaagagtggaaaaacgagggacttaatgtgactggctcagtatgtgatttacaatgttctgaacaacgtataagataaatggagtttgttggcccatccttcacggaaagctcaacatactagtgaacaatgctggaagatgtatagcaaagac

SEQ ID NO: 20955 - DNA, 396 bp, Glycine max
  Clone ID: LIB3049-008-Q1-E1-F5
gacgctcaattcattttcttctcctctctctctctcctagggttagggttttctctcttcatcactctctgtgtcgctccgtttcaatggctcagcaagacgctcaaaacggcgggtcggagaatgccgctgctgctgctacggtgtcgtttgtcgctgtgaagccgcagctcctcgtcgaagctcccaaagccaacgacgccattctgttcttcaaggctgcgcttggcgctgaggaagttggccgtacgctcaaccctaagcgcaaagctgagcacgagctccctctcatactctccgcagaactcaaaatcgctggctccaacaatcccgttcgccaacttcgttgatgacacttcttcgccagcgaaaacggggggaaacggtgtcgttttg

SEQ ID NO: 20956 - DNA, 401 bp, Glycine max
  Clone ID: LIB3049-008-Q1-E1-F6
gctttttctgtgtagttccatcgcatcaaaccctggcaatggcagctacggccatacagaggttcccccaacacaaatacgtagacgcagttcgctggcttcccctacaatccgcattcgaccgattcgcagttttggcactcttcgacttcgattccgatgcttcctccatcgaaatccactctctcaacccaaaccccctctcattggaaccacactcttcgtggtcctctccttcccgcgtttcctccctcaaggcctcgcacttcctccagaagcccctcattgtcgcttccacttcctccggttctctccacttcctcttctccgattcctccgtcgcaacgctcgagtccgaggtctccattcccgagggcgcgctgcattccgttcccgcttct

SEQ ID NO: 20957 - DNA, 399 bp, Glycine max
  Clone ID: LIB3049-008-Q1-E1-F7
ggaaaccaaaaggctctctcacgcagtcgcagtgagtgaaaaggaaaaccctaattgcggtattctcagtgccttcgagagaaagaaaaaatggcagataatcttgttctccgtggcaccatgcgcgcccacaccgacgttgtgacggcgattgccactcccatcgacaactccgacatgatcgtcaccgcctcacgcgacaaatccatcatcctctggcatcttaccaaggaggacaagacttacggtgtcccccgccgccgcctcaccggccattctcattttgtccaggacgtcgtcctctcttctgacggccagtttgccctaacccggttcctggaacggcaagctcggcctctgggaccttgctgctggcacctccgctcgccgctttgtggg

SEQ ID NO: 20958 - DNA, 72 bp, Glycine max
  Clone ID: LIB3049-008-Q1-E1-F8
gattctgttgttatttatttgacttttacagtttactttagtcacattaatgtgtatgtttggttcagccgc

SEQ ID NO: 20959 - DNA, 346 bp, Glycine max
  Clone ID: LIB3049-008-Q1-E1-G10
gaaggaaggcattgataatcatagctatggcaacggcgagtgcaagttgtgcggtatcatttagaaacagcttcggtgtgagtaaaccctcggatcttgggttcttgagctctcgtctgaacggcctcagaatctgcttccccaaattgccacccacacccctcactgcttctcccttccccacacccctccctatcgttgccaagagagtgtgtcccttcactggaaagaaatcaaacagggccaacaaagtatcattttcaaaccacaagacaaagaaactgcagtttgtgaaccttcagtacaagagaatttggtgggaagcagggaagcgctacgtaaagct

SEQ ID NO: 20960 - DNA, 343 bp, Glycine max
  Clone ID: LIB3049-008-Q1-E1-G11
ggagcagacagcaagaagaccaatttacctgataccgtcaaagccggtgaccccgttctgcacgagccagcccaggatgttgatcctaacgaaataaagtcggagagagtgcagaagattattgatgacatgatccaggtcatgagaaaggctcctggtgttggtcttgctgctccccagattggaattcctttgaggataattgttttggaagatacaaaagagtacattagttatgtctcaaaggaagaggctaaaactcaagatagaagaccttttgatcttttggtgatcctgaatcccaagctagagaagaagggcaagaggactgctctgttttttg

SEQ ID NO: 20961 - DNA, 355 bp, Glycine max
  Clone ID: LIB3049-008-Q1-E1-G12
gatacgcagcataatataagcacgcacgttgccgaagaaaataccactactcctcctaagtctttgaagtcataaagacaaaagaaaagacttagtcatagcagcaaacaaggaaaggcgcgtacacgaccaccgtttacctgttttttgaacgttgaaattaattgacctgcgcctgcgcgtgtcactgtttgagagcacacaaacaatgtcctcccaatctgacgccgttggctgtaacttgaaggagacggagctcaccttaggccttcccggcaccaaaactaatggcacaaaacgtggcttctccgacacccttaacacttctcataataaaatgttgcgccccaacttc

SEQ ID NO: 20962 - DNA, 404 bp, Glycine max
  Clone ID: LIB3049-008-Q1-E1-G2
gacttcacaaattgccagtgcctactaatagcaattgcaaccaaacagtgtctcatgatactgtttgttctgatgccccaccgtcgaagccctcctccgccactcgccgccatcgtagctctcccttctcacaccgtggaatcaaatcacgatgtcgagcccagattctcgatcattcagttggcactacacggaactcgatgacagagacctcgagatccgaggtaggactctgttttttgtcatcgtactcttctccattattctcctcgtcactgttctcttcatctacacgcgctgggtttgccgctaccagggacgcctccccaacaacgcgttcaacggcggcaccggccaacgcgccgccgctcgcgcagcctcagggaatggacccagcttccatc

SEQ ID NO: 20963 - DNA, 398 bp, Glycine max
  unsure (1)..(398): unsure at all n locations
  Clone ID: LIB3049-008-Q1-E1-G3
ggaggaaacacaaacagtcgaagcagggtgttatcgtctggcagatccaaatctggaactgaaatccccttctccattcattgagtgaagcttcagcttcgataacgaacacagtccttttccatggcaaatgcctggaaaagagataaggccaccagactcctctccccaaagctactgttcctactcttctcctccactctcatagtcttcttcttcttcgcattccttacctcacgcccctcaaaccccgccaccaccctcaccgccttcaacacccgcctctccttcaatgcaatctcccccttcgactgcaacggctcccctcaaggccaaccccttcttcgccaaaaccgtcnagggcgtccgctaccccttcctcttctcgctctccgatt

SEQ ID NO: 20964 - DNA, 399 bp, Glycine max
  Clone ID: LIB3049-008-Q1-E1-G5
gaatcggagggcgttgaagagttgtgagcataataaattgagaagcaaaagcgaaagggtctgtgtcttcactcattcttctattctattccatcatcaatggagaacaccgagggatccggatctgcgacgaacggggtgctggctccgccgcgcaaggtggcattgataaccggaattaccggacaagacggttcgtacctgacggaattcctcctggacaaggggtacgaggtgcacggcctgatccgccgctcgtcgaacttcaacacgcagcgcatcgaccacatatacgtggatccccacaacgcccacaagggccgcatgaagcttcaactacgccgttctctccgacgcctcctccctccgccgctggctcgacaccatcctccccgacga

SEQ ID NO: 20965 - DNA, 402 bp, Glycine max
  Clone ID: LIB3049-008-Q1-E1-G6
gaacacagaagtaacaacagaccattaaaaacacaaaacaaggaaagccagccaagttccgcgtttcttcttagaattctcgcgtgtcaaccttatctgtggtgtgctccatttgtattggagctcctatataaccaactttcctgacccatcgttttcttcaattcaatccttaacttcaatttatttctctgtctttaattattatcctatcgatggcgttcaggaaaacccttgctcaacggctccttaacatcaccaaagtgtcatcacaagcgctcaccaattgtcggatttcctcttcctccgtcatcggaaggctttcaccgccggccgacgaacccgttggatcccggaaaaaatggcctcttcggtgcgccgcaactcgccggaaacctcctc

SEQ ID NO: 20966 - DNA, 401 bp, Glycine max
  Clone ID: LIB3049-008-Q1-E1-G7
gagagaaagagagagaaagatgtcgaagcgtggtcgtggtggttcggcggggaacaagttccgcatgtcgctgggtcttccagtggcggcgacggtgaactgcgccgacaacacgggggcgaagaacctctacatcatttcggtgaaagggatcaaaggccgtttgaaccgtcttccctcggcctgcgttggcgacatggtgatggccaccgtgaagaagggaaaacccgatctgaggaagaaggtcttgccagctgtcatcgttcgccagcgcaagccatggcgccgaaaggacggcgtctacatgtacttcgaagataatgcttgtgttaatggccaatcccaagggaaaaatgaaaggttctgctatcactggtcccattggaaaagagtgtgctgat

SEQ ID NO: 20967 - DNA, 399 bp, Glycine max
  Clone ID: LIB3049-008-Q1-E1-G8
tcagtcacattaaaacgattgggcgtgaaagatagtcgaggattggaacagttcaagaatgaaatagagttgctctgccagcttcgccaccctaattgtgtctctcttataggattttgcaaccacaaaaaagagaagattcttgtgtacgagtacatgtctaatggatctctacatcaacacctacgaggtggcctattgtcatggaagaaaaggctagagatttgtatagaagcagcgcatggactacactaccttcacactggagctaaacgcaccatcattcaccgtaacatcaaccctagcaacattcttttggataacaacatgaagtccaaaacttactgatttccgccttagcatacagggaccacgttatgggtcaaagccaaaaccaat

SEQ ID NO: 20968 - DNA, 335 bp, Glycine max
  Clone ID: LIB3049-008-Q1-E1-G9
cattccgcataggttccgtgttccaaacaatgagtttgagtatgagcttgtgcggtaattacagtcttcagcttcaaaatcgcagaatcgtaagctgcaatcttcaccaggatggcaggcatattgttcccatcaatacgcaccaaaaaccttccaaacctgaaaagtgtcttcggtccaaatggaagattaatggcaataacattgggacatgcattggagtcatgacagtggcacacttggttgctccagtcgctgcaaaagctgaagtggctgcttctatttatgctttggctgatggaagcctcggtgactggtttggaggctttccaatt

SEQ ID NO: 20969 - DNA, 305 bp, Glycine max
  Clone ID: LIB3049-008-Q1-E1-H1
ggaaagaaaaattggttgaaagcgtccattgaaggtagagagagagaggttttgggaattggtgctgcttcgtgtctgtttatttcctcgcgaggtttgagaattcagtgaagagaaaacggagtttccgatcctgcgatgtcctatatgatagatctgtgaggaaattgaactgaaaaaaaaaatggcgacgtcggaggtatcgatcaagggaaattcggtaaacggaaaaggagataacagttctggtgatgctagaaacagtggaggcgaggctcagaatgcttcttcatcatcatcatccg

SEQ ID NO: 20970 - DNA, 351 bp, Glycine max
  Clone ID: LIB3049-008-Q1-E1-H10
ggtactccatcatttccttgttcttcttccttctcttcattctgtctctacccttcaacgcaactttctttcttttctattgagcttccaatattctcacgccttgcaatcgtagttgcaccctccaaactccttcccttttctttcatctgttcaggtacttgcagtaagagaacatattgtaaaactaaaagggaaaaatggccttagatcactttgaggagactgtgcaccaaaaaggaaattggaaatcttccagtgaaatcattgcagattctgatagaaatgcctctggtgactttgactgcaacatctgcctggagtgtgtgcaagattcagtggtgacacttt

SEQ ID NO: 20971 - DNA, 347 bp, Glycine max
  Clone ID: LIB3049-008-Q1-E1-H11
ggagcggaagcatattcctaaaactttcttcaaaacagcgttgtgtcacgcacgccactgctcatccaacttcttcttcttcttcttcgctctctgtttctgcgtgtgcgcgaaaaaaaaaagcaaaaatgcattccagtcacttacttctcgaagaacccattcgcatggtttccatcctcgaaccatccaagcccaatttctttcccgcaatgacgaagatcgttggtaccctgggtcctaaatctcggtcggtcgaggttatttctgcttgtcttaaagctggaatgtcagtggctcgtttcgacttctcttgggatgaccctgaatatcatcaggaaactttg

SEQ ID NO: 20972 - DNA, 373 bp, Glycine max
  Clone ID: LIB3049-008-Q1-E1-H12
gggacaaaagacttacttgcccccagcaatcttgagtatccctccaaacccttgtatggctgaagcaaggaaagaagctgagcaagtgatgtttggagccattgaccagcttctggagaaaactggtgtgaaggctaaggatattgggattttggtggtgaattgcagcttgttcaatcccacaccttctctctctgcaatgattgtgaaccactacaagctgagagggaatatccaaagttataatcttggtggcatgggttgcagtgctggacttatctctatagaccttgccaaacagctcctccaggttcatccaaactcttatgccttagtggtgagcatggagaacatcactctcaactggtaattt

SEQ ID NO: 20973 - DNA, 398 bp, Glycine max
  Clone ID: LIB3049-008-Q1-E1-H2
gaacgtaactcaactgaaaatggatcgagaatggggatcgaagccggggagcggaggtgcggcgtcggcgcagaacgaagccatagaccggcgagagcgtctccggcgactggctctggagaccatagacttggcgaaggatccctatttcatgcgcaaccacctcggaagctacgaatgcaaactctgtctcactctccacaacaacgagggtaactacttggcccacactcagggcaagcgccaccaaaccaacttggccaaacgtgccgctcgcgaggccaacgacgcccccgcccagccccaaccccacaagcgcaaagtcactcttcgaaaaacagtgaagattggacgccctgggtaccgtgtgaccaagcagtatgacccggagacaaaac

SEQ ID NO: 20974 - DNA, 395 bp, Glycine max
  Clone ID: LIB3049-008-Q1-E1-H3
gatcaaaacacttctcaatctctctctctccaatggccaaagacctcgaaacggagattcaaagtgggttgcctcacaaggactaccacgacccaccccccgccccattctacgaccccgccgagctccgaaagtggtccttcttccgagccctcatcgccgagttcgtcgccaccctcctcttcctctacgtcaccatcctcaccgtcatcggctacaaccaccagacagccaccgccgccgagccctgcagcggcgtcggcgtcctcggcatcgcttgggcctttggaggcatgatttttgtcctcgtccaatgcaacgccgggatatcaaggggaacacataaacccgggggtgacgttcgggttgtttttggcgaggaaggtgtccctgac

SEQ ID NO: 20975 - DNA, 392 bp, Glycine max
  Clone ID: LIB3049-008-Q1-E1-H5
ggttctagtgtgtgattgtttgttgttgtaactcgttcttcttcttttgttgttctgtgtttgtgtttgttttttctctcacctgaaaatgtcttgctgcggtggtaactgtggttgcggaagctcctgcaagtgcggcaacggctgcggaggctgcaagatgtacccagacttgagctacactgagtcaaccaccaccgagaccttggtcatgggagtggcacctgttaaggctcaatttgagggtgctgaaatgggtgtgcccgctgagaacgatggctgcaaatgtggaccaaactgctcctgcaacccctgcactttcaaattaagttgttggaaaaccagccttcaggcagagatagcccttaaataggaataatgataaactatta

SEQ ID NO: 20976 - DNA, 404 bp, Glycine max
  unsure (1)..(404): unsure at all n locations
  Clone ID: LIB3049-008-Q1-E1-H6
ggaacttcaagggcaaaaaaagttgtgctgtgccgcctcttccgtaggcagcagcaatggcctcaaatcccaaaactttgacctttgaggaggtagctaagcacaacaacaaaaaggattgctggattattatcaatggaaaggtgtatgatatcacaccatttttggatgagcatccaggaggtgatgaagttttgctgacgtcaacagggaaggatgccaccattgattttgaagatgtgggccacagtgattctgctatagaaatgatggaaaaatacttcattgggaaggttgacacttccactcttccacccaaagttagccatagtctgccacaacctacacnaacacatggcgctggcaatcaatcttctggatttgttgtaaagatcttgcaattc

SEQ ID NO: 20977 - DNA, 378 bp, Glycine max
  Clone ID: LIB3049-008-Q1-E1-H8
ggagaaagagagagatgggaagagaaaaggagacaacaaaggtagcttacacagtggagcagcttgtagccttcaatccatacaatcccgatattcttccagatctcgaaaactatgtcaacgaccaggtttcgtcgcaaacttacagcctggacgcgaatctctgccttcttcgcctctaccagtttgaaccagagaaaatgagttcccagattgtggcccgcatattggtcaaggctctcatggcaatgccggcgccagatttcagcctttgtctctttttgattccagaacgcgtgcaaatggaggagcatttcaagactttgattgtcctgtctcacaatttggagacaggaagatttcggcagttctgggatg

SEQ ID NO: 20978 - DNA, 335 bp, Glycine max
  Clone ID: LIB3049-008-Q1-E1-H9
ggaaataaaccaacatcaaaccaagccattttttcttctcccttgtagcaatgaaacaccactccttgtcatttaaatggcttcttctgattttcctcacacactcaacccttctcaccgcaacacactcgttgacaattccaaggatgagtccaattcctgaatgggaaacaacactacacaaccaccctgcaattaatacagaggaagtgaaaacattttacttcaaacaggttctggatcacttcaactacaggccagaaagctacacaacgtttcaacaaagatatctaatcaatttcaagtactggggtggagccaattctagtgctccc

SEQ ID NO: 20979 - DNA, 303 bp, Glycine max
  Clone ID: LIB3049-009-Q1-E1-A1
ggacggcagtgtgaaaagggagggagagagaagagaagaatctaaaaaggaagcagcatttctgtttccgcttcttcatctcatctcagcacaagaaagaaagaaagaaacttcaatcctcacacaaacgataacaaatatctttcacttcttctgcatccgacgctagaagaggtgtcggaacaaacaagcttcgtttcgccggaacgatgaccggcggcggatcgacggggaggttgccaacatggaatgagagagaaaacaacaagacgagagagaggagactaagagcgatcgccgcta

SEQ ID NO: 20980 - DNA, 348 bp, Glycine max
  Clone ID: LIB3049-009-Q1-E1-A11
gaaagtgcttgacgcaaaggcgatgaagcaacaaaagcaattgttaaggttgtaacttgtatcatcattcatttcatctgtgttgtgttgtacgtgtgatttccattgccgccaccggttacccaccaactgatatacataacctcttcacctttccctccttccctaatttatcactaaaaaaacaaacaaataaaaaaaaagtccactaagttggggcacgtcacccatctcgcccttcccctcgctcatctcaaatccatgcttcggaattagggtttccattcggatttcgtaagtctggtgcccaatttcgtgactcccagcgaagtaaaaagggaaaggaaa

SEQ ID NO: 20981 - DNA, 381 bp, Glycine max
  Clone ID: LIB3049-009-Q1-E1-A12
ggataacatgtggtggtgatttgaagatggcagacttaccagggtatcttcgtgcctgtttgaacacagggaagcttgcctccttggcaattttggtgtctggaggaattgtcttgcaaattttggcatgtgccttgtataataactggtggccgatgctgagtgtgttaacgtatgtgcttctgccaatgcctttgctgttctttgcggggtctgatgattctatattttctgaatctgataatagctgggtgaattttactaagttcttgactggagcctcaactgtgggaggtattgccattccaagcatattaaagcatgctggggttatcggttggggagcctttgtaatggaactctcttcctactttgtgtttg

SEQ ID NO: 20982 - DNA, 327 bp, Glycine max
  Clone ID: LIB3049-009-Q1-E1-A2
ggaagaaaagagcagatagaagaaaaagctcggtgcatagttccgaatccttgttcttctgatagtgaaggtagcttgaggtttatttaatttaattcggttcgagaaaagtgctgagagagagaaaatagaaaaggtgaaaaatcgaaggtcggagatgcaaatggaagctagggttggtatggcggtggatggtggtggtgtacggaagttggtgcagccgccgccgaagcagattggaactgtttctcagcttctcgccggaggagtcgccggcgcgttcagcaaaacctgtacggcgcctcttgcgagacttaccatcctctt

SEQ ID NO: 20983 - DNA, 342 bp, Glycine max
  Clone ID: LIB3049-009-Q1-E1-A3
tcaagcatccgtagacgcgtggggaaggggagtttgagcttttctgaggaagattttatggatgggtgtagtagtcaagatggtagcatcattggacacgaatctcactcaaggcggtctaggaagctctcaggaagtcgagcatgggaaagaggtagtgaggcagatcaaggagagggtggctatgatattattttgatgacagagattccatactctgttacctctttgaagaagctgtatgcacttattaagaagtgcttgaggcctccatatggggtggtatatctagctcctactaagaggcactatgttggcttcagtaatggcgtacgacagctg

SEQ ID NO: 20984 - DNA, 284 bp, Glycine max
  Clone ID: LIB3049-009-Q1-E1-A5
ggtaacacaagaacatatcgctccccttcgttctgctctctattgggctggattttaccgatcaatctctctgttcttcggttgcaatctcgttctctcttttggaatcgtttcctctccatctaatctctctggtcttcggtttcaatcactgctgtttagtccttaggttgtgtctacatattgaccttccttgatccgcatatctatgaattgtttggttttgtataaagaagagaagagaggttggggttgggggcaatagcaatagagcaatggagggc

SEQ ID NO: 20985 - DNA, 195 bp, Glycine max
  Clone ID: LIB3049-009-Q1-E1-A6
aactggggtaacacaatactatatcgctccatctcattctgcgctctattgagctagattgtacctatcaggctctctgttcttcttttgtatgctcgttcgggcttttgacatcctttcctccccatctaatctctcaggtcatcagtttcactcaatgcagtttactcattacgttgtgtgtagatattatcc

SEQ ID NO: 20986 - DNA, 353 bp, Glycine max
  Clone ID: LIB3049-009-Q1-E1-A8
gaaaaaaggaagaggaacgaagcaatcgcaagtcgtctgttctgtcccgcgggagcagacgacctgtcttcatcgccaaacaacctcaaaaacattcatcaacgttcactattaatccatccatcattaagtaagaaaataaggttcgatttttttatctttgttttgcttctgatccatcatggaggtgccgagttcctgggatgcccttcgcaaacaggcaagaaaacttgaagctcagttggatgagcagatgaattcttatcgtaaattggtttctaataatgtttctacaaaagctgacgctgcagagagtgatctagagtcttggattgagcgtttactaaaacaac

SEQ ID NO: 20987 - DNA, 331 bp, Glycine max
  Clone ID: LIB3049-009-Q1-E1-A9
gtgagtatagtgttcttgtaccacagacagcgcacggtgtagcacatcattcctcgatcgagctcgctccaatggcagagacaccaaacaaaggccacatcgtgatggtacctctcatggcacaaggtcacctcatcccatttctcgcactagcaagacaaatccaacaaaacacaagcttcaccatcaccatagccaacacaccccaaaacattcaacaccttcgatctgcactttcttcttctactactcctaatcatcaaatccatcttgctgagttagtacccttcaactctacccaacactccaacaaagacaacaacacacaaaa

SEQ ID NO: 20988 - DNA, 338 bp, Glycine max; identical to SEQ ID NO: 8251
  Clone ID: LIB3049-009-Q1-E1-B1

SEQ ID NO: 20989 - DNA, 377 bp, Glycine max
  Clone ID: LIB3049-009-Q1-E1-B10
gatactcaattcattttcttcttctgcttcaccttctcttctcttctctcatagggttagggtttttttctcttcattgctctctctgtcgttttatttccatggctcagcaagatgctcagaatggtgggtcggagaatgccgctgctgcggtgtcgtttgtcgctttgaagccgcagctcctcatcgaagctcccaaagcgaacgacgccgttctgttctacaaggccgcgtttgccgctgaggaggttggccgtacgctcaaccctaagcgtaaagcggagcacgagcttcctctcatactctccgcagagctcaaaatcgctggctctaccattctcgttgctgacctcgttgatgactctgcttcaacagcg

SEQ ID NO: 20990 - DNA, 250 bp, Glycine max
  Clone ID: LIB3049-009-Q1-E1-B11
tgggatacacaattcactttcttcctctgcttcacattctcttctcttctctcatagggttagggtttttttctcttcagggctctctctgtccttttatttccatggttcagcaagatgctcacaatggtgggtcagagaatgccgctgctgctgtgtcgtttgtcgctttgaagccgcagctcctcatcgaactctcccaacacgaacgaccccgttctgttctacaaggccgcgtttgcctctgacg

SEQ ID NO: 20991 - DNA, 372 bp, Glycine max
  Clone ID: LIB3049-009-Q1-E1-B12
gcagtttcaaattttcttttccttcactttcccgagaaaaaaataacacttttcactttcttcactacgttctcacttcgatatggctcgtacgaagcaaaccgctcgcaagtccaccggtggcaaggcgccacgtaagcagctcgccaccaaggccgctcggaagtccgctccggcgaccggaggagtgaagaagccccaccgcttcaggccgggaaccgtggcgctgagggaaatcagaaagtaccagaagagcaccgagcttctcatcaggaagcttccatttcagaggctcgtgagagaaatcccgcaggatttcaagaccgatttgcgtttccagagcagcgccgtttccgcgcttcaggacgctgc

SEQ ID NO: 20992 - DNA, 345 bp, Glycine max
  Clone ID: LIB3049-009-Q1-E1-B3
gagtgccagacgcagtgactaaaccaaacctctcactcgccgtcgtagggtttctcctttcgtttagcaacaacaacaatggttgcagccaagaaaaccaagaagacccatgagagcatcaacaacaggctcgctcttgtcatgaagagtggaaaattcaccctcggttacaagacggttctcaaatcacttaggagctccaaagggaaattgattatcattgctaacaactgcccccctttgaggaaatcagagattgaatactatgctatgttggccaaggttggagttcatcattacaatgggaacaatgtggatttgggcactgcatgtggaaaatattac

SEQ ID NO: 20993 - DNA, 182 bp, Glycine max
  Clone ID: LIB3049-009-Q1-E1-B4
gacccaaacacttctctttttctctctctacactctattcaacccttcacattttctctcttctttatcttaaattacttttccatggaggaaagcaagaaacgagtccgggacgagtccagctactcacccgagtcccaaactcagctggtcgactctcccgagtctgaaagtcaacgggt

SEQ ID NO: 20994 - DNA, 385 bp, Glycine max
  Clone ID: LIB3049-009-Q1-E1-B5
ggggtttatatcgcgcatagtgtggtaccagcagcagagcttgtatacgtcgccgcttcagcgtagcaacatgatcattcccgagaagaaccgtaaagagatctgcaaatacctcttccaagagggagtttgctttgcgaagaaggacttcaatctggcgaagcacccggagattgatgtgccgaatctgcaggtgataaagctgatgcagagcttcaaatccagagagtacgtgagggaaacatttgcgtggatgcactattactggttcctcaccaacgatggaattgagttccttaggacttacctcaaccttccatccgaaattgtccctgccactctcaagaaaccaggcaagccccgccgggagaacattcggtggccc

SEQ ID NO: 20995 - DNA, 325 bp, Glycine max
  unsure (1)..(325): unsure at all n locations
  Clone ID: LIB3049-009-Q1-E1-B6
ggttctagtgtgtgattgtttgttgttgtaactcgttcttcttcttttgttgttctgtgtttgtgtttgttttttctctcacctgaaaatgtcttgctgcggtggtaactgtggttgcggaagctcctgcaagtgcggcaacggctgcggaggctgcaagatgtacccagacttgagctacactgagtcaaccaccaccgagaccttggtcatgggagtggcacctgttaaggctcaatttgagggtgctgaaatgggtgtgcccgctgagaacgatggctgcaaatgtggaccaaactgctcctgcanaccctgcacttgcaag

SEQ ID NO: 20996 - DNA, 327 bp, Glycine max
  Clone ID: LIB3049-009-Q1-E1-B7
ggtggtcgtcgaagcgcgagcaagcatcccaaaaccctagctcgcgttctgctttcgtcttttacatcaggatggagtctcaggtgaagcacgcacttgttgtcaaagttatgggtcgtactggatccagaggacaagtaacccaggttagagtgaaatttttggatgatcagaaccgtcacatcatgaggaatgtgaaaggacctgtgcgagaaggagacattctcaccctactcgagtctgaaagggaagcaagaagattgcgctagatggtttcttttggcttgcctccaaattcgaacaaaacagtgtgattttgttgatttt

SEQ ID NO: 20997 - DNA, 253 bp, Glycine max
  Clone ID: LIB3049-009-Q1-E1-B8
ggatctcgtttttgttggtttccacctttttccagtgggaggagctgagcagagaaggagtttaggaagtgtttggttacttctgagattctgctgttccttagagagcgagcgatgacggtagcaccaggaatgggttacgctctgctaccgtaaggaccctctctctccatcttcgttcctgtcatttccaaaaaacccttcctcattctcaccggtctctccagcacactggctgtggctaacaagtttg

SEQ ID NO: 20998 - DNA, 314 bp, Glycine max
  Clone ID: LIB3049-009-Q1-E1-B9
gagtagctaatagctatactctctctagagtaattgcggaatcagctagaattttctaataatggccaaagacgttgagcaggttacagagcaaggtgaatactccgcgaaggattaccatgacccacctccggcgccgttgatcgacccagatgagctcactaagtggtccttgtacagagccgccatagctgagttcatagcaacactccttttcctttacatcaccgtgttgaccattattggctacaagagacagagtgacaccaaaatccccggtaacaccgagtgcgaccgcgtttgcattttgggca

SEQ ID NO: 20999 - DNA, 322 bp, Glycine max
  Clone ID: LIB3049-009-Q1-E1-C1
aaggctcctttttgattacaaaaatgtggaagaaaacgggttttgaagaagaagcagttcaattgatcaactcagatttcagggacctaagtctagctgctaatagactcgcccatcatgccatcaaacttggtggcattggctttggagcctcttttttcggattgtttgctgccattgctgctatttatctgttgattttggatcgtacaaactggaaaacaaatattctcacagcactactcattccatacattttcttcagcttgccttcattaattttcgacgtcttcaagggagagcttggaaaatggattgctgc

SEQ ID NO: 21000 - DNA, 379 bp, Glycine max
  unsure (1)..(379): unsure at all n locations
  Clone ID: LIB3049-009-Q1-E1-C10
gagtggaagagtgaataagagatatcaatatattatgataatggagggatacaataagaaggttatgattgtggggatggtgttgggcatggccatgattgggatggccaatggccaatactcgttttgtcgcatgcccagcgatgggttggcggcatgcaagccgagtgtgagtggggactatcctgctgatccctccactgcttgttgctcagccattgccaaggctgatcttaaatgcttctgccgcttcaaggattcgggccttctctctatgtatggtgttgatcccaacaagtgcatggaactccctgttaagtgcaaggttgtcgactctttccactgctagattcattaganggggcactaatcaatataa

SEQ ID NO: 21001 - DNA, 379 bp, Glycine max
  Clone ID: LIB3049-009-Q1-E1-C11
gggagcgtagttgaggttttgcttttgccacttcgaaaccaaattttcttcgttcgtccttctgtgatctcttcttccaccatgagcaagtcagggcaaccaccggatttgaagaagtacatggataagaagcttcagatcaagctgaacgcaaatcgcatggttgttggtactctccgtggctttgaccagtttatgaatttagttgttgacaacactgtggaagtgaatggcaatgagaaaaatgacatacggatggtggtaattagaggaaatagtgtggtcactgttgaggcgcttgaacccgtgaataggacttgatttctgtttgttgtaaacacttatatgagtatttcctggtttaacggttgtgtatttg

SEQ ID NO: 21002 - DNA, 369 bp, Glycine max
  Clone ID: LIB3049-009-Q1-E1-C12
ggttcaagaggctgagaagtacaaatctgaggatgaagagcacaaaaagaaggttgaggccaagaatgctttggaaaactatgcatacaacatgaggaacactgtgaaggatgacaaaattggtgagaaacttgatcctactgacaagaagaagattgaggacgcaattgagcaagctatccagtggctagacagcaaccagctcgcagaagcagatgaatttgaggacaaaatgaaggaattggaaagcatctgcaatcctatcattgccaagatgtaccaaggtggtgctggtcctgacatgggtggtgctggtgctggggcagccgaagatgattatgctgctccttctggtggaagtggtgctgg

SEQ ID NO: 21003 - DNA, 81 bp, Glycine max
  Clone ID: LIB3049-007-Q1-E1-C4
aggggtggaagttaaagaagaaaaggaaaagaagaacaaattagaagaagaaaaagggaaaaccccaaacaaaaaagaaga

SEQ ID NO: 21004 - DNA, 322 bp, Glycine max
  Clone ID: LIB3049-005-Q1-E1-D3
gaagaagcgcactcgcaacaggggacgaagcagagcactgcagcctcatcatttcaaggccatcacatagcagagaaagcagaaaagaacacagagcaaagagagagagagagataataaagagataaaactgaaggaagaagaaagggtttgtttgtgtgaaagaaagagaaagagaggatgcagagtgagaaccagaacaaccagttggtggtgcagaattcggggagcctgagcttcagcagccatttgtcgaaggaagacgaagagatgtcaatgtctgctctctccaccttcagagccaaggacgaagagattgaaa

SEQ ID NO: 21005 - DNA, 391 bp, Glycine max
  Clone ID: LIB3049-005-Q1-E1-D4
gtggtttctgaggtttttggggatagaactgagcttggtttgtccataaagttcttttccatattggtgtgtttcttgttggcatttttgctgaatgtgcagtccataagatactatagccatgcaagcatcttaatcaacgtgcccttcaagaaagtgtccccaaacctaaggcatcaaatgctcacagctgagtatgttgccaacactgtgaaccgaggtagttacttctggtccctcggattgcgtgccttctacttctctttccctctcttcatgtggctctttggacccattcctgtgttcttctcttgctttgcccttgttttcatgctatacttcttggatgttacatttgagcgtggatgtgctggggtttctgatactgatg

SEQ ID NO: 21006 - DNA, 383 bp, Glycine max
  Clone ID: LIB3049-005-Q1-E1-D5
ggtgtttttgtggatagaagcccagccatggataggcttctatcatcgccttcacccccttctttcacatttctcactcgattcgaatctgcaactgcaagattcattttcacacgttctcattctcacttgaagcgggtcacctcaatttgttgccagcatgctaatccatctcctttcactccctttctcgcttcttccaaccaccccaatacttttccatccatttcctccccttcaattcgctccacacccgaatcccattctctcaatcaaatcaaaactggggctttccaaaaaccaaaagcaataacagctcggacgcttgtaatactttctgctcttgctatgatcttaatccaaccagctattggcacagcagc

SEQ ID NO: 21007 - DNA, 389 bp, Glycine max
  Clone ID: LIB3049-005-Q1-E1-D6
gggacttatcacactcgtgacctaacgctgggtgcttctcttctctgcagcctctttgatctgttggtgctcacttcgatcccgttgtgccctcttcagtttaggtgttttcattttagtgatattgttgaactgaacatactctgcccagttctcagcttaaagcatggatccggaggctgcacgaactgcacgagaatctctagacctggcattccatatgtccaatatacttgatactggtctagaccgtcacacactttctgttcttatagcactttgtgatcttggagtcaatcctgaagcgcttgctgctgttgtcaaggaactaagaaaagagaaaccctcactatcatcatcacttcccgtagctccttctttgccataaa

SEQ ID NO: 21008 - DNA, 76 bp, Glycine max
  Clone ID: LIB3049-005-Q1-E1-D7
tacagctgtcagacgacgagagaaagggcgacatgacacacgcttatctacgcgctcagtgcacgtcttatctgta

SEQ ID NO: 21009 - DNA, 294 bp, Glycine max
  Clone ID: LIB3049-005-Q1-E1-D9
gaaaggcgattttcttaaaaccgtctttgagattagtatctttctagtcgaatgagccttatcgtctcgttgtcacactcagtcttcatgattcaaagactgttcgcattcactcttctccttccaccggactttcttcttcaccacctcactttctgtcttcctcctctaggttacactccatctgagcctcttcccaaaacaaccttgcgtttcacaccccctctactccaaaccctacccttgttcatcgccgccattgccttcttcttcattcgcttccaccacataacc

SEQ ID NO: 21010 - DNA, 384 bp, Glycine max
  Clone ID: LIB3049-005-Q1-E1-E1
gacactgtacggtaacagagatcggaacgtggaactgcggaaaccggaatatctcacttctcagatcagatcaatccgacgtcgttgcagttataatggctccattcagcggcgatgagacggcaccgtttttcggcttccttggagccgcagctgccctcgtcttctcctgtatgggagctgcctatggcacagcgaagagtggcgtgggcgtggcttcgatgggtgtgatgagaccggagctggtgatgaagtctattgtccctgttgttatggctggagttttgggtatttatggccttattattgctgttattatcagtactggcattaatcccaaggccaaatcttattacctctttgatggttatgcacatctctcct

SEQ ID NO: 21011 - DNA, 400 bp, Glycine max
  Clone ID: LIB3049-005-Q1-E1-E10
gatatcaccctttttgtttctcgccttgtcattgaaaccttttcacccccttcatatatccttaattcagcaatggcgagccacgacaaagcccaaagatctagcacaaccaaaaatggcatctcgcgaagcaacaaagctggtctccaattccctgttggtcgtgttgctcgataccttaagactggcaagtatgctgagcgtatcacttctgctgctcccgtgtatctctcctctgttcttgaatatcttgctgctgaggttttagagttggccggaaatgctgtaatggacaacaagaagactcgaattatgccacgccatatccaatttgcaattacggattgatgatgatttaaccaagcttctcggagatgtgaccacccctaatggtggtgtg

SEQ ID NO: 21012 - DNA, 297 bp, Glycine max
  Clone ID: LIB3049-005-Q1-E1-E11
cgggaatagagactacagaagagagaggtgttggtgccctaatcgtgagaagaaaggaaagggaaaagaggaaagtggtgtgcataacgaatgcgacggtgaaggaccttctggcgatgcaggcgtgcaacctgttctgcctccctgagaactaccagatgaagtactacctctatcacatcctctcctggacccagctcctctacgtcgccgaatactacaactgccgcatcgtcggctacgtcctcgccaagatggaggaataaaccaccgactgccacggccacatcacctccc

SEQ ID NO: 21013 - DNA, 378 bp, Glycine max
  unsure (1)..(378): unsure at all n locations
  Clone ID: LIB3049-005-Q1-E1-E12
gatctctggtcgacgaaacagaatgagaaccaatacaaaagtggagatagctaacagtgacaagaactaaagcaaaaaatatgaatgagagacatttaaggtttcgatcatatctatgtagagaagacaaggcatattccacgagggaagaagacgaagaaacaaagctatataaagggctgcaagtgaacaaggctgcggggcacatgcagattgtgccgctgctatcatcggagaaaattcaacanaaaaaaaaaaaacttgatagttatgatgaaattgcaaccacaagccatgggtgctctccccaataataaattacggccttaattccccaaccggaattagtaggctcatcagcccattccaattctgtct

SEQ ID NO: 21014 - DNA, 394 bp, Glycine max
  unsure (1)..(394): unsure at all n locations
  Clone ID: LIB3049-005-Q1-E1-E3
cggtttcgaagcagcgggaacaaacatgtcgtggtgttactgcgctaagcctatgactttgcagttgccgttgcaatcaagagcagcatcatcgttccattcccacgttggaggagtaacagtaacattctcaacactgtctcttcgaccctcttctcctcttgttctgacccacaacctccacttccaacccaaactcaaacgcgcttccacaaccattcgctgctcctctgcgttgactcctcaattgaagtctaccttggatcaagttattgcttcaaataaagtagttgtgtttatgaagggaactaaagactttccacagtgtggattctcaaacacagtggtgcaaatattgaagtctccaaatgtgccttttganaccataaatgtg

SEQ ID NO: 21015 - DNA, 390 bp, Glycine max
  Clone ID: LIB3049-005-Q1-E1-E4
ggcacttctcaatcgcaaattttctcccccaaatcgtagatctacggttaaattggtgtagtgtggtaagatgggaggaggatttagagtgcttcacttagttaggccatttctctcgtttcttcctgaagttcaaactgctgacaggaaagtgccatttagagagaaggtcatatacactgtgatctctcttttcattttcctggtttgtagtcagctccctctatatgggatacactcaacaacaggtgctgatccattctattggatgcgtgttattctcgcttcaaaccgtggaactgtcatggaacttggaatcactccgattgtgacttctgggctagtaatgcaacttctggctgggtcaaagatcattgaagtggacaacaa

SEQ ID NO: 21016 - DNA, 383 bp, Glycine max
  Clone ID: LIB3049-005-Q1-E1-E5
gactttcaaagttcttccttagcaacctcaatagggttccaccgttgaagtctcaatttgtgtttagggttcctcacatttgaagagttcacaccttattgtcgccattctcgcatctcaatattcattcaagtgttcacacaagagaaaccctacttcgctattcattctctccaatttcaattctcaatcgtgctcttcaccaactatgcattgatttgtctccctctttttctcttcagatgaacaaggaaatactaaaaagatccagcttacaaaaccaagtgtatttgcgatacctcatcgtgaatatatagtcataccatttgatagtcaactatgagcctatggagaagcagctacacttctttcatcagcttgtg

SEQ ID NO: 21017 - DNA, 391 bp, Glycine max
  unsure (1)..(391): unsure at all n locations
  Clone ID: LIB3049-005-Q1-E1-E6
gaggtttttagggtttacaccgaggagacacaccttcagcagcagcagccatggttctcaaaaccgaactatgccgattcagcggtgccaagatctacccagggaaaggcatcagatttgttcgtggtgattctcaggttttcctgtttgctaactcgaaatgtaagaggtatttccacaacaggttgaagccatcaaagctcacctggactgcaatgtacagaaagcaacacaagaaggacattgctcaagaagctgtgaagaaaagaagacgtgctgccaaaaagccttactccaggtccattgtcggtgccactttggaagttatccagaannaagagagctgagaagccagaagttcgagatgcaaatagggaagctgcccttcgtg

SEQ ID NO: 21018 - DNA, 391 bp, Glycine max
  Clone ID: LIB3049-005-Q1-E1-E7
gaactaagtagagaataaaatcaaatcaggagagcatgcatatgaacatgatgatgaagaaggtgtgtgggtttgcaatagtgatggtggcagtgcagcttctggtgggggtgagtcccaaggcagaggctgtgacttgtacccctgtggagctgagtccttgtttgggggcaataacttcctctcaaccaccatcaacaatttgttgccagaaggtgagggaacaaaggcaatgcctctgtggttacctcaaaaacccaagtctaaggccatatgccaattctcctggctccagaagggttgctacctcttgtggggttccctttccaacttgttaactaccttcatatcacatcatatatagtatgtaataaaccctgttggctggaaa

SEQ ID NO: 21019 - DNA, 295 bp, Glycine max
  Clone ID: LIB3049-005-Q1-E1-E8
gaatctgtataatagaatttccaacagtatatcatccttgtgaaacctgtcacagatctaagaagaaaatcctgaccttcttctcacgtcaaaggctcatgacgatcatgggtttgtcatggactttggcattggcctggaaagtctgtgacccttggatcacatatctttggtctctaatcccaagcctccttttctctatttaagtatctctgatcaacctttttcgccattctgtgcttttacatatgatgaagatctgaggcaatacatgattccctcatcatgtaataca

SEQ ID NO: 21020 - DNA, 248 bp, Glycine max
  Clone ID: LIB3049-005-Q1-E1-E9
ggaacgactactttggtgtggtgtcagtagatcaacattagattgcctgccgagctctttacggtgacagcacaagcacgtggcgcatacacgcacatatgcgatcaagctcaagctgataacgccgacgcccgactgtgaagactaagacccggtcctcaccttcatgttgctccttcttcctattcctcttcctcctagtggcgcacttcacatcgtcgctctccgagatgcggttctcctagata

SEQ ID NO: 21021 - DNA, 404 bp, Glycine max
  unsure (1)..(404): unsure at all n locations
  Clone ID: LIB3049-005-Q1-E1-F1
ggcttgctgcaaccgaatccctcccccaacctctcaaacaaactttccctctctctctccctcacccaattcttgtaccaatggcaagagctcccactccacgcgaagagtccgtgtacatggcgaacctggcggagcaagccgagcgctacgaggagatggtggagttcatggagaaggtctccgcctccgccgagagcgaggagctgaccgtggaggagcgtaacctcctctccgtcgcctacaagaacgtgatcggcgctcgccgcgcctcctggcgcatcatctcctcaatcgagcagaaggaggagagccgcggcaacganggacacgtcgccgtcatccgcgactaacgctccaagatcgaggccgagctctccaacatctgcgacggaatcctcaaa

SEQ ID NO: 21022 - DNA, 394 bp, Glycine max
  Clone ID: LIB3049-005-Q1-E1-F10
gtaacttggtaatatattttgttgcactctatggcctcagagacagaagctgctcttgctgccactccctctgatggtcccaccgtatttgacaagatcatcaataaggaaattccttctactgtggtctatgaggatgataaggtccttgcctttagggacatagatccacaagctcctacccatattctaatcattcctaaagttagggatgggttaactggtctgtccaaggctgaggagaggcactgtgagattctaggtcgacttttgtgcactgctaagctggctgcaaagcaagaaggtcttgatgatggcttcaagattgttaattaataatggacaagacgggggccaatcattttaccacattcatgtgcacctcattggggga

SEQ ID NO: 21023 - DNA, 396 bp, Glycine max
  Clone ID: LIB3049-005-Q1-E1-F11
gattgcatttcactgaaacgagaaaagcgtgtcgaatggatttcacggagaacgatctattcggcgaagattccgacaacgacaacgggtcccactcctccggttcctcttcttcttcctccgccgcttcctcttcctcatcatcctccgcctcctcttccgcctcttcctccaaagccagcgacgccgccgccgactcctcctccgccagcagcagcgcaagcagcggcgccgagaacgacgacgagaatggcgacgtcgtagatagcaccaaagtccgcgcccatcaccatcacgactacgaacaccaagatctgtttggctccgattattaaaaatacggtaaaaccctcgctaaaagtccttaccccattccggtattgcctgccatccgca

SEQ ID NO: 21024 - DNA, 319 bp, Glycine max
  Clone ID: LIB3049-005-Q1-E1-F12
gaaggcatcttcaagctctgaatctgcaatggcttctctactcaacatggtttcggttccaccaagaatatcaccaacctcacacaccagaatcgcttcgcttcaagctcgacccgttttgccacccttttctgtctcattttccaggaggagactatcaattagagcaacagaaactgataccaatgaagttcaatctcaggcaccgggtgcagcgccatctaaagatggttcaagcttcaatcagcttcttggtatcaaaggagctgcccaagaaacaaataaatggaaaattcgtcttcaactcacaaagcctgtc

SEQ ID NO: 21025 - DNA, 395 bp, Glycine max
  Clone ID: LIB3049-005-Q1-E1-F2
gtcctctcattcattcattcattccatcctctgttgtacggccagaacagaacaagatgagaggccatttgttagaacttgaaacaaaaacatcgagtctttaagataagagcgagaaatagagacaagttcaggtaatggcgagtgggtggatgaagtcattgcaatgcaagtccagagcataccaagacgtataccaccctaactctaaatacctcattcccagttccagctgcagaaagaccatcaaagacgtcgtcgtcgacacaaccaagcccaggcccaagcccaattccaagcccgaaaagcctctccagaaacacccaacttcagatacccttcatccgccgccaagcccgacttcgaaaccactatcaaccgattgaggagcgtga

SEQ ID NO: 21026 - DNA, 361 bp, Glycine max
  Clone ID: LIB3049-005-Q1-E1-F3
gactgcactgaattggattgagtttgcagcaggagcacagaaagatatcagtgattcgatccttctcttgcagttccatcaactcccactttctcgcactcgtttcatctgacatccactgtcaagttccatacgatgcacattcactatatcttcctcatcaaagatattatactccacatgcatcacttagagtatcaatggcacacgacaatgagactcgtcacgtgcatatgcaaattgccatcactagggataacacttcggaagctctaccagtcacacttcaaggatttccttgtgagaatgctgatcatactgtcctagacagattatataatcctgcagcatcaacagtgaa

SEQ ID NO: 21027 - DNA, 389 bp, Glycine max
  Clone ID: LIB3049-005-Q1-E1-F4
agaaatgtggtggcagcagtctttcagattgtgatcgaactgctattagtgctttattggataaactaatgagtaacgatatagaacagcaaagggcagctgctggtgagctcaggctgttggctaagaggaatgcagacaaccgagtatgcattgctgaggcaggagcaataccacctcttgtagatttgttgtcttcttcagaccctcgaactcaggagcacgctgttacagcacttctcaatctttccatcaacgagagtaacaaaggaactatagtaaatgctggagccataccggatattgtagatgtactgaaaaatggaagcatggaggctagagaaaatgcagctgcaactctcttcagtttatcggttctagacgagaat

SEQ ID NO: 21028 - DNA, 396 bp, Glycine max
  Clone ID: LIB3049-005-Q1-E1-F5
ggttctagtgtgtgattgtttgttgttgtaactcgttcttcttcttttgttgttctgtgtttgtgtttgttttttctctcacctgaaaatgtcttgctgcggtggtaactgtggttgcggaagctcctgcaagtgcggcaacggctgcggaggctgcaagatgtacccagacttgagctacactgagtcaaccaccaccgagaccttggtcatgggagtggcacctgttaaggctcaatttgagggtgctgaaatgggtgtgcccgctaagaacgatggctgcaaatgtggaccaaactgctcctgcaacccctgcacttgcaagtgaggtgttgggagagcaagcttcaagcagagatagcccttaattaggaataatgataaactattaatgtg

SEQ ID NO: 21029 - DNA, 345 bp, Glycine max
  Clone ID: LIB3049-005-Q1-E1-F6
tggggaatcagaatggatcatcaacaactaacactgaaacttcactttaatccttacatgtcatcggggcatgtgatacctctctgcggcactgcaaaactcgtcaccacatgcgggcaataagtaaccgtgatcaccactccctactacgcacatctcctccgtaagtcaagctccacgttccaaatccacgtcgttgacattcccgccaaagatgtgggccttcccgaaggtgtccagatcaagtccgctgtcacagagctcgctgacactgcacagttctaccaatccgccatgctccttcgcagatccatgtcccatttcaaggagaatcactcacctgat

SEQ ID NO: 21030 - DNA, 399 bp, Glycine max
  Clone ID: LIB3049-005-Q1-E1-F7
ggcaccacaaaccacataattcgacaacactctctcctaattgttcaacttctggagctacttccaccccactagctaccttcattgtattttcagtctccaaactccaaagggaaaatgagcagaccaggagattggaactgcaggacatgcaaccacctgaacttccagagaagagagtcgtgccagcgatgcggggagcctaggagtggtggcggcggcgactacggcggaggcttcggtggtggcagaggctcttcctcctttggcttcaccactggcccggatgttcgccccggtgactggtactgcaccgtcggaaactgtggagcccacaacttcgccagccgctccagctgcttcaagtgcggtgcccccaaggaggactcctccgccgga

SEQ ID NO: 21031 - DNA, 317 bp, Glycine max
  Clone ID: LIB3049-005-Q1-E1-F9
gagagtcaatgtctttaaattttcttctgtattaagctgaccaaagacaaatcctttttgtatctgtagctggaattttcttccttcttactttaccttcgattgtcaccttctaattctgcaacaagttccaaaccttcaaatctcactgccccaaaaatcctttcttttttaaatagccatttgacttcagcctctacagcagagtcccagatctctgcattccaattcccatggctggtcgctatgacagcaaccccttcgatgaggaagaagttaaccccttctataatcctggaagtgttcccgctgccact

SEQ ID NO: 21032 - DNA, 367 bp, Glycine max
  Clone ID: LIB3049-005-Q1-E1-G1
gaagaagaaaagagaaggtataagcagccgttttttctgttggaatatgaaggtggtgaagagagaagaagaaggagaatggtgacggaccaggatatagcgaaaggggtggagtctctactgcgtcactctgacccaaactccataactacggttaacggtgtcgttcagcagctggaggccaaactagggttagacctctctcacaaggccagtttcatcagagaccagatcgaccatcttctccggtcacagccacaggcatttgttcctcaccctcctccacttcacagagactattttgcccctcacccccaacggcactttccgaccacccactttcccttcccaattttgcctccatgac

SEQ ID NO: 21033 - DNA, 392 bp, Glycine max
  unsure (1)..(392): unsure at all n locations
  Clone ID: LIB3049-005-Q1-E1-G10
gggacaacatcaacctaatccagtttcgttattcgcccgacacattttttctccgatcccctattcctctccattctccgttgtgtcgatttttgttactcaaaagggaaattgatttgatagatagacagatagatcgtttctatgggttaaagtgaaatccgaatccgaatctgaatctgaatctgatccaatcattttcatgttagggcgtgcgatctccaatcaagcgcggttgtgtttaggtttcattttgttgggcgtgtgagtcgtanggggtttcgaagagcatagaataatgccttcggtgcccgttgatctccgtccaattccctccttggacgttttcccatggtggatccccttttcatcgtctgaaaaatcttgaaaaa

SEQ ID NO: 21034 - DNA, 399 bp, Glycine max
  Clone ID: LIB3049-005-Q1-E1-G11
gagttcaattccaatatattccattctctctgtgtatttccctacctctcccttcaagatgcagatcttcgtcaagaccctcaccggcaagaccatcacccttgaggtggaaagctctgacaccatcgacaacgtcaaggccaagatccaggacaaggaaggaatccccccggaccagcaacgtctcattttcgccgggaagcaacttgaggacggccgtacccttgctgactacaacattcagaaggagagtactcttcacctcgtcctccgtctccgtggtggcatgcagatcttcgttaagacactcaccggcaagaacattaacctaaaaggttaaaagctccaacaccatcgataacgtcaaggccaacatccaggacaaggagggtatccccc

SEQ ID NO: 21035 - DNA, 316 bp, Glycine max
  Clone ID: LIB3049-005-Q1-E1-G12
ggaacctttgcattctattcattcaagattcagcaagtgcgttttggaagcagagaccgaaatacttcgagatggcccgtacaaagcaaactgctcgtaagtcaactggaggaaaagctcccaggaagcagcttgcaaccaaggctgcacgtaagtctgcaccaacaactggtggtgtgaagaagcctcatcgttatcgccctggaactgttgctcttcgtgagattaggaaataccagaagagcactgagctcctaatcaggaagcttcctttccagaggttggttcgtgaaattgcccaggatttcaagactga

SEQ ID NO: 21036 - DNA, 313 bp, Glycine max
  Clone ID: LIB3049-005-Q1-E1-G2
gagagcgaaagagatgtcgttggtttcaagcatgttcgggtgtggagtggtgatggcggcgtcgcaagcaatgggaattggaaggagaagcgatggtggattgacgatagtgtgttcgtctaagccgcagaagaaagcgacggcgcatcacatgaagactcggcctcggaagacgcaggcatgggatagaaaccgcaagcccaccgtctacgatccactccctcctcatcctcctgattggaccctcgttattcccgctgacgcttcttctgctcccgttacgcctccgcctccaactccctctgcctagtca

SEQ ID NO: 21037 - DNA, 405 bp, Glycine max
  Clone ID: LIB3049-005-Q1-E1-G3
cgaggattccaaagctgtgaagaaaaattccaggtttggctcagaaggtagcaatcagagatcagctgatcagccgaagttagcatctgactttctgagggaggatagtgtagactctaggaagggaaaagataaaaacattaaaaagaagaagaaaaaaggagcaaacaacaatgagtcaaagaatgagagtgagtataaaaagggtttaagacctgtgttgtggttgacgccagactttcctctgaaaactgatgagctgctgcctctgcttgacatcttagcaaataaggttaaggctattagaagactcagagagcttttgacaacaaagcttcctcatggaacttttcctgtcaaggtcgctatcccaatagttcctactattcgggtgcttgtcacttt

SEQ ID NO: 21038 - DNA, 395 bp, Glycine max
  unsure (1)..(395): unsure at all n locations
  Clone ID: LIB3049-005-Q1-E1-G4
gagtggaagagtgaataagagatatcaatatattatgataatggagggatacaataagaaggttatgattgtggggatggtgttgggcatggccatgattgggatggccaatggccaatactcgttttgtcgcatgcccagcgatgggttggcggcatgcaagccgagtgtgagtggggactatcctgctgatccctccactgcttgctgctcagccattgccaaggctgatcttaaatgcttctgccgcttcaaggattcgggccttctctctatgtatggtgttgatcccaacaagtgcatggaactccctgttaagtgcaaggttgtcgactctttccactgctagattcattaganggggcactaatcaatataaactacacaagggcact

SEQ ID NO: 21039 - DNA, 359 bp, Glycine max
  Clone ID: LIB3049-005-Q1-E1-G5
gggaatgggctctggcaatgaaaagagagagaaaaagattttgaattttaattgaacacttaagattgcaggcagtgacgtagtttccctgtaacgttgtgaactccgtttctcatgcttttttgtccctcatcggatctcgccttctttctcttcccttcaagcaagggtcagtccattcctgggtttactttttttattttgtgatatcttttgttgaggaggtggattgagtttaaggatttagttaagggagacagtttagaggacaaaattttgtagggtaggtaacaagaagggagaaaagttggattagttttgtttctatcatttgtgggtttgagatggatcttaagagt

SEQ ID NO: 21040 - DNA, 394 bp, Glycine max
  unsure (1)..(394): unsure at all n locations
  Clone ID: LIB3049-005-Q1-E1-G6
ggcacaagtttgttgagatagctagaagcaataagatgaaaatgaaagtgcttgttttgtttgttgctacagttttggtagcatatgaatgccatggctcagactaccagaagttccctctccaaatgaaaactgggtttggtgggcaatacagcaatgaggtggcatgtgccagttggaggcttggcgtggaagcaaacaacgtagtcaagtggcaaactgttcctgcagcttgcggagagtacatagctgactacgttctaggagaccaatatagatcagattccaaaacagttaaccaacaagcttatttctatgctaaatccctcaaactcaccaacanagatgtctttgtcttggacgttgacgacactactctctctaatctccagta

SEQ ID NO: 21041 - DNA, 396 bp, Glycine max
  Clone ID: LIB3049-005-Q1-E1-G7
gagaatcgaattcattactatacaactttttgtgttgggaacgaaaaatacatttatttaattctgaaacgctctttatcttctcttcctcctcataggccttactatgacctcactcacgcattgaagaaggcaacgctccttgcagctcaaatctgcaaattaggctttttttccccccaacagtgggttttgcttttctctggaattttaagttttggggttttctttcaatcagggttcagtttattcaagttttacaatttcgcggctccgaaactattagatggggaattgtttgcgtaaggctcaagcggatgatgattctgatcataatgtggagtttgcttctgggaatgtgcaagttattactaccacagaatcttggggacaaaa

SEQ ID NO: 21042 - DNA, 393 bp, Glycine max
  Clone ID: LIB3049-005-Q1-E1-G8
gacgcattttctgttctgttttgttctcattctgtgactctgtgcttagttaacgttaacagtgacttaagatggcggattctgcagatgtcacccacgatgttgtgtccctcctctcttctcctcaaagggactttcttcttcgaaacaacggcgatcaggttaaaattgacagcttgaagggtaagaaacttggtttgtatttttcggcatcctggtgtggtccatgtcaaacatttacgccaactttggtggatgtgtacaatgaggttgcaaaaaaaggtgacttccagatcgttttcattacggctgatgaagatgatgagtcctttaacggttacttttccaagatgccatggcttgcaatcccattttctgattcagacacacgca

SEQ ID NO: 21043 - DNA, 316 bp, Glycine max
  Clone ID: LIB3049-005-Q1-E1-G9
gaaacacagagagcgcagtcgtagaagaaaagaaatcctcacaatgcattcattcggctacagagccaatgcgttgctaacctttgccgtcaccattttggctcttatgtgcgccatggcctctgtatccgacaacttcaacacccccactccctctgcacaagtccaggtgttgaacatcaactggtttcagaaacagcccaatggcaatgacgaggtcagcatgacactgaatatatctgcagatttgcagtcccttttcacatggaacacaaaacaggtttttgtttttctagctgctgagtatgaaactcct

SEQ ID NO: 21044 - DNA, 388 bp, Glycine max
  Clone ID: LIB3049-005-Q1-E1-H10
ggagactaagttgagctgagaagagaagctgggagcgaatggggcagaagcagcgttcgagttccgatgccgacaacgaagtcaagaaacgacgccgtgttggtttctcaggcgttgattctggagttgaggccaaagactgcatcacaatctatctagtttcaagcaaggaagaattcgatgctccagagagttttgtcattcatcctgtggatctgaatagcttttttgatgatgatgggaaaatttatggctatgagggtttgaagattaccatctgggttagcagcatatcattttatgcatatgctgatattacattccagaattcaaccgaatcaaggcaaaggggtcacagatttgaaatctgctcttcagacaatttttg

SEQ ID NO: 21045 - DNA, 314 bp, Glycine max
  Clone ID: LIB3049-005-Q1-E1-H11
gagcgaaacagagagtggtttcagtgagtgatcggtgttcacttgatccttcataagtcgtcatcatcatcatcatcatcaccgttgattgaagaagatgccgatcagaaacatcgccatcggaaggcctgaagaggctactcaccccgacacgttgaaggcggggttggctgagttcatctccaccttgatcttcgtgttcgccggttcaggttccggcatcgcctacaacaagctcaccgacaacggcgccgccactcccgccggcctcatctccgcttccatcgcccatgctttcgccctcttcgtcgccg

SEQ ID NO: 21046 - DNA, 404 bp, Glycine max
  Clone ID: LIB3049-005-Q1-E1-H12
gacaacacaacgcaacacaacgcgcactctctcttttctctcttaacacaaaaaccctatcgttcttcgcggtttcgccgattctcgccatgccgaaagccaaatccgacgccaaagccgccgatagccggttgaagcgcaagggcgctggtgctggaaggaagcaatcgaagaaagctgctaaggatcctaacaagccaaagagacctccaagcgctttcttcgttttcatgtccgagttcagagagcagtttaagaaggagcatcctaacaacaaatccgtcgctgttgtcggtaaagctggtggtgacaaatggaaatcgctgtctgaagctgaaaaggcccccttcgttgcaacggccgaaaagaagaaacaagagtatgagaaaactattttggcttac

SEQ ID NO: 21047 - DNA, 309 bp, Glycine max
  Clone ID: LIB3049-005-Q1-E1-H2
ggttctagtgtatgtgattgttgtgactcgttcttcttcgtcgttatcttcttcttttgttgtttgtgtgtttgttttttctctcacctgaaaatgtcttgctgcggtggtaactgtggttgcggaagcgcctgcaagtgcggcaacggctgcggaggctgcaagatgtacccagacttgagctacaccgagtcaaccaccaccgagaccttggtcatgggagtggcaccagttaaggctcaattcgagagtgctgaaatgggtgttcccgctgagaacgatggctgcaaatgtggatctaactgcacc

SEQ ID NO: 21048 - DNA, 402 bp, Glycine max
  Clone ID: LIB3049-005-Q1-E1-H3
gaaggttttgcgctgttgttgctgcgcatcctccgtaacctccgagctctgcaccgaagaacgaagccatggggaagacacatggaatgggatctgctcgcaagctcaagtcccaccgcaggaggcaaaggtgggctgacaagtcatacaagaaatcacatcttggaaatgaatggaagaaaccttttgctggttcatcccatgccaagggaattgtccttgaaaagataggtattgaggctaagcagcccaactctgccattcgtaagtgtgccagcgttcaacttatcaagaatgggaagaagattgccgcttttgtccctaatgacagttgcttgaactacattgaagagaatgacgaagtcctgattgctggatttggacgaaaatgtcatgctgtgg

SEQ ID NO: 21049 - DNA, 383 bp, Glycine max
  Clone ID: LIB3049-005-Q1-E1-H4
catacagaagtgtcatattgacagcatattcacggagagtaaattcctgcaagctgaatctctattgcagctagcaagagcactcatttgggctgcggggagaccacaaaaagggaacagcacacccgaggatgaagatacagcagttttctgcctggagttgctgattgcaatcactttgaataacagggatagaattgggattctttggcagggtgtgtatgaacacatatccaacattgttcagtcaactgtaatgccctgtgccctggtagagaaggctgtttttggactcctgcggatttgccagcggttgcttccctacaaggagaacattgctgatgaacttctgaggtcattgcaacttgtcttgaagcttgatg

SEQ ID NO: 21050 - DNA, 385 bp, Glycine max
  Clone ID: LIB3049-005-Q1-E1-H5
gaactaaggcaaaaccaaaactcatttcatgtaattcattttctctctccccccgaacactcaagttttatctctcagcctcagtttgctgctagaggttgcatatttggggtttcacacgtgcgcaatttgaaggtattattggaggagagagtgtaaatgaagaaaccaacaaccgacgcaattagtatgggaaaaaggagcctggagggtggagaagatgaccagcctgaacgaaagaggcctgctcttgccagtgtaattgtggaagctctgaaggtggacagtttgcagaagctttgctcatctttagaacccattcttcgtagagttgtcagtgaagaagtggagcgtgctttggcaaagttaggtcctgcaagactta

SEQ ID NO: 21051 - DNA, 391 bp, Glycine max
  Clone ID: LIB3049-005-Q1-E1-H6
ctaacaagccggcagatcgagcgagggccaagtaccggcttgtccacgtcgtgaggactcatcgcggggccgacgacaaggcgttccggtgtgtttaccacgagcaggatgatgctgggaaaactggtgtttccttgtctaaggatttgatggcaattgctggtggagcattgaagactaacatcaccacacttggtcctctggtgctgccagttactgagcagcttctgtttttcgtgactctgctgatgaacaagttatcttaacgctggtgtgaagccttacataccggatttcaagcttgcatttgatcacttatgtatccatgctggtcgcagggctgtgattgatgagttggtgaacaacctgcagctgcttcctgatcatgtgg

SEQ ID NO: 21052 - DNA, 395 bp, Glycine max
  Clone ID: LIB3049-005-Q1-E1-H7
gattggtgacaaagttagaaacaaggagaaagaaagaagatggcaggaaagaaaatcccagatgtgttgctgaattcaggacacaaaatgccagttataggcatgggaacttcagtggagaatcgtccatcaaatgagacccttgcttctatctatgttgaagccattgaggtgggttaccgtcattttgacactgctgcagtgtatggaacagaggaagccatacgcctagccgtggccaaagccatagacaaaggccttataaagagtagagatgaagttttcatcacttcaaagccttggaacacagatgcacaccgtgaccttactgtctcagctcttaagaccacattaaagaagctggggacggagtatgtggatcgttatctgattca

SEQ ID NO: 21053 - DNA, 272 bp, Glycine max
  Clone ID: LIB3049-005-Q1-E1-H8
catacaggactagagaagggggagtaagtaaagttttctctattgtgcaggcttctagaattgaatcataaaggaatctgggataggaatttgaggaaacatagaactgattcaaaagcttagcagggtagcaatagattccaaaagacctcgactcaaccaaccaattttatggaaacccctacaaagccaactgagtcaatggcaatgcttgggtgtgacccaaaaccaacaaactaggtcaatgaaaatatttggcgtgacccttaccc

SEQ ID NO: 21054 - DNA, 286 bp, Glycine max
  Clone ID: LIB3049-005-Q1-E1-H9
agggaagagcaacccttaaccacaacaaacaacatcgtttcatatatagtgagtgagagaatctaccatcaaccatgtctgatattgctatgttggtagcagaagaatatgagaggaggacaatgaattttaagaaggctggcgctgtatacgagaggaacttgaacgtggtttcttgtgcttctttgttggttctgaacgacaagattgaggtgcagaagaacgagcttgtcaagtgggttttggaacccaagacccaatttgcaattgctgcttctaacagttt

SEQ ID NO: 21055 - DNA, 428 bp, Glycine max
  unsure (1)..(428): unsure at all n locations
  Clone ID: LIB3049-006-Q1-E1-A1
gacaccaaaatttgccaattgccatttcaatccccagtttcttcttcaacgtccccttacgagcagatcccaattctccttcccagtttcanaccctaattccctcattcccatggcctcagaagagcccactgtcgcggtggaacccgctcccgaacctgccaccgccgagcctcccccggaggagaaggaggagcccaaacctgaagccaaggctaagaaaaccaaggaacccaaacctaaaaaggtttccagaccacgcaaccctcccactcatccttcctacgaggagatgattaaagacgcaattacctcgctgaaggagaaaaccggttcgagccaacacgcgattgcgaagttcatcgaggagaagcacaagcagcttccaacgaacttcaagaagcttcttctcttacatttgaagaaac

SEQ ID NO: 21056 - DNA, 328 bp, Glycine max
  Clone ID: LIB3049-006-Q1-E1-A10
ggtcccataccagagctatctattcatctggactcaacagtttggtggatggcttcttcttcttcttattctttttctctgcttcgttccattcccatttcctttccgcacacccaatgcgctctcaaatcccagcgcctctcgcttcgtgcttcggccactccgagccagaaggctcggttcgtcgctcgccgcaaggagtccctttcggttcggcaactgcaacgccccctaattgagtacatgcggttaccggcgagtcagtattcggtgttggacgcggagaggattgagcgggtaaacgaaaacacgtttacgtgttatgttt

SEQ ID NO: 21057 - DNA, 330 bp, Glycine max
  Clone ID: LIB3049-006-Q1-E1-A11
gacacacactctctctggtgttgttgagttttgaaaatggtgtcgtcgcaggttgtgaatacttacccgttgtccagctacacgttcggcacgaaggagcccaagatggagaaggatacctccgtcgcggatcgtctcgctcgcatgaaagtcaactatatgaaggagggaatgaggaccagtgtggaaggaattttactggtacaagagcacaatcatcctcatatacttcttctccaaattggaaacacattctgcaaactcccaggcggtcgtctcaaaccaggagagaatgaaattgagggcttgaagaggaagttgactagcaag

SEQ ID NO: 21058 - DNA, 232 bp, Glycine max
  Clone ID: LIB3049-006-Q1-E1-A12
tgggatacaaactcacaccgctgtagtcaactttacccaatagtgtcgtcgcaggctgcgactacctccccgtcgtccacccagacgctgggcacgcacgatcccaataccgcgatcaccaggtctgcaatgcttgttggcgtgatctctcagagccttgtcatccctgacggagccatcactgttgaagatcagcagaactactacaccccagatgcctcatcctcaaata

SEQ ID NO: 21059 - DNA, 403 bp, Glycine max
  Clone ID: LIB3049-006-Q1-E1-A2
gtctccgaactcacaaatctgcaaagtttgggtgaacaactccaacggcatttaattattcattcgcagattttcgtcgttcgaaccctagaatgccgaagcgtgatagaaccaagaaaaccgcgaaagcaaccgaatcagtacccgaacctcaacctcaactgcagccaccacaattcatcgacctcgaaatccaagcgatggagcgacaaattggcgcgatcagggcggttcgcgacgtggagatcgagcacctgctcacggagctgcggttcctgcgctcgcggttcagcagcgaagagctccggaagcccgtgctgcaggttttcgaagaaaccctaccgaatctcgctgtcgtgaacgacgagcgcagcaagaagcttgaagtgaaatggagagagac

SEQ ID NO: 21060 - DNA, 428 bp, Glycine max
  Clone ID: LIB3049-006-Q1-E1-A3
agacgacagaaggggaaagaaaaagattgttagtttttgtgttgtgttgtgtacagagagagagagagagagagagagagagagagagagaggctgctatggggaacagagctatgttaaccttgctactactcctcttcttctcgaccaatttggttccttccgcccttgctatctggctgacgttacccaccactggcactaagtgcgtctccgatgaaatccaacacaacgtcgtcgttttggccgactacgtcgttatccccagtgatcacgcccacaacctcagcatcgccgtcaaggtgacatcaccgtatggaaacaatcttcatcacaaggagaacacaacacatggtagtattgcatttacaactcaagatgctgggaactaccttgcatgcttctgggtggatagccctagtcaagga

SEQ ID NO: 21061 - DNA, 398 bp, Glycine max
  unsure (1)..(398): unsure at all n locations
  Clone ID: LIB3049-006-Q1-E1-A4
ggtggccaatggtgcacgaggcagtagtggaccctacaaaggagcccttcgagagggcaaatggggagccagcatatggatactatctgaagcacccagagatgaatgacctaatggtgagggccatgtcaggggtgtcagtgcccttcattanggccatgttggagggctatgatggctttcaaggtgtggagaagcttgtggatgtgggtggtagtggcggtgattgccttcgtatgatcttggaaaaacaccccaccatcaaagaagggatcaactttgacctacctgaagttgtggccaaagccccacaaatcccatttgttacccatgtgggtggtgacatgttcaagtttatccccaaggagatgctatcttcatgaagtgggtgctaacaa

SEQ ID NO: 21062 - DNA, 382 bp, Glycine max
  unsure (1)..(382): unsure at all n locations
  Clone ID: LIB3049-006-Q1-E1-A5
gaagacaatttttttttcccttgtttctttgttgatcgttttggatttgaaaaagactttcttattttcttttcatcaagttgctggcatggctttttggttctataaattctccggttgaagcatacagagtccccttccactttcttccttctttctcatcactcttttaagatatttttgttacatagtttatggtctacgagagccctgcctctgtagagtgtagaccaacctccttttctttgctttgagctcgctcgattcttcttcatttcatgtcntgttttattttattttatttatttaagccttttaaatgcccaacattttgttcttgatgtttgagattgatgtattcaattctgagtganatcttctt

SEQ ID NO: 21063 - DNA, 395 bp, Glycine max
  unsure (1)..(395): unsure at all n locations
  Clone ID: LIB3049-006-Q1-E1-A6
agggccagagtggcattttgtgttttgtcactttttctgtgtcttcttttcttttctattctcttttgtgtgggtagtgattttcagtttcaatcttggaaagccaacctttgcaattttcaacccgaaatcgtcgatttcttctaaaatatatactgtgcattggtctccttttcgaattgtggttgagggattaaagtaccgttattggtagagatggcttgtagggggtgctgggagtgccttttgaagctgtttaacttcatactgaccctcactggtctggccattgtgggctacggaatctatctttttgttgaattctctaaagcttcggatgatgacaacacgcctgcaatttctcncgtcagtgatgattctgctctgattcaact

SEQ ID NO: 21064 - DNA, 406 bp, Glycine max
  unsure (1)..(406): unsure at all n locations
  Clone ID: LIB3049-006-Q1-E1-A7
ggcatcactgtaagacaaggtaaaagcgggaccagagagaaaacagggggatttgtttctctctgcagttgcactcttgcaggcaggtgcagctgtttcccgttctgctcctctcccaacccctctgtttctttggagtgagaaagttttatactttagaaccagctagcgagcaagtgagccagtgtcatacatatatataaatagcgtgcgagaaatgcagcagcacctgatgcagatgcagcctatcatggcagcctactaccccaacaacgtcaccactgatcacattcaacagtacctggatgagaacaagtccttgatcctgaagattgttganagccagaattctggcaagctgagcgagtgtgcagagaaccaatcaaggctgcagagaaatctcatg

SEQ ID NO: 21065 - DNA, 393 bp, Glycine max
  unsure (1)..(393): unsure at all n locations
  Clone ID: LIB3049-006-Q1-E1-A8
ggagcaagagtgaagagcgaagagaatggctcccaagggtttaatctttttggctgtgttatgcttctcagcactgtcactgagtcgttgtcttgcggaggataatggacttgttatgaacttctacaaggaatcatgccctcaggctgaagacatcatcaaagaacaagtcaagcttctctacaagcgccacaagaacactgctttctcctggctcagaaacatcttccatgactgtgctgttcagagttgtgatgcttcactgttgctggactccacaagaaggagcttgtctgagaaggaaacagatagaagctttgggttgagaaatttcaggtacattggagacatcanagaagctttggaaagggaatgnccaggagttgtttcctg

SEQ ID NO: 21066 - DNA, 399 bp, Glycine max
  unsure (1)..(399): unsure at all n locations
  Clone ID: LIB3049-006-Q1-E1-B1
ggtgtctgtgactgtcagaaacaaacattatttggttttctgaattgtttggattgcgagaaaaaaaaagggggggaaatggcaaaggatattcgattcttcgacctcaacacgggcgccaagatcccttcagtcggcttgggaacttggcagtctgatcctggccttgttgctgaagccgtcgcggcggccatcaaggttggttaccgccacattgattgtgctcaaatctatggcaatgagaaggagattggctctttgttgaagaatctgtttgagganggtgtagtgaagcgcgaggatttgtggattacatctaaactctggaatactgatcatgctccagaagatgtaccactggcactggaccggaccttgaaagatttgcagctggattat

SEQ ID NO: 21067 - DNA, 335 bp, Glycine max
  Clone ID: LIB3049-006-Q1-E1-B10
gaggcgacttgctgttgtttgtaccgcgaaagagaaggcaagcaaaaaacgtcatcctcggcggaacaggcgcggaggctaatcgttaaccaaaccaacacagatcccataacgcttcgtctagggtttcgctgaatccccaattttcctaaccccgaccggacatgctccttccccgatggccgtcgtaaccagcaacggcaagcgccgccaacattggccatccgcgaattaccactttccatctcccaattccaaaagacccagagtttcaacaatgtcccaaaaccacgcgcaatccttgttatcctcgactagtatcatttcaagaatct

SEQ ID NO: 21068 - DNA, 379 bp, Glycine max
  Clone ID: LIB3049-006-Q1-E1-B11
gggggaagaagagataggggtggtggcaatgtgttaccaatatcatatcatatattctttcatcttcttgggttagggttctacacttgcaatctcctttcacacccacccacccttcaaccatttcaattccttccctcacccaaaccgcactatcgttcttcgacacggtcctgtttattaagcggtttggataaaagaatagaagcgtaaaatggccttcgtagcacatcaacctcagggtttgtttgtgacatcttcctcgaggcgtttgccatggagcaaaaggctgaagttgaagcagtgtttaacaaaacatcacatgattgggagaactgaccggcatttcctagttaaattggaatgcttgtttaagggc

SEQ ID NO: 21069 - DNA, 337 bp, Glycine max
  Clone ID: LIB3049-006-Q1-E1-B12
gcaactaagtagagaataaaatcaaatcaggagagcatgcatatgaacatgatgatgaagaaggtgtgtgggtttgcaatagtgatggtggcagtgcagcttctggtggaggtgagtcccaaggcagaggctgtgacttgtacccctgtggagctgagtccttgtttgggggcaataacttcctctcaaccatcatcaacaatttgttgccagaaggtgagggaacaaaggcaatgcctctgtggttacctcaaaaacccaagtctaaggccatatgccaattctcctggctccagaagggttgctagctcttgtggggttccctttccaacttgtt

SEQ ID NO: 21070 - DNA, 410 bp, Glycine max
  unsure (1)..(410): unsure at all n locations
  Clone ID: LIB3049-006-Q1-E1-B2
gggcggtgcgaaagcaaagttagttgagagagaggagctgaggagaatcaatcgagagaaatatgtctggtatcgctcgtggacgccttgctgaggaacgaaagtcatggcgcaaaaaccatccacacggtttcgttgccaagcccgagactctacctgatggcaccgtaaatttgatggtctggcattgcactattcctggcaagaccgggactgattgggagggtggatatttcccactgacaaggcacttcagtgaagattaccctagcaagcctcccaagtgcaaattccctcaaggtttctttcaccctaatgtgtatccatctggaactgtntgcttgtctatacttaatgaagatagtgggtggagaacaagctatacagtgaagcanattcttgtgggcatc

SEQ ID NO: 21071 - DNA, 421 bp, Glycine max
  Clone ID: LIB3049-006-Q1-E1-B3
ggctgacaagccaatcctttgtgtaggtgctcaaccctagtaagccgcaatggtgaagtactcaagggagcctgacaatccaactaagtcttgcaaggctagaggcgccgaccttagggttcattttaagaacacaagggaaactgcctttgcaatcaggaagttgcccttggtcaaggctaaaaggtacttggaagatgttcttgcccacaagcaggcaattccattcagacgtttttgtcgaggtgttggaaggacagcccaggctaagaatagacactctaatggccaaggacggtggcctgtcaagtcagcaaaattcattcttgatttgctcaaaaatgctgagagcaatgctgaagtgaaaggtttggatgttgatgcactgtacatttcgcatatccaagtcaatcaagcacag

SEQ ID NO: 21072 - DNA, 369 bp, Glycine max
  Clone ID: LIB3049-006-Q1-E1-B4
gacgagaaatgagtagaaaacaaatgaaatggaaacggtgttgtaagaaagagatttggagaggtttgactttttgagagttggaagatctcatcctctctatattcctcttctcgtctcagagagaaagagaaccagaaaagaccaaagcaacaacatcaccagacaatacaaacgcagatagatcactttgacgccaccctgaatcttgatacctttgaccgcaacaaaattcttaattgatcactgggtatgtttttgatcgtgcaccttgtgggccagtaatcgttcaaaacgtgaacaagtcttacttttgattccgaattcctcttatcacttgatgcttaagtttgctgctttcaccaattg

SEQ ID NO: 21073 - DNA, 412 bp, Glycine max
  Clone ID: LIB3049-006-Q1-E1-B5
gctcactcaaaattaaccacaagcataagcacaagcacaagcacaagcacttctctaattccctttcacactctattacagatttcacaagtgcttacacttcaaatggctttggaagctcttcaatcacccaccacagccactccatcgtttagtccctttgaagaaaccagtctcagttacttagagacaccgtggacgaaaggaaagcgttctaagcgtagccgcacggagcaacaactgcaacacccttcatgcaccgaggaagagtacctcgctctttgtctcatcatgctcgctcgcggcggcgccggcagtgtctccaccgccaaacccgctgtctccgacaacaattctgcgccgctatccgccgccaaactgagctacaaatgttcggtttgcaacaaagcct

SEQ ID NO: 21074 - DNA, 395 bp, Glycine max
  unsure (1)..(395): unsure at all n locations
  Clone ID: LIB3049-006-Q1-E1-B6
gagagcgagaaatattatagtagctctgcgtttttggggtatcattattcaaccacccattttctctcttcttcttcttccattgagaaaattctctttcatcgtgtgtgatcggtgagatgtacgtagcttccatgcgcaagtctttcaaggactccttgaaagtccttgaagctgatatccagcacgccaataccctggcttcagattttccaagggagtatgatggtgcatgccttcagatgagaatgtcatacagtccagctgcacacctgtttcttttcttggtgcaatggacagattgtcatcttgctggagcccttggactgttaagaatcctaatttacaaggtctatgtggatgggacaanncacatgtctacacatganagaaaa

SEQ ID NO: 21075 - DNA, 390 bp, Glycine max
  Clone ID: LIB3049-006-Q1-E1-B7
ggaggagagagagagagagagagatggaggagaagacggagaaggtgaagtctgaggcagttcagataattgaagcgtttgaggttctgccaaagctcgtggttttcgatctcgattacactctctggcctttctactgtgagtgtcgatcgaagcgcgagattccttctctgtatccccacgccaaaggcatattgttagctctcaaagagaaaggcatcgacattgccatcgcttctcgctcgccaacggcagacatcgcaaccgctttcctcaacaaattgaacctcaccccaatgttcgtctcacaggaaatatattccagttggacacataaaaccgatcattttcagaggattcattcgaggaccggtgtccccttcaactcca

SEQ ID NO: 21076 - DNA, 400 bp, Glycine max
  Clone ID: LIB3049-006-Q1-E1-B8
ggagagaaagagtggttgaaagcgtccattgaaggtagagagagagaggttttgggaattggtgctgcttcgtgtctgtttatttcctcgcgaggtttgagaattcagtgaagagaaaacggagtttccgatcctgcgatgtcctatatgatagatctgtgaggaaattgaactgaaaaaaaaaatggcgacgtcggaggtatcgatcaagggaaattcggtaaacggaaaaggagataacagttctggtgatgctagaaacagtggaggcgaggctcagaatgcttcttcatcatcatcatccgcgagaggtaacgtggtttcctctgcgtgtgccttgtggcgtgtttggcgtgacgataacaagtttttttttggttcagacgcggaagctgcgctt

SEQ ID NO: 21077 - DNA, 343 bp, Glycine max
  Clone ID: LIB3049-006-Q1-E1-B9
gacacacagtggtgttgaattttcctcagagagaagagagagagaggatgtggaaactcgtgcgatacgccgccgcctccaacctcgcccgatcgcggcggttctccgccgcgattcccggtccgtgcattgttcacaagcgcggtgccgacatactccacgatccctggttcaacaaggatactgggtttcctttgactgaaagggacagattggggcttcggggcctcttacctcctcgtgttatatcctttgagcagcaatatgatcgctttatgaattcattccgatctttggagaataatactcaggggcaaccagataaagtcgtttccctggccaa

SEQ ID NO: 21078 - DNA, 317 bp, Glycine max
  Clone ID: LIB3049-006-Q1-E1-C10
ggaaatagagtgcgcagagagcattgtaataataccacattaccacttccaccctcaccttgctgtgcctctccctatggcggccataacccgactcgtaaagcgcacctcccccctctcttccgtggcgcgtgggttctcatctcacgcgcctccgtgcaaggaggagaggaatgtccagtgggtgttcctgggttgccctggcgtcggaaaaggcacctatgccagccgcctctgcaacctcctcggcgtccctcacatcgccactggcgatcttgtccgccacgagctcgcctccaacgggcccctttcctccc

SEQ ID NO: 21079 - DNA, 383 bp, Glycine max
  Clone ID: LIB3049-006-Q1-E1-C11
gaatctagtggaagagtgaataagagatatcaatatattatgataatggagggatacaataagaaggttatgattgtggggatggtgttgggcatggccatgattgggatggccaatggccaatactcgttttgtcgcatgcccagcgatgggttggcggcatgcaagccgagtgtgagtggggactatcctgctgatccctccactgcttgttgctcagccattgccaaggctgatcttaaatgcttctgccgcttcaaggattcgggccttctctctatgtatggtgttgatcccaacaagtgcatggaactccctgttaagtgcaacgttgtcgactccttccactggcaaaatccaataaagggggcactaatcaatat

SEQ ID NO: 21080 - DNA, 304 bp, Glycine max
  Clone ID: LIB3049-006-Q1-E1-C12
gaccgcacagaattagggttttccaattcacagagcaacacaacgaaccaacaatggcgcagcctcagccgcagtcgcagccgcagcacgggcaagcagcgctggagcaggtgcagtgcttcggtcgcaagaagaccgccgtggccgtgacctactgcaagcgcgggcgcggtctcatcaagatcaacggctgccccattgagctcgtggagccggagatcctccgcttcaaggccttcgagcctatcctcctgttgggtaagagccgcttcgccggcgtcgacatgcgcatccgcgttaaggg

SEQ ID NO: 21081 - DNA, 398 bp, Glycine max
  unsure (1)..(398): unsure at all n locations
  Clone ID: LIB3049-006-Q1-E1-C2
ggaaaggaagaaacataccgaatgagagcatcaaactctttttcttcgatttccattgcgaagcgttactttttcttcttctttctcttcattttcttcgctcttcgatcttcgtccggggactgctccgaataccaccaccaccactcgccgatggccacgatcggaggcttacacgactcccaaggctctcaaaacagcgtcgaaaccgaagccctcgctcgattcgccgtagacgaacacaacaagaagcagaattcgcttctggagtttgctanggtggttagggcacaggaacaggttgttgctggtaccctgcatcaccttactcttgaggctattgaggctggtgagaagaagctctatgaagccaaggtgtgggtgaaaccatggctgaa
